United States Patent Application Publication US 2005/0255487 A1 - sequence listing, part 78

SEQ ID NO: 2143011 - RNA, 19 nt, Homo sapiens
  misc_RNA (1)...(19): siRNA sense strand
ucgacaacgucuccaggaa

SEQ ID NO: 2143012 - RNA, 19 nt, Homo sapiens
  misc_RNA (1)...(19): siRNA sense strand
uuugugcaguucauccaua

SEQ ID NO: 2143013 - RNA, 19 nt, Homo sapiens
  misc_RNA (1)...(19): siRNA sense strand
gugcugagcgcucuguugu

SEQ ID NO: 2143014 - RNA, 19 nt, Homo sapiens
  misc_RNA (1)...(19): siRNA sense strand
gcagcaggcaauccacaug

SEQ ID NO: 2143015 - RNA, 19 nt, Homo sapiens
  misc_RNA (1)...(19): siRNA sense strand
ggugcuggacuacuucuug

SEQ ID NO: 2143016 - RNA, 19 nt, Homo sapiens
  misc_RNA (1)...(19): siRNA sense strand
ccgaagacauggacgucau

SEQ ID NO: 2143017 - RNA, 19 nt, Homo sapiens
  misc_RNA (1)...(19): siRNA sense strand
ucauugaggcucuguguag

SEQ ID NO: 2143018 - RNA, 19 nt, Homo sapiens
  misc_RNA (1)...(19): siRNA sense strand
gcaguucauccauaaguac

SEQ ID NO: 2143019 - RNA, 19 nt, Homo sapiens
  misc_RNA (1)...(19): siRNA sense strand
uccgccugcugcugaauua

SEQ ID NO: 2143020 - RNA, 19 nt, Homo sapiens
  misc_RNA (1)...(19): siRNA sense strand
ugcuacgguuugcagauua

SEQ ID NO: 2143021 - RNA, 19 nt, Homo sapiens
  misc_RNA (1)...(19): siRNA sense strand
ugaccaacaacuacuccua

SEQ ID NO: 2143022 - RNA, 19 nt, Homo sapiens
  misc_RNA (1)...(19): siRNA sense strand
ggucgucgccgcauucaac

SEQ ID NO: 2143023 - RNA, 19 nt, Homo sapiens
  misc_RNA (1)...(19): siRNA sense strand
cgagagugaccgcaacuuc

SEQ ID NO: 2143024 - RNA, 19 nt, Homo sapiens
  misc_RNA (1)...(19): siRNA sense strand
caacuggccacccgagagu

SEQ ID NO: 2143025 - RNA, 19 nt, Homo sapiens
  misc_RNA (1)...(19): siRNA sense strand
agaccaagcacgagaucaa

SEQ ID NO: 2143026 - RNA, 19 nt, Homo sapiens
  misc_RNA (1)...(19): siRNA sense strand
gcccggaacccgaacaaca

SEQ ID NO: 2143027 - RNA, 19 nt, Homo sapiens
  misc_RNA (1)...(19): siRNA sense strand
acagugaccuggugaugcu

SEQ ID NO: 2143028 - RNA, 19 nt, Homo sapiens
  misc_RNA (1)...(19): siRNA sense strand
ugcuggagguucugaguga

SEQ ID NO: 2143029 - RNA, 19 nt, Homo sapiens
  misc_RNA (1)...(19): siRNA sense strand
gaacuggcccgagaucuuu

SEQ ID NO: 2143030 - RNA, 19 nt, Homo sapiens
  misc_RNA (1)...(19): siRNA sense strand
ccacggugcugcuggauga

SEQ ID NO: 2143031 - RNA, 19 nt, Homo sapiens
  misc_RNA (1)...(19): siRNA sense strand
gcgccuaccugaucuacuu

SEQ ID NO: 2143032 - RNA, 19 nt, Homo sapiens
  misc_RNA (1)...(19): siRNA sense strand
caaagggucaggccaauga

SEQ ID NO: 2143033 - RNA, 19 nt, Homo sapiens
  misc_RNA (1)...(19): siRNA sense strand
cgaccuggcuggcauguuc

SEQ ID NO: 2143034 - RNA, 19 nt, Homo sapiens
  misc_RNA (1)...(19): siRNA sense strand
gaucgacgccguucugaau

SEQ ID NO: 2143035 - RNA, 19 nt, Homo sapiens
  misc_RNA (1)...(19): siRNA sense strand
gaucaagcccaacaucuuc

SEQ ID NO: 2143036 - RNA, 19 nt, Homo sapiens
  misc_RNA (1)...(19): siRNA sense strand
ccaagcagaccaucacuga

SEQ ID NO: 2143037 - RNA, 19 nt, Homo sapiens
  misc_RNA (1)...(19): siRNA sense strand
caucuguggugccaauuga

SEQ ID NO: 2143038 - RNA, 19 nt, Homo sapiens
  misc_RNA (1)...(19): siRNA sense strand
ugaagaugcucauggagau

SEQ ID NO: 2143039 - RNA, 19 nt, Homo sapiens
  misc_RNA (1)...(19): siRNA sense strand
ugucugugcuggccuguaa

SEQ ID NO: 2143040 - RNA, 19 nt, Homo sapiens
  misc_RNA (1)...(19): siRNA sense strand
ccacugagggcgucauuga

SEQ ID NO: 2143041 - RNA, 19 nt, Homo sapiens
  misc_RNA (1)...(19): siRNA sense strand
gcacgaugcuguggacgau

SEQ ID NO: 2143042 - RNA, 19 nt, Homo sapiens
  misc_RNA (1)...(19): siRNA sense strand
ucucacaccugaucaagau

SEQ ID NO: 2143043 - RNA, 19 nt, Homo sapiens
  misc_RNA (1)...(19): siRNA sense strand
ucauguaccuggccaagau

SEQ ID NO: 2143044 - RNA, 19 nt, Homo sapiens
  misc_RNA (1)...(19): siRNA sense strand
caacaugcagguccucuau

SEQ ID NO: 2143045 - RNA, 19 nt, Homo sapiens
  misc_RNA (1)...(19): siRNA sense strand
gcaaggagccgcaguaccu

SEQ ID NO: 2143046 - RNA, 19 nt, Homo sapiens
  misc_RNA (1)...(19): siRNA sense strand
gacccgagauccugagcuu

SEQ ID NO: 2143047 - RNA, 19 nt, Homo sapiens
  misc_RNA (1)...(19): siRNA sense strand
cgugugaggugcuggacua

SEQ ID NO: 2143048 - RNA, 19 nt, Homo sapiens
  misc_RNA (1)...(19): siRNA sense strand
ccauuucuccgucgauuaa

SEQ ID NO: 2143049 - RNA, 19 nt, Homo sapiens
  misc_RNA (1)...(19): siRNA sense strand
cuaguggacuggcuggaaa

SEQ ID NO: 2143050 - RNA, 19 nt, Homo sapiens
  misc_RNA (1)...(19): siRNA sense strand
gugaggugcuggacuacuu

SEQ ID NO: 2143051 - RNA, 19 nt, Homo sapiens
  misc_RNA (1)...(19): siRNA sense strand
gcacgguuccgaagacaug

SEQ ID NO: 2143052 - RNA, 19 nt, Homo sapiens
  misc_RNA (1)...(19): siRNA sense strand
ucaaguuggugaucuucaa

SEQ ID NO: 2143053 - RNA, 19 nt, Homo sapiens
  misc_RNA (1)...(19): siRNA sense strand
gaacaucauggacaagagu

SEQ ID NO: 2143054 - RNA, 19 nt, Homo sapiens
  misc_RNA (1)...(19): siRNA sense strand
gcacccaccucaacuucca

SEQ ID NO: 2143055 - RNA, 19 nt, Homo sapiens
  misc_RNA (1)...(19): siRNA sense strand
ugaaggugcuccugcagau

SEQ ID NO: 2143056 - RNA, 19 nt, Homo sapiens
  misc_RNA (1)...(19): siRNA sense strand
ucucuacccucuacuggaa

SEQ ID NO: 2143057 - RNA, 19 nt, Homo sapiens
  misc_RNA (1)...(19): siRNA sense strand
gcugcugacugcauucuuc

SEQ ID NO: 2143058 - RNA, 19 nt, Homo sapiens
  misc_RNA (1)...(19): siRNA sense strand
caucaugucccaccucuuc

SEQ ID NO: 2143059 - RNA, 19 nt, Homo sapiens
  misc_RNA (1)...(19): siRNA sense strand
cagagcagccggagaccua

SEQ ID NO: 2143060 - RNA, 19 nt, Homo sapiens
  misc_RNA (1)...(19): siRNA sense strand
gccaaacgguggaggaucu

SEQ ID NO: 2143061 - RNA, 19 nt, Homo sapiens
  misc_RNA (1)...(19): siRNA sense strand
ugcagaagcuggagaugug

SEQ ID NO: 2143062 - RNA, 19 nt, Homo sapiens
  misc_RNA (1)...(19): siRNA sense strand
guucauccauaaguacauu

SEQ ID NO: 2143063 - RNA, 19 nt, Homo sapiens
  misc_RNA (1)...(19): siRNA sense strand
ccucaccggucucaccaaa

SEQ ID NO: 2143064 - RNA, 19 nt, Homo sapiens
  misc_RNA (1)...(19): siRNA sense strand
ggcaagagccgggaacaga

SEQ ID NO: 2143065 - RNA, 19 nt, Homo sapiens
  misc_RNA (1)...(19): siRNA sense strand
agacauggacgucaucuca

SEQ ID NO: 2143066 - RNA, 19 nt, Homo sapiens
  misc_RNA (1)...(19): siRNA sense strand
cggagagcguggaggagua

SEQ ID NO: 2143067 - RNA, 19 nt, Homo sapiens
  misc_RNA (1)...(19): siRNA sense strand
ggacucauccaccgcuuca

SEQ ID NO: 2143068 - RNA, 19 nt, Homo sapiens
  misc_RNA (1)...(19): siRNA sense strand
gcccugaggauccugcaua

SEQ ID NO: 2143069 - RNA, 19 nt, Homo sapiens
  misc_RNA (1)...(19): siRNA sense strand
uccggaaccugccugagua

SEQ ID NO: 2143070 - RNA, 19 nt, Homo sapiens
  misc_RNA (1)...(19): siRNA sense strand
gcuccgaggugcccauuuu

SEQ ID NO: 2143071 - RNA, 19 nt, Homo sapiens
  misc_RNA (1)...(19): siRNA sense strand
ggacgccuccaucaacuuc

SEQ ID NO: 2143072 - RNA, 19 nt, Homo sapiens
  misc_RNA (1)...(19): siRNA sense strand
gcugaaaucccuccuugca

SEQ ID NO: 2143073 - RNA, 19 nt, Homo sapiens
  misc_RNA (1)...(19): siRNA sense strand
gcauguuccuccagauuuu

SEQ ID NO: 2143074 - RNA, 19 nt, Homo sapiens
  misc_RNA (1)...(19): siRNA sense strand
cagccgaaacccugacuuu

SEQ ID NO: 2143075 - RNA, 19 nt, Homo sapiens
  misc_RNA (1)...(19): siRNA sense strand
ggaagugcuccgcucauuc

SEQ ID NO: 2143076 - RNA, 19 nt, Homo sapiens
  misc_RNA (1)...(19): siRNA sense strand
cgcaguaccuggagaugga

SEQ ID NO: 2143077 - RNA, 19 nt, Homo sapiens
  misc_RNA (1)...(19): siRNA sense strand
ggcccgagaucuuugucaa

SEQ ID NO: 2143078 - RNA, 19 nt, Homo sapiens
  misc_RNA (1)...(19): siRNA sense strand
ggcauguuccuccagauuu

SEQ ID NO: 2143079 - RNA, 19 nt, Homo sapiens
  misc_RNA (1)...(19): siRNA sense strand
cagaggcacccaaaccaaa

SEQ ID NO: 2143080 - RNA, 19 nt, Homo sapiens
  misc_RNA (1)...(19): siRNA sense strand
cggcccagcucaugagugu

SEQ ID NO: 2143081 - RNA, 19 nt, Homo sapiens
  misc_RNA (1)...(19): siRNA sense strand
ccggagaccuacuacaagu

SEQ ID NO: 2143082 - RNA, 19 nt, Homo sapiens
  misc_RNA (1)...(19): siRNA sense strand
uggaagugcuccgcucauu

SEQ ID NO: 2143083 - RNA, 19 nt, Homo sapiens
  misc_RNA (1)...(19): siRNA sense strand
aagcagaccaucacugaga

SEQ ID NO: 2143084 - RNA, 19 nt, Homo sapiens
  misc_RNA (1)...(19): siRNA sense strand
ucaggccaaugaaucgaaa

SEQ ID NO: 2143085 - RNA, 19 nt, Homo sapiens
  misc_RNA (1)...(19): siRNA sense strand
ccaucuggcugccuucauc

SEQ ID NO: 2143086 - RNA, 19 nt, Homo sapiens
  misc_RNA (1)...(19): siRNA sense strand
ucauugcucugggcucaaa

SEQ ID NO: 2143087 - RNA, 19 nt, Homo sapiens
  misc_RNA (1)...(19): siRNA sense strand
ccaagguccuccucaacca

SEQ ID NO: 2143088 - RNA, 19 nt, Homo sapiens
  misc_RNA (1)...(19): siRNA sense strand
ugaggauccugcauaugga

SEQ ID NO: 2143089 - RNA, 19 nt, Homo sapiens
  misc_RNA (1)...(19): siRNA sense strand
ugagugacauagacgagau

SEQ ID NO: 2143090 - RNA, 19 nt, Homo sapiens
  misc_RNA (1)...(19): siRNA sense strand
gcacagaggcacccaaacc

SEQ ID NO: 2143091 - RNA, 19 nt, Homo sapiens
  misc_RNA (1)...(19): siRNA sense strand
guuugucgcuggugcuuuc

SEQ ID NO: 2143092 - RNA, 19 nt, Homo sapiens
  misc_RNA (1)...(19): siRNA sense strand
gggcaccaccaucaaguug

SEQ ID NO: 2143093 - RNA, 19 nt, Homo sapiens
  misc_RNA (1)...(19): siRNA sense strand
ucagcaagcucgccccuaa

SEQ ID NO: 2143094 - RNA, 19 nt, Homo sapiens
  misc_RNA (1)...(19): siRNA sense strand
gggcauguacggccagaug

SEQ ID NO: 2143095 - RNA, 19 nt, Homo sapiens
  misc_RNA (1)...(19): siRNA sense strand
ggucagcgucucccuguuc

SEQ ID NO: 2143096 - RNA, 19 nt, Homo sapiens
  misc_RNA (1)...(19): siRNA sense strand
caacagugaccuggugaug

SEQ ID NO: 2143097 - RNA, 19 nt, Homo sapiens
  misc_RNA (1)...(19): siRNA sense strand
ccaaguuccuggccauggu

SEQ ID NO: 2143098 - RNA, 19 nt, Homo sapiens
  misc_RNA (1)...(19): siRNA sense strand
ugcaguucauccauaagua

SEQ ID NO: 2143099 - RNA, 19 nt, Homo sapiens
  misc_RNA (1)...(19): siRNA sense strand
gggcacagcucaggaugcu

SEQ ID NO: 2143100 - RNA, 19 nt, Homo sapiens
  misc_RNA (1)...(19): siRNA sense strand
ucuccucgcucuuccugaa

SEQ ID NO: 2143101 - RNA, 19 nt, Homo sapiens
  misc_RNA (1)...(19): siRNA sense strand
cggcaucgccugggacaaa

SEQ ID NO: 2143102 - RNA, 19 nt, Homo sapiens
  misc_RNA (1)...(19): siRNA sense strand
cagcacagaggcacccaaa

SEQ ID NO: 2143103 - RNA, 19 nt, Homo sapiens
  misc_RNA (1)...(19): siRNA sense strand
gagagugaccgcaacuucu

SEQ ID NO: 2143104 - RNA, 19 nt, Homo sapiens
  misc_RNA (1)...(19): siRNA sense strand
gaagugcuccgcucauucc

SEQ ID NO: 2143105 - RNA, 19 nt, Homo sapiens
  misc_RNA (1)...(19): siRNA sense strand
caagaucaagcccaacauc

SEQ ID NO: 2143106 - RNA, 19 nt, Homo sapiens
  misc_RNA (1)...(19): siRNA sense strand
gaaguccucccgccaucug

SEQ ID NO: 2143107 - RNA, 19 nt, Homo sapiens
  misc_RNA (1)...(19): siRNA sense strand
ugucccaccucuucucgaa

SEQ ID NO: 2143108 - RNA, 19 nt, Homo sapiens
  misc_RNA (1)...(19): siRNA sense strand
cgugcacccugacggauga

SEQ ID NO: 2143109 - RNA, 19 nt, Homo sapiens
  misc_RNA (1)...(19): siRNA sense strand
acaugcagguccucuauac

SEQ ID NO: 2143110 - RNA, 19 nt, Homo sapiens
  misc_RNA (1)...(19): siRNA sense strand
ccaacaucuucgccacuga

SEQ ID NO: 2143111 - RNA, 19 nt, Homo sapiens
  misc_RNA (1)...(19): siRNA sense strand
ucgacaacgucuccaggaa

SEQ ID NO: 2143112 - RNA, 19 nt, Homo sapiens
  misc_RNA (1)...(19): siRNA sense strand
uuugugcaguucauccaua

SEQ ID NO: 2143113 - RNA, 19 nt, Homo sapiens
  misc_RNA (1)...(19): siRNA sense strand
gugcugagcgcucuguugu

SEQ ID NO: 2143114 - RNA, 19 nt, Homo sapiens
  misc_RNA (1)...(19): siRNA sense strand
gcagcaggcaauccacaug

SEQ ID NO: 2143115 - RNA, 19 nt, Homo sapiens
  misc_RNA (1)...(19): siRNA sense strand
ggugcuggacuacuucuug

SEQ ID NO: 2143116 - RNA, 19 nt, Homo sapiens
  misc_RNA (1)...(19): siRNA sense strand
ccgaagacauggacgucau

SEQ ID NO: 2143117 - RNA, 19 nt, Homo sapiens
  misc_RNA (1)...(19): siRNA sense strand
ucauugaggcucuguguag

SEQ ID NO: 2143118 - RNA, 19 nt, Homo sapiens
  misc_RNA (1)...(19): siRNA sense strand
gcaguucauccauaaguac

SEQ ID NO: 2143119 - RNA, 19 nt, Homo sapiens
  misc_RNA (1)...(19): siRNA sense strand
uccgccugcugcugaauua

SEQ ID NO: 2143120 - RNA, 19 nt, Homo sapiens
  misc_RNA (1)...(19): siRNA sense strand
ugcuacgguuugcagauua

SEQ ID NO: 2143121 - RNA, 19 nt, Homo sapiens
  misc_RNA (1)...(19): siRNA sense strand
ugaccaacaacuacuccua

SEQ ID NO: 2143122 - RNA, 19 nt, Homo sapiens
  misc_RNA (1)...(19): siRNA sense strand
ggucgucgccgcauucaac

SEQ ID NO: 2143123 - RNA, 19 nt, Homo sapiens
  misc_RNA (1)...(19): siRNA sense strand
cgagagugaccgcaacuuc

SEQ ID NO: 2143124 - RNA, 19 nt, Homo sapiens
  misc_RNA (1)...(19): siRNA sense strand
caacuggccacccgagagu

SEQ ID NO: 2143125 - RNA, 19 nt, Homo sapiens
  misc_RNA (1)...(19): siRNA sense strand
agaccaagcacgagaucaa

SEQ ID NO: 2143126 - RNA, 19 nt, Homo sapiens
  misc_RNA (1)...(19): siRNA sense strand
gcccggaacccgaacaaca

SEQ ID NO: 2143127 - RNA, 19 nt, Homo sapiens
  misc_RNA (1)...(19): siRNA sense strand
acagugaccuggugaugcu

SEQ ID NO: 2143128 - RNA, 19 nt, Homo sapiens
  misc_RNA (1)...(19): siRNA sense strand
ugcuggagguucugaguga

SEQ ID NO: 2143129 - RNA, 19 nt, Homo sapiens
  misc_RNA (1)...(19): siRNA sense strand
gcaacguggucaucacaaa

SEQ ID NO: 2143130 - RNA, 19 nt, Homo sapiens
  misc_RNA (1)...(19): siRNA sense strand
gcaagauggccguggagua

SEQ ID NO: 2143131 - RNA, 19 nt, Homo sapiens
  misc_RNA (1)...(19): siRNA sense strand
ggauccggcugccugauga

SEQ ID NO: 2143132 - RNA, 19 nt, Homo sapiens
  misc_RNA (1)...(19): siRNA sense strand
caagauggccguggaguau

SEQ ID NO: 2143133 - RNA, 19 nt, Homo sapiens
  misc_RNA (1)...(19): siRNA sense strand
gagcuacgguauguuugaa

SEQ ID NO: 2143134 - RNA, 19 nt, Homo sapiens
  misc_RNA (1)...(19): siRNA sense strand
ugacguucaucuucacuga

SEQ ID NO: 2143135 - RNA, 19 nt, Homo sapiens
  misc_RNA (1)...(19): siRNA sense strand
gcugagcuacgguauguuu

SEQ ID NO: 2143136 - RNA, 19 nt, Homo sapiens
  misc_RNA (1)...(19): siRNA sense strand
ggaacgccguccacgugaa

SEQ ID NO: 2143137 - RNA, 19 nt, Homo sapiens
  misc_RNA (1)...(19): siRNA sense strand
agauggccguggaguauga

SEQ ID NO: 2143138 - RNA, 19 nt, Homo sapiens
  misc_RNA (1)...(19): siRNA sense strand
ggcgcuggcuucugcauca

SEQ ID NO: 2143139 - RNA, 19 nt, Homo sapiens
  misc_RNA (1)...(19): siRNA sense strand
acgcugagcuacgguaugu

SEQ ID NO: 2143140 - RNA, 19 nt, Homo sapiens
  misc_RNA (1)...(19): siRNA sense strand
gaacgccguccacgugaag

SEQ ID NO: 2143141 - RNA, 19 nt, Homo sapiens
  misc_RNA (1)...(19): siRNA sense strand
ggaucucgcgccacaagga

SEQ ID NO: 2143142 - RNA, 19 nt, Homo sapiens
  misc_RNA (1)...(19): siRNA sense strand
ccuguccacuucugguuug

SEQ ID NO: 2143143 - RNA, 19 nt, Homo sapiens
  misc_RNA (1)...(19): siRNA sense strand
gggcuggcucugaagauga

SEQ ID NO: 2143144 - RNA, 19 nt, Homo sapiens
  misc_RNA (1)...(19): siRNA sense strand
cguggacgaugacaacuac

SEQ ID NO: 2143145 - RNA, 19 nt, Homo sapiens
  misc_RNA (1)...(19): siRNA sense strand
gcuacgguauguuugaaaa

SEQ ID NO: 2143146 - RNA, 19 nt, Homo sapiens
  misc_RNA (1)...(19): siRNA sense strand
ggugcguccuguccacuuc

SEQ ID NO: 2143147 - RNA, 19 nt, Homo sapiens
  misc_RNA (1)...(19): siRNA sense strand
ugagcuacgguauguuuga

SEQ ID NO: 2143148 - RNA, 19 nt, Homo sapiens
  misc_RNA (1)...(19): siRNA sense strand
ccacguggacgaugacaac

SEQ ID NO: 2143149 - RNA, 19 nt, Homo sapiens
  misc_RNA (1)...(19): siRNA sense strand
gccacaaggagaugacguu

SEQ ID NO: 2143150 - RNA, 19 nt, Homo sapiens
  misc_RNA (1)...(19): siRNA sense strand
gggcaacguggucaucaca

SEQ ID NO: 2143151 - RNA, 19 nt, Homo sapiens
  misc_RNA (1)...(19): siRNA sense strand
ccacagagcuggccaaguc

SEQ ID NO: 2143152 - RNA, 19 nt, Homo sapiens
  misc_RNA (1)...(19): siRNA sense strand
ggagggagcuggacaaagg

SEQ ID NO: 2143153 - RNA, 19 nt, Homo sapiens
  misc_RNA (1)...(19): siRNA sense strand
ugaagcagcugcccgguuu

SEQ ID NO: 2143154 - RNA, 19 nt, Homo sapiens
  misc_RNA (1)...(19): siRNA sense strand
cacaggagguccaggaaua

SEQ ID NO: 2143155 - RNA, 19 nt, Homo sapiens
  misc_RNA (1)...(19): siRNA sense strand
ggacaaaggcuguguggau

SEQ ID NO: 2143156 - RNA, 19 nt, Homo sapiens
  misc_RNA (1)...(19): siRNA sense strand
acacacacauccugcagua

SEQ ID NO: 2143157 - RNA, 19 nt, Homo sapiens
  misc_RNA (1)...(19): siRNA sense strand
cuaaggaggugcugaaugg

SEQ ID NO: 2143158 - RNA, 19 nt, Homo sapiens
  misc_RNA (1)...(19): siRNA sense strand
gaucagacaguucccauuc

SEQ ID NO: 2143159 - RNA, 19 nt, Homo sapiens
  misc_RNA (1)...(19): siRNA sense strand
caguacaccuccagcauga

SEQ ID NO: 2143160 - RNA, 19 nt, Homo sapiens
  misc_RNA (1)...(19): siRNA sense strand
ccagcaggcuucacaguuc

SEQ ID NO: 2143161 - RNA, 19 nt, Homo sapiens
  misc_RNA (1)...(19): siRNA sense strand
ccgcacaccuggcagcaaa

SEQ ID NO: 2143162 - RNA, 19 nt, Homo sapiens
  misc_RNA (1)...(19): siRNA sense strand
ucagacaguucccauucuu

SEQ ID NO: 2143163 - RNA, 19 nt, Homo sapiens
  misc_RNA (1)...(19): siRNA sense strand
gaacgcuaauuuccagaac

SEQ ID NO: 2143164 - RNA, 19 nt, Homo sapiens
  misc_RNA (1)...(19): siRNA sense strand
ccaaaaugguggaggagua

SEQ ID NO: 2143165 - RNA, 19 nt, Homo sapiens
  misc_RNA (1)...(19): siRNA sense strand
acaguucacuuacgaugau

SEQ ID NO: 2143166 - RNA, 19 nt, Homo sapiens
  misc_RNA (1)...(19): siRNA sense strand
ucacagcccucauguucag

SEQ ID NO: 2143167 - RNA, 19 nt, Homo sapiens
  misc_RNA (1)...(19): siRNA sense strand
cgucacagcccucauguuc

SEQ ID NO: 2143168 - RNA, 19 nt, Homo sapiens
  misc_RNA (1)...(19): siRNA sense strand
acaaggcacugguggagau

SEQ ID NO: 2143169 - RNA, 19 nt, Homo sapiens
  misc_RNA (1)...(19): siRNA sense strand
cggagcagguggaucucua

SEQ ID NO: 2143170 - RNA, 19 nt, Homo sapiens
  misc_RNA (1)...(19): siRNA sense strand
guacaccuccagcaugaga

SEQ ID NO: 2143171 - RNA, 19 nt, Homo sapiens
  misc_RNA (1)...(19): siRNA sense strand
ccacuaaggaggugcugaa

SEQ ID NO: 2143172 - RNA, 19 nt, Homo sapiens
  misc_RNA (1)...(19): siRNA sense strand
aggcuucacaguucacuua

SEQ ID NO: 2143173 - RNA, 19 nt, Homo sapiens
  misc_RNA (1)...(19): siRNA sense strand
gagaacaccccacucauug

SEQ ID NO: 2143174 - RNA, 19 nt, Homo sapiens
  misc_RNA (1)...(19): siRNA sense strand
cacacauccugcaguacua

SEQ ID NO: 2143175 - RNA, 19 nt, Homo sapiens
  misc_RNA (1)...(19): siRNA sense strand
cagcaggcuucacaguuca

SEQ ID NO: 2143176 - RNA, 19 nt, Homo sapiens
  misc_RNA (1)...(19): siRNA sense strand
ugagccagaacgcuaauuu

SEQ ID NO: 2143177 - RNA, 19 nt, Homo sapiens
  misc_RNA (1)...(19): siRNA sense strand
gaaccgucccugccugcaa

SEQ ID NO: 2143178 - RNA, 19 nt, Homo sapiens
  misc_RNA (1)...(19): siRNA sense strand
gcucugacgugggaugaag

SEQ ID NO: 2143179 - RNA, 19 nt, Homo sapiens
  misc_RNA (1)...(19): siRNA sense strand
caaaggcuguguggauguc

SEQ ID NO: 2143180 - RNA, 19 nt, Homo sapiens
  misc_RNA (1)...(19): siRNA sense strand
gaugcugagugccuguguu

SEQ ID NO: 2143181 - RNA, 19 nt, Homo sapiens
  misc_RNA (1)...(19): siRNA sense strand
cuucacaguucacuuacga

SEQ ID NO: 2143182 - RNA, 19 nt, Homo sapiens
  misc_RNA (1)...(19): siRNA sense strand
caaaagagaggcccugaug

SEQ ID NO: 2143183 - RNA, 19 nt, Homo sapiens
  misc_RNA (1)...(19): siRNA sense strand
gagccagaacgcuaauuuc

SEQ ID NO: 2143184 - RNA, 19 nt, Homo sapiens
  misc_RNA (1)...(19): siRNA sense strand
aaagagaggcccugaugag

SEQ ID NO: 2143185 - RNA, 19 nt, Homo sapiens
  misc_RNA (1)...(19): siRNA sense strand
ggccuggugugucaucauc

SEQ ID NO: 2143186 - RNA, 19 nt, Homo sapiens
  misc_RNA (1)...(19): siRNA sense strand
gcaucgcagugggauucua

SEQ ID NO: 2143187 - RNA, 19 nt, Homo sapiens
  misc_RNA (1)...(19): siRNA sense strand
aaccgucccugccugcaaa

SEQ ID NO: 2143188 - RNA, 19 nt, Homo sapiens
  misc_RNA (1)...(19): siRNA sense strand
agacaguucccauucuuuc

SEQ ID NO: 2143189 - RNA, 19 nt, Homo sapiens
  misc_RNA (1)...(19): siRNA sense strand
ccacaugcccagccuguac

SEQ ID NO: 2143190 - RNA, 19 nt, Homo sapiens
  misc_RNA (1)...(19): siRNA sense strand
ugaccggcuucugcuauga

SEQ ID NO: 2143191 - RNA, 19 nt, Homo sapiens
  misc_RNA (1)...(19): siRNA sense strand
ugguggagaugcaggaugu

SEQ ID NO: 2143192 - RNA, 19 nt, Homo sapiens
  misc_RNA (1)...(19): siRNA sense strand
gugcgucucucaccaucca

SEQ ID NO: 2143193 - RNA, 19 nt, Homo sapiens
  misc_RNA (1)...(19): siRNA sense strand
ucaucuaccuggcccucuu

SEQ ID NO: 2143194 - RNA, 19 nt, Homo sapiens
  misc_RNA (1)...(19): siRNA sense strand
cuacgacugguacagguuu

SEQ ID NO: 2143195 - RNA, 19 nt, Homo sapiens
  misc_RNA (1)...(19): siRNA sense strand
cagacaguucccauucuuu

SEQ ID NO: 2143196 - RNA, 19 nt, Homo sapiens
  misc_RNA (1)...(19): siRNA sense strand
gcucugugccucugagucu

SEQ ID NO: 2143197 - RNA, 19 nt, Homo sapiens
  misc_RNA (1)...(19): siRNA sense strand
gagucagggcagucaauga

SEQ ID NO: 2143198 - RNA, 19 nt, Homo sapiens
  misc_RNA (1)...(19): siRNA sense strand
cugaguacaugagccagaa

SEQ ID NO: 2143199 - RNA, 19 nt, Homo sapiens
  misc_RNA (1)...(19): siRNA sense strand
gcugaccggcuucugcuau

SEQ ID NO: 2143200 - RNA, 19 nt, Homo sapiens
  misc_RNA (1)...(19): siRNA sense strand
gcaucuggacuacgugcaa

SEQ ID NO: 2143201 - RNA, 19 nt, Homo sapiens
  misc_RNA (1)...(19): siRNA sense strand
acaggagguccaggaauaa

SEQ ID NO: 2143202 - RNA, 19 nt, Homo sapiens
  misc_RNA (1)...(19): siRNA sense strand
cagcaugagagccaaauac

SEQ ID NO: 2143203 - RNA, 19 nt, Homo sapiens
  misc_RNA (1)...(19): siRNA sense strand
gcagugcgucucucaccau

SEQ ID NO: 2143204 - RNA, 19 nt, Homo sapiens
  misc_RNA (1)...(19): siRNA sense strand
ccagcaugagagccaaaua

SEQ ID NO: 2143205 - RNA, 19 nt, Homo sapiens
  misc_RNA (1)...(19): siRNA sense strand
ugaauggcacggaggugaa

SEQ ID NO: 2143206 - RNA, 19 nt, Homo sapiens
  misc_RNA (1)...(19): siRNA sense strand
ugaggaagcugcagcaugu

SEQ ID NO: 2143207 - RNA, 19 nt, Homo sapiens
  misc_RNA (1)...(19): siRNA sense strand
ggaagcacaucuaccuaca

SEQ ID NO: 2143208 - RNA, 19 nt, Homo sapiens
  misc_RNA (1)...(19): siRNA sense strand
caugaggccuggagcuuca

SEQ ID NO: 2143209 - RNA, 19 nt, Homo sapiens
  misc_RNA (1)...(19): siRNA sense strand
gccuggagcuucaccuuca

SEQ ID NO: 2143210 - RNA, 19 nt, Homo sapiens
  misc_RNA (1)...(19): siRNA sense strand
gcacagaggccuucuuccu

SEQ ID NO: 2143211 - RNA, 19 nt, Homo sapiens
  misc_RNA (1)...(19): siRNA sense strand
gaagcugagugcccgaaaa

SEQ ID NO: 2143212 - RNA, 19 nt, Homo sapiens
  misc_RNA (1)...(19): siRNA sense strand
ggcauccuguccuucuuga

SEQ ID NO: 2143213 - RNA, 19 nt, Homo sapiens
  misc_RNA (1)...(19): siRNA sense strand
gugcugggccucacacugu

SEQ ID NO: 2143214 - RNA, 19 nt, Homo sapiens
  misc_RNA (1)...(19): siRNA sense strand
ggcuccagcuccacacaga

SEQ ID NO: 2143215 - RNA, 19 nt, Homo sapiens
  misc_RNA (1)...(19): siRNA sense strand
cagaggaagggcugagcua

SEQ ID NO: 2143216 - RNA, 19 nt, Homo sapiens
  misc_RNA (1)...(19): siRNA sense strand
ucaggcucaucgagaggua

SEQ ID NO: 2143217 - RNA, 19 nt, Homo sapiens
  misc_RNA (1)...(19): siRNA sense strand
cagcauguccuggguuuca

SEQ ID NO: 2143218 - RNA, 19 nt, Homo sapiens
  misc_RNA (1)...(19): siRNA sense strand
gggcaugugcugugagagu

SEQ ID NO: 2143219 - RNA, 19 nt, Homo sapiens
  misc_RNA (1)...(19): siRNA sense strand
ggaagcugagugcccgaaa

SEQ ID NO: 2143220 - RNA, 19 nt, Homo sapiens
  misc_RNA (1)...(19): siRNA sense strand
ccgaggacuuccagaccuu

SEQ ID NO: 2143221 - RNA, 19 nt, Homo sapiens
  misc_RNA (1)...(19): siRNA sense strand
ugcagcauguccuggguuu

SEQ ID NO: 2143222 - RNA, 19 nt, Homo sapiens
  misc_RNA (1)...(19): siRNA sense strand
cacacugucugaccuguac

SEQ ID NO: 2143223 - RNA, 19 nt, Homo sapiens
  misc_RNA (1)...(19): siRNA sense strand
cagacggcauccuguccuu

SEQ ID NO: 2143224 - RNA, 19 nt, Homo sapiens
  misc_RNA (1)...(19): siRNA sense strand
gcaugugcugugagaguga

SEQ ID NO: 2143225 - RNA, 19 nt, Homo sapiens
  misc_RNA (1)...(19): siRNA sense strand
ucacacugucugaccugua

SEQ ID NO: 2143226 - RNA, 19 nt, Homo sapiens
  misc_RNA (1)...(19): siRNA sense strand
ugaggaagcugcagcaugu

SEQ ID NO: 2143227 - RNA, 19 nt, Homo sapiens
  misc_RNA (1)...(19): siRNA sense strand
ggaagcacaucuaccuaca

SEQ ID NO: 2143228 - RNA, 19 nt, Homo sapiens
  misc_RNA (1)...(19): siRNA sense strand
caugaggccuggagcuuca

SEQ ID NO: 2143229 - RNA, 19 nt, Homo sapiens
  misc_RNA (1)...(19): siRNA sense strand
gccuggagcuucaccuuca

SEQ ID NO: 2143230 - RNA, 19 nt, Homo sapiens
  misc_RNA (1)...(19): siRNA sense strand
gcacagaggccuucuuccu

SEQ ID NO: 2143231 - RNA, 19 nt, Homo sapiens
  misc_RNA (1)...(19): siRNA sense strand
gaagcugagugcccgaaaa

SEQ ID NO: 2143232 - RNA, 19 nt, Homo sapiens
  misc_RNA (1)...(19): siRNA sense strand
ggcauccuguccuucuuga

SEQ ID NO: 2143233 - RNA, 19 nt, Homo sapiens
  misc_RNA (1)...(19): siRNA sense strand
gugcugggccucacacugu

SEQ ID NO: 2143234 - RNA, 19 nt, Homo sapiens
  misc_RNA (1)...(19): siRNA sense strand
ggcuccagcuccacacaga

SEQ ID NO: 2143235 - RNA, 19 nt, Homo sapiens
  misc_RNA (1)...(19): siRNA sense strand
cagaggaagggcugagcua

SEQ ID NO: 2143236 - RNA, 19 nt, Homo sapiens
  misc_RNA (1)...(19): siRNA sense strand
ucaggcucaucgagaggua

SEQ ID NO: 2143237 - RNA, 19 nt, Homo sapiens
  misc_RNA (1)...(19): siRNA sense strand
cagcauguccuggguuuca

SEQ ID NO: 2143238 - RNA, 19 nt, Homo sapiens
  misc_RNA (1)...(19): siRNA sense strand
gggcaugugcugugagagu

SEQ ID NO: 2143239 - RNA, 19 nt, Homo sapiens
  misc_RNA (1)...(19): siRNA sense strand
ggaagcugagugcccgaaa

SEQ ID NO: 2143240 - RNA, 19 nt, Homo sapiens
  misc_RNA (1)...(19): siRNA sense strand
ccgaggacuuccagaccuu

SEQ ID NO: 2143241 - RNA, 19 nt, Homo sapiens
  misc_RNA (1)...(19): siRNA sense strand
ugcagcauguccuggguuu

SEQ ID NO: 2143242 - RNA, 19 nt, Homo sapiens
  misc_RNA (1)...(19): siRNA sense strand
cacacugucugaccuguac

SEQ ID NO: 2143243 - RNA, 19 nt, Homo sapiens
  misc_RNA (1)...(19): siRNA sense strand
cagacggcauccuguccuu

SEQ ID NO: 2143244 - RNA, 19 nt, Homo sapiens
  misc_RNA (1)...(19): siRNA sense strand
gcaugugcugugagaguga

SEQ ID NO: 2143245 - RNA, 19 nt, Homo sapiens
  misc_RNA (1)...(19): siRNA sense strand
ucacacugucugaccugua

SEQ ID NO: 2143246 - RNA, 19 nt, Homo sapiens
  misc_RNA (1)...(19): siRNA sense strand
gagcauggguccacaguua

SEQ ID NO: 2143247 - RNA, 19 nt, Homo sapiens
  misc_RNA (1)...(19): siRNA sense strand
gacaaaggcuggcagaauu

SEQ ID NO: 2143248 - RNA, 19 nt, Homo sapiens
  misc_RNA (1)...(19): siRNA sense strand
caagagaccugcuggaguu

SEQ ID NO: 2143249 - RNA, 19 nt, Homo sapiens
  misc_RNA (1)...(19): siRNA sense strand
gaauagacccugccucuga

SEQ ID NO: 2143250 - RNA, 19 nt, Homo sapiens
  misc_RNA (1)...(19): siRNA sense strand
gaacaggcauuccggaaac

SEQ ID NO: 2143251 - RNA, 19 nt, Homo sapiens
  misc_RNA (1)...(19): siRNA sense strand
cgaauugagucguuucuau

SEQ ID NO: 2143252 - RNA, 19 nt, Homo sapiens
  misc_RNA (1)...(19): siRNA sense strand
ucacgucgcucuaucacaa

SEQ ID NO: 2143253 - RNA, 19 nt, Homo sapiens
  misc_RNA (1)...(19): siRNA sense strand
acgaggagcugaagaaguu

SEQ ID NO: 2143254 - RNA, 19 nt, Homo sapiens
  misc_RNA (1)...(19): siRNA sense strand
gaggagaaacccaccauug

SEQ ID NO: 2143255 - RNA, 19 nt, Homo sapiens
  misc_RNA (1)...(19): siRNA sense strand
gcacagcccuggagaugcu

SEQ ID NO: 2143256 - RNA, 19 nt, Homo sapiens
  misc_RNA (1)...(19): siRNA sense strand
gaggagccaugugaacaaa

SEQ ID NO: 2143257 - RNA, 19 nt, Homo sapiens
  misc_RNA (1)...(19): siRNA sense strand
gaaccguuacuuuaucaaa

SEQ ID NO: 2143258 - RNA, 19 nt, Homo sapiens
  misc_RNA (1)...(19): siRNA sense strand
ggcacaaccucucuuugaa

SEQ ID NO: 2143259 - RNA, 19 nt, Homo sapiens
  misc_RNA (1)...(19): siRNA sense strand
ggagccaugugaacaaaca

SEQ ID NO: 2143260 - RNA, 19 nt, Homo sapiens
  misc_RNA (1)...(19): siRNA sense strand
gggacaaccuccaccuguu

SEQ ID NO: 2143261 - RNA, 19 nt, Homo sapiens
  misc_RNA (1)...(19): siRNA sense strand
gaauugagucguuucuaug

SEQ ID NO: 2143262 - RNA, 19 nt, Homo sapiens
  misc_RNA (1)...(19): siRNA sense strand
uggagcagaucaacaaguu

SEQ ID NO: 2143263 - RNA, 19 nt, Homo sapiens
  misc_RNA (1)...(19): siRNA sense strand
gaucaacaaguucuucgaa

SEQ ID NO: 2143264 - RNA, 19 nt, Homo sapiens
  misc_RNA (1)...(19): siRNA sense strand
gccgacaaguuaccaguga

SEQ ID NO: 2143265 - RNA, 19 nt, Homo sapiens
  misc_RNA (1)...(19): siRNA sense strand
gugcaggccuucucuaugc

SEQ ID NO: 2143266 - RNA, 19 nt, Homo sapiens
  misc_RNA (1)...(19): siRNA sense strand
ggacaaccuccaccuguuc

SEQ ID NO: 2143267 - RNA, 19 nt, Homo sapiens
  misc_RNA (1)...(19): siRNA sense strand
ggagguggccuucgaguac

SEQ ID NO: 2143268 - RNA, 19 nt, Homo sapiens
  misc_RNA (1)...(19): siRNA sense strand
ggaggagccaugugaacaa

SEQ ID NO: 2143269 - RNA, 19 nt, Homo sapiens
  misc_RNA (1)...(19): siRNA sense strand
caugggaaauaagcucuuu

SEQ ID NO: 2143270 - RNA, 19 nt, Homo sapiens
  misc_RNA (1)...(19): siRNA sense strand
gcacggccaucaagaucca

SEQ ID NO: 2143271 - RNA, 19 nt, Homo sapiens
  misc_RNA (1)...(19): siRNA sense strand
cgacaaaggcuggcagaau

SEQ ID NO: 2143272 - RNA, 19 nt, Homo sapiens
  misc_RNA (1)...(19): siRNA sense strand
ccagugaccuacaaguuac

SEQ ID NO: 2143273 - RNA, 19 nt, Homo sapiens
  misc_RNA (1)...(19): siRNA sense strand
gcugacgggucccugauca

SEQ ID NO: 2143274 - RNA, 19 nt, Homo sapiens
  misc_RNA (1)...(19): siRNA sense strand
aagccaagcucguggaaca

SEQ ID NO: 2143275 - RNA, 19 nt, Homo sapiens
  misc_RNA (1)...(19): siRNA sense strand
cggcacaaccucucuuuga

SEQ ID NO: 2143276 - RNA, 19 nt, Homo sapiens
  misc_RNA (1)...(19): siRNA sense strand
ucuuugaaccguuacuuua

SEQ ID NO: 2143277 - RNA, 19 nt, Homo sapiens
  misc_RNA (1)...(19): siRNA sense strand
ccaacucggccaacggaua

SEQ ID NO: 2143278 - RNA, 19 nt, Homo sapiens
  misc_RNA (1)...(19): siRNA sense strand
gaguaccgguauucccaaa

SEQ ID NO: 2143279 - RNA, 19 nt, Homo sapiens
  misc_RNA (1)...(19): siRNA sense strand
cugcuuugccgacaaguua

SEQ ID NO: 2143280 - RNA, 19 nt, Homo sapiens
  misc_RNA (1)...(19): siRNA sense strand
gguccaaguuagcuucugu

SEQ ID NO: 2143281 - RNA, 19 nt, Homo sapiens
  misc_RNA (1)...(19): siRNA sense strand
gcaccuccacagccucuuu

SEQ ID NO: 2143282 - RNA, 19 nt, Homo sapiens
  misc_RNA (1)...(19): siRNA sense strand
ccucagcacccucagauug

SEQ ID NO: 2143283 - RNA, 19 nt, Homo sapiens
  misc_RNA (1)...(19): siRNA sense strand
aauagacccugccucugaa

SEQ ID NO: 2143284 - RNA, 19 nt, Homo sapiens
  misc_RNA (1)...(19): siRNA sense strand
ugguggagcuggcaagaga

SEQ ID NO: 2143285 - RNA, 19 nt, Homo sapiens
  misc_RNA (1)...(19): siRNA sense strand
ggacuccgaccugcagaaa

SEQ ID NO: 2143286 - RNA, 19 nt, Homo sapiens
  misc_RNA (1)...(19): siRNA sense strand
cacacuggcuucucuugga

SEQ ID NO: 2143287 - RNA, 19 nt, Homo sapiens
  misc_RNA (1)...(19): siRNA sense strand
uuauugcugucaaagauga

SEQ ID NO: 2143288 - RNA, 19 nt, Homo sapiens
  misc_RNA (1)...(19): siRNA sense strand
gcauucuucucagcaguga

SEQ ID NO: 2143289 - RNA, 19 nt, Homo sapiens
  misc_RNA (1)...(19): siRNA sense strand
ccuggaggcucugcuauuc

SEQ ID NO: 2143290 - RNA, 19 nt, Homo sapiens
  misc_RNA (1)...(19): siRNA sense strand
gagcagaucaacaaguucu

SEQ ID NO: 2143291 - RNA, 19 nt, Homo sapiens
  misc_RNA (1)...(19): siRNA sense strand
caugcuggccuuugaauuc

SEQ ID NO: 2143292 - RNA, 19 nt, Homo sapiens
  misc_RNA (1)...(19): siRNA sense strand
acacuggcuucucuuggaa

SEQ ID NO: 2143293 - RNA, 19 nt, Homo sapiens
  misc_RNA (1)...(19): siRNA sense strand
accagugaccuacaaguua

SEQ ID NO: 2143294 - RNA, 19 nt, Homo sapiens
  misc_RNA (1)...(19): siRNA sense strand
ugaccacgcugacgaagcu

SEQ ID NO: 2143295 - RNA, 19 nt, Homo sapiens
  misc_RNA (1)...(19): siRNA sense strand
gaacgugcaggccuucucu

SEQ ID NO: 2143296 - RNA, 19 nt, Homo sapiens
  misc_RNA (1)...(19): siRNA sense strand
ggagaagacaugcguagac

SEQ ID NO: 2143297 - RNA, 19 nt, Homo sapiens
  misc_RNA (1)...(19): siRNA sense strand
gcacaaccucucuuugaac

SEQ ID NO: 2143298 - RNA, 19 nt, Homo sapiens
  misc_RNA (1)...(19): siRNA sense strand
gggagguggccuucgagua

SEQ ID NO: 2143299 - RNA, 19 nt, Homo sapiens
  misc_RNA (1)...(19): siRNA sense strand
ggaucccgguggagcaguu

SEQ ID NO: 2143300 - RNA, 19 nt, Homo sapiens
  misc_RNA (1)...(19): siRNA sense strand
guacugccagcgccucauu

SEQ ID NO: 2143301 - RNA, 19 nt, Homo sapiens
  misc_RNA (1)...(19): siRNA sense strand
ggaggagaaacccaccauu

SEQ ID NO: 2143302 - RNA, 19 nt, Homo sapiens
  misc_RNA (1)...(19): siRNA sense strand
gcauggguccacaguuaga

SEQ ID NO: 2143303 - RNA, 19 nt, Homo sapiens
  misc_RNA (1)...(19): siRNA sense strand
gcccacaucaccaagcauu

SEQ ID NO: 2143304 - RNA, 19 nt, Homo sapiens
  misc_RNA (1)...(19): siRNA sense strand
gcagaucaacaaguucuuc

SEQ ID NO: 2143305 - RNA, 19 nt, Homo sapiens
  misc_RNA (1)...(19): siRNA sense strand
gcuccacucugucggugau

SEQ ID NO: 2143306 - RNA, 19 nt, Homo sapiens
  misc_RNA (1)...(19): siRNA sense strand
cggcaggagcggagaguuu

SEQ ID NO: 2143307 - RNA, 19 nt, Homo sapiens
  misc_RNA (1)...(19): siRNA sense strand
guaccgguauucccaaagc

SEQ ID NO: 2143308 - RNA, 19 nt, Homo sapiens
  misc_RNA (1)...(19): siRNA sense strand
ccucuuuauugcugucaaa

SEQ ID NO: 2143309 - RNA, 19 nt, Homo sapiens
  misc_RNA (1)...(19): siRNA sense strand
caacucggccaacggauac

SEQ ID NO: 2143310 - RNA, 19 nt, Homo sapiens
  misc_RNA (1)...(19): siRNA sense strand
gaacuacacacuggcuucu

SEQ ID NO: 2143311 - RNA, 19 nt, Homo sapiens
  misc_RNA (1)...(19): siRNA sense strand
gcggaggacaguugaaugg

SEQ ID NO: 2143312 - RNA, 19 nt, Homo sapiens
  misc_RNA (1)...(19): siRNA sense strand
ccuuugaauucauccaguu

SEQ ID NO: 2143313 - RNA, 19 nt, Homo sapiens
  misc_RNA (1)...(19): siRNA sense strand
ggcgguagccacagacuuc

SEQ ID NO: 2143314 - RNA, 19 nt, Homo sapiens
  misc_RNA (1)...(19): siRNA sense strand
gguggaacggguaggugua

SEQ ID NO: 2143315 - RNA, 19 nt, Homo sapiens
  misc_RNA (1)...(19): siRNA sense strand
uggaggcucugcuauucga

SEQ ID NO: 2143316 - RNA, 19 nt, Homo sapiens
  misc_RNA (1)...(19): siRNA sense strand
ccaagcccguggccuacau

SEQ ID NO: 2143317 - RNA, 19 nt, Homo sapiens
  misc_RNA (1)...(19): siRNA sense strand
ccacacgacccugaguuug

SEQ ID NO: 2143318 - RNA, 19 nt, Homo sapiens
  misc_RNA (1)...(19): siRNA sense strand
agaauucuauccggcacaa

SEQ ID NO: 2143319 - RNA, 19 nt, Homo sapiens
  misc_RNA (1)...(19): siRNA sense strand
gguggccuccguucucuug

SEQ ID NO: 2143320 - RNA, 19 nt, Homo sapiens
  misc_RNA (1)...(19): siRNA sense strand
gucgcucuaucacaaagaa

SEQ ID NO: 2143321 - RNA, 19 nt, Homo sapiens
  misc_RNA (1)...(19): siRNA sense strand
cugcugacccugcugaaga

SEQ ID NO: 2143322 - RNA, 19 nt, Homo sapiens
  misc_RNA (1)...(19): siRNA sense strand
gcaccucagcacccucaga

SEQ ID NO: 2143323 - RNA, 19 nt, Homo sapiens
  misc_RNA (1)...(19): siRNA sense strand
cagcuccucuacccugcuu

SEQ ID NO: 2143324 - RNA, 19 nt, Homo sapiens
  misc_RNA (1)...(19): siRNA sense strand
guggaaguccguaccuguu

SEQ ID NO: 2143325 - RNA, 19 nt, Homo sapiens
  misc_RNA (1)...(19): siRNA sense strand
uaccagugaccuacaaguu

SEQ ID NO: 2143326 - RNA, 19 nt, Homo sapiens
  misc_RNA (1)...(19): siRNA sense strand
cacagccucuuuccaggau

SEQ ID NO: 2143327 - RNA, 19 nt, Homo sapiens
  misc_RNA (1)...(19): siRNA sense strand
aaauaagcucuuuguggaa

SEQ ID NO: 2143328 - RNA, 19 nt, Homo sapiens
  misc_RNA (1)...(19): siRNA sense strand
gcugcaggcauucuucuca

SEQ ID NO: 2143329 - RNA, 19 nt, Homo sapiens
  misc_RNA (1)...(19): siRNA sense strand
gagcuuccccaaccucuuu

SEQ ID NO: 2143330 - RNA, 19 nt, Homo sapiens
  misc_RNA (1)...(19): siRNA sense strand
ggacucggaagccgucuac

SEQ ID NO: 2143331 - RNA, 19 nt, Homo sapiens
  misc_RNA (1)...(19): siRNA sense strand
gguagccacagacuucuuc

SEQ ID NO: 2143332 - RNA, 19 nt, Homo sapiens
  misc_RNA (1)...(19): siRNA sense strand
ggacgaggagcugaagaag

SEQ ID NO: 2143333 - RNA, 19 nt, Homo sapiens
  misc_RNA (1)...(19): siRNA sense strand
ggcaggagcggagaguuug

SEQ ID NO: 2143334 - RNA, 19 nt, Homo sapiens
  misc_RNA (1)...(19): siRNA sense strand
uugaaccguuacuuuauca

SEQ ID NO: 2143335 - RNA, 19 nt, Homo sapiens
  misc_RNA (1)...(19): siRNA sense strand
uccagggucuuuuccaaua

SEQ ID NO: 2143336 - RNA, 19 nt, Homo sapiens
  misc_RNA (1)...(19): siRNA sense strand
cagcacggccaucaagauc

SEQ ID NO: 2143337 - RNA, 19 nt, Homo sapiens
  misc_RNA (1)...(19): siRNA sense strand
gcacccuggacacagauga

SEQ ID NO: 2143338 - RNA, 19 nt, Homo sapiens
  misc_RNA (1)...(19): siRNA sense strand
cuguugcccuggccacgua

SEQ ID NO: 2143339 - RNA, 19 nt, Homo sapiens
  misc_RNA (1)...(19): siRNA sense strand
ccacaucaccaagcauuac

SEQ ID NO: 2143340 - RNA, 19 nt, Homo sapiens
  misc_RNA (1)...(19): siRNA sense strand
ucuguucccggaucuguaa

SEQ ID NO: 2143341 - RNA, 19 nt, Homo sapiens
  misc_RNA (1)...(19): siRNA sense strand
uuugaaccguuacuuuauc

SEQ ID NO: 2143342 - RNA, 19 nt, Homo sapiens
  misc_RNA (1)...(19): siRNA sense strand
acaaaggcuggcagaauuc

SEQ ID NO: 2143343 - RNA, 19 nt, Homo sapiens
  misc_RNA (1)...(19): siRNA sense strand
gacaaccuccaccuguuca

SEQ ID NO: 2143344 - RNA, 19 nt, Homo sapiens
  misc_RNA (1)...(19): siRNA sense strand
uggcuucucuuggaacaca

SEQ ID NO: 2143345 - RNA, 19 nt, Homo sapiens
  misc_RNA (1)...(19): siRNA sense strand
guggucaccgugcugauga

SEQ ID NO: 2143346 - RNA, 19 nt, Homo sapiens
  misc_RNA (1)...(19): siRNA sense strand
gcagguacuugacuccuua

SEQ ID NO: 2143347 - RNA, 19 nt, Homo sapiens
  misc_RNA (1)...(19): siRNA sense strand
gaagaaagacuuggaguug

SEQ ID NO: 2143348 - RNA, 19 nt, Homo sapiens
  misc_RNA (1)...(19): siRNA sense strand
ucagucagcuaaagauuaa

SEQ ID NO: 2143349 - RNA, 19 nt, Homo sapiens
  misc_RNA (1)...(19): siRNA sense strand
gcaagucucugcugacauc

SEQ ID NO: 2143350 - RNA, 19 nt, Homo sapiens
  misc_RNA (1)...(19): siRNA sense strand
cagagaagguaaacacaaa

SEQ ID NO: 2143351 - RNA, 19 nt, Homo sapiens
  misc_RNA (1)...(19): siRNA sense strand
gggcggagauggaagagaa

SEQ ID NO: 2143352 - RNA, 19 nt, Homo sapiens
  misc_RNA (1)...(19): siRNA sense strand
gggaagagcggccacagua

SEQ ID NO: 2143353 - RNA, 19 nt, Homo sapiens
  misc_RNA (1)...(19): siRNA sense strand
gaaccagacuugggaugaa

SEQ ID NO: 2143354 - RNA, 19 nt, Homo sapiens
  misc_RNA (1)...(19): siRNA sense strand
gcacagaguucgaguacac

SEQ ID NO: 2143355 - RNA, 19 nt, Homo sapiens
  misc_RNA (1)...(19): siRNA sense strand
gaagugagcagcuacucuu

SEQ ID NO: 2143356 - RNA, 19 nt, Homo sapiens
  misc_RNA (1)...(19): siRNA sense strand
ggcaagcucugaccaguuc

SEQ ID NO: 2143357 - RNA, 19 nt, Homo sapiens
  misc_RNA (1)...(19): siRNA sense strand
ugcagagccuuauaaagua

SEQ ID NO: 2143358 - RNA, 19 nt, Homo sapiens
  misc_RNA (1)...(19): siRNA sense strand
gccaagagccgacccaaga

SEQ ID NO: 2143359 - RNA, 19 nt, Homo sapiens
  misc_RNA (1)...(19): siRNA sense strand
aggagaagcugcucagaga

SEQ ID NO: 2143360 - RNA, 19 nt, Homo sapiens
  misc_RNA (1)...(19): siRNA sense strand
gagcggauguaugccauga

SEQ ID NO: 2143361 - RNA, 19 nt, Homo sapiens
  misc_RNA (1)...(19): siRNA sense strand
ggacucagaggaagacgaa

SEQ ID NO: 2143362 - RNA, 19 nt, Homo sapiens
  misc_RNA (1)...(19): siRNA sense strand
ggaaucguuugaccaagau

SEQ ID NO: 2143363 - RNA, 19 nt, Homo sapiens
  misc_RNA (1)...(19): siRNA sense strand
ggaggaaucguuugaccaa

SEQ ID NO: 2143364 - RNA, 19 nt, Homo sapiens
  misc_RNA (1)...(19): siRNA sense strand
agaauguggucgagaagaa

SEQ ID NO: 2143365 - RNA, 19 nt, Homo sapiens
  misc_RNA (1)...(19): siRNA sense strand
gagcugaagcccaacaaga

SEQ ID NO: 2143366 - RNA, 19 nt, Homo sapiens
  misc_RNA (1)...(19): siRNA sense strand
agaaagacuuggaguugga

SEQ ID NO: 2143367 - RNA, 19 nt, Homo sapiens
  misc_RNA (1)...(19): siRNA sense strand
gaagaagaagaaagggaaa

SEQ ID NO: 2143368 - RNA, 19 nt, Homo sapiens
  misc_RNA (1)...(19): siRNA sense strand
gagcagcuacucuuacaau

SEQ ID NO: 2143369 - RNA, 19 nt, Homo sapiens
  misc_RNA (1)...(19): siRNA sense strand
ggucugaggaggaacauga

SEQ ID NO: 2143370 - RNA, 19 nt, Homo sapiens
  misc_RNA (1)...(19): siRNA sense strand
gagaagcugcucagagaga

SEQ ID NO: 2143371 - RNA, 19 nt, Homo sapiens
  misc_RNA (1)...(19): siRNA sense strand
cauccuaccuccaccugaa

SEQ ID NO: 2143372 - RNA, 19 nt, Homo sapiens
  misc_RNA (1)...(19): siRNA sense strand
gagaggaggagccaagaga

SEQ ID NO: 2143373 - RNA, 19 nt, Homo sapiens
  misc_RNA (1)...(19): siRNA sense strand
ucaccaagcaggacaaguu

SEQ ID NO: 2143374 - RNA, 19 nt, Homo sapiens
  misc_RNA (1)...(19): siRNA sense strand
gcccugagcauaaauggaa

SEQ ID NO: 2143375 - RNA, 19 nt, Homo sapiens
  misc_RNA (1)...(19): siRNA sense strand
guagcaugguggcaaagaa

SEQ ID NO: 2143376 - RNA, 19 nt, Homo sapiens
  misc_RNA (1)...(19): siRNA sense strand
ccgagaauguggucgagaa

SEQ ID NO: 2143377 - RNA, 19 nt, Homo sapiens
  misc_RNA (1)...(19): siRNA sense strand
gcagagccuuauaaaguac

SEQ ID NO: 2143378 - RNA, 19 nt, Homo sapiens
  misc_RNA (1)...(19): siRNA sense strand
gagcagaugaggacugugu

SEQ ID NO: 2143379 - RNA, 19 nt, Homo sapiens
  misc_RNA (1)...(19): siRNA sense strand
gagcagggauaagaaagag

SEQ ID NO: 2143380 - RNA, 19 nt, Homo sapiens
  misc_RNA (1)...(19): siRNA sense strand
agaggaagacgaagaauuc

SEQ ID NO: 2143381 - RNA, 19 nt, Homo sapiens
  misc_RNA (1)...(19): siRNA sense strand
gugagcagcuacucuuaca

SEQ ID NO: 2143382 - RNA, 19 nt, Homo sapiens
  misc_RNA (1)...(19): siRNA sense strand
ggaaccagacuugggauga

SEQ ID NO: 2143383 - RNA, 19 nt, Homo sapiens
  misc_RNA (1)...(19): siRNA sense strand
ggagcagggauaagaaaga

SEQ ID NO: 2143384 - RNA, 19 nt, Homo sapiens
  misc_RNA (1)...(19): siRNA sense strand
gaaauccuccagagaaggu

SEQ ID NO: 2143385 - RNA, 19 nt, Homo sapiens
  misc_RNA (1)...(19): siRNA sense strand
gcggauguaugccaugaag

SEQ ID NO: 2143386 - RNA, 19 nt, Homo sapiens
  misc_RNA (1)...(19): siRNA sense strand
ccacagacgaggacucuuc

SEQ ID NO: 2143387 - RNA, 19 nt, Homo sapiens
  misc_RNA (1)...(19): siRNA sense strand
gaaggaggagcggauguau

SEQ ID NO: 2143388 - RNA, 19 nt, Homo sapiens
  misc_RNA (1)...(19): siRNA sense strand
gaauguggucgagaagaaa

SEQ ID NO: 2143389 - RNA, 19 nt, Homo sapiens
  misc_RNA (1)...(19): siRNA sense strand
cagcgacucuucggaggaa

SEQ ID NO: 2143390 - RNA, 19 nt, Homo sapiens
  misc_RNA (1)...(19): siRNA sense strand
cagcuaaagauuaagaaga

SEQ ID NO: 2143391 - RNA, 19 nt, Homo sapiens
  misc_RNA (1)...(19): siRNA sense strand
gauaagaaagagacacaag

SEQ ID NO: 2143392 - RNA, 19 nt, Homo sapiens
  misc_RNA (1)...(19): siRNA sense strand
ggaccgggaucaggagaag

SEQ ID NO: 2143393 - RNA, 19 nt, Homo sapiens
  misc_RNA (1)...(19): siRNA sense strand
aggaaucguuugaccaaga

SEQ ID NO: 2143394 - RNA, 19 nt, Homo sapiens
  misc_RNA (1)...(19): siRNA sense strand
cagaggaagacgaagaauu

SEQ ID NO: 2143395 - RNA, 19 nt, Homo sapiens
  misc_RNA (1)...(19): siRNA sense strand
ccaagcaggacaaguugaa

SEQ ID NO: 2143396 - RNA, 19 nt, Homo sapiens
  misc_RNA (1)...(19): siRNA sense strand
gagcugggagcagggauaa

SEQ ID NO: 2143397 - RNA, 19 nt, Homo sapiens
  misc_RNA (1)...(19): siRNA sense strand
ggauguaugccaugaaguc

SEQ ID NO: 2143398 - RNA, 19 nt, Homo sapiens
  misc_RNA (1)...(19): siRNA sense strand
ccgagagccuugucuugga

SEQ ID NO: 2143399 - RNA, 19 nt, Homo sapiens
  misc_RNA (1)...(19): siRNA sense strand
gaggaggagccaagagaug

SEQ ID NO: 2143400 - RNA, 19 nt, Homo sapiens
  misc_RNA (1)...(19): siRNA sense strand
ccagagaagguaaacacaa

SEQ ID NO: 2143401 - RNA, 19 nt, Homo sapiens
  misc_RNA (1)...(19): siRNA sense strand
gccaugcagagccuuauaa

SEQ ID NO: 2143402 - RNA, 19 nt, Homo sapiens
  misc_RNA (1)...(19): siRNA sense strand
gcaggaagcagccguuuug

SEQ ID NO: 2143403 - RNA, 19 nt, Homo sapiens
  misc_RNA (1)...(19): siRNA sense strand
caauacggacucagaggaa

SEQ ID NO: 2143404 - RNA, 19 nt, Homo sapiens
  misc_RNA (1)...(19): siRNA sense strand
agacuugggaugaacauga

SEQ ID NO: 2143405 - RNA, 19 nt, Homo sapiens
  misc_RNA (1)...(19): siRNA sense strand
augcagagccuuauaaagu

SEQ ID NO: 2143406 - RNA, 19 nt, Homo sapiens
  misc_RNA (1)...(19): siRNA sense strand
cgagagcgccaaagcuuuc

SEQ ID NO: 2143407 - RNA, 19 nt, Homo sapiens
  misc_RNA (1)...(19): siRNA sense strand
cagcuacucuuacaauacg

SEQ ID NO: 2143408 - RNA, 19 nt, Homo sapiens
  misc_RNA (1)...(19): siRNA sense strand
gcagcuacucuuacaauac

SEQ ID NO: 2143409 - RNA, 19 nt, Homo sapiens
  misc_RNA (1)...(19): siRNA sense strand
gcugggagcagggauaaga

SEQ ID NO: 2143410 - RNA, 19 nt, Homo sapiens
  misc_RNA (1)...(19): siRNA sense strand
gagcccaggccuuggagaa

SEQ ID NO: 2143411 - RNA, 19 nt, Homo sapiens
  misc_RNA (1)...(19): siRNA sense strand
ccuaccagcugugcuccua

SEQ ID NO: 2143412 - RNA, 19 nt, Homo sapiens
  misc_RNA (1)...(19): siRNA sense strand
ccucggaagugagcagcua

SEQ ID NO: 2143413 - RNA, 19 nt, Homo sapiens
  misc_RNA (1)...(19): siRNA sense strand
ggcagguacuugacuccuu

SEQ ID NO: 2143414 - RNA, 19 nt, Homo sapiens
  misc_RNA (1)...(19): siRNA sense strand
ggaagagcggccacaguag

SEQ ID NO: 2143415 - RNA, 19 nt, Homo sapiens
  misc_RNA (1)...(19): siRNA sense strand
aggccaaggucauccagaa

SEQ ID NO: 2143416 - RNA, 19 nt, Homo sapiens
  misc_RNA (1)...(19): siRNA sense strand
gaucaccuuccucacuuug

SEQ ID NO: 2143417 - RNA, 19 nt, Homo sapiens
  misc_RNA (1)...(19): siRNA sense strand
ccaagagccgacccaagaa

SEQ ID NO: 2143418 - RNA, 19 nt, Homo sapiens
  misc_RNA (1)...(19): siRNA sense strand
ugaagcccaacaagaagua

SEQ ID NO: 2143419 - RNA, 19 nt, Homo sapiens
  misc_RNA (1)...(19): siRNA sense strand
agaagaaagacuuggaguu

SEQ ID NO: 2143420 - RNA, 19 nt, Homo sapiens
  misc_RNA (1)...(19): siRNA sense strand
ggaaggaccccaggaagaa

SEQ ID NO: 2143421 - RNA, 19 nt, Homo sapiens
  misc_RNA (1)...(19): siRNA sense strand
gaagaagaaagggaaagag

SEQ ID NO: 2143422 - RNA, 19 nt, Homo sapiens
  misc_RNA (1)...(19): siRNA sense strand
gagaauguggucgagaaga

SEQ ID NO: 2143423 - RNA, 19 nt, Homo sapiens
  misc_RNA (1)...(19): siRNA sense strand
ccaccaaggccaccaagca

SEQ ID NO: 2143424 - RNA, 19 nt, Homo sapiens
  misc_RNA (1)...(19): siRNA sense strand
ccaugcagagccuuauaaa

SEQ ID NO: 2143425 - RNA, 19 nt, Homo sapiens
  misc_RNA (1)...(19): siRNA sense strand
ccaggaagaagaagaaagg

SEQ ID NO: 2143426 - RNA, 19 nt, Homo sapiens
  misc_RNA (1)...(19): siRNA sense strand
gggauaagaaagagacaca

SEQ ID NO: 2143427 - RNA, 19 nt, Homo sapiens
  misc_RNA (1)...(19): siRNA sense strand
ggcaucacccugcuaagug

SEQ ID NO: 2143428 - RNA, 19 nt, Homo sapiens
  misc_RNA (1)...(19): siRNA sense strand
aggcagagguggaggacau

SEQ ID NO: 2143429 - RNA, 19 nt, Homo sapiens
  misc_RNA (1)...(19): siRNA sense strand
ccugguggcuguggcaaga

SEQ ID NO: 2143430 - RNA, 19 nt, Homo sapiens
  misc_RNA (1)...(19): siRNA sense strand
ugaucaccuuccucacuuu

SEQ ID NO: 2143431 - RNA, 19 nt, Homo sapiens
  misc_RNA (1)...(19): siRNA sense strand
cccgucagccuaccaguuu

SEQ ID NO: 2143432 - RNA, 19 nt, Homo sapiens
  misc_RNA (1)...(19): siRNA sense strand
gaccaggagcgcucucugu

SEQ ID NO: 2143433 - RNA, 19 nt, Homo sapiens
  misc_RNA (1)...(19): siRNA sense strand
ggccaugcagagccuuaua

SEQ ID NO: 2143434 - RNA, 19 nt, Homo sapiens
  misc_RNA (1)...(19): siRNA sense strand
gggcacagaguucgaguac

SEQ ID NO: 2143435 - RNA, 19 nt, Homo sapiens
  misc_RNA (1)...(19): siRNA sense strand
ggaagcagccguuuugucu

SEQ ID NO: 2143436 - RNA, 19 nt, Homo sapiens
  misc_RNA (1)...(19): siRNA sense strand
cgccuucccuccuguguag

SEQ ID NO: 2143437 - RNA, 19 nt, Homo sapiens
  misc_RNA (1)...(19): siRNA sense strand
agacgaagaauuccugaag

SEQ ID NO: 2143438 - RNA, 19 nt, Homo sapiens
  misc_RNA (1)...(19): siRNA sense strand
agcagcuacucuuacaaua

SEQ ID NO: 2143439 - RNA, 19 nt, Homo sapiens
  misc_RNA (1)...(19): siRNA sense strand
ggaagugagcagcuacucu

SEQ ID NO: 2143440 - RNA, 19 nt, Homo sapiens
  misc_RNA (1)...(19): siRNA sense strand
gcuaaagauuaagaagaag

SEQ ID NO: 2143441 - RNA, 19 nt, Homo sapiens
  misc_RNA (1)...(19): siRNA sense strand
caucagucagcuaaagauu

SEQ ID NO: 2143442 - RNA, 19 nt, Homo sapiens
  misc_RNA (1)...(19): siRNA sense strand
agaaggaggagcggaugua

SEQ ID NO: 2143443 - RNA, 19 nt, Homo sapiens
  misc_RNA (1)...(19): siRNA sense strand
ggagguuugggcaccauga

SEQ ID NO: 2143444 - RNA, 19 nt, Homo sapiens
  misc_RNA (1)...(19): siRNA sense strand
cauggcaucacccugcuaa

SEQ ID NO: 2143445 - RNA, 19 nt, Homo sapiens
  misc_RNA (1)...(19): siRNA sense strand
gugcaaaggacaggaagga

SEQ ID NO: 2143446 - RNA, 19 nt, Homo sapiens
  misc_RNA (1)...(19): siRNA sense strand
gcagguacuugacuccuua

SEQ ID NO: 2143447 - RNA, 19 nt, Homo sapiens
  misc_RNA (1)...(19): siRNA sense strand
gaagaaagacuuggaguug

SEQ ID NO: 2143448 - RNA, 19 nt, Homo sapiens
  misc_RNA (1)...(19): siRNA sense strand
ucagucagcuaaagauuaa

SEQ ID NO: 2143449 - RNA, 19 nt, Homo sapiens
  misc_RNA (1)...(19): siRNA sense strand
gcaagucucugcugacauc

SEQ ID NO: 2143450 - RNA, 19 nt, Homo sapiens
  misc_RNA (1)...(19): siRNA sense strand
cagagaagguaaacacaaa

SEQ ID NO: 2143451 - RNA, 19 nt, Homo sapiens
  misc_RNA (1)...(19): siRNA sense strand
gggcggagauggaagagaa

SEQ ID NO: 2143452 - RNA, 19 nt, Homo sapiens
  misc_RNA (1)...(19): siRNA sense strand
gggaagagcggccacagua

SEQ ID NO: 2143453 - RNA, 19 nt, Homo sapiens
  misc_RNA (1)...(19): siRNA sense strand
gaaccagacuugggaugaa

SEQ ID NO: 2143454 - RNA, 19 nt, Homo sapiens
  misc_RNA (1)...(19): siRNA sense strand
gcacagaguucgaguacac

SEQ ID NO: 2143455 - RNA, 19 nt, Homo sapiens
  misc_RNA (1)...(19): siRNA sense strand
gaagugagcagcuacucuu

SEQ ID NO: 2143456 - RNA, 19 nt, Homo sapiens
  misc_RNA (1)...(19): siRNA sense strand
ggcaagcucugaccaguuc

SEQ ID NO: 2143457 - RNA, 19 nt, Homo sapiens
  misc_RNA (1)...(19): siRNA sense strand
ugcagagccuuauaaagua

SEQ ID NO: 2143458 - RNA, 19 nt, Homo sapiens
  misc_RNA (1)...(19): siRNA sense strand
gccaagagccgacccaaga

SEQ ID NO: 2143459 - RNA, 19 nt, Homo sapiens
  misc_RNA (1)...(19): siRNA sense strand
aggagaagcugcucagaga

SEQ ID NO: 2143460 - RNA, 19 nt, Homo sapiens
  misc_RNA (1)...(19): siRNA sense strand
gagcggauguaugccauga

SEQ ID NO: 2143461 - RNA, 19 nt, Homo sapiens
  misc_RNA (1)...(19): siRNA sense strand
ggacucagaggaagacgaa

SEQ ID NO: 2143462 - RNA, 19 nt, Homo sapiens
  misc_RNA (1)...(19): siRNA sense strand
ggaaucguuugaccaagau

SEQ ID NO: 2143463 - RNA, 19 nt, Homo sapiens
  misc_RNA (1)...(19): siRNA sense strand
ggaggaaucguuugaccaa

SEQ ID NO: 2143464 - RNA, 19 nt, Homo sapiens
  misc_RNA (1)...(19): siRNA sense strand
agaauguggucgagaagaa

SEQ ID NO: 2143465 - RNA, 19 nt, Homo sapiens
  misc_RNA (1)...(19): siRNA sense strand
gagcugaagcccaacaaga

SEQ ID NO: 2143466 - RNA, 19 nt, Homo sapiens
  misc_RNA (1)...(19): siRNA sense strand
agaaagacuuggaguugga

SEQ ID NO: 2143467 - RNA, 19 nt, Homo sapiens
  misc_RNA (1)...(19): siRNA sense strand
gaagaagaagaaagggaaa

SEQ ID NO: 2143468 - RNA, 19 nt, Homo sapiens
  misc_RNA (1)...(19): siRNA sense strand
gagcagcuacucuuacaau

SEQ ID NO: 2143469 - RNA, 19 nt, Homo sapiens
  misc_RNA (1)...(19): siRNA sense strand
ggucugaggaggaacauga

SEQ ID NO: 2143470 - RNA, 19 nt, Homo sapiens
  misc_RNA (1)...(19): siRNA sense strand
gagaagcugcucagagaga

SEQ ID NO: 2143471 - RNA, 19 nt, Homo sapiens
  misc_RNA (1)...(19): siRNA sense strand
cauccuaccuccaccugaa

SEQ ID NO: 2143472 - RNA, 19 nt, Homo sapiens
  misc_RNA (1)...(19): siRNA sense strand
gagaggaggagccaagaga

SEQ ID NO: 2143473 - RNA, 19 nt, Homo sapiens
  misc_RNA (1)...(19): siRNA sense strand
ucaccaagcaggacaaguu

SEQ ID NO: 2143474 - RNA, 19 nt, Homo sapiens
  misc_RNA (1)...(19): siRNA sense strand
gcccugagcauaaauggaa

SEQ ID NO: 2143475 - RNA, 19 nt, Homo sapiens
  misc_RNA (1)...(19): siRNA sense strand
guagcaugguggcaaagaa

SEQ ID NO: 2143476 - RNA, 19 nt, Homo sapiens
  misc_RNA (1)...(19): siRNA sense strand
ccgagaauguggucgagaa

SEQ ID NO: 2143477 - RNA, 19 nt, Homo sapiens
  misc_RNA (1)...(19): siRNA sense strand
gcagagccuuauaaaguac

SEQ ID NO: 2143478 - RNA, 19 nt, Homo sapiens
  misc_RNA (1)...(19): siRNA sense strand
gagcagaugaggacugugu

SEQ ID NO: 2143479 - RNA, 19 nt, Homo sapiens
  misc_RNA (1)...(19): siRNA sense strand
gagcagggauaagaaagag

SEQ ID NO: 2143480 - RNA, 19 nt, Homo sapiens
  misc_RNA (1)...(19): siRNA sense strand
agaggaagacgaagaauuc

SEQ ID NO: 2143481 - RNA, 19 nt, Homo sapiens
  misc_RNA (1)...(19): siRNA sense strand
gugagcagcuacucuuaca

SEQ ID NO: 2143482 - RNA, 19 nt, Homo sapiens
  misc_RNA (1)...(19): siRNA sense strand
ggaaccagacuugggauga

SEQ ID NO: 2143483 - RNA, 19 nt, Homo sapiens
  misc_RNA (1)...(19): siRNA sense strand
ggagcagggauaagaaaga

SEQ ID NO: 2143484 - RNA, 19 nt, Homo sapiens
  misc_RNA (1)...(19): siRNA sense strand
gaaauccuccagagaaggu

SEQ ID NO: 2143485 - RNA, 19 nt, Homo sapiens
  misc_RNA (1)...(19): siRNA sense strand
gcggauguaugccaugaag

SEQ ID NO: 2143486 - RNA, 19 nt, Homo sapiens
  misc_RNA (1)...(19): siRNA sense strand
ccacagacgaggacucuuc

SEQ ID NO: 2143487 - RNA, 19 nt, Homo sapiens
  misc_RNA (1)...(19): siRNA sense strand
gaaggaggagcggauguau

SEQ ID NO: 2143488 - RNA, 19 nt, Homo sapiens
  misc_RNA (1)...(19): siRNA sense strand
gaauguggucgagaagaaa

SEQ ID NO: 2143489 - RNA, 19 nt, Homo sapiens
  misc_RNA (1)...(19): siRNA sense strand
cagcgacucuucggaggaa

SEQ ID NO: 2143490 - RNA, 19 nt, Homo sapiens
  misc_RNA (1)...(19): siRNA sense strand
cagcuaaagauuaagaaga

SEQ ID NO: 2143491 - RNA, 19 nt, Homo sapiens
  misc_RNA (1)...(19): siRNA sense strand
gauaagaaagagacacaag

SEQ ID NO: 2143492 - RNA, 19 nt, Homo sapiens
  misc_RNA (1)...(19): siRNA sense strand
ggaccgggaucaggagaag

SEQ ID NO: 2143493 - RNA, 19 nt, Homo sapiens
  misc_RNA (1)...(19): siRNA sense strand
aggaaucguuugaccaaga

SEQ ID NO: 2143494 - RNA, 19 nt, Homo sapiens
  misc_RNA (1)...(19): siRNA sense strand
cagaggaagacgaagaauu

SEQ ID NO: 2143495 - RNA, 19 nt, Homo sapiens
  misc_RNA (1)...(19): siRNA sense strand
ccaagcaggacaaguugaa

SEQ ID NO: 2143496 - RNA, 19 nt, Homo sapiens
  misc_RNA (1)...(19): siRNA sense strand
gagcugggagcagggauaa

SEQ ID NO: 2143497 - RNA, 19 nt, Homo sapiens
  misc_RNA (1)...(19): siRNA sense strand
ggauguaugccaugaaguc

SEQ ID NO: 2143498 - RNA, 19 nt, Homo sapiens
  misc_RNA (1)...(19): siRNA sense strand
ccgagagccuugucuugga

SEQ ID NO: 2143499 - RNA, 19 nt, Homo sapiens
  misc_RNA (1)...(19): siRNA sense strand
gaggaggagccaagagaug

SEQ ID NO: 2143500 - RNA, 19 nt, Homo sapiens
  misc_RNA (1)...(19): siRNA sense strand
ccagagaagguaaacacaa

SEQ ID NO: 2143501 - RNA, 19 nt, Homo sapiens
  misc_RNA (1)...(19): siRNA sense strand
gccaugcagagccuuauaa

SEQ ID NO: 2143502 - RNA, 19 nt, Homo sapiens
  misc_RNA (1)...(19): siRNA sense strand
gcaggaagcagccguuuug

SEQ ID NO: 2143503 - RNA, 19 nt, Homo sapiens
  misc_RNA (1)...(19): siRNA sense strand
caauacggacucagaggaa

SEQ ID NO: 2143504 - RNA, 19 nt, Homo sapiens
  misc_RNA (1)...(19): siRNA sense strand
agacuugggaugaacauga

SEQ ID NO: 2143505 - RNA, 19 nt, Homo sapiens
  misc_RNA (1)...(19): siRNA sense strand
augcagagccuuauaaagu

SEQ ID NO: 2143506 - RNA, 19 nt, Homo sapiens
  misc_RNA (1)...(19): siRNA sense strand
cgagagcgccaaagcuuuc

SEQ ID NO: 2143507 - RNA, 19 nt, Homo sapiens
  misc_RNA (1)...(19): siRNA sense strand
cagcuacucuuacaauacg

SEQ ID NO: 2143508 - RNA, 19 nt, Homo sapiens
  misc_RNA (1)...(19): siRNA sense strand
gcagcuacucuuacaauac

SEQ ID NO: 2143509 - RNA, 19 nt, Homo sapiens
  misc_RNA (1)...(19): siRNA sense strand
gcugggagcagggauaaga

SEQ ID NO: 2143510 - RNA, 19 nt, Homo sapiens
  misc_RNA (1)...(19): siRNA sense strand
gagcccaggccuuggagaa

SEQ ID NO: 2143511 - RNA, 19 nt, Homo sapiens
  misc_RNA (1)...(19): siRNA sense strand
ccuaccagcugugcuccua

SEQ ID NO: 2143512 - RNA, 19 nt, Homo sapiens
  misc_RNA (1)...(19): siRNA sense strand
ccucggaagugagcagcua

SEQ ID NO: 2143513 - RNA, 19 nt, Homo sapiens
  misc_RNA (1)...(19): siRNA sense strand
ggcagguacuugacuccuu

SEQ ID NO: 2143514 - RNA, 19 nt, Homo sapiens
  misc_RNA (1)...(19): siRNA sense strand
ggaagagcggccacaguag

SEQ ID NO: 2143515 - RNA, 19 nt, Homo sapiens
  misc_RNA (1)...(19): siRNA sense strand
aggccaaggucauccagaa

SEQ ID NO: 2143516 - RNA, 19 nt, Homo sapiens
  misc_RNA (1)...(19): siRNA sense strand
gaucaccuuccucacuuug

SEQ ID NO: 2143517 - RNA, 19 nt, Homo sapiens
  misc_RNA (1)...(19): siRNA sense strand
ccaagagccgacccaagaa

SEQ ID NO: 2143518 - RNA, 19 nt, Homo sapiens
  misc_RNA (1)...(19): siRNA sense strand
ugaagcccaacaagaagua

SEQ ID NO: 2143519 - RNA, 19 nt, Homo sapiens
  misc_RNA (1)...(19): siRNA sense strand
agaagaaagacuuggaguu

SEQ ID NO: 2143520 - RNA, 19 nt, Homo sapiens
  misc_RNA (1)...(19): siRNA sense strand
ggaaggaccccaggaagaa

SEQ ID NO: 2143521 - RNA, 19 nt, Homo sapiens
  misc_RNA (1)...(19): siRNA sense strand
gaagaagaaagggaaagag

SEQ ID NO: 2143522 - RNA, 19 nt, Homo sapiens
  misc_RNA (1)...(19): siRNA sense strand
gagaauguggucgagaaga

SEQ ID NO: 2143523 - RNA, 19 nt, Homo sapiens
  misc_RNA (1)...(19): siRNA sense strand
ccaccaaggccaccaagca

SEQ ID NO: 2143524 - RNA, 19 nt, Homo sapiens
  misc_RNA (1)...(19): siRNA sense strand
ccaugcagagccuuauaaa

SEQ ID NO: 2143525 - RNA, 19 nt, Homo sapiens
  misc_RNA (1)...(19): siRNA sense strand
ccaggaagaagaagaaagg

SEQ ID NO: 2143526 - RNA, 19 nt, Homo sapiens
  misc_RNA (1)...(19): siRNA sense strand
gggauaagaaagagacaca

SEQ ID NO: 2143527 - RNA, 19 nt, Homo sapiens
  misc_RNA (1)...(19): siRNA sense strand
ggcaucacccugcuaagug

SEQ ID NO: 2143528 - RNA, 19 nt, Homo sapiens
  misc_RNA (1)...(19): siRNA sense strand
aggcagagguggaggacau

SEQ ID NO: 2143529 - RNA, 19 nt, Homo sapiens
  misc_RNA (1)...(19): siRNA sense strand
ccugguggcuguggcaaga

SEQ ID NO: 2143530 - RNA, 19 nt, Homo sapiens
  misc_RNA (1)...(19): siRNA sense strand
ugaucaccuuccucacuuu

SEQ ID NO: 2143531 - RNA, 19 nt, Homo sapiens
  misc_RNA (1)...(19): siRNA sense strand
cccgucagccuaccaguuu

SEQ ID NO: 2143532 - RNA, 19 nt, Homo sapiens
  misc_RNA (1)...(19): siRNA sense strand
gaccaggagcgcucucugu

SEQ ID NO: 2143533 - RNA, 19 nt, Homo sapiens
  misc_RNA (1)...(19): siRNA sense strand
ggccaugcagagccuuaua

SEQ ID NO: 2143534 - RNA, 19 nt, Homo sapiens
  misc_RNA (1)...(19): siRNA sense strand
gggcacagaguucgaguac

SEQ ID NO: 2143535 - RNA, 19 nt, Homo sapiens
  misc_RNA (1)...(19): siRNA sense strand
ggaagcagccguuuugucu

SEQ ID NO: 2143536 - RNA, 19 nt, Homo sapiens
  misc_RNA (1)...(19): siRNA sense strand
cgccuucccuccuguguag

SEQ ID NO: 2143537 - RNA, 19 nt, Homo sapiens
  misc_RNA (1)...(19): siRNA sense strand
agacgaagaauuccugaag

SEQ ID NO: 2143538 - RNA, 19 nt, Homo sapiens
  misc_RNA (1)...(19): siRNA sense strand
agcagcuacucuuacaaua

SEQ ID NO: 2143539 - RNA, 19 nt, Homo sapiens
  misc_RNA (1)...(19): siRNA sense strand
ggaagugagcagcuacucu

SEQ ID NO: 2143540 - RNA, 19 nt, Homo sapiens
  misc_RNA (1)...(19): siRNA sense strand
gcuaaagauuaagaagaag

SEQ ID NO: 2143541 - RNA, 19 nt, Homo sapiens
  misc_RNA (1)...(19): siRNA sense strand
caucagucagcuaaagauu

SEQ ID NO: 2143542 - RNA, 19 nt, Homo sapiens
  misc_RNA (1)...(19): siRNA sense strand
agaaggaggagcggaugua

SEQ ID NO: 2143543 - RNA, 19 nt, Homo sapiens
  misc_RNA (1)...(19): siRNA sense strand
ggagguuugggcaccauga

SEQ ID NO: 2143544 - RNA, 19 nt, Homo sapiens
  misc_RNA (1)...(19): siRNA sense strand
cauggcaucacccugcuaa

SEQ ID NO: 2143545 - RNA, 19 nt, Homo sapiens
  misc_RNA (1)...(19): siRNA sense strand
gugcaaaggacaggaagga

SEQ ID NO: 2143546 - RNA, 19 nt, Homo sapiens
  misc_RNA (1)...(19): siRNA sense strand
ggaaacagcccucaaccaa

SEQ ID NO: 2143547 - RNA, 19 nt, Homo sapiens
  misc_RNA (1)...(19): siRNA sense strand
gaaacagcccucaaccaaa

SEQ ID NO: 2143548 - RNA, 19 nt, Homo sapiens
  misc_RNA (1)...(19): siRNA sense strand
aaacagcccucaaccaaaa

SEQ ID NO: 2143549 - RNA, 19 nt, Homo sapiens
  misc_RNA (1)...(19): siRNA sense strand
ggacaucgccagggaaaca

SEQ ID NO: 2143550 - RNA, 19 nt, Homo sapiens
  misc_RNA (1)...(19): siRNA sense strand
gaagcugcaugggugaaga

SEQ ID NO: 2143551 - RNA, 19 nt, Homo sapiens
  misc_RNA (1)...(19): siRNA sense strand
gaagagaccgugggaucgu

SEQ ID NO: 2143552 - RNA, 19 nt, Homo sapiens
  misc_RNA (1)...(19): siRNA sense strand
ccagaagucacaccucauc

SEQ ID NO: 2143553 - RNA, 19 nt, Homo sapiens
  misc_RNA (1)...(19): siRNA sense strand
caccucauccugcgucaga

SEQ ID NO: 2143554 - RNA, 19 nt, Homo sapiens
  misc_RNA (1)...(19): siRNA sense strand
gggaaacagcccucaacca

SEQ ID NO: 2143555 - RNA, 19 nt, Homo sapiens
  misc_RNA (1)...(19): siRNA sense strand
accgugggaucgucacaaa

SEQ ID NO: 2143556 - RNA, 19 nt, Homo sapiens
  misc_RNA (1)...(19): siRNA sense strand
ggaaacagcccucaaccaa

SEQ ID NO: 2143557 - RNA, 19 nt, Homo sapiens
  misc_RNA (1)...(19): siRNA sense strand
gaaacagcccucaaccaaa

SEQ ID NO: 2143558 - RNA, 19 nt, Homo sapiens
  misc_RNA (1)...(19): siRNA sense strand
aaacagcccucaaccaaaa

SEQ ID NO: 2143559 - RNA, 19 nt, Homo sapiens
  misc_RNA (1)...(19): siRNA sense strand
ggacaucgccagggaaaca

SEQ ID NO: 2143560 - RNA, 19 nt, Homo sapiens
  misc_RNA (1)...(19): siRNA sense strand
gaagcugcaugggugaaga

SEQ ID NO: 2143561 - RNA, 19 nt, Homo sapiens
  misc_RNA (1)...(19): siRNA sense strand
gaagagaccgugggaucgu

SEQ ID NO: 2143562 - RNA, 19 nt, Homo sapiens
  misc_RNA (1)...(19): siRNA sense strand
ccagaagucacaccucauc

SEQ ID NO: 2143563 - RNA, 19 nt, Homo sapiens
  misc_RNA (1)...(19): siRNA sense strand
caccucauccugcgucaga

SEQ ID NO: 2143564 - RNA, 19 nt, Homo sapiens
  misc_RNA (1)...(19): siRNA sense strand
gggaaacagcccucaacca

SEQ ID NO: 2143565 - RNA, 19 nt, Homo sapiens
  misc_RNA (1)...(19): siRNA sense strand
accgugggaucgucacaaa

SEQ ID NO: 2143566 - RNA, 19 nt, Homo sapiens
  misc_RNA (1)...(19): siRNA sense strand
cgacagaacugcacuugua

SEQ ID NO: 2143567 - RNA, 19 nt, Homo sapiens
  misc_RNA (1)...(19): siRNA sense strand
ugacaaagcuucugaaucu

SEQ ID NO: 2143568 - RNA, 19 nt, Homo sapiens
  misc_RNA (1)...(19): siRNA sense strand
gaucuagagucaaauguuu

SEQ ID NO: 2143569 - RNA, 19 nt, Homo sapiens
  misc_RNA (1)...(19): siRNA sense strand
guuaauagguccucaguga

SEQ ID NO: 2143570 - RNA, 19 nt, Homo sapiens
  misc_RNA (1)...(19): siRNA sense strand
uuagagaccuucaggcuua

SEQ ID NO: 2143571 - RNA, 19 nt, Homo sapiens
  misc_RNA (1)...(19): siRNA sense strand
gauaaaggcugcucagagu

SEQ ID NO: 2143572 - RNA, 19 nt, Homo sapiens
  misc_RNA (1)...(19): siRNA sense strand
caaccuaaccuucauagua

SEQ ID NO: 2143573 - RNA, 19 nt, Homo sapiens
  misc_RNA (1)...(19): siRNA sense strand
caccaccucuugccaauua

SEQ ID NO: 2143574 - RNA, 19 nt, Homo sapiens
  misc_RNA (1)...(19): siRNA sense strand
gaagagacauucaagaaaa

SEQ ID NO: 2143575 - RNA, 19 nt, Homo sapiens
  misc_RNA (1)...(19): siRNA sense strand
ccaagaagaugcccaugaa

SEQ ID NO: 2143576 - RNA, 19 nt, Homo sapiens
  misc_RNA (1)...(19): siRNA sense strand
gaccacagcuucccucuca

SEQ ID NO: 2143577 - RNA, 19 nt, Homo sapiens
  misc_RNA (1)...(19): siRNA sense strand
gaauggcagcaauaaauua

SEQ ID NO: 2143578 - RNA, 19 nt, Homo sapiens
  misc_RNA (1)...(19): siRNA sense strand
gauauuagaucgguacuca

SEQ ID NO: 2143579 - RNA, 19 nt, Homo sapiens
  misc_RNA (1)...(19): siRNA sense strand
ccuaagaucuagagucaaa

SEQ ID NO: 2143580 - RNA, 19 nt, Homo sapiens
  misc_RNA (1)...(19): siRNA sense strand
gaauccaccucacuuaaau

SEQ ID NO: 2143581 - RNA, 19 nt, Homo sapiens
  misc_RNA (1)...(19): siRNA sense strand
gcaauggccucugguauca

SEQ ID NO: 2143582 - RNA, 19 nt, Homo sapiens
  misc_RNA (1)...(19): siRNA sense strand
aaccuaaccuucauaguaa

SEQ ID NO: 2143583 - RNA, 19 nt, Homo sapiens
  misc_RNA (1)...(19): siRNA sense strand
uagaagagccuaaagcaaa

SEQ ID NO: 2143584 - RNA, 19 nt, Homo sapiens
  misc_RNA (1)...(19): siRNA sense strand
ccaauuacaugcuaucaca

SEQ ID NO: 2143585 - RNA, 19 nt, Homo sapiens
  misc_RNA (1)...(19): siRNA sense strand
gcaauaaauuagacagaca

SEQ ID NO: 2143586 - RNA, 19 nt, Homo sapiens
  misc_RNA (1)...(19): siRNA sense strand
cagcuucccucucacauga

SEQ ID NO: 2143587 - RNA, 19 nt, Homo sapiens
  misc_RNA (1)...(19): siRNA sense strand
acagaaggauccucuagaa

SEQ ID NO: 2143588 - RNA, 19 nt, Homo sapiens
  misc_RNA (1)...(19): siRNA sense strand
gaugucaguuucuaguaaa

SEQ ID NO: 2143589 - RNA, 19 nt, Homo sapiens
  misc_RNA (1)...(19): siRNA sense strand
guucaucuguaccugauaa

SEQ ID NO: 2143590 - RNA, 19 nt, Homo sapiens
  misc_RNA (1)...(19): siRNA sense strand
ggacuggaccauugaaaga

SEQ ID NO: 2143591 - RNA, 19 nt, Homo sapiens
  misc_RNA (1)...(19): siRNA sense strand
ucaaagagguucacuaucc

SEQ ID NO: 2143592 - RNA, 19 nt, Homo sapiens
  misc_RNA (1)...(19): siRNA sense strand
gaggauaccuaagaucuag

SEQ ID NO: 2143593 - RNA, 19 nt, Homo sapiens
  misc_RNA (1)...(19): siRNA sense strand
cgaugucaguuucuaguaa

SEQ ID NO: 2143594 - RNA, 19 nt, Homo sapiens
  misc_RNA (1)...(19): siRNA sense strand
gcaagggcguuucagauac

SEQ ID NO: 2143595 - RNA, 19 nt, Homo sapiens
  misc_RNA (1)...(19): siRNA sense strand
caaaucacacacuuucuuu

SEQ ID NO: 2143596 - RNA, 19 nt, Homo sapiens
  misc_RNA (1)...(19): siRNA sense strand
ggugucgucucuuugagua

SEQ ID NO: 2143597 - RNA, 19 nt, Homo sapiens
  misc_RNA (1)...(19): siRNA sense strand
gaacagaaggauccucuag

SEQ ID NO: 2143598 - RNA, 19 nt, Homo sapiens
  misc_RNA (1)...(19): siRNA sense strand
ccaccacucuuguuuguca

SEQ ID NO: 2143599 - RNA, 19 nt, Homo sapiens
  misc_RNA (1)...(19): siRNA sense strand
gaacauccuaagaaacaaa

SEQ ID NO: 2143600 - RNA, 19 nt, Homo sapiens
  misc_RNA (1)...(19): siRNA sense strand
ucacacacuuucuuuagga

SEQ ID NO: 2143601 - RNA, 19 nt, Homo sapiens
  misc_RNA (1)...(19): siRNA sense strand
caagaacccaugacccuaa

SEQ ID NO: 2143602 - RNA, 19 nt, Homo sapiens
  misc_RNA (1)...(19): siRNA sense strand
gaaugggauugguacgauu

SEQ ID NO: 2143603 - RNA, 19 nt, Homo sapiens
  misc_RNA (1)...(19): siRNA sense strand
ggagaaaacucguacaagu

SEQ ID NO: 2143604 - RNA, 19 nt, Homo sapiens
  misc_RNA (1)...(19): siRNA sense strand
ugucuuaaguggcaacaaa

SEQ ID NO: 2143605 - RNA, 19 nt, Homo sapiens
  misc_RNA (1)...(19): siRNA sense strand
uaccuaagaucuagaguca

SEQ ID NO: 2143606 - RNA, 19 nt, Homo sapiens
  misc_RNA (1)...(19): siRNA sense strand
gaccauaguugacaaagcu

SEQ ID NO: 2143607 - RNA, 19 nt, Homo sapiens
  misc_RNA (1)...(19): siRNA sense strand
ggaacagcuugauggagaa

SEQ ID NO: 2143608 - RNA, 19 nt, Homo sapiens
  misc_RNA (1)...(19): siRNA sense strand
aaagaauccaccucacuua

SEQ ID NO: 2143609 - RNA, 19 nt, Homo sapiens
  misc_RNA (1)...(19): siRNA sense strand
ccucucacaugauaaagaa

SEQ ID NO: 2143610 - RNA, 19 nt, Homo sapiens
  misc_RNA (1)...(19): siRNA sense strand
cagaacauccuaagaaaca

SEQ ID NO: 2143611 - RNA, 19 nt, Homo sapiens
  misc_RNA (1)...(19): siRNA sense strand
guugaugccugcuccuuug

SEQ ID NO: 2143612 - RNA, 19 nt, Homo sapiens
  misc_RNA (1)...(19): siRNA sense strand
gacagugacccgaaagaaa

SEQ ID NO: 2143613 - RNA, 19 nt, Homo sapiens
  misc_RNA (1)...(19): siRNA sense strand
ggaggauaccuaagaucua

SEQ ID NO: 2143614 - RNA, 19 nt, Homo sapiens
  misc_RNA (1)...(19): siRNA sense strand
gcccuuagcguuuauugaa

SEQ ID NO: 2143615 - RNA, 19 nt, Homo sapiens
  misc_RNA (1)...(19): siRNA sense strand
agaaggauccucuagaaga

SEQ ID NO: 2143616 - RNA, 19 nt, Homo sapiens
  misc_RNA (1)...(19): siRNA sense strand
cauuacuucugcuacauaa

SEQ ID NO: 2143617 - RNA, 19 nt, Homo sapiens
  misc_RNA (1)...(19): siRNA sense strand
aaucagaggacuuuguuaa

SEQ ID NO: 2143618 - RNA, 19 nt, Homo sapiens
  misc_RNA (1)...(19): siRNA sense strand
cccagaacauccuaagaaa

SEQ ID NO: 2143619 - RNA, 19 nt, Homo sapiens
  misc_RNA (1)...(19): siRNA sense strand
uaaagaauccaccucacuu

SEQ ID NO: 2143620 - RNA, 19 nt, Homo sapiens
  misc_RNA (1)...(19): siRNA sense strand
guucuuacacuuucucuga

SEQ ID NO: 2143621 - RNA, 19 nt, Homo sapiens
  misc_RNA (1)...(19): siRNA sense strand
aagaagagacauucaagaa

SEQ ID NO: 2143622 - RNA, 19 nt, Homo sapiens
  misc_RNA (1)...(19): siRNA sense strand
ccuaaacggugcuaauagu

SEQ ID NO: 2143623 - RNA, 19 nt, Homo sapiens
  misc_RNA (1)...(19): siRNA sense strand
gccaagaugccgaagauga

SEQ ID NO: 2143624 - RNA, 19 nt, Homo sapiens
  misc_RNA (1)...(19): siRNA sense strand
gucaguuucuaguaaagua

SEQ ID NO: 2143625 - RNA, 19 nt, Homo sapiens
  misc_RNA (1)...(19): siRNA sense strand
ucagauauuuggaggauac

SEQ ID NO: 2143626 - RNA, 19 nt, Homo sapiens
  misc_RNA (1)...(19): siRNA sense strand
gaugugaaauacccugagu

SEQ ID NO: 2143627 - RNA, 19 nt, Homo sapiens
  misc_RNA (1)...(19): siRNA sense strand
cuaauguucuuacacuuuc

SEQ ID NO: 2143628 - RNA, 19 nt, Homo sapiens
  misc_RNA (1)...(19): siRNA sense strand
aaagaugguuccagcuuca

SEQ ID NO: 2143629 - RNA, 19 nt, Homo sapiens
  misc_RNA (1)...(19): siRNA sense strand
ggccaccacucuuguuugu

SEQ ID NO: 2143630 - RNA, 19 nt, Homo sapiens
  misc_RNA (1)...(19): siRNA sense strand
caaucaguauucacaacaa

SEQ ID NO: 2143631 - RNA, 19 nt, Homo sapiens
  misc_RNA (1)...(19): siRNA sense strand
caaagagguucacuaucca

SEQ ID NO: 2143632 - RNA, 19 nt, Homo sapiens
  misc_RNA (1)...(19): siRNA sense strand
aagaagaugcccaugaauu

SEQ ID NO: 2143633 - RNA, 19 nt, Homo sapiens
  misc_RNA (1)...(19): siRNA sense strand
ugaauggcagcaauaaauu

SEQ ID NO: 2143634 - RNA, 19 nt, Homo sapiens
  misc_RNA (1)...(19): siRNA sense strand
agagagagcaggagcaaga

SEQ ID NO: 2143635 - RNA, 19 nt, Homo sapiens
  misc_RNA (1)...(19): siRNA sense strand
cauuaccaauucugcagua

SEQ ID NO: 2143636 - RNA, 19 nt, Homo sapiens
  misc_RNA (1)...(19): siRNA sense strand
gcuucccucucacaugaua

SEQ ID NO: 2143637 - RNA, 19 nt, Homo sapiens
  misc_RNA (1)...(19): siRNA sense strand
uugcuaaggaugugaaaua

SEQ ID NO: 2143638 - RNA, 19 nt, Homo sapiens
  misc_RNA (1)...(19): siRNA sense strand
ggugcugugucuucauuga

SEQ ID NO: 2143639 - RNA, 19 nt, Homo sapiens
  misc_RNA (1)...(19): siRNA sense strand
uguuaaagauucagaacug

SEQ ID NO: 2143640 - RNA, 19 nt, Homo sapiens
  misc_RNA (1)...(19): siRNA sense strand
agaagagacauucaagaaa

SEQ ID NO: 2143641 - RNA, 19 nt, Homo sapiens
  misc_RNA (1)...(19): siRNA sense strand
agaagaugcccaugaauuc

SEQ ID NO: 2143642 - RNA, 19 nt, Homo sapiens
  misc_RNA (1)...(19): siRNA sense strand
cagcgacagugacccgaaa

SEQ ID NO: 2143643 - RNA, 19 nt, Homo sapiens
  misc_RNA (1)...(19): siRNA sense strand
agacauggaugcagguucu

SEQ ID NO: 2143644 - RNA, 19 nt, Homo sapiens
  misc_RNA (1)...(19): siRNA sense strand
ucaaaucacacacuuucuu

SEQ ID NO: 2143645 - RNA, 19 nt, Homo sapiens
  misc_RNA (1)...(19): siRNA sense strand
gaguucaucuguaccugau

SEQ ID NO: 2143646 - RNA, 19 nt, Homo sapiens
  misc_RNA (1)...(19): siRNA sense strand
caggguggcuuuccucucu

SEQ ID NO: 2143647 - RNA, 19 nt, Homo sapiens
  misc_RNA (1)...(19): siRNA sense strand
ucaaaaccaucaccacaaa

SEQ ID NO: 2143648 - RNA, 19 nt, Homo sapiens
  misc_RNA (1)...(19): siRNA sense strand
cagaaaaucccuuugcuaa

SEQ ID NO: 2143649 - RNA, 19 nt, Homo sapiens
  misc_RNA (1)...(19): siRNA sense strand
ccucugguaucaaaugaau

SEQ ID NO: 2143650 - RNA, 19 nt, Homo sapiens
  misc_RNA (1)...(19): siRNA sense strand
gauauuuggaggauaccua

SEQ ID NO: 2143651 - RNA, 19 nt, Homo sapiens
  misc_RNA (1)...(19): siRNA sense strand
ugcaagggcguuucagaua

SEQ ID NO: 2143652 - RNA, 19 nt, Homo sapiens
  misc_RNA (1)...(19): siRNA sense strand
gcaggacucagaccucuca

SEQ ID NO: 2143653 - RNA, 19 nt, Homo sapiens
  misc_RNA (1)...(19): siRNA sense strand
caucgcuccuccacagaaa

SEQ ID NO: 2143654 - RNA, 19 nt, Homo sapiens
  misc_RNA (1)...(19): siRNA sense strand
caacggagagccaauuguc

SEQ ID NO: 2143655 - RNA, 19 nt, Homo sapiens
  misc_RNA (1)...(19): siRNA sense strand
uagcuaggcacuuccguuu

SEQ ID NO: 2143656 - RNA, 19 nt, Homo sapiens
  misc_RNA (1)...(19): siRNA sense strand
aaauggaggugaacuuacu

SEQ ID NO: 2143657 - RNA, 19 nt, Homo sapiens
  misc_RNA (1)...(19): siRNA sense strand
gcuaggcacuuccguuuug

SEQ ID NO: 2143658 - RNA, 19 nt, Homo sapiens
  misc_RNA (1)...(19): siRNA sense strand
agaagagccuaaagcaaag

SEQ ID NO: 2143659 - RNA, 19 nt, Homo sapiens
  misc_RNA (1)...(19): siRNA sense strand
gcaaauccaagcugaacuc

SEQ ID NO: 2143660 - RNA, 19 nt, Homo sapiens
  misc_RNA (1)...(19): siRNA sense strand
agaauccaccucacuuaaa

SEQ ID NO: 2143661 - RNA, 19 nt, Homo sapiens
  misc_RNA (1)...(19): siRNA sense strand
ggaggugaacuuacucauc

SEQ ID NO: 2143662 - RNA, 19 nt, Homo sapiens
  misc_RNA (1)...(19): siRNA sense strand
gaacagcuugauggagaaa

SEQ ID NO: 2143663 - RNA, 19 nt, Homo sapiens
  misc_RNA (1)...(19): siRNA sense strand
aauggccucugguaucaaa

SEQ ID NO: 2143664 - RNA, 19 nt, Homo sapiens
  misc_RNA (1)...(19): siRNA sense strand
ugagaaaacgaaacacuua

SEQ ID NO: 2143665 - RNA, 19 nt, Homo sapiens
  misc_RNA (1)...(19): siRNA sense strand
gaaaggcucgacggaugaa

SEQ ID NO: 2143666 - RNA, 19 nt, Homo sapiens
  misc_RNA (1)...(19): siRNA sense strand
cgacagaacugcacuugua

SEQ ID NO: 2143667 - RNA, 19 nt, Homo sapiens
  misc_RNA (1)...(19): siRNA sense strand
ugacaaagcuucugaaucu

SEQ ID NO: 2143668 - RNA, 19 nt, Homo sapiens
  misc_RNA (1)...(19): siRNA sense strand
gaucuagagucaaauguuu

SEQ ID NO: 2143669 - RNA, 19 nt, Homo sapiens
  misc_RNA (1)...(19): siRNA sense strand
guuaauagguccucaguga

SEQ ID NO: 2143670 - RNA, 19 nt, Homo sapiens
  misc_RNA (1)...(19): siRNA sense strand
uuagagaccuucaggcuua

SEQ ID NO: 2143671 - RNA, 19 nt, Homo sapiens
  misc_RNA (1)...(19): siRNA sense strand
gauaaaggcugcucagagu

SEQ ID NO: 2143672 - RNA, 19 nt, Homo sapiens
  misc_RNA (1)...(19): siRNA sense strand
caaccuaaccuucauagua

SEQ ID NO: 2143673 - RNA, 19 nt, Homo sapiens
  misc_RNA (1)...(19): siRNA sense strand
caccaccucuugccaauua

SEQ ID NO: 2143674 - RNA, 19 nt, Homo sapiens
  misc_RNA (1)...(19): siRNA sense strand
gaagagacauucaagaaaa

SEQ ID NO: 2143675 - RNA, 19 nt, Homo sapiens
  misc_RNA (1)...(19): siRNA sense strand
ccaagaagaugcccaugaa

SEQ ID NO: 2143676 - RNA, 19 nt, Homo sapiens
  misc_RNA (1)...(19): siRNA sense strand
gaccacagcuucccucuca

SEQ ID NO: 2143677 - RNA, 19 nt, Homo sapiens
  misc_RNA (1)...(19): siRNA sense strand
gaauggcagcaauaaauua

SEQ ID NO: 2143678 - RNA, 19 nt, Homo sapiens
  misc_RNA (1)...(19): siRNA sense strand
gauauuagaucgguacuca

SEQ ID NO: 2143679 - RNA, 19 nt, Homo sapiens
  misc_RNA (1)...(19): siRNA sense strand
ccuaagaucuagagucaaa

SEQ ID NO: 2143680 - RNA, 19 nt, Homo sapiens
  misc_RNA (1)...(19): siRNA sense strand
gaauccaccucacuuaaau

SEQ ID NO: 2143681 - RNA, 19 nt, Homo sapiens
  misc_RNA (1)...(19): siRNA sense strand
gcaauggccucugguauca

SEQ ID NO: 2143682 - RNA, 19 nt, Homo sapiens
  misc_RNA (1)...(19): siRNA sense strand
aaccuaaccuucauaguaa

SEQ ID NO: 2143683 - RNA, 19 nt, Homo sapiens
  misc_RNA (1)...(19): siRNA sense strand
uagaagagccuaaagcaaa

SEQ ID NO: 2143684 - RNA, 19 nt, Homo sapiens
  misc_RNA (1)...(19): siRNA sense strand
ccaauuacaugcuaucaca

SEQ ID NO: 2143685 - RNA, 19 nt, Homo sapiens
  misc_RNA (1)...(19): siRNA sense strand
gcaauaaauuagacagaca

SEQ ID NO: 2143686 - RNA, 19 nt, Homo sapiens
  misc_RNA (1)...(19): siRNA sense strand
cagcuucccucucacauga

SEQ ID NO: 2143687 - RNA, 19 nt, Homo sapiens
  misc_RNA (1)...(19): siRNA sense strand
acagaaggauccucuagaa

SEQ ID NO: 2143688 - RNA, 19 nt, Homo sapiens
  misc_RNA (1)...(19): siRNA sense strand
gaugucaguuucuaguaaa

SEQ ID NO: 2143689 - RNA, 19 nt, Homo sapiens
  misc_RNA (1)...(19): siRNA sense strand
guucaucuguaccugauaa

SEQ ID NO: 2143690 - RNA, 19 nt, Homo sapiens
  misc_RNA (1)...(19): siRNA sense strand
ggacuggaccauugaaaga

SEQ ID NO: 2143691 - RNA, 19 nt, Homo sapiens
  misc_RNA (1)...(19): siRNA sense strand
ucaaagagguucacuaucc

SEQ ID NO: 2143692 - RNA, 19 nt, Homo sapiens
  misc_RNA (1)...(19): siRNA sense strand
gaggauaccuaagaucuag

SEQ ID NO: 2143693 - RNA, 19 nt, Homo sapiens
  misc_RNA (1)...(19): siRNA sense strand
cgaugucaguuucuaguaa

SEQ ID NO: 2143694 - RNA, 19 nt, Homo sapiens
  misc_RNA (1)...(19): siRNA sense strand
gcaagggcguuucagauac

SEQ ID NO: 2143695 - RNA, 19 nt, Homo sapiens
  misc_RNA (1)...(19): siRNA sense strand
caaaucacacacuuucuuu

SEQ ID NO: 2143696 - RNA, 19 nt, Homo sapiens
  misc_RNA (1)...(19): siRNA sense strand
ggugucgucucuuugagua

SEQ ID NO: 2143697 - RNA, 19 nt, Homo sapiens
  misc_RNA (1)...(19): siRNA sense strand
gaacagaaggauccucuag

SEQ ID NO: 2143698 - RNA, 19 nt, Homo sapiens
  misc_RNA (1)...(19): siRNA sense strand
ccaccacucuuguuuguca

SEQ ID NO: 2143699 - RNA, 19 nt, Homo sapiens
  misc_RNA (1)...(19): siRNA sense strand
gaacauccuaagaaacaaa

SEQ ID NO: 2143700 - RNA, 19 nt, Homo sapiens
  misc_RNA (1)...(19): siRNA sense strand
ucacacacuuucuuuagga

SEQ ID NO: 2143701 - RNA, 19 nt, Homo sapiens
  misc_RNA (1)...(19): siRNA sense strand
caagaacccaugacccuaa

SEQ ID NO: 2143702 - RNA, 19 nt, Homo sapiens
  misc_RNA (1)...(19): siRNA sense strand
gaaugggauugguacgauu

SEQ ID NO: 2143703 - RNA, 19 nt, Homo sapiens
  misc_RNA (1)...(19): siRNA sense strand
ggagaaaacucguacaagu

SEQ ID NO: 2143704 - RNA, 19 nt, Homo sapiens
  misc_RNA (1)...(19): siRNA sense strand
ugucuuaaguggcaacaaa

SEQ ID NO: 2143705 - RNA, 19 nt, Homo sapiens
  misc_RNA (1)...(19): siRNA sense strand
uaccuaagaucuagaguca

SEQ ID NO: 2143706 - RNA, 19 nt, Homo sapiens
  misc_RNA (1)...(19): siRNA sense strand
gaccauaguugacaaagcu

SEQ ID NO: 2143707 - RNA, 19 nt, Homo sapiens
  misc_RNA (1)...(19): siRNA sense strand
ggaacagcuugauggagaa

SEQ ID NO: 2143708 - RNA, 19 nt, Homo sapiens
  misc_RNA (1)...(19): siRNA sense strand
aaagaauccaccucacuua

SEQ ID NO: 2143709 - RNA, 19 nt, Homo sapiens
  misc_RNA (1)...(19): siRNA sense strand
ccucucacaugauaaagaa

SEQ ID NO: 2143710 - RNA, 19 nt, Homo sapiens
  misc_RNA (1)...(19): siRNA sense strand
cagaacauccuaagaaaca

SEQ ID NO: 2143711 - RNA, 19 nt, Homo sapiens
  misc_RNA (1)...(19): siRNA sense strand
guugaugccugcuccuuug

SEQ ID NO: 2143712 - RNA, 19 nt, Homo sapiens
  misc_RNA (1)...(19): siRNA sense strand
gacagugacccgaaagaaa

SEQ ID NO: 2143713 - RNA, 19 nt, Homo sapiens
  misc_RNA (1)...(19): siRNA sense strand
ggaggauaccuaagaucua

SEQ ID NO: 2143714 - RNA, 19 nt, Homo sapiens
  misc_RNA (1)...(19): siRNA sense strand
gcccuuagcguuuauugaa

SEQ ID NO: 2143715 - RNA, 19 nt, Homo sapiens
  misc_RNA (1)...(19): siRNA sense strand
agaaggauccucuagaaga

SEQ ID NO: 2143716 - RNA, 19 nt, Homo sapiens
  misc_RNA (1)...(19): siRNA sense strand
cauuacuucugcuacauaa

SEQ ID NO: 2143717 - RNA, 19 nt, Homo sapiens
  misc_RNA (1)...(19): siRNA sense strand
aaucagaggacuuuguuaa

SEQ ID NO: 2143718 - RNA, 19 nt, Homo sapiens
  misc_RNA (1)...(19): siRNA sense strand
cccagaacauccuaagaaa

SEQ ID NO: 2143719 - RNA, 19 nt, Homo sapiens
  misc_RNA (1)...(19): siRNA sense strand
uaaagaauccaccucacuu

SEQ ID NO: 2143720 - RNA, 19 nt, Homo sapiens
  misc_RNA (1)...(19): siRNA sense strand
guucuuacacuuucucuga

SEQ ID NO: 2143721 - RNA, 19 nt, Homo sapiens
  misc_RNA (1)...(19): siRNA sense strand
aagaagagacauucaagaa

SEQ ID NO: 2143722 - RNA, 19 nt, Homo sapiens
  misc_RNA (1)...(19): siRNA sense strand
ccuaaacggugcuaauagu

SEQ ID NO: 2143723 - RNA, 19 nt, Homo sapiens
  misc_RNA (1)...(19): siRNA sense strand
gccaagaugccgaagauga

SEQ ID NO: 2143724 - RNA, 19 nt, Homo sapiens
  misc_RNA (1)...(19): siRNA sense strand
gucaguuucuaguaaagua

SEQ ID NO: 2143725 - RNA, 19 nt, Homo sapiens
  misc_RNA (1)...(19): siRNA sense strand
ucagauauuuggaggauac

SEQ ID NO: 2143726 - RNA, 19 nt, Homo sapiens
  misc_RNA (1)...(19): siRNA sense strand
gaugugaaauacccugagu

SEQ ID NO: 2143727 - RNA, 19 nt, Homo sapiens
  misc_RNA (1)...(19): siRNA sense strand
cuaauguucuuacacuuuc

SEQ ID NO: 2143728 - RNA, 19 nt, Homo sapiens
  misc_RNA (1)...(19): siRNA sense strand
aaagaugguuccagcuuca

SEQ ID NO: 2143729 - RNA, 19 nt, Homo sapiens
  misc_RNA (1)...(19): siRNA sense strand
ggccaccacucuuguuugu

SEQ ID NO: 2143730 - RNA, 19 nt, Homo sapiens
  misc_RNA (1)...(19): siRNA sense strand
caaucaguauucacaacaa

SEQ ID NO: 2143731 - RNA, 19 nt, Homo sapiens
  misc_RNA (1)...(19): siRNA sense strand
caaagagguucacuaucca

SEQ ID NO: 2143732 - RNA, 19 nt, Homo sapiens
  misc_RNA (1)...(19): siRNA sense strand
aagaagaugcccaugaauu

SEQ ID NO: 2143733 - RNA, 19 nt, Homo sapiens
  misc_RNA (1)...(19): siRNA sense strand
ugaauggcagcaauaaauu

SEQ ID NO: 2143734 - RNA, 19 nt, Homo sapiens
  misc_RNA (1)...(19): siRNA sense strand
agagagagcaggagcaaga

SEQ ID NO: 2143735 - RNA, 19 nt, Homo sapiens
  misc_RNA (1)...(19): siRNA sense strand
cauuaccaauucugcagua

SEQ ID NO: 2143736 - RNA, 19 nt, Homo sapiens
  misc_RNA (1)...(19): siRNA sense strand
gcuucccucucacaugaua

SEQ ID NO: 2143737 - RNA, 19 nt, Homo sapiens
  misc_RNA (1)...(19): siRNA sense strand
uugcuaaggaugugaaaua

SEQ ID NO: 2143738 - RNA, 19 nt, Homo sapiens
  misc_RNA (1)...(19): siRNA sense strand
ggugcugugucuucauuga

SEQ ID NO: 2143739 - RNA, 19 nt, Homo sapiens
  misc_RNA (1)...(19): siRNA sense strand
uguuaaagauucagaacug

SEQ ID NO: 2143740 - RNA, 19 nt, Homo sapiens
  misc_RNA (1)...(19): siRNA sense strand
agaagagacauucaagaaa

SEQ ID NO: 2143741 - RNA, 19 nt, Homo sapiens
  misc_RNA (1)...(19): siRNA sense strand
agaagaugcccaugaauuc

SEQ ID NO: 2143742 - RNA, 19 nt, Homo sapiens
  misc_RNA (1)...(19): siRNA sense strand
cagcgacagugacccgaaa

SEQ ID NO: 2143743 - RNA, 19 nt, Homo sapiens
  misc_RNA (1)...(19): siRNA sense strand
agacauggaugcagguucu

SEQ ID NO: 2143744 - RNA, 19 nt, Homo sapiens
  misc_RNA (1)...(19): siRNA sense strand
ucaaaucacacacuuucuu

SEQ ID NO: 2143745 - RNA, 19 nt, Homo sapiens
  misc_RNA (1)...(19): siRNA sense strand
gaguucaucuguaccugau

SEQ ID NO: 2143746 - RNA, 19 nt, Homo sapiens
  misc_RNA (1)...(19): siRNA sense strand
caggguggcuuuccucucu

SEQ ID NO: 2143747 - RNA, 19 nt, Homo sapiens
  misc_RNA (1)...(19): siRNA sense strand
ucaaaaccaucaccacaaa

SEQ ID NO: 2143748 - RNA, 19 nt, Homo sapiens
  misc_RNA (1)...(19): siRNA sense strand
cagaaaaucccuuugcuaa

SEQ ID NO: 2143749 - RNA, 19 nt, Homo sapiens
  misc_RNA (1)...(19): siRNA sense strand
ccucugguaucaaaugaau

SEQ ID NO: 2143750 - RNA, 19 nt, Homo sapiens
  misc_RNA (1)...(19): siRNA sense strand
gauauuuggaggauaccua

SEQ ID NO: 2143751 - RNA, 19 nt, Homo sapiens
  misc_RNA (1)...(19): siRNA sense strand
ugcaagggcguuucagaua

SEQ ID NO: 2143752 - RNA, 19 nt, Homo sapiens
  misc_RNA (1)...(19): siRNA sense strand
gcaggacucagaccucuca

SEQ ID NO: 2143753 - RNA, 19 nt, Homo sapiens
  misc_RNA (1)...(19): siRNA sense strand
caucgcuccuccacagaaa

SEQ ID NO: 2143754 - RNA, 19 nt, Homo sapiens
  misc_RNA (1)...(19): siRNA sense strand
caacggagagccaauuguc

SEQ ID NO: 2143755 - RNA, 19 nt, Homo sapiens
  misc_RNA (1)...(19): siRNA sense strand
uagcuaggcacuuccguuu

SEQ ID NO: 2143756 - RNA, 19 nt, Homo sapiens
  misc_RNA (1)...(19): siRNA sense strand
aaauggaggugaacuuacu

SEQ ID NO: 2143757 - RNA, 19 nt, Homo sapiens
  misc_RNA (1)...(19): siRNA sense strand
gcuaggcacuuccguuuug

SEQ ID NO: 2143758 - RNA, 19 nt, Homo sapiens
  misc_RNA (1)...(19): siRNA sense strand
agaagagccuaaagcaaag

SEQ ID NO: 2143759 - RNA, 19 nt, Homo sapiens
  misc_RNA (1)...(19): siRNA sense strand
gcaaauccaagcugaacuc

SEQ ID NO: 2143760 - RNA, 19 nt, Homo sapiens
  misc_RNA (1)...(19): siRNA sense strand
agaauccaccucacuuaaa

SEQ ID NO: 2143761 - RNA, 19 nt, Homo sapiens
  misc_RNA (1)...(19): siRNA sense strand
ggaggugaacuuacucauc

SEQ ID NO: 2143762 - RNA, 19 nt, Homo sapiens
  misc_RNA (1)...(19): siRNA sense strand
gaacagcuugauggagaaa

SEQ ID NO: 2143763 - RNA, 19 nt, Homo sapiens
  misc_RNA (1)...(19): siRNA sense strand
aauggccucugguaucaaa

SEQ ID NO: 2143764 - RNA, 19 nt, Homo sapiens
  misc_RNA (1)...(19): siRNA sense strand
ugagaaaacgaaacacuua

SEQ ID NO: 2143765 - RNA, 19 nt, Homo sapiens
  misc_RNA (1)...(19): siRNA sense strand
gaaaggcucgacggaugaa

SEQ ID NO: 2143766 - RNA, 19 nt, Homo sapiens
  misc_RNA (1)...(19): siRNA sense strand
ggagaaagaucgccaguca

SEQ ID NO: 2143767 - RNA, 19 nt, Homo sapiens
  misc_RNA (1)...(19): siRNA sense strand
cagaagauuugcucuauga

SEQ ID NO: 2143768 - RNA, 19 nt, Homo sapiens
  misc_RNA (1)...(19): siRNA sense strand
gaauaaguccugaauuaga

SEQ ID NO: 2143769 - RNA, 19 nt, Homo sapiens
  misc_RNA (1)...(19): siRNA sense strand
gagcagaucgccaaacuga

SEQ ID NO: 2143770 - RNA, 19 nt, Homo sapiens
  misc_RNA (1)...(19): siRNA sense strand
agacaaagcuacucagaca

SEQ ID NO: 2143771 - RNA, 19 nt, Homo sapiens
  misc_RNA (1)...(19): siRNA sense strand
guucggaccucuaguacaa

SEQ ID NO: 2143772 - RNA, 19 nt, Homo sapiens
  misc_RNA (1)...(19): siRNA sense strand
uuacgucucuuucugauga

SEQ ID NO: 2143773 - RNA, 19 nt, Homo sapiens
  misc_RNA (1)...(19): siRNA sense strand
gcucuaugaucgugauaaa

SEQ ID NO: 2143774 - RNA, 19 nt, Homo sapiens
  misc_RNA (1)...(19): siRNA sense strand
gggaguagcucaccguuac

SEQ ID NO: 2143775 - RNA, 19 nt, Homo sapiens
  misc_RNA (1)...(19): siRNA sense strand
gcucagaacuaugugauca

SEQ ID NO: 2143776 - RNA, 19 nt, Homo sapiens
  misc_RNA (1)...(19): siRNA sense strand
caacagaagauuugcucua

SEQ ID NO: 2143777 - RNA, 19 nt, Homo sapiens
  misc_RNA (1)...(19): siRNA sense strand
gaaggucuuugaggaaaug

SEQ ID NO: 2143778 - RNA, 19 nt, Homo sapiens
  misc_RNA (1)...(19): siRNA sense strand
gcucaccguuacccaagua

SEQ ID NO: 2143779 - RNA, 19 nt, Homo sapiens
  misc_RNA (1)...(19): siRNA sense strand
agaacuaugugaucaucua

SEQ ID NO: 2143780 - RNA, 19 nt, Homo sapiens
  misc_RNA (1)...(19): siRNA sense strand
caaguucggaccucuagua

SEQ ID NO: 2143781 - RNA, 19 nt, Homo sapiens
  misc_RNA (1)...(19): siRNA sense strand
gaacuaugugaucaucuaa

SEQ ID NO: 2143782 - RNA, 19 nt, Homo sapiens
  misc_RNA (1)...(19): siRNA sense strand
ggaucaaggucaguuccua

SEQ ID NO: 2143783 - RNA, 19 nt, Homo sapiens
  misc_RNA (1)...(19): siRNA sense strand
gauaaagacagugggagua

SEQ ID NO: 2143784 - RNA, 19 nt, Homo sapiens
  misc_RNA (1)...(19): siRNA sense strand
gugaaggucuuugaggaaa

SEQ ID NO: 2143785 - RNA, 19 nt, Homo sapiens
  misc_RNA (1)...(19): siRNA sense strand
ggaauaaguccugaauuag

SEQ ID NO: 2143786 - RNA, 19 nt, Homo sapiens
  misc_RNA (1)...(19): siRNA sense strand
cuacaacgcaguaaacaga

SEQ ID NO: 2143787 - RNA, 19 nt, Homo sapiens
  misc_RNA (1)...(19): siRNA sense strand
cagaguagucgucacagua

SEQ ID NO: 2143788 - RNA, 19 nt, Homo sapiens
  misc_RNA (1)...(19): siRNA sense strand
gaugguagcccuugcucaa

SEQ ID NO: 2143789 - RNA, 19 nt, Homo sapiens
  misc_RNA (1)...(19): siRNA sense strand
gcagagcggacaaggcaaa

SEQ ID NO: 2143790 - RNA, 19 nt, Homo sapiens
  misc_RNA (1)...(19): siRNA sense strand
ucagcuuucuguccuguaa

SEQ ID NO: 2143791 - RNA, 19 nt, Homo sapiens
  misc_RNA (1)...(19): siRNA sense strand
ccaaacaacagcuacaugu

SEQ ID NO: 2143792 - RNA, 19 nt, Homo sapiens
  misc_RNA (1)...(19): siRNA sense strand
gaagauuugcucuaugauc

SEQ ID NO: 2143793 - RNA, 19 nt, Homo sapiens
  misc_RNA (1)...(19): siRNA sense strand
cgaaccuccucuuuggaua

SEQ ID NO: 2143794 - RNA, 19 nt, Homo sapiens
  misc_RNA (1)...(19): siRNA sense strand
gcaacuacaacgcaguaaa

SEQ ID NO: 2143795 - RNA, 19 nt, Homo sapiens
  misc_RNA (1)...(19): siRNA sense strand
gaucgccagucaccucuuc

SEQ ID NO: 2143796 - RNA, 19 nt, Homo sapiens
  misc_RNA (1)...(19): siRNA sense strand
ccuaugccacugucaaaua

SEQ ID NO: 2143797 - RNA, 19 nt, Homo sapiens
  misc_RNA (1)...(19): siRNA sense strand
cuaugccacugucaaauau

SEQ ID NO: 2143798 - RNA, 19 nt, Homo sapiens
  misc_RNA (1)...(19): siRNA sense strand
ucggaccucuaguacaaua

SEQ ID NO: 2143799 - RNA, 19 nt, Homo sapiens
  misc_RNA (1)...(19): siRNA sense strand
caauguagaaggaauaagu

SEQ ID NO: 2143800 - RNA, 19 nt, Homo sapiens
  misc_RNA (1)...(19): siRNA sense strand
gcccugcaauguagaagga

SEQ ID NO: 2143801 - RNA, 19 nt, Homo sapiens
  misc_RNA (1)...(19): siRNA sense strand
ucuaugaucgugauaaaga

SEQ ID NO: 2143802 - RNA, 19 nt, Homo sapiens
  misc_RNA (1)...(19): siRNA sense strand
caacgcaguaaacagagua

SEQ ID NO: 2143803 - RNA, 19 nt, Homo sapiens
  misc_RNA (1)...(19): siRNA sense strand
aacagaagauuugcucuau

SEQ ID NO: 2143804 - RNA, 19 nt, Homo sapiens
  misc_RNA (1)...(19): siRNA sense strand
ggaaggaagaaguauccaa

SEQ ID NO: 2143805 - RNA, 19 nt, Homo sapiens
  misc_RNA (1)...(19): siRNA sense strand
gaucaaggucaguuccuau

SEQ ID NO: 2143806 - RNA, 19 nt, Homo sapiens
  misc_RNA (1)...(19): siRNA sense strand
ggggagugcugaucaacua

SEQ ID NO: 2143807 - RNA, 19 nt, Homo sapiens
  misc_RNA (1)...(19): siRNA sense strand
cuucugaccuuaugcucaa

SEQ ID NO: 2143808 - RNA, 19 nt, Homo sapiens
  misc_RNA (1)...(19): siRNA sense strand
ggagugcugaucaacuaaa

SEQ ID NO: 2143809 - RNA, 19 nt, Homo sapiens
  misc_RNA (1)...(19): siRNA sense strand
caacuacaacgcaguaaac

SEQ ID NO: 2143810 - RNA, 19 nt, Homo sapiens
  misc_RNA (1)...(19): siRNA sense strand
gcucagcuuuggcaacucu

SEQ ID NO: 2143811 - RNA, 19 nt, Homo sapiens
  misc_RNA (1)...(19): siRNA sense strand
ggcaaaaucucagcaaguu

SEQ ID NO: 2143812 - RNA, 19 nt, Homo sapiens
  misc_RNA (1)...(19): siRNA sense strand
aacaggaccuuaccucaca

SEQ ID NO: 2143813 - RNA, 19 nt, Homo sapiens
  misc_RNA (1)...(19): siRNA sense strand
agaguagucgucacaguaa

SEQ ID NO: 2143814 - RNA, 19 nt, Homo sapiens
  misc_RNA (1)...(19): siRNA sense strand
aaacagaguagucgucaca

SEQ ID NO: 2143815 - RNA, 19 nt, Homo sapiens
  misc_RNA (1)...(19): siRNA sense strand
cagcaacuacaacgcagua

SEQ ID NO: 2143816 - RNA, 19 nt, Homo sapiens
  misc_RNA (1)...(19): siRNA sense strand
gccacgggauccucauguu

SEQ ID NO: 2143817 - RNA, 19 nt, Homo sapiens
  misc_RNA (1)...(19): siRNA sense strand
uaaugggaaggaagaagua

SEQ ID NO: 2143818 - RNA, 19 nt, Homo sapiens
  misc_RNA (1)...(19): siRNA sense strand
ugaaagacaaagcuacuca

SEQ ID NO: 2143819 - RNA, 19 nt, Homo sapiens
  misc_RNA (1)...(19): siRNA sense strand
ucagaacuaugugaucauc

SEQ ID NO: 2143820 - RNA, 19 nt, Homo sapiens
  misc_RNA (1)...(19): siRNA sense strand
gcagaagagggugcagaaa

SEQ ID NO: 2143821 - RNA, 19 nt, Homo sapiens
  misc_RNA (1)...(19): siRNA sense strand
gcaaccauauaacaaucag

SEQ ID NO: 2143822 - RNA, 19 nt, Homo sapiens
  misc_RNA (1)...(19): siRNA sense strand
gaugugagcgagugaaggu

SEQ ID NO: 2143823 - RNA, 19 nt, Homo sapiens
  misc_RNA (1)...(19): siRNA sense strand
ccaaaccaaacaacagcua

SEQ ID NO: 2143824 - RNA, 19 nt, Homo sapiens
  misc_RNA (1)...(19): siRNA sense strand
acagaagauuugcucuaug

SEQ ID NO: 2143825 - RNA, 19 nt, Homo sapiens
  misc_RNA (1)...(19): siRNA sense strand
uaaggcgaaccuccucuuu

SEQ ID NO: 2143826 - RNA, 19 nt, Homo sapiens
  misc_RNA (1)...(19): siRNA sense strand
cgugugcccugcaauguag

SEQ ID NO: 2143827 - RNA, 19 nt, Homo sapiens
  misc_RNA (1)...(19): siRNA sense strand
aaagacaaagcuacucaga

SEQ ID NO: 2143828 - RNA, 19 nt, Homo sapiens
  misc_RNA (1)...(19): siRNA sense strand
cuucaucucccaaaccaaa

SEQ ID NO: 2143829 - RNA, 19 nt, Homo sapiens
  misc_RNA (1)...(19): siRNA sense strand
gcgugugcccugcaaugua

SEQ ID NO: 2143830 - RNA, 19 nt, Homo sapiens
  misc_RNA (1)...(19): siRNA sense strand
gugccaaaaucaucuguuu

SEQ ID NO: 2143831 - RNA, 19 nt, Homo sapiens
  misc_RNA (1)...(19): siRNA sense strand
uaacaaucagucacacuca

SEQ ID NO: 2143832 - RNA, 19 nt, Homo sapiens
  misc_RNA (1)...(19): siRNA sense strand
aaacugaggcagcaacuac

SEQ ID NO: 2143833 - RNA, 19 nt, Homo sapiens
  misc_RNA (1)...(19): siRNA sense strand
gaaccuccucuuuggauac

SEQ ID NO: 2143834 - RNA, 19 nt, Homo sapiens
  misc_RNA (1)...(19): siRNA sense strand
gggauccucauguucacua

SEQ ID NO: 2143835 - RNA, 19 nt, Homo sapiens
  misc_RNA (1)...(19): siRNA sense strand
gcgaaccuccucuuuggau

SEQ ID NO: 2143836 - RNA, 19 nt, Homo sapiens
  misc_RNA (1)...(19): siRNA sense strand
ugaaggucuuugaggaaau

SEQ ID NO: 2143837 - RNA, 19 nt, Homo sapiens
  misc_RNA (1)...(19): siRNA sense strand
aggcgaaccuccucuuugg

SEQ ID NO: 2143838 - RNA, 19 nt, Homo sapiens
  misc_RNA (1)...(19): siRNA sense strand
ggcagaagagggugcagaa

SEQ ID NO: 2143839 - RNA, 19 nt, Homo sapiens
  misc_RNA (1)...(19): siRNA sense strand
aagagcagaucgccaaacu

SEQ ID NO: 2143840 - RNA, 19 nt, Homo sapiens
  misc_RNA (1)...(19): siRNA sense strand
guaguacucgcagcauuga

SEQ ID NO: 2143841 - RNA, 19 nt, Homo sapiens
  misc_RNA (1)...(19): siRNA sense strand
cauauaacaaucagucaca

SEQ ID NO: 2143842 - RNA, 19 nt, Homo sapiens
  misc_RNA (1)...(19): siRNA sense strand
uggcaaccauauaacaauc

SEQ ID NO: 2143843 - RNA, 19 nt, Homo sapiens
  misc_RNA (1)...(19): siRNA sense strand
ggaccucuaguacaauaag

SEQ ID NO: 2143844 - RNA, 19 nt, Homo sapiens
  misc_RNA (1)...(19): siRNA sense strand
gaccuuaugcucaagaacu

SEQ ID NO: 2143845 - RNA, 19 nt, Homo sapiens
  misc_RNA (1)...(19): siRNA sense strand
uuaccugcuucugaccuua

SEQ ID NO: 2143846 - RNA, 19 nt, Homo sapiens
  misc_RNA (1)...(19): siRNA sense strand
cagcucucaucccggguuu

SEQ ID NO: 2143847 - RNA, 19 nt, Homo sapiens
  misc_RNA (1)...(19): siRNA sense strand
cauguucacuacccuucau

SEQ ID NO: 2143848 - RNA, 19 nt, Homo sapiens
  misc_RNA (1)...(19): siRNA sense strand
cauuaccggagcaguagua

SEQ ID NO: 2143849 - RNA, 19 nt, Homo sapiens
  misc_RNA (1)...(19): siRNA sense strand
caaauauaucagugccaaa

SEQ ID NO: 2143850 - RNA, 19 nt, Homo sapiens
  misc_RNA (1)...(19): siRNA sense strand
cagaagagggugcagaaaa

SEQ ID NO: 2143851 - RNA, 19 nt, Homo sapiens
  misc_RNA (1)...(19): siRNA sense strand
guccaggagcgcagcagua

SEQ ID NO: 2143852 - RNA, 19 nt, Homo sapiens
  misc_RNA (1)...(19): siRNA sense strand
caaacugaggcagcaacua

SEQ ID NO: 2143853 - RNA, 19 nt, Homo sapiens
  misc_RNA (1)...(19): siRNA sense strand
gaguagucgucacaguaag

SEQ ID NO: 2143854 - RNA, 19 nt, Homo sapiens
  misc_RNA (1)...(19): siRNA sense strand
ccacgggauccucauguuc

SEQ ID NO: 2143855 - RNA, 19 nt, Homo sapiens
  misc_RNA (1)...(19): siRNA sense strand
augccacugucaaauauau

SEQ ID NO: 2143856 - RNA, 19 nt, Homo sapiens
  misc_RNA (1)...(19): siRNA sense strand
gggagugcugaucaacuaa

SEQ ID NO: 2143857 - RNA, 19 nt, Homo sapiens
  misc_RNA (1)...(19): siRNA sense strand
caucccggguuuccuuuac

SEQ ID NO: 2143858 - RNA, 19 nt, Homo sapiens
  misc_RNA (1)...(19): siRNA sense strand
ugguagcccuugcucaaca

SEQ ID NO: 2143859 - RNA, 19 nt, Homo sapiens
  misc_RNA (1)...(19): siRNA sense strand
acagaguagucgucacagu

SEQ ID NO: 2143860 - RNA, 19 nt, Homo sapiens
  misc_RNA (1)...(19): siRNA sense strand
cagcaaguucggaccucua

SEQ ID NO: 2143861 - RNA, 19 nt, Homo sapiens
  misc_RNA (1)...(19): siRNA sense strand
ggagaaagaucgccaguca

SEQ ID NO: 2143862 - RNA, 19 nt, Homo sapiens
  misc_RNA (1)...(19): siRNA sense strand
cagaagauuugcucuauga

SEQ ID NO: 2143863 - RNA, 19 nt, Homo sapiens
  misc_RNA (1)...(19): siRNA sense strand
gaauaaguccugaauuaga

SEQ ID NO: 2143864 - RNA, 19 nt, Homo sapiens
  misc_RNA (1)...(19): siRNA sense strand
gagcagaucgccaaacuga

SEQ ID NO: 2143865 - RNA, 19 nt, Homo sapiens
  misc_RNA (1)...(19): siRNA sense strand
agacaaagcuacucagaca

SEQ ID NO: 2143866 - RNA, 19 nt, Homo sapiens
  misc_RNA (1)...(19): siRNA sense strand
guucggaccucuaguacaa

SEQ ID NO: 2143867 - RNA, 19 nt, Homo sapiens
  misc_RNA (1)...(19): siRNA sense strand
uuacgucucuuucugauga

SEQ ID NO: 2143868 - RNA, 19 nt, Homo sapiens
  misc_RNA (1)...(19): siRNA sense strand
gcucuaugaucgugauaaa

SEQ ID NO: 2143869 - RNA, 19 nt, Homo sapiens
  misc_RNA (1)...(19): siRNA sense strand
gggaguagcucaccguuac

SEQ ID NO: 2143870 - RNA, 19 nt, Homo sapiens
  misc_RNA (1)...(19): siRNA sense strand
gcucagaacuaugugauca

SEQ ID NO: 2143871 - RNA, 19 nt, Homo sapiens
  misc_RNA (1)...(19): siRNA sense strand
caacagaagauuugcucua

SEQ ID NO: 2143872 - RNA, 19 nt, Homo sapiens
  misc_RNA (1)...(19): siRNA sense strand
gaaggucuuugaggaaaug

SEQ ID NO: 2143873 - RNA, 19 nt, Homo sapiens
  misc_RNA (1)...(19): siRNA sense strand
gcucaccguuacccaagua

SEQ ID NO: 2143874 - RNA, 19 nt, Homo sapiens
  misc_RNA (1)...(19): siRNA sense strand
agaacuaugugaucaucua

SEQ ID NO: 2143875 - RNA, 19 nt, Homo sapiens
  misc_RNA (1)...(19): siRNA sense strand
caaguucggaccucuagua

SEQ ID NO: 2143876 - RNA, 19 nt, Homo sapiens
  misc_RNA (1)...(19): siRNA sense strand
gaacuaugugaucaucuaa

SEQ ID NO: 2143877 - RNA, 19 nt, Homo sapiens
  misc_RNA (1)...(19): siRNA sense strand
ggaucaaggucaguuccua

SEQ ID NO: 2143878 - RNA, 19 nt, Homo sapiens
  misc_RNA (1)...(19): siRNA sense strand
gauaaagacagugggagua

SEQ ID NO: 2143879 - RNA, 19 nt, Homo sapiens
  misc_RNA (1)...(19): siRNA sense strand
gugaaggucuuugaggaaa

SEQ ID NO: 2143880 - RNA, 19 nt, Homo sapiens
  misc_RNA (1)...(19): siRNA sense strand
ggaauaaguccugaauuag

SEQ ID NO: 2143881 - RNA, 19 nt, Homo sapiens
  misc_RNA (1)...(19): siRNA sense strand
cuacaacgcaguaaacaga

SEQ ID NO: 2143882 - RNA, 19 nt, Homo sapiens
  misc_RNA (1)...(19): siRNA sense strand
cagaguagucgucacagua

SEQ ID NO: 2143883 - RNA, 19 nt, Homo sapiens
  misc_RNA (1)...(19): siRNA sense strand
gaugguagcccuugcucaa

SEQ ID NO: 2143884 - RNA, 19 nt, Homo sapiens
  misc_RNA (1)...(19): siRNA sense strand
gcagagcggacaaggcaaa

SEQ ID NO: 2143885 - RNA, 19 nt, Homo sapiens
  misc_RNA (1)...(19): siRNA sense strand
ucagcuuucuguccuguaa

SEQ ID NO: 2143886 - RNA, 19 nt, Homo sapiens
  misc_RNA (1)...(19): siRNA sense strand
ccaaacaacagcuacaugu

SEQ ID NO: 2143887 - RNA, 19 nt, Homo sapiens
  misc_RNA (1)...(19): siRNA sense strand
gaagauuugcucuaugauc

SEQ ID NO: 2143888 - RNA, 19 nt, Homo sapiens
  misc_RNA (1)...(19): siRNA sense strand
cgaaccuccucuuuggaua

SEQ ID NO: 2143889 - RNA, 19 nt, Homo sapiens
  misc_RNA (1)...(19): siRNA sense strand
gcaacuacaacgcaguaaa

SEQ ID NO: 2143890 - RNA, 19 nt, Homo sapiens
  misc_RNA (1)...(19): siRNA sense strand
gaucgccagucaccucuuc

SEQ ID NO: 2143891 - RNA, 19 nt, Homo sapiens
  misc_RNA (1)...(19): siRNA sense strand
ccuaugccacugucaaaua

SEQ ID NO: 2143892 - RNA, 19 nt, Homo sapiens
  misc_RNA (1)...(19): siRNA sense strand
cuaugccacugucaaauau

SEQ ID NO: 2143893 - RNA, 19 nt, Homo sapiens
  misc_RNA (1)...(19): siRNA sense strand
ucggaccucuaguacaaua

SEQ ID NO: 2143894 - RNA, 19 nt, Homo sapiens
  misc_RNA (1)...(19): siRNA sense strand
caauguagaaggaauaagu

SEQ ID NO: 2143895 - RNA, 19 nt, Homo sapiens
  misc_RNA (1)...(19): siRNA sense strand
gcccugcaauguagaagga

SEQ ID NO: 2143896 - RNA, 19 nt, Homo sapiens
  misc_RNA (1)...(19): siRNA sense strand
ucuaugaucgugauaaaga

SEQ ID NO: 2143897 - RNA, 19 nt, Homo sapiens
  misc_RNA (1)...(19): siRNA sense strand
caacgcaguaaacagagua

SEQ ID NO: 2143898 - RNA, 19 nt, Homo sapiens
  misc_RNA (1)...(19): siRNA sense strand
aacagaagauuugcucuau

SEQ ID NO: 2143899 - RNA, 19 nt, Homo sapiens
  misc_RNA (1)...(19): siRNA sense strand
ggaaggaagaaguauccaa

SEQ ID NO: 2143900 - RNA, 19 nt, Homo sapiens
  misc_RNA (1)...(19): siRNA sense strand
gaucaaggucaguuccuau

SEQ ID NO: 2143901 - RNA, 19 nt, Homo sapiens
  misc_RNA (1)...(19): siRNA sense strand
ggggagugcugaucaacua

SEQ ID NO: 2143902 - RNA, 19 nt, Homo sapiens
  misc_RNA (1)...(19): siRNA sense strand
cuucugaccuuaugcucaa

SEQ ID NO: 2143903 - RNA, 19 nt, Homo sapiens
  misc_RNA (1)...(19): siRNA sense strand
ggagugcugaucaacuaaa

SEQ ID NO: 2143904 - RNA, 19 nt, Homo sapiens
  misc_RNA (1)...(19): siRNA sense strand
caacuacaacgcaguaaac

SEQ ID NO: 2143905 - RNA, 19 nt, Homo sapiens
  misc_RNA (1)...(19): siRNA sense strand
gcucagcuuuggcaacucu

SEQ ID NO: 2143906 - RNA, 19 nt, Homo sapiens
  misc_RNA (1)...(19): siRNA sense strand
ggcaaaaucucagcaaguu

SEQ ID NO: 2143907 - RNA, 19 nt, Homo sapiens
  misc_RNA (1)...(19): siRNA sense strand
aacaggaccuuaccucaca

SEQ ID NO: 2143908 - RNA, 19 nt, Homo sapiens
  misc_RNA (1)...(19): siRNA sense strand
agaguagucgucacaguaa

SEQ ID NO: 2143909 - RNA, 19 nt, Homo sapiens
  misc_RNA (1)...(19): siRNA sense strand
aaacagaguagucgucaca

SEQ ID NO: 2143910 - RNA, 19 nt, Homo sapiens
  misc_RNA (1)...(19): siRNA sense strand
cagcaacuacaacgcagua

SEQ ID NO: 2143911 - RNA, 19 nt, Homo sapiens
  misc_RNA (1)...(19): siRNA sense strand
gccacgggauccucauguu

SEQ ID NO: 2143912 - RNA, 19 nt, Homo sapiens
  misc_RNA (1)...(19): siRNA sense strand
uaaugggaaggaagaagua

SEQ ID NO: 2143913 - RNA, 19 nt, Homo sapiens
  misc_RNA (1)...(19): siRNA sense strand
ugaaagacaaagcuacuca

SEQ ID NO: 2143914 - RNA, 19 nt, Homo sapiens
  misc_RNA (1)...(19): siRNA sense strand
ucagaacuaugugaucauc

SEQ ID NO: 2143915 - RNA, 19 nt, Homo sapiens
  misc_RNA (1)...(19): siRNA sense strand
gcagaagagggugcagaaa

SEQ ID NO: 2143916 - RNA, 19 nt, Homo sapiens
  misc_RNA (1)...(19): siRNA sense strand
gcaaccauauaacaaucag

SEQ ID NO: 2143917 - RNA, 19 nt, Homo sapiens
  misc_RNA (1)...(19): siRNA sense strand
gaugugagcgagugaaggu

SEQ ID NO: 2143918 - RNA, 19 nt, Homo sapiens
  misc_RNA (1)...(19): siRNA sense strand
ccaaaccaaacaacagcua

SEQ ID NO: 2143919 - RNA, 19 nt, Homo sapiens
  misc_RNA (1)...(19): siRNA sense strand
acagaagauuugcucuaug

SEQ ID NO: 2143920 - RNA, 19 nt, Homo sapiens
  misc_RNA (1)...(19): siRNA sense strand
uaaggcgaaccuccucuuu

SEQ ID NO: 2143921 - RNA, 19 nt, Homo sapiens
  misc_RNA (1)...(19): siRNA sense strand
cgugugcccugcaauguag

SEQ ID NO: 2143922 - RNA, 19 nt, Homo sapiens
  misc_RNA (1)...(19): siRNA sense strand
aaagacaaagcuacucaga

SEQ ID NO: 2143923 - RNA, 19 nt, Homo sapiens
  misc_RNA (1)...(19): siRNA sense strand
cuucaucucccaaaccaaa

SEQ ID NO: 2143924 - RNA, 19 nt, Homo sapiens
  misc_RNA (1)...(19): siRNA sense strand
gcgugugcccugcaaugua

SEQ ID NO: 2143925 - RNA, 19 nt, Homo sapiens
  misc_RNA (1)...(19): siRNA sense strand
gugccaaaaucaucuguuu

SEQ ID NO: 2143926 - RNA, 19 nt, Homo sapiens
  misc_RNA (1)...(19): siRNA sense strand
uaacaaucagucacacuca

SEQ ID NO: 2143927 - RNA, 19 nt, Homo sapiens
  misc_RNA (1)...(19): siRNA sense strand
aaacugaggcagcaacuac

SEQ ID NO: 2143928 - RNA, 19 nt, Homo sapiens
  misc_RNA (1)...(19): siRNA sense strand
gaaccuccucuuuggauac

SEQ ID NO: 2143929 - RNA, 19 nt, Homo sapiens
  misc_RNA (1)...(19): siRNA sense strand
gggauccucauguucacua

SEQ ID NO: 2143930 - RNA, 19 nt, Homo sapiens
  misc_RNA (1)...(19): siRNA sense strand
gcgaaccuccucuuuggau

SEQ ID NO: 2143931 - RNA, 19 nt, Homo sapiens
  misc_RNA (1)...(19): siRNA sense strand
ugaaggucuuugaggaaau

SEQ ID NO: 2143932 - RNA, 19 nt, Homo sapiens
  misc_RNA (1)...(19): siRNA sense strand
aggcgaaccuccucuuugg

SEQ ID NO: 2143933 - RNA, 19 nt, Homo sapiens
  misc_RNA (1)...(19): siRNA sense strand
ggcagaagagggugcagaa

SEQ ID NO: 2143934 - RNA, 19 nt, Homo sapiens
  misc_RNA (1)...(19): siRNA sense strand
aagagcagaucgccaaacu

SEQ ID NO: 2143935 - RNA, 19 nt, Homo sapiens
  misc_RNA (1)...(19): siRNA sense strand
guaguacucgcagcauuga

SEQ ID NO: 2143936 - RNA, 19 nt, Homo sapiens
  misc_RNA (1)...(19): siRNA sense strand
cauauaacaaucagucaca

SEQ ID NO: 2143937 - RNA, 19 nt, Homo sapiens
  misc_RNA (1)...(19): siRNA sense strand
uggcaaccauauaacaauc

SEQ ID NO: 2143938 - RNA, 19 nt, Homo sapiens
  misc_RNA (1)...(19): siRNA sense strand
ggaccucuaguacaauaag

SEQ ID NO: 2143939 - RNA, 19 nt, Homo sapiens
  misc_RNA (1)...(19): siRNA sense strand
gaccuuaugcucaagaacu

SEQ ID NO: 2143940 - RNA, 19 nt, Homo sapiens
  misc_RNA (1)...(19): siRNA sense strand
uuaccugcuucugaccuua

SEQ ID NO: 2143941 - RNA, 19 nt, Homo sapiens
  misc_RNA (1)...(19): siRNA sense strand
cagcucucaucccggguuu

SEQ ID NO: 2143942 - RNA, 19 nt, Homo sapiens
  misc_RNA (1)...(19): siRNA sense strand
cauguucacuacccuucau

SEQ ID NO: 2143943 - RNA, 19 nt, Homo sapiens
  misc_RNA (1)...(19): siRNA sense strand
cauuaccggagcaguagua

SEQ ID NO: 2143944 - RNA, 19 nt, Homo sapiens
  misc_RNA (1)...(19): siRNA sense strand
caaauauaucagugccaaa

SEQ ID NO: 2143945 - RNA, 19 nt, Homo sapiens
  misc_RNA (1)...(19): siRNA sense strand
cagaagagggugcagaaaa

SEQ ID NO: 2143946 - RNA, 19 nt, Homo sapiens
  misc_RNA (1)...(19): siRNA sense strand
guccaggagcgcagcagua

SEQ ID NO: 2143947 - RNA, 19 nt, Homo sapiens
  misc_RNA (1)...(19): siRNA sense strand
caaacugaggcagcaacua

SEQ ID NO: 2143948 - RNA, 19 nt, Homo sapiens
  misc_RNA (1)...(19): siRNA sense strand
gaguagucgucacaguaag

SEQ ID NO: 2143949 - RNA, 19 nt, Homo sapiens
  misc_RNA (1)...(19): siRNA sense strand
ccacgggauccucauguuc

SEQ ID NO: 2143950 - RNA, 19 nt, Homo sapiens
  misc_RNA (1)...(19): siRNA sense strand
augccacugucaaauauau

SEQ ID NO: 2143951 - RNA, 19 nt, Homo sapiens
  misc_RNA (1)...(19): siRNA sense strand
gggagugcugaucaacuaa

SEQ ID NO: 2143952 - RNA, 19 nt, Homo sapiens
  misc_RNA (1)...(19): siRNA sense strand
caucccggguuuccuuuac

SEQ ID NO: 2143953 - RNA, 19 nt, Homo sapiens
  misc_RNA (1)...(19): siRNA sense strand
ugguagcccuugcucaaca

SEQ ID NO: 2143954 - RNA, 19 nt, Homo sapiens
  misc_RNA (1)...(19): siRNA sense strand
acagaguagucgucacagu

SEQ ID NO: 2143955 - RNA, 19 nt, Homo sapiens
  misc_RNA (1)...(19): siRNA sense strand
cagcaaguucggaccucua

SEQ ID NO: 2143956 - RNA, 19 nt, Homo sapiens
  misc_RNA (1)...(19): siRNA sense strand
ggaauucgcuguccaaaua

SEQ ID NO: 2143957 - RNA, 19 nt, Homo sapiens
  misc_RNA (1)...(19): siRNA sense strand
gaacauuucuuguguagua

SEQ ID NO: 2143958 - RNA, 19 nt, Homo sapiens
  misc_RNA (1)...(19): siRNA sense strand
ggacuacacugcauacuaa

SEQ ID NO: 2143959 - RNA, 19 nt, Homo sapiens
  misc_RNA (1)...(19): siRNA sense strand
gagaagaacuggcagauga

SEQ ID NO: 2143960 - RNA, 19 nt, Homo sapiens
  misc_RNA (1)...(19): siRNA sense strand
ggacagugcuaugaauaua

SEQ ID NO: 2143961 - RNA, 19 nt, Homo sapiens
  misc_RNA (1)...(19): siRNA sense strand
gaacaaauauugggacauc

SEQ ID NO: 2143962 - RNA, 19 nt, Homo sapiens
  misc_RNA (1)...(19): siRNA sense strand
gugaagagccugccuguua

SEQ ID NO: 2143963 - RNA, 19 nt, Homo sapiens
  misc_RNA (1)...(19): siRNA sense strand
ggaauucugugcugacauu

SEQ ID NO: 2143964 - RNA, 19 nt, Homo sapiens
  misc_RNA (1)...(19): siRNA sense strand
caacagugauggagaagaa

SEQ ID NO: 2143965 - RNA, 19 nt, Homo sapiens
  misc_RNA (1)...(19): siRNA sense strand
ggaaggaccugguuucuac

SEQ ID NO: 2143966 - RNA, 19 nt, Homo sapiens
  misc_RNA (1)...(19): siRNA sense strand
ggggaaagcugcugauuua

SEQ ID NO: 2143967 - RNA, 19 nt, Homo sapiens
  misc_RNA (1)...(19): siRNA sense strand
ggaccuaucccuaauacua

SEQ ID NO: 2143968 - RNA, 19 nt, Homo sapiens
  misc_RNA (1)...(19): siRNA sense strand
gcagaauuguuucaaaguu

SEQ ID NO: 2143969 - RNA, 19 nt, Homo sapiens
  misc_RNA (1)...(19): siRNA sense strand
gagaagaaguugacagaca

SEQ ID NO: 2143970 - RNA, 19 nt, Homo sapiens
  misc_RNA (1)...(19): siRNA sense strand
acugaaaccuuuaaccuua

SEQ ID NO: 2143971 - RNA, 19 nt, Homo sapiens
  misc_RNA (1)...(19): siRNA sense strand
gacaagagaacaaauauug

SEQ ID NO: 2143972 - RNA, 19 nt, Homo sapiens
  misc_RNA (1)...(19): siRNA sense strand
caagagaagcuuccaauga

SEQ ID NO: 2143973 - RNA, 19 nt, Homo sapiens
  misc_RNA (1)...(19): siRNA sense strand
gaacaaagaagccucaaag

SEQ ID NO: 2143974 - RNA, 19 nt, Homo sapiens
  misc_RNA (1)...(19): siRNA sense strand
gaaggcaguuuguggaaau

SEQ ID NO: 2143975 - RNA, 19 nt, Homo sapiens
  misc_RNA (1)...(19): siRNA sense strand
ccaggugacuguuauuuga

SEQ ID NO: 2143976 - RNA, 19 nt, Homo sapiens
  misc_RNA (1)...(19): siRNA sense strand
gaacagacaagagaacaaa

SEQ ID NO: 2143977 - RNA, 19 nt, Homo sapiens
  misc_RNA (1)...(19): siRNA sense strand
gaagaaggguacacugaag

SEQ ID NO: 2143978 - RNA, 19 nt, Homo sapiens
  misc_RNA (1)...(19): siRNA sense strand
gaucuaggcuuugguggaa

SEQ ID NO: 2143979 - RNA, 19 nt, Homo sapiens
  misc_RNA (1)...(19): siRNA sense strand
caguugaccugaaauauug

SEQ ID NO: 2143980 - RNA, 19 nt, Homo sapiens
  misc_RNA (1)...(19): siRNA sense strand
gcacuggaccuaucccuaa

SEQ ID NO: 2143981 - RNA, 19 nt, Homo sapiens
  misc_RNA (1)...(19): siRNA sense strand
aaaggaguguccagaauuu

SEQ ID NO: 2143982 - RNA, 19 nt, Homo sapiens
  misc_RNA (1)...(19): siRNA sense strand
caaagccaauggacuuaaa

SEQ ID NO: 2143983 - RNA, 19 nt, Homo sapiens
  misc_RNA (1)...(19): siRNA sense strand
aagaaggacuguauuguga

SEQ ID NO: 2143984 - RNA, 19 nt, Homo sapiens
  misc_RNA (1)...(19): siRNA sense strand
caaagcaguuuccggcaaa

SEQ ID NO: 2143985 - RNA, 19 nt, Homo sapiens
  misc_RNA (1)...(19): siRNA sense strand
gaacuggucagacuguauu

SEQ ID NO: 2143986 - RNA, 19 nt, Homo sapiens
  misc_RNA (1)...(19): siRNA sense strand
gaaagcugcugauuuaagc

SEQ ID NO: 2143987 - RNA, 19 nt, Homo sapiens
  misc_RNA (1)...(19): siRNA sense strand
gcacagauccccucuauga

SEQ ID NO: 2143988 - RNA, 19 nt, Homo sapiens
  misc_RNA (1)...(19): siRNA sense strand
uacaagaacuagagaauca

SEQ ID NO: 2143989 - RNA, 19 nt, Homo sapiens
  misc_RNA (1)...(19): siRNA sense strand
gaagggaccagaacaagga

SEQ ID NO: 2143990 - RNA, 19 nt, Homo sapiens
  misc_RNA (1)...(19): siRNA sense strand
ggaaugcccugugaacugu

SEQ ID NO: 2143991 - RNA, 19 nt, Homo sapiens
  misc_RNA (1)...(19): siRNA sense strand
gaaguacgaagcuguaaug

SEQ ID NO: 2143992 - RNA, 19 nt, Homo sapiens
  misc_RNA (1)...(19): siRNA sense strand
gaagguucguucuaaaugg

SEQ ID NO: 2143993 - RNA, 19 nt, Homo sapiens
  misc_RNA (1)...(19): siRNA sense strand
guacaugucagcugaguga

SEQ ID NO: 2143994 - RNA, 19 nt, Homo sapiens
  misc_RNA (1)...(19): siRNA sense strand
ccagaaagacaaagacauu

SEQ ID NO: 2143995 - RNA, 19 nt, Homo sapiens
  misc_RNA (1)...(19): siRNA sense strand
ugucaaaggucagauggua

SEQ ID NO: 2143996 - RNA, 19 nt, Homo sapiens
  misc_RNA (1)...(19): siRNA sense strand
ccugugaacugucagcuuu

SEQ ID NO: 2143997 - RNA, 19 nt, Homo sapiens
  misc_RNA (1)...(19): siRNA sense strand
cuaaugcuguugagaaaga

SEQ ID NO: 2143998 - RNA, 19 nt, Homo sapiens
  misc_RNA (1)...(19): siRNA sense strand
ccagagagguuaugugcau

SEQ ID NO: 2143999 - RNA, 19 nt, Homo sapiens
  misc_RNA (1)...(19): siRNA sense strand
guccaaaccugacggaguu

SEQ ID NO: 2144000 - RNA, 19 nt, Homo sapiens
  misc_RNA (1)...(19): siRNA sense strand
gaaaguacaaggagacauc

SEQ ID NO: 2144001 - RNA, 19 nt, Homo sapiens
  misc_RNA (1)...(19): siRNA sense strand
caacccaacccuccaguaa

SEQ ID NO: 2144002 - RNA, 19 nt, Homo sapiens
  misc_RNA (1)...(19): siRNA sense strand
cggaggauaucaucuguga

SEQ ID NO: 2144003 - RNA, 19 nt, Homo sapiens
  misc_RNA (1)...(19): siRNA sense strand
ucaaaggucagaugguaua

SEQ ID NO: 2144004 - RNA, 19 nt, Homo sapiens
  misc_RNA (1)...(19): siRNA sense strand
ggaagaucuugcccuaaug

SEQ ID NO: 2144005 - RNA, 19 nt, Homo sapiens
  misc_RNA (1)...(19): siRNA sense strand
ugaagagccugccuguuau

SEQ ID NO: 2144006 - RNA, 19 nt, Homo sapiens
  misc_RNA (1)...(19): siRNA sense strand
gaaaaggaguguccagaau

SEQ ID NO: 2144007 - RNA, 19 nt, Homo sapiens
  misc_RNA (1)...(19): siRNA sense strand
uaucaucugugaguacuuu

SEQ ID NO: 2144008 - RNA, 19 nt, Homo sapiens
  misc_RNA (1)...(19): siRNA sense strand
cugaacauguagaggauua

SEQ ID NO: 2144009 - RNA, 19 nt, Homo sapiens
  misc_RNA (1)...(19): siRNA sense strand
ggaaugcggacaaggauau

SEQ ID NO: 2144010 - RNA, 19 nt, Homo sapiens
  misc_RNA (1)...(19): siRNA sense strand
aaacugcccucacuuacug

SEQ ID NO: 2144011 - RNA, 19 nt, Homo sapiens
  misc_RNA (1)...(19): siRNA sense strand
gagagguuaugugcauuaa

SEQ ID NO: 2144012 - RNA, 19 nt, Homo sapiens
  misc_RNA (1)...(19): siRNA sense strand
cuugagcaaugcacacuua

SEQ ID NO: 2144013 - RNA, 19 nt, Homo sapiens
  misc_RNA (1)...(19): siRNA sense strand
gcgcuuggcuuggagaaga

SEQ ID NO: 2144014 - RNA, 19 nt, Homo sapiens
  misc_RNA (1)...(19): siRNA sense strand
acaaccagcugaugaagga

SEQ ID NO: 2144015 - RNA, 19 nt, Homo sapiens
  misc_RNA (1)...(19): siRNA sense strand
gcucuagagugugcaaauu

SEQ ID NO: 2144016 - RNA, 19 nt, Homo sapiens
  misc_RNA (1)...(19): siRNA sense strand
gaaggggacuccaguauca

SEQ ID NO: 2144017 - RNA, 19 nt, Homo sapiens
  misc_RNA (1)...(19): siRNA sense strand
gagcauccuugcacagugu

SEQ ID NO: 2144018 - RNA, 19 nt, Homo sapiens
  misc_RNA (1)...(19): siRNA sense strand
ucaaggagauggaguuguc

SEQ ID NO: 2144019 - RNA, 19 nt, Homo sapiens
  misc_RNA (1)...(19): siRNA sense strand
gaaacaggcagaacagaca

SEQ ID NO: 2144020 - RNA, 19 nt, Homo sapiens
  misc_RNA (1)...(19): siRNA sense strand
ggucagaugguauaaaugu

SEQ ID NO: 2144021 - RNA, 19 nt, Homo sapiens
  misc_RNA (1)...(19): siRNA sense strand
cgaacaguguggugucaaa

SEQ ID NO: 2144022 - RNA, 19 nt, Homo sapiens
  misc_RNA (1)...(19): siRNA sense strand
guaacagacuggaguacau

SEQ ID NO: 2144023 - RNA, 19 nt, Homo sapiens
  misc_RNA (1)...(19): siRNA sense strand
acaaggauaucguuaccaa

SEQ ID NO: 2144024 - RNA, 19 nt, Homo sapiens
  misc_RNA (1)...(19): siRNA sense strand
gauacgagcacgauccauu

SEQ ID NO: 2144025 - RNA, 19 nt, Homo sapiens
  misc_RNA (1)...(19): siRNA sense strand
gacagaagggaaacagaua

SEQ ID NO: 2144026 - RNA, 19 nt, Homo sapiens
  misc_RNA (1)...(19): siRNA sense strand
ggaaagcugcugauuuaag

SEQ ID NO: 2144027 - RNA, 19 nt, Homo sapiens
  misc_RNA (1)...(19): siRNA sense strand
gaccuggguuuacggugua

SEQ ID NO: 2144028 - RNA, 19 nt, Homo sapiens
  misc_RNA (1)...(19): siRNA sense strand
gauggacagugcuaugaau

SEQ ID NO: 2144029 - RNA, 19 nt, Homo sapiens
  misc_RNA (1)...(19): siRNA sense strand
gaccggugauuauacaaga

SEQ ID NO: 2144030 - RNA, 19 nt, Homo sapiens
  misc_RNA (1)...(19): siRNA sense strand
gauguuggauuguguucga

SEQ ID NO: 2144031 - RNA, 19 nt, Homo sapiens
  misc_RNA (1)...(19): siRNA sense strand
caagaaguacgaagcugua

SEQ ID NO: 2144032 - RNA, 19 nt, Homo sapiens
  misc_RNA (1)...(19): siRNA sense strand
ggagacgcgggaagaauaa

SEQ ID NO: 2144033 - RNA, 19 nt, Homo sapiens
  misc_RNA (1)...(19): siRNA sense strand
uaacagcacccuugagcaa

SEQ ID NO: 2144034 - RNA, 19 nt, Homo sapiens
  misc_RNA (1)...(19): siRNA sense strand
ccagcagaauuguuucaaa

SEQ ID NO: 2144035 - RNA, 19 nt, Homo sapiens
  misc_RNA (1)...(19): siRNA sense strand
cagcagaauuguuucaaag

SEQ ID NO: 2144036 - RNA, 19 nt, Homo sapiens
  misc_RNA (1)...(19): siRNA sense strand
gguggaagacucacaaaug

SEQ ID NO: 2144037 - RNA, 19 nt, Homo sapiens
  misc_RNA (1)...(19): siRNA sense strand
guaaggacacgaaccauca

SEQ ID NO: 2144038 - RNA, 19 nt, Homo sapiens
  misc_RNA (1)...(19): siRNA sense strand
gcccagagcagauguuaga

SEQ ID NO: 2144039 - RNA, 19 nt, Homo sapiens
  misc_RNA (1)...(19): siRNA sense strand
cagcugaccugugugaaug

SEQ ID NO: 2144040 - RNA, 19 nt, Homo sapiens
  misc_RNA (1)...(19): siRNA sense strand
agaaagcgcacucuuguug

SEQ ID NO: 2144041 - RNA, 19 nt, Homo sapiens
  misc_RNA (1)...(19): siRNA sense strand
guggaagacucacaaaugg

SEQ ID NO: 2144042 - RNA, 19 nt, Homo sapiens
  misc_RNA (1)...(19): siRNA sense strand
gccaauggacuuaaaauua

SEQ ID NO: 2144043 - RNA, 19 nt, Homo sapiens
  misc_RNA (1)...(19): siRNA sense strand
gcaaggagacgcgggaaga

SEQ ID NO: 2144044 - RNA, 19 nt, Homo sapiens
  misc_RNA (1)...(19): siRNA sense strand
ucagcaaagugguggauga

SEQ ID NO: 2144045 - RNA, 19 nt, Homo sapiens
  misc_RNA (1)...(19): siRNA sense strand
ggagaagggaccagaacaa

SEQ ID NO: 2144046 - RNA, 19 nt, Homo sapiens
  misc_RNA (1)...(19): siRNA sense strand
aaaccuccucucacaauua

SEQ ID NO: 2144047 - RNA, 19 nt, Homo sapiens
  misc_RNA (1)...(19): siRNA sense strand
cggaaacugcccucacuua

SEQ ID NO: 2144048 - RNA, 19 nt, Homo sapiens
  misc_RNA (1)...(19): siRNA sense strand
gaacucauuauagauggua

SEQ ID NO: 2144049 - RNA, 19 nt, Homo sapiens
  misc_RNA (1)...(19): siRNA sense strand
ugagaugcaugcagaauac

SEQ ID NO: 2144050 - RNA, 19 nt, Homo sapiens
  misc_RNA (1)...(19): siRNA sense strand
ggauaucguuaccaagcaa

SEQ ID NO: 2144051 - RNA, 19 nt, Homo sapiens
  misc_RNA (1)...(19): siRNA sense strand
gaaagccuucgaccugaaa

SEQ ID NO: 2144052 - RNA, 19 nt, Homo sapiens
  misc_RNA (1)...(19): siRNA sense strand
agacagcugugcagagaug

SEQ ID NO: 2144053 - RNA, 19 nt, Homo sapiens
  misc_RNA (1)...(19): siRNA sense strand
gaccugaaauauugugaag

SEQ ID NO: 2144054 - RNA, 19 nt, Homo sapiens
  misc_RNA (1)...(19): siRNA sense strand
ugauggagaugccgacaug

SEQ ID NO: 2144055 - RNA, 19 nt, Homo sapiens
  misc_RNA (1)...(19): siRNA sense strand
gcauuuguguuacucaucu

SEQ ID NO: 2144056 - RNA, 19 nt, Homo sapiens
  misc_RNA (1)...(19): siRNA sense strand
ggaauucgcuguccaaaua

SEQ ID NO: 2144057 - RNA, 19 nt, Homo sapiens
  misc_RNA (1)...(19): siRNA sense strand
gaacauuucuuguguagua

SEQ ID NO: 2144058 - RNA, 19 nt, Homo sapiens
  misc_RNA (1)...(19): siRNA sense strand
ggacuacacugcauacuaa

SEQ ID NO: 2144059 - RNA, 19 nt, Homo sapiens
  misc_RNA (1)...(19): siRNA sense strand
gagaagaacuggcagauga

SEQ ID NO: 2144060 - RNA, 19 nt, Homo sapiens
  misc_RNA (1)...(19): siRNA sense strand
ggacagugcuaugaauaua

SEQ ID NO: 2144061 - RNA, 19 nt, Homo sapiens
  misc_RNA (1)...(19): siRNA sense strand
gaacaaauauugggacauc

SEQ ID NO: 2144062 - RNA, 19 nt, Homo sapiens
  misc_RNA (1)...(19): siRNA sense strand
gugaagagccugccuguua

SEQ ID NO: 2144063 - RNA, 19 nt, Homo sapiens
  misc_RNA (1)...(19): siRNA sense strand
ggaauucugugcugacauu

SEQ ID NO: 2144064 - RNA, 19 nt, Homo sapiens
  misc_RNA (1)...(19): siRNA sense strand
caacagugauggagaagaa

SEQ ID NO: 2144065 - RNA, 19 nt, Homo sapiens
  misc_RNA (1)...(19): siRNA sense strand
ggaaggaccugguuucuac

SEQ ID NO: 2144066 - RNA, 19 nt, Homo sapiens
  misc_RNA (1)...(19): siRNA sense strand
ggggaaagcugcugauuua

SEQ ID NO: 2144067 - RNA, 19 nt, Homo sapiens
  misc_RNA (1)...(19): siRNA sense strand
ggaccuaucccuaauacua

SEQ ID NO: 2144068 - RNA, 19 nt, Homo sapiens
  misc_RNA (1)...(19): siRNA sense strand
gcagaauuguuucaaaguu

SEQ ID NO: 2144069 - RNA, 19 nt, Homo sapiens
  misc_RNA (1)...(19): siRNA sense strand
gagaagaaguugacagaca

SEQ ID NO: 2144070 - RNA, 19 nt, Homo sapiens
  misc_RNA (1)...(19): siRNA sense strand
acugaaaccuuuaaccuua

SEQ ID NO: 2144071 - RNA, 19 nt, Homo sapiens
  misc_RNA (1)...(19): siRNA sense strand
gacaagagaacaaauauug

SEQ ID NO: 2144072 - RNA, 19 nt, Homo sapiens
  misc_RNA (1)...(19): siRNA sense strand
caagagaagcuuccaauga

SEQ ID NO: 2144073 - RNA, 19 nt, Homo sapiens
  misc_RNA (1)...(19): siRNA sense strand
gaacaaagaagccucaaag

SEQ ID NO: 2144074 - RNA, 19 nt, Homo sapiens
  misc_RNA (1)...(19): siRNA sense strand
gaaggcaguuuguggaaau

SEQ ID NO: 2144075 - RNA, 19 nt, Homo sapiens
  misc_RNA (1)...(19): siRNA sense strand
ccaggugacuguuauuuga

SEQ ID NO: 2144076 - RNA, 19 nt, Homo sapiens
  misc_RNA (1)...(19): siRNA sense strand
gaacagacaagagaacaaa

SEQ ID NO: 2144077 - RNA, 19 nt, Homo sapiens
  misc_RNA (1)...(19): siRNA sense strand
gaagaaggguacacugaag

SEQ ID NO: 2144078 - RNA, 19 nt, Homo sapiens
  misc_RNA (1)...(19): siRNA sense strand
gaucuaggcuuugguggaa

SEQ ID NO: 2144079 - RNA, 19 nt, Homo sapiens
  misc_RNA (1)...(19): siRNA sense strand
caguugaccugaaauauug

SEQ ID NO: 2144080 - RNA, 19 nt, Homo sapiens
  misc_RNA (1)...(19): siRNA sense strand
gcacuggaccuaucccuaa

SEQ ID NO: 2144081 - RNA, 19 nt, Homo sapiens
  misc_RNA (1)...(19): siRNA sense strand
aaaggaguguccagaauuu

SEQ ID NO: 2144082 - RNA, 19 nt, Homo sapiens
  misc_RNA (1)...(19): siRNA sense strand
caaagccaauggacuuaaa

SEQ ID NO: 2144083 - RNA, 19 nt, Homo sapiens
  misc_RNA (1)...(19): siRNA sense strand
aagaaggacuguauuguga

SEQ ID NO: 2144084 - RNA, 19 nt, Homo sapiens
  misc_RNA (1)...(19): siRNA sense strand
caaagcaguuuccggcaaa

SEQ ID NO: 2144085 - RNA, 19 nt, Homo sapiens
  misc_RNA (1)...(19): siRNA sense strand
gaacuggucagacuguauu

SEQ ID NO: 2144086 - RNA, 19 nt, Homo sapiens
  misc_RNA (1)...(19): siRNA sense strand
gaaagcugcugauuuaagc

SEQ ID NO: 2144087 - RNA, 19 nt, Homo sapiens
  misc_RNA (1)...(19): siRNA sense strand
gcacagauccccucuauga

SEQ ID NO: 2144088 - RNA, 19 nt, Homo sapiens
  misc_RNA (1)...(19): siRNA sense strand
uacaagaacuagagaauca

SEQ ID NO: 2144089 - RNA, 19 nt, Homo sapiens
  misc_RNA (1)...(19): siRNA sense strand
gaagggaccagaacaagga

SEQ ID NO: 2144090 - RNA, 19 nt, Homo sapiens
  misc_RNA (1)...(19): siRNA sense strand
ggaaugcccugugaacugu

SEQ ID NO: 2144091 - RNA, 19 nt, Homo sapiens
  misc_RNA (1)...(19): siRNA sense strand
gaaguacgaagcuguaaug

SEQ ID NO: 2144092 - RNA, 19 nt, Homo sapiens
  misc_RNA (1)...(19): siRNA sense strand
gaagguucguucuaaaugg

SEQ ID NO: 2144093 - RNA, 19 nt, Homo sapiens
  misc_RNA (1)...(19): siRNA sense strand
guacaugucagcugaguga

SEQ ID NO: 2144094 - RNA, 19 nt, Homo sapiens
  misc_RNA (1)...(19): siRNA sense strand
ccagaaagacaaagacauu

SEQ ID NO: 2144095 - RNA, 19 nt, Homo sapiens
  misc_RNA (1)...(19): siRNA sense strand
ugucaaaggucagauggua

SEQ ID NO: 2144096 - RNA, 19 nt, Homo sapiens
  misc_RNA (1)...(19): siRNA sense strand
ccugugaacugucagcuuu

SEQ ID NO: 2144097 - RNA, 19 nt, Homo sapiens
  misc_RNA (1)...(19): siRNA sense strand
cuaaugcuguugagaaaga

SEQ ID NO: 2144098 - RNA, 19 nt, Homo sapiens
  misc_RNA (1)...(19): siRNA sense strand
ccagagagguuaugugcau

SEQ ID NO: 2144099 - RNA, 19 nt, Homo sapiens
  misc_RNA (1)...(19): siRNA sense strand
guccaaaccugacggaguu

SEQ ID NO: 2144100 - RNA, 19 nt, Homo sapiens
  misc_RNA (1)...(19): siRNA sense strand
gaaaguacaaggagacauc

SEQ ID NO: 2144101 - RNA, 19 nt, Homo sapiens
  misc_RNA (1)...(19): siRNA sense strand
caacccaacccuccaguaa

SEQ ID NO: 2144102 - RNA, 19 nt, Homo sapiens
  misc_RNA (1)...(19): siRNA sense strand
cggaggauaucaucuguga

SEQ ID NO: 2144103 - RNA, 19 nt, Homo sapiens
  misc_RNA (1)...(19): siRNA sense strand
ucaaaggucagaugguaua

SEQ ID NO: 2144104 - RNA, 19 nt, Homo sapiens
  misc_RNA (1)...(19): siRNA sense strand
ggaagaucuugcccuaaug

SEQ ID NO: 2144105 - RNA, 19 nt, Homo sapiens
  misc_RNA (1)...(19): siRNA sense strand
ugaagagccugccuguuau

SEQ ID NO: 2144106 - RNA, 19 nt, Homo sapiens
  misc_RNA (1)...(19): siRNA sense strand
gaaaaggaguguccagaau

SEQ ID NO: 2144107 - RNA, 19 nt, Homo sapiens
  misc_RNA (1)...(19): siRNA sense strand
uaucaucugugaguacuuu

SEQ ID NO: 2144108 - RNA, 19 nt, Homo sapiens
  misc_RNA (1)...(19): siRNA sense strand
cugaacauguagaggauua

SEQ ID NO: 2144109 - RNA, 19 nt, Homo sapiens
  misc_RNA (1)...(19): siRNA sense strand
ggaaugcggacaaggauau

SEQ ID NO: 2144110 - RNA, 19 nt, Homo sapiens
  misc_RNA (1)...(19): siRNA sense strand
aaacugcccucacuuacug

SEQ ID NO: 2144111 - RNA, 19 nt, Homo sapiens
  misc_RNA (1)...(19): siRNA sense strand
gagagguuaugugcauuaa

SEQ ID NO: 2144112 - RNA, 19 nt, Homo sapiens
  misc_RNA (1)...(19): siRNA sense strand
cuugagcaaugcacacuua

SEQ ID NO: 2144113 - RNA, 19 nt, Homo sapiens
  misc_RNA (1)...(19): siRNA sense strand
gcgcuuggcuuggagaaga

SEQ ID NO: 2144114 - RNA, 19 nt, Homo sapiens
  misc_RNA (1)...(19): siRNA sense strand
acaaccagcugaugaagga

SEQ ID NO: 2144115 - RNA, 19 nt, Homo sapiens
  misc_RNA (1)...(19): siRNA sense strand
gcucuagagugugcaaauu

SEQ ID NO: 2144116 - RNA, 19 nt, Homo sapiens
  misc_RNA (1)...(19): siRNA sense strand
gaaggggacuccaguauca

SEQ ID NO: 2144117 - RNA, 19 nt, Homo sapiens
  misc_RNA (1)...(19): siRNA sense strand
gagcauccuugcacagugu

SEQ ID NO: 2144118 - RNA, 19 nt, Homo sapiens
  misc_RNA (1)...(19): siRNA sense strand
ucaaggagauggaguuguc

SEQ ID NO: 2144119 - RNA, 19 nt, Homo sapiens
  misc_RNA (1)...(19): siRNA sense strand
gaaacaggcagaacagaca

SEQ ID NO: 2144120 - RNA, 19 nt, Homo sapiens
  misc_RNA (1)...(19): siRNA sense strand
ggucagaugguauaaaugu

SEQ ID NO: 2144121 - RNA, 19 nt, Homo sapiens
  misc_RNA (1)...(19): siRNA sense strand
cgaacaguguggugucaaa

SEQ ID NO: 2144122 - RNA, 19 nt, Homo sapiens
  misc_RNA (1)...(19): siRNA sense strand
guaacagacuggaguacau

SEQ ID NO: 2144123 - RNA, 19 nt, Homo sapiens
  misc_RNA (1)...(19): siRNA sense strand
acaaggauaucguuaccaa

SEQ ID NO: 2144124 - RNA, 19 nt, Homo sapiens
  misc_RNA (1)...(19): siRNA sense strand
gauacgagcacgauccauu

SEQ ID NO: 2144125 - RNA, 19 nt, Homo sapiens
  misc_RNA (1)...(19): siRNA sense strand
gacagaagggaaacagaua

SEQ ID NO: 2144126 - RNA, 19 nt, Homo sapiens
  misc_RNA (1)...(19): siRNA sense strand
ggaaagcugcugauuuaag

SEQ ID NO: 2144127 - RNA, 19 nt, Homo sapiens
  misc_RNA (1)...(19): siRNA sense strand
gaccuggguuuacggugua

SEQ ID NO: 2144128 - RNA, 19 nt, Homo sapiens
  misc_RNA (1)...(19): siRNA sense strand
gauggacagugcuaugaau

SEQ ID NO: 2144129 - RNA, 19 nt, Homo sapiens
  misc_RNA (1)...(19): siRNA sense strand
gaccggugauuauacaaga

SEQ ID NO: 2144130 - RNA, 19 nt, Homo sapiens
  misc_RNA (1)...(19): siRNA sense strand
gauguuggauuguguucga

SEQ ID NO: 2144131 - RNA, 19 nt, Homo sapiens
  misc_RNA (1)...(19): siRNA sense strand
caagaaguacgaagcugua

SEQ ID NO: 2144132 - RNA, 19 nt, Homo sapiens
  misc_RNA (1)...(19): siRNA sense strand
ggagacgcgggaagaauaa

SEQ ID NO: 2144133 - RNA, 19 nt, Homo sapiens
  misc_RNA (1)...(19): siRNA sense strand
uaacagcacccuugagcaa

SEQ ID NO: 2144134 - RNA, 19 nt, Homo sapiens
  misc_RNA (1)...(19): siRNA sense strand
ccagcagaauuguuucaaa

SEQ ID NO: 2144135 - RNA, 19 nt, Homo sapiens
  misc_RNA (1)...(19): siRNA sense strand
cagcagaauuguuucaaag

SEQ ID NO: 2144136 - RNA, 19 nt, Homo sapiens
  misc_RNA (1)...(19): siRNA sense strand
gguggaagacucacaaaug

SEQ ID NO: 2144137 - RNA, 19 nt, Homo sapiens
  misc_RNA (1)...(19): siRNA sense strand
guaaggacacgaaccauca

SEQ ID NO: 2144138 - RNA, 19 nt, Homo sapiens
  misc_RNA (1)...(19): siRNA sense strand
gcccagagcagauguuaga

SEQ ID NO: 2144139 - RNA, 19 nt, Homo sapiens
  misc_RNA (1)...(19): siRNA sense strand
cagcugaccugugugaaug

SEQ ID NO: 2144140 - RNA, 19 nt, Homo sapiens
  misc_RNA (1)...(19): siRNA sense strand
agaaagcgcacucuuguug

SEQ ID NO: 2144141 - RNA, 19 nt, Homo sapiens
  misc_RNA (1)...(19): siRNA sense strand
guggaagacucacaaaugg

SEQ ID NO: 2144142 - RNA, 19 nt, Homo sapiens
  misc_RNA (1)...(19): siRNA sense strand
gccaauggacuuaaaauua

SEQ ID NO: 2144143 - RNA, 19 nt, Homo sapiens
  misc_RNA (1)...(19): siRNA sense strand
gcaaggagacgcgggaaga

SEQ ID NO: 2144144 - RNA, 19 nt, Homo sapiens
  misc_RNA (1)...(19): siRNA sense strand
ucagcaaagugguggauga

SEQ ID NO: 2144145 - RNA, 19 nt, Homo sapiens
  misc_RNA (1)...(19): siRNA sense strand
ggagaagggaccagaacaa

SEQ ID NO: 2144146 - RNA, 19 nt, Homo sapiens
  misc_RNA (1)...(19): siRNA sense strand
aaaccuccucucacaauua

SEQ ID NO: 2144147 - RNA, 19 nt, Homo sapiens
  misc_RNA (1)...(19): siRNA sense strand
cggaaacugcccucacuua

SEQ ID NO: 2144148 - RNA, 19 nt, Homo sapiens
  misc_RNA (1)...(19): siRNA sense strand
gaacucauuauagauggua

SEQ ID NO: 2144149 - RNA, 19 nt, Homo sapiens
  misc_RNA (1)...(19): siRNA sense strand
ugagaugcaugcagaauac

SEQ ID NO: 2144150 - RNA, 19 nt, Homo sapiens
  misc_RNA (1)...(19): siRNA sense strand
ggauaucguuaccaagcaa

SEQ ID NO: 2144151 - RNA, 19 nt, Homo sapiens
  misc_RNA (1)...(19): siRNA sense strand
gaaagccuucgaccugaaa

SEQ ID NO: 2144152 - RNA, 19 nt, Homo sapiens
  misc_RNA (1)...(19): siRNA sense strand
agacagcugugcagagaug

SEQ ID NO: 2144153 - RNA, 19 nt, Homo sapiens
  misc_RNA (1)...(19): siRNA sense strand
gaccugaaauauugugaag

SEQ ID NO: 2144154 - RNA, 19 nt, Homo sapiens
  misc_RNA (1)...(19): siRNA sense strand
ugauggagaugccgacaug

SEQ ID NO: 2144155 - RNA, 19 nt, Homo sapiens
  misc_RNA (1)...(19): siRNA sense strand
gcauuuguguuacucaucu

SEQ ID NO: 2144156 - RNA, 19 nt, Homo sapiens
  misc_RNA (1)...(19): siRNA sense strand
aaacaugggugaugaacua

SEQ ID NO: 2144157 - RNA, 19 nt, Homo sapiens
  misc_RNA (1)...(19): siRNA sense strand
guacauggguguuucaaug

SEQ ID NO: 2144158 - RNA, 19 nt, Homo sapiens
  misc_RNA (1)...(19): siRNA sense strand
gaagaaagacccagagaca

SEQ ID NO: 2144159 - RNA, 19 nt, Homo sapiens
  misc_RNA (1)...(19): siRNA sense strand
ggcagaagcuuauggguau

SEQ ID NO: 2144160 - RNA, 19 nt, Homo sapiens
  misc_RNA (1)...(19): siRNA sense strand
caaggacacauucaucuua

SEQ ID NO: 2144161 - RNA, 19 nt, Homo sapiens
  misc_RNA (1)...(19): siRNA sense strand
gugaugaacuagaauuuga

SEQ ID NO: 2144162 - RNA, 19 nt, Homo sapiens
  misc_RNA (1)...(19): siRNA sense strand
gccuagaguugccgacuua

SEQ ID NO: 2144163 - RNA, 19 nt, Homo sapiens
  misc_RNA (1)...(19): siRNA sense strand
gaaccagggcagaagcuua

SEQ ID NO: 2144164 - RNA, 19 nt, Homo sapiens
  misc_RNA (1)...(19): siRNA sense strand
agaaagacccagagacaua

SEQ ID NO: 2144165 - RNA, 19 nt, Homo sapiens
  misc_RNA (1)...(19): siRNA sense strand
ccacauuggcuguuuagua

SEQ ID NO: 2144166 - RNA, 19 nt, Homo sapiens
  misc_RNA (1)...(19): siRNA sense strand
ggcaaaccauggagauaaa

SEQ ID NO: 2144167 - RNA, 19 nt, Homo sapiens
  misc_RNA (1)...(19): siRNA sense strand
gcacugaggaagcugcuaa

SEQ ID NO: 2144168 - RNA, 19 nt, Homo sapiens
  misc_RNA (1)...(19): siRNA sense strand
gaaagacccagagacauau

SEQ ID NO: 2144169 - RNA, 19 nt, Homo sapiens
  misc_RNA (1)...(19): siRNA sense strand
ggguauaguuaauaaagug

SEQ ID NO: 2144170 - RNA, 19 nt, Homo sapiens
  misc_RNA (1)...(19): siRNA sense strand
gcagaagcuuauggguaua

SEQ ID NO: 2144171 - RNA, 19 nt, Homo sapiens
  misc_RNA (1)...(19): siRNA sense strand
ugggagagcuuggagauau

SEQ ID NO: 2144172 - RNA, 19 nt, Homo sapiens
  misc_RNA (1)...(19): siRNA sense strand
ggagauauuuaugaugauc

SEQ ID NO: 2144173 - RNA, 19 nt, Homo sapiens
  misc_RNA (1)...(19): siRNA sense strand
ggugaacagucgcuacuca

SEQ ID NO: 2144174 - RNA, 19 nt, Homo sapiens
  misc_RNA (1)...(19): siRNA sense strand
cacauuggcuguuuaguac

SEQ ID NO: 2144175 - RNA, 19 nt, Homo sapiens
  misc_RNA (1)...(19): siRNA sense strand
aagcuuauggguauaguua

SEQ ID NO: 2144176 - RNA, 19 nt, Homo sapiens
  misc_RNA (1)...(19): siRNA sense strand
aaggacacauucaucuuaa

SEQ ID NO: 2144177 - RNA, 19 nt, Homo sapiens
  misc_RNA (1)...(19): siRNA sense strand
gggagagcuuggagauauu

SEQ ID NO: 2144178 - RNA, 19 nt, Homo sapiens
  misc_RNA (1)...(19): siRNA sense strand
gcuuauggguauaguuaau

SEQ ID NO: 2144179 - RNA, 19 nt, Homo sapiens
  misc_RNA (1)...(19): siRNA sense strand
gaucaaggacacauucauc

SEQ ID NO: 2144180 - RNA, 19 nt, Homo sapiens
  misc_RNA (1)...(19): siRNA sense strand
caugggugaugaacuagaa

SEQ ID NO: 2144181 - RNA, 19 nt, Homo sapiens
  misc_RNA (1)...(19): siRNA sense strand
ggacacauucaucuuaaca

SEQ ID NO: 2144182 - RNA, 19 nt, Homo sapiens
  misc_RNA (1)...(19): siRNA sense strand
ggagagcuuggagauauuu

SEQ ID NO: 2144183 - RNA, 19 nt, Homo sapiens
  misc_RNA (1)...(19): siRNA sense strand
agauaaacaugggugauga

SEQ ID NO: 2144184 - RNA, 19 nt, Homo sapiens
  misc_RNA (1)...(19): siRNA sense strand
gagauaaacaugggugaug

SEQ ID NO: 2144185 - RNA, 19 nt, Homo sapiens
  misc_RNA (1)...(19): siRNA sense strand
gaaacgcaccggcauucga

SEQ ID NO: 2144186 - RNA, 19 nt, Homo sapiens
  misc_RNA (1)...(19): siRNA sense strand
gcuuggagauauuuaugau

SEQ ID NO: 2144187 - RNA, 19 nt, Homo sapiens
  misc_RNA (1)...(19): siRNA sense strand
gauaaacaugggugaugaa

SEQ ID NO: 2144188 - RNA, 19 nt, Homo sapiens
  misc_RNA (1)...(19): siRNA sense strand
gcggagcuccuucgcuauu

SEQ ID NO: 2144189 - RNA, 19 nt, Homo sapiens
  misc_RNA (1)...(19): siRNA sense strand
gagcuuggagauauuuaug

SEQ ID NO: 2144190 - RNA, 19 nt, Homo sapiens
  misc_RNA (1)...(19): siRNA sense strand
gaugaucaaggacacauuc

SEQ ID NO: 2144191 - RNA, 19 nt, Homo sapiens
  misc_RNA (1)...(19): siRNA sense strand
uggcaaaccauggagauaa

SEQ ID NO: 2144192 - RNA, 19 nt, Homo sapiens
  misc_RNA (1)...(19): siRNA sense strand
gcaccggcauucgagaaca

SEQ ID NO: 2144193 - RNA, 19 nt, Homo sapiens
  misc_RNA (1)...(19): siRNA sense strand
ugaagccgauuuuguuauu

SEQ ID NO: 2144194 - RNA, 19 nt, Homo sapiens
  misc_RNA (1)...(19): siRNA sense strand
ggugaugaacuagaauuug

SEQ ID NO: 2144195 - RNA, 19 nt, Homo sapiens
  misc_RNA (1)...(19): siRNA sense strand
gcugagcaguggcaaacca

SEQ ID NO: 2144196 - RNA, 19 nt, Homo sapiens
  misc_RNA (1)...(19): siRNA sense strand
gagagcuuggagauauuua

SEQ ID NO: 2144197 - RNA, 19 nt, Homo sapiens
  misc_RNA (1)...(19): siRNA sense strand
cugaagaaguuacagaaaa

SEQ ID NO: 2144198 - RNA, 19 nt, Homo sapiens
  misc_RNA (1)...(19): siRNA sense strand
cccgcuaccuuaacaggaa

SEQ ID NO: 2144199 - RNA, 19 nt, Homo sapiens
  misc_RNA (1)...(19): siRNA sense strand
gggugaugaacuagaauuu

SEQ ID NO: 2144200 - RNA, 19 nt, Homo sapiens
  misc_RNA (1)...(19): siRNA sense strand
ggagcuccuucgcuauucu

SEQ ID NO: 2144201 - RNA, 19 nt, Homo sapiens
  misc_RNA (1)...(19): siRNA sense strand
ucaaggacacauucaucuu

SEQ ID NO: 2144202 - RNA, 19 nt, Homo sapiens
  misc_RNA (1)...(19): siRNA sense strand
cuccuucgcuauucugaga

SEQ ID NO: 2144203 - RNA, 19 nt, Homo sapiens
  misc_RNA (1)...(19): siRNA sense strand
gaagccgauuuuguuauuu

SEQ ID NO: 2144204 - RNA, 19 nt, Homo sapiens
  misc_RNA (1)...(19): siRNA sense strand
uaacauugaagccgauuuu

SEQ ID NO: 2144205 - RNA, 19 nt, Homo sapiens
  misc_RNA (1)...(19): siRNA sense strand
uccuaaaccugagcaguug

SEQ ID NO: 2144206 - RNA, 19 nt, Homo sapiens
  misc_RNA (1)...(19): siRNA sense strand
gaagcuuauggguauaguu

SEQ ID NO: 2144207 - RNA, 19 nt, Homo sapiens
  misc_RNA (1)...(19): siRNA sense strand
cacauucaucuuaacauug

SEQ ID NO: 2144208 - RNA, 19 nt, Homo sapiens
  misc_RNA (1)...(19): siRNA sense strand
ggagauaaacaugggugau

SEQ ID NO: 2144209 - RNA, 19 nt, Homo sapiens
  misc_RNA (1)...(19): siRNA sense strand
ugaacagucgcuacucaug

SEQ ID NO: 2144210 - RNA, 19 nt, Homo sapiens
  misc_RNA (1)...(19): siRNA sense strand
cauuggcuguuuaguacau

SEQ ID NO: 2144211 - RNA, 19 nt, Homo sapiens
  misc_RNA (1)...(19): siRNA sense strand
gaaguggacagugguacca

SEQ ID NO: 2144212 - RNA, 19 nt, Homo sapiens
  misc_RNA (1)...(19): siRNA sense strand
gugucccuauugcauauga

SEQ ID NO: 2144213 - RNA, 19 nt, Homo sapiens
  misc_RNA (1)...(19): siRNA sense strand
caggaaacgcaccggcauu

SEQ ID NO: 2144214 - RNA, 19 nt, Homo sapiens
  misc_RNA (1)...(19): siRNA sense strand
caaaccauggagauaaaca

SEQ ID NO: 2144215 - RNA, 19 nt, Homo sapiens
  misc_RNA (1)...(19): siRNA sense strand
ccuauugcauaugauaaca

SEQ ID NO: 2144216 - RNA, 19 nt, Homo sapiens
  misc_RNA (1)...(19): siRNA sense strand
ccgcuaccuuaacaggaaa

SEQ ID NO: 2144217 - RNA, 19 nt, Homo sapiens
  misc_RNA (1)...(19): siRNA sense strand
cguccugccuugccuagag

SEQ ID NO: 2144218 - RNA, 19 nt, Homo sapiens
  misc_RNA (1)...(19): siRNA sense strand
ugacauaacucaacuaaga

SEQ ID NO: 2144219 - RNA, 19 nt, Homo sapiens
  misc_RNA (1)...(19): siRNA sense strand
caccauagcuugcaaagua

SEQ ID NO: 2144220 - RNA, 19 nt, Homo sapiens
  misc_RNA (1)...(19): siRNA sense strand
ugacagaaaugguguguuu

SEQ ID NO: 2144221 - RNA, 19 nt, Homo sapiens
  misc_RNA (1)...(19): siRNA sense strand
caaggaaguuucuguauga

SEQ ID NO: 2144222 - RNA, 19 nt, Homo sapiens
  misc_RNA (1)...(19): siRNA sense strand
ggaagcaggugaaguaguu

SEQ ID NO: 2144223 - RNA, 19 nt, Homo sapiens
  misc_RNA (1)...(19): siRNA sense strand
gcacaguucucuaucacua

SEQ ID NO: 2144224 - RNA, 19 nt, Homo sapiens
  misc_RNA (1)...(19): siRNA sense strand
gagaugcacuuguuugauu

SEQ ID NO: 2144225 - RNA, 19 nt, Homo sapiens
  misc_RNA (1)...(19): siRNA sense strand
aaacauaucuccaguugug

SEQ ID NO: 2144226 - RNA, 19 nt, Homo sapiens
  misc_RNA (1)...(19): siRNA sense strand
gaaauaacaggaagagaaa

SEQ ID NO: 2144227 - RNA, 19 nt, Homo sapiens
  misc_RNA (1)...(19): siRNA sense strand
ggagaaaggaaagaaauua

SEQ ID NO: 2144228 - RNA, 19 nt, Homo sapiens
  misc_RNA (1)...(19): siRNA sense strand
aaucaagucugcuccuuua

SEQ ID NO: 2144229 - RNA, 19 nt, Homo sapiens
  misc_RNA (1)...(19): siRNA sense strand
gcacaugcccaucagagua

SEQ ID NO: 2144230 - RNA, 19 nt, Homo sapiens
  misc_RNA (1)...(19): siRNA sense strand
gaaagaaugguauguagga

SEQ ID NO: 2144231 - RNA, 19 nt, Homo sapiens
  misc_RNA (1)...(19): siRNA sense strand
ugacaagccacaagauuua

SEQ ID NO: 2144232 - RNA, 19 nt, Homo sapiens
  misc_RNA (1)...(19): siRNA sense strand
ggaagaauugcacaaagua

SEQ ID NO: 2144233 - RNA, 19 nt, Homo sapiens
  misc_RNA (1)...(19): siRNA sense strand
caggacagcuuacaauuuc

SEQ ID NO: 2144234 - RNA, 19 nt, Homo sapiens
  misc_RNA (1)...(19): siRNA sense strand
gguaauguaucuagugguu

SEQ ID NO: 2144235 - RNA, 19 nt, Homo sapiens
  misc_RNA (1)...(19): siRNA sense strand
uagcugauguccuggguua

SEQ ID NO: 2144236 - RNA, 19 nt, Homo sapiens
  misc_RNA (1)...(19): siRNA sense strand
ggaaaccugccuaugauuu

SEQ ID NO: 2144237 - RNA, 19 nt, Homo sapiens
  misc_RNA (1)...(19): siRNA sense strand
caaauuugauugacaugga

SEQ ID NO: 2144238 - RNA, 19 nt, Homo sapiens
  misc_RNA (1)...(19): siRNA sense strand
gacaaagcaagauugauua

SEQ ID NO: 2144239 - RNA, 19 nt, Homo sapiens
  misc_RNA (1)...(19): siRNA sense strand
acagagagaugcacuuguu

SEQ ID NO: 2144240 - RNA, 19 nt, Homo sapiens
  misc_RNA (1)...(19): siRNA sense strand
gaagcaaauuugauugaca

SEQ ID NO: 2144241 - RNA, 19 nt, Homo sapiens
  misc_RNA (1)...(19): siRNA sense strand
gauagugucuuuacaacca

SEQ ID NO: 2144242 - RNA, 19 nt, Homo sapiens
  misc_RNA (1)...(19): siRNA sense strand
caagauugauuacuuccuu

SEQ ID NO: 2144243 - RNA, 19 nt, Homo sapiens
  misc_RNA (1)...(19): siRNA sense strand
caaaguaaaccaucaagga

SEQ ID NO: 2144244 - RNA, 19 nt, Homo sapiens
  misc_RNA (1)...(19): siRNA sense strand
caagucugcuccuuuauca

SEQ ID NO: 2144245 - RNA, 19 nt, Homo sapiens
  misc_RNA (1)...(19): siRNA sense strand
gaaaucaagucugcuccuu

SEQ ID NO: 2144246 - RNA, 19 nt, Homo sapiens
  misc_RNA (1)...(19): siRNA sense strand
caaaggagcaaguaauguu

SEQ ID NO: 2144247 - RNA, 19 nt, Homo sapiens
  misc_RNA (1)...(19): siRNA sense strand
caaaguaugucugaagcaa

SEQ ID NO: 2144248 - RNA, 19 nt, Homo sapiens
  misc_RNA (1)...(19): siRNA sense strand
gccacaagauuuaaguauu

SEQ ID NO: 2144249 - RNA, 19 nt, Homo sapiens
  misc_RNA (1)...(19): siRNA sense strand
cagacuugcuucacaauug

SEQ ID NO: 2144250 - RNA, 19 nt, Homo sapiens
  misc_RNA (1)...(19): siRNA sense strand
gaagauugccacacagaga

SEQ ID NO: 2144251 - RNA, 19 nt, Homo sapiens
  misc_RNA (1)...(19): siRNA sense strand
gaaaauggauugccaagag

SEQ ID NO: 2144252 - RNA, 19 nt, Homo sapiens
  misc_RNA (1)...(19): siRNA sense strand
gcuaaucacugaaagaaaa

SEQ ID NO: 2144253 - RNA, 19 nt, Homo sapiens
  misc_RNA (1)...(19): siRNA sense strand
caaagaaucagagaaaguu

SEQ ID NO: 2144254 - RNA, 19 nt, Homo sapiens
  misc_RNA (1)...(19): siRNA sense strand
agacaaagaaucagagaaa

SEQ ID NO: 2144255 - RNA, 19 nt, Homo sapiens
  misc_RNA (1)...(19): siRNA sense strand
ugacuuauaucuacucagu

SEQ ID NO: 2144256 - RNA, 19 nt, Homo sapiens
  misc_RNA (1)...(19): siRNA sense strand
agacaaagcaagauugauu

SEQ ID NO: 2144257 - RNA, 19 nt, Homo sapiens
  misc_RNA (1)...(19): siRNA sense strand
gaucuuucgugcacuguga

SEQ ID NO: 2144258 - RNA, 19 nt, Homo sapiens
  misc_RNA (1)...(19): siRNA sense strand
aaaggaagauugccacaca

SEQ ID NO: 2144259 - RNA, 19 nt, Homo sapiens
  misc_RNA (1)...(19): siRNA sense strand
guaauaaugcuuccaaagu

SEQ ID NO: 2144260 - RNA, 19 nt, Homo sapiens
  misc_RNA (1)...(19): siRNA sense strand
gaaggagaaaggaaagaaa

SEQ ID NO: 2144261 - RNA, 19 nt, Homo sapiens
  misc_RNA (1)...(19): siRNA sense strand
gaugacauaacucaacuaa

SEQ ID NO: 2144262 - RNA, 19 nt, Homo sapiens
  misc_RNA (1)...(19): siRNA sense strand
agaaauaacaggaagagaa

SEQ ID NO: 2144263 - RNA, 19 nt, Homo sapiens
  misc_RNA (1)...(19): siRNA sense strand
uauuguggcucuucugaaa

SEQ ID NO: 2144264 - RNA, 19 nt, Homo sapiens
  misc_RNA (1)...(19): siRNA sense strand
cagauuguccugccuuuaa

SEQ ID NO: 2144265 - RNA, 19 nt, Homo sapiens
  misc_RNA (1)...(19): siRNA sense strand
gcacaaaguaugucugaag

SEQ ID NO: 2144266 - RNA, 19 nt, Homo sapiens
  misc_RNA (1)...(19): siRNA sense strand
gaagaaggaggaaaucaag

SEQ ID NO: 2144267 - RNA, 19 nt, Homo sapiens
  misc_RNA (1)...(19): siRNA sense strand
cagcuuacaauuucugaua

SEQ ID NO: 2144268 - RNA, 19 nt, Homo sapiens
  misc_RNA (1)...(19): siRNA sense strand
gcuccugccuugauuugaa

SEQ ID NO: 2144269 - RNA, 19 nt, Homo sapiens
  misc_RNA (1)...(19): siRNA sense strand
cagacuuccucaagaaauu

SEQ ID NO: 2144270 - RNA, 19 nt, Homo sapiens
  misc_RNA (1)...(19): siRNA sense strand
gcaaguaauguuuauguca

SEQ ID NO: 2144271 - RNA, 19 nt, Homo sapiens
  misc_RNA (1)...(19): siRNA sense strand
gagcaaguaauguuuaugu

SEQ ID NO: 2144272 - RNA, 19 nt, Homo sapiens
  misc_RNA (1)...(19): siRNA sense strand
ucaaggugauuucaaagga

SEQ ID NO: 2144273 - RNA, 19 nt, Homo sapiens
  misc_RNA (1)...(19): siRNA sense strand
gugaaagaaugguauguag

SEQ ID NO: 2144274 - RNA, 19 nt, Homo sapiens
  misc_RNA (1)...(19): siRNA sense strand
guuggaagcaggugaagua

SEQ ID NO: 2144275 - RNA, 19 nt, Homo sapiens
  misc_RNA (1)...(19): siRNA sense strand
gcaacugcuacauuuauaa

SEQ ID NO: 2144276 - RNA, 19 nt, Homo sapiens
  misc_RNA (1)...(19): siRNA sense strand
uaugucagauagugucuuu

SEQ ID NO: 2144277 - RNA, 19 nt, Homo sapiens
  misc_RNA (1)...(19): siRNA sense strand
guggaaaccugccuaugau

SEQ ID NO: 2144278 - RNA, 19 nt, Homo sapiens
  misc_RNA (1)...(19): siRNA sense strand
acaaggaaguuucuguaug

SEQ ID NO: 2144279 - RNA, 19 nt, Homo sapiens
  misc_RNA (1)...(19): siRNA sense strand
gaaauucuggaagaucuaa

SEQ ID NO: 2144280 - RNA, 19 nt, Homo sapiens
  misc_RNA (1)...(19): siRNA sense strand
uaacugcauucuccacuuc

SEQ ID NO: 2144281 - RNA, 19 nt, Homo sapiens
  misc_RNA (1)...(19): siRNA sense strand
ggagggaacuagcugaaaa

SEQ ID NO: 2144282 - RNA, 19 nt, Homo sapiens
  misc_RNA (1)...(19): siRNA sense strand
gagguaagauuggacuugu

SEQ ID NO: 2144283 - RNA, 19 nt, Homo sapiens
  misc_RNA (1)...(19): siRNA sense strand
gagagaugcacuuguuuga

SEQ ID NO: 2144284 - RNA, 19 nt, Homo sapiens
  misc_RNA (1)...(19): siRNA sense strand
gcacagagagaugcacuug

SEQ ID NO: 2144285 - RNA, 19 nt, Homo sapiens
  misc_RNA (1)...(19): siRNA sense strand
ccaggacagcuuacaauuu

SEQ ID NO: 2144286 - RNA, 19 nt, Homo sapiens
  misc_RNA (1)...(19): siRNA sense strand
caaccucaauacaauggaa

SEQ ID NO: 2144287 - RNA, 19 nt, Homo sapiens
  misc_RNA (1)...(19): siRNA sense strand
gauccuacuacacgacuua

SEQ ID NO: 2144288 - RNA, 19 nt, Homo sapiens
  misc_RNA (1)...(19): siRNA sense strand
acaauuggccggaugcuuu

SEQ ID NO: 2144289 - RNA, 19 nt, Homo sapiens
  misc_RNA (1)...(19): siRNA sense strand
gaagaauugcacaaaguau

SEQ ID NO: 2144290 - RNA, 19 nt, Homo sapiens
  misc_RNA (1)...(19): siRNA sense strand
caaauggaggcauaugaaa

SEQ ID NO: 2144291 - RNA, 19 nt, Homo sapiens
  misc_RNA (1)...(19): siRNA sense strand
aaucagacaucacuguuca

SEQ ID NO: 2144292 - RNA, 19 nt, Homo sapiens
  misc_RNA (1)...(19): siRNA sense strand
guaaauucuuuggagguuu

SEQ ID NO: 2144293 - RNA, 19 nt, Homo sapiens
  misc_RNA (1)...(19): siRNA sense strand
uaaacacuggagagaauua

SEQ ID NO: 2144294 - RNA, 19 nt, Homo sapiens
  misc_RNA (1)...(19): siRNA sense strand
ucacaaagcaacaaaugga

SEQ ID NO: 2144295 - RNA, 19 nt, Homo sapiens
  misc_RNA (1)...(19): siRNA sense strand
aauaaugcuuccaaaguug

SEQ ID NO: 2144296 - RNA, 19 nt, Homo sapiens
  misc_RNA (1)...(19): siRNA sense strand
ucagucagcuuuggacaga

SEQ ID NO: 2144297 - RNA, 19 nt, Homo sapiens
  misc_RNA (1)...(19): siRNA sense strand
caaggagggucaguacaau

SEQ ID NO: 2144298 - RNA, 19 nt, Homo sapiens
  misc_RNA (1)...(19): siRNA sense strand
gaaaauuggggcugaagua

SEQ ID NO: 2144299 - RNA, 19 nt, Homo sapiens
  misc_RNA (1)...(19): siRNA sense strand
uaaaauggcuugguuaagu

SEQ ID NO: 2144300 - RNA, 19 nt, Homo sapiens
  misc_RNA (1)...(19): siRNA sense strand
guaacugcauucuccacuu

SEQ ID NO: 2144301 - RNA, 19 nt, Homo sapiens
  misc_RNA (1)...(19): siRNA sense strand
acuaaacacuggagagaau

SEQ ID NO: 2144302 - RNA, 19 nt, Homo sapiens
  misc_RNA (1)...(19): siRNA sense strand
uaagacaaagcaagauuga

SEQ ID NO: 2144303 - RNA, 19 nt, Homo sapiens
  misc_RNA (1)...(19): siRNA sense strand
gacagaaggagaaaggaaa

SEQ ID NO: 2144304 - RNA, 19 nt, Homo sapiens
  misc_RNA (1)...(19): siRNA sense strand
gcuaagacaaagcaagauu

SEQ ID NO: 2144305 - RNA, 19 nt, Homo sapiens
  misc_RNA (1)...(19): siRNA sense strand
uaggcaaccucaauacaau

SEQ ID NO: 2144306 - RNA, 19 nt, Homo sapiens
  misc_RNA (1)...(19): siRNA sense strand
gcccaucagaguauacaua

SEQ ID NO: 2144307 - RNA, 19 nt, Homo sapiens
  misc_RNA (1)...(19): siRNA sense strand
gaaguuaaaggaagauugc

SEQ ID NO: 2144308 - RNA, 19 nt, Homo sapiens
  misc_RNA (1)...(19): siRNA sense strand
guugcaauauuacagaaug

SEQ ID NO: 2144309 - RNA, 19 nt, Homo sapiens
  misc_RNA (1)...(19): siRNA sense strand
cgacuuagaguggcuuaaa

SEQ ID NO: 2144310 - RNA, 19 nt, Homo sapiens
  misc_RNA (1)...(19): siRNA sense strand
aaauauauccaucccaguu

SEQ ID NO: 2144311 - RNA, 19 nt, Homo sapiens
  misc_RNA (1)...(19): siRNA sense strand
gaacuuauuguggcucuuc

SEQ ID NO: 2144312 - RNA, 19 nt, Homo sapiens
  misc_RNA (1)...(19): siRNA sense strand
acuuauaucuacucaguug

SEQ ID NO: 2144313 - RNA, 19 nt, Homo sapiens
  misc_RNA (1)...(19): siRNA sense strand
caaagugaaagaaugguau

SEQ ID NO: 2144314 - RNA, 19 nt, Homo sapiens
  misc_RNA (1)...(19): siRNA sense strand
gacccagacuugcuucaca

SEQ ID NO: 2144315 - RNA, 19 nt, Homo sapiens
  misc_RNA (1)...(19): siRNA sense strand
gcacgucucauccaagaag

SEQ ID NO: 2144316 - RNA, 19 nt, Homo sapiens
  misc_RNA (1)...(19): siRNA sense strand
gacaaagaaucagagaaag

SEQ ID NO: 2144317 - RNA, 19 nt, Homo sapiens
  misc_RNA (1)...(19): siRNA sense strand
ucagauagugucuuuacaa

SEQ ID NO: 2144318 - RNA, 19 nt, Homo sapiens
  misc_RNA (1)...(19): siRNA sense strand
ugacauaacucaacuaaga

SEQ ID NO: 2144319 - RNA, 19 nt, Homo sapiens
  misc_RNA (1)...(19): siRNA sense strand
caccauagcuugcaaagua

SEQ ID NO: 2144320 - RNA, 19 nt, Homo sapiens
  misc_RNA (1)...(19): siRNA sense strand
ugacagaaaugguguguuu

SEQ ID NO: 2144321 - RNA, 19 nt, Homo sapiens
  misc_RNA (1)...(19): siRNA sense strand
caaggaaguuucuguauga

SEQ ID NO: 2144322 - RNA, 19 nt, Homo sapiens
  misc_RNA (1)...(19): siRNA sense strand
ggaagcaggugaaguaguu

SEQ ID NO: 2144323 - RNA, 19 nt, Homo sapiens
  misc_RNA (1)...(19): siRNA sense strand
gcacaguucucuaucacua

SEQ ID NO: 2144324 - RNA, 19 nt, Homo sapiens
  misc_RNA (1)...(19): siRNA sense strand
gagaugcacuuguuugauu

SEQ ID NO: 2144325 - RNA, 19 nt, Homo sapiens
  misc_RNA (1)...(19): siRNA sense strand
aaacauaucuccaguugug

SEQ ID NO: 2144326 - RNA, 19 nt, Homo sapiens
  misc_RNA (1)...(19): siRNA sense strand
gaaauaacaggaagagaaa

SEQ ID NO: 2144327 - RNA, 19 nt, Homo sapiens
  misc_RNA (1)...(19): siRNA sense strand
ggagaaaggaaagaaauua

SEQ ID NO: 2144328 - RNA, 19 nt, Homo sapiens
  misc_RNA (1)...(19): siRNA sense strand
aaucaagucugcuccuuua

SEQ ID NO: 2144329 - RNA, 19 nt, Homo sapiens
  misc_RNA (1)...(19): siRNA sense strand
gcacaugcccaucagagua

SEQ ID NO: 2144330 - RNA, 19 nt, Homo sapiens
  misc_RNA (1)...(19): siRNA sense strand
gaaagaaugguauguagga

SEQ ID NO: 2144331 - RNA, 19 nt, Homo sapiens
  misc_RNA (1)...(19): siRNA sense strand
ugacaagccacaagauuua

SEQ ID NO: 2144332 - RNA, 19 nt, Homo sapiens
  misc_RNA (1)...(19): siRNA sense strand
ggaagaauugcacaaagua

SEQ ID NO: 2144333 - RNA, 19 nt, Homo sapiens
  misc_RNA (1)...(19): siRNA sense strand
caggacagcuuacaauuuc

SEQ ID NO: 2144334 - RNA, 19 nt, Homo sapiens
  misc_RNA (1)...(19): siRNA sense strand
gguaauguaucuagugguu

SEQ ID NO: 2144335 - RNA, 19 nt, Homo sapiens
  misc_RNA (1)...(19): siRNA sense strand
uagcugauguccuggguua

SEQ ID NO: 2144336 - RNA, 19 nt, Homo sapiens
  misc_RNA (1)...(19): siRNA sense strand
ggaaaccugccuaugauuu

SEQ ID NO: 2144337 - RNA, 19 nt, Homo sapiens
  misc_RNA (1)...(19): siRNA sense strand
caaauuugauugacaugga

SEQ ID NO: 2144338 - RNA, 19 nt, Homo sapiens
  misc_RNA (1)...(19): siRNA sense strand
gacaaagcaagauugauua

SEQ ID NO: 2144339 - RNA, 19 nt, Homo sapiens
  misc_RNA (1)...(19): siRNA sense strand
acagagagaugcacuuguu

SEQ ID NO: 2144340 - RNA, 19 nt, Homo sapiens
  misc_RNA (1)...(19): siRNA sense strand
gaagcaaauuugauugaca

SEQ ID NO: 2144341 - RNA, 19 nt, Homo sapiens
  misc_RNA (1)...(19): siRNA sense strand
gauagugucuuuacaacca

SEQ ID NO: 2144342 - RNA, 19 nt, Homo sapiens
  misc_RNA (1)...(19): siRNA sense strand
caagauugauuacuuccuu

SEQ ID NO: 2144343 - RNA, 19 nt, Homo sapiens
  misc_RNA (1)...(19): siRNA sense strand
caaaguaaaccaucaagga

SEQ ID NO: 2144344 - RNA, 19 nt, Homo sapiens
  misc_RNA (1)...(19): siRNA sense strand
caagucugcuccuuuauca

SEQ ID NO: 2144345 - RNA, 19 nt, Homo sapiens
  misc_RNA (1)...(19): siRNA sense strand
gaaaucaagucugcuccuu

SEQ ID NO: 2144346 - RNA, 19 nt, Homo sapiens
  misc_RNA (1)...(19): siRNA sense strand
caaaggagcaaguaauguu

SEQ ID NO: 2144347 - RNA, 19 nt, Homo sapiens
  misc_RNA (1)...(19): siRNA sense strand
caaaguaugucugaagcaa

SEQ ID NO: 2144348 - RNA, 19 nt, Homo sapiens
  misc_RNA (1)...(19): siRNA sense strand
gccacaagauuuaaguauu

SEQ ID NO: 2144349 - RNA, 19 nt, Homo sapiens
  misc_RNA (1)...(19): siRNA sense strand
cagacuugcuucacaauug

SEQ ID NO: 2144350 - RNA, 19 nt, Homo sapiens
  misc_RNA (1)...(19): siRNA sense strand
gaagauugccacacagaga

SEQ ID NO: 2144351 - RNA, 19 nt, Homo sapiens
  misc_RNA (1)...(19): siRNA sense strand
gaaaauggauugccaagag

SEQ ID NO: 2144352 - RNA, 19 nt, Homo sapiens
  misc_RNA (1)...(19): siRNA sense strand
gcuaaucacugaaagaaaa

SEQ ID NO: 2144353 - RNA, 19 nt, Homo sapiens
  misc_RNA (1)...(19): siRNA sense strand
caaagaaucagagaaaguu

SEQ ID NO: 2144354 - RNA, 19 nt, Homo sapiens
  misc_RNA (1)...(19): siRNA sense strand
agacaaagaaucagagaaa

SEQ ID NO: 2144355 - RNA, 19 nt, Homo sapiens
  misc_RNA (1)...(19): siRNA sense strand
ugacuuauaucuacucagu

SEQ ID NO: 2144356 - RNA, 19 nt, Homo sapiens
  misc_RNA (1)...(19): siRNA sense strand
agacaaagcaagauugauu

SEQ ID NO: 2144357 - RNA, 19 nt, Homo sapiens
  misc_RNA (1)...(19): siRNA sense strand
gaucuuucgugcacuguga

SEQ ID NO: 2144358 - RNA, 19 nt, Homo sapiens
  misc_RNA (1)...(19): siRNA sense strand
aaaggaagauugccacaca

SEQ ID NO: 2144359 - RNA, 19 nt, Homo sapiens
  misc_RNA (1)...(19): siRNA sense strand
guaauaaugcuuccaaagu

SEQ ID NO: 2144360 - RNA, 19 nt, Homo sapiens
  misc_RNA (1)...(19): siRNA sense strand
gaaggagaaaggaaagaaa

SEQ ID NO: 2144361 - RNA, 19 nt, Homo sapiens
  misc_RNA (1)...(19): siRNA sense strand
gaugacauaacucaacuaa

SEQ ID NO: 2144362 - RNA, 19 nt, Homo sapiens
  misc_RNA (1)...(19): siRNA sense strand
agaaauaacaggaagagaa

SEQ ID NO: 2144363 - RNA, 19 nt, Homo sapiens
  misc_RNA (1)...(19): siRNA sense strand
uauuguggcucuucugaaa

SEQ ID NO: 2144364 - RNA, 19 nt, Homo sapiens
  misc_RNA (1)...(19): siRNA sense strand
cagauuguccugccuuuaa

SEQ ID NO: 2144365 - RNA, 19 nt, Homo sapiens
  misc_RNA (1)...(19): siRNA sense strand
gcacaaaguaugucugaag

SEQ ID NO: 2144366 - RNA, 19 nt, Homo sapiens
  misc_RNA (1)...(19): siRNA sense strand
gaagaaggaggaaaucaag

SEQ ID NO: 2144367 - RNA, 19 nt, Homo sapiens
  misc_RNA (1)...(19): siRNA sense strand
cagcuuacaauuucugaua

SEQ ID NO: 2144368 - RNA, 19 nt, Homo sapiens
  misc_RNA (1)...(19): siRNA sense strand
gcuccugccuugauuugaa

SEQ ID NO: 2144369 - RNA, 19 nt, Homo sapiens
  misc_RNA (1)...(19): siRNA sense strand
cagacuuccucaagaaauu

SEQ ID NO: 2144370 - RNA, 19 nt, Homo sapiens
  misc_RNA (1)...(19): siRNA sense strand
gcaaguaauguuuauguca

SEQ ID NO: 2144371 - RNA, 19 nt, Homo sapiens
  misc_RNA (1)...(19): siRNA sense strand
gagcaaguaauguuuaugu

SEQ ID NO: 2144372 - RNA, 19 nt, Homo sapiens
  misc_RNA (1)...(19): siRNA sense strand
ucaaggugauuucaaagga

SEQ ID NO: 2144373 - RNA, 19 nt, Homo sapiens
  misc_RNA (1)...(19): siRNA sense strand
gugaaagaaugguauguag

SEQ ID NO: 2144374 - RNA, 19 nt, Homo sapiens
  misc_RNA (1)...(19): siRNA sense strand
guuggaagcaggugaagua

SEQ ID NO: 2144375 - RNA, 19 nt, Homo sapiens
  misc_RNA (1)...(19): siRNA sense strand
gcaacugcuacauuuauaa

SEQ ID NO: 2144376 - RNA, 19 nt, Homo sapiens
  misc_RNA (1)...(19): siRNA sense strand
uaugucagauagugucuuu

SEQ ID NO: 2144377 - RNA, 19 nt, Homo sapiens
  misc_RNA (1)...(19): siRNA sense strand
guggaaaccugccuaugau

SEQ ID NO: 2144378 - RNA, 19 nt, Homo sapiens
  misc_RNA (1)...(19): siRNA sense strand
acaaggaaguuucuguaug

SEQ ID NO: 2144379 - RNA, 19 nt, Homo sapiens
  misc_RNA (1)...(19): siRNA sense strand
gaaauucuggaagaucuaa

SEQ ID NO: 2144380 - RNA, 19 nt, Homo sapiens
  misc_RNA (1)...(19): siRNA sense strand
uaacugcauucuccacuuc

SEQ ID NO: 2144381 - RNA, 19 nt, Homo sapiens
  misc_RNA (1)...(19): siRNA sense strand
ggagggaacuagcugaaaa

SEQ ID NO: 2144382 - RNA, 19 nt, Homo sapiens
  misc_RNA (1)...(19): siRNA sense strand
gagguaagauuggacuugu

SEQ ID NO: 2144383 - RNA, 19 nt, Homo sapiens
  misc_RNA (1)...(19): siRNA sense strand
gagagaugcacuuguuuga

SEQ ID NO: 2144384 - RNA, 19 nt, Homo sapiens
  misc_RNA (1)...(19): siRNA sense strand
gcacagagagaugcacuug

SEQ ID NO: 2144385 - RNA, 19 nt, Homo sapiens
  misc_RNA (1)...(19): siRNA sense strand
ccaggacagcuuacaauuu

SEQ ID NO: 2144386 - RNA, 19 nt, Homo sapiens
  misc_RNA (1)...(19): siRNA sense strand
caaccucaauacaauggaa

SEQ ID NO: 2144387 - RNA, 19 nt, Homo sapiens
  misc_RNA (1)...(19): siRNA sense strand
gauccuacuacacgacuua

SEQ ID NO: 2144388 - RNA, 19 nt, Homo sapiens
  misc_RNA (1)...(19): siRNA sense strand
acaauuggccggaugcuuu

SEQ ID NO: 2144389 - RNA, 19 nt, Homo sapiens
  misc_RNA (1)...(19): siRNA sense strand
gaagaauugcacaaaguau

SEQ ID NO: 2144390 - RNA, 19 nt, Homo sapiens
  misc_RNA (1)...(19): siRNA sense strand
caaauggaggcauaugaaa

SEQ ID NO: 2144391 - RNA, 19 nt, Homo sapiens
  misc_RNA (1)...(19): siRNA sense strand
aaucagacaucacuguuca

SEQ ID NO: 2144392 - RNA, 19 nt, Homo sapiens
  misc_RNA (1)...(19): siRNA sense strand
guaaauucuuuggagguuu

SEQ ID NO: 2144393 - RNA, 19 nt, Homo sapiens
  misc_RNA (1)...(19): siRNA sense strand
uaaacacuggagagaauua

SEQ ID NO: 2144394 - RNA, 19 nt, Homo sapiens
  misc_RNA (1)...(19): siRNA sense strand
ucacaaagcaacaaaugga

SEQ ID NO: 2144395 - RNA, 19 nt, Homo sapiens
  misc_RNA (1)...(19): siRNA sense strand
aauaaugcuuccaaaguug

SEQ ID NO: 2144396 - RNA, 19 nt, Homo sapiens
  misc_RNA (1)...(19): siRNA sense strand
ucagucagcuuuggacaga

SEQ ID NO: 2144397 - RNA, 19 nt, Homo sapiens
  misc_RNA (1)...(19): siRNA sense strand
caaggagggucaguacaau

SEQ ID NO: 2144398 - RNA, 19 nt, Homo sapiens
  misc_RNA (1)...(19): siRNA sense strand
gaaaauuggggcugaagua

SEQ ID NO: 2144399 - RNA, 19 nt, Homo sapiens
  misc_RNA (1)...(19): siRNA sense strand
uaaaauggcuugguuaagu

SEQ ID NO: 2144400 - RNA, 19 nt, Homo sapiens
  misc_RNA (1)...(19): siRNA sense strand
guaacugcauucuccacuu

SEQ ID NO: 2144401 - RNA, 19 nt, Homo sapiens
  misc_RNA (1)...(19): siRNA sense strand
acuaaacacuggagagaau

SEQ ID NO: 2144402 - RNA, 19 nt, Homo sapiens
  misc_RNA (1)...(19): siRNA sense strand
uaagacaaagcaagauuga

SEQ ID NO: 2144403 - RNA, 19 nt, Homo sapiens
  misc_RNA (1)...(19): siRNA sense strand
gacagaaggagaaaggaaa

SEQ ID NO: 2144404 - RNA, 19 nt, Homo sapiens
  misc_RNA (1)...(19): siRNA sense strand
gcuaagacaaagcaagauu

SEQ ID NO: 2144405 - RNA, 19 nt, Homo sapiens
  misc_RNA (1)...(19): siRNA sense strand
uaggcaaccucaauacaau

SEQ ID NO: 2144406 - RNA, 19 nt, Homo sapiens
  misc_RNA (1)...(19): siRNA sense strand
gcccaucagaguauacaua

SEQ ID NO: 2144407 - RNA, 19 nt, Homo sapiens
  misc_RNA (1)...(19): siRNA sense strand
gaaguuaaaggaagauugc

SEQ ID NO: 2144408 - RNA, 19 nt, Homo sapiens
  misc_RNA (1)...(19): siRNA sense strand
guugcaauauuacagaaug

SEQ ID NO: 2144409 - RNA, 19 nt, Homo sapiens
  misc_RNA (1)...(19): siRNA sense strand
cgacuuagaguggcuuaaa

SEQ ID NO: 2144410 - RNA, 19 nt, Homo sapiens
  misc_RNA (1)...(19): siRNA sense strand
aaauauauccaucccaguu

SEQ ID NO: 2144411 - RNA, 19 nt, Homo sapiens
  misc_RNA (1)...(19): siRNA sense strand
gaacuuauuguggcucuuc

SEQ ID NO: 2144412 - RNA, 19 nt, Homo sapiens
  misc_RNA (1)...(19): siRNA sense strand
acuuauaucuacucaguug

SEQ ID NO: 2144413 - RNA, 19 nt, Homo sapiens
  misc_RNA (1)...(19): siRNA sense strand
caaagugaaagaaugguau

SEQ ID NO: 2144414 - RNA, 19 nt, Homo sapiens
  misc_RNA (1)...(19): siRNA sense strand
gacccagacuugcuucaca

SEQ ID NO: 2144415 - RNA, 19 nt, Homo sapiens
  misc_RNA (1)...(19): siRNA sense strand
gcacgucucauccaagaag

SEQ ID NO: 2144416 - RNA, 19 nt, Homo sapiens
  misc_RNA (1)...(19): siRNA sense strand
gacaaagaaucagagaaag

SEQ ID NO: 2144417 - RNA, 19 nt, Homo sapiens
  misc_RNA (1)...(19): siRNA sense strand
ucagauagugucuuuacaa

SEQ ID NO: 2144418 - RNA, 19 nt, Homo sapiens
  misc_RNA (1)...(19): siRNA sense strand
ugacauaacucaacuaaga

SEQ ID NO: 2144419 - RNA, 19 nt, Homo sapiens
  misc_RNA (1)...(19): siRNA sense strand
caccauagcuugcaaagua

SEQ ID NO: 2144420 - RNA, 19 nt, Homo sapiens
  misc_RNA (1)...(19): siRNA sense strand
ugacagaaaugguguguuu

SEQ ID NO: 2144421 - RNA, 19 nt, Homo sapiens
  misc_RNA (1)...(19): siRNA sense strand
caaggaaguuucuguauga

SEQ ID NO: 2144422 - RNA, 19 nt, Homo sapiens
  misc_RNA (1)...(19): siRNA sense strand
ggaagcaggugaaguaguu

SEQ ID NO: 2144423 - RNA, 19 nt, Homo sapiens
  misc_RNA (1)...(19): siRNA sense strand
gcacaguucucuaucacua

SEQ ID NO: 2144424 - RNA, 19 nt, Homo sapiens
  misc_RNA (1)...(19): siRNA sense strand
gagaugcacuuguuugauu

SEQ ID NO: 2144425 - RNA, 19 nt, Homo sapiens
  misc_RNA (1)...(19): siRNA sense strand
aaacauaucuccaguugug

SEQ ID NO: 2144426 - RNA, 19 nt, Homo sapiens
  misc_RNA (1)...(19): siRNA sense strand
gaaauaacaggaagagaaa

SEQ ID NO: 2144427 - RNA, 19 nt, Homo sapiens
  misc_RNA (1)...(19): siRNA sense strand
ggagaaaggaaagaaauua

SEQ ID NO: 2144428 - RNA, 19 nt, Homo sapiens
  misc_RNA (1)...(19): siRNA sense strand
aaucaagucugcuccuuua

SEQ ID NO: 2144429 - RNA, 19 nt, Homo sapiens
  misc_RNA (1)...(19): siRNA sense strand
gcacaugcccaucagagua

SEQ ID NO: 2144430 - RNA, 19 nt, Homo sapiens
  misc_RNA (1)...(19): siRNA sense strand
gaaagaaugguauguagga

SEQ ID NO: 2144431 - RNA, 19 nt, Homo sapiens
  misc_RNA (1)...(19): siRNA sense strand
ugacaagccacaagauuua

SEQ ID NO: 2144432 - RNA, 19 nt, Homo sapiens
  misc_RNA (1)...(19): siRNA sense strand
ggaagaauugcacaaagua

SEQ ID NO: 2144433 - RNA, 19 nt, Homo sapiens
  misc_RNA (1)...(19): siRNA sense strand
caggacagcuuacaauuuc

SEQ ID NO: 2144434 - RNA, 19 nt, Homo sapiens
  misc_RNA (1)...(19): siRNA sense strand
gguaauguaucuagugguu

SEQ ID NO: 2144435 - RNA, 19 nt, Homo sapiens
  misc_RNA (1)...(19): siRNA sense strand
uagcugauguccuggguua

SEQ ID NO: 2144436 - RNA, 19 nt, Homo sapiens
  misc_RNA (1)...(19): siRNA sense strand
ggaaaccugccuaugauuu

SEQ ID NO: 2144437 - RNA, 19 nt, Homo sapiens
  misc_RNA (1)...(19): siRNA sense strand
caaauuugauugacaugga

SEQ ID NO: 2144438 - RNA, 19 nt, Homo sapiens
  misc_RNA (1)...(19): siRNA sense strand
gacaaagcaagauugauua

SEQ ID NO: 2144439 - RNA, 19 nt, Homo sapiens
  misc_RNA (1)...(19): siRNA sense strand
acagagagaugcacuuguu

SEQ ID NO: 2144440 - RNA, 19 nt, Homo sapiens
  misc_RNA (1)...(19): siRNA sense strand
gaagcaaauuugauugaca

SEQ ID NO: 2144441 - RNA, 19 nt, Homo sapiens
  misc_RNA (1)...(19): siRNA sense strand
gauagugucuuuacaacca

SEQ ID NO: 2144442 - RNA, 19 nt, Homo sapiens
  misc_RNA (1)...(19): siRNA sense strand
caagauugauuacuuccuu

SEQ ID NO: 2144443 - RNA, 19 nt, Homo sapiens
  misc_RNA (1)...(19): siRNA sense strand
caaaguaaaccaucaagga

SEQ ID NO: 2144444 - RNA, 19 nt, Homo sapiens
  misc_RNA (1)...(19): siRNA sense strand
caagucugcuccuuuauca

SEQ ID NO: 2144445 - RNA, 19 nt, Homo sapiens
  misc_RNA (1)...(19): siRNA sense strand
gaaaucaagucugcuccuu

SEQ ID NO: 2144446 - RNA, 19 nt, Homo sapiens
  misc_RNA (1)...(19): siRNA sense strand
caaaggagcaaguaauguu

SEQ ID NO: 2144447 - RNA, 19 nt, Homo sapiens
  misc_RNA (1)...(19): siRNA sense strand
caaaguaugucugaagcaa

SEQ ID NO: 2144448 - RNA, 19 nt, Homo sapiens
  misc_RNA (1)...(19): siRNA sense strand
gccacaagauuuaaguauu

SEQ ID NO: 2144449 - RNA, 19 nt, Homo sapiens
  misc_RNA (1)...(19): siRNA sense strand
cagacuugcuucacaauug

SEQ ID NO: 2144450 - RNA, 19 nt, Homo sapiens
  misc_RNA (1)...(19): siRNA sense strand
gaagauugccacacagaga

SEQ ID NO: 2144451 - RNA, 19 nt, Homo sapiens
  misc_RNA (1)...(19): siRNA sense strand
gaaaauggauugccaagag

SEQ ID NO: 2144452 - RNA, 19 nt, Homo sapiens
  misc_RNA (1)...(19): siRNA sense strand
gcuaaucacugaaagaaaa

SEQ ID NO: 2144453 - RNA, 19 nt, Homo sapiens
  misc_RNA (1)...(19): siRNA sense strand
caaagaaucagagaaaguu

SEQ ID NO: 2144454 - RNA, 19 nt, Homo sapiens
  misc_RNA (1)...(19): siRNA sense strand
agacaaagaaucagagaaa

SEQ ID NO: 2144455 - RNA, 19 nt, Homo sapiens
  misc_RNA (1)...(19): siRNA sense strand
ugacuuauaucuacucagu

SEQ ID NO: 2144456 - RNA, 19 nt, Homo sapiens
  misc_RNA (1)...(19): siRNA sense strand
agacaaagcaagauugauu

SEQ ID NO: 2144457 - RNA, 19 nt, Homo sapiens
  misc_RNA (1)...(19): siRNA sense strand
gaucuuucgugcacuguga

SEQ ID NO: 2144458 - RNA, 19 nt, Homo sapiens
  misc_RNA (1)...(19): siRNA sense strand
aaaggaagauugccacaca

SEQ ID NO: 2144459 - RNA, 19 nt, Homo sapiens
  misc_RNA (1)...(19): siRNA sense strand
guaauaaugcuuccaaagu

SEQ ID NO: 2144460 - RNA, 19 nt, Homo sapiens
  misc_RNA (1)...(19): siRNA sense strand
gaaggagaaaggaaagaaa

SEQ ID NO: 2144461 - RNA, 19 nt, Homo sapiens
  misc_RNA (1)...(19): siRNA sense strand
gaugacauaacucaacuaa

SEQ ID NO: 2144462 - RNA, 19 nt, Homo sapiens
  misc_RNA (1)...(19): siRNA sense strand
agaaauaacaggaagagaa

SEQ ID NO: 2144463 - RNA, 19 nt, Homo sapiens
  misc_RNA (1)...(19): siRNA sense strand
uauuguggcucuucugaaa

SEQ ID NO: 2144464 - RNA, 19 nt, Homo sapiens
  misc_RNA (1)...(19): siRNA sense strand
cagauuguccugccuuuaa

SEQ ID NO: 2144465 - RNA, 19 nt, Homo sapiens
  misc_RNA (1)...(19): siRNA sense strand
gcacaaaguaugucugaag

SEQ ID NO: 2144466 - RNA, 19 nt, Homo sapiens
  misc_RNA (1)...(19): siRNA sense strand
gaagaaggaggaaaucaag

SEQ ID NO: 2144467 - RNA, 19 nt, Homo sapiens
  misc_RNA (1)...(19): siRNA sense strand
cagcuuacaauuucugaua

SEQ ID NO: 2144468 - RNA, 19 nt, Homo sapiens
  misc_RNA (1)...(19): siRNA sense strand
gcuccugccuugauuugaa

SEQ ID NO: 2144469 - RNA, 19 nt, Homo sapiens
  misc_RNA (1)...(19): siRNA sense strand
cagacuuccucaagaaauu

SEQ ID NO: 2144470 - RNA, 19 nt, Homo sapiens
  misc_RNA (1)...(19): siRNA sense strand
gcaaguaauguuuauguca

SEQ ID NO: 2144471 - RNA, 19 nt, Homo sapiens
  misc_RNA (1)...(19): siRNA sense strand
gagcaaguaauguuuaugu

SEQ ID NO: 2144472 - RNA, 19 nt, Homo sapiens
  misc_RNA (1)...(19): siRNA sense strand
ucaaggugauuucaaagga

SEQ ID NO: 2144473 - RNA, 19 nt, Homo sapiens
  misc_RNA (1)...(19): siRNA sense strand
gugaaagaaugguauguag

SEQ ID NO: 2144474 - RNA, 19 nt, Homo sapiens
  misc_RNA (1)...(19): siRNA sense strand
guuggaagcaggugaagua

SEQ ID NO: 2144475 - RNA, 19 nt, Homo sapiens
  misc_RNA (1)...(19): siRNA sense strand
gcaacugcuacauuuauaa

SEQ ID NO: 2144476 - RNA, 19 nt, Homo sapiens
  misc_RNA (1)...(19): siRNA sense strand
uaugucagauagugucuuu

SEQ ID NO: 2144477 - RNA, 19 nt, Homo sapiens
  misc_RNA (1)...(19): siRNA sense strand
guggaaaccugccuaugau

SEQ ID NO: 2144478 - RNA, 19 nt, Homo sapiens
  misc_RNA (1)...(19): siRNA sense strand
acaaggaaguuucuguaug

SEQ ID NO: 2144479 - RNA, 19 nt, Homo sapiens
  misc_RNA (1)...(19): siRNA sense strand
gaaauucuggaagaucuaa

SEQ ID NO: 2144480 - RNA, 19 nt, Homo sapiens
  misc_RNA (1)...(19): siRNA sense strand
uaacugcauucuccacuuc

SEQ ID NO: 2144481 - RNA, 19 nt, Homo sapiens
  misc_RNA (1)...(19): siRNA sense strand
ggagggaacuagcugaaaa

SEQ ID NO: 2144482 - RNA, 19 nt, Homo sapiens
  misc_RNA (1)...(19): siRNA sense strand
gagguaagauuggacuugu

SEQ ID NO: 2144483 - RNA, 19 nt, Homo sapiens
  misc_RNA (1)...(19): siRNA sense strand
gagagaugcacuuguuuga

SEQ ID NO: 2144484 - RNA, 19 nt, Homo sapiens
  misc_RNA (1)...(19): siRNA sense strand
gcacagagagaugcacuug

SEQ ID NO: 2144485 - RNA, 19 nt, Homo sapiens
  misc_RNA (1)...(19): siRNA sense strand
ccaggacagcuuacaauuu

SEQ ID NO: 2144486 - RNA, 19 nt, Homo sapiens
  misc_RNA (1)...(19): siRNA sense strand
caaccucaauacaauggaa

SEQ ID NO: 2144487 - RNA, 19 nt, Homo sapiens
  misc_RNA (1)...(19): siRNA sense strand
gauccuacuacacgacuua

SEQ ID NO: 2144488 - RNA, 19 nt, Homo sapiens
  misc_RNA (1)...(19): siRNA sense strand
acaauuggccggaugcuuu

SEQ ID NO: 2144489 - RNA, 19 nt, Homo sapiens
  misc_RNA (1)...(19): siRNA sense strand
gaagaauugcacaaaguau

SEQ ID NO: 2144490 - RNA, 19 nt, Homo sapiens
  misc_RNA (1)...(19): siRNA sense strand
caaauggaggcauaugaaa

SEQ ID NO: 2144491 - RNA, 19 nt, Homo sapiens
  misc_RNA (1)...(19): siRNA sense strand
aaucagacaucacuguuca

SEQ ID NO: 2144492 - RNA, 19 nt, Homo sapiens
  misc_RNA (1)...(19): siRNA sense strand
guaaauucuuuggagguuu

SEQ ID NO: 2144493 - RNA, 19 nt, Homo sapiens
  misc_RNA (1)...(19): siRNA sense strand
uaaacacuggagagaauua

SEQ ID NO: 2144494 - RNA, 19 nt, Homo sapiens
  misc_RNA (1)...(19): siRNA sense strand
ucacaaagcaacaaaugga

SEQ ID NO: 2144495 - RNA, 19 nt, Homo sapiens
  misc_RNA (1)...(19): siRNA sense strand
aauaaugcuuccaaaguug

SEQ ID NO: 2144496 - RNA, 19 nt, Homo sapiens
  misc_RNA (1)...(19): siRNA sense strand
ucagucagcuuuggacaga

SEQ ID NO: 2144497 - RNA, 19 nt, Homo sapiens
  misc_RNA (1)...(19): siRNA sense strand
caaggagggucaguacaau

SEQ ID NO: 2144498 - RNA, 19 nt, Homo sapiens
  misc_RNA (1)...(19): siRNA sense strand
gaaaauuggggcugaagua

SEQ ID NO: 2144499 - RNA, 19 nt, Homo sapiens
  misc_RNA (1)...(19): siRNA sense strand
uaaaauggcuugguuaagu

SEQ ID NO: 2144500 - RNA, 19 nt, Homo sapiens
  misc_RNA (1)...(19): siRNA sense strand
guaacugcauucuccacuu

SEQ ID NO: 2144501 - RNA, 19 nt, Homo sapiens
  misc_RNA (1)...(19): siRNA sense strand
acuaaacacuggagagaau

SEQ ID NO: 2144502 - RNA, 19 nt, Homo sapiens
  misc_RNA (1)...(19): siRNA sense strand
uaagacaaagcaagauuga

SEQ ID NO: 2144503 - RNA, 19 nt, Homo sapiens
  misc_RNA (1)...(19): siRNA sense strand
gacagaaggagaaaggaaa

SEQ ID NO: 2144504 - RNA, 19 nt, Homo sapiens
  misc_RNA (1)...(19): siRNA sense strand
gcuaagacaaagcaagauu

SEQ ID NO: 2144505 - RNA, 19 nt, Homo sapiens
  misc_RNA (1)...(19): siRNA sense strand
uaggcaaccucaauacaau

SEQ ID NO: 2144506 - RNA, 19 nt, Homo sapiens
  misc_RNA (1)...(19): siRNA sense strand
gcccaucagaguauacaua

SEQ ID NO: 2144507 - RNA, 19 nt, Homo sapiens
  misc_RNA (1)...(19): siRNA sense strand
gaaguuaaaggaagauugc

SEQ ID NO: 2144508 - RNA, 19 nt, Homo sapiens
  misc_RNA (1)...(19): siRNA sense strand
guugcaauauuacagaaug

SEQ ID NO: 2144509 - RNA, 19 nt, Homo sapiens
  misc_RNA (1)...(19): siRNA sense strand
cgacuuagaguggcuuaaa

SEQ ID NO: 2144510 - RNA, 19 nt, Homo sapiens
  misc_RNA (1)...(19): siRNA sense strand
aaauauauccaucccaguu

SEQ ID NO: 2144511 - RNA, 19 nt, Homo sapiens
  misc_RNA (1)...(19): siRNA sense strand
gaacuuauuguggcucuuc

SEQ ID NO: 2144512 - RNA, 19 nt, Homo sapiens
  misc_RNA (1)...(19): siRNA sense strand
acuuauaucuacucaguug

SEQ ID NO: 2144513 - RNA, 19 nt, Homo sapiens
  misc_RNA (1)...(19): siRNA sense strand
caaagugaaagaaugguau

SEQ ID NO: 2144514 - RNA, 19 nt, Homo sapiens
  misc_RNA (1)...(19): siRNA sense strand
gacccagacuugcuucaca

SEQ ID NO: 2144515 - RNA, 19 nt, Homo sapiens
  misc_RNA (1)...(19): siRNA sense strand
gcacgucucauccaagaag

SEQ ID NO: 2144516 - RNA, 19 nt, Homo sapiens
  misc_RNA (1)...(19): siRNA sense strand
gacaaagaaucagagaaag

SEQ ID NO: 2144517 - RNA, 19 nt, Homo sapiens
  misc_RNA (1)...(19): siRNA sense strand
ucagauagugucuuuacaa

SEQ ID NO: 2144518 - RNA, 19 nt, Homo sapiens
  misc_RNA (1)...(19): siRNA sense strand
gccaacgacuacucuguuu

SEQ ID NO: 2144519 - RNA, 19 nt, Homo sapiens
  misc_RNA (1)...(19): siRNA sense strand
gccgcuaccuguaauaaga

SEQ ID NO: 2144520 - RNA, 19 nt, Homo sapiens
  misc_RNA (1)...(19): siRNA sense strand
gaggcuacaacucggauua

SEQ ID NO: 2144521 - RNA, 19 nt, Homo sapiens
  misc_RNA (1)...(19): siRNA sense strand
gcgcuucgccuguccaguu

SEQ ID NO: 2144522 - RNA, 19 nt, Homo sapiens
  misc_RNA (1)...(19): siRNA sense strand
guaguggguuccagucucu

SEQ ID NO: 2144523 - RNA, 19 nt, Homo sapiens
  misc_RNA (1)...(19): siRNA sense strand
guuccagucucucaagcuu

SEQ ID NO: 2144524 - RNA, 19 nt, Homo sapiens
  misc_RNA (1)...(19): siRNA sense strand
ccgcaacggccuagaguga

SEQ ID NO: 2144525 - RNA, 19 nt, Homo sapiens
  misc_RNA (1)...(19): siRNA sense strand
gcagcgaccaccucagcaa

SEQ ID NO: 2144526 - RNA, 19 nt, Homo sapiens
  misc_RNA (1)...(19): siRNA sense strand
gcaagacuucgcaccucaa

SEQ ID NO: 2144527 - RNA, 19 nt, Homo sapiens
  misc_RNA (1)...(19): siRNA sense strand
aaacgcuccucguccucuu

SEQ ID NO: 2144528 - RNA, 19 nt, Homo sapiens
  misc_RNA (1)...(19): siRNA sense strand
gcgaccaccucagcaagca

SEQ ID NO: 2144529 - RNA, 19 nt, Homo sapiens
  misc_RNA (1)...(19): siRNA sense strand
cgacuccucuggccaugcu

SEQ ID NO: 2144530 - RNA, 19 nt, Homo sapiens
  misc_RNA (1)...(19): siRNA sense strand
ggcaagguguacggcaaga

SEQ ID NO: 2144531 - RNA, 19 nt, Homo sapiens
  misc_RNA (1)...(19): siRNA sense strand
gcuugccgcuaccuguaau

SEQ ID NO: 2144532 - RNA, 19 nt, Homo sapiens
  misc_RNA (1)...(19): siRNA sense strand
cgcuaccuguaauaagaua

SEQ ID NO: 2144533 - RNA, 19 nt, Homo sapiens
  misc_RNA (1)...(19): siRNA sense strand
ccucauggacggcuucaag

SEQ ID NO: 2144534 - RNA, 19 nt, Homo sapiens
  misc_RNA (1)...(19): siRNA sense strand
gccaacgacuacucuguuu

SEQ ID NO: 2144535 - RNA, 19 nt, Homo sapiens
  misc_RNA (1)...(19): siRNA sense strand
gccgcuaccuguaauaaga

SEQ ID NO: 2144536 - RNA, 19 nt, Homo sapiens
  misc_RNA (1)...(19): siRNA sense strand
gaggcuacaacucggauua

SEQ ID NO: 2144537 - RNA, 19 nt, Homo sapiens
  misc_RNA (1)...(19): siRNA sense strand
gcgcuucgccuguccaguu

SEQ ID NO: 2144538 - RNA, 19 nt, Homo sapiens
  misc_RNA (1)...(19): siRNA sense strand
guaguggguuccagucucu

SEQ ID NO: 2144539 - RNA, 19 nt, Homo sapiens
  misc_RNA (1)...(19): siRNA sense strand
guuccagucucucaagcuu

SEQ ID NO: 2144540 - RNA, 19 nt, Homo sapiens
  misc_RNA (1)...(19): siRNA sense strand
ccgcaacggccuagaguga

SEQ ID NO: 2144541 - RNA, 19 nt, Homo sapiens
  misc_RNA (1)...(19): siRNA sense strand
gcagcgaccaccucagcaa

SEQ ID NO: 2144542 - RNA, 19 nt, Homo sapiens
  misc_RNA (1)...(19): siRNA sense strand
gcaagacuucgcaccucaa

SEQ ID NO: 2144543 - RNA, 19 nt, Homo sapiens
  misc_RNA (1)...(19): siRNA sense strand
aaacgcuccucguccucuu

SEQ ID NO: 2144544 - RNA, 19 nt, Homo sapiens
  misc_RNA (1)...(19): siRNA sense strand
gcgaccaccucagcaagca

SEQ ID NO: 2144545 - RNA, 19 nt, Homo sapiens
  misc_RNA (1)...(19): siRNA sense strand
ggcaagguguacggcaaga

SEQ ID NO: 2144546 - RNA, 19 nt, Homo sapiens
  misc_RNA (1)...(19): siRNA sense strand
gcuugccgcuaccuguaau

SEQ ID NO: 2144547 - RNA, 19 nt, Homo sapiens
  misc_RNA (1)...(19): siRNA sense strand
cgcuaccuguaauaagaua

SEQ ID NO: 2144548 - RNA, 19 nt, Homo sapiens
  misc_RNA (1)...(19): siRNA sense strand
ccucauggacggcuucaag

SEQ ID NO: 2144549 - RNA, 19 nt, Homo sapiens
  misc_RNA (1)...(19): siRNA sense strand
gccaacgacuacucuguuu

SEQ ID NO: 2144550 - RNA, 19 nt, Homo sapiens
  misc_RNA (1)...(19): siRNA sense strand
gccgcuaccuguaauaaga

SEQ ID NO: 2144551 - RNA, 19 nt, Homo sapiens
  misc_RNA (1)...(19): siRNA sense strand
gaggcuacaacucggauua

SEQ ID NO: 2144552 - RNA, 19 nt, Homo sapiens
  misc_RNA (1)...(19): siRNA sense strand
gcgcuucgccuguccaguu

SEQ ID NO: 2144553 - RNA, 19 nt, Homo sapiens
  misc_RNA (1)...(19): siRNA sense strand
guaguggguuccagucucu

SEQ ID NO: 2144554 - RNA, 19 nt, Homo sapiens
  misc_RNA (1)...(19): siRNA sense strand
guuccagucucucaagcuu

SEQ ID NO: 2144555 - RNA, 19 nt, Homo sapiens
  misc_RNA (1)...(19): siRNA sense strand
ccgcaacggccuagaguga

SEQ ID NO: 2144556 - RNA, 19 nt, Homo sapiens
  misc_RNA (1)...(19): siRNA sense strand
gcagcgaccaccucagcaa

SEQ ID NO: 2144557 - RNA, 19 nt, Homo sapiens
  misc_RNA (1)...(19): siRNA sense strand
gcaagacuucgcaccucaa

SEQ ID NO: 2144558 - RNA, 19 nt, Homo sapiens
  misc_RNA (1)...(19): siRNA sense strand
aaacgcuccucguccucuu

SEQ ID NO: 2144559 - RNA, 19 nt, Homo sapiens
  misc_RNA (1)...(19): siRNA sense strand
gcgaccaccucagcaagca

SEQ ID NO: 2144560 - RNA, 19 nt, Homo sapiens
  misc_RNA (1)...(19): siRNA sense strand
cgacuccucuggccaugcu

SEQ ID NO: 2144561 - RNA, 19 nt, Homo sapiens
  misc_RNA (1)...(19): siRNA sense strand
ggcaagguguacggcaaga

SEQ ID NO: 2144562 - RNA, 19 nt, Homo sapiens
  misc_RNA (1)...(19): siRNA sense strand
gcuugccgcuaccuguaau

SEQ ID NO: 2144563 - RNA, 19 nt, Homo sapiens
  misc_RNA (1)...(19): siRNA sense strand
cgcuaccuguaauaagaua

SEQ ID NO: 2144564 - RNA, 19 nt, Homo sapiens
  misc_RNA (1)...(19): siRNA sense strand
ccucauggacggcuucaag

SEQ ID NO: 2144565 - RNA, 19 nt, Homo sapiens
  misc_RNA (1)...(19): siRNA sense strand
gccaacgacuacucuguuu

SEQ ID NO: 2144566 - RNA, 19 nt, Homo sapiens
  misc_RNA (1)...(19): siRNA sense strand
gccgcuaccuguaauaaga

SEQ ID NO: 2144567 - RNA, 19 nt, Homo sapiens
  misc_RNA (1)...(19): siRNA sense strand
gaggcuacaacucggauua

SEQ ID NO: 2144568 - RNA, 19 nt, Homo sapiens
  misc_RNA (1)...(19): siRNA sense strand
gcgcuucgccuguccaguu

SEQ ID NO: 2144569 - RNA, 19 nt, Homo sapiens
  misc_RNA (1)...(19): siRNA sense strand
guaguggguuccagucucu

SEQ ID NO: 2144570 - RNA, 19 nt, Homo sapiens
  misc_RNA (1)...(19): siRNA sense strand
guuccagucucucaagcuu

SEQ ID NO: 2144571 - RNA, 19 nt, Homo sapiens
  misc_RNA (1)...(19): siRNA sense strand
ccgcaacggccuagaguga

SEQ ID NO: 2144572 - RNA, 19 nt, Homo sapiens
  misc_RNA (1)...(19): siRNA sense strand
gcagcgaccaccucagcaa

SEQ ID NO: 2144573 - RNA, 19 nt, Homo sapiens
  misc_RNA (1)...(19): siRNA sense strand
gcaagacuucgcaccucaa

SEQ ID NO: 2144574 - RNA, 19 nt, Homo sapiens
  misc_RNA (1)...(19): siRNA sense strand
aaacgcuccucguccucuu

SEQ ID NO: 2144575 - RNA, 19 nt, Homo sapiens
  misc_RNA (1)...(19): siRNA sense strand
gcgaccaccucagcaagca

SEQ ID NO: 2144576 - RNA, 19 nt, Homo sapiens
  misc_RNA (1)...(19): siRNA sense strand
cgacuccucuggccaugcu

SEQ ID NO: 2144577 - RNA, 19 nt, Homo sapiens
  misc_RNA (1)...(19): siRNA sense strand
ggcaagguguacggcaaga

SEQ ID NO: 2144578 - RNA, 19 nt, Homo sapiens
  misc_RNA (1)...(19): siRNA sense strand
gcuugccgcuaccuguaau

SEQ ID NO: 2144579 - RNA, 19 nt, Homo sapiens
  misc_RNA (1)...(19): siRNA sense strand
cgcuaccuguaauaagaua

SEQ ID NO: 2144580 - RNA, 19 nt, Homo sapiens
  misc_RNA (1)...(19): siRNA sense strand
ccucauggacggcuucaag

SEQ ID NO: 2144581 - RNA, 19 nt, Homo sapiens
  misc_RNA (1)...(19): siRNA sense strand
caacagggauggauuguaa

SEQ ID NO: 2144582 - RNA, 19 nt, Homo sapiens
  misc_RNA (1)...(19): siRNA sense strand
gaaagacgauaccaggaaa

SEQ ID NO: 2144583 - RNA, 19 nt, Homo sapiens
  misc_RNA (1)...(19): siRNA sense strand
gaucugcccugccaaguga

SEQ ID NO: 2144584 - RNA, 19 nt, Homo sapiens
  misc_RNA (1)...(19): siRNA sense strand
gugcagggcuuaccuuuau

SEQ ID NO: 2144585 - RNA, 19 nt, Homo sapiens
  misc_RNA (1)...(19): siRNA sense strand
guagacagcccauuccuaa

SEQ ID NO: 2144586 - RNA, 19 nt, Homo sapiens
  misc_RNA (1)...(19): siRNA sense strand
ccagaaacguuaacagaug

SEQ ID NO: 2144587 - RNA, 19 nt, Homo sapiens
  misc_RNA (1)...(19): siRNA sense strand
ugauauggcuuucuuugaa

SEQ ID NO: 2144588 - RNA, 19 nt, Homo sapiens
  misc_RNA (1)...(19): siRNA sense strand
guagucaaguuucuucauu

SEQ ID NO: 2144589 - RNA, 19 nt, Homo sapiens
  misc_RNA (1)...(19): siRNA sense strand
gaugauggagggaaacuuu

SEQ ID NO: 2144590 - RNA, 19 nt, Homo sapiens
  misc_RNA (1)...(19): siRNA sense strand
caauacauguuccaagugu

SEQ ID NO: 2144591 - RNA, 19 nt, Homo sapiens
  misc_RNA (1)...(19): siRNA sense strand
gggauggauuguaaacuug

SEQ ID NO: 2144592 - RNA, 19 nt, Homo sapiens
  misc_RNA (1)...(19): siRNA sense strand
acacauagguauaaacaac

SEQ ID NO: 2144593 - RNA, 19 nt, Homo sapiens
  misc_RNA (1)...(19): siRNA sense strand
gagaauuguuggugaggau

SEQ ID NO: 2144594 - RNA, 19 nt, Homo sapiens
  misc_RNA (1)...(19): siRNA sense strand
gaugauauggcuuucuuug

SEQ ID NO: 2144595 - RNA, 19 nt, Homo sapiens
  misc_RNA (1)...(19): siRNA sense strand
guacacauagguauaaaca

SEQ ID NO: 2144596 - RNA, 19 nt, Homo sapiens
  misc_RNA (1)...(19): siRNA sense strand
cagaaacguuaacagaugu

SEQ ID NO: 2144597 - RNA, 19 nt, Homo sapiens
  misc_RNA (1)...(19): siRNA sense strand
ucaaguuucuucauuaagg

SEQ ID NO: 2144598 - RNA, 19 nt, Homo sapiens
  misc_RNA (1)...(19): siRNA sense strand
gcugcuaaguggaaaggaa

SEQ ID NO: 2144599 - RNA, 19 nt, Homo sapiens
  misc_RNA (1)...(19): siRNA sense strand
caaguuucuucauuaagga

SEQ ID NO: 2144600 - RNA, 19 nt, Homo sapiens
  misc_RNA (1)...(19): siRNA sense strand
uuccauagcugcuucacuu

SEQ ID NO: 2144601 - RNA, 19 nt, Homo sapiens
  misc_RNA (1)...(19): siRNA sense strand
aaggagaccugaagaggau

SEQ ID NO: 2144602 - RNA, 19 nt, Homo sapiens
  misc_RNA (1)...(19): siRNA sense strand
gguacaaguagucaaguuu

SEQ ID NO: 2144603 - RNA, 19 nt, Homo sapiens
  misc_RNA (1)...(19): siRNA sense strand
gaaagauuggcucaggaaa

SEQ ID NO: 2144604 - RNA, 19 nt, Homo sapiens
  misc_RNA (1)...(19): siRNA sense strand
ggaaacuaagcaagaaaga

SEQ ID NO: 2144605 - RNA, 19 nt, Homo sapiens
  misc_RNA (1)...(19): siRNA sense strand
ugaaagacgauaccaggaa

SEQ ID NO: 2144606 - RNA, 19 nt, Homo sapiens
  misc_RNA (1)...(19): siRNA sense strand
uuucaagcaucaucuaguu

SEQ ID NO: 2144607 - RNA, 19 nt, Homo sapiens
  misc_RNA (1)...(19): siRNA sense strand
ggaaggcuacaugcgguua

SEQ ID NO: 2144608 - RNA, 19 nt, Homo sapiens
  misc_RNA (1)...(19): siRNA sense strand
gcgccuggcuuuacaugca

SEQ ID NO: 2144609 - RNA, 19 nt, Homo sapiens
  misc_RNA (1)...(19): siRNA sense strand
gaaacuaagcaagaaagau

SEQ ID NO: 2144610 - RNA, 19 nt, Homo sapiens
  misc_RNA (1)...(19): siRNA sense strand
gaaaggaaaagcuccauug

SEQ ID NO: 2144611 - RNA, 19 nt, Homo sapiens
  misc_RNA (1)...(19): siRNA sense strand
guacaaguagucaaguuuc

SEQ ID NO: 2144612 - RNA, 19 nt, Homo sapiens
  misc_RNA (1)...(19): siRNA sense strand
agggauggauuguaaacuu

SEQ ID NO: 2144613 - RNA, 19 nt, Homo sapiens
  misc_RNA (1)...(19): siRNA sense strand
gaccugaagaggaugauau

SEQ ID NO: 2144614 - RNA, 19 nt, Homo sapiens
  misc_RNA (1)...(19): siRNA sense strand
ugaggaugauggagggaaa

SEQ ID NO: 2144615 - RNA, 19 nt, Homo sapiens
  misc_RNA (1)...(19): siRNA sense strand
gcaauacauguuccaagug

SEQ ID NO: 2144616 - RNA, 19 nt, Homo sapiens
  misc_RNA (1)...(19): siRNA sense strand
cauagcugcuucacuugug

SEQ ID NO: 2144617 - RNA, 19 nt, Homo sapiens
  misc_RNA (1)...(19): siRNA sense strand
ugcaauacauguuccaagu

SEQ ID NO: 2144618 - RNA, 19 nt, Homo sapiens
  misc_RNA (1)...(19): siRNA sense strand
caaguagucaaguuucuuc

SEQ ID NO: 2144619 - RNA, 19 nt, Homo sapiens
  misc_RNA (1)...(19): siRNA sense strand
gcauuucaagcaucaucua

SEQ ID NO: 2144620 - RNA, 19 nt, Homo sapiens
  misc_RNA (1)...(19): siRNA sense strand
acauaaaacugacuuggaa

SEQ ID NO: 2144621 - RNA, 19 nt, Homo sapiens
  misc_RNA (1)...(19): siRNA sense strand
gacgauaccaggaaaggau

SEQ ID NO: 2144622 - RNA, 19 nt, Homo sapiens
  misc_RNA (1)...(19): siRNA sense strand
gaauuguuggugaggauga

SEQ ID NO: 2144623 - RNA, 19 nt, Homo sapiens
  misc_RNA (1)...(19): siRNA sense strand
aggaugauauggcuuucuu

SEQ ID NO: 2144624 - RNA, 19 nt, Homo sapiens
  misc_RNA (1)...(19): siRNA sense strand
ggauugguguaccuucagu

SEQ ID NO: 2144625 - RNA, 19 nt, Homo sapiens
  misc_RNA (1)...(19): siRNA sense strand
gcuacaugcgguuagauga

SEQ ID NO: 2144626 - RNA, 19 nt, Homo sapiens
  misc_RNA (1)...(19): siRNA sense strand
caagcaucaucuaguucuu

SEQ ID NO: 2144627 - RNA, 19 nt, Homo sapiens
  misc_RNA (1)...(19): siRNA sense strand
gaaaggaugaaaauggaaa

SEQ ID NO: 2144628 - RNA, 19 nt, Homo sapiens
  misc_RNA (1)...(19): siRNA sense strand
gauggauuguaaacuugug

SEQ ID NO: 2144629 - RNA, 19 nt, Homo sapiens
  misc_RNA (1)...(19): siRNA sense strand
ggcuuuacaugcaauacau

SEQ ID NO: 2144630 - RNA, 19 nt, Homo sapiens
  misc_RNA (1)...(19): siRNA sense strand
gcagggcuuaccuuuaugu

SEQ ID NO: 2144631 - RNA, 19 nt, Homo sapiens
  misc_RNA (1)...(19): siRNA sense strand
gaguaccggagaauuguug

SEQ ID NO: 2144632 - RNA, 19 nt, Homo sapiens
  misc_RNA (1)...(19): siRNA sense strand
agaaagauuggcucaggaa

SEQ ID NO: 2144633 - RNA, 19 nt, Homo sapiens
  misc_RNA (1)...(19): siRNA sense strand
cugcuucacuugugcuugu

SEQ ID NO: 2144634 - RNA, 19 nt, Homo sapiens
  misc_RNA (1)...(19): siRNA sense strand
aagaggaugauauggcuuu

SEQ ID NO: 2144635 - RNA, 19 nt, Homo sapiens
  misc_RNA (1)...(19): siRNA sense strand
ggagaccugaagaggauga

SEQ ID NO: 2144636 - RNA, 19 nt, Homo sapiens
  misc_RNA (1)...(19): siRNA sense strand
aguggaaacuaagcaagaa

SEQ ID NO: 2144637 - RNA, 19 nt, Homo sapiens
  misc_RNA (1)...(19): siRNA sense strand
guagguacaaguagucaag

SEQ ID NO: 2144638 - RNA, 19 nt, Homo sapiens
  misc_RNA (1)...(19): siRNA sense strand
ggcaguagacagcccauuc

SEQ ID NO: 2144639 - RNA, 19 nt, Homo sapiens
  misc_RNA (1)...(19): siRNA sense strand
ccucugcgcuuacaaaaca

SEQ ID NO: 2144640 - RNA, 19 nt, Homo sapiens
  misc_RNA (1)...(19): siRNA sense strand
gcgcuuacaaaacagauua

SEQ ID NO: 2144641 - RNA, 19 nt, Homo sapiens
  misc_RNA (1)...(19): siRNA sense strand
ggaguaccggagaauuguu

SEQ ID NO: 2144642 - RNA, 19 nt, Homo sapiens
  misc_RNA (1)...(19): siRNA sense strand
ggaugauauggcuuucuuu

SEQ ID NO: 2144643 - RNA, 19 nt, Homo sapiens
  misc_RNA (1)...(19): siRNA sense strand
ccauugccaucagcuacaa

SEQ ID NO: 2144644 - RNA, 19 nt, Homo sapiens
  misc_RNA (1)...(19): siRNA sense strand
ccaacagggauggauugua

SEQ ID NO: 2144645 - RNA, 19 nt, Homo sapiens
  misc_RNA (1)...(19): siRNA sense strand
ggauggauuguaaacuugu

SEQ ID NO: 2144646 - RNA, 19 nt, Homo sapiens
  misc_RNA (1)...(19): siRNA sense strand
ccaugacacaguaguggaa

SEQ ID NO: 2144647 - RNA, 19 nt, Homo sapiens
  misc_RNA (1)...(19): siRNA sense strand
ucaccaacagggauggauu

SEQ ID NO: 2144648 - RNA, 19 nt, Homo sapiens
  misc_RNA (1)...(19): siRNA sense strand
aaacuugugggcccagaga

SEQ ID NO: 2144649 - RNA, 19 nt, Homo sapiens
  misc_RNA (1)...(19): siRNA sense strand
ugggaggauuaacugguuu

SEQ ID NO: 2144650 - RNA, 19 nt, Homo sapiens
  misc_RNA (1)...(19): siRNA sense strand
gcagccaugggaggauuaa

SEQ ID NO: 2144651 - RNA, 19 nt, Homo sapiens
  misc_RNA (1)...(19): siRNA sense strand
uuccaaguguucaggauuc

SEQ ID NO: 2144652 - RNA, 19 nt, Homo sapiens
  misc_RNA (1)...(19): siRNA sense strand
aaaggcugcuaaguggaaa

SEQ ID NO: 2144653 - RNA, 19 nt, Homo sapiens
  misc_RNA (1)...(19): siRNA sense strand
uacaaguagucaaguuucu

SEQ ID NO: 2144654 - RNA, 19 nt, Homo sapiens
  misc_RNA (1)...(19): siRNA sense strand
uuuagaaucucccauuacg

SEQ ID NO: 2144655 - RNA, 19 nt, Homo sapiens
  misc_RNA (1)...(19): siRNA sense strand
ugacagugggauuggugua

SEQ ID NO: 2144656 - RNA, 19 nt, Homo sapiens
  misc_RNA (1)...(19): siRNA sense strand
caccaacagggauggauug

SEQ ID NO: 2144657 - RNA, 19 nt, Homo sapiens
  misc_RNA (1)...(19): siRNA sense strand
ugggauugguguaccuuca

SEQ ID NO: 2144658 - RNA, 19 nt, Homo sapiens
  misc_RNA (1)...(19): siRNA sense strand
cuccagaaacguuaacaga

SEQ ID NO: 2144659 - RNA, 19 nt, Homo sapiens
  misc_RNA (1)...(19): siRNA sense strand
aaaagcauuucaagcauca

SEQ ID NO: 2144660 - RNA, 19 nt, Homo sapiens
  misc_RNA (1)...(19): siRNA sense strand
agacagcccauuccuaaaa

SEQ ID NO: 2144661 - RNA, 19 nt, Homo sapiens
  misc_RNA (1)...(19): siRNA sense strand
caacagggauggauuguaa

SEQ ID NO: 2144662 - RNA, 19 nt, Homo sapiens
  misc_RNA (1)...(19): siRNA sense strand
gaaagacgauaccaggaaa

SEQ ID NO: 2144663 - RNA, 19 nt, Homo sapiens
  misc_RNA (1)...(19): siRNA sense strand
gaucugcccugccaaguga

SEQ ID NO: 2144664 - RNA, 19 nt, Homo sapiens
  misc_RNA (1)...(19): siRNA sense strand
gugcagggcuuaccuuuau

SEQ ID NO: 2144665 - RNA, 19 nt, Homo sapiens
  misc_RNA (1)...(19): siRNA sense strand
guagacagcccauuccuaa

SEQ ID NO: 2144666 - RNA, 19 nt, Homo sapiens
  misc_RNA (1)...(19): siRNA sense strand
ccagaaacguuaacagaug

SEQ ID NO: 2144667 - RNA, 19 nt, Homo sapiens
  misc_RNA (1)...(19): siRNA sense strand
ugauauggcuuucuuugaa

SEQ ID NO: 2144668 - RNA, 19 nt, Homo sapiens
  misc_RNA (1)...(19): siRNA sense strand
guagucaaguuucuucauu

SEQ ID NO: 2144669 - RNA, 19 nt, Homo sapiens
  misc_RNA (1)...(19): siRNA sense strand
gaugauggagggaaacuuu

SEQ ID NO: 2144670 - RNA, 19 nt, Homo sapiens
  misc_RNA (1)...(19): siRNA sense strand
caauacauguuccaagugu

SEQ ID NO: 2144671 - RNA, 19 nt, Homo sapiens
  misc_RNA (1)...(19): siRNA sense strand
gggauggauuguaaacuug

SEQ ID NO: 2144672 - RNA, 19 nt, Homo sapiens
  misc_RNA (1)...(19): siRNA sense strand
acacauagguauaaacaac

SEQ ID NO: 2144673 - RNA, 19 nt, Homo sapiens
  misc_RNA (1)...(19): siRNA sense strand
gagaauuguuggugaggau

SEQ ID NO: 2144674 - RNA, 19 nt, Homo sapiens
  misc_RNA (1)...(19): siRNA sense strand
gaugauauggcuuucuuug

SEQ ID NO: 2144675 - RNA, 19 nt, Homo sapiens
  misc_RNA (1)...(19): siRNA sense strand
guacacauagguauaaaca

SEQ ID NO: 2144676 - RNA, 19 nt, Homo sapiens
  misc_RNA (1)...(19): siRNA sense strand
cagaaacguuaacagaugu

SEQ ID NO: 2144677 - RNA, 19 nt, Homo sapiens
  misc_RNA (1)...(19): siRNA sense strand
ucaaguuucuucauuaagg

SEQ ID NO: 2144678 - RNA, 19 nt, Homo sapiens
  misc_RNA (1)...(19): siRNA sense strand
gcugcuaaguggaaaggaa

SEQ ID NO: 2144679 - RNA, 19 nt, Homo sapiens
  misc_RNA (1)...(19): siRNA sense strand
caaguuucuucauuaagga

SEQ ID NO: 2144680 - RNA, 19 nt, Homo sapiens
  misc_RNA (1)...(19): siRNA sense strand
uuccauagcugcuucacuu

SEQ ID NO: 2144681 - RNA, 19 nt, Homo sapiens
  misc_RNA (1)...(19): siRNA sense strand
aaggagaccugaagaggau

SEQ ID NO: 2144682 - RNA, 19 nt, Homo sapiens
  misc_RNA (1)...(19): siRNA sense strand
gguacaaguagucaaguuu

SEQ ID NO: 2144683 - RNA, 19 nt, Homo sapiens
  misc_RNA (1)...(19): siRNA sense strand
gaaagauuggcucaggaaa

SEQ ID NO: 2144684 - RNA, 19 nt, Homo sapiens
  misc_RNA (1)...(19): siRNA sense strand
ggaaacuaagcaagaaaga

SEQ ID NO: 2144685 - RNA, 19 nt, Homo sapiens
  misc_RNA (1)...(19): siRNA sense strand
ugaaagacgauaccaggaa

SEQ ID NO: 2144686 - RNA, 19 nt, Homo sapiens
  misc_RNA (1)...(19): siRNA sense strand
uuucaagcaucaucuaguu

SEQ ID NO: 2144687 - RNA, 19 nt, Homo sapiens
  misc_RNA (1)...(19): siRNA sense strand
ggaaggcuacaugcgguua

SEQ ID NO: 2144688 - RNA, 19 nt, Homo sapiens
  misc_RNA (1)...(19): siRNA sense strand
gcgccuggcuuuacaugca

SEQ ID NO: 2144689 - RNA, 19 nt, Homo sapiens
  misc_RNA (1)...(19): siRNA sense strand
gaaacuaagcaagaaagau

SEQ ID NO: 2144690 - RNA, 19 nt, Homo sapiens
  misc_RNA (1)...(19): siRNA sense strand
gaaaggaaaagcuccauug

SEQ ID NO: 2144691 - RNA, 19 nt, Homo sapiens
  misc_RNA (1)...(19): siRNA sense strand
guacaaguagucaaguuuc

SEQ ID NO: 2144692 - RNA, 19 nt, Homo sapiens
  misc_RNA (1)...(19): siRNA sense strand
agggauggauuguaaacuu

SEQ ID NO: 2144693 - RNA, 19 nt, Homo sapiens
  misc_RNA (1)...(19): siRNA sense strand
gaccugaagaggaugauau

SEQ ID NO: 2144694 - RNA, 19 nt, Homo sapiens
  misc_RNA (1)...(19): siRNA sense strand
ugaggaugauggagggaaa

SEQ ID NO: 2144695 - RNA, 19 nt, Homo sapiens
  misc_RNA (1)...(19): siRNA sense strand
gcaauacauguuccaagug

SEQ ID NO: 2144696 - RNA, 19 nt, Homo sapiens
  misc_RNA (1)...(19): siRNA sense strand
cauagcugcuucacuugug

SEQ ID NO: 2144697 - RNA, 19 nt, Homo sapiens
  misc_RNA (1)...(19): siRNA sense strand
ugcaauacauguuccaagu

SEQ ID NO: 2144698 - RNA, 19 nt, Homo sapiens
  misc_RNA (1)...(19): siRNA sense strand
caaguagucaaguuucuuc

SEQ ID NO: 2144699 - RNA, 19 nt, Homo sapiens
  misc_RNA (1)...(19): siRNA sense strand
gcauuucaagcaucaucua

SEQ ID NO: 2144700 - RNA, 19 nt, Homo sapiens
  misc_RNA (1)...(19): siRNA sense strand
acauaaaacugacuuggaa

SEQ ID NO: 2144701 - RNA, 19 nt, Homo sapiens
  misc_RNA (1)...(19): siRNA sense strand
gacgauaccaggaaaggau

SEQ ID NO: 2144702 - RNA, 19 nt, Homo sapiens
  misc_RNA (1)...(19): siRNA sense strand
gaauuguuggugaggauga

SEQ ID NO: 2144703 - RNA, 19 nt, Homo sapiens
  misc_RNA (1)...(19): siRNA sense strand
aggaugauauggcuuucuu

SEQ ID NO: 2144704 - RNA, 19 nt, Homo sapiens
  misc_RNA (1)...(19): siRNA sense strand
ggauugguguaccuucagu

SEQ ID NO: 2144705 - RNA, 19 nt, Homo sapiens
  misc_RNA (1)...(19): siRNA sense strand
gcuacaugcgguuagauga

SEQ ID NO: 2144706 - RNA, 19 nt, Homo sapiens
  misc_RNA (1)...(19): siRNA sense strand
caagcaucaucuaguucuu

SEQ ID NO: 2144707 - RNA, 19 nt, Homo sapiens
  misc_RNA (1)...(19): siRNA sense strand
gaaaggaugaaaauggaaa

SEQ ID NO: 2144708 - RNA, 19 nt, Homo sapiens
  misc_RNA (1)...(19): siRNA sense strand
gauggauuguaaacuugug

SEQ ID NO: 2144709 - RNA, 19 nt, Homo sapiens
  misc_RNA (1)...(19): siRNA sense strand
ggcuuuacaugcaauacau

SEQ ID NO: 2144710 - RNA, 19 nt, Homo sapiens
  misc_RNA (1)...(19): siRNA sense strand
gcagggcuuaccuuuaugu

SEQ ID NO: 2144711 - RNA, 19 nt, Homo sapiens
  misc_RNA (1)...(19): siRNA sense strand
gaguaccggagaauuguug

SEQ ID NO: 2144712 - RNA, 19 nt, Homo sapiens
  misc_RNA (1)...(19): siRNA sense strand
agaaagauuggcucaggaa

SEQ ID NO: 2144713 - RNA, 19 nt, Homo sapiens
  misc_RNA (1)...(19): siRNA sense strand
cugcuucacuugugcuugu

SEQ ID NO: 2144714 - RNA, 19 nt, Homo sapiens
  misc_RNA (1)...(19): siRNA sense strand
aagaggaugauauggcuuu

SEQ ID NO: 2144715 - RNA, 19 nt, Homo sapiens
  misc_RNA (1)...(19): siRNA sense strand
ggagaccugaagaggauga

SEQ ID NO: 2144716 - RNA, 19 nt, Homo sapiens
  misc_RNA (1)...(19): siRNA sense strand
aguggaaacuaagcaagaa

SEQ ID NO: 2144717 - RNA, 19 nt, Homo sapiens
  misc_RNA (1)...(19): siRNA sense strand
guagguacaaguagucaag

SEQ ID NO: 2144718 - RNA, 19 nt, Homo sapiens
  misc_RNA (1)...(19): siRNA sense strand
ggcaguagacagcccauuc

SEQ ID NO: 2144719 - RNA, 19 nt, Homo sapiens
  misc_RNA (1)...(19): siRNA sense strand
ccucugcgcuuacaaaaca

SEQ ID NO: 2144720 - RNA, 19 nt, Homo sapiens
  misc_RNA (1)...(19): siRNA sense strand
gcgcuuacaaaacagauua

SEQ ID NO: 2144721 - RNA, 19 nt, Homo sapiens
  misc_RNA (1)...(19): siRNA sense strand
ggaguaccggagaauuguu

SEQ ID NO: 2144722 - RNA, 19 nt, Homo sapiens
  misc_RNA (1)...(19): siRNA sense strand
ggaugauauggcuuucuuu

SEQ ID NO: 2144723 - RNA, 19 nt, Homo sapiens
  misc_RNA (1)...(19): siRNA sense strand
ccauugccaucagcuacaa

SEQ ID NO: 2144724 - RNA, 19 nt, Homo sapiens
  misc_RNA (1)...(19): siRNA sense strand
ccaacagggauggauugua

SEQ ID NO: 2144725 - RNA, 19 nt, Homo sapiens
  misc_RNA (1)...(19): siRNA sense strand
ggauggauuguaaacuugu

SEQ ID NO: 2144726 - RNA, 19 nt, Homo sapiens
  misc_RNA (1)...(19): siRNA sense strand
ccaugacacaguaguggaa

SEQ ID NO: 2144727 - RNA, 19 nt, Homo sapiens
  misc_RNA (1)...(19): siRNA sense strand
ucaccaacagggauggauu

SEQ ID NO: 2144728 - RNA, 19 nt, Homo sapiens
  misc_RNA (1)...(19): siRNA sense strand
aaacuugugggcccagaga

SEQ ID NO: 2144729 - RNA, 19 nt, Homo sapiens
  misc_RNA (1)...(19): siRNA sense strand
ugggaggauuaacugguuu

SEQ ID NO: 2144730 - RNA, 19 nt, Homo sapiens
  misc_RNA (1)...(19): siRNA sense strand
gcagccaugggaggauuaa

SEQ ID NO: 2144731 - RNA, 19 nt, Homo sapiens
  misc_RNA (1)...(19): siRNA sense strand
uuccaaguguucaggauuc

SEQ ID NO: 2144732 - RNA, 19 nt, Homo sapiens
  misc_RNA (1)...(19): siRNA sense strand
aaaggcugcuaaguggaaa

SEQ ID NO: 2144733 - RNA, 19 nt, Homo sapiens
  misc_RNA (1)...(19): siRNA sense strand
uacaaguagucaaguuucu

SEQ ID NO: 2144734 - RNA, 19 nt, Homo sapiens
  misc_RNA (1)...(19): siRNA sense strand
uuuagaaucucccauuacg

SEQ ID NO: 2144735 - RNA, 19 nt, Homo sapiens
  misc_RNA (1)...(19): siRNA sense strand
ugacagugggauuggugua

SEQ ID NO: 2144736 - RNA, 19 nt, Homo sapiens
  misc_RNA (1)...(19): siRNA sense strand
caccaacagggauggauug

SEQ ID NO: 2144737 - RNA, 19 nt, Homo sapiens
  misc_RNA (1)...(19): siRNA sense strand
ugggauugguguaccuuca

SEQ ID NO: 2144738 - RNA, 19 nt, Homo sapiens
  misc_RNA (1)...(19): siRNA sense strand
cuccagaaacguuaacaga

SEQ ID NO: 2144739 - RNA, 19 nt, Homo sapiens
  misc_RNA (1)...(19): siRNA sense strand
aaaagcauuucaagcauca

SEQ ID NO: 2144740 - RNA, 19 nt, Homo sapiens
  misc_RNA (1)...(19): siRNA sense strand
agacagcccauuccuaaaa

SEQ ID NO: 2144741 - RNA, 19 nt, Homo sapiens
  misc_RNA (1)...(19): siRNA sense strand
caaagcagauggagucuua

SEQ ID NO: 2144742 - RNA, 19 nt, Homo sapiens
  misc_RNA (1)...(19): siRNA sense strand
gaaaugaucuucgaaaggu

SEQ ID NO: 2144743 - RNA, 19 nt, Homo sapiens
  misc_RNA (1)...(19): siRNA sense strand
agaaagggcuuaaagaaga

SEQ ID NO: 2144744 - RNA, 19 nt, Homo sapiens
  misc_RNA (1)...(19): siRNA sense strand
gaaggucccugagcucuuu

SEQ ID NO: 2144745 - RNA, 19 nt, Homo sapiens
  misc_RNA (1)...(19): siRNA sense strand
uauaugaccuuucagauga

SEQ ID NO: 2144746 - RNA, 19 nt, Homo sapiens
  misc_RNA (1)...(19): siRNA sense strand
caacagaaaugaucuucga

SEQ ID NO: 2144747 - RNA, 19 nt, Homo sapiens
  misc_RNA (1)...(19): siRNA sense strand
ggaaauacggcuaacaauu

SEQ ID NO: 2144748 - RNA, 19 nt, Homo sapiens
  misc_RNA (1)...(19): siRNA sense strand
gagauguacuugguaauuu

SEQ ID NO: 2144749 - RNA, 19 nt, Homo sapiens
  misc_RNA (1)...(19): siRNA sense strand
gcagaaagggcuuaaagaa

SEQ ID NO: 2144750 - RNA, 19 nt, Homo sapiens
  misc_RNA (1)...(19): siRNA sense strand
agacuacacugguaaauau

SEQ ID NO: 2144751 - RNA, 19 nt, Homo sapiens
  misc_RNA (1)...(19): siRNA sense strand
caacaaagcauucaucagu

SEQ ID NO: 2144752 - RNA, 19 nt, Homo sapiens
  misc_RNA (1)...(19): siRNA sense strand
gccaaagucuggucugauu

SEQ ID NO: 2144753 - RNA, 19 nt, Homo sapiens
  misc_RNA (1)...(19): siRNA sense strand
gaacaucauugucagaaac

SEQ ID NO: 2144754 - RNA, 19 nt, Homo sapiens
  misc_RNA (1)...(19): siRNA sense strand
gaaauaaagacccuucugu

SEQ ID NO: 2144755 - RNA, 19 nt, Homo sapiens
  misc_RNA (1)...(19): siRNA sense strand
acaaagcauucaucaguuu

SEQ ID NO: 2144756 - RNA, 19 nt, Homo sapiens
  misc_RNA (1)...(19): siRNA sense strand
gcagauggagucuuagaaa

SEQ ID NO: 2144757 - RNA, 19 nt, Homo sapiens
  misc_RNA (1)...(19): siRNA sense strand
gcacauggcuacuguacac

SEQ ID NO: 2144758 - RNA, 19 nt, Homo sapiens
  misc_RNA (1)...(19): siRNA sense strand
uaaagacccuucuguuugg

SEQ ID NO: 2144759 - RNA, 19 nt, Homo sapiens
  misc_RNA (1)...(19): siRNA sense strand
gggugaaacuccuguguug

SEQ ID NO: 2144760 - RNA, 19 nt, Homo sapiens
  misc_RNA (1)...(19): siRNA sense strand
uaacacagccucauuaaaa

SEQ ID NO: 2144761 - RNA, 19 nt, Homo sapiens
  misc_RNA (1)...(19): siRNA sense strand
gagacuacacugguaaaua

SEQ ID NO: 2144762 - RNA, 19 nt, Homo sapiens
  misc_RNA (1)...(19): siRNA sense strand
ggagauguacuugguaauu

SEQ ID NO: 2144763 - RNA, 19 nt, Homo sapiens
  misc_RNA (1)...(19): siRNA sense strand
uagaaacacuuacgcuuca

SEQ ID NO: 2144764 - RNA, 19 nt, Homo sapiens
  misc_RNA (1)...(19): siRNA sense strand
uaacaaagugccaucaaga

SEQ ID NO: 2144765 - RNA, 19 nt, Homo sapiens
  misc_RNA (1)...(19): siRNA sense strand
aauaaagacccuucuguuu

SEQ ID NO: 2144766 - RNA, 19 nt, Homo sapiens
  misc_RNA (1)...(19): siRNA sense strand
ggugguaauuccaggauga

SEQ ID NO: 2144767 - RNA, 19 nt, Homo sapiens
  misc_RNA (1)...(19): siRNA sense strand
cacaggaacuugucaaucu

SEQ ID NO: 2144768 - RNA, 19 nt, Homo sapiens
  misc_RNA (1)...(19): siRNA sense strand
cacuuacgcuucacaguuu

SEQ ID NO: 2144769 - RNA, 19 nt, Homo sapiens
  misc_RNA (1)...(19): siRNA sense strand
cuggaucacuuuggaaaua

SEQ ID NO: 2144770 - RNA, 19 nt, Homo sapiens
  misc_RNA (1)...(19): siRNA sense strand
gaagaugcaggauggagaa

SEQ ID NO: 2144771 - RNA, 19 nt, Homo sapiens
  misc_RNA (1)...(19): siRNA sense strand
gcauaaacaacagaaauga

SEQ ID NO: 2144772 - RNA, 19 nt, Homo sapiens
  misc_RNA (1)...(19): siRNA sense strand
gaaauacaaagcagaugga

SEQ ID NO: 2144773 - RNA, 19 nt, Homo sapiens
  misc_RNA (1)...(19): siRNA sense strand
ucaagaugcucagagacua

SEQ ID NO: 2144774 - RNA, 19 nt, Homo sapiens
  misc_RNA (1)...(19): siRNA sense strand
gauacuuucuggaucacuu

SEQ ID NO: 2144775 - RNA, 19 nt, Homo sapiens
  misc_RNA (1)...(19): siRNA sense strand
gcuaacaauuucacucaag

SEQ ID NO: 2144776 - RNA, 19 nt, Homo sapiens
  misc_RNA (1)...(19): siRNA sense strand
augaggaccuggugacuuu

SEQ ID NO: 2144777 - RNA, 19 nt, Homo sapiens
  misc_RNA (1)...(19): siRNA sense strand
auaaagacccuucuguuug

SEQ ID NO: 2144778 - RNA, 19 nt, Homo sapiens
  misc_RNA (1)...(19): siRNA sense strand
uuagugaacugaccguaga

SEQ ID NO: 2144779 - RNA, 19 nt, Homo sapiens
  misc_RNA (1)...(19): siRNA sense strand
cagaaaugaucuucgaaag

SEQ ID NO: 2144780 - RNA, 19 nt, Homo sapiens
  misc_RNA (1)...(19): siRNA sense strand
caucagugcucaaguugca

SEQ ID NO: 2144781 - RNA, 19 nt, Homo sapiens
  misc_RNA (1)...(19): siRNA sense strand
gagaacaaggcaaaggaaa

SEQ ID NO: 2144782 - RNA, 19 nt, Homo sapiens
  misc_RNA (1)...(19): siRNA sense strand
gaaagggcuuaaagaagac

SEQ ID NO: 2144783 - RNA, 19 nt, Homo sapiens
  misc_RNA (1)...(19): siRNA sense strand
ucgaggauguggaggauga

SEQ ID NO: 2144784 - RNA, 19 nt, Homo sapiens
  misc_RNA (1)...(19): siRNA sense strand
cuaacaauuucacucaaga

SEQ ID NO: 2144785 - RNA, 19 nt, Homo sapiens
  misc_RNA (1)...(19): siRNA sense strand
ggagaacaaggcaaaggaa

SEQ ID NO: 2144786 - RNA, 19 nt, Homo sapiens
  misc_RNA (1)...(19): siRNA sense strand
acacagcaguucaguccaa

SEQ ID NO: 2144787 - RNA, 19 nt, Homo sapiens
  misc_RNA (1)...(19): siRNA sense strand
ccaauugaccucucaguag

SEQ ID NO: 2144788 - RNA, 19 nt, Homo sapiens
  misc_RNA (1)...(19): siRNA sense strand
cuacuugccuggugguaau

SEQ ID NO: 2144789 - RNA, 19 nt, Homo sapiens
  misc_RNA (1)...(19): siRNA sense strand
ugaagaggaugggagagaa

SEQ ID NO: 2144790 - RNA, 19 nt, Homo sapiens
  misc_RNA (1)...(19): siRNA sense strand
gagaacaucauugucagaa

SEQ ID NO: 2144791 - RNA, 19 nt, Homo sapiens
  misc_RNA (1)...(19): siRNA sense strand
uuaaagaagacauguguga

SEQ ID NO: 2144792 - RNA, 19 nt, Homo sapiens
  misc_RNA (1)...(19): siRNA sense strand
gaacucaucaccagauacu

SEQ ID NO: 2144793 - RNA, 19 nt, Homo sapiens
  misc_RNA (1)...(19): siRNA sense strand
aaacuccuguguugacuuc

SEQ ID NO: 2144794 - RNA, 19 nt, Homo sapiens
  misc_RNA (1)...(19): siRNA sense strand
gggagaagauagacaagcu

SEQ ID NO: 2144795 - RNA, 19 nt, Homo sapiens
  misc_RNA (1)...(19): siRNA sense strand
guaacacagccucauuaaa

SEQ ID NO: 2144796 - RNA, 19 nt, Homo sapiens
  misc_RNA (1)...(19): siRNA sense strand
aaauaaagacccuucuguu

SEQ ID NO: 2144797 - RNA, 19 nt, Homo sapiens
  misc_RNA (1)...(19): siRNA sense strand
gggaguuccucagcagaaa

SEQ ID NO: 2144798 - RNA, 19 nt, Homo sapiens
  misc_RNA (1)...(19): siRNA sense strand
uaguaacacagccucauua

SEQ ID NO: 2144799 - RNA, 19 nt, Homo sapiens
  misc_RNA (1)...(19): siRNA sense strand
gaugcaggauggagaacau

SEQ ID NO: 2144800 - RNA, 19 nt, Homo sapiens
  misc_RNA (1)...(19): siRNA sense strand
ggaaauaaagacccuucug

SEQ ID NO: 2144801 - RNA, 19 nt, Homo sapiens
  misc_RNA (1)...(19): siRNA sense strand
gagccuuccuuggauguga

SEQ ID NO: 2144802 - RNA, 19 nt, Homo sapiens
  misc_RNA (1)...(19): siRNA sense strand
cccaaucccugcacucuca

SEQ ID NO: 2144803 - RNA, 19 nt, Homo sapiens
  misc_RNA (1)...(19): siRNA sense strand
aacaaagcauucaucaguu

SEQ ID NO: 2144804 - RNA, 19 nt, Homo sapiens
  misc_RNA (1)...(19): siRNA sense strand
cagcauaaacaacagaaau

SEQ ID NO: 2144805 - RNA, 19 nt, Homo sapiens
  misc_RNA (1)...(19): siRNA sense strand
gaagaggaugggagagaau

SEQ ID NO: 2144806 - RNA, 19 nt, Homo sapiens
  misc_RNA (1)...(19): siRNA sense strand
ggauguggaggaugaguug

SEQ ID NO: 2144807 - RNA, 19 nt, Homo sapiens
  misc_RNA (1)...(19): siRNA sense strand
acucucaguuccaaagaaa

SEQ ID NO: 2144808 - RNA, 19 nt, Homo sapiens
  misc_RNA (1)...(19): siRNA sense strand
gaccucagcauaaacaaca

SEQ ID NO: 2144809 - RNA, 19 nt, Homo sapiens
  misc_RNA (1)...(19): siRNA sense strand
uguggaggaugaguugaua

SEQ ID NO: 2144810 - RNA, 19 nt, Homo sapiens
  misc_RNA (1)...(19): siRNA sense strand
ggagaacaucauugucaga

SEQ ID NO: 2144811 - RNA, 19 nt, Homo sapiens
  misc_RNA (1)...(19): siRNA sense strand
acacuuacgcuucacaguu

SEQ ID NO: 2144812 - RNA, 19 nt, Homo sapiens
  misc_RNA (1)...(19): siRNA sense strand
gcuuaaagaagacaugugu

SEQ ID NO: 2144813 - RNA, 19 nt, Homo sapiens
  misc_RNA (1)...(19): siRNA sense strand
cagaaagggcuuaaagaag

SEQ ID NO: 2144814 - RNA, 19 nt, Homo sapiens
  misc_RNA (1)...(19): siRNA sense strand
agaacaucauugucagaaa

SEQ ID NO: 2144815 - RNA, 19 nt, Homo sapiens
  misc_RNA (1)...(19): siRNA sense strand
gcaaagccagacaugacaa

SEQ ID NO: 2144816 - RNA, 19 nt, Homo sapiens
  misc_RNA (1)...(19): siRNA sense strand
agagagagccguuguugca

SEQ ID NO: 2144817 - RNA, 19 nt, Homo sapiens
  misc_RNA (1)...(19): siRNA sense strand
caaagucuggucugauugu

SEQ ID NO: 2144818 - RNA, 19 nt, Homo sapiens
  misc_RNA (1)...(19): siRNA sense strand
gagaauuccaggccaaagu

SEQ ID NO: 2144819 - RNA, 19 nt, Homo sapiens
  misc_RNA (1)...(19): siRNA sense strand
ugauggagauguacuuggu

SEQ ID NO: 2144820 - RNA, 19 nt, Homo sapiens
  misc_RNA (1)...(19): siRNA sense strand
cgaaagguuuugcaucuug

SEQ ID NO: 2144821 - RNA, 19 nt, Homo sapiens
  misc_RNA (1)...(19): siRNA sense strand
gcucauccgccaggacuuu

SEQ ID NO: 2144822 - RNA, 19 nt, Homo sapiens
  misc_RNA (1)...(19): siRNA sense strand
gaaagguuuugcaucuuga

SEQ ID NO: 2144823 - RNA, 19 nt, Homo sapiens
  misc_RNA (1)...(19): siRNA sense strand
cgagagagagccguuguug

SEQ ID NO: 2144824 - RNA, 19 nt, Homo sapiens
  misc_RNA (1)...(19): siRNA sense strand
ucccaucagugcucaaguu

SEQ ID NO: 2144825 - RNA, 19 nt, Homo sapiens
  misc_RNA (1)...(19): siRNA sense strand
acagaaaugaucuucgaaa

SEQ ID NO: 2144826 - RNA, 19 nt, Homo sapiens
  misc_RNA (1)...(19): siRNA sense strand
acucaucaccagauacuuu

SEQ ID NO: 2144827 - RNA, 19 nt, Homo sapiens
  misc_RNA (1)...(19): siRNA sense strand
ggagucuuagaaacacuua

SEQ ID NO: 2144828 - RNA, 19 nt, Homo sapiens
  misc_RNA (1)...(19): siRNA sense strand
gaacaaggcaaaggaaaau

SEQ ID NO: 2144829 - RNA, 19 nt, Homo sapiens
  misc_RNA (1)...(19): siRNA sense strand
cagcagaaagggcuuaaag

SEQ ID NO: 2144830 - RNA, 19 nt, Homo sapiens
  misc_RNA (1)...(19): siRNA sense strand
gguuuugcaucuugaauuu

SEQ ID NO: 2144831 - RNA, 19 nt, Homo sapiens
  misc_RNA (1)...(19): siRNA sense strand
ucagagacuacacugguaa

SEQ ID NO: 2144832 - RNA, 19 nt, Homo sapiens
  misc_RNA (1)...(19): siRNA sense strand
ccagacaugacaaucuuga

SEQ ID NO: 2144833 - RNA, 19 nt, Homo sapiens
  misc_RNA (1)...(19): siRNA sense strand
cagauggagucuuagaaac

SEQ ID NO: 2144834 - RNA, 19 nt, Homo sapiens
  misc_RNA (1)...(19): siRNA sense strand
gcacuggcuucgagaacac

SEQ ID NO: 2144835 - RNA, 19 nt, Homo sapiens
  misc_RNA (1)...(19): siRNA sense strand
gcucgaggauguggaggau

SEQ ID NO: 2144836 - RNA, 19 nt, Homo sapiens
  misc_RNA (1)...(19): siRNA sense strand
caagcaaagccagacauga

SEQ ID NO: 2144837 - RNA, 19 nt, Homo sapiens
  misc_RNA (1)...(19): siRNA sense strand
caaugaagaauggaaacuu

SEQ ID NO: 2144838 - RNA, 19 nt, Homo sapiens
  misc_RNA (1)...(19): siRNA sense strand
guagcaaaggaaauaaaga

SEQ ID NO: 2144839 - RNA, 19 nt, Homo sapiens
  misc_RNA (1)...(19): siRNA sense strand
ggaaggucccugagcucuu

SEQ ID NO: 2144840 - RNA, 19 nt, Homo sapiens
  misc_RNA (1)...(19): siRNA sense strand
gauggagauguacuuggua

SEQ ID NO: 2144841 - RNA, 19 nt, Homo sapiens
  misc_RNA (1)...(19): siRNA sense strand
caaagcagauggagucuua

SEQ ID NO: 2144842 - RNA, 19 nt, Homo sapiens
  misc_RNA (1)...(19): siRNA sense strand
gaaaugaucuucgaaaggu

SEQ ID NO: 2144843 - RNA, 19 nt, Homo sapiens
  misc_RNA (1)...(19): siRNA sense strand
agaaagggcuuaaagaaga

SEQ ID NO: 2144844 - RNA, 19 nt, Homo sapiens
  misc_RNA (1)...(19): siRNA sense strand
gaaggucccugagcucuuu

SEQ ID NO: 2144845 - RNA, 19 nt, Homo sapiens
  misc_RNA (1)...(19): siRNA sense strand
uauaugaccuuucagauga

SEQ ID NO: 2144846 - RNA, 19 nt, Homo sapiens
  misc_RNA (1)...(19): siRNA sense strand
caacagaaaugaucuucga

SEQ ID NO: 2144847 - RNA, 19 nt, Homo sapiens
  misc_RNA (1)...(19): siRNA sense strand
ggaaauacggcuaacaauu

SEQ ID NO: 2144848 - RNA, 19 nt, Homo sapiens
  misc_RNA (1)...(19): siRNA sense strand
gagauguacuugguaauuu

SEQ ID NO: 2144849 - RNA, 19 nt, Homo sapiens
  misc_RNA (1)...(19): siRNA sense strand
gcagaaagggcuuaaagaa

SEQ ID NO: 2144850 - RNA, 19 nt, Homo sapiens
  misc_RNA (1)...(19): siRNA sense strand
agacuacacugguaaauau

SEQ ID NO: 2144851 - RNA, 19 nt, Homo sapiens
  misc_RNA (1)...(19): siRNA sense strand
caacaaagcauucaucagu

SEQ ID NO: 2144852 - RNA, 19 nt, Homo sapiens
  misc_RNA (1)...(19): siRNA sense strand
gccaaagucuggucugauu

SEQ ID NO: 2144853 - RNA, 19 nt, Homo sapiens
  misc_RNA (1)...(19): siRNA sense strand
gaacaucauugucagaaac

SEQ ID NO: 2144854 - RNA, 19 nt, Homo sapiens
  misc_RNA (1)...(19): siRNA sense strand
gaaauaaagacccuucugu

SEQ ID NO: 2144855 - RNA, 19 nt, Homo sapiens
  misc_RNA (1)...(19): siRNA sense strand
acaaagcauucaucaguuu

SEQ ID NO: 2144856 - RNA, 19 nt, Homo sapiens
  misc_RNA (1)...(19): siRNA sense strand
gcagauggagucuuagaaa

SEQ ID NO: 2144857 - RNA, 19 nt, Homo sapiens
  misc_RNA (1)...(19): siRNA sense strand
gcacauggcuacuguacac

SEQ ID NO: 2144858 - RNA, 19 nt, Homo sapiens
  misc_RNA (1)...(19): siRNA sense strand
uaaagacccuucuguuugg

SEQ ID NO: 2144859 - RNA, 19 nt, Homo sapiens
  misc_RNA (1)...(19): siRNA sense strand
gggugaaacuccuguguug

SEQ ID NO: 2144860 - RNA, 19 nt, Homo sapiens
  misc_RNA (1)...(19): siRNA sense strand
uaacacagccucauuaaaa

SEQ ID NO: 2144861 - RNA, 19 nt, Homo sapiens
  misc_RNA (1)...(19): siRNA sense strand
gagacuacacugguaaaua

SEQ ID NO: 2144862 - RNA, 19 nt, Homo sapiens
  misc_RNA (1)...(19): siRNA sense strand
ggagauguacuugguaauu

SEQ ID NO: 2144863 - RNA, 19 nt, Homo sapiens
  misc_RNA (1)...(19): siRNA sense strand
uagaaacacuuacgcuuca

SEQ ID NO: 2144864 - RNA, 19 nt, Homo sapiens
  misc_RNA (1)...(19): siRNA sense strand
uaacaaagugccaucaaga

SEQ ID NO: 2144865 - RNA, 19 nt, Homo sapiens
  misc_RNA (1)...(19): siRNA sense strand
aauaaagacccuucuguuu

SEQ ID NO: 2144866 - RNA, 19 nt, Homo sapiens
  misc_RNA (1)...(19): siRNA sense strand
ggugguaauuccaggauga

SEQ ID NO: 2144867 - RNA, 19 nt, Homo sapiens
  misc_RNA (1)...(19): siRNA sense strand
gcagugauauuggcuucuu

SEQ ID NO: 2144868 - RNA, 19 nt, Homo sapiens
  misc_RNA (1)...(19): siRNA sense strand
cacaggaacuugucaaucu

SEQ ID NO: 2144869 - RNA, 19 nt, Homo sapiens
  misc_RNA (1)...(19): siRNA sense strand
cacuuacgcuucacaguuu

SEQ ID NO: 2144870 - RNA, 19 nt, Homo sapiens
  misc_RNA (1)...(19): siRNA sense strand
cuggaucacuuuggaaaua

SEQ ID NO: 2144871 - RNA, 19 nt, Homo sapiens
  misc_RNA (1)...(19): siRNA sense strand
gaagaugcaggauggagaa

SEQ ID NO: 2144872 - RNA, 19 nt, Homo sapiens
  misc_RNA (1)...(19): siRNA sense strand
gcauaaacaacagaaauga

SEQ ID NO: 2144873 - RNA, 19 nt, Homo sapiens
  misc_RNA (1)...(19): siRNA sense strand
gaaauacaaagcagaugga

SEQ ID NO: 2144874 - RNA, 19 nt, Homo sapiens
  misc_RNA (1)...(19): siRNA sense strand
ucaagaugcucagagacua

SEQ ID NO: 2144875 - RNA, 19 nt, Homo sapiens
  misc_RNA (1)...(19): siRNA sense strand
gauacuuucuggaucacuu

SEQ ID NO: 2144876 - RNA, 19 nt, Homo sapiens
  misc_RNA (1)...(19): siRNA sense strand
ggacacagacaacgaccuu

SEQ ID NO: 2144877 - RNA, 19 nt, Homo sapiens
  misc_RNA (1)...(19): siRNA sense strand
gcuaacaauuucacucaag

SEQ ID NO: 2144878 - RNA, 19 nt, Homo sapiens
  misc_RNA (1)...(19): siRNA sense strand
augaggaccuggugacuuu

SEQ ID NO: 2144879 - RNA, 19 nt, Homo sapiens
  misc_RNA (1)...(19): siRNA sense strand
auaaagacccuucuguuug

SEQ ID NO: 2144880 - RNA, 19 nt, Homo sapiens
  misc_RNA (1)...(19): siRNA sense strand
uuagugaacugaccguaga

SEQ ID NO: 2144881 - RNA, 19 nt, Homo sapiens
  misc_RNA (1)...(19): siRNA sense strand
cagaaaugaucuucgaaag

SEQ ID NO: 2144882 - RNA, 19 nt, Homo sapiens
  misc_RNA (1)...(19): siRNA sense strand
caucagugcucaaguugca

SEQ ID NO: 2144883 - RNA, 19 nt, Homo sapiens
  misc_RNA (1)...(19): siRNA sense strand
gagaacaaggcaaaggaaa

SEQ ID NO: 2144884 - RNA, 19 nt, Homo sapiens
  misc_RNA (1)...(19): siRNA sense strand
gaaagggcuuaaagaagac

SEQ ID NO: 2144885 - RNA, 19 nt, Homo sapiens
  misc_RNA (1)...(19): siRNA sense strand
ucgaggauguggaggauga

SEQ ID NO: 2144886 - RNA, 19 nt, Homo sapiens
  misc_RNA (1)...(19): siRNA sense strand
cuaacaauuucacucaaga

SEQ ID NO: 2144887 - RNA, 19 nt, Homo sapiens
  misc_RNA (1)...(19): siRNA sense strand
ggagaacaaggcaaaggaa

SEQ ID NO: 2144888 - RNA, 19 nt, Homo sapiens
  misc_RNA (1)...(19): siRNA sense strand
acacagcaguucaguccaa

SEQ ID NO: 2144889 - RNA, 19 nt, Homo sapiens
  misc_RNA (1)...(19): siRNA sense strand
ccaauugaccucucaguag

SEQ ID NO: 2144890 - RNA, 19 nt, Homo sapiens
  misc_RNA (1)...(19): siRNA sense strand
cuacuugccuggugguaau

SEQ ID NO: 2144891 - RNA, 19 nt, Homo sapiens
  misc_RNA (1)...(19): siRNA sense strand
ugaagaggaugggagagaa

SEQ ID NO: 2144892 - RNA, 19 nt, Homo sapiens
  misc_RNA (1)...(19): siRNA sense strand
gagaacaucauugucagaa

SEQ ID NO: 2144893 - RNA, 19 nt, Homo sapiens
  misc_RNA (1)...(19): siRNA sense strand
uuaaagaagacauguguga

SEQ ID NO: 2144894 - RNA, 19 nt, Homo sapiens
  misc_RNA (1)...(19): siRNA sense strand
gaacucaucaccagauacu

SEQ ID NO: 2144895 - RNA, 19 nt, Homo sapiens
  misc_RNA (1)...(19): siRNA sense strand
aaacuccuguguugacuuc

SEQ ID NO: 2144896 - RNA, 19 nt, Homo sapiens
  misc_RNA (1)...(19): siRNA sense strand
gggagaagauagacaagcu

SEQ ID NO: 2144897 - RNA, 19 nt, Homo sapiens
  misc_RNA (1)...(19): siRNA sense strand
guaacacagccucauuaaa

SEQ ID NO: 2144898 - RNA, 19 nt, Homo sapiens
  misc_RNA (1)...(19): siRNA sense strand
aaauaaagacccuucuguu

SEQ ID NO: 2144899 - RNA, 19 nt, Homo sapiens
  misc_RNA (1)...(19): siRNA sense strand
gggaguuccucagcagaaa

SEQ ID NO: 2144900 - RNA, 19 nt, Homo sapiens
  misc_RNA (1)...(19): siRNA sense strand
uaguaacacagccucauua

SEQ ID NO: 2144901 - RNA, 19 nt, Homo sapiens
  misc_RNA (1)...(19): siRNA sense strand
gaugcaggauggagaacau

SEQ ID NO: 2144902 - RNA, 19 nt, Homo sapiens
  misc_RNA (1)...(19): siRNA sense strand
ggaaauaaagacccuucug

SEQ ID NO: 2144903 - RNA, 19 nt, Homo sapiens
  misc_RNA (1)...(19): siRNA sense strand
gagccuuccuuggauguga

SEQ ID NO: 2144904 - RNA, 19 nt, Homo sapiens
  misc_RNA (1)...(19): siRNA sense strand
cccaaucccugcacucuca

SEQ ID NO: 2144905 - RNA, 19 nt, Homo sapiens
  misc_RNA (1)...(19): siRNA sense strand
cagcauaaacaacagaaau

SEQ ID NO: 2144906 - RNA, 19 nt, Homo sapiens
  misc_RNA (1)...(19): siRNA sense strand
ccacuucagcauccucuuu

SEQ ID NO: 2144907 - RNA, 19 nt, Homo sapiens
  misc_RNA (1)...(19): siRNA sense strand
aacaaagcauucaucaguu

SEQ ID NO: 2144908 - RNA, 19 nt, Homo sapiens
  misc_RNA (1)...(19): siRNA sense strand
gaagaggaugggagagaau

SEQ ID NO: 2144909 - RNA, 19 nt, Homo sapiens
  misc_RNA (1)...(19): siRNA sense strand
ggauguggaggaugaguug

SEQ ID NO: 2144910 - RNA, 19 nt, Homo sapiens
  misc_RNA (1)...(19): siRNA sense strand
acucucaguuccaaagaaa

SEQ ID NO: 2144911 - RNA, 19 nt, Homo sapiens
  misc_RNA (1)...(19): siRNA sense strand
uguggaggaugaguugaua

SEQ ID NO: 2144912 - RNA, 19 nt, Homo sapiens
  misc_RNA (1)...(19): siRNA sense strand
gaccucagcauaaacaaca

SEQ ID NO: 2144913 - RNA, 19 nt, Homo sapiens
  misc_RNA (1)...(19): siRNA sense strand
ggagaacaucauugucaga

SEQ ID NO: 2144914 - RNA, 19 nt, Homo sapiens
  misc_RNA (1)...(19): siRNA sense strand
acacuuacgcuucacaguu

SEQ ID NO: 2144915 - RNA, 19 nt, Homo sapiens
  misc_RNA (1)...(19): siRNA sense strand
cagaaagggcuuaaagaag

SEQ ID NO: 2144916 - RNA, 19 nt, Homo sapiens
  misc_RNA (1)...(19): siRNA sense strand
gcuuaaagaagacaugugu

SEQ ID NO: 2144917 - RNA, 19 nt, Homo sapiens
  misc_RNA (1)...(19): siRNA sense strand
agaacaucauugucagaaa

SEQ ID NO: 2144918 - RNA, 19 nt, Homo sapiens
  misc_RNA (1)...(19): siRNA sense strand
gcaaagccagacaugacaa

SEQ ID NO: 2144919 - RNA, 19 nt, Homo sapiens
  misc_RNA (1)...(19): siRNA sense strand
agagagagccguuguugca

SEQ ID NO: 2144920 - RNA, 19 nt, Homo sapiens
  misc_RNA (1)...(19): siRNA sense strand
caaagucuggucugauugu

SEQ ID NO: 2144921 - RNA, 19 nt, Homo sapiens
  misc_RNA (1)...(19): siRNA sense strand
gagaauuccaggccaaagu

SEQ ID NO: 2144922 - RNA, 19 nt, Homo sapiens
  misc_RNA (1)...(19): siRNA sense strand
ugauggagauguacuuggu

SEQ ID NO: 2144923 - RNA, 19 nt, Homo sapiens
  misc_RNA (1)...(19): siRNA sense strand
gaaagguuuugcaucuuga

SEQ ID NO: 2144924 - RNA, 19 nt, Homo sapiens
  misc_RNA (1)...(19): siRNA sense strand
gcucauccgccaggacuuu

SEQ ID NO: 2144925 - RNA, 19 nt, Homo sapiens
  misc_RNA (1)...(19): siRNA sense strand
cgagagagagccguuguug

SEQ ID NO: 2144926 - RNA, 19 nt, Homo sapiens
  misc_RNA (1)...(19): siRNA sense strand
acagaaaugaucuucgaaa

SEQ ID NO: 2144927 - RNA, 19 nt, Homo sapiens
  misc_RNA (1)...(19): siRNA sense strand
ucccaucagugcucaaguu

SEQ ID NO: 2144928 - RNA, 19 nt, Homo sapiens
  misc_RNA (1)...(19): siRNA sense strand
cgaaagguuuugcaucuug

SEQ ID NO: 2144929 - RNA, 19 nt, Homo sapiens
  misc_RNA (1)...(19): siRNA sense strand
acucaucaccagauacuuu

SEQ ID NO: 2144930 - RNA, 19 nt, Homo sapiens
  misc_RNA (1)...(19): siRNA sense strand
ggagucuuagaaacacuua

SEQ ID NO: 2144931 - RNA, 19 nt, Homo sapiens
  misc_RNA (1)...(19): siRNA sense strand
ucagagacuacacugguaa

SEQ ID NO: 2144932 - RNA, 19 nt, Homo sapiens
  misc_RNA (1)...(19): siRNA sense strand
gaacaaggcaaaggaaaau

SEQ ID NO: 2144933 - RNA, 19 nt, Homo sapiens
  misc_RNA (1)...(19): siRNA sense strand
gguuuugcaucuugaauuu

SEQ ID NO: 2144934 - RNA, 19 nt, Homo sapiens
  misc_RNA (1)...(19): siRNA sense strand
cagcagaaagggcuuaaag

SEQ ID NO: 2144935 - RNA, 19 nt, Homo sapiens
  misc_RNA (1)...(19): siRNA sense strand
ccagacaugacaaucuuga

SEQ ID NO: 2144936 - RNA, 19 nt, Homo sapiens
  misc_RNA (1)...(19): siRNA sense strand
ccacccaaaccaucucuga

SEQ ID NO: 2144937 - RNA, 19 nt, Homo sapiens
  misc_RNA (1)...(19): siRNA sense strand
cagauggagucuuagaaac

SEQ ID NO: 2144938 - RNA, 19 nt, Homo sapiens
  misc_RNA (1)...(19): siRNA sense strand
gcacuggcuucgagaacac

SEQ ID NO: 2144939 - RNA, 19 nt, Homo sapiens
  misc_RNA (1)...(19): siRNA sense strand
gcucgaggauguggaggau

SEQ ID NO: 2144940 - RNA, 19 nt, Homo sapiens
  misc_RNA (1)...(19): siRNA sense strand
caaugaagaauggaaacuu

SEQ ID NO: 2144941 - RNA, 19 nt, Homo sapiens
  misc_RNA (1)...(19): siRNA sense strand
caaagcagauggagucuua

SEQ ID NO: 2144942 - RNA, 19 nt, Homo sapiens
  misc_RNA (1)...(19): siRNA sense strand
gaaaugaucuucgaaaggu

SEQ ID NO: 2144943 - RNA, 19 nt, Homo sapiens
  misc_RNA (1)...(19): siRNA sense strand
agaaagggcuuaaagaaga

SEQ ID NO: 2144944 - RNA, 19 nt, Homo sapiens
  misc_RNA (1)...(19): siRNA sense strand
gaaggucccugagcucuuu

SEQ ID NO: 2144945 - RNA, 19 nt, Homo sapiens
  misc_RNA (1)...(19): siRNA sense strand
uauaugaccuuucagauga

SEQ ID NO: 2144946 - RNA, 19 nt, Homo sapiens
  misc_RNA (1)...(19): siRNA sense strand
caacagaaaugaucuucga

SEQ ID NO: 2144947 - RNA, 19 nt, Homo sapiens
  misc_RNA (1)...(19): siRNA sense strand
ggaaauacggcuaacaauu

SEQ ID NO: 2144948 - RNA, 19 nt, Homo sapiens
  misc_RNA (1)...(19): siRNA sense strand
gagauguacuugguaauuu

SEQ ID NO: 2144949 - RNA, 19 nt, Homo sapiens
  misc_RNA (1)...(19): siRNA sense strand
gcagaaagggcuuaaagaa

SEQ ID NO: 2144950 - RNA, 19 nt, Homo sapiens
  misc_RNA (1)...(19): siRNA sense strand
agacuacacugguaaauau

SEQ ID NO: 2144951 - RNA, 19 nt, Homo sapiens
  misc_RNA (1)...(19): siRNA sense strand
caacaaagcauucaucagu

SEQ ID NO: 2144952 - RNA, 19 nt, Homo sapiens
  misc_RNA (1)...(19): siRNA sense strand
gccaaagucuggucugauu

SEQ ID NO: 2144953 - RNA, 19 nt, Homo sapiens
  misc_RNA (1)...(19): siRNA sense strand
gaacaucauugucagaaac

SEQ ID NO: 2144954 - RNA, 19 nt, Homo sapiens
  misc_RNA (1)...(19): siRNA sense strand
gaaauaaagacccuucugu

SEQ ID NO: 2144955 - RNA, 19 nt, Homo sapiens
  misc_RNA (1)...(19): siRNA sense strand
acaaagcauucaucaguuu

SEQ ID NO: 2144956 - RNA, 19 nt, Homo sapiens
  misc_RNA (1)...(19): siRNA sense strand
gcagauggagucuuagaaa

SEQ ID NO: 2144957 - RNA, 19 nt, Homo sapiens
  misc_RNA (1)...(19): siRNA sense strand
gcacauggcuacuguacac

SEQ ID NO: 2144958 - RNA, 19 nt, Homo sapiens
  misc_RNA (1)...(19): siRNA sense strand
uaaagacccuucuguuugg

SEQ ID NO: 2144959 - RNA, 19 nt, Homo sapiens
  misc_RNA (1)...(19): siRNA sense strand
gggugaaacuccuguguug

SEQ ID NO: 2144960 - RNA, 19 nt, Homo sapiens
  misc_RNA (1)...(19): siRNA sense strand
uaacacagccucauuaaaa

SEQ ID NO: 2144961 - RNA, 19 nt, Homo sapiens
  misc_RNA (1)...(19): siRNA sense strand
gagacuacacugguaaaua

SEQ ID NO: 2144962 - RNA, 19 nt, Homo sapiens
  misc_RNA (1)...(19): siRNA sense strand
ggagauguacuugguaauu

SEQ ID NO: 2144963 - RNA, 19 nt, Homo sapiens
  misc_RNA (1)...(19): siRNA sense strand
uagaaacacuuacgcuuca

SEQ ID NO: 2144964 - RNA, 19 nt, Homo sapiens
  misc_RNA (1)...(19): siRNA sense strand
uaacaaagugccaucaaga

SEQ ID NO: 2144965 - RNA, 19 nt, Homo sapiens
  misc_RNA (1)...(19): siRNA sense strand
aauaaagacccuucuguuu

SEQ ID NO: 2144966 - RNA, 19 nt, Homo sapiens
  misc_RNA (1)...(19): siRNA sense strand
ggugguaauuccaggauga

SEQ ID NO: 2144967 - RNA, 19 nt, Homo sapiens
  misc_RNA (1)...(19): siRNA sense strand
gcagugauauuggcuucuu

SEQ ID NO: 2144968 - RNA, 19 nt, Homo sapiens
  misc_RNA (1)...(19): siRNA sense strand
cacaggaacuugucaaucu

SEQ ID NO: 2144969 - RNA, 19 nt, Homo sapiens
  misc_RNA (1)...(19): siRNA sense strand
cacuuacgcuucacaguuu

SEQ ID NO: 2144970 - RNA, 19 nt, Homo sapiens
  misc_RNA (1)...(19): siRNA sense strand
cuggaucacuuuggaaaua

SEQ ID NO: 2144971 - RNA, 19 nt, Homo sapiens
  misc_RNA (1)...(19): siRNA sense strand
gaagaugcaggauggagaa

SEQ ID NO: 2144972 - RNA, 19 nt, Homo sapiens
  misc_RNA (1)...(19): siRNA sense strand
gcauaaacaacagaaauga

SEQ ID NO: 2144973 - RNA, 19 nt, Homo sapiens
  misc_RNA (1)...(19): siRNA sense strand
gaaauacaaagcagaugga

SEQ ID NO: 2144974 - RNA, 19 nt, Homo sapiens
  misc_RNA (1)...(19): siRNA sense strand
ucaagaugcucagagacua

SEQ ID NO: 2144975 - RNA, 19 nt, Homo sapiens
  misc_RNA (1)...(19): siRNA sense strand
gauacuuucuggaucacuu

SEQ ID NO: 2144976 - RNA, 19 nt, Homo sapiens
  misc_RNA (1)...(19): siRNA sense strand
ggacacagacaacgaccuu

SEQ ID NO: 2144977 - RNA, 19 nt, Homo sapiens
  misc_RNA (1)...(19): siRNA sense strand
gcuaacaauuucacucaag

SEQ ID NO: 2144978 - RNA, 19 nt, Homo sapiens
  misc_RNA (1)...(19): siRNA sense strand
augaggaccuggugacuuu

SEQ ID NO: 2144979 - RNA, 19 nt, Homo sapiens
  misc_RNA (1)...(19): siRNA sense strand
auaaagacccuucuguuug

SEQ ID NO: 2144980 - RNA, 19 nt, Homo sapiens
  misc_RNA (1)...(19): siRNA sense strand
uuagugaacugaccguaga

SEQ ID NO: 2144981 - RNA, 19 nt, Homo sapiens
  misc_RNA (1)...(19): siRNA sense strand
cagaaaugaucuucgaaag

SEQ ID NO: 2144982 - RNA, 19 nt, Homo sapiens
  misc_RNA (1)...(19): siRNA sense strand
caucagugcucaaguugca

SEQ ID NO: 2144983 - RNA, 19 nt, Homo sapiens
  misc_RNA (1)...(19): siRNA sense strand
gagaacaaggcaaaggaaa

SEQ ID NO: 2144984 - RNA, 19 nt, Homo sapiens
  misc_RNA (1)...(19): siRNA sense strand
gaaagggcuuaaagaagac

SEQ ID NO: 2144985 - RNA, 19 nt, Homo sapiens
  misc_RNA (1)...(19): siRNA sense strand
ucgaggauguggaggauga

SEQ ID NO: 2144986 - RNA, 19 nt, Homo sapiens
  misc_RNA (1)...(19): siRNA sense strand
cuaacaauuucacucaaga

SEQ ID NO: 2144987 - RNA, 19 nt, Homo sapiens
  misc_RNA (1)...(19): siRNA sense strand
ggagaacaaggcaaaggaa

SEQ ID NO: 2144988 - RNA, 19 nt, Homo sapiens
  misc_RNA (1)...(19): siRNA sense strand
acacagcaguucaguccaa

SEQ ID NO: 2144989 - RNA, 19 nt, Homo sapiens
  misc_RNA (1)...(19): siRNA sense strand
ccaauugaccucucaguag

SEQ ID NO: 2144990 - RNA, 19 nt, Homo sapiens
  misc_RNA (1)...(19): siRNA sense strand
cuacuugccuggugguaau

SEQ ID NO: 2144991 - RNA, 19 nt, Homo sapiens
  misc_RNA (1)...(19): siRNA sense strand
ugaagaggaugggagagaa

SEQ ID NO: 2144992 - RNA, 19 nt, Homo sapiens
  misc_RNA (1)...(19): siRNA sense strand
gagaacaucauugucagaa

SEQ ID NO: 2144993 - RNA, 19 nt, Homo sapiens
  misc_RNA (1)...(19): siRNA sense strand
uuaaagaagacauguguga

SEQ ID NO: 2144994 - RNA, 19 nt, Homo sapiens
  misc_RNA (1)...(19): siRNA sense strand
gaacucaucaccagauacu

SEQ ID NO: 2144995 - RNA, 19 nt, Homo sapiens
  misc_RNA (1)...(19): siRNA sense strand
aaacuccuguguugacuuc

SEQ ID NO: 2144996 - RNA, 19 nt, Homo sapiens
  misc_RNA (1)...(19): siRNA sense strand
gggagaagauagacaagcu

SEQ ID NO: 2144997 - RNA, 19 nt, Homo sapiens
  misc_RNA (1)...(19): siRNA sense strand
guaacacagccucauuaaa

SEQ ID NO: 2144998 - RNA, 19 nt, Homo sapiens
  misc_RNA (1)...(19): siRNA sense strand
aaauaaagacccuucuguu

SEQ ID NO: 2144999 - RNA, 19 nt, Homo sapiens
  misc_RNA (1)...(19): siRNA sense strand
gggaguuccucagcagaaa

SEQ ID NO: 2145000 - RNA, 19 nt, Homo sapiens
  misc_RNA (1)...(19): siRNA sense strand
uaguaacacagccucauua

SEQ ID NO: 2145001 - RNA, 19 nt, Homo sapiens
  misc_RNA (1)...(19): siRNA sense strand
gaugcaggauggagaacau

SEQ ID NO: 2145002 - RNA, 19 nt, Homo sapiens
  misc_RNA (1)...(19): siRNA sense strand
ggaaauaaagacccuucug

SEQ ID NO: 2145003 - RNA, 19 nt, Homo sapiens
  misc_RNA (1)...(19): siRNA sense strand
gagccuuccuuggauguga

SEQ ID NO: 2145004 - RNA, 19 nt, Homo sapiens
  misc_RNA (1)...(19): siRNA sense strand
cccaaucccugcacucuca

SEQ ID NO: 2145005 - RNA, 19 nt, Homo sapiens
  misc_RNA (1)...(19): siRNA sense strand
cagcauaaacaacagaaau

SEQ ID NO: 2145006 - RNA, 19 nt, Homo sapiens
  misc_RNA (1)...(19): siRNA sense strand
ccacuucagcauccucuuu

SEQ ID NO: 2145007 - RNA, 19 nt, Homo sapiens
  misc_RNA (1)...(19): siRNA sense strand
aacaaagcauucaucaguu

SEQ ID NO: 2145008 - RNA, 19 nt, Homo sapiens
  misc_RNA (1)...(19): siRNA sense strand
gaagaggaugggagagaau

SEQ ID NO: 2145009 - RNA, 19 nt, Homo sapiens
  misc_RNA (1)...(19): siRNA sense strand
ggauguggaggaugaguug

SEQ ID NO: 2145010 - RNA, 19 nt, Homo sapiens
  misc_RNA (1)...(19): siRNA sense strand
acucucaguuccaaagaaa

SEQ ID NO: 2145011 - RNA, 19 nt, Homo sapiens
  misc_RNA (1)...(19): siRNA sense strand
uguggaggaugaguugaua

SEQ ID NO: 2145012 - RNA, 19 nt, Homo sapiens
  misc_RNA (1)...(19): siRNA sense strand
gaccucagcauaaacaaca

SEQ ID NO: 2145013 - RNA, 19 nt, Homo sapiens
  misc_RNA (1)...(19): siRNA sense strand
ggagaacaucauugucaga

SEQ ID NO: 2145014 - RNA, 19 nt, Homo sapiens
  misc_RNA (1)...(19): siRNA sense strand
acacuuacgcuucacaguu

SEQ ID NO: 2145015 - RNA, 19 nt, Homo sapiens
  misc_RNA (1)...(19): siRNA sense strand
cagaaagggcuuaaagaag

SEQ ID NO: 2145016 - RNA, 19 nt, Homo sapiens
  misc_RNA (1)...(19): siRNA sense strand
gcuuaaagaagacaugugu

SEQ ID NO: 2145017 - RNA, 19 nt, Homo sapiens
  misc_RNA (1)...(19): siRNA sense strand
agaacaucauugucagaaa

SEQ ID NO: 2145018 - RNA, 19 nt, Homo sapiens
  misc_RNA (1)...(19): siRNA sense strand
gcaaagccagacaugacaa

SEQ ID NO: 2145019 - RNA, 19 nt, Homo sapiens
  misc_RNA (1)...(19): siRNA sense strand
agagagagccguuguugca

SEQ ID NO: 2145020 - RNA, 19 nt, Homo sapiens
  misc_RNA (1)...(19): siRNA sense strand
caaagucuggucugauugu

SEQ ID NO: 2145021 - RNA, 19 nt, Homo sapiens
  misc_RNA (1)...(19): siRNA sense strand
gagaauuccaggccaaagu

SEQ ID NO: 2145022 - RNA, 19 nt, Homo sapiens
  misc_RNA (1)...(19): siRNA sense strand
ugauggagauguacuuggu

SEQ ID NO: 2145023 - RNA, 19 nt, Homo sapiens
  misc_RNA (1)...(19): siRNA sense strand
gaaagguuuugcaucuuga

SEQ ID NO: 2145024 - RNA, 19 nt, Homo sapiens
  misc_RNA (1)...(19): siRNA sense strand
gcucauccgccaggacuuu

SEQ ID NO: 2145025 - RNA, 19 nt, Homo sapiens
  misc_RNA (1)...(19): siRNA sense strand
cgagagagagccguuguug

SEQ ID NO: 2145026 - RNA, 19 nt, Homo sapiens
  misc_RNA (1)...(19): siRNA sense strand
acagaaaugaucuucgaaa

SEQ ID NO: 2145027 - RNA, 19 nt, Homo sapiens
  misc_RNA (1)...(19): siRNA sense strand
ucccaucagugcucaaguu

SEQ ID NO: 2145028 - RNA, 19 nt, Homo sapiens
  misc_RNA (1)...(19): siRNA sense strand
cgaaagguuuugcaucuug

SEQ ID NO: 2145029 - RNA, 19 nt, Homo sapiens
  misc_RNA (1)...(19): siRNA sense strand
acucaucaccagauacuuu

SEQ ID NO: 2145030 - RNA, 19 nt, Homo sapiens
  misc_RNA (1)...(19): siRNA sense strand
ggagucuuagaaacacuua

SEQ ID NO: 2145031 - RNA, 19 nt, Homo sapiens
  misc_RNA (1)...(19): siRNA sense strand
ucagagacuacacugguaa

SEQ ID NO: 2145032 - RNA, 19 nt, Homo sapiens
  misc_RNA (1)...(19): siRNA sense strand
gaacaaggcaaaggaaaau

SEQ ID NO: 2145033 - RNA, 19 nt, Homo sapiens
  misc_RNA (1)...(19): siRNA sense strand
gguuuugcaucuugaauuu

SEQ ID NO: 2145034 - RNA, 19 nt, Homo sapiens
  misc_RNA (1)...(19): siRNA sense strand
cagcagaaagggcuuaaag

SEQ ID NO: 2145035 - RNA, 19 nt, Homo sapiens
  misc_RNA (1)...(19): siRNA sense strand
ccagacaugacaaucuuga

SEQ ID NO: 2145036 - RNA, 19 nt, Homo sapiens
  misc_RNA (1)...(19): siRNA sense strand
ccacccaaaccaucucuga

SEQ ID NO: 2145037 - RNA, 19 nt, Homo sapiens
  misc_RNA (1)...(19): siRNA sense strand
cagauggagucuuagaaac

SEQ ID NO: 2145038 - RNA, 19 nt, Homo sapiens
  misc_RNA (1)...(19): siRNA sense strand
gcacuggcuucgagaacac

SEQ ID NO: 2145039 - RNA, 19 nt, Homo sapiens
  misc_RNA (1)...(19): siRNA sense strand
gcucgaggauguggaggau

SEQ ID NO: 2145040 - RNA, 19 nt, Homo sapiens
  misc_RNA (1)...(19): siRNA sense strand
caaugaagaauggaaacuu

SEQ ID NO: 2145041 - RNA, 19 nt, Homo sapiens
  misc_RNA (1)...(19): siRNA sense strand
aaacagagcugaagagaaa

SEQ ID NO: 2145042 - RNA, 19 nt, Homo sapiens
  misc_RNA (1)...(19): siRNA sense strand
gaacaaagggccucaguau

SEQ ID NO: 2145043 - RNA, 19 nt, Homo sapiens
  misc_RNA (1)...(19): siRNA sense strand
gaaaugaucauacucaaga

SEQ ID NO: 2145044 - RNA, 19 nt, Homo sapiens
  misc_RNA (1)...(19): siRNA sense strand
gcaagacaguuaaaugaug

SEQ ID NO: 2145045 - RNA, 19 nt, Homo sapiens
  misc_RNA (1)...(19): siRNA sense strand
ccagaaagcucaucacagu

SEQ ID NO: 2145046 - RNA, 19 nt, Homo sapiens
  misc_RNA (1)...(19): siRNA sense strand
gcaaagcccuggcccugaa

SEQ ID NO: 2145047 - RNA, 19 nt, Homo sapiens
  misc_RNA (1)...(19): siRNA sense strand
gaaauugaacagcaccuua

SEQ ID NO: 2145048 - RNA, 19 nt, Homo sapiens
  misc_RNA (1)...(19): siRNA sense strand
caauauaacuggauagaag

SEQ ID NO: 2145049 - RNA, 19 nt, Homo sapiens
  misc_RNA (1)...(19): siRNA sense strand
gcuggacucuggauucuuu

SEQ ID NO: 2145050 - RNA, 19 nt, Homo sapiens
  misc_RNA (1)...(19): siRNA sense strand
ccacagccacuuccaaaua

SEQ ID NO: 2145051 - RNA, 19 nt, Homo sapiens
  misc_RNA (1)...(19): siRNA sense strand
gacagaagcugagauggaa

SEQ ID NO: 2145052 - RNA, 19 nt, Homo sapiens
  misc_RNA (1)...(19): siRNA sense strand
caacugaccuugcucaaac

SEQ ID NO: 2145053 - RNA, 19 nt, Homo sapiens
  misc_RNA (1)...(19): siRNA sense strand
caagacaaguuccuucaug

SEQ ID NO: 2145054 - RNA, 19 nt, Homo sapiens
  misc_RNA (1)...(19): siRNA sense strand
ugagggagcuggcaaagug

SEQ ID NO: 2145055 - RNA, 19 nt, Homo sapiens
  misc_RNA (1)...(19): siRNA sense strand
gggcagacuucauguucua

SEQ ID NO: 2145056 - RNA, 19 nt, Homo sapiens
  misc_RNA (1)...(19): siRNA sense strand
gaaagcucaucacagugua

SEQ ID NO: 2145057 - RNA, 19 nt, Homo sapiens
  misc_RNA (1)...(19): siRNA sense strand
gcaucaauauaacuggaua

SEQ ID NO: 2145058 - RNA, 19 nt, Homo sapiens
  misc_RNA (1)...(19): siRNA sense strand
ggagagagugugcaaagaa

SEQ ID NO: 2145059 - RNA, 19 nt, Homo sapiens
  misc_RNA (1)...(19): siRNA sense strand
ggacagaagcugagaugga

SEQ ID NO: 2145060 - RNA, 19 nt, Homo sapiens
  misc_RNA (1)...(19): siRNA sense strand
gaaaucacaccuuaugcaa

SEQ ID NO: 2145061 - RNA, 19 nt, Homo sapiens
  misc_RNA (1)...(19): siRNA sense strand
gcaaugggcagacuucaug

SEQ ID NO: 2145062 - RNA, 19 nt, Homo sapiens
  misc_RNA (1)...(19): siRNA sense strand
gacucaggcuucucuagua

SEQ ID NO: 2145063 - RNA, 19 nt, Homo sapiens
  misc_RNA (1)...(19): siRNA sense strand
gauacuaccugggacagaa

SEQ ID NO: 2145064 - RNA, 19 nt, Homo sapiens
  misc_RNA (1)...(19): siRNA sense strand
ccaaauccgucucucuaga

SEQ ID NO: 2145065 - RNA, 19 nt, Homo sapiens
  misc_RNA (1)...(19): siRNA sense strand
gaucagagccacagcuuag

SEQ ID NO: 2145066 - RNA, 19 nt, Homo sapiens
  misc_RNA (1)...(19): siRNA sense strand
caagggaugguucaaauga

SEQ ID NO: 2145067 - RNA, 19 nt, Homo sapiens
  misc_RNA (1)...(19): siRNA sense strand
gagaacagcaccaggaugu

SEQ ID NO: 2145068 - RNA, 19 nt, Homo sapiens
  misc_RNA (1)...(19): siRNA sense strand
gaagauuccaagcaagaaa

SEQ ID NO: 2145069 - RNA, 19 nt, Homo sapiens
  misc_RNA (1)...(19): siRNA sense strand
ugacaugacuucaggaacu

SEQ ID NO: 2145070 - RNA, 19 nt, Homo sapiens
  misc_RNA (1)...(19): siRNA sense strand
cagaggaacaucuuuagaa

SEQ ID NO: 2145071 - RNA, 19 nt, Homo sapiens
  misc_RNA (1)...(19): siRNA sense strand
ggaacaaagggccucagua

SEQ ID NO: 2145072 - RNA, 19 nt, Homo sapiens
  misc_RNA (1)...(19): siRNA sense strand
gcacuguuucuuuguauga

SEQ ID NO: 2145073 - RNA, 19 nt, Homo sapiens
  misc_RNA (1)...(19): siRNA sense strand
gacaaaagcaagacaguua

SEQ ID NO: 2145074 - RNA, 19 nt, Homo sapiens
  misc_RNA (1)...(19): siRNA sense strand
gaaaaccuuccucuaaaua

SEQ ID NO: 2145075 - RNA, 19 nt, Homo sapiens
  misc_RNA (1)...(19): siRNA sense strand
gucaaggucugguacuuug

SEQ ID NO: 2145076 - RNA, 19 nt, Homo sapiens
  misc_RNA (1)...(19): siRNA sense strand
cagaaaugcaggacaguuu

SEQ ID NO: 2145077 - RNA, 19 nt, Homo sapiens
  misc_RNA (1)...(19): siRNA sense strand
uggcagaguuggaauuuca

SEQ ID NO: 2145078 - RNA, 19 nt, Homo sapiens
  misc_RNA (1)...(19): siRNA sense strand
agaggaacaucuuuagaau

SEQ ID NO: 2145079 - RNA, 19 nt, Homo sapiens
  misc_RNA (1)...(19): siRNA sense strand
guagaaagccaagagauca

SEQ ID NO: 2145080 - RNA, 19 nt, Homo sapiens
  misc_RNA (1)...(19): siRNA sense strand
agaguuggaauuucaguua

SEQ ID NO: 2145081 - RNA, 19 nt, Homo sapiens
  misc_RNA (1)...(19): siRNA sense strand
ucuaguaucugcccaaugg

SEQ ID NO: 2145082 - RNA, 19 nt, Homo sapiens
  misc_RNA (1)...(19): siRNA sense strand
acaaguuccuucauguuga

SEQ ID NO: 2145083 - RNA, 19 nt, Homo sapiens
  misc_RNA (1)...(19): siRNA sense strand
gacaaguuccuucauguug

SEQ ID NO: 2145084 - RNA, 19 nt, Homo sapiens
  misc_RNA (1)...(19): siRNA sense strand
cacagccacuuccaaauau

SEQ ID NO: 2145085 - RNA, 19 nt, Homo sapiens
  misc_RNA (1)...(19): siRNA sense strand
ccagaguccugcugagaau

SEQ ID NO: 2145086 - RNA, 19 nt, Homo sapiens
  misc_RNA (1)...(19): siRNA sense strand
gugcaaagccaccacaaug

SEQ ID NO: 2145087 - RNA, 19 nt, Homo sapiens
  misc_RNA (1)...(19): siRNA sense strand
ggaggaagaguuucugcuu

SEQ ID NO: 2145088 - RNA, 19 nt, Homo sapiens
  misc_RNA (1)...(19): siRNA sense strand
gugaaagacuacaugagau

SEQ ID NO: 2145089 - RNA, 19 nt, Homo sapiens
  misc_RNA (1)...(19): siRNA sense strand
aagcaagacaguuaaauga

SEQ ID NO: 2145090 - RNA, 19 nt, Homo sapiens
  misc_RNA (1)...(19): siRNA sense strand
ggagaaugcccaaggaaag

SEQ ID NO: 2145091 - RNA, 19 nt, Homo sapiens
  misc_RNA (1)...(19): siRNA sense strand
aggaagaguuucugcuuga

SEQ ID NO: 2145092 - RNA, 19 nt, Homo sapiens
  misc_RNA (1)...(19): siRNA sense strand
ugagaucuuugcaucaguu

SEQ ID NO: 2145093 - RNA, 19 nt, Homo sapiens
  misc_RNA (1)...(19): siRNA sense strand
ccgagcaacugcaaacguu

SEQ ID NO: 2145094 - RNA, 19 nt, Homo sapiens
  misc_RNA (1)...(19): siRNA sense strand
ggacaugucagaggaggaa

SEQ ID NO: 2145095 - RNA, 19 nt, Homo sapiens
  misc_RNA (1)...(19): siRNA sense strand
caaccacagcuuacucgua

SEQ ID NO: 2145096 - RNA, 19 nt, Homo sapiens
  misc_RNA (1)...(19): siRNA sense strand
ucacaccaaccacagcuua

SEQ ID NO: 2145097 - RNA, 19 nt, Homo sapiens
  misc_RNA (1)...(19): siRNA sense strand
aaaugacugugaaagacua

SEQ ID NO: 2145098 - RNA, 19 nt, Homo sapiens
  misc_RNA (1)...(19): siRNA sense strand
uaacccacgucacagaaau

SEQ ID NO: 2145099 - RNA, 19 nt, Homo sapiens
  misc_RNA (1)...(19): siRNA sense strand
acaaagggccucaguaucu

SEQ ID NO: 2145100 - RNA, 19 nt, Homo sapiens
  misc_RNA (1)...(19): siRNA sense strand
aagacgauaugccaaaguu

SEQ ID NO: 2145101 - RNA, 19 nt, Homo sapiens
  misc_RNA (1)...(19): siRNA sense strand
gcaaguguaccacaaagca

SEQ ID NO: 2145102 - RNA, 19 nt, Homo sapiens
  misc_RNA (1)...(19): siRNA sense strand
gagaaugcccaaggaaaga

SEQ ID NO: 2145103 - RNA, 19 nt, Homo sapiens
  misc_RNA (1)...(19): siRNA sense strand
caaagggccucaguaucug

SEQ ID NO: 2145104 - RNA, 19 nt, Homo sapiens
  misc_RNA (1)...(19): siRNA sense strand
guagggcgagcaugucuuu

SEQ ID NO: 2145105 - RNA, 19 nt, Homo sapiens
  misc_RNA (1)...(19): siRNA sense strand
gagagagugugcaaagaac

SEQ ID NO: 2145106 - RNA, 19 nt, Homo sapiens
  misc_RNA (1)...(19): siRNA sense strand
ccagccagauuccuugguu

SEQ ID NO: 2145107 - RNA, 19 nt, Homo sapiens
  misc_RNA (1)...(19): siRNA sense strand
caccaaauccgucucucua

SEQ ID NO: 2145108 - RNA, 19 nt, Homo sapiens
  misc_RNA (1)...(19): siRNA sense strand
ccaguuggcugccuucacu

SEQ ID NO: 2145109 - RNA, 19 nt, Homo sapiens
  misc_RNA (1)...(19): siRNA sense strand
ggcagcagguggcagaguu

SEQ ID NO: 2145110 - RNA, 19 nt, Homo sapiens
  misc_RNA (1)...(19): siRNA sense strand
ucaaaugacugugaaagac

SEQ ID NO: 2145111 - RNA, 19 nt, Homo sapiens
  misc_RNA (1)...(19): siRNA sense strand
gggagaaugcccaaggaaa

SEQ ID NO: 2145112 - RNA, 19 nt, Homo sapiens
  misc_RNA (1)...(19): siRNA sense strand
aacaagggaugguucaaau

SEQ ID NO: 2145113 - RNA, 19 nt, Homo sapiens
  misc_RNA (1)...(19): siRNA sense strand
cagcagagccaccugaaca

SEQ ID NO: 2145114 - RNA, 19 nt, Homo sapiens
  misc_RNA (1)...(19): siRNA sense strand
gaaauccuggaccauguga

SEQ ID NO: 2145115 - RNA, 19 nt, Homo sapiens
  misc_RNA (1)...(19): siRNA sense strand
gaacagcaccaggaugucu

SEQ ID NO: 2145116 - RNA, 19 nt, Homo sapiens
  misc_RNA (1)...(19): siRNA sense strand
ccgggaguauuuagaagaa

SEQ ID NO: 2145117 - RNA, 19 nt, Homo sapiens
  misc_RNA (1)...(19): siRNA sense strand
aaaguuuccgggaguauuu

SEQ ID NO: 2145118 - RNA, 19 nt, Homo sapiens
  misc_RNA (1)...(19): siRNA sense strand
aggaacaucuuuagaaugc

SEQ ID NO: 2145119 - RNA, 19 nt, Homo sapiens
  misc_RNA (1)...(19): siRNA sense strand
gcaaagccaccacaaugag

SEQ ID NO: 2145120 - RNA, 19 nt, Homo sapiens
  misc_RNA (1)...(19): siRNA sense strand
uaucugugauggaggaaga

SEQ ID NO: 2145121 - RNA, 19 nt, Homo sapiens
  misc_RNA (1)...(19): siRNA sense strand
guaauccucuugacaugac

SEQ ID NO: 2145122 - RNA, 19 nt, Homo sapiens
  misc_RNA (1)...(19): siRNA sense strand
gaggagagagugugcaaag

SEQ ID NO: 2145123 - RNA, 19 nt, Homo sapiens
  misc_RNA (1)...(19): siRNA sense strand
caaacagagcugaagagaa

SEQ ID NO: 2145124 - RNA, 19 nt, Homo sapiens
  misc_RNA (1)...(19): siRNA sense strand
aaauuguccuguuggagaa

SEQ ID NO: 2145125 - RNA, 19 nt, Homo sapiens
  misc_RNA (1)...(19): siRNA sense strand
agagccaccugaacacuau

SEQ ID NO: 2145126 - RNA, 19 nt, Homo sapiens
  misc_RNA (1)...(19): siRNA sense strand
gaguuggaauuucaguuag

SEQ ID NO: 2145127 - RNA, 19 nt, Homo sapiens
  misc_RNA (1)...(19): siRNA sense strand
ccaggaagcccaguucaug

SEQ ID NO: 2145128 - RNA, 19 nt, Homo sapiens
  misc_RNA (1)...(19): siRNA sense strand
uagaaugcacuguguguga

SEQ ID NO: 2145129 - RNA, 19 nt, Homo sapiens
  misc_RNA (1)...(19): siRNA sense strand
gaggaacaucuuuagaaug

SEQ ID NO: 2145130 - RNA, 19 nt, Homo sapiens
  misc_RNA (1)...(19): siRNA sense strand
aaucacaccuuaugcaacu

SEQ ID NO: 2145131 - RNA, 19 nt, Homo sapiens
  misc_RNA (1)...(19): siRNA sense strand
gaagaagagacugguaauc

SEQ ID NO: 2145132 - RNA, 19 nt, Homo sapiens
  misc_RNA (1)...(19): siRNA sense strand
caacuuguacggucguuuc

SEQ ID NO: 2145133 - RNA, 19 nt, Homo sapiens
  misc_RNA (1)...(19): siRNA sense strand
gcagacuucauguucuaaa

SEQ ID NO: 2145134 - RNA, 19 nt, Homo sapiens
  misc_RNA (1)...(19): siRNA sense strand
uucagaaacucccauccua

SEQ ID NO: 2145135 - RNA, 19 nt, Homo sapiens
  misc_RNA (1)...(19): siRNA sense strand
gacgauaugccaaaguuuc

SEQ ID NO: 2145136 - RNA, 19 nt, Homo sapiens
  misc_RNA (1)...(19): siRNA sense strand
aaagcaagacaguuaaaug

SEQ ID NO: 2145137 - RNA, 19 nt, Homo sapiens
  misc_RNA (1)...(19): siRNA sense strand
ugaccuugcucaaacaucu

SEQ ID NO: 2145138 - RNA, 19 nt, Homo sapiens
  misc_RNA (1)...(19): siRNA sense strand
ugugaaagacuacaugaga

SEQ ID NO: 2145139 - RNA, 19 nt, Homo sapiens
  misc_RNA (1)...(19): siRNA sense strand
gagccacagcuuaguauca

SEQ ID NO: 2145140 - RNA, 19 nt, Homo sapiens
  misc_RNA (1)...(19): siRNA sense strand
ggaaaugaucauacucaag

SEQ ID NO: 2145141 - RNA, 19 nt, Homo sapiens
  misc_RNA (1)...(19): siRNA sense strand
aaacagagcugaagagaaa

SEQ ID NO: 2145142 - RNA, 19 nt, Homo sapiens
  misc_RNA (1)...(19): siRNA sense strand
gaacaaagggccucaguau

SEQ ID NO: 2145143 - RNA, 19 nt, Homo sapiens
  misc_RNA (1)...(19): siRNA sense strand
gaaaugaucauacucaaga

SEQ ID NO: 2145144 - RNA, 19 nt, Homo sapiens
  misc_RNA (1)...(19): siRNA sense strand
gcaagacaguuaaaugaug

SEQ ID NO: 2145145 - RNA, 19 nt, Homo sapiens
  misc_RNA (1)...(19): siRNA sense strand
ccagaaagcucaucacagu

SEQ ID NO: 2145146 - RNA, 19 nt, Homo sapiens
  misc_RNA (1)...(19): siRNA sense strand
gcaaagcccuggcccugaa

SEQ ID NO: 2145147 - RNA, 19 nt, Homo sapiens
  misc_RNA (1)...(19): siRNA sense strand
gaaauugaacagcaccuua

SEQ ID NO: 2145148 - RNA, 19 nt, Homo sapiens
  misc_RNA (1)...(19): siRNA sense strand
caauauaacuggauagaag

SEQ ID NO: 2145149 - RNA, 19 nt, Homo sapiens
  misc_RNA (1)...(19): siRNA sense strand
ccacagccacuuccaaaua

SEQ ID NO: 2145150 - RNA, 19 nt, Homo sapiens
  misc_RNA (1)...(19): siRNA sense strand
gacagaagcugagauggaa

SEQ ID NO: 2145151 - RNA, 19 nt, Homo sapiens
  misc_RNA (1)...(19): siRNA sense strand
caacugaccuugcucaaac

SEQ ID NO: 2145152 - RNA, 19 nt, Homo sapiens
  misc_RNA (1)...(19): siRNA sense strand
caagacaaguuccuucaug

SEQ ID NO: 2145153 - RNA, 19 nt, Homo sapiens
  misc_RNA (1)...(19): siRNA sense strand
ugagggagcuggcaaagug

SEQ ID NO: 2145154 - RNA, 19 nt, Homo sapiens
  misc_RNA (1)...(19): siRNA sense strand
gggcagacuucauguucua

SEQ ID NO: 2145155 - RNA, 19 nt, Homo sapiens
  misc_RNA (1)...(19): siRNA sense strand
gaaagcucaucacagugua

SEQ ID NO: 2145156 - RNA, 19 nt, Homo sapiens
  misc_RNA (1)...(19): siRNA sense strand
gcaucaauauaacuggaua

SEQ ID NO: 2145157 - RNA, 19 nt, Homo sapiens
  misc_RNA (1)...(19): siRNA sense strand
ggagagagugugcaaagaa

SEQ ID NO: 2145158 - RNA, 19 nt, Homo sapiens
  misc_RNA (1)...(19): siRNA sense strand
ggacagaagcugagaugga

SEQ ID NO: 2145159 - RNA, 19 nt, Homo sapiens
  misc_RNA (1)...(19): siRNA sense strand
gaaaucacaccuuaugcaa

SEQ ID NO: 2145160 - RNA, 19 nt, Homo sapiens
  misc_RNA (1)...(19): siRNA sense strand
gcaaugggcagacuucaug

SEQ ID NO: 2145161 - RNA, 19 nt, Homo sapiens
  misc_RNA (1)...(19): siRNA sense strand
gacucaggcuucucuagua

SEQ ID NO: 2145162 - RNA, 19 nt, Homo sapiens
  misc_RNA (1)...(19): siRNA sense strand
gauacuaccugggacagaa

SEQ ID NO: 2145163 - RNA, 19 nt, Homo sapiens
  misc_RNA (1)...(19): siRNA sense strand
ccaaauccgucucucuaga

SEQ ID NO: 2145164 - RNA, 19 nt, Homo sapiens
  misc_RNA (1)...(19): siRNA sense strand
gaucagagccacagcuuag

SEQ ID NO: 2145165 - RNA, 19 nt, Homo sapiens
  misc_RNA (1)...(19): siRNA sense strand
gagaacagcaccaggaugu

SEQ ID NO: 2145166 - RNA, 19 nt, Homo sapiens
  misc_RNA (1)...(19): siRNA sense strand
ugacaugacuucaggaacu

SEQ ID NO: 2145167 - RNA, 19 nt, Homo sapiens
  misc_RNA (1)...(19): siRNA sense strand
cagaggaacaucuuuagaa

SEQ ID NO: 2145168 - RNA, 19 nt, Homo sapiens
  misc_RNA (1)...(19): siRNA sense strand
ggaacaaagggccucagua

SEQ ID NO: 2145169 - RNA, 19 nt, Homo sapiens
  misc_RNA (1)...(19): siRNA sense strand
gucaaggucugguacuuug

SEQ ID NO: 2145170 - RNA, 19 nt, Homo sapiens
  misc_RNA (1)...(19): siRNA sense strand
gacaaaagcaagacaguua

SEQ ID NO: 2145171 - RNA, 19 nt, Homo sapiens
  misc_RNA (1)...(19): siRNA sense strand
gaaaaccuuccucuaaaua

SEQ ID NO: 2145172 - RNA, 19 nt, Homo sapiens
  misc_RNA (1)...(19): siRNA sense strand
cagaaaugcaggacaguuu

SEQ ID NO: 2145173 - RNA, 19 nt, Homo sapiens
  misc_RNA (1)...(19): siRNA sense strand
uggcagaguuggaauuuca

SEQ ID NO: 2145174 - RNA, 19 nt, Homo sapiens
  misc_RNA (1)...(19): siRNA sense strand
agaggaacaucuuuagaau

SEQ ID NO: 2145175 - RNA, 19 nt, Homo sapiens
  misc_RNA (1)...(19): siRNA sense strand
guagaaagccaagagauca

SEQ ID NO: 2145176 - RNA, 19 nt, Homo sapiens
  misc_RNA (1)...(19): siRNA sense strand
agaguuggaauuucaguua

SEQ ID NO: 2145177 - RNA, 19 nt, Homo sapiens
  misc_RNA (1)...(19): siRNA sense strand
ucuaguaucugcccaaugg

SEQ ID NO: 2145178 - RNA, 19 nt, Homo sapiens
  misc_RNA (1)...(19): siRNA sense strand
acaaguuccuucauguuga

SEQ ID NO: 2145179 - RNA, 19 nt, Homo sapiens
  misc_RNA (1)...(19): siRNA sense strand
gacaaguuccuucauguug

SEQ ID NO: 2145180 - RNA, 19 nt, Homo sapiens
  misc_RNA (1)...(19): siRNA sense strand
cacagccacuuccaaauau

SEQ ID NO: 2145181 - RNA, 19 nt, Homo sapiens
  misc_RNA (1)...(19): siRNA sense strand
ccagaguccugcugagaau

SEQ ID NO: 2145182 - RNA, 19 nt, Homo sapiens
  misc_RNA (1)...(19): siRNA sense strand
gugcaaagccaccacaaug

SEQ ID NO: 2145183 - RNA, 19 nt, Homo sapiens
  misc_RNA (1)...(19): siRNA sense strand
ggaggaagaguuucugcuu

SEQ ID NO: 2145184 - RNA, 19 nt, Homo sapiens
  misc_RNA (1)...(19): siRNA sense strand
aggaagaguuucugcuuga

SEQ ID NO: 2145185 - RNA, 19 nt, Homo sapiens
  misc_RNA (1)...(19): siRNA sense strand
aagcaagacaguuaaauga

SEQ ID NO: 2145186 - RNA, 19 nt, Homo sapiens
  misc_RNA (1)...(19): siRNA sense strand
gugaaagacuacaugagau

SEQ ID NO: 2145187 - RNA, 19 nt, Homo sapiens
  misc_RNA (1)...(19): siRNA sense strand
ggagaaugcccaaggaaag

SEQ ID NO: 2145188 - RNA, 19 nt, Homo sapiens
  misc_RNA (1)...(19): siRNA sense strand
aaaugacugugaaagacua

SEQ ID NO: 2145189 - RNA, 19 nt, Homo sapiens
  misc_RNA (1)...(19): siRNA sense strand
ccgagcaacugcaaacguu

SEQ ID NO: 2145190 - RNA, 19 nt, Homo sapiens
  misc_RNA (1)...(19): siRNA sense strand
ggacaugucagaggaggaa

SEQ ID NO: 2145191 - RNA, 19 nt, Homo sapiens
  misc_RNA (1)...(19): siRNA sense strand
ugagaucuuugcaucaguu

SEQ ID NO: 2145192 - RNA, 19 nt, Homo sapiens
  misc_RNA (1)...(19): siRNA sense strand
caaccacagcuuacucgua

SEQ ID NO: 2145193 - RNA, 19 nt, Homo sapiens
  misc_RNA (1)...(19): siRNA sense strand
ucacaccaaccacagcuua

SEQ ID NO: 2145194 - RNA, 19 nt, Homo sapiens
  misc_RNA (1)...(19): siRNA sense strand
uaacccacgucacagaaau

SEQ ID NO: 2145195 - RNA, 19 nt, Homo sapiens
  misc_RNA (1)...(19): siRNA sense strand
acaaagggccucaguaucu

SEQ ID NO: 2145196 - RNA, 19 nt, Homo sapiens
  misc_RNA (1)...(19): siRNA sense strand
aagacgauaugccaaaguu

SEQ ID NO: 2145197 - RNA, 19 nt, Homo sapiens
  misc_RNA (1)...(19): siRNA sense strand
ccagccagauuccuugguu

SEQ ID NO: 2145198 - RNA, 19 nt, Homo sapiens
  misc_RNA (1)...(19): siRNA sense strand
gagaaugcccaaggaaaga

SEQ ID NO: 2145199 - RNA, 19 nt, Homo sapiens
  misc_RNA (1)...(19): siRNA sense strand
caaagggccucaguaucug

SEQ ID NO: 2145200 - RNA, 19 nt, Homo sapiens
  misc_RNA (1)...(19): siRNA sense strand
gcaaguguaccacaaagca

SEQ ID NO: 2145201 - RNA, 19 nt, Homo sapiens
  misc_RNA (1)...(19): siRNA sense strand
guagggcgagcaugucuuu

SEQ ID NO: 2145202 - RNA, 19 nt, Homo sapiens
  misc_RNA (1)...(19): siRNA sense strand
gagagagugugcaaagaac

SEQ ID NO: 2145203 - RNA, 19 nt, Homo sapiens
  misc_RNA (1)...(19): siRNA sense strand
ucaaaugacugugaaagac

SEQ ID NO: 2145204 - RNA, 19 nt, Homo sapiens
  misc_RNA (1)...(19): siRNA sense strand
ccaguuggcugccuucacu

SEQ ID NO: 2145205 - RNA, 19 nt, Homo sapiens
  misc_RNA (1)...(19): siRNA sense strand
ggcagcagguggcagaguu

SEQ ID NO: 2145206 - RNA, 19 nt, Homo sapiens
  misc_RNA (1)...(19): siRNA sense strand
caccaaauccgucucucua

SEQ ID NO: 2145207 - RNA, 19 nt, Homo sapiens
  misc_RNA (1)...(19): siRNA sense strand
gggagaaugcccaaggaaa

SEQ ID NO: 2145208 - RNA, 19 nt, Homo sapiens
  misc_RNA (1)...(19): siRNA sense strand
cagcagagccaccugaaca

SEQ ID NO: 2145209 - RNA, 19 nt, Homo sapiens
  misc_RNA (1)...(19): siRNA sense strand
gaaauccuggaccauguga

SEQ ID NO: 2145210 - RNA, 19 nt, Homo sapiens
  misc_RNA (1)...(19): siRNA sense strand
gaacagcaccaggaugucu

SEQ ID NO: 2145211 - RNA, 19 nt, Homo sapiens
  misc_RNA (1)...(19): siRNA sense strand
ccgggaguauuuagaagaa

SEQ ID NO: 2145212 - RNA, 19 nt, Homo sapiens
  misc_RNA (1)...(19): siRNA sense strand
aaaguuuccgggaguauuu

SEQ ID NO: 2145213 - RNA, 19 nt, Homo sapiens
  misc_RNA (1)...(19): siRNA sense strand
aggaacaucuuuagaaugc

SEQ ID NO: 2145214 - RNA, 19 nt, Homo sapiens
  misc_RNA (1)...(19): siRNA sense strand
gcaaagccaccacaaugag

SEQ ID NO: 2145215 - RNA, 19 nt, Homo sapiens
  misc_RNA (1)...(19): siRNA sense strand
uaucugugauggaggaaga

SEQ ID NO: 2145216 - RNA, 19 nt, Homo sapiens
  misc_RNA (1)...(19): siRNA sense strand
guaauccucuugacaugac

SEQ ID NO: 2145217 - RNA, 19 nt, Homo sapiens
  misc_RNA (1)...(19): siRNA sense strand
gaggagagagugugcaaag

SEQ ID NO: 2145218 - RNA, 19 nt, Homo sapiens
  misc_RNA (1)...(19): siRNA sense strand
caaacagagcugaagagaa

SEQ ID NO: 2145219 - RNA, 19 nt, Homo sapiens
  misc_RNA (1)...(19): siRNA sense strand
aaauuguccuguuggagaa

SEQ ID NO: 2145220 - RNA, 19 nt, Homo sapiens
  misc_RNA (1)...(19): siRNA sense strand
agagccaccugaacacuau

SEQ ID NO: 2145221 - RNA, 19 nt, Homo sapiens
  misc_RNA (1)...(19): siRNA sense strand
gaguuggaauuucaguuag

SEQ ID NO: 2145222 - RNA, 19 nt, Homo sapiens
  misc_RNA (1)...(19): siRNA sense strand
ccaggaagcccaguucaug

SEQ ID NO: 2145223 - RNA, 19 nt, Homo sapiens
  misc_RNA (1)...(19): siRNA sense strand
uagaaugcacuguguguga

SEQ ID NO: 2145224 - RNA, 19 nt, Homo sapiens
  misc_RNA (1)...(19): siRNA sense strand
gaggaacaucuuuagaaug

SEQ ID NO: 2145225 - RNA, 19 nt, Homo sapiens
  misc_RNA (1)...(19): siRNA sense strand
aaucacaccuuaugcaacu

SEQ ID NO: 2145226 - RNA, 19 nt, Homo sapiens
  misc_RNA (1)...(19): siRNA sense strand
gaagaagagacugguaauc

SEQ ID NO: 2145227 - RNA, 19 nt, Homo sapiens
  misc_RNA (1)...(19): siRNA sense strand
caacuuguacggucguuuc

SEQ ID NO: 2145228 - RNA, 19 nt, Homo sapiens
  misc_RNA (1)...(19): siRNA sense strand
gcagacuucauguucuaaa

SEQ ID NO: 2145229 - RNA, 19 nt, Homo sapiens
  misc_RNA (1)...(19): siRNA sense strand
gacgauaugccaaaguuuc

SEQ ID NO: 2145230 - RNA, 19 nt, Homo sapiens
  misc_RNA (1)...(19): siRNA sense strand
aaagcaagacaguuaaaug

SEQ ID NO: 2145231 - RNA, 19 nt, Homo sapiens
  misc_RNA (1)...(19): siRNA sense strand
uucagaaacucccauccua

SEQ ID NO: 2145232 - RNA, 19 nt, Homo sapiens
  misc_RNA (1)...(19): siRNA sense strand
ugaccuugcucaaacaucu

SEQ ID NO: 2145233 - RNA, 19 nt, Homo sapiens
  misc_RNA (1)...(19): siRNA sense strand
ugugaaagacuacaugaga

SEQ ID NO: 2145234 - RNA, 19 nt, Homo sapiens
  misc_RNA (1)...(19): siRNA sense strand
gguagaaagccaagagauc

SEQ ID NO: 2145235 - RNA, 19 nt, Homo sapiens
  misc_RNA (1)...(19): siRNA sense strand
ggaaaugaucauacucaag

SEQ ID NO: 2145236 - RNA, 19 nt, Homo sapiens
  misc_RNA (1)...(19): siRNA sense strand
gagccacagcuuaguauca

SEQ ID NO: 2145237 - RNA, 19 nt, Homo sapiens
  misc_RNA (1)...(19): siRNA sense strand
ucagagccacagcuuagua

SEQ ID NO: 2145238 - RNA, 19 nt, Homo sapiens
  misc_RNA (1)...(19): siRNA sense strand
gccaaaguuuccgggagua

SEQ ID NO: 2145239 - RNA, 19 nt, Homo sapiens
  misc_RNA (1)...(19): siRNA sense strand
gaaagcaaugggcagacuu

SEQ ID NO: 2145240 - RNA, 19 nt, Homo sapiens
  misc_RNA (1)...(19): siRNA sense strand
gcagguggcagaguuggaa

SEQ ID NO: 2145241 - RNA, 19 nt, Homo sapiens
  misc_RNA (1)...(19): siRNA sense strand
aaacagagcugaagagaaa

SEQ ID NO: 2145242 - RNA, 19 nt, Homo sapiens
  misc_RNA (1)...(19): siRNA sense strand
gaacaaagggccucaguau

SEQ ID NO: 2145243 - RNA, 19 nt, Homo sapiens
  misc_RNA (1)...(19): siRNA sense strand
gaaaugaucauacucaaga

SEQ ID NO: 2145244 - RNA, 19 nt, Homo sapiens
  misc_RNA (1)...(19): siRNA sense strand
gcaagacaguuaaaugaug

SEQ ID NO: 2145245 - RNA, 19 nt, Homo sapiens
  misc_RNA (1)...(19): siRNA sense strand
ccagaaagcucaucacagu

SEQ ID NO: 2145246 - RNA, 19 nt, Homo sapiens
  misc_RNA (1)...(19): siRNA sense strand
gcaaagcccuggcccugaa

SEQ ID NO: 2145247 - RNA, 19 nt, Homo sapiens
  misc_RNA (1)...(19): siRNA sense strand
gaaauugaacagcaccuua

SEQ ID NO: 2145248 - RNA, 19 nt, Homo sapiens
  misc_RNA (1)...(19): siRNA sense strand
caauauaacuggauagaag

SEQ ID NO: 2145249 - RNA, 19 nt, Homo sapiens
  misc_RNA (1)...(19): siRNA sense strand
ccacagccacuuccaaaua

SEQ ID NO: 2145250 - RNA, 19 nt, Homo sapiens
  misc_RNA (1)...(19): siRNA sense strand
gacagaagcugagauggaa

SEQ ID NO: 2145251 - RNA, 19 nt, Homo sapiens
  misc_RNA (1)...(19): siRNA sense strand
caacugaccuugcucaaac

SEQ ID NO: 2145252 - RNA, 19 nt, Homo sapiens
  misc_RNA (1)...(19): siRNA sense strand
caagacaaguuccuucaug

SEQ ID NO: 2145253 - RNA, 19 nt, Homo sapiens
  misc_RNA (1)...(19): siRNA sense strand
ugagggagcuggcaaagug

SEQ ID NO: 2145254 - RNA, 19 nt, Homo sapiens
  misc_RNA (1)...(19): siRNA sense strand
gggcagacuucauguucua

SEQ ID NO: 2145255 - RNA, 19 nt, Homo sapiens
  misc_RNA (1)...(19): siRNA sense strand
gaaagcucaucacagugua

SEQ ID NO: 2145256 - RNA, 19 nt, Homo sapiens
  misc_RNA (1)...(19): siRNA sense strand
gcaucaauauaacuggaua

SEQ ID NO: 2145257 - RNA, 19 nt, Homo sapiens
  misc_RNA (1)...(19): siRNA sense strand
ggagagagugugcaaagaa

SEQ ID NO: 2145258 - RNA, 19 nt, Homo sapiens
  misc_RNA (1)...(19): siRNA sense strand
ggacagaagcugagaugga

SEQ ID NO: 2145259 - RNA, 19 nt, Homo sapiens
  misc_RNA (1)...(19): siRNA sense strand
gaaaucacaccuuaugcaa

SEQ ID NO: 2145260 - RNA, 19 nt, Homo sapiens
  misc_RNA (1)...(19): siRNA sense strand
gcaaugggcagacuucaug

SEQ ID NO: 2145261 - RNA, 19 nt, Homo sapiens
  misc_RNA (1)...(19): siRNA sense strand
gacucaggcuucucuagua

SEQ ID NO: 2145262 - RNA, 19 nt, Homo sapiens
  misc_RNA (1)...(19): siRNA sense strand
gauacuaccugggacagaa

SEQ ID NO: 2145263 - RNA, 19 nt, Homo sapiens
  misc_RNA (1)...(19): siRNA sense strand
ccaaauccgucucucuaga

SEQ ID NO: 2145264 - RNA, 19 nt, Homo sapiens
  misc_RNA (1)...(19): siRNA sense strand
gaucagagccacagcuuag

SEQ ID NO: 2145265 - RNA, 19 nt, Homo sapiens
  misc_RNA (1)...(19): siRNA sense strand
gagaacagcaccaggaugu

SEQ ID NO: 2145266 - RNA, 19 nt, Homo sapiens
  misc_RNA (1)...(19): siRNA sense strand
ugacaugacuucaggaacu

SEQ ID NO: 2145267 - RNA, 19 nt, Homo sapiens
  misc_RNA (1)...(19): siRNA sense strand
cagaggaacaucuuuagaa

SEQ ID NO: 2145268 - RNA, 19 nt, Homo sapiens
  misc_RNA (1)...(19): siRNA sense strand
ggaacaaagggccucagua

SEQ ID NO: 2145269 - RNA, 19 nt, Homo sapiens
  misc_RNA (1)...(19): siRNA sense strand
gucaaggucugguacuuug

SEQ ID NO: 2145270 - RNA, 19 nt, Homo sapiens
  misc_RNA (1)...(19): siRNA sense strand
gacaaaagcaagacaguua

SEQ ID NO: 2145271 - RNA, 19 nt, Homo sapiens
  misc_RNA (1)...(19): siRNA sense strand
gaaaaccuuccucuaaaua

SEQ ID NO: 2145272 - RNA, 19 nt, Homo sapiens
  misc_RNA (1)...(19): siRNA sense strand
cagaaaugcaggacaguuu

SEQ ID NO: 2145273 - RNA, 19 nt, Homo sapiens
  misc_RNA (1)...(19): siRNA sense strand
uggcagaguuggaauuuca

SEQ ID NO: 2145274 - RNA, 19 nt, Homo sapiens
  misc_RNA (1)...(19): siRNA sense strand
agaggaacaucuuuagaau

SEQ ID NO: 2145275 - RNA, 19 nt, Homo sapiens
  misc_RNA (1)...(19): siRNA sense strand
guagaaagccaagagauca

SEQ ID NO: 2145276 - RNA, 19 nt, Homo sapiens
  misc_RNA (1)...(19): siRNA sense strand
agaguuggaauuucaguua

SEQ ID NO: 2145277 - RNA, 19 nt, Homo sapiens
  misc_RNA (1)...(19): siRNA sense strand
ucuaguaucugcccaaugg

SEQ ID NO: 2145278 - RNA, 19 nt, Homo sapiens
  misc_RNA (1)...(19): siRNA sense strand
acaaguuccuucauguuga

SEQ ID NO: 2145279 - RNA, 19 nt, Homo sapiens
  misc_RNA (1)...(19): siRNA sense strand
gacaaguuccuucauguug

SEQ ID NO: 2145280 - RNA, 19 nt, Homo sapiens
  misc_RNA (1)...(19): siRNA sense strand
cacagccacuuccaaauau

SEQ ID NO: 2145281 - RNA, 19 nt, Homo sapiens
  misc_RNA (1)...(19): siRNA sense strand
ccagaguccugcugagaau

SEQ ID NO: 2145282 - RNA, 19 nt, Homo sapiens
  misc_RNA (1)...(19): siRNA sense strand
gugcaaagccaccacaaug

SEQ ID NO: 2145283 - RNA, 19 nt, Homo sapiens
  misc_RNA (1)...(19): siRNA sense strand
ggaggaagaguuucugcuu

SEQ ID NO: 2145284 - RNA, 19 nt, Homo sapiens
  misc_RNA (1)...(19): siRNA sense strand
aggaagaguuucugcuuga

SEQ ID NO: 2145285 - RNA, 19 nt, Homo sapiens
  misc_RNA (1)...(19): siRNA sense strand
aagcaagacaguuaaauga

SEQ ID NO: 2145286 - RNA, 19 nt, Homo sapiens
  misc_RNA (1)...(19): siRNA sense strand
gugaaagacuacaugagau

SEQ ID NO: 2145287 - RNA, 19 nt, Homo sapiens
  misc_RNA (1)...(19): siRNA sense strand
ggagaaugcccaaggaaag

SEQ ID NO: 2145288 - RNA, 19 nt, Homo sapiens
  misc_RNA (1)...(19): siRNA sense strand
aaaugacugugaaagacua

SEQ ID NO: 2145289 - RNA, 19 nt, Homo sapiens
  misc_RNA (1)...(19): siRNA sense strand
ccgagcaacugcaaacguu

SEQ ID NO: 2145290 - RNA, 19 nt, Homo sapiens
  misc_RNA (1)...(19): siRNA sense strand
ggacaugucagaggaggaa

SEQ ID NO: 2145291 - RNA, 19 nt, Homo sapiens
  misc_RNA (1)...(19): siRNA sense strand
ugagaucuuugcaucaguu

SEQ ID NO: 2145292 - RNA, 19 nt, Homo sapiens
  misc_RNA (1)...(19): siRNA sense strand
caaccacagcuuacucgua

SEQ ID NO: 2145293 - RNA, 19 nt, Homo sapiens
  misc_RNA (1)...(19): siRNA sense strand
ucacaccaaccacagcuua

SEQ ID NO: 2145294 - RNA, 19 nt, Homo sapiens
  misc_RNA (1)...(19): siRNA sense strand
uaacccacgucacagaaau

SEQ ID NO: 2145295 - RNA, 19 nt, Homo sapiens
  misc_RNA (1)...(19): siRNA sense strand
acaaagggccucaguaucu

SEQ ID NO: 2145296 - RNA, 19 nt, Homo sapiens
  misc_RNA (1)...(19): siRNA sense strand
aagacgauaugccaaaguu

SEQ ID NO: 2145297 - RNA, 19 nt, Homo sapiens
  misc_RNA (1)...(19): siRNA sense strand
ccagccagauuccuugguu

SEQ ID NO: 2145298 - RNA, 19 nt, Homo sapiens
  misc_RNA (1)...(19): siRNA sense strand
gagaaugcccaaggaaaga

SEQ ID NO: 2145299 - RNA, 19 nt, Homo sapiens
  misc_RNA (1)...(19): siRNA sense strand
caaagggccucaguaucug

SEQ ID NO: 2145300 - RNA, 19 nt, Homo sapiens
  misc_RNA (1)...(19): siRNA sense strand
gcaaguguaccacaaagca

SEQ ID NO: 2145301 - RNA, 19 nt, Homo sapiens
  misc_RNA (1)...(19): siRNA sense strand
guagggcgagcaugucuuu

SEQ ID NO: 2145302 - RNA, 19 nt, Homo sapiens
  misc_RNA (1)...(19): siRNA sense strand
gagagagugugcaaagaac

SEQ ID NO: 2145303 - RNA, 19 nt, Homo sapiens
  misc_RNA (1)...(19): siRNA sense strand
ucaaaugacugugaaagac

SEQ ID NO: 2145304 - RNA, 19 nt, Homo sapiens
  misc_RNA (1)...(19): siRNA sense strand
ccaguuggcugccuucacu

SEQ ID NO: 2145305 - RNA, 19 nt, Homo sapiens
  misc_RNA (1)...(19): siRNA sense strand
ggcagcagguggcagaguu

SEQ ID NO: 2145306 - RNA, 19 nt, Homo sapiens
  misc_RNA (1)...(19): siRNA sense strand
caccaaauccgucucucua

SEQ ID NO: 2145307 - RNA, 19 nt, Homo sapiens
  misc_RNA (1)...(19): siRNA sense strand
gggagaaugcccaaggaaa

SEQ ID NO: 2145308 - RNA, 19 nt, Homo sapiens
  misc_RNA (1)...(19): siRNA sense strand
cagcagagccaccugaaca

SEQ ID NO: 2145309 - RNA, 19 nt, Homo sapiens
  misc_RNA (1)...(19): siRNA sense strand
gaaauccuggaccauguga

SEQ ID NO: 2145310 - RNA, 19 nt, Homo sapiens
  misc_RNA (1)...(19): siRNA sense strand
gaacagcaccaggaugucu

SEQ ID NO: 2145311 - RNA, 19 nt, Homo sapiens
  misc_RNA (1)...(19): siRNA sense strand
ccgggaguauuuagaagaa

SEQ ID NO: 2145312 - RNA, 19 nt, Homo sapiens
  misc_RNA (1)...(19): siRNA sense strand
aaaguuuccgggaguauuu

SEQ ID NO: 2145313 - RNA, 19 nt, Homo sapiens
  misc_RNA (1)...(19): siRNA sense strand
aggaacaucuuuagaaugc

SEQ ID NO: 2145314 - RNA, 19 nt, Homo sapiens
  misc_RNA (1)...(19): siRNA sense strand
gcaaagccaccacaaugag

SEQ ID NO: 2145315 - RNA, 19 nt, Homo sapiens
  misc_RNA (1)...(19): siRNA sense strand
uaucugugauggaggaaga

SEQ ID NO: 2145316 - RNA, 19 nt, Homo sapiens
  misc_RNA (1)...(19): siRNA sense strand
guaauccucuugacaugac

SEQ ID NO: 2145317 - RNA, 19 nt, Homo sapiens
  misc_RNA (1)...(19): siRNA sense strand
gaggagagagugugcaaag

SEQ ID NO: 2145318 - RNA, 19 nt, Homo sapiens
  misc_RNA (1)...(19): siRNA sense strand
caaacagagcugaagagaa

SEQ ID NO: 2145319 - RNA, 19 nt, Homo sapiens
  misc_RNA (1)...(19): siRNA sense strand
aaauuguccuguuggagaa

SEQ ID NO: 2145320 - RNA, 19 nt, Homo sapiens
  misc_RNA (1)...(19): siRNA sense strand
agagccaccugaacacuau

SEQ ID NO: 2145321 - RNA, 19 nt, Homo sapiens
  misc_RNA (1)...(19): siRNA sense strand
gaguuggaauuucaguuag

SEQ ID NO: 2145322 - RNA, 19 nt, Homo sapiens
  misc_RNA (1)...(19): siRNA sense strand
ccaggaagcccaguucaug

SEQ ID NO: 2145323 - RNA, 19 nt, Homo sapiens
  misc_RNA (1)...(19): siRNA sense strand
uagaaugcacuguguguga

SEQ ID NO: 2145324 - RNA, 19 nt, Homo sapiens
  misc_RNA (1)...(19): siRNA sense strand
gaggaacaucuuuagaaug

SEQ ID NO: 2145325 - RNA, 19 nt, Homo sapiens
  misc_RNA (1)...(19): siRNA sense strand
aaucacaccuuaugcaacu

SEQ ID NO: 2145326 - RNA, 19 nt, Homo sapiens
  misc_RNA (1)...(19): siRNA sense strand
gaagaagagacugguaauc

SEQ ID NO: 2145327 - RNA, 19 nt, Homo sapiens
  misc_RNA (1)...(19): siRNA sense strand
caacuuguacggucguuuc

SEQ ID NO: 2145328 - RNA, 19 nt, Homo sapiens
  misc_RNA (1)...(19): siRNA sense strand
gcagacuucauguucuaaa

SEQ ID NO: 2145329 - RNA, 19 nt, Homo sapiens
  misc_RNA (1)...(19): siRNA sense strand
gacgauaugccaaaguuuc

SEQ ID NO: 2145330 - RNA, 19 nt, Homo sapiens
  misc_RNA (1)...(19): siRNA sense strand
aaagcaagacaguuaaaug

SEQ ID NO: 2145331 - RNA, 19 nt, Homo sapiens
  misc_RNA (1)...(19): siRNA sense strand
uucagaaacucccauccua

SEQ ID NO: 2145332 - RNA, 19 nt, Homo sapiens
  misc_RNA (1)...(19): siRNA sense strand
ugaccuugcucaaacaucu

SEQ ID NO: 2145333 - RNA, 19 nt, Homo sapiens
  misc_RNA (1)...(19): siRNA sense strand
ugugaaagacuacaugaga

SEQ ID NO: 2145334 - RNA, 19 nt, Homo sapiens
  misc_RNA (1)...(19): siRNA sense strand
gguagaaagccaagagauc

SEQ ID NO: 2145335 - RNA, 19 nt, Homo sapiens
  misc_RNA (1)...(19): siRNA sense strand
ggaaaugaucauacucaag

SEQ ID NO: 2145336 - RNA, 19 nt, Homo sapiens
  misc_RNA (1)...(19): siRNA sense strand
gagccacagcuuaguauca

SEQ ID NO: 2145337 - RNA, 19 nt, Homo sapiens
  misc_RNA (1)...(19): siRNA sense strand
ucagagccacagcuuagua

SEQ ID NO: 2145338 - RNA, 19 nt, Homo sapiens
  misc_RNA (1)...(19): siRNA sense strand
gccaaaguuuccgggagua

SEQ ID NO: 2145339 - RNA, 19 nt, Homo sapiens
  misc_RNA (1)...(19): siRNA sense strand
gaaagcaaugggcagacuu

SEQ ID NO: 2145340 - RNA, 19 nt, Homo sapiens
  misc_RNA (1)...(19): siRNA sense strand
gcagguggcagaguuggaa

SEQ ID NO: 2145341 - RNA, 19 nt, Homo sapiens
  misc_RNA (1)...(19): siRNA sense strand
gaucagaccagacaaauuu

SEQ ID NO: 2145342 - RNA, 19 nt, Homo sapiens
  misc_RNA (1)...(19): siRNA sense strand
ggaagaauacucacaacua

SEQ ID NO: 2145343 - RNA, 19 nt, Homo sapiens
  misc_RNA (1)...(19): siRNA sense strand
ucagagagucuuccaauua

SEQ ID NO: 2145344 - RNA, 19 nt, Homo sapiens
  misc_RNA (1)...(19): siRNA sense strand
gaagaauacucacaacuac

SEQ ID NO: 2145345 - RNA, 19 nt, Homo sapiens
  misc_RNA (1)...(19): siRNA sense strand
ccaggaagauacuguguuu

SEQ ID NO: 2145346 - RNA, 19 nt, Homo sapiens
  misc_RNA (1)...(19): siRNA sense strand
uaagcaagcugccucugua

SEQ ID NO: 2145347 - RNA, 19 nt, Homo sapiens
  misc_RNA (1)...(19): siRNA sense strand
cuucauggcuuuccacuuu

SEQ ID NO: 2145348 - RNA, 19 nt, Homo sapiens
  misc_RNA (1)...(19): siRNA sense strand
ggagggaggugacgaaugg

SEQ ID NO: 2145349 - RNA, 19 nt, Homo sapiens
  misc_RNA (1)...(19): siRNA sense strand
gggaggugcuucauuagaa

SEQ ID NO: 2145350 - RNA, 19 nt, Homo sapiens
  misc_RNA (1)...(19): siRNA sense strand
ggaaagucauggcaggaaa

SEQ ID NO: 2145351 - RNA, 19 nt, Homo sapiens
  misc_RNA (1)...(19): siRNA sense strand
cagagagacuguucagaaa

SEQ ID NO: 2145352 - RNA, 19 nt, Homo sapiens
  misc_RNA (1)...(19): siRNA sense strand
gcagauaucaccagagaga

SEQ ID NO: 2145353 - RNA, 19 nt, Homo sapiens
  misc_RNA (1)...(19): siRNA sense strand
caacaagcauccagcacuu

SEQ ID NO: 2145354 - RNA, 19 nt, Homo sapiens
  misc_RNA (1)...(19): siRNA sense strand
ggaaauggagccacaguau

SEQ ID NO: 2145355 - RNA, 19 nt, Homo sapiens
  misc_RNA (1)...(19): siRNA sense strand
gaaauggagccacaguauu

SEQ ID NO: 2145356 - RNA, 19 nt, Homo sapiens
  misc_RNA (1)...(19): siRNA sense strand
gaugacgucuuccuagaug

SEQ ID NO: 2145357 - RNA, 19 nt, Homo sapiens
  misc_RNA (1)...(19): siRNA sense strand
gggaacagcugggaucaga

SEQ ID NO: 2145358 - RNA, 19 nt, Homo sapiens
  misc_RNA (1)...(19): siRNA sense strand
cuugggaggugcuucauua

SEQ ID NO: 2145359 - RNA, 19 nt, Homo sapiens
  misc_RNA (1)...(19): siRNA sense strand
agaaggaucccaaguauau

SEQ ID NO: 2145360 - RNA, 19 nt, Homo sapiens
  misc_RNA (1)...(19): siRNA sense strand
gagaagaugcugccaugaa

SEQ ID NO: 2145361 - RNA, 19 nt, Homo sapiens
  misc_RNA (1)...(19): siRNA sense strand
gagaucuuguccuucauuu

SEQ ID NO: 2145362 - RNA, 19 nt, Homo sapiens
  misc_RNA (1)...(19): siRNA sense strand
cacaaggucuuaauccuau

SEQ ID NO: 2145363 - RNA, 19 nt, Homo sapiens
  misc_RNA (1)...(19): siRNA sense strand
ccagagagacuguucagaa

SEQ ID NO: 2145364 - RNA, 19 nt, Homo sapiens
  misc_RNA (1)...(19): siRNA sense strand
gaaucgggaugacgucuuc

SEQ ID NO: 2145365 - RNA, 19 nt, Homo sapiens
  misc_RNA (1)...(19): siRNA sense strand
uuagaaggaucccaaguau

SEQ ID NO: 2145366 - RNA, 19 nt, Homo sapiens
  misc_RNA (1)...(19): siRNA sense strand
gggcaggaacccaaugaua

SEQ ID NO: 2145367 - RNA, 19 nt, Homo sapiens
  misc_RNA (1)...(19): siRNA sense strand
ggaacuaucaggaaaguca

SEQ ID NO: 2145368 - RNA, 19 nt, Homo sapiens
  misc_RNA (1)...(19): siRNA sense strand
ggaaaaguaugucugaaga

SEQ ID NO: 2145369 - RNA, 19 nt, Homo sapiens
  misc_RNA (1)...(19): siRNA sense strand
gaaaguaaggcaagcagau

SEQ ID NO: 2145370 - RNA, 19 nt, Homo sapiens
  misc_RNA (1)...(19): siRNA sense strand
ucacugagccaccagauga

SEQ ID NO: 2145371 - RNA, 19 nt, Homo sapiens
  misc_RNA (1)...(19): siRNA sense strand
uaucagacaugaaguuaag

SEQ ID NO: 2145372 - RNA, 19 nt, Homo sapiens
  misc_RNA (1)...(19): siRNA sense strand
guuacagcauggaagaaua

SEQ ID NO: 2145373 - RNA, 19 nt, Homo sapiens
  misc_RNA (1)...(19): siRNA sense strand
aagcagauaucaccagaga

SEQ ID NO: 2145374 - RNA, 19 nt, Homo sapiens
  misc_RNA (1)...(19): siRNA sense strand
gggaugacgucuuccuaga

SEQ ID NO: 2145375 - RNA, 19 nt, Homo sapiens
  misc_RNA (1)...(19): siRNA sense strand
ggacaugacagccacacuu

SEQ ID NO: 2145376 - RNA, 19 nt, Homo sapiens
  misc_RNA (1)...(19): siRNA sense strand
ccaaggcacugaaaguaag

SEQ ID NO: 2145377 - RNA, 19 nt, Homo sapiens
  misc_RNA (1)...(19): siRNA sense strand
gaacauggucucagugacu

SEQ ID NO: 2145378 - RNA, 19 nt, Homo sapiens
  misc_RNA (1)...(19): siRNA sense strand
ggucacaacuagccggaau

SEQ ID NO: 2145379 - RNA, 19 nt, Homo sapiens
  misc_RNA (1)...(19): siRNA sense strand
aaguuaagguucucacauu

SEQ ID NO: 2145380 - RNA, 19 nt, Homo sapiens
  misc_RNA (1)...(19): siRNA sense strand
acaaagggauaucuguguu

SEQ ID NO: 2145381 - RNA, 19 nt, Homo sapiens
  misc_RNA (1)...(19): siRNA sense strand
cagagagucuuccaauuac

SEQ ID NO: 2145382 - RNA, 19 nt, Homo sapiens
  misc_RNA (1)...(19): siRNA sense strand
caagaagggcugccagguu

SEQ ID NO: 2145383 - RNA, 19 nt, Homo sapiens
  misc_RNA (1)...(19): siRNA sense strand
gacaugaaguuaagguucu

SEQ ID NO: 2145384 - RNA, 19 nt, Homo sapiens
  misc_RNA (1)...(19): siRNA sense strand
gacaugacagccacacuuu

SEQ ID NO: 2145385 - RNA, 19 nt, Homo sapiens
  misc_RNA (1)...(19): siRNA sense strand
gccaaggcacugaaaguaa

SEQ ID NO: 2145386 - RNA, 19 nt, Homo sapiens
  misc_RNA (1)...(19): siRNA sense strand
cagaaacaccucagugaug

SEQ ID NO: 2145387 - RNA, 19 nt, Homo sapiens
  misc_RNA (1)...(19): siRNA sense strand
caaagggauaucuguguuu

SEQ ID NO: 2145388 - RNA, 19 nt, Homo sapiens
  misc_RNA (1)...(19): siRNA sense strand
gauugaacauggucucagu

SEQ ID NO: 2145389 - RNA, 19 nt, Homo sapiens
  misc_RNA (1)...(19): siRNA sense strand
guacaaccucaagcuaaua

SEQ ID NO: 2145390 - RNA, 19 nt, Homo sapiens
  misc_RNA (1)...(19): siRNA sense strand
aaagggauaucuguguuug

SEQ ID NO: 2145391 - RNA, 19 nt, Homo sapiens
  misc_RNA (1)...(19): siRNA sense strand
gcaaaacuucaacucauua

SEQ ID NO: 2145392 - RNA, 19 nt, Homo sapiens
  misc_RNA (1)...(19): siRNA sense strand
ggaacccaaugauaccaau

SEQ ID NO: 2145393 - RNA, 19 nt, Homo sapiens
  misc_RNA (1)...(19): siRNA sense strand
gaagaugcugccaugaaga

SEQ ID NO: 2145394 - RNA, 19 nt, Homo sapiens
  misc_RNA (1)...(19): siRNA sense strand
ccugaagaauggaaguauu

SEQ ID NO: 2145395 - RNA, 19 nt, Homo sapiens
  misc_RNA (1)...(19): siRNA sense strand
gaaguuaagguucucacau

SEQ ID NO: 2145396 - RNA, 19 nt, Homo sapiens
  misc_RNA (1)...(19): siRNA sense strand
aaaguaaggcaagcagaua

SEQ ID NO: 2145397 - RNA, 19 nt, Homo sapiens
  misc_RNA (1)...(19): siRNA sense strand
gcuaugucuucauggcuuu

SEQ ID NO: 2145398 - RNA, 19 nt, Homo sapiens
  misc_RNA (1)...(19): siRNA sense strand
gaauagugaacguggcaaa

SEQ ID NO: 2145399 - RNA, 19 nt, Homo sapiens
  misc_RNA (1)...(19): siRNA sense strand
acacaaggucuuaauccua

SEQ ID NO: 2145400 - RNA, 19 nt, Homo sapiens
  misc_RNA (1)...(19): siRNA sense strand
gagccacaguauuugguau

SEQ ID NO: 2145401 - RNA, 19 nt, Homo sapiens
  misc_RNA (1)...(19): siRNA sense strand
ggucggauuucaccacaag

SEQ ID NO: 2145402 - RNA, 19 nt, Homo sapiens
  misc_RNA (1)...(19): siRNA sense strand
agaagaugcugccaugaag

SEQ ID NO: 2145403 - RNA, 19 nt, Homo sapiens
  misc_RNA (1)...(19): siRNA sense strand
gauggugggcuucaggaaa

SEQ ID NO: 2145404 - RNA, 19 nt, Homo sapiens
  misc_RNA (1)...(19): siRNA sense strand
gcaagcugccucuguaugg

SEQ ID NO: 2145405 - RNA, 19 nt, Homo sapiens
  misc_RNA (1)...(19): siRNA sense strand
aaaagugucuguguucuaa

SEQ ID NO: 2145406 - RNA, 19 nt, Homo sapiens
  misc_RNA (1)...(19): siRNA sense strand
cagccacacuuuaccugaa

SEQ ID NO: 2145407 - RNA, 19 nt, Homo sapiens
  misc_RNA (1)...(19): siRNA sense strand
ggaucagaccagacaaauu

SEQ ID NO: 2145408 - RNA, 19 nt, Homo sapiens
  misc_RNA (1)...(19): siRNA sense strand
gaaacgucauggucacaac

SEQ ID NO: 2145409 - RNA, 19 nt, Homo sapiens
  misc_RNA (1)...(19): siRNA sense strand
ugaggcacgugacugagaa

SEQ ID NO: 2145410 - RNA, 19 nt, Homo sapiens
  misc_RNA (1)...(19): siRNA sense strand
cacuuuaccugaagaaugg

SEQ ID NO: 2145411 - RNA, 19 nt, Homo sapiens
  misc_RNA (1)...(19): siRNA sense strand
gcacuugcagaaauaaauc

SEQ ID NO: 2145412 - RNA, 19 nt, Homo sapiens
  misc_RNA (1)...(19): siRNA sense strand
gcacugaugacuguguuau

SEQ ID NO: 2145413 - RNA, 19 nt, Homo sapiens
  misc_RNA (1)...(19): siRNA sense strand
uccagcacuugcagaaaua

SEQ ID NO: 2145414 - RNA, 19 nt, Homo sapiens
  misc_RNA (1)...(19): siRNA sense strand
ggagccacaguauuuggua

SEQ ID NO: 2145415 - RNA, 19 nt, Homo sapiens
  misc_RNA (1)...(19): siRNA sense strand
gcuguuggccagucaguug

SEQ ID NO: 2145416 - RNA, 19 nt, Homo sapiens
  misc_RNA (1)...(19): siRNA sense strand
cagcauggaagaauacuca

SEQ ID NO: 2145417 - RNA, 19 nt, Homo sapiens
  misc_RNA (1)...(19): siRNA sense strand
cugaagaauggaaguauuu

SEQ ID NO: 2145418 - RNA, 19 nt, Homo sapiens
  misc_RNA (1)...(19): siRNA sense strand
uguacaaccucaagcuaau

SEQ ID NO: 2145419 - RNA, 19 nt, Homo sapiens
  misc_RNA (1)...(19): siRNA sense strand
caaggucuuaauccuauuu

SEQ ID NO: 2145420 - RNA, 19 nt, Homo sapiens
  misc_RNA (1)...(19): siRNA sense strand
gauaucuguguuugccuua

SEQ ID NO: 2145421 - RNA, 19 nt, Homo sapiens
  misc_RNA (1)...(19): siRNA sense strand
gcaauuagacaaugaaaag

SEQ ID NO: 2145422 - RNA, 19 nt, Homo sapiens
  misc_RNA (1)...(19): siRNA sense strand
gaaaagugucuguguucua

SEQ ID NO: 2145423 - RNA, 19 nt, Homo sapiens
  misc_RNA (1)...(19): siRNA sense strand
acacugcaauuagacaaug

SEQ ID NO: 2145424 - RNA, 19 nt, Homo sapiens
  misc_RNA (1)...(19): siRNA sense strand
ccaguuugcggucuacauu

SEQ ID NO: 2145425 - RNA, 19 nt, Homo sapiens
  misc_RNA (1)...(19): siRNA sense strand
cccaaccacugcagaccua

SEQ ID NO: 2145426 - RNA, 19 nt, Homo sapiens
  misc_RNA (1)...(19): siRNA sense strand
uagaaggaucccaaguaua

SEQ ID NO: 2145427 - RNA, 19 nt, Homo sapiens
  misc_RNA (1)...(19): siRNA sense strand
uauuugguaucucuugcua

SEQ ID NO: 2145428 - RNA, 19 nt, Homo sapiens
  misc_RNA (1)...(19): siRNA sense strand
ugacugagaaucgggauga

SEQ ID NO: 2145429 - RNA, 19 nt, Homo sapiens
  misc_RNA (1)...(19): siRNA sense strand
gcucauuucggguuuggaa

SEQ ID NO: 2145430 - RNA, 19 nt, Homo sapiens
  misc_RNA (1)...(19): siRNA sense strand
cuugggaacuaucaggaaa

SEQ ID NO: 2145431 - RNA, 19 nt, Homo sapiens
  misc_RNA (1)...(19): siRNA sense strand
agacugaggagccuuuguu

SEQ ID NO: 2145432 - RNA, 19 nt, Homo sapiens
  misc_RNA (1)...(19): siRNA sense strand
gcauccagcacuugcagaa

SEQ ID NO: 2145433 - RNA, 19 nt, Homo sapiens
  misc_RNA (1)...(19): siRNA sense strand
ccucagugaugccauugug

SEQ ID NO: 2145434 - RNA, 19 nt, Homo sapiens
  misc_RNA (1)...(19): siRNA sense strand
acaccucagugaugccauu

SEQ ID NO: 2145435 - RNA, 19 nt, Homo sapiens
  misc_RNA (1)...(19): siRNA sense strand
ugaggagccuuuguuccaa

SEQ ID NO: 2145436 - RNA, 19 nt, Homo sapiens
  misc_RNA (1)...(19): siRNA sense strand
uagccggaauguuguacaa

SEQ ID NO: 2145437 - RNA, 19 nt, Homo sapiens
  misc_RNA (1)...(19): siRNA sense strand
ggaaacgucauggucacaa

SEQ ID NO: 2145438 - RNA, 19 nt, Homo sapiens
  misc_RNA (1)...(19): siRNA sense strand
gugaugccauuguggaagu

SEQ ID NO: 2145439 - RNA, 19 nt, Homo sapiens
  misc_RNA (1)...(19): siRNA sense strand
gaccccaacuugaaagaaa

SEQ ID NO: 2145440 - RNA, 19 nt, Homo sapiens
  misc_RNA (1)...(19): siRNA sense strand
ggcaggaacccaaugauac

SEQ ID NO: 2145441 - RNA, 19 nt, Homo sapiens
  misc_RNA (1)...(19): siRNA sense strand
gaucagaccagacaaauuu

SEQ ID NO: 2145442 - RNA, 19 nt, Homo sapiens
  misc_RNA (1)...(19): siRNA sense strand
ggaagaauacucacaacua

SEQ ID NO: 2145443 - RNA, 19 nt, Homo sapiens
  misc_RNA (1)...(19): siRNA sense strand
ucagagagucuuccaauua

SEQ ID NO: 2145444 - RNA, 19 nt, Homo sapiens
  misc_RNA (1)...(19): siRNA sense strand
gaagaauacucacaacuac

SEQ ID NO: 2145445 - RNA, 19 nt, Homo sapiens
  misc_RNA (1)...(19): siRNA sense strand
ccaggaagauacuguguuu

SEQ ID NO: 2145446 - RNA, 19 nt, Homo sapiens
  misc_RNA (1)...(19): siRNA sense strand
uaagcaagcugccucugua

SEQ ID NO: 2145447 - RNA, 19 nt, Homo sapiens
  misc_RNA (1)...(19): siRNA sense strand
cuucauggcuuuccacuuu

SEQ ID NO: 2145448 - RNA, 19 nt, Homo sapiens
  misc_RNA (1)...(19): siRNA sense strand
ggagggaggugacgaaugg

SEQ ID NO: 2145449 - RNA, 19 nt, Homo sapiens
  misc_RNA (1)...(19): siRNA sense strand
gggaggugcuucauuagaa

SEQ ID NO: 2145450 - RNA, 19 nt, Homo sapiens
  misc_RNA (1)...(19): siRNA sense strand
ggaaagucauggcaggaaa

SEQ ID NO: 2145451 - RNA, 19 nt, Homo sapiens
  misc_RNA (1)...(19): siRNA sense strand
cagagagacuguucagaaa

SEQ ID NO: 2145452 - RNA, 19 nt, Homo sapiens
  misc_RNA (1)...(19): siRNA sense strand
gcagauaucaccagagaga

SEQ ID NO: 2145453 - RNA, 19 nt, Homo sapiens
  misc_RNA (1)...(19): siRNA sense strand
caacaagcauccagcacuu

SEQ ID NO: 2145454 - RNA, 19 nt, Homo sapiens
  misc_RNA (1)...(19): siRNA sense strand
ggaaauggagccacaguau

SEQ ID NO: 2145455 - RNA, 19 nt, Homo sapiens
  misc_RNA (1)...(19): siRNA sense strand
gaaauggagccacaguauu

SEQ ID NO: 2145456 - RNA, 19 nt, Homo sapiens
  misc_RNA (1)...(19): siRNA sense strand
gaugacgucuuccuagaug

SEQ ID NO: 2145457 - RNA, 19 nt, Homo sapiens
  misc_RNA (1)...(19): siRNA sense strand
gggaacagcugggaucaga

SEQ ID NO: 2145458 - RNA, 19 nt, Homo sapiens
  misc_RNA (1)...(19): siRNA sense strand
cuugggaggugcuucauua

SEQ ID NO: 2145459 - RNA, 19 nt, Homo sapiens
  misc_RNA (1)...(19): siRNA sense strand
agaaggaucccaaguauau

SEQ ID NO: 2145460 - RNA, 19 nt, Homo sapiens
  misc_RNA (1)...(19): siRNA sense strand
gagaagaugcugccaugaa

SEQ ID NO: 2145461 - RNA, 19 nt, Homo sapiens
  misc_RNA (1)...(19): siRNA sense strand
gagaucuuguccuucauuu

SEQ ID NO: 2145462 - RNA, 19 nt, Homo sapiens
  misc_RNA (1)...(19): siRNA sense strand
cacaaggucuuaauccuau

SEQ ID NO: 2145463 - RNA, 19 nt, Homo sapiens
  misc_RNA (1)...(19): siRNA sense strand
ccagagagacuguucagaa

SEQ ID NO: 2145464 - RNA, 19 nt, Homo sapiens
  misc_RNA (1)...(19): siRNA sense strand
gaaucgggaugacgucuuc

SEQ ID NO: 2145465 - RNA, 19 nt, Homo sapiens
  misc_RNA (1)...(19): siRNA sense strand
uuagaaggaucccaaguau

SEQ ID NO: 2145466 - RNA, 19 nt, Homo sapiens
  misc_RNA (1)...(19): siRNA sense strand
gggcaggaacccaaugaua

SEQ ID NO: 2145467 - RNA, 19 nt, Homo sapiens
  misc_RNA (1)...(19): siRNA sense strand
ggaacuaucaggaaaguca

SEQ ID NO: 2145468 - RNA, 19 nt, Homo sapiens
  misc_RNA (1)...(19): siRNA sense strand
ggaaaaguaugucugaaga

SEQ ID NO: 2145469 - RNA, 19 nt, Homo sapiens
  misc_RNA (1)...(19): siRNA sense strand
gaaaguaaggcaagcagau

SEQ ID NO: 2145470 - RNA, 19 nt, Homo sapiens
  misc_RNA (1)...(19): siRNA sense strand
ucacugagccaccagauga

SEQ ID NO: 2145471 - RNA, 19 nt, Homo sapiens
  misc_RNA (1)...(19): siRNA sense strand
uaucagacaugaaguuaag

SEQ ID NO: 2145472 - RNA, 19 nt, Homo sapiens
  misc_RNA (1)...(19): siRNA sense strand
guuacagcauggaagaaua

SEQ ID NO: 2145473 - RNA, 19 nt, Homo sapiens
  misc_RNA (1)...(19): siRNA sense strand
aagcagauaucaccagaga

SEQ ID NO: 2145474 - RNA, 19 nt, Homo sapiens
  misc_RNA (1)...(19): siRNA sense strand
gggaugacgucuuccuaga

SEQ ID NO: 2145475 - RNA, 19 nt, Homo sapiens
  misc_RNA (1)...(19): siRNA sense strand
ggacaugacagccacacuu

SEQ ID NO: 2145476 - RNA, 19 nt, Homo sapiens
  misc_RNA (1)...(19): siRNA sense strand
ccaaggcacugaaaguaag

SEQ ID NO: 2145477 - RNA, 19 nt, Homo sapiens
  misc_RNA (1)...(19): siRNA sense strand
gaacauggucucagugacu

SEQ ID NO: 2145478 - RNA, 19 nt, Homo sapiens
  misc_RNA (1)...(19): siRNA sense strand
ggucacaacuagccggaau

SEQ ID NO: 2145479 - RNA, 19 nt, Homo sapiens
  misc_RNA (1)...(19): siRNA sense strand
aaguuaagguucucacauu

SEQ ID NO: 2145480 - RNA, 19 nt, Homo sapiens
  misc_RNA (1)...(19): siRNA sense strand
acaaagggauaucuguguu

SEQ ID NO: 2145481 - RNA, 19 nt, Homo sapiens
  misc_RNA (1)...(19): siRNA sense strand
cagagagucuuccaauuac

SEQ ID NO: 2145482 - RNA, 19 nt, Homo sapiens
  misc_RNA (1)...(19): siRNA sense strand
caagaagggcugccagguu

SEQ ID NO: 2145483 - RNA, 19 nt, Homo sapiens
  misc_RNA (1)...(19): siRNA sense strand
gacaugaaguuaagguucu

SEQ ID NO: 2145484 - RNA, 19 nt, Homo sapiens
  misc_RNA (1)...(19): siRNA sense strand
gacaugacagccacacuuu

SEQ ID NO: 2145485 - RNA, 19 nt, Homo sapiens
  misc_RNA (1)...(19): siRNA sense strand
gccaaggcacugaaaguaa

SEQ ID NO: 2145486 - RNA, 19 nt, Homo sapiens
  misc_RNA (1)...(19): siRNA sense strand
cagaaacaccucagugaug

SEQ ID NO: 2145487 - RNA, 19 nt, Homo sapiens
  misc_RNA (1)...(19): siRNA sense strand
caaagggauaucuguguuu

SEQ ID NO: 2145488 - RNA, 19 nt, Homo sapiens
  misc_RNA (1)...(19): siRNA sense strand
gauugaacauggucucagu

SEQ ID NO: 2145489 - RNA, 19 nt, Homo sapiens
  misc_RNA (1)...(19): siRNA sense strand
guacaaccucaagcuaaua

SEQ ID NO: 2145490 - RNA, 19 nt, Homo sapiens
  misc_RNA (1)...(19): siRNA sense strand
aaagggauaucuguguuug

SEQ ID NO: 2145491 - RNA, 19 nt, Homo sapiens
  misc_RNA (1)...(19): siRNA sense strand
gcaaaacuucaacucauua

SEQ ID NO: 2145492 - RNA, 19 nt, Homo sapiens
  misc_RNA (1)...(19): siRNA sense strand
ggaacccaaugauaccaau

SEQ ID NO: 2145493 - RNA, 19 nt, Homo sapiens
  misc_RNA (1)...(19): siRNA sense strand
gaagaugcugccaugaaga

SEQ ID NO: 2145494 - RNA, 19 nt, Homo sapiens
  misc_RNA (1)...(19): siRNA sense strand
ccugaagaauggaaguauu

SEQ ID NO: 2145495 - RNA, 19 nt, Homo sapiens
  misc_RNA (1)...(19): siRNA sense strand
gaaguuaagguucucacau

SEQ ID NO: 2145496 - RNA, 19 nt, Homo sapiens
  misc_RNA (1)...(19): siRNA sense strand
aaaguaaggcaagcagaua

SEQ ID NO: 2145497 - RNA, 19 nt, Homo sapiens
  misc_RNA (1)...(19): siRNA sense strand
gcuaugucuucauggcuuu

SEQ ID NO: 2145498 - RNA, 19 nt, Homo sapiens
  misc_RNA (1)...(19): siRNA sense strand
gaauagugaacguggcaaa

SEQ ID NO: 2145499 - RNA, 19 nt, Homo sapiens
  misc_RNA (1)...(19): siRNA sense strand
acacaaggucuuaauccua

SEQ ID NO: 2145500 - RNA, 19 nt, Homo sapiens
  misc_RNA (1)...(19): siRNA sense strand
gagccacaguauuugguau

SEQ ID NO: 2145501 - RNA, 19 nt, Homo sapiens
  misc_RNA (1)...(19): siRNA sense strand
ggucggauuucaccacaag

SEQ ID NO: 2145502 - RNA, 19 nt, Homo sapiens
  misc_RNA (1)...(19): siRNA sense strand
agaagaugcugccaugaag

SEQ ID NO: 2145503 - RNA, 19 nt, Homo sapiens
  misc_RNA (1)...(19): siRNA sense strand
gauggugggcuucaggaaa

SEQ ID NO: 2145504 - RNA, 19 nt, Homo sapiens
  misc_RNA (1)...(19): siRNA sense strand
gcaagcugccucuguaugg

SEQ ID NO: 2145505 - RNA, 19 nt, Homo sapiens
  misc_RNA (1)...(19): siRNA sense strand
aaaagugucuguguucuaa

SEQ ID NO: 2145506 - RNA, 19 nt, Homo sapiens
  misc_RNA (1)...(19): siRNA sense strand
cagccacacuuuaccugaa

SEQ ID NO: 2145507 - RNA, 19 nt, Homo sapiens
  misc_RNA (1)...(19): siRNA sense strand
ggaucagaccagacaaauu

SEQ ID NO: 2145508 - RNA, 19 nt, Homo sapiens
  misc_RNA (1)...(19): siRNA sense strand
gaaacgucauggucacaac

SEQ ID NO: 2145509 - RNA, 19 nt, Homo sapiens
  misc_RNA (1)...(19): siRNA sense strand
ugaggcacgugacugagaa

SEQ ID NO: 2145510 - RNA, 19 nt, Homo sapiens
  misc_RNA (1)...(19): siRNA sense strand
cacuuuaccugaagaaugg

SEQ ID NO: 2145511 - RNA, 19 nt, Homo sapiens
  misc_RNA (1)...(19): siRNA sense strand
gcacuugcagaaauaaauc

SEQ ID NO: 2145512 - RNA, 19 nt, Homo sapiens
  misc_RNA (1)...(19): siRNA sense strand
gcacugaugacuguguuau

SEQ ID NO: 2145513 - RNA, 19 nt, Homo sapiens
  misc_RNA (1)...(19): siRNA sense strand
uccagcacuugcagaaaua

SEQ ID NO: 2145514 - RNA, 19 nt, Homo sapiens
  misc_RNA (1)...(19): siRNA sense strand
ggagccacaguauuuggua

SEQ ID NO: 2145515 - RNA, 19 nt, Homo sapiens
  misc_RNA (1)...(19): siRNA sense strand
gcuguuggccagucaguug

SEQ ID NO: 2145516 - RNA, 19 nt, Homo sapiens
  misc_RNA (1)...(19): siRNA sense strand
cagcauggaagaauacuca

SEQ ID NO: 2145517 - RNA, 19 nt, Homo sapiens
  misc_RNA (1)...(19): siRNA sense strand
cugaagaauggaaguauuu

SEQ ID NO: 2145518 - RNA, 19 nt, Homo sapiens
  misc_RNA (1)...(19): siRNA sense strand
uguacaaccucaagcuaau

SEQ ID NO: 2145519 - RNA, 19 nt, Homo sapiens
  misc_RNA (1)...(19): siRNA sense strand
caaggucuuaauccuauuu

SEQ ID NO: 2145520 - RNA, 19 nt, Homo sapiens
  misc_RNA (1)...(19): siRNA sense strand
gauaucuguguuugccuua

SEQ ID NO: 2145521 - RNA, 19 nt, Homo sapiens
  misc_RNA (1)...(19): siRNA sense strand
gcaauuagacaaugaaaag

SEQ ID NO: 2145522 - RNA, 19 nt, Homo sapiens
  misc_RNA (1)...(19): siRNA sense strand
gaaaagugucuguguucua

SEQ ID NO: 2145523 - RNA, 19 nt, Homo sapiens
  misc_RNA (1)...(19): siRNA sense strand
acacugcaauuagacaaug

SEQ ID NO: 2145524 - RNA, 19 nt, Homo sapiens
  misc_RNA (1)...(19): siRNA sense strand
ccaguuugcggucuacauu

SEQ ID NO: 2145525 - RNA, 19 nt, Homo sapiens
  misc_RNA (1)...(19): siRNA sense strand
cccaaccacugcagaccua

SEQ ID NO: 2145526 - RNA, 19 nt, Homo sapiens
  misc_RNA (1)...(19): siRNA sense strand
uagaaggaucccaaguaua

SEQ ID NO: 2145527 - RNA, 19 nt, Homo sapiens
  misc_RNA (1)...(19): siRNA sense strand
uauuugguaucucuugcua

SEQ ID NO: 2145528 - RNA, 19 nt, Homo sapiens
  misc_RNA (1)...(19): siRNA sense strand
ugacugagaaucgggauga

SEQ ID NO: 2145529 - RNA, 19 nt, Homo sapiens
  misc_RNA (1)...(19): siRNA sense strand
gcucauuucggguuuggaa

SEQ ID NO: 2145530 - RNA, 19 nt, Homo sapiens
  misc_RNA (1)...(19): siRNA sense strand
cuugggaacuaucaggaaa

SEQ ID NO: 2145531 - RNA, 19 nt, Homo sapiens
  misc_RNA (1)...(19): siRNA sense strand
agacugaggagccuuuguu

SEQ ID NO: 2145532 - RNA, 19 nt, Homo sapiens
  misc_RNA (1)...(19): siRNA sense strand
gcauccagcacuugcagaa

SEQ ID NO: 2145533 - RNA, 19 nt, Homo sapiens
  misc_RNA (1)...(19): siRNA sense strand
ccucagugaugccauugug

SEQ ID NO: 2145534 - RNA, 19 nt, Homo sapiens
  misc_RNA (1)...(19): siRNA sense strand
acaccucagugaugccauu

SEQ ID NO: 2145535 - RNA, 19 nt, Homo sapiens
  misc_RNA (1)...(19): siRNA sense strand
ugaggagccuuuguuccaa

SEQ ID NO: 2145536 - RNA, 19 nt, Homo sapiens
  misc_RNA (1)...(19): siRNA sense strand
uagccggaauguuguacaa

SEQ ID NO: 2145537 - RNA, 19 nt, Homo sapiens
  misc_RNA (1)...(19): siRNA sense strand
ggaaacgucauggucacaa

SEQ ID NO: 2145538 - RNA, 19 nt, Homo sapiens
  misc_RNA (1)...(19): siRNA sense strand
gugaugccauuguggaagu

SEQ ID NO: 2145539 - RNA, 19 nt, Homo sapiens
  misc_RNA (1)...(19): siRNA sense strand
gaccccaacuugaaagaaa

SEQ ID NO: 2145540 - RNA, 19 nt, Homo sapiens
  misc_RNA (1)...(19): siRNA sense strand
ggcaggaacccaaugauac

SEQ ID NO: 2145541 - RNA, 19 nt, Homo sapiens
  misc_RNA (1)...(19): siRNA sense strand
uaaagggacuguauuauuc

SEQ ID NO: 2145542 - RNA, 19 nt, Homo sapiens
  misc_RNA (1)...(19): siRNA sense strand
gcagaugacgguuauauaa

SEQ ID NO: 2145543 - RNA, 19 nt, Homo sapiens
  misc_RNA (1)...(19): siRNA sense strand
gcaguuugcucaguuugua

SEQ ID NO: 2145544 - RNA, 19 nt, Homo sapiens
  misc_RNA (1)...(19): siRNA sense strand
gaucagacuuaauuuggaa

SEQ ID NO: 2145545 - RNA, 19 nt, Homo sapiens
  misc_RNA (1)...(19): siRNA sense strand
gaguauggaugauuaugaa

SEQ ID NO: 2145546 - RNA, 19 nt, Homo sapiens
  misc_RNA (1)...(19): siRNA sense strand
ugaaagcugugaaggauug

SEQ ID NO: 2145547 - RNA, 19 nt, Homo sapiens
  misc_RNA (1)...(19): siRNA sense strand
guaggacccugucugcuuu

SEQ ID NO: 2145548 - RNA, 19 nt, Homo sapiens
  misc_RNA (1)...(19): siRNA sense strand
gaugagugcuguuuauucu

SEQ ID NO: 2145549 - RNA, 19 nt, Homo sapiens
  misc_RNA (1)...(19): siRNA sense strand
guacuggauuuauaccaaa

SEQ ID NO: 2145550 - RNA, 19 nt, Homo sapiens
  misc_RNA (1)...(19): siRNA sense strand
ccagaugagugcuguuuau

SEQ ID NO: 2145551 - RNA, 19 nt, Homo sapiens
  misc_RNA (1)...(19): siRNA sense strand
ggacuucauugcaauucaa

SEQ ID NO: 2145552 - RNA, 19 nt, Homo sapiens
  misc_RNA (1)...(19): siRNA sense strand
gagaauguuucgcgagaau

SEQ ID NO: 2145553 - RNA, 19 nt, Homo sapiens
  misc_RNA (1)...(19): siRNA sense strand
aauggaguauggaugauua

SEQ ID NO: 2145554 - RNA, 19 nt, Homo sapiens
  misc_RNA (1)...(19): siRNA sense strand
gaaagcuucucauauccau

SEQ ID NO: 2145555 - RNA, 19 nt, Homo sapiens
  misc_RNA (1)...(19): siRNA sense strand
gaguguaccuguguaaugu

SEQ ID NO: 2145556 - RNA, 19 nt, Homo sapiens
  misc_RNA (1)...(19): siRNA sense strand
cuucagauguugcuuguga

SEQ ID NO: 2145557 - RNA, 19 nt, Homo sapiens
  misc_RNA (1)...(19): siRNA sense strand
gcaauucaaaccaagauau

SEQ ID NO: 2145558 - RNA, 19 nt, Homo sapiens
  misc_RNA (1)...(19): siRNA sense strand
ggaacugucauacuuaaau

SEQ ID NO: 2145559 - RNA, 19 nt, Homo sapiens
  misc_RNA (1)...(19): siRNA sense strand
ggaucagacuuaauuugga

SEQ ID NO: 2145560 - RNA, 19 nt, Homo sapiens
  misc_RNA (1)...(19): siRNA sense strand
ggaguauggaugauuauga

SEQ ID NO: 2145561 - RNA, 19 nt, Homo sapiens
  misc_RNA (1)...(19): siRNA sense strand
cgcgaaagcuucucauauc

SEQ ID NO: 2145562 - RNA, 19 nt, Homo sapiens
  misc_RNA (1)...(19): siRNA sense strand
gcacucugcauuuccaauu

SEQ ID NO: 2145563 - RNA, 19 nt, Homo sapiens
  misc_RNA (1)...(19): siRNA sense strand
gcgagaaucccaaggguau

SEQ ID NO: 2145564 - RNA, 19 nt, Homo sapiens
  misc_RNA (1)...(19): siRNA sense strand
gagaagggcagcacuacga

SEQ ID NO: 2145565 - RNA, 19 nt, Homo sapiens
  misc_RNA (1)...(19): siRNA sense strand
ggacuguauuauuccuauu

SEQ ID NO: 2145566 - RNA, 19 nt, Homo sapiens
  misc_RNA (1)...(19): siRNA sense strand
acucugcauuuccaauuua

SEQ ID NO: 2145567 - RNA, 19 nt, Homo sapiens
  misc_RNA (1)...(19): siRNA sense strand
ucauauccauuucuuguuc

SEQ ID NO: 2145568 - RNA, 19 nt, Homo sapiens
  misc_RNA (1)...(19): siRNA sense strand
gaucuugcuugcuucuaug

SEQ ID NO: 2145569 - RNA, 19 nt, Homo sapiens
  misc_RNA (1)...(19): siRNA sense strand
gggacuguauuauuccuau

SEQ ID NO: 2145570 - RNA, 19 nt, Homo sapiens
  misc_RNA (1)...(19): siRNA sense strand
ugggagaucuugcuugcuu

SEQ ID NO: 2145571 - RNA, 19 nt, Homo sapiens
  misc_RNA (1)...(19): siRNA sense strand
ggagaguguaccuguguaa

SEQ ID NO: 2145572 - RNA, 19 nt, Homo sapiens
  misc_RNA (1)...(19): siRNA sense strand
gaggagacgcggagaggaa

SEQ ID NO: 2145573 - RNA, 19 nt, Homo sapiens
  misc_RNA (1)...(19): siRNA sense strand
gcucaguuuguacuucuua

SEQ ID NO: 2145574 - RNA, 19 nt, Homo sapiens
  misc_RNA (1)...(19): siRNA sense strand
gauggcauuauucuucaua

SEQ ID NO: 2145575 - RNA, 19 nt, Homo sapiens
  misc_RNA (1)...(19): siRNA sense strand
gguaggacccugucugcuu

SEQ ID NO: 2145576 - RNA, 19 nt, Homo sapiens
  misc_RNA (1)...(19): siRNA sense strand
gaauggaguauggaugauu

SEQ ID NO: 2145577 - RNA, 19 nt, Homo sapiens
  misc_RNA (1)...(19): siRNA sense strand
gaucaacguugugggucuu

SEQ ID NO: 2145578 - RNA, 19 nt, Homo sapiens
  misc_RNA (1)...(19): siRNA sense strand
uuucaagacuauuguggaa

SEQ ID NO: 2145579 - RNA, 19 nt, Homo sapiens
  misc_RNA (1)...(19): siRNA sense strand
ucaagacuauuguggaaac

SEQ ID NO: 2145580 - RNA, 19 nt, Homo sapiens
  misc_RNA (1)...(19): siRNA sense strand
aagcuucucauauccauuu

SEQ ID NO: 2145581 - RNA, 19 nt, Homo sapiens
  misc_RNA (1)...(19): siRNA sense strand
ugaaugauaaacugacuga

SEQ ID NO: 2145582 - RNA, 19 nt, Homo sapiens
  misc_RNA (1)...(19): siRNA sense strand
uaggaggccugguuacagu

SEQ ID NO: 2145583 - RNA, 19 nt, Homo sapiens
  misc_RNA (1)...(19): siRNA sense strand
gacuggcggcugaagaaua

SEQ ID NO: 2145584 - RNA, 19 nt, Homo sapiens
  misc_RNA (1)...(19): siRNA sense strand
cuucuauguugcuguaauu

SEQ ID NO: 2145585 - RNA, 19 nt, Homo sapiens
  misc_RNA (1)...(19): siRNA sense strand
acuggcggcugaagaauau

SEQ ID NO: 2145586 - RNA, 19 nt, Homo sapiens
  misc_RNA (1)...(19): siRNA sense strand
gacaguacuuucuggaacu

SEQ ID NO: 2145587 - RNA, 19 nt, Homo sapiens
  misc_RNA (1)...(19): siRNA sense strand
uuggaacugucauacuuaa

SEQ ID NO: 2145588 - RNA, 19 nt, Homo sapiens
  misc_RNA (1)...(19): siRNA sense strand
uauagaggaaguuugauug

SEQ ID NO: 2145589 - RNA, 19 nt, Homo sapiens
  misc_RNA (1)...(19): siRNA sense strand
caauucaaaccaagauaug

SEQ ID NO: 2145590 - RNA, 19 nt, Homo sapiens
  misc_RNA (1)...(19): siRNA sense strand
guauugcagaugacgguua

SEQ ID NO: 2145591 - RNA, 19 nt, Homo sapiens
  misc_RNA (1)...(19): siRNA sense strand
agauguugcuugugacuca

SEQ ID NO: 2145592 - RNA, 19 nt, Homo sapiens
  misc_RNA (1)...(19): siRNA sense strand
cgauuaggaggccugguua

SEQ ID NO: 2145593 - RNA, 19 nt, Homo sapiens
  misc_RNA (1)...(19): siRNA sense strand
ucauugcaauucaaaccaa

SEQ ID NO: 2145594 - RNA, 19 nt, Homo sapiens
  misc_RNA (1)...(19): siRNA sense strand
gcgacuggcggcugaagaa

SEQ ID NO: 2145595 - RNA, 19 nt, Homo sapiens
  misc_RNA (1)...(19): siRNA sense strand
acugaaagcugugaaggau

SEQ ID NO: 2145596 - RNA, 19 nt, Homo sapiens
  misc_RNA (1)...(19): siRNA sense strand
guauggaugauuaugaaug

SEQ ID NO: 2145597 - RNA, 19 nt, Homo sapiens
  misc_RNA (1)...(19): siRNA sense strand
cagaugacgguuauauaau

SEQ ID NO: 2145598 - RNA, 19 nt, Homo sapiens
  misc_RNA (1)...(19): siRNA sense strand
cacucugcauuuccaauuu

SEQ ID NO: 2145599 - RNA, 19 nt, Homo sapiens
  misc_RNA (1)...(19): siRNA sense strand
gcgaaagcuucucauaucc

SEQ ID NO: 2145600 - RNA, 19 nt, Homo sapiens
  misc_RNA (1)...(19): siRNA sense strand
agaucuugcuugcuucuau

SEQ ID NO: 2145601 - RNA, 19 nt, Homo sapiens
  misc_RNA (1)...(19): siRNA sense strand
gggcagcacuacgagaaag

SEQ ID NO: 2145602 - RNA, 19 nt, Homo sapiens
  misc_RNA (1)...(19): siRNA sense strand
uucuggaacugcuagauuu

SEQ ID NO: 2145603 - RNA, 19 nt, Homo sapiens
  misc_RNA (1)...(19): siRNA sense strand
uguggaaacacccucauuu

SEQ ID NO: 2145604 - RNA, 19 nt, Homo sapiens
  misc_RNA (1)...(19): siRNA sense strand
uauugcagaugacgguuau

SEQ ID NO: 2145605 - RNA, 19 nt, Homo sapiens
  misc_RNA (1)...(19): siRNA sense strand
ccgcgaaagcuucucauau

SEQ ID NO: 2145606 - RNA, 19 nt, Homo sapiens
  misc_RNA (1)...(19): siRNA sense strand
uuuccuccauuaucucuuu

SEQ ID NO: 2145607 - RNA, 19 nt, Homo sapiens
  misc_RNA (1)...(19): siRNA sense strand
cgagaauguuucgcgagaa

SEQ ID NO: 2145608 - RNA, 19 nt, Homo sapiens
  misc_RNA (1)...(19): siRNA sense strand
uugcuucuauguugcugua

SEQ ID NO: 2145609 - RNA, 19 nt, Homo sapiens
  misc_RNA (1)...(19): siRNA sense strand
gcccuucacgagaauguuu

SEQ ID NO: 2145610 - RNA, 19 nt, Homo sapiens
  misc_RNA (1)...(19): siRNA sense strand
ucucauauccauuucuugu

SEQ ID NO: 2145611 - RNA, 19 nt, Homo sapiens
  misc_RNA (1)...(19): siRNA sense strand
gcuucuauguugcuguaau

SEQ ID NO: 2145612 - RNA, 19 nt, Homo sapiens
  misc_RNA (1)...(19): siRNA sense strand
acugcuagauuuccagaug

SEQ ID NO: 2145613 - RNA, 19 nt, Homo sapiens
  misc_RNA (1)...(19): siRNA sense strand
ugucugcuuuccucgguuu

SEQ ID NO: 2145614 - RNA, 19 nt, Homo sapiens
  misc_RNA (1)...(19): siRNA sense strand
cugcuagauuuccagauga

SEQ ID NO: 2145615 - RNA, 19 nt, Homo sapiens
  misc_RNA (1)...(19): siRNA sense strand
cuucucauauccauuucuu

SEQ ID NO: 2145616 - RNA, 19 nt, Homo sapiens
  misc_RNA (1)...(19): siRNA sense strand
gcuugugacucauauucuc

SEQ ID NO: 2145617 - RNA, 19 nt, Homo sapiens
  misc_RNA (1)...(19): siRNA sense strand
cuugcuugcuucuauguug

SEQ ID NO: 2145618 - RNA, 19 nt, Homo sapiens
  misc_RNA (1)...(19): siRNA sense strand
gcagcacuacgagaaagaa

SEQ ID NO: 2145619 - RNA, 19 nt, Homo sapiens
  misc_RNA (1)...(19): siRNA sense strand
caggagaagggcagcacua

SEQ ID NO: 2145620 - RNA, 19 nt, Homo sapiens
  misc_RNA (1)...(19): siRNA sense strand
guuauuuggaacugucaua

SEQ ID NO: 2145621 - RNA, 19 nt, Homo sapiens
  misc_RNA (1)...(19): siRNA sense strand
uuaaguggcagccgauuag

SEQ ID NO: 2145622 - RNA, 19 nt, Homo sapiens
  misc_RNA (1)...(19): siRNA sense strand
cagaugagugcuguuuauu

SEQ ID NO: 2145623 - RNA, 19 nt, Homo sapiens
  misc_RNA (1)...(19): siRNA sense strand
caugcuuccuuggcaguuu

SEQ ID NO: 2145624 - RNA, 19 nt, Homo sapiens
  misc_RNA (1)...(19): siRNA sense strand
uagaggaaguuugauugca

SEQ ID NO: 2145625 - RNA, 19 nt, Homo sapiens
  misc_RNA (1)...(19): siRNA sense strand
gaaggauugggagaucuug

SEQ ID NO: 2145626 - RNA, 19 nt, Homo sapiens
  misc_RNA (1)...(19): siRNA sense strand
uuaugcagaucaacguugu

SEQ ID NO: 2145627 - RNA, 19 nt, Homo sapiens
  misc_RNA (1)...(19): siRNA sense strand
auuuggaacugucauacuu

SEQ ID NO: 2145628 - RNA, 19 nt, Homo sapiens
  misc_RNA (1)...(19): siRNA sense strand
cuuuauagaggaaguuuga

SEQ ID NO: 2145629 - RNA, 19 nt, Homo sapiens
  misc_RNA (1)...(19): siRNA sense strand
uggagaguguaccugugua

SEQ ID NO: 2145630 - RNA, 19 nt, Homo sapiens
  misc_RNA (1)...(19): siRNA sense strand
cagaggagaaggacucagu

SEQ ID NO: 2145631 - RNA, 19 nt, Homo sapiens
  misc_RNA (1)...(19): siRNA sense strand
uugaauggaguauggauga

SEQ ID NO: 2145632 - RNA, 19 nt, Homo sapiens
  misc_RNA (1)...(19): siRNA sense strand
agaguguaccuguguaaug

SEQ ID NO: 2145633 - RNA, 19 nt, Homo sapiens
  misc_RNA (1)...(19): siRNA sense strand
aagauaugucggacgguua

SEQ ID NO: 2145634 - RNA, 19 nt, Homo sapiens
  misc_RNA (1)...(19): siRNA sense strand
ccuggucucacucgacuuu

SEQ ID NO: 2145635 - RNA, 19 nt, Homo sapiens
  misc_RNA (1)...(19): siRNA sense strand
gcggcugaagaauauauuu

SEQ ID NO: 2145636 - RNA, 19 nt, Homo sapiens
  misc_RNA (1)...(19): siRNA sense strand
ccgauuaggaggccugguu

SEQ ID NO: 2145637 - RNA, 19 nt, Homo sapiens
  misc_RNA (1)...(19): siRNA sense strand
caagacuauuguggaaaca

SEQ ID NO: 2145638 - RNA, 19 nt, Homo sapiens
  misc_RNA (1)...(19): siRNA sense strand
uuuaaguggcagccgauua

SEQ ID NO: 2145639 - RNA, 19 nt, Homo sapiens
  misc_RNA (1)...(19): siRNA sense strand
ugcagaugacgguuauaua

SEQ ID NO: 2145640 - RNA, 19 nt, Homo sapiens
  misc_RNA (1)...(19): siRNA sense strand
guuccuuccucucuguugu

SEQ ID NO: 2145641 - RNA, 19 nt, Homo sapiens
  misc_RNA (1)...(19): siRNA sense strand
uaaagggacuguauuauuc

SEQ ID NO: 2145642 - RNA, 19 nt, Homo sapiens
  misc_RNA (1)...(19): siRNA sense strand
gcagaugacgguuauauaa

SEQ ID NO: 2145643 - RNA, 19 nt, Homo sapiens
  misc_RNA (1)...(19): siRNA sense strand
gcaguuugcucaguuugua

SEQ ID NO: 2145644 - RNA, 19 nt, Homo sapiens
  misc_RNA (1)...(19): siRNA sense strand
gaucagacuuaauuuggaa

SEQ ID NO: 2145645 - RNA, 19 nt, Homo sapiens
  misc_RNA (1)...(19): siRNA sense strand
gaguauggaugauuaugaa

SEQ ID NO: 2145646 - RNA, 19 nt, Homo sapiens
  misc_RNA (1)...(19): siRNA sense strand
ugaaagcugugaaggauug

SEQ ID NO: 2145647 - RNA, 19 nt, Homo sapiens
  misc_RNA (1)...(19): siRNA sense strand
guaggacccugucugcuuu

SEQ ID NO: 2145648 - RNA, 19 nt, Homo sapiens
  misc_RNA (1)...(19): siRNA sense strand
gaugagugcuguuuauucu

SEQ ID NO: 2145649 - RNA, 19 nt, Homo sapiens
  misc_RNA (1)...(19): siRNA sense strand
guacuggauuuauaccaaa

SEQ ID NO: 2145650 - RNA, 19 nt, Homo sapiens
  misc_RNA (1)...(19): siRNA sense strand
ccagaugagugcuguuuau

SEQ ID NO: 2145651 - RNA, 19 nt, Homo sapiens
  misc_RNA (1)...(19): siRNA sense strand
ggacuucauugcaauucaa

SEQ ID NO: 2145652 - RNA, 19 nt, Homo sapiens
  misc_RNA (1)...(19): siRNA sense strand
gagaauguuucgcgagaau

SEQ ID NO: 2145653 - RNA, 19 nt, Homo sapiens
  misc_RNA (1)...(19): siRNA sense strand
aauggaguauggaugauua

SEQ ID NO: 2145654 - RNA, 19 nt, Homo sapiens
  misc_RNA (1)...(19): siRNA sense strand
gaaagcuucucauauccau

SEQ ID NO: 2145655 - RNA, 19 nt, Homo sapiens
  misc_RNA (1)...(19): siRNA sense strand
gaguguaccuguguaaugu

SEQ ID NO: 2145656 - RNA, 19 nt, Homo sapiens
  misc_RNA (1)...(19): siRNA sense strand
cuucagauguugcuuguga

SEQ ID NO: 2145657 - RNA, 19 nt, Homo sapiens
  misc_RNA (1)...(19): siRNA sense strand
gcaauucaaaccaagauau

SEQ ID NO: 2145658 - RNA, 19 nt, Homo sapiens
  misc_RNA (1)...(19): siRNA sense strand
ggaacugucauacuuaaau

SEQ ID NO: 2145659 - RNA, 19 nt, Homo sapiens
  misc_RNA (1)...(19): siRNA sense strand
ggaucagacuuaauuugga

SEQ ID NO: 2145660 - RNA, 19 nt, Homo sapiens
  misc_RNA (1)...(19): siRNA sense strand
ggaguauggaugauuauga

SEQ ID NO: 2145661 - RNA, 19 nt, Homo sapiens
  misc_RNA (1)...(19): siRNA sense strand
cgcgaaagcuucucauauc

SEQ ID NO: 2145662 - RNA, 19 nt, Homo sapiens
  misc_RNA (1)...(19): siRNA sense strand
gcacucugcauuuccaauu

SEQ ID NO: 2145663 - RNA, 19 nt, Homo sapiens
  misc_RNA (1)...(19): siRNA sense strand
gcgagaaucccaaggguau

SEQ ID NO: 2145664 - RNA, 19 nt, Homo sapiens
  misc_RNA (1)...(19): siRNA sense strand
gagaagggcagcacuacga

SEQ ID NO: 2145665 - RNA, 19 nt, Homo sapiens
  misc_RNA (1)...(19): siRNA sense strand
ggacuguauuauuccuauu

SEQ ID NO: 2145666 - RNA, 19 nt, Homo sapiens
  misc_RNA (1)...(19): siRNA sense strand
acucugcauuuccaauuua

SEQ ID NO: 2145667 - RNA, 19 nt, Homo sapiens
  misc_RNA (1)...(19): siRNA sense strand
ucauauccauuucuuguuc

SEQ ID NO: 2145668 - RNA, 19 nt, Homo sapiens
  misc_RNA (1)...(19): siRNA sense strand
gaucuugcuugcuucuaug

SEQ ID NO: 2145669 - RNA, 19 nt, Homo sapiens
  misc_RNA (1)...(19): siRNA sense strand
gggacuguauuauuccuau

SEQ ID NO: 2145670 - RNA, 19 nt, Homo sapiens
  misc_RNA (1)...(19): siRNA sense strand
ugggagaucuugcuugcuu

SEQ ID NO: 2145671 - RNA, 19 nt, Homo sapiens
  misc_RNA (1)...(19): siRNA sense strand
ggagaguguaccuguguaa

SEQ ID NO: 2145672 - RNA, 19 nt, Homo sapiens
  misc_RNA (1)...(19): siRNA sense strand
gaggagacgcggagaggaa

SEQ ID NO: 2145673 - RNA, 19 nt, Homo sapiens
  misc_RNA (1)...(19): siRNA sense strand
gcucaguuuguacuucuua

SEQ ID NO: 2145674 - RNA, 19 nt, Homo sapiens
  misc_RNA (1)...(19): siRNA sense strand
gauggcauuauucuucaua

SEQ ID NO: 2145675 - RNA, 19 nt, Homo sapiens
  misc_RNA (1)...(19): siRNA sense strand
gguaggacccugucugcuu

SEQ ID NO: 2145676 - RNA, 19 nt, Homo sapiens
  misc_RNA (1)...(19): siRNA sense strand
gaauggaguauggaugauu

SEQ ID NO: 2145677 - RNA, 19 nt, Homo sapiens
  misc_RNA (1)...(19): siRNA sense strand
gaucaacguugugggucuu

SEQ ID NO: 2145678 - RNA, 19 nt, Homo sapiens
  misc_RNA (1)...(19): siRNA sense strand
uuucaagacuauuguggaa

SEQ ID NO: 2145679 - RNA, 19 nt, Homo sapiens
  misc_RNA (1)...(19): siRNA sense strand
ucaagacuauuguggaaac

SEQ ID NO: 2145680 - RNA, 19 nt, Homo sapiens
  misc_RNA (1)...(19): siRNA sense strand
aagcuucucauauccauuu

SEQ ID NO: 2145681 - RNA, 19 nt, Homo sapiens
  misc_RNA (1)...(19): siRNA sense strand
ugaaugauaaacugacuga

SEQ ID NO: 2145682 - RNA, 19 nt, Homo sapiens
  misc_RNA (1)...(19): siRNA sense strand
uaggaggccugguuacagu

SEQ ID NO: 2145683 - RNA, 19 nt, Homo sapiens
  misc_RNA (1)...(19): siRNA sense strand
gacuggcggcugaagaaua

SEQ ID NO: 2145684 - RNA, 19 nt, Homo sapiens
  misc_RNA (1)...(19): siRNA sense strand
cuucuauguugcuguaauu

SEQ ID NO: 2145685 - RNA, 19 nt, Homo sapiens
  misc_RNA (1)...(19): siRNA sense strand
acuggcggcugaagaauau

SEQ ID NO: 2145686 - RNA, 19 nt, Homo sapiens
  misc_RNA (1)...(19): siRNA sense strand
gacaguacuuucuggaacu

SEQ ID NO: 2145687 - RNA, 19 nt, Homo sapiens
  misc_RNA (1)...(19): siRNA sense strand
uuggaacugucauacuuaa

SEQ ID NO: 2145688 - RNA, 19 nt, Homo sapiens
  misc_RNA (1)...(19): siRNA sense strand
uauagaggaaguuugauug

SEQ ID NO: 2145689 - RNA, 19 nt, Homo sapiens
  misc_RNA (1)...(19): siRNA sense strand
caauucaaaccaagauaug

SEQ ID NO: 2145690 - RNA, 19 nt, Homo sapiens
  misc_RNA (1)...(19): siRNA sense strand
guauugcagaugacgguua

SEQ ID NO: 2145691 - RNA, 19 nt, Homo sapiens
  misc_RNA (1)...(19): siRNA sense strand
agauguugcuugugacuca

SEQ ID NO: 2145692 - RNA, 19 nt, Homo sapiens
  misc_RNA (1)...(19): siRNA sense strand
cgauuaggaggccugguua

SEQ ID NO: 2145693 - RNA, 19 nt, Homo sapiens
  misc_RNA (1)...(19): siRNA sense strand
ucauugcaauucaaaccaa

SEQ ID NO: 2145694 - RNA, 19 nt, Homo sapiens
  misc_RNA (1)...(19): siRNA sense strand
gcgacuggcggcugaagaa

SEQ ID NO: 2145695 - RNA, 19 nt, Homo sapiens
  misc_RNA (1)...(19): siRNA sense strand
acugaaagcugugaaggau

SEQ ID NO: 2145696 - RNA, 19 nt, Homo sapiens
  misc_RNA (1)...(19): siRNA sense strand
guauggaugauuaugaaug

SEQ ID NO: 2145697 - RNA, 19 nt, Homo sapiens
  misc_RNA (1)...(19): siRNA sense strand
cagaugacgguuauauaau

SEQ ID NO: 2145698 - RNA, 19 nt, Homo sapiens
  misc_RNA (1)...(19): siRNA sense strand
cacucugcauuuccaauuu

SEQ ID NO: 2145699 - RNA, 19 nt, Homo sapiens
  misc_RNA (1)...(19): siRNA sense strand
gcgaaagcuucucauaucc

SEQ ID NO: 2145700 - RNA, 19 nt, Homo sapiens
  misc_RNA (1)...(19): siRNA sense strand
agaucuugcuugcuucuau

SEQ ID NO: 2145701 - RNA, 19 nt, Homo sapiens
  misc_RNA (1)...(19): siRNA sense strand
gggcagcacuacgagaaag

SEQ ID NO: 2145702 - RNA, 19 nt, Homo sapiens
  misc_RNA (1)...(19): siRNA sense strand
uucuggaacugcuagauuu

SEQ ID NO: 2145703 - RNA, 19 nt, Homo sapiens
  misc_RNA (1)...(19): siRNA sense strand
uguggaaacacccucauuu

SEQ ID NO: 2145704 - RNA, 19 nt, Homo sapiens
  misc_RNA (1)...(19): siRNA sense strand
uauugcagaugacgguuau

SEQ ID NO: 2145705 - RNA, 19 nt, Homo sapiens
  misc_RNA (1)...(19): siRNA sense strand
ccgcgaaagcuucucauau

SEQ ID NO: 2145706 - RNA, 19 nt, Homo sapiens
  misc_RNA (1)...(19): siRNA sense strand
uuuccuccauuaucucuuu

SEQ ID NO: 2145707 - RNA, 19 nt, Homo sapiens
  misc_RNA (1)...(19): siRNA sense strand
cgagaauguuucgcgagaa

SEQ ID NO: 2145708 - RNA, 19 nt, Homo sapiens
  misc_RNA (1)...(19): siRNA sense strand
uugcuucuauguugcugua

SEQ ID NO: 2145709 - RNA, 19 nt, Homo sapiens
  misc_RNA (1)...(19): siRNA sense strand
gcccuucacgagaauguuu

SEQ ID NO: 2145710 - RNA, 19 nt, Homo sapiens
  misc_RNA (1)...(19): siRNA sense strand
ucucauauccauuucuugu

SEQ ID NO: 2145711 - RNA, 19 nt, Homo sapiens
  misc_RNA (1)...(19): siRNA sense strand
gcuucuauguugcuguaau

SEQ ID NO: 2145712 - RNA, 19 nt, Homo sapiens
  misc_RNA (1)...(19): siRNA sense strand
acugcuagauuuccagaug

SEQ ID NO: 2145713 - RNA, 19 nt, Homo sapiens
  misc_RNA (1)...(19): siRNA sense strand
ugucugcuuuccucgguuu

SEQ ID NO: 2145714 - RNA, 19 nt, Homo sapiens
  misc_RNA (1)...(19): siRNA sense strand
cugcuagauuuccagauga

SEQ ID NO: 2145715 - RNA, 19 nt, Homo sapiens
  misc_RNA (1)...(19): siRNA sense strand
cuucucauauccauuucuu

SEQ ID NO: 2145716 - RNA, 19 nt, Homo sapiens
  misc_RNA (1)...(19): siRNA sense strand
gcuugugacucauauucuc

SEQ ID NO: 2145717 - RNA, 19 nt, Homo sapiens
  misc_RNA (1)...(19): siRNA sense strand
cuugcuugcuucuauguug

SEQ ID NO: 2145718 - RNA, 19 nt, Homo sapiens
  misc_RNA (1)...(19): siRNA sense strand
gcagcacuacgagaaagaa

SEQ ID NO: 2145719 - RNA, 19 nt, Homo sapiens
  misc_RNA (1)...(19): siRNA sense strand
caggagaagggcagcacua

SEQ ID NO: 2145720 - RNA, 19 nt, Homo sapiens
  misc_RNA (1)...(19): siRNA sense strand
guuauuuggaacugucaua

SEQ ID NO: 2145721 - RNA, 19 nt, Homo sapiens
  misc_RNA (1)...(19): siRNA sense strand
uuaaguggcagccgauuag

SEQ ID NO: 2145722 - RNA, 19 nt, Homo sapiens
  misc_RNA (1)...(19): siRNA sense strand
cagaugagugcuguuuauu

SEQ ID NO: 2145723 - RNA, 19 nt, Homo sapiens
  misc_RNA (1)...(19): siRNA sense strand
caugcuuccuuggcaguuu

SEQ ID NO: 2145724 - RNA, 19 nt, Homo sapiens
  misc_RNA (1)...(19): siRNA sense strand
uagaggaaguuugauugca

SEQ ID NO: 2145725 - RNA, 19 nt, Homo sapiens
  misc_RNA (1)...(19): siRNA sense strand
gaaggauugggagaucuug

SEQ ID NO: 2145726 - RNA, 19 nt, Homo sapiens
  misc_RNA (1)...(19): siRNA sense strand
uuaugcagaucaacguugu

SEQ ID NO: 2145727 - RNA, 19 nt, Homo sapiens
  misc_RNA (1)...(19): siRNA sense strand
auuuggaacugucauacuu

SEQ ID NO: 2145728 - RNA, 19 nt, Homo sapiens
  misc_RNA (1)...(19): siRNA sense strand
cuuuauagaggaaguuuga

SEQ ID NO: 2145729 - RNA, 19 nt, Homo sapiens
  misc_RNA (1)...(19): siRNA sense strand
uggagaguguaccugugua

SEQ ID NO: 2145730 - RNA, 19 nt, Homo sapiens
  misc_RNA (1)...(19): siRNA sense strand
cagaggagaaggacucagu

SEQ ID NO: 2145731 - RNA, 19 nt, Homo sapiens
  misc_RNA (1)...(19): siRNA sense strand
uugaauggaguauggauga

SEQ ID NO: 2145732 - RNA, 19 nt, Homo sapiens
  misc_RNA (1)...(19): siRNA sense strand
agaguguaccuguguaaug

SEQ ID NO: 2145733 - RNA, 19 nt, Homo sapiens
  misc_RNA (1)...(19): siRNA sense strand
aagauaugucggacgguua

SEQ ID NO: 2145734 - RNA, 19 nt, Homo sapiens
  misc_RNA (1)...(19): siRNA sense strand
ccuggucucacucgacuuu

SEQ ID NO: 2145735 - RNA, 19 nt, Homo sapiens
  misc_RNA (1)...(19): siRNA sense strand
gcggcugaagaauauauuu

SEQ ID NO: 2145736 - RNA, 19 nt, Homo sapiens
  misc_RNA (1)...(19): siRNA sense strand
ccgauuaggaggccugguu

SEQ ID NO: 2145737 - RNA, 19 nt, Homo sapiens
  misc_RNA (1)...(19): siRNA sense strand
caagacuauuguggaaaca

SEQ ID NO: 2145738 - RNA, 19 nt, Homo sapiens
  misc_RNA (1)...(19): siRNA sense strand
uuuaaguggcagccgauua

SEQ ID NO: 2145739 - RNA, 19 nt, Homo sapiens
  misc_RNA (1)...(19): siRNA sense strand
ugcagaugacgguuauaua

SEQ ID NO: 2145740 - RNA, 19 nt, Homo sapiens
  misc_RNA (1)...(19): siRNA sense strand
guuccuuccucucuguugu

SEQ ID NO: 2145741 - RNA, 19 nt, Homo sapiens
  misc_RNA (1)...(19): siRNA sense strand
gcauauaucugaacgugua

SEQ ID NO: 2145742 - RNA, 19 nt, Homo sapiens
  misc_RNA (1)...(19): siRNA sense strand
guagaugggucuucaguaa

SEQ ID NO: 2145743 - RNA, 19 nt, Homo sapiens
  misc_RNA (1)...(19): siRNA sense strand
gaagauguguuacaacguu

SEQ ID NO: 2145744 - RNA, 19 nt, Homo sapiens
  misc_RNA (1)...(19): siRNA sense strand
ugaaacagcuugcuuccua

SEQ ID NO: 2145745 - RNA, 19 nt, Homo sapiens
  misc_RNA (1)...(19): siRNA sense strand
uaaaugagcgagcuaaaua

SEQ ID NO: 2145746 - RNA, 19 nt, Homo sapiens
  misc_RNA (1)...(19): siRNA sense strand
gcagaucaauacugaauau

SEQ ID NO: 2145747 - RNA, 19 nt, Homo sapiens
  misc_RNA (1)...(19): siRNA sense strand
ggaagaaaccguucgagaa

SEQ ID NO: 2145748 - RNA, 19 nt, Homo sapiens
  misc_RNA (1)...(19): siRNA sense strand
caacauguagcucuuauuu

SEQ ID NO: 2145749 - RNA, 19 nt, Homo sapiens
  misc_RNA (1)...(19): siRNA sense strand
gaucucaaauucucuaugu

SEQ ID NO: 2145750 - RNA, 19 nt, Homo sapiens
  misc_RNA (1)...(19): siRNA sense strand
caaguucacugcuguguau

SEQ ID NO: 2145751 - RNA, 19 nt, Homo sapiens
  misc_RNA (1)...(19): siRNA sense strand
gagaaacccacuuaaauga

SEQ ID NO: 2145752 - RNA, 19 nt, Homo sapiens
  misc_RNA (1)...(19): siRNA sense strand
gcacugaauucccuuguca

SEQ ID NO: 2145753 - RNA, 19 nt, Homo sapiens
  misc_RNA (1)...(19): siRNA sense strand
gaaaauccuuguagucuuu

SEQ ID NO: 2145754 - RNA, 19 nt, Homo sapiens
  misc_RNA (1)...(19): siRNA sense strand
ggaggaccguagaaagaua

SEQ ID NO: 2145755 - RNA, 19 nt, Homo sapiens
  misc_RNA (1)...(19): siRNA sense strand
gcaauggagugcagcaguu

SEQ ID NO: 2145756 - RNA, 19 nt, Homo sapiens
  misc_RNA (1)...(19): siRNA sense strand
gacauaguguuaauuguug

SEQ ID NO: 2145757 - RNA, 19 nt, Homo sapiens
  misc_RNA (1)...(19): siRNA sense strand
guucaugacugcauuuaug

SEQ ID NO: 2145758 - RNA, 19 nt, Homo sapiens
  misc_RNA (1)...(19): siRNA sense strand
gguagaagauguguuacaa

SEQ ID NO: 2145759 - RNA, 19 nt, Homo sapiens
  misc_RNA (1)...(19): siRNA sense strand
ugaagagucuccauggaaa

SEQ ID NO: 2145760 - RNA, 19 nt, Homo sapiens
  misc_RNA (1)...(19): siRNA sense strand
gaagaaaccguucgagaag

SEQ ID NO: 2145761 - RNA, 19 nt, Homo sapiens
  misc_RNA (1)...(19): siRNA sense strand
gaaauggccaugagacaga

SEQ ID NO: 2145762 - RNA, 19 nt, Homo sapiens
  misc_RNA (1)...(19): siRNA sense strand
caaaauaccugguuuccaa

SEQ ID NO: 2145763 - RNA, 19 nt, Homo sapiens
  misc_RNA (1)...(19): siRNA sense strand
acauguagcucuuauuuca

SEQ ID NO: 2145764 - RNA, 19 nt, Homo sapiens
  misc_RNA (1)...(19): siRNA sense strand
gaaucacgaucccaguauu

SEQ ID NO: 2145765 - RNA, 19 nt, Homo sapiens
  misc_RNA (1)...(19): siRNA sense strand
aauaugaccuggaacuuga

SEQ ID NO: 2145766 - RNA, 19 nt, Homo sapiens
  misc_RNA (1)...(19): siRNA sense strand
gcugccaccuuacagauaa

SEQ ID NO: 2145767 - RNA, 19 nt, Homo sapiens
  misc_RNA (1)...(19): siRNA sense strand
gcgagaaacccacuuaaau

SEQ ID NO: 2145768 - RNA, 19 nt, Homo sapiens
  misc_RNA (1)...(19): siRNA sense strand
uagaacagcuuuaugaaac

SEQ ID NO: 2145769 - RNA, 19 nt, Homo sapiens
  misc_RNA (1)...(19): siRNA sense strand
gagcuguugugaucucaaa

SEQ ID NO: 2145770 - RNA, 19 nt, Homo sapiens
  misc_RNA (1)...(19): siRNA sense strand
ucucaguagugacaauuua

SEQ ID NO: 2145771 - RNA, 19 nt, Homo sapiens
  misc_RNA (1)...(19): siRNA sense strand
gacgagaggcagaucaaua

SEQ ID NO: 2145772 - RNA, 19 nt, Homo sapiens
  misc_RNA (1)...(19): siRNA sense strand
guagaacagcuuuaugaaa

SEQ ID NO: 2145773 - RNA, 19 nt, Homo sapiens
  misc_RNA (1)...(19): siRNA sense strand
ugaacuggauggagaaaug

SEQ ID NO: 2145774 - RNA, 19 nt, Homo sapiens
  misc_RNA (1)...(19): siRNA sense strand
cauggaaaccaccaacuua

SEQ ID NO: 2145775 - RNA, 19 nt, Homo sapiens
  misc_RNA (1)...(19): siRNA sense strand
cgagaaacccacuuaaaug

SEQ ID NO: 2145776 - RNA, 19 nt, Homo sapiens
  misc_RNA (1)...(19): siRNA sense strand
uagcguagguggagaacuu

SEQ ID NO: 2145777 - RNA, 19 nt, Homo sapiens
  misc_RNA (1)...(19): siRNA sense strand
acagguagaagauguguua

SEQ ID NO: 2145778 - RNA, 19 nt, Homo sapiens
  misc_RNA (1)...(19): siRNA sense strand
ugaauaugcugugucauug

SEQ ID NO: 2145779 - RNA, 19 nt, Homo sapiens
  misc_RNA (1)...(19): siRNA sense strand
ugaauucccuugucauaag

SEQ ID NO: 2145780 - RNA, 19 nt, Homo sapiens
  misc_RNA (1)...(19): siRNA sense strand
acagagagcuugguuucaa

SEQ ID NO: 2145781 - RNA, 19 nt, Homo sapiens
  misc_RNA (1)...(19): siRNA sense strand
cagaauugaugcacuuuca

SEQ ID NO: 2145782 - RNA, 19 nt, Homo sapiens
  misc_RNA (1)...(19): siRNA sense strand
ugauagauauucucaguag

SEQ ID NO: 2145783 - RNA, 19 nt, Homo sapiens
  misc_RNA (1)...(19): siRNA sense strand
agaggcagaucaauacuga

SEQ ID NO: 2145784 - RNA, 19 nt, Homo sapiens
  misc_RNA (1)...(19): siRNA sense strand
gaauucccuugucauaaga

SEQ ID NO: 2145785 - RNA, 19 nt, Homo sapiens
  misc_RNA (1)...(19): siRNA sense strand
ugucgaugcugccaccuua

SEQ ID NO: 2145786 - RNA, 19 nt, Homo sapiens
  misc_RNA (1)...(19): siRNA sense strand
guauuugucuucuguucuu

SEQ ID NO: 2145787 - RNA, 19 nt, Homo sapiens
  misc_RNA (1)...(19): siRNA sense strand
caaauucucuauguguguu

SEQ ID NO: 2145788 - RNA, 19 nt, Homo sapiens
  misc_RNA (1)...(19): siRNA sense strand
gacuugggaugacuaaaga

SEQ ID NO: 2145789 - RNA, 19 nt, Homo sapiens
  misc_RNA (1)...(19): siRNA sense strand
gauacgacacugagaaaga

SEQ ID NO: 2145790 - RNA, 19 nt, Homo sapiens
  misc_RNA (1)...(19): siRNA sense strand
gcagagaauuguguacgau

SEQ ID NO: 2145791 - RNA, 19 nt, Homo sapiens
  misc_RNA (1)...(19): siRNA sense strand
cagccaacaucccugcuaa

SEQ ID NO: 2145792 - RNA, 19 nt, Homo sapiens
  misc_RNA (1)...(19): siRNA sense strand
gaucaauacugaauaugcu

SEQ ID NO: 2145793 - RNA, 19 nt, Homo sapiens
  misc_RNA (1)...(19): siRNA sense strand
ucacugcuguguaucauca

SEQ ID NO: 2145794 - RNA, 19 nt, Homo sapiens
  misc_RNA (1)...(19): siRNA sense strand
cacaugaccuacugauaga

SEQ ID NO: 2145795 - RNA, 19 nt, Homo sapiens
  misc_RNA (1)...(19): siRNA sense strand
gccaugagacagacuagua

SEQ ID NO: 2145796 - RNA, 19 nt, Homo sapiens
  misc_RNA (1)...(19): siRNA sense strand
gcauuuaugugaugacacu

SEQ ID NO: 2145797 - RNA, 19 nt, Homo sapiens
  misc_RNA (1)...(19): siRNA sense strand
cagcaguugugguucauga

SEQ ID NO: 2145798 - RNA, 19 nt, Homo sapiens
  misc_RNA (1)...(19): siRNA sense strand
gcuagaguauaacacagaa

SEQ ID NO: 2145799 - RNA, 19 nt, Homo sapiens
  misc_RNA (1)...(19): siRNA sense strand
ucacaugaccuacugauag

SEQ ID NO: 2145800 - RNA, 19 nt, Homo sapiens
  misc_RNA (1)...(19): siRNA sense strand
ggaugggacagaagaguuu

SEQ ID NO: 2145801 - RNA, 19 nt, Homo sapiens
  misc_RNA (1)...(19): siRNA sense strand
cuaccaauaugaccuggaa

SEQ ID NO: 2145802 - RNA, 19 nt, Homo sapiens
  misc_RNA (1)...(19): siRNA sense strand
ggcuauaucuaugcaauug

SEQ ID NO: 2145803 - RNA, 19 nt, Homo sapiens
  misc_RNA (1)...(19): siRNA sense strand
gaauugaugcacuuucaga

SEQ ID NO: 2145804 - RNA, 19 nt, Homo sapiens
  misc_RNA (1)...(19): siRNA sense strand
gcaaacaaacccauguaca

SEQ ID NO: 2145805 - RNA, 19 nt, Homo sapiens
  misc_RNA (1)...(19): siRNA sense strand
ggaaaccaccaacuuaucu

SEQ ID NO: 2145806 - RNA, 19 nt, Homo sapiens
  misc_RNA (1)...(19): siRNA sense strand
ggacgaugguaagcccuuu

SEQ ID NO: 2145807 - RNA, 19 nt, Homo sapiens
  misc_RNA (1)...(19): siRNA sense strand
ucagaacugugaauugcuu

SEQ ID NO: 2145808 - RNA, 19 nt, Homo sapiens
  misc_RNA (1)...(19): siRNA sense strand
ggucugccacccaaugaua

SEQ ID NO: 2145809 - RNA, 19 nt, Homo sapiens
  misc_RNA (1)...(19): siRNA sense strand
gaaguaacacagagagcuu

SEQ ID NO: 2145810 - RNA, 19 nt, Homo sapiens
  misc_RNA (1)...(19): siRNA sense strand
ugaaccucauguacuguua

SEQ ID NO: 2145811 - RNA, 19 nt, Homo sapiens
  misc_RNA (1)...(19): siRNA sense strand
uguuagagcuguugugauc

SEQ ID NO: 2145812 - RNA, 19 nt, Homo sapiens
  misc_RNA (1)...(19): siRNA sense strand
ugacugcauuuaugugaug

SEQ ID NO: 2145813 - RNA, 19 nt, Homo sapiens
  misc_RNA (1)...(19): siRNA sense strand
cuucaguugugaggaauua

SEQ ID NO: 2145814 - RNA, 19 nt, Homo sapiens
  misc_RNA (1)...(19): siRNA sense strand
caacggaugggacagaaga

SEQ ID NO: 2145815 - RNA, 19 nt, Homo sapiens
  misc_RNA (1)...(19): siRNA sense strand
gaaagauacgacacugaga

SEQ ID NO: 2145816 - RNA, 19 nt, Homo sapiens
  misc_RNA (1)...(19): siRNA sense strand
aaagaaugguggagcacaa

SEQ ID NO: 2145817 - RNA, 19 nt, Homo sapiens
  misc_RNA (1)...(19): siRNA sense strand
agagaauuguguacgauug

SEQ ID NO: 2145818 - RNA, 19 nt, Homo sapiens
  misc_RNA (1)...(19): siRNA sense strand
gaacagcuuuaugaaacag

SEQ ID NO: 2145819 - RNA, 19 nt, Homo sapiens
  misc_RNA (1)...(19): siRNA sense strand
gauauucucaguagugaca

SEQ ID NO: 2145820 - RNA, 19 nt, Homo sapiens
  misc_RNA (1)...(19): siRNA sense strand
caauaugaccuggaacuug

SEQ ID NO: 2145821 - RNA, 19 nt, Homo sapiens
  misc_RNA (1)...(19): siRNA sense strand
gggucaaguuccucugaaa

SEQ ID NO: 2145822 - RNA, 19 nt, Homo sapiens
  misc_RNA (1)...(19): siRNA sense strand
cguuguaacuccugauaau

SEQ ID NO: 2145823 - RNA, 19 nt, Homo sapiens
  misc_RNA (1)...(19): siRNA sense strand
aauaugcugugucauuguu

SEQ ID NO: 2145824 - RNA, 19 nt, Homo sapiens
  misc_RNA (1)...(19): siRNA sense strand
auaaguccaugcccaaguu

SEQ ID NO: 2145825 - RNA, 19 nt, Homo sapiens
  misc_RNA (1)...(19): siRNA sense strand
uagauauucucaguaguga

SEQ ID NO: 2145826 - RNA, 19 nt, Homo sapiens
  misc_RNA (1)...(19): siRNA sense strand
caugaccuacugauagaua

SEQ ID NO: 2145827 - RNA, 19 nt, Homo sapiens
  misc_RNA (1)...(19): siRNA sense strand
gaaaccaccaacuuaucuu

SEQ ID NO: 2145828 - RNA, 19 nt, Homo sapiens
  misc_RNA (1)...(19): siRNA sense strand
guugugaucucaaauucuc

SEQ ID NO: 2145829 - RNA, 19 nt, Homo sapiens
  misc_RNA (1)...(19): siRNA sense strand
acuaguagguccuuugcuu

SEQ ID NO: 2145830 - RNA, 19 nt, Homo sapiens
  misc_RNA (1)...(19): siRNA sense strand
aaagauacgacacugagaa

SEQ ID NO: 2145831 - RNA, 19 nt, Homo sapiens
  misc_RNA (1)...(19): siRNA sense strand
ugugaaggcuauaucuaug

SEQ ID NO: 2145832 - RNA, 19 nt, Homo sapiens
  misc_RNA (1)...(19): siRNA sense strand
caucuuugguuugcuguga

SEQ ID NO: 2145833 - RNA, 19 nt, Homo sapiens
  misc_RNA (1)...(19): siRNA sense strand
cagcugauuugcauaaggu

SEQ ID NO: 2145834 - RNA, 19 nt, Homo sapiens
  misc_RNA (1)...(19): siRNA sense strand
uaacacagagagcuugguu

SEQ ID NO: 2145835 - RNA, 19 nt, Homo sapiens
  misc_RNA (1)...(19): siRNA sense strand
gcuaugcuguggcuagagu

SEQ ID NO: 2145836 - RNA, 19 nt, Homo sapiens
  misc_RNA (1)...(19): siRNA sense strand
cagaaucacgaucccagua

SEQ ID NO: 2145837 - RNA, 19 nt, Homo sapiens
  misc_RNA (1)...(19): siRNA sense strand
gugcagcaguugugguuca

SEQ ID NO: 2145838 - RNA, 19 nt, Homo sapiens
  misc_RNA (1)...(19): siRNA sense strand
guuguuuacugacauagug

SEQ ID NO: 2145839 - RNA, 19 nt, Homo sapiens
  misc_RNA (1)...(19): siRNA sense strand
gacuaaagaggaaaugaug

SEQ ID NO: 2145840 - RNA, 19 nt, Homo sapiens
  misc_RNA (1)...(19): siRNA sense strand
uauauuggaggguugcaua

SEQ ID NO: 2145841 - RNA, 19 nt, Homo sapiens
  misc_RNA (1)...(19): siRNA sense strand
gcauauaucugaacgugua

SEQ ID NO: 2145842 - RNA, 19 nt, Homo sapiens
  misc_RNA (1)...(19): siRNA sense strand
guagaugggucuucaguaa

SEQ ID NO: 2145843 - RNA, 19 nt, Homo sapiens
  misc_RNA (1)...(19): siRNA sense strand
gaagauguguuacaacguu

SEQ ID NO: 2145844 - RNA, 19 nt, Homo sapiens
  misc_RNA (1)...(19): siRNA sense strand
ugaaacagcuugcuuccua

SEQ ID NO: 2145845 - RNA, 19 nt, Homo sapiens
  misc_RNA (1)...(19): siRNA sense strand
uaaaugagcgagcuaaaua

SEQ ID NO: 2145846 - RNA, 19 nt, Homo sapiens
  misc_RNA (1)...(19): siRNA sense strand
gcagaucaauacugaauau

SEQ ID NO: 2145847 - RNA, 19 nt, Homo sapiens
  misc_RNA (1)...(19): siRNA sense strand
ggaagaaaccguucgagaa

SEQ ID NO: 2145848 - RNA, 19 nt, Homo sapiens
  misc_RNA (1)...(19): siRNA sense strand
caacauguagcucuuauuu

SEQ ID NO: 2145849 - RNA, 19 nt, Homo sapiens
  misc_RNA (1)...(19): siRNA sense strand
gaucucaaauucucuaugu

SEQ ID NO: 2145850 - RNA, 19 nt, Homo sapiens
  misc_RNA (1)...(19): siRNA sense strand
caaguucacugcuguguau

SEQ ID NO: 2145851 - RNA, 19 nt, Homo sapiens
  misc_RNA (1)...(19): siRNA sense strand
gagaaacccacuuaaauga

SEQ ID NO: 2145852 - RNA, 19 nt, Homo sapiens
  misc_RNA (1)...(19): siRNA sense strand
gcacugaauucccuuguca

SEQ ID NO: 2145853 - RNA, 19 nt, Homo sapiens
  misc_RNA (1)...(19): siRNA sense strand
gaaaauccuuguagucuuu

SEQ ID NO: 2145854 - RNA, 19 nt, Homo sapiens
  misc_RNA (1)...(19): siRNA sense strand
ggaggaccguagaaagaua

SEQ ID NO: 2145855 - RNA, 19 nt, Homo sapiens
  misc_RNA (1)...(19): siRNA sense strand
gcaauggagugcagcaguu

SEQ ID NO: 2145856 - RNA, 19 nt, Homo sapiens
  misc_RNA (1)...(19): siRNA sense strand
gacauaguguuaauuguug

SEQ ID NO: 2145857 - RNA, 19 nt, Homo sapiens
  misc_RNA (1)...(19): siRNA sense strand
guucaugacugcauuuaug

SEQ ID NO: 2145858 - RNA, 19 nt, Homo sapiens
  misc_RNA (1)...(19): siRNA sense strand
gguagaagauguguuacaa

SEQ ID NO: 2145859 - RNA, 19 nt, Homo sapiens
  misc_RNA (1)...(19): siRNA sense strand
ugaagagucuccauggaaa

SEQ ID NO: 2145860 - RNA, 19 nt, Homo sapiens
  misc_RNA (1)...(19): siRNA sense strand
gaagaaaccguucgagaag

SEQ ID NO: 2145861 - RNA, 19 nt, Homo sapiens
  misc_RNA (1)...(19): siRNA sense strand
gaaauggccaugagacaga

SEQ ID NO: 2145862 - RNA, 19 nt, Homo sapiens
  misc_RNA (1)...(19): siRNA sense strand
caaaauaccugguuuccaa

SEQ ID NO: 2145863 - RNA, 19 nt, Homo sapiens
  misc_RNA (1)...(19): siRNA sense strand
acauguagcucuuauuuca

SEQ ID NO: 2145864 - RNA, 19 nt, Homo sapiens
  misc_RNA (1)...(19): siRNA sense strand
gaaucacgaucccaguauu

SEQ ID NO: 2145865 - RNA, 19 nt, Homo sapiens
  misc_RNA (1)...(19): siRNA sense strand
aauaugaccuggaacuuga

SEQ ID NO: 2145866 - RNA, 19 nt, Homo sapiens
  misc_RNA (1)...(19): siRNA sense strand
gcugccaccuuacagauaa

SEQ ID NO: 2145867 - RNA, 19 nt, Homo sapiens
  misc_RNA (1)...(19): siRNA sense strand
gcgagaaacccacuuaaau

SEQ ID NO: 2145868 - RNA, 19 nt, Homo sapiens
  misc_RNA (1)...(19): siRNA sense strand
uagaacagcuuuaugaaac

SEQ ID NO: 2145869 - RNA, 19 nt, Homo sapiens
  misc_RNA (1)...(19): siRNA sense strand
gagcuguugugaucucaaa

SEQ ID NO: 2145870 - RNA, 19 nt, Homo sapiens
  misc_RNA (1)...(19): siRNA sense strand
ucucaguagugacaauuua

SEQ ID NO: 2145871 - RNA, 19 nt, Homo sapiens
  misc_RNA (1)...(19): siRNA sense strand
gacgagaggcagaucaaua

SEQ ID NO: 2145872 - RNA, 19 nt, Homo sapiens
  misc_RNA (1)...(19): siRNA sense strand
guagaacagcuuuaugaaa

SEQ ID NO: 2145873 - RNA, 19 nt, Homo sapiens
  misc_RNA (1)...(19): siRNA sense strand
ugaacuggauggagaaaug

SEQ ID NO: 2145874 - RNA, 19 nt, Homo sapiens
  misc_RNA (1)...(19): siRNA sense strand
cauggaaaccaccaacuua

SEQ ID NO: 2145875 - RNA, 19 nt, Homo sapiens
  misc_RNA (1)...(19): siRNA sense strand
cgagaaacccacuuaaaug

SEQ ID NO: 2145876 - RNA, 19 nt, Homo sapiens
  misc_RNA (1)...(19): siRNA sense strand
uagcguagguggagaacuu

SEQ ID NO: 2145877 - RNA, 19 nt, Homo sapiens
  misc_RNA (1)...(19): siRNA sense strand
acagguagaagauguguua

SEQ ID NO: 2145878 - RNA, 19 nt, Homo sapiens
  misc_RNA (1)...(19): siRNA sense strand
ugaauaugcugugucauug

SEQ ID NO: 2145879 - RNA, 19 nt, Homo sapiens
  misc_RNA (1)...(19): siRNA sense strand
ugaauucccuugucauaag

SEQ ID NO: 2145880 - RNA, 19 nt, Homo sapiens
  misc_RNA (1)...(19): siRNA sense strand
acagagagcuugguuucaa

SEQ ID NO: 2145881 - RNA, 19 nt, Homo sapiens
  misc_RNA (1)...(19): siRNA sense strand
cagaauugaugcacuuuca

SEQ ID NO: 2145882 - RNA, 19 nt, Homo sapiens
  misc_RNA (1)...(19): siRNA sense strand
ugauagauauucucaguag

SEQ ID NO: 2145883 - RNA, 19 nt, Homo sapiens
  misc_RNA (1)...(19): siRNA sense strand
agaggcagaucaauacuga

SEQ ID NO: 2145884 - RNA, 19 nt, Homo sapiens
  misc_RNA (1)...(19): siRNA sense strand
gaauucccuugucauaaga

SEQ ID NO: 2145885 - RNA, 19 nt, Homo sapiens
  misc_RNA (1)...(19): siRNA sense strand
ugucgaugcugccaccuua

SEQ ID NO: 2145886 - RNA, 19 nt, Homo sapiens
  misc_RNA (1)...(19): siRNA sense strand
guauuugucuucuguucuu

SEQ ID NO: 2145887 - RNA, 19 nt, Homo sapiens
  misc_RNA (1)...(19): siRNA sense strand
caaauucucuauguguguu

SEQ ID NO: 2145888 - RNA, 19 nt, Homo sapiens
  misc_RNA (1)...(19): siRNA sense strand
gacuugggaugacuaaaga

SEQ ID NO: 2145889 - RNA, 19 nt, Homo sapiens
  misc_RNA (1)...(19): siRNA sense strand
gauacgacacugagaaaga

SEQ ID NO: 2145890 - RNA, 19 nt, Homo sapiens
  misc_RNA (1)...(19): siRNA sense strand
gcagagaauuguguacgau

SEQ ID NO: 2145891 - RNA, 19 nt, Homo sapiens
  misc_RNA (1)...(19): siRNA sense strand
cagccaacaucccugcuaa

SEQ ID NO: 2145892 - RNA, 19 nt, Homo sapiens
  misc_RNA (1)...(19): siRNA sense strand
gaucaauacugaauaugcu

SEQ ID NO: 2145893 - RNA, 19 nt, Homo sapiens
  misc_RNA (1)...(19): siRNA sense strand
ucacugcuguguaucauca

SEQ ID NO: 2145894 - RNA, 19 nt, Homo sapiens
  misc_RNA (1)...(19): siRNA sense strand
cacaugaccuacugauaga

SEQ ID NO: 2145895 - RNA, 19 nt, Homo sapiens
  misc_RNA (1)...(19): siRNA sense strand
gccaugagacagacuagua

SEQ ID NO: 2145896 - RNA, 19 nt, Homo sapiens
  misc_RNA (1)...(19): siRNA sense strand
gcauuuaugugaugacacu

SEQ ID NO: 2145897 - RNA, 19 nt, Homo sapiens
  misc_RNA (1)...(19): siRNA sense strand
cagcaguugugguucauga

SEQ ID NO: 2145898 - RNA, 19 nt, Homo sapiens
  misc_RNA (1)...(19): siRNA sense strand
gcuagaguauaacacagaa

SEQ ID NO: 2145899 - RNA, 19 nt, Homo sapiens
  misc_RNA (1)...(19): siRNA sense strand
ucacaugaccuacugauag

SEQ ID NO: 2145900 - RNA, 19 nt, Homo sapiens
  misc_RNA (1)...(19): siRNA sense strand
ggaugggacagaagaguuu

SEQ ID NO: 2145901 - RNA, 19 nt, Homo sapiens
  misc_RNA (1)...(19): siRNA sense strand
cuaccaauaugaccuggaa

SEQ ID NO: 2145902 - RNA, 19 nt, Homo sapiens
  misc_RNA (1)...(19): siRNA sense strand
ggcuauaucuaugcaauug

SEQ ID NO: 2145903 - RNA, 19 nt, Homo sapiens
  misc_RNA (1)...(19): siRNA sense strand
gaauugaugcacuuucaga

SEQ ID NO: 2145904 - RNA, 19 nt, Homo sapiens
  misc_RNA (1)...(19): siRNA sense strand
gcaaacaaacccauguaca

SEQ ID NO: 2145905 - RNA, 19 nt, Homo sapiens
  misc_RNA (1)...(19): siRNA sense strand
ggaaaccaccaacuuaucu

SEQ ID NO: 2145906 - RNA, 19 nt, Homo sapiens
  misc_RNA (1)...(19): siRNA sense strand
ggacgaugguaagcccuuu

SEQ ID NO: 2145907 - RNA, 19 nt, Homo sapiens
  misc_RNA (1)...(19): siRNA sense strand
ucagaacugugaauugcuu

SEQ ID NO: 2145908 - RNA, 19 nt, Homo sapiens
  misc_RNA (1)...(19): siRNA sense strand
ggucugccacccaaugaua

SEQ ID NO: 2145909 - RNA, 19 nt, Homo sapiens
  misc_RNA (1)...(19): siRNA sense strand
gaaguaacacagagagcuu

SEQ ID NO: 2145910 - RNA, 19 nt, Homo sapiens
  misc_RNA (1)...(19): siRNA sense strand
ugaaccucauguacuguua

SEQ ID NO: 2145911 - RNA, 19 nt, Homo sapiens
  misc_RNA (1)...(19): siRNA sense strand
uguuagagcuguugugauc

SEQ ID NO: 2145912 - RNA, 19 nt, Homo sapiens
  misc_RNA (1)...(19): siRNA sense strand
ugacugcauuuaugugaug

SEQ ID NO: 2145913 - RNA, 19 nt, Homo sapiens
  misc_RNA (1)...(19): siRNA sense strand
cuucaguugugaggaauua

SEQ ID NO: 2145914 - RNA, 19 nt, Homo sapiens
  misc_RNA (1)...(19): siRNA sense strand
caacggaugggacagaaga

SEQ ID NO: 2145915 - RNA, 19 nt, Homo sapiens
  misc_RNA (1)...(19): siRNA sense strand
gaaagauacgacacugaga

SEQ ID NO: 2145916 - RNA, 19 nt, Homo sapiens
  misc_RNA (1)...(19): siRNA sense strand
aaagaaugguggagcacaa

SEQ ID NO: 2145917 - RNA, 19 nt, Homo sapiens
  misc_RNA (1)...(19): siRNA sense strand
agagaauuguguacgauug

SEQ ID NO: 2145918 - RNA, 19 nt, Homo sapiens
  misc_RNA (1)...(19): siRNA sense strand
gaacagcuuuaugaaacag

SEQ ID NO: 2145919 - RNA, 19 nt, Homo sapiens
  misc_RNA (1)...(19): siRNA sense strand
gauauucucaguagugaca

SEQ ID NO: 2145920 - RNA, 19 nt, Homo sapiens
  misc_RNA (1)...(19): siRNA sense strand
caauaugaccuggaacuug

SEQ ID NO: 2145921 - RNA, 19 nt, Homo sapiens
  misc_RNA (1)...(19): siRNA sense strand
gggucaaguuccucugaaa

SEQ ID NO: 2145922 - RNA, 19 nt, Homo sapiens
  misc_RNA (1)...(19): siRNA sense strand
cguuguaacuccugauaau

SEQ ID NO: 2145923 - RNA, 19 nt, Homo sapiens
  misc_RNA (1)...(19): siRNA sense strand
aauaugcugugucauuguu

SEQ ID NO: 2145924 - RNA, 19 nt, Homo sapiens
  misc_RNA (1)...(19): siRNA sense strand
auaaguccaugcccaaguu

SEQ ID NO: 2145925 - RNA, 19 nt, Homo sapiens
  misc_RNA (1)...(19): siRNA sense strand
uagauauucucaguaguga

SEQ ID NO: 2145926 - RNA, 19 nt, Homo sapiens
  misc_RNA (1)...(19): siRNA sense strand
caugaccuacugauagaua

SEQ ID NO: 2145927 - RNA, 19 nt, Homo sapiens
  misc_RNA (1)...(19): siRNA sense strand
gaaaccaccaacuuaucuu

SEQ ID NO: 2145928 - RNA, 19 nt, Homo sapiens
  misc_RNA (1)...(19): siRNA sense strand
guugugaucucaaauucuc

SEQ ID NO: 2145929 - RNA, 19 nt, Homo sapiens
  misc_RNA (1)...(19): siRNA sense strand
acuaguagguccuuugcuu

SEQ ID NO: 2145930 - RNA, 19 nt, Homo sapiens
  misc_RNA (1)...(19): siRNA sense strand
aaagauacgacacugagaa

SEQ ID NO: 2145931 - RNA, 19 nt, Homo sapiens
  misc_RNA (1)...(19): siRNA sense strand
ugugaaggcuauaucuaug

SEQ ID NO: 2145932 - RNA, 19 nt, Homo sapiens
  misc_RNA (1)...(19): siRNA sense strand
caucuuugguuugcuguga

SEQ ID NO: 2145933 - RNA, 19 nt, Homo sapiens
  misc_RNA (1)...(19): siRNA sense strand
cagcugauuugcauaaggu

SEQ ID NO: 2145934 - RNA, 19 nt, Homo sapiens
  misc_RNA (1)...(19): siRNA sense strand
uaacacagagagcuugguu

SEQ ID NO: 2145935 - RNA, 19 nt, Homo sapiens
  misc_RNA (1)...(19): siRNA sense strand
gcuaugcuguggcuagagu

SEQ ID NO: 2145936 - RNA, 19 nt, Homo sapiens
  misc_RNA (1)...(19): siRNA sense strand
cagaaucacgaucccagua

SEQ ID NO: 2145937 - RNA, 19 nt, Homo sapiens
  misc_RNA (1)...(19): siRNA sense strand
gugcagcaguugugguuca

SEQ ID NO: 2145938 - RNA, 19 nt, Homo sapiens
  misc_RNA (1)...(19): siRNA sense strand
guuguuuacugacauagug

SEQ ID NO: 2145939 - RNA, 19 nt, Homo sapiens
  misc_RNA (1)...(19): siRNA sense strand
gacuaaagaggaaaugaug

SEQ ID NO: 2145940 - RNA, 19 nt, Homo sapiens
  misc_RNA (1)...(19): siRNA sense strand
uauauuggaggguugcaua

SEQ ID NO: 2145941 - RNA, 19 nt, Homo sapiens
  misc_RNA (1)...(19): siRNA sense strand
caacagacauaccaucuua

SEQ ID NO: 2145942 - RNA, 19 nt, Homo sapiens
  misc_RNA (1)...(19): siRNA sense strand
gcacaaaucuuccaaguca

SEQ ID NO: 2145943 - RNA, 19 nt, Homo sapiens
  misc_RNA (1)...(19): siRNA sense strand
ggaaagaagucaaaguuau

SEQ ID NO: 2145944 - RNA, 19 nt, Homo sapiens
  misc_RNA (1)...(19): siRNA sense strand
gaaagaagucaaaguuaug

SEQ ID NO: 2145945 - RNA, 19 nt, Homo sapiens
  misc_RNA (1)...(19): siRNA sense strand
gacaauaaacgacaugaaa

SEQ ID NO: 2145946 - RNA, 19 nt, Homo sapiens
  misc_RNA (1)...(19): siRNA sense strand
guaaagagaaacacaagaa

SEQ ID NO: 2145947 - RNA, 19 nt, Homo sapiens
  misc_RNA (1)...(19): siRNA sense strand
gggaaagaagucaaaguua

SEQ ID NO: 2145948 - RNA, 19 nt, Homo sapiens
  misc_RNA (1)...(19): siRNA sense strand
gaagauugcauaccagaug

SEQ ID NO: 2145949 - RNA, 19 nt, Homo sapiens
  misc_RNA (1)...(19): siRNA sense strand
ucaaaguuaugcaguguug

SEQ ID NO: 2145950 - RNA, 19 nt, Homo sapiens
  misc_RNA (1)...(19): siRNA sense strand
gaagaucccauguaugaca

SEQ ID NO: 2145951 - RNA, 19 nt, Homo sapiens
  misc_RNA (1)...(19): siRNA sense strand
guaaggauacagcaguuaa

SEQ ID NO: 2145952 - RNA, 19 nt, Homo sapiens
  misc_RNA (1)...(19): siRNA sense strand
gaaugcccuuucuuuauca

SEQ ID NO: 2145953 - RNA, 19 nt, Homo sapiens
  misc_RNA (1)...(19): siRNA sense strand
ucauguacccgaaguuuaa

SEQ ID NO: 2145954 - RNA, 19 nt, Homo sapiens
  misc_RNA (1)...(19): siRNA sense strand
gaacgggugacaaagaaug

SEQ ID NO: 2145955 - RNA, 19 nt, Homo sapiens
  misc_RNA (1)...(19): siRNA sense strand
caucauacgagacaauaaa

SEQ ID NO: 2145956 - RNA, 19 nt, Homo sapiens
  misc_RNA (1)...(19): siRNA sense strand
ucaagcaccuggaguccuu

SEQ ID NO: 2145957 - RNA, 19 nt, Homo sapiens
  misc_RNA (1)...(19): siRNA sense strand
ccgaacgggugacaaagaa

SEQ ID NO: 2145958 - RNA, 19 nt, Homo sapiens
  misc_RNA (1)...(19): siRNA sense strand
gccagaagauugcauacca

SEQ ID NO: 2145959 - RNA, 19 nt, Homo sapiens
  misc_RNA (1)...(19): siRNA sense strand
caaaggcaaccaaaaguua

SEQ ID NO: 2145960 - RNA, 19 nt, Homo sapiens
  misc_RNA (1)...(19): siRNA sense strand
augaagaucccauguauga

SEQ ID NO: 2145961 - RNA, 19 nt, Homo sapiens
  misc_RNA (1)...(19): siRNA sense strand
ggaaaggguauucauguac

SEQ ID NO: 2145962 - RNA, 19 nt, Homo sapiens
  misc_RNA (1)...(19): siRNA sense strand
gaacacgccagggaauuuc

SEQ ID NO: 2145963 - RNA, 19 nt, Homo sapiens
  misc_RNA (1)...(19): siRNA sense strand
gaagguaaagagaaacaca

SEQ ID NO: 2145964 - RNA, 19 nt, Homo sapiens
  misc_RNA (1)...(19): siRNA sense strand
gacaucauacgagacaaua

SEQ ID NO: 2145965 - RNA, 19 nt, Homo sapiens
  misc_RNA (1)...(19): siRNA sense strand
acaaaucuuccaagucaaa

SEQ ID NO: 2145966 - RNA, 19 nt, Homo sapiens
  misc_RNA (1)...(19): siRNA sense strand
gcucaugcaccaacuaaag

SEQ ID NO: 2145967 - RNA, 19 nt, Homo sapiens
  misc_RNA (1)...(19): siRNA sense strand
uaagccagaagauugcaua

SEQ ID NO: 2145968 - RNA, 19 nt, Homo sapiens
  misc_RNA (1)...(19): siRNA sense strand
aagcacaaaucuuccaagu

SEQ ID NO: 2145969 - RNA, 19 nt, Homo sapiens
  misc_RNA (1)...(19): siRNA sense strand
ugaacacgccagggaauuu

SEQ ID NO: 2145970 - RNA, 19 nt, Homo sapiens
  misc_RNA (1)...(19): siRNA sense strand
uaaggauacagcaguuaaa

SEQ ID NO: 2145971 - RNA, 19 nt, Homo sapiens
  misc_RNA (1)...(19): siRNA sense strand
cagaguggcacaugaagau

SEQ ID NO: 2145972 - RNA, 19 nt, Homo sapiens
  misc_RNA (1)...(19): siRNA sense strand
gaaaaggacguaaggauac

SEQ ID NO: 2145973 - RNA, 19 nt, Homo sapiens
  misc_RNA (1)...(19): siRNA sense strand
ugaaaaggacguaaggaua

SEQ ID NO: 2145974 - RNA, 19 nt, Homo sapiens
  misc_RNA (1)...(19): siRNA sense strand
gauucuaccucagaugaag

SEQ ID NO: 2145975 - RNA, 19 nt, Homo sapiens
  misc_RNA (1)...(19): siRNA sense strand
caguuccucugaagguaaa

SEQ ID NO: 2145976 - RNA, 19 nt, Homo sapiens
  misc_RNA (1)...(19): siRNA sense strand
gguaaagagaaacacaaga

SEQ ID NO: 2145977 - RNA, 19 nt, Homo sapiens
  misc_RNA (1)...(19): siRNA sense strand
aaacggaagcacaaaucuu

SEQ ID NO: 2145978 - RNA, 19 nt, Homo sapiens
  misc_RNA (1)...(19): siRNA sense strand
aaaguuagagcaguucaga

SEQ ID NO: 2145979 - RNA, 19 nt, Homo sapiens
  misc_RNA (1)...(19): siRNA sense strand
aaucuuccaagucaaauga

SEQ ID NO: 2145980 - RNA, 19 nt, Homo sapiens
  misc_RNA (1)...(19): siRNA sense strand
ccaguuccucugaagguaa

SEQ ID NO: 2145981 - RNA, 19 nt, Homo sapiens
  misc_RNA (1)...(19): siRNA sense strand
gcagcuccaguuccucuga

SEQ ID NO: 2145982 - RNA, 19 nt, Homo sapiens
  misc_RNA (1)...(19): siRNA sense strand
uacccgaaguuuaacaaca

SEQ ID NO: 2145983 - RNA, 19 nt, Homo sapiens
  misc_RNA (1)...(19): siRNA sense strand
cagcuccaguuccucugaa

SEQ ID NO: 2145984 - RNA, 19 nt, Homo sapiens
  misc_RNA (1)...(19): siRNA sense strand
ggauacagcaguuaaaaca

SEQ ID NO: 2145985 - RNA, 19 nt, Homo sapiens
  misc_RNA (1)...(19): siRNA sense strand
aagauugcauaccagaugu

SEQ ID NO: 2145986 - RNA, 19 nt, Homo sapiens
  misc_RNA (1)...(19): siRNA sense strand
caagucaaaugaggguucu

SEQ ID NO: 2145987 - RNA, 19 nt, Homo sapiens
  misc_RNA (1)...(19): siRNA sense strand
ggauucuaccucagaugaa

SEQ ID NO: 2145988 - RNA, 19 nt, Homo sapiens
  misc_RNA (1)...(19): siRNA sense strand
cauacgagacaauaaacga

SEQ ID NO: 2145989 - RNA, 19 nt, Homo sapiens
  misc_RNA (1)...(19): siRNA sense strand
guauucauguacccgaagu

SEQ ID NO: 2145990 - RNA, 19 nt, Homo sapiens
  misc_RNA (1)...(19): siRNA sense strand
gaaaaggaagaaagaaaag

SEQ ID NO: 2145991 - RNA, 19 nt, Homo sapiens
  misc_RNA (1)...(19): siRNA sense strand
uaccucagaugaagauagg

SEQ ID NO: 2145992 - RNA, 19 nt, Homo sapiens
  misc_RNA (1)...(19): siRNA sense strand
ggggaaagaagucaaaguu

SEQ ID NO: 2145993 - RNA, 19 nt, Homo sapiens
  misc_RNA (1)...(19): siRNA sense strand
gagacaauaaacgacauga

SEQ ID NO: 2145994 - RNA, 19 nt, Homo sapiens
  misc_RNA (1)...(19): siRNA sense strand
gggcuuaucaaggaagaug

SEQ ID NO: 2145995 - RNA, 19 nt, Homo sapiens
  misc_RNA (1)...(19): siRNA sense strand
cguaaggauacagcaguua

SEQ ID NO: 2145996 - RNA, 19 nt, Homo sapiens
  misc_RNA (1)...(19): siRNA sense strand
ugacaucauacgagacaau

SEQ ID NO: 2145997 - RNA, 19 nt, Homo sapiens
  misc_RNA (1)...(19): siRNA sense strand
gaaguuuaacaacagacau

SEQ ID NO: 2145998 - RNA, 19 nt, Homo sapiens
  misc_RNA (1)...(19): siRNA sense strand
gcaguguuggcguugcaaa

SEQ ID NO: 2145999 - RNA, 19 nt, Homo sapiens
  misc_RNA (1)...(19): siRNA sense strand
agucaaaguuaugcagugu

SEQ ID NO: 2146000 - RNA, 19 nt, Homo sapiens
  misc_RNA (1)...(19): siRNA sense strand
agauguaccaggcaaugaa

SEQ ID NO: 2146001 - RNA, 19 nt, Homo sapiens
  misc_RNA (1)...(19): siRNA sense strand
ccagauguaccaggcaaug

SEQ ID NO: 2146002 - RNA, 19 nt, Homo sapiens
  misc_RNA (1)...(19): siRNA sense strand
gaaaagcauaagaaaagga

SEQ ID NO: 2146003 - RNA, 19 nt, Homo sapiens
  misc_RNA (1)...(19): siRNA sense strand
agacaauaaacgacaugaa

SEQ ID NO: 2146004 - RNA, 19 nt, Homo sapiens
  misc_RNA (1)...(19): siRNA sense strand
gaagugauguuuaugacaa

SEQ ID NO: 2146005 - RNA, 19 nt, Homo sapiens
  misc_RNA (1)...(19): siRNA sense strand
ggaaauaucuugggaugga

SEQ ID NO: 2146006 - RNA, 19 nt, Homo sapiens
  misc_RNA (1)...(19): siRNA sense strand
caacuacaauggacauaaa

SEQ ID NO: 2146007 - RNA, 19 nt, Homo sapiens
  misc_RNA (1)...(19): siRNA sense strand
acauaaacgugaugacuua

SEQ ID NO: 2146008 - RNA, 19 nt, Homo sapiens
  misc_RNA (1)...(19): siRNA sense strand
acaaggaagugacauguaa

SEQ ID NO: 2146009 - RNA, 19 nt, Homo sapiens
  misc_RNA (1)...(19): siRNA sense strand
uauaacagcuccuucaaau

SEQ ID NO: 2146010 - RNA, 19 nt, Homo sapiens
  misc_RNA (1)...(19): siRNA sense strand
agacaacccuugcauaaug

SEQ ID NO: 2146011 - RNA, 19 nt, Homo sapiens
  misc_RNA (1)...(19): siRNA sense strand
caacagaccucagagaaag

SEQ ID NO: 2146012 - RNA, 19 nt, Homo sapiens
  misc_RNA (1)...(19): siRNA sense strand
ccucauuucuguacgauaa

SEQ ID NO: 2146013 - RNA, 19 nt, Homo sapiens
  misc_RNA (1)...(19): siRNA sense strand
ggaagcaaauguaccaagu

SEQ ID NO: 2146014 - RNA, 19 nt, Homo sapiens
  misc_RNA (1)...(19): siRNA sense strand
caucugugcuugugugaaa

SEQ ID NO: 2146015 - RNA, 19 nt, Homo sapiens
  misc_RNA (1)...(19): siRNA sense strand
gcaaauguaccaaguguuc

SEQ ID NO: 2146016 - RNA, 19 nt, Homo sapiens
  misc_RNA (1)...(19): siRNA sense strand
gagaugugguccucuauca

SEQ ID NO: 2146017 - RNA, 19 nt, Homo sapiens
  misc_RNA (1)...(19): siRNA sense strand
cagaagacaucaaaguaug

SEQ ID NO: 2146018 - RNA, 19 nt, Homo sapiens
  misc_RNA (1)...(19): siRNA sense strand
gcucaaauccugggaguuu

SEQ ID NO: 2146019 - RNA, 19 nt, Homo sapiens
  misc_RNA (1)...(19): siRNA sense strand
gcaacagaccucagagaaa

SEQ ID NO: 2146020 - RNA, 19 nt, Homo sapiens
  misc_RNA (1)...(19): siRNA sense strand
ggucggacauuuaacuuuc

SEQ ID NO: 2146021 - RNA, 19 nt, Homo sapiens
  misc_RNA (1)...(19): siRNA sense strand
ggaagugacauguaagaga

SEQ ID NO: 2146022 - RNA, 19 nt, Homo sapiens
  misc_RNA (1)...(19): siRNA sense strand
ggcaagcucuguggucuuu

SEQ ID NO: 2146023 - RNA, 19 nt, Homo sapiens
  misc_RNA (1)...(19): siRNA sense strand
uaacagcuccuucaaaugg

SEQ ID NO: 2146024 - RNA, 19 nt, Homo sapiens
  misc_RNA (1)...(19): siRNA sense strand
ggacggagugucgcaauaa

SEQ ID NO: 2146025 - RNA, 19 nt, Homo sapiens
  misc_RNA (1)...(19): siRNA sense strand
ugacagacaugugugaaug

SEQ ID NO: 2146026 - RNA, 19 nt, Homo sapiens
  misc_RNA (1)...(19): siRNA sense strand
ugugacaacuggaaugaaa

SEQ ID NO: 2146027 - RNA, 19 nt, Homo sapiens
  misc_RNA (1)...(19): siRNA sense strand
gaaauugguccaugcaaca

SEQ ID NO: 2146028 - RNA, 19 nt, Homo sapiens
  misc_RNA (1)...(19): siRNA sense strand
gaacaaggaagugacaugu

SEQ ID NO: 2146029 - RNA, 19 nt, Homo sapiens
  misc_RNA (1)...(19): siRNA sense strand
agagaagucugucccauuc

SEQ ID NO: 2146030 - RNA, 19 nt, Homo sapiens
  misc_RNA (1)...(19): siRNA sense strand
gcuguguuguucauuguaa

SEQ ID NO: 2146031 - RNA, 19 nt, Homo sapiens
  misc_RNA (1)...(19): siRNA sense strand
caacuggaaugaaauuggu

SEQ ID NO: 2146032 - RNA, 19 nt, Homo sapiens
  misc_RNA (1)...(19): siRNA sense strand
gaaagugaccaccaaagca

SEQ ID NO: 2146033 - RNA, 19 nt, Homo sapiens
  misc_RNA (1)...(19): siRNA sense strand
acagacaacccuugcauaa

SEQ ID NO: 2146034 - RNA, 19 nt, Homo sapiens
  misc_RNA (1)...(19): siRNA sense strand
ccagagagagggcaucaaa

SEQ ID NO: 2146035 - RNA, 19 nt, Homo sapiens
  misc_RNA (1)...(19): siRNA sense strand
gagagaagucugucccauu

SEQ ID NO: 2146036 - RNA, 19 nt, Homo sapiens
  misc_RNA (1)...(19): siRNA sense strand
gaaggaaauaccuauaaca

SEQ ID NO: 2146037 - RNA, 19 nt, Homo sapiens
  misc_RNA (1)...(19): siRNA sense strand
gaaggaagcaaauguacca

SEQ ID NO: 2146038 - RNA, 19 nt, Homo sapiens
  misc_RNA (1)...(19): siRNA sense strand
ggaggaauuucagccagaa

SEQ ID NO: 2146039 - RNA, 19 nt, Homo sapiens
  misc_RNA (1)...(19): siRNA sense strand
ccagaaggaagcaaaugua

SEQ ID NO: 2146040 - RNA, 19 nt, Homo sapiens
  misc_RNA (1)...(19): siRNA sense strand
gguccgggauguaucaaga

SEQ ID NO: 2146041 - RNA, 19 nt, Homo sapiens
  misc_RNA (1)...(19): siRNA sense strand
caggagggcuguugugaag

SEQ ID NO: 2146042 - RNA, 19 nt, Homo sapiens
  misc_RNA (1)...(19): siRNA sense strand
gcaacuacaauggacauaa

SEQ ID NO: 2146043 - RNA, 19 nt, Homo sapiens
  misc_RNA (1)...(19): siRNA sense strand
gugaauguccaguccauaa

SEQ ID NO: 2146044 - RNA, 19 nt, Homo sapiens
  misc_RNA (1)...(19): siRNA sense strand
ggacuacgccacuuucuac

SEQ ID NO: 2146045 - RNA, 19 nt, Homo sapiens
  misc_RNA (1)...(19): siRNA sense strand
ccagaagacaucaaaguau

SEQ ID NO: 2146046 - RNA, 19 nt, Homo sapiens
  misc_RNA (1)...(19): siRNA sense strand
caaacuugguccuucacaa

SEQ ID NO: 2146047 - RNA, 19 nt, Homo sapiens
  misc_RNA (1)...(19): siRNA sense strand
ggacagugcugccccaaau

SEQ ID NO: 2146048 - RNA, 19 nt, Homo sapiens
  misc_RNA (1)...(19): siRNA sense strand
cagcaaacuugguccuuca

SEQ ID NO: 2146049 - RNA, 19 nt, Homo sapiens
  misc_RNA (1)...(19): siRNA sense strand
caagggacagucaagguaa

SEQ ID NO: 2146050 - RNA, 19 nt, Homo sapiens
  misc_RNA (1)...(19): siRNA sense strand
gaaagccagugccugaacu

SEQ ID NO: 2146051 - RNA, 19 nt, Homo sapiens
  misc_RNA (1)...(19): siRNA sense strand
caaauuuggcaacaagauu

SEQ ID NO: 2146052 - RNA, 19 nt, Homo sapiens
  misc_RNA (1)...(19): siRNA sense strand
ggagggcuguugugaagag

SEQ ID NO: 2146053 - RNA, 19 nt, Homo sapiens
  misc_RNA (1)...(19): siRNA sense strand
gacaacccuugcauaaugu

SEQ ID NO: 2146054 - RNA, 19 nt, Homo sapiens
  misc_RNA (1)...(19): siRNA sense strand
ugacuuaauugguggagau

SEQ ID NO: 2146055 - RNA, 19 nt, Homo sapiens
  misc_RNA (1)...(19): siRNA sense strand
uacgauaacugcacagcuu

SEQ ID NO: 2146056 - RNA, 19 nt, Homo sapiens
  misc_RNA (1)...(19): siRNA sense strand
aagcaaauguaccaagugu

SEQ ID NO: 2146057 - RNA, 19 nt, Homo sapiens
  misc_RNA (1)...(19): siRNA sense strand
aaacuguuauugcgaguca

SEQ ID NO: 2146058 - RNA, 19 nt, Homo sapiens
  misc_RNA (1)...(19): siRNA sense strand
gacauaaacgugaugacuu

SEQ ID NO: 2146059 - RNA, 19 nt, Homo sapiens
  misc_RNA (1)...(19): siRNA sense strand
gaugugguccucuaucaau

SEQ ID NO: 2146060 - RNA, 19 nt, Homo sapiens
  misc_RNA (1)...(19): siRNA sense strand
ucaagggacagucaaggua

SEQ ID NO: 2146061 - RNA, 19 nt, Homo sapiens
  misc_RNA (1)...(19): siRNA sense strand
gcaaauuuggcaacaagau

SEQ ID NO: 2146062 - RNA, 19 nt, Homo sapiens
  misc_RNA (1)...(19): siRNA sense strand
ggugaaguccuccagauuc

SEQ ID NO: 2146063 - RNA, 19 nt, Homo sapiens
  misc_RNA (1)...(19): siRNA sense strand
caagcucuguggucuuugu

SEQ ID NO: 2146064 - RNA, 19 nt, Homo sapiens
  misc_RNA (1)...(19): siRNA sense strand
ggcuaccucuugaaaguga

SEQ ID NO: 2146065 - RNA, 19 nt, Homo sapiens
  misc_RNA (1)...(19): siRNA sense strand
gcagugcauucccaucagu

SEQ ID NO: 2146066 - RNA, 19 nt, Homo sapiens
  misc_RNA (1)...(19): siRNA sense strand
gcaucaagccaguccuuug

SEQ ID NO: 2146067 - RNA, 19 nt, Homo sapiens
  misc_RNA (1)...(19): siRNA sense strand
ugacaacuggaaugaaauu

SEQ ID NO: 2146068 - RNA, 19 nt, Homo sapiens
  misc_RNA (1)...(19): siRNA sense strand
ggaugacuuugcugaaucu

SEQ ID NO: 2146069 - RNA, 19 nt, Homo sapiens
  misc_RNA (1)...(19): siRNA sense strand
ggauggcuaccucuugaaa

SEQ ID NO: 2146070 - RNA, 19 nt, Homo sapiens
  misc_RNA (1)...(19): siRNA sense strand
ugaaggaaauaccuauaac

SEQ ID NO: 2146071 - RNA, 19 nt, Homo sapiens
  misc_RNA (1)...(19): siRNA sense strand
ggacauaaacgugaugacu

SEQ ID NO: 2146072 - RNA, 19 nt, Homo sapiens
  misc_RNA (1)...(19): siRNA sense strand
gauccucauuucuguacga

SEQ ID NO: 2146073 - RNA, 19 nt, Homo sapiens
  misc_RNA (1)...(19): siRNA sense strand
gugcagccacccaguguaa

SEQ ID NO: 2146074 - RNA, 19 nt, Homo sapiens
  misc_RNA (1)...(19): siRNA sense strand
gaagcaaauguaccaagug

SEQ ID NO: 2146075 - RNA, 19 nt, Homo sapiens
  misc_RNA (1)...(19): siRNA sense strand
guggaugacuuugcugaau

SEQ ID NO: 2146076 - RNA, 19 nt, Homo sapiens
  misc_RNA (1)...(19): siRNA sense strand
cccagaagacaucaaagua

SEQ ID NO: 2146077 - RNA, 19 nt, Homo sapiens
  misc_RNA (1)...(19): siRNA sense strand
gauaacugcacagcuugua

SEQ ID NO: 2146078 - RNA, 19 nt, Homo sapiens
  misc_RNA (1)...(19): siRNA sense strand
gcgcuguguuguucauugu

SEQ ID NO: 2146079 - RNA, 19 nt, Homo sapiens
  misc_RNA (1)...(19): siRNA sense strand
aaagcagguuuggaaauau

SEQ ID NO: 2146080 - RNA, 19 nt, Homo sapiens
  misc_RNA (1)...(19): siRNA sense strand
ccagcaccuuagucacaua

SEQ ID NO: 2146081 - RNA, 19 nt, Homo sapiens
  misc_RNA (1)...(19): siRNA sense strand
gggcaaaauucucaacaga

SEQ ID NO: 2146082 - RNA, 19 nt, Homo sapiens
  misc_RNA (1)...(19): siRNA sense strand
gguccucuaucaauuguac

SEQ ID NO: 2146083 - RNA, 19 nt, Homo sapiens
  misc_RNA (1)...(19): siRNA sense strand
cagggacucuacugugguu

SEQ ID NO: 2146084 - RNA, 19 nt, Homo sapiens
  misc_RNA (1)...(19): siRNA sense strand
uguccuauuugcacugaaa

SEQ ID NO: 2146085 - RNA, 19 nt, Homo sapiens
  misc_RNA (1)...(19): siRNA sense strand
ccaaugaguucugcaacag

SEQ ID NO: 2146086 - RNA, 19 nt, Homo sapiens
  misc_RNA (1)...(19): siRNA sense strand
caauggacauaaacgugau

SEQ ID NO: 2146087 - RNA, 19 nt, Homo sapiens
  misc_RNA (1)...(19): siRNA sense strand
cuggauggcuaccucuuga

SEQ ID NO: 2146088 - RNA, 19 nt, Homo sapiens
  misc_RNA (1)...(19): siRNA sense strand
ugugaacagugcaaagguu

SEQ ID NO: 2146089 - RNA, 19 nt, Homo sapiens
  misc_RNA (1)...(19): siRNA sense strand
gcauggugcuguguacgau

SEQ ID NO: 2146090 - RNA, 19 nt, Homo sapiens
  misc_RNA (1)...(19): siRNA sense strand
ggaauuucagccagaagga

SEQ ID NO: 2146091 - RNA, 19 nt, Homo sapiens
  misc_RNA (1)...(19): siRNA sense strand
caucaagccaguccuuugu

SEQ ID NO: 2146092 - RNA, 19 nt, Homo sapiens
  misc_RNA (1)...(19): siRNA sense strand
gggagccucagcagaauug

SEQ ID NO: 2146093 - RNA, 19 nt, Homo sapiens
  misc_RNA (1)...(19): siRNA sense strand
gcaauaagcagugcauucc

SEQ ID NO: 2146094 - RNA, 19 nt, Homo sapiens
  misc_RNA (1)...(19): siRNA sense strand
agacaucaaaguaugcaaa

SEQ ID NO: 2146095 - RNA, 19 nt, Homo sapiens
  misc_RNA (1)...(19): siRNA sense strand
gaauuucagccagaaggaa

SEQ ID NO: 2146096 - RNA, 19 nt, Homo sapiens
  misc_RNA (1)...(19): siRNA sense strand
ugaauguccaguccauaaa

SEQ ID NO: 2146097 - RNA, 19 nt, Homo sapiens
  misc_RNA (1)...(19): siRNA sense strand
ugguggagauggaaacuuc

SEQ ID NO: 2146098 - RNA, 19 nt, Homo sapiens
  misc_RNA (1)...(19): siRNA sense strand
uuugggagcugccucuuuc

SEQ ID NO: 2146099 - RNA, 19 nt, Homo sapiens
  misc_RNA (1)...(19): siRNA sense strand
uaucaauuguaccaucugu

SEQ ID NO: 2146100 - RNA, 19 nt, Homo sapiens
  misc_RNA (1)...(19): siRNA sense strand
ccacuguccagcaaacuug

SEQ ID NO: 2146101 - RNA, 19 nt, Homo sapiens
  misc_RNA (1)...(19): siRNA sense strand
gagagagggcaucaaaguc

SEQ ID NO: 2146102 - RNA, 19 nt, Homo sapiens
  misc_RNA (1)...(19): siRNA sense strand
agagagagggcaucaaagu

SEQ ID NO: 2146103 - RNA, 19 nt, Homo sapiens
  misc_RNA (1)...(19): siRNA sense strand
uaaugugugucugcuugaa

SEQ ID NO: 2146104 - RNA, 19 nt, Homo sapiens
  misc_RNA (1)...(19): siRNA sense strand
gaagugauguuuaugacaa

SEQ ID NO: 2146105 - RNA, 19 nt, Homo sapiens
  misc_RNA (1)...(19): siRNA sense strand
ggaaauaucuugggaugga

SEQ ID NO: 2146106 - RNA, 19 nt, Homo sapiens
  misc_RNA (1)...(19): siRNA sense strand
caacuacaauggacauaaa

SEQ ID NO: 2146107 - RNA, 19 nt, Homo sapiens
  misc_RNA (1)...(19): siRNA sense strand
acauaaacgugaugacuua

SEQ ID NO: 2146108 - RNA, 19 nt, Homo sapiens
  misc_RNA (1)...(19): siRNA sense strand
acaaggaagugacauguaa

SEQ ID NO: 2146109 - RNA, 19 nt, Homo sapiens
  misc_RNA (1)...(19): siRNA sense strand
uauaacagcuccuucaaau

SEQ ID NO: 2146110 - RNA, 19 nt, Homo sapiens
  misc_RNA (1)...(19): siRNA sense strand
agacaacccuugcauaaug

SEQ ID NO: 2146111 - RNA, 19 nt, Homo sapiens
  misc_RNA (1)...(19): siRNA sense strand
caacagaccucagagaaag

SEQ ID NO: 2146112 - RNA, 19 nt, Homo sapiens
  misc_RNA (1)...(19): siRNA sense strand
ccucauuucuguacgauaa

SEQ ID NO: 2146113 - RNA, 19 nt, Homo sapiens
  misc_RNA (1)...(19): siRNA sense strand
ggaagcaaauguaccaagu

SEQ ID NO: 2146114 - RNA, 19 nt, Homo sapiens
  misc_RNA (1)...(19): siRNA sense strand
caucugugcuugugugaaa

SEQ ID NO: 2146115 - RNA, 19 nt, Homo sapiens
  misc_RNA (1)...(19): siRNA sense strand
gcaaauguaccaaguguuc

SEQ ID NO: 2146116 - RNA, 19 nt, Homo sapiens
  misc_RNA (1)...(19): siRNA sense strand
gagaugugguccucuauca

SEQ ID NO: 2146117 - RNA, 19 nt, Homo sapiens
  misc_RNA (1)...(19): siRNA sense strand
cagaagacaucaaaguaug

SEQ ID NO: 2146118 - RNA, 19 nt, Homo sapiens
  misc_RNA (1)...(19): siRNA sense strand
gcucaaauccugggaguuu

SEQ ID NO: 2146119 - RNA, 19 nt, Homo sapiens
  misc_RNA (1)...(19): siRNA sense strand
gcaacagaccucagagaaa

SEQ ID NO: 2146120 - RNA, 19 nt, Homo sapiens
  misc_RNA (1)...(19): siRNA sense strand
ggucggacauuuaacuuuc

SEQ ID NO: 2146121 - RNA, 19 nt, Homo sapiens
  misc_RNA (1)...(19): siRNA sense strand
ggaagugacauguaagaga

SEQ ID NO: 2146122 - RNA, 19 nt, Homo sapiens
  misc_RNA (1)...(19): siRNA sense strand
ggcaagcucuguggucuuu

SEQ ID NO: 2146123 - RNA, 19 nt, Homo sapiens
  misc_RNA (1)...(19): siRNA sense strand
uaacagcuccuucaaaugg

SEQ ID NO: 2146124 - RNA, 19 nt, Homo sapiens
  misc_RNA (1)...(19): siRNA sense strand
ggacggagugucgcaauaa

SEQ ID NO: 2146125 - RNA, 19 nt, Homo sapiens
  misc_RNA (1)...(19): siRNA sense strand
ugacagacaugugugaaug

SEQ ID NO: 2146126 - RNA, 19 nt, Homo sapiens
  misc_RNA (1)...(19): siRNA sense strand
ugugacaacuggaaugaaa

SEQ ID NO: 2146127 - RNA, 19 nt, Homo sapiens
  misc_RNA (1)...(19): siRNA sense strand
gaaauugguccaugcaaca

SEQ ID NO: 2146128 - RNA, 19 nt, Homo sapiens
  misc_RNA (1)...(19): siRNA sense strand
gaacaaggaagugacaugu

SEQ ID NO: 2146129 - RNA, 19 nt, Homo sapiens
  misc_RNA (1)...(19): siRNA sense strand
agagaagucugucccauuc

SEQ ID NO: 2146130 - RNA, 19 nt, Homo sapiens
  misc_RNA (1)...(19): siRNA sense strand
gcuguguuguucauuguaa

SEQ ID NO: 2146131 - RNA, 19 nt, Homo sapiens
  misc_RNA (1)...(19): siRNA sense strand
caacuggaaugaaauuggu

SEQ ID NO: 2146132 - RNA, 19 nt, Homo sapiens
  misc_RNA (1)...(19): siRNA sense strand
gaaagugaccaccaaagca

SEQ ID NO: 2146133 - RNA, 19 nt, Homo sapiens
  misc_RNA (1)...(19): siRNA sense strand
acagacaacccuugcauaa

SEQ ID NO: 2146134 - RNA, 19 nt, Homo sapiens
  misc_RNA (1)...(19): siRNA sense strand
ccagagagagggcaucaaa

SEQ ID NO: 2146135 - RNA, 19 nt, Homo sapiens
  misc_RNA (1)...(19): siRNA sense strand
gagagaagucugucccauu

SEQ ID NO: 2146136 - RNA, 19 nt, Homo sapiens
  misc_RNA (1)...(19): siRNA sense strand
gaaggaaauaccuauaaca

SEQ ID NO: 2146137 - RNA, 19 nt, Homo sapiens
  misc_RNA (1)...(19): siRNA sense strand
gaaggaagcaaauguacca

SEQ ID NO: 2146138 - RNA, 19 nt, Homo sapiens
  misc_RNA (1)...(19): siRNA sense strand
ggaggaauuucagccagaa

SEQ ID NO: 2146139 - RNA, 19 nt, Homo sapiens
  misc_RNA (1)...(19): siRNA sense strand
ccagaaggaagcaaaugua

SEQ ID NO: 2146140 - RNA, 19 nt, Homo sapiens
  misc_RNA (1)...(19): siRNA sense strand
gguccgggauguaucaaga

SEQ ID NO: 2146141 - RNA, 19 nt, Homo sapiens
  misc_RNA (1)...(19): siRNA sense strand
caggagggcuguugugaag

SEQ ID NO: 2146142 - RNA, 19 nt, Homo sapiens
  misc_RNA (1)...(19): siRNA sense strand
gcaacuacaauggacauaa

SEQ ID NO: 2146143 - RNA, 19 nt, Homo sapiens
  misc_RNA (1)...(19): siRNA sense strand
gugaauguccaguccauaa

SEQ ID NO: 2146144 - RNA, 19 nt, Homo sapiens
  misc_RNA (1)...(19): siRNA sense strand
ggacuacgccacuuucuac

SEQ ID NO: 2146145 - RNA, 19 nt, Homo sapiens
  misc_RNA (1)...(19): siRNA sense strand
ccagaagacaucaaaguau

SEQ ID NO: 2146146 - RNA, 19 nt, Homo sapiens
  misc_RNA (1)...(19): siRNA sense strand
caaacuugguccuucacaa

SEQ ID NO: 2146147 - RNA, 19 nt, Homo sapiens
  misc_RNA (1)...(19): siRNA sense strand
ggacagugcugccccaaau

SEQ ID NO: 2146148 - RNA, 19 nt, Homo sapiens
  misc_RNA (1)...(19): siRNA sense strand
cagcaaacuugguccuuca

SEQ ID NO: 2146149 - RNA, 19 nt, Homo sapiens
  misc_RNA (1)...(19): siRNA sense strand
caagggacagucaagguaa

SEQ ID NO: 2146150 - RNA, 19 nt, Homo sapiens
  misc_RNA (1)...(19): siRNA sense strand
gaaagccagugccugaacu

SEQ ID NO: 2146151 - RNA, 19 nt, Homo sapiens
  misc_RNA (1)...(19): siRNA sense strand
caaauuuggcaacaagauu

SEQ ID NO: 2146152 - RNA, 19 nt, Homo sapiens
  misc_RNA (1)...(19): siRNA sense strand
ggagggcuguugugaagag

SEQ ID NO: 2146153 - RNA, 19 nt, Homo sapiens
  misc_RNA (1)...(19): siRNA sense strand
gacaacccuugcauaaugu

SEQ ID NO: 2146154 - RNA, 19 nt, Homo sapiens
  misc_RNA (1)...(19): siRNA sense strand
ugacuuaauugguggagau

SEQ ID NO: 2146155 - RNA, 19 nt, Homo sapiens
  misc_RNA (1)...(19): siRNA sense strand
uacgauaacugcacagcuu

SEQ ID NO: 2146156 - RNA, 19 nt, Homo sapiens
  misc_RNA (1)...(19): siRNA sense strand
aagcaaauguaccaagugu

SEQ ID NO: 2146157 - RNA, 19 nt, Homo sapiens
  misc_RNA (1)...(19): siRNA sense strand
aaacuguuauugcgaguca

SEQ ID NO: 2146158 - RNA, 19 nt, Homo sapiens
  misc_RNA (1)...(19): siRNA sense strand
gacauaaacgugaugacuu

SEQ ID NO: 2146159 - RNA, 19 nt, Homo sapiens
  misc_RNA (1)...(19): siRNA sense strand
gaugugguccucuaucaau

SEQ ID NO: 2146160 - RNA, 19 nt, Homo sapiens
  misc_RNA (1)...(19): siRNA sense strand
ucaagggacagucaaggua

SEQ ID NO: 2146161 - RNA, 19 nt, Homo sapiens
  misc_RNA (1)...(19): siRNA sense strand
gcaaauuuggcaacaagau

SEQ ID NO: 2146162 - RNA, 19 nt, Homo sapiens
  misc_RNA (1)...(19): siRNA sense strand
ggugaaguccuccagauuc

SEQ ID NO: 2146163 - RNA, 19 nt, Homo sapiens
  misc_RNA (1)...(19): siRNA sense strand
caagcucuguggucuuugu

SEQ ID NO: 2146164 - RNA, 19 nt, Homo sapiens
  misc_RNA (1)...(19): siRNA sense strand
ggcuaccucuugaaaguga

SEQ ID NO: 2146165 - RNA, 19 nt, Homo sapiens
  misc_RNA (1)...(19): siRNA sense strand
gcagugcauucccaucagu

SEQ ID NO: 2146166 - RNA, 19 nt, Homo sapiens
  misc_RNA (1)...(19): siRNA sense strand
gcaucaagccaguccuuug

SEQ ID NO: 2146167 - RNA, 19 nt, Homo sapiens
  misc_RNA (1)...(19): siRNA sense strand
ugacaacuggaaugaaauu

SEQ ID NO: 2146168 - RNA, 19 nt, Homo sapiens
  misc_RNA (1)...(19): siRNA sense strand
ggaugacuuugcugaaucu

SEQ ID NO: 2146169 - RNA, 19 nt, Homo sapiens
  misc_RNA (1)...(19): siRNA sense strand
ggauggcuaccucuugaaa

SEQ ID NO: 2146170 - RNA, 19 nt, Homo sapiens
  misc_RNA (1)...(19): siRNA sense strand
ugaaggaaauaccuauaac

SEQ ID NO: 2146171 - RNA, 19 nt, Homo sapiens
  misc_RNA (1)...(19): siRNA sense strand
ggacauaaacgugaugacu

SEQ ID NO: 2146172 - RNA, 19 nt, Homo sapiens
  misc_RNA (1)...(19): siRNA sense strand
gauccucauuucuguacga

SEQ ID NO: 2146173 - RNA, 19 nt, Homo sapiens
  misc_RNA (1)...(19): siRNA sense strand
gugcagccacccaguguaa

SEQ ID NO: 2146174 - RNA, 19 nt, Homo sapiens
  misc_RNA (1)...(19): siRNA sense strand
gaagcaaauguaccaagug

SEQ ID NO: 2146175 - RNA, 19 nt, Homo sapiens
  misc_RNA (1)...(19): siRNA sense strand
guggaugacuuugcugaau

SEQ ID NO: 2146176 - RNA, 19 nt, Homo sapiens
  misc_RNA (1)...(19): siRNA sense strand
cccagaagacaucaaagua

SEQ ID NO: 2146177 - RNA, 19 nt, Homo sapiens
  misc_RNA (1)...(19): siRNA sense strand
gauaacugcacagcuugua

SEQ ID NO: 2146178 - RNA, 19 nt, Homo sapiens
  misc_RNA (1)...(19): siRNA sense strand
gcgcuguguuguucauugu

SEQ ID NO: 2146179 - RNA, 19 nt, Homo sapiens
  misc_RNA (1)...(19): siRNA sense strand
aaagcagguuuggaaauau

SEQ ID NO: 2146180 - RNA, 19 nt, Homo sapiens
  misc_RNA (1)...(19): siRNA sense strand
ccagcaccuuagucacaua

SEQ ID NO: 2146181 - RNA, 19 nt, Homo sapiens
  misc_RNA (1)...(19): siRNA sense strand
gggcaaaauucucaacaga

SEQ ID NO: 2146182 - RNA, 19 nt, Homo sapiens
  misc_RNA (1)...(19): siRNA sense strand
gguccucuaucaauuguac

SEQ ID NO: 2146183 - RNA, 19 nt, Homo sapiens
  misc_RNA (1)...(19): siRNA sense strand
cagggacucuacugugguu

SEQ ID NO: 2146184 - RNA, 19 nt, Homo sapiens
  misc_RNA (1)...(19): siRNA sense strand
uguccuauuugcacugaaa

SEQ ID NO: 2146185 - RNA, 19 nt, Homo sapiens
  misc_RNA (1)...(19): siRNA sense strand
ccaaugaguucugcaacag

SEQ ID NO: 2146186 - RNA, 19 nt, Homo sapiens
  misc_RNA (1)...(19): siRNA sense strand
caauggacauaaacgugau

SEQ ID NO: 2146187 - RNA, 19 nt, Homo sapiens
  misc_RNA (1)...(19): siRNA sense strand
cuggauggcuaccucuuga

SEQ ID NO: 2146188 - RNA, 19 nt, Homo sapiens
  misc_RNA (1)...(19): siRNA sense strand
ugugaacagugcaaagguu

SEQ ID NO: 2146189 - RNA, 19 nt, Homo sapiens
  misc_RNA (1)...(19): siRNA sense strand
gcauggugcuguguacgau

SEQ ID NO: 2146190 - RNA, 19 nt, Homo sapiens
  misc_RNA (1)...(19): siRNA sense strand
ggaauuucagccagaagga

SEQ ID NO: 2146191 - RNA, 19 nt, Homo sapiens
  misc_RNA (1)...(19): siRNA sense strand
caucaagccaguccuuugu

SEQ ID NO: 2146192 - RNA, 19 nt, Homo sapiens
  misc_RNA (1)...(19): siRNA sense strand
gggagccucagcagaauug

SEQ ID NO: 2146193 - RNA, 19 nt, Homo sapiens
  misc_RNA (1)...(19): siRNA sense strand
gcaauaagcagugcauucc

SEQ ID NO: 2146194 - RNA, 19 nt, Homo sapiens
  misc_RNA (1)...(19): siRNA sense strand
agacaucaaaguaugcaaa

SEQ ID NO: 2146195 - RNA, 19 nt, Homo sapiens
  misc_RNA (1)...(19): siRNA sense strand
gaauuucagccagaaggaa

SEQ ID NO: 2146196 - RNA, 19 nt, Homo sapiens
  misc_RNA (1)...(19): siRNA sense strand
ugaauguccaguccauaaa

SEQ ID NO: 2146197 - RNA, 19 nt, Homo sapiens
  misc_RNA (1)...(19): siRNA sense strand
ugguggagauggaaacuuc

SEQ ID NO: 2146198 - RNA, 19 nt, Homo sapiens
  misc_RNA (1)...(19): siRNA sense strand
uuugggagcugccucuuuc

SEQ ID NO: 2146199 - RNA, 19 nt, Homo sapiens
  misc_RNA (1)...(19): siRNA sense strand
uaucaauuguaccaucugu

SEQ ID NO: 2146200 - RNA, 19 nt, Homo sapiens
  misc_RNA (1)...(19): siRNA sense strand
ccacuguccagcaaacuug

SEQ ID NO: 2146201 - RNA, 19 nt, Homo sapiens
  misc_RNA (1)...(19): siRNA sense strand
gagagagggcaucaaaguc

SEQ ID NO: 2146202 - RNA, 19 nt, Homo sapiens
  misc_RNA (1)...(19): siRNA sense strand
agagagagggcaucaaagu

SEQ ID NO: 2146203 - RNA, 19 nt, Homo sapiens
  misc_RNA (1)...(19): siRNA sense strand
uaaugugugucugcuugaa

SEQ ID NO: 2146204 - RNA, 19 nt, Homo sapiens
  misc_RNA (1)...(19): siRNA sense strand
gaagugauguuuaugacaa

SEQ ID NO: 2146205 - RNA, 19 nt, Homo sapiens
  misc_RNA (1)...(19): siRNA sense strand
ggaaauaucuugggaugga

SEQ ID NO: 2146206 - RNA, 19 nt, Homo sapiens
  misc_RNA (1)...(19): siRNA sense strand
caacuacaauggacauaaa

SEQ ID NO: 2146207 - RNA, 19 nt, Homo sapiens
  misc_RNA (1)...(19): siRNA sense strand
acauaaacgugaugacuua

SEQ ID NO: 2146208 - RNA, 19 nt, Homo sapiens
  misc_RNA (1)...(19): siRNA sense strand
acaaggaagugacauguaa

SEQ ID NO: 2146209 - RNA, 19 nt, Homo sapiens
  misc_RNA (1)...(19): siRNA sense strand
uauaacagcuccuucaaau

SEQ ID NO: 2146210 - RNA, 19 nt, Homo sapiens
  misc_RNA (1)...(19): siRNA sense strand
agacaacccuugcauaaug

SEQ ID NO: 2146211 - RNA, 19 nt, Homo sapiens
  misc_RNA (1)...(19): siRNA sense strand
caacagaccucagagaaag

SEQ ID NO: 2146212 - RNA, 19 nt, Homo sapiens
  misc_RNA (1)...(19): siRNA sense strand
ccucauuucuguacgauaa

SEQ ID NO: 2146213 - RNA, 19 nt, Homo sapiens
  misc_RNA (1)...(19): siRNA sense strand
ggaagcaaauguaccaagu

SEQ ID NO: 2146214 - RNA, 19 nt, Homo sapiens
  misc_RNA (1)...(19): siRNA sense strand
caucugugcuugugugaaa

SEQ ID NO: 2146215 - RNA, 19 nt, Homo sapiens
  misc_RNA (1)...(19): siRNA sense strand
gcaaauguaccaaguguuc

SEQ ID NO: 2146216 - RNA, 19 nt, Homo sapiens
  misc_RNA (1)...(19): siRNA sense strand
gagaugugguccucuauca

SEQ ID NO: 2146217 - RNA, 19 nt, Homo sapiens
  misc_RNA (1)...(19): siRNA sense strand
cagaagacaucaaaguaug

SEQ ID NO: 2146218 - RNA, 19 nt, Homo sapiens
  misc_RNA (1)...(19): siRNA sense strand
gcucaaauccugggaguuu

SEQ ID NO: 2146219 - RNA, 19 nt, Homo sapiens
  misc_RNA (1)...(19): siRNA sense strand
gcaacagaccucagagaaa

SEQ ID NO: 2146220 - RNA, 19 nt, Homo sapiens
  misc_RNA (1)...(19): siRNA sense strand
ggucggacauuuaacuuuc

SEQ ID NO: 2146221 - RNA, 19 nt, Homo sapiens
  misc_RNA (1)...(19): siRNA sense strand
ggaagugacauguaagaga

SEQ ID NO: 2146222 - RNA, 19 nt, Homo sapiens
  misc_RNA (1)...(19): siRNA sense strand
ggcaagcucuguggucuuu

SEQ ID NO: 2146223 - RNA, 19 nt, Homo sapiens
  misc_RNA (1)...(19): siRNA sense strand
uaacagcuccuucaaaugg

SEQ ID NO: 2146224 - RNA, 19 nt, Homo sapiens
  misc_RNA (1)...(19): siRNA sense strand
ggacggagugucgcaauaa

SEQ ID NO: 2146225 - RNA, 19 nt, Homo sapiens
  misc_RNA (1)...(19): siRNA sense strand
ugacagacaugugugaaug

SEQ ID NO: 2146226 - RNA, 19 nt, Homo sapiens
  misc_RNA (1)...(19): siRNA sense strand
ugugacaacuggaaugaaa

SEQ ID NO: 2146227 - RNA, 19 nt, Homo sapiens
  misc_RNA (1)...(19): siRNA sense strand
gaaauugguccaugcaaca

SEQ ID NO: 2146228 - RNA, 19 nt, Homo sapiens
  misc_RNA (1)...(19): siRNA sense strand
gaacaaggaagugacaugu

SEQ ID NO: 2146229 - RNA, 19 nt, Homo sapiens
  misc_RNA (1)...(19): siRNA sense strand
agagaagucugucccauuc

SEQ ID NO: 2146230 - RNA, 19 nt, Homo sapiens
  misc_RNA (1)...(19): siRNA sense strand
gcuguguuguucauuguaa

SEQ ID NO: 2146231 - RNA, 19 nt, Homo sapiens
  misc_RNA (1)...(19): siRNA sense strand
caacuggaaugaaauuggu

SEQ ID NO: 2146232 - RNA, 19 nt, Homo sapiens
  misc_RNA (1)...(19): siRNA sense strand
gaaagugaccaccaaagca

SEQ ID NO: 2146233 - RNA, 19 nt, Homo sapiens
  misc_RNA (1)...(19): siRNA sense strand
acagacaacccuugcauaa

SEQ ID NO: 2146234 - RNA, 19 nt, Homo sapiens
  misc_RNA (1)...(19): siRNA sense strand
ccagagagagggcaucaaa

SEQ ID NO: 2146235 - RNA, 19 nt, Homo sapiens
  misc_RNA (1)...(19): siRNA sense strand
gagagaagucugucccauu

SEQ ID NO: 2146236 - RNA, 19 nt, Homo sapiens
  misc_RNA (1)...(19): siRNA sense strand
gaaggaaauaccuauaaca

SEQ ID NO: 2146237 - RNA, 19 nt, Homo sapiens
  misc_RNA (1)...(19): siRNA sense strand
gaaggaagcaaauguacca

SEQ ID NO: 2146238 - RNA, 19 nt, Homo sapiens
  misc_RNA (1)...(19): siRNA sense strand
ggaggaauuucagccagaa

SEQ ID NO: 2146239 - RNA, 19 nt, Homo sapiens
  misc_RNA (1)...(19): siRNA sense strand
ccagaaggaagcaaaugua

SEQ ID NO: 2146240 - RNA, 19 nt, Homo sapiens
  misc_RNA (1)...(19): siRNA sense strand
gguccgggauguaucaaga

SEQ ID NO: 2146241 - RNA, 19 nt, Homo sapiens
  misc_RNA (1)...(19): siRNA sense strand
caggagggcuguugugaag

SEQ ID NO: 2146242 - RNA, 19 nt, Homo sapiens
  misc_RNA (1)...(19): siRNA sense strand
gcaacuacaauggacauaa

SEQ ID NO: 2146243 - RNA, 19 nt, Homo sapiens
  misc_RNA (1)...(19): siRNA sense strand
gugaauguccaguccauaa

SEQ ID NO: 2146244 - RNA, 19 nt, Homo sapiens
  misc_RNA (1)...(19): siRNA sense strand
ggacuacgccacuuucuac

SEQ ID NO: 2146245 - RNA, 19 nt, Homo sapiens
  misc_RNA (1)...(19): siRNA sense strand
ccagaagacaucaaaguau

SEQ ID NO: 2146246 - RNA, 19 nt, Homo sapiens
  misc_RNA (1)...(19): siRNA sense strand
caaacuugguccuucacaa

SEQ ID NO: 2146247 - RNA, 19 nt, Homo sapiens
  misc_RNA (1)...(19): siRNA sense strand
ggacagugcugccccaaau

SEQ ID NO: 2146248 - RNA, 19 nt, Homo sapiens
  misc_RNA (1)...(19): siRNA sense strand
cagcaaacuugguccuuca

SEQ ID NO: 2146249 - RNA, 19 nt, Homo sapiens
  misc_RNA (1)...(19): siRNA sense strand
caagggacagucaagguaa

SEQ ID NO: 2146250 - RNA, 19 nt, Homo sapiens
  misc_RNA (1)...(19): siRNA sense strand
gaaagccagugccugaacu

SEQ ID NO: 2146251 - RNA, 19 nt, Homo sapiens
  misc_RNA (1)...(19): siRNA sense strand
caaauuuggcaacaagauu

SEQ ID NO: 2146252 - RNA, 19 nt, Homo sapiens
  misc_RNA (1)...(19): siRNA sense strand
ggagggcuguugugaagag

SEQ ID NO: 2146253 - RNA, 19 nt, Homo sapiens
  misc_RNA (1)...(19): siRNA sense strand
gacaacccuugcauaaugu

SEQ ID NO: 2146254 - RNA, 19 nt, Homo sapiens
  misc_RNA (1)...(19): siRNA sense strand
ugacuuaauugguggagau

SEQ ID NO: 2146255 - RNA, 19 nt, Homo sapiens
  misc_RNA (1)...(19): siRNA sense strand
uacgauaacugcacagcuu

SEQ ID NO: 2146256 - RNA, 19 nt, Homo sapiens
  misc_RNA (1)...(19): siRNA sense strand
aagcaaauguaccaagugu

SEQ ID NO: 2146257 - RNA, 19 nt, Homo sapiens
  misc_RNA (1)...(19): siRNA sense strand
aaacuguuauugcgaguca

SEQ ID NO: 2146258 - RNA, 19 nt, Homo sapiens
  misc_RNA (1)...(19): siRNA sense strand
gacauaaacgugaugacuu

SEQ ID NO: 2146259 - RNA, 19 nt, Homo sapiens
  misc_RNA (1)...(19): siRNA sense strand
gaugugguccucuaucaau

SEQ ID NO: 2146260 - RNA, 19 nt, Homo sapiens
  misc_RNA (1)...(19): siRNA sense strand
ucaagggacagucaaggua

SEQ ID NO: 2146261 - RNA, 19 nt, Homo sapiens
  misc_RNA (1)...(19): siRNA sense strand
gcaaauuuggcaacaagau

SEQ ID NO: 2146262 - RNA, 19 nt, Homo sapiens
  misc_RNA (1)...(19): siRNA sense strand
ggugaaguccuccagauuc

SEQ ID NO: 2146263 - RNA, 19 nt, Homo sapiens
  misc_RNA (1)...(19): siRNA sense strand
caagcucuguggucuuugu

SEQ ID NO: 2146264 - RNA, 19 nt, Homo sapiens
  misc_RNA (1)...(19): siRNA sense strand
ggcuaccucuugaaaguga

SEQ ID NO: 2146265 - RNA, 19 nt, Homo sapiens
  misc_RNA (1)...(19): siRNA sense strand
gcagugcauucccaucagu

SEQ ID NO: 2146266 - RNA, 19 nt, Homo sapiens
  misc_RNA (1)...(19): siRNA sense strand
gcaucaagccaguccuuug

SEQ ID NO: 2146267 - RNA, 19 nt, Homo sapiens
  misc_RNA (1)...(19): siRNA sense strand
ugacaacuggaaugaaauu

SEQ ID NO: 2146268 - RNA, 19 nt, Homo sapiens
  misc_RNA (1)...(19): siRNA sense strand
ggaugacuuugcugaaucu

SEQ ID NO: 2146269 - RNA, 19 nt, Homo sapiens
  misc_RNA (1)...(19): siRNA sense strand
ggauggcuaccucuugaaa

SEQ ID NO: 2146270 - RNA, 19 nt, Homo sapiens
  misc_RNA (1)...(19): siRNA sense strand
ugaaggaaauaccuauaac

SEQ ID NO: 2146271 - RNA, 19 nt, Homo sapiens
  misc_RNA (1)...(19): siRNA sense strand
ggacauaaacgugaugacu

SEQ ID NO: 2146272 - RNA, 19 nt, Homo sapiens
  misc_RNA (1)...(19): siRNA sense strand
gauccucauuucuguacga

SEQ ID NO: 2146273 - RNA, 19 nt, Homo sapiens
  misc_RNA (1)...(19): siRNA sense strand
gugcagccacccaguguaa

SEQ ID NO: 2146274 - RNA, 19 nt, Homo sapiens
  misc_RNA (1)...(19): siRNA sense strand
gaagcaaauguaccaagug

SEQ ID NO: 2146275 - RNA, 19 nt, Homo sapiens
  misc_RNA (1)...(19): siRNA sense strand
guggaugacuuugcugaau

SEQ ID NO: 2146276 - RNA, 19 nt, Homo sapiens
  misc_RNA (1)...(19): siRNA sense strand
cccagaagacaucaaagua

SEQ ID NO: 2146277 - RNA, 19 nt, Homo sapiens
  misc_RNA (1)...(19): siRNA sense strand
gauaacugcacagcuugua

SEQ ID NO: 2146278 - RNA, 19 nt, Homo sapiens
  misc_RNA (1)...(19): siRNA sense strand
gcgcuguguuguucauugu

SEQ ID NO: 2146279 - RNA, 19 nt, Homo sapiens
  misc_RNA (1)...(19): siRNA sense strand
aaagcagguuuggaaauau

SEQ ID NO: 2146280 - RNA, 19 nt, Homo sapiens
  misc_RNA (1)...(19): siRNA sense strand
ccagcaccuuagucacaua

SEQ ID NO: 2146281 - RNA, 19 nt, Homo sapiens
  misc_RNA (1)...(19): siRNA sense strand
gggcaaaauucucaacaga

SEQ ID NO: 2146282 - RNA, 19 nt, Homo sapiens
  misc_RNA (1)...(19): siRNA sense strand
gguccucuaucaauuguac

SEQ ID NO: 2146283 - RNA, 19 nt, Homo sapiens
  misc_RNA (1)...(19): siRNA sense strand
cagggacucuacugugguu

SEQ ID NO: 2146284 - RNA, 19 nt, Homo sapiens
  misc_RNA (1)...(19): siRNA sense strand
uguccuauuugcacugaaa

SEQ ID NO: 2146285 - RNA, 19 nt, Homo sapiens
  misc_RNA (1)...(19): siRNA sense strand
ccaaugaguucugcaacag

SEQ ID NO: 2146286 - RNA, 19 nt, Homo sapiens
  misc_RNA (1)...(19): siRNA sense strand
caauggacauaaacgugau

SEQ ID NO: 2146287 - RNA, 19 nt, Homo sapiens
  misc_RNA (1)...(19): siRNA sense strand
cuggauggcuaccucuuga

SEQ ID NO: 2146288 - RNA, 19 nt, Homo sapiens
  misc_RNA (1)...(19): siRNA sense strand
ugugaacagugcaaagguu

SEQ ID NO: 2146289 - RNA, 19 nt, Homo sapiens
  misc_RNA (1)...(19): siRNA sense strand
gcauggugcuguguacgau

SEQ ID NO: 2146290 - RNA, 19 nt, Homo sapiens
  misc_RNA (1)...(19): siRNA sense strand
ggaauuucagccagaagga

SEQ ID NO: 2146291 - RNA, 19 nt, Homo sapiens
  misc_RNA (1)...(19): siRNA sense strand
caucaagccaguccuuugu

SEQ ID NO: 2146292 - RNA, 19 nt, Homo sapiens
  misc_RNA (1)...(19): siRNA sense strand
gggagccucagcagaauug

SEQ ID NO: 2146293 - RNA, 19 nt, Homo sapiens
  misc_RNA (1)...(19): siRNA sense strand
gcaauaagcagugcauucc

SEQ ID NO: 2146294 - RNA, 19 nt, Homo sapiens
  misc_RNA (1)...(19): siRNA sense strand
agacaucaaaguaugcaaa

SEQ ID NO: 2146295 - RNA, 19 nt, Homo sapiens
  misc_RNA (1)...(19): siRNA sense strand
gaauuucagccagaaggaa

SEQ ID NO: 2146296 - RNA, 19 nt, Homo sapiens
  misc_RNA (1)...(19): siRNA sense strand
ugaauguccaguccauaaa

SEQ ID NO: 2146297 - RNA, 19 nt, Homo sapiens
  misc_RNA (1)...(19): siRNA sense strand
ugguggagauggaaacuuc

SEQ ID NO: 2146298 - RNA, 19 nt, Homo sapiens
  misc_RNA (1)...(19): siRNA sense strand
uuugggagcugccucuuuc

SEQ ID NO: 2146299 - RNA, 19 nt, Homo sapiens
  misc_RNA (1)...(19): siRNA sense strand
uaucaauuguaccaucugu

SEQ ID NO: 2146300 - RNA, 19 nt, Homo sapiens
  misc_RNA (1)...(19): siRNA sense strand
ccacuguccagcaaacuug

SEQ ID NO: 2146301 - RNA, 19 nt, Homo sapiens
  misc_RNA (1)...(19): siRNA sense strand
gagagagggcaucaaaguc

SEQ ID NO: 2146302 - RNA, 19 nt, Homo sapiens
  misc_RNA (1)...(19): siRNA sense strand
agagagagggcaucaaagu

SEQ ID NO: 2146303 - RNA, 19 nt, Homo sapiens
  misc_RNA (1)...(19): siRNA sense strand
uaaugugugucugcuugaa

SEQ ID NO: 2146304 - RNA, 19 nt, Homo sapiens
  misc_RNA (1)...(19): siRNA sense strand
gaagagucaugguguguaa

SEQ ID NO: 2146305 - RNA, 19 nt, Homo sapiens
  misc_RNA (1)...(19): siRNA sense strand
gaaagcagccgaagaagug

SEQ ID NO: 2146306 - RNA, 19 nt, Homo sapiens
  misc_RNA (1)...(19): siRNA sense strand
ccacugagauacacaaaga

SEQ ID NO: 2146307 - RNA, 19 nt, Homo sapiens
  misc_RNA (1)...(19): siRNA sense strand
gcaguuugcucaguuugua

SEQ ID NO: 2146308 - RNA, 19 nt, Homo sapiens
  misc_RNA (1)...(19): siRNA sense strand
gaguauggaugauuaugaa

SEQ ID NO: 2146309 - RNA, 19 nt, Homo sapiens
  misc_RNA (1)...(19): siRNA sense strand
ugaaagcugugaaggauug

SEQ ID NO: 2146310 - RNA, 19 nt, Homo sapiens
  misc_RNA (1)...(19): siRNA sense strand
gcaacuuacuaacaucaaa

SEQ ID NO: 2146311 - RNA, 19 nt, Homo sapiens
  misc_RNA (1)...(19): siRNA sense strand
gaguuugacuuuauggaaa

SEQ ID NO: 2146312 - RNA, 19 nt, Homo sapiens
  misc_RNA (1)...(19): siRNA sense strand
auaauggacuugauuggua

SEQ ID NO: 2146313 - RNA, 19 nt, Homo sapiens
  misc_RNA (1)...(19): siRNA sense strand
gcacuucggcccauuguga

SEQ ID NO: 2146314 - RNA, 19 nt, Homo sapiens
  misc_RNA (1)...(19): siRNA sense strand
ccaagaagaacuuauagaa

SEQ ID NO: 2146315 - RNA, 19 nt, Homo sapiens
  misc_RNA (1)...(19): siRNA sense strand
cgugaaagcuucucauauc

SEQ ID NO: 2146316 - RNA, 19 nt, Homo sapiens
  misc_RNA (1)...(19): siRNA sense strand
uuacucagauugcaucauu

SEQ ID NO: 2146317 - RNA, 19 nt, Homo sapiens
  misc_RNA (1)...(19): siRNA sense strand
cagauugcaucauuauuug

SEQ ID NO: 2146318 - RNA, 19 nt, Homo sapiens
  misc_RNA (1)...(19): siRNA sense strand
ggaaaacucccuuauguaa

SEQ ID NO: 2146319 - RNA, 19 nt, Homo sapiens
  misc_RNA (1)...(19): siRNA sense strand
gcaguaugccugaaauuug

SEQ ID NO: 2146320 - RNA, 19 nt, Homo sapiens
  misc_RNA (1)...(19): siRNA sense strand
cagcggaguuugacuuuau

SEQ ID NO: 2146321 - RNA, 19 nt, Homo sapiens
  misc_RNA (1)...(19): siRNA sense strand
gaccagggacuauauuauu

SEQ ID NO: 2146322 - RNA, 19 nt, Homo sapiens
  misc_RNA (1)...(19): siRNA sense strand
gaacuuauagaauggauca

SEQ ID NO: 2146323 - RNA, 19 nt, Homo sapiens
  misc_RNA (1)...(19): siRNA sense strand
caaacccaguggaauauug

SEQ ID NO: 2146324 - RNA, 19 nt, Homo sapiens
  misc_RNA (1)...(19): siRNA sense strand
gggacuauauuauuccuau

SEQ ID NO: 2146325 - RNA, 19 nt, Homo sapiens
  misc_RNA (1)...(19): siRNA sense strand
ggagcuggcugccuguaga

SEQ ID NO: 2146326 - RNA, 19 nt, Homo sapiens
  misc_RNA (1)...(19): siRNA sense strand
aauggaguauggaugauua

SEQ ID NO: 2146327 - RNA, 19 nt, Homo sapiens
  misc_RNA (1)...(19): siRNA sense strand
gaaagcuucucauauccau

SEQ ID NO: 2146328 - RNA, 19 nt, Homo sapiens
  misc_RNA (1)...(19): siRNA sense strand
gggagauccugcuugcuuu

SEQ ID NO: 2146329 - RNA, 19 nt, Homo sapiens
  misc_RNA (1)...(19): siRNA sense strand
gaagugaagcgagaacuga

SEQ ID NO: 2146330 - RNA, 19 nt, Homo sapiens
  misc_RNA (1)...(19): siRNA sense strand
gcagcaaugucaauacaag

SEQ ID NO: 2146331 - RNA, 19 nt, Homo sapiens
  misc_RNA (1)...(19): siRNA sense strand
gcagcggaguuugacuuua

SEQ ID NO: 2146332 - RNA, 19 nt, Homo sapiens
  misc_RNA (1)...(19): siRNA sense strand
cuucagauguugcuaguga

SEQ ID NO: 2146333 - RNA, 19 nt, Homo sapiens
  misc_RNA (1)...(19): siRNA sense strand
ggaacugucauacuuaaau

SEQ ID NO: 2146334 - RNA, 19 nt, Homo sapiens
  misc_RNA (1)...(19): siRNA sense strand
gcauauacagcccuuggua

SEQ ID NO: 2146335 - RNA, 19 nt, Homo sapiens
  misc_RNA (1)...(19): siRNA sense strand
aaacaacagacacauguaa

SEQ ID NO: 2146336 - RNA, 19 nt, Homo sapiens
  misc_RNA (1)...(19): siRNA sense strand
gagauacacaaagacauua

SEQ ID NO: 2146337 - RNA, 19 nt, Homo sapiens
  misc_RNA (1)...(19): siRNA sense strand
ucacugaucugcucaagac

SEQ ID NO: 2146338 - RNA, 19 nt, Homo sapiens
  misc_RNA (1)...(19): siRNA sense strand
ggaguauggaugauuauga

SEQ ID NO: 2146339 - RNA, 19 nt, Homo sapiens
  misc_RNA (1)...(19): siRNA sense strand
uuacaaaguccuagaaguu

SEQ ID NO: 2146340 - RNA, 19 nt, Homo sapiens
  misc_RNA (1)...(19): siRNA sense strand
uauguaaccucuuggugaa

SEQ ID NO: 2146341 - RNA, 19 nt, Homo sapiens
  misc_RNA (1)...(19): siRNA sense strand
caacagacacauguaagaa

SEQ ID NO: 2146342 - RNA, 19 nt, Homo sapiens
  misc_RNA (1)...(19): siRNA sense strand
cauauuggcaacuuacuaa

SEQ ID NO: 2146343 - RNA, 19 nt, Homo sapiens
  misc_RNA (1)...(19): siRNA sense strand
uauauuagcagcaauguca

SEQ ID NO: 2146344 - RNA, 19 nt, Homo sapiens
  misc_RNA (1)...(19): siRNA sense strand
guaccggauuuauaccaaa

SEQ ID NO: 2146345 - RNA, 19 nt, Homo sapiens
  misc_RNA (1)...(19): siRNA sense strand
gaacuccccuccccacuug

SEQ ID NO: 2146346 - RNA, 19 nt, Homo sapiens
  misc_RNA (1)...(19): siRNA sense strand
gaucauggagagcugguuu

SEQ ID NO: 2146347 - RNA, 19 nt, Homo sapiens
  misc_RNA (1)...(19): siRNA sense strand
ggaguuugacuuuauggaa

SEQ ID NO: 2146348 - RNA, 19 nt, Homo sapiens
  misc_RNA (1)...(19): siRNA sense strand
ugauuucucuugcacuuug

SEQ ID NO: 2146349 - RNA, 19 nt, Homo sapiens
  misc_RNA (1)...(19): siRNA sense strand
ucauauccauuucuuguuc

SEQ ID NO: 2146350 - RNA, 19 nt, Homo sapiens
  misc_RNA (1)...(19): siRNA sense strand
aauacaagguucagcaaau

SEQ ID NO: 2146351 - RNA, 19 nt, Homo sapiens
  misc_RNA (1)...(19): siRNA sense strand
ggaaagcagccgaagaagu

SEQ ID NO: 2146352 - RNA, 19 nt, Homo sapiens
  misc_RNA (1)...(19): siRNA sense strand
guuaagcucucugcacuuc

SEQ ID NO: 2146353 - RNA, 19 nt, Homo sapiens
  misc_RNA (1)...(19): siRNA sense strand
uaauggacuugauugguau

SEQ ID NO: 2146354 - RNA, 19 nt, Homo sapiens
  misc_RNA (1)...(19): siRNA sense strand
gcuagugacucauauucuc

SEQ ID NO: 2146355 - RNA, 19 nt, Homo sapiens
  misc_RNA (1)...(19): siRNA sense strand
aagauauguuggacgguua

SEQ ID NO: 2146356 - RNA, 19 nt, Homo sapiens
  misc_RNA (1)...(19): siRNA sense strand
ugagauacacaaagacauu

SEQ ID NO: 2146357 - RNA, 19 nt, Homo sapiens
  misc_RNA (1)...(19): siRNA sense strand
cggaagaucauuuauauac

SEQ ID NO: 2146358 - RNA, 19 nt, Homo sapiens
  misc_RNA (1)...(19): siRNA sense strand
cugcaaacccaguggaaua

SEQ ID NO: 2146359 - RNA, 19 nt, Homo sapiens
  misc_RNA (1)...(19): siRNA sense strand
uagcagcaaugucaauaca

SEQ ID NO: 2146360 - RNA, 19 nt, Homo sapiens
  misc_RNA (1)...(19): siRNA sense strand
caugauuucucuugcacuu

SEQ ID NO: 2146361 - RNA, 19 nt, Homo sapiens
  misc_RNA (1)...(19): siRNA sense strand
gcucaguuuguacuucuua

SEQ ID NO: 2146362 - RNA, 19 nt, Homo sapiens
  misc_RNA (1)...(19): siRNA sense strand
caaaguccuagaaguugua

SEQ ID NO: 2146363 - RNA, 19 nt, Homo sapiens
  misc_RNA (1)...(19): siRNA sense strand
uguagaagauccugccaau

SEQ ID NO: 2146364 - RNA, 19 nt, Homo sapiens
  misc_RNA (1)...(19): siRNA sense strand
guugucggguacauugaua

SEQ ID NO: 2146365 - RNA, 19 nt, Homo sapiens
  misc_RNA (1)...(19): siRNA sense strand
gauggcauuauucuucaua

SEQ ID NO: 2146366 - RNA, 19 nt, Homo sapiens
  misc_RNA (1)...(19): siRNA sense strand
gcauugcaauuguuagcau

SEQ ID NO: 2146367 - RNA, 19 nt, Homo sapiens
  misc_RNA (1)...(19): siRNA sense strand
ggagaguguacccguguaa

SEQ ID NO: 2146368 - RNA, 19 nt, Homo sapiens
  misc_RNA (1)...(19): siRNA sense strand
gaauggaguauggaugauu

SEQ ID NO: 2146369 - RNA, 19 nt, Homo sapiens
  misc_RNA (1)...(19): siRNA sense strand
gccaguugguaccggauuu

SEQ ID NO: 2146370 - RNA, 19 nt, Homo sapiens
  misc_RNA (1)...(19): siRNA sense strand
ucacuucaccacuguauuc

SEQ ID NO: 2146371 - RNA, 19 nt, Homo sapiens
  misc_RNA (1)...(19): siRNA sense strand
caguaugccugaaauuugg

SEQ ID NO: 2146372 - RNA, 19 nt, Homo sapiens
  misc_RNA (1)...(19): siRNA sense strand
agaagaacuuauagaaugg

SEQ ID NO: 2146373 - RNA, 19 nt, Homo sapiens
  misc_RNA (1)...(19): siRNA sense strand
ugucuuagcuaaacaacag

SEQ ID NO: 2146374 - RNA, 19 nt, Homo sapiens
  misc_RNA (1)...(19): siRNA sense strand
cauuauugcuuccaguugu

SEQ ID NO: 2146375 - RNA, 19 nt, Homo sapiens
  misc_RNA (1)...(19): siRNA sense strand
gacaccaccucuccgugaa

SEQ ID NO: 2146376 - RNA, 19 nt, Homo sapiens
  misc_RNA (1)...(19): siRNA sense strand
uuucaagacuauuguggaa

SEQ ID NO: 2146377 - RNA, 19 nt, Homo sapiens
  misc_RNA (1)...(19): siRNA sense strand
uagaagauccugccaaugc

SEQ ID NO: 2146378 - RNA, 19 nt, Homo sapiens
  misc_RNA (1)...(19): siRNA sense strand
gugaagcgagaacugauaa

SEQ ID NO: 2146379 - RNA, 19 nt, Homo sapiens
  misc_RNA (1)...(19): siRNA sense strand
ugaagacgcaggcuugaga

SEQ ID NO: 2146380 - RNA, 19 nt, Homo sapiens
  misc_RNA (1)...(19): siRNA sense strand
cauugcaauuguuagcaua

SEQ ID NO: 2146381 - RNA, 19 nt, Homo sapiens
  misc_RNA (1)...(19): siRNA sense strand
uaaacaacagacacaugua

SEQ ID NO: 2146382 - RNA, 19 nt, Homo sapiens
  misc_RNA (1)...(19): siRNA sense strand
cuaaacaacagacacaugu

SEQ ID NO: 2146383 - RNA, 19 nt, Homo sapiens
  misc_RNA (1)...(19): siRNA sense strand
aagcuucucauauccauuu

SEQ ID NO: 2146384 - RNA, 19 nt, Homo sapiens
  misc_RNA (1)...(19): siRNA sense strand
ugaaugauaaacugacuga

SEQ ID NO: 2146385 - RNA, 19 nt, Homo sapiens
  misc_RNA (1)...(19): siRNA sense strand
gaucugcucaagacagcua

SEQ ID NO: 2146386 - RNA, 19 nt, Homo sapiens
  misc_RNA (1)...(19): siRNA sense strand
gcuuccaguuguucuugua

SEQ ID NO: 2146387 - RNA, 19 nt, Homo sapiens
  misc_RNA (1)...(19): siRNA sense strand
uuugggaacucaauguuau

SEQ ID NO: 2146388 - RNA, 19 nt, Homo sapiens
  misc_RNA (1)...(19): siRNA sense strand
ucggguacauugauauaug

SEQ ID NO: 2146389 - RNA, 19 nt, Homo sapiens
  misc_RNA (1)...(19): siRNA sense strand
uguggaagcacccucauuu

SEQ ID NO: 2146390 - RNA, 19 nt, Homo sapiens
  misc_RNA (1)...(19): siRNA sense strand
gguauucaaaccaagauau

SEQ ID NO: 2146391 - RNA, 19 nt, Homo sapiens
  misc_RNA (1)...(19): siRNA sense strand
gaagcgagaacugauaaag

SEQ ID NO: 2146392 - RNA, 19 nt, Homo sapiens
  misc_RNA (1)...(19): siRNA sense strand
gcaaugucaauacaagguu

SEQ ID NO: 2146393 - RNA, 19 nt, Homo sapiens
  misc_RNA (1)...(19): siRNA sense strand
uaggaggccugguuacagu

SEQ ID NO: 2146394 - RNA, 19 nt, Homo sapiens
  misc_RNA (1)...(19): siRNA sense strand
uagaccagggacuauauua

SEQ ID NO: 2146395 - RNA, 19 nt, Homo sapiens
  misc_RNA (1)...(19): siRNA sense strand
guacuucuuacucagauug

SEQ ID NO: 2146396 - RNA, 19 nt, Homo sapiens
  misc_RNA (1)...(19): siRNA sense strand
ggugaaggauuccaaaccu

SEQ ID NO: 2146397 - RNA, 19 nt, Homo sapiens
  misc_RNA (1)...(19): siRNA sense strand
gucaugguguguaagaaga

SEQ ID NO: 2146398 - RNA, 19 nt, Homo sapiens
  misc_RNA (1)...(19): siRNA sense strand
gcaaacccaguggaauauu

SEQ ID NO: 2146399 - RNA, 19 nt, Homo sapiens
  misc_RNA (1)...(19): siRNA sense strand
aaaagagacuccacugaga

SEQ ID NO: 2146400 - RNA, 19 nt, Homo sapiens
  misc_RNA (1)...(19): siRNA sense strand
uuggaacugucauacuuaa

SEQ ID NO: 2146401 - RNA, 19 nt, Homo sapiens
  misc_RNA (1)...(19): siRNA sense strand
guuugggaacucaauguua

SEQ ID NO: 2146402 - RNA, 19 nt, Homo sapiens
  misc_RNA (1)...(19): siRNA sense strand
gcuaaacaacagacacaug

SEQ ID NO: 2146403 - RNA, 19 nt, Homo sapiens
  misc_RNA (1)...(19): siRNA sense strand
aagagacuccacugagaua

SEQ ID NO: 2146404 - RNA, 19 nt, Homo sapiens
  misc_RNA (1)...(19): siRNA sense strand
gaagagucaugguguguaa

SEQ ID NO: 2146405 - RNA, 19 nt, Homo sapiens
  misc_RNA (1)...(19): siRNA sense strand
gaaagcagccgaagaagug

SEQ ID NO: 2146406 - RNA, 19 nt, Homo sapiens
  misc_RNA (1)...(19): siRNA sense strand
ccacugagauacacaaaga

SEQ ID NO: 2146407 - RNA, 19 nt, Homo sapiens
  misc_RNA (1)...(19): siRNA sense strand
gcaguuugcucaguuugua

SEQ ID NO: 2146408 - RNA, 19 nt, Homo sapiens
  misc_RNA (1)...(19): siRNA sense strand
gaguauggaugauuaugaa

SEQ ID NO: 2146409 - RNA, 19 nt, Homo sapiens
  misc_RNA (1)...(19): siRNA sense strand
ugaaagcugugaaggauug

SEQ ID NO: 2146410 - RNA, 19 nt, Homo sapiens
  misc_RNA (1)...(19): siRNA sense strand
gcaacuuacuaacaucaaa

SEQ ID NO: 2146411 - RNA, 19 nt, Homo sapiens
  misc_RNA (1)...(19): siRNA sense strand
gaguuugacuuuauggaaa

SEQ ID NO: 2146412 - RNA, 19 nt, Homo sapiens
  misc_RNA (1)...(19): siRNA sense strand
auaauggacuugauuggua

SEQ ID NO: 2146413 - RNA, 19 nt, Homo sapiens
  misc_RNA (1)...(19): siRNA sense strand
gcacuucggcccauuguga

SEQ ID NO: 2146414 - RNA, 19 nt, Homo sapiens
  misc_RNA (1)...(19): siRNA sense strand
ccaagaagaacuuauagaa

SEQ ID NO: 2146415 - RNA, 19 nt, Homo sapiens
  misc_RNA (1)...(19): siRNA sense strand
cgugaaagcuucucauauc

SEQ ID NO: 2146416 - RNA, 19 nt, Homo sapiens
  misc_RNA (1)...(19): siRNA sense strand
uuacucagauugcaucauu

SEQ ID NO: 2146417 - RNA, 19 nt, Homo sapiens
  misc_RNA (1)...(19): siRNA sense strand
cagauugcaucauuauuug

SEQ ID NO: 2146418 - RNA, 19 nt, Homo sapiens
  misc_RNA (1)...(19): siRNA sense strand
ggaaaacucccuuauguaa

SEQ ID NO: 2146419 - RNA, 19 nt, Homo sapiens
  misc_RNA (1)...(19): siRNA sense strand
gcaguaugccugaaauuug

SEQ ID NO: 2146420 - RNA, 19 nt, Homo sapiens
  misc_RNA (1)...(19): siRNA sense strand
cagcggaguuugacuuuau

SEQ ID NO: 2146421 - RNA, 19 nt, Homo sapiens
  misc_RNA (1)...(19): siRNA sense strand
gaccagggacuauauuauu

SEQ ID NO: 2146422 - RNA, 19 nt, Homo sapiens
  misc_RNA (1)...(19): siRNA sense strand
gaacuuauagaauggauca

SEQ ID NO: 2146423 - RNA, 19 nt, Homo sapiens
  misc_RNA (1)...(19): siRNA sense strand
caaacccaguggaauauug

SEQ ID NO: 2146424 - RNA, 19 nt, Homo sapiens
  misc_RNA (1)...(19): siRNA sense strand
gggacuauauuauuccuau

SEQ ID NO: 2146425 - RNA, 19 nt, Homo sapiens
  misc_RNA (1)...(19): siRNA sense strand
ggagcuggcugccuguaga

SEQ ID NO: 2146426 - RNA, 19 nt, Homo sapiens
  misc_RNA (1)...(19): siRNA sense strand
aauggaguauggaugauua

SEQ ID NO: 2146427 - RNA, 19 nt, Homo sapiens
  misc_RNA (1)...(19): siRNA sense strand
gaaagcuucucauauccau

SEQ ID NO: 2146428 - RNA, 19 nt, Homo sapiens
  misc_RNA (1)...(19): siRNA sense strand
gggagauccugcuugcuuu

SEQ ID NO: 2146429 - RNA, 19 nt, Homo sapiens
  misc_RNA (1)...(19): siRNA sense strand
gaagugaagcgagaacuga

SEQ ID NO: 2146430 - RNA, 19 nt, Homo sapiens
  misc_RNA (1)...(19): siRNA sense strand
gcagcaaugucaauacaag

SEQ ID NO: 2146431 - RNA, 19 nt, Homo sapiens
  misc_RNA (1)...(19): siRNA sense strand
gcagcggaguuugacuuua

SEQ ID NO: 2146432 - RNA, 19 nt, Homo sapiens
  misc_RNA (1)...(19): siRNA sense strand
cuucagauguugcuaguga

SEQ ID NO: 2146433 - RNA, 19 nt, Homo sapiens
  misc_RNA (1)...(19): siRNA sense strand
ggaacugucauacuuaaau

SEQ ID NO: 2146434 - RNA, 19 nt, Homo sapiens
  misc_RNA (1)...(19): siRNA sense strand
gcauauacagcccuuggua

SEQ ID NO: 2146435 - RNA, 19 nt, Homo sapiens
  misc_RNA (1)...(19): siRNA sense strand
aaacaacagacacauguaa

SEQ ID NO: 2146436 - RNA, 19 nt, Homo sapiens
  misc_RNA (1)...(19): siRNA sense strand
gagauacacaaagacauua

SEQ ID NO: 2146437 - RNA, 19 nt, Homo sapiens
  misc_RNA (1)...(19): siRNA sense strand
ucacugaucugcucaagac

SEQ ID NO: 2146438 - RNA, 19 nt, Homo sapiens
  misc_RNA (1)...(19): siRNA sense strand
ggaguauggaugauuauga

SEQ ID NO: 2146439 - RNA, 19 nt, Homo sapiens
  misc_RNA (1)...(19): siRNA sense strand
uuacaaaguccuagaaguu

SEQ ID NO: 2146440 - RNA, 19 nt, Homo sapiens
  misc_RNA (1)...(19): siRNA sense strand
uauguaaccucuuggugaa

SEQ ID NO: 2146441 - RNA, 19 nt, Homo sapiens
  misc_RNA (1)...(19): siRNA sense strand
caacagacacauguaagaa

SEQ ID NO: 2146442 - RNA, 19 nt, Homo sapiens
  misc_RNA (1)...(19): siRNA sense strand
cauauuggcaacuuacuaa

SEQ ID NO: 2146443 - RNA, 19 nt, Homo sapiens
  misc_RNA (1)...(19): siRNA sense strand
uauauuagcagcaauguca

SEQ ID NO: 2146444 - RNA, 19 nt, Homo sapiens
  misc_RNA (1)...(19): siRNA sense strand
guaccggauuuauaccaaa

SEQ ID NO: 2146445 - RNA, 19 nt, Homo sapiens
  misc_RNA (1)...(19): siRNA sense strand
gaacuccccuccccacuug

SEQ ID NO: 2146446 - RNA, 19 nt, Homo sapiens
  misc_RNA (1)...(19): siRNA sense strand
gaucauggagagcugguuu

SEQ ID NO: 2146447 - RNA, 19 nt, Homo sapiens
  misc_RNA (1)...(19): siRNA sense strand
ggaguuugacuuuauggaa

SEQ ID NO: 2146448 - RNA, 19 nt, Homo sapiens
  misc_RNA (1)...(19): siRNA sense strand
ugauuucucuugcacuuug

SEQ ID NO: 2146449 - RNA, 19 nt, Homo sapiens
  misc_RNA (1)...(19): siRNA sense strand
ucauauccauuucuuguuc

SEQ ID NO: 2146450 - RNA, 19 nt, Homo sapiens
  misc_RNA (1)...(19): siRNA sense strand
aauacaagguucagcaaau

SEQ ID NO: 2146451 - RNA, 19 nt, Homo sapiens
  misc_RNA (1)...(19): siRNA sense strand
ggaaagcagccgaagaagu

SEQ ID NO: 2146452 - RNA, 19 nt, Homo sapiens
  misc_RNA (1)...(19): siRNA sense strand
guuaagcucucugcacuuc

SEQ ID NO: 2146453 - RNA, 19 nt, Homo sapiens
  misc_RNA (1)...(19): siRNA sense strand
uaauggacuugauugguau

SEQ ID NO: 2146454 - RNA, 19 nt, Homo sapiens
  misc_RNA (1)...(19): siRNA sense strand
gcuagugacucauauucuc

SEQ ID NO: 2146455 - RNA, 19 nt, Homo sapiens
  misc_RNA (1)...(19): siRNA sense strand
aagauauguuggacgguua

SEQ ID NO: 2146456 - RNA, 19 nt, Homo sapiens
  misc_RNA (1)...(19): siRNA sense strand
ugagauacacaaagacauu

SEQ ID NO: 2146457 - RNA, 19 nt, Homo sapiens
  misc_RNA (1)...(19): siRNA sense strand
cggaagaucauuuauauac

SEQ ID NO: 2146458 - RNA, 19 nt, Homo sapiens
  misc_RNA (1)...(19): siRNA sense strand
cugcaaacccaguggaaua

SEQ ID NO: 2146459 - RNA, 19 nt, Homo sapiens
  misc_RNA (1)...(19): siRNA sense strand
uagcagcaaugucaauaca

SEQ ID NO: 2146460 - RNA, 19 nt, Homo sapiens
  misc_RNA (1)...(19): siRNA sense strand
caugauuucucuugcacuu

SEQ ID NO: 2146461 - RNA, 19 nt, Homo sapiens
  misc_RNA (1)...(19): siRNA sense strand
gcucaguuuguacuucuua

SEQ ID NO: 2146462 - RNA, 19 nt, Homo sapiens
  misc_RNA (1)...(19): siRNA sense strand
caaaguccuagaaguugua

SEQ ID NO: 2146463 - RNA, 19 nt, Homo sapiens
  misc_RNA (1)...(19): siRNA sense strand
uguagaagauccugccaau

SEQ ID NO: 2146464 - RNA, 19 nt, Homo sapiens
  misc_RNA (1)...(19): siRNA sense strand
guugucggguacauugaua

SEQ ID NO: 2146465 - RNA, 19 nt, Homo sapiens
  misc_RNA (1)...(19): siRNA sense strand
gauggcauuauucuucaua

SEQ ID NO: 2146466 - RNA, 19 nt, Homo sapiens
  misc_RNA (1)...(19): siRNA sense strand
gcauugcaauuguuagcau

SEQ ID NO: 2146467 - RNA, 19 nt, Homo sapiens
  misc_RNA (1)...(19): siRNA sense strand
ggagaguguacccguguaa

SEQ ID NO: 2146468 - RNA, 19 nt, Homo sapiens
  misc_RNA (1)...(19): siRNA sense strand
gaauggaguauggaugauu

SEQ ID NO: 2146469 - RNA, 19 nt, Homo sapiens
  misc_RNA (1)...(19): siRNA sense strand
gccaguugguaccggauuu

SEQ ID NO: 2146470 - RNA, 19 nt, Homo sapiens
  misc_RNA (1)...(19): siRNA sense strand
ucacuucaccacuguauuc

SEQ ID NO: 2146471 - RNA, 19 nt, Homo sapiens
  misc_RNA (1)...(19): siRNA sense strand
caguaugccugaaauuugg

SEQ ID NO: 2146472 - RNA, 19 nt, Homo sapiens
  misc_RNA (1)...(19): siRNA sense strand
agaagaacuuauagaaugg

SEQ ID NO: 2146473 - RNA, 19 nt, Homo sapiens
  misc_RNA (1)...(19): siRNA sense strand
ugucuuagcuaaacaacag

SEQ ID NO: 2146474 - RNA, 19 nt, Homo sapiens
  misc_RNA (1)...(19): siRNA sense strand
cauuauugcuuccaguugu

SEQ ID NO: 2146475 - RNA, 19 nt, Homo sapiens
  misc_RNA (1)...(19): siRNA sense strand
gacaccaccucuccgugaa

SEQ ID NO: 2146476 - RNA, 19 nt, Homo sapiens
  misc_RNA (1)...(19): siRNA sense strand
uuucaagacuauuguggaa

SEQ ID NO: 2146477 - RNA, 19 nt, Homo sapiens
  misc_RNA (1)...(19): siRNA sense strand
uagaagauccugccaaugc

SEQ ID NO: 2146478 - RNA, 19 nt, Homo sapiens
  misc_RNA (1)...(19): siRNA sense strand
gugaagcgagaacugauaa

SEQ ID NO: 2146479 - RNA, 19 nt, Homo sapiens
  misc_RNA (1)...(19): siRNA sense strand
ugaagacgcaggcuugaga

SEQ ID NO: 2146480 - RNA, 19 nt, Homo sapiens
  misc_RNA (1)...(19): siRNA sense strand
cauugcaauuguuagcaua

SEQ ID NO: 2146481 - RNA, 19 nt, Homo sapiens
  misc_RNA (1)...(19): siRNA sense strand
uaaacaacagacacaugua

SEQ ID NO: 2146482 - RNA, 19 nt, Homo sapiens
  misc_RNA (1)...(19): siRNA sense strand
cuaaacaacagacacaugu

SEQ ID NO: 2146483 - RNA, 19 nt, Homo sapiens
  misc_RNA (1)...(19): siRNA sense strand
aagcuucucauauccauuu

SEQ ID NO: 2146484 - RNA, 19 nt, Homo sapiens
  misc_RNA (1)...(19): siRNA sense strand
ugaaugauaaacugacuga

SEQ ID NO: 2146485 - RNA, 19 nt, Homo sapiens
  misc_RNA (1)...(19): siRNA sense strand
gaucugcucaagacagcua

SEQ ID NO: 2146486 - RNA, 19 nt, Homo sapiens
  misc_RNA (1)...(19): siRNA sense strand
gcuuccaguuguucuugua

SEQ ID NO: 2146487 - RNA, 19 nt, Homo sapiens
  misc_RNA (1)...(19): siRNA sense strand
uuugggaacucaauguuau

SEQ ID NO: 2146488 - RNA, 19 nt, Homo sapiens
  misc_RNA (1)...(19): siRNA sense strand
ucggguacauugauauaug

SEQ ID NO: 2146489 - RNA, 19 nt, Homo sapiens
  misc_RNA (1)...(19): siRNA sense strand
uguggaagcacccucauuu

SEQ ID NO: 2146490 - RNA, 19 nt, Homo sapiens
  misc_RNA (1)...(19): siRNA sense strand
gguauucaaaccaagauau

SEQ ID NO: 2146491 - RNA, 19 nt, Homo sapiens
  misc_RNA (1)...(19): siRNA sense strand
gaagcgagaacugauaaag

SEQ ID NO: 2146492 - RNA, 19 nt, Homo sapiens
  misc_RNA (1)...(19): siRNA sense strand
gcaaugucaauacaagguu

SEQ ID NO: 2146493 - RNA, 19 nt, Homo sapiens
  misc_RNA (1)...(19): siRNA sense strand
uaggaggccugguuacagu

SEQ ID NO: 2146494 - RNA, 19 nt, Homo sapiens
  misc_RNA (1)...(19): siRNA sense strand
uagaccagggacuauauua

SEQ ID NO: 2146495 - RNA, 19 nt, Homo sapiens
  misc_RNA (1)...(19): siRNA sense strand
guacuucuuacucagauug

SEQ ID NO: 2146496 - RNA, 19 nt, Homo sapiens
  misc_RNA (1)...(19): siRNA sense strand
ggugaaggauuccaaaccu

SEQ ID NO: 2146497 - RNA, 19 nt, Homo sapiens
  misc_RNA (1)...(19): siRNA sense strand
gucaugguguguaagaaga

SEQ ID NO: 2146498 - RNA, 19 nt, Homo sapiens
  misc_RNA (1)...(19): siRNA sense strand
gcaaacccaguggaauauu

SEQ ID NO: 2146499 - RNA, 19 nt, Homo sapiens
  misc_RNA (1)...(19): siRNA sense strand
aaaagagacuccacugaga

SEQ ID NO: 2146500 - RNA, 19 nt, Homo sapiens
  misc_RNA (1)...(19): siRNA sense strand
uuggaacugucauacuuaa

SEQ ID NO: 2146501 - RNA, 19 nt, Homo sapiens
  misc_RNA (1)...(19): siRNA sense strand
guuugggaacucaauguua

SEQ ID NO: 2146502 - RNA, 19 nt, Homo sapiens
  misc_RNA (1)...(19): siRNA sense strand
gcuaaacaacagacacaug

SEQ ID NO: 2146503 - RNA, 19 nt, Homo sapiens
  misc_RNA (1)...(19): siRNA sense strand
aagagacuccacugagaua

SEQ ID NO: 2146504 - RNA, 19 nt, Homo sapiens
  misc_RNA (1)...(19): siRNA sense strand
gaagauucauugaucauug

SEQ ID NO: 2146505 - RNA, 19 nt, Homo sapiens
  misc_RNA (1)...(19): siRNA sense strand
ccacgcaucugaccgauuu

SEQ ID NO: 2146506 - RNA, 19 nt, Homo sapiens
  misc_RNA (1)...(19): siRNA sense strand
gcaaaucuccuaacacuuc

SEQ ID NO: 2146507 - RNA, 19 nt, Homo sapiens
  misc_RNA (1)...(19): siRNA sense strand
gcauaguacugccaccuaa

SEQ ID NO: 2146508 - RNA, 19 nt, Homo sapiens
  misc_RNA (1)...(19): siRNA sense strand
gcagaagauucauugauca

SEQ ID NO: 2146509 - RNA, 19 nt, Homo sapiens
  misc_RNA (1)...(19): siRNA sense strand
guaaagaccagguauacuu

SEQ ID NO: 2146510 - RNA, 19 nt, Homo sapiens
  misc_RNA (1)...(19): siRNA sense strand
gcaucugaccgauuucuua

SEQ ID NO: 2146511 - RNA, 19 nt, Homo sapiens
  misc_RNA (1)...(19): siRNA sense strand
uaacacuucucguagcaaa

SEQ ID NO: 2146512 - RNA, 19 nt, Homo sapiens
  misc_RNA (1)...(19): siRNA sense strand
gcaggaccauggccgauau

SEQ ID NO: 2146513 - RNA, 19 nt, Homo sapiens
  misc_RNA (1)...(19): siRNA sense strand
cagcaaaucuccuaacacu

SEQ ID NO: 2146514 - RNA, 19 nt, Homo sapiens
  misc_RNA (1)...(19): siRNA sense strand
gagaagaucauggaaguga

SEQ ID NO: 2146515 - RNA, 19 nt, Homo sapiens
  misc_RNA (1)...(19): siRNA sense strand
ucgggaagguuucuuauga

SEQ ID NO: 2146516 - RNA, 19 nt, Homo sapiens
  misc_RNA (1)...(19): siRNA sense strand
ggauggaauucuucaaauc

SEQ ID NO: 2146517 - RNA, 19 nt, Homo sapiens
  misc_RNA (1)...(19): siRNA sense strand
gucaaguccuguaaaguuu

SEQ ID NO: 2146518 - RNA, 19 nt, Homo sapiens
  misc_RNA (1)...(19): siRNA sense strand
ggaacugaaagaucuuaua

SEQ ID NO: 2146519 - RNA, 19 nt, Homo sapiens
  misc_RNA (1)...(19): siRNA sense strand
cuacuacacuguuuaucaa

SEQ ID NO: 2146520 - RNA, 19 nt, Homo sapiens
  misc_RNA (1)...(19): siRNA sense strand
gagcuaaagccaaauaauc

SEQ ID NO: 2146521 - RNA, 19 nt, Homo sapiens
  misc_RNA (1)...(19): siRNA sense strand
gauauuggcagguuuguca

SEQ ID NO: 2146522 - RNA, 19 nt, Homo sapiens
  misc_RNA (1)...(19): siRNA sense strand
ggaagugaaugaacugacu

SEQ ID NO: 2146523 - RNA, 19 nt, Homo sapiens
  misc_RNA (1)...(19): siRNA sense strand
aagaugggauuauugugua

SEQ ID NO: 2146524 - RNA, 19 nt, Homo sapiens
  misc_RNA (1)...(19): siRNA sense strand
uagagaagaucauggaagu

SEQ ID NO: 2146525 - RNA, 19 nt, Homo sapiens
  misc_RNA (1)...(19): siRNA sense strand
caaccaggguguuuuagua

SEQ ID NO: 2146526 - RNA, 19 nt, Homo sapiens
  misc_RNA (1)...(19): siRNA sense strand
uaaagauauuggcagguuu

SEQ ID NO: 2146527 - RNA, 19 nt, Homo sapiens
  misc_RNA (1)...(19): siRNA sense strand
gaagauguggaucgcuuaa

SEQ ID NO: 2146528 - RNA, 19 nt, Homo sapiens
  misc_RNA (1)...(19): siRNA sense strand
gaaccaguaguuacaaugu

SEQ ID NO: 2146529 - RNA, 19 nt, Homo sapiens
  misc_RNA (1)...(19): siRNA sense strand
uuaaagauauuggcagguu

SEQ ID NO: 2146530 - RNA, 19 nt, Homo sapiens
  misc_RNA (1)...(19): siRNA sense strand
cagcagccauggaacaguu

SEQ ID NO: 2146531 - RNA, 19 nt, Homo sapiens
  misc_RNA (1)...(19): siRNA sense strand
ucacuggccugagcaagaa

SEQ ID NO: 2146532 - RNA, 19 nt, Homo sapiens
  misc_RNA (1)...(19): siRNA sense strand
aacaugagcuaaagccaaa

SEQ ID NO: 2146533 - RNA, 19 nt, Homo sapiens
  misc_RNA (1)...(19): siRNA sense strand
uacagggaauggcauagua

SEQ ID NO: 2146534 - RNA, 19 nt, Homo sapiens
  misc_RNA (1)...(19): siRNA sense strand
gccgauauauggaacacuu

SEQ ID NO: 2146535 - RNA, 19 nt, Homo sapiens
  misc_RNA (1)...(19): siRNA sense strand
uaccuacaauccucaguuu

SEQ ID NO: 2146536 - RNA, 19 nt, Homo sapiens
  misc_RNA (1)...(19): siRNA sense strand
caagaugggauuauugugu

SEQ ID NO: 2146537 - RNA, 19 nt, Homo sapiens
  misc_RNA (1)...(19): siRNA sense strand
uuaagcagauuguaguuca

SEQ ID NO: 2146538 - RNA, 19 nt, Homo sapiens
  misc_RNA (1)...(19): siRNA sense strand
aagaagcauuucacauuug

SEQ ID NO: 2146539 - RNA, 19 nt, Homo sapiens
  misc_RNA (1)...(19): siRNA sense strand
acagggaacugaaagaucu

SEQ ID NO: 2146540 - RNA, 19 nt, Homo sapiens
  misc_RNA (1)...(19): siRNA sense strand
uagcaagcauucacagugu

SEQ ID NO: 2146541 - RNA, 19 nt, Homo sapiens
  misc_RNA (1)...(19): siRNA sense strand
ccaccaacuuagagaaaga

SEQ ID NO: 2146542 - RNA, 19 nt, Homo sapiens
  misc_RNA (1)...(19): siRNA sense strand
acacaugauaucucuguua

SEQ ID NO: 2146543 - RNA, 19 nt, Homo sapiens
  misc_RNA (1)...(19): siRNA sense strand
gggaagguuucuuaugaag

SEQ ID NO: 2146544 - RNA, 19 nt, Homo sapiens
  misc_RNA (1)...(19): siRNA sense strand
gaagaucauggaagugaau

SEQ ID NO: 2146545 - RNA, 19 nt, Homo sapiens
  misc_RNA (1)...(19): siRNA sense strand
caugaaauagguacacauu

SEQ ID NO: 2146546 - RNA, 19 nt, Homo sapiens
  misc_RNA (1)...(19): siRNA sense strand
uuaaaaggauuggcaguua

SEQ ID NO: 2146547 - RNA, 19 nt, Homo sapiens
  misc_RNA (1)...(19): siRNA sense strand
gaaggacuagcaagcauuc

SEQ ID NO: 2146548 - RNA, 19 nt, Homo sapiens
  misc_RNA (1)...(19): siRNA sense strand
ggaaggacuagcaagcauu

SEQ ID NO: 2146549 - RNA, 19 nt, Homo sapiens
  misc_RNA (1)...(19): siRNA sense strand
uggaagcgcugcucacagu

SEQ ID NO: 2146550 - RNA, 19 nt, Homo sapiens
  misc_RNA (1)...(19): siRNA sense strand
uaaagaccagguauacuug

SEQ ID NO: 2146551 - RNA, 19 nt, Homo sapiens
  misc_RNA (1)...(19): siRNA sense strand
gcugaggcaugaaauaggu

SEQ ID NO: 2146552 - RNA, 19 nt, Homo sapiens
  misc_RNA (1)...(19): siRNA sense strand
caucugaccgauuucuuaa

SEQ ID NO: 2146553 - RNA, 19 nt, Homo sapiens
  misc_RNA (1)...(19): siRNA sense strand
ugucaaguccuguaaaguu

SEQ ID NO: 2146554 - RNA, 19 nt, Homo sapiens
  misc_RNA (1)...(19): siRNA sense strand
uauaaaacccaccaacuua

SEQ ID NO: 2146555 - RNA, 19 nt, Homo sapiens
  misc_RNA (1)...(19): siRNA sense strand
auacuuggauggaauucuu

SEQ ID NO: 2146556 - RNA, 19 nt, Homo sapiens
  misc_RNA (1)...(19): siRNA sense strand
ucaaaucugacuauaccua

SEQ ID NO: 2146557 - RNA, 19 nt, Homo sapiens
  misc_RNA (1)...(19): siRNA sense strand
ccacugcacgugagcauug

SEQ ID NO: 2146558 - RNA, 19 nt, Homo sapiens
  misc_RNA (1)...(19): siRNA sense strand
cgggaagguuucuuaugaa

SEQ ID NO: 2146559 - RNA, 19 nt, Homo sapiens
  misc_RNA (1)...(19): siRNA sense strand
ccuacaauccucaguuuga

SEQ ID NO: 2146560 - RNA, 19 nt, Homo sapiens
  misc_RNA (1)...(19): siRNA sense strand
gauuguaguucaucucacu

SEQ ID NO: 2146561 - RNA, 19 nt, Homo sapiens
  misc_RNA (1)...(19): siRNA sense strand
agaagcauuucacauuugu

SEQ ID NO: 2146562 - RNA, 19 nt, Homo sapiens
  misc_RNA (1)...(19): siRNA sense strand
ugcagaagauucauugauc

SEQ ID NO: 2146563 - RNA, 19 nt, Homo sapiens
  misc_RNA (1)...(19): siRNA sense strand
caaugacaguaguaaaugg

SEQ ID NO: 2146564 - RNA, 19 nt, Homo sapiens
  misc_RNA (1)...(19): siRNA sense strand
auacagagauaccauagac

SEQ ID NO: 2146565 - RNA, 19 nt, Homo sapiens
  misc_RNA (1)...(19): siRNA sense strand
caugagcuaaagccaaaua

SEQ ID NO: 2146566 - RNA, 19 nt, Homo sapiens
  misc_RNA (1)...(19): siRNA sense strand
ggaaccaguaguuacaaug

SEQ ID NO: 2146567 - RNA, 19 nt, Homo sapiens
  misc_RNA (1)...(19): siRNA sense strand
uggauggaauucuucaaau

SEQ ID NO: 2146568 - RNA, 19 nt, Homo sapiens
  misc_RNA (1)...(19): siRNA sense strand
uaucaagccagccaaaugu

SEQ ID NO: 2146569 - RNA, 19 nt, Homo sapiens
  misc_RNA (1)...(19): siRNA sense strand
guccgacucugacuaucaa

SEQ ID NO: 2146570 - RNA, 19 nt, Homo sapiens
  misc_RNA (1)...(19): siRNA sense strand
gauguccgacucugacuau

SEQ ID NO: 2146571 - RNA, 19 nt, Homo sapiens
  misc_RNA (1)...(19): siRNA sense strand
uacaauguccuacuacaga

SEQ ID NO: 2146572 - RNA, 19 nt, Homo sapiens
  misc_RNA (1)...(19): siRNA sense strand
cacaugauaucucuguuac

SEQ ID NO: 2146573 - RNA, 19 nt, Homo sapiens
  misc_RNA (1)...(19): siRNA sense strand
ggaccauggccgauauaug

SEQ ID NO: 2146574 - RNA, 19 nt, Homo sapiens
  misc_RNA (1)...(19): siRNA sense strand
gaagcgcugcucacaguca

SEQ ID NO: 2146575 - RNA, 19 nt, Homo sapiens
  misc_RNA (1)...(19): siRNA sense strand
ccaauacaagaugggauua

SEQ ID NO: 2146576 - RNA, 19 nt, Homo sapiens
  misc_RNA (1)...(19): siRNA sense strand
ggacuagcaagcauucaca

SEQ ID NO: 2146577 - RNA, 19 nt, Homo sapiens
  misc_RNA (1)...(19): siRNA sense strand
gaagucuauucuaaaugca

SEQ ID NO: 2146578 - RNA, 19 nt, Homo sapiens
  misc_RNA (1)...(19): siRNA sense strand
guuacaauguccuacuaca

SEQ ID NO: 2146579 - RNA, 19 nt, Homo sapiens
  misc_RNA (1)...(19): siRNA sense strand
gaacacuuagagaagauca

SEQ ID NO: 2146580 - RNA, 19 nt, Homo sapiens
  misc_RNA (1)...(19): siRNA sense strand
acagagauaccauagacuu

SEQ ID NO: 2146581 - RNA, 19 nt, Homo sapiens
  misc_RNA (1)...(19): siRNA sense strand
ucaaauccuccgauacaga

SEQ ID NO: 2146582 - RNA, 19 nt, Homo sapiens
  misc_RNA (1)...(19): siRNA sense strand
gcaagcauucacaguguuc

SEQ ID NO: 2146583 - RNA, 19 nt, Homo sapiens
  misc_RNA (1)...(19): siRNA sense strand
ucaaugacaguaguaaaug

SEQ ID NO: 2146584 - RNA, 19 nt, Homo sapiens
  misc_RNA (1)...(19): siRNA sense strand
cuacagagcaaggaggaaa

SEQ ID NO: 2146585 - RNA, 19 nt, Homo sapiens
  misc_RNA (1)...(19): siRNA sense strand
gagauaccauagacuucca

SEQ ID NO: 2146586 - RNA, 19 nt, Homo sapiens
  misc_RNA (1)...(19): siRNA sense strand
caaagccucagcugucuag

SEQ ID NO: 2146587 - RNA, 19 nt, Homo sapiens
  misc_RNA (1)...(19): siRNA sense strand
agaagaucauggaagugaa

SEQ ID NO: 2146588 - RNA, 19 nt, Homo sapiens
  misc_RNA (1)...(19): siRNA sense strand
ugaagauguggaucgcuua

SEQ ID NO: 2146589 - RNA, 19 nt, Homo sapiens
  misc_RNA (1)...(19): siRNA sense strand
cuucaaauccuccgauaca

SEQ ID NO: 2146590 - RNA, 19 nt, Homo sapiens
  misc_RNA (1)...(19): siRNA sense strand
uuaguaaagaccagguaua

SEQ ID NO: 2146591 - RNA, 19 nt, Homo sapiens
  misc_RNA (1)...(19): siRNA sense strand
aaagauauuggcagguuug

SEQ ID NO: 2146592 - RNA, 19 nt, Homo sapiens
  misc_RNA (1)...(19): siRNA sense strand
aaacccagcaaaucuccua

SEQ ID NO: 2146593 - RNA, 19 nt, Homo sapiens
  misc_RNA (1)...(19): siRNA sense strand
ugacugcucucgggaaggu

SEQ ID NO: 2146594 - RNA, 19 nt, Homo sapiens
  misc_RNA (1)...(19): siRNA sense strand
cgacucugacuaucaaugu

SEQ ID NO: 2146595 - RNA, 19 nt, Homo sapiens
  misc_RNA (1)...(19): siRNA sense strand
ucacugaggaccugcuuuc

SEQ ID NO: 2146596 - RNA, 19 nt, Homo sapiens
  misc_RNA (1)...(19): siRNA sense strand
ugccaagcguauuagcuaa

SEQ ID NO: 2146597 - RNA, 19 nt, Homo sapiens
  misc_RNA (1)...(19): siRNA sense strand
gccaaagccucagcugucu

SEQ ID NO: 2146598 - RNA, 19 nt, Homo sapiens
  misc_RNA (1)...(19): siRNA sense strand
ggucaaguggugccauuuc

SEQ ID NO: 2146599 - RNA, 19 nt, Homo sapiens
  misc_RNA (1)...(19): siRNA sense strand
caaaucuccuaacacuucu

SEQ ID NO: 2146600 - RNA, 19 nt, Homo sapiens
  misc_RNA (1)...(19): siRNA sense strand
aagaggggauggacugaua

SEQ ID NO: 2146601 - RNA, 19 nt, Homo sapiens
  misc_RNA (1)...(19): siRNA sense strand
gauauauggaacacuuaga

SEQ ID NO: 2146602 - RNA, 19 nt, Homo sapiens
  misc_RNA (1)...(19): siRNA sense strand
gauacagagauaccauaga

SEQ ID NO: 2146603 - RNA, 19 nt, Homo sapiens
  misc_RNA (1)...(19): siRNA sense strand
gguauacuuggauggaauu

SEQ ID NO: 2146604 - RNA, 19 nt, Homo sapiens
  misc_RNA (1)...(19): siRNA sense strand
gaagauucauugaucauug

SEQ ID NO: 2146605 - RNA, 19 nt, Homo sapiens
  misc_RNA (1)...(19): siRNA sense strand
ccacgcaucugaccgauuu

SEQ ID NO: 2146606 - RNA, 19 nt, Homo sapiens
  misc_RNA (1)...(19): siRNA sense strand
gcaaaucuccuaacacuuc

SEQ ID NO: 2146607 - RNA, 19 nt, Homo sapiens
  misc_RNA (1)...(19): siRNA sense strand
gcauaguacugccaccuaa

SEQ ID NO: 2146608 - RNA, 19 nt, Homo sapiens
  misc_RNA (1)...(19): siRNA sense strand
gcagaagauucauugauca

SEQ ID NO: 2146609 - RNA, 19 nt, Homo sapiens
  misc_RNA (1)...(19): siRNA sense strand
guaaagaccagguauacuu

SEQ ID NO: 2146610 - RNA, 19 nt, Homo sapiens
  misc_RNA (1)...(19): siRNA sense strand
gcaucugaccgauuucuua

SEQ ID NO: 2146611 - RNA, 19 nt, Homo sapiens
  misc_RNA (1)...(19): siRNA sense strand
uaacacuucucguagcaaa

SEQ ID NO: 2146612 - RNA, 19 nt, Homo sapiens
  misc_RNA (1)...(19): siRNA sense strand
gcaggaccauggccgauau

SEQ ID NO: 2146613 - RNA, 19 nt, Homo sapiens
  misc_RNA (1)...(19): siRNA sense strand
cagcaaaucuccuaacacu

SEQ ID NO: 2146614 - RNA, 19 nt, Homo sapiens
  misc_RNA (1)...(19): siRNA sense strand
gagaagaucauggaaguga

SEQ ID NO: 2146615 - RNA, 19 nt, Homo sapiens
  misc_RNA (1)...(19): siRNA sense strand
ucgggaagguuucuuauga

SEQ ID NO: 2146616 - RNA, 19 nt, Homo sapiens
  misc_RNA (1)...(19): siRNA sense strand
ggauggaauucuucaaauc

SEQ ID NO: 2146617 - RNA, 19 nt, Homo sapiens
  misc_RNA (1)...(19): siRNA sense strand
gucaaguccuguaaaguuu

SEQ ID NO: 2146618 - RNA, 19 nt, Homo sapiens
  misc_RNA (1)...(19): siRNA sense strand
ggaacugaaagaucuuaua

SEQ ID NO: 2146619 - RNA, 19 nt, Homo sapiens
  misc_RNA (1)...(19): siRNA sense strand
cuacuacacuguuuaucaa

SEQ ID NO: 2146620 - RNA, 19 nt, Homo sapiens
  misc_RNA (1)...(19): siRNA sense strand
gagcuaaagccaaauaauc

SEQ ID NO: 2146621 - RNA, 19 nt, Homo sapiens
  misc_RNA (1)...(19): siRNA sense strand
gauauuggcagguuuguca

SEQ ID NO: 2146622 - RNA, 19 nt, Homo sapiens
  misc_RNA (1)...(19): siRNA sense strand
ggaagugaaugaacugacu

SEQ ID NO: 2146623 - RNA, 19 nt, Homo sapiens
  misc_RNA (1)...(19): siRNA sense strand
aagaugggauuauugugua

SEQ ID NO: 2146624 - RNA, 19 nt, Homo sapiens
  misc_RNA (1)...(19): siRNA sense strand
uagagaagaucauggaagu

SEQ ID NO: 2146625 - RNA, 19 nt, Homo sapiens
  misc_RNA (1)...(19): siRNA sense strand
caaccaggguguuuuagua

SEQ ID NO: 2146626 - RNA, 19 nt, Homo sapiens
  misc_RNA (1)...(19): siRNA sense strand
uaaagauauuggcagguuu

SEQ ID NO: 2146627 - RNA, 19 nt, Homo sapiens
  misc_RNA (1)...(19): siRNA sense strand
gaagauguggaucgcuuaa

SEQ ID NO: 2146628 - RNA, 19 nt, Homo sapiens
  misc_RNA (1)...(19): siRNA sense strand
gaaccaguaguuacaaugu

SEQ ID NO: 2146629 - RNA, 19 nt, Homo sapiens
  misc_RNA (1)...(19): siRNA sense strand
uuaaagauauuggcagguu

SEQ ID NO: 2146630 - RNA, 19 nt, Homo sapiens
  misc_RNA (1)...(19): siRNA sense strand
cagcagccauggaacaguu

SEQ ID NO: 2146631 - RNA, 19 nt, Homo sapiens
  misc_RNA (1)...(19): siRNA sense strand
ucacuggccugagcaagaa

SEQ ID NO: 2146632 - RNA, 19 nt, Homo sapiens
  misc_RNA (1)...(19): siRNA sense strand
aacaugagcuaaagccaaa

SEQ ID NO: 2146633 - RNA, 19 nt, Homo sapiens
  misc_RNA (1)...(19): siRNA sense strand
uacagggaauggcauagua

SEQ ID NO: 2146634 - RNA, 19 nt, Homo sapiens
  misc_RNA (1)...(19): siRNA sense strand
gccgauauauggaacacuu

SEQ ID NO: 2146635 - RNA, 19 nt, Homo sapiens
  misc_RNA (1)...(19): siRNA sense strand
uaccuacaauccucaguuu

SEQ ID NO: 2146636 - RNA, 19 nt, Homo sapiens
  misc_RNA (1)...(19): siRNA sense strand
caagaugggauuauugugu

SEQ ID NO: 2146637 - RNA, 19 nt, Homo sapiens
  misc_RNA (1)...(19): siRNA sense strand
uuaagcagauuguaguuca

SEQ ID NO: 2146638 - RNA, 19 nt, Homo sapiens
  misc_RNA (1)...(19): siRNA sense strand
aagaagcauuucacauuug

SEQ ID NO: 2146639 - RNA, 19 nt, Homo sapiens
  misc_RNA (1)...(19): siRNA sense strand
acagggaacugaaagaucu

SEQ ID NO: 2146640 - RNA, 19 nt, Homo sapiens
  misc_RNA (1)...(19): siRNA sense strand
uagcaagcauucacagugu

SEQ ID NO: 2146641 - RNA, 19 nt, Homo sapiens
  misc_RNA (1)...(19): siRNA sense strand
ccaccaacuuagagaaaga

SEQ ID NO: 2146642 - RNA, 19 nt, Homo sapiens
  misc_RNA (1)...(19): siRNA sense strand
acacaugauaucucuguua

SEQ ID NO: 2146643 - RNA, 19 nt, Homo sapiens
  misc_RNA (1)...(19): siRNA sense strand
gggaagguuucuuaugaag

SEQ ID NO: 2146644 - RNA, 19 nt, Homo sapiens
  misc_RNA (1)...(19): siRNA sense strand
gaagaucauggaagugaau

SEQ ID NO: 2146645 - RNA, 19 nt, Homo sapiens
  misc_RNA (1)...(19): siRNA sense strand
caugaaauagguacacauu

SEQ ID NO: 2146646 - RNA, 19 nt, Homo sapiens
  misc_RNA (1)...(19): siRNA sense strand
uuaaaaggauuggcaguua

SEQ ID NO: 2146647 - RNA, 19 nt, Homo sapiens
  misc_RNA (1)...(19): siRNA sense strand
gaaggacuagcaagcauuc

SEQ ID NO: 2146648 - RNA, 19 nt, Homo sapiens
  misc_RNA (1)...(19): siRNA sense strand
ggaaggacuagcaagcauu

SEQ ID NO: 2146649 - RNA, 19 nt, Homo sapiens
  misc_RNA (1)...(19): siRNA sense strand
uggaagcgcugcucacagu

SEQ ID NO: 2146650 - RNA, 19 nt, Homo sapiens
  misc_RNA (1)...(19): siRNA sense strand
uaaagaccagguauacuug

SEQ ID NO: 2146651 - RNA, 19 nt, Homo sapiens
  misc_RNA (1)...(19): siRNA sense strand
gcugaggcaugaaauaggu

SEQ ID NO: 2146652 - RNA, 19 nt, Homo sapiens
  misc_RNA (1)...(19): siRNA sense strand
caucugaccgauuucuuaa

SEQ ID NO: 2146653 - RNA, 19 nt, Homo sapiens
  misc_RNA (1)...(19): siRNA sense strand
ugucaaguccuguaaaguu

SEQ ID NO: 2146654 - RNA, 19 nt, Homo sapiens
  misc_RNA (1)...(19): siRNA sense strand
uauaaaacccaccaacuua

SEQ ID NO: 2146655 - RNA, 19 nt, Homo sapiens
  misc_RNA (1)...(19): siRNA sense strand
auacuuggauggaauucuu

SEQ ID NO: 2146656 - RNA, 19 nt, Homo sapiens
  misc_RNA (1)...(19): siRNA sense strand
ucaaaucugacuauaccua

SEQ ID NO: 2146657 - RNA, 19 nt, Homo sapiens
  misc_RNA (1)...(19): siRNA sense strand
ccacugcacgugagcauug

SEQ ID NO: 2146658 - RNA, 19 nt, Homo sapiens
  misc_RNA (1)...(19): siRNA sense strand
cgggaagguuucuuaugaa

SEQ ID NO: 2146659 - RNA, 19 nt, Homo sapiens
  misc_RNA (1)...(19): siRNA sense strand
ccuacaauccucaguuuga

SEQ ID NO: 2146660 - RNA, 19 nt, Homo sapiens
  misc_RNA (1)...(19): siRNA sense strand
gauuguaguucaucucacu

SEQ ID NO: 2146661 - RNA, 19 nt, Homo sapiens
  misc_RNA (1)...(19): siRNA sense strand
agaagcauuucacauuugu

SEQ ID NO: 2146662 - RNA, 19 nt, Homo sapiens
  misc_RNA (1)...(19): siRNA sense strand
ugcagaagauucauugauc

SEQ ID NO: 2146663 - RNA, 19 nt, Homo sapiens
  misc_RNA (1)...(19): siRNA sense strand
caaugacaguaguaaaugg

SEQ ID NO: 2146664 - RNA, 19 nt, Homo sapiens
  misc_RNA (1)...(19): siRNA sense strand
auacagagauaccauagac

SEQ ID NO: 2146665 - RNA, 19 nt, Homo sapiens
  misc_RNA (1)...(19): siRNA sense strand
caugagcuaaagccaaaua

SEQ ID NO: 2146666 - RNA, 19 nt, Homo sapiens
  misc_RNA (1)...(19): siRNA sense strand
ggaaccaguaguuacaaug

SEQ ID NO: 2146667 - RNA, 19 nt, Homo sapiens
  misc_RNA (1)...(19): siRNA sense strand
uggauggaauucuucaaau

SEQ ID NO: 2146668 - RNA, 19 nt, Homo sapiens
  misc_RNA (1)...(19): siRNA sense strand
uaucaagccagccaaaugu

SEQ ID NO: 2146669 - RNA, 19 nt, Homo sapiens
  misc_RNA (1)...(19): siRNA sense strand
guccgacucugacuaucaa

SEQ ID NO: 2146670 - RNA, 19 nt, Homo sapiens
  misc_RNA (1)...(19): siRNA sense strand
gauguccgacucugacuau

SEQ ID NO: 2146671 - RNA, 19 nt, Homo sapiens
  misc_RNA (1)...(19): siRNA sense strand
uacaauguccuacuacaga

SEQ ID NO: 2146672 - RNA, 19 nt, Homo sapiens
  misc_RNA (1)...(19): siRNA sense strand
cacaugauaucucuguuac

SEQ ID NO: 2146673 - RNA, 19 nt, Homo sapiens
  misc_RNA (1)...(19): siRNA sense strand
ggaccauggccgauauaug

SEQ ID NO: 2146674 - RNA, 19 nt, Homo sapiens
  misc_RNA (1)...(19): siRNA sense strand
gaagcgcugcucacaguca

SEQ ID NO: 2146675 - RNA, 19 nt, Homo sapiens
  misc_RNA (1)...(19): siRNA sense strand
ccaauacaagaugggauua

SEQ ID NO: 2146676 - RNA, 19 nt, Homo sapiens
  misc_RNA (1)...(19): siRNA sense strand
ggacuagcaagcauucaca

SEQ ID NO: 2146677 - RNA, 19 nt, Homo sapiens
  misc_RNA (1)...(19): siRNA sense strand
gaagucuauucuaaaugca

SEQ ID NO: 2146678 - RNA, 19 nt, Homo sapiens
  misc_RNA (1)...(19): siRNA sense strand
guuacaauguccuacuaca

SEQ ID NO: 2146679 - RNA, 19 nt, Homo sapiens
  misc_RNA (1)...(19): siRNA sense strand
gaacacuuagagaagauca

SEQ ID NO: 2146680 - RNA, 19 nt, Homo sapiens
  misc_RNA (1)...(19): siRNA sense strand
acagagauaccauagacuu

SEQ ID NO: 2146681 - RNA, 19 nt, Homo sapiens
  misc_RNA (1)...(19): siRNA sense strand
ucaaauccuccgauacaga

SEQ ID NO: 2146682 - RNA, 19 nt, Homo sapiens
  misc_RNA (1)...(19): siRNA sense strand
gcaagcauucacaguguuc

SEQ ID NO: 2146683 - RNA, 19 nt, Homo sapiens
  misc_RNA (1)...(19): siRNA sense strand
ucaaugacaguaguaaaug

SEQ ID NO: 2146684 - RNA, 19 nt, Homo sapiens
  misc_RNA (1)...(19): siRNA sense strand
cuacagagcaaggaggaaa

SEQ ID NO: 2146685 - RNA, 19 nt, Homo sapiens
  misc_RNA (1)...(19): siRNA sense strand
gagauaccauagacuucca

SEQ ID NO: 2146686 - RNA, 19 nt, Homo sapiens
  misc_RNA (1)...(19): siRNA sense strand
caaagccucagcugucuag

SEQ ID NO: 2146687 - RNA, 19 nt, Homo sapiens
  misc_RNA (1)...(19): siRNA sense strand
agaagaucauggaagugaa

SEQ ID NO: 2146688 - RNA, 19 nt, Homo sapiens
  misc_RNA (1)...(19): siRNA sense strand
ugaagauguggaucgcuua

SEQ ID NO: 2146689 - RNA, 19 nt, Homo sapiens
  misc_RNA (1)...(19): siRNA sense strand
cuucaaauccuccgauaca

SEQ ID NO: 2146690 - RNA, 19 nt, Homo sapiens
  misc_RNA (1)...(19): siRNA sense strand
uuaguaaagaccagguaua

SEQ ID NO: 2146691 - RNA, 19 nt, Homo sapiens
  misc_RNA (1)...(19): siRNA sense strand
aaagauauuggcagguuug

SEQ ID NO: 2146692 - RNA, 19 nt, Homo sapiens
  misc_RNA (1)...(19): siRNA sense strand
aaacccagcaaaucuccua

SEQ ID NO: 2146693 - RNA, 19 nt, Homo sapiens
  misc_RNA (1)...(19): siRNA sense strand
ugacugcucucgggaaggu

SEQ ID NO: 2146694 - RNA, 19 nt, Homo sapiens
  misc_RNA (1)...(19): siRNA sense strand
cgacucugacuaucaaugu

SEQ ID NO: 2146695 - RNA, 19 nt, Homo sapiens
  misc_RNA (1)...(19): siRNA sense strand
ucacugaggaccugcuuuc

SEQ ID NO: 2146696 - RNA, 19 nt, Homo sapiens
  misc_RNA (1)...(19): siRNA sense strand
ugccaagcguauuagcuaa

SEQ ID NO: 2146697 - RNA, 19 nt, Homo sapiens
  misc_RNA (1)...(19): siRNA sense strand
gccaaagccucagcugucu

SEQ ID NO: 2146698 - RNA, 19 nt, Homo sapiens
  misc_RNA (1)...(19): siRNA sense strand
ggucaaguggugccauuuc

SEQ ID NO: 2146699 - RNA, 19 nt, Homo sapiens
  misc_RNA (1)...(19): siRNA sense strand
caaaucuccuaacacuucu

SEQ ID NO: 2146700 - RNA, 19 nt, Homo sapiens
  misc_RNA (1)...(19): siRNA sense strand
aagaggggauggacugaua

SEQ ID NO: 2146701 - RNA, 19 nt, Homo sapiens
  misc_RNA (1)...(19): siRNA sense strand
gauauauggaacacuuaga

SEQ ID NO: 2146702 - RNA, 19 nt, Homo sapiens
  misc_RNA (1)...(19): siRNA sense strand
gauacagagauaccauaga

SEQ ID NO: 2146703 - RNA, 19 nt, Homo sapiens
  misc_RNA (1)...(19): siRNA sense strand
gguauacuuggauggaauu

SEQ ID NO: 2146704 - RNA, 19 nt, Homo sapiens
  misc_RNA (1)...(19): siRNA sense strand
gagcuuggcugcagaaacu

SEQ ID NO: 2146705 - RNA, 19 nt, Homo sapiens
  misc_RNA (1)...(19): siRNA sense strand
cccagaaccuccucaaguu

SEQ ID NO: 2146706 - RNA, 19 nt, Homo sapiens
  misc_RNA (1)...(19): siRNA sense strand
ggcgagagcugagccgaaa

SEQ ID NO: 2146707 - RNA, 19 nt, Homo sapiens
  misc_RNA (1)...(19): siRNA sense strand
gaagagcuuggcugcagaa

SEQ ID NO: 2146708 - RNA, 19 nt, Homo sapiens
  misc_RNA (1)...(19): siRNA sense strand
ggaaaugggccuggaagag

SEQ ID NO: 2146709 - RNA, 19 nt, Homo sapiens
  misc_RNA (1)...(19): siRNA sense strand
gcccagaaccuccucaagu

SEQ ID NO: 2146710 - RNA, 19 nt, Homo sapiens
  misc_RNA (1)...(19): siRNA sense strand
gguggccucuccaggauca

SEQ ID NO: 2146711 - RNA, 19 nt, Homo sapiens
  misc_RNA (1)...(19): siRNA sense strand
caaccucuuuggacucagu

SEQ ID NO: 2146712 - RNA, 19 nt, Homo sapiens
  misc_RNA (1)...(19): siRNA sense strand
ggcugggccuccucaaguu

SEQ ID NO: 2146713 - RNA, 19 nt, Homo sapiens
  misc_RNA (1)...(19): siRNA sense strand
ccagaaccuccucaaguug

SEQ ID NO: 2146714 - RNA, 19 nt, Homo sapiens
  misc_RNA (1)...(19): siRNA sense strand
gcccaaaucguccugaagu

SEQ ID NO: 2146715 - RNA, 19 nt, Homo sapiens
  misc_RNA (1)...(19): siRNA sense strand
aacaaggucuuuggacuca

SEQ ID NO: 2146716 - RNA, 19 nt, Homo sapiens
  misc_RNA (1)...(19): siRNA sense strand
cgagagcugagccgaaaga

SEQ ID NO: 2146717 - RNA, 19 nt, Homo sapiens
  misc_RNA (1)...(19): siRNA sense strand
ucaagucggccuggaaaug

SEQ ID NO: 2146718 - RNA, 19 nt, Homo sapiens
  misc_RNA (1)...(19): siRNA sense strand
caacuccggccucccaaca

SEQ ID NO: 2146719 - RNA, 19 nt, Homo sapiens
  misc_RNA (1)...(19): siRNA sense strand
gcagaaacuuuggggucua

SEQ ID NO: 2146720 - RNA, 19 nt, Homo sapiens
  misc_RNA (1)...(19): siRNA sense strand
ccucaagucggccuggaaa

SEQ ID NO: 2146721 - RNA, 19 nt, Homo sapiens
  misc_RNA (1)...(19): siRNA sense strand
ccuaagucguccucaaguc

SEQ ID NO: 2146722 - RNA, 19 nt, Homo sapiens
  misc_RNA (1)...(19): siRNA sense strand
cugccucaguggccucuuu

SEQ ID NO: 2146723 - RNA, 19 nt, Homo sapiens
  misc_RNA (1)...(19): siRNA sense strand
caagucggccuggaaaugg

SEQ ID NO: 2146724 - RNA, 19 nt, Homo sapiens
  misc_RNA (1)...(19): siRNA sense strand
gagaugcagccaggaggaa

SEQ ID NO: 2146725 - RNA, 19 nt, Homo sapiens
  misc_RNA (1)...(19): siRNA sense strand
ccugguaggcccacaacuu

SEQ ID NO: 2146726 - RNA, 19 nt, Homo sapiens
  misc_RNA (1)...(19): siRNA sense strand
aacaaccucuuuggacuca

SEQ ID NO: 2146727 - RNA, 19 nt, Homo sapiens
  misc_RNA (1)...(19): siRNA sense strand
gcaaaacuuccucgaguca

SEQ ID NO: 2146728 - RNA, 19 nt, Homo sapiens
  misc_RNA (1)...(19): siRNA sense strand
gagcuuggcugcagaaacu

SEQ ID NO: 2146729 - RNA, 19 nt, Homo sapiens
  misc_RNA (1)...(19): siRNA sense strand
ggcgagagcugagccgaaa

SEQ ID NO: 2146730 - RNA, 19 nt, Homo sapiens
  misc_RNA (1)...(19): siRNA sense strand
gaagagcuuggcugcagaa

SEQ ID NO: 2146731 - RNA, 19 nt, Homo sapiens
  misc_RNA (1)...(19): siRNA sense strand
ggcugggccuccucaaguu

SEQ ID NO: 2146732 - RNA, 19 nt, Homo sapiens
  misc_RNA (1)...(19): siRNA sense strand
gcccaaaucguccugaagu

SEQ ID NO: 2146733 - RNA, 19 nt, Homo sapiens
  misc_RNA (1)...(19): siRNA sense strand
gcagaaacuuuggggucua

SEQ ID NO: 2146734 - RNA, 19 nt, Homo sapiens
  misc_RNA (1)...(19): siRNA sense strand
ccuaagucguccucaaguc

SEQ ID NO: 2146735 - RNA, 19 nt, Homo sapiens
  misc_RNA (1)...(19): siRNA sense strand
cugccucaguggccucuuu

SEQ ID NO: 2146736 - RNA, 19 nt, Homo sapiens
  misc_RNA (1)...(19): siRNA sense strand
gagaugcagccaggaggaa

SEQ ID NO: 2146737 - RNA, 19 nt, Homo sapiens
  misc_RNA (1)...(19): siRNA sense strand
ccugguaggcccacaacuu

SEQ ID NO: 2146738 - RNA, 19 nt, Homo sapiens
  misc_RNA (1)...(19): siRNA sense strand
gcaaaacuuccucgaguca

SEQ ID NO: 2146739 - RNA, 19 nt, Homo sapiens
  misc_RNA (1)...(19): siRNA sense strand
ccacgggacugcauuauaa

SEQ ID NO: 2146740 - RNA, 19 nt, Homo sapiens
  misc_RNA (1)...(19): siRNA sense strand
gaccaacccugaugagcua

SEQ ID NO: 2146741 - RNA, 19 nt, Homo sapiens
  misc_RNA (1)...(19): siRNA sense strand
gcuuugaccuggagucgua

SEQ ID NO: 2146742 - RNA, 19 nt, Homo sapiens
  misc_RNA (1)...(19): siRNA sense strand
gccaggagcugagccagua

SEQ ID NO: 2146743 - RNA, 19 nt, Homo sapiens
  misc_RNA (1)...(19): siRNA sense strand
uacaagacccugauaauga

SEQ ID NO: 2146744 - RNA, 19 nt, Homo sapiens
  misc_RNA (1)...(19): siRNA sense strand
gaacugaccaacccugaug

SEQ ID NO: 2146745 - RNA, 19 nt, Homo sapiens
  misc_RNA (1)...(19): siRNA sense strand
caugaacccuacuggcaua

SEQ ID NO: 2146746 - RNA, 19 nt, Homo sapiens
  misc_RNA (1)...(19): siRNA sense strand
gcaagacccuccacugacu

SEQ ID NO: 2146747 - RNA, 19 nt, Homo sapiens
  misc_RNA (1)...(19): siRNA sense strand
ggaaugacacccuuguaug

SEQ ID NO: 2146748 - RNA, 19 nt, Homo sapiens
  misc_RNA (1)...(19): siRNA sense strand
cagcgucccuuacauguca

SEQ ID NO: 2146749 - RNA, 19 nt, Homo sapiens
  misc_RNA (1)...(19): siRNA sense strand
gaacuuucccugaguccuu

SEQ ID NO: 2146750 - RNA, 19 nt, Homo sapiens
  misc_RNA (1)...(19): siRNA sense strand
cugaugagcuacuguccua

SEQ ID NO: 2146751 - RNA, 19 nt, Homo sapiens
  misc_RNA (1)...(19): siRNA sense strand
gcacugcaucaccaagaua

SEQ ID NO: 2146752 - RNA, 19 nt, Homo sapiens
  misc_RNA (1)...(19): siRNA sense strand
cgaccugcuuucucuguuu

SEQ ID NO: 2146753 - RNA, 19 nt, Homo sapiens
  misc_RNA (1)...(19): siRNA sense strand
ucaugacugucgccacaua

SEQ ID NO: 2146754 - RNA, 19 nt, Homo sapiens
  misc_RNA (1)...(19): siRNA sense strand
ggaagccagugcccgugaa

SEQ ID NO: 2146755 - RNA, 19 nt, Homo sapiens
  misc_RNA (1)...(19): siRNA sense strand
gaaugacacccuuguaugc

SEQ ID NO: 2146756 - RNA, 19 nt, Homo sapiens
  misc_RNA (1)...(19): siRNA sense strand
caacaaugacgaccugcuu

SEQ ID NO: 2146757 - RNA, 19 nt, Homo sapiens
  misc_RNA (1)...(19): siRNA sense strand
ggagguguccugugugcaa

SEQ ID NO: 2146758 - RNA, 19 nt, Homo sapiens
  misc_RNA (1)...(19): siRNA sense strand
gaccugcuuucucuguuug

SEQ ID NO: 2146759 - RNA, 19 nt, Homo sapiens
  misc_RNA (1)...(19): siRNA sense strand
cuacaagacccugauaaug

SEQ ID NO: 2146760 - RNA, 19 nt, Homo sapiens
  misc_RNA (1)...(19): siRNA sense strand
ccagcagccuccugacuuc

SEQ ID NO: 2146761 - RNA, 19 nt, Homo sapiens
  misc_RNA (1)...(19): siRNA sense strand
acaagacccugauaaugag

SEQ ID NO: 2146762 - RNA, 19 nt, Homo sapiens
  misc_RNA (1)...(19): siRNA sense strand
acacggugaugguucauuc

SEQ ID NO: 2146763 - RNA, 19 nt, Homo sapiens
  misc_RNA (1)...(19): siRNA sense strand
gagcguggcgacaacaaga

SEQ ID NO: 2146764 - RNA, 19 nt, Homo sapiens
  misc_RNA (1)...(19): siRNA sense strand
cacccgaccucccuacgaa

SEQ ID NO: 2146765 - RNA, 19 nt, Homo sapiens
  misc_RNA (1)...(19): siRNA sense strand
acaagccacucuaccugaa

SEQ ID NO: 2146766 - RNA, 19 nt, Homo sapiens
  misc_RNA (1)...(19): siRNA sense strand
caacaagaccucgcacaag

SEQ ID NO: 2146767 - RNA, 19 nt, Homo sapiens
  misc_RNA (1)...(19): siRNA sense strand
gagcacugcaucaccaaga

SEQ ID NO: 2146768 - RNA, 19 nt, Homo sapiens
  misc_RNA (1)...(19): siRNA sense strand
gcaaggaggccaguaugca

SEQ ID NO: 2146769 - RNA, 19 nt, Homo sapiens
  misc_RNA (1)...(19): siRNA sense strand
ugauuuacauucagaacuc

SEQ ID NO: 2146770 - RNA, 19 nt, Homo sapiens
  misc_RNA (1)...(19): siRNA sense strand
caagauaaagcggaacuuc

SEQ ID NO: 2146771 - RNA, 19 nt, Homo sapiens
  misc_RNA (1)...(19): siRNA sense strand
gcagcagcgucccuuacau

SEQ ID NO: 2146772 - RNA, 19 nt, Homo sapiens
  misc_RNA (1)...(19): siRNA sense strand
ucccuuacaugucaccaaa

SEQ ID NO: 2146773 - RNA, 19 nt, Homo sapiens
  misc_RNA (1)...(19): siRNA sense strand
gcauccugauuuacauuca

SEQ ID NO: 2146774 - RNA, 19 nt, Homo sapiens
  misc_RNA (1)...(19): siRNA sense strand
gcucaugcccagcgugaug

SEQ ID NO: 2146775 - RNA, 19 nt, Homo sapiens
  misc_RNA (1)...(19): siRNA sense strand
ggagguggaccaguacaug

SEQ ID NO: 2146776 - RNA, 19 nt, Homo sapiens
  misc_RNA (1)...(19): siRNA sense strand
gcaggaaugacacccuugu

SEQ ID NO: 2146777 - RNA, 19 nt, Homo sapiens
  misc_RNA (1)...(19): siRNA sense strand
caagcagcagcgucccuua

SEQ ID NO: 2146778 - RNA, 19 nt, Homo sapiens
  misc_RNA (1)...(19): siRNA sense strand
gaggucaagucucccuucu

SEQ ID NO: 2146779 - RNA, 19 nt, Homo sapiens
  misc_RNA (1)...(19): siRNA sense strand
cuaucaaggugucccugaa

SEQ ID NO: 2146780 - RNA, 19 nt, Homo sapiens
  misc_RNA (1)...(19): siRNA sense strand
agucguaccugcagcucaa

SEQ ID NO: 2146781 - RNA, 19 nt, Homo sapiens
  misc_RNA (1)...(19): siRNA sense strand
cugcaagacccuccacuga

SEQ ID NO: 2146782 - RNA, 19 nt, Homo sapiens
  misc_RNA (1)...(19): siRNA sense strand
uuacaugucaccaaaccaa

SEQ ID NO: 2146783 - RNA, 19 nt, Homo sapiens
  misc_RNA (1)...(19): siRNA sense strand
gaugguucauucgcauaug

SEQ ID NO: 2146784 - RNA, 19 nt, Homo sapiens
  misc_RNA (1)...(19): siRNA sense strand
cagcagcgucccuuacaug

SEQ ID NO: 2146785 - RNA, 19 nt, Homo sapiens
  misc_RNA (1)...(19): siRNA sense strand
ggguggagcagacagcuau

SEQ ID NO: 2146786 - RNA, 19 nt, Homo sapiens
  misc_RNA (1)...(19): siRNA sense strand
gaccugcucccggaacuga

SEQ ID NO: 2146787 - RNA, 19 nt, Homo sapiens
  misc_RNA (1)...(19): siRNA sense strand
gccacacggugaugguuca

SEQ ID NO: 2146788 - RNA, 19 nt, Homo sapiens
  misc_RNA (1)...(19): siRNA sense strand
gaccuggagcugcaauuca

SEQ ID NO: 2146789 - RNA, 19 nt, Homo sapiens
  misc_RNA (1)...(19): siRNA sense strand
gcaacaccauccagaucac

SEQ ID NO: 2146790 - RNA, 19 nt, Homo sapiens
  misc_RNA (1)...(19): siRNA sense strand
acaacaagaccucgcacaa

SEQ ID NO: 2146791 - RNA, 19 nt, Homo sapiens
  misc_RNA (1)...(19): siRNA sense strand
cacgaggaccggcagauga

SEQ ID NO: 2146792 - RNA, 19 nt, Homo sapiens
  misc_RNA (1)...(19): siRNA sense strand
cacucuaccugaagcaugu

SEQ ID NO: 2146793 - RNA, 19 nt, Homo sapiens
  misc_RNA (1)...(19): siRNA sense strand
ugcugggcauccugauuua

SEQ ID NO: 2146794 - RNA, 19 nt, Homo sapiens
  misc_RNA (1)...(19): siRNA sense strand
ugucuguggucacuacugu

SEQ ID NO: 2146795 - RNA, 19 nt, Homo sapiens
  misc_RNA (1)...(19): siRNA sense strand
gcuguaagcaaccaugucu

SEQ ID NO: 2146796 - RNA, 19 nt, Homo sapiens
  misc_RNA (1)...(19): siRNA sense strand
caggaaugacacccuugua

SEQ ID NO: 2146797 - RNA, 19 nt, Homo sapiens
  misc_RNA (1)...(19): siRNA sense strand
gggcauccugauuuacauu

SEQ ID NO: 2146798 - RNA, 19 nt, Homo sapiens
  misc_RNA (1)...(19): siRNA sense strand
aaaccaagaggucaagucu

SEQ ID NO: 2146799 - RNA, 19 nt, Homo sapiens
  misc_RNA (1)...(19): siRNA sense strand
ucaacuccuugcacucauc

SEQ ID NO: 2146800 - RNA, 19 nt, Homo sapiens
  misc_RNA (1)...(19): siRNA sense strand
ggaacugaccaacccugau

SEQ ID NO: 2146801 - RNA, 19 nt, Homo sapiens
  misc_RNA (1)...(19): siRNA sense strand
ccacauacagugcuuugac

SEQ ID NO: 2146802 - RNA, 19 nt, Homo sapiens
  misc_RNA (1)...(19): siRNA sense strand
ggagcagacagcuaucaag

SEQ ID NO: 2146803 - RNA, 19 nt, Homo sapiens
  misc_RNA (1)...(19): siRNA sense strand
gcugcagggccuccucaaa

SEQ ID NO: 2146804 - RNA, 19 nt, Homo sapiens
  misc_RNA (1)...(19): siRNA sense strand
uguaagcaaccaugucuuc

SEQ ID NO: 2146805 - RNA, 19 nt, Homo sapiens
  misc_RNA (1)...(19): siRNA sense strand
aggaaugacacccuuguau

SEQ ID NO: 2146806 - RNA, 19 nt, Homo sapiens
  misc_RNA (1)...(19): siRNA sense strand
uguccugugugcaacaaga

SEQ ID NO: 2146807 - RNA, 19 nt, Homo sapiens
  misc_RNA (1)...(19): siRNA sense strand
accugcagcucaacuguga

SEQ ID NO: 2146808 - RNA, 19 nt, Homo sapiens
  misc_RNA (1)...(19): siRNA sense strand
aagauaaagcggaacuuca

SEQ ID NO: 2146809 - RNA, 19 nt, Homo sapiens
  misc_RNA (1)...(19): siRNA sense strand
ucuacaagacccugauaau

SEQ ID NO: 2146810 - RNA, 19 nt, Homo sapiens
  misc_RNA (1)...(19): siRNA sense strand
cccacgggacugcauuaua

SEQ ID NO: 2146811 - RNA, 19 nt, Homo sapiens
  misc_RNA (1)...(19): siRNA sense strand
ccagcgugauggagaugau

SEQ ID NO: 2146812 - RNA, 19 nt, Homo sapiens
  misc_RNA (1)...(19): siRNA sense strand
ugcccgaggucaugacugu

SEQ ID NO: 2146813 - RNA, 19 nt, Homo sapiens
  misc_RNA (1)...(19): siRNA sense strand
ccucaacuccuugcacuca

SEQ ID NO: 2146814 - RNA, 19 nt, Homo sapiens
  misc_RNA (1)...(19): siRNA sense strand
augaggagaucaccaucga

SEQ ID NO: 2146815 - RNA, 19 nt, Homo sapiens
  misc_RNA (1)...(19): siRNA sense strand
acuuggagguguccugugu

SEQ ID NO: 2146816 - RNA, 19 nt, Homo sapiens
  misc_RNA (1)...(19): siRNA sense strand
caucgagcguggcgacaac

SEQ ID NO: 2146817 - RNA, 19 nt, Homo sapiens
  misc_RNA (1)...(19): siRNA sense strand
accuggagcugcaauucaa

SEQ ID NO: 2146818 - RNA, 19 nt, Homo sapiens
  misc_RNA (1)...(19): siRNA sense strand
gcacaaccuggcuguaagc

SEQ ID NO: 2146819 - RNA, 19 nt, Homo sapiens
  misc_RNA (1)...(19): siRNA sense strand
ccacgggacugcauuauaa

SEQ ID NO: 2146820 - RNA, 19 nt, Homo sapiens
  misc_RNA (1)...(19): siRNA sense strand
gaccaacccugaugagcua

SEQ ID NO: 2146821 - RNA, 19 nt, Homo sapiens
  misc_RNA (1)...(19): siRNA sense strand
gcuuugaccuggagucgua

SEQ ID NO: 2146822 - RNA, 19 nt, Homo sapiens
  misc_RNA (1)...(19): siRNA sense strand
gccaggagcugagccagua

SEQ ID NO: 2146823 - RNA, 19 nt, Homo sapiens
  misc_RNA (1)...(19): siRNA sense strand
uacaagacccugauaauga

SEQ ID NO: 2146824 - RNA, 19 nt, Homo sapiens
  misc_RNA (1)...(19): siRNA sense strand
gaacugaccaacccugaug

SEQ ID NO: 2146825 - RNA, 19 nt, Homo sapiens
  misc_RNA (1)...(19): siRNA sense strand
caugaacccuacuggcaua

SEQ ID NO: 2146826 - RNA, 19 nt, Homo sapiens
  misc_RNA (1)...(19): siRNA sense strand
gcaagacccuccacugacu

SEQ ID NO: 2146827 - RNA, 19 nt, Homo sapiens
  misc_RNA (1)...(19): siRNA sense strand
ggaaugacacccuuguaug

SEQ ID NO: 2146828 - RNA, 19 nt, Homo sapiens
  misc_RNA (1)...(19): siRNA sense strand
cagcgucccuuacauguca

SEQ ID NO: 2146829 - RNA, 19 nt, Homo sapiens
  misc_RNA (1)...(19): siRNA sense strand
gaacuuucccugaguccuu

SEQ ID NO: 2146830 - RNA, 19 nt, Homo sapiens
  misc_RNA (1)...(19): siRNA sense strand
cugaugagcuacuguccua

SEQ ID NO: 2146831 - RNA, 19 nt, Homo sapiens
  misc_RNA (1)...(19): siRNA sense strand
gcacugcaucaccaagaua

SEQ ID NO: 2146832 - RNA, 19 nt, Homo sapiens
  misc_RNA (1)...(19): siRNA sense strand
cgaccugcuuucucuguuu

SEQ ID NO: 2146833 - RNA, 19 nt, Homo sapiens
  misc_RNA (1)...(19): siRNA sense strand
ucaugacugucgccacaua

SEQ ID NO: 2146834 - RNA, 19 nt, Homo sapiens
  misc_RNA (1)...(19): siRNA sense strand
ggaagccagugcccgugaa

SEQ ID NO: 2146835 - RNA, 19 nt, Homo sapiens
  misc_RNA (1)...(19): siRNA sense strand
gaaugacacccuuguaugc

SEQ ID NO: 2146836 - RNA, 19 nt, Homo sapiens
  misc_RNA (1)...(19): siRNA sense strand
caacaaugacgaccugcuu

SEQ ID NO: 2146837 - RNA, 19 nt, Homo sapiens
  misc_RNA (1)...(19): siRNA sense strand
ggagguguccugugugcaa

SEQ ID NO: 2146838 - RNA, 19 nt, Homo sapiens
  misc_RNA (1)...(19): siRNA sense strand
gaccugcuuucucuguuug

SEQ ID NO: 2146839 - RNA, 19 nt, Homo sapiens
  misc_RNA (1)...(19): siRNA sense strand
cuacaagacccugauaaug

SEQ ID NO: 2146840 - RNA, 19 nt, Homo sapiens
  misc_RNA (1)...(19): siRNA sense strand
ccagcagccuccugacuuc

SEQ ID NO: 2146841 - RNA, 19 nt, Homo sapiens
  misc_RNA (1)...(19): siRNA sense strand
acaagacccugauaaugag

SEQ ID NO: 2146842 - RNA, 19 nt, Homo sapiens
  misc_RNA (1)...(19): siRNA sense strand
acacggugaugguucauuc

SEQ ID NO: 2146843 - RNA, 19 nt, Homo sapiens
  misc_RNA (1)...(19): siRNA sense strand
gagcguggcgacaacaaga

SEQ ID NO: 2146844 - RNA, 19 nt, Homo sapiens
  misc_RNA (1)...(19): siRNA sense strand
cacccgaccucccuacgaa

SEQ ID NO: 2146845 - RNA, 19 nt, Homo sapiens
  misc_RNA (1)...(19): siRNA sense strand
acaagccacucuaccugaa

SEQ ID NO: 2146846 - RNA, 19 nt, Homo sapiens
  misc_RNA (1)...(19): siRNA sense strand
caacaagaccucgcacaag

SEQ ID NO: 2146847 - RNA, 19 nt, Homo sapiens
  misc_RNA (1)...(19): siRNA sense strand
gagcacugcaucaccaaga

SEQ ID NO: 2146848 - RNA, 19 nt, Homo sapiens
  misc_RNA (1)...(19): siRNA sense strand
gcaaggaggccaguaugca

SEQ ID NO: 2146849 - RNA, 19 nt, Homo sapiens
  misc_RNA (1)...(19): siRNA sense strand
ugauuuacauucagaacuc

SEQ ID NO: 2146850 - RNA, 19 nt, Homo sapiens
  misc_RNA (1)...(19): siRNA sense strand
caagauaaagcggaacuuc

SEQ ID NO: 2146851 - RNA, 19 nt, Homo sapiens
  misc_RNA (1)...(19): siRNA sense strand
gcagcagcgucccuuacau

SEQ ID NO: 2146852 - RNA, 19 nt, Homo sapiens
  misc_RNA (1)...(19): siRNA sense strand
ucccuuacaugucaccaaa

SEQ ID NO: 2146853 - RNA, 19 nt, Homo sapiens
  misc_RNA (1)...(19): siRNA sense strand
gcauccugauuuacauuca

SEQ ID NO: 2146854 - RNA, 19 nt, Homo sapiens
  misc_RNA (1)...(19): siRNA sense strand
gcucaugcccagcgugaug

SEQ ID NO: 2146855 - RNA, 19 nt, Homo sapiens
  misc_RNA (1)...(19): siRNA sense strand
ggagguggaccaguacaug

SEQ ID NO: 2146856 - RNA, 19 nt, Homo sapiens
  misc_RNA (1)...(19): siRNA sense strand
gcaggaaugacacccuugu

SEQ ID NO: 2146857 - RNA, 19 nt, Homo sapiens
  misc_RNA (1)...(19): siRNA sense strand
caagcagcagcgucccuua

SEQ ID NO: 2146858 - RNA, 19 nt, Homo sapiens
  misc_RNA (1)...(19): siRNA sense strand
gaggucaagucucccuucu

SEQ ID NO: 2146859 - RNA, 19 nt, Homo sapiens
  misc_RNA (1)...(19): siRNA sense strand
cuaucaaggugucccugaa

SEQ ID NO: 2146860 - RNA, 19 nt, Homo sapiens
  misc_RNA (1)...(19): siRNA sense strand
agucguaccugcagcucaa

SEQ ID NO: 2146861 - RNA, 19 nt, Homo sapiens
  misc_RNA (1)...(19): siRNA sense strand
cugcaagacccuccacuga

SEQ ID NO: 2146862 - RNA, 19 nt, Homo sapiens
  misc_RNA (1)...(19): siRNA sense strand
uuacaugucaccaaaccaa

SEQ ID NO: 2146863 - RNA, 19 nt, Homo sapiens
  misc_RNA (1)...(19): siRNA sense strand
gaugguucauucgcauaug

SEQ ID NO: 2146864 - RNA, 19 nt, Homo sapiens
  misc_RNA (1)...(19): siRNA sense strand
cagcagcgucccuuacaug

SEQ ID NO: 2146865 - RNA, 19 nt, Homo sapiens
  misc_RNA (1)...(19): siRNA sense strand
ggguggagcagacagcuau

SEQ ID NO: 2146866 - RNA, 19 nt, Homo sapiens
  misc_RNA (1)...(19): siRNA sense strand
gaccugcucccggaacuga

SEQ ID NO: 2146867 - RNA, 19 nt, Homo sapiens
  misc_RNA (1)...(19): siRNA sense strand
gccacacggugaugguuca

SEQ ID NO: 2146868 - RNA, 19 nt, Homo sapiens
  misc_RNA (1)...(19): siRNA sense strand
gaccuggagcugcaauuca

SEQ ID NO: 2146869 - RNA, 19 nt, Homo sapiens
  misc_RNA (1)...(19): siRNA sense strand
gcaacaccauccagaucac

SEQ ID NO: 2146870 - RNA, 19 nt, Homo sapiens
  misc_RNA (1)...(19): siRNA sense strand
acaacaagaccucgcacaa

SEQ ID NO: 2146871 - RNA, 19 nt, Homo sapiens
  misc_RNA (1)...(19): siRNA sense strand
cacgaggaccggcagauga

SEQ ID NO: 2146872 - RNA, 19 nt, Homo sapiens
  misc_RNA (1)...(19): siRNA sense strand
cacucuaccugaagcaugu

SEQ ID NO: 2146873 - RNA, 19 nt, Homo sapiens
  misc_RNA (1)...(19): siRNA sense strand
ugcugggcauccugauuua

SEQ ID NO: 2146874 - RNA, 19 nt, Homo sapiens
  misc_RNA (1)...(19): siRNA sense strand
ugucuguggucacuacugu

SEQ ID NO: 2146875 - RNA, 19 nt, Homo sapiens
  misc_RNA (1)...(19): siRNA sense strand
gcuguaagcaaccaugucu

SEQ ID NO: 2146876 - RNA, 19 nt, Homo sapiens
  misc_RNA (1)...(19): siRNA sense strand
caggaaugacacccuugua

SEQ ID NO: 2146877 - RNA, 19 nt, Homo sapiens
  misc_RNA (1)...(19): siRNA sense strand
gggcauccugauuuacauu

SEQ ID NO: 2146878 - RNA, 19 nt, Homo sapiens
  misc_RNA (1)...(19): siRNA sense strand
aaaccaagaggucaagucu

SEQ ID NO: 2146879 - RNA, 19 nt, Homo sapiens
  misc_RNA (1)...(19): siRNA sense strand
ucaacuccuugcacucauc

SEQ ID NO: 2146880 - RNA, 19 nt, Homo sapiens
  misc_RNA (1)...(19): siRNA sense strand
ggaacugaccaacccugau

SEQ ID NO: 2146881 - RNA, 19 nt, Homo sapiens
  misc_RNA (1)...(19): siRNA sense strand
ccacauacagugcuuugac

SEQ ID NO: 2146882 - RNA, 19 nt, Homo sapiens
  misc_RNA (1)...(19): siRNA sense strand
ggagcagacagcuaucaag

SEQ ID NO: 2146883 - RNA, 19 nt, Homo sapiens
  misc_RNA (1)...(19): siRNA sense strand
gcugcagggccuccucaaa

SEQ ID NO: 2146884 - RNA, 19 nt, Homo sapiens
  misc_RNA (1)...(19): siRNA sense strand
uguaagcaaccaugucuuc

SEQ ID NO: 2146885 - RNA, 19 nt, Homo sapiens
  misc_RNA (1)...(19): siRNA sense strand
aggaaugacacccuuguau

SEQ ID NO: 2146886 - RNA, 19 nt, Homo sapiens
  misc_RNA (1)...(19): siRNA sense strand
uguccugugugcaacaaga

SEQ ID NO: 2146887 - RNA, 19 nt, Homo sapiens
  misc_RNA (1)...(19): siRNA sense strand
accugcagcucaacuguga

SEQ ID NO: 2146888 - RNA, 19 nt, Homo sapiens
  misc_RNA (1)...(19): siRNA sense strand
aagauaaagcggaacuuca

SEQ ID NO: 2146889 - RNA, 19 nt, Homo sapiens
  misc_RNA (1)...(19): siRNA sense strand
ucuacaagacccugauaau

SEQ ID NO: 2146890 - RNA, 19 nt, Homo sapiens
  misc_RNA (1)...(19): siRNA sense strand
cccacgggacugcauuaua

SEQ ID NO: 2146891 - RNA, 19 nt, Homo sapiens
  misc_RNA (1)...(19): siRNA sense strand
ccagcgugauggagaugau

SEQ ID NO: 2146892 - RNA, 19 nt, Homo sapiens
  misc_RNA (1)...(19): siRNA sense strand
ugcccgaggucaugacugu

SEQ ID NO: 2146893 - RNA, 19 nt, Homo sapiens
  misc_RNA (1)...(19): siRNA sense strand
ccucaacuccuugcacuca

SEQ ID NO: 2146894 - RNA, 19 nt, Homo sapiens
  misc_RNA (1)...(19): siRNA sense strand
augaggagaucaccaucga

SEQ ID NO: 2146895 - RNA, 19 nt, Homo sapiens
  misc_RNA (1)...(19): siRNA sense strand
acuuggagguguccugugu

SEQ ID NO: 2146896 - RNA, 19 nt, Homo sapiens
  misc_RNA (1)...(19): siRNA sense strand
caucgagcguggcgacaac

SEQ ID NO: 2146897 - RNA, 19 nt, Homo sapiens
  misc_RNA (1)...(19): siRNA sense strand
accuggagcugcaauucaa

SEQ ID NO: 2146898 - RNA, 19 nt, Homo sapiens
  misc_RNA (1)...(19): siRNA sense strand
gcacaaccuggcuguaagc

SEQ ID NO: 2146899 - RNA, 19 nt, Homo sapiens
  misc_RNA (1)...(19): siRNA sense strand
gcagggaacucauagagaa

SEQ ID NO: 2146900 - RNA, 19 nt, Homo sapiens
  misc_RNA (1)...(19): siRNA sense strand
gcaaguacauggacaucaa

SEQ ID NO: 2146901 - RNA, 19 nt, Homo sapiens
  misc_RNA (1)...(19): siRNA sense strand
gaacugcacuuggagagaa

SEQ ID NO: 2146902 - RNA, 19 nt, Homo sapiens
  misc_RNA (1)...(19): siRNA sense strand
gagaaacccugcuguauac

SEQ ID NO: 2146903 - RNA, 19 nt, Homo sapiens
  misc_RNA (1)...(19): siRNA sense strand
guaagcacaucaugcagua

SEQ ID NO: 2146904 - RNA, 19 nt, Homo sapiens
  misc_RNA (1)...(19): siRNA sense strand
gaucaacagugucauggaa

SEQ ID NO: 2146905 - RNA, 19 nt, Homo sapiens
  misc_RNA (1)...(19): siRNA sense strand
gguacaagaugaccuguga

SEQ ID NO: 2146906 - RNA, 19 nt, Homo sapiens
  misc_RNA (1)...(19): siRNA sense strand
uaaagacacuucaggacaa

SEQ ID NO: 2146907 - RNA, 19 nt, Homo sapiens
  misc_RNA (1)...(19): siRNA sense strand
guacauggacaucaacuuu

SEQ ID NO: 2146908 - RNA, 19 nt, Homo sapiens
  misc_RNA (1)...(19): siRNA sense strand
ggagagaaacccugcugua

SEQ ID NO: 2146909 - RNA, 19 nt, Homo sapiens
  misc_RNA (1)...(19): siRNA sense strand
gaggacacauccacagcua

SEQ ID NO: 2146910 - RNA, 19 nt, Homo sapiens
  misc_RNA (1)...(19): siRNA sense strand
ggcagagcguugaguauuu

SEQ ID NO: 2146911 - RNA, 19 nt, Homo sapiens
  misc_RNA (1)...(19): siRNA sense strand
gcacgugggugaaagaaac

SEQ ID NO: 2146912 - RNA, 19 nt, Homo sapiens
  misc_RNA (1)...(19): siRNA sense strand
agagaaacccugcuguaua

SEQ ID NO: 2146913 - RNA, 19 nt, Homo sapiens
  misc_RNA (1)...(19): siRNA sense strand
gugaaccgcuuccacaaga

SEQ ID NO: 2146914 - RNA, 19 nt, Homo sapiens
  misc_RNA (1)...(19): siRNA sense strand
gcagagcguugaguauuuc

SEQ ID NO: 2146915 - RNA, 19 nt, Homo sapiens
  misc_RNA (1)...(19): siRNA sense strand
ucaagcggcugcuguacaa

SEQ ID NO: 2146916 - RNA, 19 nt, Homo sapiens
  misc_RNA (1)...(19): siRNA sense strand
caagaugaccugugaauac

SEQ ID NO: 2146917 - RNA, 19 nt, Homo sapiens
  misc_RNA (1)...(19): siRNA sense strand
gagcaggacucaacaugac

SEQ ID NO: 2146918 - RNA, 19 nt, Homo sapiens
  misc_RNA (1)...(19): siRNA sense strand
gagagaaacccugcuguau

SEQ ID NO: 2146919 - RNA, 19 nt, Homo sapiens
  misc_RNA (1)...(19): siRNA sense strand
aaaccugacuuugugcuuu

SEQ ID NO: 2146920 - RNA, 19 nt, Homo sapiens
  misc_RNA (1)...(19): siRNA sense strand
ggagcaggacucaacauga

SEQ ID NO: 2146921 - RNA, 19 nt, Homo sapiens
  misc_RNA (1)...(19): siRNA sense strand
ugaacaggaucaacagugu

SEQ ID NO: 2146922 - RNA, 19 nt, Homo sapiens
  misc_RNA (1)...(19): siRNA sense strand
cugaagagguggagucugu

SEQ ID NO: 2146923 - RNA, 19 nt, Homo sapiens
  misc_RNA (1)...(19): siRNA sense strand
ggaagacagaagccaguaa

SEQ ID NO: 2146924 - RNA, 19 nt, Homo sapiens
  misc_RNA (1)...(19): siRNA sense strand
cugggaagcuggaugagaa

SEQ ID NO: 2146925 - RNA, 19 nt, Homo sapiens
  misc_RNA (1)...(19): siRNA sense strand
gcaccaaccgcaaucacaa

SEQ ID NO: 2146926 - RNA, 19 nt, Homo sapiens
  misc_RNA (1)...(19): siRNA sense strand
cgaggaaggcccugaguau

SEQ ID NO: 2146927 - RNA, 19 nt, Homo sapiens
  misc_RNA (1)...(19): siRNA sense strand
caaggcagccgccacucua

SEQ ID NO: 2146928 - RNA, 19 nt, Homo sapiens
  misc_RNA (1)...(19): siRNA sense strand
caccaucacugaccgaauc

SEQ ID NO: 2146929 - RNA, 19 nt, Homo sapiens
  misc_RNA (1)...(19): siRNA sense strand
acaagcagcugcaugaacu

SEQ ID NO: 2146930 - RNA, 19 nt, Homo sapiens
  misc_RNA (1)...(19): siRNA sense strand
ucacagaccagcaccucua

SEQ ID NO: 2146931 - RNA, 19 nt, Homo sapiens
  misc_RNA (1)...(19): siRNA sense strand
ggccgagacuuccggauca

SEQ ID NO: 2146932 - RNA, 19 nt, Homo sapiens
  misc_RNA (1)...(19): siRNA sense strand
gaagacagaagccaguaag

SEQ ID NO: 2146933 - RNA, 19 nt, Homo sapiens
  misc_RNA (1)...(19): siRNA sense strand
gaaacccugcuguauacaa

SEQ ID NO: 2146934 - RNA, 19 nt, Homo sapiens
  misc_RNA (1)...(19): siRNA sense strand
gaaacuuccacgccuucua

SEQ ID NO: 2146935 - RNA, 19 nt, Homo sapiens
  misc_RNA (1)...(19): siRNA sense strand
ucacaacuccagccgcuuu

SEQ ID NO: 2146936 - RNA, 19 nt, Homo sapiens
  misc_RNA (1)...(19): siRNA sense strand
ucaaggacgugcugcucaa

SEQ ID NO: 2146937 - RNA, 19 nt, Homo sapiens
  misc_RNA (1)...(19): siRNA sense strand
aaacccugcuguauacaau

SEQ ID NO: 2146938 - RNA, 19 nt, Homo sapiens
  misc_RNA (1)...(19): siRNA sense strand
aaagacacuucaggacaaa

SEQ ID NO: 2146939 - RNA, 19 nt, Homo sapiens
  misc_RNA (1)...(19): siRNA sense strand
gcaaggacacagucauugg

SEQ ID NO: 2146940 - RNA, 19 nt, Homo sapiens
  misc_RNA (1)...(19): siRNA sense strand
gacaagaccauggaguuug

SEQ ID NO: 2146941 - RNA, 19 nt, Homo sapiens
  misc_RNA (1)...(19): siRNA sense strand
cccggcagcuggugaagaa

SEQ ID NO: 2146942 - RNA, 19 nt, Homo sapiens
  misc_RNA (1)...(19): siRNA sense strand
acagcuaccuacuggagaa

SEQ ID NO: 2146943 - RNA, 19 nt, Homo sapiens
  misc_RNA (1)...(19): siRNA sense strand
aagaugaccugugaauaca

SEQ ID NO: 2146944 - RNA, 19 nt, Homo sapiens
  misc_RNA (1)...(19): siRNA sense strand
cgacaagaacagagauuuc

SEQ ID NO: 2146945 - RNA, 19 nt, Homo sapiens
  misc_RNA (1)...(19): siRNA sense strand
ccacagacaagaccaugga

SEQ ID NO: 2146946 - RNA, 19 nt, Homo sapiens
  misc_RNA (1)...(19): siRNA sense strand
gcaccaccgccaucaccua

SEQ ID NO: 2146947 - RNA, 19 nt, Homo sapiens
  misc_RNA (1)...(19): siRNA sense strand
gggaggcagggaacucaua

SEQ ID NO: 2146948 - RNA, 19 nt, Homo sapiens
  misc_RNA (1)...(19): siRNA sense strand
cagacaagaccauggaguu

SEQ ID NO: 2146949 - RNA, 19 nt, Homo sapiens
  misc_RNA (1)...(19): siRNA sense strand
ccaguaagcacaucaugca

SEQ ID NO: 2146950 - RNA, 19 nt, Homo sapiens
  misc_RNA (1)...(19): siRNA sense strand
ggaguuuggccgagacuuc

SEQ ID NO: 2146951 - RNA, 19 nt, Homo sapiens
  misc_RNA (1)...(19): siRNA sense strand
agacaagaccauggaguuu

SEQ ID NO: 2146952 - RNA, 19 nt, Homo sapiens
  misc_RNA (1)...(19): siRNA sense strand
ucauccagcucauccugaa

SEQ ID NO: 2146953 - RNA, 19 nt, Homo sapiens
  misc_RNA (1)...(19): siRNA sense strand
gaggaaggcccugaguaug

SEQ ID NO: 2146954 - RNA, 19 nt, Homo sapiens
  misc_RNA (1)...(19): siRNA sense strand
ggacaagcagcugcaugaa

SEQ ID NO: 2146955 - RNA, 19 nt, Homo sapiens
  misc_RNA (1)...(19): siRNA sense strand
cugcucagguacaagauga

SEQ ID NO: 2146956 - RNA, 19 nt, Homo sapiens
  misc_RNA (1)...(19): siRNA sense strand
uggaggacuucaugaggaa

SEQ ID NO: 2146957 - RNA, 19 nt, Homo sapiens
  misc_RNA (1)...(19): siRNA sense strand
acaagaccauggaguuugg

SEQ ID NO: 2146958 - RNA, 19 nt, Homo sapiens
  misc_RNA (1)...(19): siRNA sense strand
gcaggaacaggaagaguac

SEQ ID NO: 2146959 - RNA, 19 nt, Homo sapiens
  misc_RNA (1)...(19): siRNA sense strand
ucaacaguuucgagcaguu

SEQ ID NO: 2146960 - RNA, 19 nt, Homo sapiens
  misc_RNA (1)...(19): siRNA sense strand
gcagugaccgaggccauga

SEQ ID NO: 2146961 - RNA, 19 nt, Homo sapiens
  misc_RNA (1)...(19): siRNA sense strand
caucgcugcugucaccaau

SEQ ID NO: 2146962 - RNA, 19 nt, Homo sapiens
  misc_RNA (1)...(19): siRNA sense strand
gaaccgcuuccacaagauc

SEQ ID NO: 2146963 - RNA, 19 nt, Homo sapiens
  misc_RNA (1)...(19): siRNA sense strand
ccugcuggcucgcacaguu

SEQ ID NO: 2146964 - RNA, 19 nt, Homo sapiens
  misc_RNA (1)...(19): siRNA sense strand
acagugccuuggacaguga

SEQ ID NO: 2146965 - RNA, 19 nt, Homo sapiens
  misc_RNA (1)...(19): siRNA sense strand
gagaggcagugaggacaag

SEQ ID NO: 2146966 - RNA, 19 nt, Homo sapiens
  misc_RNA (1)...(19): siRNA sense strand
gcuggaggccuuuggcaau

SEQ ID NO: 2146967 - RNA, 19 nt, Homo sapiens
  misc_RNA (1)...(19): siRNA sense strand
acaagaugaccugugaaua

SEQ ID NO: 2146968 - RNA, 19 nt, Homo sapiens
  misc_RNA (1)...(19): siRNA sense strand
acccugcuguauacaauuu

SEQ ID NO: 2146969 - RNA, 19 nt, Homo sapiens
  misc_RNA (1)...(19): siRNA sense strand
guauggcaaaccugacuuu

SEQ ID NO: 2146970 - RNA, 19 nt, Homo sapiens
  misc_RNA (1)...(19): siRNA sense strand
cugaggccaucgccaggua

SEQ ID NO: 2146971 - RNA, 19 nt, Homo sapiens
  misc_RNA (1)...(19): siRNA sense strand
cuacgggcgugaccuugug

SEQ ID NO: 2146972 - RNA, 19 nt, Homo sapiens
  misc_RNA (1)...(19): siRNA sense strand
gcccaaugaggacaaggua

SEQ ID NO: 2146973 - RNA, 19 nt, Homo sapiens
  misc_RNA (1)...(19): siRNA sense strand
agggugggcugcagaagga

SEQ ID NO: 2146974 - RNA, 19 nt, Homo sapiens
  misc_RNA (1)...(19): siRNA sense strand
ccagggccgugagcucuau

SEQ ID NO: 2146975 - RNA, 19 nt, Homo sapiens
  misc_RNA (1)...(19): siRNA sense strand
gggaagacagaagccagua

SEQ ID NO: 2146976 - RNA, 19 nt, Homo sapiens
  misc_RNA (1)...(19): siRNA sense strand
gggagcaggacucaacaug

SEQ ID NO: 2146977 - RNA, 19 nt, Homo sapiens
  misc_RNA (1)...(19): siRNA sense strand
ccacgccuucuaccaauug

SEQ ID NO: 2146978 - RNA, 19 nt, Homo sapiens
  misc_RNA (1)...(19): siRNA sense strand
gcagcacgugggugaaaga

SEQ ID NO: 2146979 - RNA, 19 nt, Homo sapiens
  misc_RNA (1)...(19): siRNA sense strand
ucauugugcugcuauugca

SEQ ID NO: 2146980 - RNA, 19 nt, Homo sapiens
  misc_RNA (1)...(19): siRNA sense strand
uggcagagcguugaguauu

SEQ ID NO: 2146981 - RNA, 19 nt, Homo sapiens
  misc_RNA (1)...(19): siRNA sense strand
ggacaccugcaucgucauc

SEQ ID NO: 2146982 - RNA, 19 nt, Homo sapiens
  misc_RNA (1)...(19): siRNA sense strand
ccauauugcaccugggaaa

SEQ ID NO: 2146983 - RNA, 19 nt, Homo sapiens
  misc_RNA (1)...(19): siRNA sense strand
acacauccacagcuaccua

SEQ ID NO: 2146984 - RNA, 19 nt, Homo sapiens
  misc_RNA (1)...(19): siRNA sense strand
ugacaaucccacagcauca

SEQ ID NO: 2146985 - RNA, 19 nt, Homo sapiens
  misc_RNA (1)...(19): siRNA sense strand
ggaggcagggaacucauag

SEQ ID NO: 2146986 - RNA, 19 nt, Homo sapiens
  misc_RNA (1)...(19): siRNA sense strand
uggcaaggacacagucauu

SEQ ID NO: 2146987 - RNA, 19 nt, Homo sapiens
  misc_RNA (1)...(19): siRNA sense strand
gcagccagagcccgauuuc

SEQ ID NO: 2146988 - RNA, 19 nt, Homo sapiens
  misc_RNA (1)...(19): siRNA sense strand
cagaccagcaccucuacaa

SEQ ID NO: 2146989 - RNA, 19 nt, Homo sapiens
  misc_RNA (1)...(19): siRNA sense strand
ccuguuugcucagcgacua

SEQ ID NO: 2146990 - RNA, 19 nt, Homo sapiens
  misc_RNA (1)...(19): siRNA sense strand
caacuacugcaacgagaag

SEQ ID NO: 2146991 - RNA, 19 nt, Homo sapiens
  misc_RNA (1)...(19): siRNA sense strand
ccagggagcaggacucaac

SEQ ID NO: 2146992 - RNA, 19 nt, Homo sapiens
  misc_RNA (1)...(19): siRNA sense strand
ugagggcuaucuacaccau

SEQ ID NO: 2146993 - RNA, 19 nt, Homo sapiens
  misc_RNA (1)...(19): siRNA sense strand
ggcaaggacacagucauug

SEQ ID NO: 2146994 - RNA, 19 nt, Homo sapiens
  misc_RNA (1)...(19): siRNA sense strand
ggccgcaucuacaccuaca

SEQ ID NO: 2146995 - RNA, 19 nt, Homo sapiens
  misc_RNA (1)...(19): siRNA sense strand
gagcagccagagcccgauu

SEQ ID NO: 2146996 - RNA, 19 nt, Homo sapiens
  misc_RNA (1)...(19): siRNA sense strand
caucacugaccgaaucuuc

SEQ ID NO: 2146997 - RNA, 19 nt, Homo sapiens
  misc_RNA (1)...(19): siRNA sense strand
agacacuucaggacaaaga

SEQ ID NO: 2146998 - RNA, 19 nt, Homo sapiens
  misc_RNA (1)...(19): siRNA sense strand
gcacaucaugcaguacauc

SEQ ID NO: 2146999 - RNA, 19 nt, Homo sapiens
  misc_RNA (1)...(19): siRNA sense strand
gaauugaucucagaaguaa

SEQ ID NO: 2147000 - RNA, 19 nt, Homo sapiens
  misc_RNA (1)...(19): siRNA sense strand
ggaaguaggugaggccuua

SEQ ID NO: 2147001 - RNA, 19 nt, Homo sapiens
  misc_RNA (1)...(19): siRNA sense strand
ggaauugaucucagaagua

SEQ ID NO: 2147002 - RNA, 19 nt, Homo sapiens
  misc_RNA (1)...(19): siRNA sense strand
ccaaagaccuggccuugca

SEQ ID NO: 2147003 - RNA, 19 nt, Homo sapiens
  misc_RNA (1)...(19): siRNA sense strand
gaaaggcaaugucaaagcu

SEQ ID NO: 2147004 - RNA, 19 nt, Homo sapiens
  misc_RNA (1)...(19): siRNA sense strand
agacacagaucucucauca

SEQ ID NO: 2147005 - RNA, 19 nt, Homo sapiens
  misc_RNA (1)...(19): siRNA sense strand
gaagagggccuugcuuuag

SEQ ID NO: 2147006 - RNA, 19 nt, Homo sapiens
  misc_RNA (1)...(19): siRNA sense strand
gacaggaauugaucucaga

SEQ ID NO: 2147007 - RNA, 19 nt, Homo sapiens
  misc_RNA (1)...(19): siRNA sense strand
gaacuugaaggaagaagga

SEQ ID NO: 2147008 - RNA, 19 nt, Homo sapiens
  misc_RNA (1)...(19): siRNA sense strand
gaacauccucuuugucauc

SEQ ID NO: 2147009 - RNA, 19 nt, Homo sapiens
  misc_RNA (1)...(19): siRNA sense strand
cagaagagggccuugcuuu

SEQ ID NO: 2147010 - RNA, 19 nt, Homo sapiens
  misc_RNA (1)...(19): siRNA sense strand
agaagagggccuugcuuua

SEQ ID NO: 2147011 - RNA, 19 nt, Homo sapiens
  misc_RNA (1)...(19): siRNA sense strand
gaucucagaaguaacagaa

SEQ ID NO: 2147012 - RNA, 19 nt, Homo sapiens
  misc_RNA (1)...(19): siRNA sense strand
gggcaucagcgagaucuua

SEQ ID NO: 2147013 - RNA, 19 nt, Homo sapiens
  misc_RNA (1)...(19): siRNA sense strand
ggaagacucuguggaagac

SEQ ID NO: 2147014 - RNA, 19 nt, Homo sapiens
  misc_RNA (1)...(19): siRNA sense strand
gaagaaacaagccucacau

SEQ ID NO: 2147015 - RNA, 19 nt, Homo sapiens
  misc_RNA (1)...(19): siRNA sense strand
ucucagaaguaacagaaga

SEQ ID NO: 2147016 - RNA, 19 nt, Homo sapiens
  misc_RNA (1)...(19): siRNA sense strand
acacuuauguggucuuugg

SEQ ID NO: 2147017 - RNA, 19 nt, Homo sapiens
  misc_RNA (1)...(19): siRNA sense strand
ccaggaagacucuguggaa

SEQ ID NO: 2147018 - RNA, 19 nt, Homo sapiens
  misc_RNA (1)...(19): siRNA sense strand
ggaagaaacaagccucaca

SEQ ID NO: 2147019 - RNA, 19 nt, Homo sapiens
  misc_RNA (1)...(19): siRNA sense strand
caccauggcucagcaggaa

SEQ ID NO: 2147020 - RNA, 19 nt, Homo sapiens
  misc_RNA (1)...(19): siRNA sense strand
ggacgagcaggacaucuug

SEQ ID NO: 2147021 - RNA, 19 nt, Homo sapiens
  misc_RNA (1)...(19): siRNA sense strand
gaccuggccuugcagaucu

SEQ ID NO: 2147022 - RNA, 19 nt, Homo sapiens
  misc_RNA (1)...(19): siRNA sense strand
agaaacaagccucacauug

SEQ ID NO: 2147023 - RNA, 19 nt, Homo sapiens
  misc_RNA (1)...(19): siRNA sense strand
gaaugcagcccucccuaca

SEQ ID NO: 2147024 - RNA, 19 nt, Homo sapiens
  misc_RNA (1)...(19): siRNA sense strand
ggaacugcgugacauugag

SEQ ID NO: 2147025 - RNA, 19 nt, Homo sapiens
  misc_RNA (1)...(19): siRNA sense strand
cgccaagccugaugucuuc

SEQ ID NO: 2147026 - RNA, 19 nt, Homo sapiens
  misc_RNA (1)...(19): siRNA sense strand
caagguggccuccauggau

SEQ ID NO: 2147027 - RNA, 19 nt, Homo sapiens
  misc_RNA (1)...(19): siRNA sense strand
aggcugagcugcgggauga

SEQ ID NO: 2147028 - RNA, 19 nt, Homo sapiens
  misc_RNA (1)...(19): siRNA sense strand
gggugaggcuggagugcaa

SEQ ID NO: 2147029 - RNA, 19 nt, Homo sapiens
  misc_RNA (1)...(19): siRNA sense strand
ugagagacaaccacaguga

SEQ ID NO: 2147030 - RNA, 19 nt, Homo sapiens
  misc_RNA (1)...(19): siRNA sense strand
cccucgggcuccuacauua

SEQ ID NO: 2147031 - RNA, 19 nt, Homo sapiens
  misc_RNA (1)...(19): siRNA sense strand
cgaaguacccaguguccuu

SEQ ID NO: 2147032 - RNA, 19 nt, Homo sapiens
  misc_RNA (1)...(19): siRNA sense strand
gaaauagcagaagcccuuu

SEQ ID NO: 2147033 - RNA, 19 nt, Homo sapiens
  misc_RNA (1)...(19): siRNA sense strand
ccagggcagccucaucuuu

SEQ ID NO: 2147034 - RNA, 19 nt, Homo sapiens
  misc_RNA (1)...(19): siRNA sense strand
gagaagaaggcccgaaagg

SEQ ID NO: 2147035 - RNA, 19 nt, Homo sapiens
  misc_RNA (1)...(19): siRNA sense strand
gaccaccuaugcccugcuu

SEQ ID NO: 2147036 - RNA, 19 nt, Homo sapiens
  misc_RNA (1)...(19): siRNA sense strand
ucacguuccugcccagcaa

SEQ ID NO: 2147037 - RNA, 19 nt, Homo sapiens
  misc_RNA (1)...(19): siRNA sense strand
ggccagcaccugaggagaa

SEQ ID NO: 2147038 - RNA, 19 nt, Homo sapiens
  misc_RNA (1)...(19): siRNA sense strand
ggacagcugggccucuuca

SEQ ID NO: 2147039 - RNA, 19 nt, Homo sapiens
  misc_RNA (1)...(19): siRNA sense strand
gaagaugcggauuccacuu

SEQ ID NO: 2147040 - RNA, 19 nt, Homo sapiens
  misc_RNA (1)...(19): siRNA sense strand
ggagugcaaggaagaggaa

SEQ ID NO: 2147041 - RNA, 19 nt, Homo sapiens
  misc_RNA (1)...(19): siRNA sense strand
ggaagaggaggaggaggaa

SEQ ID NO: 2147042 - RNA, 19 nt, Homo sapiens
  misc_RNA (1)...(19): siRNA sense strand
ccagagacaggaauugauc

SEQ ID NO: 2147043 - RNA, 19 nt, Homo sapiens
  misc_RNA (1)...(19): siRNA sense strand
aggagacccuggagguuga

SEQ ID NO: 2147044 - RNA, 19 nt, Homo sapiens
  misc_RNA (1)...(19): siRNA sense strand
ccgcagcugagaaguuuaa

SEQ ID NO: 2147045 - RNA, 19 nt, Homo sapiens
  misc_RNA (1)...(19): siRNA sense strand
agccgcagcugagaaguuu

SEQ ID NO: 2147046 - RNA, 19 nt, Homo sapiens
  misc_RNA (1)...(19): siRNA sense strand
uggacuuccuggccaauga

SEQ ID NO: 2147047 - RNA, 19 nt, Homo sapiens
  misc_RNA (1)...(19): siRNA sense strand
gcccagccucagacacuua

SEQ ID NO: 2147048 - RNA, 19 nt, Homo sapiens
  misc_RNA (1)...(19): siRNA sense strand
gugagaagaaggcccgaaa

SEQ ID NO: 2147049 - RNA, 19 nt, Homo sapiens
  misc_RNA (1)...(19): siRNA sense strand
uguccagacucuccucaga

SEQ ID NO: 2147050 - RNA, 19 nt, Homo sapiens
  misc_RNA (1)...(19): siRNA sense strand
cagcugagaaguuuaaggu

SEQ ID NO: 2147051 - RNA, 19 nt, Homo sapiens
  misc_RNA (1)...(19): siRNA sense strand
caaagccgcagcugagaag

SEQ ID NO: 2147052 - RNA, 19 nt, Homo sapiens
  misc_RNA (1)...(19): siRNA sense strand
aagcagagucgcagugaga

SEQ ID NO: 2147053 - RNA, 19 nt, Homo sapiens
  misc_RNA (1)...(19): siRNA sense strand
ccaccaagaccaccuaugc

SEQ ID NO: 2147054 - RNA, 19 nt, Homo sapiens
  misc_RNA (1)...(19): siRNA sense strand
aagaugcggauuccacuuu

SEQ ID NO: 2147055 - RNA, 19 nt, Homo sapiens
  misc_RNA (1)...(19): siRNA sense strand
ccaggacuccguuaugaca

SEQ ID NO: 2147056 - RNA, 19 nt, Homo sapiens
  misc_RNA (1)...(19): siRNA sense strand
ccaggagggccacuucuuc

SEQ ID NO: 2147057 - RNA, 19 nt, Homo sapiens
  misc_RNA (1)...(19): siRNA sense strand
ggaggaaagaggccugagu

SEQ ID NO: 2147058 - RNA, 19 nt, Homo sapiens
  misc_RNA (1)...(19): siRNA sense strand
acgcagaggcagaugauga

SEQ ID NO: 2147059 - RNA, 19 nt, Homo sapiens
  misc_RNA (1)...(19): siRNA sense strand
acaagacacagaucucuca

SEQ ID NO: 2147060 - RNA, 19 nt, Homo sapiens
  misc_RNA (1)...(19): siRNA sense strand
ucugcagccuccucugauu

SEQ ID NO: 2147061 - RNA, 19 nt, Homo sapiens
  misc_RNA (1)...(19): siRNA sense strand
aguuuaaggugcccucaga

SEQ ID NO: 2147062 - RNA, 19 nt, Homo sapiens
  misc_RNA (1)...(19): siRNA sense strand
cagacucuccucagaacuu

SEQ ID NO: 2147063 - RNA, 19 nt, Homo sapiens
  misc_RNA (1)...(19): siRNA sense strand
aggaauugaucucagaagu

SEQ ID NO: 2147064 - RNA, 19 nt, Homo sapiens
  misc_RNA (1)...(19): siRNA sense strand
ucaagagcccagccucaga

SEQ ID NO: 2147065 - RNA, 19 nt, Homo sapiens
  misc_RNA (1)...(19): siRNA sense strand
ccaagcagagucgcaguga

SEQ ID NO: 2147066 - RNA, 19 nt, Homo sapiens
  misc_RNA (1)...(19): siRNA sense strand
ccaggacuccgcuaugaca

SEQ ID NO: 2147067 - RNA, 19 nt, Homo sapiens
  misc_RNA (1)...(19): siRNA sense strand
ccaggacuccgcuaugaca

SEQ ID NO: 2147068 - RNA, 19 nt, Homo sapiens
  misc_RNA (1)...(19): siRNA sense strand
ccaggacuccgcuaugaca

SEQ ID NO: 2147069 - RNA, 19 nt, Homo sapiens
  misc_RNA (1)...(19): siRNA sense strand
ccaggacuccgcuaugaca

SEQ ID NO: 2147070 - RNA, 19 nt, Homo sapiens
  misc_RNA (1)...(19): siRNA sense strand
ccaggacuccgcuaugaca

SEQ ID NO: 2147071 - RNA, 19 nt, Homo sapiens
  misc_RNA (1)...(19): siRNA sense strand
ccaggacuccgcuaugaca

SEQ ID NO: 2147072 - RNA, 19 nt, Homo sapiens
  misc_RNA (1)...(19): siRNA sense strand
ccaggacuccgcuaugaca

SEQ ID NO: 2147073 - RNA, 19 nt, Homo sapiens
  misc_RNA (1)...(19): siRNA sense strand
cagggcagccucaucuuuc

SEQ ID NO: 2147074 - RNA, 19 nt, Homo sapiens
  misc_RNA (1)...(19): siRNA sense strand
ccaggacuccgcuaugaca

SEQ ID NO: 2147075 - RNA, 19 nt, Homo sapiens
  misc_RNA (1)...(19): siRNA sense strand
aagaaacaagccucacauu

SEQ ID NO: 2147076 - RNA, 19 nt, Homo sapiens
  misc_RNA (1)...(19): siRNA sense strand
agacucuccucagaacuug

SEQ ID NO: 2147077 - RNA, 19 nt, Homo sapiens
  misc_RNA (1)...(19): siRNA sense strand
cccgaaaggcaaugucaaa

SEQ ID NO: 2147078 - RNA, 19 nt, Homo sapiens
  misc_RNA (1)...(19): siRNA sense strand
gcacaggaagaugcggauu

SEQ ID NO: 2147079 - RNA, 19 nt, Homo sapiens
  misc_RNA (1)...(19): siRNA sense strand
aagagggccuugcuuuagg

SEQ ID NO: 2147080 - RNA, 19 nt, Homo sapiens
  misc_RNA (1)...(19): siRNA sense strand
gacccugauuccuucuuca

SEQ ID NO: 2147081 - RNA, 19 nt, Homo sapiens
  misc_RNA (1)...(19): siRNA sense strand
gagcccagccucagacacu

SEQ ID NO: 2147082 - RNA, 19 nt, Homo sapiens
  misc_RNA (1)...(19): siRNA sense strand
gaggagaccaucgccaaag

SEQ ID NO: 2147083 - RNA, 19 nt, Homo sapiens
  misc_RNA (1)...(19): siRNA sense strand
agaugcggauuccacuuug

SEQ ID NO: 2147084 - RNA, 19 nt, Homo sapiens
  misc_RNA (1)...(19): siRNA sense strand
ccucuucacccuccuguuc

SEQ ID NO: 2147085 - RNA, 19 nt, Homo sapiens
  misc_RNA (1)...(19): siRNA sense strand
caagccugaugucuucaag

SEQ ID NO: 2147086 - RNA, 19 nt, Homo sapiens
  misc_RNA (1)...(19): siRNA sense strand
cucagaacuugaaggaaga

SEQ ID NO: 2147087 - RNA, 19 nt, Homo sapiens
  misc_RNA (1)...(19): siRNA sense strand
gcuggaacugcgugacauu

SEQ ID NO: 2147088 - RNA, 19 nt, Homo sapiens
  misc_RNA (1)...(19): siRNA sense strand
aagaggaggaggaggaaga

SEQ ID NO: 2147089 - RNA, 19 nt, Homo sapiens
  misc_RNA (1)...(19): siRNA sense strand
cagagucgcagugagaaga

SEQ ID NO: 2147090 - RNA, 19 nt, Homo sapiens
  misc_RNA (1)...(19): siRNA sense strand
ccgagcagcaagaggauga

SEQ ID NO: 2147091 - RNA, 19 nt, Homo sapiens
  misc_RNA (1)...(19): siRNA sense strand
gcagaagcugggacaccuu

SEQ ID NO: 2147092 - RNA, 19 nt, Homo sapiens
  misc_RNA (1)...(19): siRNA sense strand
gccagcaccugaggagaag

SEQ ID NO: 2147093 - RNA, 19 nt, Homo sapiens
  misc_RNA (1)...(19): siRNA sense strand
ugaggagaccaucgccaaa

SEQ ID NO: 2147094 - RNA, 19 nt, Homo sapiens
  misc_RNA (1)...(19): siRNA sense strand
aggacagccuggaggaaga

SEQ ID NO: 2147095 - RNA, 19 nt, Homo sapiens
  misc_RNA (1)...(19): siRNA sense strand
gaugcggauuccacuuugg

SEQ ID NO: 2147096 - RNA, 19 nt, Homo sapiens
  misc_RNA (1)...(19): siRNA sense strand
gcaccugaggagaagaaug

SEQ ID NO: 2147097 - RNA, 19 nt, Homo sapiens
  misc_RNA (1)...(19): siRNA sense strand
acaaagccgcagcugagaa

SEQ ID NO: 2147098 - RNA, 19 nt, Homo sapiens
  misc_RNA (1)...(19): siRNA sense strand
gaggcuggagugcaaggaa

SEQ ID NO: 2147099 - RNA, 19 nt, Homo sapiens
  misc_RNA (1)...(19): siRNA sense strand
gcaaagagaggcugaggaa

SEQ ID NO: 2147100 - RNA, 19 nt, Homo sapiens
  misc_RNA (1)...(19): siRNA sense strand
gggcaucaguguuaucuca

SEQ ID NO: 2147101 - RNA, 19 nt, Homo sapiens
  misc_RNA (1)...(19): siRNA sense strand
caaaguaucugagcaaagc

SEQ ID NO: 2147102 - RNA, 19 nt, Homo sapiens
  misc_RNA (1)...(19): siRNA sense strand
acaguucaccuaccaauuu

SEQ ID NO: 2147103 - RNA, 19 nt, Homo sapiens
  misc_RNA (1)...(19): siRNA sense strand
acucggagauacuggauaa

SEQ ID NO: 2147104 - RNA, 19 nt, Homo sapiens
  misc_RNA (1)...(19): siRNA sense strand
gcaaugguuauaaggauga

SEQ ID NO: 2147105 - RNA, 19 nt, Homo sapiens
  misc_RNA (1)...(19): siRNA sense strand
gaucccaggucucagcaau

SEQ ID NO: 2147106 - RNA, 19 nt, Homo sapiens
  misc_RNA (1)...(19): siRNA sense strand
gaacacaagcaaggaacuu

SEQ ID NO: 2147107 - RNA, 19 nt, Homo sapiens
  misc_RNA (1)...(19): siRNA sense strand
ucccaggucucagcaauuu

SEQ ID NO: 2147108 - RNA, 19 nt, Homo sapiens
  misc_RNA (1)...(19): siRNA sense strand
uagcaaugguuauaaggau

SEQ ID NO: 2147109 - RNA, 19 nt, Homo sapiens
  misc_RNA (1)...(19): siRNA sense strand
caagguggcaggcccgauu

SEQ ID NO: 2147110 - RNA, 19 nt, Homo sapiens
  misc_RNA (1)...(19): siRNA sense strand
caccagcagagcucaaaua

SEQ ID NO: 2147111 - RNA, 19 nt, Homo sapiens
  misc_RNA (1)...(19): siRNA sense strand
guuauaaggaugagugguu

SEQ ID NO: 2147112 - RNA, 19 nt, Homo sapiens
  misc_RNA (1)...(19): siRNA sense strand
ucaagccaaugguagcuau

SEQ ID NO: 2147113 - RNA, 19 nt, Homo sapiens
  misc_RNA (1)...(19): siRNA sense strand
aagagaggcugaggaacuu

SEQ ID NO: 2147114 - RNA, 19 nt, Homo sapiens
  misc_RNA (1)...(19): siRNA sense strand
cuccagggcaucaguguua

SEQ ID NO: 2147115 - RNA, 19 nt, Homo sapiens
  misc_RNA (1)...(19): siRNA sense strand
ucaaagcccagaagaaucu

SEQ ID NO: 2147116 - RNA, 19 nt, Homo sapiens
  misc_RNA (1)...(19): siRNA sense strand
gcaucaguguuaucucagu

SEQ ID NO: 2147117 - RNA, 19 nt, Homo sapiens
  misc_RNA (1)...(19): siRNA sense strand
gaaucuguaucugcaucaa

SEQ ID NO: 2147118 - RNA, 19 nt, Homo sapiens
  misc_RNA (1)...(19): siRNA sense strand
gaggaacacaagcaaggaa

SEQ ID NO: 2147119 - RNA, 19 nt, Homo sapiens
  misc_RNA (1)...(19): siRNA sense strand
ucucaaagcccagaagaau

SEQ ID NO: 2147120 - RNA, 19 nt, Homo sapiens
  misc_RNA (1)...(19): siRNA sense strand
uuuccaaacucauuagcaa

SEQ ID NO: 2147121 - RNA, 19 nt, Homo sapiens
  misc_RNA (1)...(19): siRNA sense strand
ccagugaagcgcucugaga

SEQ ID NO: 2147122 - RNA, 19 nt, Homo sapiens
  misc_RNA (1)...(19): siRNA sense strand
uggcaggcccgauuuguug

SEQ ID NO: 2147123 - RNA, 19 nt, Homo sapiens
  misc_RNA (1)...(19): siRNA sense strand
aaagagaggcugaggaacu

SEQ ID NO: 2147124 - RNA, 19 nt, Homo sapiens
  misc_RNA (1)...(19): siRNA sense strand
gagaggcugaggaacuuga

SEQ ID NO: 2147125 - RNA, 19 nt, Homo sapiens
  misc_RNA (1)...(19): siRNA sense strand
gaagaccuccagggcauca

SEQ ID NO: 2147126 - RNA, 19 nt, Homo sapiens
  misc_RNA (1)...(19): siRNA sense strand
cgacagccagccagcaaga

SEQ ID NO: 2147127 - RNA, 19 nt, Homo sapiens
  misc_RNA (1)...(19): siRNA sense strand
cagugaagcgcucugagaa

SEQ ID NO: 2147128 - RNA, 19 nt, Homo sapiens
  misc_RNA (1)...(19): siRNA sense strand
ggagauacuggauaaaaga

SEQ ID NO: 2147129 - RNA, 19 nt, Homo sapiens
  misc_RNA (1)...(19): siRNA sense strand
aaacaguucaccuaccaau

SEQ ID NO: 2147130 - RNA, 19 nt, Homo sapiens
  misc_RNA (1)...(19): siRNA sense strand
gcaauuugggagacucaca

SEQ ID NO: 2147131 - RNA, 19 nt, Homo sapiens
  misc_RNA (1)...(19): siRNA sense strand
uagcuaugcauccagaaga

SEQ ID NO: 2147132 - RNA, 19 nt, Homo sapiens
  misc_RNA (1)...(19): siRNA sense strand
ggcccgauuuguugaagca

SEQ ID NO: 2147133 - RNA, 19 nt, Homo sapiens
  misc_RNA (1)...(19): siRNA sense strand
gcaggcccgauuuguugaa

SEQ ID NO: 2147134 - RNA, 19 nt, Homo sapiens
  misc_RNA (1)...(19): siRNA sense strand
cugaggaacuugaaaagga

SEQ ID NO: 2147135 - RNA, 19 nt, Homo sapiens
  misc_RNA (1)...(19): siRNA sense strand
ccgauuuguugaagcacuu

SEQ ID NO: 2147136 - RNA, 19 nt, Homo sapiens
  misc_RNA (1)...(19): siRNA sense strand
ggacucggagauacuggau

SEQ ID NO: 2147137 - RNA, 19 nt, Homo sapiens
  misc_RNA (1)...(19): siRNA sense strand
accagcagagcucaaauaa

SEQ ID NO: 2147138 - RNA, 19 nt, Homo sapiens
  misc_RNA (1)...(19): siRNA sense strand
gaagaaucuguaucugcau

SEQ ID NO: 2147139 - RNA, 19 nt, Homo sapiens
  misc_RNA (1)...(19): siRNA sense strand
gcucuccaguggccuacuc

SEQ ID NO: 2147140 - RNA, 19 nt, Homo sapiens
  misc_RNA (1)...(19): siRNA sense strand
gcaaagagaggcugaggaa

SEQ ID NO: 2147141 - RNA, 19 nt, Homo sapiens
  misc_RNA (1)...(19): siRNA sense strand
gggcaucaguguuaucuca

SEQ ID NO: 2147142 - RNA, 19 nt, Homo sapiens
  misc_RNA (1)...(19): siRNA sense strand
caaaguaucugagcaaagc

SEQ ID NO: 2147143 - RNA, 19 nt, Homo sapiens
  misc_RNA (1)...(19): siRNA sense strand
acaguucaccuaccaauuu

SEQ ID NO: 2147144 - RNA, 19 nt, Homo sapiens
  misc_RNA (1)...(19): siRNA sense strand
acucggagauacuggauaa

SEQ ID NO: 2147145 - RNA, 19 nt, Homo sapiens
  misc_RNA (1)...(19): siRNA sense strand
gcaaugguuauaaggauga

SEQ ID NO: 2147146 - RNA, 19 nt, Homo sapiens
  misc_RNA (1)...(19): siRNA sense strand
gaucccaggucucagcaau

SEQ ID NO: 2147147 - RNA, 19 nt, Homo sapiens
  misc_RNA (1)...(19): siRNA sense strand
gaacacaagcaaggaacuu

SEQ ID NO: 2147148 - RNA, 19 nt, Homo sapiens
  misc_RNA (1)...(19): siRNA sense strand
ucccaggucucagcaauuu

SEQ ID NO: 2147149 - RNA, 19 nt, Homo sapiens
  misc_RNA (1)...(19): siRNA sense strand
uagcaaugguuauaaggau

SEQ ID NO: 2147150 - RNA, 19 nt, Homo sapiens
  misc_RNA (1)...(19): siRNA sense strand
caagguggcaggcccgauu

SEQ ID NO: 2147151 - RNA, 19 nt, Homo sapiens
  misc_RNA (1)...(19): siRNA sense strand
caccagcagagcucaaaua

SEQ ID NO: 2147152 - RNA, 19 nt, Homo sapiens
  misc_RNA (1)...(19): siRNA sense strand
guuauaaggaugagugguu

SEQ ID NO: 2147153 - RNA, 19 nt, Homo sapiens
  misc_RNA (1)...(19): siRNA sense strand
ucaagccaaugguagcuau

SEQ ID NO: 2147154 - RNA, 19 nt, Homo sapiens
  misc_RNA (1)...(19): siRNA sense strand
aagagaggcugaggaacuu

SEQ ID NO: 2147155 - RNA, 19 nt, Homo sapiens
  misc_RNA (1)...(19): siRNA sense strand
cuccagggcaucaguguua

SEQ ID NO: 2147156 - RNA, 19 nt, Homo sapiens
  misc_RNA (1)...(19): siRNA sense strand
ucaaagcccagaagaaucu

SEQ ID NO: 2147157 - RNA, 19 nt, Homo sapiens
  misc_RNA (1)...(19): siRNA sense strand
gcaucaguguuaucucagu

SEQ ID NO: 2147158 - RNA, 19 nt, Homo sapiens
  misc_RNA (1)...(19): siRNA sense strand
gaaucuguaucugcaucaa

SEQ ID NO: 2147159 - RNA, 19 nt, Homo sapiens
  misc_RNA (1)...(19): siRNA sense strand
gaggaacacaagcaaggaa

SEQ ID NO: 2147160 - RNA, 19 nt, Homo sapiens
  misc_RNA (1)...(19): siRNA sense strand
ucucaaagcccagaagaau

SEQ ID NO: 2147161 - RNA, 19 nt, Homo sapiens
  misc_RNA (1)...(19): siRNA sense strand
uuuccaaacucauuagcaa

SEQ ID NO: 2147162 - RNA, 19 nt, Homo sapiens
  misc_RNA (1)...(19): siRNA sense strand
ccagugaagcgcucugaga

SEQ ID NO: 2147163 - RNA, 19 nt, Homo sapiens
  misc_RNA (1)...(19): siRNA sense strand
uggcaggcccgauuuguug

SEQ ID NO: 2147164 - RNA, 19 nt, Homo sapiens
  misc_RNA (1)...(19): siRNA sense strand
aaagagaggcugaggaacu

SEQ ID NO: 2147165 - RNA, 19 nt, Homo sapiens
  misc_RNA (1)...(19): siRNA sense strand
gagaggcugaggaacuuga

SEQ ID NO: 2147166 - RNA, 19 nt, Homo sapiens
  misc_RNA (1)...(19): siRNA sense strand
gaagaccuccagggcauca

SEQ ID NO: 2147167 - RNA, 19 nt, Homo sapiens
  misc_RNA (1)...(19): siRNA sense strand
cgacagccagccagcaaga

SEQ ID NO: 2147168 - RNA, 19 nt, Homo sapiens
  misc_RNA (1)...(19): siRNA sense strand
cagugaagcgcucugagaa

SEQ ID NO: 2147169 - RNA, 19 nt, Homo sapiens
  misc_RNA (1)...(19): siRNA sense strand
ggagauacuggauaaaaga

SEQ ID NO: 2147170 - RNA, 19 nt, Homo sapiens
  misc_RNA (1)...(19): siRNA sense strand
aaacaguucaccuaccaau

SEQ ID NO: 2147171 - RNA, 19 nt, Homo sapiens
  misc_RNA (1)...(19): siRNA sense strand
gcaauuugggagacucaca

SEQ ID NO: 2147172 - RNA, 19 nt, Homo sapiens
  misc_RNA (1)...(19): siRNA sense strand
uagcuaugcauccagaaga

SEQ ID NO: 2147173 - RNA, 19 nt, Homo sapiens
  misc_RNA (1)...(19): siRNA sense strand
ggcccgauuuguugaagca

SEQ ID NO: 2147174 - RNA, 19 nt, Homo sapiens
  misc_RNA (1)...(19): siRNA sense strand
gcaggcccgauuuguugaa

SEQ ID NO: 2147175 - RNA, 19 nt, Homo sapiens
  misc_RNA (1)...(19): siRNA sense strand
cugaggaacuugaaaagga

SEQ ID NO: 2147176 - RNA, 19 nt, Homo sapiens
  misc_RNA (1)...(19): siRNA sense strand
ccgauuuguugaagcacuu

SEQ ID NO: 2147177 - RNA, 19 nt, Homo sapiens
  misc_RNA (1)...(19): siRNA sense strand
ggacucggagauacuggau

SEQ ID NO: 2147178 - RNA, 19 nt, Homo sapiens
  misc_RNA (1)...(19): siRNA sense strand
accagcagagcucaaauaa

SEQ ID NO: 2147179 - RNA, 19 nt, Homo sapiens
  misc_RNA (1)...(19): siRNA sense strand
gaagaaucuguaucugcau

SEQ ID NO: 2147180 - RNA, 19 nt, Homo sapiens
  misc_RNA (1)...(19): siRNA sense strand
gcucuccaguggccuacuc

SEQ ID NO: 2147181 - RNA, 19 nt, Homo sapiens
  misc_RNA (1)...(19): siRNA sense strand
ggucaucuauuucuucaua

SEQ ID NO: 2147182 - RNA, 19 nt, Homo sapiens
  misc_RNA (1)...(19): siRNA sense strand
ggaacacugucuacacaug

SEQ ID NO: 2147183 - RNA, 19 nt, Homo sapiens
  misc_RNA (1)...(19): siRNA sense strand
caucuggcaucucuuugua

SEQ ID NO: 2147184 - RNA, 19 nt, Homo sapiens
  misc_RNA (1)...(19): siRNA sense strand
agaccaagguguccaaaug

SEQ ID NO: 2147185 - RNA, 19 nt, Homo sapiens
  misc_RNA (1)...(19): siRNA sense strand
gcaucucuuuguagcauuu

SEQ ID NO: 2147186 - RNA, 19 nt, Homo sapiens
  misc_RNA (1)...(19): siRNA sense strand
gguaccagcccacagagua

SEQ ID NO: 2147187 - RNA, 19 nt, Homo sapiens
  misc_RNA (1)...(19): siRNA sense strand
gaaauacgcgagguucaug

SEQ ID NO: 2147188 - RNA, 19 nt, Homo sapiens
  misc_RNA (1)...(19): siRNA sense strand
caccaucuaugucuucuuc

SEQ ID NO: 2147189 - RNA, 19 nt, Homo sapiens
  misc_RNA (1)...(19): siRNA sense strand
gaacacugucuacacaugu

SEQ ID NO: 2147190 - RNA, 19 nt, Homo sapiens
  misc_RNA (1)...(19): siRNA sense strand
gaccaagguguccaaauga

SEQ ID NO: 2147191 - RNA, 19 nt, Homo sapiens
  misc_RNA (1)...(19): siRNA sense strand
guggaacacugucuacaca

SEQ ID NO: 2147192 - RNA, 19 nt, Homo sapiens
  misc_RNA (1)...(19): siRNA sense strand
uggcuggucuggauuaugg

SEQ ID NO: 2147193 - RNA, 19 nt, Homo sapiens
  misc_RNA (1)...(19): siRNA sense strand
uuguggagcuucucugcua

SEQ ID NO: 2147194 - RNA, 19 nt, Homo sapiens
  misc_RNA (1)...(19): siRNA sense strand
ccaucuaugucuucuucuu

SEQ ID NO: 2147195 - RNA, 19 nt, Homo sapiens
  misc_RNA (1)...(19): siRNA sense strand
cacaccaucuccuggaaga

SEQ ID NO: 2147196 - RNA, 19 nt, Homo sapiens
  misc_RNA (1)...(19): siRNA sense strand
ccagcacccugcagaccaa

SEQ ID NO: 2147197 - RNA, 19 nt, Homo sapiens
  misc_RNA (1)...(19): siRNA sense strand
guaccagcccacagaguau

SEQ ID NO: 2147198 - RNA, 19 nt, Homo sapiens
  misc_RNA (1)...(19): siRNA sense strand
gaugguggaacacugucua

SEQ ID NO: 2147199 - RNA, 19 nt, Homo sapiens
  misc_RNA (1)...(19): siRNA sense strand
gugcugguacccacuacua

SEQ ID NO: 2147200 - RNA, 19 nt, Homo sapiens
  misc_RNA (1)...(19): siRNA sense strand
gggcauggucuucuucaag

SEQ ID NO: 2147201 - RNA, 19 nt, Homo sapiens
  misc_RNA (1)...(19): siRNA sense strand
gcuccaaccucuacuuccu

SEQ ID NO: 2147202 - RNA, 19 nt, Homo sapiens
  misc_RNA (1)...(19): siRNA sense strand
gcugguacccacuacuaug

SEQ ID NO: 2147203 - RNA, 19 nt, Homo sapiens
  misc_RNA (1)...(19): siRNA sense strand
gggcagcuccaaccucuac

SEQ ID NO: 2147204 - RNA, 19 nt, Homo sapiens
  misc_RNA (1)...(19): siRNA sense strand
agagguaccagcccacaga

SEQ ID NO: 2147205 - RNA, 19 nt, Homo sapiens
  misc_RNA (1)...(19): siRNA sense strand
cgaaauacgcgagguucau

SEQ ID NO: 2147206 - RNA, 19 nt, Homo sapiens
  misc_RNA (1)...(19): siRNA sense strand
gcccacagaguaugaacau

SEQ ID NO: 2147207 - RNA, 19 nt, Homo sapiens
  misc_RNA (1)...(19): siRNA sense strand
acuaugccaucuggaggua

SEQ ID NO: 2147208 - RNA, 19 nt, Homo sapiens
  misc_RNA (1)...(19): siRNA sense strand
uggcaucucuuuguagcau

SEQ ID NO: 2147209 - RNA, 19 nt, Homo sapiens
  misc_RNA (1)...(19): siRNA sense strand
gcagcuccaaccucuacuu

SEQ ID NO: 2147210 - RNA, 19 nt, Homo sapiens
  misc_RNA (1)...(19): siRNA sense strand
caucuaugucuucuucuuc

SEQ ID NO: 2147211 - RNA, 19 nt, Homo sapiens
  misc_RNA (1)...(19): siRNA sense strand
gggcaccaucuaugucuuc

SEQ ID NO: 2147212 - RNA, 19 nt, Homo sapiens
  misc_RNA (1)...(19): siRNA sense strand
ggucaucuauuucuucaua

SEQ ID NO: 2147213 - RNA, 19 nt, Homo sapiens
  misc_RNA (1)...(19): siRNA sense strand
ggaacacugucuacacaug

SEQ ID NO: 2147214 - RNA, 19 nt, Homo sapiens
  misc_RNA (1)...(19): siRNA sense strand
caucuggcaucucuuugua

SEQ ID NO: 2147215 - RNA, 19 nt, Homo sapiens
  misc_RNA (1)...(19): siRNA sense strand
agaccaagguguccaaaug

SEQ ID NO: 2147216 - RNA, 19 nt, Homo sapiens
  misc_RNA (1)...(19): siRNA sense strand
gcaucucuuuguagcauuu

SEQ ID NO: 2147217 - RNA, 19 nt, Homo sapiens
  misc_RNA (1)...(19): siRNA sense strand
gguaccagcccacagagua

SEQ ID NO: 2147218 - RNA, 19 nt, Homo sapiens
  misc_RNA (1)...(19): siRNA sense strand
gaaauacgcgagguucaug

SEQ ID NO: 2147219 - RNA, 19 nt, Homo sapiens
  misc_RNA (1)...(19): siRNA sense strand
caccaucuaugucuucuuc

SEQ ID NO: 2147220 - RNA, 19 nt, Homo sapiens
  misc_RNA (1)...(19): siRNA sense strand
gaacacugucuacacaugu

SEQ ID NO: 2147221 - RNA, 19 nt, Homo sapiens
  misc_RNA (1)...(19): siRNA sense strand
gaccaagguguccaaauga

SEQ ID NO: 2147222 - RNA, 19 nt, Homo sapiens
  misc_RNA (1)...(19): siRNA sense strand
guggaacacugucuacaca

SEQ ID NO: 2147223 - RNA, 19 nt, Homo sapiens
  misc_RNA (1)...(19): siRNA sense strand
uggcuggucuggauuaugg

SEQ ID NO: 2147224 - RNA, 19 nt, Homo sapiens
  misc_RNA (1)...(19): siRNA sense strand
uuguggagcuucucugcua

SEQ ID NO: 2147225 - RNA, 19 nt, Homo sapiens
  misc_RNA (1)...(19): siRNA sense strand
ccaucuaugucuucuucuu

SEQ ID NO: 2147226 - RNA, 19 nt, Homo sapiens
  misc_RNA (1)...(19): siRNA sense strand
cacaccaucuccuggaaga

SEQ ID NO: 2147227 - RNA, 19 nt, Homo sapiens
  misc_RNA (1)...(19): siRNA sense strand
ccagcacccugcagaccaa

SEQ ID NO: 2147228 - RNA, 19 nt, Homo sapiens
  misc_RNA (1)...(19): siRNA sense strand
guaccagcccacagaguau

SEQ ID NO: 2147229 - RNA, 19 nt, Homo sapiens
  misc_RNA (1)...(19): siRNA sense strand
gaugguggaacacugucua

SEQ ID NO: 2147230 - RNA, 19 nt, Homo sapiens
  misc_RNA (1)...(19): siRNA sense strand
gugcugguacccacuacua

SEQ ID NO: 2147231 - RNA, 19 nt, Homo sapiens
  misc_RNA (1)...(19): siRNA sense strand
gggcauggucuucuucaag

SEQ ID NO: 2147232 - RNA, 19 nt, Homo sapiens
  misc_RNA (1)...(19): siRNA sense strand
gcuccaaccucuacuuccu

SEQ ID NO: 2147233 - RNA, 19 nt, Homo sapiens
  misc_RNA (1)...(19): siRNA sense strand
gcugguacccacuacuaug

SEQ ID NO: 2147234 - RNA, 19 nt, Homo sapiens
  misc_RNA (1)...(19): siRNA sense strand
gggcagcuccaaccucuac

SEQ ID NO: 2147235 - RNA, 19 nt, Homo sapiens
  misc_RNA (1)...(19): siRNA sense strand
agagguaccagcccacaga

SEQ ID NO: 2147236 - RNA, 19 nt, Homo sapiens
  misc_RNA (1)...(19): siRNA sense strand
cgaaauacgcgagguucau

SEQ ID NO: 2147237 - RNA, 19 nt, Homo sapiens
  misc_RNA (1)...(19): siRNA sense strand
uggcaucucuuuguagcau

SEQ ID NO: 2147238 - RNA, 19 nt, Homo sapiens
  misc_RNA (1)...(19): siRNA sense strand
acuaugccaucuggaggua

SEQ ID NO: 2147239 - RNA, 19 nt, Homo sapiens
  misc_RNA (1)...(19): siRNA sense strand
gcccacagaguaugaacau

SEQ ID NO: 2147240 - RNA, 19 nt, Homo sapiens
  misc_RNA (1)...(19): siRNA sense strand
gcagcuccaaccucuacuu

SEQ ID NO: 2147241 - RNA, 19 nt, Homo sapiens
  misc_RNA (1)...(19): siRNA sense strand
caucuaugucuucuucuuc

SEQ ID NO: 2147242 - RNA, 19 nt, Homo sapiens
  misc_RNA (1)...(19): siRNA sense strand
gggcaccaucuaugucuuc

SEQ ID NO: 2147243 - RNA, 19 nt, Homo sapiens
  misc_RNA (1)...(19): siRNA sense strand
ggucaucuauuucuucaua

SEQ ID NO: 2147244 - RNA, 19 nt, Homo sapiens
  misc_RNA (1)...(19): siRNA sense strand
ggaacacugucuacacaug

SEQ ID NO: 2147245 - RNA, 19 nt, Homo sapiens
  misc_RNA (1)...(19): siRNA sense strand
caucuggcaucucuuugua

SEQ ID NO: 2147246 - RNA, 19 nt, Homo sapiens
  misc_RNA (1)...(19): siRNA sense strand
agaccaagguguccaaaug

SEQ ID NO: 2147247 - RNA, 19 nt, Homo sapiens
  misc_RNA (1)...(19): siRNA sense strand
gcaucucuuuguagcauuu

SEQ ID NO: 2147248 - RNA, 19 nt, Homo sapiens
  misc_RNA (1)...(19): siRNA sense strand
gguaccagcccacagagua

SEQ ID NO: 2147249 - RNA, 19 nt, Homo sapiens
  misc_RNA (1)...(19): siRNA sense strand
gaaauacgcgagguucaug

SEQ ID NO: 2147250 - RNA, 19 nt, Homo sapiens
  misc_RNA (1)...(19): siRNA sense strand
caccaucuaugucuucuuc

SEQ ID NO: 2147251 - RNA, 19 nt, Homo sapiens
  misc_RNA (1)...(19): siRNA sense strand
gaacacugucuacacaugu

SEQ ID NO: 2147252 - RNA, 19 nt, Homo sapiens
  misc_RNA (1)...(19): siRNA sense strand
gaccaagguguccaaauga

SEQ ID NO: 2147253 - RNA, 19 nt, Homo sapiens
  misc_RNA (1)...(19): siRNA sense strand
guggaacacugucuacaca

SEQ ID NO: 2147254 - RNA, 19 nt, Homo sapiens
  misc_RNA (1)...(19): siRNA sense strand
uggcuggucuggauuaugg

SEQ ID NO: 2147255 - RNA, 19 nt, Homo sapiens
  misc_RNA (1)...(19): siRNA sense strand
uuguggagcuucucugcua

SEQ ID NO: 2147256 - RNA, 19 nt, Homo sapiens
  misc_RNA (1)...(19): siRNA sense strand
ccaucuaugucuucuucuu

SEQ ID NO: 2147257 - RNA, 19 nt, Homo sapiens
  misc_RNA (1)...(19): siRNA sense strand
cacaccaucuccuggaaga

SEQ ID NO: 2147258 - RNA, 19 nt, Homo sapiens
  misc_RNA (1)...(19): siRNA sense strand
ccagcacccugcagaccaa

SEQ ID NO: 2147259 - RNA, 19 nt, Homo sapiens
  misc_RNA (1)...(19): siRNA sense strand
guaccagcccacagaguau

SEQ ID NO: 2147260 - RNA, 19 nt, Homo sapiens
  misc_RNA (1)...(19): siRNA sense strand
gaugguggaacacugucua

SEQ ID NO: 2147261 - RNA, 19 nt, Homo sapiens
  misc_RNA (1)...(19): siRNA sense strand
gugcugguacccacuacua

SEQ ID NO: 2147262 - RNA, 19 nt, Homo sapiens
  misc_RNA (1)...(19): siRNA sense strand
gggcauggucuucuucaag

SEQ ID NO: 2147263 - RNA, 19 nt, Homo sapiens
  misc_RNA (1)...(19): siRNA sense strand
gcuccaaccucuacuuccu

SEQ ID NO: 2147264 - RNA, 19 nt, Homo sapiens
  misc_RNA (1)...(19): siRNA sense strand
gcugguacccacuacuaug

SEQ ID NO: 2147265 - RNA, 19 nt, Homo sapiens
  misc_RNA (1)...(19): siRNA sense strand
gggcagcuccaaccucuac

SEQ ID NO: 2147266 - RNA, 19 nt, Homo sapiens
  misc_RNA (1)...(19): siRNA sense strand
agagguaccagcccacaga

SEQ ID NO: 2147267 - RNA, 19 nt, Homo sapiens
  misc_RNA (1)...(19): siRNA sense strand
cgaaauacgcgagguucau

SEQ ID NO: 2147268 - RNA, 19 nt, Homo sapiens
  misc_RNA (1)...(19): siRNA sense strand
uggcaucucuuuguagcau

SEQ ID NO: 2147269 - RNA, 19 nt, Homo sapiens
  misc_RNA (1)...(19): siRNA sense strand
acuaugccaucuggaggua

SEQ ID NO: 2147270 - RNA, 19 nt, Homo sapiens
  misc_RNA (1)...(19): siRNA sense strand
gcccacagaguaugaacau

SEQ ID NO: 2147271 - RNA, 19 nt, Homo sapiens
  misc_RNA (1)...(19): siRNA sense strand
gcagcuccaaccucuacuu

SEQ ID NO: 2147272 - RNA, 19 nt, Homo sapiens
  misc_RNA (1)...(19): siRNA sense strand
caucuaugucuucuucuuc

SEQ ID NO: 2147273 - RNA, 19 nt, Homo sapiens
  misc_RNA (1)...(19): siRNA sense strand
gggcaccaucuaugucuuc

SEQ ID NO: 2147274 - RNA, 19 nt, Homo sapiens
  misc_RNA (1)...(19): siRNA sense strand
ggacauaccuuauuuguuc

SEQ ID NO: 2147275 - RNA, 19 nt, Homo sapiens
  misc_RNA (1)...(19): siRNA sense strand
gaaaguauaugcagaauuc

SEQ ID NO: 2147276 - RNA, 19 nt, Homo sapiens
  misc_RNA (1)...(19): siRNA sense strand
gaacaugccuuugaaauuc

SEQ ID NO: 2147277 - RNA, 19 nt, Homo sapiens
  misc_RNA (1)...(19): siRNA sense strand
gagauaagguggauaaaug

SEQ ID NO: 2147278 - RNA, 19 nt, Homo sapiens
  misc_RNA (1)...(19): siRNA sense strand
caagacagcuauacagauu

SEQ ID NO: 2147279 - RNA, 19 nt, Homo sapiens
  misc_RNA (1)...(19): siRNA sense strand
ggaacuagaacuuucauua

SEQ ID NO: 2147280 - RNA, 19 nt, Homo sapiens
  misc_RNA (1)...(19): siRNA sense strand
gcagggacauaccuuauuu

SEQ ID NO: 2147281 - RNA, 19 nt, Homo sapiens
  misc_RNA (1)...(19): siRNA sense strand
gaagguucaucagaaauua

SEQ ID NO: 2147282 - RNA, 19 nt, Homo sapiens
  misc_RNA (1)...(19): siRNA sense strand
gaacagaaauggccaugca

SEQ ID NO: 2147283 - RNA, 19 nt, Homo sapiens
  misc_RNA (1)...(19): siRNA sense strand
gcacagacaugacuacaca

SEQ ID NO: 2147284 - RNA, 19 nt, Homo sapiens
  misc_RNA (1)...(19): siRNA sense strand
gcucuaaacugaauggaaa

SEQ ID NO: 2147285 - RNA, 19 nt, Homo sapiens
  misc_RNA (1)...(19): siRNA sense strand
gcaugcagcucagguguua

SEQ ID NO: 2147286 - RNA, 19 nt, Homo sapiens
  misc_RNA (1)...(19): siRNA sense strand
aaagauaucuggagaaaca

SEQ ID NO: 2147287 - RNA, 19 nt, Homo sapiens
  misc_RNA (1)...(19): siRNA sense strand
ggaggaaucuaaugugaug

SEQ ID NO: 2147288 - RNA, 19 nt, Homo sapiens
  misc_RNA (1)...(19): siRNA sense strand
ggagaaacauggauuugau

SEQ ID NO: 2147289 - RNA, 19 nt, Homo sapiens
  misc_RNA (1)...(19): siRNA sense strand
ggaagauccuuaaguugaa

SEQ ID NO: 2147290 - RNA, 19 nt, Homo sapiens
  misc_RNA (1)...(19): siRNA sense strand
gcugacaaauggaagaaua

SEQ ID NO: 2147291 - RNA, 19 nt, Homo sapiens
  misc_RNA (1)...(19): siRNA sense strand
gaaauuccagacaauguua

SEQ ID NO: 2147292 - RNA, 19 nt, Homo sapiens
  misc_RNA (1)...(19): siRNA sense strand
gaauggagagcgaaagaua

SEQ ID NO: 2147293 - RNA, 19 nt, Homo sapiens
  misc_RNA (1)...(19): siRNA sense strand
gaagagaguucaggaguag

SEQ ID NO: 2147294 - RNA, 19 nt, Homo sapiens
  misc_RNA (1)...(19): siRNA sense strand
ugaaagaacugagagaaga

SEQ ID NO: 2147295 - RNA, 19 nt, Homo sapiens
  misc_RNA (1)...(19): siRNA sense strand
gaacuuguaucugaacaug

SEQ ID NO: 2147296 - RNA, 19 nt, Homo sapiens
  misc_RNA (1)...(19): siRNA sense strand
caacaaacaucuccaacca

SEQ ID NO: 2147297 - RNA, 19 nt, Homo sapiens
  misc_RNA (1)...(19): siRNA sense strand
gaauuacgcucucgagucu

SEQ ID NO: 2147298 - RNA, 19 nt, Homo sapiens
  misc_RNA (1)...(19): siRNA sense strand
gaaauggccaugcacguuu

SEQ ID NO: 2147299 - RNA, 19 nt, Homo sapiens
  misc_RNA (1)...(19): siRNA sense strand
aaaggaagguucaucagaa

SEQ ID NO: 2147300 - RNA, 19 nt, Homo sapiens
  misc_RNA (1)...(19): siRNA sense strand
gaggacaucuugagcucua

SEQ ID NO: 2147301 - RNA, 19 nt, Homo sapiens
  misc_RNA (1)...(19): siRNA sense strand
gauaaaugcuacaaaugug

SEQ ID NO: 2147302 - RNA, 19 nt, Homo sapiens
  misc_RNA (1)...(19): siRNA sense strand
gggaagauccuuaaguuga

SEQ ID NO: 2147303 - RNA, 19 nt, Homo sapiens
  misc_RNA (1)...(19): siRNA sense strand
gaacaugaagaaucucaaa

SEQ ID NO: 2147304 - RNA, 19 nt, Homo sapiens
  misc_RNA (1)...(19): siRNA sense strand
gcucaagccuucagaaugg

SEQ ID NO: 2147305 - RNA, 19 nt, Homo sapiens
  misc_RNA (1)...(19): siRNA sense strand
gaaaggaagguucaucaga

SEQ ID NO: 2147306 - RNA, 19 nt, Homo sapiens
  misc_RNA (1)...(19): siRNA sense strand
agacaugacuacacagaaa

SEQ ID NO: 2147307 - RNA, 19 nt, Homo sapiens
  misc_RNA (1)...(19): siRNA sense strand
uaauaaagccaacagauga

SEQ ID NO: 2147308 - RNA, 19 nt, Homo sapiens
  misc_RNA (1)...(19): siRNA sense strand
gauuugaugucccuauuau

SEQ ID NO: 2147309 - RNA, 19 nt, Homo sapiens
  misc_RNA (1)...(19): siRNA sense strand
gaagccauauguugguuug

SEQ ID NO: 2147310 - RNA, 19 nt, Homo sapiens
  misc_RNA (1)...(19): siRNA sense strand
ggauaaaugcuacaaaugu

SEQ ID NO: 2147311 - RNA, 19 nt, Homo sapiens
  misc_RNA (1)...(19): siRNA sense strand
acaaagauaucuggagaaa

SEQ ID NO: 2147312 - RNA, 19 nt, Homo sapiens
  misc_RNA (1)...(19): siRNA sense strand
ugauggauguggaacguua

SEQ ID NO: 2147313 - RNA, 19 nt, Homo sapiens
  misc_RNA (1)...(19): siRNA sense strand
gauaccaugucaagacuga

SEQ ID NO: 2147314 - RNA, 19 nt, Homo sapiens
  misc_RNA (1)...(19): siRNA sense strand
gaauguggauaccauguca

SEQ ID NO: 2147315 - RNA, 19 nt, Homo sapiens
  misc_RNA (1)...(19): siRNA sense strand
ggaagguucaucagaaauu

SEQ ID NO: 2147316 - RNA, 19 nt, Homo sapiens
  misc_RNA (1)...(19): siRNA sense strand
gauaaguaauggcagucua

SEQ ID NO: 2147317 - RNA, 19 nt, Homo sapiens
  misc_RNA (1)...(19): siRNA sense strand
cuauacagauuuccacauu

SEQ ID NO: 2147318 - RNA, 19 nt, Homo sapiens
  misc_RNA (1)...(19): siRNA sense strand
gacugaagauccagacuug

SEQ ID NO: 2147319 - RNA, 19 nt, Homo sapiens
  misc_RNA (1)...(19): siRNA sense strand
gaagccaucuagaagugaa

SEQ ID NO: 2147320 - RNA, 19 nt, Homo sapiens
  misc_RNA (1)...(19): siRNA sense strand
ggagagcgaaagauaauga

SEQ ID NO: 2147321 - RNA, 19 nt, Homo sapiens
  misc_RNA (1)...(19): siRNA sense strand
gagguguucuuuggagaua

SEQ ID NO: 2147322 - RNA, 19 nt, Homo sapiens
  misc_RNA (1)...(19): siRNA sense strand
guacaaaguaggaauuaug

SEQ ID NO: 2147323 - RNA, 19 nt, Homo sapiens
  misc_RNA (1)...(19): siRNA sense strand
gcacugcacugaaaaguau

SEQ ID NO: 2147324 - RNA, 19 nt, Homo sapiens
  misc_RNA (1)...(19): siRNA sense strand
auacagauuuccacauuga

SEQ ID NO: 2147325 - RNA, 19 nt, Homo sapiens
  misc_RNA (1)...(19): siRNA sense strand
gcacagaggaagaagcuau

SEQ ID NO: 2147326 - RNA, 19 nt, Homo sapiens
  misc_RNA (1)...(19): siRNA sense strand
agaagagaguucaggagua

SEQ ID NO: 2147327 - RNA, 19 nt, Homo sapiens
  misc_RNA (1)...(19): siRNA sense strand
guggauaaaugcuacaaau

SEQ ID NO: 2147328 - RNA, 19 nt, Homo sapiens
  misc_RNA (1)...(19): siRNA sense strand
gccagaugauucagucuuu

SEQ ID NO: 2147329 - RNA, 19 nt, Homo sapiens
  misc_RNA (1)...(19): siRNA sense strand
gccucaaacuuaccuagua

SEQ ID NO: 2147330 - RNA, 19 nt, Homo sapiens
  misc_RNA (1)...(19): siRNA sense strand
caccagaucuuuucaaauu

SEQ ID NO: 2147331 - RNA, 19 nt, Homo sapiens
  misc_RNA (1)...(19): siRNA sense strand
ugauagaugucauugaugu

SEQ ID NO: 2147332 - RNA, 19 nt, Homo sapiens
  misc_RNA (1)...(19): siRNA sense strand
gauccagacuugaggacuu

SEQ ID NO: 2147333 - RNA, 19 nt, Homo sapiens
  misc_RNA (1)...(19): siRNA sense strand
gcaguuguaucgcuaugau

SEQ ID NO: 2147334 - RNA, 19 nt, Homo sapiens
  misc_RNA (1)...(19): siRNA sense strand
gaagauagaagagaguuca

SEQ ID NO: 2147335 - RNA, 19 nt, Homo sapiens
  misc_RNA (1)...(19): siRNA sense strand
caagagaccggcaucaaau

SEQ ID NO: 2147336 - RNA, 19 nt, Homo sapiens
  misc_RNA (1)...(19): siRNA sense strand
cagaagccaucuagaagug

SEQ ID NO: 2147337 - RNA, 19 nt, Homo sapiens
  misc_RNA (1)...(19): siRNA sense strand
ggauuugaugucccuauua

SEQ ID NO: 2147338 - RNA, 19 nt, Homo sapiens
  misc_RNA (1)...(19): siRNA sense strand
aaucuaaugugaugaggaa

SEQ ID NO: 2147339 - RNA, 19 nt, Homo sapiens
  misc_RNA (1)...(19): siRNA sense strand
gaguagaucaucaggauau

SEQ ID NO: 2147340 - RNA, 19 nt, Homo sapiens
  misc_RNA (1)...(19): siRNA sense strand
uuauguagguggugacaaa

SEQ ID NO: 2147341 - RNA, 19 nt, Homo sapiens
  misc_RNA (1)...(19): siRNA sense strand
ccaagagaccggcaucaaa

SEQ ID NO: 2147342 - RNA, 19 nt, Homo sapiens
  misc_RNA (1)...(19): siRNA sense strand
cggcagcuguguuggagua

SEQ ID NO: 2147343 - RNA, 19 nt, Homo sapiens
  misc_RNA (1)...(19): siRNA sense strand
cuggacaccuuauuaaaga

SEQ ID NO: 2147344 - RNA, 19 nt, Homo sapiens
  misc_RNA (1)...(19): siRNA sense strand
cuacaaaugugugguaaag

SEQ ID NO: 2147345 - RNA, 19 nt, Homo sapiens
  misc_RNA (1)...(19): siRNA sense strand
ccaaaaguguuaaauguga

SEQ ID NO: 2147346 - RNA, 19 nt, Homo sapiens
  misc_RNA (1)...(19): siRNA sense strand
gaccaaaaguguuaaaugu

SEQ ID NO: 2147347 - RNA, 19 nt, Homo sapiens
  misc_RNA (1)...(19): siRNA sense strand
caagccauuuguucagaaa

SEQ ID NO: 2147348 - RNA, 19 nt, Homo sapiens
  misc_RNA (1)...(19): siRNA sense strand
uuacaugguuccuccuuga

SEQ ID NO: 2147349 - RNA, 19 nt, Homo sapiens
  misc_RNA (1)...(19): siRNA sense strand
agacugcaguggugaaaga

SEQ ID NO: 2147350 - RNA, 19 nt, Homo sapiens
  misc_RNA (1)...(19): siRNA sense strand
gaccuggacaccuuauuaa

SEQ ID NO: 2147351 - RNA, 19 nt, Homo sapiens
  misc_RNA (1)...(19): siRNA sense strand
gaacugagagaagaugguu

SEQ ID NO: 2147352 - RNA, 19 nt, Homo sapiens
  misc_RNA (1)...(19): siRNA sense strand
gaacuucagucugguacca

SEQ ID NO: 2147353 - RNA, 19 nt, Homo sapiens
  misc_RNA (1)...(19): siRNA sense strand
ugacuucgguggaacuuca

SEQ ID NO: 2147354 - RNA, 19 nt, Homo sapiens
  misc_RNA (1)...(19): siRNA sense strand
acaaaugugugguaaagca

SEQ ID NO: 2147355 - RNA, 19 nt, Homo sapiens
  misc_RNA (1)...(19): siRNA sense strand
gauuacugcugacaaaugg

SEQ ID NO: 2147356 - RNA, 19 nt, Homo sapiens
  misc_RNA (1)...(19): siRNA sense strand
ugaacaugccuuugaaauu

SEQ ID NO: 2147357 - RNA, 19 nt, Homo sapiens
  misc_RNA (1)...(19): siRNA sense strand
cccaagugccgaugaaaua

SEQ ID NO: 2147358 - RNA, 19 nt, Homo sapiens
  misc_RNA (1)...(19): siRNA sense strand
gaaaugcaucagaaaggaa

SEQ ID NO: 2147359 - RNA, 19 nt, Homo sapiens
  misc_RNA (1)...(19): siRNA sense strand
ggagauaagguggauaaau

SEQ ID NO: 2147360 - RNA, 19 nt, Homo sapiens
  misc_RNA (1)...(19): siRNA sense strand
ggauguggaacguuaugua

SEQ ID NO: 2147361 - RNA, 19 nt, Homo sapiens
  misc_RNA (1)...(19): siRNA sense strand
gggcgugccagauaaguaa

SEQ ID NO: 2147362 - RNA, 19 nt, Homo sapiens
  misc_RNA (1)...(19): siRNA sense strand
gcacuauuccacguguuua

SEQ ID NO: 2147363 - RNA, 19 nt, Homo sapiens
  misc_RNA (1)...(19): siRNA sense strand
aaggaggaaucuaauguga

SEQ ID NO: 2147364 - RNA, 19 nt, Homo sapiens
  misc_RNA (1)...(19): siRNA sense strand
uaacauccaacuuuaagga

SEQ ID NO: 2147365 - RNA, 19 nt, Homo sapiens
  misc_RNA (1)...(19): siRNA sense strand
uagagggaguggaacauga

SEQ ID NO: 2147366 - RNA, 19 nt, Homo sapiens
  misc_RNA (1)...(19): siRNA sense strand
uaaaugugaucagccuuga

SEQ ID NO: 2147367 - RNA, 19 nt, Homo sapiens
  misc_RNA (1)...(19): siRNA sense strand
cuagaacuuucauuaagga

SEQ ID NO: 2147368 - RNA, 19 nt, Homo sapiens
  misc_RNA (1)...(19): siRNA sense strand
ucaaauccaccaccuauca

SEQ ID NO: 2147369 - RNA, 19 nt, Homo sapiens
  misc_RNA (1)...(19): siRNA sense strand
caucaaauccaccaccuau

SEQ ID NO: 2147370 - RNA, 19 nt, Homo sapiens
  misc_RNA (1)...(19): siRNA sense strand
aaggaagguucaucagaaa

SEQ ID NO: 2147371 - RNA, 19 nt, Homo sapiens
  misc_RNA (1)...(19): siRNA sense strand
ccaaccauccuccacagua

SEQ ID NO: 2147372 - RNA, 19 nt, Homo sapiens
  misc_RNA (1)...(19): siRNA sense strand
agaccuggacaccuuauua

SEQ ID NO: 2147373 - RNA, 19 nt, Homo sapiens
  misc_RNA (1)...(19): siRNA sense strand
agacagcuauacagauuuc

SEQ ID NO: 2147374 - RNA, 19 nt, Homo sapiens
  misc_RNA (1)...(19): siRNA sense strand
ggaacgagcuggcuuguga

SEQ ID NO: 2147375 - RNA, 19 nt, Homo sapiens
  misc_RNA (1)...(19): siRNA sense strand
gcacaagucccucaacaua

SEQ ID NO: 2147376 - RNA, 19 nt, Homo sapiens
  misc_RNA (1)...(19): siRNA sense strand
gaaguuuacugcauuguga

SEQ ID NO: 2147377 - RNA, 19 nt, Homo sapiens
  misc_RNA (1)...(19): siRNA sense strand
caacauaaaggacaagaua

SEQ ID NO: 2147378 - RNA, 19 nt, Homo sapiens
  misc_RNA (1)...(19): siRNA sense strand
gaacagagagcacagagaa

SEQ ID NO: 2147379 - RNA, 19 nt, Homo sapiens
  misc_RNA (1)...(19): siRNA sense strand
gaacugaggugaucgaacu

SEQ ID NO: 2147380 - RNA, 19 nt, Homo sapiens
  misc_RNA (1)...(19): siRNA sense strand
gcacagcggugucaauaag

SEQ ID NO: 2147381 - RNA, 19 nt, Homo sapiens
  misc_RNA (1)...(19): siRNA sense strand
agaagugugucuugaauuu

SEQ ID NO: 2147382 - RNA, 19 nt, Homo sapiens
  misc_RNA (1)...(19): siRNA sense strand
gaauggauauguucagcuu

SEQ ID NO: 2147383 - RNA, 19 nt, Homo sapiens
  misc_RNA (1)...(19): siRNA sense strand
gcaaagcugucuccuccaa

SEQ ID NO: 2147384 - RNA, 19 nt, Homo sapiens
  misc_RNA (1)...(19): siRNA sense strand
ccuaugaguuugaagauuu

SEQ ID NO: 2147385 - RNA, 19 nt, Homo sapiens
  misc_RNA (1)...(19): siRNA sense strand
gcacagagaaggagaggaa

SEQ ID NO: 2147386 - RNA, 19 nt, Homo sapiens
  misc_RNA (1)...(19): siRNA sense strand
gagagaagcugaggaccaa

SEQ ID NO: 2147387 - RNA, 19 nt, Homo sapiens
  misc_RNA (1)...(19): siRNA sense strand
cagcagcccugaugacauu

SEQ ID NO: 2147388 - RNA, 19 nt, Homo sapiens
  misc_RNA (1)...(19): siRNA sense strand
ccacaaagcccuucaucaa

SEQ ID NO: 2147389 - RNA, 19 nt, Homo sapiens
  misc_RNA (1)...(19): siRNA sense strand
acaagucccucaacauaaa

SEQ ID NO: 2147390 - RNA, 19 nt, Homo sapiens
  misc_RNA (1)...(19): siRNA sense strand
ucagacagauggacgauga

SEQ ID NO: 2147391 - RNA, 19 nt, Homo sapiens
  misc_RNA (1)...(19): siRNA sense strand
cagaaaguccuaugaguuu

SEQ ID NO: 2147392 - RNA, 19 nt, Homo sapiens
  misc_RNA (1)...(19): siRNA sense strand
gcagcaggguggacuggua

SEQ ID NO: 2147393 - RNA, 19 nt, Homo sapiens
  misc_RNA (1)...(19): siRNA sense strand
gaaagaaacgggugaagag

SEQ ID NO: 2147394 - RNA, 19 nt, Homo sapiens
  misc_RNA (1)...(19): siRNA sense strand
ugaacgagguggugucuga

SEQ ID NO: 2147395 - RNA, 19 nt, Homo sapiens
  misc_RNA (1)...(19): siRNA sense strand
gaaucaacgccauuuauga

SEQ ID NO: 2147396 - RNA, 19 nt, Homo sapiens
  misc_RNA (1)...(19): siRNA sense strand
gagcacagcggugucaaua

SEQ ID NO: 2147397 - RNA, 19 nt, Homo sapiens
  misc_RNA (1)...(19): siRNA sense strand
guucaaacaugccggagaa

SEQ ID NO: 2147398 - RNA, 19 nt, Homo sapiens
  misc_RNA (1)...(19): siRNA sense strand
gguggugucugaagccuuu

SEQ ID NO: 2147399 - RNA, 19 nt, Homo sapiens
  misc_RNA (1)...(19): siRNA sense strand
ugaagggacuaggcaauaa

SEQ ID NO: 2147400 - RNA, 19 nt, Homo sapiens
  misc_RNA (1)...(19): siRNA sense strand
ggaaagaaacgggugaaga

SEQ ID NO: 2147401 - RNA, 19 nt, Homo sapiens
  misc_RNA (1)...(19): siRNA sense strand
gaucuuggaugagguggaa

SEQ ID NO: 2147402 - RNA, 19 nt, Homo sapiens
  misc_RNA (1)...(19): siRNA sense strand
gaaaguccuaugaguuuga

SEQ ID NO: 2147403 - RNA, 19 nt, Homo sapiens
  misc_RNA (1)...(19): siRNA sense strand
ucacagaggcuaagaaugg

SEQ ID NO: 2147404 - RNA, 19 nt, Homo sapiens
  misc_RNA (1)...(19): siRNA sense strand
ccacagaacggcaggaaga

SEQ ID NO: 2147405 - RNA, 19 nt, Homo sapiens
  misc_RNA (1)...(19): siRNA sense strand
gaagggacuaggcaauaaa

SEQ ID NO: 2147406 - RNA, 19 nt, Homo sapiens
  misc_RNA (1)...(19): siRNA sense strand
gggaguggcucagaaguca

SEQ ID NO: 2147407 - RNA, 19 nt, Homo sapiens
  misc_RNA (1)...(19): siRNA sense strand
cauggagacucagauguuu

SEQ ID NO: 2147408 - RNA, 19 nt, Homo sapiens
  misc_RNA (1)...(19): siRNA sense strand
gguccgagcccaagaguau

SEQ ID NO: 2147409 - RNA, 19 nt, Homo sapiens
  misc_RNA (1)...(19): siRNA sense strand
ugacagaugagaacaguga

SEQ ID NO: 2147410 - RNA, 19 nt, Homo sapiens
  misc_RNA (1)...(19): siRNA sense strand
gauauguucagcuuggaua

SEQ ID NO: 2147411 - RNA, 19 nt, Homo sapiens
  misc_RNA (1)...(19): siRNA sense strand
ggaagagguccuugugguu

SEQ ID NO: 2147412 - RNA, 19 nt, Homo sapiens
  misc_RNA (1)...(19): siRNA sense strand
gguccacccuuccugagaa

SEQ ID NO: 2147413 - RNA, 19 nt, Homo sapiens
  misc_RNA (1)...(19): siRNA sense strand
gagaggaggaguagugaug

SEQ ID NO: 2147414 - RNA, 19 nt, Homo sapiens
  misc_RNA (1)...(19): siRNA sense strand
uaaaggacaagauaucaga

SEQ ID NO: 2147415 - RNA, 19 nt, Homo sapiens
  misc_RNA (1)...(19): siRNA sense strand
ugaagcaggucaagaaacu

SEQ ID NO: 2147416 - RNA, 19 nt, Homo sapiens
  misc_RNA (1)...(19): siRNA sense strand
cggagaacguucaaacaug

SEQ ID NO: 2147417 - RNA, 19 nt, Homo sapiens
  misc_RNA (1)...(19): siRNA sense strand
gcgaaucaacgccauuuau

SEQ ID NO: 2147418 - RNA, 19 nt, Homo sapiens
  misc_RNA (1)...(19): siRNA sense strand
gcagaagguucgguuacug

SEQ ID NO: 2147419 - RNA, 19 nt, Homo sapiens
  misc_RNA (1)...(19): siRNA sense strand
gaagaugggagcagaaggu

SEQ ID NO: 2147420 - RNA, 19 nt, Homo sapiens
  misc_RNA (1)...(19): siRNA sense strand
gaacagugagucugacagu

SEQ ID NO: 2147421 - RNA, 19 nt, Homo sapiens
  misc_RNA (1)...(19): siRNA sense strand
cagagaaggagaggaauaa

SEQ ID NO: 2147422 - RNA, 19 nt, Homo sapiens
  misc_RNA (1)...(19): siRNA sense strand
gaauaaaggagcagugaac

SEQ ID NO: 2147423 - RNA, 19 nt, Homo sapiens
  misc_RNA (1)...(19): siRNA sense strand
ucagaacccuugcccaucu

SEQ ID NO: 2147424 - RNA, 19 nt, Homo sapiens
  misc_RNA (1)...(19): siRNA sense strand
aaagcugucuccuccaaga

SEQ ID NO: 2147425 - RNA, 19 nt, Homo sapiens
  misc_RNA (1)...(19): siRNA sense strand
gaggagaacgucuaugaag

SEQ ID NO: 2147426 - RNA, 19 nt, Homo sapiens
  misc_RNA (1)...(19): siRNA sense strand
gaucaggagucaggcuuca

SEQ ID NO: 2147427 - RNA, 19 nt, Homo sapiens
  misc_RNA (1)...(19): siRNA sense strand
ggacaucgaguuacauggu

SEQ ID NO: 2147428 - RNA, 19 nt, Homo sapiens
  misc_RNA (1)...(19): siRNA sense strand
ggaggagaacgucuaugaa

SEQ ID NO: 2147429 - RNA, 19 nt, Homo sapiens
  misc_RNA (1)...(19): siRNA sense strand
gggcugacacgcacuuuau

SEQ ID NO: 2147430 - RNA, 19 nt, Homo sapiens
  misc_RNA (1)...(19): siRNA sense strand
ggacuaggcaauaaaauga

SEQ ID NO: 2147431 - RNA, 19 nt, Homo sapiens
  misc_RNA (1)...(19): siRNA sense strand
ccaagaguaucuggaaaca

SEQ ID NO: 2147432 - RNA, 19 nt, Homo sapiens
  misc_RNA (1)...(19): siRNA sense strand
ggacaagauaucagaaugg

SEQ ID NO: 2147433 - RNA, 19 nt, Homo sapiens
  misc_RNA (1)...(19): siRNA sense strand
gcccaagaguaucuggaaa

SEQ ID NO: 2147434 - RNA, 19 nt, Homo sapiens
  misc_RNA (1)...(19): siRNA sense strand
gagaggagggucaucuuca

SEQ ID NO: 2147435 - RNA, 19 nt, Homo sapiens
  misc_RNA (1)...(19): siRNA sense strand
caacaguucccucugaagu

SEQ ID NO: 2147436 - RNA, 19 nt, Homo sapiens
  misc_RNA (1)...(19): siRNA sense strand
cgaaucaacgccauuuaug

SEQ ID NO: 2147437 - RNA, 19 nt, Homo sapiens
  misc_RNA (1)...(19): siRNA sense strand
cacaagucccucaacauaa

SEQ ID NO: 2147438 - RNA, 19 nt, Homo sapiens
  misc_RNA (1)...(19): siRNA sense strand
aagaguaucuggaaacacu

SEQ ID NO: 2147439 - RNA, 19 nt, Homo sapiens
  misc_RNA (1)...(19): siRNA sense strand
ggagcagaagguucgguua

SEQ ID NO: 2147440 - RNA, 19 nt, Homo sapiens
  misc_RNA (1)...(19): siRNA sense strand
ucaagcugcuggacacuag

SEQ ID NO: 2147441 - RNA, 19 nt, Homo sapiens
  misc_RNA (1)...(19): siRNA sense strand
ggaauaaaggagcagugaa

SEQ ID NO: 2147442 - RNA, 19 nt, Homo sapiens
  misc_RNA (1)...(19): siRNA sense strand
agucaagaauggauauguu

SEQ ID NO: 2147443 - RNA, 19 nt, Homo sapiens
  misc_RNA (1)...(19): siRNA sense strand
cagacggacaggaggauua

SEQ ID NO: 2147444 - RNA, 19 nt, Homo sapiens
  misc_RNA (1)...(19): siRNA sense strand
caacagccgguuccucaga

SEQ ID NO: 2147445 - RNA, 19 nt, Homo sapiens
  misc_RNA (1)...(19): siRNA sense strand
cggaggagaacgucuauga

SEQ ID NO: 2147446 - RNA, 19 nt, Homo sapiens
  misc_RNA (1)...(19): siRNA sense strand
acagaaaguccuaugaguu

SEQ ID NO: 2147447 - RNA, 19 nt, Homo sapiens
  misc_RNA (1)...(19): siRNA sense strand
gagaaggagaggaauaaag

SEQ ID NO: 2147448 - RNA, 19 nt, Homo sapiens
  misc_RNA (1)...(19): siRNA sense strand
ggucacagaggcuaagaau

SEQ ID NO: 2147449 - RNA, 19 nt, Homo sapiens
  misc_RNA (1)...(19): siRNA sense strand
gcaaaaccauccuugucaa

SEQ ID NO: 2147450 - RNA, 19 nt, Homo sapiens
  misc_RNA (1)...(19): siRNA sense strand
acaguucccucugaaguug

SEQ ID NO: 2147451 - RNA, 19 nt, Homo sapiens
  misc_RNA (1)...(19): siRNA sense strand
ugccagaacucacccaaca

SEQ ID NO: 2147452 - RNA, 19 nt, Homo sapiens
  misc_RNA (1)...(19): siRNA sense strand
gcaggaagaagagaaagau

SEQ ID NO: 2147453 - RNA, 19 nt, Homo sapiens
  misc_RNA (1)...(19): siRNA sense strand
aggagaacgucuaugaaga

SEQ ID NO: 2147454 - RNA, 19 nt, Homo sapiens
  misc_RNA (1)...(19): siRNA sense strand
cacagaaaguccuaugagu

SEQ ID NO: 2147455 - RNA, 19 nt, Homo sapiens
  misc_RNA (1)...(19): siRNA sense strand
gaacgggaaguggauccua

SEQ ID NO: 2147456 - RNA, 19 nt, Homo sapiens
  misc_RNA (1)...(19): siRNA sense strand
gaaggagaggaauaaagga

SEQ ID NO: 2147457 - RNA, 19 nt, Homo sapiens
  misc_RNA (1)...(19): siRNA sense strand
gaggagggucaucuucauu

SEQ ID NO: 2147458 - RNA, 19 nt, Homo sapiens
  misc_RNA (1)...(19): siRNA sense strand
ggagaggagggucaucuuc

SEQ ID NO: 2147459 - RNA, 19 nt, Homo sapiens
  misc_RNA (1)...(19): siRNA sense strand
aagcugguguugcgaauca

SEQ ID NO: 2147460 - RNA, 19 nt, Homo sapiens
  misc_RNA (1)...(19): siRNA sense strand
acacugcccuccugacaag

SEQ ID NO: 2147461 - RNA, 19 nt, Homo sapiens
  misc_RNA (1)...(19): siRNA sense strand
aggaaagguucaugcagaa

SEQ ID NO: 2147462 - RNA, 19 nt, Homo sapiens
  misc_RNA (1)...(19): siRNA sense strand
ccaagagccuccgccacuu

SEQ ID NO: 2147463 - RNA, 19 nt, Homo sapiens
  misc_RNA (1)...(19): siRNA sense strand
ccaccuggucuguguguuu

SEQ ID NO: 2147464 - RNA, 19 nt, Homo sapiens
  misc_RNA (1)...(19): siRNA sense strand
caggaaaagugacagauga

SEQ ID NO: 2147465 - RNA, 19 nt, Homo sapiens
  misc_RNA (1)...(19): siRNA sense strand
ggcaucggcuucaggaaag

SEQ ID NO: 2147466 - RNA, 19 nt, Homo sapiens
  misc_RNA (1)...(19): siRNA sense strand
gaaugaggccaggaacaga

SEQ ID NO: 2147467 - RNA, 19 nt, Homo sapiens
  misc_RNA (1)...(19): siRNA sense strand
acacagaggagaagcugaa

SEQ ID NO: 2147468 - RNA, 19 nt, Homo sapiens
  misc_RNA (1)...(19): siRNA sense strand
gaagaggcugucccaguca

SEQ ID NO: 2147469 - RNA, 19 nt, Homo sapiens
  misc_RNA (1)...(19): siRNA sense strand
agagaaagauacccaagcu

SEQ ID NO: 2147470 - RNA, 19 nt, Homo sapiens
  misc_RNA (1)...(19): siRNA sense strand
acagagaaggagaggaaua

SEQ ID NO: 2147471 - RNA, 19 nt, Homo sapiens
  misc_RNA (1)...(19): siRNA sense strand
gaggacaucgaguuacaug

SEQ ID NO: 2147472 - RNA, 19 nt, Homo sapiens
  misc_RNA (1)...(19): siRNA sense strand
ucgagcacguggacuuuga

SEQ ID NO: 2147473 - RNA, 19 nt, Homo sapiens
  misc_RNA (1)...(19): siRNA sense strand
gaagcugagucgggaugga

SEQ ID NO: 2147474 - RNA, 19 nt, Homo sapiens
  misc_RNA (1)...(19): siRNA sense strand
ggaacgagcuggcuuguga

SEQ ID NO: 2147475 - RNA, 19 nt, Homo sapiens
  misc_RNA (1)...(19): siRNA sense strand
gcacaagucccucaacaua

SEQ ID NO: 2147476 - RNA, 19 nt, Homo sapiens
  misc_RNA (1)...(19): siRNA sense strand
gaaguuuacugcauuguga

SEQ ID NO: 2147477 - RNA, 19 nt, Homo sapiens
  misc_RNA (1)...(19): siRNA sense strand
caacauaaaggacaagaua

SEQ ID NO: 2147478 - RNA, 19 nt, Homo sapiens
  misc_RNA (1)...(19): siRNA sense strand
gaacagagagcacagagaa

SEQ ID NO: 2147479 - RNA, 19 nt, Homo sapiens
  misc_RNA (1)...(19): siRNA sense strand
gaacugaggugaucgaacu

SEQ ID NO: 2147480 - RNA, 19 nt, Homo sapiens
  misc_RNA (1)...(19): siRNA sense strand
gcacagcggugucaauaag

SEQ ID NO: 2147481 - RNA, 19 nt, Homo sapiens
  misc_RNA (1)...(19): siRNA sense strand
agaagugugucuugaauuu

SEQ ID NO: 2147482 - RNA, 19 nt, Homo sapiens
  misc_RNA (1)...(19): siRNA sense strand
gaauggauauguucagcuu

SEQ ID NO: 2147483 - RNA, 19 nt, Homo sapiens
  misc_RNA (1)...(19): siRNA sense strand
gcaaagcugucuccuccaa

SEQ ID NO: 2147484 - RNA, 19 nt, Homo sapiens
  misc_RNA (1)...(19): siRNA sense strand
ccuaugaguuugaagauuu

SEQ ID NO: 2147485 - RNA, 19 nt, Homo sapiens
  misc_RNA (1)...(19): siRNA sense strand
gcacagagaaggagaggaa

SEQ ID NO: 2147486 - RNA, 19 nt, Homo sapiens
  misc_RNA (1)...(19): siRNA sense strand
gagagaagcugaggaccaa

SEQ ID NO: 2147487 - RNA, 19 nt, Homo sapiens
  misc_RNA (1)...(19): siRNA sense strand
cagcagcccugaugacauu

SEQ ID NO: 2147488 - RNA, 19 nt, Homo sapiens
  misc_RNA (1)...(19): siRNA sense strand
ccacaaagcccuucaucaa

SEQ ID NO: 2147489 - RNA, 19 nt, Homo sapiens
  misc_RNA (1)...(19): siRNA sense strand
acaagucccucaacauaaa

SEQ ID NO: 2147490 - RNA, 19 nt, Homo sapiens
  misc_RNA (1)...(19): siRNA sense strand
ucagacagauggacgauga

SEQ ID NO: 2147491 - RNA, 19 nt, Homo sapiens
  misc_RNA (1)...(19): siRNA sense strand
cagaaaguccuaugaguuu

SEQ ID NO: 2147492 - RNA, 19 nt, Homo sapiens
  misc_RNA (1)...(19): siRNA sense strand
gcagcaggguggacuggua

SEQ ID NO: 2147493 - RNA, 19 nt, Homo sapiens
  misc_RNA (1)...(19): siRNA sense strand
gaaagaaacgggugaagag

SEQ ID NO: 2147494 - RNA, 19 nt, Homo sapiens
  misc_RNA (1)...(19): siRNA sense strand
ugaacgagguggugucuga

SEQ ID NO: 2147495 - RNA, 19 nt, Homo sapiens
  misc_RNA (1)...(19): siRNA sense strand
gaaucaacgccauuuauga

SEQ ID NO: 2147496 - RNA, 19 nt, Homo sapiens
  misc_RNA (1)...(19): siRNA sense strand
gagcacagcggugucaaua

SEQ ID NO: 2147497 - RNA, 19 nt, Homo sapiens
  misc_RNA (1)...(19): siRNA sense strand
guucaaacaugccggagaa

SEQ ID NO: 2147498 - RNA, 19 nt, Homo sapiens
  misc_RNA (1)...(19): siRNA sense strand
gguggugucugaagccuuu

SEQ ID NO: 2147499 - RNA, 19 nt, Homo sapiens
  misc_RNA (1)...(19): siRNA sense strand
ugaagggacuaggcaauaa

SEQ ID NO: 2147500 - RNA, 19 nt, Homo sapiens
  misc_RNA (1)...(19): siRNA sense strand
ggaaagaaacgggugaaga

SEQ ID NO: 2147501 - RNA, 19 nt, Homo sapiens
  misc_RNA (1)...(19): siRNA sense strand
gaucuuggaugagguggaa

SEQ ID NO: 2147502 - RNA, 19 nt, Homo sapiens
  misc_RNA (1)...(19): siRNA sense strand
gaaaguccuaugaguuuga

SEQ ID NO: 2147503 - RNA, 19 nt, Homo sapiens
  misc_RNA (1)...(19): siRNA sense strand
ucacagaggcuaagaaugg

SEQ ID NO: 2147504 - RNA, 19 nt, Homo sapiens
  misc_RNA (1)...(19): siRNA sense strand
ccacagaacggcaggaaga

SEQ ID NO: 2147505 - RNA, 19 nt, Homo sapiens
  misc_RNA (1)...(19): siRNA sense strand
gaagggacuaggcaauaaa

SEQ ID NO: 2147506 - RNA, 19 nt, Homo sapiens
  misc_RNA (1)...(19): siRNA sense strand
gggaguggcucagaaguca

SEQ ID NO: 2147507 - RNA, 19 nt, Homo sapiens
  misc_RNA (1)...(19): siRNA sense strand
cauggagacucagauguuu

SEQ ID NO: 2147508 - RNA, 19 nt, Homo sapiens
  misc_RNA (1)...(19): siRNA sense strand
gguccgagcccaagaguau

SEQ ID NO: 2147509 - RNA, 19 nt, Homo sapiens
  misc_RNA (1)...(19): siRNA sense strand
ugacagaugagaacaguga

SEQ ID NO: 2147510 - RNA, 19 nt, Homo sapiens
  misc_RNA (1)...(19): siRNA sense strand
gauauguucagcuuggaua

SEQ ID NO: 2147511 - RNA, 19 nt, Homo sapiens
  misc_RNA (1)...(19): siRNA sense strand
ggaagagguccuugugguu

SEQ ID NO: 2147512 - RNA, 19 nt, Homo sapiens
  misc_RNA (1)...(19): siRNA sense strand
gguccacccuuccugagaa

SEQ ID NO: 2147513 - RNA, 19 nt, Homo sapiens
  misc_RNA (1)...(19): siRNA sense strand
gagaggaggaguagugaug

SEQ ID NO: 2147514 - RNA, 19 nt, Homo sapiens
  misc_RNA (1)...(19): siRNA sense strand
uaaaggacaagauaucaga

SEQ ID NO: 2147515 - RNA, 19 nt, Homo sapiens
  misc_RNA (1)...(19): siRNA sense strand
ugaagcaggucaagaaacu

SEQ ID NO: 2147516 - RNA, 19 nt, Homo sapiens
  misc_RNA (1)...(19): siRNA sense strand
cggagaacguucaaacaug

SEQ ID NO: 2147517 - RNA, 19 nt, Homo sapiens
  misc_RNA (1)...(19): siRNA sense strand
gcgaaucaacgccauuuau

SEQ ID NO: 2147518 - RNA, 19 nt, Homo sapiens
  misc_RNA (1)...(19): siRNA sense strand
gcagaagguucgguuacug

SEQ ID NO: 2147519 - RNA, 19 nt, Homo sapiens
  misc_RNA (1)...(19): siRNA sense strand
gaagaugggagcagaaggu

SEQ ID NO: 2147520 - RNA, 19 nt, Homo sapiens
  misc_RNA (1)...(19): siRNA sense strand
gaacagugagucugacagu

SEQ ID NO: 2147521 - RNA, 19 nt, Homo sapiens
  misc_RNA (1)...(19): siRNA sense strand
cagagaaggagaggaauaa

SEQ ID NO: 2147522 - RNA, 19 nt, Homo sapiens
  misc_RNA (1)...(19): siRNA sense strand
gaauaaaggagcagugaac

SEQ ID NO: 2147523 - RNA, 19 nt, Homo sapiens
  misc_RNA (1)...(19): siRNA sense strand
ucagaacccuugcccaucu

SEQ ID NO: 2147524 - RNA, 19 nt, Homo sapiens
  misc_RNA (1)...(19): siRNA sense strand
aaagcugucuccuccaaga

SEQ ID NO: 2147525 - RNA, 19 nt, Homo sapiens
  misc_RNA (1)...(19): siRNA sense strand
gaggagaacgucuaugaag

SEQ ID NO: 2147526 - RNA, 19 nt, Homo sapiens
  misc_RNA (1)...(19): siRNA sense strand
gaucaggagucaggcuuca

SEQ ID NO: 2147527 - RNA, 19 nt, Homo sapiens
  misc_RNA (1)...(19): siRNA sense strand
ggacaucgaguuacauggu

SEQ ID NO: 2147528 - RNA, 19 nt, Homo sapiens
  misc_RNA (1)...(19): siRNA sense strand
ggaggagaacgucuaugaa

SEQ ID NO: 2147529 - RNA, 19 nt, Homo sapiens
  misc_RNA (1)...(19): siRNA sense strand
gggcugacacgcacuuuau

SEQ ID NO: 2147530 - RNA, 19 nt, Homo sapiens
  misc_RNA (1)...(19): siRNA sense strand
ggacuaggcaauaaaauga

SEQ ID NO: 2147531 - RNA, 19 nt, Homo sapiens
  misc_RNA (1)...(19): siRNA sense strand
ccaagaguaucuggaaaca

SEQ ID NO: 2147532 - RNA, 19 nt, Homo sapiens
  misc_RNA (1)...(19): siRNA sense strand
ggacaagauaucagaaugg

SEQ ID NO: 2147533 - RNA, 19 nt, Homo sapiens
  misc_RNA (1)...(19): siRNA sense strand
gcccaagaguaucuggaaa

SEQ ID NO: 2147534 - RNA, 19 nt, Homo sapiens
  misc_RNA (1)...(19): siRNA sense strand
gagaggagggucaucuuca

SEQ ID NO: 2147535 - RNA, 19 nt, Homo sapiens
  misc_RNA (1)...(19): siRNA sense strand
caacaguucccucugaagu

SEQ ID NO: 2147536 - RNA, 19 nt, Homo sapiens
  misc_RNA (1)...(19): siRNA sense strand
cgaaucaacgccauuuaug

SEQ ID NO: 2147537 - RNA, 19 nt, Homo sapiens
  misc_RNA (1)...(19): siRNA sense strand
cacaagucccucaacauaa

SEQ ID NO: 2147538 - RNA, 19 nt, Homo sapiens
  misc_RNA (1)...(19): siRNA sense strand
aagaguaucuggaaacacu

SEQ ID NO: 2147539 - RNA, 19 nt, Homo sapiens
  misc_RNA (1)...(19): siRNA sense strand
ggagcagaagguucgguua

SEQ ID NO: 2147540 - RNA, 19 nt, Homo sapiens
  misc_RNA (1)...(19): siRNA sense strand
ucaagcugcuggacacuag

SEQ ID NO: 2147541 - RNA, 19 nt, Homo sapiens
  misc_RNA (1)...(19): siRNA sense strand
ggaauaaaggagcagugaa

SEQ ID NO: 2147542 - RNA, 19 nt, Homo sapiens
  misc_RNA (1)...(19): siRNA sense strand
agucaagaauggauauguu

SEQ ID NO: 2147543 - RNA, 19 nt, Homo sapiens
  misc_RNA (1)...(19): siRNA sense strand
cagacggacaggaggauua

SEQ ID NO: 2147544 - RNA, 19 nt, Homo sapiens
  misc_RNA (1)...(19): siRNA sense strand
caacagccgguuccucaga

SEQ ID NO: 2147545 - RNA, 19 nt, Homo sapiens
  misc_RNA (1)...(19): siRNA sense strand
cggaggagaacgucuauga

SEQ ID NO: 2147546 - RNA, 19 nt, Homo sapiens
  misc_RNA (1)...(19): siRNA sense strand
acagaaaguccuaugaguu

SEQ ID NO: 2147547 - RNA, 19 nt, Homo sapiens
  misc_RNA (1)...(19): siRNA sense strand
gagaaggagaggaauaaag

SEQ ID NO: 2147548 - RNA, 19 nt, Homo sapiens
  misc_RNA (1)...(19): siRNA sense strand
ggucacagaggcuaagaau

SEQ ID NO: 2147549 - RNA, 19 nt, Homo sapiens
  misc_RNA (1)...(19): siRNA sense strand
gcaaaaccauccuugucaa

SEQ ID NO: 2147550 - RNA, 19 nt, Homo sapiens
  misc_RNA (1)...(19): siRNA sense strand
acaguucccucugaaguug

SEQ ID NO: 2147551 - RNA, 19 nt, Homo sapiens
  misc_RNA (1)...(19): siRNA sense strand
ugccagaacucacccaaca

SEQ ID NO: 2147552 - RNA, 19 nt, Homo sapiens
  misc_RNA (1)...(19): siRNA sense strand
gcaggaagaagagaaagau

SEQ ID NO: 2147553 - RNA, 19 nt, Homo sapiens
  misc_RNA (1)...(19): siRNA sense strand
aggagaacgucuaugaaga

SEQ ID NO: 2147554 - RNA, 19 nt, Homo sapiens
  misc_RNA (1)...(19): siRNA sense strand
cacagaaaguccuaugagu

SEQ ID NO: 2147555 - RNA, 19 nt, Homo sapiens
  misc_RNA (1)...(19): siRNA sense strand
gaacgggaaguggauccua

SEQ ID NO: 2147556 - RNA, 19 nt, Homo sapiens
  misc_RNA (1)...(19): siRNA sense strand
gaaggagaggaauaaagga

SEQ ID NO: 2147557 - RNA, 19 nt, Homo sapiens
  misc_RNA (1)...(19): siRNA sense strand
gaggagggucaucuucauu

SEQ ID NO: 2147558 - RNA, 19 nt, Homo sapiens
  misc_RNA (1)...(19): siRNA sense strand
ggagaggagggucaucuuc

SEQ ID NO: 2147559 - RNA, 19 nt, Homo sapiens
  misc_RNA (1)...(19): siRNA sense strand
aagcugguguugcgaauca

SEQ ID NO: 2147560 - RNA, 19 nt, Homo sapiens
  misc_RNA (1)...(19): siRNA sense strand
acacugcccuccugacaag

SEQ ID NO: 2147561 - RNA, 19 nt, Homo sapiens
  misc_RNA (1)...(19): siRNA sense strand
aggaaagguucaugcagaa

SEQ ID NO: 2147562 - RNA, 19 nt, Homo sapiens
  misc_RNA (1)...(19): siRNA sense strand
ccaagagccuccgccacuu

SEQ ID NO: 2147563 - RNA, 19 nt, Homo sapiens
  misc_RNA (1)...(19): siRNA sense strand
ccaccuggucuguguguuu

SEQ ID NO: 2147564 - RNA, 19 nt, Homo sapiens
  misc_RNA (1)...(19): siRNA sense strand
caggaaaagugacagauga

SEQ ID NO: 2147565 - RNA, 19 nt, Homo sapiens
  misc_RNA (1)...(19): siRNA sense strand
ggcaucggcuucaggaaag

SEQ ID NO: 2147566 - RNA, 19 nt, Homo sapiens
  misc_RNA (1)...(19): siRNA sense strand
gaaugaggccaggaacaga

SEQ ID NO: 2147567 - RNA, 19 nt, Homo sapiens
  misc_RNA (1)...(19): siRNA sense strand
acacagaggagaagcugaa

SEQ ID NO: 2147568 - RNA, 19 nt, Homo sapiens
  misc_RNA (1)...(19): siRNA sense strand
gaagaggcugucccaguca

SEQ ID NO: 2147569 - RNA, 19 nt, Homo sapiens
  misc_RNA (1)...(19): siRNA sense strand
agagaaagauacccaagcu

SEQ ID NO: 2147570 - RNA, 19 nt, Homo sapiens
  misc_RNA (1)...(19): siRNA sense strand
acagagaaggagaggaaua

SEQ ID NO: 2147571 - RNA, 19 nt, Homo sapiens
  misc_RNA (1)...(19): siRNA sense strand
gaggacaucgaguuacaug

SEQ ID NO: 2147572 - RNA, 19 nt, Homo sapiens
  misc_RNA (1)...(19): siRNA sense strand
ucgagcacguggacuuuga

SEQ ID NO: 2147573 - RNA, 19 nt, Homo sapiens
  misc_RNA (1)...(19): siRNA sense strand
gaagcugagucgggaugga

SEQ ID NO: 2147574 - RNA, 19 nt, Homo sapiens
  misc_RNA (1)...(19): siRNA sense strand
gaacagggaugcuuagaua

SEQ ID NO: 2147575 - RNA, 19 nt, Homo sapiens
  misc_RNA (1)...(19): siRNA sense strand
gaagaauacuggaaaguug

SEQ ID NO: 2147576 - RNA, 19 nt, Homo sapiens
  misc_RNA (1)...(19): siRNA sense strand
gaagaggauugccguuuaa

SEQ ID NO: 2147577 - RNA, 19 nt, Homo sapiens
  misc_RNA (1)...(19): siRNA sense strand
ggacuugugugcugccuua

SEQ ID NO: 2147578 - RNA, 19 nt, Homo sapiens
  misc_RNA (1)...(19): siRNA sense strand
gacaagagcuacugcauca

SEQ ID NO: 2147579 - RNA, 19 nt, Homo sapiens
  misc_RNA (1)...(19): siRNA sense strand
gaugaacaguugaacauga

SEQ ID NO: 2147580 - RNA, 19 nt, Homo sapiens
  misc_RNA (1)...(19): siRNA sense strand
agaagaggauugccguuua

SEQ ID NO: 2147581 - RNA, 19 nt, Homo sapiens
  misc_RNA (1)...(19): siRNA sense strand
agaaagaccugcggcauaa

SEQ ID NO: 2147582 - RNA, 19 nt, Homo sapiens
  misc_RNA (1)...(19): siRNA sense strand
gcaggaaauucaucuacaa

SEQ ID NO: 2147583 - RNA, 19 nt, Homo sapiens
  misc_RNA (1)...(19): siRNA sense strand
gaacaagggagaaugcuau

SEQ ID NO: 2147584 - RNA, 19 nt, Homo sapiens
  misc_RNA (1)...(19): siRNA sense strand
gcaaaggcuuccuccagaa

SEQ ID NO: 2147585 - RNA, 19 nt, Homo sapiens
  misc_RNA (1)...(19): siRNA sense strand
caagggagaaugcuauuaa

SEQ ID NO: 2147586 - RNA, 19 nt, Homo sapiens
  misc_RNA (1)...(19): siRNA sense strand
gcagauacccaaaguacaa

SEQ ID NO: 2147587 - RNA, 19 nt, Homo sapiens
  misc_RNA (1)...(19): siRNA sense strand
gcuugaagguccacuugua

SEQ ID NO: 2147588 - RNA, 19 nt, Homo sapiens
  misc_RNA (1)...(19): siRNA sense strand
gacaagaccuuccgguaca

SEQ ID NO: 2147589 - RNA, 19 nt, Homo sapiens
  misc_RNA (1)...(19): siRNA sense strand
ggcagaagcaaauguauaa

SEQ ID NO: 2147590 - RNA, 19 nt, Homo sapiens
  misc_RNA (1)...(19): siRNA sense strand
caacuagcccuccuacuga

SEQ ID NO: 2147591 - RNA, 19 nt, Homo sapiens
  misc_RNA (1)...(19): siRNA sense strand
gaggauugccguuuaaaug

SEQ ID NO: 2147592 - RNA, 19 nt, Homo sapiens
  misc_RNA (1)...(19): siRNA sense strand
ccagggcgcuuagaaauuc

SEQ ID NO: 2147593 - RNA, 19 nt, Homo sapiens
  misc_RNA (1)...(19): siRNA sense strand
cuggaaaguugcuauguuu

SEQ ID NO: 2147594 - RNA, 19 nt, Homo sapiens
  misc_RNA (1)...(19): siRNA sense strand
gggagaaugcuauuaauca

SEQ ID NO: 2147595 - RNA, 19 nt, Homo sapiens
  misc_RNA (1)...(19): siRNA sense strand
gccauucucuugugugaug

SEQ ID NO: 2147596 - RNA, 19 nt, Homo sapiens
  misc_RNA (1)...(19): siRNA sense strand
guaaggagggauuugcuaa

SEQ ID NO: 2147597 - RNA, 19 nt, Homo sapiens
  misc_RNA (1)...(19): siRNA sense strand
uugaugauguggccuuaua

SEQ ID NO: 2147598 - RNA, 19 nt, Homo sapiens
  misc_RNA (1)...(19): siRNA sense strand
ggaaagagagaaagauuuu

SEQ ID NO: 2147599 - RNA, 19 nt, Homo sapiens
  misc_RNA (1)...(19): siRNA sense strand
gggaaagagagaaagauuu

SEQ ID NO: 2147600 - RNA, 19 nt, Homo sapiens
  misc_RNA (1)...(19): siRNA sense strand
gcaaauguauaagcaagag

SEQ ID NO: 2147601 - RNA, 19 nt, Homo sapiens
  misc_RNA (1)...(19): siRNA sense strand
cauaugauccagacaagaa

SEQ ID NO: 2147602 - RNA, 19 nt, Homo sapiens
  misc_RNA (1)...(19): siRNA sense strand
ggagaaugcuauuaaucag

SEQ ID NO: 2147603 - RNA, 19 nt, Homo sapiens
  misc_RNA (1)...(19): siRNA sense strand
gggccaaccugaagaagca

SEQ ID NO: 2147604 - RNA, 19 nt, Homo sapiens
  misc_RNA (1)...(19): siRNA sense strand
gaaaguugcuauguuuuga

SEQ ID NO: 2147605 - RNA, 19 nt, Homo sapiens
  misc_RNA (1)...(19): siRNA sense strand
caagagaugaagaccaauu

SEQ ID NO: 2147606 - RNA, 19 nt, Homo sapiens
  misc_RNA (1)...(19): siRNA sense strand
ggaacaagggagaaugcua

SEQ ID NO: 2147607 - RNA, 19 nt, Homo sapiens
  misc_RNA (1)...(19): siRNA sense strand
caguugaacaugaagaaua

SEQ ID NO: 2147608 - RNA, 19 nt, Homo sapiens
  misc_RNA (1)...(19): siRNA sense strand
gggagauccuggagaagug

SEQ ID NO: 2147609 - RNA, 19 nt, Homo sapiens
  misc_RNA (1)...(19): siRNA sense strand
ugaagguccacuuguauaa

SEQ ID NO: 2147610 - RNA, 19 nt, Homo sapiens
  misc_RNA (1)...(19): siRNA sense strand
ggaaggccuccaugaaguu

SEQ ID NO: 2147611 - RNA, 19 nt, Homo sapiens
  misc_RNA (1)...(19): siRNA sense strand
ccucgucacucaucagguu

SEQ ID NO: 2147612 - RNA, 19 nt, Homo sapiens
  misc_RNA (1)...(19): siRNA sense strand
gaugauguggccuuauauu

SEQ ID NO: 2147613 - RNA, 19 nt, Homo sapiens
  misc_RNA (1)...(19): siRNA sense strand
agaagcaaauguauaagca

SEQ ID NO: 2147614 - RNA, 19 nt, Homo sapiens
  misc_RNA (1)...(19): siRNA sense strand
gaaagucuuccaaguaagg

SEQ ID NO: 2147615 - RNA, 19 nt, Homo sapiens
  misc_RNA (1)...(19): siRNA sense strand
aagaaagaccugcggcaua

SEQ ID NO: 2147616 - RNA, 19 nt, Homo sapiens
  misc_RNA (1)...(19): siRNA sense strand
gaaggaacucccaggacaa

SEQ ID NO: 2147617 - RNA, 19 nt, Homo sapiens
  misc_RNA (1)...(19): siRNA sense strand
gaacaguugaacaugaaga

SEQ ID NO: 2147618 - RNA, 19 nt, Homo sapiens
  misc_RNA (1)...(19): siRNA sense strand
cagcgaacagggaugcuua

SEQ ID NO: 2147619 - RNA, 19 nt, Homo sapiens
  misc_RNA (1)...(19): siRNA sense strand
gaagaagcaccugugucua

SEQ ID NO: 2147620 - RNA, 19 nt, Homo sapiens
  misc_RNA (1)...(19): siRNA sense strand
uaacugugacauuugauga

SEQ ID NO: 2147621 - RNA, 19 nt, Homo sapiens
  misc_RNA (1)...(19): siRNA sense strand
aagagaugaagaccaauua

SEQ ID NO: 2147622 - RNA, 19 nt, Homo sapiens
  misc_RNA (1)...(19): siRNA sense strand
ggcaggaaauucaucuaca

SEQ ID NO: 2147623 - RNA, 19 nt, Homo sapiens
  misc_RNA (1)...(19): siRNA sense strand
ugaagaauacuggaaaguu

SEQ ID NO: 2147624 - RNA, 19 nt, Homo sapiens
  misc_RNA (1)...(19): siRNA sense strand
ccaauuacgagacccuuga

SEQ ID NO: 2147625 - RNA, 19 nt, Homo sapiens
  misc_RNA (1)...(19): siRNA sense strand
ggacgagcacaucagaguu

SEQ ID NO: 2147626 - RNA, 19 nt, Homo sapiens
  misc_RNA (1)...(19): siRNA sense strand
ugaagaagcaccugugucu

SEQ ID NO: 2147627 - RNA, 19 nt, Homo sapiens
  misc_RNA (1)...(19): siRNA sense strand
ccacagggccaagaugcua

SEQ ID NO: 2147628 - RNA, 19 nt, Homo sapiens
  misc_RNA (1)...(19): siRNA sense strand
ggauugccguuuaaauggu

SEQ ID NO: 2147629 - RNA, 19 nt, Homo sapiens
  misc_RNA (1)...(19): siRNA sense strand
cagauuugaucacauggau

SEQ ID NO: 2147630 - RNA, 19 nt, Homo sapiens
  misc_RNA (1)...(19): siRNA sense strand
agcaagagaugaagaccaa

SEQ ID NO: 2147631 - RNA, 19 nt, Homo sapiens
  misc_RNA (1)...(19): siRNA sense strand
gagaaguggcagaagcaaa

SEQ ID NO: 2147632 - RNA, 19 nt, Homo sapiens
  misc_RNA (1)...(19): siRNA sense strand
cgguaacugugacauuuga

SEQ ID NO: 2147633 - RNA, 19 nt, Homo sapiens
  misc_RNA (1)...(19): siRNA sense strand
gcaaaaguuucacucaaca

SEQ ID NO: 2147634 - RNA, 19 nt, Homo sapiens
  misc_RNA (1)...(19): siRNA sense strand
caaaagccauucucuugug

SEQ ID NO: 2147635 - RNA, 19 nt, Homo sapiens
  misc_RNA (1)...(19): siRNA sense strand
cgcagaggcuccuguguca

SEQ ID NO: 2147636 - RNA, 19 nt, Homo sapiens
  misc_RNA (1)...(19): siRNA sense strand
acagggaugcuuagauaaa

SEQ ID NO: 2147637 - RNA, 19 nt, Homo sapiens
  misc_RNA (1)...(19): siRNA sense strand
gaagcaaauguauaagcaa

SEQ ID NO: 2147638 - RNA, 19 nt, Homo sapiens
  misc_RNA (1)...(19): siRNA sense strand
caagccagauuugaucaca

SEQ ID NO: 2147639 - RNA, 19 nt, Homo sapiens
  misc_RNA (1)...(19): siRNA sense strand
uaaggagggauuugcuaaa

SEQ ID NO: 2147640 - RNA, 19 nt, Homo sapiens
  misc_RNA (1)...(19): siRNA sense strand
uggcagaagcaaauguaua

SEQ ID NO: 2147641 - RNA, 19 nt, Homo sapiens
  misc_RNA (1)...(19): siRNA sense strand
aagaugcuauuccugcuau

SEQ ID NO: 2147642 - RNA, 19 nt, Homo sapiens
  misc_RNA (1)...(19): siRNA sense strand
aaacaagaaggacaacuag

SEQ ID NO: 2147643 - RNA, 19 nt, Homo sapiens
  misc_RNA (1)...(19): siRNA sense strand
gcucaagacccacauugca

SEQ ID NO: 2147644 - RNA, 19 nt, Homo sapiens
  misc_RNA (1)...(19): siRNA sense strand
acaagagcuucuccuggaa

SEQ ID NO: 2147645 - RNA, 19 nt, Homo sapiens
  misc_RNA (1)...(19): siRNA sense strand
acaacuagcccuccuacug

SEQ ID NO: 2147646 - RNA, 19 nt, Homo sapiens
  misc_RNA (1)...(19): siRNA sense strand
agaaguggcagaagcaaau

SEQ ID NO: 2147647 - RNA, 19 nt, Homo sapiens
  misc_RNA (1)...(19): siRNA sense strand
caagaugcuauuccugcua

SEQ ID NO: 2147648 - RNA, 19 nt, Homo sapiens
  misc_RNA (1)...(19): siRNA sense strand
agugggagauccuggagaa

SEQ ID NO: 2147649 - RNA, 19 nt, Homo sapiens
  misc_RNA (1)...(19): siRNA sense strand
cagcauaugauccagacaa

SEQ ID NO: 2147650 - RNA, 19 nt, Homo sapiens
  misc_RNA (1)...(19): siRNA sense strand
aagccauucucuuguguga

SEQ ID NO: 2147651 - RNA, 19 nt, Homo sapiens
  misc_RNA (1)...(19): siRNA sense strand
gcagugagugugagaagag

SEQ ID NO: 2147652 - RNA, 19 nt, Homo sapiens
  misc_RNA (1)...(19): siRNA sense strand
cagaggcuccugugucaga

SEQ ID NO: 2147653 - RNA, 19 nt, Homo sapiens
  misc_RNA (1)...(19): siRNA sense strand
caugaagaauacuggaaag

SEQ ID NO: 2147654 - RNA, 19 nt, Homo sapiens
  misc_RNA (1)...(19): siRNA sense strand
aaaguuucacucaacagua

SEQ ID NO: 2147655 - RNA, 19 nt, Homo sapiens
  misc_RNA (1)...(19): siRNA sense strand
uguauaagcaagagaugaa

SEQ ID NO: 2147656 - RNA, 19 nt, Homo sapiens
  misc_RNA (1)...(19): siRNA sense strand
acuggaaaguugcuauguu

SEQ ID NO: 2147657 - RNA, 19 nt, Homo sapiens
  misc_RNA (1)...(19): siRNA sense strand
augaacaguugaacaugaa

SEQ ID NO: 2147658 - RNA, 19 nt, Homo sapiens
  misc_RNA (1)...(19): siRNA sense strand
gacgagcacaucagaguuc

SEQ ID NO: 2147659 - RNA, 19 nt, Homo sapiens
  misc_RNA (1)...(19): siRNA sense strand
ggcaugaagguccaucuga

SEQ ID NO: 2147660 - RNA, 19 nt, Homo sapiens
  misc_RNA (1)...(19): siRNA sense strand
ggacaaaagaagaggauug

SEQ ID NO: 2147661 - RNA, 19 nt, Homo sapiens
  misc_RNA (1)...(19): siRNA sense strand
ggaaaguugcuauguuuug

SEQ ID NO: 2147662 - RNA, 19 nt, Homo sapiens
  misc_RNA (1)...(19): siRNA sense strand
gaagguccacuuguauaag

SEQ ID NO: 2147663 - RNA, 19 nt, Homo sapiens
  misc_RNA (1)...(19): siRNA sense strand
gagcacaucagaguucaca

SEQ ID NO: 2147664 - RNA, 19 nt, Homo sapiens
  misc_RNA (1)...(19): siRNA sense strand
aagggagaaugcuauuaau

SEQ ID NO: 2147665 - RNA, 19 nt, Homo sapiens
  misc_RNA (1)...(19): siRNA sense strand
gcucacagaacacauucga

SEQ ID NO: 2147666 - RNA, 19 nt, Homo sapiens
  misc_RNA (1)...(19): siRNA sense strand
gccaaaagccauucucuug

SEQ ID NO: 2147667 - RNA, 19 nt, Homo sapiens
  misc_RNA (1)...(19): siRNA sense strand
agagaagcccuaccagugu

SEQ ID NO: 2147668 - RNA, 19 nt, Homo sapiens
  misc_RNA (1)...(19): siRNA sense strand
ggaacaagagugggagauc

SEQ ID NO: 2147669 - RNA, 19 nt, Homo sapiens
  misc_RNA (1)...(19): siRNA sense strand
aagaagaggauugccguuu

SEQ ID NO: 2147670 - RNA, 19 nt, Homo sapiens
  misc_RNA (1)...(19): siRNA sense strand
cgaggagcccuuccagugu

SEQ ID NO: 2147671 - RNA, 19 nt, Homo sapiens
  misc_RNA (1)...(19): siRNA sense strand
guaacugugacauuugaug

SEQ ID NO: 2147672 - RNA, 19 nt, Homo sapiens
  misc_RNA (1)...(19): siRNA sense strand
cgagggaaagagagaaaga

SEQ ID NO: 2147673 - RNA, 19 nt, Homo sapiens
  misc_RNA (1)...(19): siRNA sense strand
uucgguaacugugacauuu

SEQ ID NO: 2147674 - RNA, 19 nt, Homo sapiens
  misc_RNA (1)...(19): siRNA sense strand
gaacagggaugcuuagaua

SEQ ID NO: 2147675 - RNA, 19 nt, Homo sapiens
  misc_RNA (1)...(19): siRNA sense strand
gaagaauacuggaaaguug

SEQ ID NO: 2147676 - RNA, 19 nt, Homo sapiens
  misc_RNA (1)...(19): siRNA sense strand
gaagaggauugccguuuaa

SEQ ID NO: 2147677 - RNA, 19 nt, Homo sapiens
  misc_RNA (1)...(19): siRNA sense strand
ggacuugugugcugccuua

SEQ ID NO: 2147678 - RNA, 19 nt, Homo sapiens
  misc_RNA (1)...(19): siRNA sense strand
gacaagagcuacugcauca

SEQ ID NO: 2147679 - RNA, 19 nt, Homo sapiens
  misc_RNA (1)...(19): siRNA sense strand
gaugaacaguugaacauga

SEQ ID NO: 2147680 - RNA, 19 nt, Homo sapiens
  misc_RNA (1)...(19): siRNA sense strand
agaagaggauugccguuua

SEQ ID NO: 2147681 - RNA, 19 nt, Homo sapiens
  misc_RNA (1)...(19): siRNA sense strand
agaaagaccugcggcauaa

SEQ ID NO: 2147682 - RNA, 19 nt, Homo sapiens
  misc_RNA (1)...(19): siRNA sense strand
gcaggaaauucaucuacaa

SEQ ID NO: 2147683 - RNA, 19 nt, Homo sapiens
  misc_RNA (1)...(19): siRNA sense strand
gaacaagggagaaugcuau

SEQ ID NO: 2147684 - RNA, 19 nt, Homo sapiens
  misc_RNA (1)...(19): siRNA sense strand
gcaaaggcuuccuccagaa

SEQ ID NO: 2147685 - RNA, 19 nt, Homo sapiens
  misc_RNA (1)...(19): siRNA sense strand
caagggagaaugcuauuaa

SEQ ID NO: 2147686 - RNA, 19 nt, Homo sapiens
  misc_RNA (1)...(19): siRNA sense strand
gcagauacccaaaguacaa

SEQ ID NO: 2147687 - RNA, 19 nt, Homo sapiens
  misc_RNA (1)...(19): siRNA sense strand
gcuugaagguccacuugua

SEQ ID NO: 2147688 - RNA, 19 nt, Homo sapiens
  misc_RNA (1)...(19): siRNA sense strand
gacaagaccuuccgguaca

SEQ ID NO: 2147689 - RNA, 19 nt, Homo sapiens
  misc_RNA (1)...(19): siRNA sense strand
ggcagaagcaaauguauaa

SEQ ID NO: 2147690 - RNA, 19 nt, Homo sapiens
  misc_RNA (1)...(19): siRNA sense strand
caacuagcccuccuacuga

SEQ ID NO: 2147691 - RNA, 19 nt, Homo sapiens
  misc_RNA (1)...(19): siRNA sense strand
gaggauugccguuuaaaug

SEQ ID NO: 2147692 - RNA, 19 nt, Homo sapiens
  misc_RNA (1)...(19): siRNA sense strand
ccagggcgcuuagaaauuc

SEQ ID NO: 2147693 - RNA, 19 nt, Homo sapiens
  misc_RNA (1)...(19): siRNA sense strand
cuggaaaguugcuauguuu

SEQ ID NO: 2147694 - RNA, 19 nt, Homo sapiens
  misc_RNA (1)...(19): siRNA sense strand
gggagaaugcuauuaauca

SEQ ID NO: 2147695 - RNA, 19 nt, Homo sapiens
  misc_RNA (1)...(19): siRNA sense strand
gccauucucuugugugaug

SEQ ID NO: 2147696 - RNA, 19 nt, Homo sapiens
  misc_RNA (1)...(19): siRNA sense strand
guaaggagggauuugcuaa

SEQ ID NO: 2147697 - RNA, 19 nt, Homo sapiens
  misc_RNA (1)...(19): siRNA sense strand
uugaugauguggccuuaua

SEQ ID NO: 2147698 - RNA, 19 nt, Homo sapiens
  misc_RNA (1)...(19): siRNA sense strand
ggaaagagagaaagauuuu

SEQ ID NO: 2147699 - RNA, 19 nt, Homo sapiens
  misc_RNA (1)...(19): siRNA sense strand
gggaaagagagaaagauuu

SEQ ID NO: 2147700 - RNA, 19 nt, Homo sapiens
  misc_RNA (1)...(19): siRNA sense strand
gcaaauguauaagcaagag

SEQ ID NO: 2147701 - RNA, 19 nt, Homo sapiens
  misc_RNA (1)...(19): siRNA sense strand
cauaugauccagacaagaa

SEQ ID NO: 2147702 - RNA, 19 nt, Homo sapiens
  misc_RNA (1)...(19): siRNA sense strand
ggagaaugcuauuaaucag

SEQ ID NO: 2147703 - RNA, 19 nt, Homo sapiens
  misc_RNA (1)...(19): siRNA sense strand
gggccaaccugaagaagca

SEQ ID NO: 2147704 - RNA, 19 nt, Homo sapiens
  misc_RNA (1)...(19): siRNA sense strand
gaaaguugcuauguuuuga

SEQ ID NO: 2147705 - RNA, 19 nt, Homo sapiens
  misc_RNA (1)...(19): siRNA sense strand
caagagaugaagaccaauu

SEQ ID NO: 2147706 - RNA, 19 nt, Homo sapiens
  misc_RNA (1)...(19): siRNA sense strand
ggaacaagggagaaugcua

SEQ ID NO: 2147707 - RNA, 19 nt, Homo sapiens
  misc_RNA (1)...(19): siRNA sense strand
caguugaacaugaagaaua

SEQ ID NO: 2147708 - RNA, 19 nt, Homo sapiens
  misc_RNA (1)...(19): siRNA sense strand
gggagauccuggagaagug

SEQ ID NO: 2147709 - RNA, 19 nt, Homo sapiens
  misc_RNA (1)...(19): siRNA sense strand
ugaagguccacuuguauaa

SEQ ID NO: 2147710 - RNA, 19 nt, Homo sapiens
  misc_RNA (1)...(19): siRNA sense strand
ggaaggccuccaugaaguu

SEQ ID NO: 2147711 - RNA, 19 nt, Homo sapiens
  misc_RNA (1)...(19): siRNA sense strand
ccucgucacucaucagguu

SEQ ID NO: 2147712 - RNA, 19 nt, Homo sapiens
  misc_RNA (1)...(19): siRNA sense strand
gaugauguggccuuauauu

SEQ ID NO: 2147713 - RNA, 19 nt, Homo sapiens
  misc_RNA (1)...(19): siRNA sense strand
agaagcaaauguauaagca

SEQ ID NO: 2147714 - RNA, 19 nt, Homo sapiens
  misc_RNA (1)...(19): siRNA sense strand
gaaagucuuccaaguaagg

SEQ ID NO: 2147715 - RNA, 19 nt, Homo sapiens
  misc_RNA (1)...(19): siRNA sense strand
aagaaagaccugcggcaua

SEQ ID NO: 2147716 - RNA, 19 nt, Homo sapiens
  misc_RNA (1)...(19): siRNA sense strand
gaaggaacucccaggacaa

SEQ ID NO: 2147717 - RNA, 19 nt, Homo sapiens
  misc_RNA (1)...(19): siRNA sense strand
gaacaguugaacaugaaga

SEQ ID NO: 2147718 - RNA, 19 nt, Homo sapiens
  misc_RNA (1)...(19): siRNA sense strand
cagcgaacagggaugcuua

SEQ ID NO: 2147719 - RNA, 19 nt, Homo sapiens
  misc_RNA (1)...(19): siRNA sense strand
gaagaagcaccugugucua

SEQ ID NO: 2147720 - RNA, 19 nt, Homo sapiens
  misc_RNA (1)...(19): siRNA sense strand
uaacugugacauuugauga

SEQ ID NO: 2147721 - RNA, 19 nt, Homo sapiens
  misc_RNA (1)...(19): siRNA sense strand
aagagaugaagaccaauua

SEQ ID NO: 2147722 - RNA, 19 nt, Homo sapiens
  misc_RNA (1)...(19): siRNA sense strand
ggcaggaaauucaucuaca

SEQ ID NO: 2147723 - RNA, 19 nt, Homo sapiens
  misc_RNA (1)...(19): siRNA sense strand
ugaagaauacuggaaaguu

SEQ ID NO: 2147724 - RNA, 19 nt, Homo sapiens
  misc_RNA (1)...(19): siRNA sense strand
ccaauuacgagacccuuga

SEQ ID NO: 2147725 - RNA, 19 nt, Homo sapiens
  misc_RNA (1)...(19): siRNA sense strand
ggacgagcacaucagaguu

SEQ ID NO: 2147726 - RNA, 19 nt, Homo sapiens
  misc_RNA (1)...(19): siRNA sense strand
ugaagaagcaccugugucu

SEQ ID NO: 2147727 - RNA, 19 nt, Homo sapiens
  misc_RNA (1)...(19): siRNA sense strand
ccacagggccaagaugcua

SEQ ID NO: 2147728 - RNA, 19 nt, Homo sapiens
  misc_RNA (1)...(19): siRNA sense strand
ggauugccguuuaaauggu

SEQ ID NO: 2147729 - RNA, 19 nt, Homo sapiens
  misc_RNA (1)...(19): siRNA sense strand
cagauuugaucacauggau

SEQ ID NO: 2147730 - RNA, 19 nt, Homo sapiens
  misc_RNA (1)...(19): siRNA sense strand
agcaagagaugaagaccaa

SEQ ID NO: 2147731 - RNA, 19 nt, Homo sapiens
  misc_RNA (1)...(19): siRNA sense strand
gagaaguggcagaagcaaa

SEQ ID NO: 2147732 - RNA, 19 nt, Homo sapiens
  misc_RNA (1)...(19): siRNA sense strand
cgguaacugugacauuuga

SEQ ID NO: 2147733 - RNA, 19 nt, Homo sapiens
  misc_RNA (1)...(19): siRNA sense strand
gcaaaaguuucacucaaca

SEQ ID NO: 2147734 - RNA, 19 nt, Homo sapiens
  misc_RNA (1)...(19): siRNA sense strand
caaaagccauucucuugug

SEQ ID NO: 2147735 - RNA, 19 nt, Homo sapiens
  misc_RNA (1)...(19): siRNA sense strand
cgcagaggcuccuguguca

SEQ ID NO: 2147736 - RNA, 19 nt, Homo sapiens
  misc_RNA (1)...(19): siRNA sense strand
acagggaugcuuagauaaa

SEQ ID NO: 2147737 - RNA, 19 nt, Homo sapiens
  misc_RNA (1)...(19): siRNA sense strand
gaagcaaauguauaagcaa

SEQ ID NO: 2147738 - RNA, 19 nt, Homo sapiens
  misc_RNA (1)...(19): siRNA sense strand
caagccagauuugaucaca

SEQ ID NO: 2147739 - RNA, 19 nt, Homo sapiens
  misc_RNA (1)...(19): siRNA sense strand
uaaggagggauuugcuaaa

SEQ ID NO: 2147740 - RNA, 19 nt, Homo sapiens
  misc_RNA (1)...(19): siRNA sense strand
uggcagaagcaaauguaua

SEQ ID NO: 2147741 - RNA, 19 nt, Homo sapiens
  misc_RNA (1)...(19): siRNA sense strand
aagaugcuauuccugcuau

SEQ ID NO: 2147742 - RNA, 19 nt, Homo sapiens
  misc_RNA (1)...(19): siRNA sense strand
aaacaagaaggacaacuag

SEQ ID NO: 2147743 - RNA, 19 nt, Homo sapiens
  misc_RNA (1)...(19): siRNA sense strand
gcucaagacccacauugca

SEQ ID NO: 2147744 - RNA, 19 nt, Homo sapiens
  misc_RNA (1)...(19): siRNA sense strand
acaagagcuucuccuggaa

SEQ ID NO: 2147745 - RNA, 19 nt, Homo sapiens
  misc_RNA (1)...(19): siRNA sense strand
acaacuagcccuccuacug

SEQ ID NO: 2147746 - RNA, 19 nt, Homo sapiens
  misc_RNA (1)...(19): siRNA sense strand
agaaguggcagaagcaaau

SEQ ID NO: 2147747 - RNA, 19 nt, Homo sapiens
  misc_RNA (1)...(19): siRNA sense strand
caagaugcuauuccugcua

SEQ ID NO: 2147748 - RNA, 19 nt, Homo sapiens
  misc_RNA (1)...(19): siRNA sense strand
agugggagauccuggagaa

SEQ ID NO: 2147749 - RNA, 19 nt, Homo sapiens
  misc_RNA (1)...(19): siRNA sense strand
cagcauaugauccagacaa

SEQ ID NO: 2147750 - RNA, 19 nt, Homo sapiens
  misc_RNA (1)...(19): siRNA sense strand
aagccauucucuuguguga

SEQ ID NO: 2147751 - RNA, 19 nt, Homo sapiens
  misc_RNA (1)...(19): siRNA sense strand
gcagugagugugagaagag

SEQ ID NO: 2147752 - RNA, 19 nt, Homo sapiens
  misc_RNA (1)...(19): siRNA sense strand
cagaggcuccugugucaga

SEQ ID NO: 2147753 - RNA, 19 nt, Homo sapiens
  misc_RNA (1)...(19): siRNA sense strand
caugaagaauacuggaaag

SEQ ID NO: 2147754 - RNA, 19 nt, Homo sapiens
  misc_RNA (1)...(19): siRNA sense strand
aaaguuucacucaacagua

SEQ ID NO: 2147755 - RNA, 19 nt, Homo sapiens
  misc_RNA (1)...(19): siRNA sense strand
uguauaagcaagagaugaa

SEQ ID NO: 2147756 - RNA, 19 nt, Homo sapiens
  misc_RNA (1)...(19): siRNA sense strand
acuggaaaguugcuauguu

SEQ ID NO: 2147757 - RNA, 19 nt, Homo sapiens
  misc_RNA (1)...(19): siRNA sense strand
augaacaguugaacaugaa

SEQ ID NO: 2147758 - RNA, 19 nt, Homo sapiens
  misc_RNA (1)...(19): siRNA sense strand
gacgagcacaucagaguuc

SEQ ID NO: 2147759 - RNA, 19 nt, Homo sapiens
  misc_RNA (1)...(19): siRNA sense strand
ggcaugaagguccaucuga

SEQ ID NO: 2147760 - RNA, 19 nt, Homo sapiens
  misc_RNA (1)...(19): siRNA sense strand
ggacaaaagaagaggauug

SEQ ID NO: 2147761 - RNA, 19 nt, Homo sapiens
  misc_RNA (1)...(19): siRNA sense strand
ggaaaguugcuauguuuug

SEQ ID NO: 2147762 - RNA, 19 nt, Homo sapiens
  misc_RNA (1)...(19): siRNA sense strand
gaagguccacuuguauaag

SEQ ID NO: 2147763 - RNA, 19 nt, Homo sapiens
  misc_RNA (1)...(19): siRNA sense strand
gagcacaucagaguucaca

SEQ ID NO: 2147764 - RNA, 19 nt, Homo sapiens
  misc_RNA (1)...(19): siRNA sense strand
aagggagaaugcuauuaau

SEQ ID NO: 2147765 - RNA, 19 nt, Homo sapiens
  misc_RNA (1)...(19): siRNA sense strand
gcucacagaacacauucga

SEQ ID NO: 2147766 - RNA, 19 nt, Homo sapiens
  misc_RNA (1)...(19): siRNA sense strand
gccaaaagccauucucuug

SEQ ID NO: 2147767 - RNA, 19 nt, Homo sapiens
  misc_RNA (1)...(19): siRNA sense strand
agagaagcccuaccagugu

SEQ ID NO: 2147768 - RNA, 19 nt, Homo sapiens
  misc_RNA (1)...(19): siRNA sense strand
ggaacaagagugggagauc

SEQ ID NO: 2147769 - RNA, 19 nt, Homo sapiens
  misc_RNA (1)...(19): siRNA sense strand
aagaagaggauugccguuu

SEQ ID NO: 2147770 - RNA, 19 nt, Homo sapiens
  misc_RNA (1)...(19): siRNA sense strand
cgaggagcccuuccagugu

SEQ ID NO: 2147771 - RNA, 19 nt, Homo sapiens
  misc_RNA (1)...(19): siRNA sense strand
guaacugugacauuugaug

SEQ ID NO: 2147772 - RNA, 19 nt, Homo sapiens
  misc_RNA (1)...(19): siRNA sense strand
cgagggaaagagagaaaga

SEQ ID NO: 2147773 - RNA, 19 nt, Homo sapiens
  misc_RNA (1)...(19): siRNA sense strand
uucgguaacugugacauuu

SEQ ID NO: 2147774 - RNA, 19 nt, Homo sapiens
  misc_RNA (1)...(19): siRNA sense strand
agaagggccucguguauga

SEQ ID NO: 2147775 - RNA, 19 nt, Homo sapiens
  misc_RNA (1)...(19): siRNA sense strand
caucuugccugguuuguga

SEQ ID NO: 2147776 - RNA, 19 nt, Homo sapiens
  misc_RNA (1)...(19): siRNA sense strand
gcgugaagauggagaaugu

SEQ ID NO: 2147777 - RNA, 19 nt, Homo sapiens
  misc_RNA (1)...(19): siRNA sense strand
caauguggcugcugcuuca

SEQ ID NO: 2147778 - RNA, 19 nt, Homo sapiens
  misc_RNA (1)...(19): siRNA sense strand
gagaagcacuauccuugca

SEQ ID NO: 2147779 - RNA, 19 nt, Homo sapiens
  misc_RNA (1)...(19): siRNA sense strand
gcaggagauucaugcagaa

SEQ ID NO: 2147780 - RNA, 19 nt, Homo sapiens
  misc_RNA (1)...(19): siRNA sense strand
gggcaguggugaucaggaa

SEQ ID NO: 2147781 - RNA, 19 nt, Homo sapiens
  misc_RNA (1)...(19): siRNA sense strand
cagaguggcugugucagaa

SEQ ID NO: 2147782 - RNA, 19 nt, Homo sapiens
  misc_RNA (1)...(19): siRNA sense strand
gcagaacacccucccuuuc

SEQ ID NO: 2147783 - RNA, 19 nt, Homo sapiens
  misc_RNA (1)...(19): siRNA sense strand
gcacugggcccugguuaau

SEQ ID NO: 2147784 - RNA, 19 nt, Homo sapiens
  misc_RNA (1)...(19): siRNA sense strand
caacacacgccuugaagag

SEQ ID NO: 2147785 - RNA, 19 nt, Homo sapiens
  misc_RNA (1)...(19): siRNA sense strand
ucagaagggccucguguau

SEQ ID NO: 2147786 - RNA, 19 nt, Homo sapiens
  misc_RNA (1)...(19): siRNA sense strand
acacacacaucagcgagaa

SEQ ID NO: 2147787 - RNA, 19 nt, Homo sapiens
  misc_RNA (1)...(19): siRNA sense strand
gggcuggugucuucagagu

SEQ ID NO: 2147788 - RNA, 19 nt, Homo sapiens
  misc_RNA (1)...(19): siRNA sense strand
agagaggagucuggaggua

SEQ ID NO: 2147789 - RNA, 19 nt, Homo sapiens
  misc_RNA (1)...(19): siRNA sense strand
cgagugcgccaagcucuuu

SEQ ID NO: 2147790 - RNA, 19 nt, Homo sapiens
  misc_RNA (1)...(19): siRNA sense strand
uguccuggaucaagcaaga

SEQ ID NO: 2147791 - RNA, 19 nt, Homo sapiens
  misc_RNA (1)...(19): siRNA sense strand
guacagcaggagauucaug

SEQ ID NO: 2147792 - RNA, 19 nt, Homo sapiens
  misc_RNA (1)...(19): siRNA sense strand
gcgcgcacaucagggagaa

SEQ ID NO: 2147793 - RNA, 19 nt, Homo sapiens
  misc_RNA (1)...(19): siRNA sense strand
ggugcucagugucccaaga

SEQ ID NO: 2147794 - RNA, 19 nt, Homo sapiens
  misc_RNA (1)...(19): siRNA sense strand
cagaagggccucguguaug

SEQ ID NO: 2147795 - RNA, 19 nt, Homo sapiens
  misc_RNA (1)...(19): siRNA sense strand
ggcguucuguccuggauca

SEQ ID NO: 2147796 - RNA, 19 nt, Homo sapiens
  misc_RNA (1)...(19): siRNA sense strand
caguacagcaggagauuca

SEQ ID NO: 2147797 - RNA, 19 nt, Homo sapiens
  misc_RNA (1)...(19): siRNA sense strand
ucagaguggcugugucaga

SEQ ID NO: 2147798 - RNA, 19 nt, Homo sapiens
  misc_RNA (1)...(19): siRNA sense strand
caccaggacagccaugcua

SEQ ID NO: 2147799 - RNA, 19 nt, Homo sapiens
  misc_RNA (1)...(19): siRNA sense strand
gucagaagggccucgugua

SEQ ID NO: 2147800 - RNA, 19 nt, Homo sapiens
  misc_RNA (1)...(19): siRNA sense strand
gagcaccggcacacacaca

SEQ ID NO: 2147801 - RNA, 19 nt, Homo sapiens
  misc_RNA (1)...(19): siRNA sense strand
aaacgcaggccagcuggaa

SEQ ID NO: 2147802 - RNA, 19 nt, Homo sapiens
  misc_RNA (1)...(19): siRNA sense strand
ccucguguaugacagaaac

SEQ ID NO: 2147803 - RNA, 19 nt, Homo sapiens
  misc_RNA (1)...(19): siRNA sense strand
ggcacugggcccugguuaa

SEQ ID NO: 2147804 - RNA, 19 nt, Homo sapiens
  misc_RNA (1)...(19): siRNA sense strand
ggagacaggcaggcaacug

SEQ ID NO: 2147805 - RNA, 19 nt, Homo sapiens
  misc_RNA (1)...(19): siRNA sense strand
agccaggccucuccaucuu

SEQ ID NO: 2147806 - RNA, 19 nt, Homo sapiens
  misc_RNA (1)...(19): siRNA sense strand
gaacagagcccagguacug

SEQ ID NO: 2147807 - RNA, 19 nt, Homo sapiens
  misc_RNA (1)...(19): siRNA sense strand
ugaaggagaucccagaguu

SEQ ID NO: 2147808 - RNA, 19 nt, Homo sapiens
  misc_RNA (1)...(19): siRNA sense strand
ccaaaugggucgucaccuu

SEQ ID NO: 2147809 - RNA, 19 nt, Homo sapiens
  misc_RNA (1)...(19): siRNA sense strand
gacaaaccguggccuacaa

SEQ ID NO: 2147810 - RNA, 19 nt, Homo sapiens
  misc_RNA (1)...(19): siRNA sense strand
caucaaaacugccgacaaa

SEQ ID NO: 2147811 - RNA, 19 nt, Homo sapiens
  misc_RNA (1)...(19): siRNA sense strand
ccacgaggccuaaaccaaa

SEQ ID NO: 2147812 - RNA, 19 nt, Homo sapiens
  misc_RNA (1)...(19): siRNA sense strand
gagaaaaggcccaggguua

SEQ ID NO: 2147813 - RNA, 19 nt, Homo sapiens
  misc_RNA (1)...(19): siRNA sense strand
ucaacugucugaaggaaau

SEQ ID NO: 2147814 - RNA, 19 nt, Homo sapiens
  misc_RNA (1)...(19): siRNA sense strand
cagcggcucugaaggagaa

SEQ ID NO: 2147815 - RNA, 19 nt, Homo sapiens
  misc_RNA (1)...(19): siRNA sense strand
aaaggaagcccaccaggaa

SEQ ID NO: 2147816 - RNA, 19 nt, Homo sapiens
  misc_RNA (1)...(19): siRNA sense strand
gagcagagcccaggaacug

SEQ ID NO: 2147817 - RNA, 19 nt, Homo sapiens
  misc_RNA (1)...(19): siRNA sense strand
gaucccagaguucuuguuu

SEQ ID NO: 2147818 - RNA, 19 nt, Homo sapiens
  misc_RNA (1)...(19): siRNA sense strand
uuuagugccugcugccuua

SEQ ID NO: 2147819 - RNA, 19 nt, Homo sapiens
  misc_RNA (1)...(19): siRNA sense strand
gaacuggacagcagacaag

SEQ ID NO: 2147820 - RNA, 19 nt, Homo sapiens
  misc_RNA (1)...(19): siRNA sense strand
ggucugcucucugugaaga

SEQ ID NO: 2147821 - RNA, 19 nt, Homo sapiens
  misc_RNA (1)...(19): siRNA sense strand
ggagaacagagcccaggua

SEQ ID NO: 2147822 - RNA, 19 nt, Homo sapiens
  misc_RNA (1)...(19): siRNA sense strand
gugcugcccuugcggagaa

SEQ ID NO: 2147823 - RNA, 19 nt, Homo sapiens
  misc_RNA (1)...(19): siRNA sense strand
ggagaucccagaguucuug

SEQ ID NO: 2147824 - RNA, 19 nt, Homo sapiens
  misc_RNA (1)...(19): siRNA sense strand
gcagagcugugugagagau

SEQ ID NO: 2147825 - RNA, 19 nt, Homo sapiens
  misc_RNA (1)...(19): siRNA sense strand
caucaacugucugaaggaa

SEQ ID NO: 2147826 - RNA, 19 nt, Homo sapiens
  misc_RNA (1)...(19): siRNA sense strand
ugcagggucuggagaauug

SEQ ID NO: 2147827 - RNA, 19 nt, Homo sapiens
  misc_RNA (1)...(19): siRNA sense strand
cauggaagacccagaguug

SEQ ID NO: 2147828 - RNA, 19 nt, Homo sapiens
  misc_RNA (1)...(19): siRNA sense strand
gaaggagaucccagaguuc

SEQ ID NO: 2147829 - RNA, 19 nt, Homo sapiens
  misc_RNA (1)...(19): siRNA sense strand
cagccuggauggagagaga

SEQ ID NO: 2147830 - RNA, 19 nt, Homo sapiens
  misc_RNA (1)...(19): siRNA sense strand
gugaagaagcgaccagaga

SEQ ID NO: 2147831 - RNA, 19 nt, Homo sapiens
  misc_RNA (1)...(19): siRNA sense strand
ucauggcccuggucacaga

SEQ ID NO: 2147832 - RNA, 19 nt, Homo sapiens
  misc_RNA (1)...(19): siRNA sense strand
ccacagaggacaggagaga

SEQ ID NO: 2147833 - RNA, 19 nt, Homo sapiens
  misc_RNA (1)...(19): siRNA sense strand
ggagagcagagcccaggaa

SEQ ID NO: 2147834 - RNA, 19 nt, Homo sapiens
  misc_RNA (1)...(19): siRNA sense strand
gagggagccacgcugauga

SEQ ID NO: 2147835 - RNA, 19 nt, Homo sapiens
  misc_RNA (1)...(19): siRNA sense strand
ggccaagcuuccuggaugu

SEQ ID NO: 2147836 - RNA, 19 nt, Homo sapiens
  misc_RNA (1)...(19): siRNA sense strand
gaaguccucuccccaucaa

SEQ ID NO: 2147837 - RNA, 19 nt, Homo sapiens
  misc_RNA (1)...(19): siRNA sense strand
ccucucugcuuuccuguca

SEQ ID NO: 2147838 - RNA, 19 nt, Homo sapiens
  misc_RNA (1)...(19): siRNA sense strand
ggaacuggacagcagacaa

SEQ ID NO: 2147839 - RNA, 19 nt, Homo sapiens
  misc_RNA (1)...(19): siRNA sense strand
gcggucugcucucugugaa

SEQ ID NO: 2147840 - RNA, 19 nt, Homo sapiens
  misc_RNA (1)...(19): siRNA sense strand
gggcuccacugcagcucuu

SEQ ID NO: 2147841 - RNA, 19 nt, Homo sapiens
  misc_RNA (1)...(19): siRNA sense strand
gcucauggcccuggucaca

SEQ ID NO: 2147842 - RNA, 19 nt, Homo sapiens
  misc_RNA (1)...(19): siRNA sense strand
ugcaaggccucaucaacug

SEQ ID NO: 2147843 - RNA, 19 nt, Homo sapiens
  misc_RNA (1)...(19): siRNA sense strand
gaagcugcgccuccugugu

SEQ ID NO: 2147844 - RNA, 19 nt, Homo sapiens
  misc_RNA (1)...(19): siRNA sense strand
ggucugcuacacugucuga

SEQ ID NO: 2147845 - RNA, 19 nt, Homo sapiens
  misc_RNA (1)...(19): siRNA sense strand
ucccagaguucuuguuugg

SEQ ID NO: 2147846 - RNA, 19 nt, Homo sapiens
  misc_RNA (1)...(19): siRNA sense strand
uggugcagcuggugaagga

SEQ ID NO: 2147847 - RNA, 19 nt, Homo sapiens
  misc_RNA (1)...(19): siRNA sense strand
gcaaggccucaucaacugu

SEQ ID NO: 2147848 - RNA, 19 nt, Homo sapiens
  misc_RNA (1)...(19): siRNA sense strand
gcccaggguuagugaagca

SEQ ID NO: 2147849 - RNA, 19 nt, Homo sapiens
  misc_RNA (1)...(19): siRNA sense strand
ggucugcagagcuguguga

SEQ ID NO: 2147850 - RNA, 19 nt, Homo sapiens
  misc_RNA (1)...(19): siRNA sense strand
gcacagccugcaccucaca

SEQ ID NO: 2147851 - RNA, 19 nt, Homo sapiens
  misc_RNA (1)...(19): siRNA sense strand
ccuggaagccugucugaag

SEQ ID NO: 2147852 - RNA, 19 nt, Homo sapiens
  misc_RNA (1)...(19): siRNA sense strand
ccaccagcuucuccucauc

SEQ ID NO: 2147853 - RNA, 19 nt, Homo sapiens
  misc_RNA (1)...(19): siRNA sense strand
cacgaggccuaaaccaaag

SEQ ID NO: 2147854 - RNA, 19 nt, Homo sapiens
  misc_RNA (1)...(19): siRNA sense strand
cgacaaaccguggccuaca

SEQ ID NO: 2147855 - RNA, 19 nt, Homo sapiens
  misc_RNA (1)...(19): siRNA sense strand
aaccguggccuacaaggaa

SEQ ID NO: 2147856 - RNA, 19 nt, Homo sapiens
  misc_RNA (1)...(19): siRNA sense strand
gagcacagggacccgagau

SEQ ID NO: 2147857 - RNA, 19 nt, Homo sapiens
  misc_RNA (1)...(19): siRNA sense strand
gaauuucuccugggaacag

SEQ ID NO: 2147858 - RNA, 19 nt, Homo sapiens
  misc_RNA (1)...(19): siRNA sense strand
gaagucaagggcgcuaugg

SEQ ID NO: 2147859 - RNA, 19 nt, Homo sapiens
  misc_RNA (1)...(19): siRNA sense strand
caggaaguggccaccauga

SEQ ID NO: 2147860 - RNA, 19 nt, Homo sapiens
  misc_RNA (1)...(19): siRNA sense strand
aagcugcgccuccuguguu

SEQ ID NO: 2147861 - RNA, 19 nt, Homo sapiens
  misc_RNA (1)...(19): siRNA sense strand
ggccucaucaacugucuga

SEQ ID NO: 2147862 - RNA, 19 nt, Homo sapiens
  misc_RNA (1)...(19): siRNA sense strand
guucuggagggccuggaua

SEQ ID NO: 2147863 - RNA, 19 nt, Homo sapiens
  misc_RNA (1)...(19): siRNA sense strand
gcagccaagacccaugaga

SEQ ID NO: 2147864 - RNA, 19 nt, Homo sapiens
  misc_RNA (1)...(19): siRNA sense strand
ggagcuuggacauggaaga

SEQ ID NO: 2147865 - RNA, 19 nt, Homo sapiens
  misc_RNA (1)...(19): siRNA sense strand
ccaccgacagcucguguuc

SEQ ID NO: 2147866 - RNA, 19 nt, Homo sapiens
  misc_RNA (1)...(19): siRNA sense strand
gagaagcgcuuucgcaaga

SEQ ID NO: 2147867 - RNA, 19 nt, Homo sapiens
  misc_RNA (1)...(19): siRNA sense strand
gagcagauguccucuucua

SEQ ID NO: 2147868 - RNA, 19 nt, Homo sapiens
  misc_RNA (1)...(19): siRNA sense strand
gacaagcgcuucagcaaga

SEQ ID NO: 2147869 - RNA, 19 nt, Homo sapiens
  misc_RNA (1)...(19): siRNA sense strand
ggagaggaguggaugauuc

SEQ ID NO: 2147870 - RNA, 19 nt, Homo sapiens
  misc_RNA (1)...(19): siRNA sense strand
ggaggaaggugcccacaca

SEQ ID NO: 2147871 - RNA, 19 nt, Homo sapiens
  misc_RNA (1)...(19): siRNA sense strand
cagcaucuaucguuacuuc

SEQ ID NO: 2147872 - RNA, 19 nt, Homo sapiens
  misc_RNA (1)...(19): siRNA sense strand
ggaaggugcccacacagaa

SEQ ID NO: 2147873 - RNA, 19 nt, Homo sapiens
  misc_RNA (1)...(19): siRNA sense strand
caccugggcucgcaccaaa

SEQ ID NO: 2147874 - RNA, 19 nt, Homo sapiens
  misc_RNA (1)...(19): siRNA sense strand
gaagguggaggacgaagau

SEQ ID NO: 2147875 - RNA, 19 nt, Homo sapiens
  misc_RNA (1)...(19): siRNA sense strand
cagaagaggaggucgaaug

SEQ ID NO: 2147876 - RNA, 19 nt, Homo sapiens
  misc_RNA (1)...(19): siRNA sense strand
gaagcgcuuucgcaagaag

SEQ ID NO: 2147877 - RNA, 19 nt, Homo sapiens
  misc_RNA (1)...(19): siRNA sense strand
gcgacaagcgcuucagcaa

SEQ ID NO: 2147878 - RNA, 19 nt, Homo sapiens
  misc_RNA (1)...(19): siRNA sense strand
gcaagcgcuucagccagaa

SEQ ID NO: 2147879 - RNA, 19 nt, Homo sapiens
  misc_RNA (1)...(19): siRNA sense strand
ggaaugcgagaagcgcuuu

SEQ ID NO: 2147880 - RNA, 19 nt, Homo sapiens
  misc_RNA (1)...(19): siRNA sense strand
gaaggugcccacacagaac

SEQ ID NO: 2147881 - RNA, 19 nt, Homo sapiens
  misc_RNA (1)...(19): siRNA sense strand
aagaagacgcacuugauuc

SEQ ID NO: 2147882 - RNA, 19 nt, Homo sapiens
  misc_RNA (1)...(19): siRNA sense strand
ggcgagcgguccuucuucu

SEQ ID NO: 2147883 - RNA, 19 nt, Homo sapiens
  misc_RNA (1)...(19): siRNA sense strand
gagaggaguggaugauucg

SEQ ID NO: 2147884 - RNA, 19 nt, Homo sapiens
  misc_RNA (1)...(19): siRNA sense strand
gagaagcgcuuucgcaaga

SEQ ID NO: 2147885 - RNA, 19 nt, Homo sapiens
  misc_RNA (1)...(19): siRNA sense strand
gagcagauguccucuucua

SEQ ID NO: 2147886 - RNA, 19 nt, Homo sapiens
  misc_RNA (1)...(19): siRNA sense strand
gacaagcgcuucagcaaga

SEQ ID NO: 2147887 - RNA, 19 nt, Homo sapiens
  misc_RNA (1)...(19): siRNA sense strand
ggagaggaguggaugauuc

SEQ ID NO: 2147888 - RNA, 19 nt, Homo sapiens
  misc_RNA (1)...(19): siRNA sense strand
ggaggaaggugcccacaca

SEQ ID NO: 2147889 - RNA, 19 nt, Homo sapiens
  misc_RNA (1)...(19): siRNA sense strand
cagcaucuaucguuacuuc

SEQ ID NO: 2147890 - RNA, 19 nt, Homo sapiens
  misc_RNA (1)...(19): siRNA sense strand
ggaaggugcccacacagaa

SEQ ID NO: 2147891 - RNA, 19 nt, Homo sapiens
  misc_RNA (1)...(19): siRNA sense strand
caccugggcucgcaccaaa

SEQ ID NO: 2147892 - RNA, 19 nt, Homo sapiens
  misc_RNA (1)...(19): siRNA sense strand
gaagguggaggacgaagau

SEQ ID NO: 2147893 - RNA, 19 nt, Homo sapiens
  misc_RNA (1)...(19): siRNA sense strand
cagaagaggaggucgaaug

SEQ ID NO: 2147894 - RNA, 19 nt, Homo sapiens
  misc_RNA (1)...(19): siRNA sense strand
gaagcgcuuucgcaagaag

SEQ ID NO: 2147895 - RNA, 19 nt, Homo sapiens
  misc_RNA (1)...(19): siRNA sense strand
gcgacaagcgcuucagcaa

SEQ ID NO: 2147896 - RNA, 19 nt, Homo sapiens
  misc_RNA (1)...(19): siRNA sense strand
gcaagcgcuucagccagaa

SEQ ID NO: 2147897 - RNA, 19 nt, Homo sapiens
  misc_RNA (1)...(19): siRNA sense strand
ggaaugcgagaagcgcuuu

SEQ ID NO: 2147898 - RNA, 19 nt, Homo sapiens
  misc_RNA (1)...(19): siRNA sense strand
gaaggugcccacacagaac

SEQ ID NO: 2147899 - RNA, 19 nt, Homo sapiens
  misc_RNA (1)...(19): siRNA sense strand
aagaagacgcacuugauuc

SEQ ID NO: 2147900 - RNA, 19 nt, Homo sapiens
  misc_RNA (1)...(19): siRNA sense strand
ggcgagcgguccuucuucu

SEQ ID NO: 2147901 - RNA, 19 nt, Homo sapiens
  misc_RNA (1)...(19): siRNA sense strand
gagaggaguggaugauucg

SEQ ID NO: 2147902 - RNA, 19 nt, Homo sapiens
  misc_RNA (1)...(19): siRNA sense strand
gggauguccugcuccaaua

SEQ ID NO: 2147903 - RNA, 19 nt, Homo sapiens
  misc_RNA (1)...(19): siRNA sense strand
gcacugcucuggaguuugc

SEQ ID NO: 2147904 - RNA, 19 nt, Homo sapiens
  misc_RNA (1)...(19): siRNA sense strand
ccaccgccgucugcuguua

SEQ ID NO: 2147905 - RNA, 19 nt, Homo sapiens
  misc_RNA (1)...(19): siRNA sense strand
gugcccagcucucggaaug

SEQ ID NO: 2147906 - RNA, 19 nt, Homo sapiens
  misc_RNA (1)...(19): siRNA sense strand
gguggggucuuucccuuua

SEQ ID NO: 2147907 - RNA, 19 nt, Homo sapiens
  misc_RNA (1)...(19): siRNA sense strand
ccgcacugcucuggaguuu

SEQ ID NO: 2147908 - RNA, 19 nt, Homo sapiens
  misc_RNA (1)...(19): siRNA sense strand
ucuggaguuugcccucuuu

SEQ ID NO: 2147909 - RNA, 19 nt, Homo sapiens
  misc_RNA (1)...(19): siRNA sense strand
gggauguccugcuccaaua

SEQ ID NO: 2147910 - RNA, 19 nt, Homo sapiens
  misc_RNA (1)...(19): siRNA sense strand
gcacugcucuggaguuugc

SEQ ID NO: 2147911 - RNA, 19 nt, Homo sapiens
  misc_RNA (1)...(19): siRNA sense strand
gggccucuauuggguuaua

SEQ ID NO: 2147912 - RNA, 19 nt, Homo sapiens
  misc_RNA (1)...(19): siRNA sense strand
gugcccagcucucggaaug

SEQ ID NO: 2147913 - RNA, 19 nt, Homo sapiens
  misc_RNA (1)...(19): siRNA sense strand
gguggggucuuucccuuua

SEQ ID NO: 2147914 - RNA, 19 nt, Homo sapiens
  misc_RNA (1)...(19): siRNA sense strand
ccgcacugcucuggaguuu

SEQ ID NO: 2147915 - RNA, 19 nt, Homo sapiens
  misc_RNA (1)...(19): siRNA sense strand
ucuggaguuugcccucuuu

SEQ ID NO: 2147916 - RNA, 19 nt, Homo sapiens
  misc_RNA (1)...(19): siRNA sense strand
gagcuacacuguccacuuu

SEQ ID NO: 2147917 - RNA, 19 nt, Homo sapiens
  misc_RNA (1)...(19): siRNA sense strand
gacacucucuucuuccuua

SEQ ID NO: 2147918 - RNA, 19 nt, Homo sapiens
  misc_RNA (1)...(19): siRNA sense strand
caaccaagaccuguacuua

SEQ ID NO: 2147919 - RNA, 19 nt, Homo sapiens
  misc_RNA (1)...(19): siRNA sense strand
gcagcaguaucgcucauuu

SEQ ID NO: 2147920 - RNA, 19 nt, Homo sapiens
  misc_RNA (1)...(19): siRNA sense strand
ccaacaagcccuacaagaa

SEQ ID NO: 2147921 - RNA, 19 nt, Homo sapiens
  misc_RNA (1)...(19): siRNA sense strand
ggagcgggcuuacagugaa

SEQ ID NO: 2147922 - RNA, 19 nt, Homo sapiens
  misc_RNA (1)...(19): siRNA sense strand
ggaugcagguggugucuca

SEQ ID NO: 2147923 - RNA, 19 nt, Homo sapiens
  misc_RNA (1)...(19): siRNA sense strand
gagcucggcuuuccugagu

SEQ ID NO: 2147924 - RNA, 19 nt, Homo sapiens
  misc_RNA (1)...(19): siRNA sense strand
caacaagcccuacaagaag

SEQ ID NO: 2147925 - RNA, 19 nt, Homo sapiens
  misc_RNA (1)...(19): siRNA sense strand
gaagggagcucggcuuucc

SEQ ID NO: 2147926 - RNA, 19 nt, Homo sapiens
  misc_RNA (1)...(19): siRNA sense strand
ucacagagcagcacaccuu

SEQ ID NO: 2147927 - RNA, 19 nt, Homo sapiens
  misc_RNA (1)...(19): siRNA sense strand
gcggagggcugcuucuaca

SEQ ID NO: 2147928 - RNA, 19 nt, Homo sapiens
  misc_RNA (1)...(19): siRNA sense strand
guccugaccucccgagcua

SEQ ID NO: 2147929 - RNA, 19 nt, Homo sapiens
  misc_RNA (1)...(19): siRNA sense strand
caaccgcugucgcaugaau

SEQ ID NO: 2147930 - RNA, 19 nt, Homo sapiens
  misc_RNA (1)...(19): siRNA sense strand
gagcgggcuuacagugaaa

SEQ ID NO: 2147931 - RNA, 19 nt, Homo sapiens
  misc_RNA (1)...(19): siRNA sense strand
gagcucggcuagaccaaag

SEQ ID NO: 2147932 - RNA, 19 nt, Homo sapiens
  misc_RNA (1)...(19): siRNA sense strand
guucaauccugcccuguca

SEQ ID NO: 2147933 - RNA, 19 nt, Homo sapiens
  misc_RNA (1)...(19): siRNA sense strand
gcucaggacucgguacauc

SEQ ID NO: 2147934 - RNA, 19 nt, Homo sapiens
  misc_RNA (1)...(19): siRNA sense strand
caugcaggaugacacauau

SEQ ID NO: 2147935 - RNA, 19 nt, Homo sapiens
  misc_RNA (1)...(19): siRNA sense strand
caguaucgcucauuugaac

SEQ ID NO: 2147936 - RNA, 19 nt, Homo sapiens
  misc_RNA (1)...(19): siRNA sense strand
ggguggaaauccuaccuau

SEQ ID NO: 2147937 - RNA, 19 nt, Homo sapiens
  misc_RNA (1)...(19): siRNA sense strand
gaacaacugcaggcucaga

SEQ ID NO: 2147938 - RNA, 19 nt, Homo sapiens
  misc_RNA (1)...(19): siRNA sense strand
cuucagcgcucuggaguug

SEQ ID NO: 2147939 - RNA, 19 nt, Homo sapiens
  misc_RNA (1)...(19): siRNA sense strand
acaccacacucucgcuuug

SEQ ID NO: 2147940 - RNA, 19 nt, Homo sapiens
  misc_RNA (1)...(19): siRNA sense strand
ccgccuggcucaugucaga

SEQ ID NO: 2147941 - RNA, 19 nt, Homo sapiens
  misc_RNA (1)...(19): siRNA sense strand
cuuggacgcugccucauug

SEQ ID NO: 2147942 - RNA, 19 nt, Homo sapiens
  misc_RNA (1)...(19): siRNA sense strand
gggcuuacagugaaauaga

SEQ ID NO: 2147943 - RNA, 19 nt, Homo sapiens
  misc_RNA (1)...(19): siRNA sense strand
gcccacggcucagugaaga

SEQ ID NO: 2147944 - RNA, 19 nt, Homo sapiens
  misc_RNA (1)...(19): siRNA sense strand
ucucagggcuccaccucuu

SEQ ID NO: 2147945 - RNA, 19 nt, Homo sapiens
  misc_RNA (1)...(19): siRNA sense strand
ucauggacguggucucgaa

SEQ ID NO: 2147946 - RNA, 19 nt, Homo sapiens
  misc_RNA (1)...(19): siRNA sense strand
gcuccagacccauuucuug

SEQ ID NO: 2147947 - RNA, 19 nt, Homo sapiens
  misc_RNA (1)...(19): siRNA sense strand
ggcuuacagugaaauagaa

SEQ ID NO: 2147948 - RNA, 19 nt, Homo sapiens
  misc_RNA (1)...(19): siRNA sense strand
cucaaccgcugucgcauga

SEQ ID NO: 2147949 - RNA, 19 nt, Homo sapiens
  misc_RNA (1)...(19): siRNA sense strand
gagcaggagcaggccaaua

SEQ ID NO: 2147950 - RNA, 19 nt, Homo sapiens
  misc_RNA (1)...(19): siRNA sense strand
gggcagaggaguucauugg

SEQ ID NO: 2147951 - RNA, 19 nt, Homo sapiens
  misc_RNA (1)...(19): siRNA sense strand
gcaguaucgcucauuugaa

SEQ ID NO: 2147952 - RNA, 19 nt, Homo sapiens
  misc_RNA (1)...(19): siRNA sense strand
ggcuggaggugauggaugu

SEQ ID NO: 2147953 - RNA, 19 nt, Homo sapiens
  misc_RNA (1)...(19): siRNA sense strand
gacuacgacugguucuuca

SEQ ID NO: 2147954 - RNA, 19 nt, Homo sapiens
  misc_RNA (1)...(19): siRNA sense strand
uguggacacucucuucuuc

SEQ ID NO: 2147955 - RNA, 19 nt, Homo sapiens
  misc_RNA (1)...(19): siRNA sense strand
guggaaauccuaccuaugc

SEQ ID NO: 2147956 - RNA, 19 nt, Homo sapiens
  misc_RNA (1)...(19): siRNA sense strand
ccgaagguacccucaugua

SEQ ID NO: 2147957 - RNA, 19 nt, Homo sapiens
  misc_RNA (1)...(19): siRNA sense strand
gaagcacccuguggacacu

SEQ ID NO: 2147958 - RNA, 19 nt, Homo sapiens
  misc_RNA (1)...(19): siRNA sense strand
ggcuauggcucucuuugag

SEQ ID NO: 2147959 - RNA, 19 nt, Homo sapiens
  misc_RNA (1)...(19): siRNA sense strand
gggcuuuggcuaccuguug

SEQ ID NO: 2147960 - RNA, 19 nt, Homo sapiens
  misc_RNA (1)...(19): siRNA sense strand
gagcaggccaauagcacuu

SEQ ID NO: 2147961 - RNA, 19 nt, Homo sapiens
  misc_RNA (1)...(19): siRNA sense strand
gcgaggagggccacagaau

SEQ ID NO: 2147962 - RNA, 19 nt, Homo sapiens
  misc_RNA (1)...(19): siRNA sense strand
gcuacacuguccacuuugg

SEQ ID NO: 2147963 - RNA, 19 nt, Homo sapiens
  misc_RNA (1)...(19): siRNA sense strand
gcaggccaauagcacuuag

SEQ ID NO: 2147964 - RNA, 19 nt, Homo sapiens
  misc_RNA (1)...(19): siRNA sense strand
gcagcucaaucggcgcuau

SEQ ID NO: 2147965 - RNA, 19 nt, Homo sapiens
  misc_RNA (1)...(19): siRNA sense strand
ucagcgcucuggaguugga

SEQ ID NO: 2147966 - RNA, 19 nt, Homo sapiens
  misc_RNA (1)...(19): siRNA sense strand
gcaucaaccaagaccugua

SEQ ID NO: 2147967 - RNA, 19 nt, Homo sapiens
  misc_RNA (1)...(19): siRNA sense strand
ucacuucccucgguuacuc

SEQ ID NO: 2147968 - RNA, 19 nt, Homo sapiens
  misc_RNA (1)...(19): siRNA sense strand
agaccaaagugaugaagac

SEQ ID NO: 2147969 - RNA, 19 nt, Homo sapiens
  misc_RNA (1)...(19): siRNA sense strand
gggcugggacuacuucaca

SEQ ID NO: 2147970 - RNA, 19 nt, Homo sapiens
  misc_RNA (1)...(19): siRNA sense strand
cgacuacgacugguucuuc

SEQ ID NO: 2147971 - RNA, 19 nt, Homo sapiens
  misc_RNA (1)...(19): siRNA sense strand
cgacugguucuucaucaug

SEQ ID NO: 2147972 - RNA, 19 nt, Homo sapiens
  misc_RNA (1)...(19): siRNA sense strand
gccacgagaacaugcauug

SEQ ID NO: 2147973 - RNA, 19 nt, Homo sapiens
  misc_RNA (1)...(19): siRNA sense strand
cacccugucuccgaaggua

SEQ ID NO: 2147974 - RNA, 19 nt, Homo sapiens
  misc_RNA (1)...(19): siRNA sense strand
accaagaccuguacuuagg

SEQ ID NO: 2147975 - RNA, 19 nt, Homo sapiens
  misc_RNA (1)...(19): siRNA sense strand
ggucuacgggccacgagaa

SEQ ID NO: 2147976 - RNA, 19 nt, Homo sapiens
  misc_RNA (1)...(19): siRNA sense strand
gaccugcuguuggaaugug

SEQ ID NO: 2147977 - RNA, 19 nt, Homo sapiens
  misc_RNA (1)...(19): siRNA sense strand
gcucccugcuccuuucaca

SEQ ID NO: 2147978 - RNA, 19 nt, Homo sapiens
  misc_RNA (1)...(19): siRNA sense strand
gcuuggacgcugccucauu

SEQ ID NO: 2147979 - RNA, 19 nt, Homo sapiens
  misc_RNA (1)...(19): siRNA sense strand
guacgguggcccaucacuu

SEQ ID NO: 2147980 - RNA, 19 nt, Homo sapiens
  misc_RNA (1)...(19): siRNA sense strand
cagggcuggugcagaaguu

SEQ ID NO: 2147981 - RNA, 19 nt, Homo sapiens
  misc_RNA (1)...(19): siRNA sense strand
cuaccuaugcccuauguca

SEQ ID NO: 2147982 - RNA, 19 nt, Homo sapiens
  misc_RNA (1)...(19): siRNA sense strand
acagugaaauagaacaacu

SEQ ID NO: 2147983 - RNA, 19 nt, Homo sapiens
  misc_RNA (1)...(19): siRNA sense strand
ggacgcugccucauugacu

SEQ ID NO: 2147984 - RNA, 19 nt, Homo sapiens
  misc_RNA (1)...(19): siRNA sense strand
gaggagggccacagaaucc

SEQ ID NO: 2147985 - RNA, 19 nt, Homo sapiens
  misc_RNA (1)...(19): siRNA sense strand
augcauugcucacccuguu

SEQ ID NO: 2147986 - RNA, 19 nt, Homo sapiens
  misc_RNA (1)...(19): siRNA sense strand
ggcuuuggcuaccuguugu

SEQ ID NO: 2147987 - RNA, 19 nt, Homo sapiens
  misc_RNA (1)...(19): siRNA sense strand
cgaggagggccacagaauc

SEQ ID NO: 2147988 - RNA, 19 nt, Homo sapiens
  misc_RNA (1)...(19): siRNA sense strand
ggacacucucuucuuccuu

SEQ ID NO: 2147989 - RNA, 19 nt, Homo sapiens
  misc_RNA (1)...(19): siRNA sense strand
ggacguggucucgaagaag

SEQ ID NO: 2147990 - RNA, 19 nt, Homo sapiens
  misc_RNA (1)...(19): siRNA sense strand
uggacguggucucgaagaa

SEQ ID NO: 2147991 - RNA, 19 nt, Homo sapiens
  misc_RNA (1)...(19): siRNA sense strand
gagccggguggaaauccua

SEQ ID NO: 2147992 - RNA, 19 nt, Homo sapiens
  misc_RNA (1)...(19): siRNA sense strand
ggaagggagcucggcuuuc

SEQ ID NO: 2147993 - RNA, 19 nt, Homo sapiens
  misc_RNA (1)...(19): siRNA sense strand
gggcagcaguaucgcucau

SEQ ID NO: 2147994 - RNA, 19 nt, Homo sapiens
  misc_RNA (1)...(19): siRNA sense strand
ggagggcugcuucuacaac

SEQ ID NO: 2147995 - RNA, 19 nt, Homo sapiens
  misc_RNA (1)...(19): siRNA sense strand
cagcaguaucgcucauuug

SEQ ID NO: 2147996 - RNA, 19 nt, Homo sapiens
  misc_RNA (1)...(19): siRNA sense strand
gcucagugaagaacucuac

SEQ ID NO: 2147997 - RNA, 19 nt, Homo sapiens
  misc_RNA (1)...(19): siRNA sense strand
aauccuaccuaugcccuau

SEQ ID NO: 2147998 - RNA, 19 nt, Homo sapiens
  misc_RNA (1)...(19): siRNA sense strand
gguggaaauccuaccuaug

SEQ ID NO: 2147999 - RNA, 19 nt, Homo sapiens
  misc_RNA (1)...(19): siRNA sense strand
cuccgaagguacccucaug

SEQ ID NO: 2148000 - RNA, 19 nt, Homo sapiens
  misc_RNA (1)...(19): siRNA sense strand
gagcuacacuguccacuuu

SEQ ID NO: 2148001 - RNA, 19 nt, Homo sapiens
  misc_RNA (1)...(19): siRNA sense strand
gacacucucuucuuccuua

SEQ ID NO: 2148002 - RNA, 19 nt, Homo sapiens
  misc_RNA (1)...(19): siRNA sense strand
caaccaagaccuguacuua

SEQ ID NO: 2148003 - RNA, 19 nt, Homo sapiens
  misc_RNA (1)...(19): siRNA sense strand
gcagcaguaucgcucauuu

SEQ ID NO: 2148004 - RNA, 19 nt, Homo sapiens
  misc_RNA (1)...(19): siRNA sense strand
ccaacaagcccuacaagaa

SEQ ID NO: 2148005 - RNA, 19 nt, Homo sapiens
  misc_RNA (1)...(19): siRNA sense strand
ggagcgggcuuacagugaa

SEQ ID NO: 2148006 - RNA, 19 nt, Homo sapiens
  misc_RNA (1)...(19): siRNA sense strand
ggaugcagguggugucuca

SEQ ID NO: 2148007 - RNA, 19 nt, Homo sapiens
  misc_RNA (1)...(19): siRNA sense strand
gagcucggcuuuccugagu

SEQ ID NO: 2148008 - RNA, 19 nt, Homo sapiens
  misc_RNA (1)...(19): siRNA sense strand
caacaagcccuacaagaag

SEQ ID NO: 2148009 - RNA, 19 nt, Homo sapiens
  misc_RNA (1)...(19): siRNA sense strand
gaagggagcucggcuuucc

SEQ ID NO: 2148010 - RNA, 19 nt, Homo sapiens
  misc_RNA (1)...(19): siRNA sense strand
ucacagagcagcacaccuu

SEQ ID NO: 2148011 - RNA, 19 nt, Homo sapiens
  misc_RNA (1)...(19): siRNA sense strand
gcggagggcugcuucuaca

SEQ ID NO: 2148012 - RNA, 19 nt, Homo sapiens
  misc_RNA (1)...(19): siRNA sense strand
guccugaccucccgagcua

SEQ ID NO: 2148013 - RNA, 19 nt, Homo sapiens
  misc_RNA (1)...(19): siRNA sense strand
caaccgcugucgcaugaau

SEQ ID NO: 2148014 - RNA, 19 nt, Homo sapiens
  misc_RNA (1)...(19): siRNA sense strand
gagcgggcuuacagugaaa

SEQ ID NO: 2148015 - RNA, 19 nt, Homo sapiens
  misc_RNA (1)...(19): siRNA sense strand
gagcucggcuagaccaaag

SEQ ID NO: 2148016 - RNA, 19 nt, Homo sapiens
  misc_RNA (1)...(19): siRNA sense strand
guucaauccugcccuguca

SEQ ID NO: 2148017 - RNA, 19 nt, Homo sapiens
  misc_RNA (1)...(19): siRNA sense strand
gcucaggacucgguacauc

SEQ ID NO: 2148018 - RNA, 19 nt, Homo sapiens
  misc_RNA (1)...(19): siRNA sense strand
caugcaggaugacacauau

SEQ ID NO: 2148019 - RNA, 19 nt, Homo sapiens
  misc_RNA (1)...(19): siRNA sense strand
caguaucgcucauuugaac

SEQ ID NO: 2148020 - RNA, 19 nt, Homo sapiens
  misc_RNA (1)...(19): siRNA sense strand
ggguggaaauccuaccuau

SEQ ID NO: 2148021 - RNA, 19 nt, Homo sapiens
  misc_RNA (1)...(19): siRNA sense strand
gaacaacugcaggcucaga

SEQ ID NO: 2148022 - RNA, 19 nt, Homo sapiens
  misc_RNA (1)...(19): siRNA sense strand
cuucagcgcucuggaguug

SEQ ID NO: 2148023 - RNA, 19 nt, Homo sapiens
  misc_RNA (1)...(19): siRNA sense strand
acaccacacucucgcuuug

SEQ ID NO: 2148024 - RNA, 19 nt, Homo sapiens
  misc_RNA (1)...(19): siRNA sense strand
ccgccuggcucaugucaga

SEQ ID NO: 2148025 - RNA, 19 nt, Homo sapiens
  misc_RNA (1)...(19): siRNA sense strand
cuuggacgcugccucauug

SEQ ID NO: 2148026 - RNA, 19 nt, Homo sapiens
  misc_RNA (1)...(19): siRNA sense strand
gggcuuacagugaaauaga

SEQ ID NO: 2148027 - RNA, 19 nt, Homo sapiens
  misc_RNA (1)...(19): siRNA sense strand
gcccacggcucagugaaga

SEQ ID NO: 2148028 - RNA, 19 nt, Homo sapiens
  misc_RNA (1)...(19): siRNA sense strand
ucucagggcuccaccucuu

SEQ ID NO: 2148029 - RNA, 19 nt, Homo sapiens
  misc_RNA (1)...(19): siRNA sense strand
ucauggacguggucucgaa

SEQ ID NO: 2148030 - RNA, 19 nt, Homo sapiens
  misc_RNA (1)...(19): siRNA sense strand
gcuccagacccauuucuug

SEQ ID NO: 2148031 - RNA, 19 nt, Homo sapiens
  misc_RNA (1)...(19): siRNA sense strand
ggcuuacagugaaauagaa

SEQ ID NO: 2148032 - RNA, 19 nt, Homo sapiens
  misc_RNA (1)...(19): siRNA sense strand
cucaaccgcugucgcauga

SEQ ID NO: 2148033 - RNA, 19 nt, Homo sapiens
  misc_RNA (1)...(19): siRNA sense strand
gagcaggagcaggccaaua

SEQ ID NO: 2148034 - RNA, 19 nt, Homo sapiens
  misc_RNA (1)...(19): siRNA sense strand
gggcagaggaguucauugg

SEQ ID NO: 2148035 - RNA, 19 nt, Homo sapiens
  misc_RNA (1)...(19): siRNA sense strand
gcaguaucgcucauuugaa

SEQ ID NO: 2148036 - RNA, 19 nt, Homo sapiens
  misc_RNA (1)...(19): siRNA sense strand
ggcuggaggugauggaugu

SEQ ID NO: 2148037 - RNA, 19 nt, Homo sapiens
  misc_RNA (1)...(19): siRNA sense strand
gacuacgacugguucuuca

SEQ ID NO: 2148038 - RNA, 19 nt, Homo sapiens
  misc_RNA (1)...(19): siRNA sense strand
uguggacacucucuucuuc

SEQ ID NO: 2148039 - RNA, 19 nt, Homo sapiens
  misc_RNA (1)...(19): siRNA sense strand
guggaaauccuaccuaugc

SEQ ID NO: 2148040 - RNA, 19 nt, Homo sapiens
  misc_RNA (1)...(19): siRNA sense strand
ccgaagguacccucaugua

SEQ ID NO: 2148041 - RNA, 19 nt, Homo sapiens
  misc_RNA (1)...(19): siRNA sense strand
gaagcacccuguggacacu

SEQ ID NO: 2148042 - RNA, 19 nt, Homo sapiens
  misc_RNA (1)...(19): siRNA sense strand
ggcuauggcucucuuugag

SEQ ID NO: 2148043 - RNA, 19 nt, Homo sapiens
  misc_RNA (1)...(19): siRNA sense strand
gggcuuuggcuaccuguug

SEQ ID NO: 2148044 - RNA, 19 nt, Homo sapiens
  misc_RNA (1)...(19): siRNA sense strand
gagcaggccaauagcacuu

SEQ ID NO: 2148045 - RNA, 19 nt, Homo sapiens
  misc_RNA (1)...(19): siRNA sense strand
gcgaggagggccacagaau

SEQ ID NO: 2148046 - RNA, 19 nt, Homo sapiens
  misc_RNA (1)...(19): siRNA sense strand
gcuacacuguccacuuugg

SEQ ID NO: 2148047 - RNA, 19 nt, Homo sapiens
  misc_RNA (1)...(19): siRNA sense strand
gcaggccaauagcacuuag

SEQ ID NO: 2148048 - RNA, 19 nt, Homo sapiens
  misc_RNA (1)...(19): siRNA sense strand
gcagcucaaucggcgcuau

SEQ ID NO: 2148049 - RNA, 19 nt, Homo sapiens
  misc_RNA (1)...(19): siRNA sense strand
ucagcgcucuggaguugga

SEQ ID NO: 2148050 - RNA, 19 nt, Homo sapiens
  misc_RNA (1)...(19): siRNA sense strand
gcaucaaccaagaccugua

SEQ ID NO: 2148051 - RNA, 19 nt, Homo sapiens
  misc_RNA (1)...(19): siRNA sense strand
ucacuucccucgguuacuc

SEQ ID NO: 2148052 - RNA, 19 nt, Homo sapiens
  misc_RNA (1)...(19): siRNA sense strand
agaccaaagugaugaagac

SEQ ID NO: 2148053 - RNA, 19 nt, Homo sapiens
  misc_RNA (1)...(19): siRNA sense strand
gggcugggacuacuucaca

SEQ ID NO: 2148054 - RNA, 19 nt, Homo sapiens
  misc_RNA (1)...(19): siRNA sense strand
cgacuacgacugguucuuc

SEQ ID NO: 2148055 - RNA, 19 nt, Homo sapiens
  misc_RNA (1)...(19): siRNA sense strand
cgacugguucuucaucaug

SEQ ID NO: 2148056 - RNA, 19 nt, Homo sapiens
  misc_RNA (1)...(19): siRNA sense strand
gccacgagaacaugcauug

SEQ ID NO: 2148057 - RNA, 19 nt, Homo sapiens
  misc_RNA (1)...(19): siRNA sense strand
cacccugucuccgaaggua

SEQ ID NO: 2148058 - RNA, 19 nt, Homo sapiens
  misc_RNA (1)...(19): siRNA sense strand
accaagaccuguacuuagg

SEQ ID NO: 2148059 - RNA, 19 nt, Homo sapiens
  misc_RNA (1)...(19): siRNA sense strand
ggucuacgggccacgagaa

SEQ ID NO: 2148060 - RNA, 19 nt, Homo sapiens
  misc_RNA (1)...(19): siRNA sense strand
gaccugcuguuggaaugug

SEQ ID NO: 2148061 - RNA, 19 nt, Homo sapiens
  misc_RNA (1)...(19): siRNA sense strand
gcucccugcuccuuucaca

SEQ ID NO: 2148062 - RNA, 19 nt, Homo sapiens
  misc_RNA (1)...(19): siRNA sense strand
gcuuggacgcugccucauu

SEQ ID NO: 2148063 - RNA, 19 nt, Homo sapiens
  misc_RNA (1)...(19): siRNA sense strand
guacgguggcccaucacuu

SEQ ID NO: 2148064 - RNA, 19 nt, Homo sapiens
  misc_RNA (1)...(19): siRNA sense strand
cagggcuggugcagaaguu

SEQ ID NO: 2148065 - RNA, 19 nt, Homo sapiens
  misc_RNA (1)...(19): siRNA sense strand
cuaccuaugcccuauguca

SEQ ID NO: 2148066 - RNA, 19 nt, Homo sapiens
  misc_RNA (1)...(19): siRNA sense strand
acagugaaauagaacaacu

SEQ ID NO: 2148067 - RNA, 19 nt, Homo sapiens
  misc_RNA (1)...(19): siRNA sense strand
ggacgcugccucauugacu

SEQ ID NO: 2148068 - RNA, 19 nt, Homo sapiens
  misc_RNA (1)...(19): siRNA sense strand
gaggagggccacagaaucc

SEQ ID NO: 2148069 - RNA, 19 nt, Homo sapiens
  misc_RNA (1)...(19): siRNA sense strand
augcauugcucacccuguu

SEQ ID NO: 2148070 - RNA, 19 nt, Homo sapiens
  misc_RNA (1)...(19): siRNA sense strand
ggcuuuggcuaccuguugu

SEQ ID NO: 2148071 - RNA, 19 nt, Homo sapiens
  misc_RNA (1)...(19): siRNA sense strand
cgaggagggccacagaauc

SEQ ID NO: 2148072 - RNA, 19 nt, Homo sapiens
  misc_RNA (1)...(19): siRNA sense strand
ggacacucucuucuuccuu

SEQ ID NO: 2148073 - RNA, 19 nt, Homo sapiens
  misc_RNA (1)...(19): siRNA sense strand
ggacguggucucgaagaag

SEQ ID NO: 2148074 - RNA, 19 nt, Homo sapiens
  misc_RNA (1)...(19): siRNA sense strand
uggacguggucucgaagaa

SEQ ID NO: 2148075 - RNA, 19 nt, Homo sapiens
  misc_RNA (1)...(19): siRNA sense strand
gagccggguggaaauccua

SEQ ID NO: 2148076 - RNA, 19 nt, Homo sapiens
  misc_RNA (1)...(19): siRNA sense strand
ggaagggagcucggcuuuc

SEQ ID NO: 2148077 - RNA, 19 nt, Homo sapiens
  misc_RNA (1)...(19): siRNA sense strand
gggcagcaguaucgcucau

SEQ ID NO: 2148078 - RNA, 19 nt, Homo sapiens
  misc_RNA (1)...(19): siRNA sense strand
ggagggcugcuucuacaac

SEQ ID NO: 2148079 - RNA, 19 nt, Homo sapiens
  misc_RNA (1)...(19): siRNA sense strand
cagcaguaucgcucauuug

SEQ ID NO: 2148080 - RNA, 19 nt, Homo sapiens
  misc_RNA (1)...(19): siRNA sense strand
gcucagugaagaacucuac

SEQ ID NO: 2148081 - RNA, 19 nt, Homo sapiens
  misc_RNA (1)...(19): siRNA sense strand
aauccuaccuaugcccuau

SEQ ID NO: 2148082 - RNA, 19 nt, Homo sapiens
  misc_RNA (1)...(19): siRNA sense strand
gguggaaauccuaccuaug

SEQ ID NO: 2148083 - RNA, 19 nt, Homo sapiens
  misc_RNA (1)...(19): siRNA sense strand
cuccgaagguacccucaug

SEQ ID NO: 2148084 - RNA, 19 nt, Homo sapiens
  misc_RNA (1)...(19): siRNA sense strand
ggccacacauucaucauca

SEQ ID NO: 2148085 - RNA, 19 nt, Homo sapiens
  misc_RNA (1)...(19): siRNA sense strand
acacauucaucaucaacug

SEQ ID NO: 2148086 - RNA, 19 nt, Homo sapiens
  misc_RNA (1)...(19): siRNA sense strand
ucucgcggcucuucagcaa

SEQ ID NO: 2148087 - RNA, 19 nt, Homo sapiens
  misc_RNA (1)...(19): siRNA sense strand
ucgcggcucuucagcaaca

SEQ ID NO: 2148088 - RNA, 19 nt, Homo sapiens
  misc_RNA (1)...(19): siRNA sense strand
cgucgcaggcgucugguuu

SEQ ID NO: 2148089 - RNA, 19 nt, Homo sapiens
  misc_RNA (1)...(19): siRNA sense strand
gugcagugcugugccuagu

SEQ ID NO: 2148090 - RNA, 19 nt, Homo sapiens
  misc_RNA (1)...(19): siRNA sense strand
gccacacauucaucaucaa

SEQ ID NO: 2148091 - RNA, 19 nt, Homo sapiens
  misc_RNA (1)...(19): siRNA sense strand
ggccacacauucaucauca

SEQ ID NO: 2148092 - RNA, 19 nt, Homo sapiens
  misc_RNA (1)...(19): siRNA sense strand
gcagaugucccgggaguuc

SEQ ID NO: 2148093 - RNA, 19 nt, Homo sapiens
  misc_RNA (1)...(19): siRNA sense strand
acacauucaucaucaacug

SEQ ID NO: 2148094 - RNA, 19 nt, Homo sapiens
  misc_RNA (1)...(19): siRNA sense strand
ucugccagcuggaggauga

SEQ ID NO: 2148095 - RNA, 19 nt, Homo sapiens
  misc_RNA (1)...(19): siRNA sense strand
aaagcuaugugaccuucug

SEQ ID NO: 2148096 - RNA, 19 nt, Homo sapiens
  misc_RNA (1)...(19): siRNA sense strand
ucucgcggcucuucagcaa

SEQ ID NO: 2148097 - RNA, 19 nt, Homo sapiens
  misc_RNA (1)...(19): siRNA sense strand
ucgcggcucuucagcaaca

SEQ ID NO: 2148098 - RNA, 19 nt, Homo sapiens
  misc_RNA (1)...(19): siRNA sense strand
ggucuggaguguggacaag

SEQ ID NO: 2148099 - RNA, 19 nt, Homo sapiens
  misc_RNA (1)...(19): siRNA sense strand
gccaacaaccagcucuuca

SEQ ID NO: 2148100 - RNA, 19 nt, Homo sapiens
  misc_RNA (1)...(19): siRNA sense strand
gugcagugcugugccuagu

SEQ ID NO: 2148101 - RNA, 19 nt, Homo sapiens
  misc_RNA (1)...(19): siRNA sense strand
gccacacauucaucaucaa

SEQ ID NO: 2148102 - RNA, 19 nt, Homo sapiens
  misc_RNA (1)...(19): siRNA sense strand
ggccacacauucaucauca

SEQ ID NO: 2148103 - RNA, 19 nt, Homo sapiens
  misc_RNA (1)...(19): siRNA sense strand
gcagaugucccgggaguuc

SEQ ID NO: 2148104 - RNA, 19 nt, Homo sapiens
  misc_RNA (1)...(19): siRNA sense strand
acacauucaucaucaacug

SEQ ID NO: 2148105 - RNA, 19 nt, Homo sapiens
  misc_RNA (1)...(19): siRNA sense strand
ucugccagcuggaggauga

SEQ ID NO: 2148106 - RNA, 19 nt, Homo sapiens
  misc_RNA (1)...(19): siRNA sense strand
aaagcuaugugaccuucug

SEQ ID NO: 2148107 - RNA, 19 nt, Homo sapiens
  misc_RNA (1)...(19): siRNA sense strand
ucucgcggcucuucagcaa

SEQ ID NO: 2148108 - RNA, 19 nt, Homo sapiens
  misc_RNA (1)...(19): siRNA sense strand
ucgcggcucuucagcaaca

SEQ ID NO: 2148109 - RNA, 19 nt, Homo sapiens
  misc_RNA (1)...(19): siRNA sense strand
ggucuggaguguggacaag

SEQ ID NO: 2148110 - RNA, 19 nt, Homo sapiens
  misc_RNA (1)...(19): siRNA sense strand
gccaacaaccagcucuuca

SEQ ID NO: 2148111 - RNA, 19 nt, Homo sapiens
  misc_RNA (1)...(19): siRNA sense strand
gugcagugcugugccuagu

SEQ ID NO: 2148112 - RNA, 19 nt, Homo sapiens
  misc_RNA (1)...(19): siRNA sense strand
gccacacauucaucaucaa

SEQ ID NO: 2148113 - RNA, 19 nt, Homo sapiens
  misc_RNA (1)...(19): siRNA sense strand
uaaaggaagugaccaauua

SEQ ID NO: 2148114 - RNA, 19 nt, Homo sapiens
  misc_RNA (1)...(19): siRNA sense strand
gcaaauggccgcaguguua

SEQ ID NO: 2148115 - RNA, 19 nt, Homo sapiens
  misc_RNA (1)...(19): siRNA sense strand
gcaacggccugucuuucua

SEQ ID NO: 2148116 - RNA, 19 nt, Homo sapiens
  misc_RNA (1)...(19): siRNA sense strand
gacuguagaugaaaucgua

SEQ ID NO: 2148117 - RNA, 19 nt, Homo sapiens
  misc_RNA (1)...(19): siRNA sense strand
gcucgugacuguagaugaa

SEQ ID NO: 2148118 - RNA, 19 nt, Homo sapiens
  misc_RNA (1)...(19): siRNA sense strand
ugugggagcugaagggaua

SEQ ID NO: 2148119 - RNA, 19 nt, Homo sapiens
  misc_RNA (1)...(19): siRNA sense strand
agucaaagcccaaggauuu

SEQ ID NO: 2148120 - RNA, 19 nt, Homo sapiens
  misc_RNA (1)...(19): siRNA sense strand
ggcagagaaugcaggcuua

SEQ ID NO: 2148121 - RNA, 19 nt, Homo sapiens
  misc_RNA (1)...(19): siRNA sense strand
gagcugaagggauaauaaa

SEQ ID NO: 2148122 - RNA, 19 nt, Homo sapiens
  misc_RNA (1)...(19): siRNA sense strand
gcugaucuagcucaauuua

SEQ ID NO: 2148123 - RNA, 19 nt, Homo sapiens
  misc_RNA (1)...(19): siRNA sense strand
ggagaucauuuaccugagu

SEQ ID NO: 2148124 - RNA, 19 nt, Homo sapiens
  misc_RNA (1)...(19): siRNA sense strand
gaagugaccaauuacuaga

SEQ ID NO: 2148125 - RNA, 19 nt, Homo sapiens
  misc_RNA (1)...(19): siRNA sense strand
gcaagugccagaggguuua

SEQ ID NO: 2148126 - RNA, 19 nt, Homo sapiens
  misc_RNA (1)...(19): siRNA sense strand
gggaagcucugugggcaaa

SEQ ID NO: 2148127 - RNA, 19 nt, Homo sapiens
  misc_RNA (1)...(19): siRNA sense strand
ggaagugaccaauuacuag

SEQ ID NO: 2148128 - RNA, 19 nt, Homo sapiens
  misc_RNA (1)...(19): siRNA sense strand
guaaaggaagugaccaauu

SEQ ID NO: 2148129 - RNA, 19 nt, Homo sapiens
  misc_RNA (1)...(19): siRNA sense strand
gaagcucugugggcaaaug

SEQ ID NO: 2148130 - RNA, 19 nt, Homo sapiens
  misc_RNA (1)...(19): siRNA sense strand
ugaucuagcucaauuuagu

SEQ ID NO: 2148131 - RNA, 19 nt, Homo sapiens
  misc_RNA (1)...(19): siRNA sense strand
gaucuggaauccugacucu

SEQ ID NO: 2148132 - RNA, 19 nt, Homo sapiens
  misc_RNA (1)...(19): siRNA sense strand
ggagcugaagggauaauaa

SEQ ID NO: 2148133 - RNA, 19 nt, Homo sapiens
  misc_RNA (1)...(19): siRNA sense strand
agacgugguugcagaaaug

SEQ ID NO: 2148134 - RNA, 19 nt, Homo sapiens
  misc_RNA (1)...(19): siRNA sense strand
ggauggagaucauuuaccu

SEQ ID NO: 2148135 - RNA, 19 nt, Homo sapiens
  misc_RNA (1)...(19): siRNA sense strand
gaucuagcucaauuuagua

SEQ ID NO: 2148136 - RNA, 19 nt, Homo sapiens
  misc_RNA (1)...(19): siRNA sense strand
cugcugaucuagcucaauu

SEQ ID NO: 2148137 - RNA, 19 nt, Homo sapiens
  misc_RNA (1)...(19): siRNA sense strand
guauuugaaugggaaugua

SEQ ID NO: 2148138 - RNA, 19 nt, Homo sapiens
  misc_RNA (1)...(19): siRNA sense strand
gcugaagggauaauaaaug

SEQ ID NO: 2148139 - RNA, 19 nt, Homo sapiens
  misc_RNA (1)...(19): siRNA sense strand
cugaagggauaauaaaugu

SEQ ID NO: 2148140 - RNA, 19 nt, Homo sapiens
  misc_RNA (1)...(19): siRNA sense strand
gcacagccuucgugguucu

SEQ ID NO: 2148141 - RNA, 19 nt, Homo sapiens
  misc_RNA (1)...(19): siRNA sense strand
uaaaggaagcagauuggaa

SEQ ID NO: 2148142 - RNA, 19 nt, Homo sapiens
  misc_RNA (1)...(19): siRNA sense strand
gauaaaggaagcagauugg

SEQ ID NO: 2148143 - RNA, 19 nt, Homo sapiens
  misc_RNA (1)...(19): siRNA sense strand
ggaauccugacucuaagaa

SEQ ID NO: 2148144 - RNA, 19 nt, Homo sapiens
  misc_RNA (1)...(19): siRNA sense strand
ucuggaauccugacucuaa

SEQ ID NO: 2148145 - RNA, 19 nt, Homo sapiens
  misc_RNA (1)...(19): siRNA sense strand
caaauggccgcaguguuaa

SEQ ID NO: 2148146 - RNA, 19 nt, Homo sapiens
  misc_RNA (1)...(19): siRNA sense strand
aauccugacucuaagaaga

SEQ ID NO: 2148147 - RNA, 19 nt, Homo sapiens
  misc_RNA (1)...(19): siRNA sense strand
ugguuuggcugugguauuu

SEQ ID NO: 2148148 - RNA, 19 nt, Homo sapiens
  misc_RNA (1)...(19): siRNA sense strand
gugcagagcaggccgucua

SEQ ID NO: 2148149 - RNA, 19 nt, Homo sapiens
  misc_RNA (1)...(19): siRNA sense strand
ucacacuggcggacaagua

SEQ ID NO: 2148150 - RNA, 19 nt, Homo sapiens
  misc_RNA (1)...(19): siRNA sense strand
ggugggaaccuccuaaugg

SEQ ID NO: 2148151 - RNA, 19 nt, Homo sapiens
  misc_RNA (1)...(19): siRNA sense strand
gacggaagccuugcuggaa

SEQ ID NO: 2148152 - RNA, 19 nt, Homo sapiens
  misc_RNA (1)...(19): siRNA sense strand
guuuggcugugguauuuga

SEQ ID NO: 2148153 - RNA, 19 nt, Homo sapiens
  misc_RNA (1)...(19): siRNA sense strand
uggcacagccuucgugguu

SEQ ID NO: 2148154 - RNA, 19 nt, Homo sapiens
  misc_RNA (1)...(19): siRNA sense strand
aaugcucucugauaaagga

SEQ ID NO: 2148155 - RNA, 19 nt, Homo sapiens
  misc_RNA (1)...(19): siRNA sense strand
ugauaaaggaagcagauug

SEQ ID NO: 2148156 - RNA, 19 nt, Homo sapiens
  misc_RNA (1)...(19): siRNA sense strand
gaccaugaaaggagaaaca

SEQ ID NO: 2148157 - RNA, 19 nt, Homo sapiens
  misc_RNA (1)...(19): siRNA sense strand
acucuaagaagacaaagaa

SEQ ID NO: 2148158 - RNA, 19 nt, Homo sapiens
  misc_RNA (1)...(19): siRNA sense strand
ggacacccuaauagucaaa

SEQ ID NO: 2148159 - RNA, 19 nt, Homo sapiens
  misc_RNA (1)...(19): siRNA sense strand
agugaccaauuacuagaaa

SEQ ID NO: 2148160 - RNA, 19 nt, Homo sapiens
  misc_RNA (1)...(19): siRNA sense strand
gggacacccuaauagucaa

SEQ ID NO: 2148161 - RNA, 19 nt, Homo sapiens
  misc_RNA (1)...(19): siRNA sense strand
ggccugcauuccuagcauu

SEQ ID NO: 2148162 - RNA, 19 nt, Homo sapiens
  misc_RNA (1)...(19): siRNA sense strand
caagaaaagucccacacau

SEQ ID NO: 2148163 - RNA, 19 nt, Homo sapiens
  misc_RNA (1)...(19): siRNA sense strand
ccacacaucagcagaucug

SEQ ID NO: 2148164 - RNA, 19 nt, Homo sapiens
  misc_RNA (1)...(19): siRNA sense strand
ccugggcccuccauucugu

SEQ ID NO: 2148165 - RNA, 19 nt, Homo sapiens
  misc_RNA (1)...(19): siRNA sense strand
cacaucagcagaucuggaa

SEQ ID NO: 2148166 - RNA, 19 nt, Homo sapiens
  misc_RNA (1)...(19): siRNA sense strand
gaaaucguaguggccaaga

SEQ ID NO: 2148167 - RNA, 19 nt, Homo sapiens
  misc_RNA (1)...(19): siRNA sense strand
uggcugagguggugcuaca

SEQ ID NO: 2148168 - RNA, 19 nt, Homo sapiens
  misc_RNA (1)...(19): siRNA sense strand
cagacgugguugcagaaau

SEQ ID NO: 2148169 - RNA, 19 nt, Homo sapiens
  misc_RNA (1)...(19): siRNA sense strand
ccagcaacggccugucuuu

SEQ ID NO: 2148170 - RNA, 19 nt, Homo sapiens
  misc_RNA (1)...(19): siRNA sense strand
ggagcugggagaugguuug

SEQ ID NO: 2148171 - RNA, 19 nt, Homo sapiens
  misc_RNA (1)...(19): siRNA sense strand
ggcccuccauucugugaug

SEQ ID NO: 2148172 - RNA, 19 nt, Homo sapiens
  misc_RNA (1)...(19): siRNA sense strand
aggaagugaccaauuacua

SEQ ID NO: 2148173 - RNA, 19 nt, Homo sapiens
  misc_RNA (1)...(19): siRNA sense strand
caggguggcucucuuugcu

SEQ ID NO: 2148174 - RNA, 19 nt, Homo sapiens
  misc_RNA (1)...(19): siRNA sense strand
aaucguaguggccaagaaa

SEQ ID NO: 2148175 - RNA, 19 nt, Homo sapiens
  misc_RNA (1)...(19): siRNA sense strand
ccaugaaccacuugaccaa

SEQ ID NO: 2148176 - RNA, 19 nt, Homo sapiens
  misc_RNA (1)...(19): siRNA sense strand
gcccaaggaguccggaaga

SEQ ID NO: 2148177 - RNA, 19 nt, Homo sapiens
  misc_RNA (1)...(19): siRNA sense strand
gguccugcccauccaaaug

SEQ ID NO: 2148178 - RNA, 19 nt, Homo sapiens
  misc_RNA (1)...(19): siRNA sense strand
gcccaaacccaagcagaga

SEQ ID NO: 2148179 - RNA, 19 nt, Homo sapiens
  misc_RNA (1)...(19): siRNA sense strand
ccuaaaaccuuggcagaga

SEQ ID NO: 2148180 - RNA, 19 nt, Homo sapiens
  misc_RNA (1)...(19): siRNA sense strand
uaauguggcagugguguug

SEQ ID NO: 2148181 - RNA, 19 nt, Homo sapiens
  misc_RNA (1)...(19): siRNA sense strand
aaaaugcucucugauaaag

SEQ ID NO: 2148182 - RNA, 19 nt, Homo sapiens
  misc_RNA (1)...(19): siRNA sense strand
cggaagccuugcuggaaca

SEQ ID NO: 2148183 - RNA, 19 nt, Homo sapiens
  misc_RNA (1)...(19): siRNA sense strand
caaacccaagcagagaaua

SEQ ID NO: 2148184 - RNA, 19 nt, Homo sapiens
  misc_RNA (1)...(19): siRNA sense strand
caacggccugucuuucuag

SEQ ID NO: 2148185 - RNA, 19 nt, Homo sapiens
  misc_RNA (1)...(19): siRNA sense strand
uccuuggaaugaauaacua

SEQ ID NO: 2148186 - RNA, 19 nt, Homo sapiens
  misc_RNA (1)...(19): siRNA sense strand
cuaagaagacaaagaaacg

SEQ ID NO: 2148187 - RNA, 19 nt, Homo sapiens
  misc_RNA (1)...(19): siRNA sense strand
ugggacacccuaauaguca

SEQ ID NO: 2148188 - RNA, 19 nt, Homo sapiens
  misc_RNA (1)...(19): siRNA sense strand
ccaaacccaagcagagaau

SEQ ID NO: 2148189 - RNA, 19 nt, Homo sapiens
  misc_RNA (1)...(19): siRNA sense strand
cuucaagccugagcguguu

SEQ ID NO: 2148190 - RNA, 19 nt, Homo sapiens
  misc_RNA (1)...(19): siRNA sense strand
uggcugugguauuugaaug

SEQ ID NO: 2148191 - RNA, 19 nt, Homo sapiens
  misc_RNA (1)...(19): siRNA sense strand
aaaucguaguggccaagaa

SEQ ID NO: 2148192 - RNA, 19 nt, Homo sapiens
  misc_RNA (1)...(19): siRNA sense strand
gggagcugaagggauaaua

SEQ ID NO: 2148193 - RNA, 19 nt, Homo sapiens
  misc_RNA (1)...(19): siRNA sense strand
ccaagggagagcccaagga

SEQ ID NO: 2148194 - RNA, 19 nt, Homo sapiens
  misc_RNA (1)...(19): siRNA sense strand
gggccugcauuccuagcau

SEQ ID NO: 2148195 - RNA, 19 nt, Homo sapiens
  misc_RNA (1)...(19): siRNA sense strand
ggacguagcucuuuccaaa

SEQ ID NO: 2148196 - RNA, 19 nt, Homo sapiens
  misc_RNA (1)...(19): siRNA sense strand
ucaacaagcuuaucgacuu

SEQ ID NO: 2148197 - RNA, 19 nt, Homo sapiens
  misc_RNA (1)...(19): siRNA sense strand
gcacuucacccaagccauu

SEQ ID NO: 2148198 - RNA, 19 nt, Homo sapiens
  misc_RNA (1)...(19): siRNA sense strand
caagauacuuuggaacaga

SEQ ID NO: 2148199 - RNA, 19 nt, Homo sapiens
  misc_RNA (1)...(19): siRNA sense strand
uccaaaagcugcaauauaa

SEQ ID NO: 2148200 - RNA, 19 nt, Homo sapiens
  misc_RNA (1)...(19): siRNA sense strand
caacaagcuuaucgacuuc

SEQ ID NO: 2148201 - RNA, 19 nt, Homo sapiens
  misc_RNA (1)...(19): siRNA sense strand
gcaauggaucaacuucaua

SEQ ID NO: 2148202 - RNA, 19 nt, Homo sapiens
  misc_RNA (1)...(19): siRNA sense strand
ggaacuaugugcaggaaac

SEQ ID NO: 2148203 - RNA, 19 nt, Homo sapiens
  misc_RNA (1)...(19): siRNA sense strand
gcugcaagauacuuuggaa

SEQ ID NO: 2148204 - RNA, 19 nt, Homo sapiens
  misc_RNA (1)...(19): siRNA sense strand
auucaaagcugcaagauac

SEQ ID NO: 2148205 - RNA, 19 nt, Homo sapiens
  misc_RNA (1)...(19): siRNA sense strand
uggaacagauugaggaaca

SEQ ID NO: 2148206 - RNA, 19 nt, Homo sapiens
  misc_RNA (1)...(19): siRNA sense strand
gcaagauacuuuggaacag

SEQ ID NO: 2148207 - RNA, 19 nt, Homo sapiens
  misc_RNA (1)...(19): siRNA sense strand
caauggaucaacuucauau

SEQ ID NO: 2148208 - RNA, 19 nt, Homo sapiens
  misc_RNA (1)...(19): siRNA sense strand
caauauaaggaucucugua

SEQ ID NO: 2148209 - RNA, 19 nt, Homo sapiens
  misc_RNA (1)...(19): siRNA sense strand
ccaagguucaacaagcuua

SEQ ID NO: 2148210 - RNA, 19 nt, Homo sapiens
  misc_RNA (1)...(19): siRNA sense strand
gacauuaaccauuauacca

SEQ ID NO: 2148211 - RNA, 19 nt, Homo sapiens
  misc_RNA (1)...(19): siRNA sense strand
caggaaacacagacacaaa

SEQ ID NO: 2148212 - RNA, 19 nt, Homo sapiens
  misc_RNA (1)...(19): siRNA sense strand
gcuuaucgacuucuuggaa

SEQ ID NO: 2148213 - RNA, 19 nt, Homo sapiens
  misc_RNA (1)...(19): siRNA sense strand
aaacacagacagcaaugga

SEQ ID NO: 2148214 - RNA, 19 nt, Homo sapiens
  misc_RNA (1)...(19): siRNA sense strand
gcaggaaacacagacacaa

SEQ ID NO: 2148215 - RNA, 19 nt, Homo sapiens
  misc_RNA (1)...(19): siRNA sense strand
uccaaaaucugcaagaauu

SEQ ID NO: 2148216 - RNA, 19 nt, Homo sapiens
  misc_RNA (1)...(19): siRNA sense strand
gcaauauaaggaucucugu

SEQ ID NO: 2148217 - RNA, 19 nt, Homo sapiens
  misc_RNA (1)...(19): siRNA sense strand
agacagcaauggaucaacu

SEQ ID NO: 2148218 - RNA, 19 nt, Homo sapiens
  misc_RNA (1)...(19): siRNA sense strand
cuuaucgacuucuuggaaa

SEQ ID NO: 2148219 - RNA, 19 nt, Homo sapiens
  misc_RNA (1)...(19): siRNA sense strand
uggaucaacuucauaugca

SEQ ID NO: 2148220 - RNA, 19 nt, Homo sapiens
  misc_RNA (1)...(19): siRNA sense strand
gaaacacagacacaaaauu

SEQ ID NO: 2148221 - RNA, 19 nt, Homo sapiens
  misc_RNA (1)...(19): siRNA sense strand
caccguguuucaaguuguu

SEQ ID NO: 2148222 - RNA, 19 nt, Homo sapiens
  misc_RNA (1)...(19): siRNA sense strand
guggaacuaugugcaggaa

SEQ ID NO: 2148223 - RNA, 19 nt, Homo sapiens
  misc_RNA (1)...(19): siRNA sense strand
ugaauucaaagcugcaaga

SEQ ID NO: 2148224 - RNA, 19 nt, Homo sapiens
  misc_RNA (1)...(19): siRNA sense strand
gaacuaugugcaggaaaca

SEQ ID NO: 2148225 - RNA, 19 nt, Homo sapiens
  misc_RNA (1)...(19): siRNA sense strand
caacuucauaugcacuuca

SEQ ID NO: 2148226 - RNA, 19 nt, Homo sapiens
  misc_RNA (1)...(19): siRNA sense strand
auauaaggaucucuguaca

SEQ ID NO: 2148227 - RNA, 19 nt, Homo sapiens
  misc_RNA (1)...(19): siRNA sense strand
aaacacagacacaaaauuc

SEQ ID NO: 2148228 - RNA, 19 nt, Homo sapiens
  misc_RNA (1)...(19): siRNA sense strand
aagauacuuuggaacagau

SEQ ID NO: 2148229 - RNA, 19 nt, Homo sapiens
  misc_RNA (1)...(19): siRNA sense strand
aauauaaggaucucuguac

SEQ ID NO: 2148230 - RNA, 19 nt, Homo sapiens
  misc_RNA (1)...(19): siRNA sense strand
gaauucaaagcugcaagau

SEQ ID NO: 2148231 - RNA, 19 nt, Homo sapiens
  misc_RNA (1)...(19): siRNA sense strand
aauucaaagcugcaagaua

SEQ ID NO: 2148232 - RNA, 19 nt, Homo sapiens
  misc_RNA (1)...(19): siRNA sense strand
uaccaagguucaacaagcu

SEQ ID NO: 2148233 - RNA, 19 nt, Homo sapiens
  misc_RNA (1)...(19): siRNA sense strand
ggaacagauugaggaacag

SEQ ID NO: 2148234 - RNA, 19 nt, Homo sapiens
  misc_RNA (1)...(19): siRNA sense strand
uugguuauguggaacuaug

SEQ ID NO: 2148235 - RNA, 19 nt, Homo sapiens
  misc_RNA (1)...(19): siRNA sense strand
agcaauggaucaacuucau

SEQ ID NO: 2148236 - RNA, 19 nt, Homo sapiens
  misc_RNA (1)...(19): siRNA sense strand
cugcaagaauuuugacauu

SEQ ID NO: 2148237 - RNA, 19 nt, Homo sapiens
  misc_RNA (1)...(19): siRNA sense strand
ggaaacacagacacaaaau

SEQ ID NO: 2148238 - RNA, 19 nt, Homo sapiens
  misc_RNA (1)...(19): siRNA sense strand
gcacuucacccaagccauu

SEQ ID NO: 2148239 - RNA, 19 nt, Homo sapiens
  misc_RNA (1)...(19): siRNA sense strand
uccaaaagcugcaauauaa

SEQ ID NO: 2148240 - RNA, 19 nt, Homo sapiens
  misc_RNA (1)...(19): siRNA sense strand
ggaacuaugugcaggaaac

SEQ ID NO: 2148241 - RNA, 19 nt, Homo sapiens
  misc_RNA (1)...(19): siRNA sense strand
caauauaaggaucucugua

SEQ ID NO: 2148242 - RNA, 19 nt, Homo sapiens
  misc_RNA (1)...(19): siRNA sense strand
caggaaacacagacacaaa

SEQ ID NO: 2148243 - RNA, 19 nt, Homo sapiens
  misc_RNA (1)...(19): siRNA sense strand
gcaggaaacacagacacaa

SEQ ID NO: 2148244 - RNA, 19 nt, Homo sapiens
  misc_RNA (1)...(19): siRNA sense strand
gcaauauaaggaucucugu

SEQ ID NO: 2148245 - RNA, 19 nt, Homo sapiens
  misc_RNA (1)...(19): siRNA sense strand
gaaacacagacacaaaauu

SEQ ID NO: 2148246 - RNA, 19 nt, Homo sapiens
  misc_RNA (1)...(19): siRNA sense strand
caccguguuucaaguuguu

SEQ ID NO: 2148247 - RNA, 19 nt, Homo sapiens
  misc_RNA (1)...(19): siRNA sense strand
guggaacuaugugcaggaa

SEQ ID NO: 2148248 - RNA, 19 nt, Homo sapiens
  misc_RNA (1)...(19): siRNA sense strand
gaacuaugugcaggaaaca

SEQ ID NO: 2148249 - RNA, 19 nt, Homo sapiens
  misc_RNA (1)...(19): siRNA sense strand
caacuucauaugcacuuca

SEQ ID NO: 2148250 - RNA, 19 nt, Homo sapiens
  misc_RNA (1)...(19): siRNA sense strand
auauaaggaucucuguaca

SEQ ID NO: 2148251 - RNA, 19 nt, Homo sapiens
  misc_RNA (1)...(19): siRNA sense strand
aaacacagacacaaaauuc

SEQ ID NO: 2148252 - RNA, 19 nt, Homo sapiens
  misc_RNA (1)...(19): siRNA sense strand
aauauaaggaucucuguac

SEQ ID NO: 2148253 - RNA, 19 nt, Homo sapiens
  misc_RNA (1)...(19): siRNA sense strand
uugguuauguggaacuaug

SEQ ID NO: 2148254 - RNA, 19 nt, Homo sapiens
  misc_RNA (1)...(19): siRNA sense strand
ggaaacacagacacaaaau

SEQ ID NO: 2148255 - RNA, 19 nt, Homo sapiens
  misc_RNA (1)...(19): siRNA sense strand
gcacuucacccaagccauu

SEQ ID NO: 2148256 - RNA, 19 nt, Homo sapiens
  misc_RNA (1)...(19): siRNA sense strand
uccaaaagcugcaauauaa

SEQ ID NO: 2148257 - RNA, 19 nt, Homo sapiens
  misc_RNA (1)...(19): siRNA sense strand
ggaacuaugugcaggaaac

SEQ ID NO: 2148258 - RNA, 19 nt, Homo sapiens
  misc_RNA (1)...(19): siRNA sense strand
caauauaaggaucucugua

SEQ ID NO: 2148259 - RNA, 19 nt, Homo sapiens
  misc_RNA (1)...(19): siRNA sense strand
caggaaacacagacacaaa

SEQ ID NO: 2148260 - RNA, 19 nt, Homo sapiens
  misc_RNA (1)...(19): siRNA sense strand
gcaggaaacacagacacaa

SEQ ID NO: 2148261 - RNA, 19 nt, Homo sapiens
  misc_RNA (1)...(19): siRNA sense strand
gcaauauaaggaucucugu

SEQ ID NO: 2148262 - RNA, 19 nt, Homo sapiens
  misc_RNA (1)...(19): siRNA sense strand
gaaacacagacacaaaauu

SEQ ID NO: 2148263 - RNA, 19 nt, Homo sapiens
  misc_RNA (1)...(19): siRNA sense strand
caccguguuucaaguuguu

SEQ ID NO: 2148264 - RNA, 19 nt, Homo sapiens
  misc_RNA (1)...(19): siRNA sense strand
guggaacuaugugcaggaa

SEQ ID NO: 2148265 - RNA, 19 nt, Homo sapiens
  misc_RNA (1)...(19): siRNA sense strand
gaacuaugugcaggaaaca

SEQ ID NO: 2148266 - RNA, 19 nt, Homo sapiens
  misc_RNA (1)...(19): siRNA sense strand
caacuucauaugcacuuca

SEQ ID NO: 2148267 - RNA, 19 nt, Homo sapiens
  misc_RNA (1)...(19): siRNA sense strand
auauaaggaucucuguaca

SEQ ID NO: 2148268 - RNA, 19 nt, Homo sapiens
  misc_RNA (1)...(19): siRNA sense strand
aaacacagacacaaaauuc

SEQ ID NO: 2148269 - RNA, 19 nt, Homo sapiens
  misc_RNA (1)...(19): siRNA sense strand
aauauaaggaucucuguac

SEQ ID NO: 2148270 - RNA, 19 nt, Homo sapiens
  misc_RNA (1)...(19): siRNA sense strand
uugguuauguggaacuaug

SEQ ID NO: 2148271 - RNA, 19 nt, Homo sapiens
  misc_RNA (1)...(19): siRNA sense strand
ggaaacacagacacaaaau

SEQ ID NO: 2148272 - RNA, 19 nt, Homo sapiens
  misc_RNA (1)...(19): siRNA sense strand
ggaaagaaguggaaagaaa

SEQ ID NO: 2148273 - RNA, 19 nt, Homo sapiens
  misc_RNA (1)...(19): siRNA sense strand
gagaacagcuccugcaguu

SEQ ID NO: 2148274 - RNA, 19 nt, Homo sapiens
  misc_RNA (1)...(19): siRNA sense strand
gcaguuggauggaaauaaa

SEQ ID NO: 2148275 - RNA, 19 nt, Homo sapiens
  misc_RNA (1)...(19): siRNA sense strand
gcagguuucucacugguua

SEQ ID NO: 2148276 - RNA, 19 nt, Homo sapiens
  misc_RNA (1)...(19): siRNA sense strand
gggagacacuucacuguuu

SEQ ID NO: 2148277 - RNA, 19 nt, Homo sapiens
  misc_RNA (1)...(19): siRNA sense strand
ccaaauuacuuccaccuaa

SEQ ID NO: 2148278 - RNA, 19 nt, Homo sapiens
  misc_RNA (1)...(19): siRNA sense strand
gcucagaccuccacucguu

SEQ ID NO: 2148279 - RNA, 19 nt, Homo sapiens
  misc_RNA (1)...(19): siRNA sense strand
cagaugagauccuugauga

SEQ ID NO: 2148280 - RNA, 19 nt, Homo sapiens
  misc_RNA (1)...(19): siRNA sense strand
gaaaggagcaagagcaaau

SEQ ID NO: 2148281 - RNA, 19 nt, Homo sapiens
  misc_RNA (1)...(19): siRNA sense strand
gccuaaaucuggagcagua

SEQ ID NO: 2148282 - RNA, 19 nt, Homo sapiens
  misc_RNA (1)...(19): siRNA sense strand
gaaaugaagaugucucuag

SEQ ID NO: 2148283 - RNA, 19 nt, Homo sapiens
  misc_RNA (1)...(19): siRNA sense strand
gagaaaagcuaaggagaaa

SEQ ID NO: 2148284 - RNA, 19 nt, Homo sapiens
  misc_RNA (1)...(19): siRNA sense strand
ugccaaagaucccaaauca

SEQ ID NO: 2148285 - RNA, 19 nt, Homo sapiens
  misc_RNA (1)...(19): siRNA sense strand
aaacaucacuggagaacag

SEQ ID NO: 2148286 - RNA, 19 nt, Homo sapiens
  misc_RNA (1)...(19): siRNA sense strand
aaaugaagaugucucuaga

SEQ ID NO: 2148287 - RNA, 19 nt, Homo sapiens
  misc_RNA (1)...(19): siRNA sense strand
gaaaagaugacgucaacua

SEQ ID NO: 2148288 - RNA, 19 nt, Homo sapiens
  misc_RNA (1)...(19): siRNA sense strand
gcagguagcaggaucuuca

SEQ ID NO: 2148289 - RNA, 19 nt, Homo sapiens
  misc_RNA (1)...(19): siRNA sense strand
caaauuacuuccaccuaag

SEQ ID NO: 2148290 - RNA, 19 nt, Homo sapiens
  misc_RNA (1)...(19): siRNA sense strand
gaugagauccuugaugaug

SEQ ID NO: 2148291 - RNA, 19 nt, Homo sapiens
  misc_RNA (1)...(19): siRNA sense strand
gggccucucuccucuaugu

SEQ ID NO: 2148292 - RNA, 19 nt, Homo sapiens
  misc_RNA (1)...(19): siRNA sense strand
ucaaggaaaugaagauguc

SEQ ID NO: 2148293 - RNA, 19 nt, Homo sapiens
  misc_RNA (1)...(19): siRNA sense strand
ggauggaaauaaacuuaag

SEQ ID NO: 2148294 - RNA, 19 nt, Homo sapiens
  misc_RNA (1)...(19): siRNA sense strand
ccaaagaucccaaaucacu

SEQ ID NO: 2148295 - RNA, 19 nt, Homo sapiens
  misc_RNA (1)...(19): siRNA sense strand
ggagcaguauguaucugaa

SEQ ID NO: 2148296 - RNA, 19 nt, Homo sapiens
  misc_RNA (1)...(19): siRNA sense strand
gagacucuaauuucagaua

SEQ ID NO: 2148297 - RNA, 19 nt, Homo sapiens
  misc_RNA (1)...(19): siRNA sense strand
gaaagaaguggaaagaaaa

SEQ ID NO: 2148298 - RNA, 19 nt, Homo sapiens
  misc_RNA (1)...(19): siRNA sense strand
aaagaucccaaaucacuaa

SEQ ID NO: 2148299 - RNA, 19 nt, Homo sapiens
  misc_RNA (1)...(19): siRNA sense strand
ccaaaccaccaacaagaaa

SEQ ID NO: 2148300 - RNA, 19 nt, Homo sapiens
  misc_RNA (1)...(19): siRNA sense strand
cuucucgucugaccacaua

SEQ ID NO: 2148301 - RNA, 19 nt, Homo sapiens
  misc_RNA (1)...(19): siRNA sense strand
gagaaaggagcaagagcaa

SEQ ID NO: 2148302 - RNA, 19 nt, Homo sapiens
  misc_RNA (1)...(19): siRNA sense strand
guuucucacugguuaauga

SEQ ID NO: 2148303 - RNA, 19 nt, Homo sapiens
  misc_RNA (1)...(19): siRNA sense strand
caaagaucccaaaucacua

SEQ ID NO: 2148304 - RNA, 19 nt, Homo sapiens
  misc_RNA (1)...(19): siRNA sense strand
gcaagggaaagaaguggaa

SEQ ID NO: 2148305 - RNA, 19 nt, Homo sapiens
  misc_RNA (1)...(19): siRNA sense strand
gaaccugccugcgccuaca

SEQ ID NO: 2148306 - RNA, 19 nt, Homo sapiens
  misc_RNA (1)...(19): siRNA sense strand
ggagacacuucacuguuuu

SEQ ID NO: 2148307 - RNA, 19 nt, Homo sapiens
  misc_RNA (1)...(19): siRNA sense strand
aaacuuaaggcucuuggaa

SEQ ID NO: 2148308 - RNA, 19 nt, Homo sapiens
  misc_RNA (1)...(19): siRNA sense strand
aaauuaagcggaaguuugu

SEQ ID NO: 2148309 - RNA, 19 nt, Homo sapiens
  misc_RNA (1)...(19): siRNA sense strand
ucacuaagggcauccaguu

SEQ ID NO: 2148310 - RNA, 19 nt, Homo sapiens
  misc_RNA (1)...(19): siRNA sense strand
cuucaaagucugaucauga

SEQ ID NO: 2148311 - RNA, 19 nt, Homo sapiens
  misc_RNA (1)...(19): siRNA sense strand
gagcaaaugcagaggaagu

SEQ ID NO: 2148312 - RNA, 19 nt, Homo sapiens
  misc_RNA (1)...(19): siRNA sense strand
ccuuagcacugucaucaga

SEQ ID NO: 2148313 - RNA, 19 nt, Homo sapiens
  misc_RNA (1)...(19): siRNA sense strand
caaagucugaucaugaugu

SEQ ID NO: 2148314 - RNA, 19 nt, Homo sapiens
  misc_RNA (1)...(19): siRNA sense strand
caccaaaccaccaacaaga

SEQ ID NO: 2148315 - RNA, 19 nt, Homo sapiens
  misc_RNA (1)...(19): siRNA sense strand
gaaacucaaggaaaugaag

SEQ ID NO: 2148316 - RNA, 19 nt, Homo sapiens
  misc_RNA (1)...(19): siRNA sense strand
acuuaaggcucuuggaaug

SEQ ID NO: 2148317 - RNA, 19 nt, Homo sapiens
  misc_RNA (1)...(19): siRNA sense strand
ugagauccuugaugaugga

SEQ ID NO: 2148318 - RNA, 19 nt, Homo sapiens
  misc_RNA (1)...(19): siRNA sense strand
aagagcaaaugcagaggaa

SEQ ID NO: 2148319 - RNA, 19 nt, Homo sapiens
  misc_RNA (1)...(19): siRNA sense strand
ucggaaggcccaagagaaa

SEQ ID NO: 2148320 - RNA, 19 nt, Homo sapiens
  misc_RNA (1)...(19): siRNA sense strand
aaaagaagccaguagguuu

SEQ ID NO: 2148321 - RNA, 19 nt, Homo sapiens
  misc_RNA (1)...(19): siRNA sense strand
gcaguauguaucugaauuc

SEQ ID NO: 2148322 - RNA, 19 nt, Homo sapiens
  misc_RNA (1)...(19): siRNA sense strand
uaccuucaaugaugacuuc

SEQ ID NO: 2148323 - RNA, 19 nt, Homo sapiens
  misc_RNA (1)...(19): siRNA sense strand
ggacacccaagccauguuc

SEQ ID NO: 2148324 - RNA, 19 nt, Homo sapiens
  misc_RNA (1)...(19): siRNA sense strand
gauggacagucucccaaac

SEQ ID NO: 2148325 - RNA, 19 nt, Homo sapiens
  misc_RNA (1)...(19): siRNA sense strand
ggaaaugaagaugucucua

SEQ ID NO: 2148326 - RNA, 19 nt, Homo sapiens
  misc_RNA (1)...(19): siRNA sense strand
gggaaagaaguggaaagaa

SEQ ID NO: 2148327 - RNA, 19 nt, Homo sapiens
  misc_RNA (1)...(19): siRNA sense strand
agcaguauguaucugaauu

SEQ ID NO: 2148328 - RNA, 19 nt, Homo sapiens
  misc_RNA (1)...(19): siRNA sense strand
ccaccuaaggguuugagaa

SEQ ID NO: 2148329 - RNA, 19 nt, Homo sapiens
  misc_RNA (1)...(19): siRNA sense strand
ggagugugcagcagguuuc

SEQ ID NO: 2148330 - RNA, 19 nt, Homo sapiens
  misc_RNA (1)...(19): siRNA sense strand
ccaagaauuuuaccuucaa

SEQ ID NO: 2148331 - RNA, 19 nt, Homo sapiens
  misc_RNA (1)...(19): siRNA sense strand
aagaugacgucaacuacag

SEQ ID NO: 2148332 - RNA, 19 nt, Homo sapiens
  misc_RNA (1)...(19): siRNA sense strand
cagaaaagaugacgucaac

SEQ ID NO: 2148333 - RNA, 19 nt, Homo sapiens
  misc_RNA (1)...(19): siRNA sense strand
ccuaaggguuugagaacgu

SEQ ID NO: 2148334 - RNA, 19 nt, Homo sapiens
  misc_RNA (1)...(19): siRNA sense strand
caguauguaucugaauuca

SEQ ID NO: 2148335 - RNA, 19 nt, Homo sapiens
  misc_RNA (1)...(19): siRNA sense strand
cacagucagugucagaauc

SEQ ID NO: 2148336 - RNA, 19 nt, Homo sapiens
  misc_RNA (1)...(19): siRNA sense strand
aaagucugaucaugaugug

SEQ ID NO: 2148337 - RNA, 19 nt, Homo sapiens
  misc_RNA (1)...(19): siRNA sense strand
cuucaaugaugacuucagu

SEQ ID NO: 2148338 - RNA, 19 nt, Homo sapiens
  misc_RNA (1)...(19): siRNA sense strand
gcucggaaggcccaagaga

SEQ ID NO: 2148339 - RNA, 19 nt, Homo sapiens
  misc_RNA (1)...(19): siRNA sense strand
ggacagucucccaaacaca

SEQ ID NO: 2148340 - RNA, 19 nt, Homo sapiens
  misc_RNA (1)...(19): siRNA sense strand
cuaagggcauccaguucau

SEQ ID NO: 2148341 - RNA, 19 nt, Homo sapiens
  misc_RNA (1)...(19): siRNA sense strand
uucaaagucugaucaugau

SEQ ID NO: 2148342 - RNA, 19 nt, Homo sapiens
  misc_RNA (1)...(19): siRNA sense strand
ugaccacauagcugaauuu

SEQ ID NO: 2148343 - RNA, 19 nt, Homo sapiens
  misc_RNA (1)...(19): siRNA sense strand
aaaagggguccaagaauuu

SEQ ID NO: 2148344 - RNA, 19 nt, Homo sapiens
  misc_RNA (1)...(19): siRNA sense strand
augccuuucucaugguuua

SEQ ID NO: 2148345 - RNA, 19 nt, Homo sapiens
  misc_RNA (1)...(19): siRNA sense strand
aaagaugacgucaacuaca

SEQ ID NO: 2148346 - RNA, 19 nt, Homo sapiens
  misc_RNA (1)...(19): siRNA sense strand
uaaaucuggagcaguaugu

SEQ ID NO: 2148347 - RNA, 19 nt, Homo sapiens
  misc_RNA (1)...(19): siRNA sense strand
uaaggagaaaggagcaaga

SEQ ID NO: 2148348 - RNA, 19 nt, Homo sapiens
  misc_RNA (1)...(19): siRNA sense strand
aaugacagccggaaaggau

SEQ ID NO: 2148349 - RNA, 19 nt, Homo sapiens
  misc_RNA (1)...(19): siRNA sense strand
aaacucaaggaaaugaaga

SEQ ID NO: 2148350 - RNA, 19 nt, Homo sapiens
  misc_RNA (1)...(19): siRNA sense strand
aaagaaacucaaggaaaug

SEQ ID NO: 2148351 - RNA, 19 nt, Homo sapiens
  misc_RNA (1)...(19): siRNA sense strand
ucagaugagauccuugaug

SEQ ID NO: 2148352 - RNA, 19 nt, Homo sapiens
  misc_RNA (1)...(19): siRNA sense strand
aaaagaugaugccaaagau

SEQ ID NO: 2148353 - RNA, 19 nt, Homo sapiens
  misc_RNA (1)...(19): siRNA sense strand
aagaaacucaaggaaauga

SEQ ID NO: 2148354 - RNA, 19 nt, Homo sapiens
  misc_RNA (1)...(19): siRNA sense strand
gagcaguauguaucugaau

SEQ ID NO: 2148355 - RNA, 19 nt, Homo sapiens
  misc_RNA (1)...(19): siRNA sense strand
guuaaugagccuaaaucug

SEQ ID NO: 2148356 - RNA, 19 nt, Homo sapiens
  misc_RNA (1)...(19): siRNA sense strand
cuucagaggcagacuggaa

SEQ ID NO: 2148357 - RNA, 19 nt, Homo sapiens
  misc_RNA (1)...(19): siRNA sense strand
gaaaagcuaaggagaaagg

SEQ ID NO: 2148358 - RNA, 19 nt, Homo sapiens
  misc_RNA (1)...(19): siRNA sense strand
aagaaucuccuugccauca

SEQ ID NO: 2148359 - RNA, 19 nt, Homo sapiens
  misc_RNA (1)...(19): siRNA sense strand
ucaccaaaccaccaacaag

SEQ ID NO: 2148360 - RNA, 19 nt, Homo sapiens
  misc_RNA (1)...(19): siRNA sense strand
gaucaugauguggaagaau

SEQ ID NO: 2148361 - RNA, 19 nt, Homo sapiens
  misc_RNA (1)...(19): siRNA sense strand
aaaauuaagcggaaguuug

SEQ ID NO: 2148362 - RNA, 19 nt, Homo sapiens
  misc_RNA (1)...(19): siRNA sense strand
acacuucacuguuuucuac

SEQ ID NO: 2148363 - RNA, 19 nt, Homo sapiens
  misc_RNA (1)...(19): siRNA sense strand
gaccacauagcugaauuuc

SEQ ID NO: 2148364 - RNA, 19 nt, Homo sapiens
  misc_RNA (1)...(19): siRNA sense strand
ggaaagaaguggaaagaaa

SEQ ID NO: 2148365 - RNA, 19 nt, Homo sapiens
  misc_RNA (1)...(19): siRNA sense strand
gagaacagcuccugcaguu

SEQ ID NO: 2148366 - RNA, 19 nt, Homo sapiens
  misc_RNA (1)...(19): siRNA sense strand
gcaguuggauggaaauaaa

SEQ ID NO: 2148367 - RNA, 19 nt, Homo sapiens
  misc_RNA (1)...(19): siRNA sense strand
gcagguuucucacugguua

SEQ ID NO: 2148368 - RNA, 19 nt, Homo sapiens
  misc_RNA (1)...(19): siRNA sense strand
gggagacacuucacuguuu

SEQ ID NO: 2148369 - RNA, 19 nt, Homo sapiens
  misc_RNA (1)...(19): siRNA sense strand
ccaaauuacuuccaccuaa

SEQ ID NO: 2148370 - RNA, 19 nt, Homo sapiens
  misc_RNA (1)...(19): siRNA sense strand
gcucagaccuccacucguu

SEQ ID NO: 2148371 - RNA, 19 nt, Homo sapiens
  misc_RNA (1)...(19): siRNA sense strand
cagaugagauccuugauga

SEQ ID NO: 2148372 - RNA, 19 nt, Homo sapiens
  misc_RNA (1)...(19): siRNA sense strand
gaaaggagcaagagcaaau

SEQ ID NO: 2148373 - RNA, 19 nt, Homo sapiens
  misc_RNA (1)...(19): siRNA sense strand
gccuaaaucuggagcagua

SEQ ID NO: 2148374 - RNA, 19 nt, Homo sapiens
  misc_RNA (1)...(19): siRNA sense strand
gaaaugaagaugucucuag

SEQ ID NO: 2148375 - RNA, 19 nt, Homo sapiens
  misc_RNA (1)...(19): siRNA sense strand
gagaaaagcuaaggagaaa

SEQ ID NO: 2148376 - RNA, 19 nt, Homo sapiens
  misc_RNA (1)...(19): siRNA sense strand
ugccaaagaucccaaauca

SEQ ID NO: 2148377 - RNA, 19 nt, Homo sapiens
  misc_RNA (1)...(19): siRNA sense strand
aaacaucacuggagaacag

SEQ ID NO: 2148378 - RNA, 19 nt, Homo sapiens
  misc_RNA (1)...(19): siRNA sense strand
aaaugaagaugucucuaga

SEQ ID NO: 2148379 - RNA, 19 nt, Homo sapiens
  misc_RNA (1)...(19): siRNA sense strand
gaaaagaugacgucaacua

SEQ ID NO: 2148380 - RNA, 19 nt, Homo sapiens
  misc_RNA (1)...(19): siRNA sense strand
gcagguagcaggaucuuca

SEQ ID NO: 2148381 - RNA, 19 nt, Homo sapiens
  misc_RNA (1)...(19): siRNA sense strand
caaauuacuuccaccuaag

SEQ ID NO: 2148382 - RNA, 19 nt, Homo sapiens
  misc_RNA (1)...(19): siRNA sense strand
gaugagauccuugaugaug

SEQ ID NO: 2148383 - RNA, 19 nt, Homo sapiens
  misc_RNA (1)...(19): siRNA sense strand
gggccucucuccucuaugu

SEQ ID NO: 2148384 - RNA, 19 nt, Homo sapiens
  misc_RNA (1)...(19): siRNA sense strand
ucaaggaaaugaagauguc

SEQ ID NO: 2148385 - RNA, 19 nt, Homo sapiens
  misc_RNA (1)...(19): siRNA sense strand
ggauggaaauaaacuuaag

SEQ ID NO: 2148386 - RNA, 19 nt, Homo sapiens
  misc_RNA (1)...(19): siRNA sense strand
ccaaagaucccaaaucacu

SEQ ID NO: 2148387 - RNA, 19 nt, Homo sapiens
  misc_RNA (1)...(19): siRNA sense strand
ggagcaguauguaucugaa

SEQ ID NO: 2148388 - RNA, 19 nt, Homo sapiens
  misc_RNA (1)...(19): siRNA sense strand
gagacucuaauuucagaua

SEQ ID NO: 2148389 - RNA, 19 nt, Homo sapiens
  misc_RNA (1)...(19): siRNA sense strand
gaaagaaguggaaagaaaa

SEQ ID NO: 2148390 - RNA, 19 nt, Homo sapiens
  misc_RNA (1)...(19): siRNA sense strand
aaagaucccaaaucacuaa

SEQ ID NO: 2148391 - RNA, 19 nt, Homo sapiens
  misc_RNA (1)...(19): siRNA sense strand
ccaaaccaccaacaagaaa

SEQ ID NO: 2148392 - RNA, 19 nt, Homo sapiens
  misc_RNA (1)...(19): siRNA sense strand
cuucucgucugaccacaua

SEQ ID NO: 2148393 - RNA, 19 nt, Homo sapiens
  misc_RNA (1)...(19): siRNA sense strand
gagaaaggagcaagagcaa

SEQ ID NO: 2148394 - RNA, 19 nt, Homo sapiens
  misc_RNA (1)...(19): siRNA sense strand
guuucucacugguuaauga

SEQ ID NO: 2148395 - RNA, 19 nt, Homo sapiens
  misc_RNA (1)...(19): siRNA sense strand
caaagaucccaaaucacua

SEQ ID NO: 2148396 - RNA, 19 nt, Homo sapiens
  misc_RNA (1)...(19): siRNA sense strand
gcaagggaaagaaguggaa

SEQ ID NO: 2148397 - RNA, 19 nt, Homo sapiens
  misc_RNA (1)...(19): siRNA sense strand
gaaccugccugcgccuaca

SEQ ID NO: 2148398 - RNA, 19 nt, Homo sapiens
  misc_RNA (1)...(19): siRNA sense strand
ggagacacuucacuguuuu

SEQ ID NO: 2148399 - RNA, 19 nt, Homo sapiens
  misc_RNA (1)...(19): siRNA sense strand
aaacuuaaggcucuuggaa

SEQ ID NO: 2148400 - RNA, 19 nt, Homo sapiens
  misc_RNA (1)...(19): siRNA sense strand
aaauuaagcggaaguuugu

SEQ ID NO: 2148401 - RNA, 19 nt, Homo sapiens
  misc_RNA (1)...(19): siRNA sense strand
ucacuaagggcauccaguu

SEQ ID NO: 2148402 - RNA, 19 nt, Homo sapiens
  misc_RNA (1)...(19): siRNA sense strand
cuucaaagucugaucauga

SEQ ID NO: 2148403 - RNA, 19 nt, Homo sapiens
  misc_RNA (1)...(19): siRNA sense strand
gagcaaaugcagaggaagu

SEQ ID NO: 2148404 - RNA, 19 nt, Homo sapiens
  misc_RNA (1)...(19): siRNA sense strand
ccuuagcacugucaucaga

SEQ ID NO: 2148405 - RNA, 19 nt, Homo sapiens
  misc_RNA (1)...(19): siRNA sense strand
caaagucugaucaugaugu

SEQ ID NO: 2148406 - RNA, 19 nt, Homo sapiens
  misc_RNA (1)...(19): siRNA sense strand
caccaaaccaccaacaaga

SEQ ID NO: 2148407 - RNA, 19 nt, Homo sapiens
  misc_RNA (1)...(19): siRNA sense strand
gaaacucaaggaaaugaag

SEQ ID NO: 2148408 - RNA, 19 nt, Homo sapiens
  misc_RNA (1)...(19): siRNA sense strand
acuuaaggcucuuggaaug

SEQ ID NO: 2148409 - RNA, 19 nt, Homo sapiens
  misc_RNA (1)...(19): siRNA sense strand
ugagauccuugaugaugga

SEQ ID NO: 2148410 - RNA, 19 nt, Homo sapiens
  misc_RNA (1)...(19): siRNA sense strand
aagagcaaaugcagaggaa

SEQ ID NO: 2148411 - RNA, 19 nt, Homo sapiens
  misc_RNA (1)...(19): siRNA sense strand
ucggaaggcccaagagaaa

SEQ ID NO: 2148412 - RNA, 19 nt, Homo sapiens
  misc_RNA (1)...(19): siRNA sense strand
aaaagaagccaguagguuu

SEQ ID NO: 2148413 - RNA, 19 nt, Homo sapiens
  misc_RNA (1)...(19): siRNA sense strand
gcaguauguaucugaauuc

SEQ ID NO: 2148414 - RNA, 19 nt, Homo sapiens
  misc_RNA (1)...(19): siRNA sense strand
uaccuucaaugaugacuuc

SEQ ID NO: 2148415 - RNA, 19 nt, Homo sapiens
  misc_RNA (1)...(19): siRNA sense strand
ggacacccaagccauguuc

SEQ ID NO: 2148416 - RNA, 19 nt, Homo sapiens
  misc_RNA (1)...(19): siRNA sense strand
gauggacagucucccaaac

SEQ ID NO: 2148417 - RNA, 19 nt, Homo sapiens
  misc_RNA (1)...(19): siRNA sense strand
ggaaaugaagaugucucua

SEQ ID NO: 2148418 - RNA, 19 nt, Homo sapiens
  misc_RNA (1)...(19): siRNA sense strand
gggaaagaaguggaaagaa

SEQ ID NO: 2148419 - RNA, 19 nt, Homo sapiens
  misc_RNA (1)...(19): siRNA sense strand
agcaguauguaucugaauu

SEQ ID NO: 2148420 - RNA, 19 nt, Homo sapiens
  misc_RNA (1)...(19): siRNA sense strand
ccaccuaaggguuugagaa

SEQ ID NO: 2148421 - RNA, 19 nt, Homo sapiens
  misc_RNA (1)...(19): siRNA sense strand
ggagugugcagcagguuuc

SEQ ID NO: 2148422 - RNA, 19 nt, Homo sapiens
  misc_RNA (1)...(19): siRNA sense strand
ccaagaauuuuaccuucaa

SEQ ID NO: 2148423 - RNA, 19 nt, Homo sapiens
  misc_RNA (1)...(19): siRNA sense strand
aagaugacgucaacuacag

SEQ ID NO: 2148424 - RNA, 19 nt, Homo sapiens
  misc_RNA (1)...(19): siRNA sense strand
cagaaaagaugacgucaac

SEQ ID NO: 2148425 - RNA, 19 nt, Homo sapiens
  misc_RNA (1)...(19): siRNA sense strand
ccuaaggguuugagaacgu

SEQ ID NO: 2148426 - RNA, 19 nt, Homo sapiens
  misc_RNA (1)...(19): siRNA sense strand
caguauguaucugaauuca

SEQ ID NO: 2148427 - RNA, 19 nt, Homo sapiens
  misc_RNA (1)...(19): siRNA sense strand
cacagucagugucagaauc

SEQ ID NO: 2148428 - RNA, 19 nt, Homo sapiens
  misc_RNA (1)...(19): siRNA sense strand
aaagucugaucaugaugug

SEQ ID NO: 2148429 - RNA, 19 nt, Homo sapiens
  misc_RNA (1)...(19): siRNA sense strand
cuucaaugaugacuucagu

SEQ ID NO: 2148430 - RNA, 19 nt, Homo sapiens
  misc_RNA (1)...(19): siRNA sense strand
gcucggaaggcccaagaga

SEQ ID NO: 2148431 - RNA, 19 nt, Homo sapiens
  misc_RNA (1)...(19): siRNA sense strand
ggacagucucccaaacaca

SEQ ID NO: 2148432 - RNA, 19 nt, Homo sapiens
  misc_RNA (1)...(19): siRNA sense strand
cuaagggcauccaguucau

SEQ ID NO: 2148433 - RNA, 19 nt, Homo sapiens
  misc_RNA (1)...(19): siRNA sense strand
uucaaagucugaucaugau

SEQ ID NO: 2148434 - RNA, 19 nt, Homo sapiens
  misc_RNA (1)...(19): siRNA sense strand
ugaccacauagcugaauuu

SEQ ID NO: 2148435 - RNA, 19 nt, Homo sapiens
  misc_RNA (1)...(19): siRNA sense strand
aaaagggguccaagaauuu

SEQ ID NO: 2148436 - RNA, 19 nt, Homo sapiens
  misc_RNA (1)...(19): siRNA sense strand
augccuuucucaugguuua

SEQ ID NO: 2148437 - RNA, 19 nt, Homo sapiens
  misc_RNA (1)...(19): siRNA sense strand
aaagaugacgucaacuaca

SEQ ID NO: 2148438 - RNA, 19 nt, Homo sapiens
  misc_RNA (1)...(19): siRNA sense strand
uaaaucuggagcaguaugu

SEQ ID NO: 2148439 - RNA, 19 nt, Homo sapiens
  misc_RNA (1)...(19): siRNA sense strand
uaaggagaaaggagcaaga

SEQ ID NO: 2148440 - RNA, 19 nt, Homo sapiens
  misc_RNA (1)...(19): siRNA sense strand
aaugacagccggaaaggau

SEQ ID NO: 2148441 - RNA, 19 nt, Homo sapiens
  misc_RNA (1)...(19): siRNA sense strand
aaacucaaggaaaugaaga

SEQ ID NO: 2148442 - RNA, 19 nt, Homo sapiens
  misc_RNA (1)...(19): siRNA sense strand
aaagaaacucaaggaaaug

SEQ ID NO: 2148443 - RNA, 19 nt, Homo sapiens
  misc_RNA (1)...(19): siRNA sense strand
ucagaugagauccuugaug

SEQ ID NO: 2148444 - RNA, 19 nt, Homo sapiens
  misc_RNA (1)...(19): siRNA sense strand
aaaagaugaugccaaagau

SEQ ID NO: 2148445 - RNA, 19 nt, Homo sapiens
  misc_RNA (1)...(19): siRNA sense strand
aagaaacucaaggaaauga

SEQ ID NO: 2148446 - RNA, 19 nt, Homo sapiens
  misc_RNA (1)...(19): siRNA sense strand
gagcaguauguaucugaau

SEQ ID NO: 2148447 - RNA, 19 nt, Homo sapiens
  misc_RNA (1)...(19): siRNA sense strand
guuaaugagccuaaaucug

SEQ ID NO: 2148448 - RNA, 19 nt, Homo sapiens
  misc_RNA (1)...(19): siRNA sense strand
cuucagaggcagacuggaa

SEQ ID NO: 2148449 - RNA, 19 nt, Homo sapiens
  misc_RNA (1)...(19): siRNA sense strand
gaaaagcuaaggagaaagg

SEQ ID NO: 2148450 - RNA, 19 nt, Homo sapiens
  misc_RNA (1)...(19): siRNA sense strand
aagaaucuccuugccauca

SEQ ID NO: 2148451 - RNA, 19 nt, Homo sapiens
  misc_RNA (1)...(19): siRNA sense strand
ucaccaaaccaccaacaag

SEQ ID NO: 2148452 - RNA, 19 nt, Homo sapiens
  misc_RNA (1)...(19): siRNA sense strand
gaucaugauguggaagaau

SEQ ID NO: 2148453 - RNA, 19 nt, Homo sapiens
  misc_RNA (1)...(19): siRNA sense strand
aaaauuaagcggaaguuug

SEQ ID NO: 2148454 - RNA, 19 nt, Homo sapiens
  misc_RNA (1)...(19): siRNA sense strand
acacuucacuguuuucuac

SEQ ID NO: 2148455 - RNA, 19 nt, Homo sapiens
  misc_RNA (1)...(19): siRNA sense strand
gaccacauagcugaauuuc

SEQ ID NO: 2148456 - RNA, 19 nt, Homo sapiens
  misc_RNA (1)...(19): siRNA sense strand
gaaagaagaugcugagaaa

SEQ ID NO: 2148457 - RNA, 19 nt, Homo sapiens
  misc_RNA (1)...(19): siRNA sense strand
gaagaagacugcccaaauc

SEQ ID NO: 2148458 - RNA, 19 nt, Homo sapiens
  misc_RNA (1)...(19): siRNA sense strand
gcgagaagcugaaaggaaa

SEQ ID NO: 2148459 - RNA, 19 nt, Homo sapiens
  misc_RNA (1)...(19): siRNA sense strand
gcucaaauguguucgagaa

SEQ ID NO: 2148460 - RNA, 19 nt, Homo sapiens
  misc_RNA (1)...(19): siRNA sense strand
gcaagaucauucauacuga

SEQ ID NO: 2148461 - RNA, 19 nt, Homo sapiens
  misc_RNA (1)...(19): siRNA sense strand
ugaagaugcugcacaguuu

SEQ ID NO: 2148462 - RNA, 19 nt, Homo sapiens
  misc_RNA (1)...(19): siRNA sense strand
gaagaggcaggcugaguua

SEQ ID NO: 2148463 - RNA, 19 nt, Homo sapiens
  misc_RNA (1)...(19): siRNA sense strand
gaucauucauacugacaua

SEQ ID NO: 2148464 - RNA, 19 nt, Homo sapiens
  misc_RNA (1)...(19): siRNA sense strand
gcccagaggugaaacuaaa

SEQ ID NO: 2148465 - RNA, 19 nt, Homo sapiens
  misc_RNA (1)...(19): siRNA sense strand
gaaaagauuuguugcaaug

SEQ ID NO: 2148466 - RNA, 19 nt, Homo sapiens
  misc_RNA (1)...(19): siRNA sense strand
guuguucucuggauccuua

SEQ ID NO: 2148467 - RNA, 19 nt, Homo sapiens
  misc_RNA (1)...(19): siRNA sense strand
gcagaaaccuauaggaaaa

SEQ ID NO: 2148468 - RNA, 19 nt, Homo sapiens
  misc_RNA (1)...(19): siRNA sense strand
ucugagggaucaccacuua

SEQ ID NO: 2148469 - RNA, 19 nt, Homo sapiens
  misc_RNA (1)...(19): siRNA sense strand
ucaaguggaucaucaaauc

SEQ ID NO: 2148470 - RNA, 19 nt, Homo sapiens
  misc_RNA (1)...(19): siRNA sense strand
gaagaugcugcacaguuua

SEQ ID NO: 2148471 - RNA, 19 nt, Homo sapiens
  misc_RNA (1)...(19): siRNA sense strand
cgaugaagaugaugaugaa

SEQ ID NO: 2148472 - RNA, 19 nt, Homo sapiens
  misc_RNA (1)...(19): siRNA sense strand
ugaagaugaugaugaagaa

SEQ ID NO: 2148473 - RNA, 19 nt, Homo sapiens
  misc_RNA (1)...(19): siRNA sense strand
gacagaagcagaacgguuu

SEQ ID NO: 2148474 - RNA, 19 nt, Homo sapiens
  misc_RNA (1)...(19): siRNA sense strand
gaggcaggcugaguuauug

SEQ ID NO: 2148475 - RNA, 19 nt, Homo sapiens
  misc_RNA (1)...(19): siRNA sense strand
aacgggagauuauuuguuu

SEQ ID NO: 2148476 - RNA, 19 nt, Homo sapiens
  misc_RNA (1)...(19): siRNA sense strand
ggagacagccuuggaugaa

SEQ ID NO: 2148477 - RNA, 19 nt, Homo sapiens
  misc_RNA (1)...(19): siRNA sense strand
gagacagccuuggaugaaa

SEQ ID NO: 2148478 - RNA, 19 nt, Homo sapiens
  misc_RNA (1)...(19): siRNA sense strand
caaauguguucgagaaagu

SEQ ID NO: 2148479 - RNA, 19 nt, Homo sapiens
  misc_RNA (1)...(19): siRNA sense strand
cugcacaguuuacagauuu

SEQ ID NO: 2148480 - RNA, 19 nt, Homo sapiens
  misc_RNA (1)...(19): siRNA sense strand
gaucaucaaauccaacuau

SEQ ID NO: 2148481 - RNA, 19 nt, Homo sapiens
  misc_RNA (1)...(19): siRNA sense strand
cagaaagugauuacacaua

SEQ ID NO: 2148482 - RNA, 19 nt, Homo sapiens
  misc_RNA (1)...(19): siRNA sense strand
ggaauauaaucuugaugag

SEQ ID NO: 2148483 - RNA, 19 nt, Homo sapiens
  misc_RNA (1)...(19): siRNA sense strand
agaagaugcugagaaagaa

SEQ ID NO: 2148484 - RNA, 19 nt, Homo sapiens
  misc_RNA (1)...(19): siRNA sense strand
gagaaagugaucccaguga

SEQ ID NO: 2148485 - RNA, 19 nt, Homo sapiens
  misc_RNA (1)...(19): siRNA sense strand
agaugaagaugauguagau

SEQ ID NO: 2148486 - RNA, 19 nt, Homo sapiens
  misc_RNA (1)...(19): siRNA sense strand
cagcugcaccuuccaauga

SEQ ID NO: 2148487 - RNA, 19 nt, Homo sapiens
  misc_RNA (1)...(19): siRNA sense strand
cagcagaaaccuauaggaa

SEQ ID NO: 2148488 - RNA, 19 nt, Homo sapiens
  misc_RNA (1)...(19): siRNA sense strand
caucaaauccaacuaucaa

SEQ ID NO: 2148489 - RNA, 19 nt, Homo sapiens
  misc_RNA (1)...(19): siRNA sense strand
ggagaacugcgacacauca

SEQ ID NO: 2148490 - RNA, 19 nt, Homo sapiens
  misc_RNA (1)...(19): siRNA sense strand
gaggagaacugcgacacau

SEQ ID NO: 2148491 - RNA, 19 nt, Homo sapiens
  misc_RNA (1)...(19): siRNA sense strand
ccgggcagcugacuuguug

SEQ ID NO: 2148492 - RNA, 19 nt, Homo sapiens
  misc_RNA (1)...(19): siRNA sense strand
ugaagaagacugcccaaau

SEQ ID NO: 2148493 - RNA, 19 nt, Homo sapiens
  misc_RNA (1)...(19): siRNA sense strand
ucaggaacuugcgaacaua

SEQ ID NO: 2148494 - RNA, 19 nt, Homo sapiens
  misc_RNA (1)...(19): siRNA sense strand
cacaguaagugcaagauca

SEQ ID NO: 2148495 - RNA, 19 nt, Homo sapiens
  misc_RNA (1)...(19): siRNA sense strand
ccagugacccaaacaaaga

SEQ ID NO: 2148496 - RNA, 19 nt, Homo sapiens
  misc_RNA (1)...(19): siRNA sense strand
gcaacuggacgaugaagau

SEQ ID NO: 2148497 - RNA, 19 nt, Homo sapiens
  misc_RNA (1)...(19): siRNA sense strand
gacccuacguggauagaau

SEQ ID NO: 2148498 - RNA, 19 nt, Homo sapiens
  misc_RNA (1)...(19): siRNA sense strand
gccggagccucaacagaaa

SEQ ID NO: 2148499 - RNA, 19 nt, Homo sapiens
  misc_RNA (1)...(19): siRNA sense strand
gaagaugcugagaaagaaa

SEQ ID NO: 2148500 - RNA, 19 nt, Homo sapiens
  misc_RNA (1)...(19): siRNA sense strand
ucaaggguuagauuacuua

SEQ ID NO: 2148501 - RNA, 19 nt, Homo sapiens
  misc_RNA (1)...(19): siRNA sense strand
cagcuccuaugaacaauuc

SEQ ID NO: 2148502 - RNA, 19 nt, Homo sapiens
  misc_RNA (1)...(19): siRNA sense strand
caaaugcagaaagugauua

SEQ ID NO: 2148503 - RNA, 19 nt, Homo sapiens
  misc_RNA (1)...(19): siRNA sense strand
aagaagaugcugagaaaga

SEQ ID NO: 2148504 - RNA, 19 nt, Homo sapiens
  misc_RNA (1)...(19): siRNA sense strand
gaugaugcauaugugagaa

SEQ ID NO: 2148505 - RNA, 19 nt, Homo sapiens
  misc_RNA (1)...(19): siRNA sense strand
gcugcacaguuuacagauu

SEQ ID NO: 2148506 - RNA, 19 nt, Homo sapiens
  misc_RNA (1)...(19): siRNA sense strand
gagccucuuugauguacuu

SEQ ID NO: 2148507 - RNA, 19 nt, Homo sapiens
  misc_RNA (1)...(19): siRNA sense strand
cauagacccuacguggaua

SEQ ID NO: 2148508 - RNA, 19 nt, Homo sapiens
  misc_RNA (1)...(19): siRNA sense strand
ccaaauggacgacauaaaa

SEQ ID NO: 2148509 - RNA, 19 nt, Homo sapiens
  misc_RNA (1)...(19): siRNA sense strand
cggcauccuugguugaauu

SEQ ID NO: 2148510 - RNA, 19 nt, Homo sapiens
  misc_RNA (1)...(19): siRNA sense strand
ugcaggagauagaagaauu

SEQ ID NO: 2148511 - RNA, 19 nt, Homo sapiens
  misc_RNA (1)...(19): siRNA sense strand
ggagauuauuuguuugaac

SEQ ID NO: 2148512 - RNA, 19 nt, Homo sapiens
  misc_RNA (1)...(19): siRNA sense strand
cggcguguauggcauuuga

SEQ ID NO: 2148513 - RNA, 19 nt, Homo sapiens
  misc_RNA (1)...(19): siRNA sense strand
uagcagcuccuaugaacaa

SEQ ID NO: 2148514 - RNA, 19 nt, Homo sapiens
  misc_RNA (1)...(19): siRNA sense strand
gcaggagauagaagaauug

SEQ ID NO: 2148515 - RNA, 19 nt, Homo sapiens
  misc_RNA (1)...(19): siRNA sense strand
agacagccuuggaugaaau

SEQ ID NO: 2148516 - RNA, 19 nt, Homo sapiens
  misc_RNA (1)...(19): siRNA sense strand
caacgggagauuauuuguu

SEQ ID NO: 2148517 - RNA, 19 nt, Homo sapiens
  misc_RNA (1)...(19): siRNA sense strand
cagcugacuuguuggugaa

SEQ ID NO: 2148518 - RNA, 19 nt, Homo sapiens
  misc_RNA (1)...(19): siRNA sense strand
ccugaggaauauaaucuug

SEQ ID NO: 2148519 - RNA, 19 nt, Homo sapiens
  misc_RNA (1)...(19): siRNA sense strand
ugaccaggauggcgaauac

SEQ ID NO: 2148520 - RNA, 19 nt, Homo sapiens
  misc_RNA (1)...(19): siRNA sense strand
aauggccgguaucauguua

SEQ ID NO: 2148521 - RNA, 19 nt, Homo sapiens
  misc_RNA (1)...(19): siRNA sense strand
agaaagaagaugcugagaa

SEQ ID NO: 2148522 - RNA, 19 nt, Homo sapiens
  misc_RNA (1)...(19): siRNA sense strand
guuuacagauuuccugauc

SEQ ID NO: 2148523 - RNA, 19 nt, Homo sapiens
  misc_RNA (1)...(19): siRNA sense strand
ucaaauguguucgagaaag

SEQ ID NO: 2148524 - RNA, 19 nt, Homo sapiens
  misc_RNA (1)...(19): siRNA sense strand
cugcaaagguggauaucau

SEQ ID NO: 2148525 - RNA, 19 nt, Homo sapiens
  misc_RNA (1)...(19): siRNA sense strand
ccaaaugcagaaagugauu

SEQ ID NO: 2148526 - RNA, 19 nt, Homo sapiens
  misc_RNA (1)...(19): siRNA sense strand
uaaaaccaauggccauauu

SEQ ID NO: 2148527 - RNA, 19 nt, Homo sapiens
  misc_RNA (1)...(19): siRNA sense strand
guggauagaaucaccuaaa

SEQ ID NO: 2148528 - RNA, 19 nt, Homo sapiens
  misc_RNA (1)...(19): siRNA sense strand
ggaaaagauuuguugcaau

SEQ ID NO: 2148529 - RNA, 19 nt, Homo sapiens
  misc_RNA (1)...(19): siRNA sense strand
guguguggaugaugcauau

SEQ ID NO: 2148530 - RNA, 19 nt, Homo sapiens
  misc_RNA (1)...(19): siRNA sense strand
gccaccaucuccucaagug

SEQ ID NO: 2148531 - RNA, 19 nt, Homo sapiens
  misc_RNA (1)...(19): siRNA sense strand
uuggagaccucuucaaugg

SEQ ID NO: 2148532 - RNA, 19 nt, Homo sapiens
  misc_RNA (1)...(19): siRNA sense strand
cgaaguacuuggccaccau

SEQ ID NO: 2148533 - RNA, 19 nt, Homo sapiens
  misc_RNA (1)...(19): siRNA sense strand
auccuugguugaauucuua

SEQ ID NO: 2148534 - RNA, 19 nt, Homo sapiens
  misc_RNA (1)...(19): siRNA sense strand
uuagaaaugguuccagaaa

SEQ ID NO: 2148535 - RNA, 19 nt, Homo sapiens
  misc_RNA (1)...(19): siRNA sense strand
gcggcucugugcuuucuga

SEQ ID NO: 2148536 - RNA, 19 nt, Homo sapiens
  misc_RNA (1)...(19): siRNA sense strand
aauggugaauugccaaaug

SEQ ID NO: 2148537 - RNA, 19 nt, Homo sapiens
  misc_RNA (1)...(19): siRNA sense strand
guacggcuccacagcagaa

SEQ ID NO: 2148538 - RNA, 19 nt, Homo sapiens
  misc_RNA (1)...(19): siRNA sense strand
ggaugaugcauaugugaga

SEQ ID NO: 2148539 - RNA, 19 nt, Homo sapiens
  misc_RNA (1)...(19): siRNA sense strand
guaagugcaagaucauuca

SEQ ID NO: 2148540 - RNA, 19 nt, Homo sapiens
  misc_RNA (1)...(19): siRNA sense strand
gggagauuauuuguuugaa

SEQ ID NO: 2148541 - RNA, 19 nt, Homo sapiens
  misc_RNA (1)...(19): siRNA sense strand
gggaaaagauuuguugcaa

SEQ ID NO: 2148542 - RNA, 19 nt, Homo sapiens
  misc_RNA (1)...(19): siRNA sense strand
uaucaaggccucccaguac

SEQ ID NO: 2148543 - RNA, 19 nt, Homo sapiens
  misc_RNA (1)...(19): siRNA sense strand
ccuggagccucuuugaugu

SEQ ID NO: 2148544 - RNA, 19 nt, Homo sapiens
  misc_RNA (1)...(19): siRNA sense strand
ggaccaggaagagaaagaa

SEQ ID NO: 2148545 - RNA, 19 nt, Homo sapiens
  misc_RNA (1)...(19): siRNA sense strand
gggcacuucucuacugucu

SEQ ID NO: 2148546 - RNA, 19 nt, Homo sapiens
  misc_RNA (1)...(19): siRNA sense strand
guacguugugugaagagua

SEQ ID NO: 2148547 - RNA, 19 nt, Homo sapiens
  misc_RNA (1)...(19): siRNA sense strand
ccaguacguugugugaaga

SEQ ID NO: 2148548 - RNA, 19 nt, Homo sapiens
  misc_RNA (1)...(19): siRNA sense strand
cugcauggucuucgaagua

SEQ ID NO: 2148549 - RNA, 19 nt, Homo sapiens
  misc_RNA (1)...(19): siRNA sense strand
uggcaacgggagauuauuu

SEQ ID NO: 2148550 - RNA, 19 nt, Homo sapiens
  misc_RNA (1)...(19): siRNA sense strand
agucacaguucccagaguu

SEQ ID NO: 2148551 - RNA, 19 nt, Homo sapiens
  misc_RNA (1)...(19): siRNA sense strand
gcagaaagugauuacacau

SEQ ID NO: 2148552 - RNA, 19 nt, Homo sapiens
  misc_RNA (1)...(19): siRNA sense strand
aagaggacccugcggacua

SEQ ID NO: 2148553 - RNA, 19 nt, Homo sapiens
  misc_RNA (1)...(19): siRNA sense strand
gcauaugugagaagaaugg

SEQ ID NO: 2148554 - RNA, 19 nt, Homo sapiens
  misc_RNA (1)...(19): siRNA sense strand
ccucuucaauggccgguau

SEQ ID NO: 2148555 - RNA, 19 nt, Homo sapiens
  misc_RNA (1)...(19): siRNA sense strand
gcaacgggagauuauuugu

SEQ ID NO: 2148556 - RNA, 19 nt, Homo sapiens
  misc_RNA (1)...(19): siRNA sense strand
gaaagaagaugcugagaaa

SEQ ID NO: 2148557 - RNA, 19 nt, Homo sapiens
  misc_RNA (1)...(19): siRNA sense strand
gaagaagacugcccaaauc

SEQ ID NO: 2148558 - RNA, 19 nt, Homo sapiens
  misc_RNA (1)...(19): siRNA sense strand
gcgagaagcugaaaggaaa

SEQ ID NO: 2148559 - RNA, 19 nt, Homo sapiens
  misc_RNA (1)...(19): siRNA sense strand
gcucaaauguguucgagaa

SEQ ID NO: 2148560 - RNA, 19 nt, Homo sapiens
  misc_RNA (1)...(19): siRNA sense strand
gcaagaucauucauacuga

SEQ ID NO: 2148561 - RNA, 19 nt, Homo sapiens
  misc_RNA (1)...(19): siRNA sense strand
ugaagaugcugcacaguuu

SEQ ID NO: 2148562 - RNA, 19 nt, Homo sapiens
  misc_RNA (1)...(19): siRNA sense strand
gaagaggcaggcugaguua

SEQ ID NO: 2148563 - RNA, 19 nt, Homo sapiens
  misc_RNA (1)...(19): siRNA sense strand
gaucauucauacugacaua

SEQ ID NO: 2148564 - RNA, 19 nt, Homo sapiens
  misc_RNA (1)...(19): siRNA sense strand
gcccagaggugaaacuaaa

SEQ ID NO: 2148565 - RNA, 19 nt, Homo sapiens
  misc_RNA (1)...(19): siRNA sense strand
gaaaagauuuguugcaaug

SEQ ID NO: 2148566 - RNA, 19 nt, Homo sapiens
  misc_RNA (1)...(19): siRNA sense strand
guuguucucuggauccuua

SEQ ID NO: 2148567 - RNA, 19 nt, Homo sapiens
  misc_RNA (1)...(19): siRNA sense strand
gcagaaaccuauaggaaaa

SEQ ID NO: 2148568 - RNA, 19 nt, Homo sapiens
  misc_RNA (1)...(19): siRNA sense strand
ucugagggaucaccacuua

SEQ ID NO: 2148569 - RNA, 19 nt, Homo sapiens
  misc_RNA (1)...(19): siRNA sense strand
ucaaguggaucaucaaauc

SEQ ID NO: 2148570 - RNA, 19 nt, Homo sapiens
  misc_RNA (1)...(19): siRNA sense strand
gaagaugcugcacaguuua

SEQ ID NO: 2148571 - RNA, 19 nt, Homo sapiens
  misc_RNA (1)...(19): siRNA sense strand
cgaugaagaugaugaugaa

SEQ ID NO: 2148572 - RNA, 19 nt, Homo sapiens
  misc_RNA (1)...(19): siRNA sense strand
ugaagaugaugaugaagaa

SEQ ID NO: 2148573 - RNA, 19 nt, Homo sapiens
  misc_RNA (1)...(19): siRNA sense strand
gacagaagcagaacgguuu

SEQ ID NO: 2148574 - RNA, 19 nt, Homo sapiens
  misc_RNA (1)...(19): siRNA sense strand
gaggcaggcugaguuauug

SEQ ID NO: 2148575 - RNA, 19 nt, Homo sapiens
  misc_RNA (1)...(19): siRNA sense strand
aacgggagauuauuuguuu

SEQ ID NO: 2148576 - RNA, 19 nt, Homo sapiens
  misc_RNA (1)...(19): siRNA sense strand
ggagacagccuuggaugaa

SEQ ID NO: 2148577 - RNA, 19 nt, Homo sapiens
  misc_RNA (1)...(19): siRNA sense strand
gagacagccuuggaugaaa

SEQ ID NO: 2148578 - RNA, 19 nt, Homo sapiens
  misc_RNA (1)...(19): siRNA sense strand
caaauguguucgagaaagu

SEQ ID NO: 2148579 - RNA, 19 nt, Homo sapiens
  misc_RNA (1)...(19): siRNA sense strand
cugcacaguuuacagauuu

SEQ ID NO: 2148580 - RNA, 19 nt, Homo sapiens
  misc_RNA (1)...(19): siRNA sense strand
gaucaucaaauccaacuau

SEQ ID NO: 2148581 - RNA, 19 nt, Homo sapiens
  misc_RNA (1)...(19): siRNA sense strand
cagaaagugauuacacaua

SEQ ID NO: 2148582 - RNA, 19 nt, Homo sapiens
  misc_RNA (1)...(19): siRNA sense strand
ggaauauaaucuugaugag

SEQ ID NO: 2148583 - RNA, 19 nt, Homo sapiens
  misc_RNA (1)...(19): siRNA sense strand
agaagaugcugagaaagaa

SEQ ID NO: 2148584 - RNA, 19 nt, Homo sapiens
  misc_RNA (1)...(19): siRNA sense strand
gagaaagugaucccaguga

SEQ ID NO: 2148585 - RNA, 19 nt, Homo sapiens
  misc_RNA (1)...(19): siRNA sense strand
agaugaagaugauguagau

SEQ ID NO: 2148586 - RNA, 19 nt, Homo sapiens
  misc_RNA (1)...(19): siRNA sense strand
cagcugcaccuuccaauga

SEQ ID NO: 2148587 - RNA, 19 nt, Homo sapiens
  misc_RNA (1)...(19): siRNA sense strand
cagcagaaaccuauaggaa

SEQ ID NO: 2148588 - RNA, 19 nt, Homo sapiens
  misc_RNA (1)...(19): siRNA sense strand
caucaaauccaacuaucaa

SEQ ID NO: 2148589 - RNA, 19 nt, Homo sapiens
  misc_RNA (1)...(19): siRNA sense strand
ggagaacugcgacacauca

SEQ ID NO: 2148590 - RNA, 19 nt, Homo sapiens
  misc_RNA (1)...(19): siRNA sense strand
gaggagaacugcgacacau

SEQ ID NO: 2148591 - RNA, 19 nt, Homo sapiens
  misc_RNA (1)...(19): siRNA sense strand
ccgggcagcugacuuguug

SEQ ID NO: 2148592 - RNA, 19 nt, Homo sapiens
  misc_RNA (1)...(19): siRNA sense strand
ugaagaagacugcccaaau

SEQ ID NO: 2148593 - RNA, 19 nt, Homo sapiens
  misc_RNA (1)...(19): siRNA sense strand
ucaggaacuugcgaacaua

SEQ ID NO: 2148594 - RNA, 19 nt, Homo sapiens
  misc_RNA (1)...(19): siRNA sense strand
cacaguaagugcaagauca

SEQ ID NO: 2148595 - RNA, 19 nt, Homo sapiens
  misc_RNA (1)...(19): siRNA sense strand
ccagugacccaaacaaaga

SEQ ID NO: 2148596 - RNA, 19 nt, Homo sapiens
  misc_RNA (1)...(19): siRNA sense strand
gcaacuggacgaugaagau

SEQ ID NO: 2148597 - RNA, 19 nt, Homo sapiens
  misc_RNA (1)...(19): siRNA sense strand
gacccuacguggauagaau

SEQ ID NO: 2148598 - RNA, 19 nt, Homo sapiens
  misc_RNA (1)...(19): siRNA sense strand
gccggagccucaacagaaa

SEQ ID NO: 2148599 - RNA, 19 nt, Homo sapiens
  misc_RNA (1)...(19): siRNA sense strand
gaagaugcugagaaagaaa

SEQ ID NO: 2148600 - RNA, 19 nt, Homo sapiens
  misc_RNA (1)...(19): siRNA sense strand
ucaaggguuagauuacuua

SEQ ID NO: 2148601 - RNA, 19 nt, Homo sapiens
  misc_RNA (1)...(19): siRNA sense strand
cagcuccuaugaacaauuc

SEQ ID NO: 2148602 - RNA, 19 nt, Homo sapiens
  misc_RNA (1)...(19): siRNA sense strand
caaaugcagaaagugauua

SEQ ID NO: 2148603 - RNA, 19 nt, Homo sapiens
  misc_RNA (1)...(19): siRNA sense strand
aagaagaugcugagaaaga

SEQ ID NO: 2148604 - RNA, 19 nt, Homo sapiens
  misc_RNA (1)...(19): siRNA sense strand
gaugaugcauaugugagaa

SEQ ID NO: 2148605 - RNA, 19 nt, Homo sapiens
  misc_RNA (1)...(19): siRNA sense strand
gcugcacaguuuacagauu

SEQ ID NO: 2148606 - RNA, 19 nt, Homo sapiens
  misc_RNA (1)...(19): siRNA sense strand
gagccucuuugauguacuu

SEQ ID NO: 2148607 - RNA, 19 nt, Homo sapiens
  misc_RNA (1)...(19): siRNA sense strand
cauagacccuacguggaua

SEQ ID NO: 2148608 - RNA, 19 nt, Homo sapiens
  misc_RNA (1)...(19): siRNA sense strand
ccaaauggacgacauaaaa

SEQ ID NO: 2148609 - RNA, 19 nt, Homo sapiens
  misc_RNA (1)...(19): siRNA sense strand
cggcauccuugguugaauu

SEQ ID NO: 2148610 - RNA, 19 nt, Homo sapiens
  misc_RNA (1)...(19): siRNA sense strand
ugcaggagauagaagaauu

SEQ ID NO: 2148611 - RNA, 19 nt, Homo sapiens
  misc_RNA (1)...(19): siRNA sense strand
ggagauuauuuguuugaac

SEQ ID NO: 2148612 - RNA, 19 nt, Homo sapiens
  misc_RNA (1)...(19): siRNA sense strand
cggcguguauggcauuuga

SEQ ID NO: 2148613 - RNA, 19 nt, Homo sapiens
  misc_RNA (1)...(19): siRNA sense strand
uagcagcuccuaugaacaa

SEQ ID NO: 2148614 - RNA, 19 nt, Homo sapiens
  misc_RNA (1)...(19): siRNA sense strand
gcaggagauagaagaauug

SEQ ID NO: 2148615 - RNA, 19 nt, Homo sapiens
  misc_RNA (1)...(19): siRNA sense strand
agacagccuuggaugaaau

SEQ ID NO: 2148616 - RNA, 19 nt, Homo sapiens
  misc_RNA (1)...(19): siRNA sense strand
caacgggagauuauuuguu

SEQ ID NO: 2148617 - RNA, 19 nt, Homo sapiens
  misc_RNA (1)...(19): siRNA sense strand
cagcugacuuguuggugaa

SEQ ID NO: 2148618 - RNA, 19 nt, Homo sapiens
  misc_RNA (1)...(19): siRNA sense strand
ccugaggaauauaaucuug

SEQ ID NO: 2148619 - RNA, 19 nt, Homo sapiens
  misc_RNA (1)...(19): siRNA sense strand
ugaccaggauggcgaauac

SEQ ID NO: 2148620 - RNA, 19 nt, Homo sapiens
  misc_RNA (1)...(19): siRNA sense strand
aauggccgguaucauguua

SEQ ID NO: 2148621 - RNA, 19 nt, Homo sapiens
  misc_RNA (1)...(19): siRNA sense strand
agaaagaagaugcugagaa

SEQ ID NO: 2148622 - RNA, 19 nt, Homo sapiens
  misc_RNA (1)...(19): siRNA sense strand
guuuacagauuuccugauc

SEQ ID NO: 2148623 - RNA, 19 nt, Homo sapiens
  misc_RNA (1)...(19): siRNA sense strand
ucaaauguguucgagaaag

SEQ ID NO: 2148624 - RNA, 19 nt, Homo sapiens
  misc_RNA (1)...(19): siRNA sense strand
cugcaaagguggauaucau

SEQ ID NO: 2148625 - RNA, 19 nt, Homo sapiens
  misc_RNA (1)...(19): siRNA sense strand
ccaaaugcagaaagugauu

SEQ ID NO: 2148626 - RNA, 19 nt, Homo sapiens
  misc_RNA (1)...(19): siRNA sense strand
uaaaaccaauggccauauu

SEQ ID NO: 2148627 - RNA, 19 nt, Homo sapiens
  misc_RNA (1)...(19): siRNA sense strand
guggauagaaucaccuaaa

SEQ ID NO: 2148628 - RNA, 19 nt, Homo sapiens
  misc_RNA (1)...(19): siRNA sense strand
ggaaaagauuuguugcaau

SEQ ID NO: 2148629 - RNA, 19 nt, Homo sapiens
  misc_RNA (1)...(19): siRNA sense strand
guguguggaugaugcauau

SEQ ID NO: 2148630 - RNA, 19 nt, Homo sapiens
  misc_RNA (1)...(19): siRNA sense strand
gccaccaucuccucaagug

SEQ ID NO: 2148631 - RNA, 19 nt, Homo sapiens
  misc_RNA (1)...(19): siRNA sense strand
uuggagaccucuucaaugg

SEQ ID NO: 2148632 - RNA, 19 nt, Homo sapiens
  misc_RNA (1)...(19): siRNA sense strand
cgaaguacuuggccaccau

SEQ ID NO: 2148633 - RNA, 19 nt, Homo sapiens
  misc_RNA (1)...(19): siRNA sense strand
auccuugguugaauucuua

SEQ ID NO: 2148634 - RNA, 19 nt, Homo sapiens
  misc_RNA (1)...(19): siRNA sense strand
uuagaaaugguuccagaaa

SEQ ID NO: 2148635 - RNA, 19 nt, Homo sapiens
  misc_RNA (1)...(19): siRNA sense strand
gcggcucugugcuuucuga

SEQ ID NO: 2148636 - RNA, 19 nt, Homo sapiens
  misc_RNA (1)...(19): siRNA sense strand
aauggugaauugccaaaug

SEQ ID NO: 2148637 - RNA, 19 nt, Homo sapiens
  misc_RNA (1)...(19): siRNA sense strand
guacggcuccacagcagaa

SEQ ID NO: 2148638 - RNA, 19 nt, Homo sapiens
  misc_RNA (1)...(19): siRNA sense strand
ggaugaugcauaugugaga

SEQ ID NO: 2148639 - RNA, 19 nt, Homo sapiens
  misc_RNA (1)...(19): siRNA sense strand
guaagugcaagaucauuca

SEQ ID NO: 2148640 - RNA, 19 nt, Homo sapiens
  misc_RNA (1)...(19): siRNA sense strand
gggagauuauuuguuugaa

SEQ ID NO: 2148641 - RNA, 19 nt, Homo sapiens
  misc_RNA (1)...(19): siRNA sense strand
gggaaaagauuuguugcaa

SEQ ID NO: 2148642 - RNA, 19 nt, Homo sapiens
  misc_RNA (1)...(19): siRNA sense strand
uaucaaggccucccaguac

SEQ ID NO: 2148643 - RNA, 19 nt, Homo sapiens
  misc_RNA (1)...(19): siRNA sense strand
ccuggagccucuuugaugu

SEQ ID NO: 2148644 - RNA, 19 nt, Homo sapiens
  misc_RNA (1)...(19): siRNA sense strand
ggaccaggaagagaaagaa

SEQ ID NO: 2148645 - RNA, 19 nt, Homo sapiens
  misc_RNA (1)...(19): siRNA sense strand
gggcacuucucuacugucu

SEQ ID NO: 2148646 - RNA, 19 nt, Homo sapiens
  misc_RNA (1)...(19): siRNA sense strand
guacguugugugaagagua

SEQ ID NO: 2148647 - RNA, 19 nt, Homo sapiens
  misc_RNA (1)...(19): siRNA sense strand
ccaguacguugugugaaga

SEQ ID NO: 2148648 - RNA, 19 nt, Homo sapiens
  misc_RNA (1)...(19): siRNA sense strand
cugcauggucuucgaagua

SEQ ID NO: 2148649 - RNA, 19 nt, Homo sapiens
  misc_RNA (1)...(19): siRNA sense strand
uggcaacgggagauuauuu

SEQ ID NO: 2148650 - RNA, 19 nt, Homo sapiens
  misc_RNA (1)...(19): siRNA sense strand
agucacaguucccagaguu

SEQ ID NO: 2148651 - RNA, 19 nt, Homo sapiens
  misc_RNA (1)...(19): siRNA sense strand
gcagaaagugauuacacau

SEQ ID NO: 2148652 - RNA, 19 nt, Homo sapiens
  misc_RNA (1)...(19): siRNA sense strand
aagaggacccugcggacua

SEQ ID NO: 2148653 - RNA, 19 nt, Homo sapiens
  misc_RNA (1)...(19): siRNA sense strand
gcauaugugagaagaaugg

SEQ ID NO: 2148654 - RNA, 19 nt, Homo sapiens
  misc_RNA (1)...(19): siRNA sense strand
ccucuucaauggccgguau

SEQ ID NO: 2148655 - RNA, 19 nt, Homo sapiens
  misc_RNA (1)...(19): siRNA sense strand
gcaacgggagauuauuugu

SEQ ID NO: 2148656 - RNA, 19 nt, Homo sapiens
  misc_RNA (1)...(19): siRNA sense strand
gaaagaagaugcugagaaa

SEQ ID NO: 2148657 - RNA, 19 nt, Homo sapiens
  misc_RNA (1)...(19): siRNA sense strand
gaagaagacugcccaaauc

SEQ ID NO: 2148658 - RNA, 19 nt, Homo sapiens
  misc_RNA (1)...(19): siRNA sense strand
gcgagaagcugaaaggaaa

SEQ ID NO: 2148659 - RNA, 19 nt, Homo sapiens
  misc_RNA (1)...(19): siRNA sense strand
gcucaaauguguucgagaa

SEQ ID NO: 2148660 - RNA, 19 nt, Homo sapiens
  misc_RNA (1)...(19): siRNA sense strand
gcaagaucauucauacuga

SEQ ID NO: 2148661 - RNA, 19 nt, Homo sapiens
  misc_RNA (1)...(19): siRNA sense strand
ugaagaugcugcacaguuu

SEQ ID NO: 2148662 - RNA, 19 nt, Homo sapiens
  misc_RNA (1)...(19): siRNA sense strand
gaagaggcaggcugaguua

SEQ ID NO: 2148663 - RNA, 19 nt, Homo sapiens
  misc_RNA (1)...(19): siRNA sense strand
gaucauucauacugacaua

SEQ ID NO: 2148664 - RNA, 19 nt, Homo sapiens
  misc_RNA (1)...(19): siRNA sense strand
gcccagaggugaaacuaaa

SEQ ID NO: 2148665 - RNA, 19 nt, Homo sapiens
  misc_RNA (1)...(19): siRNA sense strand
gaaaagauuuguugcaaug

SEQ ID NO: 2148666 - RNA, 19 nt, Homo sapiens
  misc_RNA (1)...(19): siRNA sense strand
guuguucucuggauccuua

SEQ ID NO: 2148667 - RNA, 19 nt, Homo sapiens
  misc_RNA (1)...(19): siRNA sense strand
gcagaaaccuauaggaaaa

SEQ ID NO: 2148668 - RNA, 19 nt, Homo sapiens
  misc_RNA (1)...(19): siRNA sense strand
ucugagggaucaccacuua

SEQ ID NO: 2148669 - RNA, 19 nt, Homo sapiens
  misc_RNA (1)...(19): siRNA sense strand
ucaaguggaucaucaaauc

SEQ ID NO: 2148670 - RNA, 19 nt, Homo sapiens
  misc_RNA (1)...(19): siRNA sense strand
gaagaugcugcacaguuua

SEQ ID NO: 2148671 - RNA, 19 nt, Homo sapiens
  misc_RNA (1)...(19): siRNA sense strand
cgaugaagaugaugaugaa

SEQ ID NO: 2148672 - RNA, 19 nt, Homo sapiens
  misc_RNA (1)...(19): siRNA sense strand
ugaagaugaugaugaagaa

SEQ ID NO: 2148673 - RNA, 19 nt, Homo sapiens
  misc_RNA (1)...(19): siRNA sense strand
gacagaagcagaacgguuu

SEQ ID NO: 2148674 - RNA, 19 nt, Homo sapiens
  misc_RNA (1)...(19): siRNA sense strand
gaggcaggcugaguuauug

SEQ ID NO: 2148675 - RNA, 19 nt, Homo sapiens
  misc_RNA (1)...(19): siRNA sense strand
aacgggagauuauuuguuu

SEQ ID NO: 2148676 - RNA, 19 nt, Homo sapiens
  misc_RNA (1)...(19): siRNA sense strand
ggagacagccuuggaugaa

SEQ ID NO: 2148677 - RNA, 19 nt, Homo sapiens
  misc_RNA (1)...(19): siRNA sense strand
gagacagccuuggaugaaa

SEQ ID NO: 2148678 - RNA, 19 nt, Homo sapiens
  misc_RNA (1)...(19): siRNA sense strand
caaauguguucgagaaagu

SEQ ID NO: 2148679 - RNA, 19 nt, Homo sapiens
  misc_RNA (1)...(19): siRNA sense strand
cugcacaguuuacagauuu

SEQ ID NO: 2148680 - RNA, 19 nt, Homo sapiens
  misc_RNA (1)...(19): siRNA sense strand
gaucaucaaauccaacuau

SEQ ID NO: 2148681 - RNA, 19 nt, Homo sapiens
  misc_RNA (1)...(19): siRNA sense strand
cagaaagugauuacacaua

SEQ ID NO: 2148682 - RNA, 19 nt, Homo sapiens
  misc_RNA (1)...(19): siRNA sense strand
ggaauauaaucuugaugag

SEQ ID NO: 2148683 - RNA, 19 nt, Homo sapiens
  misc_RNA (1)...(19): siRNA sense strand
agaagaugcugagaaagaa

SEQ ID NO: 2148684 - RNA, 19 nt, Homo sapiens
  misc_RNA (1)...(19): siRNA sense strand
gagaaagugaucccaguga

SEQ ID NO: 2148685 - RNA, 19 nt, Homo sapiens
  misc_RNA (1)...(19): siRNA sense strand
agaugaagaugauguagau

SEQ ID NO: 2148686 - RNA, 19 nt, Homo sapiens
  misc_RNA (1)...(19): siRNA sense strand
cagcugcaccuuccaauga

SEQ ID NO: 2148687 - RNA, 19 nt, Homo sapiens
  misc_RNA (1)...(19): siRNA sense strand
cagcagaaaccuauaggaa

SEQ ID NO: 2148688 - RNA, 19 nt, Homo sapiens
  misc_RNA (1)...(19): siRNA sense strand
caucaaauccaacuaucaa

SEQ ID NO: 2148689 - RNA, 19 nt, Homo sapiens
  misc_RNA (1)...(19): siRNA sense strand
ggagaacugcgacacauca

SEQ ID NO: 2148690 - RNA, 19 nt, Homo sapiens
  misc_RNA (1)...(19): siRNA sense strand
gaggagaacugcgacacau

SEQ ID NO: 2148691 - RNA, 19 nt, Homo sapiens
  misc_RNA (1)...(19): siRNA sense strand
ccgggcagcugacuuguug

SEQ ID NO: 2148692 - RNA, 19 nt, Homo sapiens
  misc_RNA (1)...(19): siRNA sense strand
ugaagaagacugcccaaau

SEQ ID NO: 2148693 - RNA, 19 nt, Homo sapiens
  misc_RNA (1)...(19): siRNA sense strand
ucaggaacuugcgaacaua

SEQ ID NO: 2148694 - RNA, 19 nt, Homo sapiens
  misc_RNA (1)...(19): siRNA sense strand
cacaguaagugcaagauca

SEQ ID NO: 2148695 - RNA, 19 nt, Homo sapiens
  misc_RNA (1)...(19): siRNA sense strand
ccagugacccaaacaaaga

SEQ ID NO: 2148696 - RNA, 19 nt, Homo sapiens
  misc_RNA (1)...(19): siRNA sense strand
gcaacuggacgaugaagau

SEQ ID NO: 2148697 - RNA, 19 nt, Homo sapiens
  misc_RNA (1)...(19): siRNA sense strand
gacccuacguggauagaau

SEQ ID NO: 2148698 - RNA, 19 nt, Homo sapiens
  misc_RNA (1)...(19): siRNA sense strand
gccggagccucaacagaaa

SEQ ID NO: 2148699 - RNA, 19 nt, Homo sapiens
  misc_RNA (1)...(19): siRNA sense strand
gaagaugcugagaaagaaa

SEQ ID NO: 2148700 - RNA, 19 nt, Homo sapiens
  misc_RNA (1)...(19): siRNA sense strand
ucaaggguuagauuacuua

SEQ ID NO: 2148701 - RNA, 19 nt, Homo sapiens
  misc_RNA (1)...(19): siRNA sense strand
cagcuccuaugaacaauuc

SEQ ID NO: 2148702 - RNA, 19 nt, Homo sapiens
  misc_RNA (1)...(19): siRNA sense strand
caaaugcagaaagugauua

SEQ ID NO: 2148703 - RNA, 19 nt, Homo sapiens
  misc_RNA (1)...(19): siRNA sense strand
aagaagaugcugagaaaga

SEQ ID NO: 2148704 - RNA, 19 nt, Homo sapiens
  misc_RNA (1)...(19): siRNA sense strand
gaugaugcauaugugagaa

SEQ ID NO: 2148705 - RNA, 19 nt, Homo sapiens
  misc_RNA (1)...(19): siRNA sense strand
gcugcacaguuuacagauu

SEQ ID NO: 2148706 - RNA, 19 nt, Homo sapiens
  misc_RNA (1)...(19): siRNA sense strand
gagccucuuugauguacuu

SEQ ID NO: 2148707 - RNA, 19 nt, Homo sapiens
  misc_RNA (1)...(19): siRNA sense strand
cauagacccuacguggaua

SEQ ID NO: 2148708 - RNA, 19 nt, Homo sapiens
  misc_RNA (1)...(19): siRNA sense strand
ccaaauggacgacauaaaa

SEQ ID NO: 2148709 - RNA, 19 nt, Homo sapiens
  misc_RNA (1)...(19): siRNA sense strand
cggcauccuugguugaauu

SEQ ID NO: 2148710 - RNA, 19 nt, Homo sapiens
  misc_RNA (1)...(19): siRNA sense strand
ugcaggagauagaagaauu

SEQ ID NO: 2148711 - RNA, 19 nt, Homo sapiens
  misc_RNA (1)...(19): siRNA sense strand
ggagauuauuuguuugaac

SEQ ID NO: 2148712 - RNA, 19 nt, Homo sapiens
  misc_RNA (1)...(19): siRNA sense strand
cggcguguauggcauuuga

SEQ ID NO: 2148713 - RNA, 19 nt, Homo sapiens
  misc_RNA (1)...(19): siRNA sense strand
uagcagcuccuaugaacaa

SEQ ID NO: 2148714 - RNA, 19 nt, Homo sapiens
  misc_RNA (1)...(19): siRNA sense strand
gcaggagauagaagaauug

SEQ ID NO: 2148715 - RNA, 19 nt, Homo sapiens
  misc_RNA (1)...(19): siRNA sense strand
agacagccuuggaugaaau

SEQ ID NO: 2148716 - RNA, 19 nt, Homo sapiens
  misc_RNA (1)...(19): siRNA sense strand
caacgggagauuauuuguu

SEQ ID NO: 2148717 - RNA, 19 nt, Homo sapiens
  misc_RNA (1)...(19): siRNA sense strand
cagcugacuuguuggugaa

SEQ ID NO: 2148718 - RNA, 19 nt, Homo sapiens
  misc_RNA (1)...(19): siRNA sense strand
ccugaggaauauaaucuug

SEQ ID NO: 2148719 - RNA, 19 nt, Homo sapiens
  misc_RNA (1)...(19): siRNA sense strand
ugaccaggauggcgaauac

SEQ ID NO: 2148720 - RNA, 19 nt, Homo sapiens
  misc_RNA (1)...(19): siRNA sense strand
aauggccgguaucauguua

SEQ ID NO: 2148721 - RNA, 19 nt, Homo sapiens
  misc_RNA (1)...(19): siRNA sense strand
agaaagaagaugcugagaa

SEQ ID NO: 2148722 - RNA, 19 nt, Homo sapiens
  misc_RNA (1)...(19): siRNA sense strand
guuuacagauuuccugauc

SEQ ID NO: 2148723 - RNA, 19 nt, Homo sapiens
  misc_RNA (1)...(19): siRNA sense strand
ucaaauguguucgagaaag

SEQ ID NO: 2148724 - RNA, 19 nt, Homo sapiens
  misc_RNA (1)...(19): siRNA sense strand
cugcaaagguggauaucau

SEQ ID NO: 2148725 - RNA, 19 nt, Homo sapiens
  misc_RNA (1)...(19): siRNA sense strand
ccaaaugcagaaagugauu

SEQ ID NO: 2148726 - RNA, 19 nt, Homo sapiens
  misc_RNA (1)...(19): siRNA sense strand
uaaaaccaauggccauauu

SEQ ID NO: 2148727 - RNA, 19 nt, Homo sapiens
  misc_RNA (1)...(19): siRNA sense strand
guggauagaaucaccuaaa

SEQ ID NO: 2148728 - RNA, 19 nt, Homo sapiens
  misc_RNA (1)...(19): siRNA sense strand
ggaaaagauuuguugcaau

SEQ ID NO: 2148729 - RNA, 19 nt, Homo sapiens
  misc_RNA (1)...(19): siRNA sense strand
guguguggaugaugcauau

SEQ ID NO: 2148730 - RNA, 19 nt, Homo sapiens
  misc_RNA (1)...(19): siRNA sense strand
gccaccaucuccucaagug

SEQ ID NO: 2148731 - RNA, 19 nt, Homo sapiens
  misc_RNA (1)...(19): siRNA sense strand
uuggagaccucuucaaugg

SEQ ID NO: 2148732 - RNA, 19 nt, Homo sapiens
  misc_RNA (1)...(19): siRNA sense strand
cgaaguacuuggccaccau

SEQ ID NO: 2148733 - RNA, 19 nt, Homo sapiens
  misc_RNA (1)...(19): siRNA sense strand
auccuugguugaauucuua

SEQ ID NO: 2148734 - RNA, 19 nt, Homo sapiens
  misc_RNA (1)...(19): siRNA sense strand
uuagaaaugguuccagaaa

SEQ ID NO: 2148735 - RNA, 19 nt, Homo sapiens
  misc_RNA (1)...(19): siRNA sense strand
gcggcucugugcuuucuga

SEQ ID NO: 2148736 - RNA, 19 nt, Homo sapiens
  misc_RNA (1)...(19): siRNA sense strand
aauggugaauugccaaaug

SEQ ID NO: 2148737 - RNA, 19 nt, Homo sapiens
  misc_RNA (1)...(19): siRNA sense strand
guacggcuccacagcagaa

SEQ ID NO: 2148738 - RNA, 19 nt, Homo sapiens
  misc_RNA (1)...(19): siRNA sense strand
ggaugaugcauaugugaga

SEQ ID NO: 2148739 - RNA, 19 nt, Homo sapiens
  misc_RNA (1)...(19): siRNA sense strand
guaagugcaagaucauuca

SEQ ID NO: 2148740 - RNA, 19 nt, Homo sapiens
  misc_RNA (1)...(19): siRNA sense strand
gggagauuauuuguuugaa

SEQ ID NO: 2148741 - RNA, 19 nt, Homo sapiens
  misc_RNA (1)...(19): siRNA sense strand
gggaaaagauuuguugcaa

SEQ ID NO: 2148742 - RNA, 19 nt, Homo sapiens
  misc_RNA (1)...(19): siRNA sense strand
uaucaaggccucccaguac

SEQ ID NO: 2148743 - RNA, 19 nt, Homo sapiens
  misc_RNA (1)...(19): siRNA sense strand
ccuggagccucuuugaugu

SEQ ID NO: 2148744 - RNA, 19 nt, Homo sapiens
  misc_RNA (1)...(19): siRNA sense strand
ggaccaggaagagaaagaa

SEQ ID NO: 2148745 - RNA, 19 nt, Homo sapiens
  misc_RNA (1)...(19): siRNA sense strand
gggcacuucucuacugucu

SEQ ID NO: 2148746 - RNA, 19 nt, Homo sapiens
  misc_RNA (1)...(19): siRNA sense strand
guacguugugugaagagua

SEQ ID NO: 2148747 - RNA, 19 nt, Homo sapiens
  misc_RNA (1)...(19): siRNA sense strand
ccaguacguugugugaaga

SEQ ID NO: 2148748 - RNA, 19 nt, Homo sapiens
  misc_RNA (1)...(19): siRNA sense strand
cugcauggucuucgaagua

SEQ ID NO: 2148749 - RNA, 19 nt, Homo sapiens
  misc_RNA (1)...(19): siRNA sense strand
uggcaacgggagauuauuu

SEQ ID NO: 2148750 - RNA, 19 nt, Homo sapiens
  misc_RNA (1)...(19): siRNA sense strand
agucacaguucccagaguu

SEQ ID NO: 2148751 - RNA, 19 nt, Homo sapiens
  misc_RNA (1)...(19): siRNA sense strand
gcagaaagugauuacacau

SEQ ID NO: 2148752 - RNA, 19 nt, Homo sapiens
  misc_RNA (1)...(19): siRNA sense strand
aagaggacccugcggacua

SEQ ID NO: 2148753 - RNA, 19 nt, Homo sapiens
  misc_RNA (1)...(19): siRNA sense strand
gcauaugugagaagaaugg

SEQ ID NO: 2148754 - RNA, 19 nt, Homo sapiens
  misc_RNA (1)...(19): siRNA sense strand
ccucuucaauggccgguau

SEQ ID NO: 2148755 - RNA, 19 nt, Homo sapiens
  misc_RNA (1)...(19): siRNA sense strand
gcaacgggagauuauuugu

SEQ ID NO: 2148756 - RNA, 19 nt, Homo sapiens
  misc_RNA (1)...(19): siRNA sense strand
gaaagaagaugcugagaaa

SEQ ID NO: 2148757 - RNA, 19 nt, Homo sapiens
  misc_RNA (1)...(19): siRNA sense strand
gaagaagacugcccaaauc

SEQ ID NO: 2148758 - RNA, 19 nt, Homo sapiens
  misc_RNA (1)...(19): siRNA sense strand
gcgagaagcugaaaggaaa

SEQ ID NO: 2148759 - RNA, 19 nt, Homo sapiens
  misc_RNA (1)...(19): siRNA sense strand
gcucaaauguguucgagaa

SEQ ID NO: 2148760 - RNA, 19 nt, Homo sapiens
  misc_RNA (1)...(19): siRNA sense strand
gcaagaucauucauacuga

SEQ ID NO: 2148761 - RNA, 19 nt, Homo sapiens
  misc_RNA (1)...(19): siRNA sense strand
ugaagaugcugcacaguuu

SEQ ID NO: 2148762 - RNA, 19 nt, Homo sapiens
  misc_RNA (1)...(19): siRNA sense strand
gaagaggcaggcugaguua

SEQ ID NO: 2148763 - RNA, 19 nt, Homo sapiens
  misc_RNA (1)...(19): siRNA sense strand
gaucauucauacugacaua

SEQ ID NO: 2148764 - RNA, 19 nt, Homo sapiens
  misc_RNA (1)...(19): siRNA sense strand
gcccagaggugaaacuaaa

SEQ ID NO: 2148765 - RNA, 19 nt, Homo sapiens
  misc_RNA (1)...(19): siRNA sense strand
gaaaagauuuguugcaaug

SEQ ID NO: 2148766 - RNA, 19 nt, Homo sapiens
  misc_RNA (1)...(19): siRNA sense strand
guuguucucuggauccuua

SEQ ID NO: 2148767 - RNA, 19 nt, Homo sapiens
  misc_RNA (1)...(19): siRNA sense strand
gcagaaaccuauaggaaaa

SEQ ID NO: 2148768 - RNA, 19 nt, Homo sapiens
  misc_RNA (1)...(19): siRNA sense strand
ucugagggaucaccacuua

SEQ ID NO: 2148769 - RNA, 19 nt, Homo sapiens
  misc_RNA (1)...(19): siRNA sense strand
ucaaguggaucaucaaauc

SEQ ID NO: 2148770 - RNA, 19 nt, Homo sapiens
  misc_RNA (1)...(19): siRNA sense strand
gaagaugcugcacaguuua

SEQ ID NO: 2148771 - RNA, 19 nt, Homo sapiens
  misc_RNA (1)...(19): siRNA sense strand
cgaugaagaugaugaugaa

SEQ ID NO: 2148772 - RNA, 19 nt, Homo sapiens
  misc_RNA (1)...(19): siRNA sense strand
ugaagaugaugaugaagaa

SEQ ID NO: 2148773 - RNA, 19 nt, Homo sapiens
  misc_RNA (1)...(19): siRNA sense strand
gacagaagcagaacgguuu

SEQ ID NO: 2148774 - RNA, 19 nt, Homo sapiens
  misc_RNA (1)...(19): siRNA sense strand
gaggcaggcugaguuauug

SEQ ID NO: 2148775 - RNA, 19 nt, Homo sapiens
  misc_RNA (1)...(19): siRNA sense strand
aacgggagauuauuuguuu

SEQ ID NO: 2148776 - RNA, 19 nt, Homo sapiens
  misc_RNA (1)...(19): siRNA sense strand
gagacagccuuggaugaaa

SEQ ID NO: 2148777 - RNA, 19 nt, Homo sapiens
  misc_RNA (1)...(19): siRNA sense strand
ggagacagccuuggaugaa

SEQ ID NO: 2148778 - RNA, 19 nt, Homo sapiens
  misc_RNA (1)...(19): siRNA sense strand
caaauguguucgagaaagu

SEQ ID NO: 2148779 - RNA, 19 nt, Homo sapiens
  misc_RNA (1)...(19): siRNA sense strand
cugcacaguuuacagauuu

SEQ ID NO: 2148780 - RNA, 19 nt, Homo sapiens
  misc_RNA (1)...(19): siRNA sense strand
gaucaucaaauccaacuau

SEQ ID NO: 2148781 - RNA, 19 nt, Homo sapiens
  misc_RNA (1)...(19): siRNA sense strand
cagaaagugauuacacaua

SEQ ID NO: 2148782 - RNA, 19 nt, Homo sapiens
  misc_RNA (1)...(19): siRNA sense strand
ggaauauaaucuugaugag

SEQ ID NO: 2148783 - RNA, 19 nt, Homo sapiens
  misc_RNA (1)...(19): siRNA sense strand
agaagaugcugagaaagaa

SEQ ID NO: 2148784 - RNA, 19 nt, Homo sapiens
  misc_RNA (1)...(19): siRNA sense strand
gagaaagugaucccaguga

SEQ ID NO: 2148785 - RNA, 19 nt, Homo sapiens
  misc_RNA (1)...(19): siRNA sense strand
agaugaagaugauguagau

SEQ ID NO: 2148786 - RNA, 19 nt, Homo sapiens
  misc_RNA (1)...(19): siRNA sense strand
cagcugcaccuuccaauga

SEQ ID NO: 2148787 - RNA, 19 nt, Homo sapiens
  misc_RNA (1)...(19): siRNA sense strand
cagcagaaaccuauaggaa

SEQ ID NO: 2148788 - RNA, 19 nt, Homo sapiens
  misc_RNA (1)...(19): siRNA sense strand
caucaaauccaacuaucaa

SEQ ID NO: 2148789 - RNA, 19 nt, Homo sapiens
  misc_RNA (1)...(19): siRNA sense strand
ggagaacugcgacacauca

SEQ ID NO: 2148790 - RNA, 19 nt, Homo sapiens
  misc_RNA (1)...(19): siRNA sense strand
gaggagaacugcgacacau

SEQ ID NO: 2148791 - RNA, 19 nt, Homo sapiens
  misc_RNA (1)...(19): siRNA sense strand
ccgggcagcugacuuguug

SEQ ID NO: 2148792 - RNA, 19 nt, Homo sapiens
  misc_RNA (1)...(19): siRNA sense strand
ugaagaagacugcccaaau

SEQ ID NO: 2148793 - RNA, 19 nt, Homo sapiens
  misc_RNA (1)...(19): siRNA sense strand
ucaggaacuugcgaacaua

SEQ ID NO: 2148794 - RNA, 19 nt, Homo sapiens
  misc_RNA (1)...(19): siRNA sense strand
cacaguaagugcaagauca

SEQ ID NO: 2148795 - RNA, 19 nt, Homo sapiens
  misc_RNA (1)...(19): siRNA sense strand
ccagugacccaaacaaaga

SEQ ID NO: 2148796 - RNA, 19 nt, Homo sapiens
  misc_RNA (1)...(19): siRNA sense strand
gcaacuggacgaugaagau

SEQ ID NO: 2148797 - RNA, 19 nt, Homo sapiens
  misc_RNA (1)...(19): siRNA sense strand
gacccuacguggauagaau

SEQ ID NO: 2148798 - RNA, 19 nt, Homo sapiens
  misc_RNA (1)...(19): siRNA sense strand
gaagaugcugagaaagaaa

SEQ ID NO: 2148799 - RNA, 19 nt, Homo sapiens
  misc_RNA (1)...(19): siRNA sense strand
ucaaggguuagauuacuua

SEQ ID NO: 2148800 - RNA, 19 nt, Homo sapiens
  misc_RNA (1)...(19): siRNA sense strand
cagcuccuaugaacaauuc

SEQ ID NO: 2148801 - RNA, 19 nt, Homo sapiens
  misc_RNA (1)...(19): siRNA sense strand
caaaugcagaaagugauua

SEQ ID NO: 2148802 - RNA, 19 nt, Homo sapiens
  misc_RNA (1)...(19): siRNA sense strand
aagaagaugcugagaaaga

SEQ ID NO: 2148803 - RNA, 19 nt, Homo sapiens
  misc_RNA (1)...(19): siRNA sense strand
gaugaugcauaugugagaa

SEQ ID NO: 2148804 - RNA, 19 nt, Homo sapiens
  misc_RNA (1)...(19): siRNA sense strand
gcugcacaguuuacagauu

SEQ ID NO: 2148805 - RNA, 19 nt, Homo sapiens
  misc_RNA (1)...(19): siRNA sense strand
gagccucuuugauguacuu

SEQ ID NO: 2148806 - RNA, 19 nt, Homo sapiens
  misc_RNA (1)...(19): siRNA sense strand
cauagacccuacguggaua

SEQ ID NO: 2148807 - RNA, 19 nt, Homo sapiens
  misc_RNA (1)...(19): siRNA sense strand
ccaaauggacgacauaaaa

SEQ ID NO: 2148808 - RNA, 19 nt, Homo sapiens
  misc_RNA (1)...(19): siRNA sense strand
cggcauccuugguugaauu

SEQ ID NO: 2148809 - RNA, 19 nt, Homo sapiens
  misc_RNA (1)...(19): siRNA sense strand
ugcaggagauagaagaauu

SEQ ID NO: 2148810 - RNA, 19 nt, Homo sapiens
  misc_RNA (1)...(19): siRNA sense strand
ggagauuauuuguuugaac

SEQ ID NO: 2148811 - RNA, 19 nt, Homo sapiens
  misc_RNA (1)...(19): siRNA sense strand
cggcguguauggcauuuga

SEQ ID NO: 2148812 - RNA, 19 nt, Homo sapiens
  misc_RNA (1)...(19): siRNA sense strand
uagcagcuccuaugaacaa

SEQ ID NO: 2148813 - RNA, 19 nt, Homo sapiens
  misc_RNA (1)...(19): siRNA sense strand
gcaggagauagaagaauug

SEQ ID NO: 2148814 - RNA, 19 nt, Homo sapiens
  misc_RNA (1)...(19): siRNA sense strand
ugaccaggauggcgaauac

SEQ ID NO: 2148815 - RNA, 19 nt, Homo sapiens
  misc_RNA (1)...(19): siRNA sense strand
agacagccuuggaugaaau

SEQ ID NO: 2148816 - RNA, 19 nt, Homo sapiens
  misc_RNA (1)...(19): siRNA sense strand
caacgggagauuauuuguu

SEQ ID NO: 2148817 - RNA, 19 nt, Homo sapiens
  misc_RNA (1)...(19): siRNA sense strand
cagcugacuuguuggugaa

SEQ ID NO: 2148818 - RNA, 19 nt, Homo sapiens
  misc_RNA (1)...(19): siRNA sense strand
ccugaggaauauaaucuug

SEQ ID NO: 2148819 - RNA, 19 nt, Homo sapiens
  misc_RNA (1)...(19): siRNA sense strand
agaaagaagaugcugagaa

SEQ ID NO: 2148820 - RNA, 19 nt, Homo sapiens
  misc_RNA (1)...(19): siRNA sense strand
guuuacagauuuccugauc

SEQ ID NO: 2148821 - RNA, 19 nt, Homo sapiens
  misc_RNA (1)...(19): siRNA sense strand
ucaaauguguucgagaaag

SEQ ID NO: 2148822 - RNA, 19 nt, Homo sapiens
  misc_RNA (1)...(19): siRNA sense strand
ggaaaagauuuguugcaau

SEQ ID NO: 2148823 - RNA, 19 nt, Homo sapiens
  misc_RNA (1)...(19): siRNA sense strand
ccaaaugcagaaagugauu

SEQ ID NO: 2148824 - RNA, 19 nt, Homo sapiens
  misc_RNA (1)...(19): siRNA sense strand
uaaaaccaauggccauauu

SEQ ID NO: 2148825 - RNA, 19 nt, Homo sapiens
  misc_RNA (1)...(19): siRNA sense strand
guggauagaaucaccuaaa

SEQ ID NO: 2148826 - RNA, 19 nt, Homo sapiens
  misc_RNA (1)...(19): siRNA sense strand
guguguggaugaugcauau

SEQ ID NO: 2148827 - RNA, 19 nt, Homo sapiens
  misc_RNA (1)...(19): siRNA sense strand
gccaccaucuccucaagug

SEQ ID NO: 2148828 - RNA, 19 nt, Homo sapiens
  misc_RNA (1)...(19): siRNA sense strand
ggaugaugcauaugugaga

SEQ ID NO: 2148829 - RNA, 19 nt, Homo sapiens
  misc_RNA (1)...(19): siRNA sense strand
auccuugguugaauucuua

SEQ ID NO: 2148830 - RNA, 19 nt, Homo sapiens
  misc_RNA (1)...(19): siRNA sense strand
uuagaaaugguuccagaaa

SEQ ID NO: 2148831 - RNA, 19 nt, Homo sapiens
  misc_RNA (1)...(19): siRNA sense strand
gcggcucugugcuuucuga

SEQ ID NO: 2148832 - RNA, 19 nt, Homo sapiens
  misc_RNA (1)...(19): siRNA sense strand
cgaaguacuuggccaccau

SEQ ID NO: 2148833 - RNA, 19 nt, Homo sapiens
  misc_RNA (1)...(19): siRNA sense strand
aauggugaauugccaaaug

SEQ ID NO: 2148834 - RNA, 19 nt, Homo sapiens
  misc_RNA (1)...(19): siRNA sense strand
guacggcuccacagcagaa

SEQ ID NO: 2148835 - RNA, 19 nt, Homo sapiens
  misc_RNA (1)...(19): siRNA sense strand
guaagugcaagaucauuca

SEQ ID NO: 2148836 - RNA, 19 nt, Homo sapiens
  misc_RNA (1)...(19): siRNA sense strand
gggagauuauuuguuugaa

SEQ ID NO: 2148837 - RNA, 19 nt, Homo sapiens
  misc_RNA (1)...(19): siRNA sense strand
gggaaaagauuuguugcaa

SEQ ID NO: 2148838 - RNA, 19 nt, Homo sapiens
  misc_RNA (1)...(19): siRNA sense strand
uaucaaggccucccaguac

SEQ ID NO: 2148839 - RNA, 19 nt, Homo sapiens
  misc_RNA (1)...(19): siRNA sense strand
ccuggagccucuuugaugu

SEQ ID NO: 2148840 - RNA, 19 nt, Homo sapiens
  misc_RNA (1)...(19): siRNA sense strand
ggaccaggaagagaaagaa

SEQ ID NO: 2148841 - RNA, 19 nt, Homo sapiens
  misc_RNA (1)...(19): siRNA sense strand
guacguugugugaagagua

SEQ ID NO: 2148842 - RNA, 19 nt, Homo sapiens
  misc_RNA (1)...(19): siRNA sense strand
ccaguacguugugugaaga

SEQ ID NO: 2148843 - RNA, 19 nt, Homo sapiens
  misc_RNA (1)...(19): siRNA sense strand
cugcauggucuucgaagua

SEQ ID NO: 2148844 - RNA, 19 nt, Homo sapiens
  misc_RNA (1)...(19): siRNA sense strand
uggcaacgggagauuauuu

SEQ ID NO: 2148845 - RNA, 19 nt, Homo sapiens
  misc_RNA (1)...(19): siRNA sense strand
agucacaguucccagaguu

SEQ ID NO: 2148846 - RNA, 19 nt, Homo sapiens
  misc_RNA (1)...(19): siRNA sense strand
gcagaaagugauuacacau

SEQ ID NO: 2148847 - RNA, 19 nt, Homo sapiens
  misc_RNA (1)...(19): siRNA sense strand
gcauaugugagaagaaugg

SEQ ID NO: 2148848 - RNA, 19 nt, Homo sapiens
  misc_RNA (1)...(19): siRNA sense strand
acauaaagccggaaaauau

SEQ ID NO: 2148849 - RNA, 19 nt, Homo sapiens
  misc_RNA (1)...(19): siRNA sense strand
gcaacgggagauuauuugu

SEQ ID NO: 2148850 - RNA, 19 nt, Homo sapiens
  misc_RNA (1)...(19): siRNA sense strand
ggacgaugaagaugaugau

SEQ ID NO: 2148851 - RNA, 19 nt, Homo sapiens
  misc_RNA (1)...(19): siRNA sense strand
gaagcugaaaggaaaauaa

SEQ ID NO: 2148852 - RNA, 19 nt, Homo sapiens
  misc_RNA (1)...(19): siRNA sense strand
agaagaggcaggcugaguu

SEQ ID NO: 2148853 - RNA, 19 nt, Homo sapiens
  misc_RNA (1)...(19): siRNA sense strand
ccucuuugauguacuugug

SEQ ID NO: 2148854 - RNA, 19 nt, Homo sapiens
  misc_RNA (1)...(19): siRNA sense strand
cauccuugguugaauucuu

SEQ ID NO: 2148855 - RNA, 19 nt, Homo sapiens
  misc_RNA (1)...(19): siRNA sense strand
gacagccuuggaugaaaua

SEQ ID NO: 2148856 - RNA, 19 nt, Homo sapiens
  misc_RNA (1)...(19): siRNA sense strand
gaaauagaguggugauuaa

SEQ ID NO: 2148857 - RNA, 19 nt, Homo sapiens
  misc_RNA (1)...(19): siRNA sense strand
gaugagagcuauaacuuaa

SEQ ID NO: 2148858 - RNA, 19 nt, Homo sapiens
  misc_RNA (1)...(19): siRNA sense strand
ggaaauagaguggugauua

SEQ ID NO: 2148859 - RNA, 19 nt, Homo sapiens
  misc_RNA (1)...(19): siRNA sense strand
gaauaacucuugugacaga

SEQ ID NO: 2148860 - RNA, 19 nt, Homo sapiens
  misc_RNA (1)...(19): siRNA sense strand
uaugagagcuuacauguau

SEQ ID NO: 2148861 - RNA, 19 nt, Homo sapiens
  misc_RNA (1)...(19): siRNA sense strand
ccaagaagauggaaauaga

SEQ ID NO: 2148862 - RNA, 19 nt, Homo sapiens
  misc_RNA (1)...(19): siRNA sense strand
uaagggaaaugucgucuuu

SEQ ID NO: 2148863 - RNA, 19 nt, Homo sapiens
  misc_RNA (1)...(19): siRNA sense strand
gacauugcauugccucuua

SEQ ID NO: 2148864 - RNA, 19 nt, Homo sapiens
  misc_RNA (1)...(19): siRNA sense strand
gaaaucaaggaguaucuua

SEQ ID NO: 2148865 - RNA, 19 nt, Homo sapiens
  misc_RNA (1)...(19): siRNA sense strand
gaaguacccuuggacauau

SEQ ID NO: 2148866 - RNA, 19 nt, Homo sapiens
  misc_RNA (1)...(19): siRNA sense strand
gaaaugucgucuuuggauu

SEQ ID NO: 2148867 - RNA, 19 nt, Homo sapiens
  misc_RNA (1)...(19): siRNA sense strand
uuauguggcuguuuacuua

SEQ ID NO: 2148868 - RNA, 19 nt, Homo sapiens
  misc_RNA (1)...(19): siRNA sense strand
cagaauagcugaggauuuc

SEQ ID NO: 2148869 - RNA, 19 nt, Homo sapiens
  misc_RNA (1)...(19): siRNA sense strand
gacaaacuauugccacauu

SEQ ID NO: 2148870 - RNA, 19 nt, Homo sapiens
  misc_RNA (1)...(19): siRNA sense strand
uuaagcaacucaggauuua

SEQ ID NO: 2148871 - RNA, 19 nt, Homo sapiens
  misc_RNA (1)...(19): siRNA sense strand
uaacauggacaaacuauug

SEQ ID NO: 2148872 - RNA, 19 nt, Homo sapiens
  misc_RNA (1)...(19): siRNA sense strand
gacaggaaauaaugaaaug

SEQ ID NO: 2148873 - RNA, 19 nt, Homo sapiens
  misc_RNA (1)...(19): siRNA sense strand
gaaguuuguguguauguua

SEQ ID NO: 2148874 - RNA, 19 nt, Homo sapiens
  misc_RNA (1)...(19): siRNA sense strand
gaacuccaaccuagaauau

SEQ ID NO: 2148875 - RNA, 19 nt, Homo sapiens
  misc_RNA (1)...(19): siRNA sense strand
gcagaacacuugcuuagac

SEQ ID NO: 2148876 - RNA, 19 nt, Homo sapiens
  misc_RNA (1)...(19): siRNA sense strand
uaaaggcuguggauagcua

SEQ ID NO: 2148877 - RNA, 19 nt, Homo sapiens
  misc_RNA (1)...(19): siRNA sense strand
uuacuuaccuggucauuuc

SEQ ID NO: 2148878 - RNA, 19 nt, Homo sapiens
  misc_RNA (1)...(19): siRNA sense strand
cugaagaaaucaaggagua

SEQ ID NO: 2148879 - RNA, 19 nt, Homo sapiens
  misc_RNA (1)...(19): siRNA sense strand
gaccugaucugccacaauc

SEQ ID NO: 2148880 - RNA, 19 nt, Homo sapiens
  misc_RNA (1)...(19): siRNA sense strand
guugaaauccacccuguua

SEQ ID NO: 2148881 - RNA, 19 nt, Homo sapiens
  misc_RNA (1)...(19): siRNA sense strand
acuauuauguggcuguuua

SEQ ID NO: 2148882 - RNA, 19 nt, Homo sapiens
  misc_RNA (1)...(19): siRNA sense strand
caaaucacauauucagugu

SEQ ID NO: 2148883 - RNA, 19 nt, Homo sapiens
  misc_RNA (1)...(19): siRNA sense strand
gcaagaccuucaccacuuc

SEQ ID NO: 2148884 - RNA, 19 nt, Homo sapiens
  misc_RNA (1)...(19): siRNA sense strand
ggcacaaccugaucucuga

SEQ ID NO: 2148885 - RNA, 19 nt, Homo sapiens
  misc_RNA (1)...(19): siRNA sense strand
ugaaggugcucagcuuuaa

SEQ ID NO: 2148886 - RNA, 19 nt, Homo sapiens
  misc_RNA (1)...(19): siRNA sense strand
caaguaacauggacaaacu

SEQ ID NO: 2148887 - RNA, 19 nt, Homo sapiens
  misc_RNA (1)...(19): siRNA sense strand
uggaauaacucuugugaca

SEQ ID NO: 2148888 - RNA, 19 nt, Homo sapiens
  misc_RNA (1)...(19): siRNA sense strand
gagcuucuauauaccuuug

SEQ ID NO: 2148889 - RNA, 19 nt, Homo sapiens
  misc_RNA (1)...(19): siRNA sense strand
ugaaguacccuuggacaua

SEQ ID NO: 2148890 - RNA, 19 nt, Homo sapiens
  misc_RNA (1)...(19): siRNA sense strand
ggaaaugucgucuuuggau

SEQ ID NO: 2148891 - RNA, 19 nt, Homo sapiens
  misc_RNA (1)...(19): siRNA sense strand
ugagagcuauaacuuaaug

SEQ ID NO: 2148892 - RNA, 19 nt, Homo sapiens
  misc_RNA (1)...(19): siRNA sense strand
ggacaaaucacauauucag

SEQ ID NO: 2148893 - RNA, 19 nt, Homo sapiens
  misc_RNA (1)...(19): siRNA sense strand
acaggaaguuuguguguau

SEQ ID NO: 2148894 - RNA, 19 nt, Homo sapiens
  misc_RNA (1)...(19): siRNA sense strand
aaccaucuguuacugauuu

SEQ ID NO: 2148895 - RNA, 19 nt, Homo sapiens
  misc_RNA (1)...(19): siRNA sense strand
cagccagucgucuuuauua

SEQ ID NO: 2148896 - RNA, 19 nt, Homo sapiens
  misc_RNA (1)...(19): siRNA sense strand
caacucaggauuuaaacuu

SEQ ID NO: 2148897 - RNA, 19 nt, Homo sapiens
  misc_RNA (1)...(19): siRNA sense strand
aaacgauuaugagagcuua

SEQ ID NO: 2148898 - RNA, 19 nt, Homo sapiens
  misc_RNA (1)...(19): siRNA sense strand
acauugaccugaagaaauc

SEQ ID NO: 2148899 - RNA, 19 nt, Homo sapiens
  misc_RNA (1)...(19): siRNA sense strand
gacagaagacauugcauug

SEQ ID NO: 2148900 - RNA, 19 nt, Homo sapiens
  misc_RNA (1)...(19): siRNA sense strand
ugagagcuuacauguauua

SEQ ID NO: 2148901 - RNA, 19 nt, Homo sapiens
  misc_RNA (1)...(19): siRNA sense strand
gaguguauauucagagaca

SEQ ID NO: 2148902 - RNA, 19 nt, Homo sapiens
  misc_RNA (1)...(19): siRNA sense strand
ggaaguuuguguguauguu

SEQ ID NO: 2148903 - RNA, 19 nt, Homo sapiens
  misc_RNA (1)...(19): siRNA sense strand
ggacacagcaagaccuuca

SEQ ID NO: 2148904 - RNA, 19 nt, Homo sapiens
  misc_RNA (1)...(19): siRNA sense strand
caguuucucuacccacaua

SEQ ID NO: 2148905 - RNA, 19 nt, Homo sapiens
  misc_RNA (1)...(19): siRNA sense strand
gguauuggauuguuguucu

SEQ ID NO: 2148906 - RNA, 19 nt, Homo sapiens
  misc_RNA (1)...(19): siRNA sense strand
gaaauccacccuguuaaca

SEQ ID NO: 2148907 - RNA, 19 nt, Homo sapiens
  misc_RNA (1)...(19): siRNA sense strand
gaucugccacaaucucuuu

SEQ ID NO: 2148908 - RNA, 19 nt, Homo sapiens
  misc_RNA (1)...(19): siRNA sense strand
ggauaugucagaacagaga

SEQ ID NO: 2148909 - RNA, 19 nt, Homo sapiens
  misc_RNA (1)...(19): siRNA sense strand
aaaugucgucuuuggauua

SEQ ID NO: 2148910 - RNA, 19 nt, Homo sapiens
  misc_RNA (1)...(19): siRNA sense strand
aagccacacuuccacuaua

SEQ ID NO: 2148911 - RNA, 19 nt, Homo sapiens
  misc_RNA (1)...(19): siRNA sense strand
ccuagaauauguuaaguac

SEQ ID NO: 2148912 - RNA, 19 nt, Homo sapiens
  misc_RNA (1)...(19): siRNA sense strand
gaacacuugcuuagacugu

SEQ ID NO: 2148913 - RNA, 19 nt, Homo sapiens
  misc_RNA (1)...(19): siRNA sense strand
ugaugagagcuauaacuua

SEQ ID NO: 2148914 - RNA, 19 nt, Homo sapiens
  misc_RNA (1)...(19): siRNA sense strand
ugacagaagacauugcauu

SEQ ID NO: 2148915 - RNA, 19 nt, Homo sapiens
  misc_RNA (1)...(19): siRNA sense strand
caacuuuggaugugauuau

SEQ ID NO: 2148916 - RNA, 19 nt, Homo sapiens
  misc_RNA (1)...(19): siRNA sense strand
ucauugcccuuuacaguca

SEQ ID NO: 2148917 - RNA, 19 nt, Homo sapiens
  misc_RNA (1)...(19): siRNA sense strand
ugucagaacagagauuaua

SEQ ID NO: 2148918 - RNA, 19 nt, Homo sapiens
  misc_RNA (1)...(19): siRNA sense strand
caaccuagaauauguuaag

SEQ ID NO: 2148919 - RNA, 19 nt, Homo sapiens
  misc_RNA (1)...(19): siRNA sense strand
gaacuucaaccaggaucaa

SEQ ID NO: 2148920 - RNA, 19 nt, Homo sapiens
  misc_RNA (1)...(19): siRNA sense strand
uuuaagggcuacugggaaa

SEQ ID NO: 2148921 - RNA, 19 nt, Homo sapiens
  misc_RNA (1)...(19): siRNA sense strand
gagaaccaucuguuacuga

SEQ ID NO: 2148922 - RNA, 19 nt, Homo sapiens
  misc_RNA (1)...(19): siRNA sense strand
ugacuuuguugguugaaau

SEQ ID NO: 2148923 - RNA, 19 nt, Homo sapiens
  misc_RNA (1)...(19): siRNA sense strand
gugcuugacuuuguugguu

SEQ ID NO: 2148924 - RNA, 19 nt, Homo sapiens
  misc_RNA (1)...(19): siRNA sense strand
caaggaguaucuuaaaaug

SEQ ID NO: 2148925 - RNA, 19 nt, Homo sapiens
  misc_RNA (1)...(19): siRNA sense strand
ccauucauuugaccucauu

SEQ ID NO: 2148926 - RNA, 19 nt, Homo sapiens
  misc_RNA (1)...(19): siRNA sense strand
gaagaaaucaaggaguauc

SEQ ID NO: 2148927 - RNA, 19 nt, Homo sapiens
  misc_RNA (1)...(19): siRNA sense strand
cagauuauucaguggauuu

SEQ ID NO: 2148928 - RNA, 19 nt, Homo sapiens
  misc_RNA (1)...(19): siRNA sense strand
caaguuuaguucagucuac

SEQ ID NO: 2148929 - RNA, 19 nt, Homo sapiens
  misc_RNA (1)...(19): siRNA sense strand
ugucgucuuuggauuauau

SEQ ID NO: 2148930 - RNA, 19 nt, Homo sapiens
  misc_RNA (1)...(19): siRNA sense strand
aagcaacucaggauuuaaa

SEQ ID NO: 2148931 - RNA, 19 nt, Homo sapiens
  misc_RNA (1)...(19): siRNA sense strand
cauaaaggacacagcaaga

SEQ ID NO: 2148932 - RNA, 19 nt, Homo sapiens
  misc_RNA (1)...(19): siRNA sense strand
gcuaccucauugcccuuua

SEQ ID NO: 2148933 - RNA, 19 nt, Homo sapiens
  misc_RNA (1)...(19): siRNA sense strand
agcaagaccuucaccacuu

SEQ ID NO: 2148934 - RNA, 19 nt, Homo sapiens
  misc_RNA (1)...(19): siRNA sense strand
agccacacuuccacuauaa

SEQ ID NO: 2148935 - RNA, 19 nt, Homo sapiens
  misc_RNA (1)...(19): siRNA sense strand
aauccacccuguuaacaau

SEQ ID NO: 2148936 - RNA, 19 nt, Homo sapiens
  misc_RNA (1)...(19): siRNA sense strand
ccaccuacuuaauguucaa

SEQ ID NO: 2148937 - RNA, 19 nt, Homo sapiens
  misc_RNA (1)...(19): siRNA sense strand
gcaaguuuaguucagucua

SEQ ID NO: 2148938 - RNA, 19 nt, Homo sapiens
  misc_RNA (1)...(19): siRNA sense strand
acuccaaccuagaauaugu

SEQ ID NO: 2148939 - RNA, 19 nt, Homo sapiens
  misc_RNA (1)...(19): siRNA sense strand
uuaugaaggugcucagcuu

SEQ ID NO: 2148940 - RNA, 19 nt, Homo sapiens
  misc_RNA (1)...(19): siRNA sense strand
ucacuuggaauacagaaau

SEQ ID NO: 2148941 - RNA, 19 nt, Homo sapiens
  misc_RNA (1)...(19): siRNA sense strand
acacuugcuuagacuguga

SEQ ID NO: 2148942 - RNA, 19 nt, Homo sapiens
  misc_RNA (1)...(19): siRNA sense strand
ccagucgucuuuauuacag

SEQ ID NO: 2148943 - RNA, 19 nt, Homo sapiens
  misc_RNA (1)...(19): siRNA sense strand
ggauuguuguucuggaaag

SEQ ID NO: 2148944 - RNA, 19 nt, Homo sapiens
  misc_RNA (1)...(19): siRNA sense strand
ugaacuccaaccuagaaua

SEQ ID NO: 2148945 - RNA, 19 nt, Homo sapiens
  misc_RNA (1)...(19): siRNA sense strand
gcucagccagucgucuuua

SEQ ID NO: 2148946 - RNA, 19 nt, Homo sapiens
  misc_RNA (1)...(19): siRNA sense strand
gcuguggauagcuauauuu

SEQ ID NO: 2148947 - RNA, 19 nt, Homo sapiens
  misc_RNA (1)...(19): siRNA sense strand
gagaguggcacaaccugau

SEQ ID NO: 2148948 - RNA, 19 nt, Homo sapiens
  misc_RNA (1)...(19): siRNA sense strand
uagcugaggauuucguuug

SEQ ID NO: 2148949 - RNA, 19 nt, Homo sapiens
  misc_RNA (1)...(19): siRNA sense strand
gaaccaucuguuacugauu

SEQ ID NO: 2148950 - RNA, 19 nt, Homo sapiens
  misc_RNA (1)...(19): siRNA sense strand
agaaccaucuguuacugau

SEQ ID NO: 2148951 - RNA, 19 nt, Homo sapiens
  misc_RNA (1)...(19): siRNA sense strand
ggcuguggauagcuauauu

SEQ ID NO: 2148952 - RNA, 19 nt, Homo sapiens
  misc_RNA (1)...(19): siRNA sense strand
ggggacaaaucacauauuc

SEQ ID NO: 2148953 - RNA, 19 nt, Homo sapiens
  misc_RNA (1)...(19): siRNA sense strand
ccaugucgcccaagaagau

SEQ ID NO: 2148954 - RNA, 19 nt, Homo sapiens
  misc_RNA (1)...(19): siRNA sense strand
ugaacaauuucguauccau

SEQ ID NO: 2148955 - RNA, 19 nt, Homo sapiens
  misc_RNA (1)...(19): siRNA sense strand
uugauaugcuaccucauug

SEQ ID NO: 2148956 - RNA, 19 nt, Homo sapiens
  misc_RNA (1)...(19): siRNA sense strand
ggaaagaggcccuauuaaa

SEQ ID NO: 2148957 - RNA, 19 nt, Homo sapiens
  misc_RNA (1)...(19): siRNA sense strand
ggaauucccuugacuucua

SEQ ID NO: 2148958 - RNA, 19 nt, Homo sapiens
  misc_RNA (1)...(19): siRNA sense strand
ggaggauccuuacgaguua

SEQ ID NO: 2148959 - RNA, 19 nt, Homo sapiens
  misc_RNA (1)...(19): siRNA sense strand
gaggaaagaggcccuauua

SEQ ID NO: 2148960 - RNA, 19 nt, Homo sapiens
  misc_RNA (1)...(19): siRNA sense strand
gauacuagcuacagacauu

SEQ ID NO: 2148961 - RNA, 19 nt, Homo sapiens
  misc_RNA (1)...(19): siRNA sense strand
gaaauuggagccuauauug

SEQ ID NO: 2148962 - RNA, 19 nt, Homo sapiens
  misc_RNA (1)...(19): siRNA sense strand
gaaagaggcccuauuaaag

SEQ ID NO: 2148963 - RNA, 19 nt, Homo sapiens
  misc_RNA (1)...(19): siRNA sense strand
caagauaaccucaaacuau

SEQ ID NO: 2148964 - RNA, 19 nt, Homo sapiens
  misc_RNA (1)...(19): siRNA sense strand
gagaauagguuuggaggaa

SEQ ID NO: 2148965 - RNA, 19 nt, Homo sapiens
  misc_RNA (1)...(19): siRNA sense strand
gcauuuagccuucaugaaa

SEQ ID NO: 2148966 - RNA, 19 nt, Homo sapiens
  misc_RNA (1)...(19): siRNA sense strand
gcacaggacugggcacauu

SEQ ID NO: 2148967 - RNA, 19 nt, Homo sapiens
  misc_RNA (1)...(19): siRNA sense strand
gcacaucucaccucgauaa

SEQ ID NO: 2148968 - RNA, 19 nt, Homo sapiens
  misc_RNA (1)...(19): siRNA sense strand
gaaguucagaguaucauua

SEQ ID NO: 2148969 - RNA, 19 nt, Homo sapiens
  misc_RNA (1)...(19): siRNA sense strand
ggagauugaugcuaagcua

SEQ ID NO: 2148970 - RNA, 19 nt, Homo sapiens
  misc_RNA (1)...(19): siRNA sense strand
gcucagcucugcaggauga

SEQ ID NO: 2148971 - RNA, 19 nt, Homo sapiens
  misc_RNA (1)...(19): siRNA sense strand
caacaucaagagcaaauua

SEQ ID NO: 2148972 - RNA, 19 nt, Homo sapiens
  misc_RNA (1)...(19): siRNA sense strand
guacaauaguuuagacuug

SEQ ID NO: 2148973 - RNA, 19 nt, Homo sapiens
  misc_RNA (1)...(19): siRNA sense strand
ggacagagagcuuagauca

SEQ ID NO: 2148974 - RNA, 19 nt, Homo sapiens
  misc_RNA (1)...(19): siRNA sense strand
uggaacagcucaagaagaa

SEQ ID NO: 2148975 - RNA, 19 nt, Homo sapiens
  misc_RNA (1)...(19): siRNA sense strand
gguaguaaguacaauaguu

SEQ ID NO: 2148976 - RNA, 19 nt, Homo sapiens
  misc_RNA (1)...(19): siRNA sense strand
caaaggaacagcggcauua

SEQ ID NO: 2148977 - RNA, 19 nt, Homo sapiens
  misc_RNA (1)...(19): siRNA sense strand
gcauuaagcaccgcauuua

SEQ ID NO: 2148978 - RNA, 19 nt, Homo sapiens
  misc_RNA (1)...(19): siRNA sense strand
acagagagcuugaucuugu

SEQ ID NO: 2148979 - RNA, 19 nt, Homo sapiens
  misc_RNA (1)...(19): siRNA sense strand
ucaguuaccuucacagaug

SEQ ID NO: 2148980 - RNA, 19 nt, Homo sapiens
  misc_RNA (1)...(19): siRNA sense strand
ugacauagcauucaucaug

SEQ ID NO: 2148981 - RNA, 19 nt, Homo sapiens
  misc_RNA (1)...(19): siRNA sense strand
ggagagaucaccaaaggaa

SEQ ID NO: 2148982 - RNA, 19 nt, Homo sapiens
  misc_RNA (1)...(19): siRNA sense strand
ggacauaguggagaaauug

SEQ ID NO: 2148983 - RNA, 19 nt, Homo sapiens
  misc_RNA (1)...(19): siRNA sense strand
gacuaaacauguccagaaa

SEQ ID NO: 2148984 - RNA, 19 nt, Homo sapiens
  misc_RNA (1)...(19): siRNA sense strand
gcaccuguuucuacggaua

SEQ ID NO: 2148985 - RNA, 19 nt, Homo sapiens
  misc_RNA (1)...(19): siRNA sense strand
ggacauagacagagagcuu

SEQ ID NO: 2148986 - RNA, 19 nt, Homo sapiens
  misc_RNA (1)...(19): siRNA sense strand
cagcagaacuccagaaggu

SEQ ID NO: 2148987 - RNA, 19 nt, Homo sapiens
  misc_RNA (1)...(19): siRNA sense strand
gaauucccuugacuucuaa

SEQ ID NO: 2148988 - RNA, 19 nt, Homo sapiens
  misc_RNA (1)...(19): siRNA sense strand
gauaagccauacaguagug

SEQ ID NO: 2148989 - RNA, 19 nt, Homo sapiens
  misc_RNA (1)...(19): siRNA sense strand
ggaacucaauccacauuca

SEQ ID NO: 2148990 - RNA, 19 nt, Homo sapiens
  misc_RNA (1)...(19): siRNA sense strand
ccaaacagaaucucaacua

SEQ ID NO: 2148991 - RNA, 19 nt, Homo sapiens
  misc_RNA (1)...(19): siRNA sense strand
gaacagacugaaagcauug

SEQ ID NO: 2148992 - RNA, 19 nt, Homo sapiens
  misc_RNA (1)...(19): siRNA sense strand
ggacugggcacauuaggaa

SEQ ID NO: 2148993 - RNA, 19 nt, Homo sapiens
  misc_RNA (1)...(19): siRNA sense strand
uugcuggucuuucucauua

SEQ ID NO: 2148994 - RNA, 19 nt, Homo sapiens
  misc_RNA (1)...(19): siRNA sense strand
caacagaagccacggcaaa

SEQ ID NO: 2148995 - RNA, 19 nt, Homo sapiens
  misc_RNA (1)...(19): siRNA sense strand
gagccuauauugccaagau

SEQ ID NO: 2148996 - RNA, 19 nt, Homo sapiens
  misc_RNA (1)...(19): siRNA sense strand
aaagccaucuguuaucaaa

SEQ ID NO: 2148997 - RNA, 19 nt, Homo sapiens
  misc_RNA (1)...(19): siRNA sense strand
gaucauggcaagucucauu

SEQ ID NO: 2148998 - RNA, 19 nt, Homo sapiens
  misc_RNA (1)...(19): siRNA sense strand
gcagaacuccagaagguuu

SEQ ID NO: 2148999 - RNA, 19 nt, Homo sapiens
  misc_RNA (1)...(19): siRNA sense strand
aacagaaucucaacuaguu

SEQ ID NO: 2149000 - RNA, 19 nt, Homo sapiens
  misc_RNA (1)...(19): siRNA sense strand
ggagguauugauugauuua

SEQ ID NO: 2149001 - RNA, 19 nt, Homo sapiens
  misc_RNA (1)...(19): siRNA sense strand
gagaaggacuaaacauguc

SEQ ID NO: 2149002 - RNA, 19 nt, Homo sapiens
  misc_RNA (1)...(19): siRNA sense strand
aaagaaaucccgggacaua

SEQ ID NO: 2149003 - RNA, 19 nt, Homo sapiens
  misc_RNA (1)...(19): siRNA sense strand
gagcaaauuauacagauga

SEQ ID NO: 2149004 - RNA, 19 nt, Homo sapiens
  misc_RNA (1)...(19): siRNA sense strand
caagcuauaugacuucuag

SEQ ID NO: 2149005 - RNA, 19 nt, Homo sapiens
  misc_RNA (1)...(19): siRNA sense strand
caaaagcagucaaagcaua

SEQ ID NO: 2149006 - RNA, 19 nt, Homo sapiens
  misc_RNA (1)...(19): siRNA sense strand
ccucuagauugcauaguua

SEQ ID NO: 2149007 - RNA, 19 nt, Homo sapiens
  misc_RNA (1)...(19): siRNA sense strand
gauguuuccuuuagucaug

SEQ ID NO: 2149008 - RNA, 19 nt, Homo sapiens
  misc_RNA (1)...(19): siRNA sense strand
ccaaagccaucuguuauca

SEQ ID NO: 2149009 - RNA, 19 nt, Homo sapiens
  misc_RNA (1)...(19): siRNA sense strand
ugaguggaaucaaacagua

SEQ ID NO: 2149010 - RNA, 19 nt, Homo sapiens
  misc_RNA (1)...(19): siRNA sense strand
caaaguagaggaagaauac

SEQ ID NO: 2149011 - RNA, 19 nt, Homo sapiens
  misc_RNA (1)...(19): siRNA sense strand
ccgaccaguuugccaauua

SEQ ID NO: 2149012 - RNA, 19 nt, Homo sapiens
  misc_RNA (1)...(19): siRNA sense strand
aaaaggagauugaugcuaa

SEQ ID NO: 2149013 - RNA, 19 nt, Homo sapiens
  misc_RNA (1)...(19): siRNA sense strand
caaacagaaucucaacuag

SEQ ID NO: 2149014 - RNA, 19 nt, Homo sapiens
  misc_RNA (1)...(19): siRNA sense strand
ggaauuaacaggaggaaag

SEQ ID NO: 2149015 - RNA, 19 nt, Homo sapiens
  misc_RNA (1)...(19): siRNA sense strand
aagauaaccucaaacuaug

SEQ ID NO: 2149016 - RNA, 19 nt, Homo sapiens
  misc_RNA (1)...(19): siRNA sense strand
ggagaaauucagcuucaaa

SEQ ID NO: 2149017 - RNA, 19 nt, Homo sapiens
  misc_RNA (1)...(19): siRNA sense strand
ucaauaugcuaucagauuc

SEQ ID NO: 2149018 - RNA, 19 nt, Homo sapiens
  misc_RNA (1)...(19): siRNA sense strand
gcagaaauauguguaagac

SEQ ID NO: 2149019 - RNA, 19 nt, Homo sapiens
  misc_RNA (1)...(19): siRNA sense strand
gaagcagaaauauguguaa

SEQ ID NO: 2149020 - RNA, 19 nt, Homo sapiens
  misc_RNA (1)...(19): siRNA sense strand
gaucacacaguuucaggua

SEQ ID NO: 2149021 - RNA, 19 nt, Homo sapiens
  misc_RNA (1)...(19): siRNA sense strand
ucaguagacucacacuuga

SEQ ID NO: 2149022 - RNA, 19 nt, Homo sapiens
  misc_RNA (1)...(19): siRNA sense strand
ggcaagcaguccaauauca

SEQ ID NO: 2149023 - RNA, 19 nt, Homo sapiens
  misc_RNA (1)...(19): siRNA sense strand
ccacaaacccaaacagaau

SEQ ID NO: 2149024 - RNA, 19 nt, Homo sapiens
  misc_RNA (1)...(19): siRNA sense strand
gaucuuggaaaucucauaa

SEQ ID NO: 2149025 - RNA, 19 nt, Homo sapiens
  misc_RNA (1)...(19): siRNA sense strand
gguugucucucauccaauu

SEQ ID NO: 2149026 - RNA, 19 nt, Homo sapiens
  misc_RNA (1)...(19): siRNA sense strand
gaacagacggggaagcuua

SEQ ID NO: 2149027 - RNA, 19 nt, Homo sapiens
  misc_RNA (1)...(19): siRNA sense strand
gcggauaagccauacagua

SEQ ID NO: 2149028 - RNA, 19 nt, Homo sapiens
  misc_RNA (1)...(19): siRNA sense strand
aaacaggaauuucguagag

SEQ ID NO: 2149029 - RNA, 19 nt, Homo sapiens
  misc_RNA (1)...(19): siRNA sense strand
gacaaguccuuacacacaa

SEQ ID NO: 2149030 - RNA, 19 nt, Homo sapiens
  misc_RNA (1)...(19): siRNA sense strand
gaauucagccaguuuauac

SEQ ID NO: 2149031 - RNA, 19 nt, Homo sapiens
  misc_RNA (1)...(19): siRNA sense strand
ggugguauccucucaaaga

SEQ ID NO: 2149032 - RNA, 19 nt, Homo sapiens
  misc_RNA (1)...(19): siRNA sense strand
ggcugaagcucuagauguu

SEQ ID NO: 2149033 - RNA, 19 nt, Homo sapiens
  misc_RNA (1)...(19): siRNA sense strand
gagcuuagaucaccuugcu

SEQ ID NO: 2149034 - RNA, 19 nt, Homo sapiens
  misc_RNA (1)...(19): siRNA sense strand
uaaagcuucugaaacauca

SEQ ID NO: 2149035 - RNA, 19 nt, Homo sapiens
  misc_RNA (1)...(19): siRNA sense strand
cucaagaagugacagauuu

SEQ ID NO: 2149036 - RNA, 19 nt, Homo sapiens
  misc_RNA (1)...(19): siRNA sense strand
gaauagguuuggaggaaag

SEQ ID NO: 2149037 - RNA, 19 nt, Homo sapiens
  misc_RNA (1)...(19): siRNA sense strand
gcaagucucauuccaguca

SEQ ID NO: 2149038 - RNA, 19 nt, Homo sapiens
  misc_RNA (1)...(19): siRNA sense strand
caaaggaucacacaguuuc

SEQ ID NO: 2149039 - RNA, 19 nt, Homo sapiens
  misc_RNA (1)...(19): siRNA sense strand
gaaguucagcaacacauga

SEQ ID NO: 2149040 - RNA, 19 nt, Homo sapiens
  misc_RNA (1)...(19): siRNA sense strand
gaggaagaauaccaauugu

SEQ ID NO: 2149041 - RNA, 19 nt, Homo sapiens
  misc_RNA (1)...(19): siRNA sense strand
gcagauauugaucaccaua

SEQ ID NO: 2149042 - RNA, 19 nt, Homo sapiens
  misc_RNA (1)...(19): siRNA sense strand
ggaagcagaaauaugugua

SEQ ID NO: 2149043 - RNA, 19 nt, Homo sapiens
  misc_RNA (1)...(19): siRNA sense strand
gaagaaguucagaguauca

SEQ ID NO: 2149044 - RNA, 19 nt, Homo sapiens
  misc_RNA (1)...(19): siRNA sense strand
ucacacaguuucagguaau

SEQ ID NO: 2149045 - RNA, 19 nt, Homo sapiens
  misc_RNA (1)...(19): siRNA sense strand
cagcagccauacuuuauca

SEQ ID NO: 2149046 - RNA, 19 nt, Homo sapiens
  misc_RNA (1)...(19): siRNA sense strand
aguuaaagcuucugaaaca

SEQ ID NO: 2149047 - RNA, 19 nt, Homo sapiens
  misc_RNA (1)...(19): siRNA sense strand
caggagaaauucagcuuca

SEQ ID NO: 2149048 - RNA, 19 nt, Homo sapiens
  misc_RNA (1)...(19): siRNA sense strand
gggagguauugauugauuu

SEQ ID NO: 2149049 - RNA, 19 nt, Homo sapiens
  misc_RNA (1)...(19): siRNA sense strand
gaaugcaagugcugaguac

SEQ ID NO: 2149050 - RNA, 19 nt, Homo sapiens
  misc_RNA (1)...(19): siRNA sense strand
gaagaagaaagcccacuca

SEQ ID NO: 2149051 - RNA, 19 nt, Homo sapiens
  misc_RNA (1)...(19): siRNA sense strand
auugagaaaucccauagua

SEQ ID NO: 2149052 - RNA, 19 nt, Homo sapiens
  misc_RNA (1)...(19): siRNA sense strand
agaacagacugaaagcauu

SEQ ID NO: 2149053 - RNA, 19 nt, Homo sapiens
  misc_RNA (1)...(19): siRNA sense strand
uggaagggaugcaaguauu

SEQ ID NO: 2149054 - RNA, 19 nt, Homo sapiens
  misc_RNA (1)...(19): siRNA sense strand
gguauccucucaaagaaca

SEQ ID NO: 2149055 - RNA, 19 nt, Homo sapiens
  misc_RNA (1)...(19): siRNA sense strand
uaucuucccugacccauca

SEQ ID NO: 2149056 - RNA, 19 nt, Homo sapiens
  misc_RNA (1)...(19): siRNA sense strand
gcacuuggcuuugaauaua

SEQ ID NO: 2149057 - RNA, 19 nt, Homo sapiens
  misc_RNA (1)...(19): siRNA sense strand
gaagauauguucccaguuc

SEQ ID NO: 2149058 - RNA, 19 nt, Homo sapiens
  misc_RNA (1)...(19): siRNA sense strand
gaauauaaaugguggaaug

SEQ ID NO: 2149059 - RNA, 19 nt, Homo sapiens
  misc_RNA (1)...(19): siRNA sense strand
gaaaggagccaaagaaugu

SEQ ID NO: 2149060 - RNA, 19 nt, Homo sapiens
  misc_RNA (1)...(19): siRNA sense strand
gaaaucaggcacaaacaua

SEQ ID NO: 2149061 - RNA, 19 nt, Homo sapiens
  misc_RNA (1)...(19): siRNA sense strand
gaaagacacagauaaugua

SEQ ID NO: 2149062 - RNA, 19 nt, Homo sapiens
  misc_RNA (1)...(19): siRNA sense strand
guacaaaugugguagaauc

SEQ ID NO: 2149063 - RNA, 19 nt, Homo sapiens
  misc_RNA (1)...(19): siRNA sense strand
caacaauuauuccuucuga

SEQ ID NO: 2149064 - RNA, 19 nt, Homo sapiens
  misc_RNA (1)...(19): siRNA sense strand
gcacaaacauacucuacug

SEQ ID NO: 2149065 - RNA, 19 nt, Homo sapiens
  misc_RNA (1)...(19): siRNA sense strand
uaaagacgacucucaauuu

SEQ ID NO: 2149066 - RNA, 19 nt, Homo sapiens
  misc_RNA (1)...(19): siRNA sense strand
gauaauagacgguucauca

SEQ ID NO: 2149067 - RNA, 19 nt, Homo sapiens
  misc_RNA (1)...(19): siRNA sense strand
gaaggaaagacacagauaa

SEQ ID NO: 2149068 - RNA, 19 nt, Homo sapiens
  misc_RNA (1)...(19): siRNA sense strand
ggaaagacacagauaaugu

SEQ ID NO: 2149069 - RNA, 19 nt, Homo sapiens
  misc_RNA (1)...(19): siRNA sense strand
guaugccagucaacaauua

SEQ ID NO: 2149070 - RNA, 19 nt, Homo sapiens
  misc_RNA (1)...(19): siRNA sense strand
ggaaggagaagauaaugaa

SEQ ID NO: 2149071 - RNA, 19 nt, Homo sapiens
  misc_RNA (1)...(19): siRNA sense strand
caaagaauguagaccaugu

SEQ ID NO: 2149072 - RNA, 19 nt, Homo sapiens
  misc_RNA (1)...(19): siRNA sense strand
caggaaaccuuguaugugu

SEQ ID NO: 2149073 - RNA, 19 nt, Homo sapiens
  misc_RNA (1)...(19): siRNA sense strand
caaagaggcuuguauucca

SEQ ID NO: 2149074 - RNA, 19 nt, Homo sapiens
  misc_RNA (1)...(19): siRNA sense strand
ggucaagccugugcuggua

SEQ ID NO: 2149075 - RNA, 19 nt, Homo sapiens
  misc_RNA (1)...(19): siRNA sense strand
ucacagaugcuauuagauu

SEQ ID NO: 2149076 - RNA, 19 nt, Homo sapiens
  misc_RNA (1)...(19): siRNA sense strand
guaaagacgacucucaauu

SEQ ID NO: 2149077 - RNA, 19 nt, Homo sapiens
  misc_RNA (1)...(19): siRNA sense strand
gcagacaguugugcuauca

SEQ ID NO: 2149078 - RNA, 19 nt, Homo sapiens
  misc_RNA (1)...(19): siRNA sense strand
gaacuaaucagggucaaga

SEQ ID NO: 2149079 - RNA, 19 nt, Homo sapiens
  misc_RNA (1)...(19): siRNA sense strand
ucaaugacauggugaagau

SEQ ID NO: 2149080 - RNA, 19 nt, Homo sapiens
  misc_RNA (1)...(19): siRNA sense strand
agacacagauaauguacaa

SEQ ID NO: 2149081 - RNA, 19 nt, Homo sapiens
  misc_RNA (1)...(19): siRNA sense strand
caagagaggauuucaggaa

SEQ ID NO: 2149082 - RNA, 19 nt, Homo sapiens
  misc_RNA (1)...(19): siRNA sense strand
gagcaggagugauuucagu

SEQ ID NO: 2149083 - RNA, 19 nt, Homo sapiens
  misc_RNA (1)...(19): siRNA sense strand
ggagguggcuggagaucau

SEQ ID NO: 2149084 - RNA, 19 nt, Homo sapiens
  misc_RNA (1)...(19): siRNA sense strand
gaacuaggaagaauaacau

SEQ ID NO: 2149085 - RNA, 19 nt, Homo sapiens
  misc_RNA (1)...(19): siRNA sense strand
aagaggaaguuguauauuc

SEQ ID NO: 2149086 - RNA, 19 nt, Homo sapiens
  misc_RNA (1)...(19): siRNA sense strand
gaggaaggauccagugagu

SEQ ID NO: 2149087 - RNA, 19 nt, Homo sapiens
  misc_RNA (1)...(19): siRNA sense strand
aaacaagcuuacacccaua

SEQ ID NO: 2149088 - RNA, 19 nt, Homo sapiens
  misc_RNA (1)...(19): siRNA sense strand
ggaaggauccagugagugu

SEQ ID NO: 2149089 - RNA, 19 nt, Homo sapiens
  misc_RNA (1)...(19): siRNA sense strand
ggucagaugauuacacaaa

SEQ ID NO: 2149090 - RNA, 19 nt, Homo sapiens
  misc_RNA (1)...(19): siRNA sense strand
caauaaacagucacuacua

SEQ ID NO: 2149091 - RNA, 19 nt, Homo sapiens
  misc_RNA (1)...(19): siRNA sense strand
ccgaucaacugcugugaaa

SEQ ID NO: 2149092 - RNA, 19 nt, Homo sapiens
  misc_RNA (1)...(19): siRNA sense strand
gagguucugacaaugauua

SEQ ID NO: 2149093 - RNA, 19 nt, Homo sapiens
  misc_RNA (1)...(19): siRNA sense strand
gaagaaggaaagacacaga

SEQ ID NO: 2149094 - RNA, 19 nt, Homo sapiens
  misc_RNA (1)...(19): siRNA sense strand
ggaauuucuuugccugaga

SEQ ID NO: 2149095 - RNA, 19 nt, Homo sapiens
  misc_RNA (1)...(19): siRNA sense strand
aaagugcgauggaaugaau

SEQ ID NO: 2149096 - RNA, 19 nt, Homo sapiens
  misc_RNA (1)...(19): siRNA sense strand
ucucacagaugcuauuaga

SEQ ID NO: 2149097 - RNA, 19 nt, Homo sapiens
  misc_RNA (1)...(19): siRNA sense strand
ugacaaugauuaccugauc

SEQ ID NO: 2149098 - RNA, 19 nt, Homo sapiens
  misc_RNA (1)...(19): siRNA sense strand
aaaaugagguguaauccua

SEQ ID NO: 2149099 - RNA, 19 nt, Homo sapiens
  misc_RNA (1)...(19): siRNA sense strand
gccacuacauugagaaaga

SEQ ID NO: 2149100 - RNA, 19 nt, Homo sapiens
  misc_RNA (1)...(19): siRNA sense strand
gguguaauccuacuaaauc

SEQ ID NO: 2149101 - RNA, 19 nt, Homo sapiens
  misc_RNA (1)...(19): siRNA sense strand
gaagaggaaguuguauauu

SEQ ID NO: 2149102 - RNA, 19 nt, Homo sapiens
  misc_RNA (1)...(19): siRNA sense strand
gcucugaccugcuacuucu

SEQ ID NO: 2149103 - RNA, 19 nt, Homo sapiens
  misc_RNA (1)...(19): siRNA sense strand
gaagcuugcccucugugua

SEQ ID NO: 2149104 - RNA, 19 nt, Homo sapiens
  misc_RNA (1)...(19): siRNA sense strand
gaacuacaggcauccuuau

SEQ ID NO: 2149105 - RNA, 19 nt, Homo sapiens
  misc_RNA (1)...(19): siRNA sense strand
ugagaaaggagccaaagaa

SEQ ID NO: 2149106 - RNA, 19 nt, Homo sapiens
  misc_RNA (1)...(19): siRNA sense strand
uaaugaagaggaaguugua

SEQ ID NO: 2149107 - RNA, 19 nt, Homo sapiens
  misc_RNA (1)...(19): siRNA sense strand
aaucagaguuugcacuaug

SEQ ID NO: 2149108 - RNA, 19 nt, Homo sapiens
  misc_RNA (1)...(19): siRNA sense strand
ggaagaauaacauuugucu

SEQ ID NO: 2149109 - RNA, 19 nt, Homo sapiens
  misc_RNA (1)...(19): siRNA sense strand
gagaaaggagccaaagaau

SEQ ID NO: 2149110 - RNA, 19 nt, Homo sapiens
  misc_RNA (1)...(19): siRNA sense strand
gaauguauaagguguaaag

SEQ ID NO: 2149111 - RNA, 19 nt, Homo sapiens
  misc_RNA (1)...(19): siRNA sense strand
ugaagaggaaguuguauau

SEQ ID NO: 2149112 - RNA, 19 nt, Homo sapiens
  misc_RNA (1)...(19): siRNA sense strand
ccaacaauauaacagacuu

SEQ ID NO: 2149113 - RNA, 19 nt, Homo sapiens
  misc_RNA (1)...(19): siRNA sense strand
aauagacgguucaucaaug

SEQ ID NO: 2149114 - RNA, 19 nt, Homo sapiens
  misc_RNA (1)...(19): siRNA sense strand
gccaaagaauguauaaggu

SEQ ID NO: 2149115 - RNA, 19 nt, Homo sapiens
  misc_RNA (1)...(19): siRNA sense strand
aauaaacagucacuacuag

SEQ ID NO: 2149116 - RNA, 19 nt, Homo sapiens
  misc_RNA (1)...(19): siRNA sense strand
ugagggagccugcaagaga

SEQ ID NO: 2149117 - RNA, 19 nt, Homo sapiens
  misc_RNA (1)...(19): siRNA sense strand
gagguguaauccuacuaaa

SEQ ID NO: 2149118 - RNA, 19 nt, Homo sapiens
  misc_RNA (1)...(19): siRNA sense strand
cuaaucagggucaagauaa

SEQ ID NO: 2149119 - RNA, 19 nt, Homo sapiens
  misc_RNA (1)...(19): siRNA sense strand
cacagaugcuauuagauug

SEQ ID NO: 2149120 - RNA, 19 nt, Homo sapiens
  misc_RNA (1)...(19): siRNA sense strand
gauaauguacaaguggaua

SEQ ID NO: 2149121 - RNA, 19 nt, Homo sapiens
  misc_RNA (1)...(19): siRNA sense strand
ccacuacauugagaaagaa

SEQ ID NO: 2149122 - RNA, 19 nt, Homo sapiens
  misc_RNA (1)...(19): siRNA sense strand
caugguggauauuaauaga

SEQ ID NO: 2149123 - RNA, 19 nt, Homo sapiens
  misc_RNA (1)...(19): siRNA sense strand
acaccuaccuguccauaca

SEQ ID NO: 2149124 - RNA, 19 nt, Homo sapiens
  misc_RNA (1)...(19): siRNA sense strand
uaaugacgacuaacucaaa

SEQ ID NO: 2149125 - RNA, 19 nt, Homo sapiens
  misc_RNA (1)...(19): siRNA sense strand
uaccagaugugcauuucuu

SEQ ID NO: 2149126 - RNA, 19 nt, Homo sapiens
  misc_RNA (1)...(19): siRNA sense strand
aaagacgacucucaauuuu

SEQ ID NO: 2149127 - RNA, 19 nt, Homo sapiens
  misc_RNA (1)...(19): siRNA sense strand
ccaaauaccagaugugcau

SEQ ID NO: 2149128 - RNA, 19 nt, Homo sapiens
  misc_RNA (1)...(19): siRNA sense strand
ucauaggagucacaguuga

SEQ ID NO: 2149129 - RNA, 19 nt, Homo sapiens
  misc_RNA (1)...(19): siRNA sense strand
gaguuugcacuaugacuuu

SEQ ID NO: 2149130 - RNA, 19 nt, Homo sapiens
  misc_RNA (1)...(19): siRNA sense strand
cuaggaagaauaacauuug

SEQ ID NO: 2149131 - RNA, 19 nt, Homo sapiens
  misc_RNA (1)...(19): siRNA sense strand
ccagauccauacuccaugu

SEQ ID NO: 2149132 - RNA, 19 nt, Homo sapiens
  misc_RNA (1)...(19): siRNA sense strand
ggagccaaagaauguauaa

SEQ ID NO: 2149133 - RNA, 19 nt, Homo sapiens
  misc_RNA (1)...(19): siRNA sense strand
agacaguugugcuaucaug

SEQ ID NO: 2149134 - RNA, 19 nt, Homo sapiens
  misc_RNA (1)...(19): siRNA sense strand
caacaucuuguauuaaugg

SEQ ID NO: 2149135 - RNA, 19 nt, Homo sapiens
  misc_RNA (1)...(19): siRNA sense strand
gagcagccuuaucaucaca

SEQ ID NO: 2149136 - RNA, 19 nt, Homo sapiens
  misc_RNA (1)...(19): siRNA sense strand
guaccaacaauauaacaga

SEQ ID NO: 2149137 - RNA, 19 nt, Homo sapiens
  misc_RNA (1)...(19): siRNA sense strand
guccauacaucaggucuau

SEQ ID NO: 2149138 - RNA, 19 nt, Homo sapiens
  misc_RNA (1)...(19): siRNA sense strand
uaaucagggucaagauaau

SEQ ID NO: 2149139 - RNA, 19 nt, Homo sapiens
  misc_RNA (1)...(19): siRNA sense strand
aacaauggaucaucuucuu

SEQ ID NO: 2149140 - RNA, 19 nt, Homo sapiens
  misc_RNA (1)...(19): siRNA sense strand
agaagauaaugaagaggaa

SEQ ID NO: 2149141 - RNA, 19 nt, Homo sapiens
  misc_RNA (1)...(19): siRNA sense strand
gaagaagauggcucucugu

SEQ ID NO: 2149142 - RNA, 19 nt, Homo sapiens
  misc_RNA (1)...(19): siRNA sense strand
agaaggaaagacacagaua

SEQ ID NO: 2149143 - RNA, 19 nt, Homo sapiens
  misc_RNA (1)...(19): siRNA sense strand
gcaaagaggcuuguauucc

SEQ ID NO: 2149144 - RNA, 19 nt, Homo sapiens
  misc_RNA (1)...(19): siRNA sense strand
ggugaagauuuauucuauc

SEQ ID NO: 2149145 - RNA, 19 nt, Homo sapiens
  misc_RNA (1)...(19): siRNA sense strand
ucaagccugugcugguaaa

SEQ ID NO: 2149146 - RNA, 19 nt, Homo sapiens
  misc_RNA (1)...(19): siRNA sense strand
ggauuuaaaccaccaacau

SEQ ID NO: 2149147 - RNA, 19 nt, Homo sapiens
  misc_RNA (1)...(19): siRNA sense strand
gaucuuaaacuugcauauc

SEQ ID NO: 2149148 - RNA, 19 nt, Homo sapiens
  misc_RNA (1)...(19): siRNA sense strand
gauggaaccaaagaaugua

SEQ ID NO: 2149149 - RNA, 19 nt, Homo sapiens
  misc_RNA (1)...(19): siRNA sense strand
gugaaacgguugacuuuug

SEQ ID NO: 2149150 - RNA, 19 nt, Homo sapiens
  misc_RNA (1)...(19): siRNA sense strand
cacuuggcuuugaauauaa

SEQ ID NO: 2149151 - RNA, 19 nt, Homo sapiens
  misc_RNA (1)...(19): siRNA sense strand
ccaggccacuacauugaga

SEQ ID NO: 2149152 - RNA, 19 nt, Homo sapiens
  misc_RNA (1)...(19): siRNA sense strand
uaaacagucacuacuagga

SEQ ID NO: 2149153 - RNA, 19 nt, Homo sapiens
  misc_RNA (1)...(19): siRNA sense strand
agaacuacaggcauccuua

SEQ ID NO: 2149154 - RNA, 19 nt, Homo sapiens
  misc_RNA (1)...(19): siRNA sense strand
auacucuacuggagaacua

SEQ ID NO: 2149155 - RNA, 19 nt, Homo sapiens
  misc_RNA (1)...(19): siRNA sense strand
guacggagcaugacuucca

SEQ ID NO: 2149156 - RNA, 19 nt, Homo sapiens
  misc_RNA (1)...(19): siRNA sense strand
gcacuuggcuuugaauaua

SEQ ID NO: 2149157 - RNA, 19 nt, Homo sapiens
  misc_RNA (1)...(19): siRNA sense strand
gaagauauguucccaguuc

SEQ ID NO: 2149158 - RNA, 19 nt, Homo sapiens
  misc_RNA (1)...(19): siRNA sense strand
gaauauaaaugguggaaug

SEQ ID NO: 2149159 - RNA, 19 nt, Homo sapiens
  misc_RNA (1)...(19): siRNA sense strand
gaaaggagccaaagaaugu

SEQ ID NO: 2149160 - RNA, 19 nt, Homo sapiens
  misc_RNA (1)...(19): siRNA sense strand
gaaaucaggcacaaacaua

SEQ ID NO: 2149161 - RNA, 19 nt, Homo sapiens
  misc_RNA (1)...(19): siRNA sense strand
gaaagacacagauaaugua

SEQ ID NO: 2149162 - RNA, 19 nt, Homo sapiens
  misc_RNA (1)...(19): siRNA sense strand
guacaaaugugguagaauc

SEQ ID NO: 2149163 - RNA, 19 nt, Homo sapiens
  misc_RNA (1)...(19): siRNA sense strand
caacaauuauuccuucuga

SEQ ID NO: 2149164 - RNA, 19 nt, Homo sapiens
  misc_RNA (1)...(19): siRNA sense strand
gcacaaacauacucuacug

SEQ ID NO: 2149165 - RNA, 19 nt, Homo sapiens
  misc_RNA (1)...(19): siRNA sense strand
uaaagacgacucucaauuu

SEQ ID NO: 2149166 - RNA, 19 nt, Homo sapiens
  misc_RNA (1)...(19): siRNA sense strand
gauaauagacgguucauca

SEQ ID NO: 2149167 - RNA, 19 nt, Homo sapiens
  misc_RNA (1)...(19): siRNA sense strand
gaaggaaagacacagauaa

SEQ ID NO: 2149168 - RNA, 19 nt, Homo sapiens
  misc_RNA (1)...(19): siRNA sense strand
ggaaagacacagauaaugu

SEQ ID NO: 2149169 - RNA, 19 nt, Homo sapiens
  misc_RNA (1)...(19): siRNA sense strand
guaugccagucaacaauua

SEQ ID NO: 2149170 - RNA, 19 nt, Homo sapiens
  misc_RNA (1)...(19): siRNA sense strand
ggaaggagaagauaaugaa

SEQ ID NO: 2149171 - RNA, 19 nt, Homo sapiens
  misc_RNA (1)...(19): siRNA sense strand
caaagaauguagaccaugu

SEQ ID NO: 2149172 - RNA, 19 nt, Homo sapiens
  misc_RNA (1)...(19): siRNA sense strand
caggaaaccuuguaugugu

SEQ ID NO: 2149173 - RNA, 19 nt, Homo sapiens
  misc_RNA (1)...(19): siRNA sense strand
caaagaggcuuguauucca

SEQ ID NO: 2149174 - RNA, 19 nt, Homo sapiens
  misc_RNA (1)...(19): siRNA sense strand
ggucaagccugugcuggua

SEQ ID NO: 2149175 - RNA, 19 nt, Homo sapiens
  misc_RNA (1)...(19): siRNA sense strand
ucacagaugcuauuagauu

SEQ ID NO: 2149176 - RNA, 19 nt, Homo sapiens
  misc_RNA (1)...(19): siRNA sense strand
guaaagacgacucucaauu

SEQ ID NO: 2149177 - RNA, 19 nt, Homo sapiens
  misc_RNA (1)...(19): siRNA sense strand
gcagacaguugugcuauca

SEQ ID NO: 2149178 - RNA, 19 nt, Homo sapiens
  misc_RNA (1)...(19): siRNA sense strand
gaacuaaucagggucaaga

SEQ ID NO: 2149179 - RNA, 19 nt, Homo sapiens
  misc_RNA (1)...(19): siRNA sense strand
ucaaugacauggugaagau

SEQ ID NO: 2149180 - RNA, 19 nt, Homo sapiens
  misc_RNA (1)...(19): siRNA sense strand
agacacagauaauguacaa

SEQ ID NO: 2149181 - RNA, 19 nt, Homo sapiens
  misc_RNA (1)...(19): siRNA sense strand
caagagaggauuucaggaa

SEQ ID NO: 2149182 - RNA, 19 nt, Homo sapiens
  misc_RNA (1)...(19): siRNA sense strand
gagcaggagugauuucagu

SEQ ID NO: 2149183 - RNA, 19 nt, Homo sapiens
  misc_RNA (1)...(19): siRNA sense strand
ggagguggcuggagaucau

SEQ ID NO: 2149184 - RNA, 19 nt, Homo sapiens
  misc_RNA (1)...(19): siRNA sense strand
gaacuaggaagaauaacau

SEQ ID NO: 2149185 - RNA, 19 nt, Homo sapiens
  misc_RNA (1)...(19): siRNA sense strand
aagaggaaguuguauauuc

SEQ ID NO: 2149186 - RNA, 19 nt, Homo sapiens
  misc_RNA (1)...(19): siRNA sense strand
gaggaaggauccagugagu

SEQ ID NO: 2149187 - RNA, 19 nt, Homo sapiens
  misc_RNA (1)...(19): siRNA sense strand
aaacaagcuuacacccaua

SEQ ID NO: 2149188 - RNA, 19 nt, Homo sapiens
  misc_RNA (1)...(19): siRNA sense strand
ggaaggauccagugagugu

SEQ ID NO: 2149189 - RNA, 19 nt, Homo sapiens
  misc_RNA (1)...(19): siRNA sense strand
ggucagaugauuacacaaa

SEQ ID NO: 2149190 - RNA, 19 nt, Homo sapiens
  misc_RNA (1)...(19): siRNA sense strand
caauaaacagucacuacua

SEQ ID NO: 2149191 - RNA, 19 nt, Homo sapiens
  misc_RNA (1)...(19): siRNA sense strand
ccgaucaacugcugugaaa

SEQ ID NO: 2149192 - RNA, 19 nt, Homo sapiens
  misc_RNA (1)...(19): siRNA sense strand
gagguucugacaaugauua

SEQ ID NO: 2149193 - RNA, 19 nt, Homo sapiens
  misc_RNA (1)...(19): siRNA sense strand
gaagaaggaaagacacaga

SEQ ID NO: 2149194 - RNA, 19 nt, Homo sapiens
  misc_RNA (1)...(19): siRNA sense strand
ggaauuucuuugccugaga

SEQ ID NO: 2149195 - RNA, 19 nt, Homo sapiens
  misc_RNA (1)...(19): siRNA sense strand
aaagugcgauggaaugaau

SEQ ID NO: 2149196 - RNA, 19 nt, Homo sapiens
  misc_RNA (1)...(19): siRNA sense strand
ucucacagaugcuauuaga

SEQ ID NO: 2149197 - RNA, 19 nt, Homo sapiens
  misc_RNA (1)...(19): siRNA sense strand
ugacaaugauuaccugauc

SEQ ID NO: 2149198 - RNA, 19 nt, Homo sapiens
  misc_RNA (1)...(19): siRNA sense strand
aaaaugagguguaauccua

SEQ ID NO: 2149199 - RNA, 19 nt, Homo sapiens
  misc_RNA (1)...(19): siRNA sense strand
gccacuacauugagaaaga

SEQ ID NO: 2149200 - RNA, 19 nt, Homo sapiens
  misc_RNA (1)...(19): siRNA sense strand
gguguaauccuacuaaauc

SEQ ID NO: 2149201 - RNA, 19 nt, Homo sapiens
  misc_RNA (1)...(19): siRNA sense strand
gaagaggaaguuguauauu

SEQ ID NO: 2149202 - RNA, 19 nt, Homo sapiens
  misc_RNA (1)...(19): siRNA sense strand
gcucugaccugcuacuucu

SEQ ID NO: 2149203 - RNA, 19 nt, Homo sapiens
  misc_RNA (1)...(19): siRNA sense strand
gaacuacaggcauccuuau

SEQ ID NO: 2149204 - RNA, 19 nt, Homo sapiens
  misc_RNA (1)...(19): siRNA sense strand
gaagcuugcccucugugua

SEQ ID NO: 2149205 - RNA, 19 nt, Homo sapiens
  misc_RNA (1)...(19): siRNA sense strand
ugagaaaggagccaaagaa

SEQ ID NO: 2149206 - RNA, 19 nt, Homo sapiens
  misc_RNA (1)...(19): siRNA sense strand
uaaugaagaggaaguugua

SEQ ID NO: 2149207 - RNA, 19 nt, Homo sapiens
  misc_RNA (1)...(19): siRNA sense strand
aaucagaguuugcacuaug

SEQ ID NO: 2149208 - RNA, 19 nt, Homo sapiens
  misc_RNA (1)...(19): siRNA sense strand
ggaagaauaacauuugucu

SEQ ID NO: 2149209 - RNA, 19 nt, Homo sapiens
  misc_RNA (1)...(19): siRNA sense strand
gagaaaggagccaaagaau

SEQ ID NO: 2149210 - RNA, 19 nt, Homo sapiens
  misc_RNA (1)...(19): siRNA sense strand
gaauguauaagguguaaag

SEQ ID NO: 2149211 - RNA, 19 nt, Homo sapiens
  misc_RNA (1)...(19): siRNA sense strand
ugaagaggaaguuguauau

SEQ ID NO: 2149212 - RNA, 19 nt, Homo sapiens
  misc_RNA (1)...(19): siRNA sense strand
ccaacaauauaacagacuu

SEQ ID NO: 2149213 - RNA, 19 nt, Homo sapiens
  misc_RNA (1)...(19): siRNA sense strand
aauagacgguucaucaaug

SEQ ID NO: 2149214 - RNA, 19 nt, Homo sapiens
  misc_RNA (1)...(19): siRNA sense strand
gccaaagaauguauaaggu

SEQ ID NO: 2149215 - RNA, 19 nt, Homo sapiens
  misc_RNA (1)...(19): siRNA sense strand
aauaaacagucacuacuag

SEQ ID NO: 2149216 - RNA, 19 nt, Homo sapiens
  misc_RNA (1)...(19): siRNA sense strand
ugagggagccugcaagaga

SEQ ID NO: 2149217 - RNA, 19 nt, Homo sapiens
  misc_RNA (1)...(19): siRNA sense strand
gagguguaauccuacuaaa

SEQ ID NO: 2149218 - RNA, 19 nt, Homo sapiens
  misc_RNA (1)...(19): siRNA sense strand
cuaaucagggucaagauaa

SEQ ID NO: 2149219 - RNA, 19 nt, Homo sapiens
  misc_RNA (1)...(19): siRNA sense strand
cacagaugcuauuagauug

SEQ ID NO: 2149220 - RNA, 19 nt, Homo sapiens
  misc_RNA (1)...(19): siRNA sense strand
gauaauguacaaguggaua

SEQ ID NO: 2149221 - RNA, 19 nt, Homo sapiens
  misc_RNA (1)...(19): siRNA sense strand
ccacuacauugagaaagaa

SEQ ID NO: 2149222 - RNA, 19 nt, Homo sapiens
  misc_RNA (1)...(19): siRNA sense strand
caugguggauauuaauaga

SEQ ID NO: 2149223 - RNA, 19 nt, Homo sapiens
  misc_RNA (1)...(19): siRNA sense strand
acaccuaccuguccauaca

SEQ ID NO: 2149224 - RNA, 19 nt, Homo sapiens
  misc_RNA (1)...(19): siRNA sense strand
uaaugacgacuaacucaaa

SEQ ID NO: 2149225 - RNA, 19 nt, Homo sapiens
  misc_RNA (1)...(19): siRNA sense strand
uaccagaugugcauuucuu

SEQ ID NO: 2149226 - RNA, 19 nt, Homo sapiens
  misc_RNA (1)...(19): siRNA sense strand
aaagacgacucucaauuuu

SEQ ID NO: 2149227 - RNA, 19 nt, Homo sapiens
  misc_RNA (1)...(19): siRNA sense strand
ccaaauaccagaugugcau

SEQ ID NO: 2149228 - RNA, 19 nt, Homo sapiens
  misc_RNA (1)...(19): siRNA sense strand
ucauaggagucacaguuga

SEQ ID NO: 2149229 - RNA, 19 nt, Homo sapiens
  misc_RNA (1)...(19): siRNA sense strand
gaguuugcacuaugacuuu

SEQ ID NO: 2149230 - RNA, 19 nt, Homo sapiens
  misc_RNA (1)...(19): siRNA sense strand
cuaggaagaauaacauuug

SEQ ID NO: 2149231 - RNA, 19 nt, Homo sapiens
  misc_RNA (1)...(19): siRNA sense strand
ccagauccauacuccaugu

SEQ ID NO: 2149232 - RNA, 19 nt, Homo sapiens
  misc_RNA (1)...(19): siRNA sense strand
ggagccaaagaauguauaa

SEQ ID NO: 2149233 - RNA, 19 nt, Homo sapiens
  misc_RNA (1)...(19): siRNA sense strand
agacaguugugcuaucaug

SEQ ID NO: 2149234 - RNA, 19 nt, Homo sapiens
  misc_RNA (1)...(19): siRNA sense strand
caacaucuuguauuaaugg

SEQ ID NO: 2149235 - RNA, 19 nt, Homo sapiens
  misc_RNA (1)...(19): siRNA sense strand
gagcagccuuaucaucaca

SEQ ID NO: 2149236 - RNA, 19 nt, Homo sapiens
  misc_RNA (1)...(19): siRNA sense strand
guaccaacaauauaacaga

SEQ ID NO: 2149237 - RNA, 19 nt, Homo sapiens
  misc_RNA (1)...(19): siRNA sense strand
guccauacaucaggucuau

SEQ ID NO: 2149238 - RNA, 19 nt, Homo sapiens
  misc_RNA (1)...(19): siRNA sense strand
uaaucagggucaagauaau

SEQ ID NO: 2149239 - RNA, 19 nt, Homo sapiens
  misc_RNA (1)...(19): siRNA sense strand
aacaauggaucaucuucuu

SEQ ID NO: 2149240 - RNA, 19 nt, Homo sapiens
  misc_RNA (1)...(19): siRNA sense strand
agaagauaaugaagaggaa

SEQ ID NO: 2149241 - RNA, 19 nt, Homo sapiens
  misc_RNA (1)...(19): siRNA sense strand
gaagaagauggcucucugu

SEQ ID NO: 2149242 - RNA, 19 nt, Homo sapiens
  misc_RNA (1)...(19): siRNA sense strand
ucaagccugugcugguaaa

SEQ ID NO: 2149243 - RNA, 19 nt, Homo sapiens
  misc_RNA (1)...(19): siRNA sense strand
gcaaagaggcuuguauucc

SEQ ID NO: 2149244 - RNA, 19 nt, Homo sapiens
  misc_RNA (1)...(19): siRNA sense strand
ggugaagauuuauucuauc

SEQ ID NO: 2149245 - RNA, 19 nt, Homo sapiens
  misc_RNA (1)...(19): siRNA sense strand
ggauuuaaaccaccaacau

SEQ ID NO: 2149246 - RNA, 19 nt, Homo sapiens
  misc_RNA (1)...(19): siRNA sense strand
gaucuuaaacuugcauauc

SEQ ID NO: 2149247 - RNA, 19 nt, Homo sapiens
  misc_RNA (1)...(19): siRNA sense strand
agaaggaaagacacagaua

SEQ ID NO: 2149248 - RNA, 19 nt, Homo sapiens
  misc_RNA (1)...(19): siRNA sense strand
gauggaaccaaagaaugua

SEQ ID NO: 2149249 - RNA, 19 nt, Homo sapiens
  misc_RNA (1)...(19): siRNA sense strand
gugaaacgguugacuuuug

SEQ ID NO: 2149250 - RNA, 19 nt, Homo sapiens
  misc_RNA (1)...(19): siRNA sense strand
cacuuggcuuugaauauaa

SEQ ID NO: 2149251 - RNA, 19 nt, Homo sapiens
  misc_RNA (1)...(19): siRNA sense strand
ccaggcacauucagcaaca

SEQ ID NO: 2149252 - RNA, 19 nt, Homo sapiens
  misc_RNA (1)...(19): siRNA sense strand
uaaacagucacuacuagga

SEQ ID NO: 2149253 - RNA, 19 nt, Homo sapiens
  misc_RNA (1)...(19): siRNA sense strand
guacggagcaugacuucca

SEQ ID NO: 2149254 - RNA, 19 nt, Homo sapiens
  misc_RNA (1)...(19): siRNA sense strand
ccaggccacuacauugaga

SEQ ID NO: 2149255 - RNA, 19 nt, Homo sapiens
  misc_RNA (1)...(19): siRNA sense strand
auacucuacuggagaacua

SEQ ID NO: 2149256 - RNA, 19 nt, Homo sapiens
  misc_RNA (1)...(19): siRNA sense strand
gcacuuggcuuugaauaua

SEQ ID NO: 2149257 - RNA, 19 nt, Homo sapiens
  misc_RNA (1)...(19): siRNA sense strand
gaagauauguucccaguuc

SEQ ID NO: 2149258 - RNA, 19 nt, Homo sapiens
  misc_RNA (1)...(19): siRNA sense strand
gaauauaaaugguggaaug

SEQ ID NO: 2149259 - RNA, 19 nt, Homo sapiens
  misc_RNA (1)...(19): siRNA sense strand
gaaaggagccaaagaaugu

SEQ ID NO: 2149260 - RNA, 19 nt, Homo sapiens
  misc_RNA (1)...(19): siRNA sense strand
gaaaucaggcacaaacaua

SEQ ID NO: 2149261 - RNA, 19 nt, Homo sapiens
  misc_RNA (1)...(19): siRNA sense strand
gaaagacacagauaaugua

SEQ ID NO: 2149262 - RNA, 19 nt, Homo sapiens
  misc_RNA (1)...(19): siRNA sense strand
guacaaaugugguagaauc

SEQ ID NO: 2149263 - RNA, 19 nt, Homo sapiens
  misc_RNA (1)...(19): siRNA sense strand
caacaauuauuccuucuga

SEQ ID NO: 2149264 - RNA, 19 nt, Homo sapiens
  misc_RNA (1)...(19): siRNA sense strand
gcacaaacauacucuacug

SEQ ID NO: 2149265 - RNA, 19 nt, Homo sapiens
  misc_RNA (1)...(19): siRNA sense strand
uaaagacgacucucaauuu

SEQ ID NO: 2149266 - RNA, 19 nt, Homo sapiens
  misc_RNA (1)...(19): siRNA sense strand
gauaauagacgguucauca

SEQ ID NO: 2149267 - RNA, 19 nt, Homo sapiens
  misc_RNA (1)...(19): siRNA sense strand
gaaggaaagacacagauaa

SEQ ID NO: 2149268 - RNA, 19 nt, Homo sapiens
  misc_RNA (1)...(19): siRNA sense strand
ggaaagacacagauaaugu

SEQ ID NO: 2149269 - RNA, 19 nt, Homo sapiens
  misc_RNA (1)...(19): siRNA sense strand
guaugccagucaacaauua

SEQ ID NO: 2149270 - RNA, 19 nt, Homo sapiens
  misc_RNA (1)...(19): siRNA sense strand
ggaaggagaagauaaugaa

SEQ ID NO: 2149271 - RNA, 19 nt, Homo sapiens
  misc_RNA (1)...(19): siRNA sense strand
caaagaauguagaccaugu

SEQ ID NO: 2149272 - RNA, 19 nt, Homo sapiens
  misc_RNA (1)...(19): siRNA sense strand
caggaaaccuuguaugugu

SEQ ID NO: 2149273 - RNA, 19 nt, Homo sapiens
  misc_RNA (1)...(19): siRNA sense strand
caaagaggcuuguauucca

SEQ ID NO: 2149274 - RNA, 19 nt, Homo sapiens
  misc_RNA (1)...(19): siRNA sense strand
ggucaagccugugcuggua

SEQ ID NO: 2149275 - RNA, 19 nt, Homo sapiens
  misc_RNA (1)...(19): siRNA sense strand
ucacagaugcuauuagauu

SEQ ID NO: 2149276 - RNA, 19 nt, Homo sapiens
  misc_RNA (1)...(19): siRNA sense strand
guaaagacgacucucaauu

SEQ ID NO: 2149277 - RNA, 19 nt, Homo sapiens
  misc_RNA (1)...(19): siRNA sense strand
gcagacaguugugcuauca

SEQ ID NO: 2149278 - RNA, 19 nt, Homo sapiens
  misc_RNA (1)...(19): siRNA sense strand
gaacuaaucagggucaaga

SEQ ID NO: 2149279 - RNA, 19 nt, Homo sapiens
  misc_RNA (1)...(19): siRNA sense strand
ucaaugacauggugaagau

SEQ ID NO: 2149280 - RNA, 19 nt, Homo sapiens
  misc_RNA (1)...(19): siRNA sense strand
agacacagauaauguacaa

SEQ ID NO: 2149281 - RNA, 19 nt, Homo sapiens
  misc_RNA (1)...(19): siRNA sense strand
caagagaggauuucaggaa

SEQ ID NO: 2149282 - RNA, 19 nt, Homo sapiens
  misc_RNA (1)...(19): siRNA sense strand
gagcaggagugauuucagu

SEQ ID NO: 2149283 - RNA, 19 nt, Homo sapiens
  misc_RNA (1)...(19): siRNA sense strand
ggagguggcuggagaucau

SEQ ID NO: 2149284 - RNA, 19 nt, Homo sapiens
  misc_RNA (1)...(19): siRNA sense strand
gaacuaggaagaauaacau

SEQ ID NO: 2149285 - RNA, 19 nt, Homo sapiens
  misc_RNA (1)...(19): siRNA sense strand
aagaggaaguuguauauuc

SEQ ID NO: 2149286 - RNA, 19 nt, Homo sapiens
  misc_RNA (1)...(19): siRNA sense strand
gaggaaggauccagugagu

SEQ ID NO: 2149287 - RNA, 19 nt, Homo sapiens
  misc_RNA (1)...(19): siRNA sense strand
aaacaagcuuacacccaua

SEQ ID NO: 2149288 - RNA, 19 nt, Homo sapiens
  misc_RNA (1)...(19): siRNA sense strand
ggaaggauccagugagugu

SEQ ID NO: 2149289 - RNA, 19 nt, Homo sapiens
  misc_RNA (1)...(19): siRNA sense strand
ggucagaugauuacacaaa

SEQ ID NO: 2149290 - RNA, 19 nt, Homo sapiens
  misc_RNA (1)...(19): siRNA sense strand
caauaaacagucacuacua

SEQ ID NO: 2149291 - RNA, 19 nt, Homo sapiens
  misc_RNA (1)...(19): siRNA sense strand
ccgaucaacugcugugaaa

SEQ ID NO: 2149292 - RNA, 19 nt, Homo sapiens
  misc_RNA (1)...(19): siRNA sense strand
gagguucugacaaugauua

SEQ ID NO: 2149293 - RNA, 19 nt, Homo sapiens
  misc_RNA (1)...(19): siRNA sense strand
gaagaaggaaagacacaga

SEQ ID NO: 2149294 - RNA, 19 nt, Homo sapiens
  misc_RNA (1)...(19): siRNA sense strand
ggaauuucuuugccugaga

SEQ ID NO: 2149295 - RNA, 19 nt, Homo sapiens
  misc_RNA (1)...(19): siRNA sense strand
aaagugcgauggaaugaau

SEQ ID NO: 2149296 - RNA, 19 nt, Homo sapiens
  misc_RNA (1)...(19): siRNA sense strand
ucucacagaugcuauuaga

SEQ ID NO: 2149297 - RNA, 19 nt, Homo sapiens
  misc_RNA (1)...(19): siRNA sense strand
ugacaaugauuaccugauc

SEQ ID NO: 2149298 - RNA, 19 nt, Homo sapiens
  misc_RNA (1)...(19): siRNA sense strand
aaaaugagguguaauccua

SEQ ID NO: 2149299 - RNA, 19 nt, Homo sapiens
  misc_RNA (1)...(19): siRNA sense strand
gccacuacauugagaaaga

SEQ ID NO: 2149300 - RNA, 19 nt, Homo sapiens
  misc_RNA (1)...(19): siRNA sense strand
gguguaauccuacuaaauc

SEQ ID NO: 2149301 - RNA, 19 nt, Homo sapiens
  misc_RNA (1)...(19): siRNA sense strand
gaagaggaaguuguauauu

SEQ ID NO: 2149302 - RNA, 19 nt, Homo sapiens
  misc_RNA (1)...(19): siRNA sense strand
gcucugaccugcuacuucu

SEQ ID NO: 2149303 - RNA, 19 nt, Homo sapiens
  misc_RNA (1)...(19): siRNA sense strand
gaacuacaggcauccuuau

SEQ ID NO: 2149304 - RNA, 19 nt, Homo sapiens
  misc_RNA (1)...(19): siRNA sense strand
gaagcuugcccucugugua

SEQ ID NO: 2149305 - RNA, 19 nt, Homo sapiens
  misc_RNA (1)...(19): siRNA sense strand
ugagaaaggagccaaagaa

SEQ ID NO: 2149306 - RNA, 19 nt, Homo sapiens
  misc_RNA (1)...(19): siRNA sense strand
uaaugaagaggaaguugua

SEQ ID NO: 2149307 - RNA, 19 nt, Homo sapiens
  misc_RNA (1)...(19): siRNA sense strand
aaucagaguuugcacuaug

SEQ ID NO: 2149308 - RNA, 19 nt, Homo sapiens
  misc_RNA (1)...(19): siRNA sense strand
ggaagaauaacauuugucu

SEQ ID NO: 2149309 - RNA, 19 nt, Homo sapiens
  misc_RNA (1)...(19): siRNA sense strand
gagaaaggagccaaagaau

SEQ ID NO: 2149310 - RNA, 19 nt, Homo sapiens
  misc_RNA (1)...(19): siRNA sense strand
gaauguauaagguguaaag

SEQ ID NO: 2149311 - RNA, 19 nt, Homo sapiens
  misc_RNA (1)...(19): siRNA sense strand
ugaagaggaaguuguauau

SEQ ID NO: 2149312 - RNA, 19 nt, Homo sapiens
  misc_RNA (1)...(19): siRNA sense strand
ccaacaauauaacagacuu

SEQ ID NO: 2149313 - RNA, 19 nt, Homo sapiens
  misc_RNA (1)...(19): siRNA sense strand
aauagacgguucaucaaug

SEQ ID NO: 2149314 - RNA, 19 nt, Homo sapiens
  misc_RNA (1)...(19): siRNA sense strand
gccaaagaauguauaaggu

SEQ ID NO: 2149315 - RNA, 19 nt, Homo sapiens
  misc_RNA (1)...(19): siRNA sense strand
aauaaacagucacuacuag

SEQ ID NO: 2149316 - RNA, 19 nt, Homo sapiens
  misc_RNA (1)...(19): siRNA sense strand
ugagggagccugcaagaga

SEQ ID NO: 2149317 - RNA, 19 nt, Homo sapiens
  misc_RNA (1)...(19): siRNA sense strand
gagguguaauccuacuaaa

SEQ ID NO: 2149318 - RNA, 19 nt, Homo sapiens
  misc_RNA (1)...(19): siRNA sense strand
cuaaucagggucaagauaa

SEQ ID NO: 2149319 - RNA, 19 nt, Homo sapiens
  misc_RNA (1)...(19): siRNA sense strand
cacagaugcuauuagauug

SEQ ID NO: 2149320 - RNA, 19 nt, Homo sapiens
  misc_RNA (1)...(19): siRNA sense strand
gauaauguacaaguggaua

SEQ ID NO: 2149321 - RNA, 19 nt, Homo sapiens
  misc_RNA (1)...(19): siRNA sense strand
ccacuacauugagaaagaa

SEQ ID NO: 2149322 - RNA, 19 nt, Homo sapiens
  misc_RNA (1)...(19): siRNA sense strand
caugguggauauuaauaga

SEQ ID NO: 2149323 - RNA, 19 nt, Homo sapiens
  misc_RNA (1)...(19): siRNA sense strand
acaccuaccuguccauaca

SEQ ID NO: 2149324 - RNA, 19 nt, Homo sapiens
  misc_RNA (1)...(19): siRNA sense strand
uaaugacgacuaacucaaa

SEQ ID NO: 2149325 - RNA, 19 nt, Homo sapiens
  misc_RNA (1)...(19): siRNA sense strand
uaccagaugugcauuucuu

SEQ ID NO: 2149326 - RNA, 19 nt, Homo sapiens
  misc_RNA (1)...(19): siRNA sense strand
aaagacgacucucaauuuu

SEQ ID NO: 2149327 - RNA, 19 nt, Homo sapiens
  misc_RNA (1)...(19): siRNA sense strand
ccaaauaccagaugugcau

SEQ ID NO: 2149328 - RNA, 19 nt, Homo sapiens
  misc_RNA (1)...(19): siRNA sense strand
ucauaggagucacaguuga

SEQ ID NO: 2149329 - RNA, 19 nt, Homo sapiens
  misc_RNA (1)...(19): siRNA sense strand
gaguuugcacuaugacuuu

SEQ ID NO: 2149330 - RNA, 19 nt, Homo sapiens
  misc_RNA (1)...(19): siRNA sense strand
cuaggaagaauaacauuug

SEQ ID NO: 2149331 - RNA, 19 nt, Homo sapiens
  misc_RNA (1)...(19): siRNA sense strand
ccagauccauacuccaugu

SEQ ID NO: 2149332 - RNA, 19 nt, Homo sapiens
  misc_RNA (1)...(19): siRNA sense strand
ggagccaaagaauguauaa

SEQ ID NO: 2149333 - RNA, 19 nt, Homo sapiens
  misc_RNA (1)...(19): siRNA sense strand
agacaguugugcuaucaug

SEQ ID NO: 2149334 - RNA, 19 nt, Homo sapiens
  misc_RNA (1)...(19): siRNA sense strand
caacaucuuguauuaaugg

SEQ ID NO: 2149335 - RNA, 19 nt, Homo sapiens
  misc_RNA (1)...(19): siRNA sense strand
gagcagccuuaucaucaca

SEQ ID NO: 2149336 - RNA, 19 nt, Homo sapiens
  misc_RNA (1)...(19): siRNA sense strand
guaccaacaauauaacaga

SEQ ID NO: 2149337 - RNA, 19 nt, Homo sapiens
  misc_RNA (1)...(19): siRNA sense strand
guccauacaucaggucuau

SEQ ID NO: 2149338 - RNA, 19 nt, Homo sapiens
  misc_RNA (1)...(19): siRNA sense strand
uaaucagggucaagauaau

SEQ ID NO: 2149339 - RNA, 19 nt, Homo sapiens
  misc_RNA (1)...(19): siRNA sense strand
aacaauggaucaucuucuu

SEQ ID NO: 2149340 - RNA, 19 nt, Homo sapiens
  misc_RNA (1)...(19): siRNA sense strand
agaagauaaugaagaggaa

SEQ ID NO: 2149341 - RNA, 19 nt, Homo sapiens
  misc_RNA (1)...(19): siRNA sense strand
gaagaagauggcucucugu

SEQ ID NO: 2149342 - RNA, 19 nt, Homo sapiens
  misc_RNA (1)...(19): siRNA sense strand
ucaagccugugcugguaaa

SEQ ID NO: 2149343 - RNA, 19 nt, Homo sapiens
  misc_RNA (1)...(19): siRNA sense strand
gcaaagaggcuuguauucc

SEQ ID NO: 2149344 - RNA, 19 nt, Homo sapiens
  misc_RNA (1)...(19): siRNA sense strand
ggugaagauuuauucuauc

SEQ ID NO: 2149345 - RNA, 19 nt, Homo sapiens
  misc_RNA (1)...(19): siRNA sense strand
ggauuuaaaccaccaacau

SEQ ID NO: 2149346 - RNA, 19 nt, Homo sapiens
  misc_RNA (1)...(19): siRNA sense strand
gaucuuaaacuugcauauc

SEQ ID NO: 2149347 - RNA, 19 nt, Homo sapiens
  misc_RNA (1)...(19): siRNA sense strand
agaaggaaagacacagaua

SEQ ID NO: 2149348 - RNA, 19 nt, Homo sapiens
  misc_RNA (1)...(19): siRNA sense strand
gauggaaccaaagaaugua

SEQ ID NO: 2149349 - RNA, 19 nt, Homo sapiens
  misc_RNA (1)...(19): siRNA sense strand
gugaaacgguugacuuuug

SEQ ID NO: 2149350 - RNA, 19 nt, Homo sapiens
  misc_RNA (1)...(19): siRNA sense strand
cacuuggcuuugaauauaa

SEQ ID NO: 2149351 - RNA, 19 nt, Homo sapiens
  misc_RNA (1)...(19): siRNA sense strand
ccaggcacauucagcaaca

SEQ ID NO: 2149352 - RNA, 19 nt, Homo sapiens
  misc_RNA (1)...(19): siRNA sense strand
uaaacagucacuacuagga

SEQ ID NO: 2149353 - RNA, 19 nt, Homo sapiens
  misc_RNA (1)...(19): siRNA sense strand
guacggagcaugacuucca

SEQ ID NO: 2149354 - RNA, 19 nt, Homo sapiens
  misc_RNA (1)...(19): siRNA sense strand
ccaggccacuacauugaga

SEQ ID NO: 2149355 - RNA, 19 nt, Homo sapiens
  misc_RNA (1)...(19): siRNA sense strand
auacucuacuggagaacua

SEQ ID NO: 2149356 - RNA, 19 nt, Homo sapiens
  misc_RNA (1)...(19): siRNA sense strand
caggaaagcucaaacauuu

SEQ ID NO: 2149357 - RNA, 19 nt, Homo sapiens
  misc_RNA (1)...(19): siRNA sense strand
caacacaaguucaccauga

SEQ ID NO: 2149358 - RNA, 19 nt, Homo sapiens
  misc_RNA (1)...(19): siRNA sense strand
uaucaacccuacaaaguua

SEQ ID NO: 2149359 - RNA, 19 nt, Homo sapiens
  misc_RNA (1)...(19): siRNA sense strand
ggacugacaauacuacaua

SEQ ID NO: 2149360 - RNA, 19 nt, Homo sapiens
  misc_RNA (1)...(19): siRNA sense strand
gcaagaccauccagaguga

SEQ ID NO: 2149361 - RNA, 19 nt, Homo sapiens
  misc_RNA (1)...(19): siRNA sense strand
gcaauuacaucgugaaggu

SEQ ID NO: 2149362 - RNA, 19 nt, Homo sapiens
  misc_RNA (1)...(19): siRNA sense strand
ggaaagugauaucauuaug

SEQ ID NO: 2149363 - RNA, 19 nt, Homo sapiens
  misc_RNA (1)...(19): siRNA sense strand
ggagaagcuugcacagaaa

SEQ ID NO: 2149364 - RNA, 19 nt, Homo sapiens
  misc_RNA (1)...(19): siRNA sense strand
gagaggccauccuauuuga

SEQ ID NO: 2149365 - RNA, 19 nt, Homo sapiens
  misc_RNA (1)...(19): siRNA sense strand
gaaaguagcccagaagaca

SEQ ID NO: 2149366 - RNA, 19 nt, Homo sapiens
  misc_RNA (1)...(19): siRNA sense strand
aggaagacauugggaauua

SEQ ID NO: 2149367 - RNA, 19 nt, Homo sapiens
  misc_RNA (1)...(19): siRNA sense strand
gcaugggccucgcuuagaa

SEQ ID NO: 2149368 - RNA, 19 nt, Homo sapiens
  misc_RNA (1)...(19): siRNA sense strand
ucagugaaauggaaaguga

SEQ ID NO: 2149369 - RNA, 19 nt, Homo sapiens
  misc_RNA (1)...(19): siRNA sense strand
uuacugggcucugugaaua

SEQ ID NO: 2149370 - RNA, 19 nt, Homo sapiens
  misc_RNA (1)...(19): siRNA sense strand
gaaaaucauugucaccuuu

SEQ ID NO: 2149371 - RNA, 19 nt, Homo sapiens
  misc_RNA (1)...(19): siRNA sense strand
gcuuagaaguugcaucuga

SEQ ID NO: 2149372 - RNA, 19 nt, Homo sapiens
  misc_RNA (1)...(19): siRNA sense strand
gaggaacccugucagugaa

SEQ ID NO: 2149373 - RNA, 19 nt, Homo sapiens
  misc_RNA (1)...(19): siRNA sense strand
uaucaucacuuccguagga

SEQ ID NO: 2149374 - RNA, 19 nt, Homo sapiens
  misc_RNA (1)...(19): siRNA sense strand
uggagaagcuugcacagaa

SEQ ID NO: 2149375 - RNA, 19 nt, Homo sapiens
  misc_RNA (1)...(19): siRNA sense strand
cagaucauauggcuauuug

SEQ ID NO: 2149376 - RNA, 19 nt, Homo sapiens
  misc_RNA (1)...(19): siRNA sense strand
ggagaggccauccuauuug

SEQ ID NO: 2149377 - RNA, 19 nt, Homo sapiens
  misc_RNA (1)...(19): siRNA sense strand
gcaaguauaacuggaauau

SEQ ID NO: 2149378 - RNA, 19 nt, Homo sapiens
  misc_RNA (1)...(19): siRNA sense strand
cacaaugcccaaauacuua

SEQ ID NO: 2149379 - RNA, 19 nt, Homo sapiens
  misc_RNA (1)...(19): siRNA sense strand
gaaacagaauacaggaaag

SEQ ID NO: 2149380 - RNA, 19 nt, Homo sapiens
  misc_RNA (1)...(19): siRNA sense strand
cccaaugcaucucugcuua

SEQ ID NO: 2149381 - RNA, 19 nt, Homo sapiens
  misc_RNA (1)...(19): siRNA sense strand
gggaaguguuuacuguuga

SEQ ID NO: 2149382 - RNA, 19 nt, Homo sapiens
  misc_RNA (1)...(19): siRNA sense strand
agaagacaauggacuaugu

SEQ ID NO: 2149383 - RNA, 19 nt, Homo sapiens
  misc_RNA (1)...(19): siRNA sense strand
ucagggaaauggaacucua

SEQ ID NO: 2149384 - RNA, 19 nt, Homo sapiens
  misc_RNA (1)...(19): siRNA sense strand
ucacaguuaucaucacuuc

SEQ ID NO: 2149385 - RNA, 19 nt, Homo sapiens
  misc_RNA (1)...(19): siRNA sense strand
gaaauggaaagugauauca

SEQ ID NO: 2149386 - RNA, 19 nt, Homo sapiens
  misc_RNA (1)...(19): siRNA sense strand
ccacugcaguucccugaug

SEQ ID NO: 2149387 - RNA, 19 nt, Homo sapiens
  misc_RNA (1)...(19): siRNA sense strand
gaaguugcaucugagaaag

SEQ ID NO: 2149388 - RNA, 19 nt, Homo sapiens
  misc_RNA (1)...(19): siRNA sense strand
gggccucgcuuagaaguug

SEQ ID NO: 2149389 - RNA, 19 nt, Homo sapiens
  misc_RNA (1)...(19): siRNA sense strand
gcacucggcuagcuuacca

SEQ ID NO: 2149390 - RNA, 19 nt, Homo sapiens
  misc_RNA (1)...(19): siRNA sense strand
ggaaauggaacucuaucug

SEQ ID NO: 2149391 - RNA, 19 nt, Homo sapiens
  misc_RNA (1)...(19): siRNA sense strand
caucagacauccagaucau

SEQ ID NO: 2149392 - RNA, 19 nt, Homo sapiens
  misc_RNA (1)...(19): siRNA sense strand
ugaggaacccugucaguga

SEQ ID NO: 2149393 - RNA, 19 nt, Homo sapiens
  misc_RNA (1)...(19): siRNA sense strand
caagugaauucugauaaag

SEQ ID NO: 2149394 - RNA, 19 nt, Homo sapiens
  misc_RNA (1)...(19): siRNA sense strand
ccaugaagaugcucuggau

SEQ ID NO: 2149395 - RNA, 19 nt, Homo sapiens
  misc_RNA (1)...(19): siRNA sense strand
ggaauaccaacacaaguuc

SEQ ID NO: 2149396 - RNA, 19 nt, Homo sapiens
  misc_RNA (1)...(19): siRNA sense strand
acacaaugcccaaauacuu

SEQ ID NO: 2149397 - RNA, 19 nt, Homo sapiens
  misc_RNA (1)...(19): siRNA sense strand
gaggccauccuauuugauu

SEQ ID NO: 2149398 - RNA, 19 nt, Homo sapiens
  misc_RNA (1)...(19): siRNA sense strand
caacaccuacuccuggauu

SEQ ID NO: 2149399 - RNA, 19 nt, Homo sapiens
  misc_RNA (1)...(19): siRNA sense strand
gagaaaguagcccagaaga

SEQ ID NO: 2149400 - RNA, 19 nt, Homo sapiens
  misc_RNA (1)...(19): siRNA sense strand
agaaacagaauacaggaaa

SEQ ID NO: 2149401 - RNA, 19 nt, Homo sapiens
  misc_RNA (1)...(19): siRNA sense strand
gaucauauggcuauuugag

SEQ ID NO: 2149402 - RNA, 19 nt, Homo sapiens
  misc_RNA (1)...(19): siRNA sense strand
cuagaaggcaggccagaaa

SEQ ID NO: 2149403 - RNA, 19 nt, Homo sapiens
  misc_RNA (1)...(19): siRNA sense strand
cccacacaaugcccaaaua

SEQ ID NO: 2149404 - RNA, 19 nt, Homo sapiens
  misc_RNA (1)...(19): siRNA sense strand
uggagaggccauccuauuu

SEQ ID NO: 2149405 - RNA, 19 nt, Homo sapiens
  misc_RNA (1)...(19): siRNA sense strand
gaaagugauaucauuaugc

SEQ ID NO: 2149406 - RNA, 19 nt, Homo sapiens
  misc_RNA (1)...(19): siRNA sense strand
caaagccaguggugcagau

SEQ ID NO: 2149407 - RNA, 19 nt, Homo sapiens
  misc_RNA (1)...(19): siRNA sense strand
ggaagacauugggaauuac

SEQ ID NO: 2149408 - RNA, 19 nt, Homo sapiens
  misc_RNA (1)...(19): siRNA sense strand
ggaugacuucggaauauau

SEQ ID NO: 2149409 - RNA, 19 nt, Homo sapiens
  misc_RNA (1)...(19): siRNA sense strand
uggaugacuucggaauaua

SEQ ID NO: 2149410 - RNA, 19 nt, Homo sapiens
  misc_RNA (1)...(19): siRNA sense strand
aagaugcucuggaugacuu

SEQ ID NO: 2149411 - RNA, 19 nt, Homo sapiens
  misc_RNA (1)...(19): siRNA sense strand
ucagacauccagaucauau

SEQ ID NO: 2149412 - RNA, 19 nt, Homo sapiens
  misc_RNA (1)...(19): siRNA sense strand
uuauggaccuuauggacuu

SEQ ID NO: 2149413 - RNA, 19 nt, Homo sapiens
  misc_RNA (1)...(19): siRNA sense strand
gaagacauugggaauuaca

SEQ ID NO: 2149414 - RNA, 19 nt, Homo sapiens
  misc_RNA (1)...(19): siRNA sense strand
caaggaagacauugggaau

SEQ ID NO: 2149415 - RNA, 19 nt, Homo sapiens
  misc_RNA (1)...(19): siRNA sense strand
gaauacaggaaagcucaaa

SEQ ID NO: 2149416 - RNA, 19 nt, Homo sapiens
  misc_RNA (1)...(19): siRNA sense strand
ugucuucucuuccuaugga

SEQ ID NO: 2149417 - RNA, 19 nt, Homo sapiens
  misc_RNA (1)...(19): siRNA sense strand
gaaaggaaaaucauuguca

SEQ ID NO: 2149418 - RNA, 19 nt, Homo sapiens
  misc_RNA (1)...(19): siRNA sense strand
gaagacaauggacuaugug

SEQ ID NO: 2149419 - RNA, 19 nt, Homo sapiens
  misc_RNA (1)...(19): siRNA sense strand
caaugcaucucugcuuauc

SEQ ID NO: 2149420 - RNA, 19 nt, Homo sapiens
  misc_RNA (1)...(19): siRNA sense strand
acaggaaagcucaaacauu

SEQ ID NO: 2149421 - RNA, 19 nt, Homo sapiens
  misc_RNA (1)...(19): siRNA sense strand
ggucaacauucagggaaau

SEQ ID NO: 2149422 - RNA, 19 nt, Homo sapiens
  misc_RNA (1)...(19): siRNA sense strand
cuaccuacccguccacuau

SEQ ID NO: 2149423 - RNA, 19 nt, Homo sapiens
  misc_RNA (1)...(19): siRNA sense strand
ucggcuagcuuaccaaugg

SEQ ID NO: 2149424 - RNA, 19 nt, Homo sapiens
  misc_RNA (1)...(19): siRNA sense strand
agauacaagucacgguuga

SEQ ID NO: 2149425 - RNA, 19 nt, Homo sapiens
  misc_RNA (1)...(19): siRNA sense strand
gaaggugacagugccauca

SEQ ID NO: 2149426 - RNA, 19 nt, Homo sapiens
  misc_RNA (1)...(19): siRNA sense strand
cuggaugacuucggaauau

SEQ ID NO: 2149427 - RNA, 19 nt, Homo sapiens
  misc_RNA (1)...(19): siRNA sense strand
uagcaaguauaacuggaau

SEQ ID NO: 2149428 - RNA, 19 nt, Homo sapiens
  misc_RNA (1)...(19): siRNA sense strand
ggaaaaucauugucaccuu

SEQ ID NO: 2149429 - RNA, 19 nt, Homo sapiens
  misc_RNA (1)...(19): siRNA sense strand
agaaguugcaucugagaaa

SEQ ID NO: 2149430 - RNA, 19 nt, Homo sapiens
  misc_RNA (1)...(19): siRNA sense strand
gaauaagucugugguuccu

SEQ ID NO: 2149431 - RNA, 19 nt, Homo sapiens
  misc_RNA (1)...(19): siRNA sense strand
uugaugauccugucacaaa

SEQ ID NO: 2149432 - RNA, 19 nt, Homo sapiens
  misc_RNA (1)...(19): siRNA sense strand
gacugacaauacuacauau

SEQ ID NO: 2149433 - RNA, 19 nt, Homo sapiens
  misc_RNA (1)...(19): siRNA sense strand
uggaauaccaacacaaguu

SEQ ID NO: 2149434 - RNA, 19 nt, Homo sapiens
  misc_RNA (1)...(19): siRNA sense strand
gcaggcaagaugaaacuca

SEQ ID NO: 2149435 - RNA, 19 nt, Homo sapiens
  misc_RNA (1)...(19): siRNA sense strand
gacuaugugugcugugcuu

SEQ ID NO: 2149436 - RNA, 19 nt, Homo sapiens
  misc_RNA (1)...(19): siRNA sense strand
ggaacccugucagugaaau

SEQ ID NO: 2149437 - RNA, 19 nt, Homo sapiens
  misc_RNA (1)...(19): siRNA sense strand
gugcugugcuuacaacaac

SEQ ID NO: 2149438 - RNA, 19 nt, Homo sapiens
  misc_RNA (1)...(19): siRNA sense strand
uaggaggacugacaauacu

SEQ ID NO: 2149439 - RNA, 19 nt, Homo sapiens
  misc_RNA (1)...(19): siRNA sense strand
augcaucucugcuuaucaa

SEQ ID NO: 2149440 - RNA, 19 nt, Homo sapiens
  misc_RNA (1)...(19): siRNA sense strand
gcaggccagaaacagaaua

SEQ ID NO: 2149441 - RNA, 19 nt, Homo sapiens
  misc_RNA (1)...(19): siRNA sense strand
aaaaguaggggaaguguuu

SEQ ID NO: 2149442 - RNA, 19 nt, Homo sapiens
  misc_RNA (1)...(19): siRNA sense strand
gauaaagggcuaaaaguag

SEQ ID NO: 2149443 - RNA, 19 nt, Homo sapiens
  misc_RNA (1)...(19): siRNA sense strand
cagcuccaccuacuccuuu

SEQ ID NO: 2149444 - RNA, 19 nt, Homo sapiens
  misc_RNA (1)...(19): siRNA sense strand
caaaacaauacccuucaua

SEQ ID NO: 2149445 - RNA, 19 nt, Homo sapiens
  misc_RNA (1)...(19): siRNA sense strand
ggaaguguuuacuguugac

SEQ ID NO: 2149446 - RNA, 19 nt, Homo sapiens
  misc_RNA (1)...(19): siRNA sense strand
acagcugccuggugaggaa

SEQ ID NO: 2149447 - RNA, 19 nt, Homo sapiens
  misc_RNA (1)...(19): siRNA sense strand
ccagaucauauggcuauuu

SEQ ID NO: 2149448 - RNA, 19 nt, Homo sapiens
  misc_RNA (1)...(19): siRNA sense strand
aauaucaacccuacaaagu

SEQ ID NO: 2149449 - RNA, 19 nt, Homo sapiens
  misc_RNA (1)...(19): siRNA sense strand
ggggaaguguuuacuguug

SEQ ID NO: 2149450 - RNA, 19 nt, Homo sapiens
  misc_RNA (1)...(19): siRNA sense strand
ugaaauggaaagugauauc

SEQ ID NO: 2149451 - RNA, 19 nt, Homo sapiens
  misc_RNA (1)...(19): siRNA sense strand
ugacuucggaauauaugaa

SEQ ID NO: 2149452 - RNA, 19 nt, Homo sapiens
  misc_RNA (1)...(19): siRNA sense strand
ucaccuuuagcaaguauaa

SEQ ID NO: 2149453 - RNA, 19 nt, Homo sapiens
  misc_RNA (1)...(19): siRNA sense strand
ggauuaggaggacugacaa

SEQ ID NO: 2149454 - RNA, 19 nt, Homo sapiens
  misc_RNA (1)...(19): siRNA sense strand
aacaccuacuccuggauua

SEQ ID NO: 2149455 - RNA, 19 nt, Homo sapiens
  misc_RNA (1)...(19): siRNA sense strand
gauaucauuaugcccauca

SEQ ID NO: 2149456 - RNA, 19 nt, Homo sapiens
  misc_RNA (1)...(19): siRNA sense strand
caggaaagcucaaacauuu

SEQ ID NO: 2149457 - RNA, 19 nt, Homo sapiens
  misc_RNA (1)...(19): siRNA sense strand
caacacaaguucaccauga

SEQ ID NO: 2149458 - RNA, 19 nt, Homo sapiens
  misc_RNA (1)...(19): siRNA sense strand
uaucaacccuacaaaguua

SEQ ID NO: 2149459 - RNA, 19 nt, Homo sapiens
  misc_RNA (1)...(19): siRNA sense strand
ggacugacaauacuacaua

SEQ ID NO: 2149460 - RNA, 19 nt, Homo sapiens
  misc_RNA (1)...(19): siRNA sense strand
gcaagaccauccagaguga

SEQ ID NO: 2149461 - RNA, 19 nt, Homo sapiens
  misc_RNA (1)...(19): siRNA sense strand
gcaauuacaucgugaaggu

SEQ ID NO: 2149462 - RNA, 19 nt, Homo sapiens
  misc_RNA (1)...(19): siRNA sense strand
ggaaagugauaucauuaug

SEQ ID NO: 2149463 - RNA, 19 nt, Homo sapiens
  misc_RNA (1)...(19): siRNA sense strand
ggagaagcuugcacagaaa

SEQ ID NO: 2149464 - RNA, 19 nt, Homo sapiens
  misc_RNA (1)...(19): siRNA sense strand
gagaggccauccuauuuga

SEQ ID NO: 2149465 - RNA, 19 nt, Homo sapiens
  misc_RNA (1)...(19): siRNA sense strand
gaaaguagcccagaagaca

SEQ ID NO: 2149466 - RNA, 19 nt, Homo sapiens
  misc_RNA (1)...(19): siRNA sense strand
aggaagacauugggaauua

SEQ ID NO: 2149467 - RNA, 19 nt, Homo sapiens
  misc_RNA (1)...(19): siRNA sense strand
gcaugggccucgcuuagaa

SEQ ID NO: 2149468 - RNA, 19 nt, Homo sapiens
  misc_RNA (1)...(19): siRNA sense strand
ucagugaaauggaaaguga

SEQ ID NO: 2149469 - RNA, 19 nt, Homo sapiens
  misc_RNA (1)...(19): siRNA sense strand
uuacugggcucugugaaua

SEQ ID NO: 2149470 - RNA, 19 nt, Homo sapiens
  misc_RNA (1)...(19): siRNA sense strand
gaaaaucauugucaccuuu

SEQ ID NO: 2149471 - RNA, 19 nt, Homo sapiens
  misc_RNA (1)...(19): siRNA sense strand
gcuuagaaguugcaucuga

SEQ ID NO: 2149472 - RNA, 19 nt, Homo sapiens
  misc_RNA (1)...(19): siRNA sense strand
gaggaacccugucagugaa

SEQ ID NO: 2149473 - RNA, 19 nt, Homo sapiens
  misc_RNA (1)...(19): siRNA sense strand
uaucaucacuuccguagga

SEQ ID NO: 2149474 - RNA, 19 nt, Homo sapiens
  misc_RNA (1)...(19): siRNA sense strand
uggagaagcuugcacagaa

SEQ ID NO: 2149475 - RNA, 19 nt, Homo sapiens
  misc_RNA (1)...(19): siRNA sense strand
cagaucauauggcuauuug

SEQ ID NO: 2149476 - RNA, 19 nt, Homo sapiens
  misc_RNA (1)...(19): siRNA sense strand
ggagaggccauccuauuug

SEQ ID NO: 2149477 - RNA, 19 nt, Homo sapiens
  misc_RNA (1)...(19): siRNA sense strand
gcaaguauaacuggaauau

SEQ ID NO: 2149478 - RNA, 19 nt, Homo sapiens
  misc_RNA (1)...(19): siRNA sense strand
cacaaugcccaaauacuua

SEQ ID NO: 2149479 - RNA, 19 nt, Homo sapiens
  misc_RNA (1)...(19): siRNA sense strand
gaaacagaauacaggaaag

SEQ ID NO: 2149480 - RNA, 19 nt, Homo sapiens
  misc_RNA (1)...(19): siRNA sense strand
cccaaugcaucucugcuua

SEQ ID NO: 2149481 - RNA, 19 nt, Homo sapiens
  misc_RNA (1)...(19): siRNA sense strand
gggaaguguuuacuguuga

SEQ ID NO: 2149482 - RNA, 19 nt, Homo sapiens
  misc_RNA (1)...(19): siRNA sense strand
agaagacaauggacuaugu

SEQ ID NO: 2149483 - RNA, 19 nt, Homo sapiens
  misc_RNA (1)...(19): siRNA sense strand
ucagggaaauggaacucua

SEQ ID NO: 2149484 - RNA, 19 nt, Homo sapiens
  misc_RNA (1)...(19): siRNA sense strand
ucacaguuaucaucacuuc

SEQ ID NO: 2149485 - RNA, 19 nt, Homo sapiens
  misc_RNA (1)...(19): siRNA sense strand
gaaauggaaagugauauca

SEQ ID NO: 2149486 - RNA, 19 nt, Homo sapiens
  misc_RNA (1)...(19): siRNA sense strand
ccacugcaguucccugaug

SEQ ID NO: 2149487 - RNA, 19 nt, Homo sapiens
  misc_RNA (1)...(19): siRNA sense strand
gaaguugcaucugagaaag

SEQ ID NO: 2149488 - RNA, 19 nt, Homo sapiens
  misc_RNA (1)...(19): siRNA sense strand
gggccucgcuuagaaguug

SEQ ID NO: 2149489 - RNA, 19 nt, Homo sapiens
  misc_RNA (1)...(19): siRNA sense strand
gcacucggcuagcuuacca

SEQ ID NO: 2149490 - RNA, 19 nt, Homo sapiens
  misc_RNA (1)...(19): siRNA sense strand
ggaaauggaacucuaucug

SEQ ID NO: 2149491 - RNA, 19 nt, Homo sapiens
  misc_RNA (1)...(19): siRNA sense strand
caucagacauccagaucau

SEQ ID NO: 2149492 - RNA, 19 nt, Homo sapiens
  misc_RNA (1)...(19): siRNA sense strand
ugaggaacccugucaguga

SEQ ID NO: 2149493 - RNA, 19 nt, Homo sapiens
  misc_RNA (1)...(19): siRNA sense strand
caagugaauucugauaaag

SEQ ID NO: 2149494 - RNA, 19 nt, Homo sapiens
  misc_RNA (1)...(19): siRNA sense strand
ccaugaagaugcucuggau

SEQ ID NO: 2149495 - RNA, 19 nt, Homo sapiens
  misc_RNA (1)...(19): siRNA sense strand
ggaauaccaacacaaguuc

SEQ ID NO: 2149496 - RNA, 19 nt, Homo sapiens
  misc_RNA (1)...(19): siRNA sense strand
acacaaugcccaaauacuu

SEQ ID NO: 2149497 - RNA, 19 nt, Homo sapiens
  misc_RNA (1)...(19): siRNA sense strand
gaggccauccuauuugauu

SEQ ID NO: 2149498 - RNA, 19 nt, Homo sapiens
  misc_RNA (1)...(19): siRNA sense strand
caacaccuacuccuggauu

SEQ ID NO: 2149499 - RNA, 19 nt, Homo sapiens
  misc_RNA (1)...(19): siRNA sense strand
gagaaaguagcccagaaga

SEQ ID NO: 2149500 - RNA, 19 nt, Homo sapiens
  misc_RNA (1)...(19): siRNA sense strand
agaaacagaauacaggaaa

SEQ ID NO: 2149501 - RNA, 19 nt, Homo sapiens
  misc_RNA (1)...(19): siRNA sense strand
gaucauauggcuauuugag

SEQ ID NO: 2149502 - RNA, 19 nt, Homo sapiens
  misc_RNA (1)...(19): siRNA sense strand
cuagaaggcaggccagaaa

SEQ ID NO: 2149503 - RNA, 19 nt, Homo sapiens
  misc_RNA (1)...(19): siRNA sense strand
cccacacaaugcccaaaua

SEQ ID NO: 2149504 - RNA, 19 nt, Homo sapiens
  misc_RNA (1)...(19): siRNA sense strand
uggagaggccauccuauuu

SEQ ID NO: 2149505 - RNA, 19 nt, Homo sapiens
  misc_RNA (1)...(19): siRNA sense strand
gaaagugauaucauuaugc

SEQ ID NO: 2149506 - RNA, 19 nt, Homo sapiens
  misc_RNA (1)...(19): siRNA sense strand
caaagccaguggugcagau

SEQ ID NO: 2149507 - RNA, 19 nt, Homo sapiens
  misc_RNA (1)...(19): siRNA sense strand
ggaagacauugggaauuac

SEQ ID NO: 2149508 - RNA, 19 nt, Homo sapiens
  misc_RNA (1)...(19): siRNA sense strand
ggaugacuucggaauauau

SEQ ID NO: 2149509 - RNA, 19 nt, Homo sapiens
  misc_RNA (1)...(19): siRNA sense strand
uggaugacuucggaauaua

SEQ ID NO: 2149510 - RNA, 19 nt, Homo sapiens
  misc_RNA (1)...(19): siRNA sense strand
aagaugcucuggaugacuu

SEQ ID NO: 2149511 - RNA, 19 nt, Homo sapiens
  misc_RNA (1)...(19): siRNA sense strand
ucagacauccagaucauau

SEQ ID NO: 2149512 - RNA, 19 nt, Homo sapiens
  misc_RNA (1)...(19): siRNA sense strand
uuauggaccuuauggacuu

SEQ ID NO: 2149513 - RNA, 19 nt, Homo sapiens
  misc_RNA (1)...(19): siRNA sense strand
gaagacauugggaauuaca

SEQ ID NO: 2149514 - RNA, 19 nt, Homo sapiens
  misc_RNA (1)...(19): siRNA sense strand
caaggaagacauugggaau

SEQ ID NO: 2149515 - RNA, 19 nt, Homo sapiens
  misc_RNA (1)...(19): siRNA sense strand
gaauacaggaaagcucaaa

SEQ ID NO: 2149516 - RNA, 19 nt, Homo sapiens
  misc_RNA (1)...(19): siRNA sense strand
ugucuucucuuccuaugga

SEQ ID NO: 2149517 - RNA, 19 nt, Homo sapiens
  misc_RNA (1)...(19): siRNA sense strand
gaaaggaaaaucauuguca

SEQ ID NO: 2149518 - RNA, 19 nt, Homo sapiens
  misc_RNA (1)...(19): siRNA sense strand
gaagacaauggacuaugug

SEQ ID NO: 2149519 - RNA, 19 nt, Homo sapiens
  misc_RNA (1)...(19): siRNA sense strand
caaugcaucucugcuuauc

SEQ ID NO: 2149520 - RNA, 19 nt, Homo sapiens
  misc_RNA (1)...(19): siRNA sense strand
acaggaaagcucaaacauu

SEQ ID NO: 2149521 - RNA, 19 nt, Homo sapiens
  misc_RNA (1)...(19): siRNA sense strand
ggucaacauucagggaaau

SEQ ID NO: 2149522 - RNA, 19 nt, Homo sapiens
  misc_RNA (1)...(19): siRNA sense strand
cuaccuacccguccacuau

SEQ ID NO: 2149523 - RNA, 19 nt, Homo sapiens
  misc_RNA (1)...(19): siRNA sense strand
ucggcuagcuuaccaaugg

SEQ ID NO: 2149524 - RNA, 19 nt, Homo sapiens
  misc_RNA (1)...(19): siRNA sense strand
agauacaagucacgguuga

SEQ ID NO: 2149525 - RNA, 19 nt, Homo sapiens
  misc_RNA (1)...(19): siRNA sense strand
gaaggugacagugccauca

SEQ ID NO: 2149526 - RNA, 19 nt, Homo sapiens
  misc_RNA (1)...(19): siRNA sense strand
cuggaugacuucggaauau

SEQ ID NO: 2149527 - RNA, 19 nt, Homo sapiens
  misc_RNA (1)...(19): siRNA sense strand
uagcaaguauaacuggaau

SEQ ID NO: 2149528 - RNA, 19 nt, Homo sapiens
  misc_RNA (1)...(19): siRNA sense strand
ggaaaaucauugucaccuu

SEQ ID NO: 2149529 - RNA, 19 nt, Homo sapiens
  misc_RNA (1)...(19): siRNA sense strand
agaaguugcaucugagaaa

SEQ ID NO: 2149530 - RNA, 19 nt, Homo sapiens
  misc_RNA (1)...(19): siRNA sense strand
gaauaagucugugguuccu

SEQ ID NO: 2149531 - RNA, 19 nt, Homo sapiens
  misc_RNA (1)...(19): siRNA sense strand
uugaugauccugucacaaa

SEQ ID NO: 2149532 - RNA, 19 nt, Homo sapiens
  misc_RNA (1)...(19): siRNA sense strand
gacugacaauacuacauau

SEQ ID NO: 2149533 - RNA, 19 nt, Homo sapiens
  misc_RNA (1)...(19): siRNA sense strand
uggaauaccaacacaaguu

SEQ ID NO: 2149534 - RNA, 19 nt, Homo sapiens
  misc_RNA (1)...(19): siRNA sense strand
gcaggcaagaugaaacuca

SEQ ID NO: 2149535 - RNA, 19 nt, Homo sapiens
  misc_RNA (1)...(19): siRNA sense strand
gacuaugugugcugugcuu

SEQ ID NO: 2149536 - RNA, 19 nt, Homo sapiens
  misc_RNA (1)...(19): siRNA sense strand
ggaacccugucagugaaau

SEQ ID NO: 2149537 - RNA, 19 nt, Homo sapiens
  misc_RNA (1)...(19): siRNA sense strand
gugcugugcuuacaacaac

SEQ ID NO: 2149538 - RNA, 19 nt, Homo sapiens
  misc_RNA (1)...(19): siRNA sense strand
uaggaggacugacaauacu

SEQ ID NO: 2149539 - RNA, 19 nt, Homo sapiens
  misc_RNA (1)...(19): siRNA sense strand
augcaucucugcuuaucaa

SEQ ID NO: 2149540 - RNA, 19 nt, Homo sapiens
  misc_RNA (1)...(19): siRNA sense strand
gcaggccagaaacagaaua

SEQ ID NO: 2149541 - RNA, 19 nt, Homo sapiens
  misc_RNA (1)...(19): siRNA sense strand
aaaaguaggggaaguguuu

SEQ ID NO: 2149542 - RNA, 19 nt, Homo sapiens
  misc_RNA (1)...(19): siRNA sense strand
gauaaagggcuaaaaguag

SEQ ID NO: 2149543 - RNA, 19 nt, Homo sapiens
  misc_RNA (1)...(19): siRNA sense strand
cagcuccaccuacuccuuu

SEQ ID NO: 2149544 - RNA, 19 nt, Homo sapiens
  misc_RNA (1)...(19): siRNA sense strand
caaaacaauacccuucaua

SEQ ID NO: 2149545 - RNA, 19 nt, Homo sapiens
  misc_RNA (1)...(19): siRNA sense strand
ggaaguguuuacuguugac

SEQ ID NO: 2149546 - RNA, 19 nt, Homo sapiens
  misc_RNA (1)...(19): siRNA sense strand
acagcugccuggugaggaa

SEQ ID NO: 2149547 - RNA, 19 nt, Homo sapiens
  misc_RNA (1)...(19): siRNA sense strand
ccagaucauauggcuauuu

SEQ ID NO: 2149548 - RNA, 19 nt, Homo sapiens
  misc_RNA (1)...(19): siRNA sense strand
aauaucaacccuacaaagu

SEQ ID NO: 2149549 - RNA, 19 nt, Homo sapiens
  misc_RNA (1)...(19): siRNA sense strand
ggggaaguguuuacuguug

SEQ ID NO: 2149550 - RNA, 19 nt, Homo sapiens
  misc_RNA (1)...(19): siRNA sense strand
ugaaauggaaagugauauc

SEQ ID NO: 2149551 - RNA, 19 nt, Homo sapiens
  misc_RNA (1)...(19): siRNA sense strand
ugacuucggaauauaugaa

SEQ ID NO: 2149552 - RNA, 19 nt, Homo sapiens
  misc_RNA (1)...(19): siRNA sense strand
ucaccuuuagcaaguauaa

SEQ ID NO: 2149553 - RNA, 19 nt, Homo sapiens
  misc_RNA (1)...(19): siRNA sense strand
ggauuaggaggacugacaa

SEQ ID NO: 2149554 - RNA, 19 nt, Homo sapiens
  misc_RNA (1)...(19): siRNA sense strand
aacaccuacuccuggauua

SEQ ID NO: 2149555 - RNA, 19 nt, Homo sapiens
  misc_RNA (1)...(19): siRNA sense strand
gauaucauuaugcccauca

SEQ ID NO: 2149556 - RNA, 19 nt, Homo sapiens
  misc_RNA (1)...(19): siRNA sense strand
caggaaagcucaaacauuu

SEQ ID NO: 2149557 - RNA, 19 nt, Homo sapiens
  misc_RNA (1)...(19): siRNA sense strand
caacacaaguucaccauga

SEQ ID NO: 2149558 - RNA, 19 nt, Homo sapiens
  misc_RNA (1)...(19): siRNA sense strand
uaucaacccuacaaaguua

SEQ ID NO: 2149559 - RNA, 19 nt, Homo sapiens
  misc_RNA (1)...(19): siRNA sense strand
ggacugacaauacuacaua

SEQ ID NO: 2149560 - RNA, 19 nt, Homo sapiens
  misc_RNA (1)...(19): siRNA sense strand
gcaagaccauccagaguga

SEQ ID NO: 2149561 - RNA, 19 nt, Homo sapiens
  misc_RNA (1)...(19): siRNA sense strand
gcaauuacaucgugaaggu

SEQ ID NO: 2149562 - RNA, 19 nt, Homo sapiens
  misc_RNA (1)...(19): siRNA sense strand
ggaaagugauaucauuaug

SEQ ID NO: 2149563 - RNA, 19 nt, Homo sapiens
  misc_RNA (1)...(19): siRNA sense strand
ggagaagcuugcacagaaa

SEQ ID NO: 2149564 - RNA, 19 nt, Homo sapiens
  misc_RNA (1)...(19): siRNA sense strand
gagaggccauccuauuuga

SEQ ID NO: 2149565 - RNA, 19 nt, Homo sapiens
  misc_RNA (1)...(19): siRNA sense strand
gaaaguagcccagaagaca

SEQ ID NO: 2149566 - RNA, 19 nt, Homo sapiens
  misc_RNA (1)...(19): siRNA sense strand
aggaagacauugggaauua

SEQ ID NO: 2149567 - RNA, 19 nt, Homo sapiens
  misc_RNA (1)...(19): siRNA sense strand
gcaugggccucgcuuagaa

SEQ ID NO: 2149568 - RNA, 19 nt, Homo sapiens
  misc_RNA (1)...(19): siRNA sense strand
ucagugaaauggaaaguga

SEQ ID NO: 2149569 - RNA, 19 nt, Homo sapiens
  misc_RNA (1)...(19): siRNA sense strand
uuacugggcucugugaaua

SEQ ID NO: 2149570 - RNA, 19 nt, Homo sapiens
  misc_RNA (1)...(19): siRNA sense strand
gaaaaucauugucaccuuu

SEQ ID NO: 2149571 - RNA, 19 nt, Homo sapiens
  misc_RNA (1)...(19): siRNA sense strand
gcuuagaaguugcaucuga

SEQ ID NO: 2149572 - RNA, 19 nt, Homo sapiens
  misc_RNA (1)...(19): siRNA sense strand
gaggaacccugucagugaa

SEQ ID NO: 2149573 - RNA, 19 nt, Homo sapiens
  misc_RNA (1)...(19): siRNA sense strand
uaucaucacuuccguagga

SEQ ID NO: 2149574 - RNA, 19 nt, Homo sapiens
  misc_RNA (1)...(19): siRNA sense strand
uggagaagcuugcacagaa

SEQ ID NO: 2149575 - RNA, 19 nt, Homo sapiens
  misc_RNA (1)...(19): siRNA sense strand
cagaucauauggcuauuug

SEQ ID NO: 2149576 - RNA, 19 nt, Homo sapiens
  misc_RNA (1)...(19): siRNA sense strand
ggagaggccauccuauuug

SEQ ID NO: 2149577 - RNA, 19 nt, Homo sapiens
  misc_RNA (1)...(19): siRNA sense strand
gcaaguauaacuggaauau

SEQ ID NO: 2149578 - RNA, 19 nt, Homo sapiens
  misc_RNA (1)...(19): siRNA sense strand
cacaaugcccaaauacuua

SEQ ID NO: 2149579 - RNA, 19 nt, Homo sapiens
  misc_RNA (1)...(19): siRNA sense strand
gaaacagaauacaggaaag

SEQ ID NO: 2149580 - RNA, 19 nt, Homo sapiens
  misc_RNA (1)...(19): siRNA sense strand
cccaaugcaucucugcuua

SEQ ID NO: 2149581 - RNA, 19 nt, Homo sapiens
  misc_RNA (1)...(19): siRNA sense strand
gggaaguguuuacuguuga

SEQ ID NO: 2149582 - RNA, 19 nt, Homo sapiens
  misc_RNA (1)...(19): siRNA sense strand
agaagacaauggacuaugu

SEQ ID NO: 2149583 - RNA, 19 nt, Homo sapiens
  misc_RNA (1)...(19): siRNA sense strand
ucagggaaauggaacucua

SEQ ID NO: 2149584 - RNA, 19 nt, Homo sapiens
  misc_RNA (1)...(19): siRNA sense strand
ucacaguuaucaucacuuc

SEQ ID NO: 2149585 - RNA, 19 nt, Homo sapiens
  misc_RNA (1)...(19): siRNA sense strand
gaaauggaaagugauauca

SEQ ID NO: 2149586 - RNA, 19 nt, Homo sapiens
  misc_RNA (1)...(19): siRNA sense strand
ccacugcaguucccugaug

SEQ ID NO: 2149587 - RNA, 19 nt, Homo sapiens
  misc_RNA (1)...(19): siRNA sense strand
gaaguugcaucugagaaag

SEQ ID NO: 2149588 - RNA, 19 nt, Homo sapiens
  misc_RNA (1)...(19): siRNA sense strand
gggccucgcuuagaaguug

SEQ ID NO: 2149589 - RNA, 19 nt, Homo sapiens
  misc_RNA (1)...(19): siRNA sense strand
gcacucggcuagcuuacca

SEQ ID NO: 2149590 - RNA, 19 nt, Homo sapiens
  misc_RNA (1)...(19): siRNA sense strand
ggaaauggaacucuaucug

SEQ ID NO: 2149591 - RNA, 19 nt, Homo sapiens
  misc_RNA (1)...(19): siRNA sense strand
caucagacauccagaucau

SEQ ID NO: 2149592 - RNA, 19 nt, Homo sapiens
  misc_RNA (1)...(19): siRNA sense strand
ugaggaacccugucaguga

SEQ ID NO: 2149593 - RNA, 19 nt, Homo sapiens
  misc_RNA (1)...(19): siRNA sense strand
caagugaauucugauaaag

SEQ ID NO: 2149594 - RNA, 19 nt, Homo sapiens
  misc_RNA (1)...(19): siRNA sense strand
ccaugaagaugcucuggau

SEQ ID NO: 2149595 - RNA, 19 nt, Homo sapiens
  misc_RNA (1)...(19): siRNA sense strand
ggaauaccaacacaaguuc

SEQ ID NO: 2149596 - RNA, 19 nt, Homo sapiens
  misc_RNA (1)...(19): siRNA sense strand
acacaaugcccaaauacuu

SEQ ID NO: 2149597 - RNA, 19 nt, Homo sapiens
  misc_RNA (1)...(19): siRNA sense strand
gaggccauccuauuugauu

SEQ ID NO: 2149598 - RNA, 19 nt, Homo sapiens
  misc_RNA (1)...(19): siRNA sense strand
caacaccuacuccuggauu

SEQ ID NO: 2149599 - RNA, 19 nt, Homo sapiens
  misc_RNA (1)...(19): siRNA sense strand
gagaaaguagcccagaaga

SEQ ID NO: 2149600 - RNA, 19 nt, Homo sapiens
  misc_RNA (1)...(19): siRNA sense strand
agaaacagaauacaggaaa

SEQ ID NO: 2149601 - RNA, 19 nt, Homo sapiens
  misc_RNA (1)...(19): siRNA sense strand
gaucauauggcuauuugag

SEQ ID NO: 2149602 - RNA, 19 nt, Homo sapiens
  misc_RNA (1)...(19): siRNA sense strand
cuagaaggcaggccagaaa

SEQ ID NO: 2149603 - RNA, 19 nt, Homo sapiens
  misc_RNA (1)...(19): siRNA sense strand
cccacacaaugcccaaaua

SEQ ID NO: 2149604 - RNA, 19 nt, Homo sapiens
  misc_RNA (1)...(19): siRNA sense strand
uggagaggccauccuauuu

SEQ ID NO: 2149605 - RNA, 19 nt, Homo sapiens
  misc_RNA (1)...(19): siRNA sense strand
gaaagugauaucauuaugc

SEQ ID NO: 2149606 - RNA, 19 nt, Homo sapiens
  misc_RNA (1)...(19): siRNA sense strand
caaagccaguggugcagau

SEQ ID NO: 2149607 - RNA, 19 nt, Homo sapiens
  misc_RNA (1)...(19): siRNA sense strand
ggaagacauugggaauuac

SEQ ID NO: 2149608 - RNA, 19 nt, Homo sapiens
  misc_RNA (1)...(19): siRNA sense strand
ggaugacuucggaauauau

SEQ ID NO: 2149609 - RNA, 19 nt, Homo sapiens
  misc_RNA (1)...(19): siRNA sense strand
uggaugacuucggaauaua

SEQ ID NO: 2149610 - RNA, 19 nt, Homo sapiens
  misc_RNA (1)...(19): siRNA sense strand
aagaugcucuggaugacuu

SEQ ID NO: 2149611 - RNA, 19 nt, Homo sapiens
  misc_RNA (1)...(19): siRNA sense strand
ucagacauccagaucauau

SEQ ID NO: 2149612 - RNA, 19 nt, Homo sapiens
  misc_RNA (1)...(19): siRNA sense strand
uuauggaccuuauggacuu

SEQ ID NO: 2149613 - RNA, 19 nt, Homo sapiens
  misc_RNA (1)...(19): siRNA sense strand
gaagacauugggaauuaca

SEQ ID NO: 2149614 - RNA, 19 nt, Homo sapiens
  misc_RNA (1)...(19): siRNA sense strand
caaggaagacauugggaau

SEQ ID NO: 2149615 - RNA, 19 nt, Homo sapiens
  misc_RNA (1)...(19): siRNA sense strand
gaauacaggaaagcucaaa

SEQ ID NO: 2149616 - RNA, 19 nt, Homo sapiens
  misc_RNA (1)...(19): siRNA sense strand
ugucuucucuuccuaugga

SEQ ID NO: 2149617 - RNA, 19 nt, Homo sapiens
  misc_RNA (1)...(19): siRNA sense strand
gaaaggaaaaucauuguca

SEQ ID NO: 2149618 - RNA, 19 nt, Homo sapiens
  misc_RNA (1)...(19): siRNA sense strand
gaagacaauggacuaugug

SEQ ID NO: 2149619 - RNA, 19 nt, Homo sapiens
  misc_RNA (1)...(19): siRNA sense strand
caaugcaucucugcuuauc

SEQ ID NO: 2149620 - RNA, 19 nt, Homo sapiens
  misc_RNA (1)...(19): siRNA sense strand
acaggaaagcucaaacauu

SEQ ID NO: 2149621 - RNA, 19 nt, Homo sapiens
  misc_RNA (1)...(19): siRNA sense strand
ggucaacauucagggaaau

SEQ ID NO: 2149622 - RNA, 19 nt, Homo sapiens
  misc_RNA (1)...(19): siRNA sense strand
cuaccuacccguccacuau

SEQ ID NO: 2149623 - RNA, 19 nt, Homo sapiens
  misc_RNA (1)...(19): siRNA sense strand
ucggcuagcuuaccaaugg

SEQ ID NO: 2149624 - RNA, 19 nt, Homo sapiens
  misc_RNA (1)...(19): siRNA sense strand
agauacaagucacgguuga

SEQ ID NO: 2149625 - RNA, 19 nt, Homo sapiens
  misc_RNA (1)...(19): siRNA sense strand
gaaggugacagugccauca

SEQ ID NO: 2149626 - RNA, 19 nt, Homo sapiens
  misc_RNA (1)...(19): siRNA sense strand
cuggaugacuucggaauau

SEQ ID NO: 2149627 - RNA, 19 nt, Homo sapiens
  misc_RNA (1)...(19): siRNA sense strand
uagcaaguauaacuggaau

SEQ ID NO: 2149628 - RNA, 19 nt, Homo sapiens
  misc_RNA (1)...(19): siRNA sense strand
ggaaaaucauugucaccuu

SEQ ID NO: 2149629 - RNA, 19 nt, Homo sapiens
  misc_RNA (1)...(19): siRNA sense strand
agaaguugcaucugagaaa

SEQ ID NO: 2149630 - RNA, 19 nt, Homo sapiens
  misc_RNA (1)...(19): siRNA sense strand
gaauaagucugugguuccu

SEQ ID NO: 2149631 - RNA, 19 nt, Homo sapiens
  misc_RNA (1)...(19): siRNA sense strand
uugaugauccugucacaaa

SEQ ID NO: 2149632 - RNA, 19 nt, Homo sapiens
  misc_RNA (1)...(19): siRNA sense strand
gacugacaauacuacauau

SEQ ID NO: 2149633 - RNA, 19 nt, Homo sapiens
  misc_RNA (1)...(19): siRNA sense strand
uggaauaccaacacaaguu

SEQ ID NO: 2149634 - RNA, 19 nt, Homo sapiens
  misc_RNA (1)...(19): siRNA sense strand
gcaggcaagaugaaacuca

SEQ ID NO: 2149635 - RNA, 19 nt, Homo sapiens
  misc_RNA (1)...(19): siRNA sense strand
gacuaugugugcugugcuu

SEQ ID NO: 2149636 - RNA, 19 nt, Homo sapiens
  misc_RNA (1)...(19): siRNA sense strand
ggaacccugucagugaaau

SEQ ID NO: 2149637 - RNA, 19 nt, Homo sapiens
  misc_RNA (1)...(19): siRNA sense strand
gugcugugcuuacaacaac

SEQ ID NO: 2149638 - RNA, 19 nt, Homo sapiens
  misc_RNA (1)...(19): siRNA sense strand
uaggaggacugacaauacu

SEQ ID NO: 2149639 - RNA, 19 nt, Homo sapiens
  misc_RNA (1)...(19): siRNA sense strand
augcaucucugcuuaucaa

SEQ ID NO: 2149640 - RNA, 19 nt, Homo sapiens
  misc_RNA (1)...(19): siRNA sense strand
gcaggccagaaacagaaua

SEQ ID NO: 2149641 - RNA, 19 nt, Homo sapiens
  misc_RNA (1)...(19): siRNA sense strand
aaaaguaggggaaguguuu

SEQ ID NO: 2149642 - RNA, 19 nt, Homo sapiens
  misc_RNA (1)...(19): siRNA sense strand
gauaaagggcuaaaaguag

SEQ ID NO: 2149643 - RNA, 19 nt, Homo sapiens
  misc_RNA (1)...(19): siRNA sense strand
cagcuccaccuacuccuuu

SEQ ID NO: 2149644 - RNA, 19 nt, Homo sapiens
  misc_RNA (1)...(19): siRNA sense strand
caaaacaauacccuucaua

SEQ ID NO: 2149645 - RNA, 19 nt, Homo sapiens
  misc_RNA (1)...(19): siRNA sense strand
ggaaguguuuacuguugac

SEQ ID NO: 2149646 - RNA, 19 nt, Homo sapiens
  misc_RNA (1)...(19): siRNA sense strand
acagcugccuggugaggaa

SEQ ID NO: 2149647 - RNA, 19 nt, Homo sapiens
  misc_RNA (1)...(19): siRNA sense strand
ccagaucauauggcuauuu

SEQ ID NO: 2149648 - RNA, 19 nt, Homo sapiens
  misc_RNA (1)...(19): siRNA sense strand
aauaucaacccuacaaagu

SEQ ID NO: 2149649 - RNA, 19 nt, Homo sapiens
  misc_RNA (1)...(19): siRNA sense strand
ggggaaguguuuacuguug

SEQ ID NO: 2149650 - RNA, 19 nt, Homo sapiens
  misc_RNA (1)...(19): siRNA sense strand
ugaaauggaaagugauauc

SEQ ID NO: 2149651 - RNA, 19 nt, Homo sapiens
  misc_RNA (1)...(19): siRNA sense strand
ugacuucggaauauaugaa

SEQ ID NO: 2149652 - RNA, 19 nt, Homo sapiens
  misc_RNA (1)...(19): siRNA sense strand
ucaccuuuagcaaguauaa

SEQ ID NO: 2149653 - RNA, 19 nt, Homo sapiens
  misc_RNA (1)...(19): siRNA sense strand
ggauuaggaggacugacaa

SEQ ID NO: 2149654 - RNA, 19 nt, Homo sapiens
  misc_RNA (1)...(19): siRNA sense strand
aacaccuacuccuggauua

SEQ ID NO: 2149655 - RNA, 19 nt, Homo sapiens
  misc_RNA (1)...(19): siRNA sense strand
gauaucauuaugcccauca

SEQ ID NO: 2149656 - RNA, 19 nt, Homo sapiens
  misc_RNA (1)...(19): siRNA sense strand
ggaaucagcugagaaacuu

SEQ ID NO: 2149657 - RNA, 19 nt, Homo sapiens
  misc_RNA (1)...(19): siRNA sense strand
ggcaaacccuucaaucaaa

SEQ ID NO: 2149658 - RNA, 19 nt, Homo sapiens
  misc_RNA (1)...(19): siRNA sense strand
agacagcggucagcucuua

SEQ ID NO: 2149659 - RNA, 19 nt, Homo sapiens
  misc_RNA (1)...(19): siRNA sense strand
gaacauaagaggauucaca

SEQ ID NO: 2149660 - RNA, 19 nt, Homo sapiens
  misc_RNA (1)...(19): siRNA sense strand
gagcaaagucuuaugaaug

SEQ ID NO: 2149661 - RNA, 19 nt, Homo sapiens
  misc_RNA (1)...(19): siRNA sense strand
gcaggaaucagcugagaaa

SEQ ID NO: 2149662 - RNA, 19 nt, Homo sapiens
  misc_RNA (1)...(19): siRNA sense strand
gagaugugauguuggagaa

SEQ ID NO: 2149663 - RNA, 19 nt, Homo sapiens
  misc_RNA (1)...(19): siRNA sense strand
gggcagauaugaugaggau

SEQ ID NO: 2149664 - RNA, 19 nt, Homo sapiens
  misc_RNA (1)...(19): siRNA sense strand
gaggaauucuuucaaugug

SEQ ID NO: 2149665 - RNA, 19 nt, Homo sapiens
  misc_RNA (1)...(19): siRNA sense strand
agucagaauucaacccuua

SEQ ID NO: 2149666 - RNA, 19 nt, Homo sapiens
  misc_RNA (1)...(19): siRNA sense strand
guggacaguugcaggcuua

SEQ ID NO: 2149667 - RNA, 19 nt, Homo sapiens
  misc_RNA (1)...(19): siRNA sense strand
guaaaccgaacacccauaa

SEQ ID NO: 2149668 - RNA, 19 nt, Homo sapiens
  misc_RNA (1)...(19): siRNA sense strand
uaagaggauucacaccaaa

SEQ ID NO: 2149669 - RNA, 19 nt, Homo sapiens
  misc_RNA (1)...(19): siRNA sense strand
gcacacaagcuuuauuaag

SEQ ID NO: 2149670 - RNA, 19 nt, Homo sapiens
  misc_RNA (1)...(19): siRNA sense strand
caucaaagaauccauacaa

SEQ ID NO: 2149671 - RNA, 19 nt, Homo sapiens
  misc_RNA (1)...(19): siRNA sense strand
ccagggcacucacaaagga

SEQ ID NO: 2149672 - RNA, 19 nt, Homo sapiens
  misc_RNA (1)...(19): siRNA sense strand
cuaccaaugugucauaugu

SEQ ID NO: 2149673 - RNA, 19 nt, Homo sapiens
  misc_RNA (1)...(19): siRNA sense strand
ggaggaauucuuucaaugu

SEQ ID NO: 2149674 - RNA, 19 nt, Homo sapiens
  misc_RNA (1)...(19): siRNA sense strand
gcaaacccuucaaucaaag

SEQ ID NO: 2149675 - RNA, 19 nt, Homo sapiens
  misc_RNA (1)...(19): siRNA sense strand
cugaagauuuagagucaua

SEQ ID NO: 2149676 - RNA, 19 nt, Homo sapiens
  misc_RNA (1)...(19): siRNA sense strand
caaagaauccauacaaagg

SEQ ID NO: 2149677 - RNA, 19 nt, Homo sapiens
  misc_RNA (1)...(19): siRNA sense strand
uaagauaucagugguaaug

SEQ ID NO: 2149678 - RNA, 19 nt, Homo sapiens
  misc_RNA (1)...(19): siRNA sense strand
gcauucaacccuucuaugu

SEQ ID NO: 2149679 - RNA, 19 nt, Homo sapiens
  misc_RNA (1)...(19): siRNA sense strand
ggaagcagggcagauauga

SEQ ID NO: 2149680 - RNA, 19 nt, Homo sapiens
  misc_RNA (1)...(19): siRNA sense strand
gaagccaacccuaccaaug

SEQ ID NO: 2149681 - RNA, 19 nt, Homo sapiens
  misc_RNA (1)...(19): siRNA sense strand
gaagccagacacaagauga

SEQ ID NO: 2149682 - RNA, 19 nt, Homo sapiens
  misc_RNA (1)...(19): siRNA sense strand
cuaccgagaugugauguug

SEQ ID NO: 2149683 - RNA, 19 nt, Homo sapiens
  misc_RNA (1)...(19): siRNA sense strand
uggcacacaagcuuuauua

SEQ ID NO: 2149684 - RNA, 19 nt, Homo sapiens
  misc_RNA (1)...(19): siRNA sense strand
gaucagaaugcgcaaacaa

SEQ ID NO: 2149685 - RNA, 19 nt, Homo sapiens
  misc_RNA (1)...(19): siRNA sense strand
gaucaacaucaaagaauuc

SEQ ID NO: 2149686 - RNA, 19 nt, Homo sapiens
  misc_RNA (1)...(19): siRNA sense strand
gaaaagucauuaggcguaa

SEQ ID NO: 2149687 - RNA, 19 nt, Homo sapiens
  misc_RNA (1)...(19): siRNA sense strand
aaacaagccauacagaugu

SEQ ID NO: 2149688 - RNA, 19 nt, Homo sapiens
  misc_RNA (1)...(19): siRNA sense strand
gguggaagcagggcagaua

SEQ ID NO: 2149689 - RNA, 19 nt, Homo sapiens
  misc_RNA (1)...(19): siRNA sense strand
aucaacagauucacaguaa

SEQ ID NO: 2149690 - RNA, 19 nt, Homo sapiens
  misc_RNA (1)...(19): siRNA sense strand
uaaacagugucaccugcaa

SEQ ID NO: 2149691 - RNA, 19 nt, Homo sapiens
  misc_RNA (1)...(19): siRNA sense strand
uaaagaauuuguggacagu

SEQ ID NO: 2149692 - RNA, 19 nt, Homo sapiens
  misc_RNA (1)...(19): siRNA sense strand
cagcaucaaagaauccaua

SEQ ID NO: 2149693 - RNA, 19 nt, Homo sapiens
  misc_RNA (1)...(19): siRNA sense strand
caucaacagauucacagua

SEQ ID NO: 2149694 - RNA, 19 nt, Homo sapiens
  misc_RNA (1)...(19): siRNA sense strand
gcucgcguaucuuguugaa

SEQ ID NO: 2149695 - RNA, 19 nt, Homo sapiens
  misc_RNA (1)...(19): siRNA sense strand
aagaauuuguggacaguug

SEQ ID NO: 2149696 - RNA, 19 nt, Homo sapiens
  misc_RNA (1)...(19): siRNA sense strand
gcaccagggcacucacaaa

SEQ ID NO: 2149697 - RNA, 19 nt, Homo sapiens
  misc_RNA (1)...(19): siRNA sense strand
aaaccgaacacccauaaau

SEQ ID NO: 2149698 - RNA, 19 nt, Homo sapiens
  misc_RNA (1)...(19): siRNA sense strand
gcagcucgcguaucuuguu

SEQ ID NO: 2149699 - RNA, 19 nt, Homo sapiens
  misc_RNA (1)...(19): siRNA sense strand
cuacuaguggugaugaaua

SEQ ID NO: 2149700 - RNA, 19 nt, Homo sapiens
  misc_RNA (1)...(19): siRNA sense strand
guaggaauguggaucucau

SEQ ID NO: 2149701 - RNA, 19 nt, Homo sapiens
  misc_RNA (1)...(19): siRNA sense strand
auaagaggauucacaccaa

SEQ ID NO: 2149702 - RNA, 19 nt, Homo sapiens
  misc_RNA (1)...(19): siRNA sense strand
agagcaaagucuuaugaau

SEQ ID NO: 2149703 - RNA, 19 nt, Homo sapiens
  misc_RNA (1)...(19): siRNA sense strand
cgauguacuucaccagaga

SEQ ID NO: 2149704 - RNA, 19 nt, Homo sapiens
  misc_RNA (1)...(19): siRNA sense strand
uugaggauguggcgaugua

SEQ ID NO: 2149705 - RNA, 19 nt, Homo sapiens
  misc_RNA (1)...(19): siRNA sense strand
aggcuuacuuucccuacua

SEQ ID NO: 2149706 - RNA, 19 nt, Homo sapiens
  misc_RNA (1)...(19): siRNA sense strand
caacagauucacaguaaac

SEQ ID NO: 2149707 - RNA, 19 nt, Homo sapiens
  misc_RNA (1)...(19): siRNA sense strand
ucaacagauucacaguaaa

SEQ ID NO: 2149708 - RNA, 19 nt, Homo sapiens
  misc_RNA (1)...(19): siRNA sense strand
ccauacagaugucaugacu

SEQ ID NO: 2149709 - RNA, 19 nt, Homo sapiens
  misc_RNA (1)...(19): siRNA sense strand
cguaaggcaugguuugauc

SEQ ID NO: 2149710 - RNA, 19 nt, Homo sapiens
  misc_RNA (1)...(19): siRNA sense strand
gguagugcuugcccagguu

SEQ ID NO: 2149711 - RNA, 19 nt, Homo sapiens
  misc_RNA (1)...(19): siRNA sense strand
aaggaggaauucuuucaau

SEQ ID NO: 2149712 - RNA, 19 nt, Homo sapiens
  misc_RNA (1)...(19): siRNA sense strand
ucaaagaauccauacaaag

SEQ ID NO: 2149713 - RNA, 19 nt, Homo sapiens
  misc_RNA (1)...(19): siRNA sense strand
auucaacccuucuauguca

SEQ ID NO: 2149714 - RNA, 19 nt, Homo sapiens
  misc_RNA (1)...(19): siRNA sense strand
uggcaaacccuucaaucaa

SEQ ID NO: 2149715 - RNA, 19 nt, Homo sapiens
  misc_RNA (1)...(19): siRNA sense strand
ccauaaaugccuugagugu

SEQ ID NO: 2149716 - RNA, 19 nt, Homo sapiens
  misc_RNA (1)...(19): siRNA sense strand
cgaauucucacaagagcaa

SEQ ID NO: 2149717 - RNA, 19 nt, Homo sapiens
  misc_RNA (1)...(19): siRNA sense strand
caaugugucauauguggaa

SEQ ID NO: 2149718 - RNA, 19 nt, Homo sapiens
  misc_RNA (1)...(19): siRNA sense strand
gaucucauucagcaucaaa

SEQ ID NO: 2149719 - RNA, 19 nt, Homo sapiens
  misc_RNA (1)...(19): siRNA sense strand
ccauaaaugcagugaaugu

SEQ ID NO: 2149720 - RNA, 19 nt, Homo sapiens
  misc_RNA (1)...(19): siRNA sense strand
cgccauaaaugccuugagu

SEQ ID NO: 2149721 - RNA, 19 nt, Homo sapiens
  misc_RNA (1)...(19): siRNA sense strand
ugucaugacuguggaaagu

SEQ ID NO: 2149722 - RNA, 19 nt, Homo sapiens
  misc_RNA (1)...(19): siRNA sense strand
aaggacagauauccacaug

SEQ ID NO: 2149723 - RNA, 19 nt, Homo sapiens
  misc_RNA (1)...(19): siRNA sense strand
acccauaaaugcagugaau

SEQ ID NO: 2149724 - RNA, 19 nt, Homo sapiens
  misc_RNA (1)...(19): siRNA sense strand
cuucaaaaccuuaaccuua

SEQ ID NO: 2149725 - RNA, 19 nt, Homo sapiens
  misc_RNA (1)...(19): siRNA sense strand
caaguggcacacaagcuuu

SEQ ID NO: 2149726 - RNA, 19 nt, Homo sapiens
  misc_RNA (1)...(19): siRNA sense strand
ucaaguggcacacaagcuu

SEQ ID NO: 2149727 - RNA, 19 nt, Homo sapiens
  misc_RNA (1)...(19): siRNA sense strand
ucuaugucaucaacagauu

SEQ ID NO: 2149728 - RNA, 19 nt, Homo sapiens
  misc_RNA (1)...(19): siRNA sense strand
caacaucaaagaauucacu

SEQ ID NO: 2149729 - RNA, 19 nt, Homo sapiens
  misc_RNA (1)...(19): siRNA sense strand
cagaaaaguuacauaagug

SEQ ID NO: 2149730 - RNA, 19 nt, Homo sapiens
  misc_RNA (1)...(19): siRNA sense strand
ucugucagcuggagaacug

SEQ ID NO: 2149731 - RNA, 19 nt, Homo sapiens
  misc_RNA (1)...(19): siRNA sense strand
gagcgaauucucacaagag

SEQ ID NO: 2149732 - RNA, 19 nt, Homo sapiens
  misc_RNA (1)...(19): siRNA sense strand
aagcagggcagauaugaug

SEQ ID NO: 2149733 - RNA, 19 nt, Homo sapiens
  misc_RNA (1)...(19): siRNA sense strand
gaugugauguuggagaacu

SEQ ID NO: 2149734 - RNA, 19 nt, Homo sapiens
  misc_RNA (1)...(19): siRNA sense strand
gaggauggcaaacccuuca

SEQ ID NO: 2149735 - RNA, 19 nt, Homo sapiens
  misc_RNA (1)...(19): siRNA sense strand
aggaggaauucuuucaaug

SEQ ID NO: 2149736 - RNA, 19 nt, Homo sapiens
  misc_RNA (1)...(19): siRNA sense strand
auacaaaggaggaauucuu

SEQ ID NO: 2149737 - RNA, 19 nt, Homo sapiens
  misc_RNA (1)...(19): siRNA sense strand
aaagaauccauacaaagga

SEQ ID NO: 2149738 - RNA, 19 nt, Homo sapiens
  misc_RNA (1)...(19): siRNA sense strand
ucaugacuguggaaagugu

SEQ ID NO: 2149739 - RNA, 19 nt, Homo sapiens
  misc_RNA (1)...(19): siRNA sense strand
gacaguugcaggcuuacuu

SEQ ID NO: 2149740 - RNA, 19 nt, Homo sapiens
  misc_RNA (1)...(19): siRNA sense strand
cgagaacugggaauaggaa

SEQ ID NO: 2149741 - RNA, 19 nt, Homo sapiens
  misc_RNA (1)...(19): siRNA sense strand
gaaggaccucuaccgagau

SEQ ID NO: 2149742 - RNA, 19 nt, Homo sapiens
  misc_RNA (1)...(19): siRNA sense strand
gaggauucacaccaaagaa

SEQ ID NO: 2149743 - RNA, 19 nt, Homo sapiens
  misc_RNA (1)...(19): siRNA sense strand
cagcucgcguaucuuguug

SEQ ID NO: 2149744 - RNA, 19 nt, Homo sapiens
  misc_RNA (1)...(19): siRNA sense strand
agcaaagucuuaugaaugc

SEQ ID NO: 2149745 - RNA, 19 nt, Homo sapiens
  misc_RNA (1)...(19): siRNA sense strand
gaagcagggcagauaugau

SEQ ID NO: 2149746 - RNA, 19 nt, Homo sapiens
  misc_RNA (1)...(19): siRNA sense strand
cuaccgagaacugggaaua

SEQ ID NO: 2149747 - RNA, 19 nt, Homo sapiens
  misc_RNA (1)...(19): siRNA sense strand
ggaagccaacccuaccaau

SEQ ID NO: 2149748 - RNA, 19 nt, Homo sapiens
  misc_RNA (1)...(19): siRNA sense strand
cgacaucaggucauucaca

SEQ ID NO: 2149749 - RNA, 19 nt, Homo sapiens
  misc_RNA (1)...(19): siRNA sense strand
ucccaaaccugagaugauc

SEQ ID NO: 2149750 - RNA, 19 nt, Homo sapiens
  misc_RNA (1)...(19): siRNA sense strand
ggaccucuaccgagaugug

SEQ ID NO: 2149751 - RNA, 19 nt, Homo sapiens
  misc_RNA (1)...(19): siRNA sense strand
gaaugcagugaauguggaa

SEQ ID NO: 2149752 - RNA, 19 nt, Homo sapiens
  misc_RNA (1)...(19): siRNA sense strand
aagccaacccuaccaaugu

SEQ ID NO: 2149753 - RNA, 19 nt, Homo sapiens
  misc_RNA (1)...(19): siRNA sense strand
ggagaacuacaggaacaug

SEQ ID NO: 2149754 - RNA, 19 nt, Homo sapiens
  misc_RNA (1)...(19): siRNA sense strand
cggcagcucgcguaucuug

SEQ ID NO: 2149755 - RNA, 19 nt, Homo sapiens
  misc_RNA (1)...(19): siRNA sense strand
aggcaugguuugaucaaca

SEQ ID NO: 2149756 - RNA, 19 nt, Homo sapiens
  misc_RNA (1)...(19): siRNA sense strand
ggaaucagcugagaaacuu

SEQ ID NO: 2149757 - RNA, 19 nt, Homo sapiens
  misc_RNA (1)...(19): siRNA sense strand
ggcaaacccuucaaucaaa

SEQ ID NO: 2149758 - RNA, 19 nt, Homo sapiens
  misc_RNA (1)...(19): siRNA sense strand
agacagcggucagcucuua

SEQ ID NO: 2149759 - RNA, 19 nt, Homo sapiens
  misc_RNA (1)...(19): siRNA sense strand
gaacauaagaggauucaca

SEQ ID NO: 2149760 - RNA, 19 nt, Homo sapiens
  misc_RNA (1)...(19): siRNA sense strand
gagcaaagucuuaugaaug

SEQ ID NO: 2149761 - RNA, 19 nt, Homo sapiens
  misc_RNA (1)...(19): siRNA sense strand
gcaggaaucagcugagaaa

SEQ ID NO: 2149762 - RNA, 19 nt, Homo sapiens
  misc_RNA (1)...(19): siRNA sense strand
gagaugugauguuggagaa

SEQ ID NO: 2149763 - RNA, 19 nt, Homo sapiens
  misc_RNA (1)...(19): siRNA sense strand
gggcagauaugaugaggau

SEQ ID NO: 2149764 - RNA, 19 nt, Homo sapiens
  misc_RNA (1)...(19): siRNA sense strand
gaggaauucuuucaaugug

SEQ ID NO: 2149765 - RNA, 19 nt, Homo sapiens
  misc_RNA (1)...(19): siRNA sense strand
agucagaauucaacccuua

SEQ ID NO: 2149766 - RNA, 19 nt, Homo sapiens
  misc_RNA (1)...(19): siRNA sense strand
guggacaguugcaggcuua

SEQ ID NO: 2149767 - RNA, 19 nt, Homo sapiens
  misc_RNA (1)...(19): siRNA sense strand
guaaaccgaacacccauaa

SEQ ID NO: 2149768 - RNA, 19 nt, Homo sapiens
  misc_RNA (1)...(19): siRNA sense strand
uaagaggauucacaccaaa

SEQ ID NO: 2149769 - RNA, 19 nt, Homo sapiens
  misc_RNA (1)...(19): siRNA sense strand
gcacacaagcuuuauuaag

SEQ ID NO: 2149770 - RNA, 19 nt, Homo sapiens
  misc_RNA (1)...(19): siRNA sense strand
caucaaagaauccauacaa

SEQ ID NO: 2149771 - RNA, 19 nt, Homo sapiens
  misc_RNA (1)...(19): siRNA sense strand
ccagggcacucacaaagga

SEQ ID NO: 2149772 - RNA, 19 nt, Homo sapiens
  misc_RNA (1)...(19): siRNA sense strand
cuaccaaugugucauaugu

SEQ ID NO: 2149773 - RNA, 19 nt, Homo sapiens
  misc_RNA (1)...(19): siRNA sense strand
ggaggaauucuuucaaugu

SEQ ID NO: 2149774 - RNA, 19 nt, Homo sapiens
  misc_RNA (1)...(19): siRNA sense strand
gcaaacccuucaaucaaag

SEQ ID NO: 2149775 - RNA, 19 nt, Homo sapiens
  misc_RNA (1)...(19): siRNA sense strand
cugaagauuuagagucaua

SEQ ID NO: 2149776 - RNA, 19 nt, Homo sapiens
  misc_RNA (1)...(19): siRNA sense strand
caaagaauccauacaaagg

SEQ ID NO: 2149777 - RNA, 19 nt, Homo sapiens
  misc_RNA (1)...(19): siRNA sense strand
uaagauaucagugguaaug

SEQ ID NO: 2149778 - RNA, 19 nt, Homo sapiens
  misc_RNA (1)...(19): siRNA sense strand
gcauucaacccuucuaugu

SEQ ID NO: 2149779 - RNA, 19 nt, Homo sapiens
  misc_RNA (1)...(19): siRNA sense strand
ggaagcagggcagauauga

SEQ ID NO: 2149780 - RNA, 19 nt, Homo sapiens
  misc_RNA (1)...(19): siRNA sense strand
gaagccaacccuaccaaug

SEQ ID NO: 2149781 - RNA, 19 nt, Homo sapiens
  misc_RNA (1)...(19): siRNA sense strand
gaagccagacacaagauga

SEQ ID NO: 2149782 - RNA, 19 nt, Homo sapiens
  misc_RNA (1)...(19): siRNA sense strand
cuaccgagaugugauguug

SEQ ID NO: 2149783 - RNA, 19 nt, Homo sapiens
  misc_RNA (1)...(19): siRNA sense strand
uggcacacaagcuuuauua

SEQ ID NO: 2149784 - RNA, 19 nt, Homo sapiens
  misc_RNA (1)...(19): siRNA sense strand
gaucagaaugcgcaaacaa

SEQ ID NO: 2149785 - RNA, 19 nt, Homo sapiens
  misc_RNA (1)...(19): siRNA sense strand
gaucaacaucaaagaauuc

SEQ ID NO: 2149786 - RNA, 19 nt, Homo sapiens
  misc_RNA (1)...(19): siRNA sense strand
gaaaagucauuaggcguaa

SEQ ID NO: 2149787 - RNA, 19 nt, Homo sapiens
  misc_RNA (1)...(19): siRNA sense strand
aaacaagccauacagaugu

SEQ ID NO: 2149788 - RNA, 19 nt, Homo sapiens
  misc_RNA (1)...(19): siRNA sense strand
gguggaagcagggcagaua

SEQ ID NO: 2149789 - RNA, 19 nt, Homo sapiens
  misc_RNA (1)...(19): siRNA sense strand
aucaacagauucacaguaa

SEQ ID NO: 2149790 - RNA, 19 nt, Homo sapiens
  misc_RNA (1)...(19): siRNA sense strand
uaaacagugucaccugcaa

SEQ ID NO: 2149791 - RNA, 19 nt, Homo sapiens
  misc_RNA (1)...(19): siRNA sense strand
uaaagaauuuguggacagu

SEQ ID NO: 2149792 - RNA, 19 nt, Homo sapiens
  misc_RNA (1)...(19): siRNA sense strand
cagcaucaaagaauccaua

SEQ ID NO: 2149793 - RNA, 19 nt, Homo sapiens
  misc_RNA (1)...(19): siRNA sense strand
caucaacagauucacagua

SEQ ID NO: 2149794 - RNA, 19 nt, Homo sapiens
  misc_RNA (1)...(19): siRNA sense strand
gcucgcguaucuuguugaa

SEQ ID NO: 2149795 - RNA, 19 nt, Homo sapiens
  misc_RNA (1)...(19): siRNA sense strand
aagaauuuguggacaguug

SEQ ID NO: 2149796 - RNA, 19 nt, Homo sapiens
  misc_RNA (1)...(19): siRNA sense strand
gcaccagggcacucacaaa

SEQ ID NO: 2149797 - RNA, 19 nt, Homo sapiens
  misc_RNA (1)...(19): siRNA sense strand
aaaccgaacacccauaaau

SEQ ID NO: 2149798 - RNA, 19 nt, Homo sapiens
  misc_RNA (1)...(19): siRNA sense strand
gcagcucgcguaucuuguu

SEQ ID NO: 2149799 - RNA, 19 nt, Homo sapiens
  misc_RNA (1)...(19): siRNA sense strand
cuacuaguggugaugaaua

SEQ ID NO: 2149800 - RNA, 19 nt, Homo sapiens
  misc_RNA (1)...(19): siRNA sense strand
guaggaauguggaucucau

SEQ ID NO: 2149801 - RNA, 19 nt, Homo sapiens
  misc_RNA (1)...(19): siRNA sense strand
auaagaggauucacaccaa

SEQ ID NO: 2149802 - RNA, 19 nt, Homo sapiens
  misc_RNA (1)...(19): siRNA sense strand
agagcaaagucuuaugaau

SEQ ID NO: 2149803 - RNA, 19 nt, Homo sapiens
  misc_RNA (1)...(19): siRNA sense strand
cgauguacuucaccagaga

SEQ ID NO: 2149804 - RNA, 19 nt, Homo sapiens
  misc_RNA (1)...(19): siRNA sense strand
uugaggauguggcgaugua

SEQ ID NO: 2149805 - RNA, 19 nt, Homo sapiens
  misc_RNA (1)...(19): siRNA sense strand
aggcuuacuuucccuacua

SEQ ID NO: 2149806 - RNA, 19 nt, Homo sapiens
  misc_RNA (1)...(19): siRNA sense strand
caacagauucacaguaaac

SEQ ID NO: 2149807 - RNA, 19 nt, Homo sapiens
  misc_RNA (1)...(19): siRNA sense strand
ucaacagauucacaguaaa

SEQ ID NO: 2149808 - RNA, 19 nt, Homo sapiens
  misc_RNA (1)...(19): siRNA sense strand
ccauacagaugucaugacu

SEQ ID NO: 2149809 - RNA, 19 nt, Homo sapiens
  misc_RNA (1)...(19): siRNA sense strand
cguaaggcaugguuugauc

SEQ ID NO: 2149810 - RNA, 19 nt, Homo sapiens
  misc_RNA (1)...(19): siRNA sense strand
gguagugcuugcccagguu

SEQ ID NO: 2149811 - RNA, 19 nt, Homo sapiens
  misc_RNA (1)...(19): siRNA sense strand
aaggaggaauucuuucaau

SEQ ID NO: 2149812 - RNA, 19 nt, Homo sapiens
  misc_RNA (1)...(19): siRNA sense strand
ucaaagaauccauacaaag

SEQ ID NO: 2149813 - RNA, 19 nt, Homo sapiens
  misc_RNA (1)...(19): siRNA sense strand
auucaacccuucuauguca

SEQ ID NO: 2149814 - RNA, 19 nt, Homo sapiens
  misc_RNA (1)...(19): siRNA sense strand
uggcaaacccuucaaucaa

SEQ ID NO: 2149815 - RNA, 19 nt, Homo sapiens
  misc_RNA (1)...(19): siRNA sense strand
ccauaaaugccuugagugu

SEQ ID NO: 2149816 - RNA, 19 nt, Homo sapiens
  misc_RNA (1)...(19): siRNA sense strand
cgaauucucacaagagcaa

SEQ ID NO: 2149817 - RNA, 19 nt, Homo sapiens
  misc_RNA (1)...(19): siRNA sense strand
caaugugucauauguggaa

SEQ ID NO: 2149818 - RNA, 19 nt, Homo sapiens
  misc_RNA (1)...(19): siRNA sense strand
gaucucauucagcaucaaa

SEQ ID NO: 2149819 - RNA, 19 nt, Homo sapiens
  misc_RNA (1)...(19): siRNA sense strand
ccauaaaugcagugaaugu

SEQ ID NO: 2149820 - RNA, 19 nt, Homo sapiens
  misc_RNA (1)...(19): siRNA sense strand
cgccauaaaugccuugagu

SEQ ID NO: 2149821 - RNA, 19 nt, Homo sapiens
  misc_RNA (1)...(19): siRNA sense strand
ugucaugacuguggaaagu

SEQ ID NO: 2149822 - RNA, 19 nt, Homo sapiens
  misc_RNA (1)...(19): siRNA sense strand
aaggacagauauccacaug

SEQ ID NO: 2149823 - RNA, 19 nt, Homo sapiens
  misc_RNA (1)...(19): siRNA sense strand
acccauaaaugcagugaau

SEQ ID NO: 2149824 - RNA, 19 nt, Homo sapiens
  misc_RNA (1)...(19): siRNA sense strand
cuucaaaaccuuaaccuua

SEQ ID NO: 2149825 - RNA, 19 nt, Homo sapiens
  misc_RNA (1)...(19): siRNA sense strand
caaguggcacacaagcuuu

SEQ ID NO: 2149826 - RNA, 19 nt, Homo sapiens
  misc_RNA (1)...(19): siRNA sense strand
ucaaguggcacacaagcuu

SEQ ID NO: 2149827 - RNA, 19 nt, Homo sapiens
  misc_RNA (1)...(19): siRNA sense strand
ucuaugucaucaacagauu

SEQ ID NO: 2149828 - RNA, 19 nt, Homo sapiens
  misc_RNA (1)...(19): siRNA sense strand
caacaucaaagaauucacu

SEQ ID NO: 2149829 - RNA, 19 nt, Homo sapiens
  misc_RNA (1)...(19): siRNA sense strand
cagaaaaguuacauaagug

SEQ ID NO: 2149830 - RNA, 19 nt, Homo sapiens
  misc_RNA (1)...(19): siRNA sense strand
ucugucagcuggagaacug

SEQ ID NO: 2149831 - RNA, 19 nt, Homo sapiens
  misc_RNA (1)...(19): siRNA sense strand
gagcgaauucucacaagag

SEQ ID NO: 2149832 - RNA, 19 nt, Homo sapiens
  misc_RNA (1)...(19): siRNA sense strand
aagcagggcagauaugaug

SEQ ID NO: 2149833 - RNA, 19 nt, Homo sapiens
  misc_RNA (1)...(19): siRNA sense strand
gaugugauguuggagaacu

SEQ ID NO: 2149834 - RNA, 19 nt, Homo sapiens
  misc_RNA (1)...(19): siRNA sense strand
gaggauggcaaacccuuca

SEQ ID NO: 2149835 - RNA, 19 nt, Homo sapiens
  misc_RNA (1)...(19): siRNA sense strand
aggaggaauucuuucaaug

SEQ ID NO: 2149836 - RNA, 19 nt, Homo sapiens
  misc_RNA (1)...(19): siRNA sense strand
auacaaaggaggaauucuu

SEQ ID NO: 2149837 - RNA, 19 nt, Homo sapiens
  misc_RNA (1)...(19): siRNA sense strand
aaagaauccauacaaagga

SEQ ID NO: 2149838 - RNA, 19 nt, Homo sapiens
  misc_RNA (1)...(19): siRNA sense strand
ucaugacuguggaaagugu

SEQ ID NO: 2149839 - RNA, 19 nt, Homo sapiens
  misc_RNA (1)...(19): siRNA sense strand
gacaguugcaggcuuacuu

SEQ ID NO: 2149840 - RNA, 19 nt, Homo sapiens
  misc_RNA (1)...(19): siRNA sense strand
cgagaacugggaauaggaa

SEQ ID NO: 2149841 - RNA, 19 nt, Homo sapiens
  misc_RNA (1)...(19): siRNA sense strand
gaaggaccucuaccgagau

SEQ ID NO: 2149842 - RNA, 19 nt, Homo sapiens
  misc_RNA (1)...(19): siRNA sense strand
gaggauucacaccaaagaa

SEQ ID NO: 2149843 - RNA, 19 nt, Homo sapiens
  misc_RNA (1)...(19): siRNA sense strand
cagcucgcguaucuuguug

SEQ ID NO: 2149844 - RNA, 19 nt, Homo sapiens
  misc_RNA (1)...(19): siRNA sense strand
agcaaagucuuaugaaugc

SEQ ID NO: 2149845 - RNA, 19 nt, Homo sapiens
  misc_RNA (1)...(19): siRNA sense strand
gaagcagggcagauaugau

SEQ ID NO: 2149846 - RNA, 19 nt, Homo sapiens
  misc_RNA (1)...(19): siRNA sense strand
cuaccgagaacugggaaua

SEQ ID NO: 2149847 - RNA, 19 nt, Homo sapiens
  misc_RNA (1)...(19): siRNA sense strand
ggaagccaacccuaccaau

SEQ ID NO: 2149848 - RNA, 19 nt, Homo sapiens
  misc_RNA (1)...(19): siRNA sense strand
cgacaucaggucauucaca

SEQ ID NO: 2149849 - RNA, 19 nt, Homo sapiens
  misc_RNA (1)...(19): siRNA sense strand
ucccaaaccugagaugauc

SEQ ID NO: 2149850 - RNA, 19 nt, Homo sapiens
  misc_RNA (1)...(19): siRNA sense strand
ggaccucuaccgagaugug

SEQ ID NO: 2149851 - RNA, 19 nt, Homo sapiens
  misc_RNA (1)...(19): siRNA sense strand
gaaugcagugaauguggaa

SEQ ID NO: 2149852 - RNA, 19 nt, Homo sapiens
  misc_RNA (1)...(19): siRNA sense strand
aagccaacccuaccaaugu

SEQ ID NO: 2149853 - RNA, 19 nt, Homo sapiens
  misc_RNA (1)...(19): siRNA sense strand
ggagaacuacaggaacaug

SEQ ID NO: 2149854 - RNA, 19 nt, Homo sapiens
  misc_RNA (1)...(19): siRNA sense strand
cggcagcucgcguaucuug

SEQ ID NO: 2149855 - RNA, 19 nt, Homo sapiens
  misc_RNA (1)...(19): siRNA sense strand
aggcaugguuugaucaaca

SEQ ID NO: 2149856 - RNA, 19 nt, Homo sapiens
  misc_RNA (1)...(19): siRNA sense strand
gggaaagccuucagucuua

SEQ ID NO: 2149857 - RNA, 19 nt, Homo sapiens
  misc_RNA (1)...(19): siRNA sense strand
ggagaaggaugguaucgua

SEQ ID NO: 2149858 - RNA, 19 nt, Homo sapiens
  misc_RNA (1)...(19): siRNA sense strand
gaaggaugguaucguaaua

SEQ ID NO: 2149859 - RNA, 19 nt, Homo sapiens
  misc_RNA (1)...(19): siRNA sense strand
gaaagaguuuggagagaaa

SEQ ID NO: 2149860 - RNA, 19 nt, Homo sapiens
  misc_RNA (1)...(19): siRNA sense strand
gaacaaagucucacagaug

SEQ ID NO: 2149861 - RNA, 19 nt, Homo sapiens
  misc_RNA (1)...(19): siRNA sense strand
ggagaaacccuaugaaugu

SEQ ID NO: 2149862 - RNA, 19 nt, Homo sapiens
  misc_RNA (1)...(19): siRNA sense strand
agagaaaccuuaugaaugu

SEQ ID NO: 2149863 - RNA, 19 nt, Homo sapiens
  misc_RNA (1)...(19): siRNA sense strand
gguaaaugcuucacgagaa

SEQ ID NO: 2149864 - RNA, 19 nt, Homo sapiens
  misc_RNA (1)...(19): siRNA sense strand
agagaaaccucaugaaugu

SEQ ID NO: 2149865 - RNA, 19 nt, Homo sapiens
  misc_RNA (1)...(19): siRNA sense strand
gagaaacccuaugaaugua

SEQ ID NO: 2149866 - RNA, 19 nt, Homo sapiens
  misc_RNA (1)...(19): siRNA sense strand
gagagaaaccuuaugaaug

SEQ ID NO: 2149867 - RNA, 19 nt, Homo sapiens
  misc_RNA (1)...(19): siRNA sense strand
gcugaaaccucggaagauu

SEQ ID NO: 2149868 - RNA, 19 nt, Homo sapiens
  misc_RNA (1)...(19): siRNA sense strand
gagagaaaccucaugaaug

SEQ ID NO: 2149869 - RNA, 19 nt, Homo sapiens
  misc_RNA (1)...(19): siRNA sense strand
ggaaagccuucagucuuaa

SEQ ID NO: 2149870 - RNA, 19 nt, Homo sapiens
  misc_RNA (1)...(19): siRNA sense strand
gaagaucccagaaagaguu

SEQ ID NO: 2149871 - RNA, 19 nt, Homo sapiens
  misc_RNA (1)...(19): siRNA sense strand
ggaacaaagucucacagau

SEQ ID NO: 2149872 - RNA, 19 nt, Homo sapiens
  misc_RNA (1)...(19): siRNA sense strand
ggagagaaaccuuaugaau

SEQ ID NO: 2149873 - RNA, 19 nt, Homo sapiens
  misc_RNA (1)...(19): siRNA sense strand
gggaaaggauugggaagaa

SEQ ID NO: 2149874 - RNA, 19 nt, Homo sapiens
  misc_RNA (1)...(19): siRNA sense strand
ugaaggaacuuugucauca

SEQ ID NO: 2149875 - RNA, 19 nt, Homo sapiens
  misc_RNA (1)...(19): siRNA sense strand
ggagagaaaccucaugaau

SEQ ID NO: 2149876 - RNA, 19 nt, Homo sapiens
  misc_RNA (1)...(19): siRNA sense strand
gaugguaucguaauaguga

SEQ ID NO: 2149877 - RNA, 19 nt, Homo sapiens
  misc_RNA (1)...(19): siRNA sense strand
gaaaagcccuaugaaugua

SEQ ID NO: 2149878 - RNA, 19 nt, Homo sapiens
  misc_RNA (1)...(19): siRNA sense strand
acaacaggcaggagaauua

SEQ ID NO: 2149879 - RNA, 19 nt, Homo sapiens
  misc_RNA (1)...(19): siRNA sense strand
gcucggaccucaccaagca

SEQ ID NO: 2149880 - RNA, 19 nt, Homo sapiens
  misc_RNA (1)...(19): siRNA sense strand
acgagaaguucaagccuua

SEQ ID NO: 2149881 - RNA, 19 nt, Homo sapiens
  misc_RNA (1)...(19): siRNA sense strand
gagaaaccuuaugaaugua

SEQ ID NO: 2149882 - RNA, 19 nt, Homo sapiens
  misc_RNA (1)...(19): siRNA sense strand
gggagaaacccuaugaaug

SEQ ID NO: 2149883 - RNA, 19 nt, Homo sapiens
  misc_RNA (1)...(19): siRNA sense strand
agacuuggagcuugauuua

SEQ ID NO: 2149884 - RNA, 19 nt, Homo sapiens
  misc_RNA (1)...(19): siRNA sense strand
agaaagaguuuggagagaa

SEQ ID NO: 2149885 - RNA, 19 nt, Homo sapiens
  misc_RNA (1)...(19): siRNA sense strand
ggaagaggaagaugaggaa

SEQ ID NO: 2149886 - RNA, 19 nt, Homo sapiens
  misc_RNA (1)...(19): siRNA sense strand
gagaaaagcccuaugaaug

SEQ ID NO: 2149887 - RNA, 19 nt, Homo sapiens
  misc_RNA (1)...(19): siRNA sense strand
uagaagacuuggagcuuga

SEQ ID NO: 2149888 - RNA, 19 nt, Homo sapiens
  misc_RNA (1)...(19): siRNA sense strand
gaaggaacuuugucaucag

SEQ ID NO: 2149889 - RNA, 19 nt, Homo sapiens
  misc_RNA (1)...(19): siRNA sense strand
cgaaacucauaccugauuu

SEQ ID NO: 2149890 - RNA, 19 nt, Homo sapiens
  misc_RNA (1)...(19): siRNA sense strand
gagaaaagcccuacaagug

SEQ ID NO: 2149891 - RNA, 19 nt, Homo sapiens
  misc_RNA (1)...(19): siRNA sense strand
ggccagaaauaaacaccaa

SEQ ID NO: 2149892 - RNA, 19 nt, Homo sapiens
  misc_RNA (1)...(19): siRNA sense strand
gaaacccuaugaauguagu

SEQ ID NO: 2149893 - RNA, 19 nt, Homo sapiens
  misc_RNA (1)...(19): siRNA sense strand
agucugagcuccaacuuca

SEQ ID NO: 2149894 - RNA, 19 nt, Homo sapiens
  misc_RNA (1)...(19): siRNA sense strand
agaaaccucaugaauguaa

SEQ ID NO: 2149895 - RNA, 19 nt, Homo sapiens
  misc_RNA (1)...(19): siRNA sense strand
ggaaaggauugggaagaag

SEQ ID NO: 2149896 - RNA, 19 nt, Homo sapiens
  misc_RNA (1)...(19): siRNA sense strand
aacaaagucucacagaugu

SEQ ID NO: 2149897 - RNA, 19 nt, Homo sapiens
  misc_RNA (1)...(19): siRNA sense strand
gaaucuggcucggaggaau

SEQ ID NO: 2149898 - RNA, 19 nt, Homo sapiens
  misc_RNA (1)...(19): siRNA sense strand
cagccucccuugaugcauu

SEQ ID NO: 2149899 - RNA, 19 nt, Homo sapiens
  misc_RNA (1)...(19): siRNA sense strand
gagaaggaugguaucguaa

SEQ ID NO: 2149900 - RNA, 19 nt, Homo sapiens
  misc_RNA (1)...(19): siRNA sense strand
cagaaagaguuuggagaga

SEQ ID NO: 2149901 - RNA, 19 nt, Homo sapiens
  misc_RNA (1)...(19): siRNA sense strand
acaggaagaucccagaaag

SEQ ID NO: 2149902 - RNA, 19 nt, Homo sapiens
  misc_RNA (1)...(19): siRNA sense strand
agaaauaaacaccaaggaa

SEQ ID NO: 2149903 - RNA, 19 nt, Homo sapiens
  misc_RNA (1)...(19): siRNA sense strand
gcucggaggaaucucagua

SEQ ID NO: 2149904 - RNA, 19 nt, Homo sapiens
  misc_RNA (1)...(19): siRNA sense strand
ggagaaagacagcagaaaa

SEQ ID NO: 2149905 - RNA, 19 nt, Homo sapiens
  misc_RNA (1)...(19): siRNA sense strand
gaauguagugaauguggaa

SEQ ID NO: 2149906 - RNA, 19 nt, Homo sapiens
  misc_RNA (1)...(19): siRNA sense strand
gauccacacaggagagaaa

SEQ ID NO: 2149907 - RNA, 19 nt, Homo sapiens
  misc_RNA (1)...(19): siRNA sense strand
ucaccaagcaucagagaau

SEQ ID NO: 2149908 - RNA, 19 nt, Homo sapiens
  misc_RNA (1)...(19): siRNA sense strand
caccaagcaucagagaauu

SEQ ID NO: 2149909 - RNA, 19 nt, Homo sapiens
  misc_RNA (1)...(19): siRNA sense strand
agaauucacacucgagaaa

SEQ ID NO: 2149910 - RNA, 19 nt, Homo sapiens
  misc_RNA (1)...(19): siRNA sense strand
gcuucaggcgcuucuguua

SEQ ID NO: 2149911 - RNA, 19 nt, Homo sapiens
  misc_RNA (1)...(19): siRNA sense strand
cuaugaauguagugaaugu

SEQ ID NO: 2149912 - RNA, 19 nt, Homo sapiens
  misc_RNA (1)...(19): siRNA sense strand
ccgaaacucauaccugauu

SEQ ID NO: 2149913 - RNA, 19 nt, Homo sapiens
  misc_RNA (1)...(19): siRNA sense strand
ccugaaaaguuguguguaa

SEQ ID NO: 2149914 - RNA, 19 nt, Homo sapiens
  misc_RNA (1)...(19): siRNA sense strand
gaauuaugggagcgcauuu

SEQ ID NO: 2149915 - RNA, 19 nt, Homo sapiens
  misc_RNA (1)...(19): siRNA sense strand
ugaugaaugugguaaaugc

SEQ ID NO: 2149916 - RNA, 19 nt, Homo sapiens
  misc_RNA (1)...(19): siRNA sense strand
ggccgugacccuucuagaa

SEQ ID NO: 2149917 - RNA, 19 nt, Homo sapiens
  misc_RNA (1)...(19): siRNA sense strand
gagaaaaccaggaaagaga

SEQ ID NO: 2149918 - RNA, 19 nt, Homo sapiens
  misc_RNA (1)...(19): siRNA sense strand
caacaggaagaucccagaa

SEQ ID NO: 2149919 - RNA, 19 nt, Homo sapiens
  misc_RNA (1)...(19): siRNA sense strand
caacaggcaggagaauuau

SEQ ID NO: 2149920 - RNA, 19 nt, Homo sapiens
  misc_RNA (1)...(19): siRNA sense strand
acuuggagcuugauuuauc

SEQ ID NO: 2149921 - RNA, 19 nt, Homo sapiens
  misc_RNA (1)...(19): siRNA sense strand
gcacaggagaaggauggua

SEQ ID NO: 2149922 - RNA, 19 nt, Homo sapiens
  misc_RNA (1)...(19): siRNA sense strand
caggagagaaaccucauga

SEQ ID NO: 2149923 - RNA, 19 nt, Homo sapiens
  misc_RNA (1)...(19): siRNA sense strand
gggaacaaagucucacaga

SEQ ID NO: 2149924 - RNA, 19 nt, Homo sapiens
  misc_RNA (1)...(19): siRNA sense strand
caacaggucccaggucaag

SEQ ID NO: 2149925 - RNA, 19 nt, Homo sapiens
  misc_RNA (1)...(19): siRNA sense strand
gaagguggaagaggaagau

SEQ ID NO: 2149926 - RNA, 19 nt, Homo sapiens
  misc_RNA (1)...(19): siRNA sense strand
ucaugaauguaacgagugu

SEQ ID NO: 2149927 - RNA, 19 nt, Homo sapiens
  misc_RNA (1)...(19): siRNA sense strand
aaauaaacaccaaggaaca

SEQ ID NO: 2149928 - RNA, 19 nt, Homo sapiens
  misc_RNA (1)...(19): siRNA sense strand
ccaaucucauccuccauca

SEQ ID NO: 2149929 - RNA, 19 nt, Homo sapiens
  misc_RNA (1)...(19): siRNA sense strand
gagaaaccucaugaaugua

SEQ ID NO: 2149930 - RNA, 19 nt, Homo sapiens
  misc_RNA (1)...(19): siRNA sense strand
gaauggggaugucagaauc

SEQ ID NO: 2149931 - RNA, 19 nt, Homo sapiens
  misc_RNA (1)...(19): siRNA sense strand
aaacauucgucucggaaac

SEQ ID NO: 2149932 - RNA, 19 nt, Homo sapiens
  misc_RNA (1)...(19): siRNA sense strand
gagaauucacacucgagaa

SEQ ID NO: 2149933 - RNA, 19 nt, Homo sapiens
  misc_RNA (1)...(19): siRNA sense strand
aggucuggcugcaggaaua

SEQ ID NO: 2149934 - RNA, 19 nt, Homo sapiens
  misc_RNA (1)...(19): siRNA sense strand
ggagaaaagcccuaugaau

SEQ ID NO: 2149935 - RNA, 19 nt, Homo sapiens
  misc_RNA (1)...(19): siRNA sense strand
gggcaaaacaggagaaaga

SEQ ID NO: 2149936 - RNA, 19 nt, Homo sapiens
  misc_RNA (1)...(19): siRNA sense strand
ggaagaucccagaaagagu

SEQ ID NO: 2149937 - RNA, 19 nt, Homo sapiens
  misc_RNA (1)...(19): siRNA sense strand
gacaacaggcaggagaauu

SEQ ID NO: 2149938 - RNA, 19 nt, Homo sapiens
  misc_RNA (1)...(19): siRNA sense strand
ggacaacaggcaggagaau

SEQ ID NO: 2149939 - RNA, 19 nt, Homo sapiens
  misc_RNA (1)...(19): siRNA sense strand
ggucccaggucaaguucau

SEQ ID NO: 2149940 - RNA, 19 nt, Homo sapiens
  misc_RNA (1)...(19): siRNA sense strand
caaacauucgucucggaaa

SEQ ID NO: 2149941 - RNA, 19 nt, Homo sapiens
  misc_RNA (1)...(19): siRNA sense strand
cuaugaauguagugagugu

SEQ ID NO: 2149942 - RNA, 19 nt, Homo sapiens
  misc_RNA (1)...(19): siRNA sense strand
gaagacuuggagcuugauu

SEQ ID NO: 2149943 - RNA, 19 nt, Homo sapiens
  misc_RNA (1)...(19): siRNA sense strand
gaaaccucaugaauguaac

SEQ ID NO: 2149944 - RNA, 19 nt, Homo sapiens
  misc_RNA (1)...(19): siRNA sense strand
uagagcaguuucuuuccau

SEQ ID NO: 2149945 - RNA, 19 nt, Homo sapiens
  misc_RNA (1)...(19): siRNA sense strand
ugggaaagccuucagucuu

SEQ ID NO: 2149946 - RNA, 19 nt, Homo sapiens
  misc_RNA (1)...(19): siRNA sense strand
ugugaugaaugugguaaau

SEQ ID NO: 2149947 - RNA, 19 nt, Homo sapiens
  misc_RNA (1)...(19): siRNA sense strand
gagauucagggccagcuau

SEQ ID NO: 2149948 - RNA, 19 nt, Homo sapiens
  misc_RNA (1)...(19): siRNA sense strand
gcacuauucacagcggauu

SEQ ID NO: 2149949 - RNA, 19 nt, Homo sapiens
  misc_RNA (1)...(19): siRNA sense strand
cagucccacuucaaacauu

SEQ ID NO: 2149950 - RNA, 19 nt, Homo sapiens
  misc_RNA (1)...(19): siRNA sense strand
gaaugagaacgaggaguca

SEQ ID NO: 2149951 - RNA, 19 nt, Homo sapiens
  misc_RNA (1)...(19): siRNA sense strand
ccuuaugaauguaaugagu

SEQ ID NO: 2149952 - RNA, 19 nt, Homo sapiens
  misc_RNA (1)...(19): siRNA sense strand
ccacaguuccaaucucauc

SEQ ID NO: 2149953 - RNA, 19 nt, Homo sapiens
  misc_RNA (1)...(19): siRNA sense strand
cucggaagauucagcauca

SEQ ID NO: 2149954 - RNA, 19 nt, Homo sapiens
  misc_RNA (1)...(19): siRNA sense strand
ccaagcaucagagaauuca

SEQ ID NO: 2149955 - RNA, 19 nt, Homo sapiens
  misc_RNA (1)...(19): siRNA sense strand
gcgcguuccugaaaaguug

SEQ ID NO: 2149956 - RNA, 19 nt, Homo sapiens
  misc_RNA (1)...(19): siRNA sense strand
ggaagagccuguguacauu

SEQ ID NO: 2149957 - RNA, 19 nt, Homo sapiens
  misc_RNA (1)...(19): siRNA sense strand
caaaggaguuggacaaggu

SEQ ID NO: 2149958 - RNA, 19 nt, Homo sapiens
  misc_RNA (1)...(19): siRNA sense strand
gaaagcaggcucacagaag

SEQ ID NO: 2149959 - RNA, 19 nt, Homo sapiens
  misc_RNA (1)...(19): siRNA sense strand
ggaggcagcacaaggaaga

SEQ ID NO: 2149960 - RNA, 19 nt, Homo sapiens
  misc_RNA (1)...(19): siRNA sense strand
gaagagccuguguacauug

SEQ ID NO: 2149961 - RNA, 19 nt, Homo sapiens
  misc_RNA (1)...(19): siRNA sense strand
aagaggagcuccaguaagg

SEQ ID NO: 2149962 - RNA, 19 nt, Homo sapiens
  misc_RNA (1)...(19): siRNA sense strand
ccaagaggagcuccaguaa

SEQ ID NO: 2149963 - RNA, 19 nt, Homo sapiens
  misc_RNA (1)...(19): siRNA sense strand
agagugaggccaucuauga

SEQ ID NO: 2149964 - RNA, 19 nt, Homo sapiens
  misc_RNA (1)...(19): siRNA sense strand
gccaagaggagcuccagua

SEQ ID NO: 2149965 - RNA, 19 nt, Homo sapiens
  misc_RNA (1)...(19): siRNA sense strand
gaccacuccuugugaaauc

SEQ ID NO: 2149966 - RNA, 19 nt, Homo sapiens
  misc_RNA (1)...(19): siRNA sense strand
ggaagcugcuggaggugau

SEQ ID NO: 2149967 - RNA, 19 nt, Homo sapiens
  misc_RNA (1)...(19): siRNA sense strand
gugaggccaucuaugaaga

SEQ ID NO: 2149968 - RNA, 19 nt, Homo sapiens
  misc_RNA (1)...(19): siRNA sense strand
ggacagcagcacccgaaga

SEQ ID NO: 2149969 - RNA, 19 nt, Homo sapiens
  misc_RNA (1)...(19): siRNA sense strand
gagccuguguacauugaga

SEQ ID NO: 2149970 - RNA, 19 nt, Homo sapiens
  misc_RNA (1)...(19): siRNA sense strand
gaagguuccuccgcagaag

SEQ ID NO: 2149971 - RNA, 19 nt, Homo sapiens
  misc_RNA (1)...(19): siRNA sense strand
ccaccgcaauggagacuuc

SEQ ID NO: 2149972 - RNA, 19 nt, Homo sapiens
  misc_RNA (1)...(19): siRNA sense strand
ucuaugaagagaugaagua

SEQ ID NO: 2149973 - RNA, 19 nt, Homo sapiens
  misc_RNA (1)...(19): siRNA sense strand
ggacaccagaggaggaaga

SEQ ID NO: 2149974 - RNA, 19 nt, Homo sapiens
  misc_RNA (1)...(19): siRNA sense strand
caaagacggagaaggagau

SEQ ID NO: 2149975 - RNA, 19 nt, Homo sapiens
  misc_RNA (1)...(19): siRNA sense strand
ggauggguuucaugacgau

SEQ ID NO: 2149976 - RNA, 19 nt, Homo sapiens
  misc_RNA (1)...(19): siRNA sense strand
gagugaggccaucuaugaa

SEQ ID NO: 2149977 - RNA, 19 nt, Homo sapiens
  misc_RNA (1)...(19): siRNA sense strand
aggaagagccuguguacau

SEQ ID NO: 2149978 - RNA, 19 nt, Homo sapiens
  misc_RNA (1)...(19): siRNA sense strand
caccagaggaggaagaaga

SEQ ID NO: 2149979 - RNA, 19 nt, Homo sapiens
  misc_RNA (1)...(19): siRNA sense strand
aagagccuguguacauuga

SEQ ID NO: 2149980 - RNA, 19 nt, Homo sapiens
  misc_RNA (1)...(19): siRNA sense strand
gaggccaucuaugaagaga

SEQ ID NO: 2149981 - RNA, 19 nt, Homo sapiens
  misc_RNA (1)...(19): siRNA sense strand
aagcaaaggaguuggacaa

SEQ ID NO: 2149982 - RNA, 19 nt, Homo sapiens
  misc_RNA (1)...(19): siRNA sense strand
gcaagaaagcaggcucaca

SEQ ID NO: 2149983 - RNA, 19 nt, Homo sapiens
  misc_RNA (1)...(19): siRNA sense strand
gagaaaagcaaaggaguug

SEQ ID NO: 2149984 - RNA, 19 nt, Homo sapiens
  misc_RNA (1)...(19): siRNA sense strand
gaaaagcaaaggaguugga

SEQ ID NO: 2149985 - RNA, 19 nt, Homo sapiens
  misc_RNA (1)...(19): siRNA sense strand
agaaagcaggcucacagaa

SEQ ID NO: 2149986 - RNA, 19 nt, Homo sapiens
  misc_RNA (1)...(19): siRNA sense strand
ggagaaaagcaaaggaguu

SEQ ID NO: 2149987 - RNA, 19 nt, Homo sapiens
  misc_RNA (1)...(19): siRNA sense strand
caagaggagcuccaguaag

SEQ ID NO: 2149988 - RNA, 19 nt, Homo sapiens
  misc_RNA (1)...(19): siRNA sense strand
gagagugaggccaucuaug

SEQ ID NO: 2149989 - RNA, 19 nt, Homo sapiens
  misc_RNA (1)...(19): siRNA sense strand
gaagagagugaggccaucu

SEQ ID NO: 2149990 - RNA, 19 nt, Homo sapiens
  misc_RNA (1)...(19): siRNA sense strand
agccaaagacggagaagga

SEQ ID NO: 2149991 - RNA, 19 nt, Homo sapiens
  misc_RNA (1)...(19): siRNA sense strand
ggaagagccuguguacauu

SEQ ID NO: 2149992 - RNA, 19 nt, Homo sapiens
  misc_RNA (1)...(19): siRNA sense strand
caaaggaguuggacaaggu

SEQ ID NO: 2149993 - RNA, 19 nt, Homo sapiens
  misc_RNA (1)...(19): siRNA sense strand
gaaagcaggcucacagaag

SEQ ID NO: 2149994 - RNA, 19 nt, Homo sapiens
  misc_RNA (1)...(19): siRNA sense strand
ggaggcagcacaaggaaga

SEQ ID NO: 2149995 - RNA, 19 nt, Homo sapiens
  misc_RNA (1)...(19): siRNA sense strand
gaagagccuguguacauug

SEQ ID NO: 2149996 - RNA, 19 nt, Homo sapiens
  misc_RNA (1)...(19): siRNA sense strand
aagaggagcuccaguaagg

SEQ ID NO: 2149997 - RNA, 19 nt, Homo sapiens
  misc_RNA (1)...(19): siRNA sense strand
ccaagaggagcuccaguaa

SEQ ID NO: 2149998 - RNA, 19 nt, Homo sapiens
  misc_RNA (1)...(19): siRNA sense strand
agagugaggccaucuauga

SEQ ID NO: 2149999 - RNA, 19 nt, Homo sapiens
  misc_RNA (1)...(19): siRNA sense strand
gccaagaggagcuccagua

SEQ ID NO: 2150000 - RNA, 19 nt, Homo sapiens
  misc_RNA (1)...(19): siRNA sense strand
gaccacuccuugugaaauc

SEQ ID NO: 2150001 - RNA, 19 nt, Homo sapiens
  misc_RNA (1)...(19): siRNA sense strand
ggaagcugcuggaggugau

SEQ ID NO: 2150002 - RNA, 19 nt, Homo sapiens
  misc_RNA (1)...(19): siRNA sense strand
gugaggccaucuaugaaga

SEQ ID NO: 2150003 - RNA, 19 nt, Homo sapiens
  misc_RNA (1)...(19): siRNA sense strand
ggacagcagcacccgaaga

SEQ ID NO: 2150004 - RNA, 19 nt, Homo sapiens
  misc_RNA (1)...(19): siRNA sense strand
gagccuguguacauugaga

SEQ ID NO: 2150005 - RNA, 19 nt, Homo sapiens
  misc_RNA (1)...(19): siRNA sense strand
gaagguuccuccgcagaag

SEQ ID NO: 2150006 - RNA, 19 nt, Homo sapiens
  misc_RNA (1)...(19): siRNA sense strand
ccaccgcaauggagacuuc

SEQ ID NO: 2150007 - RNA, 19 nt, Homo sapiens
  misc_RNA (1)...(19): siRNA sense strand
ucuaugaagagaugaagua

SEQ ID NO: 2150008 - RNA, 19 nt, Homo sapiens
  misc_RNA (1)...(19): siRNA sense strand
ggacaccagaggaggaaga

SEQ ID NO: 2150009 - RNA, 19 nt, Homo sapiens
  misc_RNA (1)...(19): siRNA sense strand
caaagacggagaaggagau

SEQ ID NO: 2150010 - RNA, 19 nt, Homo sapiens
  misc_RNA (1)...(19): siRNA sense strand
ggauggguuucaugacgau

SEQ ID NO: 2150011 - RNA, 19 nt, Homo sapiens
  misc_RNA (1)...(19): siRNA sense strand
gagugaggccaucuaugaa

SEQ ID NO: 2150012 - RNA, 19 nt, Homo sapiens
  misc_RNA (1)...(19): siRNA sense strand
aggaagagccuguguacau

SEQ ID NO: 2150013 - RNA, 19 nt, Homo sapiens
  misc_RNA (1)...(19): siRNA sense strand
caccagaggaggaagaaga

SEQ ID NO: 2150014 - RNA, 19 nt, Homo sapiens
  misc_RNA (1)...(19): siRNA sense strand
aagagccuguguacauuga

SEQ ID NO: 2150015 - RNA, 19 nt, Homo sapiens
  misc_RNA (1)...(19): siRNA sense strand
gaggccaucuaugaagaga

SEQ ID NO: 2150016 - RNA, 19 nt, Homo sapiens
  misc_RNA (1)...(19): siRNA sense strand
aagcaaaggaguuggacaa

SEQ ID NO: 2150017 - RNA, 19 nt, Homo sapiens
  misc_RNA (1)...(19): siRNA sense strand
gcaagaaagcaggcucaca

SEQ ID NO: 2150018 - RNA, 19 nt, Homo sapiens
  misc_RNA (1)...(19): siRNA sense strand
gagaaaagcaaaggaguug

SEQ ID NO: 2150019 - RNA, 19 nt, Homo sapiens
  misc_RNA (1)...(19): siRNA sense strand
gaaaagcaaaggaguugga

SEQ ID NO: 2150020 - RNA, 19 nt, Homo sapiens
  misc_RNA (1)...(19): siRNA sense strand
agaaagcaggcucacagaa

SEQ ID NO: 2150021 - RNA, 19 nt, Homo sapiens
  misc_RNA (1)...(19): siRNA sense strand
ggagaaaagcaaaggaguu

SEQ ID NO: 2150022 - RNA, 19 nt, Homo sapiens
  misc_RNA (1)...(19): siRNA sense strand
caagaggagcuccaguaag

SEQ ID NO: 2150023 - RNA, 19 nt, Homo sapiens
  misc_RNA (1)...(19): siRNA sense strand
gagagugaggccaucuaug

SEQ ID NO: 2150024 - RNA, 19 nt, Homo sapiens
  misc_RNA (1)...(19): siRNA sense strand
gaagagagugaggccaucu

SEQ ID NO: 2150025 - RNA, 19 nt, Homo sapiens
  misc_RNA (1)...(19): siRNA sense strand
agccaaagacggagaagga

SEQ ID NO: 2150026 - RNA, 19 nt, Homo sapiens
  misc_RNA (1)...(19): siRNA sense strand
ggaagagccuguguacauu

SEQ ID NO: 2150027 - RNA, 19 nt, Homo sapiens
  misc_RNA (1)...(19): siRNA sense strand
caaaggaguuggacaaggu

SEQ ID NO: 2150028 - RNA, 19 nt, Homo sapiens
  misc_RNA (1)...(19): siRNA sense strand
gaaagcaggcucacagaag

SEQ ID NO: 2150029 - RNA, 19 nt, Homo sapiens
  misc_RNA (1)...(19): siRNA sense strand
ggaggcagcacaaggaaga

SEQ ID NO: 2150030 - RNA, 19 nt, Homo sapiens
  misc_RNA (1)...(19): siRNA sense strand
gaagagccuguguacauug

SEQ ID NO: 2150031 - RNA, 19 nt, Homo sapiens
  misc_RNA (1)...(19): siRNA sense strand
aagaggagcuccaguaagg

SEQ ID NO: 2150032 - RNA, 19 nt, Homo sapiens
  misc_RNA (1)...(19): siRNA sense strand
ccaagaggagcuccaguaa

SEQ ID NO: 2150033 - RNA, 19 nt, Homo sapiens
  misc_RNA (1)...(19): siRNA sense strand
agagugaggccaucuauga

SEQ ID NO: 2150034 - RNA, 19 nt, Homo sapiens
  misc_RNA (1)...(19): siRNA sense strand
gccaagaggagcuccagua

SEQ ID NO: 2150035 - RNA, 19 nt, Homo sapiens
  misc_RNA (1)...(19): siRNA sense strand
gaccacuccuugugaaauc

SEQ ID NO: 2150036 - RNA, 19 nt, Homo sapiens
  misc_RNA (1)...(19): siRNA sense strand
ggaagcugcuggaggugau

SEQ ID NO: 2150037 - RNA, 19 nt, Homo sapiens
  misc_RNA (1)...(19): siRNA sense strand
gugaggccaucuaugaaga

SEQ ID NO: 2150038 - RNA, 19 nt, Homo sapiens
  misc_RNA (1)...(19): siRNA sense strand
ggacagcagcacccgaaga

SEQ ID NO: 2150039 - RNA, 19 nt, Homo sapiens
  misc_RNA (1)...(19): siRNA sense strand
gagccuguguacauugaga

SEQ ID NO: 2150040 - RNA, 19 nt, Homo sapiens
  misc_RNA (1)...(19): siRNA sense strand
gaagguuccuccgcagaag

SEQ ID NO: 2150041 - RNA, 19 nt, Homo sapiens
  misc_RNA (1)...(19): siRNA sense strand
ccaccgcaauggagacuuc

SEQ ID NO: 2150042 - RNA, 19 nt, Homo sapiens
  misc_RNA (1)...(19): siRNA sense strand
ucuaugaagagaugaagua

SEQ ID NO: 2150043 - RNA, 19 nt, Homo sapiens
  misc_RNA (1)...(19): siRNA sense strand
ggacaccagaggaggaaga

SEQ ID NO: 2150044 - RNA, 19 nt, Homo sapiens
  misc_RNA (1)...(19): siRNA sense strand
caaagacggagaaggagau

SEQ ID NO: 2150045 - RNA, 19 nt, Homo sapiens
  misc_RNA (1)...(19): siRNA sense strand
ggauggguuucaugacgau

SEQ ID NO: 2150046 - RNA, 19 nt, Homo sapiens
  misc_RNA (1)...(19): siRNA sense strand
gagugaggccaucuaugaa

SEQ ID NO: 2150047 - RNA, 19 nt, Homo sapiens
  misc_RNA (1)...(19): siRNA sense strand
aggaagagccuguguacau

SEQ ID NO: 2150048 - RNA, 19 nt, Homo sapiens
  misc_RNA (1)...(19): siRNA sense strand
caccagaggaggaagaaga

SEQ ID NO: 2150049 - RNA, 19 nt, Homo sapiens
  misc_RNA (1)...(19): siRNA sense strand
aagagccuguguacauuga

SEQ ID NO: 2150050 - RNA, 19 nt, Homo sapiens
  misc_RNA (1)...(19): siRNA sense strand
gaggccaucuaugaagaga

SEQ ID NO: 2150051 - RNA, 19 nt, Homo sapiens
  misc_RNA (1)...(19): siRNA sense strand
aagcaaaggaguuggacaa

SEQ ID NO: 2150052 - RNA, 19 nt, Homo sapiens
  misc_RNA (1)...(19): siRNA sense strand
gcaagaaagcaggcucaca

SEQ ID NO: 2150053 - RNA, 19 nt, Homo sapiens
  misc_RNA (1)...(19): siRNA sense strand
gagaaaagcaaaggaguug

SEQ ID NO: 2150054 - RNA, 19 nt, Homo sapiens
  misc_RNA (1)...(19): siRNA sense strand
gaaaagcaaaggaguugga

SEQ ID NO: 2150055 - RNA, 19 nt, Homo sapiens
  misc_RNA (1)...(19): siRNA sense strand
agaaagcaggcucacagaa

SEQ ID NO: 2150056 - RNA, 19 nt, Homo sapiens
  misc_RNA (1)...(19): siRNA sense strand
ggagaaaagcaaaggaguu

SEQ ID NO: 2150057 - RNA, 19 nt, Homo sapiens
  misc_RNA (1)...(19): siRNA sense strand
caagaggagcuccaguaag

SEQ ID NO: 2150058 - RNA, 19 nt, Homo sapiens
  misc_RNA (1)...(19): siRNA sense strand
gagagugaggccaucuaug

SEQ ID NO: 2150059 - RNA, 19 nt, Homo sapiens
  misc_RNA (1)...(19): siRNA sense strand
gaagagagugaggccaucu

SEQ ID NO: 2150060 - RNA, 19 nt, Homo sapiens
  misc_RNA (1)...(19): siRNA sense strand
agccaaagacggagaagga

SEQ ID NO: 2150061 - RNA, 19 nt, Homo sapiens
  misc_RNA (1)...(19): siRNA sense strand
ggaaguacgucuacaaaug

SEQ ID NO: 2150062 - RNA, 19 nt, Homo sapiens
  misc_RNA (1)...(19): siRNA sense strand
ccaacgagcuuuauaauca

SEQ ID NO: 2150063 - RNA, 19 nt, Homo sapiens
  misc_RNA (1)...(19): siRNA sense strand
gaacacacaucauuucauc

SEQ ID NO: 2150064 - RNA, 19 nt, Homo sapiens
  misc_RNA (1)...(19): siRNA sense strand
gagacuaccucacacagua

SEQ ID NO: 2150065 - RNA, 19 nt, Homo sapiens
  misc_RNA (1)...(19): siRNA sense strand
gaacagacaaggauacaaa

SEQ ID NO: 2150066 - RNA, 19 nt, Homo sapiens
  misc_RNA (1)...(19): siRNA sense strand
agaaugacccucagaauua

SEQ ID NO: 2150067 - RNA, 19 nt, Homo sapiens
  misc_RNA (1)...(19): siRNA sense strand
gagaccaccucacacaaua

SEQ ID NO: 2150068 - RNA, 19 nt, Homo sapiens
  misc_RNA (1)...(19): siRNA sense strand
ggaaucagaugcagaagau

SEQ ID NO: 2150069 - RNA, 19 nt, Homo sapiens
  misc_RNA (1)...(19): siRNA sense strand
caaauacagugacuucuau

SEQ ID NO: 2150070 - RNA, 19 nt, Homo sapiens
  misc_RNA (1)...(19): siRNA sense strand
cagcauaacuccaguguuc

SEQ ID NO: 2150071 - RNA, 19 nt, Homo sapiens
  misc_RNA (1)...(19): siRNA sense strand
ucaaucacuuccacaaaua

SEQ ID NO: 2150072 - RNA, 19 nt, Homo sapiens
  misc_RNA (1)...(19): siRNA sense strand
ccacagcucucacugaaau

SEQ ID NO: 2150073 - RNA, 19 nt, Homo sapiens
  misc_RNA (1)...(19): siRNA sense strand
gagaccaccucacacagua

SEQ ID NO: 2150074 - RNA, 19 nt, Homo sapiens
  misc_RNA (1)...(19): siRNA sense strand
gaccacagcucucacugaa

SEQ ID NO: 2150075 - RNA, 19 nt, Homo sapiens
  misc_RNA (1)...(19): siRNA sense strand
caaaugcaaucuugacuuc

SEQ ID NO: 2150076 - RNA, 19 nt, Homo sapiens
  misc_RNA (1)...(19): siRNA sense strand
gagaaugacccucagaauu

SEQ ID NO: 2150077 - RNA, 19 nt, Homo sapiens
  misc_RNA (1)...(19): siRNA sense strand
gagaccaccucacacagua

SEQ ID NO: 2150078 - RNA, 19 nt, Homo sapiens
  misc_RNA (1)...(19): siRNA sense strand
cuacauauauggacacuuc

SEQ ID NO: 2150079 - RNA, 19 nt, Homo sapiens
  misc_RNA (1)...(19): siRNA sense strand
ccacagacuuucccucuau

SEQ ID NO: 2150080 - RNA, 19 nt, Homo sapiens
  misc_RNA (1)...(19): siRNA sense strand
ggacacuucuuccaugaug

SEQ ID NO: 2150081 - RNA, 19 nt, Homo sapiens
  misc_RNA (1)...(19): siRNA sense strand
gaaagugaguccagcaucu

SEQ ID NO: 2150082 - RNA, 19 nt, Homo sapiens
  misc_RNA (1)...(19): siRNA sense strand
gacacaaccuuccacacua

SEQ ID NO: 2150083 - RNA, 19 nt, Homo sapiens
  misc_RNA (1)...(19): siRNA sense strand
gaaauggucaccuguccua

SEQ ID NO: 2150084 - RNA, 19 nt, Homo sapiens
  misc_RNA (1)...(19): siRNA sense strand
uuaacagucuuucccuuua

SEQ ID NO: 2150085 - RNA, 19 nt, Homo sapiens
  misc_RNA (1)...(19): siRNA sense strand
ucaaccagcuccucucuga

SEQ ID NO: 2150086 - RNA, 19 nt, Homo sapiens
  misc_RNA (1)...(19): siRNA sense strand
cagauucacuucuucauuc

SEQ ID NO: 2150087 - RNA, 19 nt, Homo sapiens
  misc_RNA (1)...(19): siRNA sense strand
gcucgcagcuucacuucuu

SEQ ID NO: 2150088 - RNA, 19 nt, Homo sapiens
  misc_RNA (1)...(19): siRNA sense strand
aagaccaccucacacauua

SEQ ID NO: 2150089 - RNA, 19 nt, Homo sapiens
  misc_RNA (1)...(19): siRNA sense strand
ggacaacgccaucgacugu

SEQ ID NO: 2150090 - RNA, 19 nt, Homo sapiens
  misc_RNA (1)...(19): siRNA sense strand
ccaggaacuauaacaauua

SEQ ID NO: 2150091 - RNA, 19 nt, Homo sapiens
  misc_RNA (1)...(19): siRNA sense strand
ggauacaaauuuccaugug

SEQ ID NO: 2150092 - RNA, 19 nt, Homo sapiens
  misc_RNA (1)...(19): siRNA sense strand
ggacaacucgcaucacuuc

SEQ ID NO: 2150093 - RNA, 19 nt, Homo sapiens
  misc_RNA (1)...(19): siRNA sense strand
gcucaacucuccagucagu

SEQ ID NO: 2150094 - RNA, 19 nt, Homo sapiens
  misc_RNA (1)...(19): siRNA sense strand
gagaucuccucccacagua

SEQ ID NO: 2150095 - RNA, 19 nt, Homo sapiens
  misc_RNA (1)...(19): siRNA sense strand
agacaaggauacaaauuuc

SEQ ID NO: 2150096 - RNA, 19 nt, Homo sapiens
  misc_RNA (1)...(19): siRNA sense strand
aaacuucacucacaucuac

SEQ ID NO: 2150097 - RNA, 19 nt, Homo sapiens
  misc_RNA (1)...(19): siRNA sense strand
acucaucucugaaacauug

SEQ ID NO: 2150098 - RNA, 19 nt, Homo sapiens
  misc_RNA (1)...(19): siRNA sense strand
caacaagaccuucuggaau

SEQ ID NO: 2150099 - RNA, 19 nt, Homo sapiens
  misc_RNA (1)...(19): siRNA sense strand
acagguggaucuagaugua

SEQ ID NO: 2150100 - RNA, 19 nt, Homo sapiens
  misc_RNA (1)...(19): siRNA sense strand
gaacagggacagugugcuu

SEQ ID NO: 2150101 - RNA, 19 nt, Homo sapiens
  misc_RNA (1)...(19): siRNA sense strand
acagucaccucacacagua

SEQ ID NO: 2150102 - RNA, 19 nt, Homo sapiens
  misc_RNA (1)...(19): siRNA sense strand
gagaccaccucagagagua

SEQ ID NO: 2150103 - RNA, 19 nt, Homo sapiens
  misc_RNA (1)...(19): siRNA sense strand
ccacuaccauucauucugu

SEQ ID NO: 2150104 - RNA, 19 nt, Homo sapiens
  misc_RNA (1)...(19): siRNA sense strand
ccacgacuccuaugacaaa

SEQ ID NO: 2150105 - RNA, 19 nt, Homo sapiens
  misc_RNA (1)...(19): siRNA sense strand
cagacaaggauacaaauuu

SEQ ID NO: 2150106 - RNA, 19 nt, Homo sapiens
  misc_RNA (1)...(19): siRNA sense strand
cuacagggauuucaacaag

SEQ ID NO: 2150107 - RNA, 19 nt, Homo sapiens
  misc_RNA (1)...(19): siRNA sense strand
caacaucacagguuccuau

SEQ ID NO: 2150108 - RNA, 19 nt, Homo sapiens
  misc_RNA (1)...(19): siRNA sense strand
ccacagccacuaauacauu

SEQ ID NO: 2150109 - RNA, 19 nt, Homo sapiens
  misc_RNA (1)...(19): siRNA sense strand
ccacauccaucucucaagu

SEQ ID NO: 2150110 - RNA, 19 nt, Homo sapiens
  misc_RNA (1)...(19): siRNA sense strand
ucagugggauggccucaaa

SEQ ID NO: 2150111 - RNA, 19 nt, Homo sapiens
  misc_RNA (1)...(19): siRNA sense strand
ggucuacaccuacaucuga

SEQ ID NO: 2150112 - RNA, 19 nt, Homo sapiens
  misc_RNA (1)...(19): siRNA sense strand
gaacaacaacagcaagaca

SEQ ID NO: 2150113 - RNA, 19 nt, Homo sapiens
  misc_RNA (1)...(19): siRNA sense strand
caacucgcaucacuucuca

SEQ ID NO: 2150114 - RNA, 19 nt, Homo sapiens
  misc_RNA (1)...(19): siRNA sense strand
uguccuaccuccaucagua

SEQ ID NO: 2150115 - RNA, 19 nt, Homo sapiens
  misc_RNA (1)...(19): siRNA sense strand
caacugccaucaccucaca

SEQ ID NO: 2150116 - RNA, 19 nt, Homo sapiens
  misc_RNA (1)...(19): siRNA sense strand
cagcuucacuucuuugauc

SEQ ID NO: 2150117 - RNA, 19 nt, Homo sapiens
  misc_RNA (1)...(19): siRNA sense strand
gaaacagccacgacuccua

SEQ ID NO: 2150118 - RNA, 19 nt, Homo sapiens
  misc_RNA (1)...(19): siRNA sense strand
caagaccaccucacacauu

SEQ ID NO: 2150119 - RNA, 19 nt, Homo sapiens
  misc_RNA (1)...(19): siRNA sense strand
ccaaucaguuccuuuagca

SEQ ID NO: 2150120 - RNA, 19 nt, Homo sapiens
  misc_RNA (1)...(19): siRNA sense strand
acacaguacucccagauuc

SEQ ID NO: 2150121 - RNA, 19 nt, Homo sapiens
  misc_RNA (1)...(19): siRNA sense strand
ccaucaaggugaacaacaa

SEQ ID NO: 2150122 - RNA, 19 nt, Homo sapiens
  misc_RNA (1)...(19): siRNA sense strand
gaacagguggaucuagaug

SEQ ID NO: 2150123 - RNA, 19 nt, Homo sapiens
  misc_RNA (1)...(19): siRNA sense strand
gaaugacccucagaauuac

SEQ ID NO: 2150124 - RNA, 19 nt, Homo sapiens
  misc_RNA (1)...(19): siRNA sense strand
gccaucaccucacauuuua

SEQ ID NO: 2150125 - RNA, 19 nt, Homo sapiens
  misc_RNA (1)...(19): siRNA sense strand
acacaguacucccagauuc

SEQ ID NO: 2150126 - RNA, 19 nt, Homo sapiens
  misc_RNA (1)...(19): siRNA sense strand
gggcuccgcuucuaucaca

SEQ ID NO: 2150127 - RNA, 19 nt, Homo sapiens
  misc_RNA (1)...(19): siRNA sense strand
ccacaaauacagugacuuc

SEQ ID NO: 2150128 - RNA, 19 nt, Homo sapiens
  misc_RNA (1)...(19): siRNA sense strand
aacaagaccuucuggaauc

SEQ ID NO: 2150129 - RNA, 19 nt, Homo sapiens
  misc_RNA (1)...(19): siRNA sense strand
gcaguagccucccgaccau

SEQ ID NO: 2150130 - RNA, 19 nt, Homo sapiens
  misc_RNA (1)...(19): siRNA sense strand
ucaaacaacuccuucuacu

SEQ ID NO: 2150131 - RNA, 19 nt, Homo sapiens
  misc_RNA (1)...(19): siRNA sense strand
gcacuucauugacuacaac

SEQ ID NO: 2150132 - RNA, 19 nt, Homo sapiens
  misc_RNA (1)...(19): siRNA sense strand
cgacuccuaugacaaacuu

SEQ ID NO: 2150133 - RNA, 19 nt, Homo sapiens
  misc_RNA (1)...(19): siRNA sense strand
aaaggaacgucagccauga

SEQ ID NO: 2150134 - RNA, 19 nt, Homo sapiens
  misc_RNA (1)...(19): siRNA sense strand
gcaccuaugacacucacua

SEQ ID NO: 2150135 - RNA, 19 nt, Homo sapiens
  misc_RNA (1)...(19): siRNA sense strand
uccaggaacuauaacaauu

SEQ ID NO: 2150136 - RNA, 19 nt, Homo sapiens
  misc_RNA (1)...(19): siRNA sense strand
acucggagcuucacuucuu

SEQ ID NO: 2150137 - RNA, 19 nt, Homo sapiens
  misc_RNA (1)...(19): siRNA sense strand
acaaauacagugacuucua

SEQ ID NO: 2150138 - RNA, 19 nt, Homo sapiens
  misc_RNA (1)...(19): siRNA sense strand
gcaacuaccagcacuucuu

SEQ ID NO: 2150139 - RNA, 19 nt, Homo sapiens
  misc_RNA (1)...(19): siRNA sense strand
acuacaaucucaucuacaa

SEQ ID NO: 2150140 - RNA, 19 nt, Homo sapiens
  misc_RNA (1)...(19): siRNA sense strand
gaaguacgucuacaaaugc

SEQ ID NO: 2150141 - RNA, 19 nt, Homo sapiens
  misc_RNA (1)...(19): siRNA sense strand
caagaccaccucacacaga

SEQ ID NO: 2150142 - RNA, 19 nt, Homo sapiens
  misc_RNA (1)...(19): siRNA sense strand
ccaaacuacucuuacuaca

SEQ ID NO: 2150143 - RNA, 19 nt, Homo sapiens
  misc_RNA (1)...(19): siRNA sense strand
gaccaacucucacaguacu

SEQ ID NO: 2150144 - RNA, 19 nt, Homo sapiens
  misc_RNA (1)...(19): siRNA sense strand
uaugaccacuacugagaaa

SEQ ID NO: 2150145 - RNA, 19 nt, Homo sapiens
  misc_RNA (1)...(19): siRNA sense strand
gaaggugcacaucaagaga

SEQ ID NO: 2150146 - RNA, 19 nt, Homo sapiens
  misc_RNA (1)...(19): siRNA sense strand
ucaacaagaccuucuggaa

SEQ ID NO: 2150147 - RNA, 19 nt, Homo sapiens
  misc_RNA (1)...(19): siRNA sense strand
ccucaacacccacuauuau

SEQ ID NO: 2150148 - RNA, 19 nt, Homo sapiens
  misc_RNA (1)...(19): siRNA sense strand
cagcuucaguucuucaauc

SEQ ID NO: 2150149 - RNA, 19 nt, Homo sapiens
  misc_RNA (1)...(19): siRNA sense strand
cuaugaaggugcacaucaa

SEQ ID NO: 2150150 - RNA, 19 nt, Homo sapiens
  misc_RNA (1)...(19): siRNA sense strand
ggaccucaaugacaacacu

SEQ ID NO: 2150151 - RNA, 19 nt, Homo sapiens
  misc_RNA (1)...(19): siRNA sense strand
uggaacagguggaucuaga

SEQ ID NO: 2150152 - RNA, 19 nt, Homo sapiens
  misc_RNA (1)...(19): siRNA sense strand
cagaccagaugccagaaug

SEQ ID NO: 2150153 - RNA, 19 nt, Homo sapiens
  misc_RNA (1)...(19): siRNA sense strand
ugaguucacuacagaaucu

SEQ ID NO: 2150154 - RNA, 19 nt, Homo sapiens
  misc_RNA (1)...(19): siRNA sense strand
cggcuucacuucuucaauc

SEQ ID NO: 2150155 - RNA, 19 nt, Homo sapiens
  misc_RNA (1)...(19): siRNA sense strand
cgacucccgugacacagaa

SEQ ID NO: 2150156 - RNA, 19 nt, Homo sapiens
  misc_RNA (1)...(19): siRNA sense strand
ggaagugucuguggaucag

SEQ ID NO: 2150157 - RNA, 19 nt, Homo sapiens
  misc_RNA (1)...(19): siRNA sense strand
acaaucucaucuacaacua

SEQ ID NO: 2150158 - RNA, 19 nt, Homo sapiens
  misc_RNA (1)...(19): siRNA sense strand
gcuaugaagaguucuacuu

SEQ ID NO: 2150159 - RNA, 19 nt, Homo sapiens
  misc_RNA (1)...(19): siRNA sense strand
cacagacuuucccucuaua

SEQ ID NO: 2150160 - RNA, 19 nt, Homo sapiens
  misc_RNA (1)...(19): siRNA sense strand
uauccaacgagcuuuauaa

SEQ ID NO: 2150161 - RNA, 19 nt, Homo sapiens
  misc_RNA (1)...(19): siRNA sense strand
gaaagaagcacuccauuaa

SEQ ID NO: 2150162 - RNA, 19 nt, Homo sapiens
  misc_RNA (1)...(19): siRNA sense strand
gaaagaagcacuccauuaa

SEQ ID NO: 2150163 - RNA, 19 nt, Homo sapiens
  misc_RNA (1)...(19): siRNA sense strand
gaaagaagcacuccauuaa

SEQ ID NO: 2150164 - RNA, 19 nt, Homo sapiens
  misc_RNA (1)...(19): siRNA sense strand
gaaagaggcacuacaauaa

SEQ ID NO: 2150165 - RNA, 19 nt, Homo sapiens
  misc_RNA (1)...(19): siRNA sense strand
ggagaugggugccagaaua

SEQ ID NO: 2150166 - RNA, 19 nt, Homo sapiens
  misc_RNA (1)...(19): siRNA sense strand
gaaagaagaacuccauuaa

SEQ ID NO: 2150167 - RNA, 19 nt, Homo sapiens
  misc_RNA (1)...(19): siRNA sense strand
gaaguaagcacuccauuaa

SEQ ID NO: 2150168 - RNA, 19 nt, Homo sapiens
  misc_RNA (1)...(19): siRNA sense strand
ggacaccugugaccacuua

SEQ ID NO: 2150169 - RNA, 19 nt, Homo sapiens
  misc_RNA (1)...(19): siRNA sense strand
gaaggaagcacuccauuaa

SEQ ID NO: 2150170 - RNA, 19 nt, Homo sapiens
  misc_RNA (1)...(19): siRNA sense strand
gaaggaagcacuccauuaa

SEQ ID NO: 2150171 - RNA, 19 nt, Homo sapiens
  misc_RNA (1)...(19): siRNA sense strand
gaaggaagcacuccauuaa

SEQ ID NO: 2150172 - RNA, 19 nt, Homo sapiens
  misc_RNA (1)...(19): siRNA sense strand
gaaggaagcacuccauuaa

SEQ ID NO: 2150173 - RNA, 19 nt, Homo sapiens
  misc_RNA (1)...(19): siRNA sense strand
gaaggaagcacuccauuaa

SEQ ID NO: 2150174 - RNA, 19 nt, Homo sapiens
  misc_RNA (1)...(19): siRNA sense strand
gaaggaagcacuccauuaa

SEQ ID NO: 2150175 - RNA, 19 nt, Homo sapiens
  misc_RNA (1)...(19): siRNA sense strand
gaaaucaguucaucugcua

SEQ ID NO: 2150176 - RNA, 19 nt, Homo sapiens
  misc_RNA (1)...(19): siRNA sense strand
gaaggaagcacuccauuaa

SEQ ID NO: 2150177 - RNA, 19 nt, Homo sapiens
  misc_RNA (1)...(19): siRNA sense strand
gaaggaagcacuccauuaa

SEQ ID NO: 2150178 - RNA, 19 nt, Homo sapiens
  misc_RNA (1)...(19): siRNA sense strand
gaaggaagcacuccauuaa

SEQ ID NO: 2150179 - RNA, 19 nt, Homo sapiens
  misc_RNA (1)...(19): siRNA sense strand
gaaggaagcacuccauuaa

SEQ ID NO: 2150180 - RNA, 19 nt, Homo sapiens
  misc_RNA (1)...(19): siRNA sense strand
gaaggaagcacuccauuaa

SEQ ID NO: 2150181 - RNA, 19 nt, Homo sapiens
  misc_RNA (1)...(19): siRNA sense strand
gaaggaagcacuccauuaa

SEQ ID NO: 2150182 - RNA, 19 nt, Homo sapiens
  misc_RNA (1)...(19): siRNA sense strand
gaaggaagcacuccauuaa

SEQ ID NO: 2150183 - RNA, 19 nt, Homo sapiens
  misc_RNA (1)...(19): siRNA sense strand
gaaggaagcacuccauuaa

SEQ ID NO: 2150184 - RNA, 19 nt, Homo sapiens
  misc_RNA (1)...(19): siRNA sense strand
gaaggaagcacuccauuaa

SEQ ID NO: 2150185 - RNA, 19 nt, Homo sapiens
  misc_RNA (1)...(19): siRNA sense strand
ugaaggaaguacucuauua

SEQ ID NO: 2150186 - RNA, 19 nt, Homo sapiens
  misc_RNA (1)...(19): siRNA sense strand
ugaaggaaguacucuauua

SEQ ID NO: 2150187 - RNA, 19 nt, Homo sapiens
  misc_RNA (1)...(19): siRNA sense strand
ugaaggaaguacucuauua

SEQ ID NO: 2150188 - RNA, 19 nt, Homo sapiens
  misc_RNA (1)...(19): siRNA sense strand
gaaggaagcacuccacuaa

SEQ ID NO: 2150189 - RNA, 19 nt, Homo sapiens
  misc_RNA (1)...(19): siRNA sense strand
gaaggaagcacuccacuaa

SEQ ID NO: 2150190 - RNA, 19 nt, Homo sapiens
  misc_RNA (1)...(19): siRNA sense strand
gaaggaagcacuccacuaa

SEQ ID NO: 2150191 - RNA, 19 nt, Homo sapiens
  misc_RNA (1)...(19): siRNA sense strand
gaaggaagcacuccacuaa

SEQ ID NO: 2150192 - RNA, 19 nt, Homo sapiens
  misc_RNA (1)...(19): siRNA sense strand
gaaggaagcacuccacuaa

SEQ ID NO: 2150193 - RNA, 19 nt, Homo sapiens
  misc_RNA (1)...(19): siRNA sense strand
gaagaggacugccggaaga

SEQ ID NO: 2150194 - RNA, 19 nt, Homo sapiens
  misc_RNA (1)...(19): siRNA sense strand
gaaggaaggccuccauuaa

SEQ ID NO: 2150195 - RNA, 19 nt, Homo sapiens
  misc_RNA (1)...(19): siRNA sense strand
gaaggaaacacuccauuaa

SEQ ID NO: 2150196 - RNA, 19 nt, Homo sapiens
  misc_RNA (1)...(19): siRNA sense strand
ugaaacaaguacuccauua

SEQ ID NO: 2150197 - RNA, 19 nt, Homo sapiens
  misc_RNA (1)...(19): siRNA sense strand
gcacacauaucaccacuuc

SEQ ID NO: 2150198 - RNA, 19 nt, Homo sapiens
  misc_RNA (1)...(19): siRNA sense strand
gaaguacuccauuaacaua

SEQ ID NO: 2150199 - RNA, 19 nt, Homo sapiens
  misc_RNA (1)...(19): siRNA sense strand
ugaaggaaguacuccauua

SEQ ID NO: 2150200 - RNA, 19 nt, Homo sapiens
  misc_RNA (1)...(19): siRNA sense strand
ugaaggaaguacuccauua

SEQ ID NO: 2150201 - RNA, 19 nt, Homo sapiens
  misc_RNA (1)...(19): siRNA sense strand
cagaagaacuccuuuaaca

SEQ ID NO: 2150202 - RNA, 19 nt, Homo sapiens
  misc_RNA (1)...(19): siRNA sense strand
gaagucaguucaucuccua

SEQ ID NO: 2150203 - RNA, 19 nt, Homo sapiens
  misc_RNA (1)...(19): siRNA sense strand
gaaggaagcacuccauuau

SEQ ID NO: 2150204 - RNA, 19 nt, Homo sapiens
  misc_RNA (1)...(19): siRNA sense strand
gaagucaguucaucuccua

SEQ ID NO: 2150205 - RNA, 19 nt, Homo sapiens
  misc_RNA (1)...(19): siRNA sense strand
gaagucaguucaucuccua

SEQ ID NO: 2150206 - RNA, 19 nt, Homo sapiens
  misc_RNA (1)...(19): siRNA sense strand
gaagucaguucaucuccua

SEQ ID NO: 2150207 - RNA, 19 nt, Homo sapiens
  misc_RNA (1)...(19): siRNA sense strand
gcacuccacuaacaaguuu

SEQ ID NO: 2150208 - RNA, 19 nt, Homo sapiens
  misc_RNA (1)...(19): siRNA sense strand
gaagucaguucaucuccua

SEQ ID NO: 2150209 - RNA, 19 nt, Homo sapiens
  misc_RNA (1)...(19): siRNA sense strand
gcacuccacuaacaaauau

SEQ ID NO: 2150210 - RNA, 19 nt, Homo sapiens
  misc_RNA (1)...(19): siRNA sense strand
ggaaggaagcacuccauua

SEQ ID NO: 2150211 - RNA, 19 nt, Homo sapiens
  misc_RNA (1)...(19): siRNA sense strand
gaaaccaguucaucuccua

SEQ ID NO: 2150212 - RNA, 19 nt, Homo sapiens
  misc_RNA (1)...(19): siRNA sense strand
gaaggaaguacucuauuaa

SEQ ID NO: 2150213 - RNA, 19 nt, Homo sapiens
  misc_RNA (1)...(19): siRNA sense strand
gaaggcaguucaucuccua

SEQ ID NO: 2150214 - RNA, 19 nt, Homo sapiens
  misc_RNA (1)...(19): siRNA sense strand
gaaggaaguacucuauuaa

SEQ ID NO: 2150215 - RNA, 19 nt, Homo sapiens
  misc_RNA (1)...(19): siRNA sense strand
gaaggaaguacucuauuaa

SEQ ID NO: 2150216 - RNA, 19 nt, Homo sapiens
  misc_RNA (1)...(19): siRNA sense strand
gaaggcaguucaucuccua

SEQ ID NO: 2150217 - RNA, 19 nt, Homo sapiens
  misc_RNA (1)...(19): siRNA sense strand
ggaaggaaggccuccauua

SEQ ID NO: 2150218 - RNA, 19 nt, Homo sapiens
  misc_RNA (1)...(19): siRNA sense strand
gaaggaagcacugcauuaa

SEQ ID NO: 2150219 - RNA, 19 nt, Homo sapiens
  misc_RNA (1)...(19): siRNA sense strand
gaaggaagcacugcauuaa

SEQ ID NO: 2150220 - RNA, 19 nt, Homo sapiens
  misc_RNA (1)...(19): siRNA sense strand
gcacaccucugaccacuuc

SEQ ID NO: 2150221 - RNA, 19 nt, Homo sapiens
  misc_RNA (1)...(19): siRNA sense strand
gcacuacaauaacaaguau

SEQ ID NO: 2150222 - RNA, 19 nt, Homo sapiens
  misc_RNA (1)...(19): siRNA sense strand
gaaacaaguacuccauuaa

SEQ ID NO: 2150223 - RNA, 19 nt, Homo sapiens
  misc_RNA (1)...(19): siRNA sense strand
gaaaccaguuccucuccua

SEQ ID NO: 2150224 - RNA, 19 nt, Homo sapiens
  misc_RNA (1)...(19): siRNA sense strand
gaaggaaagacuccauuaa

SEQ ID NO: 2150225 - RNA, 19 nt, Homo sapiens
  misc_RNA (1)...(19): siRNA sense strand
guacagauugucucaguua

SEQ ID NO: 2150226 - RNA, 19 nt, Homo sapiens
  misc_RNA (1)...(19): siRNA sense strand
ggacaaugccaccgaagua

SEQ ID NO: 2150227 - RNA, 19 nt, Homo sapiens
  misc_RNA (1)...(19): siRNA sense strand
gaaggaaguacuccauuaa

SEQ ID NO: 2150228 - RNA, 19 nt, Homo sapiens
  misc_RNA (1)...(19): siRNA sense strand
gaaggaaguacuccauuaa

SEQ ID NO: 2150229 - RNA, 19 nt, Homo sapiens
  misc_RNA (1)...(19): siRNA sense strand
gcaaguucaucuccuacua

SEQ ID NO: 2150230 - RNA, 19 nt, Homo sapiens
  misc_RNA (1)...(19): siRNA sense strand
gauaugagcacaccucuga

SEQ ID NO: 2150231 - RNA, 19 nt, Homo sapiens
  misc_RNA (1)...(19): siRNA sense strand
gaacuaaacacaccaucaa

SEQ ID NO: 2150232 - RNA, 19 nt, Homo sapiens
  misc_RNA (1)...(19): siRNA sense strand
gaaguacucuauuaacaag

SEQ ID NO: 2150233 - RNA, 19 nt, Homo sapiens
  misc_RNA (1)...(19): siRNA sense strand
gaaguacucuauuaacaag

SEQ ID NO: 2150234 - RNA, 19 nt, Homo sapiens
  misc_RNA (1)...(19): siRNA sense strand
gaaggaagcacuccauuca

SEQ ID NO: 2150235 - RNA, 19 nt, Homo sapiens
  misc_RNA (1)...(19): siRNA sense strand
auacaaaccucaacuccua

SEQ ID NO: 2150236 - RNA, 19 nt, Homo sapiens
  misc_RNA (1)...(19): siRNA sense strand
gaaggaaccacuccguuaa

SEQ ID NO: 2150237 - RNA, 19 nt, Homo sapiens
  misc_RNA (1)...(19): siRNA sense strand
gaaguacucuauuaacaag

SEQ ID NO: 2150238 - RNA, 19 nt, Homo sapiens
  misc_RNA (1)...(19): siRNA sense strand
ggaaguccuuuauuaacaa

SEQ ID NO: 2150239 - RNA, 19 nt, Homo sapiens
  misc_RNA (1)...(19): siRNA sense strand
ugaaagaggcacuacaaua

SEQ ID NO: 2150240 - RNA, 19 nt, Homo sapiens
  misc_RNA (1)...(19): siRNA sense strand
gcaugccaaucucaacuua

SEQ ID NO: 2150241 - RNA, 19 nt, Homo sapiens
  misc_RNA (1)...(19): siRNA sense strand
auaccaaccucgacucuua

SEQ ID NO: 2150242 - RNA, 19 nt, Homo sapiens
  misc_RNA (1)...(19): siRNA sense strand
gaagauaccagcauugcaa

SEQ ID NO: 2150243 - RNA, 19 nt, Homo sapiens
  misc_RNA (1)...(19): siRNA sense strand
gauauuugcucagacauga

SEQ ID NO: 2150244 - RNA, 19 nt, Homo sapiens
  misc_RNA (1)...(19): siRNA sense strand
ccacgaauacuacaauuaa

SEQ ID NO: 2150245 - RNA, 19 nt, Homo sapiens
  misc_RNA (1)...(19): siRNA sense strand
ccacaucggugaccauuuc

SEQ ID NO: 2150246 - RNA, 19 nt, Homo sapiens
  misc_RNA (1)...(19): siRNA sense strand
aagaagaacuccauuaaca

SEQ ID NO: 2150247 - RNA, 19 nt, Homo sapiens
  misc_RNA (1)...(19): siRNA sense strand
gaaggaacgacuccauuaa

SEQ ID NO: 2150248 - RNA, 19 nt, Homo sapiens
  misc_RNA (1)...(19): siRNA sense strand
aaacucaggugaccaauuc

SEQ ID NO: 2150249 - RNA, 19 nt, Homo sapiens
  misc_RNA (1)...(19): siRNA sense strand
auaccaaccucaacuuaua

SEQ ID NO: 2150250 - RNA, 19 nt, Homo sapiens
  misc_RNA (1)...(19): siRNA sense strand
gaagauggccaaggaauau

SEQ ID NO: 2150251 - RNA, 19 nt, Homo sapiens
  misc_RNA (1)...(19): siRNA sense strand
ugaaagaagcacuccauua

SEQ ID NO: 2150252 - RNA, 19 nt, Homo sapiens
  misc_RNA (1)...(19): siRNA sense strand
ugaaggaaccacuccauua

SEQ ID NO: 2150253 - RNA, 19 nt, Homo sapiens
  misc_RNA (1)...(19): siRNA sense strand
gaagccaguuuaucuccua

SEQ ID NO: 2150254 - RNA, 19 nt, Homo sapiens
  misc_RNA (1)...(19): siRNA sense strand
caaaucaacuaacagugaa

SEQ ID NO: 2150255 - RNA, 19 nt, Homo sapiens
  misc_RNA (1)...(19): siRNA sense strand
ugaaagaagcacuccauua

SEQ ID NO: 2150256 - RNA, 19 nt, Homo sapiens
  misc_RNA (1)...(19): siRNA sense strand
augcaaaccucaacuuaua

SEQ ID NO: 2150257 - RNA, 19 nt, Homo sapiens
  misc_RNA (1)...(19): siRNA sense strand
gcacuccacuaacaaguau

SEQ ID NO: 2150258 - RNA, 19 nt, Homo sapiens
  misc_RNA (1)...(19): siRNA sense strand
augcaaaccucaacuuaua

SEQ ID NO: 2150259 - RNA, 19 nt, Homo sapiens
  misc_RNA (1)...(19): siRNA sense strand
gaagaacuccuuuaacaag

SEQ ID NO: 2150260 - RNA, 19 nt, Homo sapiens
  misc_RNA (1)...(19): siRNA sense strand
gaaguucaccgaagagcua

SEQ ID NO: 2150261 - RNA, 19 nt, Homo sapiens
  misc_RNA (1)...(19): siRNA sense strand
aaagaaagcugcucaagaa

SEQ ID NO: 2150262 - RNA, 19 nt, Homo sapiens
  misc_RNA (1)...(19): siRNA sense strand
gaagaugguuugaagcuuu

SEQ ID NO: 2150263 - RNA, 19 nt, Homo sapiens
  misc_RNA (1)...(19): siRNA sense strand
gagaggagauggauugaaa

SEQ ID NO: 2150264 - RNA, 19 nt, Homo sapiens
  misc_RNA (1)...(19): siRNA sense strand
gggaaguuauugcuaauua

SEQ ID NO: 2150265 - RNA, 19 nt, Homo sapiens
  misc_RNA (1)...(19): siRNA sense strand
ggaagaaccaagaucauua

SEQ ID NO: 2150266 - RNA, 19 nt, Homo sapiens
  misc_RNA (1)...(19): siRNA sense strand
gaucaaagcagcucauaaa

SEQ ID NO: 2150267 - RNA, 19 nt, Homo sapiens
  misc_RNA (1)...(19): siRNA sense strand
gaaagcugcucaagaacaa

SEQ ID NO: 2150268 - RNA, 19 nt, Homo sapiens
  misc_RNA (1)...(19): siRNA sense strand
gaaccaagaucauuaugca

SEQ ID NO: 2150269 - RNA, 19 nt, Homo sapiens
  misc_RNA (1)...(19): siRNA sense strand
caaagcagcucauaaagca

SEQ ID NO: 2150270 - RNA, 19 nt, Homo sapiens
  misc_RNA (1)...(19): siRNA sense strand
gaugggaaguuauugcuaa

SEQ ID NO: 2150271 - RNA, 19 nt, Homo sapiens
  misc_RNA (1)...(19): siRNA sense strand
gauaaugacuacuucacuu

SEQ ID NO: 2150272 - RNA, 19 nt, Homo sapiens
  misc_RNA (1)...(19): siRNA sense strand
acaaagacaagcugaauua

SEQ ID NO: 2150273 - RNA, 19 nt, Homo sapiens
  misc_RNA (1)...(19): siRNA sense strand
ggaaggagcaagaagcuaa

SEQ ID NO: 2150274 - RNA, 19 nt, Homo sapiens
  misc_RNA (1)...(19): siRNA sense strand
aagacaagcugaauuagaa

SEQ ID NO: 2150275 - RNA, 19 nt, Homo sapiens
  misc_RNA (1)...(19): siRNA sense strand
gaaaugcuucugccucuuu

SEQ ID NO: 2150276 - RNA, 19 nt, Homo sapiens
  misc_RNA (1)...(19): siRNA sense strand
gaaagaagcagaaaagaaa

SEQ ID NO: 2150277 - RNA, 19 nt, Homo sapiens
  misc_RNA (1)...(19): siRNA sense strand
gaaaggaauuccagauggu

SEQ ID NO: 2150278 - RNA, 19 nt, Homo sapiens
  misc_RNA (1)...(19): siRNA sense strand
ggaaucagaagaugaagaa

SEQ ID NO: 2150279 - RNA, 19 nt, Homo sapiens
  misc_RNA (1)...(19): siRNA sense strand
gaacaagugcugaaugcaa

SEQ ID NO: 2150280 - RNA, 19 nt, Homo sapiens
  misc_RNA (1)...(19): siRNA sense strand
caaaagaacugccaaagau

SEQ ID NO: 2150281 - RNA, 19 nt, Homo sapiens
  misc_RNA (1)...(19): siRNA sense strand
auuagaagcugcucgguua

SEQ ID NO: 2150282 - RNA, 19 nt, Homo sapiens
  misc_RNA (1)...(19): siRNA sense strand
gaacuugucgagaugguaa

SEQ ID NO: 2150283 - RNA, 19 nt, Homo sapiens
  misc_RNA (1)...(19): siRNA sense strand
gcaacaagagcacaaagaa

SEQ ID NO: 2150284 - RNA, 19 nt, Homo sapiens
  misc_RNA (1)...(19): siRNA sense strand
gaagaaccaagaucauuau

SEQ ID NO: 2150285 - RNA, 19 nt, Homo sapiens
  misc_RNA (1)...(19): siRNA sense strand
gcaaguagagccaagaaau

SEQ ID NO: 2150286 - RNA, 19 nt, Homo sapiens
  misc_RNA (1)...(19): siRNA sense strand
gcauacagcugugauccaa

SEQ ID NO: 2150287 - RNA, 19 nt, Homo sapiens
  misc_RNA (1)...(19): siRNA sense strand
gauaauuucuucgaagugu

SEQ ID NO: 2150288 - RNA, 19 nt, Homo sapiens
  misc_RNA (1)...(19): siRNA sense strand
gaugagaggagauggauug

SEQ ID NO: 2150289 - RNA, 19 nt, Homo sapiens
  misc_RNA (1)...(19): siRNA sense strand
caaagaaagcugcucaaga

SEQ ID NO: 2150290 - RNA, 19 nt, Homo sapiens
  misc_RNA (1)...(19): siRNA sense strand
cgacaagcaucuaagaaca

SEQ ID NO: 2150291 - RNA, 19 nt, Homo sapiens
  misc_RNA (1)...(19): siRNA sense strand
uaaauacaccugaaagaug

SEQ ID NO: 2150292 - RNA, 19 nt, Homo sapiens
  misc_RNA (1)...(19): siRNA sense strand
gcucauaaagcaaugguuu

SEQ ID NO: 2150293 - RNA, 19 nt, Homo sapiens
  misc_RNA (1)...(19): siRNA sense strand
caacaagagcacaaagaaa

SEQ ID NO: 2150294 - RNA, 19 nt, Homo sapiens
  misc_RNA (1)...(19): siRNA sense strand
aaacauacccaguaaauac

SEQ ID NO: 2150295 - RNA, 19 nt, Homo sapiens
  misc_RNA (1)...(19): siRNA sense strand
gaaaacacuugaucccaaa

SEQ ID NO: 2150296 - RNA, 19 nt, Homo sapiens
  misc_RNA (1)...(19): siRNA sense strand
gagcaagaagcuaaagaaa

SEQ ID NO: 2150297 - RNA, 19 nt, Homo sapiens
  misc_RNA (1)...(19): siRNA sense strand
auacaaggcuacacagaga

SEQ ID NO: 2150298 - RNA, 19 nt, Homo sapiens
  misc_RNA (1)...(19): siRNA sense strand
aaagaaggacugcaugaaa

SEQ ID NO: 2150299 - RNA, 19 nt, Homo sapiens
  misc_RNA (1)...(19): siRNA sense strand
ggagcaagaagcuaaagaa

SEQ ID NO: 2150300 - RNA, 19 nt, Homo sapiens
  misc_RNA (1)...(19): siRNA sense strand
ggaacuggaggauaagaaa

SEQ ID NO: 2150301 - RNA, 19 nt, Homo sapiens
  misc_RNA (1)...(19): siRNA sense strand
ggacaaagaaggacugcau

SEQ ID NO: 2150302 - RNA, 19 nt, Homo sapiens
  misc_RNA (1)...(19): siRNA sense strand
cuucgaaacucaugcaaga

SEQ ID NO: 2150303 - RNA, 19 nt, Homo sapiens
  misc_RNA (1)...(19): siRNA sense strand
caaagauguuauuggcaaa

SEQ ID NO: 2150304 - RNA, 19 nt, Homo sapiens
  misc_RNA (1)...(19): siRNA sense strand
gcucugaccucugccucua

SEQ ID NO: 2150305 - RNA, 19 nt, Homo sapiens
  misc_RNA (1)...(19): siRNA sense strand
ggaacaagcuuugaaaaca

SEQ ID NO: 2150306 - RNA, 19 nt, Homo sapiens
  misc_RNA (1)...(19): siRNA sense strand
ccaagaucauuaugcaguu

SEQ ID NO: 2150307 - RNA, 19 nt, Homo sapiens
  misc_RNA (1)...(19): siRNA sense strand
guaaauacaccugaaagau

SEQ ID NO: 2150308 - RNA, 19 nt, Homo sapiens
  misc_RNA (1)...(19): siRNA sense strand
gaaagaagaggaggaaguc

SEQ ID NO: 2150309 - RNA, 19 nt, Homo sapiens
  misc_RNA (1)...(19): siRNA sense strand
ggaagaugguuugaagcuu

SEQ ID NO: 2150310 - RNA, 19 nt, Homo sapiens
  misc_RNA (1)...(19): siRNA sense strand
gugaagcaaaggauaauuu

SEQ ID NO: 2150311 - RNA, 19 nt, Homo sapiens
  misc_RNA (1)...(19): siRNA sense strand
cuacuucacuugcauaacu

SEQ ID NO: 2150312 - RNA, 19 nt, Homo sapiens
  misc_RNA (1)...(19): siRNA sense strand
gaaaacauacccaguaaau

SEQ ID NO: 2150313 - RNA, 19 nt, Homo sapiens
  misc_RNA (1)...(19): siRNA sense strand
ggagaaagaagaggaggaa

SEQ ID NO: 2150314 - RNA, 19 nt, Homo sapiens
  misc_RNA (1)...(19): siRNA sense strand
agaaggagauaaugacuac

SEQ ID NO: 2150315 - RNA, 19 nt, Homo sapiens
  misc_RNA (1)...(19): siRNA sense strand
guuaagaggagaaacagaa

SEQ ID NO: 2150316 - RNA, 19 nt, Homo sapiens
  misc_RNA (1)...(19): siRNA sense strand
aaaagaacauggaguggua

SEQ ID NO: 2150317 - RNA, 19 nt, Homo sapiens
  misc_RNA (1)...(19): siRNA sense strand
ggaaguuauugcuaauuac

SEQ ID NO: 2150318 - RNA, 19 nt, Homo sapiens
  misc_RNA (1)...(19): siRNA sense strand
uuaaagcugugaaucuguu

SEQ ID NO: 2150319 - RNA, 19 nt, Homo sapiens
  misc_RNA (1)...(19): siRNA sense strand
uucaggaacuggaggauaa

SEQ ID NO: 2150320 - RNA, 19 nt, Homo sapiens
  misc_RNA (1)...(19): siRNA sense strand
aaagugaagcaaaggauaa

SEQ ID NO: 2150321 - RNA, 19 nt, Homo sapiens
  misc_RNA (1)...(19): siRNA sense strand
gaaagaguuauccgaggaa

SEQ ID NO: 2150322 - RNA, 19 nt, Homo sapiens
  misc_RNA (1)...(19): siRNA sense strand
caaguagagccaagaaaug

SEQ ID NO: 2150323 - RNA, 19 nt, Homo sapiens
  misc_RNA (1)...(19): siRNA sense strand
gaacaagcuuugaaaacau

SEQ ID NO: 2150324 - RNA, 19 nt, Homo sapiens
  misc_RNA (1)...(19): siRNA sense strand
caacgcaacgccuucagaa

SEQ ID NO: 2150325 - RNA, 19 nt, Homo sapiens
  misc_RNA (1)...(19): siRNA sense strand
gaacacagagaaaucaacu

SEQ ID NO: 2150326 - RNA, 19 nt, Homo sapiens
  misc_RNA (1)...(19): siRNA sense strand
gaaggagcaagaagcuaaa

SEQ ID NO: 2150327 - RNA, 19 nt, Homo sapiens
  misc_RNA (1)...(19): siRNA sense strand
aauuccagauggucaaaua

SEQ ID NO: 2150328 - RNA, 19 nt, Homo sapiens
  misc_RNA (1)...(19): siRNA sense strand
aucagaagaugaagaauug

SEQ ID NO: 2150329 - RNA, 19 nt, Homo sapiens
  misc_RNA (1)...(19): siRNA sense strand
ggacaacagaagaacagaa

SEQ ID NO: 2150330 - RNA, 19 nt, Homo sapiens
  misc_RNA (1)...(19): siRNA sense strand
gaagguccauauacagacu

SEQ ID NO: 2150331 - RNA, 19 nt, Homo sapiens
  misc_RNA (1)...(19): siRNA sense strand
ucgaaacucaugcaagaua

SEQ ID NO: 2150332 - RNA, 19 nt, Homo sapiens
  misc_RNA (1)...(19): siRNA sense strand
ggagauggauugaaaagca

SEQ ID NO: 2150333 - RNA, 19 nt, Homo sapiens
  misc_RNA (1)...(19): siRNA sense strand
cgaggaaucagaagaugaa

SEQ ID NO: 2150334 - RNA, 19 nt, Homo sapiens
  misc_RNA (1)...(19): siRNA sense strand
caaagaaggacugcaugaa

SEQ ID NO: 2150335 - RNA, 19 nt, Homo sapiens
  misc_RNA (1)...(19): siRNA sense strand
ggaggauaagaaagaguua

SEQ ID NO: 2150336 - RNA, 19 nt, Homo sapiens
  misc_RNA (1)...(19): siRNA sense strand
caucuaagaacacagagaa

SEQ ID NO: 2150337 - RNA, 19 nt, Homo sapiens
  misc_RNA (1)...(19): siRNA sense strand
gcagaacagagcaacaaga

SEQ ID NO: 2150338 - RNA, 19 nt, Homo sapiens
  misc_RNA (1)...(19): siRNA sense strand
gugggaagaugguuugaag

SEQ ID NO: 2150339 - RNA, 19 nt, Homo sapiens
  misc_RNA (1)...(19): siRNA sense strand
aaaggcauuugauaaguuc

SEQ ID NO: 2150340 - RNA, 19 nt, Homo sapiens
  misc_RNA (1)...(19): siRNA sense strand
gaacugccaaagauguuau

SEQ ID NO: 2150341 - RNA, 19 nt, Homo sapiens
  misc_RNA (1)...(19): siRNA sense strand
aauucaagaugggaaguua

SEQ ID NO: 2150342 - RNA, 19 nt, Homo sapiens
  misc_RNA (1)...(19): siRNA sense strand
guuaucugauccagugaaa

SEQ ID NO: 2150343 - RNA, 19 nt, Homo sapiens
  misc_RNA (1)...(19): siRNA sense strand
caugcaagauagaagaaau

SEQ ID NO: 2150344 - RNA, 19 nt, Homo sapiens
  misc_RNA (1)...(19): siRNA sense strand
cgaaacucaugcaagauag

SEQ ID NO: 2150345 - RNA, 19 nt, Homo sapiens
  misc_RNA (1)...(19): siRNA sense strand
ucuacacucugucaaguug

SEQ ID NO: 2150346 - RNA, 19 nt, Homo sapiens
  misc_RNA (1)...(19): siRNA sense strand
caaaggauaauuucuucga

SEQ ID NO: 2150347 - RNA, 19 nt, Homo sapiens
  misc_RNA (1)...(19): siRNA sense strand
gacgagcauuuaacagugu

SEQ ID NO: 2150348 - RNA, 19 nt, Homo sapiens
  misc_RNA (1)...(19): siRNA sense strand
aaagacaagcugaauuaga

SEQ ID NO: 2150349 - RNA, 19 nt, Homo sapiens
  misc_RNA (1)...(19): siRNA sense strand
gaaacgauacaaggaacuu

SEQ ID NO: 2150350 - RNA, 19 nt, Homo sapiens
  misc_RNA (1)...(19): siRNA sense strand
gcaugaaacgauacaagga

SEQ ID NO: 2150351 - RNA, 19 nt, Homo sapiens
  misc_RNA (1)...(19): siRNA sense strand
gaauugcaguuggaagagu

SEQ ID NO: 2150352 - RNA, 19 nt, Homo sapiens
  misc_RNA (1)...(19): siRNA sense strand
caagaacaagugcugaaug

SEQ ID NO: 2150353 - RNA, 19 nt, Homo sapiens
  misc_RNA (1)...(19): siRNA sense strand
uaagaacacagagaaauca

SEQ ID NO: 2150354 - RNA, 19 nt, Homo sapiens
  misc_RNA (1)...(19): siRNA sense strand
aaacaaagacaagcugaau

SEQ ID NO: 2150355 - RNA, 19 nt, Homo sapiens
  misc_RNA (1)...(19): siRNA sense strand
ucgguuagcuaaggagaaa

SEQ ID NO: 2150356 - RNA, 19 nt, Homo sapiens
  misc_RNA (1)...(19): siRNA sense strand
gagcaaaucagaaaagaga

SEQ ID NO: 2150357 - RNA, 19 nt, Homo sapiens
  misc_RNA (1)...(19): siRNA sense strand
gaaacucaugcaagauaga

SEQ ID NO: 2150358 - RNA, 19 nt, Homo sapiens
  misc_RNA (1)...(19): siRNA sense strand
aagaaggacugcaugaaac

SEQ ID NO: 2150359 - RNA, 19 nt, Homo sapiens
  misc_RNA (1)...(19): siRNA sense strand
gcaaagaaagcugcucaag

SEQ ID NO: 2150360 - RNA, 19 nt, Homo sapiens
  misc_RNA (1)...(19): siRNA sense strand
ggagguggaaauggaagua

SEQ ID NO: 2150361 - RNA, 19 nt, Homo sapiens
  misc_RNA (1)...(19): siRNA sense strand
caaggaagauguauuugua

SEQ ID NO: 2150362 - RNA, 19 nt, Homo sapiens
  misc_RNA (1)...(19): siRNA sense strand
gaacggauaugguuucauc

SEQ ID NO: 2150363 - RNA, 19 nt, Homo sapiens
  misc_RNA (1)...(19): siRNA sense strand
gcucaccucuucuuacaua

SEQ ID NO: 2150364 - RNA, 19 nt, Homo sapiens
  misc_RNA (1)...(19): siRNA sense strand
gcaaagaaguguucaaugc

SEQ ID NO: 2150365 - RNA, 19 nt, Homo sapiens
  misc_RNA (1)...(19): siRNA sense strand
gcgaaaggaucaagggaua

SEQ ID NO: 2150366 - RNA, 19 nt, Homo sapiens
  misc_RNA (1)...(19): siRNA sense strand
gaucuuaaauggcaaagga

SEQ ID NO: 2150367 - RNA, 19 nt, Homo sapiens
  misc_RNA (1)...(19): siRNA sense strand
caacgcagaugcccagaaa

SEQ ID NO: 2150368 - RNA, 19 nt, Homo sapiens
  misc_RNA (1)...(19): siRNA sense strand
cagcagaucguaaccauua

SEQ ID NO: 2150369 - RNA, 19 nt, Homo sapiens
  misc_RNA (1)...(19): siRNA sense strand
gauagaagaugggaucguu

SEQ ID NO: 2150370 - RNA, 19 nt, Homo sapiens
  misc_RNA (1)...(19): siRNA sense strand
cagagaagaucuuaaaugg

SEQ ID NO: 2150371 - RNA, 19 nt, Homo sapiens
  misc_RNA (1)...(19): siRNA sense strand
gaacaagguagaccaguga

SEQ ID NO: 2150372 - RNA, 19 nt, Homo sapiens
  misc_RNA (1)...(19): siRNA sense strand
uaaacacuguggaguauug

SEQ ID NO: 2150373 - RNA, 19 nt, Homo sapiens
  misc_RNA (1)...(19): siRNA sense strand
ggaguuugauguuguugaa

SEQ ID NO: 2150374 - RNA, 19 nt, Homo sapiens
  misc_RNA (1)...(19): siRNA sense strand
ggacuugccuaaccaaucu

SEQ ID NO: 2150375 - RNA, 19 nt, Homo sapiens
  misc_RNA (1)...(19): siRNA sense strand
caagaucccucaccugcaa

SEQ ID NO: 2150376 - RNA, 19 nt, Homo sapiens
  misc_RNA (1)...(19): siRNA sense strand
ggacgaggguacuaugugu

SEQ ID NO: 2150377 - RNA, 19 nt, Homo sapiens
  misc_RNA (1)...(19): siRNA sense strand
gugcacaacucaaacaaug

SEQ ID NO: 2150378 - RNA, 19 nt, Homo sapiens
  misc_RNA (1)...(19): siRNA sense strand
aaacgcagcuuucgugaca

SEQ ID NO: 2150379 - RNA, 19 nt, Homo sapiens
  misc_RNA (1)...(19): siRNA sense strand
ggaaugacaccaaggaaga

SEQ ID NO: 2150380 - RNA, 19 nt, Homo sapiens
  misc_RNA (1)...(19): siRNA sense strand
ccaggagacuacaguguuu

SEQ ID NO: 2150381 - RNA, 19 nt, Homo sapiens
  misc_RNA (1)...(19): siRNA sense strand
ugaagagacuguggaguuu

SEQ ID NO: 2150382 - RNA, 19 nt, Homo sapiens
  misc_RNA (1)...(19): siRNA sense strand
agacugccauaaagaauaa

SEQ ID NO: 2150383 - RNA, 19 nt, Homo sapiens
  misc_RNA (1)...(19): siRNA sense strand
caucagccaugcucucaaa

SEQ ID NO: 2150384 - RNA, 19 nt, Homo sapiens
  misc_RNA (1)...(19): siRNA sense strand
gaaaggaucaagggauaaa

SEQ ID NO: 2150385 - RNA, 19 nt, Homo sapiens
  misc_RNA (1)...(19): siRNA sense strand
ccaacaagaagaaauauga

SEQ ID NO: 2150386 - RNA, 19 nt, Homo sapiens
  misc_RNA (1)...(19): siRNA sense strand
caaaugaagcagugggaua

SEQ ID NO: 2150387 - RNA, 19 nt, Homo sapiens
  misc_RNA (1)...(19): siRNA sense strand
guacggcaaugaagaagau

SEQ ID NO: 2150388 - RNA, 19 nt, Homo sapiens
  misc_RNA (1)...(19): siRNA sense strand
ggauaugguuucaucaaca

SEQ ID NO: 2150389 - RNA, 19 nt, Homo sapiens
  misc_RNA (1)...(19): siRNA sense strand
caaccagggugcaggagaa

SEQ ID NO: 2150390 - RNA, 19 nt, Homo sapiens
  misc_RNA (1)...(19): siRNA sense strand
gcaaacagcacacagucuu

SEQ ID NO: 2150391 - RNA, 19 nt, Homo sapiens
  misc_RNA (1)...(19): siRNA sense strand
guaaggaacggauaugguu

SEQ ID NO: 2150392 - RNA, 19 nt, Homo sapiens
  misc_RNA (1)...(19): siRNA sense strand
ccaacacaguauucucuuu

SEQ ID NO: 2150393 - RNA, 19 nt, Homo sapiens
  misc_RNA (1)...(19): siRNA sense strand
cugaguaaaugccggcuua

SEQ ID NO: 2150394 - RNA, 19 nt, Homo sapiens
  misc_RNA (1)...(19): siRNA sense strand
gcagaucguaaccauuaua

SEQ ID NO: 2150395 - RNA, 19 nt, Homo sapiens
  misc_RNA (1)...(19): siRNA sense strand
caaccaccauagacaagaa

SEQ ID NO: 2150396 - RNA, 19 nt, Homo sapiens
  misc_RNA (1)...(19): siRNA sense strand
ccgagaagcuagacuguca

SEQ ID NO: 2150397 - RNA, 19 nt, Homo sapiens
  misc_RNA (1)...(19): siRNA sense strand
uaaaccauguguuccaguu

SEQ ID NO: 2150398 - RNA, 19 nt, Homo sapiens
  misc_RNA (1)...(19): siRNA sense strand
cagcacaucuucaaaucau

SEQ ID NO: 2150399 - RNA, 19 nt, Homo sapiens
  misc_RNA (1)...(19): siRNA sense strand
gaaaauuccuaaccuagug

SEQ ID NO: 2150400 - RNA, 19 nt, Homo sapiens
  misc_RNA (1)...(19): siRNA sense strand
aaagacagccuagagagua

SEQ ID NO: 2150401 - RNA, 19 nt, Homo sapiens
  misc_RNA (1)...(19): siRNA sense strand
uaaccaaucugcugucacu

SEQ ID NO: 2150402 - RNA, 19 nt, Homo sapiens
  misc_RNA (1)...(19): siRNA sense strand
aaauaaacacuguggagua

SEQ ID NO: 2150403 - RNA, 19 nt, Homo sapiens
  misc_RNA (1)...(19): siRNA sense strand
ggaagacauuaggaagaaa

SEQ ID NO: 2150404 - RNA, 19 nt, Homo sapiens
  misc_RNA (1)...(19): siRNA sense strand
agaauucuuuccuuccuaa

SEQ ID NO: 2150405 - RNA, 19 nt, Homo sapiens
  misc_RNA (1)...(19): siRNA sense strand
uaaaaugccugguaugaau

SEQ ID NO: 2150406 - RNA, 19 nt, Homo sapiens
  misc_RNA (1)...(19): siRNA sense strand
gaaugccaguucugcuuug

SEQ ID NO: 2150407 - RNA, 19 nt, Homo sapiens
  misc_RNA (1)...(19): siRNA sense strand
ccagagaagaucuuaaaug

SEQ ID NO: 2150408 - RNA, 19 nt, Homo sapiens
  misc_RNA (1)...(19): siRNA sense strand
cauccaacaagaagaaaua

SEQ ID NO: 2150409 - RNA, 19 nt, Homo sapiens
  misc_RNA (1)...(19): siRNA sense strand
caccaaggaagauguauuu

SEQ ID NO: 2150410 - RNA, 19 nt, Homo sapiens
  misc_RNA (1)...(19): siRNA sense strand
aauaaacacuguggaguau

SEQ ID NO: 2150411 - RNA, 19 nt, Homo sapiens
  misc_RNA (1)...(19): siRNA sense strand
ccacagcuuucccucaugu

SEQ ID NO: 2150412 - RNA, 19 nt, Homo sapiens
  misc_RNA (1)...(19): siRNA sense strand
caggagacuuucagagaga

SEQ ID NO: 2150413 - RNA, 19 nt, Homo sapiens
  misc_RNA (1)...(19): siRNA sense strand
uggaagacauuaggaagaa

SEQ ID NO: 2150414 - RNA, 19 nt, Homo sapiens
  misc_RNA (1)...(19): siRNA sense strand
uguagucaguuuagagaaa

SEQ ID NO: 2150415 - RNA, 19 nt, Homo sapiens
  misc_RNA (1)...(19): siRNA sense strand
gcggaggcagcaaauguua

SEQ ID NO: 2150416 - RNA, 19 nt, Homo sapiens
  misc_RNA (1)...(19): siRNA sense strand
gauaggaguguguaugguu

SEQ ID NO: 2150417 - RNA, 19 nt, Homo sapiens
  misc_RNA (1)...(19): siRNA sense strand
gaaauacuuccaagccaau

SEQ ID NO: 2150418 - RNA, 19 nt, Homo sapiens
  misc_RNA (1)...(19): siRNA sense strand
caccagagaagaucuuaaa

SEQ ID NO: 2150419 - RNA, 19 nt, Homo sapiens
  misc_RNA (1)...(19): siRNA sense strand
gucaccagcuggcaaagaa

SEQ ID NO: 2150420 - RNA, 19 nt, Homo sapiens
  misc_RNA (1)...(19): siRNA sense strand
cgacgaauccgagaagcua

SEQ ID NO: 2150421 - RNA, 19 nt, Homo sapiens
  misc_RNA (1)...(19): siRNA sense strand
gagaguacggcaaugaaga

SEQ ID NO: 2150422 - RNA, 19 nt, Homo sapiens
  misc_RNA (1)...(19): siRNA sense strand
gcgacgagucuccaaguaa

SEQ ID NO: 2150423 - RNA, 19 nt, Homo sapiens
  misc_RNA (1)...(19): siRNA sense strand
aaagcaaagucccgggaaa

SEQ ID NO: 2150424 - RNA, 19 nt, Homo sapiens
  misc_RNA (1)...(19): siRNA sense strand
gcacaucuucaaaucauag

SEQ ID NO: 2150425 - RNA, 19 nt, Homo sapiens
  misc_RNA (1)...(19): siRNA sense strand
aagagcaucuccugacuuc

SEQ ID NO: 2150426 - RNA, 19 nt, Homo sapiens
  misc_RNA (1)...(19): siRNA sense strand
ggcacaggauucucugcua

SEQ ID NO: 2150427 - RNA, 19 nt, Homo sapiens
  misc_RNA (1)...(19): siRNA sense strand
guucccaccuuacuacaug

SEQ ID NO: 2150428 - RNA, 19 nt, Homo sapiens
  misc_RNA (1)...(19): siRNA sense strand
aagagacuguggaguuuga

SEQ ID NO: 2150429 - RNA, 19 nt, Homo sapiens
  misc_RNA (1)...(19): siRNA sense strand
cagaauucuuuccuuccua

SEQ ID NO: 2150430 - RNA, 19 nt, Homo sapiens
  misc_RNA (1)...(19): siRNA sense strand
caacacaguauucucuuuc

SEQ ID NO: 2150431 - RNA, 19 nt, Homo sapiens
  misc_RNA (1)...(19): siRNA sense strand
gcccaaagacaaucuacuu

SEQ ID NO: 2150432 - RNA, 19 nt, Homo sapiens
  misc_RNA (1)...(19): siRNA sense strand
gaagaucuuaaauggcaaa

SEQ ID NO: 2150433 - RNA, 19 nt, Homo sapiens
  misc_RNA (1)...(19): siRNA sense strand
gcagcaacuucaauuacca

SEQ ID NO: 2150434 - RNA, 19 nt, Homo sapiens
  misc_RNA (1)...(19): siRNA sense strand
gaucguaaccauuauagac

SEQ ID NO: 2150435 - RNA, 19 nt, Homo sapiens
  misc_RNA (1)...(19): siRNA sense strand
cagacugccauaaagaaua

SEQ ID NO: 2150436 - RNA, 19 nt, Homo sapiens
  misc_RNA (1)...(19): siRNA sense strand
acaaagaaaccuugcacaa

SEQ ID NO: 2150437 - RNA, 19 nt, Homo sapiens
  misc_RNA (1)...(19): siRNA sense strand
uaaagagcaucuccugacu

SEQ ID NO: 2150438 - RNA, 19 nt, Homo sapiens
  misc_RNA (1)...(19): siRNA sense strand
ccagugaggcagaauaugu

SEQ ID NO: 2150439 - RNA, 19 nt, Homo sapiens
  misc_RNA (1)...(19): siRNA sense strand
caaacagcacacagucuuu

SEQ ID NO: 2150440 - RNA, 19 nt, Homo sapiens
  misc_RNA (1)...(19): siRNA sense strand
gauaugguuucaucaacag

SEQ ID NO: 2150441 - RNA, 19 nt, Homo sapiens
  misc_RNA (1)...(19): siRNA sense strand
cgacaggcuagucaaauga

SEQ ID NO: 2150442 - RNA, 19 nt, Homo sapiens
  misc_RNA (1)...(19): siRNA sense strand
ccgacaggcuagucaaaug

SEQ ID NO: 2150443 - RNA, 19 nt, Homo sapiens
  misc_RNA (1)...(19): siRNA sense strand
gcagauaggaguguguaug

SEQ ID NO: 2150444 - RNA, 19 nt, Homo sapiens
  misc_RNA (1)...(19): siRNA sense strand
gcagauggugccaauguca

SEQ ID NO: 2150445 - RNA, 19 nt, Homo sapiens
  misc_RNA (1)...(19): siRNA sense strand
acaccagacugccauaaag

SEQ ID NO: 2150446 - RNA, 19 nt, Homo sapiens
  misc_RNA (1)...(19): siRNA sense strand
ggccuggacaucacuagua

SEQ ID NO: 2150447 - RNA, 19 nt, Homo sapiens
  misc_RNA (1)...(19): siRNA sense strand
ccaaggaagauguauuugu

SEQ ID NO: 2150448 - RNA, 19 nt, Homo sapiens
  misc_RNA (1)...(19): siRNA sense strand
gcagaauucuuuccuuccu

SEQ ID NO: 2150449 - RNA, 19 nt, Homo sapiens
  misc_RNA (1)...(19): siRNA sense strand
cgacgagucuccaaguaac

SEQ ID NO: 2150450 - RNA, 19 nt, Homo sapiens
  misc_RNA (1)...(19): siRNA sense strand
ccacccaacucuguacuuc

SEQ ID NO: 2150451 - RNA, 19 nt, Homo sapiens
  misc_RNA (1)...(19): siRNA sense strand
uaauuaagccuguccugau

SEQ ID NO: 2150452 - RNA, 19 nt, Homo sapiens
  misc_RNA (1)...(19): siRNA sense strand
uaaaucacaagauggcaaa

SEQ ID NO: 2150453 - RNA, 19 nt, Homo sapiens
  misc_RNA (1)...(19): siRNA sense strand
gauggagggugcugacaac

SEQ ID NO: 2150454 - RNA, 19 nt, Homo sapiens
  misc_RNA (1)...(19): siRNA sense strand
gaagagacuguggaguuug

SEQ ID NO: 2150455 - RNA, 19 nt, Homo sapiens
  misc_RNA (1)...(19): siRNA sense strand
ucaaugccauggugcagau

SEQ ID NO: 2150456 - RNA, 19 nt, Homo sapiens
  misc_RNA (1)...(19): siRNA sense strand
ucucuggccucacacaaug

SEQ ID NO: 2150457 - RNA, 19 nt, Homo sapiens
  misc_RNA (1)...(19): siRNA sense strand
gcauuuaacucugcaucag

SEQ ID NO: 2150458 - RNA, 19 nt, Homo sapiens
  misc_RNA (1)...(19): siRNA sense strand
caaccucgcugcccaaacc

SEQ ID NO: 2150459 - RNA, 19 nt, Homo sapiens
  misc_RNA (1)...(19): siRNA sense strand
cccaaagacaaucuacuua

SEQ ID NO: 2150460 - RNA, 19 nt, Homo sapiens
  misc_RNA (1)...(19): siRNA sense strand
gaccagugaggcagaauau

SEQ ID NO: 2150461 - RNA, 19 nt, Homo sapiens
  misc_RNA (1)...(19): siRNA sense strand
gaaacuaguuccaccauua

SEQ ID NO: 2150462 - RNA, 19 nt, Homo sapiens
  misc_RNA (1)...(19): siRNA sense strand
gcaauugucuucaagguua

SEQ ID NO: 2150463 - RNA, 19 nt, Homo sapiens
  misc_RNA (1)...(19): siRNA sense strand
gaacgugucugaaauagaa

SEQ ID NO: 2150464 - RNA, 19 nt, Homo sapiens
  misc_RNA (1)...(19): siRNA sense strand
gaaugaagcagaccucuua

SEQ ID NO: 2150465 - RNA, 19 nt, Homo sapiens
  misc_RNA (1)...(19): siRNA sense strand
ggacuuagaggcauuauuu

SEQ ID NO: 2150466 - RNA, 19 nt, Homo sapiens
  misc_RNA (1)...(19): siRNA sense strand
gaaagcaguguaugaauuu

SEQ ID NO: 2150467 - RNA, 19 nt, Homo sapiens
  misc_RNA (1)...(19): siRNA sense strand
ggagaaugcucuacugguu

SEQ ID NO: 2150468 - RNA, 19 nt, Homo sapiens
  misc_RNA (1)...(19): siRNA sense strand
ugacaaaccugaggauaaa

SEQ ID NO: 2150469 - RNA, 19 nt, Homo sapiens
  misc_RNA (1)...(19): siRNA sense strand
ccuaggaccucucaaagua

SEQ ID NO: 2150470 - RNA, 19 nt, Homo sapiens
  misc_RNA (1)...(19): siRNA sense strand
ugacuuacuuaccaucuua

SEQ ID NO: 2150471 - RNA, 19 nt, Homo sapiens
  misc_RNA (1)...(19): siRNA sense strand
gaaagcagcaaauauucua

SEQ ID NO: 2150472 - RNA, 19 nt, Homo sapiens
  misc_RNA (1)...(19): siRNA sense strand
ugaaagcaguguaugaauu

SEQ ID NO: 2150473 - RNA, 19 nt, Homo sapiens
  misc_RNA (1)...(19): siRNA sense strand
aaagguguauugaugguua

SEQ ID NO: 2150474 - RNA, 19 nt, Homo sapiens
  misc_RNA (1)...(19): siRNA sense strand
gagacuggcugcuaacaug

SEQ ID NO: 2150475 - RNA, 19 nt, Homo sapiens
  misc_RNA (1)...(19): siRNA sense strand
caaaggacacuguauguga

SEQ ID NO: 2150476 - RNA, 19 nt, Homo sapiens
  misc_RNA (1)...(19): siRNA sense strand
ccagggaaaugaagaguga

SEQ ID NO: 2150477 - RNA, 19 nt, Homo sapiens
  misc_RNA (1)...(19): siRNA sense strand
aagcagaccucuuacuuga

SEQ ID NO: 2150478 - RNA, 19 nt, Homo sapiens
  misc_RNA (1)...(19): siRNA sense strand
gauguaaucugcaauuguc

SEQ ID NO: 2150479 - RNA, 19 nt, Homo sapiens
  misc_RNA (1)...(19): siRNA sense strand
gaugaucccucaagcaauc

SEQ ID NO: 2150480 - RNA, 19 nt, Homo sapiens
  misc_RNA (1)...(19): siRNA sense strand
cgggcaaacucuaccauua

SEQ ID NO: 2150481 - RNA, 19 nt, Homo sapiens
  misc_RNA (1)...(19): siRNA sense strand
ugagaaagcagcaaauauu

SEQ ID NO: 2150482 - RNA, 19 nt, Homo sapiens
  misc_RNA (1)...(19): siRNA sense strand
gaaaacagguuaaaugaag

SEQ ID NO: 2150483 - RNA, 19 nt, Homo sapiens
  misc_RNA (1)...(19): siRNA sense strand
ggaaacuugucauuggaaa

SEQ ID NO: 2150484 - RNA, 19 nt, Homo sapiens
  misc_RNA (1)...(19): siRNA sense strand
gacaagcacuacaggacua

SEQ ID NO: 2150485 - RNA, 19 nt, Homo sapiens
  misc_RNA (1)...(19): siRNA sense strand
gaucgaaaguauaagugaa

SEQ ID NO: 2150486 - RNA, 19 nt, Homo sapiens
  misc_RNA (1)...(19): siRNA sense strand
gaaaagaaaugguggcaau

SEQ ID NO: 2150487 - RNA, 19 nt, Homo sapiens
  misc_RNA (1)...(19): siRNA sense strand
gcagaccucuuacuugaag

SEQ ID NO: 2150488 - RNA, 19 nt, Homo sapiens
  misc_RNA (1)...(19): siRNA sense strand
gccaagauaagaagaauaa

SEQ ID NO: 2150489 - RNA, 19 nt, Homo sapiens
  misc_RNA (1)...(19): siRNA sense strand
caaagcagcugagaaagca

SEQ ID NO: 2150490 - RNA, 19 nt, Homo sapiens
  misc_RNA (1)...(19): siRNA sense strand
aaucagaccugcagaagau

SEQ ID NO: 2150491 - RNA, 19 nt, Homo sapiens
  misc_RNA (1)...(19): siRNA sense strand
caaaggagacauuaggaaa

SEQ ID NO: 2150492 - RNA, 19 nt, Homo sapiens
  misc_RNA (1)...(19): siRNA sense strand
uaaugagacuggcugcuaa

SEQ ID NO: 2150493 - RNA, 19 nt, Homo sapiens
  misc_RNA (1)...(19): siRNA sense strand
cuacuugucuucaauguca

SEQ ID NO: 2150494 - RNA, 19 nt, Homo sapiens
  misc_RNA (1)...(19): siRNA sense strand
ggaauucccuacuugucuu

SEQ ID NO: 2150495 - RNA, 19 nt, Homo sapiens
  misc_RNA (1)...(19): siRNA sense strand
agaaccagauguacaauau

SEQ ID NO: 2150496 - RNA, 19 nt, Homo sapiens
  misc_RNA (1)...(19): siRNA sense strand
aaaggaaacuugucauugg

SEQ ID NO: 2150497 - RNA, 19 nt, Homo sapiens
  misc_RNA (1)...(19): siRNA sense strand
gaagcagaccucuuacuug

SEQ ID NO: 2150498 - RNA, 19 nt, Homo sapiens
  misc_RNA (1)...(19): siRNA sense strand
uaucaugacucuguuagaa

SEQ ID NO: 2150499 - RNA, 19 nt, Homo sapiens
  misc_RNA (1)...(19): siRNA sense strand
caaugucacuugugcuuug

SEQ ID NO: 2150500 - RNA, 19 nt, Homo sapiens
  misc_RNA (1)...(19): siRNA sense strand
gggagugccuucgauguuu

SEQ ID NO: 2150501 - RNA, 19 nt, Homo sapiens
  misc_RNA (1)...(19): siRNA sense strand
gcaagcaggacuuagauga

SEQ ID NO: 2150502 - RNA, 19 nt, Homo sapiens
  misc_RNA (1)...(19): siRNA sense strand
acuggaaaguguucaaaua

SEQ ID NO: 2150503 - RNA, 19 nt, Homo sapiens
  misc_RNA (1)...(19): siRNA sense strand
gaagagugagcuggaguua

SEQ ID NO: 2150504 - RNA, 19 nt, Homo sapiens
  misc_RNA (1)...(19): siRNA sense strand
gcaauccaguguccuuaau

SEQ ID NO: 2150505 - RNA, 19 nt, Homo sapiens
  misc_RNA (1)...(19): siRNA sense strand
gcagcuaaaugaacaacug

SEQ ID NO: 2150506 - RNA, 19 nt, Homo sapiens
  misc_RNA (1)...(19): siRNA sense strand
gagggaacgugucugaaau

SEQ ID NO: 2150507 - RNA, 19 nt, Homo sapiens
  misc_RNA (1)...(19): siRNA sense strand
gagcagagcccagaaauac

SEQ ID NO: 2150508 - RNA, 19 nt, Homo sapiens
  misc_RNA (1)...(19): siRNA sense strand
caaaaugauucccuugaua

SEQ ID NO: 2150509 - RNA, 19 nt, Homo sapiens
  misc_RNA (1)...(19): siRNA sense strand
caccuuauccugaccuuua

SEQ ID NO: 2150510 - RNA, 19 nt, Homo sapiens
  misc_RNA (1)...(19): siRNA sense strand
cuacaggacuaacaaagga

SEQ ID NO: 2150511 - RNA, 19 nt, Homo sapiens
  misc_RNA (1)...(19): siRNA sense strand
ggaauuuguugagcugaaa

SEQ ID NO: 2150512 - RNA, 19 nt, Homo sapiens
  misc_RNA (1)...(19): siRNA sense strand
agacaaaucaugcagcuaa

SEQ ID NO: 2150513 - RNA, 19 nt, Homo sapiens
  misc_RNA (1)...(19): siRNA sense strand
gaacguggaaggagccaaa

SEQ ID NO: 2150514 - RNA, 19 nt, Homo sapiens
  misc_RNA (1)...(19): siRNA sense strand
ccacucugauccugccuua

SEQ ID NO: 2150515 - RNA, 19 nt, Homo sapiens
  misc_RNA (1)...(19): siRNA sense strand
gacaggugcucaacuggaa

SEQ ID NO: 2150516 - RNA, 19 nt, Homo sapiens
  misc_RNA (1)...(19): siRNA sense strand
ggccaaagcagcugagaaa

SEQ ID NO: 2150517 - RNA, 19 nt, Homo sapiens
  misc_RNA (1)...(19): siRNA sense strand
cugcuaacauggaagauaa

SEQ ID NO: 2150518 - RNA, 19 nt, Homo sapiens
  misc_RNA (1)...(19): siRNA sense strand
caaaccaggucacuaugga

SEQ ID NO: 2150519 - RNA, 19 nt, Homo sapiens
  misc_RNA (1)...(19): siRNA sense strand
guacaauauuccauagaug

SEQ ID NO: 2150520 - RNA, 19 nt, Homo sapiens
  misc_RNA (1)...(19): siRNA sense strand
gaagcaaaauccauuauuc

SEQ ID NO: 2150521 - RNA, 19 nt, Homo sapiens
  misc_RNA (1)...(19): siRNA sense strand
uagauacacuaaccucaaa

SEQ ID NO: 2150522 - RNA, 19 nt, Homo sapiens
  misc_RNA (1)...(19): siRNA sense strand
ugugaaagguguauugaug

SEQ ID NO: 2150523 - RNA, 19 nt, Homo sapiens
  misc_RNA (1)...(19): siRNA sense strand
gaucaaaggacacuguaug

SEQ ID NO: 2150524 - RNA, 19 nt, Homo sapiens
  misc_RNA (1)...(19): siRNA sense strand
caacuggaagcuaugauuu

SEQ ID NO: 2150525 - RNA, 19 nt, Homo sapiens
  misc_RNA (1)...(19): siRNA sense strand
gagauuugcugucaacaac

SEQ ID NO: 2150526 - RNA, 19 nt, Homo sapiens
  misc_RNA (1)...(19): siRNA sense strand
acagcugacugccaauaua

SEQ ID NO: 2150527 - RNA, 19 nt, Homo sapiens
  misc_RNA (1)...(19): siRNA sense strand
ggacuuagaugaguaucag

SEQ ID NO: 2150528 - RNA, 19 nt, Homo sapiens
  misc_RNA (1)...(19): siRNA sense strand
ccauugccauucacuauga

SEQ ID NO: 2150529 - RNA, 19 nt, Homo sapiens
  misc_RNA (1)...(19): siRNA sense strand
gcaucagacuggacuuaga

SEQ ID NO: 2150530 - RNA, 19 nt, Homo sapiens
  misc_RNA (1)...(19): siRNA sense strand
gagaaagcagcaaauauuc

SEQ ID NO: 2150531 - RNA, 19 nt, Homo sapiens
  misc_RNA (1)...(19): siRNA sense strand
cagaagacaucgagaaggu

SEQ ID NO: 2150532 - RNA, 19 nt, Homo sapiens
  misc_RNA (1)...(19): siRNA sense strand
caaagugacucugaagaag

SEQ ID NO: 2150533 - RNA, 19 nt, Homo sapiens
  misc_RNA (1)...(19): siRNA sense strand
gugcggagauccaggaaau

SEQ ID NO: 2150534 - RNA, 19 nt, Homo sapiens
  misc_RNA (1)...(19): siRNA sense strand
cagauuaagauaccagaua

SEQ ID NO: 2150535 - RNA, 19 nt, Homo sapiens
  misc_RNA (1)...(19): siRNA sense strand
ggacuucaccauugccauu

SEQ ID NO: 2150536 - RNA, 19 nt, Homo sapiens
  misc_RNA (1)...(19): siRNA sense strand
caacguaagacaagcacua

SEQ ID NO: 2150537 - RNA, 19 nt, Homo sapiens
  misc_RNA (1)...(19): siRNA sense strand
gaaaccaaagugacucuga

SEQ ID NO: 2150538 - RNA, 19 nt, Homo sapiens
  misc_RNA (1)...(19): siRNA sense strand
caggaaaugugccaugugu

SEQ ID NO: 2150539 - RNA, 19 nt, Homo sapiens
  misc_RNA (1)...(19): siRNA sense strand
gacaaaucaugcagcuaaa

SEQ ID NO: 2150540 - RNA, 19 nt, Homo sapiens
  misc_RNA (1)...(19): siRNA sense strand
ccaguguccguguaaauua

SEQ ID NO: 2150541 - RNA, 19 nt, Homo sapiens
  misc_RNA (1)...(19): siRNA sense strand
ugggagacauuguuuguga

SEQ ID NO: 2150542 - RNA, 19 nt, Homo sapiens
  misc_RNA (1)...(19): siRNA sense strand
ucaaguuguugccauuaaa

SEQ ID NO: 2150543 - RNA, 19 nt, Homo sapiens
  misc_RNA (1)...(19): siRNA sense strand
gacauucaccuaccaauuc

SEQ ID NO: 2150544 - RNA, 19 nt, Homo sapiens
  misc_RNA (1)...(19): siRNA sense strand
ccaaagugacucugaagaa

SEQ ID NO: 2150545 - RNA, 19 nt, Homo sapiens
  misc_RNA (1)...(19): siRNA sense strand
gaaaggauuuugaaacauc

SEQ ID NO: 2150546 - RNA, 19 nt, Homo sapiens
  misc_RNA (1)...(19): siRNA sense strand
gaggaugucagucauguga

SEQ ID NO: 2150547 - RNA, 19 nt, Homo sapiens
  misc_RNA (1)...(19): siRNA sense strand
gcagcaagcaggacuuaga

SEQ ID NO: 2150548 - RNA, 19 nt, Homo sapiens
  misc_RNA (1)...(19): siRNA sense strand
gcccauuccuguuaucaga

SEQ ID NO: 2150549 - RNA, 19 nt, Homo sapiens
  misc_RNA (1)...(19): siRNA sense strand
aaaccaaagugacucugaa

SEQ ID NO: 2150550 - RNA, 19 nt, Homo sapiens
  misc_RNA (1)...(19): siRNA sense strand
ggaaugacuuacuuaccau

SEQ ID NO: 2150551 - RNA, 19 nt, Homo sapiens
  misc_RNA (1)...(19): siRNA sense strand
ggagugccuucgauguuug

SEQ ID NO: 2150552 - RNA, 19 nt, Homo sapiens
  misc_RNA (1)...(19): siRNA sense strand
gagaaugcucuacugguuu

SEQ ID NO: 2150553 - RNA, 19 nt, Homo sapiens
  misc_RNA (1)...(19): siRNA sense strand
gugcucaacuggaagcuau

SEQ ID NO: 2150554 - RNA, 19 nt, Homo sapiens
  misc_RNA (1)...(19): siRNA sense strand
acaacaagcucaaaucacu

SEQ ID NO: 2150555 - RNA, 19 nt, Homo sapiens
  misc_RNA (1)...(19): siRNA sense strand
gauguacaauauuccauag

SEQ ID NO: 2150556 - RNA, 19 nt, Homo sapiens
  misc_RNA (1)...(19): siRNA sense strand
gaucaaguuguugccauua

SEQ ID NO: 2150557 - RNA, 19 nt, Homo sapiens
  misc_RNA (1)...(19): siRNA sense strand
gcugaucaacugagaauau

SEQ ID NO: 2150558 - RNA, 19 nt, Homo sapiens
  misc_RNA (1)...(19): siRNA sense strand
ucaugacucuguuagaaga

SEQ ID NO: 2150559 - RNA, 19 nt, Homo sapiens
  misc_RNA (1)...(19): siRNA sense strand
gaaaugguggcaaucugaa

SEQ ID NO: 2150560 - RNA, 19 nt, Homo sapiens
  misc_RNA (1)...(19): siRNA sense strand
gagacagggucaugcuuca

SEQ ID NO: 2150561 - RNA, 19 nt, Homo sapiens
  misc_RNA (1)...(19): siRNA sense strand
ggaaucaacucucauuauu

SEQ ID NO: 2150562 - RNA, 19 nt, Homo sapiens
  misc_RNA (1)...(19): siRNA sense strand
gaauaacccuucggcauua

SEQ ID NO: 2150563 - RNA, 19 nt, Homo sapiens
  misc_RNA (1)...(19): siRNA sense strand
cauauuagcuuucauguug

SEQ ID NO: 2150564 - RNA, 19 nt, Homo sapiens
  misc_RNA (1)...(19): siRNA sense strand
aaacauaccucuagaugaa

SEQ ID NO: 2150565 - RNA, 19 nt, Homo sapiens
  misc_RNA (1)...(19): siRNA sense strand
ccaaagcucugcauuacua

SEQ ID NO: 2150566 - RNA, 19 nt, Homo sapiens
  misc_RNA (1)...(19): siRNA sense strand
gagguuugcuucugaauaa

SEQ ID NO: 2150567 - RNA, 19 nt, Homo sapiens
  misc_RNA (1)...(19): siRNA sense strand
gaucugcacugaugauuga

SEQ ID NO: 2150568 - RNA, 19 nt, Homo sapiens
  misc_RNA (1)...(19): siRNA sense strand
gcaagcaacuguauuucuu

SEQ ID NO: 2150569 - RNA, 19 nt, Homo sapiens
  misc_RNA (1)...(19): siRNA sense strand
gaagcaagcaacuguauuu

SEQ ID NO: 2150570 - RNA, 19 nt, Homo sapiens
  misc_RNA (1)...(19): siRNA sense strand
uaagguagcugcuguaagu

SEQ ID NO: 2150571 - RNA, 19 nt, Homo sapiens
  misc_RNA (1)...(19): siRNA sense strand
ggacaaaucagaacuugaa

SEQ ID NO: 2150572 - RNA, 19 nt, Homo sapiens
  misc_RNA (1)...(19): siRNA sense strand
ccacaucagucuacaaaga

SEQ ID NO: 2150573 - RNA, 19 nt, Homo sapiens
  misc_RNA (1)...(19): siRNA sense strand
gaugggaucugcacugaug

SEQ ID NO: 2150574 - RNA, 19 nt, Homo sapiens
  misc_RNA (1)...(19): siRNA sense strand
gugaggaacuuuaucgaaa

SEQ ID NO: 2150575 - RNA, 19 nt, Homo sapiens
  misc_RNA (1)...(19): siRNA sense strand
cagaagaaguccauauaau

SEQ ID NO: 2150576 - RNA, 19 nt, Homo sapiens
  misc_RNA (1)...(19): siRNA sense strand
gaugaaagucgaaaugaaa

SEQ ID NO: 2150577 - RNA, 19 nt, Homo sapiens
  misc_RNA (1)...(19): siRNA sense strand
gcaacuguauuucuuguuc

SEQ ID NO: 2150578 - RNA, 19 nt, Homo sapiens
  misc_RNA (1)...(19): siRNA sense strand
gaagcacauucuugcagua

SEQ ID NO: 2150579 - RNA, 19 nt, Homo sapiens
  misc_RNA (1)...(19): siRNA sense strand
cauaguaaauagagggaua

SEQ ID NO: 2150580 - RNA, 19 nt, Homo sapiens
  misc_RNA (1)...(19): siRNA sense strand
ugagacaaauuaaggauga

SEQ ID NO: 2150581 - RNA, 19 nt, Homo sapiens
  misc_RNA (1)...(19): siRNA sense strand
ggcauuaguucaggcauua

SEQ ID NO: 2150582 - RNA, 19 nt, Homo sapiens
  misc_RNA (1)...(19): siRNA sense strand
gaagagaaaagucacauua

SEQ ID NO: 2150583 - RNA, 19 nt, Homo sapiens
  misc_RNA (1)...(19): siRNA sense strand
caacagugcuacagauaca

SEQ ID NO: 2150584 - RNA, 19 nt, Homo sapiens
  misc_RNA (1)...(19): siRNA sense strand
gaagaacaacugacccaaa

SEQ ID NO: 2150585 - RNA, 19 nt, Homo sapiens
  misc_RNA (1)...(19): siRNA sense strand
gcaagggugaguauugaua

SEQ ID NO: 2150586 - RNA, 19 nt, Homo sapiens
  misc_RNA (1)...(19): siRNA sense strand
ugagaaacacgguaacaua

SEQ ID NO: 2150587 - RNA, 19 nt, Homo sapiens
  misc_RNA (1)...(19): siRNA sense strand
ggauaacacccaaagcuuu

SEQ ID NO: 2150588 - RNA, 19 nt, Homo sapiens
  misc_RNA (1)...(19): siRNA sense strand
guucaggcauuaagaagaa

SEQ ID NO: 2150589 - RNA, 19 nt, Homo sapiens
  misc_RNA (1)...(19): siRNA sense strand
caaguucuauaaccacaaa

SEQ ID NO: 2150590 - RNA, 19 nt, Homo sapiens
  misc_RNA (1)...(19): siRNA sense strand
gauggagguuugcuucuga

SEQ ID NO: 2150591 - RNA, 19 nt, Homo sapiens
  misc_RNA (1)...(19): siRNA sense strand
aagcauuacuggaggauaa

SEQ ID NO: 2150592 - RNA, 19 nt, Homo sapiens
  misc_RNA (1)...(19): siRNA sense strand
uccaaggucuacaugauua

SEQ ID NO: 2150593 - RNA, 19 nt, Homo sapiens
  misc_RNA (1)...(19): siRNA sense strand
aagccaaguucccaaauuu

SEQ ID NO: 2150594 - RNA, 19 nt, Homo sapiens
  misc_RNA (1)...(19): siRNA sense strand
uaagccaaguucccaaauu

SEQ ID NO: 2150595 - RNA, 19 nt, Homo sapiens
  misc_RNA (1)...(19): siRNA sense strand
gaagaaguccauauaaugc

SEQ ID NO: 2150596 - RNA, 19 nt, Homo sapiens
  misc_RNA (1)...(19): siRNA sense strand
gacccaaagcucugcauua

SEQ ID NO: 2150597 - RNA, 19 nt, Homo sapiens
  misc_RNA (1)...(19): siRNA sense strand
gaacugacuuuucaucuuc

SEQ ID NO: 2150598 - RNA, 19 nt, Homo sapiens
  misc_RNA (1)...(19): siRNA sense strand
caaacaagccaucaaaucu

SEQ ID NO: 2150599 - RNA, 19 nt, Homo sapiens
  misc_RNA (1)...(19): siRNA sense strand
ggccagaugugccguuaga

SEQ ID NO: 2150600 - RNA, 19 nt, Homo sapiens
  misc_RNA (1)...(19): siRNA sense strand
gcucuuugauuacauuugu

SEQ ID NO: 2150601 - RNA, 19 nt, Homo sapiens
  misc_RNA (1)...(19): siRNA sense strand
caaagaagaagauauaggu

SEQ ID NO: 2150602 - RNA, 19 nt, Homo sapiens
  misc_RNA (1)...(19): siRNA sense strand
ugaauaacccuucggcauu

SEQ ID NO: 2150603 - RNA, 19 nt, Homo sapiens
  misc_RNA (1)...(19): siRNA sense strand
ggagguuugcuucugaaua

SEQ ID NO: 2150604 - RNA, 19 nt, Homo sapiens
  misc_RNA (1)...(19): siRNA sense strand
caugauuaccugaaguuua

SEQ ID NO: 2150605 - RNA, 19 nt, Homo sapiens
  misc_RNA (1)...(19): siRNA sense strand
ggaagguguacaagcuuua

SEQ ID NO: 2150606 - RNA, 19 nt, Homo sapiens
  misc_RNA (1)...(19): siRNA sense strand
aaacaacucugcagaaaau

SEQ ID NO: 2150607 - RNA, 19 nt, Homo sapiens
  misc_RNA (1)...(19): siRNA sense strand
ggguugaaauacauagaaa

SEQ ID NO: 2150608 - RNA, 19 nt, Homo sapiens
  misc_RNA (1)...(19): siRNA sense strand
ggaugaaugugaggaacuu

SEQ ID NO: 2150609 - RNA, 19 nt, Homo sapiens
  misc_RNA (1)...(19): siRNA sense strand
ccauauuuauuacgacuga

SEQ ID NO: 2150610 - RNA, 19 nt, Homo sapiens
  misc_RNA (1)...(19): siRNA sense strand
caaagagucagucagaaga

SEQ ID NO: 2150611 - RNA, 19 nt, Homo sapiens
  misc_RNA (1)...(19): siRNA sense strand
caaaucagaacuugaagau

SEQ ID NO: 2150612 - RNA, 19 nt, Homo sapiens
  misc_RNA (1)...(19): siRNA sense strand
uacaaguccuucugcgaua

SEQ ID NO: 2150613 - RNA, 19 nt, Homo sapiens
  misc_RNA (1)...(19): siRNA sense strand
caucaaacaagccaucaaa

SEQ ID NO: 2150614 - RNA, 19 nt, Homo sapiens
  misc_RNA (1)...(19): siRNA sense strand
agaagaaguccauauaaug

SEQ ID NO: 2150615 - RNA, 19 nt, Homo sapiens
  misc_RNA (1)...(19): siRNA sense strand
caggcuacuuugcagaaua

SEQ ID NO: 2150616 - RNA, 19 nt, Homo sapiens
  misc_RNA (1)...(19): siRNA sense strand
uuacgacugagacaaauua

SEQ ID NO: 2150617 - RNA, 19 nt, Homo sapiens
  misc_RNA (1)...(19): siRNA sense strand
gggcauuaguucaggcauu

SEQ ID NO: 2150618 - RNA, 19 nt, Homo sapiens
  misc_RNA (1)...(19): siRNA sense strand
gagaagcaagcaacuguau

SEQ ID NO: 2150619 - RNA, 19 nt, Homo sapiens
  misc_RNA (1)...(19): siRNA sense strand
ggaaggguugaaauacaua

SEQ ID NO: 2150620 - RNA, 19 nt, Homo sapiens
  misc_RNA (1)...(19): siRNA sense strand
gggaaaacauucuuaagga

SEQ ID NO: 2150621 - RNA, 19 nt, Homo sapiens
  misc_RNA (1)...(19): siRNA sense strand
uguacaagcuuuaguaggu

SEQ ID NO: 2150622 - RNA, 19 nt, Homo sapiens
  misc_RNA (1)...(19): siRNA sense strand
gaaacacgguaacauacac

SEQ ID NO: 2150623 - RNA, 19 nt, Homo sapiens
  misc_RNA (1)...(19): siRNA sense strand
gcuguaaguaccauaguaa

SEQ ID NO: 2150624 - RNA, 19 nt, Homo sapiens
  misc_RNA (1)...(19): siRNA sense strand
caagggugaguauugauaa

SEQ ID NO: 2150625 - RNA, 19 nt, Homo sapiens
  misc_RNA (1)...(19): siRNA sense strand
gagaaacacgguaacauac

SEQ ID NO: 2150626 - RNA, 19 nt, Homo sapiens
  misc_RNA (1)...(19): siRNA sense strand
cuauguggauccagugaaa

SEQ ID NO: 2150627 - RNA, 19 nt, Homo sapiens
  misc_RNA (1)...(19): siRNA sense strand
auuuguaugucccguauua

SEQ ID NO: 2150628 - RNA, 19 nt, Homo sapiens
  misc_RNA (1)...(19): siRNA sense strand
acagaagaaguccauauaa

SEQ ID NO: 2150629 - RNA, 19 nt, Homo sapiens
  misc_RNA (1)...(19): siRNA sense strand
uacagaagaaguccauaua

SEQ ID NO: 2150630 - RNA, 19 nt, Homo sapiens
  misc_RNA (1)...(19): siRNA sense strand
gaugugagaaacacgguaa

SEQ ID NO: 2150631 - RNA, 19 nt, Homo sapiens
  misc_RNA (1)...(19): siRNA sense strand
gggaggcugucaguauaaa

SEQ ID NO: 2150632 - RNA, 19 nt, Homo sapiens
  misc_RNA (1)...(19): siRNA sense strand
cagaaacuauggucauuuu

SEQ ID NO: 2150633 - RNA, 19 nt, Homo sapiens
  misc_RNA (1)...(19): siRNA sense strand
aagaacaacugacccaaag

SEQ ID NO: 2150634 - RNA, 19 nt, Homo sapiens
  misc_RNA (1)...(19): siRNA sense strand
gaaaaggaguggcugucaa

SEQ ID NO: 2150635 - RNA, 19 nt, Homo sapiens
  misc_RNA (1)...(19): siRNA sense strand
agaugaaagucgaaaugaa

SEQ ID NO: 2150636 - RNA, 19 nt, Homo sapiens
  misc_RNA (1)...(19): siRNA sense strand
gaaaacauaccucuagaug

SEQ ID NO: 2150637 - RNA, 19 nt, Homo sapiens
  misc_RNA (1)...(19): siRNA sense strand
gccguuagagugcauagua

SEQ ID NO: 2150638 - RNA, 19 nt, Homo sapiens
  misc_RNA (1)...(19): siRNA sense strand
gcugucaaggaaagaauua

SEQ ID NO: 2150639 - RNA, 19 nt, Homo sapiens
  misc_RNA (1)...(19): siRNA sense strand
caaagagguuuucauacaa

SEQ ID NO: 2150640 - RNA, 19 nt, Homo sapiens
  misc_RNA (1)...(19): siRNA sense strand
ucaauccuguaauguguga

SEQ ID NO: 2150641 - RNA, 19 nt, Homo sapiens
  misc_RNA (1)...(19): siRNA sense strand
uaucaacagugcuacagau

SEQ ID NO: 2150642 - RNA, 19 nt, Homo sapiens
  misc_RNA (1)...(19): siRNA sense strand
aggaguggcugucaaggaa

SEQ ID NO: 2150643 - RNA, 19 nt, Homo sapiens
  misc_RNA (1)...(19): siRNA sense strand
gcauuaagaagaacaacug

SEQ ID NO: 2150644 - RNA, 19 nt, Homo sapiens
  misc_RNA (1)...(19): siRNA sense strand
cggaagguguacaagcuuu

SEQ ID NO: 2150645 - RNA, 19 nt, Homo sapiens
  misc_RNA (1)...(19): siRNA sense strand
ucaaacaagccaucaaauc

SEQ ID NO: 2150646 - RNA, 19 nt, Homo sapiens
  misc_RNA (1)...(19): siRNA sense strand
gauaguggcugguuaaaac

SEQ ID NO: 2150647 - RNA, 19 nt, Homo sapiens
  misc_RNA (1)...(19): siRNA sense strand
guaaauggaccaaaaguga

SEQ ID NO: 2150648 - RNA, 19 nt, Homo sapiens
  misc_RNA (1)...(19): siRNA sense strand
uggaucagcugcaguugga

SEQ ID NO: 2150649 - RNA, 19 nt, Homo sapiens
  misc_RNA (1)...(19): siRNA sense strand
cagaauaugcauugggaaa

SEQ ID NO: 2150650 - RNA, 19 nt, Homo sapiens
  misc_RNA (1)...(19): siRNA sense strand
uugggaggcugucaguaua

SEQ ID NO: 2150651 - RNA, 19 nt, Homo sapiens
  misc_RNA (1)...(19): siRNA sense strand
guaaauagagggauaacac

SEQ ID NO: 2150652 - RNA, 19 nt, Homo sapiens
  misc_RNA (1)...(19): siRNA sense strand
cauaugcccuuggaugaau

SEQ ID NO: 2150653 - RNA, 19 nt, Homo sapiens
  misc_RNA (1)...(19): siRNA sense strand
gaggauaagccacaucagu

SEQ ID NO: 2150654 - RNA, 19 nt, Homo sapiens
  misc_RNA (1)...(19): siRNA sense strand
ucacguuuagcucaauuua

SEQ ID NO: 2150655 - RNA, 19 nt, Homo sapiens
  misc_RNA (1)...(19): siRNA sense strand
cuacaaagagguuuucaua

SEQ ID NO: 2150656 - RNA, 19 nt, Homo sapiens
  misc_RNA (1)...(19): siRNA sense strand
ugauauguaugaaggacuu

SEQ ID NO: 2150657 - RNA, 19 nt, Homo sapiens
  misc_RNA (1)...(19): siRNA sense strand
uaacauacacaagcuugaa

SEQ ID NO: 2150658 - RNA, 19 nt, Homo sapiens
  misc_RNA (1)...(19): siRNA sense strand
ucgcaagggugaguauuga

SEQ ID NO: 2150659 - RNA, 19 nt, Homo sapiens
  misc_RNA (1)...(19): siRNA sense strand
gcacauucuugcaguaagc

SEQ ID NO: 2150660 - RNA, 19 nt, Homo sapiens
  misc_RNA (1)...(19): siRNA sense strand
ggacuuccauucuuuucaa

SEQ ID NO: 2150661 - RNA, 19 nt, Homo sapiens
  misc_RNA (1)...(19): siRNA sense strand
gaaauaggcaagauaaaga

SEQ ID NO: 2150662 - RNA, 19 nt, Homo sapiens
  misc_RNA (1)...(19): siRNA sense strand
gcagauaaucgcaaacuuu

SEQ ID NO: 2150663 - RNA, 19 nt, Homo sapiens
  misc_RNA (1)...(19): siRNA sense strand
guaaacagcgauaucagua

SEQ ID NO: 2150664 - RNA, 19 nt, Homo sapiens
  misc_RNA (1)...(19): siRNA sense strand
gaggaaauaggcaagauaa

SEQ ID NO: 2150665 - RNA, 19 nt, Homo sapiens
  misc_RNA (1)...(19): siRNA sense strand
aaacacggauccgcagaua

SEQ ID NO: 2150666 - RNA, 19 nt, Homo sapiens
  misc_RNA (1)...(19): siRNA sense strand
guaagaagagcaaaguaaa

SEQ ID NO: 2150667 - RNA, 19 nt, Homo sapiens
  misc_RNA (1)...(19): siRNA sense strand
gccaaguggugaggaaaua

SEQ ID NO: 2150668 - RNA, 19 nt, Homo sapiens
  misc_RNA (1)...(19): siRNA sense strand
ggaaauaggcaagauaaag

SEQ ID NO: 2150669 - RNA, 19 nt, Homo sapiens
  misc_RNA (1)...(19): siRNA sense strand
gauaaagacaauacugaga

SEQ ID NO: 2150670 - RNA, 19 nt, Homo sapiens
  misc_RNA (1)...(19): siRNA sense strand
caguccagcuugucuguaa

SEQ ID NO: 2150671 - RNA, 19 nt, Homo sapiens
  misc_RNA (1)...(19): siRNA sense strand
gacaauacugagaaagaua

SEQ ID NO: 2150672 - RNA, 19 nt, Homo sapiens
  misc_RNA (1)...(19): siRNA sense strand
uaacucaagcuaccaauag

SEQ ID NO: 2150673 - RNA, 19 nt, Homo sapiens
  misc_RNA (1)...(19): siRNA sense strand
aaacagcgauaucaguaag

SEQ ID NO: 2150674 - RNA, 19 nt, Homo sapiens
  misc_RNA (1)...(19): siRNA sense strand
gauggugaacucauuagaa

SEQ ID NO: 2150675 - RNA, 19 nt, Homo sapiens
  misc_RNA (1)...(19): siRNA sense strand
ccacacaggucugagcaau

SEQ ID NO: 2150676 - RNA, 19 nt, Homo sapiens
  misc_RNA (1)...(19): siRNA sense strand
gauaaagaacggccacaca

SEQ ID NO: 2150677 - RNA, 19 nt, Homo sapiens
  misc_RNA (1)...(19): siRNA sense strand
uaaacagcgauaucaguaa

SEQ ID NO: 2150678 - RNA, 19 nt, Homo sapiens
  misc_RNA (1)...(19): siRNA sense strand
acacaggucugagcaaugg

SEQ ID NO: 2150679 - RNA, 19 nt, Homo sapiens
  misc_RNA (1)...(19): siRNA sense strand
agacaauacugagaaagau

SEQ ID NO: 2150680 - RNA, 19 nt, Homo sapiens
  misc_RNA (1)...(19): siRNA sense strand
gugauaaagacaauacuga

SEQ ID NO: 2150681 - RNA, 19 nt, Homo sapiens
  misc_RNA (1)...(19): siRNA sense strand
gagcaauggaaauggaauu

SEQ ID NO: 2150682 - RNA, 19 nt, Homo sapiens
  misc_RNA (1)...(19): siRNA sense strand
acacggauccgcagauaau

SEQ ID NO: 2150683 - RNA, 19 nt, Homo sapiens
  misc_RNA (1)...(19): siRNA sense strand
cagauaaucgcaaacuuuc

SEQ ID NO: 2150684 - RNA, 19 nt, Homo sapiens
  misc_RNA (1)...(19): siRNA sense strand
ugccucagcuucagacuuc

SEQ ID NO: 2150685 - RNA, 19 nt, Homo sapiens
  misc_RNA (1)...(19): siRNA sense strand
aguaagaagagcaaaguaa

SEQ ID NO: 2150686 - RNA, 19 nt, Homo sapiens
  misc_RNA (1)...(19): siRNA sense strand
aauagccacuucacacaug

SEQ ID NO: 2150687 - RNA, 19 nt, Homo sapiens
  misc_RNA (1)...(19): siRNA sense strand
ggucugagcaauggaaaug

SEQ ID NO: 2150688 - RNA, 19 nt, Homo sapiens
  misc_RNA (1)...(19): siRNA sense strand
ugaggaaauaggcaagaua

SEQ ID NO: 2150689 - RNA, 19 nt, Homo sapiens
  misc_RNA (1)...(19): siRNA sense strand
cuucacacauggagagaug

SEQ ID NO: 2150690 - RNA, 19 nt, Homo sapiens
  misc_RNA (1)...(19): siRNA sense strand
ugaagacaaacaggaauuu

SEQ ID NO: 2150691 - RNA, 19 nt, Homo sapiens
  misc_RNA (1)...(19): siRNA sense strand
acagcgauaucaguaagaa

SEQ ID NO: 2150692 - RNA, 19 nt, Homo sapiens
  misc_RNA (1)...(19): siRNA sense strand
aagaagagcaaaguaaaug

SEQ ID NO: 2150693 - RNA, 19 nt, Homo sapiens
  misc_RNA (1)...(19): siRNA sense strand
gcaauggaaauggaauuca

SEQ ID NO: 2150694 - RNA, 19 nt, Homo sapiens
  misc_RNA (1)...(19): siRNA sense strand
gauaaucgcaaacuuucag

SEQ ID NO: 2150695 - RNA, 19 nt, Homo sapiens
  misc_RNA (1)...(19): siRNA sense strand
gcaagaccaguccauuugg

SEQ ID NO: 2150696 - RNA, 19 nt, Homo sapiens
  misc_RNA (1)...(19): siRNA sense strand
gcaaaguaaaugcugucuu

SEQ ID NO: 2150697 - RNA, 19 nt, Homo sapiens
  misc_RNA (1)...(19): siRNA sense strand
gagaaagauauaacucaag

SEQ ID NO: 2150698 - RNA, 19 nt, Homo sapiens
  misc_RNA (1)...(19): siRNA sense strand
ccaauagccacuucacaca

SEQ ID NO: 2150699 - RNA, 19 nt, Homo sapiens
  misc_RNA (1)...(19): siRNA sense strand
caauggaaauggaauucac

SEQ ID NO: 2150700 - RNA, 19 nt, Homo sapiens
  misc_RNA (1)...(19): siRNA sense strand
gggaaaaugugauaaagac

SEQ ID NO: 2150701 - RNA, 19 nt, Homo sapiens
  misc_RNA (1)...(19): siRNA sense strand
aagacaauacugagaaaga

SEQ ID NO: 2150702 - RNA, 19 nt, Homo sapiens
  misc_RNA (1)...(19): siRNA sense strand
ggugccaaguggugaggaa

SEQ ID NO: 2150703 - RNA, 19 nt, Homo sapiens
  misc_RNA (1)...(19): siRNA sense strand
gaugcaagaccaguccauu

SEQ ID NO: 2150704 - RNA, 19 nt, Homo sapiens
  misc_RNA (1)...(19): siRNA sense strand
ugcaagaccaguccauuug

SEQ ID NO: 2150705 - RNA, 19 nt, Homo sapiens
  misc_RNA (1)...(19): siRNA sense strand
ucugagcaauggaaaugga

SEQ ID NO: 2150706 - RNA, 19 nt, Homo sapiens
  misc_RNA (1)...(19): siRNA sense strand
gugaggaaauaggcaagau

SEQ ID NO: 2150707 - RNA, 19 nt, Homo sapiens
  misc_RNA (1)...(19): siRNA sense strand
gaagacaaacaggaauuuu

SEQ ID NO: 2150708 - RNA, 19 nt, Homo sapiens
  misc_RNA (1)...(19): siRNA sense strand
ggauggugaacucauuaga

SEQ ID NO: 2150709 - RNA, 19 nt, Homo sapiens
  misc_RNA (1)...(19): siRNA sense strand
cagcaccuguuucucaaaa

SEQ ID NO: 2150710 - RNA, 19 nt, Homo sapiens
  misc_RNA (1)...(19): siRNA sense strand
caaacacggauccgcagau

SEQ ID NO: 2150711 - RNA, 19 nt, Homo sapiens
  misc_RNA (1)...(19): siRNA sense strand
caguaagaagagcaaagua

SEQ ID NO: 2150712 - RNA, 19 nt, Homo sapiens
  misc_RNA (1)...(19): siRNA sense strand
uuucagcaccuguuucuca

SEQ ID NO: 2150713 - RNA, 19 nt, Homo sapiens
  misc_RNA (1)...(19): siRNA sense strand
caauagccacuucacacau

SEQ ID NO: 2150714 - RNA, 19 nt, Homo sapiens
  misc_RNA (1)...(19): siRNA sense strand
auaacucaagcuaccaaua

SEQ ID NO: 2150715 - RNA, 19 nt, Homo sapiens
  misc_RNA (1)...(19): siRNA sense strand
caaacuuucagcaccuguu

SEQ ID NO: 2150716 - RNA, 19 nt, Homo sapiens
  misc_RNA (1)...(19): siRNA sense strand
ucggauggugaacucauua

SEQ ID NO: 2150717 - RNA, 19 nt, Homo sapiens
  misc_RNA (1)...(19): siRNA sense strand
ucaguaagaagagcaaagu

SEQ ID NO: 2150718 - RNA, 19 nt, Homo sapiens
  misc_RNA (1)...(19): siRNA sense strand
augcaagaccaguccauuu

SEQ ID NO: 2150719 - RNA, 19 nt, Homo sapiens
  misc_RNA (1)...(19): siRNA sense strand
gaaauaggcaagauaaaga

SEQ ID NO: 2150720 - RNA, 19 nt, Homo sapiens
  misc_RNA (1)...(19): siRNA sense strand
gcagauaaucgcaaacuuu

SEQ ID NO: 2150721 - RNA, 19 nt, Homo sapiens
  misc_RNA (1)...(19): siRNA sense strand
guaaacagcgauaucagua

SEQ ID NO: 2150722 - RNA, 19 nt, Homo sapiens
  misc_RNA (1)...(19): siRNA sense strand
gaggaaauaggcaagauaa

SEQ ID NO: 2150723 - RNA, 19 nt, Homo sapiens
  misc_RNA (1)...(19): siRNA sense strand
aaacacggauccgcagaua

SEQ ID NO: 2150724 - RNA, 19 nt, Homo sapiens
  misc_RNA (1)...(19): siRNA sense strand
guaagaagagcaaaguaaa

SEQ ID NO: 2150725 - RNA, 19 nt, Homo sapiens
  misc_RNA (1)...(19): siRNA sense strand
gccaaguggugaggaaaua

SEQ ID NO: 2150726 - RNA, 19 nt, Homo sapiens
  misc_RNA (1)...(19): siRNA sense strand
ggaaauaggcaagauaaag

SEQ ID NO: 2150727 - RNA, 19 nt, Homo sapiens
  misc_RNA (1)...(19): siRNA sense strand
gauaaagacaauacugaga

SEQ ID NO: 2150728 - RNA, 19 nt, Homo sapiens
  misc_RNA (1)...(19): siRNA sense strand
caguccagcuugucuguaa

SEQ ID NO: 2150729 - RNA, 19 nt, Homo sapiens
  misc_RNA (1)...(19): siRNA sense strand
gacaauacugagaaagaua

SEQ ID NO: 2150730 - RNA, 19 nt, Homo sapiens
  misc_RNA (1)...(19): siRNA sense strand
uaacucaagcuaccaauag

SEQ ID NO: 2150731 - RNA, 19 nt, Homo sapiens
  misc_RNA (1)...(19): siRNA sense strand
aaacagcgauaucaguaag

SEQ ID NO: 2150732 - RNA, 19 nt, Homo sapiens
  misc_RNA (1)...(19): siRNA sense strand
gauggugaacucauuagaa

SEQ ID NO: 2150733 - RNA, 19 nt, Homo sapiens
  misc_RNA (1)...(19): siRNA sense strand
ccacacaggucugagcaau

SEQ ID NO: 2150734 - RNA, 19 nt, Homo sapiens
  misc_RNA (1)...(19): siRNA sense strand
gauaaagaacggccacaca

SEQ ID NO: 2150735 - RNA, 19 nt, Homo sapiens
  misc_RNA (1)...(19): siRNA sense strand
uaaacagcgauaucaguaa

SEQ ID NO: 2150736 - RNA, 19 nt, Homo sapiens
  misc_RNA (1)...(19): siRNA sense strand
acacaggucugagcaaugg

SEQ ID NO: 2150737 - RNA, 19 nt, Homo sapiens
  misc_RNA (1)...(19): siRNA sense strand
agacaauacugagaaagau

SEQ ID NO: 2150738 - RNA, 19 nt, Homo sapiens
  misc_RNA (1)...(19): siRNA sense strand
gugauaaagacaauacuga

SEQ ID NO: 2150739 - RNA, 19 nt, Homo sapiens
  misc_RNA (1)...(19): siRNA sense strand
gagcaauggaaauggaauu

SEQ ID NO: 2150740 - RNA, 19 nt, Homo sapiens
  misc_RNA (1)...(19): siRNA sense strand
acacggauccgcagauaau

SEQ ID NO: 2150741 - RNA, 19 nt, Homo sapiens
  misc_RNA (1)...(19): siRNA sense strand
cagauaaucgcaaacuuuc

SEQ ID NO: 2150742 - RNA, 19 nt, Homo sapiens
  misc_RNA (1)...(19): siRNA sense strand
ugccucagcuucagacuuc

SEQ ID NO: 2150743 - RNA, 19 nt, Homo sapiens
  misc_RNA (1)...(19): siRNA sense strand
aguaagaagagcaaaguaa

SEQ ID NO: 2150744 - RNA, 19 nt, Homo sapiens
  misc_RNA (1)...(19): siRNA sense strand
aauagccacuucacacaug

SEQ ID NO: 2150745 - RNA, 19 nt, Homo sapiens
  misc_RNA (1)...(19): siRNA sense strand
ggucugagcaauggaaaug

SEQ ID NO: 2150746 - RNA, 19 nt, Homo sapiens
  misc_RNA (1)...(19): siRNA sense strand
ugaggaaauaggcaagaua

SEQ ID NO: 2150747 - RNA, 19 nt, Homo sapiens
  misc_RNA (1)...(19): siRNA sense strand
cuucacacauggagagaug

SEQ ID NO: 2150748 - RNA, 19 nt, Homo sapiens
  misc_RNA (1)...(19): siRNA sense strand
ugaagacaaacaggaauuu

SEQ ID NO: 2150749 - RNA, 19 nt, Homo sapiens
  misc_RNA (1)...(19): siRNA sense strand
acagcgauaucaguaagaa

SEQ ID NO: 2150750 - RNA, 19 nt, Homo sapiens
  misc_RNA (1)...(19): siRNA sense strand
aagaagagcaaaguaaaug

SEQ ID NO: 2150751 - RNA, 19 nt, Homo sapiens
  misc_RNA (1)...(19): siRNA sense strand
gcaauggaaauggaauuca

SEQ ID NO: 2150752 - RNA, 19 nt, Homo sapiens
  misc_RNA (1)...(19): siRNA sense strand
gauaaucgcaaacuuucag

SEQ ID NO: 2150753 - RNA, 19 nt, Homo sapiens
  misc_RNA (1)...(19): siRNA sense strand
gcaagaccaguccauuugg

SEQ ID NO: 2150754 - RNA, 19 nt, Homo sapiens
  misc_RNA (1)...(19): siRNA sense strand
gcaaaguaaaugcugucuu

SEQ ID NO: 2150755 - RNA, 19 nt, Homo sapiens
  misc_RNA (1)...(19): siRNA sense strand
gagaaagauauaacucaag

SEQ ID NO: 2150756 - RNA, 19 nt, Homo sapiens
  misc_RNA (1)...(19): siRNA sense strand
ccaauagccacuucacaca

SEQ ID NO: 2150757 - RNA, 19 nt, Homo sapiens
  misc_RNA (1)...(19): siRNA sense strand
caauggaaauggaauucac

SEQ ID NO: 2150758 - RNA, 19 nt, Homo sapiens
  misc_RNA (1)...(19): siRNA sense strand
gggaaaaugugauaaagac

SEQ ID NO: 2150759 - RNA, 19 nt, Homo sapiens
  misc_RNA (1)...(19): siRNA sense strand
aagacaauacugagaaaga

SEQ ID NO: 2150760 - RNA, 19 nt, Homo sapiens
  misc_RNA (1)...(19): siRNA sense strand
ggugccaaguggugaggaa

SEQ ID NO: 2150761 - RNA, 19 nt, Homo sapiens
  misc_RNA (1)...(19): siRNA sense strand
gaugcaagaccaguccauu

SEQ ID NO: 2150762 - RNA, 19 nt, Homo sapiens
  misc_RNA (1)...(19): siRNA sense strand
ugcaagaccaguccauuug

SEQ ID NO: 2150763 - RNA, 19 nt, Homo sapiens
  misc_RNA (1)...(19): siRNA sense strand
ucugagcaauggaaaugga

SEQ ID NO: 2150764 - RNA, 19 nt, Homo sapiens
  misc_RNA (1)...(19): siRNA sense strand
gugaggaaauaggcaagau

SEQ ID NO: 2150765 - RNA, 19 nt, Homo sapiens
  misc_RNA (1)...(19): siRNA sense strand
gaagacaaacaggaauuuu

SEQ ID NO: 2150766 - RNA, 19 nt, Homo sapiens
  misc_RNA (1)...(19): siRNA sense strand
ggauggugaacucauuaga

SEQ ID NO: 2150767 - RNA, 19 nt, Homo sapiens
  misc_RNA (1)...(19): siRNA sense strand
cagcaccuguuucucaaaa

SEQ ID NO: 2150768 - RNA, 19 nt, Homo sapiens
  misc_RNA (1)...(19): siRNA sense strand
caaacacggauccgcagau

SEQ ID NO: 2150769 - RNA, 19 nt, Homo sapiens
  misc_RNA (1)...(19): siRNA sense strand
caguaagaagagcaaagua

SEQ ID NO: 2150770 - RNA, 19 nt, Homo sapiens
  misc_RNA (1)...(19): siRNA sense strand
uuucagcaccuguuucuca

SEQ ID NO: 2150771 - RNA, 19 nt, Homo sapiens
  misc_RNA (1)...(19): siRNA sense strand
caauagccacuucacacau

SEQ ID NO: 2150772 - RNA, 19 nt, Homo sapiens
  misc_RNA (1)...(19): siRNA sense strand
auaacucaagcuaccaaua

SEQ ID NO: 2150773 - RNA, 19 nt, Homo sapiens
  misc_RNA (1)...(19): siRNA sense strand
caaacuuucagcaccuguu

SEQ ID NO: 2150774 - RNA, 19 nt, Homo sapiens
  misc_RNA (1)...(19): siRNA sense strand
ucggauggugaacucauua

SEQ ID NO: 2150775 - RNA, 19 nt, Homo sapiens
  misc_RNA (1)...(19): siRNA sense strand
ucaguaagaagagcaaagu

SEQ ID NO: 2150776 - RNA, 19 nt, Homo sapiens
  misc_RNA (1)...(19): siRNA sense strand
augcaagaccaguccauuu

SEQ ID NO: 2150777 - RNA, 19 nt, Homo sapiens
  misc_RNA (1)...(19): siRNA sense strand
aggcacagcuccaucguua

SEQ ID NO: 2150778 - RNA, 19 nt, Homo sapiens
  misc_RNA (1)...(19): siRNA sense strand
agaccaagcucaugacuca

SEQ ID NO: 2150779 - RNA, 19 nt, Homo sapiens
  misc_RNA (1)...(19): siRNA sense strand
gcacagcuccaucguuaca

SEQ ID NO: 2150780 - RNA, 19 nt, Homo sapiens
  misc_RNA (1)...(19): siRNA sense strand
gacucacaauggccuauuu

SEQ ID NO: 2150781 - RNA, 19 nt, Homo sapiens
  misc_RNA (1)...(19): siRNA sense strand
cuacagaccaagcucauga

SEQ ID NO: 2150782 - RNA, 19 nt, Homo sapiens
  misc_RNA (1)...(19): siRNA sense strand
gcccagcucaugcuucuuu

SEQ ID NO: 2150783 - RNA, 19 nt, Homo sapiens
  misc_RNA (1)...(19): siRNA sense strand
aagccaagcucccaaccuu

SEQ ID NO: 2150784 - RNA, 19 nt, Homo sapiens
  misc_RNA (1)...(19): siRNA sense strand
gcccagcuccugcaucuug

SEQ ID NO: 2150785 - RNA, 19 nt, Homo sapiens
  misc_RNA (1)...(19): siRNA sense strand
uuacaauggccucuuuaga

SEQ ID NO: 2150786 - RNA, 19 nt, Homo sapiens
  misc_RNA (1)...(19): siRNA sense strand
gccaagcucccaaccuuuc

SEQ ID NO: 2150787 - RNA, 19 nt, Homo sapiens
  misc_RNA (1)...(19): siRNA sense strand
ccucacagcagauucuuca

SEQ ID NO: 2150788 - RNA, 19 nt, Homo sapiens
  misc_RNA (1)...(19): siRNA sense strand
ucguuacaauggccucuuu

SEQ ID NO: 2150789 - RNA, 19 nt, Homo sapiens
  misc_RNA (1)...(19): siRNA sense strand
ccaagcucaugacucacaa

SEQ ID NO: 2150790 - RNA, 19 nt, Homo sapiens
  misc_RNA (1)...(19): siRNA sense strand
acucacaauggccuauuua

SEQ ID NO: 2150791 - RNA, 19 nt, Homo sapiens
  misc_RNA (1)...(19): siRNA sense strand
acagcuccaucguuacaau

SEQ ID NO: 2150792 - RNA, 19 nt, Homo sapiens
  misc_RNA (1)...(19): siRNA sense strand
uacaauggccucuuuagac

SEQ ID NO: 2150793 - RNA, 19 nt, Homo sapiens
  misc_RNA (1)...(19): siRNA sense strand
aggcacagcuccaucguua

SEQ ID NO: 2150794 - RNA, 19 nt, Homo sapiens
  misc_RNA (1)...(19): siRNA sense strand
agaccaagcucaugacuca

SEQ ID NO: 2150795 - RNA, 19 nt, Homo sapiens
  misc_RNA (1)...(19): siRNA sense strand
gcacagcuccaucguuaca

SEQ ID NO: 2150796 - RNA, 19 nt, Homo sapiens
  misc_RNA (1)...(19): siRNA sense strand
gacucacaauggccuauuu

SEQ ID NO: 2150797 - RNA, 19 nt, Homo sapiens
  misc_RNA (1)...(19): siRNA sense strand
cuacagaccaagcucauga

SEQ ID NO: 2150798 - RNA, 19 nt, Homo sapiens
  misc_RNA (1)...(19): siRNA sense strand
gcccagcucaugcuucuuu

SEQ ID NO: 2150799 - RNA, 19 nt, Homo sapiens
  misc_RNA (1)...(19): siRNA sense strand
aagccaagcucccaaccuu

SEQ ID NO: 2150800 - RNA, 19 nt, Homo sapiens
  misc_RNA (1)...(19): siRNA sense strand
gcccagcuccugcaucuug

SEQ ID NO: 2150801 - RNA, 19 nt, Homo sapiens
  misc_RNA (1)...(19): siRNA sense strand
uuacaauggccucuuuaga

SEQ ID NO: 2150802 - RNA, 19 nt, Homo sapiens
  misc_RNA (1)...(19): siRNA sense strand
gccaagcucccaaccuuuc

SEQ ID NO: 2150803 - RNA, 19 nt, Homo sapiens
  misc_RNA (1)...(19): siRNA sense strand
ccucacagcagauucuuca

SEQ ID NO: 2150804 - RNA, 19 nt, Homo sapiens
  misc_RNA (1)...(19): siRNA sense strand
ucguuacaauggccucuuu

SEQ ID NO: 2150805 - RNA, 19 nt, Homo sapiens
  misc_RNA (1)...(19): siRNA sense strand
ccaagcucaugacucacaa

SEQ ID NO: 2150806 - RNA, 19 nt, Homo sapiens
  misc_RNA (1)...(19): siRNA sense strand
acucacaauggccuauuua

SEQ ID NO: 2150807 - RNA, 19 nt, Homo sapiens
  misc_RNA (1)...(19): siRNA sense strand
acagcuccaucguuacaau

SEQ ID NO: 2150808 - RNA, 19 nt, Homo sapiens
  misc_RNA (1)...(19): siRNA sense strand
uacaauggccucuuuagac

SEQ ID NO: 2150809 - RNA, 19 nt, Homo sapiens
  misc_RNA (1)...(19): siRNA sense strand
ucucacagcucucaggaaa

SEQ ID NO: 2150810 - RNA, 19 nt, Homo sapiens
  misc_RNA (1)...(19): siRNA sense strand
ccaacucggugguguuuga

SEQ ID NO: 2150811 - RNA, 19 nt, Homo sapiens
  misc_RNA (1)...(19): siRNA sense strand
ggaaugagcaccuucuaca

SEQ ID NO: 2150812 - RNA, 19 nt, Homo sapiens
  misc_RNA (1)...(19): siRNA sense strand
cagaaaggccuguccauca

SEQ ID NO: 2150813 - RNA, 19 nt, Homo sapiens
  misc_RNA (1)...(19): siRNA sense strand
cagcagacaggaacaauga

SEQ ID NO: 2150814 - RNA, 19 nt, Homo sapiens
  misc_RNA (1)...(19): siRNA sense strand
cagcgcauccugaggguua

SEQ ID NO: 2150815 - RNA, 19 nt, Homo sapiens
  misc_RNA (1)...(19): siRNA sense strand
ucauauagccaguuaccua

SEQ ID NO: 2150816 - RNA, 19 nt, Homo sapiens
  misc_RNA (1)...(19): siRNA sense strand
gaacaagaggacuggaaug

SEQ ID NO: 2150817 - RNA, 19 nt, Homo sapiens
  misc_RNA (1)...(19): siRNA sense strand
ccaguggcaucuccaauca

SEQ ID NO: 2150818 - RNA, 19 nt, Homo sapiens
  misc_RNA (1)...(19): siRNA sense strand
gaacuggagagaugucugu

SEQ ID NO: 2150819 - RNA, 19 nt, Homo sapiens
  misc_RNA (1)...(19): siRNA sense strand
gcagaccaguggcaguuuc

SEQ ID NO: 2150820 - RNA, 19 nt, Homo sapiens
  misc_RNA (1)...(19): siRNA sense strand
caaagacccgagaaucaaa

SEQ ID NO: 2150821 - RNA, 19 nt, Homo sapiens
  misc_RNA (1)...(19): siRNA sense strand
gaaaauggccuucuuuguc

SEQ ID NO: 2150822 - RNA, 19 nt, Homo sapiens
  misc_RNA (1)...(19): siRNA sense strand
ggacuggaaugagcaccuu

SEQ ID NO: 2150823 - RNA, 19 nt, Homo sapiens
  misc_RNA (1)...(19): siRNA sense strand
uggcaucuccaaucaauuu

SEQ ID NO: 2150824 - RNA, 19 nt, Homo sapiens
  misc_RNA (1)...(19): siRNA sense strand
ccaaagacccgagaaucaa

SEQ ID NO: 2150825 - RNA, 19 nt, Homo sapiens
  misc_RNA (1)...(19): siRNA sense strand
gaaugagcaccuucuacaa

SEQ ID NO: 2150826 - RNA, 19 nt, Homo sapiens
  misc_RNA (1)...(19): siRNA sense strand
acccagagauuguguuuca

SEQ ID NO: 2150827 - RNA, 19 nt, Homo sapiens
  misc_RNA (1)...(19): siRNA sense strand
ggaacaagaggacuggaau

SEQ ID NO: 2150828 - RNA, 19 nt, Homo sapiens
  misc_RNA (1)...(19): siRNA sense strand
ggccuucuuugucaacuga

SEQ ID NO: 2150829 - RNA, 19 nt, Homo sapiens
  misc_RNA (1)...(19): siRNA sense strand
gagcagaccaguggcaguu

SEQ ID NO: 2150830 - RNA, 19 nt, Homo sapiens
  misc_RNA (1)...(19): siRNA sense strand
cuggagagaugucugugaa

SEQ ID NO: 2150831 - RNA, 19 nt, Homo sapiens
  misc_RNA (1)...(19): siRNA sense strand
acagaaacaacaccugaaa

SEQ ID NO: 2150832 - RNA, 19 nt, Homo sapiens
  misc_RNA (1)...(19): siRNA sense strand
aaguucauauagccaguua

SEQ ID NO: 2150833 - RNA, 19 nt, Homo sapiens
  misc_RNA (1)...(19): siRNA sense strand
aaaauggccuucuuuguca

SEQ ID NO: 2150834 - RNA, 19 nt, Homo sapiens
  misc_RNA (1)...(19): siRNA sense strand
uaucugaagcuccacgaaa

SEQ ID NO: 2150835 - RNA, 19 nt, Homo sapiens
  misc_RNA (1)...(19): siRNA sense strand
ccuaggagagcacuucuug

SEQ ID NO: 2150836 - RNA, 19 nt, Homo sapiens
  misc_RNA (1)...(19): siRNA sense strand
gcagacaggaacaaugaca

SEQ ID NO: 2150837 - RNA, 19 nt, Homo sapiens
  misc_RNA (1)...(19): siRNA sense strand
ucacagcucucaggaaagc

SEQ ID NO: 2150838 - RNA, 19 nt, Homo sapiens
  misc_RNA (1)...(19): siRNA sense strand
cccaccaacuccacagaaa

SEQ ID NO: 2150839 - RNA, 19 nt, Homo sapiens
  misc_RNA (1)...(19): siRNA sense strand
uauagccaguuaccuagga

SEQ ID NO: 2150840 - RNA, 19 nt, Homo sapiens
  misc_RNA (1)...(19): siRNA sense strand
cccgggaacuggagagaug

SEQ ID NO: 2150841 - RNA, 19 nt, Homo sapiens
  misc_RNA (1)...(19): siRNA sense strand
uuugucaacugauucauuc

SEQ ID NO: 2150842 - RNA, 19 nt, Homo sapiens
  misc_RNA (1)...(19): siRNA sense strand
caacuccacagaaacaaca

SEQ ID NO: 2150843 - RNA, 19 nt, Homo sapiens
  misc_RNA (1)...(19): siRNA sense strand
guacguggagcuacgaauc

SEQ ID NO: 2150844 - RNA, 19 nt, Homo sapiens
  misc_RNA (1)...(19): siRNA sense strand
gggaacaagaggacuggaa

SEQ ID NO: 2150845 - RNA, 19 nt, Homo sapiens
  misc_RNA (1)...(19): siRNA sense strand
gagcaccuucuacaaguuc

SEQ ID NO: 2150846 - RNA, 19 nt, Homo sapiens
  misc_RNA (1)...(19): siRNA sense strand
ugagcaccuucuacaaguu

SEQ ID NO: 2150847 - RNA, 19 nt, Homo sapiens
  misc_RNA (1)...(19): siRNA sense strand
ucaauuuguucuccaacuc

SEQ ID NO: 2150848 - RNA, 19 nt, Homo sapiens
  misc_RNA (1)...(19): siRNA sense strand
agaaaggccuguccaucac

SEQ ID NO: 2150849 - RNA, 19 nt, Homo sapiens
  misc_RNA (1)...(19): siRNA sense strand
aguggcaucuccaaucaau

SEQ ID NO: 2150850 - RNA, 19 nt, Homo sapiens
  misc_RNA (1)...(19): siRNA sense strand
guuaggacagugaccgaaa

SEQ ID NO: 2150851 - RNA, 19 nt, Homo sapiens
  misc_RNA (1)...(19): siRNA sense strand
ggaaaauggccuucuuugu

SEQ ID NO: 2150852 - RNA, 19 nt, Homo sapiens
  misc_RNA (1)...(19): siRNA sense strand
ccaagaugcccaccaacuc

SEQ ID NO: 2150853 - RNA, 19 nt, Homo sapiens
  misc_RNA (1)...(19): siRNA sense strand
aacaagaggacuggaauga

SEQ ID NO: 2150854 - RNA, 19 nt, Homo sapiens
  misc_RNA (1)...(19): siRNA sense strand
cuccugauggccaauguua

SEQ ID NO: 2150855 - RNA, 19 nt, Homo sapiens
  misc_RNA (1)...(19): siRNA sense strand
caccaacuccacagaaaca

SEQ ID NO: 2150856 - RNA, 19 nt, Homo sapiens
  misc_RNA (1)...(19): siRNA sense strand
ggacagugaccgaaaagau

SEQ ID NO: 2150857 - RNA, 19 nt, Homo sapiens
  misc_RNA (1)...(19): siRNA sense strand
gaacuugggguggaaaaug

SEQ ID NO: 2150858 - RNA, 19 nt, Homo sapiens
  misc_RNA (1)...(19): siRNA sense strand
gaccaguggcaguuucuca

SEQ ID NO: 2150859 - RNA, 19 nt, Homo sapiens
  misc_RNA (1)...(19): siRNA sense strand
gaaguacguggagcuacga

SEQ ID NO: 2150860 - RNA, 19 nt, Homo sapiens
  misc_RNA (1)...(19): siRNA sense strand
ugcagcagcuacaagauac

SEQ ID NO: 2150861 - RNA, 19 nt, Homo sapiens
  misc_RNA (1)...(19): siRNA sense strand
ccaccaaagacccgagaau

SEQ ID NO: 2150862 - RNA, 19 nt, Homo sapiens
  misc_RNA (1)...(19): siRNA sense strand
caccaaagacccgagaauc

SEQ ID NO: 2150863 - RNA, 19 nt, Homo sapiens
  misc_RNA (1)...(19): siRNA sense strand
gaaacaacaccugaaaaca

SEQ ID NO: 2150864 - RNA, 19 nt, Homo sapiens
  misc_RNA (1)...(19): siRNA sense strand
accaaagacccgagaauca

SEQ ID NO: 2150865 - RNA, 19 nt, Homo sapiens
  misc_RNA (1)...(19): siRNA sense strand
ucucacagcucucaggaaa

SEQ ID NO: 2150866 - RNA, 19 nt, Homo sapiens
  misc_RNA (1)...(19): siRNA sense strand
ccaacucggugguguuuga

SEQ ID NO: 2150867 - RNA, 19 nt, Homo sapiens
  misc_RNA (1)...(19): siRNA sense strand
ggaaugagcaccuucuaca

SEQ ID NO: 2150868 - RNA, 19 nt, Homo sapiens
  misc_RNA (1)...(19): siRNA sense strand
cagaaaggccuguccauca

SEQ ID NO: 2150869 - RNA, 19 nt, Homo sapiens
  misc_RNA (1)...(19): siRNA sense strand
cagcagacaggaacaauga

SEQ ID NO: 2150870 - RNA, 19 nt, Homo sapiens
  misc_RNA (1)...(19): siRNA sense strand
cagcgcauccugaggguua

SEQ ID NO: 2150871 - RNA, 19 nt, Homo sapiens
  misc_RNA (1)...(19): siRNA sense strand
ucauauagccaguuaccua

SEQ ID NO: 2150872 - RNA, 19 nt, Homo sapiens
  misc_RNA (1)...(19): siRNA sense strand
gaacaagaggacuggaaug

SEQ ID NO: 2150873 - RNA, 19 nt, Homo sapiens
  misc_RNA (1)...(19): siRNA sense strand
ccaguggcaucuccaauca

SEQ ID NO: 2150874 - RNA, 19 nt, Homo sapiens
  misc_RNA (1)...(19): siRNA sense strand
gaacuggagagaugucugu

SEQ ID NO: 2150875 - RNA, 19 nt, Homo sapiens
  misc_RNA (1)...(19): siRNA sense strand
gcagaccaguggcaguuuc

SEQ ID NO: 2150876 - RNA, 19 nt, Homo sapiens
  misc_RNA (1)...(19): siRNA sense strand
caaagacccgagaaucaaa

SEQ ID NO: 2150877 - RNA, 19 nt, Homo sapiens
  misc_RNA (1)...(19): siRNA sense strand
gaaaauggccuucuuuguc

SEQ ID NO: 2150878 - RNA, 19 nt, Homo sapiens
  misc_RNA (1)...(19): siRNA sense strand
ggacuggaaugagcaccuu

SEQ ID NO: 2150879 - RNA, 19 nt, Homo sapiens
  misc_RNA (1)...(19): siRNA sense strand
uggcaucuccaaucaauuu

SEQ ID NO: 2150880 - RNA, 19 nt, Homo sapiens
  misc_RNA (1)...(19): siRNA sense strand
ccaaagacccgagaaucaa

SEQ ID NO: 2150881 - RNA, 19 nt, Homo sapiens
  misc_RNA (1)...(19): siRNA sense strand
gaaugagcaccuucuacaa

SEQ ID NO: 2150882 - RNA, 19 nt, Homo sapiens
  misc_RNA (1)...(19): siRNA sense strand
acccagagauuguguuuca

SEQ ID NO: 2150883 - RNA, 19 nt, Homo sapiens
  misc_RNA (1)...(19): siRNA sense strand
ggaacaagaggacuggaau

SEQ ID NO: 2150884 - RNA, 19 nt, Homo sapiens
  misc_RNA (1)...(19): siRNA sense strand
ggccuucuuugucaacuga

SEQ ID NO: 2150885 - RNA, 19 nt, Homo sapiens
  misc_RNA (1)...(19): siRNA sense strand
gagcagaccaguggcaguu

SEQ ID NO: 2150886 - RNA, 19 nt, Homo sapiens
  misc_RNA (1)...(19): siRNA sense strand
cuggagagaugucugugaa

SEQ ID NO: 2150887 - RNA, 19 nt, Homo sapiens
  misc_RNA (1)...(19): siRNA sense strand
acagaaacaacaccugaaa

SEQ ID NO: 2150888 - RNA, 19 nt, Homo sapiens
  misc_RNA (1)...(19): siRNA sense strand
aaguucauauagccaguua

SEQ ID NO: 2150889 - RNA, 19 nt, Homo sapiens
  misc_RNA (1)...(19): siRNA sense strand
aaaauggccuucuuuguca

SEQ ID NO: 2150890 - RNA, 19 nt, Homo sapiens
  misc_RNA (1)...(19): siRNA sense strand
uaucugaagcuccacgaaa

SEQ ID NO: 2150891 - RNA, 19 nt, Homo sapiens
  misc_RNA (1)...(19): siRNA sense strand
ccuaggagagcacuucuug

SEQ ID NO: 2150892 - RNA, 19 nt, Homo sapiens
  misc_RNA (1)...(19): siRNA sense strand
gcagacaggaacaaugaca

SEQ ID NO: 2150893 - RNA, 19 nt, Homo sapiens
  misc_RNA (1)...(19): siRNA sense strand
ucacagcucucaggaaagc

SEQ ID NO: 2150894 - RNA, 19 nt, Homo sapiens
  misc_RNA (1)...(19): siRNA sense strand
cccaccaacuccacagaaa

SEQ ID NO: 2150895 - RNA, 19 nt, Homo sapiens
  misc_RNA (1)...(19): siRNA sense strand
uauagccaguuaccuagga

SEQ ID NO: 2150896 - RNA, 19 nt, Homo sapiens
  misc_RNA (1)...(19): siRNA sense strand
cccgggaacuggagagaug

SEQ ID NO: 2150897 - RNA, 19 nt, Homo sapiens
  misc_RNA (1)...(19): siRNA sense strand
uuugucaacugauucauuc

SEQ ID NO: 2150898 - RNA, 19 nt, Homo sapiens
  misc_RNA (1)...(19): siRNA sense strand
caacuccacagaaacaaca

SEQ ID NO: 2150899 - RNA, 19 nt, Homo sapiens
  misc_RNA (1)...(19): siRNA sense strand
guacguggagcuacgaauc

SEQ ID NO: 2150900 - RNA, 19 nt, Homo sapiens
  misc_RNA (1)...(19): siRNA sense strand
gggaacaagaggacuggaa

SEQ ID NO: 2150901 - RNA, 19 nt, Homo sapiens
  misc_RNA (1)...(19): siRNA sense strand
gagcaccuucuacaaguuc

SEQ ID NO: 2150902 - RNA, 19 nt, Homo sapiens
  misc_RNA (1)...(19): siRNA sense strand
ugagcaccuucuacaaguu

SEQ ID NO: 2150903 - RNA, 19 nt, Homo sapiens
  misc_RNA (1)...(19): siRNA sense strand
ucaauuuguucuccaacuc

SEQ ID NO: 2150904 - RNA, 19 nt, Homo sapiens
  misc_RNA (1)...(19): siRNA sense strand
agaaaggccuguccaucac

SEQ ID NO: 2150905 - RNA, 19 nt, Homo sapiens
  misc_RNA (1)...(19): siRNA sense strand
aguggcaucuccaaucaau

SEQ ID NO: 2150906 - RNA, 19 nt, Homo sapiens
  misc_RNA (1)...(19): siRNA sense strand
guuaggacagugaccgaaa

SEQ ID NO: 2150907 - RNA, 19 nt, Homo sapiens
  misc_RNA (1)...(19): siRNA sense strand
ggaaaauggccuucuuugu

SEQ ID NO: 2150908 - RNA, 19 nt, Homo sapiens
  misc_RNA (1)...(19): siRNA sense strand
ccaagaugcccaccaacuc

SEQ ID NO: 2150909 - RNA, 19 nt, Homo sapiens
  misc_RNA (1)...(19): siRNA sense strand
aacaagaggacuggaauga

SEQ ID NO: 2150910 - RNA, 19 nt, Homo sapiens
  misc_RNA (1)...(19): siRNA sense strand
cuccugauggccaauguua

SEQ ID NO: 2150911 - RNA, 19 nt, Homo sapiens
  misc_RNA (1)...(19): siRNA sense strand
caccaacuccacagaaaca

SEQ ID NO: 2150912 - RNA, 19 nt, Homo sapiens
  misc_RNA (1)...(19): siRNA sense strand
ggacagugaccgaaaagau

SEQ ID NO: 2150913 - RNA, 19 nt, Homo sapiens
  misc_RNA (1)...(19): siRNA sense strand
gaacuugggguggaaaaug

SEQ ID NO: 2150914 - RNA, 19 nt, Homo sapiens
  misc_RNA (1)...(19): siRNA sense strand
gaccaguggcaguuucuca

SEQ ID NO: 2150915 - RNA, 19 nt, Homo sapiens
  misc_RNA (1)...(19): siRNA sense strand
gaaguacguggagcuacga

SEQ ID NO: 2150916 - RNA, 19 nt, Homo sapiens
  misc_RNA (1)...(19): siRNA sense strand
ugcagcagcuacaagauac

SEQ ID NO: 2150917 - RNA, 19 nt, Homo sapiens
  misc_RNA (1)...(19): siRNA sense strand
ccaccaaagacccgagaau

SEQ ID NO: 2150918 - RNA, 19 nt, Homo sapiens
  misc_RNA (1)...(19): siRNA sense strand
caccaaagacccgagaauc

SEQ ID NO: 2150919 - RNA, 19 nt, Homo sapiens
  misc_RNA (1)...(19): siRNA sense strand
gaaacaacaccugaaaaca

SEQ ID NO: 2150920 - RNA, 19 nt, Homo sapiens
  misc_RNA (1)...(19): siRNA sense strand
accaaagacccgagaauca

SEQ ID NO: 2150921 - RNA, 19 nt, Homo sapiens
  misc_RNA (1)...(19): siRNA sense strand
gaaaccagcugucuccaua

SEQ ID NO: 2150922 - RNA, 19 nt, Homo sapiens
  misc_RNA (1)...(19): siRNA sense strand
gaaggcaacuccucacuaa

SEQ ID NO: 2150923 - RNA, 19 nt, Homo sapiens
  misc_RNA (1)...(19): siRNA sense strand
ucaauaaacugaccaaaug

SEQ ID NO: 2150924 - RNA, 19 nt, Homo sapiens
  misc_RNA (1)...(19): siRNA sense strand
ggacacagauacauugguu

SEQ ID NO: 2150925 - RNA, 19 nt, Homo sapiens
  misc_RNA (1)...(19): siRNA sense strand
gcagaagaauguaccuuga

SEQ ID NO: 2150926 - RNA, 19 nt, Homo sapiens
  misc_RNA (1)...(19): siRNA sense strand
uaaaucggcaccaaucuua

SEQ ID NO: 2150927 - RNA, 19 nt, Homo sapiens
  misc_RNA (1)...(19): siRNA sense strand
uaaagcagcacaaguauau

SEQ ID NO: 2150928 - RNA, 19 nt, Homo sapiens
  misc_RNA (1)...(19): siRNA sense strand
gcaucucaguccuggauua

SEQ ID NO: 2150929 - RNA, 19 nt, Homo sapiens
  misc_RNA (1)...(19): siRNA sense strand
aagaggagcuggagaagug

SEQ ID NO: 2150930 - RNA, 19 nt, Homo sapiens
  misc_RNA (1)...(19): siRNA sense strand
aagacagacucuaucaaua

SEQ ID NO: 2150931 - RNA, 19 nt, Homo sapiens
  misc_RNA (1)...(19): siRNA sense strand
gaagugcccuaugucuuug

SEQ ID NO: 2150932 - RNA, 19 nt, Homo sapiens
  misc_RNA (1)...(19): siRNA sense strand
ggaagguggucauguuuac

SEQ ID NO: 2150933 - RNA, 19 nt, Homo sapiens
  misc_RNA (1)...(19): siRNA sense strand
gggccaacauugaggcuuu

SEQ ID NO: 2150934 - RNA, 19 nt, Homo sapiens
  misc_RNA (1)...(19): siRNA sense strand
uauaugaucgcucugcuua

SEQ ID NO: 2150935 - RNA, 19 nt, Homo sapiens
  misc_RNA (1)...(19): siRNA sense strand
ggaagaagaugcccaaaag

SEQ ID NO: 2150936 - RNA, 19 nt, Homo sapiens
  misc_RNA (1)...(19): siRNA sense strand
ugacugggcuuacgggaau

SEQ ID NO: 2150937 - RNA, 19 nt, Homo sapiens
  misc_RNA (1)...(19): siRNA sense strand
ugccggagcuuacuacuga

SEQ ID NO: 2150938 - RNA, 19 nt, Homo sapiens
  misc_RNA (1)...(19): siRNA sense strand
ggacauugagcacuucuug

SEQ ID NO: 2150939 - RNA, 19 nt, Homo sapiens
  misc_RNA (1)...(19): siRNA sense strand
ggaggugcuuugaagaaga

SEQ ID NO: 2150940 - RNA, 19 nt, Homo sapiens
  misc_RNA (1)...(19): siRNA sense strand
uaaaguuacagaccaagua

SEQ ID NO: 2150941 - RNA, 19 nt, Homo sapiens
  misc_RNA (1)...(19): siRNA sense strand
gguuggaucugccugaaga

SEQ ID NO: 2150942 - RNA, 19 nt, Homo sapiens
  misc_RNA (1)...(19): siRNA sense strand
gagaugagcaggaacaagu

SEQ ID NO: 2150943 - RNA, 19 nt, Homo sapiens
  misc_RNA (1)...(19): siRNA sense strand
gcaggacacagauacauug

SEQ ID NO: 2150944 - RNA, 19 nt, Homo sapiens
  misc_RNA (1)...(19): siRNA sense strand
gaccuuccgcacugaauua

SEQ ID NO: 2150945 - RNA, 19 nt, Homo sapiens
  misc_RNA (1)...(19): siRNA sense strand
cagccgaguugucagaauu

SEQ ID NO: 2150946 - RNA, 19 nt, Homo sapiens
  misc_RNA (1)...(19): siRNA sense strand
uaagacagacucuaucaau

SEQ ID NO: 2150947 - RNA, 19 nt, Homo sapiens
  misc_RNA (1)...(19): siRNA sense strand
gagcacuucuuggagauga

SEQ ID NO: 2150948 - RNA, 19 nt, Homo sapiens
  misc_RNA (1)...(19): siRNA sense strand
uuacucuucuccaugguua

SEQ ID NO: 2150949 - RNA, 19 nt, Homo sapiens
  misc_RNA (1)...(19): siRNA sense strand
agacagacucuaucaauau

SEQ ID NO: 2150950 - RNA, 19 nt, Homo sapiens
  misc_RNA (1)...(19): siRNA sense strand
ccagagacgccaugugaaa

SEQ ID NO: 2150951 - RNA, 19 nt, Homo sapiens
  misc_RNA (1)...(19): siRNA sense strand
agaagugcccuaugucuuu

SEQ ID NO: 2150952 - RNA, 19 nt, Homo sapiens
  misc_RNA (1)...(19): siRNA sense strand
aagaagauuucaagacuca

SEQ ID NO: 2150953 - RNA, 19 nt, Homo sapiens
  misc_RNA (1)...(19): siRNA sense strand
gccugaagauuuccacuau

SEQ ID NO: 2150954 - RNA, 19 nt, Homo sapiens
  misc_RNA (1)...(19): siRNA sense strand
gaacaggcacaaggagauu

SEQ ID NO: 2150955 - RNA, 19 nt, Homo sapiens
  misc_RNA (1)...(19): siRNA sense strand
gcaugaagcugggcaucga

SEQ ID NO: 2150956 - RNA, 19 nt, Homo sapiens
  misc_RNA (1)...(19): siRNA sense strand
gacagacucuaucaauauc

SEQ ID NO: 2150957 - RNA, 19 nt, Homo sapiens
  misc_RNA (1)...(19): siRNA sense strand
gaagaggugguaccagaga

SEQ ID NO: 2150958 - RNA, 19 nt, Homo sapiens
  misc_RNA (1)...(19): siRNA sense strand
gccuggacaucuacaauga

SEQ ID NO: 2150959 - RNA, 19 nt, Homo sapiens
  misc_RNA (1)...(19): siRNA sense strand
ggagauuauuguaaagagu

SEQ ID NO: 2150960 - RNA, 19 nt, Homo sapiens
  misc_RNA (1)...(19): siRNA sense strand
agaaggacauugagcacuu

SEQ ID NO: 2150961 - RNA, 19 nt, Homo sapiens
  misc_RNA (1)...(19): siRNA sense strand
ggagucugcuggugaugga

SEQ ID NO: 2150962 - RNA, 19 nt, Homo sapiens
  misc_RNA (1)...(19): siRNA sense strand
ucaauauccuggcagaugu

SEQ ID NO: 2150963 - RNA, 19 nt, Homo sapiens
  misc_RNA (1)...(19): siRNA sense strand
cugaagauuuccacuauuc

SEQ ID NO: 2150964 - RNA, 19 nt, Homo sapiens
  misc_RNA (1)...(19): siRNA sense strand
aaccauaucuaccaguuug

SEQ ID NO: 2150965 - RNA, 19 nt, Homo sapiens
  misc_RNA (1)...(19): siRNA sense strand
ccaaaaggccuauauaaug

SEQ ID NO: 2150966 - RNA, 19 nt, Homo sapiens
  misc_RNA (1)...(19): siRNA sense strand
aaacauucccggaccauga

SEQ ID NO: 2150967 - RNA, 19 nt, Homo sapiens
  misc_RNA (1)...(19): siRNA sense strand
caaaaggccuauauaaugg

SEQ ID NO: 2150968 - RNA, 19 nt, Homo sapiens
  misc_RNA (1)...(19): siRNA sense strand
uccuaaagcuacuaaaguu

SEQ ID NO: 2150969 - RNA, 19 nt, Homo sapiens
  misc_RNA (1)...(19): siRNA sense strand
aaccuggaauucaccaaua

SEQ ID NO: 2150970 - RNA, 19 nt, Homo sapiens
  misc_RNA (1)...(19): siRNA sense strand
guacagccuuccgcaguau

SEQ ID NO: 2150971 - RNA, 19 nt, Homo sapiens
  misc_RNA (1)...(19): siRNA sense strand
cuaccaguuugaauaugua

SEQ ID NO: 2150972 - RNA, 19 nt, Homo sapiens
  misc_RNA (1)...(19): siRNA sense strand
ucaaccauaucuaccaguu

SEQ ID NO: 2150973 - RNA, 19 nt, Homo sapiens
  misc_RNA (1)...(19): siRNA sense strand
gaguaucucuacccugcuu

SEQ ID NO: 2150974 - RNA, 19 nt, Homo sapiens
  misc_RNA (1)...(19): siRNA sense strand
aggaauggcuggaguugga

SEQ ID NO: 2150975 - RNA, 19 nt, Homo sapiens
  misc_RNA (1)...(19): siRNA sense strand
ucaaacacuucaaacucaa

SEQ ID NO: 2150976 - RNA, 19 nt, Homo sapiens
  misc_RNA (1)...(19): siRNA sense strand
gagaagugcccuaugucuu

SEQ ID NO: 2150977 - RNA, 19 nt, Homo sapiens
  misc_RNA (1)...(19): siRNA sense strand
ucugcagacucucaaagua

SEQ ID NO: 2150978 - RNA, 19 nt, Homo sapiens
  misc_RNA (1)...(19): siRNA sense strand
uuaagcuucuccaugcaua

SEQ ID NO: 2150979 - RNA, 19 nt, Homo sapiens
  misc_RNA (1)...(19): siRNA sense strand
ggcuagagguggucaguag

SEQ ID NO: 2150980 - RNA, 19 nt, Homo sapiens
  misc_RNA (1)...(19): siRNA sense strand
ugucagccauuuaccagaa

SEQ ID NO: 2150981 - RNA, 19 nt, Homo sapiens
  misc_RNA (1)...(19): siRNA sense strand
gcugcaacuuuauguccua

SEQ ID NO: 2150982 - RNA, 19 nt, Homo sapiens
  misc_RNA (1)...(19): siRNA sense strand
gaggugcuuugaagaagau

SEQ ID NO: 2150983 - RNA, 19 nt, Homo sapiens
  misc_RNA (1)...(19): siRNA sense strand
gaaccuggaauucaccaau

SEQ ID NO: 2150984 - RNA, 19 nt, Homo sapiens
  misc_RNA (1)...(19): siRNA sense strand
acacugagaaccuggaauu

SEQ ID NO: 2150985 - RNA, 19 nt, Homo sapiens
  misc_RNA (1)...(19): siRNA sense strand
gcagaugugcagaucaaga

SEQ ID NO: 2150986 - RNA, 19 nt, Homo sapiens
  misc_RNA (1)...(19): siRNA sense strand
cagauacauugguuggauu

SEQ ID NO: 2150987 - RNA, 19 nt, Homo sapiens
  misc_RNA (1)...(19): siRNA sense strand
ggacaucuacaaugaaagg

SEQ ID NO: 2150988 - RNA, 19 nt, Homo sapiens
  misc_RNA (1)...(19): siRNA sense strand
gcuucuccaugcauaauga

SEQ ID NO: 2150989 - RNA, 19 nt, Homo sapiens
  misc_RNA (1)...(19): siRNA sense strand
gauuuccacuauucauaug

SEQ ID NO: 2150990 - RNA, 19 nt, Homo sapiens
  misc_RNA (1)...(19): siRNA sense strand
ccuaaagcuacuaaaguua

SEQ ID NO: 2150991 - RNA, 19 nt, Homo sapiens
  misc_RNA (1)...(19): siRNA sense strand
caaggagauuauuguaaag

SEQ ID NO: 2150992 - RNA, 19 nt, Homo sapiens
  misc_RNA (1)...(19): siRNA sense strand
gcuaagacagacucuauca

SEQ ID NO: 2150993 - RNA, 19 nt, Homo sapiens
  misc_RNA (1)...(19): siRNA sense strand
uaccagagacgccauguga

SEQ ID NO: 2150994 - RNA, 19 nt, Homo sapiens
  misc_RNA (1)...(19): siRNA sense strand
gcaaggaauggcuggaguu

SEQ ID NO: 2150995 - RNA, 19 nt, Homo sapiens
  misc_RNA (1)...(19): siRNA sense strand
ucgcagaugugcagaucaa

SEQ ID NO: 2150996 - RNA, 19 nt, Homo sapiens
  misc_RNA (1)...(19): siRNA sense strand
ucuggaagguggucauguu

SEQ ID NO: 2150997 - RNA, 19 nt, Homo sapiens
  misc_RNA (1)...(19): siRNA sense strand
ggagcuuacuacugaaagu

SEQ ID NO: 2150998 - RNA, 19 nt, Homo sapiens
  misc_RNA (1)...(19): siRNA sense strand
cucaaacacuucaaacuca

SEQ ID NO: 2150999 - RNA, 19 nt, Homo sapiens
  misc_RNA (1)...(19): siRNA sense strand
uaacaggaggugcuuugaa

SEQ ID NO: 2151000 - RNA, 19 nt, Homo sapiens
  misc_RNA (1)...(19): siRNA sense strand
cuggacaucuacaaugaaa

SEQ ID NO: 2151001 - RNA, 19 nt, Homo sapiens
  misc_RNA (1)...(19): siRNA sense strand
ucagacagaaggacauuga

SEQ ID NO: 2151002 - RNA, 19 nt, Homo sapiens
  misc_RNA (1)...(19): siRNA sense strand
gaagauuuccacuauucau

SEQ ID NO: 2151003 - RNA, 19 nt, Homo sapiens
  misc_RNA (1)...(19): siRNA sense strand
cgaguugucagaauuguau

SEQ ID NO: 2151004 - RNA, 19 nt, Homo sapiens
  misc_RNA (1)...(19): siRNA sense strand
aggccaugcugcaacuuua

SEQ ID NO: 2151005 - RNA, 19 nt, Homo sapiens
  misc_RNA (1)...(19): siRNA sense strand
uguacagccuuccgcagua

SEQ ID NO: 2151006 - RNA, 19 nt, Homo sapiens
  misc_RNA (1)...(19): siRNA sense strand
cuaaagcagcacaaguaua

SEQ ID NO: 2151007 - RNA, 19 nt, Homo sapiens
  misc_RNA (1)...(19): siRNA sense strand
ccucuaaggcuaagacaga

SEQ ID NO: 2151008 - RNA, 19 nt, Homo sapiens
  misc_RNA (1)...(19): siRNA sense strand
gagguuggaucugccugaa

SEQ ID NO: 2151009 - RNA, 19 nt, Homo sapiens
  misc_RNA (1)...(19): siRNA sense strand
ccaugaugcugguaguguu

SEQ ID NO: 2151010 - RNA, 19 nt, Homo sapiens
  misc_RNA (1)...(19): siRNA sense strand
uaaacugaccaaauggaaa

SEQ ID NO: 2151011 - RNA, 19 nt, Homo sapiens
  misc_RNA (1)...(19): siRNA sense strand
guacagaagcgggcagaau

SEQ ID NO: 2151012 - RNA, 19 nt, Homo sapiens
  misc_RNA (1)...(19): siRNA sense strand
uaacagccgucgcuaugac

SEQ ID NO: 2151013 - RNA, 19 nt, Homo sapiens
  misc_RNA (1)...(19): siRNA sense strand
cgaaggcaacuccucacua

SEQ ID NO: 2151014 - RNA, 19 nt, Homo sapiens
  misc_RNA (1)...(19): siRNA sense strand
uacagaagcgggcagaauu

SEQ ID NO: 2151015 - RNA, 19 nt, Homo sapiens
  misc_RNA (1)...(19): siRNA sense strand
cccuaaagcagcacaagua

SEQ ID NO: 2151016 - RNA, 19 nt, Homo sapiens
  misc_RNA (1)...(19): siRNA sense strand
uaugaucgcucugcuuaag

SEQ ID NO: 2151017 - RNA, 19 nt, Homo sapiens
  misc_RNA (1)...(19): siRNA sense strand
ggagaagugcccuaugucu

SEQ ID NO: 2151018 - RNA, 19 nt, Homo sapiens
  misc_RNA (1)...(19): siRNA sense strand
cuggagaagugcccuaugu

SEQ ID NO: 2151019 - RNA, 19 nt, Homo sapiens
  misc_RNA (1)...(19): siRNA sense strand
caugugaaauccucuacca

SEQ ID NO: 2151020 - RNA, 19 nt, Homo sapiens
  misc_RNA (1)...(19): siRNA sense strand
gcagccgaguugucagaau

SEQ ID NO: 2151021 - RNA, 19 nt, Homo sapiens
  misc_RNA (1)...(19): siRNA sense strand
gaaaccagcugucuccaua

SEQ ID NO: 2151022 - RNA, 19 nt, Homo sapiens
  misc_RNA (1)...(19): siRNA sense strand
gaaggcaacuccucacuaa

SEQ ID NO: 2151023 - RNA, 19 nt, Homo sapiens
  misc_RNA (1)...(19): siRNA sense strand
ucaauaaacugaccaaaug

SEQ ID NO: 2151024 - RNA, 19 nt, Homo sapiens
  misc_RNA (1)...(19): siRNA sense strand
ggacacagauacauugguu

SEQ ID NO: 2151025 - RNA, 19 nt, Homo sapiens
  misc_RNA (1)...(19): siRNA sense strand
gcagaagaauguaccuuga

SEQ ID NO: 2151026 - RNA, 19 nt, Homo sapiens
  misc_RNA (1)...(19): siRNA sense strand
uaaaucggcaccaaucuua

SEQ ID NO: 2151027 - RNA, 19 nt, Homo sapiens
  misc_RNA (1)...(19): siRNA sense strand
uaaagcagcacaaguauau

SEQ ID NO: 2151028 - RNA, 19 nt, Homo sapiens
  misc_RNA (1)...(19): siRNA sense strand
gcaucucaguccuggauua

SEQ ID NO: 2151029 - RNA, 19 nt, Homo sapiens
  misc_RNA (1)...(19): siRNA sense strand
aagaggagcuggagaagug

SEQ ID NO: 2151030 - RNA, 19 nt, Homo sapiens
  misc_RNA (1)...(19): siRNA sense strand
aagacagacucuaucaaua

SEQ ID NO: 2151031 - RNA, 19 nt, Homo sapiens
  misc_RNA (1)...(19): siRNA sense strand
gaagugcccuaugucuuug

SEQ ID NO: 2151032 - RNA, 19 nt, Homo sapiens
  misc_RNA (1)...(19): siRNA sense strand
ggaagguggucauguuuac

SEQ ID NO: 2151033 - RNA, 19 nt, Homo sapiens
  misc_RNA (1)...(19): siRNA sense strand
gggccaacauugaggcuuu

SEQ ID NO: 2151034 - RNA, 19 nt, Homo sapiens
  misc_RNA (1)...(19): siRNA sense strand
uauaugaucgcucugcuua

SEQ ID NO: 2151035 - RNA, 19 nt, Homo sapiens
  misc_RNA (1)...(19): siRNA sense strand
ggaagaagaugcccaaaag

SEQ ID NO: 2151036 - RNA, 19 nt, Homo sapiens
  misc_RNA (1)...(19): siRNA sense strand
ugacugggcuuacgggaau

SEQ ID NO: 2151037 - RNA, 19 nt, Homo sapiens
  misc_RNA (1)...(19): siRNA sense strand
ugccggagcuuacuacuga

SEQ ID NO: 2151038 - RNA, 19 nt, Homo sapiens
  misc_RNA (1)...(19): siRNA sense strand
ggacauugagcacuucuug

SEQ ID NO: 2151039 - RNA, 19 nt, Homo sapiens
  misc_RNA (1)...(19): siRNA sense strand
ggaggugcuuugaagaaga

SEQ ID NO: 2151040 - RNA, 19 nt, Homo sapiens
  misc_RNA (1)...(19): siRNA sense strand
uaaaguuacagaccaagua

SEQ ID NO: 2151041 - RNA, 19 nt, Homo sapiens
  misc_RNA (1)...(19): siRNA sense strand
gguuggaucugccugaaga

SEQ ID NO: 2151042 - RNA, 19 nt, Homo sapiens
  misc_RNA (1)...(19): siRNA sense strand
gagaugagcaggaacaagu

SEQ ID NO: 2151043 - RNA, 19 nt, Homo sapiens
  misc_RNA (1)...(19): siRNA sense strand
gcaggacacagauacauug

SEQ ID NO: 2151044 - RNA, 19 nt, Homo sapiens
  misc_RNA (1)...(19): siRNA sense strand
gaccuuccgcacugaauua

SEQ ID NO: 2151045 - RNA, 19 nt, Homo sapiens
  misc_RNA (1)...(19): siRNA sense strand
cagccgaguugucagaauu

SEQ ID NO: 2151046 - RNA, 19 nt, Homo sapiens
  misc_RNA (1)...(19): siRNA sense strand
uaagacagacucuaucaau

SEQ ID NO: 2151047 - RNA, 19 nt, Homo sapiens
  misc_RNA (1)...(19): siRNA sense strand
gagcacuucuuggagauga

SEQ ID NO: 2151048 - RNA, 19 nt, Homo sapiens
  misc_RNA (1)...(19): siRNA sense strand
uuacucuucuccaugguua

SEQ ID NO: 2151049 - RNA, 19 nt, Homo sapiens
  misc_RNA (1)...(19): siRNA sense strand
agacagacucuaucaauau

SEQ ID NO: 2151050 - RNA, 19 nt, Homo sapiens
  misc_RNA (1)...(19): siRNA sense strand
ccagagacgccaugugaaa

SEQ ID NO: 2151051 - RNA, 19 nt, Homo sapiens
  misc_RNA (1)...(19): siRNA sense strand
agaagugcccuaugucuuu

SEQ ID NO: 2151052 - RNA, 19 nt, Homo sapiens
  misc_RNA (1)...(19): siRNA sense strand
aagaagauuucaagacuca

SEQ ID NO: 2151053 - RNA, 19 nt, Homo sapiens
  misc_RNA (1)...(19): siRNA sense strand
gccugaagauuuccacuau

SEQ ID NO: 2151054 - RNA, 19 nt, Homo sapiens
  misc_RNA (1)...(19): siRNA sense strand
gaacaggcacaaggagauu

SEQ ID NO: 2151055 - RNA, 19 nt, Homo sapiens
  misc_RNA (1)...(19): siRNA sense strand
gcaugaagcugggcaucga

SEQ ID NO: 2151056 - RNA, 19 nt, Homo sapiens
  misc_RNA (1)...(19): siRNA sense strand
gacagacucuaucaauauc

SEQ ID NO: 2151057 - RNA, 19 nt, Homo sapiens
  misc_RNA (1)...(19): siRNA sense strand
gaagaggugguaccagaga

SEQ ID NO: 2151058 - RNA, 19 nt, Homo sapiens
  misc_RNA (1)...(19): siRNA sense strand
gccuggacaucuacaauga

SEQ ID NO: 2151059 - RNA, 19 nt, Homo sapiens
  misc_RNA (1)...(19): siRNA sense strand
ggagauuauuguaaagagu

SEQ ID NO: 2151060 - RNA, 19 nt, Homo sapiens
  misc_RNA (1)...(19): siRNA sense strand
agaaggacauugagcacuu

SEQ ID NO: 2151061 - RNA, 19 nt, Homo sapiens
  misc_RNA (1)...(19): siRNA sense strand
ggagucugcuggugaugga

SEQ ID NO: 2151062 - RNA, 19 nt, Homo sapiens
  misc_RNA (1)...(19): siRNA sense strand
ucaauauccuggcagaugu

SEQ ID NO: 2151063 - RNA, 19 nt, Homo sapiens
  misc_RNA (1)...(19): siRNA sense strand
cugaagauuuccacuauuc

SEQ ID NO: 2151064 - RNA, 19 nt, Homo sapiens
  misc_RNA (1)...(19): siRNA sense strand
aaccauaucuaccaguuug

SEQ ID NO: 2151065 - RNA, 19 nt, Homo sapiens
  misc_RNA (1)...(19): siRNA sense strand
ccaaaaggccuauauaaug

SEQ ID NO: 2151066 - RNA, 19 nt, Homo sapiens
  misc_RNA (1)...(19): siRNA sense strand
aaacauucccggaccauga

SEQ ID NO: 2151067 - RNA, 19 nt, Homo sapiens
  misc_RNA (1)...(19): siRNA sense strand
caaaaggccuauauaaugg

SEQ ID NO: 2151068 - RNA, 19 nt, Homo sapiens
  misc_RNA (1)...(19): siRNA sense strand
uccuaaagcuacuaaaguu

SEQ ID NO: 2151069 - RNA, 19 nt, Homo sapiens
  misc_RNA (1)...(19): siRNA sense strand
aaccuggaauucaccaaua

SEQ ID NO: 2151070 - RNA, 19 nt, Homo sapiens
  misc_RNA (1)...(19): siRNA sense strand
guacagccuuccgcaguau

SEQ ID NO: 2151071 - RNA, 19 nt, Homo sapiens
  misc_RNA (1)...(19): siRNA sense strand
cuaccaguuugaauaugua

SEQ ID NO: 2151072 - RNA, 19 nt, Homo sapiens
  misc_RNA (1)...(19): siRNA sense strand
ucaaccauaucuaccaguu

SEQ ID NO: 2151073 - RNA, 19 nt, Homo sapiens
  misc_RNA (1)...(19): siRNA sense strand
gaguaucucuacccugcuu

SEQ ID NO: 2151074 - RNA, 19 nt, Homo sapiens
  misc_RNA (1)...(19): siRNA sense strand
aggaauggcuggaguugga

SEQ ID NO: 2151075 - RNA, 19 nt, Homo sapiens
  misc_RNA (1)...(19): siRNA sense strand
ucaaacacuucaaacucaa

SEQ ID NO: 2151076 - RNA, 19 nt, Homo sapiens
  misc_RNA (1)...(19): siRNA sense strand
gagaagugcccuaugucuu

SEQ ID NO: 2151077 - RNA, 19 nt, Homo sapiens
  misc_RNA (1)...(19): siRNA sense strand
ucugcagacucucaaagua

SEQ ID NO: 2151078 - RNA, 19 nt, Homo sapiens
  misc_RNA (1)...(19): siRNA sense strand
uuaagcuucuccaugcaua

SEQ ID NO: 2151079 - RNA, 19 nt, Homo sapiens
  misc_RNA (1)...(19): siRNA sense strand
ggcuagagguggucaguag

SEQ ID NO: 2151080 - RNA, 19 nt, Homo sapiens
  misc_RNA (1)...(19): siRNA sense strand
ugucagccauuuaccagaa

SEQ ID NO: 2151081 - RNA, 19 nt, Homo sapiens
  misc_RNA (1)...(19): siRNA sense strand
gcugcaacuuuauguccua

SEQ ID NO: 2151082 - RNA, 19 nt, Homo sapiens
  misc_RNA (1)...(19): siRNA sense strand
gaggugcuuugaagaagau

SEQ ID NO: 2151083 - RNA, 19 nt, Homo sapiens
  misc_RNA (1)...(19): siRNA sense strand
gaaccuggaauucaccaau

SEQ ID NO: 2151084 - RNA, 19 nt, Homo sapiens
  misc_RNA (1)...(19): siRNA sense strand
acacugagaaccuggaauu

SEQ ID NO: 2151085 - RNA, 19 nt, Homo sapiens
  misc_RNA (1)...(19): siRNA sense strand
gcagaugugcagaucaaga

SEQ ID NO: 2151086 - RNA, 19 nt, Homo sapiens
  misc_RNA (1)...(19): siRNA sense strand
cagauacauugguuggauu

SEQ ID NO: 2151087 - RNA, 19 nt, Homo sapiens
  misc_RNA (1)...(19): siRNA sense strand
ggacaucuacaaugaaagg

SEQ ID NO: 2151088 - RNA, 19 nt, Homo sapiens
  misc_RNA (1)...(19): siRNA sense strand
gcuucuccaugcauaauga

SEQ ID NO: 2151089 - RNA, 19 nt, Homo sapiens
  misc_RNA (1)...(19): siRNA sense strand
gauuuccacuauucauaug

SEQ ID NO: 2151090 - RNA, 19 nt, Homo sapiens
  misc_RNA (1)...(19): siRNA sense strand
ccuaaagcuacuaaaguua

SEQ ID NO: 2151091 - RNA, 19 nt, Homo sapiens
  misc_RNA (1)...(19): siRNA sense strand
caaggagauuauuguaaag

SEQ ID NO: 2151092 - RNA, 19 nt, Homo sapiens
  misc_RNA (1)...(19): siRNA sense strand
gcuaagacagacucuauca

SEQ ID NO: 2151093 - RNA, 19 nt, Homo sapiens
  misc_RNA (1)...(19): siRNA sense strand
uaccagagacgccauguga

SEQ ID NO: 2151094 - RNA, 19 nt, Homo sapiens
  misc_RNA (1)...(19): siRNA sense strand
gcaaggaauggcuggaguu

SEQ ID NO: 2151095 - RNA, 19 nt, Homo sapiens
  misc_RNA (1)...(19): siRNA sense strand
ucgcagaugugcagaucaa

SEQ ID NO: 2151096 - RNA, 19 nt, Homo sapiens
  misc_RNA (1)...(19): siRNA sense strand
ucuggaagguggucauguu

SEQ ID NO: 2151097 - RNA, 19 nt, Homo sapiens
  misc_RNA (1)...(19): siRNA sense strand
ggagcuuacuacugaaagu

SEQ ID NO: 2151098 - RNA, 19 nt, Homo sapiens
  misc_RNA (1)...(19): siRNA sense strand
cucaaacacuucaaacuca

SEQ ID NO: 2151099 - RNA, 19 nt, Homo sapiens
  misc_RNA (1)...(19): siRNA sense strand
uaacaggaggugcuuugaa

SEQ ID NO: 2151100 - RNA, 19 nt, Homo sapiens
  misc_RNA (1)...(19): siRNA sense strand
cuggacaucuacaaugaaa

SEQ ID NO: 2151101 - RNA, 19 nt, Homo sapiens
  misc_RNA (1)...(19): siRNA sense strand
ucagacagaaggacauuga

SEQ ID NO: 2151102 - RNA, 19 nt, Homo sapiens
  misc_RNA (1)...(19): siRNA sense strand
gaagauuuccacuauucau

SEQ ID NO: 2151103 - RNA, 19 nt, Homo sapiens
  misc_RNA (1)...(19): siRNA sense strand
cgaguugucagaauuguau

SEQ ID NO: 2151104 - RNA, 19 nt, Homo sapiens
  misc_RNA (1)...(19): siRNA sense strand
aggccaugcugcaacuuua

SEQ ID NO: 2151105 - RNA, 19 nt, Homo sapiens
  misc_RNA (1)...(19): siRNA sense strand
uguacagccuuccgcagua

SEQ ID NO: 2151106 - RNA, 19 nt, Homo sapiens
  misc_RNA (1)...(19): siRNA sense strand
cuaaagcagcacaaguaua

SEQ ID NO: 2151107 - RNA, 19 nt, Homo sapiens
  misc_RNA (1)...(19): siRNA sense strand
ccucuaaggcuaagacaga

SEQ ID NO: 2151108 - RNA, 19 nt, Homo sapiens
  misc_RNA (1)...(19): siRNA sense strand
gagguuggaucugccugaa

SEQ ID NO: 2151109 - RNA, 19 nt, Homo sapiens
  misc_RNA (1)...(19): siRNA sense strand
ccaugaugcugguaguguu

SEQ ID NO: 2151110 - RNA, 19 nt, Homo sapiens
  misc_RNA (1)...(19): siRNA sense strand
uaaacugaccaaauggaaa

SEQ ID NO: 2151111 - RNA, 19 nt, Homo sapiens
  misc_RNA (1)...(19): siRNA sense strand
guacagaagcgggcagaau

SEQ ID NO: 2151112 - RNA, 19 nt, Homo sapiens
  misc_RNA (1)...(19): siRNA sense strand
uaacagccgucgcuaugac

SEQ ID NO: 2151113 - RNA, 19 nt, Homo sapiens
  misc_RNA (1)...(19): siRNA sense strand
cgaaggcaacuccucacua

SEQ ID NO: 2151114 - RNA, 19 nt, Homo sapiens
  misc_RNA (1)...(19): siRNA sense strand
uacagaagcgggcagaauu

SEQ ID NO: 2151115 - RNA, 19 nt, Homo sapiens
  misc_RNA (1)...(19): siRNA sense strand
cccuaaagcagcacaagua

SEQ ID NO: 2151116 - RNA, 19 nt, Homo sapiens
  misc_RNA (1)...(19): siRNA sense strand
uaugaucgcucugcuuaag

SEQ ID NO: 2151117 - RNA, 19 nt, Homo sapiens
  misc_RNA (1)...(19): siRNA sense strand
ggagaagugcccuaugucu

SEQ ID NO: 2151118 - RNA, 19 nt, Homo sapiens
  misc_RNA (1)...(19): siRNA sense strand
cuggagaagugcccuaugu

SEQ ID NO: 2151119 - RNA, 19 nt, Homo sapiens
  misc_RNA (1)...(19): siRNA sense strand
caugugaaauccucuacca

SEQ ID NO: 2151120 - RNA, 19 nt, Homo sapiens
  misc_RNA (1)...(19): siRNA sense strand
gcagccgaguugucagaau

SEQ ID NO: 2151121 - RNA, 19 nt, Homo sapiens
  misc_RNA (1)...(19): siRNA sense strand
ccaagaagauguuugcaua

SEQ ID NO: 2151122 - RNA, 19 nt, Homo sapiens
  misc_RNA (1)...(19): siRNA sense strand
gaaccagggugaacacuuu

SEQ ID NO: 2151123 - RNA, 19 nt, Homo sapiens
  misc_RNA (1)...(19): siRNA sense strand
ggauaaaguuuccagugua

SEQ ID NO: 2151124 - RNA, 19 nt, Homo sapiens
  misc_RNA (1)...(19): siRNA sense strand
ccaagaagcugcaucaagu

SEQ ID NO: 2151125 - RNA, 19 nt, Homo sapiens
  misc_RNA (1)...(19): siRNA sense strand
gauaagcuaugaugugguu

SEQ ID NO: 2151126 - RNA, 19 nt, Homo sapiens
  misc_RNA (1)...(19): siRNA sense strand
caaugaaacuccaaucaau

SEQ ID NO: 2151127 - RNA, 19 nt, Homo sapiens
  misc_RNA (1)...(19): siRNA sense strand
gauaaaguuuccaguguau

SEQ ID NO: 2151128 - RNA, 19 nt, Homo sapiens
  misc_RNA (1)...(19): siRNA sense strand
cuaaagacaugacuggaaa

SEQ ID NO: 2151129 - RNA, 19 nt, Homo sapiens
  misc_RNA (1)...(19): siRNA sense strand
guuaagcgcuggaucaaug

SEQ ID NO: 2151130 - RNA, 19 nt, Homo sapiens
  misc_RNA (1)...(19): siRNA sense strand
gaagauaagcuaugaugug

SEQ ID NO: 2151131 - RNA, 19 nt, Homo sapiens
  misc_RNA (1)...(19): siRNA sense strand
uaucuuagcuucuguugga

SEQ ID NO: 2151132 - RNA, 19 nt, Homo sapiens
  misc_RNA (1)...(19): siRNA sense strand
gaucaccgauggaacaaug

SEQ ID NO: 2151133 - RNA, 19 nt, Homo sapiens
  misc_RNA (1)...(19): siRNA sense strand
ugaagaggcugucaacaau

SEQ ID NO: 2151134 - RNA, 19 nt, Homo sapiens
  misc_RNA (1)...(19): siRNA sense strand
ggagaagagugcuguuuua

SEQ ID NO: 2151135 - RNA, 19 nt, Homo sapiens
  misc_RNA (1)...(19): siRNA sense strand
gaagauguuugcauauucu

SEQ ID NO: 2151136 - RNA, 19 nt, Homo sapiens
  misc_RNA (1)...(19): siRNA sense strand
agaaaguacugaagccuaa

SEQ ID NO: 2151137 - RNA, 19 nt, Homo sapiens
  misc_RNA (1)...(19): siRNA sense strand
gaagaggcugucaacaaua

SEQ ID NO: 2151138 - RNA, 19 nt, Homo sapiens
  misc_RNA (1)...(19): siRNA sense strand
gguaguggcuccaauccuu

SEQ ID NO: 2151139 - RNA, 19 nt, Homo sapiens
  misc_RNA (1)...(19): siRNA sense strand
acaggaggcucguauauuc

SEQ ID NO: 2151140 - RNA, 19 nt, Homo sapiens
  misc_RNA (1)...(19): siRNA sense strand
ugagagguccgauaaagua

SEQ ID NO: 2151141 - RNA, 19 nt, Homo sapiens
  misc_RNA (1)...(19): siRNA sense strand
gcuggaagaucucgaagug

SEQ ID NO: 2151142 - RNA, 19 nt, Homo sapiens
  misc_RNA (1)...(19): siRNA sense strand
ggaguccuguaucaccuua

SEQ ID NO: 2151143 - RNA, 19 nt, Homo sapiens
  misc_RNA (1)...(19): siRNA sense strand
guucagcacugguaucuuc

SEQ ID NO: 2151144 - RNA, 19 nt, Homo sapiens
  misc_RNA (1)...(19): siRNA sense strand
uaaaguaccugagaacaag

SEQ ID NO: 2151145 - RNA, 19 nt, Homo sapiens
  misc_RNA (1)...(19): siRNA sense strand
gaacaacggaagcuacaga

SEQ ID NO: 2151146 - RNA, 19 nt, Homo sapiens
  misc_RNA (1)...(19): siRNA sense strand
ccaagauguugaauaaguu

SEQ ID NO: 2151147 - RNA, 19 nt, Homo sapiens
  misc_RNA (1)...(19): siRNA sense strand
aggagaaugugcuaccuua

SEQ ID NO: 2151148 - RNA, 19 nt, Homo sapiens
  misc_RNA (1)...(19): siRNA sense strand
ucaagucacaguuugcuua

SEQ ID NO: 2151149 - RNA, 19 nt, Homo sapiens
  misc_RNA (1)...(19): siRNA sense strand
guacugaagccuaacuuug

SEQ ID NO: 2151150 - RNA, 19 nt, Homo sapiens
  misc_RNA (1)...(19): siRNA sense strand
ggugaacacuuuggaacaa

SEQ ID NO: 2151151 - RNA, 19 nt, Homo sapiens
  misc_RNA (1)...(19): siRNA sense strand
ggucucaagucacaguuug

SEQ ID NO: 2151152 - RNA, 19 nt, Homo sapiens
  misc_RNA (1)...(19): siRNA sense strand
ugcaagccauugaaagaua

SEQ ID NO: 2151153 - RNA, 19 nt, Homo sapiens
  misc_RNA (1)...(19): siRNA sense strand
gauguuaucuuagcuucug

SEQ ID NO: 2151154 - RNA, 19 nt, Homo sapiens
  misc_RNA (1)...(19): siRNA sense strand
gacugugucugaccauauu

SEQ ID NO: 2151155 - RNA, 19 nt, Homo sapiens
  misc_RNA (1)...(19): siRNA sense strand
gggaagaggugggagauac

SEQ ID NO: 2151156 - RNA, 19 nt, Homo sapiens
  misc_RNA (1)...(19): siRNA sense strand
cagagguggcuaugauuua

SEQ ID NO: 2151157 - RNA, 19 nt, Homo sapiens
  misc_RNA (1)...(19): siRNA sense strand
ugaugaagauaagcuauga

SEQ ID NO: 2151158 - RNA, 19 nt, Homo sapiens
  misc_RNA (1)...(19): siRNA sense strand
uaaaucuggucucaaguca

SEQ ID NO: 2151159 - RNA, 19 nt, Homo sapiens
  misc_RNA (1)...(19): siRNA sense strand
uagaaagaaugaucgacuu

SEQ ID NO: 2151160 - RNA, 19 nt, Homo sapiens
  misc_RNA (1)...(19): siRNA sense strand
gaucaaugaagcccaagaa

SEQ ID NO: 2151161 - RNA, 19 nt, Homo sapiens
  misc_RNA (1)...(19): siRNA sense strand
aagaggcugucaacaauau

SEQ ID NO: 2151162 - RNA, 19 nt, Homo sapiens
  misc_RNA (1)...(19): siRNA sense strand
ggaaaccuuugcccucagu

SEQ ID NO: 2151163 - RNA, 19 nt, Homo sapiens
  misc_RNA (1)...(19): siRNA sense strand
agaagauguuugcauauuc

SEQ ID NO: 2151164 - RNA, 19 nt, Homo sapiens
  misc_RNA (1)...(19): siRNA sense strand
ugucagaaguaaagagaga

SEQ ID NO: 2151165 - RNA, 19 nt, Homo sapiens
  misc_RNA (1)...(19): siRNA sense strand
gaggauggguaugaugaug

SEQ ID NO: 2151166 - RNA, 19 nt, Homo sapiens
  misc_RNA (1)...(19): siRNA sense strand
agacaugacuggaaaagaa

SEQ ID NO: 2151167 - RNA, 19 nt, Homo sapiens
  misc_RNA (1)...(19): siRNA sense strand
gcaagccauugaaagauac

SEQ ID NO: 2151168 - RNA, 19 nt, Homo sapiens
  misc_RNA (1)...(19): siRNA sense strand
uguaucaccuuagaaagaa

SEQ ID NO: 2151169 - RNA, 19 nt, Homo sapiens
  misc_RNA (1)...(19): siRNA sense strand
caugugagagguccgauaa

SEQ ID NO: 2151170 - RNA, 19 nt, Homo sapiens
  misc_RNA (1)...(19): siRNA sense strand
gguaugaugaugaguaugu

SEQ ID NO: 2151171 - RNA, 19 nt, Homo sapiens
  misc_RNA (1)...(19): siRNA sense strand
uccaagauguugaauaagu

SEQ ID NO: 2151172 - RNA, 19 nt, Homo sapiens
  misc_RNA (1)...(19): siRNA sense strand
gggagauaccuuugagaaa

SEQ ID NO: 2151173 - RNA, 19 nt, Homo sapiens
  misc_RNA (1)...(19): siRNA sense strand
uaucuucccugcacaugau

SEQ ID NO: 2151174 - RNA, 19 nt, Homo sapiens
  misc_RNA (1)...(19): siRNA sense strand
aaagagagaacaccuguag

SEQ ID NO: 2151175 - RNA, 19 nt, Homo sapiens
  misc_RNA (1)...(19): siRNA sense strand
ucaaugaaacuccaaucaa

SEQ ID NO: 2151176 - RNA, 19 nt, Homo sapiens
  misc_RNA (1)...(19): siRNA sense strand
ccgauaaaguaccugagaa

SEQ ID NO: 2151177 - RNA, 19 nt, Homo sapiens
  misc_RNA (1)...(19): siRNA sense strand
uccuuuagcugcaccauga

SEQ ID NO: 2151178 - RNA, 19 nt, Homo sapiens
  misc_RNA (1)...(19): siRNA sense strand
gaaacuccaaucaauccaa

SEQ ID NO: 2151179 - RNA, 19 nt, Homo sapiens
  misc_RNA (1)...(19): siRNA sense strand
ccgaauugccagucgcuua

SEQ ID NO: 2151180 - RNA, 19 nt, Homo sapiens
  misc_RNA (1)...(19): siRNA sense strand
caagaagauguuugcauau

SEQ ID NO: 2151181 - RNA, 19 nt, Homo sapiens
  misc_RNA (1)...(19): siRNA sense strand
cugaggaugugauaauugu

SEQ ID NO: 2151182 - RNA, 19 nt, Homo sapiens
  misc_RNA (1)...(19): siRNA sense strand
agagguggcuaugauuuau

SEQ ID NO: 2151183 - RNA, 19 nt, Homo sapiens
  misc_RNA (1)...(19): siRNA sense strand
aaucuggucucaagucaca

SEQ ID NO: 2151184 - RNA, 19 nt, Homo sapiens
  misc_RNA (1)...(19): siRNA sense strand
gaagcaggccauuguggau

SEQ ID NO: 2151185 - RNA, 19 nt, Homo sapiens
  misc_RNA (1)...(19): siRNA sense strand
uaccuuaccaucaaagaaa

SEQ ID NO: 2151186 - RNA, 19 nt, Homo sapiens
  misc_RNA (1)...(19): siRNA sense strand
gagagaacaccuguagaug

SEQ ID NO: 2151187 - RNA, 19 nt, Homo sapiens
  misc_RNA (1)...(19): siRNA sense strand
ucagagguggcuaugauuu

SEQ ID NO: 2151188 - RNA, 19 nt, Homo sapiens
  misc_RNA (1)...(19): siRNA sense strand
caaugaagcccaagaagcu

SEQ ID NO: 2151189 - RNA, 19 nt, Homo sapiens
  misc_RNA (1)...(19): siRNA sense strand
gaggaugugauaauuguca

SEQ ID NO: 2151190 - RNA, 19 nt, Homo sapiens
  misc_RNA (1)...(19): siRNA sense strand
uaagcuaugaugugguuaa

SEQ ID NO: 2151191 - RNA, 19 nt, Homo sapiens
  misc_RNA (1)...(19): siRNA sense strand
gagaacaagaauucccauu

SEQ ID NO: 2151192 - RNA, 19 nt, Homo sapiens
  misc_RNA (1)...(19): siRNA sense strand
cagaugaggauggguauga

SEQ ID NO: 2151193 - RNA, 19 nt, Homo sapiens
  misc_RNA (1)...(19): siRNA sense strand
gcaggccauuguggauaaa

SEQ ID NO: 2151194 - RNA, 19 nt, Homo sapiens
  misc_RNA (1)...(19): siRNA sense strand
cuuagcuucuguuggauaa

SEQ ID NO: 2151195 - RNA, 19 nt, Homo sapiens
  misc_RNA (1)...(19): siRNA sense strand
ggauggguaugaugaugag

SEQ ID NO: 2151196 - RNA, 19 nt, Homo sapiens
  misc_RNA (1)...(19): siRNA sense strand
uccaaucaauccaagaaga

SEQ ID NO: 2151197 - RNA, 19 nt, Homo sapiens
  misc_RNA (1)...(19): siRNA sense strand
uacuaaaucuggucucaag

SEQ ID NO: 2151198 - RNA, 19 nt, Homo sapiens
  misc_RNA (1)...(19): siRNA sense strand
guugcaagccauugaaaga

SEQ ID NO: 2151199 - RNA, 19 nt, Homo sapiens
  misc_RNA (1)...(19): siRNA sense strand
agagaacaccuguagaugu

SEQ ID NO: 2151200 - RNA, 19 nt, Homo sapiens
  misc_RNA (1)...(19): siRNA sense strand
agagagaacaccuguagau

SEQ ID NO: 2151201 - RNA, 19 nt, Homo sapiens
  misc_RNA (1)...(19): siRNA sense strand
ggugggagauaccuuugag

SEQ ID NO: 2151202 - RNA, 19 nt, Homo sapiens
  misc_RNA (1)...(19): siRNA sense strand
gauaaaguaccugagaaca

SEQ ID NO: 2151203 - RNA, 19 nt, Homo sapiens
  misc_RNA (1)...(19): siRNA sense strand
gugcuaccuuaccaucaaa

SEQ ID NO: 2151204 - RNA, 19 nt, Homo sapiens
  misc_RNA (1)...(19): siRNA sense strand
auucagagguggcuaugau

SEQ ID NO: 2151205 - RNA, 19 nt, Homo sapiens
  misc_RNA (1)...(19): siRNA sense strand
cauugggaguccuguauca

SEQ ID NO: 2151206 - RNA, 19 nt, Homo sapiens
  misc_RNA (1)...(19): siRNA sense strand
ugugagagguccgauaaag

SEQ ID NO: 2151207 - RNA, 19 nt, Homo sapiens
  misc_RNA (1)...(19): siRNA sense strand
uaccugagaacaagaauuc

SEQ ID NO: 2151208 - RNA, 19 nt, Homo sapiens
  misc_RNA (1)...(19): siRNA sense strand
guaguggcuccaauccuuu

SEQ ID NO: 2151209 - RNA, 19 nt, Homo sapiens
  misc_RNA (1)...(19): siRNA sense strand
uuacaggaggcucguauau

SEQ ID NO: 2151210 - RNA, 19 nt, Homo sapiens
  misc_RNA (1)...(19): siRNA sense strand
gacgaggagucugguagug

SEQ ID NO: 2151211 - RNA, 19 nt, Homo sapiens
  misc_RNA (1)...(19): siRNA sense strand
ggacgaggagucugguagu

SEQ ID NO: 2151212 - RNA, 19 nt, Homo sapiens
  misc_RNA (1)...(19): siRNA sense strand
ggaggcucguauauucaau

SEQ ID NO: 2151213 - RNA, 19 nt, Homo sapiens
  misc_RNA (1)...(19): siRNA sense strand
ugucaacaauaucaucaca

SEQ ID NO: 2151214 - RNA, 19 nt, Homo sapiens
  misc_RNA (1)...(19): siRNA sense strand
ugaccauauucagaaagua

SEQ ID NO: 2151215 - RNA, 19 nt, Homo sapiens
  misc_RNA (1)...(19): siRNA sense strand
ugugcuaccuuaccaucaa

SEQ ID NO: 2151216 - RNA, 19 nt, Homo sapiens
  misc_RNA (1)...(19): siRNA sense strand
ccaaucaauccaagaagau

SEQ ID NO: 2151217 - RNA, 19 nt, Homo sapiens
  misc_RNA (1)...(19): siRNA sense strand
uggguaugaugaugaguau

SEQ ID NO: 2151218 - RNA, 19 nt, Homo sapiens
  misc_RNA (1)...(19): siRNA sense strand
uaaagagagaacaccugua

SEQ ID NO: 2151219 - RNA, 19 nt, Homo sapiens
  misc_RNA (1)...(19): siRNA sense strand
auaaaguaccugagaacaa

SEQ ID NO: 2151220 - RNA, 19 nt, Homo sapiens
  misc_RNA (1)...(19): siRNA sense strand
gugacugugucugaccaua

SEQ ID NO: 2151221 - RNA, 19 nt, Homo sapiens
  misc_RNA (1)...(19): siRNA sense strand
ccaagaagauguuugcaua

SEQ ID NO: 2151222 - RNA, 19 nt, Homo sapiens
  misc_RNA (1)...(19): siRNA sense strand
gaaccagggugaacacuuu

SEQ ID NO: 2151223 - RNA, 19 nt, Homo sapiens
  misc_RNA (1)...(19): siRNA sense strand
ggauaaaguuuccagugua

SEQ ID NO: 2151224 - RNA, 19 nt, Homo sapiens
  misc_RNA (1)...(19): siRNA sense strand
ccaagaagcugcaucaagu

SEQ ID NO: 2151225 - RNA, 19 nt, Homo sapiens
  misc_RNA (1)...(19): siRNA sense strand
gauaagcuaugaugugguu

SEQ ID NO: 2151226 - RNA, 19 nt, Homo sapiens
  misc_RNA (1)...(19): siRNA sense strand
caaugaaacuccaaucaau

SEQ ID NO: 2151227 - RNA, 19 nt, Homo sapiens
  misc_RNA (1)...(19): siRNA sense strand
gauaaaguuuccaguguau

SEQ ID NO: 2151228 - RNA, 19 nt, Homo sapiens
  misc_RNA (1)...(19): siRNA sense strand
cuaaagacaugacuggaaa

SEQ ID NO: 2151229 - RNA, 19 nt, Homo sapiens
  misc_RNA (1)...(19): siRNA sense strand
guuaagcgcuggaucaaug

SEQ ID NO: 2151230 - RNA, 19 nt, Homo sapiens
  misc_RNA (1)...(19): siRNA sense strand
gaagauaagcuaugaugug

SEQ ID NO: 2151231 - RNA, 19 nt, Homo sapiens
  misc_RNA (1)...(19): siRNA sense strand
uaucuuagcuucuguugga

SEQ ID NO: 2151232 - RNA, 19 nt, Homo sapiens
  misc_RNA (1)...(19): siRNA sense strand
gaucaccgauggaacaaug

SEQ ID NO: 2151233 - RNA, 19 nt, Homo sapiens
  misc_RNA (1)...(19): siRNA sense strand
ugaagaggcugucaacaau

SEQ ID NO: 2151234 - RNA, 19 nt, Homo sapiens
  misc_RNA (1)...(19): siRNA sense strand
ggagaagagugcuguuuua

SEQ ID NO: 2151235 - RNA, 19 nt, Homo sapiens
  misc_RNA (1)...(19): siRNA sense strand
gaagauguuugcauauucu

SEQ ID NO: 2151236 - RNA, 19 nt, Homo sapiens
  misc_RNA (1)...(19): siRNA sense strand
agaaaguacugaagccuaa

SEQ ID NO: 2151237 - RNA, 19 nt, Homo sapiens
  misc_RNA (1)...(19): siRNA sense strand
gaagaggcugucaacaaua

SEQ ID NO: 2151238 - RNA, 19 nt, Homo sapiens
  misc_RNA (1)...(19): siRNA sense strand
gguaguggcuccaauccuu

SEQ ID NO: 2151239 - RNA, 19 nt, Homo sapiens
  misc_RNA (1)...(19): siRNA sense strand
acaggaggcucguauauuc

SEQ ID NO: 2151240 - RNA, 19 nt, Homo sapiens
  misc_RNA (1)...(19): siRNA sense strand
ugagagguccgauaaagua

SEQ ID NO: 2151241 - RNA, 19 nt, Homo sapiens
  misc_RNA (1)...(19): siRNA sense strand
gcuggaagaucucgaagug

SEQ ID NO: 2151242 - RNA, 19 nt, Homo sapiens
  misc_RNA (1)...(19): siRNA sense strand
ggaguccuguaucaccuua

SEQ ID NO: 2151243 - RNA, 19 nt, Homo sapiens
  misc_RNA (1)...(19): siRNA sense strand
guucagcacugguaucuuc

SEQ ID NO: 2151244 - RNA, 19 nt, Homo sapiens
  misc_RNA (1)...(19): siRNA sense strand
uaaaguaccugagaacaag

SEQ ID NO: 2151245 - RNA, 19 nt, Homo sapiens
  misc_RNA (1)...(19): siRNA sense strand
gaacaacggaagcuacaga

SEQ ID NO: 2151246 - RNA, 19 nt, Homo sapiens
  misc_RNA (1)...(19): siRNA sense strand
ccaagauguugaauaaguu

SEQ ID NO: 2151247 - RNA, 19 nt, Homo sapiens
  misc_RNA (1)...(19): siRNA sense strand
aggagaaugugcuaccuua

SEQ ID NO: 2151248 - RNA, 19 nt, Homo sapiens
  misc_RNA (1)...(19): siRNA sense strand
ucaagucacaguuugcuua

SEQ ID NO: 2151249 - RNA, 19 nt, Homo sapiens
  misc_RNA (1)...(19): siRNA sense strand
guacugaagccuaacuuug

SEQ ID NO: 2151250 - RNA, 19 nt, Homo sapiens
  misc_RNA (1)...(19): siRNA sense strand
ggugaacacuuuggaacaa

SEQ ID NO: 2151251 - RNA, 19 nt, Homo sapiens
  misc_RNA (1)...(19): siRNA sense strand
ggucucaagucacaguuug

SEQ ID NO: 2151252 - RNA, 19 nt, Homo sapiens
  misc_RNA (1)...(19): siRNA sense strand
ugcaagccauugaaagaua

SEQ ID NO: 2151253 - RNA, 19 nt, Homo sapiens
  misc_RNA (1)...(19): siRNA sense strand
gauguuaucuuagcuucug

SEQ ID NO: 2151254 - RNA, 19 nt, Homo sapiens
  misc_RNA (1)...(19): siRNA sense strand
gacugugucugaccauauu

SEQ ID NO: 2151255 - RNA, 19 nt, Homo sapiens
  misc_RNA (1)...(19): siRNA sense strand
gggaagaggugggagauac

SEQ ID NO: 2151256 - RNA, 19 nt, Homo sapiens
  misc_RNA (1)...(19): siRNA sense strand
cagagguggcuaugauuua

SEQ ID NO: 2151257 - RNA, 19 nt, Homo sapiens
  misc_RNA (1)...(19): siRNA sense strand
ugaugaagauaagcuauga

SEQ ID NO: 2151258 - RNA, 19 nt, Homo sapiens
  misc_RNA (1)...(19): siRNA sense strand
uaaaucuggucucaaguca

SEQ ID NO: 2151259 - RNA, 19 nt, Homo sapiens
  misc_RNA (1)...(19): siRNA sense strand
uagaaagaaugaucgacuu

SEQ ID NO: 2151260 - RNA, 19 nt, Homo sapiens
  misc_RNA (1)...(19): siRNA sense strand
gaucaaugaagcccaagaa

SEQ ID NO: 2151261 - RNA, 19 nt, Homo sapiens
  misc_RNA (1)...(19): siRNA sense strand
aagaggcugucaacaauau

SEQ ID NO: 2151262 - RNA, 19 nt, Homo sapiens
  misc_RNA (1)...(19): siRNA sense strand
ggaaaccuuugcccucagu

SEQ ID NO: 2151263 - RNA, 19 nt, Homo sapiens
  misc_RNA (1)...(19): siRNA sense strand
agaagauguuugcauauuc

SEQ ID NO: 2151264 - RNA, 19 nt, Homo sapiens
  misc_RNA (1)...(19): siRNA sense strand
ugucagaaguaaagagaga

SEQ ID NO: 2151265 - RNA, 19 nt, Homo sapiens
  misc_RNA (1)...(19): siRNA sense strand
gaggauggguaugaugaug

SEQ ID NO: 2151266 - RNA, 19 nt, Homo sapiens
  misc_RNA (1)...(19): siRNA sense strand
agacaugacuggaaaagaa

SEQ ID NO: 2151267 - RNA, 19 nt, Homo sapiens
  misc_RNA (1)...(19): siRNA sense strand
gcaagccauugaaagauac

SEQ ID NO: 2151268 - RNA, 19 nt, Homo sapiens
  misc_RNA (1)...(19): siRNA sense strand
uguaucaccuuagaaagaa

SEQ ID NO: 2151269 - RNA, 19 nt, Homo sapiens
  misc_RNA (1)...(19): siRNA sense strand
caugugagagguccgauaa

SEQ ID NO: 2151270 - RNA, 19 nt, Homo sapiens
  misc_RNA (1)...(19): siRNA sense strand
gguaugaugaugaguaugu

SEQ ID NO: 2151271 - RNA, 19 nt, Homo sapiens
  misc_RNA (1)...(19): siRNA sense strand
uccaagauguugaauaagu

SEQ ID NO: 2151272 - RNA, 19 nt, Homo sapiens
  misc_RNA (1)...(19): siRNA sense strand
gggagauaccuuugagaaa

SEQ ID NO: 2151273 - RNA, 19 nt, Homo sapiens
  misc_RNA (1)...(19): siRNA sense strand
uaucuucccugcacaugau

SEQ ID NO: 2151274 - RNA, 19 nt, Homo sapiens
  misc_RNA (1)...(19): siRNA sense strand
aaagagagaacaccuguag

SEQ ID NO: 2151275 - RNA, 19 nt, Homo sapiens
  misc_RNA (1)...(19): siRNA sense strand
ucaaugaaacuccaaucaa

SEQ ID NO: 2151276 - RNA, 19 nt, Homo sapiens
  misc_RNA (1)...(19): siRNA sense strand
ccgauaaaguaccugagaa

SEQ ID NO: 2151277 - RNA, 19 nt, Homo sapiens
  misc_RNA (1)...(19): siRNA sense strand
uccuuuagcugcaccauga

SEQ ID NO: 2151278 - RNA, 19 nt, Homo sapiens
  misc_RNA (1)...(19): siRNA sense strand
gaaacuccaaucaauccaa

SEQ ID NO: 2151279 - RNA, 19 nt, Homo sapiens
  misc_RNA (1)...(19): siRNA sense strand
ccgaauugccagucgcuua

SEQ ID NO: 2151280 - RNA, 19 nt, Homo sapiens
  misc_RNA (1)...(19): siRNA sense strand
caagaagauguuugcauau

SEQ ID NO: 2151281 - RNA, 19 nt, Homo sapiens
  misc_RNA (1)...(19): siRNA sense strand
cugaggaugugauaauugu

SEQ ID NO: 2151282 - RNA, 19 nt, Homo sapiens
  misc_RNA (1)...(19): siRNA sense strand
agagguggcuaugauuuau

SEQ ID NO: 2151283 - RNA, 19 nt, Homo sapiens
  misc_RNA (1)...(19): siRNA sense strand
aaucuggucucaagucaca

SEQ ID NO: 2151284 - RNA, 19 nt, Homo sapiens
  misc_RNA (1)...(19): siRNA sense strand
gaagcaggccauuguggau

SEQ ID NO: 2151285 - RNA, 19 nt, Homo sapiens
  misc_RNA (1)...(19): siRNA sense strand
uaccuuaccaucaaagaaa

SEQ ID NO: 2151286 - RNA, 19 nt, Homo sapiens
  misc_RNA (1)...(19): siRNA sense strand
gagagaacaccuguagaug

SEQ ID NO: 2151287 - RNA, 19 nt, Homo sapiens
  misc_RNA (1)...(19): siRNA sense strand
ucagagguggcuaugauuu

SEQ ID NO: 2151288 - RNA, 19 nt, Homo sapiens
  misc_RNA (1)...(19): siRNA sense strand
caaugaagcccaagaagcu

SEQ ID NO: 2151289 - RNA, 19 nt, Homo sapiens
  misc_RNA (1)...(19): siRNA sense strand
gaggaugugauaauuguca

SEQ ID NO: 2151290 - RNA, 19 nt, Homo sapiens
  misc_RNA (1)...(19): siRNA sense strand
uaagcuaugaugugguuaa

SEQ ID NO: 2151291 - RNA, 19 nt, Homo sapiens
  misc_RNA (1)...(19): siRNA sense strand
gagaacaagaauucccauu

SEQ ID NO: 2151292 - RNA, 19 nt, Homo sapiens
  misc_RNA (1)...(19): siRNA sense strand
cagaugaggauggguauga

SEQ ID NO: 2151293 - RNA, 19 nt, Homo sapiens
  misc_RNA (1)...(19): siRNA sense strand
gcaggccauuguggauaaa

SEQ ID NO: 2151294 - RNA, 19 nt, Homo sapiens
  misc_RNA (1)...(19): siRNA sense strand
cuuagcuucuguuggauaa

SEQ ID NO: 2151295 - RNA, 19 nt, Homo sapiens
  misc_RNA (1)...(19): siRNA sense strand
ggauggguaugaugaugag

SEQ ID NO: 2151296 - RNA, 19 nt, Homo sapiens
  misc_RNA (1)...(19): siRNA sense strand
uccaaucaauccaagaaga

SEQ ID NO: 2151297 - RNA, 19 nt, Homo sapiens
  misc_RNA (1)...(19): siRNA sense strand
uacuaaaucuggucucaag

SEQ ID NO: 2151298 - RNA, 19 nt, Homo sapiens
  misc_RNA (1)...(19): siRNA sense strand
guugcaagccauugaaaga

SEQ ID NO: 2151299 - RNA, 19 nt, Homo sapiens
  misc_RNA (1)...(19): siRNA sense strand
agagaacaccuguagaugu

SEQ ID NO: 2151300 - RNA, 19 nt, Homo sapiens
  misc_RNA (1)...(19): siRNA sense strand
agagagaacaccuguagau

SEQ ID NO: 2151301 - RNA, 19 nt, Homo sapiens
  misc_RNA (1)...(19): siRNA sense strand
ggugggagauaccuuugag

SEQ ID NO: 2151302 - RNA, 19 nt, Homo sapiens
  misc_RNA (1)...(19): siRNA sense strand
gauaaaguaccugagaaca

SEQ ID NO: 2151303 - RNA, 19 nt, Homo sapiens
  misc_RNA (1)...(19): siRNA sense strand
gugcuaccuuaccaucaaa

SEQ ID NO: 2151304 - RNA, 19 nt, Homo sapiens
  misc_RNA (1)...(19): siRNA sense strand
auucagagguggcuaugau

SEQ ID NO: 2151305 - RNA, 19 nt, Homo sapiens
  misc_RNA (1)...(19): siRNA sense strand
cauugggaguccuguauca

SEQ ID NO: 2151306 - RNA, 19 nt, Homo sapiens
  misc_RNA (1)...(19): siRNA sense strand
ugugagagguccgauaaag

SEQ ID NO: 2151307 - RNA, 19 nt, Homo sapiens
  misc_RNA (1)...(19): siRNA sense strand
uaccugagaacaagaauuc

SEQ ID NO: 2151308 - RNA, 19 nt, Homo sapiens
  misc_RNA (1)...(19): siRNA sense strand
guaguggcuccaauccuuu

SEQ ID NO: 2151309 - RNA, 19 nt, Homo sapiens
  misc_RNA (1)...(19): siRNA sense strand
uuacaggaggcucguauau

SEQ ID NO: 2151310 - RNA, 19 nt, Homo sapiens
  misc_RNA (1)...(19): siRNA sense strand
gacgaggagucugguagug

SEQ ID NO: 2151311 - RNA, 19 nt, Homo sapiens
  misc_RNA (1)...(19): siRNA sense strand
ggacgaggagucugguagu

SEQ ID NO: 2151312 - RNA, 19 nt, Homo sapiens
  misc_RNA (1)...(19): siRNA sense strand
ggaggcucguauauucaau

SEQ ID NO: 2151313 - RNA, 19 nt, Homo sapiens
  misc_RNA (1)...(19): siRNA sense strand
ugucaacaauaucaucaca

SEQ ID NO: 2151314 - RNA, 19 nt, Homo sapiens
  misc_RNA (1)...(19): siRNA sense strand
ugaccauauucagaaagua

SEQ ID NO: 2151315 - RNA, 19 nt, Homo sapiens
  misc_RNA (1)...(19): siRNA sense strand
ugugcuaccuuaccaucaa

SEQ ID NO: 2151316 - RNA, 19 nt, Homo sapiens
  misc_RNA (1)...(19): siRNA sense strand
ccaaucaauccaagaagau

SEQ ID NO: 2151317 - RNA, 19 nt, Homo sapiens
  misc_RNA (1)...(19): siRNA sense strand
uggguaugaugaugaguau

SEQ ID NO: 2151318 - RNA, 19 nt, Homo sapiens
  misc_RNA (1)...(19): siRNA sense strand
uaaagagagaacaccugua

SEQ ID NO: 2151319 - RNA, 19 nt, Homo sapiens
  misc_RNA (1)...(19): siRNA sense strand
auaaaguaccugagaacaa

SEQ ID NO: 2151320 - RNA, 19 nt, Homo sapiens
  misc_RNA (1)...(19): siRNA sense strand
gugacugugucugaccaua

SEQ ID NO: 2151321 - RNA, 19 nt, Homo sapiens
  misc_RNA (1)...(19): siRNA sense strand
gaacaccucuuauuccuau

SEQ ID NO: 2151322 - RNA, 19 nt, Homo sapiens
  misc_RNA (1)...(19): siRNA sense strand
ggaaggagcacaucaauau

SEQ ID NO: 2151323 - RNA, 19 nt, Homo sapiens
  misc_RNA (1)...(19): siRNA sense strand
gcaaucagauccagugcua

SEQ ID NO: 2151324 - RNA, 19 nt, Homo sapiens
  misc_RNA (1)...(19): siRNA sense strand
gaacagaucgugugugaga

SEQ ID NO: 2151325 - RNA, 19 nt, Homo sapiens
  misc_RNA (1)...(19): siRNA sense strand
gaacuacacugugcugguu

SEQ ID NO: 2151326 - RNA, 19 nt, Homo sapiens
  misc_RNA (1)...(19): siRNA sense strand
gaauaaaguucaccucuac

SEQ ID NO: 2151327 - RNA, 19 nt, Homo sapiens
  misc_RNA (1)...(19): siRNA sense strand
cagaggagcuggccuguug

SEQ ID NO: 2151328 - RNA, 19 nt, Homo sapiens
  misc_RNA (1)...(19): siRNA sense strand
cagaacagaucguguguga

SEQ ID NO: 2151329 - RNA, 19 nt, Homo sapiens
  misc_RNA (1)...(19): siRNA sense strand
caacccagcucagaauaaa

SEQ ID NO: 2151330 - RNA, 19 nt, Homo sapiens
  misc_RNA (1)...(19): siRNA sense strand
ccucacagcucuauuacuu

SEQ ID NO: 2151331 - RNA, 19 nt, Homo sapiens
  misc_RNA (1)...(19): siRNA sense strand
gaaccugggccuggaauuu

SEQ ID NO: 2151332 - RNA, 19 nt, Homo sapiens
  misc_RNA (1)...(19): siRNA sense strand
agaauaaaguucaccucua

SEQ ID NO: 2151333 - RNA, 19 nt, Homo sapiens
  misc_RNA (1)...(19): siRNA sense strand
ggagcugucuggugccaaa

SEQ ID NO: 2151334 - RNA, 19 nt, Homo sapiens
  misc_RNA (1)...(19): siRNA sense strand
gcacgcccaucauccuaaa

SEQ ID NO: 2151335 - RNA, 19 nt, Homo sapiens
  misc_RNA (1)...(19): siRNA sense strand
gcaagucccgcgaaaguga

SEQ ID NO: 2151336 - RNA, 19 nt, Homo sapiens
  misc_RNA (1)...(19): siRNA sense strand
gguccucacagcucuauua

SEQ ID NO: 2151337 - RNA, 19 nt, Homo sapiens
  misc_RNA (1)...(19): siRNA sense strand
ucacagcucuauuacuuca

SEQ ID NO: 2151338 - RNA, 19 nt, Homo sapiens
  misc_RNA (1)...(19): siRNA sense strand
gcaccagcuuugucuucua

SEQ ID NO: 2151339 - RNA, 19 nt, Homo sapiens
  misc_RNA (1)...(19): siRNA sense strand
cagaugaggugcuagagau

SEQ ID NO: 2151340 - RNA, 19 nt, Homo sapiens
  misc_RNA (1)...(19): siRNA sense strand
gcaacgugguggugauguu

SEQ ID NO: 2151341 - RNA, 19 nt, Homo sapiens
  misc_RNA (1)...(19): siRNA sense strand
ggaaugggcacuucaacau

SEQ ID NO: 2151342 - RNA, 19 nt, Homo sapiens
  misc_RNA (1)...(19): siRNA sense strand
gaagcaacgugguggugau

SEQ ID NO: 2151343 - RNA, 19 nt, Homo sapiens
  misc_RNA (1)...(19): siRNA sense strand
gcccuuuaguggaugguua

SEQ ID NO: 2151344 - RNA, 19 nt, Homo sapiens
  misc_RNA (1)...(19): siRNA sense strand
aaacgcaagucccgcgaaa

SEQ ID NO: 2151345 - RNA, 19 nt, Homo sapiens
  misc_RNA (1)...(19): siRNA sense strand
gggaaggagcacaucaaua

SEQ ID NO: 2151346 - RNA, 19 nt, Homo sapiens
  misc_RNA (1)...(19): siRNA sense strand
gaaagcagcccugucucuu

SEQ ID NO: 2151347 - RNA, 19 nt, Homo sapiens
  misc_RNA (1)...(19): siRNA sense strand
gugcagcccuuuaguggau

SEQ ID NO: 2151348 - RNA, 19 nt, Homo sapiens
  misc_RNA (1)...(19): siRNA sense strand
agaccaacuucaccuacua

SEQ ID NO: 2151349 - RNA, 19 nt, Homo sapiens
  misc_RNA (1)...(19): siRNA sense strand
ggauggagaucaacaaccu

SEQ ID NO: 2151350 - RNA, 19 nt, Homo sapiens
  misc_RNA (1)...(19): siRNA sense strand
cauccuacauugucugcaa

SEQ ID NO: 2151351 - RNA, 19 nt, Homo sapiens
  misc_RNA (1)...(19): siRNA sense strand
ggaaagcagcccugucucu

SEQ ID NO: 2151352 - RNA, 19 nt, Homo sapiens
  misc_RNA (1)...(19): siRNA sense strand
ucugaacgcuacugagaug

SEQ ID NO: 2151353 - RNA, 19 nt, Homo sapiens
  misc_RNA (1)...(19): siRNA sense strand
ggcgucaacugcaccuuug

SEQ ID NO: 2151354 - RNA, 19 nt, Homo sapiens
  misc_RNA (1)...(19): siRNA sense strand
gcaacgugaagcugaacua

SEQ ID NO: 2151355 - RNA, 19 nt, Homo sapiens
  misc_RNA (1)...(19): siRNA sense strand
uuacaucccugcagaacag

SEQ ID NO: 2151356 - RNA, 19 nt, Homo sapiens
  misc_RNA (1)...(19): siRNA sense strand
ggugugagcgguccaagga

SEQ ID NO: 2151357 - RNA, 19 nt, Homo sapiens
  misc_RNA (1)...(19): siRNA sense strand
gccagaacaccucuuauuc

SEQ ID NO: 2151358 - RNA, 19 nt, Homo sapiens
  misc_RNA (1)...(19): siRNA sense strand
gacaacccagcucagaaua

SEQ ID NO: 2151359 - RNA, 19 nt, Homo sapiens
  misc_RNA (1)...(19): siRNA sense strand
ggacccaccuggaccucau

SEQ ID NO: 2151360 - RNA, 19 nt, Homo sapiens
  misc_RNA (1)...(19): siRNA sense strand
ggaccaccaugucguacag

SEQ ID NO: 2151361 - RNA, 19 nt, Homo sapiens
  misc_RNA (1)...(19): siRNA sense strand
cgagaggcccgaggaguuu

SEQ ID NO: 2151362 - RNA, 19 nt, Homo sapiens
  misc_RNA (1)...(19): siRNA sense strand
ggagugcagcccuuuagug

SEQ ID NO: 2151363 - RNA, 19 nt, Homo sapiens
  misc_RNA (1)...(19): siRNA sense strand
gaaggagcacaucaauauc

SEQ ID NO: 2151364 - RNA, 19 nt, Homo sapiens
  misc_RNA (1)...(19): siRNA sense strand
gaagggauggagaucaaca

SEQ ID NO: 2151365 - RNA, 19 nt, Homo sapiens
  misc_RNA (1)...(19): siRNA sense strand
gaugaggugcuagagauga

SEQ ID NO: 2151366 - RNA, 19 nt, Homo sapiens
  misc_RNA (1)...(19): siRNA sense strand
gacgguccaucccaacaau

SEQ ID NO: 2151367 - RNA, 19 nt, Homo sapiens
  misc_RNA (1)...(19): siRNA sense strand
caacgugguggugauguuu

SEQ ID NO: 2151368 - RNA, 19 nt, Homo sapiens
  misc_RNA (1)...(19): siRNA sense strand
ugacaacccagcucagaau

SEQ ID NO: 2151369 - RNA, 19 nt, Homo sapiens
  misc_RNA (1)...(19): siRNA sense strand
cagaacaccucuuauuccu

SEQ ID NO: 2151370 - RNA, 19 nt, Homo sapiens
  misc_RNA (1)...(19): siRNA sense strand
caacaccacauccucagau

SEQ ID NO: 2151371 - RNA, 19 nt, Homo sapiens
  misc_RNA (1)...(19): siRNA sense strand
cgaucuccauccuacauug

SEQ ID NO: 2151372 - RNA, 19 nt, Homo sapiens
  misc_RNA (1)...(19): siRNA sense strand
gagggaaggagcacaucaa

SEQ ID NO: 2151373 - RNA, 19 nt, Homo sapiens
  misc_RNA (1)...(19): siRNA sense strand
ucaagccuaucacgcugaa

SEQ ID NO: 2151374 - RNA, 19 nt, Homo sapiens
  misc_RNA (1)...(19): siRNA sense strand
caucguggccgugcucauu

SEQ ID NO: 2151375 - RNA, 19 nt, Homo sapiens
  misc_RNA (1)...(19): siRNA sense strand
ccagauccgugccaagcau

SEQ ID NO: 2151376 - RNA, 19 nt, Homo sapiens
  misc_RNA (1)...(19): siRNA sense strand
caacagcuccagcguacag

SEQ ID NO: 2151377 - RNA, 19 nt, Homo sapiens
  misc_RNA (1)...(19): siRNA sense strand
uugaggaccugucagagau

SEQ ID NO: 2151378 - RNA, 19 nt, Homo sapiens
  misc_RNA (1)...(19): siRNA sense strand
acagcucuauuacuucaug

SEQ ID NO: 2151379 - RNA, 19 nt, Homo sapiens
  misc_RNA (1)...(19): siRNA sense strand
aaaguucaccucuacaagu

SEQ ID NO: 2151380 - RNA, 19 nt, Homo sapiens
  misc_RNA (1)...(19): siRNA sense strand
ugccagaacaccucuuauu

SEQ ID NO: 2151381 - RNA, 19 nt, Homo sapiens
  misc_RNA (1)...(19): siRNA sense strand
gcaacaccacauccucaga

SEQ ID NO: 2151382 - RNA, 19 nt, Homo sapiens
  misc_RNA (1)...(19): siRNA sense strand
ccaggaaggccgagugaag

SEQ ID NO: 2151383 - RNA, 19 nt, Homo sapiens
  misc_RNA (1)...(19): siRNA sense strand
cgaggaguuuggcuucauc

SEQ ID NO: 2151384 - RNA, 19 nt, Homo sapiens
  misc_RNA (1)...(19): siRNA sense strand
caauaucugugagguucug

SEQ ID NO: 2151385 - RNA, 19 nt, Homo sapiens
  misc_RNA (1)...(19): siRNA sense strand
ggagggaaggagcacauca

SEQ ID NO: 2151386 - RNA, 19 nt, Homo sapiens
  misc_RNA (1)...(19): siRNA sense strand
aaguucaccucuacaagug

SEQ ID NO: 2151387 - RNA, 19 nt, Homo sapiens
  misc_RNA (1)...(19): siRNA sense strand
ggagcauugucaguggaaa

SEQ ID NO: 2151388 - RNA, 19 nt, Homo sapiens
  misc_RNA (1)...(19): siRNA sense strand
acacacccaucgccguaug

SEQ ID NO: 2151389 - RNA, 19 nt, Homo sapiens
  misc_RNA (1)...(19): siRNA sense strand
augaagggauggagaucaa

SEQ ID NO: 2151390 - RNA, 19 nt, Homo sapiens
  misc_RNA (1)...(19): siRNA sense strand
gaccaacuucaccuacuau

SEQ ID NO: 2151391 - RNA, 19 nt, Homo sapiens
  misc_RNA (1)...(19): siRNA sense strand
ggagaaccugggccuggaa

SEQ ID NO: 2151392 - RNA, 19 nt, Homo sapiens
  misc_RNA (1)...(19): siRNA sense strand
acaacccagcucagaauaa

SEQ ID NO: 2151393 - RNA, 19 nt, Homo sapiens
  misc_RNA (1)...(19): siRNA sense strand
caccuggaccucauacaga

SEQ ID NO: 2151394 - RNA, 19 nt, Homo sapiens
  misc_RNA (1)...(19): siRNA sense strand
caccagcuuugucuucuac

SEQ ID NO: 2151395 - RNA, 19 nt, Homo sapiens
  misc_RNA (1)...(19): siRNA sense strand
gaucugcguggcugugugu

SEQ ID NO: 2151396 - RNA, 19 nt, Homo sapiens
  misc_RNA (1)...(19): siRNA sense strand
gacccagacuucgcaugug

SEQ ID NO: 2151397 - RNA, 19 nt, Homo sapiens
  misc_RNA (1)...(19): siRNA sense strand
cagcucagaauaaaguuca

SEQ ID NO: 2151398 - RNA, 19 nt, Homo sapiens
  misc_RNA (1)...(19): siRNA sense strand
ugacagucguguggaaugg

SEQ ID NO: 2151399 - RNA, 19 nt, Homo sapiens
  misc_RNA (1)...(19): siRNA sense strand
acgaaugcauccucaacau

SEQ ID NO: 2151400 - RNA, 19 nt, Homo sapiens
  misc_RNA (1)...(19): siRNA sense strand
uggaggugaucaagccuau

SEQ ID NO: 2151401 - RNA, 19 nt, Homo sapiens
  misc_RNA (1)...(19): siRNA sense strand
ugacccagacuucgcaugu

SEQ ID NO: 2151402 - RNA, 19 nt, Homo sapiens
  misc_RNA (1)...(19): siRNA sense strand
caacaauaucuccgucucu

SEQ ID NO: 2151403 - RNA, 19 nt, Homo sapiens
  misc_RNA (1)...(19): siRNA sense strand
cauugucaguggaaacaca

SEQ ID NO: 2151404 - RNA, 19 nt, Homo sapiens
  misc_RNA (1)...(19): siRNA sense strand
ucagaugaggugcuagaga

SEQ ID NO: 2151405 - RNA, 19 nt, Homo sapiens
  misc_RNA (1)...(19): siRNA sense strand
ccagaacaccucuuauucc

SEQ ID NO: 2151406 - RNA, 19 nt, Homo sapiens
  misc_RNA (1)...(19): siRNA sense strand
acaagaccaacuucaccua

SEQ ID NO: 2151407 - RNA, 19 nt, Homo sapiens
  misc_RNA (1)...(19): siRNA sense strand
gaucuccauccuacauugu

SEQ ID NO: 2151408 - RNA, 19 nt, Homo sapiens
  misc_RNA (1)...(19): siRNA sense strand
aaagcagcccugucucuuc

SEQ ID NO: 2151409 - RNA, 19 nt, Homo sapiens
  misc_RNA (1)...(19): siRNA sense strand
ucuauuacuucaugacacu

SEQ ID NO: 2151410 - RNA, 19 nt, Homo sapiens
  misc_RNA (1)...(19): siRNA sense strand
cagcaccagcuuugucuuc

SEQ ID NO: 2151411 - RNA, 19 nt, Homo sapiens
  misc_RNA (1)...(19): siRNA sense strand
gugucggccugaauucaug

SEQ ID NO: 2151412 - RNA, 19 nt, Homo sapiens
  misc_RNA (1)...(19): siRNA sense strand
uaaaguucaccucuacaag

SEQ ID NO: 2151413 - RNA, 19 nt, Homo sapiens
  misc_RNA (1)...(19): siRNA sense strand
gcagaggagcuggccuguu

SEQ ID NO: 2151414 - RNA, 19 nt, Homo sapiens
  misc_RNA (1)...(19): siRNA sense strand
cagcguggcuacgaaugca

SEQ ID NO: 2151415 - RNA, 19 nt, Homo sapiens
  misc_RNA (1)...(19): siRNA sense strand
ccaccaucgugcggauuga

SEQ ID NO: 2151416 - RNA, 19 nt, Homo sapiens
  misc_RNA (1)...(19): siRNA sense strand
ccuggaauuucgcgacauc

SEQ ID NO: 2151417 - RNA, 19 nt, Homo sapiens
  misc_RNA (1)...(19): siRNA sense strand
caucaauaucugugagguu

SEQ ID NO: 2151418 - RNA, 19 nt, Homo sapiens
  misc_RNA (1)...(19): siRNA sense strand
guguggcccuggagugcaa

SEQ ID NO: 2151419 - RNA, 19 nt, Homo sapiens
  misc_RNA (1)...(19): siRNA sense strand
cgugcucauugccuauaaa

SEQ ID NO: 2151420 - RNA, 19 nt, Homo sapiens
  misc_RNA (1)...(19): siRNA sense strand
cugcucauccucaacaaga

SEQ ID NO: 2151421 - RNA, 19 nt, Homo sapiens
  misc_RNA (1)...(19): siRNA sense strand
gaacaccucuuauuccuau

SEQ ID NO: 2151422 - RNA, 19 nt, Homo sapiens
  misc_RNA (1)...(19): siRNA sense strand
ggaaggagcacaucaauau

SEQ ID NO: 2151423 - RNA, 19 nt, Homo sapiens
  misc_RNA (1)...(19): siRNA sense strand
gcaaucagauccagugcua

SEQ ID NO: 2151424 - RNA, 19 nt, Homo sapiens
  misc_RNA (1)...(19): siRNA sense strand
gaacagaucgugugugaga

SEQ ID NO: 2151425 - RNA, 19 nt, Homo sapiens
  misc_RNA (1)...(19): siRNA sense strand
gaacuacacugugcugguu

SEQ ID NO: 2151426 - RNA, 19 nt, Homo sapiens
  misc_RNA (1)...(19): siRNA sense strand
gaauaaaguucaccucuac

SEQ ID NO: 2151427 - RNA, 19 nt, Homo sapiens
  misc_RNA (1)...(19): siRNA sense strand
cagaggagcuggccuguug

SEQ ID NO: 2151428 - RNA, 19 nt, Homo sapiens
  misc_RNA (1)...(19): siRNA sense strand
cagaacagaucguguguga

SEQ ID NO: 2151429 - RNA, 19 nt, Homo sapiens
  misc_RNA (1)...(19): siRNA sense strand
caacccagcucagaauaaa

SEQ ID NO: 2151430 - RNA, 19 nt, Homo sapiens
  misc_RNA (1)...(19): siRNA sense strand
ccucacagcucuauuacuu

SEQ ID NO: 2151431 - RNA, 19 nt, Homo sapiens
  misc_RNA (1)...(19): siRNA sense strand
gaaccugggccuggaauuu

SEQ ID NO: 2151432 - RNA, 19 nt, Homo sapiens
  misc_RNA (1)...(19): siRNA sense strand
agaauaaaguucaccucua

SEQ ID NO: 2151433 - RNA, 19 nt, Homo sapiens
  misc_RNA (1)...(19): siRNA sense strand
ggagcugucuggugccaaa

SEQ ID NO: 2151434 - RNA, 19 nt, Homo sapiens
  misc_RNA (1)...(19): siRNA sense strand
gcacgcccaucauccuaaa

SEQ ID NO: 2151435 - RNA, 19 nt, Homo sapiens
  misc_RNA (1)...(19): siRNA sense strand
gcaagucccgcgaaaguga

SEQ ID NO: 2151436 - RNA, 19 nt, Homo sapiens
  misc_RNA (1)...(19): siRNA sense strand
gguccucacagcucuauua

SEQ ID NO: 2151437 - RNA, 19 nt, Homo sapiens
  misc_RNA (1)...(19): siRNA sense strand
ucacagcucuauuacuuca

SEQ ID NO: 2151438 - RNA, 19 nt, Homo sapiens
  misc_RNA (1)...(19): siRNA sense strand
gcaccagcuuugucuucua

SEQ ID NO: 2151439 - RNA, 19 nt, Homo sapiens
  misc_RNA (1)...(19): siRNA sense strand
cagaugaggugcuagagau

SEQ ID NO: 2151440 - RNA, 19 nt, Homo sapiens
  misc_RNA (1)...(19): siRNA sense strand
gcaacgugguggugauguu

SEQ ID NO: 2151441 - RNA, 19 nt, Homo sapiens
  misc_RNA (1)...(19): siRNA sense strand
ggaaugggcacuucaacau

SEQ ID NO: 2151442 - RNA, 19 nt, Homo sapiens
  misc_RNA (1)...(19): siRNA sense strand
gaagcaacgugguggugau

SEQ ID NO: 2151443 - RNA, 19 nt, Homo sapiens
  misc_RNA (1)...(19): siRNA sense strand
gcccuuuaguggaugguua

SEQ ID NO: 2151444 - RNA, 19 nt, Homo sapiens
  misc_RNA (1)...(19): siRNA sense strand
aaacgcaagucccgcgaaa

SEQ ID NO: 2151445 - RNA, 19 nt, Homo sapiens
  misc_RNA (1)...(19): siRNA sense strand
gggaaggagcacaucaaua

SEQ ID NO: 2151446 - RNA, 19 nt, Homo sapiens
  misc_RNA (1)...(19): siRNA sense strand
gaaagcagcccugucucuu

SEQ ID NO: 2151447 - RNA, 19 nt, Homo sapiens
  misc_RNA (1)...(19): siRNA sense strand
gugcagcccuuuaguggau

SEQ ID NO: 2151448 - RNA, 19 nt, Homo sapiens
  misc_RNA (1)...(19): siRNA sense strand
agaccaacuucaccuacua

SEQ ID NO: 2151449 - RNA, 19 nt, Homo sapiens
  misc_RNA (1)...(19): siRNA sense strand
ggauggagaucaacaaccu

SEQ ID NO: 2151450 - RNA, 19 nt, Homo sapiens
  misc_RNA (1)...(19): siRNA sense strand
cauccuacauugucugcaa

SEQ ID NO: 2151451 - RNA, 19 nt, Homo sapiens
  misc_RNA (1)...(19): siRNA sense strand
ggaaagcagcccugucucu

SEQ ID NO: 2151452 - RNA, 19 nt, Homo sapiens
  misc_RNA (1)...(19): siRNA sense strand
ucugaacgcuacugagaug

SEQ ID NO: 2151453 - RNA, 19 nt, Homo sapiens
  misc_RNA (1)...(19): siRNA sense strand
ggcgucaacugcaccuuug

SEQ ID NO: 2151454 - RNA, 19 nt, Homo sapiens
  misc_RNA (1)...(19): siRNA sense strand
gcaacgugaagcugaacua

SEQ ID NO: 2151455 - RNA, 19 nt, Homo sapiens
  misc_RNA (1)...(19): siRNA sense strand
uuacaucccugcagaacag

SEQ ID NO: 2151456 - RNA, 19 nt, Homo sapiens
  misc_RNA (1)...(19): siRNA sense strand
ggugugagcgguccaagga

SEQ ID NO: 2151457 - RNA, 19 nt, Homo sapiens
  misc_RNA (1)...(19): siRNA sense strand
gccagaacaccucuuauuc

SEQ ID NO: 2151458 - RNA, 19 nt, Homo sapiens
  misc_RNA (1)...(19): siRNA sense strand
gacaacccagcucagaaua

SEQ ID NO: 2151459 - RNA, 19 nt, Homo sapiens
  misc_RNA (1)...(19): siRNA sense strand
ggacccaccuggaccucau

SEQ ID NO: 2151460 - RNA, 19 nt, Homo sapiens
  misc_RNA (1)...(19): siRNA sense strand
ggaccaccaugucguacag

SEQ ID NO: 2151461 - RNA, 19 nt, Homo sapiens
  misc_RNA (1)...(19): siRNA sense strand
cgagaggcccgaggaguuu

SEQ ID NO: 2151462 - RNA, 19 nt, Homo sapiens
  misc_RNA (1)...(19): siRNA sense strand
ggagugcagcccuuuagug

SEQ ID NO: 2151463 - RNA, 19 nt, Homo sapiens
  misc_RNA (1)...(19): siRNA sense strand
gaaggagcacaucaauauc

SEQ ID NO: 2151464 - RNA, 19 nt, Homo sapiens
  misc_RNA (1)...(19): siRNA sense strand
gaagggauggagaucaaca

SEQ ID NO: 2151465 - RNA, 19 nt, Homo sapiens
  misc_RNA (1)...(19): siRNA sense strand
gaugaggugcuagagauga

SEQ ID NO: 2151466 - RNA, 19 nt, Homo sapiens
  misc_RNA (1)...(19): siRNA sense strand
gacgguccaucccaacaau

SEQ ID NO: 2151467 - RNA, 19 nt, Homo sapiens
  misc_RNA (1)...(19): siRNA sense strand
caacgugguggugauguuu

SEQ ID NO: 2151468 - RNA, 19 nt, Homo sapiens
  misc_RNA (1)...(19): siRNA sense strand
ugacaacccagcucagaau

SEQ ID NO: 2151469 - RNA, 19 nt, Homo sapiens
  misc_RNA (1)...(19): siRNA sense strand
cagaacaccucuuauuccu

SEQ ID NO: 2151470 - RNA, 19 nt, Homo sapiens
  misc_RNA (1)...(19): siRNA sense strand
caacaccacauccucagau

SEQ ID NO: 2151471 - RNA, 19 nt, Homo sapiens
  misc_RNA (1)...(19): siRNA sense strand
cgaucuccauccuacauug

SEQ ID NO: 2151472 - RNA, 19 nt, Homo sapiens
  misc_RNA (1)...(19): siRNA sense strand
gagggaaggagcacaucaa

SEQ ID NO: 2151473 - RNA, 19 nt, Homo sapiens
  misc_RNA (1)...(19): siRNA sense strand
ucaagccuaucacgcugaa

SEQ ID NO: 2151474 - RNA, 19 nt, Homo sapiens
  misc_RNA (1)...(19): siRNA sense strand
caucguggccgugcucauu

SEQ ID NO: 2151475 - RNA, 19 nt, Homo sapiens
  misc_RNA (1)...(19): siRNA sense strand
ccagauccgugccaagcau

SEQ ID NO: 2151476 - RNA, 19 nt, Homo sapiens
  misc_RNA (1)...(19): siRNA sense strand
caacagcuccagcguacag

SEQ ID NO: 2151477 - RNA, 19 nt, Homo sapiens
  misc_RNA (1)...(19): siRNA sense strand
uugaggaccugucagagau

SEQ ID NO: 2151478 - RNA, 19 nt, Homo sapiens
  misc_RNA (1)...(19): siRNA sense strand
acagcucuauuacuucaug

SEQ ID NO: 2151479 - RNA, 19 nt, Homo sapiens
  misc_RNA (1)...(19): siRNA sense strand
aaaguucaccucuacaagu

SEQ ID NO: 2151480 - RNA, 19 nt, Homo sapiens
  misc_RNA (1)...(19): siRNA sense strand
ugccagaacaccucuuauu

SEQ ID NO: 2151481 - RNA, 19 nt, Homo sapiens
  misc_RNA (1)...(19): siRNA sense strand
gcaacaccacauccucaga

SEQ ID NO: 2151482 - RNA, 19 nt, Homo sapiens
  misc_RNA (1)...(19): siRNA sense strand
ccaggaaggccgagugaag

SEQ ID NO: 2151483 - RNA, 19 nt, Homo sapiens
  misc_RNA (1)...(19): siRNA sense strand
cgaggaguuuggcuucauc

SEQ ID NO: 2151484 - RNA, 19 nt, Homo sapiens
  misc_RNA (1)...(19): siRNA sense strand
caauaucugugagguucug

SEQ ID NO: 2151485 - RNA, 19 nt, Homo sapiens
  misc_RNA (1)...(19): siRNA sense strand
ggagggaaggagcacauca

SEQ ID NO: 2151486 - RNA, 19 nt, Homo sapiens
  misc_RNA (1)...(19): siRNA sense strand
aaguucaccucuacaagug

SEQ ID NO: 2151487 - RNA, 19 nt, Homo sapiens
  misc_RNA (1)...(19): siRNA sense strand
ggagcauugucaguggaaa

SEQ ID NO: 2151488 - RNA, 19 nt, Homo sapiens
  misc_RNA (1)...(19): siRNA sense strand
acacacccaucgccguaug

SEQ ID NO: 2151489 - RNA, 19 nt, Homo sapiens
  misc_RNA (1)...(19): siRNA sense strand
augaagggauggagaucaa

SEQ ID NO: 2151490 - RNA, 19 nt, Homo sapiens
  misc_RNA (1)...(19): siRNA sense strand
gaccaacuucaccuacuau

SEQ ID NO: 2151491 - RNA, 19 nt, Homo sapiens
  misc_RNA (1)...(19): siRNA sense strand
ggagaaccugggccuggaa

SEQ ID NO: 2151492 - RNA, 19 nt, Homo sapiens
  misc_RNA (1)...(19): siRNA sense strand
acaacccagcucagaauaa

SEQ ID NO: 2151493 - RNA, 19 nt, Homo sapiens
  misc_RNA (1)...(19): siRNA sense strand
caccuggaccucauacaga

SEQ ID NO: 2151494 - RNA, 19 nt, Homo sapiens
  misc_RNA (1)...(19): siRNA sense strand
caccagcuuugucuucuac

SEQ ID NO: 2151495 - RNA, 19 nt, Homo sapiens
  misc_RNA (1)...(19): siRNA sense strand
gaucugcguggcugugugu

SEQ ID NO: 2151496 - RNA, 19 nt, Homo sapiens
  misc_RNA (1)...(19): siRNA sense strand
gacccagacuucgcaugug

SEQ ID NO: 2151497 - RNA, 19 nt, Homo sapiens
  misc_RNA (1)...(19): siRNA sense strand
cagcucagaauaaaguuca

SEQ ID NO: 2151498 - RNA, 19 nt, Homo sapiens
  misc_RNA (1)...(19): siRNA sense strand
ugacagucguguggaaugg

SEQ ID NO: 2151499 - RNA, 19 nt, Homo sapiens
  misc_RNA (1)...(19): siRNA sense strand
acgaaugcauccucaacau

SEQ ID NO: 2151500 - RNA, 19 nt, Homo sapiens
  misc_RNA (1)...(19): siRNA sense strand
uggaggugaucaagccuau

SEQ ID NO: 2151501 - RNA, 19 nt, Homo sapiens
  misc_RNA (1)...(19): siRNA sense strand
ugacccagacuucgcaugu

SEQ ID NO: 2151502 - RNA, 19 nt, Homo sapiens
  misc_RNA (1)...(19): siRNA sense strand
caacaauaucuccgucucu

SEQ ID NO: 2151503 - RNA, 19 nt, Homo sapiens
  misc_RNA (1)...(19): siRNA sense strand
cauugucaguggaaacaca

SEQ ID NO: 2151504 - RNA, 19 nt, Homo sapiens
  misc_RNA (1)...(19): siRNA sense strand
ucagaugaggugcuagaga

SEQ ID NO: 2151505 - RNA, 19 nt, Homo sapiens
  misc_RNA (1)...(19): siRNA sense strand
ccagaacaccucuuauucc

SEQ ID NO: 2151506 - RNA, 19 nt, Homo sapiens
  misc_RNA (1)...(19): siRNA sense strand
acaagaccaacuucaccua

SEQ ID NO: 2151507 - RNA, 19 nt, Homo sapiens
  misc_RNA (1)...(19): siRNA sense strand
gaucuccauccuacauugu

SEQ ID NO: 2151508 - RNA, 19 nt, Homo sapiens
  misc_RNA (1)...(19): siRNA sense strand
aaagcagcccugucucuuc

SEQ ID NO: 2151509 - RNA, 19 nt, Homo sapiens
  misc_RNA (1)...(19): siRNA sense strand
ucuauuacuucaugacacu

SEQ ID NO: 2151510 - RNA, 19 nt, Homo sapiens
  misc_RNA (1)...(19): siRNA sense strand
cagcaccagcuuugucuuc

SEQ ID NO: 2151511 - RNA, 19 nt, Homo sapiens
  misc_RNA (1)...(19): siRNA sense strand
gugucggccugaauucaug

SEQ ID NO: 2151512 - RNA, 19 nt, Homo sapiens
  misc_RNA (1)...(19): siRNA sense strand
uaaaguucaccucuacaag

SEQ ID NO: 2151513 - RNA, 19 nt, Homo sapiens
  misc_RNA (1)...(19): siRNA sense strand
gcagaggagcuggccuguu

SEQ ID NO: 2151514 - RNA, 19 nt, Homo sapiens
  misc_RNA (1)...(19): siRNA sense strand
cagcguggcuacgaaugca

SEQ ID NO: 2151515 - RNA, 19 nt, Homo sapiens
  misc_RNA (1)...(19): siRNA sense strand
ccaccaucgugcggauuga

SEQ ID NO: 2151516 - RNA, 19 nt, Homo sapiens
  misc_RNA (1)...(19): siRNA sense strand
ccuggaauuucgcgacauc

SEQ ID NO: 2151517 - RNA, 19 nt, Homo sapiens
  misc_RNA (1)...(19): siRNA sense strand
caucaauaucugugagguu

SEQ ID NO: 2151518 - RNA, 19 nt, Homo sapiens
  misc_RNA (1)...(19): siRNA sense strand
guguggcccuggagugcaa

SEQ ID NO: 2151519 - RNA, 19 nt, Homo sapiens
  misc_RNA (1)...(19): siRNA sense strand
cgugcucauugccuauaaa

SEQ ID NO: 2151520 - RNA, 19 nt, Homo sapiens
  misc_RNA (1)...(19): siRNA sense strand
cugcucauccucaacaaga

SEQ ID NO: 2151521 - RNA, 19 nt, Homo sapiens
  misc_RNA (1)...(19): siRNA sense strand
caacgaaucuucccacuua

SEQ ID NO: 2151522 - RNA, 19 nt, Homo sapiens
  misc_RNA (1)...(19): siRNA sense strand
gaagaacucugacucaaga

SEQ ID NO: 2151523 - RNA, 19 nt, Homo sapiens
  misc_RNA (1)...(19): siRNA sense strand
gagaccaaaucaaguauua

SEQ ID NO: 2151524 - RNA, 19 nt, Homo sapiens
  misc_RNA (1)...(19): siRNA sense strand
ugacagaucuaagacauua

SEQ ID NO: 2151525 - RNA, 19 nt, Homo sapiens
  misc_RNA (1)...(19): siRNA sense strand
cgaaagaccuggaaucaau

SEQ ID NO: 2151526 - RNA, 19 nt, Homo sapiens
  misc_RNA (1)...(19): siRNA sense strand
gugauucucucuuggauua

SEQ ID NO: 2151527 - RNA, 19 nt, Homo sapiens
  misc_RNA (1)...(19): siRNA sense strand
ugaaaggcuuccuagauua

SEQ ID NO: 2151528 - RNA, 19 nt, Homo sapiens
  misc_RNA (1)...(19): siRNA sense strand
gaagaaauggaaagacaua

SEQ ID NO: 2151529 - RNA, 19 nt, Homo sapiens
  misc_RNA (1)...(19): siRNA sense strand
gaggauauguucaugaaau

SEQ ID NO: 2151530 - RNA, 19 nt, Homo sapiens
  misc_RNA (1)...(19): siRNA sense strand
caaggaagcuacugugguu

SEQ ID NO: 2151531 - RNA, 19 nt, Homo sapiens
  misc_RNA (1)...(19): siRNA sense strand
ggaagacuauucagacaga

SEQ ID NO: 2151532 - RNA, 19 nt, Homo sapiens
  misc_RNA (1)...(19): siRNA sense strand
ugaagcagccuguggauua

SEQ ID NO: 2151533 - RNA, 19 nt, Homo sapiens
  misc_RNA (1)...(19): siRNA sense strand
acaccaaccugcaagaaua

SEQ ID NO: 2151534 - RNA, 19 nt, Homo sapiens
  misc_RNA (1)...(19): siRNA sense strand
ggccaaggcucaucacauu

SEQ ID NO: 2151535 - RNA, 19 nt, Homo sapiens
  misc_RNA (1)...(19): siRNA sense strand
gacaauacuuugauguuug

SEQ ID NO: 2151536 - RNA, 19 nt, Homo sapiens
  misc_RNA (1)...(19): siRNA sense strand
caacagcucuuggaucaug

SEQ ID NO: 2151537 - RNA, 19 nt, Homo sapiens
  misc_RNA (1)...(19): siRNA sense strand
gcccugaccucuucacaaa

SEQ ID NO: 2151538 - RNA, 19 nt, Homo sapiens
  misc_RNA (1)...(19): siRNA sense strand
gaauacgaauaccaauuga

SEQ ID NO: 2151539 - RNA, 19 nt, Homo sapiens
  misc_RNA (1)...(19): siRNA sense strand
ccugaccucuucacaaaua

SEQ ID NO: 2151540 - RNA, 19 nt, Homo sapiens
  misc_RNA (1)...(19): siRNA sense strand
gaacaacccaggccaagau

SEQ ID NO: 2151541 - RNA, 19 nt, Homo sapiens
  misc_RNA (1)...(19): siRNA sense strand
gaaacgagagguuauuuua

SEQ ID NO: 2151542 - RNA, 19 nt, Homo sapiens
  misc_RNA (1)...(19): siRNA sense strand
gagaauaggagaccaaauc

SEQ ID NO: 2151543 - RNA, 19 nt, Homo sapiens
  misc_RNA (1)...(19): siRNA sense strand
ggaaucaggaacagcuuua

SEQ ID NO: 2151544 - RNA, 19 nt, Homo sapiens
  misc_RNA (1)...(19): siRNA sense strand
cuaggaacaugguguauau

SEQ ID NO: 2151545 - RNA, 19 nt, Homo sapiens
  misc_RNA (1)...(19): siRNA sense strand
cuacacagauacuauuaga

SEQ ID NO: 2151546 - RNA, 19 nt, Homo sapiens
  misc_RNA (1)...(19): siRNA sense strand
gaucuacucuggguaacaa

SEQ ID NO: 2151547 - RNA, 19 nt, Homo sapiens
  misc_RNA (1)...(19): siRNA sense strand
caaaguggcagaauacgaa

SEQ ID NO: 2151548 - RNA, 19 nt, Homo sapiens
  misc_RNA (1)...(19): siRNA sense strand
ggacuacacagauacuauu

SEQ ID NO: 2151549 - RNA, 19 nt, Homo sapiens
  misc_RNA (1)...(19): siRNA sense strand
gaagggugguaauguggaa

SEQ ID NO: 2151550 - RNA, 19 nt, Homo sapiens
  misc_RNA (1)...(19): siRNA sense strand
gaaaggcuuccuagauuau

SEQ ID NO: 2151551 - RNA, 19 nt, Homo sapiens
  misc_RNA (1)...(19): siRNA sense strand
ccacuguucuauucugaaa

SEQ ID NO: 2151552 - RNA, 19 nt, Homo sapiens
  misc_RNA (1)...(19): siRNA sense strand
uagaagaaauggaaagaca

SEQ ID NO: 2151553 - RNA, 19 nt, Homo sapiens
  misc_RNA (1)...(19): siRNA sense strand
gaaauuaucgcuguuccuu

SEQ ID NO: 2151554 - RNA, 19 nt, Homo sapiens
  misc_RNA (1)...(19): siRNA sense strand
ggauuuauauggugucucu

SEQ ID NO: 2151555 - RNA, 19 nt, Homo sapiens
  misc_RNA (1)...(19): siRNA sense strand
uuaggaaacucaagugaug

SEQ ID NO: 2151556 - RNA, 19 nt, Homo sapiens
  misc_RNA (1)...(19): siRNA sense strand
gaaccaagggauuuauaug

SEQ ID NO: 2151557 - RNA, 19 nt, Homo sapiens
  misc_RNA (1)...(19): siRNA sense strand
cuacuuugcucauugcuau

SEQ ID NO: 2151558 - RNA, 19 nt, Homo sapiens
  misc_RNA (1)...(19): siRNA sense strand
gaauaccaauugacuguac

SEQ ID NO: 2151559 - RNA, 19 nt, Homo sapiens
  misc_RNA (1)...(19): siRNA sense strand
cacauuggcuggcagagaa

SEQ ID NO: 2151560 - RNA, 19 nt, Homo sapiens
  misc_RNA (1)...(19): siRNA sense strand
augaaaggcuuccuagauu

SEQ ID NO: 2151561 - RNA, 19 nt, Homo sapiens
  misc_RNA (1)...(19): siRNA sense strand
ugaagaugcuuacaaagag

SEQ ID NO: 2151562 - RNA, 19 nt, Homo sapiens
  misc_RNA (1)...(19): siRNA sense strand
auucucagcuugcaaguuu

SEQ ID NO: 2151563 - RNA, 19 nt, Homo sapiens
  misc_RNA (1)...(19): siRNA sense strand
gcucauugcuauccauaca

SEQ ID NO: 2151564 - RNA, 19 nt, Homo sapiens
  misc_RNA (1)...(19): siRNA sense strand
gcucuuggaucaugaaagg

SEQ ID NO: 2151565 - RNA, 19 nt, Homo sapiens
  misc_RNA (1)...(19): siRNA sense strand
ugauagacauuacauugga

SEQ ID NO: 2151566 - RNA, 19 nt, Homo sapiens
  misc_RNA (1)...(19): siRNA sense strand
gagaaacgagagguuauuu

SEQ ID NO: 2151567 - RNA, 19 nt, Homo sapiens
  misc_RNA (1)...(19): siRNA sense strand
ggaagcuacugugguuuau

SEQ ID NO: 2151568 - RNA, 19 nt, Homo sapiens
  misc_RNA (1)...(19): siRNA sense strand
caccaaaccugcuagucuu

SEQ ID NO: 2151569 - RNA, 19 nt, Homo sapiens
  misc_RNA (1)...(19): siRNA sense strand
gucuacagauucacuauug

SEQ ID NO: 2151570 - RNA, 19 nt, Homo sapiens
  misc_RNA (1)...(19): siRNA sense strand
ggaacaugguguauauuuu

SEQ ID NO: 2151571 - RNA, 19 nt, Homo sapiens
  misc_RNA (1)...(19): siRNA sense strand
gcacucauuucagcacgaa

SEQ ID NO: 2151572 - RNA, 19 nt, Homo sapiens
  misc_RNA (1)...(19): siRNA sense strand
gaacaggaagggugguaau

SEQ ID NO: 2151573 - RNA, 19 nt, Homo sapiens
  misc_RNA (1)...(19): siRNA sense strand
gccacacgcuugcuaggaa

SEQ ID NO: 2151574 - RNA, 19 nt, Homo sapiens
  misc_RNA (1)...(19): siRNA sense strand
gaucaugaaaggcuuccua

SEQ ID NO: 2151575 - RNA, 19 nt, Homo sapiens
  misc_RNA (1)...(19): siRNA sense strand
ggagaaacgagagguuauu

SEQ ID NO: 2151576 - RNA, 19 nt, Homo sapiens
  misc_RNA (1)...(19): siRNA sense strand
agaauacgaauaccaauug

SEQ ID NO: 2151577 - RNA, 19 nt, Homo sapiens
  misc_RNA (1)...(19): siRNA sense strand
gaaagaccuggaaucaaug

SEQ ID NO: 2151578 - RNA, 19 nt, Homo sapiens
  misc_RNA (1)...(19): siRNA sense strand
ggaacagcuuuaccaugga

SEQ ID NO: 2151579 - RNA, 19 nt, Homo sapiens
  misc_RNA (1)...(19): siRNA sense strand
gaagagcaaagaaggaaca

SEQ ID NO: 2151580 - RNA, 19 nt, Homo sapiens
  misc_RNA (1)...(19): siRNA sense strand
gguagugacagaucuaaga

SEQ ID NO: 2151581 - RNA, 19 nt, Homo sapiens
  misc_RNA (1)...(19): siRNA sense strand
ucucuuacauggacauuuc

SEQ ID NO: 2151582 - RNA, 19 nt, Homo sapiens
  misc_RNA (1)...(19): siRNA sense strand
caggaauagucuacagauu

SEQ ID NO: 2151583 - RNA, 19 nt, Homo sapiens
  misc_RNA (1)...(19): siRNA sense strand
uauauggugucucuucuuc

SEQ ID NO: 2151584 - RNA, 19 nt, Homo sapiens
  misc_RNA (1)...(19): siRNA sense strand
ccugaaagaauuagaagaa

SEQ ID NO: 2151585 - RNA, 19 nt, Homo sapiens
  misc_RNA (1)...(19): siRNA sense strand
caggaagggugguaaugug

SEQ ID NO: 2151586 - RNA, 19 nt, Homo sapiens
  misc_RNA (1)...(19): siRNA sense strand
gacauuauacuuacagcaa

SEQ ID NO: 2151587 - RNA, 19 nt, Homo sapiens
  misc_RNA (1)...(19): siRNA sense strand
gaucuucauggccauagua

SEQ ID NO: 2151588 - RNA, 19 nt, Homo sapiens
  misc_RNA (1)...(19): siRNA sense strand
caugaaaggcuuccuagau

SEQ ID NO: 2151589 - RNA, 19 nt, Homo sapiens
  misc_RNA (1)...(19): siRNA sense strand
gcuaggaacaugguguaua

SEQ ID NO: 2151590 - RNA, 19 nt, Homo sapiens
  misc_RNA (1)...(19): siRNA sense strand
cgccauuauuucucucuua

SEQ ID NO: 2151591 - RNA, 19 nt, Homo sapiens
  misc_RNA (1)...(19): siRNA sense strand
uaggagaccaaaucaagua

SEQ ID NO: 2151592 - RNA, 19 nt, Homo sapiens
  misc_RNA (1)...(19): siRNA sense strand
gaagcagccuguggauuac

SEQ ID NO: 2151593 - RNA, 19 nt, Homo sapiens
  misc_RNA (1)...(19): siRNA sense strand
gauucucucuuggauuauu

SEQ ID NO: 2151594 - RNA, 19 nt, Homo sapiens
  misc_RNA (1)...(19): siRNA sense strand
aaacgaggcacucauuuca

SEQ ID NO: 2151595 - RNA, 19 nt, Homo sapiens
  misc_RNA (1)...(19): siRNA sense strand
uagucaaaguggcagaaua

SEQ ID NO: 2151596 - RNA, 19 nt, Homo sapiens
  misc_RNA (1)...(19): siRNA sense strand
acauggacauuucaauuuc

SEQ ID NO: 2151597 - RNA, 19 nt, Homo sapiens
  misc_RNA (1)...(19): siRNA sense strand
gcacgaaagaccuggaauc

SEQ ID NO: 2151598 - RNA, 19 nt, Homo sapiens
  misc_RNA (1)...(19): siRNA sense strand
caaacgaggcacucauuuc

SEQ ID NO: 2151599 - RNA, 19 nt, Homo sapiens
  misc_RNA (1)...(19): siRNA sense strand
gacuacacagauacuauua

SEQ ID NO: 2151600 - RNA, 19 nt, Homo sapiens
  misc_RNA (1)...(19): siRNA sense strand
uuucuggcaucaauaauga

SEQ ID NO: 2151601 - RNA, 19 nt, Homo sapiens
  misc_RNA (1)...(19): siRNA sense strand
cuucaucggugugcacuuu

SEQ ID NO: 2151602 - RNA, 19 nt, Homo sapiens
  misc_RNA (1)...(19): siRNA sense strand
guccugagccaguguauau

SEQ ID NO: 2151603 - RNA, 19 nt, Homo sapiens
  misc_RNA (1)...(19): siRNA sense strand
gagcaggaauagucuacag

SEQ ID NO: 2151604 - RNA, 19 nt, Homo sapiens
  misc_RNA (1)...(19): siRNA sense strand
uaauaugcgagcaggaaua

SEQ ID NO: 2151605 - RNA, 19 nt, Homo sapiens
  misc_RNA (1)...(19): siRNA sense strand
cagaauacgaauaccaauu

SEQ ID NO: 2151606 - RNA, 19 nt, Homo sapiens
  misc_RNA (1)...(19): siRNA sense strand
gauagacauuacauuggau

SEQ ID NO: 2151607 - RNA, 19 nt, Homo sapiens
  misc_RNA (1)...(19): siRNA sense strand
ccaaaccugcuagucuuua

SEQ ID NO: 2151608 - RNA, 19 nt, Homo sapiens
  misc_RNA (1)...(19): siRNA sense strand
gauucacuauugucaacuu

SEQ ID NO: 2151609 - RNA, 19 nt, Homo sapiens
  misc_RNA (1)...(19): siRNA sense strand
gaagacuauucagacagaa

SEQ ID NO: 2151610 - RNA, 19 nt, Homo sapiens
  misc_RNA (1)...(19): siRNA sense strand
uacagaagguagucaaagu

SEQ ID NO: 2151611 - RNA, 19 nt, Homo sapiens
  misc_RNA (1)...(19): siRNA sense strand
agacauauaacccuggaaa

SEQ ID NO: 2151612 - RNA, 19 nt, Homo sapiens
  misc_RNA (1)...(19): siRNA sense strand
caaguuuaauguccagaag

SEQ ID NO: 2151613 - RNA, 19 nt, Homo sapiens
  misc_RNA (1)...(19): siRNA sense strand
gaacucugacucaagaaag

SEQ ID NO: 2151614 - RNA, 19 nt, Homo sapiens
  misc_RNA (1)...(19): siRNA sense strand
gaauaggagaccaaaucaa

SEQ ID NO: 2151615 - RNA, 19 nt, Homo sapiens
  misc_RNA (1)...(19): siRNA sense strand
cugaagaugcuuacaaaga

SEQ ID NO: 2151616 - RNA, 19 nt, Homo sapiens
  misc_RNA (1)...(19): siRNA sense strand
aauuaucgcuguuccuuag

SEQ ID NO: 2151617 - RNA, 19 nt, Homo sapiens
  misc_RNA (1)...(19): siRNA sense strand
gcggaaggcugugauucug

SEQ ID NO: 2151618 - RNA, 19 nt, Homo sapiens
  misc_RNA (1)...(19): siRNA sense strand
gcaggaauagucuacagau

SEQ ID NO: 2151619 - RNA, 19 nt, Homo sapiens
  misc_RNA (1)...(19): siRNA sense strand
gguaaccgaacaccuuuga

SEQ ID NO: 2151620 - RNA, 19 nt, Homo sapiens
  misc_RNA (1)...(19): siRNA sense strand
gcaaguuuaauguccagaa

SEQ ID NO: 2151621 - RNA, 19 nt, Homo sapiens
  misc_RNA (1)...(19): siRNA sense strand
caacgaaucuucccacuua

SEQ ID NO: 2151622 - RNA, 19 nt, Homo sapiens
  misc_RNA (1)...(19): siRNA sense strand
gaagaacucugacucaaga

SEQ ID NO: 2151623 - RNA, 19 nt, Homo sapiens
  misc_RNA (1)...(19): siRNA sense strand
gagaccaaaucaaguauua

SEQ ID NO: 2151624 - RNA, 19 nt, Homo sapiens
  misc_RNA (1)...(19): siRNA sense strand
ugacagaucuaagacauua

SEQ ID NO: 2151625 - RNA, 19 nt, Homo sapiens
  misc_RNA (1)...(19): siRNA sense strand
cgaaagaccuggaaucaau

SEQ ID NO: 2151626 - RNA, 19 nt, Homo sapiens
  misc_RNA (1)...(19): siRNA sense strand
gugauucucucuuggauua

SEQ ID NO: 2151627 - RNA, 19 nt, Homo sapiens
  misc_RNA (1)...(19): siRNA sense strand
ugaaaggcuuccuagauua

SEQ ID NO: 2151628 - RNA, 19 nt, Homo sapiens
  misc_RNA (1)...(19): siRNA sense strand
gaagaaauggaaagacaua

SEQ ID NO: 2151629 - RNA, 19 nt, Homo sapiens
  misc_RNA (1)...(19): siRNA sense strand
gaggauauguucaugaaau

SEQ ID NO: 2151630 - RNA, 19 nt, Homo sapiens
  misc_RNA (1)...(19): siRNA sense strand
caaggaagcuacugugguu

SEQ ID NO: 2151631 - RNA, 19 nt, Homo sapiens
  misc_RNA (1)...(19): siRNA sense strand
ggaagacuauucagacaga

SEQ ID NO: 2151632 - RNA, 19 nt, Homo sapiens
  misc_RNA (1)...(19): siRNA sense strand
ugaagcagccuguggauua

SEQ ID NO: 2151633 - RNA, 19 nt, Homo sapiens
  misc_RNA (1)...(19): siRNA sense strand
acaccaaccugcaagaaua

SEQ ID NO: 2151634 - RNA, 19 nt, Homo sapiens
  misc_RNA (1)...(19): siRNA sense strand
ggccaaggcucaucacauu

SEQ ID NO: 2151635 - RNA, 19 nt, Homo sapiens
  misc_RNA (1)...(19): siRNA sense strand
gacaauacuuugauguuug

SEQ ID NO: 2151636 - RNA, 19 nt, Homo sapiens
  misc_RNA (1)...(19): siRNA sense strand
caacagcucuuggaucaug

SEQ ID NO: 2151637 - RNA, 19 nt, Homo sapiens
  misc_RNA (1)...(19): siRNA sense strand
gcccugaccucuucacaaa

SEQ ID NO: 2151638 - RNA, 19 nt, Homo sapiens
  misc_RNA (1)...(19): siRNA sense strand
gaauacgaauaccaauuga

SEQ ID NO: 2151639 - RNA, 19 nt, Homo sapiens
  misc_RNA (1)...(19): siRNA sense strand
ccugaccucuucacaaaua

SEQ ID NO: 2151640 - RNA, 19 nt, Homo sapiens
  misc_RNA (1)...(19): siRNA sense strand
gaacaacccaggccaagau

SEQ ID NO: 2151641 - RNA, 19 nt, Homo sapiens
  misc_RNA (1)...(19): siRNA sense strand
gaaacgagagguuauuuua

SEQ ID NO: 2151642 - RNA, 19 nt, Homo sapiens
  misc_RNA (1)...(19): siRNA sense strand
gagaauaggagaccaaauc

SEQ ID NO: 2151643 - RNA, 19 nt, Homo sapiens
  misc_RNA (1)...(19): siRNA sense strand
ggaaucaggaacagcuuua

SEQ ID NO: 2151644 - RNA, 19 nt, Homo sapiens
  misc_RNA (1)...(19): siRNA sense strand
cuaggaacaugguguauau

SEQ ID NO: 2151645 - RNA, 19 nt, Homo sapiens
  misc_RNA (1)...(19): siRNA sense strand
cuacacagauacuauuaga

SEQ ID NO: 2151646 - RNA, 19 nt, Homo sapiens
  misc_RNA (1)...(19): siRNA sense strand
gaucuacucuggguaacaa

SEQ ID NO: 2151647 - RNA, 19 nt, Homo sapiens
  misc_RNA (1)...(19): siRNA sense strand
caaaguggcagaauacgaa

SEQ ID NO: 2151648 - RNA, 19 nt, Homo sapiens
  misc_RNA (1)...(19): siRNA sense strand
ggacuacacagauacuauu

SEQ ID NO: 2151649 - RNA, 19 nt, Homo sapiens
  misc_RNA (1)...(19): siRNA sense strand
gaagggugguaauguggaa

SEQ ID NO: 2151650 - RNA, 19 nt, Homo sapiens
  misc_RNA (1)...(19): siRNA sense strand
gaaaggcuuccuagauuau

SEQ ID NO: 2151651 - RNA, 19 nt, Homo sapiens
  misc_RNA (1)...(19): siRNA sense strand
ccacuguucuauucugaaa

SEQ ID NO: 2151652 - RNA, 19 nt, Homo sapiens
  misc_RNA (1)...(19): siRNA sense strand
uagaagaaauggaaagaca

SEQ ID NO: 2151653 - RNA, 19 nt, Homo sapiens
  misc_RNA (1)...(19): siRNA sense strand
gaaauuaucgcuguuccuu

SEQ ID NO: 2151654 - RNA, 19 nt, Homo sapiens
  misc_RNA (1)...(19): siRNA sense strand
ggauuuauauggugucucu

SEQ ID NO: 2151655 - RNA, 19 nt, Homo sapiens
  misc_RNA (1)...(19): siRNA sense strand
uuaggaaacucaagugaug

SEQ ID NO: 2151656 - RNA, 19 nt, Homo sapiens
  misc_RNA (1)...(19): siRNA sense strand
gaaccaagggauuuauaug

SEQ ID NO: 2151657 - RNA, 19 nt, Homo sapiens
  misc_RNA (1)...(19): siRNA sense strand
cuacuuugcucauugcuau

SEQ ID NO: 2151658 - RNA, 19 nt, Homo sapiens
  misc_RNA (1)...(19): siRNA sense strand
gaauaccaauugacuguac

SEQ ID NO: 2151659 - RNA, 19 nt, Homo sapiens
  misc_RNA (1)...(19): siRNA sense strand
cacauuggcuggcagagaa

SEQ ID NO: 2151660 - RNA, 19 nt, Homo sapiens
  misc_RNA (1)...(19): siRNA sense strand
augaaaggcuuccuagauu

SEQ ID NO: 2151661 - RNA, 19 nt, Homo sapiens
  misc_RNA (1)...(19): siRNA sense strand
ugaagaugcuuacaaagag

SEQ ID NO: 2151662 - RNA, 19 nt, Homo sapiens
  misc_RNA (1)...(19): siRNA sense strand
auucucagcuugcaaguuu

SEQ ID NO: 2151663 - RNA, 19 nt, Homo sapiens
  misc_RNA (1)...(19): siRNA sense strand
gcucauugcuauccauaca

SEQ ID NO: 2151664 - RNA, 19 nt, Homo sapiens
  misc_RNA (1)...(19): siRNA sense strand
gcucuuggaucaugaaagg

SEQ ID NO: 2151665 - RNA, 19 nt, Homo sapiens
  misc_RNA (1)...(19): siRNA sense strand
ugauagacauuacauugga

SEQ ID NO: 2151666 - RNA, 19 nt, Homo sapiens
  misc_RNA (1)...(19): siRNA sense strand
gagaaacgagagguuauuu

SEQ ID NO: 2151667 - RNA, 19 nt, Homo sapiens
  misc_RNA (1)...(19): siRNA sense strand
ggaagcuacugugguuuau

SEQ ID NO: 2151668 - RNA, 19 nt, Homo sapiens
  misc_RNA (1)...(19): siRNA sense strand
caccaaaccugcuagucuu

SEQ ID NO: 2151669 - RNA, 19 nt, Homo sapiens
  misc_RNA (1)...(19): siRNA sense strand
gucuacagauucacuauug

SEQ ID NO: 2151670 - RNA, 19 nt, Homo sapiens
  misc_RNA (1)...(19): siRNA sense strand
ggaacaugguguauauuuu

SEQ ID NO: 2151671 - RNA, 19 nt, Homo sapiens
  misc_RNA (1)...(19): siRNA sense strand
gcacucauuucagcacgaa

SEQ ID NO: 2151672 - RNA, 19 nt, Homo sapiens
  misc_RNA (1)...(19): siRNA sense strand
gaacaggaagggugguaau

SEQ ID NO: 2151673 - RNA, 19 nt, Homo sapiens
  misc_RNA (1)...(19): siRNA sense strand
gccacacgcuugcuaggaa

SEQ ID NO: 2151674 - RNA, 19 nt, Homo sapiens
  misc_RNA (1)...(19): siRNA sense strand
gaucaugaaaggcuuccua

SEQ ID NO: 2151675 - RNA, 19 nt, Homo sapiens
  misc_RNA (1)...(19): siRNA sense strand
ggagaaacgagagguuauu

SEQ ID NO: 2151676 - RNA, 19 nt, Homo sapiens
  misc_RNA (1)...(19): siRNA sense strand
agaauacgaauaccaauug

SEQ ID NO: 2151677 - RNA, 19 nt, Homo sapiens
  misc_RNA (1)...(19): siRNA sense strand
gaaagaccuggaaucaaug

SEQ ID NO: 2151678 - RNA, 19 nt, Homo sapiens
  misc_RNA (1)...(19): siRNA sense strand
ggaacagcuuuaccaugga

SEQ ID NO: 2151679 - RNA, 19 nt, Homo sapiens
  misc_RNA (1)...(19): siRNA sense strand
gaagagcaaagaaggaaca

SEQ ID NO: 2151680 - RNA, 19 nt, Homo sapiens
  misc_RNA (1)...(19): siRNA sense strand
gguagugacagaucuaaga

SEQ ID NO: 2151681 - RNA, 19 nt, Homo sapiens
  misc_RNA (1)...(19): siRNA sense strand
ucucuuacauggacauuuc

SEQ ID NO: 2151682 - RNA, 19 nt, Homo sapiens
  misc_RNA (1)...(19): siRNA sense strand
caggaauagucuacagauu

SEQ ID NO: 2151683 - RNA, 19 nt, Homo sapiens
  misc_RNA (1)...(19): siRNA sense strand
uauauggugucucuucuuc

SEQ ID NO: 2151684 - RNA, 19 nt, Homo sapiens
  misc_RNA (1)...(19): siRNA sense strand
ccugaaagaauuagaagaa

SEQ ID NO: 2151685 - RNA, 19 nt, Homo sapiens
  misc_RNA (1)...(19): siRNA sense strand
caggaagggugguaaugug

SEQ ID NO: 2151686 - RNA, 19 nt, Homo sapiens
  misc_RNA (1)...(19): siRNA sense strand
gacauuauacuuacagcaa

SEQ ID NO: 2151687 - RNA, 19 nt, Homo sapiens
  misc_RNA (1)...(19): siRNA sense strand
gaucuucauggccauagua

SEQ ID NO: 2151688 - RNA, 19 nt, Homo sapiens
  misc_RNA (1)...(19): siRNA sense strand
caugaaaggcuuccuagau

SEQ ID NO: 2151689 - RNA, 19 nt, Homo sapiens
  misc_RNA (1)...(19): siRNA sense strand
gcuaggaacaugguguaua

SEQ ID NO: 2151690 - RNA, 19 nt, Homo sapiens
  misc_RNA (1)...(19): siRNA sense strand
cgccauuauuucucucuua

SEQ ID NO: 2151691 - RNA, 19 nt, Homo sapiens
  misc_RNA (1)...(19): siRNA sense strand
uaggagaccaaaucaagua

SEQ ID NO: 2151692 - RNA, 19 nt, Homo sapiens
  misc_RNA (1)...(19): siRNA sense strand
gaagcagccuguggauuac

SEQ ID NO: 2151693 - RNA, 19 nt, Homo sapiens
  misc_RNA (1)...(19): siRNA sense strand
gauucucucuuggauuauu

SEQ ID NO: 2151694 - RNA, 19 nt, Homo sapiens
  misc_RNA (1)...(19): siRNA sense strand
aaacgaggcacucauuuca

SEQ ID NO: 2151695 - RNA, 19 nt, Homo sapiens
  misc_RNA (1)...(19): siRNA sense strand
uagucaaaguggcagaaua

SEQ ID NO: 2151696 - RNA, 19 nt, Homo sapiens
  misc_RNA (1)...(19): siRNA sense strand
acauggacauuucaauuuc

SEQ ID NO: 2151697 - RNA, 19 nt, Homo sapiens
  misc_RNA (1)...(19): siRNA sense strand
gcacgaaagaccuggaauc

SEQ ID NO: 2151698 - RNA, 19 nt, Homo sapiens
  misc_RNA (1)...(19): siRNA sense strand
caaacgaggcacucauuuc

SEQ ID NO: 2151699 - RNA, 19 nt, Homo sapiens
  misc_RNA (1)...(19): siRNA sense strand
gacuacacagauacuauua

SEQ ID NO: 2151700 - RNA, 19 nt, Homo sapiens
  misc_RNA (1)...(19): siRNA sense strand
uuucuggcaucaauaauga

SEQ ID NO: 2151701 - RNA, 19 nt, Homo sapiens
  misc_RNA (1)...(19): siRNA sense strand
cuucaucggugugcacuuu

SEQ ID NO: 2151702 - RNA, 19 nt, Homo sapiens
  misc_RNA (1)...(19): siRNA sense strand
guccugagccaguguauau

SEQ ID NO: 2151703 - RNA, 19 nt, Homo sapiens
  misc_RNA (1)...(19): siRNA sense strand
gagcaggaauagucuacag

SEQ ID NO: 2151704 - RNA, 19 nt, Homo sapiens
  misc_RNA (1)...(19): siRNA sense strand
uaauaugcgagcaggaaua

SEQ ID NO: 2151705 - RNA, 19 nt, Homo sapiens
  misc_RNA (1)...(19): siRNA sense strand
cagaauacgaauaccaauu

SEQ ID NO: 2151706 - RNA, 19 nt, Homo sapiens
  misc_RNA (1)...(19): siRNA sense strand
gauagacauuacauuggau

SEQ ID NO: 2151707 - RNA, 19 nt, Homo sapiens
  misc_RNA (1)...(19): siRNA sense strand
ccaaaccugcuagucuuua

SEQ ID NO: 2151708 - RNA, 19 nt, Homo sapiens
  misc_RNA (1)...(19): siRNA sense strand
gauucacuauugucaacuu

SEQ ID NO: 2151709 - RNA, 19 nt, Homo sapiens
  misc_RNA (1)...(19): siRNA sense strand
gaagacuauucagacagaa

SEQ ID NO: 2151710 - RNA, 19 nt, Homo sapiens
  misc_RNA (1)...(19): siRNA sense strand
uacagaagguagucaaagu

SEQ ID NO: 2151711 - RNA, 19 nt, Homo sapiens
  misc_RNA (1)...(19): siRNA sense strand
agacauauaacccuggaaa

SEQ ID NO: 2151712 - RNA, 19 nt, Homo sapiens
  misc_RNA (1)...(19): siRNA sense strand
caaguuuaauguccagaag

SEQ ID NO: 2151713 - RNA, 19 nt, Homo sapiens
  misc_RNA (1)...(19): siRNA sense strand
gaacucugacucaagaaag

SEQ ID NO: 2151714 - RNA, 19 nt, Homo sapiens
  misc_RNA (1)...(19): siRNA sense strand
gaauaggagaccaaaucaa

SEQ ID NO: 2151715 - RNA, 19 nt, Homo sapiens
  misc_RNA (1)...(19): siRNA sense strand
cugaagaugcuuacaaaga

SEQ ID NO: 2151716 - RNA, 19 nt, Homo sapiens
  misc_RNA (1)...(19): siRNA sense strand
aauuaucgcuguuccuuag

SEQ ID NO: 2151717 - RNA, 19 nt, Homo sapiens
  misc_RNA (1)...(19): siRNA sense strand
gcggaaggcugugauucug

SEQ ID NO: 2151718 - RNA, 19 nt, Homo sapiens
  misc_RNA (1)...(19): siRNA sense strand
gcaggaauagucuacagau

SEQ ID NO: 2151719 - RNA, 19 nt, Homo sapiens
  misc_RNA (1)...(19): siRNA sense strand
gguaaccgaacaccuuuga

SEQ ID NO: 2151720 - RNA, 19 nt, Homo sapiens
  misc_RNA (1)...(19): siRNA sense strand
gcaaguuuaauguccagaa

SEQ ID NO: 2151721 - RNA, 19 nt, Homo sapiens
  misc_RNA (1)...(19): siRNA sense strand
gagcaaggauugacuuaua

SEQ ID NO: 2151722 - RNA, 19 nt, Homo sapiens
  misc_RNA (1)...(19): siRNA sense strand
ggaacgagaugauaugauu

SEQ ID NO: 2151723 - RNA, 19 nt, Homo sapiens
  misc_RNA (1)...(19): siRNA sense strand
gcaaaugggugaccuguug

SEQ ID NO: 2151724 - RNA, 19 nt, Homo sapiens
  misc_RNA (1)...(19): siRNA sense strand
gaacuaagaaggcagauaa

SEQ ID NO: 2151725 - RNA, 19 nt, Homo sapiens
  misc_RNA (1)...(19): siRNA sense strand
gcaaagagguuucugaucu

SEQ ID NO: 2151726 - RNA, 19 nt, Homo sapiens
  misc_RNA (1)...(19): siRNA sense strand
gaagacaggugguggauuc

SEQ ID NO: 2151727 - RNA, 19 nt, Homo sapiens
  misc_RNA (1)...(19): siRNA sense strand
gaaggcagauaauguggua

SEQ ID NO: 2151728 - RNA, 19 nt, Homo sapiens
  misc_RNA (1)...(19): siRNA sense strand
gaagggaccuggaacacuu

SEQ ID NO: 2151729 - RNA, 19 nt, Homo sapiens
  misc_RNA (1)...(19): siRNA sense strand
ggagcaagauggauugauu

SEQ ID NO: 2151730 - RNA, 19 nt, Homo sapiens
  misc_RNA (1)...(19): siRNA sense strand
gaagagggaucagaacuug

SEQ ID NO: 2151731 - RNA, 19 nt, Homo sapiens
  misc_RNA (1)...(19): siRNA sense strand
gaaguggucugucgagaug

SEQ ID NO: 2151732 - RNA, 19 nt, Homo sapiens
  misc_RNA (1)...(19): siRNA sense strand
caagaaagaugagauugaa

SEQ ID NO: 2151733 - RNA, 19 nt, Homo sapiens
  misc_RNA (1)...(19): siRNA sense strand
gaaauauguucuagcaaga

SEQ ID NO: 2151734 - RNA, 19 nt, Homo sapiens
  misc_RNA (1)...(19): siRNA sense strand
gaagugggcuggcuauagu

SEQ ID NO: 2151735 - RNA, 19 nt, Homo sapiens
  misc_RNA (1)...(19): siRNA sense strand
gaucagaacuugaaaagaa

SEQ ID NO: 2151736 - RNA, 19 nt, Homo sapiens
  misc_RNA (1)...(19): siRNA sense strand
gaucaacaaucgagcuaaa

SEQ ID NO: 2151737 - RNA, 19 nt, Homo sapiens
  misc_RNA (1)...(19): siRNA sense strand
gaaucuggcucuucuuaug

SEQ ID NO: 2151738 - RNA, 19 nt, Homo sapiens
  misc_RNA (1)...(19): siRNA sense strand
cauggaaucuguaguggua

SEQ ID NO: 2151739 - RNA, 19 nt, Homo sapiens
  misc_RNA (1)...(19): siRNA sense strand
caagauggauugauugcuu

SEQ ID NO: 2151740 - RNA, 19 nt, Homo sapiens
  misc_RNA (1)...(19): siRNA sense strand
gcagauuugugccaaugua

SEQ ID NO: 2151741 - RNA, 19 nt, Homo sapiens
  misc_RNA (1)...(19): siRNA sense strand
ugaagaaacuguuagacuu

SEQ ID NO: 2151742 - RNA, 19 nt, Homo sapiens
  misc_RNA (1)...(19): siRNA sense strand
gaaauuauacugacagcuu

SEQ ID NO: 2151743 - RNA, 19 nt, Homo sapiens
  misc_RNA (1)...(19): siRNA sense strand
gaauuaaucccagaacuaa

SEQ ID NO: 2151744 - RNA, 19 nt, Homo sapiens
  misc_RNA (1)...(19): siRNA sense strand
guauugagguugaacuaaa

SEQ ID NO: 2151745 - RNA, 19 nt, Homo sapiens
  misc_RNA (1)...(19): siRNA sense strand
uacaagaugugcaugauaa

SEQ ID NO: 2151746 - RNA, 19 nt, Homo sapiens
  misc_RNA (1)...(19): siRNA sense strand
cagccaggauuucuuauuu

SEQ ID NO: 2151747 - RNA, 19 nt, Homo sapiens
  misc_RNA (1)...(19): siRNA sense strand
gaaaugcucuuuggagaag

SEQ ID NO: 2151748 - RNA, 19 nt, Homo sapiens
  misc_RNA (1)...(19): siRNA sense strand
gaacuugacguugauguaa

SEQ ID NO: 2151749 - RNA, 19 nt, Homo sapiens
  misc_RNA (1)...(19): siRNA sense strand
gagagacccuccaauguuc

SEQ ID NO: 2151750 - RNA, 19 nt, Homo sapiens
  misc_RNA (1)...(19): siRNA sense strand
ggaauuaaucccagaacua

SEQ ID NO: 2151751 - RNA, 19 nt, Homo sapiens
  misc_RNA (1)...(19): siRNA sense strand
gcucauuuccuucuaauuu

SEQ ID NO: 2151752 - RNA, 19 nt, Homo sapiens
  misc_RNA (1)...(19): siRNA sense strand
ugaagaugcucgaaugauu

SEQ ID NO: 2151753 - RNA, 19 nt, Homo sapiens
  misc_RNA (1)...(19): siRNA sense strand
acacaaaccugacuucauc

SEQ ID NO: 2151754 - RNA, 19 nt, Homo sapiens
  misc_RNA (1)...(19): siRNA sense strand
gaggaucgacaacugauua

SEQ ID NO: 2151755 - RNA, 19 nt, Homo sapiens
  misc_RNA (1)...(19): siRNA sense strand
cugaacagcucauuaaaga

SEQ ID NO: 2151756 - RNA, 19 nt, Homo sapiens
  misc_RNA (1)...(19): siRNA sense strand
ugaagacacucgcagcuuu

SEQ ID NO: 2151757 - RNA, 19 nt, Homo sapiens
  misc_RNA (1)...(19): siRNA sense strand
gaacagcucauuaaagaag

SEQ ID NO: 2151758 - RNA, 19 nt, Homo sapiens
  misc_RNA (1)...(19): siRNA sense strand
ggacauugaaggauuauau

SEQ ID NO: 2151759 - RNA, 19 nt, Homo sapiens
  misc_RNA (1)...(19): siRNA sense strand
gcaagaaagaugagauuga

SEQ ID NO: 2151760 - RNA, 19 nt, Homo sapiens
  misc_RNA (1)...(19): siRNA sense strand
ggaauuggcucugcugaca

SEQ ID NO: 2151761 - RNA, 19 nt, Homo sapiens
  misc_RNA (1)...(19): siRNA sense strand
gaguauaagucagaaacua

SEQ ID NO: 2151762 - RNA, 19 nt, Homo sapiens
  misc_RNA (1)...(19): siRNA sense strand
guggagagcucauuuccuu

SEQ ID NO: 2151763 - RNA, 19 nt, Homo sapiens
  misc_RNA (1)...(19): siRNA sense strand
caacacgcuuuacagauga

SEQ ID NO: 2151764 - RNA, 19 nt, Homo sapiens
  misc_RNA (1)...(19): siRNA sense strand
gaaacagagugcuaaugau

SEQ ID NO: 2151765 - RNA, 19 nt, Homo sapiens
  misc_RNA (1)...(19): siRNA sense strand
cagaaacaguuaauagaga

SEQ ID NO: 2151766 - RNA, 19 nt, Homo sapiens
  misc_RNA (1)...(19): siRNA sense strand
ggaauacacucagauacug

SEQ ID NO: 2151767 - RNA, 19 nt, Homo sapiens
  misc_RNA (1)...(19): siRNA sense strand
ccaccuggauuuagucuga

SEQ ID NO: 2151768 - RNA, 19 nt, Homo sapiens
  misc_RNA (1)...(19): siRNA sense strand
gagauaaaguaagcaagaa

SEQ ID NO: 2151769 - RNA, 19 nt, Homo sapiens
  misc_RNA (1)...(19): siRNA sense strand
caacugauuauucgugaua

SEQ ID NO: 2151770 - RNA, 19 nt, Homo sapiens
  misc_RNA (1)...(19): siRNA sense strand
ggaggcaacuaguagaaau

SEQ ID NO: 2151771 - RNA, 19 nt, Homo sapiens
  misc_RNA (1)...(19): siRNA sense strand
gccaagauccucuguugua

SEQ ID NO: 2151772 - RNA, 19 nt, Homo sapiens
  misc_RNA (1)...(19): siRNA sense strand
ggaaguugcugaggugguu

SEQ ID NO: 2151773 - RNA, 19 nt, Homo sapiens
  misc_RNA (1)...(19): siRNA sense strand
ggagaucccugagccuuug

SEQ ID NO: 2151774 - RNA, 19 nt, Homo sapiens
  misc_RNA (1)...(19): siRNA sense strand
aaccagaugucauggcuua

SEQ ID NO: 2151775 - RNA, 19 nt, Homo sapiens
  misc_RNA (1)...(19): siRNA sense strand
gaaacuaauggcuggauuu

SEQ ID NO: 2151776 - RNA, 19 nt, Homo sapiens
  misc_RNA (1)...(19): siRNA sense strand
uaaaguugguuggagauuu

SEQ ID NO: 2151777 - RNA, 19 nt, Homo sapiens
  misc_RNA (1)...(19): siRNA sense strand
caucuugaaucuucucauu

SEQ ID NO: 2151778 - RNA, 19 nt, Homo sapiens
  misc_RNA (1)...(19): siRNA sense strand
ggagauaaaguaagcaaga

SEQ ID NO: 2151779 - RNA, 19 nt, Homo sapiens
  misc_RNA (1)...(19): siRNA sense strand
guaaaugaagggucucuaa

SEQ ID NO: 2151780 - RNA, 19 nt, Homo sapiens
  misc_RNA (1)...(19): siRNA sense strand
ggaaugcaauccacccaau

SEQ ID NO: 2151781 - RNA, 19 nt, Homo sapiens
  misc_RNA (1)...(19): siRNA sense strand
ccagucaccuuuaggcaaa

SEQ ID NO: 2151782 - RNA, 19 nt, Homo sapiens
  misc_RNA (1)...(19): siRNA sense strand
gaaaucagcacuguacuuc

SEQ ID NO: 2151783 - RNA, 19 nt, Homo sapiens
  misc_RNA (1)...(19): siRNA sense strand
acaaggagaagaaaucaua

SEQ ID NO: 2151784 - RNA, 19 nt, Homo sapiens
  misc_RNA (1)...(19): siRNA sense strand
acacaugaccagaguauaa

SEQ ID NO: 2151785 - RNA, 19 nt, Homo sapiens
  misc_RNA (1)...(19): siRNA sense strand
cuaaugauuucuucagcua

SEQ ID NO: 2151786 - RNA, 19 nt, Homo sapiens
  misc_RNA (1)...(19): siRNA sense strand
ugaaacagagugcuaauga

SEQ ID NO: 2151787 - RNA, 19 nt, Homo sapiens
  misc_RNA (1)...(19): siRNA sense strand
ccagagaccugaugaacca

SEQ ID NO: 2151788 - RNA, 19 nt, Homo sapiens
  misc_RNA (1)...(19): siRNA sense strand
gcucacgucuaccaucauu

SEQ ID NO: 2151789 - RNA, 19 nt, Homo sapiens
  misc_RNA (1)...(19): siRNA sense strand
gcaauacuaauccagaauu

SEQ ID NO: 2151790 - RNA, 19 nt, Homo sapiens
  misc_RNA (1)...(19): siRNA sense strand
acaauucacucucgucuuc

SEQ ID NO: 2151791 - RNA, 19 nt, Homo sapiens
  misc_RNA (1)...(19): siRNA sense strand
cauacaggcucuugucaga

SEQ ID NO: 2151792 - RNA, 19 nt, Homo sapiens
  misc_RNA (1)...(19): siRNA sense strand
aaacagagugcuaaugauu

SEQ ID NO: 2151793 - RNA, 19 nt, Homo sapiens
  misc_RNA (1)...(19): siRNA sense strand
ugaagaugcagaagaauuu

SEQ ID NO: 2151794 - RNA, 19 nt, Homo sapiens
  misc_RNA (1)...(19): siRNA sense strand
gcuguucaccuucuugaua

SEQ ID NO: 2151795 - RNA, 19 nt, Homo sapiens
  misc_RNA (1)...(19): siRNA sense strand
ugaagaugcuccagggauu

SEQ ID NO: 2151796 - RNA, 19 nt, Homo sapiens
  misc_RNA (1)...(19): siRNA sense strand
acaacacgcuuuacagaug

SEQ ID NO: 2151797 - RNA, 19 nt, Homo sapiens
  misc_RNA (1)...(19): siRNA sense strand
gagaaucacuacaaaagaa

SEQ ID NO: 2151798 - RNA, 19 nt, Homo sapiens
  misc_RNA (1)...(19): siRNA sense strand
ucacaagaguggcaaagau

SEQ ID NO: 2151799 - RNA, 19 nt, Homo sapiens
  misc_RNA (1)...(19): siRNA sense strand
guagacagcuugguagaag

SEQ ID NO: 2151800 - RNA, 19 nt, Homo sapiens
  misc_RNA (1)...(19): siRNA sense strand
gcucucugcuuuauuacuu

SEQ ID NO: 2151801 - RNA, 19 nt, Homo sapiens
  misc_RNA (1)...(19): siRNA sense strand
uaugaaaacugccucaaua

SEQ ID NO: 2151802 - RNA, 19 nt, Homo sapiens
  misc_RNA (1)...(19): siRNA sense strand
ucuaauagucuguccuuua

SEQ ID NO: 2151803 - RNA, 19 nt, Homo sapiens
  misc_RNA (1)...(19): siRNA sense strand
ggagaaagcaguacagcau

SEQ ID NO: 2151804 - RNA, 19 nt, Homo sapiens
  misc_RNA (1)...(19): siRNA sense strand
ucaacuggcucuaauaguc

SEQ ID NO: 2151805 - RNA, 19 nt, Homo sapiens
  misc_RNA (1)...(19): siRNA sense strand
gugccaauguaauggaaua

SEQ ID NO: 2151806 - RNA, 19 nt, Homo sapiens
  misc_RNA (1)...(19): siRNA sense strand
ggagggagauaaaguaagc

SEQ ID NO: 2151807 - RNA, 19 nt, Homo sapiens
  misc_RNA (1)...(19): siRNA sense strand
ugacguugauguaaaugaa

SEQ ID NO: 2151808 - RNA, 19 nt, Homo sapiens
  misc_RNA (1)...(19): siRNA sense strand
ggaaaugcucuuuggagaa

SEQ ID NO: 2151809 - RNA, 19 nt, Homo sapiens
  misc_RNA (1)...(19): siRNA sense strand
gugccaagauccucuguug

SEQ ID NO: 2151810 - RNA, 19 nt, Homo sapiens
  misc_RNA (1)...(19): siRNA sense strand
gaaacugccugggcuccaa

SEQ ID NO: 2151811 - RNA, 19 nt, Homo sapiens
  misc_RNA (1)...(19): siRNA sense strand
cuaaacugcuuucccuuug

SEQ ID NO: 2151812 - RNA, 19 nt, Homo sapiens
  misc_RNA (1)...(19): siRNA sense strand
gaagaugaccguacuuugc

SEQ ID NO: 2151813 - RNA, 19 nt, Homo sapiens
  misc_RNA (1)...(19): siRNA sense strand
agaauugucuccguggaua

SEQ ID NO: 2151814 - RNA, 19 nt, Homo sapiens
  misc_RNA (1)...(19): siRNA sense strand
gaucgacaacugauuauuc

SEQ ID NO: 2151815 - RNA, 19 nt, Homo sapiens
  misc_RNA (1)...(19): siRNA sense strand
ucuuguagcugaaguaaau

SEQ ID NO: 2151816 - RNA, 19 nt, Homo sapiens
  misc_RNA (1)...(19): siRNA sense strand
gaaacaagaauccacaucu

SEQ ID NO: 2151817 - RNA, 19 nt, Homo sapiens
  misc_RNA (1)...(19): siRNA sense strand
ugguaaacauugccagaua

SEQ ID NO: 2151818 - RNA, 19 nt, Homo sapiens
  misc_RNA (1)...(19): siRNA sense strand
gaaugagucaccaauguug

SEQ ID NO: 2151819 - RNA, 19 nt, Homo sapiens
  misc_RNA (1)...(19): siRNA sense strand
cgacuaucaugggcucuua

SEQ ID NO: 2151820 - RNA, 19 nt, Homo sapiens
  misc_RNA (1)...(19): siRNA sense strand
guaugcagauggguaauga

SEQ ID NO: 2151821 - RNA, 19 nt, Homo sapiens
  misc_RNA (1)...(19): siRNA sense strand
gagcaaggauugacuuaua

SEQ ID NO: 2151822 - RNA, 19 nt, Homo sapiens
  misc_RNA (1)...(19): siRNA sense strand
ggaacgagaugauaugauu

SEQ ID NO: 2151823 - RNA, 19 nt, Homo sapiens
  misc_RNA (1)...(19): siRNA sense strand
gcaaaugggugaccuguug

SEQ ID NO: 2151824 - RNA, 19 nt, Homo sapiens
  misc_RNA (1)...(19): siRNA sense strand
gaacuaagaaggcagauaa

SEQ ID NO: 2151825 - RNA, 19 nt, Homo sapiens
  misc_RNA (1)...(19): siRNA sense strand
gcaaagagguuucugaucu

SEQ ID NO: 2151826 - RNA, 19 nt, Homo sapiens
  misc_RNA (1)...(19): siRNA sense strand
gaagacaggugguggauuc

SEQ ID NO: 2151827 - RNA, 19 nt, Homo sapiens
  misc_RNA (1)...(19): siRNA sense strand
gaaggcagauaauguggua

SEQ ID NO: 2151828 - RNA, 19 nt, Homo sapiens
  misc_RNA (1)...(19): siRNA sense strand
gaagggaccuggaacacuu

SEQ ID NO: 2151829 - RNA, 19 nt, Homo sapiens
  misc_RNA (1)...(19): siRNA sense strand
ggagcaagauggauugauu

SEQ ID NO: 2151830 - RNA, 19 nt, Homo sapiens
  misc_RNA (1)...(19): siRNA sense strand
gaagagggaucagaacuug

SEQ ID NO: 2151831 - RNA, 19 nt, Homo sapiens
  misc_RNA (1)...(19): siRNA sense strand
gaaguggucugucgagaug

SEQ ID NO: 2151832 - RNA, 19 nt, Homo sapiens
  misc_RNA (1)...(19): siRNA sense strand
caagaaagaugagauugaa

SEQ ID NO: 2151833 - RNA, 19 nt, Homo sapiens
  misc_RNA (1)...(19): siRNA sense strand
gaaauauguucuagcaaga

SEQ ID NO: 2151834 - RNA, 19 nt, Homo sapiens
  misc_RNA (1)...(19): siRNA sense strand
gaagugggcuggcuauagu

SEQ ID NO: 2151835 - RNA, 19 nt, Homo sapiens
  misc_RNA (1)...(19): siRNA sense strand
gaucagaacuugaaaagaa

SEQ ID NO: 2151836 - RNA, 19 nt, Homo sapiens
  misc_RNA (1)...(19): siRNA sense strand
gaucaacaaucgagcuaaa

SEQ ID NO: 2151837 - RNA, 19 nt, Homo sapiens
  misc_RNA (1)...(19): siRNA sense strand
gaaucuggcucuucuuaug

SEQ ID NO: 2151838 - RNA, 19 nt, Homo sapiens
  misc_RNA (1)...(19): siRNA sense strand
cauggaaucuguaguggua

SEQ ID NO: 2151839 - RNA, 19 nt, Homo sapiens
  misc_RNA (1)...(19): siRNA sense strand
caagauggauugauugcuu

SEQ ID NO: 2151840 - RNA, 19 nt, Homo sapiens
  misc_RNA (1)...(19): siRNA sense strand
gcagauuugugccaaugua

SEQ ID NO: 2151841 - RNA, 19 nt, Homo sapiens
  misc_RNA (1)...(19): siRNA sense strand
ugaagaaacuguuagacuu

SEQ ID NO: 2151842 - RNA, 19 nt, Homo sapiens
  misc_RNA (1)...(19): siRNA sense strand
gaaauuauacugacagcuu

SEQ ID NO: 2151843 - RNA, 19 nt, Homo sapiens
  misc_RNA (1)...(19): siRNA sense strand
gaauuaaucccagaacuaa

SEQ ID NO: 2151844 - RNA, 19 nt, Homo sapiens
  misc_RNA (1)...(19): siRNA sense strand
guauugagguugaacuaaa

SEQ ID NO: 2151845 - RNA, 19 nt, Homo sapiens
  misc_RNA (1)...(19): siRNA sense strand
uacaagaugugcaugauaa

SEQ ID NO: 2151846 - RNA, 19 nt, Homo sapiens
  misc_RNA (1)...(19): siRNA sense strand
cagccaggauuucuuauuu

SEQ ID NO: 2151847 - RNA, 19 nt, Homo sapiens
  misc_RNA (1)...(19): siRNA sense strand
gaaaugcucuuuggagaag

SEQ ID NO: 2151848 - RNA, 19 nt, Homo sapiens
  misc_RNA (1)...(19): siRNA sense strand
gaacuugacguugauguaa

SEQ ID NO: 2151849 - RNA, 19 nt, Homo sapiens
  misc_RNA (1)...(19): siRNA sense strand
gagagacccuccaauguuc

SEQ ID NO: 2151850 - RNA, 19 nt, Homo sapiens
  misc_RNA (1)...(19): siRNA sense strand
ggaauuaaucccagaacua

SEQ ID NO: 2151851 - RNA, 19 nt, Homo sapiens
  misc_RNA (1)...(19): siRNA sense strand
gcucauuuccuucuaauuu

SEQ ID NO: 2151852 - RNA, 19 nt, Homo sapiens
  misc_RNA (1)...(19): siRNA sense strand
ugaagaugcucgaaugauu

SEQ ID NO: 2151853 - RNA, 19 nt, Homo sapiens
  misc_RNA (1)...(19): siRNA sense strand
acacaaaccugacuucauc

SEQ ID NO: 2151854 - RNA, 19 nt, Homo sapiens
  misc_RNA (1)...(19): siRNA sense strand
gaggaucgacaacugauua

SEQ ID NO: 2151855 - RNA, 19 nt, Homo sapiens
  misc_RNA (1)...(19): siRNA sense strand
cugaacagcucauuaaaga

SEQ ID NO: 2151856 - RNA, 19 nt, Homo sapiens
  misc_RNA (1)...(19): siRNA sense strand
ugaagacacucgcagcuuu

SEQ ID NO: 2151857 - RNA, 19 nt, Homo sapiens
  misc_RNA (1)...(19): siRNA sense strand
gaacagcucauuaaagaag

SEQ ID NO: 2151858 - RNA, 19 nt, Homo sapiens
  misc_RNA (1)...(19): siRNA sense strand
ggacauugaaggauuauau

SEQ ID NO: 2151859 - RNA, 19 nt, Homo sapiens
  misc_RNA (1)...(19): siRNA sense strand
gcaagaaagaugagauuga

SEQ ID NO: 2151860 - RNA, 19 nt, Homo sapiens
  misc_RNA (1)...(19): siRNA sense strand
ggaauuggcucugcugaca

SEQ ID NO: 2151861 - RNA, 19 nt, Homo sapiens
  misc_RNA (1)...(19): siRNA sense strand
gaguauaagucagaaacua

SEQ ID NO: 2151862 - RNA, 19 nt, Homo sapiens
  misc_RNA (1)...(19): siRNA sense strand
guggagagcucauuuccuu

SEQ ID NO: 2151863 - RNA, 19 nt, Homo sapiens
  misc_RNA (1)...(19): siRNA sense strand
caacacgcuuuacagauga

SEQ ID NO: 2151864 - RNA, 19 nt, Homo sapiens
  misc_RNA (1)...(19): siRNA sense strand
gaaacagagugcuaaugau

SEQ ID NO: 2151865 - RNA, 19 nt, Homo sapiens
  misc_RNA (1)...(19): siRNA sense strand
cagaaacaguuaauagaga

SEQ ID NO: 2151866 - RNA, 19 nt, Homo sapiens
  misc_RNA (1)...(19): siRNA sense strand
ggaauacacucagauacug

SEQ ID NO: 2151867 - RNA, 19 nt, Homo sapiens
  misc_RNA (1)...(19): siRNA sense strand
ccaccuggauuuagucuga

SEQ ID NO: 2151868 - RNA, 19 nt, Homo sapiens
  misc_RNA (1)...(19): siRNA sense strand
gagauaaaguaagcaagaa

SEQ ID NO: 2151869 - RNA, 19 nt, Homo sapiens
  misc_RNA (1)...(19): siRNA sense strand
caacugauuauucgugaua

SEQ ID NO: 2151870 - RNA, 19 nt, Homo sapiens
  misc_RNA (1)...(19): siRNA sense strand
ggaggcaacuaguagaaau

SEQ ID NO: 2151871 - RNA, 19 nt, Homo sapiens
  misc_RNA (1)...(19): siRNA sense strand
gccaagauccucuguugua

SEQ ID NO: 2151872 - RNA, 19 nt, Homo sapiens
  misc_RNA (1)...(19): siRNA sense strand
ggaaguugcugaggugguu

SEQ ID NO: 2151873 - RNA, 19 nt, Homo sapiens
  misc_RNA (1)...(19): siRNA sense strand
ggagaucccugagccuuug

SEQ ID NO: 2151874 - RNA, 19 nt, Homo sapiens
  misc_RNA (1)...(19): siRNA sense strand
aaccagaugucauggcuua

SEQ ID NO: 2151875 - RNA, 19 nt, Homo sapiens
  misc_RNA (1)...(19): siRNA sense strand
gaaacuaauggcuggauuu

SEQ ID NO: 2151876 - RNA, 19 nt, Homo sapiens
  misc_RNA (1)...(19): siRNA sense strand
uaaaguugguuggagauuu

SEQ ID NO: 2151877 - RNA, 19 nt, Homo sapiens
  misc_RNA (1)...(19): siRNA sense strand
caucuugaaucuucucauu

SEQ ID NO: 2151878 - RNA, 19 nt, Homo sapiens
  misc_RNA (1)...(19): siRNA sense strand
ggagauaaaguaagcaaga

SEQ ID NO: 2151879 - RNA, 19 nt, Homo sapiens
  misc_RNA (1)...(19): siRNA sense strand
guaaaugaagggucucuaa

SEQ ID NO: 2151880 - RNA, 19 nt, Homo sapiens
  misc_RNA (1)...(19): siRNA sense strand
ggaaugcaauccacccaau

SEQ ID NO: 2151881 - RNA, 19 nt, Homo sapiens
  misc_RNA (1)...(19): siRNA sense strand
ccagucaccuuuaggcaaa

SEQ ID NO: 2151882 - RNA, 19 nt, Homo sapiens
  misc_RNA (1)...(19): siRNA sense strand
gaaaucagcacuguacuuc

SEQ ID NO: 2151883 - RNA, 19 nt, Homo sapiens
  misc_RNA (1)...(19): siRNA sense strand
acaaggagaagaaaucaua

SEQ ID NO: 2151884 - RNA, 19 nt, Homo sapiens
  misc_RNA (1)...(19): siRNA sense strand
acacaugaccagaguauaa

SEQ ID NO: 2151885 - RNA, 19 nt, Homo sapiens
  misc_RNA (1)...(19): siRNA sense strand
cuaaugauuucuucagcua

SEQ ID NO: 2151886 - RNA, 19 nt, Homo sapiens
  misc_RNA (1)...(19): siRNA sense strand
ugaaacagagugcuaauga

SEQ ID NO: 2151887 - RNA, 19 nt, Homo sapiens
  misc_RNA (1)...(19): siRNA sense strand
ccagagaccugaugaacca

SEQ ID NO: 2151888 - RNA, 19 nt, Homo sapiens
  misc_RNA (1)...(19): siRNA sense strand
gcucacgucuaccaucauu

SEQ ID NO: 2151889 - RNA, 19 nt, Homo sapiens
  misc_RNA (1)...(19): siRNA sense strand
gcaauacuaauccagaauu

SEQ ID NO: 2151890 - RNA, 19 nt, Homo sapiens
  misc_RNA (1)...(19): siRNA sense strand
acaauucacucucgucuuc

SEQ ID NO: 2151891 - RNA, 19 nt, Homo sapiens
  misc_RNA (1)...(19): siRNA sense strand
cauacaggcucuugucaga

SEQ ID NO: 2151892 - RNA, 19 nt, Homo sapiens
  misc_RNA (1)...(19): siRNA sense strand
aaacagagugcuaaugauu

SEQ ID NO: 2151893 - RNA, 19 nt, Homo sapiens
  misc_RNA (1)...(19): siRNA sense strand
ugaagaugcagaagaauuu

SEQ ID NO: 2151894 - RNA, 19 nt, Homo sapiens
  misc_RNA (1)...(19): siRNA sense strand
gcuguucaccuucuugaua

SEQ ID NO: 2151895 - RNA, 19 nt, Homo sapiens
  misc_RNA (1)...(19): siRNA sense strand
ugaagaugcuccagggauu

SEQ ID NO: 2151896 - RNA, 19 nt, Homo sapiens
  misc_RNA (1)...(19): siRNA sense strand
acaacacgcuuuacagaug

SEQ ID NO: 2151897 - RNA, 19 nt, Homo sapiens
  misc_RNA (1)...(19): siRNA sense strand
gagaaucacuacaaaagaa

SEQ ID NO: 2151898 - RNA, 19 nt, Homo sapiens
  misc_RNA (1)...(19): siRNA sense strand
ucacaagaguggcaaagau

SEQ ID NO: 2151899 - RNA, 19 nt, Homo sapiens
  misc_RNA (1)...(19): siRNA sense strand
guagacagcuugguagaag

SEQ ID NO: 2151900 - RNA, 19 nt, Homo sapiens
  misc_RNA (1)...(19): siRNA sense strand
gcucucugcuuuauuacuu

SEQ ID NO: 2151901 - RNA, 19 nt, Homo sapiens
  misc_RNA (1)...(19): siRNA sense strand
uaugaaaacugccucaaua

SEQ ID NO: 2151902 - RNA, 19 nt, Homo sapiens
  misc_RNA (1)...(19): siRNA sense strand
ucuaauagucuguccuuua

SEQ ID NO: 2151903 - RNA, 19 nt, Homo sapiens
  misc_RNA (1)...(19): siRNA sense strand
ggagaaagcaguacagcau

SEQ ID NO: 2151904 - RNA, 19 nt, Homo sapiens
  misc_RNA (1)...(19): siRNA sense strand
ucaacuggcucuaauaguc

SEQ ID NO: 2151905 - RNA, 19 nt, Homo sapiens
  misc_RNA (1)...(19): siRNA sense strand
gugccaauguaauggaaua

SEQ ID NO: 2151906 - RNA, 19 nt, Homo sapiens
  misc_RNA (1)...(19): siRNA sense strand
ggagggagauaaaguaagc

SEQ ID NO: 2151907 - RNA, 19 nt, Homo sapiens
  misc_RNA (1)...(19): siRNA sense strand
ugacguugauguaaaugaa

SEQ ID NO: 2151908 - RNA, 19 nt, Homo sapiens
  misc_RNA (1)...(19): siRNA sense strand
ggaaaugcucuuuggagaa

SEQ ID NO: 2151909 - RNA, 19 nt, Homo sapiens
  misc_RNA (1)...(19): siRNA sense strand
gugccaagauccucuguug

SEQ ID NO: 2151910 - RNA, 19 nt, Homo sapiens
  misc_RNA (1)...(19): siRNA sense strand
gaaacugccugggcuccaa

SEQ ID NO: 2151911 - RNA, 19 nt, Homo sapiens
  misc_RNA (1)...(19): siRNA sense strand
cuaaacugcuuucccuuug

SEQ ID NO: 2151912 - RNA, 19 nt, Homo sapiens
  misc_RNA (1)...(19): siRNA sense strand
gaagaugaccguacuuugc

SEQ ID NO: 2151913 - RNA, 19 nt, Homo sapiens
  misc_RNA (1)...(19): siRNA sense strand
agaauugucuccguggaua

SEQ ID NO: 2151914 - RNA, 19 nt, Homo sapiens
  misc_RNA (1)...(19): siRNA sense strand
gaucgacaacugauuauuc

SEQ ID NO: 2151915 - RNA, 19 nt, Homo sapiens
  misc_RNA (1)...(19): siRNA sense strand
ucuuguagcugaaguaaau

SEQ ID NO: 2151916 - RNA, 19 nt, Homo sapiens
  misc_RNA (1)...(19): siRNA sense strand
gaaacaagaauccacaucu

SEQ ID NO: 2151917 - RNA, 19 nt, Homo sapiens
  misc_RNA (1)...(19): siRNA sense strand
ugguaaacauugccagaua

SEQ ID NO: 2151918 - RNA, 19 nt, Homo sapiens
  misc_RNA (1)...(19): siRNA sense strand
gaaugagucaccaauguug

SEQ ID NO: 2151919 - RNA, 19 nt, Homo sapiens
  misc_RNA (1)...(19): siRNA sense strand
cgacuaucaugggcucuua

SEQ ID NO: 2151920 - RNA, 19 nt, Homo sapiens
  misc_RNA (1)...(19): siRNA sense strand
guaugcagauggguaauga

SEQ ID NO: 2151921 - RNA, 19 nt, Homo sapiens
  misc_RNA (1)...(19): siRNA sense strand
ucaacaccgucuacauuua

SEQ ID NO: 2151922 - RNA, 19 nt, Homo sapiens
  misc_RNA (1)...(19): siRNA sense strand
uuacagaucugggucauau

SEQ ID NO: 2151923 - RNA, 19 nt, Homo sapiens
  misc_RNA (1)...(19): siRNA sense strand
caucguggccuucaaguuu

SEQ ID NO: 2151924 - RNA, 19 nt, Homo sapiens
  misc_RNA (1)...(19): siRNA sense strand
gaaauaccgaggcuauaug

SEQ ID NO: 2151925 - RNA, 19 nt, Homo sapiens
  misc_RNA (1)...(19): siRNA sense strand
ucugguagcugcaaacuuc

SEQ ID NO: 2151926 - RNA, 19 nt, Homo sapiens
  misc_RNA (1)...(19): siRNA sense strand
auaccgaggcuauauguua

SEQ ID NO: 2151927 - RNA, 19 nt, Homo sapiens
  misc_RNA (1)...(19): siRNA sense strand
gcagaccuauuggaugcua

SEQ ID NO: 2151928 - RNA, 19 nt, Homo sapiens
  misc_RNA (1)...(19): siRNA sense strand
ggucugugguucaaaguca

SEQ ID NO: 2151929 - RNA, 19 nt, Homo sapiens
  misc_RNA (1)...(19): siRNA sense strand
cgaaauaccgaggcuauau

SEQ ID NO: 2151930 - RNA, 19 nt, Homo sapiens
  misc_RNA (1)...(19): siRNA sense strand
ggagcgcguugccaagaug

SEQ ID NO: 2151931 - RNA, 19 nt, Homo sapiens
  misc_RNA (1)...(19): siRNA sense strand
gaagauuugcagaccuauu

SEQ ID NO: 2151932 - RNA, 19 nt, Homo sapiens
  misc_RNA (1)...(19): siRNA sense strand
uuacacagcugaggucuac

SEQ ID NO: 2151933 - RNA, 19 nt, Homo sapiens
  misc_RNA (1)...(19): siRNA sense strand
aggaagauuugcagaccua

SEQ ID NO: 2151934 - RNA, 19 nt, Homo sapiens
  misc_RNA (1)...(19): siRNA sense strand
ggacuuggucugugguuca

SEQ ID NO: 2151935 - RNA, 19 nt, Homo sapiens
  misc_RNA (1)...(19): siRNA sense strand
gaaucugcccgguucaaug

SEQ ID NO: 2151936 - RNA, 19 nt, Homo sapiens
  misc_RNA (1)...(19): siRNA sense strand
cugauuggcuuccucuuca

SEQ ID NO: 2151937 - RNA, 19 nt, Homo sapiens
  misc_RNA (1)...(19): siRNA sense strand
ccaccacgaugcgcgcuuu

SEQ ID NO: 2151938 - RNA, 19 nt, Homo sapiens
  misc_RNA (1)...(19): siRNA sense strand
gguuaaucauaaagacuga

SEQ ID NO: 2151939 - RNA, 19 nt, Homo sapiens
  misc_RNA (1)...(19): siRNA sense strand
ggucauauggcuuggaauc

SEQ ID NO: 2151940 - RNA, 19 nt, Homo sapiens
  misc_RNA (1)...(19): siRNA sense strand
ggcuauauguuacccuugu

SEQ ID NO: 2151941 - RNA, 19 nt, Homo sapiens
  misc_RNA (1)...(19): siRNA sense strand
cuucaacaccgucuacauu

SEQ ID NO: 2151942 - RNA, 19 nt, Homo sapiens
  misc_RNA (1)...(19): siRNA sense strand
uuacggaccacauuacaga

SEQ ID NO: 2151943 - RNA, 19 nt, Homo sapiens
  misc_RNA (1)...(19): siRNA sense strand
caacaccgucuacauuuac

SEQ ID NO: 2151944 - RNA, 19 nt, Homo sapiens
  misc_RNA (1)...(19): siRNA sense strand
aagauuugcagaccuauug

SEQ ID NO: 2151945 - RNA, 19 nt, Homo sapiens
  misc_RNA (1)...(19): siRNA sense strand
gcugagggcucugguagcu

SEQ ID NO: 2151946 - RNA, 19 nt, Homo sapiens
  misc_RNA (1)...(19): siRNA sense strand
ggaccacauuacagaucug

SEQ ID NO: 2151947 - RNA, 19 nt, Homo sapiens
  misc_RNA (1)...(19): siRNA sense strand
gaaucucuuuugccuacua

SEQ ID NO: 2151948 - RNA, 19 nt, Homo sapiens
  misc_RNA (1)...(19): siRNA sense strand
cauauggcuuggaaucucu

SEQ ID NO: 2151949 - RNA, 19 nt, Homo sapiens
  misc_RNA (1)...(19): siRNA sense strand
aucguggccuucaaguuua

SEQ ID NO: 2151950 - RNA, 19 nt, Homo sapiens
  misc_RNA (1)...(19): siRNA sense strand
ucauauggcuuggaaucuc

SEQ ID NO: 2151951 - RNA, 19 nt, Homo sapiens
  misc_RNA (1)...(19): siRNA sense strand
gcucccugcucaucauugg

SEQ ID NO: 2151952 - RNA, 19 nt, Homo sapiens
  misc_RNA (1)...(19): siRNA sense strand
uaccgaggcuauauguuac

SEQ ID NO: 2151953 - RNA, 19 nt, Homo sapiens
  misc_RNA (1)...(19): siRNA sense strand
gggcucugguagcugcaaa

SEQ ID NO: 2151954 - RNA, 19 nt, Homo sapiens
  misc_RNA (1)...(19): siRNA sense strand
cacgaaauaccgaggcuau

SEQ ID NO: 2151955 - RNA, 19 nt, Homo sapiens
  misc_RNA (1)...(19): siRNA sense strand
ugggucauauggcuuggaa

SEQ ID NO: 2151956 - RNA, 19 nt, Homo sapiens
  misc_RNA (1)...(19): siRNA sense strand
gacuuggucugugguucaa

SEQ ID NO: 2151957 - RNA, 19 nt, Homo sapiens
  misc_RNA (1)...(19): siRNA sense strand
aaauaccgaggcuauaugu

SEQ ID NO: 2151958 - RNA, 19 nt, Homo sapiens
  misc_RNA (1)...(19): siRNA sense strand
cugcuacugccacauguuu

SEQ ID NO: 2151959 - RNA, 19 nt, Homo sapiens
  misc_RNA (1)...(19): siRNA sense strand
uucaacaccgucuacauuu

SEQ ID NO: 2151960 - RNA, 19 nt, Homo sapiens
  misc_RNA (1)...(19): siRNA sense strand
gacuaucggaccaugauca

SEQ ID NO: 2151961 - RNA, 19 nt, Homo sapiens
  misc_RNA (1)...(19): siRNA sense strand
aaucugcccgguucaaugu

SEQ ID NO: 2151962 - RNA, 19 nt, Homo sapiens
  misc_RNA (1)...(19): siRNA sense strand
gcuauauguuacccuuguc

SEQ ID NO: 2151963 - RNA, 19 nt, Homo sapiens
  misc_RNA (1)...(19): siRNA sense strand
auauuuacggaccacauua

SEQ ID NO: 2151964 - RNA, 19 nt, Homo sapiens
  misc_RNA (1)...(19): siRNA sense strand
aauauuuacggaccacauu

SEQ ID NO: 2151965 - RNA, 19 nt, Homo sapiens
  misc_RNA (1)...(19): siRNA sense strand
ucaacaccgucuacauuua

SEQ ID NO: 2151966 - RNA, 19 nt, Homo sapiens
  misc_RNA (1)...(19): siRNA sense strand
uuacagaucugggucauau

SEQ ID NO: 2151967 - RNA, 19 nt, Homo sapiens
  misc_RNA (1)...(19): siRNA sense strand
caucguggccuucaaguuu

SEQ ID NO: 2151968 - RNA, 19 nt, Homo sapiens
  misc_RNA (1)...(19): siRNA sense strand
gaaauaccgaggcuauaug

SEQ ID NO: 2151969 - RNA, 19 nt, Homo sapiens
  misc_RNA (1)...(19): siRNA sense strand
ucugguagcugcaaacuuc

SEQ ID NO: 2151970 - RNA, 19 nt, Homo sapiens
  misc_RNA (1)...(19): siRNA sense strand
auaccgaggcuauauguua

SEQ ID NO: 2151971 - RNA, 19 nt, Homo sapiens
  misc_RNA (1)...(19): siRNA sense strand
gcagaccuauuggaugcua

SEQ ID NO: 2151972 - RNA, 19 nt, Homo sapiens
  misc_RNA (1)...(19): siRNA sense strand
ggucugugguucaaaguca

SEQ ID NO: 2151973 - RNA, 19 nt, Homo sapiens
  misc_RNA (1)...(19): siRNA sense strand
ccuccuggcugacagauau

SEQ ID NO: 2151974 - RNA, 19 nt, Homo sapiens
  misc_RNA (1)...(19): siRNA sense strand
cgaaauaccgaggcuauau

SEQ ID NO: 2151975 - RNA, 19 nt, Homo sapiens
  misc_RNA (1)...(19): siRNA sense strand
ggagcgcguugccaagaug

SEQ ID NO: 2151976 - RNA, 19 nt, Homo sapiens
  misc_RNA (1)...(19): siRNA sense strand
gaagauuugcagaccuauu

SEQ ID NO: 2151977 - RNA, 19 nt, Homo sapiens
  misc_RNA (1)...(19): siRNA sense strand
uuacacagcugaggucuac

SEQ ID NO: 2151978 - RNA, 19 nt, Homo sapiens
  misc_RNA (1)...(19): siRNA sense strand
aggaagauuugcagaccua

SEQ ID NO: 2151979 - RNA, 19 nt, Homo sapiens
  misc_RNA (1)...(19): siRNA sense strand
ggacuuggucugugguuca

SEQ ID NO: 2151980 - RNA, 19 nt, Homo sapiens
  misc_RNA (1)...(19): siRNA sense strand
gaaucugcccgguucaaug

SEQ ID NO: 2151981 - RNA, 19 nt, Homo sapiens
  misc_RNA (1)...(19): siRNA sense strand
cugauuggcuuccucuuca

SEQ ID NO: 2151982 - RNA, 19 nt, Homo sapiens
  misc_RNA (1)...(19): siRNA sense strand
ccaccacgaugcgcgcuuu

SEQ ID NO: 2151983 - RNA, 19 nt, Homo sapiens
  misc_RNA (1)...(19): siRNA sense strand
gguuaaucauaaagacuga

SEQ ID NO: 2151984 - RNA, 19 nt, Homo sapiens
  misc_RNA (1)...(19): siRNA sense strand
ggucauauggcuuggaauc

SEQ ID NO: 2151985 - RNA, 19 nt, Homo sapiens
  misc_RNA (1)...(19): siRNA sense strand
ggcuauauguuacccuugu

SEQ ID NO: 2151986 - RNA, 19 nt, Homo sapiens
  misc_RNA (1)...(19): siRNA sense strand
cuucaacaccgucuacauu

SEQ ID NO: 2151987 - RNA, 19 nt, Homo sapiens
  misc_RNA (1)...(19): siRNA sense strand
uuacggaccacauuacaga

SEQ ID NO: 2151988 - RNA, 19 nt, Homo sapiens
  misc_RNA (1)...(19): siRNA sense strand
caacaccgucuacauuuac

SEQ ID NO: 2151989 - RNA, 19 nt, Homo sapiens
  misc_RNA (1)...(19): siRNA sense strand
aagauuugcagaccuauug

SEQ ID NO: 2151990 - RNA, 19 nt, Homo sapiens
  misc_RNA (1)...(19): siRNA sense strand
gcugagggcucugguagcu

SEQ ID NO: 2151991 - RNA, 19 nt, Homo sapiens
  misc_RNA (1)...(19): siRNA sense strand
ggaccacauuacagaucug

SEQ ID NO: 2151992 - RNA, 19 nt, Homo sapiens
  misc_RNA (1)...(19): siRNA sense strand
gaaucucuuuugccuacua

SEQ ID NO: 2151993 - RNA, 19 nt, Homo sapiens
  misc_RNA (1)...(19): siRNA sense strand
cauauggcuuggaaucucu

SEQ ID NO: 2151994 - RNA, 19 nt, Homo sapiens
  misc_RNA (1)...(19): siRNA sense strand
aucguggccuucaaguuua

SEQ ID NO: 2151995 - RNA, 19 nt, Homo sapiens
  misc_RNA (1)...(19): siRNA sense strand
ucauauggcuuggaaucuc

SEQ ID NO: 2151996 - RNA, 19 nt, Homo sapiens
  misc_RNA (1)...(19): siRNA sense strand
uaccgaggcuauauguuac

SEQ ID NO: 2151997 - RNA, 19 nt, Homo sapiens
  misc_RNA (1)...(19): siRNA sense strand
gggcucugguagcugcaaa

SEQ ID NO: 2151998 - RNA, 19 nt, Homo sapiens
  misc_RNA (1)...(19): siRNA sense strand
gcucccugcucaucauugg

SEQ ID NO: 2151999 - RNA, 19 nt, Homo sapiens
  misc_RNA (1)...(19): siRNA sense strand
cacgaaauaccgaggcuau

SEQ ID NO: 2152000 - RNA, 19 nt, Homo sapiens
  misc_RNA (1)...(19): siRNA sense strand
ugggucauauggcuuggaa

SEQ ID NO: 2152001 - RNA, 19 nt, Homo sapiens
  misc_RNA (1)...(19): siRNA sense strand
gacuuggucugugguucaa

SEQ ID NO: 2152002 - RNA, 19 nt, Homo sapiens
  misc_RNA (1)...(19): siRNA sense strand
aaauaccgaggcuauaugu

SEQ ID NO: 2152003 - RNA, 19 nt, Homo sapiens
  misc_RNA (1)...(19): siRNA sense strand
cugcuacugccacauguuu

SEQ ID NO: 2152004 - RNA, 19 nt, Homo sapiens
  misc_RNA (1)...(19): siRNA sense strand
uucaacaccgucuacauuu

SEQ ID NO: 2152005 - RNA, 19 nt, Homo sapiens
  misc_RNA (1)...(19): siRNA sense strand
gacuaucggaccaugauca

SEQ ID NO: 2152006 - RNA, 19 nt, Homo sapiens
  misc_RNA (1)...(19): siRNA sense strand
aaucugcccgguucaaugu

SEQ ID NO: 2152007 - RNA, 19 nt, Homo sapiens
  misc_RNA (1)...(19): siRNA sense strand
gcuauauguuacccuuguc

SEQ ID NO: 2152008 - RNA, 19 nt, Homo sapiens
  misc_RNA (1)...(19): siRNA sense strand
auauuuacggaccacauua

SEQ ID NO: 2152009 - RNA, 19 nt, Homo sapiens
  misc_RNA (1)...(19): siRNA sense strand
aauauuuacggaccacauu

SEQ ID NO: 2152010 - RNA, 19 nt, Homo sapiens
  misc_RNA (1)...(19): siRNA sense strand
ucaacaccgucuacauuua

SEQ ID NO: 2152011 - RNA, 19 nt, Homo sapiens
  misc_RNA (1)...(19): siRNA sense strand
uuacagaucugggucauau

SEQ ID NO: 2152012 - RNA, 19 nt, Homo sapiens
  misc_RNA (1)...(19): siRNA sense strand
caucguggccuucaaguuu

SEQ ID NO: 2152013 - RNA, 19 nt, Homo sapiens
  misc_RNA (1)...(19): siRNA sense strand
gaaauaccgaggcuauaug

SEQ ID NO: 2152014 - RNA, 19 nt, Homo sapiens
  misc_RNA (1)...(19): siRNA sense strand
ucugguagcugcaaacuuc

SEQ ID NO: 2152015 - RNA, 19 nt, Homo sapiens
  misc_RNA (1)...(19): siRNA sense strand
auaccgaggcuauauguua

SEQ ID NO: 2152016 - RNA, 19 nt, Homo sapiens
  misc_RNA (1)...(19): siRNA sense strand
gcagaccuauuggaugcua

SEQ ID NO: 2152017 - RNA, 19 nt, Homo sapiens
  misc_RNA (1)...(19): siRNA sense strand
ggucugugguucaaaguca

SEQ ID NO: 2152018 - RNA, 19 nt, Homo sapiens
  misc_RNA (1)...(19): siRNA sense strand
ccuccuggcugacagauau

SEQ ID NO: 2152019 - RNA, 19 nt, Homo sapiens
  misc_RNA (1)...(19): siRNA sense strand
cgaaauaccgaggcuauau

SEQ ID NO: 2152020 - RNA, 19 nt, Homo sapiens
  misc_RNA (1)...(19): siRNA sense strand
ggagcgcguugccaagaug

SEQ ID NO: 2152021 - RNA, 19 nt, Homo sapiens
  misc_RNA (1)...(19): siRNA sense strand
gaagauuugcagaccuauu

SEQ ID NO: 2152022 - RNA, 19 nt, Homo sapiens
  misc_RNA (1)...(19): siRNA sense strand
uuacacagcugaggucuac

SEQ ID NO: 2152023 - RNA, 19 nt, Homo sapiens
  misc_RNA (1)...(19): siRNA sense strand
aggaagauuugcagaccua

SEQ ID NO: 2152024 - RNA, 19 nt, Homo sapiens
  misc_RNA (1)...(19): siRNA sense strand
ggacuuggucugugguuca

SEQ ID NO: 2152025 - RNA, 19 nt, Homo sapiens
  misc_RNA (1)...(19): siRNA sense strand
gaaucugcccgguucaaug

SEQ ID NO: 2152026 - RNA, 19 nt, Homo sapiens
  misc_RNA (1)...(19): siRNA sense strand
cugauuggcuuccucuuca

SEQ ID NO: 2152027 - RNA, 19 nt, Homo sapiens
  misc_RNA (1)...(19): siRNA sense strand
ccaccacgaugcgcgcuuu

SEQ ID NO: 2152028 - RNA, 19 nt, Homo sapiens
  misc_RNA (1)...(19): siRNA sense strand
gguuaaucauaaagacuga

SEQ ID NO: 2152029 - RNA, 19 nt, Homo sapiens
  misc_RNA (1)...(19): siRNA sense strand
ggucauauggcuuggaauc

SEQ ID NO: 2152030 - RNA, 19 nt, Homo sapiens
  misc_RNA (1)...(19): siRNA sense strand
ggcuauauguuacccuugu

SEQ ID NO: 2152031 - RNA, 19 nt, Homo sapiens
  misc_RNA (1)...(19): siRNA sense strand
cuucaacaccgucuacauu

SEQ ID NO: 2152032 - RNA, 19 nt, Homo sapiens
  misc_RNA (1)...(19): siRNA sense strand
uuacggaccacauuacaga

SEQ ID NO: 2152033 - RNA, 19 nt, Homo sapiens
  misc_RNA (1)...(19): siRNA sense strand
caacaccgucuacauuuac

SEQ ID NO: 2152034 - RNA, 19 nt, Homo sapiens
  misc_RNA (1)...(19): siRNA sense strand
aagauuugcagaccuauug

SEQ ID NO: 2152035 - RNA, 19 nt, Homo sapiens
  misc_RNA (1)...(19): siRNA sense strand
gcugagggcucugguagcu

SEQ ID NO: 2152036 - RNA, 19 nt, Homo sapiens
  misc_RNA (1)...(19): siRNA sense strand
ggaccacauuacagaucug

SEQ ID NO: 2152037 - RNA, 19 nt, Homo sapiens
  misc_RNA (1)...(19): siRNA sense strand
gaaucucuuuugccuacua

SEQ ID NO: 2152038 - RNA, 19 nt, Homo sapiens
  misc_RNA (1)...(19): siRNA sense strand
cauauggcuuggaaucucu

SEQ ID NO: 2152039 - RNA, 19 nt, Homo sapiens
  misc_RNA (1)...(19): siRNA sense strand
aucguggccuucaaguuua

SEQ ID NO: 2152040 - RNA, 19 nt, Homo sapiens
  misc_RNA (1)...(19): siRNA sense strand
ucauauggcuuggaaucuc

SEQ ID NO: 2152041 - RNA, 19 nt, Homo sapiens
  misc_RNA (1)...(19): siRNA sense strand
uaccgaggcuauauguuac

SEQ ID NO: 2152042 - RNA, 19 nt, Homo sapiens
  misc_RNA (1)...(19): siRNA sense strand
gggcucugguagcugcaaa

SEQ ID NO: 2152043 - RNA, 19 nt, Homo sapiens
  misc_RNA (1)...(19): siRNA sense strand
gcucccugcucaucauugg

SEQ ID NO: 2152044 - RNA, 19 nt, Homo sapiens
  misc_RNA (1)...(19): siRNA sense strand
cacgaaauaccgaggcuau

SEQ ID NO: 2152045 - RNA, 19 nt, Homo sapiens
  misc_RNA (1)...(19): siRNA sense strand
ugggucauauggcuuggaa

SEQ ID NO: 2152046 - RNA, 19 nt, Homo sapiens
  misc_RNA (1)...(19): siRNA sense strand
gacuuggucugugguucaa

SEQ ID NO: 2152047 - RNA, 19 nt, Homo sapiens
  misc_RNA (1)...(19): siRNA sense strand
aaauaccgaggcuauaugu

SEQ ID NO: 2152048 - RNA, 19 nt, Homo sapiens
  misc_RNA (1)...(19): siRNA sense strand
cugcuacugccacauguuu

SEQ ID NO: 2152049 - RNA, 19 nt, Homo sapiens
  misc_RNA (1)...(19): siRNA sense strand
uucaacaccgucuacauuu

SEQ ID NO: 2152050 - RNA, 19 nt, Homo sapiens
  misc_RNA (1)...(19): siRNA sense strand
gacuaucggaccaugauca

SEQ ID NO: 2152051 - RNA, 19 nt, Homo sapiens
  misc_RNA (1)...(19): siRNA sense strand
aaucugcccgguucaaugu

SEQ ID NO: 2152052 - RNA, 19 nt, Homo sapiens
  misc_RNA (1)...(19): siRNA sense strand
gcuauauguuacccuuguc

SEQ ID NO: 2152053 - RNA, 19 nt, Homo sapiens
  misc_RNA (1)...(19): siRNA sense strand
auauuuacggaccacauua

SEQ ID NO: 2152054 - RNA, 19 nt, Homo sapiens
  misc_RNA (1)...(19): siRNA sense strand
aauauuuacggaccacauu

SEQ ID NO: 2152055 - RNA, 19 nt, Homo sapiens
  misc_RNA (1)...(19): siRNA sense strand
gaaacuaccuccuaucuug

SEQ ID NO: 2152056 - RNA, 19 nt, Homo sapiens
  misc_RNA (1)...(19): siRNA sense strand
ggaagauccucaaguauuu

SEQ ID NO: 2152057 - RNA, 19 nt, Homo sapiens
  misc_RNA (1)...(19): siRNA sense strand
gcacagcgcugcacaagug

SEQ ID NO: 2152058 - RNA, 19 nt, Homo sapiens
  misc_RNA (1)...(19): siRNA sense strand
gaaaccaucucuccaagaa

SEQ ID NO: 2152059 - RNA, 19 nt, Homo sapiens
  misc_RNA (1)...(19): siRNA sense strand
gaaagcagcaucucucuaa

SEQ ID NO: 2152060 - RNA, 19 nt, Homo sapiens
  misc_RNA (1)...(19): siRNA sense strand
gaagagcugugcaggagua

SEQ ID NO: 2152061 - RNA, 19 nt, Homo sapiens
  misc_RNA (1)...(19): siRNA sense strand
gcaggaauuuggugcuuua

SEQ ID NO: 2152062 - RNA, 19 nt, Homo sapiens
  misc_RNA (1)...(19): siRNA sense strand
gugcagaucuugaauauca

SEQ ID NO: 2152063 - RNA, 19 nt, Homo sapiens
  misc_RNA (1)...(19): siRNA sense strand
caaguggccuuaacagaaa

SEQ ID NO: 2152064 - RNA, 19 nt, Homo sapiens
  misc_RNA (1)...(19): siRNA sense strand
aggaagagcucacggauaa

SEQ ID NO: 2152065 - RNA, 19 nt, Homo sapiens
  misc_RNA (1)...(19): siRNA sense strand
ggaucaagauggagaaaga

SEQ ID NO: 2152066 - RNA, 19 nt, Homo sapiens
  misc_RNA (1)...(19): siRNA sense strand
guaaagagguggccgucaa

SEQ ID NO: 2152067 - RNA, 19 nt, Homo sapiens
  misc_RNA (1)...(19): siRNA sense strand
agaagcaacuccagaauga

SEQ ID NO: 2152068 - RNA, 19 nt, Homo sapiens
  misc_RNA (1)...(19): siRNA sense strand
ccacagaggugccacugaa

SEQ ID NO: 2152069 - RNA, 19 nt, Homo sapiens
  misc_RNA (1)...(19): siRNA sense strand
gcagacagauacacugaug

SEQ ID NO: 2152070 - RNA, 19 nt, Homo sapiens
  misc_RNA (1)...(19): siRNA sense strand
gaagaaaccaucucuccaa

SEQ ID NO: 2152071 - RNA, 19 nt, Homo sapiens
  misc_RNA (1)...(19): siRNA sense strand
gugcaggaguacaucauua

SEQ ID NO: 2152072 - RNA, 19 nt, Homo sapiens
  misc_RNA (1)...(19): siRNA sense strand
caagcaacaucaccauuga

SEQ ID NO: 2152073 - RNA, 19 nt, Homo sapiens
  misc_RNA (1)...(19): siRNA sense strand
gacgacauauugauuauuc

SEQ ID NO: 2152074 - RNA, 19 nt, Homo sapiens
  misc_RNA (1)...(19): siRNA sense strand
caauauccgucauaaaugu

SEQ ID NO: 2152075 - RNA, 19 nt, Homo sapiens
  misc_RNA (1)...(19): siRNA sense strand
caucuuggguuaccgaauu

SEQ ID NO: 2152076 - RNA, 19 nt, Homo sapiens
  misc_RNA (1)...(19): siRNA sense strand
aaagaucccuuccaagaau

SEQ ID NO: 2152077 - RNA, 19 nt, Homo sapiens
  misc_RNA (1)...(19): siRNA sense strand
gcacgcagcccuugcauuc

SEQ ID NO: 2152078 - RNA, 19 nt, Homo sapiens
  misc_RNA (1)...(19): siRNA sense strand
ucaaagaucccuuccaaga

SEQ ID NO: 2152079 - RNA, 19 nt, Homo sapiens
  misc_RNA (1)...(19): siRNA sense strand
uaugcucacuccaucauua

SEQ ID NO: 2152080 - RNA, 19 nt, Homo sapiens
  misc_RNA (1)...(19): siRNA sense strand
gcacaauaaagacgacaua

SEQ ID NO: 2152081 - RNA, 19 nt, Homo sapiens
  misc_RNA (1)...(19): siRNA sense strand
gcagagcccuuccaguauc

SEQ ID NO: 2152082 - RNA, 19 nt, Homo sapiens
  misc_RNA (1)...(19): siRNA sense strand
ccacgagccucauggagaa

SEQ ID NO: 2152083 - RNA, 19 nt, Homo sapiens
  misc_RNA (1)...(19): siRNA sense strand
gauuguggcuucccuaaca

SEQ ID NO: 2152084 - RNA, 19 nt, Homo sapiens
  misc_RNA (1)...(19): siRNA sense strand
ugacagcucucuuugaagu

SEQ ID NO: 2152085 - RNA, 19 nt, Homo sapiens
  misc_RNA (1)...(19): siRNA sense strand
ggcaauauccgucauaaau

SEQ ID NO: 2152086 - RNA, 19 nt, Homo sapiens
  misc_RNA (1)...(19): siRNA sense strand
ccacaaaucuugaguuuuc

SEQ ID NO: 2152087 - RNA, 19 nt, Homo sapiens
  misc_RNA (1)...(19): siRNA sense strand
gaagauccucaaguauuua

SEQ ID NO: 2152088 - RNA, 19 nt, Homo sapiens
  misc_RNA (1)...(19): siRNA sense strand
gcagaucccuagugugaag

SEQ ID NO: 2152089 - RNA, 19 nt, Homo sapiens
  misc_RNA (1)...(19): siRNA sense strand
aaugacagcucucuuugaa

SEQ ID NO: 2152090 - RNA, 19 nt, Homo sapiens
  misc_RNA (1)...(19): siRNA sense strand
guuccaaguucaaacagua

SEQ ID NO: 2152091 - RNA, 19 nt, Homo sapiens
  misc_RNA (1)...(19): siRNA sense strand
gcaucuuuguggcaacuua

SEQ ID NO: 2152092 - RNA, 19 nt, Homo sapiens
  misc_RNA (1)...(19): siRNA sense strand
cagcaucucucuaaugagu

SEQ ID NO: 2152093 - RNA, 19 nt, Homo sapiens
  misc_RNA (1)...(19): siRNA sense strand
guugagacauuuacauugu

SEQ ID NO: 2152094 - RNA, 19 nt, Homo sapiens
  misc_RNA (1)...(19): siRNA sense strand
cagacaagcuagacuuuca

SEQ ID NO: 2152095 - RNA, 19 nt, Homo sapiens
  misc_RNA (1)...(19): siRNA sense strand
aauaucaucuuugcgguua

SEQ ID NO: 2152096 - RNA, 19 nt, Homo sapiens
  misc_RNA (1)...(19): siRNA sense strand
ggucaagcuucccuucuga

SEQ ID NO: 2152097 - RNA, 19 nt, Homo sapiens
  misc_RNA (1)...(19): siRNA sense strand
uaacugagucuucuuuguu

SEQ ID NO: 2152098 - RNA, 19 nt, Homo sapiens
  misc_RNA (1)...(19): siRNA sense strand
caagaauguucgucacaga

SEQ ID NO: 2152099 - RNA, 19 nt, Homo sapiens
  misc_RNA (1)...(19): siRNA sense strand
gagagcagccaucaucuug

SEQ ID NO: 2152100 - RNA, 19 nt, Homo sapiens
  misc_RNA (1)...(19): siRNA sense strand
gaaguccucuugggucaga

SEQ ID NO: 2152101 - RNA, 19 nt, Homo sapiens
  misc_RNA (1)...(19): siRNA sense strand
gcacagcaguccucuccau

SEQ ID NO: 2152102 - RNA, 19 nt, Homo sapiens
  misc_RNA (1)...(19): siRNA sense strand
caacugugcuggccagaag

SEQ ID NO: 2152103 - RNA, 19 nt, Homo sapiens
  misc_RNA (1)...(19): siRNA sense strand
guacgguguugaucacuga

SEQ ID NO: 2152104 - RNA, 19 nt, Homo sapiens
  misc_RNA (1)...(19): siRNA sense strand
gcaauauccgucauaaaug

SEQ ID NO: 2152105 - RNA, 19 nt, Homo sapiens
  misc_RNA (1)...(19): siRNA sense strand
ucgcagagcccuuccagua

SEQ ID NO: 2152106 - RNA, 19 nt, Homo sapiens
  misc_RNA (1)...(19): siRNA sense strand
guggauaugaguaguguua

SEQ ID NO: 2152107 - RNA, 19 nt, Homo sapiens
  misc_RNA (1)...(19): siRNA sense strand
gagaaggaccggcucauca

SEQ ID NO: 2152108 - RNA, 19 nt, Homo sapiens
  misc_RNA (1)...(19): siRNA sense strand
caaagaucccuuccaagaa

SEQ ID NO: 2152109 - RNA, 19 nt, Homo sapiens
  misc_RNA (1)...(19): siRNA sense strand
gcacagacaagcuagacuu

SEQ ID NO: 2152110 - RNA, 19 nt, Homo sapiens
  misc_RNA (1)...(19): siRNA sense strand
guacagcucaucuacuuug

SEQ ID NO: 2152111 - RNA, 19 nt, Homo sapiens
  misc_RNA (1)...(19): siRNA sense strand
gaacucagcggcuccaucu

SEQ ID NO: 2152112 - RNA, 19 nt, Homo sapiens
  misc_RNA (1)...(19): siRNA sense strand
gaacacaacgcgacaacca

SEQ ID NO: 2152113 - RNA, 19 nt, Homo sapiens
  misc_RNA (1)...(19): siRNA sense strand
ucaaagaaguacugaggau

SEQ ID NO: 2152114 - RNA, 19 nt, Homo sapiens
  misc_RNA (1)...(19): siRNA sense strand
ggagaaagacgugggauca

SEQ ID NO: 2152115 - RNA, 19 nt, Homo sapiens
  misc_RNA (1)...(19): siRNA sense strand
caggacacauucuccauug

SEQ ID NO: 2152116 - RNA, 19 nt, Homo sapiens
  misc_RNA (1)...(19): siRNA sense strand
ggaauuuggugcuuuaucc

SEQ ID NO: 2152117 - RNA, 19 nt, Homo sapiens
  misc_RNA (1)...(19): siRNA sense strand
ggaguucaguuucuaucug

SEQ ID NO: 2152118 - RNA, 19 nt, Homo sapiens
  misc_RNA (1)...(19): siRNA sense strand
gauacuggcuucugcaacu

SEQ ID NO: 2152119 - RNA, 19 nt, Homo sapiens
  misc_RNA (1)...(19): siRNA sense strand
ugaccagacuccuuuaauc

SEQ ID NO: 2152120 - RNA, 19 nt, Homo sapiens
  misc_RNA (1)...(19): siRNA sense strand
ccacaagugcagacagaua

SEQ ID NO: 2152121 - RNA, 19 nt, Homo sapiens
  misc_RNA (1)...(19): siRNA sense strand
gcauucagcaggacacauu

SEQ ID NO: 2152122 - RNA, 19 nt, Homo sapiens
  misc_RNA (1)...(19): siRNA sense strand
gggcacagaugcagaucga

SEQ ID NO: 2152123 - RNA, 19 nt, Homo sapiens
  misc_RNA (1)...(19): siRNA sense strand
cuucggaccugauuaacaa

SEQ ID NO: 2152124 - RNA, 19 nt, Homo sapiens
  misc_RNA (1)...(19): siRNA sense strand
cuagugaucugcagucauc

SEQ ID NO: 2152125 - RNA, 19 nt, Homo sapiens
  misc_RNA (1)...(19): siRNA sense strand
acacugaugugaccacugu

SEQ ID NO: 2152126 - RNA, 19 nt, Homo sapiens
  misc_RNA (1)...(19): siRNA sense strand
gagaagcaacuccagaaug

SEQ ID NO: 2152127 - RNA, 19 nt, Homo sapiens
  misc_RNA (1)...(19): siRNA sense strand
cagcucaacuuaucucagu

SEQ ID NO: 2152128 - RNA, 19 nt, Homo sapiens
  misc_RNA (1)...(19): siRNA sense strand
guugaagcgucuacgguuu

SEQ ID NO: 2152129 - RNA, 19 nt, Homo sapiens
  misc_RNA (1)...(19): siRNA sense strand
agucaaagaucccuuccaa

SEQ ID NO: 2152130 - RNA, 19 nt, Homo sapiens
  misc_RNA (1)...(19): siRNA sense strand
acgaugagauggauaacuu

SEQ ID NO: 2152131 - RNA, 19 nt, Homo sapiens
  misc_RNA (1)...(19): siRNA sense strand
ccuccuaucuugagucuuc

SEQ ID NO: 2152132 - RNA, 19 nt, Homo sapiens
  misc_RNA (1)...(19): siRNA sense strand
caacuccucuugcauuugc

SEQ ID NO: 2152133 - RNA, 19 nt, Homo sapiens
  misc_RNA (1)...(19): siRNA sense strand
acaaguggccuuaacagaa

SEQ ID NO: 2152134 - RNA, 19 nt, Homo sapiens
  misc_RNA (1)...(19): siRNA sense strand
guacaucauuacagcaauc

SEQ ID NO: 2152135 - RNA, 19 nt, Homo sapiens
  misc_RNA (1)...(19): siRNA sense strand
ggauaugaguaguguuaca

SEQ ID NO: 2152136 - RNA, 19 nt, Homo sapiens
  misc_RNA (1)...(19): siRNA sense strand
gcaugaccgugcuggaaga

SEQ ID NO: 2152137 - RNA, 19 nt, Homo sapiens
  misc_RNA (1)...(19): siRNA sense strand
ccaaaucagugcucuagac

SEQ ID NO: 2152138 - RNA, 19 nt, Homo sapiens
  misc_RNA (1)...(19): siRNA sense strand
cgguacagcucaucuacuu

SEQ ID NO: 2152139 - RNA, 19 nt, Homo sapiens
  misc_RNA (1)...(19): siRNA sense strand
ugacuucacuuuucuggua

SEQ ID NO: 2152140 - RNA, 19 nt, Homo sapiens
  misc_RNA (1)...(19): siRNA sense strand
ggccacaagugcagacaga

SEQ ID NO: 2152141 - RNA, 19 nt, Homo sapiens
  misc_RNA (1)...(19): siRNA sense strand
gggauugccagcagaauug

SEQ ID NO: 2152142 - RNA, 19 nt, Homo sapiens
  misc_RNA (1)...(19): siRNA sense strand
caacaaucccugcaguaga

SEQ ID NO: 2152143 - RNA, 19 nt, Homo sapiens
  misc_RNA (1)...(19): siRNA sense strand
guacugaggauucacuuca

SEQ ID NO: 2152144 - RNA, 19 nt, Homo sapiens
  misc_RNA (1)...(19): siRNA sense strand
gcaggacacauucuccauu

SEQ ID NO: 2152145 - RNA, 19 nt, Homo sapiens
  misc_RNA (1)...(19): siRNA sense strand
cauuacccaugguuucuuu

SEQ ID NO: 2152146 - RNA, 19 nt, Homo sapiens
  misc_RNA (1)...(19): siRNA sense strand
gagcucagccaguggaaau

SEQ ID NO: 2152147 - RNA, 19 nt, Homo sapiens
  misc_RNA (1)...(19): siRNA sense strand
ccagagagcagccaucauc

SEQ ID NO: 2152148 - RNA, 19 nt, Homo sapiens
  misc_RNA (1)...(19): siRNA sense strand
ccuaaugacagcucucuuu

SEQ ID NO: 2152149 - RNA, 19 nt, Homo sapiens
  misc_RNA (1)...(19): siRNA sense strand
cauccgguccuuucguuua

SEQ ID NO: 2152150 - RNA, 19 nt, Homo sapiens
  misc_RNA (1)...(19): siRNA sense strand
acggaugguuucuccaaua

SEQ ID NO: 2152151 - RNA, 19 nt, Homo sapiens
  misc_RNA (1)...(19): siRNA sense strand
uuacagcaaucaaagaagu

SEQ ID NO: 2152152 - RNA, 19 nt, Homo sapiens
  misc_RNA (1)...(19): siRNA sense strand
gcagucaucucagcugucu

SEQ ID NO: 2152153 - RNA, 19 nt, Homo sapiens
  misc_RNA (1)...(19): siRNA sense strand
ccaagaacguuccaguuuu

SEQ ID NO: 2152154 - RNA, 19 nt, Homo sapiens
  misc_RNA (1)...(19): siRNA sense strand
ugagaaaggccuaaugaca

SEQ ID NO: 2152155 - RNA, 19 nt, Homo sapiens
  misc_RNA (1)...(19): siRNA sense strand
gaaacuaccuccuaucuug

SEQ ID NO: 2152156 - RNA, 19 nt, Homo sapiens
  misc_RNA (1)...(19): siRNA sense strand
ggaagauccucaaguauuu

SEQ ID NO: 2152157 - RNA, 19 nt, Homo sapiens
  misc_RNA (1)...(19): siRNA sense strand
gcacagcgcugcacaagug

SEQ ID NO: 2152158 - RNA, 19 nt, Homo sapiens
  misc_RNA (1)...(19): siRNA sense strand
gaaaccaucucuccaagaa

SEQ ID NO: 2152159 - RNA, 19 nt, Homo sapiens
  misc_RNA (1)...(19): siRNA sense strand
gaaagcagcaucucucuaa

SEQ ID NO: 2152160 - RNA, 19 nt, Homo sapiens
  misc_RNA (1)...(19): siRNA sense strand
gaagagcugugcaggagua

SEQ ID NO: 2152161 - RNA, 19 nt, Homo sapiens
  misc_RNA (1)...(19): siRNA sense strand
gcaggaauuuggugcuuua

SEQ ID NO: 2152162 - RNA, 19 nt, Homo sapiens
  misc_RNA (1)...(19): siRNA sense strand
gugcagaucuugaauauca

SEQ ID NO: 2152163 - RNA, 19 nt, Homo sapiens
  misc_RNA (1)...(19): siRNA sense strand
caaguggccuuaacagaaa

SEQ ID NO: 2152164 - RNA, 19 nt, Homo sapiens
  misc_RNA (1)...(19): siRNA sense strand
aggaagagcucacggauaa

SEQ ID NO: 2152165 - RNA, 19 nt, Homo sapiens
  misc_RNA (1)...(19): siRNA sense strand
ggaucaagauggagaaaga

SEQ ID NO: 2152166 - RNA, 19 nt, Homo sapiens
  misc_RNA (1)...(19): siRNA sense strand
guaaagagguggccgucaa

SEQ ID NO: 2152167 - RNA, 19 nt, Homo sapiens
  misc_RNA (1)...(19): siRNA sense strand
agaagcaacuccagaauga

SEQ ID NO: 2152168 - RNA, 19 nt, Homo sapiens
  misc_RNA (1)...(19): siRNA sense strand
ccacagaggugccacugaa

SEQ ID NO: 2152169 - RNA, 19 nt, Homo sapiens
  misc_RNA (1)...(19): siRNA sense strand
gcagacagauacacugaug

SEQ ID NO: 2152170 - RNA, 19 nt, Homo sapiens
  misc_RNA (1)...(19): siRNA sense strand
gaagaaaccaucucuccaa

SEQ ID NO: 2152171 - RNA, 19 nt, Homo sapiens
  misc_RNA (1)...(19): siRNA sense strand
gugcaggaguacaucauua

SEQ ID NO: 2152172 - RNA, 19 nt, Homo sapiens
  misc_RNA (1)...(19): siRNA sense strand
caagcaacaucaccauuga

SEQ ID NO: 2152173 - RNA, 19 nt, Homo sapiens
  misc_RNA (1)...(19): siRNA sense strand
gacgacauauugauuauuc

SEQ ID NO: 2152174 - RNA, 19 nt, Homo sapiens
  misc_RNA (1)...(19): siRNA sense strand
caauauccgucauaaaugu

SEQ ID NO: 2152175 - RNA, 19 nt, Homo sapiens
  misc_RNA (1)...(19): siRNA sense strand
caucuuggguuaccgaauu

SEQ ID NO: 2152176 - RNA, 19 nt, Homo sapiens
  misc_RNA (1)...(19): siRNA sense strand
aaagaucccuuccaagaau

SEQ ID NO: 2152177 - RNA, 19 nt, Homo sapiens
  misc_RNA (1)...(19): siRNA sense strand
gcacgcagcccuugcauuc

SEQ ID NO: 2152178 - RNA, 19 nt, Homo sapiens
  misc_RNA (1)...(19): siRNA sense strand
ucaaagaucccuuccaaga

SEQ ID NO: 2152179 - RNA, 19 nt, Homo sapiens
  misc_RNA (1)...(19): siRNA sense strand
uaugcucacuccaucauua

SEQ ID NO: 2152180 - RNA, 19 nt, Homo sapiens
  misc_RNA (1)...(19): siRNA sense strand
gcacaauaaagacgacaua

SEQ ID NO: 2152181 - RNA, 19 nt, Homo sapiens
  misc_RNA (1)...(19): siRNA sense strand
gcagagcccuuccaguauc

SEQ ID NO: 2152182 - RNA, 19 nt, Homo sapiens
  misc_RNA (1)...(19): siRNA sense strand
ccacgagccucauggagaa

SEQ ID NO: 2152183 - RNA, 19 nt, Homo sapiens
  misc_RNA (1)...(19): siRNA sense strand
gauuguggcuucccuaaca

SEQ ID NO: 2152184 - RNA, 19 nt, Homo sapiens
  misc_RNA (1)...(19): siRNA sense strand
ugacagcucucuuugaagu

SEQ ID NO: 2152185 - RNA, 19 nt, Homo sapiens
  misc_RNA (1)...(19): siRNA sense strand
ggcaauauccgucauaaau

SEQ ID NO: 2152186 - RNA, 19 nt, Homo sapiens
  misc_RNA (1)...(19): siRNA sense strand
ccacaaaucuugaguuuuc

SEQ ID NO: 2152187 - RNA, 19 nt, Homo sapiens
  misc_RNA (1)...(19): siRNA sense strand
gaagauccucaaguauuua

SEQ ID NO: 2152188 - RNA, 19 nt, Homo sapiens
  misc_RNA (1)...(19): siRNA sense strand
gcagaucccuagugugaag

SEQ ID NO: 2152189 - RNA, 19 nt, Homo sapiens
  misc_RNA (1)...(19): siRNA sense strand
aaugacagcucucuuugaa

SEQ ID NO: 2152190 - RNA, 19 nt, Homo sapiens
  misc_RNA (1)...(19): siRNA sense strand
guuccaaguucaaacagua

SEQ ID NO: 2152191 - RNA, 19 nt, Homo sapiens
  misc_RNA (1)...(19): siRNA sense strand
gcaucuuuguggcaacuua

SEQ ID NO: 2152192 - RNA, 19 nt, Homo sapiens
  misc_RNA (1)...(19): siRNA sense strand
cagcaucucucuaaugagu

SEQ ID NO: 2152193 - RNA, 19 nt, Homo sapiens
  misc_RNA (1)...(19): siRNA sense strand
guugagacauuuacauugu

SEQ ID NO: 2152194 - RNA, 19 nt, Homo sapiens
  misc_RNA (1)...(19): siRNA sense strand
cagacaagcuagacuuuca

SEQ ID NO: 2152195 - RNA, 19 nt, Homo sapiens
  misc_RNA (1)...(19): siRNA sense strand
aauaucaucuuugcgguua

SEQ ID NO: 2152196 - RNA, 19 nt, Homo sapiens
  misc_RNA (1)...(19): siRNA sense strand
ggucaagcuucccuucuga

SEQ ID NO: 2152197 - RNA, 19 nt, Homo sapiens
  misc_RNA (1)...(19): siRNA sense strand
uaacugagucuucuuuguu

SEQ ID NO: 2152198 - RNA, 19 nt, Homo sapiens
  misc_RNA (1)...(19): siRNA sense strand
caagaauguucgucacaga

SEQ ID NO: 2152199 - RNA, 19 nt, Homo sapiens
  misc_RNA (1)...(19): siRNA sense strand
gagagcagccaucaucuug

SEQ ID NO: 2152200 - RNA, 19 nt, Homo sapiens
  misc_RNA (1)...(19): siRNA sense strand
gaaguccucuugggucaga

SEQ ID NO: 2152201 - RNA, 19 nt, Homo sapiens
  misc_RNA (1)...(19): siRNA sense strand
gcacagcaguccucuccau

SEQ ID NO: 2152202 - RNA, 19 nt, Homo sapiens
  misc_RNA (1)...(19): siRNA sense strand
caacugugcuggccagaag

SEQ ID NO: 2152203 - RNA, 19 nt, Homo sapiens
  misc_RNA (1)...(19): siRNA sense strand
guacgguguugaucacuga

SEQ ID NO: 2152204 - RNA, 19 nt, Homo sapiens
  misc_RNA (1)...(19): siRNA sense strand
gcaauauccgucauaaaug

SEQ ID NO: 2152205 - RNA, 19 nt, Homo sapiens
  misc_RNA (1)...(19): siRNA sense strand
ucgcagagcccuuccagua

SEQ ID NO: 2152206 - RNA, 19 nt, Homo sapiens
  misc_RNA (1)...(19): siRNA sense strand
guggauaugaguaguguua

SEQ ID NO: 2152207 - RNA, 19 nt, Homo sapiens
  misc_RNA (1)...(19): siRNA sense strand
gagaaggaccggcucauca

SEQ ID NO: 2152208 - RNA, 19 nt, Homo sapiens
  misc_RNA (1)...(19): siRNA sense strand
caaagaucccuuccaagaa

SEQ ID NO: 2152209 - RNA, 19 nt, Homo sapiens
  misc_RNA (1)...(19): siRNA sense strand
gcacagacaagcuagacuu

SEQ ID NO: 2152210 - RNA, 19 nt, Homo sapiens
  misc_RNA (1)...(19): siRNA sense strand
guacagcucaucuacuuug

SEQ ID NO: 2152211 - RNA, 19 nt, Homo sapiens
  misc_RNA (1)...(19): siRNA sense strand
gaacucagcggcuccaucu

SEQ ID NO: 2152212 - RNA, 19 nt, Homo sapiens
  misc_RNA (1)...(19): siRNA sense strand
gaacacaacgcgacaacca

SEQ ID NO: 2152213 - RNA, 19 nt, Homo sapiens
  misc_RNA (1)...(19): siRNA sense strand
ucaaagaaguacugaggau

SEQ ID NO: 2152214 - RNA, 19 nt, Homo sapiens
  misc_RNA (1)...(19): siRNA sense strand
ggagaaagacgugggauca

SEQ ID NO: 2152215 - RNA, 19 nt, Homo sapiens
  misc_RNA (1)...(19): siRNA sense strand
caggacacauucuccauug

SEQ ID NO: 2152216 - RNA, 19 nt, Homo sapiens
  misc_RNA (1)...(19): siRNA sense strand
ggaauuuggugcuuuaucc

SEQ ID NO: 2152217 - RNA, 19 nt, Homo sapiens
  misc_RNA (1)...(19): siRNA sense strand
ggaguucaguuucuaucug

SEQ ID NO: 2152218 - RNA, 19 nt, Homo sapiens
  misc_RNA (1)...(19): siRNA sense strand
gauacuggcuucugcaacu

SEQ ID NO: 2152219 - RNA, 19 nt, Homo sapiens
  misc_RNA (1)...(19): siRNA sense strand
ugaccagacuccuuuaauc

SEQ ID NO: 2152220 - RNA, 19 nt, Homo sapiens
  misc_RNA (1)...(19): siRNA sense strand
ccacaagugcagacagaua

SEQ ID NO: 2152221 - RNA, 19 nt, Homo sapiens
  misc_RNA (1)...(19): siRNA sense strand
gcauucagcaggacacauu

SEQ ID NO: 2152222 - RNA, 19 nt, Homo sapiens
  misc_RNA (1)...(19): siRNA sense strand
gggcacagaugcagaucga

SEQ ID NO: 2152223 - RNA, 19 nt, Homo sapiens
  misc_RNA (1)...(19): siRNA sense strand
cuucggaccugauuaacaa

SEQ ID NO: 2152224 - RNA, 19 nt, Homo sapiens
  misc_RNA (1)...(19): siRNA sense strand
cuagugaucugcagucauc

SEQ ID NO: 2152225 - RNA, 19 nt, Homo sapiens
  misc_RNA (1)...(19): siRNA sense strand
acacugaugugaccacugu

SEQ ID NO: 2152226 - RNA, 19 nt, Homo sapiens
  misc_RNA (1)...(19): siRNA sense strand
gagaagcaacuccagaaug

SEQ ID NO: 2152227 - RNA, 19 nt, Homo sapiens
  misc_RNA (1)...(19): siRNA sense strand
cagcucaacuuaucucagu

SEQ ID NO: 2152228 - RNA, 19 nt, Homo sapiens
  misc_RNA (1)...(19): siRNA sense strand
guugaagcgucuacgguuu

SEQ ID NO: 2152229 - RNA, 19 nt, Homo sapiens
  misc_RNA (1)...(19): siRNA sense strand
agucaaagaucccuuccaa

SEQ ID NO: 2152230 - RNA, 19 nt, Homo sapiens
  misc_RNA (1)...(19): siRNA sense strand
acgaugagauggauaacuu

SEQ ID NO: 2152231 - RNA, 19 nt, Homo sapiens
  misc_RNA (1)...(19): siRNA sense strand
ccuccuaucuugagucuuc

SEQ ID NO: 2152232 - RNA, 19 nt, Homo sapiens
  misc_RNA (1)...(19): siRNA sense strand
caacuccucuugcauuugc

SEQ ID NO: 2152233 - RNA, 19 nt, Homo sapiens
  misc_RNA (1)...(19): siRNA sense strand
acaaguggccuuaacagaa

SEQ ID NO: 2152234 - RNA, 19 nt, Homo sapiens
  misc_RNA (1)...(19): siRNA sense strand
guacaucauuacagcaauc

SEQ ID NO: 2152235 - RNA, 19 nt, Homo sapiens
  misc_RNA (1)...(19): siRNA sense strand
ggauaugaguaguguuaca

SEQ ID NO: 2152236 - RNA, 19 nt, Homo sapiens
  misc_RNA (1)...(19): siRNA sense strand
gcaugaccgugcuggaaga

SEQ ID NO: 2152237 - RNA, 19 nt, Homo sapiens
  misc_RNA (1)...(19): siRNA sense strand
ccaaaucagugcucuagac

SEQ ID NO: 2152238 - RNA, 19 nt, Homo sapiens
  misc_RNA (1)...(19): siRNA sense strand
cgguacagcucaucuacuu

SEQ ID NO: 2152239 - RNA, 19 nt, Homo sapiens
  misc_RNA (1)...(19): siRNA sense strand
ugacuucacuuuucuggua

SEQ ID NO: 2152240 - RNA, 19 nt, Homo sapiens
  misc_RNA (1)...(19): siRNA sense strand
ggccacaagugcagacaga

SEQ ID NO: 2152241 - RNA, 19 nt, Homo sapiens
  misc_RNA (1)...(19): siRNA sense strand
gggauugccagcagaauug

SEQ ID NO: 2152242 - RNA, 19 nt, Homo sapiens
  misc_RNA (1)...(19): siRNA sense strand
caacaaucccugcaguaga

SEQ ID NO: 2152243 - RNA, 19 nt, Homo sapiens
  misc_RNA (1)...(19): siRNA sense strand
guacugaggauucacuuca

SEQ ID NO: 2152244 - RNA, 19 nt, Homo sapiens
  misc_RNA (1)...(19): siRNA sense strand
gcaggacacauucuccauu

SEQ ID NO: 2152245 - RNA, 19 nt, Homo sapiens
  misc_RNA (1)...(19): siRNA sense strand
cauuacccaugguuucuuu

SEQ ID NO: 2152246 - RNA, 19 nt, Homo sapiens
  misc_RNA (1)...(19): siRNA sense strand
gagcucagccaguggaaau

SEQ ID NO: 2152247 - RNA, 19 nt, Homo sapiens
  misc_RNA (1)...(19): siRNA sense strand
ccagagagcagccaucauc

SEQ ID NO: 2152248 - RNA, 19 nt, Homo sapiens
  misc_RNA (1)...(19): siRNA sense strand
ccuaaugacagcucucuuu

SEQ ID NO: 2152249 - RNA, 19 nt, Homo sapiens
  misc_RNA (1)...(19): siRNA sense strand
cauccgguccuuucguuua

SEQ ID NO: 2152250 - RNA, 19 nt, Homo sapiens
  misc_RNA (1)...(19): siRNA sense strand
acggaugguuucuccaaua

SEQ ID NO: 2152251 - RNA, 19 nt, Homo sapiens
  misc_RNA (1)...(19): siRNA sense strand
uuacagcaaucaaagaagu

SEQ ID NO: 2152252 - RNA, 19 nt, Homo sapiens
  misc_RNA (1)...(19): siRNA sense strand
gcagucaucucagcugucu

SEQ ID NO: 2152253 - RNA, 19 nt, Homo sapiens
  misc_RNA (1)...(19): siRNA sense strand
ccaagaacguuccaguuuu

SEQ ID NO: 2152254 - RNA, 19 nt, Homo sapiens
  misc_RNA (1)...(19): siRNA sense strand
ugagaaaggccuaaugaca

SEQ ID NO: 2152255 - RNA, 19 nt, Homo sapiens
  misc_RNA (1)...(19): siRNA sense strand
ggacacagcuggagugaca

SEQ ID NO: 2152256 - RNA, 19 nt, Homo sapiens
  misc_RNA (1)...(19): siRNA sense strand
gaaagagaaggaugcauua

SEQ ID NO: 2152257 - RNA, 19 nt, Homo sapiens
  misc_RNA (1)...(19): siRNA sense strand
ccaguuggcucaaggauaa

SEQ ID NO: 2152258 - RNA, 19 nt, Homo sapiens
  misc_RNA (1)...(19): siRNA sense strand
uaaaggaggugaugguaaa

SEQ ID NO: 2152259 - RNA, 19 nt, Homo sapiens
  misc_RNA (1)...(19): siRNA sense strand
gaaacuggcuguuagcaau

SEQ ID NO: 2152260 - RNA, 19 nt, Homo sapiens
  misc_RNA (1)...(19): siRNA sense strand
gcuaagaaguuugaaauga

SEQ ID NO: 2152261 - RNA, 19 nt, Homo sapiens
  misc_RNA (1)...(19): siRNA sense strand
gcuaaugccucaccucuga

SEQ ID NO: 2152262 - RNA, 19 nt, Homo sapiens
  misc_RNA (1)...(19): siRNA sense strand
gcagacagaugaagaacga

SEQ ID NO: 2152263 - RNA, 19 nt, Homo sapiens
  misc_RNA (1)...(19): siRNA sense strand
ugagacagauccauuuauu

SEQ ID NO: 2152264 - RNA, 19 nt, Homo sapiens
  misc_RNA (1)...(19): siRNA sense strand
gaacaagggcccuccaguu

SEQ ID NO: 2152265 - RNA, 19 nt, Homo sapiens
  misc_RNA (1)...(19): siRNA sense strand
uagcaaguaucaugaguaa

SEQ ID NO: 2152266 - RNA, 19 nt, Homo sapiens
  misc_RNA (1)...(19): siRNA sense strand
gaacuaugugucuccauua

SEQ ID NO: 2152267 - RNA, 19 nt, Homo sapiens
  misc_RNA (1)...(19): siRNA sense strand
ggcaagagguggaaauguu

SEQ ID NO: 2152268 - RNA, 19 nt, Homo sapiens
  misc_RNA (1)...(19): siRNA sense strand
ggagauauuuggcuuugga

SEQ ID NO: 2152269 - RNA, 19 nt, Homo sapiens
  misc_RNA (1)...(19): siRNA sense strand
gcaccuaaacccaaaguaa

SEQ ID NO: 2152270 - RNA, 19 nt, Homo sapiens
  misc_RNA (1)...(19): siRNA sense strand
uagccuaacucagaauuua

SEQ ID NO: 2152271 - RNA, 19 nt, Homo sapiens
  misc_RNA (1)...(19): siRNA sense strand
gucgugaaguuaaguaaua

SEQ ID NO: 2152272 - RNA, 19 nt, Homo sapiens
  misc_RNA (1)...(19): siRNA sense strand
aagaacagcuugaguggaa

SEQ ID NO: 2152273 - RNA, 19 nt, Homo sapiens
  misc_RNA (1)...(19): siRNA sense strand
gagcaucauuauuggcuaa

SEQ ID NO: 2152274 - RNA, 19 nt, Homo sapiens
  misc_RNA (1)...(19): siRNA sense strand
ggaaggaucggcuacaaga

SEQ ID NO: 2152275 - RNA, 19 nt, Homo sapiens
  misc_RNA (1)...(19): siRNA sense strand
acacauucuucaagucuua

SEQ ID NO: 2152276 - RNA, 19 nt, Homo sapiens
  misc_RNA (1)...(19): siRNA sense strand
gaacuaggcccugucauuc

SEQ ID NO: 2152277 - RNA, 19 nt, Homo sapiens
  misc_RNA (1)...(19): siRNA sense strand
gaugagacagauccauuua

SEQ ID NO: 2152278 - RNA, 19 nt, Homo sapiens
  misc_RNA (1)...(19): siRNA sense strand
gaccaugcccuuccaguuu

SEQ ID NO: 2152279 - RNA, 19 nt, Homo sapiens
  misc_RNA (1)...(19): siRNA sense strand
gcuaugaguuagaaccaaa

SEQ ID NO: 2152280 - RNA, 19 nt, Homo sapiens
  misc_RNA (1)...(19): siRNA sense strand
gaacacagggugcuaccaa

SEQ ID NO: 2152281 - RNA, 19 nt, Homo sapiens
  misc_RNA (1)...(19): siRNA sense strand
ccaaguaguuccaguccaa

SEQ ID NO: 2152282 - RNA, 19 nt, Homo sapiens
  misc_RNA (1)...(19): siRNA sense strand
agacagauccauuuauuga

SEQ ID NO: 2152283 - RNA, 19 nt, Homo sapiens
  misc_RNA (1)...(19): siRNA sense strand
uagagaugcuagaugauuu

SEQ ID NO: 2152284 - RNA, 19 nt, Homo sapiens
  misc_RNA (1)...(19): siRNA sense strand
uaucaacacuggcacucua

SEQ ID NO: 2152285 - RNA, 19 nt, Homo sapiens
  misc_RNA (1)...(19): siRNA sense strand
aaacugaaacuggcuguua

SEQ ID NO: 2152286 - RNA, 19 nt, Homo sapiens
  misc_RNA (1)...(19): siRNA sense strand
uaaauucacacaagucuga

SEQ ID NO: 2152287 - RNA, 19 nt, Homo sapiens
  misc_RNA (1)...(19): siRNA sense strand
uaacagcccaguccauaaa

SEQ ID NO: 2152288 - RNA, 19 nt, Homo sapiens
  misc_RNA (1)...(19): siRNA sense strand
gaagcucauucacacagaa

SEQ ID NO: 2152289 - RNA, 19 nt, Homo sapiens
  misc_RNA (1)...(19): siRNA sense strand
gcaagcauuucacgaugga

SEQ ID NO: 2152290 - RNA, 19 nt, Homo sapiens
  misc_RNA (1)...(19): siRNA sense strand
caccauagccuaacucaga

SEQ ID NO: 2152291 - RNA, 19 nt, Homo sapiens
  misc_RNA (1)...(19): siRNA sense strand
gccuggagcuggugcuuaa

SEQ ID NO: 2152292 - RNA, 19 nt, Homo sapiens
  misc_RNA (1)...(19): siRNA sense strand
guagcaaccuuaacucaag

SEQ ID NO: 2152293 - RNA, 19 nt, Homo sapiens
  misc_RNA (1)...(19): siRNA sense strand
ggacauugaguuacagcua

SEQ ID NO: 2152294 - RNA, 19 nt, Homo sapiens
  misc_RNA (1)...(19): siRNA sense strand
gauccagaccuucccauuu

SEQ ID NO: 2152295 - RNA, 19 nt, Homo sapiens
  misc_RNA (1)...(19): siRNA sense strand
ccaggaugaucguuuaaga

SEQ ID NO: 2152296 - RNA, 19 nt, Homo sapiens
  misc_RNA (1)...(19): siRNA sense strand
ccucaaagcuaacaaacuc

SEQ ID NO: 2152297 - RNA, 19 nt, Homo sapiens
  misc_RNA (1)...(19): siRNA sense strand
caagccagauucacacuuc

SEQ ID NO: 2152298 - RNA, 19 nt, Homo sapiens
  misc_RNA (1)...(19): siRNA sense strand
ccaaauugcagacagauga

SEQ ID NO: 2152299 - RNA, 19 nt, Homo sapiens
  misc_RNA (1)...(19): siRNA sense strand
agagaaggaugcauuaaag

SEQ ID NO: 2152300 - RNA, 19 nt, Homo sapiens
  misc_RNA (1)...(19): siRNA sense strand
uaacacaaguaacaaaggu

SEQ ID NO: 2152301 - RNA, 19 nt, Homo sapiens
  misc_RNA (1)...(19): siRNA sense strand
gaacauccgaggcccaaga

SEQ ID NO: 2152302 - RNA, 19 nt, Homo sapiens
  misc_RNA (1)...(19): siRNA sense strand
gaucugaagaggaugauga

SEQ ID NO: 2152303 - RNA, 19 nt, Homo sapiens
  misc_RNA (1)...(19): siRNA sense strand
ugucaugccugaacagcua

SEQ ID NO: 2152304 - RNA, 19 nt, Homo sapiens
  misc_RNA (1)...(19): siRNA sense strand
ucacacagaagacccauuu

SEQ ID NO: 2152305 - RNA, 19 nt, Homo sapiens
  misc_RNA (1)...(19): siRNA sense strand
aaugaaauauggugggaaa

SEQ ID NO: 2152306 - RNA, 19 nt, Homo sapiens
  misc_RNA (1)...(19): siRNA sense strand
gcaggagcaucauuauugg

SEQ ID NO: 2152307 - RNA, 19 nt, Homo sapiens
  misc_RNA (1)...(19): siRNA sense strand
gcaccacuaccuccaguaa

SEQ ID NO: 2152308 - RNA, 19 nt, Homo sapiens
  misc_RNA (1)...(19): siRNA sense strand
ccaaauugcugccucuucu

SEQ ID NO: 2152309 - RNA, 19 nt, Homo sapiens
  misc_RNA (1)...(19): siRNA sense strand
gaaagccggaguguucaua

SEQ ID NO: 2152310 - RNA, 19 nt, Homo sapiens
  misc_RNA (1)...(19): siRNA sense strand
agaggcuuaugaugaauua

SEQ ID NO: 2152311 - RNA, 19 nt, Homo sapiens
  misc_RNA (1)...(19): siRNA sense strand
gcuaauaggacuagucugu

SEQ ID NO: 2152312 - RNA, 19 nt, Homo sapiens
  misc_RNA (1)...(19): siRNA sense strand
gaaugaacaucagcagaca

SEQ ID NO: 2152313 - RNA, 19 nt, Homo sapiens
  misc_RNA (1)...(19): siRNA sense strand
gguagccacuccagcacua

SEQ ID NO: 2152314 - RNA, 19 nt, Homo sapiens
  misc_RNA (1)...(19): siRNA sense strand
caaagaaaccccaggauuu

SEQ ID NO: 2152315 - RNA, 19 nt, Homo sapiens
  misc_RNA (1)...(19): siRNA sense strand
guaaaggaggugaugguaa

SEQ ID NO: 2152316 - RNA, 19 nt, Homo sapiens
  misc_RNA (1)...(19): siRNA sense strand
acacagaagacccauuuaa

SEQ ID NO: 2152317 - RNA, 19 nt, Homo sapiens
  misc_RNA (1)...(19): siRNA sense strand
uagcugccaugauuagaaa

SEQ ID NO: 2152318 - RNA, 19 nt, Homo sapiens
  misc_RNA (1)...(19): siRNA sense strand
ggaguuguggcucuaaauu

SEQ ID NO: 2152319 - RNA, 19 nt, Homo sapiens
  misc_RNA (1)...(19): siRNA sense strand
gccacuagcuacucccaaa

SEQ ID NO: 2152320 - RNA, 19 nt, Homo sapiens
  misc_RNA (1)...(19): siRNA sense strand
gcaagagguggaaauguug

SEQ ID NO: 2152321 - RNA, 19 nt, Homo sapiens
  misc_RNA (1)...(19): siRNA sense strand
ccagucugcugaagauuau

SEQ ID NO: 2152322 - RNA, 19 nt, Homo sapiens
  misc_RNA (1)...(19): siRNA sense strand
uauguaaccuuguugagau

SEQ ID NO: 2152323 - RNA, 19 nt, Homo sapiens
  misc_RNA (1)...(19): siRNA sense strand
gcaaugucaugccugaaca

SEQ ID NO: 2152324 - RNA, 19 nt, Homo sapiens
  misc_RNA (1)...(19): siRNA sense strand
uaaaacgucugaagaaguu

SEQ ID NO: 2152325 - RNA, 19 nt, Homo sapiens
  misc_RNA (1)...(19): siRNA sense strand
gcucuaaauucacacaagu

SEQ ID NO: 2152326 - RNA, 19 nt, Homo sapiens
  misc_RNA (1)...(19): siRNA sense strand
gaacagcuugaguggaauu

SEQ ID NO: 2152327 - RNA, 19 nt, Homo sapiens
  misc_RNA (1)...(19): siRNA sense strand
gcaaguaucaugaguaagc

SEQ ID NO: 2152328 - RNA, 19 nt, Homo sapiens
  misc_RNA (1)...(19): siRNA sense strand
cacuggaucuuguuucuga

SEQ ID NO: 2152329 - RNA, 19 nt, Homo sapiens
  misc_RNA (1)...(19): siRNA sense strand
aaauggaucugaagaggau

SEQ ID NO: 2152330 - RNA, 19 nt, Homo sapiens
  misc_RNA (1)...(19): siRNA sense strand
gaugaucguuuaagagaac

SEQ ID NO: 2152331 - RNA, 19 nt, Homo sapiens
  misc_RNA (1)...(19): siRNA sense strand
uguccaggaugaucguuua

SEQ ID NO: 2152332 - RNA, 19 nt, Homo sapiens
  misc_RNA (1)...(19): siRNA sense strand
cugaagaaguuacaucuca

SEQ ID NO: 2152333 - RNA, 19 nt, Homo sapiens
  misc_RNA (1)...(19): siRNA sense strand
cauuaaagaaggagucuaa

SEQ ID NO: 2152334 - RNA, 19 nt, Homo sapiens
  misc_RNA (1)...(19): siRNA sense strand
ccgcuucucuaacaacaaa

SEQ ID NO: 2152335 - RNA, 19 nt, Homo sapiens
  misc_RNA (1)...(19): siRNA sense strand
agaacuaugugucuccauu

SEQ ID NO: 2152336 - RNA, 19 nt, Homo sapiens
  misc_RNA (1)...(19): siRNA sense strand
gggaugcuaugaguuagaa

SEQ ID NO: 2152337 - RNA, 19 nt, Homo sapiens
  misc_RNA (1)...(19): siRNA sense strand
guggaaauguuggcuaaga

SEQ ID NO: 2152338 - RNA, 19 nt, Homo sapiens
  misc_RNA (1)...(19): siRNA sense strand
gccagucugcugaagauua

SEQ ID NO: 2152339 - RNA, 19 nt, Homo sapiens
  misc_RNA (1)...(19): siRNA sense strand
ccacugggaugacacuauc

SEQ ID NO: 2152340 - RNA, 19 nt, Homo sapiens
  misc_RNA (1)...(19): siRNA sense strand
ggaugaucguuuaagagaa

SEQ ID NO: 2152341 - RNA, 19 nt, Homo sapiens
  misc_RNA (1)...(19): siRNA sense strand
agaaagagaaggaugcauu

SEQ ID NO: 2152342 - RNA, 19 nt, Homo sapiens
  misc_RNA (1)...(19): siRNA sense strand
gaaggaugcauuaaagaag

SEQ ID NO: 2152343 - RNA, 19 nt, Homo sapiens
  misc_RNA (1)...(19): siRNA sense strand
ugaguggaauugcaaugaa

SEQ ID NO: 2152344 - RNA, 19 nt, Homo sapiens
  misc_RNA (1)...(19): siRNA sense strand
gaguagcguucauuagcuu

SEQ ID NO: 2152345 - RNA, 19 nt, Homo sapiens
  misc_RNA (1)...(19): siRNA sense strand
gaagaaguuacaucucaau

SEQ ID NO: 2152346 - RNA, 19 nt, Homo sapiens
  misc_RNA (1)...(19): siRNA sense strand
gagaaggaugcauuaaaga

SEQ ID NO: 2152347 - RNA, 19 nt, Homo sapiens
  misc_RNA (1)...(19): siRNA sense strand
uaaaggggacacuaaauua

SEQ ID NO: 2152348 - RNA, 19 nt, Homo sapiens
  misc_RNA (1)...(19): siRNA sense strand
gaguggaauugcaaugaau

SEQ ID NO: 2152349 - RNA, 19 nt, Homo sapiens
  misc_RNA (1)...(19): siRNA sense strand
auucagaacccuaaaguuu

SEQ ID NO: 2152350 - RNA, 19 nt, Homo sapiens
  misc_RNA (1)...(19): siRNA sense strand
gaucaaauugggaugcuau

SEQ ID NO: 2152351 - RNA, 19 nt, Homo sapiens
  misc_RNA (1)...(19): siRNA sense strand
agaggaugaugaugagaaa

SEQ ID NO: 2152352 - RNA, 19 nt, Homo sapiens
  misc_RNA (1)...(19): siRNA sense strand
acacuuacagcaagcauuu

SEQ ID NO: 2152353 - RNA, 19 nt, Homo sapiens
  misc_RNA (1)...(19): siRNA sense strand
gaugcuggguggccuuguu

SEQ ID NO: 2152354 - RNA, 19 nt, Homo sapiens
  misc_RNA (1)...(19): siRNA sense strand
ccaaggcuauggugucaca

SEQ ID NO: 2152355 - RNA, 19 nt, Homo sapiens
  misc_RNA (1)...(19): siRNA sense strand
ggacacagcuggagugaca

SEQ ID NO: 2152356 - RNA, 19 nt, Homo sapiens
  misc_RNA (1)...(19): siRNA sense strand
gaaagagaaggaugcauua

SEQ ID NO: 2152357 - RNA, 19 nt, Homo sapiens
  misc_RNA (1)...(19): siRNA sense strand
ccaguuggcucaaggauaa

SEQ ID NO: 2152358 - RNA, 19 nt, Homo sapiens
  misc_RNA (1)...(19): siRNA sense strand
uaaaggaggugaugguaaa

SEQ ID NO: 2152359 - RNA, 19 nt, Homo sapiens
  misc_RNA (1)...(19): siRNA sense strand
gaaacuggcuguuagcaau

SEQ ID NO: 2152360 - RNA, 19 nt, Homo sapiens
  misc_RNA (1)...(19): siRNA sense strand
gcuaagaaguuugaaauga

SEQ ID NO: 2152361 - RNA, 19 nt, Homo sapiens
  misc_RNA (1)...(19): siRNA sense strand
gcuaaugccucaccucuga

SEQ ID NO: 2152362 - RNA, 19 nt, Homo sapiens
  misc_RNA (1)...(19): siRNA sense strand
gcagacagaugaagaacga

SEQ ID NO: 2152363 - RNA, 19 nt, Homo sapiens
  misc_RNA (1)...(19): siRNA sense strand
ugagacagauccauuuauu

SEQ ID NO: 2152364 - RNA, 19 nt, Homo sapiens
  misc_RNA (1)...(19): siRNA sense strand
gaacaagggcccuccaguu

SEQ ID NO: 2152365 - RNA, 19 nt, Homo sapiens
  misc_RNA (1)...(19): siRNA sense strand
uagcaaguaucaugaguaa

SEQ ID NO: 2152366 - RNA, 19 nt, Homo sapiens
  misc_RNA (1)...(19): siRNA sense strand
gaacuaugugucuccauua

SEQ ID NO: 2152367 - RNA, 19 nt, Homo sapiens
  misc_RNA (1)...(19): siRNA sense strand
ggcaagagguggaaauguu

SEQ ID NO: 2152368 - RNA, 19 nt, Homo sapiens
  misc_RNA (1)...(19): siRNA sense strand
ggagauauuuggcuuugga

SEQ ID NO: 2152369 - RNA, 19 nt, Homo sapiens
  misc_RNA (1)...(19): siRNA sense strand
gcaccuaaacccaaaguaa

SEQ ID NO: 2152370 - RNA, 19 nt, Homo sapiens
  misc_RNA (1)...(19): siRNA sense strand
uagccuaacucagaauuua

SEQ ID NO: 2152371 - RNA, 19 nt, Homo sapiens
  misc_RNA (1)...(19): siRNA sense strand
gucgugaaguuaaguaaua

SEQ ID NO: 2152372 - RNA, 19 nt, Homo sapiens
  misc_RNA (1)...(19): siRNA sense strand
aagaacagcuugaguggaa

SEQ ID NO: 2152373 - RNA, 19 nt, Homo sapiens
  misc_RNA (1)...(19): siRNA sense strand
gagcaucauuauuggcuaa

SEQ ID NO: 2152374 - RNA, 19 nt, Homo sapiens
  misc_RNA (1)...(19): siRNA sense strand
ggaaggaucggcuacaaga

SEQ ID NO: 2152375 - RNA, 19 nt, Homo sapiens
  misc_RNA (1)...(19): siRNA sense strand
acacauucuucaagucuua

SEQ ID NO: 2152376 - RNA, 19 nt, Homo sapiens
  misc_RNA (1)...(19): siRNA sense strand
gaacuaggcccugucauuc

SEQ ID NO: 2152377 - RNA, 19 nt, Homo sapiens
  misc_RNA (1)...(19): siRNA sense strand
gaugagacagauccauuua

SEQ ID NO: 2152378 - RNA, 19 nt, Homo sapiens
  misc_RNA (1)...(19): siRNA sense strand
gaccaugcccuuccaguuu

SEQ ID NO: 2152379 - RNA, 19 nt, Homo sapiens
  misc_RNA (1)...(19): siRNA sense strand
gcuaugaguuagaaccaaa

SEQ ID NO: 2152380 - RNA, 19 nt, Homo sapiens
  misc_RNA (1)...(19): siRNA sense strand
gaacacagggugcuaccaa

SEQ ID NO: 2152381 - RNA, 19 nt, Homo sapiens
  misc_RNA (1)...(19): siRNA sense strand
ccaaguaguuccaguccaa

SEQ ID NO: 2152382 - RNA, 19 nt, Homo sapiens
  misc_RNA (1)...(19): siRNA sense strand
agacagauccauuuauuga

SEQ ID NO: 2152383 - RNA, 19 nt, Homo sapiens
  misc_RNA (1)...(19): siRNA sense strand
uagagaugcuagaugauuu

SEQ ID NO: 2152384 - RNA, 19 nt, Homo sapiens
  misc_RNA (1)...(19): siRNA sense strand
uaucaacacuggcacucua

SEQ ID NO: 2152385 - RNA, 19 nt, Homo sapiens
  misc_RNA (1)...(19): siRNA sense strand
aaacugaaacuggcuguua

SEQ ID NO: 2152386 - RNA, 19 nt, Homo sapiens
  misc_RNA (1)...(19): siRNA sense strand
uaaauucacacaagucuga

SEQ ID NO: 2152387 - RNA, 19 nt, Homo sapiens
  misc_RNA (1)...(19): siRNA sense strand
uaacagcccaguccauaaa

SEQ ID NO: 2152388 - RNA, 19 nt, Homo sapiens
  misc_RNA (1)...(19): siRNA sense strand
gaagcucauucacacagaa

SEQ ID NO: 2152389 - RNA, 19 nt, Homo sapiens
  misc_RNA (1)...(19): siRNA sense strand
gcaagcauuucacgaugga

SEQ ID NO: 2152390 - RNA, 19 nt, Homo sapiens
  misc_RNA (1)...(19): siRNA sense strand
caccauagccuaacucaga

SEQ ID NO: 2152391 - RNA, 19 nt, Homo sapiens
  misc_RNA (1)...(19): siRNA sense strand
gccuggagcuggugcuuaa

SEQ ID NO: 2152392 - RNA, 19 nt, Homo sapiens
  misc_RNA (1)...(19): siRNA sense strand
guagcaaccuuaacucaag

SEQ ID NO: 2152393 - RNA, 19 nt, Homo sapiens
  misc_RNA (1)...(19): siRNA sense strand
ggacauugaguuacagcua

SEQ ID NO: 2152394 - RNA, 19 nt, Homo sapiens
  misc_RNA (1)...(19): siRNA sense strand
gauccagaccuucccauuu

SEQ ID NO: 2152395 - RNA, 19 nt, Homo sapiens
  misc_RNA (1)...(19): siRNA sense strand
ccaggaugaucguuuaaga

SEQ ID NO: 2152396 - RNA, 19 nt, Homo sapiens
  misc_RNA (1)...(19): siRNA sense strand
ccucaaagcuaacaaacuc

SEQ ID NO: 2152397 - RNA, 19 nt, Homo sapiens
  misc_RNA (1)...(19): siRNA sense strand
caagccagauucacacuuc

SEQ ID NO: 2152398 - RNA, 19 nt, Homo sapiens
  misc_RNA (1)...(19): siRNA sense strand
ccaaauugcagacagauga

SEQ ID NO: 2152399 - RNA, 19 nt, Homo sapiens
  misc_RNA (1)...(19): siRNA sense strand
agagaaggaugcauuaaag

SEQ ID NO: 2152400 - RNA, 19 nt, Homo sapiens
  misc_RNA (1)...(19): siRNA sense strand
uaacacaaguaacaaaggu

SEQ ID NO: 2152401 - RNA, 19 nt, Homo sapiens
  misc_RNA (1)...(19): siRNA sense strand
gaacauccgaggcccaaga

SEQ ID NO: 2152402 - RNA, 19 nt, Homo sapiens
  misc_RNA (1)...(19): siRNA sense strand
gaucugaagaggaugauga

SEQ ID NO: 2152403 - RNA, 19 nt, Homo sapiens
  misc_RNA (1)...(19): siRNA sense strand
ugucaugccugaacagcua

SEQ ID NO: 2152404 - RNA, 19 nt, Homo sapiens
  misc_RNA (1)...(19): siRNA sense strand
ucacacagaagacccauuu

SEQ ID NO: 2152405 - RNA, 19 nt, Homo sapiens
  misc_RNA (1)...(19): siRNA sense strand
aaugaaauauggugggaaa

SEQ ID NO: 2152406 - RNA, 19 nt, Homo sapiens
  misc_RNA (1)...(19): siRNA sense strand
gcaggagcaucauuauugg

SEQ ID NO: 2152407 - RNA, 19 nt, Homo sapiens
  misc_RNA (1)...(19): siRNA sense strand
gcaccacuaccuccaguaa

SEQ ID NO: 2152408 - RNA, 19 nt, Homo sapiens
  misc_RNA (1)...(19): siRNA sense strand
ccaaauugcugccucuucu

SEQ ID NO: 2152409 - RNA, 19 nt, Homo sapiens
  misc_RNA (1)...(19): siRNA sense strand
gaaagccggaguguucaua

SEQ ID NO: 2152410 - RNA, 19 nt, Homo sapiens
  misc_RNA (1)...(19): siRNA sense strand
agaggcuuaugaugaauua

SEQ ID NO: 2152411 - RNA, 19 nt, Homo sapiens
  misc_RNA (1)...(19): siRNA sense strand
gcuaauaggacuagucugu

SEQ ID NO: 2152412 - RNA, 19 nt, Homo sapiens
  misc_RNA (1)...(19): siRNA sense strand
gaaugaacaucagcagaca

SEQ ID NO: 2152413 - RNA, 19 nt, Homo sapiens
  misc_RNA (1)...(19): siRNA sense strand
gguagccacuccagcacua

SEQ ID NO: 2152414 - RNA, 19 nt, Homo sapiens
  misc_RNA (1)...(19): siRNA sense strand
caaagaaaccccaggauuu

SEQ ID NO: 2152415 - RNA, 19 nt, Homo sapiens
  misc_RNA (1)...(19): siRNA sense strand
guaaaggaggugaugguaa

SEQ ID NO: 2152416 - RNA, 19 nt, Homo sapiens
  misc_RNA (1)...(19): siRNA sense strand
acacagaagacccauuuaa

SEQ ID NO: 2152417 - RNA, 19 nt, Homo sapiens
  misc_RNA (1)...(19): siRNA sense strand
uagcugccaugauuagaaa

SEQ ID NO: 2152418 - RNA, 19 nt, Homo sapiens
  misc_RNA (1)...(19): siRNA sense strand
ggaguuguggcucuaaauu

SEQ ID NO: 2152419 - RNA, 19 nt, Homo sapiens
  misc_RNA (1)...(19): siRNA sense strand
gccacuagcuacucccaaa

SEQ ID NO: 2152420 - RNA, 19 nt, Homo sapiens
  misc_RNA (1)...(19): siRNA sense strand
gcaagagguggaaauguug

SEQ ID NO: 2152421 - RNA, 19 nt, Homo sapiens
  misc_RNA (1)...(19): siRNA sense strand
ccagucugcugaagauuau

SEQ ID NO: 2152422 - RNA, 19 nt, Homo sapiens
  misc_RNA (1)...(19): siRNA sense strand
uauguaaccuuguugagau

SEQ ID NO: 2152423 - RNA, 19 nt, Homo sapiens
  misc_RNA (1)...(19): siRNA sense strand
gcaaugucaugccugaaca

SEQ ID NO: 2152424 - RNA, 19 nt, Homo sapiens
  misc_RNA (1)...(19): siRNA sense strand
uaaaacgucugaagaaguu

SEQ ID NO: 2152425 - RNA, 19 nt, Homo sapiens
  misc_RNA (1)...(19): siRNA sense strand
gcucuaaauucacacaagu

SEQ ID NO: 2152426 - RNA, 19 nt, Homo sapiens
  misc_RNA (1)...(19): siRNA sense strand
gaacagcuugaguggaauu

SEQ ID NO: 2152427 - RNA, 19 nt, Homo sapiens
  misc_RNA (1)...(19): siRNA sense strand
gcaaguaucaugaguaagc

SEQ ID NO: 2152428 - RNA, 19 nt, Homo sapiens
  misc_RNA (1)...(19): siRNA sense strand
cacuggaucuuguuucuga

SEQ ID NO: 2152429 - RNA, 19 nt, Homo sapiens
  misc_RNA (1)...(19): siRNA sense strand
aaauggaucugaagaggau

SEQ ID NO: 2152430 - RNA, 19 nt, Homo sapiens
  misc_RNA (1)...(19): siRNA sense strand
gaugaucguuuaagagaac

SEQ ID NO: 2152431 - RNA, 19 nt, Homo sapiens
  misc_RNA (1)...(19): siRNA sense strand
uguccaggaugaucguuua

SEQ ID NO: 2152432 - RNA, 19 nt, Homo sapiens
  misc_RNA (1)...(19): siRNA sense strand
cugaagaaguuacaucuca

SEQ ID NO: 2152433 - RNA, 19 nt, Homo sapiens
  misc_RNA (1)...(19): siRNA sense strand
cauuaaagaaggagucuaa

SEQ ID NO: 2152434 - RNA, 19 nt, Homo sapiens
  misc_RNA (1)...(19): siRNA sense strand
ccgcuucucuaacaacaaa

SEQ ID NO: 2152435 - RNA, 19 nt, Homo sapiens
  misc_RNA (1)...(19): siRNA sense strand
agaacuaugugucuccauu

SEQ ID NO: 2152436 - RNA, 19 nt, Homo sapiens
  misc_RNA (1)...(19): siRNA sense strand
gggaugcuaugaguuagaa

SEQ ID NO: 2152437 - RNA, 19 nt, Homo sapiens
  misc_RNA (1)...(19): siRNA sense strand
guggaaauguuggcuaaga

SEQ ID NO: 2152438 - RNA, 19 nt, Homo sapiens
  misc_RNA (1)...(19): siRNA sense strand
gccagucugcugaagauua

SEQ ID NO: 2152439 - RNA, 19 nt, Homo sapiens
  misc_RNA (1)...(19): siRNA sense strand
ccacugggaugacacuauc

SEQ ID NO: 2152440 - RNA, 19 nt, Homo sapiens
  misc_RNA (1)...(19): siRNA sense strand
ggaugaucguuuaagagaa

SEQ ID NO: 2152441 - RNA, 19 nt, Homo sapiens
  misc_RNA (1)...(19): siRNA sense strand
agaaagagaaggaugcauu

SEQ ID NO: 2152442 - RNA, 19 nt, Homo sapiens
  misc_RNA (1)...(19): siRNA sense strand
gaaggaugcauuaaagaag

SEQ ID NO: 2152443 - RNA, 19 nt, Homo sapiens
  misc_RNA (1)...(19): siRNA sense strand
ugaguggaauugcaaugaa

SEQ ID NO: 2152444 - RNA, 19 nt, Homo sapiens
  misc_RNA (1)...(19): siRNA sense strand
gaguagcguucauuagcuu

SEQ ID NO: 2152445 - RNA, 19 nt, Homo sapiens
  misc_RNA (1)...(19): siRNA sense strand
gaagaaguuacaucucaau

SEQ ID NO: 2152446 - RNA, 19 nt, Homo sapiens
  misc_RNA (1)...(19): siRNA sense strand
gagaaggaugcauuaaaga

SEQ ID NO: 2152447 - RNA, 19 nt, Homo sapiens
  misc_RNA (1)...(19): siRNA sense strand
uaaaggggacacuaaauua

SEQ ID NO: 2152448 - RNA, 19 nt, Homo sapiens
  misc_RNA (1)...(19): siRNA sense strand
gaguggaauugcaaugaau

SEQ ID NO: 2152449 - RNA, 19 nt, Homo sapiens
  misc_RNA (1)...(19): siRNA sense strand
auucagaacccuaaaguuu

SEQ ID NO: 2152450 - RNA, 19 nt, Homo sapiens
  misc_RNA (1)...(19): siRNA sense strand
gaucaaauugggaugcuau

SEQ ID NO: 2152451 - RNA, 19 nt, Homo sapiens
  misc_RNA (1)...(19): siRNA sense strand
agaggaugaugaugagaaa

SEQ ID NO: 2152452 - RNA, 19 nt, Homo sapiens
  misc_RNA (1)...(19): siRNA sense strand
acacuuacagcaagcauuu

SEQ ID NO: 2152453 - RNA, 19 nt, Homo sapiens
  misc_RNA (1)...(19): siRNA sense strand
gaugcuggguggccuuguu

SEQ ID NO: 2152454 - RNA, 19 nt, Homo sapiens
  misc_RNA (1)...(19): siRNA sense strand
ccaaggcuauggugucaca

SEQ ID NO: 2152455 - RNA, 19 nt, Homo sapiens
  misc_RNA (1)...(19): siRNA sense strand
gcacagaccugcacaaguu

SEQ ID NO: 2152456 - RNA, 19 nt, Homo sapiens
  misc_RNA (1)...(19): siRNA sense strand
ggagauaucuggaaguuga

SEQ ID NO: 2152457 - RNA, 19 nt, Homo sapiens
  misc_RNA (1)...(19): siRNA sense strand
ggacacaacugaaaccaaa

SEQ ID NO: 2152458 - RNA, 19 nt, Homo sapiens
  misc_RNA (1)...(19): siRNA sense strand
uaaacaagauccaugcaua

SEQ ID NO: 2152459 - RNA, 19 nt, Homo sapiens
  misc_RNA (1)...(19): siRNA sense strand
gaagaaacccagucguaua

SEQ ID NO: 2152460 - RNA, 19 nt, Homo sapiens
  misc_RNA (1)...(19): siRNA sense strand
caaacaaccuauccuguga

SEQ ID NO: 2152461 - RNA, 19 nt, Homo sapiens
  misc_RNA (1)...(19): siRNA sense strand
gaaacccagucguauauau

SEQ ID NO: 2152462 - RNA, 19 nt, Homo sapiens
  misc_RNA (1)...(19): siRNA sense strand
gggaggaaauugcaacaaa

SEQ ID NO: 2152463 - RNA, 19 nt, Homo sapiens
  misc_RNA (1)...(19): siRNA sense strand
gaacauccaugaaaacaaa

SEQ ID NO: 2152464 - RNA, 19 nt, Homo sapiens
  misc_RNA (1)...(19): siRNA sense strand
guacaaccggcuauauuua

SEQ ID NO: 2152465 - RNA, 19 nt, Homo sapiens
  misc_RNA (1)...(19): siRNA sense strand
gcauauuccuuaaacaaga

SEQ ID NO: 2152466 - RNA, 19 nt, Homo sapiens
  misc_RNA (1)...(19): siRNA sense strand
uaacccagauuaugaugaa

SEQ ID NO: 2152467 - RNA, 19 nt, Homo sapiens
  misc_RNA (1)...(19): siRNA sense strand
ggaauuggcaucuauguca

SEQ ID NO: 2152468 - RNA, 19 nt, Homo sapiens
  misc_RNA (1)...(19): siRNA sense strand
gggcacagauggcuacaug

SEQ ID NO: 2152469 - RNA, 19 nt, Homo sapiens
  misc_RNA (1)...(19): siRNA sense strand
cauacaaccuugaaacgaa

SEQ ID NO: 2152470 - RNA, 19 nt, Homo sapiens
  misc_RNA (1)...(19): siRNA sense strand
gaagagaggauuuacaucu

SEQ ID NO: 2152471 - RNA, 19 nt, Homo sapiens
  misc_RNA (1)...(19): siRNA sense strand
caaccuauccugugaucua

SEQ ID NO: 2152472 - RNA, 19 nt, Homo sapiens
  misc_RNA (1)...(19): siRNA sense strand
gggagggccugauaaugaa

SEQ ID NO: 2152473 - RNA, 19 nt, Homo sapiens
  misc_RNA (1)...(19): siRNA sense strand
gauaauaccaaccuauaug

SEQ ID NO: 2152474 - RNA, 19 nt, Homo sapiens
  misc_RNA (1)...(19): siRNA sense strand
gggaagaaacccagucgua

SEQ ID NO: 2152475 - RNA, 19 nt, Homo sapiens
  misc_RNA (1)...(19): siRNA sense strand
gguacaaccggcuauauuu

SEQ ID NO: 2152476 - RNA, 19 nt, Homo sapiens
  misc_RNA (1)...(19): siRNA sense strand
ggacugggucauuguuuaa

SEQ ID NO: 2152477 - RNA, 19 nt, Homo sapiens
  misc_RNA (1)...(19): siRNA sense strand
caacaaaaccccaugaaaa

SEQ ID NO: 2152478 - RNA, 19 nt, Homo sapiens
  misc_RNA (1)...(19): siRNA sense strand
cagauaauaccaaccuaua

SEQ ID NO: 2152479 - RNA, 19 nt, Homo sapiens
  misc_RNA (1)...(19): siRNA sense strand
ggaagaaacccagucguau

SEQ ID NO: 2152480 - RNA, 19 nt, Homo sapiens
  misc_RNA (1)...(19): siRNA sense strand
ucagggaacucuggaggua

SEQ ID NO: 2152481 - RNA, 19 nt, Homo sapiens
  misc_RNA (1)...(19): siRNA sense strand
gaggugauccugggagaua

SEQ ID NO: 2152482 - RNA, 19 nt, Homo sapiens
  misc_RNA (1)...(19): siRNA sense strand
caaacggacugggucauug

SEQ ID NO: 2152483 - RNA, 19 nt, Homo sapiens
  misc_RNA (1)...(19): siRNA sense strand
ggacagcauauuccuuaaa

SEQ ID NO: 2152484 - RNA, 19 nt, Homo sapiens
  misc_RNA (1)...(19): siRNA sense strand
cggacugggucauuguuua

SEQ ID NO: 2152485 - RNA, 19 nt, Homo sapiens
  misc_RNA (1)...(19): siRNA sense strand
ugccagagccaguuuauuu

SEQ ID NO: 2152486 - RNA, 19 nt, Homo sapiens
  misc_RNA (1)...(19): siRNA sense strand
guccauguguguaauguga

SEQ ID NO: 2152487 - RNA, 19 nt, Homo sapiens
  misc_RNA (1)...(19): siRNA sense strand
caaccuauauguguuugga

SEQ ID NO: 2152488 - RNA, 19 nt, Homo sapiens
  misc_RNA (1)...(19): siRNA sense strand
gcaaaccucucccgaacac

SEQ ID NO: 2152489 - RNA, 19 nt, Homo sapiens
  misc_RNA (1)...(19): siRNA sense strand
caagauccaugcauacaac

SEQ ID NO: 2152490 - RNA, 19 nt, Homo sapiens
  misc_RNA (1)...(19): siRNA sense strand
caaguuagaucucaauacc

SEQ ID NO: 2152491 - RNA, 19 nt, Homo sapiens
  misc_RNA (1)...(19): siRNA sense strand
gcagauaauaccaaccuau

SEQ ID NO: 2152492 - RNA, 19 nt, Homo sapiens
  misc_RNA (1)...(19): siRNA sense strand
aguugaaucugcagacuuu

SEQ ID NO: 2152493 - RNA, 19 nt, Homo sapiens
  misc_RNA (1)...(19): siRNA sense strand
ggaggaaauugcaacaaaa

SEQ ID NO: 2152494 - RNA, 19 nt, Homo sapiens
  misc_RNA (1)...(19): siRNA sense strand
agagaggauuuacaucuug

SEQ ID NO: 2152495 - RNA, 19 nt, Homo sapiens
  misc_RNA (1)...(19): siRNA sense strand
gaacucuggagguaucauu

SEQ ID NO: 2152496 - RNA, 19 nt, Homo sapiens
  misc_RNA (1)...(19): siRNA sense strand
cgggagggccugauaauga

SEQ ID NO: 2152497 - RNA, 19 nt, Homo sapiens
  misc_RNA (1)...(19): siRNA sense strand
gacagcauauuccuuaaac

SEQ ID NO: 2152498 - RNA, 19 nt, Homo sapiens
  misc_RNA (1)...(19): siRNA sense strand
cagcauauuccuuaaacaa

SEQ ID NO: 2152499 - RNA, 19 nt, Homo sapiens
  misc_RNA (1)...(19): siRNA sense strand
gaaucgggagggccugaua

SEQ ID NO: 2152500 - RNA, 19 nt, Homo sapiens
  misc_RNA (1)...(19): siRNA sense strand
gcacaaguuagaucucaau

SEQ ID NO: 2152501 - RNA, 19 nt, Homo sapiens
  misc_RNA (1)...(19): siRNA sense strand
caacggcaaugacguccau

SEQ ID NO: 2152502 - RNA, 19 nt, Homo sapiens
  misc_RNA (1)...(19): siRNA sense strand
guacgggcaucccauuugg

SEQ ID NO: 2152503 - RNA, 19 nt, Homo sapiens
  misc_RNA (1)...(19): siRNA sense strand
ggagagagcaacggcaaug

SEQ ID NO: 2152504 - RNA, 19 nt, Homo sapiens
  misc_RNA (1)...(19): siRNA sense strand
ggacucaucgaacgcuuga

SEQ ID NO: 2152505 - RNA, 19 nt, Homo sapiens
  misc_RNA (1)...(19): siRNA sense strand
ccugugaucuaccagaaga

SEQ ID NO: 2152506 - RNA, 19 nt, Homo sapiens
  misc_RNA (1)...(19): siRNA sense strand
cagaagagaggauuuacau

SEQ ID NO: 2152507 - RNA, 19 nt, Homo sapiens
  misc_RNA (1)...(19): siRNA sense strand
ggucauuguuuaagaucug

SEQ ID NO: 2152508 - RNA, 19 nt, Homo sapiens
  misc_RNA (1)...(19): siRNA sense strand
gaaguugaaucugcagacu

SEQ ID NO: 2152509 - RNA, 19 nt, Homo sapiens
  misc_RNA (1)...(19): siRNA sense strand
uauauguguuuggagguua

SEQ ID NO: 2152510 - RNA, 19 nt, Homo sapiens
  misc_RNA (1)...(19): siRNA sense strand
caucgaacgcuugaaauga

SEQ ID NO: 2152511 - RNA, 19 nt, Homo sapiens
  misc_RNA (1)...(19): siRNA sense strand
cuggacagcauauuccuua

SEQ ID NO: 2152512 - RNA, 19 nt, Homo sapiens
  misc_RNA (1)...(19): siRNA sense strand
aagaaacccagucguauau

SEQ ID NO: 2152513 - RNA, 19 nt, Homo sapiens
  misc_RNA (1)...(19): siRNA sense strand
uauaagagaugggcuuugc

SEQ ID NO: 2152514 - RNA, 19 nt, Homo sapiens
  misc_RNA (1)...(19): siRNA sense strand
ggagguacaaccggcuaua

SEQ ID NO: 2152515 - RNA, 19 nt, Homo sapiens
  misc_RNA (1)...(19): siRNA sense strand
gaaguggacaucguugugu

SEQ ID NO: 2152516 - RNA, 19 nt, Homo sapiens
  misc_RNA (1)...(19): siRNA sense strand
guggugaacauccaugaaa

SEQ ID NO: 2152517 - RNA, 19 nt, Homo sapiens
  misc_RNA (1)...(19): siRNA sense strand
caucaauggcucccuuuau

SEQ ID NO: 2152518 - RNA, 19 nt, Homo sapiens
  misc_RNA (1)...(19): siRNA sense strand
gcuauggccaucaucaaug

SEQ ID NO: 2152519 - RNA, 19 nt, Homo sapiens
  misc_RNA (1)...(19): siRNA sense strand
ugggagauaucuggaaguu

SEQ ID NO: 2152520 - RNA, 19 nt, Homo sapiens
  misc_RNA (1)...(19): siRNA sense strand
gcauacaaccuugaaacga

SEQ ID NO: 2152521 - RNA, 19 nt, Homo sapiens
  misc_RNA (1)...(19): siRNA sense strand
gguacgggcaucccauuug

SEQ ID NO: 2152522 - RNA, 19 nt, Homo sapiens
  misc_RNA (1)...(19): siRNA sense strand
auaccaaccuauauguguu

SEQ ID NO: 2152523 - RNA, 19 nt, Homo sapiens
  misc_RNA (1)...(19): siRNA sense strand
guacuuccuggacagcaua

SEQ ID NO: 2152524 - RNA, 19 nt, Homo sapiens
  misc_RNA (1)...(19): siRNA sense strand
gagaguggacacaacugaa

SEQ ID NO: 2152525 - RNA, 19 nt, Homo sapiens
  misc_RNA (1)...(19): siRNA sense strand
aucaauggcucccuuuaug

SEQ ID NO: 2152526 - RNA, 19 nt, Homo sapiens
  misc_RNA (1)...(19): siRNA sense strand
uaccagaagagaggauuua

SEQ ID NO: 2152527 - RNA, 19 nt, Homo sapiens
  misc_RNA (1)...(19): siRNA sense strand
gaggaguggugaacaucca

SEQ ID NO: 2152528 - RNA, 19 nt, Homo sapiens
  misc_RNA (1)...(19): siRNA sense strand
uggcaucuaugucacuugu

SEQ ID NO: 2152529 - RNA, 19 nt, Homo sapiens
  misc_RNA (1)...(19): siRNA sense strand
gcaacaaaaccccaugaaa

SEQ ID NO: 2152530 - RNA, 19 nt, Homo sapiens
  misc_RNA (1)...(19): siRNA sense strand
ggccugauaaugaagacua

SEQ ID NO: 2152531 - RNA, 19 nt, Homo sapiens
  misc_RNA (1)...(19): siRNA sense strand
ucacuugugcugcauggaa

SEQ ID NO: 2152532 - RNA, 19 nt, Homo sapiens
  misc_RNA (1)...(19): siRNA sense strand
cuuuaugucuuuggaggua

SEQ ID NO: 2152533 - RNA, 19 nt, Homo sapiens
  misc_RNA (1)...(19): siRNA sense strand
gagagagcaacggcaauga

SEQ ID NO: 2152534 - RNA, 19 nt, Homo sapiens
  misc_RNA (1)...(19): siRNA sense strand
auacaaccuugaaacgaau

SEQ ID NO: 2152535 - RNA, 19 nt, Homo sapiens
  misc_RNA (1)...(19): siRNA sense strand
acaaccggcuauauuuaca

SEQ ID NO: 2152536 - RNA, 19 nt, Homo sapiens
  misc_RNA (1)...(19): siRNA sense strand
gacaggcuauggccaucau

SEQ ID NO: 2152537 - RNA, 19 nt, Homo sapiens
  misc_RNA (1)...(19): siRNA sense strand
ccaguggcgaccagaaauu

SEQ ID NO: 2152538 - RNA, 19 nt, Homo sapiens
  misc_RNA (1)...(19): siRNA sense strand
gagguacaaccggcuauau

SEQ ID NO: 2152539 - RNA, 19 nt, Homo sapiens
  misc_RNA (1)...(19): siRNA sense strand
ggcaaugacguccaugugu

SEQ ID NO: 2152540 - RNA, 19 nt, Homo sapiens
  misc_RNA (1)...(19): siRNA sense strand
gagguacgggcaucccauu

SEQ ID NO: 2152541 - RNA, 19 nt, Homo sapiens
  misc_RNA (1)...(19): siRNA sense strand
guaaugugaaguauaagag

SEQ ID NO: 2152542 - RNA, 19 nt, Homo sapiens
  misc_RNA (1)...(19): siRNA sense strand
aaugaagacuauccucucu

SEQ ID NO: 2152543 - RNA, 19 nt, Homo sapiens
  misc_RNA (1)...(19): siRNA sense strand
acgaaugccugggaggaaa

SEQ ID NO: 2152544 - RNA, 19 nt, Homo sapiens
  misc_RNA (1)...(19): siRNA sense strand
ggcagauaauaccaaccua

SEQ ID NO: 2152545 - RNA, 19 nt, Homo sapiens
  misc_RNA (1)...(19): siRNA sense strand
agaguggacacaacugaaa

SEQ ID NO: 2152546 - RNA, 19 nt, Homo sapiens
  misc_RNA (1)...(19): siRNA sense strand
uggcucccuuuaugucuuu

SEQ ID NO: 2152547 - RNA, 19 nt, Homo sapiens
  misc_RNA (1)...(19): siRNA sense strand
ugacguccauguguguaau

SEQ ID NO: 2152548 - RNA, 19 nt, Homo sapiens
  misc_RNA (1)...(19): siRNA sense strand
aaaccucucccgaacacaa

SEQ ID NO: 2152549 - RNA, 19 nt, Homo sapiens
  misc_RNA (1)...(19): siRNA sense strand
uaagaucuggcugguggua

SEQ ID NO: 2152550 - RNA, 19 nt, Homo sapiens
  misc_RNA (1)...(19): siRNA sense strand
cuauauguguuuggagguu

SEQ ID NO: 2152551 - RNA, 19 nt, Homo sapiens
  misc_RNA (1)...(19): siRNA sense strand
gauccaugcauacaaccuu

SEQ ID NO: 2152552 - RNA, 19 nt, Homo sapiens
  misc_RNA (1)...(19): siRNA sense strand
aaacaagauccaugcauac

SEQ ID NO: 2152553 - RNA, 19 nt, Homo sapiens
  misc_RNA (1)...(19): siRNA sense strand
ucaauggcucccuuuaugu

SEQ ID NO: 2152554 - RNA, 19 nt, Homo sapiens
  misc_RNA (1)...(19): siRNA sense strand
aaacccagucguauauaug

SEQ ID NO: 2152555 - RNA, 19 nt, Homo sapiens
  misc_RNA (1)...(19): siRNA sense strand
gcacagaccugcacaaguu

SEQ ID NO: 2152556 - RNA, 19 nt, Homo sapiens
  misc_RNA (1)...(19): siRNA sense strand
ggagauaucuggaaguuga

SEQ ID NO: 2152557 - RNA, 19 nt, Homo sapiens
  misc_RNA (1)...(19): siRNA sense strand
ggacacaacugaaaccaaa

SEQ ID NO: 2152558 - RNA, 19 nt, Homo sapiens
  misc_RNA (1)...(19): siRNA sense strand
uaaacaagauccaugcaua

SEQ ID NO: 2152559 - RNA, 19 nt, Homo sapiens
  misc_RNA (1)...(19): siRNA sense strand
gaagaaacccagucguaua

SEQ ID NO: 2152560 - RNA, 19 nt, Homo sapiens
  misc_RNA (1)...(19): siRNA sense strand
caaacaaccuauccuguga

SEQ ID NO: 2152561 - RNA, 19 nt, Homo sapiens
  misc_RNA (1)...(19): siRNA sense strand
gaaacccagucguauauau

SEQ ID NO: 2152562 - RNA, 19 nt, Homo sapiens
  misc_RNA (1)...(19): siRNA sense strand
gggaggaaauugcaacaaa

SEQ ID NO: 2152563 - RNA, 19 nt, Homo sapiens
  misc_RNA (1)...(19): siRNA sense strand
gaacauccaugaaaacaaa

SEQ ID NO: 2152564 - RNA, 19 nt, Homo sapiens
  misc_RNA (1)...(19): siRNA sense strand
guacaaccggcuauauuua

SEQ ID NO: 2152565 - RNA, 19 nt, Homo sapiens
  misc_RNA (1)...(19): siRNA sense strand
gcauauuccuuaaacaaga

SEQ ID NO: 2152566 - RNA, 19 nt, Homo sapiens
  misc_RNA (1)...(19): siRNA sense strand
uaacccagauuaugaugaa

SEQ ID NO: 2152567 - RNA, 19 nt, Homo sapiens
  misc_RNA (1)...(19): siRNA sense strand
ggaauuggcaucuauguca

SEQ ID NO: 2152568 - RNA, 19 nt, Homo sapiens
  misc_RNA (1)...(19): siRNA sense strand
gggcacagauggcuacaug

SEQ ID NO: 2152569 - RNA, 19 nt, Homo sapiens
  misc_RNA (1)...(19): siRNA sense strand
cauacaaccuugaaacgaa

SEQ ID NO: 2152570 - RNA, 19 nt, Homo sapiens
  misc_RNA (1)...(19): siRNA sense strand
gaagagaggauuuacaucu

SEQ ID NO: 2152571 - RNA, 19 nt, Homo sapiens
  misc_RNA (1)...(19): siRNA sense strand
caaccuauccugugaucua

SEQ ID NO: 2152572 - RNA, 19 nt, Homo sapiens
  misc_RNA (1)...(19): siRNA sense strand
gggagggccugauaaugaa

SEQ ID NO: 2152573 - RNA, 19 nt, Homo sapiens
  misc_RNA (1)...(19): siRNA sense strand
gauaauaccaaccuauaug

SEQ ID NO: 2152574 - RNA, 19 nt, Homo sapiens
  misc_RNA (1)...(19): siRNA sense strand
gggaagaaacccagucgua

SEQ ID NO: 2152575 - RNA, 19 nt, Homo sapiens
  misc_RNA (1)...(19): siRNA sense strand
gguacaaccggcuauauuu

SEQ ID NO: 2152576 - RNA, 19 nt, Homo sapiens
  misc_RNA (1)...(19): siRNA sense strand
ggacugggucauuguuuaa

SEQ ID NO: 2152577 - RNA, 19 nt, Homo sapiens
  misc_RNA (1)...(19): siRNA sense strand
caacaaaaccccaugaaaa

SEQ ID NO: 2152578 - RNA, 19 nt, Homo sapiens
  misc_RNA (1)...(19): siRNA sense strand
cagauaauaccaaccuaua

SEQ ID NO: 2152579 - RNA, 19 nt, Homo sapiens
  misc_RNA (1)...(19): siRNA sense strand
ggaagaaacccagucguau

SEQ ID NO: 2152580 - RNA, 19 nt, Homo sapiens
  misc_RNA (1)...(19): siRNA sense strand
ucagggaacucuggaggua

SEQ ID NO: 2152581 - RNA, 19 nt, Homo sapiens
  misc_RNA (1)...(19): siRNA sense strand
gaggugauccugggagaua

SEQ ID NO: 2152582 - RNA, 19 nt, Homo sapiens
  misc_RNA (1)...(19): siRNA sense strand
caaacggacugggucauug

SEQ ID NO: 2152583 - RNA, 19 nt, Homo sapiens
  misc_RNA (1)...(19): siRNA sense strand
ggacagcauauuccuuaaa

SEQ ID NO: 2152584 - RNA, 19 nt, Homo sapiens
  misc_RNA (1)...(19): siRNA sense strand
cggacugggucauuguuua

SEQ ID NO: 2152585 - RNA, 19 nt, Homo sapiens
  misc_RNA (1)...(19): siRNA sense strand
ugccagagccaguuuauuu

SEQ ID NO: 2152586 - RNA, 19 nt, Homo sapiens
  misc_RNA (1)...(19): siRNA sense strand
guccauguguguaauguga

SEQ ID NO: 2152587 - RNA, 19 nt, Homo sapiens
  misc_RNA (1)...(19): siRNA sense strand
caaccuauauguguuugga

SEQ ID NO: 2152588 - RNA, 19 nt, Homo sapiens
  misc_RNA (1)...(19): siRNA sense strand
gcaaaccucucccgaacac

SEQ ID NO: 2152589 - RNA, 19 nt, Homo sapiens
  misc_RNA (1)...(19): siRNA sense strand
caagauccaugcauacaac

SEQ ID NO: 2152590 - RNA, 19 nt, Homo sapiens
  misc_RNA (1)...(19): siRNA sense strand
caaguuagaucucaauacc

SEQ ID NO: 2152591 - RNA, 19 nt, Homo sapiens
  misc_RNA (1)...(19): siRNA sense strand
gcagauaauaccaaccuau

SEQ ID NO: 2152592 - RNA, 19 nt, Homo sapiens
  misc_RNA (1)...(19): siRNA sense strand
aguugaaucugcagacuuu

SEQ ID NO: 2152593 - RNA, 19 nt, Homo sapiens
  misc_RNA (1)...(19): siRNA sense strand
ggaggaaauugcaacaaaa

SEQ ID NO: 2152594 - RNA, 19 nt, Homo sapiens
  misc_RNA (1)...(19): siRNA sense strand
agagaggauuuacaucuug

SEQ ID NO: 2152595 - RNA, 19 nt, Homo sapiens
  misc_RNA (1)...(19): siRNA sense strand
gaacucuggagguaucauu

SEQ ID NO: 2152596 - RNA, 19 nt, Homo sapiens
  misc_RNA (1)...(19): siRNA sense strand
cgggagggccugauaauga

SEQ ID NO: 2152597 - RNA, 19 nt, Homo sapiens
  misc_RNA (1)...(19): siRNA sense strand
gacagcauauuccuuaaac

SEQ ID NO: 2152598 - RNA, 19 nt, Homo sapiens
  misc_RNA (1)...(19): siRNA sense strand
cagcauauuccuuaaacaa

SEQ ID NO: 2152599 - RNA, 19 nt, Homo sapiens
  misc_RNA (1)...(19): siRNA sense strand
gaaucgggagggccugaua

SEQ ID NO: 2152600 - RNA, 19 nt, Homo sapiens
  misc_RNA (1)...(19): siRNA sense strand
gcacaaguuagaucucaau

SEQ ID NO: 2152601 - RNA, 19 nt, Homo sapiens
  misc_RNA (1)...(19): siRNA sense strand
caacggcaaugacguccau

SEQ ID NO: 2152602 - RNA, 19 nt, Homo sapiens
  misc_RNA (1)...(19): siRNA sense strand
guacgggcaucccauuugg

SEQ ID NO: 2152603 - RNA, 19 nt, Homo sapiens
  misc_RNA (1)...(19): siRNA sense strand
ggagagagcaacggcaaug

SEQ ID NO: 2152604 - RNA, 19 nt, Homo sapiens
  misc_RNA (1)...(19): siRNA sense strand
ggacucaucgaacgcuuga

SEQ ID NO: 2152605 - RNA, 19 nt, Homo sapiens
  misc_RNA (1)...(19): siRNA sense strand
ccugugaucuaccagaaga

SEQ ID NO: 2152606 - RNA, 19 nt, Homo sapiens
  misc_RNA (1)...(19): siRNA sense strand
cagaagagaggauuuacau

SEQ ID NO: 2152607 - RNA, 19 nt, Homo sapiens
  misc_RNA (1)...(19): siRNA sense strand
ggucauuguuuaagaucug

SEQ ID NO: 2152608 - RNA, 19 nt, Homo sapiens
  misc_RNA (1)...(19): siRNA sense strand
gaaguugaaucugcagacu

SEQ ID NO: 2152609 - RNA, 19 nt, Homo sapiens
  misc_RNA (1)...(19): siRNA sense strand
uauauguguuuggagguua

SEQ ID NO: 2152610 - RNA, 19 nt, Homo sapiens
  misc_RNA (1)...(19): siRNA sense strand
caucgaacgcuugaaauga

SEQ ID NO: 2152611 - RNA, 19 nt, Homo sapiens
  misc_RNA (1)...(19): siRNA sense strand
cuggacagcauauuccuua

SEQ ID NO: 2152612 - RNA, 19 nt, Homo sapiens
  misc_RNA (1)...(19): siRNA sense strand
aagaaacccagucguauau

SEQ ID NO: 2152613 - RNA, 19 nt, Homo sapiens
  misc_RNA (1)...(19): siRNA sense strand
uauaagagaugggcuuugc

SEQ ID NO: 2152614 - RNA, 19 nt, Homo sapiens
  misc_RNA (1)...(19): siRNA sense strand
ggagguacaaccggcuaua

SEQ ID NO: 2152615 - RNA, 19 nt, Homo sapiens
  misc_RNA (1)...(19): siRNA sense strand
gaaguggacaucguugugu

SEQ ID NO: 2152616 - RNA, 19 nt, Homo sapiens
  misc_RNA (1)...(19): siRNA sense strand
guggugaacauccaugaaa

SEQ ID NO: 2152617 - RNA, 19 nt, Homo sapiens
  misc_RNA (1)...(19): siRNA sense strand
caucaauggcucccuuuau

SEQ ID NO: 2152618 - RNA, 19 nt, Homo sapiens
  misc_RNA (1)...(19): siRNA sense strand
gcuauggccaucaucaaug

SEQ ID NO: 2152619 - RNA, 19 nt, Homo sapiens
  misc_RNA (1)...(19): siRNA sense strand
ugggagauaucuggaaguu

SEQ ID NO: 2152620 - RNA, 19 nt, Homo sapiens
  misc_RNA (1)...(19): siRNA sense strand
gcauacaaccuugaaacga

SEQ ID NO: 2152621 - RNA, 19 nt, Homo sapiens
  misc_RNA (1)...(19): siRNA sense strand
gguacgggcaucccauuug

SEQ ID NO: 2152622 - RNA, 19 nt, Homo sapiens
  misc_RNA (1)...(19): siRNA sense strand
auaccaaccuauauguguu

SEQ ID NO: 2152623 - RNA, 19 nt, Homo sapiens
  misc_RNA (1)...(19): siRNA sense strand
guacuuccuggacagcaua

SEQ ID NO: 2152624 - RNA, 19 nt, Homo sapiens
  misc_RNA (1)...(19): siRNA sense strand
gagaguggacacaacugaa

SEQ ID NO: 2152625 - RNA, 19 nt, Homo sapiens
  misc_RNA (1)...(19): siRNA sense strand
aucaauggcucccuuuaug

SEQ ID NO: 2152626 - RNA, 19 nt, Homo sapiens
  misc_RNA (1)...(19): siRNA sense strand
uaccagaagagaggauuua

SEQ ID NO: 2152627 - RNA, 19 nt, Homo sapiens
  misc_RNA (1)...(19): siRNA sense strand
gaggaguggugaacaucca

SEQ ID NO: 2152628 - RNA, 19 nt, Homo sapiens
  misc_RNA (1)...(19): siRNA sense strand
uggcaucuaugucacuugu

SEQ ID NO: 2152629 - RNA, 19 nt, Homo sapiens
  misc_RNA (1)...(19): siRNA sense strand
gcaacaaaaccccaugaaa

SEQ ID NO: 2152630 - RNA, 19 nt, Homo sapiens
  misc_RNA (1)...(19): siRNA sense strand
ggccugauaaugaagacua

SEQ ID NO: 2152631 - RNA, 19 nt, Homo sapiens
  misc_RNA (1)...(19): siRNA sense strand
ucacuugugcugcauggaa

SEQ ID NO: 2152632 - RNA, 19 nt, Homo sapiens
  misc_RNA (1)...(19): siRNA sense strand
cuuuaugucuuuggaggua

SEQ ID NO: 2152633 - RNA, 19 nt, Homo sapiens
  misc_RNA (1)...(19): siRNA sense strand
gagagagcaacggcaauga

SEQ ID NO: 2152634 - RNA, 19 nt, Homo sapiens
  misc_RNA (1)...(19): siRNA sense strand
auacaaccuugaaacgaau

SEQ ID NO: 2152635 - RNA, 19 nt, Homo sapiens
  misc_RNA (1)...(19): siRNA sense strand
acaaccggcuauauuuaca

SEQ ID NO: 2152636 - RNA, 19 nt, Homo sapiens
  misc_RNA (1)...(19): siRNA sense strand
gacaggcuauggccaucau

SEQ ID NO: 2152637 - RNA, 19 nt, Homo sapiens
  misc_RNA (1)...(19): siRNA sense strand
ccaguggcgaccagaaauu

SEQ ID NO: 2152638 - RNA, 19 nt, Homo sapiens
  misc_RNA (1)...(19): siRNA sense strand
gagguacaaccggcuauau

SEQ ID NO: 2152639 - RNA, 19 nt, Homo sapiens
  misc_RNA (1)...(19): siRNA sense strand
ggcaaugacguccaugugu

SEQ ID NO: 2152640 - RNA, 19 nt, Homo sapiens
  misc_RNA (1)...(19): siRNA sense strand
gagguacgggcaucccauu

SEQ ID NO: 2152641 - RNA, 19 nt, Homo sapiens
  misc_RNA (1)...(19): siRNA sense strand
guaaugugaaguauaagag

SEQ ID NO: 2152642 - RNA, 19 nt, Homo sapiens
  misc_RNA (1)...(19): siRNA sense strand
aaugaagacuauccucucu

SEQ ID NO: 2152643 - RNA, 19 nt, Homo sapiens
  misc_RNA (1)...(19): siRNA sense strand
acgaaugccugggaggaaa

SEQ ID NO: 2152644 - RNA, 19 nt, Homo sapiens
  misc_RNA (1)...(19): siRNA sense strand
ggcagauaauaccaaccua

SEQ ID NO: 2152645 - RNA, 19 nt, Homo sapiens
  misc_RNA (1)...(19): siRNA sense strand
agaguggacacaacugaaa

SEQ ID NO: 2152646 - RNA, 19 nt, Homo sapiens
  misc_RNA (1)...(19): siRNA sense strand
uggcucccuuuaugucuuu

SEQ ID NO: 2152647 - RNA, 19 nt, Homo sapiens
  misc_RNA (1)...(19): siRNA sense strand
ugacguccauguguguaau

SEQ ID NO: 2152648 - RNA, 19 nt, Homo sapiens
  misc_RNA (1)...(19): siRNA sense strand
aaaccucucccgaacacaa

SEQ ID NO: 2152649 - RNA, 19 nt, Homo sapiens
  misc_RNA (1)...(19): siRNA sense strand
uaagaucuggcugguggua

SEQ ID NO: 2152650 - RNA, 19 nt, Homo sapiens
  misc_RNA (1)...(19): siRNA sense strand
cuauauguguuuggagguu

SEQ ID NO: 2152651 - RNA, 19 nt, Homo sapiens
  misc_RNA (1)...(19): siRNA sense strand
gauccaugcauacaaccuu

SEQ ID NO: 2152652 - RNA, 19 nt, Homo sapiens
  misc_RNA (1)...(19): siRNA sense strand
aaacaagauccaugcauac

SEQ ID NO: 2152653 - RNA, 19 nt, Homo sapiens
  misc_RNA (1)...(19): siRNA sense strand
ucaauggcucccuuuaugu

SEQ ID NO: 2152654 - RNA, 19 nt, Homo sapiens
  misc_RNA (1)...(19): siRNA sense strand
aaacccagucguauauaug

SEQ ID NO: 2152655 - RNA, 19 nt, Homo sapiens
  misc_RNA (1)...(19): siRNA sense strand
ggaaagugaucuagaaauu

SEQ ID NO: 2152656 - RNA, 19 nt, Homo sapiens
  misc_RNA (1)...(19): siRNA sense strand
ccagaaagccguugacuua

SEQ ID NO: 2152657 - RNA, 19 nt, Homo sapiens
  misc_RNA (1)...(19): siRNA sense strand
ugacagagccauugaaaua

SEQ ID NO: 2152658 - RNA, 19 nt, Homo sapiens
  misc_RNA (1)...(19): siRNA sense strand
gaaagaauagaacgaguua

SEQ ID NO: 2152659 - RNA, 19 nt, Homo sapiens
  misc_RNA (1)...(19): siRNA sense strand
guaaugcccuucugauaaa

SEQ ID NO: 2152660 - RNA, 19 nt, Homo sapiens
  misc_RNA (1)...(19): siRNA sense strand
guaagaagguggaggaaga

SEQ ID NO: 2152661 - RNA, 19 nt, Homo sapiens
  misc_RNA (1)...(19): siRNA sense strand
gaaagccguugacuuauuc

SEQ ID NO: 2152662 - RNA, 19 nt, Homo sapiens
  misc_RNA (1)...(19): siRNA sense strand
gaaagaaguucaacauagg

SEQ ID NO: 2152663 - RNA, 19 nt, Homo sapiens
  misc_RNA (1)...(19): siRNA sense strand
gaagguggaggaagacuua

SEQ ID NO: 2152664 - RNA, 19 nt, Homo sapiens
  misc_RNA (1)...(19): siRNA sense strand
uaaagaaggugugauugaa

SEQ ID NO: 2152665 - RNA, 19 nt, Homo sapiens
  misc_RNA (1)...(19): siRNA sense strand
gaauagaacgaguuaagaa

SEQ ID NO: 2152666 - RNA, 19 nt, Homo sapiens
  misc_RNA (1)...(19): siRNA sense strand
uaagaaggcucgagaagag

SEQ ID NO: 2152667 - RNA, 19 nt, Homo sapiens
  misc_RNA (1)...(19): siRNA sense strand
ugaggaaagugaucuagaa

SEQ ID NO: 2152668 - RNA, 19 nt, Homo sapiens
  misc_RNA (1)...(19): siRNA sense strand
gcucgaaacccagcaaaua

SEQ ID NO: 2152669 - RNA, 19 nt, Homo sapiens
  misc_RNA (1)...(19): siRNA sense strand
gaacaucggagaaaguaug

SEQ ID NO: 2152670 - RNA, 19 nt, Homo sapiens
  misc_RNA (1)...(19): siRNA sense strand
agaaagccguugacuuauu

SEQ ID NO: 2152671 - RNA, 19 nt, Homo sapiens
  misc_RNA (1)...(19): siRNA sense strand
gaacgagcuucaggccuuu

SEQ ID NO: 2152672 - RNA, 19 nt, Homo sapiens
  misc_RNA (1)...(19): siRNA sense strand
gaaagugaucuagaaauug

SEQ ID NO: 2152673 - RNA, 19 nt, Homo sapiens
  misc_RNA (1)...(19): siRNA sense strand
ggaagaagcagcccaugau

SEQ ID NO: 2152674 - RNA, 19 nt, Homo sapiens
  misc_RNA (1)...(19): siRNA sense strand
gaaagcauacagacuucua

SEQ ID NO: 2152675 - RNA, 19 nt, Homo sapiens
  misc_RNA (1)...(19): siRNA sense strand
acagagccauugaaauaaa

SEQ ID NO: 2152676 - RNA, 19 nt, Homo sapiens
  misc_RNA (1)...(19): siRNA sense strand
ggacucaaugaaauucuua

SEQ ID NO: 2152677 - RNA, 19 nt, Homo sapiens
  misc_RNA (1)...(19): siRNA sense strand
aaagguggcugcuauugga

SEQ ID NO: 2152678 - RNA, 19 nt, Homo sapiens
  misc_RNA (1)...(19): siRNA sense strand
ggagaaaguaugagcgaaa

SEQ ID NO: 2152679 - RNA, 19 nt, Homo sapiens
  misc_RNA (1)...(19): siRNA sense strand
cguaaugcccuucugauaa

SEQ ID NO: 2152680 - RNA, 19 nt, Homo sapiens
  misc_RNA (1)...(19): siRNA sense strand
ccuguaaauuggauuauga

SEQ ID NO: 2152681 - RNA, 19 nt, Homo sapiens
  misc_RNA (1)...(19): siRNA sense strand
gaggaaaugcgcuucuuga

SEQ ID NO: 2152682 - RNA, 19 nt, Homo sapiens
  misc_RNA (1)...(19): siRNA sense strand
gcgaaaaugugaagaguga

SEQ ID NO: 2152683 - RNA, 19 nt, Homo sapiens
  misc_RNA (1)...(19): siRNA sense strand
aaauaaagcccuugcugaa

SEQ ID NO: 2152684 - RNA, 19 nt, Homo sapiens
  misc_RNA (1)...(19): siRNA sense strand
aaaggcauaugaaacauca

SEQ ID NO: 2152685 - RNA, 19 nt, Homo sapiens
  misc_RNA (1)...(19): siRNA sense strand
gugcaaugcugaaagaagu

SEQ ID NO: 2152686 - RNA, 19 nt, Homo sapiens
  misc_RNA (1)...(19): siRNA sense strand
gggaaagcauacagacuuc

SEQ ID NO: 2152687 - RNA, 19 nt, Homo sapiens
  misc_RNA (1)...(19): siRNA sense strand
ugaagaugcuagugcaaug

SEQ ID NO: 2152688 - RNA, 19 nt, Homo sapiens
  misc_RNA (1)...(19): siRNA sense strand
cggaaugccuggacucaau

SEQ ID NO: 2152689 - RNA, 19 nt, Homo sapiens
  misc_RNA (1)...(19): siRNA sense strand
gaagaagccagacgacagu

SEQ ID NO: 2152690 - RNA, 19 nt, Homo sapiens
  misc_RNA (1)...(19): siRNA sense strand
ggagauaacggaggagaug

SEQ ID NO: 2152691 - RNA, 19 nt, Homo sapiens
  misc_RNA (1)...(19): siRNA sense strand
gaagauguguaagcaggau

SEQ ID NO: 2152692 - RNA, 19 nt, Homo sapiens
  misc_RNA (1)...(19): siRNA sense strand
gaggaaagugaucuagaaa

SEQ ID NO: 2152693 - RNA, 19 nt, Homo sapiens
  misc_RNA (1)...(19): siRNA sense strand
cuagugcaaugcugaaaga

SEQ ID NO: 2152694 - RNA, 19 nt, Homo sapiens
  misc_RNA (1)...(19): siRNA sense strand
ucaagaaacgggagaugaa

SEQ ID NO: 2152695 - RNA, 19 nt, Homo sapiens
  misc_RNA (1)...(19): siRNA sense strand
caacguaaugcccuucuga

SEQ ID NO: 2152696 - RNA, 19 nt, Homo sapiens
  misc_RNA (1)...(19): siRNA sense strand
gggagugccugguaauuuu

SEQ ID NO: 2152697 - RNA, 19 nt, Homo sapiens
  misc_RNA (1)...(19): siRNA sense strand
gacagagccauugaaauaa

SEQ ID NO: 2152698 - RNA, 19 nt, Homo sapiens
  misc_RNA (1)...(19): siRNA sense strand
ugauaaagaaggugugauu

SEQ ID NO: 2152699 - RNA, 19 nt, Homo sapiens
  misc_RNA (1)...(19): siRNA sense strand
cauaugaaacaucaaguga

SEQ ID NO: 2152700 - RNA, 19 nt, Homo sapiens
  misc_RNA (1)...(19): siRNA sense strand
cagaacaucggagaaagua

SEQ ID NO: 2152701 - RNA, 19 nt, Homo sapiens
  misc_RNA (1)...(19): siRNA sense strand
caacauagggcacagaaaa

SEQ ID NO: 2152702 - RNA, 19 nt, Homo sapiens
  misc_RNA (1)...(19): siRNA sense strand
gggaagaagcagcccauga

SEQ ID NO: 2152703 - RNA, 19 nt, Homo sapiens
  misc_RNA (1)...(19): siRNA sense strand
caagaaacgggagaugaaa

SEQ ID NO: 2152704 - RNA, 19 nt, Homo sapiens
  misc_RNA (1)...(19): siRNA sense strand
caugcaggauccagaaguu

SEQ ID NO: 2152705 - RNA, 19 nt, Homo sapiens
  misc_RNA (1)...(19): siRNA sense strand
uaacggaggagaugaugga

SEQ ID NO: 2152706 - RNA, 19 nt, Homo sapiens
  misc_RNA (1)...(19): siRNA sense strand
acccaaagguuaugaaucu

SEQ ID NO: 2152707 - RNA, 19 nt, Homo sapiens
  misc_RNA (1)...(19): siRNA sense strand
gaagaagcagcccaugauc

SEQ ID NO: 2152708 - RNA, 19 nt, Homo sapiens
  misc_RNA (1)...(19): siRNA sense strand
ccagugucuucgucaaauu

SEQ ID NO: 2152709 - RNA, 19 nt, Homo sapiens
  misc_RNA (1)...(19): siRNA sense strand
aauccucgcuuggccauuu

SEQ ID NO: 2152710 - RNA, 19 nt, Homo sapiens
  misc_RNA (1)...(19): siRNA sense strand
gauaaagaaggugugauug

SEQ ID NO: 2152711 - RNA, 19 nt, Homo sapiens
  misc_RNA (1)...(19): siRNA sense strand
aggaagacuuaaaggcaua

SEQ ID NO: 2152712 - RNA, 19 nt, Homo sapiens
  misc_RNA (1)...(19): siRNA sense strand
gcccuugccuguaaauugg

SEQ ID NO: 2152713 - RNA, 19 nt, Homo sapiens
  misc_RNA (1)...(19): siRNA sense strand
cagcucagccucacaagug

SEQ ID NO: 2152714 - RNA, 19 nt, Homo sapiens
  misc_RNA (1)...(19): siRNA sense strand
gaucuugcccuugccugua

SEQ ID NO: 2152715 - RNA, 19 nt, Homo sapiens
  misc_RNA (1)...(19): siRNA sense strand
agugagagaucaaagaaag

SEQ ID NO: 2152716 - RNA, 19 nt, Homo sapiens
  misc_RNA (1)...(19): siRNA sense strand
auaaagaaggugugauuga

SEQ ID NO: 2152717 - RNA, 19 nt, Homo sapiens
  misc_RNA (1)...(19): siRNA sense strand
caaagaaagaauagaacga

SEQ ID NO: 2152718 - RNA, 19 nt, Homo sapiens
  misc_RNA (1)...(19): siRNA sense strand
gcagaacaucggagaaagu

SEQ ID NO: 2152719 - RNA, 19 nt, Homo sapiens
  misc_RNA (1)...(19): siRNA sense strand
gagcuucaggccuuuguga

SEQ ID NO: 2152720 - RNA, 19 nt, Homo sapiens
  misc_RNA (1)...(19): siRNA sense strand
gcauaugaaacaucaagug

SEQ ID NO: 2152721 - RNA, 19 nt, Homo sapiens
  misc_RNA (1)...(19): siRNA sense strand
ucaaauuacagaagccaaa

SEQ ID NO: 2152722 - RNA, 19 nt, Homo sapiens
  misc_RNA (1)...(19): siRNA sense strand
gagaaaguaugagcgaaaa

SEQ ID NO: 2152723 - RNA, 19 nt, Homo sapiens
  misc_RNA (1)...(19): siRNA sense strand
cagagccauugaaauaaau

SEQ ID NO: 2152724 - RNA, 19 nt, Homo sapiens
  misc_RNA (1)...(19): siRNA sense strand
caucaagugaggaaaguga

SEQ ID NO: 2152725 - RNA, 19 nt, Homo sapiens
  misc_RNA (1)...(19): siRNA sense strand
ucucaucaguaaauuguca

SEQ ID NO: 2152726 - RNA, 19 nt, Homo sapiens
  misc_RNA (1)...(19): siRNA sense strand
ugaaacaucaagugaggaa

SEQ ID NO: 2152727 - RNA, 19 nt, Homo sapiens
  misc_RNA (1)...(19): siRNA sense strand
gccagugucuucgucaaau

SEQ ID NO: 2152728 - RNA, 19 nt, Homo sapiens
  misc_RNA (1)...(19): siRNA sense strand
ugacuggaauggccggaau

SEQ ID NO: 2152729 - RNA, 19 nt, Homo sapiens
  misc_RNA (1)...(19): siRNA sense strand
gagaucaaagaaagaauag

SEQ ID NO: 2152730 - RNA, 19 nt, Homo sapiens
  misc_RNA (1)...(19): siRNA sense strand
gggaguggguggagagcau

SEQ ID NO: 2152731 - RNA, 19 nt, Homo sapiens
  misc_RNA (1)...(19): siRNA sense strand
agaagcagcccaugaucuu

SEQ ID NO: 2152732 - RNA, 19 nt, Homo sapiens
  misc_RNA (1)...(19): siRNA sense strand
cagugucuucgucaaauua

SEQ ID NO: 2152733 - RNA, 19 nt, Homo sapiens
  misc_RNA (1)...(19): siRNA sense strand
acacugaugcuccucaaga

SEQ ID NO: 2152734 - RNA, 19 nt, Homo sapiens
  misc_RNA (1)...(19): siRNA sense strand
gaaucucaucaguaaauug

SEQ ID NO: 2152735 - RNA, 19 nt, Homo sapiens
  misc_RNA (1)...(19): siRNA sense strand
agacuuaaaggcauaugaa

SEQ ID NO: 2152736 - RNA, 19 nt, Homo sapiens
  misc_RNA (1)...(19): siRNA sense strand
ugauugaaccagacacuga

SEQ ID NO: 2152737 - RNA, 19 nt, Homo sapiens
  misc_RNA (1)...(19): siRNA sense strand
ugagagaucaaagaaagaa

SEQ ID NO: 2152738 - RNA, 19 nt, Homo sapiens
  misc_RNA (1)...(19): siRNA sense strand
cuuaaaggcauaugaaaca

SEQ ID NO: 2152739 - RNA, 19 nt, Homo sapiens
  misc_RNA (1)...(19): siRNA sense strand
cacugaugcuccucaagaa

SEQ ID NO: 2152740 - RNA, 19 nt, Homo sapiens
  misc_RNA (1)...(19): siRNA sense strand
cgaaacccagcaaauaugu

SEQ ID NO: 2152741 - RNA, 19 nt, Homo sapiens
  misc_RNA (1)...(19): siRNA sense strand
gcaggauccagaaguuaug

SEQ ID NO: 2152742 - RNA, 19 nt, Homo sapiens
  misc_RNA (1)...(19): siRNA sense strand
agaaagaauagaacgaguu

SEQ ID NO: 2152743 - RNA, 19 nt, Homo sapiens
  misc_RNA (1)...(19): siRNA sense strand
gaagcagcccaugaucuug

SEQ ID NO: 2152744 - RNA, 19 nt, Homo sapiens
  misc_RNA (1)...(19): siRNA sense strand
gaagagugagagaucaaag

SEQ ID NO: 2152745 - RNA, 19 nt, Homo sapiens
  misc_RNA (1)...(19): siRNA sense strand
aaauuuggaggucaacgua

SEQ ID NO: 2152746 - RNA, 19 nt, Homo sapiens
  misc_RNA (1)...(19): siRNA sense strand
ccaaagguuaugaaucuca

SEQ ID NO: 2152747 - RNA, 19 nt, Homo sapiens
  misc_RNA (1)...(19): siRNA sense strand
gacuuaaaggcauaugaaa

SEQ ID NO: 2152748 - RNA, 19 nt, Homo sapiens
  misc_RNA (1)...(19): siRNA sense strand
ggaaugccuggacucaaug

SEQ ID NO: 2152749 - RNA, 19 nt, Homo sapiens
  misc_RNA (1)...(19): siRNA sense strand
ugccuggacucaaugaaau

SEQ ID NO: 2152750 - RNA, 19 nt, Homo sapiens
  misc_RNA (1)...(19): siRNA sense strand
agacccaaaugauggugaa

SEQ ID NO: 2152751 - RNA, 19 nt, Homo sapiens
  misc_RNA (1)...(19): siRNA sense strand
aagaauagaacgaguuaag

SEQ ID NO: 2152752 - RNA, 19 nt, Homo sapiens
  misc_RNA (1)...(19): siRNA sense strand
agagugagagaucaaagaa

SEQ ID NO: 2152753 - RNA, 19 nt, Homo sapiens
  misc_RNA (1)...(19): siRNA sense strand
ggauuaugaugaagaugcu

SEQ ID NO: 2152754 - RNA, 19 nt, Homo sapiens
  misc_RNA (1)...(19): siRNA sense strand
uccaggauguggcucgaaa

SEQ ID NO: 2152755 - RNA, 19 nt, Homo sapiens
  misc_RNA (1)...(19): siRNA sense strand
ggaggaagaucaagaauaa

SEQ ID NO: 2152756 - RNA, 19 nt, Homo sapiens
  misc_RNA (1)...(19): siRNA sense strand
ggagaaagaagaaagaaua

SEQ ID NO: 2152757 - RNA, 19 nt, Homo sapiens
  misc_RNA (1)...(19): siRNA sense strand
ccagaaaccugcugaucua

SEQ ID NO: 2152758 - RNA, 19 nt, Homo sapiens
  misc_RNA (1)...(19): siRNA sense strand
gaaaguaggagaaagaaga

SEQ ID NO: 2152759 - RNA, 19 nt, Homo sapiens
  misc_RNA (1)...(19): siRNA sense strand
caacauccaucaagacaga

SEQ ID NO: 2152760 - RNA, 19 nt, Homo sapiens
  misc_RNA (1)...(19): siRNA sense strand
uccagaagcuucagacuuu

SEQ ID NO: 2152761 - RNA, 19 nt, Homo sapiens
  misc_RNA (1)...(19): siRNA sense strand
uaagauuucugcucaggaa

SEQ ID NO: 2152762 - RNA, 19 nt, Homo sapiens
  misc_RNA (1)...(19): siRNA sense strand
gaaugauccuuuccucuca

SEQ ID NO: 2152763 - RNA, 19 nt, Homo sapiens
  misc_RNA (1)...(19): siRNA sense strand
ggagaaggcccugaagaaa

SEQ ID NO: 2152764 - RNA, 19 nt, Homo sapiens
  misc_RNA (1)...(19): siRNA sense strand
gaaaccugcugaucuacga

SEQ ID NO: 2152765 - RNA, 19 nt, Homo sapiens
  misc_RNA (1)...(19): siRNA sense strand
ccucacggcuccucauaaa

SEQ ID NO: 2152766 - RNA, 19 nt, Homo sapiens
  misc_RNA (1)...(19): siRNA sense strand
gagaaaugguaccugucua

SEQ ID NO: 2152767 - RNA, 19 nt, Homo sapiens
  misc_RNA (1)...(19): siRNA sense strand
gcaccugccucaugguugu

SEQ ID NO: 2152768 - RNA, 19 nt, Homo sapiens
  misc_RNA (1)...(19): siRNA sense strand
agacagagccaauuacaga

SEQ ID NO: 2152769 - RNA, 19 nt, Homo sapiens
  misc_RNA (1)...(19): siRNA sense strand
gccagaccauuauuccuaa

SEQ ID NO: 2152770 - RNA, 19 nt, Homo sapiens
  misc_RNA (1)...(19): siRNA sense strand
uuucuaaacuucucuccua

SEQ ID NO: 2152771 - RNA, 19 nt, Homo sapiens
  misc_RNA (1)...(19): siRNA sense strand
ugaaguggaucaguuucua

SEQ ID NO: 2152772 - RNA, 19 nt, Homo sapiens
  misc_RNA (1)...(19): siRNA sense strand
gaaguggaucaguuucuaa

SEQ ID NO: 2152773 - RNA, 19 nt, Homo sapiens
  misc_RNA (1)...(19): siRNA sense strand
acgaugagguggaaaguga

SEQ ID NO: 2152774 - RNA, 19 nt, Homo sapiens
  misc_RNA (1)...(19): siRNA sense strand
gcuggagccucaugaagug

SEQ ID NO: 2152775 - RNA, 19 nt, Homo sapiens
  misc_RNA (1)...(19): siRNA sense strand
gagaagagugugucaaugg

SEQ ID NO: 2152776 - RNA, 19 nt, Homo sapiens
  misc_RNA (1)...(19): siRNA sense strand
ccagugacagcuucaauga

SEQ ID NO: 2152777 - RNA, 19 nt, Homo sapiens
  misc_RNA (1)...(19): siRNA sense strand
cuagagaacacuaauagga

SEQ ID NO: 2152778 - RNA, 19 nt, Homo sapiens
  misc_RNA (1)...(19): siRNA sense strand
cuaaacuucucuccuaaag

SEQ ID NO: 2152779 - RNA, 19 nt, Homo sapiens
  misc_RNA (1)...(19): siRNA sense strand
gaucuuccccauuucauua

SEQ ID NO: 2152780 - RNA, 19 nt, Homo sapiens
  misc_RNA (1)...(19): siRNA sense strand
caaugacgaugagguggaa

SEQ ID NO: 2152781 - RNA, 19 nt, Homo sapiens
  misc_RNA (1)...(19): siRNA sense strand
ucucgaaccugcaaguuag

SEQ ID NO: 2152782 - RNA, 19 nt, Homo sapiens
  misc_RNA (1)...(19): siRNA sense strand
aaaguggagucuuguucaa

SEQ ID NO: 2152783 - RNA, 19 nt, Homo sapiens
  misc_RNA (1)...(19): siRNA sense strand
gaaccuccucuggaaauga

SEQ ID NO: 2152784 - RNA, 19 nt, Homo sapiens
  misc_RNA (1)...(19): siRNA sense strand
agaagagugugucaaugga

SEQ ID NO: 2152785 - RNA, 19 nt, Homo sapiens
  misc_RNA (1)...(19): siRNA sense strand
cggaggaagaucaagaaua

SEQ ID NO: 2152786 - RNA, 19 nt, Homo sapiens
  misc_RNA (1)...(19): siRNA sense strand
caagacagagccaauuaca

SEQ ID NO: 2152787 - RNA, 19 nt, Homo sapiens
  misc_RNA (1)...(19): siRNA sense strand
ggaaccuccucuggaaaug

SEQ ID NO: 2152788 - RNA, 19 nt, Homo sapiens
  misc_RNA (1)...(19): siRNA sense strand
gaggagaaggcccugaaga

SEQ ID NO: 2152789 - RNA, 19 nt, Homo sapiens
  misc_RNA (1)...(19): siRNA sense strand
gguggaaagugagaaaugg

SEQ ID NO: 2152790 - RNA, 19 nt, Homo sapiens
  misc_RNA (1)...(19): siRNA sense strand
ggacucuccuucagcaacu

SEQ ID NO: 2152791 - RNA, 19 nt, Homo sapiens
  misc_RNA (1)...(19): siRNA sense strand
caggaaaguaggagaaaga

SEQ ID NO: 2152792 - RNA, 19 nt, Homo sapiens
  misc_RNA (1)...(19): siRNA sense strand
gagaaggcccugaagaaaa

SEQ ID NO: 2152793 - RNA, 19 nt, Homo sapiens
  misc_RNA (1)...(19): siRNA sense strand
cuacagacuucccuucaac

SEQ ID NO: 2152794 - RNA, 19 nt, Homo sapiens
  misc_RNA (1)...(19): siRNA sense strand
ggaggggaaugaaacacua

SEQ ID NO: 2152795 - RNA, 19 nt, Homo sapiens
  misc_RNA (1)...(19): siRNA sense strand
gagaaagaagaaagaauac

SEQ ID NO: 2152796 - RNA, 19 nt, Homo sapiens
  misc_RNA (1)...(19): siRNA sense strand
guaggagaaagaagaaaga

SEQ ID NO: 2152797 - RNA, 19 nt, Homo sapiens
  misc_RNA (1)...(19): siRNA sense strand
cagagaagagugugucaau

SEQ ID NO: 2152798 - RNA, 19 nt, Homo sapiens
  misc_RNA (1)...(19): siRNA sense strand
ggaagaucaagaauaagau

SEQ ID NO: 2152799 - RNA, 19 nt, Homo sapiens
  misc_RNA (1)...(19): siRNA sense strand
gcuccugaaugauccuuuc

SEQ ID NO: 2152800 - RNA, 19 nt, Homo sapiens
  misc_RNA (1)...(19): siRNA sense strand
ugacagaggaggagaagag

SEQ ID NO: 2152801 - RNA, 19 nt, Homo sapiens
  misc_RNA (1)...(19): siRNA sense strand
ccugaucgcugagggcuau

SEQ ID NO: 2152802 - RNA, 19 nt, Homo sapiens
  misc_RNA (1)...(19): siRNA sense strand
gaaaugguaccugucuaca

SEQ ID NO: 2152803 - RNA, 19 nt, Homo sapiens
  misc_RNA (1)...(19): siRNA sense strand
gcucaggaaaguaggagaa

SEQ ID NO: 2152804 - RNA, 19 nt, Homo sapiens
  misc_RNA (1)...(19): siRNA sense strand
ccagaccauuauuccuaaa

SEQ ID NO: 2152805 - RNA, 19 nt, Homo sapiens
  misc_RNA (1)...(19): siRNA sense strand
gaucuacgaggaacauucu

SEQ ID NO: 2152806 - RNA, 19 nt, Homo sapiens
  misc_RNA (1)...(19): siRNA sense strand
ccagaagcuucagacuuug

SEQ ID NO: 2152807 - RNA, 19 nt, Homo sapiens
  misc_RNA (1)...(19): siRNA sense strand
ucaugaaguggaucaguuu

SEQ ID NO: 2152808 - RNA, 19 nt, Homo sapiens
  misc_RNA (1)...(19): siRNA sense strand
caucaagacagagccaauu

SEQ ID NO: 2152809 - RNA, 19 nt, Homo sapiens
  misc_RNA (1)...(19): siRNA sense strand
aggaagaucaagaauaaga

SEQ ID NO: 2152810 - RNA, 19 nt, Homo sapiens
  misc_RNA (1)...(19): siRNA sense strand
agagaagagugugucaaug

SEQ ID NO: 2152811 - RNA, 19 nt, Homo sapiens
  misc_RNA (1)...(19): siRNA sense strand
aaaguaggagaaagaagaa

SEQ ID NO: 2152812 - RNA, 19 nt, Homo sapiens
  misc_RNA (1)...(19): siRNA sense strand
cucaugaaguggaucaguu

SEQ ID NO: 2152813 - RNA, 19 nt, Homo sapiens
  misc_RNA (1)...(19): siRNA sense strand
cuggagaagucagugcuuu

SEQ ID NO: 2152814 - RNA, 19 nt, Homo sapiens
  misc_RNA (1)...(19): siRNA sense strand
ccaaauugccccugucaaa

SEQ ID NO: 2152815 - RNA, 19 nt, Homo sapiens
  misc_RNA (1)...(19): siRNA sense strand
ugccagaccauuauuccua

SEQ ID NO: 2152816 - RNA, 19 nt, Homo sapiens
  misc_RNA (1)...(19): siRNA sense strand
agaaggcccugaagaaaau

SEQ ID NO: 2152817 - RNA, 19 nt, Homo sapiens
  misc_RNA (1)...(19): siRNA sense strand
cagcuucaaugacgaugag

SEQ ID NO: 2152818 - RNA, 19 nt, Homo sapiens
  misc_RNA (1)...(19): siRNA sense strand
aggagaaggcccugaagaa

SEQ ID NO: 2152819 - RNA, 19 nt, Homo sapiens
  misc_RNA (1)...(19): siRNA sense strand
ucacggcuccucauaaacu

SEQ ID NO: 2152820 - RNA, 19 nt, Homo sapiens
  misc_RNA (1)...(19): siRNA sense strand
gugcuuugccguugcauuc

SEQ ID NO: 2152821 - RNA, 19 nt, Homo sapiens
  misc_RNA (1)...(19): siRNA sense strand
uggaaagugagaaauggua

SEQ ID NO: 2152822 - RNA, 19 nt, Homo sapiens
  misc_RNA (1)...(19): siRNA sense strand
ucuacagacuucccuucaa

SEQ ID NO: 2152823 - RNA, 19 nt, Homo sapiens
  misc_RNA (1)...(19): siRNA sense strand
aaccuccucuggaaaugaa

SEQ ID NO: 2152824 - RNA, 19 nt, Homo sapiens
  misc_RNA (1)...(19): siRNA sense strand
ggaaugaaacacuaaaagu

SEQ ID NO: 2152825 - RNA, 19 nt, Homo sapiens
  misc_RNA (1)...(19): siRNA sense strand
gcucugcccagccagcauu

SEQ ID NO: 2152826 - RNA, 19 nt, Homo sapiens
  misc_RNA (1)...(19): siRNA sense strand
ggacucguuccgucuguca

SEQ ID NO: 2152827 - RNA, 19 nt, Homo sapiens
  misc_RNA (1)...(19): siRNA sense strand
cagaggagaaggcccugaa

SEQ ID NO: 2152828 - RNA, 19 nt, Homo sapiens
  misc_RNA (1)...(19): siRNA sense strand
gcauucggcagcuucuuuc

SEQ ID NO: 2152829 - RNA, 19 nt, Homo sapiens
  misc_RNA (1)...(19): siRNA sense strand
gaugagguggaaagugaga

SEQ ID NO: 2152830 - RNA, 19 nt, Homo sapiens
  misc_RNA (1)...(19): siRNA sense strand
gagucuuguucaacugaga

SEQ ID NO: 2152831 - RNA, 19 nt, Homo sapiens
  misc_RNA (1)...(19): siRNA sense strand
ccuucaacauccaucaaga

SEQ ID NO: 2152832 - RNA, 19 nt, Homo sapiens
  misc_RNA (1)...(19): siRNA sense strand
guagaacucgacagaagag

SEQ ID NO: 2152833 - RNA, 19 nt, Homo sapiens
  misc_RNA (1)...(19): siRNA sense strand
uuguagaacucgacagaag

SEQ ID NO: 2152834 - RNA, 19 nt, Homo sapiens
  misc_RNA (1)...(19): siRNA sense strand
gcaccuggucagcgccaaa

SEQ ID NO: 2152835 - RNA, 19 nt, Homo sapiens
  misc_RNA (1)...(19): siRNA sense strand
guggugagauccagaaacc

SEQ ID NO: 2152836 - RNA, 19 nt, Homo sapiens
  misc_RNA (1)...(19): siRNA sense strand
ugagaaaugguaccugucu

SEQ ID NO: 2152837 - RNA, 19 nt, Homo sapiens
  misc_RNA (1)...(19): siRNA sense strand
cccauuucauuaucucgaa

SEQ ID NO: 2152838 - RNA, 19 nt, Homo sapiens
  misc_RNA (1)...(19): siRNA sense strand
ggaaaguaggagaaagaag

SEQ ID NO: 2152839 - RNA, 19 nt, Homo sapiens
  misc_RNA (1)...(19): siRNA sense strand
uaaacuucucuccuaaaga

SEQ ID NO: 2152840 - RNA, 19 nt, Homo sapiens
  misc_RNA (1)...(19): siRNA sense strand
ugagguggaaagugagaaa

SEQ ID NO: 2152841 - RNA, 19 nt, Homo sapiens
  misc_RNA (1)...(19): siRNA sense strand
gcuucagacuuuggugaug

SEQ ID NO: 2152842 - RNA, 19 nt, Homo sapiens
  misc_RNA (1)...(19): siRNA sense strand
ugaagaaaauucggaggaa

SEQ ID NO: 2152843 - RNA, 19 nt, Homo sapiens
  misc_RNA (1)...(19): siRNA sense strand
caaauugccccugucaaaa

SEQ ID NO: 2152844 - RNA, 19 nt, Homo sapiens
  misc_RNA (1)...(19): siRNA sense strand
uaagcuggagccucaugaa

SEQ ID NO: 2152845 - RNA, 19 nt, Homo sapiens
  misc_RNA (1)...(19): siRNA sense strand
aucaagacagagccaauua

SEQ ID NO: 2152846 - RNA, 19 nt, Homo sapiens
  misc_RNA (1)...(19): siRNA sense strand
ggagaagaggacccugauc

SEQ ID NO: 2152847 - RNA, 19 nt, Homo sapiens
  misc_RNA (1)...(19): siRNA sense strand
ccucgugccagaccauuau

SEQ ID NO: 2152848 - RNA, 19 nt, Homo sapiens
  misc_RNA (1)...(19): siRNA sense strand
cagccuccguggugagauc

SEQ ID NO: 2152849 - RNA, 19 nt, Homo sapiens
  misc_RNA (1)...(19): siRNA sense strand
ucaggaaaguaggagaaag

SEQ ID NO: 2152850 - RNA, 19 nt, Homo sapiens
  misc_RNA (1)...(19): siRNA sense strand
ucuaaacuucucuccuaaa

SEQ ID NO: 2152851 - RNA, 19 nt, Homo sapiens
  misc_RNA (1)...(19): siRNA sense strand
ggaggaagaucaagaauaa

SEQ ID NO: 2152852 - RNA, 19 nt, Homo sapiens
  misc_RNA (1)...(19): siRNA sense strand
ggagaaagaagaaagaaua

SEQ ID NO: 2152853 - RNA, 19 nt, Homo sapiens
  misc_RNA (1)...(19): siRNA sense strand
ccagaaaccugcugaucua

SEQ ID NO: 2152854 - RNA, 19 nt, Homo sapiens
  misc_RNA (1)...(19): siRNA sense strand
gaaaguaggagaaagaaga

SEQ ID NO: 2152855 - RNA, 19 nt, Homo sapiens
  misc_RNA (1)...(19): siRNA sense strand
caacauccaucaagacaga

SEQ ID NO: 2152856 - RNA, 19 nt, Homo sapiens
  misc_RNA (1)...(19): siRNA sense strand
uccagaagcuucagacuuu

SEQ ID NO: 2152857 - RNA, 19 nt, Homo sapiens
  misc_RNA (1)...(19): siRNA sense strand
uaagauuucugcucaggaa

SEQ ID NO: 2152858 - RNA, 19 nt, Homo sapiens
  misc_RNA (1)...(19): siRNA sense strand
gaaugauccuuuccucuca

SEQ ID NO: 2152859 - RNA, 19 nt, Homo sapiens
  misc_RNA (1)...(19): siRNA sense strand
ggagaaggcccugaagaaa

SEQ ID NO: 2152860 - RNA, 19 nt, Homo sapiens
  misc_RNA (1)...(19): siRNA sense strand
gaaaccugcugaucuacga

SEQ ID NO: 2152861 - RNA, 19 nt, Homo sapiens
  misc_RNA (1)...(19): siRNA sense strand
ccucacggcuccucauaaa

SEQ ID NO: 2152862 - RNA, 19 nt, Homo sapiens
  misc_RNA (1)...(19): siRNA sense strand
gagaaaugguaccugucua

SEQ ID NO: 2152863 - RNA, 19 nt, Homo sapiens
  misc_RNA (1)...(19): siRNA sense strand
gcaccugccucaugguugu

SEQ ID NO: 2152864 - RNA, 19 nt, Homo sapiens
  misc_RNA (1)...(19): siRNA sense strand
agacagagccaauuacaga

SEQ ID NO: 2152865 - RNA, 19 nt, Homo sapiens
  misc_RNA (1)...(19): siRNA sense strand
gccagaccauuauuccuaa

SEQ ID NO: 2152866 - RNA, 19 nt, Homo sapiens
  misc_RNA (1)...(19): siRNA sense strand
uuucuaaacuucucuccua

SEQ ID NO: 2152867 - RNA, 19 nt, Homo sapiens
  misc_RNA (1)...(19): siRNA sense strand
ugaaguggaucaguuucua

SEQ ID NO: 2152868 - RNA, 19 nt, Homo sapiens
  misc_RNA (1)...(19): siRNA sense strand
gaaguggaucaguuucuaa

SEQ ID NO: 2152869 - RNA, 19 nt, Homo sapiens
  misc_RNA (1)...(19): siRNA sense strand
acgaugagguggaaaguga

SEQ ID NO: 2152870 - RNA, 19 nt, Homo sapiens
  misc_RNA (1)...(19): siRNA sense strand
gcuggagccucaugaagug

SEQ ID NO: 2152871 - RNA, 19 nt, Homo sapiens
  misc_RNA (1)...(19): siRNA sense strand
gagaagagugugucaaugg

SEQ ID NO: 2152872 - RNA, 19 nt, Homo sapiens
  misc_RNA (1)...(19): siRNA sense strand
ccagugacagcuucaauga

SEQ ID NO: 2152873 - RNA, 19 nt, Homo sapiens
  misc_RNA (1)...(19): siRNA sense strand
cuagagaacacuaauagga

SEQ ID NO: 2152874 - RNA, 19 nt, Homo sapiens
  misc_RNA (1)...(19): siRNA sense strand
cuaaacuucucuccuaaag

SEQ ID NO: 2152875 - RNA, 19 nt, Homo sapiens
  misc_RNA (1)...(19): siRNA sense strand
gaucuuccccauuucauua

SEQ ID NO: 2152876 - RNA, 19 nt, Homo sapiens
  misc_RNA (1)...(19): siRNA sense strand
caaugacgaugagguggaa

SEQ ID NO: 2152877 - RNA, 19 nt, Homo sapiens
  misc_RNA (1)...(19): siRNA sense strand
ucucgaaccugcaaguuag

SEQ ID NO: 2152878 - RNA, 19 nt, Homo sapiens
  misc_RNA (1)...(19): siRNA sense strand
aaaguggagucuuguucaa

SEQ ID NO: 2152879 - RNA, 19 nt, Homo sapiens
  misc_RNA (1)...(19): siRNA sense strand
gaaccuccucuggaaauga

SEQ ID NO: 2152880 - RNA, 19 nt, Homo sapiens
  misc_RNA (1)...(19): siRNA sense strand
agaagagugugucaaugga

SEQ ID NO: 2152881 - RNA, 19 nt, Homo sapiens
  misc_RNA (1)...(19): siRNA sense strand
cggaggaagaucaagaaua

SEQ ID NO: 2152882 - RNA, 19 nt, Homo sapiens
  misc_RNA (1)...(19): siRNA sense strand
caagacagagccaauuaca

SEQ ID NO: 2152883 - RNA, 19 nt, Homo sapiens
  misc_RNA (1)...(19): siRNA sense strand
ggaaccuccucuggaaaug

SEQ ID NO: 2152884 - RNA, 19 nt, Homo sapiens
  misc_RNA (1)...(19): siRNA sense strand
gaggagaaggcccugaaga

SEQ ID NO: 2152885 - RNA, 19 nt, Homo sapiens
  misc_RNA (1)...(19): siRNA sense strand
gguggaaagugagaaaugg

SEQ ID NO: 2152886 - RNA, 19 nt, Homo sapiens
  misc_RNA (1)...(19): siRNA sense strand
ggacucuccuucagcaacu

SEQ ID NO: 2152887 - RNA, 19 nt, Homo sapiens
  misc_RNA (1)...(19): siRNA sense strand
caggaaaguaggagaaaga

SEQ ID NO: 2152888 - RNA, 19 nt, Homo sapiens
  misc_RNA (1)...(19): siRNA sense strand
gagaaggcccugaagaaaa

SEQ ID NO: 2152889 - RNA, 19 nt, Homo sapiens
  misc_RNA (1)...(19): siRNA sense strand
cuacagacuucccuucaac

SEQ ID NO: 2152890 - RNA, 19 nt, Homo sapiens
  misc_RNA (1)...(19): siRNA sense strand
ggaggggaaugaaacacua

SEQ ID NO: 2152891 - RNA, 19 nt, Homo sapiens
  misc_RNA (1)...(19): siRNA sense strand
gagaaagaagaaagaauac

SEQ ID NO: 2152892 - RNA, 19 nt, Homo sapiens
  misc_RNA (1)...(19): siRNA sense strand
guaggagaaagaagaaaga

SEQ ID NO: 2152893 - RNA, 19 nt, Homo sapiens
  misc_RNA (1)...(19): siRNA sense strand
cagagaagagugugucaau

SEQ ID NO: 2152894 - RNA, 19 nt, Homo sapiens
  misc_RNA (1)...(19): siRNA sense strand
ggaagaucaagaauaagau

SEQ ID NO: 2152895 - RNA, 19 nt, Homo sapiens
  misc_RNA (1)...(19): siRNA sense strand
gcuccugaaugauccuuuc

SEQ ID NO: 2152896 - RNA, 19 nt, Homo sapiens
  misc_RNA (1)...(19): siRNA sense strand
ugacagaggaggagaagag

SEQ ID NO: 2152897 - RNA, 19 nt, Homo sapiens
  misc_RNA (1)...(19): siRNA sense strand
ccugaucgcugagggcuau

SEQ ID NO: 2152898 - RNA, 19 nt, Homo sapiens
  misc_RNA (1)...(19): siRNA sense strand
gaaaugguaccugucuaca

SEQ ID NO: 2152899 - RNA, 19 nt, Homo sapiens
  misc_RNA (1)...(19): siRNA sense strand
gcucaggaaaguaggagaa

SEQ ID NO: 2152900 - RNA, 19 nt, Homo sapiens
  misc_RNA (1)...(19): siRNA sense strand
ccagaccauuauuccuaaa

SEQ ID NO: 2152901 - RNA, 19 nt, Homo sapiens
  misc_RNA (1)...(19): siRNA sense strand
gaucuacgaggaacauucu

SEQ ID NO: 2152902 - RNA, 19 nt, Homo sapiens
  misc_RNA (1)...(19): siRNA sense strand
ccagaagcuucagacuuug

SEQ ID NO: 2152903 - RNA, 19 nt, Homo sapiens
  misc_RNA (1)...(19): siRNA sense strand
ucaugaaguggaucaguuu

SEQ ID NO: 2152904 - RNA, 19 nt, Homo sapiens
  misc_RNA (1)...(19): siRNA sense strand
caucaagacagagccaauu

SEQ ID NO: 2152905 - RNA, 19 nt, Homo sapiens
  misc_RNA (1)...(19): siRNA sense strand
aggaagaucaagaauaaga

SEQ ID NO: 2152906 - RNA, 19 nt, Homo sapiens
  misc_RNA (1)...(19): siRNA sense strand
agagaagagugugucaaug

SEQ ID NO: 2152907 - RNA, 19 nt, Homo sapiens
  misc_RNA (1)...(19): siRNA sense strand
aaaguaggagaaagaagaa

SEQ ID NO: 2152908 - RNA, 19 nt, Homo sapiens
  misc_RNA (1)...(19): siRNA sense strand
cucaugaaguggaucaguu

SEQ ID NO: 2152909 - RNA, 19 nt, Homo sapiens
  misc_RNA (1)...(19): siRNA sense strand
cuggagaagucagugcuuu

SEQ ID NO: 2152910 - RNA, 19 nt, Homo sapiens
  misc_RNA (1)...(19): siRNA sense strand
ccaaauugccccugucaaa

SEQ ID NO: 2152911 - RNA, 19 nt, Homo sapiens
  misc_RNA (1)...(19): siRNA sense strand
ugccagaccauuauuccua

SEQ ID NO: 2152912 - RNA, 19 nt, Homo sapiens
  misc_RNA (1)...(19): siRNA sense strand
agaaggcccugaagaaaau

SEQ ID NO: 2152913 - RNA, 19 nt, Homo sapiens
  misc_RNA (1)...(19): siRNA sense strand
cagcuucaaugacgaugag

SEQ ID NO: 2152914 - RNA, 19 nt, Homo sapiens
  misc_RNA (1)...(19): siRNA sense strand
aggagaaggcccugaagaa

SEQ ID NO: 2152915 - RNA, 19 nt, Homo sapiens
  misc_RNA (1)...(19): siRNA sense strand
ucacggcuccucauaaacu

SEQ ID NO: 2152916 - RNA, 19 nt, Homo sapiens
  misc_RNA (1)...(19): siRNA sense strand
gugcuuugccguugcauuc

SEQ ID NO: 2152917 - RNA, 19 nt, Homo sapiens
  misc_RNA (1)...(19): siRNA sense strand
uggaaagugagaaauggua

SEQ ID NO: 2152918 - RNA, 19 nt, Homo sapiens
  misc_RNA (1)...(19): siRNA sense strand
ucuacagacuucccuucaa

SEQ ID NO: 2152919 - RNA, 19 nt, Homo sapiens
  misc_RNA (1)...(19): siRNA sense strand
aaccuccucuggaaaugaa

SEQ ID NO: 2152920 - RNA, 19 nt, Homo sapiens
  misc_RNA (1)...(19): siRNA sense strand
ggaaugaaacacuaaaagu

SEQ ID NO: 2152921 - RNA, 19 nt, Homo sapiens
  misc_RNA (1)...(19): siRNA sense strand
gcucugcccagccagcauu

SEQ ID NO: 2152922 - RNA, 19 nt, Homo sapiens
  misc_RNA (1)...(19): siRNA sense strand
ggacucguuccgucuguca

SEQ ID NO: 2152923 - RNA, 19 nt, Homo sapiens
  misc_RNA (1)...(19): siRNA sense strand
cagaggagaaggcccugaa

SEQ ID NO: 2152924 - RNA, 19 nt, Homo sapiens
  misc_RNA (1)...(19): siRNA sense strand
gcauucggcagcuucuuuc

SEQ ID NO: 2152925 - RNA, 19 nt, Homo sapiens
  misc_RNA (1)...(19): siRNA sense strand
gaugagguggaaagugaga

SEQ ID NO: 2152926 - RNA, 19 nt, Homo sapiens
  misc_RNA (1)...(19): siRNA sense strand
gagucuuguucaacugaga

SEQ ID NO: 2152927 - RNA, 19 nt, Homo sapiens
  misc_RNA (1)...(19): siRNA sense strand
ccuucaacauccaucaaga

SEQ ID NO: 2152928 - RNA, 19 nt, Homo sapiens
  misc_RNA (1)...(19): siRNA sense strand
guagaacucgacagaagag

SEQ ID NO: 2152929 - RNA, 19 nt, Homo sapiens
  misc_RNA (1)...(19): siRNA sense strand
uuguagaacucgacagaag

SEQ ID NO: 2152930 - RNA, 19 nt, Homo sapiens
  misc_RNA (1)...(19): siRNA sense strand
gcaccuggucagcgccaaa

SEQ ID NO: 2152931 - RNA, 19 nt, Homo sapiens
  misc_RNA (1)...(19): siRNA sense strand
guggugagauccagaaacc

SEQ ID NO: 2152932 - RNA, 19 nt, Homo sapiens
  misc_RNA (1)...(19): siRNA sense strand
ugagaaaugguaccugucu

SEQ ID NO: 2152933 - RNA, 19 nt, Homo sapiens
  misc_RNA (1)...(19): siRNA sense strand
cccauuucauuaucucgaa

SEQ ID NO: 2152934 - RNA, 19 nt, Homo sapiens
  misc_RNA (1)...(19): siRNA sense strand
ggaaaguaggagaaagaag

SEQ ID NO: 2152935 - RNA, 19 nt, Homo sapiens
  misc_RNA (1)...(19): siRNA sense strand
uaaacuucucuccuaaaga

SEQ ID NO: 2152936 - RNA, 19 nt, Homo sapiens
  misc_RNA (1)...(19): siRNA sense strand
ugagguggaaagugagaaa

SEQ ID NO: 2152937 - RNA, 19 nt, Homo sapiens
  misc_RNA (1)...(19): siRNA sense strand
gcuucagacuuuggugaug

SEQ ID NO: 2152938 - RNA, 19 nt, Homo sapiens
  misc_RNA (1)...(19): siRNA sense strand
ugaagaaaauucggaggaa

SEQ ID NO: 2152939 - RNA, 19 nt, Homo sapiens
  misc_RNA (1)...(19): siRNA sense strand
caaauugccccugucaaaa

SEQ ID NO: 2152940 - RNA, 19 nt, Homo sapiens
  misc_RNA (1)...(19): siRNA sense strand
uaagcuggagccucaugaa

SEQ ID NO: 2152941 - RNA, 19 nt, Homo sapiens
  misc_RNA (1)...(19): siRNA sense strand
aucaagacagagccaauua

SEQ ID NO: 2152942 - RNA, 19 nt, Homo sapiens
  misc_RNA (1)...(19): siRNA sense strand
ggagaagaggacccugauc

SEQ ID NO: 2152943 - RNA, 19 nt, Homo sapiens
  misc_RNA (1)...(19): siRNA sense strand
ccucgugccagaccauuau

SEQ ID NO: 2152944 - RNA, 19 nt, Homo sapiens
  misc_RNA (1)...(19): siRNA sense strand
cagccuccguggugagauc

SEQ ID NO: 2152945 - RNA, 19 nt, Homo sapiens
  misc_RNA (1)...(19): siRNA sense strand
ucaggaaaguaggagaaag

SEQ ID NO: 2152946 - RNA, 19 nt, Homo sapiens
  misc_RNA (1)...(19): siRNA sense strand
ucuaaacuucucuccuaaa

SEQ ID NO: 2152947 - RNA, 19 nt, Homo sapiens
  misc_RNA (1)...(19): siRNA sense strand
cgacacagcuuuccaaaua

SEQ ID NO: 2152948 - RNA, 19 nt, Homo sapiens
  misc_RNA (1)...(19): siRNA sense strand
gaacacagcggguggauga

SEQ ID NO: 2152949 - RNA, 19 nt, Homo sapiens
  misc_RNA (1)...(19): siRNA sense strand
gcaaggcgguucucuggaa

SEQ ID NO: 2152950 - RNA, 19 nt, Homo sapiens
  misc_RNA (1)...(19): siRNA sense strand
gaaauaaagcugccauuca

SEQ ID NO: 2152951 - RNA, 19 nt, Homo sapiens
  misc_RNA (1)...(19): siRNA sense strand
cugaauguguuucuucuua

SEQ ID NO: 2152952 - RNA, 19 nt, Homo sapiens
  misc_RNA (1)...(19): siRNA sense strand
gguaacugcugggcauuua

SEQ ID NO: 2152953 - RNA, 19 nt, Homo sapiens
  misc_RNA (1)...(19): siRNA sense strand
gcacaaacaaaucagcuuu

SEQ ID NO: 2152954 - RNA, 19 nt, Homo sapiens
  misc_RNA (1)...(19): siRNA sense strand
gagggagacugacuuuaug

SEQ ID NO: 2152955 - RNA, 19 nt, Homo sapiens
  misc_RNA (1)...(19): siRNA sense strand
gaucuuaaagguggaaaua

SEQ ID NO: 2152956 - RNA, 19 nt, Homo sapiens
  misc_RNA (1)...(19): siRNA sense strand
gguaccaguuuguuacuuu

SEQ ID NO: 2152957 - RNA, 19 nt, Homo sapiens
  misc_RNA (1)...(19): siRNA sense strand
gaacacgggcuacacguau

SEQ ID NO: 2152958 - RNA, 19 nt, Homo sapiens
  misc_RNA (1)...(19): siRNA sense strand
uccgagagcugaccacuuu

SEQ ID NO: 2152959 - RNA, 19 nt, Homo sapiens
  misc_RNA (1)...(19): siRNA sense strand
gaagcuguauucccaagau

SEQ ID NO: 2152960 - RNA, 19 nt, Homo sapiens
  misc_RNA (1)...(19): siRNA sense strand
ggacuucgccgucuaugga

SEQ ID NO: 2152961 - RNA, 19 nt, Homo sapiens
  misc_RNA (1)...(19): siRNA sense strand
ggacuuugcucuggaaucu

SEQ ID NO: 2152962 - RNA, 19 nt, Homo sapiens
  misc_RNA (1)...(19): siRNA sense strand
gugaggcucuccaugauga

SEQ ID NO: 2152963 - RNA, 19 nt, Homo sapiens
  misc_RNA (1)...(19): siRNA sense strand
gcacaaauuggacccugua

SEQ ID NO: 2152964 - RNA, 19 nt, Homo sapiens
  misc_RNA (1)...(19): siRNA sense strand
uggcgaaccugucaaguga

SEQ ID NO: 2152965 - RNA, 19 nt, Homo sapiens
  misc_RNA (1)...(19): siRNA sense strand
gacaguggaugccguacaa

SEQ ID NO: 2152966 - RNA, 19 nt, Homo sapiens
  misc_RNA (1)...(19): siRNA sense strand
uggaagauauucugggaaa

SEQ ID NO: 2152967 - RNA, 19 nt, Homo sapiens
  misc_RNA (1)...(19): siRNA sense strand
aaacggcgcugaugagucu

SEQ ID NO: 2152968 - RNA, 19 nt, Homo sapiens
  misc_RNA (1)...(19): siRNA sense strand
gaaccgagcggccagaaca

SEQ ID NO: 2152969 - RNA, 19 nt, Homo sapiens
  misc_RNA (1)...(19): siRNA sense strand
aaauaaagcugccauucag

SEQ ID NO: 2152970 - RNA, 19 nt, Homo sapiens
  misc_RNA (1)...(19): siRNA sense strand
acuagcaggucucuccuua

SEQ ID NO: 2152971 - RNA, 19 nt, Homo sapiens
  misc_RNA (1)...(19): siRNA sense strand
gagguucucaucacaguuu

SEQ ID NO: 2152972 - RNA, 19 nt, Homo sapiens
  misc_RNA (1)...(19): siRNA sense strand
ucagagaaauggugaaacu

SEQ ID NO: 2152973 - RNA, 19 nt, Homo sapiens
  misc_RNA (1)...(19): siRNA sense strand
ggaaauaaagcugccauuc

SEQ ID NO: 2152974 - RNA, 19 nt, Homo sapiens
  misc_RNA (1)...(19): siRNA sense strand
ggaugguaccaguuuguua

SEQ ID NO: 2152975 - RNA, 19 nt, Homo sapiens
  misc_RNA (1)...(19): siRNA sense strand
cgagggagacugacuuuau

SEQ ID NO: 2152976 - RNA, 19 nt, Homo sapiens
  misc_RNA (1)...(19): siRNA sense strand
gcgcucaguuccagcuauu

SEQ ID NO: 2152977 - RNA, 19 nt, Homo sapiens
  misc_RNA (1)...(19): siRNA sense strand
caaaucagcuuuuaguauc

SEQ ID NO: 2152978 - RNA, 19 nt, Homo sapiens
  misc_RNA (1)...(19): siRNA sense strand
gcgcagaagcacaaacaaa

SEQ ID NO: 2152979 - RNA, 19 nt, Homo sapiens
  misc_RNA (1)...(19): siRNA sense strand
ucauccagccugacauuua

SEQ ID NO: 2152980 - RNA, 19 nt, Homo sapiens
  misc_RNA (1)...(19): siRNA sense strand
gaaaagacccgacgacaca

SEQ ID NO: 2152981 - RNA, 19 nt, Homo sapiens
  misc_RNA (1)...(19): siRNA sense strand
ccaaggacuucgccgucua

SEQ ID NO: 2152982 - RNA, 19 nt, Homo sapiens
  misc_RNA (1)...(19): siRNA sense strand
guaccaguuuguuacuuug

SEQ ID NO: 2152983 - RNA, 19 nt, Homo sapiens
  misc_RNA (1)...(19): siRNA sense strand
aaacagcgcagaagcacaa

SEQ ID NO: 2152984 - RNA, 19 nt, Homo sapiens
  misc_RNA (1)...(19): siRNA sense strand
ugggacaguucacguauga

SEQ ID NO: 2152985 - RNA, 19 nt, Homo sapiens
  misc_RNA (1)...(19): siRNA sense strand
aguacucgcuguucugaaa

SEQ ID NO: 2152986 - RNA, 19 nt, Homo sapiens
  misc_RNA (1)...(19): siRNA sense strand
gguggcagcaucuugagua

SEQ ID NO: 2152987 - RNA, 19 nt, Homo sapiens
  misc_RNA (1)...(19): siRNA sense strand
gaagaccggcugugagaca

SEQ ID NO: 2152988 - RNA, 19 nt, Homo sapiens
  misc_RNA (1)...(19): siRNA sense strand
uggaucagcuaaagucaga

SEQ ID NO: 2152989 - RNA, 19 nt, Homo sapiens
  misc_RNA (1)...(19): siRNA sense strand
gcagaagcacaaacaaauc

SEQ ID NO: 2152990 - RNA, 19 nt, Homo sapiens
  misc_RNA (1)...(19): siRNA sense strand
ugaugauggugaucuuaaa

SEQ ID NO: 2152991 - RNA, 19 nt, Homo sapiens
  misc_RNA (1)...(19): siRNA sense strand
ggacaguucacguaugauc

SEQ ID NO: 2152992 - RNA, 19 nt, Homo sapiens
  misc_RNA (1)...(19): siRNA sense strand
uuucucggcuucacaugua

SEQ ID NO: 2152993 - RNA, 19 nt, Homo sapiens
  misc_RNA (1)...(19): siRNA sense strand
gcagguggccucucugucu

SEQ ID NO: 2152994 - RNA, 19 nt, Homo sapiens
  misc_RNA (1)...(19): siRNA sense strand
gauuggaugguaccaguuu

SEQ ID NO: 2152995 - RNA, 19 nt, Homo sapiens
  misc_RNA (1)...(19): siRNA sense strand
uaacugcugggcauuuaaa

SEQ ID NO: 2152996 - RNA, 19 nt, Homo sapiens
  misc_RNA (1)...(19): siRNA sense strand
gaugaugauggugaucuua

SEQ ID NO: 2152997 - RNA, 19 nt, Homo sapiens
  misc_RNA (1)...(19): siRNA sense strand
ggacgugcaagucagagaa

SEQ ID NO: 2152998 - RNA, 19 nt, Homo sapiens
  misc_RNA (1)...(19): siRNA sense strand
gggcaagcaugcauagaac

SEQ ID NO: 2152999 - RNA, 19 nt, Homo sapiens
  misc_RNA (1)...(19): siRNA sense strand
gaacugggcaagcaugcau

SEQ ID NO: 2153000 - RNA, 19 nt, Homo sapiens
  misc_RNA (1)...(19): siRNA sense strand
ccaguuuguuacuuugauu

SEQ ID NO: 2153001 - RNA, 19 nt, Homo sapiens
  misc_RNA (1)...(19): siRNA sense strand
agacggagcacaaauugga

SEQ ID NO: 2153002 - RNA, 19 nt, Homo sapiens
  misc_RNA (1)...(19): siRNA sense strand
gugaagaccggcugugaga

SEQ ID NO: 2153003 - RNA, 19 nt, Homo sapiens
  misc_RNA (1)...(19): siRNA sense strand
ugucacacuuggaagauau

SEQ ID NO: 2153004 - RNA, 19 nt, Homo sapiens
  misc_RNA (1)...(19): siRNA sense strand
uuucuuggcugaauguguu

SEQ ID NO: 2153005 - RNA, 19 nt, Homo sapiens
  misc_RNA (1)...(19): siRNA sense strand
ucgacggccuccuguauug

SEQ ID NO: 2153006 - RNA, 19 nt, Homo sapiens
  misc_RNA (1)...(19): siRNA sense strand
gcagcgcugucucccugaa

SEQ ID NO: 2153007 - RNA, 19 nt, Homo sapiens
  misc_RNA (1)...(19): siRNA sense strand
gacacagcuuuccaaauag

SEQ ID NO: 2153008 - RNA, 19 nt, Homo sapiens
  misc_RNA (1)...(19): siRNA sense strand
cagaagcacaaacaaauca

SEQ ID NO: 2153009 - RNA, 19 nt, Homo sapiens
  misc_RNA (1)...(19): siRNA sense strand
gguuugaaguggugaacau

SEQ ID NO: 2153010 - RNA, 19 nt, Homo sapiens
  misc_RNA (1)...(19): siRNA sense strand
acacagcuuuccaaauagu

SEQ ID NO: 2153011 - RNA, 19 nt, Homo sapiens
  misc_RNA (1)...(19): siRNA sense strand
ggcagcaucuugaguacuc

SEQ ID NO: 2153012 - RNA, 19 nt, Homo sapiens
  misc_RNA (1)...(19): siRNA sense strand
gaaguggugaacauggauu

SEQ ID NO: 2153013 - RNA, 19 nt, Homo sapiens
  misc_RNA (1)...(19): siRNA sense strand
guggugaggcucuccauga

SEQ ID NO: 2153014 - RNA, 19 nt, Homo sapiens
  misc_RNA (1)...(19): siRNA sense strand
cauccagccugacauuuac

SEQ ID NO: 2153015 - RNA, 19 nt, Homo sapiens
  misc_RNA (1)...(19): siRNA sense strand
ggcagccucuggaguguuc

SEQ ID NO: 2153016 - RNA, 19 nt, Homo sapiens
  misc_RNA (1)...(19): siRNA sense strand
aaaugaguaucaggaagaa

SEQ ID NO: 2153017 - RNA, 19 nt, Homo sapiens
  misc_RNA (1)...(19): siRNA sense strand
ggugugugcauuaugguuu

SEQ ID NO: 2153018 - RNA, 19 nt, Homo sapiens
  misc_RNA (1)...(19): siRNA sense strand
aagcuguauucccaagaua

SEQ ID NO: 2153019 - RNA, 19 nt, Homo sapiens
  misc_RNA (1)...(19): siRNA sense strand
cagagguucucaucacagu

SEQ ID NO: 2153020 - RNA, 19 nt, Homo sapiens
  misc_RNA (1)...(19): siRNA sense strand
ccacuuugcuacagaagcu

SEQ ID NO: 2153021 - RNA, 19 nt, Homo sapiens
  misc_RNA (1)...(19): siRNA sense strand
aagcugccauucagggaaa

SEQ ID NO: 2153022 - RNA, 19 nt, Homo sapiens
  misc_RNA (1)...(19): siRNA sense strand
gguggacuuugcucuggaa

SEQ ID NO: 2153023 - RNA, 19 nt, Homo sapiens
  misc_RNA (1)...(19): siRNA sense strand
ugagacggagcacaaauug

SEQ ID NO: 2153024 - RNA, 19 nt, Homo sapiens
  misc_RNA (1)...(19): siRNA sense strand
ugaccacuuugcuacagaa

SEQ ID NO: 2153025 - RNA, 19 nt, Homo sapiens
  misc_RNA (1)...(19): siRNA sense strand
gcucaucccacucuuccuu

SEQ ID NO: 2153026 - RNA, 19 nt, Homo sapiens
  misc_RNA (1)...(19): siRNA sense strand
ugucgagaguuuauucuag

SEQ ID NO: 2153027 - RNA, 19 nt, Homo sapiens
  misc_RNA (1)...(19): siRNA sense strand
gggccagggcaauuucuuu

SEQ ID NO: 2153028 - RNA, 19 nt, Homo sapiens
  misc_RNA (1)...(19): siRNA sense strand
guucacguaugaucaggau

SEQ ID NO: 2153029 - RNA, 19 nt, Homo sapiens
  misc_RNA (1)...(19): siRNA sense strand
guggaugccguacaagaaa

SEQ ID NO: 2153030 - RNA, 19 nt, Homo sapiens
  misc_RNA (1)...(19): siRNA sense strand
ucaccaagaacaugaagug

SEQ ID NO: 2153031 - RNA, 19 nt, Homo sapiens
  misc_RNA (1)...(19): siRNA sense strand
gccgucagcuucggucaga

SEQ ID NO: 2153032 - RNA, 19 nt, Homo sapiens
  misc_RNA (1)...(19): siRNA sense strand
gaugguaccaguuuguuac

SEQ ID NO: 2153033 - RNA, 19 nt, Homo sapiens
  misc_RNA (1)...(19): siRNA sense strand
cagggugugugcauuaugg

SEQ ID NO: 2153034 - RNA, 19 nt, Homo sapiens
  misc_RNA (1)...(19): siRNA sense strand
ggaucccgcugugguacuu

SEQ ID NO: 2153035 - RNA, 19 nt, Homo sapiens
  misc_RNA (1)...(19): siRNA sense strand
gcgcugaugagucuguuug

SEQ ID NO: 2153036 - RNA, 19 nt, Homo sapiens
  misc_RNA (1)...(19): siRNA sense strand
ggugguggcagcaucuuga

SEQ ID NO: 2153037 - RNA, 19 nt, Homo sapiens
  misc_RNA (1)...(19): siRNA sense strand
ccaggugccuucgaaacau

SEQ ID NO: 2153038 - RNA, 19 nt, Homo sapiens
  misc_RNA (1)...(19): siRNA sense strand
acacguaugcgcucaguuc

SEQ ID NO: 2153039 - RNA, 19 nt, Homo sapiens
  misc_RNA (1)...(19): siRNA sense strand
agucagggugugugcauua

SEQ ID NO: 2153040 - RNA, 19 nt, Homo sapiens
  misc_RNA (1)...(19): siRNA sense strand
cgacgacacagcuuuccaa

SEQ ID NO: 2153041 - RNA, 19 nt, Homo sapiens
  misc_RNA (1)...(19): siRNA sense strand
guaacugcugggcauuuaa

SEQ ID NO: 2153042 - RNA, 19 nt, Homo sapiens
  misc_RNA (1)...(19): siRNA sense strand
aauuggacccuguauuuga

SEQ ID NO: 2153043 - RNA, 19 nt, Homo sapiens
  misc_RNA (1)...(19): siRNA sense strand
ugaauguguuucuucuuac

SEQ ID NO: 2153044 - RNA, 19 nt, Homo sapiens
  misc_RNA (1)...(19): siRNA sense strand
agaccgggaugguggacuu

SEQ ID NO: 2153045 - RNA, 19 nt, Homo sapiens
  misc_RNA (1)...(19): siRNA sense strand
guaugucacacuuggaaga

SEQ ID NO: 2153046 - RNA, 19 nt, Homo sapiens
  misc_RNA (1)...(19): siRNA sense strand
uagcaggucucuccuuacg

SEQ ID NO: 2153047 - RNA, 19 nt, Homo sapiens
  misc_RNA (1)...(19): siRNA sense strand
cgacacagcuuuccaaaua

SEQ ID NO: 2153048 - RNA, 19 nt, Homo sapiens
  misc_RNA (1)...(19): siRNA sense strand
gaacacagcggguggauga

SEQ ID NO: 2153049 - RNA, 19 nt, Homo sapiens
  misc_RNA (1)...(19): siRNA sense strand
gcaaggcgguucucuggaa

SEQ ID NO: 2153050 - RNA, 19 nt, Homo sapiens
  misc_RNA (1)...(19): siRNA sense strand
gaaauaaagcugccauuca

SEQ ID NO: 2153051 - RNA, 19 nt, Homo sapiens
  misc_RNA (1)...(19): siRNA sense strand
cugaauguguuucuucuua

SEQ ID NO: 2153052 - RNA, 19 nt, Homo sapiens
  misc_RNA (1)...(19): siRNA sense strand
gguaacugcugggcauuua

SEQ ID NO: 2153053 - RNA, 19 nt, Homo sapiens
  misc_RNA (1)...(19): siRNA sense strand
gcacaaacaaaucagcuuu

SEQ ID NO: 2153054 - RNA, 19 nt, Homo sapiens
  misc_RNA (1)...(19): siRNA sense strand
gagggagacugacuuuaug

SEQ ID NO: 2153055 - RNA, 19 nt, Homo sapiens
  misc_RNA (1)...(19): siRNA sense strand
gaucuuaaagguggaaaua

SEQ ID NO: 2153056 - RNA, 19 nt, Homo sapiens
  misc_RNA (1)...(19): siRNA sense strand
gguaccaguuuguuacuuu

SEQ ID NO: 2153057 - RNA, 19 nt, Homo sapiens
  misc_RNA (1)...(19): siRNA sense strand
gaacacgggcuacacguau

SEQ ID NO: 2153058 - RNA, 19 nt, Homo sapiens
  misc_RNA (1)...(19): siRNA sense strand
uccgagagcugaccacuuu

SEQ ID NO: 2153059 - RNA, 19 nt, Homo sapiens
  misc_RNA (1)...(19): siRNA sense strand
gaagcuguauucccaagau

SEQ ID NO: 2153060 - RNA, 19 nt, Homo sapiens
  misc_RNA (1)...(19): siRNA sense strand
ggacuucgccgucuaugga

SEQ ID NO: 2153061 - RNA, 19 nt, Homo sapiens
  misc_RNA (1)...(19): siRNA sense strand
ggacuuugcucuggaaucu

SEQ ID NO: 2153062 - RNA, 19 nt, Homo sapiens
  misc_RNA (1)...(19): siRNA sense strand
gugaggcucuccaugauga

SEQ ID NO: 2153063 - RNA, 19 nt, Homo sapiens
  misc_RNA (1)...(19): siRNA sense strand
gcacaaauuggacccugua

SEQ ID NO: 2153064 - RNA, 19 nt, Homo sapiens
  misc_RNA (1)...(19): siRNA sense strand
uggcgaaccugucaaguga

SEQ ID NO: 2153065 - RNA, 19 nt, Homo sapiens
  misc_RNA (1)...(19): siRNA sense strand
gacaguggaugccguacaa

SEQ ID NO: 2153066 - RNA, 19 nt, Homo sapiens
  misc_RNA (1)...(19): siRNA sense strand
uggaagauauucugggaaa

SEQ ID NO: 2153067 - RNA, 19 nt, Homo sapiens
  misc_RNA (1)...(19): siRNA sense strand
aaacggcgcugaugagucu

SEQ ID NO: 2153068 - RNA, 19 nt, Homo sapiens
  misc_RNA (1)...(19): siRNA sense strand
gaaccgagcggccagaaca

SEQ ID NO: 2153069 - RNA, 19 nt, Homo sapiens
  misc_RNA (1)...(19): siRNA sense strand
aaauaaagcugccauucag

SEQ ID NO: 2153070 - RNA, 19 nt, Homo sapiens
  misc_RNA (1)...(19): siRNA sense strand
acuagcaggucucuccuua

SEQ ID NO: 2153071 - RNA, 19 nt, Homo sapiens
  misc_RNA (1)...(19): siRNA sense strand
gagguucucaucacaguuu

SEQ ID NO: 2153072 - RNA, 19 nt, Homo sapiens
  misc_RNA (1)...(19): siRNA sense strand
ucagagaaauggugaaacu

SEQ ID NO: 2153073 - RNA, 19 nt, Homo sapiens
  misc_RNA (1)...(19): siRNA sense strand
ggaaauaaagcugccauuc

SEQ ID NO: 2153074 - RNA, 19 nt, Homo sapiens
  misc_RNA (1)...(19): siRNA sense strand
ggaugguaccaguuuguua

SEQ ID NO: 2153075 - RNA, 19 nt, Homo sapiens
  misc_RNA (1)...(19): siRNA sense strand
cgagggagacugacuuuau

SEQ ID NO: 2153076 - RNA, 19 nt, Homo sapiens
  misc_RNA (1)...(19): siRNA sense strand
gcgcucaguuccagcuauu

SEQ ID NO: 2153077 - RNA, 19 nt, Homo sapiens
  misc_RNA (1)...(19): siRNA sense strand
caaaucagcuuuuaguauc

SEQ ID NO: 2153078 - RNA, 19 nt, Homo sapiens
  misc_RNA (1)...(19): siRNA sense strand
gcgcagaagcacaaacaaa

SEQ ID NO: 2153079 - RNA, 19 nt, Homo sapiens
  misc_RNA (1)...(19): siRNA sense strand
ucauccagccugacauuua

SEQ ID NO: 2153080 - RNA, 19 nt, Homo sapiens
  misc_RNA (1)...(19): siRNA sense strand
gaaaagacccgacgacaca

SEQ ID NO: 2153081 - RNA, 19 nt, Homo sapiens
  misc_RNA (1)...(19): siRNA sense strand
ccaaggacuucgccgucua

SEQ ID NO: 2153082 - RNA, 19 nt, Homo sapiens
  misc_RNA (1)...(19): siRNA sense strand
guaccaguuuguuacuuug

SEQ ID NO: 2153083 - RNA, 19 nt, Homo sapiens
  misc_RNA (1)...(19): siRNA sense strand
aaacagcgcagaagcacaa

SEQ ID NO: 2153084 - RNA, 19 nt, Homo sapiens
  misc_RNA (1)...(19): siRNA sense strand
ugggacaguucacguauga

SEQ ID NO: 2153085 - RNA, 19 nt, Homo sapiens
  misc_RNA (1)...(19): siRNA sense strand
aguacucgcuguucugaaa

SEQ ID NO: 2153086 - RNA, 19 nt, Homo sapiens
  misc_RNA (1)...(19): siRNA sense strand
gguggcagcaucuugagua

SEQ ID NO: 2153087 - RNA, 19 nt, Homo sapiens
  misc_RNA (1)...(19): siRNA sense strand
gaagaccggcugugagaca

SEQ ID NO: 2153088 - RNA, 19 nt, Homo sapiens
  misc_RNA (1)...(19): siRNA sense strand
uggaucagcuaaagucaga

SEQ ID NO: 2153089 - RNA, 19 nt, Homo sapiens
  misc_RNA (1)...(19): siRNA sense strand
gcagaagcacaaacaaauc

SEQ ID NO: 2153090 - RNA, 19 nt, Homo sapiens
  misc_RNA (1)...(19): siRNA sense strand
ugaugauggugaucuuaaa

SEQ ID NO: 2153091 - RNA, 19 nt, Homo sapiens
  misc_RNA (1)...(19): siRNA sense strand
ggacaguucacguaugauc

SEQ ID NO: 2153092 - RNA, 19 nt, Homo sapiens
  misc_RNA (1)...(19): siRNA sense strand
uuucucggcuucacaugua

SEQ ID NO: 2153093 - RNA, 19 nt, Homo sapiens
  misc_RNA (1)...(19): siRNA sense strand
gcagguggccucucugucu

SEQ ID NO: 2153094 - RNA, 19 nt, Homo sapiens
  misc_RNA (1)...(19): siRNA sense strand
gauuggaugguaccaguuu

SEQ ID NO: 2153095 - RNA, 19 nt, Homo sapiens
  misc_RNA (1)...(19): siRNA sense strand
uaacugcugggcauuuaaa

SEQ ID NO: 2153096 - RNA, 19 nt, Homo sapiens
  misc_RNA (1)...(19): siRNA sense strand
gaugaugauggugaucuua

SEQ ID NO: 2153097 - RNA, 19 nt, Homo sapiens
  misc_RNA (1)...(19): siRNA sense strand
ggacgugcaagucagagaa

SEQ ID NO: 2153098 - RNA, 19 nt, Homo sapiens
  misc_RNA (1)...(19): siRNA sense strand
gggcaagcaugcauagaac

SEQ ID NO: 2153099 - RNA, 19 nt, Homo sapiens
  misc_RNA (1)...(19): siRNA sense strand
gaacugggcaagcaugcau

SEQ ID NO: 2153100 - RNA, 19 nt, Homo sapiens
  misc_RNA (1)...(19): siRNA sense strand
ccaguuuguuacuuugauu

SEQ ID NO: 2153101 - RNA, 19 nt, Homo sapiens
  misc_RNA (1)...(19): siRNA sense strand
agacggagcacaaauugga

SEQ ID NO: 2153102 - RNA, 19 nt, Homo sapiens
  misc_RNA (1)...(19): siRNA sense strand
gugaagaccggcugugaga

SEQ ID NO: 2153103 - RNA, 19 nt, Homo sapiens
  misc_RNA (1)...(19): siRNA sense strand
ugucacacuuggaagauau

SEQ ID NO: 2153104 - RNA, 19 nt, Homo sapiens
  misc_RNA (1)...(19): siRNA sense strand
uuucuuggcugaauguguu

SEQ ID NO: 2153105 - RNA, 19 nt, Homo sapiens
  misc_RNA (1)...(19): siRNA sense strand
ucgacggccuccuguauug

SEQ ID NO: 2153106 - RNA, 19 nt, Homo sapiens
  misc_RNA (1)...(19): siRNA sense strand
gcagcgcugucucccugaa

SEQ ID NO: 2153107 - RNA, 19 nt, Homo sapiens
  misc_RNA (1)...(19): siRNA sense strand
gacacagcuuuccaaauag

SEQ ID NO: 2153108 - RNA, 19 nt, Homo sapiens
  misc_RNA (1)...(19): siRNA sense strand
cagaagcacaaacaaauca

SEQ ID NO: 2153109 - RNA, 19 nt, Homo sapiens
  misc_RNA (1)...(19): siRNA sense strand
gguuugaaguggugaacau

SEQ ID NO: 2153110 - RNA, 19 nt, Homo sapiens
  misc_RNA (1)...(19): siRNA sense strand
acacagcuuuccaaauagu

SEQ ID NO: 2153111 - RNA, 19 nt, Homo sapiens
  misc_RNA (1)...(19): siRNA sense strand
ggcagcaucuugaguacuc

SEQ ID NO: 2153112 - RNA, 19 nt, Homo sapiens
  misc_RNA (1)...(19): siRNA sense strand
gaaguggugaacauggauu

SEQ ID NO: 2153113 - RNA, 19 nt, Homo sapiens
  misc_RNA (1)...(19): siRNA sense strand
guggugaggcucuccauga

SEQ ID NO: 2153114 - RNA, 19 nt, Homo sapiens
  misc_RNA (1)...(19): siRNA sense strand
cauccagccugacauuuac

SEQ ID NO: 2153115 - RNA, 19 nt, Homo sapiens
  misc_RNA (1)...(19): siRNA sense strand
ggcagccucuggaguguuc

SEQ ID NO: 2153116 - RNA, 19 nt, Homo sapiens
  misc_RNA (1)...(19): siRNA sense strand
aaaugaguaucaggaagaa

SEQ ID NO: 2153117 - RNA, 19 nt, Homo sapiens
  misc_RNA (1)...(19): siRNA sense strand
ggugugugcauuaugguuu

SEQ ID NO: 2153118 - RNA, 19 nt, Homo sapiens
  misc_RNA (1)...(19): siRNA sense strand
aagcuguauucccaagaua

SEQ ID NO: 2153119 - RNA, 19 nt, Homo sapiens
  misc_RNA (1)...(19): siRNA sense strand
cagagguucucaucacagu

SEQ ID NO: 2153120 - RNA, 19 nt, Homo sapiens
  misc_RNA (1)...(19): siRNA sense strand
ccacuuugcuacagaagcu

SEQ ID NO: 2153121 - RNA, 19 nt, Homo sapiens
  misc_RNA (1)...(19): siRNA sense strand
aagcugccauucagggaaa

SEQ ID NO: 2153122 - RNA, 19 nt, Homo sapiens
  misc_RNA (1)...(19): siRNA sense strand
gguggacuuugcucuggaa

SEQ ID NO: 2153123 - RNA, 19 nt, Homo sapiens
  misc_RNA (1)...(19): siRNA sense strand
ugagacggagcacaaauug

SEQ ID NO: 2153124 - RNA, 19 nt, Homo sapiens
  misc_RNA (1)...(19): siRNA sense strand
ugaccacuuugcuacagaa

SEQ ID NO: 2153125 - RNA, 19 nt, Homo sapiens
  misc_RNA (1)...(19): siRNA sense strand
gcucaucccacucuuccuu

SEQ ID NO: 2153126 - RNA, 19 nt, Homo sapiens
  misc_RNA (1)...(19): siRNA sense strand
ugucgagaguuuauucuag

SEQ ID NO: 2153127 - RNA, 19 nt, Homo sapiens
  misc_RNA (1)...(19): siRNA sense strand
gggccagggcaauuucuuu

SEQ ID NO: 2153128 - RNA, 19 nt, Homo sapiens
  misc_RNA (1)...(19): siRNA sense strand
guucacguaugaucaggau

SEQ ID NO: 2153129 - RNA, 19 nt, Homo sapiens
  misc_RNA (1)...(19): siRNA sense strand
guggaugccguacaagaaa

SEQ ID NO: 2153130 - RNA, 19 nt, Homo sapiens
  misc_RNA (1)...(19): siRNA sense strand
ucaccaagaacaugaagug

SEQ ID NO: 2153131 - RNA, 19 nt, Homo sapiens
  misc_RNA (1)...(19): siRNA sense strand
gccgucagcuucggucaga

SEQ ID NO: 2153132 - RNA, 19 nt, Homo sapiens
  misc_RNA (1)...(19): siRNA sense strand
gaugguaccaguuuguuac

SEQ ID NO: 2153133 - RNA, 19 nt, Homo sapiens
  misc_RNA (1)...(19): siRNA sense strand
cagggugugugcauuaugg

SEQ ID NO: 2153134 - RNA, 19 nt, Homo sapiens
  misc_RNA (1)...(19): siRNA sense strand
ggaucccgcugugguacuu

SEQ ID NO: 2153135 - RNA, 19 nt, Homo sapiens
  misc_RNA (1)...(19): siRNA sense strand
gcgcugaugagucuguuug

SEQ ID NO: 2153136 - RNA, 19 nt, Homo sapiens
  misc_RNA (1)...(19): siRNA sense strand
ggugguggcagcaucuuga

SEQ ID NO: 2153137 - RNA, 19 nt, Homo sapiens
  misc_RNA (1)...(19): siRNA sense strand
ccaggugccuucgaaacau

SEQ ID NO: 2153138 - RNA, 19 nt, Homo sapiens
  misc_RNA (1)...(19): siRNA sense strand
acacguaugcgcucaguuc

SEQ ID NO: 2153139 - RNA, 19 nt, Homo sapiens
  misc_RNA (1)...(19): siRNA sense strand
agucagggugugugcauua

SEQ ID NO: 2153140 - RNA, 19 nt, Homo sapiens
  misc_RNA (1)...(19): siRNA sense strand
cgacgacacagcuuuccaa

SEQ ID NO: 2153141 - RNA, 19 nt, Homo sapiens
  misc_RNA (1)...(19): siRNA sense strand
guaacugcugggcauuuaa

SEQ ID NO: 2153142 - RNA, 19 nt, Homo sapiens
  misc_RNA (1)...(19): siRNA sense strand
aauuggacccuguauuuga

SEQ ID NO: 2153143 - RNA, 19 nt, Homo sapiens
  misc_RNA (1)...(19): siRNA sense strand
ugaauguguuucuucuuac

SEQ ID NO: 2153144 - RNA, 19 nt, Homo sapiens
  misc_RNA (1)...(19): siRNA sense strand
agaccgggaugguggacuu

SEQ ID NO: 2153145 - RNA, 19 nt, Homo sapiens
  misc_RNA (1)...(19): siRNA sense strand
guaugucacacuuggaaga

SEQ ID NO: 2153146 - RNA, 19 nt, Homo sapiens
  misc_RNA (1)...(19): siRNA sense strand
uagcaggucucuccuuacg

SEQ ID NO: 2153147 - RNA, 19 nt, Homo sapiens
  misc_RNA (1)...(19): siRNA sense strand
gaacuggcccgagaucuuu

SEQ ID NO: 2153148 - RNA, 19 nt, Homo sapiens
  misc_RNA (1)...(19): siRNA sense strand
ccacggugcugcuggauga

SEQ ID NO: 2153149 - RNA, 19 nt, Homo sapiens
  misc_RNA (1)...(19): siRNA sense strand
gcgccuaccugaucuacuu

SEQ ID NO: 2153150 - RNA, 19 nt, Homo sapiens
  misc_RNA (1)...(19): siRNA sense strand
caaagggucaggccaauga

SEQ ID NO: 2153151 - RNA, 19 nt, Homo sapiens
  misc_RNA (1)...(19): siRNA sense strand
cgaccuggcuggcauguuc

SEQ ID NO: 2153152 - RNA, 19 nt, Homo sapiens
  misc_RNA (1)...(19): siRNA sense strand
gaucgacgccguucugaau

SEQ ID NO: 2153153 - RNA, 19 nt, Homo sapiens
  misc_RNA (1)...(19): siRNA sense strand
gaucaagcccaacaucuuc

SEQ ID NO: 2153154 - RNA, 19 nt, Homo sapiens
  misc_RNA (1)...(19): siRNA sense strand
ccaagcagaccaucacuga

SEQ ID NO: 2153155 - RNA, 19 nt, Homo sapiens
  misc_RNA (1)...(19): siRNA sense strand
caucuguggugccaauuga

SEQ ID NO: 2153156 - RNA, 19 nt, Homo sapiens
  misc_RNA (1)...(19): siRNA sense strand
ugaagaugcucauggagau

SEQ ID NO: 2153157 - RNA, 19 nt, Homo sapiens
  misc_RNA (1)...(19): siRNA sense strand
ugucugugcuggccuguaa

SEQ ID NO: 2153158 - RNA, 19 nt, Homo sapiens
  misc_RNA (1)...(19): siRNA sense strand
ccacugagggcgucauuga

SEQ ID NO: 2153159 - RNA, 19 nt, Homo sapiens
  misc_RNA (1)...(19): siRNA sense strand
gcacgaugcuguggacgau

SEQ ID NO: 2153160 - RNA, 19 nt, Homo sapiens
  misc_RNA (1)...(19): siRNA sense strand
ucucacaccugaucaagau

SEQ ID NO: 2153161 - RNA, 19 nt, Homo sapiens
  misc_RNA (1)...(19): siRNA sense strand
ucauguaccuggccaagau

SEQ ID NO: 2153162 - RNA, 19 nt, Homo sapiens
  misc_RNA (1)...(19): siRNA sense strand
caacaugcagguccucuau

SEQ ID NO: 2153163 - RNA, 19 nt, Homo sapiens
  misc_RNA (1)...(19): siRNA sense strand
gcaaggagccgcaguaccu

SEQ ID NO: 2153164 - RNA, 19 nt, Homo sapiens
  misc_RNA (1)...(19): siRNA sense strand
gacccgagauccugagcuu

SEQ ID NO: 2153165 - RNA, 19 nt, Homo sapiens
  misc_RNA (1)...(19): siRNA sense strand
cgugugaggugcuggacua

SEQ ID NO: 2153166 - RNA, 19 nt, Homo sapiens
  misc_RNA (1)...(19): siRNA sense strand
ccauuucuccgucgauuaa

SEQ ID NO: 2153167 - RNA, 19 nt, Homo sapiens
  misc_RNA (1)...(19): siRNA sense strand
cuaguggacuggcuggaaa

SEQ ID NO: 2153168 - RNA, 19 nt, Homo sapiens
  misc_RNA (1)...(19): siRNA sense strand
gugaggugcuggacuacuu

SEQ ID NO: 2153169 - RNA, 19 nt, Homo sapiens
  misc_RNA (1)...(19): siRNA sense strand
gcacgguuccgaagacaug

SEQ ID NO: 2153170 - RNA, 19 nt, Homo sapiens
  misc_RNA (1)...(19): siRNA sense strand
ucaaguuggugaucuucaa

SEQ ID NO: 2153171 - RNA, 19 nt, Homo sapiens
  misc_RNA (1)...(19): siRNA sense strand
gaacaucauggacaagagu

SEQ ID NO: 2153172 - RNA, 19 nt, Homo sapiens
  misc_RNA (1)...(19): siRNA sense strand
gcacccaccucaacuucca

SEQ ID NO: 2153173 - RNA, 19 nt, Homo sapiens
  misc_RNA (1)...(19): siRNA sense strand
ugaaggugcuccugcagau

SEQ ID NO: 2153174 - RNA, 19 nt, Homo sapiens
  misc_RNA (1)...(19): siRNA sense strand
ucucuacccucuacuggaa

SEQ ID NO: 2153175 - RNA, 19 nt, Homo sapiens
  misc_RNA (1)...(19): siRNA sense strand
gcugcugacugcauucuuc

SEQ ID NO: 2153176 - RNA, 19 nt, Homo sapiens
  misc_RNA (1)...(19): siRNA sense strand
caucaugucccaccucuuc

SEQ ID NO: 2153177 - RNA, 19 nt, Homo sapiens
  misc_RNA (1)...(19): siRNA sense strand
cagagcagccggagaccua

SEQ ID NO: 2153178 - RNA, 19 nt, Homo sapiens
  misc_RNA (1)...(19): siRNA sense strand
gccaaacgguggaggaucu

SEQ ID NO: 2153179 - RNA, 19 nt, Homo sapiens
  misc_RNA (1)...(19): siRNA sense strand
ugcagaagcuggagaugug

SEQ ID NO: 2153180 - RNA, 19 nt, Homo sapiens
  misc_RNA (1)...(19): siRNA sense strand
guucauccauaaguacauu

SEQ ID NO: 2153181 - RNA, 19 nt, Homo sapiens
  misc_RNA (1)...(19): siRNA sense strand
ccucaccggucucaccaaa

SEQ ID NO: 2153182 - RNA, 19 nt, Homo sapiens
  misc_RNA (1)...(19): siRNA sense strand
ggcaagagccgggaacaga

SEQ ID NO: 2153183 - RNA, 19 nt, Homo sapiens
  misc_RNA (1)...(19): siRNA sense strand
agacauggacgucaucuca

SEQ ID NO: 2153184 - RNA, 19 nt, Homo sapiens
  misc_RNA (1)...(19): siRNA sense strand
cggagagcguggaggagua

SEQ ID NO: 2153185 - RNA, 19 nt, Homo sapiens
  misc_RNA (1)...(19): siRNA sense strand
ggacucauccaccgcuuca

SEQ ID NO: 2153186 - RNA, 19 nt, Homo sapiens
  misc_RNA (1)...(19): siRNA sense strand
gcccugaggauccugcaua

SEQ ID NO: 2153187 - RNA, 19 nt, Homo sapiens
  misc_RNA (1)...(19): siRNA sense strand
uccggaaccugccugagua

SEQ ID NO: 2153188 - RNA, 19 nt, Homo sapiens
  misc_RNA (1)...(19): siRNA sense strand
gcuccgaggugcccauuuu

SEQ ID NO: 2153189 - RNA, 19 nt, Homo sapiens
  misc_RNA (1)...(19): siRNA sense strand
ggacgccuccaucaacuuc

SEQ ID NO: 2153190 - RNA, 19 nt, Homo sapiens
  misc_RNA (1)...(19): siRNA sense strand
gcugaaaucccuccuugca

SEQ ID NO: 2153191 - RNA, 19 nt, Homo sapiens
  misc_RNA (1)...(19): siRNA sense strand
gcauguuccuccagauuuu

SEQ ID NO: 2153192 - RNA, 19 nt, Homo sapiens
  misc_RNA (1)...(19): siRNA sense strand
cagccgaaacccugacuuu

SEQ ID NO: 2153193 - RNA, 19 nt, Homo sapiens
  misc_RNA (1)...(19): siRNA sense strand
ggaagugcuccgcucauuc

SEQ ID NO: 2153194 - RNA, 19 nt, Homo sapiens
  misc_RNA (1)...(19): siRNA sense strand
cgcaguaccuggagaugga

SEQ ID NO: 2153195 - RNA, 19 nt, Homo sapiens
  misc_RNA (1)...(19): siRNA sense strand
ggcccgagaucuuugucaa

SEQ ID NO: 2153196 - RNA, 19 nt, Homo sapiens
  misc_RNA (1)...(19): siRNA sense strand
ggcauguuccuccagauuu

SEQ ID NO: 2153197 - RNA, 19 nt, Homo sapiens
  misc_RNA (1)...(19): siRNA sense strand
cagaggcacccaaaccaaa

SEQ ID NO: 2153198 - RNA, 19 nt, Homo sapiens
  misc_RNA (1)...(19): siRNA sense strand
cggcccagcucaugagugu

SEQ ID NO: 2153199 - RNA, 19 nt, Homo sapiens
  misc_RNA (1)...(19): siRNA sense strand
ccggagaccuacuacaagu

SEQ ID NO: 2153200 - RNA, 19 nt, Homo sapiens
  misc_RNA (1)...(19): siRNA sense strand
uggaagugcuccgcucauu

SEQ ID NO: 2153201 - RNA, 19 nt, Homo sapiens
  misc_RNA (1)...(19): siRNA sense strand
aagcagaccaucacugaga

SEQ ID NO: 2153202 - RNA, 19 nt, Homo sapiens
  misc_RNA (1)...(19): siRNA sense strand
ucaggccaaugaaucgaaa

SEQ ID NO: 2153203 - RNA, 19 nt, Homo sapiens
  misc_RNA (1)...(19): siRNA sense strand
ccaucuggcugccuucauc

SEQ ID NO: 2153204 - RNA, 19 nt, Homo sapiens
  misc_RNA (1)...(19): siRNA sense strand
ucauugcucugggcucaaa

SEQ ID NO: 2153205 - RNA, 19 nt, Homo sapiens
  misc_RNA (1)...(19): siRNA sense strand
ccaagguccuccucaacca

SEQ ID NO: 2153206 - RNA, 19 nt, Homo sapiens
  misc_RNA (1)...(19): siRNA sense strand
ugaggauccugcauaugga

SEQ ID NO: 2153207 - RNA, 19 nt, Homo sapiens
  misc_RNA (1)...(19): siRNA sense strand
ugagugacauagacgagau

SEQ ID NO: 2153208 - RNA, 19 nt, Homo sapiens
  misc_RNA (1)...(19): siRNA sense strand
gcacagaggcacccaaacc

SEQ ID NO: 2153209 - RNA, 19 nt, Homo sapiens
  misc_RNA (1)...(19): siRNA sense strand
guuugucgcuggugcuuuc

SEQ ID NO: 2153210 - RNA, 19 nt, Homo sapiens
  misc_RNA (1)...(19): siRNA sense strand
gggcaccaccaucaaguug

SEQ ID NO: 2153211 - RNA, 19 nt, Homo sapiens
  misc_RNA (1)...(19): siRNA sense strand
ucagcaagcucgccccuaa

SEQ ID NO: 2153212 - RNA, 19 nt, Homo sapiens
  misc_RNA (1)...(19): siRNA sense strand
gggcauguacggccagaug

SEQ ID NO: 2153213 - RNA, 19 nt, Homo sapiens
  misc_RNA (1)...(19): siRNA sense strand
ggucagcgucucccuguuc

SEQ ID NO: 2153214 - RNA, 19 nt, Homo sapiens
  misc_RNA (1)...(19): siRNA sense strand
caacagugaccuggugaug

SEQ ID NO: 2153215 - RNA, 19 nt, Homo sapiens
  misc_RNA (1)...(19): siRNA sense strand
ccaaguuccuggccauggu

SEQ ID NO: 2153216 - RNA, 19 nt, Homo sapiens
  misc_RNA (1)...(19): siRNA sense strand
ugcaguucauccauaagua

SEQ ID NO: 2153217 - RNA, 19 nt, Homo sapiens
  misc_RNA (1)...(19): siRNA sense strand
gggcacagcucaggaugcu

SEQ ID NO: 2153218 - RNA, 19 nt, Homo sapiens
  misc_RNA (1)...(19): siRNA sense strand
ucuccucgcucuuccugaa

SEQ ID NO: 2153219 - RNA, 19 nt, Homo sapiens
  misc_RNA (1)...(19): siRNA sense strand
cggcaucgccugggacaaa

SEQ ID NO: 2153220 - RNA, 19 nt, Homo sapiens
  misc_RNA (1)...(19): siRNA sense strand
cagcacagaggcacccaaa

SEQ ID NO: 2153221 - RNA, 19 nt, Homo sapiens
  misc_RNA (1)...(19): siRNA sense strand
gagagugaccgcaacuucu

SEQ ID NO: 2153222 - RNA, 19 nt, Homo sapiens
  misc_RNA (1)...(19): siRNA sense strand
gaagugcuccgcucauucc

SEQ ID NO: 2153223 - RNA, 19 nt, Homo sapiens
  misc_RNA (1)...(19): siRNA sense strand
caagaucaagcccaacauc

SEQ ID NO: 2153224 - RNA, 19 nt, Homo sapiens
  misc_RNA (1)...(19): siRNA sense strand
gaaguccucccgccaucug

SEQ ID NO: 2153225 - RNA, 19 nt, Homo sapiens
  misc_RNA (1)...(19): siRNA sense strand
ugucccaccucuucucgaa

SEQ ID NO: 2153226 - RNA, 19 nt, Homo sapiens
  misc_RNA (1)...(19): siRNA sense strand
cgugcacccugacggauga

SEQ ID NO: 2153227 - RNA, 19 nt, Homo sapiens
  misc_RNA (1)...(19): siRNA sense strand
acaugcagguccucuauac

SEQ ID NO: 2153228 - RNA, 19 nt, Homo sapiens
  misc_RNA (1)...(19): siRNA sense strand
ccaacaucuucgccacuga

SEQ ID NO: 2153229 - RNA, 19 nt, Homo sapiens
  misc_RNA (1)...(19): siRNA sense strand
ucgacaacgucuccaggaa

SEQ ID NO: 2153230 - RNA, 19 nt, Homo sapiens
  misc_RNA (1)...(19): siRNA sense strand
uuugugcaguucauccaua

SEQ ID NO: 2153231 - RNA, 19 nt, Homo sapiens
  misc_RNA (1)...(19): siRNA sense strand
gugcugagcgcucuguugu

SEQ ID NO: 2153232 - RNA, 19 nt, Homo sapiens
  misc_RNA (1)...(19): siRNA sense strand
gcagcaggcaauccacaug

SEQ ID NO: 2153233 - RNA, 19 nt, Homo sapiens
  misc_RNA (1)...(19): siRNA sense strand
ggugcuggacuacuucuug

SEQ ID NO: 2153234 - RNA, 19 nt, Homo sapiens
  misc_RNA (1)...(19): siRNA sense strand
ccgaagacauggacgucau

SEQ ID NO: 2153235 - RNA, 19 nt, Homo sapiens
  misc_RNA (1)...(19): siRNA sense strand
ucauugaggcucuguguag

SEQ ID NO: 2153236 - RNA, 19 nt, Homo sapiens
  misc_RNA (1)...(19): siRNA sense strand
gcaguucauccauaaguac

SEQ ID NO: 2153237 - RNA, 19 nt, Homo sapiens
  misc_RNA (1)...(19): siRNA sense strand
uccgccugcugcugaauua

SEQ ID NO: 2153238 - RNA, 19 nt, Homo sapiens
  misc_RNA (1)...(19): siRNA sense strand
ugcuacgguuugcagauua

SEQ ID NO: 2153239 - RNA, 19 nt, Homo sapiens
  misc_RNA (1)...(19): siRNA sense strand
ugaccaacaacuacuccua

SEQ ID NO: 2153240 - RNA, 19 nt, Homo sapiens
  misc_RNA (1)...(19): siRNA sense strand
ggucgucgccgcauucaac

SEQ ID NO: 2153241 - RNA, 19 nt, Homo sapiens
  misc_RNA (1)...(19): siRNA sense strand
cgagagugaccgcaacuuc

SEQ ID NO: 2153242 - RNA, 19 nt, Homo sapiens
  misc_RNA (1)...(19): siRNA sense strand
caacuggccacccgagagu

SEQ ID NO: 2153243 - RNA, 19 nt, Homo sapiens
  misc_RNA (1)...(19): siRNA sense strand
agaccaagcacgagaucaa

SEQ ID NO: 2153244 - RNA, 19 nt, Homo sapiens
  misc_RNA (1)...(19): siRNA sense strand
gcccggaacccgaacaaca

SEQ ID NO: 2153245 - RNA, 19 nt, Homo sapiens
  misc_RNA (1)...(19): siRNA sense strand
acagugaccuggugaugcu

SEQ ID NO: 2153246 - RNA, 19 nt, Homo sapiens
  misc_RNA (1)...(19): siRNA sense strand
ugcuggagguucugaguga

SEQ ID NO: 2153247 - RNA, 19 nt, Homo sapiens
  misc_RNA (1)...(19): siRNA sense strand
gaacuggcccgagaucuuu

SEQ ID NO: 2153248 - RNA, 19 nt, Homo sapiens
  misc_RNA (1)...(19): siRNA sense strand
ccacggugcugcuggauga

SEQ ID NO: 2153249 - RNA, 19 nt, Homo sapiens
  misc_RNA (1)...(19): siRNA sense strand
gcgccuaccugaucuacuu

SEQ ID NO: 2153250 - RNA, 19 nt, Homo sapiens
  misc_RNA (1)...(19): siRNA sense strand
caaagggucaggccaauga

SEQ ID NO: 2153251 - RNA, 19 nt, Homo sapiens
  misc_RNA (1)...(19): siRNA sense strand
cgaccuggcuggcauguuc

SEQ ID NO: 2153252 - RNA, 19 nt, Homo sapiens
  misc_RNA (1)...(19): siRNA sense strand
gaucgacgccguucugaau

SEQ ID NO: 2153253 - RNA, 19 nt, Homo sapiens
  misc_RNA (1)...(19): siRNA sense strand
gaucaagcccaacaucuuc

SEQ ID NO: 2153254 - RNA, 19 nt, Homo sapiens
  misc_RNA (1)...(19): siRNA sense strand
ccaagcagaccaucacuga

SEQ ID NO: 2153255 - RNA, 19 nt, Homo sapiens
  misc_RNA (1)...(19): siRNA sense strand
caucuguggugccaauuga

SEQ ID NO: 2153256 - RNA, 19 nt, Homo sapiens
  misc_RNA (1)...(19): siRNA sense strand
ugaagaugcucauggagau

SEQ ID NO: 2153257 - RNA, 19 nt, Homo sapiens
  misc_RNA (1)...(19): siRNA sense strand
ugucugugcuggccuguaa

SEQ ID NO: 2153258 - RNA, 19 nt, Homo sapiens
  misc_RNA (1)...(19): siRNA sense strand
ccacugagggcgucauuga

SEQ ID NO: 2153259 - RNA, 19 nt, Homo sapiens
  misc_RNA (1)...(19): siRNA sense strand
gcacgaugcuguggacgau

SEQ ID NO: 2153260 - RNA, 19 nt, Homo sapiens
  misc_RNA (1)...(19): siRNA sense strand
ucucacaccugaucaagau

SEQ ID NO: 2153261 - RNA, 19 nt, Homo sapiens
  misc_RNA (1)...(19): siRNA sense strand
ucauguaccuggccaagau

SEQ ID NO: 2153262 - RNA, 19 nt, Homo sapiens
  misc_RNA (1)...(19): siRNA sense strand
caacaugcagguccucuau

SEQ ID NO: 2153263 - RNA, 19 nt, Homo sapiens
  misc_RNA (1)...(19): siRNA sense strand
gcaaggagccgcaguaccu

SEQ ID NO: 2153264 - RNA, 19 nt, Homo sapiens
  misc_RNA (1)...(19): siRNA sense strand
gacccgagauccugagcuu

SEQ ID NO: 2153265 - RNA, 19 nt, Homo sapiens
  misc_RNA (1)...(19): siRNA sense strand
cgugugaggugcuggacua

SEQ ID NO: 2153266 - RNA, 19 nt, Homo sapiens
  misc_RNA (1)...(19): siRNA sense strand
ccauuucuccgucgauuaa

SEQ ID NO: 2153267 - RNA, 19 nt, Homo sapiens
  misc_RNA (1)...(19): siRNA sense strand
cuaguggacuggcuggaaa

SEQ ID NO: 2153268 - RNA, 19 nt, Homo sapiens
  misc_RNA (1)...(19): siRNA sense strand
gugaggugcuggacuacuu

SEQ ID NO: 2153269 - RNA, 19 nt, Homo sapiens
  misc_RNA (1)...(19): siRNA sense strand
gcacgguuccgaagacaug

SEQ ID NO: 2153270 - RNA, 19 nt, Homo sapiens
  misc_RNA (1)...(19): siRNA sense strand
ucaaguuggugaucuucaa

SEQ ID NO: 2153271 - RNA, 19 nt, Homo sapiens
  misc_RNA (1)...(19): siRNA sense strand
gaacaucauggacaagagu

SEQ ID NO: 2153272 - RNA, 19 nt, Homo sapiens
  misc_RNA (1)...(19): siRNA sense strand
gcacccaccucaacuucca

SEQ ID NO: 2153273 - RNA, 19 nt, Homo sapiens
  misc_RNA (1)...(19): siRNA sense strand
ugaaggugcuccugcagau

SEQ ID NO: 2153274 - RNA, 19 nt, Homo sapiens
  misc_RNA (1)...(19): siRNA sense strand
ucucuacccucuacuggaa

SEQ ID NO: 2153275 - RNA, 19 nt, Homo sapiens
  misc_RNA (1)...(19): siRNA sense strand
gcugcugacugcauucuuc

SEQ ID NO: 2153276 - RNA, 19 nt, Homo sapiens
  misc_RNA (1)...(19): siRNA sense strand
caucaugucccaccucuuc

SEQ ID NO: 2153277 - RNA, 19 nt, Homo sapiens
  misc_RNA (1)...(19): siRNA sense strand
cagagcagccggagaccua

SEQ ID NO: 2153278 - RNA, 19 nt, Homo sapiens
  misc_RNA (1)...(19): siRNA sense strand
gccaaacgguggaggaucu

SEQ ID NO: 2153279 - RNA, 19 nt, Homo sapiens
  misc_RNA (1)...(19): siRNA sense strand
ugcagaagcuggagaugug

SEQ ID NO: 2153280 - RNA, 19 nt, Homo sapiens
  misc_RNA (1)...(19): siRNA sense strand
guucauccauaaguacauu

SEQ ID NO: 2153281 - RNA, 19 nt, Homo sapiens
  misc_RNA (1)...(19): siRNA sense strand
ccucaccggucucaccaaa

SEQ ID NO: 2153282 - RNA, 19 nt, Homo sapiens
  misc_RNA (1)...(19): siRNA sense strand
ggcaagagccgggaacaga

SEQ ID NO: 2153283 - RNA, 19 nt, Homo sapiens
  misc_RNA (1)...(19): siRNA sense strand
agacauggacgucaucuca

SEQ ID NO: 2153284 - RNA, 19 nt, Homo sapiens
  misc_RNA (1)...(19): siRNA sense strand
cggagagcguggaggagua

SEQ ID NO: 2153285 - RNA, 19 nt, Homo sapiens
  misc_RNA (1)...(19): siRNA sense strand
ggacucauccaccgcuuca

SEQ ID NO: 2153286 - RNA, 19 nt, Homo sapiens
  misc_RNA (1)...(19): siRNA sense strand
gcccugaggauccugcaua

SEQ ID NO: 2153287 - RNA, 19 nt, Homo sapiens
  misc_RNA (1)...(19): siRNA sense strand
uccggaaccugccugagua

SEQ ID NO: 2153288 - RNA, 19 nt, Homo sapiens
  misc_RNA (1)...(19): siRNA sense strand
gcuccgaggugcccauuuu

SEQ ID NO: 2153289 - RNA, 19 nt, Homo sapiens
  misc_RNA (1)...(19): siRNA sense strand
ggacgccuccaucaacuuc

SEQ ID NO: 2153290 - RNA, 19 nt, Homo sapiens
  misc_RNA (1)...(19): siRNA sense strand
gcugaaaucccuccuugca

SEQ ID NO: 2153291 - RNA, 19 nt, Homo sapiens
  misc_RNA (1)...(19): siRNA sense strand
gcauguuccuccagauuuu

SEQ ID NO: 2153292 - RNA, 19 nt, Homo sapiens
  misc_RNA (1)...(19): siRNA sense strand
cagccgaaacccugacuuu

SEQ ID NO: 2153293 - RNA, 19 nt, Homo sapiens
  misc_RNA (1)...(19): siRNA sense strand
ggaagugcuccgcucauuc

SEQ ID NO: 2153294 - RNA, 19 nt, Homo sapiens
  misc_RNA (1)...(19): siRNA sense strand
cgcaguaccuggagaugga

SEQ ID NO: 2153295 - RNA, 19 nt, Homo sapiens
  misc_RNA (1)...(19): siRNA sense strand
ggcccgagaucuuugucaa

SEQ ID NO: 2153296 - RNA, 19 nt, Homo sapiens
  misc_RNA (1)...(19): siRNA sense strand
ggcauguuccuccagauuu

SEQ ID NO: 2153297 - RNA, 19 nt, Homo sapiens
  misc_RNA (1)...(19): siRNA sense strand
cagaggcacccaaaccaaa

SEQ ID NO: 2153298 - RNA, 19 nt, Homo sapiens
  misc_RNA (1)...(19): siRNA sense strand
cggcccagcucaugagugu

SEQ ID NO: 2153299 - RNA, 19 nt, Homo sapiens
  misc_RNA (1)...(19): siRNA sense strand
ccggagaccuacuacaagu

SEQ ID NO: 2153300 - RNA, 19 nt, Homo sapiens
  misc_RNA (1)...(19): siRNA sense strand
uggaagugcuccgcucauu

SEQ ID NO: 2153301 - RNA, 19 nt, Homo sapiens
  misc_RNA (1)...(19): siRNA sense strand
aagcagaccaucacugaga

SEQ ID NO: 2153302 - RNA, 19 nt, Homo sapiens
  misc_RNA (1)...(19): siRNA sense strand
ucaggccaaugaaucgaaa

SEQ ID NO: 2153303 - RNA, 19 nt, Homo sapiens
  misc_RNA (1)...(19): siRNA sense strand
ccaucuggcugccuucauc

SEQ ID NO: 2153304 - RNA, 19 nt, Homo sapiens
  misc_RNA (1)...(19): siRNA sense strand
ucauugcucugggcucaaa

SEQ ID NO: 2153305 - RNA, 19 nt, Homo sapiens
  misc_RNA (1)...(19): siRNA sense strand
ccaagguccuccucaacca

SEQ ID NO: 2153306 - RNA, 19 nt, Homo sapiens
  misc_RNA (1)...(19): siRNA sense strand
ugaggauccugcauaugga

SEQ ID NO: 2153307 - RNA, 19 nt, Homo sapiens
  misc_RNA (1)...(19): siRNA sense strand
ugagugacauagacgagau

SEQ ID NO: 2153308 - RNA, 19 nt, Homo sapiens
  misc_RNA (1)...(19): siRNA sense strand
gcacagaggcacccaaacc

SEQ ID NO: 2153309 - RNA, 19 nt, Homo sapiens
  misc_RNA (1)...(19): siRNA sense strand
guuugucgcuggugcuuuc

SEQ ID NO: 2153310 - RNA, 19 nt, Homo sapiens
  misc_RNA (1)...(19): siRNA sense strand
gggcaccaccaucaaguug

SEQ ID NO: 2153311 - RNA, 19 nt, Homo sapiens
  misc_RNA (1)...(19): siRNA sense strand
ucagcaagcucgccccuaa

SEQ ID NO: 2153312 - RNA, 19 nt, Homo sapiens
  misc_RNA (1)...(19): siRNA sense strand
gggcauguacggccagaug

SEQ ID NO: 2153313 - RNA, 19 nt, Homo sapiens
  misc_RNA (1)...(19): siRNA sense strand
ggucagcgucucccuguuc

SEQ ID NO: 2153314 - RNA, 19 nt, Homo sapiens
  misc_RNA (1)...(19): siRNA sense strand
caacagugaccuggugaug

SEQ ID NO: 2153315 - RNA, 19 nt, Homo sapiens
  misc_RNA (1)...(19): siRNA sense strand
ccaaguuccuggccauggu

SEQ ID NO: 2153316 - RNA, 19 nt, Homo sapiens
  misc_RNA (1)...(19): siRNA sense strand
ugcaguucauccauaagua

SEQ ID NO: 2153317 - RNA, 19 nt, Homo sapiens
  misc_RNA (1)...(19): siRNA sense strand
gggcacagcucaggaugcu

SEQ ID NO: 2153318 - RNA, 19 nt, Homo sapiens
  misc_RNA (1)...(19): siRNA sense strand
ucuccucgcucuuccugaa

SEQ ID NO: 2153319 - RNA, 19 nt, Homo sapiens
  misc_RNA (1)...(19): siRNA sense strand
cggcaucgccugggacaaa

SEQ ID NO: 2153320 - RNA, 19 nt, Homo sapiens
  misc_RNA (1)...(19): siRNA sense strand
cagcacagaggcacccaaa

SEQ ID NO: 2153321 - RNA, 19 nt, Homo sapiens
  misc_RNA (1)...(19): siRNA sense strand
gagagugaccgcaacuucu

SEQ ID NO: 2153322 - RNA, 19 nt, Homo sapiens
  misc_RNA (1)...(19): siRNA sense strand
gaagugcuccgcucauucc

SEQ ID NO: 2153323 - RNA, 19 nt, Homo sapiens
  misc_RNA (1)...(19): siRNA sense strand
caagaucaagcccaacauc

SEQ ID NO: 2153324 - RNA, 19 nt, Homo sapiens
  misc_RNA (1)...(19): siRNA sense strand
gaaguccucccgccaucug

SEQ ID NO: 2153325 - RNA, 19 nt, Homo sapiens
  misc_RNA (1)...(19): siRNA sense strand
ugucccaccucuucucgaa

SEQ ID NO: 2153326 - RNA, 19 nt, Homo sapiens
  misc_RNA (1)...(19): siRNA sense strand
cgugcacccugacggauga

SEQ ID NO: 2153327 - RNA, 19 nt, Homo sapiens
  misc_RNA (1)...(19): siRNA sense strand
acaugcagguccucuauac

SEQ ID NO: 2153328 - RNA, 19 nt, Homo sapiens
  misc_RNA (1)...(19): siRNA sense strand
ccaacaucuucgccacuga

SEQ ID NO: 2153329 - RNA, 19 nt, Homo sapiens
  misc_RNA (1)...(19): siRNA sense strand
ucgacaacgucuccaggaa

SEQ ID NO: 2153330 - RNA, 19 nt, Homo sapiens
  misc_RNA (1)...(19): siRNA sense strand
uuugugcaguucauccaua

SEQ ID NO: 2153331 - RNA, 19 nt, Homo sapiens
  misc_RNA (1)...(19): siRNA sense strand
gugcugagcgcucuguugu

SEQ ID NO: 2153332 - RNA, 19 nt, Homo sapiens
  misc_RNA (1)...(19): siRNA sense strand
gcagcaggcaauccacaug

SEQ ID NO: 2153333 - RNA, 19 nt, Homo sapiens
  misc_RNA (1)...(19): siRNA sense strand
ggugcuggacuacuucuug

SEQ ID NO: 2153334 - RNA, 19 nt, Homo sapiens
  misc_RNA (1)...(19): siRNA sense strand
ccgaagacauggacgucau

SEQ ID NO: 2153335 - RNA, 19 nt, Homo sapiens
  misc_RNA (1)...(19): siRNA sense strand
ucauugaggcucuguguag

SEQ ID NO: 2153336 - RNA, 19 nt, Homo sapiens
  misc_RNA (1)...(19): siRNA sense strand
gcaguucauccauaaguac

SEQ ID NO: 2153337 - RNA, 19 nt, Homo sapiens
  misc_RNA (1)...(19): siRNA sense strand
uccgccugcugcugaauua

SEQ ID NO: 2153338 - RNA, 19 nt, Homo sapiens
  misc_RNA (1)...(19): siRNA sense strand
ugcuacgguuugcagauua

SEQ ID NO: 2153339 - RNA, 19 nt, Homo sapiens
  misc_RNA (1)...(19): siRNA sense strand
ugaccaacaacuacuccua

SEQ ID NO: 2153340 - RNA, 19 nt, Homo sapiens
  misc_RNA (1)...(19): siRNA sense strand
ggucgucgccgcauucaac

SEQ ID NO: 2153341 - RNA, 19 nt, Homo sapiens
  misc_RNA (1)...(19): siRNA sense strand
cgagagugaccgcaacuuc

SEQ ID NO: 2153342 - RNA, 19 nt, Homo sapiens
  misc_RNA (1)...(19): siRNA sense strand
caacuggccacccgagagu

SEQ ID NO: 2153343 - RNA, 19 nt, Homo sapiens
  misc_RNA (1)...(19): siRNA sense strand
agaccaagcacgagaucaa

SEQ ID NO: 2153344 - RNA, 19 nt, Homo sapiens
  misc_RNA (1)...(19): siRNA sense strand
gcccggaacccgaacaaca

SEQ ID NO: 2153345 - RNA, 19 nt, Homo sapiens
  misc_RNA (1)...(19): siRNA sense strand
acagugaccuggugaugcu

SEQ ID NO: 2153346 - RNA, 19 nt, Homo sapiens
  misc_RNA (1)...(19): siRNA sense strand
ugcuggagguucugaguga

SEQ ID NO: 2153347 - RNA, 19 nt, Homo sapiens
  misc_RNA (1)...(19): siRNA sense strand
ugaggaagcugcagcaugu

SEQ ID NO: 2153348 - RNA, 19 nt, Homo sapiens
  misc_RNA (1)...(19): siRNA sense strand
ggaagcacaucuaccuaca

SEQ ID NO: 2153349 - RNA, 19 nt, Homo sapiens
  misc_RNA (1)...(19): siRNA sense strand
caugaggccuggagcuuca

SEQ ID NO: 2153350 - RNA, 19 nt, Homo sapiens
  misc_RNA (1)...(19): siRNA sense strand
gccuggagcuucaccuuca

SEQ ID NO: 2153351 - RNA, 19 nt, Homo sapiens
  misc_RNA (1)...(19): siRNA sense strand
gcacagaggccuucuuccu

SEQ ID NO: 2153352 - RNA, 19 nt, Homo sapiens
  misc_RNA (1)...(19): siRNA sense strand
gaagcugagugcccgaaaa

SEQ ID NO: 2153353 - RNA, 19 nt, Homo sapiens
  misc_RNA (1)...(19): siRNA sense strand
ggcauccuguccuucuuga

SEQ ID NO: 2153354 - RNA, 19 nt, Homo sapiens
  misc_RNA (1)...(19): siRNA sense strand
gugcugggccucacacugu

SEQ ID NO: 2153355 - RNA, 19 nt, Homo sapiens
  misc_RNA (1)...(19): siRNA sense strand
ggcuccagcuccacacaga

SEQ ID NO: 2153356 - RNA, 19 nt, Homo sapiens
  misc_RNA (1)...(19): siRNA sense strand
cagaggaagggcugagcua

SEQ ID NO: 2153357 - RNA, 19 nt, Homo sapiens
  misc_RNA (1)...(19): siRNA sense strand
ucaggcucaucgagaggua

SEQ ID NO: 2153358 - RNA, 19 nt, Homo sapiens
  misc_RNA (1)...(19): siRNA sense strand
cagcauguccuggguuuca

SEQ ID NO: 2153359 - RNA, 19 nt, Homo sapiens
  misc_RNA (1)...(19): siRNA sense strand
gggcaugugcugugagagu

SEQ ID NO: 2153360 - RNA, 19 nt, Homo sapiens
  misc_RNA (1)...(19): siRNA sense strand
ggaagcugagugcccgaaa

SEQ ID NO: 2153361 - RNA, 19 nt, Homo sapiens
  misc_RNA (1)...(19): siRNA sense strand
ccgaggacuuccagaccuu

SEQ ID NO: 2153362 - RNA, 19 nt, Homo sapiens
  misc_RNA (1)...(19): siRNA sense strand
ugcagcauguccuggguuu

SEQ ID NO: 2153363 - RNA, 19 nt, Homo sapiens
  misc_RNA (1)...(19): siRNA sense strand
cacacugucugaccuguac

SEQ ID NO: 2153364 - RNA, 19 nt, Homo sapiens
  misc_RNA (1)...(19): siRNA sense strand
cagacggcauccuguccuu

SEQ ID NO: 2153365 - RNA, 19 nt, Homo sapiens
  misc_RNA (1)...(19): siRNA sense strand
gcaugugcugugagaguga

SEQ ID NO: 2153366 - RNA, 19 nt, Homo sapiens
  misc_RNA (1)...(19): siRNA sense strand
ucacacugucugaccugua

SEQ ID NO: 2153367 - RNA, 19 nt, Homo sapiens
  misc_RNA (1)...(19): siRNA sense strand
ugaggaagcugcagcaugu

SEQ ID NO: 2153368 - RNA, 19 nt, Homo sapiens
  misc_RNA (1)...(19): siRNA sense strand
ggaagcacaucuaccuaca

SEQ ID NO: 2153369 - RNA, 19 nt, Homo sapiens
  misc_RNA (1)...(19): siRNA sense strand
caugaggccuggagcuuca

SEQ ID NO: 2153370 - RNA, 19 nt, Homo sapiens
  misc_RNA (1)...(19): siRNA sense strand
gccuggagcuucaccuuca

SEQ ID NO: 2153371 - RNA, 19 nt, Homo sapiens
  misc_RNA (1)...(19): siRNA sense strand
gcacagaggccuucuuccu

SEQ ID NO: 2153372 - RNA, 19 nt, Homo sapiens
  misc_RNA (1)...(19): siRNA sense strand
gaagcugagugcccgaaaa

SEQ ID NO: 2153373 - RNA, 19 nt, Homo sapiens
  misc_RNA (1)...(19): siRNA sense strand
ggcauccuguccuucuuga

SEQ ID NO: 2153374 - RNA, 19 nt, Homo sapiens
  misc_RNA (1)...(19): siRNA sense strand
gugcugggccucacacugu

SEQ ID NO: 2153375 - RNA, 19 nt, Homo sapiens
  misc_RNA (1)...(19): siRNA sense strand
ggcuccagcuccacacaga

SEQ ID NO: 2153376 - RNA, 19 nt, Homo sapiens
  misc_RNA (1)...(19): siRNA sense strand
cagaggaagggcugagcua

SEQ ID NO: 2153377 - RNA, 19 nt, Homo sapiens
  misc_RNA (1)...(19): siRNA sense strand
ucaggcucaucgagaggua

SEQ ID NO: 2153378 - RNA, 19 nt, Homo sapiens
  misc_RNA (1)...(19): siRNA sense strand
cagcauguccuggguuuca

SEQ ID NO: 2153379 - RNA, 19 nt, Homo sapiens
  misc_RNA (1)...(19): siRNA sense strand
gggcaugugcugugagagu

SEQ ID NO: 2153380 - RNA, 19 nt, Homo sapiens
  misc_RNA (1)...(19): siRNA sense strand
ggaagcugagugcccgaaa

SEQ ID NO: 2153381 - RNA, 19 nt, Homo sapiens
  misc_RNA (1)...(19): siRNA sense strand
ccgaggacuuccagaccuu

SEQ ID NO: 2153382 - RNA, 19 nt, Homo sapiens
  misc_RNA (1)...(19): siRNA sense strand
ugcagcauguccuggguuu

SEQ ID NO: 2153383 - RNA, 19 nt, Homo sapiens
  misc_RNA (1)...(19): siRNA sense strand
cacacugucugaccuguac

SEQ ID NO: 2153384 - RNA, 19 nt, Homo sapiens
  misc_RNA (1)...(19): siRNA sense strand
cagacggcauccuguccuu

SEQ ID NO: 2153385 - RNA, 19 nt, Homo sapiens
  misc_RNA (1)...(19): siRNA sense strand
gcaugugcugugagaguga

SEQ ID NO: 2153386 - RNA, 19 nt, Homo sapiens
  misc_RNA (1)...(19): siRNA sense strand
ucacacugucugaccugua

SEQ ID NO: 2153387 - RNA, 19 nt, Homo sapiens
  misc_RNA (1)...(19): siRNA sense strand
gcagguacuugacuccuua

SEQ ID NO: 2153388 - RNA, 19 nt, Homo sapiens
  misc_RNA (1)...(19): siRNA sense strand
gaagaaagacuuggaguug

SEQ ID NO: 2153389 - RNA, 19 nt, Homo sapiens
  misc_RNA (1)...(19): siRNA sense strand
ucagucagcuaaagauuaa

SEQ ID NO: 2153390 - RNA, 19 nt, Homo sapiens
  misc_RNA (1)...(19): siRNA sense strand
gcaagucucugcugacauc

SEQ ID NO: 2153391 - RNA, 19 nt, Homo sapiens
  misc_RNA (1)...(19): siRNA sense strand
cagagaagguaaacacaaa

SEQ ID NO: 2153392 - RNA, 19 nt, Homo sapiens
  misc_RNA (1)...(19): siRNA sense strand
gggcggagauggaagagaa

SEQ ID NO: 2153393 - RNA, 19 nt, Homo sapiens
  misc_RNA (1)...(19): siRNA sense strand
gggaagagcggccacagua

SEQ ID NO: 2153394 - RNA, 19 nt, Homo sapiens
  misc_RNA (1)...(19): siRNA sense strand
gaaccagacuugggaugaa

SEQ ID NO: 2153395 - RNA, 19 nt, Homo sapiens
  misc_RNA (1)...(19): siRNA sense strand
gcacagaguucgaguacac

SEQ ID NO: 2153396 - RNA, 19 nt, Homo sapiens
  misc_RNA (1)...(19): siRNA sense strand
gaagugagcagcuacucuu

SEQ ID NO: 2153397 - RNA, 19 nt, Homo sapiens
  misc_RNA (1)...(19): siRNA sense strand
ggcaagcucugaccaguuc

SEQ ID NO: 2153398 - RNA, 19 nt, Homo sapiens
  misc_RNA (1)...(19): siRNA sense strand
ugcagagccuuauaaagua

SEQ ID NO: 2153399 - RNA, 19 nt, Homo sapiens
  misc_RNA (1)...(19): siRNA sense strand
gccaagagccgacccaaga

SEQ ID NO: 2153400 - RNA, 19 nt, Homo sapiens
  misc_RNA (1)...(19): siRNA sense strand
aggagaagcugcucagaga

SEQ ID NO: 2153401 - RNA, 19 nt, Homo sapiens
  misc_RNA (1)...(19): siRNA sense strand
gagcggauguaugccauga

SEQ ID NO: 2153402 - RNA, 19 nt, Homo sapiens
  misc_RNA (1)...(19): siRNA sense strand
ggacucagaggaagacgaa

SEQ ID NO: 2153403 - RNA, 19 nt, Homo sapiens
  misc_RNA (1)...(19): siRNA sense strand
ggaaucguuugaccaagau

SEQ ID NO: 2153404 - RNA, 19 nt, Homo sapiens
  misc_RNA (1)...(19): siRNA sense strand
ggaggaaucguuugaccaa

SEQ ID NO: 2153405 - RNA, 19 nt, Homo sapiens
  misc_RNA (1)...(19): siRNA sense strand
agaauguggucgagaagaa

SEQ ID NO: 2153406 - RNA, 19 nt, Homo sapiens
  misc_RNA (1)...(19): siRNA sense strand
gagcugaagcccaacaaga

SEQ ID NO: 2153407 - RNA, 19 nt, Homo sapiens
  misc_RNA (1)...(19): siRNA sense strand
agaaagacuuggaguugga

SEQ ID NO: 2153408 - RNA, 19 nt, Homo sapiens
  misc_RNA (1)...(19): siRNA sense strand
gaagaagaagaaagggaaa

SEQ ID NO: 2153409 - RNA, 19 nt, Homo sapiens
  misc_RNA (1)...(19): siRNA sense strand
gagcagcuacucuuacaau

SEQ ID NO: 2153410 - RNA, 19 nt, Homo sapiens
  misc_RNA (1)...(19): siRNA sense strand
ggucugaggaggaacauga

SEQ ID NO: 2153411 - RNA, 19 nt, Homo sapiens
  misc_RNA (1)...(19): siRNA sense strand
gagaagcugcucagagaga

SEQ ID NO: 2153412 - RNA, 19 nt, Homo sapiens
  misc_RNA (1)...(19): siRNA sense strand
cauccuaccuccaccugaa

SEQ ID NO: 2153413 - RNA, 19 nt, Homo sapiens
  misc_RNA (1)...(19): siRNA sense strand
gagaggaggagccaagaga

SEQ ID NO: 2153414 - RNA, 19 nt, Homo sapiens
  misc_RNA (1)...(19): siRNA sense strand
ucaccaagcaggacaaguu

SEQ ID NO: 2153415 - RNA, 19 nt, Homo sapiens
  misc_RNA (1)...(19): siRNA sense strand
gcccugagcauaaauggaa

SEQ ID NO: 2153416 - RNA, 19 nt, Homo sapiens
  misc_RNA (1)...(19): siRNA sense strand
guagcaugguggcaaagaa

SEQ ID NO: 2153417 - RNA, 19 nt, Homo sapiens
  misc_RNA (1)...(19): siRNA sense strand
ccgagaauguggucgagaa

SEQ ID NO: 2153418 - RNA, 19 nt, Homo sapiens
  misc_RNA (1)...(19): siRNA sense strand
gcagagccuuauaaaguac

SEQ ID NO: 2153419 - RNA, 19 nt, Homo sapiens
  misc_RNA (1)...(19): siRNA sense strand
gagcagaugaggacugugu

SEQ ID NO: 2153420 - RNA, 19 nt, Homo sapiens
  misc_RNA (1)...(19): siRNA sense strand
gagcagggauaagaaagag

SEQ ID NO: 2153421 - RNA, 19 nt, Homo sapiens
  misc_RNA (1)...(19): siRNA sense strand
agaggaagacgaagaauuc

SEQ ID NO: 2153422 - RNA, 19 nt, Homo sapiens
  misc_RNA (1)...(19): siRNA sense strand
gugagcagcuacucuuaca

SEQ ID NO: 2153423 - RNA, 19 nt, Homo sapiens
  misc_RNA (1)...(19): siRNA sense strand
ggaaccagacuugggauga

SEQ ID NO: 2153424 - RNA, 19 nt, Homo sapiens
  misc_RNA (1)...(19): siRNA sense strand
ggagcagggauaagaaaga

SEQ ID NO: 2153425 - RNA, 19 nt, Homo sapiens
  misc_RNA (1)...(19): siRNA sense strand
gaaauccuccagagaaggu

SEQ ID NO: 2153426 - RNA, 19 nt, Homo sapiens
  misc_RNA (1)...(19): siRNA sense strand
gcggauguaugccaugaag

SEQ ID NO: 2153427 - RNA, 19 nt, Homo sapiens
  misc_RNA (1)...(19): siRNA sense strand
ccacagacgaggacucuuc

SEQ ID NO: 2153428 - RNA, 19 nt, Homo sapiens
  misc_RNA (1)...(19): siRNA sense strand
gaaggaggagcggauguau

SEQ ID NO: 2153429 - RNA, 19 nt, Homo sapiens
  misc_RNA (1)...(19): siRNA sense strand
gaauguggucgagaagaaa

SEQ ID NO: 2153430 - RNA, 19 nt, Homo sapiens
  misc_RNA (1)...(19): siRNA sense strand
cagcgacucuucggaggaa

SEQ ID NO: 2153431 - RNA, 19 nt, Homo sapiens
  misc_RNA (1)...(19): siRNA sense strand
cagcuaaagauuaagaaga

SEQ ID NO: 2153432 - RNA, 19 nt, Homo sapiens
  misc_RNA (1)...(19): siRNA sense strand
gauaagaaagagacacaag

SEQ ID NO: 2153433 - RNA, 19 nt, Homo sapiens
  misc_RNA (1)...(19): siRNA sense strand
ggaccgggaucaggagaag

SEQ ID NO: 2153434 - RNA, 19 nt, Homo sapiens
  misc_RNA (1)...(19): siRNA sense strand
aggaaucguuugaccaaga

SEQ ID NO: 2153435 - RNA, 19 nt, Homo sapiens
  misc_RNA (1)...(19): siRNA sense strand
cagaggaagacgaagaauu

SEQ ID NO: 2153436 - RNA, 19 nt, Homo sapiens
  misc_RNA (1)...(19): siRNA sense strand
ccaagcaggacaaguugaa

SEQ ID NO: 2153437 - RNA, 19 nt, Homo sapiens
  misc_RNA (1)...(19): siRNA sense strand
gagcugggagcagggauaa

SEQ ID NO: 2153438 - RNA, 19 nt, Homo sapiens
  misc_RNA (1)...(19): siRNA sense strand
ggauguaugccaugaaguc

SEQ ID NO: 2153439 - RNA, 19 nt, Homo sapiens
  misc_RNA (1)...(19): siRNA sense strand
ccgagagccuugucuugga

SEQ ID NO: 2153440 - RNA, 19 nt, Homo sapiens
  misc_RNA (1)...(19): siRNA sense strand
gaggaggagccaagagaug

SEQ ID NO: 2153441 - RNA, 19 nt, Homo sapiens
  misc_RNA (1)...(19): siRNA sense strand
ccagagaagguaaacacaa

SEQ ID NO: 2153442 - RNA, 19 nt, Homo sapiens
  misc_RNA (1)...(19): siRNA sense strand
gccaugcagagccuuauaa

SEQ ID NO: 2153443 - RNA, 19 nt, Homo sapiens
  misc_RNA (1)...(19): siRNA sense strand
gcaggaagcagccguuuug

SEQ ID NO: 2153444 - RNA, 19 nt, Homo sapiens
  misc_RNA (1)...(19): siRNA sense strand
caauacggacucagaggaa

SEQ ID NO: 2153445 - RNA, 19 nt, Homo sapiens
  misc_RNA (1)...(19): siRNA sense strand
agacuugggaugaacauga

SEQ ID NO: 2153446 - RNA, 19 nt, Homo sapiens
  misc_RNA (1)...(19): siRNA sense strand
augcagagccuuauaaagu

SEQ ID NO: 2153447 - RNA, 19 nt, Homo sapiens
  misc_RNA (1)...(19): siRNA sense strand
cgagagcgccaaagcuuuc

SEQ ID NO: 2153448 - RNA, 19 nt, Homo sapiens
  misc_RNA (1)...(19): siRNA sense strand
cagcuacucuuacaauacg

SEQ ID NO: 2153449 - RNA, 19 nt, Homo sapiens
  misc_RNA (1)...(19): siRNA sense strand
gcagcuacucuuacaauac

SEQ ID NO: 2153450 - RNA, 19 nt, Homo sapiens
  misc_RNA (1)...(19): siRNA sense strand
gcugggagcagggauaaga

SEQ ID NO: 2153451 - RNA, 19 nt, Homo sapiens
  misc_RNA (1)...(19): siRNA sense strand
gagcccaggccuuggagaa

SEQ ID NO: 2153452 - RNA, 19 nt, Homo sapiens
  misc_RNA (1)...(19): siRNA sense strand
ccuaccagcugugcuccua

SEQ ID NO: 2153453 - RNA, 19 nt, Homo sapiens
  misc_RNA (1)...(19): siRNA sense strand
ccucggaagugagcagcua

SEQ ID NO: 2153454 - RNA, 19 nt, Homo sapiens
  misc_RNA (1)...(19): siRNA sense strand
ggcagguacuugacuccuu

SEQ ID NO: 2153455 - RNA, 19 nt, Homo sapiens
  misc_RNA (1)...(19): siRNA sense strand
ggaagagcggccacaguag

SEQ ID NO: 2153456 - RNA, 19 nt, Homo sapiens
  misc_RNA (1)...(19): siRNA sense strand
aggccaaggucauccagaa

SEQ ID NO: 2153457 - RNA, 19 nt, Homo sapiens
  misc_RNA (1)...(19): siRNA sense strand
gaucaccuuccucacuuug

SEQ ID NO: 2153458 - RNA, 19 nt, Homo sapiens
  misc_RNA (1)...(19): siRNA sense strand
ccaagagccgacccaagaa

SEQ ID NO: 2153459 - RNA, 19 nt, Homo sapiens
  misc_RNA (1)...(19): siRNA sense strand
ugaagcccaacaagaagua

SEQ ID NO: 2153460 - RNA, 19 nt, Homo sapiens
  misc_RNA (1)...(19): siRNA sense strand
agaagaaagacuuggaguu

SEQ ID NO: 2153461 - RNA, 19 nt, Homo sapiens
  misc_RNA (1)...(19): siRNA sense strand
ggaaggaccccaggaagaa

SEQ ID NO: 2153462 - RNA, 19 nt, Homo sapiens
  misc_RNA (1)...(19): siRNA sense strand
gaagaagaaagggaaagag

SEQ ID NO: 2153463 - RNA, 19 nt, Homo sapiens
  misc_RNA (1)...(19): siRNA sense strand
gagaauguggucgagaaga

SEQ ID NO: 2153464 - RNA, 19 nt, Homo sapiens
  misc_RNA (1)...(19): siRNA sense strand
ccaccaaggccaccaagca

SEQ ID NO: 2153465 - RNA, 19 nt, Homo sapiens
  misc_RNA (1)...(19): siRNA sense strand
ccaugcagagccuuauaaa

SEQ ID NO: 2153466 - RNA, 19 nt, Homo sapiens
  misc_RNA (1)...(19): siRNA sense strand
ccaggaagaagaagaaagg

SEQ ID NO: 2153467 - RNA, 19 nt, Homo sapiens
  misc_RNA (1)...(19): siRNA sense strand
gggauaagaaagagacaca

SEQ ID NO: 2153468 - RNA, 19 nt, Homo sapiens
  misc_RNA (1)...(19): siRNA sense strand
ggcaucacccugcuaagug

SEQ ID NO: 2153469 - RNA, 19 nt, Homo sapiens
  misc_RNA (1)...(19): siRNA sense strand
aggcagagguggaggacau

SEQ ID NO: 2153470 - RNA, 19 nt, Homo sapiens
  misc_RNA (1)...(19): siRNA sense strand
ccugguggcuguggcaaga

SEQ ID NO: 2153471 - RNA, 19 nt, Homo sapiens
  misc_RNA (1)...(19): siRNA sense strand
ugaucaccuuccucacuuu

SEQ ID NO: 2153472 - RNA, 19 nt, Homo sapiens
  misc_RNA (1)...(19): siRNA sense strand
cccgucagccuaccaguuu

SEQ ID NO: 2153473 - RNA, 19 nt, Homo sapiens
  misc_RNA (1)...(19): siRNA sense strand
gaccaggagcgcucucugu

SEQ ID NO: 2153474 - RNA, 19 nt, Homo sapiens
  misc_RNA (1)...(19): siRNA sense strand
ggccaugcagagccuuaua

SEQ ID NO: 2153475 - RNA, 19 nt, Homo sapiens
  misc_RNA (1)...(19): siRNA sense strand
gggcacagaguucgaguac

SEQ ID NO: 2153476 - RNA, 19 nt, Homo sapiens
  misc_RNA (1)...(19): siRNA sense strand
ggaagcagccguuuugucu

SEQ ID NO: 2153477 - RNA, 19 nt, Homo sapiens
  misc_RNA (1)...(19): siRNA sense strand
cgccuucccuccuguguag

SEQ ID NO: 2153478 - RNA, 19 nt, Homo sapiens
  misc_RNA (1)...(19): siRNA sense strand
agacgaagaauuccugaag

SEQ ID NO: 2153479 - RNA, 19 nt, Homo sapiens
  misc_RNA (1)...(19): siRNA sense strand
agcagcuacucuuacaaua

SEQ ID NO: 2153480 - RNA, 19 nt, Homo sapiens
  misc_RNA (1)...(19): siRNA sense strand
ggaagugagcagcuacucu

SEQ ID NO: 2153481 - RNA, 19 nt, Homo sapiens
  misc_RNA (1)...(19): siRNA sense strand
gcuaaagauuaagaagaag

SEQ ID NO: 2153482 - RNA, 19 nt, Homo sapiens
  misc_RNA (1)...(19): siRNA sense strand
caucagucagcuaaagauu

SEQ ID NO: 2153483 - RNA, 19 nt, Homo sapiens
  misc_RNA (1)...(19): siRNA sense strand
agaaggaggagcggaugua

SEQ ID NO: 2153484 - RNA, 19 nt, Homo sapiens
  misc_RNA (1)...(19): siRNA sense strand
ggagguuugggcaccauga

SEQ ID NO: 2153485 - RNA, 19 nt, Homo sapiens
  misc_RNA (1)...(19): siRNA sense strand
cauggcaucacccugcuaa

SEQ ID NO: 2153486 - RNA, 19 nt, Homo sapiens
  misc_RNA (1)...(19): siRNA sense strand
gugcaaaggacaggaagga

SEQ ID NO: 2153487 - RNA, 19 nt, Homo sapiens
  misc_RNA (1)...(19): siRNA sense strand
gcagguacuugacuccuua

SEQ ID NO: 2153488 - RNA, 19 nt, Homo sapiens
  misc_RNA (1)...(19): siRNA sense strand
gaagaaagacuuggaguug

SEQ ID NO: 2153489 - RNA, 19 nt, Homo sapiens
  misc_RNA (1)...(19): siRNA sense strand
ucagucagcuaaagauuaa

SEQ ID NO: 2153490 - RNA, 19 nt, Homo sapiens
  misc_RNA (1)...(19): siRNA sense strand
gcaagucucugcugacauc

SEQ ID NO: 2153491 - RNA, 19 nt, Homo sapiens
  misc_RNA (1)...(19): siRNA sense strand
cagagaagguaaacacaaa

SEQ ID NO: 2153492 - RNA, 19 nt, Homo sapiens
  misc_RNA (1)...(19): siRNA sense strand
gggcggagauggaagagaa

SEQ ID NO: 2153493 - RNA, 19 nt, Homo sapiens
  misc_RNA (1)...(19): siRNA sense strand
gggaagagcggccacagua

SEQ ID NO: 2153494 - RNA, 19 nt, Homo sapiens
  misc_RNA (1)...(19): siRNA sense strand
gaaccagacuugggaugaa

SEQ ID NO: 2153495 - RNA, 19 nt, Homo sapiens
  misc_RNA (1)...(19): siRNA sense strand
gcacagaguucgaguacac

SEQ ID NO: 2153496 - RNA, 19 nt, Homo sapiens
  misc_RNA (1)...(19): siRNA sense strand
gaagugagcagcuacucuu

SEQ ID NO: 2153497 - RNA, 19 nt, Homo sapiens
  misc_RNA (1)...(19): siRNA sense strand
ggcaagcucugaccaguuc

SEQ ID NO: 2153498 - RNA, 19 nt, Homo sapiens
  misc_RNA (1)...(19): siRNA sense strand
ugcagagccuuauaaagua

SEQ ID NO: 2153499 - RNA, 19 nt, Homo sapiens
  misc_RNA (1)...(19): siRNA sense strand
gccaagagccgacccaaga

SEQ ID NO: 2153500 - RNA, 19 nt, Homo sapiens
  misc_RNA (1)...(19): siRNA sense strand
aggagaagcugcucagaga

SEQ ID NO: 2153501 - RNA, 19 nt, Homo sapiens
  misc_RNA (1)...(19): siRNA sense strand
gagcggauguaugccauga

SEQ ID NO: 2153502 - RNA, 19 nt, Homo sapiens
  misc_RNA (1)...(19): siRNA sense strand
ggacucagaggaagacgaa

SEQ ID NO: 2153503 - RNA, 19 nt, Homo sapiens
  misc_RNA (1)...(19): siRNA sense strand
ggaaucguuugaccaagau

SEQ ID NO: 2153504 - RNA, 19 nt, Homo sapiens
  misc_RNA (1)...(19): siRNA sense strand
ggaggaaucguuugaccaa

SEQ ID NO: 2153505 - RNA, 19 nt, Homo sapiens
  misc_RNA (1)...(19): siRNA sense strand
agaauguggucgagaagaa

SEQ ID NO: 2153506 - RNA, 19 nt, Homo sapiens
  misc_RNA (1)...(19): siRNA sense strand
gagcugaagcccaacaaga

SEQ ID NO: 2153507 - RNA, 19 nt, Homo sapiens
  misc_RNA (1)...(19): siRNA sense strand
agaaagacuuggaguugga

SEQ ID NO: 2153508 - RNA, 19 nt, Homo sapiens
  misc_RNA (1)...(19): siRNA sense strand
gaagaagaagaaagggaaa

SEQ ID NO: 2153509 - RNA, 19 nt, Homo sapiens
  misc_RNA (1)...(19): siRNA sense strand
gagcagcuacucuuacaau

SEQ ID NO: 2153510 - RNA, 19 nt, Homo sapiens
  misc_RNA (1)...(19): siRNA sense strand
ggucugaggaggaacauga

SEQ ID NO: 2153511 - RNA, 19 nt, Homo sapiens
  misc_RNA (1)...(19): siRNA sense strand
gagaagcugcucagagaga

SEQ ID NO: 2153512 - RNA, 19 nt, Homo sapiens
  misc_RNA (1)...(19): siRNA sense strand
cauccuaccuccaccugaa

SEQ ID NO: 2153513 - RNA, 19 nt, Homo sapiens
  misc_RNA (1)...(19): siRNA sense strand
gagaggaggagccaagaga

SEQ ID NO: 2153514 - RNA, 19 nt, Homo sapiens
  misc_RNA (1)...(19): siRNA sense strand
ucaccaagcaggacaaguu

SEQ ID NO: 2153515 - RNA, 19 nt, Homo sapiens
  misc_RNA (1)...(19): siRNA sense strand
gcccugagcauaaauggaa

SEQ ID NO: 2153516 - RNA, 19 nt, Homo sapiens
  misc_RNA (1)...(19): siRNA sense strand
guagcaugguggcaaagaa

SEQ ID NO: 2153517 - RNA, 19 nt, Homo sapiens
  misc_RNA (1)...(19): siRNA sense strand
ccgagaauguggucgagaa

SEQ ID NO: 2153518 - RNA, 19 nt, Homo sapiens
  misc_RNA (1)...(19): siRNA sense strand
gcagagccuuauaaaguac

SEQ ID NO: 2153519 - RNA, 19 nt, Homo sapiens
  misc_RNA (1)...(19): siRNA sense strand
gagcagaugaggacugugu

SEQ ID NO: 2153520 - RNA, 19 nt, Homo sapiens
  misc_RNA (1)...(19): siRNA sense strand
gagcagggauaagaaagag

SEQ ID NO: 2153521 - RNA, 19 nt, Homo sapiens
  misc_RNA (1)...(19): siRNA sense strand
agaggaagacgaagaauuc

SEQ ID NO: 2153522 - RNA, 19 nt, Homo sapiens
  misc_RNA (1)...(19): siRNA sense strand
gugagcagcuacucuuaca

SEQ ID NO: 2153523 - RNA, 19 nt, Homo sapiens
  misc_RNA (1)...(19): siRNA sense strand
ggaaccagacuugggauga

SEQ ID NO: 2153524 - RNA, 19 nt, Homo sapiens
  misc_RNA (1)...(19): siRNA sense strand
ggagcagggauaagaaaga

SEQ ID NO: 2153525 - RNA, 19 nt, Homo sapiens
  misc_RNA (1)...(19): siRNA sense strand
gaaauccuccagagaaggu

SEQ ID NO: 2153526 - RNA, 19 nt, Homo sapiens
  misc_RNA (1)...(19): siRNA sense strand
gcggauguaugccaugaag

SEQ ID NO: 2153527 - RNA, 19 nt, Homo sapiens
  misc_RNA (1)...(19): siRNA sense strand
ccacagacgaggacucuuc

SEQ ID NO: 2153528 - RNA, 19 nt, Homo sapiens
  misc_RNA (1)...(19): siRNA sense strand
gaaggaggagcggauguau

SEQ ID NO: 2153529 - RNA, 19 nt, Homo sapiens
  misc_RNA (1)...(19): siRNA sense strand
gaauguggucgagaagaaa

SEQ ID NO: 2153530 - RNA, 19 nt, Homo sapiens
  misc_RNA (1)...(19): siRNA sense strand
cagcgacucuucggaggaa

SEQ ID NO: 2153531 - RNA, 19 nt, Homo sapiens
  misc_RNA (1)...(19): siRNA sense strand
cagcuaaagauuaagaaga

SEQ ID NO: 2153532 - RNA, 19 nt, Homo sapiens
  misc_RNA (1)...(19): siRNA sense strand
gauaagaaagagacacaag

SEQ ID NO: 2153533 - RNA, 19 nt, Homo sapiens
  misc_RNA (1)...(19): siRNA sense strand
ggaccgggaucaggagaag

SEQ ID NO: 2153534 - RNA, 19 nt, Homo sapiens
  misc_RNA (1)...(19): siRNA sense strand
aggaaucguuugaccaaga

SEQ ID NO: 2153535 - RNA, 19 nt, Homo sapiens
  misc_RNA (1)...(19): siRNA sense strand
cagaggaagacgaagaauu

SEQ ID NO: 2153536 - RNA, 19 nt, Homo sapiens
  misc_RNA (1)...(19): siRNA sense strand
ccaagcaggacaaguugaa

SEQ ID NO: 2153537 - RNA, 19 nt, Homo sapiens
  misc_RNA (1)...(19): siRNA sense strand
gagcugggagcagggauaa

SEQ ID NO: 2153538 - RNA, 19 nt, Homo sapiens
  misc_RNA (1)...(19): siRNA sense strand
ggauguaugccaugaaguc

SEQ ID NO: 2153539 - RNA, 19 nt, Homo sapiens
  misc_RNA (1)...(19): siRNA sense strand
ccgagagccuugucuugga

SEQ ID NO: 2153540 - RNA, 19 nt, Homo sapiens
  misc_RNA (1)...(19): siRNA sense strand
gaggaggagccaagagaug

SEQ ID NO: 2153541 - RNA, 19 nt, Homo sapiens
  misc_RNA (1)...(19): siRNA sense strand
ccagagaagguaaacacaa

SEQ ID NO: 2153542 - RNA, 19 nt, Homo sapiens
  misc_RNA (1)...(19): siRNA sense strand
gccaugcagagccuuauaa

SEQ ID NO: 2153543 - RNA, 19 nt, Homo sapiens
  misc_RNA (1)...(19): siRNA sense strand
gcaggaagcagccguuuug

SEQ ID NO: 2153544 - RNA, 19 nt, Homo sapiens
  misc_RNA (1)...(19): siRNA sense strand
caauacggacucagaggaa

SEQ ID NO: 2153545 - RNA, 19 nt, Homo sapiens
  misc_RNA (1)...(19): siRNA sense strand
agacuugggaugaacauga

SEQ ID NO: 2153546 - RNA, 19 nt, Homo sapiens
  misc_RNA (1)...(19): siRNA sense strand
augcagagccuuauaaagu

SEQ ID NO: 2153547 - RNA, 19 nt, Homo sapiens
  misc_RNA (1)...(19): siRNA sense strand
cgagagcgccaaagcuuuc

SEQ ID NO: 2153548 - RNA, 19 nt, Homo sapiens
  misc_RNA (1)...(19): siRNA sense strand
cagcuacucuuacaauacg

SEQ ID NO: 2153549 - RNA, 19 nt, Homo sapiens
  misc_RNA (1)...(19): siRNA sense strand
gcagcuacucuuacaauac

SEQ ID NO: 2153550 - RNA, 19 nt, Homo sapiens
  misc_RNA (1)...(19): siRNA sense strand
gcugggagcagggauaaga

SEQ ID NO: 2153551 - RNA, 19 nt, Homo sapiens
  misc_RNA (1)...(19): siRNA sense strand
gagcccaggccuuggagaa

SEQ ID NO: 2153552 - RNA, 19 nt, Homo sapiens
  misc_RNA (1)...(19): siRNA sense strand
ccuaccagcugugcuccua

SEQ ID NO: 2153553 - RNA, 19 nt, Homo sapiens
  misc_RNA (1)...(19): siRNA sense strand
ccucggaagugagcagcua

SEQ ID NO: 2153554 - RNA, 19 nt, Homo sapiens
  misc_RNA (1)...(19): siRNA sense strand
ggcagguacuugacuccuu

SEQ ID NO: 2153555 - RNA, 19 nt, Homo sapiens
  misc_RNA (1)...(19): siRNA sense strand
ggaagagcggccacaguag

SEQ ID NO: 2153556 - RNA, 19 nt, Homo sapiens
  misc_RNA (1)...(19): siRNA sense strand
aggccaaggucauccagaa

SEQ ID NO: 2153557 - RNA, 19 nt, Homo sapiens
  misc_RNA (1)...(19): siRNA sense strand
gaucaccuuccucacuuug

SEQ ID NO: 2153558 - RNA, 19 nt, Homo sapiens
  misc_RNA (1)...(19): siRNA sense strand
ccaagagccgacccaagaa

SEQ ID NO: 2153559 - RNA, 19 nt, Homo sapiens
  misc_RNA (1)...(19): siRNA sense strand
ugaagcccaacaagaagua

SEQ ID NO: 2153560 - RNA, 19 nt, Homo sapiens
  misc_RNA (1)...(19): siRNA sense strand
agaagaaagacuuggaguu

SEQ ID NO: 2153561 - RNA, 19 nt, Homo sapiens
  misc_RNA (1)...(19): siRNA sense strand
ggaaggaccccaggaagaa

SEQ ID NO: 2153562 - RNA, 19 nt, Homo sapiens
  misc_RNA (1)...(19): siRNA sense strand
gaagaagaaagggaaagag

SEQ ID NO: 2153563 - RNA, 19 nt, Homo sapiens
  misc_RNA (1)...(19): siRNA sense strand
gagaauguggucgagaaga

SEQ ID NO: 2153564 - RNA, 19 nt, Homo sapiens
  misc_RNA (1)...(19): siRNA sense strand
ccaccaaggccaccaagca

SEQ ID NO: 2153565 - RNA, 19 nt, Homo sapiens
  misc_RNA (1)...(19): siRNA sense strand
ccaugcagagccuuauaaa

SEQ ID NO: 2153566 - RNA, 19 nt, Homo sapiens
  misc_RNA (1)...(19): siRNA sense strand
ccaggaagaagaagaaagg

SEQ ID NO: 2153567 - RNA, 19 nt, Homo sapiens
  misc_RNA (1)...(19): siRNA sense strand
gggauaagaaagagacaca

SEQ ID NO: 2153568 - RNA, 19 nt, Homo sapiens
  misc_RNA (1)...(19): siRNA sense strand
ggcaucacccugcuaagug

SEQ ID NO: 2153569 - RNA, 19 nt, Homo sapiens
  misc_RNA (1)...(19): siRNA sense strand
aggcagagguggaggacau

SEQ ID NO: 2153570 - RNA, 19 nt, Homo sapiens
  misc_RNA (1)...(19): siRNA sense strand
ccugguggcuguggcaaga

SEQ ID NO: 2153571 - RNA, 19 nt, Homo sapiens
  misc_RNA (1)...(19): siRNA sense strand
ugaucaccuuccucacuuu

SEQ ID NO: 2153572 - RNA, 19 nt, Homo sapiens
  misc_RNA (1)...(19): siRNA sense strand
cccgucagccuaccaguuu

SEQ ID NO: 2153573 - RNA, 19 nt, Homo sapiens
  misc_RNA (1)...(19): siRNA sense strand
gaccaggagcgcucucugu

SEQ ID NO: 2153574 - RNA, 19 nt, Homo sapiens
  misc_RNA (1)...(19): siRNA sense strand
ggccaugcagagccuuaua

SEQ ID NO: 2153575 - RNA, 19 nt, Homo sapiens
  misc_RNA (1)...(19): siRNA sense strand
gggcacagaguucgaguac

SEQ ID NO: 2153576 - RNA, 19 nt, Homo sapiens
  misc_RNA (1)...(19): siRNA sense strand
ggaagcagccguuuugucu

SEQ ID NO: 2153577 - RNA, 19 nt, Homo sapiens
  misc_RNA (1)...(19): siRNA sense strand
cgccuucccuccuguguag

SEQ ID NO: 2153578 - RNA, 19 nt, Homo sapiens
  misc_RNA (1)...(19): siRNA sense strand
agacgaagaauuccugaag

SEQ ID NO: 2153579 - RNA, 19 nt, Homo sapiens
  misc_RNA (1)...(19): siRNA sense strand
agcagcuacucuuacaaua

SEQ ID NO: 2153580 - RNA, 19 nt, Homo sapiens
  misc_RNA (1)...(19): siRNA sense strand
ggaagugagcagcuacucu

SEQ ID NO: 2153581 - RNA, 19 nt, Homo sapiens
  misc_RNA (1)...(19): siRNA sense strand
gcuaaagauuaagaagaag

SEQ ID NO: 2153582 - RNA, 19 nt, Homo sapiens
  misc_RNA (1)...(19): siRNA sense strand
caucagucagcuaaagauu

SEQ ID NO: 2153583 - RNA, 19 nt, Homo sapiens
  misc_RNA (1)...(19): siRNA sense strand
agaaggaggagcggaugua

SEQ ID NO: 2153584 - RNA, 19 nt, Homo sapiens
  misc_RNA (1)...(19): siRNA sense strand
ggagguuugggcaccauga

SEQ ID NO: 2153585 - RNA, 19 nt, Homo sapiens
  misc_RNA (1)...(19): siRNA sense strand
cauggcaucacccugcuaa

SEQ ID NO: 2153586 - RNA, 19 nt, Homo sapiens
  misc_RNA (1)...(19): siRNA sense strand
gugcaaaggacaggaagga

SEQ ID NO: 2153587 - RNA, 19 nt, Homo sapiens
  misc_RNA (1)...(19): siRNA sense strand
ggaaacagcccucaaccaa

SEQ ID NO: 2153588 - RNA, 19 nt, Homo sapiens
  misc_RNA (1)...(19): siRNA sense strand
gaaacagcccucaaccaaa

SEQ ID NO: 2153589 - RNA, 19 nt, Homo sapiens
  misc_RNA (1)...(19): siRNA sense strand
aaacagcccucaaccaaaa

SEQ ID NO: 2153590 - RNA, 19 nt, Homo sapiens
  misc_RNA (1)...(19): siRNA sense strand
ggacaucgccagggaaaca

SEQ ID NO: 2153591 - RNA, 19 nt, Homo sapiens
  misc_RNA (1)...(19): siRNA sense strand
gaagcugcaugggugaaga

SEQ ID NO: 2153592 - RNA, 19 nt, Homo sapiens
  misc_RNA (1)...(19): siRNA sense strand
gaagagaccgugggaucgu

SEQ ID NO: 2153593 - RNA, 19 nt, Homo sapiens
  misc_RNA (1)...(19): siRNA sense strand
ccagaagucacaccucauc

SEQ ID NO: 2153594 - RNA, 19 nt, Homo sapiens
  misc_RNA (1)...(19): siRNA sense strand
caccucauccugcgucaga

SEQ ID NO: 2153595 - RNA, 19 nt, Homo sapiens
  misc_RNA (1)...(19): siRNA sense strand
gggaaacagcccucaacca

SEQ ID NO: 2153596 - RNA, 19 nt, Homo sapiens
  misc_RNA (1)...(19): siRNA sense strand
accgugggaucgucacaaa

SEQ ID NO: 2153597 - RNA, 19 nt, Homo sapiens
  misc_RNA (1)...(19): siRNA sense strand
ggaaacagcccucaaccaa

SEQ ID NO: 2153598 - RNA, 19 nt, Homo sapiens
  misc_RNA (1)...(19): siRNA sense strand
gaaacagcccucaaccaaa

SEQ ID NO: 2153599 - RNA, 19 nt, Homo sapiens
  misc_RNA (1)...(19): siRNA sense strand
aaacagcccucaaccaaaa

SEQ ID NO: 2153600 - RNA, 19 nt, Homo sapiens
  misc_RNA (1)...(19): siRNA sense strand
ggacaucgccagggaaaca

SEQ ID NO: 2153601 - RNA, 19 nt, Homo sapiens
  misc_RNA (1)...(19): siRNA sense strand
gaagcugcaugggugaaga

SEQ ID NO: 2153602 - RNA, 19 nt, Homo sapiens
  misc_RNA (1)...(19): siRNA sense strand
gaagagaccgugggaucgu

SEQ ID NO: 2153603 - RNA, 19 nt, Homo sapiens
  misc_RNA (1)...(19): siRNA sense strand
ccagaagucacaccucauc

SEQ ID NO: 2153604 - RNA, 19 nt, Homo sapiens
  misc_RNA (1)...(19): siRNA sense strand
caccucauccugcgucaga

SEQ ID NO: 2153605 - RNA, 19 nt, Homo sapiens
  misc_RNA (1)...(19): siRNA sense strand
gggaaacagcccucaacca

SEQ ID NO: 2153606 - RNA, 19 nt, Homo sapiens
  misc_RNA (1)...(19): siRNA sense strand
accgugggaucgucacaaa

SEQ ID NO: 2153607 - RNA, 19 nt, Homo sapiens
  misc_RNA (1)...(19): siRNA sense strand
cgacagaacugcacuugua

SEQ ID NO: 2153608 - RNA, 19 nt, Homo sapiens
  misc_RNA (1)...(19): siRNA sense strand
ugacaaagcuucugaaucu

SEQ ID NO: 2153609 - RNA, 19 nt, Homo sapiens
  misc_RNA (1)...(19): siRNA sense strand
gaucuagagucaaauguuu

SEQ ID NO: 2153610 - RNA, 19 nt, Homo sapiens
  misc_RNA (1)...(19): siRNA sense strand
guuaauagguccucaguga

SEQ ID NO: 2153611 - RNA, 19 nt, Homo sapiens
  misc_RNA (1)...(19): siRNA sense strand
uuagagaccuucaggcuua

SEQ ID NO: 2153612 - RNA, 19 nt, Homo sapiens
  misc_RNA (1)...(19): siRNA sense strand
gauaaaggcugcucagagu

SEQ ID NO: 2153613 - RNA, 19 nt, Homo sapiens
  misc_RNA (1)...(19): siRNA sense strand
caaccuaaccuucauagua

SEQ ID NO: 2153614 - RNA, 19 nt, Homo sapiens
  misc_RNA (1)...(19): siRNA sense strand
caccaccucuugccaauua

SEQ ID NO: 2153615 - RNA, 19 nt, Homo sapiens
  misc_RNA (1)...(19): siRNA sense strand
gaagagacauucaagaaaa

SEQ ID NO: 2153616 - RNA, 19 nt, Homo sapiens
  misc_RNA (1)...(19): siRNA sense strand
ccaagaagaugcccaugaa

SEQ ID NO: 2153617 - RNA, 19 nt, Homo sapiens
  misc_RNA (1)...(19): siRNA sense strand
gaccacagcuucccucuca

SEQ ID NO: 2153618 - RNA, 19 nt, Homo sapiens
  misc_RNA (1)...(19): siRNA sense strand
gaauggcagcaauaaauua

SEQ ID NO: 2153619 - RNA, 19 nt, Homo sapiens
  misc_RNA (1)...(19): siRNA sense strand
gauauuagaucgguacuca

SEQ ID NO: 2153620 - RNA, 19 nt, Homo sapiens
  misc_RNA (1)...(19): siRNA sense strand
ccuaagaucuagagucaaa

SEQ ID NO: 2153621 - RNA, 19 nt, Homo sapiens
  misc_RNA (1)...(19): siRNA sense strand
gaauccaccucacuuaaau

SEQ ID NO: 2153622 - RNA, 19 nt, Homo sapiens
  misc_RNA (1)...(19): siRNA sense strand
gcaauggccucugguauca

SEQ ID NO: 2153623 - RNA, 19 nt, Homo sapiens
  misc_RNA (1)...(19): siRNA sense strand
aaccuaaccuucauaguaa

SEQ ID NO: 2153624 - RNA, 19 nt, Homo sapiens
  misc_RNA (1)...(19): siRNA sense strand
uagaagagccuaaagcaaa

SEQ ID NO: 2153625 - RNA, 19 nt, Homo sapiens
  misc_RNA (1)...(19): siRNA sense strand
ccaauuacaugcuaucaca

SEQ ID NO: 2153626 - RNA, 19 nt, Homo sapiens
  misc_RNA (1)...(19): siRNA sense strand
gcaauaaauuagacagaca

SEQ ID NO: 2153627 - RNA, 19 nt, Homo sapiens
  misc_RNA (1)...(19): siRNA sense strand
cagcuucccucucacauga

SEQ ID NO: 2153628 - RNA, 19 nt, Homo sapiens
  misc_RNA (1)...(19): siRNA sense strand
acagaaggauccucuagaa

SEQ ID NO: 2153629 - RNA, 19 nt, Homo sapiens
  misc_RNA (1)...(19): siRNA sense strand
gaugucaguuucuaguaaa

SEQ ID NO: 2153630 - RNA, 19 nt, Homo sapiens
  misc_RNA (1)...(19): siRNA sense strand
guucaucuguaccugauaa

SEQ ID NO: 2153631 - RNA, 19 nt, Homo sapiens
  misc_RNA (1)...(19): siRNA sense strand
ggacuggaccauugaaaga

SEQ ID NO: 2153632 - RNA, 19 nt, Homo sapiens
  misc_RNA (1)...(19): siRNA sense strand
ucaaagagguucacuaucc

SEQ ID NO: 2153633 - RNA, 19 nt, Homo sapiens
  misc_RNA (1)...(19): siRNA sense strand
gaggauaccuaagaucuag

SEQ ID NO: 2153634 - RNA, 19 nt, Homo sapiens
  misc_RNA (1)...(19): siRNA sense strand
cgaugucaguuucuaguaa

SEQ ID NO: 2153635 - RNA, 19 nt, Homo sapiens
  misc_RNA (1)...(19): siRNA sense strand
gcaagggcguuucagauac

SEQ ID NO: 2153636 - RNA, 19 nt, Homo sapiens
  misc_RNA (1)...(19): siRNA sense strand
caaaucacacacuuucuuu

SEQ ID NO: 2153637 - RNA, 19 nt, Homo sapiens
  misc_RNA (1)...(19): siRNA sense strand
ggugucgucucuuugagua

SEQ ID NO: 2153638 - RNA, 19 nt, Homo sapiens
  misc_RNA (1)...(19): siRNA sense strand
gaacagaaggauccucuag

SEQ ID NO: 2153639 - RNA, 19 nt, Homo sapiens
  misc_RNA (1)...(19): siRNA sense strand
ccaccacucuuguuuguca

SEQ ID NO: 2153640 - RNA, 19 nt, Homo sapiens
  misc_RNA (1)...(19): siRNA sense strand
gaacauccuaagaaacaaa

SEQ ID NO: 2153641 - RNA, 19 nt, Homo sapiens
  misc_RNA (1)...(19): siRNA sense strand
ucacacacuuucuuuagga

SEQ ID NO: 2153642 - RNA, 19 nt, Homo sapiens
  misc_RNA (1)...(19): siRNA sense strand
caagaacccaugacccuaa

SEQ ID NO: 2153643 - RNA, 19 nt, Homo sapiens
  misc_RNA (1)...(19): siRNA sense strand
gaaugggauugguacgauu

SEQ ID NO: 2153644 - RNA, 19 nt, Homo sapiens
  misc_RNA (1)...(19): siRNA sense strand
ggagaaaacucguacaagu

SEQ ID NO: 2153645 - RNA, 19 nt, Homo sapiens
  misc_RNA (1)...(19): siRNA sense strand
ugucuuaaguggcaacaaa

SEQ ID NO: 2153646 - RNA, 19 nt, Homo sapiens
  misc_RNA (1)...(19): siRNA sense strand
uaccuaagaucuagaguca

SEQ ID NO: 2153647 - RNA, 19 nt, Homo sapiens
  misc_RNA (1)...(19): siRNA sense strand
gaccauaguugacaaagcu

SEQ ID NO: 2153648 - RNA, 19 nt, Homo sapiens
  misc_RNA (1)...(19): siRNA sense strand
ggaacagcuugauggagaa

SEQ ID NO: 2153649 - RNA, 19 nt, Homo sapiens
  misc_RNA (1)...(19): siRNA sense strand
aaagaauccaccucacuua

SEQ ID NO: 2153650 - RNA, 19 nt, Homo sapiens
  misc_RNA (1)...(19): siRNA sense strand
ccucucacaugauaaagaa

SEQ ID NO: 2153651 - RNA, 19 nt, Homo sapiens
  misc_RNA (1)...(19): siRNA sense strand
cagaacauccuaagaaaca

SEQ ID NO: 2153652 - RNA, 19 nt, Homo sapiens
  misc_RNA (1)...(19): siRNA sense strand
guugaugccugcuccuuug

SEQ ID NO: 2153653 - RNA, 19 nt, Homo sapiens
  misc_RNA (1)...(19): siRNA sense strand
gacagugacccgaaagaaa

SEQ ID NO: 2153654 - RNA, 19 nt, Homo sapiens
  misc_RNA (1)...(19): siRNA sense strand
ggaggauaccuaagaucua

SEQ ID NO: 2153655 - RNA, 19 nt, Homo sapiens
  misc_RNA (1)...(19): siRNA sense strand
gcccuuagcguuuauugaa

SEQ ID NO: 2153656 - RNA, 19 nt, Homo sapiens
  misc_RNA (1)...(19): siRNA sense strand
agaaggauccucuagaaga

SEQ ID NO: 2153657 - RNA, 19 nt, Homo sapiens
  misc_RNA (1)...(19): siRNA sense strand
cauuacuucugcuacauaa

SEQ ID NO: 2153658 - RNA, 19 nt, Homo sapiens
  misc_RNA (1)...(19): siRNA sense strand
aaucagaggacuuuguuaa

SEQ ID NO: 2153659 - RNA, 19 nt, Homo sapiens
  misc_RNA (1)...(19): siRNA sense strand
cccagaacauccuaagaaa

SEQ ID NO: 2153660 - RNA, 19 nt, Homo sapiens
  misc_RNA (1)...(19): siRNA sense strand
uaaagaauccaccucacuu

SEQ ID NO: 2153661 - RNA, 19 nt, Homo sapiens
  misc_RNA (1)...(19): siRNA sense strand
guucuuacacuuucucuga

SEQ ID NO: 2153662 - RNA, 19 nt, Homo sapiens
  misc_RNA (1)...(19): siRNA sense strand
aagaagagacauucaagaa

SEQ ID NO: 2153663 - RNA, 19 nt, Homo sapiens
  misc_RNA (1)...(19): siRNA sense strand
ccuaaacggugcuaauagu

SEQ ID NO: 2153664 - RNA, 19 nt, Homo sapiens
  misc_RNA (1)...(19): siRNA sense strand
gccaagaugccgaagauga

SEQ ID NO: 2153665 - RNA, 19 nt, Homo sapiens
  misc_RNA (1)...(19): siRNA sense strand
gucaguuucuaguaaagua

SEQ ID NO: 2153666 - RNA, 19 nt, Homo sapiens
  misc_RNA (1)...(19): siRNA sense strand
ucagauauuuggaggauac

SEQ ID NO: 2153667 - RNA, 19 nt, Homo sapiens
  misc_RNA (1)...(19): siRNA sense strand
gaugugaaauacccugagu

SEQ ID NO: 2153668 - RNA, 19 nt, Homo sapiens
  misc_RNA (1)...(19): siRNA sense strand
cuaauguucuuacacuuuc

SEQ ID NO: 2153669 - RNA, 19 nt, Homo sapiens
  misc_RNA (1)...(19): siRNA sense strand
aaagaugguuccagcuuca

SEQ ID NO: 2153670 - RNA, 19 nt, Homo sapiens
  misc_RNA (1)...(19): siRNA sense strand
ggccaccacucuuguuugu

SEQ ID NO: 2153671 - RNA, 19 nt, Homo sapiens
  misc_RNA (1)...(19): siRNA sense strand
caaucaguauucacaacaa

SEQ ID NO: 2153672 - RNA, 19 nt, Homo sapiens
  misc_RNA (1)...(19): siRNA sense strand
caaagagguucacuaucca

SEQ ID NO: 2153673 - RNA, 19 nt, Homo sapiens
  misc_RNA (1)...(19): siRNA sense strand
aagaagaugcccaugaauu

SEQ ID NO: 2153674 - RNA, 19 nt, Homo sapiens
  misc_RNA (1)...(19): siRNA sense strand
ugaauggcagcaauaaauu

SEQ ID NO: 2153675 - RNA, 19 nt, Homo sapiens
  misc_RNA (1)...(19): siRNA sense strand
agagagagcaggagcaaga

SEQ ID NO: 2153676 - RNA, 19 nt, Homo sapiens
  misc_RNA (1)...(19): siRNA sense strand
cauuaccaauucugcagua

SEQ ID NO: 2153677 - RNA, 19 nt, Homo sapiens
  misc_RNA (1)...(19): siRNA sense strand
gcuucccucucacaugaua

SEQ ID NO: 2153678 - RNA, 19 nt, Homo sapiens
  misc_RNA (1)...(19): siRNA sense strand
uugcuaaggaugugaaaua

SEQ ID NO: 2153679 - RNA, 19 nt, Homo sapiens
  misc_RNA (1)...(19): siRNA sense strand
ggugcugugucuucauuga

SEQ ID NO: 2153680 - RNA, 19 nt, Homo sapiens
  misc_RNA (1)...(19): siRNA sense strand
uguuaaagauucagaacug

SEQ ID NO: 2153681 - RNA, 19 nt, Homo sapiens
  misc_RNA (1)...(19): siRNA sense strand
agaagagacauucaagaaa

SEQ ID NO: 2153682 - RNA, 19 nt, Homo sapiens
  misc_RNA (1)...(19): siRNA sense strand
agaagaugcccaugaauuc

SEQ ID NO: 2153683 - RNA, 19 nt, Homo sapiens
  misc_RNA (1)...(19): siRNA sense strand
cagcgacagugacccgaaa

SEQ ID NO: 2153684 - RNA, 19 nt, Homo sapiens
  misc_RNA (1)...(19): siRNA sense strand
agacauggaugcagguucu

SEQ ID NO: 2153685 - RNA, 19 nt, Homo sapiens
  misc_RNA (1)...(19): siRNA sense strand
ucaaaucacacacuuucuu

SEQ ID NO: 2153686 - RNA, 19 nt, Homo sapiens
  misc_RNA (1)...(19): siRNA sense strand
gaguucaucuguaccugau

SEQ ID NO: 2153687 - RNA, 19 nt, Homo sapiens
  misc_RNA (1)...(19): siRNA sense strand
caggguggcuuuccucucu

SEQ ID NO: 2153688 - RNA, 19 nt, Homo sapiens
  misc_RNA (1)...(19): siRNA sense strand
ucaaaaccaucaccacaaa

SEQ ID NO: 2153689 - RNA, 19 nt, Homo sapiens
  misc_RNA (1)...(19): siRNA sense strand
cagaaaaucccuuugcuaa

SEQ ID NO: 2153690 - RNA, 19 nt, Homo sapiens
  misc_RNA (1)...(19): siRNA sense strand
ccucugguaucaaaugaau

SEQ ID NO: 2153691 - RNA, 19 nt, Homo sapiens
  misc_RNA (1)...(19): siRNA sense strand
gauauuuggaggauaccua

SEQ ID NO: 2153692 - RNA, 19 nt, Homo sapiens
  misc_RNA (1)...(19): siRNA sense strand
ugcaagggcguuucagaua

SEQ ID NO: 2153693 - RNA, 19 nt, Homo sapiens
  misc_RNA (1)...(19): siRNA sense strand
gcaggacucagaccucuca

SEQ ID NO: 2153694 - RNA, 19 nt, Homo sapiens
  misc_RNA (1)...(19): siRNA sense strand
caucgcuccuccacagaaa

SEQ ID NO: 2153695 - RNA, 19 nt, Homo sapiens
  misc_RNA (1)...(19): siRNA sense strand
caacggagagccaauuguc

SEQ ID NO: 2153696 - RNA, 19 nt, Homo sapiens
  misc_RNA (1)...(19): siRNA sense strand
uagcuaggcacuuccguuu

SEQ ID NO: 2153697 - RNA, 19 nt, Homo sapiens
  misc_RNA (1)...(19): siRNA sense strand
aaauggaggugaacuuacu

SEQ ID NO: 2153698 - RNA, 19 nt, Homo sapiens
  misc_RNA (1)...(19): siRNA sense strand
gcuaggcacuuccguuuug

SEQ ID NO: 2153699 - RNA, 19 nt, Homo sapiens
  misc_RNA (1)...(19): siRNA sense strand
agaagagccuaaagcaaag

SEQ ID NO: 2153700 - RNA, 19 nt, Homo sapiens
  misc_RNA (1)...(19): siRNA sense strand
gcaaauccaagcugaacuc

SEQ ID NO: 2153701 - RNA, 19 nt, Homo sapiens
  misc_RNA (1)...(19): siRNA sense strand
agaauccaccucacuuaaa

SEQ ID NO: 2153702 - RNA, 19 nt, Homo sapiens
  misc_RNA (1)...(19): siRNA sense strand
ggaggugaacuuacucauc

SEQ ID NO: 2153703 - RNA, 19 nt, Homo sapiens
  misc_RNA (1)...(19): siRNA sense strand
gaacagcuugauggagaaa

SEQ ID NO: 2153704 - RNA, 19 nt, Homo sapiens
  misc_RNA (1)...(19): siRNA sense strand
aauggccucugguaucaaa

SEQ ID NO: 2153705 - RNA, 19 nt, Homo sapiens
  misc_RNA (1)...(19): siRNA sense strand
ugagaaaacgaaacacuua

SEQ ID NO: 2153706 - RNA, 19 nt, Homo sapiens
  misc_RNA (1)...(19): siRNA sense strand
gaaaggcucgacggaugaa

SEQ ID NO: 2153707 - RNA, 19 nt, Homo sapiens
  misc_RNA (1)...(19): siRNA sense strand
cgacagaacugcacuugua

SEQ ID NO: 2153708 - RNA, 19 nt, Homo sapiens
  misc_RNA (1)...(19): siRNA sense strand
ugacaaagcuucugaaucu

SEQ ID NO: 2153709 - RNA, 19 nt, Homo sapiens
  misc_RNA (1)...(19): siRNA sense strand
gaucuagagucaaauguuu

SEQ ID NO: 2153710 - RNA, 19 nt, Homo sapiens
  misc_RNA (1)...(19): siRNA sense strand
guuaauagguccucaguga

SEQ ID NO: 2153711 - RNA, 19 nt, Homo sapiens
  misc_RNA (1)...(19): siRNA sense strand
uuagagaccuucaggcuua

SEQ ID NO: 2153712 - RNA, 19 nt, Homo sapiens
  misc_RNA (1)...(19): siRNA sense strand
gauaaaggcugcucagagu

SEQ ID NO: 2153713 - RNA, 19 nt, Homo sapiens
  misc_RNA (1)...(19): siRNA sense strand
caaccuaaccuucauagua

SEQ ID NO: 2153714 - RNA, 19 nt, Homo sapiens
  misc_RNA (1)...(19): siRNA sense strand
caccaccucuugccaauua

SEQ ID NO: 2153715 - RNA, 19 nt, Homo sapiens
  misc_RNA (1)...(19): siRNA sense strand
gaagagacauucaagaaaa

SEQ ID NO: 2153716 - RNA, 19 nt, Homo sapiens
  misc_RNA (1)...(19): siRNA sense strand
ccaagaagaugcccaugaa

SEQ ID NO: 2153717 - RNA, 19 nt, Homo sapiens
  misc_RNA (1)...(19): siRNA sense strand
gaccacagcuucccucuca

SEQ ID NO: 2153718 - RNA, 19 nt, Homo sapiens
  misc_RNA (1)...(19): siRNA sense strand
gaauggcagcaauaaauua

SEQ ID NO: 2153719 - RNA, 19 nt, Homo sapiens
  misc_RNA (1)...(19): siRNA sense strand
gauauuagaucgguacuca

SEQ ID NO: 2153720 - RNA, 19 nt, Homo sapiens
  misc_RNA (1)...(19): siRNA sense strand
ccuaagaucuagagucaaa

SEQ ID NO: 2153721 - RNA, 19 nt, Homo sapiens
  misc_RNA (1)...(19): siRNA sense strand
gaauccaccucacuuaaau

SEQ ID NO: 2153722 - RNA, 19 nt, Homo sapiens
  misc_RNA (1)...(19): siRNA sense strand
gcaauggccucugguauca

SEQ ID NO: 2153723 - RNA, 19 nt, Homo sapiens
  misc_RNA (1)...(19): siRNA sense strand
aaccuaaccuucauaguaa

SEQ ID NO: 2153724 - RNA, 19 nt, Homo sapiens
  misc_RNA (1)...(19): siRNA sense strand
uagaagagccuaaagcaaa

SEQ ID NO: 2153725 - RNA, 19 nt, Homo sapiens
  misc_RNA (1)...(19): siRNA sense strand
ccaauuacaugcuaucaca

SEQ ID NO: 2153726 - RNA, 19 nt, Homo sapiens
  misc_RNA (1)...(19): siRNA sense strand
gcaauaaauuagacagaca

SEQ ID NO: 2153727 - RNA, 19 nt, Homo sapiens
  misc_RNA (1)...(19): siRNA sense strand
cagcuucccucucacauga

SEQ ID NO: 2153728 - RNA, 19 nt, Homo sapiens
  misc_RNA (1)...(19): siRNA sense strand
acagaaggauccucuagaa

SEQ ID NO: 2153729 - RNA, 19 nt, Homo sapiens
  misc_RNA (1)...(19): siRNA sense strand
gaugucaguuucuaguaaa

SEQ ID NO: 2153730 - RNA, 19 nt, Homo sapiens
  misc_RNA (1)...(19): siRNA sense strand
guucaucuguaccugauaa

SEQ ID NO: 2153731 - RNA, 19 nt, Homo sapiens
  misc_RNA (1)...(19): siRNA sense strand
ggacuggaccauugaaaga

SEQ ID NO: 2153732 - RNA, 19 nt, Homo sapiens
  misc_RNA (1)...(19): siRNA sense strand
ucaaagagguucacuaucc

SEQ ID NO: 2153733 - RNA, 19 nt, Homo sapiens
  misc_RNA (1)...(19): siRNA sense strand
gaggauaccuaagaucuag

SEQ ID NO: 2153734 - RNA, 19 nt, Homo sapiens
  misc_RNA (1)...(19): siRNA sense strand
cgaugucaguuucuaguaa

SEQ ID NO: 2153735 - RNA, 19 nt, Homo sapiens
  misc_RNA (1)...(19): siRNA sense strand
gcaagggcguuucagauac

SEQ ID NO: 2153736 - RNA, 19 nt, Homo sapiens
  misc_RNA (1)...(19): siRNA sense strand
caaaucacacacuuucuuu

SEQ ID NO: 2153737 - RNA, 19 nt, Homo sapiens
  misc_RNA (1)...(19): siRNA sense strand
ggugucgucucuuugagua

SEQ ID NO: 2153738 - RNA, 19 nt, Homo sapiens
  misc_RNA (1)...(19): siRNA sense strand
gaacagaaggauccucuag

SEQ ID NO: 2153739 - RNA, 19 nt, Homo sapiens
  misc_RNA (1)...(19): siRNA sense strand
ccaccacucuuguuuguca

SEQ ID NO: 2153740 - RNA, 19 nt, Homo sapiens
  misc_RNA (1)...(19): siRNA sense strand
gaacauccuaagaaacaaa

SEQ ID NO: 2153741 - RNA, 19 nt, Homo sapiens
  misc_RNA (1)...(19): siRNA sense strand
ucacacacuuucuuuagga

SEQ ID NO: 2153742 - RNA, 19 nt, Homo sapiens
  misc_RNA (1)...(19): siRNA sense strand
caagaacccaugacccuaa

SEQ ID NO: 2153743 - RNA, 19 nt, Homo sapiens
  misc_RNA (1)...(19): siRNA sense strand
gaaugggauugguacgauu

SEQ ID NO: 2153744 - RNA, 19 nt, Homo sapiens
  misc_RNA (1)...(19): siRNA sense strand
ggagaaaacucguacaagu

SEQ ID NO: 2153745 - RNA, 19 nt, Homo sapiens
  misc_RNA (1)...(19): siRNA sense strand
ugucuuaaguggcaacaaa

SEQ ID NO: 2153746 - RNA, 19 nt, Homo sapiens
  misc_RNA (1)...(19): siRNA sense strand
uaccuaagaucuagaguca

SEQ ID NO: 2153747 - RNA, 19 nt, Homo sapiens
  misc_RNA (1)...(19): siRNA sense strand
gaccauaguugacaaagcu

SEQ ID NO: 2153748 - RNA, 19 nt, Homo sapiens
  misc_RNA (1)...(19): siRNA sense strand
ggaacagcuugauggagaa

SEQ ID NO: 2153749 - RNA, 19 nt, Homo sapiens
  misc_RNA (1)...(19): siRNA sense strand
aaagaauccaccucacuua

SEQ ID NO: 2153750 - RNA, 19 nt, Homo sapiens
  misc_RNA (1)...(19): siRNA sense strand
ccucucacaugauaaagaa

SEQ ID NO: 2153751 - RNA, 19 nt, Homo sapiens
  misc_RNA (1)...(19): siRNA sense strand
cagaacauccuaagaaaca

SEQ ID NO: 2153752 - RNA, 19 nt, Homo sapiens
  misc_RNA (1)...(19): siRNA sense strand
guugaugccugcuccuuug

SEQ ID NO: 2153753 - RNA, 19 nt, Homo sapiens
  misc_RNA (1)...(19): siRNA sense strand
gacagugacccgaaagaaa

SEQ ID NO: 2153754 - RNA, 19 nt, Homo sapiens
  misc_RNA (1)...(19): siRNA sense strand
ggaggauaccuaagaucua

SEQ ID NO: 2153755 - RNA, 19 nt, Homo sapiens
  misc_RNA (1)...(19): siRNA sense strand
gcccuuagcguuuauugaa

SEQ ID NO: 2153756 - RNA, 19 nt, Homo sapiens
  misc_RNA (1)...(19): siRNA sense strand
agaaggauccucuagaaga

SEQ ID NO: 2153757 - RNA, 19 nt, Homo sapiens
  misc_RNA (1)...(19): siRNA sense strand
cauuacuucugcuacauaa

SEQ ID NO: 2153758 - RNA, 19 nt, Homo sapiens
  misc_RNA (1)...(19): siRNA sense strand
aaucagaggacuuuguuaa

SEQ ID NO: 2153759 - RNA, 19 nt, Homo sapiens
  misc_RNA (1)...(19): siRNA sense strand
cccagaacauccuaagaaa

SEQ ID NO: 2153760 - RNA, 19 nt, Homo sapiens
  misc_RNA (1)...(19): siRNA sense strand
uaaagaauccaccucacuu

SEQ ID NO: 2153761 - RNA, 19 nt, Homo sapiens
  misc_RNA (1)...(19): siRNA sense strand
guucuuacacuuucucuga

SEQ ID NO: 2153762 - RNA, 19 nt, Homo sapiens
  misc_RNA (1)...(19): siRNA sense strand
aagaagagacauucaagaa

SEQ ID NO: 2153763 - RNA, 19 nt, Homo sapiens
  misc_RNA (1)...(19): siRNA sense strand
ccuaaacggugcuaauagu

SEQ ID NO: 2153764 - RNA, 19 nt, Homo sapiens
  misc_RNA (1)...(19): siRNA sense strand
gccaagaugccgaagauga

SEQ ID NO: 2153765 - RNA, 19 nt, Homo sapiens
  misc_RNA (1)...(19): siRNA sense strand
gucaguuucuaguaaagua

SEQ ID NO: 2153766 - RNA, 19 nt, Homo sapiens
  misc_RNA (1)...(19): siRNA sense strand
ucagauauuuggaggauac

SEQ ID NO: 2153767 - RNA, 19 nt, Homo sapiens
  misc_RNA (1)...(19): siRNA sense strand
gaugugaaauacccugagu

SEQ ID NO: 2153768 - RNA, 19 nt, Homo sapiens
  misc_RNA (1)...(19): siRNA sense strand
cuaauguucuuacacuuuc

SEQ ID NO: 2153769 - RNA, 19 nt, Homo sapiens
  misc_RNA (1)...(19): siRNA sense strand
aaagaugguuccagcuuca

SEQ ID NO: 2153770 - RNA, 19 nt, Homo sapiens
  misc_RNA (1)...(19): siRNA sense strand
ggccaccacucuuguuugu

SEQ ID NO: 2153771 - RNA, 19 nt, Homo sapiens
  misc_RNA (1)...(19): siRNA sense strand
caaucaguauucacaacaa

SEQ ID NO: 2153772 - RNA, 19 nt, Homo sapiens
  misc_RNA (1)...(19): siRNA sense strand
caaagagguucacuaucca

SEQ ID NO: 2153773 - RNA, 19 nt, Homo sapiens
  misc_RNA (1)...(19): siRNA sense strand
aagaagaugcccaugaauu

SEQ ID NO: 2153774 - RNA, 19 nt, Homo sapiens
  misc_RNA (1)...(19): siRNA sense strand
ugaauggcagcaauaaauu

SEQ ID NO: 2153775 - RNA, 19 nt, Homo sapiens
  misc_RNA (1)...(19): siRNA sense strand
agagagagcaggagcaaga

SEQ ID NO: 2153776 - RNA, 19 nt, Homo sapiens
  misc_RNA (1)...(19): siRNA sense strand
cauuaccaauucugcagua

SEQ ID NO: 2153777 - RNA, 19 nt, Homo sapiens
  misc_RNA (1)...(19): siRNA sense strand
gcuucccucucacaugaua

SEQ ID NO: 2153778 - RNA, 19 nt, Homo sapiens
  misc_RNA (1)...(19): siRNA sense strand
uugcuaaggaugugaaaua

SEQ ID NO: 2153779 - RNA, 19 nt, Homo sapiens
  misc_RNA (1)...(19): siRNA sense strand
ggugcugugucuucauuga

SEQ ID NO: 2153780 - RNA, 19 nt, Homo sapiens
  misc_RNA (1)...(19): siRNA sense strand
uguuaaagauucagaacug

SEQ ID NO: 2153781 - RNA, 19 nt, Homo sapiens
  misc_RNA (1)...(19): siRNA sense strand
agaagagacauucaagaaa

SEQ ID NO: 2153782 - RNA, 19 nt, Homo sapiens
  misc_RNA (1)...(19): siRNA sense strand
agaagaugcccaugaauuc

SEQ ID NO: 2153783 - RNA, 19 nt, Homo sapiens
  misc_RNA (1)...(19): siRNA sense strand
cagcgacagugacccgaaa

SEQ ID NO: 2153784 - RNA, 19 nt, Homo sapiens
  misc_RNA (1)...(19): siRNA sense strand
agacauggaugcagguucu

SEQ ID NO: 2153785 - RNA, 19 nt, Homo sapiens
  misc_RNA (1)...(19): siRNA sense strand
ucaaaucacacacuuucuu

SEQ ID NO: 2153786 - RNA, 19 nt, Homo sapiens
  misc_RNA (1)...(19): siRNA sense strand
gaguucaucuguaccugau

SEQ ID NO: 2153787 - RNA, 19 nt, Homo sapiens
  misc_RNA (1)...(19): siRNA sense strand
caggguggcuuuccucucu

SEQ ID NO: 2153788 - RNA, 19 nt, Homo sapiens
  misc_RNA (1)...(19): siRNA sense strand
ucaaaaccaucaccacaaa

SEQ ID NO: 2153789 - RNA, 19 nt, Homo sapiens
  misc_RNA (1)...(19): siRNA sense strand
cagaaaaucccuuugcuaa

SEQ ID NO: 2153790 - RNA, 19 nt, Homo sapiens
  misc_RNA (1)...(19): siRNA sense strand
ccucugguaucaaaugaau

SEQ ID NO: 2153791 - RNA, 19 nt, Homo sapiens
  misc_RNA (1)...(19): siRNA sense strand
gauauuuggaggauaccua

SEQ ID NO: 2153792 - RNA, 19 nt, Homo sapiens
  misc_RNA (1)...(19): siRNA sense strand
ugcaagggcguuucagaua

SEQ ID NO: 2153793 - RNA, 19 nt, Homo sapiens
  misc_RNA (1)...(19): siRNA sense strand
gcaggacucagaccucuca

SEQ ID NO: 2153794 - RNA, 19 nt, Homo sapiens
  misc_RNA (1)...(19): siRNA sense strand
caucgcuccuccacagaaa

SEQ ID NO: 2153795 - RNA, 19 nt, Homo sapiens
  misc_RNA (1)...(19): siRNA sense strand
caacggagagccaauuguc

SEQ ID NO: 2153796 - RNA, 19 nt, Homo sapiens
  misc_RNA (1)...(19): siRNA sense strand
uagcuaggcacuuccguuu

SEQ ID NO: 2153797 - RNA, 19 nt, Homo sapiens
  misc_RNA (1)...(19): siRNA sense strand
aaauggaggugaacuuacu

SEQ ID NO: 2153798 - RNA, 19 nt, Homo sapiens
  misc_RNA (1)...(19): siRNA sense strand
gcuaggcacuuccguuuug

SEQ ID NO: 2153799 - RNA, 19 nt, Homo sapiens
  misc_RNA (1)...(19): siRNA sense strand
agaagagccuaaagcaaag

SEQ ID NO: 2153800 - RNA, 19 nt, Homo sapiens
  misc_RNA (1)...(19): siRNA sense strand
gcaaauccaagcugaacuc

SEQ ID NO: 2153801 - RNA, 19 nt, Homo sapiens
  misc_RNA (1)...(19): siRNA sense strand
agaauccaccucacuuaaa

SEQ ID NO: 2153802 - RNA, 19 nt, Homo sapiens
  misc_RNA (1)...(19): siRNA sense strand
ggaggugaacuuacucauc

SEQ ID NO: 2153803 - RNA, 19 nt, Homo sapiens
  misc_RNA (1)...(19): siRNA sense strand
gaacagcuugauggagaaa

SEQ ID NO: 2153804 - RNA, 19 nt, Homo sapiens
  misc_RNA (1)...(19): siRNA sense strand
aauggccucugguaucaaa

SEQ ID NO: 2153805 - RNA, 19 nt, Homo sapiens
  misc_RNA (1)...(19): siRNA sense strand
ugagaaaacgaaacacuua

SEQ ID NO: 2153806 - RNA, 19 nt, Homo sapiens
  misc_RNA (1)...(19): siRNA sense strand
gaaaggcucgacggaugaa

SEQ ID NO: 2153807 - RNA, 19 nt, Homo sapiens
  misc_RNA (1)...(19): siRNA sense strand
ggagaaagaucgccaguca

SEQ ID NO: 2153808 - RNA, 19 nt, Homo sapiens
  misc_RNA (1)...(19): siRNA sense strand
cagaagauuugcucuauga

SEQ ID NO: 2153809 - RNA, 19 nt, Homo sapiens
  misc_RNA (1)...(19): siRNA sense strand
gaauaaguccugaauuaga

SEQ ID NO: 2153810 - RNA, 19 nt, Homo sapiens
  misc_RNA (1)...(19): siRNA sense strand
gagcagaucgccaaacuga

SEQ ID NO: 2153811 - RNA, 19 nt, Homo sapiens
  misc_RNA (1)...(19): siRNA sense strand
agacaaagcuacucagaca

SEQ ID NO: 2153812 - RNA, 19 nt, Homo sapiens
  misc_RNA (1)...(19): siRNA sense strand
guucggaccucuaguacaa

SEQ ID NO: 2153813 - RNA, 19 nt, Homo sapiens
  misc_RNA (1)...(19): siRNA sense strand
uuacgucucuuucugauga

SEQ ID NO: 2153814 - RNA, 19 nt, Homo sapiens
  misc_RNA (1)...(19): siRNA sense strand
gcucuaugaucgugauaaa

SEQ ID NO: 2153815 - RNA, 19 nt, Homo sapiens
  misc_RNA (1)...(19): siRNA sense strand
gggaguagcucaccguuac

SEQ ID NO: 2153816 - RNA, 19 nt, Homo sapiens
  misc_RNA (1)...(19): siRNA sense strand
gcucagaacuaugugauca

SEQ ID NO: 2153817 - RNA, 19 nt, Homo sapiens
  misc_RNA (1)...(19): siRNA sense strand
caacagaagauuugcucua

SEQ ID NO: 2153818 - RNA, 19 nt, Homo sapiens
  misc_RNA (1)...(19): siRNA sense strand
gaaggucuuugaggaaaug

SEQ ID NO: 2153819 - RNA, 19 nt, Homo sapiens
  misc_RNA (1)...(19): siRNA sense strand
gcucaccguuacccaagua

SEQ ID NO: 2153820 - RNA, 19 nt, Homo sapiens
  misc_RNA (1)...(19): siRNA sense strand
agaacuaugugaucaucua

SEQ ID NO: 2153821 - RNA, 19 nt, Homo sapiens
  misc_RNA (1)...(19): siRNA sense strand
caaguucggaccucuagua

SEQ ID NO: 2153822 - RNA, 19 nt, Homo sapiens
  misc_RNA (1)...(19): siRNA sense strand
gaacuaugugaucaucuaa

SEQ ID NO: 2153823 - RNA, 19 nt, Homo sapiens
  misc_RNA (1)...(19): siRNA sense strand
ggaucaaggucaguuccua

SEQ ID NO: 2153824 - RNA, 19 nt, Homo sapiens
  misc_RNA (1)...(19): siRNA sense strand
gauaaagacagugggagua

SEQ ID NO: 2153825 - RNA, 19 nt, Homo sapiens
  misc_RNA (1)...(19): siRNA sense strand
gugaaggucuuugaggaaa

SEQ ID NO: 2153826 - RNA, 19 nt, Homo sapiens
  misc_RNA (1)...(19): siRNA sense strand
ggaauaaguccugaauuag

SEQ ID NO: 2153827 - RNA, 19 nt, Homo sapiens
  misc_RNA (1)...(19): siRNA sense strand
cuacaacgcaguaaacaga

SEQ ID NO: 2153828 - RNA, 19 nt, Homo sapiens
  misc_RNA (1)...(19): siRNA sense strand
cagaguagucgucacagua

SEQ ID NO: 2153829 - RNA, 19 nt, Homo sapiens
  misc_RNA (1)...(19): siRNA sense strand
gaugguagcccuugcucaa

SEQ ID NO: 2153830 - RNA, 19 nt, Homo sapiens
  misc_RNA (1)...(19): siRNA sense strand
gcagagcggacaaggcaaa

SEQ ID NO: 2153831 - RNA, 19 nt, Homo sapiens
  misc_RNA (1)...(19): siRNA sense strand
ucagcuuucuguccuguaa

SEQ ID NO: 2153832 - RNA, 19 nt, Homo sapiens
  misc_RNA (1)...(19): siRNA sense strand
ccaaacaacagcuacaugu

SEQ ID NO: 2153833 - RNA, 19 nt, Homo sapiens
  misc_RNA (1)...(19): siRNA sense strand
gaagauuugcucuaugauc

SEQ ID NO: 2153834 - RNA, 19 nt, Homo sapiens
  misc_RNA (1)...(19): siRNA sense strand
cgaaccuccucuuuggaua

SEQ ID NO: 2153835 - RNA, 19 nt, Homo sapiens
  misc_RNA (1)...(19): siRNA sense strand
gcaacuacaacgcaguaaa

SEQ ID NO: 2153836 - RNA, 19 nt, Homo sapiens
  misc_RNA (1)...(19): siRNA sense strand
gaucgccagucaccucuuc

SEQ ID NO: 2153837 - RNA, 19 nt, Homo sapiens
  misc_RNA (1)...(19): siRNA sense strand
ccuaugccacugucaaaua

SEQ ID NO: 2153838 - RNA, 19 nt, Homo sapiens
  misc_RNA (1)...(19): siRNA sense strand
cuaugccacugucaaauau

SEQ ID NO: 2153839 - RNA, 19 nt, Homo sapiens
  misc_RNA (1)...(19): siRNA sense strand
ucggaccucuaguacaaua

SEQ ID NO: 2153840 - RNA, 19 nt, Homo sapiens
  misc_RNA (1)...(19): siRNA sense strand
caauguagaaggaauaagu

SEQ ID NO: 2153841 - RNA, 19 nt, Homo sapiens
  misc_RNA (1)...(19): siRNA sense strand
gcccugcaauguagaagga

SEQ ID NO: 2153842 - RNA, 19 nt, Homo sapiens
  misc_RNA (1)...(19): siRNA sense strand
ucuaugaucgugauaaaga

SEQ ID NO: 2153843 - RNA, 19 nt, Homo sapiens
  misc_RNA (1)...(19): siRNA sense strand
caacgcaguaaacagagua

SEQ ID NO: 2153844 - RNA, 19 nt, Homo sapiens
  misc_RNA (1)...(19): siRNA sense strand
aacagaagauuugcucuau

SEQ ID NO: 2153845 - RNA, 19 nt, Homo sapiens
  misc_RNA (1)...(19): siRNA sense strand
ggaaggaagaaguauccaa

SEQ ID NO: 2153846 - RNA, 19 nt, Homo sapiens
  misc_RNA (1)...(19): siRNA sense strand
gaucaaggucaguuccuau

SEQ ID NO: 2153847 - RNA, 19 nt, Homo sapiens
  misc_RNA (1)...(19): siRNA sense strand
ggggagugcugaucaacua

SEQ ID NO: 2153848 - RNA, 19 nt, Homo sapiens
  misc_RNA (1)...(19): siRNA sense strand
cuucugaccuuaugcucaa

SEQ ID NO: 2153849 - RNA, 19 nt, Homo sapiens
  misc_RNA (1)...(19): siRNA sense strand
ggagugcugaucaacuaaa

SEQ ID NO: 2153850 - RNA, 19 nt, Homo sapiens
  misc_RNA (1)...(19): siRNA sense strand
caacuacaacgcaguaaac

SEQ ID NO: 2153851 - RNA, 19 nt, Homo sapiens
  misc_RNA (1)...(19): siRNA sense strand
gcucagcuuuggcaacucu

SEQ ID NO: 2153852 - RNA, 19 nt, Homo sapiens
  misc_RNA (1)...(19): siRNA sense strand
ggcaaaaucucagcaaguu

SEQ ID NO: 2153853 - RNA, 19 nt, Homo sapiens
  misc_RNA (1)...(19): siRNA sense strand
aacaggaccuuaccucaca

SEQ ID NO: 2153854 - RNA, 19 nt, Homo sapiens
  misc_RNA (1)...(19): siRNA sense strand
agaguagucgucacaguaa

SEQ ID NO: 2153855 - RNA, 19 nt, Homo sapiens
  misc_RNA (1)...(19): siRNA sense strand
aaacagaguagucgucaca

SEQ ID NO: 2153856 - RNA, 19 nt, Homo sapiens
  misc_RNA (1)...(19): siRNA sense strand
cagcaacuacaacgcagua

SEQ ID NO: 2153857 - RNA, 19 nt, Homo sapiens
  misc_RNA (1)...(19): siRNA sense strand
gccacgggauccucauguu

SEQ ID NO: 2153858 - RNA, 19 nt, Homo sapiens
  misc_RNA (1)...(19): siRNA sense strand
uaaugggaaggaagaagua

SEQ ID NO: 2153859 - RNA, 19 nt, Homo sapiens
  misc_RNA (1)...(19): siRNA sense strand
ugaaagacaaagcuacuca

SEQ ID NO: 2153860 - RNA, 19 nt, Homo sapiens
  misc_RNA (1)...(19): siRNA sense strand
ucagaacuaugugaucauc

SEQ ID NO: 2153861 - RNA, 19 nt, Homo sapiens
  misc_RNA (1)...(19): siRNA sense strand
gcagaagagggugcagaaa

SEQ ID NO: 2153862 - RNA, 19 nt, Homo sapiens
  misc_RNA (1)...(19): siRNA sense strand
gcaaccauauaacaaucag

SEQ ID NO: 2153863 - RNA, 19 nt, Homo sapiens
  misc_RNA (1)...(19): siRNA sense strand
gaugugagcgagugaaggu

SEQ ID NO: 2153864 - RNA, 19 nt, Homo sapiens
  misc_RNA (1)...(19): siRNA sense strand
ccaaaccaaacaacagcua

SEQ ID NO: 2153865 - RNA, 19 nt, Homo sapiens
  misc_RNA (1)...(19): siRNA sense strand
acagaagauuugcucuaug

SEQ ID NO: 2153866 - RNA, 19 nt, Homo sapiens
  misc_RNA (1)...(19): siRNA sense strand
uaaggcgaaccuccucuuu

SEQ ID NO: 2153867 - RNA, 19 nt, Homo sapiens
  misc_RNA (1)...(19): siRNA sense strand
cgugugcccugcaauguag

SEQ ID NO: 2153868 - RNA, 19 nt, Homo sapiens
  misc_RNA (1)...(19): siRNA sense strand
aaagacaaagcuacucaga

SEQ ID NO: 2153869 - RNA, 19 nt, Homo sapiens
  misc_RNA (1)...(19): siRNA sense strand
cuucaucucccaaaccaaa

SEQ ID NO: 2153870 - RNA, 19 nt, Homo sapiens
  misc_RNA (1)...(19): siRNA sense strand
gcgugugcccugcaaugua

SEQ ID NO: 2153871 - RNA, 19 nt, Homo sapiens
  misc_RNA (1)...(19): siRNA sense strand
gugccaaaaucaucuguuu

SEQ ID NO: 2153872 - RNA, 19 nt, Homo sapiens
  misc_RNA (1)...(19): siRNA sense strand
uaacaaucagucacacuca

SEQ ID NO: 2153873 - RNA, 19 nt, Homo sapiens
  misc_RNA (1)...(19): siRNA sense strand
aaacugaggcagcaacuac

SEQ ID NO: 2153874 - RNA, 19 nt, Homo sapiens
  misc_RNA (1)...(19): siRNA sense strand
gaaccuccucuuuggauac

SEQ ID NO: 2153875 - RNA, 19 nt, Homo sapiens
  misc_RNA (1)...(19): siRNA sense strand
gggauccucauguucacua

SEQ ID NO: 2153876 - RNA, 19 nt, Homo sapiens
  misc_RNA (1)...(19): siRNA sense strand
gcgaaccuccucuuuggau

SEQ ID NO: 2153877 - RNA, 19 nt, Homo sapiens
  misc_RNA (1)...(19): siRNA sense strand
ugaaggucuuugaggaaau

SEQ ID NO: 2153878 - RNA, 19 nt, Homo sapiens
  misc_RNA (1)...(19): siRNA sense strand
aggcgaaccuccucuuugg

SEQ ID NO: 2153879 - RNA, 19 nt, Homo sapiens
  misc_RNA (1)...(19): siRNA sense strand
ggcagaagagggugcagaa

SEQ ID NO: 2153880 - RNA, 19 nt, Homo sapiens
  misc_RNA (1)...(19): siRNA sense strand
aagagcagaucgccaaacu

SEQ ID NO: 2153881 - RNA, 19 nt, Homo sapiens
  misc_RNA (1)...(19): siRNA sense strand
guaguacucgcagcauuga

SEQ ID NO: 2153882 - RNA, 19 nt, Homo sapiens
  misc_RNA (1)...(19): siRNA sense strand
cauauaacaaucagucaca

SEQ ID NO: 2153883 - RNA, 19 nt, Homo sapiens
  misc_RNA (1)...(19): siRNA sense strand
uggcaaccauauaacaauc

SEQ ID NO: 2153884 - RNA, 19 nt, Homo sapiens
  misc_RNA (1)...(19): siRNA sense strand
ggaccucuaguacaauaag

SEQ ID NO: 2153885 - RNA, 19 nt, Homo sapiens
  misc_RNA (1)...(19): siRNA sense strand
gaccuuaugcucaagaacu

SEQ ID NO: 2153886 - RNA, 19 nt, Homo sapiens
  misc_RNA (1)...(19): siRNA sense strand
uuaccugcuucugaccuua

SEQ ID NO: 2153887 - RNA, 19 nt, Homo sapiens
  misc_RNA (1)...(19): siRNA sense strand
cagcucucaucccggguuu

SEQ ID NO: 2153888 - RNA, 19 nt, Homo sapiens
  misc_RNA (1)...(19): siRNA sense strand
cauguucacuacccuucau

SEQ ID NO: 2153889 - RNA, 19 nt, Homo sapiens
  misc_RNA (1)...(19): siRNA sense strand
cauuaccggagcaguagua

SEQ ID NO: 2153890 - RNA, 19 nt, Homo sapiens
  misc_RNA (1)...(19): siRNA sense strand
caaauauaucagugccaaa

SEQ ID NO: 2153891 - RNA, 19 nt, Homo sapiens
  misc_RNA (1)...(19): siRNA sense strand
cagaagagggugcagaaaa

SEQ ID NO: 2153892 - RNA, 19 nt, Homo sapiens
  misc_RNA (1)...(19): siRNA sense strand
guccaggagcgcagcagua

SEQ ID NO: 2153893 - RNA, 19 nt, Homo sapiens
  misc_RNA (1)...(19): siRNA sense strand
caaacugaggcagcaacua

SEQ ID NO: 2153894 - RNA, 19 nt, Homo sapiens
  misc_RNA (1)...(19): siRNA sense strand
gaguagucgucacaguaag

SEQ ID NO: 2153895 - RNA, 19 nt, Homo sapiens
  misc_RNA (1)...(19): siRNA sense strand
ccacgggauccucauguuc

SEQ ID NO: 2153896 - RNA, 19 nt, Homo sapiens
  misc_RNA (1)...(19): siRNA sense strand
augccacugucaaauauau

SEQ ID NO: 2153897 - RNA, 19 nt, Homo sapiens
  misc_RNA (1)...(19): siRNA sense strand
gggagugcugaucaacuaa

SEQ ID NO: 2153898 - RNA, 19 nt, Homo sapiens
  misc_RNA (1)...(19): siRNA sense strand
caucccggguuuccuuuac

SEQ ID NO: 2153899 - RNA, 19 nt, Homo sapiens
  misc_RNA (1)...(19): siRNA sense strand
ugguagcccuugcucaaca

SEQ ID NO: 2153900 - RNA, 19 nt, Homo sapiens
  misc_RNA (1)...(19): siRNA sense strand
acagaguagucgucacagu

SEQ ID NO: 2153901 - RNA, 19 nt, Homo sapiens
  misc_RNA (1)...(19): siRNA sense strand
cagcaaguucggaccucua

SEQ ID NO: 2153902 - RNA, 19 nt, Homo sapiens
  misc_RNA (1)...(19): siRNA sense strand
ggagaaagaucgccaguca

SEQ ID NO: 2153903 - RNA, 19 nt, Homo sapiens
  misc_RNA (1)...(19): siRNA sense strand
cagaagauuugcucuauga

SEQ ID NO: 2153904 - RNA, 19 nt, Homo sapiens
  misc_RNA (1)...(19): siRNA sense strand
gaauaaguccugaauuaga

SEQ ID NO: 2153905 - RNA, 19 nt, Homo sapiens
  misc_RNA (1)...(19): siRNA sense strand
gagcagaucgccaaacuga

SEQ ID NO: 2153906 - RNA, 19 nt, Homo sapiens
  misc_RNA (1)...(19): siRNA sense strand
agacaaagcuacucagaca

SEQ ID NO: 2153907 - RNA, 19 nt, Homo sapiens
  misc_RNA (1)...(19): siRNA sense strand
guucggaccucuaguacaa

SEQ ID NO: 2153908 - RNA, 19 nt, Homo sapiens
  misc_RNA (1)...(19): siRNA sense strand
uuacgucucuuucugauga

SEQ ID NO: 2153909 - RNA, 19 nt, Homo sapiens
  misc_RNA (1)...(19): siRNA sense strand
gcucuaugaucgugauaaa

SEQ ID NO: 2153910 - RNA, 19 nt, Homo sapiens
  misc_RNA (1)...(19): siRNA sense strand
gggaguagcucaccguuac

SEQ ID NO: 2153911 - RNA, 19 nt, Homo sapiens
  misc_RNA (1)...(19): siRNA sense strand
gcucagaacuaugugauca

SEQ ID NO: 2153912 - RNA, 19 nt, Homo sapiens
  misc_RNA (1)...(19): siRNA sense strand
caacagaagauuugcucua

SEQ ID NO: 2153913 - RNA, 19 nt, Homo sapiens
  misc_RNA (1)...(19): siRNA sense strand
gaaggucuuugaggaaaug

SEQ ID NO: 2153914 - RNA, 19 nt, Homo sapiens
  misc_RNA (1)...(19): siRNA sense strand
gcucaccguuacccaagua

SEQ ID NO: 2153915 - RNA, 19 nt, Homo sapiens
  misc_RNA (1)...(19): siRNA sense strand
agaacuaugugaucaucua

SEQ ID NO: 2153916 - RNA, 19 nt, Homo sapiens
  misc_RNA (1)...(19): siRNA sense strand
caaguucggaccucuagua

SEQ ID NO: 2153917 - RNA, 19 nt, Homo sapiens
  misc_RNA (1)...(19): siRNA sense strand
gaacuaugugaucaucuaa

SEQ ID NO: 2153918 - RNA, 19 nt, Homo sapiens
  misc_RNA (1)...(19): siRNA sense strand
ggaucaaggucaguuccua

SEQ ID NO: 2153919 - RNA, 19 nt, Homo sapiens
  misc_RNA (1)...(19): siRNA sense strand
gauaaagacagugggagua

SEQ ID NO: 2153920 - RNA, 19 nt, Homo sapiens
  misc_RNA (1)...(19): siRNA sense strand
gugaaggucuuugaggaaa

SEQ ID NO: 2153921 - RNA, 19 nt, Homo sapiens
  misc_RNA (1)...(19): siRNA sense strand
ggaauaaguccugaauuag

SEQ ID NO: 2153922 - RNA, 19 nt, Homo sapiens
  misc_RNA (1)...(19): siRNA sense strand
cuacaacgcaguaaacaga

SEQ ID NO: 2153923 - RNA, 19 nt, Homo sapiens
  misc_RNA (1)...(19): siRNA sense strand
cagaguagucgucacagua

SEQ ID NO: 2153924 - RNA, 19 nt, Homo sapiens
  misc_RNA (1)...(19): siRNA sense strand
gaugguagcccuugcucaa

SEQ ID NO: 2153925 - RNA, 19 nt, Homo sapiens
  misc_RNA (1)...(19): siRNA sense strand
gcagagcggacaaggcaaa

SEQ ID NO: 2153926 - RNA, 19 nt, Homo sapiens
  misc_RNA (1)...(19): siRNA sense strand
ucagcuuucuguccuguaa

SEQ ID NO: 2153927 - RNA, 19 nt, Homo sapiens
  misc_RNA (1)...(19): siRNA sense strand
ccaaacaacagcuacaugu

SEQ ID NO: 2153928 - RNA, 19 nt, Homo sapiens
  misc_RNA (1)...(19): siRNA sense strand
gaagauuugcucuaugauc

SEQ ID NO: 2153929 - RNA, 19 nt, Homo sapiens
  misc_RNA (1)...(19): siRNA sense strand
cgaaccuccucuuuggaua

SEQ ID NO: 2153930 - RNA, 19 nt, Homo sapiens
  misc_RNA (1)...(19): siRNA sense strand
gcaacuacaacgcaguaaa

SEQ ID NO: 2153931 - RNA, 19 nt, Homo sapiens
  misc_RNA (1)...(19): siRNA sense strand
gaucgccagucaccucuuc

SEQ ID NO: 2153932 - RNA, 19 nt, Homo sapiens
  misc_RNA (1)...(19): siRNA sense strand
ccuaugccacugucaaaua

SEQ ID NO: 2153933 - RNA, 19 nt, Homo sapiens
  misc_RNA (1)...(19): siRNA sense strand
cuaugccacugucaaauau

SEQ ID NO: 2153934 - RNA, 19 nt, Homo sapiens
  misc_RNA (1)...(19): siRNA sense strand
ucggaccucuaguacaaua

SEQ ID NO: 2153935 - RNA, 19 nt, Homo sapiens
  misc_RNA (1)...(19): siRNA sense strand
caauguagaaggaauaagu

SEQ ID NO: 2153936 - RNA, 19 nt, Homo sapiens
  misc_RNA (1)...(19): siRNA sense strand
gcccugcaauguagaagga

SEQ ID NO: 2153937 - RNA, 19 nt, Homo sapiens
  misc_RNA (1)...(19): siRNA sense strand
ucuaugaucgugauaaaga

SEQ ID NO: 2153938 - RNA, 19 nt, Homo sapiens
  misc_RNA (1)...(19): siRNA sense strand
caacgcaguaaacagagua

SEQ ID NO: 2153939 - RNA, 19 nt, Homo sapiens
  misc_RNA (1)...(19): siRNA sense strand
aacagaagauuugcucuau

SEQ ID NO: 2153940 - RNA, 19 nt, Homo sapiens
  misc_RNA (1)...(19): siRNA sense strand
ggaaggaagaaguauccaa

SEQ ID NO: 2153941 - RNA, 19 nt, Homo sapiens
  misc_RNA (1)...(19): siRNA sense strand
gaucaaggucaguuccuau

SEQ ID NO: 2153942 - RNA, 19 nt, Homo sapiens
  misc_RNA (1)...(19): siRNA sense strand
ggggagugcugaucaacua

SEQ ID NO: 2153943 - RNA, 19 nt, Homo sapiens
  misc_RNA (1)...(19): siRNA sense strand
cuucugaccuuaugcucaa

SEQ ID NO: 2153944 - RNA, 19 nt, Homo sapiens
  misc_RNA (1)...(19): siRNA sense strand
ggagugcugaucaacuaaa

SEQ ID NO: 2153945 - RNA, 19 nt, Homo sapiens
  misc_RNA (1)...(19): siRNA sense strand
caacuacaacgcaguaaac

SEQ ID NO: 2153946 - RNA, 19 nt, Homo sapiens
  misc_RNA (1)...(19): siRNA sense strand
gcucagcuuuggcaacucu

SEQ ID NO: 2153947 - RNA, 19 nt, Homo sapiens
  misc_RNA (1)...(19): siRNA sense strand
ggcaaaaucucagcaaguu

SEQ ID NO: 2153948 - RNA, 19 nt, Homo sapiens
  misc_RNA (1)...(19): siRNA sense strand
aacaggaccuuaccucaca

SEQ ID NO: 2153949 - RNA, 19 nt, Homo sapiens
  misc_RNA (1)...(19): siRNA sense strand
agaguagucgucacaguaa

SEQ ID NO: 2153950 - RNA, 19 nt, Homo sapiens
  misc_RNA (1)...(19): siRNA sense strand
aaacagaguagucgucaca

SEQ ID NO: 2153951 - RNA, 19 nt, Homo sapiens
  misc_RNA (1)...(19): siRNA sense strand
cagcaacuacaacgcagua

SEQ ID NO: 2153952 - RNA, 19 nt, Homo sapiens
  misc_RNA (1)...(19): siRNA sense strand
gccacgggauccucauguu

SEQ ID NO: 2153953 - RNA, 19 nt, Homo sapiens
  misc_RNA (1)...(19): siRNA sense strand
uaaugggaaggaagaagua

SEQ ID NO: 2153954 - RNA, 19 nt, Homo sapiens
  misc_RNA (1)...(19): siRNA sense strand
ugaaagacaaagcuacuca

SEQ ID NO: 2153955 - RNA, 19 nt, Homo sapiens
  misc_RNA (1)...(19): siRNA sense strand
ucagaacuaugugaucauc

SEQ ID NO: 2153956 - RNA, 19 nt, Homo sapiens
  misc_RNA (1)...(19): siRNA sense strand
gcagaagagggugcagaaa

SEQ ID NO: 2153957 - RNA, 19 nt, Homo sapiens
  misc_RNA (1)...(19): siRNA sense strand
gcaaccauauaacaaucag

SEQ ID NO: 2153958 - RNA, 19 nt, Homo sapiens
  misc_RNA (1)...(19): siRNA sense strand
gaugugagcgagugaaggu

SEQ ID NO: 2153959 - RNA, 19 nt, Homo sapiens
  misc_RNA (1)...(19): siRNA sense strand
ccaaaccaaacaacagcua

SEQ ID NO: 2153960 - RNA, 19 nt, Homo sapiens
  misc_RNA (1)...(19): siRNA sense strand
acagaagauuugcucuaug

SEQ ID NO: 2153961 - RNA, 19 nt, Homo sapiens
  misc_RNA (1)...(19): siRNA sense strand
uaaggcgaaccuccucuuu

SEQ ID NO: 2153962 - RNA, 19 nt, Homo sapiens
  misc_RNA (1)...(19): siRNA sense strand
cgugugcccugcaauguag

SEQ ID NO: 2153963 - RNA, 19 nt, Homo sapiens
  misc_RNA (1)...(19): siRNA sense strand
aaagacaaagcuacucaga

SEQ ID NO: 2153964 - RNA, 19 nt, Homo sapiens
  misc_RNA (1)...(19): siRNA sense strand
cuucaucucccaaaccaaa

SEQ ID NO: 2153965 - RNA, 19 nt, Homo sapiens
  misc_RNA (1)...(19): siRNA sense strand
gcgugugcccugcaaugua

SEQ ID NO: 2153966 - RNA, 19 nt, Homo sapiens
  misc_RNA (1)...(19): siRNA sense strand
gugccaaaaucaucuguuu

SEQ ID NO: 2153967 - RNA, 19 nt, Homo sapiens
  misc_RNA (1)...(19): siRNA sense strand
uaacaaucagucacacuca

SEQ ID NO: 2153968 - RNA, 19 nt, Homo sapiens
  misc_RNA (1)...(19): siRNA sense strand
aaacugaggcagcaacuac

SEQ ID NO: 2153969 - RNA, 19 nt, Homo sapiens
  misc_RNA (1)...(19): siRNA sense strand
gaaccuccucuuuggauac

SEQ ID NO: 2153970 - RNA, 19 nt, Homo sapiens
  misc_RNA (1)...(19): siRNA sense strand
gggauccucauguucacua

SEQ ID NO: 2153971 - RNA, 19 nt, Homo sapiens
  misc_RNA (1)...(19): siRNA sense strand
gcgaaccuccucuuuggau

SEQ ID NO: 2153972 - RNA, 19 nt, Homo sapiens
  misc_RNA (1)...(19): siRNA sense strand
ugaaggucuuugaggaaau

SEQ ID NO: 2153973 - RNA, 19 nt, Homo sapiens
  misc_RNA (1)...(19): siRNA sense strand
aggcgaaccuccucuuugg

SEQ ID NO: 2153974 - RNA, 19 nt, Homo sapiens
  misc_RNA (1)...(19): siRNA sense strand
ggcagaagagggugcagaa

SEQ ID NO: 2153975 - RNA, 19 nt, Homo sapiens
  misc_RNA (1)...(19): siRNA sense strand
aagagcagaucgccaaacu

SEQ ID NO: 2153976 - RNA, 19 nt, Homo sapiens
  misc_RNA (1)...(19): siRNA sense strand
guaguacucgcagcauuga

SEQ ID NO: 2153977 - RNA, 19 nt, Homo sapiens
  misc_RNA (1)...(19): siRNA sense strand
cauauaacaaucagucaca

SEQ ID NO: 2153978 - RNA, 19 nt, Homo sapiens
  misc_RNA (1)...(19): siRNA sense strand
uggcaaccauauaacaauc

SEQ ID NO: 2153979 - RNA, 19 nt, Homo sapiens
  misc_RNA (1)...(19): siRNA sense strand
ggaccucuaguacaauaag

SEQ ID NO: 2153980 - RNA, 19 nt, Homo sapiens
  misc_RNA (1)...(19): siRNA sense strand
gaccuuaugcucaagaacu

SEQ ID NO: 2153981 - RNA, 19 nt, Homo sapiens
  misc_RNA (1)...(19): siRNA sense strand
uuaccugcuucugaccuua

SEQ ID NO: 2153982 - RNA, 19 nt, Homo sapiens
  misc_RNA (1)...(19): siRNA sense strand
cagcucucaucccggguuu

SEQ ID NO: 2153983 - RNA, 19 nt, Homo sapiens
  misc_RNA (1)...(19): siRNA sense strand
cauguucacuacccuucau

SEQ ID NO: 2153984 - RNA, 19 nt, Homo sapiens
  misc_RNA (1)...(19): siRNA sense strand
cauuaccggagcaguagua

SEQ ID NO: 2153985 - RNA, 19 nt, Homo sapiens
  misc_RNA (1)...(19): siRNA sense strand
caaauauaucagugccaaa

SEQ ID NO: 2153986 - RNA, 19 nt, Homo sapiens
  misc_RNA (1)...(19): siRNA sense strand
cagaagagggugcagaaaa

SEQ ID NO: 2153987 - RNA, 19 nt, Homo sapiens
  misc_RNA (1)...(19): siRNA sense strand
guccaggagcgcagcagua

SEQ ID NO: 2153988 - RNA, 19 nt, Homo sapiens
  misc_RNA (1)...(19): siRNA sense strand
caaacugaggcagcaacua

SEQ ID NO: 2153989 - RNA, 19 nt, Homo sapiens
  misc_RNA (1)...(19): siRNA sense strand
gaguagucgucacaguaag

SEQ ID NO: 2153990 - RNA, 19 nt, Homo sapiens
  misc_RNA (1)...(19): siRNA sense strand
ccacgggauccucauguuc

SEQ ID NO: 2153991 - RNA, 19 nt, Homo sapiens
  misc_RNA (1)...(19): siRNA sense strand
augccacugucaaauauau

SEQ ID NO: 2153992 - RNA, 19 nt, Homo sapiens
  misc_RNA (1)...(19): siRNA sense strand
gggagugcugaucaacuaa

SEQ ID NO: 2153993 - RNA, 19 nt, Homo sapiens
  misc_RNA (1)...(19): siRNA sense strand
caucccggguuuccuuuac

SEQ ID NO: 2153994 - RNA, 19 nt, Homo sapiens
  misc_RNA (1)...(19): siRNA sense strand
ugguagcccuugcucaaca

SEQ ID NO: 2153995 - RNA, 19 nt, Homo sapiens
  misc_RNA (1)...(19): siRNA sense strand
acagaguagucgucacagu

SEQ ID NO: 2153996 - RNA, 19 nt, Homo sapiens
  misc_RNA (1)...(19): siRNA sense strand
cagcaaguucggaccucua

SEQ ID NO: 2153997 - RNA, 19 nt, Homo sapiens
  misc_RNA (1)...(19): siRNA sense strand
ggaauucgcuguccaaaua

SEQ ID NO: 2153998 - RNA, 19 nt, Homo sapiens
  misc_RNA (1)...(19): siRNA sense strand
gaacauuucuuguguagua

SEQ ID NO: 2153999 - RNA, 19 nt, Homo sapiens
  misc_RNA (1)...(19): siRNA sense strand
ggacuacacugcauacuaa

SEQ ID NO: 2154000 - RNA, 19 nt, Homo sapiens
  misc_RNA (1)...(19): siRNA sense strand
gagaagaacuggcagauga

SEQ ID NO: 2154001 - RNA, 19 nt, Homo sapiens
  misc_RNA (1)...(19): siRNA sense strand
ggacagugcuaugaauaua

SEQ ID NO: 2154002 - RNA, 19 nt, Homo sapiens
  misc_RNA (1)...(19): siRNA sense strand
gaacaaauauugggacauc

SEQ ID NO: 2154003 - RNA, 19 nt, Homo sapiens
  misc_RNA (1)...(19): siRNA sense strand
gugaagagccugccuguua

SEQ ID NO: 2154004 - RNA, 19 nt, Homo sapiens
  misc_RNA (1)...(19): siRNA sense strand
ggaauucugugcugacauu

SEQ ID NO: 2154005 - RNA, 19 nt, Homo sapiens
  misc_RNA (1)...(19): siRNA sense strand
caacagugauggagaagaa

SEQ ID NO: 2154006 - RNA, 19 nt, Homo sapiens
  misc_RNA (1)...(19): siRNA sense strand
ggaaggaccugguuucuac

SEQ ID NO: 2154007 - RNA, 19 nt, Homo sapiens
  misc_RNA (1)...(19): siRNA sense strand
ggggaaagcugcugauuua

SEQ ID NO: 2154008 - RNA, 19 nt, Homo sapiens
  misc_RNA (1)...(19): siRNA sense strand
ggaccuaucccuaauacua

SEQ ID NO: 2154009 - RNA, 19 nt, Homo sapiens
  misc_RNA (1)...(19): siRNA sense strand
gcagaauuguuucaaaguu

SEQ ID NO: 2154010 - RNA, 19 nt, Homo sapiens
  misc_RNA (1)...(19): siRNA sense strand
gagaagaaguugacagaca

SEQ ID NO: 2154011 - RNA, 19 nt, Homo sapiens
  misc_RNA (1)...(19): siRNA sense strand
acugaaaccuuuaaccuua

SEQ ID NO: 2154012 - RNA, 19 nt, Homo sapiens
  misc_RNA (1)...(19): siRNA sense strand
gacaagagaacaaauauug

SEQ ID NO: 2154013 - RNA, 19 nt, Homo sapiens
  misc_RNA (1)...(19): siRNA sense strand
caagagaagcuuccaauga

SEQ ID NO: 2154014 - RNA, 19 nt, Homo sapiens
  misc_RNA (1)...(19): siRNA sense strand
gaacaaagaagccucaaag

SEQ ID NO: 2154015 - RNA, 19 nt, Homo sapiens
  misc_RNA (1)...(19): siRNA sense strand
gaaggcaguuuguggaaau

SEQ ID NO: 2154016 - RNA, 19 nt, Homo sapiens
  misc_RNA (1)...(19): siRNA sense strand
ccaggugacuguuauuuga

SEQ ID NO: 2154017 - RNA, 19 nt, Homo sapiens
  misc_RNA (1)...(19): siRNA sense strand
gaacagacaagagaacaaa

SEQ ID NO: 2154018 - RNA, 19 nt, Homo sapiens
  misc_RNA (1)...(19): siRNA sense strand
gaagaaggguacacugaag

SEQ ID NO: 2154019 - RNA, 19 nt, Homo sapiens
  misc_RNA (1)...(19): siRNA sense strand
gaucuaggcuuugguggaa

SEQ ID NO: 2154020 - RNA, 19 nt, Homo sapiens
  misc_RNA (1)...(19): siRNA sense strand
caguugaccugaaauauug

SEQ ID NO: 2154021 - RNA, 19 nt, Homo sapiens
  misc_RNA (1)...(19): siRNA sense strand
gcacuggaccuaucccuaa

SEQ ID NO: 2154022 - RNA, 19 nt, Homo sapiens
  misc_RNA (1)...(19): siRNA sense strand
aaaggaguguccagaauuu

SEQ ID NO: 2154023 - RNA, 19 nt, Homo sapiens
  misc_RNA (1)...(19): siRNA sense strand
caaagccaauggacuuaaa

SEQ ID NO: 2154024 - RNA, 19 nt, Homo sapiens
  misc_RNA (1)...(19): siRNA sense strand
aagaaggacuguauuguga

SEQ ID NO: 2154025 - RNA, 19 nt, Homo sapiens
  misc_RNA (1)...(19): siRNA sense strand
caaagcaguuuccggcaaa

SEQ ID NO: 2154026 - RNA, 19 nt, Homo sapiens
  misc_RNA (1)...(19): siRNA sense strand
gaacuggucagacuguauu

SEQ ID NO: 2154027 - RNA, 19 nt, Homo sapiens
  misc_RNA (1)...(19): siRNA sense strand
gaaagcugcugauuuaagc

SEQ ID NO: 2154028 - RNA, 19 nt, Homo sapiens
  misc_RNA (1)...(19): siRNA sense strand
gcacagauccccucuauga

SEQ ID NO: 2154029 - RNA, 19 nt, Homo sapiens
  misc_RNA (1)...(19): siRNA sense strand
uacaagaacuagagaauca

SEQ ID NO: 2154030 - RNA, 19 nt, Homo sapiens
  misc_RNA (1)...(19): siRNA sense strand
gaagggaccagaacaagga

SEQ ID NO: 2154031 - RNA, 19 nt, Homo sapiens
  misc_RNA (1)...(19): siRNA sense strand
ggaaugcccugugaacugu

SEQ ID NO: 2154032 - RNA, 19 nt, Homo sapiens
  misc_RNA (1)...(19): siRNA sense strand
gaaguacgaagcuguaaug

SEQ ID NO: 2154033 - RNA, 19 nt, Homo sapiens
  misc_RNA (1)...(19): siRNA sense strand
gaagguucguucuaaaugg

SEQ ID NO: 2154034 - RNA, 19 nt, Homo sapiens
  misc_RNA (1)...(19): siRNA sense strand
guacaugucagcugaguga

SEQ ID NO: 2154035 - RNA, 19 nt, Homo sapiens
  misc_RNA (1)...(19): siRNA sense strand
ccagaaagacaaagacauu

SEQ ID NO: 2154036 - RNA, 19 nt, Homo sapiens
  misc_RNA (1)...(19): siRNA sense strand
ugucaaaggucagauggua

SEQ ID NO: 2154037 - RNA, 19 nt, Homo sapiens
  misc_RNA (1)...(19): siRNA sense strand
ccugugaacugucagcuuu

SEQ ID NO: 2154038 - RNA, 19 nt, Homo sapiens
  misc_RNA (1)...(19): siRNA sense strand
cuaaugcuguugagaaaga

SEQ ID NO: 2154039 - RNA, 19 nt, Homo sapiens
  misc_RNA (1)...(19): siRNA sense strand
ccagagagguuaugugcau

SEQ ID NO: 2154040 - RNA, 19 nt, Homo sapiens
  misc_RNA (1)...(19): siRNA sense strand
guccaaaccugacggaguu

SEQ ID NO: 2154041 - RNA, 19 nt, Homo sapiens
  misc_RNA (1)...(19): siRNA sense strand
gaaaguacaaggagacauc

SEQ ID NO: 2154042 - RNA, 19 nt, Homo sapiens
  misc_RNA (1)...(19): siRNA sense strand
caacccaacccuccaguaa

SEQ ID NO: 2154043 - RNA, 19 nt, Homo sapiens
  misc_RNA (1)...(19): siRNA sense strand
cggaggauaucaucuguga

SEQ ID NO: 2154044 - RNA, 19 nt, Homo sapiens
  misc_RNA (1)...(19): siRNA sense strand
ucaaaggucagaugguaua

SEQ ID NO: 2154045 - RNA, 19 nt, Homo sapiens
  misc_RNA (1)...(19): siRNA sense strand
ggaagaucuugcccuaaug

SEQ ID NO: 2154046 - RNA, 19 nt, Homo sapiens
  misc_RNA (1)...(19): siRNA sense strand
ugaagagccugccuguuau

SEQ ID NO: 2154047 - RNA, 19 nt, Homo sapiens
  misc_RNA (1)...(19): siRNA sense strand
gaaaaggaguguccagaau

SEQ ID NO: 2154048 - RNA, 19 nt, Homo sapiens
  misc_RNA (1)...(19): siRNA sense strand
uaucaucugugaguacuuu

SEQ ID NO: 2154049 - RNA, 19 nt, Homo sapiens
  misc_RNA (1)...(19): siRNA sense strand
cugaacauguagaggauua

SEQ ID NO: 2154050 - RNA, 19 nt, Homo sapiens
  misc_RNA (1)...(19): siRNA sense strand
ggaaugcggacaaggauau

SEQ ID NO: 2154051 - RNA, 19 nt, Homo sapiens
  misc_RNA (1)...(19): siRNA sense strand
aaacugcccucacuuacug

SEQ ID NO: 2154052 - RNA, 19 nt, Homo sapiens
  misc_RNA (1)...(19): siRNA sense strand
gagagguuaugugcauuaa

SEQ ID NO: 2154053 - RNA, 19 nt, Homo sapiens
  misc_RNA (1)...(19): siRNA sense strand
cuugagcaaugcacacuua

SEQ ID NO: 2154054 - RNA, 19 nt, Homo sapiens
  misc_RNA (1)...(19): siRNA sense strand
gcgcuuggcuuggagaaga

SEQ ID NO: 2154055 - RNA, 19 nt, Homo sapiens
  misc_RNA (1)...(19): siRNA sense strand
acaaccagcugaugaagga

SEQ ID NO: 2154056 - RNA, 19 nt, Homo sapiens
  misc_RNA (1)...(19): siRNA sense strand
gcucuagagugugcaaauu

SEQ ID NO: 2154057 - RNA, 19 nt, Homo sapiens
  misc_RNA (1)...(19): siRNA sense strand
gaaggggacuccaguauca

SEQ ID NO: 2154058 - RNA, 19 nt, Homo sapiens
  misc_RNA (1)...(19): siRNA sense strand
gagcauccuugcacagugu

SEQ ID NO: 2154059 - RNA, 19 nt, Homo sapiens
  misc_RNA (1)...(19): siRNA sense strand
ucaaggagauggaguuguc

SEQ ID NO: 2154060 - RNA, 19 nt, Homo sapiens
  misc_RNA (1)...(19): siRNA sense strand
gaaacaggcagaacagaca

SEQ ID NO: 2154061 - RNA, 19 nt, Homo sapiens
  misc_RNA (1)...(19): siRNA sense strand
ggucagaugguauaaaugu

SEQ ID NO: 2154062 - RNA, 19 nt, Homo sapiens
  misc_RNA (1)...(19): siRNA sense strand
cgaacaguguggugucaaa

SEQ ID NO: 2154063 - RNA, 19 nt, Homo sapiens
  misc_RNA (1)...(19): siRNA sense strand
guaacagacuggaguacau

SEQ ID NO: 2154064 - RNA, 19 nt, Homo sapiens
  misc_RNA (1)...(19): siRNA sense strand
acaaggauaucguuaccaa

SEQ ID NO: 2154065 - RNA, 19 nt, Homo sapiens
  misc_RNA (1)...(19): siRNA sense strand
gauacgagcacgauccauu

SEQ ID NO: 2154066 - RNA, 19 nt, Homo sapiens
  misc_RNA (1)...(19): siRNA sense strand
gacagaagggaaacagaua

SEQ ID NO: 2154067 - RNA, 19 nt, Homo sapiens
  misc_RNA (1)...(19): siRNA sense strand
ggaaagcugcugauuuaag

SEQ ID NO: 2154068 - RNA, 19 nt, Homo sapiens
  misc_RNA (1)...(19): siRNA sense strand
gaccuggguuuacggugua

SEQ ID NO: 2154069 - RNA, 19 nt, Homo sapiens
  misc_RNA (1)...(19): siRNA sense strand
gauggacagugcuaugaau

SEQ ID NO: 2154070 - RNA, 19 nt, Homo sapiens
  misc_RNA (1)...(19): siRNA sense strand
gaccggugauuauacaaga

SEQ ID NO: 2154071 - RNA, 19 nt, Homo sapiens
  misc_RNA (1)...(19): siRNA sense strand
gauguuggauuguguucga

SEQ ID NO: 2154072 - RNA, 19 nt, Homo sapiens
  misc_RNA (1)...(19): siRNA sense strand
caagaaguacgaagcugua

SEQ ID NO: 2154073 - RNA, 19 nt, Homo sapiens
  misc_RNA (1)...(19): siRNA sense strand
ggagacgcgggaagaauaa

SEQ ID NO: 2154074 - RNA, 19 nt, Homo sapiens
  misc_RNA (1)...(19): siRNA sense strand
uaacagcacccuugagcaa

SEQ ID NO: 2154075 - RNA, 19 nt, Homo sapiens
  misc_RNA (1)...(19): siRNA sense strand
ccagcagaauuguuucaaa

SEQ ID NO: 2154076 - RNA, 19 nt, Homo sapiens
  misc_RNA (1)...(19): siRNA sense strand
cagcagaauuguuucaaag

SEQ ID NO: 2154077 - RNA, 19 nt, Homo sapiens
  misc_RNA (1)...(19): siRNA sense strand
gguggaagacucacaaaug

SEQ ID NO: 2154078 - RNA, 19 nt, Homo sapiens
  misc_RNA (1)...(19): siRNA sense strand
guaaggacacgaaccauca

SEQ ID NO: 2154079 - RNA, 19 nt, Homo sapiens
  misc_RNA (1)...(19): siRNA sense strand
gcccagagcagauguuaga

SEQ ID NO: 2154080 - RNA, 19 nt, Homo sapiens
  misc_RNA (1)...(19): siRNA sense strand
cagcugaccugugugaaug

SEQ ID NO: 2154081 - RNA, 19 nt, Homo sapiens
  misc_RNA (1)...(19): siRNA sense strand
agaaagcgcacucuuguug

SEQ ID NO: 2154082 - RNA, 19 nt, Homo sapiens
  misc_RNA (1)...(19): siRNA sense strand
guggaagacucacaaaugg

SEQ ID NO: 2154083 - RNA, 19 nt, Homo sapiens
  misc_RNA (1)...(19): siRNA sense strand
gccaauggacuuaaaauua

SEQ ID NO: 2154084 - RNA, 19 nt, Homo sapiens
  misc_RNA (1)...(19): siRNA sense strand
gcaaggagacgcgggaaga

SEQ ID NO: 2154085 - RNA, 19 nt, Homo sapiens
  misc_RNA (1)...(19): siRNA sense strand
ucagcaaagugguggauga

SEQ ID NO: 2154086 - RNA, 19 nt, Homo sapiens
  misc_RNA (1)...(19): siRNA sense strand
ggagaagggaccagaacaa

SEQ ID NO: 2154087 - RNA, 19 nt, Homo sapiens
  misc_RNA (1)...(19): siRNA sense strand
aaaccuccucucacaauua

SEQ ID NO: 2154088 - RNA, 19 nt, Homo sapiens
  misc_RNA (1)...(19): siRNA sense strand
cggaaacugcccucacuua

SEQ ID NO: 2154089 - RNA, 19 nt, Homo sapiens
  misc_RNA (1)...(19): siRNA sense strand
gaacucauuauagauggua

SEQ ID NO: 2154090 - RNA, 19 nt, Homo sapiens
  misc_RNA (1)...(19): siRNA sense strand
ugagaugcaugcagaauac

SEQ ID NO: 2154091 - RNA, 19 nt, Homo sapiens
  misc_RNA (1)...(19): siRNA sense strand
ggauaucguuaccaagcaa

SEQ ID NO: 2154092 - RNA, 19 nt, Homo sapiens
  misc_RNA (1)...(19): siRNA sense strand
gaaagccuucgaccugaaa

SEQ ID NO: 2154093 - RNA, 19 nt, Homo sapiens
  misc_RNA (1)...(19): siRNA sense strand
agacagcugugcagagaug

SEQ ID NO: 2154094 - RNA, 19 nt, Homo sapiens
  misc_RNA (1)...(19): siRNA sense strand
gaccugaaauauugugaag

SEQ ID NO: 2154095 - RNA, 19 nt, Homo sapiens
  misc_RNA (1)...(19): siRNA sense strand
ugauggagaugccgacaug

SEQ ID NO: 2154096 - RNA, 19 nt, Homo sapiens
  misc_RNA (1)...(19): siRNA sense strand
gcauuuguguuacucaucu

SEQ ID NO: 2154097 - RNA, 19 nt, Homo sapiens
  misc_RNA (1)...(19): siRNA sense strand
ggaauucgcuguccaaaua

SEQ ID NO: 2154098 - RNA, 19 nt, Homo sapiens
  misc_RNA (1)...(19): siRNA sense strand
gaacauuucuuguguagua

SEQ ID NO: 2154099 - RNA, 19 nt, Homo sapiens
  misc_RNA (1)...(19): siRNA sense strand
ggacuacacugcauacuaa

SEQ ID NO: 2154100 - RNA, 19 nt, Homo sapiens
  misc_RNA (1)...(19): siRNA sense strand
gagaagaacuggcagauga

SEQ ID NO: 2154101 - RNA, 19 nt, Homo sapiens
  misc_RNA (1)...(19): siRNA sense strand
ggacagugcuaugaauaua

SEQ ID NO: 2154102 - RNA, 19 nt, Homo sapiens
  misc_RNA (1)...(19): siRNA sense strand
gaacaaauauugggacauc

SEQ ID NO: 2154103 - RNA, 19 nt, Homo sapiens
  misc_RNA (1)...(19): siRNA sense strand
gugaagagccugccuguua

SEQ ID NO: 2154104 - RNA, 19 nt, Homo sapiens
  misc_RNA (1)...(19): siRNA sense strand
ggaauucugugcugacauu

SEQ ID NO: 2154105 - RNA, 19 nt, Homo sapiens
  misc_RNA (1)...(19): siRNA sense strand
caacagugauggagaagaa

SEQ ID NO: 2154106 - RNA, 19 nt, Homo sapiens
  misc_RNA (1)...(19): siRNA sense strand
ggaaggaccugguuucuac

SEQ ID NO: 2154107 - RNA, 19 nt, Homo sapiens
  misc_RNA (1)...(19): siRNA sense strand
ggggaaagcugcugauuua

SEQ ID NO: 2154108 - RNA, 19 nt, Homo sapiens
  misc_RNA (1)...(19): siRNA sense strand
ggaccuaucccuaauacua

SEQ ID NO: 2154109 - RNA, 19 nt, Homo sapiens
  misc_RNA (1)...(19): siRNA sense strand
gcagaauuguuucaaaguu

SEQ ID NO: 2154110 - RNA, 19 nt, Homo sapiens
  misc_RNA (1)...(19): siRNA sense strand
gagaagaaguugacagaca

SEQ ID NO: 2154111 - RNA, 19 nt, Homo sapiens
  misc_RNA (1)...(19): siRNA sense strand
acugaaaccuuuaaccuua

SEQ ID NO: 2154112 - RNA, 19 nt, Homo sapiens
  misc_RNA (1)...(19): siRNA sense strand
gacaagagaacaaauauug

SEQ ID NO: 2154113 - RNA, 19 nt, Homo sapiens
  misc_RNA (1)...(19): siRNA sense strand
caagagaagcuuccaauga

SEQ ID NO: 2154114 - RNA, 19 nt, Homo sapiens
  misc_RNA (1)...(19): siRNA sense strand
gaacaaagaagccucaaag

SEQ ID NO: 2154115 - RNA, 19 nt, Homo sapiens
  misc_RNA (1)...(19): siRNA sense strand
gaaggcaguuuguggaaau

SEQ ID NO: 2154116 - RNA, 19 nt, Homo sapiens
  misc_RNA (1)...(19): siRNA sense strand
ccaggugacuguuauuuga

SEQ ID NO: 2154117 - RNA, 19 nt, Homo sapiens
  misc_RNA (1)...(19): siRNA sense strand
gaacagacaagagaacaaa

SEQ ID NO: 2154118 - RNA, 19 nt, Homo sapiens
  misc_RNA (1)...(19): siRNA sense strand
gaagaaggguacacugaag

SEQ ID NO: 2154119 - RNA, 19 nt, Homo sapiens
  misc_RNA (1)...(19): siRNA sense strand
gaucuaggcuuugguggaa

SEQ ID NO: 2154120 - RNA, 19 nt, Homo sapiens
  misc_RNA (1)...(19): siRNA sense strand
caguugaccugaaauauug

SEQ ID NO: 2154121 - RNA, 19 nt, Homo sapiens
  misc_RNA (1)...(19): siRNA sense strand
gcacuggaccuaucccuaa

SEQ ID NO: 2154122 - RNA, 19 nt, Homo sapiens
  misc_RNA (1)...(19): siRNA sense strand
aaaggaguguccagaauuu

SEQ ID NO: 2154123 - RNA, 19 nt, Homo sapiens
  misc_RNA (1)...(19): siRNA sense strand
caaagccaauggacuuaaa

SEQ ID NO: 2154124 - RNA, 19 nt, Homo sapiens
  misc_RNA (1)...(19): siRNA sense strand
aagaaggacuguauuguga

SEQ ID NO: 2154125 - RNA, 19 nt, Homo sapiens
  misc_RNA (1)...(19): siRNA sense strand
caaagcaguuuccggcaaa

SEQ ID NO: 2154126 - RNA, 19 nt, Homo sapiens
  misc_RNA (1)...(19): siRNA sense strand
gaacuggucagacuguauu

SEQ ID NO: 2154127 - RNA, 19 nt, Homo sapiens
  misc_RNA (1)...(19): siRNA sense strand
gaaagcugcugauuuaagc

SEQ ID NO: 2154128 - RNA, 19 nt, Homo sapiens
  misc_RNA (1)...(19): siRNA sense strand
gcacagauccccucuauga

SEQ ID NO: 2154129 - RNA, 19 nt, Homo sapiens
  misc_RNA (1)...(19): siRNA sense strand
uacaagaacuagagaauca

SEQ ID NO: 2154130 - RNA, 19 nt, Homo sapiens
  misc_RNA (1)...(19): siRNA sense strand
gaagggaccagaacaagga

SEQ ID NO: 2154131 - RNA, 19 nt, Homo sapiens
  misc_RNA (1)...(19): siRNA sense strand
ggaaugcccugugaacugu

SEQ ID NO: 2154132 - RNA, 19 nt, Homo sapiens
  misc_RNA (1)...(19): siRNA sense strand
gaaguacgaagcuguaaug

SEQ ID NO: 2154133 - RNA, 19 nt, Homo sapiens
  misc_RNA (1)...(19): siRNA sense strand
gaagguucguucuaaaugg

SEQ ID NO: 2154134 - RNA, 19 nt, Homo sapiens
  misc_RNA (1)...(19): siRNA sense strand
guacaugucagcugaguga

SEQ ID NO: 2154135 - RNA, 19 nt, Homo sapiens
  misc_RNA (1)...(19): siRNA sense strand
ccagaaagacaaagacauu

SEQ ID NO: 2154136 - RNA, 19 nt, Homo sapiens
  misc_RNA (1)...(19): siRNA sense strand
ugucaaaggucagauggua

SEQ ID NO: 2154137 - RNA, 19 nt, Homo sapiens
  misc_RNA (1)...(19): siRNA sense strand
ccugugaacugucagcuuu

SEQ ID NO: 2154138 - RNA, 19 nt, Homo sapiens
  misc_RNA (1)...(19): siRNA sense strand
cuaaugcuguugagaaaga

SEQ ID NO: 2154139 - RNA, 19 nt, Homo sapiens
  misc_RNA (1)...(19): siRNA sense strand
ccagagagguuaugugcau

SEQ ID NO: 2154140 - RNA, 19 nt, Homo sapiens
  misc_RNA (1)...(19): siRNA sense strand
guccaaaccugacggaguu

SEQ ID NO: 2154141 - RNA, 19 nt, Homo sapiens
  misc_RNA (1)...(19): siRNA sense strand
gaaaguacaaggagacauc

SEQ ID NO: 2154142 - RNA, 19 nt, Homo sapiens
  misc_RNA (1)...(19): siRNA sense strand
caacccaacccuccaguaa

SEQ ID NO: 2154143 - RNA, 19 nt, Homo sapiens
  misc_RNA (1)...(19): siRNA sense strand
cggaggauaucaucuguga

SEQ ID NO: 2154144 - RNA, 19 nt, Homo sapiens
  misc_RNA (1)...(19): siRNA sense strand
ucaaaggucagaugguaua

SEQ ID NO: 2154145 - RNA, 19 nt, Homo sapiens
  misc_RNA (1)...(19): siRNA sense strand
ggaagaucuugcccuaaug

SEQ ID NO: 2154146 - RNA, 19 nt, Homo sapiens
  misc_RNA (1)...(19): siRNA sense strand
ugaagagccugccuguuau

SEQ ID NO: 2154147 - RNA, 19 nt, Homo sapiens
  misc_RNA (1)...(19): siRNA sense strand
gaaaaggaguguccagaau

SEQ ID NO: 2154148 - RNA, 19 nt, Homo sapiens
  misc_RNA (1)...(19): siRNA sense strand
uaucaucugugaguacuuu

SEQ ID NO: 2154149 - RNA, 19 nt, Homo sapiens
  misc_RNA (1)...(19): siRNA sense strand
cugaacauguagaggauua

SEQ ID NO: 2154150 - RNA, 19 nt, Homo sapiens
  misc_RNA (1)...(19): siRNA sense strand
ggaaugcggacaaggauau

SEQ ID NO: 2154151 - RNA, 19 nt, Homo sapiens
  misc_RNA (1)...(19): siRNA sense strand
aaacugcccucacuuacug

SEQ ID NO: 2154152 - RNA, 19 nt, Homo sapiens
  misc_RNA (1)...(19): siRNA sense strand
gagagguuaugugcauuaa

SEQ ID NO: 2154153 - RNA, 19 nt, Homo sapiens
  misc_RNA (1)...(19): siRNA sense strand
cuugagcaaugcacacuua

SEQ ID NO: 2154154 - RNA, 19 nt, Homo sapiens
  misc_RNA (1)...(19): siRNA sense strand
gcgcuuggcuuggagaaga

SEQ ID NO: 2154155 - RNA, 19 nt, Homo sapiens
  misc_RNA (1)...(19): siRNA sense strand
acaaccagcugaugaagga

SEQ ID NO: 2154156 - RNA, 19 nt, Homo sapiens
  misc_RNA (1)...(19): siRNA sense strand
gcucuagagugugcaaauu

SEQ ID NO: 2154157 - RNA, 19 nt, Homo sapiens
  misc_RNA (1)...(19): siRNA sense strand
gaaggggacuccaguauca

SEQ ID NO: 2154158 - RNA, 19 nt, Homo sapiens
  misc_RNA (1)...(19): siRNA sense strand
gagcauccuugcacagugu

SEQ ID NO: 2154159 - RNA, 19 nt, Homo sapiens
  misc_RNA (1)...(19): siRNA sense strand
ucaaggagauggaguuguc

SEQ ID NO: 2154160 - RNA, 19 nt, Homo sapiens
  misc_RNA (1)...(19): siRNA sense strand
gaaacaggcagaacagaca

SEQ ID NO: 2154161 - RNA, 19 nt, Homo sapiens
  misc_RNA (1)...(19): siRNA sense strand
ggucagaugguauaaaugu

SEQ ID NO: 2154162 - RNA, 19 nt, Homo sapiens
  misc_RNA (1)...(19): siRNA sense strand
cgaacaguguggugucaaa

SEQ ID NO: 2154163 - RNA, 19 nt, Homo sapiens
  misc_RNA (1)...(19): siRNA sense strand
guaacagacuggaguacau

SEQ ID NO: 2154164 - RNA, 19 nt, Homo sapiens
  misc_RNA (1)...(19): siRNA sense strand
acaaggauaucguuaccaa

SEQ ID NO: 2154165 - RNA, 19 nt, Homo sapiens
  misc_RNA (1)...(19): siRNA sense strand
gauacgagcacgauccauu

SEQ ID NO: 2154166 - RNA, 19 nt, Homo sapiens
  misc_RNA (1)...(19): siRNA sense strand
gacagaagggaaacagaua

SEQ ID NO: 2154167 - RNA, 19 nt, Homo sapiens
  misc_RNA (1)...(19): siRNA sense strand
ggaaagcugcugauuuaag

SEQ ID NO: 2154168 - RNA, 19 nt, Homo sapiens
  misc_RNA (1)...(19): siRNA sense strand
gaccuggguuuacggugua

SEQ ID NO: 2154169 - RNA, 19 nt, Homo sapiens
  misc_RNA (1)...(19): siRNA sense strand
gauggacagugcuaugaau

SEQ ID NO: 2154170 - RNA, 19 nt, Homo sapiens
  misc_RNA (1)...(19): siRNA sense strand
gaccggugauuauacaaga

SEQ ID NO: 2154171 - RNA, 19 nt, Homo sapiens
  misc_RNA (1)...(19): siRNA sense strand
gauguuggauuguguucga

SEQ ID NO: 2154172 - RNA, 19 nt, Homo sapiens
  misc_RNA (1)...(19): siRNA sense strand
caagaaguacgaagcugua

SEQ ID NO: 2154173 - RNA, 19 nt, Homo sapiens
  misc_RNA (1)...(19): siRNA sense strand
ggagacgcgggaagaauaa

SEQ ID NO: 2154174 - RNA, 19 nt, Homo sapiens
  misc_RNA (1)...(19): siRNA sense strand
uaacagcacccuugagcaa

SEQ ID NO: 2154175 - RNA, 19 nt, Homo sapiens
  misc_RNA (1)...(19): siRNA sense strand
ccagcagaauuguuucaaa

SEQ ID NO: 2154176 - RNA, 19 nt, Homo sapiens
  misc_RNA (1)...(19): siRNA sense strand
cagcagaauuguuucaaag

SEQ ID NO: 2154177 - RNA, 19 nt, Homo sapiens
  misc_RNA (1)...(19): siRNA sense strand
gguggaagacucacaaaug

SEQ ID NO: 2154178 - RNA, 19 nt, Homo sapiens
  misc_RNA (1)...(19): siRNA sense strand
guaaggacacgaaccauca

SEQ ID NO: 2154179 - RNA, 19 nt, Homo sapiens
  misc_RNA (1)...(19): siRNA sense strand
gcccagagcagauguuaga

SEQ ID NO: 2154180 - RNA, 19 nt, Homo sapiens
  misc_RNA (1)...(19): siRNA sense strand
cagcugaccugugugaaug

SEQ ID NO: 2154181 - RNA, 19 nt, Homo sapiens
  misc_RNA (1)...(19): siRNA sense strand
agaaagcgcacucuuguug

SEQ ID NO: 2154182 - RNA, 19 nt, Homo sapiens
  misc_RNA (1)...(19): siRNA sense strand
guggaagacucacaaaugg

SEQ ID NO: 2154183 - RNA, 19 nt, Homo sapiens
  misc_RNA (1)...(19): siRNA sense strand
gccaauggacuuaaaauua

SEQ ID NO: 2154184 - RNA, 19 nt, Homo sapiens
  misc_RNA (1)...(19): siRNA sense strand
gcaaggagacgcgggaaga

SEQ ID NO: 2154185 - RNA, 19 nt, Homo sapiens
  misc_RNA (1)...(19): siRNA sense strand
ucagcaaagugguggauga

SEQ ID NO: 2154186 - RNA, 19 nt, Homo sapiens
  misc_RNA (1)...(19): siRNA sense strand
ggagaagggaccagaacaa

SEQ ID NO: 2154187 - RNA, 19 nt, Homo sapiens
  misc_RNA (1)...(19): siRNA sense strand
aaaccuccucucacaauua

SEQ ID NO: 2154188 - RNA, 19 nt, Homo sapiens
  misc_RNA (1)...(19): siRNA sense strand
cggaaacugcccucacuua

SEQ ID NO: 2154189 - RNA, 19 nt, Homo sapiens
  misc_RNA (1)...(19): siRNA sense strand
gaacucauuauagauggua

SEQ ID NO: 2154190 - RNA, 19 nt, Homo sapiens
  misc_RNA (1)...(19): siRNA sense strand
ugagaugcaugcagaauac

SEQ ID NO: 2154191 - RNA, 19 nt, Homo sapiens
  misc_RNA (1)...(19): siRNA sense strand
ggauaucguuaccaagcaa

SEQ ID NO: 2154192 - RNA, 19 nt, Homo sapiens
  misc_RNA (1)...(19): siRNA sense strand
gaaagccuucgaccugaaa

SEQ ID NO: 2154193 - RNA, 19 nt, Homo sapiens
  misc_RNA (1)...(19): siRNA sense strand
agacagcugugcagagaug

SEQ ID NO: 2154194 - RNA, 19 nt, Homo sapiens
  misc_RNA (1)...(19): siRNA sense strand
gaccugaaauauugugaag

SEQ ID NO: 2154195 - RNA, 19 nt, Homo sapiens
  misc_RNA (1)...(19): siRNA sense strand
ugauggagaugccgacaug

SEQ ID NO: 2154196 - RNA, 19 nt, Homo sapiens
  misc_RNA (1)...(19): siRNA sense strand
gcauuuguguuacucaucu

SEQ ID NO: 2154197 - RNA, 19 nt, Homo sapiens
  misc_RNA (1)...(19): siRNA sense strand
ugacauaacucaacuaaga

SEQ ID NO: 2154198 - RNA, 19 nt, Homo sapiens
  misc_RNA (1)...(19): siRNA sense strand
caccauagcuugcaaagua

SEQ ID NO: 2154199 - RNA, 19 nt, Homo sapiens
  misc_RNA (1)...(19): siRNA sense strand
ugacagaaaugguguguuu

SEQ ID NO: 2154200 - RNA, 19 nt, Homo sapiens
  misc_RNA (1)...(19): siRNA sense strand
caaggaaguuucuguauga

SEQ ID NO: 2154201 - RNA, 19 nt, Homo sapiens
  misc_RNA (1)...(19): siRNA sense strand
ggaagcaggugaaguaguu

SEQ ID NO: 2154202 - RNA, 19 nt, Homo sapiens
  misc_RNA (1)...(19): siRNA sense strand
gcacaguucucuaucacua

SEQ ID NO: 2154203 - RNA, 19 nt, Homo sapiens
  misc_RNA (1)...(19): siRNA sense strand
gagaugcacuuguuugauu

SEQ ID NO: 2154204 - RNA, 19 nt, Homo sapiens
  misc_RNA (1)...(19): siRNA sense strand
aaacauaucuccaguugug

SEQ ID NO: 2154205 - RNA, 19 nt, Homo sapiens
  misc_RNA (1)...(19): siRNA sense strand
gaaauaacaggaagagaaa

SEQ ID NO: 2154206 - RNA, 19 nt, Homo sapiens
  misc_RNA (1)...(19): siRNA sense strand
ggagaaaggaaagaaauua

SEQ ID NO: 2154207 - RNA, 19 nt, Homo sapiens
  misc_RNA (1)...(19): siRNA sense strand
aaucaagucugcuccuuua

SEQ ID NO: 2154208 - RNA, 19 nt, Homo sapiens
  misc_RNA (1)...(19): siRNA sense strand
gcacaugcccaucagagua

SEQ ID NO: 2154209 - RNA, 19 nt, Homo sapiens
  misc_RNA (1)...(19): siRNA sense strand
gaaagaaugguauguagga

SEQ ID NO: 2154210 - RNA, 19 nt, Homo sapiens
  misc_RNA (1)...(19): siRNA sense strand
ugacaagccacaagauuua

SEQ ID NO: 2154211 - RNA, 19 nt, Homo sapiens
  misc_RNA (1)...(19): siRNA sense strand
ggaagaauugcacaaagua

SEQ ID NO: 2154212 - RNA, 19 nt, Homo sapiens
  misc_RNA (1)...(19): siRNA sense strand
caggacagcuuacaauuuc

SEQ ID NO: 2154213 - RNA, 19 nt, Homo sapiens
  misc_RNA (1)...(19): siRNA sense strand
gguaauguaucuagugguu

SEQ ID NO: 2154214 - RNA, 19 nt, Homo sapiens
  misc_RNA (1)...(19): siRNA sense strand
uagcugauguccuggguua

SEQ ID NO: 2154215 - RNA, 19 nt, Homo sapiens
  misc_RNA (1)...(19): siRNA sense strand
ggaaaccugccuaugauuu

SEQ ID NO: 2154216 - RNA, 19 nt, Homo sapiens
  misc_RNA (1)...(19): siRNA sense strand
caaauuugauugacaugga

SEQ ID NO: 2154217 - RNA, 19 nt, Homo sapiens
  misc_RNA (1)...(19): siRNA sense strand
gacaaagcaagauugauua

SEQ ID NO: 2154218 - RNA, 19 nt, Homo sapiens
  misc_RNA (1)...(19): siRNA sense strand
acagagagaugcacuuguu

SEQ ID NO: 2154219 - RNA, 19 nt, Homo sapiens
  misc_RNA (1)...(19): siRNA sense strand
gaagcaaauuugauugaca

SEQ ID NO: 2154220 - RNA, 19 nt, Homo sapiens
  misc_RNA (1)...(19): siRNA sense strand
gauagugucuuuacaacca

SEQ ID NO: 2154221 - RNA, 19 nt, Homo sapiens
  misc_RNA (1)...(19): siRNA sense strand
caagauugauuacuuccuu

SEQ ID NO: 2154222 - RNA, 19 nt, Homo sapiens
  misc_RNA (1)...(19): siRNA sense strand
caaaguaaaccaucaagga

SEQ ID NO: 2154223 - RNA, 19 nt, Homo sapiens
  misc_RNA (1)...(19): siRNA sense strand
caagucugcuccuuuauca

SEQ ID NO: 2154224 - RNA, 19 nt, Homo sapiens
  misc_RNA (1)...(19): siRNA sense strand
gaaaucaagucugcuccuu

SEQ ID NO: 2154225 - RNA, 19 nt, Homo sapiens
  misc_RNA (1)...(19): siRNA sense strand
caaaggagcaaguaauguu

SEQ ID NO: 2154226 - RNA, 19 nt, Homo sapiens
  misc_RNA (1)...(19): siRNA sense strand
caaaguaugucugaagcaa

SEQ ID NO: 2154227 - RNA, 19 nt, Homo sapiens
  misc_RNA (1)...(19): siRNA sense strand
gccacaagauuuaaguauu

SEQ ID NO: 2154228 - RNA, 19 nt, Homo sapiens
  misc_RNA (1)...(19): siRNA sense strand
cagacuugcuucacaauug

SEQ ID NO: 2154229 - RNA, 19 nt, Homo sapiens
  misc_RNA (1)...(19): siRNA sense strand
gaagauugccacacagaga

SEQ ID NO: 2154230 - RNA, 19 nt, Homo sapiens
  misc_RNA (1)...(19): siRNA sense strand
gaaaauggauugccaagag

SEQ ID NO: 2154231 - RNA, 19 nt, Homo sapiens
  misc_RNA (1)...(19): siRNA sense strand
gcuaaucacugaaagaaaa

SEQ ID NO: 2154232 - RNA, 19 nt, Homo sapiens
  misc_RNA (1)...(19): siRNA sense strand
caaagaaucagagaaaguu

SEQ ID NO: 2154233 - RNA, 19 nt, Homo sapiens
  misc_RNA (1)...(19): siRNA sense strand
agacaaagaaucagagaaa

SEQ ID NO: 2154234 - RNA, 19 nt, Homo sapiens
  misc_RNA (1)...(19): siRNA sense strand
ugacuuauaucuacucagu

SEQ ID NO: 2154235 - RNA, 19 nt, Homo sapiens
  misc_RNA (1)...(19): siRNA sense strand
agacaaagcaagauugauu

SEQ ID NO: 2154236 - RNA, 19 nt, Homo sapiens
  misc_RNA (1)...(19): siRNA sense strand
gaucuuucgugcacuguga

SEQ ID NO: 2154237 - RNA, 19 nt, Homo sapiens
  misc_RNA (1)...(19): siRNA sense strand
aaaggaagauugccacaca

SEQ ID NO: 2154238 - RNA, 19 nt, Homo sapiens
  misc_RNA (1)...(19): siRNA sense strand
guaauaaugcuuccaaagu

SEQ ID NO: 2154239 - RNA, 19 nt, Homo sapiens
  misc_RNA (1)...(19): siRNA sense strand
gaaggagaaaggaaagaaa

SEQ ID NO: 2154240 - RNA, 19 nt, Homo sapiens
  misc_RNA (1)...(19): siRNA sense strand
gaugacauaacucaacuaa

SEQ ID NO: 2154241 - RNA, 19 nt, Homo sapiens
  misc_RNA (1)...(19): siRNA sense strand
agaaauaacaggaagagaa

SEQ ID NO: 2154242 - RNA, 19 nt, Homo sapiens
  misc_RNA (1)...(19): siRNA sense strand
uauuguggcucuucugaaa

SEQ ID NO: 2154243 - RNA, 19 nt, Homo sapiens
  misc_RNA (1)...(19): siRNA sense strand
cagauuguccugccuuuaa

SEQ ID NO: 2154244 - RNA, 19 nt, Homo sapiens
  misc_RNA (1)...(19): siRNA sense strand
gcacaaaguaugucugaag

SEQ ID NO: 2154245 - RNA, 19 nt, Homo sapiens
  misc_RNA (1)...(19): siRNA sense strand
gaagaaggaggaaaucaag

SEQ ID NO: 2154246 - RNA, 19 nt, Homo sapiens
  misc_RNA (1)...(19): siRNA sense strand
cagcuuacaauuucugaua

SEQ ID NO: 2154247 - RNA, 19 nt, Homo sapiens
  misc_RNA (1)...(19): siRNA sense strand
gcuccugccuugauuugaa

SEQ ID NO: 2154248 - RNA, 19 nt, Homo sapiens
  misc_RNA (1)...(19): siRNA sense strand
cagacuuccucaagaaauu

SEQ ID NO: 2154249 - RNA, 19 nt, Homo sapiens
  misc_RNA (1)...(19): siRNA sense strand
gcaaguaauguuuauguca

SEQ ID NO: 2154250 - RNA, 19 nt, Homo sapiens
  misc_RNA (1)...(19): siRNA sense strand
gagcaaguaauguuuaugu

SEQ ID NO: 2154251 - RNA, 19 nt, Homo sapiens
  misc_RNA (1)...(19): siRNA sense strand
ucaaggugauuucaaagga

SEQ ID NO: 2154252 - RNA, 19 nt, Homo sapiens
  misc_RNA (1)...(19): siRNA sense strand
gugaaagaaugguauguag

SEQ ID NO: 2154253 - RNA, 19 nt, Homo sapiens
  misc_RNA (1)...(19): siRNA sense strand
guuggaagcaggugaagua

SEQ ID NO: 2154254 - RNA, 19 nt, Homo sapiens
  misc_RNA (1)...(19): siRNA sense strand
gcaacugcuacauuuauaa

SEQ ID NO: 2154255 - RNA, 19 nt, Homo sapiens
  misc_RNA (1)...(19): siRNA sense strand
uaugucagauagugucuuu

SEQ ID NO: 2154256 - RNA, 19 nt, Homo sapiens
  misc_RNA (1)...(19): siRNA sense strand
guggaaaccugccuaugau

SEQ ID NO: 2154257 - RNA, 19 nt, Homo sapiens
  misc_RNA (1)...(19): siRNA sense strand
acaaggaaguuucuguaug

SEQ ID NO: 2154258 - RNA, 19 nt, Homo sapiens
  misc_RNA (1)...(19): siRNA sense strand
gaaauucuggaagaucuaa

SEQ ID NO: 2154259 - RNA, 19 nt, Homo sapiens
  misc_RNA (1)...(19): siRNA sense strand
uaacugcauucuccacuuc

SEQ ID NO: 2154260 - RNA, 19 nt, Homo sapiens
  misc_RNA (1)...(19): siRNA sense strand
ggagggaacuagcugaaaa

SEQ ID NO: 2154261 - RNA, 19 nt, Homo sapiens
  misc_RNA (1)...(19): siRNA sense strand
gagguaagauuggacuugu

SEQ ID NO: 2154262 - RNA, 19 nt, Homo sapiens
  misc_RNA (1)...(19): siRNA sense strand
gagagaugcacuuguuuga

SEQ ID NO: 2154263 - RNA, 19 nt, Homo sapiens
  misc_RNA (1)...(19): siRNA sense strand
gcacagagagaugcacuug

SEQ ID NO: 2154264 - RNA, 19 nt, Homo sapiens
  misc_RNA (1)...(19): siRNA sense strand
ccaggacagcuuacaauuu

SEQ ID NO: 2154265 - RNA, 19 nt, Homo sapiens
  misc_RNA (1)...(19): siRNA sense strand
caaccucaauacaauggaa

SEQ ID NO: 2154266 - RNA, 19 nt, Homo sapiens
  misc_RNA (1)...(19): siRNA sense strand
gauccuacuacacgacuua

SEQ ID NO: 2154267 - RNA, 19 nt, Homo sapiens
  misc_RNA (1)...(19): siRNA sense strand
acaauuggccggaugcuuu

SEQ ID NO: 2154268 - RNA, 19 nt, Homo sapiens
  misc_RNA (1)...(19): siRNA sense strand
gaagaauugcacaaaguau

SEQ ID NO: 2154269 - RNA, 19 nt, Homo sapiens
  misc_RNA (1)...(19): siRNA sense strand
caaauggaggcauaugaaa

SEQ ID NO: 2154270 - RNA, 19 nt, Homo sapiens
  misc_RNA (1)...(19): siRNA sense strand
aaucagacaucacuguuca

SEQ ID NO: 2154271 - RNA, 19 nt, Homo sapiens
  misc_RNA (1)...(19): siRNA sense strand
guaaauucuuuggagguuu

SEQ ID NO: 2154272 - RNA, 19 nt, Homo sapiens
  misc_RNA (1)...(19): siRNA sense strand
uaaacacuggagagaauua

SEQ ID NO: 2154273 - RNA, 19 nt, Homo sapiens
  misc_RNA (1)...(19): siRNA sense strand
ucacaaagcaacaaaugga

SEQ ID NO: 2154274 - RNA, 19 nt, Homo sapiens
  misc_RNA (1)...(19): siRNA sense strand
aauaaugcuuccaaaguug

SEQ ID NO: 2154275 - RNA, 19 nt, Homo sapiens
  misc_RNA (1)...(19): siRNA sense strand
ucagucagcuuuggacaga

SEQ ID NO: 2154276 - RNA, 19 nt, Homo sapiens
  misc_RNA (1)...(19): siRNA sense strand
caaggagggucaguacaau

SEQ ID NO: 2154277 - RNA, 19 nt, Homo sapiens
  misc_RNA (1)...(19): siRNA sense strand
gaaaauuggggcugaagua

SEQ ID NO: 2154278 - RNA, 19 nt, Homo sapiens
  misc_RNA (1)...(19): siRNA sense strand
uaaaauggcuugguuaagu

SEQ ID NO: 2154279 - RNA, 19 nt, Homo sapiens
  misc_RNA (1)...(19): siRNA sense strand
guaacugcauucuccacuu

SEQ ID NO: 2154280 - RNA, 19 nt, Homo sapiens
  misc_RNA (1)...(19): siRNA sense strand
acuaaacacuggagagaau

SEQ ID NO: 2154281 - RNA, 19 nt, Homo sapiens
  misc_RNA (1)...(19): siRNA sense strand
uaagacaaagcaagauuga

SEQ ID NO: 2154282 - RNA, 19 nt, Homo sapiens
  misc_RNA (1)...(19): siRNA sense strand
gacagaaggagaaaggaaa

SEQ ID NO: 2154283 - RNA, 19 nt, Homo sapiens
  misc_RNA (1)...(19): siRNA sense strand
gcuaagacaaagcaagauu

SEQ ID NO: 2154284 - RNA, 19 nt, Homo sapiens
  misc_RNA (1)...(19): siRNA sense strand
uaggcaaccucaauacaau

SEQ ID NO: 2154285 - RNA, 19 nt, Homo sapiens
  misc_RNA (1)...(19): siRNA sense strand
gcccaucagaguauacaua

SEQ ID NO: 2154286 - RNA, 19 nt, Homo sapiens
  misc_RNA (1)...(19): siRNA sense strand
gaaguuaaaggaagauugc

SEQ ID NO: 2154287 - RNA, 19 nt, Homo sapiens
  misc_RNA (1)...(19): siRNA sense strand
guugcaauauuacagaaug

SEQ ID NO: 2154288 - RNA, 19 nt, Homo sapiens
  misc_RNA (1)...(19): siRNA sense strand
cgacuuagaguggcuuaaa

SEQ ID NO: 2154289 - RNA, 19 nt, Homo sapiens
  misc_RNA (1)...(19): siRNA sense strand
aaauauauccaucccaguu

SEQ ID NO: 2154290 - RNA, 19 nt, Homo sapiens
  misc_RNA (1)...(19): siRNA sense strand
gaacuuauuguggcucuuc

SEQ ID NO: 2154291 - RNA, 19 nt, Homo sapiens
  misc_RNA (1)...(19): siRNA sense strand
acuuauaucuacucaguug

SEQ ID NO: 2154292 - RNA, 19 nt, Homo sapiens
  misc_RNA (1)...(19): siRNA sense strand
caaagugaaagaaugguau

SEQ ID NO: 2154293 - RNA, 19 nt, Homo sapiens
  misc_RNA (1)...(19): siRNA sense strand
gacccagacuugcuucaca

SEQ ID NO: 2154294 - RNA, 19 nt, Homo sapiens
  misc_RNA (1)...(19): siRNA sense strand
gcacgucucauccaagaag

SEQ ID NO: 2154295 - RNA, 19 nt, Homo sapiens
  misc_RNA (1)...(19): siRNA sense strand
gacaaagaaucagagaaag

SEQ ID NO: 2154296 - RNA, 19 nt, Homo sapiens
  misc_RNA (1)...(19): siRNA sense strand
ucagauagugucuuuacaa

SEQ ID NO: 2154297 - RNA, 19 nt, Homo sapiens
  misc_RNA (1)...(19): siRNA sense strand
ugacauaacucaacuaaga

SEQ ID NO: 2154298 - RNA, 19 nt, Homo sapiens
  misc_RNA (1)...(19): siRNA sense strand
caccauagcuugcaaagua

SEQ ID NO: 2154299 - RNA, 19 nt, Homo sapiens
  misc_RNA (1)...(19): siRNA sense strand
ugacagaaaugguguguuu

SEQ ID NO: 2154300 - RNA, 19 nt, Homo sapiens
  misc_RNA (1)...(19): siRNA sense strand
caaggaaguuucuguauga

SEQ ID NO: 2154301 - RNA, 19 nt, Homo sapiens
  misc_RNA (1)...(19): siRNA sense strand
ggaagcaggugaaguaguu

SEQ ID NO: 2154302 - RNA, 19 nt, Homo sapiens
  misc_RNA (1)...(19): siRNA sense strand
gcacaguucucuaucacua

SEQ ID NO: 2154303 - RNA, 19 nt, Homo sapiens
  misc_RNA (1)...(19): siRNA sense strand
gagaugcacuuguuugauu

SEQ ID NO: 2154304 - RNA, 19 nt, Homo sapiens
  misc_RNA (1)...(19): siRNA sense strand
aaacauaucuccaguugug

SEQ ID NO: 2154305 - RNA, 19 nt, Homo sapiens
  misc_RNA (1)...(19): siRNA sense strand
gaaauaacaggaagagaaa

SEQ ID NO: 2154306 - RNA, 19 nt, Homo sapiens
  misc_RNA (1)...(19): siRNA sense strand
ggagaaaggaaagaaauua

SEQ ID NO: 2154307 - RNA, 19 nt, Homo sapiens
  misc_RNA (1)...(19): siRNA sense strand
aaucaagucugcuccuuua

SEQ ID NO: 2154308 - RNA, 19 nt, Homo sapiens
  misc_RNA (1)...(19): siRNA sense strand
gcacaugcccaucagagua

SEQ ID NO: 2154309 - RNA, 19 nt, Homo sapiens
  misc_RNA (1)...(19): siRNA sense strand
gaaagaaugguauguagga

SEQ ID NO: 2154310 - RNA, 19 nt, Homo sapiens
  misc_RNA (1)...(19): siRNA sense strand
ugacaagccacaagauuua

SEQ ID NO: 2154311 - RNA, 19 nt, Homo sapiens
  misc_RNA (1)...(19): siRNA sense strand
ggaagaauugcacaaagua

SEQ ID NO: 2154312 - RNA, 19 nt, Homo sapiens
  misc_RNA (1)...(19): siRNA sense strand
caggacagcuuacaauuuc

SEQ ID NO: 2154313 - RNA, 19 nt, Homo sapiens
  misc_RNA (1)...(19): siRNA sense strand
gguaauguaucuagugguu

SEQ ID NO: 2154314 - RNA, 19 nt, Homo sapiens
  misc_RNA (1)...(19): siRNA sense strand
uagcugauguccuggguua

SEQ ID NO: 2154315 - RNA, 19 nt, Homo sapiens
  misc_RNA (1)...(19): siRNA sense strand
ggaaaccugccuaugauuu

SEQ ID NO: 2154316 - RNA, 19 nt, Homo sapiens
  misc_RNA (1)...(19): siRNA sense strand
caaauuugauugacaugga

SEQ ID NO: 2154317 - RNA, 19 nt, Homo sapiens
  misc_RNA (1)...(19): siRNA sense strand
gacaaagcaagauugauua

SEQ ID NO: 2154318 - RNA, 19 nt, Homo sapiens
  misc_RNA (1)...(19): siRNA sense strand
acagagagaugcacuuguu

SEQ ID NO: 2154319 - RNA, 19 nt, Homo sapiens
  misc_RNA (1)...(19): siRNA sense strand
gaagcaaauuugauugaca

SEQ ID NO: 2154320 - RNA, 19 nt, Homo sapiens
  misc_RNA (1)...(19): siRNA sense strand
gauagugucuuuacaacca

SEQ ID NO: 2154321 - RNA, 19 nt, Homo sapiens
  misc_RNA (1)...(19): siRNA sense strand
caagauugauuacuuccuu

SEQ ID NO: 2154322 - RNA, 19 nt, Homo sapiens
  misc_RNA (1)...(19): siRNA sense strand
caaaguaaaccaucaagga

SEQ ID NO: 2154323 - RNA, 19 nt, Homo sapiens
  misc_RNA (1)...(19): siRNA sense strand
caagucugcuccuuuauca

SEQ ID NO: 2154324 - RNA, 19 nt, Homo sapiens
  misc_RNA (1)...(19): siRNA sense strand
gaaaucaagucugcuccuu

SEQ ID NO: 2154325 - RNA, 19 nt, Homo sapiens
  misc_RNA (1)...(19): siRNA sense strand
caaaggagcaaguaauguu

SEQ ID NO: 2154326 - RNA, 19 nt, Homo sapiens
  misc_RNA (1)...(19): siRNA sense strand
caaaguaugucugaagcaa

SEQ ID NO: 2154327 - RNA, 19 nt, Homo sapiens
  misc_RNA (1)...(19): siRNA sense strand
gccacaagauuuaaguauu

SEQ ID NO: 2154328 - RNA, 19 nt, Homo sapiens
  misc_RNA (1)...(19): siRNA sense strand
cagacuugcuucacaauug

SEQ ID NO: 2154329 - RNA, 19 nt, Homo sapiens
  misc_RNA (1)...(19): siRNA sense strand
gaagauugccacacagaga

SEQ ID NO: 2154330 - RNA, 19 nt, Homo sapiens
  misc_RNA (1)...(19): siRNA sense strand
gaaaauggauugccaagag

SEQ ID NO: 2154331 - RNA, 19 nt, Homo sapiens
  misc_RNA (1)...(19): siRNA sense strand
gcuaaucacugaaagaaaa

SEQ ID NO: 2154332 - RNA, 19 nt, Homo sapiens
  misc_RNA (1)...(19): siRNA sense strand
caaagaaucagagaaaguu

SEQ ID NO: 2154333 - RNA, 19 nt, Homo sapiens
  misc_RNA (1)...(19): siRNA sense strand
agacaaagaaucagagaaa

SEQ ID NO: 2154334 - RNA, 19 nt, Homo sapiens
  misc_RNA (1)...(19): siRNA sense strand
ugacuuauaucuacucagu

SEQ ID NO: 2154335 - RNA, 19 nt, Homo sapiens
  misc_RNA (1)...(19): siRNA sense strand
agacaaagcaagauugauu

SEQ ID NO: 2154336 - RNA, 19 nt, Homo sapiens
  misc_RNA (1)...(19): siRNA sense strand
gaucuuucgugcacuguga

SEQ ID NO: 2154337 - RNA, 19 nt, Homo sapiens
  misc_RNA (1)...(19): siRNA sense strand
aaaggaagauugccacaca

SEQ ID NO: 2154338 - RNA, 19 nt, Homo sapiens
  misc_RNA (1)...(19): siRNA sense strand
guaauaaugcuuccaaagu

SEQ ID NO: 2154339 - RNA, 19 nt, Homo sapiens
  misc_RNA (1)...(19): siRNA sense strand
gaaggagaaaggaaagaaa

SEQ ID NO: 2154340 - RNA, 19 nt, Homo sapiens
  misc_RNA (1)...(19): siRNA sense strand
gaugacauaacucaacuaa

SEQ ID NO: 2154341 - RNA, 19 nt, Homo sapiens
  misc_RNA (1)...(19): siRNA sense strand
agaaauaacaggaagagaa

SEQ ID NO: 2154342 - RNA, 19 nt, Homo sapiens
  misc_RNA (1)...(19): siRNA sense strand
uauuguggcucuucugaaa

SEQ ID NO: 2154343 - RNA, 19 nt, Homo sapiens
  misc_RNA (1)...(19): siRNA sense strand
cagauuguccugccuuuaa

SEQ ID NO: 2154344 - RNA, 19 nt, Homo sapiens
  misc_RNA (1)...(19): siRNA sense strand
gcacaaaguaugucugaag

SEQ ID NO: 2154345 - RNA, 19 nt, Homo sapiens
  misc_RNA (1)...(19): siRNA sense strand
gaagaaggaggaaaucaag

SEQ ID NO: 2154346 - RNA, 19 nt, Homo sapiens
  misc_RNA (1)...(19): siRNA sense strand
cagcuuacaauuucugaua

SEQ ID NO: 2154347 - RNA, 19 nt, Homo sapiens
  misc_RNA (1)...(19): siRNA sense strand
gcuccugccuugauuugaa

SEQ ID NO: 2154348 - RNA, 19 nt, Homo sapiens
  misc_RNA (1)...(19): siRNA sense strand
cagacuuccucaagaaauu

SEQ ID NO: 2154349 - RNA, 19 nt, Homo sapiens
  misc_RNA (1)...(19): siRNA sense strand
gcaaguaauguuuauguca

SEQ ID NO: 2154350 - RNA, 19 nt, Homo sapiens
  misc_RNA (1)...(19): siRNA sense strand
gagcaaguaauguuuaugu

SEQ ID NO: 2154351 - RNA, 19 nt, Homo sapiens
  misc_RNA (1)...(19): siRNA sense strand
ucaaggugauuucaaagga

SEQ ID NO: 2154352 - RNA, 19 nt, Homo sapiens
  misc_RNA (1)...(19): siRNA sense strand
gugaaagaaugguauguag

SEQ ID NO: 2154353 - RNA, 19 nt, Homo sapiens
  misc_RNA (1)...(19): siRNA sense strand
guuggaagcaggugaagua

SEQ ID NO: 2154354 - RNA, 19 nt, Homo sapiens
  misc_RNA (1)...(19): siRNA sense strand
gcaacugcuacauuuauaa

SEQ ID NO: 2154355 - RNA, 19 nt, Homo sapiens
  misc_RNA (1)...(19): siRNA sense strand
uaugucagauagugucuuu

SEQ ID NO: 2154356 - RNA, 19 nt, Homo sapiens
  misc_RNA (1)...(19): siRNA sense strand
guggaaaccugccuaugau

SEQ ID NO: 2154357 - RNA, 19 nt, Homo sapiens
  misc_RNA (1)...(19): siRNA sense strand
acaaggaaguuucuguaug

SEQ ID NO: 2154358 - RNA, 19 nt, Homo sapiens
  misc_RNA (1)...(19): siRNA sense strand
gaaauucuggaagaucuaa

SEQ ID NO: 2154359 - RNA, 19 nt, Homo sapiens
  misc_RNA (1)...(19): siRNA sense strand
uaacugcauucuccacuuc

SEQ ID NO: 2154360 - RNA, 19 nt, Homo sapiens
  misc_RNA (1)...(19): siRNA sense strand
ggagggaacuagcugaaaa

SEQ ID NO: 2154361 - RNA, 19 nt, Homo sapiens
  misc_RNA (1)...(19): siRNA sense strand
gagguaagauuggacuugu

SEQ ID NO: 2154362 - RNA, 19 nt, Homo sapiens
  misc_RNA (1)...(19): siRNA sense strand
gagagaugcacuuguuuga

SEQ ID NO: 2154363 - RNA, 19 nt, Homo sapiens
  misc_RNA (1)...(19): siRNA sense strand
gcacagagagaugcacuug

SEQ ID NO: 2154364 - RNA, 19 nt, Homo sapiens
  misc_RNA (1)...(19): siRNA sense strand
ccaggacagcuuacaauuu

SEQ ID NO: 2154365 - RNA, 19 nt, Homo sapiens
  misc_RNA (1)...(19): siRNA sense strand
caaccucaauacaauggaa

SEQ ID NO: 2154366 - RNA, 19 nt, Homo sapiens
  misc_RNA (1)...(19): siRNA sense strand
gauccuacuacacgacuua

SEQ ID NO: 2154367 - RNA, 19 nt, Homo sapiens
  misc_RNA (1)...(19): siRNA sense strand
acaauuggccggaugcuuu

SEQ ID NO: 2154368 - RNA, 19 nt, Homo sapiens
  misc_RNA (1)...(19): siRNA sense strand
gaagaauugcacaaaguau

SEQ ID NO: 2154369 - RNA, 19 nt, Homo sapiens
  misc_RNA (1)...(19): siRNA sense strand
caaauggaggcauaugaaa

SEQ ID NO: 2154370 - RNA, 19 nt, Homo sapiens
  misc_RNA (1)...(19): siRNA sense strand
aaucagacaucacuguuca

SEQ ID NO: 2154371 - RNA, 19 nt, Homo sapiens
  misc_RNA (1)...(19): siRNA sense strand
guaaauucuuuggagguuu

SEQ ID NO: 2154372 - RNA, 19 nt, Homo sapiens
  misc_RNA (1)...(19): siRNA sense strand
uaaacacuggagagaauua

SEQ ID NO: 2154373 - RNA, 19 nt, Homo sapiens
  misc_RNA (1)...(19): siRNA sense strand
ucacaaagcaacaaaugga

SEQ ID NO: 2154374 - RNA, 19 nt, Homo sapiens
  misc_RNA (1)...(19): siRNA sense strand
aauaaugcuuccaaaguug

SEQ ID NO: 2154375 - RNA, 19 nt, Homo sapiens
  misc_RNA (1)...(19): siRNA sense strand
ucagucagcuuuggacaga

SEQ ID NO: 2154376 - RNA, 19 nt, Homo sapiens
  misc_RNA (1)...(19): siRNA sense strand
caaggagggucaguacaau

SEQ ID NO: 2154377 - RNA, 19 nt, Homo sapiens
  misc_RNA (1)...(19): siRNA sense strand
gaaaauuggggcugaagua

SEQ ID NO: 2154378 - RNA, 19 nt, Homo sapiens
  misc_RNA (1)...(19): siRNA sense strand
uaaaauggcuugguuaagu

SEQ ID NO: 2154379 - RNA, 19 nt, Homo sapiens
  misc_RNA (1)...(19): siRNA sense strand
guaacugcauucuccacuu

SEQ ID NO: 2154380 - RNA, 19 nt, Homo sapiens
  misc_RNA (1)...(19): siRNA sense strand
acuaaacacuggagagaau

SEQ ID NO: 2154381 - RNA, 19 nt, Homo sapiens
  misc_RNA (1)...(19): siRNA sense strand
uaagacaaagcaagauuga

SEQ ID NO: 2154382 - RNA, 19 nt, Homo sapiens
  misc_RNA (1)...(19): siRNA sense strand
gacagaaggagaaaggaaa

SEQ ID NO: 2154383 - RNA, 19 nt, Homo sapiens
  misc_RNA (1)...(19): siRNA sense strand
gcuaagacaaagcaagauu

SEQ ID NO: 2154384 - RNA, 19 nt, Homo sapiens
  misc_RNA (1)...(19): siRNA sense strand
uaggcaaccucaauacaau

SEQ ID NO: 2154385 - RNA, 19 nt, Homo sapiens
  misc_RNA (1)...(19): siRNA sense strand
gcccaucagaguauacaua

SEQ ID NO: 2154386 - RNA, 19 nt, Homo sapiens
  misc_RNA (1)...(19): siRNA sense strand
gaaguuaaaggaagauugc

SEQ ID NO: 2154387 - RNA, 19 nt, Homo sapiens
  misc_RNA (1)...(19): siRNA sense strand
guugcaauauuacagaaug

SEQ ID NO: 2154388 - RNA, 19 nt, Homo sapiens
  misc_RNA (1)...(19): siRNA sense strand
cgacuuagaguggcuuaaa

SEQ ID NO: 2154389 - RNA, 19 nt, Homo sapiens
  misc_RNA (1)...(19): siRNA sense strand
aaauauauccaucccaguu

SEQ ID NO: 2154390 - RNA, 19 nt, Homo sapiens
  misc_RNA (1)...(19): siRNA sense strand
gaacuuauuguggcucuuc

SEQ ID NO: 2154391 - RNA, 19 nt, Homo sapiens
  misc_RNA (1)...(19): siRNA sense strand
acuuauaucuacucaguug

SEQ ID NO: 2154392 - RNA, 19 nt, Homo sapiens
  misc_RNA (1)...(19): siRNA sense strand
caaagugaaagaaugguau

SEQ ID NO: 2154393 - RNA, 19 nt, Homo sapiens
  misc_RNA (1)...(19): siRNA sense strand
gacccagacuugcuucaca

SEQ ID NO: 2154394 - RNA, 19 nt, Homo sapiens
  misc_RNA (1)...(19): siRNA sense strand
gcacgucucauccaagaag

SEQ ID NO: 2154395 - RNA, 19 nt, Homo sapiens
  misc_RNA (1)...(19): siRNA sense strand
gacaaagaaucagagaaag

SEQ ID NO: 2154396 - RNA, 19 nt, Homo sapiens
  misc_RNA (1)...(19): siRNA sense strand
ucagauagugucuuuacaa

SEQ ID NO: 2154397 - RNA, 19 nt, Homo sapiens
  misc_RNA (1)...(19): siRNA sense strand
ugacauaacucaacuaaga

SEQ ID NO: 2154398 - RNA, 19 nt, Homo sapiens
  misc_RNA (1)...(19): siRNA sense strand
caccauagcuugcaaagua

SEQ ID NO: 2154399 - RNA, 19 nt, Homo sapiens
  misc_RNA (1)...(19): siRNA sense strand
ugacagaaaugguguguuu

SEQ ID NO: 2154400 - RNA, 19 nt, Homo sapiens
  misc_RNA (1)...(19): siRNA sense strand
caaggaaguuucuguauga

SEQ ID NO: 2154401 - RNA, 19 nt, Homo sapiens
  misc_RNA (1)...(19): siRNA sense strand
ggaagcaggugaaguaguu

SEQ ID NO: 2154402 - RNA, 19 nt, Homo sapiens
  misc_RNA (1)...(19): siRNA sense strand
gcacaguucucuaucacua

SEQ ID NO: 2154403 - RNA, 19 nt, Homo sapiens
  misc_RNA (1)...(19): siRNA sense strand
gagaugcacuuguuugauu

SEQ ID NO: 2154404 - RNA, 19 nt, Homo sapiens
  misc_RNA (1)...(19): siRNA sense strand
aaacauaucuccaguugug

SEQ ID NO: 2154405 - RNA, 19 nt, Homo sapiens
  misc_RNA (1)...(19): siRNA sense strand
gaaauaacaggaagagaaa

SEQ ID NO: 2154406 - RNA, 19 nt, Homo sapiens
  misc_RNA (1)...(19): siRNA sense strand
ggagaaaggaaagaaauua

SEQ ID NO: 2154407 - RNA, 19 nt, Homo sapiens
  misc_RNA (1)...(19): siRNA sense strand
aaucaagucugcuccuuua

SEQ ID NO: 2154408 - RNA, 19 nt, Homo sapiens
  misc_RNA (1)...(19): siRNA sense strand
gcacaugcccaucagagua

SEQ ID NO: 2154409 - RNA, 19 nt, Homo sapiens
  misc_RNA (1)...(19): siRNA sense strand
gaaagaaugguauguagga

SEQ ID NO: 2154410 - RNA, 19 nt, Homo sapiens
  misc_RNA (1)...(19): siRNA sense strand
ugacaagccacaagauuua

SEQ ID NO: 2154411 - RNA, 19 nt, Homo sapiens
  misc_RNA (1)...(19): siRNA sense strand
ggaagaauugcacaaagua

SEQ ID NO: 2154412 - RNA, 19 nt, Homo sapiens
  misc_RNA (1)...(19): siRNA sense strand
caggacagcuuacaauuuc

SEQ ID NO: 2154413 - RNA, 19 nt, Homo sapiens
  misc_RNA (1)...(19): siRNA sense strand
gguaauguaucuagugguu

SEQ ID NO: 2154414 - RNA, 19 nt, Homo sapiens
  misc_RNA (1)...(19): siRNA sense strand
uagcugauguccuggguua

SEQ ID NO: 2154415 - RNA, 19 nt, Homo sapiens
  misc_RNA (1)...(19): siRNA sense strand
ggaaaccugccuaugauuu

SEQ ID NO: 2154416 - RNA, 19 nt, Homo sapiens
  misc_RNA (1)...(19): siRNA sense strand
caaauuugauugacaugga

SEQ ID NO: 2154417 - RNA, 19 nt, Homo sapiens
  misc_RNA (1)...(19): siRNA sense strand
gacaaagcaagauugauua

SEQ ID NO: 2154418 - RNA, 19 nt, Homo sapiens
  misc_RNA (1)...(19): siRNA sense strand
acagagagaugcacuuguu

SEQ ID NO: 2154419 - RNA, 19 nt, Homo sapiens
  misc_RNA (1)...(19): siRNA sense strand
gaagcaaauuugauugaca

SEQ ID NO: 2154420 - RNA, 19 nt, Homo sapiens
  misc_RNA (1)...(19): siRNA sense strand
gauagugucuuuacaacca

SEQ ID NO: 2154421 - RNA, 19 nt, Homo sapiens
  misc_RNA (1)...(19): siRNA sense strand
caagauugauuacuuccuu

SEQ ID NO: 2154422 - RNA, 19 nt, Homo sapiens
  misc_RNA (1)...(19): siRNA sense strand
caaaguaaaccaucaagga

SEQ ID NO: 2154423 - RNA, 19 nt, Homo sapiens
  misc_RNA (1)...(19): siRNA sense strand
caagucugcuccuuuauca

SEQ ID NO: 2154424 - RNA, 19 nt, Homo sapiens
  misc_RNA (1)...(19): siRNA sense strand
gaaaucaagucugcuccuu

SEQ ID NO: 2154425 - RNA, 19 nt, Homo sapiens
  misc_RNA (1)...(19): siRNA sense strand
caaaggagcaaguaauguu

SEQ ID NO: 2154426 - RNA, 19 nt, Homo sapiens
  misc_RNA (1)...(19): siRNA sense strand
caaaguaugucugaagcaa

SEQ ID NO: 2154427 - RNA, 19 nt, Homo sapiens
  misc_RNA (1)...(19): siRNA sense strand
gccacaagauuuaaguauu

SEQ ID NO: 2154428 - RNA, 19 nt, Homo sapiens
  misc_RNA (1)...(19): siRNA sense strand
cagacuugcuucacaauug

SEQ ID NO: 2154429 - RNA, 19 nt, Homo sapiens
  misc_RNA (1)...(19): siRNA sense strand
gaagauugccacacagaga

SEQ ID NO: 2154430 - RNA, 19 nt, Homo sapiens
  misc_RNA (1)...(19): siRNA sense strand
gaaaauggauugccaagag

SEQ ID NO: 2154431 - RNA, 19 nt, Homo sapiens
  misc_RNA (1)...(19): siRNA sense strand
gcuaaucacugaaagaaaa

SEQ ID NO: 2154432 - RNA, 19 nt, Homo sapiens
  misc_RNA (1)...(19): siRNA sense strand
caaagaaucagagaaaguu

SEQ ID NO: 2154433 - RNA, 19 nt, Homo sapiens
  misc_RNA (1)...(19): siRNA sense strand
agacaaagaaucagagaaa

SEQ ID NO: 2154434 - RNA, 19 nt, Homo sapiens
  misc_RNA (1)...(19): siRNA sense strand
ugacuuauaucuacucagu

SEQ ID NO: 2154435 - RNA, 19 nt, Homo sapiens
  misc_RNA (1)...(19): siRNA sense strand
agacaaagcaagauugauu

SEQ ID NO: 2154436 - RNA, 19 nt, Homo sapiens
  misc_RNA (1)...(19): siRNA sense strand
gaucuuucgugcacuguga

SEQ ID NO: 2154437 - RNA, 19 nt, Homo sapiens
  misc_RNA (1)...(19): siRNA sense strand
aaaggaagauugccacaca

SEQ ID NO: 2154438 - RNA, 19 nt, Homo sapiens
  misc_RNA (1)...(19): siRNA sense strand
guaauaaugcuuccaaagu

SEQ ID NO: 2154439 - RNA, 19 nt, Homo sapiens
  misc_RNA (1)...(19): siRNA sense strand
gaaggagaaaggaaagaaa

SEQ ID NO: 2154440 - RNA, 19 nt, Homo sapiens
  misc_RNA (1)...(19): siRNA sense strand
gaugacauaacucaacuaa

SEQ ID NO: 2154441 - RNA, 19 nt, Homo sapiens
  misc_RNA (1)...(19): siRNA sense strand
agaaauaacaggaagagaa

SEQ ID NO: 2154442 - RNA, 19 nt, Homo sapiens
  misc_RNA (1)...(19): siRNA sense strand
uauuguggcucuucugaaa

SEQ ID NO: 2154443 - RNA, 19 nt, Homo sapiens
  misc_RNA (1)...(19): siRNA sense strand
cagauuguccugccuuuaa

SEQ ID NO: 2154444 - RNA, 19 nt, Homo sapiens
  misc_RNA (1)...(19): siRNA sense strand
gcacaaaguaugucugaag

SEQ ID NO: 2154445 - RNA, 19 nt, Homo sapiens
  misc_RNA (1)...(19): siRNA sense strand
gaagaaggaggaaaucaag

SEQ ID NO: 2154446 - RNA, 19 nt, Homo sapiens
  misc_RNA (1)...(19): siRNA sense strand
cagcuuacaauuucugaua

SEQ ID NO: 2154447 - RNA, 19 nt, Homo sapiens
  misc_RNA (1)...(19): siRNA sense strand
gcuccugccuugauuugaa

SEQ ID NO: 2154448 - RNA, 19 nt, Homo sapiens
  misc_RNA (1)...(19): siRNA sense strand
cagacuuccucaagaaauu

SEQ ID NO: 2154449 - RNA, 19 nt, Homo sapiens
  misc_RNA (1)...(19): siRNA sense strand
gcaaguaauguuuauguca

SEQ ID NO: 2154450 - RNA, 19 nt, Homo sapiens
  misc_RNA (1)...(19): siRNA sense strand
gagcaaguaauguuuaugu

SEQ ID NO: 2154451 - RNA, 19 nt, Homo sapiens
  misc_RNA (1)...(19): siRNA sense strand
ucaaggugauuucaaagga

SEQ ID NO: 2154452 - RNA, 19 nt, Homo sapiens
  misc_RNA (1)...(19): siRNA sense strand
gugaaagaaugguauguag

SEQ ID NO: 2154453 - RNA, 19 nt, Homo sapiens
  misc_RNA (1)...(19): siRNA sense strand
guuggaagcaggugaagua

SEQ ID NO: 2154454 - RNA, 19 nt, Homo sapiens
  misc_RNA (1)...(19): siRNA sense strand
gcaacugcuacauuuauaa

SEQ ID NO: 2154455 - RNA, 19 nt, Homo sapiens
  misc_RNA (1)...(19): siRNA sense strand
uaugucagauagugucuuu

SEQ ID NO: 2154456 - RNA, 19 nt, Homo sapiens
  misc_RNA (1)...(19): siRNA sense strand
guggaaaccugccuaugau

SEQ ID NO: 2154457 - RNA, 19 nt, Homo sapiens
  misc_RNA (1)...(19): siRNA sense strand
acaaggaaguuucuguaug

SEQ ID NO: 2154458 - RNA, 19 nt, Homo sapiens
  misc_RNA (1)...(19): siRNA sense strand
gaaauucuggaagaucuaa

SEQ ID NO: 2154459 - RNA, 19 nt, Homo sapiens
  misc_RNA (1)...(19): siRNA sense strand
uaacugcauucuccacuuc

SEQ ID NO: 2154460 - RNA, 19 nt, Homo sapiens
  misc_RNA (1)...(19): siRNA sense strand
ggagggaacuagcugaaaa

SEQ ID NO: 2154461 - RNA, 19 nt, Homo sapiens
  misc_RNA (1)...(19): siRNA sense strand
gagguaagauuggacuugu

SEQ ID NO: 2154462 - RNA, 19 nt, Homo sapiens
  misc_RNA (1)...(19): siRNA sense strand
gagagaugcacuuguuuga

SEQ ID NO: 2154463 - RNA, 19 nt, Homo sapiens
  misc_RNA (1)...(19): siRNA sense strand
gcacagagagaugcacuug

SEQ ID NO: 2154464 - RNA, 19 nt, Homo sapiens
  misc_RNA (1)...(19): siRNA sense strand
ccaggacagcuuacaauuu

SEQ ID NO: 2154465 - RNA, 19 nt, Homo sapiens
  misc_RNA (1)...(19): siRNA sense strand
caaccucaauacaauggaa

SEQ ID NO: 2154466 - RNA, 19 nt, Homo sapiens
  misc_RNA (1)...(19): siRNA sense strand
gauccuacuacacgacuua

SEQ ID NO: 2154467 - RNA, 19 nt, Homo sapiens
  misc_RNA (1)...(19): siRNA sense strand
acaauuggccggaugcuuu

SEQ ID NO: 2154468 - RNA, 19 nt, Homo sapiens
  misc_RNA (1)...(19): siRNA sense strand
gaagaauugcacaaaguau

SEQ ID NO: 2154469 - RNA, 19 nt, Homo sapiens
  misc_RNA (1)...(19): siRNA sense strand
caaauggaggcauaugaaa

SEQ ID NO: 2154470 - RNA, 19 nt, Homo sapiens
  misc_RNA (1)...(19): siRNA sense strand
aaucagacaucacuguuca

SEQ ID NO: 2154471 - RNA, 19 nt, Homo sapiens
  misc_RNA (1)...(19): siRNA sense strand
guaaauucuuuggagguuu

SEQ ID NO: 2154472 - RNA, 19 nt, Homo sapiens
  misc_RNA (1)...(19): siRNA sense strand
uaaacacuggagagaauua

SEQ ID NO: 2154473 - RNA, 19 nt, Homo sapiens
  misc_RNA (1)...(19): siRNA sense strand
ucacaaagcaacaaaugga

SEQ ID NO: 2154474 - RNA, 19 nt, Homo sapiens
  misc_RNA (1)...(19): siRNA sense strand
aauaaugcuuccaaaguug

SEQ ID NO: 2154475 - RNA, 19 nt, Homo sapiens
  misc_RNA (1)...(19): siRNA sense strand
ucagucagcuuuggacaga

SEQ ID NO: 2154476 - RNA, 19 nt, Homo sapiens
  misc_RNA (1)...(19): siRNA sense strand
caaggagggucaguacaau

SEQ ID NO: 2154477 - RNA, 19 nt, Homo sapiens
  misc_RNA (1)...(19): siRNA sense strand
gaaaauuggggcugaagua

SEQ ID NO: 2154478 - RNA, 19 nt, Homo sapiens
  misc_RNA (1)...(19): siRNA sense strand
uaaaauggcuugguuaagu

SEQ ID NO: 2154479 - RNA, 19 nt, Homo sapiens
  misc_RNA (1)...(19): siRNA sense strand
guaacugcauucuccacuu

SEQ ID NO: 2154480 - RNA, 19 nt, Homo sapiens
  misc_RNA (1)...(19): siRNA sense strand
acuaaacacuggagagaau

SEQ ID NO: 2154481 - RNA, 19 nt, Homo sapiens
  misc_RNA (1)...(19): siRNA sense strand
uaagacaaagcaagauuga

SEQ ID NO: 2154482 - RNA, 19 nt, Homo sapiens
  misc_RNA (1)...(19): siRNA sense strand
gacagaaggagaaaggaaa

SEQ ID NO: 2154483 - RNA, 19 nt, Homo sapiens
  misc_RNA (1)...(19): siRNA sense strand
gcuaagacaaagcaagauu

SEQ ID NO: 2154484 - RNA, 19 nt, Homo sapiens
  misc_RNA (1)...(19): siRNA sense strand
uaggcaaccucaauacaau

SEQ ID NO: 2154485 - RNA, 19 nt, Homo sapiens
  misc_RNA (1)...(19): siRNA sense strand
gcccaucagaguauacaua

SEQ ID NO: 2154486 - RNA, 19 nt, Homo sapiens
  misc_RNA (1)...(19): siRNA sense strand
gaaguuaaaggaagauugc

SEQ ID NO: 2154487 - RNA, 19 nt, Homo sapiens
  misc_RNA (1)...(19): siRNA sense strand
guugcaauauuacagaaug

SEQ ID NO: 2154488 - RNA, 19 nt, Homo sapiens
  misc_RNA (1)...(19): siRNA sense strand
cgacuuagaguggcuuaaa

SEQ ID NO: 2154489 - RNA, 19 nt, Homo sapiens
  misc_RNA (1)...(19): siRNA sense strand
aaauauauccaucccaguu

SEQ ID NO: 2154490 - RNA, 19 nt, Homo sapiens
  misc_RNA (1)...(19): siRNA sense strand
gaacuuauuguggcucuuc

SEQ ID NO: 2154491 - RNA, 19 nt, Homo sapiens
  misc_RNA (1)...(19): siRNA sense strand
acuuauaucuacucaguug

SEQ ID NO: 2154492 - RNA, 19 nt, Homo sapiens
  misc_RNA (1)...(19): siRNA sense strand
caaagugaaagaaugguau

SEQ ID NO: 2154493 - RNA, 19 nt, Homo sapiens
  misc_RNA (1)...(19): siRNA sense strand
gacccagacuugcuucaca

SEQ ID NO: 2154494 - RNA, 19 nt, Homo sapiens
  misc_RNA (1)...(19): siRNA sense strand
gcacgucucauccaagaag

SEQ ID NO: 2154495 - RNA, 19 nt, Homo sapiens
  misc_RNA (1)...(19): siRNA sense strand
gacaaagaaucagagaaag

SEQ ID NO: 2154496 - RNA, 19 nt, Homo sapiens
  misc_RNA (1)...(19): siRNA sense strand
ucagauagugucuuuacaa

SEQ ID NO: 2154497 - RNA, 19 nt, Homo sapiens
  misc_RNA (1)...(19): siRNA sense strand
caacagggauggauuguaa

SEQ ID NO: 2154498 - RNA, 19 nt, Homo sapiens
  misc_RNA (1)...(19): siRNA sense strand
gaaagacgauaccaggaaa

SEQ ID NO: 2154499 - RNA, 19 nt, Homo sapiens
  misc_RNA (1)...(19): siRNA sense strand
gaucugcccugccaaguga

SEQ ID NO: 2154500 - RNA, 19 nt, Homo sapiens
  misc_RNA (1)...(19): siRNA sense strand
gugcagggcuuaccuuuau

SEQ ID NO: 2154501 - RNA, 19 nt, Homo sapiens
  misc_RNA (1)...(19): siRNA sense strand
guagacagcccauuccuaa

SEQ ID NO: 2154502 - RNA, 19 nt, Homo sapiens
  misc_RNA (1)...(19): siRNA sense strand
ccagaaacguuaacagaug

SEQ ID NO: 2154503 - RNA, 19 nt, Homo sapiens
  misc_RNA (1)...(19): siRNA sense strand
ugauauggcuuucuuugaa

SEQ ID NO: 2154504 - RNA, 19 nt, Homo sapiens
  misc_RNA (1)...(19): siRNA sense strand
guagucaaguuucuucauu

SEQ ID NO: 2154505 - RNA, 19 nt, Homo sapiens
  misc_RNA (1)...(19): siRNA sense strand
gaugauggagggaaacuuu

SEQ ID NO: 2154506 - RNA, 19 nt, Homo sapiens
  misc_RNA (1)...(19): siRNA sense strand
caauacauguuccaagugu

SEQ ID NO: 2154507 - RNA, 19 nt, Homo sapiens
  misc_RNA (1)...(19): siRNA sense strand
gggauggauuguaaacuug

SEQ ID NO: 2154508 - RNA, 19 nt, Homo sapiens
  misc_RNA (1)...(19): siRNA sense strand
acacauagguauaaacaac

SEQ ID NO: 2154509 - RNA, 19 nt, Homo sapiens
  misc_RNA (1)...(19): siRNA sense strand
gagaauuguuggugaggau

SEQ ID NO: 2154510 - RNA, 19 nt, Homo sapiens
  misc_RNA (1)...(19): siRNA sense strand
gaugauauggcuuucuuug

SEQ ID NO: 2154511 - RNA, 19 nt, Homo sapiens
  misc_RNA (1)...(19): siRNA sense strand
guacacauagguauaaaca

SEQ ID NO: 2154512 - RNA, 19 nt, Homo sapiens
  misc_RNA (1)...(19): siRNA sense strand
cagaaacguuaacagaugu

SEQ ID NO: 2154513 - RNA, 19 nt, Homo sapiens
  misc_RNA (1)...(19): siRNA sense strand
ucaaguuucuucauuaagg

SEQ ID NO: 2154514 - RNA, 19 nt, Homo sapiens
  misc_RNA (1)...(19): siRNA sense strand
gcugcuaaguggaaaggaa

SEQ ID NO: 2154515 - RNA, 19 nt, Homo sapiens
  misc_RNA (1)...(19): siRNA sense strand
caaguuucuucauuaagga

SEQ ID NO: 2154516 - RNA, 19 nt, Homo sapiens
  misc_RNA (1)...(19): siRNA sense strand
uuccauagcugcuucacuu

SEQ ID NO: 2154517 - RNA, 19 nt, Homo sapiens
  misc_RNA (1)...(19): siRNA sense strand
aaggagaccugaagaggau

SEQ ID NO: 2154518 - RNA, 19 nt, Homo sapiens
  misc_RNA (1)...(19): siRNA sense strand
gguacaaguagucaaguuu

SEQ ID NO: 2154519 - RNA, 19 nt, Homo sapiens
  misc_RNA (1)...(19): siRNA sense strand
gaaagauuggcucaggaaa

SEQ ID NO: 2154520 - RNA, 19 nt, Homo sapiens
  misc_RNA (1)...(19): siRNA sense strand
ggaaacuaagcaagaaaga

SEQ ID NO: 2154521 - RNA, 19 nt, Homo sapiens
  misc_RNA (1)...(19): siRNA sense strand
ugaaagacgauaccaggaa

SEQ ID NO: 2154522 - RNA, 19 nt, Homo sapiens
  misc_RNA (1)...(19): siRNA sense strand
uuucaagcaucaucuaguu

SEQ ID NO: 2154523 - RNA, 19 nt, Homo sapiens
  misc_RNA (1)...(19): siRNA sense strand
ggaaggcuacaugcgguua

SEQ ID NO: 2154524 - RNA, 19 nt, Homo sapiens
  misc_RNA (1)...(19): siRNA sense strand
gcgccuggcuuuacaugca

SEQ ID NO: 2154525 - RNA, 19 nt, Homo sapiens
  misc_RNA (1)...(19): siRNA sense strand
gaaacuaagcaagaaagau

SEQ ID NO: 2154526 - RNA, 19 nt, Homo sapiens
  misc_RNA (1)...(19): siRNA sense strand
gaaaggaaaagcuccauug

SEQ ID NO: 2154527 - RNA, 19 nt, Homo sapiens
  misc_RNA (1)...(19): siRNA sense strand
guacaaguagucaaguuuc

SEQ ID NO: 2154528 - RNA, 19 nt, Homo sapiens
  misc_RNA (1)...(19): siRNA sense strand
agggauggauuguaaacuu

SEQ ID NO: 2154529 - RNA, 19 nt, Homo sapiens
  misc_RNA (1)...(19): siRNA sense strand
gaccugaagaggaugauau

SEQ ID NO: 2154530 - RNA, 19 nt, Homo sapiens
  misc_RNA (1)...(19): siRNA sense strand
ugaggaugauggagggaaa

SEQ ID NO: 2154531 - RNA, 19 nt, Homo sapiens
  misc_RNA (1)...(19): siRNA sense strand
gcaauacauguuccaagug

SEQ ID NO: 2154532 - RNA, 19 nt, Homo sapiens
  misc_RNA (1)...(19): siRNA sense strand
cauagcugcuucacuugug

SEQ ID NO: 2154533 - RNA, 19 nt, Homo sapiens
  misc_RNA (1)...(19): siRNA sense strand
ugcaauacauguuccaagu

SEQ ID NO: 2154534 - RNA, 19 nt, Homo sapiens
  misc_RNA (1)...(19): siRNA sense strand
caaguagucaaguuucuuc

SEQ ID NO: 2154535 - RNA, 19 nt, Homo sapiens
  misc_RNA (1)...(19): siRNA sense strand
gcauuucaagcaucaucua

SEQ ID NO: 2154536 - RNA, 19 nt, Homo sapiens
  misc_RNA (1)...(19): siRNA sense strand
acauaaaacugacuuggaa

SEQ ID NO: 2154537 - RNA, 19 nt, Homo sapiens
  misc_RNA (1)...(19): siRNA sense strand
gacgauaccaggaaaggau

SEQ ID NO: 2154538 - RNA, 19 nt, Homo sapiens
  misc_RNA (1)...(19): siRNA sense strand
gaauuguuggugaggauga

SEQ ID NO: 2154539 - RNA, 19 nt, Homo sapiens
  misc_RNA (1)...(19): siRNA sense strand
aggaugauauggcuuucuu

SEQ ID NO: 2154540 - RNA, 19 nt, Homo sapiens
  misc_RNA (1)...(19): siRNA sense strand
ggauugguguaccuucagu

SEQ ID NO: 2154541 - RNA, 19 nt, Homo sapiens
  misc_RNA (1)...(19): siRNA sense strand
gcuacaugcgguuagauga

SEQ ID NO: 2154542 - RNA, 19 nt, Homo sapiens
  misc_RNA (1)...(19): siRNA sense strand
caagcaucaucuaguucuu

SEQ ID NO: 2154543 - RNA, 19 nt, Homo sapiens
  misc_RNA (1)...(19): siRNA sense strand
gaaaggaugaaaauggaaa

SEQ ID NO: 2154544 - RNA, 19 nt, Homo sapiens
  misc_RNA (1)...(19): siRNA sense strand
gauggauuguaaacuugug

SEQ ID NO: 2154545 - RNA, 19 nt, Homo sapiens
  misc_RNA (1)...(19): siRNA sense strand
ggcuuuacaugcaauacau

SEQ ID NO: 2154546 - RNA, 19 nt, Homo sapiens
  misc_RNA (1)...(19): siRNA sense strand
gcagggcuuaccuuuaugu

SEQ ID NO: 2154547 - RNA, 19 nt, Homo sapiens
  misc_RNA (1)...(19): siRNA sense strand
gaguaccggagaauuguug

SEQ ID NO: 2154548 - RNA, 19 nt, Homo sapiens
  misc_RNA (1)...(19): siRNA sense strand
agaaagauuggcucaggaa

SEQ ID NO: 2154549 - RNA, 19 nt, Homo sapiens
  misc_RNA (1)...(19): siRNA sense strand
cugcuucacuugugcuugu

SEQ ID NO: 2154550 - RNA, 19 nt, Homo sapiens
  misc_RNA (1)...(19): siRNA sense strand
aagaggaugauauggcuuu

SEQ ID NO: 2154551 - RNA, 19 nt, Homo sapiens
  misc_RNA (1)...(19): siRNA sense strand
ggagaccugaagaggauga

SEQ ID NO: 2154552 - RNA, 19 nt, Homo sapiens
  misc_RNA (1)...(19): siRNA sense strand
aguggaaacuaagcaagaa

SEQ ID NO: 2154553 - RNA, 19 nt, Homo sapiens
  misc_RNA (1)...(19): siRNA sense strand
guagguacaaguagucaag

SEQ ID NO: 2154554 - RNA, 19 nt, Homo sapiens
  misc_RNA (1)...(19): siRNA sense strand
ggcaguagacagcccauuc

SEQ ID NO: 2154555 - RNA, 19 nt, Homo sapiens
  misc_RNA (1)...(19): siRNA sense strand
ccucugcgcuuacaaaaca

SEQ ID NO: 2154556 - RNA, 19 nt, Homo sapiens
  misc_RNA (1)...(19): siRNA sense strand
gcgcuuacaaaacagauua

SEQ ID NO: 2154557 - RNA, 19 nt, Homo sapiens
  misc_RNA (1)...(19): siRNA sense strand
ggaguaccggagaauuguu

SEQ ID NO: 2154558 - RNA, 19 nt, Homo sapiens
  misc_RNA (1)...(19): siRNA sense strand
ggaugauauggcuuucuuu

SEQ ID NO: 2154559 - RNA, 19 nt, Homo sapiens
  misc_RNA (1)...(19): siRNA sense strand
ccauugccaucagcuacaa

SEQ ID NO: 2154560 - RNA, 19 nt, Homo sapiens
  misc_RNA (1)...(19): siRNA sense strand
ccaacagggauggauugua

SEQ ID NO: 2154561 - RNA, 19 nt, Homo sapiens
  misc_RNA (1)...(19): siRNA sense strand
ggauggauuguaaacuugu

SEQ ID NO: 2154562 - RNA, 19 nt, Homo sapiens
  misc_RNA (1)...(19): siRNA sense strand
ccaugacacaguaguggaa

SEQ ID NO: 2154563 - RNA, 19 nt, Homo sapiens
  misc_RNA (1)...(19): siRNA sense strand
ucaccaacagggauggauu

SEQ ID NO: 2154564 - RNA, 19 nt, Homo sapiens
  misc_RNA (1)...(19): siRNA sense strand
aaacuugugggcccagaga

SEQ ID NO: 2154565 - RNA, 19 nt, Homo sapiens
  misc_RNA (1)...(19): siRNA sense strand
ugggaggauuaacugguuu

SEQ ID NO: 2154566 - RNA, 19 nt, Homo sapiens
  misc_RNA (1)...(19): siRNA sense strand
gcagccaugggaggauuaa

SEQ ID NO: 2154567 - RNA, 19 nt, Homo sapiens
  misc_RNA (1)...(19): siRNA sense strand
uuccaaguguucaggauuc

SEQ ID NO: 2154568 - RNA, 19 nt, Homo sapiens
  misc_RNA (1)...(19): siRNA sense strand
aaaggcugcuaaguggaaa

SEQ ID NO: 2154569 - RNA, 19 nt, Homo sapiens
  misc_RNA (1)...(19): siRNA sense strand
uacaaguagucaaguuucu

SEQ ID NO: 2154570 - RNA, 19 nt, Homo sapiens
  misc_RNA (1)...(19): siRNA sense strand
uuuagaaucucccauuacg

SEQ ID NO: 2154571 - RNA, 19 nt, Homo sapiens
  misc_RNA (1)...(19): siRNA sense strand
ugacagugggauuggugua

SEQ ID NO: 2154572 - RNA, 19 nt, Homo sapiens
  misc_RNA (1)...(19): siRNA sense strand
caccaacagggauggauug

SEQ ID NO: 2154573 - RNA, 19 nt, Homo sapiens
  misc_RNA (1)...(19): siRNA sense strand
ugggauugguguaccuuca

SEQ ID NO: 2154574 - RNA, 19 nt, Homo sapiens
  misc_RNA (1)...(19): siRNA sense strand
cuccagaaacguuaacaga

SEQ ID NO: 2154575 - RNA, 19 nt, Homo sapiens
  misc_RNA (1)...(19): siRNA sense strand
aaaagcauuucaagcauca

SEQ ID NO: 2154576 - RNA, 19 nt, Homo sapiens
  misc_RNA (1)...(19): siRNA sense strand
agacagcccauuccuaaaa

SEQ ID NO: 2154577 - RNA, 19 nt, Homo sapiens
  misc_RNA (1)...(19): siRNA sense strand
caacagggauggauuguaa

SEQ ID NO: 2154578 - RNA, 19 nt, Homo sapiens
  misc_RNA (1)...(19): siRNA sense strand
gaaagacgauaccaggaaa

SEQ ID NO: 2154579 - RNA, 19 nt, Homo sapiens
  misc_RNA (1)...(19): siRNA sense strand
gaucugcccugccaaguga

SEQ ID NO: 2154580 - RNA, 19 nt, Homo sapiens
  misc_RNA (1)...(19): siRNA sense strand
gugcagggcuuaccuuuau

SEQ ID NO: 2154581 - RNA, 19 nt, Homo sapiens
  misc_RNA (1)...(19): siRNA sense strand
guagacagcccauuccuaa

SEQ ID NO: 2154582 - RNA, 19 nt, Homo sapiens
  misc_RNA (1)...(19): siRNA sense strand
ccagaaacguuaacagaug

SEQ ID NO: 2154583 - RNA, 19 nt, Homo sapiens
  misc_RNA (1)...(19): siRNA sense strand
ugauauggcuuucuuugaa

SEQ ID NO: 2154584 - RNA, 19 nt, Homo sapiens
  misc_RNA (1)...(19): siRNA sense strand
guagucaaguuucuucauu

SEQ ID NO: 2154585 - RNA, 19 nt, Homo sapiens
  misc_RNA (1)...(19): siRNA sense strand
gaugauggagggaaacuuu

SEQ ID NO: 2154586 - RNA, 19 nt, Homo sapiens
  misc_RNA (1)...(19): siRNA sense strand
caauacauguuccaagugu

SEQ ID NO: 2154587 - RNA, 19 nt, Homo sapiens
  misc_RNA (1)...(19): siRNA sense strand
gggauggauuguaaacuug

SEQ ID NO: 2154588 - RNA, 19 nt, Homo sapiens
  misc_RNA (1)...(19): siRNA sense strand
acacauagguauaaacaac

SEQ ID NO: 2154589 - RNA, 19 nt, Homo sapiens
  misc_RNA (1)...(19): siRNA sense strand
gagaauuguuggugaggau

SEQ ID NO: 2154590 - RNA, 19 nt, Homo sapiens
  misc_RNA (1)...(19): siRNA sense strand
gaugauauggcuuucuuug

SEQ ID NO: 2154591 - RNA, 19 nt, Homo sapiens
  misc_RNA (1)...(19): siRNA sense strand
guacacauagguauaaaca

SEQ ID NO: 2154592 - RNA, 19 nt, Homo sapiens
  misc_RNA (1)...(19): siRNA sense strand
cagaaacguuaacagaugu

SEQ ID NO: 2154593 - RNA, 19 nt, Homo sapiens
  misc_RNA (1)...(19): siRNA sense strand
ucaaguuucuucauuaagg

SEQ ID NO: 2154594 - RNA, 19 nt, Homo sapiens
  misc_RNA (1)...(19): siRNA sense strand
gcugcuaaguggaaaggaa

SEQ ID NO: 2154595 - RNA, 19 nt, Homo sapiens
  misc_RNA (1)...(19): siRNA sense strand
caaguuucuucauuaagga

SEQ ID NO: 2154596 - RNA, 19 nt, Homo sapiens
  misc_RNA (1)...(19): siRNA sense strand
uuccauagcugcuucacuu

SEQ ID NO: 2154597 - RNA, 19 nt, Homo sapiens
  misc_RNA (1)...(19): siRNA sense strand
aaggagaccugaagaggau

SEQ ID NO: 2154598 - RNA, 19 nt, Homo sapiens
  misc_RNA (1)...(19): siRNA sense strand
gguacaaguagucaaguuu

SEQ ID NO: 2154599 - RNA, 19 nt, Homo sapiens
  misc_RNA (1)...(19): siRNA sense strand
gaaagauuggcucaggaaa

SEQ ID NO: 2154600 - RNA, 19 nt, Homo sapiens
  misc_RNA (1)...(19): siRNA sense strand
ggaaacuaagcaagaaaga

SEQ ID NO: 2154601 - RNA, 19 nt, Homo sapiens
  misc_RNA (1)...(19): siRNA sense strand
ugaaagacgauaccaggaa

SEQ ID NO: 2154602 - RNA, 19 nt, Homo sapiens
  misc_RNA (1)...(19): siRNA sense strand
uuucaagcaucaucuaguu

SEQ ID NO: 2154603 - RNA, 19 nt, Homo sapiens
  misc_RNA (1)...(19): siRNA sense strand
ggaaggcuacaugcgguua

SEQ ID NO: 2154604 - RNA, 19 nt, Homo sapiens
  misc_RNA (1)...(19): siRNA sense strand
gcgccuggcuuuacaugca

SEQ ID NO: 2154605 - RNA, 19 nt, Homo sapiens
  misc_RNA (1)...(19): siRNA sense strand
gaaacuaagcaagaaagau

SEQ ID NO: 2154606 - RNA, 19 nt, Homo sapiens
  misc_RNA (1)...(19): siRNA sense strand
gaaaggaaaagcuccauug

SEQ ID NO: 2154607 - RNA, 19 nt, Homo sapiens
  misc_RNA (1)...(19): siRNA sense strand
guacaaguagucaaguuuc

SEQ ID NO: 2154608 - RNA, 19 nt, Homo sapiens
  misc_RNA (1)...(19): siRNA sense strand
agggauggauuguaaacuu

SEQ ID NO: 2154609 - RNA, 19 nt, Homo sapiens
  misc_RNA (1)...(19): siRNA sense strand
gaccugaagaggaugauau

SEQ ID NO: 2154610 - RNA, 19 nt, Homo sapiens
  misc_RNA (1)...(19): siRNA sense strand
ugaggaugauggagggaaa

SEQ ID NO: 2154611 - RNA, 19 nt, Homo sapiens
  misc_RNA (1)...(19): siRNA sense strand
gcaauacauguuccaagug

SEQ ID NO: 2154612 - RNA, 19 nt, Homo sapiens
  misc_RNA (1)...(19): siRNA sense strand
cauagcugcuucacuugug

SEQ ID NO: 2154613 - RNA, 19 nt, Homo sapiens
  misc_RNA (1)...(19): siRNA sense strand
ugcaauacauguuccaagu

SEQ ID NO: 2154614 - RNA, 19 nt, Homo sapiens
  misc_RNA (1)...(19): siRNA sense strand
caaguagucaaguuucuuc

SEQ ID NO: 2154615 - RNA, 19 nt, Homo sapiens
  misc_RNA (1)...(19): siRNA sense strand
gcauuucaagcaucaucua

SEQ ID NO: 2154616 - RNA, 19 nt, Homo sapiens
  misc_RNA (1)...(19): siRNA sense strand
acauaaaacugacuuggaa

SEQ ID NO: 2154617 - RNA, 19 nt, Homo sapiens
  misc_RNA (1)...(19): siRNA sense strand
gacgauaccaggaaaggau

SEQ ID NO: 2154618 - RNA, 19 nt, Homo sapiens
  misc_RNA (1)...(19): siRNA sense strand
gaauuguuggugaggauga

SEQ ID NO: 2154619 - RNA, 19 nt, Homo sapiens
  misc_RNA (1)...(19): siRNA sense strand
aggaugauauggcuuucuu

SEQ ID NO: 2154620 - RNA, 19 nt, Homo sapiens
  misc_RNA (1)...(19): siRNA sense strand
ggauugguguaccuucagu

SEQ ID NO: 2154621 - RNA, 19 nt, Homo sapiens
  misc_RNA (1)...(19): siRNA sense strand
gcuacaugcgguuagauga

SEQ ID NO: 2154622 - RNA, 19 nt, Homo sapiens
  misc_RNA (1)...(19): siRNA sense strand
caagcaucaucuaguucuu

SEQ ID NO: 2154623 - RNA, 19 nt, Homo sapiens
  misc_RNA (1)...(19): siRNA sense strand
gaaaggaugaaaauggaaa

SEQ ID NO: 2154624 - RNA, 19 nt, Homo sapiens
  misc_RNA (1)...(19): siRNA sense strand
gauggauuguaaacuugug

SEQ ID NO: 2154625 - RNA, 19 nt, Homo sapiens
  misc_RNA (1)...(19): siRNA sense strand
ggcuuuacaugcaauacau

SEQ ID NO: 2154626 - RNA, 19 nt, Homo sapiens
  misc_RNA (1)...(19): siRNA sense strand
gcagggcuuaccuuuaugu

SEQ ID NO: 2154627 - RNA, 19 nt, Homo sapiens
  misc_RNA (1)...(19): siRNA sense strand
gaguaccggagaauuguug

SEQ ID NO: 2154628 - RNA, 19 nt, Homo sapiens
  misc_RNA (1)...(19): siRNA sense strand
agaaagauuggcucaggaa

SEQ ID NO: 2154629 - RNA, 19 nt, Homo sapiens
  misc_RNA (1)...(19): siRNA sense strand
cugcuucacuugugcuugu

SEQ ID NO: 2154630 - RNA, 19 nt, Homo sapiens
  misc_RNA (1)...(19): siRNA sense strand
aagaggaugauauggcuuu

SEQ ID NO: 2154631 - RNA, 19 nt, Homo sapiens
  misc_RNA (1)...(19): siRNA sense strand
ggagaccugaagaggauga

SEQ ID NO: 2154632 - RNA, 19 nt, Homo sapiens
  misc_RNA (1)...(19): siRNA sense strand
aguggaaacuaagcaagaa

SEQ ID NO: 2154633 - RNA, 19 nt, Homo sapiens
  misc_RNA (1)...(19): siRNA sense strand
guagguacaaguagucaag

SEQ ID NO: 2154634 - RNA, 19 nt, Homo sapiens
  misc_RNA (1)...(19): siRNA sense strand
ggcaguagacagcccauuc

SEQ ID NO: 2154635 - RNA, 19 nt, Homo sapiens
  misc_RNA (1)...(19): siRNA sense strand
ccucugcgcuuacaaaaca

SEQ ID NO: 2154636 - RNA, 19 nt, Homo sapiens
  misc_RNA (1)...(19): siRNA sense strand
gcgcuuacaaaacagauua

SEQ ID NO: 2154637 - RNA, 19 nt, Homo sapiens
  misc_RNA (1)...(19): siRNA sense strand
ggaguaccggagaauuguu

SEQ ID NO: 2154638 - RNA, 19 nt, Homo sapiens
  misc_RNA (1)...(19): siRNA sense strand
ggaugauauggcuuucuuu

SEQ ID NO: 2154639 - RNA, 19 nt, Homo sapiens
  misc_RNA (1)...(19): siRNA sense strand
ccauugccaucagcuacaa

SEQ ID NO: 2154640 - RNA, 19 nt, Homo sapiens
  misc_RNA (1)...(19): siRNA sense strand
ccaacagggauggauugua

SEQ ID NO: 2154641 - RNA, 19 nt, Homo sapiens
  misc_RNA (1)...(19): siRNA sense strand
ggauggauuguaaacuugu

SEQ ID NO: 2154642 - RNA, 19 nt, Homo sapiens
  misc_RNA (1)...(19): siRNA sense strand
ccaugacacaguaguggaa

SEQ ID NO: 2154643 - RNA, 19 nt, Homo sapiens
  misc_RNA (1)...(19): siRNA sense strand
ucaccaacagggauggauu

SEQ ID NO: 2154644 - RNA, 19 nt, Homo sapiens
  misc_RNA (1)...(19): siRNA sense strand
aaacuugugggcccagaga

SEQ ID NO: 2154645 - RNA, 19 nt, Homo sapiens
  misc_RNA (1)...(19): siRNA sense strand
ugggaggauuaacugguuu

SEQ ID NO: 2154646 - RNA, 19 nt, Homo sapiens
  misc_RNA (1)...(19): siRNA sense strand
gcagccaugggaggauuaa

SEQ ID NO: 2154647 - RNA, 19 nt, Homo sapiens
  misc_RNA (1)...(19): siRNA sense strand
uuccaaguguucaggauuc

SEQ ID NO: 2154648 - RNA, 19 nt, Homo sapiens
  misc_RNA (1)...(19): siRNA sense strand
aaaggcugcuaaguggaaa

SEQ ID NO: 2154649 - RNA, 19 nt, Homo sapiens
  misc_RNA (1)...(19): siRNA sense strand
uacaaguagucaaguuucu

SEQ ID NO: 2154650 - RNA, 19 nt, Homo sapiens
  misc_RNA (1)...(19): siRNA sense strand
uuuagaaucucccauuacg

SEQ ID NO: 2154651 - RNA, 19 nt, Homo sapiens
  misc_RNA (1)...(19): siRNA sense strand
ugacagugggauuggugua

SEQ ID NO: 2154652 - RNA, 19 nt, Homo sapiens
  misc_RNA (1)...(19): siRNA sense strand
caccaacagggauggauug

SEQ ID NO: 2154653 - RNA, 19 nt, Homo sapiens
  misc_RNA (1)...(19): siRNA sense strand
ugggauugguguaccuuca

SEQ ID NO: 2154654 - RNA, 19 nt, Homo sapiens
  misc_RNA (1)...(19): siRNA sense strand
cuccagaaacguuaacaga

SEQ ID NO: 2154655 - RNA, 19 nt, Homo sapiens
  misc_RNA (1)...(19): siRNA sense strand
aaaagcauuucaagcauca

SEQ ID NO: 2154656 - RNA, 19 nt, Homo sapiens
  misc_RNA (1)...(19): siRNA sense strand
agacagcccauuccuaaaa

SEQ ID NO: 2154657 - RNA, 19 nt, Homo sapiens
  misc_RNA (1)...(19): siRNA sense strand
caaagcagauggagucuua

SEQ ID NO: 2154658 - RNA, 19 nt, Homo sapiens
  misc_RNA (1)...(19): siRNA sense strand
gaaaugaucuucgaaaggu

SEQ ID NO: 2154659 - RNA, 19 nt, Homo sapiens
  misc_RNA (1)...(19): siRNA sense strand
agaaagggcuuaaagaaga

SEQ ID NO: 2154660 - RNA, 19 nt, Homo sapiens
  misc_RNA (1)...(19): siRNA sense strand
gaaggucccugagcucuuu

SEQ ID NO: 2154661 - RNA, 19 nt, Homo sapiens
  misc_RNA (1)...(19): siRNA sense strand
uauaugaccuuucagauga

SEQ ID NO: 2154662 - RNA, 19 nt, Homo sapiens
  misc_RNA (1)...(19): siRNA sense strand
caacagaaaugaucuucga

SEQ ID NO: 2154663 - RNA, 19 nt, Homo sapiens
  misc_RNA (1)...(19): siRNA sense strand
ggaaauacggcuaacaauu

SEQ ID NO: 2154664 - RNA, 19 nt, Homo sapiens
  misc_RNA (1)...(19): siRNA sense strand
gagauguacuugguaauuu

SEQ ID NO: 2154665 - RNA, 19 nt, Homo sapiens
  misc_RNA (1)...(19): siRNA sense strand
gcagaaagggcuuaaagaa

SEQ ID NO: 2154666 - RNA, 19 nt, Homo sapiens
  misc_RNA (1)...(19): siRNA sense strand
agacuacacugguaaauau

SEQ ID NO: 2154667 - RNA, 19 nt, Homo sapiens
  misc_RNA (1)...(19): siRNA sense strand
caacaaagcauucaucagu

SEQ ID NO: 2154668 - RNA, 19 nt, Homo sapiens
  misc_RNA (1)...(19): siRNA sense strand
gccaaagucuggucugauu

SEQ ID NO: 2154669 - RNA, 19 nt, Homo sapiens
  misc_RNA (1)...(19): siRNA sense strand
gaacaucauugucagaaac

SEQ ID NO: 2154670 - RNA, 19 nt, Homo sapiens
  misc_RNA (1)...(19): siRNA sense strand
gaaauaaagacccuucugu

SEQ ID NO: 2154671 - RNA, 19 nt, Homo sapiens
  misc_RNA (1)...(19): siRNA sense strand
acaaagcauucaucaguuu

SEQ ID NO: 2154672 - RNA, 19 nt, Homo sapiens
  misc_RNA (1)...(19): siRNA sense strand
gcagauggagucuuagaaa

SEQ ID NO: 2154673 - RNA, 19 nt, Homo sapiens
  misc_RNA (1)...(19): siRNA sense strand
gcacauggcuacuguacac

SEQ ID NO: 2154674 - RNA, 19 nt, Homo sapiens
  misc_RNA (1)...(19): siRNA sense strand
uaaagacccuucuguuugg

SEQ ID NO: 2154675 - RNA, 19 nt, Homo sapiens
  misc_RNA (1)...(19): siRNA sense strand
gggugaaacuccuguguug

SEQ ID NO: 2154676 - RNA, 19 nt, Homo sapiens
  misc_RNA (1)...(19): siRNA sense strand
uaacacagccucauuaaaa

SEQ ID NO: 2154677 - RNA, 19 nt, Homo sapiens
  misc_RNA (1)...(19): siRNA sense strand
gagacuacacugguaaaua

SEQ ID NO: 2154678 - RNA, 19 nt, Homo sapiens
  misc_RNA (1)...(19): siRNA sense strand
ggagauguacuugguaauu

SEQ ID NO: 2154679 - RNA, 19 nt, Homo sapiens
  misc_RNA (1)...(19): siRNA sense strand
uagaaacacuuacgcuuca

SEQ ID NO: 2154680 - RNA, 19 nt, Homo sapiens
  misc_RNA (1)...(19): siRNA sense strand
uaacaaagugccaucaaga

SEQ ID NO: 2154681 - RNA, 19 nt, Homo sapiens
  misc_RNA (1)...(19): siRNA sense strand
aauaaagacccuucuguuu

SEQ ID NO: 2154682 - RNA, 19 nt, Homo sapiens
  misc_RNA (1)...(19): siRNA sense strand
ggugguaauuccaggauga

SEQ ID NO: 2154683 - RNA, 19 nt, Homo sapiens
  misc_RNA (1)...(19): siRNA sense strand
cacaggaacuugucaaucu

SEQ ID NO: 2154684 - RNA, 19 nt, Homo sapiens
  misc_RNA (1)...(19): siRNA sense strand
cacuuacgcuucacaguuu

SEQ ID NO: 2154685 - RNA, 19 nt, Homo sapiens
  misc_RNA (1)...(19): siRNA sense strand
cuggaucacuuuggaaaua

SEQ ID NO: 2154686 - RNA, 19 nt, Homo sapiens
  misc_RNA (1)...(19): siRNA sense strand
gaagaugcaggauggagaa

SEQ ID NO: 2154687 - RNA, 19 nt, Homo sapiens
  misc_RNA (1)...(19): siRNA sense strand
gcauaaacaacagaaauga

SEQ ID NO: 2154688 - RNA, 19 nt, Homo sapiens
  misc_RNA (1)...(19): siRNA sense strand
gaaauacaaagcagaugga

SEQ ID NO: 2154689 - RNA, 19 nt, Homo sapiens
  misc_RNA (1)...(19): siRNA sense strand
ucaagaugcucagagacua

SEQ ID NO: 2154690 - RNA, 19 nt, Homo sapiens
  misc_RNA (1)...(19): siRNA sense strand
gauacuuucuggaucacuu

SEQ ID NO: 2154691 - RNA, 19 nt, Homo sapiens
  misc_RNA (1)...(19): siRNA sense strand
gcuaacaauuucacucaag

SEQ ID NO: 2154692 - RNA, 19 nt, Homo sapiens
  misc_RNA (1)...(19): siRNA sense strand
augaggaccuggugacuuu

SEQ ID NO: 2154693 - RNA, 19 nt, Homo sapiens
  misc_RNA (1)...(19): siRNA sense strand
auaaagacccuucuguuug

SEQ ID NO: 2154694 - RNA, 19 nt, Homo sapiens
  misc_RNA (1)...(19): siRNA sense strand
uuagugaacugaccguaga

SEQ ID NO: 2154695 - RNA, 19 nt, Homo sapiens
  misc_RNA (1)...(19): siRNA sense strand
cagaaaugaucuucgaaag

SEQ ID NO: 2154696 - RNA, 19 nt, Homo sapiens
  misc_RNA (1)...(19): siRNA sense strand
caucagugcucaaguugca

SEQ ID NO: 2154697 - RNA, 19 nt, Homo sapiens
  misc_RNA (1)...(19): siRNA sense strand
gagaacaaggcaaaggaaa

SEQ ID NO: 2154698 - RNA, 19 nt, Homo sapiens
  misc_RNA (1)...(19): siRNA sense strand
gaaagggcuuaaagaagac

SEQ ID NO: 2154699 - RNA, 19 nt, Homo sapiens
  misc_RNA (1)...(19): siRNA sense strand
ucgaggauguggaggauga

SEQ ID NO: 2154700 - RNA, 19 nt, Homo sapiens
  misc_RNA (1)...(19): siRNA sense strand
cuaacaauuucacucaaga

SEQ ID NO: 2154701 - RNA, 19 nt, Homo sapiens
  misc_RNA (1)...(19): siRNA sense strand
ggagaacaaggcaaaggaa

SEQ ID NO: 2154702 - RNA, 19 nt, Homo sapiens
  misc_RNA (1)...(19): siRNA sense strand
acacagcaguucaguccaa

SEQ ID NO: 2154703 - RNA, 19 nt, Homo sapiens
  misc_RNA (1)...(19): siRNA sense strand
ccaauugaccucucaguag

SEQ ID NO: 2154704 - RNA, 19 nt, Homo sapiens
  misc_RNA (1)...(19): siRNA sense strand
cuacuugccuggugguaau

SEQ ID NO: 2154705 - RNA, 19 nt, Homo sapiens
  misc_RNA (1)...(19): siRNA sense strand
ugaagaggaugggagagaa

SEQ ID NO: 2154706 - RNA, 19 nt, Homo sapiens
  misc_RNA (1)...(19): siRNA sense strand
gagaacaucauugucagaa

SEQ ID NO: 2154707 - RNA, 19 nt, Homo sapiens
  misc_RNA (1)...(19): siRNA sense strand
uuaaagaagacauguguga

SEQ ID NO: 2154708 - RNA, 19 nt, Homo sapiens
  misc_RNA (1)...(19): siRNA sense strand
gaacucaucaccagauacu

SEQ ID NO: 2154709 - RNA, 19 nt, Homo sapiens
  misc_RNA (1)...(19): siRNA sense strand
aaacuccuguguugacuuc

SEQ ID NO: 2154710 - RNA, 19 nt, Homo sapiens
  misc_RNA (1)...(19): siRNA sense strand
gggagaagauagacaagcu

SEQ ID NO: 2154711 - RNA, 19 nt, Homo sapiens
  misc_RNA (1)...(19): siRNA sense strand
guaacacagccucauuaaa

SEQ ID NO: 2154712 - RNA, 19 nt, Homo sapiens
  misc_RNA (1)...(19): siRNA sense strand
aaauaaagacccuucuguu

SEQ ID NO: 2154713 - RNA, 19 nt, Homo sapiens
  misc_RNA (1)...(19): siRNA sense strand
gggaguuccucagcagaaa

SEQ ID NO: 2154714 - RNA, 19 nt, Homo sapiens
  misc_RNA (1)...(19): siRNA sense strand
uaguaacacagccucauua

SEQ ID NO: 2154715 - RNA, 19 nt, Homo sapiens
  misc_RNA (1)...(19): siRNA sense strand
gaugcaggauggagaacau

SEQ ID NO: 2154716 - RNA, 19 nt, Homo sapiens
  misc_RNA (1)...(19): siRNA sense strand
ggaaauaaagacccuucug

SEQ ID NO: 2154717 - RNA, 19 nt, Homo sapiens
  misc_RNA (1)...(19): siRNA sense strand
gagccuuccuuggauguga

SEQ ID NO: 2154718 - RNA, 19 nt, Homo sapiens
  misc_RNA (1)...(19): siRNA sense strand
cccaaucccugcacucuca

SEQ ID NO: 2154719 - RNA, 19 nt, Homo sapiens
  misc_RNA (1)...(19): siRNA sense strand
aacaaagcauucaucaguu

SEQ ID NO: 2154720 - RNA, 19 nt, Homo sapiens
  misc_RNA (1)...(19): siRNA sense strand
cagcauaaacaacagaaau

SEQ ID NO: 2154721 - RNA, 19 nt, Homo sapiens
  misc_RNA (1)...(19): siRNA sense strand
gaagaggaugggagagaau

SEQ ID NO: 2154722 - RNA, 19 nt, Homo sapiens
  misc_RNA (1)...(19): siRNA sense strand
ggauguggaggaugaguug

SEQ ID NO: 2154723 - RNA, 19 nt, Homo sapiens
  misc_RNA (1)...(19): siRNA sense strand
acucucaguuccaaagaaa

SEQ ID NO: 2154724 - RNA, 19 nt, Homo sapiens
  misc_RNA (1)...(19): siRNA sense strand
gaccucagcauaaacaaca

SEQ ID NO: 2154725 - RNA, 19 nt, Homo sapiens
  misc_RNA (1)...(19): siRNA sense strand
uguggaggaugaguugaua

SEQ ID NO: 2154726 - RNA, 19 nt, Homo sapiens
  misc_RNA (1)...(19): siRNA sense strand
ggagaacaucauugucaga

SEQ ID NO: 2154727 - RNA, 19 nt, Homo sapiens
  misc_RNA (1)...(19): siRNA sense strand
acacuuacgcuucacaguu

SEQ ID NO: 2154728 - RNA, 19 nt, Homo sapiens
  misc_RNA (1)...(19): siRNA sense strand
gcuuaaagaagacaugugu

SEQ ID NO: 2154729 - RNA, 19 nt, Homo sapiens
  misc_RNA (1)...(19): siRNA sense strand
cagaaagggcuuaaagaag

SEQ ID NO: 2154730 - RNA, 19 nt, Homo sapiens
  misc_RNA (1)...(19): siRNA sense strand
agaacaucauugucagaaa

SEQ ID NO: 2154731 - RNA, 19 nt, Homo sapiens
  misc_RNA (1)...(19): siRNA sense strand
gcaaagccagacaugacaa

SEQ ID NO: 2154732 - RNA, 19 nt, Homo sapiens
  misc_RNA (1)...(19): siRNA sense strand
agagagagccguuguugca

SEQ ID NO: 2154733 - RNA, 19 nt, Homo sapiens
  misc_RNA (1)...(19): siRNA sense strand
caaagucuggucugauugu

SEQ ID NO: 2154734 - RNA, 19 nt, Homo sapiens
  misc_RNA (1)...(19): siRNA sense strand
gagaauuccaggccaaagu

SEQ ID NO: 2154735 - RNA, 19 nt, Homo sapiens
  misc_RNA (1)...(19): siRNA sense strand
ugauggagauguacuuggu

SEQ ID NO: 2154736 - RNA, 19 nt, Homo sapiens
  misc_RNA (1)...(19): siRNA sense strand
cgaaagguuuugcaucuug

SEQ ID NO: 2154737 - RNA, 19 nt, Homo sapiens
  misc_RNA (1)...(19): siRNA sense strand
gcucauccgccaggacuuu

SEQ ID NO: 2154738 - RNA, 19 nt, Homo sapiens
  misc_RNA (1)...(19): siRNA sense strand
gaaagguuuugcaucuuga

SEQ ID NO: 2154739 - RNA, 19 nt, Homo sapiens
  misc_RNA (1)...(19): siRNA sense strand
cgagagagagccguuguug

SEQ ID NO: 2154740 - RNA, 19 nt, Homo sapiens
  misc_RNA (1)...(19): siRNA sense strand
ucccaucagugcucaaguu

SEQ ID NO: 2154741 - RNA, 19 nt, Homo sapiens
  misc_RNA (1)...(19): siRNA sense strand
acagaaaugaucuucgaaa

SEQ ID NO: 2154742 - RNA, 19 nt, Homo sapiens
  misc_RNA (1)...(19): siRNA sense strand
acucaucaccagauacuuu

SEQ ID NO: 2154743 - RNA, 19 nt, Homo sapiens
  misc_RNA (1)...(19): siRNA sense strand
ggagucuuagaaacacuua

SEQ ID NO: 2154744 - RNA, 19 nt, Homo sapiens
  misc_RNA (1)...(19): siRNA sense strand
gaacaaggcaaaggaaaau

SEQ ID NO: 2154745 - RNA, 19 nt, Homo sapiens
  misc_RNA (1)...(19): siRNA sense strand
cagcagaaagggcuuaaag

SEQ ID NO: 2154746 - RNA, 19 nt, Homo sapiens
  misc_RNA (1)...(19): siRNA sense strand
gguuuugcaucuugaauuu

SEQ ID NO: 2154747 - RNA, 19 nt, Homo sapiens
  misc_RNA (1)...(19): siRNA sense strand
ucagagacuacacugguaa

SEQ ID NO: 2154748 - RNA, 19 nt, Homo sapiens
  misc_RNA (1)...(19): siRNA sense strand
ccagacaugacaaucuuga

SEQ ID NO: 2154749 - RNA, 19 nt, Homo sapiens
  misc_RNA (1)...(19): siRNA sense strand
cagauggagucuuagaaac

SEQ ID NO: 2154750 - RNA, 19 nt, Homo sapiens
  misc_RNA (1)...(19): siRNA sense strand
gcacuggcuucgagaacac

SEQ ID NO: 2154751 - RNA, 19 nt, Homo sapiens
  misc_RNA (1)...(19): siRNA sense strand
gcucgaggauguggaggau

SEQ ID NO: 2154752 - RNA, 19 nt, Homo sapiens
  misc_RNA (1)...(19): siRNA sense strand
caagcaaagccagacauga

SEQ ID NO: 2154753 - RNA, 19 nt, Homo sapiens
  misc_RNA (1)...(19): siRNA sense strand
caaugaagaauggaaacuu

SEQ ID NO: 2154754 - RNA, 19 nt, Homo sapiens
  misc_RNA (1)...(19): siRNA sense strand
guagcaaaggaaauaaaga

SEQ ID NO: 2154755 - RNA, 19 nt, Homo sapiens
  misc_RNA (1)...(19): siRNA sense strand
ggaaggucccugagcucuu

SEQ ID NO: 2154756 - RNA, 19 nt, Homo sapiens
  misc_RNA (1)...(19): siRNA sense strand
gauggagauguacuuggua

SEQ ID NO: 2154757 - RNA, 19 nt, Homo sapiens
  misc_RNA (1)...(19): siRNA sense strand
caaagcagauggagucuua

SEQ ID NO: 2154758 - RNA, 19 nt, Homo sapiens
  misc_RNA (1)...(19): siRNA sense strand
gaaaugaucuucgaaaggu

SEQ ID NO: 2154759 - RNA, 19 nt, Homo sapiens
  misc_RNA (1)...(19): siRNA sense strand
agaaagggcuuaaagaaga

SEQ ID NO: 2154760 - RNA, 19 nt, Homo sapiens
  misc_RNA (1)...(19): siRNA sense strand
gaaggucccugagcucuuu

SEQ ID NO: 2154761 - RNA, 19 nt, Homo sapiens
  misc_RNA (1)...(19): siRNA sense strand
uauaugaccuuucagauga

SEQ ID NO: 2154762 - RNA, 19 nt, Homo sapiens
  misc_RNA (1)...(19): siRNA sense strand
caacagaaaugaucuucga

SEQ ID NO: 2154763 - RNA, 19 nt, Homo sapiens
  misc_RNA (1)...(19): siRNA sense strand
ggaaauacggcuaacaauu

SEQ ID NO: 2154764 - RNA, 19 nt, Homo sapiens
  misc_RNA (1)...(19): siRNA sense strand
gagauguacuugguaauuu

SEQ ID NO: 2154765 - RNA, 19 nt, Homo sapiens
  misc_RNA (1)...(19): siRNA sense strand
gcagaaagggcuuaaagaa

SEQ ID NO: 2154766 - RNA, 19 nt, Homo sapiens
  misc_RNA (1)...(19): siRNA sense strand
agacuacacugguaaauau

SEQ ID NO: 2154767 - RNA, 19 nt, Homo sapiens
  misc_RNA (1)...(19): siRNA sense strand
caacaaagcauucaucagu

SEQ ID NO: 2154768 - RNA, 19 nt, Homo sapiens
  misc_RNA (1)...(19): siRNA sense strand
gccaaagucuggucugauu

SEQ ID NO: 2154769 - RNA, 19 nt, Homo sapiens
  misc_RNA (1)...(19): siRNA sense strand
gaacaucauugucagaaac

SEQ ID NO: 2154770 - RNA, 19 nt, Homo sapiens
  misc_RNA (1)...(19): siRNA sense strand
gaaauaaagacccuucugu

SEQ ID NO: 2154771 - RNA, 19 nt, Homo sapiens
  misc_RNA (1)...(19): siRNA sense strand
acaaagcauucaucaguuu

SEQ ID NO: 2154772 - RNA, 19 nt, Homo sapiens
  misc_RNA (1)...(19): siRNA sense strand
gcagauggagucuuagaaa

SEQ ID NO: 2154773 - RNA, 19 nt, Homo sapiens
  misc_RNA (1)...(19): siRNA sense strand
gcacauggcuacuguacac

SEQ ID NO: 2154774 - RNA, 19 nt, Homo sapiens
  misc_RNA (1)...(19): siRNA sense strand
uaaagacccuucuguuugg

SEQ ID NO: 2154775 - RNA, 19 nt, Homo sapiens
  misc_RNA (1)...(19): siRNA sense strand
gggugaaacuccuguguug

SEQ ID NO: 2154776 - RNA, 19 nt, Homo sapiens
  misc_RNA (1)...(19): siRNA sense strand
uaacacagccucauuaaaa

SEQ ID NO: 2154777 - RNA, 19 nt, Homo sapiens
  misc_RNA (1)...(19): siRNA sense strand
gagacuacacugguaaaua

SEQ ID NO: 2154778 - RNA, 19 nt, Homo sapiens
  misc_RNA (1)...(19): siRNA sense strand
ggagauguacuugguaauu

SEQ ID NO: 2154779 - RNA, 19 nt, Homo sapiens
  misc_RNA (1)...(19): siRNA sense strand
uagaaacacuuacgcuuca

SEQ ID NO: 2154780 - RNA, 19 nt, Homo sapiens
  misc_RNA (1)...(19): siRNA sense strand
uaacaaagugccaucaaga

SEQ ID NO: 2154781 - RNA, 19 nt, Homo sapiens
  misc_RNA (1)...(19): siRNA sense strand
aauaaagacccuucuguuu

SEQ ID NO: 2154782 - RNA, 19 nt, Homo sapiens
  misc_RNA (1)...(19): siRNA sense strand
ggugguaauuccaggauga

SEQ ID NO: 2154783 - RNA, 19 nt, Homo sapiens
  misc_RNA (1)...(19): siRNA sense strand
gcagugauauuggcuucuu

SEQ ID NO: 2154784 - RNA, 19 nt, Homo sapiens
  misc_RNA (1)...(19): siRNA sense strand
cacaggaacuugucaaucu

SEQ ID NO: 2154785 - RNA, 19 nt, Homo sapiens
  misc_RNA (1)...(19): siRNA sense strand
cacuuacgcuucacaguuu

SEQ ID NO: 2154786 - RNA, 19 nt, Homo sapiens
  misc_RNA (1)...(19): siRNA sense strand
cuggaucacuuuggaaaua

SEQ ID NO: 2154787 - RNA, 19 nt, Homo sapiens
  misc_RNA (1)...(19): siRNA sense strand
gaagaugcaggauggagaa

SEQ ID NO: 2154788 - RNA, 19 nt, Homo sapiens
  misc_RNA (1)...(19): siRNA sense strand
gcauaaacaacagaaauga

SEQ ID NO: 2154789 - RNA, 19 nt, Homo sapiens
  misc_RNA (1)...(19): siRNA sense strand
gaaauacaaagcagaugga

SEQ ID NO: 2154790 - RNA, 19 nt, Homo sapiens
  misc_RNA (1)...(19): siRNA sense strand
ucaagaugcucagagacua

SEQ ID NO: 2154791 - RNA, 19 nt, Homo sapiens
  misc_RNA (1)...(19): siRNA sense strand
gauacuuucuggaucacuu

SEQ ID NO: 2154792 - RNA, 19 nt, Homo sapiens
  misc_RNA (1)...(19): siRNA sense strand
ggacacagacaacgaccuu

SEQ ID NO: 2154793 - RNA, 19 nt, Homo sapiens
  misc_RNA (1)...(19): siRNA sense strand
gcuaacaauuucacucaag

SEQ ID NO: 2154794 - RNA, 19 nt, Homo sapiens
  misc_RNA (1)...(19): siRNA sense strand
augaggaccuggugacuuu

SEQ ID NO: 2154795 - RNA, 19 nt, Homo sapiens
  misc_RNA (1)...(19): siRNA sense strand
auaaagacccuucuguuug

SEQ ID NO: 2154796 - RNA, 19 nt, Homo sapiens
  misc_RNA (1)...(19): siRNA sense strand
uuagugaacugaccguaga

SEQ ID NO: 2154797 - RNA, 19 nt, Homo sapiens
  misc_RNA (1)...(19): siRNA sense strand
cagaaaugaucuucgaaag

SEQ ID NO: 2154798 - RNA, 19 nt, Homo sapiens
  misc_RNA (1)...(19): siRNA sense strand
caucagugcucaaguugca

SEQ ID NO: 2154799 - RNA, 19 nt, Homo sapiens
  misc_RNA (1)...(19): siRNA sense strand
gagaacaaggcaaaggaaa

SEQ ID NO: 2154800 - RNA, 19 nt, Homo sapiens
  misc_RNA (1)...(19): siRNA sense strand
gaaagggcuuaaagaagac

SEQ ID NO: 2154801 - RNA, 19 nt, Homo sapiens
  misc_RNA (1)...(19): siRNA sense strand
ucgaggauguggaggauga

SEQ ID NO: 2154802 - RNA, 19 nt, Homo sapiens
  misc_RNA (1)...(19): siRNA sense strand
cuaacaauuucacucaaga

SEQ ID NO: 2154803 - RNA, 19 nt, Homo sapiens
  misc_RNA (1)...(19): siRNA sense strand
ggagaacaaggcaaaggaa

SEQ ID NO: 2154804 - RNA, 19 nt, Homo sapiens
  misc_RNA (1)...(19): siRNA sense strand
acacagcaguucaguccaa

SEQ ID NO: 2154805 - RNA, 19 nt, Homo sapiens
  misc_RNA (1)...(19): siRNA sense strand
ccaauugaccucucaguag

SEQ ID NO: 2154806 - RNA, 19 nt, Homo sapiens
  misc_RNA (1)...(19): siRNA sense strand
cuacuugccuggugguaau

SEQ ID NO: 2154807 - RNA, 19 nt, Homo sapiens
  misc_RNA (1)...(19): siRNA sense strand
ugaagaggaugggagagaa

SEQ ID NO: 2154808 - RNA, 19 nt, Homo sapiens
  misc_RNA (1)...(19): siRNA sense strand
gagaacaucauugucagaa

SEQ ID NO: 2154809 - RNA, 19 nt, Homo sapiens
  misc_RNA (1)...(19): siRNA sense strand
uuaaagaagacauguguga

SEQ ID NO: 2154810 - RNA, 19 nt, Homo sapiens
  misc_RNA (1)...(19): siRNA sense strand
gaacucaucaccagauacu

SEQ ID NO: 2154811 - RNA, 19 nt, Homo sapiens
  misc_RNA (1)...(19): siRNA sense strand
aaacuccuguguugacuuc

SEQ ID NO: 2154812 - RNA, 19 nt, Homo sapiens
  misc_RNA (1)...(19): siRNA sense strand
gggagaagauagacaagcu

SEQ ID NO: 2154813 - RNA, 19 nt, Homo sapiens
  misc_RNA (1)...(19): siRNA sense strand
guaacacagccucauuaaa

SEQ ID NO: 2154814 - RNA, 19 nt, Homo sapiens
  misc_RNA (1)...(19): siRNA sense strand
aaauaaagacccuucuguu

SEQ ID NO: 2154815 - RNA, 19 nt, Homo sapiens
  misc_RNA (1)...(19): siRNA sense strand
gggaguuccucagcagaaa

SEQ ID NO: 2154816 - RNA, 19 nt, Homo sapiens
  misc_RNA (1)...(19): siRNA sense strand
uaguaacacagccucauua

SEQ ID NO: 2154817 - RNA, 19 nt, Homo sapiens
  misc_RNA (1)...(19): siRNA sense strand
gaugcaggauggagaacau

SEQ ID NO: 2154818 - RNA, 19 nt, Homo sapiens
  misc_RNA (1)...(19): siRNA sense strand
ggaaauaaagacccuucug

SEQ ID NO: 2154819 - RNA, 19 nt, Homo sapiens
  misc_RNA (1)...(19): siRNA sense strand
gagccuuccuuggauguga

SEQ ID NO: 2154820 - RNA, 19 nt, Homo sapiens
  misc_RNA (1)...(19): siRNA sense strand
cccaaucccugcacucuca

SEQ ID NO: 2154821 - RNA, 19 nt, Homo sapiens
  misc_RNA (1)...(19): siRNA sense strand
cagcauaaacaacagaaau

SEQ ID NO: 2154822 - RNA, 19 nt, Homo sapiens
  misc_RNA (1)...(19): siRNA sense strand
ccacuucagcauccucuuu

SEQ ID NO: 2154823 - RNA, 19 nt, Homo sapiens
  misc_RNA (1)...(19): siRNA sense strand
aacaaagcauucaucaguu

SEQ ID NO: 2154824 - RNA, 19 nt, Homo sapiens
  misc_RNA (1)...(19): siRNA sense strand
gaagaggaugggagagaau

SEQ ID NO: 2154825 - RNA, 19 nt, Homo sapiens
  misc_RNA (1)...(19): siRNA sense strand
ggauguggaggaugaguug

SEQ ID NO: 2154826 - RNA, 19 nt, Homo sapiens
  misc_RNA (1)...(19): siRNA sense strand
acucucaguuccaaagaaa

SEQ ID NO: 2154827 - RNA, 19 nt, Homo sapiens
  misc_RNA (1)...(19): siRNA sense strand
uguggaggaugaguugaua

SEQ ID NO: 2154828 - RNA, 19 nt, Homo sapiens
  misc_RNA (1)...(19): siRNA sense strand
gaccucagcauaaacaaca

SEQ ID NO: 2154829 - RNA, 19 nt, Homo sapiens
  misc_RNA (1)...(19): siRNA sense strand
ggagaacaucauugucaga

SEQ ID NO: 2154830 - RNA, 19 nt, Homo sapiens
  misc_RNA (1)...(19): siRNA sense strand
acacuuacgcuucacaguu

SEQ ID NO: 2154831 - RNA, 19 nt, Homo sapiens
  misc_RNA (1)...(19): siRNA sense strand
cagaaagggcuuaaagaag

SEQ ID NO: 2154832 - RNA, 19 nt, Homo sapiens
  misc_RNA (1)...(19): siRNA sense strand
gcuuaaagaagacaugugu

SEQ ID NO: 2154833 - RNA, 19 nt, Homo sapiens
  misc_RNA (1)...(19): siRNA sense strand
agaacaucauugucagaaa

SEQ ID NO: 2154834 - RNA, 19 nt, Homo sapiens
  misc_RNA (1)...(19): siRNA sense strand
gcaaagccagacaugacaa

SEQ ID NO: 2154835 - RNA, 19 nt, Homo sapiens
  misc_RNA (1)...(19): siRNA sense strand
agagagagccguuguugca

SEQ ID NO: 2154836 - RNA, 19 nt, Homo sapiens
  misc_RNA (1)...(19): siRNA sense strand
caaagucuggucugauugu

SEQ ID NO: 2154837 - RNA, 19 nt, Homo sapiens
  misc_RNA (1)...(19): siRNA sense strand
gagaauuccaggccaaagu

SEQ ID NO: 2154838 - RNA, 19 nt, Homo sapiens
  misc_RNA (1)...(19): siRNA sense strand
ugauggagauguacuuggu

SEQ ID NO: 2154839 - RNA, 19 nt, Homo sapiens
  misc_RNA (1)...(19): siRNA sense strand
gaaagguuuugcaucuuga

SEQ ID NO: 2154840 - RNA, 19 nt, Homo sapiens
  misc_RNA (1)...(19): siRNA sense strand
gcucauccgccaggacuuu

SEQ ID NO: 2154841 - RNA, 19 nt, Homo sapiens
  misc_RNA (1)...(19): siRNA sense strand
cgagagagagccguuguug

SEQ ID NO: 2154842 - RNA, 19 nt, Homo sapiens
  misc_RNA (1)...(19): siRNA sense strand
acagaaaugaucuucgaaa

SEQ ID NO: 2154843 - RNA, 19 nt, Homo sapiens
  misc_RNA (1)...(19): siRNA sense strand
ucccaucagugcucaaguu

SEQ ID NO: 2154844 - RNA, 19 nt, Homo sapiens
  misc_RNA (1)...(19): siRNA sense strand
cgaaagguuuugcaucuug

SEQ ID NO: 2154845 - RNA, 19 nt, Homo sapiens
  misc_RNA (1)...(19): siRNA sense strand
acucaucaccagauacuuu

SEQ ID NO: 2154846 - RNA, 19 nt, Homo sapiens
  misc_RNA (1)...(19): siRNA sense strand
ggagucuuagaaacacuua

SEQ ID NO: 2154847 - RNA, 19 nt, Homo sapiens
  misc_RNA (1)...(19): siRNA sense strand
ucagagacuacacugguaa

SEQ ID NO: 2154848 - RNA, 19 nt, Homo sapiens
  misc_RNA (1)...(19): siRNA sense strand
gaacaaggcaaaggaaaau

SEQ ID NO: 2154849 - RNA, 19 nt, Homo sapiens
  misc_RNA (1)...(19): siRNA sense strand
gguuuugcaucuugaauuu

SEQ ID NO: 2154850 - RNA, 19 nt, Homo sapiens
  misc_RNA (1)...(19): siRNA sense strand
cagcagaaagggcuuaaag

SEQ ID NO: 2154851 - RNA, 19 nt, Homo sapiens
  misc_RNA (1)...(19): siRNA sense strand
ccagacaugacaaucuuga

SEQ ID NO: 2154852 - RNA, 19 nt, Homo sapiens
  misc_RNA (1)...(19): siRNA sense strand
ccacccaaaccaucucuga

SEQ ID NO: 2154853 - RNA, 19 nt, Homo sapiens
  misc_RNA (1)...(19): siRNA sense strand
cagauggagucuuagaaac

SEQ ID NO: 2154854 - RNA, 19 nt, Homo sapiens
  misc_RNA (1)...(19): siRNA sense strand
gcacuggcuucgagaacac

SEQ ID NO: 2154855 - RNA, 19 nt, Homo sapiens
  misc_RNA (1)...(19): siRNA sense strand
gcucgaggauguggaggau

SEQ ID NO: 2154856 - RNA, 19 nt, Homo sapiens
  misc_RNA (1)...(19): siRNA sense strand
caaugaagaauggaaacuu

SEQ ID NO: 2154857 - RNA, 19 nt, Homo sapiens
  misc_RNA (1)...(19): siRNA sense strand
caaagcagauggagucuua

SEQ ID NO: 2154858 - RNA, 19 nt, Homo sapiens
  misc_RNA (1)...(19): siRNA sense strand
gaaaugaucuucgaaaggu

SEQ ID NO: 2154859 - RNA, 19 nt, Homo sapiens
  misc_RNA (1)...(19): siRNA sense strand
agaaagggcuuaaagaaga

SEQ ID NO: 2154860 - RNA, 19 nt, Homo sapiens
  misc_RNA (1)...(19): siRNA sense strand
gaaggucccugagcucuuu

SEQ ID NO: 2154861 - RNA, 19 nt, Homo sapiens
  misc_RNA (1)...(19): siRNA sense strand
uauaugaccuuucagauga

SEQ ID NO: 2154862 - RNA, 19 nt, Homo sapiens
  misc_RNA (1)...(19): siRNA sense strand
caacagaaaugaucuucga

SEQ ID NO: 2154863 - RNA, 19 nt, Homo sapiens
  misc_RNA (1)...(19): siRNA sense strand
ggaaauacggcuaacaauu

SEQ ID NO: 2154864 - RNA, 19 nt, Homo sapiens
  misc_RNA (1)...(19): siRNA sense strand
gagauguacuugguaauuu

SEQ ID NO: 2154865 - RNA, 19 nt, Homo sapiens
  misc_RNA (1)...(19): siRNA sense strand
gcagaaagggcuuaaagaa

SEQ ID NO: 2154866 - RNA, 19 nt, Homo sapiens
  misc_RNA (1)...(19): siRNA sense strand
agacuacacugguaaauau

SEQ ID NO: 2154867 - RNA, 19 nt, Homo sapiens
  misc_RNA (1)...(19): siRNA sense strand
caacaaagcauucaucagu

SEQ ID NO: 2154868 - RNA, 19 nt, Homo sapiens
  misc_RNA (1)...(19): siRNA sense strand
gccaaagucuggucugauu

SEQ ID NO: 2154869 - RNA, 19 nt, Homo sapiens
  misc_RNA (1)...(19): siRNA sense strand
gaacaucauugucagaaac

SEQ ID NO: 2154870 - RNA, 19 nt, Homo sapiens
  misc_RNA (1)...(19): siRNA sense strand
gaaauaaagacccuucugu

SEQ ID NO: 2154871 - RNA, 19 nt, Homo sapiens
  misc_RNA (1)...(19): siRNA sense strand
acaaagcauucaucaguuu

SEQ ID NO: 2154872 - RNA, 19 nt, Homo sapiens
  misc_RNA (1)...(19): siRNA sense strand
gcagauggagucuuagaaa

SEQ ID NO: 2154873 - RNA, 19 nt, Homo sapiens
  misc_RNA (1)...(19): siRNA sense strand
gcacauggcuacuguacac

SEQ ID NO: 2154874 - RNA, 19 nt, Homo sapiens
  misc_RNA (1)...(19): siRNA sense strand
uaaagacccuucuguuugg

SEQ ID NO: 2154875 - RNA, 19 nt, Homo sapiens
  misc_RNA (1)...(19): siRNA sense strand
gggugaaacuccuguguug

SEQ ID NO: 2154876 - RNA, 19 nt, Homo sapiens
  misc_RNA (1)...(19): siRNA sense strand
uaacacagccucauuaaaa

SEQ ID NO: 2154877 - RNA, 19 nt, Homo sapiens
  misc_RNA (1)...(19): siRNA sense strand
gagacuacacugguaaaua

SEQ ID NO: 2154878 - RNA, 19 nt, Homo sapiens
  misc_RNA (1)...(19): siRNA sense strand
ggagauguacuugguaauu

SEQ ID NO: 2154879 - RNA, 19 nt, Homo sapiens
  misc_RNA (1)...(19): siRNA sense strand
uagaaacacuuacgcuuca

SEQ ID NO: 2154880 - RNA, 19 nt, Homo sapiens
  misc_RNA (1)...(19): siRNA sense strand
uaacaaagugccaucaaga

SEQ ID NO: 2154881 - RNA, 19 nt, Homo sapiens
  misc_RNA (1)...(19): siRNA sense strand
aauaaagacccuucuguuu

SEQ ID NO: 2154882 - RNA, 19 nt, Homo sapiens
  misc_RNA (1)...(19): siRNA sense strand
ggugguaauuccaggauga

SEQ ID NO: 2154883 - RNA, 19 nt, Homo sapiens
  misc_RNA (1)...(19): siRNA sense strand
gcagugauauuggcuucuu

SEQ ID NO: 2154884 - RNA, 19 nt, Homo sapiens
  misc_RNA (1)...(19): siRNA sense strand
cacaggaacuugucaaucu

SEQ ID NO: 2154885 - RNA, 19 nt, Homo sapiens
  misc_RNA (1)...(19): siRNA sense strand
cacuuacgcuucacaguuu

SEQ ID NO: 2154886 - RNA, 19 nt, Homo sapiens
  misc_RNA (1)...(19): siRNA sense strand
cuggaucacuuuggaaaua

SEQ ID NO: 2154887 - RNA, 19 nt, Homo sapiens
  misc_RNA (1)...(19): siRNA sense strand
gaagaugcaggauggagaa

SEQ ID NO: 2154888 - RNA, 19 nt, Homo sapiens
  misc_RNA (1)...(19): siRNA sense strand
gcauaaacaacagaaauga

SEQ ID NO: 2154889 - RNA, 19 nt, Homo sapiens
  misc_RNA (1)...(19): siRNA sense strand
gaaauacaaagcagaugga

SEQ ID NO: 2154890 - RNA, 19 nt, Homo sapiens
  misc_RNA (1)...(19): siRNA sense strand
ucaagaugcucagagacua

SEQ ID NO: 2154891 - RNA, 19 nt, Homo sapiens
  misc_RNA (1)...(19): siRNA sense strand
gauacuuucuggaucacuu

SEQ ID NO: 2154892 - RNA, 19 nt, Homo sapiens
  misc_RNA (1)...(19): siRNA sense strand
ggacacagacaacgaccuu

SEQ ID NO: 2154893 - RNA, 19 nt, Homo sapiens
  misc_RNA (1)...(19): siRNA sense strand
gcuaacaauuucacucaag

SEQ ID NO: 2154894 - RNA, 19 nt, Homo sapiens
  misc_RNA (1)...(19): siRNA sense strand
augaggaccuggugacuuu

SEQ ID NO: 2154895 - RNA, 19 nt, Homo sapiens
  misc_RNA (1)...(19): siRNA sense strand
auaaagacccuucuguuug

SEQ ID NO: 2154896 - RNA, 19 nt, Homo sapiens
  misc_RNA (1)...(19): siRNA sense strand
uuagugaacugaccguaga

SEQ ID NO: 2154897 - RNA, 19 nt, Homo sapiens
  misc_RNA (1)...(19): siRNA sense strand
cagaaaugaucuucgaaag

SEQ ID NO: 2154898 - RNA, 19 nt, Homo sapiens
  misc_RNA (1)...(19): siRNA sense strand
caucagugcucaaguugca

SEQ ID NO: 2154899 - RNA, 19 nt, Homo sapiens
  misc_RNA (1)...(19): siRNA sense strand
gagaacaaggcaaaggaaa

SEQ ID NO: 2154900 - RNA, 19 nt, Homo sapiens
  misc_RNA (1)...(19): siRNA sense strand
gaaagggcuuaaagaagac

SEQ ID NO: 2154901 - RNA, 19 nt, Homo sapiens
  misc_RNA (1)...(19): siRNA sense strand
ucgaggauguggaggauga

SEQ ID NO: 2154902 - RNA, 19 nt, Homo sapiens
  misc_RNA (1)...(19): siRNA sense strand
cuaacaauuucacucaaga

SEQ ID NO: 2154903 - RNA, 19 nt, Homo sapiens
  misc_RNA (1)...(19): siRNA sense strand
ggagaacaaggcaaaggaa

SEQ ID NO: 2154904 - RNA, 19 nt, Homo sapiens
  misc_RNA (1)...(19): siRNA sense strand
acacagcaguucaguccaa

SEQ ID NO: 2154905 - RNA, 19 nt, Homo sapiens
  misc_RNA (1)...(19): siRNA sense strand
ccaauugaccucucaguag

SEQ ID NO: 2154906 - RNA, 19 nt, Homo sapiens
  misc_RNA (1)...(19): siRNA sense strand
cuacuugccuggugguaau

SEQ ID NO: 2154907 - RNA, 19 nt, Homo sapiens
  misc_RNA (1)...(19): siRNA sense strand
ugaagaggaugggagagaa

SEQ ID NO: 2154908 - RNA, 19 nt, Homo sapiens
  misc_RNA (1)...(19): siRNA sense strand
gagaacaucauugucagaa

SEQ ID NO: 2154909 - RNA, 19 nt, Homo sapiens
  misc_RNA (1)...(19): siRNA sense strand
uuaaagaagacauguguga

SEQ ID NO: 2154910 - RNA, 19 nt, Homo sapiens
  misc_RNA (1)...(19): siRNA sense strand
gaacucaucaccagauacu

SEQ ID NO: 2154911 - RNA, 19 nt, Homo sapiens
  misc_RNA (1)...(19): siRNA sense strand
aaacuccuguguugacuuc

SEQ ID NO: 2154912 - RNA, 19 nt, Homo sapiens
  misc_RNA (1)...(19): siRNA sense strand
gggagaagauagacaagcu

SEQ ID NO: 2154913 - RNA, 19 nt, Homo sapiens
  misc_RNA (1)...(19): siRNA sense strand
guaacacagccucauuaaa

SEQ ID NO: 2154914 - RNA, 19 nt, Homo sapiens
  misc_RNA (1)...(19): siRNA sense strand
aaauaaagacccuucuguu

SEQ ID NO: 2154915 - RNA, 19 nt, Homo sapiens
  misc_RNA (1)...(19): siRNA sense strand
gggaguuccucagcagaaa

SEQ ID NO: 2154916 - RNA, 19 nt, Homo sapiens
  misc_RNA (1)...(19): siRNA sense strand
uaguaacacagccucauua

SEQ ID NO: 2154917 - RNA, 19 nt, Homo sapiens
  misc_RNA (1)...(19): siRNA sense strand
gaugcaggauggagaacau

SEQ ID NO: 2154918 - RNA, 19 nt, Homo sapiens
  misc_RNA (1)...(19): siRNA sense strand
ggaaauaaagacccuucug

SEQ ID NO: 2154919 - RNA, 19 nt, Homo sapiens
  misc_RNA (1)...(19): siRNA sense strand
gagccuuccuuggauguga

SEQ ID NO: 2154920 - RNA, 19 nt, Homo sapiens
  misc_RNA (1)...(19): siRNA sense strand
cccaaucccugcacucuca

SEQ ID NO: 2154921 - RNA, 19 nt, Homo sapiens
  misc_RNA (1)...(19): siRNA sense strand
cagcauaaacaacagaaau

SEQ ID NO: 2154922 - RNA, 19 nt, Homo sapiens
  misc_RNA (1)...(19): siRNA sense strand
ccacuucagcauccucuuu

SEQ ID NO: 2154923 - RNA, 19 nt, Homo sapiens
  misc_RNA (1)...(19): siRNA sense strand
aacaaagcauucaucaguu

SEQ ID NO: 2154924 - RNA, 19 nt, Homo sapiens
  misc_RNA (1)...(19): siRNA sense strand
gaagaggaugggagagaau

SEQ ID NO: 2154925 - RNA, 19 nt, Homo sapiens
  misc_RNA (1)...(19): siRNA sense strand
ggauguggaggaugaguug

SEQ ID NO: 2154926 - RNA, 19 nt, Homo sapiens
  misc_RNA (1)...(19): siRNA sense strand
acucucaguuccaaagaaa

SEQ ID NO: 2154927 - RNA, 19 nt, Homo sapiens
  misc_RNA (1)...(19): siRNA sense strand
uguggaggaugaguugaua

SEQ ID NO: 2154928 - RNA, 19 nt, Homo sapiens
  misc_RNA (1)...(19): siRNA sense strand
gaccucagcauaaacaaca

SEQ ID NO: 2154929 - RNA, 19 nt, Homo sapiens
  misc_RNA (1)...(19): siRNA sense strand
ggagaacaucauugucaga

SEQ ID NO: 2154930 - RNA, 19 nt, Homo sapiens
  misc_RNA (1)...(19): siRNA sense strand
acacuuacgcuucacaguu

SEQ ID NO: 2154931 - RNA, 19 nt, Homo sapiens
  misc_RNA (1)...(19): siRNA sense strand
cagaaagggcuuaaagaag

SEQ ID NO: 2154932 - RNA, 19 nt, Homo sapiens
  misc_RNA (1)...(19): siRNA sense strand
gcuuaaagaagacaugugu

SEQ ID NO: 2154933 - RNA, 19 nt, Homo sapiens
  misc_RNA (1)...(19): siRNA sense strand
agaacaucauugucagaaa

SEQ ID NO: 2154934 - RNA, 19 nt, Homo sapiens
  misc_RNA (1)...(19): siRNA sense strand
gcaaagccagacaugacaa

SEQ ID NO: 2154935 - RNA, 19 nt, Homo sapiens
  misc_RNA (1)...(19): siRNA sense strand
agagagagccguuguugca

SEQ ID NO: 2154936 - RNA, 19 nt, Homo sapiens
  misc_RNA (1)...(19): siRNA sense strand
caaagucuggucugauugu

SEQ ID NO: 2154937 - RNA, 19 nt, Homo sapiens
  misc_RNA (1)...(19): siRNA sense strand
gagaauuccaggccaaagu

SEQ ID NO: 2154938 - RNA, 19 nt, Homo sapiens
  misc_RNA (1)...(19): siRNA sense strand
ugauggagauguacuuggu

SEQ ID NO: 2154939 - RNA, 19 nt, Homo sapiens
  misc_RNA (1)...(19): siRNA sense strand
gaaagguuuugcaucuuga

SEQ ID NO: 2154940 - RNA, 19 nt, Homo sapiens
  misc_RNA (1)...(19): siRNA sense strand
gcucauccgccaggacuuu

SEQ ID NO: 2154941 - RNA, 19 nt, Homo sapiens
  misc_RNA (1)...(19): siRNA sense strand
cgagagagagccguuguug

SEQ ID NO: 2154942 - RNA, 19 nt, Homo sapiens
  misc_RNA (1)...(19): siRNA sense strand
acagaaaugaucuucgaaa

SEQ ID NO: 2154943 - RNA, 19 nt, Homo sapiens
  misc_RNA (1)...(19): siRNA sense strand
ucccaucagugcucaaguu

SEQ ID NO: 2154944 - RNA, 19 nt, Homo sapiens
  misc_RNA (1)...(19): siRNA sense strand
cgaaagguuuugcaucuug

SEQ ID NO: 2154945 - RNA, 19 nt, Homo sapiens
  misc_RNA (1)...(19): siRNA sense strand
acucaucaccagauacuuu

SEQ ID NO: 2154946 - RNA, 19 nt, Homo sapiens
  misc_RNA (1)...(19): siRNA sense strand
ggagucuuagaaacacuua

SEQ ID NO: 2154947 - RNA, 19 nt, Homo sapiens
  misc_RNA (1)...(19): siRNA sense strand
ucagagacuacacugguaa

SEQ ID NO: 2154948 - RNA, 19 nt, Homo sapiens
  misc_RNA (1)...(19): siRNA sense strand
gaacaaggcaaaggaaaau

SEQ ID NO: 2154949 - RNA, 19 nt, Homo sapiens
  misc_RNA (1)...(19): siRNA sense strand
gguuuugcaucuugaauuu

SEQ ID NO: 2154950 - RNA, 19 nt, Homo sapiens
  misc_RNA (1)...(19): siRNA sense strand
cagcagaaagggcuuaaag

SEQ ID NO: 2154951 - RNA, 19 nt, Homo sapiens
  misc_RNA (1)...(19): siRNA sense strand
ccagacaugacaaucuuga

SEQ ID NO: 2154952 - RNA, 19 nt, Homo sapiens
  misc_RNA (1)...(19): siRNA sense strand
ccacccaaaccaucucuga

SEQ ID NO: 2154953 - RNA, 19 nt, Homo sapiens
  misc_RNA (1)...(19): siRNA sense strand
cagauggagucuuagaaac

SEQ ID NO: 2154954 - RNA, 19 nt, Homo sapiens
  misc_RNA (1)...(19): siRNA sense strand
gcacuggcuucgagaacac

SEQ ID NO: 2154955 - RNA, 19 nt, Homo sapiens
  misc_RNA (1)...(19): siRNA sense strand
gcucgaggauguggaggau

SEQ ID NO: 2154956 - RNA, 19 nt, Homo sapiens
  misc_RNA (1)...(19): siRNA sense strand
caaugaagaauggaaacuu

SEQ ID NO: 2154957 - RNA, 19 nt, Homo sapiens
  misc_RNA (1)...(19): siRNA sense strand
aaacagagcugaagagaaa

SEQ ID NO: 2154958 - RNA, 19 nt, Homo sapiens
  misc_RNA (1)...(19): siRNA sense strand
gaacaaagggccucaguau

SEQ ID NO: 2154959 - RNA, 19 nt, Homo sapiens
  misc_RNA (1)...(19): siRNA sense strand
gaaaugaucauacucaaga

SEQ ID NO: 2154960 - RNA, 19 nt, Homo sapiens
  misc_RNA (1)...(19): siRNA sense strand
gcaagacaguuaaaugaug

SEQ ID NO: 2154961 - RNA, 19 nt, Homo sapiens
  misc_RNA (1)...(19): siRNA sense strand
ccagaaagcucaucacagu

SEQ ID NO: 2154962 - RNA, 19 nt, Homo sapiens
  misc_RNA (1)...(19): siRNA sense strand
gcaaagcccuggcccugaa

SEQ ID NO: 2154963 - RNA, 19 nt, Homo sapiens
  misc_RNA (1)...(19): siRNA sense strand
gaaauugaacagcaccuua

SEQ ID NO: 2154964 - RNA, 19 nt, Homo sapiens
  misc_RNA (1)...(19): siRNA sense strand
caauauaacuggauagaag

SEQ ID NO: 2154965 - RNA, 19 nt, Homo sapiens
  misc_RNA (1)...(19): siRNA sense strand
gcuggacucuggauucuuu

SEQ ID NO: 2154966 - RNA, 19 nt, Homo sapiens
  misc_RNA (1)...(19): siRNA sense strand
ccacagccacuuccaaaua

SEQ ID NO: 2154967 - RNA, 19 nt, Homo sapiens
  misc_RNA (1)...(19): siRNA sense strand
gacagaagcugagauggaa

SEQ ID NO: 2154968 - RNA, 19 nt, Homo sapiens
  misc_RNA (1)...(19): siRNA sense strand
caacugaccuugcucaaac

SEQ ID NO: 2154969 - RNA, 19 nt, Homo sapiens
  misc_RNA (1)...(19): siRNA sense strand
caagacaaguuccuucaug

SEQ ID NO: 2154970 - RNA, 19 nt, Homo sapiens
  misc_RNA (1)...(19): siRNA sense strand
ugagggagcuggcaaagug

SEQ ID NO: 2154971 - RNA, 19 nt, Homo sapiens
  misc_RNA (1)...(19): siRNA sense strand
gggcagacuucauguucua

SEQ ID NO: 2154972 - RNA, 19 nt, Homo sapiens
  misc_RNA (1)...(19): siRNA sense strand
gaaagcucaucacagugua

SEQ ID NO: 2154973 - RNA, 19 nt, Homo sapiens
  misc_RNA (1)...(19): siRNA sense strand
gcaucaauauaacuggaua

SEQ ID NO: 2154974 - RNA, 19 nt, Homo sapiens
  misc_RNA (1)...(19): siRNA sense strand
ggagagagugugcaaagaa

SEQ ID NO: 2154975 - RNA, 19 nt, Homo sapiens
  misc_RNA (1)...(19): siRNA sense strand
ggacagaagcugagaugga

SEQ ID NO: 2154976 - RNA, 19 nt, Homo sapiens
  misc_RNA (1)...(19): siRNA sense strand
gaaaucacaccuuaugcaa

SEQ ID NO: 2154977 - RNA, 19 nt, Homo sapiens
  misc_RNA (1)...(19): siRNA sense strand
gcaaugggcagacuucaug

SEQ ID NO: 2154978 - RNA, 19 nt, Homo sapiens
  misc_RNA (1)...(19): siRNA sense strand
gacucaggcuucucuagua

SEQ ID NO: 2154979 - RNA, 19 nt, Homo sapiens
  misc_RNA (1)...(19): siRNA sense strand
gauacuaccugggacagaa

SEQ ID NO: 2154980 - RNA, 19 nt, Homo sapiens
  misc_RNA (1)...(19): siRNA sense strand
ccaaauccgucucucuaga

SEQ ID NO: 2154981 - RNA, 19 nt, Homo sapiens
  misc_RNA (1)...(19): siRNA sense strand
gaucagagccacagcuuag

SEQ ID NO: 2154982 - RNA, 19 nt, Homo sapiens
  misc_RNA (1)...(19): siRNA sense strand
caagggaugguucaaauga

SEQ ID NO: 2154983 - RNA, 19 nt, Homo sapiens
  misc_RNA (1)...(19): siRNA sense strand
gagaacagcaccaggaugu

SEQ ID NO: 2154984 - RNA, 19 nt, Homo sapiens
  misc_RNA (1)...(19): siRNA sense strand
gaagauuccaagcaagaaa

SEQ ID NO: 2154985 - RNA, 19 nt, Homo sapiens
  misc_RNA (1)...(19): siRNA sense strand
ugacaugacuucaggaacu

SEQ ID NO: 2154986 - RNA, 19 nt, Homo sapiens
  misc_RNA (1)...(19): siRNA sense strand
cagaggaacaucuuuagaa

SEQ ID NO: 2154987 - RNA, 19 nt, Homo sapiens
  misc_RNA (1)...(19): siRNA sense strand
ggaacaaagggccucagua

SEQ ID NO: 2154988 - RNA, 19 nt, Homo sapiens
  misc_RNA (1)...(19): siRNA sense strand
gcacuguuucuuuguauga

SEQ ID NO: 2154989 - RNA, 19 nt, Homo sapiens
  misc_RNA (1)...(19): siRNA sense strand
gacaaaagcaagacaguua

SEQ ID NO: 2154990 - RNA, 19 nt, Homo sapiens
  misc_RNA (1)...(19): siRNA sense strand
gaaaaccuuccucuaaaua

SEQ ID NO: 2154991 - RNA, 19 nt, Homo sapiens
  misc_RNA (1)...(19): siRNA sense strand
gucaaggucugguacuuug

SEQ ID NO: 2154992 - RNA, 19 nt, Homo sapiens
  misc_RNA (1)...(19): siRNA sense strand
cagaaaugcaggacaguuu

SEQ ID NO: 2154993 - RNA, 19 nt, Homo sapiens
  misc_RNA (1)...(19): siRNA sense strand
uggcagaguuggaauuuca

SEQ ID NO: 2154994 - RNA, 19 nt, Homo sapiens
  misc_RNA (1)...(19): siRNA sense strand
agaggaacaucuuuagaau

SEQ ID NO: 2154995 - RNA, 19 nt, Homo sapiens
  misc_RNA (1)...(19): siRNA sense strand
guagaaagccaagagauca

SEQ ID NO: 2154996 - RNA, 19 nt, Homo sapiens
  misc_RNA (1)...(19): siRNA sense strand
agaguuggaauuucaguua

SEQ ID NO: 2154997 - RNA, 19 nt, Homo sapiens
  misc_RNA (1)...(19): siRNA sense strand
ucuaguaucugcccaaugg

SEQ ID NO: 2154998 - RNA, 19 nt, Homo sapiens
  misc_RNA (1)...(19): siRNA sense strand
acaaguuccuucauguuga

SEQ ID NO: 2154999 - RNA, 19 nt, Homo sapiens
  misc_RNA (1)...(19): siRNA sense strand
gacaaguuccuucauguug

SEQ ID NO: 2155000 - RNA, 19 nt, Homo sapiens
  misc_RNA (1)...(19): siRNA sense strand
cacagccacuuccaaauau

SEQ ID NO: 2155001 - RNA, 19 nt, Homo sapiens
  misc_RNA (1)...(19): siRNA sense strand
ccagaguccugcugagaau

SEQ ID NO: 2155002 - RNA, 19 nt, Homo sapiens
  misc_RNA (1)...(19): siRNA sense strand
gugcaaagccaccacaaug

SEQ ID NO: 2155003 - RNA, 19 nt, Homo sapiens
  misc_RNA (1)...(19): siRNA sense strand
ggaggaagaguuucugcuu

SEQ ID NO: 2155004 - RNA, 19 nt, Homo sapiens
  misc_RNA (1)...(19): siRNA sense strand
gugaaagacuacaugagau

SEQ ID NO: 2155005 - RNA, 19 nt, Homo sapiens
  misc_RNA (1)...(19): siRNA sense strand
aagcaagacaguuaaauga

SEQ ID NO: 2155006 - RNA, 19 nt, Homo sapiens
  misc_RNA (1)...(19): siRNA sense strand
ggagaaugcccaaggaaag

SEQ ID NO: 2155007 - RNA, 19 nt, Homo sapiens
  misc_RNA (1)...(19): siRNA sense strand
aggaagaguuucugcuuga

SEQ ID NO: 2155008 - RNA, 19 nt, Homo sapiens
  misc_RNA (1)...(19): siRNA sense strand
ugagaucuuugcaucaguu

SEQ ID NO: 2155009 - RNA, 19 nt, Homo sapiens
  misc_RNA (1)...(19): siRNA sense strand
ccgagcaacugcaaacguu

SEQ ID NO: 2155010 - RNA, 19 nt, Homo sapiens
  misc_RNA (1)...(19): siRNA sense strand
ggacaugucagaggaggaa

SEQ ID NO: 2155011 - RNA, 19 nt, Homo sapiens
  misc_RNA (1)...(19): siRNA sense strand
caaccacagcuuacucgua

SEQ ID NO: 2155012 - RNA, 19 nt, Homo sapiens
  misc_RNA (1)...(19): siRNA sense strand
ucacaccaaccacagcuua

SEQ ID NO: 2155013 - RNA, 19 nt, Homo sapiens
  misc_RNA (1)...(19): siRNA sense strand
aaaugacugugaaagacua

SEQ ID NO: 2155014 - RNA, 19 nt, Homo sapiens
  misc_RNA (1)...(19): siRNA sense strand
uaacccacgucacagaaau

SEQ ID NO: 2155015 - RNA, 19 nt, Homo sapiens
  misc_RNA (1)...(19): siRNA sense strand
acaaagggccucaguaucu

SEQ ID NO: 2155016 - RNA, 19 nt, Homo sapiens
  misc_RNA (1)...(19): siRNA sense strand
aagacgauaugccaaaguu

SEQ ID NO: 2155017 - RNA, 19 nt, Homo sapiens
  misc_RNA (1)...(19): siRNA sense strand
gcaaguguaccacaaagca

SEQ ID NO: 2155018 - RNA, 19 nt, Homo sapiens
  misc_RNA (1)...(19): siRNA sense strand
gagaaugcccaaggaaaga

SEQ ID NO: 2155019 - RNA, 19 nt, Homo sapiens
  misc_RNA (1)...(19): siRNA sense strand
caaagggccucaguaucug

SEQ ID NO: 2155020 - RNA, 19 nt, Homo sapiens
  misc_RNA (1)...(19): siRNA sense strand
guagggcgagcaugucuuu

SEQ ID NO: 2155021 - RNA, 19 nt, Homo sapiens
  misc_RNA (1)...(19): siRNA sense strand
gagagagugugcaaagaac

SEQ ID NO: 2155022 - RNA, 19 nt, Homo sapiens
  misc_RNA (1)...(19): siRNA sense strand
ccagccagauuccuugguu

SEQ ID NO: 2155023 - RNA, 19 nt, Homo sapiens
  misc_RNA (1)...(19): siRNA sense strand
caccaaauccgucucucua

SEQ ID NO: 2155024 - RNA, 19 nt, Homo sapiens
  misc_RNA (1)...(19): siRNA sense strand
ccaguuggcugccuucacu

SEQ ID NO: 2155025 - RNA, 19 nt, Homo sapiens
  misc_RNA (1)...(19): siRNA sense strand
ggcagcagguggcagaguu

SEQ ID NO: 2155026 - RNA, 19 nt, Homo sapiens
  misc_RNA (1)...(19): siRNA sense strand
ucaaaugacugugaaagac

SEQ ID NO: 2155027 - RNA, 19 nt, Homo sapiens
  misc_RNA (1)...(19): siRNA sense strand
gggagaaugcccaaggaaa

SEQ ID NO: 2155028 - RNA, 19 nt, Homo sapiens
  misc_RNA (1)...(19): siRNA sense strand
aacaagggaugguucaaau

SEQ ID NO: 2155029 - RNA, 19 nt, Homo sapiens
  misc_RNA (1)...(19): siRNA sense strand
cagcagagccaccugaaca

SEQ ID NO: 2155030 - RNA, 19 nt, Homo sapiens
  misc_RNA (1)...(19): siRNA sense strand
gaaauccuggaccauguga

SEQ ID NO: 2155031 - RNA, 19 nt, Homo sapiens
  misc_RNA (1)...(19): siRNA sense strand
gaacagcaccaggaugucu

SEQ ID NO: 2155032 - RNA, 19 nt, Homo sapiens
  misc_RNA (1)...(19): siRNA sense strand
ccgggaguauuuagaagaa

SEQ ID NO: 2155033 - RNA, 19 nt, Homo sapiens
  misc_RNA (1)...(19): siRNA sense strand
aaaguuuccgggaguauuu

SEQ ID NO: 2155034 - RNA, 19 nt, Homo sapiens
  misc_RNA (1)...(19): siRNA sense strand
aggaacaucuuuagaaugc

SEQ ID NO: 2155035 - RNA, 19 nt, Homo sapiens
  misc_RNA (1)...(19): siRNA sense strand
gcaaagccaccacaaugag

SEQ ID NO: 2155036 - RNA, 19 nt, Homo sapiens
  misc_RNA (1)...(19): siRNA sense strand
uaucugugauggaggaaga

SEQ ID NO: 2155037 - RNA, 19 nt, Homo sapiens
  misc_RNA (1)...(19): siRNA sense strand
guaauccucuugacaugac

SEQ ID NO: 2155038 - RNA, 19 nt, Homo sapiens
  misc_RNA (1)...(19): siRNA sense strand
gaggagagagugugcaaag

SEQ ID NO: 2155039 - RNA, 19 nt, Homo sapiens
  misc_RNA (1)...(19): siRNA sense strand
caaacagagcugaagagaa

SEQ ID NO: 2155040 - RNA, 19 nt, Homo sapiens
  misc_RNA (1)...(19): siRNA sense strand
aaauuguccuguuggagaa

SEQ ID NO: 2155041 - RNA, 19 nt, Homo sapiens
  misc_RNA (1)...(19): siRNA sense strand
agagccaccugaacacuau

SEQ ID NO: 2155042 - RNA, 19 nt, Homo sapiens
  misc_RNA (1)...(19): siRNA sense strand
gaguuggaauuucaguuag

SEQ ID NO: 2155043 - RNA, 19 nt, Homo sapiens
  misc_RNA (1)...(19): siRNA sense strand
ccaggaagcccaguucaug

SEQ ID NO: 2155044 - RNA, 19 nt, Homo sapiens
  misc_RNA (1)...(19): siRNA sense strand
uagaaugcacuguguguga

SEQ ID NO: 2155045 - RNA, 19 nt, Homo sapiens
  misc_RNA (1)...(19): siRNA sense strand
gaggaacaucuuuagaaug

SEQ ID NO: 2155046 - RNA, 19 nt, Homo sapiens
  misc_RNA (1)...(19): siRNA sense strand
aaucacaccuuaugcaacu

SEQ ID NO: 2155047 - RNA, 19 nt, Homo sapiens
  misc_RNA (1)...(19): siRNA sense strand
gaagaagagacugguaauc

SEQ ID NO: 2155048 - RNA, 19 nt, Homo sapiens
  misc_RNA (1)...(19): siRNA sense strand
caacuuguacggucguuuc

SEQ ID NO: 2155049 - RNA, 19 nt, Homo sapiens
  misc_RNA (1)...(19): siRNA sense strand
gcagacuucauguucuaaa

SEQ ID NO: 2155050 - RNA, 19 nt, Homo sapiens
  misc_RNA (1)...(19): siRNA sense strand
uucagaaacucccauccua

SEQ ID NO: 2155051 - RNA, 19 nt, Homo sapiens
  misc_RNA (1)...(19): siRNA sense strand
gacgauaugccaaaguuuc

SEQ ID NO: 2155052 - RNA, 19 nt, Homo sapiens
  misc_RNA (1)...(19): siRNA sense strand
aaagcaagacaguuaaaug

SEQ ID NO: 2155053 - RNA, 19 nt, Homo sapiens
  misc_RNA (1)...(19): siRNA sense strand
ugaccuugcucaaacaucu

SEQ ID NO: 2155054 - RNA, 19 nt, Homo sapiens
  misc_RNA (1)...(19): siRNA sense strand
ugugaaagacuacaugaga

SEQ ID NO: 2155055 - RNA, 19 nt, Homo sapiens
  misc_RNA (1)...(19): siRNA sense strand
gagccacagcuuaguauca

SEQ ID NO: 2155056 - RNA, 19 nt, Homo sapiens
  misc_RNA (1)...(19): siRNA sense strand
ggaaaugaucauacucaag

SEQ ID NO: 2155057 - RNA, 19 nt, Homo sapiens
  misc_RNA (1)...(19): siRNA sense strand
aaacagagcugaagagaaa

SEQ ID NO: 2155058 - RNA, 19 nt, Homo sapiens
  misc_RNA (1)...(19): siRNA sense strand
gaacaaagggccucaguau

SEQ ID NO: 2155059 - RNA, 19 nt, Homo sapiens
  misc_RNA (1)...(19): siRNA sense strand
gaaaugaucauacucaaga

SEQ ID NO: 2155060 - RNA, 19 nt, Homo sapiens
  misc_RNA (1)...(19): siRNA sense strand
gcaagacaguuaaaugaug

SEQ ID NO: 2155061 - RNA, 19 nt, Homo sapiens
  misc_RNA (1)...(19): siRNA sense strand
ccagaaagcucaucacagu

SEQ ID NO: 2155062 - RNA, 19 nt, Homo sapiens
  misc_RNA (1)...(19): siRNA sense strand
gcaaagcccuggcccugaa

SEQ ID NO: 2155063 - RNA, 19 nt, Homo sapiens
  misc_RNA (1)...(19): siRNA sense strand
gaaauugaacagcaccuua

SEQ ID NO: 2155064 - RNA, 19 nt, Homo sapiens
  misc_RNA (1)...(19): siRNA sense strand
caauauaacuggauagaag

SEQ ID NO: 2155065 - RNA, 19 nt, Homo sapiens
  misc_RNA (1)...(19): siRNA sense strand
ccacagccacuuccaaaua

SEQ ID NO: 2155066 - RNA, 19 nt, Homo sapiens
  misc_RNA (1)...(19): siRNA sense strand
gacagaagcugagauggaa

SEQ ID NO: 2155067 - RNA, 19 nt, Homo sapiens
  misc_RNA (1)...(19): siRNA sense strand
caacugaccuugcucaaac

SEQ ID NO: 2155068 - RNA, 19 nt, Homo sapiens
  misc_RNA (1)...(19): siRNA sense strand
caagacaaguuccuucaug

SEQ ID NO: 2155069 - RNA, 19 nt, Homo sapiens
  misc_RNA (1)...(19): siRNA sense strand
ugagggagcuggcaaagug

SEQ ID NO: 2155070 - RNA, 19 nt, Homo sapiens
  misc_RNA (1)...(19): siRNA sense strand
gggcagacuucauguucua

SEQ ID NO: 2155071 - RNA, 19 nt, Homo sapiens
  misc_RNA (1)...(19): siRNA sense strand
gaaagcucaucacagugua

SEQ ID NO: 2155072 - RNA, 19 nt, Homo sapiens
  misc_RNA (1)...(19): siRNA sense strand
gcaucaauauaacuggaua

SEQ ID NO: 2155073 - RNA, 19 nt, Homo sapiens
  misc_RNA (1)...(19): siRNA sense strand
ggagagagugugcaaagaa

SEQ ID NO: 2155074 - RNA, 19 nt, Homo sapiens
  misc_RNA (1)...(19): siRNA sense strand
ggacagaagcugagaugga

SEQ ID NO: 2155075 - RNA, 19 nt, Homo sapiens
  misc_RNA (1)...(19): siRNA sense strand
gaaaucacaccuuaugcaa

SEQ ID NO: 2155076 - RNA, 19 nt, Homo sapiens
  misc_RNA (1)...(19): siRNA sense strand
gcaaugggcagacuucaug

SEQ ID NO: 2155077 - RNA, 19 nt, Homo sapiens
  misc_RNA (1)...(19): siRNA sense strand
gacucaggcuucucuagua

SEQ ID NO: 2155078 - RNA, 19 nt, Homo sapiens
  misc_RNA (1)...(19): siRNA sense strand
gauacuaccugggacagaa

SEQ ID NO: 2155079 - RNA, 19 nt, Homo sapiens
  misc_RNA (1)...(19): siRNA sense strand
ccaaauccgucucucuaga

SEQ ID NO: 2155080 - RNA, 19 nt, Homo sapiens
  misc_RNA (1)...(19): siRNA sense strand
gaucagagccacagcuuag

SEQ ID NO: 2155081 - RNA, 19 nt, Homo sapiens
  misc_RNA (1)...(19): siRNA sense strand
gagaacagcaccaggaugu

SEQ ID NO: 2155082 - RNA, 19 nt, Homo sapiens
  misc_RNA (1)...(19): siRNA sense strand
ugacaugacuucaggaacu

SEQ ID NO: 2155083 - RNA, 19 nt, Homo sapiens
  misc_RNA (1)...(19): siRNA sense strand
cagaggaacaucuuuagaa

SEQ ID NO: 2155084 - RNA, 19 nt, Homo sapiens
  misc_RNA (1)...(19): siRNA sense strand
ggaacaaagggccucagua

SEQ ID NO: 2155085 - RNA, 19 nt, Homo sapiens
  misc_RNA (1)...(19): siRNA sense strand
gucaaggucugguacuuug

SEQ ID NO: 2155086 - RNA, 19 nt, Homo sapiens
  misc_RNA (1)...(19): siRNA sense strand
gacaaaagcaagacaguua

SEQ ID NO: 2155087 - RNA, 19 nt, Homo sapiens
  misc_RNA (1)...(19): siRNA sense strand
gaaaaccuuccucuaaaua

SEQ ID NO: 2155088 - RNA, 19 nt, Homo sapiens
  misc_RNA (1)...(19): siRNA sense strand
cagaaaugcaggacaguuu

SEQ ID NO: 2155089 - RNA, 19 nt, Homo sapiens
  misc_RNA (1)...(19): siRNA sense strand
uggcagaguuggaauuuca

SEQ ID NO: 2155090 - RNA, 19 nt, Homo sapiens
  misc_RNA (1)...(19): siRNA sense strand
agaggaacaucuuuagaau

SEQ ID NO: 2155091 - RNA, 19 nt, Homo sapiens
  misc_RNA (1)...(19): siRNA sense strand
guagaaagccaagagauca

SEQ ID NO: 2155092 - RNA, 19 nt, Homo sapiens
  misc_RNA (1)...(19): siRNA sense strand
agaguuggaauuucaguua

SEQ ID NO: 2155093 - RNA, 19 nt, Homo sapiens
  misc_RNA (1)...(19): siRNA sense strand
ucuaguaucugcccaaugg

SEQ ID NO: 2155094 - RNA, 19 nt, Homo sapiens
  misc_RNA (1)...(19): siRNA sense strand
acaaguuccuucauguuga

SEQ ID NO: 2155095 - RNA, 19 nt, Homo sapiens
  misc_RNA (1)...(19): siRNA sense strand
gacaaguuccuucauguug

SEQ ID NO: 2155096 - RNA, 19 nt, Homo sapiens
  misc_RNA (1)...(19): siRNA sense strand
cacagccacuuccaaauau

SEQ ID NO: 2155097 - RNA, 19 nt, Homo sapiens
  misc_RNA (1)...(19): siRNA sense strand
ccagaguccugcugagaau

SEQ ID NO: 2155098 - RNA, 19 nt, Homo sapiens
  misc_RNA (1)...(19): siRNA sense strand
gugcaaagccaccacaaug

SEQ ID NO: 2155099 - RNA, 19 nt, Homo sapiens
  misc_RNA (1)...(19): siRNA sense strand
ggaggaagaguuucugcuu

SEQ ID NO: 2155100 - RNA, 19 nt, Homo sapiens
  misc_RNA (1)...(19): siRNA sense strand
aggaagaguuucugcuuga

SEQ ID NO: 2155101 - RNA, 19 nt, Homo sapiens
  misc_RNA (1)...(19): siRNA sense strand
aagcaagacaguuaaauga

SEQ ID NO: 2155102 - RNA, 19 nt, Homo sapiens
  misc_RNA (1)...(19): siRNA sense strand
gugaaagacuacaugagau

SEQ ID NO: 2155103 - RNA, 19 nt, Homo sapiens
  misc_RNA (1)...(19): siRNA sense strand
ggagaaugcccaaggaaag

SEQ ID NO: 2155104 - RNA, 19 nt, Homo sapiens
  misc_RNA (1)...(19): siRNA sense strand
aaaugacugugaaagacua

SEQ ID NO: 2155105 - RNA, 19 nt, Homo sapiens
  misc_RNA (1)...(19): siRNA sense strand
ccgagcaacugcaaacguu

SEQ ID NO: 2155106 - RNA, 19 nt, Homo sapiens
  misc_RNA (1)...(19): siRNA sense strand
ggacaugucagaggaggaa

SEQ ID NO: 2155107 - RNA, 19 nt, Homo sapiens
  misc_RNA (1)...(19): siRNA sense strand
ugagaucuuugcaucaguu

SEQ ID NO: 2155108 - RNA, 19 nt, Homo sapiens
  misc_RNA (1)...(19): siRNA sense strand
caaccacagcuuacucgua

SEQ ID NO: 2155109 - RNA, 19 nt, Homo sapiens
  misc_RNA (1)...(19): siRNA sense strand
ucacaccaaccacagcuua

SEQ ID NO: 2155110 - RNA, 19 nt, Homo sapiens
  misc_RNA (1)...(19): siRNA sense strand
uaacccacgucacagaaau

SEQ ID NO: 2155111 - RNA, 19 nt, Homo sapiens
  misc_RNA (1)...(19): siRNA sense strand
acaaagggccucaguaucu

SEQ ID NO: 2155112 - RNA, 19 nt, Homo sapiens
  misc_RNA (1)...(19): siRNA sense strand
aagacgauaugccaaaguu

SEQ ID NO: 2155113 - RNA, 19 nt, Homo sapiens
  misc_RNA (1)...(19): siRNA sense strand
ccagccagauuccuugguu

SEQ ID NO: 2155114 - RNA, 19 nt, Homo sapiens
  misc_RNA (1)...(19): siRNA sense strand
gagaaugcccaaggaaaga

SEQ ID NO: 2155115 - RNA, 19 nt, Homo sapiens
  misc_RNA (1)...(19): siRNA sense strand
caaagggccucaguaucug

SEQ ID NO: 2155116 - RNA, 19 nt, Homo sapiens
  misc_RNA (1)...(19): siRNA sense strand
gcaaguguaccacaaagca

SEQ ID NO: 2155117 - RNA, 19 nt, Homo sapiens
  misc_RNA (1)...(19): siRNA sense strand
guagggcgagcaugucuuu

SEQ ID NO: 2155118 - RNA, 19 nt, Homo sapiens
  misc_RNA (1)...(19): siRNA sense strand
gagagagugugcaaagaac

SEQ ID NO: 2155119 - RNA, 19 nt, Homo sapiens
  misc_RNA (1)...(19): siRNA sense strand
ucaaaugacugugaaagac

SEQ ID NO: 2155120 - RNA, 19 nt, Homo sapiens
  misc_RNA (1)...(19): siRNA sense strand
ccaguuggcugccuucacu

SEQ ID NO: 2155121 - RNA, 19 nt, Homo sapiens
  misc_RNA (1)...(19): siRNA sense strand
ggcagcagguggcagaguu

SEQ ID NO: 2155122 - RNA, 19 nt, Homo sapiens
  misc_RNA (1)...(19): siRNA sense strand
caccaaauccgucucucua

SEQ ID NO: 2155123 - RNA, 19 nt, Homo sapiens
  misc_RNA (1)...(19): siRNA sense strand
gggagaaugcccaaggaaa

SEQ ID NO: 2155124 - RNA, 19 nt, Homo sapiens
  misc_RNA (1)...(19): siRNA sense strand
cagcagagccaccugaaca

SEQ ID NO: 2155125 - RNA, 19 nt, Homo sapiens
  misc_RNA (1)...(19): siRNA sense strand
gaaauccuggaccauguga

SEQ ID NO: 2155126 - RNA, 19 nt, Homo sapiens
  misc_RNA (1)...(19): siRNA sense strand
gaacagcaccaggaugucu

SEQ ID NO: 2155127 - RNA, 19 nt, Homo sapiens
  misc_RNA (1)...(19): siRNA sense strand
ccgggaguauuuagaagaa

SEQ ID NO: 2155128 - RNA, 19 nt, Homo sapiens
  misc_RNA (1)...(19): siRNA sense strand
aaaguuuccgggaguauuu

SEQ ID NO: 2155129 - RNA, 19 nt, Homo sapiens
  misc_RNA (1)...(19): siRNA sense strand
aggaacaucuuuagaaugc

SEQ ID NO: 2155130 - RNA, 19 nt, Homo sapiens
  misc_RNA (1)...(19): siRNA sense strand
gcaaagccaccacaaugag

SEQ ID NO: 2155131 - RNA, 19 nt, Homo sapiens
  misc_RNA (1)...(19): siRNA sense strand
uaucugugauggaggaaga

SEQ ID NO: 2155132 - RNA, 19 nt, Homo sapiens
  misc_RNA (1)...(19): siRNA sense strand
guaauccucuugacaugac

SEQ ID NO: 2155133 - RNA, 19 nt, Homo sapiens
  misc_RNA (1)...(19): siRNA sense strand
gaggagagagugugcaaag

SEQ ID NO: 2155134 - RNA, 19 nt, Homo sapiens
  misc_RNA (1)...(19): siRNA sense strand
caaacagagcugaagagaa

SEQ ID NO: 2155135 - RNA, 19 nt, Homo sapiens
  misc_RNA (1)...(19): siRNA sense strand
aaauuguccuguuggagaa

SEQ ID NO: 2155136 - RNA, 19 nt, Homo sapiens
  misc_RNA (1)...(19): siRNA sense strand
agagccaccugaacacuau

SEQ ID NO: 2155137 - RNA, 19 nt, Homo sapiens
  misc_RNA (1)...(19): siRNA sense strand
gaguuggaauuucaguuag

SEQ ID NO: 2155138 - RNA, 19 nt, Homo sapiens
  misc_RNA (1)...(19): siRNA sense strand
ccaggaagcccaguucaug

SEQ ID NO: 2155139 - RNA, 19 nt, Homo sapiens
  misc_RNA (1)...(19): siRNA sense strand
uagaaugcacuguguguga

SEQ ID NO: 2155140 - RNA, 19 nt, Homo sapiens
  misc_RNA (1)...(19): siRNA sense strand
gaggaacaucuuuagaaug

SEQ ID NO: 2155141 - RNA, 19 nt, Homo sapiens
  misc_RNA (1)...(19): siRNA sense strand
aaucacaccuuaugcaacu

SEQ ID NO: 2155142 - RNA, 19 nt, Homo sapiens
  misc_RNA (1)...(19): siRNA sense strand
gaagaagagacugguaauc

SEQ ID NO: 2155143 - RNA, 19 nt, Homo sapiens
  misc_RNA (1)...(19): siRNA sense strand
caacuuguacggucguuuc

SEQ ID NO: 2155144 - RNA, 19 nt, Homo sapiens
  misc_RNA (1)...(19): siRNA sense strand
gcagacuucauguucuaaa

SEQ ID NO: 2155145 - RNA, 19 nt, Homo sapiens
  misc_RNA (1)...(19): siRNA sense strand
gacgauaugccaaaguuuc

SEQ ID NO: 2155146 - RNA, 19 nt, Homo sapiens
  misc_RNA (1)...(19): siRNA sense strand
aaagcaagacaguuaaaug

SEQ ID NO: 2155147 - RNA, 19 nt, Homo sapiens
  misc_RNA (1)...(19): siRNA sense strand
uucagaaacucccauccua

SEQ ID NO: 2155148 - RNA, 19 nt, Homo sapiens
  misc_RNA (1)...(19): siRNA sense strand
ugaccuugcucaaacaucu

SEQ ID NO: 2155149 - RNA, 19 nt, Homo sapiens
  misc_RNA (1)...(19): siRNA sense strand
ugugaaagacuacaugaga

SEQ ID NO: 2155150 - RNA, 19 nt, Homo sapiens
  misc_RNA (1)...(19): siRNA sense strand
gguagaaagccaagagauc

SEQ ID NO: 2155151 - RNA, 19 nt, Homo sapiens
  misc_RNA (1)...(19): siRNA sense strand
ggaaaugaucauacucaag

SEQ ID NO: 2155152 - RNA, 19 nt, Homo sapiens
  misc_RNA (1)...(19): siRNA sense strand
gagccacagcuuaguauca

SEQ ID NO: 2155153 - RNA, 19 nt, Homo sapiens
  misc_RNA (1)...(19): siRNA sense strand
ucagagccacagcuuagua

SEQ ID NO: 2155154 - RNA, 19 nt, Homo sapiens
  misc_RNA (1)...(19): siRNA sense strand
gccaaaguuuccgggagua

SEQ ID NO: 2155155 - RNA, 19 nt, Homo sapiens
  misc_RNA (1)...(19): siRNA sense strand
gaaagcaaugggcagacuu

SEQ ID NO: 2155156 - RNA, 19 nt, Homo sapiens
  misc_RNA (1)...(19): siRNA sense strand
gcagguggcagaguuggaa

SEQ ID NO: 2155157 - RNA, 19 nt, Homo sapiens
  misc_RNA (1)...(19): siRNA sense strand
aaacagagcugaagagaaa

SEQ ID NO: 2155158 - RNA, 19 nt, Homo sapiens
  misc_RNA (1)...(19): siRNA sense strand
gaacaaagggccucaguau

SEQ ID NO: 2155159 - RNA, 19 nt, Homo sapiens
  misc_RNA (1)...(19): siRNA sense strand
gaaaugaucauacucaaga

SEQ ID NO: 2155160 - RNA, 19 nt, Homo sapiens
  misc_RNA (1)...(19): siRNA sense strand
gcaagacaguuaaaugaug

SEQ ID NO: 2155161 - RNA, 19 nt, Homo sapiens
  misc_RNA (1)...(19): siRNA sense strand
ccagaaagcucaucacagu

SEQ ID NO: 2155162 - RNA, 19 nt, Homo sapiens
  misc_RNA (1)...(19): siRNA sense strand
gcaaagcccuggcccugaa

SEQ ID NO: 2155163 - RNA, 19 nt, Homo sapiens
  misc_RNA (1)...(19): siRNA sense strand
gaaauugaacagcaccuua

SEQ ID NO: 2155164 - RNA, 19 nt, Homo sapiens
  misc_RNA (1)...(19): siRNA sense strand
caauauaacuggauagaag

SEQ ID NO: 2155165 - RNA, 19 nt, Homo sapiens
  misc_RNA (1)...(19): siRNA sense strand
ccacagccacuuccaaaua

SEQ ID NO: 2155166 - RNA, 19 nt, Homo sapiens
  misc_RNA (1)...(19): siRNA sense strand
gacagaagcugagauggaa

SEQ ID NO: 2155167 - RNA, 19 nt, Homo sapiens
  misc_RNA (1)...(19): siRNA sense strand
caacugaccuugcucaaac

SEQ ID NO: 2155168 - RNA, 19 nt, Homo sapiens
  misc_RNA (1)...(19): siRNA sense strand
caagacaaguuccuucaug

SEQ ID NO: 2155169 - RNA, 19 nt, Homo sapiens
  misc_RNA (1)...(19): siRNA sense strand
ugagggagcuggcaaagug

SEQ ID NO: 2155170 - RNA, 19 nt, Homo sapiens
  misc_RNA (1)...(19): siRNA sense strand
gggcagacuucauguucua

SEQ ID NO: 2155171 - RNA, 19 nt, Homo sapiens
  misc_RNA (1)...(19): siRNA sense strand
gaaagcucaucacagugua

SEQ ID NO: 2155172 - RNA, 19 nt, Homo sapiens
  misc_RNA (1)...(19): siRNA sense strand
gcaucaauauaacuggaua

SEQ ID NO: 2155173 - RNA, 19 nt, Homo sapiens
  misc_RNA (1)...(19): siRNA sense strand
ggagagagugugcaaagaa

SEQ ID NO: 2155174 - RNA, 19 nt, Homo sapiens
  misc_RNA (1)...(19): siRNA sense strand
ggacagaagcugagaugga

SEQ ID NO: 2155175 - RNA, 19 nt, Homo sapiens
  misc_RNA (1)...(19): siRNA sense strand
gaaaucacaccuuaugcaa

SEQ ID NO: 2155176 - RNA, 19 nt, Homo sapiens
  misc_RNA (1)...(19): siRNA sense strand
gcaaugggcagacuucaug

SEQ ID NO: 2155177 - RNA, 19 nt, Homo sapiens
  misc_RNA (1)...(19): siRNA sense strand
gacucaggcuucucuagua

SEQ ID NO: 2155178 - RNA, 19 nt, Homo sapiens
  misc_RNA (1)...(19): siRNA sense strand
gauacuaccugggacagaa

SEQ ID NO: 2155179 - RNA, 19 nt, Homo sapiens
  misc_RNA (1)...(19): siRNA sense strand
ccaaauccgucucucuaga

SEQ ID NO: 2155180 - RNA, 19 nt, Homo sapiens
  misc_RNA (1)...(19): siRNA sense strand
gaucagagccacagcuuag

SEQ ID NO: 2155181 - RNA, 19 nt, Homo sapiens
  misc_RNA (1)...(19): siRNA sense strand
gagaacagcaccaggaugu

SEQ ID NO: 2155182 - RNA, 19 nt, Homo sapiens
  misc_RNA (1)...(19): siRNA sense strand
ugacaugacuucaggaacu

SEQ ID NO: 2155183 - RNA, 19 nt, Homo sapiens
  misc_RNA (1)...(19): siRNA sense strand
cagaggaacaucuuuagaa

SEQ ID NO: 2155184 - RNA, 19 nt, Homo sapiens
  misc_RNA (1)...(19): siRNA sense strand
ggaacaaagggccucagua

SEQ ID NO: 2155185 - RNA, 19 nt, Homo sapiens
  misc_RNA (1)...(19): siRNA sense strand
gucaaggucugguacuuug

SEQ ID NO: 2155186 - RNA, 19 nt, Homo sapiens
  misc_RNA (1)...(19): siRNA sense strand
gacaaaagcaagacaguua

SEQ ID NO: 2155187 - RNA, 19 nt, Homo sapiens
  misc_RNA (1)...(19): siRNA sense strand
gaaaaccuuccucuaaaua

SEQ ID NO: 2155188 - RNA, 19 nt, Homo sapiens
  misc_RNA (1)...(19): siRNA sense strand
cagaaaugcaggacaguuu

SEQ ID NO: 2155189 - RNA, 19 nt, Homo sapiens
  misc_RNA (1)...(19): siRNA sense strand
uggcagaguuggaauuuca

SEQ ID NO: 2155190 - RNA, 19 nt, Homo sapiens
  misc_RNA (1)...(19): siRNA sense strand
agaggaacaucuuuagaau

SEQ ID NO: 2155191 - RNA, 19 nt, Homo sapiens
  misc_RNA (1)...(19): siRNA sense strand
guagaaagccaagagauca

SEQ ID NO: 2155192 - RNA, 19 nt, Homo sapiens
  misc_RNA (1)...(19): siRNA sense strand
agaguuggaauuucaguua

SEQ ID NO: 2155193 - RNA, 19 nt, Homo sapiens
  misc_RNA (1)...(19): siRNA sense strand
ucuaguaucugcccaaugg

SEQ ID NO: 2155194 - RNA, 19 nt, Homo sapiens
  misc_RNA (1)...(19): siRNA sense strand
acaaguuccuucauguuga

SEQ ID NO: 2155195 - RNA, 19 nt, Homo sapiens
  misc_RNA (1)...(19): siRNA sense strand
gacaaguuccuucauguug

SEQ ID NO: 2155196 - RNA, 19 nt, Homo sapiens
  misc_RNA (1)...(19): siRNA sense strand
cacagccacuuccaaauau

SEQ ID NO: 2155197 - RNA, 19 nt, Homo sapiens
  misc_RNA (1)...(19): siRNA sense strand
ccagaguccugcugagaau

SEQ ID NO: 2155198 - RNA, 19 nt, Homo sapiens
  misc_RNA (1)...(19): siRNA sense strand
gugcaaagccaccacaaug

SEQ ID NO: 2155199 - RNA, 19 nt, Homo sapiens
  misc_RNA (1)...(19): siRNA sense strand
ggaggaagaguuucugcuu

SEQ ID NO: 2155200 - RNA, 19 nt, Homo sapiens
  misc_RNA (1)...(19): siRNA sense strand
aggaagaguuucugcuuga

SEQ ID NO: 2155201 - RNA, 19 nt, Homo sapiens
  misc_RNA (1)...(19): siRNA sense strand
aagcaagacaguuaaauga

SEQ ID NO: 2155202 - RNA, 19 nt, Homo sapiens
  misc_RNA (1)...(19): siRNA sense strand
gugaaagacuacaugagau

SEQ ID NO: 2155203 - RNA, 19 nt, Homo sapiens
  misc_RNA (1)...(19): siRNA sense strand
ggagaaugcccaaggaaag

SEQ ID NO: 2155204 - RNA, 19 nt, Homo sapiens
  misc_RNA (1)...(19): siRNA sense strand
aaaugacugugaaagacua

SEQ ID NO: 2155205 - RNA, 19 nt, Homo sapiens
  misc_RNA (1)...(19): siRNA sense strand
ccgagcaacugcaaacguu

SEQ ID NO: 2155206 - RNA, 19 nt, Homo sapiens
  misc_RNA (1)...(19): siRNA sense strand
ggacaugucagaggaggaa

SEQ ID NO: 2155207 - RNA, 19 nt, Homo sapiens
  misc_RNA (1)...(19): siRNA sense strand
ugagaucuuugcaucaguu

SEQ ID NO: 2155208 - RNA, 19 nt, Homo sapiens
  misc_RNA (1)...(19): siRNA sense strand
caaccacagcuuacucgua

SEQ ID NO: 2155209 - RNA, 19 nt, Homo sapiens
  misc_RNA (1)...(19): siRNA sense strand
ucacaccaaccacagcuua

SEQ ID NO: 2155210 - RNA, 19 nt, Homo sapiens
  misc_RNA (1)...(19): siRNA sense strand
uaacccacgucacagaaau

SEQ ID NO: 2155211 - RNA, 19 nt, Homo sapiens
  misc_RNA (1)...(19): siRNA sense strand
acaaagggccucaguaucu

SEQ ID NO: 2155212 - RNA, 19 nt, Homo sapiens
  misc_RNA (1)...(19): siRNA sense strand
aagacgauaugccaaaguu

SEQ ID NO: 2155213 - RNA, 19 nt, Homo sapiens
  misc_RNA (1)...(19): siRNA sense strand
ccagccagauuccuugguu

SEQ ID NO: 2155214 - RNA, 19 nt, Homo sapiens
  misc_RNA (1)...(19): siRNA sense strand
gagaaugcccaaggaaaga

SEQ ID NO: 2155215 - RNA, 19 nt, Homo sapiens
  misc_RNA (1)...(19): siRNA sense strand
caaagggccucaguaucug

SEQ ID NO: 2155216 - RNA, 19 nt, Homo sapiens
  misc_RNA (1)...(19): siRNA sense strand
gcaaguguaccacaaagca

SEQ ID NO: 2155217 - RNA, 19 nt, Homo sapiens
  misc_RNA (1)...(19): siRNA sense strand
guagggcgagcaugucuuu

SEQ ID NO: 2155218 - RNA, 19 nt, Homo sapiens
  misc_RNA (1)...(19): siRNA sense strand
gagagagugugcaaagaac

SEQ ID NO: 2155219 - RNA, 19 nt, Homo sapiens
  misc_RNA (1)...(19): siRNA sense strand
ucaaaugacugugaaagac

SEQ ID NO: 2155220 - RNA, 19 nt, Homo sapiens
  misc_RNA (1)...(19): siRNA sense strand
ccaguuggcugccuucacu

SEQ ID NO: 2155221 - RNA, 19 nt, Homo sapiens
  misc_RNA (1)...(19): siRNA sense strand
ggcagcagguggcagaguu

SEQ ID NO: 2155222 - RNA, 19 nt, Homo sapiens
  misc_RNA (1)...(19): siRNA sense strand
caccaaauccgucucucua

SEQ ID NO: 2155223 - RNA, 19 nt, Homo sapiens
  misc_RNA (1)...(19): siRNA sense strand
gggagaaugcccaaggaaa

SEQ ID NO: 2155224 - RNA, 19 nt, Homo sapiens
  misc_RNA (1)...(19): siRNA sense strand
cagcagagccaccugaaca

SEQ ID NO: 2155225 - RNA, 19 nt, Homo sapiens
  misc_RNA (1)...(19): siRNA sense strand
gaaauccuggaccauguga

SEQ ID NO: 2155226 - RNA, 19 nt, Homo sapiens
  misc_RNA (1)...(19): siRNA sense strand
gaacagcaccaggaugucu

SEQ ID NO: 2155227 - RNA, 19 nt, Homo sapiens
  misc_RNA (1)...(19): siRNA sense strand
ccgggaguauuuagaagaa

SEQ ID NO: 2155228 - RNA, 19 nt, Homo sapiens
  misc_RNA (1)...(19): siRNA sense strand
aaaguuuccgggaguauuu

SEQ ID NO: 2155229 - RNA, 19 nt, Homo sapiens
  misc_RNA (1)...(19): siRNA sense strand
aggaacaucuuuagaaugc

SEQ ID NO: 2155230 - RNA, 19 nt, Homo sapiens
  misc_RNA (1)...(19): siRNA sense strand
gcaaagccaccacaaugag

SEQ ID NO: 2155231 - RNA, 19 nt, Homo sapiens
  misc_RNA (1)...(19): siRNA sense strand
uaucugugauggaggaaga

SEQ ID NO: 2155232 - RNA, 19 nt, Homo sapiens
  misc_RNA (1)...(19): siRNA sense strand
guaauccucuugacaugac

SEQ ID NO: 2155233 - RNA, 19 nt, Homo sapiens
  misc_RNA (1)...(19): siRNA sense strand
gaggagagagugugcaaag

SEQ ID NO: 2155234 - RNA, 19 nt, Homo sapiens
  misc_RNA (1)...(19): siRNA sense strand
caaacagagcugaagagaa

SEQ ID NO: 2155235 - RNA, 19 nt, Homo sapiens
  misc_RNA (1)...(19): siRNA sense strand
aaauuguccuguuggagaa

SEQ ID NO: 2155236 - RNA, 19 nt, Homo sapiens
  misc_RNA (1)...(19): siRNA sense strand
agagccaccugaacacuau

SEQ ID NO: 2155237 - RNA, 19 nt, Homo sapiens
  misc_RNA (1)...(19): siRNA sense strand
gaguuggaauuucaguuag

SEQ ID NO: 2155238 - RNA, 19 nt, Homo sapiens
  misc_RNA (1)...(19): siRNA sense strand
ccaggaagcccaguucaug

SEQ ID NO: 2155239 - RNA, 19 nt, Homo sapiens
  misc_RNA (1)...(19): siRNA sense strand
uagaaugcacuguguguga

SEQ ID NO: 2155240 - RNA, 19 nt, Homo sapiens
  misc_RNA (1)...(19): siRNA sense strand
gaggaacaucuuuagaaug

SEQ ID NO: 2155241 - RNA, 19 nt, Homo sapiens
  misc_RNA (1)...(19): siRNA sense strand
aaucacaccuuaugcaacu

SEQ ID NO: 2155242 - RNA, 19 nt, Homo sapiens
  misc_RNA (1)...(19): siRNA sense strand
gaagaagagacugguaauc

SEQ ID NO: 2155243 - RNA, 19 nt, Homo sapiens
  misc_RNA (1)...(19): siRNA sense strand
caacuuguacggucguuuc

SEQ ID NO: 2155244 - RNA, 19 nt, Homo sapiens
  misc_RNA (1)...(19): siRNA sense strand
gcagacuucauguucuaaa

SEQ ID NO: 2155245 - RNA, 19 nt, Homo sapiens
  misc_RNA (1)...(19): siRNA sense strand
gacgauaugccaaaguuuc

SEQ ID NO: 2155246 - RNA, 19 nt, Homo sapiens
  misc_RNA (1)...(19): siRNA sense strand
aaagcaagacaguuaaaug

SEQ ID NO: 2155247 - RNA, 19 nt, Homo sapiens
  misc_RNA (1)...(19): siRNA sense strand
uucagaaacucccauccua

SEQ ID NO: 2155248 - RNA, 19 nt, Homo sapiens
  misc_RNA (1)...(19): siRNA sense strand
ugaccuugcucaaacaucu

SEQ ID NO: 2155249 - RNA, 19 nt, Homo sapiens
  misc_RNA (1)...(19): siRNA sense strand
ugugaaagacuacaugaga

SEQ ID NO: 2155250 - RNA, 19 nt, Homo sapiens
  misc_RNA (1)...(19): siRNA sense strand
gguagaaagccaagagauc

SEQ ID NO: 2155251 - RNA, 19 nt, Homo sapiens
  misc_RNA (1)...(19): siRNA sense strand
ggaaaugaucauacucaag

SEQ ID NO: 2155252 - RNA, 19 nt, Homo sapiens
  misc_RNA (1)...(19): siRNA sense strand
gagccacagcuuaguauca

SEQ ID NO: 2155253 - RNA, 19 nt, Homo sapiens
  misc_RNA (1)...(19): siRNA sense strand
ucagagccacagcuuagua

SEQ ID NO: 2155254 - RNA, 19 nt, Homo sapiens
  misc_RNA (1)...(19): siRNA sense strand
gccaaaguuuccgggagua

SEQ ID NO: 2155255 - RNA, 19 nt, Homo sapiens
  misc_RNA (1)...(19): siRNA sense strand
gaaagcaaugggcagacuu

SEQ ID NO: 2155256 - RNA, 19 nt, Homo sapiens
  misc_RNA (1)...(19): siRNA sense strand
gcagguggcagaguuggaa

SEQ ID NO: 2155257 - RNA, 19 nt, Homo sapiens
  misc_RNA (1)...(19): siRNA sense strand
gaucagaccagacaaauuu

SEQ ID NO: 2155258 - RNA, 19 nt, Homo sapiens
  misc_RNA (1)...(19): siRNA sense strand
ggaagaauacucacaacua

SEQ ID NO: 2155259 - RNA, 19 nt, Homo sapiens
  misc_RNA (1)...(19): siRNA sense strand
ucagagagucuuccaauua

SEQ ID NO: 2155260 - RNA, 19 nt, Homo sapiens
  misc_RNA (1)...(19): siRNA sense strand
gaagaauacucacaacuac

SEQ ID NO: 2155261 - RNA, 19 nt, Homo sapiens
  misc_RNA (1)...(19): siRNA sense strand
ccaggaagauacuguguuu

SEQ ID NO: 2155262 - RNA, 19 nt, Homo sapiens
  misc_RNA (1)...(19): siRNA sense strand
uaagcaagcugccucugua

SEQ ID NO: 2155263 - RNA, 19 nt, Homo sapiens
  misc_RNA (1)...(19): siRNA sense strand
cuucauggcuuuccacuuu

SEQ ID NO: 2155264 - RNA, 19 nt, Homo sapiens
  misc_RNA (1)...(19): siRNA sense strand
ggagggaggugacgaaugg

SEQ ID NO: 2155265 - RNA, 19 nt, Homo sapiens
  misc_RNA (1)...(19): siRNA sense strand
gggaggugcuucauuagaa

SEQ ID NO: 2155266 - RNA, 19 nt, Homo sapiens
  misc_RNA (1)...(19): siRNA sense strand
ggaaagucauggcaggaaa

SEQ ID NO: 2155267 - RNA, 19 nt, Homo sapiens
  misc_RNA (1)...(19): siRNA sense strand
cagagagacuguucagaaa

SEQ ID NO: 2155268 - RNA, 19 nt, Homo sapiens
  misc_RNA (1)...(19): siRNA sense strand
gcagauaucaccagagaga

SEQ ID NO: 2155269 - RNA, 19 nt, Homo sapiens
  misc_RNA (1)...(19): siRNA sense strand
caacaagcauccagcacuu

SEQ ID NO: 2155270 - RNA, 19 nt, Homo sapiens
  misc_RNA (1)...(19): siRNA sense strand
ggaaauggagccacaguau

SEQ ID NO: 2155271 - RNA, 19 nt, Homo sapiens
  misc_RNA (1)...(19): siRNA sense strand
gaaauggagccacaguauu

SEQ ID NO: 2155272 - RNA, 19 nt, Homo sapiens
  misc_RNA (1)...(19): siRNA sense strand
gaugacgucuuccuagaug

SEQ ID NO: 2155273 - RNA, 19 nt, Homo sapiens
  misc_RNA (1)...(19): siRNA sense strand
gggaacagcugggaucaga

SEQ ID NO: 2155274 - RNA, 19 nt, Homo sapiens
  misc_RNA (1)...(19): siRNA sense strand
cuugggaggugcuucauua

SEQ ID NO: 2155275 - RNA, 19 nt, Homo sapiens
  misc_RNA (1)...(19): siRNA sense strand
agaaggaucccaaguauau

SEQ ID NO: 2155276 - RNA, 19 nt, Homo sapiens
  misc_RNA (1)...(19): siRNA sense strand
gagaagaugcugccaugaa

SEQ ID NO: 2155277 - RNA, 19 nt, Homo sapiens
  misc_RNA (1)...(19): siRNA sense strand
gagaucuuguccuucauuu

SEQ ID NO: 2155278 - RNA, 19 nt, Homo sapiens
  misc_RNA (1)...(19): siRNA sense strand
cacaaggucuuaauccuau

SEQ ID NO: 2155279 - RNA, 19 nt, Homo sapiens
  misc_RNA (1)...(19): siRNA sense strand
ccagagagacuguucagaa

SEQ ID NO: 2155280 - RNA, 19 nt, Homo sapiens
  misc_RNA (1)...(19): siRNA sense strand
gaaucgggaugacgucuuc

SEQ ID NO: 2155281 - RNA, 19 nt, Homo sapiens
  misc_RNA (1)...(19): siRNA sense strand
uuagaaggaucccaaguau

SEQ ID NO: 2155282 - RNA, 19 nt, Homo sapiens
  misc_RNA (1)...(19): siRNA sense strand
gggcaggaacccaaugaua

SEQ ID NO: 2155283 - RNA, 19 nt, Homo sapiens
  misc_RNA (1)...(19): siRNA sense strand
ggaacuaucaggaaaguca

SEQ ID NO: 2155284 - RNA, 19 nt, Homo sapiens
  misc_RNA (1)...(19): siRNA sense strand
ggaaaaguaugucugaaga

SEQ ID NO: 2155285 - RNA, 19 nt, Homo sapiens
  misc_RNA (1)...(19): siRNA sense strand
gaaaguaaggcaagcagau

SEQ ID NO: 2155286 - RNA, 19 nt, Homo sapiens
  misc_RNA (1)...(19): siRNA sense strand
ucacugagccaccagauga

SEQ ID NO: 2155287 - RNA, 19 nt, Homo sapiens
  misc_RNA (1)...(19): siRNA sense strand
uaucagacaugaaguuaag

SEQ ID NO: 2155288 - RNA, 19 nt, Homo sapiens
  misc_RNA (1)...(19): siRNA sense strand
guuacagcauggaagaaua

SEQ ID NO: 2155289 - RNA, 19 nt, Homo sapiens
  misc_RNA (1)...(19): siRNA sense strand
aagcagauaucaccagaga

SEQ ID NO: 2155290 - RNA, 19 nt, Homo sapiens
  misc_RNA (1)...(19): siRNA sense strand
gggaugacgucuuccuaga

SEQ ID NO: 2155291 - RNA, 19 nt, Homo sapiens
  misc_RNA (1)...(19): siRNA sense strand
ggacaugacagccacacuu

SEQ ID NO: 2155292 - RNA, 19 nt, Homo sapiens
  misc_RNA (1)...(19): siRNA sense strand
ccaaggcacugaaaguaag

SEQ ID NO: 2155293 - RNA, 19 nt, Homo sapiens
  misc_RNA (1)...(19): siRNA sense strand
gaacauggucucagugacu

SEQ ID NO: 2155294 - RNA, 19 nt, Homo sapiens
  misc_RNA (1)...(19): siRNA sense strand
ggucacaacuagccggaau

SEQ ID NO: 2155295 - RNA, 19 nt, Homo sapiens
  misc_RNA (1)...(19): siRNA sense strand
aaguuaagguucucacauu

SEQ ID NO: 2155296 - RNA, 19 nt, Homo sapiens
  misc_RNA (1)...(19): siRNA sense strand
acaaagggauaucuguguu

SEQ ID NO: 2155297 - RNA, 19 nt, Homo sapiens
  misc_RNA (1)...(19): siRNA sense strand
cagagagucuuccaauuac

SEQ ID NO: 2155298 - RNA, 19 nt, Homo sapiens
  misc_RNA (1)...(19): siRNA sense strand
caagaagggcugccagguu

SEQ ID NO: 2155299 - RNA, 19 nt, Homo sapiens
  misc_RNA (1)...(19): siRNA sense strand
gacaugaaguuaagguucu

SEQ ID NO: 2155300 - RNA, 19 nt, Homo sapiens
  misc_RNA (1)...(19): siRNA sense strand
gacaugacagccacacuuu

SEQ ID NO: 2155301 - RNA, 19 nt, Homo sapiens
  misc_RNA (1)...(19): siRNA sense strand
gccaaggcacugaaaguaa

SEQ ID NO: 2155302 - RNA, 19 nt, Homo sapiens
  misc_RNA (1)...(19): siRNA sense strand
cagaaacaccucagugaug

SEQ ID NO: 2155303 - RNA, 19 nt, Homo sapiens
  misc_RNA (1)...(19): siRNA sense strand
caaagggauaucuguguuu

SEQ ID NO: 2155304 - RNA, 19 nt, Homo sapiens
  misc_RNA (1)...(19): siRNA sense strand
gauugaacauggucucagu

SEQ ID NO: 2155305 - RNA, 19 nt, Homo sapiens
  misc_RNA (1)...(19): siRNA sense strand
guacaaccucaagcuaaua

SEQ ID NO: 2155306 - RNA, 19 nt, Homo sapiens
  misc_RNA (1)...(19): siRNA sense strand
aaagggauaucuguguuug

SEQ ID NO: 2155307 - RNA, 19 nt, Homo sapiens
  misc_RNA (1)...(19): siRNA sense strand
gcaaaacuucaacucauua

SEQ ID NO: 2155308 - RNA, 19 nt, Homo sapiens
  misc_RNA (1)...(19): siRNA sense strand
ggaacccaaugauaccaau

SEQ ID NO: 2155309 - RNA, 19 nt, Homo sapiens
  misc_RNA (1)...(19): siRNA sense strand
gaagaugcugccaugaaga

SEQ ID NO: 2155310 - RNA, 19 nt, Homo sapiens
  misc_RNA (1)...(19): siRNA sense strand
ccugaagaauggaaguauu

SEQ ID NO: 2155311 - RNA, 19 nt, Homo sapiens
  misc_RNA (1)...(19): siRNA sense strand
gaaguuaagguucucacau

SEQ ID NO: 2155312 - RNA, 19 nt, Homo sapiens
  misc_RNA (1)...(19): siRNA sense strand
aaaguaaggcaagcagaua

SEQ ID NO: 2155313 - RNA, 19 nt, Homo sapiens
  misc_RNA (1)...(19): siRNA sense strand
gcuaugucuucauggcuuu

SEQ ID NO: 2155314 - RNA, 19 nt, Homo sapiens
  misc_RNA (1)...(19): siRNA sense strand
gaauagugaacguggcaaa

SEQ ID NO: 2155315 - RNA, 19 nt, Homo sapiens
  misc_RNA (1)...(19): siRNA sense strand
acacaaggucuuaauccua

SEQ ID NO: 2155316 - RNA, 19 nt, Homo sapiens
  misc_RNA (1)...(19): siRNA sense strand
gagccacaguauuugguau

SEQ ID NO: 2155317 - RNA, 19 nt, Homo sapiens
  misc_RNA (1)...(19): siRNA sense strand
ggucggauuucaccacaag

SEQ ID NO: 2155318 - RNA, 19 nt, Homo sapiens
  misc_RNA (1)...(19): siRNA sense strand
agaagaugcugccaugaag

SEQ ID NO: 2155319 - RNA, 19 nt, Homo sapiens
  misc_RNA (1)...(19): siRNA sense strand
gauggugggcuucaggaaa

SEQ ID NO: 2155320 - RNA, 19 nt, Homo sapiens
  misc_RNA (1)...(19): siRNA sense strand
gcaagcugccucuguaugg

SEQ ID NO: 2155321 - RNA, 19 nt, Homo sapiens
  misc_RNA (1)...(19): siRNA sense strand
aaaagugucuguguucuaa

SEQ ID NO: 2155322 - RNA, 19 nt, Homo sapiens
  misc_RNA (1)...(19): siRNA sense strand
cagccacacuuuaccugaa

SEQ ID NO: 2155323 - RNA, 19 nt, Homo sapiens
  misc_RNA (1)...(19): siRNA sense strand
ggaucagaccagacaaauu

SEQ ID NO: 2155324 - RNA, 19 nt, Homo sapiens
  misc_RNA (1)...(19): siRNA sense strand
gaaacgucauggucacaac

SEQ ID NO: 2155325 - RNA, 19 nt, Homo sapiens
  misc_RNA (1)...(19): siRNA sense strand
ugaggcacgugacugagaa

SEQ ID NO: 2155326 - RNA, 19 nt, Homo sapiens
  misc_RNA (1)...(19): siRNA sense strand
cacuuuaccugaagaaugg

SEQ ID NO: 2155327 - RNA, 19 nt, Homo sapiens
  misc_RNA (1)...(19): siRNA sense strand
gcacuugcagaaauaaauc

SEQ ID NO: 2155328 - RNA, 19 nt, Homo sapiens
  misc_RNA (1)...(19): siRNA sense strand
gcacugaugacuguguuau

SEQ ID NO: 2155329 - RNA, 19 nt, Homo sapiens
  misc_RNA (1)...(19): siRNA sense strand
uccagcacuugcagaaaua

SEQ ID NO: 2155330 - RNA, 19 nt, Homo sapiens
  misc_RNA (1)...(19): siRNA sense strand
ggagccacaguauuuggua

SEQ ID NO: 2155331 - RNA, 19 nt, Homo sapiens
  misc_RNA (1)...(19): siRNA sense strand
gcuguuggccagucaguug

SEQ ID NO: 2155332 - RNA, 19 nt, Homo sapiens
  misc_RNA (1)...(19): siRNA sense strand
cagcauggaagaauacuca

SEQ ID NO: 2155333 - RNA, 19 nt, Homo sapiens
  misc_RNA (1)...(19): siRNA sense strand
cugaagaauggaaguauuu

SEQ ID NO: 2155334 - RNA, 19 nt, Homo sapiens
  misc_RNA (1)...(19): siRNA sense strand
uguacaaccucaagcuaau

SEQ ID NO: 2155335 - RNA, 19 nt, Homo sapiens
  misc_RNA (1)...(19): siRNA sense strand
caaggucuuaauccuauuu

SEQ ID NO: 2155336 - RNA, 19 nt, Homo sapiens
  misc_RNA (1)...(19): siRNA sense strand
gauaucuguguuugccuua

SEQ ID NO: 2155337 - RNA, 19 nt, Homo sapiens
  misc_RNA (1)...(19): siRNA sense strand
gcaauuagacaaugaaaag

SEQ ID NO: 2155338 - RNA, 19 nt, Homo sapiens
  misc_RNA (1)...(19): siRNA sense strand
gaaaagugucuguguucua

SEQ ID NO: 2155339 - RNA, 19 nt, Homo sapiens
  misc_RNA (1)...(19): siRNA sense strand
acacugcaauuagacaaug

SEQ ID NO: 2155340 - RNA, 19 nt, Homo sapiens
  misc_RNA (1)...(19): siRNA sense strand
ccaguuugcggucuacauu

SEQ ID NO: 2155341 - RNA, 19 nt, Homo sapiens
  misc_RNA (1)...(19): siRNA sense strand
cccaaccacugcagaccua

SEQ ID NO: 2155342 - RNA, 19 nt, Homo sapiens
  misc_RNA (1)...(19): siRNA sense strand
uagaaggaucccaaguaua

SEQ ID NO: 2155343 - RNA, 19 nt, Homo sapiens
  misc_RNA (1)...(19): siRNA sense strand
uauuugguaucucuugcua

SEQ ID NO: 2155344 - RNA, 19 nt, Homo sapiens
  misc_RNA (1)...(19): siRNA sense strand
ugacugagaaucgggauga

SEQ ID NO: 2155345 - RNA, 19 nt, Homo sapiens
  misc_RNA (1)...(19): siRNA sense strand
gcucauuucggguuuggaa

SEQ ID NO: 2155346 - RNA, 19 nt, Homo sapiens
  misc_RNA (1)...(19): siRNA sense strand
cuugggaacuaucaggaaa

SEQ ID NO: 2155347 - RNA, 19 nt, Homo sapiens
  misc_RNA (1)...(19): siRNA sense strand
agacugaggagccuuuguu

SEQ ID NO: 2155348 - RNA, 19 nt, Homo sapiens
  misc_RNA (1)...(19): siRNA sense strand
gcauccagcacuugcagaa

SEQ ID NO: 2155349 - RNA, 19 nt, Homo sapiens
  misc_RNA (1)...(19): siRNA sense strand
ccucagugaugccauugug

SEQ ID NO: 2155350 - RNA, 19 nt, Homo sapiens
  misc_RNA (1)...(19): siRNA sense strand
acaccucagugaugccauu

SEQ ID NO: 2155351 - RNA, 19 nt, Homo sapiens
  misc_RNA (1)...(19): siRNA sense strand
ugaggagccuuuguuccaa

SEQ ID NO: 2155352 - RNA, 19 nt, Homo sapiens
  misc_RNA (1)...(19): siRNA sense strand
uagccggaauguuguacaa

SEQ ID NO: 2155353 - RNA, 19 nt, Homo sapiens
  misc_RNA (1)...(19): siRNA sense strand
ggaaacgucauggucacaa

SEQ ID NO: 2155354 - RNA, 19 nt, Homo sapiens
  misc_RNA (1)...(19): siRNA sense strand
gugaugccauuguggaagu

SEQ ID NO: 2155355 - RNA, 19 nt, Homo sapiens
  misc_RNA (1)...(19): siRNA sense strand
gaccccaacuugaaagaaa

SEQ ID NO: 2155356 - RNA, 19 nt, Homo sapiens
  misc_RNA (1)...(19): siRNA sense strand
ggcaggaacccaaugauac

SEQ ID NO: 2155357 - RNA, 19 nt, Homo sapiens
  misc_RNA (1)...(19): siRNA sense strand
gaucagaccagacaaauuu

SEQ ID NO: 2155358 - RNA, 19 nt, Homo sapiens
  misc_RNA (1)...(19): siRNA sense strand
ggaagaauacucacaacua

SEQ ID NO: 2155359 - RNA, 19 nt, Homo sapiens
  misc_RNA (1)...(19): siRNA sense strand
ucagagagucuuccaauua

SEQ ID NO: 2155360 - RNA, 19 nt, Homo sapiens
  misc_RNA (1)...(19): siRNA sense strand
gaagaauacucacaacuac

SEQ ID NO: 2155361 - RNA, 19 nt, Homo sapiens
  misc_RNA (1)...(19): siRNA sense strand
ccaggaagauacuguguuu

SEQ ID NO: 2155362 - RNA, 19 nt, Homo sapiens
  misc_RNA (1)...(19): siRNA sense strand
uaagcaagcugccucugua

SEQ ID NO: 2155363 - RNA, 19 nt, Homo sapiens
  misc_RNA (1)...(19): siRNA sense strand
cuucauggcuuuccacuuu

SEQ ID NO: 2155364 - RNA, 19 nt, Homo sapiens
  misc_RNA (1)...(19): siRNA sense strand
ggagggaggugacgaaugg

SEQ ID NO: 2155365 - RNA, 19 nt, Homo sapiens
  misc_RNA (1)...(19): siRNA sense strand
gggaggugcuucauuagaa

SEQ ID NO: 2155366 - RNA, 19 nt, Homo sapiens
  misc_RNA (1)...(19): siRNA sense strand
ggaaagucauggcaggaaa

SEQ ID NO: 2155367 - RNA, 19 nt, Homo sapiens
  misc_RNA (1)...(19): siRNA sense strand
cagagagacuguucagaaa

SEQ ID NO: 2155368 - RNA, 19 nt, Homo sapiens
  misc_RNA (1)...(19): siRNA sense strand
gcagauaucaccagagaga

SEQ ID NO: 2155369 - RNA, 19 nt, Homo sapiens
  misc_RNA (1)...(19): siRNA sense strand
caacaagcauccagcacuu

SEQ ID NO: 2155370 - RNA, 19 nt, Homo sapiens
  misc_RNA (1)...(19): siRNA sense strand
ggaaauggagccacaguau

SEQ ID NO: 2155371 - RNA, 19 nt, Homo sapiens
  misc_RNA (1)...(19): siRNA sense strand
gaaauggagccacaguauu

SEQ ID NO: 2155372 - RNA, 19 nt, Homo sapiens
  misc_RNA (1)...(19): siRNA sense strand
gaugacgucuuccuagaug

SEQ ID NO: 2155373 - RNA, 19 nt, Homo sapiens
  misc_RNA (1)...(19): siRNA sense strand
gggaacagcugggaucaga

SEQ ID NO: 2155374 - RNA, 19 nt, Homo sapiens
  misc_RNA (1)...(19): siRNA sense strand
cuugggaggugcuucauua

SEQ ID NO: 2155375 - RNA, 19 nt, Homo sapiens
  misc_RNA (1)...(19): siRNA sense strand
agaaggaucccaaguauau

SEQ ID NO: 2155376 - RNA, 19 nt, Homo sapiens
  misc_RNA (1)...(19): siRNA sense strand
gagaagaugcugccaugaa

SEQ ID NO: 2155377 - RNA, 19 nt, Homo sapiens
  misc_RNA (1)...(19): siRNA sense strand
gagaucuuguccuucauuu

SEQ ID NO: 2155378 - RNA, 19 nt, Homo sapiens
  misc_RNA (1)...(19): siRNA sense strand
cacaaggucuuaauccuau

SEQ ID NO: 2155379 - RNA, 19 nt, Homo sapiens
  misc_RNA (1)...(19): siRNA sense strand
ccagagagacuguucagaa

SEQ ID NO: 2155380 - RNA, 19 nt, Homo sapiens
  misc_RNA (1)...(19): siRNA sense strand
gaaucgggaugacgucuuc

SEQ ID NO: 2155381 - RNA, 19 nt, Homo sapiens
  misc_RNA (1)...(19): siRNA sense strand
uuagaaggaucccaaguau

SEQ ID NO: 2155382 - RNA, 19 nt, Homo sapiens
  misc_RNA (1)...(19): siRNA sense strand
gggcaggaacccaaugaua

SEQ ID NO: 2155383 - RNA, 19 nt, Homo sapiens
  misc_RNA (1)...(19): siRNA sense strand
ggaacuaucaggaaaguca

SEQ ID NO: 2155384 - RNA, 19 nt, Homo sapiens
  misc_RNA (1)...(19): siRNA sense strand
ggaaaaguaugucugaaga

SEQ ID NO: 2155385 - RNA, 19 nt, Homo sapiens
  misc_RNA (1)...(19): siRNA sense strand
gaaaguaaggcaagcagau

SEQ ID NO: 2155386 - RNA, 19 nt, Homo sapiens
  misc_RNA (1)...(19): siRNA sense strand
ucacugagccaccagauga

SEQ ID NO: 2155387 - RNA, 19 nt, Homo sapiens
  misc_RNA (1)...(19): siRNA sense strand
uaucagacaugaaguuaag

SEQ ID NO: 2155388 - RNA, 19 nt, Homo sapiens
  misc_RNA (1)...(19): siRNA sense strand
guuacagcauggaagaaua

SEQ ID NO: 2155389 - RNA, 19 nt, Homo sapiens
  misc_RNA (1)...(19): siRNA sense strand
aagcagauaucaccagaga

SEQ ID NO: 2155390 - RNA, 19 nt, Homo sapiens
  misc_RNA (1)...(19): siRNA sense strand
gggaugacgucuuccuaga

SEQ ID NO: 2155391 - RNA, 19 nt, Homo sapiens
  misc_RNA (1)...(19): siRNA sense strand
ggacaugacagccacacuu

SEQ ID NO: 2155392 - RNA, 19 nt, Homo sapiens
  misc_RNA (1)...(19): siRNA sense strand
ccaaggcacugaaaguaag

SEQ ID NO: 2155393 - RNA, 19 nt, Homo sapiens
  misc_RNA (1)...(19): siRNA sense strand
gaacauggucucagugacu

SEQ ID NO: 2155394 - RNA, 19 nt, Homo sapiens
  misc_RNA (1)...(19): siRNA sense strand
ggucacaacuagccggaau

SEQ ID NO: 2155395 - RNA, 19 nt, Homo sapiens
  misc_RNA (1)...(19): siRNA sense strand
aaguuaagguucucacauu

SEQ ID NO: 2155396 - RNA, 19 nt, Homo sapiens
  misc_RNA (1)...(19): siRNA sense strand
acaaagggauaucuguguu

SEQ ID NO: 2155397 - RNA, 19 nt, Homo sapiens
  misc_RNA (1)...(19): siRNA sense strand
cagagagucuuccaauuac

SEQ ID NO: 2155398 - RNA, 19 nt, Homo sapiens
  misc_RNA (1)...(19): siRNA sense strand
caagaagggcugccagguu

SEQ ID NO: 2155399 - RNA, 19 nt, Homo sapiens
  misc_RNA (1)...(19): siRNA sense strand
gacaugaaguuaagguucu

SEQ ID NO: 2155400 - RNA, 19 nt, Homo sapiens
  misc_RNA (1)...(19): siRNA sense strand
gacaugacagccacacuuu

SEQ ID NO: 2155401 - RNA, 19 nt, Homo sapiens
  misc_RNA (1)...(19): siRNA sense strand
gccaaggcacugaaaguaa

SEQ ID NO: 2155402 - RNA, 19 nt, Homo sapiens
  misc_RNA (1)...(19): siRNA sense strand
cagaaacaccucagugaug

SEQ ID NO: 2155403 - RNA, 19 nt, Homo sapiens
  misc_RNA (1)...(19): siRNA sense strand
caaagggauaucuguguuu

SEQ ID NO: 2155404 - RNA, 19 nt, Homo sapiens
  misc_RNA (1)...(19): siRNA sense strand
gauugaacauggucucagu

SEQ ID NO: 2155405 - RNA, 19 nt, Homo sapiens
  misc_RNA (1)...(19): siRNA sense strand
guacaaccucaagcuaaua

SEQ ID NO: 2155406 - RNA, 19 nt, Homo sapiens
  misc_RNA (1)...(19): siRNA sense strand
aaagggauaucuguguuug

SEQ ID NO: 2155407 - RNA, 19 nt, Homo sapiens
  misc_RNA (1)...(19): siRNA sense strand
gcaaaacuucaacucauua

SEQ ID NO: 2155408 - RNA, 19 nt, Homo sapiens
  misc_RNA (1)...(19): siRNA sense strand
ggaacccaaugauaccaau

SEQ ID NO: 2155409 - RNA, 19 nt, Homo sapiens
  misc_RNA (1)...(19): siRNA sense strand
gaagaugcugccaugaaga

SEQ ID NO: 2155410 - RNA, 19 nt, Homo sapiens
  misc_RNA (1)...(19): siRNA sense strand
ccugaagaauggaaguauu

SEQ ID NO: 2155411 - RNA, 19 nt, Homo sapiens
  misc_RNA (1)...(19): siRNA sense strand
gaaguuaagguucucacau

SEQ ID NO: 2155412 - RNA, 19 nt, Homo sapiens
  misc_RNA (1)...(19): siRNA sense strand
aaaguaaggcaagcagaua

SEQ ID NO: 2155413 - RNA, 19 nt, Homo sapiens
  misc_RNA (1)...(19): siRNA sense strand
gcuaugucuucauggcuuu

SEQ ID NO: 2155414 - RNA, 19 nt, Homo sapiens
  misc_RNA (1)...(19): siRNA sense strand
gaauagugaacguggcaaa

SEQ ID NO: 2155415 - RNA, 19 nt, Homo sapiens
  misc_RNA (1)...(19): siRNA sense strand
acacaaggucuuaauccua

SEQ ID NO: 2155416 - RNA, 19 nt, Homo sapiens
  misc_RNA (1)...(19): siRNA sense strand
gagccacaguauuugguau

SEQ ID NO: 2155417 - RNA, 19 nt, Homo sapiens
  misc_RNA (1)...(19): siRNA sense strand
ggucggauuucaccacaag

SEQ ID NO: 2155418 - RNA, 19 nt, Homo sapiens
  misc_RNA (1)...(19): siRNA sense strand
agaagaugcugccaugaag

SEQ ID NO: 2155419 - RNA, 19 nt, Homo sapiens
  misc_RNA (1)...(19): siRNA sense strand
gauggugggcuucaggaaa

SEQ ID NO: 2155420 - RNA, 19 nt, Homo sapiens
  misc_RNA (1)...(19): siRNA sense strand
gcaagcugccucuguaugg

SEQ ID NO: 2155421 - RNA, 19 nt, Homo sapiens
  misc_RNA (1)...(19): siRNA sense strand
aaaagugucuguguucuaa

SEQ ID NO: 2155422 - RNA, 19 nt, Homo sapiens
  misc_RNA (1)...(19): siRNA sense strand
cagccacacuuuaccugaa

SEQ ID NO: 2155423 - RNA, 19 nt, Homo sapiens
  misc_RNA (1)...(19): siRNA sense strand
ggaucagaccagacaaauu

SEQ ID NO: 2155424 - RNA, 19 nt, Homo sapiens
  misc_RNA (1)...(19): siRNA sense strand
gaaacgucauggucacaac

SEQ ID NO: 2155425 - RNA, 19 nt, Homo sapiens
  misc_RNA (1)...(19): siRNA sense strand
ugaggcacgugacugagaa

SEQ ID NO: 2155426 - RNA, 19 nt, Homo sapiens
  misc_RNA (1)...(19): siRNA sense strand
cacuuuaccugaagaaugg

SEQ ID NO: 2155427 - RNA, 19 nt, Homo sapiens
  misc_RNA (1)...(19): siRNA sense strand
gcacuugcagaaauaaauc

SEQ ID NO: 2155428 - RNA, 19 nt, Homo sapiens
  misc_RNA (1)...(19): siRNA sense strand
gcacugaugacuguguuau

SEQ ID NO: 2155429 - RNA, 19 nt, Homo sapiens
  misc_RNA (1)...(19): siRNA sense strand
uccagcacuugcagaaaua

SEQ ID NO: 2155430 - RNA, 19 nt, Homo sapiens
  misc_RNA (1)...(19): siRNA sense strand
ggagccacaguauuuggua

SEQ ID NO: 2155431 - RNA, 19 nt, Homo sapiens
  misc_RNA (1)...(19): siRNA sense strand
gcuguuggccagucaguug

SEQ ID NO: 2155432 - RNA, 19 nt, Homo sapiens
  misc_RNA (1)...(19): siRNA sense strand
cagcauggaagaauacuca

SEQ ID NO: 2155433 - RNA, 19 nt, Homo sapiens
  misc_RNA (1)...(19): siRNA sense strand
cugaagaauggaaguauuu

SEQ ID NO: 2155434 - RNA, 19 nt, Homo sapiens
  misc_RNA (1)...(19): siRNA sense strand
uguacaaccucaagcuaau

SEQ ID NO: 2155435 - RNA, 19 nt, Homo sapiens
  misc_RNA (1)...(19): siRNA sense strand
caaggucuuaauccuauuu

SEQ ID NO: 2155436 - RNA, 19 nt, Homo sapiens
  misc_RNA (1)...(19): siRNA sense strand
gauaucuguguuugccuua

SEQ ID NO: 2155437 - RNA, 19 nt, Homo sapiens
  misc_RNA (1)...(19): siRNA sense strand
gcaauuagacaaugaaaag

SEQ ID NO: 2155438 - RNA, 19 nt, Homo sapiens
  misc_RNA (1)...(19): siRNA sense strand
gaaaagugucuguguucua

SEQ ID NO: 2155439 - RNA, 19 nt, Homo sapiens
  misc_RNA (1)...(19): siRNA sense strand
acacugcaauuagacaaug

SEQ ID NO: 2155440 - RNA, 19 nt, Homo sapiens
  misc_RNA (1)...(19): siRNA sense strand
ccaguuugcggucuacauu

SEQ ID NO: 2155441 - RNA, 19 nt, Homo sapiens
  misc_RNA (1)...(19): siRNA sense strand
cccaaccacugcagaccua

SEQ ID NO: 2155442 - RNA, 19 nt, Homo sapiens
  misc_RNA (1)...(19): siRNA sense strand
uagaaggaucccaaguaua

SEQ ID NO: 2155443 - RNA, 19 nt, Homo sapiens
  misc_RNA (1)...(19): siRNA sense strand
uauuugguaucucuugcua

SEQ ID NO: 2155444 - RNA, 19 nt, Homo sapiens
  misc_RNA (1)...(19): siRNA sense strand
ugacugagaaucgggauga

SEQ ID NO: 2155445 - RNA, 19 nt, Homo sapiens
  misc_RNA (1)...(19): siRNA sense strand
gcucauuucggguuuggaa

SEQ ID NO: 2155446 - RNA, 19 nt, Homo sapiens
  misc_RNA (1)...(19): siRNA sense strand
cuugggaacuaucaggaaa

SEQ ID NO: 2155447 - RNA, 19 nt, Homo sapiens
  misc_RNA (1)...(19): siRNA sense strand
agacugaggagccuuuguu

SEQ ID NO: 2155448 - RNA, 19 nt, Homo sapiens
  misc_RNA (1)...(19): siRNA sense strand
gcauccagcacuugcagaa

SEQ ID NO: 2155449 - RNA, 19 nt, Homo sapiens
  misc_RNA (1)...(19): siRNA sense strand
ccucagugaugccauugug

SEQ ID NO: 2155450 - RNA, 19 nt, Homo sapiens
  misc_RNA (1)...(19): siRNA sense strand
acaccucagugaugccauu

SEQ ID NO: 2155451 - RNA, 19 nt, Homo sapiens
  misc_RNA (1)...(19): siRNA sense strand
ugaggagccuuuguuccaa

SEQ ID NO: 2155452 - RNA, 19 nt, Homo sapiens
  misc_RNA (1)...(19): siRNA sense strand
uagccggaauguuguacaa

SEQ ID NO: 2155453 - RNA, 19 nt, Homo sapiens
  misc_RNA (1)...(19): siRNA sense strand
ggaaacgucauggucacaa

SEQ ID NO: 2155454 - RNA, 19 nt, Homo sapiens
  misc_RNA (1)...(19): siRNA sense strand
gugaugccauuguggaagu

SEQ ID NO: 2155455 - RNA, 19 nt, Homo sapiens
  misc_RNA (1)...(19): siRNA sense strand
gaccccaacuugaaagaaa

SEQ ID NO: 2155456 - RNA, 19 nt, Homo sapiens
  misc_RNA (1)...(19): siRNA sense strand
ggcaggaacccaaugauac

SEQ ID NO: 2155457 - RNA, 19 nt, Homo sapiens
  misc_RNA (1)...(19): siRNA sense strand
uaaagggacuguauuauuc

SEQ ID NO: 2155458 - RNA, 19 nt, Homo sapiens
  misc_RNA (1)...(19): siRNA sense strand
gcagaugacgguuauauaa

SEQ ID NO: 2155459 - RNA, 19 nt, Homo sapiens
  misc_RNA (1)...(19): siRNA sense strand
gcaguuugcucaguuugua

SEQ ID NO: 2155460 - RNA, 19 nt, Homo sapiens
  misc_RNA (1)...(19): siRNA sense strand
gaucagacuuaauuuggaa

SEQ ID NO: 2155461 - RNA, 19 nt, Homo sapiens
  misc_RNA (1)...(19): siRNA sense strand
gaguauggaugauuaugaa

SEQ ID NO: 2155462 - RNA, 19 nt, Homo sapiens
  misc_RNA (1)...(19): siRNA sense strand
ugaaagcugugaaggauug

SEQ ID NO: 2155463 - RNA, 19 nt, Homo sapiens
  misc_RNA (1)...(19): siRNA sense strand
guaggacccugucugcuuu

SEQ ID NO: 2155464 - RNA, 19 nt, Homo sapiens
  misc_RNA (1)...(19): siRNA sense strand
gaugagugcuguuuauucu

SEQ ID NO: 2155465 - RNA, 19 nt, Homo sapiens
  misc_RNA (1)...(19): siRNA sense strand
guacuggauuuauaccaaa

SEQ ID NO: 2155466 - RNA, 19 nt, Homo sapiens
  misc_RNA (1)...(19): siRNA sense strand
ccagaugagugcuguuuau

SEQ ID NO: 2155467 - RNA, 19 nt, Homo sapiens
  misc_RNA (1)...(19): siRNA sense strand
ggacuucauugcaauucaa

SEQ ID NO: 2155468 - RNA, 19 nt, Homo sapiens
  misc_RNA (1)...(19): siRNA sense strand
gagaauguuucgcgagaau

SEQ ID NO: 2155469 - RNA, 19 nt, Homo sapiens
  misc_RNA (1)...(19): siRNA sense strand
aauggaguauggaugauua

SEQ ID NO: 2155470 - RNA, 19 nt, Homo sapiens
  misc_RNA (1)...(19): siRNA sense strand
gaaagcuucucauauccau

SEQ ID NO: 2155471 - RNA, 19 nt, Homo sapiens
  misc_RNA (1)...(19): siRNA sense strand
gaguguaccuguguaaugu

SEQ ID NO: 2155472 - RNA, 19 nt, Homo sapiens
  misc_RNA (1)...(19): siRNA sense strand
cuucagauguugcuuguga

SEQ ID NO: 2155473 - RNA, 19 nt, Homo sapiens
  misc_RNA (1)...(19): siRNA sense strand
gcaauucaaaccaagauau

SEQ ID NO: 2155474 - RNA, 19 nt, Homo sapiens
  misc_RNA (1)...(19): siRNA sense strand
ggaacugucauacuuaaau

SEQ ID NO: 2155475 - RNA, 19 nt, Homo sapiens
  misc_RNA (1)...(19): siRNA sense strand
ggaucagacuuaauuugga

SEQ ID NO: 2155476 - RNA, 19 nt, Homo sapiens
  misc_RNA (1)...(19): siRNA sense strand
ggaguauggaugauuauga

SEQ ID NO: 2155477 - RNA, 19 nt, Homo sapiens
  misc_RNA (1)...(19): siRNA sense strand
cgcgaaagcuucucauauc

SEQ ID NO: 2155478 - RNA, 19 nt, Homo sapiens
  misc_RNA (1)...(19): siRNA sense strand
gcacucugcauuuccaauu

SEQ ID NO: 2155479 - RNA, 19 nt, Homo sapiens
  misc_RNA (1)...(19): siRNA sense strand
gcgagaaucccaaggguau

SEQ ID NO: 2155480 - RNA, 19 nt, Homo sapiens
  misc_RNA (1)...(19): siRNA sense strand
gagaagggcagcacuacga

SEQ ID NO: 2155481 - RNA, 19 nt, Homo sapiens
  misc_RNA (1)...(19): siRNA sense strand
ggacuguauuauuccuauu

SEQ ID NO: 2155482 - RNA, 19 nt, Homo sapiens
  misc_RNA (1)...(19): siRNA sense strand
acucugcauuuccaauuua

SEQ ID NO: 2155483 - RNA, 19 nt, Homo sapiens
  misc_RNA (1)...(19): siRNA sense strand
ucauauccauuucuuguuc

SEQ ID NO: 2155484 - RNA, 19 nt, Homo sapiens
  misc_RNA (1)...(19): siRNA sense strand
gaucuugcuugcuucuaug

SEQ ID NO: 2155485 - RNA, 19 nt, Homo sapiens
  misc_RNA (1)...(19): siRNA sense strand
gggacuguauuauuccuau

SEQ ID NO: 2155486 - RNA, 19 nt, Homo sapiens
  misc_RNA (1)...(19): siRNA sense strand
ugggagaucuugcuugcuu

SEQ ID NO: 2155487 - RNA, 19 nt, Homo sapiens
  misc_RNA (1)...(19): siRNA sense strand
ggagaguguaccuguguaa

SEQ ID NO: 2155488 - RNA, 19 nt, Homo sapiens
  misc_RNA (1)...(19): siRNA sense strand
gaggagacgcggagaggaa

SEQ ID NO: 2155489 - RNA, 19 nt, Homo sapiens
  misc_RNA (1)...(19): siRNA sense strand
gcucaguuuguacuucuua

SEQ ID NO: 2155490 - RNA, 19 nt, Homo sapiens
  misc_RNA (1)...(19): siRNA sense strand
gauggcauuauucuucaua

SEQ ID NO: 2155491 - RNA, 19 nt, Homo sapiens
  misc_RNA (1)...(19): siRNA sense strand
gguaggacccugucugcuu

SEQ ID NO: 2155492 - RNA, 19 nt, Homo sapiens
  misc_RNA (1)...(19): siRNA sense strand
gaauggaguauggaugauu

SEQ ID NO: 2155493 - RNA, 19 nt, Homo sapiens
  misc_RNA (1)...(19): siRNA sense strand
gaucaacguugugggucuu

SEQ ID NO: 2155494 - RNA, 19 nt, Homo sapiens
  misc_RNA (1)...(19): siRNA sense strand
uuucaagacuauuguggaa

SEQ ID NO: 2155495 - RNA, 19 nt, Homo sapiens
  misc_RNA (1)...(19): siRNA sense strand
ucaagacuauuguggaaac

SEQ ID NO: 2155496 - RNA, 19 nt, Homo sapiens
  misc_RNA (1)...(19): siRNA sense strand
aagcuucucauauccauuu

SEQ ID NO: 2155497 - RNA, 19 nt, Homo sapiens
  misc_RNA (1)...(19): siRNA sense strand
ugaaugauaaacugacuga

SEQ ID NO: 2155498 - RNA, 19 nt, Homo sapiens
  misc_RNA (1)...(19): siRNA sense strand
uaggaggccugguuacagu

SEQ ID NO: 2155499 - RNA, 19 nt, Homo sapiens
  misc_RNA (1)...(19): siRNA sense strand
gacuggcggcugaagaaua

SEQ ID NO: 2155500 - RNA, 19 nt, Homo sapiens
  misc_RNA (1)...(19): siRNA sense strand
cuucuauguugcuguaauu

SEQ ID NO: 2155501 - RNA, 19 nt, Homo sapiens
  misc_RNA (1)...(19): siRNA sense strand
acuggcggcugaagaauau

SEQ ID NO: 2155502 - RNA, 19 nt, Homo sapiens
  misc_RNA (1)...(19): siRNA sense strand
gacaguacuuucuggaacu

SEQ ID NO: 2155503 - RNA, 19 nt, Homo sapiens
  misc_RNA (1)...(19): siRNA sense strand
uuggaacugucauacuuaa

SEQ ID NO: 2155504 - RNA, 19 nt, Homo sapiens
  misc_RNA (1)...(19): siRNA sense strand
uauagaggaaguuugauug

SEQ ID NO: 2155505 - RNA, 19 nt, Homo sapiens
  misc_RNA (1)...(19): siRNA sense strand
caauucaaaccaagauaug

SEQ ID NO: 2155506 - RNA, 19 nt, Homo sapiens
  misc_RNA (1)...(19): siRNA sense strand
guauugcagaugacgguua

SEQ ID NO: 2155507 - RNA, 19 nt, Homo sapiens
  misc_RNA (1)...(19): siRNA sense strand
agauguugcuugugacuca

SEQ ID NO: 2155508 - RNA, 19 nt, Homo sapiens
  misc_RNA (1)...(19): siRNA sense strand
cgauuaggaggccugguua

SEQ ID NO: 2155509 - RNA, 19 nt, Homo sapiens
  misc_RNA (1)...(19): siRNA sense strand
ucauugcaauucaaaccaa

SEQ ID NO: 2155510 - RNA, 19 nt, Homo sapiens
  misc_RNA (1)...(19): siRNA sense strand
gcgacuggcggcugaagaa

SEQ ID NO: 2155511 - RNA, 19 nt, Homo sapiens
  misc_RNA (1)...(19): siRNA sense strand
acugaaagcugugaaggau

SEQ ID NO: 2155512 - RNA, 19 nt, Homo sapiens
  misc_RNA (1)...(19): siRNA sense strand
guauggaugauuaugaaug

SEQ ID NO: 2155513 - RNA, 19 nt, Homo sapiens
  misc_RNA (1)...(19): siRNA sense strand
cagaugacgguuauauaau

SEQ ID NO: 2155514 - RNA, 19 nt, Homo sapiens
  misc_RNA (1)...(19): siRNA sense strand
cacucugcauuuccaauuu

SEQ ID NO: 2155515 - RNA, 19 nt, Homo sapiens
  misc_RNA (1)...(19): siRNA sense strand
gcgaaagcuucucauaucc

SEQ ID NO: 2155516 - RNA, 19 nt, Homo sapiens
  misc_RNA (1)...(19): siRNA sense strand
agaucuugcuugcuucuau

SEQ ID NO: 2155517 - RNA, 19 nt, Homo sapiens
  misc_RNA (1)...(19): siRNA sense strand
gggcagcacuacgagaaag

SEQ ID NO: 2155518 - RNA, 19 nt, Homo sapiens
  misc_RNA (1)...(19): siRNA sense strand
uucuggaacugcuagauuu

SEQ ID NO: 2155519 - RNA, 19 nt, Homo sapiens
  misc_RNA (1)...(19): siRNA sense strand
uguggaaacacccucauuu

SEQ ID NO: 2155520 - RNA, 19 nt, Homo sapiens
  misc_RNA (1)...(19): siRNA sense strand
uauugcagaugacgguuau

SEQ ID NO: 2155521 - RNA, 19 nt, Homo sapiens
  misc_RNA (1)...(19): siRNA sense strand
ccgcgaaagcuucucauau

SEQ ID NO: 2155522 - RNA, 19 nt, Homo sapiens
  misc_RNA (1)...(19): siRNA sense strand
uuuccuccauuaucucuuu

SEQ ID NO: 2155523 - RNA, 19 nt, Homo sapiens
  misc_RNA (1)...(19): siRNA sense strand
cgagaauguuucgcgagaa

SEQ ID NO: 2155524 - RNA, 19 nt, Homo sapiens
  misc_RNA (1)...(19): siRNA sense strand
uugcuucuauguugcugua

SEQ ID NO: 2155525 - RNA, 19 nt, Homo sapiens
  misc_RNA (1)...(19): siRNA sense strand
gcccuucacgagaauguuu

SEQ ID NO: 2155526 - RNA, 19 nt, Homo sapiens
  misc_RNA (1)...(19): siRNA sense strand
ucucauauccauuucuugu

SEQ ID NO: 2155527 - RNA, 19 nt, Homo sapiens
  misc_RNA (1)...(19): siRNA sense strand
gcuucuauguugcuguaau

SEQ ID NO: 2155528 - RNA, 19 nt, Homo sapiens
  misc_RNA (1)...(19): siRNA sense strand
acugcuagauuuccagaug

SEQ ID NO: 2155529 - RNA, 19 nt, Homo sapiens
  misc_RNA (1)...(19): siRNA sense strand
ugucugcuuuccucgguuu

SEQ ID NO: 2155530 - RNA, 19 nt, Homo sapiens
  misc_RNA (1)...(19): siRNA sense strand
cugcuagauuuccagauga

SEQ ID NO: 2155531 - RNA, 19 nt, Homo sapiens
  misc_RNA (1)...(19): siRNA sense strand
cuucucauauccauuucuu

SEQ ID NO: 2155532 - RNA, 19 nt, Homo sapiens
  misc_RNA (1)...(19): siRNA sense strand
gcuugugacucauauucuc

SEQ ID NO: 2155533 - RNA, 19 nt, Homo sapiens
  misc_RNA (1)...(19): siRNA sense strand
cuugcuugcuucuauguug

SEQ ID NO: 2155534 - RNA, 19 nt, Homo sapiens
  misc_RNA (1)...(19): siRNA sense strand
gcagcacuacgagaaagaa

SEQ ID NO: 2155535 - RNA, 19 nt, Homo sapiens
  misc_RNA (1)...(19): siRNA sense strand
caggagaagggcagcacua

SEQ ID NO: 2155536 - RNA, 19 nt, Homo sapiens
  misc_RNA (1)...(19): siRNA sense strand
guuauuuggaacugucaua

SEQ ID NO: 2155537 - RNA, 19 nt, Homo sapiens
  misc_RNA (1)...(19): siRNA sense strand
uuaaguggcagccgauuag

SEQ ID NO: 2155538 - RNA, 19 nt, Homo sapiens
  misc_RNA (1)...(19): siRNA sense strand
cagaugagugcuguuuauu

SEQ ID NO: 2155539 - RNA, 19 nt, Homo sapiens
  misc_RNA (1)...(19): siRNA sense strand
caugcuuccuuggcaguuu

SEQ ID NO: 2155540 - RNA, 19 nt, Homo sapiens
  misc_RNA (1)...(19): siRNA sense strand
uagaggaaguuugauugca

SEQ ID NO: 2155541 - RNA, 19 nt, Homo sapiens
  misc_RNA (1)...(19): siRNA sense strand
gaaggauugggagaucuug

SEQ ID NO: 2155542 - RNA, 19 nt, Homo sapiens
  misc_RNA (1)...(19): siRNA sense strand
uuaugcagaucaacguugu

SEQ ID NO: 2155543 - RNA, 19 nt, Homo sapiens
  misc_RNA (1)...(19): siRNA sense strand
auuuggaacugucauacuu

SEQ ID NO: 2155544 - RNA, 19 nt, Homo sapiens
  misc_RNA (1)...(19): siRNA sense strand
cuuuauagaggaaguuuga

SEQ ID NO: 2155545 - RNA, 19 nt, Homo sapiens
  misc_RNA (1)...(19): siRNA sense strand
uggagaguguaccugugua

SEQ ID NO: 2155546 - RNA, 19 nt, Homo sapiens
  misc_RNA (1)...(19): siRNA sense strand
cagaggagaaggacucagu

SEQ ID NO: 2155547 - RNA, 19 nt, Homo sapiens
  misc_RNA (1)...(19): siRNA sense strand
uugaauggaguauggauga

SEQ ID NO: 2155548 - RNA, 19 nt, Homo sapiens
  misc_RNA (1)...(19): siRNA sense strand
agaguguaccuguguaaug

SEQ ID NO: 2155549 - RNA, 19 nt, Homo sapiens
  misc_RNA (1)...(19): siRNA sense strand
aagauaugucggacgguua

SEQ ID NO: 2155550 - RNA, 19 nt, Homo sapiens
  misc_RNA (1)...(19): siRNA sense strand
ccuggucucacucgacuuu

SEQ ID NO: 2155551 - RNA, 19 nt, Homo sapiens
  misc_RNA (1)...(19): siRNA sense strand
gcggcugaagaauauauuu

SEQ ID NO: 2155552 - RNA, 19 nt, Homo sapiens
  misc_RNA (1)...(19): siRNA sense strand
ccgauuaggaggccugguu

SEQ ID NO: 2155553 - RNA, 19 nt, Homo sapiens
  misc_RNA (1)...(19): siRNA sense strand
caagacuauuguggaaaca

SEQ ID NO: 2155554 - RNA, 19 nt, Homo sapiens
  misc_RNA (1)...(19): siRNA sense strand
uuuaaguggcagccgauua

SEQ ID NO: 2155555 - RNA, 19 nt, Homo sapiens
  misc_RNA (1)...(19): siRNA sense strand
ugcagaugacgguuauaua

SEQ ID NO: 2155556 - RNA, 19 nt, Homo sapiens
  misc_RNA (1)...(19): siRNA sense strand
guuccuuccucucuguugu

SEQ ID NO: 2155557 - RNA, 19 nt, Homo sapiens
  misc_RNA (1)...(19): siRNA sense strand
uaaagggacuguauuauuc

SEQ ID NO: 2155558 - RNA, 19 nt, Homo sapiens
  misc_RNA (1)...(19): siRNA sense strand
gcagaugacgguuauauaa

SEQ ID NO: 2155559 - RNA, 19 nt, Homo sapiens
  misc_RNA (1)...(19): siRNA sense strand
gcaguuugcucaguuugua

SEQ ID NO: 2155560 - RNA, 19 nt, Homo sapiens
  misc_RNA (1)...(19): siRNA sense strand
gaucagacuuaauuuggaa

SEQ ID NO: 2155561 - RNA, 19 nt, Homo sapiens
  misc_RNA (1)...(19): siRNA sense strand
gaguauggaugauuaugaa

SEQ ID NO: 2155562 - RNA, 19 nt, Homo sapiens
  misc_RNA (1)...(19): siRNA sense strand
ugaaagcugugaaggauug

SEQ ID NO: 2155563 - RNA, 19 nt, Homo sapiens
  misc_RNA (1)...(19): siRNA sense strand
guaggacccugucugcuuu

SEQ ID NO: 2155564 - RNA, 19 nt, Homo sapiens
  misc_RNA (1)...(19): siRNA sense strand
gaugagugcuguuuauucu

SEQ ID NO: 2155565 - RNA, 19 nt, Homo sapiens
  misc_RNA (1)...(19): siRNA sense strand
guacuggauuuauaccaaa

SEQ ID NO: 2155566 - RNA, 19 nt, Homo sapiens
  misc_RNA (1)...(19): siRNA sense strand
ccagaugagugcuguuuau

SEQ ID NO: 2155567 - RNA, 19 nt, Homo sapiens
  misc_RNA (1)...(19): siRNA sense strand
ggacuucauugcaauucaa

SEQ ID NO: 2155568 - RNA, 19 nt, Homo sapiens
  misc_RNA (1)...(19): siRNA sense strand
gagaauguuucgcgagaau

SEQ ID NO: 2155569 - RNA, 19 nt, Homo sapiens
  misc_RNA (1)...(19): siRNA sense strand
aauggaguauggaugauua

SEQ ID NO: 2155570 - RNA, 19 nt, Homo sapiens
  misc_RNA (1)...(19): siRNA sense strand
gaaagcuucucauauccau

SEQ ID NO: 2155571 - RNA, 19 nt, Homo sapiens
  misc_RNA (1)...(19): siRNA sense strand
gaguguaccuguguaaugu

SEQ ID NO: 2155572 - RNA, 19 nt, Homo sapiens
  misc_RNA (1)...(19): siRNA sense strand
cuucagauguugcuuguga

SEQ ID NO: 2155573 - RNA, 19 nt, Homo sapiens
  misc_RNA (1)...(19): siRNA sense strand
gcaauucaaaccaagauau

SEQ ID NO: 2155574 - RNA, 19 nt, Homo sapiens
  misc_RNA (1)...(19): siRNA sense strand
ggaacugucauacuuaaau

SEQ ID NO: 2155575 - RNA, 19 nt, Homo sapiens
  misc_RNA (1)...(19): siRNA sense strand
ggaucagacuuaauuugga

SEQ ID NO: 2155576 - RNA, 19 nt, Homo sapiens
  misc_RNA (1)...(19): siRNA sense strand
ggaguauggaugauuauga

SEQ ID NO: 2155577 - RNA, 19 nt, Homo sapiens
  misc_RNA (1)...(19): siRNA sense strand
cgcgaaagcuucucauauc

SEQ ID NO: 2155578 - RNA, 19 nt, Homo sapiens
  misc_RNA (1)...(19): siRNA sense strand
gcacucugcauuuccaauu

SEQ ID NO: 2155579 - RNA, 19 nt, Homo sapiens
  misc_RNA (1)...(19): siRNA sense strand
gcgagaaucccaaggguau

SEQ ID NO: 2155580 - RNA, 19 nt, Homo sapiens
  misc_RNA (1)...(19): siRNA sense strand
gagaagggcagcacuacga

SEQ ID NO: 2155581 - RNA, 19 nt, Homo sapiens
  misc_RNA (1)...(19): siRNA sense strand
ggacuguauuauuccuauu

SEQ ID NO: 2155582 - RNA, 19 nt, Homo sapiens
  misc_RNA (1)...(19): siRNA sense strand
acucugcauuuccaauuua

SEQ ID NO: 2155583 - RNA, 19 nt, Homo sapiens
  misc_RNA (1)...(19): siRNA sense strand
ucauauccauuucuuguuc

SEQ ID NO: 2155584 - RNA, 19 nt, Homo sapiens
  misc_RNA (1)...(19): siRNA sense strand
gaucuugcuugcuucuaug

SEQ ID NO: 2155585 - RNA, 19 nt, Homo sapiens
  misc_RNA (1)...(19): siRNA sense strand
gggacuguauuauuccuau

SEQ ID NO: 2155586 - RNA, 19 nt, Homo sapiens
  misc_RNA (1)...(19): siRNA sense strand
ugggagaucuugcuugcuu

SEQ ID NO: 2155587 - RNA, 19 nt, Homo sapiens
  misc_RNA (1)...(19): siRNA sense strand
ggagaguguaccuguguaa

SEQ ID NO: 2155588 - RNA, 19 nt, Homo sapiens
  misc_RNA (1)...(19): siRNA sense strand
gaggagacgcggagaggaa

SEQ ID NO: 2155589 - RNA, 19 nt, Homo sapiens
  misc_RNA (1)...(19): siRNA sense strand
gcucaguuuguacuucuua

SEQ ID NO: 2155590 - RNA, 19 nt, Homo sapiens
  misc_RNA (1)...(19): siRNA sense strand
gauggcauuauucuucaua

SEQ ID NO: 2155591 - RNA, 19 nt, Homo sapiens
  misc_RNA (1)...(19): siRNA sense strand
gguaggacccugucugcuu

SEQ ID NO: 2155592 - RNA, 19 nt, Homo sapiens
  misc_RNA (1)...(19): siRNA sense strand
gaauggaguauggaugauu

SEQ ID NO: 2155593 - RNA, 19 nt, Homo sapiens
  misc_RNA (1)...(19): siRNA sense strand
gaucaacguugugggucuu

SEQ ID NO: 2155594 - RNA, 19 nt, Homo sapiens
  misc_RNA (1)...(19): siRNA sense strand
uuucaagacuauuguggaa

SEQ ID NO: 2155595 - RNA, 19 nt, Homo sapiens
  misc_RNA (1)...(19): siRNA sense strand
ucaagacuauuguggaaac

SEQ ID NO: 2155596 - RNA, 19 nt, Homo sapiens
  misc_RNA (1)...(19): siRNA sense strand
aagcuucucauauccauuu

SEQ ID NO: 2155597 - RNA, 19 nt, Homo sapiens
  misc_RNA (1)...(19): siRNA sense strand
ugaaugauaaacugacuga

SEQ ID NO: 2155598 - RNA, 19 nt, Homo sapiens
  misc_RNA (1)...(19): siRNA sense strand
uaggaggccugguuacagu

SEQ ID NO: 2155599 - RNA, 19 nt, Homo sapiens
  misc_RNA (1)...(19): siRNA sense strand
gacuggcggcugaagaaua

SEQ ID NO: 2155600 - RNA, 19 nt, Homo sapiens
  misc_RNA (1)...(19): siRNA sense strand
cuucuauguugcuguaauu

SEQ ID NO: 2155601 - RNA, 19 nt, Homo sapiens
  misc_RNA (1)...(19): siRNA sense strand
acuggcggcugaagaauau

SEQ ID NO: 2155602 - RNA, 19 nt, Homo sapiens
  misc_RNA (1)...(19): siRNA sense strand
gacaguacuuucuggaacu

SEQ ID NO: 2155603 - RNA, 19 nt, Homo sapiens
  misc_RNA (1)...(19): siRNA sense strand
uuggaacugucauacuuaa

SEQ ID NO: 2155604 - RNA, 19 nt, Homo sapiens
  misc_RNA (1)...(19): siRNA sense strand
uauagaggaaguuugauug

SEQ ID NO: 2155605 - RNA, 19 nt, Homo sapiens
  misc_RNA (1)...(19): siRNA sense strand
caauucaaaccaagauaug

SEQ ID NO: 2155606 - RNA, 19 nt, Homo sapiens
  misc_RNA (1)...(19): siRNA sense strand
guauugcagaugacgguua

SEQ ID NO: 2155607 - RNA, 19 nt, Homo sapiens
  misc_RNA (1)...(19): siRNA sense strand
agauguugcuugugacuca

SEQ ID NO: 2155608 - RNA, 19 nt, Homo sapiens
  misc_RNA (1)...(19): siRNA sense strand
cgauuaggaggccugguua

SEQ ID NO: 2155609 - RNA, 19 nt, Homo sapiens
  misc_RNA (1)...(19): siRNA sense strand
ucauugcaauucaaaccaa

SEQ ID NO: 2155610 - RNA, 19 nt, Homo sapiens
  misc_RNA (1)...(19): siRNA sense strand
gcgacuggcggcugaagaa

SEQ ID NO: 2155611 - RNA, 19 nt, Homo sapiens
  misc_RNA (1)...(19): siRNA sense strand
acugaaagcugugaaggau

SEQ ID NO: 2155612 - RNA, 19 nt, Homo sapiens
  misc_RNA (1)...(19): siRNA sense strand
guauggaugauuaugaaug

SEQ ID NO: 2155613 - RNA, 19 nt, Homo sapiens
  misc_RNA (1)...(19): siRNA sense strand
cagaugacgguuauauaau

SEQ ID NO: 2155614 - RNA, 19 nt, Homo sapiens
  misc_RNA (1)...(19): siRNA sense strand
cacucugcauuuccaauuu

SEQ ID NO: 2155615 - RNA, 19 nt, Homo sapiens
  misc_RNA (1)...(19): siRNA sense strand
gcgaaagcuucucauaucc

SEQ ID NO: 2155616 - RNA, 19 nt, Homo sapiens
  misc_RNA (1)...(19): siRNA sense strand
agaucuugcuugcuucuau

SEQ ID NO: 2155617 - RNA, 19 nt, Homo sapiens
  misc_RNA (1)...(19): siRNA sense strand
gggcagcacuacgagaaag

SEQ ID NO: 2155618 - RNA, 19 nt, Homo sapiens
  misc_RNA (1)...(19): siRNA sense strand
uucuggaacugcuagauuu

SEQ ID NO: 2155619 - RNA, 19 nt, Homo sapiens
  misc_RNA (1)...(19): siRNA sense strand
uguggaaacacccucauuu

SEQ ID NO: 2155620 - RNA, 19 nt, Homo sapiens
  misc_RNA (1)...(19): siRNA sense strand
uauugcagaugacgguuau

SEQ ID NO: 2155621 - RNA, 19 nt, Homo sapiens
  misc_RNA (1)...(19): siRNA sense strand
ccgcgaaagcuucucauau

SEQ ID NO: 2155622 - RNA, 19 nt, Homo sapiens
  misc_RNA (1)...(19): siRNA sense strand
uuuccuccauuaucucuuu

SEQ ID NO: 2155623 - RNA, 19 nt, Homo sapiens
  misc_RNA (1)...(19): siRNA sense strand
cgagaauguuucgcgagaa

SEQ ID NO: 2155624 - RNA, 19 nt, Homo sapiens
  misc_RNA (1)...(19): siRNA sense strand
uugcuucuauguugcugua

SEQ ID NO: 2155625 - RNA, 19 nt, Homo sapiens
  misc_RNA (1)...(19): siRNA sense strand
gcccuucacgagaauguuu

SEQ ID NO: 2155626 - RNA, 19 nt, Homo sapiens
  misc_RNA (1)...(19): siRNA sense strand
ucucauauccauuucuugu

SEQ ID NO: 2155627 - RNA, 19 nt, Homo sapiens
  misc_RNA (1)...(19): siRNA sense strand
gcuucuauguugcuguaau

SEQ ID NO: 2155628 - RNA, 19 nt, Homo sapiens
  misc_RNA (1)...(19): siRNA sense strand
acugcuagauuuccagaug

SEQ ID NO: 2155629 - RNA, 19 nt, Homo sapiens
  misc_RNA (1)...(19): siRNA sense strand
ugucugcuuuccucgguuu

SEQ ID NO: 2155630 - RNA, 19 nt, Homo sapiens
  misc_RNA (1)...(19): siRNA sense strand
cugcuagauuuccagauga

SEQ ID NO: 2155631 - RNA, 19 nt, Homo sapiens
  misc_RNA (1)...(19): siRNA sense strand
cuucucauauccauuucuu

SEQ ID NO: 2155632 - RNA, 19 nt, Homo sapiens
  misc_RNA (1)...(19): siRNA sense strand
gcuugugacucauauucuc

SEQ ID NO: 2155633 - RNA, 19 nt, Homo sapiens
  misc_RNA (1)...(19): siRNA sense strand
cuugcuugcuucuauguug

SEQ ID NO: 2155634 - RNA, 19 nt, Homo sapiens
  misc_RNA (1)...(19): siRNA sense strand
gcagcacuacgagaaagaa

SEQ ID NO: 2155635 - RNA, 19 nt, Homo sapiens
  misc_RNA (1)...(19): siRNA sense strand
caggagaagggcagcacua

SEQ ID NO: 2155636 - RNA, 19 nt, Homo sapiens
  misc_RNA (1)...(19): siRNA sense strand
guuauuuggaacugucaua

SEQ ID NO: 2155637 - RNA, 19 nt, Homo sapiens
  misc_RNA (1)...(19): siRNA sense strand
uuaaguggcagccgauuag

SEQ ID NO: 2155638 - RNA, 19 nt, Homo sapiens
  misc_RNA (1)...(19): siRNA sense strand
cagaugagugcuguuuauu

SEQ ID NO: 2155639 - RNA, 19 nt, Homo sapiens
  misc_RNA (1)...(19): siRNA sense strand
caugcuuccuuggcaguuu

SEQ ID NO: 2155640 - RNA, 19 nt, Homo sapiens
  misc_RNA (1)...(19): siRNA sense strand
uagaggaaguuugauugca

SEQ ID NO: 2155641 - RNA, 19 nt, Homo sapiens
  misc_RNA (1)...(19): siRNA sense strand
gaaggauugggagaucuug

SEQ ID NO: 2155642 - RNA, 19 nt, Homo sapiens
  misc_RNA (1)...(19): siRNA sense strand
uuaugcagaucaacguugu

SEQ ID NO: 2155643 - RNA, 19 nt, Homo sapiens
  misc_RNA (1)...(19): siRNA sense strand
auuuggaacugucauacuu

SEQ ID NO: 2155644 - RNA, 19 nt, Homo sapiens
  misc_RNA (1)...(19): siRNA sense strand
cuuuauagaggaaguuuga

SEQ ID NO: 2155645 - RNA, 19 nt, Homo sapiens
  misc_RNA (1)...(19): siRNA sense strand
uggagaguguaccugugua

SEQ ID NO: 2155646 - RNA, 19 nt, Homo sapiens
  misc_RNA (1)...(19): siRNA sense strand
cagaggagaaggacucagu

SEQ ID NO: 2155647 - RNA, 19 nt, Homo sapiens
  misc_RNA (1)...(19): siRNA sense strand
uugaauggaguauggauga

SEQ ID NO: 2155648 - RNA, 19 nt, Homo sapiens
  misc_RNA (1)...(19): siRNA sense strand
agaguguaccuguguaaug

SEQ ID NO: 2155649 - RNA, 19 nt, Homo sapiens
  misc_RNA (1)...(19): siRNA sense strand
aagauaugucggacgguua

SEQ ID NO: 2155650 - RNA, 19 nt, Homo sapiens
  misc_RNA (1)...(19): siRNA sense strand
ccuggucucacucgacuuu

SEQ ID NO: 2155651 - RNA, 19 nt, Homo sapiens
  misc_RNA (1)...(19): siRNA sense strand
gcggcugaagaauauauuu

SEQ ID NO: 2155652 - RNA, 19 nt, Homo sapiens
  misc_RNA (1)...(19): siRNA sense strand
ccgauuaggaggccugguu

SEQ ID NO: 2155653 - RNA, 19 nt, Homo sapiens
  misc_RNA (1)...(19): siRNA sense strand
caagacuauuguggaaaca

SEQ ID NO: 2155654 - RNA, 19 nt, Homo sapiens
  misc_RNA (1)...(19): siRNA sense strand
uuuaaguggcagccgauua

SEQ ID NO: 2155655 - RNA, 19 nt, Homo sapiens
  misc_RNA (1)...(19): siRNA sense strand
ugcagaugacgguuauaua

SEQ ID NO: 2155656 - RNA, 19 nt, Homo sapiens
  misc_RNA (1)...(19): siRNA sense strand
guuccuuccucucuguugu

SEQ ID NO: 2155657 - RNA, 19 nt, Homo sapiens
  misc_RNA (1)...(19): siRNA sense strand
gcauauaucugaacgugua

SEQ ID NO: 2155658 - RNA, 19 nt, Homo sapiens
  misc_RNA (1)...(19): siRNA sense strand
guagaugggucuucaguaa

SEQ ID NO: 2155659 - RNA, 19 nt, Homo sapiens
  misc_RNA (1)...(19): siRNA sense strand
gaagauguguuacaacguu

SEQ ID NO: 2155660 - RNA, 19 nt, Homo sapiens
  misc_RNA (1)...(19): siRNA sense strand
ugaaacagcuugcuuccua

SEQ ID NO: 2155661 - RNA, 19 nt, Homo sapiens
  misc_RNA (1)...(19): siRNA sense strand
uaaaugagcgagcuaaaua

SEQ ID NO: 2155662 - RNA, 19 nt, Homo sapiens
  misc_RNA (1)...(19): siRNA sense strand
gcagaucaauacugaauau

SEQ ID NO: 2155663 - RNA, 19 nt, Homo sapiens
  misc_RNA (1)...(19): siRNA sense strand
ggaagaaaccguucgagaa

SEQ ID NO: 2155664 - RNA, 19 nt, Homo sapiens
  misc_RNA (1)...(19): siRNA sense strand
caacauguagcucuuauuu

SEQ ID NO: 2155665 - RNA, 19 nt, Homo sapiens
  misc_RNA (1)...(19): siRNA sense strand
gaucucaaauucucuaugu

SEQ ID NO: 2155666 - RNA, 19 nt, Homo sapiens
  misc_RNA (1)...(19): siRNA sense strand
caaguucacugcuguguau

SEQ ID NO: 2155667 - RNA, 19 nt, Homo sapiens
  misc_RNA (1)...(19): siRNA sense strand
gagaaacccacuuaaauga

SEQ ID NO: 2155668 - RNA, 19 nt, Homo sapiens
  misc_RNA (1)...(19): siRNA sense strand
gcacugaauucccuuguca

SEQ ID NO: 2155669 - RNA, 19 nt, Homo sapiens
  misc_RNA (1)...(19): siRNA sense strand
gaaaauccuuguagucuuu

SEQ ID NO: 2155670 - RNA, 19 nt, Homo sapiens
  misc_RNA (1)...(19): siRNA sense strand
ggaggaccguagaaagaua

SEQ ID NO: 2155671 - RNA, 19 nt, Homo sapiens
  misc_RNA (1)...(19): siRNA sense strand
gcaauggagugcagcaguu

SEQ ID NO: 2155672 - RNA, 19 nt, Homo sapiens
  misc_RNA (1)...(19): siRNA sense strand
gacauaguguuaauuguug

SEQ ID NO: 2155673 - RNA, 19 nt, Homo sapiens
  misc_RNA (1)...(19): siRNA sense strand
guucaugacugcauuuaug

SEQ ID NO: 2155674 - RNA, 19 nt, Homo sapiens
  misc_RNA (1)...(19): siRNA sense strand
gguagaagauguguuacaa

SEQ ID NO: 2155675 - RNA, 19 nt, Homo sapiens
  misc_RNA (1)...(19): siRNA sense strand
ugaagagucuccauggaaa

SEQ ID NO: 2155676 - RNA, 19 nt, Homo sapiens
  misc_RNA (1)...(19): siRNA sense strand
gaagaaaccguucgagaag

SEQ ID NO: 2155677 - RNA, 19 nt, Homo sapiens
  misc_RNA (1)...(19): siRNA sense strand
gaaauggccaugagacaga

SEQ ID NO: 2155678 - RNA, 19 nt, Homo sapiens
  misc_RNA (1)...(19): siRNA sense strand
caaaauaccugguuuccaa

SEQ ID NO: 2155679 - RNA, 19 nt, Homo sapiens
  misc_RNA (1)...(19): siRNA sense strand
acauguagcucuuauuuca

SEQ ID NO: 2155680 - RNA, 19 nt, Homo sapiens
  misc_RNA (1)...(19): siRNA sense strand
gaaucacgaucccaguauu

SEQ ID NO: 2155681 - RNA, 19 nt, Homo sapiens
  misc_RNA (1)...(19): siRNA sense strand
aauaugaccuggaacuuga

SEQ ID NO: 2155682 - RNA, 19 nt, Homo sapiens
  misc_RNA (1)...(19): siRNA sense strand
gcugccaccuuacagauaa

SEQ ID NO: 2155683 - RNA, 19 nt, Homo sapiens
  misc_RNA (1)...(19): siRNA sense strand
gcgagaaacccacuuaaau

SEQ ID NO: 2155684 - RNA, 19 nt, Homo sapiens
  misc_RNA (1)...(19): siRNA sense strand
uagaacagcuuuaugaaac

SEQ ID NO: 2155685 - RNA, 19 nt, Homo sapiens
  misc_RNA (1)...(19): siRNA sense strand
gagcuguugugaucucaaa

SEQ ID NO: 2155686 - RNA, 19 nt, Homo sapiens
  misc_RNA (1)...(19): siRNA sense strand
ucucaguagugacaauuua

SEQ ID NO: 2155687 - RNA, 19 nt, Homo sapiens
  misc_RNA (1)...(19): siRNA sense strand
gacgagaggcagaucaaua

SEQ ID NO: 2155688 - RNA, 19 nt, Homo sapiens
  misc_RNA (1)...(19): siRNA sense strand
guagaacagcuuuaugaaa

SEQ ID NO: 2155689 - RNA, 19 nt, Homo sapiens
  misc_RNA (1)...(19): siRNA sense strand
ugaacuggauggagaaaug

SEQ ID NO: 2155690 - RNA, 19 nt, Homo sapiens
  misc_RNA (1)...(19): siRNA sense strand
cauggaaaccaccaacuua

SEQ ID NO: 2155691 - RNA, 19 nt, Homo sapiens
  misc_RNA (1)...(19): siRNA sense strand
cgagaaacccacuuaaaug

SEQ ID NO: 2155692 - RNA, 19 nt, Homo sapiens
  misc_RNA (1)...(19): siRNA sense strand
uagcguagguggagaacuu

SEQ ID NO: 2155693 - RNA, 19 nt, Homo sapiens
  misc_RNA (1)...(19): siRNA sense strand
acagguagaagauguguua

SEQ ID NO: 2155694 - RNA, 19 nt, Homo sapiens
  misc_RNA (1)...(19): siRNA sense strand
ugaauaugcugugucauug

SEQ ID NO: 2155695 - RNA, 19 nt, Homo sapiens
  misc_RNA (1)...(19): siRNA sense strand
ugaauucccuugucauaag

SEQ ID NO: 2155696 - RNA, 19 nt, Homo sapiens
  misc_RNA (1)...(19): siRNA sense strand
acagagagcuugguuucaa

SEQ ID NO: 2155697 - RNA, 19 nt, Homo sapiens
  misc_RNA (1)...(19): siRNA sense strand
cagaauugaugcacuuuca

SEQ ID NO: 2155698 - RNA, 19 nt, Homo sapiens
  misc_RNA (1)...(19): siRNA sense strand
ugauagauauucucaguag

SEQ ID NO: 2155699 - RNA, 19 nt, Homo sapiens
  misc_RNA (1)...(19): siRNA sense strand
agaggcagaucaauacuga

SEQ ID NO: 2155700 - RNA, 19 nt, Homo sapiens
  misc_RNA (1)...(19): siRNA sense strand
gaauucccuugucauaaga

SEQ ID NO: 2155701 - RNA, 19 nt, Homo sapiens
  misc_RNA (1)...(19): siRNA sense strand
ugucgaugcugccaccuua

SEQ ID NO: 2155702 - RNA, 19 nt, Homo sapiens
  misc_RNA (1)...(19): siRNA sense strand
guauuugucuucuguucuu

SEQ ID NO: 2155703 - RNA, 19 nt, Homo sapiens
  misc_RNA (1)...(19): siRNA sense strand
caaauucucuauguguguu

SEQ ID NO: 2155704 - RNA, 19 nt, Homo sapiens
  misc_RNA (1)...(19): siRNA sense strand
gacuugggaugacuaaaga

SEQ ID NO: 2155705 - RNA, 19 nt, Homo sapiens
  misc_RNA (1)...(19): siRNA sense strand
gauacgacacugagaaaga

SEQ ID NO: 2155706 - RNA, 19 nt, Homo sapiens
  misc_RNA (1)...(19): siRNA sense strand
gcagagaauuguguacgau

SEQ ID NO: 2155707 - RNA, 19 nt, Homo sapiens
  misc_RNA (1)...(19): siRNA sense strand
cagccaacaucccugcuaa

SEQ ID NO: 2155708 - RNA, 19 nt, Homo sapiens
  misc_RNA (1)...(19): siRNA sense strand
gaucaauacugaauaugcu

SEQ ID NO: 2155709 - RNA, 19 nt, Homo sapiens
  misc_RNA (1)...(19): siRNA sense strand
ucacugcuguguaucauca

SEQ ID NO: 2155710 - RNA, 19 nt, Homo sapiens
  misc_RNA (1)...(19): siRNA sense strand
cacaugaccuacugauaga

SEQ ID NO: 2155711 - RNA, 19 nt, Homo sapiens
  misc_RNA (1)...(19): siRNA sense strand
gccaugagacagacuagua

SEQ ID NO: 2155712 - RNA, 19 nt, Homo sapiens
  misc_RNA (1)...(19): siRNA sense strand
gcauuuaugugaugacacu

SEQ ID NO: 2155713 - RNA, 19 nt, Homo sapiens
  misc_RNA (1)...(19): siRNA sense strand
cagcaguugugguucauga

SEQ ID NO: 2155714 - RNA, 19 nt, Homo sapiens
  misc_RNA (1)...(19): siRNA sense strand
gcuagaguauaacacagaa

SEQ ID NO: 2155715 - RNA, 19 nt, Homo sapiens
  misc_RNA (1)...(19): siRNA sense strand
ucacaugaccuacugauag

SEQ ID NO: 2155716 - RNA, 19 nt, Homo sapiens
  misc_RNA (1)...(19): siRNA sense strand
ggaugggacagaagaguuu

SEQ ID NO: 2155717 - RNA, 19 nt, Homo sapiens
  misc_RNA (1)...(19): siRNA sense strand
cuaccaauaugaccuggaa

SEQ ID NO: 2155718 - RNA, 19 nt, Homo sapiens
  misc_RNA (1)...(19): siRNA sense strand
ggcuauaucuaugcaauug

SEQ ID NO: 2155719 - RNA, 19 nt, Homo sapiens
  misc_RNA (1)...(19): siRNA sense strand
gaauugaugcacuuucaga

SEQ ID NO: 2155720 - RNA, 19 nt, Homo sapiens
  misc_RNA (1)...(19): siRNA sense strand
gcaaacaaacccauguaca

SEQ ID NO: 2155721 - RNA, 19 nt, Homo sapiens
  misc_RNA (1)...(19): siRNA sense strand
ggaaaccaccaacuuaucu

SEQ ID NO: 2155722 - RNA, 19 nt, Homo sapiens
  misc_RNA (1)...(19): siRNA sense strand
ggacgaugguaagcccuuu

SEQ ID NO: 2155723 - RNA, 19 nt, Homo sapiens
  misc_RNA (1)...(19): siRNA sense strand
ucagaacugugaauugcuu

SEQ ID NO: 2155724 - RNA, 19 nt, Homo sapiens
  misc_RNA (1)...(19): siRNA sense strand
ggucugccacccaaugaua

SEQ ID NO: 2155725 - RNA, 19 nt, Homo sapiens
  misc_RNA (1)...(19): siRNA sense strand
gaaguaacacagagagcuu

SEQ ID NO: 2155726 - RNA, 19 nt, Homo sapiens
  misc_RNA (1)...(19): siRNA sense strand
ugaaccucauguacuguua

SEQ ID NO: 2155727 - RNA, 19 nt, Homo sapiens
  misc_RNA (1)...(19): siRNA sense strand
uguuagagcuguugugauc

SEQ ID NO: 2155728 - RNA, 19 nt, Homo sapiens
  misc_RNA (1)...(19): siRNA sense strand
ugacugcauuuaugugaug

SEQ ID NO: 2155729 - RNA, 19 nt, Homo sapiens
  misc_RNA (1)...(19): siRNA sense strand
cuucaguugugaggaauua

SEQ ID NO: 2155730 - RNA, 19 nt, Homo sapiens
  misc_RNA (1)...(19): siRNA sense strand
caacggaugggacagaaga

SEQ ID NO: 2155731 - RNA, 19 nt, Homo sapiens
  misc_RNA (1)...(19): siRNA sense strand
gaaagauacgacacugaga

SEQ ID NO: 2155732 - RNA, 19 nt, Homo sapiens
  misc_RNA (1)...(19): siRNA sense strand
aaagaaugguggagcacaa

SEQ ID NO: 2155733 - RNA, 19 nt, Homo sapiens
  misc_RNA (1)...(19): siRNA sense strand
agagaauuguguacgauug

SEQ ID NO: 2155734 - RNA, 19 nt, Homo sapiens
  misc_RNA (1)...(19): siRNA sense strand
gaacagcuuuaugaaacag

SEQ ID NO: 2155735 - RNA, 19 nt, Homo sapiens
  misc_RNA (1)...(19): siRNA sense strand
gauauucucaguagugaca

SEQ ID NO: 2155736 - RNA, 19 nt, Homo sapiens
  misc_RNA (1)...(19): siRNA sense strand
caauaugaccuggaacuug

SEQ ID NO: 2155737 - RNA, 19 nt, Homo sapiens
  misc_RNA (1)...(19): siRNA sense strand
gggucaaguuccucugaaa

SEQ ID NO: 2155738 - RNA, 19 nt, Homo sapiens
  misc_RNA (1)...(19): siRNA sense strand
cguuguaacuccugauaau

SEQ ID NO: 2155739 - RNA, 19 nt, Homo sapiens
  misc_RNA (1)...(19): siRNA sense strand
aauaugcugugucauuguu

SEQ ID NO: 2155740 - RNA, 19 nt, Homo sapiens
  misc_RNA (1)...(19): siRNA sense strand
auaaguccaugcccaaguu

SEQ ID NO: 2155741 - RNA, 19 nt, Homo sapiens
  misc_RNA (1)...(19): siRNA sense strand
uagauauucucaguaguga

SEQ ID NO: 2155742 - RNA, 19 nt, Homo sapiens
  misc_RNA (1)...(19): siRNA sense strand
caugaccuacugauagaua

SEQ ID NO: 2155743 - RNA, 19 nt, Homo sapiens
  misc_RNA (1)...(19): siRNA sense strand
gaaaccaccaacuuaucuu

SEQ ID NO: 2155744 - RNA, 19 nt, Homo sapiens
  misc_RNA (1)...(19): siRNA sense strand
guugugaucucaaauucuc

SEQ ID NO: 2155745 - RNA, 19 nt, Homo sapiens
  misc_RNA (1)...(19): siRNA sense strand
acuaguagguccuuugcuu

SEQ ID NO: 2155746 - RNA, 19 nt, Homo sapiens
  misc_RNA (1)...(19): siRNA sense strand
aaagauacgacacugagaa

SEQ ID NO: 2155747 - RNA, 19 nt, Homo sapiens
  misc_RNA (1)...(19): siRNA sense strand
ugugaaggcuauaucuaug

SEQ ID NO: 2155748 - RNA, 19 nt, Homo sapiens
  misc_RNA (1)...(19): siRNA sense strand
caucuuugguuugcuguga

SEQ ID NO: 2155749 - RNA, 19 nt, Homo sapiens
  misc_RNA (1)...(19): siRNA sense strand
cagcugauuugcauaaggu

SEQ ID NO: 2155750 - RNA, 19 nt, Homo sapiens
  misc_RNA (1)...(19): siRNA sense strand
uaacacagagagcuugguu

SEQ ID NO: 2155751 - RNA, 19 nt, Homo sapiens
  misc_RNA (1)...(19): siRNA sense strand
gcuaugcuguggcuagagu

SEQ ID NO: 2155752 - RNA, 19 nt, Homo sapiens
  misc_RNA (1)...(19): siRNA sense strand
cagaaucacgaucccagua

SEQ ID NO: 2155753 - RNA, 19 nt, Homo sapiens
  misc_RNA (1)...(19): siRNA sense strand
gugcagcaguugugguuca

SEQ ID NO: 2155754 - RNA, 19 nt, Homo sapiens
  misc_RNA (1)...(19): siRNA sense strand
guuguuuacugacauagug

SEQ ID NO: 2155755 - RNA, 19 nt, Homo sapiens
  misc_RNA (1)...(19): siRNA sense strand
gacuaaagaggaaaugaug

SEQ ID NO: 2155756 - RNA, 19 nt, Homo sapiens
  misc_RNA (1)...(19): siRNA sense strand
uauauuggaggguugcaua

SEQ ID NO: 2155757 - RNA, 19 nt, Homo sapiens
  misc_RNA (1)...(19): siRNA sense strand
gcauauaucugaacgugua

SEQ ID NO: 2155758 - RNA, 19 nt, Homo sapiens
  misc_RNA (1)...(19): siRNA sense strand
guagaugggucuucaguaa

SEQ ID NO: 2155759 - RNA, 19 nt, Homo sapiens
  misc_RNA (1)...(19): siRNA sense strand
gaagauguguuacaacguu

SEQ ID NO: 2155760 - RNA, 19 nt, Homo sapiens
  misc_RNA (1)...(19): siRNA sense strand
ugaaacagcuugcuuccua

SEQ ID NO: 2155761 - RNA, 19 nt, Homo sapiens
  misc_RNA (1)...(19): siRNA sense strand
uaaaugagcgagcuaaaua

SEQ ID NO: 2155762 - RNA, 19 nt, Homo sapiens
  misc_RNA (1)...(19): siRNA sense strand
gcagaucaauacugaauau

SEQ ID NO: 2155763 - RNA, 19 nt, Homo sapiens
  misc_RNA (1)...(19): siRNA sense strand
ggaagaaaccguucgagaa

SEQ ID NO: 2155764 - RNA, 19 nt, Homo sapiens
  misc_RNA (1)...(19): siRNA sense strand
caacauguagcucuuauuu

SEQ ID NO: 2155765 - RNA, 19 nt, Homo sapiens
  misc_RNA (1)...(19): siRNA sense strand
gaucucaaauucucuaugu

SEQ ID NO: 2155766 - RNA, 19 nt, Homo sapiens
  misc_RNA (1)...(19): siRNA sense strand
caaguucacugcuguguau

SEQ ID NO: 2155767 - RNA, 19 nt, Homo sapiens
  misc_RNA (1)...(19): siRNA sense strand
gagaaacccacuuaaauga

SEQ ID NO: 2155768 - RNA, 19 nt, Homo sapiens
  misc_RNA (1)...(19): siRNA sense strand
gcacugaauucccuuguca

SEQ ID NO: 2155769 - RNA, 19 nt, Homo sapiens
  misc_RNA (1)...(19): siRNA sense strand
gaaaauccuuguagucuuu

SEQ ID NO: 2155770 - RNA, 19 nt, Homo sapiens
  misc_RNA (1)...(19): siRNA sense strand
ggaggaccguagaaagaua

SEQ ID NO: 2155771 - RNA, 19 nt, Homo sapiens
  misc_RNA (1)...(19): siRNA sense strand
gcaauggagugcagcaguu

SEQ ID NO: 2155772 - RNA, 19 nt, Homo sapiens
  misc_RNA (1)...(19): siRNA sense strand
gacauaguguuaauuguug

SEQ ID NO: 2155773 - RNA, 19 nt, Homo sapiens
  misc_RNA (1)...(19): siRNA sense strand
guucaugacugcauuuaug

SEQ ID NO: 2155774 - RNA, 19 nt, Homo sapiens
  misc_RNA (1)...(19): siRNA sense strand
gguagaagauguguuacaa

SEQ ID NO: 2155775 - RNA, 19 nt, Homo sapiens
  misc_RNA (1)...(19): siRNA sense strand
ugaagagucuccauggaaa

SEQ ID NO: 2155776 - RNA, 19 nt, Homo sapiens
  misc_RNA (1)...(19): siRNA sense strand
gaagaaaccguucgagaag

SEQ ID NO: 2155777 - RNA, 19 nt, Homo sapiens
  misc_RNA (1)...(19): siRNA sense strand
gaaauggccaugagacaga

SEQ ID NO: 2155778 - RNA, 19 nt, Homo sapiens
  misc_RNA (1)...(19): siRNA sense strand
caaaauaccugguuuccaa

SEQ ID NO: 2155779 - RNA, 19 nt, Homo sapiens
  misc_RNA (1)...(19): siRNA sense strand
acauguagcucuuauuuca

SEQ ID NO: 2155780 - RNA, 19 nt, Homo sapiens
  misc_RNA (1)...(19): siRNA sense strand
gaaucacgaucccaguauu

SEQ ID NO: 2155781 - RNA, 19 nt, Homo sapiens
  misc_RNA (1)...(19): siRNA sense strand
aauaugaccuggaacuuga

SEQ ID NO: 2155782 - RNA, 19 nt, Homo sapiens
  misc_RNA (1)...(19): siRNA sense strand
gcugccaccuuacagauaa

SEQ ID NO: 2155783 - RNA, 19 nt, Homo sapiens
  misc_RNA (1)...(19): siRNA sense strand
gcgagaaacccacuuaaau

SEQ ID NO: 2155784 - RNA, 19 nt, Homo sapiens
  misc_RNA (1)...(19): siRNA sense strand
uagaacagcuuuaugaaac

SEQ ID NO: 2155785 - RNA, 19 nt, Homo sapiens
  misc_RNA (1)...(19): siRNA sense strand
gagcuguugugaucucaaa

SEQ ID NO: 2155786 - RNA, 19 nt, Homo sapiens
  misc_RNA (1)...(19): siRNA sense strand
ucucaguagugacaauuua

SEQ ID NO: 2155787 - RNA, 19 nt, Homo sapiens
  misc_RNA (1)...(19): siRNA sense strand
gacgagaggcagaucaaua

SEQ ID NO: 2155788 - RNA, 19 nt, Homo sapiens
  misc_RNA (1)...(19): siRNA sense strand
guagaacagcuuuaugaaa

SEQ ID NO: 2155789 - RNA, 19 nt, Homo sapiens
  misc_RNA (1)...(19): siRNA sense strand
ugaacuggauggagaaaug

SEQ ID NO: 2155790 - RNA, 19 nt, Homo sapiens
  misc_RNA (1)...(19): siRNA sense strand
cauggaaaccaccaacuua

SEQ ID NO: 2155791 - RNA, 19 nt, Homo sapiens
  misc_RNA (1)...(19): siRNA sense strand
cgagaaacccacuuaaaug

SEQ ID NO: 2155792 - RNA, 19 nt, Homo sapiens
  misc_RNA (1)...(19): siRNA sense strand
uagcguagguggagaacuu

SEQ ID NO: 2155793 - RNA, 19 nt, Homo sapiens
  misc_RNA (1)...(19): siRNA sense strand
acagguagaagauguguua

SEQ ID NO: 2155794 - RNA, 19 nt, Homo sapiens
  misc_RNA (1)...(19): siRNA sense strand
ugaauaugcugugucauug

SEQ ID NO: 2155795 - RNA, 19 nt, Homo sapiens
  misc_RNA (1)...(19): siRNA sense strand
ugaauucccuugucauaag

SEQ ID NO: 2155796 - RNA, 19 nt, Homo sapiens
  misc_RNA (1)...(19): siRNA sense strand
acagagagcuugguuucaa

SEQ ID NO: 2155797 - RNA, 19 nt, Homo sapiens
  misc_RNA (1)...(19): siRNA sense strand
cagaauugaugcacuuuca

SEQ ID NO: 2155798 - RNA, 19 nt, Homo sapiens
  misc_RNA (1)...(19): siRNA sense strand
ugauagauauucucaguag

SEQ ID NO: 2155799 - RNA, 19 nt, Homo sapiens
  misc_RNA (1)...(19): siRNA sense strand
agaggcagaucaauacuga

SEQ ID NO: 2155800 - RNA, 19 nt, Homo sapiens
  misc_RNA (1)...(19): siRNA sense strand
gaauucccuugucauaaga

SEQ ID NO: 2155801 - RNA, 19 nt, Homo sapiens
  misc_RNA (1)...(19): siRNA sense strand
ugucgaugcugccaccuua

SEQ ID NO: 2155802 - RNA, 19 nt, Homo sapiens
  misc_RNA (1)...(19): siRNA sense strand
guauuugucuucuguucuu

SEQ ID NO: 2155803 - RNA, 19 nt, Homo sapiens
  misc_RNA (1)...(19): siRNA sense strand
caaauucucuauguguguu

SEQ ID NO: 2155804 - RNA, 19 nt, Homo sapiens
  misc_RNA (1)...(19): siRNA sense strand
gacuugggaugacuaaaga

SEQ ID NO: 2155805 - RNA, 19 nt, Homo sapiens
  misc_RNA (1)...(19): siRNA sense strand
gauacgacacugagaaaga

SEQ ID NO: 2155806 - RNA, 19 nt, Homo sapiens
  misc_RNA (1)...(19): siRNA sense strand
gcagagaauuguguacgau

SEQ ID NO: 2155807 - RNA, 19 nt, Homo sapiens
  misc_RNA (1)...(19): siRNA sense strand
cagccaacaucccugcuaa

SEQ ID NO: 2155808 - RNA, 19 nt, Homo sapiens
  misc_RNA (1)...(19): siRNA sense strand
gaucaauacugaauaugcu

SEQ ID NO: 2155809 - RNA, 19 nt, Homo sapiens
  misc_RNA (1)...(19): siRNA sense strand
ucacugcuguguaucauca

SEQ ID NO: 2155810 - RNA, 19 nt, Homo sapiens
  misc_RNA (1)...(19): siRNA sense strand
cacaugaccuacugauaga

SEQ ID NO: 2155811 - RNA, 19 nt, Homo sapiens
  misc_RNA (1)...(19): siRNA sense strand
gccaugagacagacuagua

SEQ ID NO: 2155812 - RNA, 19 nt, Homo sapiens
  misc_RNA (1)...(19): siRNA sense strand
gcauuuaugugaugacacu

SEQ ID NO: 2155813 - RNA, 19 nt, Homo sapiens
  misc_RNA (1)...(19): siRNA sense strand
cagcaguugugguucauga

SEQ ID NO: 2155814 - RNA, 19 nt, Homo sapiens
  misc_RNA (1)...(19): siRNA sense strand
gcuagaguauaacacagaa

SEQ ID NO: 2155815 - RNA, 19 nt, Homo sapiens
  misc_RNA (1)...(19): siRNA sense strand
ucacaugaccuacugauag

SEQ ID NO: 2155816 - RNA, 19 nt, Homo sapiens
  misc_RNA (1)...(19): siRNA sense strand
ggaugggacagaagaguuu

SEQ ID NO: 2155817 - RNA, 19 nt, Homo sapiens
  misc_RNA (1)...(19): siRNA sense strand
cuaccaauaugaccuggaa

SEQ ID NO: 2155818 - RNA, 19 nt, Homo sapiens
  misc_RNA (1)...(19): siRNA sense strand
ggcuauaucuaugcaauug

SEQ ID NO: 2155819 - RNA, 19 nt, Homo sapiens
  misc_RNA (1)...(19): siRNA sense strand
gaauugaugcacuuucaga

SEQ ID NO: 2155820 - RNA, 19 nt, Homo sapiens
  misc_RNA (1)...(19): siRNA sense strand
gcaaacaaacccauguaca

SEQ ID NO: 2155821 - RNA, 19 nt, Homo sapiens
  misc_RNA (1)...(19): siRNA sense strand
ggaaaccaccaacuuaucu

SEQ ID NO: 2155822 - RNA, 19 nt, Homo sapiens
  misc_RNA (1)...(19): siRNA sense strand
ggacgaugguaagcccuuu

SEQ ID NO: 2155823 - RNA, 19 nt, Homo sapiens
  misc_RNA (1)...(19): siRNA sense strand
ucagaacugugaauugcuu

SEQ ID NO: 2155824 - RNA, 19 nt, Homo sapiens
  misc_RNA (1)...(19): siRNA sense strand
ggucugccacccaaugaua

SEQ ID NO: 2155825 - RNA, 19 nt, Homo sapiens
  misc_RNA (1)...(19): siRNA sense strand
gaaguaacacagagagcuu

SEQ ID NO: 2155826 - RNA, 19 nt, Homo sapiens
  misc_RNA (1)...(19): siRNA sense strand
ugaaccucauguacuguua

SEQ ID NO: 2155827 - RNA, 19 nt, Homo sapiens
  misc_RNA (1)...(19): siRNA sense strand
uguuagagcuguugugauc

SEQ ID NO: 2155828 - RNA, 19 nt, Homo sapiens
  misc_RNA (1)...(19): siRNA sense strand
ugacugcauuuaugugaug

SEQ ID NO: 2155829 - RNA, 19 nt, Homo sapiens
  misc_RNA (1)...(19): siRNA sense strand
cuucaguugugaggaauua

SEQ ID NO: 2155830 - RNA, 19 nt, Homo sapiens
  misc_RNA (1)...(19): siRNA sense strand
caacggaugggacagaaga

SEQ ID NO: 2155831 - RNA, 19 nt, Homo sapiens
  misc_RNA (1)...(19): siRNA sense strand
gaaagauacgacacugaga

SEQ ID NO: 2155832 - RNA, 19 nt, Homo sapiens
  misc_RNA (1)...(19): siRNA sense strand
aaagaaugguggagcacaa

SEQ ID NO: 2155833 - RNA, 19 nt, Homo sapiens
  misc_RNA (1)...(19): siRNA sense strand
agagaauuguguacgauug

SEQ ID NO: 2155834 - RNA, 19 nt, Homo sapiens
  misc_RNA (1)...(19): siRNA sense strand
gaacagcuuuaugaaacag

SEQ ID NO: 2155835 - RNA, 19 nt, Homo sapiens
  misc_RNA (1)...(19): siRNA sense strand
gauauucucaguagugaca

SEQ ID NO: 2155836 - RNA, 19 nt, Homo sapiens
  misc_RNA (1)...(19): siRNA sense strand
caauaugaccuggaacuug

SEQ ID NO: 2155837 - RNA, 19 nt, Homo sapiens
  misc_RNA (1)...(19): siRNA sense strand
gggucaaguuccucugaaa

SEQ ID NO: 2155838 - RNA, 19 nt, Homo sapiens
  misc_RNA (1)...(19): siRNA sense strand
cguuguaacuccugauaau

SEQ ID NO: 2155839 - RNA, 19 nt, Homo sapiens
  misc_RNA (1)...(19): siRNA sense strand
aauaugcugugucauuguu

SEQ ID NO: 2155840 - RNA, 19 nt, Homo sapiens
  misc_RNA (1)...(19): siRNA sense strand
auaaguccaugcccaaguu

SEQ ID NO: 2155841 - RNA, 19 nt, Homo sapiens
  misc_RNA (1)...(19): siRNA sense strand
uagauauucucaguaguga

SEQ ID NO: 2155842 - RNA, 19 nt, Homo sapiens
  misc_RNA (1)...(19): siRNA sense strand
caugaccuacugauagaua

SEQ ID NO: 2155843 - RNA, 19 nt, Homo sapiens
  misc_RNA (1)...(19): siRNA sense strand
gaaaccaccaacuuaucuu

SEQ ID NO: 2155844 - RNA, 19 nt, Homo sapiens
  misc_RNA (1)...(19): siRNA sense strand
guugugaucucaaauucuc

SEQ ID NO: 2155845 - RNA, 19 nt, Homo sapiens
  misc_RNA (1)...(19): siRNA sense strand
acuaguagguccuuugcuu

SEQ ID NO: 2155846 - RNA, 19 nt, Homo sapiens
  misc_RNA (1)...(19): siRNA sense strand
aaagauacgacacugagaa

SEQ ID NO: 2155847 - RNA, 19 nt, Homo sapiens
  misc_RNA (1)...(19): siRNA sense strand
ugugaaggcuauaucuaug

SEQ ID NO: 2155848 - RNA, 19 nt, Homo sapiens
  misc_RNA (1)...(19): siRNA sense strand
caucuuugguuugcuguga

SEQ ID NO: 2155849 - RNA, 19 nt, Homo sapiens
  misc_RNA (1)...(19): siRNA sense strand
cagcugauuugcauaaggu

SEQ ID NO: 2155850 - RNA, 19 nt, Homo sapiens
  misc_RNA (1)...(19): siRNA sense strand
uaacacagagagcuugguu

SEQ ID NO: 2155851 - RNA, 19 nt, Homo sapiens
  misc_RNA (1)...(19): siRNA sense strand
gcuaugcuguggcuagagu

SEQ ID NO: 2155852 - RNA, 19 nt, Homo sapiens
  misc_RNA (1)...(19): siRNA sense strand
cagaaucacgaucccagua

SEQ ID NO: 2155853 - RNA, 19 nt, Homo sapiens
  misc_RNA (1)...(19): siRNA sense strand
gugcagcaguugugguuca

SEQ ID NO: 2155854 - RNA, 19 nt, Homo sapiens
  misc_RNA (1)...(19): siRNA sense strand
guuguuuacugacauagug

SEQ ID NO: 2155855 - RNA, 19 nt, Homo sapiens
  misc_RNA (1)...(19): siRNA sense strand
gacuaaagaggaaaugaug

SEQ ID NO: 2155856 - RNA, 19 nt, Homo sapiens
  misc_RNA (1)...(19): siRNA sense strand
uauauuggaggguugcaua

SEQ ID NO: 2155857 - RNA, 19 nt, Homo sapiens
  misc_RNA (1)...(19): siRNA sense strand
gaagugauguuuaugacaa

SEQ ID NO: 2155858 - RNA, 19 nt, Homo sapiens
  misc_RNA (1)...(19): siRNA sense strand
ggaaauaucuugggaugga

SEQ ID NO: 2155859 - RNA, 19 nt, Homo sapiens
  misc_RNA (1)...(19): siRNA sense strand
caacuacaauggacauaaa

SEQ ID NO: 2155860 - RNA, 19 nt, Homo sapiens
  misc_RNA (1)...(19): siRNA sense strand
acauaaacgugaugacuua

SEQ ID NO: 2155861 - RNA, 19 nt, Homo sapiens
  misc_RNA (1)...(19): siRNA sense strand
acaaggaagugacauguaa

SEQ ID NO: 2155862 - RNA, 19 nt, Homo sapiens
  misc_RNA (1)...(19): siRNA sense strand
uauaacagcuccuucaaau

SEQ ID NO: 2155863 - RNA, 19 nt, Homo sapiens
  misc_RNA (1)...(19): siRNA sense strand
agacaacccuugcauaaug

SEQ ID NO: 2155864 - RNA, 19 nt, Homo sapiens
  misc_RNA (1)...(19): siRNA sense strand
caacagaccucagagaaag

SEQ ID NO: 2155865 - RNA, 19 nt, Homo sapiens
  misc_RNA (1)...(19): siRNA sense strand
ccucauuucuguacgauaa

SEQ ID NO: 2155866 - RNA, 19 nt, Homo sapiens
  misc_RNA (1)...(19): siRNA sense strand
ggaagcaaauguaccaagu

SEQ ID NO: 2155867 - RNA, 19 nt, Homo sapiens
  misc_RNA (1)...(19): siRNA sense strand
caucugugcuugugugaaa

SEQ ID NO: 2155868 - RNA, 19 nt, Homo sapiens
  misc_RNA (1)...(19): siRNA sense strand
gcaaauguaccaaguguuc

SEQ ID NO: 2155869 - RNA, 19 nt, Homo sapiens
  misc_RNA (1)...(19): siRNA sense strand
gagaugugguccucuauca

SEQ ID NO: 2155870 - RNA, 19 nt, Homo sapiens
  misc_RNA (1)...(19): siRNA sense strand
cagaagacaucaaaguaug

SEQ ID NO: 2155871 - RNA, 19 nt, Homo sapiens
  misc_RNA (1)...(19): siRNA sense strand
gcucaaauccugggaguuu

SEQ ID NO: 2155872 - RNA, 19 nt, Homo sapiens
  misc_RNA (1)...(19): siRNA sense strand
gcaacagaccucagagaaa

SEQ ID NO: 2155873 - RNA, 19 nt, Homo sapiens
  misc_RNA (1)...(19): siRNA sense strand
ggucggacauuuaacuuuc

SEQ ID NO: 2155874 - RNA, 19 nt, Homo sapiens
  misc_RNA (1)...(19): siRNA sense strand
ggaagugacauguaagaga

SEQ ID NO: 2155875 - RNA, 19 nt, Homo sapiens
  misc_RNA (1)...(19): siRNA sense strand
ggcaagcucuguggucuuu

SEQ ID NO: 2155876 - RNA, 19 nt, Homo sapiens
  misc_RNA (1)...(19): siRNA sense strand
uaacagcuccuucaaaugg

SEQ ID NO: 2155877 - RNA, 19 nt, Homo sapiens
  misc_RNA (1)...(19): siRNA sense strand
ggacggagugucgcaauaa

SEQ ID NO: 2155878 - RNA, 19 nt, Homo sapiens
  misc_RNA (1)...(19): siRNA sense strand
ugacagacaugugugaaug

SEQ ID NO: 2155879 - RNA, 19 nt, Homo sapiens
  misc_RNA (1)...(19): siRNA sense strand
ugugacaacuggaaugaaa

SEQ ID NO: 2155880 - RNA, 19 nt, Homo sapiens
  misc_RNA (1)...(19): siRNA sense strand
gaaauugguccaugcaaca

SEQ ID NO: 2155881 - RNA, 19 nt, Homo sapiens
  misc_RNA (1)...(19): siRNA sense strand
gaacaaggaagugacaugu

SEQ ID NO: 2155882 - RNA, 19 nt, Homo sapiens
  misc_RNA (1)...(19): siRNA sense strand
agagaagucugucccauuc

SEQ ID NO: 2155883 - RNA, 19 nt, Homo sapiens
  misc_RNA (1)...(19): siRNA sense strand
gcuguguuguucauuguaa

SEQ ID NO: 2155884 - RNA, 19 nt, Homo sapiens
  misc_RNA (1)...(19): siRNA sense strand
caacuggaaugaaauuggu

SEQ ID NO: 2155885 - RNA, 19 nt, Homo sapiens
  misc_RNA (1)...(19): siRNA sense strand
gaaagugaccaccaaagca

SEQ ID NO: 2155886 - RNA, 19 nt, Homo sapiens
  misc_RNA (1)...(19): siRNA sense strand
acagacaacccuugcauaa

SEQ ID NO: 2155887 - RNA, 19 nt, Homo sapiens
  misc_RNA (1)...(19): siRNA sense strand
ccagagagagggcaucaaa

SEQ ID NO: 2155888 - RNA, 19 nt, Homo sapiens
  misc_RNA (1)...(19): siRNA sense strand
gagagaagucugucccauu

SEQ ID NO: 2155889 - RNA, 19 nt, Homo sapiens
  misc_RNA (1)...(19): siRNA sense strand
gaaggaaauaccuauaaca

SEQ ID NO: 2155890 - RNA, 19 nt, Homo sapiens
  misc_RNA (1)...(19): siRNA sense strand
gaaggaagcaaauguacca

SEQ ID NO: 2155891 - RNA, 19 nt, Homo sapiens
  misc_RNA (1)...(19): siRNA sense strand
ggaggaauuucagccagaa

SEQ ID NO: 2155892 - RNA, 19 nt, Homo sapiens
  misc_RNA (1)...(19): siRNA sense strand
ccagaaggaagcaaaugua

SEQ ID NO: 2155893 - RNA, 19 nt, Homo sapiens
  misc_RNA (1)...(19): siRNA sense strand
gguccgggauguaucaaga

SEQ ID NO: 2155894 - RNA, 19 nt, Homo sapiens
  misc_RNA (1)...(19): siRNA sense strand
caggagggcuguugugaag

SEQ ID NO: 2155895 - RNA, 19 nt, Homo sapiens
  misc_RNA (1)...(19): siRNA sense strand
gcaacuacaauggacauaa

SEQ ID NO: 2155896 - RNA, 19 nt, Homo sapiens
  misc_RNA (1)...(19): siRNA sense strand
gugaauguccaguccauaa

SEQ ID NO: 2155897 - RNA, 19 nt, Homo sapiens
  misc_RNA (1)...(19): siRNA sense strand
ggacuacgccacuuucuac

SEQ ID NO: 2155898 - RNA, 19 nt, Homo sapiens
  misc_RNA (1)...(19): siRNA sense strand
ccagaagacaucaaaguau

SEQ ID NO: 2155899 - RNA, 19 nt, Homo sapiens
  misc_RNA (1)...(19): siRNA sense strand
caaacuugguccuucacaa

SEQ ID NO: 2155900 - RNA, 19 nt, Homo sapiens
  misc_RNA (1)...(19): siRNA sense strand
ggacagugcugccccaaau

SEQ ID NO: 2155901 - RNA, 19 nt, Homo sapiens
  misc_RNA (1)...(19): siRNA sense strand
cagcaaacuugguccuuca

SEQ ID NO: 2155902 - RNA, 19 nt, Homo sapiens
  misc_RNA (1)...(19): siRNA sense strand
caagggacagucaagguaa

SEQ ID NO: 2155903 - RNA, 19 nt, Homo sapiens
  misc_RNA (1)...(19): siRNA sense strand
gaaagccagugccugaacu

SEQ ID NO: 2155904 - RNA, 19 nt, Homo sapiens
  misc_RNA (1)...(19): siRNA sense strand
caaauuuggcaacaagauu

SEQ ID NO: 2155905 - RNA, 19 nt, Homo sapiens
  misc_RNA (1)...(19): siRNA sense strand
ggagggcuguugugaagag

SEQ ID NO: 2155906 - RNA, 19 nt, Homo sapiens
  misc_RNA (1)...(19): siRNA sense strand
gacaacccuugcauaaugu

SEQ ID NO: 2155907 - RNA, 19 nt, Homo sapiens
  misc_RNA (1)...(19): siRNA sense strand
ugacuuaauugguggagau

SEQ ID NO: 2155908 - RNA, 19 nt, Homo sapiens
  misc_RNA (1)...(19): siRNA sense strand
uacgauaacugcacagcuu

SEQ ID NO: 2155909 - RNA, 19 nt, Homo sapiens
  misc_RNA (1)...(19): siRNA sense strand
aagcaaauguaccaagugu

SEQ ID NO: 2155910 - RNA, 19 nt, Homo sapiens
  misc_RNA (1)...(19): siRNA sense strand
aaacuguuauugcgaguca

SEQ ID NO: 2155911 - RNA, 19 nt, Homo sapiens
  misc_RNA (1)...(19): siRNA sense strand
gacauaaacgugaugacuu

SEQ ID NO: 2155912 - RNA, 19 nt, Homo sapiens
  misc_RNA (1)...(19): siRNA sense strand
gaugugguccucuaucaau

SEQ ID NO: 2155913 - RNA, 19 nt, Homo sapiens
  misc_RNA (1)...(19): siRNA sense strand
ucaagggacagucaaggua

SEQ ID NO: 2155914 - RNA, 19 nt, Homo sapiens
  misc_RNA (1)...(19): siRNA sense strand
gcaaauuuggcaacaagau

SEQ ID NO: 2155915 - RNA, 19 nt, Homo sapiens
  misc_RNA (1)...(19): siRNA sense strand
ggugaaguccuccagauuc

SEQ ID NO: 2155916 - RNA, 19 nt, Homo sapiens
  misc_RNA (1)...(19): siRNA sense strand
caagcucuguggucuuugu

SEQ ID NO: 2155917 - RNA, 19 nt, Homo sapiens
  misc_RNA (1)...(19): siRNA sense strand
ggcuaccucuugaaaguga

SEQ ID NO: 2155918 - RNA, 19 nt, Homo sapiens
  misc_RNA (1)...(19): siRNA sense strand
gcagugcauucccaucagu

SEQ ID NO: 2155919 - RNA, 19 nt, Homo sapiens
  misc_RNA (1)...(19): siRNA sense strand
gcaucaagccaguccuuug

SEQ ID NO: 2155920 - RNA, 19 nt, Homo sapiens
  misc_RNA (1)...(19): siRNA sense strand
ugacaacuggaaugaaauu

SEQ ID NO: 2155921 - RNA, 19 nt, Homo sapiens
  misc_RNA (1)...(19): siRNA sense strand
ggaugacuuugcugaaucu

SEQ ID NO: 2155922 - RNA, 19 nt, Homo sapiens
  misc_RNA (1)...(19): siRNA sense strand
ggauggcuaccucuugaaa

SEQ ID NO: 2155923 - RNA, 19 nt, Homo sapiens
  misc_RNA (1)...(19): siRNA sense strand
ugaaggaaauaccuauaac

SEQ ID NO: 2155924 - RNA, 19 nt, Homo sapiens
  misc_RNA (1)...(19): siRNA sense strand
ggacauaaacgugaugacu

SEQ ID NO: 2155925 - RNA, 19 nt, Homo sapiens
  misc_RNA (1)...(19): siRNA sense strand
gauccucauuucuguacga

SEQ ID NO: 2155926 - RNA, 19 nt, Homo sapiens
  misc_RNA (1)...(19): siRNA sense strand
gugcagccacccaguguaa

SEQ ID NO: 2155927 - RNA, 19 nt, Homo sapiens
  misc_RNA (1)...(19): siRNA sense strand
gaagcaaauguaccaagug

SEQ ID NO: 2155928 - RNA, 19 nt, Homo sapiens
  misc_RNA (1)...(19): siRNA sense strand
guggaugacuuugcugaau

SEQ ID NO: 2155929 - RNA, 19 nt, Homo sapiens
  misc_RNA (1)...(19): siRNA sense strand
cccagaagacaucaaagua

SEQ ID NO: 2155930 - RNA, 19 nt, Homo sapiens
  misc_RNA (1)...(19): siRNA sense strand
gauaacugcacagcuugua

SEQ ID NO: 2155931 - RNA, 19 nt, Homo sapiens
  misc_RNA (1)...(19): siRNA sense strand
gcgcuguguuguucauugu

SEQ ID NO: 2155932 - RNA, 19 nt, Homo sapiens
  misc_RNA (1)...(19): siRNA sense strand
aaagcagguuuggaaauau

SEQ ID NO: 2155933 - RNA, 19 nt, Homo sapiens
  misc_RNA (1)...(19): siRNA sense strand
ccagcaccuuagucacaua

SEQ ID NO: 2155934 - RNA, 19 nt, Homo sapiens
  misc_RNA (1)...(19): siRNA sense strand
gggcaaaauucucaacaga

SEQ ID NO: 2155935 - RNA, 19 nt, Homo sapiens
  misc_RNA (1)...(19): siRNA sense strand
gguccucuaucaauuguac

SEQ ID NO: 2155936 - RNA, 19 nt, Homo sapiens
  misc_RNA (1)...(19): siRNA sense strand
cagggacucuacugugguu

SEQ ID NO: 2155937 - RNA, 19 nt, Homo sapiens
  misc_RNA (1)...(19): siRNA sense strand
uguccuauuugcacugaaa

SEQ ID NO: 2155938 - RNA, 19 nt, Homo sapiens
  misc_RNA (1)...(19): siRNA sense strand
ccaaugaguucugcaacag

SEQ ID NO: 2155939 - RNA, 19 nt, Homo sapiens
  misc_RNA (1)...(19): siRNA sense strand
caauggacauaaacgugau

SEQ ID NO: 2155940 - RNA, 19 nt, Homo sapiens
  misc_RNA (1)...(19): siRNA sense strand
cuggauggcuaccucuuga

SEQ ID NO: 2155941 - RNA, 19 nt, Homo sapiens
  misc_RNA (1)...(19): siRNA sense strand
ugugaacagugcaaagguu

SEQ ID NO: 2155942 - RNA, 19 nt, Homo sapiens
  misc_RNA (1)...(19): siRNA sense strand
gcauggugcuguguacgau

SEQ ID NO: 2155943 - RNA, 19 nt, Homo sapiens
  misc_RNA (1)...(19): siRNA sense strand
ggaauuucagccagaagga

SEQ ID NO: 2155944 - RNA, 19 nt, Homo sapiens
  misc_RNA (1)...(19): siRNA sense strand
caucaagccaguccuuugu

SEQ ID NO: 2155945 - RNA, 19 nt, Homo sapiens
  misc_RNA (1)...(19): siRNA sense strand
gggagccucagcagaauug

SEQ ID NO: 2155946 - RNA, 19 nt, Homo sapiens
  misc_RNA (1)...(19): siRNA sense strand
gcaauaagcagugcauucc

SEQ ID NO: 2155947 - RNA, 19 nt, Homo sapiens
  misc_RNA (1)...(19): siRNA sense strand
agacaucaaaguaugcaaa

SEQ ID NO: 2155948 - RNA, 19 nt, Homo sapiens
  misc_RNA (1)...(19): siRNA sense strand
gaauuucagccagaaggaa

SEQ ID NO: 2155949 - RNA, 19 nt, Homo sapiens
  misc_RNA (1)...(19): siRNA sense strand
ugaauguccaguccauaaa

SEQ ID NO: 2155950 - RNA, 19 nt, Homo sapiens
  misc_RNA (1)...(19): siRNA sense strand
ugguggagauggaaacuuc

SEQ ID NO: 2155951 - RNA, 19 nt, Homo sapiens
  misc_RNA (1)...(19): siRNA sense strand
uuugggagcugccucuuuc

SEQ ID NO: 2155952 - RNA, 19 nt, Homo sapiens
  misc_RNA (1)...(19): siRNA sense strand
uaucaauuguaccaucugu

SEQ ID NO: 2155953 - RNA, 19 nt, Homo sapiens
  misc_RNA (1)...(19): siRNA sense strand
ccacuguccagcaaacuug

SEQ ID NO: 2155954 - RNA, 19 nt, Homo sapiens
  misc_RNA (1)...(19): siRNA sense strand
gagagagggcaucaaaguc

SEQ ID NO: 2155955 - RNA, 19 nt, Homo sapiens
  misc_RNA (1)...(19): siRNA sense strand
agagagagggcaucaaagu

SEQ ID NO: 2155956 - RNA, 19 nt, Homo sapiens
  misc_RNA (1)...(19): siRNA sense strand
uaaugugugucugcuugaa

SEQ ID NO: 2155957 - RNA, 19 nt, Homo sapiens
  misc_RNA (1)...(19): siRNA sense strand
gaagugauguuuaugacaa

SEQ ID NO: 2155958 - RNA, 19 nt, Homo sapiens
  misc_RNA (1)...(19): siRNA sense strand
ggaaauaucuugggaugga

SEQ ID NO: 2155959 - RNA, 19 nt, Homo sapiens
  misc_RNA (1)...(19): siRNA sense strand
caacuacaauggacauaaa

SEQ ID NO: 2155960 - RNA, 19 nt, Homo sapiens
  misc_RNA (1)...(19): siRNA sense strand
acauaaacgugaugacuua

SEQ ID NO: 2155961 - RNA, 19 nt, Homo sapiens
  misc_RNA (1)...(19): siRNA sense strand
acaaggaagugacauguaa

SEQ ID NO: 2155962 - RNA, 19 nt, Homo sapiens
  misc_RNA (1)...(19): siRNA sense strand
uauaacagcuccuucaaau

SEQ ID NO: 2155963 - RNA, 19 nt, Homo sapiens
  misc_RNA (1)...(19): siRNA sense strand
agacaacccuugcauaaug

SEQ ID NO: 2155964 - RNA, 19 nt, Homo sapiens
  misc_RNA (1)...(19): siRNA sense strand
caacagaccucagagaaag

SEQ ID NO: 2155965 - RNA, 19 nt, Homo sapiens
  misc_RNA (1)...(19): siRNA sense strand
ccucauuucuguacgauaa

SEQ ID NO: 2155966 - RNA, 19 nt, Homo sapiens
  misc_RNA (1)...(19): siRNA sense strand
ggaagcaaauguaccaagu

SEQ ID NO: 2155967 - RNA, 19 nt, Homo sapiens
  misc_RNA (1)...(19): siRNA sense strand
caucugugcuugugugaaa

SEQ ID NO: 2155968 - RNA, 19 nt, Homo sapiens
  misc_RNA (1)...(19): siRNA sense strand
gcaaauguaccaaguguuc

SEQ ID NO: 2155969 - RNA, 19 nt, Homo sapiens
  misc_RNA (1)...(19): siRNA sense strand
gagaugugguccucuauca

SEQ ID NO: 2155970 - RNA, 19 nt, Homo sapiens
  misc_RNA (1)...(19): siRNA sense strand
cagaagacaucaaaguaug

SEQ ID NO: 2155971 - RNA, 19 nt, Homo sapiens
  misc_RNA (1)...(19): siRNA sense strand
gcucaaauccugggaguuu

SEQ ID NO: 2155972 - RNA, 19 nt, Homo sapiens
  misc_RNA (1)...(19): siRNA sense strand
gcaacagaccucagagaaa

SEQ ID NO: 2155973 - RNA, 19 nt, Homo sapiens
  misc_RNA (1)...(19): siRNA sense strand
ggucggacauuuaacuuuc

SEQ ID NO: 2155974 - RNA, 19 nt, Homo sapiens
  misc_RNA (1)...(19): siRNA sense strand
ggaagugacauguaagaga

SEQ ID NO: 2155975 - RNA, 19 nt, Homo sapiens
  misc_RNA (1)...(19): siRNA sense strand
ggcaagcucuguggucuuu

SEQ ID NO: 2155976 - RNA, 19 nt, Homo sapiens
  misc_RNA (1)...(19): siRNA sense strand
uaacagcuccuucaaaugg

SEQ ID NO: 2155977 - RNA, 19 nt, Homo sapiens
  misc_RNA (1)...(19): siRNA sense strand
ggacggagugucgcaauaa

SEQ ID NO: 2155978 - RNA, 19 nt, Homo sapiens
  misc_RNA (1)...(19): siRNA sense strand
ugacagacaugugugaaug

SEQ ID NO: 2155979 - RNA, 19 nt, Homo sapiens
  misc_RNA (1)...(19): siRNA sense strand
ugugacaacuggaaugaaa

SEQ ID NO: 2155980 - RNA, 19 nt, Homo sapiens
  misc_RNA (1)...(19): siRNA sense strand
gaaauugguccaugcaaca

SEQ ID NO: 2155981 - RNA, 19 nt, Homo sapiens
  misc_RNA (1)...(19): siRNA sense strand
gaacaaggaagugacaugu

SEQ ID NO: 2155982 - RNA, 19 nt, Homo sapiens
  misc_RNA (1)...(19): siRNA sense strand
agagaagucugucccauuc

SEQ ID NO: 2155983 - RNA, 19 nt, Homo sapiens
  misc_RNA (1)...(19): siRNA sense strand
gcuguguuguucauuguaa

SEQ ID NO: 2155984 - RNA, 19 nt, Homo sapiens
  misc_RNA (1)...(19): siRNA sense strand
caacuggaaugaaauuggu

SEQ ID NO: 2155985 - RNA, 19 nt, Homo sapiens
  misc_RNA (1)...(19): siRNA sense strand
gaaagugaccaccaaagca

SEQ ID NO: 2155986 - RNA, 19 nt, Homo sapiens
  misc_RNA (1)...(19): siRNA sense strand
acagacaacccuugcauaa

SEQ ID NO: 2155987 - RNA, 19 nt, Homo sapiens
  misc_RNA (1)...(19): siRNA sense strand
ccagagagagggcaucaaa

SEQ ID NO: 2155988 - RNA, 19 nt, Homo sapiens
  misc_RNA (1)...(19): siRNA sense strand
gagagaagucugucccauu

SEQ ID NO: 2155989 - RNA, 19 nt, Homo sapiens
  misc_RNA (1)...(19): siRNA sense strand
gaaggaaauaccuauaaca

SEQ ID NO: 2155990 - RNA, 19 nt, Homo sapiens
  misc_RNA (1)...(19): siRNA sense strand
gaaggaagcaaauguacca

SEQ ID NO: 2155991 - RNA, 19 nt, Homo sapiens
  misc_RNA (1)...(19): siRNA sense strand
ggaggaauuucagccagaa

SEQ ID NO: 2155992 - RNA, 19 nt, Homo sapiens
  misc_RNA (1)...(19): siRNA sense strand
ccagaaggaagcaaaugua

SEQ ID NO: 2155993 - RNA, 19 nt, Homo sapiens
  misc_RNA (1)...(19): siRNA sense strand
gguccgggauguaucaaga

SEQ ID NO: 2155994 - RNA, 19 nt, Homo sapiens
  misc_RNA (1)...(19): siRNA sense strand
caggagggcuguugugaag

SEQ ID NO: 2155995 - RNA, 19 nt, Homo sapiens
  misc_RNA (1)...(19): siRNA sense strand
gcaacuacaauggacauaa

SEQ ID NO: 2155996 - RNA, 19 nt, Homo sapiens
  misc_RNA (1)...(19): siRNA sense strand
gugaauguccaguccauaa

SEQ ID NO: 2155997 - RNA, 19 nt, Homo sapiens
  misc_RNA (1)...(19): siRNA sense strand
ggacuacgccacuuucuac

SEQ ID NO: 2155998 - RNA, 19 nt, Homo sapiens
  misc_RNA (1)...(19): siRNA sense strand
ccagaagacaucaaaguau

SEQ ID NO: 2155999 - RNA, 19 nt, Homo sapiens
  misc_RNA (1)...(19): siRNA sense strand
caaacuugguccuucacaa

SEQ ID NO: 2156000 - RNA, 19 nt, Homo sapiens
  misc_RNA (1)...(19): siRNA sense strand
ggacagugcugccccaaau

SEQ ID NO: 2156001 - RNA, 19 nt, Homo sapiens
  misc_RNA (1)...(19): siRNA sense strand
cagcaaacuugguccuuca

SEQ ID NO: 2156002 - RNA, 19 nt, Homo sapiens
  misc_RNA (1)...(19): siRNA sense strand
caagggacagucaagguaa

SEQ ID NO: 2156003 - RNA, 19 nt, Homo sapiens
  misc_RNA (1)...(19): siRNA sense strand
gaaagccagugccugaacu

SEQ ID NO: 2156004 - RNA, 19 nt, Homo sapiens
  misc_RNA (1)...(19): siRNA sense strand
caaauuuggcaacaagauu

SEQ ID NO: 2156005 - RNA, 19 nt, Homo sapiens
  misc_RNA (1)...(19): siRNA sense strand
ggagggcuguugugaagag

SEQ ID NO: 2156006 - RNA, 19 nt, Homo sapiens
  misc_RNA (1)...(19): siRNA sense strand
gacaacccuugcauaaugu

SEQ ID NO: 2156007 - RNA, 19 nt, Homo sapiens
  misc_RNA (1)...(19): siRNA sense strand
ugacuuaauugguggagau

SEQ ID NO: 2156008 - RNA, 19 nt, Homo sapiens
  misc_RNA (1)...(19): siRNA sense strand
uacgauaacugcacagcuu

SEQ ID NO: 2156009 - RNA, 19 nt, Homo sapiens
  misc_RNA (1)...(19): siRNA sense strand
aagcaaauguaccaagugu

SEQ ID NO: 2156010 - RNA, 19 nt, Homo sapiens
  misc_RNA (1)...(19): siRNA sense strand
aaacuguuauugcgaguca

SEQ ID NO: 2156011 - RNA, 19 nt, Homo sapiens
  misc_RNA (1)...(19): siRNA sense strand
gacauaaacgugaugacuu

SEQ ID NO: 2156012 - RNA, 19 nt, Homo sapiens
  misc_RNA (1)...(19): siRNA sense strand
gaugugguccucuaucaau

SEQ ID NO: 2156013 - RNA, 19 nt, Homo sapiens
  misc_RNA (1)...(19): siRNA sense strand
ucaagggacagucaaggua

SEQ ID NO: 2156014 - RNA, 19 nt, Homo sapiens
  misc_RNA (1)...(19): siRNA sense strand
gcaaauuuggcaacaagau

SEQ ID NO: 2156015 - RNA, 19 nt, Homo sapiens
  misc_RNA (1)...(19): siRNA sense strand
ggugaaguccuccagauuc

SEQ ID NO: 2156016 - RNA, 19 nt, Homo sapiens
  misc_RNA (1)...(19): siRNA sense strand
caagcucuguggucuuugu

SEQ ID NO: 2156017 - RNA, 19 nt, Homo sapiens
  misc_RNA (1)...(19): siRNA sense strand
ggcuaccucuugaaaguga

SEQ ID NO: 2156018 - RNA, 19 nt, Homo sapiens
  misc_RNA (1)...(19): siRNA sense strand
gcagugcauucccaucagu

SEQ ID NO: 2156019 - RNA, 19 nt, Homo sapiens
  misc_RNA (1)...(19): siRNA sense strand
gcaucaagccaguccuuug

SEQ ID NO: 2156020 - RNA, 19 nt, Homo sapiens
  misc_RNA (1)...(19): siRNA sense strand
ugacaacuggaaugaaauu

SEQ ID NO: 2156021 - RNA, 19 nt, Homo sapiens
  misc_RNA (1)...(19): siRNA sense strand
ggaugacuuugcugaaucu

SEQ ID NO: 2156022 - RNA, 19 nt, Homo sapiens
  misc_RNA (1)...(19): siRNA sense strand
ggauggcuaccucuugaaa

SEQ ID NO: 2156023 - RNA, 19 nt, Homo sapiens
  misc_RNA (1)...(19): siRNA sense strand
ugaaggaaauaccuauaac

SEQ ID NO: 2156024 - RNA, 19 nt, Homo sapiens
  misc_RNA (1)...(19): siRNA sense strand
ggacauaaacgugaugacu

SEQ ID NO: 2156025 - RNA, 19 nt, Homo sapiens
  misc_RNA (1)...(19): siRNA sense strand
gauccucauuucuguacga

SEQ ID NO: 2156026 - RNA, 19 nt, Homo sapiens
  misc_RNA (1)...(19): siRNA sense strand
gugcagccacccaguguaa

SEQ ID NO: 2156027 - RNA, 19 nt, Homo sapiens
  misc_RNA (1)...(19): siRNA sense strand
gaagcaaauguaccaagug

SEQ ID NO: 2156028 - RNA, 19 nt, Homo sapiens
  misc_RNA (1)...(19): siRNA sense strand
guggaugacuuugcugaau

SEQ ID NO: 2156029 - RNA, 19 nt, Homo sapiens
  misc_RNA (1)...(19): siRNA sense strand
cccagaagacaucaaagua

SEQ ID NO: 2156030 - RNA, 19 nt, Homo sapiens
  misc_RNA (1)...(19): siRNA sense strand
gauaacugcacagcuugua

SEQ ID NO: 2156031 - RNA, 19 nt, Homo sapiens
  misc_RNA (1)...(19): siRNA sense strand
gcgcuguguuguucauugu

SEQ ID NO: 2156032 - RNA, 19 nt, Homo sapiens
  misc_RNA (1)...(19): siRNA sense strand
aaagcagguuuggaaauau

SEQ ID NO: 2156033 - RNA, 19 nt, Homo sapiens
  misc_RNA (1)...(19): siRNA sense strand
ccagcaccuuagucacaua

SEQ ID NO: 2156034 - RNA, 19 nt, Homo sapiens
  misc_RNA (1)...(19): siRNA sense strand
gggcaaaauucucaacaga

SEQ ID NO: 2156035 - RNA, 19 nt, Homo sapiens
  misc_RNA (1)...(19): siRNA sense strand
gguccucuaucaauuguac

SEQ ID NO: 2156036 - RNA, 19 nt, Homo sapiens
  misc_RNA (1)...(19): siRNA sense strand
cagggacucuacugugguu

SEQ ID NO: 2156037 - RNA, 19 nt, Homo sapiens
  misc_RNA (1)...(19): siRNA sense strand
uguccuauuugcacugaaa

SEQ ID NO: 2156038 - RNA, 19 nt, Homo sapiens
  misc_RNA (1)...(19): siRNA sense strand
ccaaugaguucugcaacag

SEQ ID NO: 2156039 - RNA, 19 nt, Homo sapiens
  misc_RNA (1)...(19): siRNA sense strand
caauggacauaaacgugau

SEQ ID NO: 2156040 - RNA, 19 nt, Homo sapiens
  misc_RNA (1)...(19): siRNA sense strand
cuggauggcuaccucuuga

SEQ ID NO: 2156041 - RNA, 19 nt, Homo sapiens
  misc_RNA (1)...(19): siRNA sense strand
ugugaacagugcaaagguu

SEQ ID NO: 2156042 - RNA, 19 nt, Homo sapiens
  misc_RNA (1)...(19): siRNA sense strand
gcauggugcuguguacgau

SEQ ID NO: 2156043 - RNA, 19 nt, Homo sapiens
  misc_RNA (1)...(19): siRNA sense strand
ggaauuucagccagaagga

SEQ ID NO: 2156044 - RNA, 19 nt, Homo sapiens
  misc_RNA (1)...(19): siRNA sense strand
caucaagccaguccuuugu

SEQ ID NO: 2156045 - RNA, 19 nt, Homo sapiens
  misc_RNA (1)...(19): siRNA sense strand
gggagccucagcagaauug

SEQ ID NO: 2156046 - RNA, 19 nt, Homo sapiens
  misc_RNA (1)...(19): siRNA sense strand
gcaauaagcagugcauucc

SEQ ID NO: 2156047 - RNA, 19 nt, Homo sapiens
  misc_RNA (1)...(19): siRNA sense strand
agacaucaaaguaugcaaa

SEQ ID NO: 2156048 - RNA, 19 nt, Homo sapiens
  misc_RNA (1)...(19): siRNA sense strand
gaauuucagccagaaggaa

SEQ ID NO: 2156049 - RNA, 19 nt, Homo sapiens
  misc_RNA (1)...(19): siRNA sense strand
ugaauguccaguccauaaa

SEQ ID NO: 2156050 - RNA, 19 nt, Homo sapiens
  misc_RNA (1)...(19): siRNA sense strand
ugguggagauggaaacuuc

SEQ ID NO: 2156051 - RNA, 19 nt, Homo sapiens
  misc_RNA (1)...(19): siRNA sense strand
uuugggagcugccucuuuc

SEQ ID NO: 2156052 - RNA, 19 nt, Homo sapiens
  misc_RNA (1)...(19): siRNA sense strand
uaucaauuguaccaucugu

SEQ ID NO: 2156053 - RNA, 19 nt, Homo sapiens
  misc_RNA (1)...(19): siRNA sense strand
ccacuguccagcaaacuug

SEQ ID NO: 2156054 - RNA, 19 nt, Homo sapiens
  misc_RNA (1)...(19): siRNA sense strand
gagagagggcaucaaaguc

SEQ ID NO: 2156055 - RNA, 19 nt, Homo sapiens
  misc_RNA (1)...(19): siRNA sense strand
agagagagggcaucaaagu

SEQ ID NO: 2156056 - RNA, 19 nt, Homo sapiens
  misc_RNA (1)...(19): siRNA sense strand
uaaugugugucugcuugaa

SEQ ID NO: 2156057 - RNA, 19 nt, Homo sapiens
  misc_RNA (1)...(19): siRNA sense strand
gaagugauguuuaugacaa

SEQ ID NO: 2156058 - RNA, 19 nt, Homo sapiens
  misc_RNA (1)...(19): siRNA sense strand
ggaaauaucuugggaugga

SEQ ID NO: 2156059 - RNA, 19 nt, Homo sapiens
  misc_RNA (1)...(19): siRNA sense strand
caacuacaauggacauaaa

SEQ ID NO: 2156060 - RNA, 19 nt, Homo sapiens
  misc_RNA (1)...(19): siRNA sense strand
acauaaacgugaugacuua

SEQ ID NO: 2156061 - RNA, 19 nt, Homo sapiens
  misc_RNA (1)...(19): siRNA sense strand
acaaggaagugacauguaa

SEQ ID NO: 2156062 - RNA, 19 nt, Homo sapiens
  misc_RNA (1)...(19): siRNA sense strand
uauaacagcuccuucaaau

SEQ ID NO: 2156063 - RNA, 19 nt, Homo sapiens
  misc_RNA (1)...(19): siRNA sense strand
agacaacccuugcauaaug

SEQ ID NO: 2156064 - RNA, 19 nt, Homo sapiens
  misc_RNA (1)...(19): siRNA sense strand
caacagaccucagagaaag

SEQ ID NO: 2156065 - RNA, 19 nt, Homo sapiens
  misc_RNA (1)...(19): siRNA sense strand
ccucauuucuguacgauaa

SEQ ID NO: 2156066 - RNA, 19 nt, Homo sapiens
  misc_RNA (1)...(19): siRNA sense strand
ggaagcaaauguaccaagu

SEQ ID NO: 2156067 - RNA, 19 nt, Homo sapiens
  misc_RNA (1)...(19): siRNA sense strand
caucugugcuugugugaaa

SEQ ID NO: 2156068 - RNA, 19 nt, Homo sapiens
  misc_RNA (1)...(19): siRNA sense strand
gcaaauguaccaaguguuc

SEQ ID NO: 2156069 - RNA, 19 nt, Homo sapiens
  misc_RNA (1)...(19): siRNA sense strand
gagaugugguccucuauca

SEQ ID NO: 2156070 - RNA, 19 nt, Homo sapiens
  misc_RNA (1)...(19): siRNA sense strand
cagaagacaucaaaguaug

SEQ ID NO: 2156071 - RNA, 19 nt, Homo sapiens
  misc_RNA (1)...(19): siRNA sense strand
gcucaaauccugggaguuu

SEQ ID NO: 2156072 - RNA, 19 nt, Homo sapiens
  misc_RNA (1)...(19): siRNA sense strand
gcaacagaccucagagaaa

SEQ ID NO: 2156073 - RNA, 19 nt, Homo sapiens
  misc_RNA (1)...(19): siRNA sense strand
ggucggacauuuaacuuuc

SEQ ID NO: 2156074 - RNA, 19 nt, Homo sapiens
  misc_RNA (1)...(19): siRNA sense strand
ggaagugacauguaagaga

SEQ ID NO: 2156075 - RNA, 19 nt, Homo sapiens
  misc_RNA (1)...(19): siRNA sense strand
ggcaagcucuguggucuuu

SEQ ID NO: 2156076 - RNA, 19 nt, Homo sapiens
  misc_RNA (1)...(19): siRNA sense strand
uaacagcuccuucaaaugg

SEQ ID NO: 2156077 - RNA, 19 nt, Homo sapiens
  misc_RNA (1)...(19): siRNA sense strand
ggacggagugucgcaauaa

SEQ ID NO: 2156078 - RNA, 19 nt, Homo sapiens
  misc_RNA (1)...(19): siRNA sense strand
ugacagacaugugugaaug

SEQ ID NO: 2156079 - RNA, 19 nt, Homo sapiens
  misc_RNA (1)...(19): siRNA sense strand
ugugacaacuggaaugaaa

SEQ ID NO: 2156080 - RNA, 19 nt, Homo sapiens
  misc_RNA (1)...(19): siRNA sense strand
gaaauugguccaugcaaca

SEQ ID NO: 2156081 - RNA, 19 nt, Homo sapiens
  misc_RNA (1)...(19): siRNA sense strand
gaacaaggaagugacaugu

SEQ ID NO: 2156082 - RNA, 19 nt, Homo sapiens
  misc_RNA (1)...(19): siRNA sense strand
agagaagucugucccauuc

SEQ ID NO: 2156083 - RNA, 19 nt, Homo sapiens
  misc_RNA (1)...(19): siRNA sense strand
gcuguguuguucauuguaa

SEQ ID NO: 2156084 - RNA, 19 nt, Homo sapiens
  misc_RNA (1)...(19): siRNA sense strand
caacuggaaugaaauuggu

SEQ ID NO: 2156085 - RNA, 19 nt, Homo sapiens
  misc_RNA (1)...(19): siRNA sense strand
gaaagugaccaccaaagca

SEQ ID NO: 2156086 - RNA, 19 nt, Homo sapiens
  misc_RNA (1)...(19): siRNA sense strand
acagacaacccuugcauaa

SEQ ID NO: 2156087 - RNA, 19 nt, Homo sapiens
  misc_RNA (1)...(19): siRNA sense strand
ccagagagagggcaucaaa

SEQ ID NO: 2156088 - RNA, 19 nt, Homo sapiens
  misc_RNA (1)...(19): siRNA sense strand
gagagaagucugucccauu

SEQ ID NO: 2156089 - RNA, 19 nt, Homo sapiens
  misc_RNA (1)...(19): siRNA sense strand
gaaggaaauaccuauaaca

SEQ ID NO: 2156090 - RNA, 19 nt, Homo sapiens
  misc_RNA (1)...(19): siRNA sense strand
gaaggaagcaaauguacca

SEQ ID NO: 2156091 - RNA, 19 nt, Homo sapiens
  misc_RNA (1)...(19): siRNA sense strand
ggaggaauuucagccagaa

SEQ ID NO: 2156092 - RNA, 19 nt, Homo sapiens
  misc_RNA (1)...(19): siRNA sense strand
ccagaaggaagcaaaugua

SEQ ID NO: 2156093 - RNA, 19 nt, Homo sapiens
  misc_RNA (1)...(19): siRNA sense strand
gguccgggauguaucaaga

SEQ ID NO: 2156094 - RNA, 19 nt, Homo sapiens
  misc_RNA (1)...(19): siRNA sense strand
caggagggcuguugugaag

SEQ ID NO: 2156095 - RNA, 19 nt, Homo sapiens
  misc_RNA (1)...(19): siRNA sense strand
gcaacuacaauggacauaa

SEQ ID NO: 2156096 - RNA, 19 nt, Homo sapiens
  misc_RNA (1)...(19): siRNA sense strand
gugaauguccaguccauaa

SEQ ID NO: 2156097 - RNA, 19 nt, Homo sapiens
  misc_RNA (1)...(19): siRNA sense strand
ggacuacgccacuuucuac

SEQ ID NO: 2156098 - RNA, 19 nt, Homo sapiens
  misc_RNA (1)...(19): siRNA sense strand
ccagaagacaucaaaguau

SEQ ID NO: 2156099 - RNA, 19 nt, Homo sapiens
  misc_RNA (1)...(19): siRNA sense strand
caaacuugguccuucacaa

SEQ ID NO: 2156100 - RNA, 19 nt, Homo sapiens
  misc_RNA (1)...(19): siRNA sense strand
ggacagugcugccccaaau

SEQ ID NO: 2156101 - RNA, 19 nt, Homo sapiens
  misc_RNA (1)...(19): siRNA sense strand
cagcaaacuugguccuuca

SEQ ID NO: 2156102 - RNA, 19 nt, Homo sapiens
  misc_RNA (1)...(19): siRNA sense strand
caagggacagucaagguaa

SEQ ID NO: 2156103 - RNA, 19 nt, Homo sapiens
  misc_RNA (1)...(19): siRNA sense strand
gaaagccagugccugaacu

SEQ ID NO: 2156104 - RNA, 19 nt, Homo sapiens
  misc_RNA (1)...(19): siRNA sense strand
caaauuuggcaacaagauu

SEQ ID NO: 2156105 - RNA, 19 nt, Homo sapiens
  misc_RNA (1)...(19): siRNA sense strand
ggagggcuguugugaagag

SEQ ID NO: 2156106 - RNA, 19 nt, Homo sapiens
  misc_RNA (1)...(19): siRNA sense strand
gacaacccuugcauaaugu

SEQ ID NO: 2156107 - RNA, 19 nt, Homo sapiens
  misc_RNA (1)...(19): siRNA sense strand
ugacuuaauugguggagau

SEQ ID NO: 2156108 - RNA, 19 nt, Homo sapiens
  misc_RNA (1)...(19): siRNA sense strand
uacgauaacugcacagcuu

SEQ ID NO: 2156109 - RNA, 19 nt, Homo sapiens
  misc_RNA (1)...(19): siRNA sense strand
aagcaaauguaccaagugu

SEQ ID NO: 2156110 - RNA, 19 nt, Homo sapiens
  misc_RNA (1)...(19): siRNA sense strand
aaacuguuauugcgaguca

SEQ ID NO: 2156111 - RNA, 19 nt, Homo sapiens
  misc_RNA (1)...(19): siRNA sense strand
gacauaaacgugaugacuu

SEQ ID NO: 2156112 - RNA, 19 nt, Homo sapiens
  misc_RNA (1)...(19): siRNA sense strand
gaugugguccucuaucaau

SEQ ID NO: 2156113 - RNA, 19 nt, Homo sapiens
  misc_RNA (1)...(19): siRNA sense strand
ucaagggacagucaaggua

SEQ ID NO: 2156114 - RNA, 19 nt, Homo sapiens
  misc_RNA (1)...(19): siRNA sense strand
gcaaauuuggcaacaagau

SEQ ID NO: 2156115 - RNA, 19 nt, Homo sapiens
  misc_RNA (1)...(19): siRNA sense strand
ggugaaguccuccagauuc

SEQ ID NO: 2156116 - RNA, 19 nt, Homo sapiens
  misc_RNA (1)...(19): siRNA sense strand
caagcucuguggucuuugu

SEQ ID NO: 2156117 - RNA, 19 nt, Homo sapiens
  misc_RNA (1)...(19): siRNA sense strand
ggcuaccucuugaaaguga

SEQ ID NO: 2156118 - RNA, 19 nt, Homo sapiens
  misc_RNA (1)...(19): siRNA sense strand
gcagugcauucccaucagu

SEQ ID NO: 2156119 - RNA, 19 nt, Homo sapiens
  misc_RNA (1)...(19): siRNA sense strand
gcaucaagccaguccuuug

SEQ ID NO: 2156120 - RNA, 19 nt, Homo sapiens
  misc_RNA (1)...(19): siRNA sense strand
ugacaacuggaaugaaauu

SEQ ID NO: 2156121 - RNA, 19 nt, Homo sapiens
  misc_RNA (1)...(19): siRNA sense strand
ggaugacuuugcugaaucu

SEQ ID NO: 2156122 - RNA, 19 nt, Homo sapiens
  misc_RNA (1)...(19): siRNA sense strand
ggauggcuaccucuugaaa

SEQ ID NO: 2156123 - RNA, 19 nt, Homo sapiens
  misc_RNA (1)...(19): siRNA sense strand
ugaaggaaauaccuauaac

SEQ ID NO: 2156124 - RNA, 19 nt, Homo sapiens
  misc_RNA (1)...(19): siRNA sense strand
ggacauaaacgugaugacu

SEQ ID NO: 2156125 - RNA, 19 nt, Homo sapiens
  misc_RNA (1)...(19): siRNA sense strand
gauccucauuucuguacga

SEQ ID NO: 2156126 - RNA, 19 nt, Homo sapiens
  misc_RNA (1)...(19): siRNA sense strand
gugcagccacccaguguaa

SEQ ID NO: 2156127 - RNA, 19 nt, Homo sapiens
  misc_RNA (1)...(19): siRNA sense strand
gaagcaaauguaccaagug

SEQ ID NO: 2156128 - RNA, 19 nt, Homo sapiens
  misc_RNA (1)...(19): siRNA sense strand
guggaugacuuugcugaau

SEQ ID NO: 2156129 - RNA, 19 nt, Homo sapiens
  misc_RNA (1)...(19): siRNA sense strand
cccagaagacaucaaagua

SEQ ID NO: 2156130 - RNA, 19 nt, Homo sapiens
  misc_RNA (1)...(19): siRNA sense strand
gauaacugcacagcuugua

SEQ ID NO: 2156131 - RNA, 19 nt, Homo sapiens
  misc_RNA (1)...(19): siRNA sense strand
gcgcuguguuguucauugu

SEQ ID NO: 2156132 - RNA, 19 nt, Homo sapiens
  misc_RNA (1)...(19): siRNA sense strand
aaagcagguuuggaaauau

SEQ ID NO: 2156133 - RNA, 19 nt, Homo sapiens
  misc_RNA (1)...(19): siRNA sense strand
ccagcaccuuagucacaua

SEQ ID NO: 2156134 - RNA, 19 nt, Homo sapiens
  misc_RNA (1)...(19): siRNA sense strand
gggcaaaauucucaacaga

SEQ ID NO: 2156135 - RNA, 19 nt, Homo sapiens
  misc_RNA (1)...(19): siRNA sense strand
gguccucuaucaauuguac

SEQ ID NO: 2156136 - RNA, 19 nt, Homo sapiens
  misc_RNA (1)...(19): siRNA sense strand
cagggacucuacugugguu

SEQ ID NO: 2156137 - RNA, 19 nt, Homo sapiens
  misc_RNA (1)...(19): siRNA sense strand
uguccuauuugcacugaaa

SEQ ID NO: 2156138 - RNA, 19 nt, Homo sapiens
  misc_RNA (1)...(19): siRNA sense strand
ccaaugaguucugcaacag

SEQ ID NO: 2156139 - RNA, 19 nt, Homo sapiens
  misc_RNA (1)...(19): siRNA sense strand
caauggacauaaacgugau

SEQ ID NO: 2156140 - RNA, 19 nt, Homo sapiens
  misc_RNA (1)...(19): siRNA sense strand
cuggauggcuaccucuuga

SEQ ID NO: 2156141 - RNA, 19 nt, Homo sapiens
  misc_RNA (1)...(19): siRNA sense strand
ugugaacagugcaaagguu

SEQ ID NO: 2156142 - RNA, 19 nt, Homo sapiens
  misc_RNA (1)...(19): siRNA sense strand
gcauggugcuguguacgau

SEQ ID NO: 2156143 - RNA, 19 nt, Homo sapiens
  misc_RNA (1)...(19): siRNA sense strand
ggaauuucagccagaagga

SEQ ID NO: 2156144 - RNA, 19 nt, Homo sapiens
  misc_RNA (1)...(19): siRNA sense strand
caucaagccaguccuuugu

SEQ ID NO: 2156145 - RNA, 19 nt, Homo sapiens
  misc_RNA (1)...(19): siRNA sense strand
gggagccucagcagaauug

SEQ ID NO: 2156146 - RNA, 19 nt, Homo sapiens
  misc_RNA (1)...(19): siRNA sense strand
gcaauaagcagugcauucc

SEQ ID NO: 2156147 - RNA, 19 nt, Homo sapiens
  misc_RNA (1)...(19): siRNA sense strand
agacaucaaaguaugcaaa

SEQ ID NO: 2156148 - RNA, 19 nt, Homo sapiens
  misc_RNA (1)...(19): siRNA sense strand
gaauuucagccagaaggaa

SEQ ID NO: 2156149 - RNA, 19 nt, Homo sapiens
  misc_RNA (1)...(19): siRNA sense strand
ugaauguccaguccauaaa

SEQ ID NO: 2156150 - RNA, 19 nt, Homo sapiens
  misc_RNA (1)...(19): siRNA sense strand
ugguggagauggaaacuuc

SEQ ID NO: 2156151 - RNA, 19 nt, Homo sapiens
  misc_RNA (1)...(19): siRNA sense strand
uuugggagcugccucuuuc

SEQ ID NO: 2156152 - RNA, 19 nt, Homo sapiens
  misc_RNA (1)...(19): siRNA sense strand
uaucaauuguaccaucugu

SEQ ID NO: 2156153 - RNA, 19 nt, Homo sapiens
  misc_RNA (1)...(19): siRNA sense strand
ccacuguccagcaaacuug

SEQ ID NO: 2156154 - RNA, 19 nt, Homo sapiens
  misc_RNA (1)...(19): siRNA sense strand
gagagagggcaucaaaguc

SEQ ID NO: 2156155 - RNA, 19 nt, Homo sapiens
  misc_RNA (1)...(19): siRNA sense strand
agagagagggcaucaaagu

SEQ ID NO: 2156156 - RNA, 19 nt, Homo sapiens
  misc_RNA (1)...(19): siRNA sense strand
uaaugugugucugcuugaa

SEQ ID NO: 2156157 - RNA, 19 nt, Homo sapiens
  misc_RNA (1)...(19): siRNA sense strand
gaagagucaugguguguaa

SEQ ID NO: 2156158 - RNA, 19 nt, Homo sapiens
  misc_RNA (1)...(19): siRNA sense strand
gaaagcagccgaagaagug

SEQ ID NO: 2156159 - RNA, 19 nt, Homo sapiens
  misc_RNA (1)...(19): siRNA sense strand
ccacugagauacacaaaga

SEQ ID NO: 2156160 - RNA, 19 nt, Homo sapiens
  misc_RNA (1)...(19): siRNA sense strand
gcaguuugcucaguuugua

SEQ ID NO: 2156161 - RNA, 19 nt, Homo sapiens
  misc_RNA (1)...(19): siRNA sense strand
gaguauggaugauuaugaa

SEQ ID NO: 2156162 - RNA, 19 nt, Homo sapiens
  misc_RNA (1)...(19): siRNA sense strand
ugaaagcugugaaggauug

SEQ ID NO: 2156163 - RNA, 19 nt, Homo sapiens
  misc_RNA (1)...(19): siRNA sense strand
gcaacuuacuaacaucaaa

SEQ ID NO: 2156164 - RNA, 19 nt, Homo sapiens
  misc_RNA (1)...(19): siRNA sense strand
gaguuugacuuuauggaaa

SEQ ID NO: 2156165 - RNA, 19 nt, Homo sapiens
  misc_RNA (1)...(19): siRNA sense strand
auaauggacuugauuggua

SEQ ID NO: 2156166 - RNA, 19 nt, Homo sapiens
  misc_RNA (1)...(19): siRNA sense strand
gcacuucggcccauuguga

SEQ ID NO: 2156167 - RNA, 19 nt, Homo sapiens
  misc_RNA (1)...(19): siRNA sense strand
ccaagaagaacuuauagaa

SEQ ID NO: 2156168 - RNA, 19 nt, Homo sapiens
  misc_RNA (1)...(19): siRNA sense strand
cgugaaagcuucucauauc

SEQ ID NO: 2156169 - RNA, 19 nt, Homo sapiens
  misc_RNA (1)...(19): siRNA sense strand
uuacucagauugcaucauu

SEQ ID NO: 2156170 - RNA, 19 nt, Homo sapiens
  misc_RNA (1)...(19): siRNA sense strand
cagauugcaucauuauuug

SEQ ID NO: 2156171 - RNA, 19 nt, Homo sapiens
  misc_RNA (1)...(19): siRNA sense strand
ggaaaacucccuuauguaa

SEQ ID NO: 2156172 - RNA, 19 nt, Homo sapiens
  misc_RNA (1)...(19): siRNA sense strand
gcaguaugccugaaauuug

SEQ ID NO: 2156173 - RNA, 19 nt, Homo sapiens
  misc_RNA (1)...(19): siRNA sense strand
cagcggaguuugacuuuau

SEQ ID NO: 2156174 - RNA, 19 nt, Homo sapiens
  misc_RNA (1)...(19): siRNA sense strand
gaccagggacuauauuauu

SEQ ID NO: 2156175 - RNA, 19 nt, Homo sapiens
  misc_RNA (1)...(19): siRNA sense strand
gaacuuauagaauggauca

SEQ ID NO: 2156176 - RNA, 19 nt, Homo sapiens
  misc_RNA (1)...(19): siRNA sense strand
caaacccaguggaauauug

SEQ ID NO: 2156177 - RNA, 19 nt, Homo sapiens
  misc_RNA (1)...(19): siRNA sense strand
gggacuauauuauuccuau

SEQ ID NO: 2156178 - RNA, 19 nt, Homo sapiens
  misc_RNA (1)...(19): siRNA sense strand
ggagcuggcugccuguaga

SEQ ID NO: 2156179 - RNA, 19 nt, Homo sapiens
  misc_RNA (1)...(19): siRNA sense strand
aauggaguauggaugauua

SEQ ID NO: 2156180 - RNA, 19 nt, Homo sapiens
  misc_RNA (1)...(19): siRNA sense strand
gaaagcuucucauauccau

SEQ ID NO: 2156181 - RNA, 19 nt, Homo sapiens
  misc_RNA (1)...(19): siRNA sense strand
gggagauccugcuugcuuu

SEQ ID NO: 2156182 - RNA, 19 nt, Homo sapiens
  misc_RNA (1)...(19): siRNA sense strand
gaagugaagcgagaacuga

SEQ ID NO: 2156183 - RNA, 19 nt, Homo sapiens
  misc_RNA (1)...(19): siRNA sense strand
gcagcaaugucaauacaag

SEQ ID NO: 2156184 - RNA, 19 nt, Homo sapiens
  misc_RNA (1)...(19): siRNA sense strand
gcagcggaguuugacuuua

SEQ ID NO: 2156185 - RNA, 19 nt, Homo sapiens
  misc_RNA (1)...(19): siRNA sense strand
cuucagauguugcuaguga

SEQ ID NO: 2156186 - RNA, 19 nt, Homo sapiens
  misc_RNA (1)...(19): siRNA sense strand
ggaacugucauacuuaaau

SEQ ID NO: 2156187 - RNA, 19 nt, Homo sapiens
  misc_RNA (1)...(19): siRNA sense strand
gcauauacagcccuuggua

SEQ ID NO: 2156188 - RNA, 19 nt, Homo sapiens
  misc_RNA (1)...(19): siRNA sense strand
aaacaacagacacauguaa

SEQ ID NO: 2156189 - RNA, 19 nt, Homo sapiens
  misc_RNA (1)...(19): siRNA sense strand
gagauacacaaagacauua

SEQ ID NO: 2156190 - RNA, 19 nt, Homo sapiens
  misc_RNA (1)...(19): siRNA sense strand
ucacugaucugcucaagac

SEQ ID NO: 2156191 - RNA, 19 nt, Homo sapiens
  misc_RNA (1)...(19): siRNA sense strand
ggaguauggaugauuauga

SEQ ID NO: 2156192 - RNA, 19 nt, Homo sapiens
  misc_RNA (1)...(19): siRNA sense strand
uuacaaaguccuagaaguu

SEQ ID NO: 2156193 - RNA, 19 nt, Homo sapiens
  misc_RNA (1)...(19): siRNA sense strand
uauguaaccucuuggugaa

SEQ ID NO: 2156194 - RNA, 19 nt, Homo sapiens
  misc_RNA (1)...(19): siRNA sense strand
caacagacacauguaagaa

SEQ ID NO: 2156195 - RNA, 19 nt, Homo sapiens
  misc_RNA (1)...(19): siRNA sense strand
cauauuggcaacuuacuaa

SEQ ID NO: 2156196 - RNA, 19 nt, Homo sapiens
  misc_RNA (1)...(19): siRNA sense strand
uauauuagcagcaauguca

SEQ ID NO: 2156197 - RNA, 19 nt, Homo sapiens
  misc_RNA (1)...(19): siRNA sense strand
guaccggauuuauaccaaa

SEQ ID NO: 2156198 - RNA, 19 nt, Homo sapiens
  misc_RNA (1)...(19): siRNA sense strand
gaacuccccuccccacuug

SEQ ID NO: 2156199 - RNA, 19 nt, Homo sapiens
  misc_RNA (1)...(19): siRNA sense strand
gaucauggagagcugguuu

SEQ ID NO: 2156200 - RNA, 19 nt, Homo sapiens
  misc_RNA (1)...(19): siRNA sense strand
ggaguuugacuuuauggaa

SEQ ID NO: 2156201 - RNA, 19 nt, Homo sapiens
  misc_RNA (1)...(19): siRNA sense strand
ugauuucucuugcacuuug

SEQ ID NO: 2156202 - RNA, 19 nt, Homo sapiens
  misc_RNA (1)...(19): siRNA sense strand
ucauauccauuucuuguuc

SEQ ID NO: 2156203 - RNA, 19 nt, Homo sapiens
  misc_RNA (1)...(19): siRNA sense strand
aauacaagguucagcaaau

SEQ ID NO: 2156204 - RNA, 19 nt, Homo sapiens
  misc_RNA (1)...(19): siRNA sense strand
ggaaagcagccgaagaagu

SEQ ID NO: 2156205 - RNA, 19 nt, Homo sapiens
  misc_RNA (1)...(19): siRNA sense strand
guuaagcucucugcacuuc

SEQ ID NO: 2156206 - RNA, 19 nt, Homo sapiens
  misc_RNA (1)...(19): siRNA sense strand
uaauggacuugauugguau

SEQ ID NO: 2156207 - RNA, 19 nt, Homo sapiens
  misc_RNA (1)...(19): siRNA sense strand
gcuagugacucauauucuc

SEQ ID NO: 2156208 - RNA, 19 nt, Homo sapiens
  misc_RNA (1)...(19): siRNA sense strand
aagauauguuggacgguua

SEQ ID NO: 2156209 - RNA, 19 nt, Homo sapiens
  misc_RNA (1)...(19): siRNA sense strand
ugagauacacaaagacauu

SEQ ID NO: 2156210 - RNA, 19 nt, Homo sapiens
  misc_RNA (1)...(19): siRNA sense strand
cggaagaucauuuauauac

SEQ ID NO: 2156211 - RNA, 19 nt, Homo sapiens
  misc_RNA (1)...(19): siRNA sense strand
cugcaaacccaguggaaua

SEQ ID NO: 2156212 - RNA, 19 nt, Homo sapiens
  misc_RNA (1)...(19): siRNA sense strand
uagcagcaaugucaauaca

SEQ ID NO: 2156213 - RNA, 19 nt, Homo sapiens
  misc_RNA (1)...(19): siRNA sense strand
caugauuucucuugcacuu

SEQ ID NO: 2156214 - RNA, 19 nt, Homo sapiens
  misc_RNA (1)...(19): siRNA sense strand
gcucaguuuguacuucuua

SEQ ID NO: 2156215 - RNA, 19 nt, Homo sapiens
  misc_RNA (1)...(19): siRNA sense strand
caaaguccuagaaguugua

SEQ ID NO: 2156216 - RNA, 19 nt, Homo sapiens
  misc_RNA (1)...(19): siRNA sense strand
uguagaagauccugccaau

SEQ ID NO: 2156217 - RNA, 19 nt, Homo sapiens
  misc_RNA (1)...(19): siRNA sense strand
guugucggguacauugaua

SEQ ID NO: 2156218 - RNA, 19 nt, Homo sapiens
  misc_RNA (1)...(19): siRNA sense strand
gauggcauuauucuucaua

SEQ ID NO: 2156219 - RNA, 19 nt, Homo sapiens
  misc_RNA (1)...(19): siRNA sense strand
gcauugcaauuguuagcau

SEQ ID NO: 2156220 - RNA, 19 nt, Homo sapiens
  misc_RNA (1)...(19): siRNA sense strand
ggagaguguacccguguaa

SEQ ID NO: 2156221 - RNA, 19 nt, Homo sapiens
  misc_RNA (1)...(19): siRNA sense strand
gaauggaguauggaugauu

SEQ ID NO: 2156222 - RNA, 19 nt, Homo sapiens
  misc_RNA (1)...(19): siRNA sense strand
gccaguugguaccggauuu

SEQ ID NO: 2156223 - RNA, 19 nt, Homo sapiens
  misc_RNA (1)...(19): siRNA sense strand
ucacuucaccacuguauuc

SEQ ID NO: 2156224 - RNA, 19 nt, Homo sapiens
  misc_RNA (1)...(19): siRNA sense strand
caguaugccugaaauuugg

SEQ ID NO: 2156225 - RNA, 19 nt, Homo sapiens
  misc_RNA (1)...(19): siRNA sense strand
agaagaacuuauagaaugg

SEQ ID NO: 2156226 - RNA, 19 nt, Homo sapiens
  misc_RNA (1)...(19): siRNA sense strand
ugucuuagcuaaacaacag

SEQ ID NO: 2156227 - RNA, 19 nt, Homo sapiens
  misc_RNA (1)...(19): siRNA sense strand
cauuauugcuuccaguugu

SEQ ID NO: 2156228 - RNA, 19 nt, Homo sapiens
  misc_RNA (1)...(19): siRNA sense strand
gacaccaccucuccgugaa

SEQ ID NO: 2156229 - RNA, 19 nt, Homo sapiens
  misc_RNA (1)...(19): siRNA sense strand
uuucaagacuauuguggaa

SEQ ID NO: 2156230 - RNA, 19 nt, Homo sapiens
  misc_RNA (1)...(19): siRNA sense strand
uagaagauccugccaaugc

SEQ ID NO: 2156231 - RNA, 19 nt, Homo sapiens
  misc_RNA (1)...(19): siRNA sense strand
gugaagcgagaacugauaa

SEQ ID NO: 2156232 - RNA, 19 nt, Homo sapiens
  misc_RNA (1)...(19): siRNA sense strand
ugaagacgcaggcuugaga

SEQ ID NO: 2156233 - RNA, 19 nt, Homo sapiens
  misc_RNA (1)...(19): siRNA sense strand
cauugcaauuguuagcaua

SEQ ID NO: 2156234 - RNA, 19 nt, Homo sapiens
  misc_RNA (1)...(19): siRNA sense strand
uaaacaacagacacaugua

SEQ ID NO: 2156235 - RNA, 19 nt, Homo sapiens
  misc_RNA (1)...(19): siRNA sense strand
cuaaacaacagacacaugu

SEQ ID NO: 2156236 - RNA, 19 nt, Homo sapiens
  misc_RNA (1)...(19): siRNA sense strand
aagcuucucauauccauuu

SEQ ID NO: 2156237 - RNA, 19 nt, Homo sapiens
  misc_RNA (1)...(19): siRNA sense strand
ugaaugauaaacugacuga

SEQ ID NO: 2156238 - RNA, 19 nt, Homo sapiens
  misc_RNA (1)...(19): siRNA sense strand
gaucugcucaagacagcua

SEQ ID NO: 2156239 - RNA, 19 nt, Homo sapiens
  misc_RNA (1)...(19): siRNA sense strand
gcuuccaguuguucuugua

SEQ ID NO: 2156240 - RNA, 19 nt, Homo sapiens
  misc_RNA (1)...(19): siRNA sense strand
uuugggaacucaauguuau

SEQ ID NO: 2156241 - RNA, 19 nt, Homo sapiens
  misc_RNA (1)...(19): siRNA sense strand
ucggguacauugauauaug

SEQ ID NO: 2156242 - RNA, 19 nt, Homo sapiens
  misc_RNA (1)...(19): siRNA sense strand
uguggaagcacccucauuu

SEQ ID NO: 2156243 - RNA, 19 nt, Homo sapiens
  misc_RNA (1)...(19): siRNA sense strand
gguauucaaaccaagauau

SEQ ID NO: 2156244 - RNA, 19 nt, Homo sapiens
  misc_RNA (1)...(19): siRNA sense strand
gaagcgagaacugauaaag

SEQ ID NO: 2156245 - RNA, 19 nt, Homo sapiens
  misc_RNA (1)...(19): siRNA sense strand
gcaaugucaauacaagguu

SEQ ID NO: 2156246 - RNA, 19 nt, Homo sapiens
  misc_RNA (1)...(19): siRNA sense strand
uaggaggccugguuacagu

SEQ ID NO: 2156247 - RNA, 19 nt, Homo sapiens
  misc_RNA (1)...(19): siRNA sense strand
uagaccagggacuauauua

SEQ ID NO: 2156248 - RNA, 19 nt, Homo sapiens
  misc_RNA (1)...(19): siRNA sense strand
guacuucuuacucagauug

SEQ ID NO: 2156249 - RNA, 19 nt, Homo sapiens
  misc_RNA (1)...(19): siRNA sense strand
ggugaaggauuccaaaccu

SEQ ID NO: 2156250 - RNA, 19 nt, Homo sapiens
  misc_RNA (1)...(19): siRNA sense strand
gucaugguguguaagaaga

SEQ ID NO: 2156251 - RNA, 19 nt, Homo sapiens
  misc_RNA (1)...(19): siRNA sense strand
gcaaacccaguggaauauu

SEQ ID NO: 2156252 - RNA, 19 nt, Homo sapiens
  misc_RNA (1)...(19): siRNA sense strand
aaaagagacuccacugaga

SEQ ID NO: 2156253 - RNA, 19 nt, Homo sapiens
  misc_RNA (1)...(19): siRNA sense strand
uuggaacugucauacuuaa

SEQ ID NO: 2156254 - RNA, 19 nt, Homo sapiens
  misc_RNA (1)...(19): siRNA sense strand
guuugggaacucaauguua

SEQ ID NO: 2156255 - RNA, 19 nt, Homo sapiens
  misc_RNA (1)...(19): siRNA sense strand
gcuaaacaacagacacaug

SEQ ID NO: 2156256 - RNA, 19 nt, Homo sapiens
  misc_RNA (1)...(19): siRNA sense strand
aagagacuccacugagaua

SEQ ID NO: 2156257 - RNA, 19 nt, Homo sapiens
  misc_RNA (1)...(19): siRNA sense strand
gaagagucaugguguguaa

SEQ ID NO: 2156258 - RNA, 19 nt, Homo sapiens
  misc_RNA (1)...(19): siRNA sense strand
gaaagcagccgaagaagug

SEQ ID NO: 2156259 - RNA, 19 nt, Homo sapiens
  misc_RNA (1)...(19): siRNA sense strand
ccacugagauacacaaaga

SEQ ID NO: 2156260 - RNA, 19 nt, Homo sapiens
  misc_RNA (1)...(19): siRNA sense strand
gcaguuugcucaguuugua

SEQ ID NO: 2156261 - RNA, 19 nt, Homo sapiens
  misc_RNA (1)...(19): siRNA sense strand
gaguauggaugauuaugaa

SEQ ID NO: 2156262 - RNA, 19 nt, Homo sapiens
  misc_RNA (1)...(19): siRNA sense strand
ugaaagcugugaaggauug

SEQ ID NO: 2156263 - RNA, 19 nt, Homo sapiens
  misc_RNA (1)...(19): siRNA sense strand
gcaacuuacuaacaucaaa

SEQ ID NO: 2156264 - RNA, 19 nt, Homo sapiens
  misc_RNA (1)...(19): siRNA sense strand
gaguuugacuuuauggaaa

SEQ ID NO: 2156265 - RNA, 19 nt, Homo sapiens
  misc_RNA (1)...(19): siRNA sense strand
auaauggacuugauuggua

SEQ ID NO: 2156266 - RNA, 19 nt, Homo sapiens
  misc_RNA (1)...(19): siRNA sense strand
gcacuucggcccauuguga

SEQ ID NO: 2156267 - RNA, 19 nt, Homo sapiens
  misc_RNA (1)...(19): siRNA sense strand
ccaagaagaacuuauagaa

SEQ ID NO: 2156268 - RNA, 19 nt, Homo sapiens
  misc_RNA (1)...(19): siRNA sense strand
cgugaaagcuucucauauc

SEQ ID NO: 2156269 - RNA, 19 nt, Homo sapiens
  misc_RNA (1)...(19): siRNA sense strand
uuacucagauugcaucauu

SEQ ID NO: 2156270 - RNA, 19 nt, Homo sapiens
  misc_RNA (1)...(19): siRNA sense strand
cagauugcaucauuauuug

SEQ ID NO: 2156271 - RNA, 19 nt, Homo sapiens
  misc_RNA (1)...(19): siRNA sense strand
ggaaaacucccuuauguaa

SEQ ID NO: 2156272 - RNA, 19 nt, Homo sapiens
  misc_RNA (1)...(19): siRNA sense strand
gcaguaugccugaaauuug

SEQ ID NO: 2156273 - RNA, 19 nt, Homo sapiens
  misc_RNA (1)...(19): siRNA sense strand
cagcggaguuugacuuuau

SEQ ID NO: 2156274 - RNA, 19 nt, Homo sapiens
  misc_RNA (1)...(19): siRNA sense strand
gaccagggacuauauuauu

SEQ ID NO: 2156275 - RNA, 19 nt, Homo sapiens
  misc_RNA (1)...(19): siRNA sense strand
gaacuuauagaauggauca

SEQ ID NO: 2156276 - RNA, 19 nt, Homo sapiens
  misc_RNA (1)...(19): siRNA sense strand
caaacccaguggaauauug

SEQ ID NO: 2156277 - RNA, 19 nt, Homo sapiens
  misc_RNA (1)...(19): siRNA sense strand
gggacuauauuauuccuau

SEQ ID NO: 2156278 - RNA, 19 nt, Homo sapiens
  misc_RNA (1)...(19): siRNA sense strand
ggagcuggcugccuguaga

SEQ ID NO: 2156279 - RNA, 19 nt, Homo sapiens
  misc_RNA (1)...(19): siRNA sense strand
aauggaguauggaugauua

SEQ ID NO: 2156280 - RNA, 19 nt, Homo sapiens
  misc_RNA (1)...(19): siRNA sense strand
gaaagcuucucauauccau

SEQ ID NO: 2156281 - RNA, 19 nt, Homo sapiens
  misc_RNA (1)...(19): siRNA sense strand
gggagauccugcuugcuuu

SEQ ID NO: 2156282 - RNA, 19 nt, Homo sapiens
  misc_RNA (1)...(19): siRNA sense strand
gaagugaagcgagaacuga

SEQ ID NO: 2156283 - RNA, 19 nt, Homo sapiens
  misc_RNA (1)...(19): siRNA sense strand
gcagcaaugucaauacaag

SEQ ID NO: 2156284 - RNA, 19 nt, Homo sapiens
  misc_RNA (1)...(19): siRNA sense strand
gcagcggaguuugacuuua

SEQ ID NO: 2156285 - RNA, 19 nt, Homo sapiens
  misc_RNA (1)...(19): siRNA sense strand
cuucagauguugcuaguga

SEQ ID NO: 2156286 - RNA, 19 nt, Homo sapiens
  misc_RNA (1)...(19): siRNA sense strand
ggaacugucauacuuaaau

SEQ ID NO: 2156287 - RNA, 19 nt, Homo sapiens
  misc_RNA (1)...(19): siRNA sense strand
gcauauacagcccuuggua

SEQ ID NO: 2156288 - RNA, 19 nt, Homo sapiens
  misc_RNA (1)...(19): siRNA sense strand
aaacaacagacacauguaa

SEQ ID NO: 2156289 - RNA, 19 nt, Homo sapiens
  misc_RNA (1)...(19): siRNA sense strand
gagauacacaaagacauua

SEQ ID NO: 2156290 - RNA, 19 nt, Homo sapiens
  misc_RNA (1)...(19): siRNA sense strand
ucacugaucugcucaagac

SEQ ID NO: 2156291 - RNA, 19 nt, Homo sapiens
  misc_RNA (1)...(19): siRNA sense strand
ggaguauggaugauuauga

SEQ ID NO: 2156292 - RNA, 19 nt, Homo sapiens
  misc_RNA (1)...(19): siRNA sense strand
uuacaaaguccuagaaguu

SEQ ID NO: 2156293 - RNA, 19 nt, Homo sapiens
  misc_RNA (1)...(19): siRNA sense strand
uauguaaccucuuggugaa

SEQ ID NO: 2156294 - RNA, 19 nt, Homo sapiens
  misc_RNA (1)...(19): siRNA sense strand
caacagacacauguaagaa

SEQ ID NO: 2156295 - RNA, 19 nt, Homo sapiens
  misc_RNA (1)...(19): siRNA sense strand
cauauuggcaacuuacuaa

SEQ ID NO: 2156296 - RNA, 19 nt, Homo sapiens
  misc_RNA (1)...(19): siRNA sense strand
uauauuagcagcaauguca

SEQ ID NO: 2156297 - RNA, 19 nt, Homo sapiens
  misc_RNA (1)...(19): siRNA sense strand
guaccggauuuauaccaaa

SEQ ID NO: 2156298 - RNA, 19 nt, Homo sapiens
  misc_RNA (1)...(19): siRNA sense strand
gaacuccccuccccacuug

SEQ ID NO: 2156299 - RNA, 19 nt, Homo sapiens
  misc_RNA (1)...(19): siRNA sense strand
gaucauggagagcugguuu

SEQ ID NO: 2156300 - RNA, 19 nt, Homo sapiens
  misc_RNA (1)...(19): siRNA sense strand
ggaguuugacuuuauggaa

SEQ ID NO: 2156301 - RNA, 19 nt, Homo sapiens
  misc_RNA (1)...(19): siRNA sense strand
ugauuucucuugcacuuug

SEQ ID NO: 2156302 - RNA, 19 nt, Homo sapiens
  misc_RNA (1)...(19): siRNA sense strand
ucauauccauuucuuguuc

SEQ ID NO: 2156303 - RNA, 19 nt, Homo sapiens
  misc_RNA (1)...(19): siRNA sense strand
aauacaagguucagcaaau

SEQ ID NO: 2156304 - RNA, 19 nt, Homo sapiens
  misc_RNA (1)...(19): siRNA sense strand
ggaaagcagccgaagaagu

SEQ ID NO: 2156305 - RNA, 19 nt, Homo sapiens
  misc_RNA (1)...(19): siRNA sense strand
guuaagcucucugcacuuc

SEQ ID NO: 2156306 - RNA, 19 nt, Homo sapiens
  misc_RNA (1)...(19): siRNA sense strand
uaauggacuugauugguau

SEQ ID NO: 2156307 - RNA, 19 nt, Homo sapiens
  misc_RNA (1)...(19): siRNA sense strand
gcuagugacucauauucuc

SEQ ID NO: 2156308 - RNA, 19 nt, Homo sapiens
  misc_RNA (1)...(19): siRNA sense strand
aagauauguuggacgguua

SEQ ID NO: 2156309 - RNA, 19 nt, Homo sapiens
  misc_RNA (1)...(19): siRNA sense strand
ugagauacacaaagacauu

SEQ ID NO: 2156310 - RNA, 19 nt, Homo sapiens
  misc_RNA (1)...(19): siRNA sense strand
cggaagaucauuuauauac

SEQ ID NO: 2156311 - RNA, 19 nt, Homo sapiens
  misc_RNA (1)...(19): siRNA sense strand
cugcaaacccaguggaaua

SEQ ID NO: 2156312 - RNA, 19 nt, Homo sapiens
  misc_RNA (1)...(19): siRNA sense strand
uagcagcaaugucaauaca

SEQ ID NO: 2156313 - RNA, 19 nt, Homo sapiens
  misc_RNA (1)...(19): siRNA sense strand
caugauuucucuugcacuu

SEQ ID NO: 2156314 - RNA, 19 nt, Homo sapiens
  misc_RNA (1)...(19): siRNA sense strand
gcucaguuuguacuucuua

SEQ ID NO: 2156315 - RNA, 19 nt, Homo sapiens
  misc_RNA (1)...(19): siRNA sense strand
caaaguccuagaaguugua

SEQ ID NO: 2156316 - RNA, 19 nt, Homo sapiens
  misc_RNA (1)...(19): siRNA sense strand
uguagaagauccugccaau

SEQ ID NO: 2156317 - RNA, 19 nt, Homo sapiens
  misc_RNA (1)...(19): siRNA sense strand
guugucggguacauugaua

SEQ ID NO: 2156318 - RNA, 19 nt, Homo sapiens
  misc_RNA (1)...(19): siRNA sense strand
gauggcauuauucuucaua

SEQ ID NO: 2156319 - RNA, 19 nt, Homo sapiens
  misc_RNA (1)...(19): siRNA sense strand
gcauugcaauuguuagcau

SEQ ID NO: 2156320 - RNA, 19 nt, Homo sapiens
  misc_RNA (1)...(19): siRNA sense strand
ggagaguguacccguguaa

SEQ ID NO: 2156321 - RNA, 19 nt, Homo sapiens
  misc_RNA (1)...(19): siRNA sense strand
gaauggaguauggaugauu

SEQ ID NO: 2156322 - RNA, 19 nt, Homo sapiens
  misc_RNA (1)...(19): siRNA sense strand
gccaguugguaccggauuu

SEQ ID NO: 2156323 - RNA, 19 nt, Homo sapiens
  misc_RNA (1)...(19): siRNA sense strand
ucacuucaccacuguauuc

SEQ ID NO: 2156324 - RNA, 19 nt, Homo sapiens
  misc_RNA (1)...(19): siRNA sense strand
caguaugccugaaauuugg

SEQ ID NO: 2156325 - RNA, 19 nt, Homo sapiens
  misc_RNA (1)...(19): siRNA sense strand
agaagaacuuauagaaugg

SEQ ID NO: 2156326 - RNA, 19 nt, Homo sapiens
  misc_RNA (1)...(19): siRNA sense strand
ugucuuagcuaaacaacag

SEQ ID NO: 2156327 - RNA, 19 nt, Homo sapiens
  misc_RNA (1)...(19): siRNA sense strand
cauuauugcuuccaguugu

SEQ ID NO: 2156328 - RNA, 19 nt, Homo sapiens
  misc_RNA (1)...(19): siRNA sense strand
gacaccaccucuccgugaa

SEQ ID NO: 2156329 - RNA, 19 nt, Homo sapiens
  misc_RNA (1)...(19): siRNA sense strand
uuucaagacuauuguggaa

SEQ ID NO: 2156330 - RNA, 19 nt, Homo sapiens
  misc_RNA (1)...(19): siRNA sense strand
uagaagauccugccaaugc

SEQ ID NO: 2156331 - RNA, 19 nt, Homo sapiens
  misc_RNA (1)...(19): siRNA sense strand
gugaagcgagaacugauaa

SEQ ID NO: 2156332 - RNA, 19 nt, Homo sapiens
  misc_RNA (1)...(19): siRNA sense strand
ugaagacgcaggcuugaga

SEQ ID NO: 2156333 - RNA, 19 nt, Homo sapiens
  misc_RNA (1)...(19): siRNA sense strand
cauugcaauuguuagcaua

SEQ ID NO: 2156334 - RNA, 19 nt, Homo sapiens
  misc_RNA (1)...(19): siRNA sense strand
uaaacaacagacacaugua

SEQ ID NO: 2156335 - RNA, 19 nt, Homo sapiens
  misc_RNA (1)...(19): siRNA sense strand
cuaaacaacagacacaugu

SEQ ID NO: 2156336 - RNA, 19 nt, Homo sapiens
  misc_RNA (1)...(19): siRNA sense strand
aagcuucucauauccauuu

SEQ ID NO: 2156337 - RNA, 19 nt, Homo sapiens
  misc_RNA (1)...(19): siRNA sense strand
ugaaugauaaacugacuga

SEQ ID NO: 2156338 - RNA, 19 nt, Homo sapiens
  misc_RNA (1)...(19): siRNA sense strand
gaucugcucaagacagcua

SEQ ID NO: 2156339 - RNA, 19 nt, Homo sapiens
  misc_RNA (1)...(19): siRNA sense strand
gcuuccaguuguucuugua

SEQ ID NO: 2156340 - RNA, 19 nt, Homo sapiens
  misc_RNA (1)...(19): siRNA sense strand
uuugggaacucaauguuau

SEQ ID NO: 2156341 - RNA, 19 nt, Homo sapiens
  misc_RNA (1)...(19): siRNA sense strand
ucggguacauugauauaug

SEQ ID NO: 2156342 - RNA, 19 nt, Homo sapiens
  misc_RNA (1)...(19): siRNA sense strand
uguggaagcacccucauuu

SEQ ID NO: 2156343 - RNA, 19 nt, Homo sapiens
  misc_RNA (1)...(19): siRNA sense strand
gguauucaaaccaagauau

SEQ ID NO: 2156344 - RNA, 19 nt, Homo sapiens
  misc_RNA (1)...(19): siRNA sense strand
gaagcgagaacugauaaag

SEQ ID NO: 2156345 - RNA, 19 nt, Homo sapiens
  misc_RNA (1)...(19): siRNA sense strand
gcaaugucaauacaagguu

SEQ ID NO: 2156346 - RNA, 19 nt, Homo sapiens
  misc_RNA (1)...(19): siRNA sense strand
uaggaggccugguuacagu

SEQ ID NO: 2156347 - RNA, 19 nt, Homo sapiens
  misc_RNA (1)...(19): siRNA sense strand
uagaccagggacuauauua

SEQ ID NO: 2156348 - RNA, 19 nt, Homo sapiens
  misc_RNA (1)...(19): siRNA sense strand
guacuucuuacucagauug

SEQ ID NO: 2156349 - RNA, 19 nt, Homo sapiens
  misc_RNA (1)...(19): siRNA sense strand
ggugaaggauuccaaaccu

SEQ ID NO: 2156350 - RNA, 19 nt, Homo sapiens
  misc_RNA (1)...(19): siRNA sense strand
gucaugguguguaagaaga

SEQ ID NO: 2156351 - RNA, 19 nt, Homo sapiens
  misc_RNA (1)...(19): siRNA sense strand
gcaaacccaguggaauauu

SEQ ID NO: 2156352 - RNA, 19 nt, Homo sapiens
  misc_RNA (1)...(19): siRNA sense strand
aaaagagacuccacugaga

SEQ ID NO: 2156353 - RNA, 19 nt, Homo sapiens
  misc_RNA (1)...(19): siRNA sense strand
uuggaacugucauacuuaa

SEQ ID NO: 2156354 - RNA, 19 nt, Homo sapiens
  misc_RNA (1)...(19): siRNA sense strand
guuugggaacucaauguua

SEQ ID NO: 2156355 - RNA, 19 nt, Homo sapiens
  misc_RNA (1)...(19): siRNA sense strand
gcuaaacaacagacacaug

SEQ ID NO: 2156356 - RNA, 19 nt, Homo sapiens
  misc_RNA (1)...(19): siRNA sense strand
aagagacuccacugagaua

SEQ ID NO: 2156357 - RNA, 19 nt, Homo sapiens
  misc_RNA (1)...(19): siRNA sense strand
gaagauucauugaucauug

SEQ ID NO: 2156358 - RNA, 19 nt, Homo sapiens
  misc_RNA (1)...(19): siRNA sense strand
ccacgcaucugaccgauuu

SEQ ID NO: 2156359 - RNA, 19 nt, Homo sapiens
  misc_RNA (1)...(19): siRNA sense strand
gcaaaucuccuaacacuuc

SEQ ID NO: 2156360 - RNA, 19 nt, Homo sapiens
  misc_RNA (1)...(19): siRNA sense strand
gcauaguacugccaccuaa

SEQ ID NO: 2156361 - RNA, 19 nt, Homo sapiens
  misc_RNA (1)...(19): siRNA sense strand
gcagaagauucauugauca

SEQ ID NO: 2156362 - RNA, 19 nt, Homo sapiens
  misc_RNA (1)...(19): siRNA sense strand
guaaagaccagguauacuu

SEQ ID NO: 2156363 - RNA, 19 nt, Homo sapiens
  misc_RNA (1)...(19): siRNA sense strand
gcaucugaccgauuucuua

SEQ ID NO: 2156364 - RNA, 19 nt, Homo sapiens
  misc_RNA (1)...(19): siRNA sense strand
uaacacuucucguagcaaa

SEQ ID NO: 2156365 - RNA, 19 nt, Homo sapiens
  misc_RNA (1)...(19): siRNA sense strand
gcaggaccauggccgauau

SEQ ID NO: 2156366 - RNA, 19 nt, Homo sapiens
  misc_RNA (1)...(19): siRNA sense strand
cagcaaaucuccuaacacu

SEQ ID NO: 2156367 - RNA, 19 nt, Homo sapiens
  misc_RNA (1)...(19): siRNA sense strand
gagaagaucauggaaguga

SEQ ID NO: 2156368 - RNA, 19 nt, Homo sapiens
  misc_RNA (1)...(19): siRNA sense strand
ucgggaagguuucuuauga

SEQ ID NO: 2156369 - RNA, 19 nt, Homo sapiens
  misc_RNA (1)...(19): siRNA sense strand
ggauggaauucuucaaauc

SEQ ID NO: 2156370 - RNA, 19 nt, Homo sapiens
  misc_RNA (1)...(19): siRNA sense strand
gucaaguccuguaaaguuu

SEQ ID NO: 2156371 - RNA, 19 nt, Homo sapiens
  misc_RNA (1)...(19): siRNA sense strand
ggaacugaaagaucuuaua

SEQ ID NO: 2156372 - RNA, 19 nt, Homo sapiens
  misc_RNA (1)...(19): siRNA sense strand
cuacuacacuguuuaucaa

SEQ ID NO: 2156373 - RNA, 19 nt, Homo sapiens
  misc_RNA (1)...(19): siRNA sense strand
gagcuaaagccaaauaauc

SEQ ID NO: 2156374 - RNA, 19 nt, Homo sapiens
  misc_RNA (1)...(19): siRNA sense strand
gauauuggcagguuuguca

SEQ ID NO: 2156375 - RNA, 19 nt, Homo sapiens
  misc_RNA (1)...(19): siRNA sense strand
ggaagugaaugaacugacu

SEQ ID NO: 2156376 - RNA, 19 nt, Homo sapiens
  misc_RNA (1)...(19): siRNA sense strand
aagaugggauuauugugua

SEQ ID NO: 2156377 - RNA, 19 nt, Homo sapiens
  misc_RNA (1)...(19): siRNA sense strand
uagagaagaucauggaagu

SEQ ID NO: 2156378 - RNA, 19 nt, Homo sapiens
  misc_RNA (1)...(19): siRNA sense strand
caaccaggguguuuuagua

SEQ ID NO: 2156379 - RNA, 19 nt, Homo sapiens
  misc_RNA (1)...(19): siRNA sense strand
uaaagauauuggcagguuu

SEQ ID NO: 2156380 - RNA, 19 nt, Homo sapiens
  misc_RNA (1)...(19): siRNA sense strand
gaagauguggaucgcuuaa

SEQ ID NO: 2156381 - RNA, 19 nt, Homo sapiens
  misc_RNA (1)...(19): siRNA sense strand
gaaccaguaguuacaaugu

SEQ ID NO: 2156382 - RNA, 19 nt, Homo sapiens
  misc_RNA (1)...(19): siRNA sense strand
uuaaagauauuggcagguu

SEQ ID NO: 2156383 - RNA, 19 nt, Homo sapiens
  misc_RNA (1)...(19): siRNA sense strand
cagcagccauggaacaguu

SEQ ID NO: 2156384 - RNA, 19 nt, Homo sapiens
  misc_RNA (1)...(19): siRNA sense strand
ucacuggccugagcaagaa

SEQ ID NO: 2156385 - RNA, 19 nt, Homo sapiens
  misc_RNA (1)...(19): siRNA sense strand
aacaugagcuaaagccaaa

SEQ ID NO: 2156386 - RNA, 19 nt, Homo sapiens
  misc_RNA (1)...(19): siRNA sense strand
uacagggaauggcauagua

SEQ ID NO: 2156387 - RNA, 19 nt, Homo sapiens
  misc_RNA (1)...(19): siRNA sense strand
gccgauauauggaacacuu

SEQ ID NO: 2156388 - RNA, 19 nt, Homo sapiens
  misc_RNA (1)...(19): siRNA sense strand
uaccuacaauccucaguuu

SEQ ID NO: 2156389 - RNA, 19 nt, Homo sapiens
  misc_RNA (1)...(19): siRNA sense strand
caagaugggauuauugugu

SEQ ID NO: 2156390 - RNA, 19 nt, Homo sapiens
  misc_RNA (1)...(19): siRNA sense strand
uuaagcagauuguaguuca

SEQ ID NO: 2156391 - RNA, 19 nt, Homo sapiens
  misc_RNA (1)...(19): siRNA sense strand
aagaagcauuucacauuug

SEQ ID NO: 2156392 - RNA, 19 nt, Homo sapiens
  misc_RNA (1)...(19): siRNA sense strand
acagggaacugaaagaucu

SEQ ID NO: 2156393 - RNA, 19 nt, Homo sapiens
  misc_RNA (1)...(19): siRNA sense strand
uagcaagcauucacagugu

SEQ ID NO: 2156394 - RNA, 19 nt, Homo sapiens
  misc_RNA (1)...(19): siRNA sense strand
ccaccaacuuagagaaaga

SEQ ID NO: 2156395 - RNA, 19 nt, Homo sapiens
  misc_RNA (1)...(19): siRNA sense strand
acacaugauaucucuguua

SEQ ID NO: 2156396 - RNA, 19 nt, Homo sapiens
  misc_RNA (1)...(19): siRNA sense strand
gggaagguuucuuaugaag

SEQ ID NO: 2156397 - RNA, 19 nt, Homo sapiens
  misc_RNA (1)...(19): siRNA sense strand
gaagaucauggaagugaau

SEQ ID NO: 2156398 - RNA, 19 nt, Homo sapiens
  misc_RNA (1)...(19): siRNA sense strand
caugaaauagguacacauu

SEQ ID NO: 2156399 - RNA, 19 nt, Homo sapiens
  misc_RNA (1)...(19): siRNA sense strand
uuaaaaggauuggcaguua

SEQ ID NO: 2156400 - RNA, 19 nt, Homo sapiens
  misc_RNA (1)...(19): siRNA sense strand
gaaggacuagcaagcauuc

SEQ ID NO: 2156401 - RNA, 19 nt, Homo sapiens
  misc_RNA (1)...(19): siRNA sense strand
ggaaggacuagcaagcauu

SEQ ID NO: 2156402 - RNA, 19 nt, Homo sapiens
  misc_RNA (1)...(19): siRNA sense strand
uggaagcgcugcucacagu

SEQ ID NO: 2156403 - RNA, 19 nt, Homo sapiens
  misc_RNA (1)...(19): siRNA sense strand
uaaagaccagguauacuug

SEQ ID NO: 2156404 - RNA, 19 nt, Homo sapiens
  misc_RNA (1)...(19): siRNA sense strand
gcugaggcaugaaauaggu

SEQ ID NO: 2156405 - RNA, 19 nt, Homo sapiens
  misc_RNA (1)...(19): siRNA sense strand
caucugaccgauuucuuaa

SEQ ID NO: 2156406 - RNA, 19 nt, Homo sapiens
  misc_RNA (1)...(19): siRNA sense strand
ugucaaguccuguaaaguu

SEQ ID NO: 2156407 - RNA, 19 nt, Homo sapiens
  misc_RNA (1)...(19): siRNA sense strand
uauaaaacccaccaacuua

SEQ ID NO: 2156408 - RNA, 19 nt, Homo sapiens
  misc_RNA (1)...(19): siRNA sense strand
auacuuggauggaauucuu

SEQ ID NO: 2156409 - RNA, 19 nt, Homo sapiens
  misc_RNA (1)...(19): siRNA sense strand
ucaaaucugacuauaccua

SEQ ID NO: 2156410 - RNA, 19 nt, Homo sapiens
  misc_RNA (1)...(19): siRNA sense strand
ccacugcacgugagcauug

SEQ ID NO: 2156411 - RNA, 19 nt, Homo sapiens
  misc_RNA (1)...(19): siRNA sense strand
cgggaagguuucuuaugaa

SEQ ID NO: 2156412 - RNA, 19 nt, Homo sapiens
  misc_RNA (1)...(19): siRNA sense strand
ccuacaauccucaguuuga

SEQ ID NO: 2156413 - RNA, 19 nt, Homo sapiens
  misc_RNA (1)...(19): siRNA sense strand
gauuguaguucaucucacu

SEQ ID NO: 2156414 - RNA, 19 nt, Homo sapiens
  misc_RNA (1)...(19): siRNA sense strand
agaagcauuucacauuugu

SEQ ID NO: 2156415 - RNA, 19 nt, Homo sapiens
  misc_RNA (1)...(19): siRNA sense strand
ugcagaagauucauugauc

SEQ ID NO: 2156416 - RNA, 19 nt, Homo sapiens
  misc_RNA (1)...(19): siRNA sense strand
caaugacaguaguaaaugg

SEQ ID NO: 2156417 - RNA, 19 nt, Homo sapiens
  misc_RNA (1)...(19): siRNA sense strand
auacagagauaccauagac

SEQ ID NO: 2156418 - RNA, 19 nt, Homo sapiens
  misc_RNA (1)...(19): siRNA sense strand
caugagcuaaagccaaaua

SEQ ID NO: 2156419 - RNA, 19 nt, Homo sapiens
  misc_RNA (1)...(19): siRNA sense strand
ggaaccaguaguuacaaug

SEQ ID NO: 2156420 - RNA, 19 nt, Homo sapiens
  misc_RNA (1)...(19): siRNA sense strand
uggauggaauucuucaaau

SEQ ID NO: 2156421 - RNA, 19 nt, Homo sapiens
  misc_RNA (1)...(19): siRNA sense strand
uaucaagccagccaaaugu

SEQ ID NO: 2156422 - RNA, 19 nt, Homo sapiens
  misc_RNA (1)...(19): siRNA sense strand
guccgacucugacuaucaa

SEQ ID NO: 2156423 - RNA, 19 nt, Homo sapiens
  misc_RNA (1)...(19): siRNA sense strand
gauguccgacucugacuau

SEQ ID NO: 2156424 - RNA, 19 nt, Homo sapiens
  misc_RNA (1)...(19): siRNA sense strand
uacaauguccuacuacaga

SEQ ID NO: 2156425 - RNA, 19 nt, Homo sapiens
  misc_RNA (1)...(19): siRNA sense strand
cacaugauaucucuguuac

SEQ ID NO: 2156426 - RNA, 19 nt, Homo sapiens
  misc_RNA (1)...(19): siRNA sense strand
ggaccauggccgauauaug

SEQ ID NO: 2156427 - RNA, 19 nt, Homo sapiens
  misc_RNA (1)...(19): siRNA sense strand
gaagcgcugcucacaguca

SEQ ID NO: 2156428 - RNA, 19 nt, Homo sapiens
  misc_RNA (1)...(19): siRNA sense strand
ccaauacaagaugggauua

SEQ ID NO: 2156429 - RNA, 19 nt, Homo sapiens
  misc_RNA (1)...(19): siRNA sense strand
ggacuagcaagcauucaca

SEQ ID NO: 2156430 - RNA, 19 nt, Homo sapiens
  misc_RNA (1)...(19): siRNA sense strand
gaagucuauucuaaaugca

SEQ ID NO: 2156431 - RNA, 19 nt, Homo sapiens
  misc_RNA (1)...(19): siRNA sense strand
guuacaauguccuacuaca

SEQ ID NO: 2156432 - RNA, 19 nt, Homo sapiens
  misc_RNA (1)...(19): siRNA sense strand
gaacacuuagagaagauca

SEQ ID NO: 2156433 - RNA, 19 nt, Homo sapiens
  misc_RNA (1)...(19): siRNA sense strand
acagagauaccauagacuu

SEQ ID NO: 2156434 - RNA, 19 nt, Homo sapiens
  misc_RNA (1)...(19): siRNA sense strand
ucaaauccuccgauacaga

SEQ ID NO: 2156435 - RNA, 19 nt, Homo sapiens
  misc_RNA (1)...(19): siRNA sense strand
gcaagcauucacaguguuc

SEQ ID NO: 2156436 - RNA, 19 nt, Homo sapiens
  misc_RNA (1)...(19): siRNA sense strand
ucaaugacaguaguaaaug

SEQ ID NO: 2156437 - RNA, 19 nt, Homo sapiens
  misc_RNA (1)...(19): siRNA sense strand
cuacagagcaaggaggaaa

SEQ ID NO: 2156438 - RNA, 19 nt, Homo sapiens
  misc_RNA (1)...(19): siRNA sense strand
gagauaccauagacuucca

SEQ ID NO: 2156439 - RNA, 19 nt, Homo sapiens
  misc_RNA (1)...(19): siRNA sense strand
caaagccucagcugucuag

SEQ ID NO: 2156440 - RNA, 19 nt, Homo sapiens
  misc_RNA (1)...(19): siRNA sense strand
agaagaucauggaagugaa

SEQ ID NO: 2156441 - RNA, 19 nt, Homo sapiens
  misc_RNA (1)...(19): siRNA sense strand
ugaagauguggaucgcuua

SEQ ID NO: 2156442 - RNA, 19 nt, Homo sapiens
  misc_RNA (1)...(19): siRNA sense strand
cuucaaauccuccgauaca

SEQ ID NO: 2156443 - RNA, 19 nt, Homo sapiens
  misc_RNA (1)...(19): siRNA sense strand
uuaguaaagaccagguaua

SEQ ID NO: 2156444 - RNA, 19 nt, Homo sapiens
  misc_RNA (1)...(19): siRNA sense strand
aaagauauuggcagguuug

SEQ ID NO: 2156445 - RNA, 19 nt, Homo sapiens
  misc_RNA (1)...(19): siRNA sense strand
aaacccagcaaaucuccua

SEQ ID NO: 2156446 - RNA, 19 nt, Homo sapiens
  misc_RNA (1)...(19): siRNA sense strand
ugacugcucucgggaaggu

SEQ ID NO: 2156447 - RNA, 19 nt, Homo sapiens
  misc_RNA (1)...(19): siRNA sense strand
cgacucugacuaucaaugu

SEQ ID NO: 2156448 - RNA, 19 nt, Homo sapiens
  misc_RNA (1)...(19): siRNA sense strand
ucacugaggaccugcuuuc

SEQ ID NO: 2156449 - RNA, 19 nt, Homo sapiens
  misc_RNA (1)...(19): siRNA sense strand
ugccaagcguauuagcuaa

SEQ ID NO: 2156450 - RNA, 19 nt, Homo sapiens
  misc_RNA (1)...(19): siRNA sense strand
gccaaagccucagcugucu

SEQ ID NO: 2156451 - RNA, 19 nt, Homo sapiens
  misc_RNA (1)...(19): siRNA sense strand
ggucaaguggugccauuuc

SEQ ID NO: 2156452 - RNA, 19 nt, Homo sapiens
  misc_RNA (1)...(19): siRNA sense strand
caaaucuccuaacacuucu

SEQ ID NO: 2156453 - RNA, 19 nt, Homo sapiens
  misc_RNA (1)...(19): siRNA sense strand
aagaggggauggacugaua

SEQ ID NO: 2156454 - RNA, 19 nt, Homo sapiens
  misc_RNA (1)...(19): siRNA sense strand
gauauauggaacacuuaga

SEQ ID NO: 2156455 - RNA, 19 nt, Homo sapiens
  misc_RNA (1)...(19): siRNA sense strand
gauacagagauaccauaga

SEQ ID NO: 2156456 - RNA, 19 nt, Homo sapiens
  misc_RNA (1)...(19): siRNA sense strand
gguauacuuggauggaauu

SEQ ID NO: 2156457 - RNA, 19 nt, Homo sapiens
  misc_RNA (1)...(19): siRNA sense strand
gaagauucauugaucauug

SEQ ID NO: 2156458 - RNA, 19 nt, Homo sapiens
  misc_RNA (1)...(19): siRNA sense strand
ccacgcaucugaccgauuu

SEQ ID NO: 2156459 - RNA, 19 nt, Homo sapiens
  misc_RNA (1)...(19): siRNA sense strand
gcaaaucuccuaacacuuc

SEQ ID NO: 2156460 - RNA, 19 nt, Homo sapiens
  misc_RNA (1)...(19): siRNA sense strand
gcauaguacugccaccuaa

SEQ ID NO: 2156461 - RNA, 19 nt, Homo sapiens
  misc_RNA (1)...(19): siRNA sense strand
gcagaagauucauugauca

SEQ ID NO: 2156462 - RNA, 19 nt, Homo sapiens
  misc_RNA (1)...(19): siRNA sense strand
guaaagaccagguauacuu

SEQ ID NO: 2156463 - RNA, 19 nt, Homo sapiens
  misc_RNA (1)...(19): siRNA sense strand
gcaucugaccgauuucuua

SEQ ID NO: 2156464 - RNA, 19 nt, Homo sapiens
  misc_RNA (1)...(19): siRNA sense strand
uaacacuucucguagcaaa

SEQ ID NO: 2156465 - RNA, 19 nt, Homo sapiens
  misc_RNA (1)...(19): siRNA sense strand
gcaggaccauggccgauau

SEQ ID NO: 2156466 - RNA, 19 nt, Homo sapiens
  misc_RNA (1)...(19): siRNA sense strand
cagcaaaucuccuaacacu

SEQ ID NO: 2156467 - RNA, 19 nt, Homo sapiens
  misc_RNA (1)...(19): siRNA sense strand
gagaagaucauggaaguga

SEQ ID NO: 2156468 - RNA, 19 nt, Homo sapiens
  misc_RNA (1)...(19): siRNA sense strand
ucgggaagguuucuuauga

SEQ ID NO: 2156469 - RNA, 19 nt, Homo sapiens
  misc_RNA (1)...(19): siRNA sense strand
ggauggaauucuucaaauc

SEQ ID NO: 2156470 - RNA, 19 nt, Homo sapiens
  misc_RNA (1)...(19): siRNA sense strand
gucaaguccuguaaaguuu

SEQ ID NO: 2156471 - RNA, 19 nt, Homo sapiens
  misc_RNA (1)...(19): siRNA sense strand
ggaacugaaagaucuuaua

SEQ ID NO: 2156472 - RNA, 19 nt, Homo sapiens
  misc_RNA (1)...(19): siRNA sense strand
cuacuacacuguuuaucaa

SEQ ID NO: 2156473 - RNA, 19 nt, Homo sapiens
  misc_RNA (1)...(19): siRNA sense strand
gagcuaaagccaaauaauc

SEQ ID NO: 2156474 - RNA, 19 nt, Homo sapiens
  misc_RNA (1)...(19): siRNA sense strand
gauauuggcagguuuguca

SEQ ID NO: 2156475 - RNA, 19 nt, Homo sapiens
  misc_RNA (1)...(19): siRNA sense strand
ggaagugaaugaacugacu

SEQ ID NO: 2156476 - RNA, 19 nt, Homo sapiens
  misc_RNA (1)...(19): siRNA sense strand
aagaugggauuauugugua

SEQ ID NO: 2156477 - RNA, 19 nt, Homo sapiens
  misc_RNA (1)...(19): siRNA sense strand
uagagaagaucauggaagu

SEQ ID NO: 2156478 - RNA, 19 nt, Homo sapiens
  misc_RNA (1)...(19): siRNA sense strand
caaccaggguguuuuagua

SEQ ID NO: 2156479 - RNA, 19 nt, Homo sapiens
  misc_RNA (1)...(19): siRNA sense strand
uaaagauauuggcagguuu

SEQ ID NO: 2156480 - RNA, 19 nt, Homo sapiens
  misc_RNA (1)...(19): siRNA sense strand
gaagauguggaucgcuuaa

SEQ ID NO: 2156481 - RNA, 19 nt, Homo sapiens
  misc_RNA (1)...(19): siRNA sense strand
gaaccaguaguuacaaugu

SEQ ID NO: 2156482 - RNA, 19 nt, Homo sapiens
  misc_RNA (1)...(19): siRNA sense strand
uuaaagauauuggcagguu

SEQ ID NO: 2156483 - RNA, 19 nt, Homo sapiens
  misc_RNA (1)...(19): siRNA sense strand
cagcagccauggaacaguu

SEQ ID NO: 2156484 - RNA, 19 nt, Homo sapiens
  misc_RNA (1)...(19): siRNA sense strand
ucacuggccugagcaagaa

SEQ ID NO: 2156485 - RNA, 19 nt, Homo sapiens
  misc_RNA (1)...(19): siRNA sense strand
aacaugagcuaaagccaaa

SEQ ID NO: 2156486 - RNA, 19 nt, Homo sapiens
  misc_RNA (1)...(19): siRNA sense strand
uacagggaauggcauagua

SEQ ID NO: 2156487 - RNA, 19 nt, Homo sapiens
  misc_RNA (1)...(19): siRNA sense strand
gccgauauauggaacacuu

SEQ ID NO: 2156488 - RNA, 19 nt, Homo sapiens
  misc_RNA (1)...(19): siRNA sense strand
uaccuacaauccucaguuu

SEQ ID NO: 2156489 - RNA, 19 nt, Homo sapiens
  misc_RNA (1)...(19): siRNA sense strand
caagaugggauuauugugu

SEQ ID NO: 2156490 - RNA, 19 nt, Homo sapiens
  misc_RNA (1)...(19): siRNA sense strand
uuaagcagauuguaguuca

SEQ ID NO: 2156491 - RNA, 19 nt, Homo sapiens
  misc_RNA (1)...(19): siRNA sense strand
aagaagcauuucacauuug

SEQ ID NO: 2156492 - RNA, 19 nt, Homo sapiens
  misc_RNA (1)...(19): siRNA sense strand
acagggaacugaaagaucu

SEQ ID NO: 2156493 - RNA, 19 nt, Homo sapiens
  misc_RNA (1)...(19): siRNA sense strand
uagcaagcauucacagugu

SEQ ID NO: 2156494 - RNA, 19 nt, Homo sapiens
  misc_RNA (1)...(19): siRNA sense strand
ccaccaacuuagagaaaga

SEQ ID NO: 2156495 - RNA, 19 nt, Homo sapiens
  misc_RNA (1)...(19): siRNA sense strand
acacaugauaucucuguua

SEQ ID NO: 2156496 - RNA, 19 nt, Homo sapiens
  misc_RNA (1)...(19): siRNA sense strand
gggaagguuucuuaugaag

SEQ ID NO: 2156497 - RNA, 19 nt, Homo sapiens
  misc_RNA (1)...(19): siRNA sense strand
gaagaucauggaagugaau

SEQ ID NO: 2156498 - RNA, 19 nt, Homo sapiens
  misc_RNA (1)...(19): siRNA sense strand
caugaaauagguacacauu

SEQ ID NO: 2156499 - RNA, 19 nt, Homo sapiens
  misc_RNA (1)...(19): siRNA sense strand
uuaaaaggauuggcaguua

SEQ ID NO: 2156500 - RNA, 19 nt, Homo sapiens
  misc_RNA (1)...(19): siRNA sense strand
gaaggacuagcaagcauuc

SEQ ID NO: 2156501 - RNA, 19 nt, Homo sapiens
  misc_RNA (1)...(19): siRNA sense strand
ggaaggacuagcaagcauu

SEQ ID NO: 2156502 - RNA, 19 nt, Homo sapiens
  misc_RNA (1)...(19): siRNA sense strand
uggaagcgcugcucacagu

SEQ ID NO: 2156503 - RNA, 19 nt, Homo sapiens
  misc_RNA (1)...(19): siRNA sense strand
uaaagaccagguauacuug

SEQ ID NO: 2156504 - RNA, 19 nt, Homo sapiens
  misc_RNA (1)...(19): siRNA sense strand
gcugaggcaugaaauaggu

SEQ ID NO: 2156505 - RNA, 19 nt, Homo sapiens
  misc_RNA (1)...(19): siRNA sense strand
caucugaccgauuucuuaa

SEQ ID NO: 2156506 - RNA, 19 nt, Homo sapiens
  misc_RNA (1)...(19): siRNA sense strand
ugucaaguccuguaaaguu

SEQ ID NO: 2156507 - RNA, 19 nt, Homo sapiens
  misc_RNA (1)...(19): siRNA sense strand
uauaaaacccaccaacuua

SEQ ID NO: 2156508 - RNA, 19 nt, Homo sapiens
  misc_RNA (1)...(19): siRNA sense strand
auacuuggauggaauucuu

SEQ ID NO: 2156509 - RNA, 19 nt, Homo sapiens
  misc_RNA (1)...(19): siRNA sense strand
ucaaaucugacuauaccua

SEQ ID NO: 2156510 - RNA, 19 nt, Homo sapiens
  misc_RNA (1)...(19): siRNA sense strand
ccacugcacgugagcauug

SEQ ID NO: 2156511 - RNA, 19 nt, Homo sapiens
  misc_RNA (1)...(19): siRNA sense strand
cgggaagguuucuuaugaa

SEQ ID NO: 2156512 - RNA, 19 nt, Homo sapiens
  misc_RNA (1)...(19): siRNA sense strand
ccuacaauccucaguuuga

SEQ ID NO: 2156513 - RNA, 19 nt, Homo sapiens
  misc_RNA (1)...(19): siRNA sense strand
gauuguaguucaucucacu

SEQ ID NO: 2156514 - RNA, 19 nt, Homo sapiens
  misc_RNA (1)...(19): siRNA sense strand
agaagcauuucacauuugu

SEQ ID NO: 2156515 - RNA, 19 nt, Homo sapiens
  misc_RNA (1)...(19): siRNA sense strand
ugcagaagauucauugauc

SEQ ID NO: 2156516 - RNA, 19 nt, Homo sapiens
  misc_RNA (1)...(19): siRNA sense strand
caaugacaguaguaaaugg

SEQ ID NO: 2156517 - RNA, 19 nt, Homo sapiens
  misc_RNA (1)...(19): siRNA sense strand
auacagagauaccauagac

SEQ ID NO: 2156518 - RNA, 19 nt, Homo sapiens
  misc_RNA (1)...(19): siRNA sense strand
caugagcuaaagccaaaua

SEQ ID NO: 2156519 - RNA, 19 nt, Homo sapiens
  misc_RNA (1)...(19): siRNA sense strand
ggaaccaguaguuacaaug

SEQ ID NO: 2156520 - RNA, 19 nt, Homo sapiens
  misc_RNA (1)...(19): siRNA sense strand
uggauggaauucuucaaau

SEQ ID NO: 2156521 - RNA, 19 nt, Homo sapiens
  misc_RNA (1)...(19): siRNA sense strand
uaucaagccagccaaaugu

SEQ ID NO: 2156522 - RNA, 19 nt, Homo sapiens
  misc_RNA (1)...(19): siRNA sense strand
guccgacucugacuaucaa

SEQ ID NO: 2156523 - RNA, 19 nt, Homo sapiens
  misc_RNA (1)...(19): siRNA sense strand
gauguccgacucugacuau

SEQ ID NO: 2156524 - RNA, 19 nt, Homo sapiens
  misc_RNA (1)...(19): siRNA sense strand
uacaauguccuacuacaga

SEQ ID NO: 2156525 - RNA, 19 nt, Homo sapiens
  misc_RNA (1)...(19): siRNA sense strand
cacaugauaucucuguuac

SEQ ID NO: 2156526 - RNA, 19 nt, Homo sapiens
  misc_RNA (1)...(19): siRNA sense strand
ggaccauggccgauauaug

SEQ ID NO: 2156527 - RNA, 19 nt, Homo sapiens
  misc_RNA (1)...(19): siRNA sense strand
gaagcgcugcucacaguca

SEQ ID NO: 2156528 - RNA, 19 nt, Homo sapiens
  misc_RNA (1)...(19): siRNA sense strand
ccaauacaagaugggauua

SEQ ID NO: 2156529 - RNA, 19 nt, Homo sapiens
  misc_RNA (1)...(19): siRNA sense strand
ggacuagcaagcauucaca

SEQ ID NO: 2156530 - RNA, 19 nt, Homo sapiens
  misc_RNA (1)...(19): siRNA sense strand
gaagucuauucuaaaugca

SEQ ID NO: 2156531 - RNA, 19 nt, Homo sapiens
  misc_RNA (1)...(19): siRNA sense strand
guuacaauguccuacuaca

SEQ ID NO: 2156532 - RNA, 19 nt, Homo sapiens
  misc_RNA (1)...(19): siRNA sense strand
gaacacuuagagaagauca

SEQ ID NO: 2156533 - RNA, 19 nt, Homo sapiens
  misc_RNA (1)...(19): siRNA sense strand
acagagauaccauagacuu

SEQ ID NO: 2156534 - RNA, 19 nt, Homo sapiens
  misc_RNA (1)...(19): siRNA sense strand
ucaaauccuccgauacaga

SEQ ID NO: 2156535 - RNA, 19 nt, Homo sapiens
  misc_RNA (1)...(19): siRNA sense strand
gcaagcauucacaguguuc

SEQ ID NO: 2156536 - RNA, 19 nt, Homo sapiens
  misc_RNA (1)...(19): siRNA sense strand
ucaaugacaguaguaaaug

SEQ ID NO: 2156537 - RNA, 19 nt, Homo sapiens
  misc_RNA (1)...(19): siRNA sense strand
cuacagagcaaggaggaaa

SEQ ID NO: 2156538 - RNA, 19 nt, Homo sapiens
  misc_RNA (1)...(19): siRNA sense strand
gagauaccauagacuucca

SEQ ID NO: 2156539 - RNA, 19 nt, Homo sapiens
  misc_RNA (1)...(19): siRNA sense strand
caaagccucagcugucuag

SEQ ID NO: 2156540 - RNA, 19 nt, Homo sapiens
  misc_RNA (1)...(19): siRNA sense strand
agaagaucauggaagugaa

SEQ ID NO: 2156541 - RNA, 19 nt, Homo sapiens
  misc_RNA (1)...(19): siRNA sense strand
ugaagauguggaucgcuua

SEQ ID NO: 2156542 - RNA, 19 nt, Homo sapiens
  misc_RNA (1)...(19): siRNA sense strand
cuucaaauccuccgauaca

SEQ ID NO: 2156543 - RNA, 19 nt, Homo sapiens
  misc_RNA (1)...(19): siRNA sense strand
uuaguaaagaccagguaua

SEQ ID NO: 2156544 - RNA, 19 nt, Homo sapiens
  misc_RNA (1)...(19): siRNA sense strand
aaagauauuggcagguuug

SEQ ID NO: 2156545 - RNA, 19 nt, Homo sapiens
  misc_RNA (1)...(19): siRNA sense strand
aaacccagcaaaucuccua

SEQ ID NO: 2156546 - RNA, 19 nt, Homo sapiens
  misc_RNA (1)...(19): siRNA sense strand
ugacugcucucgggaaggu

SEQ ID NO: 2156547 - RNA, 19 nt, Homo sapiens
  misc_RNA (1)...(19): siRNA sense strand
cgacucugacuaucaaugu

SEQ ID NO: 2156548 - RNA, 19 nt, Homo sapiens
  misc_RNA (1)...(19): siRNA sense strand
ucacugaggaccugcuuuc

SEQ ID NO: 2156549 - RNA, 19 nt, Homo sapiens
  misc_RNA (1)...(19): siRNA sense strand
ugccaagcguauuagcuaa

SEQ ID NO: 2156550 - RNA, 19 nt, Homo sapiens
  misc_RNA (1)...(19): siRNA sense strand
gccaaagccucagcugucu

SEQ ID NO: 2156551 - RNA, 19 nt, Homo sapiens
  misc_RNA (1)...(19): siRNA sense strand
ggucaaguggugccauuuc

SEQ ID NO: 2156552 - RNA, 19 nt, Homo sapiens
  misc_RNA (1)...(19): siRNA sense strand
caaaucuccuaacacuucu

SEQ ID NO: 2156553 - RNA, 19 nt, Homo sapiens
  misc_RNA (1)...(19): siRNA sense strand
aagaggggauggacugaua

SEQ ID NO: 2156554 - RNA, 19 nt, Homo sapiens
  misc_RNA (1)...(19): siRNA sense strand
gauauauggaacacuuaga

SEQ ID NO: 2156555 - RNA, 19 nt, Homo sapiens
  misc_RNA (1)...(19): siRNA sense strand
gauacagagauaccauaga

SEQ ID NO: 2156556 - RNA, 19 nt, Homo sapiens
  misc_RNA (1)...(19): siRNA sense strand
gguauacuuggauggaauu

SEQ ID NO: 2156557 - RNA, 19 nt, Homo sapiens
  misc_RNA (1)...(19): siRNA sense strand
ccacgggacugcauuauaa

SEQ ID NO: 2156558 - RNA, 19 nt, Homo sapiens
  misc_RNA (1)...(19): siRNA sense strand
gaccaacccugaugagcua

SEQ ID NO: 2156559 - RNA, 19 nt, Homo sapiens
  misc_RNA (1)...(19): siRNA sense strand
gcuuugaccuggagucgua

SEQ ID NO: 2156560 - RNA, 19 nt, Homo sapiens
  misc_RNA (1)...(19): siRNA sense strand
gccaggagcugagccagua

SEQ ID NO: 2156561 - RNA, 19 nt, Homo sapiens
  misc_RNA (1)...(19): siRNA sense strand
uacaagacccugauaauga

SEQ ID NO: 2156562 - RNA, 19 nt, Homo sapiens
  misc_RNA (1)...(19): siRNA sense strand
gaacugaccaacccugaug

SEQ ID NO: 2156563 - RNA, 19 nt, Homo sapiens
  misc_RNA (1)...(19): siRNA sense strand
caugaacccuacuggcaua

SEQ ID NO: 2156564 - RNA, 19 nt, Homo sapiens
  misc_RNA (1)...(19): siRNA sense strand
gcaagacccuccacugacu

SEQ ID NO: 2156565 - RNA, 19 nt, Homo sapiens
  misc_RNA (1)...(19): siRNA sense strand
ggaaugacacccuuguaug

SEQ ID NO: 2156566 - RNA, 19 nt, Homo sapiens
  misc_RNA (1)...(19): siRNA sense strand
cagcgucccuuacauguca

SEQ ID NO: 2156567 - RNA, 19 nt, Homo sapiens
  misc_RNA (1)...(19): siRNA sense strand
gaacuuucccugaguccuu

SEQ ID NO: 2156568 - RNA, 19 nt, Homo sapiens
  misc_RNA (1)...(19): siRNA sense strand
cugaugagcuacuguccua

SEQ ID NO: 2156569 - RNA, 19 nt, Homo sapiens
  misc_RNA (1)...(19): siRNA sense strand
gcacugcaucaccaagaua

SEQ ID NO: 2156570 - RNA, 19 nt, Homo sapiens
  misc_RNA (1)...(19): siRNA sense strand
cgaccugcuuucucuguuu

SEQ ID NO: 2156571 - RNA, 19 nt, Homo sapiens
  misc_RNA (1)...(19): siRNA sense strand
ucaugacugucgccacaua

SEQ ID NO: 2156572 - RNA, 19 nt, Homo sapiens
  misc_RNA (1)...(19): siRNA sense strand
ggaagccagugcccgugaa

SEQ ID NO: 2156573 - RNA, 19 nt, Homo sapiens
  misc_RNA (1)...(19): siRNA sense strand
gaaugacacccuuguaugc

SEQ ID NO: 2156574 - RNA, 19 nt, Homo sapiens
  misc_RNA (1)...(19): siRNA sense strand
caacaaugacgaccugcuu

SEQ ID NO: 2156575 - RNA, 19 nt, Homo sapiens
  misc_RNA (1)...(19): siRNA sense strand
ggagguguccugugugcaa

SEQ ID NO: 2156576 - RNA, 19 nt, Homo sapiens
  misc_RNA (1)...(19): siRNA sense strand
gaccugcuuucucuguuug

SEQ ID NO: 2156577 - RNA, 19 nt, Homo sapiens
  misc_RNA (1)...(19): siRNA sense strand
cuacaagacccugauaaug

SEQ ID NO: 2156578 - RNA, 19 nt, Homo sapiens
  misc_RNA (1)...(19): siRNA sense strand
ccagcagccuccugacuuc

SEQ ID NO: 2156579 - RNA, 19 nt, Homo sapiens
  misc_RNA (1)...(19): siRNA sense strand
acaagacccugauaaugag

SEQ ID NO: 2156580 - RNA, 19 nt, Homo sapiens
  misc_RNA (1)...(19): siRNA sense strand
acacggugaugguucauuc

SEQ ID NO: 2156581 - RNA, 19 nt, Homo sapiens
  misc_RNA (1)...(19): siRNA sense strand
gagcguggcgacaacaaga

SEQ ID NO: 2156582 - RNA, 19 nt, Homo sapiens
  misc_RNA (1)...(19): siRNA sense strand
cacccgaccucccuacgaa

SEQ ID NO: 2156583 - RNA, 19 nt, Homo sapiens
  misc_RNA (1)...(19): siRNA sense strand
acaagccacucuaccugaa

SEQ ID NO: 2156584 - RNA, 19 nt, Homo sapiens
  misc_RNA (1)...(19): siRNA sense strand
caacaagaccucgcacaag

SEQ ID NO: 2156585 - RNA, 19 nt, Homo sapiens
  misc_RNA (1)...(19): siRNA sense strand
gagcacugcaucaccaaga

SEQ ID NO: 2156586 - RNA, 19 nt, Homo sapiens
  misc_RNA (1)...(19): siRNA sense strand
gcaaggaggccaguaugca

SEQ ID NO: 2156587 - RNA, 19 nt, Homo sapiens
  misc_RNA (1)...(19): siRNA sense strand
ugauuuacauucagaacuc

SEQ ID NO: 2156588 - RNA, 19 nt, Homo sapiens
  misc_RNA (1)...(19): siRNA sense strand
caagauaaagcggaacuuc

SEQ ID NO: 2156589 - RNA, 19 nt, Homo sapiens
  misc_RNA (1)...(19): siRNA sense strand
gcagcagcgucccuuacau

SEQ ID NO: 2156590 - RNA, 19 nt, Homo sapiens
  misc_RNA (1)...(19): siRNA sense strand
ucccuuacaugucaccaaa

SEQ ID NO: 2156591 - RNA, 19 nt, Homo sapiens
  misc_RNA (1)...(19): siRNA sense strand
gcauccugauuuacauuca

SEQ ID NO: 2156592 - RNA, 19 nt, Homo sapiens
  misc_RNA (1)...(19): siRNA sense strand
gcucaugcccagcgugaug

SEQ ID NO: 2156593 - RNA, 19 nt, Homo sapiens
  misc_RNA (1)...(19): siRNA sense strand
ggagguggaccaguacaug

SEQ ID NO: 2156594 - RNA, 19 nt, Homo sapiens
  misc_RNA (1)...(19): siRNA sense strand
gcaggaaugacacccuugu

SEQ ID NO: 2156595 - RNA, 19 nt, Homo sapiens
  misc_RNA (1)...(19): siRNA sense strand
caagcagcagcgucccuua

SEQ ID NO: 2156596 - RNA, 19 nt, Homo sapiens
  misc_RNA (1)...(19): siRNA sense strand
gaggucaagucucccuucu

SEQ ID NO: 2156597 - RNA, 19 nt, Homo sapiens
  misc_RNA (1)...(19): siRNA sense strand
cuaucaaggugucccugaa

SEQ ID NO: 2156598 - RNA, 19 nt, Homo sapiens
  misc_RNA (1)...(19): siRNA sense strand
agucguaccugcagcucaa

SEQ ID NO: 2156599 - RNA, 19 nt, Homo sapiens
  misc_RNA (1)...(19): siRNA sense strand
cugcaagacccuccacuga

SEQ ID NO: 2156600 - RNA, 19 nt, Homo sapiens
  misc_RNA (1)...(19): siRNA sense strand
uuacaugucaccaaaccaa

SEQ ID NO: 2156601 - RNA, 19 nt, Homo sapiens
  misc_RNA (1)...(19): siRNA sense strand
gaugguucauucgcauaug

SEQ ID NO: 2156602 - RNA, 19 nt, Homo sapiens
  misc_RNA (1)...(19): siRNA sense strand
cagcagcgucccuuacaug

SEQ ID NO: 2156603 - RNA, 19 nt, Homo sapiens
  misc_RNA (1)...(19): siRNA sense strand
ggguggagcagacagcuau

SEQ ID NO: 2156604 - RNA, 19 nt, Homo sapiens
  misc_RNA (1)...(19): siRNA sense strand
gaccugcucccggaacuga

SEQ ID NO: 2156605 - RNA, 19 nt, Homo sapiens
  misc_RNA (1)...(19): siRNA sense strand
gccacacggugaugguuca

SEQ ID NO: 2156606 - RNA, 19 nt, Homo sapiens
  misc_RNA (1)...(19): siRNA sense strand
gaccuggagcugcaauuca

SEQ ID NO: 2156607 - RNA, 19 nt, Homo sapiens
  misc_RNA (1)...(19): siRNA sense strand
gcaacaccauccagaucac

SEQ ID NO: 2156608 - RNA, 19 nt, Homo sapiens
  misc_RNA (1)...(19): siRNA sense strand
acaacaagaccucgcacaa

SEQ ID NO: 2156609 - RNA, 19 nt, Homo sapiens
  misc_RNA (1)...(19): siRNA sense strand
cacgaggaccggcagauga

SEQ ID NO: 2156610 - RNA, 19 nt, Homo sapiens
  misc_RNA (1)...(19): siRNA sense strand
cacucuaccugaagcaugu

SEQ ID NO: 2156611 - RNA, 19 nt, Homo sapiens
  misc_RNA (1)...(19): siRNA sense strand
ugcugggcauccugauuua

SEQ ID NO: 2156612 - RNA, 19 nt, Homo sapiens
  misc_RNA (1)...(19): siRNA sense strand
ugucuguggucacuacugu

SEQ ID NO: 2156613 - RNA, 19 nt, Homo sapiens
  misc_RNA (1)...(19): siRNA sense strand
gcuguaagcaaccaugucu

SEQ ID NO: 2156614 - RNA, 19 nt, Homo sapiens
  misc_RNA (1)...(19): siRNA sense strand
caggaaugacacccuugua

SEQ ID NO: 2156615 - RNA, 19 nt, Homo sapiens
  misc_RNA (1)...(19): siRNA sense strand
gggcauccugauuuacauu

SEQ ID NO: 2156616 - RNA, 19 nt, Homo sapiens
  misc_RNA (1)...(19): siRNA sense strand
aaaccaagaggucaagucu

SEQ ID NO: 2156617 - RNA, 19 nt, Homo sapiens
  misc_RNA (1)...(19): siRNA sense strand
ucaacuccuugcacucauc

SEQ ID NO: 2156618 - RNA, 19 nt, Homo sapiens
  misc_RNA (1)...(19): siRNA sense strand
ggaacugaccaacccugau

SEQ ID NO: 2156619 - RNA, 19 nt, Homo sapiens
  misc_RNA (1)...(19): siRNA sense strand
ccacauacagugcuuugac

SEQ ID NO: 2156620 - RNA, 19 nt, Homo sapiens
  misc_RNA (1)...(19): siRNA sense strand
ggagcagacagcuaucaag

SEQ ID NO: 2156621 - RNA, 19 nt, Homo sapiens
  misc_RNA (1)...(19): siRNA sense strand
gcugcagggccuccucaaa

SEQ ID NO: 2156622 - RNA, 19 nt, Homo sapiens
  misc_RNA (1)...(19): siRNA sense strand
uguaagcaaccaugucuuc

SEQ ID NO: 2156623 - RNA, 19 nt, Homo sapiens
  misc_RNA (1)...(19): siRNA sense strand
aggaaugacacccuuguau

SEQ ID NO: 2156624 - RNA, 19 nt, Homo sapiens
  misc_RNA (1)...(19): siRNA sense strand
uguccugugugcaacaaga

SEQ ID NO: 2156625 - RNA, 19 nt, Homo sapiens
  misc_RNA (1)...(19): siRNA sense strand
accugcagcucaacuguga

SEQ ID NO: 2156626 - RNA, 19 nt, Homo sapiens
  misc_RNA (1)...(19): siRNA sense strand
aagauaaagcggaacuuca

SEQ ID NO: 2156627 - RNA, 19 nt, Homo sapiens
  misc_RNA (1)...(19): siRNA sense strand
ucuacaagacccugauaau

SEQ ID NO: 2156628 - RNA, 19 nt, Homo sapiens
  misc_RNA (1)...(19): siRNA sense strand
cccacgggacugcauuaua

SEQ ID NO: 2156629 - RNA, 19 nt, Homo sapiens
  misc_RNA (1)...(19): siRNA sense strand
ccagcgugauggagaugau

SEQ ID NO: 2156630 - RNA, 19 nt, Homo sapiens
  misc_RNA (1)...(19): siRNA sense strand
ugcccgaggucaugacugu

SEQ ID NO: 2156631 - RNA, 19 nt, Homo sapiens
  misc_RNA (1)...(19): siRNA sense strand
ccucaacuccuugcacuca

SEQ ID NO: 2156632 - RNA, 19 nt, Homo sapiens
  misc_RNA (1)...(19): siRNA sense strand
augaggagaucaccaucga

SEQ ID NO: 2156633 - RNA, 19 nt, Homo sapiens
  misc_RNA (1)...(19): siRNA sense strand
acuuggagguguccugugu

SEQ ID NO: 2156634 - RNA, 19 nt, Homo sapiens
  misc_RNA (1)...(19): siRNA sense strand
caucgagcguggcgacaac

SEQ ID NO: 2156635 - RNA, 19 nt, Homo sapiens
  misc_RNA (1)...(19): siRNA sense strand
accuggagcugcaauucaa

SEQ ID NO: 2156636 - RNA, 19 nt, Homo sapiens
  misc_RNA (1)...(19): siRNA sense strand
gcacaaccuggcuguaagc

SEQ ID NO: 2156637 - RNA, 19 nt, Homo sapiens
  misc_RNA (1)...(19): siRNA sense strand
ccacgggacugcauuauaa

SEQ ID NO: 2156638 - RNA, 19 nt, Homo sapiens
  misc_RNA (1)...(19): siRNA sense strand
gaccaacccugaugagcua

SEQ ID NO: 2156639 - RNA, 19 nt, Homo sapiens
  misc_RNA (1)...(19): siRNA sense strand
gcuuugaccuggagucgua

SEQ ID NO: 2156640 - RNA, 19 nt, Homo sapiens
  misc_RNA (1)...(19): siRNA sense strand
gccaggagcugagccagua

SEQ ID NO: 2156641 - RNA, 19 nt, Homo sapiens
  misc_RNA (1)...(19): siRNA sense strand
uacaagacccugauaauga

SEQ ID NO: 2156642 - RNA, 19 nt, Homo sapiens
  misc_RNA (1)...(19): siRNA sense strand
gaacugaccaacccugaug

SEQ ID NO: 2156643 - RNA, 19 nt, Homo sapiens
  misc_RNA (1)...(19): siRNA sense strand
caugaacccuacuggcaua

SEQ ID NO: 2156644 - RNA, 19 nt, Homo sapiens
  misc_RNA (1)...(19): siRNA sense strand
gcaagacccuccacugacu

SEQ ID NO: 2156645 - RNA, 19 nt, Homo sapiens
  misc_RNA (1)...(19): siRNA sense strand
ggaaugacacccuuguaug

SEQ ID NO: 2156646 - RNA, 19 nt, Homo sapiens
  misc_RNA (1)...(19): siRNA sense strand
cagcgucccuuacauguca

SEQ ID NO: 2156647 - RNA, 19 nt, Homo sapiens
  misc_RNA (1)...(19): siRNA sense strand
gaacuuucccugaguccuu

SEQ ID NO: 2156648 - RNA, 19 nt, Homo sapiens
  misc_RNA (1)...(19): siRNA sense strand
cugaugagcuacuguccua

SEQ ID NO: 2156649 - RNA, 19 nt, Homo sapiens
  misc_RNA (1)...(19): siRNA sense strand
gcacugcaucaccaagaua

SEQ ID NO: 2156650 - RNA, 19 nt, Homo sapiens
  misc_RNA (1)...(19): siRNA sense strand
cgaccugcuuucucuguuu

SEQ ID NO: 2156651 - RNA, 19 nt, Homo sapiens
  misc_RNA (1)...(19): siRNA sense strand
ucaugacugucgccacaua

SEQ ID NO: 2156652 - RNA, 19 nt, Homo sapiens
  misc_RNA (1)...(19): siRNA sense strand
ggaagccagugcccgugaa

SEQ ID NO: 2156653 - RNA, 19 nt, Homo sapiens
  misc_RNA (1)...(19): siRNA sense strand
gaaugacacccuuguaugc

SEQ ID NO: 2156654 - RNA, 19 nt, Homo sapiens
  misc_RNA (1)...(19): siRNA sense strand
caacaaugacgaccugcuu

SEQ ID NO: 2156655 - RNA, 19 nt, Homo sapiens
  misc_RNA (1)...(19): siRNA sense strand
ggagguguccugugugcaa

SEQ ID NO: 2156656 - RNA, 19 nt, Homo sapiens
  misc_RNA (1)...(19): siRNA sense strand
gaccugcuuucucuguuug

SEQ ID NO: 2156657 - RNA, 19 nt, Homo sapiens
  misc_RNA (1)...(19): siRNA sense strand
cuacaagacccugauaaug

SEQ ID NO: 2156658 - RNA, 19 nt, Homo sapiens
  misc_RNA (1)...(19): siRNA sense strand
ccagcagccuccugacuuc

SEQ ID NO: 2156659 - RNA, 19 nt, Homo sapiens
  misc_RNA (1)...(19): siRNA sense strand
acaagacccugauaaugag

SEQ ID NO: 2156660 - RNA, 19 nt, Homo sapiens
  misc_RNA (1)...(19): siRNA sense strand
acacggugaugguucauuc

SEQ ID NO: 2156661 - RNA, 19 nt, Homo sapiens
  misc_RNA (1)...(19): siRNA sense strand
gagcguggcgacaacaaga

SEQ ID NO: 2156662 - RNA, 19 nt, Homo sapiens
  misc_RNA (1)...(19): siRNA sense strand
cacccgaccucccuacgaa

SEQ ID NO: 2156663 - RNA, 19 nt, Homo sapiens
  misc_RNA (1)...(19): siRNA sense strand
acaagccacucuaccugaa

SEQ ID NO: 2156664 - RNA, 19 nt, Homo sapiens
  misc_RNA (1)...(19): siRNA sense strand
caacaagaccucgcacaag

SEQ ID NO: 2156665 - RNA, 19 nt, Homo sapiens
  misc_RNA (1)...(19): siRNA sense strand
gagcacugcaucaccaaga

SEQ ID NO: 2156666 - RNA, 19 nt, Homo sapiens
  misc_RNA (1)...(19): siRNA sense strand
gcaaggaggccaguaugca

SEQ ID NO: 2156667 - RNA, 19 nt, Homo sapiens
  misc_RNA (1)...(19): siRNA sense strand
ugauuuacauucagaacuc

SEQ ID NO: 2156668 - RNA, 19 nt, Homo sapiens
  misc_RNA (1)...(19): siRNA sense strand
caagauaaagcggaacuuc

SEQ ID NO: 2156669 - RNA, 19 nt, Homo sapiens
  misc_RNA (1)...(19): siRNA sense strand
gcagcagcgucccuuacau

SEQ ID NO: 2156670 - RNA, 19 nt, Homo sapiens
  misc_RNA (1)...(19): siRNA sense strand
ucccuuacaugucaccaaa

SEQ ID NO: 2156671 - RNA, 19 nt, Homo sapiens
  misc_RNA (1)...(19): siRNA sense strand
gcauccugauuuacauuca

SEQ ID NO: 2156672 - RNA, 19 nt, Homo sapiens
  misc_RNA (1)...(19): siRNA sense strand
gcucaugcccagcgugaug

SEQ ID NO: 2156673 - RNA, 19 nt, Homo sapiens
  misc_RNA (1)...(19): siRNA sense strand
ggagguggaccaguacaug

SEQ ID NO: 2156674 - RNA, 19 nt, Homo sapiens
  misc_RNA (1)...(19): siRNA sense strand
gcaggaaugacacccuugu

SEQ ID NO: 2156675 - RNA, 19 nt, Homo sapiens
  misc_RNA (1)...(19): siRNA sense strand
caagcagcagcgucccuua

SEQ ID NO: 2156676 - RNA, 19 nt, Homo sapiens
  misc_RNA (1)...(19): siRNA sense strand
gaggucaagucucccuucu

SEQ ID NO: 2156677 - RNA, 19 nt, Homo sapiens
  misc_RNA (1)...(19): siRNA sense strand
cuaucaaggugucccugaa

SEQ ID NO: 2156678 - RNA, 19 nt, Homo sapiens
  misc_RNA (1)...(19): siRNA sense strand
agucguaccugcagcucaa

SEQ ID NO: 2156679 - RNA, 19 nt, Homo sapiens
  misc_RNA (1)...(19): siRNA sense strand
cugcaagacccuccacuga

SEQ ID NO: 2156680 - RNA, 19 nt, Homo sapiens
  misc_RNA (1)...(19): siRNA sense strand
uuacaugucaccaaaccaa

SEQ ID NO: 2156681 - RNA, 19 nt, Homo sapiens
  misc_RNA (1)...(19): siRNA sense strand
gaugguucauucgcauaug

SEQ ID NO: 2156682 - RNA, 19 nt, Homo sapiens
  misc_RNA (1)...(19): siRNA sense strand
cagcagcgucccuuacaug

SEQ ID NO: 2156683 - RNA, 19 nt, Homo sapiens
  misc_RNA (1)...(19): siRNA sense strand
ggguggagcagacagcuau

SEQ ID NO: 2156684 - RNA, 19 nt, Homo sapiens
  misc_RNA (1)...(19): siRNA sense strand
gaccugcucccggaacuga

SEQ ID NO: 2156685 - RNA, 19 nt, Homo sapiens
  misc_RNA (1)...(19): siRNA sense strand
gccacacggugaugguuca

SEQ ID NO: 2156686 - RNA, 19 nt, Homo sapiens
  misc_RNA (1)...(19): siRNA sense strand
gaccuggagcugcaauuca

SEQ ID NO: 2156687 - RNA, 19 nt, Homo sapiens
  misc_RNA (1)...(19): siRNA sense strand
gcaacaccauccagaucac

SEQ ID NO: 2156688 - RNA, 19 nt, Homo sapiens
  misc_RNA (1)...(19): siRNA sense strand
acaacaagaccucgcacaa

SEQ ID NO: 2156689 - RNA, 19 nt, Homo sapiens
  misc_RNA (1)...(19): siRNA sense strand
cacgaggaccggcagauga

SEQ ID NO: 2156690 - RNA, 19 nt, Homo sapiens
  misc_RNA (1)...(19): siRNA sense strand
cacucuaccugaagcaugu

SEQ ID NO: 2156691 - RNA, 19 nt, Homo sapiens
  misc_RNA (1)...(19): siRNA sense strand
ugcugggcauccugauuua

SEQ ID NO: 2156692 - RNA, 19 nt, Homo sapiens
  misc_RNA (1)...(19): siRNA sense strand
ugucuguggucacuacugu

SEQ ID NO: 2156693 - RNA, 19 nt, Homo sapiens
  misc_RNA (1)...(19): siRNA sense strand
gcuguaagcaaccaugucu

SEQ ID NO: 2156694 - RNA, 19 nt, Homo sapiens
  misc_RNA (1)...(19): siRNA sense strand
caggaaugacacccuugua

SEQ ID NO: 2156695 - RNA, 19 nt, Homo sapiens
  misc_RNA (1)...(19): siRNA sense strand
gggcauccugauuuacauu

SEQ ID NO: 2156696 - RNA, 19 nt, Homo sapiens
  misc_RNA (1)...(19): siRNA sense strand
aaaccaagaggucaagucu

SEQ ID NO: 2156697 - RNA, 19 nt, Homo sapiens
  misc_RNA (1)...(19): siRNA sense strand
ucaacuccuugcacucauc

SEQ ID NO: 2156698 - RNA, 19 nt, Homo sapiens
  misc_RNA (1)...(19): siRNA sense strand
ggaacugaccaacccugau

SEQ ID NO: 2156699 - RNA, 19 nt, Homo sapiens
  misc_RNA (1)...(19): siRNA sense strand
ccacauacagugcuuugac

SEQ ID NO: 2156700 - RNA, 19 nt, Homo sapiens
  misc_RNA (1)...(19): siRNA sense strand
ggagcagacagcuaucaag

SEQ ID NO: 2156701 - RNA, 19 nt, Homo sapiens
  misc_RNA (1)...(19): siRNA sense strand
gcugcagggccuccucaaa

SEQ ID NO: 2156702 - RNA, 19 nt, Homo sapiens
  misc_RNA (1)...(19): siRNA sense strand
uguaagcaaccaugucuuc

SEQ ID NO: 2156703 - RNA, 19 nt, Homo sapiens
  misc_RNA (1)...(19): siRNA sense strand
aggaaugacacccuuguau

SEQ ID NO: 2156704 - RNA, 19 nt, Homo sapiens
  misc_RNA (1)...(19): siRNA sense strand
uguccugugugcaacaaga

SEQ ID NO: 2156705 - RNA, 19 nt, Homo sapiens
  misc_RNA (1)...(19): siRNA sense strand
accugcagcucaacuguga

SEQ ID NO: 2156706 - RNA, 19 nt, Homo sapiens
  misc_RNA (1)...(19): siRNA sense strand
aagauaaagcggaacuuca

SEQ ID NO: 2156707 - RNA, 19 nt, Homo sapiens
  misc_RNA (1)...(19): siRNA sense strand
ucuacaagacccugauaau

SEQ ID NO: 2156708 - RNA, 19 nt, Homo sapiens
  misc_RNA (1)...(19): siRNA sense strand
cccacgggacugcauuaua

SEQ ID NO: 2156709 - RNA, 19 nt, Homo sapiens
  misc_RNA (1)...(19): siRNA sense strand
ccagcgugauggagaugau

SEQ ID NO: 2156710 - RNA, 19 nt, Homo sapiens
  misc_RNA (1)...(19): siRNA sense strand
ugcccgaggucaugacugu

SEQ ID NO: 2156711 - RNA, 19 nt, Homo sapiens
  misc_RNA (1)...(19): siRNA sense strand
ccucaacuccuugcacuca

SEQ ID NO: 2156712 - RNA, 19 nt, Homo sapiens
  misc_RNA (1)...(19): siRNA sense strand
augaggagaucaccaucga

SEQ ID NO: 2156713 - RNA, 19 nt, Homo sapiens
  misc_RNA (1)...(19): siRNA sense strand
acuuggagguguccugugu

SEQ ID NO: 2156714 - RNA, 19 nt, Homo sapiens
  misc_RNA (1)...(19): siRNA sense strand
caucgagcguggcgacaac

SEQ ID NO: 2156715 - RNA, 19 nt, Homo sapiens
  misc_RNA (1)...(19): siRNA sense strand
accuggagcugcaauucaa

SEQ ID NO: 2156716 - RNA, 19 nt, Homo sapiens
  misc_RNA (1)...(19): siRNA sense strand
gcacaaccuggcuguaagc

SEQ ID NO: 2156717 - RNA, 19 nt, Homo sapiens
  misc_RNA (1)...(19): siRNA sense strand
gcaaagagaggcugaggaa

SEQ ID NO: 2156718 - RNA, 19 nt, Homo sapiens
  misc_RNA (1)...(19): siRNA sense strand
gggcaucaguguuaucuca

SEQ ID NO: 2156719 - RNA, 19 nt, Homo sapiens
  misc_RNA (1)...(19): siRNA sense strand
caaaguaucugagcaaagc

SEQ ID NO: 2156720 - RNA, 19 nt, Homo sapiens
  misc_RNA (1)...(19): siRNA sense strand
acaguucaccuaccaauuu

SEQ ID NO: 2156721 - RNA, 19 nt, Homo sapiens
  misc_RNA (1)...(19): siRNA sense strand
acucggagauacuggauaa

SEQ ID NO: 2156722 - RNA, 19 nt, Homo sapiens
  misc_RNA (1)...(19): siRNA sense strand
gcaaugguuauaaggauga

SEQ ID NO: 2156723 - RNA, 19 nt, Homo sapiens
  misc_RNA (1)...(19): siRNA sense strand
gaucccaggucucagcaau

SEQ ID NO: 2156724 - RNA, 19 nt, Homo sapiens
  misc_RNA (1)...(19): siRNA sense strand
gaacacaagcaaggaacuu

SEQ ID NO: 2156725 - RNA, 19 nt, Homo sapiens
  misc_RNA (1)...(19): siRNA sense strand
ucccaggucucagcaauuu

SEQ ID NO: 2156726 - RNA, 19 nt, Homo sapiens
  misc_RNA (1)...(19): siRNA sense strand
uagcaaugguuauaaggau

SEQ ID NO: 2156727 - RNA, 19 nt, Homo sapiens
  misc_RNA (1)...(19): siRNA sense strand
caagguggcaggcccgauu

SEQ ID NO: 2156728 - RNA, 19 nt, Homo sapiens
  misc_RNA (1)...(19): siRNA sense strand
caccagcagagcucaaaua

SEQ ID NO: 2156729 - RNA, 19 nt, Homo sapiens
  misc_RNA (1)...(19): siRNA sense strand
guuauaaggaugagugguu

SEQ ID NO: 2156730 - RNA, 19 nt, Homo sapiens
  misc_RNA (1)...(19): siRNA sense strand
ucaagccaaugguagcuau

SEQ ID NO: 2156731 - RNA, 19 nt, Homo sapiens
  misc_RNA (1)...(19): siRNA sense strand
aagagaggcugaggaacuu

SEQ ID NO: 2156732 - RNA, 19 nt, Homo sapiens
  misc_RNA (1)...(19): siRNA sense strand
cuccagggcaucaguguua

SEQ ID NO: 2156733 - RNA, 19 nt, Homo sapiens
  misc_RNA (1)...(19): siRNA sense strand
ucaaagcccagaagaaucu

SEQ ID NO: 2156734 - RNA, 19 nt, Homo sapiens
  misc_RNA (1)...(19): siRNA sense strand
gcaucaguguuaucucagu

SEQ ID NO: 2156735 - RNA, 19 nt, Homo sapiens
  misc_RNA (1)...(19): siRNA sense strand
gaaucuguaucugcaucaa

SEQ ID NO: 2156736 - RNA, 19 nt, Homo sapiens
  misc_RNA (1)...(19): siRNA sense strand
gaggaacacaagcaaggaa

SEQ ID NO: 2156737 - RNA, 19 nt, Homo sapiens
  misc_RNA (1)...(19): siRNA sense strand
ucucaaagcccagaagaau

SEQ ID NO: 2156738 - RNA, 19 nt, Homo sapiens
  misc_RNA (1)...(19): siRNA sense strand
uuuccaaacucauuagcaa

SEQ ID NO: 2156739 - RNA, 19 nt, Homo sapiens
  misc_RNA (1)...(19): siRNA sense strand
ccagugaagcgcucugaga

SEQ ID NO: 2156740 - RNA, 19 nt, Homo sapiens
  misc_RNA (1)...(19): siRNA sense strand
uggcaggcccgauuuguug

SEQ ID NO: 2156741 - RNA, 19 nt, Homo sapiens
  misc_RNA (1)...(19): siRNA sense strand
aaagagaggcugaggaacu

SEQ ID NO: 2156742 - RNA, 19 nt, Homo sapiens
  misc_RNA (1)...(19): siRNA sense strand
gagaggcugaggaacuuga

SEQ ID NO: 2156743 - RNA, 19 nt, Homo sapiens
  misc_RNA (1)...(19): siRNA sense strand
gaagaccuccagggcauca

SEQ ID NO: 2156744 - RNA, 19 nt, Homo sapiens
  misc_RNA (1)...(19): siRNA sense strand
cgacagccagccagcaaga

SEQ ID NO: 2156745 - RNA, 19 nt, Homo sapiens
  misc_RNA (1)...(19): siRNA sense strand
cagugaagcgcucugagaa

SEQ ID NO: 2156746 - RNA, 19 nt, Homo sapiens
  misc_RNA (1)...(19): siRNA sense strand
ggagauacuggauaaaaga

SEQ ID NO: 2156747 - RNA, 19 nt, Homo sapiens
  misc_RNA (1)...(19): siRNA sense strand
aaacaguucaccuaccaau

SEQ ID NO: 2156748 - RNA, 19 nt, Homo sapiens
  misc_RNA (1)...(19): siRNA sense strand
gcaauuugggagacucaca

SEQ ID NO: 2156749 - RNA, 19 nt, Homo sapiens
  misc_RNA (1)...(19): siRNA sense strand
uagcuaugcauccagaaga

SEQ ID NO: 2156750 - RNA, 19 nt, Homo sapiens
  misc_RNA (1)...(19): siRNA sense strand
ggcccgauuuguugaagca

SEQ ID NO: 2156751 - RNA, 19 nt, Homo sapiens
  misc_RNA (1)...(19): siRNA sense strand
gcaggcccgauuuguugaa

SEQ ID NO: 2156752 - RNA, 19 nt, Homo sapiens
  misc_RNA (1)...(19): siRNA sense strand
cugaggaacuugaaaagga

SEQ ID NO: 2156753 - RNA, 19 nt, Homo sapiens
  misc_RNA (1)...(19): siRNA sense strand
ccgauuuguugaagcacuu

SEQ ID NO: 2156754 - RNA, 19 nt, Homo sapiens
  misc_RNA (1)...(19): siRNA sense strand
ggacucggagauacuggau

SEQ ID NO: 2156755 - RNA, 19 nt, Homo sapiens
  misc_RNA (1)...(19): siRNA sense strand
accagcagagcucaaauaa

SEQ ID NO: 2156756 - RNA, 19 nt, Homo sapiens
  misc_RNA (1)...(19): siRNA sense strand
gaagaaucuguaucugcau

SEQ ID NO: 2156757 - RNA, 19 nt, Homo sapiens
  misc_RNA (1)...(19): siRNA sense strand
gcucuccaguggccuacuc

SEQ ID NO: 2156758 - RNA, 19 nt, Homo sapiens
  misc_RNA (1)...(19): siRNA sense strand
gcaaagagaggcugaggaa

SEQ ID NO: 2156759 - RNA, 19 nt, Homo sapiens
  misc_RNA (1)...(19): siRNA sense strand
gggcaucaguguuaucuca

SEQ ID NO: 2156760 - RNA, 19 nt, Homo sapiens
  misc_RNA (1)...(19): siRNA sense strand
caaaguaucugagcaaagc

SEQ ID NO: 2156761 - RNA, 19 nt, Homo sapiens
  misc_RNA (1)...(19): siRNA sense strand
acaguucaccuaccaauuu

SEQ ID NO: 2156762 - RNA, 19 nt, Homo sapiens
  misc_RNA (1)...(19): siRNA sense strand
acucggagauacuggauaa

SEQ ID NO: 2156763 - RNA, 19 nt, Homo sapiens
  misc_RNA (1)...(19): siRNA sense strand
gcaaugguuauaaggauga

SEQ ID NO: 2156764 - RNA, 19 nt, Homo sapiens
  misc_RNA (1)...(19): siRNA sense strand
gaucccaggucucagcaau

SEQ ID NO: 2156765 - RNA, 19 nt, Homo sapiens
  misc_RNA (1)...(19): siRNA sense strand
gaacacaagcaaggaacuu

SEQ ID NO: 2156766 - RNA, 19 nt, Homo sapiens
  misc_RNA (1)...(19): siRNA sense strand
ucccaggucucagcaauuu

SEQ ID NO: 2156767 - RNA, 19 nt, Homo sapiens
  misc_RNA (1)...(19): siRNA sense strand
uagcaaugguuauaaggau

SEQ ID NO: 2156768 - RNA, 19 nt, Homo sapiens
  misc_RNA (1)...(19): siRNA sense strand
caagguggcaggcccgauu

SEQ ID NO: 2156769 - RNA, 19 nt, Homo sapiens
  misc_RNA (1)...(19): siRNA sense strand
caccagcagagcucaaaua

SEQ ID NO: 2156770 - RNA, 19 nt, Homo sapiens
  misc_RNA (1)...(19): siRNA sense strand
guuauaaggaugagugguu

SEQ ID NO: 2156771 - RNA, 19 nt, Homo sapiens
  misc_RNA (1)...(19): siRNA sense strand
ucaagccaaugguagcuau

SEQ ID NO: 2156772 - RNA, 19 nt, Homo sapiens
  misc_RNA (1)...(19): siRNA sense strand
aagagaggcugaggaacuu

SEQ ID NO: 2156773 - RNA, 19 nt, Homo sapiens
  misc_RNA (1)...(19): siRNA sense strand
cuccagggcaucaguguua

SEQ ID NO: 2156774 - RNA, 19 nt, Homo sapiens
  misc_RNA (1)...(19): siRNA sense strand
ucaaagcccagaagaaucu

SEQ ID NO: 2156775 - RNA, 19 nt, Homo sapiens
  misc_RNA (1)...(19): siRNA sense strand
gcaucaguguuaucucagu

SEQ ID NO: 2156776 - RNA, 19 nt, Homo sapiens
  misc_RNA (1)...(19): siRNA sense strand
gaaucuguaucugcaucaa

SEQ ID NO: 2156777 - RNA, 19 nt, Homo sapiens
  misc_RNA (1)...(19): siRNA sense strand
gaggaacacaagcaaggaa

SEQ ID NO: 2156778 - RNA, 19 nt, Homo sapiens
  misc_RNA (1)...(19): siRNA sense strand
ucucaaagcccagaagaau

SEQ ID NO: 2156779 - RNA, 19 nt, Homo sapiens
  misc_RNA (1)...(19): siRNA sense strand
uuuccaaacucauuagcaa

SEQ ID NO: 2156780 - RNA, 19 nt, Homo sapiens
  misc_RNA (1)...(19): siRNA sense strand
ccagugaagcgcucugaga

SEQ ID NO: 2156781 - RNA, 19 nt, Homo sapiens
  misc_RNA (1)...(19): siRNA sense strand
uggcaggcccgauuuguug

SEQ ID NO: 2156782 - RNA, 19 nt, Homo sapiens
  misc_RNA (1)...(19): siRNA sense strand
aaagagaggcugaggaacu

SEQ ID NO: 2156783 - RNA, 19 nt, Homo sapiens
  misc_RNA (1)...(19): siRNA sense strand
gagaggcugaggaacuuga

SEQ ID NO: 2156784 - RNA, 19 nt, Homo sapiens
  misc_RNA (1)...(19): siRNA sense strand
gaagaccuccagggcauca

SEQ ID NO: 2156785 - RNA, 19 nt, Homo sapiens
  misc_RNA (1)...(19): siRNA sense strand
cgacagccagccagcaaga

SEQ ID NO: 2156786 - RNA, 19 nt, Homo sapiens
  misc_RNA (1)...(19): siRNA sense strand
cagugaagcgcucugagaa

SEQ ID NO: 2156787 - RNA, 19 nt, Homo sapiens
  misc_RNA (1)...(19): siRNA sense strand
ggagauacuggauaaaaga

SEQ ID NO: 2156788 - RNA, 19 nt, Homo sapiens
  misc_RNA (1)...(19): siRNA sense strand
aaacaguucaccuaccaau

SEQ ID NO: 2156789 - RNA, 19 nt, Homo sapiens
  misc_RNA (1)...(19): siRNA sense strand
gcaauuugggagacucaca

SEQ ID NO: 2156790 - RNA, 19 nt, Homo sapiens
  misc_RNA (1)...(19): siRNA sense strand
uagcuaugcauccagaaga

SEQ ID NO: 2156791 - RNA, 19 nt, Homo sapiens
  misc_RNA (1)...(19): siRNA sense strand
ggcccgauuuguugaagca

SEQ ID NO: 2156792 - RNA, 19 nt, Homo sapiens
  misc_RNA (1)...(19): siRNA sense strand
gcaggcccgauuuguugaa

SEQ ID NO: 2156793 - RNA, 19 nt, Homo sapiens
  misc_RNA (1)...(19): siRNA sense strand
cugaggaacuugaaaagga

SEQ ID NO: 2156794 - RNA, 19 nt, Homo sapiens
  misc_RNA (1)...(19): siRNA sense strand
ccgauuuguugaagcacuu

SEQ ID NO: 2156795 - RNA, 19 nt, Homo sapiens
  misc_RNA (1)...(19): siRNA sense strand
ggacucggagauacuggau

SEQ ID NO: 2156796 - RNA, 19 nt, Homo sapiens
  misc_RNA (1)...(19): siRNA sense strand
accagcagagcucaaauaa

SEQ ID NO: 2156797 - RNA, 19 nt, Homo sapiens
  misc_RNA (1)...(19): siRNA sense strand
gaagaaucuguaucugcau

SEQ ID NO: 2156798 - RNA, 19 nt, Homo sapiens
  misc_RNA (1)...(19): siRNA sense strand
gcucuccaguggccuacuc

SEQ ID NO: 2156799 - RNA, 19 nt, Homo sapiens
  misc_RNA (1)...(19): siRNA sense strand
agacauagcuauagaauuc

SEQ ID NO: 2156800 - RNA, 19 nt, Homo sapiens
  misc_RNA (1)...(19): siRNA sense strand
cuacaaaugugaagaaugu

SEQ ID NO: 2156801 - RNA, 19 nt, Homo sapiens
  misc_RNA (1)...(19): siRNA sense strand
cuacaaaugugaagaaugu

SEQ ID NO: 2156802 - RNA, 19 nt, Homo sapiens
  misc_RNA (1)...(19): siRNA sense strand
cuacaaaugugaagaaugu

SEQ ID NO: 2156803 - RNA, 19 nt, Homo sapiens
  misc_RNA (1)...(19): siRNA sense strand
caucaaagauucacuccaa

SEQ ID NO: 2156804 - RNA, 19 nt, Homo sapiens
  misc_RNA (1)...(19): siRNA sense strand
caagggagguuauagugaa

SEQ ID NO: 2156805 - RNA, 19 nt, Homo sapiens
  misc_RNA (1)...(19): siRNA sense strand
gagagaaacccuacaaaug

SEQ ID NO: 2156806 - RNA, 19 nt, Homo sapiens
  misc_RNA (1)...(19): siRNA sense strand
gagagaaacccuacaaaug

SEQ ID NO: 2156807 - RNA, 19 nt, Homo sapiens
  misc_RNA (1)...(19): siRNA sense strand
caacaucagguaauucaua

SEQ ID NO: 2156808 - RNA, 19 nt, Homo sapiens
  misc_RNA (1)...(19): siRNA sense strand
agacauaggagaauucaua

SEQ ID NO: 2156809 - RNA, 19 nt, Homo sapiens
  misc_RNA (1)...(19): siRNA sense strand
aauaaagagucccagaaua

SEQ ID NO: 2156810 - RNA, 19 nt, Homo sapiens
  misc_RNA (1)...(19): siRNA sense strand
ggagagagacccuacaaau

SEQ ID NO: 2156811 - RNA, 19 nt, Homo sapiens
  misc_RNA (1)...(19): siRNA sense strand
ggagagagacccuacaaau

SEQ ID NO: 2156812 - RNA, 19 nt, Homo sapiens
  misc_RNA (1)...(19): siRNA sense strand
ggagagagacccuacaaau

SEQ ID NO: 2156813 - RNA, 19 nt, Homo sapiens
  misc_RNA (1)...(19): siRNA sense strand
gagcagggcaucaaagauu

SEQ ID NO: 2156814 - RNA, 19 nt, Homo sapiens
  misc_RNA (1)...(19): siRNA sense strand
aaagagaaaugagauggua

SEQ ID NO: 2156815 - RNA, 19 nt, Homo sapiens
  misc_RNA (1)...(19): siRNA sense strand
gaauguggcaaauccuuua

SEQ ID NO: 2156816 - RNA, 19 nt, Homo sapiens
  misc_RNA (1)...(19): siRNA sense strand
gagaaacccuacaaaugug

SEQ ID NO: 2156817 - RNA, 19 nt, Homo sapiens
  misc_RNA (1)...(19): siRNA sense strand
gagaaacccuacaaaugug

SEQ ID NO: 2156818 - RNA, 19 nt, Homo sapiens
  misc_RNA (1)...(19): siRNA sense strand
cuacaaaugugaagagugu

SEQ ID NO: 2156819 - RNA, 19 nt, Homo sapiens
  misc_RNA (1)...(19): siRNA sense strand
gagaugugauguuagagaa

SEQ ID NO: 2156820 - RNA, 19 nt, Homo sapiens
  misc_RNA (1)...(19): siRNA sense strand
ggagagaaaccauauagau

SEQ ID NO: 2156821 - RNA, 19 nt, Homo sapiens
  misc_RNA (1)...(19): siRNA sense strand
gagagaaacccuacacaug

SEQ ID NO: 2156822 - RNA, 19 nt, Homo sapiens
  misc_RNA (1)...(19): siRNA sense strand
gagaaacccuacacaugug

SEQ ID NO: 2156823 - RNA, 19 nt, Homo sapiens
  misc_RNA (1)...(19): siRNA sense strand
ggagagaaacccuacaaau

SEQ ID NO: 2156824 - RNA, 19 nt, Homo sapiens
  misc_RNA (1)...(19): siRNA sense strand
ggagagaaacccuacaaau

SEQ ID NO: 2156825 - RNA, 19 nt, Homo sapiens
  misc_RNA (1)...(19): siRNA sense strand
uaaagagucccagaauaua

SEQ ID NO: 2156826 - RNA, 19 nt, Homo sapiens
  misc_RNA (1)...(19): siRNA sense strand
gagagaaaccauauagaug

SEQ ID NO: 2156827 - RNA, 19 nt, Homo sapiens
  misc_RNA (1)...(19): siRNA sense strand
gagagagacccuacaaaug

SEQ ID NO: 2156828 - RNA, 19 nt, Homo sapiens
  misc_RNA (1)...(19): siRNA sense strand
gagagagacccuacaaaug

SEQ ID NO: 2156829 - RNA, 19 nt, Homo sapiens
  misc_RNA (1)...(19): siRNA sense strand
gagagagacccuacaaaug

SEQ ID NO: 2156830 - RNA, 19 nt, Homo sapiens
  misc_RNA (1)...(19): siRNA sense strand
caaagaauguggcaaaucc

SEQ ID NO: 2156831 - RNA, 19 nt, Homo sapiens
  misc_RNA (1)...(19): siRNA sense strand
gaauguggccaagacuuua

SEQ ID NO: 2156832 - RNA, 19 nt, Homo sapiens
  misc_RNA (1)...(19): siRNA sense strand
gagaaaccauauagaugug

SEQ ID NO: 2156833 - RNA, 19 nt, Homo sapiens
  misc_RNA (1)...(19): siRNA sense strand
caaaccauacuacacauaa

SEQ ID NO: 2156834 - RNA, 19 nt, Homo sapiens
  misc_RNA (1)...(19): siRNA sense strand
gaauguggccaagccuuua

SEQ ID NO: 2156835 - RNA, 19 nt, Homo sapiens
  misc_RNA (1)...(19): siRNA sense strand
ucagagacauagcuauaga

SEQ ID NO: 2156836 - RNA, 19 nt, Homo sapiens
  misc_RNA (1)...(19): siRNA sense strand
gagagacccuacaaaugug

SEQ ID NO: 2156837 - RNA, 19 nt, Homo sapiens
  misc_RNA (1)...(19): siRNA sense strand
gagagacccuacaaaugug

SEQ ID NO: 2156838 - RNA, 19 nt, Homo sapiens
  misc_RNA (1)...(19): siRNA sense strand
gaaaugggacuguugacau

SEQ ID NO: 2156839 - RNA, 19 nt, Homo sapiens
  misc_RNA (1)...(19): siRNA sense strand
gaauguggccaagccuuua

SEQ ID NO: 2156840 - RNA, 19 nt, Homo sapiens
  misc_RNA (1)...(19): siRNA sense strand
gagagacccuacaaaugug

SEQ ID NO: 2156841 - RNA, 19 nt, Homo sapiens
  misc_RNA (1)...(19): siRNA sense strand
gaccacaagagaauucaua

SEQ ID NO: 2156842 - RNA, 19 nt, Homo sapiens
  misc_RNA (1)...(19): siRNA sense strand
agagaaacccuacaaaugu

SEQ ID NO: 2156843 - RNA, 19 nt, Homo sapiens
  misc_RNA (1)...(19): siRNA sense strand
gugcucagcggaauuuaua

SEQ ID NO: 2156844 - RNA, 19 nt, Homo sapiens
  misc_RNA (1)...(19): siRNA sense strand
agagaaacccuacaaaugu

SEQ ID NO: 2156845 - RNA, 19 nt, Homo sapiens
  misc_RNA (1)...(19): siRNA sense strand
gcucagcggaauuuauaua

SEQ ID NO: 2156846 - RNA, 19 nt, Homo sapiens
  misc_RNA (1)...(19): siRNA sense strand
gaccacaagagaauucaua

SEQ ID NO: 2156847 - RNA, 19 nt, Homo sapiens
  misc_RNA (1)...(19): siRNA sense strand
gaccacaagagaauucaua

SEQ ID NO: 2156848 - RNA, 19 nt, Homo sapiens
  misc_RNA (1)...(19): siRNA sense strand
ggagaaguccuacaaaugc

SEQ ID NO: 2156849 - RNA, 19 nt, Homo sapiens
  misc_RNA (1)...(19): siRNA sense strand
gaaacccuaugccugugaa

SEQ ID NO: 2156850 - RNA, 19 nt, Homo sapiens
  misc_RNA (1)...(19): siRNA sense strand
gagguuauagugaaguuaa

SEQ ID NO: 2156851 - RNA, 19 nt, Homo sapiens
  misc_RNA (1)...(19): siRNA sense strand
gagagacccuacacaugug

SEQ ID NO: 2156852 - RNA, 19 nt, Homo sapiens
  misc_RNA (1)...(19): siRNA sense strand
auagagaugugauguuaga

SEQ ID NO: 2156853 - RNA, 19 nt, Homo sapiens
  misc_RNA (1)...(19): siRNA sense strand
ggagagagacccuacacau

SEQ ID NO: 2156854 - RNA, 19 nt, Homo sapiens
  misc_RNA (1)...(19): siRNA sense strand
agagagacccuacaaaugu

SEQ ID NO: 2156855 - RNA, 19 nt, Homo sapiens
  misc_RNA (1)...(19): siRNA sense strand
agagagacccuacaaaugu

SEQ ID NO: 2156856 - RNA, 19 nt, Homo sapiens
  misc_RNA (1)...(19): siRNA sense strand
ccucgaaccuuaugagaca

SEQ ID NO: 2156857 - RNA, 19 nt, Homo sapiens
  misc_RNA (1)...(19): siRNA sense strand
agagagacccuacaaaugu

SEQ ID NO: 2156858 - RNA, 19 nt, Homo sapiens
  misc_RNA (1)...(19): siRNA sense strand
aaagagucccagaauauaa

SEQ ID NO: 2156859 - RNA, 19 nt, Homo sapiens
  misc_RNA (1)...(19): siRNA sense strand
gagagagacccuacacaug

SEQ ID NO: 2156860 - RNA, 19 nt, Homo sapiens
  misc_RNA (1)...(19): siRNA sense strand
gggagaaguccuacaaaug

SEQ ID NO: 2156861 - RNA, 19 nt, Homo sapiens
  misc_RNA (1)...(19): siRNA sense strand
auaaagagucccagaauau

SEQ ID NO: 2156862 - RNA, 19 nt, Homo sapiens
  misc_RNA (1)...(19): siRNA sense strand
ccucaacccuuaugcaaca

SEQ ID NO: 2156863 - RNA, 19 nt, Homo sapiens
  misc_RNA (1)...(19): siRNA sense strand
cuacacgugugaagaaugu

SEQ ID NO: 2156864 - RNA, 19 nt, Homo sapiens
  misc_RNA (1)...(19): siRNA sense strand
gcacaagggagguuauagu

SEQ ID NO: 2156865 - RNA, 19 nt, Homo sapiens
  misc_RNA (1)...(19): siRNA sense strand
gcacuuacuauccacaaga

SEQ ID NO: 2156866 - RNA, 19 nt, Homo sapiens
  misc_RNA (1)...(19): siRNA sense strand
ccauauagaugugaggaau

SEQ ID NO: 2156867 - RNA, 19 nt, Homo sapiens
  misc_RNA (1)...(19): siRNA sense strand
cauaagagaauucauacug

SEQ ID NO: 2156868 - RNA, 19 nt, Homo sapiens
  misc_RNA (1)...(19): siRNA sense strand
ggacaugagaaauuacaau

SEQ ID NO: 2156869 - RNA, 19 nt, Homo sapiens
  misc_RNA (1)...(19): siRNA sense strand
gccuuuagcuggucugcaa

SEQ ID NO: 2156870 - RNA, 19 nt, Homo sapiens
  misc_RNA (1)...(19): siRNA sense strand
cuacaaaugcaaagaaugu

SEQ ID NO: 2156871 - RNA, 19 nt, Homo sapiens
  misc_RNA (1)...(19): siRNA sense strand
gagaaguccuacaaaugca

SEQ ID NO: 2156872 - RNA, 19 nt, Homo sapiens
  misc_RNA (1)...(19): siRNA sense strand
caucagguaauucauacua

SEQ ID NO: 2156873 - RNA, 19 nt, Homo sapiens
  misc_RNA (1)...(19): siRNA sense strand
gccuuuagcuuauccucaa

SEQ ID NO: 2156874 - RNA, 19 nt, Homo sapiens
  misc_RNA (1)...(19): siRNA sense strand
agagaaacccuacacaugu

SEQ ID NO: 2156875 - RNA, 19 nt, Homo sapiens
  misc_RNA (1)...(19): siRNA sense strand
ggagagaaacccuacacau

SEQ ID NO: 2156876 - RNA, 19 nt, Homo sapiens
  misc_RNA (1)...(19): siRNA sense strand
cccagaauauaaagagaaa

SEQ ID NO: 2156877 - RNA, 19 nt, Homo sapiens
  misc_RNA (1)...(19): siRNA sense strand
agaauucucucuggaggaa

SEQ ID NO: 2156878 - RNA, 19 nt, Homo sapiens
  misc_RNA (1)...(19): siRNA sense strand
cagcggaauuuauauagag

SEQ ID NO: 2156879 - RNA, 19 nt, Homo sapiens
  misc_RNA (1)...(19): siRNA sense strand
agagaaaccauauagaugu

SEQ ID NO: 2156880 - RNA, 19 nt, Homo sapiens
  misc_RNA (1)...(19): siRNA sense strand
gauguuagagaacuacaga

SEQ ID NO: 2156881 - RNA, 19 nt, Homo sapiens
  misc_RNA (1)...(19): siRNA sense strand
agagagacccuacacaugu

SEQ ID NO: 2156882 - RNA, 19 nt, Homo sapiens
  misc_RNA (1)...(19): siRNA sense strand
ugaagaguguggcaaaguc

SEQ ID NO: 2156883 - RNA, 19 nt, Homo sapiens
  misc_RNA (1)...(19): siRNA sense strand
ugaagaauguggccaagac

SEQ ID NO: 2156884 - RNA, 19 nt, Homo sapiens
  misc_RNA (1)...(19): siRNA sense strand
ccucagcacuuacuaacca

SEQ ID NO: 2156885 - RNA, 19 nt, Homo sapiens
  misc_RNA (1)...(19): siRNA sense strand
cuaaaucaacaucagguaa

SEQ ID NO: 2156886 - RNA, 19 nt, Homo sapiens
  misc_RNA (1)...(19): siRNA sense strand
uaaguggcauucaagucuu

SEQ ID NO: 2156887 - RNA, 19 nt, Homo sapiens
  misc_RNA (1)...(19): siRNA sense strand
ucacugaccacaagagaau

SEQ ID NO: 2156888 - RNA, 19 nt, Homo sapiens
  misc_RNA (1)...(19): siRNA sense strand
ucacugaccacaagagaau

SEQ ID NO: 2156889 - RNA, 19 nt, Homo sapiens
  misc_RNA (1)...(19): siRNA sense strand
ucacugaccacaagagaau

SEQ ID NO: 2156890 - RNA, 19 nt, Homo sapiens
  misc_RNA (1)...(19): siRNA sense strand
gcaaagaauguggcaaauc

SEQ ID NO: 2156891 - RNA, 19 nt, Homo sapiens
  misc_RNA (1)...(19): siRNA sense strand
guaauaccaagaacauaug

SEQ ID NO: 2156892 - RNA, 19 nt, Homo sapiens
  misc_RNA (1)...(19): siRNA sense strand
cgagaaaugggacuguuga

SEQ ID NO: 2156893 - RNA, 19 nt, Homo sapiens
  misc_RNA (1)...(19): siRNA sense strand
ucagcggaauuuauauaga

SEQ ID NO: 2156894 - RNA, 19 nt, Homo sapiens
  misc_RNA (1)...(19): siRNA sense strand
gggagguuauagugaaguu

SEQ ID NO: 2156895 - RNA, 19 nt, Homo sapiens
  misc_RNA (1)...(19): siRNA sense strand
gaaguccuacaaaugcaaa

SEQ ID NO: 2156896 - RNA, 19 nt, Homo sapiens
  misc_RNA (1)...(19): siRNA sense strand
gccuuuagcugguccucaa

SEQ ID NO: 2156897 - RNA, 19 nt, Homo sapiens
  misc_RNA (1)...(19): siRNA sense strand
gcacuuacuaaccacaaga

SEQ ID NO: 2156898 - RNA, 19 nt, Homo sapiens
  misc_RNA (1)...(19): siRNA sense strand
gaauucauacuagagagaa

SEQ ID NO: 2156899 - RNA, 19 nt, Homo sapiens
  misc_RNA (1)...(19): siRNA sense strand
agacauagcuauagaauuc

SEQ ID NO: 2156900 - RNA, 19 nt, Homo sapiens
  misc_RNA (1)...(19): siRNA sense strand
cuacaaaugugaagaaugu

SEQ ID NO: 2156901 - RNA, 19 nt, Homo sapiens
  misc_RNA (1)...(19): siRNA sense strand
cuacaaaugugaagaaugu

SEQ ID NO: 2156902 - RNA, 19 nt, Homo sapiens
  misc_RNA (1)...(19): siRNA sense strand
cuacaaaugugaagaaugu

SEQ ID NO: 2156903 - RNA, 19 nt, Homo sapiens
  misc_RNA (1)...(19): siRNA sense strand
caucaaagauucacuccaa

SEQ ID NO: 2156904 - RNA, 19 nt, Homo sapiens
  misc_RNA (1)...(19): siRNA sense strand
caagggagguuauagugaa

SEQ ID NO: 2156905 - RNA, 19 nt, Homo sapiens
  misc_RNA (1)...(19): siRNA sense strand
gagagaaacccuacaaaug

SEQ ID NO: 2156906 - RNA, 19 nt, Homo sapiens
  misc_RNA (1)...(19): siRNA sense strand
gagagaaacccuacaaaug

SEQ ID NO: 2156907 - RNA, 19 nt, Homo sapiens
  misc_RNA (1)...(19): siRNA sense strand
caacaucagguaauucaua

SEQ ID NO: 2156908 - RNA, 19 nt, Homo sapiens
  misc_RNA (1)...(19): siRNA sense strand
agacauaggagaauucaua

SEQ ID NO: 2156909 - RNA, 19 nt, Homo sapiens
  misc_RNA (1)...(19): siRNA sense strand
aauaaagagucccagaaua

SEQ ID NO: 2156910 - RNA, 19 nt, Homo sapiens
  misc_RNA (1)...(19): siRNA sense strand
ggagagagacccuacaaau

SEQ ID NO: 2156911 - RNA, 19 nt, Homo sapiens
  misc_RNA (1)...(19): siRNA sense strand
ggagagagacccuacaaau

SEQ ID NO: 2156912 - RNA, 19 nt, Homo sapiens
  misc_RNA (1)...(19): siRNA sense strand
ggagagagacccuacaaau

SEQ ID NO: 2156913 - RNA, 19 nt, Homo sapiens
  misc_RNA (1)...(19): siRNA sense strand
gagcagggcaucaaagauu

SEQ ID NO: 2156914 - RNA, 19 nt, Homo sapiens
  misc_RNA (1)...(19): siRNA sense strand
aaagagaaaugagauggua

SEQ ID NO: 2156915 - RNA, 19 nt, Homo sapiens
  misc_RNA (1)...(19): siRNA sense strand
gaauguggcaaauccuuua

SEQ ID NO: 2156916 - RNA, 19 nt, Homo sapiens
  misc_RNA (1)...(19): siRNA sense strand
gagaaacccuacaaaugug

SEQ ID NO: 2156917 - RNA, 19 nt, Homo sapiens
  misc_RNA (1)...(19): siRNA sense strand
gagaaacccuacaaaugug

SEQ ID NO: 2156918 - RNA, 19 nt, Homo sapiens
  misc_RNA (1)...(19): siRNA sense strand
cuacaaaugugaagagugu

SEQ ID NO: 2156919 - RNA, 19 nt, Homo sapiens
  misc_RNA (1)...(19): siRNA sense strand
gagaugugauguuagagaa

SEQ ID NO: 2156920 - RNA, 19 nt, Homo sapiens
  misc_RNA (1)...(19): siRNA sense strand
ggagagaaaccauauagau

SEQ ID NO: 2156921 - RNA, 19 nt, Homo sapiens
  misc_RNA (1)...(19): siRNA sense strand
gagagaaacccuacacaug

SEQ ID NO: 2156922 - RNA, 19 nt, Homo sapiens
  misc_RNA (1)...(19): siRNA sense strand
gagaaacccuacacaugug

SEQ ID NO: 2156923 - RNA, 19 nt, Homo sapiens
  misc_RNA (1)...(19): siRNA sense strand
ggagagaaacccuacaaau

SEQ ID NO: 2156924 - RNA, 19 nt, Homo sapiens
  misc_RNA (1)...(19): siRNA sense strand
ggagagaaacccuacaaau

SEQ ID NO: 2156925 - RNA, 19 nt, Homo sapiens
  misc_RNA (1)...(19): siRNA sense strand
uaaagagucccagaauaua

SEQ ID NO: 2156926 - RNA, 19 nt, Homo sapiens
  misc_RNA (1)...(19): siRNA sense strand
gagagaaaccauauagaug

SEQ ID NO: 2156927 - RNA, 19 nt, Homo sapiens
  misc_RNA (1)...(19): siRNA sense strand
gagagagacccuacaaaug

SEQ ID NO: 2156928 - RNA, 19 nt, Homo sapiens
  misc_RNA (1)...(19): siRNA sense strand
gagagagacccuacaaaug

SEQ ID NO: 2156929 - RNA, 19 nt, Homo sapiens
  misc_RNA (1)...(19): siRNA sense strand
gagagagacccuacaaaug

SEQ ID NO: 2156930 - RNA, 19 nt, Homo sapiens
  misc_RNA (1)...(19): siRNA sense strand
caaagaauguggcaaaucc

SEQ ID NO: 2156931 - RNA, 19 nt, Homo sapiens
  misc_RNA (1)...(19): siRNA sense strand
gaauguggccaagacuuua

SEQ ID NO: 2156932 - RNA, 19 nt, Homo sapiens
  misc_RNA (1)...(19): siRNA sense strand
gagaaaccauauagaugug

SEQ ID NO: 2156933 - RNA, 19 nt, Homo sapiens
  misc_RNA (1)...(19): siRNA sense strand
caaaccauacuacacauaa

SEQ ID NO: 2156934 - RNA, 19 nt, Homo sapiens
  misc_RNA (1)...(19): siRNA sense strand
gaauguggccaagccuuua

SEQ ID NO: 2156935 - RNA, 19 nt, Homo sapiens
  misc_RNA (1)...(19): siRNA sense strand
ucagagacauagcuauaga

SEQ ID NO: 2156936 - RNA, 19 nt, Homo sapiens
  misc_RNA (1)...(19): siRNA sense strand
gagagacccuacaaaugug

SEQ ID NO: 2156937 - RNA, 19 nt, Homo sapiens
  misc_RNA (1)...(19): siRNA sense strand
gagagacccuacaaaugug

SEQ ID NO: 2156938 - RNA, 19 nt, Homo sapiens
  misc_RNA (1)...(19): siRNA sense strand
gaaaugggacuguugacau

SEQ ID NO: 2156939 - RNA, 19 nt, Homo sapiens
  misc_RNA (1)...(19): siRNA sense strand
gaauguggccaagccuuua

SEQ ID NO: 2156940 - RNA, 19 nt, Homo sapiens
  misc_RNA (1)...(19): siRNA sense strand
gagagacccuacaaaugug

SEQ ID NO: 2156941 - RNA, 19 nt, Homo sapiens
  misc_RNA (1)...(19): siRNA sense strand
gaccacaagagaauucaua

SEQ ID NO: 2156942 - RNA, 19 nt, Homo sapiens
  misc_RNA (1)...(19): siRNA sense strand
agagaaacccuacaaaugu

SEQ ID NO: 2156943 - RNA, 19 nt, Homo sapiens
  misc_RNA (1)...(19): siRNA sense strand
gugcucagcggaauuuaua

SEQ ID NO: 2156944 - RNA, 19 nt, Homo sapiens
  misc_RNA (1)...(19): siRNA sense strand
agagaaacccuacaaaugu

SEQ ID NO: 2156945 - RNA, 19 nt, Homo sapiens
  misc_RNA (1)...(19): siRNA sense strand
gcucagcggaauuuauaua

SEQ ID NO: 2156946 - RNA, 19 nt, Homo sapiens
  misc_RNA (1)...(19): siRNA sense strand
gaccacaagagaauucaua

SEQ ID NO: 2156947 - RNA, 19 nt, Homo sapiens
  misc_RNA (1)...(19): siRNA sense strand
gaccacaagagaauucaua

SEQ ID NO: 2156948 - RNA, 19 nt, Homo sapiens
  misc_RNA (1)...(19): siRNA sense strand
ggagaaguccuacaaaugc

SEQ ID NO: 2156949 - RNA, 19 nt, Homo sapiens
  misc_RNA (1)...(19): siRNA sense strand
gaaacccuaugccugugaa

SEQ ID NO: 2156950 - RNA, 19 nt, Homo sapiens
  misc_RNA (1)...(19): siRNA sense strand
gagguuauagugaaguuaa

SEQ ID NO: 2156951 - RNA, 19 nt, Homo sapiens
  misc_RNA (1)...(19): siRNA sense strand
gagagacccuacacaugug

SEQ ID NO: 2156952 - RNA, 19 nt, Homo sapiens
  misc_RNA (1)...(19): siRNA sense strand
auagagaugugauguuaga

SEQ ID NO: 2156953 - RNA, 19 nt, Homo sapiens
  misc_RNA (1)...(19): siRNA sense strand
ggagagagacccuacacau

SEQ ID NO: 2156954 - RNA, 19 nt, Homo sapiens
  misc_RNA (1)...(19): siRNA sense strand
agagagacccuacaaaugu

SEQ ID NO: 2156955 - RNA, 19 nt, Homo sapiens
  misc_RNA (1)...(19): siRNA sense strand
agagagacccuacaaaugu

SEQ ID NO: 2156956 - RNA, 19 nt, Homo sapiens
  misc_RNA (1)...(19): siRNA sense strand
ccucgaaccuuaugagaca

SEQ ID NO: 2156957 - RNA, 19 nt, Homo sapiens
  misc_RNA (1)...(19): siRNA sense strand
agagagacccuacaaaugu

SEQ ID NO: 2156958 - RNA, 19 nt, Homo sapiens
  misc_RNA (1)...(19): siRNA sense strand
aaagagucccagaauauaa

SEQ ID NO: 2156959 - RNA, 19 nt, Homo sapiens
  misc_RNA (1)...(19): siRNA sense strand
gagagagacccuacacaug

SEQ ID NO: 2156960 - RNA, 19 nt, Homo sapiens
  misc_RNA (1)...(19): siRNA sense strand
gggagaaguccuacaaaug

SEQ ID NO: 2156961 - RNA, 19 nt, Homo sapiens
  misc_RNA (1)...(19): siRNA sense strand
auaaagagucccagaauau

SEQ ID NO: 2156962 - RNA, 19 nt, Homo sapiens
  misc_RNA (1)...(19): siRNA sense strand
ccucaacccuuaugcaaca

SEQ ID NO: 2156963 - RNA, 19 nt, Homo sapiens
  misc_RNA (1)...(19): siRNA sense strand
cuacacgugugaagaaugu

SEQ ID NO: 2156964 - RNA, 19 nt, Homo sapiens
  misc_RNA (1)...(19): siRNA sense strand
gcacaagggagguuauagu

SEQ ID NO: 2156965 - RNA, 19 nt, Homo sapiens
  misc_RNA (1)...(19): siRNA sense strand
gcacuuacuauccacaaga

SEQ ID NO: 2156966 - RNA, 19 nt, Homo sapiens
  misc_RNA (1)...(19): siRNA sense strand
ccauauagaugugaggaau

SEQ ID NO: 2156967 - RNA, 19 nt, Homo sapiens
  misc_RNA (1)...(19): siRNA sense strand
cauaagagaauucauacug

SEQ ID NO: 2156968 - RNA, 19 nt, Homo sapiens
  misc_RNA (1)...(19): siRNA sense strand
ggacaugagaaauuacaau

SEQ ID NO: 2156969 - RNA, 19 nt, Homo sapiens
  misc_RNA (1)...(19): siRNA sense strand
gccuuuagcuggucugcaa

SEQ ID NO: 2156970 - RNA, 19 nt, Homo sapiens
  misc_RNA (1)...(19): siRNA sense strand
cuacaaaugcaaagaaugu

SEQ ID NO: 2156971 - RNA, 19 nt, Homo sapiens
  misc_RNA (1)...(19): siRNA sense strand
gagaaguccuacaaaugca

SEQ ID NO: 2156972 - RNA, 19 nt, Homo sapiens
  misc_RNA (1)...(19): siRNA sense strand
caucagguaauucauacua

SEQ ID NO: 2156973 - RNA, 19 nt, Homo sapiens
  misc_RNA (1)...(19): siRNA sense strand
gccuuuagcuuauccucaa

SEQ ID NO: 2156974 - RNA, 19 nt, Homo sapiens
  misc_RNA (1)...(19): siRNA sense strand
agagaaacccuacacaugu

SEQ ID NO: 2156975 - RNA, 19 nt, Homo sapiens
  misc_RNA (1)...(19): siRNA sense strand
ggagagaaacccuacacau

SEQ ID NO: 2156976 - RNA, 19 nt, Homo sapiens
  misc_RNA (1)...(19): siRNA sense strand
cccagaauauaaagagaaa

SEQ ID NO: 2156977 - RNA, 19 nt, Homo sapiens
  misc_RNA (1)...(19): siRNA sense strand
agaauucucucuggaggaa

SEQ ID NO: 2156978 - RNA, 19 nt, Homo sapiens
  misc_RNA (1)...(19): siRNA sense strand
cagcggaauuuauauagag

SEQ ID NO: 2156979 - RNA, 19 nt, Homo sapiens
  misc_RNA (1)...(19): siRNA sense strand
agagaaaccauauagaugu

SEQ ID NO: 2156980 - RNA, 19 nt, Homo sapiens
  misc_RNA (1)...(19): siRNA sense strand
gauguuagagaacuacaga

SEQ ID NO: 2156981 - RNA, 19 nt, Homo sapiens
  misc_RNA (1)...(19): siRNA sense strand
agagagacccuacacaugu

SEQ ID NO: 2156982 - RNA, 19 nt, Homo sapiens
  misc_RNA (1)...(19): siRNA sense strand
ugaagaguguggcaaaguc

SEQ ID NO: 2156983 - RNA, 19 nt, Homo sapiens
  misc_RNA (1)...(19): siRNA sense strand
ugaagaauguggccaagac

SEQ ID NO: 2156984 - RNA, 19 nt, Homo sapiens
  misc_RNA (1)...(19): siRNA sense strand
ccucagcacuuacuaacca

SEQ ID NO: 2156985 - RNA, 19 nt, Homo sapiens
  misc_RNA (1)...(19): siRNA sense strand
cuaaaucaacaucagguaa

SEQ ID NO: 2156986 - RNA, 19 nt, Homo sapiens
  misc_RNA (1)...(19): siRNA sense strand
uaaguggcauucaagucuu

SEQ ID NO: 2156987 - RNA, 19 nt, Homo sapiens
  misc_RNA (1)...(19): siRNA sense strand
ucacugaccacaagagaau

SEQ ID NO: 2156988 - RNA, 19 nt, Homo sapiens
  misc_RNA (1)...(19): siRNA sense strand
ucacugaccacaagagaau

SEQ ID NO: 2156989 - RNA, 19 nt, Homo sapiens
  misc_RNA (1)...(19): siRNA sense strand
ucacugaccacaagagaau

SEQ ID NO: 2156990 - RNA, 19 nt, Homo sapiens
  misc_RNA (1)...(19): siRNA sense strand
gcaaagaauguggcaaauc

SEQ ID NO: 2156991 - RNA, 19 nt, Homo sapiens
  misc_RNA (1)...(19): siRNA sense strand
guaauaccaagaacauaug

SEQ ID NO: 2156992 - RNA, 19 nt, Homo sapiens
  misc_RNA (1)...(19): siRNA sense strand
cgagaaaugggacuguuga

SEQ ID NO: 2156993 - RNA, 19 nt, Homo sapiens
  misc_RNA (1)...(19): siRNA sense strand
ucagcggaauuuauauaga

SEQ ID NO: 2156994 - RNA, 19 nt, Homo sapiens
  misc_RNA (1)...(19): siRNA sense strand
gggagguuauagugaaguu

SEQ ID NO: 2156995 - RNA, 19 nt, Homo sapiens
  misc_RNA (1)...(19): siRNA sense strand
gaaguccuacaaaugcaaa

SEQ ID NO: 2156996 - RNA, 19 nt, Homo sapiens
  misc_RNA (1)...(19): siRNA sense strand
gccuuuagcugguccucaa

SEQ ID NO: 2156997 - RNA, 19 nt, Homo sapiens
  misc_RNA (1)...(19): siRNA sense strand
gcacuuacuaaccacaaga

SEQ ID NO: 2156998 - RNA, 19 nt, Homo sapiens
  misc_RNA (1)...(19): siRNA sense strand
gaauucauacuagagagaa

SEQ ID NO: 2156999 - RNA, 19 nt, Homo sapiens
  misc_RNA (1)...(19): siRNA sense strand
ggucaucuauuucuucaua

SEQ ID NO: 2157000 - RNA, 19 nt, Homo sapiens
  misc_RNA (1)...(19): siRNA sense strand
ggaacacugucuacacaug

SEQ ID NO: 2157001 - RNA, 19 nt, Homo sapiens
  misc_RNA (1)...(19): siRNA sense strand
caucuggcaucucuuugua

SEQ ID NO: 2157002 - RNA, 19 nt, Homo sapiens
  misc_RNA (1)...(19): siRNA sense strand
agaccaagguguccaaaug

SEQ ID NO: 2157003 - RNA, 19 nt, Homo sapiens
  misc_RNA (1)...(19): siRNA sense strand
gcaucucuuuguagcauuu

SEQ ID NO: 2157004 - RNA, 19 nt, Homo sapiens
  misc_RNA (1)...(19): siRNA sense strand
gguaccagcccacagagua

SEQ ID NO: 2157005 - RNA, 19 nt, Homo sapiens
  misc_RNA (1)...(19): siRNA sense strand
gaaauacgcgagguucaug

SEQ ID NO: 2157006 - RNA, 19 nt, Homo sapiens
  misc_RNA (1)...(19): siRNA sense strand
caccaucuaugucuucuuc

SEQ ID NO: 2157007 - RNA, 19 nt, Homo sapiens
  misc_RNA (1)...(19): siRNA sense strand
gaacacugucuacacaugu

SEQ ID NO: 2157008 - RNA, 19 nt, Homo sapiens
  misc_RNA (1)...(19): siRNA sense strand
gaccaagguguccaaauga

SEQ ID NO: 2157009 - RNA, 19 nt, Homo sapiens
  misc_RNA (1)...(19): siRNA sense strand
guggaacacugucuacaca

SEQ ID NO: 2157010 - RNA, 19 nt, Homo sapiens
  misc_RNA (1)...(19): siRNA sense strand
uggcuggucuggauuaugg

SEQ ID NO: 2157011 - RNA, 19 nt, Homo sapiens
  misc_RNA (1)...(19): siRNA sense strand
uuguggagcuucucugcua

SEQ ID NO: 2157012 - RNA, 19 nt, Homo sapiens
  misc_RNA (1)...(19): siRNA sense strand
ccaucuaugucuucuucuu

SEQ ID NO: 2157013 - RNA, 19 nt, Homo sapiens
  misc_RNA (1)...(19): siRNA sense strand
cacaccaucuccuggaaga

SEQ ID NO: 2157014 - RNA, 19 nt, Homo sapiens
  misc_RNA (1)...(19): siRNA sense strand
ccagcacccugcagaccaa

SEQ ID NO: 2157015 - RNA, 19 nt, Homo sapiens
  misc_RNA (1)...(19): siRNA sense strand
guaccagcccacagaguau

SEQ ID NO: 2157016 - RNA, 19 nt, Homo sapiens
  misc_RNA (1)...(19): siRNA sense strand
gaugguggaacacugucua

SEQ ID NO: 2157017 - RNA, 19 nt, Homo sapiens
  misc_RNA (1)...(19): siRNA sense strand
gugcugguacccacuacua

SEQ ID NO: 2157018 - RNA, 19 nt, Homo sapiens
  misc_RNA (1)...(19): siRNA sense strand
gggcauggucuucuucaag

SEQ ID NO: 2157019 - RNA, 19 nt, Homo sapiens
  misc_RNA (1)...(19): siRNA sense strand
gcuccaaccucuacuuccu

SEQ ID NO: 2157020 - RNA, 19 nt, Homo sapiens
  misc_RNA (1)...(19): siRNA sense strand
gcugguacccacuacuaug

SEQ ID NO: 2157021 - RNA, 19 nt, Homo sapiens
  misc_RNA (1)...(19): siRNA sense strand
gggcagcuccaaccucuac

SEQ ID NO: 2157022 - RNA, 19 nt, Homo sapiens
  misc_RNA (1)...(19): siRNA sense strand
agagguaccagcccacaga

SEQ ID NO: 2157023 - RNA, 19 nt, Homo sapiens
  misc_RNA (1)...(19): siRNA sense strand
cgaaauacgcgagguucau

SEQ ID NO: 2157024 - RNA, 19 nt, Homo sapiens
  misc_RNA (1)...(19): siRNA sense strand
gcccacagaguaugaacau

SEQ ID NO: 2157025 - RNA, 19 nt, Homo sapiens
  misc_RNA (1)...(19): siRNA sense strand
acuaugccaucuggaggua

SEQ ID NO: 2157026 - RNA, 19 nt, Homo sapiens
  misc_RNA (1)...(19): siRNA sense strand
uggcaucucuuuguagcau

SEQ ID NO: 2157027 - RNA, 19 nt, Homo sapiens
  misc_RNA (1)...(19): siRNA sense strand
gcagcuccaaccucuacuu

SEQ ID NO: 2157028 - RNA, 19 nt, Homo sapiens
  misc_RNA (1)...(19): siRNA sense strand
caucuaugucuucuucuuc

SEQ ID NO: 2157029 - RNA, 19 nt, Homo sapiens
  misc_RNA (1)...(19): siRNA sense strand
gggcaccaucuaugucuuc

SEQ ID NO: 2157030 - RNA, 19 nt, Homo sapiens
  misc_RNA (1)...(19): siRNA sense strand
ggucaucuauuucuucaua

SEQ ID NO: 2157031 - RNA, 19 nt, Homo sapiens
  misc_RNA (1)...(19): siRNA sense strand
ggaacacugucuacacaug

SEQ ID NO: 2157032 - RNA, 19 nt, Homo sapiens
  misc_RNA (1)...(19): siRNA sense strand
caucuggcaucucuuugua

SEQ ID NO: 2157033 - RNA, 19 nt, Homo sapiens
  misc_RNA (1)...(19): siRNA sense strand
agaccaagguguccaaaug

SEQ ID NO: 2157034 - RNA, 19 nt, Homo sapiens
  misc_RNA (1)...(19): siRNA sense strand
gcaucucuuuguagcauuu

SEQ ID NO: 2157035 - RNA, 19 nt, Homo sapiens
  misc_RNA (1)...(19): siRNA sense strand
gguaccagcccacagagua

SEQ ID NO: 2157036 - RNA, 19 nt, Homo sapiens
  misc_RNA (1)...(19): siRNA sense strand
gaaauacgcgagguucaug

SEQ ID NO: 2157037 - RNA, 19 nt, Homo sapiens
  misc_RNA (1)...(19): siRNA sense strand
caccaucuaugucuucuuc

SEQ ID NO: 2157038 - RNA, 19 nt, Homo sapiens
  misc_RNA (1)...(19): siRNA sense strand
gaacacugucuacacaugu

SEQ ID NO: 2157039 - RNA, 19 nt, Homo sapiens
  misc_RNA (1)...(19): siRNA sense strand
gaccaagguguccaaauga

SEQ ID NO: 2157040 - RNA, 19 nt, Homo sapiens
  misc_RNA (1)...(19): siRNA sense strand
guggaacacugucuacaca

SEQ ID NO: 2157041 - RNA, 19 nt, Homo sapiens
  misc_RNA (1)...(19): siRNA sense strand
uggcuggucuggauuaugg

SEQ ID NO: 2157042 - RNA, 19 nt, Homo sapiens
  misc_RNA (1)...(19): siRNA sense strand
uuguggagcuucucugcua

SEQ ID NO: 2157043 - RNA, 19 nt, Homo sapiens
  misc_RNA (1)...(19): siRNA sense strand
ccaucuaugucuucuucuu

SEQ ID NO: 2157044 - RNA, 19 nt, Homo sapiens
  misc_RNA (1)...(19): siRNA sense strand
cacaccaucuccuggaaga

SEQ ID NO: 2157045 - RNA, 19 nt, Homo sapiens
  misc_RNA (1)...(19): siRNA sense strand
ccagcacccugcagaccaa

SEQ ID NO: 2157046 - RNA, 19 nt, Homo sapiens
  misc_RNA (1)...(19): siRNA sense strand
guaccagcccacagaguau

SEQ ID NO: 2157047 - RNA, 19 nt, Homo sapiens
  misc_RNA (1)...(19): siRNA sense strand
gaugguggaacacugucua

SEQ ID NO: 2157048 - RNA, 19 nt, Homo sapiens
  misc_RNA (1)...(19): siRNA sense strand
gugcugguacccacuacua

SEQ ID NO: 2157049 - RNA, 19 nt, Homo sapiens
  misc_RNA (1)...(19): siRNA sense strand
gggcauggucuucuucaag

SEQ ID NO: 2157050 - RNA, 19 nt, Homo sapiens
  misc_RNA (1)...(19): siRNA sense strand
gcuccaaccucuacuuccu

SEQ ID NO: 2157051 - RNA, 19 nt, Homo sapiens
  misc_RNA (1)...(19): siRNA sense strand
gcugguacccacuacuaug

SEQ ID NO: 2157052 - RNA, 19 nt, Homo sapiens
  misc_RNA (1)...(19): siRNA sense strand
gggcagcuccaaccucuac

SEQ ID NO: 2157053 - RNA, 19 nt, Homo sapiens
  misc_RNA (1)...(19): siRNA sense strand
agagguaccagcccacaga

SEQ ID NO: 2157054 - RNA, 19 nt, Homo sapiens
  misc_RNA (1)...(19): siRNA sense strand
cgaaauacgcgagguucau

SEQ ID NO: 2157055 - RNA, 19 nt, Homo sapiens
  misc_RNA (1)...(19): siRNA sense strand
uggcaucucuuuguagcau

SEQ ID NO: 2157056 - RNA, 19 nt, Homo sapiens
  misc_RNA (1)...(19): siRNA sense strand
acuaugccaucuggaggua

SEQ ID NO: 2157057 - RNA, 19 nt, Homo sapiens
  misc_RNA (1)...(19): siRNA sense strand
gcccacagaguaugaacau

SEQ ID NO: 2157058 - RNA, 19 nt, Homo sapiens
  misc_RNA (1)...(19): siRNA sense strand
gcagcuccaaccucuacuu

SEQ ID NO: 2157059 - RNA, 19 nt, Homo sapiens
  misc_RNA (1)...(19): siRNA sense strand
caucuaugucuucuucuuc

SEQ ID NO: 2157060 - RNA, 19 nt, Homo sapiens
  misc_RNA (1)...(19): siRNA sense strand
gggcaccaucuaugucuuc

SEQ ID NO: 2157061 - RNA, 19 nt, Homo sapiens
  misc_RNA (1)...(19): siRNA sense strand
ggucaucuauuucuucaua

SEQ ID NO: 2157062 - RNA, 19 nt, Homo sapiens
  misc_RNA (1)...(19): siRNA sense strand
ggaacacugucuacacaug

SEQ ID NO: 2157063 - RNA, 19 nt, Homo sapiens
  misc_RNA (1)...(19): siRNA sense strand
caucuggcaucucuuugua

SEQ ID NO: 2157064 - RNA, 19 nt, Homo sapiens
  misc_RNA (1)...(19): siRNA sense strand
agaccaagguguccaaaug

SEQ ID NO: 2157065 - RNA, 19 nt, Homo sapiens
  misc_RNA (1)...(19): siRNA sense strand
gcaucucuuuguagcauuu

SEQ ID NO: 2157066 - RNA, 19 nt, Homo sapiens
  misc_RNA (1)...(19): siRNA sense strand
gguaccagcccacagagua

SEQ ID NO: 2157067 - RNA, 19 nt, Homo sapiens
  misc_RNA (1)...(19): siRNA sense strand
gaaauacgcgagguucaug

SEQ ID NO: 2157068 - RNA, 19 nt, Homo sapiens
  misc_RNA (1)...(19): siRNA sense strand
caccaucuaugucuucuuc

SEQ ID NO: 2157069 - RNA, 19 nt, Homo sapiens
  misc_RNA (1)...(19): siRNA sense strand
gaacacugucuacacaugu

SEQ ID NO: 2157070 - RNA, 19 nt, Homo sapiens
  misc_RNA (1)...(19): siRNA sense strand
gaccaagguguccaaauga

SEQ ID NO: 2157071 - RNA, 19 nt, Homo sapiens
  misc_RNA (1)...(19): siRNA sense strand
guggaacacugucuacaca

SEQ ID NO: 2157072 - RNA, 19 nt, Homo sapiens
  misc_RNA (1)...(19): siRNA sense strand
uggcuggucuggauuaugg

SEQ ID NO: 2157073 - RNA, 19 nt, Homo sapiens
  misc_RNA (1)...(19): siRNA sense strand
uuguggagcuucucugcua

SEQ ID NO: 2157074 - RNA, 19 nt, Homo sapiens
  misc_RNA (1)...(19): siRNA sense strand
ccaucuaugucuucuucuu

SEQ ID NO: 2157075 - RNA, 19 nt, Homo sapiens
  misc_RNA (1)...(19): siRNA sense strand
cacaccaucuccuggaaga

SEQ ID NO: 2157076 - RNA, 19 nt, Homo sapiens
  misc_RNA (1)...(19): siRNA sense strand
ccagcacccugcagaccaa

SEQ ID NO: 2157077 - RNA, 19 nt, Homo sapiens
  misc_RNA (1)...(19): siRNA sense strand
guaccagcccacagaguau

SEQ ID NO: 2157078 - RNA, 19 nt, Homo sapiens
  misc_RNA (1)...(19): siRNA sense strand
gaugguggaacacugucua

SEQ ID NO: 2157079 - RNA, 19 nt, Homo sapiens
  misc_RNA (1)...(19): siRNA sense strand
gugcugguacccacuacua

SEQ ID NO: 2157080 - RNA, 19 nt, Homo sapiens
  misc_RNA (1)...(19): siRNA sense strand
gggcauggucuucuucaag

SEQ ID NO: 2157081 - RNA, 19 nt, Homo sapiens
  misc_RNA (1)...(19): siRNA sense strand
gcuccaaccucuacuuccu

SEQ ID NO: 2157082 - RNA, 19 nt, Homo sapiens
  misc_RNA (1)...(19): siRNA sense strand
gcugguacccacuacuaug

SEQ ID NO: 2157083 - RNA, 19 nt, Homo sapiens
  misc_RNA (1)...(19): siRNA sense strand
gggcagcuccaaccucuac

SEQ ID NO: 2157084 - RNA, 19 nt, Homo sapiens
  misc_RNA (1)...(19): siRNA sense strand
agagguaccagcccacaga

SEQ ID NO: 2157085 - RNA, 19 nt, Homo sapiens
  misc_RNA (1)...(19): siRNA sense strand
cgaaauacgcgagguucau

SEQ ID NO: 2157086 - RNA, 19 nt, Homo sapiens
  misc_RNA (1)...(19): siRNA sense strand
uggcaucucuuuguagcau

SEQ ID NO: 2157087 - RNA, 19 nt, Homo sapiens
  misc_RNA (1)...(19): siRNA sense strand
acuaugccaucuggaggua

SEQ ID NO: 2157088 - RNA, 19 nt, Homo sapiens
  misc_RNA (1)...(19): siRNA sense strand
gcccacagaguaugaacau

SEQ ID NO: 2157089 - RNA, 19 nt, Homo sapiens
  misc_RNA (1)...(19): siRNA sense strand
gcagcuccaaccucuacuu

SEQ ID NO: 2157090 - RNA, 19 nt, Homo sapiens
  misc_RNA (1)...(19): siRNA sense strand
caucuaugucuucuucuuc

SEQ ID NO: 2157091 - RNA, 19 nt, Homo sapiens
  misc_RNA (1)...(19): siRNA sense strand
gggcaccaucuaugucuuc

SEQ ID NO: 2157092 - RNA, 19 nt, Homo sapiens
  misc_RNA (1)...(19): siRNA sense strand
gcaaauaugcucucuauag

SEQ ID NO: 2157093 - RNA, 19 nt, Homo sapiens
  misc_RNA (1)...(19): siRNA sense strand
uggaagaacugcauuauug

SEQ ID NO: 2157094 - RNA, 19 nt, Homo sapiens
  misc_RNA (1)...(19): siRNA sense strand
gcaagguggugacuaagaa

SEQ ID NO: 2157095 - RNA, 19 nt, Homo sapiens
  misc_RNA (1)...(19): siRNA sense strand
caucaacacugcaugcuuu

SEQ ID NO: 2157096 - RNA, 19 nt, Homo sapiens
  misc_RNA (1)...(19): siRNA sense strand
gaaaucaacgacagucuaa

SEQ ID NO: 2157097 - RNA, 19 nt, Homo sapiens
  misc_RNA (1)...(19): siRNA sense strand
gaagaaggccaaugaagug

SEQ ID NO: 2157098 - RNA, 19 nt, Homo sapiens
  misc_RNA (1)...(19): siRNA sense strand
guucagccauguuccuuua

SEQ ID NO: 2157099 - RNA, 19 nt, Homo sapiens
  misc_RNA (1)...(19): siRNA sense strand
ggaagaaggccaaugaagu

SEQ ID NO: 2157100 - RNA, 19 nt, Homo sapiens
  misc_RNA (1)...(19): siRNA sense strand
ggaccuacaugcuucucaa

SEQ ID NO: 2157101 - RNA, 19 nt, Homo sapiens
  misc_RNA (1)...(19): siRNA sense strand
caaccagaguuuaugcuau

SEQ ID NO: 2157102 - RNA, 19 nt, Homo sapiens
  misc_RNA (1)...(19): siRNA sense strand
guaauugacaucuccauga

SEQ ID NO: 2157103 - RNA, 19 nt, Homo sapiens
  misc_RNA (1)...(19): siRNA sense strand
cuacaugcuucucaaauuc

SEQ ID NO: 2157104 - RNA, 19 nt, Homo sapiens
  misc_RNA (1)...(19): siRNA sense strand
gcagaagccauaaggagaa

SEQ ID NO: 2157105 - RNA, 19 nt, Homo sapiens
  misc_RNA (1)...(19): siRNA sense strand
uaggcaagguggugacuaa

SEQ ID NO: 2157106 - RNA, 19 nt, Homo sapiens
  misc_RNA (1)...(19): siRNA sense strand
gccauaaggagaacucaua

SEQ ID NO: 2157107 - RNA, 19 nt, Homo sapiens
  misc_RNA (1)...(19): siRNA sense strand
ccucgcagcugacaaacuu

SEQ ID NO: 2157108 - RNA, 19 nt, Homo sapiens
  misc_RNA (1)...(19): siRNA sense strand
gaauguggacuuugcuuug

SEQ ID NO: 2157109 - RNA, 19 nt, Homo sapiens
  misc_RNA (1)...(19): siRNA sense strand
ccuacaugcuucucaaauu

SEQ ID NO: 2157110 - RNA, 19 nt, Homo sapiens
  misc_RNA (1)...(19): siRNA sense strand
caaauaugcucucuauagc

SEQ ID NO: 2157111 - RNA, 19 nt, Homo sapiens
  misc_RNA (1)...(19): siRNA sense strand
gacaggauaagaaggauaa

SEQ ID NO: 2157112 - RNA, 19 nt, Homo sapiens
  misc_RNA (1)...(19): siRNA sense strand
ucagccauguuccuuuaua

SEQ ID NO: 2157113 - RNA, 19 nt, Homo sapiens
  misc_RNA (1)...(19): siRNA sense strand
ggacuuugcuuugauucau

SEQ ID NO: 2157114 - RNA, 19 nt, Homo sapiens
  misc_RNA (1)...(19): siRNA sense strand
caacuguccugaaguggau

SEQ ID NO: 2157115 - RNA, 19 nt, Homo sapiens
  misc_RNA (1)...(19): siRNA sense strand
gauuaaugccugcaagauu

SEQ ID NO: 2157116 - RNA, 19 nt, Homo sapiens
  misc_RNA (1)...(19): siRNA sense strand
uugcaaauaugcucucuau

SEQ ID NO: 2157117 - RNA, 19 nt, Homo sapiens
  misc_RNA (1)...(19): siRNA sense strand
cagccauguuccuuuauaa

SEQ ID NO: 2157118 - RNA, 19 nt, Homo sapiens
  misc_RNA (1)...(19): siRNA sense strand
ccaauaccauaccucaaga

SEQ ID NO: 2157119 - RNA, 19 nt, Homo sapiens
  misc_RNA (1)...(19): siRNA sense strand
gcaaccagaguuuaugcua

SEQ ID NO: 2157120 - RNA, 19 nt, Homo sapiens
  misc_RNA (1)...(19): siRNA sense strand
gacuuugcuuugauucaua

SEQ ID NO: 2157121 - RNA, 19 nt, Homo sapiens
  misc_RNA (1)...(19): siRNA sense strand
ccaguugaauguggacuuu

SEQ ID NO: 2157122 - RNA, 19 nt, Homo sapiens
  misc_RNA (1)...(19): siRNA sense strand
ccaagcuuguugcaaauau

SEQ ID NO: 2157123 - RNA, 19 nt, Homo sapiens
  misc_RNA (1)...(19): siRNA sense strand
uaucuugacucauggaauc

SEQ ID NO: 2157124 - RNA, 19 nt, Homo sapiens
  misc_RNA (1)...(19): siRNA sense strand
ccaaugaaguggacugcau

SEQ ID NO: 2157125 - RNA, 19 nt, Homo sapiens
  misc_RNA (1)...(19): siRNA sense strand
uaugcuaucuugacucaug

SEQ ID NO: 2157126 - RNA, 19 nt, Homo sapiens
  misc_RNA (1)...(19): siRNA sense strand
ggaagaacugcauuauugu

SEQ ID NO: 2157127 - RNA, 19 nt, Homo sapiens
  misc_RNA (1)...(19): siRNA sense strand
ggacuuaucccagaaaauu

SEQ ID NO: 2157128 - RNA, 19 nt, Homo sapiens
  misc_RNA (1)...(19): siRNA sense strand
uaauugacaucuccaugau

SEQ ID NO: 2157129 - RNA, 19 nt, Homo sapiens
  misc_RNA (1)...(19): siRNA sense strand
cagaguuuaugcuaucuug

SEQ ID NO: 2157130 - RNA, 19 nt, Homo sapiens
  misc_RNA (1)...(19): siRNA sense strand
auuaaugccugcaagauug

SEQ ID NO: 2157131 - RNA, 19 nt, Homo sapiens
  misc_RNA (1)...(19): siRNA sense strand
cgaaaucaacgacagucua

SEQ ID NO: 2157132 - RNA, 19 nt, Homo sapiens
  misc_RNA (1)...(19): siRNA sense strand
caacacugcaugcuuugaa

SEQ ID NO: 2157133 - RNA, 19 nt, Homo sapiens
  misc_RNA (1)...(19): siRNA sense strand
caaugaaguggacugcaua

SEQ ID NO: 2157134 - RNA, 19 nt, Homo sapiens
  misc_RNA (1)...(19): siRNA sense strand
ugaaugaucguguggcuau

SEQ ID NO: 2157135 - RNA, 19 nt, Homo sapiens
  misc_RNA (1)...(19): siRNA sense strand
gaguggaagaacugcauua

SEQ ID NO: 2157136 - RNA, 19 nt, Homo sapiens
  misc_RNA (1)...(19): siRNA sense strand
gauccuugcagaagccaua

SEQ ID NO: 2157137 - RNA, 19 nt, Homo sapiens
  misc_RNA (1)...(19): siRNA sense strand
gaagaacugcauuauuguc

SEQ ID NO: 2157138 - RNA, 19 nt, Homo sapiens
  misc_RNA (1)...(19): siRNA sense strand
uggcuauccuuguagauga

SEQ ID NO: 2157139 - RNA, 19 nt, Homo sapiens
  misc_RNA (1)...(19): siRNA sense strand
caagcuuguugcaaauaug

SEQ ID NO: 2157140 - RNA, 19 nt, Homo sapiens
  misc_RNA (1)...(19): siRNA sense strand
ugacauggcagacacuugu

SEQ ID NO: 2157141 - RNA, 19 nt, Homo sapiens
  misc_RNA (1)...(19): siRNA sense strand
ugaaguggacugcauagug

SEQ ID NO: 2157142 - RNA, 19 nt, Homo sapiens
  misc_RNA (1)...(19): siRNA sense strand
ugaaguggauaagggagaa

SEQ ID NO: 2157143 - RNA, 19 nt, Homo sapiens
  misc_RNA (1)...(19): siRNA sense strand
auaaggagaacucauaaug

SEQ ID NO: 2157144 - RNA, 19 nt, Homo sapiens
  misc_RNA (1)...(19): siRNA sense strand
ccauaaggagaacucauaa

SEQ ID NO: 2157145 - RNA, 19 nt, Homo sapiens
  misc_RNA (1)...(19): siRNA sense strand
aauguggacuuugcuuuga

SEQ ID NO: 2157146 - RNA, 19 nt, Homo sapiens
  misc_RNA (1)...(19): siRNA sense strand
guggaagaacugcauuauu

SEQ ID NO: 2157147 - RNA, 19 nt, Homo sapiens
  misc_RNA (1)...(19): siRNA sense strand
gaacggaagaaggccaaug

SEQ ID NO: 2157148 - RNA, 19 nt, Homo sapiens
  misc_RNA (1)...(19): siRNA sense strand
aaucaacgacagucuaaug

SEQ ID NO: 2157149 - RNA, 19 nt, Homo sapiens
  misc_RNA (1)...(19): siRNA sense strand
uaaggagaacucauaaugg

SEQ ID NO: 2157150 - RNA, 19 nt, Homo sapiens
  misc_RNA (1)...(19): siRNA sense strand
aaccagaguuuaugcuauc

SEQ ID NO: 2157151 - RNA, 19 nt, Homo sapiens
  misc_RNA (1)...(19): siRNA sense strand
ucguguggcuauccuugua

SEQ ID NO: 2157152 - RNA, 19 nt, Homo sapiens
  misc_RNA (1)...(19): siRNA sense strand
cgacaggauaagaaggaua

SEQ ID NO: 2157153 - RNA, 19 nt, Homo sapiens
  misc_RNA (1)...(19): siRNA sense strand
ggagcaaccagaguuuaug

SEQ ID NO: 2157154 - RNA, 19 nt, Homo sapiens
  misc_RNA (1)...(19): siRNA sense strand
ugaauguggacuuugcuuu

SEQ ID NO: 2157155 - RNA, 19 nt, Homo sapiens
  misc_RNA (1)...(19): siRNA sense strand
uagcaggugcggaucauau

SEQ ID NO: 2157156 - RNA, 19 nt, Homo sapiens
  misc_RNA (1)...(19): siRNA sense strand
uaauggagcuuuugaucau

SEQ ID NO: 2157157 - RNA, 19 nt, Homo sapiens
  misc_RNA (1)...(19): siRNA sense strand
cagagugguuguggcgaaa

SEQ ID NO: 2157158 - RNA, 19 nt, Homo sapiens
  misc_RNA (1)...(19): siRNA sense strand
gcuagugggagaugugaau

SEQ ID NO: 2157159 - RNA, 19 nt, Homo sapiens
  misc_RNA (1)...(19): siRNA sense strand
ccuuaugcccgacaggaua

SEQ ID NO: 2157160 - RNA, 19 nt, Homo sapiens
  misc_RNA (1)...(19): siRNA sense strand
uuuaugcuaucuugacuca

SEQ ID NO: 2157161 - RNA, 19 nt, Homo sapiens
  misc_RNA (1)...(19): siRNA sense strand
ggcaagguggugacuaaga

SEQ ID NO: 2157162 - RNA, 19 nt, Homo sapiens
  misc_RNA (1)...(19): siRNA sense strand
auuauugucucgccagaug

SEQ ID NO: 2157163 - RNA, 19 nt, Homo sapiens
  misc_RNA (1)...(19): siRNA sense strand
gcaggugcggaucauauca

SEQ ID NO: 2157164 - RNA, 19 nt, Homo sapiens
  misc_RNA (1)...(19): siRNA sense strand
gccaagcuuguugcaaaua

SEQ ID NO: 2157165 - RNA, 19 nt, Homo sapiens
  misc_RNA (1)...(19): siRNA sense strand
gagugugcguggagaggau

SEQ ID NO: 2157166 - RNA, 19 nt, Homo sapiens
  misc_RNA (1)...(19): siRNA sense strand
gagugguuguggcgaaauc

SEQ ID NO: 2157167 - RNA, 19 nt, Homo sapiens
  misc_RNA (1)...(19): siRNA sense strand
ccgaguuacugcagucauc

SEQ ID NO: 2157168 - RNA, 19 nt, Homo sapiens
  misc_RNA (1)...(19): siRNA sense strand
uugcagaccaguugaaugu

SEQ ID NO: 2157169 - RNA, 19 nt, Homo sapiens
  misc_RNA (1)...(19): siRNA sense strand
agaauaucccugaguggaa

SEQ ID NO: 2157170 - RNA, 19 nt, Homo sapiens
  misc_RNA (1)...(19): siRNA sense strand
uguggacuuugcuuugauu

SEQ ID NO: 2157171 - RNA, 19 nt, Homo sapiens
  misc_RNA (1)...(19): siRNA sense strand
gaccuacaugcuucucaaa

SEQ ID NO: 2157172 - RNA, 19 nt, Homo sapiens
  misc_RNA (1)...(19): siRNA sense strand
ccagccauuucucgcauca

SEQ ID NO: 2157173 - RNA, 19 nt, Homo sapiens
  misc_RNA (1)...(19): siRNA sense strand
cggaucauaucaucaccau

SEQ ID NO: 2157174 - RNA, 19 nt, Homo sapiens
  misc_RNA (1)...(19): siRNA sense strand
cuugacucauggaaucuuu

SEQ ID NO: 2157175 - RNA, 19 nt, Homo sapiens
  misc_RNA (1)...(19): siRNA sense strand
gagcuuuugaucaugauua

SEQ ID NO: 2157176 - RNA, 19 nt, Homo sapiens
  misc_RNA (1)...(19): siRNA sense strand
agagccaacuguccugaag

SEQ ID NO: 2157177 - RNA, 19 nt, Homo sapiens
  misc_RNA (1)...(19): siRNA sense strand
uaucaucaccauggaccua

SEQ ID NO: 2157178 - RNA, 19 nt, Homo sapiens
  misc_RNA (1)...(19): siRNA sense strand
gagcaaccagaguuuaugc

SEQ ID NO: 2157179 - RNA, 19 nt, Homo sapiens
  misc_RNA (1)...(19): siRNA sense strand
cagcucccaccaggacuua

SEQ ID NO: 2157180 - RNA, 19 nt, Homo sapiens
  misc_RNA (1)...(19): siRNA sense strand
ugacaucuccaugauccuu

SEQ ID NO: 2157181 - RNA, 19 nt, Homo sapiens
  misc_RNA (1)...(19): siRNA sense strand
guagaugacauggcagaca

SEQ ID NO: 2157182 - RNA, 19 nt, Homo sapiens
  misc_RNA (1)...(19): siRNA sense strand
gaaugaucguguggcuauc

SEQ ID NO: 2157183 - RNA, 19 nt, Homo sapiens
  misc_RNA (1)...(19): siRNA sense strand
agccaacuguccugaagug

SEQ ID NO: 2157184 - RNA, 19 nt, Homo sapiens
  misc_RNA (1)...(19): siRNA sense strand
cauaaggagaacucauaau

SEQ ID NO: 2157185 - RNA, 19 nt, Homo sapiens
  misc_RNA (1)...(19): siRNA sense strand
aacggaagaaggccaauga

SEQ ID NO: 2157186 - RNA, 19 nt, Homo sapiens
  misc_RNA (1)...(19): siRNA sense strand
gcagcucccaccaggacuu

SEQ ID NO: 2157187 - RNA, 19 nt, Homo sapiens
  misc_RNA (1)...(19): siRNA sense strand
gcaaauaugcucucuauag

SEQ ID NO: 2157188 - RNA, 19 nt, Homo sapiens
  misc_RNA (1)...(19): siRNA sense strand
uggaagaacugcauuauug

SEQ ID NO: 2157189 - RNA, 19 nt, Homo sapiens
  misc_RNA (1)...(19): siRNA sense strand
gcaagguggugacuaagaa

SEQ ID NO: 2157190 - RNA, 19 nt, Homo sapiens
  misc_RNA (1)...(19): siRNA sense strand
caucaacacugcaugcuuu

SEQ ID NO: 2157191 - RNA, 19 nt, Homo sapiens
  misc_RNA (1)...(19): siRNA sense strand
gaaaucaacgacagucuaa

SEQ ID NO: 2157192 - RNA, 19 nt, Homo sapiens
  misc_RNA (1)...(19): siRNA sense strand
gaagaaggccaaugaagug

SEQ ID NO: 2157193 - RNA, 19 nt, Homo sapiens
  misc_RNA (1)...(19): siRNA sense strand
guucagccauguuccuuua

SEQ ID NO: 2157194 - RNA, 19 nt, Homo sapiens
  misc_RNA (1)...(19): siRNA sense strand
ggaagaaggccaaugaagu

SEQ ID NO: 2157195 - RNA, 19 nt, Homo sapiens
  misc_RNA (1)...(19): siRNA sense strand
ggaccuacaugcuucucaa

SEQ ID NO: 2157196 - RNA, 19 nt, Homo sapiens
  misc_RNA (1)...(19): siRNA sense strand
caaccagaguuuaugcuau

SEQ ID NO: 2157197 - RNA, 19 nt, Homo sapiens
  misc_RNA (1)...(19): siRNA sense strand
guaauugacaucuccauga

SEQ ID NO: 2157198 - RNA, 19 nt, Homo sapiens
  misc_RNA (1)...(19): siRNA sense strand
cuacaugcuucucaaauuc

SEQ ID NO: 2157199 - RNA, 19 nt, Homo sapiens
  misc_RNA (1)...(19): siRNA sense strand
gcagaagccauaaggagaa

SEQ ID NO: 2157200 - RNA, 19 nt, Homo sapiens
  misc_RNA (1)...(19): siRNA sense strand
uaggcaagguggugacuaa

SEQ ID NO: 2157201 - RNA, 19 nt, Homo sapiens
  misc_RNA (1)...(19): siRNA sense strand
gccauaaggagaacucaua

SEQ ID NO: 2157202 - RNA, 19 nt, Homo sapiens
  misc_RNA (1)...(19): siRNA sense strand
ccucgcagcugacaaacuu

SEQ ID NO: 2157203 - RNA, 19 nt, Homo sapiens
  misc_RNA (1)...(19): siRNA sense strand
gaauguggacuuugcuuug

SEQ ID NO: 2157204 - RNA, 19 nt, Homo sapiens
  misc_RNA (1)...(19): siRNA sense strand
ccuacaugcuucucaaauu

SEQ ID NO: 2157205 - RNA, 19 nt, Homo sapiens
  misc_RNA (1)...(19): siRNA sense strand
caaauaugcucucuauagc

SEQ ID NO: 2157206 - RNA, 19 nt, Homo sapiens
  misc_RNA (1)...(19): siRNA sense strand
gacaggauaagaaggauaa

SEQ ID NO: 2157207 - RNA, 19 nt, Homo sapiens
  misc_RNA (1)...(19): siRNA sense strand
ucagccauguuccuuuaua

SEQ ID NO: 2157208 - RNA, 19 nt, Homo sapiens
  misc_RNA (1)...(19): siRNA sense strand
ggacuuugcuuugauucau

SEQ ID NO: 2157209 - RNA, 19 nt, Homo sapiens
  misc_RNA (1)...(19): siRNA sense strand
caacuguccugaaguggau

SEQ ID NO: 2157210 - RNA, 19 nt, Homo sapiens
  misc_RNA (1)...(19): siRNA sense strand
gauuaaugccugcaagauu

SEQ ID NO: 2157211 - RNA, 19 nt, Homo sapiens
  misc_RNA (1)...(19): siRNA sense strand
uugcaaauaugcucucuau

SEQ ID NO: 2157212 - RNA, 19 nt, Homo sapiens
  misc_RNA (1)...(19): siRNA sense strand
cagccauguuccuuuauaa

SEQ ID NO: 2157213 - RNA, 19 nt, Homo sapiens
  misc_RNA (1)...(19): siRNA sense strand
ccaagacgccgaauaucaa

SEQ ID NO: 2157214 - RNA, 19 nt, Homo sapiens
  misc_RNA (1)...(19): siRNA sense strand
ccaauaccauaccucaaga

SEQ ID NO: 2157215 - RNA, 19 nt, Homo sapiens
  misc_RNA (1)...(19): siRNA sense strand
gcaaccagaguuuaugcua

SEQ ID NO: 2157216 - RNA, 19 nt, Homo sapiens
  misc_RNA (1)...(19): siRNA sense strand
gacuuugcuuugauucaua

SEQ ID NO: 2157217 - RNA, 19 nt, Homo sapiens
  misc_RNA (1)...(19): siRNA sense strand
ccaguugaauguggacuuu

SEQ ID NO: 2157218 - RNA, 19 nt, Homo sapiens
  misc_RNA (1)...(19): siRNA sense strand
ccaagcuuguugcaaauau

SEQ ID NO: 2157219 - RNA, 19 nt, Homo sapiens
  misc_RNA (1)...(19): siRNA sense strand
uaucuugacucauggaauc

SEQ ID NO: 2157220 - RNA, 19 nt, Homo sapiens
  misc_RNA (1)...(19): siRNA sense strand
ccaaugaaguggacugcau

SEQ ID NO: 2157221 - RNA, 19 nt, Homo sapiens
  misc_RNA (1)...(19): siRNA sense strand
uaugcuaucuugacucaug

SEQ ID NO: 2157222 - RNA, 19 nt, Homo sapiens
  misc_RNA (1)...(19): siRNA sense strand
ggaagaacugcauuauugu

SEQ ID NO: 2157223 - RNA, 19 nt, Homo sapiens
  misc_RNA (1)...(19): siRNA sense strand
ggacuuaucccagaaaauu

SEQ ID NO: 2157224 - RNA, 19 nt, Homo sapiens
  misc_RNA (1)...(19): siRNA sense strand
uaauugacaucuccaugau

SEQ ID NO: 2157225 - RNA, 19 nt, Homo sapiens
  misc_RNA (1)...(19): siRNA sense strand
cagaguuuaugcuaucuug

SEQ ID NO: 2157226 - RNA, 19 nt, Homo sapiens
  misc_RNA (1)...(19): siRNA sense strand
auuaaugccugcaagauug

SEQ ID NO: 2157227 - RNA, 19 nt, Homo sapiens
  misc_RNA (1)...(19): siRNA sense strand
cgaaaucaacgacagucua

SEQ ID NO: 2157228 - RNA, 19 nt, Homo sapiens
  misc_RNA (1)...(19): siRNA sense strand
caacacugcaugcuuugaa

SEQ ID NO: 2157229 - RNA, 19 nt, Homo sapiens
  misc_RNA (1)...(19): siRNA sense strand
gccaagacgccgaauauca

SEQ ID NO: 2157230 - RNA, 19 nt, Homo sapiens
  misc_RNA (1)...(19): siRNA sense strand
caaugaaguggacugcaua

SEQ ID NO: 2157231 - RNA, 19 nt, Homo sapiens
  misc_RNA (1)...(19): siRNA sense strand
ugaaugaucguguggcuau

SEQ ID NO: 2157232 - RNA, 19 nt, Homo sapiens
  misc_RNA (1)...(19): siRNA sense strand
gaguggaagaacugcauua

SEQ ID NO: 2157233 - RNA, 19 nt, Homo sapiens
  misc_RNA (1)...(19): siRNA sense strand
gauccuugcagaagccaua

SEQ ID NO: 2157234 - RNA, 19 nt, Homo sapiens
  misc_RNA (1)...(19): siRNA sense strand
gaagaacugcauuauuguc

SEQ ID NO: 2157235 - RNA, 19 nt, Homo sapiens
  misc_RNA (1)...(19): siRNA sense strand
uggcuauccuuguagauga

SEQ ID NO: 2157236 - RNA, 19 nt, Homo sapiens
  misc_RNA (1)...(19): siRNA sense strand
caagcuuguugcaaauaug

SEQ ID NO: 2157237 - RNA, 19 nt, Homo sapiens
  misc_RNA (1)...(19): siRNA sense strand
ugacauggcagacacuugu

SEQ ID NO: 2157238 - RNA, 19 nt, Homo sapiens
  misc_RNA (1)...(19): siRNA sense strand
ugaaguggacugcauagug

SEQ ID NO: 2157239 - RNA, 19 nt, Homo sapiens
  misc_RNA (1)...(19): siRNA sense strand
ugaaguggauaagggagaa

SEQ ID NO: 2157240 - RNA, 19 nt, Homo sapiens
  misc_RNA (1)...(19): siRNA sense strand
auaaggagaacucauaaug

SEQ ID NO: 2157241 - RNA, 19 nt, Homo sapiens
  misc_RNA (1)...(19): siRNA sense strand
ccauaaggagaacucauaa

SEQ ID NO: 2157242 - RNA, 19 nt, Homo sapiens
  misc_RNA (1)...(19): siRNA sense strand
caagacgccgaauaucaaa

SEQ ID NO: 2157243 - RNA, 19 nt, Homo sapiens
  misc_RNA (1)...(19): siRNA sense strand
aauguggacuuugcuuuga

SEQ ID NO: 2157244 - RNA, 19 nt, Homo sapiens
  misc_RNA (1)...(19): siRNA sense strand
guggaagaacugcauuauu

SEQ ID NO: 2157245 - RNA, 19 nt, Homo sapiens
  misc_RNA (1)...(19): siRNA sense strand
gaacggaagaaggccaaug

SEQ ID NO: 2157246 - RNA, 19 nt, Homo sapiens
  misc_RNA (1)...(19): siRNA sense strand
aaucaacgacagucuaaug

SEQ ID NO: 2157247 - RNA, 19 nt, Homo sapiens
  misc_RNA (1)...(19): siRNA sense strand
uaaggagaacucauaaugg

SEQ ID NO: 2157248 - RNA, 19 nt, Homo sapiens
  misc_RNA (1)...(19): siRNA sense strand
aaccagaguuuaugcuauc

SEQ ID NO: 2157249 - RNA, 19 nt, Homo sapiens
  misc_RNA (1)...(19): siRNA sense strand
ucguguggcuauccuugua

SEQ ID NO: 2157250 - RNA, 19 nt, Homo sapiens
  misc_RNA (1)...(19): siRNA sense strand
cgacaggauaagaaggaua

SEQ ID NO: 2157251 - RNA, 19 nt, Homo sapiens
  misc_RNA (1)...(19): siRNA sense strand
ggagcaaccagaguuuaug

SEQ ID NO: 2157252 - RNA, 19 nt, Homo sapiens
  misc_RNA (1)...(19): siRNA sense strand
ugaauguggacuuugcuuu

SEQ ID NO: 2157253 - RNA, 19 nt, Homo sapiens
  misc_RNA (1)...(19): siRNA sense strand
uagcaggugcggaucauau

SEQ ID NO: 2157254 - RNA, 19 nt, Homo sapiens
  misc_RNA (1)...(19): siRNA sense strand
cagagugguuguggcgaaa

SEQ ID NO: 2157255 - RNA, 19 nt, Homo sapiens
  misc_RNA (1)...(19): siRNA sense strand
gcuagugggagaugugaau

SEQ ID NO: 2157256 - RNA, 19 nt, Homo sapiens
  misc_RNA (1)...(19): siRNA sense strand
uaauggagcuuuugaucau

SEQ ID NO: 2157257 - RNA, 19 nt, Homo sapiens
  misc_RNA (1)...(19): siRNA sense strand
ccuuaugcccgacaggaua

SEQ ID NO: 2157258 - RNA, 19 nt, Homo sapiens
  misc_RNA (1)...(19): siRNA sense strand
uuuaugcuaucuugacuca

SEQ ID NO: 2157259 - RNA, 19 nt, Homo sapiens
  misc_RNA (1)...(19): siRNA sense strand
ggcaagguggugacuaaga

SEQ ID NO: 2157260 - RNA, 19 nt, Homo sapiens
  misc_RNA (1)...(19): siRNA sense strand
auuauugucucgccagaug

SEQ ID NO: 2157261 - RNA, 19 nt, Homo sapiens
  misc_RNA (1)...(19): siRNA sense strand
gcaggugcggaucauauca

SEQ ID NO: 2157262 - RNA, 19 nt, Homo sapiens
  misc_RNA (1)...(19): siRNA sense strand
ccgaguuacugcagucauc

SEQ ID NO: 2157263 - RNA, 19 nt, Homo sapiens
  misc_RNA (1)...(19): siRNA sense strand
gagugugcguggagaggau

SEQ ID NO: 2157264 - RNA, 19 nt, Homo sapiens
  misc_RNA (1)...(19): siRNA sense strand
uggccaagacgccgaauau

SEQ ID NO: 2157265 - RNA, 19 nt, Homo sapiens
  misc_RNA (1)...(19): siRNA sense strand
gagugguuguggcgaaauc

SEQ ID NO: 2157266 - RNA, 19 nt, Homo sapiens
  misc_RNA (1)...(19): siRNA sense strand
uugcagaccaguugaaugu

SEQ ID NO: 2157267 - RNA, 19 nt, Homo sapiens
  misc_RNA (1)...(19): siRNA sense strand
agaauaucccugaguggaa

SEQ ID NO: 2157268 - RNA, 19 nt, Homo sapiens
  misc_RNA (1)...(19): siRNA sense strand
gccaagcuuguugcaaaua

SEQ ID NO: 2157269 - RNA, 19 nt, Homo sapiens
  misc_RNA (1)...(19): siRNA sense strand
uguggacuuugcuuugauu

SEQ ID NO: 2157270 - RNA, 19 nt, Homo sapiens
  misc_RNA (1)...(19): siRNA sense strand
gaccuacaugcuucucaaa

SEQ ID NO: 2157271 - RNA, 19 nt, Homo sapiens
  misc_RNA (1)...(19): siRNA sense strand
ccagccauuucucgcauca

SEQ ID NO: 2157272 - RNA, 19 nt, Homo sapiens
  misc_RNA (1)...(19): siRNA sense strand
cggaucauaucaucaccau

SEQ ID NO: 2157273 - RNA, 19 nt, Homo sapiens
  misc_RNA (1)...(19): siRNA sense strand
cuugacucauggaaucuuu

SEQ ID NO: 2157274 - RNA, 19 nt, Homo sapiens
  misc_RNA (1)...(19): siRNA sense strand
gagcuuuugaucaugauua

SEQ ID NO: 2157275 - RNA, 19 nt, Homo sapiens
  misc_RNA (1)...(19): siRNA sense strand
agagccaacuguccugaag

SEQ ID NO: 2157276 - RNA, 19 nt, Homo sapiens
  misc_RNA (1)...(19): siRNA sense strand
uaucaucaccauggaccua

SEQ ID NO: 2157277 - RNA, 19 nt, Homo sapiens
  misc_RNA (1)...(19): siRNA sense strand
gagcaaccagaguuuaugc

SEQ ID NO: 2157278 - RNA, 19 nt, Homo sapiens
  misc_RNA (1)...(19): siRNA sense strand
cagcucccaccaggacuua

SEQ ID NO: 2157279 - RNA, 19 nt, Homo sapiens
  misc_RNA (1)...(19): siRNA sense strand
ugacaucuccaugauccuu

SEQ ID NO: 2157280 - RNA, 19 nt, Homo sapiens
  misc_RNA (1)...(19): siRNA sense strand
guagaugacauggcagaca

SEQ ID NO: 2157281 - RNA, 19 nt, Homo sapiens
  misc_RNA (1)...(19): siRNA sense strand
gaaugaucguguggcuauc

SEQ ID NO: 2157282 - RNA, 19 nt, Homo sapiens
  misc_RNA (1)...(19): siRNA sense strand
agccaacuguccugaagug

SEQ ID NO: 2157283 - RNA, 19 nt, Homo sapiens
  misc_RNA (1)...(19): siRNA sense strand
cauaaggagaacucauaau

SEQ ID NO: 2157284 - RNA, 19 nt, Homo sapiens
  misc_RNA (1)...(19): siRNA sense strand
aacggaagaaggccaauga

SEQ ID NO: 2157285 - RNA, 19 nt, Homo sapiens
  misc_RNA (1)...(19): siRNA sense strand
gcagcucccaccaggacuu

SEQ ID NO: 2157286 - RNA, 19 nt, Homo sapiens
  misc_RNA (1)...(19): siRNA sense strand
gauaauaccagaccgauuu

SEQ ID NO: 2157287 - RNA, 19 nt, Homo sapiens
  misc_RNA (1)...(19): siRNA sense strand
gaugcuacaugguuauaua

SEQ ID NO: 2157288 - RNA, 19 nt, Homo sapiens
  misc_RNA (1)...(19): siRNA sense strand
caguauggcuuccuuaauu

SEQ ID NO: 2157289 - RNA, 19 nt, Homo sapiens
  misc_RNA (1)...(19): siRNA sense strand
ggagauacacccuauauuc

SEQ ID NO: 2157290 - RNA, 19 nt, Homo sapiens
  misc_RNA (1)...(19): siRNA sense strand
aaacggagauuuaaauugg

SEQ ID NO: 2157291 - RNA, 19 nt, Homo sapiens
  misc_RNA (1)...(19): siRNA sense strand
gcaaugguuuacagauauu

SEQ ID NO: 2157292 - RNA, 19 nt, Homo sapiens
  misc_RNA (1)...(19): siRNA sense strand
uaaagaaggcaaugcagua

SEQ ID NO: 2157293 - RNA, 19 nt, Homo sapiens
  misc_RNA (1)...(19): siRNA sense strand
gaccaaagagugcaucaaa

SEQ ID NO: 2157294 - RNA, 19 nt, Homo sapiens
  misc_RNA (1)...(19): siRNA sense strand
gcuacaucaugaagcauua

SEQ ID NO: 2157295 - RNA, 19 nt, Homo sapiens
  misc_RNA (1)...(19): siRNA sense strand
agaagcagcauauagaaua

SEQ ID NO: 2157296 - RNA, 19 nt, Homo sapiens
  misc_RNA (1)...(19): siRNA sense strand
ggcaaugguuuacagauau

SEQ ID NO: 2157297 - RNA, 19 nt, Homo sapiens
  misc_RNA (1)...(19): siRNA sense strand
gugcugaccuuuacacugu

SEQ ID NO: 2157298 - RNA, 19 nt, Homo sapiens
  misc_RNA (1)...(19): siRNA sense strand
cagauauuguugcaagaua

SEQ ID NO: 2157299 - RNA, 19 nt, Homo sapiens
  misc_RNA (1)...(19): siRNA sense strand
uggcaaugguuuacagaua

SEQ ID NO: 2157300 - RNA, 19 nt, Homo sapiens
  misc_RNA (1)...(19): siRNA sense strand
cgaaaucaauggagugaca

SEQ ID NO: 2157301 - RNA, 19 nt, Homo sapiens
  misc_RNA (1)...(19): siRNA sense strand
cuacaugguuauauacuug

SEQ ID NO: 2157302 - RNA, 19 nt, Homo sapiens
  misc_RNA (1)...(19): siRNA sense strand
aaacuucucucugguguug

SEQ ID NO: 2157303 - RNA, 19 nt, Homo sapiens
  misc_RNA (1)...(19): siRNA sense strand
uuacacuucuugacuguuu

SEQ ID NO: 2157304 - RNA, 19 nt, Homo sapiens
  misc_RNA (1)...(19): siRNA sense strand
ccaaagagugcaucaaaug

SEQ ID NO: 2157305 - RNA, 19 nt, Homo sapiens
  misc_RNA (1)...(19): siRNA sense strand
cagcauagauaaugaacuc

SEQ ID NO: 2157306 - RNA, 19 nt, Homo sapiens
  misc_RNA (1)...(19): siRNA sense strand
uauggaagcugcaauuucu

SEQ ID NO: 2157307 - RNA, 19 nt, Homo sapiens
  misc_RNA (1)...(19): siRNA sense strand
guacauuauuucagcauag

SEQ ID NO: 2157308 - RNA, 19 nt, Homo sapiens
  misc_RNA (1)...(19): siRNA sense strand
gacacaaggugauagaagu

SEQ ID NO: 2157309 - RNA, 19 nt, Homo sapiens
  misc_RNA (1)...(19): siRNA sense strand
guuggaugcuacaugguua

SEQ ID NO: 2157310 - RNA, 19 nt, Homo sapiens
  misc_RNA (1)...(19): siRNA sense strand
guugucaucugguggauug

SEQ ID NO: 2157311 - RNA, 19 nt, Homo sapiens
  misc_RNA (1)...(19): siRNA sense strand
gauacacccuauauuccuu

SEQ ID NO: 2157312 - RNA, 19 nt, Homo sapiens
  misc_RNA (1)...(19): siRNA sense strand
aaagagugcaucaaaugua

SEQ ID NO: 2157313 - RNA, 19 nt, Homo sapiens
  misc_RNA (1)...(19): siRNA sense strand
gucaaaagauuucuggaua

SEQ ID NO: 2157314 - RNA, 19 nt, Homo sapiens
  misc_RNA (1)...(19): siRNA sense strand
gcuacaugguuauauacuu

SEQ ID NO: 2157315 - RNA, 19 nt, Homo sapiens
  misc_RNA (1)...(19): siRNA sense strand
guugaugacauuuccauaa

SEQ ID NO: 2157316 - RNA, 19 nt, Homo sapiens
  misc_RNA (1)...(19): siRNA sense strand
aagcugcaauuucuacauu

SEQ ID NO: 2157317 - RNA, 19 nt, Homo sapiens
  misc_RNA (1)...(19): siRNA sense strand
uuucagagaugcugccuau

SEQ ID NO: 2157318 - RNA, 19 nt, Homo sapiens
  misc_RNA (1)...(19): siRNA sense strand
ggagugacacaaggugaua

SEQ ID NO: 2157319 - RNA, 19 nt, Homo sapiens
  misc_RNA (1)...(19): siRNA sense strand
gaaucaagaccagcaagaa

SEQ ID NO: 2157320 - RNA, 19 nt, Homo sapiens
  misc_RNA (1)...(19): siRNA sense strand
agcaagaacccaaaccuua

SEQ ID NO: 2157321 - RNA, 19 nt, Homo sapiens
  misc_RNA (1)...(19): siRNA sense strand
gauuguuugugacuacauu

SEQ ID NO: 2157322 - RNA, 19 nt, Homo sapiens
  misc_RNA (1)...(19): siRNA sense strand
gcaagaacccaaaccuuac

SEQ ID NO: 2157323 - RNA, 19 nt, Homo sapiens
  misc_RNA (1)...(19): siRNA sense strand
cagagaugcugccuaugga

SEQ ID NO: 2157324 - RNA, 19 nt, Homo sapiens
  misc_RNA (1)...(19): siRNA sense strand
cagagcagccuucuccaaa

SEQ ID NO: 2157325 - RNA, 19 nt, Homo sapiens
  misc_RNA (1)...(19): siRNA sense strand
aguauggcuuccuuaauuu

SEQ ID NO: 2157326 - RNA, 19 nt, Homo sapiens
  misc_RNA (1)...(19): siRNA sense strand
cauagauaaugaacucgaa

SEQ ID NO: 2157327 - RNA, 19 nt, Homo sapiens
  misc_RNA (1)...(19): siRNA sense strand
gauaaugaacucgaauaug

SEQ ID NO: 2157328 - RNA, 19 nt, Homo sapiens
  misc_RNA (1)...(19): siRNA sense strand
uaaauggggucgagaauca

SEQ ID NO: 2157329 - RNA, 19 nt, Homo sapiens
  misc_RNA (1)...(19): siRNA sense strand
gagcagccuucuccaaacu

SEQ ID NO: 2157330 - RNA, 19 nt, Homo sapiens
  misc_RNA (1)...(19): siRNA sense strand
caaagagugcaucaaaugu

SEQ ID NO: 2157331 - RNA, 19 nt, Homo sapiens
  misc_RNA (1)...(19): siRNA sense strand
caacucauuuaaccuugau

SEQ ID NO: 2157332 - RNA, 19 nt, Homo sapiens
  misc_RNA (1)...(19): siRNA sense strand
ucugguggauuguuuguga

SEQ ID NO: 2157333 - RNA, 19 nt, Homo sapiens
  misc_RNA (1)...(19): siRNA sense strand
ggagaauggacaacacaga

SEQ ID NO: 2157334 - RNA, 19 nt, Homo sapiens
  misc_RNA (1)...(19): siRNA sense strand
agaaggcaaugcaguaugg

SEQ ID NO: 2157335 - RNA, 19 nt, Homo sapiens
  misc_RNA (1)...(19): siRNA sense strand
gcagaaaacggagauuuaa

SEQ ID NO: 2157336 - RNA, 19 nt, Homo sapiens
  misc_RNA (1)...(19): siRNA sense strand
ccagaagcagcauauagaa

SEQ ID NO: 2157337 - RNA, 19 nt, Homo sapiens
  misc_RNA (1)...(19): siRNA sense strand
gcagccuucuccaaacuuc

SEQ ID NO: 2157338 - RNA, 19 nt, Homo sapiens
  misc_RNA (1)...(19): siRNA sense strand
gcaguauggcuuccuuaau

SEQ ID NO: 2157339 - RNA, 19 nt, Homo sapiens
  misc_RNA (1)...(19): siRNA sense strand
uauauuccuuucagagaug

SEQ ID NO: 2157340 - RNA, 19 nt, Homo sapiens
  misc_RNA (1)...(19): siRNA sense strand
ucaccgaucgccuucguuu

SEQ ID NO: 2157341 - RNA, 19 nt, Homo sapiens
  misc_RNA (1)...(19): siRNA sense strand
gcaggagaauggacaacac

SEQ ID NO: 2157342 - RNA, 19 nt, Homo sapiens
  misc_RNA (1)...(19): siRNA sense strand
caaaugcugccuuccuugu

SEQ ID NO: 2157343 - RNA, 19 nt, Homo sapiens
  misc_RNA (1)...(19): siRNA sense strand
gucaucugguggauuguuu

SEQ ID NO: 2157344 - RNA, 19 nt, Homo sapiens
  misc_RNA (1)...(19): siRNA sense strand
uaugaugccaaacgcuuua

SEQ ID NO: 2157345 - RNA, 19 nt, Homo sapiens
  misc_RNA (1)...(19): siRNA sense strand
ucagagaugcugccuaugg

SEQ ID NO: 2157346 - RNA, 19 nt, Homo sapiens
  misc_RNA (1)...(19): siRNA sense strand
ggauaauaccagaccgauu

SEQ ID NO: 2157347 - RNA, 19 nt, Homo sapiens
  misc_RNA (1)...(19): siRNA sense strand
aaugcugccuuccuuguug

SEQ ID NO: 2157348 - RNA, 19 nt, Homo sapiens
  misc_RNA (1)...(19): siRNA sense strand
ucgcacaggcacucugaua

SEQ ID NO: 2157349 - RNA, 19 nt, Homo sapiens
  misc_RNA (1)...(19): siRNA sense strand
auaccagaccgauuuauug

SEQ ID NO: 2157350 - RNA, 19 nt, Homo sapiens
  misc_RNA (1)...(19): siRNA sense strand
cuauauuccuuucagagau

SEQ ID NO: 2157351 - RNA, 19 nt, Homo sapiens
  misc_RNA (1)...(19): siRNA sense strand
gacagcagccgagaccauu

SEQ ID NO: 2157352 - RNA, 19 nt, Homo sapiens
  misc_RNA (1)...(19): siRNA sense strand
gaacucgaauaugagaacu

SEQ ID NO: 2157353 - RNA, 19 nt, Homo sapiens
  misc_RNA (1)...(19): siRNA sense strand
gcugcaauuucuacauuac

SEQ ID NO: 2157354 - RNA, 19 nt, Homo sapiens
  misc_RNA (1)...(19): siRNA sense strand
guuugugacuacauucuuc

SEQ ID NO: 2157355 - RNA, 19 nt, Homo sapiens
  misc_RNA (1)...(19): siRNA sense strand
gacgaaaucaauggaguga

SEQ ID NO: 2157356 - RNA, 19 nt, Homo sapiens
  misc_RNA (1)...(19): siRNA sense strand
ucccgagacuuauauucaa

SEQ ID NO: 2157357 - RNA, 19 nt, Homo sapiens
  misc_RNA (1)...(19): siRNA sense strand
cuguggaccucauucaaga

SEQ ID NO: 2157358 - RNA, 19 nt, Homo sapiens
  misc_RNA (1)...(19): siRNA sense strand
cccagaagcagcauauaga

SEQ ID NO: 2157359 - RNA, 19 nt, Homo sapiens
  misc_RNA (1)...(19): siRNA sense strand
ucaaucuggcaaugguuua

SEQ ID NO: 2157360 - RNA, 19 nt, Homo sapiens
  misc_RNA (1)...(19): siRNA sense strand
gcacaggcacucugauagc

SEQ ID NO: 2157361 - RNA, 19 nt, Homo sapiens
  misc_RNA (1)...(19): siRNA sense strand
caaaagauuucuggauauc

SEQ ID NO: 2157362 - RNA, 19 nt, Homo sapiens
  misc_RNA (1)...(19): siRNA sense strand
cauuacacuucuugacugu

SEQ ID NO: 2157363 - RNA, 19 nt, Homo sapiens
  misc_RNA (1)...(19): siRNA sense strand
gagauacacccuauauucc

SEQ ID NO: 2157364 - RNA, 19 nt, Homo sapiens
  misc_RNA (1)...(19): siRNA sense strand
aagagugcaucaaauguac

SEQ ID NO: 2157365 - RNA, 19 nt, Homo sapiens
  misc_RNA (1)...(19): siRNA sense strand
ucaugaagcauuacaggau

SEQ ID NO: 2157366 - RNA, 19 nt, Homo sapiens
  misc_RNA (1)...(19): siRNA sense strand
gaagcugcaauuucuacau

SEQ ID NO: 2157367 - RNA, 19 nt, Homo sapiens
  misc_RNA (1)...(19): siRNA sense strand
gaugacgacgaaaucaaug

SEQ ID NO: 2157368 - RNA, 19 nt, Homo sapiens
  misc_RNA (1)...(19): siRNA sense strand
cagcaagaacccaaaccuu

SEQ ID NO: 2157369 - RNA, 19 nt, Homo sapiens
  misc_RNA (1)...(19): siRNA sense strand
ugagggugccauugcagua

SEQ ID NO: 2157370 - RNA, 19 nt, Homo sapiens
  misc_RNA (1)...(19): siRNA sense strand
ucaccaugaucuuuucuuu

SEQ ID NO: 2157371 - RNA, 19 nt, Homo sapiens
  misc_RNA (1)...(19): siRNA sense strand
aaagaaggcaaugcaguau

SEQ ID NO: 2157372 - RNA, 19 nt, Homo sapiens
  misc_RNA (1)...(19): siRNA sense strand
cagaagcagcauauagaau

SEQ ID NO: 2157373 - RNA, 19 nt, Homo sapiens
  misc_RNA (1)...(19): siRNA sense strand
acucgaauaugagaacuuc

SEQ ID NO: 2157374 - RNA, 19 nt, Homo sapiens
  misc_RNA (1)...(19): siRNA sense strand
auaauaccagaccgauuua

SEQ ID NO: 2157375 - RNA, 19 nt, Homo sapiens
  misc_RNA (1)...(19): siRNA sense strand
cuacugaugccauugucaa

SEQ ID NO: 2157376 - RNA, 19 nt, Homo sapiens
  misc_RNA (1)...(19): siRNA sense strand
gguggauuguuugugacua

SEQ ID NO: 2157377 - RNA, 19 nt, Homo sapiens
  misc_RNA (1)...(19): siRNA sense strand
accaaagagugcaucaaau

SEQ ID NO: 2157378 - RNA, 19 nt, Homo sapiens
  misc_RNA (1)...(19): siRNA sense strand
uggcugugcugaccuuuac

SEQ ID NO: 2157379 - RNA, 19 nt, Homo sapiens
  misc_RNA (1)...(19): siRNA sense strand
guuuacagauauuguugca

SEQ ID NO: 2157380 - RNA, 19 nt, Homo sapiens
  misc_RNA (1)...(19): siRNA sense strand
ggucgcacaggcacucuga

SEQ ID NO: 2157381 - RNA, 19 nt, Homo sapiens
  misc_RNA (1)...(19): siRNA sense strand
ccuauauuccuuucagaga

SEQ ID NO: 2157382 - RNA, 19 nt, Homo sapiens
  misc_RNA (1)...(19): siRNA sense strand
caucaccgaucgccuucgu

SEQ ID NO: 2157383 - RNA, 19 nt, Homo sapiens
  misc_RNA (1)...(19): siRNA sense strand
guggauuguuugugacuac

SEQ ID NO: 2157384 - RNA, 19 nt, Homo sapiens
  misc_RNA (1)...(19): siRNA sense strand
ugacacaaggugauagaag

SEQ ID NO: 2157385 - RNA, 19 nt, Homo sapiens
  misc_RNA (1)...(19): siRNA sense strand
uuguaaagcuggccuuggu

SEQ ID NO: 2157386 - RNA, 19 nt, Homo sapiens
  misc_RNA (1)...(19): siRNA sense strand
gauaauaccagaccgauuu

SEQ ID NO: 2157387 - RNA, 19 nt, Homo sapiens
  misc_RNA (1)...(19): siRNA sense strand
gaugcuacaugguuauaua

SEQ ID NO: 2157388 - RNA, 19 nt, Homo sapiens
  misc_RNA (1)...(19): siRNA sense strand
caguauggcuuccuuaauu

SEQ ID NO: 2157389 - RNA, 19 nt, Homo sapiens
  misc_RNA (1)...(19): siRNA sense strand
ggagauacacccuauauuc

SEQ ID NO: 2157390 - RNA, 19 nt, Homo sapiens
  misc_RNA (1)...(19): siRNA sense strand
aaacggagauuuaaauugg

SEQ ID NO: 2157391 - RNA, 19 nt, Homo sapiens
  misc_RNA (1)...(19): siRNA sense strand
gcaaugguuuacagauauu

SEQ ID NO: 2157392 - RNA, 19 nt, Homo sapiens
  misc_RNA (1)...(19): siRNA sense strand
uaaagaaggcaaugcagua

SEQ ID NO: 2157393 - RNA, 19 nt, Homo sapiens
  misc_RNA (1)...(19): siRNA sense strand
gaccaaagagugcaucaaa

SEQ ID NO: 2157394 - RNA, 19 nt, Homo sapiens
  misc_RNA (1)...(19): siRNA sense strand
gcuacaucaugaagcauua

SEQ ID NO: 2157395 - RNA, 19 nt, Homo sapiens
  misc_RNA (1)...(19): siRNA sense strand
agaagcagcauauagaaua

SEQ ID NO: 2157396 - RNA, 19 nt, Homo sapiens
  misc_RNA (1)...(19): siRNA sense strand
ggcaaugguuuacagauau

SEQ ID NO: 2157397 - RNA, 19 nt, Homo sapiens
  misc_RNA (1)...(19): siRNA sense strand
gugcugaccuuuacacugu

SEQ ID NO: 2157398 - RNA, 19 nt, Homo sapiens
  misc_RNA (1)...(19): siRNA sense strand
cagauauuguugcaagaua

SEQ ID NO: 2157399 - RNA, 19 nt, Homo sapiens
  misc_RNA (1)...(19): siRNA sense strand
uggcaaugguuuacagaua

SEQ ID NO: 2157400 - RNA, 19 nt, Homo sapiens
  misc_RNA (1)...(19): siRNA sense strand
cgaaaucaauggagugaca

SEQ ID NO: 2157401 - RNA, 19 nt, Homo sapiens
  misc_RNA (1)...(19): siRNA sense strand
cuacaugguuauauacuug

SEQ ID NO: 2157402 - RNA, 19 nt, Homo sapiens
  misc_RNA (1)...(19): siRNA sense strand
aaacuucucucugguguug

SEQ ID NO: 2157403 - RNA, 19 nt, Homo sapiens
  misc_RNA (1)...(19): siRNA sense strand
uuacacuucuugacuguuu

SEQ ID NO: 2157404 - RNA, 19 nt, Homo sapiens
  misc_RNA (1)...(19): siRNA sense strand
ccaaagagugcaucaaaug

SEQ ID NO: 2157405 - RNA, 19 nt, Homo sapiens
  misc_RNA (1)...(19): siRNA sense strand
cagcauagauaaugaacuc

SEQ ID NO: 2157406 - RNA, 19 nt, Homo sapiens
  misc_RNA (1)...(19): siRNA sense strand
uauggaagcugcaauuucu

SEQ ID NO: 2157407 - RNA, 19 nt, Homo sapiens
  misc_RNA (1)...(19): siRNA sense strand
guacauuauuucagcauag

SEQ ID NO: 2157408 - RNA, 19 nt, Homo sapiens
  misc_RNA (1)...(19): siRNA sense strand
gacacaaggugauagaagu

SEQ ID NO: 2157409 - RNA, 19 nt, Homo sapiens
  misc_RNA (1)...(19): siRNA sense strand
guuggaugcuacaugguua

SEQ ID NO: 2157410 - RNA, 19 nt, Homo sapiens
  misc_RNA (1)...(19): siRNA sense strand
guugucaucugguggauug

SEQ ID NO: 2157411 - RNA, 19 nt, Homo sapiens
  misc_RNA (1)...(19): siRNA sense strand
gauacacccuauauuccuu

SEQ ID NO: 2157412 - RNA, 19 nt, Homo sapiens
  misc_RNA (1)...(19): siRNA sense strand
aaagagugcaucaaaugua

SEQ ID NO: 2157413 - RNA, 19 nt, Homo sapiens
  misc_RNA (1)...(19): siRNA sense strand
gucaaaagauuucuggaua

SEQ ID NO: 2157414 - RNA, 19 nt, Homo sapiens
  misc_RNA (1)...(19): siRNA sense strand
gcuacaugguuauauacuu

SEQ ID NO: 2157415 - RNA, 19 nt, Homo sapiens
  misc_RNA (1)...(19): siRNA sense strand
guugaugacauuuccauaa

SEQ ID NO: 2157416 - RNA, 19 nt, Homo sapiens
  misc_RNA (1)...(19): siRNA sense strand
aagcugcaauuucuacauu

SEQ ID NO: 2157417 - RNA, 19 nt, Homo sapiens
  misc_RNA (1)...(19): siRNA sense strand
uuucagagaugcugccuau

SEQ ID NO: 2157418 - RNA, 19 nt, Homo sapiens
  misc_RNA (1)...(19): siRNA sense strand
ggagugacacaaggugaua

SEQ ID NO: 2157419 - RNA, 19 nt, Homo sapiens
  misc_RNA (1)...(19): siRNA sense strand
gaaucaagaccagcaagaa

SEQ ID NO: 2157420 - RNA, 19 nt, Homo sapiens
  misc_RNA (1)...(19): siRNA sense strand
agcaagaacccaaaccuua

SEQ ID NO: 2157421 - RNA, 19 nt, Homo sapiens
  misc_RNA (1)...(19): siRNA sense strand
gauuguuugugacuacauu

SEQ ID NO: 2157422 - RNA, 19 nt, Homo sapiens
  misc_RNA (1)...(19): siRNA sense strand
gcaagaacccaaaccuuac

SEQ ID NO: 2157423 - RNA, 19 nt, Homo sapiens
  misc_RNA (1)...(19): siRNA sense strand
cagagaugcugccuaugga

SEQ ID NO: 2157424 - RNA, 19 nt, Homo sapiens
  misc_RNA (1)...(19): siRNA sense strand
cagagcagccuucuccaaa

SEQ ID NO: 2157425 - RNA, 19 nt, Homo sapiens
  misc_RNA (1)...(19): siRNA sense strand
aguauggcuuccuuaauuu

SEQ ID NO: 2157426 - RNA, 19 nt, Homo sapiens
  misc_RNA (1)...(19): siRNA sense strand
cauagauaaugaacucgaa

SEQ ID NO: 2157427 - RNA, 19 nt, Homo sapiens
  misc_RNA (1)...(19): siRNA sense strand
uaaauggggucgagaauca

SEQ ID NO: 2157428 - RNA, 19 nt, Homo sapiens
  misc_RNA (1)...(19): siRNA sense strand
caaagagugcaucaaaugu

SEQ ID NO: 2157429 - RNA, 19 nt, Homo sapiens
  misc_RNA (1)...(19): siRNA sense strand
gagcagccuucuccaaacu

SEQ ID NO: 2157430 - RNA, 19 nt, Homo sapiens
  misc_RNA (1)...(19): siRNA sense strand
gauaaugaacucgaauaug

SEQ ID NO: 2157431 - RNA, 19 nt, Homo sapiens
  misc_RNA (1)...(19): siRNA sense strand
caacucauuuaaccuugau

SEQ ID NO: 2157432 - RNA, 19 nt, Homo sapiens
  misc_RNA (1)...(19): siRNA sense strand
ucugguggauuguuuguga

SEQ ID NO: 2157433 - RNA, 19 nt, Homo sapiens
  misc_RNA (1)...(19): siRNA sense strand
ggagaauggacaacacaga

SEQ ID NO: 2157434 - RNA, 19 nt, Homo sapiens
  misc_RNA (1)...(19): siRNA sense strand
agaaggcaaugcaguaugg

SEQ ID NO: 2157435 - RNA, 19 nt, Homo sapiens
  misc_RNA (1)...(19): siRNA sense strand
gcagaaaacggagauuuaa

SEQ ID NO: 2157436 - RNA, 19 nt, Homo sapiens
  misc_RNA (1)...(19): siRNA sense strand
ccagaagcagcauauagaa

SEQ ID NO: 2157437 - RNA, 19 nt, Homo sapiens
  misc_RNA (1)...(19): siRNA sense strand
gcagccuucuccaaacuuc

SEQ ID NO: 2157438 - RNA, 19 nt, Homo sapiens
  misc_RNA (1)...(19): siRNA sense strand
gcaguauggcuuccuuaau

SEQ ID NO: 2157439 - RNA, 19 nt, Homo sapiens
  misc_RNA (1)...(19): siRNA sense strand
uauauuccuuucagagaug

SEQ ID NO: 2157440 - RNA, 19 nt, Homo sapiens
  misc_RNA (1)...(19): siRNA sense strand
ucaccgaucgccuucguuu

SEQ ID NO: 2157441 - RNA, 19 nt, Homo sapiens
  misc_RNA (1)...(19): siRNA sense strand
gcaggagaauggacaacac

SEQ ID NO: 2157442 - RNA, 19 nt, Homo sapiens
  misc_RNA (1)...(19): siRNA sense strand
caaaugcugccuuccuugu

SEQ ID NO: 2157443 - RNA, 19 nt, Homo sapiens
  misc_RNA (1)...(19): siRNA sense strand
gucaucugguggauuguuu

SEQ ID NO: 2157444 - RNA, 19 nt, Homo sapiens
  misc_RNA (1)...(19): siRNA sense strand
uaugaugccaaacgcuuua

SEQ ID NO: 2157445 - RNA, 19 nt, Homo sapiens
  misc_RNA (1)...(19): siRNA sense strand
ucagagaugcugccuaugg

SEQ ID NO: 2157446 - RNA, 19 nt, Homo sapiens
  misc_RNA (1)...(19): siRNA sense strand
ggauaauaccagaccgauu

SEQ ID NO: 2157447 - RNA, 19 nt, Homo sapiens
  misc_RNA (1)...(19): siRNA sense strand
aaugcugccuuccuuguug

SEQ ID NO: 2157448 - RNA, 19 nt, Homo sapiens
  misc_RNA (1)...(19): siRNA sense strand
ucgcacaggcacucugaua

SEQ ID NO: 2157449 - RNA, 19 nt, Homo sapiens
  misc_RNA (1)...(19): siRNA sense strand
auaccagaccgauuuauug

SEQ ID NO: 2157450 - RNA, 19 nt, Homo sapiens
  misc_RNA (1)...(19): siRNA sense strand
cuauauuccuuucagagau

SEQ ID NO: 2157451 - RNA, 19 nt, Homo sapiens
  misc_RNA (1)...(19): siRNA sense strand
gacagcagccgagaccauu

SEQ ID NO: 2157452 - RNA, 19 nt, Homo sapiens
  misc_RNA (1)...(19): siRNA sense strand
gaacucgaauaugagaacu

SEQ ID NO: 2157453 - RNA, 19 nt, Homo sapiens
  misc_RNA (1)...(19): siRNA sense strand
gcugcaauuucuacauuac

SEQ ID NO: 2157454 - RNA, 19 nt, Homo sapiens
  misc_RNA (1)...(19): siRNA sense strand
guuugugacuacauucuuc

SEQ ID NO: 2157455 - RNA, 19 nt, Homo sapiens
  misc_RNA (1)...(19): siRNA sense strand
gacgaaaucaauggaguga

SEQ ID NO: 2157456 - RNA, 19 nt, Homo sapiens
  misc_RNA (1)...(19): siRNA sense strand
ucccgagacuuauauucaa

SEQ ID NO: 2157457 - RNA, 19 nt, Homo sapiens
  misc_RNA (1)...(19): siRNA sense strand
cuguggaccucauucaaga

SEQ ID NO: 2157458 - RNA, 19 nt, Homo sapiens
  misc_RNA (1)...(19): siRNA sense strand
cccagaagcagcauauaga

SEQ ID NO: 2157459 - RNA, 19 nt, Homo sapiens
  misc_RNA (1)...(19): siRNA sense strand
gcacaggcacucugauagc

SEQ ID NO: 2157460 - RNA, 19 nt, Homo sapiens
  misc_RNA (1)...(19): siRNA sense strand
caaaagauuucuggauauc

SEQ ID NO: 2157461 - RNA, 19 nt, Homo sapiens
  misc_RNA (1)...(19): siRNA sense strand
ucaaucuggcaaugguuua

SEQ ID NO: 2157462 - RNA, 19 nt, Homo sapiens
  misc_RNA (1)...(19): siRNA sense strand
cauuacacuucuugacugu

SEQ ID NO: 2157463 - RNA, 19 nt, Homo sapiens
  misc_RNA (1)...(19): siRNA sense strand
gagauacacccuauauucc

SEQ ID NO: 2157464 - RNA, 19 nt, Homo sapiens
  misc_RNA (1)...(19): siRNA sense strand
aagagugcaucaaauguac

SEQ ID NO: 2157465 - RNA, 19 nt, Homo sapiens
  misc_RNA (1)...(19): siRNA sense strand
ucaugaagcauuacaggau

SEQ ID NO: 2157466 - RNA, 19 nt, Homo sapiens
  misc_RNA (1)...(19): siRNA sense strand
gaagcugcaauuucuacau

SEQ ID NO: 2157467 - RNA, 19 nt, Homo sapiens
  misc_RNA (1)...(19): siRNA sense strand
gaugacgacgaaaucaaug

SEQ ID NO: 2157468 - RNA, 19 nt, Homo sapiens
  misc_RNA (1)...(19): siRNA sense strand
cagcaagaacccaaaccuu

SEQ ID NO: 2157469 - RNA, 19 nt, Homo sapiens
  misc_RNA (1)...(19): siRNA sense strand
ugagggugccauugcagua

SEQ ID NO: 2157470 - RNA, 19 nt, Homo sapiens
  misc_RNA (1)...(19): siRNA sense strand
ucaccaugaucuuuucuuu

SEQ ID NO: 2157471 - RNA, 19 nt, Homo sapiens
  misc_RNA (1)...(19): siRNA sense strand
aaagaaggcaaugcaguau

SEQ ID NO: 2157472 - RNA, 19 nt, Homo sapiens
  misc_RNA (1)...(19): siRNA sense strand
cagaagcagcauauagaau

SEQ ID NO: 2157473 - RNA, 19 nt, Homo sapiens
  misc_RNA (1)...(19): siRNA sense strand
auaauaccagaccgauuua

SEQ ID NO: 2157474 - RNA, 19 nt, Homo sapiens
  misc_RNA (1)...(19): siRNA sense strand
acucgaauaugagaacuuc

SEQ ID NO: 2157475 - RNA, 19 nt, Homo sapiens
  misc_RNA (1)...(19): siRNA sense strand
cuacugaugccauugucaa

SEQ ID NO: 2157476 - RNA, 19 nt, Homo sapiens
  misc_RNA (1)...(19): siRNA sense strand
gguggauuguuugugacua

SEQ ID NO: 2157477 - RNA, 19 nt, Homo sapiens
  misc_RNA (1)...(19): siRNA sense strand
ccuauauuccuuucagaga

SEQ ID NO: 2157478 - RNA, 19 nt, Homo sapiens
  misc_RNA (1)...(19): siRNA sense strand
uggcugugcugaccuuuac

SEQ ID NO: 2157479 - RNA, 19 nt, Homo sapiens
  misc_RNA (1)...(19): siRNA sense strand
guuuacagauauuguugca

SEQ ID NO: 2157480 - RNA, 19 nt, Homo sapiens
  misc_RNA (1)...(19): siRNA sense strand
ggucgcacaggcacucuga

SEQ ID NO: 2157481 - RNA, 19 nt, Homo sapiens
  misc_RNA (1)...(19): siRNA sense strand
accaaagagugcaucaaau

SEQ ID NO: 2157482 - RNA, 19 nt, Homo sapiens
  misc_RNA (1)...(19): siRNA sense strand
uuguaaagcuggccuuggu

SEQ ID NO: 2157483 - RNA, 19 nt, Homo sapiens
  misc_RNA (1)...(19): siRNA sense strand
guggauuguuugugacuac

SEQ ID NO: 2157484 - RNA, 19 nt, Homo sapiens
  misc_RNA (1)...(19): siRNA sense strand
ugacacaaggugauagaag

SEQ ID NO: 2157485 - RNA, 19 nt, Homo sapiens
  misc_RNA (1)...(19): siRNA sense strand
caucaccgaucgccuucgu

SEQ ID NO: 2157486 - RNA, 19 nt, Homo sapiens
  misc_RNA (1)...(19): siRNA sense strand
aagcagggcccuagcagua

SEQ ID NO: 2157487 - RNA, 19 nt, Homo sapiens
  misc_RNA (1)...(19): siRNA sense strand
gcugcaggcugagcuagaa

SEQ ID NO: 2157488 - RNA, 19 nt, Homo sapiens
  misc_RNA (1)...(19): siRNA sense strand
gcagggcccuagcaguaag

SEQ ID NO: 2157489 - RNA, 19 nt, Homo sapiens
  misc_RNA (1)...(19): siRNA sense strand
ggcccuagcaguaagaaga

SEQ ID NO: 2157490 - RNA, 19 nt, Homo sapiens
  misc_RNA (1)...(19): siRNA sense strand
acuacgcgcuggccaagga

SEQ ID NO: 2157491 - RNA, 19 nt, Homo sapiens
  misc_RNA (1)...(19): siRNA sense strand
caucaaauaccaggagcuu

SEQ ID NO: 2157492 - RNA, 19 nt, Homo sapiens
  misc_RNA (1)...(19): siRNA sense strand
ggacgcaggcagagaagcu

SEQ ID NO: 2157493 - RNA, 19 nt, Homo sapiens
  misc_RNA (1)...(19): siRNA sense strand
ggaggcagaggagcagaug

SEQ ID NO: 2157494 - RNA, 19 nt, Homo sapiens
  misc_RNA (1)...(19): siRNA sense strand
aagcagggcccuagcagua

SEQ ID NO: 2157495 - RNA, 19 nt, Homo sapiens
  misc_RNA (1)...(19): siRNA sense strand
gcugcaggcugagcuagaa

SEQ ID NO: 2157496 - RNA, 19 nt, Homo sapiens
  misc_RNA (1)...(19): siRNA sense strand
gcagggcccuagcaguaag

SEQ ID NO: 2157497 - RNA, 19 nt, Homo sapiens
  misc_RNA (1)...(19): siRNA sense strand
ggcccuagcaguaagaaga

SEQ ID NO: 2157498 - RNA, 19 nt, Homo sapiens
  misc_RNA (1)...(19): siRNA sense strand
acuacgcgcuggccaagga

SEQ ID NO: 2157499 - RNA, 19 nt, Homo sapiens
  misc_RNA (1)...(19): siRNA sense strand
caucaaauaccaggagcuu

SEQ ID NO: 2157500 - RNA, 19 nt, Homo sapiens
  misc_RNA (1)...(19): siRNA sense strand
ggacgcaggcagagaagcu

SEQ ID NO: 2157501 - RNA, 19 nt, Homo sapiens
  misc_RNA (1)...(19): siRNA sense strand
ggaggcagaggagcagaug

SEQ ID NO: 2157502 - RNA, 19 nt, Homo sapiens
  misc_RNA (1)...(19): siRNA sense strand
ggacguagcucuuuccaaa

SEQ ID NO: 2157503 - RNA, 19 nt, Homo sapiens
  misc_RNA (1)...(19): siRNA sense strand
ucaacaagcuuaucgacuu

SEQ ID NO: 2157504 - RNA, 19 nt, Homo sapiens
  misc_RNA (1)...(19): siRNA sense strand
gcacuucacccaagccauu

SEQ ID NO: 2157505 - RNA, 19 nt, Homo sapiens
  misc_RNA (1)...(19): siRNA sense strand
caagauacuuuggaacaga

SEQ ID NO: 2157506 - RNA, 19 nt, Homo sapiens
  misc_RNA (1)...(19): siRNA sense strand
uccaaaagcugcaauauaa

SEQ ID NO: 2157507 - RNA, 19 nt, Homo sapiens
  misc_RNA (1)...(19): siRNA sense strand
caacaagcuuaucgacuuc

SEQ ID NO: 2157508 - RNA, 19 nt, Homo sapiens
  misc_RNA (1)...(19): siRNA sense strand
gcaauggaucaacuucaua

SEQ ID NO: 2157509 - RNA, 19 nt, Homo sapiens
  misc_RNA (1)...(19): siRNA sense strand
ggaacuaugugcaggaaac

SEQ ID NO: 2157510 - RNA, 19 nt, Homo sapiens
  misc_RNA (1)...(19): siRNA sense strand
gcugcaagauacuuuggaa

SEQ ID NO: 2157511 - RNA, 19 nt, Homo sapiens
  misc_RNA (1)...(19): siRNA sense strand
auucaaagcugcaagauac

SEQ ID NO: 2157512 - RNA, 19 nt, Homo sapiens
  misc_RNA (1)...(19): siRNA sense strand
uggaacagauugaggaaca

SEQ ID NO: 2157513 - RNA, 19 nt, Homo sapiens
  misc_RNA (1)...(19): siRNA sense strand
gcaagauacuuuggaacag

SEQ ID NO: 2157514 - RNA, 19 nt, Homo sapiens
  misc_RNA (1)...(19): siRNA sense strand
caauggaucaacuucauau

SEQ ID NO: 2157515 - RNA, 19 nt, Homo sapiens
  misc_RNA (1)...(19): siRNA sense strand
caauauaaggaucucugua

SEQ ID NO: 2157516 - RNA, 19 nt, Homo sapiens
  misc_RNA (1)...(19): siRNA sense strand
ccaagguucaacaagcuua

SEQ ID NO: 2157517 - RNA, 19 nt, Homo sapiens
  misc_RNA (1)...(19): siRNA sense strand
gacauuaaccauuauacca

SEQ ID NO: 2157518 - RNA, 19 nt, Homo sapiens
  misc_RNA (1)...(19): siRNA sense strand
caggaaacacagacacaaa

SEQ ID NO: 2157519 - RNA, 19 nt, Homo sapiens
  misc_RNA (1)...(19): siRNA sense strand
gcuuaucgacuucuuggaa

SEQ ID NO: 2157520 - RNA, 19 nt, Homo sapiens
  misc_RNA (1)...(19): siRNA sense strand
aaacacagacagcaaugga

SEQ ID NO: 2157521 - RNA, 19 nt, Homo sapiens
  misc_RNA (1)...(19): siRNA sense strand
gcaggaaacacagacacaa

SEQ ID NO: 2157522 - RNA, 19 nt, Homo sapiens
  misc_RNA (1)...(19): siRNA sense strand
uccaaaaucugcaagaauu

SEQ ID NO: 2157523 - RNA, 19 nt, Homo sapiens
  misc_RNA (1)...(19): siRNA sense strand
gcaauauaaggaucucugu

SEQ ID NO: 2157524 - RNA, 19 nt, Homo sapiens
  misc_RNA (1)...(19): siRNA sense strand
agacagcaauggaucaacu

SEQ ID NO: 2157525 - RNA, 19 nt, Homo sapiens
  misc_RNA (1)...(19): siRNA sense strand
cuuaucgacuucuuggaaa

SEQ ID NO: 2157526 - RNA, 19 nt, Homo sapiens
  misc_RNA (1)...(19): siRNA sense strand
uggaucaacuucauaugca

SEQ ID NO: 2157527 - RNA, 19 nt, Homo sapiens
  misc_RNA (1)...(19): siRNA sense strand
gaaacacagacacaaaauu

SEQ ID NO: 2157528 - RNA, 19 nt, Homo sapiens
  misc_RNA (1)...(19): siRNA sense strand
caccguguuucaaguuguu

SEQ ID NO: 2157529 - RNA, 19 nt, Homo sapiens
  misc_RNA (1)...(19): siRNA sense strand
guggaacuaugugcaggaa

SEQ ID NO: 2157530 - RNA, 19 nt, Homo sapiens
  misc_RNA (1)...(19): siRNA sense strand
ugaauucaaagcugcaaga

SEQ ID NO: 2157531 - RNA, 19 nt, Homo sapiens
  misc_RNA (1)...(19): siRNA sense strand
gaacuaugugcaggaaaca

SEQ ID NO: 2157532 - RNA, 19 nt, Homo sapiens
  misc_RNA (1)...(19): siRNA sense strand
caacuucauaugcacuuca

SEQ ID NO: 2157533 - RNA, 19 nt, Homo sapiens
  misc_RNA (1)...(19): siRNA sense strand
auauaaggaucucuguaca

SEQ ID NO: 2157534 - RNA, 19 nt, Homo sapiens
  misc_RNA (1)...(19): siRNA sense strand
aaacacagacacaaaauuc

SEQ ID NO: 2157535 - RNA, 19 nt, Homo sapiens
  misc_RNA (1)...(19): siRNA sense strand
aagauacuuuggaacagau

SEQ ID NO: 2157536 - RNA, 19 nt, Homo sapiens
  misc_RNA (1)...(19): siRNA sense strand
aauauaaggaucucuguac

SEQ ID NO: 2157537 - RNA, 19 nt, Homo sapiens
  misc_RNA (1)...(19): siRNA sense strand
gaauucaaagcugcaagau

SEQ ID NO: 2157538 - RNA, 19 nt, Homo sapiens
  misc_RNA (1)...(19): siRNA sense strand
aauucaaagcugcaagaua

SEQ ID NO: 2157539 - RNA, 19 nt, Homo sapiens
  misc_RNA (1)...(19): siRNA sense strand
uaccaagguucaacaagcu

SEQ ID NO: 2157540 - RNA, 19 nt, Homo sapiens
  misc_RNA (1)...(19): siRNA sense strand
ggaacagauugaggaacag

SEQ ID NO: 2157541 - RNA, 19 nt, Homo sapiens
  misc_RNA (1)...(19): siRNA sense strand
uugguuauguggaacuaug

SEQ ID NO: 2157542 - RNA, 19 nt, Homo sapiens
  misc_RNA (1)...(19): siRNA sense strand
agcaauggaucaacuucau

SEQ ID NO: 2157543 - RNA, 19 nt, Homo sapiens
  misc_RNA (1)...(19): siRNA sense strand
cugcaagaauuuugacauu

SEQ ID NO: 2157544 - RNA, 19 nt, Homo sapiens
  misc_RNA (1)...(19): siRNA sense strand
ggaaacacagacacaaaau

SEQ ID NO: 2157545 - RNA, 19 nt, Homo sapiens
  misc_RNA (1)...(19): siRNA sense strand
gcacuucacccaagccauu

SEQ ID NO: 2157546 - RNA, 19 nt, Homo sapiens
  misc_RNA (1)...(19): siRNA sense strand
uccaaaagcugcaauauaa

SEQ ID NO: 2157547 - RNA, 19 nt, Homo sapiens
  misc_RNA (1)...(19): siRNA sense strand
ggaacuaugugcaggaaac

SEQ ID NO: 2157548 - RNA, 19 nt, Homo sapiens
  misc_RNA (1)...(19): siRNA sense strand
caauauaaggaucucugua

SEQ ID NO: 2157549 - RNA, 19 nt, Homo sapiens
  misc_RNA (1)...(19): siRNA sense strand
caggaaacacagacacaaa

SEQ ID NO: 2157550 - RNA, 19 nt, Homo sapiens
  misc_RNA (1)...(19): siRNA sense strand
gcaggaaacacagacacaa

SEQ ID NO: 2157551 - RNA, 19 nt, Homo sapiens
  misc_RNA (1)...(19): siRNA sense strand
gcaauauaaggaucucugu

SEQ ID NO: 2157552 - RNA, 19 nt, Homo sapiens
  misc_RNA (1)...(19): siRNA sense strand
gaaacacagacacaaaauu

SEQ ID NO: 2157553 - RNA, 19 nt, Homo sapiens
  misc_RNA (1)...(19): siRNA sense strand
caccguguuucaaguuguu

SEQ ID NO: 2157554 - RNA, 19 nt, Homo sapiens
  misc_RNA (1)...(19): siRNA sense strand
guggaacuaugugcaggaa

SEQ ID NO: 2157555 - RNA, 19 nt, Homo sapiens
  misc_RNA (1)...(19): siRNA sense strand
gaacuaugugcaggaaaca

SEQ ID NO: 2157556 - RNA, 19 nt, Homo sapiens
  misc_RNA (1)...(19): siRNA sense strand
caacuucauaugcacuuca

SEQ ID NO: 2157557 - RNA, 19 nt, Homo sapiens
  misc_RNA (1)...(19): siRNA sense strand
auauaaggaucucuguaca

SEQ ID NO: 2157558 - RNA, 19 nt, Homo sapiens
  misc_RNA (1)...(19): siRNA sense strand
aaacacagacacaaaauuc

SEQ ID NO: 2157559 - RNA, 19 nt, Homo sapiens
  misc_RNA (1)...(19): siRNA sense strand
aauauaaggaucucuguac

SEQ ID NO: 2157560 - RNA, 19 nt, Homo sapiens
  misc_RNA (1)...(19): siRNA sense strand
uugguuauguggaacuaug

SEQ ID NO: 2157561 - RNA, 19 nt, Homo sapiens
  misc_RNA (1)...(19): siRNA sense strand
ggaaacacagacacaaaau

SEQ ID NO: 2157562 - RNA, 19 nt, Homo sapiens
  misc_RNA (1)...(19): siRNA sense strand
gcacuucacccaagccauu

SEQ ID NO: 2157563 - RNA, 19 nt, Homo sapiens
  misc_RNA (1)...(19): siRNA sense strand
uccaaaagcugcaauauaa

SEQ ID NO: 2157564 - RNA, 19 nt, Homo sapiens
  misc_RNA (1)...(19): siRNA sense strand
ggaacuaugugcaggaaac

SEQ ID NO: 2157565 - RNA, 19 nt, Homo sapiens
  misc_RNA (1)...(19): siRNA sense strand
caauauaaggaucucugua

SEQ ID NO: 2157566 - RNA, 19 nt, Homo sapiens
  misc_RNA (1)...(19): siRNA sense strand
caggaaacacagacacaaa

SEQ ID NO: 2157567 - RNA, 19 nt, Homo sapiens
  misc_RNA (1)...(19): siRNA sense strand
gcaggaaacacagacacaa

SEQ ID NO: 2157568 - RNA, 19 nt, Homo sapiens
  misc_RNA (1)...(19): siRNA sense strand
gcaauauaaggaucucugu

SEQ ID NO: 2157569 - RNA, 19 nt, Homo sapiens
  misc_RNA (1)...(19): siRNA sense strand
gaaacacagacacaaaauu

SEQ ID NO: 2157570 - RNA, 19 nt, Homo sapiens
  misc_RNA (1)...(19): siRNA sense strand
caccguguuucaaguuguu

SEQ ID NO: 2157571 - RNA, 19 nt, Homo sapiens
  misc_RNA (1)...(19): siRNA sense strand
guggaacuaugugcaggaa

SEQ ID NO: 2157572 - RNA, 19 nt, Homo sapiens
  misc_RNA (1)...(19): siRNA sense strand
gaacuaugugcaggaaaca

SEQ ID NO: 2157573 - RNA, 19 nt, Homo sapiens
  misc_RNA (1)...(19): siRNA sense strand
caacuucauaugcacuuca

SEQ ID NO: 2157574 - RNA, 19 nt, Homo sapiens
  misc_RNA (1)...(19): siRNA sense strand
auauaaggaucucuguaca

SEQ ID NO: 2157575 - RNA, 19 nt, Homo sapiens
  misc_RNA (1)...(19): siRNA sense strand
aaacacagacacaaaauuc

SEQ ID NO: 2157576 - RNA, 19 nt, Homo sapiens
  misc_RNA (1)...(19): siRNA sense strand
aauauaaggaucucuguac

SEQ ID NO: 2157577 - RNA, 19 nt, Homo sapiens
  misc_RNA (1)...(19): siRNA sense strand
uugguuauguggaacuaug

SEQ ID NO: 2157578 - RNA, 19 nt, Homo sapiens
  misc_RNA (1)...(19): siRNA sense strand
ggaaacacagacacaaaau

SEQ ID NO: 2157579 - RNA, 19 nt, Homo sapiens
  misc_RNA (1)...(19): siRNA sense strand
ggaaagaaguggaaagaaa

SEQ ID NO: 2157580 - RNA, 19 nt, Homo sapiens
  misc_RNA (1)...(19): siRNA sense strand
gagaacagcuccugcaguu

SEQ ID NO: 2157581 - RNA, 19 nt, Homo sapiens
  misc_RNA (1)...(19): siRNA sense strand
gcaguuggauggaaauaaa

SEQ ID NO: 2157582 - RNA, 19 nt, Homo sapiens
  misc_RNA (1)...(19): siRNA sense strand
gcagguuucucacugguua

SEQ ID NO: 2157583 - RNA, 19 nt, Homo sapiens
  misc_RNA (1)...(19): siRNA sense strand
gggagacacuucacuguuu

SEQ ID NO: 2157584 - RNA, 19 nt, Homo sapiens
  misc_RNA (1)...(19): siRNA sense strand
ccaaauuacuuccaccuaa

SEQ ID NO: 2157585 - RNA, 19 nt, Homo sapiens
  misc_RNA (1)...(19): siRNA sense strand
gcucagaccuccacucguu

SEQ ID NO: 2157586 - RNA, 19 nt, Homo sapiens
  misc_RNA (1)...(19): siRNA sense strand
cagaugagauccuugauga

SEQ ID NO: 2157587 - RNA, 19 nt, Homo sapiens
  misc_RNA (1)...(19): siRNA sense strand
gaaaggagcaagagcaaau

SEQ ID NO: 2157588 - RNA, 19 nt, Homo sapiens
  misc_RNA (1)...(19): siRNA sense strand
gccuaaaucuggagcagua

SEQ ID NO: 2157589 - RNA, 19 nt, Homo sapiens
  misc_RNA (1)...(19): siRNA sense strand
gaaaugaagaugucucuag

SEQ ID NO: 2157590 - RNA, 19 nt, Homo sapiens
  misc_RNA (1)...(19): siRNA sense strand
gagaaaagcuaaggagaaa

SEQ ID NO: 2157591 - RNA, 19 nt, Homo sapiens
  misc_RNA (1)...(19): siRNA sense strand
ugccaaagaucccaaauca

SEQ ID NO: 2157592 - RNA, 19 nt, Homo sapiens
  misc_RNA (1)...(19): siRNA sense strand
aaacaucacuggagaacag

SEQ ID NO: 2157593 - RNA, 19 nt, Homo sapiens
  misc_RNA (1)...(19): siRNA sense strand
aaaugaagaugucucuaga

SEQ ID NO: 2157594 - RNA, 19 nt, Homo sapiens
  misc_RNA (1)...(19): siRNA sense strand
gaaaagaugacgucaacua

SEQ ID NO: 2157595 - RNA, 19 nt, Homo sapiens
  misc_RNA (1)...(19): siRNA sense strand
gcagguagcaggaucuuca

SEQ ID NO: 2157596 - RNA, 19 nt, Homo sapiens
  misc_RNA (1)...(19): siRNA sense strand
caaauuacuuccaccuaag

SEQ ID NO: 2157597 - RNA, 19 nt, Homo sapiens
  misc_RNA (1)...(19): siRNA sense strand
gaugagauccuugaugaug

SEQ ID NO: 2157598 - RNA, 19 nt, Homo sapiens
  misc_RNA (1)...(19): siRNA sense strand
gggccucucuccucuaugu

SEQ ID NO: 2157599 - RNA, 19 nt, Homo sapiens
  misc_RNA (1)...(19): siRNA sense strand
ucaaggaaaugaagauguc

SEQ ID NO: 2157600 - RNA, 19 nt, Homo sapiens
  misc_RNA (1)...(19): siRNA sense strand
ggauggaaauaaacuuaag

SEQ ID NO: 2157601 - RNA, 19 nt, Homo sapiens
  misc_RNA (1)...(19): siRNA sense strand
ccaaagaucccaaaucacu

SEQ ID NO: 2157602 - RNA, 19 nt, Homo sapiens
  misc_RNA (1)...(19): siRNA sense strand
ggagcaguauguaucugaa

SEQ ID NO: 2157603 - RNA, 19 nt, Homo sapiens
  misc_RNA (1)...(19): siRNA sense strand
gagacucuaauuucagaua

SEQ ID NO: 2157604 - RNA, 19 nt, Homo sapiens
  misc_RNA (1)...(19): siRNA sense strand
gaaagaaguggaaagaaaa

SEQ ID NO: 2157605 - RNA, 19 nt, Homo sapiens
  misc_RNA (1)...(19): siRNA sense strand
aaagaucccaaaucacuaa

SEQ ID NO: 2157606 - RNA, 19 nt, Homo sapiens
  misc_RNA (1)...(19): siRNA sense strand
ccaaaccaccaacaagaaa

SEQ ID NO: 2157607 - RNA, 19 nt, Homo sapiens
  misc_RNA (1)...(19): siRNA sense strand
cuucucgucugaccacaua

SEQ ID NO: 2157608 - RNA, 19 nt, Homo sapiens
  misc_RNA (1)...(19): siRNA sense strand
gagaaaggagcaagagcaa

SEQ ID NO: 2157609 - RNA, 19 nt, Homo sapiens
  misc_RNA (1)...(19): siRNA sense strand
guuucucacugguuaauga

SEQ ID NO: 2157610 - RNA, 19 nt, Homo sapiens
  misc_RNA (1)...(19): siRNA sense strand
caaagaucccaaaucacua

SEQ ID NO: 2157611 - RNA, 19 nt, Homo sapiens
  misc_RNA (1)...(19): siRNA sense strand
gcaagggaaagaaguggaa

SEQ ID NO: 2157612 - RNA, 19 nt, Homo sapiens
  misc_RNA (1)...(19): siRNA sense strand
gaaccugccugcgccuaca

SEQ ID NO: 2157613 - RNA, 19 nt, Homo sapiens
  misc_RNA (1)...(19): siRNA sense strand
ggagacacuucacuguuuu

SEQ ID NO: 2157614 - RNA, 19 nt, Homo sapiens
  misc_RNA (1)...(19): siRNA sense strand
aaacuuaaggcucuuggaa

SEQ ID NO: 2157615 - RNA, 19 nt, Homo sapiens
  misc_RNA (1)...(19): siRNA sense strand
aaauuaagcggaaguuugu

SEQ ID NO: 2157616 - RNA, 19 nt, Homo sapiens
  misc_RNA (1)...(19): siRNA sense strand
ucacuaagggcauccaguu

SEQ ID NO: 2157617 - RNA, 19 nt, Homo sapiens
  misc_RNA (1)...(19): siRNA sense strand
cuucaaagucugaucauga

SEQ ID NO: 2157618 - RNA, 19 nt, Homo sapiens
  misc_RNA (1)...(19): siRNA sense strand
gagcaaaugcagaggaagu

SEQ ID NO: 2157619 - RNA, 19 nt, Homo sapiens
  misc_RNA (1)...(19): siRNA sense strand
ccuuagcacugucaucaga

SEQ ID NO: 2157620 - RNA, 19 nt, Homo sapiens
  misc_RNA (1)...(19): siRNA sense strand
caaagucugaucaugaugu

SEQ ID NO: 2157621 - RNA, 19 nt, Homo sapiens
  misc_RNA (1)...(19): siRNA sense strand
caccaaaccaccaacaaga

SEQ ID NO: 2157622 - RNA, 19 nt, Homo sapiens
  misc_RNA (1)...(19): siRNA sense strand
gaaacucaaggaaaugaag

SEQ ID NO: 2157623 - RNA, 19 nt, Homo sapiens
  misc_RNA (1)...(19): siRNA sense strand
acuuaaggcucuuggaaug

SEQ ID NO: 2157624 - RNA, 19 nt, Homo sapiens
  misc_RNA (1)...(19): siRNA sense strand
ugagauccuugaugaugga

SEQ ID NO: 2157625 - RNA, 19 nt, Homo sapiens
  misc_RNA (1)...(19): siRNA sense strand
aagagcaaaugcagaggaa

SEQ ID NO: 2157626 - RNA, 19 nt, Homo sapiens
  misc_RNA (1)...(19): siRNA sense strand
ucggaaggcccaagagaaa

SEQ ID NO: 2157627 - RNA, 19 nt, Homo sapiens
  misc_RNA (1)...(19): siRNA sense strand
aaaagaagccaguagguuu

SEQ ID NO: 2157628 - RNA, 19 nt, Homo sapiens
  misc_RNA (1)...(19): siRNA sense strand
gcaguauguaucugaauuc

SEQ ID NO: 2157629 - RNA, 19 nt, Homo sapiens
  misc_RNA (1)...(19): siRNA sense strand
uaccuucaaugaugacuuc

SEQ ID NO: 2157630 - RNA, 19 nt, Homo sapiens
  misc_RNA (1)...(19): siRNA sense strand
ggacacccaagccauguuc

SEQ ID NO: 2157631 - RNA, 19 nt, Homo sapiens
  misc_RNA (1)...(19): siRNA sense strand
gauggacagucucccaaac

SEQ ID NO: 2157632 - RNA, 19 nt, Homo sapiens
  misc_RNA (1)...(19): siRNA sense strand
ggaaaugaagaugucucua

SEQ ID NO: 2157633 - RNA, 19 nt, Homo sapiens
  misc_RNA (1)...(19): siRNA sense strand
gggaaagaaguggaaagaa

SEQ ID NO: 2157634 - RNA, 19 nt, Homo sapiens
  misc_RNA (1)...(19): siRNA sense strand
agcaguauguaucugaauu

SEQ ID NO: 2157635 - RNA, 19 nt, Homo sapiens
  misc_RNA (1)...(19): siRNA sense strand
ccaccuaaggguuugagaa

SEQ ID NO: 2157636 - RNA, 19 nt, Homo sapiens
  misc_RNA (1)...(19): siRNA sense strand
ggagugugcagcagguuuc

SEQ ID NO: 2157637 - RNA, 19 nt, Homo sapiens
  misc_RNA (1)...(19): siRNA sense strand
ccaagaauuuuaccuucaa

SEQ ID NO: 2157638 - RNA, 19 nt, Homo sapiens
  misc_RNA (1)...(19): siRNA sense strand
aagaugacgucaacuacag

SEQ ID NO: 2157639 - RNA, 19 nt, Homo sapiens
  misc_RNA (1)...(19): siRNA sense strand
cagaaaagaugacgucaac

SEQ ID NO: 2157640 - RNA, 19 nt, Homo sapiens
  misc_RNA (1)...(19): siRNA sense strand
ccuaaggguuugagaacgu

SEQ ID NO: 2157641 - RNA, 19 nt, Homo sapiens
  misc_RNA (1)...(19): siRNA sense strand
caguauguaucugaauuca

SEQ ID NO: 2157642 - RNA, 19 nt, Homo sapiens
  misc_RNA (1)...(19): siRNA sense strand
cacagucagugucagaauc

SEQ ID NO: 2157643 - RNA, 19 nt, Homo sapiens
  misc_RNA (1)...(19): siRNA sense strand
aaagucugaucaugaugug

SEQ ID NO: 2157644 - RNA, 19 nt, Homo sapiens
  misc_RNA (1)...(19): siRNA sense strand
cuucaaugaugacuucagu

SEQ ID NO: 2157645 - RNA, 19 nt, Homo sapiens
  misc_RNA (1)...(19): siRNA sense strand
gcucggaaggcccaagaga

SEQ ID NO: 2157646 - RNA, 19 nt, Homo sapiens
  misc_RNA (1)...(19): siRNA sense strand
ggacagucucccaaacaca

SEQ ID NO: 2157647 - RNA, 19 nt, Homo sapiens
  misc_RNA (1)...(19): siRNA sense strand
cuaagggcauccaguucau

SEQ ID NO: 2157648 - RNA, 19 nt, Homo sapiens
  misc_RNA (1)...(19): siRNA sense strand
uucaaagucugaucaugau

SEQ ID NO: 2157649 - RNA, 19 nt, Homo sapiens
  misc_RNA (1)...(19): siRNA sense strand
ugaccacauagcugaauuu

SEQ ID NO: 2157650 - RNA, 19 nt, Homo sapiens
  misc_RNA (1)...(19): siRNA sense strand
aaaagggguccaagaauuu

SEQ ID NO: 2157651 - RNA, 19 nt, Homo sapiens
  misc_RNA (1)...(19): siRNA sense strand
augccuuucucaugguuua

SEQ ID NO: 2157652 - RNA, 19 nt, Homo sapiens
  misc_RNA (1)...(19): siRNA sense strand
aaagaugacgucaacuaca

SEQ ID NO: 2157653 - RNA, 19 nt, Homo sapiens
  misc_RNA (1)...(19): siRNA sense strand
uaaaucuggagcaguaugu

SEQ ID NO: 2157654 - RNA, 19 nt, Homo sapiens
  misc_RNA (1)...(19): siRNA sense strand
uaaggagaaaggagcaaga

SEQ ID NO: 2157655 - RNA, 19 nt, Homo sapiens
  misc_RNA (1)...(19): siRNA sense strand
aaugacagccggaaaggau

SEQ ID NO: 2157656 - RNA, 19 nt, Homo sapiens
  misc_RNA (1)...(19): siRNA sense strand
aaacucaaggaaaugaaga

SEQ ID NO: 2157657 - RNA, 19 nt, Homo sapiens
  misc_RNA (1)...(19): siRNA sense strand
aaagaaacucaaggaaaug

SEQ ID NO: 2157658 - RNA, 19 nt, Homo sapiens
  misc_RNA (1)...(19): siRNA sense strand
ucagaugagauccuugaug

SEQ ID NO: 2157659 - RNA, 19 nt, Homo sapiens
  misc_RNA (1)...(19): siRNA sense strand
aaaagaugaugccaaagau

SEQ ID NO: 2157660 - RNA, 19 nt, Homo sapiens
  misc_RNA (1)...(19): siRNA sense strand
aagaaacucaaggaaauga

SEQ ID NO: 2157661 - RNA, 19 nt, Homo sapiens
  misc_RNA (1)...(19): siRNA sense strand
gagcaguauguaucugaau

SEQ ID NO: 2157662 - RNA, 19 nt, Homo sapiens
  misc_RNA (1)...(19): siRNA sense strand
guuaaugagccuaaaucug

SEQ ID NO: 2157663 - RNA, 19 nt, Homo sapiens
  misc_RNA (1)...(19): siRNA sense strand
cuucagaggcagacuggaa

SEQ ID NO: 2157664 - RNA, 19 nt, Homo sapiens
  misc_RNA (1)...(19): siRNA sense strand
gaaaagcuaaggagaaagg

SEQ ID NO: 2157665 - RNA, 19 nt, Homo sapiens
  misc_RNA (1)...(19): siRNA sense strand
aagaaucuccuugccauca

SEQ ID NO: 2157666 - RNA, 19 nt, Homo sapiens
  misc_RNA (1)...(19): siRNA sense strand
ucaccaaaccaccaacaag

SEQ ID NO: 2157667 - RNA, 19 nt, Homo sapiens
  misc_RNA (1)...(19): siRNA sense strand
gaucaugauguggaagaau

SEQ ID NO: 2157668 - RNA, 19 nt, Homo sapiens
  misc_RNA (1)...(19): siRNA sense strand
aaaauuaagcggaaguuug

SEQ ID NO: 2157669 - RNA, 19 nt, Homo sapiens
  misc_RNA (1)...(19): siRNA sense strand
acacuucacuguuuucuac

SEQ ID NO: 2157670 - RNA, 19 nt, Homo sapiens
  misc_RNA (1)...(19): siRNA sense strand
gaccacauagcugaauuuc

SEQ ID NO: 2157671 - RNA, 19 nt, Homo sapiens
  misc_RNA (1)...(19): siRNA sense strand
ggaaagaaguggaaagaaa

SEQ ID NO: 2157672 - RNA, 19 nt, Homo sapiens
  misc_RNA (1)...(19): siRNA sense strand
gagaacagcuccugcaguu

SEQ ID NO: 2157673 - RNA, 19 nt, Homo sapiens
  misc_RNA (1)...(19): siRNA sense strand
gcaguuggauggaaauaaa

SEQ ID NO: 2157674 - RNA, 19 nt, Homo sapiens
  misc_RNA (1)...(19): siRNA sense strand
gcagguuucucacugguua

SEQ ID NO: 2157675 - RNA, 19 nt, Homo sapiens
  misc_RNA (1)...(19): siRNA sense strand
gggagacacuucacuguuu

SEQ ID NO: 2157676 - RNA, 19 nt, Homo sapiens
  misc_RNA (1)...(19): siRNA sense strand
ccaaauuacuuccaccuaa

SEQ ID NO: 2157677 - RNA, 19 nt, Homo sapiens
  misc_RNA (1)...(19): siRNA sense strand
gcucagaccuccacucguu

SEQ ID NO: 2157678 - RNA, 19 nt, Homo sapiens
  misc_RNA (1)...(19): siRNA sense strand
cagaugagauccuugauga

SEQ ID NO: 2157679 - RNA, 19 nt, Homo sapiens
  misc_RNA (1)...(19): siRNA sense strand
gaaaggagcaagagcaaau

SEQ ID NO: 2157680 - RNA, 19 nt, Homo sapiens
  misc_RNA (1)...(19): siRNA sense strand
gccuaaaucuggagcagua

SEQ ID NO: 2157681 - RNA, 19 nt, Homo sapiens
  misc_RNA (1)...(19): siRNA sense strand
gaaaugaagaugucucuag

SEQ ID NO: 2157682 - RNA, 19 nt, Homo sapiens
  misc_RNA (1)...(19): siRNA sense strand
gagaaaagcuaaggagaaa

SEQ ID NO: 2157683 - RNA, 19 nt, Homo sapiens
  misc_RNA (1)...(19): siRNA sense strand
ugccaaagaucccaaauca

SEQ ID NO: 2157684 - RNA, 19 nt, Homo sapiens
  misc_RNA (1)...(19): siRNA sense strand
aaacaucacuggagaacag

SEQ ID NO: 2157685 - RNA, 19 nt, Homo sapiens
  misc_RNA (1)...(19): siRNA sense strand
aaaugaagaugucucuaga

SEQ ID NO: 2157686 - RNA, 19 nt, Homo sapiens
  misc_RNA (1)...(19): siRNA sense strand
gaaaagaugacgucaacua

SEQ ID NO: 2157687 - RNA, 19 nt, Homo sapiens
  misc_RNA (1)...(19): siRNA sense strand
gcagguagcaggaucuuca

SEQ ID NO: 2157688 - RNA, 19 nt, Homo sapiens
  misc_RNA (1)...(19): siRNA sense strand
caaauuacuuccaccuaag

SEQ ID NO: 2157689 - RNA, 19 nt, Homo sapiens
  misc_RNA (1)...(19): siRNA sense strand
gaugagauccuugaugaug

SEQ ID NO: 2157690 - RNA, 19 nt, Homo sapiens
  misc_RNA (1)...(19): siRNA sense strand
gggccucucuccucuaugu

SEQ ID NO: 2157691 - RNA, 19 nt, Homo sapiens
  misc_RNA (1)...(19): siRNA sense strand
ucaaggaaaugaagauguc

SEQ ID NO: 2157692 - RNA, 19 nt, Homo sapiens
  misc_RNA (1)...(19): siRNA sense strand
ggauggaaauaaacuuaag

SEQ ID NO: 2157693 - RNA, 19 nt, Homo sapiens
  misc_RNA (1)...(19): siRNA sense strand
ccaaagaucccaaaucacu

SEQ ID NO: 2157694 - RNA, 19 nt, Homo sapiens
  misc_RNA (1)...(19): siRNA sense strand
ggagcaguauguaucugaa

SEQ ID NO: 2157695 - RNA, 19 nt, Homo sapiens
  misc_RNA (1)...(19): siRNA sense strand
gagacucuaauuucagaua

SEQ ID NO: 2157696 - RNA, 19 nt, Homo sapiens
  misc_RNA (1)...(19): siRNA sense strand
gaaagaaguggaaagaaaa

SEQ ID NO: 2157697 - RNA, 19 nt, Homo sapiens
  misc_RNA (1)...(19): siRNA sense strand
aaagaucccaaaucacuaa

SEQ ID NO: 2157698 - RNA, 19 nt, Homo sapiens
  misc_RNA (1)...(19): siRNA sense strand
ccaaaccaccaacaagaaa

SEQ ID NO: 2157699 - RNA, 19 nt, Homo sapiens
  misc_RNA (1)...(19): siRNA sense strand
cuucucgucugaccacaua

SEQ ID NO: 2157700 - RNA, 19 nt, Homo sapiens
  misc_RNA (1)...(19): siRNA sense strand
gagaaaggagcaagagcaa

SEQ ID NO: 2157701 - RNA, 19 nt, Homo sapiens
  misc_RNA (1)...(19): siRNA sense strand
guuucucacugguuaauga

SEQ ID NO: 2157702 - RNA, 19 nt, Homo sapiens
  misc_RNA (1)...(19): siRNA sense strand
caaagaucccaaaucacua

SEQ ID NO: 2157703 - RNA, 19 nt, Homo sapiens
  misc_RNA (1)...(19): siRNA sense strand
gcaagggaaagaaguggaa

SEQ ID NO: 2157704 - RNA, 19 nt, Homo sapiens
  misc_RNA (1)...(19): siRNA sense strand
gaaccugccugcgccuaca

SEQ ID NO: 2157705 - RNA, 19 nt, Homo sapiens
  misc_RNA (1)...(19): siRNA sense strand
ggagacacuucacuguuuu

SEQ ID NO: 2157706 - RNA, 19 nt, Homo sapiens
  misc_RNA (1)...(19): siRNA sense strand
aaacuuaaggcucuuggaa

SEQ ID NO: 2157707 - RNA, 19 nt, Homo sapiens
  misc_RNA (1)...(19): siRNA sense strand
aaauuaagcggaaguuugu

SEQ ID NO: 2157708 - RNA, 19 nt, Homo sapiens
  misc_RNA (1)...(19): siRNA sense strand
ucacuaagggcauccaguu

SEQ ID NO: 2157709 - RNA, 19 nt, Homo sapiens
  misc_RNA (1)...(19): siRNA sense strand
cuucaaagucugaucauga

SEQ ID NO: 2157710 - RNA, 19 nt, Homo sapiens
  misc_RNA (1)...(19): siRNA sense strand
gagcaaaugcagaggaagu

SEQ ID NO: 2157711 - RNA, 19 nt, Homo sapiens
  misc_RNA (1)...(19): siRNA sense strand
ccuuagcacugucaucaga

SEQ ID NO: 2157712 - RNA, 19 nt, Homo sapiens
  misc_RNA (1)...(19): siRNA sense strand
caaagucugaucaugaugu

SEQ ID NO: 2157713 - RNA, 19 nt, Homo sapiens
  misc_RNA (1)...(19): siRNA sense strand
caccaaaccaccaacaaga

SEQ ID NO: 2157714 - RNA, 19 nt, Homo sapiens
  misc_RNA (1)...(19): siRNA sense strand
gaaacucaaggaaaugaag

SEQ ID NO: 2157715 - RNA, 19 nt, Homo sapiens
  misc_RNA (1)...(19): siRNA sense strand
acuuaaggcucuuggaaug

SEQ ID NO: 2157716 - RNA, 19 nt, Homo sapiens
  misc_RNA (1)...(19): siRNA sense strand
ugagauccuugaugaugga

SEQ ID NO: 2157717 - RNA, 19 nt, Homo sapiens
  misc_RNA (1)...(19): siRNA sense strand
aagagcaaaugcagaggaa

SEQ ID NO: 2157718 - RNA, 19 nt, Homo sapiens
  misc_RNA (1)...(19): siRNA sense strand
ucggaaggcccaagagaaa

SEQ ID NO: 2157719 - RNA, 19 nt, Homo sapiens
  misc_RNA (1)...(19): siRNA sense strand
aaaagaagccaguagguuu

SEQ ID NO: 2157720 - RNA, 19 nt, Homo sapiens
  misc_RNA (1)...(19): siRNA sense strand
gcaguauguaucugaauuc

SEQ ID NO: 2157721 - RNA, 19 nt, Homo sapiens
  misc_RNA (1)...(19): siRNA sense strand
uaccuucaaugaugacuuc

SEQ ID NO: 2157722 - RNA, 19 nt, Homo sapiens
  misc_RNA (1)...(19): siRNA sense strand
ggacacccaagccauguuc

SEQ ID NO: 2157723 - RNA, 19 nt, Homo sapiens
  misc_RNA (1)...(19): siRNA sense strand
gauggacagucucccaaac

SEQ ID NO: 2157724 - RNA, 19 nt, Homo sapiens
  misc_RNA (1)...(19): siRNA sense strand
ggaaaugaagaugucucua

SEQ ID NO: 2157725 - RNA, 19 nt, Homo sapiens
  misc_RNA (1)...(19): siRNA sense strand
gggaaagaaguggaaagaa

SEQ ID NO: 2157726 - RNA, 19 nt, Homo sapiens
  misc_RNA (1)...(19): siRNA sense strand
agcaguauguaucugaauu

SEQ ID NO: 2157727 - RNA, 19 nt, Homo sapiens
  misc_RNA (1)...(19): siRNA sense strand
ccaccuaaggguuugagaa

SEQ ID NO: 2157728 - RNA, 19 nt, Homo sapiens
  misc_RNA (1)...(19): siRNA sense strand
ggagugugcagcagguuuc

SEQ ID NO: 2157729 - RNA, 19 nt, Homo sapiens
  misc_RNA (1)...(19): siRNA sense strand
ccaagaauuuuaccuucaa

SEQ ID NO: 2157730 - RNA, 19 nt, Homo sapiens
  misc_RNA (1)...(19): siRNA sense strand
aagaugacgucaacuacag

SEQ ID NO: 2157731 - RNA, 19 nt, Homo sapiens
  misc_RNA (1)...(19): siRNA sense strand
cagaaaagaugacgucaac

SEQ ID NO: 2157732 - RNA, 19 nt, Homo sapiens
  misc_RNA (1)...(19): siRNA sense strand
ccuaaggguuugagaacgu

SEQ ID NO: 2157733 - RNA, 19 nt, Homo sapiens
  misc_RNA (1)...(19): siRNA sense strand
caguauguaucugaauuca

SEQ ID NO: 2157734 - RNA, 19 nt, Homo sapiens
  misc_RNA (1)...(19): siRNA sense strand
cacagucagugucagaauc

SEQ ID NO: 2157735 - RNA, 19 nt, Homo sapiens
  misc_RNA (1)...(19): siRNA sense strand
aaagucugaucaugaugug

SEQ ID NO: 2157736 - RNA, 19 nt, Homo sapiens
  misc_RNA (1)...(19): siRNA sense strand
cuucaaugaugacuucagu

SEQ ID NO: 2157737 - RNA, 19 nt, Homo sapiens
  misc_RNA (1)...(19): siRNA sense strand
gcucggaaggcccaagaga

SEQ ID NO: 2157738 - RNA, 19 nt, Homo sapiens
  misc_RNA (1)...(19): siRNA sense strand
ggacagucucccaaacaca

SEQ ID NO: 2157739 - RNA, 19 nt, Homo sapiens
  misc_RNA (1)...(19): siRNA sense strand
cuaagggcauccaguucau

SEQ ID NO: 2157740 - RNA, 19 nt, Homo sapiens
  misc_RNA (1)...(19): siRNA sense strand
uucaaagucugaucaugau

SEQ ID NO: 2157741 - RNA, 19 nt, Homo sapiens
  misc_RNA (1)...(19): siRNA sense strand
ugaccacauagcugaauuu

SEQ ID NO: 2157742 - RNA, 19 nt, Homo sapiens
  misc_RNA (1)...(19): siRNA sense strand
aaaagggguccaagaauuu

SEQ ID NO: 2157743 - RNA, 19 nt, Homo sapiens
  misc_RNA (1)...(19): siRNA sense strand
augccuuucucaugguuua

SEQ ID NO: 2157744 - RNA, 19 nt, Homo sapiens
  misc_RNA (1)...(19): siRNA sense strand
aaagaugacgucaacuaca

SEQ ID NO: 2157745 - RNA, 19 nt, Homo sapiens
  misc_RNA (1)...(19): siRNA sense strand
uaaaucuggagcaguaugu

SEQ ID NO: 2157746 - RNA, 19 nt, Homo sapiens
  misc_RNA (1)...(19): siRNA sense strand
uaaggagaaaggagcaaga

SEQ ID NO: 2157747 - RNA, 19 nt, Homo sapiens
  misc_RNA (1)...(19): siRNA sense strand
aaugacagccggaaaggau

SEQ ID NO: 2157748 - RNA, 19 nt, Homo sapiens
  misc_RNA (1)...(19): siRNA sense strand
aaacucaaggaaaugaaga

SEQ ID NO: 2157749 - RNA, 19 nt, Homo sapiens
  misc_RNA (1)...(19): siRNA sense strand
aaagaaacucaaggaaaug

SEQ ID NO: 2157750 - RNA, 19 nt, Homo sapiens
  misc_RNA (1)...(19): siRNA sense strand
ucagaugagauccuugaug

SEQ ID NO: 2157751 - RNA, 19 nt, Homo sapiens
  misc_RNA (1)...(19): siRNA sense strand
aaaagaugaugccaaagau

SEQ ID NO: 2157752 - RNA, 19 nt, Homo sapiens
  misc_RNA (1)...(19): siRNA sense strand
aagaaacucaaggaaauga

SEQ ID NO: 2157753 - RNA, 19 nt, Homo sapiens
  misc_RNA (1)...(19): siRNA sense strand
gagcaguauguaucugaau

SEQ ID NO: 2157754 - RNA, 19 nt, Homo sapiens
  misc_RNA (1)...(19): siRNA sense strand
guuaaugagccuaaaucug

SEQ ID NO: 2157755 - RNA, 19 nt, Homo sapiens
  misc_RNA (1)...(19): siRNA sense strand
cuucagaggcagacuggaa

SEQ ID NO: 2157756 - RNA, 19 nt, Homo sapiens
  misc_RNA (1)...(19): siRNA sense strand
gaaaagcuaaggagaaagg

SEQ ID NO: 2157757 - RNA, 19 nt, Homo sapiens
  misc_RNA (1)...(19): siRNA sense strand
aagaaucuccuugccauca

SEQ ID NO: 2157758 - RNA, 19 nt, Homo sapiens
  misc_RNA (1)...(19): siRNA sense strand
ucaccaaaccaccaacaag

SEQ ID NO: 2157759 - RNA, 19 nt, Homo sapiens
  misc_RNA (1)...(19): siRNA sense strand
gaucaugauguggaagaau

SEQ ID NO: 2157760 - RNA, 19 nt, Homo sapiens
  misc_RNA (1)...(19): siRNA sense strand
aaaauuaagcggaaguuug

SEQ ID NO: 2157761 - RNA, 19 nt, Homo sapiens
  misc_RNA (1)...(19): siRNA sense strand
acacuucacuguuuucuac

SEQ ID NO: 2157762 - RNA, 19 nt, Homo sapiens
  misc_RNA (1)...(19): siRNA sense strand
gaccacauagcugaauuuc

SEQ ID NO: 2157763 - RNA, 19 nt, Homo sapiens
  misc_RNA (1)...(19): siRNA sense strand
gcacuuggcuuugaauaua

SEQ ID NO: 2157764 - RNA, 19 nt, Homo sapiens
  misc_RNA (1)...(19): siRNA sense strand
gaagauauguucccaguuc

SEQ ID NO: 2157765 - RNA, 19 nt, Homo sapiens
  misc_RNA (1)...(19): siRNA sense strand
gaauauaaaugguggaaug

SEQ ID NO: 2157766 - RNA, 19 nt, Homo sapiens
  misc_RNA (1)...(19): siRNA sense strand
gaaaggagccaaagaaugu

SEQ ID NO: 2157767 - RNA, 19 nt, Homo sapiens
  misc_RNA (1)...(19): siRNA sense strand
gaaaucaggcacaaacaua

SEQ ID NO: 2157768 - RNA, 19 nt, Homo sapiens
  misc_RNA (1)...(19): siRNA sense strand
gaaagacacagauaaugua

SEQ ID NO: 2157769 - RNA, 19 nt, Homo sapiens
  misc_RNA (1)...(19): siRNA sense strand
guacaaaugugguagaauc

SEQ ID NO: 2157770 - RNA, 19 nt, Homo sapiens
  misc_RNA (1)...(19): siRNA sense strand
caacaauuauuccuucuga

SEQ ID NO: 2157771 - RNA, 19 nt, Homo sapiens
  misc_RNA (1)...(19): siRNA sense strand
gcacaaacauacucuacug

SEQ ID NO: 2157772 - RNA, 19 nt, Homo sapiens
  misc_RNA (1)...(19): siRNA sense strand
uaaagacgacucucaauuu

SEQ ID NO: 2157773 - RNA, 19 nt, Homo sapiens
  misc_RNA (1)...(19): siRNA sense strand
gauaauagacgguucauca

SEQ ID NO: 2157774 - RNA, 19 nt, Homo sapiens
  misc_RNA (1)...(19): siRNA sense strand
gaaggaaagacacagauaa

SEQ ID NO: 2157775 - RNA, 19 nt, Homo sapiens
  misc_RNA (1)...(19): siRNA sense strand
ggaaagacacagauaaugu

SEQ ID NO: 2157776 - RNA, 19 nt, Homo sapiens
  misc_RNA (1)...(19): siRNA sense strand
guaugccagucaacaauua

SEQ ID NO: 2157777 - RNA, 19 nt, Homo sapiens
  misc_RNA (1)...(19): siRNA sense strand
ggaaggagaagauaaugaa

SEQ ID NO: 2157778 - RNA, 19 nt, Homo sapiens
  misc_RNA (1)...(19): siRNA sense strand
caaagaauguagaccaugu

SEQ ID NO: 2157779 - RNA, 19 nt, Homo sapiens
  misc_RNA (1)...(19): siRNA sense strand
caggaaaccuuguaugugu

SEQ ID NO: 2157780 - RNA, 19 nt, Homo sapiens
  misc_RNA (1)...(19): siRNA sense strand
caaagaggcuuguauucca

SEQ ID NO: 2157781 - RNA, 19 nt, Homo sapiens
  misc_RNA (1)...(19): siRNA sense strand
ggucaagccugugcuggua

SEQ ID NO: 2157782 - RNA, 19 nt, Homo sapiens
  misc_RNA (1)...(19): siRNA sense strand
ucacagaugcuauuagauu

SEQ ID NO: 2157783 - RNA, 19 nt, Homo sapiens
  misc_RNA (1)...(19): siRNA sense strand
guaaagacgacucucaauu

SEQ ID NO: 2157784 - RNA, 19 nt, Homo sapiens
  misc_RNA (1)...(19): siRNA sense strand
gcagacaguugugcuauca

SEQ ID NO: 2157785 - RNA, 19 nt, Homo sapiens
  misc_RNA (1)...(19): siRNA sense strand
gaacuaaucagggucaaga

SEQ ID NO: 2157786 - RNA, 19 nt, Homo sapiens
  misc_RNA (1)...(19): siRNA sense strand
ucaaugacauggugaagau

SEQ ID NO: 2157787 - RNA, 19 nt, Homo sapiens
  misc_RNA (1)...(19): siRNA sense strand
agacacagauaauguacaa

SEQ ID NO: 2157788 - RNA, 19 nt, Homo sapiens
  misc_RNA (1)...(19): siRNA sense strand
caagagaggauuucaggaa

SEQ ID NO: 2157789 - RNA, 19 nt, Homo sapiens
  misc_RNA (1)...(19): siRNA sense strand
gagcaggagugauuucagu

SEQ ID NO: 2157790 - RNA, 19 nt, Homo sapiens
  misc_RNA (1)...(19): siRNA sense strand
ggagguggcuggagaucau

SEQ ID NO: 2157791 - RNA, 19 nt, Homo sapiens
  misc_RNA (1)...(19): siRNA sense strand
gaacuaggaagaauaacau

SEQ ID NO: 2157792 - RNA, 19 nt, Homo sapiens
  misc_RNA (1)...(19): siRNA sense strand
aagaggaaguuguauauuc

SEQ ID NO: 2157793 - RNA, 19 nt, Homo sapiens
  misc_RNA (1)...(19): siRNA sense strand
gaggaaggauccagugagu

SEQ ID NO: 2157794 - RNA, 19 nt, Homo sapiens
  misc_RNA (1)...(19): siRNA sense strand
aaacaagcuuacacccaua

SEQ ID NO: 2157795 - RNA, 19 nt, Homo sapiens
  misc_RNA (1)...(19): siRNA sense strand
ggaaggauccagugagugu

SEQ ID NO: 2157796 - RNA, 19 nt, Homo sapiens
  misc_RNA (1)...(19): siRNA sense strand
ggucagaugauuacacaaa

SEQ ID NO: 2157797 - RNA, 19 nt, Homo sapiens
  misc_RNA (1)...(19): siRNA sense strand
caauaaacagucacuacua

SEQ ID NO: 2157798 - RNA, 19 nt, Homo sapiens
  misc_RNA (1)...(19): siRNA sense strand
ccgaucaacugcugugaaa

SEQ ID NO: 2157799 - RNA, 19 nt, Homo sapiens
  misc_RNA (1)...(19): siRNA sense strand
gagguucugacaaugauua

SEQ ID NO: 2157800 - RNA, 19 nt, Homo sapiens
  misc_RNA (1)...(19): siRNA sense strand
gaagaaggaaagacacaga

SEQ ID NO: 2157801 - RNA, 19 nt, Homo sapiens
  misc_RNA (1)...(19): siRNA sense strand
ggaauuucuuugccugaga

SEQ ID NO: 2157802 - RNA, 19 nt, Homo sapiens
  misc_RNA (1)...(19): siRNA sense strand
aaagugcgauggaaugaau

SEQ ID NO: 2157803 - RNA, 19 nt, Homo sapiens
  misc_RNA (1)...(19): siRNA sense strand
ucucacagaugcuauuaga

SEQ ID NO: 2157804 - RNA, 19 nt, Homo sapiens
  misc_RNA (1)...(19): siRNA sense strand
ugacaaugauuaccugauc

SEQ ID NO: 2157805 - RNA, 19 nt, Homo sapiens
  misc_RNA (1)...(19): siRNA sense strand
aaaaugagguguaauccua

SEQ ID NO: 2157806 - RNA, 19 nt, Homo sapiens
  misc_RNA (1)...(19): siRNA sense strand
gccacuacauugagaaaga

SEQ ID NO: 2157807 - RNA, 19 nt, Homo sapiens
  misc_RNA (1)...(19): siRNA sense strand
gguguaauccuacuaaauc

SEQ ID NO: 2157808 - RNA, 19 nt, Homo sapiens
  misc_RNA (1)...(19): siRNA sense strand
gaagaggaaguuguauauu

SEQ ID NO: 2157809 - RNA, 19 nt, Homo sapiens
  misc_RNA (1)...(19): siRNA sense strand
gcucugaccugcuacuucu

SEQ ID NO: 2157810 - RNA, 19 nt, Homo sapiens
  misc_RNA (1)...(19): siRNA sense strand
gaagcuugcccucugugua

SEQ ID NO: 2157811 - RNA, 19 nt, Homo sapiens
  misc_RNA (1)...(19): siRNA sense strand
gaacuacaggcauccuuau

SEQ ID NO: 2157812 - RNA, 19 nt, Homo sapiens
  misc_RNA (1)...(19): siRNA sense strand
ugagaaaggagccaaagaa

SEQ ID NO: 2157813 - RNA, 19 nt, Homo sapiens
  misc_RNA (1)...(19): siRNA sense strand
uaaugaagaggaaguugua

SEQ ID NO: 2157814 - RNA, 19 nt, Homo sapiens
  misc_RNA (1)...(19): siRNA sense strand
aaucagaguuugcacuaug

SEQ ID NO: 2157815 - RNA, 19 nt, Homo sapiens
  misc_RNA (1)...(19): siRNA sense strand
ggaagaauaacauuugucu

SEQ ID NO: 2157816 - RNA, 19 nt, Homo sapiens
  misc_RNA (1)...(19): siRNA sense strand
gagaaaggagccaaagaau

SEQ ID NO: 2157817 - RNA, 19 nt, Homo sapiens
  misc_RNA (1)...(19): siRNA sense strand
gaauguauaagguguaaag

SEQ ID NO: 2157818 - RNA, 19 nt, Homo sapiens
  misc_RNA (1)...(19): siRNA sense strand
ugaagaggaaguuguauau

SEQ ID NO: 2157819 - RNA, 19 nt, Homo sapiens
  misc_RNA (1)...(19): siRNA sense strand
ccaacaauauaacagacuu

SEQ ID NO: 2157820 - RNA, 19 nt, Homo sapiens
  misc_RNA (1)...(19): siRNA sense strand
aauagacgguucaucaaug

SEQ ID NO: 2157821 - RNA, 19 nt, Homo sapiens
  misc_RNA (1)...(19): siRNA sense strand
gccaaagaauguauaaggu

SEQ ID NO: 2157822 - RNA, 19 nt, Homo sapiens
  misc_RNA (1)...(19): siRNA sense strand
aauaaacagucacuacuag

SEQ ID NO: 2157823 - RNA, 19 nt, Homo sapiens
  misc_RNA (1)...(19): siRNA sense strand
ugagggagccugcaagaga

SEQ ID NO: 2157824 - RNA, 19 nt, Homo sapiens
  misc_RNA (1)...(19): siRNA sense strand
gagguguaauccuacuaaa

SEQ ID NO: 2157825 - RNA, 19 nt, Homo sapiens
  misc_RNA (1)...(19): siRNA sense strand
cuaaucagggucaagauaa

SEQ ID NO: 2157826 - RNA, 19 nt, Homo sapiens
  misc_RNA (1)...(19): siRNA sense strand
cacagaugcuauuagauug

SEQ ID NO: 2157827 - RNA, 19 nt, Homo sapiens
  misc_RNA (1)...(19): siRNA sense strand
gauaauguacaaguggaua

SEQ ID NO: 2157828 - RNA, 19 nt, Homo sapiens
  misc_RNA (1)...(19): siRNA sense strand
ccacuacauugagaaagaa

SEQ ID NO: 2157829 - RNA, 19 nt, Homo sapiens
  misc_RNA (1)...(19): siRNA sense strand
caugguggauauuaauaga

SEQ ID NO: 2157830 - RNA, 19 nt, Homo sapiens
  misc_RNA (1)...(19): siRNA sense strand
acaccuaccuguccauaca

SEQ ID NO: 2157831 - RNA, 19 nt, Homo sapiens
  misc_RNA (1)...(19): siRNA sense strand
uaaugacgacuaacucaaa

SEQ ID NO: 2157832 - RNA, 19 nt, Homo sapiens
  misc_RNA (1)...(19): siRNA sense strand
uaccagaugugcauuucuu

SEQ ID NO: 2157833 - RNA, 19 nt, Homo sapiens
  misc_RNA (1)...(19): siRNA sense strand
aaagacgacucucaauuuu

SEQ ID NO: 2157834 - RNA, 19 nt, Homo sapiens
  misc_RNA (1)...(19): siRNA sense strand
ccaaauaccagaugugcau

SEQ ID NO: 2157835 - RNA, 19 nt, Homo sapiens
  misc_RNA (1)...(19): siRNA sense strand
ucauaggagucacaguuga

SEQ ID NO: 2157836 - RNA, 19 nt, Homo sapiens
  misc_RNA (1)...(19): siRNA sense strand
gaguuugcacuaugacuuu

SEQ ID NO: 2157837 - RNA, 19 nt, Homo sapiens
  misc_RNA (1)...(19): siRNA sense strand
cuaggaagaauaacauuug

SEQ ID NO: 2157838 - RNA, 19 nt, Homo sapiens
  misc_RNA (1)...(19): siRNA sense strand
ccagauccauacuccaugu

SEQ ID NO: 2157839 - RNA, 19 nt, Homo sapiens
  misc_RNA (1)...(19): siRNA sense strand
ggagccaaagaauguauaa

SEQ ID NO: 2157840 - RNA, 19 nt, Homo sapiens
  misc_RNA (1)...(19): siRNA sense strand
agacaguugugcuaucaug

SEQ ID NO: 2157841 - RNA, 19 nt, Homo sapiens
  misc_RNA (1)...(19): siRNA sense strand
caacaucuuguauuaaugg

SEQ ID NO: 2157842 - RNA, 19 nt, Homo sapiens
  misc_RNA (1)...(19): siRNA sense strand
gagcagccuuaucaucaca

SEQ ID NO: 2157843 - RNA, 19 nt, Homo sapiens
  misc_RNA (1)...(19): siRNA sense strand
guaccaacaauauaacaga

SEQ ID NO: 2157844 - RNA, 19 nt, Homo sapiens
  misc_RNA (1)...(19): siRNA sense strand
guccauacaucaggucuau

SEQ ID NO: 2157845 - RNA, 19 nt, Homo sapiens
  misc_RNA (1)...(19): siRNA sense strand
uaaucagggucaagauaau

SEQ ID NO: 2157846 - RNA, 19 nt, Homo sapiens
  misc_RNA (1)...(19): siRNA sense strand
aacaauggaucaucuucuu

SEQ ID NO: 2157847 - RNA, 19 nt, Homo sapiens
  misc_RNA (1)...(19): siRNA sense strand
agaagauaaugaagaggaa

SEQ ID NO: 2157848 - RNA, 19 nt, Homo sapiens
  misc_RNA (1)...(19): siRNA sense strand
gaagaagauggcucucugu

SEQ ID NO: 2157849 - RNA, 19 nt, Homo sapiens
  misc_RNA (1)...(19): siRNA sense strand
agaaggaaagacacagaua

SEQ ID NO: 2157850 - RNA, 19 nt, Homo sapiens
  misc_RNA (1)...(19): siRNA sense strand
gcaaagaggcuuguauucc

SEQ ID NO: 2157851 - RNA, 19 nt, Homo sapiens
  misc_RNA (1)...(19): siRNA sense strand
ggugaagauuuauucuauc

SEQ ID NO: 2157852 - RNA, 19 nt, Homo sapiens
  misc_RNA (1)...(19): siRNA sense strand
ucaagccugugcugguaaa

SEQ ID NO: 2157853 - RNA, 19 nt, Homo sapiens
  misc_RNA (1)...(19): siRNA sense strand
ggauuuaaaccaccaacau

SEQ ID NO: 2157854 - RNA, 19 nt, Homo sapiens
  misc_RNA (1)...(19): siRNA sense strand
gaucuuaaacuugcauauc

SEQ ID NO: 2157855 - RNA, 19 nt, Homo sapiens
  misc_RNA (1)...(19): siRNA sense strand
gauggaaccaaagaaugua

SEQ ID NO: 2157856 - RNA, 19 nt, Homo sapiens
  misc_RNA (1)...(19): siRNA sense strand
gugaaacgguugacuuuug

SEQ ID NO: 2157857 - RNA, 19 nt, Homo sapiens
  misc_RNA (1)...(19): siRNA sense strand
cacuuggcuuugaauauaa

SEQ ID NO: 2157858 - RNA, 19 nt, Homo sapiens
  misc_RNA (1)...(19): siRNA sense strand
ccaggccacuacauugaga

SEQ ID NO: 2157859 - RNA, 19 nt, Homo sapiens
  misc_RNA (1)...(19): siRNA sense strand
uaaacagucacuacuagga

SEQ ID NO: 2157860 - RNA, 19 nt, Homo sapiens
  misc_RNA (1)...(19): siRNA sense strand
agaacuacaggcauccuua

SEQ ID NO: 2157861 - RNA, 19 nt, Homo sapiens
  misc_RNA (1)...(19): siRNA sense strand
auacucuacuggagaacua

SEQ ID NO: 2157862 - RNA, 19 nt, Homo sapiens
  misc_RNA (1)...(19): siRNA sense strand
guacggagcaugacuucca

SEQ ID NO: 2157863 - RNA, 19 nt, Homo sapiens
  misc_RNA (1)...(19): siRNA sense strand
gcacuuggcuuugaauaua

SEQ ID NO: 2157864 - RNA, 19 nt, Homo sapiens
  misc_RNA (1)...(19): siRNA sense strand
gaagauauguucccaguuc

SEQ ID NO: 2157865 - RNA, 19 nt, Homo sapiens
  misc_RNA (1)...(19): siRNA sense strand
gaauauaaaugguggaaug

SEQ ID NO: 2157866 - RNA, 19 nt, Homo sapiens
  misc_RNA (1)...(19): siRNA sense strand
gaaaggagccaaagaaugu

SEQ ID NO: 2157867 - RNA, 19 nt, Homo sapiens
  misc_RNA (1)...(19): siRNA sense strand
gaaaucaggcacaaacaua

SEQ ID NO: 2157868 - RNA, 19 nt, Homo sapiens
  misc_RNA (1)...(19): siRNA sense strand
gaaagacacagauaaugua

SEQ ID NO: 2157869 - RNA, 19 nt, Homo sapiens
  misc_RNA (1)...(19): siRNA sense strand
guacaaaugugguagaauc

SEQ ID NO: 2157870 - RNA, 19 nt, Homo sapiens
  misc_RNA (1)...(19): siRNA sense strand
caacaauuauuccuucuga

SEQ ID NO: 2157871 - RNA, 19 nt, Homo sapiens
  misc_RNA (1)...(19): siRNA sense strand
gcacaaacauacucuacug

SEQ ID NO: 2157872 - RNA, 19 nt, Homo sapiens
  misc_RNA (1)...(19): siRNA sense strand
uaaagacgacucucaauuu

SEQ ID NO: 2157873 - RNA, 19 nt, Homo sapiens
  misc_RNA (1)...(19): siRNA sense strand
gauaauagacgguucauca

SEQ ID NO: 2157874 - RNA, 19 nt, Homo sapiens
  misc_RNA (1)...(19): siRNA sense strand
gaaggaaagacacagauaa

SEQ ID NO: 2157875 - RNA, 19 nt, Homo sapiens
  misc_RNA (1)...(19): siRNA sense strand
ggaaagacacagauaaugu

SEQ ID NO: 2157876 - RNA, 19 nt, Homo sapiens
  misc_RNA (1)...(19): siRNA sense strand
guaugccagucaacaauua

SEQ ID NO: 2157877 - RNA, 19 nt, Homo sapiens
  misc_RNA (1)...(19): siRNA sense strand
ggaaggagaagauaaugaa

SEQ ID NO: 2157878 - RNA, 19 nt, Homo sapiens
  misc_RNA (1)...(19): siRNA sense strand
caaagaauguagaccaugu

SEQ ID NO: 2157879 - RNA, 19 nt, Homo sapiens
  misc_RNA (1)...(19): siRNA sense strand
caggaaaccuuguaugugu

SEQ ID NO: 2157880 - RNA, 19 nt, Homo sapiens
  misc_RNA (1)...(19): siRNA sense strand
caaagaggcuuguauucca

SEQ ID NO: 2157881 - RNA, 19 nt, Homo sapiens
  misc_RNA (1)...(19): siRNA sense strand
ggucaagccugugcuggua

SEQ ID NO: 2157882 - RNA, 19 nt, Homo sapiens
  misc_RNA (1)...(19): siRNA sense strand
ucacagaugcuauuagauu

SEQ ID NO: 2157883 - RNA, 19 nt, Homo sapiens
  misc_RNA (1)...(19): siRNA sense strand
guaaagacgacucucaauu

SEQ ID NO: 2157884 - RNA, 19 nt, Homo sapiens
  misc_RNA (1)...(19): siRNA sense strand
gcagacaguugugcuauca

SEQ ID NO: 2157885 - RNA, 19 nt, Homo sapiens
  misc_RNA (1)...(19): siRNA sense strand
gaacuaaucagggucaaga

SEQ ID NO: 2157886 - RNA, 19 nt, Homo sapiens
  misc_RNA (1)...(19): siRNA sense strand
ucaaugacauggugaagau

SEQ ID NO: 2157887 - RNA, 19 nt, Homo sapiens
  misc_RNA (1)...(19): siRNA sense strand
agacacagauaauguacaa

SEQ ID NO: 2157888 - RNA, 19 nt, Homo sapiens
  misc_RNA (1)...(19): siRNA sense strand
caagagaggauuucaggaa

SEQ ID NO: 2157889 - RNA, 19 nt, Homo sapiens
  misc_RNA (1)...(19): siRNA sense strand
gagcaggagugauuucagu

SEQ ID NO: 2157890 - RNA, 19 nt, Homo sapiens
  misc_RNA (1)...(19): siRNA sense strand
ggagguggcuggagaucau

SEQ ID NO: 2157891 - RNA, 19 nt, Homo sapiens
  misc_RNA (1)...(19): siRNA sense strand
gaacuaggaagaauaacau

SEQ ID NO: 2157892 - RNA, 19 nt, Homo sapiens
  misc_RNA (1)...(19): siRNA sense strand
aagaggaaguuguauauuc

SEQ ID NO: 2157893 - RNA, 19 nt, Homo sapiens
  misc_RNA (1)...(19): siRNA sense strand
gaggaaggauccagugagu

SEQ ID NO: 2157894 - RNA, 19 nt, Homo sapiens
  misc_RNA (1)...(19): siRNA sense strand
aaacaagcuuacacccaua

SEQ ID NO: 2157895 - RNA, 19 nt, Homo sapiens
  misc_RNA (1)...(19): siRNA sense strand
ggaaggauccagugagugu

SEQ ID NO: 2157896 - RNA, 19 nt, Homo sapiens
  misc_RNA (1)...(19): siRNA sense strand
ggucagaugauuacacaaa

SEQ ID NO: 2157897 - RNA, 19 nt, Homo sapiens
  misc_RNA (1)...(19): siRNA sense strand
caauaaacagucacuacua

SEQ ID NO: 2157898 - RNA, 19 nt, Homo sapiens
  misc_RNA (1)...(19): siRNA sense strand
ccgaucaacugcugugaaa

SEQ ID NO: 2157899 - RNA, 19 nt, Homo sapiens
  misc_RNA (1)...(19): siRNA sense strand
gagguucugacaaugauua

SEQ ID NO: 2157900 - RNA, 19 nt, Homo sapiens
  misc_RNA (1)...(19): siRNA sense strand
gaagaaggaaagacacaga

SEQ ID NO: 2157901 - RNA, 19 nt, Homo sapiens
  misc_RNA (1)...(19): siRNA sense strand
ggaauuucuuugccugaga

SEQ ID NO: 2157902 - RNA, 19 nt, Homo sapiens
  misc_RNA (1)...(19): siRNA sense strand
aaagugcgauggaaugaau

SEQ ID NO: 2157903 - RNA, 19 nt, Homo sapiens
  misc_RNA (1)...(19): siRNA sense strand
ucucacagaugcuauuaga

SEQ ID NO: 2157904 - RNA, 19 nt, Homo sapiens
  misc_RNA (1)...(19): siRNA sense strand
ugacaaugauuaccugauc

SEQ ID NO: 2157905 - RNA, 19 nt, Homo sapiens
  misc_RNA (1)...(19): siRNA sense strand
aaaaugagguguaauccua

SEQ ID NO: 2157906 - RNA, 19 nt, Homo sapiens
  misc_RNA (1)...(19): siRNA sense strand
gccacuacauugagaaaga

SEQ ID NO: 2157907 - RNA, 19 nt, Homo sapiens
  misc_RNA (1)...(19): siRNA sense strand
gguguaauccuacuaaauc

SEQ ID NO: 2157908 - RNA, 19 nt, Homo sapiens
  misc_RNA (1)...(19): siRNA sense strand
gaagaggaaguuguauauu

SEQ ID NO: 2157909 - RNA, 19 nt, Homo sapiens
  misc_RNA (1)...(19): siRNA sense strand
gcucugaccugcuacuucu

SEQ ID NO: 2157910 - RNA, 19 nt, Homo sapiens
  misc_RNA (1)...(19): siRNA sense strand
gaacuacaggcauccuuau

SEQ ID NO: 2157911 - RNA, 19 nt, Homo sapiens
  misc_RNA (1)...(19): siRNA sense strand
gaagcuugcccucugugua

SEQ ID NO: 2157912 - RNA, 19 nt, Homo sapiens
  misc_RNA (1)...(19): siRNA sense strand
ugagaaaggagccaaagaa

SEQ ID NO: 2157913 - RNA, 19 nt, Homo sapiens
  misc_RNA (1)...(19): siRNA sense strand
uaaugaagaggaaguugua

SEQ ID NO: 2157914 - RNA, 19 nt, Homo sapiens
  misc_RNA (1)...(19): siRNA sense strand
aaucagaguuugcacuaug

SEQ ID NO: 2157915 - RNA, 19 nt, Homo sapiens
  misc_RNA (1)...(19): siRNA sense strand
ggaagaauaacauuugucu

SEQ ID NO: 2157916 - RNA, 19 nt, Homo sapiens
  misc_RNA (1)...(19): siRNA sense strand
gagaaaggagccaaagaau

SEQ ID NO: 2157917 - RNA, 19 nt, Homo sapiens
  misc_RNA (1)...(19): siRNA sense strand
gaauguauaagguguaaag

SEQ ID NO: 2157918 - RNA, 19 nt, Homo sapiens
  misc_RNA (1)...(19): siRNA sense strand
ugaagaggaaguuguauau

SEQ ID NO: 2157919 - RNA, 19 nt, Homo sapiens
  misc_RNA (1)...(19): siRNA sense strand
ccaacaauauaacagacuu

SEQ ID NO: 2157920 - RNA, 19 nt, Homo sapiens
  misc_RNA (1)...(19): siRNA sense strand
aauagacgguucaucaaug

SEQ ID NO: 2157921 - RNA, 19 nt, Homo sapiens
  misc_RNA (1)...(19): siRNA sense strand
gccaaagaauguauaaggu

SEQ ID NO: 2157922 - RNA, 19 nt, Homo sapiens
  misc_RNA (1)...(19): siRNA sense strand
aauaaacagucacuacuag

SEQ ID NO: 2157923 - RNA, 19 nt, Homo sapiens
  misc_RNA (1)...(19): siRNA sense strand
ugagggagccugcaagaga

SEQ ID NO: 2157924 - RNA, 19 nt, Homo sapiens
  misc_RNA (1)...(19): siRNA sense strand
gagguguaauccuacuaaa

SEQ ID NO: 2157925 - RNA, 19 nt, Homo sapiens
  misc_RNA (1)...(19): siRNA sense strand
cuaaucagggucaagauaa

SEQ ID NO: 2157926 - RNA, 19 nt, Homo sapiens
  misc_RNA (1)...(19): siRNA sense strand
cacagaugcuauuagauug

SEQ ID NO: 2157927 - RNA, 19 nt, Homo sapiens
  misc_RNA (1)...(19): siRNA sense strand
gauaauguacaaguggaua

SEQ ID NO: 2157928 - RNA, 19 nt, Homo sapiens
  misc_RNA (1)...(19): siRNA sense strand
ccacuacauugagaaagaa

SEQ ID NO: 2157929 - RNA, 19 nt, Homo sapiens
  misc_RNA (1)...(19): siRNA sense strand
caugguggauauuaauaga

SEQ ID NO: 2157930 - RNA, 19 nt, Homo sapiens
  misc_RNA (1)...(19): siRNA sense strand
acaccuaccuguccauaca

SEQ ID NO: 2157931 - RNA, 19 nt, Homo sapiens
  misc_RNA (1)...(19): siRNA sense strand
uaaugacgacuaacucaaa

SEQ ID NO: 2157932 - RNA, 19 nt, Homo sapiens
  misc_RNA (1)...(19): siRNA sense strand
uaccagaugugcauuucuu

SEQ ID NO: 2157933 - RNA, 19 nt, Homo sapiens
  misc_RNA (1)...(19): siRNA sense strand
aaagacgacucucaauuuu

SEQ ID NO: 2157934 - RNA, 19 nt, Homo sapiens
  misc_RNA (1)...(19): siRNA sense strand
ccaaauaccagaugugcau

SEQ ID NO: 2157935 - RNA, 19 nt, Homo sapiens
  misc_RNA (1)...(19): siRNA sense strand
ucauaggagucacaguuga

SEQ ID NO: 2157936 - RNA, 19 nt, Homo sapiens
  misc_RNA (1)...(19): siRNA sense strand
gaguuugcacuaugacuuu

SEQ ID NO: 2157937 - RNA, 19 nt, Homo sapiens
  misc_RNA (1)...(19): siRNA sense strand
cuaggaagaauaacauuug

SEQ ID NO: 2157938 - RNA, 19 nt, Homo sapiens
  misc_RNA (1)...(19): siRNA sense strand
ccagauccauacuccaugu

SEQ ID NO: 2157939 - RNA, 19 nt, Homo sapiens
  misc_RNA (1)...(19): siRNA sense strand
ggagccaaagaauguauaa

SEQ ID NO: 2157940 - RNA, 19 nt, Homo sapiens
  misc_RNA (1)...(19): siRNA sense strand
agacaguugugcuaucaug

SEQ ID NO: 2157941 - RNA, 19 nt, Homo sapiens
  misc_RNA (1)...(19): siRNA sense strand
caacaucuuguauuaaugg

SEQ ID NO: 2157942 - RNA, 19 nt, Homo sapiens
  misc_RNA (1)...(19): siRNA sense strand
gagcagccuuaucaucaca

SEQ ID NO: 2157943 - RNA, 19 nt, Homo sapiens
  misc_RNA (1)...(19): siRNA sense strand
guaccaacaauauaacaga

SEQ ID NO: 2157944 - RNA, 19 nt, Homo sapiens
  misc_RNA (1)...(19): siRNA sense strand
guccauacaucaggucuau

SEQ ID NO: 2157945 - RNA, 19 nt, Homo sapiens
  misc_RNA (1)...(19): siRNA sense strand
uaaucagggucaagauaau

SEQ ID NO: 2157946 - RNA, 19 nt, Homo sapiens
  misc_RNA (1)...(19): siRNA sense strand
aacaauggaucaucuucuu

SEQ ID NO: 2157947 - RNA, 19 nt, Homo sapiens
  misc_RNA (1)...(19): siRNA sense strand
agaagauaaugaagaggaa

SEQ ID NO: 2157948 - RNA, 19 nt, Homo sapiens
  misc_RNA (1)...(19): siRNA sense strand
gaagaagauggcucucugu

SEQ ID NO: 2157949 - RNA, 19 nt, Homo sapiens
  misc_RNA (1)...(19): siRNA sense strand
ucaagccugugcugguaaa

SEQ ID NO: 2157950 - RNA, 19 nt, Homo sapiens
  misc_RNA (1)...(19): siRNA sense strand
gcaaagaggcuuguauucc

SEQ ID NO: 2157951 - RNA, 19 nt, Homo sapiens
  misc_RNA (1)...(19): siRNA sense strand
ggugaagauuuauucuauc

SEQ ID NO: 2157952 - RNA, 19 nt, Homo sapiens
  misc_RNA (1)...(19): siRNA sense strand
ggauuuaaaccaccaacau

SEQ ID NO: 2157953 - RNA, 19 nt, Homo sapiens
  misc_RNA (1)...(19): siRNA sense strand
gaucuuaaacuugcauauc

SEQ ID NO: 2157954 - RNA, 19 nt, Homo sapiens
  misc_RNA (1)...(19): siRNA sense strand
agaaggaaagacacagaua

SEQ ID NO: 2157955 - RNA, 19 nt, Homo sapiens
  misc_RNA (1)...(19): siRNA sense strand
gauggaaccaaagaaugua

SEQ ID NO: 2157956 - RNA, 19 nt, Homo sapiens
  misc_RNA (1)...(19): siRNA sense strand
gugaaacgguugacuuuug

SEQ ID NO: 2157957 - RNA, 19 nt, Homo sapiens
  misc_RNA (1)...(19): siRNA sense strand
cacuuggcuuugaauauaa

SEQ ID NO: 2157958 - RNA, 19 nt, Homo sapiens
  misc_RNA (1)...(19): siRNA sense strand
ccaggcacauucagcaaca

SEQ ID NO: 2157959 - RNA, 19 nt, Homo sapiens
  misc_RNA (1)...(19): siRNA sense strand
uaaacagucacuacuagga

SEQ ID NO: 2157960 - RNA, 19 nt, Homo sapiens
  misc_RNA (1)...(19): siRNA sense strand
guacggagcaugacuucca

SEQ ID NO: 2157961 - RNA, 19 nt, Homo sapiens
  misc_RNA (1)...(19): siRNA sense strand
ccaggccacuacauugaga

SEQ ID NO: 2157962 - RNA, 19 nt, Homo sapiens
  misc_RNA (1)...(19): siRNA sense strand
auacucuacuggagaacua

SEQ ID NO: 2157963 - RNA, 19 nt, Homo sapiens
  misc_RNA (1)...(19): siRNA sense strand
gcacuuggcuuugaauaua

SEQ ID NO: 2157964 - RNA, 19 nt, Homo sapiens
  misc_RNA (1)...(19): siRNA sense strand
gaagauauguucccaguuc

SEQ ID NO: 2157965 - RNA, 19 nt, Homo sapiens
  misc_RNA (1)...(19): siRNA sense strand
gaauauaaaugguggaaug

SEQ ID NO: 2157966 - RNA, 19 nt, Homo sapiens
  misc_RNA (1)...(19): siRNA sense strand
gaaaggagccaaagaaugu

SEQ ID NO: 2157967 - RNA, 19 nt, Homo sapiens
  misc_RNA (1)...(19): siRNA sense strand
gaaaucaggcacaaacaua

SEQ ID NO: 2157968 - RNA, 19 nt, Homo sapiens
  misc_RNA (1)...(19): siRNA sense strand
gaaagacacagauaaugua

SEQ ID NO: 2157969 - RNA, 19 nt, Homo sapiens
  misc_RNA (1)...(19): siRNA sense strand
guacaaaugugguagaauc

SEQ ID NO: 2157970 - RNA, 19 nt, Homo sapiens
  misc_RNA (1)...(19): siRNA sense strand
caacaauuauuccuucuga

SEQ ID NO: 2157971 - RNA, 19 nt, Homo sapiens
  misc_RNA (1)...(19): siRNA sense strand
gcacaaacauacucuacug

SEQ ID NO: 2157972 - RNA, 19 nt, Homo sapiens
  misc_RNA (1)...(19): siRNA sense strand
uaaagacgacucucaauuu

SEQ ID NO: 2157973 - RNA, 19 nt, Homo sapiens
  misc_RNA (1)...(19): siRNA sense strand
gauaauagacgguucauca

SEQ ID NO: 2157974 - RNA, 19 nt, Homo sapiens
  misc_RNA (1)...(19): siRNA sense strand
gaaggaaagacacagauaa

SEQ ID NO: 2157975 - RNA, 19 nt, Homo sapiens
  misc_RNA (1)...(19): siRNA sense strand
ggaaagacacagauaaugu

SEQ ID NO: 2157976 - RNA, 19 nt, Homo sapiens
  misc_RNA (1)...(19): siRNA sense strand
guaugccagucaacaauua

SEQ ID NO: 2157977 - RNA, 19 nt, Homo sapiens
  misc_RNA (1)...(19): siRNA sense strand
ggaaggagaagauaaugaa

SEQ ID NO: 2157978 - RNA, 19 nt, Homo sapiens
  misc_RNA (1)...(19): siRNA sense strand
caaagaauguagaccaugu

SEQ ID NO: 2157979 - RNA, 19 nt, Homo sapiens
  misc_RNA (1)...(19): siRNA sense strand
caggaaaccuuguaugugu

SEQ ID NO: 2157980 - RNA, 19 nt, Homo sapiens
  misc_RNA (1)...(19): siRNA sense strand
caaagaggcuuguauucca

SEQ ID NO: 2157981 - RNA, 19 nt, Homo sapiens
  misc_RNA (1)...(19): siRNA sense strand
ggucaagccugugcuggua

SEQ ID NO: 2157982 - RNA, 19 nt, Homo sapiens
  misc_RNA (1)...(19): siRNA sense strand
ucacagaugcuauuagauu

SEQ ID NO: 2157983 - RNA, 19 nt, Homo sapiens
  misc_RNA (1)...(19): siRNA sense strand
guaaagacgacucucaauu

SEQ ID NO: 2157984 - RNA, 19 nt, Homo sapiens
  misc_RNA (1)...(19): siRNA sense strand
gcagacaguugugcuauca

SEQ ID NO: 2157985 - RNA, 19 nt, Homo sapiens
  misc_RNA (1)...(19): siRNA sense strand
gaacuaaucagggucaaga

SEQ ID NO: 2157986 - RNA, 19 nt, Homo sapiens
  misc_RNA (1)...(19): siRNA sense strand
ucaaugacauggugaagau

SEQ ID NO: 2157987 - RNA, 19 nt, Homo sapiens
  misc_RNA (1)...(19): siRNA sense strand
agacacagauaauguacaa

SEQ ID NO: 2157988 - RNA, 19 nt, Homo sapiens
  misc_RNA (1)...(19): siRNA sense strand
caagagaggauuucaggaa

SEQ ID NO: 2157989 - RNA, 19 nt, Homo sapiens
  misc_RNA (1)...(19): siRNA sense strand
gagcaggagugauuucagu

SEQ ID NO: 2157990 - RNA, 19 nt, Homo sapiens
  misc_RNA (1)...(19): siRNA sense strand
ggagguggcuggagaucau

SEQ ID NO: 2157991 - RNA, 19 nt, Homo sapiens
  misc_RNA (1)...(19): siRNA sense strand
gaacuaggaagaauaacau

SEQ ID NO: 2157992 - RNA, 19 nt, Homo sapiens
  misc_RNA (1)...(19): siRNA sense strand
aagaggaaguuguauauuc

SEQ ID NO: 2157993 - RNA, 19 nt, Homo sapiens
  misc_RNA (1)...(19): siRNA sense strand
gaggaaggauccagugagu

SEQ ID NO: 2157994 - RNA, 19 nt, Homo sapiens
  misc_RNA (1)...(19): siRNA sense strand
aaacaagcuuacacccaua

SEQ ID NO: 2157995 - RNA, 19 nt, Homo sapiens
  misc_RNA (1)...(19): siRNA sense strand
ggaaggauccagugagugu

SEQ ID NO: 2157996 - RNA, 19 nt, Homo sapiens
  misc_RNA (1)...(19): siRNA sense strand
ggucagaugauuacacaaa

SEQ ID NO: 2157997 - RNA, 19 nt, Homo sapiens
  misc_RNA (1)...(19): siRNA sense strand
caauaaacagucacuacua

SEQ ID NO: 2157998 - RNA, 19 nt, Homo sapiens
  misc_RNA (1)...(19): siRNA sense strand
ccgaucaacugcugugaaa

SEQ ID NO: 2157999 - RNA, 19 nt, Homo sapiens
  misc_RNA (1)...(19): siRNA sense strand
gagguucugacaaugauua

SEQ ID NO: 2158000 - RNA, 19 nt, Homo sapiens
  misc_RNA (1)...(19): siRNA sense strand
gaagaaggaaagacacaga

SEQ ID NO: 2158001 - RNA, 19 nt, Homo sapiens
  misc_RNA (1)...(19): siRNA sense strand
ggaauuucuuugccugaga

SEQ ID NO: 2158002 - RNA, 19 nt, Homo sapiens
  misc_RNA (1)...(19): siRNA sense strand
aaagugcgauggaaugaau

SEQ ID NO: 2158003 - RNA, 19 nt, Homo sapiens
  misc_RNA (1)...(19): siRNA sense strand
ucucacagaugcuauuaga

SEQ ID NO: 2158004 - RNA, 19 nt, Homo sapiens
  misc_RNA (1)...(19): siRNA sense strand
ugacaaugauuaccugauc

SEQ ID NO: 2158005 - RNA, 19 nt, Homo sapiens
  misc_RNA (1)...(19): siRNA sense strand
aaaaugagguguaauccua

SEQ ID NO: 2158006 - RNA, 19 nt, Homo sapiens
  misc_RNA (1)...(19): siRNA sense strand
gccacuacauugagaaaga

SEQ ID NO: 2158007 - RNA, 19 nt, Homo sapiens
  misc_RNA (1)...(19): siRNA sense strand
gguguaauccuacuaaauc

SEQ ID NO: 2158008 - RNA, 19 nt, Homo sapiens
  misc_RNA (1)...(19): siRNA sense strand
gaagaggaaguuguauauu

SEQ ID NO: 2158009 - RNA, 19 nt, Homo sapiens
  misc_RNA (1)...(19): siRNA sense strand
gcucugaccugcuacuucu

SEQ ID NO: 2158010 - RNA, 19 nt, Homo sapiens
  misc_RNA (1)...(19): siRNA sense strand
gaacuacaggcauccuuau

SEQ ID NO: 2158011 - RNA, 19 nt, Homo sapiens
  misc_RNA (1)...(19): siRNA sense strand
gaagcuugcccucugugua

SEQ ID NO: 2158012 - RNA, 19 nt, Homo sapiens
  misc_RNA (1)...(19): siRNA sense strand
ugagaaaggagccaaagaa

SEQ ID NO: 2158013 - RNA, 19 nt, Homo sapiens
  misc_RNA (1)...(19): siRNA sense strand
uaaugaagaggaaguugua

SEQ ID NO: 2158014 - RNA, 19 nt, Homo sapiens
  misc_RNA (1)...(19): siRNA sense strand
aaucagaguuugcacuaug

SEQ ID NO: 2158015 - RNA, 19 nt, Homo sapiens
  misc_RNA (1)...(19): siRNA sense strand
ggaagaauaacauuugucu

SEQ ID NO: 2158016 - RNA, 19 nt, Homo sapiens
  misc_RNA (1)...(19): siRNA sense strand
gagaaaggagccaaagaau

SEQ ID NO: 2158017 - RNA, 19 nt, Homo sapiens
  misc_RNA (1)...(19): siRNA sense strand
gaauguauaagguguaaag

SEQ ID NO: 2158018 - RNA, 19 nt, Homo sapiens
  misc_RNA (1)...(19): siRNA sense strand
ugaagaggaaguuguauau

SEQ ID NO: 2158019 - RNA, 19 nt, Homo sapiens
  misc_RNA (1)...(19): siRNA sense strand
ccaacaauauaacagacuu

SEQ ID NO: 2158020 - RNA, 19 nt, Homo sapiens
  misc_RNA (1)...(19): siRNA sense strand
aauagacgguucaucaaug

SEQ ID NO: 2158021 - RNA, 19 nt, Homo sapiens
  misc_RNA (1)...(19): siRNA sense strand
gccaaagaauguauaaggu

SEQ ID NO: 2158022 - RNA, 19 nt, Homo sapiens
  misc_RNA (1)...(19): siRNA sense strand
aauaaacagucacuacuag

SEQ ID NO: 2158023 - RNA, 19 nt, Homo sapiens
  misc_RNA (1)...(19): siRNA sense strand
ugagggagccugcaagaga

SEQ ID NO: 2158024 - RNA, 19 nt, Homo sapiens
  misc_RNA (1)...(19): siRNA sense strand
gagguguaauccuacuaaa

SEQ ID NO: 2158025 - RNA, 19 nt, Homo sapiens
  misc_RNA (1)...(19): siRNA sense strand
cuaaucagggucaagauaa

SEQ ID NO: 2158026 - RNA, 19 nt, Homo sapiens
  misc_RNA (1)...(19): siRNA sense strand
cacagaugcuauuagauug

SEQ ID NO: 2158027 - RNA, 19 nt, Homo sapiens
  misc_RNA (1)...(19): siRNA sense strand
gauaauguacaaguggaua

SEQ ID NO: 2158028 - RNA, 19 nt, Homo sapiens
  misc_RNA (1)...(19): siRNA sense strand
ccacuacauugagaaagaa

SEQ ID NO: 2158029 - RNA, 19 nt, Homo sapiens
  misc_RNA (1)...(19): siRNA sense strand
caugguggauauuaauaga

SEQ ID NO: 2158030 - RNA, 19 nt, Homo sapiens
  misc_RNA (1)...(19): siRNA sense strand
acaccuaccuguccauaca

SEQ ID NO: 2158031 - RNA, 19 nt, Homo sapiens
  misc_RNA (1)...(19): siRNA sense strand
uaaugacgacuaacucaaa

SEQ ID NO: 2158032 - RNA, 19 nt, Homo sapiens
  misc_RNA (1)...(19): siRNA sense strand
uaccagaugugcauuucuu

SEQ ID NO: 2158033 - RNA, 19 nt, Homo sapiens
  misc_RNA (1)...(19): siRNA sense strand
aaagacgacucucaauuuu

SEQ ID NO: 2158034 - RNA, 19 nt, Homo sapiens
  misc_RNA (1)...(19): siRNA sense strand
ccaaauaccagaugugcau

SEQ ID NO: 2158035 - RNA, 19 nt, Homo sapiens
  misc_RNA (1)...(19): siRNA sense strand
ucauaggagucacaguuga

SEQ ID NO: 2158036 - RNA, 19 nt, Homo sapiens
  misc_RNA (1)...(19): siRNA sense strand
gaguuugcacuaugacuuu

SEQ ID NO: 2158037 - RNA, 19 nt, Homo sapiens
  misc_RNA (1)...(19): siRNA sense strand
cuaggaagaauaacauuug

SEQ ID NO: 2158038 - RNA, 19 nt, Homo sapiens
  misc_RNA (1)...(19): siRNA sense strand
ccagauccauacuccaugu

SEQ ID NO: 2158039 - RNA, 19 nt, Homo sapiens
  misc_RNA (1)...(19): siRNA sense strand
ggagccaaagaauguauaa

SEQ ID NO: 2158040 - RNA, 19 nt, Homo sapiens
  misc_RNA (1)...(19): siRNA sense strand
agacaguugugcuaucaug

SEQ ID NO: 2158041 - RNA, 19 nt, Homo sapiens
  misc_RNA (1)...(19): siRNA sense strand
caacaucuuguauuaaugg

SEQ ID NO: 2158042 - RNA, 19 nt, Homo sapiens
  misc_RNA (1)...(19): siRNA sense strand
gagcagccuuaucaucaca

SEQ ID NO: 2158043 - RNA, 19 nt, Homo sapiens
  misc_RNA (1)...(19): siRNA sense strand
guaccaacaauauaacaga

SEQ ID NO: 2158044 - RNA, 19 nt, Homo sapiens
  misc_RNA (1)...(19): siRNA sense strand
guccauacaucaggucuau

SEQ ID NO: 2158045 - RNA, 19 nt, Homo sapiens
  misc_RNA (1)...(19): siRNA sense strand
uaaucagggucaagauaau

SEQ ID NO: 2158046 - RNA, 19 nt, Homo sapiens
  misc_RNA (1)...(19): siRNA sense strand
aacaauggaucaucuucuu

SEQ ID NO: 2158047 - RNA, 19 nt, Homo sapiens
  misc_RNA (1)...(19): siRNA sense strand
agaagauaaugaagaggaa

SEQ ID NO: 2158048 - RNA, 19 nt, Homo sapiens
  misc_RNA (1)...(19): siRNA sense strand
gaagaagauggcucucugu

SEQ ID NO: 2158049 - RNA, 19 nt, Homo sapiens
  misc_RNA (1)...(19): siRNA sense strand
ucaagccugugcugguaaa

SEQ ID NO: 2158050 - RNA, 19 nt, Homo sapiens
  misc_RNA (1)...(19): siRNA sense strand
gcaaagaggcuuguauucc

SEQ ID NO: 2158051 - RNA, 19 nt, Homo sapiens
  misc_RNA (1)...(19): siRNA sense strand
ggugaagauuuauucuauc

SEQ ID NO: 2158052 - RNA, 19 nt, Homo sapiens
  misc_RNA (1)...(19): siRNA sense strand
ggauuuaaaccaccaacau

SEQ ID NO: 2158053 - RNA, 19 nt, Homo sapiens
  misc_RNA (1)...(19): siRNA sense strand
gaucuuaaacuugcauauc

SEQ ID NO: 2158054 - RNA, 19 nt, Homo sapiens
  misc_RNA (1)...(19): siRNA sense strand
agaaggaaagacacagaua

SEQ ID NO: 2158055 - RNA, 19 nt, Homo sapiens
  misc_RNA (1)...(19): siRNA sense strand
gauggaaccaaagaaugua

SEQ ID NO: 2158056 - RNA, 19 nt, Homo sapiens
  misc_RNA (1)...(19): siRNA sense strand
gugaaacgguugacuuuug

SEQ ID NO: 2158057 - RNA, 19 nt, Homo sapiens
  misc_RNA (1)...(19): siRNA sense strand
cacuuggcuuugaauauaa

SEQ ID NO: 2158058 - RNA, 19 nt, Homo sapiens
  misc_RNA (1)...(19): siRNA sense strand
ccaggcacauucagcaaca

SEQ ID NO: 2158059 - RNA, 19 nt, Homo sapiens
  misc_RNA (1)...(19): siRNA sense strand
uaaacagucacuacuagga

SEQ ID NO: 2158060 - RNA, 19 nt, Homo sapiens
  misc_RNA (1)...(19): siRNA sense strand
guacggagcaugacuucca

SEQ ID NO: 2158061 - RNA, 19 nt, Homo sapiens
  misc_RNA (1)...(19): siRNA sense strand
ccaggccacuacauugaga

SEQ ID NO: 2158062 - RNA, 19 nt, Homo sapiens
  misc_RNA (1)...(19): siRNA sense strand
auacucuacuggagaacua

SEQ ID NO: 2158063 - RNA, 19 nt, Homo sapiens
  misc_RNA (1)...(19): siRNA sense strand
caggaaagcucaaacauuu

SEQ ID NO: 2158064 - RNA, 19 nt, Homo sapiens
  misc_RNA (1)...(19): siRNA sense strand
caacacaaguucaccauga

SEQ ID NO: 2158065 - RNA, 19 nt, Homo sapiens
  misc_RNA (1)...(19): siRNA sense strand
uaucaacccuacaaaguua

SEQ ID NO: 2158066 - RNA, 19 nt, Homo sapiens
  misc_RNA (1)...(19): siRNA sense strand
ggacugacaauacuacaua

SEQ ID NO: 2158067 - RNA, 19 nt, Homo sapiens
  misc_RNA (1)...(19): siRNA sense strand
gcaagaccauccagaguga

SEQ ID NO: 2158068 - RNA, 19 nt, Homo sapiens
  misc_RNA (1)...(19): siRNA sense strand
gcaauuacaucgugaaggu

SEQ ID NO: 2158069 - RNA, 19 nt, Homo sapiens
  misc_RNA (1)...(19): siRNA sense strand
ggaaagugauaucauuaug

SEQ ID NO: 2158070 - RNA, 19 nt, Homo sapiens
  misc_RNA (1)...(19): siRNA sense strand
ggagaagcuugcacagaaa

SEQ ID NO: 2158071 - RNA, 19 nt, Homo sapiens
  misc_RNA (1)...(19): siRNA sense strand
gagaggccauccuauuuga

SEQ ID NO: 2158072 - RNA, 19 nt, Homo sapiens
  misc_RNA (1)...(19): siRNA sense strand
gaaaguagcccagaagaca

SEQ ID NO: 2158073 - RNA, 19 nt, Homo sapiens
  misc_RNA (1)...(19): siRNA sense strand
aggaagacauugggaauua

SEQ ID NO: 2158074 - RNA, 19 nt, Homo sapiens
  misc_RNA (1)...(19): siRNA sense strand
gcaugggccucgcuuagaa

SEQ ID NO: 2158075 - RNA, 19 nt, Homo sapiens
  misc_RNA (1)...(19): siRNA sense strand
ucagugaaauggaaaguga

SEQ ID NO: 2158076 - RNA, 19 nt, Homo sapiens
  misc_RNA (1)...(19): siRNA sense strand
uuacugggcucugugaaua

SEQ ID NO: 2158077 - RNA, 19 nt, Homo sapiens
  misc_RNA (1)...(19): siRNA sense strand
gaaaaucauugucaccuuu

SEQ ID NO: 2158078 - RNA, 19 nt, Homo sapiens
  misc_RNA (1)...(19): siRNA sense strand
gcuuagaaguugcaucuga

SEQ ID NO: 2158079 - RNA, 19 nt, Homo sapiens
  misc_RNA (1)...(19): siRNA sense strand
gaggaacccugucagugaa

SEQ ID NO: 2158080 - RNA, 19 nt, Homo sapiens
  misc_RNA (1)...(19): siRNA sense strand
uaucaucacuuccguagga

SEQ ID NO: 2158081 - RNA, 19 nt, Homo sapiens
  misc_RNA (1)...(19): siRNA sense strand
uggagaagcuugcacagaa

SEQ ID NO: 2158082 - RNA, 19 nt, Homo sapiens
  misc_RNA (1)...(19): siRNA sense strand
cagaucauauggcuauuug

SEQ ID NO: 2158083 - RNA, 19 nt, Homo sapiens
  misc_RNA (1)...(19): siRNA sense strand
ggagaggccauccuauuug

SEQ ID NO: 2158084 - RNA, 19 nt, Homo sapiens
  misc_RNA (1)...(19): siRNA sense strand
gcaaguauaacuggaauau

SEQ ID NO: 2158085 - RNA, 19 nt, Homo sapiens
  misc_RNA (1)...(19): siRNA sense strand
cacaaugcccaaauacuua

SEQ ID NO: 2158086 - RNA, 19 nt, Homo sapiens
  misc_RNA (1)...(19): siRNA sense strand
gaaacagaauacaggaaag

SEQ ID NO: 2158087 - RNA, 19 nt, Homo sapiens
  misc_RNA (1)...(19): siRNA sense strand
cccaaugcaucucugcuua

SEQ ID NO: 2158088 - RNA, 19 nt, Homo sapiens
  misc_RNA (1)...(19): siRNA sense strand
gggaaguguuuacuguuga

SEQ ID NO: 2158089 - RNA, 19 nt, Homo sapiens
  misc_RNA (1)...(19): siRNA sense strand
agaagacaauggacuaugu

SEQ ID NO: 2158090 - RNA, 19 nt, Homo sapiens
  misc_RNA (1)...(19): siRNA sense strand
ucagggaaauggaacucua

SEQ ID NO: 2158091 - RNA, 19 nt, Homo sapiens
  misc_RNA (1)...(19): siRNA sense strand
ucacaguuaucaucacuuc

SEQ ID NO: 2158092 - RNA, 19 nt, Homo sapiens
  misc_RNA (1)...(19): siRNA sense strand
gaaauggaaagugauauca

SEQ ID NO: 2158093 - RNA, 19 nt, Homo sapiens
  misc_RNA (1)...(19): siRNA sense strand
ccacugcaguucccugaug

SEQ ID NO: 2158094 - RNA, 19 nt, Homo sapiens
  misc_RNA (1)...(19): siRNA sense strand
gaaguugcaucugagaaag

SEQ ID NO: 2158095 - RNA, 19 nt, Homo sapiens
  misc_RNA (1)...(19): siRNA sense strand
gggccucgcuuagaaguug

SEQ ID NO: 2158096 - RNA, 19 nt, Homo sapiens
  misc_RNA (1)...(19): siRNA sense strand
gcacucggcuagcuuacca

SEQ ID NO: 2158097 - RNA, 19 nt, Homo sapiens
  misc_RNA (1)...(19): siRNA sense strand
ggaaauggaacucuaucug

SEQ ID NO: 2158098 - RNA, 19 nt, Homo sapiens
  misc_RNA (1)...(19): siRNA sense strand
caucagacauccagaucau

SEQ ID NO: 2158099 - RNA, 19 nt, Homo sapiens
  misc_RNA (1)...(19): siRNA sense strand
ugaggaacccugucaguga

SEQ ID NO: 2158100 - RNA, 19 nt, Homo sapiens
  misc_RNA (1)...(19): siRNA sense strand
caagugaauucugauaaag

SEQ ID NO: 2158101 - RNA, 19 nt, Homo sapiens
  misc_RNA (1)...(19): siRNA sense strand
ccaugaagaugcucuggau

SEQ ID NO: 2158102 - RNA, 19 nt, Homo sapiens
  misc_RNA (1)...(19): siRNA sense strand
ggaauaccaacacaaguuc

SEQ ID NO: 2158103 - RNA, 19 nt, Homo sapiens
  misc_RNA (1)...(19): siRNA sense strand
acacaaugcccaaauacuu

SEQ ID NO: 2158104 - RNA, 19 nt, Homo sapiens
  misc_RNA (1)...(19): siRNA sense strand
gaggccauccuauuugauu

SEQ ID NO: 2158105 - RNA, 19 nt, Homo sapiens
  misc_RNA (1)...(19): siRNA sense strand
caacaccuacuccuggauu

SEQ ID NO: 2158106 - RNA, 19 nt, Homo sapiens
  misc_RNA (1)...(19): siRNA sense strand
gagaaaguagcccagaaga

SEQ ID NO: 2158107 - RNA, 19 nt, Homo sapiens
  misc_RNA (1)...(19): siRNA sense strand
agaaacagaauacaggaaa

SEQ ID NO: 2158108 - RNA, 19 nt, Homo sapiens
  misc_RNA (1)...(19): siRNA sense strand
gaucauauggcuauuugag

SEQ ID NO: 2158109 - RNA, 19 nt, Homo sapiens
  misc_RNA (1)...(19): siRNA sense strand
cuagaaggcaggccagaaa

SEQ ID NO: 2158110 - RNA, 19 nt, Homo sapiens
  misc_RNA (1)...(19): siRNA sense strand
cccacacaaugcccaaaua

SEQ ID NO: 2158111 - RNA, 19 nt, Homo sapiens
  misc_RNA (1)...(19): siRNA sense strand
uggagaggccauccuauuu

SEQ ID NO: 2158112 - RNA, 19 nt, Homo sapiens
  misc_RNA (1)...(19): siRNA sense strand
gaaagugauaucauuaugc

SEQ ID NO: 2158113 - RNA, 19 nt, Homo sapiens
  misc_RNA (1)...(19): siRNA sense strand
caaagccaguggugcagau

SEQ ID NO: 2158114 - RNA, 19 nt, Homo sapiens
  misc_RNA (1)...(19): siRNA sense strand
ggaagacauugggaauuac

SEQ ID NO: 2158115 - RNA, 19 nt, Homo sapiens
  misc_RNA (1)...(19): siRNA sense strand
ggaugacuucggaauauau

SEQ ID NO: 2158116 - RNA, 19 nt, Homo sapiens
  misc_RNA (1)...(19): siRNA sense strand
uggaugacuucggaauaua

SEQ ID NO: 2158117 - RNA, 19 nt, Homo sapiens
  misc_RNA (1)...(19): siRNA sense strand
aagaugcucuggaugacuu

SEQ ID NO: 2158118 - RNA, 19 nt, Homo sapiens
  misc_RNA (1)...(19): siRNA sense strand
ucagacauccagaucauau

SEQ ID NO: 2158119 - RNA, 19 nt, Homo sapiens
  misc_RNA (1)...(19): siRNA sense strand
uuauggaccuuauggacuu

SEQ ID NO: 2158120 - RNA, 19 nt, Homo sapiens
  misc_RNA (1)...(19): siRNA sense strand
gaagacauugggaauuaca

SEQ ID NO: 2158121 - RNA, 19 nt, Homo sapiens
  misc_RNA (1)...(19): siRNA sense strand
caaggaagacauugggaau

SEQ ID NO: 2158122 - RNA, 19 nt, Homo sapiens
  misc_RNA (1)...(19): siRNA sense strand
gaauacaggaaagcucaaa

SEQ ID NO: 2158123 - RNA, 19 nt, Homo sapiens
  misc_RNA (1)...(19): siRNA sense strand
ugucuucucuuccuaugga

SEQ ID NO: 2158124 - RNA, 19 nt, Homo sapiens
  misc_RNA (1)...(19): siRNA sense strand
gaaaggaaaaucauuguca

SEQ ID NO: 2158125 - RNA, 19 nt, Homo sapiens
  misc_RNA (1)...(19): siRNA sense strand
gaagacaauggacuaugug

SEQ ID NO: 2158126 - RNA, 19 nt, Homo sapiens
  misc_RNA (1)...(19): siRNA sense strand
caaugcaucucugcuuauc

SEQ ID NO: 2158127 - RNA, 19 nt, Homo sapiens
  misc_RNA (1)...(19): siRNA sense strand
acaggaaagcucaaacauu

SEQ ID NO: 2158128 - RNA, 19 nt, Homo sapiens
  misc_RNA (1)...(19): siRNA sense strand
ggucaacauucagggaaau

SEQ ID NO: 2158129 - RNA, 19 nt, Homo sapiens
  misc_RNA (1)...(19): siRNA sense strand
cuaccuacccguccacuau

SEQ ID NO: 2158130 - RNA, 19 nt, Homo sapiens
  misc_RNA (1)...(19): siRNA sense strand
ucggcuagcuuaccaaugg

SEQ ID NO: 2158131 - RNA, 19 nt, Homo sapiens
  misc_RNA (1)...(19): siRNA sense strand
agauacaagucacgguuga

SEQ ID NO: 2158132 - RNA, 19 nt, Homo sapiens
  misc_RNA (1)...(19): siRNA sense strand
gaaggugacagugccauca

SEQ ID NO: 2158133 - RNA, 19 nt, Homo sapiens
  misc_RNA (1)...(19): siRNA sense strand
cuggaugacuucggaauau

SEQ ID NO: 2158134 - RNA, 19 nt, Homo sapiens
  misc_RNA (1)...(19): siRNA sense strand
uagcaaguauaacuggaau

SEQ ID NO: 2158135 - RNA, 19 nt, Homo sapiens
  misc_RNA (1)...(19): siRNA sense strand
ggaaaaucauugucaccuu

SEQ ID NO: 2158136 - RNA, 19 nt, Homo sapiens
  misc_RNA (1)...(19): siRNA sense strand
agaaguugcaucugagaaa

SEQ ID NO: 2158137 - RNA, 19 nt, Homo sapiens
  misc_RNA (1)...(19): siRNA sense strand
gaauaagucugugguuccu

SEQ ID NO: 2158138 - RNA, 19 nt, Homo sapiens
  misc_RNA (1)...(19): siRNA sense strand
uugaugauccugucacaaa

SEQ ID NO: 2158139 - RNA, 19 nt, Homo sapiens
  misc_RNA (1)...(19): siRNA sense strand
gacugacaauacuacauau

SEQ ID NO: 2158140 - RNA, 19 nt, Homo sapiens
  misc_RNA (1)...(19): siRNA sense strand
uggaauaccaacacaaguu

SEQ ID NO: 2158141 - RNA, 19 nt, Homo sapiens
  misc_RNA (1)...(19): siRNA sense strand
gcaggcaagaugaaacuca

SEQ ID NO: 2158142 - RNA, 19 nt, Homo sapiens
  misc_RNA (1)...(19): siRNA sense strand
gacuaugugugcugugcuu

SEQ ID NO: 2158143 - RNA, 19 nt, Homo sapiens
  misc_RNA (1)...(19): siRNA sense strand
ggaacccugucagugaaau

SEQ ID NO: 2158144 - RNA, 19 nt, Homo sapiens
  misc_RNA (1)...(19): siRNA sense strand
gugcugugcuuacaacaac

SEQ ID NO: 2158145 - RNA, 19 nt, Homo sapiens
  misc_RNA (1)...(19): siRNA sense strand
uaggaggacugacaauacu

SEQ ID NO: 2158146 - RNA, 19 nt, Homo sapiens
  misc_RNA (1)...(19): siRNA sense strand
augcaucucugcuuaucaa

SEQ ID NO: 2158147 - RNA, 19 nt, Homo sapiens
  misc_RNA (1)...(19): siRNA sense strand
gcaggccagaaacagaaua

SEQ ID NO: 2158148 - RNA, 19 nt, Homo sapiens
  misc_RNA (1)...(19): siRNA sense strand
aaaaguaggggaaguguuu

SEQ ID NO: 2158149 - RNA, 19 nt, Homo sapiens
  misc_RNA (1)...(19): siRNA sense strand
gauaaagggcuaaaaguag

SEQ ID NO: 2158150 - RNA, 19 nt, Homo sapiens
  misc_RNA (1)...(19): siRNA sense strand
cagcuccaccuacuccuuu

SEQ ID NO: 2158151 - RNA, 19 nt, Homo sapiens
  misc_RNA (1)...(19): siRNA sense strand
caaaacaauacccuucaua

SEQ ID NO: 2158152 - RNA, 19 nt, Homo sapiens
  misc_RNA (1)...(19): siRNA sense strand
ggaaguguuuacuguugac

SEQ ID NO: 2158153 - RNA, 19 nt, Homo sapiens
  misc_RNA (1)...(19): siRNA sense strand
acagcugccuggugaggaa

SEQ ID NO: 2158154 - RNA, 19 nt, Homo sapiens
  misc_RNA (1)...(19): siRNA sense strand
ccagaucauauggcuauuu

SEQ ID NO: 2158155 - RNA, 19 nt, Homo sapiens
  misc_RNA (1)...(19): siRNA sense strand
aauaucaacccuacaaagu

SEQ ID NO: 2158156 - RNA, 19 nt, Homo sapiens
  misc_RNA (1)...(19): siRNA sense strand
ggggaaguguuuacuguug

SEQ ID NO: 2158157 - RNA, 19 nt, Homo sapiens
  misc_RNA (1)...(19): siRNA sense strand
ugaaauggaaagugauauc

SEQ ID NO: 2158158 - RNA, 19 nt, Homo sapiens
  misc_RNA (1)...(19): siRNA sense strand
ugacuucggaauauaugaa

SEQ ID NO: 2158159 - RNA, 19 nt, Homo sapiens
  misc_RNA (1)...(19): siRNA sense strand
ucaccuuuagcaaguauaa

SEQ ID NO: 2158160 - RNA, 19 nt, Homo sapiens
  misc_RNA (1)...(19): siRNA sense strand
ggauuaggaggacugacaa

SEQ ID NO: 2158161 - RNA, 19 nt, Homo sapiens
  misc_RNA (1)...(19): siRNA sense strand
aacaccuacuccuggauua

SEQ ID NO: 2158162 - RNA, 19 nt, Homo sapiens
  misc_RNA (1)...(19): siRNA sense strand
gauaucauuaugcccauca

SEQ ID NO: 2158163 - RNA, 19 nt, Homo sapiens
  misc_RNA (1)...(19): siRNA sense strand
caggaaagcucaaacauuu

SEQ ID NO: 2158164 - RNA, 19 nt, Homo sapiens
  misc_RNA (1)...(19): siRNA sense strand
caacacaaguucaccauga

SEQ ID NO: 2158165 - RNA, 19 nt, Homo sapiens
  misc_RNA (1)...(19): siRNA sense strand
uaucaacccuacaaaguua

SEQ ID NO: 2158166 - RNA, 19 nt, Homo sapiens
  misc_RNA (1)...(19): siRNA sense strand
ggacugacaauacuacaua

SEQ ID NO: 2158167 - RNA, 19 nt, Homo sapiens
  misc_RNA (1)...(19): siRNA sense strand
gcaagaccauccagaguga

SEQ ID NO: 2158168 - RNA, 19 nt, Homo sapiens
  misc_RNA (1)...(19): siRNA sense strand
gcaauuacaucgugaaggu

SEQ ID NO: 2158169 - RNA, 19 nt, Homo sapiens
  misc_RNA (1)...(19): siRNA sense strand
ggaaagugauaucauuaug

SEQ ID NO: 2158170 - RNA, 19 nt, Homo sapiens
  misc_RNA (1)...(19): siRNA sense strand
ggagaagcuugcacagaaa

SEQ ID NO: 2158171 - RNA, 19 nt, Homo sapiens
  misc_RNA (1)...(19): siRNA sense strand
gagaggccauccuauuuga

SEQ ID NO: 2158172 - RNA, 19 nt, Homo sapiens
  misc_RNA (1)...(19): siRNA sense strand
gaaaguagcccagaagaca

SEQ ID NO: 2158173 - RNA, 19 nt, Homo sapiens
  misc_RNA (1)...(19): siRNA sense strand
aggaagacauugggaauua

SEQ ID NO: 2158174 - RNA, 19 nt, Homo sapiens
  misc_RNA (1)...(19): siRNA sense strand
gcaugggccucgcuuagaa

SEQ ID NO: 2158175 - RNA, 19 nt, Homo sapiens
  misc_RNA (1)...(19): siRNA sense strand
ucagugaaauggaaaguga

SEQ ID NO: 2158176 - RNA, 19 nt, Homo sapiens
  misc_RNA (1)...(19): siRNA sense strand
uuacugggcucugugaaua

SEQ ID NO: 2158177 - RNA, 19 nt, Homo sapiens
  misc_RNA (1)...(19): siRNA sense strand
gaaaaucauugucaccuuu

SEQ ID NO: 2158178 - RNA, 19 nt, Homo sapiens
  misc_RNA (1)...(19): siRNA sense strand
gcuuagaaguugcaucuga

SEQ ID NO: 2158179 - RNA, 19 nt, Homo sapiens
  misc_RNA (1)...(19): siRNA sense strand
gaggaacccugucagugaa

SEQ ID NO: 2158180 - RNA, 19 nt, Homo sapiens
  misc_RNA (1)...(19): siRNA sense strand
uaucaucacuuccguagga

SEQ ID NO: 2158181 - RNA, 19 nt, Homo sapiens
  misc_RNA (1)...(19): siRNA sense strand
uggagaagcuugcacagaa

SEQ ID NO: 2158182 - RNA, 19 nt, Homo sapiens
  misc_RNA (1)...(19): siRNA sense strand
cagaucauauggcuauuug

SEQ ID NO: 2158183 - RNA, 19 nt, Homo sapiens
  misc_RNA (1)...(19): siRNA sense strand
ggagaggccauccuauuug

SEQ ID NO: 2158184 - RNA, 19 nt, Homo sapiens
  misc_RNA (1)...(19): siRNA sense strand
gcaaguauaacuggaauau

SEQ ID NO: 2158185 - RNA, 19 nt, Homo sapiens
  misc_RNA (1)...(19): siRNA sense strand
cacaaugcccaaauacuua

SEQ ID NO: 2158186 - RNA, 19 nt, Homo sapiens
  misc_RNA (1)...(19): siRNA sense strand
gaaacagaauacaggaaag

SEQ ID NO: 2158187 - RNA, 19 nt, Homo sapiens
  misc_RNA (1)...(19): siRNA sense strand
cccaaugcaucucugcuua

SEQ ID NO: 2158188 - RNA, 19 nt, Homo sapiens
  misc_RNA (1)...(19): siRNA sense strand
gggaaguguuuacuguuga

SEQ ID NO: 2158189 - RNA, 19 nt, Homo sapiens
  misc_RNA (1)...(19): siRNA sense strand
agaagacaauggacuaugu

SEQ ID NO: 2158190 - RNA, 19 nt, Homo sapiens
  misc_RNA (1)...(19): siRNA sense strand
ucagggaaauggaacucua

SEQ ID NO: 2158191 - RNA, 19 nt, Homo sapiens
  misc_RNA (1)...(19): siRNA sense strand
ucacaguuaucaucacuuc

SEQ ID NO: 2158192 - RNA, 19 nt, Homo sapiens
  misc_RNA (1)...(19): siRNA sense strand
gaaauggaaagugauauca

SEQ ID NO: 2158193 - RNA, 19 nt, Homo sapiens
  misc_RNA (1)...(19): siRNA sense strand
ccacugcaguucccugaug

SEQ ID NO: 2158194 - RNA, 19 nt, Homo sapiens
  misc_RNA (1)...(19): siRNA sense strand
gaaguugcaucugagaaag

SEQ ID NO: 2158195 - RNA, 19 nt, Homo sapiens
  misc_RNA (1)...(19): siRNA sense strand
gggccucgcuuagaaguug

SEQ ID NO: 2158196 - RNA, 19 nt, Homo sapiens
  misc_RNA (1)...(19): siRNA sense strand
gcacucggcuagcuuacca

SEQ ID NO: 2158197 - RNA, 19 nt, Homo sapiens
  misc_RNA (1)...(19): siRNA sense strand
ggaaauggaacucuaucug

SEQ ID NO: 2158198 - RNA, 19 nt, Homo sapiens
  misc_RNA (1)...(19): siRNA sense strand
caucagacauccagaucau

SEQ ID NO: 2158199 - RNA, 19 nt, Homo sapiens
  misc_RNA (1)...(19): siRNA sense strand
ugaggaacccugucaguga

SEQ ID NO: 2158200 - RNA, 19 nt, Homo sapiens
  misc_RNA (1)...(19): siRNA sense strand
caagugaauucugauaaag

SEQ ID NO: 2158201 - RNA, 19 nt, Homo sapiens
  misc_RNA (1)...(19): siRNA sense strand
ccaugaagaugcucuggau

SEQ ID NO: 2158202 - RNA, 19 nt, Homo sapiens
  misc_RNA (1)...(19): siRNA sense strand
ggaauaccaacacaaguuc

SEQ ID NO: 2158203 - RNA, 19 nt, Homo sapiens
  misc_RNA (1)...(19): siRNA sense strand
acacaaugcccaaauacuu

SEQ ID NO: 2158204 - RNA, 19 nt, Homo sapiens
  misc_RNA (1)...(19): siRNA sense strand
gaggccauccuauuugauu

SEQ ID NO: 2158205 - RNA, 19 nt, Homo sapiens
  misc_RNA (1)...(19): siRNA sense strand
caacaccuacuccuggauu

SEQ ID NO: 2158206 - RNA, 19 nt, Homo sapiens
  misc_RNA (1)...(19): siRNA sense strand
gagaaaguagcccagaaga

SEQ ID NO: 2158207 - RNA, 19 nt, Homo sapiens
  misc_RNA (1)...(19): siRNA sense strand
agaaacagaauacaggaaa

SEQ ID NO: 2158208 - RNA, 19 nt, Homo sapiens
  misc_RNA (1)...(19): siRNA sense strand
gaucauauggcuauuugag

SEQ ID NO: 2158209 - RNA, 19 nt, Homo sapiens
  misc_RNA (1)...(19): siRNA sense strand
cuagaaggcaggccagaaa

SEQ ID NO: 2158210 - RNA, 19 nt, Homo sapiens
  misc_RNA (1)...(19): siRNA sense strand
cccacacaaugcccaaaua

SEQ ID NO: 2158211 - RNA, 19 nt, Homo sapiens
  misc_RNA (1)...(19): siRNA sense strand
uggagaggccauccuauuu

SEQ ID NO: 2158212 - RNA, 19 nt, Homo sapiens
  misc_RNA (1)...(19): siRNA sense strand
gaaagugauaucauuaugc

SEQ ID NO: 2158213 - RNA, 19 nt, Homo sapiens
  misc_RNA (1)...(19): siRNA sense strand
caaagccaguggugcagau

SEQ ID NO: 2158214 - RNA, 19 nt, Homo sapiens
  misc_RNA (1)...(19): siRNA sense strand
ggaagacauugggaauuac

SEQ ID NO: 2158215 - RNA, 19 nt, Homo sapiens
  misc_RNA (1)...(19): siRNA sense strand
ggaugacuucggaauauau

SEQ ID NO: 2158216 - RNA, 19 nt, Homo sapiens
  misc_RNA (1)...(19): siRNA sense strand
uggaugacuucggaauaua

SEQ ID NO: 2158217 - RNA, 19 nt, Homo sapiens
  misc_RNA (1)...(19): siRNA sense strand
aagaugcucuggaugacuu

SEQ ID NO: 2158218 - RNA, 19 nt, Homo sapiens
  misc_RNA (1)...(19): siRNA sense strand
ucagacauccagaucauau

SEQ ID NO: 2158219 - RNA, 19 nt, Homo sapiens
  misc_RNA (1)...(19): siRNA sense strand
uuauggaccuuauggacuu

SEQ ID NO: 2158220 - RNA, 19 nt, Homo sapiens
  misc_RNA (1)...(19): siRNA sense strand
gaagacauugggaauuaca

SEQ ID NO: 2158221 - RNA, 19 nt, Homo sapiens
  misc_RNA (1)...(19): siRNA sense strand
caaggaagacauugggaau

SEQ ID NO: 2158222 - RNA, 19 nt, Homo sapiens
  misc_RNA (1)...(19): siRNA sense strand
gaauacaggaaagcucaaa

SEQ ID NO: 2158223 - RNA, 19 nt, Homo sapiens
  misc_RNA (1)...(19): siRNA sense strand
ugucuucucuuccuaugga

SEQ ID NO: 2158224 - RNA, 19 nt, Homo sapiens
  misc_RNA (1)...(19): siRNA sense strand
gaaaggaaaaucauuguca

SEQ ID NO: 2158225 - RNA, 19 nt, Homo sapiens
  misc_RNA (1)...(19): siRNA sense strand
gaagacaauggacuaugug

SEQ ID NO: 2158226 - RNA, 19 nt, Homo sapiens
  misc_RNA (1)...(19): siRNA sense strand
caaugcaucucugcuuauc

SEQ ID NO: 2158227 - RNA, 19 nt, Homo sapiens
  misc_RNA (1)...(19): siRNA sense strand
acaggaaagcucaaacauu

SEQ ID NO: 2158228 - RNA, 19 nt, Homo sapiens
  misc_RNA (1)...(19): siRNA sense strand
ggucaacauucagggaaau

SEQ ID NO: 2158229 - RNA, 19 nt, Homo sapiens
  misc_RNA (1)...(19): siRNA sense strand
cuaccuacccguccacuau

SEQ ID NO: 2158230 - RNA, 19 nt, Homo sapiens
  misc_RNA (1)...(19): siRNA sense strand
ucggcuagcuuaccaaugg

SEQ ID NO: 2158231 - RNA, 19 nt, Homo sapiens
  misc_RNA (1)...(19): siRNA sense strand
agauacaagucacgguuga

SEQ ID NO: 2158232 - RNA, 19 nt, Homo sapiens
  misc_RNA (1)...(19): siRNA sense strand
gaaggugacagugccauca

SEQ ID NO: 2158233 - RNA, 19 nt, Homo sapiens
  misc_RNA (1)...(19): siRNA sense strand
cuggaugacuucggaauau

SEQ ID NO: 2158234 - RNA, 19 nt, Homo sapiens
  misc_RNA (1)...(19): siRNA sense strand
uagcaaguauaacuggaau

SEQ ID NO: 2158235 - RNA, 19 nt, Homo sapiens
  misc_RNA (1)...(19): siRNA sense strand
ggaaaaucauugucaccuu

SEQ ID NO: 2158236 - RNA, 19 nt, Homo sapiens
  misc_RNA (1)...(19): siRNA sense strand
agaaguugcaucugagaaa

SEQ ID NO: 2158237 - RNA, 19 nt, Homo sapiens
  misc_RNA (1)...(19): siRNA sense strand
gaauaagucugugguuccu

SEQ ID NO: 2158238 - RNA, 19 nt, Homo sapiens
  misc_RNA (1)...(19): siRNA sense strand
uugaugauccugucacaaa

SEQ ID NO: 2158239 - RNA, 19 nt, Homo sapiens
  misc_RNA (1)...(19): siRNA sense strand
gacugacaauacuacauau

SEQ ID NO: 2158240 - RNA, 19 nt, Homo sapiens
  misc_RNA (1)...(19): siRNA sense strand
uggaauaccaacacaaguu

SEQ ID NO: 2158241 - RNA, 19 nt, Homo sapiens
  misc_RNA (1)...(19): siRNA sense strand
gcaggcaagaugaaacuca

SEQ ID NO: 2158242 - RNA, 19 nt, Homo sapiens
  misc_RNA (1)...(19): siRNA sense strand
gacuaugugugcugugcuu

SEQ ID NO: 2158243 - RNA, 19 nt, Homo sapiens
  misc_RNA (1)...(19): siRNA sense strand
ggaacccugucagugaaau

SEQ ID NO: 2158244 - RNA, 19 nt, Homo sapiens
  misc_RNA (1)...(19): siRNA sense strand
gugcugugcuuacaacaac

SEQ ID NO: 2158245 - RNA, 19 nt, Homo sapiens
  misc_RNA (1)...(19): siRNA sense strand
uaggaggacugacaauacu

SEQ ID NO: 2158246 - RNA, 19 nt, Homo sapiens
  misc_RNA (1)...(19): siRNA sense strand
augcaucucugcuuaucaa

SEQ ID NO: 2158247 - RNA, 19 nt, Homo sapiens
  misc_RNA (1)...(19): siRNA sense strand
gcaggccagaaacagaaua

SEQ ID NO: 2158248 - RNA, 19 nt, Homo sapiens
  misc_RNA (1)...(19): siRNA sense strand
aaaaguaggggaaguguuu

SEQ ID NO: 2158249 - RNA, 19 nt, Homo sapiens
  misc_RNA (1)...(19): siRNA sense strand
gauaaagggcuaaaaguag

SEQ ID NO: 2158250 - RNA, 19 nt, Homo sapiens
  misc_RNA (1)...(19): siRNA sense strand
cagcuccaccuacuccuuu

SEQ ID NO: 2158251 - RNA, 19 nt, Homo sapiens
  misc_RNA (1)...(19): siRNA sense strand
caaaacaauacccuucaua

SEQ ID NO: 2158252 - RNA, 19 nt, Homo sapiens
  misc_RNA (1)...(19): siRNA sense strand
ggaaguguuuacuguugac

SEQ ID NO: 2158253 - RNA, 19 nt, Homo sapiens
  misc_RNA (1)...(19): siRNA sense strand
acagcugccuggugaggaa

SEQ ID NO: 2158254 - RNA, 19 nt, Homo sapiens
  misc_RNA (1)...(19): siRNA sense strand
ccagaucauauggcuauuu

SEQ ID NO: 2158255 - RNA, 19 nt, Homo sapiens
  misc_RNA (1)...(19): siRNA sense strand
aauaucaacccuacaaagu

SEQ ID NO: 2158256 - RNA, 19 nt, Homo sapiens
  misc_RNA (1)...(19): siRNA sense strand
ggggaaguguuuacuguug

SEQ ID NO: 2158257 - RNA, 19 nt, Homo sapiens
  misc_RNA (1)...(19): siRNA sense strand
ugaaauggaaagugauauc

SEQ ID NO: 2158258 - RNA, 19 nt, Homo sapiens
  misc_RNA (1)...(19): siRNA sense strand
ugacuucggaauauaugaa

SEQ ID NO: 2158259 - RNA, 19 nt, Homo sapiens
  misc_RNA (1)...(19): siRNA sense strand
ucaccuuuagcaaguauaa

SEQ ID NO: 2158260 - RNA, 19 nt, Homo sapiens
  misc_RNA (1)...(19): siRNA sense strand
ggauuaggaggacugacaa

SEQ ID NO: 2158261 - RNA, 19 nt, Homo sapiens
  misc_RNA (1)...(19): siRNA sense strand
aacaccuacuccuggauua

SEQ ID NO: 2158262 - RNA, 19 nt, Homo sapiens
  misc_RNA (1)...(19): siRNA sense strand
gauaucauuaugcccauca

SEQ ID NO: 2158263 - RNA, 19 nt, Homo sapiens
  misc_RNA (1)...(19): siRNA sense strand
caggaaagcucaaacauuu

SEQ ID NO: 2158264 - RNA, 19 nt, Homo sapiens
  misc_RNA (1)...(19): siRNA sense strand
caacacaaguucaccauga

SEQ ID NO: 2158265 - RNA, 19 nt, Homo sapiens
  misc_RNA (1)...(19): siRNA sense strand
uaucaacccuacaaaguua

SEQ ID NO: 2158266 - RNA, 19 nt, Homo sapiens
  misc_RNA (1)...(19): siRNA sense strand
ggacugacaauacuacaua

SEQ ID NO: 2158267 - RNA, 19 nt, Homo sapiens
  misc_RNA (1)...(19): siRNA sense strand
gcaagaccauccagaguga

SEQ ID NO: 2158268 - RNA, 19 nt, Homo sapiens
  misc_RNA (1)...(19): siRNA sense strand
gcaauuacaucgugaaggu

SEQ ID NO: 2158269 - RNA, 19 nt, Homo sapiens
  misc_RNA (1)...(19): siRNA sense strand
ggaaagugauaucauuaug

SEQ ID NO: 2158270 - RNA, 19 nt, Homo sapiens
  misc_RNA (1)...(19): siRNA sense strand
ggagaagcuugcacagaaa

SEQ ID NO: 2158271 - RNA, 19 nt, Homo sapiens
  misc_RNA (1)...(19): siRNA sense strand
gagaggccauccuauuuga

SEQ ID NO: 2158272 - RNA, 19 nt, Homo sapiens
  misc_RNA (1)...(19): siRNA sense strand
gaaaguagcccagaagaca

SEQ ID NO: 2158273 - RNA, 19 nt, Homo sapiens
  misc_RNA (1)...(19): siRNA sense strand
aggaagacauugggaauua

SEQ ID NO: 2158274 - RNA, 19 nt, Homo sapiens
  misc_RNA (1)...(19): siRNA sense strand
gcaugggccucgcuuagaa

SEQ ID NO: 2158275 - RNA, 19 nt, Homo sapiens
  misc_RNA (1)...(19): siRNA sense strand
ucagugaaauggaaaguga

SEQ ID NO: 2158276 - RNA, 19 nt, Homo sapiens
  misc_RNA (1)...(19): siRNA sense strand
uuacugggcucugugaaua

SEQ ID NO: 2158277 - RNA, 19 nt, Homo sapiens
  misc_RNA (1)...(19): siRNA sense strand
gaaaaucauugucaccuuu

SEQ ID NO: 2158278 - RNA, 19 nt, Homo sapiens
  misc_RNA (1)...(19): siRNA sense strand
gcuuagaaguugcaucuga

SEQ ID NO: 2158279 - RNA, 19 nt, Homo sapiens
  misc_RNA (1)...(19): siRNA sense strand
gaggaacccugucagugaa

SEQ ID NO: 2158280 - RNA, 19 nt, Homo sapiens
  misc_RNA (1)...(19): siRNA sense strand
uaucaucacuuccguagga

SEQ ID NO: 2158281 - RNA, 19 nt, Homo sapiens
  misc_RNA (1)...(19): siRNA sense strand
uggagaagcuugcacagaa

SEQ ID NO: 2158282 - RNA, 19 nt, Homo sapiens
  misc_RNA (1)...(19): siRNA sense strand
cagaucauauggcuauuug

SEQ ID NO: 2158283 - RNA, 19 nt, Homo sapiens
  misc_RNA (1)...(19): siRNA sense strand
ggagaggccauccuauuug

SEQ ID NO: 2158284 - RNA, 19 nt, Homo sapiens
  misc_RNA (1)...(19): siRNA sense strand
gcaaguauaacuggaauau

SEQ ID NO: 2158285 - RNA, 19 nt, Homo sapiens
  misc_RNA (1)...(19): siRNA sense strand
cacaaugcccaaauacuua

SEQ ID NO: 2158286 - RNA, 19 nt, Homo sapiens
  misc_RNA (1)...(19): siRNA sense strand
gaaacagaauacaggaaag

SEQ ID NO: 2158287 - RNA, 19 nt, Homo sapiens
  misc_RNA (1)...(19): siRNA sense strand
cccaaugcaucucugcuua

SEQ ID NO: 2158288 - RNA, 19 nt, Homo sapiens
  misc_RNA (1)...(19): siRNA sense strand
gggaaguguuuacuguuga

SEQ ID NO: 2158289 - RNA, 19 nt, Homo sapiens
  misc_RNA (1)...(19): siRNA sense strand
agaagacaauggacuaugu

SEQ ID NO: 2158290 - RNA, 19 nt, Homo sapiens
  misc_RNA (1)...(19): siRNA sense strand
ucagggaaauggaacucua

SEQ ID NO: 2158291 - RNA, 19 nt, Homo sapiens
  misc_RNA (1)...(19): siRNA sense strand
ucacaguuaucaucacuuc

SEQ ID NO: 2158292 - RNA, 19 nt, Homo sapiens
  misc_RNA (1)...(19): siRNA sense strand
gaaauggaaagugauauca

SEQ ID NO: 2158293 - RNA, 19 nt, Homo sapiens
  misc_RNA (1)...(19): siRNA sense strand
ccacugcaguucccugaug

SEQ ID NO: 2158294 - RNA, 19 nt, Homo sapiens
  misc_RNA (1)...(19): siRNA sense strand
gaaguugcaucugagaaag

SEQ ID NO: 2158295 - RNA, 19 nt, Homo sapiens
  misc_RNA (1)...(19): siRNA sense strand
gggccucgcuuagaaguug

SEQ ID NO: 2158296 - RNA, 19 nt, Homo sapiens
  misc_RNA (1)...(19): siRNA sense strand
gcacucggcuagcuuacca

SEQ ID NO: 2158297 - RNA, 19 nt, Homo sapiens
  misc_RNA (1)...(19): siRNA sense strand
ggaaauggaacucuaucug

SEQ ID NO: 2158298 - RNA, 19 nt, Homo sapiens
  misc_RNA (1)...(19): siRNA sense strand
caucagacauccagaucau

SEQ ID NO: 2158299 - RNA, 19 nt, Homo sapiens
  misc_RNA (1)...(19): siRNA sense strand
ugaggaacccugucaguga

SEQ ID NO: 2158300 - RNA, 19 nt, Homo sapiens
  misc_RNA (1)...(19): siRNA sense strand
caagugaauucugauaaag

SEQ ID NO: 2158301 - RNA, 19 nt, Homo sapiens
  misc_RNA (1)...(19): siRNA sense strand
ccaugaagaugcucuggau

SEQ ID NO: 2158302 - RNA, 19 nt, Homo sapiens
  misc_RNA (1)...(19): siRNA sense strand
ggaauaccaacacaaguuc

SEQ ID NO: 2158303 - RNA, 19 nt, Homo sapiens
  misc_RNA (1)...(19): siRNA sense strand
acacaaugcccaaauacuu

SEQ ID NO: 2158304 - RNA, 19 nt, Homo sapiens
  misc_RNA (1)...(19): siRNA sense strand
gaggccauccuauuugauu

SEQ ID NO: 2158305 - RNA, 19 nt, Homo sapiens
  misc_RNA (1)...(19): siRNA sense strand
caacaccuacuccuggauu

SEQ ID NO: 2158306 - RNA, 19 nt, Homo sapiens
  misc_RNA (1)...(19): siRNA sense strand
gagaaaguagcccagaaga

SEQ ID NO: 2158307 - RNA, 19 nt, Homo sapiens
  misc_RNA (1)...(19): siRNA sense strand
agaaacagaauacaggaaa

SEQ ID NO: 2158308 - RNA, 19 nt, Homo sapiens
  misc_RNA (1)...(19): siRNA sense strand
gaucauauggcuauuugag

SEQ ID NO: 2158309 - RNA, 19 nt, Homo sapiens
  misc_RNA (1)...(19): siRNA sense strand
cuagaaggcaggccagaaa

SEQ ID NO: 2158310 - RNA, 19 nt, Homo sapiens
  misc_RNA (1)...(19): siRNA sense strand
cccacacaaugcccaaaua

SEQ ID NO: 2158311 - RNA, 19 nt, Homo sapiens
  misc_RNA (1)...(19): siRNA sense strand
uggagaggccauccuauuu

SEQ ID NO: 2158312 - RNA, 19 nt, Homo sapiens
  misc_RNA (1)...(19): siRNA sense strand
gaaagugauaucauuaugc

SEQ ID NO: 2158313 - RNA, 19 nt, Homo sapiens
  misc_RNA (1)...(19): siRNA sense strand
caaagccaguggugcagau

SEQ ID NO: 2158314 - RNA, 19 nt, Homo sapiens
  misc_RNA (1)...(19): siRNA sense strand
ggaagacauugggaauuac

SEQ ID NO: 2158315 - RNA, 19 nt, Homo sapiens
  misc_RNA (1)...(19): siRNA sense strand
ggaugacuucggaauauau

SEQ ID NO: 2158316 - RNA, 19 nt, Homo sapiens
  misc_RNA (1)...(19): siRNA sense strand
uggaugacuucggaauaua

SEQ ID NO: 2158317 - RNA, 19 nt, Homo sapiens
  misc_RNA (1)...(19): siRNA sense strand
aagaugcucuggaugacuu

SEQ ID NO: 2158318 - RNA, 19 nt, Homo sapiens
  misc_RNA (1)...(19): siRNA sense strand
ucagacauccagaucauau

SEQ ID NO: 2158319 - RNA, 19 nt, Homo sapiens
  misc_RNA (1)...(19): siRNA sense strand
uuauggaccuuauggacuu

SEQ ID NO: 2158320 - RNA, 19 nt, Homo sapiens
  misc_RNA (1)...(19): siRNA sense strand
gaagacauugggaauuaca

SEQ ID NO: 2158321 - RNA, 19 nt, Homo sapiens
  misc_RNA (1)...(19): siRNA sense strand
caaggaagacauugggaau

SEQ ID NO: 2158322 - RNA, 19 nt, Homo sapiens
  misc_RNA (1)...(19): siRNA sense strand
gaauacaggaaagcucaaa

SEQ ID NO: 2158323 - RNA, 19 nt, Homo sapiens
  misc_RNA (1)...(19): siRNA sense strand
ugucuucucuuccuaugga

SEQ ID NO: 2158324 - RNA, 19 nt, Homo sapiens
  misc_RNA (1)...(19): siRNA sense strand
gaaaggaaaaucauuguca

SEQ ID NO: 2158325 - RNA, 19 nt, Homo sapiens
  misc_RNA (1)...(19): siRNA sense strand
gaagacaauggacuaugug

SEQ ID NO: 2158326 - RNA, 19 nt, Homo sapiens
  misc_RNA (1)...(19): siRNA sense strand
caaugcaucucugcuuauc

SEQ ID NO: 2158327 - RNA, 19 nt, Homo sapiens
  misc_RNA (1)...(19): siRNA sense strand
acaggaaagcucaaacauu

SEQ ID NO: 2158328 - RNA, 19 nt, Homo sapiens
  misc_RNA (1)...(19): siRNA sense strand
ggucaacauucagggaaau

SEQ ID NO: 2158329 - RNA, 19 nt, Homo sapiens
  misc_RNA (1)...(19): siRNA sense strand
cuaccuacccguccacuau

SEQ ID NO: 2158330 - RNA, 19 nt, Homo sapiens
  misc_RNA (1)...(19): siRNA sense strand
ucggcuagcuuaccaaugg

SEQ ID NO: 2158331 - RNA, 19 nt, Homo sapiens
  misc_RNA (1)...(19): siRNA sense strand
agauacaagucacgguuga

SEQ ID NO: 2158332 - RNA, 19 nt, Homo sapiens
  misc_RNA (1)...(19): siRNA sense strand
gaaggugacagugccauca

SEQ ID NO: 2158333 - RNA, 19 nt, Homo sapiens
  misc_RNA (1)...(19): siRNA sense strand
cuggaugacuucggaauau

SEQ ID NO: 2158334 - RNA, 19 nt, Homo sapiens
  misc_RNA (1)...(19): siRNA sense strand
uagcaaguauaacuggaau

SEQ ID NO: 2158335 - RNA, 19 nt, Homo sapiens
  misc_RNA (1)...(19): siRNA sense strand
ggaaaaucauugucaccuu

SEQ ID NO: 2158336 - RNA, 19 nt, Homo sapiens
  misc_RNA (1)...(19): siRNA sense strand
agaaguugcaucugagaaa

SEQ ID NO: 2158337 - RNA, 19 nt, Homo sapiens
  misc_RNA (1)...(19): siRNA sense strand
gaauaagucugugguuccu

SEQ ID NO: 2158338 - RNA, 19 nt, Homo sapiens
  misc_RNA (1)...(19): siRNA sense strand
uugaugauccugucacaaa

SEQ ID NO: 2158339 - RNA, 19 nt, Homo sapiens
  misc_RNA (1)...(19): siRNA sense strand
gacugacaauacuacauau

SEQ ID NO: 2158340 - RNA, 19 nt, Homo sapiens
  misc_RNA (1)...(19): siRNA sense strand
uggaauaccaacacaaguu

SEQ ID NO: 2158341 - RNA, 19 nt, Homo sapiens
  misc_RNA (1)...(19): siRNA sense strand
gcaggcaagaugaaacuca

SEQ ID NO: 2158342 - RNA, 19 nt, Homo sapiens
  misc_RNA (1)...(19): siRNA sense strand
gacuaugugugcugugcuu

SEQ ID NO: 2158343 - RNA, 19 nt, Homo sapiens
  misc_RNA (1)...(19): siRNA sense strand
ggaacccugucagugaaau

SEQ ID NO: 2158344 - RNA, 19 nt, Homo sapiens
  misc_RNA (1)...(19): siRNA sense strand
gugcugugcuuacaacaac

SEQ ID NO: 2158345 - RNA, 19 nt, Homo sapiens
  misc_RNA (1)...(19): siRNA sense strand
uaggaggacugacaauacu

SEQ ID NO: 2158346 - RNA, 19 nt, Homo sapiens
  misc_RNA (1)...(19): siRNA sense strand
augcaucucugcuuaucaa

SEQ ID NO: 2158347 - RNA, 19 nt, Homo sapiens
  misc_RNA (1)...(19): siRNA sense strand
gcaggccagaaacagaaua

SEQ ID NO: 2158348 - RNA, 19 nt, Homo sapiens
  misc_RNA (1)...(19): siRNA sense strand
aaaaguaggggaaguguuu

SEQ ID NO: 2158349 - RNA, 19 nt, Homo sapiens
  misc_RNA (1)...(19): siRNA sense strand
gauaaagggcuaaaaguag

SEQ ID NO: 2158350 - RNA, 19 nt, Homo sapiens
  misc_RNA (1)...(19): siRNA sense strand
cagcuccaccuacuccuuu

SEQ ID NO: 2158351 - RNA, 19 nt, Homo sapiens
  misc_RNA (1)...(19): siRNA sense strand
caaaacaauacccuucaua

SEQ ID NO: 2158352 - RNA, 19 nt, Homo sapiens
  misc_RNA (1)...(19): siRNA sense strand
ggaaguguuuacuguugac

SEQ ID NO: 2158353 - RNA, 19 nt, Homo sapiens
  misc_RNA (1)...(19): siRNA sense strand
acagcugccuggugaggaa

SEQ ID NO: 2158354 - RNA, 19 nt, Homo sapiens
  misc_RNA (1)...(19): siRNA sense strand
ccagaucauauggcuauuu

SEQ ID NO: 2158355 - RNA, 19 nt, Homo sapiens
  misc_RNA (1)...(19): siRNA sense strand
aauaucaacccuacaaagu

SEQ ID NO: 2158356 - RNA, 19 nt, Homo sapiens
  misc_RNA (1)...(19): siRNA sense strand
ggggaaguguuuacuguug

SEQ ID NO: 2158357 - RNA, 19 nt, Homo sapiens
  misc_RNA (1)...(19): siRNA sense strand
ugaaauggaaagugauauc

SEQ ID NO: 2158358 - RNA, 19 nt, Homo sapiens
  misc_RNA (1)...(19): siRNA sense strand
ugacuucggaauauaugaa

SEQ ID NO: 2158359 - RNA, 19 nt, Homo sapiens
  misc_RNA (1)...(19): siRNA sense strand
ucaccuuuagcaaguauaa

SEQ ID NO: 2158360 - RNA, 19 nt, Homo sapiens
  misc_RNA (1)...(19): siRNA sense strand
ggauuaggaggacugacaa

SEQ ID NO: 2158361 - RNA, 19 nt, Homo sapiens
  misc_RNA (1)...(19): siRNA sense strand
aacaccuacuccuggauua

SEQ ID NO: 2158362 - RNA, 19 nt, Homo sapiens
  misc_RNA (1)...(19): siRNA sense strand
gauaucauuaugcccauca

SEQ ID NO: 2158363 - RNA, 19 nt, Homo sapiens
  misc_RNA (1)...(19): siRNA sense strand
ggaaucagcugagaaacuu

SEQ ID NO: 2158364 - RNA, 19 nt, Homo sapiens
  misc_RNA (1)...(19): siRNA sense strand
ggcaaacccuucaaucaaa

SEQ ID NO: 2158365 - RNA, 19 nt, Homo sapiens
  misc_RNA (1)...(19): siRNA sense strand
agacagcggucagcucuua

SEQ ID NO: 2158366 - RNA, 19 nt, Homo sapiens
  misc_RNA (1)...(19): siRNA sense strand
gaacauaagaggauucaca

SEQ ID NO: 2158367 - RNA, 19 nt, Homo sapiens
  misc_RNA (1)...(19): siRNA sense strand
gagcaaagucuuaugaaug

SEQ ID NO: 2158368 - RNA, 19 nt, Homo sapiens
  misc_RNA (1)...(19): siRNA sense strand
gcaggaaucagcugagaaa

SEQ ID NO: 2158369 - RNA, 19 nt, Homo sapiens
  misc_RNA (1)...(19): siRNA sense strand
gagaugugauguuggagaa

SEQ ID NO: 2158370 - RNA, 19 nt, Homo sapiens
  misc_RNA (1)...(19): siRNA sense strand
gggcagauaugaugaggau

SEQ ID NO: 2158371 - RNA, 19 nt, Homo sapiens
  misc_RNA (1)...(19): siRNA sense strand
gaggaauucuuucaaugug

SEQ ID NO: 2158372 - RNA, 19 nt, Homo sapiens
  misc_RNA (1)...(19): siRNA sense strand
agucagaauucaacccuua

SEQ ID NO: 2158373 - RNA, 19 nt, Homo sapiens
  misc_RNA (1)...(19): siRNA sense strand
guggacaguugcaggcuua

SEQ ID NO: 2158374 - RNA, 19 nt, Homo sapiens
  misc_RNA (1)...(19): siRNA sense strand
guaaaccgaacacccauaa

SEQ ID NO: 2158375 - RNA, 19 nt, Homo sapiens
  misc_RNA (1)...(19): siRNA sense strand
uaagaggauucacaccaaa

SEQ ID NO: 2158376 - RNA, 19 nt, Homo sapiens
  misc_RNA (1)...(19): siRNA sense strand
gcacacaagcuuuauuaag

SEQ ID NO: 2158377 - RNA, 19 nt, Homo sapiens
  misc_RNA (1)...(19): siRNA sense strand
caucaaagaauccauacaa

SEQ ID NO: 2158378 - RNA, 19 nt, Homo sapiens
  misc_RNA (1)...(19): siRNA sense strand
ccagggcacucacaaagga

SEQ ID NO: 2158379 - RNA, 19 nt, Homo sapiens
  misc_RNA (1)...(19): siRNA sense strand
cuaccaaugugucauaugu

SEQ ID NO: 2158380 - RNA, 19 nt, Homo sapiens
  misc_RNA (1)...(19): siRNA sense strand
ggaggaauucuuucaaugu

SEQ ID NO: 2158381 - RNA, 19 nt, Homo sapiens
  misc_RNA (1)...(19): siRNA sense strand
gcaaacccuucaaucaaag

SEQ ID NO: 2158382 - RNA, 19 nt, Homo sapiens
  misc_RNA (1)...(19): siRNA sense strand
cugaagauuuagagucaua

SEQ ID NO: 2158383 - RNA, 19 nt, Homo sapiens
  misc_RNA (1)...(19): siRNA sense strand
caaagaauccauacaaagg

SEQ ID NO: 2158384 - RNA, 19 nt, Homo sapiens
  misc_RNA (1)...(19): siRNA sense strand
uaagauaucagugguaaug

SEQ ID NO: 2158385 - RNA, 19 nt, Homo sapiens
  misc_RNA (1)...(19): siRNA sense strand
gcauucaacccuucuaugu

SEQ ID NO: 2158386 - RNA, 19 nt, Homo sapiens
  misc_RNA (1)...(19): siRNA sense strand
ggaagcagggcagauauga

SEQ ID NO: 2158387 - RNA, 19 nt, Homo sapiens
  misc_RNA (1)...(19): siRNA sense strand
gaagccaacccuaccaaug

SEQ ID NO: 2158388 - RNA, 19 nt, Homo sapiens
  misc_RNA (1)...(19): siRNA sense strand
gaagccagacacaagauga

SEQ ID NO: 2158389 - RNA, 19 nt, Homo sapiens
  misc_RNA (1)...(19): siRNA sense strand
cuaccgagaugugauguug

SEQ ID NO: 2158390 - RNA, 19 nt, Homo sapiens
  misc_RNA (1)...(19): siRNA sense strand
uggcacacaagcuuuauua

SEQ ID NO: 2158391 - RNA, 19 nt, Homo sapiens
  misc_RNA (1)...(19): siRNA sense strand
gaucagaaugcgcaaacaa

SEQ ID NO: 2158392 - RNA, 19 nt, Homo sapiens
  misc_RNA (1)...(19): siRNA sense strand
gaucaacaucaaagaauuc

SEQ ID NO: 2158393 - RNA, 19 nt, Homo sapiens
  misc_RNA (1)...(19): siRNA sense strand
gaaaagucauuaggcguaa

SEQ ID NO: 2158394 - RNA, 19 nt, Homo sapiens
  misc_RNA (1)...(19): siRNA sense strand
aaacaagccauacagaugu

SEQ ID NO: 2158395 - RNA, 19 nt, Homo sapiens
  misc_RNA (1)...(19): siRNA sense strand
gguggaagcagggcagaua

SEQ ID NO: 2158396 - RNA, 19 nt, Homo sapiens
  misc_RNA (1)...(19): siRNA sense strand
aucaacagauucacaguaa

SEQ ID NO: 2158397 - RNA, 19 nt, Homo sapiens
  misc_RNA (1)...(19): siRNA sense strand
uaaacagugucaccugcaa

SEQ ID NO: 2158398 - RNA, 19 nt, Homo sapiens
  misc_RNA (1)...(19): siRNA sense strand
uaaagaauuuguggacagu

SEQ ID NO: 2158399 - RNA, 19 nt, Homo sapiens
  misc_RNA (1)...(19): siRNA sense strand
cagcaucaaagaauccaua

SEQ ID NO: 2158400 - RNA, 19 nt, Homo sapiens
  misc_RNA (1)...(19): siRNA sense strand
caucaacagauucacagua

SEQ ID NO: 2158401 - RNA, 19 nt, Homo sapiens
  misc_RNA (1)...(19): siRNA sense strand
gcucgcguaucuuguugaa

SEQ ID NO: 2158402 - RNA, 19 nt, Homo sapiens
  misc_RNA (1)...(19): siRNA sense strand
aagaauuuguggacaguug

SEQ ID NO: 2158403 - RNA, 19 nt, Homo sapiens
  misc_RNA (1)...(19): siRNA sense strand
gcaccagggcacucacaaa

SEQ ID NO: 2158404 - RNA, 19 nt, Homo sapiens
  misc_RNA (1)...(19): siRNA sense strand
aaaccgaacacccauaaau

SEQ ID NO: 2158405 - RNA, 19 nt, Homo sapiens
  misc_RNA (1)...(19): siRNA sense strand
gcagcucgcguaucuuguu

SEQ ID NO: 2158406 - RNA, 19 nt, Homo sapiens
  misc_RNA (1)...(19): siRNA sense strand
cuacuaguggugaugaaua

SEQ ID NO: 2158407 - RNA, 19 nt, Homo sapiens
  misc_RNA (1)...(19): siRNA sense strand
guaggaauguggaucucau

SEQ ID NO: 2158408 - RNA, 19 nt, Homo sapiens
  misc_RNA (1)...(19): siRNA sense strand
auaagaggauucacaccaa

SEQ ID NO: 2158409 - RNA, 19 nt, Homo sapiens
  misc_RNA (1)...(19): siRNA sense strand
agagcaaagucuuaugaau

SEQ ID NO: 2158410 - RNA, 19 nt, Homo sapiens
  misc_RNA (1)...(19): siRNA sense strand
cgauguacuucaccagaga

SEQ ID NO: 2158411 - RNA, 19 nt, Homo sapiens
  misc_RNA (1)...(19): siRNA sense strand
uugaggauguggcgaugua

SEQ ID NO: 2158412 - RNA, 19 nt, Homo sapiens
  misc_RNA (1)...(19): siRNA sense strand
aggcuuacuuucccuacua

SEQ ID NO: 2158413 - RNA, 19 nt, Homo sapiens
  misc_RNA (1)...(19): siRNA sense strand
caacagauucacaguaaac

SEQ ID NO: 2158414 - RNA, 19 nt, Homo sapiens
  misc_RNA (1)...(19): siRNA sense strand
ucaacagauucacaguaaa

SEQ ID NO: 2158415 - RNA, 19 nt, Homo sapiens
  misc_RNA (1)...(19): siRNA sense strand
ccauacagaugucaugacu

SEQ ID NO: 2158416 - RNA, 19 nt, Homo sapiens
  misc_RNA (1)...(19): siRNA sense strand
cguaaggcaugguuugauc

SEQ ID NO: 2158417 - RNA, 19 nt, Homo sapiens
  misc_RNA (1)...(19): siRNA sense strand
gguagugcuugcccagguu

SEQ ID NO: 2158418 - RNA, 19 nt, Homo sapiens
  misc_RNA (1)...(19): siRNA sense strand
aaggaggaauucuuucaau

SEQ ID NO: 2158419 - RNA, 19 nt, Homo sapiens
  misc_RNA (1)...(19): siRNA sense strand
ucaaagaauccauacaaag

SEQ ID NO: 2158420 - RNA, 19 nt, Homo sapiens
  misc_RNA (1)...(19): siRNA sense strand
auucaacccuucuauguca

SEQ ID NO: 2158421 - RNA, 19 nt, Homo sapiens
  misc_RNA (1)...(19): siRNA sense strand
uggcaaacccuucaaucaa

SEQ ID NO: 2158422 - RNA, 19 nt, Homo sapiens
  misc_RNA (1)...(19): siRNA sense strand
ccauaaaugccuugagugu

SEQ ID NO: 2158423 - RNA, 19 nt, Homo sapiens
  misc_RNA (1)...(19): siRNA sense strand
cgaauucucacaagagcaa

SEQ ID NO: 2158424 - RNA, 19 nt, Homo sapiens
  misc_RNA (1)...(19): siRNA sense strand
caaugugucauauguggaa

SEQ ID NO: 2158425 - RNA, 19 nt, Homo sapiens
  misc_RNA (1)...(19): siRNA sense strand
gaucucauucagcaucaaa

SEQ ID NO: 2158426 - RNA, 19 nt, Homo sapiens
  misc_RNA (1)...(19): siRNA sense strand
ccauaaaugcagugaaugu

SEQ ID NO: 2158427 - RNA, 19 nt, Homo sapiens
  misc_RNA (1)...(19): siRNA sense strand
cgccauaaaugccuugagu

SEQ ID NO: 2158428 - RNA, 19 nt, Homo sapiens
  misc_RNA (1)...(19): siRNA sense strand
ugucaugacuguggaaagu

SEQ ID NO: 2158429 - RNA, 19 nt, Homo sapiens
  misc_RNA (1)...(19): siRNA sense strand
aaggacagauauccacaug

SEQ ID NO: 2158430 - RNA, 19 nt, Homo sapiens
  misc_RNA (1)...(19): siRNA sense strand
acccauaaaugcagugaau

SEQ ID NO: 2158431 - RNA, 19 nt, Homo sapiens
  misc_RNA (1)...(19): siRNA sense strand
cuucaaaaccuuaaccuua

SEQ ID NO: 2158432 - RNA, 19 nt, Homo sapiens
  misc_RNA (1)...(19): siRNA sense strand
caaguggcacacaagcuuu

SEQ ID NO: 2158433 - RNA, 19 nt, Homo sapiens
  misc_RNA (1)...(19): siRNA sense strand
ucaaguggcacacaagcuu

SEQ ID NO: 2158434 - RNA, 19 nt, Homo sapiens
  misc_RNA (1)...(19): siRNA sense strand
ucuaugucaucaacagauu

SEQ ID NO: 2158435 - RNA, 19 nt, Homo sapiens
  misc_RNA (1)...(19): siRNA sense strand
caacaucaaagaauucacu

SEQ ID NO: 2158436 - RNA, 19 nt, Homo sapiens
  misc_RNA (1)...(19): siRNA sense strand
cagaaaaguuacauaagug

SEQ ID NO: 2158437 - RNA, 19 nt, Homo sapiens
  misc_RNA (1)...(19): siRNA sense strand
ucugucagcuggagaacug

SEQ ID NO: 2158438 - RNA, 19 nt, Homo sapiens
  misc_RNA (1)...(19): siRNA sense strand
gagcgaauucucacaagag

SEQ ID NO: 2158439 - RNA, 19 nt, Homo sapiens
  misc_RNA (1)...(19): siRNA sense strand
aagcagggcagauaugaug

SEQ ID NO: 2158440 - RNA, 19 nt, Homo sapiens
  misc_RNA (1)...(19): siRNA sense strand
gaugugauguuggagaacu

SEQ ID NO: 2158441 - RNA, 19 nt, Homo sapiens
  misc_RNA (1)...(19): siRNA sense strand
gaggauggcaaacccuuca

SEQ ID NO: 2158442 - RNA, 19 nt, Homo sapiens
  misc_RNA (1)...(19): siRNA sense strand
aggaggaauucuuucaaug

SEQ ID NO: 2158443 - RNA, 19 nt, Homo sapiens
  misc_RNA (1)...(19): siRNA sense strand
auacaaaggaggaauucuu

SEQ ID NO: 2158444 - RNA, 19 nt, Homo sapiens
  misc_RNA (1)...(19): siRNA sense strand
aaagaauccauacaaagga

SEQ ID NO: 2158445 - RNA, 19 nt, Homo sapiens
  misc_RNA (1)...(19): siRNA sense strand
ucaugacuguggaaagugu

SEQ ID NO: 2158446 - RNA, 19 nt, Homo sapiens
  misc_RNA (1)...(19): siRNA sense strand
gacaguugcaggcuuacuu

SEQ ID NO: 2158447 - RNA, 19 nt, Homo sapiens
  misc_RNA (1)...(19): siRNA sense strand
cgagaacugggaauaggaa

SEQ ID NO: 2158448 - RNA, 19 nt, Homo sapiens
  misc_RNA (1)...(19): siRNA sense strand
gaaggaccucuaccgagau

SEQ ID NO: 2158449 - RNA, 19 nt, Homo sapiens
  misc_RNA (1)...(19): siRNA sense strand
gaggauucacaccaaagaa

SEQ ID NO: 2158450 - RNA, 19 nt, Homo sapiens
  misc_RNA (1)...(19): siRNA sense strand
cagcucgcguaucuuguug

SEQ ID NO: 2158451 - RNA, 19 nt, Homo sapiens
  misc_RNA (1)...(19): siRNA sense strand
agcaaagucuuaugaaugc

SEQ ID NO: 2158452 - RNA, 19 nt, Homo sapiens
  misc_RNA (1)...(19): siRNA sense strand
gaagcagggcagauaugau

SEQ ID NO: 2158453 - RNA, 19 nt, Homo sapiens
  misc_RNA (1)...(19): siRNA sense strand
cuaccgagaacugggaaua

SEQ ID NO: 2158454 - RNA, 19 nt, Homo sapiens
  misc_RNA (1)...(19): siRNA sense strand
ggaagccaacccuaccaau

SEQ ID NO: 2158455 - RNA, 19 nt, Homo sapiens
  misc_RNA (1)...(19): siRNA sense strand
cgacaucaggucauucaca

SEQ ID NO: 2158456 - RNA, 19 nt, Homo sapiens
  misc_RNA (1)...(19): siRNA sense strand
ucccaaaccugagaugauc

SEQ ID NO: 2158457 - RNA, 19 nt, Homo sapiens
  misc_RNA (1)...(19): siRNA sense strand
ggaccucuaccgagaugug

SEQ ID NO: 2158458 - RNA, 19 nt, Homo sapiens
  misc_RNA (1)...(19): siRNA sense strand
gaaugcagugaauguggaa

SEQ ID NO: 2158459 - RNA, 19 nt, Homo sapiens
  misc_RNA (1)...(19): siRNA sense strand
aagccaacccuaccaaugu

SEQ ID NO: 2158460 - RNA, 19 nt, Homo sapiens
  misc_RNA (1)...(19): siRNA sense strand
ggagaacuacaggaacaug

SEQ ID NO: 2158461 - RNA, 19 nt, Homo sapiens
  misc_RNA (1)...(19): siRNA sense strand
cggcagcucgcguaucuug

SEQ ID NO: 2158462 - RNA, 19 nt, Homo sapiens
  misc_RNA (1)...(19): siRNA sense strand
aggcaugguuugaucaaca

SEQ ID NO: 2158463 - RNA, 19 nt, Homo sapiens
  misc_RNA (1)...(19): siRNA sense strand
ggaaucagcugagaaacuu

SEQ ID NO: 2158464 - RNA, 19 nt, Homo sapiens
  misc_RNA (1)...(19): siRNA sense strand
ggcaaacccuucaaucaaa

SEQ ID NO: 2158465 - RNA, 19 nt, Homo sapiens
  misc_RNA (1)...(19): siRNA sense strand
agacagcggucagcucuua

SEQ ID NO: 2158466 - RNA, 19 nt, Homo sapiens
  misc_RNA (1)...(19): siRNA sense strand
gaacauaagaggauucaca

SEQ ID NO: 2158467 - RNA, 19 nt, Homo sapiens
  misc_RNA (1)...(19): siRNA sense strand
gagcaaagucuuaugaaug

SEQ ID NO: 2158468 - RNA, 19 nt, Homo sapiens
  misc_RNA (1)...(19): siRNA sense strand
gcaggaaucagcugagaaa

SEQ ID NO: 2158469 - RNA, 19 nt, Homo sapiens
  misc_RNA (1)...(19): siRNA sense strand
gagaugugauguuggagaa

SEQ ID NO: 2158470 - RNA, 19 nt, Homo sapiens
  misc_RNA (1)...(19): siRNA sense strand
gggcagauaugaugaggau

SEQ ID NO: 2158471 - RNA, 19 nt, Homo sapiens
  misc_RNA (1)...(19): siRNA sense strand
gaggaauucuuucaaugug

SEQ ID NO: 2158472 - RNA, 19 nt, Homo sapiens
  misc_RNA (1)...(19): siRNA sense strand
agucagaauucaacccuua

SEQ ID NO: 2158473 - RNA, 19 nt, Homo sapiens
  misc_RNA (1)...(19): siRNA sense strand
guggacaguugcaggcuua

SEQ ID NO: 2158474 - RNA, 19 nt, Homo sapiens
  misc_RNA (1)...(19): siRNA sense strand
guaaaccgaacacccauaa

SEQ ID NO: 2158475 - RNA, 19 nt, Homo sapiens
  misc_RNA (1)...(19): siRNA sense strand
uaagaggauucacaccaaa

SEQ ID NO: 2158476 - RNA, 19 nt, Homo sapiens
  misc_RNA (1)...(19): siRNA sense strand
gcacacaagcuuuauuaag

SEQ ID NO: 2158477 - RNA, 19 nt, Homo sapiens
  misc_RNA (1)...(19): siRNA sense strand
caucaaagaauccauacaa

SEQ ID NO: 2158478 - RNA, 19 nt, Homo sapiens
  misc_RNA (1)...(19): siRNA sense strand
ccagggcacucacaaagga

SEQ ID NO: 2158479 - RNA, 19 nt, Homo sapiens
  misc_RNA (1)...(19): siRNA sense strand
cuaccaaugugucauaugu

SEQ ID NO: 2158480 - RNA, 19 nt, Homo sapiens
  misc_RNA (1)...(19): siRNA sense strand
ggaggaauucuuucaaugu

SEQ ID NO: 2158481 - RNA, 19 nt, Homo sapiens
  misc_RNA (1)...(19): siRNA sense strand
gcaaacccuucaaucaaag

SEQ ID NO: 2158482 - RNA, 19 nt, Homo sapiens
  misc_RNA (1)...(19): siRNA sense strand
cugaagauuuagagucaua

SEQ ID NO: 2158483 - RNA, 19 nt, Homo sapiens
  misc_RNA (1)...(19): siRNA sense strand
caaagaauccauacaaagg

SEQ ID NO: 2158484 - RNA, 19 nt, Homo sapiens
  misc_RNA (1)...(19): siRNA sense strand
uaagauaucagugguaaug

SEQ ID NO: 2158485 - RNA, 19 nt, Homo sapiens
  misc_RNA (1)...(19): siRNA sense strand
gcauucaacccuucuaugu

SEQ ID NO: 2158486 - RNA, 19 nt, Homo sapiens
  misc_RNA (1)...(19): siRNA sense strand
ggaagcagggcagauauga

SEQ ID NO: 2158487 - RNA, 19 nt, Homo sapiens
  misc_RNA (1)...(19): siRNA sense strand
gaagccaacccuaccaaug

SEQ ID NO: 2158488 - RNA, 19 nt, Homo sapiens
  misc_RNA (1)...(19): siRNA sense strand
gaagccagacacaagauga

SEQ ID NO: 2158489 - RNA, 19 nt, Homo sapiens
  misc_RNA (1)...(19): siRNA sense strand
cuaccgagaugugauguug

SEQ ID NO: 2158490 - RNA, 19 nt, Homo sapiens
  misc_RNA (1)...(19): siRNA sense strand
uggcacacaagcuuuauua

SEQ ID NO: 2158491 - RNA, 19 nt, Homo sapiens
  misc_RNA (1)...(19): siRNA sense strand
gaucagaaugcgcaaacaa

SEQ ID NO: 2158492 - RNA, 19 nt, Homo sapiens
  misc_RNA (1)...(19): siRNA sense strand
gaucaacaucaaagaauuc

SEQ ID NO: 2158493 - RNA, 19 nt, Homo sapiens
  misc_RNA (1)...(19): siRNA sense strand
gaaaagucauuaggcguaa

SEQ ID NO: 2158494 - RNA, 19 nt, Homo sapiens
  misc_RNA (1)...(19): siRNA sense strand
aaacaagccauacagaugu

SEQ ID NO: 2158495 - RNA, 19 nt, Homo sapiens
  misc_RNA (1)...(19): siRNA sense strand
gguggaagcagggcagaua

SEQ ID NO: 2158496 - RNA, 19 nt, Homo sapiens
  misc_RNA (1)...(19): siRNA sense strand
aucaacagauucacaguaa

SEQ ID NO: 2158497 - RNA, 19 nt, Homo sapiens
  misc_RNA (1)...(19): siRNA sense strand
uaaacagugucaccugcaa

SEQ ID NO: 2158498 - RNA, 19 nt, Homo sapiens
  misc_RNA (1)...(19): siRNA sense strand
uaaagaauuuguggacagu

SEQ ID NO: 2158499 - RNA, 19 nt, Homo sapiens
  misc_RNA (1)...(19): siRNA sense strand
cagcaucaaagaauccaua

SEQ ID NO: 2158500 - RNA, 19 nt, Homo sapiens
  misc_RNA (1)...(19): siRNA sense strand
caucaacagauucacagua

SEQ ID NO: 2158501 - RNA, 19 nt, Homo sapiens
  misc_RNA (1)...(19): siRNA sense strand
gcucgcguaucuuguugaa

SEQ ID NO: 2158502 - RNA, 19 nt, Homo sapiens
  misc_RNA (1)...(19): siRNA sense strand
aagaauuuguggacaguug

SEQ ID NO: 2158503 - RNA, 19 nt, Homo sapiens
  misc_RNA (1)...(19): siRNA sense strand
gcaccagggcacucacaaa

SEQ ID NO: 2158504 - RNA, 19 nt, Homo sapiens
  misc_RNA (1)...(19): siRNA sense strand
aaaccgaacacccauaaau

SEQ ID NO: 2158505 - RNA, 19 nt, Homo sapiens
  misc_RNA (1)...(19): siRNA sense strand
gcagcucgcguaucuuguu

SEQ ID NO: 2158506 - RNA, 19 nt, Homo sapiens
  misc_RNA (1)...(19): siRNA sense strand
cuacuaguggugaugaaua

SEQ ID NO: 2158507 - RNA, 19 nt, Homo sapiens
  misc_RNA (1)...(19): siRNA sense strand
guaggaauguggaucucau

SEQ ID NO: 2158508 - RNA, 19 nt, Homo sapiens
  misc_RNA (1)...(19): siRNA sense strand
auaagaggauucacaccaa

SEQ ID NO: 2158509 - RNA, 19 nt, Homo sapiens
  misc_RNA (1)...(19): siRNA sense strand
agagcaaagucuuaugaau

SEQ ID NO: 2158510 - RNA, 19 nt, Homo sapiens
  misc_RNA (1)...(19): siRNA sense strand
cgauguacuucaccagaga

SEQ ID NO: 2158511 - RNA, 19 nt, Homo sapiens
  misc_RNA (1)...(19): siRNA sense strand
uugaggauguggcgaugua

SEQ ID NO: 2158512 - RNA, 19 nt, Homo sapiens
  misc_RNA (1)...(19): siRNA sense strand
aggcuuacuuucccuacua

SEQ ID NO: 2158513 - RNA, 19 nt, Homo sapiens
  misc_RNA (1)...(19): siRNA sense strand
caacagauucacaguaaac

SEQ ID NO: 2158514 - RNA, 19 nt, Homo sapiens
  misc_RNA (1)...(19): siRNA sense strand
ucaacagauucacaguaaa

SEQ ID NO: 2158515 - RNA, 19 nt, Homo sapiens
  misc_RNA (1)...(19): siRNA sense strand
ccauacagaugucaugacu

SEQ ID NO: 2158516 - RNA, 19 nt, Homo sapiens
  misc_RNA (1)...(19): siRNA sense strand
cguaaggcaugguuugauc

SEQ ID NO: 2158517 - RNA, 19 nt, Homo sapiens
  misc_RNA (1)...(19): siRNA sense strand
gguagugcuugcccagguu

SEQ ID NO: 2158518 - RNA, 19 nt, Homo sapiens
  misc_RNA (1)...(19): siRNA sense strand
aaggaggaauucuuucaau

SEQ ID NO: 2158519 - RNA, 19 nt, Homo sapiens
  misc_RNA (1)...(19): siRNA sense strand
ucaaagaauccauacaaag

SEQ ID NO: 2158520 - RNA, 19 nt, Homo sapiens
  misc_RNA (1)...(19): siRNA sense strand
auucaacccuucuauguca

SEQ ID NO: 2158521 - RNA, 19 nt, Homo sapiens
  misc_RNA (1)...(19): siRNA sense strand
uggcaaacccuucaaucaa

SEQ ID NO: 2158522 - RNA, 19 nt, Homo sapiens
  misc_RNA (1)...(19): siRNA sense strand
ccauaaaugccuugagugu

SEQ ID NO: 2158523 - RNA, 19 nt, Homo sapiens
  misc_RNA (1)...(19): siRNA sense strand
cgaauucucacaagagcaa

SEQ ID NO: 2158524 - RNA, 19 nt, Homo sapiens
  misc_RNA (1)...(19): siRNA sense strand
caaugugucauauguggaa

SEQ ID NO: 2158525 - RNA, 19 nt, Homo sapiens
  misc_RNA (1)...(19): siRNA sense strand
gaucucauucagcaucaaa

SEQ ID NO: 2158526 - RNA, 19 nt, Homo sapiens
  misc_RNA (1)...(19): siRNA sense strand
ccauaaaugcagugaaugu

SEQ ID NO: 2158527 - RNA, 19 nt, Homo sapiens
  misc_RNA (1)...(19): siRNA sense strand
cgccauaaaugccuugagu

SEQ ID NO: 2158528 - RNA, 19 nt, Homo sapiens
  misc_RNA (1)...(19): siRNA sense strand
ugucaugacuguggaaagu

SEQ ID NO: 2158529 - RNA, 19 nt, Homo sapiens
  misc_RNA (1)...(19): siRNA sense strand
aaggacagauauccacaug

SEQ ID NO: 2158530 - RNA, 19 nt, Homo sapiens
  misc_RNA (1)...(19): siRNA sense strand
acccauaaaugcagugaau

SEQ ID NO: 2158531 - RNA, 19 nt, Homo sapiens
  misc_RNA (1)...(19): siRNA sense strand
cuucaaaaccuuaaccuua

SEQ ID NO: 2158532 - RNA, 19 nt, Homo sapiens
  misc_RNA (1)...(19): siRNA sense strand
caaguggcacacaagcuuu

SEQ ID NO: 2158533 - RNA, 19 nt, Homo sapiens
  misc_RNA (1)...(19): siRNA sense strand
ucaaguggcacacaagcuu

SEQ ID NO: 2158534 - RNA, 19 nt, Homo sapiens
  misc_RNA (1)...(19): siRNA sense strand
ucuaugucaucaacagauu

SEQ ID NO: 2158535 - RNA, 19 nt, Homo sapiens
  misc_RNA (1)...(19): siRNA sense strand
caacaucaaagaauucacu

SEQ ID NO: 2158536 - RNA, 19 nt, Homo sapiens
  misc_RNA (1)...(19): siRNA sense strand
cagaaaaguuacauaagug

SEQ ID NO: 2158537 - RNA, 19 nt, Homo sapiens
  misc_RNA (1)...(19): siRNA sense strand
ucugucagcuggagaacug

SEQ ID NO: 2158538 - RNA, 19 nt, Homo sapiens
  misc_RNA (1)...(19): siRNA sense strand
gagcgaauucucacaagag

SEQ ID NO: 2158539 - RNA, 19 nt, Homo sapiens
  misc_RNA (1)...(19): siRNA sense strand
aagcagggcagauaugaug

SEQ ID NO: 2158540 - RNA, 19 nt, Homo sapiens
  misc_RNA (1)...(19): siRNA sense strand
gaugugauguuggagaacu

SEQ ID NO: 2158541 - RNA, 19 nt, Homo sapiens
  misc_RNA (1)...(19): siRNA sense strand
gaggauggcaaacccuuca

SEQ ID NO: 2158542 - RNA, 19 nt, Homo sapiens
  misc_RNA (1)...(19): siRNA sense strand
aggaggaauucuuucaaug

SEQ ID NO: 2158543 - RNA, 19 nt, Homo sapiens
  misc_RNA (1)...(19): siRNA sense strand
auacaaaggaggaauucuu

SEQ ID NO: 2158544 - RNA, 19 nt, Homo sapiens
  misc_RNA (1)...(19): siRNA sense strand
aaagaauccauacaaagga

SEQ ID NO: 2158545 - RNA, 19 nt, Homo sapiens
  misc_RNA (1)...(19): siRNA sense strand
ucaugacuguggaaagugu

SEQ ID NO: 2158546 - RNA, 19 nt, Homo sapiens
  misc_RNA (1)...(19): siRNA sense strand
gacaguugcaggcuuacuu

SEQ ID NO: 2158547 - RNA, 19 nt, Homo sapiens
  misc_RNA (1)...(19): siRNA sense strand
cgagaacugggaauaggaa

SEQ ID NO: 2158548 - RNA, 19 nt, Homo sapiens
  misc_RNA (1)...(19): siRNA sense strand
gaaggaccucuaccgagau

SEQ ID NO: 2158549 - RNA, 19 nt, Homo sapiens
  misc_RNA (1)...(19): siRNA sense strand
gaggauucacaccaaagaa

SEQ ID NO: 2158550 - RNA, 19 nt, Homo sapiens
  misc_RNA (1)...(19): siRNA sense strand
cagcucgcguaucuuguug

SEQ ID NO: 2158551 - RNA, 19 nt, Homo sapiens
  misc_RNA (1)...(19): siRNA sense strand
agcaaagucuuaugaaugc

SEQ ID NO: 2158552 - RNA, 19 nt, Homo sapiens
  misc_RNA (1)...(19): siRNA sense strand
gaagcagggcagauaugau

SEQ ID NO: 2158553 - RNA, 19 nt, Homo sapiens
  misc_RNA (1)...(19): siRNA sense strand
cuaccgagaacugggaaua

SEQ ID NO: 2158554 - RNA, 19 nt, Homo sapiens
  misc_RNA (1)...(19): siRNA sense strand
ggaagccaacccuaccaau

SEQ ID NO: 2158555 - RNA, 19 nt, Homo sapiens
  misc_RNA (1)...(19): siRNA sense strand
cgacaucaggucauucaca

SEQ ID NO: 2158556 - RNA, 19 nt, Homo sapiens
  misc_RNA (1)...(19): siRNA sense strand
ucccaaaccugagaugauc

SEQ ID NO: 2158557 - RNA, 19 nt, Homo sapiens
  misc_RNA (1)...(19): siRNA sense strand
ggaccucuaccgagaugug

SEQ ID NO: 2158558 - RNA, 19 nt, Homo sapiens
  misc_RNA (1)...(19): siRNA sense strand
gaaugcagugaauguggaa

SEQ ID NO: 2158559 - RNA, 19 nt, Homo sapiens
  misc_RNA (1)...(19): siRNA sense strand
aagccaacccuaccaaugu

SEQ ID NO: 2158560 - RNA, 19 nt, Homo sapiens
  misc_RNA (1)...(19): siRNA sense strand
ggagaacuacaggaacaug

SEQ ID NO: 2158561 - RNA, 19 nt, Homo sapiens
  misc_RNA (1)...(19): siRNA sense strand
cggcagcucgcguaucuug

SEQ ID NO: 2158562 - RNA, 19 nt, Homo sapiens
  misc_RNA (1)...(19): siRNA sense strand
aggcaugguuugaucaaca

SEQ ID NO: 2158563 - RNA, 19 nt, Homo sapiens
  misc_RNA (1)...(19): siRNA sense strand
ggaagagccuguguacauu

SEQ ID NO: 2158564 - RNA, 19 nt, Homo sapiens
  misc_RNA (1)...(19): siRNA sense strand
caaaggaguuggacaaggu

SEQ ID NO: 2158565 - RNA, 19 nt, Homo sapiens
  misc_RNA (1)...(19): siRNA sense strand
gaaagcaggcucacagaag

SEQ ID NO: 2158566 - RNA, 19 nt, Homo sapiens
  misc_RNA (1)...(19): siRNA sense strand
ggaggcagcacaaggaaga

SEQ ID NO: 2158567 - RNA, 19 nt, Homo sapiens
  misc_RNA (1)...(19): siRNA sense strand
gaagagccuguguacauug

SEQ ID NO: 2158568 - RNA, 19 nt, Homo sapiens
  misc_RNA (1)...(19): siRNA sense strand
aagaggagcuccaguaagg

SEQ ID NO: 2158569 - RNA, 19 nt, Homo sapiens
  misc_RNA (1)...(19): siRNA sense strand
ccaagaggagcuccaguaa

SEQ ID NO: 2158570 - RNA, 19 nt, Homo sapiens
  misc_RNA (1)...(19): siRNA sense strand
agagugaggccaucuauga

SEQ ID NO: 2158571 - RNA, 19 nt, Homo sapiens
  misc_RNA (1)...(19): siRNA sense strand
gccaagaggagcuccagua

SEQ ID NO: 2158572 - RNA, 19 nt, Homo sapiens
  misc_RNA (1)...(19): siRNA sense strand
gaccacuccuugugaaauc

SEQ ID NO: 2158573 - RNA, 19 nt, Homo sapiens
  misc_RNA (1)...(19): siRNA sense strand
ggaagcugcuggaggugau

SEQ ID NO: 2158574 - RNA, 19 nt, Homo sapiens
  misc_RNA (1)...(19): siRNA sense strand
gugaggccaucuaugaaga

SEQ ID NO: 2158575 - RNA, 19 nt, Homo sapiens
  misc_RNA (1)...(19): siRNA sense strand
ggacagcagcacccgaaga

SEQ ID NO: 2158576 - RNA, 19 nt, Homo sapiens
  misc_RNA (1)...(19): siRNA sense strand
gagccuguguacauugaga

SEQ ID NO: 2158577 - RNA, 19 nt, Homo sapiens
  misc_RNA (1)...(19): siRNA sense strand
gaagguuccuccgcagaag

SEQ ID NO: 2158578 - RNA, 19 nt, Homo sapiens
  misc_RNA (1)...(19): siRNA sense strand
ccaccgcaauggagacuuc

SEQ ID NO: 2158579 - RNA, 19 nt, Homo sapiens
  misc_RNA (1)...(19): siRNA sense strand
ucuaugaagagaugaagua

SEQ ID NO: 2158580 - RNA, 19 nt, Homo sapiens
  misc_RNA (1)...(19): siRNA sense strand
ggacaccagaggaggaaga

SEQ ID NO: 2158581 - RNA, 19 nt, Homo sapiens
  misc_RNA (1)...(19): siRNA sense strand
caaagacggagaaggagau

SEQ ID NO: 2158582 - RNA, 19 nt, Homo sapiens
  misc_RNA (1)...(19): siRNA sense strand
ggauggguuucaugacgau

SEQ ID NO: 2158583 - RNA, 19 nt, Homo sapiens
  misc_RNA (1)...(19): siRNA sense strand
gagugaggccaucuaugaa

SEQ ID NO: 2158584 - RNA, 19 nt, Homo sapiens
  misc_RNA (1)...(19): siRNA sense strand
aggaagagccuguguacau

SEQ ID NO: 2158585 - RNA, 19 nt, Homo sapiens
  misc_RNA (1)...(19): siRNA sense strand
caccagaggaggaagaaga

SEQ ID NO: 2158586 - RNA, 19 nt, Homo sapiens
  misc_RNA (1)...(19): siRNA sense strand
aagagccuguguacauuga

SEQ ID NO: 2158587 - RNA, 19 nt, Homo sapiens
  misc_RNA (1)...(19): siRNA sense strand
gaggccaucuaugaagaga

SEQ ID NO: 2158588 - RNA, 19 nt, Homo sapiens
  misc_RNA (1)...(19): siRNA sense strand
aagcaaaggaguuggacaa

SEQ ID NO: 2158589 - RNA, 19 nt, Homo sapiens
  misc_RNA (1)...(19): siRNA sense strand
gcaagaaagcaggcucaca

SEQ ID NO: 2158590 - RNA, 19 nt, Homo sapiens
  misc_RNA (1)...(19): siRNA sense strand
gagaaaagcaaaggaguug

SEQ ID NO: 2158591 - RNA, 19 nt, Homo sapiens
  misc_RNA (1)...(19): siRNA sense strand
gaaaagcaaaggaguugga

SEQ ID NO: 2158592 - RNA, 19 nt, Homo sapiens
  misc_RNA (1)...(19): siRNA sense strand
agaaagcaggcucacagaa

SEQ ID NO: 2158593 - RNA, 19 nt, Homo sapiens
  misc_RNA (1)...(19): siRNA sense strand
ggagaaaagcaaaggaguu

SEQ ID NO: 2158594 - RNA, 19 nt, Homo sapiens
  misc_RNA (1)...(19): siRNA sense strand
caagaggagcuccaguaag

SEQ ID NO: 2158595 - RNA, 19 nt, Homo sapiens
  misc_RNA (1)...(19): siRNA sense strand
gagagugaggccaucuaug

SEQ ID NO: 2158596 - RNA, 19 nt, Homo sapiens
  misc_RNA (1)...(19): siRNA sense strand
gaagagagugaggccaucu

SEQ ID NO: 2158597 - RNA, 19 nt, Homo sapiens
  misc_RNA (1)...(19): siRNA sense strand
agccaaagacggagaagga

SEQ ID NO: 2158598 - RNA, 19 nt, Homo sapiens
  misc_RNA (1)...(19): siRNA sense strand
ggaagagccuguguacauu

SEQ ID NO: 2158599 - RNA, 19 nt, Homo sapiens
  misc_RNA (1)...(19): siRNA sense strand
caaaggaguuggacaaggu

SEQ ID NO: 2158600 - RNA, 19 nt, Homo sapiens
  misc_RNA (1)...(19): siRNA sense strand
gaaagcaggcucacagaag

SEQ ID NO: 2158601 - RNA, 19 nt, Homo sapiens
  misc_RNA (1)...(19): siRNA sense strand
ggaggcagcacaaggaaga

SEQ ID NO: 2158602 - RNA, 19 nt, Homo sapiens
  misc_RNA (1)...(19): siRNA sense strand
gaagagccuguguacauug

SEQ ID NO: 2158603 - RNA, 19 nt, Homo sapiens
  misc_RNA (1)...(19): siRNA sense strand
aagaggagcuccaguaagg

SEQ ID NO: 2158604 - RNA, 19 nt, Homo sapiens
  misc_RNA (1)...(19): siRNA sense strand
ccaagaggagcuccaguaa

SEQ ID NO: 2158605 - RNA, 19 nt, Homo sapiens
  misc_RNA (1)...(19): siRNA sense strand
agagugaggccaucuauga

SEQ ID NO: 2158606 - RNA, 19 nt, Homo sapiens
  misc_RNA (1)...(19): siRNA sense strand
gccaagaggagcuccagua

SEQ ID NO: 2158607 - RNA, 19 nt, Homo sapiens
  misc_RNA (1)...(19): siRNA sense strand
gaccacuccuugugaaauc

SEQ ID NO: 2158608 - RNA, 19 nt, Homo sapiens
  misc_RNA (1)...(19): siRNA sense strand
ggaagcugcuggaggugau

SEQ ID NO: 2158609 - RNA, 19 nt, Homo sapiens
  misc_RNA (1)...(19): siRNA sense strand
gugaggccaucuaugaaga

SEQ ID NO: 2158610 - RNA, 19 nt, Homo sapiens
  misc_RNA (1)...(19): siRNA sense strand
ggacagcagcacccgaaga

SEQ ID NO: 2158611 - RNA, 19 nt, Homo sapiens
  misc_RNA (1)...(19): siRNA sense strand
gagccuguguacauugaga

SEQ ID NO: 2158612 - RNA, 19 nt, Homo sapiens
  misc_RNA (1)...(19): siRNA sense strand
gaagguuccuccgcagaag

SEQ ID NO: 2158613 - RNA, 19 nt, Homo sapiens
  misc_RNA (1)...(19): siRNA sense strand
ccaccgcaauggagacuuc

SEQ ID NO: 2158614 - RNA, 19 nt, Homo sapiens
  misc_RNA (1)...(19): siRNA sense strand
ucuaugaagagaugaagua

SEQ ID NO: 2158615 - RNA, 19 nt, Homo sapiens
  misc_RNA (1)...(19): siRNA sense strand
ggacaccagaggaggaaga

SEQ ID NO: 2158616 - RNA, 19 nt, Homo sapiens
  misc_RNA (1)...(19): siRNA sense strand
caaagacggagaaggagau

SEQ ID NO: 2158617 - RNA, 19 nt, Homo sapiens
  misc_RNA (1)...(19): siRNA sense strand
ggauggguuucaugacgau

SEQ ID NO: 2158618 - RNA, 19 nt, Homo sapiens
  misc_RNA (1)...(19): siRNA sense strand
gagugaggccaucuaugaa

SEQ ID NO: 2158619 - RNA, 19 nt, Homo sapiens
  misc_RNA (1)...(19): siRNA sense strand
aggaagagccuguguacau

SEQ ID NO: 2158620 - RNA, 19 nt, Homo sapiens
  misc_RNA (1)...(19): siRNA sense strand
caccagaggaggaagaaga

SEQ ID NO: 2158621 - RNA, 19 nt, Homo sapiens
  misc_RNA (1)...(19): siRNA sense strand
aagagccuguguacauuga

SEQ ID NO: 2158622 - RNA, 19 nt, Homo sapiens
  misc_RNA (1)...(19): siRNA sense strand
gaggccaucuaugaagaga

SEQ ID NO: 2158623 - RNA, 19 nt, Homo sapiens
  misc_RNA (1)...(19): siRNA sense strand
aagcaaaggaguuggacaa

SEQ ID NO: 2158624 - RNA, 19 nt, Homo sapiens
  misc_RNA (1)...(19): siRNA sense strand
gcaagaaagcaggcucaca

SEQ ID NO: 2158625 - RNA, 19 nt, Homo sapiens
  misc_RNA (1)...(19): siRNA sense strand
gagaaaagcaaaggaguug

SEQ ID NO: 2158626 - RNA, 19 nt, Homo sapiens
  misc_RNA (1)...(19): siRNA sense strand
gaaaagcaaaggaguugga

SEQ ID NO: 2158627 - RNA, 19 nt, Homo sapiens
  misc_RNA (1)...(19): siRNA sense strand
agaaagcaggcucacagaa

SEQ ID NO: 2158628 - RNA, 19 nt, Homo sapiens
  misc_RNA (1)...(19): siRNA sense strand
ggagaaaagcaaaggaguu

SEQ ID NO: 2158629 - RNA, 19 nt, Homo sapiens
  misc_RNA (1)...(19): siRNA sense strand
caagaggagcuccaguaag

SEQ ID NO: 2158630 - RNA, 19 nt, Homo sapiens
  misc_RNA (1)...(19): siRNA sense strand
gagagugaggccaucuaug

SEQ ID NO: 2158631 - RNA, 19 nt, Homo sapiens
  misc_RNA (1)...(19): siRNA sense strand
gaagagagugaggccaucu

SEQ ID NO: 2158632 - RNA, 19 nt, Homo sapiens
  misc_RNA (1)...(19): siRNA sense strand
agccaaagacggagaagga

SEQ ID NO: 2158633 - RNA, 19 nt, Homo sapiens
  misc_RNA (1)...(19): siRNA sense strand
ggaagagccuguguacauu

SEQ ID NO: 2158634 - RNA, 19 nt, Homo sapiens
  misc_RNA (1)...(19): siRNA sense strand
caaaggaguuggacaaggu

SEQ ID NO: 2158635 - RNA, 19 nt, Homo sapiens
  misc_RNA (1)...(19): siRNA sense strand
gaaagcaggcucacagaag

SEQ ID NO: 2158636 - RNA, 19 nt, Homo sapiens
  misc_RNA (1)...(19): siRNA sense strand
ggaggcagcacaaggaaga

SEQ ID NO: 2158637 - RNA, 19 nt, Homo sapiens
  misc_RNA (1)...(19): siRNA sense strand
gaagagccuguguacauug

SEQ ID NO: 2158638 - RNA, 19 nt, Homo sapiens
  misc_RNA (1)...(19): siRNA sense strand
aagaggagcuccaguaagg

SEQ ID NO: 2158639 - RNA, 19 nt, Homo sapiens
  misc_RNA (1)...(19): siRNA sense strand
ccaagaggagcuccaguaa

SEQ ID NO: 2158640 - RNA, 19 nt, Homo sapiens
  misc_RNA (1)...(19): siRNA sense strand
agagugaggccaucuauga

SEQ ID NO: 2158641 - RNA, 19 nt, Homo sapiens
  misc_RNA (1)...(19): siRNA sense strand
gccaagaggagcuccagua

SEQ ID NO: 2158642 - RNA, 19 nt, Homo sapiens
  misc_RNA (1)...(19): siRNA sense strand
gaccacuccuugugaaauc

SEQ ID NO: 2158643 - RNA, 19 nt, Homo sapiens
  misc_RNA (1)...(19): siRNA sense strand
ggaagcugcuggaggugau

SEQ ID NO: 2158644 - RNA, 19 nt, Homo sapiens
  misc_RNA (1)...(19): siRNA sense strand
gugaggccaucuaugaaga

SEQ ID NO: 2158645 - RNA, 19 nt, Homo sapiens
  misc_RNA (1)...(19): siRNA sense strand
ggacagcagcacccgaaga

SEQ ID NO: 2158646 - RNA, 19 nt, Homo sapiens
  misc_RNA (1)...(19): siRNA sense strand
gagccuguguacauugaga

SEQ ID NO: 2158647 - RNA, 19 nt, Homo sapiens
  misc_RNA (1)...(19): siRNA sense strand
gaagguuccuccgcagaag

SEQ ID NO: 2158648 - RNA, 19 nt, Homo sapiens
  misc_RNA (1)...(19): siRNA sense strand
ccaccgcaauggagacuuc

SEQ ID NO: 2158649 - RNA, 19 nt, Homo sapiens
  misc_RNA (1)...(19): siRNA sense strand
ucuaugaagagaugaagua

SEQ ID NO: 2158650 - RNA, 19 nt, Homo sapiens
  misc_RNA (1)...(19): siRNA sense strand
ggacaccagaggaggaaga

SEQ ID NO: 2158651 - RNA, 19 nt, Homo sapiens
  misc_RNA (1)...(19): siRNA sense strand
caaagacggagaaggagau

SEQ ID NO: 2158652 - RNA, 19 nt, Homo sapiens
  misc_RNA (1)...(19): siRNA sense strand
ggauggguuucaugacgau

SEQ ID NO: 2158653 - RNA, 19 nt, Homo sapiens
  misc_RNA (1)...(19): siRNA sense strand
gagugaggccaucuaugaa

SEQ ID NO: 2158654 - RNA, 19 nt, Homo sapiens
  misc_RNA (1)...(19): siRNA sense strand
aggaagagccuguguacau

SEQ ID NO: 2158655 - RNA, 19 nt, Homo sapiens
  misc_RNA (1)...(19): siRNA sense strand
caccagaggaggaagaaga

SEQ ID NO: 2158656 - RNA, 19 nt, Homo sapiens
  misc_RNA (1)...(19): siRNA sense strand
aagagccuguguacauuga

SEQ ID NO: 2158657 - RNA, 19 nt, Homo sapiens
  misc_RNA (1)...(19): siRNA sense strand
gaggccaucuaugaagaga

SEQ ID NO: 2158658 - RNA, 19 nt, Homo sapiens
  misc_RNA (1)...(19): siRNA sense strand
aagcaaaggaguuggacaa

SEQ ID NO: 2158659 - RNA, 19 nt, Homo sapiens
  misc_RNA (1)...(19): siRNA sense strand
gcaagaaagcaggcucaca

SEQ ID NO: 2158660 - RNA, 19 nt, Homo sapiens
  misc_RNA (1)...(19): siRNA sense strand
gagaaaagcaaaggaguug

SEQ ID NO: 2158661 - RNA, 19 nt, Homo sapiens
  misc_RNA (1)...(19): siRNA sense strand
gaaaagcaaaggaguugga

SEQ ID NO: 2158662 - RNA, 19 nt, Homo sapiens
  misc_RNA (1)...(19): siRNA sense strand
agaaagcaggcucacagaa

SEQ ID NO: 2158663 - RNA, 19 nt, Homo sapiens
  misc_RNA (1)...(19): siRNA sense strand
ggagaaaagcaaaggaguu

SEQ ID NO: 2158664 - RNA, 19 nt, Homo sapiens
  misc_RNA (1)...(19): siRNA sense strand
caagaggagcuccaguaag

SEQ ID NO: 2158665 - RNA, 19 nt, Homo sapiens
  misc_RNA (1)...(19): siRNA sense strand
gagagugaggccaucuaug

SEQ ID NO: 2158666 - RNA, 19 nt, Homo sapiens
  misc_RNA (1)...(19): siRNA sense strand
gaagagagugaggccaucu

SEQ ID NO: 2158667 - RNA, 19 nt, Homo sapiens
  misc_RNA (1)...(19): siRNA sense strand
agccaaagacggagaagga

SEQ ID NO: 2158668 - RNA, 19 nt, Homo sapiens
  misc_RNA (1)...(19): siRNA sense strand
gaaagaagaugcugagaaa

SEQ ID NO: 2158669 - RNA, 19 nt, Homo sapiens
  misc_RNA (1)...(19): siRNA sense strand
gaagaagacugcccaaauc

SEQ ID NO: 2158670 - RNA, 19 nt, Homo sapiens
  misc_RNA (1)...(19): siRNA sense strand
gcgagaagcugaaaggaaa

SEQ ID NO: 2158671 - RNA, 19 nt, Homo sapiens
  misc_RNA (1)...(19): siRNA sense strand
gcucaaauguguucgagaa

SEQ ID NO: 2158672 - RNA, 19 nt, Homo sapiens
  misc_RNA (1)...(19): siRNA sense strand
gcaagaucauucauacuga

SEQ ID NO: 2158673 - RNA, 19 nt, Homo sapiens
  misc_RNA (1)...(19): siRNA sense strand
ugaagaugcugcacaguuu

SEQ ID NO: 2158674 - RNA, 19 nt, Homo sapiens
  misc_RNA (1)...(19): siRNA sense strand
gaagaggcaggcugaguua

SEQ ID NO: 2158675 - RNA, 19 nt, Homo sapiens
  misc_RNA (1)...(19): siRNA sense strand
gaucauucauacugacaua

SEQ ID NO: 2158676 - RNA, 19 nt, Homo sapiens
  misc_RNA (1)...(19): siRNA sense strand
gcccagaggugaaacuaaa

SEQ ID NO: 2158677 - RNA, 19 nt, Homo sapiens
  misc_RNA (1)...(19): siRNA sense strand
gaaaagauuuguugcaaug

SEQ ID NO: 2158678 - RNA, 19 nt, Homo sapiens
  misc_RNA (1)...(19): siRNA sense strand
guuguucucuggauccuua

SEQ ID NO: 2158679 - RNA, 19 nt, Homo sapiens
  misc_RNA (1)...(19): siRNA sense strand
gcagaaaccuauaggaaaa

SEQ ID NO: 2158680 - RNA, 19 nt, Homo sapiens
  misc_RNA (1)...(19): siRNA sense strand
ucugagggaucaccacuua

SEQ ID NO: 2158681 - RNA, 19 nt, Homo sapiens
  misc_RNA (1)...(19): siRNA sense strand
ucaaguggaucaucaaauc

SEQ ID NO: 2158682 - RNA, 19 nt, Homo sapiens
  misc_RNA (1)...(19): siRNA sense strand
gaagaugcugcacaguuua

SEQ ID NO: 2158683 - RNA, 19 nt, Homo sapiens
  misc_RNA (1)...(19): siRNA sense strand
cgaugaagaugaugaugaa

SEQ ID NO: 2158684 - RNA, 19 nt, Homo sapiens
  misc_RNA (1)...(19): siRNA sense strand
ugaagaugaugaugaagaa

SEQ ID NO: 2158685 - RNA, 19 nt, Homo sapiens
  misc_RNA (1)...(19): siRNA sense strand
gacagaagcagaacgguuu

SEQ ID NO: 2158686 - RNA, 19 nt, Homo sapiens
  misc_RNA (1)...(19): siRNA sense strand
gaggcaggcugaguuauug

SEQ ID NO: 2158687 - RNA, 19 nt, Homo sapiens
  misc_RNA (1)...(19): siRNA sense strand
aacgggagauuauuuguuu

SEQ ID NO: 2158688 - RNA, 19 nt, Homo sapiens
  misc_RNA (1)...(19): siRNA sense strand
ggagacagccuuggaugaa

SEQ ID NO: 2158689 - RNA, 19 nt, Homo sapiens
  misc_RNA (1)...(19): siRNA sense strand
gagacagccuuggaugaaa

SEQ ID NO: 2158690 - RNA, 19 nt, Homo sapiens
  misc_RNA (1)...(19): siRNA sense strand
caaauguguucgagaaagu

SEQ ID NO: 2158691 - RNA, 19 nt, Homo sapiens
  misc_RNA (1)...(19): siRNA sense strand
cugcacaguuuacagauuu

SEQ ID NO: 2158692 - RNA, 19 nt, Homo sapiens
  misc_RNA (1)...(19): siRNA sense strand
gaucaucaaauccaacuau

SEQ ID NO: 2158693 - RNA, 19 nt, Homo sapiens
  misc_RNA (1)...(19): siRNA sense strand
cagaaagugauuacacaua

SEQ ID NO: 2158694 - RNA, 19 nt, Homo sapiens
  misc_RNA (1)...(19): siRNA sense strand
ggaauauaaucuugaugag

SEQ ID NO: 2158695 - RNA, 19 nt, Homo sapiens
  misc_RNA (1)...(19): siRNA sense strand
agaagaugcugagaaagaa

SEQ ID NO: 2158696 - RNA, 19 nt, Homo sapiens
  misc_RNA (1)...(19): siRNA sense strand
gagaaagugaucccaguga

SEQ ID NO: 2158697 - RNA, 19 nt, Homo sapiens
  misc_RNA (1)...(19): siRNA sense strand
agaugaagaugauguagau

SEQ ID NO: 2158698 - RNA, 19 nt, Homo sapiens
  misc_RNA (1)...(19): siRNA sense strand
cagcugcaccuuccaauga

SEQ ID NO: 2158699 - RNA, 19 nt, Homo sapiens
  misc_RNA (1)...(19): siRNA sense strand
cagcagaaaccuauaggaa

SEQ ID NO: 2158700 - RNA, 19 nt, Homo sapiens
  misc_RNA (1)...(19): siRNA sense strand
caucaaauccaacuaucaa

SEQ ID NO: 2158701 - RNA, 19 nt, Homo sapiens
  misc_RNA (1)...(19): siRNA sense strand
ggagaacugcgacacauca

SEQ ID NO: 2158702 - RNA, 19 nt, Homo sapiens
  misc_RNA (1)...(19): siRNA sense strand
gaggagaacugcgacacau

SEQ ID NO: 2158703 - RNA, 19 nt, Homo sapiens
  misc_RNA (1)...(19): siRNA sense strand
ccgggcagcugacuuguug

SEQ ID NO: 2158704 - RNA, 19 nt, Homo sapiens
  misc_RNA (1)...(19): siRNA sense strand
ugaagaagacugcccaaau

SEQ ID NO: 2158705 - RNA, 19 nt, Homo sapiens
  misc_RNA (1)...(19): siRNA sense strand
ucaggaacuugcgaacaua

SEQ ID NO: 2158706 - RNA, 19 nt, Homo sapiens
  misc_RNA (1)...(19): siRNA sense strand
cacaguaagugcaagauca

SEQ ID NO: 2158707 - RNA, 19 nt, Homo sapiens
  misc_RNA (1)...(19): siRNA sense strand
ccagugacccaaacaaaga

SEQ ID NO: 2158708 - RNA, 19 nt, Homo sapiens
  misc_RNA (1)...(19): siRNA sense strand
gcaacuggacgaugaagau

SEQ ID NO: 2158709 - RNA, 19 nt, Homo sapiens
  misc_RNA (1)...(19): siRNA sense strand
gacccuacguggauagaau

SEQ ID NO: 2158710 - RNA, 19 nt, Homo sapiens
  misc_RNA (1)...(19): siRNA sense strand
gccggagccucaacagaaa

SEQ ID NO: 2158711 - RNA, 19 nt, Homo sapiens
  misc_RNA (1)...(19): siRNA sense strand
gaagaugcugagaaagaaa

SEQ ID NO: 2158712 - RNA, 19 nt, Homo sapiens
  misc_RNA (1)...(19): siRNA sense strand
ucaaggguuagauuacuua

SEQ ID NO: 2158713 - RNA, 19 nt, Homo sapiens
  misc_RNA (1)...(19): siRNA sense strand
cagcuccuaugaacaauuc

SEQ ID NO: 2158714 - RNA, 19 nt, Homo sapiens
  misc_RNA (1)...(19): siRNA sense strand
caaaugcagaaagugauua

SEQ ID NO: 2158715 - RNA, 19 nt, Homo sapiens
  misc_RNA (1)...(19): siRNA sense strand
aagaagaugcugagaaaga

SEQ ID NO: 2158716 - RNA, 19 nt, Homo sapiens
  misc_RNA (1)...(19): siRNA sense strand
gaugaugcauaugugagaa

SEQ ID NO: 2158717 - RNA, 19 nt, Homo sapiens
  misc_RNA (1)...(19): siRNA sense strand
gcugcacaguuuacagauu

SEQ ID NO: 2158718 - RNA, 19 nt, Homo sapiens
  misc_RNA (1)...(19): siRNA sense strand
gagccucuuugauguacuu

SEQ ID NO: 2158719 - RNA, 19 nt, Homo sapiens
  misc_RNA (1)...(19): siRNA sense strand
cauagacccuacguggaua

SEQ ID NO: 2158720 - RNA, 19 nt, Homo sapiens
  misc_RNA (1)...(19): siRNA sense strand
ccaaauggacgacauaaaa

SEQ ID NO: 2158721 - RNA, 19 nt, Homo sapiens
  misc_RNA (1)...(19): siRNA sense strand
cggcauccuugguugaauu

SEQ ID NO: 2158722 - RNA, 19 nt, Homo sapiens
  misc_RNA (1)...(19): siRNA sense strand
ugcaggagauagaagaauu

SEQ ID NO: 2158723 - RNA, 19 nt, Homo sapiens
  misc_RNA (1)...(19): siRNA sense strand
ggagauuauuuguuugaac

SEQ ID NO: 2158724 - RNA, 19 nt, Homo sapiens
  misc_RNA (1)...(19): siRNA sense strand
cggcguguauggcauuuga

SEQ ID NO: 2158725 - RNA, 19 nt, Homo sapiens
  misc_RNA (1)...(19): siRNA sense strand
uagcagcuccuaugaacaa

SEQ ID NO: 2158726 - RNA, 19 nt, Homo sapiens
  misc_RNA (1)...(19): siRNA sense strand
gcaggagauagaagaauug

SEQ ID NO: 2158727 - RNA, 19 nt, Homo sapiens
  misc_RNA (1)...(19): siRNA sense strand
agacagccuuggaugaaau

SEQ ID NO: 2158728 - RNA, 19 nt, Homo sapiens
  misc_RNA (1)...(19): siRNA sense strand
caacgggagauuauuuguu

SEQ ID NO: 2158729 - RNA, 19 nt, Homo sapiens
  misc_RNA (1)...(19): siRNA sense strand
cagcugacuuguuggugaa

SEQ ID NO: 2158730 - RNA, 19 nt, Homo sapiens
  misc_RNA (1)...(19): siRNA sense strand
ccugaggaauauaaucuug

SEQ ID NO: 2158731 - RNA, 19 nt, Homo sapiens
  misc_RNA (1)...(19): siRNA sense strand
ugaccaggauggcgaauac

SEQ ID NO: 2158732 - RNA, 19 nt, Homo sapiens
  misc_RNA (1)...(19): siRNA sense strand
aauggccgguaucauguua

SEQ ID NO: 2158733 - RNA, 19 nt, Homo sapiens
  misc_RNA (1)...(19): siRNA sense strand
agaaagaagaugcugagaa

SEQ ID NO: 2158734 - RNA, 19 nt, Homo sapiens
  misc_RNA (1)...(19): siRNA sense strand
guuuacagauuuccugauc

SEQ ID NO: 2158735 - RNA, 19 nt, Homo sapiens
  misc_RNA (1)...(19): siRNA sense strand
ucaaauguguucgagaaag

SEQ ID NO: 2158736 - RNA, 19 nt, Homo sapiens
  misc_RNA (1)...(19): siRNA sense strand
cugcaaagguggauaucau

SEQ ID NO: 2158737 - RNA, 19 nt, Homo sapiens
  misc_RNA (1)...(19): siRNA sense strand
ccaaaugcagaaagugauu

SEQ ID NO: 2158738 - RNA, 19 nt, Homo sapiens
  misc_RNA (1)...(19): siRNA sense strand
uaaaaccaauggccauauu

SEQ ID NO: 2158739 - RNA, 19 nt, Homo sapiens
  misc_RNA (1)...(19): siRNA sense strand
guggauagaaucaccuaaa

SEQ ID NO: 2158740 - RNA, 19 nt, Homo sapiens
  misc_RNA (1)...(19): siRNA sense strand
ggaaaagauuuguugcaau

SEQ ID NO: 2158741 - RNA, 19 nt, Homo sapiens
  misc_RNA (1)...(19): siRNA sense strand
guguguggaugaugcauau

SEQ ID NO: 2158742 - RNA, 19 nt, Homo sapiens
  misc_RNA (1)...(19): siRNA sense strand
gccaccaucuccucaagug

SEQ ID NO: 2158743 - RNA, 19 nt, Homo sapiens
  misc_RNA (1)...(19): siRNA sense strand
uuggagaccucuucaaugg

SEQ ID NO: 2158744 - RNA, 19 nt, Homo sapiens
  misc_RNA (1)...(19): siRNA sense strand
cgaaguacuuggccaccau

SEQ ID NO: 2158745 - RNA, 19 nt, Homo sapiens
  misc_RNA (1)...(19): siRNA sense strand
auccuugguugaauucuua

SEQ ID NO: 2158746 - RNA, 19 nt, Homo sapiens
  misc_RNA (1)...(19): siRNA sense strand
uuagaaaugguuccagaaa

SEQ ID NO: 2158747 - RNA, 19 nt, Homo sapiens
  misc_RNA (1)...(19): siRNA sense strand
gcggcucugugcuuucuga

SEQ ID NO: 2158748 - RNA, 19 nt, Homo sapiens
  misc_RNA (1)...(19): siRNA sense strand
aauggugaauugccaaaug

SEQ ID NO: 2158749 - RNA, 19 nt, Homo sapiens
  misc_RNA (1)...(19): siRNA sense strand
guacggcuccacagcagaa

SEQ ID NO: 2158750 - RNA, 19 nt, Homo sapiens
  misc_RNA (1)...(19): siRNA sense strand
ggaugaugcauaugugaga

SEQ ID NO: 2158751 - RNA, 19 nt, Homo sapiens
  misc_RNA (1)...(19): siRNA sense strand
guaagugcaagaucauuca

SEQ ID NO: 2158752 - RNA, 19 nt, Homo sapiens
  misc_RNA (1)...(19): siRNA sense strand
gggagauuauuuguuugaa

SEQ ID NO: 2158753 - RNA, 19 nt, Homo sapiens
  misc_RNA (1)...(19): siRNA sense strand
gggaaaagauuuguugcaa

SEQ ID NO: 2158754 - RNA, 19 nt, Homo sapiens
  misc_RNA (1)...(19): siRNA sense strand
uaucaaggccucccaguac

SEQ ID NO: 2158755 - RNA, 19 nt, Homo sapiens
  misc_RNA (1)...(19): siRNA sense strand
ccuggagccucuuugaugu

SEQ ID NO: 2158756 - RNA, 19 nt, Homo sapiens
  misc_RNA (1)...(19): siRNA sense strand
ggaccaggaagagaaagaa

SEQ ID NO: 2158757 - RNA, 19 nt, Homo sapiens
  misc_RNA (1)...(19): siRNA sense strand
gggcacuucucuacugucu

SEQ ID NO: 2158758 - RNA, 19 nt, Homo sapiens
  misc_RNA (1)...(19): siRNA sense strand
guacguugugugaagagua

SEQ ID NO: 2158759 - RNA, 19 nt, Homo sapiens
  misc_RNA (1)...(19): siRNA sense strand
ccaguacguugugugaaga

SEQ ID NO: 2158760 - RNA, 19 nt, Homo sapiens
  misc_RNA (1)...(19): siRNA sense strand
cugcauggucuucgaagua

SEQ ID NO: 2158761 - RNA, 19 nt, Homo sapiens
  misc_RNA (1)...(19): siRNA sense strand
uggcaacgggagauuauuu

SEQ ID NO: 2158762 - RNA, 19 nt, Homo sapiens
  misc_RNA (1)...(19): siRNA sense strand
agucacaguucccagaguu

SEQ ID NO: 2158763 - RNA, 19 nt, Homo sapiens
  misc_RNA (1)...(19): siRNA sense strand
gcagaaagugauuacacau

SEQ ID NO: 2158764 - RNA, 19 nt, Homo sapiens
  misc_RNA (1)...(19): siRNA sense strand
aagaggacccugcggacua

SEQ ID NO: 2158765 - RNA, 19 nt, Homo sapiens
  misc_RNA (1)...(19): siRNA sense strand
gcauaugugagaagaaugg

SEQ ID NO: 2158766 - RNA, 19 nt, Homo sapiens
  misc_RNA (1)...(19): siRNA sense strand
ccucuucaauggccgguau

SEQ ID NO: 2158767 - RNA, 19 nt, Homo sapiens
  misc_RNA (1)...(19): siRNA sense strand
gcaacgggagauuauuugu

SEQ ID NO: 2158768 - RNA, 19 nt, Homo sapiens
  misc_RNA (1)...(19): siRNA sense strand
gaaagaagaugcugagaaa

SEQ ID NO: 2158769 - RNA, 19 nt, Homo sapiens
  misc_RNA (1)...(19): siRNA sense strand
gaagaagacugcccaaauc

SEQ ID NO: 2158770 - RNA, 19 nt, Homo sapiens
  misc_RNA (1)...(19): siRNA sense strand
gcgagaagcugaaaggaaa

SEQ ID NO: 2158771 - RNA, 19 nt, Homo sapiens
  misc_RNA (1)...(19): siRNA sense strand
gcucaaauguguucgagaa

SEQ ID NO: 2158772 - RNA, 19 nt, Homo sapiens
  misc_RNA (1)...(19): siRNA sense strand
gcaagaucauucauacuga

SEQ ID NO: 2158773 - RNA, 19 nt, Homo sapiens
  misc_RNA (1)...(19): siRNA sense strand
ugaagaugcugcacaguuu

SEQ ID NO: 2158774 - RNA, 19 nt, Homo sapiens
  misc_RNA (1)...(19): siRNA sense strand
gaagaggcaggcugaguua

SEQ ID NO: 2158775 - RNA, 19 nt, Homo sapiens
  misc_RNA (1)...(19): siRNA sense strand
gaucauucauacugacaua

SEQ ID NO: 2158776 - RNA, 19 nt, Homo sapiens
  misc_RNA (1)...(19): siRNA sense strand
gcccagaggugaaacuaaa

SEQ ID NO: 2158777 - RNA, 19 nt, Homo sapiens
  misc_RNA (1)...(19): siRNA sense strand
gaaaagauuuguugcaaug

SEQ ID NO: 2158778 - RNA, 19 nt, Homo sapiens
  misc_RNA (1)...(19): siRNA sense strand
guuguucucuggauccuua

SEQ ID NO: 2158779 - RNA, 19 nt, Homo sapiens
  misc_RNA (1)...(19): siRNA sense strand
gcagaaaccuauaggaaaa

SEQ ID NO: 2158780 - RNA, 19 nt, Homo sapiens
  misc_RNA (1)...(19): siRNA sense strand
ucugagggaucaccacuua

SEQ ID NO: 2158781 - RNA, 19 nt, Homo sapiens
  misc_RNA (1)...(19): siRNA sense strand
ucaaguggaucaucaaauc

SEQ ID NO: 2158782 - RNA, 19 nt, Homo sapiens
  misc_RNA (1)...(19): siRNA sense strand
gaagaugcugcacaguuua

SEQ ID NO: 2158783 - RNA, 19 nt, Homo sapiens
  misc_RNA (1)...(19): siRNA sense strand
cgaugaagaugaugaugaa

SEQ ID NO: 2158784 - RNA, 19 nt, Homo sapiens
  misc_RNA (1)...(19): siRNA sense strand
ugaagaugaugaugaagaa

SEQ ID NO: 2158785 - RNA, 19 nt, Homo sapiens
  misc_RNA (1)...(19): siRNA sense strand
gacagaagcagaacgguuu

SEQ ID NO: 2158786 - RNA, 19 nt, Homo sapiens
  misc_RNA (1)...(19): siRNA sense strand
gaggcaggcugaguuauug

SEQ ID NO: 2158787 - RNA, 19 nt, Homo sapiens
  misc_RNA (1)...(19): siRNA sense strand
aacgggagauuauuuguuu

SEQ ID NO: 2158788 - RNA, 19 nt, Homo sapiens
  misc_RNA (1)...(19): siRNA sense strand
ggagacagccuuggaugaa

SEQ ID NO: 2158789 - RNA, 19 nt, Homo sapiens
  misc_RNA (1)...(19): siRNA sense strand
gagacagccuuggaugaaa

SEQ ID NO: 2158790 - RNA, 19 nt, Homo sapiens
  misc_RNA (1)...(19): siRNA sense strand
caaauguguucgagaaagu

SEQ ID NO: 2158791 - RNA, 19 nt, Homo sapiens
  misc_RNA (1)...(19): siRNA sense strand
cugcacaguuuacagauuu

SEQ ID NO: 2158792 - RNA, 19 nt, Homo sapiens
  misc_RNA (1)...(19): siRNA sense strand
gaucaucaaauccaacuau

SEQ ID NO: 2158793 - RNA, 19 nt, Homo sapiens
  misc_RNA (1)...(19): siRNA sense strand
cagaaagugauuacacaua

SEQ ID NO: 2158794 - RNA, 19 nt, Homo sapiens
  misc_RNA (1)...(19): siRNA sense strand
ggaauauaaucuugaugag

SEQ ID NO: 2158795 - RNA, 19 nt, Homo sapiens
  misc_RNA (1)...(19): siRNA sense strand
agaagaugcugagaaagaa

SEQ ID NO: 2158796 - RNA, 19 nt, Homo sapiens
  misc_RNA (1)...(19): siRNA sense strand
gagaaagugaucccaguga

SEQ ID NO: 2158797 - RNA, 19 nt, Homo sapiens
  misc_RNA (1)...(19): siRNA sense strand
agaugaagaugauguagau

SEQ ID NO: 2158798 - RNA, 19 nt, Homo sapiens
  misc_RNA (1)...(19): siRNA sense strand
cagcugcaccuuccaauga

SEQ ID NO: 2158799 - RNA, 19 nt, Homo sapiens
  misc_RNA (1)...(19): siRNA sense strand
cagcagaaaccuauaggaa

SEQ ID NO: 2158800 - RNA, 19 nt, Homo sapiens
  misc_RNA (1)...(19): siRNA sense strand
caucaaauccaacuaucaa

SEQ ID NO: 2158801 - RNA, 19 nt, Homo sapiens
  misc_RNA (1)...(19): siRNA sense strand
ggagaacugcgacacauca

SEQ ID NO: 2158802 - RNA, 19 nt, Homo sapiens
  misc_RNA (1)...(19): siRNA sense strand
gaggagaacugcgacacau

SEQ ID NO: 2158803 - RNA, 19 nt, Homo sapiens
  misc_RNA (1)...(19): siRNA sense strand
ccgggcagcugacuuguug

SEQ ID NO: 2158804 - RNA, 19 nt, Homo sapiens
  misc_RNA (1)...(19): siRNA sense strand
ugaagaagacugcccaaau

SEQ ID NO: 2158805 - RNA, 19 nt, Homo sapiens
  misc_RNA (1)...(19): siRNA sense strand
ucaggaacuugcgaacaua

SEQ ID NO: 2158806 - RNA, 19 nt, Homo sapiens
  misc_RNA (1)...(19): siRNA sense strand
cacaguaagugcaagauca

SEQ ID NO: 2158807 - RNA, 19 nt, Homo sapiens
  misc_RNA (1)...(19): siRNA sense strand
ccagugacccaaacaaaga

SEQ ID NO: 2158808 - RNA, 19 nt, Homo sapiens
  misc_RNA (1)...(19): siRNA sense strand
gcaacuggacgaugaagau

SEQ ID NO: 2158809 - RNA, 19 nt, Homo sapiens
  misc_RNA (1)...(19): siRNA sense strand
gacccuacguggauagaau

SEQ ID NO: 2158810 - RNA, 19 nt, Homo sapiens
  misc_RNA (1)...(19): siRNA sense strand
gccggagccucaacagaaa

SEQ ID NO: 2158811 - RNA, 19 nt, Homo sapiens
  misc_RNA (1)...(19): siRNA sense strand
gaagaugcugagaaagaaa

SEQ ID NO: 2158812 - RNA, 19 nt, Homo sapiens
  misc_RNA (1)...(19): siRNA sense strand
ucaaggguuagauuacuua

SEQ ID NO: 2158813 - RNA, 19 nt, Homo sapiens
  misc_RNA (1)...(19): siRNA sense strand
cagcuccuaugaacaauuc

SEQ ID NO: 2158814 - RNA, 19 nt, Homo sapiens
  misc_RNA (1)...(19): siRNA sense strand
caaaugcagaaagugauua

SEQ ID NO: 2158815 - RNA, 19 nt, Homo sapiens
  misc_RNA (1)...(19): siRNA sense strand
aagaagaugcugagaaaga

SEQ ID NO: 2158816 - RNA, 19 nt, Homo sapiens
  misc_RNA (1)...(19): siRNA sense strand
gaugaugcauaugugagaa

SEQ ID NO: 2158817 - RNA, 19 nt, Homo sapiens
  misc_RNA (1)...(19): siRNA sense strand
gcugcacaguuuacagauu

SEQ ID NO: 2158818 - RNA, 19 nt, Homo sapiens
  misc_RNA (1)...(19): siRNA sense strand
gagccucuuugauguacuu

SEQ ID NO: 2158819 - RNA, 19 nt, Homo sapiens
  misc_RNA (1)...(19): siRNA sense strand
cauagacccuacguggaua

SEQ ID NO: 2158820 - RNA, 19 nt, Homo sapiens
  misc_RNA (1)...(19): siRNA sense strand
ccaaauggacgacauaaaa

SEQ ID NO: 2158821 - RNA, 19 nt, Homo sapiens
  misc_RNA (1)...(19): siRNA sense strand
cggcauccuugguugaauu

SEQ ID NO: 2158822 - RNA, 19 nt, Homo sapiens
  misc_RNA (1)...(19): siRNA sense strand
ugcaggagauagaagaauu

SEQ ID NO: 2158823 - RNA, 19 nt, Homo sapiens
  misc_RNA (1)...(19): siRNA sense strand
ggagauuauuuguuugaac

SEQ ID NO: 2158824 - RNA, 19 nt, Homo sapiens
  misc_RNA (1)...(19): siRNA sense strand
cggcguguauggcauuuga

SEQ ID NO: 2158825 - RNA, 19 nt, Homo sapiens
  misc_RNA (1)...(19): siRNA sense strand
uagcagcuccuaugaacaa

SEQ ID NO: 2158826 - RNA, 19 nt, Homo sapiens
  misc_RNA (1)...(19): siRNA sense strand
gcaggagauagaagaauug

SEQ ID NO: 2158827 - RNA, 19 nt, Homo sapiens
  misc_RNA (1)...(19): siRNA sense strand
agacagccuuggaugaaau

SEQ ID NO: 2158828 - RNA, 19 nt, Homo sapiens
  misc_RNA (1)...(19): siRNA sense strand
caacgggagauuauuuguu

SEQ ID NO: 2158829 - RNA, 19 nt, Homo sapiens
  misc_RNA (1)...(19): siRNA sense strand
cagcugacuuguuggugaa

SEQ ID NO: 2158830 - RNA, 19 nt, Homo sapiens
  misc_RNA (1)...(19): siRNA sense strand
ccugaggaauauaaucuug

SEQ ID NO: 2158831 - RNA, 19 nt, Homo sapiens
  misc_RNA (1)...(19): siRNA sense strand
ugaccaggauggcgaauac

SEQ ID NO: 2158832 - RNA, 19 nt, Homo sapiens
  misc_RNA (1)...(19): siRNA sense strand
aauggccgguaucauguua

SEQ ID NO: 2158833 - RNA, 19 nt, Homo sapiens
  misc_RNA (1)...(19): siRNA sense strand
agaaagaagaugcugagaa

SEQ ID NO: 2158834 - RNA, 19 nt, Homo sapiens
  misc_RNA (1)...(19): siRNA sense strand
guuuacagauuuccugauc

SEQ ID NO: 2158835 - RNA, 19 nt, Homo sapiens
  misc_RNA (1)...(19): siRNA sense strand
ucaaauguguucgagaaag

SEQ ID NO: 2158836 - RNA, 19 nt, Homo sapiens
  misc_RNA (1)...(19): siRNA sense strand
cugcaaagguggauaucau

SEQ ID NO: 2158837 - RNA, 19 nt, Homo sapiens
  misc_RNA (1)...(19): siRNA sense strand
ccaaaugcagaaagugauu

SEQ ID NO: 2158838 - RNA, 19 nt, Homo sapiens
  misc_RNA (1)...(19): siRNA sense strand
uaaaaccaauggccauauu

SEQ ID NO: 2158839 - RNA, 19 nt, Homo sapiens
  misc_RNA (1)...(19): siRNA sense strand
guggauagaaucaccuaaa

SEQ ID NO: 2158840 - RNA, 19 nt, Homo sapiens
  misc_RNA (1)...(19): siRNA sense strand
ggaaaagauuuguugcaau

SEQ ID NO: 2158841 - RNA, 19 nt, Homo sapiens
  misc_RNA (1)...(19): siRNA sense strand
guguguggaugaugcauau

SEQ ID NO: 2158842 - RNA, 19 nt, Homo sapiens
  misc_RNA (1)...(19): siRNA sense strand
gccaccaucuccucaagug

SEQ ID NO: 2158843 - RNA, 19 nt, Homo sapiens
  misc_RNA (1)...(19): siRNA sense strand
uuggagaccucuucaaugg

SEQ ID NO: 2158844 - RNA, 19 nt, Homo sapiens
  misc_RNA (1)...(19): siRNA sense strand
cgaaguacuuggccaccau

SEQ ID NO: 2158845 - RNA, 19 nt, Homo sapiens
  misc_RNA (1)...(19): siRNA sense strand
auccuugguugaauucuua

SEQ ID NO: 2158846 - RNA, 19 nt, Homo sapiens
  misc_RNA (1)...(19): siRNA sense strand
uuagaaaugguuccagaaa

SEQ ID NO: 2158847 - RNA, 19 nt, Homo sapiens
  misc_RNA (1)...(19): siRNA sense strand
gcggcucugugcuuucuga

SEQ ID NO: 2158848 - RNA, 19 nt, Homo sapiens
  misc_RNA (1)...(19): siRNA sense strand
aauggugaauugccaaaug

SEQ ID NO: 2158849 - RNA, 19 nt, Homo sapiens
  misc_RNA (1)...(19): siRNA sense strand
guacggcuccacagcagaa

SEQ ID NO: 2158850 - RNA, 19 nt, Homo sapiens
  misc_RNA (1)...(19): siRNA sense strand
ggaugaugcauaugugaga

SEQ ID NO: 2158851 - RNA, 19 nt, Homo sapiens
  misc_RNA (1)...(19): siRNA sense strand
guaagugcaagaucauuca

SEQ ID NO: 2158852 - RNA, 19 nt, Homo sapiens
  misc_RNA (1)...(19): siRNA sense strand
gggagauuauuuguuugaa

SEQ ID NO: 2158853 - RNA, 19 nt, Homo sapiens
  misc_RNA (1)...(19): siRNA sense strand
gggaaaagauuuguugcaa

SEQ ID NO: 2158854 - RNA, 19 nt, Homo sapiens
  misc_RNA (1)...(19): siRNA sense strand
uaucaaggccucccaguac

SEQ ID NO: 2158855 - RNA, 19 nt, Homo sapiens
  misc_RNA (1)...(19): siRNA sense strand
ccuggagccucuuugaugu

SEQ ID NO: 2158856 - RNA, 19 nt, Homo sapiens
  misc_RNA (1)...(19): siRNA sense strand
ggaccaggaagagaaagaa

SEQ ID NO: 2158857 - RNA, 19 nt, Homo sapiens
  misc_RNA (1)...(19): siRNA sense strand
gggcacuucucuacugucu

SEQ ID NO: 2158858 - RNA, 19 nt, Homo sapiens
  misc_RNA (1)...(19): siRNA sense strand
guacguugugugaagagua

SEQ ID NO: 2158859 - RNA, 19 nt, Homo sapiens
  misc_RNA (1)...(19): siRNA sense strand
ccaguacguugugugaaga

SEQ ID NO: 2158860 - RNA, 19 nt, Homo sapiens
  misc_RNA (1)...(19): siRNA sense strand
cugcauggucuucgaagua

SEQ ID NO: 2158861 - RNA, 19 nt, Homo sapiens
  misc_RNA (1)...(19): siRNA sense strand
uggcaacgggagauuauuu

SEQ ID NO: 2158862 - RNA, 19 nt, Homo sapiens
  misc_RNA (1)...(19): siRNA sense strand
agucacaguucccagaguu

SEQ ID NO: 2158863 - RNA, 19 nt, Homo sapiens
  misc_RNA (1)...(19): siRNA sense strand
gcagaaagugauuacacau

SEQ ID NO: 2158864 - RNA, 19 nt, Homo sapiens
  misc_RNA (1)...(19): siRNA sense strand
aagaggacccugcggacua

SEQ ID NO: 2158865 - RNA, 19 nt, Homo sapiens
  misc_RNA (1)...(19): siRNA sense strand
gcauaugugagaagaaugg

SEQ ID NO: 2158866 - RNA, 19 nt, Homo sapiens
  misc_RNA (1)...(19): siRNA sense strand
ccucuucaauggccgguau

SEQ ID NO: 2158867 - RNA, 19 nt, Homo sapiens
  misc_RNA (1)...(19): siRNA sense strand
gcaacgggagauuauuugu

SEQ ID NO: 2158868 - RNA, 19 nt, Homo sapiens
  misc_RNA (1)...(19): siRNA sense strand
gaaagaagaugcugagaaa

SEQ ID NO: 2158869 - RNA, 19 nt, Homo sapiens
  misc_RNA (1)...(19): siRNA sense strand
gaagaagacugcccaaauc

SEQ ID NO: 2158870 - RNA, 19 nt, Homo sapiens
  misc_RNA (1)...(19): siRNA sense strand
gcgagaagcugaaaggaaa

SEQ ID NO: 2158871 - RNA, 19 nt, Homo sapiens
  misc_RNA (1)...(19): siRNA sense strand
gcucaaauguguucgagaa

SEQ ID NO: 2158872 - RNA, 19 nt, Homo sapiens
  misc_RNA (1)...(19): siRNA sense strand
gcaagaucauucauacuga

SEQ ID NO: 2158873 - RNA, 19 nt, Homo sapiens
  misc_RNA (1)...(19): siRNA sense strand
ugaagaugcugcacaguuu

SEQ ID NO: 2158874 - RNA, 19 nt, Homo sapiens
  misc_RNA (1)...(19): siRNA sense strand
gaagaggcaggcugaguua

SEQ ID NO: 2158875 - RNA, 19 nt, Homo sapiens
  misc_RNA (1)...(19): siRNA sense strand
gaucauucauacugacaua

SEQ ID NO: 2158876 - RNA, 19 nt, Homo sapiens
  misc_RNA (1)...(19): siRNA sense strand
gcccagaggugaaacuaaa

SEQ ID NO: 2158877 - RNA, 19 nt, Homo sapiens
  misc_RNA (1)...(19): siRNA sense strand
gaaaagauuuguugcaaug

SEQ ID NO: 2158878 - RNA, 19 nt, Homo sapiens
  misc_RNA (1)...(19): siRNA sense strand
guuguucucuggauccuua

SEQ ID NO: 2158879 - RNA, 19 nt, Homo sapiens
  misc_RNA (1)...(19): siRNA sense strand
gcagaaaccuauaggaaaa

SEQ ID NO: 2158880 - RNA, 19 nt, Homo sapiens
  misc_RNA (1)...(19): siRNA sense strand
ucugagggaucaccacuua

SEQ ID NO: 2158881 - RNA, 19 nt, Homo sapiens
  misc_RNA (1)...(19): siRNA sense strand
ucaaguggaucaucaaauc

SEQ ID NO: 2158882 - RNA, 19 nt, Homo sapiens
  misc_RNA (1)...(19): siRNA sense strand
gaagaugcugcacaguuua

SEQ ID NO: 2158883 - RNA, 19 nt, Homo sapiens
  misc_RNA (1)...(19): siRNA sense strand
cgaugaagaugaugaugaa

SEQ ID NO: 2158884 - RNA, 19 nt, Homo sapiens
  misc_RNA (1)...(19): siRNA sense strand
ugaagaugaugaugaagaa

SEQ ID NO: 2158885 - RNA, 19 nt, Homo sapiens
  misc_RNA (1)...(19): siRNA sense strand
gacagaagcagaacgguuu

SEQ ID NO: 2158886 - RNA, 19 nt, Homo sapiens
  misc_RNA (1)...(19): siRNA sense strand
gaggcaggcugaguuauug

SEQ ID NO: 2158887 - RNA, 19 nt, Homo sapiens
  misc_RNA (1)...(19): siRNA sense strand
aacgggagauuauuuguuu

SEQ ID NO: 2158888 - RNA, 19 nt, Homo sapiens
  misc_RNA (1)...(19): siRNA sense strand
ggagacagccuuggaugaa

SEQ ID NO: 2158889 - RNA, 19 nt, Homo sapiens
  misc_RNA (1)...(19): siRNA sense strand
gagacagccuuggaugaaa

SEQ ID NO: 2158890 - RNA, 19 nt, Homo sapiens
  misc_RNA (1)...(19): siRNA sense strand
caaauguguucgagaaagu

SEQ ID NO: 2158891 - RNA, 19 nt, Homo sapiens
  misc_RNA (1)...(19): siRNA sense strand
cugcacaguuuacagauuu

SEQ ID NO: 2158892 - RNA, 19 nt, Homo sapiens
  misc_RNA (1)...(19): siRNA sense strand
gaucaucaaauccaacuau

SEQ ID NO: 2158893 - RNA, 19 nt, Homo sapiens
  misc_RNA (1)...(19): siRNA sense strand
cagaaagugauuacacaua

SEQ ID NO: 2158894 - RNA, 19 nt, Homo sapiens
  misc_RNA (1)...(19): siRNA sense strand
ggaauauaaucuugaugag

SEQ ID NO: 2158895 - RNA, 19 nt, Homo sapiens
  misc_RNA (1)...(19): siRNA sense strand
agaagaugcugagaaagaa

SEQ ID NO: 2158896 - RNA, 19 nt, Homo sapiens
  misc_RNA (1)...(19): siRNA sense strand
gagaaagugaucccaguga

SEQ ID NO: 2158897 - RNA, 19 nt, Homo sapiens
  misc_RNA (1)...(19): siRNA sense strand
agaugaagaugauguagau

SEQ ID NO: 2158898 - RNA, 19 nt, Homo sapiens
  misc_RNA (1)...(19): siRNA sense strand
cagcugcaccuuccaauga

SEQ ID NO: 2158899 - RNA, 19 nt, Homo sapiens
  misc_RNA (1)...(19): siRNA sense strand
cagcagaaaccuauaggaa

SEQ ID NO: 2158900 - RNA, 19 nt, Homo sapiens
  misc_RNA (1)...(19): siRNA sense strand
caucaaauccaacuaucaa

SEQ ID NO: 2158901 - RNA, 19 nt, Homo sapiens
  misc_RNA (1)...(19): siRNA sense strand
ggagaacugcgacacauca

SEQ ID NO: 2158902 - RNA, 19 nt, Homo sapiens
  misc_RNA (1)...(19): siRNA sense strand
gaggagaacugcgacacau

SEQ ID NO: 2158903 - RNA, 19 nt, Homo sapiens
  misc_RNA (1)...(19): siRNA sense strand
ccgggcagcugacuuguug

SEQ ID NO: 2158904 - RNA, 19 nt, Homo sapiens
  misc_RNA (1)...(19): siRNA sense strand
ugaagaagacugcccaaau

SEQ ID NO: 2158905 - RNA, 19 nt, Homo sapiens
  misc_RNA (1)...(19): siRNA sense strand
ucaggaacuugcgaacaua

SEQ ID NO: 2158906 - RNA, 19 nt, Homo sapiens
  misc_RNA (1)...(19): siRNA sense strand
cacaguaagugcaagauca

SEQ ID NO: 2158907 - RNA, 19 nt, Homo sapiens
  misc_RNA (1)...(19): siRNA sense strand
ccagugacccaaacaaaga

SEQ ID NO: 2158908 - RNA, 19 nt, Homo sapiens
  misc_RNA (1)...(19): siRNA sense strand
gcaacuggacgaugaagau

SEQ ID NO: 2158909 - RNA, 19 nt, Homo sapiens
  misc_RNA (1)...(19): siRNA sense strand
gacccuacguggauagaau

SEQ ID NO: 2158910 - RNA, 19 nt, Homo sapiens
  misc_RNA (1)...(19): siRNA sense strand
gccggagccucaacagaaa

SEQ ID NO: 2158911 - RNA, 19 nt, Homo sapiens
  misc_RNA (1)...(19): siRNA sense strand
gaagaugcugagaaagaaa

SEQ ID NO: 2158912 - RNA, 19 nt, Homo sapiens
  misc_RNA (1)...(19): siRNA sense strand
ucaaggguuagauuacuua

SEQ ID NO: 2158913 - RNA, 19 nt, Homo sapiens
  misc_RNA (1)...(19): siRNA sense strand
cagcuccuaugaacaauuc

SEQ ID NO: 2158914 - RNA, 19 nt, Homo sapiens
  misc_RNA (1)...(19): siRNA sense strand
caaaugcagaaagugauua

SEQ ID NO: 2158915 - RNA, 19 nt, Homo sapiens
  misc_RNA (1)...(19): siRNA sense strand
aagaagaugcugagaaaga

SEQ ID NO: 2158916 - RNA, 19 nt, Homo sapiens
  misc_RNA (1)...(19): siRNA sense strand
gaugaugcauaugugagaa

SEQ ID NO: 2158917 - RNA, 19 nt, Homo sapiens
  misc_RNA (1)...(19): siRNA sense strand
gcugcacaguuuacagauu

SEQ ID NO: 2158918 - RNA, 19 nt, Homo sapiens
  misc_RNA (1)...(19): siRNA sense strand
gagccucuuugauguacuu

SEQ ID NO: 2158919 - RNA, 19 nt, Homo sapiens
  misc_RNA (1)...(19): siRNA sense strand
cauagacccuacguggaua

SEQ ID NO: 2158920 - RNA, 19 nt, Homo sapiens
  misc_RNA (1)...(19): siRNA sense strand
ccaaauggacgacauaaaa

SEQ ID NO: 2158921 - RNA, 19 nt, Homo sapiens
  misc_RNA (1)...(19): siRNA sense strand
cggcauccuugguugaauu

SEQ ID NO: 2158922 - RNA, 19 nt, Homo sapiens
  misc_RNA (1)...(19): siRNA sense strand
ugcaggagauagaagaauu

SEQ ID NO: 2158923 - RNA, 19 nt, Homo sapiens
  misc_RNA (1)...(19): siRNA sense strand
ggagauuauuuguuugaac

SEQ ID NO: 2158924 - RNA, 19 nt, Homo sapiens
  misc_RNA (1)...(19): siRNA sense strand
cggcguguauggcauuuga

SEQ ID NO: 2158925 - RNA, 19 nt, Homo sapiens
  misc_RNA (1)...(19): siRNA sense strand
uagcagcuccuaugaacaa

SEQ ID NO: 2158926 - RNA, 19 nt, Homo sapiens
  misc_RNA (1)...(19): siRNA sense strand
gcaggagauagaagaauug

SEQ ID NO: 2158927 - RNA, 19 nt, Homo sapiens
  misc_RNA (1)...(19): siRNA sense strand
agacagccuuggaugaaau

SEQ ID NO: 2158928 - RNA, 19 nt, Homo sapiens
  misc_RNA (1)...(19): siRNA sense strand
caacgggagauuauuuguu

SEQ ID NO: 2158929 - RNA, 19 nt, Homo sapiens
  misc_RNA (1)...(19): siRNA sense strand
cagcugacuuguuggugaa

SEQ ID NO: 2158930 - RNA, 19 nt, Homo sapiens
  misc_RNA (1)...(19): siRNA sense strand
ccugaggaauauaaucuug

SEQ ID NO: 2158931 - RNA, 19 nt, Homo sapiens
  misc_RNA (1)...(19): siRNA sense strand
ugaccaggauggcgaauac

SEQ ID NO: 2158932 - RNA, 19 nt, Homo sapiens
  misc_RNA (1)...(19): siRNA sense strand
aauggccgguaucauguua

SEQ ID NO: 2158933 - RNA, 19 nt, Homo sapiens
  misc_RNA (1)...(19): siRNA sense strand
agaaagaagaugcugagaa

SEQ ID NO: 2158934 - RNA, 19 nt, Homo sapiens
  misc_RNA (1)...(19): siRNA sense strand
guuuacagauuuccugauc

SEQ ID NO: 2158935 - RNA, 19 nt, Homo sapiens
  misc_RNA (1)...(19): siRNA sense strand
ucaaauguguucgagaaag

SEQ ID NO: 2158936 - RNA, 19 nt, Homo sapiens
  misc_RNA (1)...(19): siRNA sense strand
cugcaaagguggauaucau

SEQ ID NO: 2158937 - RNA, 19 nt, Homo sapiens
  misc_RNA (1)...(19): siRNA sense strand
ccaaaugcagaaagugauu

SEQ ID NO: 2158938 - RNA, 19 nt, Homo sapiens
  misc_RNA (1)...(19): siRNA sense strand
uaaaaccaauggccauauu

SEQ ID NO: 2158939 - RNA, 19 nt, Homo sapiens
  misc_RNA (1)...(19): siRNA sense strand
guggauagaaucaccuaaa

SEQ ID NO: 2158940 - RNA, 19 nt, Homo sapiens
  misc_RNA (1)...(19): siRNA sense strand
ggaaaagauuuguugcaau

SEQ ID NO: 2158941 - RNA, 19 nt, Homo sapiens
  misc_RNA (1)...(19): siRNA sense strand
guguguggaugaugcauau

SEQ ID NO: 2158942 - RNA, 19 nt, Homo sapiens
  misc_RNA (1)...(19): siRNA sense strand
gccaccaucuccucaagug

SEQ ID NO: 2158943 - RNA, 19 nt, Homo sapiens
  misc_RNA (1)...(19): siRNA sense strand
uuggagaccucuucaaugg

SEQ ID NO: 2158944 - RNA, 19 nt, Homo sapiens
  misc_RNA (1)...(19): siRNA sense strand
cgaaguacuuggccaccau

SEQ ID NO: 2158945 - RNA, 19 nt, Homo sapiens
  misc_RNA (1)...(19): siRNA sense strand
auccuugguugaauucuua

SEQ ID NO: 2158946 - RNA, 19 nt, Homo sapiens
  misc_RNA (1)...(19): siRNA sense strand
uuagaaaugguuccagaaa

SEQ ID NO: 2158947 - RNA, 19 nt, Homo sapiens
  misc_RNA (1)...(19): siRNA sense strand
gcggcucugugcuuucuga

SEQ ID NO: 2158948 - RNA, 19 nt, Homo sapiens
  misc_RNA (1)...(19): siRNA sense strand
aauggugaauugccaaaug

SEQ ID NO: 2158949 - RNA, 19 nt, Homo sapiens
  misc_RNA (1)...(19): siRNA sense strand
guacggcuccacagcagaa

SEQ ID NO: 2158950 - RNA, 19 nt, Homo sapiens
  misc_RNA (1)...(19): siRNA sense strand
ggaugaugcauaugugaga

SEQ ID NO: 2158951 - RNA, 19 nt, Homo sapiens
  misc_RNA (1)...(19): siRNA sense strand
guaagugcaagaucauuca

SEQ ID NO: 2158952 - RNA, 19 nt, Homo sapiens
  misc_RNA (1)...(19): siRNA sense strand
gggagauuauuuguuugaa

SEQ ID NO: 2158953 - RNA, 19 nt, Homo sapiens
  misc_RNA (1)...(19): siRNA sense strand
gggaaaagauuuguugcaa

SEQ ID NO: 2158954 - RNA, 19 nt, Homo sapiens
  misc_RNA (1)...(19): siRNA sense strand
uaucaaggccucccaguac

SEQ ID NO: 2158955 - RNA, 19 nt, Homo sapiens
  misc_RNA (1)...(19): siRNA sense strand
ccuggagccucuuugaugu

SEQ ID NO: 2158956 - RNA, 19 nt, Homo sapiens
  misc_RNA (1)...(19): siRNA sense strand
ggaccaggaagagaaagaa

SEQ ID NO: 2158957 - RNA, 19 nt, Homo sapiens
  misc_RNA (1)...(19): siRNA sense strand
gggcacuucucuacugucu

SEQ ID NO: 2158958 - RNA, 19 nt, Homo sapiens
  misc_RNA (1)...(19): siRNA sense strand
guacguugugugaagagua

SEQ ID NO: 2158959 - RNA, 19 nt, Homo sapiens
  misc_RNA (1)...(19): siRNA sense strand
ccaguacguugugugaaga

SEQ ID NO: 2158960 - RNA, 19 nt, Homo sapiens
  misc_RNA (1)...(19): siRNA sense strand
cugcauggucuucgaagua

SEQ ID NO: 2158961 - RNA, 19 nt, Homo sapiens
  misc_RNA (1)...(19): siRNA sense strand
uggcaacgggagauuauuu

SEQ ID NO: 2158962 - RNA, 19 nt, Homo sapiens
  misc_RNA (1)...(19): siRNA sense strand
agucacaguucccagaguu

SEQ ID NO: 2158963 - RNA, 19 nt, Homo sapiens
  misc_RNA (1)...(19): siRNA sense strand
gcagaaagugauuacacau

SEQ ID NO: 2158964 - RNA, 19 nt, Homo sapiens
  misc_RNA (1)...(19): siRNA sense strand
aagaggacccugcggacua

SEQ ID NO: 2158965 - RNA, 19 nt, Homo sapiens
  misc_RNA (1)...(19): siRNA sense strand
gcauaugugagaagaaugg

SEQ ID NO: 2158966 - RNA, 19 nt, Homo sapiens
  misc_RNA (1)...(19): siRNA sense strand
ccucuucaauggccgguau

SEQ ID NO: 2158967 - RNA, 19 nt, Homo sapiens
  misc_RNA (1)...(19): siRNA sense strand
gcaacgggagauuauuugu

SEQ ID NO: 2158968 - RNA, 19 nt, Homo sapiens
  misc_RNA (1)...(19): siRNA sense strand
gaaagaagaugcugagaaa

SEQ ID NO: 2158969 - RNA, 19 nt, Homo sapiens
  misc_RNA (1)...(19): siRNA sense strand
gaagaagacugcccaaauc

SEQ ID NO: 2158970 - RNA, 19 nt, Homo sapiens
  misc_RNA (1)...(19): siRNA sense strand
gcgagaagcugaaaggaaa

SEQ ID NO: 2158971 - RNA, 19 nt, Homo sapiens
  misc_RNA (1)...(19): siRNA sense strand
gcucaaauguguucgagaa

SEQ ID NO: 2158972 - RNA, 19 nt, Homo sapiens
  misc_RNA (1)...(19): siRNA sense strand
gcaagaucauucauacuga

SEQ ID NO: 2158973 - RNA, 19 nt, Homo sapiens
  misc_RNA (1)...(19): siRNA sense strand
ugaagaugcugcacaguuu

SEQ ID NO: 2158974 - RNA, 19 nt, Homo sapiens
  misc_RNA (1)...(19): siRNA sense strand
gaagaggcaggcugaguua

SEQ ID NO: 2158975 - RNA, 19 nt, Homo sapiens
  misc_RNA (1)...(19): siRNA sense strand
gaucauucauacugacaua

SEQ ID NO: 2158976 - RNA, 19 nt, Homo sapiens
  misc_RNA (1)...(19): siRNA sense strand
gcccagaggugaaacuaaa

SEQ ID NO: 2158977 - RNA, 19 nt, Homo sapiens
  misc_RNA (1)...(19): siRNA sense strand
gaaaagauuuguugcaaug

SEQ ID NO: 2158978 - RNA, 19 nt, Homo sapiens
  misc_RNA (1)...(19): siRNA sense strand
guuguucucuggauccuua

SEQ ID NO: 2158979 - RNA, 19 nt, Homo sapiens
  misc_RNA (1)...(19): siRNA sense strand
gcagaaaccuauaggaaaa

SEQ ID NO: 2158980 - RNA, 19 nt, Homo sapiens
  misc_RNA (1)...(19): siRNA sense strand
ucugagggaucaccacuua

SEQ ID NO: 2158981 - RNA, 19 nt, Homo sapiens
  misc_RNA (1)...(19): siRNA sense strand
ucaaguggaucaucaaauc

SEQ ID NO: 2158982 - RNA, 19 nt, Homo sapiens
  misc_RNA (1)...(19): siRNA sense strand
gaagaugcugcacaguuua

SEQ ID NO: 2158983 - RNA, 19 nt, Homo sapiens
  misc_RNA (1)...(19): siRNA sense strand
cgaugaagaugaugaugaa

SEQ ID NO: 2158984 - RNA, 19 nt, Homo sapiens
  misc_RNA (1)...(19): siRNA sense strand
ugaagaugaugaugaagaa

SEQ ID NO: 2158985 - RNA, 19 nt, Homo sapiens
  misc_RNA (1)...(19): siRNA sense strand
gacagaagcagaacgguuu

SEQ ID NO: 2158986 - RNA, 19 nt, Homo sapiens
  misc_RNA (1)...(19): siRNA sense strand
gaggcaggcugaguuauug

SEQ ID NO: 2158987 - RNA, 19 nt, Homo sapiens
  misc_RNA (1)...(19): siRNA sense strand
aacgggagauuauuuguuu

SEQ ID NO: 2158988 - RNA, 19 nt, Homo sapiens
  misc_RNA (1)...(19): siRNA sense strand
gagacagccuuggaugaaa

SEQ ID NO: 2158989 - RNA, 19 nt, Homo sapiens
  misc_RNA (1)...(19): siRNA sense strand
ggagacagccuuggaugaa

SEQ ID NO: 2158990 - RNA, 19 nt, Homo sapiens
  misc_RNA (1)...(19): siRNA sense strand
caaauguguucgagaaagu

SEQ ID NO: 2158991 - RNA, 19 nt, Homo sapiens
  misc_RNA (1)...(19): siRNA sense strand
cugcacaguuuacagauuu

SEQ ID NO: 2158992 - RNA, 19 nt, Homo sapiens
  misc_RNA (1)...(19): siRNA sense strand
gaucaucaaauccaacuau

SEQ ID NO: 2158993 - RNA, 19 nt, Homo sapiens
  misc_RNA (1)...(19): siRNA sense strand
cagaaagugauuacacaua

SEQ ID NO: 2158994 - RNA, 19 nt, Homo sapiens
  misc_RNA (1)...(19): siRNA sense strand
ggaauauaaucuugaugag

SEQ ID NO: 2158995 - RNA, 19 nt, Homo sapiens
  misc_RNA (1)...(19): siRNA sense strand
agaagaugcugagaaagaa

SEQ ID NO: 2158996 - RNA, 19 nt, Homo sapiens
  misc_RNA (1)...(19): siRNA sense strand
gagaaagugaucccaguga

SEQ ID NO: 2158997 - RNA, 19 nt, Homo sapiens
  misc_RNA (1)...(19): siRNA sense strand
agaugaagaugauguagau

SEQ ID NO: 2158998 - RNA, 19 nt, Homo sapiens
  misc_RNA (1)...(19): siRNA sense strand
cagcugcaccuuccaauga

SEQ ID NO: 2158999 - RNA, 19 nt, Homo sapiens
  misc_RNA (1)...(19): siRNA sense strand
cagcagaaaccuauaggaa

SEQ ID NO: 2159000 - RNA, 19 nt, Homo sapiens
  misc_RNA (1)...(19): siRNA sense strand
caucaaauccaacuaucaa

SEQ ID NO: 2159001 - RNA, 19 nt, Homo sapiens
  misc_RNA (1)...(19): siRNA sense strand
ggagaacugcgacacauca

SEQ ID NO: 2159002 - RNA, 19 nt, Homo sapiens
  misc_RNA (1)...(19): siRNA sense strand
gaggagaacugcgacacau

SEQ ID NO: 2159003 - RNA, 19 nt, Homo sapiens
  misc_RNA (1)...(19): siRNA sense strand
ccgggcagcugacuuguug

SEQ ID NO: 2159004 - RNA, 19 nt, Homo sapiens
  misc_RNA (1)...(19): siRNA sense strand
ugaagaagacugcccaaau

SEQ ID NO: 2159005 - RNA, 19 nt, Homo sapiens
  misc_RNA (1)...(19): siRNA sense strand
ucaggaacuugcgaacaua

SEQ ID NO: 2159006 - RNA, 19 nt, Homo sapiens
  misc_RNA (1)...(19): siRNA sense strand
cacaguaagugcaagauca

SEQ ID NO: 2159007 - RNA, 19 nt, Homo sapiens
  misc_RNA (1)...(19): siRNA sense strand
ccagugacccaaacaaaga

SEQ ID NO: 2159008 - RNA, 19 nt, Homo sapiens
  misc_RNA (1)...(19): siRNA sense strand
gcaacuggacgaugaagau

SEQ ID NO: 2159009 - RNA, 19 nt, Homo sapiens
  misc_RNA (1)...(19): siRNA sense strand
gacccuacguggauagaau

SEQ ID NO: 2159010 - RNA, 19 nt, Homo sapiens
  misc_RNA (1)...(19): siRNA sense strand
gaagaugcugagaaagaaa

SEQ ID NO: 2159011 - RNA, 19 nt, Homo sapiens
  misc_RNA (1)...(19): siRNA sense strand
ucaaggguuagauuacuua

SEQ ID NO: 2159012 - RNA, 19 nt, Homo sapiens
  misc_RNA (1)...(19): siRNA sense strand
cagcuccuaugaacaauuc

SEQ ID NO: 2159013 - RNA, 19 nt, Homo sapiens
  misc_RNA (1)...(19): siRNA sense strand
caaaugcagaaagugauua

SEQ ID NO: 2159014 - RNA, 19 nt, Homo sapiens
  misc_RNA (1)...(19): siRNA sense strand
aagaagaugcugagaaaga

SEQ ID NO: 2159015 - RNA, 19 nt, Homo sapiens
  misc_RNA (1)...(19): siRNA sense strand
gaugaugcauaugugagaa

SEQ ID NO: 2159016 - RNA, 19 nt, Homo sapiens
  misc_RNA (1)...(19): siRNA sense strand
gcugcacaguuuacagauu

SEQ ID NO: 2159017 - RNA, 19 nt, Homo sapiens
  misc_RNA (1)...(19): siRNA sense strand
gagccucuuugauguacuu

SEQ ID NO: 2159018 - RNA, 19 nt, Homo sapiens
  misc_RNA (1)...(19): siRNA sense strand
cauagacccuacguggaua

SEQ ID NO: 2159019 - RNA, 19 nt, Homo sapiens
  misc_RNA (1)...(19): siRNA sense strand
ccaaauggacgacauaaaa

SEQ ID NO: 2159020 - RNA, 19 nt, Homo sapiens
  misc_RNA (1)...(19): siRNA sense strand
cggcauccuugguugaauu

SEQ ID NO: 2159021 - RNA, 19 nt, Homo sapiens
  misc_RNA (1)...(19): siRNA sense strand
ugcaggagauagaagaauu

SEQ ID NO: 2159022 - RNA, 19 nt, Homo sapiens
  misc_RNA (1)...(19): siRNA sense strand
ggagauuauuuguuugaac

SEQ ID NO: 2159023 - RNA, 19 nt, Homo sapiens
  misc_RNA (1)...(19): siRNA sense strand
cggcguguauggcauuuga

SEQ ID NO: 2159024 - RNA, 19 nt, Homo sapiens
  misc_RNA (1)...(19): siRNA sense strand
uagcagcuccuaugaacaa

SEQ ID NO: 2159025 - RNA, 19 nt, Homo sapiens
  misc_RNA (1)...(19): siRNA sense strand
gcaggagauagaagaauug

SEQ ID NO: 2159026 - RNA, 19 nt, Homo sapiens
  misc_RNA (1)...(19): siRNA sense strand
ugaccaggauggcgaauac

SEQ ID NO: 2159027 - RNA, 19 nt, Homo sapiens
  misc_RNA (1)...(19): siRNA sense strand
agacagccuuggaugaaau

SEQ ID NO: 2159028 - RNA, 19 nt, Homo sapiens
  misc_RNA (1)...(19): siRNA sense strand
caacgggagauuauuuguu

SEQ ID NO: 2159029 - RNA, 19 nt, Homo sapiens
  misc_RNA (1)...(19): siRNA sense strand
cagcugacuuguuggugaa

SEQ ID NO: 2159030 - RNA, 19 nt, Homo sapiens
  misc_RNA (1)...(19): siRNA sense strand
ccugaggaauauaaucuug

SEQ ID NO: 2159031 - RNA, 19 nt, Homo sapiens
  misc_RNA (1)...(19): siRNA sense strand
agaaagaagaugcugagaa

SEQ ID NO: 2159032 - RNA, 19 nt, Homo sapiens
  misc_RNA (1)...(19): siRNA sense strand
guuuacagauuuccugauc

SEQ ID NO: 2159033 - RNA, 19 nt, Homo sapiens
  misc_RNA (1)...(19): siRNA sense strand
ucaaauguguucgagaaag

SEQ ID NO: 2159034 - RNA, 19 nt, Homo sapiens
  misc_RNA (1)...(19): siRNA sense strand
ggaaaagauuuguugcaau

SEQ ID NO: 2159035 - RNA, 19 nt, Homo sapiens
  misc_RNA (1)...(19): siRNA sense strand
ccaaaugcagaaagugauu

SEQ ID NO: 2159036 - RNA, 19 nt, Homo sapiens
  misc_RNA (1)...(19): siRNA sense strand
uaaaaccaauggccauauu

SEQ ID NO: 2159037 - RNA, 19 nt, Homo sapiens
  misc_RNA (1)...(19): siRNA sense strand
guggauagaaucaccuaaa

SEQ ID NO: 2159038 - RNA, 19 nt, Homo sapiens
  misc_RNA (1)...(19): siRNA sense strand
guguguggaugaugcauau

SEQ ID NO: 2159039 - RNA, 19 nt, Homo sapiens
  misc_RNA (1)...(19): siRNA sense strand
gccaccaucuccucaagug

SEQ ID NO: 2159040 - RNA, 19 nt, Homo sapiens
  misc_RNA (1)...(19): siRNA sense strand
ggaugaugcauaugugaga

SEQ ID NO: 2159041 - RNA, 19 nt, Homo sapiens
  misc_RNA (1)...(19): siRNA sense strand
auccuugguugaauucuua

SEQ ID NO: 2159042 - RNA, 19 nt, Homo sapiens
  misc_RNA (1)...(19): siRNA sense strand
uuagaaaugguuccagaaa

SEQ ID NO: 2159043 - RNA, 19 nt, Homo sapiens
  misc_RNA (1)...(19): siRNA sense strand
gcggcucugugcuuucuga

SEQ ID NO: 2159044 - RNA, 19 nt, Homo sapiens
  misc_RNA (1)...(19): siRNA sense strand
cgaaguacuuggccaccau

SEQ ID NO: 2159045 - RNA, 19 nt, Homo sapiens
  misc_RNA (1)...(19): siRNA sense strand
aauggugaauugccaaaug

SEQ ID NO: 2159046 - RNA, 19 nt, Homo sapiens
  misc_RNA (1)...(19): siRNA sense strand
guacggcuccacagcagaa

SEQ ID NO: 2159047 - RNA, 19 nt, Homo sapiens
  misc_RNA (1)...(19): siRNA sense strand
guaagugcaagaucauuca

SEQ ID NO: 2159048 - RNA, 19 nt, Homo sapiens
  misc_RNA (1)...(19): siRNA sense strand
gggagauuauuuguuugaa

SEQ ID NO: 2159049 - RNA, 19 nt, Homo sapiens
  misc_RNA (1)...(19): siRNA sense strand
gggaaaagauuuguugcaa

SEQ ID NO: 2159050 - RNA, 19 nt, Homo sapiens
  misc_RNA (1)...(19): siRNA sense strand
uaucaaggccucccaguac

SEQ ID NO: 2159051 - RNA, 19 nt, Homo sapiens
  misc_RNA (1)...(19): siRNA sense strand
ccuggagccucuuugaugu

SEQ ID NO: 2159052 - RNA, 19 nt, Homo sapiens
  misc_RNA (1)...(19): siRNA sense strand
ggaccaggaagagaaagaa

SEQ ID NO: 2159053 - RNA, 19 nt, Homo sapiens
  misc_RNA (1)...(19): siRNA sense strand
guacguugugugaagagua

SEQ ID NO: 2159054 - RNA, 19 nt, Homo sapiens
  misc_RNA (1)...(19): siRNA sense strand
ccaguacguugugugaaga

SEQ ID NO: 2159055 - RNA, 19 nt, Homo sapiens
  misc_RNA (1)...(19): siRNA sense strand
cugcauggucuucgaagua

SEQ ID NO: 2159056 - RNA, 19 nt, Homo sapiens
  misc_RNA (1)...(19): siRNA sense strand
uggcaacgggagauuauuu

SEQ ID NO: 2159057 - RNA, 19 nt, Homo sapiens
  misc_RNA (1)...(19): siRNA sense strand
agucacaguucccagaguu

SEQ ID NO: 2159058 - RNA, 19 nt, Homo sapiens
  misc_RNA (1)...(19): siRNA sense strand
gcagaaagugauuacacau

SEQ ID NO: 2159059 - RNA, 19 nt, Homo sapiens
  misc_RNA (1)...(19): siRNA sense strand
gcauaugugagaagaaugg

SEQ ID NO: 2159060 - RNA, 19 nt, Homo sapiens
  misc_RNA (1)...(19): siRNA sense strand
acauaaagccggaaaauau

SEQ ID NO: 2159061 - RNA, 19 nt, Homo sapiens
  misc_RNA (1)...(19): siRNA sense strand
gcaacgggagauuauuugu

SEQ ID NO: 2159062 - RNA, 19 nt, Homo sapiens
  misc_RNA (1)...(19): siRNA sense strand
ggacgaugaagaugaugau

SEQ ID NO: 2159063 - RNA, 19 nt, Homo sapiens
  misc_RNA (1)...(19): siRNA sense strand
gaagcugaaaggaaaauaa

SEQ ID NO: 2159064 - RNA, 19 nt, Homo sapiens
  misc_RNA (1)...(19): siRNA sense strand
agaagaggcaggcugaguu

SEQ ID NO: 2159065 - RNA, 19 nt, Homo sapiens
  misc_RNA (1)...(19): siRNA sense strand
ccucuuugauguacuugug

SEQ ID NO: 2159066 - RNA, 19 nt, Homo sapiens
  misc_RNA (1)...(19): siRNA sense strand
cauccuugguugaauucuu

SEQ ID NO: 2159067 - RNA, 19 nt, Homo sapiens
  misc_RNA (1)...(19): siRNA sense strand
gacagccuuggaugaaaua

SEQ ID NO: 2159068 - RNA, 19 nt, Homo sapiens
  misc_RNA (1)...(19): siRNA sense strand
gaaauaggcaagauaaaga

SEQ ID NO: 2159069 - RNA, 19 nt, Homo sapiens
  misc_RNA (1)...(19): siRNA sense strand
gcagauaaucgcaaacuuu

SEQ ID NO: 2159070 - RNA, 19 nt, Homo sapiens
  misc_RNA (1)...(19): siRNA sense strand
guaaacagcgauaucagua

SEQ ID NO: 2159071 - RNA, 19 nt, Homo sapiens
  misc_RNA (1)...(19): siRNA sense strand
gaggaaauaggcaagauaa

SEQ ID NO: 2159072 - RNA, 19 nt, Homo sapiens
  misc_RNA (1)...(19): siRNA sense strand
aaacacggauccgcagaua

SEQ ID NO: 2159073 - RNA, 19 nt, Homo sapiens
  misc_RNA (1)...(19): siRNA sense strand
guaagaagagcaaaguaaa

SEQ ID NO: 2159074 - RNA, 19 nt, Homo sapiens
  misc_RNA (1)...(19): siRNA sense strand
gccaaguggugaggaaaua

SEQ ID NO: 2159075 - RNA, 19 nt, Homo sapiens
  misc_RNA (1)...(19): siRNA sense strand
ggaaauaggcaagauaaag

SEQ ID NO: 2159076 - RNA, 19 nt, Homo sapiens
  misc_RNA (1)...(19): siRNA sense strand
gauaaagacaauacugaga

SEQ ID NO: 2159077 - RNA, 19 nt, Homo sapiens
  misc_RNA (1)...(19): siRNA sense strand
caguccagcuugucuguaa

SEQ ID NO: 2159078 - RNA, 19 nt, Homo sapiens
  misc_RNA (1)...(19): siRNA sense strand
gacaauacugagaaagaua

SEQ ID NO: 2159079 - RNA, 19 nt, Homo sapiens
  misc_RNA (1)...(19): siRNA sense strand
uaacucaagcuaccaauag

SEQ ID NO: 2159080 - RNA, 19 nt, Homo sapiens
  misc_RNA (1)...(19): siRNA sense strand
aaacagcgauaucaguaag

SEQ ID NO: 2159081 - RNA, 19 nt, Homo sapiens
  misc_RNA (1)...(19): siRNA sense strand
gauggugaacucauuagaa

SEQ ID NO: 2159082 - RNA, 19 nt, Homo sapiens
  misc_RNA (1)...(19): siRNA sense strand
ccacacaggucugagcaau

SEQ ID NO: 2159083 - RNA, 19 nt, Homo sapiens
  misc_RNA (1)...(19): siRNA sense strand
gauaaagaacggccacaca

SEQ ID NO: 2159084 - RNA, 19 nt, Homo sapiens
  misc_RNA (1)...(19): siRNA sense strand
uaaacagcgauaucaguaa

SEQ ID NO: 2159085 - RNA, 19 nt, Homo sapiens
  misc_RNA (1)...(19): siRNA sense strand
acacaggucugagcaaugg

SEQ ID NO: 2159086 - RNA, 19 nt, Homo sapiens
  misc_RNA (1)...(19): siRNA sense strand
agacaauacugagaaagau

SEQ ID NO: 2159087 - RNA, 19 nt, Homo sapiens
  misc_RNA (1)...(19): siRNA sense strand
gugauaaagacaauacuga

SEQ ID NO: 2159088 - RNA, 19 nt, Homo sapiens
  misc_RNA (1)...(19): siRNA sense strand
gagcaauggaaauggaauu

SEQ ID NO: 2159089 - RNA, 19 nt, Homo sapiens
  misc_RNA (1)...(19): siRNA sense strand
acacggauccgcagauaau

SEQ ID NO: 2159090 - RNA, 19 nt, Homo sapiens
  misc_RNA (1)...(19): siRNA sense strand
cagauaaucgcaaacuuuc

SEQ ID NO: 2159091 - RNA, 19 nt, Homo sapiens
  misc_RNA (1)...(19): siRNA sense strand
ugccucagcuucagacuuc

SEQ ID NO: 2159092 - RNA, 19 nt, Homo sapiens
  misc_RNA (1)...(19): siRNA sense strand
aguaagaagagcaaaguaa

SEQ ID NO: 2159093 - RNA, 19 nt, Homo sapiens
  misc_RNA (1)...(19): siRNA sense strand
aauagccacuucacacaug

SEQ ID NO: 2159094 - RNA, 19 nt, Homo sapiens
  misc_RNA (1)...(19): siRNA sense strand
ggucugagcaauggaaaug

SEQ ID NO: 2159095 - RNA, 19 nt, Homo sapiens
  misc_RNA (1)...(19): siRNA sense strand
ugaggaaauaggcaagaua

SEQ ID NO: 2159096 - RNA, 19 nt, Homo sapiens
  misc_RNA (1)...(19): siRNA sense strand
cuucacacauggagagaug

SEQ ID NO: 2159097 - RNA, 19 nt, Homo sapiens
  misc_RNA (1)...(19): siRNA sense strand
ugaagacaaacaggaauuu

SEQ ID NO: 2159098 - RNA, 19 nt, Homo sapiens
  misc_RNA (1)...(19): siRNA sense strand
acagcgauaucaguaagaa

SEQ ID NO: 2159099 - RNA, 19 nt, Homo sapiens
  misc_RNA (1)...(19): siRNA sense strand
aagaagagcaaaguaaaug

SEQ ID NO: 2159100 - RNA, 19 nt, Homo sapiens
  misc_RNA (1)...(19): siRNA sense strand
gcaauggaaauggaauuca

SEQ ID NO: 2159101 - RNA, 19 nt, Homo sapiens
  misc_RNA (1)...(19): siRNA sense strand
gauaaucgcaaacuuucag

SEQ ID NO: 2159102 - RNA, 19 nt, Homo sapiens
  misc_RNA (1)...(19): siRNA sense strand
gcaagaccaguccauuugg

SEQ ID NO: 2159103 - RNA, 19 nt, Homo sapiens
  misc_RNA (1)...(19): siRNA sense strand
gcaaaguaaaugcugucuu

SEQ ID NO: 2159104 - RNA, 19 nt, Homo sapiens
  misc_RNA (1)...(19): siRNA sense strand
gagaaagauauaacucaag

SEQ ID NO: 2159105 - RNA, 19 nt, Homo sapiens
  misc_RNA (1)...(19): siRNA sense strand
ccaauagccacuucacaca

SEQ ID NO: 2159106 - RNA, 19 nt, Homo sapiens
  misc_RNA (1)...(19): siRNA sense strand
caauggaaauggaauucac

SEQ ID NO: 2159107 - RNA, 19 nt, Homo sapiens
  misc_RNA (1)...(19): siRNA sense strand
gggaaaaugugauaaagac

SEQ ID NO: 2159108 - RNA, 19 nt, Homo sapiens
  misc_RNA (1)...(19): siRNA sense strand
aagacaauacugagaaaga

SEQ ID NO: 2159109 - RNA, 19 nt, Homo sapiens
  misc_RNA (1)...(19): siRNA sense strand
ggugccaaguggugaggaa

SEQ ID NO: 2159110 - RNA, 19 nt, Homo sapiens
  misc_RNA (1)...(19): siRNA sense strand
gaugcaagaccaguccauu

SEQ ID NO: 2159111 - RNA, 19 nt, Homo sapiens
  misc_RNA (1)...(19): siRNA sense strand
ugcaagaccaguccauuug

SEQ ID NO: 2159112 - RNA, 19 nt, Homo sapiens
  misc_RNA (1)...(19): siRNA sense strand
ucugagcaauggaaaugga

SEQ ID NO: 2159113 - RNA, 19 nt, Homo sapiens
  misc_RNA (1)...(19): siRNA sense strand
gugaggaaauaggcaagau

SEQ ID NO: 2159114 - RNA, 19 nt, Homo sapiens
  misc_RNA (1)...(19): siRNA sense strand
gaagacaaacaggaauuuu

SEQ ID NO: 2159115 - RNA, 19 nt, Homo sapiens
  misc_RNA (1)...(19): siRNA sense strand
ggauggugaacucauuaga

SEQ ID NO: 2159116 - RNA, 19 nt, Homo sapiens
  misc_RNA (1)...(19): siRNA sense strand
cagcaccuguuucucaaaa

SEQ ID NO: 2159117 - RNA, 19 nt, Homo sapiens
  misc_RNA (1)...(19): siRNA sense strand
caaacacggauccgcagau

SEQ ID NO: 2159118 - RNA, 19 nt, Homo sapiens
  misc_RNA (1)...(19): siRNA sense strand
caguaagaagagcaaagua

SEQ ID NO: 2159119 - RNA, 19 nt, Homo sapiens
  misc_RNA (1)...(19): siRNA sense strand
uuucagcaccuguuucuca

SEQ ID NO: 2159120 - RNA, 19 nt, Homo sapiens
  misc_RNA (1)...(19): siRNA sense strand
caauagccacuucacacau

SEQ ID NO: 2159121 - RNA, 19 nt, Homo sapiens
  misc_RNA (1)...(19): siRNA sense strand
auaacucaagcuaccaaua

SEQ ID NO: 2159122 - RNA, 19 nt, Homo sapiens
  misc_RNA (1)...(19): siRNA sense strand
caaacuuucagcaccuguu

SEQ ID NO: 2159123 - RNA, 19 nt, Homo sapiens
  misc_RNA (1)...(19): siRNA sense strand
ucggauggugaacucauua

SEQ ID NO: 2159124 - RNA, 19 nt, Homo sapiens
  misc_RNA (1)...(19): siRNA sense strand
ucaguaagaagagcaaagu

SEQ ID NO: 2159125 - RNA, 19 nt, Homo sapiens
  misc_RNA (1)...(19): siRNA sense strand
augcaagaccaguccauuu

SEQ ID NO: 2159126 - RNA, 19 nt, Homo sapiens
  misc_RNA (1)...(19): siRNA sense strand
gaaauaggcaagauaaaga

SEQ ID NO: 2159127 - RNA, 19 nt, Homo sapiens
  misc_RNA (1)...(19): siRNA sense strand
gcagauaaucgcaaacuuu

SEQ ID NO: 2159128 - RNA, 19 nt, Homo sapiens
  misc_RNA (1)...(19): siRNA sense strand
guaaacagcgauaucagua

SEQ ID NO: 2159129 - RNA, 19 nt, Homo sapiens
  misc_RNA (1)...(19): siRNA sense strand
gaggaaauaggcaagauaa

SEQ ID NO: 2159130 - RNA, 19 nt, Homo sapiens
  misc_RNA (1)...(19): siRNA sense strand
aaacacggauccgcagaua

SEQ ID NO: 2159131 - RNA, 19 nt, Homo sapiens
  misc_RNA (1)...(19): siRNA sense strand
guaagaagagcaaaguaaa

SEQ ID NO: 2159132 - RNA, 19 nt, Homo sapiens
  misc_RNA (1)...(19): siRNA sense strand
gccaaguggugaggaaaua

SEQ ID NO: 2159133 - RNA, 19 nt, Homo sapiens
  misc_RNA (1)...(19): siRNA sense strand
ggaaauaggcaagauaaag

SEQ ID NO: 2159134 - RNA, 19 nt, Homo sapiens
  misc_RNA (1)...(19): siRNA sense strand
gauaaagacaauacugaga

SEQ ID NO: 2159135 - RNA, 19 nt, Homo sapiens
  misc_RNA (1)...(19): siRNA sense strand
caguccagcuugucuguaa

SEQ ID NO: 2159136 - RNA, 19 nt, Homo sapiens
  misc_RNA (1)...(19): siRNA sense strand
gacaauacugagaaagaua

SEQ ID NO: 2159137 - RNA, 19 nt, Homo sapiens
  misc_RNA (1)...(19): siRNA sense strand
uaacucaagcuaccaauag

SEQ ID NO: 2159138 - RNA, 19 nt, Homo sapiens
  misc_RNA (1)...(19): siRNA sense strand
aaacagcgauaucaguaag

SEQ ID NO: 2159139 - RNA, 19 nt, Homo sapiens
  misc_RNA (1)...(19): siRNA sense strand
gauggugaacucauuagaa

SEQ ID NO: 2159140 - RNA, 19 nt, Homo sapiens
  misc_RNA (1)...(19): siRNA sense strand
ccacacaggucugagcaau

SEQ ID NO: 2159141 - RNA, 19 nt, Homo sapiens
  misc_RNA (1)...(19): siRNA sense strand
gauaaagaacggccacaca

SEQ ID NO: 2159142 - RNA, 19 nt, Homo sapiens
  misc_RNA (1)...(19): siRNA sense strand
uaaacagcgauaucaguaa

SEQ ID NO: 2159143 - RNA, 19 nt, Homo sapiens
  misc_RNA (1)...(19): siRNA sense strand
acacaggucugagcaaugg

SEQ ID NO: 2159144 - RNA, 19 nt, Homo sapiens
  misc_RNA (1)...(19): siRNA sense strand
agacaauacugagaaagau

SEQ ID NO: 2159145 - RNA, 19 nt, Homo sapiens
  misc_RNA (1)...(19): siRNA sense strand
gugauaaagacaauacuga

SEQ ID NO: 2159146 - RNA, 19 nt, Homo sapiens
  misc_RNA (1)...(19): siRNA sense strand
gagcaauggaaauggaauu

SEQ ID NO: 2159147 - RNA, 19 nt, Homo sapiens
  misc_RNA (1)...(19): siRNA sense strand
acacggauccgcagauaau

SEQ ID NO: 2159148 - RNA, 19 nt, Homo sapiens
  misc_RNA (1)...(19): siRNA sense strand
cagauaaucgcaaacuuuc

SEQ ID NO: 2159149 - RNA, 19 nt, Homo sapiens
  misc_RNA (1)...(19): siRNA sense strand
ugccucagcuucagacuuc

SEQ ID NO: 2159150 - RNA, 19 nt, Homo sapiens
  misc_RNA (1)...(19): siRNA sense strand
aguaagaagagcaaaguaa

SEQ ID NO: 2159151 - RNA, 19 nt, Homo sapiens
  misc_RNA (1)...(19): siRNA sense strand
aauagccacuucacacaug

SEQ ID NO: 2159152 - RNA, 19 nt, Homo sapiens
  misc_RNA (1)...(19): siRNA sense strand
ggucugagcaauggaaaug

SEQ ID NO: 2159153 - RNA, 19 nt, Homo sapiens
  misc_RNA (1)...(19): siRNA sense strand
ugaggaaauaggcaagaua

SEQ ID NO: 2159154 - RNA, 19 nt, Homo sapiens
  misc_RNA (1)...(19): siRNA sense strand
cuucacacauggagagaug

SEQ ID NO: 2159155 - RNA, 19 nt, Homo sapiens
  misc_RNA (1)...(19): siRNA sense strand
ugaagacaaacaggaauuu

SEQ ID NO: 2159156 - RNA, 19 nt, Homo sapiens
  misc_RNA (1)...(19): siRNA sense strand
acagcgauaucaguaagaa

SEQ ID NO: 2159157 - RNA, 19 nt, Homo sapiens
  misc_RNA (1)...(19): siRNA sense strand
aagaagagcaaaguaaaug

SEQ ID NO: 2159158 - RNA, 19 nt, Homo sapiens
  misc_RNA (1)...(19): siRNA sense strand
gcaauggaaauggaauuca

SEQ ID NO: 2159159 - RNA, 19 nt, Homo sapiens
  misc_RNA (1)...(19): siRNA sense strand
gauaaucgcaaacuuucag

SEQ ID NO: 2159160 - RNA, 19 nt, Homo sapiens
  misc_RNA (1)...(19): siRNA sense strand
gcaagaccaguccauuugg

SEQ ID NO: 2159161 - RNA, 19 nt, Homo sapiens
  misc_RNA (1)...(19): siRNA sense strand
gcaaaguaaaugcugucuu

SEQ ID NO: 2159162 - RNA, 19 nt, Homo sapiens
  misc_RNA (1)...(19): siRNA sense strand
gagaaagauauaacucaag

SEQ ID NO: 2159163 - RNA, 19 nt, Homo sapiens
  misc_RNA (1)...(19): siRNA sense strand
ccaauagccacuucacaca

SEQ ID NO: 2159164 - RNA, 19 nt, Homo sapiens
  misc_RNA (1)...(19): siRNA sense strand
caauggaaauggaauucac

SEQ ID NO: 2159165 - RNA, 19 nt, Homo sapiens
  misc_RNA (1)...(19): siRNA sense strand
gggaaaaugugauaaagac

SEQ ID NO: 2159166 - RNA, 19 nt, Homo sapiens
  misc_RNA (1)...(19): siRNA sense strand
aagacaauacugagaaaga

SEQ ID NO: 2159167 - RNA, 19 nt, Homo sapiens
  misc_RNA (1)...(19): siRNA sense strand
ggugccaaguggugaggaa

SEQ ID NO: 2159168 - RNA, 19 nt, Homo sapiens
  misc_RNA (1)...(19): siRNA sense strand
gaugcaagaccaguccauu

SEQ ID NO: 2159169 - RNA, 19 nt, Homo sapiens
  misc_RNA (1)...(19): siRNA sense strand
ugcaagaccaguccauuug

SEQ ID NO: 2159170 - RNA, 19 nt, Homo sapiens
  misc_RNA (1)...(19): siRNA sense strand
ucugagcaauggaaaugga

SEQ ID NO: 2159171 - RNA, 19 nt, Homo sapiens
  misc_RNA (1)...(19): siRNA sense strand
gugaggaaauaggcaagau

SEQ ID NO: 2159172 - RNA, 19 nt, Homo sapiens
  misc_RNA (1)...(19): siRNA sense strand
gaagacaaacaggaauuuu

SEQ ID NO: 2159173 - RNA, 19 nt, Homo sapiens
  misc_RNA (1)...(19): siRNA sense strand
ggauggugaacucauuaga

SEQ ID NO: 2159174 - RNA, 19 nt, Homo sapiens
  misc_RNA (1)...(19): siRNA sense strand
cagcaccuguuucucaaaa

SEQ ID NO: 2159175 - RNA, 19 nt, Homo sapiens
  misc_RNA (1)...(19): siRNA sense strand
caaacacggauccgcagau

SEQ ID NO: 2159176 - RNA, 19 nt, Homo sapiens
  misc_RNA (1)...(19): siRNA sense strand
caguaagaagagcaaagua

SEQ ID NO: 2159177 - RNA, 19 nt, Homo sapiens
  misc_RNA (1)...(19): siRNA sense strand
uuucagcaccuguuucuca

SEQ ID NO: 2159178 - RNA, 19 nt, Homo sapiens
  misc_RNA (1)...(19): siRNA sense strand
caauagccacuucacacau

SEQ ID NO: 2159179 - RNA, 19 nt, Homo sapiens
  misc_RNA (1)...(19): siRNA sense strand
auaacucaagcuaccaaua

SEQ ID NO: 2159180 - RNA, 19 nt, Homo sapiens
  misc_RNA (1)...(19): siRNA sense strand
caaacuuucagcaccuguu

SEQ ID NO: 2159181 - RNA, 19 nt, Homo sapiens
  misc_RNA (1)...(19): siRNA sense strand
ucggauggugaacucauua

SEQ ID NO: 2159182 - RNA, 19 nt, Homo sapiens
  misc_RNA (1)...(19): siRNA sense strand
ucaguaagaagagcaaagu

SEQ ID NO: 2159183 - RNA, 19 nt, Homo sapiens
  misc_RNA (1)...(19): siRNA sense strand
augcaagaccaguccauuu

SEQ ID NO: 2159184 - RNA, 19 nt, Homo sapiens
  misc_RNA (1)...(19): siRNA sense strand
aggcacagcuccaucguua

SEQ ID NO: 2159185 - RNA, 19 nt, Homo sapiens
  misc_RNA (1)...(19): siRNA sense strand
agaccaagcucaugacuca

SEQ ID NO: 2159186 - RNA, 19 nt, Homo sapiens
  misc_RNA (1)...(19): siRNA sense strand
gcacagcuccaucguuaca

SEQ ID NO: 2159187 - RNA, 19 nt, Homo sapiens
  misc_RNA (1)...(19): siRNA sense strand
gacucacaauggccuauuu

SEQ ID NO: 2159188 - RNA, 19 nt, Homo sapiens
  misc_RNA (1)...(19): siRNA sense strand
cuacagaccaagcucauga

SEQ ID NO: 2159189 - RNA, 19 nt, Homo sapiens
  misc_RNA (1)...(19): siRNA sense strand
gcccagcucaugcuucuuu

SEQ ID NO: 2159190 - RNA, 19 nt, Homo sapiens
  misc_RNA (1)...(19): siRNA sense strand
aagccaagcucccaaccuu

SEQ ID NO: 2159191 - RNA, 19 nt, Homo sapiens
  misc_RNA (1)...(19): siRNA sense strand
gcccagcuccugcaucuug

SEQ ID NO: 2159192 - RNA, 19 nt, Homo sapiens
  misc_RNA (1)...(19): siRNA sense strand
uuacaauggccucuuuaga

SEQ ID NO: 2159193 - RNA, 19 nt, Homo sapiens
  misc_RNA (1)...(19): siRNA sense strand
gccaagcucccaaccuuuc

SEQ ID NO: 2159194 - RNA, 19 nt, Homo sapiens
  misc_RNA (1)...(19): siRNA sense strand
ccucacagcagauucuuca

SEQ ID NO: 2159195 - RNA, 19 nt, Homo sapiens
  misc_RNA (1)...(19): siRNA sense strand
ucguuacaauggccucuuu

SEQ ID NO: 2159196 - RNA, 19 nt, Homo sapiens
  misc_RNA (1)...(19): siRNA sense strand
ccaagcucaugacucacaa

SEQ ID NO: 2159197 - RNA, 19 nt, Homo sapiens
  misc_RNA (1)...(19): siRNA sense strand
acucacaauggccuauuua

SEQ ID NO: 2159198 - RNA, 19 nt, Homo sapiens
  misc_RNA (1)...(19): siRNA sense strand
acagcuccaucguuacaau

SEQ ID NO: 2159199 - RNA, 19 nt, Homo sapiens
  misc_RNA (1)...(19): siRNA sense strand
uacaauggccucuuuagac

SEQ ID NO: 2159200 - RNA, 19 nt, Homo sapiens
  misc_RNA (1)...(19): siRNA sense strand
aggcacagcuccaucguua

SEQ ID NO: 2159201 - RNA, 19 nt, Homo sapiens
  misc_RNA (1)...(19): siRNA sense strand
agaccaagcucaugacuca

SEQ ID NO: 2159202 - RNA, 19 nt, Homo sapiens
  misc_RNA (1)...(19): siRNA sense strand
gcacagcuccaucguuaca

SEQ ID NO: 2159203 - RNA, 19 nt, Homo sapiens
  misc_RNA (1)...(19): siRNA sense strand
gacucacaauggccuauuu

SEQ ID NO: 2159204 - RNA, 19 nt, Homo sapiens
  misc_RNA (1)...(19): siRNA sense strand
cuacagaccaagcucauga

SEQ ID NO: 2159205 - RNA, 19 nt, Homo sapiens
  misc_RNA (1)...(19): siRNA sense strand
gcccagcucaugcuucuuu

SEQ ID NO: 2159206 - RNA, 19 nt, Homo sapiens
  misc_RNA (1)...(19): siRNA sense strand
aagccaagcucccaaccuu

SEQ ID NO: 2159207 - RNA, 19 nt, Homo sapiens
  misc_RNA (1)...(19): siRNA sense strand
gcccagcuccugcaucuug

SEQ ID NO: 2159208 - RNA, 19 nt, Homo sapiens
  misc_RNA (1)...(19): siRNA sense strand
uuacaauggccucuuuaga

SEQ ID NO: 2159209 - RNA, 19 nt, Homo sapiens
  misc_RNA (1)...(19): siRNA sense strand
gccaagcucccaaccuuuc

SEQ ID NO: 2159210 - RNA, 19 nt, Homo sapiens
  misc_RNA (1)...(19): siRNA sense strand
ccucacagcagauucuuca

SEQ ID NO: 2159211 - RNA, 19 nt, Homo sapiens
  misc_RNA (1)...(19): siRNA sense strand
ucguuacaauggccucuuu

SEQ ID NO: 2159212 - RNA, 19 nt, Homo sapiens
  misc_RNA (1)...(19): siRNA sense strand
ccaagcucaugacucacaa

SEQ ID NO: 2159213 - RNA, 19 nt, Homo sapiens
  misc_RNA (1)...(19): siRNA sense strand
acucacaauggccuauuua

SEQ ID NO: 2159214 - RNA, 19 nt, Homo sapiens
  misc_RNA (1)...(19): siRNA sense strand
acagcuccaucguuacaau

SEQ ID NO: 2159215 - RNA, 19 nt, Homo sapiens
  misc_RNA (1)...(19): siRNA sense strand
uacaauggccucuuuagac

SEQ ID NO: 2159216 - RNA, 19 nt, Homo sapiens
  misc_RNA (1)...(19): siRNA sense strand
ucucacagcucucaggaaa

SEQ ID NO: 2159217 - RNA, 19 nt, Homo sapiens
  misc_RNA (1)...(19): siRNA sense strand
ccaacucggugguguuuga

SEQ ID NO: 2159218 - RNA, 19 nt, Homo sapiens
  misc_RNA (1)...(19): siRNA sense strand
ggaaugagcaccuucuaca

SEQ ID NO: 2159219 - RNA, 19 nt, Homo sapiens
  misc_RNA (1)...(19): siRNA sense strand
cagaaaggccuguccauca

SEQ ID NO: 2159220 - RNA, 19 nt, Homo sapiens
  misc_RNA (1)...(19): siRNA sense strand
cagcagacaggaacaauga

SEQ ID NO: 2159221 - RNA, 19 nt, Homo sapiens
  misc_RNA (1)...(19): siRNA sense strand
cagcgcauccugaggguua

SEQ ID NO: 2159222 - RNA, 19 nt, Homo sapiens
  misc_RNA (1)...(19): siRNA sense strand
ucauauagccaguuaccua

SEQ ID NO: 2159223 - RNA, 19 nt, Homo sapiens
  misc_RNA (1)...(19): siRNA sense strand
gaacaagaggacuggaaug

SEQ ID NO: 2159224 - RNA, 19 nt, Homo sapiens
  misc_RNA (1)...(19): siRNA sense strand
ccaguggcaucuccaauca

SEQ ID NO: 2159225 - RNA, 19 nt, Homo sapiens
  misc_RNA (1)...(19): siRNA sense strand
gaacuggagagaugucugu

SEQ ID NO: 2159226 - RNA, 19 nt, Homo sapiens
  misc_RNA (1)...(19): siRNA sense strand
gcagaccaguggcaguuuc

SEQ ID NO: 2159227 - RNA, 19 nt, Homo sapiens
  misc_RNA (1)...(19): siRNA sense strand
caaagacccgagaaucaaa

SEQ ID NO: 2159228 - RNA, 19 nt, Homo sapiens
  misc_RNA (1)...(19): siRNA sense strand
gaaaauggccuucuuuguc

SEQ ID NO: 2159229 - RNA, 19 nt, Homo sapiens
  misc_RNA (1)...(19): siRNA sense strand
ggacuggaaugagcaccuu

SEQ ID NO: 2159230 - RNA, 19 nt, Homo sapiens
  misc_RNA (1)...(19): siRNA sense strand
uggcaucuccaaucaauuu

SEQ ID NO: 2159231 - RNA, 19 nt, Homo sapiens
  misc_RNA (1)...(19): siRNA sense strand
ccaaagacccgagaaucaa

SEQ ID NO: 2159232 - RNA, 19 nt, Homo sapiens
  misc_RNA (1)...(19): siRNA sense strand
gaaugagcaccuucuacaa

SEQ ID NO: 2159233 - RNA, 19 nt, Homo sapiens
  misc_RNA (1)...(19): siRNA sense strand
acccagagauuguguuuca

SEQ ID NO: 2159234 - RNA, 19 nt, Homo sapiens
  misc_RNA (1)...(19): siRNA sense strand
ggaacaagaggacuggaau

SEQ ID NO: 2159235 - RNA, 19 nt, Homo sapiens
  misc_RNA (1)...(19): siRNA sense strand
ggccuucuuugucaacuga

SEQ ID NO: 2159236 - RNA, 19 nt, Homo sapiens
  misc_RNA (1)...(19): siRNA sense strand
gagcagaccaguggcaguu

SEQ ID NO: 2159237 - RNA, 19 nt, Homo sapiens
  misc_RNA (1)...(19): siRNA sense strand
cuggagagaugucugugaa

SEQ ID NO: 2159238 - RNA, 19 nt, Homo sapiens
  misc_RNA (1)...(19): siRNA sense strand
acagaaacaacaccugaaa

SEQ ID NO: 2159239 - RNA, 19 nt, Homo sapiens
  misc_RNA (1)...(19): siRNA sense strand
aaguucauauagccaguua

SEQ ID NO: 2159240 - RNA, 19 nt, Homo sapiens
  misc_RNA (1)...(19): siRNA sense strand
aaaauggccuucuuuguca

SEQ ID NO: 2159241 - RNA, 19 nt, Homo sapiens
  misc_RNA (1)...(19): siRNA sense strand
uaucugaagcuccacgaaa

SEQ ID NO: 2159242 - RNA, 19 nt, Homo sapiens
  misc_RNA (1)...(19): siRNA sense strand
ccuaggagagcacuucuug

SEQ ID NO: 2159243 - RNA, 19 nt, Homo sapiens
  misc_RNA (1)...(19): siRNA sense strand
gcagacaggaacaaugaca

SEQ ID NO: 2159244 - RNA, 19 nt, Homo sapiens
  misc_RNA (1)...(19): siRNA sense strand
ucacagcucucaggaaagc

SEQ ID NO: 2159245 - RNA, 19 nt, Homo sapiens
  misc_RNA (1)...(19): siRNA sense strand
cccaccaacuccacagaaa

SEQ ID NO: 2159246 - RNA, 19 nt, Homo sapiens
  misc_RNA (1)...(19): siRNA sense strand
uauagccaguuaccuagga

SEQ ID NO: 2159247 - RNA, 19 nt, Homo sapiens
  misc_RNA (1)...(19): siRNA sense strand
cccgggaacuggagagaug

SEQ ID NO: 2159248 - RNA, 19 nt, Homo sapiens
  misc_RNA (1)...(19): siRNA sense strand
uuugucaacugauucauuc

SEQ ID NO: 2159249 - RNA, 19 nt, Homo sapiens
  misc_RNA (1)...(19): siRNA sense strand
caacuccacagaaacaaca

SEQ ID NO: 2159250 - RNA, 19 nt, Homo sapiens
  misc_RNA (1)...(19): siRNA sense strand
guacguggagcuacgaauc

SEQ ID NO: 2159251 - RNA, 19 nt, Homo sapiens
  misc_RNA (1)...(19): siRNA sense strand
gggaacaagaggacuggaa

SEQ ID NO: 2159252 - RNA, 19 nt, Homo sapiens
  misc_RNA (1)...(19): siRNA sense strand
gagcaccuucuacaaguuc

SEQ ID NO: 2159253 - RNA, 19 nt, Homo sapiens
  misc_RNA (1)...(19): siRNA sense strand
ugagcaccuucuacaaguu

SEQ ID NO: 2159254 - RNA, 19 nt, Homo sapiens
  misc_RNA (1)...(19): siRNA sense strand
ucaauuuguucuccaacuc

SEQ ID NO: 2159255 - RNA, 19 nt, Homo sapiens
  misc_RNA (1)...(19): siRNA sense strand
agaaaggccuguccaucac

SEQ ID NO: 2159256 - RNA, 19 nt, Homo sapiens
  misc_RNA (1)...(19): siRNA sense strand
aguggcaucuccaaucaau

SEQ ID NO: 2159257 - RNA, 19 nt, Homo sapiens
  misc_RNA (1)...(19): siRNA sense strand
guuaggacagugaccgaaa

SEQ ID NO: 2159258 - RNA, 19 nt, Homo sapiens
  misc_RNA (1)...(19): siRNA sense strand
ggaaaauggccuucuuugu

SEQ ID NO: 2159259 - RNA, 19 nt, Homo sapiens
  misc_RNA (1)...(19): siRNA sense strand
ccaagaugcccaccaacuc

SEQ ID NO: 2159260 - RNA, 19 nt, Homo sapiens
  misc_RNA (1)...(19): siRNA sense strand
aacaagaggacuggaauga

SEQ ID NO: 2159261 - RNA, 19 nt, Homo sapiens
  misc_RNA (1)...(19): siRNA sense strand
cuccugauggccaauguua

SEQ ID NO: 2159262 - RNA, 19 nt, Homo sapiens
  misc_RNA (1)...(19): siRNA sense strand
caccaacuccacagaaaca

SEQ ID NO: 2159263 - RNA, 19 nt, Homo sapiens
  misc_RNA (1)...(19): siRNA sense strand
ggacagugaccgaaaagau

SEQ ID NO: 2159264 - RNA, 19 nt, Homo sapiens
  misc_RNA (1)...(19): siRNA sense strand
gaacuugggguggaaaaug

SEQ ID NO: 2159265 - RNA, 19 nt, Homo sapiens
  misc_RNA (1)...(19): siRNA sense strand
gaccaguggcaguuucuca

SEQ ID NO: 2159266 - RNA, 19 nt, Homo sapiens
  misc_RNA (1)...(19): siRNA sense strand
gaaguacguggagcuacga

SEQ ID NO: 2159267 - RNA, 19 nt, Homo sapiens
  misc_RNA (1)...(19): siRNA sense strand
ugcagcagcuacaagauac

SEQ ID NO: 2159268 - RNA, 19 nt, Homo sapiens
  misc_RNA (1)...(19): siRNA sense strand
ccaccaaagacccgagaau

SEQ ID NO: 2159269 - RNA, 19 nt, Homo sapiens
  misc_RNA (1)...(19): siRNA sense strand
caccaaagacccgagaauc

SEQ ID NO: 2159270 - RNA, 19 nt, Homo sapiens
  misc_RNA (1)...(19): siRNA sense strand
gaaacaacaccugaaaaca

SEQ ID NO: 2159271 - RNA, 19 nt, Homo sapiens
  misc_RNA (1)...(19): siRNA sense strand
accaaagacccgagaauca

SEQ ID NO: 2159272 - RNA, 19 nt, Homo sapiens
  misc_RNA (1)...(19): siRNA sense strand
ucucacagcucucaggaaa

SEQ ID NO: 2159273 - RNA, 19 nt, Homo sapiens
  misc_RNA (1)...(19): siRNA sense strand
ccaacucggugguguuuga

SEQ ID NO: 2159274 - RNA, 19 nt, Homo sapiens
  misc_RNA (1)...(19): siRNA sense strand
ggaaugagcaccuucuaca

SEQ ID NO: 2159275 - RNA, 19 nt, Homo sapiens
  misc_RNA (1)...(19): siRNA sense strand
cagaaaggccuguccauca

SEQ ID NO: 2159276 - RNA, 19 nt, Homo sapiens
  misc_RNA (1)...(19): siRNA sense strand
cagcagacaggaacaauga

SEQ ID NO: 2159277 - RNA, 19 nt, Homo sapiens
  misc_RNA (1)...(19): siRNA sense strand
cagcgcauccugaggguua

SEQ ID NO: 2159278 - RNA, 19 nt, Homo sapiens
  misc_RNA (1)...(19): siRNA sense strand
ucauauagccaguuaccua

SEQ ID NO: 2159279 - RNA, 19 nt, Homo sapiens
  misc_RNA (1)...(19): siRNA sense strand
gaacaagaggacuggaaug

SEQ ID NO: 2159280 - RNA, 19 nt, Homo sapiens
  misc_RNA (1)...(19): siRNA sense strand
ccaguggcaucuccaauca

SEQ ID NO: 2159281 - RNA, 19 nt, Homo sapiens
  misc_RNA (1)...(19): siRNA sense strand
gaacuggagagaugucugu

SEQ ID NO: 2159282 - RNA, 19 nt, Homo sapiens
  misc_RNA (1)...(19): siRNA sense strand
gcagaccaguggcaguuuc

SEQ ID NO: 2159283 - RNA, 19 nt, Homo sapiens
  misc_RNA (1)...(19): siRNA sense strand
caaagacccgagaaucaaa

SEQ ID NO: 2159284 - RNA, 19 nt, Homo sapiens
  misc_RNA (1)...(19): siRNA sense strand
gaaaauggccuucuuuguc

SEQ ID NO: 2159285 - RNA, 19 nt, Homo sapiens
  misc_RNA (1)...(19): siRNA sense strand
ggacuggaaugagcaccuu

SEQ ID NO: 2159286 - RNA, 19 nt, Homo sapiens
  misc_RNA (1)...(19): siRNA sense strand
uggcaucuccaaucaauuu

SEQ ID NO: 2159287 - RNA, 19 nt, Homo sapiens
  misc_RNA (1)...(19): siRNA sense strand
ccaaagacccgagaaucaa

SEQ ID NO: 2159288 - RNA, 19 nt, Homo sapiens
  misc_RNA (1)...(19): siRNA sense strand
gaaugagcaccuucuacaa

SEQ ID NO: 2159289 - RNA, 19 nt, Homo sapiens
  misc_RNA (1)...(19): siRNA sense strand
acccagagauuguguuuca

SEQ ID NO: 2159290 - RNA, 19 nt, Homo sapiens
  misc_RNA (1)...(19): siRNA sense strand
ggaacaagaggacuggaau

SEQ ID NO: 2159291 - RNA, 19 nt, Homo sapiens
  misc_RNA (1)...(19): siRNA sense strand
ggccuucuuugucaacuga

SEQ ID NO: 2159292 - RNA, 19 nt, Homo sapiens
  misc_RNA (1)...(19): siRNA sense strand
gagcagaccaguggcaguu

SEQ ID NO: 2159293 - RNA, 19 nt, Homo sapiens
  misc_RNA (1)...(19): siRNA sense strand
cuggagagaugucugugaa

SEQ ID NO: 2159294 - RNA, 19 nt, Homo sapiens
  misc_RNA (1)...(19): siRNA sense strand
acagaaacaacaccugaaa

SEQ ID NO: 2159295 - RNA, 19 nt, Homo sapiens
  misc_RNA (1)...(19): siRNA sense strand
aaguucauauagccaguua

SEQ ID NO: 2159296 - RNA, 19 nt, Homo sapiens
  misc_RNA (1)...(19): siRNA sense strand
aaaauggccuucuuuguca

SEQ ID NO: 2159297 - RNA, 19 nt, Homo sapiens
  misc_RNA (1)...(19): siRNA sense strand
uaucugaagcuccacgaaa

SEQ ID NO: 2159298 - RNA, 19 nt, Homo sapiens
  misc_RNA (1)...(19): siRNA sense strand
ccuaggagagcacuucuug

SEQ ID NO: 2159299 - RNA, 19 nt, Homo sapiens
  misc_RNA (1)...(19): siRNA sense strand
gcagacaggaacaaugaca

SEQ ID NO: 2159300 - RNA, 19 nt, Homo sapiens
  misc_RNA (1)...(19): siRNA sense strand
ucacagcucucaggaaagc

SEQ ID NO: 2159301 - RNA, 19 nt, Homo sapiens
  misc_RNA (1)...(19): siRNA sense strand
cccaccaacuccacagaaa

SEQ ID NO: 2159302 - RNA, 19 nt, Homo sapiens
  misc_RNA (1)...(19): siRNA sense strand
uauagccaguuaccuagga

SEQ ID NO: 2159303 - RNA, 19 nt, Homo sapiens
  misc_RNA (1)...(19): siRNA sense strand
cccgggaacuggagagaug

SEQ ID NO: 2159304 - RNA, 19 nt, Homo sapiens
  misc_RNA (1)...(19): siRNA sense strand
uuugucaacugauucauuc

SEQ ID NO: 2159305 - RNA, 19 nt, Homo sapiens
  misc_RNA (1)...(19): siRNA sense strand
caacuccacagaaacaaca

SEQ ID NO: 2159306 - RNA, 19 nt, Homo sapiens
  misc_RNA (1)...(19): siRNA sense strand
guacguggagcuacgaauc

SEQ ID NO: 2159307 - RNA, 19 nt, Homo sapiens
  misc_RNA (1)...(19): siRNA sense strand
gggaacaagaggacuggaa

SEQ ID NO: 2159308 - RNA, 19 nt, Homo sapiens
  misc_RNA (1)...(19): siRNA sense strand
gagcaccuucuacaaguuc

SEQ ID NO: 2159309 - RNA, 19 nt, Homo sapiens
  misc_RNA (1)...(19): siRNA sense strand
ugagcaccuucuacaaguu

SEQ ID NO: 2159310 - RNA, 19 nt, Homo sapiens
  misc_RNA (1)...(19): siRNA sense strand
ucaauuuguucuccaacuc

SEQ ID NO: 2159311 - RNA, 19 nt, Homo sapiens
  misc_RNA (1)...(19): siRNA sense strand
agaaaggccuguccaucac

SEQ ID NO: 2159312 - RNA, 19 nt, Homo sapiens
  misc_RNA (1)...(19): siRNA sense strand
aguggcaucuccaaucaau

SEQ ID NO: 2159313 - RNA, 19 nt, Homo sapiens
  misc_RNA (1)...(19): siRNA sense strand
guuaggacagugaccgaaa

SEQ ID NO: 2159314 - RNA, 19 nt, Homo sapiens
  misc_RNA (1)...(19): siRNA sense strand
ggaaaauggccuucuuugu

SEQ ID NO: 2159315 - RNA, 19 nt, Homo sapiens
  misc_RNA (1)...(19): siRNA sense strand
ccaagaugcccaccaacuc

SEQ ID NO: 2159316 - RNA, 19 nt, Homo sapiens
  misc_RNA (1)...(19): siRNA sense strand
aacaagaggacuggaauga

SEQ ID NO: 2159317 - RNA, 19 nt, Homo sapiens
  misc_RNA (1)...(19): siRNA sense strand
cuccugauggccaauguua

SEQ ID NO: 2159318 - RNA, 19 nt, Homo sapiens
  misc_RNA (1)...(19): siRNA sense strand
caccaacuccacagaaaca

SEQ ID NO: 2159319 - RNA, 19 nt, Homo sapiens
  misc_RNA (1)...(19): siRNA sense strand
ggacagugaccgaaaagau

SEQ ID NO: 2159320 - RNA, 19 nt, Homo sapiens
  misc_RNA (1)...(19): siRNA sense strand
gaacuugggguggaaaaug

SEQ ID NO: 2159321 - RNA, 19 nt, Homo sapiens
  misc_RNA (1)...(19): siRNA sense strand
gaccaguggcaguuucuca

SEQ ID NO: 2159322 - RNA, 19 nt, Homo sapiens
  misc_RNA (1)...(19): siRNA sense strand
gaaguacguggagcuacga

SEQ ID NO: 2159323 - RNA, 19 nt, Homo sapiens
  misc_RNA (1)...(19): siRNA sense strand
ugcagcagcuacaagauac

SEQ ID NO: 2159324 - RNA, 19 nt, Homo sapiens
  misc_RNA (1)...(19): siRNA sense strand
ccaccaaagacccgagaau

SEQ ID NO: 2159325 - RNA, 19 nt, Homo sapiens
  misc_RNA (1)...(19): siRNA sense strand
caccaaagacccgagaauc

SEQ ID NO: 2159326 - RNA, 19 nt, Homo sapiens
  misc_RNA (1)...(19): siRNA sense strand
gaaacaacaccugaaaaca

SEQ ID NO: 2159327 - RNA, 19 nt, Homo sapiens
  misc_RNA (1)...(19): siRNA sense strand
accaaagacccgagaauca

SEQ ID NO: 2159328 - RNA, 19 nt, Homo sapiens
  misc_RNA (1)...(19): siRNA sense strand
gaaaccagcugucuccaua

SEQ ID NO: 2159329 - RNA, 19 nt, Homo sapiens
  misc_RNA (1)...(19): siRNA sense strand
gaaggcaacuccucacuaa

SEQ ID NO: 2159330 - RNA, 19 nt, Homo sapiens
  misc_RNA (1)...(19): siRNA sense strand
ucaauaaacugaccaaaug

SEQ ID NO: 2159331 - RNA, 19 nt, Homo sapiens
  misc_RNA (1)...(19): siRNA sense strand
ggacacagauacauugguu

SEQ ID NO: 2159332 - RNA, 19 nt, Homo sapiens
  misc_RNA (1)...(19): siRNA sense strand
gcagaagaauguaccuuga

SEQ ID NO: 2159333 - RNA, 19 nt, Homo sapiens
  misc_RNA (1)...(19): siRNA sense strand
uaaaucggcaccaaucuua

SEQ ID NO: 2159334 - RNA, 19 nt, Homo sapiens
  misc_RNA (1)...(19): siRNA sense strand
uaaagcagcacaaguauau

SEQ ID NO: 2159335 - RNA, 19 nt, Homo sapiens
  misc_RNA (1)...(19): siRNA sense strand
gcaucucaguccuggauua

SEQ ID NO: 2159336 - RNA, 19 nt, Homo sapiens
  misc_RNA (1)...(19): siRNA sense strand
aagaggagcuggagaagug

SEQ ID NO: 2159337 - RNA, 19 nt, Homo sapiens
  misc_RNA (1)...(19): siRNA sense strand
aagacagacucuaucaaua

SEQ ID NO: 2159338 - RNA, 19 nt, Homo sapiens
  misc_RNA (1)...(19): siRNA sense strand
gaagugcccuaugucuuug

SEQ ID NO: 2159339 - RNA, 19 nt, Homo sapiens
  misc_RNA (1)...(19): siRNA sense strand
ggaagguggucauguuuac

SEQ ID NO: 2159340 - RNA, 19 nt, Homo sapiens
  misc_RNA (1)...(19): siRNA sense strand
gggccaacauugaggcuuu

SEQ ID NO: 2159341 - RNA, 19 nt, Homo sapiens
  misc_RNA (1)...(19): siRNA sense strand
uauaugaucgcucugcuua

SEQ ID NO: 2159342 - RNA, 19 nt, Homo sapiens
  misc_RNA (1)...(19): siRNA sense strand
ggaagaagaugcccaaaag

SEQ ID NO: 2159343 - RNA, 19 nt, Homo sapiens
  misc_RNA (1)...(19): siRNA sense strand
ugacugggcuuacgggaau

SEQ ID NO: 2159344 - RNA, 19 nt, Homo sapiens
  misc_RNA (1)...(19): siRNA sense strand
ugccggagcuuacuacuga

SEQ ID NO: 2159345 - RNA, 19 nt, Homo sapiens
  misc_RNA (1)...(19): siRNA sense strand
ggacauugagcacuucuug

SEQ ID NO: 2159346 - RNA, 19 nt, Homo sapiens
  misc_RNA (1)...(19): siRNA sense strand
ggaggugcuuugaagaaga

SEQ ID NO: 2159347 - RNA, 19 nt, Homo sapiens
  misc_RNA (1)...(19): siRNA sense strand
uaaaguuacagaccaagua

SEQ ID NO: 2159348 - RNA, 19 nt, Homo sapiens
  misc_RNA (1)...(19): siRNA sense strand
gguuggaucugccugaaga

SEQ ID NO: 2159349 - RNA, 19 nt, Homo sapiens
  misc_RNA (1)...(19): siRNA sense strand
gagaugagcaggaacaagu

SEQ ID NO: 2159350 - RNA, 19 nt, Homo sapiens
  misc_RNA (1)...(19): siRNA sense strand
gcaggacacagauacauug

SEQ ID NO: 2159351 - RNA, 19 nt, Homo sapiens
  misc_RNA (1)...(19): siRNA sense strand
gaccuuccgcacugaauua

SEQ ID NO: 2159352 - RNA, 19 nt, Homo sapiens
  misc_RNA (1)...(19): siRNA sense strand
cagccgaguugucagaauu

SEQ ID NO: 2159353 - RNA, 19 nt, Homo sapiens
  misc_RNA (1)...(19): siRNA sense strand
uaagacagacucuaucaau

SEQ ID NO: 2159354 - RNA, 19 nt, Homo sapiens
  misc_RNA (1)...(19): siRNA sense strand
gagcacuucuuggagauga

SEQ ID NO: 2159355 - RNA, 19 nt, Homo sapiens
  misc_RNA (1)...(19): siRNA sense strand
uuacucuucuccaugguua

SEQ ID NO: 2159356 - RNA, 19 nt, Homo sapiens
  misc_RNA (1)...(19): siRNA sense strand
agacagacucuaucaauau

SEQ ID NO: 2159357 - RNA, 19 nt, Homo sapiens
  misc_RNA (1)...(19): siRNA sense strand
ccagagacgccaugugaaa

SEQ ID NO: 2159358 - RNA, 19 nt, Homo sapiens
  misc_RNA (1)...(19): siRNA sense strand
agaagugcccuaugucuuu

SEQ ID NO: 2159359 - RNA, 19 nt, Homo sapiens
  misc_RNA (1)...(19): siRNA sense strand
aagaagauuucaagacuca

SEQ ID NO: 2159360 - RNA, 19 nt, Homo sapiens
  misc_RNA (1)...(19): siRNA sense strand
gccugaagauuuccacuau

SEQ ID NO: 2159361 - RNA, 19 nt, Homo sapiens
  misc_RNA (1)...(19): siRNA sense strand
gaacaggcacaaggagauu

SEQ ID NO: 2159362 - RNA, 19 nt, Homo sapiens
  misc_RNA (1)...(19): siRNA sense strand
gcaugaagcugggcaucga

SEQ ID NO: 2159363 - RNA, 19 nt, Homo sapiens
  misc_RNA (1)...(19): siRNA sense strand
gacagacucuaucaauauc

SEQ ID NO: 2159364 - RNA, 19 nt, Homo sapiens
  misc_RNA (1)...(19): siRNA sense strand
gaagaggugguaccagaga

SEQ ID NO: 2159365 - RNA, 19 nt, Homo sapiens
  misc_RNA (1)...(19): siRNA sense strand
gccuggacaucuacaauga

SEQ ID NO: 2159366 - RNA, 19 nt, Homo sapiens
  misc_RNA (1)...(19): siRNA sense strand
ggagauuauuguaaagagu

SEQ ID NO: 2159367 - RNA, 19 nt, Homo sapiens
  misc_RNA (1)...(19): siRNA sense strand
agaaggacauugagcacuu

SEQ ID NO: 2159368 - RNA, 19 nt, Homo sapiens
  misc_RNA (1)...(19): siRNA sense strand
ggagucugcuggugaugga

SEQ ID NO: 2159369 - RNA, 19 nt, Homo sapiens
  misc_RNA (1)...(19): siRNA sense strand
ucaauauccuggcagaugu

SEQ ID NO: 2159370 - RNA, 19 nt, Homo sapiens
  misc_RNA (1)...(19): siRNA sense strand
cugaagauuuccacuauuc

SEQ ID NO: 2159371 - RNA, 19 nt, Homo sapiens
  misc_RNA (1)...(19): siRNA sense strand
aaccauaucuaccaguuug

SEQ ID NO: 2159372 - RNA, 19 nt, Homo sapiens
  misc_RNA (1)...(19): siRNA sense strand
ccaaaaggccuauauaaug

SEQ ID NO: 2159373 - RNA, 19 nt, Homo sapiens
  misc_RNA (1)...(19): siRNA sense strand
aaacauucccggaccauga

SEQ ID NO: 2159374 - RNA, 19 nt, Homo sapiens
  misc_RNA (1)...(19): siRNA sense strand
caaaaggccuauauaaugg

SEQ ID NO: 2159375 - RNA, 19 nt, Homo sapiens
  misc_RNA (1)...(19): siRNA sense strand
uccuaaagcuacuaaaguu

SEQ ID NO: 2159376 - RNA, 19 nt, Homo sapiens
  misc_RNA (1)...(19): siRNA sense strand
aaccuggaauucaccaaua

SEQ ID NO: 2159377 - RNA, 19 nt, Homo sapiens
  misc_RNA (1)...(19): siRNA sense strand
guacagccuuccgcaguau

SEQ ID NO: 2159378 - RNA, 19 nt, Homo sapiens
  misc_RNA (1)...(19): siRNA sense strand
cuaccaguuugaauaugua

SEQ ID NO: 2159379 - RNA, 19 nt, Homo sapiens
  misc_RNA (1)...(19): siRNA sense strand
ucaaccauaucuaccaguu

SEQ ID NO: 2159380 - RNA, 19 nt, Homo sapiens
  misc_RNA (1)...(19): siRNA sense strand
gaguaucucuacccugcuu

SEQ ID NO: 2159381 - RNA, 19 nt, Homo sapiens
  misc_RNA (1)...(19): siRNA sense strand
aggaauggcuggaguugga

SEQ ID NO: 2159382 - RNA, 19 nt, Homo sapiens
  misc_RNA (1)...(19): siRNA sense strand
ucaaacacuucaaacucaa

SEQ ID NO: 2159383 - RNA, 19 nt, Homo sapiens
  misc_RNA (1)...(19): siRNA sense strand
gagaagugcccuaugucuu

SEQ ID NO: 2159384 - RNA, 19 nt, Homo sapiens
  misc_RNA (1)...(19): siRNA sense strand
ucugcagacucucaaagua

SEQ ID NO: 2159385 - RNA, 19 nt, Homo sapiens
  misc_RNA (1)...(19): siRNA sense strand
uuaagcuucuccaugcaua

SEQ ID NO: 2159386 - RNA, 19 nt, Homo sapiens
  misc_RNA (1)...(19): siRNA sense strand
ggcuagagguggucaguag

SEQ ID NO: 2159387 - RNA, 19 nt, Homo sapiens
  misc_RNA (1)...(19): siRNA sense strand
ugucagccauuuaccagaa

SEQ ID NO: 2159388 - RNA, 19 nt, Homo sapiens
  misc_RNA (1)...(19): siRNA sense strand
gcugcaacuuuauguccua

SEQ ID NO: 2159389 - RNA, 19 nt, Homo sapiens
  misc_RNA (1)...(19): siRNA sense strand
gaggugcuuugaagaagau

SEQ ID NO: 2159390 - RNA, 19 nt, Homo sapiens
  misc_RNA (1)...(19): siRNA sense strand
gaaccuggaauucaccaau

SEQ ID NO: 2159391 - RNA, 19 nt, Homo sapiens
  misc_RNA (1)...(19): siRNA sense strand
acacugagaaccuggaauu

SEQ ID NO: 2159392 - RNA, 19 nt, Homo sapiens
  misc_RNA (1)...(19): siRNA sense strand
gcagaugugcagaucaaga

SEQ ID NO: 2159393 - RNA, 19 nt, Homo sapiens
  misc_RNA (1)...(19): siRNA sense strand
cagauacauugguuggauu

SEQ ID NO: 2159394 - RNA, 19 nt, Homo sapiens
  misc_RNA (1)...(19): siRNA sense strand
ggacaucuacaaugaaagg

SEQ ID NO: 2159395 - RNA, 19 nt, Homo sapiens
  misc_RNA (1)...(19): siRNA sense strand
gcuucuccaugcauaauga

SEQ ID NO: 2159396 - RNA, 19 nt, Homo sapiens
  misc_RNA (1)...(19): siRNA sense strand
gauuuccacuauucauaug

SEQ ID NO: 2159397 - RNA, 19 nt, Homo sapiens
  misc_RNA (1)...(19): siRNA sense strand
ccuaaagcuacuaaaguua

SEQ ID NO: 2159398 - RNA, 19 nt, Homo sapiens
  misc_RNA (1)...(19): siRNA sense strand
caaggagauuauuguaaag

SEQ ID NO: 2159399 - RNA, 19 nt, Homo sapiens
  misc_RNA (1)...(19): siRNA sense strand
gcuaagacagacucuauca

SEQ ID NO: 2159400 - RNA, 19 nt, Homo sapiens
  misc_RNA (1)...(19): siRNA sense strand
uaccagagacgccauguga

SEQ ID NO: 2159401 - RNA, 19 nt, Homo sapiens
  misc_RNA (1)...(19): siRNA sense strand
gcaaggaauggcuggaguu

SEQ ID NO: 2159402 - RNA, 19 nt, Homo sapiens
  misc_RNA (1)...(19): siRNA sense strand
ucgcagaugugcagaucaa

SEQ ID NO: 2159403 - RNA, 19 nt, Homo sapiens
  misc_RNA (1)...(19): siRNA sense strand
ucuggaagguggucauguu

SEQ ID NO: 2159404 - RNA, 19 nt, Homo sapiens
  misc_RNA (1)...(19): siRNA sense strand
ggagcuuacuacugaaagu

SEQ ID NO: 2159405 - RNA, 19 nt, Homo sapiens
  misc_RNA (1)...(19): siRNA sense strand
cucaaacacuucaaacuca

SEQ ID NO: 2159406 - RNA, 19 nt, Homo sapiens
  misc_RNA (1)...(19): siRNA sense strand
uaacaggaggugcuuugaa

SEQ ID NO: 2159407 - RNA, 19 nt, Homo sapiens
  misc_RNA (1)...(19): siRNA sense strand
cuggacaucuacaaugaaa

SEQ ID NO: 2159408 - RNA, 19 nt, Homo sapiens
  misc_RNA (1)...(19): siRNA sense strand
ucagacagaaggacauuga

SEQ ID NO: 2159409 - RNA, 19 nt, Homo sapiens
  misc_RNA (1)...(19): siRNA sense strand
gaagauuuccacuauucau

SEQ ID NO: 2159410 - RNA, 19 nt, Homo sapiens
  misc_RNA (1)...(19): siRNA sense strand
cgaguugucagaauuguau

SEQ ID NO: 2159411 - RNA, 19 nt, Homo sapiens
  misc_RNA (1)...(19): siRNA sense strand
aggccaugcugcaacuuua

SEQ ID NO: 2159412 - RNA, 19 nt, Homo sapiens
  misc_RNA (1)...(19): siRNA sense strand
uguacagccuuccgcagua

SEQ ID NO: 2159413 - RNA, 19 nt, Homo sapiens
  misc_RNA (1)...(19): siRNA sense strand
cuaaagcagcacaaguaua

SEQ ID NO: 2159414 - RNA, 19 nt, Homo sapiens
  misc_RNA (1)...(19): siRNA sense strand
ccucuaaggcuaagacaga

SEQ ID NO: 2159415 - RNA, 19 nt, Homo sapiens
  misc_RNA (1)...(19): siRNA sense strand
gagguuggaucugccugaa

SEQ ID NO: 2159416 - RNA, 19 nt, Homo sapiens
  misc_RNA (1)...(19): siRNA sense strand
ccaugaugcugguaguguu

SEQ ID NO: 2159417 - RNA, 19 nt, Homo sapiens
  misc_RNA (1)...(19): siRNA sense strand
uaaacugaccaaauggaaa

SEQ ID NO: 2159418 - RNA, 19 nt, Homo sapiens
  misc_RNA (1)...(19): siRNA sense strand
guacagaagcgggcagaau

SEQ ID NO: 2159419 - RNA, 19 nt, Homo sapiens
  misc_RNA (1)...(19): siRNA sense strand
uaacagccgucgcuaugac

SEQ ID NO: 2159420 - RNA, 19 nt, Homo sapiens
  misc_RNA (1)...(19): siRNA sense strand
cgaaggcaacuccucacua

SEQ ID NO: 2159421 - RNA, 19 nt, Homo sapiens
  misc_RNA (1)...(19): siRNA sense strand
uacagaagcgggcagaauu

SEQ ID NO: 2159422 - RNA, 19 nt, Homo sapiens
  misc_RNA (1)...(19): siRNA sense strand
cccuaaagcagcacaagua

SEQ ID NO: 2159423 - RNA, 19 nt, Homo sapiens
  misc_RNA (1)...(19): siRNA sense strand
uaugaucgcucugcuuaag

SEQ ID NO: 2159424 - RNA, 19 nt, Homo sapiens
  misc_RNA (1)...(19): siRNA sense strand
ggagaagugcccuaugucu

SEQ ID NO: 2159425 - RNA, 19 nt, Homo sapiens
  misc_RNA (1)...(19): siRNA sense strand
cuggagaagugcccuaugu

SEQ ID NO: 2159426 - RNA, 19 nt, Homo sapiens
  misc_RNA (1)...(19): siRNA sense strand
caugugaaauccucuacca

SEQ ID NO: 2159427 - RNA, 19 nt, Homo sapiens
  misc_RNA (1)...(19): siRNA sense strand
gcagccgaguugucagaau

SEQ ID NO: 2159428 - RNA, 19 nt, Homo sapiens
  misc_RNA (1)...(19): siRNA sense strand
gaaaccagcugucuccaua

SEQ ID NO: 2159429 - RNA, 19 nt, Homo sapiens
  misc_RNA (1)...(19): siRNA sense strand
gaaggcaacuccucacuaa

SEQ ID NO: 2159430 - RNA, 19 nt, Homo sapiens
  misc_RNA (1)...(19): siRNA sense strand
ucaauaaacugaccaaaug

SEQ ID NO: 2159431 - RNA, 19 nt, Homo sapiens
  misc_RNA (1)...(19): siRNA sense strand
ggacacagauacauugguu

SEQ ID NO: 2159432 - RNA, 19 nt, Homo sapiens
  misc_RNA (1)...(19): siRNA sense strand
gcagaagaauguaccuuga

SEQ ID NO: 2159433 - RNA, 19 nt, Homo sapiens
  misc_RNA (1)...(19): siRNA sense strand
uaaaucggcaccaaucuua

SEQ ID NO: 2159434 - RNA, 19 nt, Homo sapiens
  misc_RNA (1)...(19): siRNA sense strand
uaaagcagcacaaguauau

SEQ ID NO: 2159435 - RNA, 19 nt, Homo sapiens
  misc_RNA (1)...(19): siRNA sense strand
gcaucucaguccuggauua

SEQ ID NO: 2159436 - RNA, 19 nt, Homo sapiens
  misc_RNA (1)...(19): siRNA sense strand
aagaggagcuggagaagug

SEQ ID NO: 2159437 - RNA, 19 nt, Homo sapiens
  misc_RNA (1)...(19): siRNA sense strand
aagacagacucuaucaaua

SEQ ID NO: 2159438 - RNA, 19 nt, Homo sapiens
  misc_RNA (1)...(19): siRNA sense strand
gaagugcccuaugucuuug

SEQ ID NO: 2159439 - RNA, 19 nt, Homo sapiens
  misc_RNA (1)...(19): siRNA sense strand
ggaagguggucauguuuac

SEQ ID NO: 2159440 - RNA, 19 nt, Homo sapiens
  misc_RNA (1)...(19): siRNA sense strand
gggccaacauugaggcuuu

SEQ ID NO: 2159441 - RNA, 19 nt, Homo sapiens
  misc_RNA (1)...(19): siRNA sense strand
uauaugaucgcucugcuua

SEQ ID NO: 2159442 - RNA, 19 nt, Homo sapiens
  misc_RNA (1)...(19): siRNA sense strand
ggaagaagaugcccaaaag

SEQ ID NO: 2159443 - RNA, 19 nt, Homo sapiens
  misc_RNA (1)...(19): siRNA sense strand
ugacugggcuuacgggaau

SEQ ID NO: 2159444 - RNA, 19 nt, Homo sapiens
  misc_RNA (1)...(19): siRNA sense strand
ugccggagcuuacuacuga

SEQ ID NO: 2159445 - RNA, 19 nt, Homo sapiens
  misc_RNA (1)...(19): siRNA sense strand
ggacauugagcacuucuug

SEQ ID NO: 2159446 - RNA, 19 nt, Homo sapiens
  misc_RNA (1)...(19): siRNA sense strand
ggaggugcuuugaagaaga

SEQ ID NO: 2159447 - RNA, 19 nt, Homo sapiens
  misc_RNA (1)...(19): siRNA sense strand
uaaaguuacagaccaagua

SEQ ID NO: 2159448 - RNA, 19 nt, Homo sapiens
  misc_RNA (1)...(19): siRNA sense strand
gguuggaucugccugaaga

SEQ ID NO: 2159449 - RNA, 19 nt, Homo sapiens
  misc_RNA (1)...(19): siRNA sense strand
gagaugagcaggaacaagu

SEQ ID NO: 2159450 - RNA, 19 nt, Homo sapiens
  misc_RNA (1)...(19): siRNA sense strand
gcaggacacagauacauug

SEQ ID NO: 2159451 - RNA, 19 nt, Homo sapiens
  misc_RNA (1)...(19): siRNA sense strand
gaccuuccgcacugaauua

SEQ ID NO: 2159452 - RNA, 19 nt, Homo sapiens
  misc_RNA (1)...(19): siRNA sense strand
cagccgaguugucagaauu

SEQ ID NO: 2159453 - RNA, 19 nt, Homo sapiens
  misc_RNA (1)...(19): siRNA sense strand
uaagacagacucuaucaau

SEQ ID NO: 2159454 - RNA, 19 nt, Homo sapiens
  misc_RNA (1)...(19): siRNA sense strand
gagcacuucuuggagauga

SEQ ID NO: 2159455 - RNA, 19 nt, Homo sapiens
  misc_RNA (1)...(19): siRNA sense strand
uuacucuucuccaugguua

SEQ ID NO: 2159456 - RNA, 19 nt, Homo sapiens
  misc_RNA (1)...(19): siRNA sense strand
agacagacucuaucaauau

SEQ ID NO: 2159457 - RNA, 19 nt, Homo sapiens
  misc_RNA (1)...(19): siRNA sense strand
ccagagacgccaugugaaa

SEQ ID NO: 2159458 - RNA, 19 nt, Homo sapiens
  misc_RNA (1)...(19): siRNA sense strand
agaagugcccuaugucuuu

SEQ ID NO: 2159459 - RNA, 19 nt, Homo sapiens
  misc_RNA (1)...(19): siRNA sense strand
aagaagauuucaagacuca

SEQ ID NO: 2159460 - RNA, 19 nt, Homo sapiens
  misc_RNA (1)...(19): siRNA sense strand
gccugaagauuuccacuau

SEQ ID NO: 2159461 - RNA, 19 nt, Homo sapiens
  misc_RNA (1)...(19): siRNA sense strand
gaacaggcacaaggagauu

SEQ ID NO: 2159462 - RNA, 19 nt, Homo sapiens
  misc_RNA (1)...(19): siRNA sense strand
gcaugaagcugggcaucga

SEQ ID NO: 2159463 - RNA, 19 nt, Homo sapiens
  misc_RNA (1)...(19): siRNA sense strand
gacagacucuaucaauauc

SEQ ID NO: 2159464 - RNA, 19 nt, Homo sapiens
  misc_RNA (1)...(19): siRNA sense strand
gaagaggugguaccagaga

SEQ ID NO: 2159465 - RNA, 19 nt, Homo sapiens
  misc_RNA (1)...(19): siRNA sense strand
gccuggacaucuacaauga

SEQ ID NO: 2159466 - RNA, 19 nt, Homo sapiens
  misc_RNA (1)...(19): siRNA sense strand
ggagauuauuguaaagagu

SEQ ID NO: 2159467 - RNA, 19 nt, Homo sapiens
  misc_RNA (1)...(19): siRNA sense strand
agaaggacauugagcacuu

SEQ ID NO: 2159468 - RNA, 19 nt, Homo sapiens
  misc_RNA (1)...(19): siRNA sense strand
ggagucugcuggugaugga

SEQ ID NO: 2159469 - RNA, 19 nt, Homo sapiens
  misc_RNA (1)...(19): siRNA sense strand
ucaauauccuggcagaugu

SEQ ID NO: 2159470 - RNA, 19 nt, Homo sapiens
  misc_RNA (1)...(19): siRNA sense strand
cugaagauuuccacuauuc

SEQ ID NO: 2159471 - RNA, 19 nt, Homo sapiens
  misc_RNA (1)...(19): siRNA sense strand
aaccauaucuaccaguuug

SEQ ID NO: 2159472 - RNA, 19 nt, Homo sapiens
  misc_RNA (1)...(19): siRNA sense strand
ccaaaaggccuauauaaug

SEQ ID NO: 2159473 - RNA, 19 nt, Homo sapiens
  misc_RNA (1)...(19): siRNA sense strand
aaacauucccggaccauga

SEQ ID NO: 2159474 - RNA, 19 nt, Homo sapiens
  misc_RNA (1)...(19): siRNA sense strand
caaaaggccuauauaaugg

SEQ ID NO: 2159475 - RNA, 19 nt, Homo sapiens
  misc_RNA (1)...(19): siRNA sense strand
uccuaaagcuacuaaaguu

SEQ ID NO: 2159476 - RNA, 19 nt, Homo sapiens
  misc_RNA (1)...(19): siRNA sense strand
aaccuggaauucaccaaua

SEQ ID NO: 2159477 - RNA, 19 nt, Homo sapiens
  misc_RNA (1)...(19): siRNA sense strand
guacagccuuccgcaguau

SEQ ID NO: 2159478 - RNA, 19 nt, Homo sapiens
  misc_RNA (1)...(19): siRNA sense strand
cuaccaguuugaauaugua

SEQ ID NO: 2159479 - RNA, 19 nt, Homo sapiens
  misc_RNA (1)...(19): siRNA sense strand
ucaaccauaucuaccaguu

SEQ ID NO: 2159480 - RNA, 19 nt, Homo sapiens
  misc_RNA (1)...(19): siRNA sense strand
gaguaucucuacccugcuu

SEQ ID NO: 2159481 - RNA, 19 nt, Homo sapiens
  misc_RNA (1)...(19): siRNA sense strand
aggaauggcuggaguugga

SEQ ID NO: 2159482 - RNA, 19 nt, Homo sapiens
  misc_RNA (1)...(19): siRNA sense strand
ucaaacacuucaaacucaa

SEQ ID NO: 2159483 - RNA, 19 nt, Homo sapiens
  misc_RNA (1)...(19): siRNA sense strand
gagaagugcccuaugucuu

SEQ ID NO: 2159484 - RNA, 19 nt, Homo sapiens
  misc_RNA (1)...(19): siRNA sense strand
ucugcagacucucaaagua

SEQ ID NO: 2159485 - RNA, 19 nt, Homo sapiens
  misc_RNA (1)...(19): siRNA sense strand
uuaagcuucuccaugcaua

SEQ ID NO: 2159486 - RNA, 19 nt, Homo sapiens
  misc_RNA (1)...(19): siRNA sense strand
ggcuagagguggucaguag

SEQ ID NO: 2159487 - RNA, 19 nt, Homo sapiens
  misc_RNA (1)...(19): siRNA sense strand
ugucagccauuuaccagaa

SEQ ID NO: 2159488 - RNA, 19 nt, Homo sapiens
  misc_RNA (1)...(19): siRNA sense strand
gcugcaacuuuauguccua

SEQ ID NO: 2159489 - RNA, 19 nt, Homo sapiens
  misc_RNA (1)...(19): siRNA sense strand
gaggugcuuugaagaagau

SEQ ID NO: 2159490 - RNA, 19 nt, Homo sapiens
  misc_RNA (1)...(19): siRNA sense strand
gaaccuggaauucaccaau

SEQ ID NO: 2159491 - RNA, 19 nt, Homo sapiens
  misc_RNA (1)...(19): siRNA sense strand
acacugagaaccuggaauu

SEQ ID NO: 2159492 - RNA, 19 nt, Homo sapiens
  misc_RNA (1)...(19): siRNA sense strand
gcagaugugcagaucaaga

SEQ ID NO: 2159493 - RNA, 19 nt, Homo sapiens
  misc_RNA (1)...(19): siRNA sense strand
cagauacauugguuggauu

SEQ ID NO: 2159494 - RNA, 19 nt, Homo sapiens
  misc_RNA (1)...(19): siRNA sense strand
ggacaucuacaaugaaagg

SEQ ID NO: 2159495 - RNA, 19 nt, Homo sapiens
  misc_RNA (1)...(19): siRNA sense strand
gcuucuccaugcauaauga

SEQ ID NO: 2159496 - RNA, 19 nt, Homo sapiens
  misc_RNA (1)...(19): siRNA sense strand
gauuuccacuauucauaug

SEQ ID NO: 2159497 - RNA, 19 nt, Homo sapiens
  misc_RNA (1)...(19): siRNA sense strand
ccuaaagcuacuaaaguua

SEQ ID NO: 2159498 - RNA, 19 nt, Homo sapiens
  misc_RNA (1)...(19): siRNA sense strand
caaggagauuauuguaaag

SEQ ID NO: 2159499 - RNA, 19 nt, Homo sapiens
  misc_RNA (1)...(19): siRNA sense strand
gcuaagacagacucuauca

SEQ ID NO: 2159500 - RNA, 19 nt, Homo sapiens
  misc_RNA (1)...(19): siRNA sense strand
uaccagagacgccauguga

SEQ ID NO: 2159501 - RNA, 19 nt, Homo sapiens
  misc_RNA (1)...(19): siRNA sense strand
gcaaggaauggcuggaguu

SEQ ID NO: 2159502 - RNA, 19 nt, Homo sapiens
  misc_RNA (1)...(19): siRNA sense strand
ucgcagaugugcagaucaa

SEQ ID NO: 2159503 - RNA, 19 nt, Homo sapiens
  misc_RNA (1)...(19): siRNA sense strand
ucuggaagguggucauguu

SEQ ID NO: 2159504 - RNA, 19 nt, Homo sapiens
  misc_RNA (1)...(19): siRNA sense strand
ggagcuuacuacugaaagu

SEQ ID NO: 2159505 - RNA, 19 nt, Homo sapiens
  misc_RNA (1)...(19): siRNA sense strand
cucaaacacuucaaacuca

SEQ ID NO: 2159506 - RNA, 19 nt, Homo sapiens
  misc_RNA (1)...(19): siRNA sense strand
uaacaggaggugcuuugaa

SEQ ID NO: 2159507 - RNA, 19 nt, Homo sapiens
  misc_RNA (1)...(19): siRNA sense strand
cuggacaucuacaaugaaa

SEQ ID NO: 2159508 - RNA, 19 nt, Homo sapiens
  misc_RNA (1)...(19): siRNA sense strand
ucagacagaaggacauuga

SEQ ID NO: 2159509 - RNA, 19 nt, Homo sapiens
  misc_RNA (1)...(19): siRNA sense strand
gaagauuuccacuauucau

SEQ ID NO: 2159510 - RNA, 19 nt, Homo sapiens
  misc_RNA (1)...(19): siRNA sense strand
cgaguugucagaauuguau

SEQ ID NO: 2159511 - RNA, 19 nt, Homo sapiens
  misc_RNA (1)...(19): siRNA sense strand
aggccaugcugcaacuuua

SEQ ID NO: 2159512 - RNA, 19 nt, Homo sapiens
  misc_RNA (1)...(19): siRNA sense strand
uguacagccuuccgcagua

SEQ ID NO: 2159513 - RNA, 19 nt, Homo sapiens
  misc_RNA (1)...(19): siRNA sense strand
cuaaagcagcacaaguaua

SEQ ID NO: 2159514 - RNA, 19 nt, Homo sapiens
  misc_RNA (1)...(19): siRNA sense strand
ccucuaaggcuaagacaga

SEQ ID NO: 2159515 - RNA, 19 nt, Homo sapiens
  misc_RNA (1)...(19): siRNA sense strand
gagguuggaucugccugaa

SEQ ID NO: 2159516 - RNA, 19 nt, Homo sapiens
  misc_RNA (1)...(19): siRNA sense strand
ccaugaugcugguaguguu

SEQ ID NO: 2159517 - RNA, 19 nt, Homo sapiens
  misc_RNA (1)...(19): siRNA sense strand
uaaacugaccaaauggaaa

SEQ ID NO: 2159518 - RNA, 19 nt, Homo sapiens
  misc_RNA (1)...(19): siRNA sense strand
guacagaagcgggcagaau

SEQ ID NO: 2159519 - RNA, 19 nt, Homo sapiens
  misc_RNA (1)...(19): siRNA sense strand
uaacagccgucgcuaugac

SEQ ID NO: 2159520 - RNA, 19 nt, Homo sapiens
  misc_RNA (1)...(19): siRNA sense strand
cgaaggcaacuccucacua

SEQ ID NO: 2159521 - RNA, 19 nt, Homo sapiens
  misc_RNA (1)...(19): siRNA sense strand
uacagaagcgggcagaauu

SEQ ID NO: 2159522 - RNA, 19 nt, Homo sapiens
  misc_RNA (1)...(19): siRNA sense strand
cccuaaagcagcacaagua

SEQ ID NO: 2159523 - RNA, 19 nt, Homo sapiens
  misc_RNA (1)...(19): siRNA sense strand
uaugaucgcucugcuuaag

SEQ ID NO: 2159524 - RNA, 19 nt, Homo sapiens
  misc_RNA (1)...(19): siRNA sense strand
ggagaagugcccuaugucu

SEQ ID NO: 2159525 - RNA, 19 nt, Homo sapiens
  misc_RNA (1)...(19): siRNA sense strand
cuggagaagugcccuaugu

SEQ ID NO: 2159526 - RNA, 19 nt, Homo sapiens
  misc_RNA (1)...(19): siRNA sense strand
caugugaaauccucuacca

SEQ ID NO: 2159527 - RNA, 19 nt, Homo sapiens
  misc_RNA (1)...(19): siRNA sense strand
gcagccgaguugucagaau

SEQ ID NO: 2159528 - RNA, 19 nt, Homo sapiens
  misc_RNA (1)...(19): siRNA sense strand
gaacaccucuuauuccuau

SEQ ID NO: 2159529 - RNA, 19 nt, Homo sapiens
  misc_RNA (1)...(19): siRNA sense strand
ggaaggagcacaucaauau

SEQ ID NO: 2159530 - RNA, 19 nt, Homo sapiens
  misc_RNA (1)...(19): siRNA sense strand
gcaaucagauccagugcua

SEQ ID NO: 2159531 - RNA, 19 nt, Homo sapiens
  misc_RNA (1)...(19): siRNA sense strand
gaacagaucgugugugaga

SEQ ID NO: 2159532 - RNA, 19 nt, Homo sapiens
  misc_RNA (1)...(19): siRNA sense strand
gaacuacacugugcugguu

SEQ ID NO: 2159533 - RNA, 19 nt, Homo sapiens
  misc_RNA (1)...(19): siRNA sense strand
gaauaaaguucaccucuac

SEQ ID NO: 2159534 - RNA, 19 nt, Homo sapiens
  misc_RNA (1)...(19): siRNA sense strand
cagaggagcuggccuguug

SEQ ID NO: 2159535 - RNA, 19 nt, Homo sapiens
  misc_RNA (1)...(19): siRNA sense strand
cagaacagaucguguguga

SEQ ID NO: 2159536 - RNA, 19 nt, Homo sapiens
  misc_RNA (1)...(19): siRNA sense strand
caacccagcucagaauaaa

SEQ ID NO: 2159537 - RNA, 19 nt, Homo sapiens
  misc_RNA (1)...(19): siRNA sense strand
ccucacagcucuauuacuu

SEQ ID NO: 2159538 - RNA, 19 nt, Homo sapiens
  misc_RNA (1)...(19): siRNA sense strand
gaaccugggccuggaauuu

SEQ ID NO: 2159539 - RNA, 19 nt, Homo sapiens
  misc_RNA (1)...(19): siRNA sense strand
agaauaaaguucaccucua

SEQ ID NO: 2159540 - RNA, 19 nt, Homo sapiens
  misc_RNA (1)...(19): siRNA sense strand
ggagcugucuggugccaaa

SEQ ID NO: 2159541 - RNA, 19 nt, Homo sapiens
  misc_RNA (1)...(19): siRNA sense strand
gcacgcccaucauccuaaa

SEQ ID NO: 2159542 - RNA, 19 nt, Homo sapiens
  misc_RNA (1)...(19): siRNA sense strand
gcaagucccgcgaaaguga

SEQ ID NO: 2159543 - RNA, 19 nt, Homo sapiens
  misc_RNA (1)...(19): siRNA sense strand
gguccucacagcucuauua

SEQ ID NO: 2159544 - RNA, 19 nt, Homo sapiens
  misc_RNA (1)...(19): siRNA sense strand
ucacagcucuauuacuuca

SEQ ID NO: 2159545 - RNA, 19 nt, Homo sapiens
  misc_RNA (1)...(19): siRNA sense strand
gcaccagcuuugucuucua

SEQ ID NO: 2159546 - RNA, 19 nt, Homo sapiens
  misc_RNA (1)...(19): siRNA sense strand
cagaugaggugcuagagau

SEQ ID NO: 2159547 - RNA, 19 nt, Homo sapiens
  misc_RNA (1)...(19): siRNA sense strand
gcaacgugguggugauguu

SEQ ID NO: 2159548 - RNA, 19 nt, Homo sapiens
  misc_RNA (1)...(19): siRNA sense strand
ggaaugggcacuucaacau

SEQ ID NO: 2159549 - RNA, 19 nt, Homo sapiens
  misc_RNA (1)...(19): siRNA sense strand
gaagcaacgugguggugau

SEQ ID NO: 2159550 - RNA, 19 nt, Homo sapiens
  misc_RNA (1)...(19): siRNA sense strand
gcccuuuaguggaugguua

SEQ ID NO: 2159551 - RNA, 19 nt, Homo sapiens
  misc_RNA (1)...(19): siRNA sense strand
aaacgcaagucccgcgaaa

SEQ ID NO: 2159552 - RNA, 19 nt, Homo sapiens
  misc_RNA (1)...(19): siRNA sense strand
gggaaggagcacaucaaua

SEQ ID NO: 2159553 - RNA, 19 nt, Homo sapiens
  misc_RNA (1)...(19): siRNA sense strand
gaaagcagcccugucucuu

SEQ ID NO: 2159554 - RNA, 19 nt, Homo sapiens
  misc_RNA (1)...(19): siRNA sense strand
gugcagcccuuuaguggau

SEQ ID NO: 2159555 - RNA, 19 nt, Homo sapiens
  misc_RNA (1)...(19): siRNA sense strand
agaccaacuucaccuacua

SEQ ID NO: 2159556 - RNA, 19 nt, Homo sapiens
  misc_RNA (1)...(19): siRNA sense strand
ggauggagaucaacaaccu

SEQ ID NO: 2159557 - RNA, 19 nt, Homo sapiens
  misc_RNA (1)...(19): siRNA sense strand
cauccuacauugucugcaa

SEQ ID NO: 2159558 - RNA, 19 nt, Homo sapiens
  misc_RNA (1)...(19): siRNA sense strand
ggaaagcagcccugucucu

SEQ ID NO: 2159559 - RNA, 19 nt, Homo sapiens
  misc_RNA (1)...(19): siRNA sense strand
ucugaacgcuacugagaug

SEQ ID NO: 2159560 - RNA, 19 nt, Homo sapiens
  misc_RNA (1)...(19): siRNA sense strand
ggcgucaacugcaccuuug

SEQ ID NO: 2159561 - RNA, 19 nt, Homo sapiens
  misc_RNA (1)...(19): siRNA sense strand
gcaacgugaagcugaacua

SEQ ID NO: 2159562 - RNA, 19 nt, Homo sapiens
  misc_RNA (1)...(19): siRNA sense strand
uuacaucccugcagaacag

SEQ ID NO: 2159563 - RNA, 19 nt, Homo sapiens
  misc_RNA (1)...(19): siRNA sense strand
ggugugagcgguccaagga

SEQ ID NO: 2159564 - RNA, 19 nt, Homo sapiens
  misc_RNA (1)...(19): siRNA sense strand
gccagaacaccucuuauuc

SEQ ID NO: 2159565 - RNA, 19 nt, Homo sapiens
  misc_RNA (1)...(19): siRNA sense strand
gacaacccagcucagaaua

SEQ ID NO: 2159566 - RNA, 19 nt, Homo sapiens
  misc_RNA (1)...(19): siRNA sense strand
ggacccaccuggaccucau

SEQ ID NO: 2159567 - RNA, 19 nt, Homo sapiens
  misc_RNA (1)...(19): siRNA sense strand
ggaccaccaugucguacag

SEQ ID NO: 2159568 - RNA, 19 nt, Homo sapiens
  misc_RNA (1)...(19): siRNA sense strand
cgagaggcccgaggaguuu

SEQ ID NO: 2159569 - RNA, 19 nt, Homo sapiens
  misc_RNA (1)...(19): siRNA sense strand
ggagugcagcccuuuagug

SEQ ID NO: 2159570 - RNA, 19 nt, Homo sapiens
  misc_RNA (1)...(19): siRNA sense strand
gaaggagcacaucaauauc

SEQ ID NO: 2159571 - RNA, 19 nt, Homo sapiens
  misc_RNA (1)...(19): siRNA sense strand
gaagggauggagaucaaca

SEQ ID NO: 2159572 - RNA, 19 nt, Homo sapiens
  misc_RNA (1)...(19): siRNA sense strand
gaugaggugcuagagauga

SEQ ID NO: 2159573 - RNA, 19 nt, Homo sapiens
  misc_RNA (1)...(19): siRNA sense strand
gacgguccaucccaacaau

SEQ ID NO: 2159574 - RNA, 19 nt, Homo sapiens
  misc_RNA (1)...(19): siRNA sense strand
caacgugguggugauguuu

SEQ ID NO: 2159575 - RNA, 19 nt, Homo sapiens
  misc_RNA (1)...(19): siRNA sense strand
ugacaacccagcucagaau

SEQ ID NO: 2159576 - RNA, 19 nt, Homo sapiens
  misc_RNA (1)...(19): siRNA sense strand
cagaacaccucuuauuccu

SEQ ID NO: 2159577 - RNA, 19 nt, Homo sapiens
  misc_RNA (1)...(19): siRNA sense strand
caacaccacauccucagau

SEQ ID NO: 2159578 - RNA, 19 nt, Homo sapiens
  misc_RNA (1)...(19): siRNA sense strand
cgaucuccauccuacauug

SEQ ID NO: 2159579 - RNA, 19 nt, Homo sapiens
  misc_RNA (1)...(19): siRNA sense strand
gagggaaggagcacaucaa

SEQ ID NO: 2159580 - RNA, 19 nt, Homo sapiens
  misc_RNA (1)...(19): siRNA sense strand
ucaagccuaucacgcugaa

SEQ ID NO: 2159581 - RNA, 19 nt, Homo sapiens
  misc_RNA (1)...(19): siRNA sense strand
caucguggccgugcucauu

SEQ ID NO: 2159582 - RNA, 19 nt, Homo sapiens
  misc_RNA (1)...(19): siRNA sense strand
ccagauccgugccaagcau

SEQ ID NO: 2159583 - RNA, 19 nt, Homo sapiens
  misc_RNA (1)...(19): siRNA sense strand
caacagcuccagcguacag

SEQ ID NO: 2159584 - RNA, 19 nt, Homo sapiens
  misc_RNA (1)...(19): siRNA sense strand
uugaggaccugucagagau

SEQ ID NO: 2159585 - RNA, 19 nt, Homo sapiens
  misc_RNA (1)...(19): siRNA sense strand
acagcucuauuacuucaug

SEQ ID NO: 2159586 - RNA, 19 nt, Homo sapiens
  misc_RNA (1)...(19): siRNA sense strand
aaaguucaccucuacaagu

SEQ ID NO: 2159587 - RNA, 19 nt, Homo sapiens
  misc_RNA (1)...(19): siRNA sense strand
ugccagaacaccucuuauu

SEQ ID NO: 2159588 - RNA, 19 nt, Homo sapiens
  misc_RNA (1)...(19): siRNA sense strand
gcaacaccacauccucaga

SEQ ID NO: 2159589 - RNA, 19 nt, Homo sapiens
  misc_RNA (1)...(19): siRNA sense strand
ccaggaaggccgagugaag

SEQ ID NO: 2159590 - RNA, 19 nt, Homo sapiens
  misc_RNA (1)...(19): siRNA sense strand
cgaggaguuuggcuucauc

SEQ ID NO: 2159591 - RNA, 19 nt, Homo sapiens
  misc_RNA (1)...(19): siRNA sense strand
caauaucugugagguucug

SEQ ID NO: 2159592 - RNA, 19 nt, Homo sapiens
  misc_RNA (1)...(19): siRNA sense strand
ggagggaaggagcacauca

SEQ ID NO: 2159593 - RNA, 19 nt, Homo sapiens
  misc_RNA (1)...(19): siRNA sense strand
aaguucaccucuacaagug

SEQ ID NO: 2159594 - RNA, 19 nt, Homo sapiens
  misc_RNA (1)...(19): siRNA sense strand
ggagcauugucaguggaaa

SEQ ID NO: 2159595 - RNA, 19 nt, Homo sapiens
  misc_RNA (1)...(19): siRNA sense strand
acacacccaucgccguaug

SEQ ID NO: 2159596 - RNA, 19 nt, Homo sapiens
  misc_RNA (1)...(19): siRNA sense strand
augaagggauggagaucaa

SEQ ID NO: 2159597 - RNA, 19 nt, Homo sapiens
  misc_RNA (1)...(19): siRNA sense strand
gaccaacuucaccuacuau

SEQ ID NO: 2159598 - RNA, 19 nt, Homo sapiens
  misc_RNA (1)...(19): siRNA sense strand
ggagaaccugggccuggaa

SEQ ID NO: 2159599 - RNA, 19 nt, Homo sapiens
  misc_RNA (1)...(19): siRNA sense strand
acaacccagcucagaauaa

SEQ ID NO: 2159600 - RNA, 19 nt, Homo sapiens
  misc_RNA (1)...(19): siRNA sense strand
caccuggaccucauacaga

SEQ ID NO: 2159601 - RNA, 19 nt, Homo sapiens
  misc_RNA (1)...(19): siRNA sense strand
caccagcuuugucuucuac

SEQ ID NO: 2159602 - RNA, 19 nt, Homo sapiens
  misc_RNA (1)...(19): siRNA sense strand
gaucugcguggcugugugu

SEQ ID NO: 2159603 - RNA, 19 nt, Homo sapiens
  misc_RNA (1)...(19): siRNA sense strand
gacccagacuucgcaugug

SEQ ID NO: 2159604 - RNA, 19 nt, Homo sapiens
  misc_RNA (1)...(19): siRNA sense strand
cagcucagaauaaaguuca

SEQ ID NO: 2159605 - RNA, 19 nt, Homo sapiens
  misc_RNA (1)...(19): siRNA sense strand
ugacagucguguggaaugg

SEQ ID NO: 2159606 - RNA, 19 nt, Homo sapiens
  misc_RNA (1)...(19): siRNA sense strand
acgaaugcauccucaacau

SEQ ID NO: 2159607 - RNA, 19 nt, Homo sapiens
  misc_RNA (1)...(19): siRNA sense strand
uggaggugaucaagccuau

SEQ ID NO: 2159608 - RNA, 19 nt, Homo sapiens
  misc_RNA (1)...(19): siRNA sense strand
ugacccagacuucgcaugu

SEQ ID NO: 2159609 - RNA, 19 nt, Homo sapiens
  misc_RNA (1)...(19): siRNA sense strand
caacaauaucuccgucucu

SEQ ID NO: 2159610 - RNA, 19 nt, Homo sapiens
  misc_RNA (1)...(19): siRNA sense strand
cauugucaguggaaacaca

SEQ ID NO: 2159611 - RNA, 19 nt, Homo sapiens
  misc_RNA (1)...(19): siRNA sense strand
ucagaugaggugcuagaga

SEQ ID NO: 2159612 - RNA, 19 nt, Homo sapiens
  misc_RNA (1)...(19): siRNA sense strand
ccagaacaccucuuauucc

SEQ ID NO: 2159613 - RNA, 19 nt, Homo sapiens
  misc_RNA (1)...(19): siRNA sense strand
acaagaccaacuucaccua

SEQ ID NO: 2159614 - RNA, 19 nt, Homo sapiens
  misc_RNA (1)...(19): siRNA sense strand
gaucuccauccuacauugu

SEQ ID NO: 2159615 - RNA, 19 nt, Homo sapiens
  misc_RNA (1)...(19): siRNA sense strand
aaagcagcccugucucuuc

SEQ ID NO: 2159616 - RNA, 19 nt, Homo sapiens
  misc_RNA (1)...(19): siRNA sense strand
ucuauuacuucaugacacu

SEQ ID NO: 2159617 - RNA, 19 nt, Homo sapiens
  misc_RNA (1)...(19): siRNA sense strand
cagcaccagcuuugucuuc

SEQ ID NO: 2159618 - RNA, 19 nt, Homo sapiens
  misc_RNA (1)...(19): siRNA sense strand
gugucggccugaauucaug

SEQ ID NO: 2159619 - RNA, 19 nt, Homo sapiens
  misc_RNA (1)...(19): siRNA sense strand
uaaaguucaccucuacaag

SEQ ID NO: 2159620 - RNA, 19 nt, Homo sapiens
  misc_RNA (1)...(19): siRNA sense strand
gcagaggagcuggccuguu

SEQ ID NO: 2159621 - RNA, 19 nt, Homo sapiens
  misc_RNA (1)...(19): siRNA sense strand
cagcguggcuacgaaugca

SEQ ID NO: 2159622 - RNA, 19 nt, Homo sapiens
  misc_RNA (1)...(19): siRNA sense strand
ccaccaucgugcggauuga

SEQ ID NO: 2159623 - RNA, 19 nt, Homo sapiens
  misc_RNA (1)...(19): siRNA sense strand
ccuggaauuucgcgacauc

SEQ ID NO: 2159624 - RNA, 19 nt, Homo sapiens
  misc_RNA (1)...(19): siRNA sense strand
caucaauaucugugagguu

SEQ ID NO: 2159625 - RNA, 19 nt, Homo sapiens
  misc_RNA (1)...(19): siRNA sense strand
guguggcccuggagugcaa

SEQ ID NO: 2159626 - RNA, 19 nt, Homo sapiens
  misc_RNA (1)...(19): siRNA sense strand
cgugcucauugccuauaaa

SEQ ID NO: 2159627 - RNA, 19 nt, Homo sapiens
  misc_RNA (1)...(19): siRNA sense strand
cugcucauccucaacaaga

SEQ ID NO: 2159628 - RNA, 19 nt, Homo sapiens
  misc_RNA (1)...(19): siRNA sense strand
gaacaccucuuauuccuau

SEQ ID NO: 2159629 - RNA, 19 nt, Homo sapiens
  misc_RNA (1)...(19): siRNA sense strand
ggaaggagcacaucaauau

SEQ ID NO: 2159630 - RNA, 19 nt, Homo sapiens
  misc_RNA (1)...(19): siRNA sense strand
gcaaucagauccagugcua

SEQ ID NO: 2159631 - RNA, 19 nt, Homo sapiens
  misc_RNA (1)...(19): siRNA sense strand
gaacagaucgugugugaga

SEQ ID NO: 2159632 - RNA, 19 nt, Homo sapiens
  misc_RNA (1)...(19): siRNA sense strand
gaacuacacugugcugguu

SEQ ID NO: 2159633 - RNA, 19 nt, Homo sapiens
  misc_RNA (1)...(19): siRNA sense strand
gaauaaaguucaccucuac

SEQ ID NO: 2159634 - RNA, 19 nt, Homo sapiens
  misc_RNA (1)...(19): siRNA sense strand
cagaggagcuggccuguug

SEQ ID NO: 2159635 - RNA, 19 nt, Homo sapiens
  misc_RNA (1)...(19): siRNA sense strand
cagaacagaucguguguga

SEQ ID NO: 2159636 - RNA, 19 nt, Homo sapiens
  misc_RNA (1)...(19): siRNA sense strand
caacccagcucagaauaaa

SEQ ID NO: 2159637 - RNA, 19 nt, Homo sapiens
  misc_RNA (1)...(19): siRNA sense strand
ccucacagcucuauuacuu

SEQ ID NO: 2159638 - RNA, 19 nt, Homo sapiens
  misc_RNA (1)...(19): siRNA sense strand
gaaccugggccuggaauuu

SEQ ID NO: 2159639 - RNA, 19 nt, Homo sapiens
  misc_RNA (1)...(19): siRNA sense strand
agaauaaaguucaccucua

SEQ ID NO: 2159640 - RNA, 19 nt, Homo sapiens
  misc_RNA (1)...(19): siRNA sense strand
ggagcugucuggugccaaa

SEQ ID NO: 2159641 - RNA, 19 nt, Homo sapiens
  misc_RNA (1)...(19): siRNA sense strand
gcacgcccaucauccuaaa

SEQ ID NO: 2159642 - RNA, 19 nt, Homo sapiens
  misc_RNA (1)...(19): siRNA sense strand
gcaagucccgcgaaaguga

SEQ ID NO: 2159643 - RNA, 19 nt, Homo sapiens
  misc_RNA (1)...(19): siRNA sense strand
gguccucacagcucuauua

SEQ ID NO: 2159644 - RNA, 19 nt, Homo sapiens
  misc_RNA (1)...(19): siRNA sense strand
ucacagcucuauuacuuca

SEQ ID NO: 2159645 - RNA, 19 nt, Homo sapiens
  misc_RNA (1)...(19): siRNA sense strand
gcaccagcuuugucuucua

SEQ ID NO: 2159646 - RNA, 19 nt, Homo sapiens
  misc_RNA (1)...(19): siRNA sense strand
cagaugaggugcuagagau

SEQ ID NO: 2159647 - RNA, 19 nt, Homo sapiens
  misc_RNA (1)...(19): siRNA sense strand
gcaacgugguggugauguu

SEQ ID NO: 2159648 - RNA, 19 nt, Homo sapiens
  misc_RNA (1)...(19): siRNA sense strand
ggaaugggcacuucaacau

SEQ ID NO: 2159649 - RNA, 19 nt, Homo sapiens
  misc_RNA (1)...(19): siRNA sense strand
gaagcaacgugguggugau

SEQ ID NO: 2159650 - RNA, 19 nt, Homo sapiens
  misc_RNA (1)...(19): siRNA sense strand
gcccuuuaguggaugguua

SEQ ID NO: 2159651 - RNA, 19 nt, Homo sapiens
  misc_RNA (1)...(19): siRNA sense strand
aaacgcaagucccgcgaaa

SEQ ID NO: 2159652 - RNA, 19 nt, Homo sapiens
  misc_RNA (1)...(19): siRNA sense strand
gggaaggagcacaucaaua

SEQ ID NO: 2159653 - RNA, 19 nt, Homo sapiens
  misc_RNA (1)...(19): siRNA sense strand
gaaagcagcccugucucuu

SEQ ID NO: 2159654 - RNA, 19 nt, Homo sapiens
  misc_RNA (1)...(19): siRNA sense strand
gugcagcccuuuaguggau

SEQ ID NO: 2159655 - RNA, 19 nt, Homo sapiens
  misc_RNA (1)...(19): siRNA sense strand
agaccaacuucaccuacua

SEQ ID NO: 2159656 - RNA, 19 nt, Homo sapiens
  misc_RNA (1)...(19): siRNA sense strand
ggauggagaucaacaaccu

SEQ ID NO: 2159657 - RNA, 19 nt, Homo sapiens
  misc_RNA (1)...(19): siRNA sense strand
cauccuacauugucugcaa

SEQ ID NO: 2159658 - RNA, 19 nt, Homo sapiens
  misc_RNA (1)...(19): siRNA sense strand
ggaaagcagcccugucucu

SEQ ID NO: 2159659 - RNA, 19 nt, Homo sapiens
  misc_RNA (1)...(19): siRNA sense strand
ucugaacgcuacugagaug

SEQ ID NO: 2159660 - RNA, 19 nt, Homo sapiens
  misc_RNA (1)...(19): siRNA sense strand
ggcgucaacugcaccuuug

SEQ ID NO: 2159661 - RNA, 19 nt, Homo sapiens
  misc_RNA (1)...(19): siRNA sense strand
gcaacgugaagcugaacua

SEQ ID NO: 2159662 - RNA, 19 nt, Homo sapiens
  misc_RNA (1)...(19): siRNA sense strand
uuacaucccugcagaacag

SEQ ID NO: 2159663 - RNA, 19 nt, Homo sapiens
  misc_RNA (1)...(19): siRNA sense strand
ggugugagcgguccaagga

SEQ ID NO: 2159664 - RNA, 19 nt, Homo sapiens
  misc_RNA (1)...(19): siRNA sense strand
gccagaacaccucuuauuc

SEQ ID NO: 2159665 - RNA, 19 nt, Homo sapiens
  misc_RNA (1)...(19): siRNA sense strand
gacaacccagcucagaaua

SEQ ID NO: 2159666 - RNA, 19 nt, Homo sapiens
  misc_RNA (1)...(19): siRNA sense strand
ggacccaccuggaccucau

SEQ ID NO: 2159667 - RNA, 19 nt, Homo sapiens
  misc_RNA (1)...(19): siRNA sense strand
ggaccaccaugucguacag

SEQ ID NO: 2159668 - RNA, 19 nt, Homo sapiens
  misc_RNA (1)...(19): siRNA sense strand
cgagaggcccgaggaguuu

SEQ ID NO: 2159669 - RNA, 19 nt, Homo sapiens
  misc_RNA (1)...(19): siRNA sense strand
ggagugcagcccuuuagug

SEQ ID NO: 2159670 - RNA, 19 nt, Homo sapiens
  misc_RNA (1)...(19): siRNA sense strand
gaaggagcacaucaauauc

SEQ ID NO: 2159671 - RNA, 19 nt, Homo sapiens
  misc_RNA (1)...(19): siRNA sense strand
gaagggauggagaucaaca

SEQ ID NO: 2159672 - RNA, 19 nt, Homo sapiens
  misc_RNA (1)...(19): siRNA sense strand
gaugaggugcuagagauga

SEQ ID NO: 2159673 - RNA, 19 nt, Homo sapiens
  misc_RNA (1)...(19): siRNA sense strand
gacgguccaucccaacaau

SEQ ID NO: 2159674 - RNA, 19 nt, Homo sapiens
  misc_RNA (1)...(19): siRNA sense strand
caacgugguggugauguuu

SEQ ID NO: 2159675 - RNA, 19 nt, Homo sapiens
  misc_RNA (1)...(19): siRNA sense strand
ugacaacccagcucagaau

SEQ ID NO: 2159676 - RNA, 19 nt, Homo sapiens
  misc_RNA (1)...(19): siRNA sense strand
cagaacaccucuuauuccu

SEQ ID NO: 2159677 - RNA, 19 nt, Homo sapiens
  misc_RNA (1)...(19): siRNA sense strand
caacaccacauccucagau

SEQ ID NO: 2159678 - RNA, 19 nt, Homo sapiens
  misc_RNA (1)...(19): siRNA sense strand
cgaucuccauccuacauug

SEQ ID NO: 2159679 - RNA, 19 nt, Homo sapiens
  misc_RNA (1)...(19): siRNA sense strand
gagggaaggagcacaucaa

SEQ ID NO: 2159680 - RNA, 19 nt, Homo sapiens
  misc_RNA (1)...(19): siRNA sense strand
ucaagccuaucacgcugaa

SEQ ID NO: 2159681 - RNA, 19 nt, Homo sapiens
  misc_RNA (1)...(19): siRNA sense strand
caucguggccgugcucauu

SEQ ID NO: 2159682 - RNA, 19 nt, Homo sapiens
  misc_RNA (1)...(19): siRNA sense strand
ccagauccgugccaagcau

SEQ ID NO: 2159683 - RNA, 19 nt, Homo sapiens
  misc_RNA (1)...(19): siRNA sense strand
caacagcuccagcguacag

SEQ ID NO: 2159684 - RNA, 19 nt, Homo sapiens
  misc_RNA (1)...(19): siRNA sense strand
uugaggaccugucagagau

SEQ ID NO: 2159685 - RNA, 19 nt, Homo sapiens
  misc_RNA (1)...(19): siRNA sense strand
acagcucuauuacuucaug

SEQ ID NO: 2159686 - RNA, 19 nt, Homo sapiens
  misc_RNA (1)...(19): siRNA sense strand
aaaguucaccucuacaagu

SEQ ID NO: 2159687 - RNA, 19 nt, Homo sapiens
  misc_RNA (1)...(19): siRNA sense strand
ugccagaacaccucuuauu

SEQ ID NO: 2159688 - RNA, 19 nt, Homo sapiens
  misc_RNA (1)...(19): siRNA sense strand
gcaacaccacauccucaga

SEQ ID NO: 2159689 - RNA, 19 nt, Homo sapiens
  misc_RNA (1)...(19): siRNA sense strand
ccaggaaggccgagugaag

SEQ ID NO: 2159690 - RNA, 19 nt, Homo sapiens
  misc_RNA (1)...(19): siRNA sense strand
cgaggaguuuggcuucauc

SEQ ID NO: 2159691 - RNA, 19 nt, Homo sapiens
  misc_RNA (1)...(19): siRNA sense strand
caauaucugugagguucug

SEQ ID NO: 2159692 - RNA, 19 nt, Homo sapiens
  misc_RNA (1)...(19): siRNA sense strand
ggagggaaggagcacauca

SEQ ID NO: 2159693 - RNA, 19 nt, Homo sapiens
  misc_RNA (1)...(19): siRNA sense strand
aaguucaccucuacaagug

SEQ ID NO: 2159694 - RNA, 19 nt, Homo sapiens
  misc_RNA (1)...(19): siRNA sense strand
ggagcauugucaguggaaa

SEQ ID NO: 2159695 - RNA, 19 nt, Homo sapiens
  misc_RNA (1)...(19): siRNA sense strand
acacacccaucgccguaug

SEQ ID NO: 2159696 - RNA, 19 nt, Homo sapiens
  misc_RNA (1)...(19): siRNA sense strand
augaagggauggagaucaa

SEQ ID NO: 2159697 - RNA, 19 nt, Homo sapiens
  misc_RNA (1)...(19): siRNA sense strand
gaccaacuucaccuacuau

SEQ ID NO: 2159698 - RNA, 19 nt, Homo sapiens
  misc_RNA (1)...(19): siRNA sense strand
ggagaaccugggccuggaa

SEQ ID NO: 2159699 - RNA, 19 nt, Homo sapiens
  misc_RNA (1)...(19): siRNA sense strand
acaacccagcucagaauaa

SEQ ID NO: 2159700 - RNA, 19 nt, Homo sapiens
  misc_RNA (1)...(19): siRNA sense strand
caccuggaccucauacaga

SEQ ID NO: 2159701 - RNA, 19 nt, Homo sapiens
  misc_RNA (1)...(19): siRNA sense strand
caccagcuuugucuucuac

SEQ ID NO: 2159702 - RNA, 19 nt, Homo sapiens
  misc_RNA (1)...(19): siRNA sense strand
gaucugcguggcugugugu

SEQ ID NO: 2159703 - RNA, 19 nt, Homo sapiens
  misc_RNA (1)...(19): siRNA sense strand
gacccagacuucgcaugug

SEQ ID NO: 2159704 - RNA, 19 nt, Homo sapiens
  misc_RNA (1)...(19): siRNA sense strand
cagcucagaauaaaguuca

SEQ ID NO: 2159705 - RNA, 19 nt, Homo sapiens
  misc_RNA (1)...(19): siRNA sense strand
ugacagucguguggaaugg

SEQ ID NO: 2159706 - RNA, 19 nt, Homo sapiens
  misc_RNA (1)...(19): siRNA sense strand
acgaaugcauccucaacau

SEQ ID NO: 2159707 - RNA, 19 nt, Homo sapiens
  misc_RNA (1)...(19): siRNA sense strand
uggaggugaucaagccuau

SEQ ID NO: 2159708 - RNA, 19 nt, Homo sapiens
  misc_RNA (1)...(19): siRNA sense strand
ugacccagacuucgcaugu

SEQ ID NO: 2159709 - RNA, 19 nt, Homo sapiens
  misc_RNA (1)...(19): siRNA sense strand
caacaauaucuccgucucu

SEQ ID NO: 2159710 - RNA, 19 nt, Homo sapiens
  misc_RNA (1)...(19): siRNA sense strand
cauugucaguggaaacaca

SEQ ID NO: 2159711 - RNA, 19 nt, Homo sapiens
  misc_RNA (1)...(19): siRNA sense strand
ucagaugaggugcuagaga

SEQ ID NO: 2159712 - RNA, 19 nt, Homo sapiens
  misc_RNA (1)...(19): siRNA sense strand
ccagaacaccucuuauucc

SEQ ID NO: 2159713 - RNA, 19 nt, Homo sapiens
  misc_RNA (1)...(19): siRNA sense strand
acaagaccaacuucaccua

SEQ ID NO: 2159714 - RNA, 19 nt, Homo sapiens
  misc_RNA (1)...(19): siRNA sense strand
gaucuccauccuacauugu

SEQ ID NO: 2159715 - RNA, 19 nt, Homo sapiens
  misc_RNA (1)...(19): siRNA sense strand
aaagcagcccugucucuuc

SEQ ID NO: 2159716 - RNA, 19 nt, Homo sapiens
  misc_RNA (1)...(19): siRNA sense strand
ucuauuacuucaugacacu

SEQ ID NO: 2159717 - RNA, 19 nt, Homo sapiens
  misc_RNA (1)...(19): siRNA sense strand
cagcaccagcuuugucuuc

SEQ ID NO: 2159718 - RNA, 19 nt, Homo sapiens
  misc_RNA (1)...(19): siRNA sense strand
gugucggccugaauucaug

SEQ ID NO: 2159719 - RNA, 19 nt, Homo sapiens
  misc_RNA (1)...(19): siRNA sense strand
uaaaguucaccucuacaag

SEQ ID NO: 2159720 - RNA, 19 nt, Homo sapiens
  misc_RNA (1)...(19): siRNA sense strand
gcagaggagcuggccuguu

SEQ ID NO: 2159721 - RNA, 19 nt, Homo sapiens
  misc_RNA (1)...(19): siRNA sense strand
cagcguggcuacgaaugca

SEQ ID NO: 2159722 - RNA, 19 nt, Homo sapiens
  misc_RNA (1)...(19): siRNA sense strand
ccaccaucgugcggauuga

SEQ ID NO: 2159723 - RNA, 19 nt, Homo sapiens
  misc_RNA (1)...(19): siRNA sense strand
ccuggaauuucgcgacauc

SEQ ID NO: 2159724 - RNA, 19 nt, Homo sapiens
  misc_RNA (1)...(19): siRNA sense strand
caucaauaucugugagguu

SEQ ID NO: 2159725 - RNA, 19 nt, Homo sapiens
  misc_RNA (1)...(19): siRNA sense strand
guguggcccuggagugcaa

SEQ ID NO: 2159726 - RNA, 19 nt, Homo sapiens
  misc_RNA (1)...(19): siRNA sense strand
cgugcucauugccuauaaa

SEQ ID NO: 2159727 - RNA, 19 nt, Homo sapiens
  misc_RNA (1)...(19): siRNA sense strand
cugcucauccucaacaaga

SEQ ID NO: 2159728 - RNA, 19 nt, Homo sapiens
  misc_RNA (1)...(19): siRNA sense strand
caacgaaucuucccacuua

SEQ ID NO: 2159729 - RNA, 19 nt, Homo sapiens
  misc_RNA (1)...(19): siRNA sense strand
gaagaacucugacucaaga

SEQ ID NO: 2159730 - RNA, 19 nt, Homo sapiens
  misc_RNA (1)...(19): siRNA sense strand
gagaccaaaucaaguauua

SEQ ID NO: 2159731 - RNA, 19 nt, Homo sapiens
  misc_RNA (1)...(19): siRNA sense strand
ugacagaucuaagacauua

SEQ ID NO: 2159732 - RNA, 19 nt, Homo sapiens
  misc_RNA (1)...(19): siRNA sense strand
cgaaagaccuggaaucaau

SEQ ID NO: 2159733 - RNA, 19 nt, Homo sapiens
  misc_RNA (1)...(19): siRNA sense strand
gugauucucucuuggauua

SEQ ID NO: 2159734 - RNA, 19 nt, Homo sapiens
  misc_RNA (1)...(19): siRNA sense strand
ugaaaggcuuccuagauua

SEQ ID NO: 2159735 - RNA, 19 nt, Homo sapiens
  misc_RNA (1)...(19): siRNA sense strand
gaagaaauggaaagacaua

SEQ ID NO: 2159736 - RNA, 19 nt, Homo sapiens
  misc_RNA (1)...(19): siRNA sense strand
gaggauauguucaugaaau

SEQ ID NO: 2159737 - RNA, 19 nt, Homo sapiens
  misc_RNA (1)...(19): siRNA sense strand
caaggaagcuacugugguu

SEQ ID NO: 2159738 - RNA, 19 nt, Homo sapiens
  misc_RNA (1)...(19): siRNA sense strand
ggaagacuauucagacaga

SEQ ID NO: 2159739 - RNA, 19 nt, Homo sapiens
  misc_RNA (1)...(19): siRNA sense strand
ugaagcagccuguggauua

SEQ ID NO: 2159740 - RNA, 19 nt, Homo sapiens
  misc_RNA (1)...(19): siRNA sense strand
acaccaaccugcaagaaua

SEQ ID NO: 2159741 - RNA, 19 nt, Homo sapiens
  misc_RNA (1)...(19): siRNA sense strand
ggccaaggcucaucacauu

SEQ ID NO: 2159742 - RNA, 19 nt, Homo sapiens
  misc_RNA (1)...(19): siRNA sense strand
gacaauacuuugauguuug

SEQ ID NO: 2159743 - RNA, 19 nt, Homo sapiens
  misc_RNA (1)...(19): siRNA sense strand
caacagcucuuggaucaug

SEQ ID NO: 2159744 - RNA, 19 nt, Homo sapiens
  misc_RNA (1)...(19): siRNA sense strand
gcccugaccucuucacaaa

SEQ ID NO: 2159745 - RNA, 19 nt, Homo sapiens
  misc_RNA (1)...(19): siRNA sense strand
gaauacgaauaccaauuga

SEQ ID NO: 2159746 - RNA, 19 nt, Homo sapiens
  misc_RNA (1)...(19): siRNA sense strand
ccugaccucuucacaaaua

SEQ ID NO: 2159747 - RNA, 19 nt, Homo sapiens
  misc_RNA (1)...(19): siRNA sense strand
gaacaacccaggccaagau

SEQ ID NO: 2159748 - RNA, 19 nt, Homo sapiens
  misc_RNA (1)...(19): siRNA sense strand
gaaacgagagguuauuuua

SEQ ID NO: 2159749 - RNA, 19 nt, Homo sapiens
  misc_RNA (1)...(19): siRNA sense strand
gagaauaggagaccaaauc

SEQ ID NO: 2159750 - RNA, 19 nt, Homo sapiens
  misc_RNA (1)...(19): siRNA sense strand
ggaaucaggaacagcuuua

SEQ ID NO: 2159751 - RNA, 19 nt, Homo sapiens
  misc_RNA (1)...(19): siRNA sense strand
cuaggaacaugguguauau

SEQ ID NO: 2159752 - RNA, 19 nt, Homo sapiens
  misc_RNA (1)...(19): siRNA sense strand
cuacacagauacuauuaga

SEQ ID NO: 2159753 - RNA, 19 nt, Homo sapiens
  misc_RNA (1)...(19): siRNA sense strand
gaucuacucuggguaacaa

SEQ ID NO: 2159754 - RNA, 19 nt, Homo sapiens
  misc_RNA (1)...(19): siRNA sense strand
caaaguggcagaauacgaa

SEQ ID NO: 2159755 - RNA, 19 nt, Homo sapiens
  misc_RNA (1)...(19): siRNA sense strand
ggacuacacagauacuauu

SEQ ID NO: 2159756 - RNA, 19 nt, Homo sapiens
  misc_RNA (1)...(19): siRNA sense strand
gaagggugguaauguggaa

SEQ ID NO: 2159757 - RNA, 19 nt, Homo sapiens
  misc_RNA (1)...(19): siRNA sense strand
gaaaggcuuccuagauuau

SEQ ID NO: 2159758 - RNA, 19 nt, Homo sapiens
  misc_RNA (1)...(19): siRNA sense strand
ccacuguucuauucugaaa

SEQ ID NO: 2159759 - RNA, 19 nt, Homo sapiens
  misc_RNA (1)...(19): siRNA sense strand
uagaagaaauggaaagaca

SEQ ID NO: 2159760 - RNA, 19 nt, Homo sapiens
  misc_RNA (1)...(19): siRNA sense strand
gaaauuaucgcuguuccuu

SEQ ID NO: 2159761 - RNA, 19 nt, Homo sapiens
  misc_RNA (1)...(19): siRNA sense strand
ggauuuauauggugucucu

SEQ ID NO: 2159762 - RNA, 19 nt, Homo sapiens
  misc_RNA (1)...(19): siRNA sense strand
uuaggaaacucaagugaug

SEQ ID NO: 2159763 - RNA, 19 nt, Homo sapiens
  misc_RNA (1)...(19): siRNA sense strand
gaaccaagggauuuauaug

SEQ ID NO: 2159764 - RNA, 19 nt, Homo sapiens
  misc_RNA (1)...(19): siRNA sense strand
cuacuuugcucauugcuau

SEQ ID NO: 2159765 - RNA, 19 nt, Homo sapiens
  misc_RNA (1)...(19): siRNA sense strand
gaauaccaauugacuguac

SEQ ID NO: 2159766 - RNA, 19 nt, Homo sapiens
  misc_RNA (1)...(19): siRNA sense strand
cacauuggcuggcagagaa

SEQ ID NO: 2159767 - RNA, 19 nt, Homo sapiens
  misc_RNA (1)...(19): siRNA sense strand
augaaaggcuuccuagauu

SEQ ID NO: 2159768 - RNA, 19 nt, Homo sapiens
  misc_RNA (1)...(19): siRNA sense strand
ugaagaugcuuacaaagag

SEQ ID NO: 2159769 - RNA, 19 nt, Homo sapiens
  misc_RNA (1)...(19): siRNA sense strand
auucucagcuugcaaguuu

SEQ ID NO: 2159770 - RNA, 19 nt, Homo sapiens
  misc_RNA (1)...(19): siRNA sense strand
gcucauugcuauccauaca

SEQ ID NO: 2159771 - RNA, 19 nt, Homo sapiens
  misc_RNA (1)...(19): siRNA sense strand
gcucuuggaucaugaaagg

SEQ ID NO: 2159772 - RNA, 19 nt, Homo sapiens
  misc_RNA (1)...(19): siRNA sense strand
ugauagacauuacauugga

SEQ ID NO: 2159773 - RNA, 19 nt, Homo sapiens
  misc_RNA (1)...(19): siRNA sense strand
gagaaacgagagguuauuu

SEQ ID NO: 2159774 - RNA, 19 nt, Homo sapiens
  misc_RNA (1)...(19): siRNA sense strand
ggaagcuacugugguuuau

SEQ ID NO: 2159775 - RNA, 19 nt, Homo sapiens
  misc_RNA (1)...(19): siRNA sense strand
caccaaaccugcuagucuu

SEQ ID NO: 2159776 - RNA, 19 nt, Homo sapiens
  misc_RNA (1)...(19): siRNA sense strand
gucuacagauucacuauug

SEQ ID NO: 2159777 - RNA, 19 nt, Homo sapiens
  misc_RNA (1)...(19): siRNA sense strand
ggaacaugguguauauuuu

SEQ ID NO: 2159778 - RNA, 19 nt, Homo sapiens
  misc_RNA (1)...(19): siRNA sense strand
gcacucauuucagcacgaa

SEQ ID NO: 2159779 - RNA, 19 nt, Homo sapiens
  misc_RNA (1)...(19): siRNA sense strand
gaacaggaagggugguaau

SEQ ID NO: 2159780 - RNA, 19 nt, Homo sapiens
  misc_RNA (1)...(19): siRNA sense strand
gccacacgcuugcuaggaa

SEQ ID NO: 2159781 - RNA, 19 nt, Homo sapiens
  misc_RNA (1)...(19): siRNA sense strand
gaucaugaaaggcuuccua

SEQ ID NO: 2159782 - RNA, 19 nt, Homo sapiens
  misc_RNA (1)...(19): siRNA sense strand
ggagaaacgagagguuauu

SEQ ID NO: 2159783 - RNA, 19 nt, Homo sapiens
  misc_RNA (1)...(19): siRNA sense strand
agaauacgaauaccaauug

SEQ ID NO: 2159784 - RNA, 19 nt, Homo sapiens
  misc_RNA (1)...(19): siRNA sense strand
gaaagaccuggaaucaaug

SEQ ID NO: 2159785 - RNA, 19 nt, Homo sapiens
  misc_RNA (1)...(19): siRNA sense strand
ggaacagcuuuaccaugga

SEQ ID NO: 2159786 - RNA, 19 nt, Homo sapiens
  misc_RNA (1)...(19): siRNA sense strand
gaagagcaaagaaggaaca

SEQ ID NO: 2159787 - RNA, 19 nt, Homo sapiens
  misc_RNA (1)...(19): siRNA sense strand
gguagugacagaucuaaga

SEQ ID NO: 2159788 - RNA, 19 nt, Homo sapiens
  misc_RNA (1)...(19): siRNA sense strand
ucucuuacauggacauuuc

SEQ ID NO: 2159789 - RNA, 19 nt, Homo sapiens
  misc_RNA (1)...(19): siRNA sense strand
caggaauagucuacagauu

SEQ ID NO: 2159790 - RNA, 19 nt, Homo sapiens
  misc_RNA (1)...(19): siRNA sense strand
uauauggugucucuucuuc

SEQ ID NO: 2159791 - RNA, 19 nt, Homo sapiens
  misc_RNA (1)...(19): siRNA sense strand
ccugaaagaauuagaagaa

SEQ ID NO: 2159792 - RNA, 19 nt, Homo sapiens
  misc_RNA (1)...(19): siRNA sense strand
caggaagggugguaaugug

SEQ ID NO: 2159793 - RNA, 19 nt, Homo sapiens
  misc_RNA (1)...(19): siRNA sense strand
gacauuauacuuacagcaa

SEQ ID NO: 2159794 - RNA, 19 nt, Homo sapiens
  misc_RNA (1)...(19): siRNA sense strand
gaucuucauggccauagua

SEQ ID NO: 2159795 - RNA, 19 nt, Homo sapiens
  misc_RNA (1)...(19): siRNA sense strand
caugaaaggcuuccuagau

SEQ ID NO: 2159796 - RNA, 19 nt, Homo sapiens
  misc_RNA (1)...(19): siRNA sense strand
gcuaggaacaugguguaua

SEQ ID NO: 2159797 - RNA, 19 nt, Homo sapiens
  misc_RNA (1)...(19): siRNA sense strand
cgccauuauuucucucuua

SEQ ID NO: 2159798 - RNA, 19 nt, Homo sapiens
  misc_RNA (1)...(19): siRNA sense strand
uaggagaccaaaucaagua

SEQ ID NO: 2159799 - RNA, 19 nt, Homo sapiens
  misc_RNA (1)...(19): siRNA sense strand
gaagcagccuguggauuac

SEQ ID NO: 2159800 - RNA, 19 nt, Homo sapiens
  misc_RNA (1)...(19): siRNA sense strand
gauucucucuuggauuauu

SEQ ID NO: 2159801 - RNA, 19 nt, Homo sapiens
  misc_RNA (1)...(19): siRNA sense strand
aaacgaggcacucauuuca

SEQ ID NO: 2159802 - RNA, 19 nt, Homo sapiens
  misc_RNA (1)...(19): siRNA sense strand
uagucaaaguggcagaaua

SEQ ID NO: 2159803 - RNA, 19 nt, Homo sapiens
  misc_RNA (1)...(19): siRNA sense strand
acauggacauuucaauuuc

SEQ ID NO: 2159804 - RNA, 19 nt, Homo sapiens
  misc_RNA (1)...(19): siRNA sense strand
gcacgaaagaccuggaauc

SEQ ID NO: 2159805 - RNA, 19 nt, Homo sapiens
  misc_RNA (1)...(19): siRNA sense strand
caaacgaggcacucauuuc

SEQ ID NO: 2159806 - RNA, 19 nt, Homo sapiens
  misc_RNA (1)...(19): siRNA sense strand
gacuacacagauacuauua

SEQ ID NO: 2159807 - RNA, 19 nt, Homo sapiens
  misc_RNA (1)...(19): siRNA sense strand
uuucuggcaucaauaauga

SEQ ID NO: 2159808 - RNA, 19 nt, Homo sapiens
  misc_RNA (1)...(19): siRNA sense strand
cuucaucggugugcacuuu

SEQ ID NO: 2159809 - RNA, 19 nt, Homo sapiens
  misc_RNA (1)...(19): siRNA sense strand
guccugagccaguguauau

SEQ ID NO: 2159810 - RNA, 19 nt, Homo sapiens
  misc_RNA (1)...(19): siRNA sense strand
gagcaggaauagucuacag

SEQ ID NO: 2159811 - RNA, 19 nt, Homo sapiens
  misc_RNA (1)...(19): siRNA sense strand
uaauaugcgagcaggaaua

SEQ ID NO: 2159812 - RNA, 19 nt, Homo sapiens
  misc_RNA (1)...(19): siRNA sense strand
cagaauacgaauaccaauu

SEQ ID NO: 2159813 - RNA, 19 nt, Homo sapiens
  misc_RNA (1)...(19): siRNA sense strand
gauagacauuacauuggau

SEQ ID NO: 2159814 - RNA, 19 nt, Homo sapiens
  misc_RNA (1)...(19): siRNA sense strand
ccaaaccugcuagucuuua

SEQ ID NO: 2159815 - RNA, 19 nt, Homo sapiens
  misc_RNA (1)...(19): siRNA sense strand
gauucacuauugucaacuu

SEQ ID NO: 2159816 - RNA, 19 nt, Homo sapiens
  misc_RNA (1)...(19): siRNA sense strand
gaagacuauucagacagaa

SEQ ID NO: 2159817 - RNA, 19 nt, Homo sapiens
  misc_RNA (1)...(19): siRNA sense strand
uacagaagguagucaaagu

SEQ ID NO: 2159818 - RNA, 19 nt, Homo sapiens
  misc_RNA (1)...(19): siRNA sense strand
agacauauaacccuggaaa

SEQ ID NO: 2159819 - RNA, 19 nt, Homo sapiens
  misc_RNA (1)...(19): siRNA sense strand
caaguuuaauguccagaag

SEQ ID NO: 2159820 - RNA, 19 nt, Homo sapiens
  misc_RNA (1)...(19): siRNA sense strand
gaacucugacucaagaaag

SEQ ID NO: 2159821 - RNA, 19 nt, Homo sapiens
  misc_RNA (1)...(19): siRNA sense strand
gaauaggagaccaaaucaa

SEQ ID NO: 2159822 - RNA, 19 nt, Homo sapiens
  misc_RNA (1)...(19): siRNA sense strand
cugaagaugcuuacaaaga

SEQ ID NO: 2159823 - RNA, 19 nt, Homo sapiens
  misc_RNA (1)...(19): siRNA sense strand
aauuaucgcuguuccuuag

SEQ ID NO: 2159824 - RNA, 19 nt, Homo sapiens
  misc_RNA (1)...(19): siRNA sense strand
gcggaaggcugugauucug

SEQ ID NO: 2159825 - RNA, 19 nt, Homo sapiens
  misc_RNA (1)...(19): siRNA sense strand
gcaggaauagucuacagau

SEQ ID NO: 2159826 - RNA, 19 nt, Homo sapiens
  misc_RNA (1)...(19): siRNA sense strand
gguaaccgaacaccuuuga

SEQ ID NO: 2159827 - RNA, 19 nt, Homo sapiens
  misc_RNA (1)...(19): siRNA sense strand
gcaaguuuaauguccagaa

SEQ ID NO: 2159828 - RNA, 19 nt, Homo sapiens
  misc_RNA (1)...(19): siRNA sense strand
caacgaaucuucccacuua

SEQ ID NO: 2159829 - RNA, 19 nt, Homo sapiens
  misc_RNA (1)...(19): siRNA sense strand
gaagaacucugacucaaga

SEQ ID NO: 2159830 - RNA, 19 nt, Homo sapiens
  misc_RNA (1)...(19): siRNA sense strand
gagaccaaaucaaguauua

SEQ ID NO: 2159831 - RNA, 19 nt, Homo sapiens
  misc_RNA (1)...(19): siRNA sense strand
ugacagaucuaagacauua

SEQ ID NO: 2159832 - RNA, 19 nt, Homo sapiens
  misc_RNA (1)...(19): siRNA sense strand
cgaaagaccuggaaucaau

SEQ ID NO: 2159833 - RNA, 19 nt, Homo sapiens
  misc_RNA (1)...(19): siRNA sense strand
gugauucucucuuggauua

SEQ ID NO: 2159834 - RNA, 19 nt, Homo sapiens
  misc_RNA (1)...(19): siRNA sense strand
ugaaaggcuuccuagauua

SEQ ID NO: 2159835 - RNA, 19 nt, Homo sapiens
  misc_RNA (1)...(19): siRNA sense strand
gaagaaauggaaagacaua

SEQ ID NO: 2159836 - RNA, 19 nt, Homo sapiens
  misc_RNA (1)...(19): siRNA sense strand
gaggauauguucaugaaau

SEQ ID NO: 2159837 - RNA, 19 nt, Homo sapiens
  misc_RNA (1)...(19): siRNA sense strand
caaggaagcuacugugguu

SEQ ID NO: 2159838 - RNA, 19 nt, Homo sapiens
  misc_RNA (1)...(19): siRNA sense strand
ggaagacuauucagacaga

SEQ ID NO: 2159839 - RNA, 19 nt, Homo sapiens
  misc_RNA (1)...(19): siRNA sense strand
ugaagcagccuguggauua

SEQ ID NO: 2159840 - RNA, 19 nt, Homo sapiens
  misc_RNA (1)...(19): siRNA sense strand
acaccaaccugcaagaaua

SEQ ID NO: 2159841 - RNA, 19 nt, Homo sapiens
  misc_RNA (1)...(19): siRNA sense strand
ggccaaggcucaucacauu

SEQ ID NO: 2159842 - RNA, 19 nt, Homo sapiens
  misc_RNA (1)...(19): siRNA sense strand
gacaauacuuugauguuug

SEQ ID NO: 2159843 - RNA, 19 nt, Homo sapiens
  misc_RNA (1)...(19): siRNA sense strand
caacagcucuuggaucaug

SEQ ID NO: 2159844 - RNA, 19 nt, Homo sapiens
  misc_RNA (1)...(19): siRNA sense strand
gcccugaccucuucacaaa

SEQ ID NO: 2159845 - RNA, 19 nt, Homo sapiens
  misc_RNA (1)...(19): siRNA sense strand
gaauacgaauaccaauuga

SEQ ID NO: 2159846 - RNA, 19 nt, Homo sapiens
  misc_RNA (1)...(19): siRNA sense strand
ccugaccucuucacaaaua

SEQ ID NO: 2159847 - RNA, 19 nt, Homo sapiens
  misc_RNA (1)...(19): siRNA sense strand
gaacaacccaggccaagau

SEQ ID NO: 2159848 - RNA, 19 nt, Homo sapiens
  misc_RNA (1)...(19): siRNA sense strand
gaaacgagagguuauuuua

SEQ ID NO: 2159849 - RNA, 19 nt, Homo sapiens
  misc_RNA (1)...(19): siRNA sense strand
gagaauaggagaccaaauc

SEQ ID NO: 2159850 - RNA, 19 nt, Homo sapiens
  misc_RNA (1)...(19): siRNA sense strand
ggaaucaggaacagcuuua

SEQ ID NO: 2159851 - RNA, 19 nt, Homo sapiens
  misc_RNA (1)...(19): siRNA sense strand
cuaggaacaugguguauau

SEQ ID NO: 2159852 - RNA, 19 nt, Homo sapiens
  misc_RNA (1)...(19): siRNA sense strand
cuacacagauacuauuaga

SEQ ID NO: 2159853 - RNA, 19 nt, Homo sapiens
  misc_RNA (1)...(19): siRNA sense strand
gaucuacucuggguaacaa

SEQ ID NO: 2159854 - RNA, 19 nt, Homo sapiens
  misc_RNA (1)...(19): siRNA sense strand
caaaguggcagaauacgaa

SEQ ID NO: 2159855 - RNA, 19 nt, Homo sapiens
  misc_RNA (1)...(19): siRNA sense strand
ggacuacacagauacuauu

SEQ ID NO: 2159856 - RNA, 19 nt, Homo sapiens
  misc_RNA (1)...(19): siRNA sense strand
gaagggugguaauguggaa

SEQ ID NO: 2159857 - RNA, 19 nt, Homo sapiens
  misc_RNA (1)...(19): siRNA sense strand
gaaaggcuuccuagauuau

SEQ ID NO: 2159858 - RNA, 19 nt, Homo sapiens
  misc_RNA (1)...(19): siRNA sense strand
ccacuguucuauucugaaa

SEQ ID NO: 2159859 - RNA, 19 nt, Homo sapiens
  misc_RNA (1)...(19): siRNA sense strand
uagaagaaauggaaagaca

SEQ ID NO: 2159860 - RNA, 19 nt, Homo sapiens
  misc_RNA (1)...(19): siRNA sense strand
gaaauuaucgcuguuccuu

SEQ ID NO: 2159861 - RNA, 19 nt, Homo sapiens
  misc_RNA (1)...(19): siRNA sense strand
ggauuuauauggugucucu

SEQ ID NO: 2159862 - RNA, 19 nt, Homo sapiens
  misc_RNA (1)...(19): siRNA sense strand
uuaggaaacucaagugaug

SEQ ID NO: 2159863 - RNA, 19 nt, Homo sapiens
  misc_RNA (1)...(19): siRNA sense strand
gaaccaagggauuuauaug

SEQ ID NO: 2159864 - RNA, 19 nt, Homo sapiens
  misc_RNA (1)...(19): siRNA sense strand
cuacuuugcucauugcuau

SEQ ID NO: 2159865 - RNA, 19 nt, Homo sapiens
  misc_RNA (1)...(19): siRNA sense strand
gaauaccaauugacuguac

SEQ ID NO: 2159866 - RNA, 19 nt, Homo sapiens
  misc_RNA (1)...(19): siRNA sense strand
cacauuggcuggcagagaa

SEQ ID NO: 2159867 - RNA, 19 nt, Homo sapiens
  misc_RNA (1)...(19): siRNA sense strand
augaaaggcuuccuagauu

SEQ ID NO: 2159868 - RNA, 19 nt, Homo sapiens
  misc_RNA (1)...(19): siRNA sense strand
ugaagaugcuuacaaagag

SEQ ID NO: 2159869 - RNA, 19 nt, Homo sapiens
  misc_RNA (1)...(19): siRNA sense strand
auucucagcuugcaaguuu

SEQ ID NO: 2159870 - RNA, 19 nt, Homo sapiens
  misc_RNA (1)...(19): siRNA sense strand
gcucauugcuauccauaca

SEQ ID NO: 2159871 - RNA, 19 nt, Homo sapiens
  misc_RNA (1)...(19): siRNA sense strand
gcucuuggaucaugaaagg

SEQ ID NO: 2159872 - RNA, 19 nt, Homo sapiens
  misc_RNA (1)...(19): siRNA sense strand
ugauagacauuacauugga

SEQ ID NO: 2159873 - RNA, 19 nt, Homo sapiens
  misc_RNA (1)...(19): siRNA sense strand
gagaaacgagagguuauuu

SEQ ID NO: 2159874 - RNA, 19 nt, Homo sapiens
  misc_RNA (1)...(19): siRNA sense strand
ggaagcuacugugguuuau

SEQ ID NO: 2159875 - RNA, 19 nt, Homo sapiens
  misc_RNA (1)...(19): siRNA sense strand
caccaaaccugcuagucuu

SEQ ID NO: 2159876 - RNA, 19 nt, Homo sapiens
  misc_RNA (1)...(19): siRNA sense strand
gucuacagauucacuauug

SEQ ID NO: 2159877 - RNA, 19 nt, Homo sapiens
  misc_RNA (1)...(19): siRNA sense strand
ggaacaugguguauauuuu

SEQ ID NO: 2159878 - RNA, 19 nt, Homo sapiens
  misc_RNA (1)...(19): siRNA sense strand
gcacucauuucagcacgaa

SEQ ID NO: 2159879 - RNA, 19 nt, Homo sapiens
  misc_RNA (1)...(19): siRNA sense strand
gaacaggaagggugguaau

SEQ ID NO: 2159880 - RNA, 19 nt, Homo sapiens
  misc_RNA (1)...(19): siRNA sense strand
gccacacgcuugcuaggaa

SEQ ID NO: 2159881 - RNA, 19 nt, Homo sapiens
  misc_RNA (1)...(19): siRNA sense strand
gaucaugaaaggcuuccua

SEQ ID NO: 2159882 - RNA, 19 nt, Homo sapiens
  misc_RNA (1)...(19): siRNA sense strand
ggagaaacgagagguuauu

SEQ ID NO: 2159883 - RNA, 19 nt, Homo sapiens
  misc_RNA (1)...(19): siRNA sense strand
agaauacgaauaccaauug

SEQ ID NO: 2159884 - RNA, 19 nt, Homo sapiens
  misc_RNA (1)...(19): siRNA sense strand
gaaagaccuggaaucaaug

SEQ ID NO: 2159885 - RNA, 19 nt, Homo sapiens
  misc_RNA (1)...(19): siRNA sense strand
ggaacagcuuuaccaugga

SEQ ID NO: 2159886 - RNA, 19 nt, Homo sapiens
  misc_RNA (1)...(19): siRNA sense strand
gaagagcaaagaaggaaca

SEQ ID NO: 2159887 - RNA, 19 nt, Homo sapiens
  misc_RNA (1)...(19): siRNA sense strand
gguagugacagaucuaaga

SEQ ID NO: 2159888 - RNA, 19 nt, Homo sapiens
  misc_RNA (1)...(19): siRNA sense strand
ucucuuacauggacauuuc

SEQ ID NO: 2159889 - RNA, 19 nt, Homo sapiens
  misc_RNA (1)...(19): siRNA sense strand
caggaauagucuacagauu

SEQ ID NO: 2159890 - RNA, 19 nt, Homo sapiens
  misc_RNA (1)...(19): siRNA sense strand
uauauggugucucuucuuc

SEQ ID NO: 2159891 - RNA, 19 nt, Homo sapiens
  misc_RNA (1)...(19): siRNA sense strand
ccugaaagaauuagaagaa

SEQ ID NO: 2159892 - RNA, 19 nt, Homo sapiens
  misc_RNA (1)...(19): siRNA sense strand
caggaagggugguaaugug

SEQ ID NO: 2159893 - RNA, 19 nt, Homo sapiens
  misc_RNA (1)...(19): siRNA sense strand
gacauuauacuuacagcaa

SEQ ID NO: 2159894 - RNA, 19 nt, Homo sapiens
  misc_RNA (1)...(19): siRNA sense strand
gaucuucauggccauagua

SEQ ID NO: 2159895 - RNA, 19 nt, Homo sapiens
  misc_RNA (1)...(19): siRNA sense strand
caugaaaggcuuccuagau

SEQ ID NO: 2159896 - RNA, 19 nt, Homo sapiens
  misc_RNA (1)...(19): siRNA sense strand
gcuaggaacaugguguaua

SEQ ID NO: 2159897 - RNA, 19 nt, Homo sapiens
  misc_RNA (1)...(19): siRNA sense strand
cgccauuauuucucucuua

SEQ ID NO: 2159898 - RNA, 19 nt, Homo sapiens
  misc_RNA (1)...(19): siRNA sense strand
uaggagaccaaaucaagua

SEQ ID NO: 2159899 - RNA, 19 nt, Homo sapiens
  misc_RNA (1)...(19): siRNA sense strand
gaagcagccuguggauuac

SEQ ID NO: 2159900 - RNA, 19 nt, Homo sapiens
  misc_RNA (1)...(19): siRNA sense strand
gauucucucuuggauuauu

SEQ ID NO: 2159901 - RNA, 19 nt, Homo sapiens
  misc_RNA (1)...(19): siRNA sense strand
aaacgaggcacucauuuca

SEQ ID NO: 2159902 - RNA, 19 nt, Homo sapiens
  misc_RNA (1)...(19): siRNA sense strand
uagucaaaguggcagaaua

SEQ ID NO: 2159903 - RNA, 19 nt, Homo sapiens
  misc_RNA (1)...(19): siRNA sense strand
acauggacauuucaauuuc

SEQ ID NO: 2159904 - RNA, 19 nt, Homo sapiens
  misc_RNA (1)...(19): siRNA sense strand
gcacgaaagaccuggaauc

SEQ ID NO: 2159905 - RNA, 19 nt, Homo sapiens
  misc_RNA (1)...(19): siRNA sense strand
caaacgaggcacucauuuc

SEQ ID NO: 2159906 - RNA, 19 nt, Homo sapiens
  misc_RNA (1)...(19): siRNA sense strand
gacuacacagauacuauua

SEQ ID NO: 2159907 - RNA, 19 nt, Homo sapiens
  misc_RNA (1)...(19): siRNA sense strand
uuucuggcaucaauaauga

SEQ ID NO: 2159908 - RNA, 19 nt, Homo sapiens
  misc_RNA (1)...(19): siRNA sense strand
cuucaucggugugcacuuu

SEQ ID NO: 2159909 - RNA, 19 nt, Homo sapiens
  misc_RNA (1)...(19): siRNA sense strand
guccugagccaguguauau

SEQ ID NO: 2159910 - RNA, 19 nt, Homo sapiens
  misc_RNA (1)...(19): siRNA sense strand
gagcaggaauagucuacag

SEQ ID NO: 2159911 - RNA, 19 nt, Homo sapiens
  misc_RNA (1)...(19): siRNA sense strand
uaauaugcgagcaggaaua

SEQ ID NO: 2159912 - RNA, 19 nt, Homo sapiens
  misc_RNA (1)...(19): siRNA sense strand
cagaauacgaauaccaauu

SEQ ID NO: 2159913 - RNA, 19 nt, Homo sapiens
  misc_RNA (1)...(19): siRNA sense strand
gauagacauuacauuggau

SEQ ID NO: 2159914 - RNA, 19 nt, Homo sapiens
  misc_RNA (1)...(19): siRNA sense strand
ccaaaccugcuagucuuua

SEQ ID NO: 2159915 - RNA, 19 nt, Homo sapiens
  misc_RNA (1)...(19): siRNA sense strand
gauucacuauugucaacuu

SEQ ID NO: 2159916 - RNA, 19 nt, Homo sapiens
  misc_RNA (1)...(19): siRNA sense strand
gaagacuauucagacagaa

SEQ ID NO: 2159917 - RNA, 19 nt, Homo sapiens
  misc_RNA (1)...(19): siRNA sense strand
uacagaagguagucaaagu

SEQ ID NO: 2159918 - RNA, 19 nt, Homo sapiens
  misc_RNA (1)...(19): siRNA sense strand
agacauauaacccuggaaa

SEQ ID NO: 2159919 - RNA, 19 nt, Homo sapiens
  misc_RNA (1)...(19): siRNA sense strand
caaguuuaauguccagaag

SEQ ID NO: 2159920 - RNA, 19 nt, Homo sapiens
  misc_RNA (1)...(19): siRNA sense strand
gaacucugacucaagaaag

SEQ ID NO: 2159921 - RNA, 19 nt, Homo sapiens
  misc_RNA (1)...(19): siRNA sense strand
gaauaggagaccaaaucaa

SEQ ID NO: 2159922 - RNA, 19 nt, Homo sapiens
  misc_RNA (1)...(19): siRNA sense strand
cugaagaugcuuacaaaga

SEQ ID NO: 2159923 - RNA, 19 nt, Homo sapiens
  misc_RNA (1)...(19): siRNA sense strand
aauuaucgcuguuccuuag

SEQ ID NO: 2159924 - RNA, 19 nt, Homo sapiens
  misc_RNA (1)...(19): siRNA sense strand
gcggaaggcugugauucug

SEQ ID NO: 2159925 - RNA, 19 nt, Homo sapiens
  misc_RNA (1)...(19): siRNA sense strand
gcaggaauagucuacagau

SEQ ID NO: 2159926 - RNA, 19 nt, Homo sapiens
  misc_RNA (1)...(19): siRNA sense strand
gguaaccgaacaccuuuga

SEQ ID NO: 2159927 - RNA, 19 nt, Homo sapiens
  misc_RNA (1)...(19): siRNA sense strand
gcaaguuuaauguccagaa

SEQ ID NO: 2159928 - RNA, 19 nt, Homo sapiens
  misc_RNA (1)...(19): siRNA sense strand
gagcaaggauugacuuaua

SEQ ID NO: 2159929 - RNA, 19 nt, Homo sapiens
  misc_RNA (1)...(19): siRNA sense strand
ggaacgagaugauaugauu

SEQ ID NO: 2159930 - RNA, 19 nt, Homo sapiens
  misc_RNA (1)...(19): siRNA sense strand
gcaaaugggugaccuguug

SEQ ID NO: 2159931 - RNA, 19 nt, Homo sapiens
  misc_RNA (1)...(19): siRNA sense strand
gaacuaagaaggcagauaa

SEQ ID NO: 2159932 - RNA, 19 nt, Homo sapiens
  misc_RNA (1)...(19): siRNA sense strand
gcaaagagguuucugaucu

SEQ ID NO: 2159933 - RNA, 19 nt, Homo sapiens
  misc_RNA (1)...(19): siRNA sense strand
gaagacaggugguggauuc

SEQ ID NO: 2159934 - RNA, 19 nt, Homo sapiens
  misc_RNA (1)...(19): siRNA sense strand
gaaggcagauaauguggua

SEQ ID NO: 2159935 - RNA, 19 nt, Homo sapiens
  misc_RNA (1)...(19): siRNA sense strand
gaagggaccuggaacacuu

SEQ ID NO: 2159936 - RNA, 19 nt, Homo sapiens
  misc_RNA (1)...(19): siRNA sense strand
ggagcaagauggauugauu

SEQ ID NO: 2159937 - RNA, 19 nt, Homo sapiens
  misc_RNA (1)...(19): siRNA sense strand
gaagagggaucagaacuug

SEQ ID NO: 2159938 - RNA, 19 nt, Homo sapiens
  misc_RNA (1)...(19): siRNA sense strand
gaaguggucugucgagaug

SEQ ID NO: 2159939 - RNA, 19 nt, Homo sapiens
  misc_RNA (1)...(19): siRNA sense strand
caagaaagaugagauugaa

SEQ ID NO: 2159940 - RNA, 19 nt, Homo sapiens
  misc_RNA (1)...(19): siRNA sense strand
gaaauauguucuagcaaga

SEQ ID NO: 2159941 - RNA, 19 nt, Homo sapiens
  misc_RNA (1)...(19): siRNA sense strand
gaagugggcuggcuauagu

SEQ ID NO: 2159942 - RNA, 19 nt, Homo sapiens
  misc_RNA (1)...(19): siRNA sense strand
gaucagaacuugaaaagaa

SEQ ID NO: 2159943 - RNA, 19 nt, Homo sapiens
  misc_RNA (1)...(19): siRNA sense strand
gaucaacaaucgagcuaaa

SEQ ID NO: 2159944 - RNA, 19 nt, Homo sapiens
  misc_RNA (1)...(19): siRNA sense strand
gaaucuggcucuucuuaug

SEQ ID NO: 2159945 - RNA, 19 nt, Homo sapiens
  misc_RNA (1)...(19): siRNA sense strand
cauggaaucuguaguggua

SEQ ID NO: 2159946 - RNA, 19 nt, Homo sapiens
  misc_RNA (1)...(19): siRNA sense strand
caagauggauugauugcuu

SEQ ID NO: 2159947 - RNA, 19 nt, Homo sapiens
  misc_RNA (1)...(19): siRNA sense strand
gcagauuugugccaaugua

SEQ ID NO: 2159948 - RNA, 19 nt, Homo sapiens
  misc_RNA (1)...(19): siRNA sense strand
ugaagaaacuguuagacuu

SEQ ID NO: 2159949 - RNA, 19 nt, Homo sapiens
  misc_RNA (1)...(19): siRNA sense strand
gaaauuauacugacagcuu

SEQ ID NO: 2159950 - RNA, 19 nt, Homo sapiens
  misc_RNA (1)...(19): siRNA sense strand
gaauuaaucccagaacuaa

SEQ ID NO: 2159951 - RNA, 19 nt, Homo sapiens
  misc_RNA (1)...(19): siRNA sense strand
guauugagguugaacuaaa

SEQ ID NO: 2159952 - RNA, 19 nt, Homo sapiens
  misc_RNA (1)...(19): siRNA sense strand
uacaagaugugcaugauaa

SEQ ID NO: 2159953 - RNA, 19 nt, Homo sapiens
  misc_RNA (1)...(19): siRNA sense strand
cagccaggauuucuuauuu

SEQ ID NO: 2159954 - RNA, 19 nt, Homo sapiens
  misc_RNA (1)...(19): siRNA sense strand
gaaaugcucuuuggagaag

SEQ ID NO: 2159955 - RNA, 19 nt, Homo sapiens
  misc_RNA (1)...(19): siRNA sense strand
gaacuugacguugauguaa

SEQ ID NO: 2159956 - RNA, 19 nt, Homo sapiens
  misc_RNA (1)...(19): siRNA sense strand
gagagacccuccaauguuc

SEQ ID NO: 2159957 - RNA, 19 nt, Homo sapiens
  misc_RNA (1)...(19): siRNA sense strand
ggaauuaaucccagaacua

SEQ ID NO: 2159958 - RNA, 19 nt, Homo sapiens
  misc_RNA (1)...(19): siRNA sense strand
gcucauuuccuucuaauuu

SEQ ID NO: 2159959 - RNA, 19 nt, Homo sapiens
  misc_RNA (1)...(19): siRNA sense strand
ugaagaugcucgaaugauu

SEQ ID NO: 2159960 - RNA, 19 nt, Homo sapiens
  misc_RNA (1)...(19): siRNA sense strand
acacaaaccugacuucauc

SEQ ID NO: 2159961 - RNA, 19 nt, Homo sapiens
  misc_RNA (1)...(19): siRNA sense strand
gaggaucgacaacugauua

SEQ ID NO: 2159962 - RNA, 19 nt, Homo sapiens
  misc_RNA (1)...(19): siRNA sense strand
cugaacagcucauuaaaga

SEQ ID NO: 2159963 - RNA, 19 nt, Homo sapiens
  misc_RNA (1)...(19): siRNA sense strand
ugaagacacucgcagcuuu

SEQ ID NO: 2159964 - RNA, 19 nt, Homo sapiens
  misc_RNA (1)...(19): siRNA sense strand
gaacagcucauuaaagaag

SEQ ID NO: 2159965 - RNA, 19 nt, Homo sapiens
  misc_RNA (1)...(19): siRNA sense strand
ggacauugaaggauuauau

SEQ ID NO: 2159966 - RNA, 19 nt, Homo sapiens
  misc_RNA (1)...(19): siRNA sense strand
gcaagaaagaugagauuga

SEQ ID NO: 2159967 - RNA, 19 nt, Homo sapiens
  misc_RNA (1)...(19): siRNA sense strand
ggaauuggcucugcugaca

SEQ ID NO: 2159968 - RNA, 19 nt, Homo sapiens
  misc_RNA (1)...(19): siRNA sense strand
gaguauaagucagaaacua

SEQ ID NO: 2159969 - RNA, 19 nt, Homo sapiens
  misc_RNA (1)...(19): siRNA sense strand
guggagagcucauuuccuu

SEQ ID NO: 2159970 - RNA, 19 nt, Homo sapiens
  misc_RNA (1)...(19): siRNA sense strand
caacacgcuuuacagauga

SEQ ID NO: 2159971 - RNA, 19 nt, Homo sapiens
  misc_RNA (1)...(19): siRNA sense strand
gaaacagagugcuaaugau

SEQ ID NO: 2159972 - RNA, 19 nt, Homo sapiens
  misc_RNA (1)...(19): siRNA sense strand
cagaaacaguuaauagaga

SEQ ID NO: 2159973 - RNA, 19 nt, Homo sapiens
  misc_RNA (1)...(19): siRNA sense strand
ggaauacacucagauacug

SEQ ID NO: 2159974 - RNA, 19 nt, Homo sapiens
  misc_RNA (1)...(19): siRNA sense strand
ccaccuggauuuagucuga

SEQ ID NO: 2159975 - RNA, 19 nt, Homo sapiens
  misc_RNA (1)...(19): siRNA sense strand
gagauaaaguaagcaagaa

SEQ ID NO: 2159976 - RNA, 19 nt, Homo sapiens
  misc_RNA (1)...(19): siRNA sense strand
caacugauuauucgugaua

SEQ ID NO: 2159977 - RNA, 19 nt, Homo sapiens
  misc_RNA (1)...(19): siRNA sense strand
ggaggcaacuaguagaaau

SEQ ID NO: 2159978 - RNA, 19 nt, Homo sapiens
  misc_RNA (1)...(19): siRNA sense strand
gccaagauccucuguugua

SEQ ID NO: 2159979 - RNA, 19 nt, Homo sapiens
  misc_RNA (1)...(19): siRNA sense strand
ggaaguugcugaggugguu

SEQ ID NO: 2159980 - RNA, 19 nt, Homo sapiens
  misc_RNA (1)...(19): siRNA sense strand
ggagaucccugagccuuug

SEQ ID NO: 2159981 - RNA, 19 nt, Homo sapiens
  misc_RNA (1)...(19): siRNA sense strand
aaccagaugucauggcuua

SEQ ID NO: 2159982 - RNA, 19 nt, Homo sapiens
  misc_RNA (1)...(19): siRNA sense strand
gaaacuaauggcuggauuu

SEQ ID NO: 2159983 - RNA, 19 nt, Homo sapiens
  misc_RNA (1)...(19): siRNA sense strand
uaaaguugguuggagauuu

SEQ ID NO: 2159984 - RNA, 19 nt, Homo sapiens
  misc_RNA (1)...(19): siRNA sense strand
caucuugaaucuucucauu

SEQ ID NO: 2159985 - RNA, 19 nt, Homo sapiens
  misc_RNA (1)...(19): siRNA sense strand
ggagauaaaguaagcaaga

SEQ ID NO: 2159986 - RNA, 19 nt, Homo sapiens
  misc_RNA (1)...(19): siRNA sense strand
guaaaugaagggucucuaa

SEQ ID NO: 2159987 - RNA, 19 nt, Homo sapiens
  misc_RNA (1)...(19): siRNA sense strand
ggaaugcaauccacccaau

SEQ ID NO: 2159988 - RNA, 19 nt, Homo sapiens
  misc_RNA (1)...(19): siRNA sense strand
ccagucaccuuuaggcaaa

SEQ ID NO: 2159989 - RNA, 19 nt, Homo sapiens
  misc_RNA (1)...(19): siRNA sense strand
gaaaucagcacuguacuuc

SEQ ID NO: 2159990 - RNA, 19 nt, Homo sapiens
  misc_RNA (1)...(19): siRNA sense strand
acaaggagaagaaaucaua

SEQ ID NO: 2159991 - RNA, 19 nt, Homo sapiens
  misc_RNA (1)...(19): siRNA sense strand
acacaugaccagaguauaa

SEQ ID NO: 2159992 - RNA, 19 nt, Homo sapiens
  misc_RNA (1)...(19): siRNA sense strand
cuaaugauuucuucagcua

SEQ ID NO: 2159993 - RNA, 19 nt, Homo sapiens
  misc_RNA (1)...(19): siRNA sense strand
ugaaacagagugcuaauga

SEQ ID NO: 2159994 - RNA, 19 nt, Homo sapiens
  misc_RNA (1)...(19): siRNA sense strand
ccagagaccugaugaacca

SEQ ID NO: 2159995 - RNA, 19 nt, Homo sapiens
  misc_RNA (1)...(19): siRNA sense strand
gcucacgucuaccaucauu

SEQ ID NO: 2159996 - RNA, 19 nt, Homo sapiens
  misc_RNA (1)...(19): siRNA sense strand
gcaauacuaauccagaauu

SEQ ID NO: 2159997 - RNA, 19 nt, Homo sapiens
  misc_RNA (1)...(19): siRNA sense strand
acaauucacucucgucuuc

SEQ ID NO: 2159998 - RNA, 19 nt, Homo sapiens
  misc_RNA (1)...(19): siRNA sense strand
cauacaggcucuugucaga

SEQ ID NO: 2159999 - RNA, 19 nt, Homo sapiens
  misc_RNA (1)...(19): siRNA sense strand
aaacagagugcuaaugauu

SEQ ID NO: 2160000 - RNA, 19 nt, Homo sapiens
  misc_RNA (1)...(19): siRNA sense strand
ugaagaugcagaagaauuu

SEQ ID NO: 2160001 - RNA, 19 nt, Homo sapiens
  misc_RNA (1)...(19): siRNA sense strand
gcuguucaccuucuugaua

SEQ ID NO: 2160002 - RNA, 19 nt, Homo sapiens
  misc_RNA (1)...(19): siRNA sense strand
ugaagaugcuccagggauu

SEQ ID NO: 2160003 - RNA, 19 nt, Homo sapiens
  misc_RNA (1)...(19): siRNA sense strand
acaacacgcuuuacagaug

SEQ ID NO: 2160004 - RNA, 19 nt, Homo sapiens
  misc_RNA (1)...(19): siRNA sense strand
gagaaucacuacaaaagaa

SEQ ID NO: 2160005 - RNA, 19 nt, Homo sapiens
  misc_RNA (1)...(19): siRNA sense strand
ucacaagaguggcaaagau

SEQ ID NO: 2160006 - RNA, 19 nt, Homo sapiens
  misc_RNA (1)...(19): siRNA sense strand
guagacagcuugguagaag

SEQ ID NO: 2160007 - RNA, 19 nt, Homo sapiens
  misc_RNA (1)...(19): siRNA sense strand
gcucucugcuuuauuacuu

SEQ ID NO: 2160008 - RNA, 19 nt, Homo sapiens
  misc_RNA (1)...(19): siRNA sense strand
uaugaaaacugccucaaua

SEQ ID NO: 2160009 - RNA, 19 nt, Homo sapiens
  misc_RNA (1)...(19): siRNA sense strand
ucuaauagucuguccuuua

SEQ ID NO: 2160010 - RNA, 19 nt, Homo sapiens
  misc_RNA (1)...(19): siRNA sense strand
ggagaaagcaguacagcau

SEQ ID NO: 2160011 - RNA, 19 nt, Homo sapiens
  misc_RNA (1)...(19): siRNA sense strand
ucaacuggcucuaauaguc

SEQ ID NO: 2160012 - RNA, 19 nt, Homo sapiens
  misc_RNA (1)...(19): siRNA sense strand
gugccaauguaauggaaua

SEQ ID NO: 2160013 - RNA, 19 nt, Homo sapiens
  misc_RNA (1)...(19): siRNA sense strand
ggagggagauaaaguaagc

SEQ ID NO: 2160014 - RNA, 19 nt, Homo sapiens
  misc_RNA (1)...(19): siRNA sense strand
ugacguugauguaaaugaa

SEQ ID NO: 2160015 - RNA, 19 nt, Homo sapiens
  misc_RNA (1)...(19): siRNA sense strand
ggaaaugcucuuuggagaa

SEQ ID NO: 2160016 - RNA, 19 nt, Homo sapiens
  misc_RNA (1)...(19): siRNA sense strand
gugccaagauccucuguug

SEQ ID NO: 2160017 - RNA, 19 nt, Homo sapiens
  misc_RNA (1)...(19): siRNA sense strand
gaaacugccugggcuccaa

SEQ ID NO: 2160018 - RNA, 19 nt, Homo sapiens
  misc_RNA (1)...(19): siRNA sense strand
cuaaacugcuuucccuuug

SEQ ID NO: 2160019 - RNA, 19 nt, Homo sapiens
  misc_RNA (1)...(19): siRNA sense strand
gaagaugaccguacuuugc

SEQ ID NO: 2160020 - RNA, 19 nt, Homo sapiens
  misc_RNA (1)...(19): siRNA sense strand
agaauugucuccguggaua

SEQ ID NO: 2160021 - RNA, 19 nt, Homo sapiens
  misc_RNA (1)...(19): siRNA sense strand
gaucgacaacugauuauuc

SEQ ID NO: 2160022 - RNA, 19 nt, Homo sapiens
  misc_RNA (1)...(19): siRNA sense strand
ucuuguagcugaaguaaau

SEQ ID NO: 2160023 - RNA, 19 nt, Homo sapiens
  misc_RNA (1)...(19): siRNA sense strand
gaaacaagaauccacaucu

SEQ ID NO: 2160024 - RNA, 19 nt, Homo sapiens
  misc_RNA (1)...(19): siRNA sense strand
ugguaaacauugccagaua

SEQ ID NO: 2160025 - RNA, 19 nt, Homo sapiens
  misc_RNA (1)...(19): siRNA sense strand
gaaugagucaccaauguug

SEQ ID NO: 2160026 - RNA, 19 nt, Homo sapiens
  misc_RNA (1)...(19): siRNA sense strand
cgacuaucaugggcucuua

SEQ ID NO: 2160027 - RNA, 19 nt, Homo sapiens
  misc_RNA (1)...(19): siRNA sense strand
guaugcagauggguaauga

SEQ ID NO: 2160028 - RNA, 19 nt, Homo sapiens
  misc_RNA (1)...(19): siRNA sense strand
gagcaaggauugacuuaua

SEQ ID NO: 2160029 - RNA, 19 nt, Homo sapiens
  misc_RNA (1)...(19): siRNA sense strand
ggaacgagaugauaugauu

SEQ ID NO: 2160030 - RNA, 19 nt, Homo sapiens
  misc_RNA (1)...(19): siRNA sense strand
gcaaaugggugaccuguug

SEQ ID NO: 2160031 - RNA, 19 nt, Homo sapiens
  misc_RNA (1)...(19): siRNA sense strand
gaacuaagaaggcagauaa

SEQ ID NO: 2160032 - RNA, 19 nt, Homo sapiens
  misc_RNA (1)...(19): siRNA sense strand
gcaaagagguuucugaucu

SEQ ID NO: 2160033 - RNA, 19 nt, Homo sapiens
  misc_RNA (1)...(19): siRNA sense strand
gaagacaggugguggauuc

SEQ ID NO: 2160034 - RNA, 19 nt, Homo sapiens
  misc_RNA (1)...(19): siRNA sense strand
gaaggcagauaauguggua

SEQ ID NO: 2160035 - RNA, 19 nt, Homo sapiens
  misc_RNA (1)...(19): siRNA sense strand
gaagggaccuggaacacuu

SEQ ID NO: 2160036 - RNA, 19 nt, Homo sapiens
  misc_RNA (1)...(19): siRNA sense strand
ggagcaagauggauugauu

SEQ ID NO: 2160037 - RNA, 19 nt, Homo sapiens
  misc_RNA (1)...(19): siRNA sense strand
gaagagggaucagaacuug

SEQ ID NO: 2160038 - RNA, 19 nt, Homo sapiens
  misc_RNA (1)...(19): siRNA sense strand
gaaguggucugucgagaug

SEQ ID NO: 2160039 - RNA, 19 nt, Homo sapiens
  misc_RNA (1)...(19): siRNA sense strand
caagaaagaugagauugaa

SEQ ID NO: 2160040 - RNA, 19 nt, Homo sapiens
  misc_RNA (1)...(19): siRNA sense strand
gaaauauguucuagcaaga

SEQ ID NO: 2160041 - RNA, 19 nt, Homo sapiens
  misc_RNA (1)...(19): siRNA sense strand
gaagugggcuggcuauagu

SEQ ID NO: 2160042 - RNA, 19 nt, Homo sapiens
  misc_RNA (1)...(19): siRNA sense strand
gaucagaacuugaaaagaa

SEQ ID NO: 2160043 - RNA, 19 nt, Homo sapiens
  misc_RNA (1)...(19): siRNA sense strand
gaucaacaaucgagcuaaa

SEQ ID NO: 2160044 - RNA, 19 nt, Homo sapiens
  misc_RNA (1)...(19): siRNA sense strand
gaaucuggcucuucuuaug

SEQ ID NO: 2160045 - RNA, 19 nt, Homo sapiens
  misc_RNA (1)...(19): siRNA sense strand
cauggaaucuguaguggua

SEQ ID NO: 2160046 - RNA, 19 nt, Homo sapiens
  misc_RNA (1)...(19): siRNA sense strand
caagauggauugauugcuu

SEQ ID NO: 2160047 - RNA, 19 nt, Homo sapiens
  misc_RNA (1)...(19): siRNA sense strand
gcagauuugugccaaugua

SEQ ID NO: 2160048 - RNA, 19 nt, Homo sapiens
  misc_RNA (1)...(19): siRNA sense strand
ugaagaaacuguuagacuu

SEQ ID NO: 2160049 - RNA, 19 nt, Homo sapiens
  misc_RNA (1)...(19): siRNA sense strand
gaaauuauacugacagcuu

SEQ ID NO: 2160050 - RNA, 19 nt, Homo sapiens
  misc_RNA (1)...(19): siRNA sense strand
gaauuaaucccagaacuaa

SEQ ID NO: 2160051 - RNA, 19 nt, Homo sapiens
  misc_RNA (1)...(19): siRNA sense strand
guauugagguugaacuaaa

SEQ ID NO: 2160052 - RNA, 19 nt, Homo sapiens
  misc_RNA (1)...(19): siRNA sense strand
uacaagaugugcaugauaa

SEQ ID NO: 2160053 - RNA, 19 nt, Homo sapiens
  misc_RNA (1)...(19): siRNA sense strand
cagccaggauuucuuauuu

SEQ ID NO: 2160054 - RNA, 19 nt, Homo sapiens
  misc_RNA (1)...(19): siRNA sense strand
gaaaugcucuuuggagaag

SEQ ID NO: 2160055 - RNA, 19 nt, Homo sapiens
  misc_RNA (1)...(19): siRNA sense strand
gaacuugacguugauguaa

SEQ ID NO: 2160056 - RNA, 19 nt, Homo sapiens
  misc_RNA (1)...(19): siRNA sense strand
gagagacccuccaauguuc

SEQ ID NO: 2160057 - RNA, 19 nt, Homo sapiens
  misc_RNA (1)...(19): siRNA sense strand
ggaauuaaucccagaacua

SEQ ID NO: 2160058 - RNA, 19 nt, Homo sapiens
  misc_RNA (1)...(19): siRNA sense strand
gcucauuuccuucuaauuu

SEQ ID NO: 2160059 - RNA, 19 nt, Homo sapiens
  misc_RNA (1)...(19): siRNA sense strand
ugaagaugcucgaaugauu

SEQ ID NO: 2160060 - RNA, 19 nt, Homo sapiens
  misc_RNA (1)...(19): siRNA sense strand
acacaaaccugacuucauc

SEQ ID NO: 2160061 - RNA, 19 nt, Homo sapiens
  misc_RNA (1)...(19): siRNA sense strand
gaggaucgacaacugauua

SEQ ID NO: 2160062 - RNA, 19 nt, Homo sapiens
  misc_RNA (1)...(19): siRNA sense strand
cugaacagcucauuaaaga

SEQ ID NO: 2160063 - RNA, 19 nt, Homo sapiens
  misc_RNA (1)...(19): siRNA sense strand
ugaagacacucgcagcuuu

SEQ ID NO: 2160064 - RNA, 19 nt, Homo sapiens
  misc_RNA (1)...(19): siRNA sense strand
gaacagcucauuaaagaag

SEQ ID NO: 2160065 - RNA, 19 nt, Homo sapiens
  misc_RNA (1)...(19): siRNA sense strand
ggacauugaaggauuauau

SEQ ID NO: 2160066 - RNA, 19 nt, Homo sapiens
  misc_RNA (1)...(19): siRNA sense strand
gcaagaaagaugagauuga

SEQ ID NO: 2160067 - RNA, 19 nt, Homo sapiens
  misc_RNA (1)...(19): siRNA sense strand
ggaauuggcucugcugaca

SEQ ID NO: 2160068 - RNA, 19 nt, Homo sapiens
  misc_RNA (1)...(19): siRNA sense strand
gaguauaagucagaaacua

SEQ ID NO: 2160069 - RNA, 19 nt, Homo sapiens
  misc_RNA (1)...(19): siRNA sense strand
guggagagcucauuuccuu

SEQ ID NO: 2160070 - RNA, 19 nt, Homo sapiens
  misc_RNA (1)...(19): siRNA sense strand
caacacgcuuuacagauga

SEQ ID NO: 2160071 - RNA, 19 nt, Homo sapiens
  misc_RNA (1)...(19): siRNA sense strand
gaaacagagugcuaaugau

SEQ ID NO: 2160072 - RNA, 19 nt, Homo sapiens
  misc_RNA (1)...(19): siRNA sense strand
cagaaacaguuaauagaga

SEQ ID NO: 2160073 - RNA, 19 nt, Homo sapiens
  misc_RNA (1)...(19): siRNA sense strand
ggaauacacucagauacug

SEQ ID NO: 2160074 - RNA, 19 nt, Homo sapiens
  misc_RNA (1)...(19): siRNA sense strand
ccaccuggauuuagucuga

SEQ ID NO: 2160075 - RNA, 19 nt, Homo sapiens
  misc_RNA (1)...(19): siRNA sense strand
gagauaaaguaagcaagaa

SEQ ID NO: 2160076 - RNA, 19 nt, Homo sapiens
  misc_RNA (1)...(19): siRNA sense strand
caacugauuauucgugaua

SEQ ID NO: 2160077 - RNA, 19 nt, Homo sapiens
  misc_RNA (1)...(19): siRNA sense strand
ggaggcaacuaguagaaau

SEQ ID NO: 2160078 - RNA, 19 nt, Homo sapiens
  misc_RNA (1)...(19): siRNA sense strand
gccaagauccucuguugua

SEQ ID NO: 2160079 - RNA, 19 nt, Homo sapiens
  misc_RNA (1)...(19): siRNA sense strand
ggaaguugcugaggugguu

SEQ ID NO: 2160080 - RNA, 19 nt, Homo sapiens
  misc_RNA (1)...(19): siRNA sense strand
ggagaucccugagccuuug

SEQ ID NO: 2160081 - RNA, 19 nt, Homo sapiens
  misc_RNA (1)...(19): siRNA sense strand
aaccagaugucauggcuua

SEQ ID NO: 2160082 - RNA, 19 nt, Homo sapiens
  misc_RNA (1)...(19): siRNA sense strand
gaaacuaauggcuggauuu

SEQ ID NO: 2160083 - RNA, 19 nt, Homo sapiens
  misc_RNA (1)...(19): siRNA sense strand
uaaaguugguuggagauuu

SEQ ID NO: 2160084 - RNA, 19 nt, Homo sapiens
  misc_RNA (1)...(19): siRNA sense strand
caucuugaaucuucucauu

SEQ ID NO: 2160085 - RNA, 19 nt, Homo sapiens
  misc_RNA (1)...(19): siRNA sense strand
ggagauaaaguaagcaaga

SEQ ID NO: 2160086 - RNA, 19 nt, Homo sapiens
  misc_RNA (1)...(19): siRNA sense strand
guaaaugaagggucucuaa

SEQ ID NO: 2160087 - RNA, 19 nt, Homo sapiens
  misc_RNA (1)...(19): siRNA sense strand
ggaaugcaauccacccaau

SEQ ID NO: 2160088 - RNA, 19 nt, Homo sapiens
  misc_RNA (1)...(19): siRNA sense strand
ccagucaccuuuaggcaaa

SEQ ID NO: 2160089 - RNA, 19 nt, Homo sapiens
  misc_RNA (1)...(19): siRNA sense strand
gaaaucagcacuguacuuc

SEQ ID NO: 2160090 - RNA, 19 nt, Homo sapiens
  misc_RNA (1)...(19): siRNA sense strand
acaaggagaagaaaucaua

SEQ ID NO: 2160091 - RNA, 19 nt, Homo sapiens
  misc_RNA (1)...(19): siRNA sense strand
acacaugaccagaguauaa

SEQ ID NO: 2160092 - RNA, 19 nt, Homo sapiens
  misc_RNA (1)...(19): siRNA sense strand
cuaaugauuucuucagcua

SEQ ID NO: 2160093 - RNA, 19 nt, Homo sapiens
  misc_RNA (1)...(19): siRNA sense strand
ugaaacagagugcuaauga

SEQ ID NO: 2160094 - RNA, 19 nt, Homo sapiens
  misc_RNA (1)...(19): siRNA sense strand
ccagagaccugaugaacca

SEQ ID NO: 2160095 - RNA, 19 nt, Homo sapiens
  misc_RNA (1)...(19): siRNA sense strand
gcucacgucuaccaucauu

SEQ ID NO: 2160096 - RNA, 19 nt, Homo sapiens
  misc_RNA (1)...(19): siRNA sense strand
gcaauacuaauccagaauu

SEQ ID NO: 2160097 - RNA, 19 nt, Homo sapiens
  misc_RNA (1)...(19): siRNA sense strand
acaauucacucucgucuuc

SEQ ID NO: 2160098 - RNA, 19 nt, Homo sapiens
  misc_RNA (1)...(19): siRNA sense strand
cauacaggcucuugucaga

SEQ ID NO: 2160099 - RNA, 19 nt, Homo sapiens
  misc_RNA (1)...(19): siRNA sense strand
aaacagagugcuaaugauu

SEQ ID NO: 2160100 - RNA, 19 nt, Homo sapiens
  misc_RNA (1)...(19): siRNA sense strand
ugaagaugcagaagaauuu

SEQ ID NO: 2160101 - RNA, 19 nt, Homo sapiens
  misc_RNA (1)...(19): siRNA sense strand
gcuguucaccuucuugaua

SEQ ID NO: 2160102 - RNA, 19 nt, Homo sapiens
  misc_RNA (1)...(19): siRNA sense strand
ugaagaugcuccagggauu

SEQ ID NO: 2160103 - RNA, 19 nt, Homo sapiens
  misc_RNA (1)...(19): siRNA sense strand
acaacacgcuuuacagaug

SEQ ID NO: 2160104 - RNA, 19 nt, Homo sapiens
  misc_RNA (1)...(19): siRNA sense strand
gagaaucacuacaaaagaa

SEQ ID NO: 2160105 - RNA, 19 nt, Homo sapiens
  misc_RNA (1)...(19): siRNA sense strand
ucacaagaguggcaaagau

SEQ ID NO: 2160106 - RNA, 19 nt, Homo sapiens
  misc_RNA (1)...(19): siRNA sense strand
guagacagcuugguagaag

SEQ ID NO: 2160107 - RNA, 19 nt, Homo sapiens
  misc_RNA (1)...(19): siRNA sense strand
gcucucugcuuuauuacuu

SEQ ID NO: 2160108 - RNA, 19 nt, Homo sapiens
  misc_RNA (1)...(19): siRNA sense strand
uaugaaaacugccucaaua

SEQ ID NO: 2160109 - RNA, 19 nt, Homo sapiens
  misc_RNA (1)...(19): siRNA sense strand
ucuaauagucuguccuuua

SEQ ID NO: 2160110 - RNA, 19 nt, Homo sapiens
  misc_RNA (1)...(19): siRNA sense strand
ggagaaagcaguacagcau

SEQ ID NO: 2160111 - RNA, 19 nt, Homo sapiens
  misc_RNA (1)...(19): siRNA sense strand
ucaacuggcucuaauaguc

SEQ ID NO: 2160112 - RNA, 19 nt, Homo sapiens
  misc_RNA (1)...(19): siRNA sense strand
gugccaauguaauggaaua

SEQ ID NO: 2160113 - RNA, 19 nt, Homo sapiens
  misc_RNA (1)...(19): siRNA sense strand
ggagggagauaaaguaagc

SEQ ID NO: 2160114 - RNA, 19 nt, Homo sapiens
  misc_RNA (1)...(19): siRNA sense strand
ugacguugauguaaaugaa

SEQ ID NO: 2160115 - RNA, 19 nt, Homo sapiens
  misc_RNA (1)...(19): siRNA sense strand
ggaaaugcucuuuggagaa

SEQ ID NO: 2160116 - RNA, 19 nt, Homo sapiens
  misc_RNA (1)...(19): siRNA sense strand
gugccaagauccucuguug

SEQ ID NO: 2160117 - RNA, 19 nt, Homo sapiens
  misc_RNA (1)...(19): siRNA sense strand
gaaacugccugggcuccaa

SEQ ID NO: 2160118 - RNA, 19 nt, Homo sapiens
  misc_RNA (1)...(19): siRNA sense strand
cuaaacugcuuucccuuug

SEQ ID NO: 2160119 - RNA, 19 nt, Homo sapiens
  misc_RNA (1)...(19): siRNA sense strand
gaagaugaccguacuuugc

SEQ ID NO: 2160120 - RNA, 19 nt, Homo sapiens
  misc_RNA (1)...(19): siRNA sense strand
agaauugucuccguggaua

SEQ ID NO: 2160121 - RNA, 19 nt, Homo sapiens
  misc_RNA (1)...(19): siRNA sense strand
gaucgacaacugauuauuc

SEQ ID NO: 2160122 - RNA, 19 nt, Homo sapiens
  misc_RNA (1)...(19): siRNA sense strand
ucuuguagcugaaguaaau

SEQ ID NO: 2160123 - RNA, 19 nt, Homo sapiens
  misc_RNA (1)...(19): siRNA sense strand
gaaacaagaauccacaucu

SEQ ID NO: 2160124 - RNA, 19 nt, Homo sapiens
  misc_RNA (1)...(19): siRNA sense strand
ugguaaacauugccagaua

SEQ ID NO: 2160125 - RNA, 19 nt, Homo sapiens
  misc_RNA (1)...(19): siRNA sense strand
gaaugagucaccaauguug

SEQ ID NO: 2160126 - RNA, 19 nt, Homo sapiens
  misc_RNA (1)...(19): siRNA sense strand
cgacuaucaugggcucuua

SEQ ID NO: 2160127 - RNA, 19 nt, Homo sapiens
  misc_RNA (1)...(19): siRNA sense strand
guaugcagauggguaauga

SEQ ID NO: 2160128 - RNA, 19 nt, Homo sapiens
  misc_RNA (1)...(19): siRNA sense strand
ucaacaccgucuacauuua

SEQ ID NO: 2160129 - RNA, 19 nt, Homo sapiens
  misc_RNA (1)...(19): siRNA sense strand
uuacagaucugggucauau

SEQ ID NO: 2160130 - RNA, 19 nt, Homo sapiens
  misc_RNA (1)...(19): siRNA sense strand
caucguggccuucaaguuu

SEQ ID NO: 2160131 - RNA, 19 nt, Homo sapiens
  misc_RNA (1)...(19): siRNA sense strand
gaaauaccgaggcuauaug

SEQ ID NO: 2160132 - RNA, 19 nt, Homo sapiens
  misc_RNA (1)...(19): siRNA sense strand
ucugguagcugcaaacuuc

SEQ ID NO: 2160133 - RNA, 19 nt, Homo sapiens
  misc_RNA (1)...(19): siRNA sense strand
auaccgaggcuauauguua

SEQ ID NO: 2160134 - RNA, 19 nt, Homo sapiens
  misc_RNA (1)...(19): siRNA sense strand
gcagaccuauuggaugcua

SEQ ID NO: 2160135 - RNA, 19 nt, Homo sapiens
  misc_RNA (1)...(19): siRNA sense strand
ggucugugguucaaaguca

SEQ ID NO: 2160136 - RNA, 19 nt, Homo sapiens
  misc_RNA (1)...(19): siRNA sense strand
cgaaauaccgaggcuauau

SEQ ID NO: 2160137 - RNA, 19 nt, Homo sapiens
  misc_RNA (1)...(19): siRNA sense strand
ggagcgcguugccaagaug

SEQ ID NO: 2160138 - RNA, 19 nt, Homo sapiens
  misc_RNA (1)...(19): siRNA sense strand
gaagauuugcagaccuauu

SEQ ID NO: 2160139 - RNA, 19 nt, Homo sapiens
  misc_RNA (1)...(19): siRNA sense strand
uuacacagcugaggucuac

SEQ ID NO: 2160140 - RNA, 19 nt, Homo sapiens
  misc_RNA (1)...(19): siRNA sense strand
aggaagauuugcagaccua

SEQ ID NO: 2160141 - RNA, 19 nt, Homo sapiens
  misc_RNA (1)...(19): siRNA sense strand
ggacuuggucugugguuca

SEQ ID NO: 2160142 - RNA, 19 nt, Homo sapiens
  misc_RNA (1)...(19): siRNA sense strand
gaaucugcccgguucaaug

SEQ ID NO: 2160143 - RNA, 19 nt, Homo sapiens
  misc_RNA (1)...(19): siRNA sense strand
cugauuggcuuccucuuca

SEQ ID NO: 2160144 - RNA, 19 nt, Homo sapiens
  misc_RNA (1)...(19): siRNA sense strand
ccaccacgaugcgcgcuuu

SEQ ID NO: 2160145 - RNA, 19 nt, Homo sapiens
  misc_RNA (1)...(19): siRNA sense strand
gguuaaucauaaagacuga

SEQ ID NO: 2160146 - RNA, 19 nt, Homo sapiens
  misc_RNA (1)...(19): siRNA sense strand
ggucauauggcuuggaauc

SEQ ID NO: 2160147 - RNA, 19 nt, Homo sapiens
  misc_RNA (1)...(19): siRNA sense strand
ggcuauauguuacccuugu

SEQ ID NO: 2160148 - RNA, 19 nt, Homo sapiens
  misc_RNA (1)...(19): siRNA sense strand
cuucaacaccgucuacauu

SEQ ID NO: 2160149 - RNA, 19 nt, Homo sapiens
  misc_RNA (1)...(19): siRNA sense strand
uuacggaccacauuacaga

SEQ ID NO: 2160150 - RNA, 19 nt, Homo sapiens
  misc_RNA (1)...(19): siRNA sense strand
caacaccgucuacauuuac

SEQ ID NO: 2160151 - RNA, 19 nt, Homo sapiens
  misc_RNA (1)...(19): siRNA sense strand
aagauuugcagaccuauug

SEQ ID NO: 2160152 - RNA, 19 nt, Homo sapiens
  misc_RNA (1)...(19): siRNA sense strand
gcugagggcucugguagcu

SEQ ID NO: 2160153 - RNA, 19 nt, Homo sapiens
  misc_RNA (1)...(19): siRNA sense strand
ggaccacauuacagaucug

SEQ ID NO: 2160154 - RNA, 19 nt, Homo sapiens
  misc_RNA (1)...(19): siRNA sense strand
gaaucucuuuugccuacua

SEQ ID NO: 2160155 - RNA, 19 nt, Homo sapiens
  misc_RNA (1)...(19): siRNA sense strand
cauauggcuuggaaucucu

SEQ ID NO: 2160156 - RNA, 19 nt, Homo sapiens
  misc_RNA (1)...(19): siRNA sense strand
aucguggccuucaaguuua

SEQ ID NO: 2160157 - RNA, 19 nt, Homo sapiens
  misc_RNA (1)...(19): siRNA sense strand
ucauauggcuuggaaucuc

SEQ ID NO: 2160158 - RNA, 19 nt, Homo sapiens
  misc_RNA (1)...(19): siRNA sense strand
gcucccugcucaucauugg

SEQ ID NO: 2160159 - RNA, 19 nt, Homo sapiens
  misc_RNA (1)...(19): siRNA sense strand
uaccgaggcuauauguuac

SEQ ID NO: 2160160 - RNA, 19 nt, Homo sapiens
  misc_RNA (1)...(19): siRNA sense strand
gggcucugguagcugcaaa

SEQ ID NO: 2160161 - RNA, 19 nt, Homo sapiens
  misc_RNA (1)...(19): siRNA sense strand
cacgaaauaccgaggcuau

SEQ ID NO: 2160162 - RNA, 19 nt, Homo sapiens
  misc_RNA (1)...(19): siRNA sense strand
ugggucauauggcuuggaa

SEQ ID NO: 2160163 - RNA, 19 nt, Homo sapiens
  misc_RNA (1)...(19): siRNA sense strand
gacuuggucugugguucaa

SEQ ID NO: 2160164 - RNA, 19 nt, Homo sapiens
  misc_RNA (1)...(19): siRNA sense strand
aaauaccgaggcuauaugu

SEQ ID NO: 2160165 - RNA, 19 nt, Homo sapiens
  misc_RNA (1)...(19): siRNA sense strand
cugcuacugccacauguuu

SEQ ID NO: 2160166 - RNA, 19 nt, Homo sapiens
  misc_RNA (1)...(19): siRNA sense strand
uucaacaccgucuacauuu

SEQ ID NO: 2160167 - RNA, 19 nt, Homo sapiens
  misc_RNA (1)...(19): siRNA sense strand
gacuaucggaccaugauca

SEQ ID NO: 2160168 - RNA, 19 nt, Homo sapiens
  misc_RNA (1)...(19): siRNA sense strand
aaucugcccgguucaaugu

SEQ ID NO: 2160169 - RNA, 19 nt, Homo sapiens
  misc_RNA (1)...(19): siRNA sense strand
gcuauauguuacccuuguc

SEQ ID NO: 2160170 - RNA, 19 nt, Homo sapiens
  misc_RNA (1)...(19): siRNA sense strand
auauuuacggaccacauua

SEQ ID NO: 2160171 - RNA, 19 nt, Homo sapiens
  misc_RNA (1)...(19): siRNA sense strand
aauauuuacggaccacauu

SEQ ID NO: 2160172 - RNA, 19 nt, Homo sapiens
  misc_RNA (1)...(19): siRNA sense strand
ucaacaccgucuacauuua

SEQ ID NO: 2160173 - RNA, 19 nt, Homo sapiens
  misc_RNA (1)...(19): siRNA sense strand
uuacagaucugggucauau

SEQ ID NO: 2160174 - RNA, 19 nt, Homo sapiens
  misc_RNA (1)...(19): siRNA sense strand
caucguggccuucaaguuu

SEQ ID NO: 2160175 - RNA, 19 nt, Homo sapiens
  misc_RNA (1)...(19): siRNA sense strand
gaaauaccgaggcuauaug

SEQ ID NO: 2160176 - RNA, 19 nt, Homo sapiens
  misc_RNA (1)...(19): siRNA sense strand
ucugguagcugcaaacuuc

SEQ ID NO: 2160177 - RNA, 19 nt, Homo sapiens
  misc_RNA (1)...(19): siRNA sense strand
auaccgaggcuauauguua

SEQ ID NO: 2160178 - RNA, 19 nt, Homo sapiens
  misc_RNA (1)...(19): siRNA sense strand
gcagaccuauuggaugcua

SEQ ID NO: 2160179 - RNA, 19 nt, Homo sapiens
  misc_RNA (1)...(19): siRNA sense strand
ggucugugguucaaaguca

SEQ ID NO: 2160180 - RNA, 19 nt, Homo sapiens
  misc_RNA (1)...(19): siRNA sense strand
ccuccuggcugacagauau

SEQ ID NO: 2160181 - RNA, 19 nt, Homo sapiens
  misc_RNA (1)...(19): siRNA sense strand
cgaaauaccgaggcuauau

SEQ ID NO: 2160182 - RNA, 19 nt, Homo sapiens
  misc_RNA (1)...(19): siRNA sense strand
ggagcgcguugccaagaug

SEQ ID NO: 2160183 - RNA, 19 nt, Homo sapiens
  misc_RNA (1)...(19): siRNA sense strand
gaagauuugcagaccuauu

SEQ ID NO: 2160184 - RNA, 19 nt, Homo sapiens
  misc_RNA (1)...(19): siRNA sense strand
uuacacagcugaggucuac

SEQ ID NO: 2160185 - RNA, 19 nt, Homo sapiens
  misc_RNA (1)...(19): siRNA sense strand
aggaagauuugcagaccua

SEQ ID NO: 2160186 - RNA, 19 nt, Homo sapiens
  misc_RNA (1)...(19): siRNA sense strand
ggacuuggucugugguuca

SEQ ID NO: 2160187 - RNA, 19 nt, Homo sapiens
  misc_RNA (1)...(19): siRNA sense strand
gaaucugcccgguucaaug

SEQ ID NO: 2160188 - RNA, 19 nt, Homo sapiens
  misc_RNA (1)...(19): siRNA sense strand
cugauuggcuuccucuuca

SEQ ID NO: 2160189 - RNA, 19 nt, Homo sapiens
  misc_RNA (1)...(19): siRNA sense strand
ccaccacgaugcgcgcuuu

SEQ ID NO: 2160190 - RNA, 19 nt, Homo sapiens
  misc_RNA (1)...(19): siRNA sense strand
gguuaaucauaaagacuga

SEQ ID NO: 2160191 - RNA, 19 nt, Homo sapiens
  misc_RNA (1)...(19): siRNA sense strand
ggucauauggcuuggaauc

SEQ ID NO: 2160192 - RNA, 19 nt, Homo sapiens
  misc_RNA (1)...(19): siRNA sense strand
ggcuauauguuacccuugu

SEQ ID NO: 2160193 - RNA, 19 nt, Homo sapiens
  misc_RNA (1)...(19): siRNA sense strand
cuucaacaccgucuacauu

SEQ ID NO: 2160194 - RNA, 19 nt, Homo sapiens
  misc_RNA (1)...(19): siRNA sense strand
uuacggaccacauuacaga

SEQ ID NO: 2160195 - RNA, 19 nt, Homo sapiens
  misc_RNA (1)...(19): siRNA sense strand
caacaccgucuacauuuac

SEQ ID NO: 2160196 - RNA, 19 nt, Homo sapiens
  misc_RNA (1)...(19): siRNA sense strand
aagauuugcagaccuauug

SEQ ID NO: 2160197 - RNA, 19 nt, Homo sapiens
  misc_RNA (1)...(19): siRNA sense strand
gcugagggcucugguagcu

SEQ ID NO: 2160198 - RNA, 19 nt, Homo sapiens
  misc_RNA (1)...(19): siRNA sense strand
ggaccacauuacagaucug

SEQ ID NO: 2160199 - RNA, 19 nt, Homo sapiens
  misc_RNA (1)...(19): siRNA sense strand
gaaucucuuuugccuacua

SEQ ID NO: 2160200 - RNA, 19 nt, Homo sapiens
  misc_RNA (1)...(19): siRNA sense strand
cauauggcuuggaaucucu

SEQ ID NO: 2160201 - RNA, 19 nt, Homo sapiens
  misc_RNA (1)...(19): siRNA sense strand
aucguggccuucaaguuua

SEQ ID NO: 2160202 - RNA, 19 nt, Homo sapiens
  misc_RNA (1)...(19): siRNA sense strand
ucauauggcuuggaaucuc

SEQ ID NO: 2160203 - RNA, 19 nt, Homo sapiens
  misc_RNA (1)...(19): siRNA sense strand
uaccgaggcuauauguuac

SEQ ID NO: 2160204 - RNA, 19 nt, Homo sapiens
  misc_RNA (1)...(19): siRNA sense strand
gggcucugguagcugcaaa

SEQ ID NO: 2160205 - RNA, 19 nt, Homo sapiens
  misc_RNA (1)...(19): siRNA sense strand
gcucccugcucaucauugg

SEQ ID NO: 2160206 - RNA, 19 nt, Homo sapiens
  misc_RNA (1)...(19): siRNA sense strand
cacgaaauaccgaggcuau

SEQ ID NO: 2160207 - RNA, 19 nt, Homo sapiens
  misc_RNA (1)...(19): siRNA sense strand
ugggucauauggcuuggaa

SEQ ID NO: 2160208 - RNA, 19 nt, Homo sapiens
  misc_RNA (1)...(19): siRNA sense strand
gacuuggucugugguucaa

SEQ ID NO: 2160209 - RNA, 19 nt, Homo sapiens
  misc_RNA (1)...(19): siRNA sense strand
aaauaccgaggcuauaugu

SEQ ID NO: 2160210 - RNA, 19 nt, Homo sapiens
  misc_RNA (1)...(19): siRNA sense strand
cugcuacugccacauguuu

SEQ ID NO: 2160211 - RNA, 19 nt, Homo sapiens
  misc_RNA (1)...(19): siRNA sense strand
uucaacaccgucuacauuu

SEQ ID NO: 2160212 - RNA, 19 nt, Homo sapiens
  misc_RNA (1)...(19): siRNA sense strand
gacuaucggaccaugauca

SEQ ID NO: 2160213 - RNA, 19 nt, Homo sapiens
  misc_RNA (1)...(19): siRNA sense strand
aaucugcccgguucaaugu

SEQ ID NO: 2160214 - RNA, 19 nt, Homo sapiens
  misc_RNA (1)...(19): siRNA sense strand
gcuauauguuacccuuguc

SEQ ID NO: 2160215 - RNA, 19 nt, Homo sapiens
  misc_RNA (1)...(19): siRNA sense strand
auauuuacggaccacauua

SEQ ID NO: 2160216 - RNA, 19 nt, Homo sapiens
  misc_RNA (1)...(19): siRNA sense strand
aauauuuacggaccacauu

SEQ ID NO: 2160217 - RNA, 19 nt, Homo sapiens
  misc_RNA (1)...(19): siRNA sense strand
ucaacaccgucuacauuua

SEQ ID NO: 2160218 - RNA, 19 nt, Homo sapiens
  misc_RNA (1)...(19): siRNA sense strand
uuacagaucugggucauau

SEQ ID NO: 2160219 - RNA, 19 nt, Homo sapiens
  misc_RNA (1)...(19): siRNA sense strand
caucguggccuucaaguuu

SEQ ID NO: 2160220 - RNA, 19 nt, Homo sapiens
  misc_RNA (1)...(19): siRNA sense strand
gaaauaccgaggcuauaug

SEQ ID NO: 2160221 - RNA, 19 nt, Homo sapiens
  misc_RNA (1)...(19): siRNA sense strand
ucugguagcugcaaacuuc

SEQ ID NO: 2160222 - RNA, 19 nt, Homo sapiens
  misc_RNA (1)...(19): siRNA sense strand
auaccgaggcuauauguua

SEQ ID NO: 2160223 - RNA, 19 nt, Homo sapiens
  misc_RNA (1)...(19): siRNA sense strand
gcagaccuauuggaugcua

SEQ ID NO: 2160224 - RNA, 19 nt, Homo sapiens
  misc_RNA (1)...(19): siRNA sense strand
ggucugugguucaaaguca

SEQ ID NO: 2160225 - RNA, 19 nt, Homo sapiens
  misc_RNA (1)...(19): siRNA sense strand
ccuccuggcugacagauau

SEQ ID NO: 2160226 - RNA, 19 nt, Homo sapiens
  misc_RNA (1)...(19): siRNA sense strand
cgaaauaccgaggcuauau

SEQ ID NO: 2160227 - RNA, 19 nt, Homo sapiens
  misc_RNA (1)...(19): siRNA sense strand
ggagcgcguugccaagaug

SEQ ID NO: 2160228 - RNA, 19 nt, Homo sapiens
  misc_RNA (1)...(19): siRNA sense strand
gaagauuugcagaccuauu

SEQ ID NO: 2160229 - RNA, 19 nt, Homo sapiens
  misc_RNA (1)...(19): siRNA sense strand
uuacacagcugaggucuac

SEQ ID NO: 2160230 - RNA, 19 nt, Homo sapiens
  misc_RNA (1)...(19): siRNA sense strand
aggaagauuugcagaccua

SEQ ID NO: 2160231 - RNA, 19 nt, Homo sapiens
  misc_RNA (1)...(19): siRNA sense strand
ggacuuggucugugguuca

SEQ ID NO: 2160232 - RNA, 19 nt, Homo sapiens
  misc_RNA (1)...(19): siRNA sense strand
gaaucugcccgguucaaug

SEQ ID NO: 2160233 - RNA, 19 nt, Homo sapiens
  misc_RNA (1)...(19): siRNA sense strand
cugauuggcuuccucuuca

SEQ ID NO: 2160234 - RNA, 19 nt, Homo sapiens
  misc_RNA (1)...(19): siRNA sense strand
ccaccacgaugcgcgcuuu

SEQ ID NO: 2160235 - RNA, 19 nt, Homo sapiens
  misc_RNA (1)...(19): siRNA sense strand
gguuaaucauaaagacuga

SEQ ID NO: 2160236 - RNA, 19 nt, Homo sapiens
  misc_RNA (1)...(19): siRNA sense strand
ggucauauggcuuggaauc

SEQ ID NO: 2160237 - RNA, 19 nt, Homo sapiens
  misc_RNA (1)...(19): siRNA sense strand
ggcuauauguuacccuugu

SEQ ID NO: 2160238 - RNA, 19 nt, Homo sapiens
  misc_RNA (1)...(19): siRNA sense strand
cuucaacaccgucuacauu

SEQ ID NO: 2160239 - RNA, 19 nt, Homo sapiens
  misc_RNA (1)...(19): siRNA sense strand
uuacggaccacauuacaga

SEQ ID NO: 2160240 - RNA, 19 nt, Homo sapiens
  misc_RNA (1)...(19): siRNA sense strand
caacaccgucuacauuuac

SEQ ID NO: 2160241 - RNA, 19 nt, Homo sapiens
  misc_RNA (1)...(19): siRNA sense strand
aagauuugcagaccuauug

SEQ ID NO: 2160242 - RNA, 19 nt, Homo sapiens
  misc_RNA (1)...(19): siRNA sense strand
gcugagggcucugguagcu

SEQ ID NO: 2160243 - RNA, 19 nt, Homo sapiens
  misc_RNA (1)...(19): siRNA sense strand
ggaccacauuacagaucug

SEQ ID NO: 2160244 - RNA, 19 nt, Homo sapiens
  misc_RNA (1)...(19): siRNA sense strand
gaaucucuuuugccuacua

SEQ ID NO: 2160245 - RNA, 19 nt, Homo sapiens
  misc_RNA (1)...(19): siRNA sense strand
cauauggcuuggaaucucu

SEQ ID NO: 2160246 - RNA, 19 nt, Homo sapiens
  misc_RNA (1)...(19): siRNA sense strand
aucguggccuucaaguuua

SEQ ID NO: 2160247 - RNA, 19 nt, Homo sapiens
  misc_RNA (1)...(19): siRNA sense strand
ucauauggcuuggaaucuc

SEQ ID NO: 2160248 - RNA, 19 nt, Homo sapiens
  misc_RNA (1)...(19): siRNA sense strand
uaccgaggcuauauguuac

SEQ ID NO: 2160249 - RNA, 19 nt, Homo sapiens
  misc_RNA (1)...(19): siRNA sense strand
gggcucugguagcugcaaa

SEQ ID NO: 2160250 - RNA, 19 nt, Homo sapiens
  misc_RNA (1)...(19): siRNA sense strand
gcucccugcucaucauugg

SEQ ID NO: 2160251 - RNA, 19 nt, Homo sapiens
  misc_RNA (1)...(19): siRNA sense strand
cacgaaauaccgaggcuau

SEQ ID NO: 2160252 - RNA, 19 nt, Homo sapiens
  misc_RNA (1)...(19): siRNA sense strand
ugggucauauggcuuggaa

SEQ ID NO: 2160253 - RNA, 19 nt, Homo sapiens
  misc_RNA (1)...(19): siRNA sense strand
gacuuggucugugguucaa

SEQ ID NO: 2160254 - RNA, 19 nt, Homo sapiens
  misc_RNA (1)...(19): siRNA sense strand
aaauaccgaggcuauaugu

SEQ ID NO: 2160255 - RNA, 19 nt, Homo sapiens
  misc_RNA (1)...(19): siRNA sense strand
cugcuacugccacauguuu

SEQ ID NO: 2160256 - RNA, 19 nt, Homo sapiens
  misc_RNA (1)...(19): siRNA sense strand
uucaacaccgucuacauuu

SEQ ID NO: 2160257 - RNA, 19 nt, Homo sapiens
  misc_RNA (1)...(19): siRNA sense strand
gacuaucggaccaugauca

SEQ ID NO: 2160258 - RNA, 19 nt, Homo sapiens
  misc_RNA (1)...(19): siRNA sense strand
aaucugcccgguucaaugu

SEQ ID NO: 2160259 - RNA, 19 nt, Homo sapiens
  misc_RNA (1)...(19): siRNA sense strand
gcuauauguuacccuuguc

SEQ ID NO: 2160260 - RNA, 19 nt, Homo sapiens
  misc_RNA (1)...(19): siRNA sense strand
auauuuacggaccacauua

SEQ ID NO: 2160261 - RNA, 19 nt, Homo sapiens
  misc_RNA (1)...(19): siRNA sense strand
aauauuuacggaccacauu

SEQ ID NO: 2160262 - RNA, 19 nt, Homo sapiens
  misc_RNA (1)...(19): siRNA sense strand
gaaacuaccuccuaucuug

SEQ ID NO: 2160263 - RNA, 19 nt, Homo sapiens
  misc_RNA (1)...(19): siRNA sense strand
ggaagauccucaaguauuu

SEQ ID NO: 2160264 - RNA, 19 nt, Homo sapiens
  misc_RNA (1)...(19): siRNA sense strand
gcacagcgcugcacaagug

SEQ ID NO: 2160265 - RNA, 19 nt, Homo sapiens
  misc_RNA (1)...(19): siRNA sense strand
gaaaccaucucuccaagaa

SEQ ID NO: 2160266 - RNA, 19 nt, Homo sapiens
  misc_RNA (1)...(19): siRNA sense strand
gaaagcagcaucucucuaa

SEQ ID NO: 2160267 - RNA, 19 nt, Homo sapiens
  misc_RNA (1)...(19): siRNA sense strand
gaagagcugugcaggagua

SEQ ID NO: 2160268 - RNA, 19 nt, Homo sapiens
  misc_RNA (1)...(19): siRNA sense strand
gcaggaauuuggugcuuua

SEQ ID NO: 2160269 - RNA, 19 nt, Homo sapiens
  misc_RNA (1)...(19): siRNA sense strand
gugcagaucuugaauauca

SEQ ID NO: 2160270 - RNA, 19 nt, Homo sapiens
  misc_RNA (1)...(19): siRNA sense strand
caaguggccuuaacagaaa

SEQ ID NO: 2160271 - RNA, 19 nt, Homo sapiens
  misc_RNA (1)...(19): siRNA sense strand
aggaagagcucacggauaa

SEQ ID NO: 2160272 - RNA, 19 nt, Homo sapiens
  misc_RNA (1)...(19): siRNA sense strand
ggaucaagauggagaaaga

SEQ ID NO: 2160273 - RNA, 19 nt, Homo sapiens
  misc_RNA (1)...(19): siRNA sense strand
guaaagagguggccgucaa

SEQ ID NO: 2160274 - RNA, 19 nt, Homo sapiens
  misc_RNA (1)...(19): siRNA sense strand
agaagcaacuccagaauga

SEQ ID NO: 2160275 - RNA, 19 nt, Homo sapiens
  misc_RNA (1)...(19): siRNA sense strand
ccacagaggugccacugaa

SEQ ID NO: 2160276 - RNA, 19 nt, Homo sapiens
  misc_RNA (1)...(19): siRNA sense strand
gcagacagauacacugaug

SEQ ID NO: 2160277 - RNA, 19 nt, Homo sapiens
  misc_RNA (1)...(19): siRNA sense strand
gaagaaaccaucucuccaa

SEQ ID NO: 2160278 - RNA, 19 nt, Homo sapiens
  misc_RNA (1)...(19): siRNA sense strand
gugcaggaguacaucauua

SEQ ID NO: 2160279 - RNA, 19 nt, Homo sapiens
  misc_RNA (1)...(19): siRNA sense strand
caagcaacaucaccauuga

SEQ ID NO: 2160280 - RNA, 19 nt, Homo sapiens
  misc_RNA (1)...(19): siRNA sense strand
gacgacauauugauuauuc

SEQ ID NO: 2160281 - RNA, 19 nt, Homo sapiens
  misc_RNA (1)...(19): siRNA sense strand
caauauccgucauaaaugu

SEQ ID NO: 2160282 - RNA, 19 nt, Homo sapiens
  misc_RNA (1)...(19): siRNA sense strand
caucuuggguuaccgaauu

SEQ ID NO: 2160283 - RNA, 19 nt, Homo sapiens
  misc_RNA (1)...(19): siRNA sense strand
aaagaucccuuccaagaau

SEQ ID NO: 2160284 - RNA, 19 nt, Homo sapiens
  misc_RNA (1)...(19): siRNA sense strand
gcacgcagcccuugcauuc

SEQ ID NO: 2160285 - RNA, 19 nt, Homo sapiens
  misc_RNA (1)...(19): siRNA sense strand
ucaaagaucccuuccaaga

SEQ ID NO: 2160286 - RNA, 19 nt, Homo sapiens
  misc_RNA (1)...(19): siRNA sense strand
uaugcucacuccaucauua

SEQ ID NO: 2160287 - RNA, 19 nt, Homo sapiens
  misc_RNA (1)...(19): siRNA sense strand
gcacaauaaagacgacaua

SEQ ID NO: 2160288 - RNA, 19 nt, Homo sapiens
  misc_RNA (1)...(19): siRNA sense strand
gcagagcccuuccaguauc

SEQ ID NO: 2160289 - RNA, 19 nt, Homo sapiens
  misc_RNA (1)...(19): siRNA sense strand
ccacgagccucauggagaa

SEQ ID NO: 2160290 - RNA, 19 nt, Homo sapiens
  misc_RNA (1)...(19): siRNA sense strand
gauuguggcuucccuaaca

SEQ ID NO: 2160291 - RNA, 19 nt, Homo sapiens
  misc_RNA (1)...(19): siRNA sense strand
ugacagcucucuuugaagu

SEQ ID NO: 2160292 - RNA, 19 nt, Homo sapiens
  misc_RNA (1)...(19): siRNA sense strand
ggcaauauccgucauaaau

SEQ ID NO: 2160293 - RNA, 19 nt, Homo sapiens
  misc_RNA (1)...(19): siRNA sense strand
ccacaaaucuugaguuuuc

SEQ ID NO: 2160294 - RNA, 19 nt, Homo sapiens
  misc_RNA (1)...(19): siRNA sense strand
gaagauccucaaguauuua

SEQ ID NO: 2160295 - RNA, 19 nt, Homo sapiens
  misc_RNA (1)...(19): siRNA sense strand
gcagaucccuagugugaag

SEQ ID NO: 2160296 - RNA, 19 nt, Homo sapiens
  misc_RNA (1)...(19): siRNA sense strand
aaugacagcucucuuugaa

SEQ ID NO: 2160297 - RNA, 19 nt, Homo sapiens
  misc_RNA (1)...(19): siRNA sense strand
guuccaaguucaaacagua

SEQ ID NO: 2160298 - RNA, 19 nt, Homo sapiens
  misc_RNA (1)...(19): siRNA sense strand
gcaucuuuguggcaacuua

SEQ ID NO: 2160299 - RNA, 19 nt, Homo sapiens
  misc_RNA (1)...(19): siRNA sense strand
cagcaucucucuaaugagu

SEQ ID NO: 2160300 - RNA, 19 nt, Homo sapiens
  misc_RNA (1)...(19): siRNA sense strand
guugagacauuuacauugu

SEQ ID NO: 2160301 - RNA, 19 nt, Homo sapiens
  misc_RNA (1)...(19): siRNA sense strand
cagacaagcuagacuuuca

SEQ ID NO: 2160302 - RNA, 19 nt, Homo sapiens
  misc_RNA (1)...(19): siRNA sense strand
aauaucaucuuugcgguua

SEQ ID NO: 2160303 - RNA, 19 nt, Homo sapiens
  misc_RNA (1)...(19): siRNA sense strand
ggucaagcuucccuucuga

SEQ ID NO: 2160304 - RNA, 19 nt, Homo sapiens
  misc_RNA (1)...(19): siRNA sense strand
uaacugagucuucuuuguu

SEQ ID NO: 2160305 - RNA, 19 nt, Homo sapiens
  misc_RNA (1)...(19): siRNA sense strand
caagaauguucgucacaga

SEQ ID NO: 2160306 - RNA, 19 nt, Homo sapiens
  misc_RNA (1)...(19): siRNA sense strand
gagagcagccaucaucuug

SEQ ID NO: 2160307 - RNA, 19 nt, Homo sapiens
  misc_RNA (1)...(19): siRNA sense strand
gaaguccucuugggucaga

SEQ ID NO: 2160308 - RNA, 19 nt, Homo sapiens
  misc_RNA (1)...(19): siRNA sense strand
gcacagcaguccucuccau

SEQ ID NO: 2160309 - RNA, 19 nt, Homo sapiens
  misc_RNA (1)...(19): siRNA sense strand
caacugugcuggccagaag

SEQ ID NO: 2160310 - RNA, 19 nt, Homo sapiens
  misc_RNA (1)...(19): siRNA sense strand
guacgguguugaucacuga

SEQ ID NO: 2160311 - RNA, 19 nt, Homo sapiens
  misc_RNA (1)...(19): siRNA sense strand
gcaauauccgucauaaaug

SEQ ID NO: 2160312 - RNA, 19 nt, Homo sapiens
  misc_RNA (1)...(19): siRNA sense strand
ucgcagagcccuuccagua

SEQ ID NO: 2160313 - RNA, 19 nt, Homo sapiens
  misc_RNA (1)...(19): siRNA sense strand
guggauaugaguaguguua

SEQ ID NO: 2160314 - RNA, 19 nt, Homo sapiens
  misc_RNA (1)...(19): siRNA sense strand
gagaaggaccggcucauca

SEQ ID NO: 2160315 - RNA, 19 nt, Homo sapiens
  misc_RNA (1)...(19): siRNA sense strand
caaagaucccuuccaagaa

SEQ ID NO: 2160316 - RNA, 19 nt, Homo sapiens
  misc_RNA (1)...(19): siRNA sense strand
gcacagacaagcuagacuu

SEQ ID NO: 2160317 - RNA, 19 nt, Homo sapiens
  misc_RNA (1)...(19): siRNA sense strand
guacagcucaucuacuuug

SEQ ID NO: 2160318 - RNA, 19 nt, Homo sapiens
  misc_RNA (1)...(19): siRNA sense strand
gaacucagcggcuccaucu

SEQ ID NO: 2160319 - RNA, 19 nt, Homo sapiens
  misc_RNA (1)...(19): siRNA sense strand
gaacacaacgcgacaacca

SEQ ID NO: 2160320 - RNA, 19 nt, Homo sapiens
  misc_RNA (1)...(19): siRNA sense strand
ucaaagaaguacugaggau

SEQ ID NO: 2160321 - RNA, 19 nt, Homo sapiens
  misc_RNA (1)...(19): siRNA sense strand
ggagaaagacgugggauca

SEQ ID NO: 2160322 - RNA, 19 nt, Homo sapiens
  misc_RNA (1)...(19): siRNA sense strand
caggacacauucuccauug

SEQ ID NO: 2160323 - RNA, 19 nt, Homo sapiens
  misc_RNA (1)...(19): siRNA sense strand
ggaauuuggugcuuuaucc

SEQ ID NO: 2160324 - RNA, 19 nt, Homo sapiens
  misc_RNA (1)...(19): siRNA sense strand
ggaguucaguuucuaucug

SEQ ID NO: 2160325 - RNA, 19 nt, Homo sapiens
  misc_RNA (1)...(19): siRNA sense strand
gauacuggcuucugcaacu

SEQ ID NO: 2160326 - RNA, 19 nt, Homo sapiens
  misc_RNA (1)...(19): siRNA sense strand
ugaccagacuccuuuaauc

SEQ ID NO: 2160327 - RNA, 19 nt, Homo sapiens
  misc_RNA (1)...(19): siRNA sense strand
ccacaagugcagacagaua

SEQ ID NO: 2160328 - RNA, 19 nt, Homo sapiens
  misc_RNA (1)...(19): siRNA sense strand
gcauucagcaggacacauu

SEQ ID NO: 2160329 - RNA, 19 nt, Homo sapiens
  misc_RNA (1)...(19): siRNA sense strand
gggcacagaugcagaucga

SEQ ID NO: 2160330 - RNA, 19 nt, Homo sapiens
  misc_RNA (1)...(19): siRNA sense strand
cuucggaccugauuaacaa

SEQ ID NO: 2160331 - RNA, 19 nt, Homo sapiens
  misc_RNA (1)...(19): siRNA sense strand
cuagugaucugcagucauc

SEQ ID NO: 2160332 - RNA, 19 nt, Homo sapiens
  misc_RNA (1)...(19): siRNA sense strand
acacugaugugaccacugu

SEQ ID NO: 2160333 - RNA, 19 nt, Homo sapiens
  misc_RNA (1)...(19): siRNA sense strand
gagaagcaacuccagaaug

SEQ ID NO: 2160334 - RNA, 19 nt, Homo sapiens
  misc_RNA (1)...(19): siRNA sense strand
cagcucaacuuaucucagu

SEQ ID NO: 2160335 - RNA, 19 nt, Homo sapiens
  misc_RNA (1)...(19): siRNA sense strand
guugaagcgucuacgguuu

SEQ ID NO: 2160336 - RNA, 19 nt, Homo sapiens
  misc_RNA (1)...(19): siRNA sense strand
agucaaagaucccuuccaa

SEQ ID NO: 2160337 - RNA, 19 nt, Homo sapiens
  misc_RNA (1)...(19): siRNA sense strand
acgaugagauggauaacuu

SEQ ID NO: 2160338 - RNA, 19 nt, Homo sapiens
  misc_RNA (1)...(19): siRNA sense strand
ccuccuaucuugagucuuc

SEQ ID NO: 2160339 - RNA, 19 nt, Homo sapiens
  misc_RNA (1)...(19): siRNA sense strand
caacuccucuugcauuugc

SEQ ID NO: 2160340 - RNA, 19 nt, Homo sapiens
  misc_RNA (1)...(19): siRNA sense strand
acaaguggccuuaacagaa

SEQ ID NO: 2160341 - RNA, 19 nt, Homo sapiens
  misc_RNA (1)...(19): siRNA sense strand
guacaucauuacagcaauc

SEQ ID NO: 2160342 - RNA, 19 nt, Homo sapiens
  misc_RNA (1)...(19): siRNA sense strand
ggauaugaguaguguuaca

SEQ ID NO: 2160343 - RNA, 19 nt, Homo sapiens
  misc_RNA (1)...(19): siRNA sense strand
gcaugaccgugcuggaaga

SEQ ID NO: 2160344 - RNA, 19 nt, Homo sapiens
  misc_RNA (1)...(19): siRNA sense strand
ccaaaucagugcucuagac

SEQ ID NO: 2160345 - RNA, 19 nt, Homo sapiens
  misc_RNA (1)...(19): siRNA sense strand
cgguacagcucaucuacuu

SEQ ID NO: 2160346 - RNA, 19 nt, Homo sapiens
  misc_RNA (1)...(19): siRNA sense strand
ugacuucacuuuucuggua

SEQ ID NO: 2160347 - RNA, 19 nt, Homo sapiens
  misc_RNA (1)...(19): siRNA sense strand
ggccacaagugcagacaga

SEQ ID NO: 2160348 - RNA, 19 nt, Homo sapiens
  misc_RNA (1)...(19): siRNA sense strand
gggauugccagcagaauug

SEQ ID NO: 2160349 - RNA, 19 nt, Homo sapiens
  misc_RNA (1)...(19): siRNA sense strand
caacaaucccugcaguaga

SEQ ID NO: 2160350 - RNA, 19 nt, Homo sapiens
  misc_RNA (1)...(19): siRNA sense strand
guacugaggauucacuuca

SEQ ID NO: 2160351 - RNA, 19 nt, Homo sapiens
  misc_RNA (1)...(19): siRNA sense strand
gcaggacacauucuccauu

SEQ ID NO: 2160352 - RNA, 19 nt, Homo sapiens
  misc_RNA (1)...(19): siRNA sense strand
cauuacccaugguuucuuu

SEQ ID NO: 2160353 - RNA, 19 nt, Homo sapiens
  misc_RNA (1)...(19): siRNA sense strand
gagcucagccaguggaaau

SEQ ID NO: 2160354 - RNA, 19 nt, Homo sapiens
  misc_RNA (1)...(19): siRNA sense strand
ccagagagcagccaucauc

SEQ ID NO: 2160355 - RNA, 19 nt, Homo sapiens
  misc_RNA (1)...(19): siRNA sense strand
ccuaaugacagcucucuuu

SEQ ID NO: 2160356 - RNA, 19 nt, Homo sapiens
  misc_RNA (1)...(19): siRNA sense strand
cauccgguccuuucguuua

SEQ ID NO: 2160357 - RNA, 19 nt, Homo sapiens
  misc_RNA (1)...(19): siRNA sense strand
acggaugguuucuccaaua

SEQ ID NO: 2160358 - RNA, 19 nt, Homo sapiens
  misc_RNA (1)...(19): siRNA sense strand
uuacagcaaucaaagaagu

SEQ ID NO: 2160359 - RNA, 19 nt, Homo sapiens
  misc_RNA (1)...(19): siRNA sense strand
gcagucaucucagcugucu

SEQ ID NO: 2160360 - RNA, 19 nt, Homo sapiens
  misc_RNA (1)...(19): siRNA sense strand
ccaagaacguuccaguuuu

SEQ ID NO: 2160361 - RNA, 19 nt, Homo sapiens
  misc_RNA (1)...(19): siRNA sense strand
ugagaaaggccuaaugaca

SEQ ID NO: 2160362 - RNA, 19 nt, Homo sapiens
  misc_RNA (1)...(19): siRNA sense strand
gaaacuaccuccuaucuug

SEQ ID NO: 2160363 - RNA, 19 nt, Homo sapiens
  misc_RNA (1)...(19): siRNA sense strand
ggaagauccucaaguauuu

SEQ ID NO: 2160364 - RNA, 19 nt, Homo sapiens
  misc_RNA (1)...(19): siRNA sense strand
gcacagcgcugcacaagug

SEQ ID NO: 2160365 - RNA, 19 nt, Homo sapiens
  misc_RNA (1)...(19): siRNA sense strand
gaaaccaucucuccaagaa

SEQ ID NO: 2160366 - RNA, 19 nt, Homo sapiens
  misc_RNA (1)...(19): siRNA sense strand
gaaagcagcaucucucuaa

SEQ ID NO: 2160367 - RNA, 19 nt, Homo sapiens
  misc_RNA (1)...(19): siRNA sense strand
gaagagcugugcaggagua

SEQ ID NO: 2160368 - RNA, 19 nt, Homo sapiens
  misc_RNA (1)...(19): siRNA sense strand
gcaggaauuuggugcuuua

SEQ ID NO: 2160369 - RNA, 19 nt, Homo sapiens
  misc_RNA (1)...(19): siRNA sense strand
gugcagaucuugaauauca

SEQ ID NO: 2160370 - RNA, 19 nt, Homo sapiens
  misc_RNA (1)...(19): siRNA sense strand
caaguggccuuaacagaaa

SEQ ID NO: 2160371 - RNA, 19 nt, Homo sapiens
  misc_RNA (1)...(19): siRNA sense strand
aggaagagcucacggauaa

SEQ ID NO: 2160372 - RNA, 19 nt, Homo sapiens
  misc_RNA (1)...(19): siRNA sense strand
ggaucaagauggagaaaga

SEQ ID NO: 2160373 - RNA, 19 nt, Homo sapiens
  misc_RNA (1)...(19): siRNA sense strand
guaaagagguggccgucaa

SEQ ID NO: 2160374 - RNA, 19 nt, Homo sapiens
  misc_RNA (1)...(19): siRNA sense strand
agaagcaacuccagaauga

SEQ ID NO: 2160375 - RNA, 19 nt, Homo sapiens
  misc_RNA (1)...(19): siRNA sense strand
ccacagaggugccacugaa

SEQ ID NO: 2160376 - RNA, 19 nt, Homo sapiens
  misc_RNA (1)...(19): siRNA sense strand
gcagacagauacacugaug

SEQ ID NO: 2160377 - RNA, 19 nt, Homo sapiens
  misc_RNA (1)...(19): siRNA sense strand
gaagaaaccaucucuccaa

SEQ ID NO: 2160378 - RNA, 19 nt, Homo sapiens
  misc_RNA (1)...(19): siRNA sense strand
gugcaggaguacaucauua

SEQ ID NO: 2160379 - RNA, 19 nt, Homo sapiens
  misc_RNA (1)...(19): siRNA sense strand
caagcaacaucaccauuga

SEQ ID NO: 2160380 - RNA, 19 nt, Homo sapiens
  misc_RNA (1)...(19): siRNA sense strand
gacgacauauugauuauuc

SEQ ID NO: 2160381 - RNA, 19 nt, Homo sapiens
  misc_RNA (1)...(19): siRNA sense strand
caauauccgucauaaaugu

SEQ ID NO: 2160382 - RNA, 19 nt, Homo sapiens
  misc_RNA (1)...(19): siRNA sense strand
caucuuggguuaccgaauu

SEQ ID NO: 2160383 - RNA, 19 nt, Homo sapiens
  misc_RNA (1)...(19): siRNA sense strand
aaagaucccuuccaagaau

SEQ ID NO: 2160384 - RNA, 19 nt, Homo sapiens
  misc_RNA (1)...(19): siRNA sense strand
gcacgcagcccuugcauuc

SEQ ID NO: 2160385 - RNA, 19 nt, Homo sapiens
  misc_RNA (1)...(19): siRNA sense strand
ucaaagaucccuuccaaga

SEQ ID NO: 2160386 - RNA, 19 nt, Homo sapiens
  misc_RNA (1)...(19): siRNA sense strand
uaugcucacuccaucauua

SEQ ID NO: 2160387 - RNA, 19 nt, Homo sapiens
  misc_RNA (1)...(19): siRNA sense strand
gcacaauaaagacgacaua

SEQ ID NO: 2160388 - RNA, 19 nt, Homo sapiens
  misc_RNA (1)...(19): siRNA sense strand
gcagagcccuuccaguauc

SEQ ID NO: 2160389 - RNA, 19 nt, Homo sapiens
  misc_RNA (1)...(19): siRNA sense strand
ccacgagccucauggagaa

SEQ ID NO: 2160390 - RNA, 19 nt, Homo sapiens
  misc_RNA (1)...(19): siRNA sense strand
gauuguggcuucccuaaca

SEQ ID NO: 2160391 - RNA, 19 nt, Homo sapiens
  misc_RNA (1)...(19): siRNA sense strand
ugacagcucucuuugaagu

SEQ ID NO: 2160392 - RNA, 19 nt, Homo sapiens
  misc_RNA (1)...(19): siRNA sense strand
ggcaauauccgucauaaau

SEQ ID NO: 2160393 - RNA, 19 nt, Homo sapiens
  misc_RNA (1)...(19): siRNA sense strand
ccacaaaucuugaguuuuc

SEQ ID NO: 2160394 - RNA, 19 nt, Homo sapiens
  misc_RNA (1)...(19): siRNA sense strand
gaagauccucaaguauuua

SEQ ID NO: 2160395 - RNA, 19 nt, Homo sapiens
  misc_RNA (1)...(19): siRNA sense strand
gcagaucccuagugugaag

SEQ ID NO: 2160396 - RNA, 19 nt, Homo sapiens
  misc_RNA (1)...(19): siRNA sense strand
aaugacagcucucuuugaa

SEQ ID NO: 2160397 - RNA, 19 nt, Homo sapiens
  misc_RNA (1)...(19): siRNA sense strand
guuccaaguucaaacagua

SEQ ID NO: 2160398 - RNA, 19 nt, Homo sapiens
  misc_RNA (1)...(19): siRNA sense strand
gcaucuuuguggcaacuua

SEQ ID NO: 2160399 - RNA, 19 nt, Homo sapiens
  misc_RNA (1)...(19): siRNA sense strand
cagcaucucucuaaugagu

SEQ ID NO: 2160400 - RNA, 19 nt, Homo sapiens
  misc_RNA (1)...(19): siRNA sense strand
guugagacauuuacauugu

SEQ ID NO: 2160401 - RNA, 19 nt, Homo sapiens
  misc_RNA (1)...(19): siRNA sense strand
cagacaagcuagacuuuca

SEQ ID NO: 2160402 - RNA, 19 nt, Homo sapiens
  misc_RNA (1)...(19): siRNA sense strand
aauaucaucuuugcgguua

SEQ ID NO: 2160403 - RNA, 19 nt, Homo sapiens
  misc_RNA (1)...(19): siRNA sense strand
ggucaagcuucccuucuga

SEQ ID NO: 2160404 - RNA, 19 nt, Homo sapiens
  misc_RNA (1)...(19): siRNA sense strand
uaacugagucuucuuuguu

SEQ ID NO: 2160405 - RNA, 19 nt, Homo sapiens
  misc_RNA (1)...(19): siRNA sense strand
caagaauguucgucacaga

SEQ ID NO: 2160406 - RNA, 19 nt, Homo sapiens
  misc_RNA (1)...(19): siRNA sense strand
gagagcagccaucaucuug

SEQ ID NO: 2160407 - RNA, 19 nt, Homo sapiens
  misc_RNA (1)...(19): siRNA sense strand
gaaguccucuugggucaga

SEQ ID NO: 2160408 - RNA, 19 nt, Homo sapiens
  misc_RNA (1)...(19): siRNA sense strand
gcacagcaguccucuccau

SEQ ID NO: 2160409 - RNA, 19 nt, Homo sapiens
  misc_RNA (1)...(19): siRNA sense strand
caacugugcuggccagaag

SEQ ID NO: 2160410 - RNA, 19 nt, Homo sapiens
  misc_RNA (1)...(19): siRNA sense strand
guacgguguugaucacuga

SEQ ID NO: 2160411 - RNA, 19 nt, Homo sapiens
  misc_RNA (1)...(19): siRNA sense strand
gcaauauccgucauaaaug

SEQ ID NO: 2160412 - RNA, 19 nt, Homo sapiens
  misc_RNA (1)...(19): siRNA sense strand
ucgcagagcccuuccagua

SEQ ID NO: 2160413 - RNA, 19 nt, Homo sapiens
  misc_RNA (1)...(19): siRNA sense strand
guggauaugaguaguguua

SEQ ID NO: 2160414 - RNA, 19 nt, Homo sapiens
  misc_RNA (1)...(19): siRNA sense strand
gagaaggaccggcucauca

SEQ ID NO: 2160415 - RNA, 19 nt, Homo sapiens
  misc_RNA (1)...(19): siRNA sense strand
caaagaucccuuccaagaa

SEQ ID NO: 2160416 - RNA, 19 nt, Homo sapiens
  misc_RNA (1)...(19): siRNA sense strand
gcacagacaagcuagacuu

SEQ ID NO: 2160417 - RNA, 19 nt, Homo sapiens
  misc_RNA (1)...(19): siRNA sense strand
guacagcucaucuacuuug

SEQ ID NO: 2160418 - RNA, 19 nt, Homo sapiens
  misc_RNA (1)...(19): siRNA sense strand
gaacucagcggcuccaucu

SEQ ID NO: 2160419 - RNA, 19 nt, Homo sapiens
  misc_RNA (1)...(19): siRNA sense strand
gaacacaacgcgacaacca

SEQ ID NO: 2160420 - RNA, 19 nt, Homo sapiens
  misc_RNA (1)...(19): siRNA sense strand
ucaaagaaguacugaggau

SEQ ID NO: 2160421 - RNA, 19 nt, Homo sapiens
  misc_RNA (1)...(19): siRNA sense strand
ggagaaagacgugggauca

SEQ ID NO: 2160422 - RNA, 19 nt, Homo sapiens
  misc_RNA (1)...(19): siRNA sense strand
caggacacauucuccauug

SEQ ID NO: 2160423 - RNA, 19 nt, Homo sapiens
  misc_RNA (1)...(19): siRNA sense strand
ggaauuuggugcuuuaucc

SEQ ID NO: 2160424 - RNA, 19 nt, Homo sapiens
  misc_RNA (1)...(19): siRNA sense strand
ggaguucaguuucuaucug

SEQ ID NO: 2160425 - RNA, 19 nt, Homo sapiens
  misc_RNA (1)...(19): siRNA sense strand
gauacuggcuucugcaacu

SEQ ID NO: 2160426 - RNA, 19 nt, Homo sapiens
  misc_RNA (1)...(19): siRNA sense strand
ugaccagacuccuuuaauc

SEQ ID NO: 2160427 - RNA, 19 nt, Homo sapiens
  misc_RNA (1)...(19): siRNA sense strand
ccacaagugcagacagaua

SEQ ID NO: 2160428 - RNA, 19 nt, Homo sapiens
  misc_RNA (1)...(19): siRNA sense strand
gcauucagcaggacacauu

SEQ ID NO: 2160429 - RNA, 19 nt, Homo sapiens
  misc_RNA (1)...(19): siRNA sense strand
gggcacagaugcagaucga

SEQ ID NO: 2160430 - RNA, 19 nt, Homo sapiens
  misc_RNA (1)...(19): siRNA sense strand
cuucggaccugauuaacaa

SEQ ID NO: 2160431 - RNA, 19 nt, Homo sapiens
  misc_RNA (1)...(19): siRNA sense strand
cuagugaucugcagucauc

SEQ ID NO: 2160432 - RNA, 19 nt, Homo sapiens
  misc_RNA (1)...(19): siRNA sense strand
acacugaugugaccacugu

SEQ ID NO: 2160433 - RNA, 19 nt, Homo sapiens
  misc_RNA (1)...(19): siRNA sense strand
gagaagcaacuccagaaug

SEQ ID NO: 2160434 - RNA, 19 nt, Homo sapiens
  misc_RNA (1)...(19): siRNA sense strand
cagcucaacuuaucucagu

SEQ ID NO: 2160435 - RNA, 19 nt, Homo sapiens
  misc_RNA (1)...(19): siRNA sense strand
guugaagcgucuacgguuu

SEQ ID NO: 2160436 - RNA, 19 nt, Homo sapiens
  misc_RNA (1)...(19): siRNA sense strand
agucaaagaucccuuccaa

SEQ ID NO: 2160437 - RNA, 19 nt, Homo sapiens
  misc_RNA (1)...(19): siRNA sense strand
acgaugagauggauaacuu

SEQ ID NO: 2160438 - RNA, 19 nt, Homo sapiens
  misc_RNA (1)...(19): siRNA sense strand
ccuccuaucuugagucuuc

SEQ ID NO: 2160439 - RNA, 19 nt, Homo sapiens
  misc_RNA (1)...(19): siRNA sense strand
caacuccucuugcauuugc

SEQ ID NO: 2160440 - RNA, 19 nt, Homo sapiens
  misc_RNA (1)...(19): siRNA sense strand
acaaguggccuuaacagaa

SEQ ID NO: 2160441 - RNA, 19 nt, Homo sapiens
  misc_RNA (1)...(19): siRNA sense strand
guacaucauuacagcaauc

SEQ ID NO: 2160442 - RNA, 19 nt, Homo sapiens
  misc_RNA (1)...(19): siRNA sense strand
ggauaugaguaguguuaca

SEQ ID NO: 2160443 - RNA, 19 nt, Homo sapiens
  misc_RNA (1)...(19): siRNA sense strand
gcaugaccgugcuggaaga

SEQ ID NO: 2160444 - RNA, 19 nt, Homo sapiens
  misc_RNA (1)...(19): siRNA sense strand
ccaaaucagugcucuagac

SEQ ID NO: 2160445 - RNA, 19 nt, Homo sapiens
  misc_RNA (1)...(19): siRNA sense strand
cgguacagcucaucuacuu

SEQ ID NO: 2160446 - RNA, 19 nt, Homo sapiens
  misc_RNA (1)...(19): siRNA sense strand
ugacuucacuuuucuggua

SEQ ID NO: 2160447 - RNA, 19 nt, Homo sapiens
  misc_RNA (1)...(19): siRNA sense strand
ggccacaagugcagacaga

SEQ ID NO: 2160448 - RNA, 19 nt, Homo sapiens
  misc_RNA (1)...(19): siRNA sense strand
gggauugccagcagaauug

SEQ ID NO: 2160449 - RNA, 19 nt, Homo sapiens
  misc_RNA (1)...(19): siRNA sense strand
caacaaucccugcaguaga

SEQ ID NO: 2160450 - RNA, 19 nt, Homo sapiens
  misc_RNA (1)...(19): siRNA sense strand
guacugaggauucacuuca

SEQ ID NO: 2160451 - RNA, 19 nt, Homo sapiens
  misc_RNA (1)...(19): siRNA sense strand
gcaggacacauucuccauu

SEQ ID NO: 2160452 - RNA, 19 nt, Homo sapiens
  misc_RNA (1)...(19): siRNA sense strand
cauuacccaugguuucuuu

SEQ ID NO: 2160453 - RNA, 19 nt, Homo sapiens
  misc_RNA (1)...(19): siRNA sense strand
gagcucagccaguggaaau

SEQ ID NO: 2160454 - RNA, 19 nt, Homo sapiens
  misc_RNA (1)...(19): siRNA sense strand
ccagagagcagccaucauc

SEQ ID NO: 2160455 - RNA, 19 nt, Homo sapiens
  misc_RNA (1)...(19): siRNA sense strand
ccuaaugacagcucucuuu

SEQ ID NO: 2160456 - RNA, 19 nt, Homo sapiens
  misc_RNA (1)...(19): siRNA sense strand
cauccgguccuuucguuua

SEQ ID NO: 2160457 - RNA, 19 nt, Homo sapiens
  misc_RNA (1)...(19): siRNA sense strand
acggaugguuucuccaaua

SEQ ID NO: 2160458 - RNA, 19 nt, Homo sapiens
  misc_RNA (1)...(19): siRNA sense strand
uuacagcaaucaaagaagu

SEQ ID NO: 2160459 - RNA, 19 nt, Homo sapiens
  misc_RNA (1)...(19): siRNA sense strand
gcagucaucucagcugucu

SEQ ID NO: 2160460 - RNA, 19 nt, Homo sapiens
  misc_RNA (1)...(19): siRNA sense strand
ccaagaacguuccaguuuu

SEQ ID NO: 2160461 - RNA, 19 nt, Homo sapiens
  misc_RNA (1)...(19): siRNA sense strand
ugagaaaggccuaaugaca

SEQ ID NO: 2160462 - RNA, 19 nt, Homo sapiens
  misc_RNA (1)...(19): siRNA sense strand
ggacacagcuggagugaca

SEQ ID NO: 2160463 - RNA, 19 nt, Homo sapiens
  misc_RNA (1)...(19): siRNA sense strand
gaaagagaaggaugcauua

SEQ ID NO: 2160464 - RNA, 19 nt, Homo sapiens
  misc_RNA (1)...(19): siRNA sense strand
ccaguuggcucaaggauaa

SEQ ID NO: 2160465 - RNA, 19 nt, Homo sapiens
  misc_RNA (1)...(19): siRNA sense strand
uaaaggaggugaugguaaa

SEQ ID NO: 2160466 - RNA, 19 nt, Homo sapiens
  misc_RNA (1)...(19): siRNA sense strand
gaaacuggcuguuagcaau

SEQ ID NO: 2160467 - RNA, 19 nt, Homo sapiens
  misc_RNA (1)...(19): siRNA sense strand
gcuaagaaguuugaaauga

SEQ ID NO: 2160468 - RNA, 19 nt, Homo sapiens
  misc_RNA (1)...(19): siRNA sense strand
gcuaaugccucaccucuga

SEQ ID NO: 2160469 - RNA, 19 nt, Homo sapiens
  misc_RNA (1)...(19): siRNA sense strand
gcagacagaugaagaacga

SEQ ID NO: 2160470 - RNA, 19 nt, Homo sapiens
  misc_RNA (1)...(19): siRNA sense strand
ugagacagauccauuuauu

SEQ ID NO: 2160471 - RNA, 19 nt, Homo sapiens
  misc_RNA (1)...(19): siRNA sense strand
gaacaagggcccuccaguu

SEQ ID NO: 2160472 - RNA, 19 nt, Homo sapiens
  misc_RNA (1)...(19): siRNA sense strand
uagcaaguaucaugaguaa

SEQ ID NO: 2160473 - RNA, 19 nt, Homo sapiens
  misc_RNA (1)...(19): siRNA sense strand
gaacuaugugucuccauua

SEQ ID NO: 2160474 - RNA, 19 nt, Homo sapiens
  misc_RNA (1)...(19): siRNA sense strand
ggcaagagguggaaauguu

SEQ ID NO: 2160475 - RNA, 19 nt, Homo sapiens
  misc_RNA (1)...(19): siRNA sense strand
ggagauauuuggcuuugga

SEQ ID NO: 2160476 - RNA, 19 nt, Homo sapiens
  misc_RNA (1)...(19): siRNA sense strand
gcaccuaaacccaaaguaa

SEQ ID NO: 2160477 - RNA, 19 nt, Homo sapiens
  misc_RNA (1)...(19): siRNA sense strand
uagccuaacucagaauuua

SEQ ID NO: 2160478 - RNA, 19 nt, Homo sapiens
  misc_RNA (1)...(19): siRNA sense strand
gucgugaaguuaaguaaua

SEQ ID NO: 2160479 - RNA, 19 nt, Homo sapiens
  misc_RNA (1)...(19): siRNA sense strand
aagaacagcuugaguggaa

SEQ ID NO: 2160480 - RNA, 19 nt, Homo sapiens
  misc_RNA (1)...(19): siRNA sense strand
gagcaucauuauuggcuaa

SEQ ID NO: 2160481 - RNA, 19 nt, Homo sapiens
  misc_RNA (1)...(19): siRNA sense strand
ggaaggaucggcuacaaga

SEQ ID NO: 2160482 - RNA, 19 nt, Homo sapiens
  misc_RNA (1)...(19): siRNA sense strand
acacauucuucaagucuua

SEQ ID NO: 2160483 - RNA, 19 nt, Homo sapiens
  misc_RNA (1)...(19): siRNA sense strand
gaacuaggcccugucauuc

SEQ ID NO: 2160484 - RNA, 19 nt, Homo sapiens
  misc_RNA (1)...(19): siRNA sense strand
gaugagacagauccauuua

SEQ ID NO: 2160485 - RNA, 19 nt, Homo sapiens
  misc_RNA (1)...(19): siRNA sense strand
gaccaugcccuuccaguuu

SEQ ID NO: 2160486 - RNA, 19 nt, Homo sapiens
  misc_RNA (1)...(19): siRNA sense strand
gcuaugaguuagaaccaaa

SEQ ID NO: 2160487 - RNA, 19 nt, Homo sapiens
  misc_RNA (1)...(19): siRNA sense strand
gaacacagggugcuaccaa

SEQ ID NO: 2160488 - RNA, 19 nt, Homo sapiens
  misc_RNA (1)...(19): siRNA sense strand
ccaaguaguuccaguccaa

SEQ ID NO: 2160489 - RNA, 19 nt, Homo sapiens
  misc_RNA (1)...(19): siRNA sense strand
agacagauccauuuauuga

SEQ ID NO: 2160490 - RNA, 19 nt, Homo sapiens
  misc_RNA (1)...(19): siRNA sense strand
uagagaugcuagaugauuu

SEQ ID NO: 2160491 - RNA, 19 nt, Homo sapiens
  misc_RNA (1)...(19): siRNA sense strand
uaucaacacuggcacucua

SEQ ID NO: 2160492 - RNA, 19 nt, Homo sapiens
  misc_RNA (1)...(19): siRNA sense strand
aaacugaaacuggcuguua

SEQ ID NO: 2160493 - RNA, 19 nt, Homo sapiens
  misc_RNA (1)...(19): siRNA sense strand
uaaauucacacaagucuga

SEQ ID NO: 2160494 - RNA, 19 nt, Homo sapiens
  misc_RNA (1)...(19): siRNA sense strand
uaacagcccaguccauaaa

SEQ ID NO: 2160495 - RNA, 19 nt, Homo sapiens
  misc_RNA (1)...(19): siRNA sense strand
gaagcucauucacacagaa

SEQ ID NO: 2160496 - RNA, 19 nt, Homo sapiens
  misc_RNA (1)...(19): siRNA sense strand
gcaagcauuucacgaugga

SEQ ID NO: 2160497 - RNA, 19 nt, Homo sapiens
  misc_RNA (1)...(19): siRNA sense strand
caccauagccuaacucaga

SEQ ID NO: 2160498 - RNA, 19 nt, Homo sapiens
  misc_RNA (1)...(19): siRNA sense strand
gccuggagcuggugcuuaa

SEQ ID NO: 2160499 - RNA, 19 nt, Homo sapiens
  misc_RNA (1)...(19): siRNA sense strand
guagcaaccuuaacucaag

SEQ ID NO: 2160500 - RNA, 19 nt, Homo sapiens
  misc_RNA (1)...(19): siRNA sense strand
ggacauugaguuacagcua

SEQ ID NO: 2160501 - RNA, 19 nt, Homo sapiens
  misc_RNA (1)...(19): siRNA sense strand
gauccagaccuucccauuu

SEQ ID NO: 2160502 - RNA, 19 nt, Homo sapiens
  misc_RNA (1)...(19): siRNA sense strand
ccaggaugaucguuuaaga

SEQ ID NO: 2160503 - RNA, 19 nt, Homo sapiens
  misc_RNA (1)...(19): siRNA sense strand
ccucaaagcuaacaaacuc

SEQ ID NO: 2160504 - RNA, 19 nt, Homo sapiens
  misc_RNA (1)...(19): siRNA sense strand
caagccagauucacacuuc

SEQ ID NO: 2160505 - RNA, 19 nt, Homo sapiens
  misc_RNA (1)...(19): siRNA sense strand
ccaaauugcagacagauga

SEQ ID NO: 2160506 - RNA, 19 nt, Homo sapiens
  misc_RNA (1)...(19): siRNA sense strand
agagaaggaugcauuaaag

SEQ ID NO: 2160507 - RNA, 19 nt, Homo sapiens
  misc_RNA (1)...(19): siRNA sense strand
uaacacaaguaacaaaggu

SEQ ID NO: 2160508 - RNA, 19 nt, Homo sapiens
  misc_RNA (1)...(19): siRNA sense strand
gaacauccgaggcccaaga

SEQ ID NO: 2160509 - RNA, 19 nt, Homo sapiens
  misc_RNA (1)...(19): siRNA sense strand
gaucugaagaggaugauga

SEQ ID NO: 2160510 - RNA, 19 nt, Homo sapiens
  misc_RNA (1)...(19): siRNA sense strand
ugucaugccugaacagcua

SEQ ID NO: 2160511 - RNA, 19 nt, Homo sapiens
  misc_RNA (1)...(19): siRNA sense strand
ucacacagaagacccauuu

SEQ ID NO: 2160512 - RNA, 19 nt, Homo sapiens
  misc_RNA (1)...(19): siRNA sense strand
aaugaaauauggugggaaa

SEQ ID NO: 2160513 - RNA, 19 nt, Homo sapiens
  misc_RNA (1)...(19): siRNA sense strand
gcaggagcaucauuauugg

SEQ ID NO: 2160514 - RNA, 19 nt, Homo sapiens
  misc_RNA (1)...(19): siRNA sense strand
gcaccacuaccuccaguaa

SEQ ID NO: 2160515 - RNA, 19 nt, Homo sapiens
  misc_RNA (1)...(19): siRNA sense strand
ccaaauugcugccucuucu

SEQ ID NO: 2160516 - RNA, 19 nt, Homo sapiens
  misc_RNA (1)...(19): siRNA sense strand
gaaagccggaguguucaua

SEQ ID NO: 2160517 - RNA, 19 nt, Homo sapiens
  misc_RNA (1)...(19): siRNA sense strand
agaggcuuaugaugaauua

SEQ ID NO: 2160518 - RNA, 19 nt, Homo sapiens
  misc_RNA (1)...(19): siRNA sense strand
gcuaauaggacuagucugu

SEQ ID NO: 2160519 - RNA, 19 nt, Homo sapiens
  misc_RNA (1)...(19): siRNA sense strand
gaaugaacaucagcagaca

SEQ ID NO: 2160520 - RNA, 19 nt, Homo sapiens
  misc_RNA (1)...(19): siRNA sense strand
gguagccacuccagcacua

SEQ ID NO: 2160521 - RNA, 19 nt, Homo sapiens
  misc_RNA (1)...(19): siRNA sense strand
caaagaaaccccaggauuu

SEQ ID NO: 2160522 - RNA, 19 nt, Homo sapiens
  misc_RNA (1)...(19): siRNA sense strand
guaaaggaggugaugguaa

SEQ ID NO: 2160523 - RNA, 19 nt, Homo sapiens
  misc_RNA (1)...(19): siRNA sense strand
acacagaagacccauuuaa

SEQ ID NO: 2160524 - RNA, 19 nt, Homo sapiens
  misc_RNA (1)...(19): siRNA sense strand
uagcugccaugauuagaaa

SEQ ID NO: 2160525 - RNA, 19 nt, Homo sapiens
  misc_RNA (1)...(19): siRNA sense strand
ggaguuguggcucuaaauu

SEQ ID NO: 2160526 - RNA, 19 nt, Homo sapiens
  misc_RNA (1)...(19): siRNA sense strand
gccacuagcuacucccaaa

SEQ ID NO: 2160527 - RNA, 19 nt, Homo sapiens
  misc_RNA (1)...(19): siRNA sense strand
gcaagagguggaaauguug

SEQ ID NO: 2160528 - RNA, 19 nt, Homo sapiens
  misc_RNA (1)...(19): siRNA sense strand
ccagucugcugaagauuau

SEQ ID NO: 2160529 - RNA, 19 nt, Homo sapiens
  misc_RNA (1)...(19): siRNA sense strand
uauguaaccuuguugagau

SEQ ID NO: 2160530 - RNA, 19 nt, Homo sapiens
  misc_RNA (1)...(19): siRNA sense strand
gcaaugucaugccugaaca

SEQ ID NO: 2160531 - RNA, 19 nt, Homo sapiens
  misc_RNA (1)...(19): siRNA sense strand
uaaaacgucugaagaaguu

SEQ ID NO: 2160532 - RNA, 19 nt, Homo sapiens
  misc_RNA (1)...(19): siRNA sense strand
gcucuaaauucacacaagu

SEQ ID NO: 2160533 - RNA, 19 nt, Homo sapiens
  misc_RNA (1)...(19): siRNA sense strand
gaacagcuugaguggaauu

SEQ ID NO: 2160534 - RNA, 19 nt, Homo sapiens
  misc_RNA (1)...(19): siRNA sense strand
gcaaguaucaugaguaagc

SEQ ID NO: 2160535 - RNA, 19 nt, Homo sapiens
  misc_RNA (1)...(19): siRNA sense strand
cacuggaucuuguuucuga

SEQ ID NO: 2160536 - RNA, 19 nt, Homo sapiens
  misc_RNA (1)...(19): siRNA sense strand
aaauggaucugaagaggau

SEQ ID NO: 2160537 - RNA, 19 nt, Homo sapiens
  misc_RNA (1)...(19): siRNA sense strand
gaugaucguuuaagagaac

SEQ ID NO: 2160538 - RNA, 19 nt, Homo sapiens
  misc_RNA (1)...(19): siRNA sense strand
uguccaggaugaucguuua

SEQ ID NO: 2160539 - RNA, 19 nt, Homo sapiens
  misc_RNA (1)...(19): siRNA sense strand
cugaagaaguuacaucuca

SEQ ID NO: 2160540 - RNA, 19 nt, Homo sapiens
  misc_RNA (1)...(19): siRNA sense strand
cauuaaagaaggagucuaa

SEQ ID NO: 2160541 - RNA, 19 nt, Homo sapiens
  misc_RNA (1)...(19): siRNA sense strand
ccgcuucucuaacaacaaa

SEQ ID NO: 2160542 - RNA, 19 nt, Homo sapiens
  misc_RNA (1)...(19): siRNA sense strand
agaacuaugugucuccauu

SEQ ID NO: 2160543 - RNA, 19 nt, Homo sapiens
  misc_RNA (1)...(19): siRNA sense strand
gggaugcuaugaguuagaa

SEQ ID NO: 2160544 - RNA, 19 nt, Homo sapiens
  misc_RNA (1)...(19): siRNA sense strand
guggaaauguuggcuaaga

SEQ ID NO: 2160545 - RNA, 19 nt, Homo sapiens
  misc_RNA (1)...(19): siRNA sense strand
gccagucugcugaagauua

SEQ ID NO: 2160546 - RNA, 19 nt, Homo sapiens
  misc_RNA (1)...(19): siRNA sense strand
ccacugggaugacacuauc

SEQ ID NO: 2160547 - RNA, 19 nt, Homo sapiens
  misc_RNA (1)...(19): siRNA sense strand
ggaugaucguuuaagagaa

SEQ ID NO: 2160548 - RNA, 19 nt, Homo sapiens
  misc_RNA (1)...(19): siRNA sense strand
agaaagagaaggaugcauu

SEQ ID NO: 2160549 - RNA, 19 nt, Homo sapiens
  misc_RNA (1)...(19): siRNA sense strand
gaaggaugcauuaaagaag

SEQ ID NO: 2160550 - RNA, 19 nt, Homo sapiens
  misc_RNA (1)...(19): siRNA sense strand
ugaguggaauugcaaugaa

SEQ ID NO: 2160551 - RNA, 19 nt, Homo sapiens
  misc_RNA (1)...(19): siRNA sense strand
gaguagcguucauuagcuu

SEQ ID NO: 2160552 - RNA, 19 nt, Homo sapiens
  misc_RNA (1)...(19): siRNA sense strand
gaagaaguuacaucucaau

SEQ ID NO: 2160553 - RNA, 19 nt, Homo sapiens
  misc_RNA (1)...(19): siRNA sense strand
gagaaggaugcauuaaaga

SEQ ID NO: 2160554 - RNA, 19 nt, Homo sapiens
  misc_RNA (1)...(19): siRNA sense strand
uaaaggggacacuaaauua

SEQ ID NO: 2160555 - RNA, 19 nt, Homo sapiens
  misc_RNA (1)...(19): siRNA sense strand
gaguggaauugcaaugaau

SEQ ID NO: 2160556 - RNA, 19 nt, Homo sapiens
  misc_RNA (1)...(19): siRNA sense strand
auucagaacccuaaaguuu

SEQ ID NO: 2160557 - RNA, 19 nt, Homo sapiens
  misc_RNA (1)...(19): siRNA sense strand
gaucaaauugggaugcuau

SEQ ID NO: 2160558 - RNA, 19 nt, Homo sapiens
  misc_RNA (1)...(19): siRNA sense strand
agaggaugaugaugagaaa

SEQ ID NO: 2160559 - RNA, 19 nt, Homo sapiens
  misc_RNA (1)...(19): siRNA sense strand
acacuuacagcaagcauuu

SEQ ID NO: 2160560 - RNA, 19 nt, Homo sapiens
  misc_RNA (1)...(19): siRNA sense strand
gaugcuggguggccuuguu

SEQ ID NO: 2160561 - RNA, 19 nt, Homo sapiens
  misc_RNA (1)...(19): siRNA sense strand
ccaaggcuauggugucaca

SEQ ID NO: 2160562 - RNA, 19 nt, Homo sapiens
  misc_RNA (1)...(19): siRNA sense strand
ggacacagcuggagugaca

SEQ ID NO: 2160563 - RNA, 19 nt, Homo sapiens
  misc_RNA (1)...(19): siRNA sense strand
gaaagagaaggaugcauua

SEQ ID NO: 2160564 - RNA, 19 nt, Homo sapiens
  misc_RNA (1)...(19): siRNA sense strand
ccaguuggcucaaggauaa

SEQ ID NO: 2160565 - RNA, 19 nt, Homo sapiens
  misc_RNA (1)...(19): siRNA sense strand
uaaaggaggugaugguaaa

SEQ ID NO: 2160566 - RNA, 19 nt, Homo sapiens
  misc_RNA (1)...(19): siRNA sense strand
gaaacuggcuguuagcaau

SEQ ID NO: 2160567 - RNA, 19 nt, Homo sapiens
  misc_RNA (1)...(19): siRNA sense strand
gcuaagaaguuugaaauga

SEQ ID NO: 2160568 - RNA, 19 nt, Homo sapiens
  misc_RNA (1)...(19): siRNA sense strand
gcuaaugccucaccucuga

SEQ ID NO: 2160569 - RNA, 19 nt, Homo sapiens
  misc_RNA (1)...(19): siRNA sense strand
gcagacagaugaagaacga

SEQ ID NO: 2160570 - RNA, 19 nt, Homo sapiens
  misc_RNA (1)...(19): siRNA sense strand
ugagacagauccauuuauu

SEQ ID NO: 2160571 - RNA, 19 nt, Homo sapiens
  misc_RNA (1)...(19): siRNA sense strand
gaacaagggcccuccaguu

SEQ ID NO: 2160572 - RNA, 19 nt, Homo sapiens
  misc_RNA (1)...(19): siRNA sense strand
uagcaaguaucaugaguaa

SEQ ID NO: 2160573 - RNA, 19 nt, Homo sapiens
  misc_RNA (1)...(19): siRNA sense strand
gaacuaugugucuccauua

SEQ ID NO: 2160574 - RNA, 19 nt, Homo sapiens
  misc_RNA (1)...(19): siRNA sense strand
ggcaagagguggaaauguu

SEQ ID NO: 2160575 - RNA, 19 nt, Homo sapiens
  misc_RNA (1)...(19): siRNA sense strand
ggagauauuuggcuuugga

SEQ ID NO: 2160576 - RNA, 19 nt, Homo sapiens
  misc_RNA (1)...(19): siRNA sense strand
gcaccuaaacccaaaguaa

SEQ ID NO: 2160577 - RNA, 19 nt, Homo sapiens
  misc_RNA (1)...(19): siRNA sense strand
uagccuaacucagaauuua

SEQ ID NO: 2160578 - RNA, 19 nt, Homo sapiens
  misc_RNA (1)...(19): siRNA sense strand
gucgugaaguuaaguaaua

SEQ ID NO: 2160579 - RNA, 19 nt, Homo sapiens
  misc_RNA (1)...(19): siRNA sense strand
aagaacagcuugaguggaa

SEQ ID NO: 2160580 - RNA, 19 nt, Homo sapiens
  misc_RNA (1)...(19): siRNA sense strand
gagcaucauuauuggcuaa

SEQ ID NO: 2160581 - RNA, 19 nt, Homo sapiens
  misc_RNA (1)...(19): siRNA sense strand
ggaaggaucggcuacaaga

SEQ ID NO: 2160582 - RNA, 19 nt, Homo sapiens
  misc_RNA (1)...(19): siRNA sense strand
acacauucuucaagucuua

SEQ ID NO: 2160583 - RNA, 19 nt, Homo sapiens
  misc_RNA (1)...(19): siRNA sense strand
gaacuaggcccugucauuc

SEQ ID NO: 2160584 - RNA, 19 nt, Homo sapiens
  misc_RNA (1)...(19): siRNA sense strand
gaugagacagauccauuua

SEQ ID NO: 2160585 - RNA, 19 nt, Homo sapiens
  misc_RNA (1)...(19): siRNA sense strand
gaccaugcccuuccaguuu

SEQ ID NO: 2160586 - RNA, 19 nt, Homo sapiens
  misc_RNA (1)...(19): siRNA sense strand
gcuaugaguuagaaccaaa

SEQ ID NO: 2160587 - RNA, 19 nt, Homo sapiens
  misc_RNA (1)...(19): siRNA sense strand
gaacacagggugcuaccaa

SEQ ID NO: 2160588 - RNA, 19 nt, Homo sapiens
  misc_RNA (1)...(19): siRNA sense strand
ccaaguaguuccaguccaa

SEQ ID NO: 2160589 - RNA, 19 nt, Homo sapiens
  misc_RNA (1)...(19): siRNA sense strand
agacagauccauuuauuga

SEQ ID NO: 2160590 - RNA, 19 nt, Homo sapiens
  misc_RNA (1)...(19): siRNA sense strand
uagagaugcuagaugauuu

SEQ ID NO: 2160591 - RNA, 19 nt, Homo sapiens
  misc_RNA (1)...(19): siRNA sense strand
uaucaacacuggcacucua

SEQ ID NO: 2160592 - RNA, 19 nt, Homo sapiens
  misc_RNA (1)...(19): siRNA sense strand
aaacugaaacuggcuguua

SEQ ID NO: 2160593 - RNA, 19 nt, Homo sapiens
  misc_RNA (1)...(19): siRNA sense strand
uaaauucacacaagucuga

SEQ ID NO: 2160594 - RNA, 19 nt, Homo sapiens
  misc_RNA (1)...(19): siRNA sense strand
uaacagcccaguccauaaa

SEQ ID NO: 2160595 - RNA, 19 nt, Homo sapiens
  misc_RNA (1)...(19): siRNA sense strand
gaagcucauucacacagaa

SEQ ID NO: 2160596 - RNA, 19 nt, Homo sapiens
  misc_RNA (1)...(19): siRNA sense strand
gcaagcauuucacgaugga

SEQ ID NO: 2160597 - RNA, 19 nt, Homo sapiens
  misc_RNA (1)...(19): siRNA sense strand
caccauagccuaacucaga

SEQ ID NO: 2160598 - RNA, 19 nt, Homo sapiens
  misc_RNA (1)...(19): siRNA sense strand
gccuggagcuggugcuuaa

SEQ ID NO: 2160599 - RNA, 19 nt, Homo sapiens
  misc_RNA (1)...(19): siRNA sense strand
guagcaaccuuaacucaag

SEQ ID NO: 2160600 - RNA, 19 nt, Homo sapiens
  misc_RNA (1)...(19): siRNA sense strand
ggacauugaguuacagcua

SEQ ID NO: 2160601 - RNA, 19 nt, Homo sapiens
  misc_RNA (1)...(19): siRNA sense strand
gauccagaccuucccauuu

SEQ ID NO: 2160602 - RNA, 19 nt, Homo sapiens
  misc_RNA (1)...(19): siRNA sense strand
ccaggaugaucguuuaaga

SEQ ID NO: 2160603 - RNA, 19 nt, Homo sapiens
  misc_RNA (1)...(19): siRNA sense strand
ccucaaagcuaacaaacuc

SEQ ID NO: 2160604 - RNA, 19 nt, Homo sapiens
  misc_RNA (1)...(19): siRNA sense strand
caagccagauucacacuuc

SEQ ID NO: 2160605 - RNA, 19 nt, Homo sapiens
  misc_RNA (1)...(19): siRNA sense strand
ccaaauugcagacagauga

SEQ ID NO: 2160606 - RNA, 19 nt, Homo sapiens
  misc_RNA (1)...(19): siRNA sense strand
agagaaggaugcauuaaag

SEQ ID NO: 2160607 - RNA, 19 nt, Homo sapiens
  misc_RNA (1)...(19): siRNA sense strand
uaacacaaguaacaaaggu

SEQ ID NO: 2160608 - RNA, 19 nt, Homo sapiens
  misc_RNA (1)...(19): siRNA sense strand
gaacauccgaggcccaaga

SEQ ID NO: 2160609 - RNA, 19 nt, Homo sapiens
  misc_RNA (1)...(19): siRNA sense strand
gaucugaagaggaugauga

SEQ ID NO: 2160610 - RNA, 19 nt, Homo sapiens
  misc_RNA (1)...(19): siRNA sense strand
ugucaugccugaacagcua

SEQ ID NO: 2160611 - RNA, 19 nt, Homo sapiens
  misc_RNA (1)...(19): siRNA sense strand
ucacacagaagacccauuu

SEQ ID NO: 2160612 - RNA, 19 nt, Homo sapiens
  misc_RNA (1)...(19): siRNA sense strand
aaugaaauauggugggaaa

SEQ ID NO: 2160613 - RNA, 19 nt, Homo sapiens
  misc_RNA (1)...(19): siRNA sense strand
gcaggagcaucauuauugg

SEQ ID NO: 2160614 - RNA, 19 nt, Homo sapiens
  misc_RNA (1)...(19): siRNA sense strand
gcaccacuaccuccaguaa

SEQ ID NO: 2160615 - RNA, 19 nt, Homo sapiens
  misc_RNA (1)...(19): siRNA sense strand
ccaaauugcugccucuucu

SEQ ID NO: 2160616 - RNA, 19 nt, Homo sapiens
  misc_RNA (1)...(19): siRNA sense strand
gaaagccggaguguucaua

SEQ ID NO: 2160617 - RNA, 19 nt, Homo sapiens
  misc_RNA (1)...(19): siRNA sense strand
agaggcuuaugaugaauua

SEQ ID NO: 2160618 - RNA, 19 nt, Homo sapiens
  misc_RNA (1)...(19): siRNA sense strand
gcuaauaggacuagucugu

SEQ ID NO: 2160619 - RNA, 19 nt, Homo sapiens
  misc_RNA (1)...(19): siRNA sense strand
gaaugaacaucagcagaca

SEQ ID NO: 2160620 - RNA, 19 nt, Homo sapiens
  misc_RNA (1)...(19): siRNA sense strand
gguagccacuccagcacua

SEQ ID NO: 2160621 - RNA, 19 nt, Homo sapiens
  misc_RNA (1)...(19): siRNA sense strand
caaagaaaccccaggauuu

SEQ ID NO: 2160622 - RNA, 19 nt, Homo sapiens
  misc_RNA (1)...(19): siRNA sense strand
guaaaggaggugaugguaa

SEQ ID NO: 2160623 - RNA, 19 nt, Homo sapiens
  misc_RNA (1)...(19): siRNA sense strand
acacagaagacccauuuaa

SEQ ID NO: 2160624 - RNA, 19 nt, Homo sapiens
  misc_RNA (1)...(19): siRNA sense strand
uagcugccaugauuagaaa

SEQ ID NO: 2160625 - RNA, 19 nt, Homo sapiens
  misc_RNA (1)...(19): siRNA sense strand
ggaguuguggcucuaaauu

SEQ ID NO: 2160626 - RNA, 19 nt, Homo sapiens
  misc_RNA (1)...(19): siRNA sense strand
gccacuagcuacucccaaa

SEQ ID NO: 2160627 - RNA, 19 nt, Homo sapiens
  misc_RNA (1)...(19): siRNA sense strand
gcaagagguggaaauguug

SEQ ID NO: 2160628 - RNA, 19 nt, Homo sapiens
  misc_RNA (1)...(19): siRNA sense strand
ccagucugcugaagauuau

SEQ ID NO: 2160629 - RNA, 19 nt, Homo sapiens
  misc_RNA (1)...(19): siRNA sense strand
uauguaaccuuguugagau

SEQ ID NO: 2160630 - RNA, 19 nt, Homo sapiens
  misc_RNA (1)...(19): siRNA sense strand
gcaaugucaugccugaaca

SEQ ID NO: 2160631 - RNA, 19 nt, Homo sapiens
  misc_RNA (1)...(19): siRNA sense strand
uaaaacgucugaagaaguu

SEQ ID NO: 2160632 - RNA, 19 nt, Homo sapiens
  misc_RNA (1)...(19): siRNA sense strand
gcucuaaauucacacaagu

SEQ ID NO: 2160633 - RNA, 19 nt, Homo sapiens
  misc_RNA (1)...(19): siRNA sense strand
gaacagcuugaguggaauu

SEQ ID NO: 2160634 - RNA, 19 nt, Homo sapiens
  misc_RNA (1)...(19): siRNA sense strand
gcaaguaucaugaguaagc

SEQ ID NO: 2160635 - RNA, 19 nt, Homo sapiens
  misc_RNA (1)...(19): siRNA sense strand
cacuggaucuuguuucuga

SEQ ID NO: 2160636 - RNA, 19 nt, Homo sapiens
  misc_RNA (1)...(19): siRNA sense strand
aaauggaucugaagaggau

SEQ ID NO: 2160637 - RNA, 19 nt, Homo sapiens
  misc_RNA (1)...(19): siRNA sense strand
gaugaucguuuaagagaac

SEQ ID NO: 2160638 - RNA, 19 nt, Homo sapiens
  misc_RNA (1)...(19): siRNA sense strand
uguccaggaugaucguuua

SEQ ID NO: 2160639 - RNA, 19 nt, Homo sapiens
  misc_RNA (1)...(19): siRNA sense strand
cugaagaaguuacaucuca

SEQ ID NO: 2160640 - RNA, 19 nt, Homo sapiens
  misc_RNA (1)...(19): siRNA sense strand
cauuaaagaaggagucuaa

SEQ ID NO: 2160641 - RNA, 19 nt, Homo sapiens
  misc_RNA (1)...(19): siRNA sense strand
ccgcuucucuaacaacaaa

SEQ ID NO: 2160642 - RNA, 19 nt, Homo sapiens
  misc_RNA (1)...(19): siRNA sense strand
agaacuaugugucuccauu

SEQ ID NO: 2160643 - RNA, 19 nt, Homo sapiens
  misc_RNA (1)...(19): siRNA sense strand
gggaugcuaugaguuagaa

SEQ ID NO: 2160644 - RNA, 19 nt, Homo sapiens
  misc_RNA (1)...(19): siRNA sense strand
guggaaauguuggcuaaga

SEQ ID NO: 2160645 - RNA, 19 nt, Homo sapiens
  misc_RNA (1)...(19): siRNA sense strand
gccagucugcugaagauua

SEQ ID NO: 2160646 - RNA, 19 nt, Homo sapiens
  misc_RNA (1)...(19): siRNA sense strand
ccacugggaugacacuauc

SEQ ID NO: 2160647 - RNA, 19 nt, Homo sapiens
  misc_RNA (1)...(19): siRNA sense strand
ggaugaucguuuaagagaa

SEQ ID NO: 2160648 - RNA, 19 nt, Homo sapiens
  misc_RNA (1)...(19): siRNA sense strand
agaaagagaaggaugcauu

SEQ ID NO: 2160649 - RNA, 19 nt, Homo sapiens
  misc_RNA (1)...(19): siRNA sense strand
gaaggaugcauuaaagaag

SEQ ID NO: 2160650 - RNA, 19 nt, Homo sapiens
  misc_RNA (1)...(19): siRNA sense strand
ugaguggaauugcaaugaa

SEQ ID NO: 2160651 - RNA, 19 nt, Homo sapiens
  misc_RNA (1)...(19): siRNA sense strand
gaguagcguucauuagcuu

SEQ ID NO: 2160652 - RNA, 19 nt, Homo sapiens
  misc_RNA (1)...(19): siRNA sense strand
gaagaaguuacaucucaau

SEQ ID NO: 2160653 - RNA, 19 nt, Homo sapiens
  misc_RNA (1)...(19): siRNA sense strand
gagaaggaugcauuaaaga

SEQ ID NO: 2160654 - RNA, 19 nt, Homo sapiens
  misc_RNA (1)...(19): siRNA sense strand
uaaaggggacacuaaauua

SEQ ID NO: 2160655 - RNA, 19 nt, Homo sapiens
  misc_RNA (1)...(19): siRNA sense strand
gaguggaauugcaaugaau

SEQ ID NO: 2160656 - RNA, 19 nt, Homo sapiens
  misc_RNA (1)...(19): siRNA sense strand
auucagaacccuaaaguuu

SEQ ID NO: 2160657 - RNA, 19 nt, Homo sapiens
  misc_RNA (1)...(19): siRNA sense strand
gaucaaauugggaugcuau

SEQ ID NO: 2160658 - RNA, 19 nt, Homo sapiens
  misc_RNA (1)...(19): siRNA sense strand
agaggaugaugaugagaaa

SEQ ID NO: 2160659 - RNA, 19 nt, Homo sapiens
  misc_RNA (1)...(19): siRNA sense strand
acacuuacagcaagcauuu

SEQ ID NO: 2160660 - RNA, 19 nt, Homo sapiens
  misc_RNA (1)...(19): siRNA sense strand
gaugcuggguggccuuguu

SEQ ID NO: 2160661 - RNA, 19 nt, Homo sapiens
  misc_RNA (1)...(19): siRNA sense strand
ccaaggcuauggugucaca

SEQ ID NO: 2160662 - RNA, 19 nt, Homo sapiens
  misc_RNA (1)...(19): siRNA sense strand
ggaacgagcuggcuuguga

SEQ ID NO: 2160663 - RNA, 19 nt, Homo sapiens
  misc_RNA (1)...(19): siRNA sense strand
gcacaagucccucaacaua

SEQ ID NO: 2160664 - RNA, 19 nt, Homo sapiens
  misc_RNA (1)...(19): siRNA sense strand
gaaguuuacugcauuguga

SEQ ID NO: 2160665 - RNA, 19 nt, Homo sapiens
  misc_RNA (1)...(19): siRNA sense strand
caacauaaaggacaagaua

SEQ ID NO: 2160666 - RNA, 19 nt, Homo sapiens
  misc_RNA (1)...(19): siRNA sense strand
gaacagagagcacagagaa

SEQ ID NO: 2160667 - RNA, 19 nt, Homo sapiens
  misc_RNA (1)...(19): siRNA sense strand
gaacugaggugaucgaacu

SEQ ID NO: 2160668 - RNA, 19 nt, Homo sapiens
  misc_RNA (1)...(19): siRNA sense strand
gcacagcggugucaauaag

SEQ ID NO: 2160669 - RNA, 19 nt, Homo sapiens
  misc_RNA (1)...(19): siRNA sense strand
agaagugugucuugaauuu

SEQ ID NO: 2160670 - RNA, 19 nt, Homo sapiens
  misc_RNA (1)...(19): siRNA sense strand
gaauggauauguucagcuu

SEQ ID NO: 2160671 - RNA, 19 nt, Homo sapiens
  misc_RNA (1)...(19): siRNA sense strand
gcaaagcugucuccuccaa

SEQ ID NO: 2160672 - RNA, 19 nt, Homo sapiens
  misc_RNA (1)...(19): siRNA sense strand
ccuaugaguuugaagauuu

SEQ ID NO: 2160673 - RNA, 19 nt, Homo sapiens
  misc_RNA (1)...(19): siRNA sense strand
gcacagagaaggagaggaa

SEQ ID NO: 2160674 - RNA, 19 nt, Homo sapiens
  misc_RNA (1)...(19): siRNA sense strand
gagagaagcugaggaccaa

SEQ ID NO: 2160675 - RNA, 19 nt, Homo sapiens
  misc_RNA (1)...(19): siRNA sense strand
cagcagcccugaugacauu

SEQ ID NO: 2160676 - RNA, 19 nt, Homo sapiens
  misc_RNA (1)...(19): siRNA sense strand
ccacaaagcccuucaucaa

SEQ ID NO: 2160677 - RNA, 19 nt, Homo sapiens
  misc_RNA (1)...(19): siRNA sense strand
acaagucccucaacauaaa

SEQ ID NO: 2160678 - RNA, 19 nt, Homo sapiens
  misc_RNA (1)...(19): siRNA sense strand
ucagacagauggacgauga

SEQ ID NO: 2160679 - RNA, 19 nt, Homo sapiens
  misc_RNA (1)...(19): siRNA sense strand
cagaaaguccuaugaguuu

SEQ ID NO: 2160680 - RNA, 19 nt, Homo sapiens
  misc_RNA (1)...(19): siRNA sense strand
gcagcaggguggacuggua

SEQ ID NO: 2160681 - RNA, 19 nt, Homo sapiens
  misc_RNA (1)...(19): siRNA sense strand
gaaagaaacgggugaagag

SEQ ID NO: 2160682 - RNA, 19 nt, Homo sapiens
  misc_RNA (1)...(19): siRNA sense strand
ugaacgagguggugucuga

SEQ ID NO: 2160683 - RNA, 19 nt, Homo sapiens
  misc_RNA (1)...(19): siRNA sense strand
gaaucaacgccauuuauga

SEQ ID NO: 2160684 - RNA, 19 nt, Homo sapiens
  misc_RNA (1)...(19): siRNA sense strand
gagcacagcggugucaaua

SEQ ID NO: 2160685 - RNA, 19 nt, Homo sapiens
  misc_RNA (1)...(19): siRNA sense strand
guucaaacaugccggagaa

SEQ ID NO: 2160686 - RNA, 19 nt, Homo sapiens
  misc_RNA (1)...(19): siRNA sense strand
gguggugucugaagccuuu

SEQ ID NO: 2160687 - RNA, 19 nt, Homo sapiens
  misc_RNA (1)...(19): siRNA sense strand
ugaagggacuaggcaauaa

SEQ ID NO: 2160688 - RNA, 19 nt, Homo sapiens
  misc_RNA (1)...(19): siRNA sense strand
ggaaagaaacgggugaaga

SEQ ID NO: 2160689 - RNA, 19 nt, Homo sapiens
  misc_RNA (1)...(19): siRNA sense strand
gaucuuggaugagguggaa

SEQ ID NO: 2160690 - RNA, 19 nt, Homo sapiens
  misc_RNA (1)...(19): siRNA sense strand
gaaaguccuaugaguuuga

SEQ ID NO: 2160691 - RNA, 19 nt, Homo sapiens
  misc_RNA (1)...(19): siRNA sense strand
ucacagaggcuaagaaugg

SEQ ID NO: 2160692 - RNA, 19 nt, Homo sapiens
  misc_RNA (1)...(19): siRNA sense strand
ccacagaacggcaggaaga

SEQ ID NO: 2160693 - RNA, 19 nt, Homo sapiens
  misc_RNA (1)...(19): siRNA sense strand
gaagggacuaggcaauaaa

SEQ ID NO: 2160694 - RNA, 19 nt, Homo sapiens
  misc_RNA (1)...(19): siRNA sense strand
gggaguggcucagaaguca

SEQ ID NO: 2160695 - RNA, 19 nt, Homo sapiens
  misc_RNA (1)...(19): siRNA sense strand
cauggagacucagauguuu

SEQ ID NO: 2160696 - RNA, 19 nt, Homo sapiens
  misc_RNA (1)...(19): siRNA sense strand
gguccgagcccaagaguau

SEQ ID NO: 2160697 - RNA, 19 nt, Homo sapiens
  misc_RNA (1)...(19): siRNA sense strand
ugacagaugagaacaguga

SEQ ID NO: 2160698 - RNA, 19 nt, Homo sapiens
  misc_RNA (1)...(19): siRNA sense strand
gauauguucagcuuggaua

SEQ ID NO: 2160699 - RNA, 19 nt, Homo sapiens
  misc_RNA (1)...(19): siRNA sense strand
ggaagagguccuugugguu

SEQ ID NO: 2160700 - RNA, 19 nt, Homo sapiens
  misc_RNA (1)...(19): siRNA sense strand
gguccacccuuccugagaa

SEQ ID NO: 2160701 - RNA, 19 nt, Homo sapiens
  misc_RNA (1)...(19): siRNA sense strand
gagaggaggaguagugaug

SEQ ID NO: 2160702 - RNA, 19 nt, Homo sapiens
  misc_RNA (1)...(19): siRNA sense strand
uaaaggacaagauaucaga

SEQ ID NO: 2160703 - RNA, 19 nt, Homo sapiens
  misc_RNA (1)...(19): siRNA sense strand
ugaagcaggucaagaaacu

SEQ ID NO: 2160704 - RNA, 19 nt, Homo sapiens
  misc_RNA (1)...(19): siRNA sense strand
cggagaacguucaaacaug

SEQ ID NO: 2160705 - RNA, 19 nt, Homo sapiens
  misc_RNA (1)...(19): siRNA sense strand
gcgaaucaacgccauuuau

SEQ ID NO: 2160706 - RNA, 19 nt, Homo sapiens
  misc_RNA (1)...(19): siRNA sense strand
gcagaagguucgguuacug

SEQ ID NO: 2160707 - RNA, 19 nt, Homo sapiens
  misc_RNA (1)...(19): siRNA sense strand
gaagaugggagcagaaggu

SEQ ID NO: 2160708 - RNA, 19 nt, Homo sapiens
  misc_RNA (1)...(19): siRNA sense strand
gaacagugagucugacagu

SEQ ID NO: 2160709 - RNA, 19 nt, Homo sapiens
  misc_RNA (1)...(19): siRNA sense strand
cagagaaggagaggaauaa

SEQ ID NO: 2160710 - RNA, 19 nt, Homo sapiens
  misc_RNA (1)...(19): siRNA sense strand
gaauaaaggagcagugaac

SEQ ID NO: 2160711 - RNA, 19 nt, Homo sapiens
  misc_RNA (1)...(19): siRNA sense strand
ucagaacccuugcccaucu

SEQ ID NO: 2160712 - RNA, 19 nt, Homo sapiens
  misc_RNA (1)...(19): siRNA sense strand
aaagcugucuccuccaaga

SEQ ID NO: 2160713 - RNA, 19 nt, Homo sapiens
  misc_RNA (1)...(19): siRNA sense strand
gaggagaacgucuaugaag

SEQ ID NO: 2160714 - RNA, 19 nt, Homo sapiens
  misc_RNA (1)...(19): siRNA sense strand
gaucaggagucaggcuuca

SEQ ID NO: 2160715 - RNA, 19 nt, Homo sapiens
  misc_RNA (1)...(19): siRNA sense strand
ggacaucgaguuacauggu

SEQ ID NO: 2160716 - RNA, 19 nt, Homo sapiens
  misc_RNA (1)...(19): siRNA sense strand
ggaggagaacgucuaugaa

SEQ ID NO: 2160717 - RNA, 19 nt, Homo sapiens
  misc_RNA (1)...(19): siRNA sense strand
gggcugacacgcacuuuau

SEQ ID NO: 2160718 - RNA, 19 nt, Homo sapiens
  misc_RNA (1)...(19): siRNA sense strand
ggacuaggcaauaaaauga

SEQ ID NO: 2160719 - RNA, 19 nt, Homo sapiens
  misc_RNA (1)...(19): siRNA sense strand
ccaagaguaucuggaaaca

SEQ ID NO: 2160720 - RNA, 19 nt, Homo sapiens
  misc_RNA (1)...(19): siRNA sense strand
ggacaagauaucagaaugg

SEQ ID NO: 2160721 - RNA, 19 nt, Homo sapiens
  misc_RNA (1)...(19): siRNA sense strand
gcccaagaguaucuggaaa

SEQ ID NO: 2160722 - RNA, 19 nt, Homo sapiens
  misc_RNA (1)...(19): siRNA sense strand
gagaggagggucaucuuca

SEQ ID NO: 2160723 - RNA, 19 nt, Homo sapiens
  misc_RNA (1)...(19): siRNA sense strand
caacaguucccucugaagu

SEQ ID NO: 2160724 - RNA, 19 nt, Homo sapiens
  misc_RNA (1)...(19): siRNA sense strand
cgaaucaacgccauuuaug

SEQ ID NO: 2160725 - RNA, 19 nt, Homo sapiens
  misc_RNA (1)...(19): siRNA sense strand
cacaagucccucaacauaa

SEQ ID NO: 2160726 - RNA, 19 nt, Homo sapiens
  misc_RNA (1)...(19): siRNA sense strand
aagaguaucuggaaacacu

SEQ ID NO: 2160727 - RNA, 19 nt, Homo sapiens
  misc_RNA (1)...(19): siRNA sense strand
ggagcagaagguucgguua

SEQ ID NO: 2160728 - RNA, 19 nt, Homo sapiens
  misc_RNA (1)...(19): siRNA sense strand
ucaagcugcuggacacuag

SEQ ID NO: 2160729 - RNA, 19 nt, Homo sapiens
  misc_RNA (1)...(19): siRNA sense strand
ggaauaaaggagcagugaa

SEQ ID NO: 2160730 - RNA, 19 nt, Homo sapiens
  misc_RNA (1)...(19): siRNA sense strand
agucaagaauggauauguu

SEQ ID NO: 2160731 - RNA, 19 nt, Homo sapiens
  misc_RNA (1)...(19): siRNA sense strand
cagacggacaggaggauua

SEQ ID NO: 2160732 - RNA, 19 nt, Homo sapiens
  misc_RNA (1)...(19): siRNA sense strand
caacagccgguuccucaga

SEQ ID NO: 2160733 - RNA, 19 nt, Homo sapiens
  misc_RNA (1)...(19): siRNA sense strand
cggaggagaacgucuauga

SEQ ID NO: 2160734 - RNA, 19 nt, Homo sapiens
  misc_RNA (1)...(19): siRNA sense strand
acagaaaguccuaugaguu

SEQ ID NO: 2160735 - RNA, 19 nt, Homo sapiens
  misc_RNA (1)...(19): siRNA sense strand
gagaaggagaggaauaaag

SEQ ID NO: 2160736 - RNA, 19 nt, Homo sapiens
  misc_RNA (1)...(19): siRNA sense strand
ggucacagaggcuaagaau

SEQ ID NO: 2160737 - RNA, 19 nt, Homo sapiens
  misc_RNA (1)...(19): siRNA sense strand
gcaaaaccauccuugucaa

SEQ ID NO: 2160738 - RNA, 19 nt, Homo sapiens
  misc_RNA (1)...(19): siRNA sense strand
acaguucccucugaaguug

SEQ ID NO: 2160739 - RNA, 19 nt, Homo sapiens
  misc_RNA (1)...(19): siRNA sense strand
ugccagaacucacccaaca

SEQ ID NO: 2160740 - RNA, 19 nt, Homo sapiens
  misc_RNA (1)...(19): siRNA sense strand
gcaggaagaagagaaagau

SEQ ID NO: 2160741 - RNA, 19 nt, Homo sapiens
  misc_RNA (1)...(19): siRNA sense strand
aggagaacgucuaugaaga

SEQ ID NO: 2160742 - RNA, 19 nt, Homo sapiens
  misc_RNA (1)...(19): siRNA sense strand
cacagaaaguccuaugagu

SEQ ID NO: 2160743 - RNA, 19 nt, Homo sapiens
  misc_RNA (1)...(19): siRNA sense strand
gaacgggaaguggauccua

SEQ ID NO: 2160744 - RNA, 19 nt, Homo sapiens
  misc_RNA (1)...(19): siRNA sense strand
gaaggagaggaauaaagga

SEQ ID NO: 2160745 - RNA, 19 nt, Homo sapiens
  misc_RNA (1)...(19): siRNA sense strand
gaggagggucaucuucauu

SEQ ID NO: 2160746 - RNA, 19 nt, Homo sapiens
  misc_RNA (1)...(19): siRNA sense strand
ggagaggagggucaucuuc

SEQ ID NO: 2160747 - RNA, 19 nt, Homo sapiens
  misc_RNA (1)...(19): siRNA sense strand
aagcugguguugcgaauca

SEQ ID NO: 2160748 - RNA, 19 nt, Homo sapiens
  misc_RNA (1)...(19): siRNA sense strand
acacugcccuccugacaag

SEQ ID NO: 2160749 - RNA, 19 nt, Homo sapiens
  misc_RNA (1)...(19): siRNA sense strand
aggaaagguucaugcagaa

SEQ ID NO: 2160750 - RNA, 19 nt, Homo sapiens
  misc_RNA (1)...(19): siRNA sense strand
ccaagagccuccgccacuu

SEQ ID NO: 2160751 - RNA, 19 nt, Homo sapiens
  misc_RNA (1)...(19): siRNA sense strand
ccaccuggucuguguguuu

SEQ ID NO: 2160752 - RNA, 19 nt, Homo sapiens
  misc_RNA (1)...(19): siRNA sense strand
caggaaaagugacagauga

SEQ ID NO: 2160753 - RNA, 19 nt, Homo sapiens
  misc_RNA (1)...(19): siRNA sense strand
ggcaucggcuucaggaaag

SEQ ID NO: 2160754 - RNA, 19 nt, Homo sapiens
  misc_RNA (1)...(19): siRNA sense strand
gaaugaggccaggaacaga

SEQ ID NO: 2160755 - RNA, 19 nt, Homo sapiens
  misc_RNA (1)...(19): siRNA sense strand
acacagaggagaagcugaa

SEQ ID NO: 2160756 - RNA, 19 nt, Homo sapiens
  misc_RNA (1)...(19): siRNA sense strand
gaagaggcugucccaguca

SEQ ID NO: 2160757 - RNA, 19 nt, Homo sapiens
  misc_RNA (1)...(19): siRNA sense strand
agagaaagauacccaagcu

SEQ ID NO: 2160758 - RNA, 19 nt, Homo sapiens
  misc_RNA (1)...(19): siRNA sense strand
acagagaaggagaggaaua

SEQ ID NO: 2160759 - RNA, 19 nt, Homo sapiens
  misc_RNA (1)...(19): siRNA sense strand
gaggacaucgaguuacaug

SEQ ID NO: 2160760 - RNA, 19 nt, Homo sapiens
  misc_RNA (1)...(19): siRNA sense strand
ucgagcacguggacuuuga

SEQ ID NO: 2160761 - RNA, 19 nt, Homo sapiens
  misc_RNA (1)...(19): siRNA sense strand
gaagcugagucgggaugga

SEQ ID NO: 2160762 - RNA, 19 nt, Homo sapiens
  misc_RNA (1)...(19): siRNA sense strand
ggaacgagcuggcuuguga

SEQ ID NO: 2160763 - RNA, 19 nt, Homo sapiens
  misc_RNA (1)...(19): siRNA sense strand
gcacaagucccucaacaua

SEQ ID NO: 2160764 - RNA, 19 nt, Homo sapiens
  misc_RNA (1)...(19): siRNA sense strand
gaaguuuacugcauuguga

SEQ ID NO: 2160765 - RNA, 19 nt, Homo sapiens
  misc_RNA (1)...(19): siRNA sense strand
caacauaaaggacaagaua

SEQ ID NO: 2160766 - RNA, 19 nt, Homo sapiens
  misc_RNA (1)...(19): siRNA sense strand
gaacagagagcacagagaa

SEQ ID NO: 2160767 - RNA, 19 nt, Homo sapiens
  misc_RNA (1)...(19): siRNA sense strand
gaacugaggugaucgaacu

SEQ ID NO: 2160768 - RNA, 19 nt, Homo sapiens
  misc_RNA (1)...(19): siRNA sense strand
gcacagcggugucaauaag

SEQ ID NO: 2160769 - RNA, 19 nt, Homo sapiens
  misc_RNA (1)...(19): siRNA sense strand
agaagugugucuugaauuu

SEQ ID NO: 2160770 - RNA, 19 nt, Homo sapiens
  misc_RNA (1)...(19): siRNA sense strand
gaauggauauguucagcuu

SEQ ID NO: 2160771 - RNA, 19 nt, Homo sapiens
  misc_RNA (1)...(19): siRNA sense strand
gcaaagcugucuccuccaa

SEQ ID NO: 2160772 - RNA, 19 nt, Homo sapiens
  misc_RNA (1)...(19): siRNA sense strand
ccuaugaguuugaagauuu

SEQ ID NO: 2160773 - RNA, 19 nt, Homo sapiens
  misc_RNA (1)...(19): siRNA sense strand
gcacagagaaggagaggaa

SEQ ID NO: 2160774 - RNA, 19 nt, Homo sapiens
  misc_RNA (1)...(19): siRNA sense strand
gagagaagcugaggaccaa

SEQ ID NO: 2160775 - RNA, 19 nt, Homo sapiens
  misc_RNA (1)...(19): siRNA sense strand
cagcagcccugaugacauu

SEQ ID NO: 2160776 - RNA, 19 nt, Homo sapiens
  misc_RNA (1)...(19): siRNA sense strand
ccacaaagcccuucaucaa

SEQ ID NO: 2160777 - RNA, 19 nt, Homo sapiens
  misc_RNA (1)...(19): siRNA sense strand
acaagucccucaacauaaa

SEQ ID NO: 2160778 - RNA, 19 nt, Homo sapiens
  misc_RNA (1)...(19): siRNA sense strand
ucagacagauggacgauga

SEQ ID NO: 2160779 - RNA, 19 nt, Homo sapiens
  misc_RNA (1)...(19): siRNA sense strand
cagaaaguccuaugaguuu

SEQ ID NO: 2160780 - RNA, 19 nt, Homo sapiens
  misc_RNA (1)...(19): siRNA sense strand
gcagcaggguggacuggua

SEQ ID NO: 2160781 - RNA, 19 nt, Homo sapiens
  misc_RNA (1)...(19): siRNA sense strand
gaaagaaacgggugaagag

SEQ ID NO: 2160782 - RNA, 19 nt, Homo sapiens
  misc_RNA (1)...(19): siRNA sense strand
ugaacgagguggugucuga

SEQ ID NO: 2160783 - RNA, 19 nt, Homo sapiens
  misc_RNA (1)...(19): siRNA sense strand
gaaucaacgccauuuauga

SEQ ID NO: 2160784 - RNA, 19 nt, Homo sapiens
  misc_RNA (1)...(19): siRNA sense strand
gagcacagcggugucaaua

SEQ ID NO: 2160785 - RNA, 19 nt, Homo sapiens
  misc_RNA (1)...(19): siRNA sense strand
guucaaacaugccggagaa

SEQ ID NO: 2160786 - RNA, 19 nt, Homo sapiens
  misc_RNA (1)...(19): siRNA sense strand
gguggugucugaagccuuu

SEQ ID NO: 2160787 - RNA, 19 nt, Homo sapiens
  misc_RNA (1)...(19): siRNA sense strand
ugaagggacuaggcaauaa

SEQ ID NO: 2160788 - RNA, 19 nt, Homo sapiens
  misc_RNA (1)...(19): siRNA sense strand
ggaaagaaacgggugaaga

SEQ ID NO: 2160789 - RNA, 19 nt, Homo sapiens
  misc_RNA (1)...(19): siRNA sense strand
gaucuuggaugagguggaa

SEQ ID NO: 2160790 - RNA, 19 nt, Homo sapiens
  misc_RNA (1)...(19): siRNA sense strand
gaaaguccuaugaguuuga

SEQ ID NO: 2160791 - RNA, 19 nt, Homo sapiens
  misc_RNA (1)...(19): siRNA sense strand
ucacagaggcuaagaaugg

SEQ ID NO: 2160792 - RNA, 19 nt, Homo sapiens
  misc_RNA (1)...(19): siRNA sense strand
ccacagaacggcaggaaga

SEQ ID NO: 2160793 - RNA, 19 nt, Homo sapiens
  misc_RNA (1)...(19): siRNA sense strand
gaagggacuaggcaauaaa

SEQ ID NO: 2160794 - RNA, 19 nt, Homo sapiens
  misc_RNA (1)...(19): siRNA sense strand
gggaguggcucagaaguca

SEQ ID NO: 2160795 - RNA, 19 nt, Homo sapiens
  misc_RNA (1)...(19): siRNA sense strand
cauggagacucagauguuu

SEQ ID NO: 2160796 - RNA, 19 nt, Homo sapiens
  misc_RNA (1)...(19): siRNA sense strand
gguccgagcccaagaguau

SEQ ID NO: 2160797 - RNA, 19 nt, Homo sapiens
  misc_RNA (1)...(19): siRNA sense strand
ugacagaugagaacaguga

SEQ ID NO: 2160798 - RNA, 19 nt, Homo sapiens
  misc_RNA (1)...(19): siRNA sense strand
gauauguucagcuuggaua

SEQ ID NO: 2160799 - RNA, 19 nt, Homo sapiens
  misc_RNA (1)...(19): siRNA sense strand
ggaagagguccuugugguu

SEQ ID NO: 2160800 - RNA, 19 nt, Homo sapiens
  misc_RNA (1)...(19): siRNA sense strand
gguccacccuuccugagaa

SEQ ID NO: 2160801 - RNA, 19 nt, Homo sapiens
  misc_RNA (1)...(19): siRNA sense strand
gagaggaggaguagugaug

SEQ ID NO: 2160802 - RNA, 19 nt, Homo sapiens
  misc_RNA (1)...(19): siRNA sense strand
uaaaggacaagauaucaga

SEQ ID NO: 2160803 - RNA, 19 nt, Homo sapiens
  misc_RNA (1)...(19): siRNA sense strand
ugaagcaggucaagaaacu

SEQ ID NO: 2160804 - RNA, 19 nt, Homo sapiens
  misc_RNA (1)...(19): siRNA sense strand
cggagaacguucaaacaug

SEQ ID NO: 2160805 - RNA, 19 nt, Homo sapiens
  misc_RNA (1)...(19): siRNA sense strand
gcgaaucaacgccauuuau

SEQ ID NO: 2160806 - RNA, 19 nt, Homo sapiens
  misc_RNA (1)...(19): siRNA sense strand
gcagaagguucgguuacug

SEQ ID NO: 2160807 - RNA, 19 nt, Homo sapiens
  misc_RNA (1)...(19): siRNA sense strand
gaagaugggagcagaaggu

SEQ ID NO: 2160808 - RNA, 19 nt, Homo sapiens
  misc_RNA (1)...(19): siRNA sense strand
gaacagugagucugacagu

SEQ ID NO: 2160809 - RNA, 19 nt, Homo sapiens
  misc_RNA (1)...(19): siRNA sense strand
cagagaaggagaggaauaa

SEQ ID NO: 2160810 - RNA, 19 nt, Homo sapiens
  misc_RNA (1)...(19): siRNA sense strand
gaauaaaggagcagugaac

SEQ ID NO: 2160811 - RNA, 19 nt, Homo sapiens
  misc_RNA (1)...(19): siRNA sense strand
ucagaacccuugcccaucu

SEQ ID NO: 2160812 - RNA, 19 nt, Homo sapiens
  misc_RNA (1)...(19): siRNA sense strand
aaagcugucuccuccaaga

SEQ ID NO: 2160813 - RNA, 19 nt, Homo sapiens
  misc_RNA (1)...(19): siRNA sense strand
gaggagaacgucuaugaag

SEQ ID NO: 2160814 - RNA, 19 nt, Homo sapiens
  misc_RNA (1)...(19): siRNA sense strand
gaucaggagucaggcuuca

SEQ ID NO: 2160815 - RNA, 19 nt, Homo sapiens
  misc_RNA (1)...(19): siRNA sense strand
ggacaucgaguuacauggu

SEQ ID NO: 2160816 - RNA, 19 nt, Homo sapiens
  misc_RNA (1)...(19): siRNA sense strand
ggaggagaacgucuaugaa

SEQ ID NO: 2160817 - RNA, 19 nt, Homo sapiens
  misc_RNA (1)...(19): siRNA sense strand
gggcugacacgcacuuuau

SEQ ID NO: 2160818 - RNA, 19 nt, Homo sapiens
  misc_RNA (1)...(19): siRNA sense strand
ggacuaggcaauaaaauga

SEQ ID NO: 2160819 - RNA, 19 nt, Homo sapiens
  misc_RNA (1)...(19): siRNA sense strand
ccaagaguaucuggaaaca

SEQ ID NO: 2160820 - RNA, 19 nt, Homo sapiens
  misc_RNA (1)...(19): siRNA sense strand
ggacaagauaucagaaugg

SEQ ID NO: 2160821 - RNA, 19 nt, Homo sapiens
  misc_RNA (1)...(19): siRNA sense strand
gcccaagaguaucuggaaa

SEQ ID NO: 2160822 - RNA, 19 nt, Homo sapiens
  misc_RNA (1)...(19): siRNA sense strand
gagaggagggucaucuuca

SEQ ID NO: 2160823 - RNA, 19 nt, Homo sapiens
  misc_RNA (1)...(19): siRNA sense strand
caacaguucccucugaagu

SEQ ID NO: 2160824 - RNA, 19 nt, Homo sapiens
  misc_RNA (1)...(19): siRNA sense strand
cgaaucaacgccauuuaug

SEQ ID NO: 2160825 - RNA, 19 nt, Homo sapiens
  misc_RNA (1)...(19): siRNA sense strand
cacaagucccucaacauaa

SEQ ID NO: 2160826 - RNA, 19 nt, Homo sapiens
  misc_RNA (1)...(19): siRNA sense strand
aagaguaucuggaaacacu

SEQ ID NO: 2160827 - RNA, 19 nt, Homo sapiens
  misc_RNA (1)...(19): siRNA sense strand
ggagcagaagguucgguua

SEQ ID NO: 2160828 - RNA, 19 nt, Homo sapiens
  misc_RNA (1)...(19): siRNA sense strand
ucaagcugcuggacacuag

SEQ ID NO: 2160829 - RNA, 19 nt, Homo sapiens
  misc_RNA (1)...(19): siRNA sense strand
ggaauaaaggagcagugaa

SEQ ID NO: 2160830 - RNA, 19 nt, Homo sapiens
  misc_RNA (1)...(19): siRNA sense strand
agucaagaauggauauguu

SEQ ID NO: 2160831 - RNA, 19 nt, Homo sapiens
  misc_RNA (1)...(19): siRNA sense strand
cagacggacaggaggauua

SEQ ID NO: 2160832 - RNA, 19 nt, Homo sapiens
  misc_RNA (1)...(19): siRNA sense strand
caacagccgguuccucaga

SEQ ID NO: 2160833 - RNA, 19 nt, Homo sapiens
  misc_RNA (1)...(19): siRNA sense strand
cggaggagaacgucuauga

SEQ ID NO: 2160834 - RNA, 19 nt, Homo sapiens
  misc_RNA (1)...(19): siRNA sense strand
acagaaaguccuaugaguu

SEQ ID NO: 2160835 - RNA, 19 nt, Homo sapiens
  misc_RNA (1)...(19): siRNA sense strand
gagaaggagaggaauaaag

SEQ ID NO: 2160836 - RNA, 19 nt, Homo sapiens
  misc_RNA (1)...(19): siRNA sense strand
ggucacagaggcuaagaau

SEQ ID NO: 2160837 - RNA, 19 nt, Homo sapiens
  misc_RNA (1)...(19): siRNA sense strand
gcaaaaccauccuugucaa

SEQ ID NO: 2160838 - RNA, 19 nt, Homo sapiens
  misc_RNA (1)...(19): siRNA sense strand
acaguucccucugaaguug

SEQ ID NO: 2160839 - RNA, 19 nt, Homo sapiens
  misc_RNA (1)...(19): siRNA sense strand
ugccagaacucacccaaca

SEQ ID NO: 2160840 - RNA, 19 nt, Homo sapiens
  misc_RNA (1)...(19): siRNA sense strand
gcaggaagaagagaaagau

SEQ ID NO: 2160841 - RNA, 19 nt, Homo sapiens
  misc_RNA (1)...(19): siRNA sense strand
aggagaacgucuaugaaga

SEQ ID NO: 2160842 - RNA, 19 nt, Homo sapiens
  misc_RNA (1)...(19): siRNA sense strand
cacagaaaguccuaugagu

SEQ ID NO: 2160843 - RNA, 19 nt, Homo sapiens
  misc_RNA (1)...(19): siRNA sense strand
gaacgggaaguggauccua

SEQ ID NO: 2160844 - RNA, 19 nt, Homo sapiens
  misc_RNA (1)...(19): siRNA sense strand
gaaggagaggaauaaagga

SEQ ID NO: 2160845 - RNA, 19 nt, Homo sapiens
  misc_RNA (1)...(19): siRNA sense strand
gaggagggucaucuucauu

SEQ ID NO: 2160846 - RNA, 19 nt, Homo sapiens
  misc_RNA (1)...(19): siRNA sense strand
ggagaggagggucaucuuc

SEQ ID NO: 2160847 - RNA, 19 nt, Homo sapiens
  misc_RNA (1)...(19): siRNA sense strand
aagcugguguugcgaauca

SEQ ID NO: 2160848 - RNA, 19 nt, Homo sapiens
  misc_RNA (1)...(19): siRNA sense strand
acacugcccuccugacaag

SEQ ID NO: 2160849 - RNA, 19 nt, Homo sapiens
  misc_RNA (1)...(19): siRNA sense strand
aggaaagguucaugcagaa

SEQ ID NO: 2160850 - RNA, 19 nt, Homo sapiens
  misc_RNA (1)...(19): siRNA sense strand
ccaagagccuccgccacuu

SEQ ID NO: 2160851 - RNA, 19 nt, Homo sapiens
  misc_RNA (1)...(19): siRNA sense strand
ccaccuggucuguguguuu

SEQ ID NO: 2160852 - RNA, 19 nt, Homo sapiens
  misc_RNA (1)...(19): siRNA sense strand
caggaaaagugacagauga

SEQ ID NO: 2160853 - RNA, 19 nt, Homo sapiens
  misc_RNA (1)...(19): siRNA sense strand
ggcaucggcuucaggaaag

SEQ ID NO: 2160854 - RNA, 19 nt, Homo sapiens
  misc_RNA (1)...(19): siRNA sense strand
gaaugaggccaggaacaga

SEQ ID NO: 2160855 - RNA, 19 nt, Homo sapiens
  misc_RNA (1)...(19): siRNA sense strand
acacagaggagaagcugaa

SEQ ID NO: 2160856 - RNA, 19 nt, Homo sapiens
  misc_RNA (1)...(19): siRNA sense strand
gaagaggcugucccaguca

SEQ ID NO: 2160857 - RNA, 19 nt, Homo sapiens
  misc_RNA (1)...(19): siRNA sense strand
agagaaagauacccaagcu

SEQ ID NO: 2160858 - RNA, 19 nt, Homo sapiens
  misc_RNA (1)...(19): siRNA sense strand
acagagaaggagaggaaua

SEQ ID NO: 2160859 - RNA, 19 nt, Homo sapiens
  misc_RNA (1)...(19): siRNA sense strand
gaggacaucgaguuacaug

SEQ ID NO: 2160860 - RNA, 19 nt, Homo sapiens
  misc_RNA (1)...(19): siRNA sense strand
ucgagcacguggacuuuga

SEQ ID NO: 2160861 - RNA, 19 nt, Homo sapiens
  misc_RNA (1)...(19): siRNA sense strand
gaagcugagucgggaugga

SEQ ID NO: 2160862 - RNA, 19 nt, Homo sapiens
  misc_RNA (1)...(19): siRNA sense strand
gaacagggaugcuuagaua

SEQ ID NO: 2160863 - RNA, 19 nt, Homo sapiens
  misc_RNA (1)...(19): siRNA sense strand
gaagaauacuggaaaguug

SEQ ID NO: 2160864 - RNA, 19 nt, Homo sapiens
  misc_RNA (1)...(19): siRNA sense strand
gaagaggauugccguuuaa

SEQ ID NO: 2160865 - RNA, 19 nt, Homo sapiens
  misc_RNA (1)...(19): siRNA sense strand
ggacuugugugcugccuua

SEQ ID NO: 2160866 - RNA, 19 nt, Homo sapiens
  misc_RNA (1)...(19): siRNA sense strand
gacaagagcuacugcauca

SEQ ID NO: 2160867 - RNA, 19 nt, Homo sapiens
  misc_RNA (1)...(19): siRNA sense strand
gaugaacaguugaacauga

SEQ ID NO: 2160868 - RNA, 19 nt, Homo sapiens
  misc_RNA (1)...(19): siRNA sense strand
agaagaggauugccguuua

SEQ ID NO: 2160869 - RNA, 19 nt, Homo sapiens
  misc_RNA (1)...(19): siRNA sense strand
agaaagaccugcggcauaa

SEQ ID NO: 2160870 - RNA, 19 nt, Homo sapiens
  misc_RNA (1)...(19): siRNA sense strand
gcaggaaauucaucuacaa

SEQ ID NO: 2160871 - RNA, 19 nt, Homo sapiens
  misc_RNA (1)...(19): siRNA sense strand
gaacaagggagaaugcuau

SEQ ID NO: 2160872 - RNA, 19 nt, Homo sapiens
  misc_RNA (1)...(19): siRNA sense strand
gcaaaggcuuccuccagaa

SEQ ID NO: 2160873 - RNA, 19 nt, Homo sapiens
  misc_RNA (1)...(19): siRNA sense strand
caagggagaaugcuauuaa

SEQ ID NO: 2160874 - RNA, 19 nt, Homo sapiens
  misc_RNA (1)...(19): siRNA sense strand
gcagauacccaaaguacaa

SEQ ID NO: 2160875 - RNA, 19 nt, Homo sapiens
  misc_RNA (1)...(19): siRNA sense strand
gcuugaagguccacuugua

SEQ ID NO: 2160876 - RNA, 19 nt, Homo sapiens
  misc_RNA (1)...(19): siRNA sense strand
gacaagaccuuccgguaca

SEQ ID NO: 2160877 - RNA, 19 nt, Homo sapiens
  misc_RNA (1)...(19): siRNA sense strand
ggcagaagcaaauguauaa

SEQ ID NO: 2160878 - RNA, 19 nt, Homo sapiens
  misc_RNA (1)...(19): siRNA sense strand
caacuagcccuccuacuga

SEQ ID NO: 2160879 - RNA, 19 nt, Homo sapiens
  misc_RNA (1)...(19): siRNA sense strand
gaggauugccguuuaaaug

SEQ ID NO: 2160880 - RNA, 19 nt, Homo sapiens
  misc_RNA (1)...(19): siRNA sense strand
ccagggcgcuuagaaauuc

SEQ ID NO: 2160881 - RNA, 19 nt, Homo sapiens
  misc_RNA (1)...(19): siRNA sense strand
cuggaaaguugcuauguuu

SEQ ID NO: 2160882 - RNA, 19 nt, Homo sapiens
  misc_RNA (1)...(19): siRNA sense strand
gggagaaugcuauuaauca

SEQ ID NO: 2160883 - RNA, 19 nt, Homo sapiens
  misc_RNA (1)...(19): siRNA sense strand
gccauucucuugugugaug

SEQ ID NO: 2160884 - RNA, 19 nt, Homo sapiens
  misc_RNA (1)...(19): siRNA sense strand
guaaggagggauuugcuaa

SEQ ID NO: 2160885 - RNA, 19 nt, Homo sapiens
  misc_RNA (1)...(19): siRNA sense strand
uugaugauguggccuuaua

SEQ ID NO: 2160886 - RNA, 19 nt, Homo sapiens
  misc_RNA (1)...(19): siRNA sense strand
ggaaagagagaaagauuuu

SEQ ID NO: 2160887 - RNA, 19 nt, Homo sapiens
  misc_RNA (1)...(19): siRNA sense strand
gggaaagagagaaagauuu

SEQ ID NO: 2160888 - RNA, 19 nt, Homo sapiens
  misc_RNA (1)...(19): siRNA sense strand
gcaaauguauaagcaagag

SEQ ID NO: 2160889 - RNA, 19 nt, Homo sapiens
  misc_RNA (1)...(19): siRNA sense strand
cauaugauccagacaagaa

SEQ ID NO: 2160890 - RNA, 19 nt, Homo sapiens
  misc_RNA (1)...(19): siRNA sense strand
ggagaaugcuauuaaucag

SEQ ID NO: 2160891 - RNA, 19 nt, Homo sapiens
  misc_RNA (1)...(19): siRNA sense strand
gggccaaccugaagaagca

SEQ ID NO: 2160892 - RNA, 19 nt, Homo sapiens
  misc_RNA (1)...(19): siRNA sense strand
gaaaguugcuauguuuuga

SEQ ID NO: 2160893 - RNA, 19 nt, Homo sapiens
  misc_RNA (1)...(19): siRNA sense strand
caagagaugaagaccaauu

SEQ ID NO: 2160894 - RNA, 19 nt, Homo sapiens
  misc_RNA (1)...(19): siRNA sense strand
ggaacaagggagaaugcua

SEQ ID NO: 2160895 - RNA, 19 nt, Homo sapiens
  misc_RNA (1)...(19): siRNA sense strand
caguugaacaugaagaaua

SEQ ID NO: 2160896 - RNA, 19 nt, Homo sapiens
  misc_RNA (1)...(19): siRNA sense strand
gggagauccuggagaagug

SEQ ID NO: 2160897 - RNA, 19 nt, Homo sapiens
  misc_RNA (1)...(19): siRNA sense strand
ugaagguccacuuguauaa

SEQ ID NO: 2160898 - RNA, 19 nt, Homo sapiens
  misc_RNA (1)...(19): siRNA sense strand
ggaaggccuccaugaaguu

SEQ ID NO: 2160899 - RNA, 19 nt, Homo sapiens
  misc_RNA (1)...(19): siRNA sense strand
ccucgucacucaucagguu

SEQ ID NO: 2160900 - RNA, 19 nt, Homo sapiens
  misc_RNA (1)...(19): siRNA sense strand
gaugauguggccuuauauu

SEQ ID NO: 2160901 - RNA, 19 nt, Homo sapiens
  misc_RNA (1)...(19): siRNA sense strand
agaagcaaauguauaagca

SEQ ID NO: 2160902 - RNA, 19 nt, Homo sapiens
  misc_RNA (1)...(19): siRNA sense strand
gaaagucuuccaaguaagg

SEQ ID NO: 2160903 - RNA, 19 nt, Homo sapiens
  misc_RNA (1)...(19): siRNA sense strand
aagaaagaccugcggcaua

SEQ ID NO: 2160904 - RNA, 19 nt, Homo sapiens
  misc_RNA (1)...(19): siRNA sense strand
gaaggaacucccaggacaa

SEQ ID NO: 2160905 - RNA, 19 nt, Homo sapiens
  misc_RNA (1)...(19): siRNA sense strand
gaacaguugaacaugaaga

SEQ ID NO: 2160906 - RNA, 19 nt, Homo sapiens
  misc_RNA (1)...(19): siRNA sense strand
cagcgaacagggaugcuua

SEQ ID NO: 2160907 - RNA, 19 nt, Homo sapiens
  misc_RNA (1)...(19): siRNA sense strand
gaagaagcaccugugucua

SEQ ID NO: 2160908 - RNA, 19 nt, Homo sapiens
  misc_RNA (1)...(19): siRNA sense strand
uaacugugacauuugauga

SEQ ID NO: 2160909 - RNA, 19 nt, Homo sapiens
  misc_RNA (1)...(19): siRNA sense strand
aagagaugaagaccaauua

SEQ ID NO: 2160910 - RNA, 19 nt, Homo sapiens
  misc_RNA (1)...(19): siRNA sense strand
ggcaggaaauucaucuaca

SEQ ID NO: 2160911 - RNA, 19 nt, Homo sapiens
  misc_RNA (1)...(19): siRNA sense strand
ugaagaauacuggaaaguu

SEQ ID NO: 2160912 - RNA, 19 nt, Homo sapiens
  misc_RNA (1)...(19): siRNA sense strand
ccaauuacgagacccuuga

SEQ ID NO: 2160913 - RNA, 19 nt, Homo sapiens
  misc_RNA (1)...(19): siRNA sense strand
ggacgagcacaucagaguu

SEQ ID NO: 2160914 - RNA, 19 nt, Homo sapiens
  misc_RNA (1)...(19): siRNA sense strand
ugaagaagcaccugugucu

SEQ ID NO: 2160915 - RNA, 19 nt, Homo sapiens
  misc_RNA (1)...(19): siRNA sense strand
ccacagggccaagaugcua

SEQ ID NO: 2160916 - RNA, 19 nt, Homo sapiens
  misc_RNA (1)...(19): siRNA sense strand
ggauugccguuuaaauggu

SEQ ID NO: 2160917 - RNA, 19 nt, Homo sapiens
  misc_RNA (1)...(19): siRNA sense strand
cagauuugaucacauggau

SEQ ID NO: 2160918 - RNA, 19 nt, Homo sapiens
  misc_RNA (1)...(19): siRNA sense strand
agcaagagaugaagaccaa

SEQ ID NO: 2160919 - RNA, 19 nt, Homo sapiens
  misc_RNA (1)...(19): siRNA sense strand
gagaaguggcagaagcaaa

SEQ ID NO: 2160920 - RNA, 19 nt, Homo sapiens
  misc_RNA (1)...(19): siRNA sense strand
cgguaacugugacauuuga

SEQ ID NO: 2160921 - RNA, 19 nt, Homo sapiens
  misc_RNA (1)...(19): siRNA sense strand
gcaaaaguuucacucaaca

SEQ ID NO: 2160922 - RNA, 19 nt, Homo sapiens
  misc_RNA (1)...(19): siRNA sense strand
caaaagccauucucuugug

SEQ ID NO: 2160923 - RNA, 19 nt, Homo sapiens
  misc_RNA (1)...(19): siRNA sense strand
cgcagaggcuccuguguca

SEQ ID NO: 2160924 - RNA, 19 nt, Homo sapiens
  misc_RNA (1)...(19): siRNA sense strand
acagggaugcuuagauaaa

SEQ ID NO: 2160925 - RNA, 19 nt, Homo sapiens
  misc_RNA (1)...(19): siRNA sense strand
gaagcaaauguauaagcaa

SEQ ID NO: 2160926 - RNA, 19 nt, Homo sapiens
  misc_RNA (1)...(19): siRNA sense strand
caagccagauuugaucaca

SEQ ID NO: 2160927 - RNA, 19 nt, Homo sapiens
  misc_RNA (1)...(19): siRNA sense strand
uaaggagggauuugcuaaa

SEQ ID NO: 2160928 - RNA, 19 nt, Homo sapiens
  misc_RNA (1)...(19): siRNA sense strand
uggcagaagcaaauguaua

SEQ ID NO: 2160929 - RNA, 19 nt, Homo sapiens
  misc_RNA (1)...(19): siRNA sense strand
aagaugcuauuccugcuau

SEQ ID NO: 2160930 - RNA, 19 nt, Homo sapiens
  misc_RNA (1)...(19): siRNA sense strand
aaacaagaaggacaacuag

SEQ ID NO: 2160931 - RNA, 19 nt, Homo sapiens
  misc_RNA (1)...(19): siRNA sense strand
gcucaagacccacauugca

SEQ ID NO: 2160932 - RNA, 19 nt, Homo sapiens
  misc_RNA (1)...(19): siRNA sense strand
acaagagcuucuccuggaa

SEQ ID NO: 2160933 - RNA, 19 nt, Homo sapiens
  misc_RNA (1)...(19): siRNA sense strand
acaacuagcccuccuacug

SEQ ID NO: 2160934 - RNA, 19 nt, Homo sapiens
  misc_RNA (1)...(19): siRNA sense strand
agaaguggcagaagcaaau

SEQ ID NO: 2160935 - RNA, 19 nt, Homo sapiens
  misc_RNA (1)...(19): siRNA sense strand
caagaugcuauuccugcua

SEQ ID NO: 2160936 - RNA, 19 nt, Homo sapiens
  misc_RNA (1)...(19): siRNA sense strand
agugggagauccuggagaa

SEQ ID NO: 2160937 - RNA, 19 nt, Homo sapiens
  misc_RNA (1)...(19): siRNA sense strand
cagcauaugauccagacaa

SEQ ID NO: 2160938 - RNA, 19 nt, Homo sapiens
  misc_RNA (1)...(19): siRNA sense strand
aagccauucucuuguguga

SEQ ID NO: 2160939 - RNA, 19 nt, Homo sapiens
  misc_RNA (1)...(19): siRNA sense strand
gcagugagugugagaagag

SEQ ID NO: 2160940 - RNA, 19 nt, Homo sapiens
  misc_RNA (1)...(19): siRNA sense strand
cagaggcuccugugucaga

SEQ ID NO: 2160941 - RNA, 19 nt, Homo sapiens
  misc_RNA (1)...(19): siRNA sense strand
caugaagaauacuggaaag

SEQ ID NO: 2160942 - RNA, 19 nt, Homo sapiens
  misc_RNA (1)...(19): siRNA sense strand
aaaguuucacucaacagua

SEQ ID NO: 2160943 - RNA, 19 nt, Homo sapiens
  misc_RNA (1)...(19): siRNA sense strand
uguauaagcaagagaugaa

SEQ ID NO: 2160944 - RNA, 19 nt, Homo sapiens
  misc_RNA (1)...(19): siRNA sense strand
acuggaaaguugcuauguu

SEQ ID NO: 2160945 - RNA, 19 nt, Homo sapiens
  misc_RNA (1)...(19): siRNA sense strand
augaacaguugaacaugaa

SEQ ID NO: 2160946 - RNA, 19 nt, Homo sapiens
  misc_RNA (1)...(19): siRNA sense strand
gacgagcacaucagaguuc

SEQ ID NO: 2160947 - RNA, 19 nt, Homo sapiens
  misc_RNA (1)...(19): siRNA sense strand
ggcaugaagguccaucuga

SEQ ID NO: 2160948 - RNA, 19 nt, Homo sapiens
  misc_RNA (1)...(19): siRNA sense strand
ggacaaaagaagaggauug

SEQ ID NO: 2160949 - RNA, 19 nt, Homo sapiens
  misc_RNA (1)...(19): siRNA sense strand
ggaaaguugcuauguuuug

SEQ ID NO: 2160950 - RNA, 19 nt, Homo sapiens
  misc_RNA (1)...(19): siRNA sense strand
gaagguccacuuguauaag

SEQ ID NO: 2160951 - RNA, 19 nt, Homo sapiens
  misc_RNA (1)...(19): siRNA sense strand
gagcacaucagaguucaca

SEQ ID NO: 2160952 - RNA, 19 nt, Homo sapiens
  misc_RNA (1)...(19): siRNA sense strand
aagggagaaugcuauuaau

SEQ ID NO: 2160953 - RNA, 19 nt, Homo sapiens
  misc_RNA (1)...(19): siRNA sense strand
gcucacagaacacauucga

SEQ ID NO: 2160954 - RNA, 19 nt, Homo sapiens
  misc_RNA (1)...(19): siRNA sense strand
gccaaaagccauucucuug

SEQ ID NO: 2160955 - RNA, 19 nt, Homo sapiens
  misc_RNA (1)...(19): siRNA sense strand
agagaagcccuaccagugu

SEQ ID NO: 2160956 - RNA, 19 nt, Homo sapiens
  misc_RNA (1)...(19): siRNA sense strand
ggaacaagagugggagauc

SEQ ID NO: 2160957 - RNA, 19 nt, Homo sapiens
  misc_RNA (1)...(19): siRNA sense strand
aagaagaggauugccguuu

SEQ ID NO: 2160958 - RNA, 19 nt, Homo sapiens
  misc_RNA (1)...(19): siRNA sense strand
cgaggagcccuuccagugu

SEQ ID NO: 2160959 - RNA, 19 nt, Homo sapiens
  misc_RNA (1)...(19): siRNA sense strand
guaacugugacauuugaug

SEQ ID NO: 2160960 - RNA, 19 nt, Homo sapiens
  misc_RNA (1)...(19): siRNA sense strand
cgagggaaagagagaaaga

SEQ ID NO: 2160961 - RNA, 19 nt, Homo sapiens
  misc_RNA (1)...(19): siRNA sense strand
uucgguaacugugacauuu

SEQ ID NO: 2160962 - RNA, 19 nt, Homo sapiens
  misc_RNA (1)...(19): siRNA sense strand
gaacagggaugcuuagaua

SEQ ID NO: 2160963 - RNA, 19 nt, Homo sapiens
  misc_RNA (1)...(19): siRNA sense strand
gaagaauacuggaaaguug

SEQ ID NO: 2160964 - RNA, 19 nt, Homo sapiens
  misc_RNA (1)...(19): siRNA sense strand
gaagaggauugccguuuaa

SEQ ID NO: 2160965 - RNA, 19 nt, Homo sapiens
  misc_RNA (1)...(19): siRNA sense strand
ggacuugugugcugccuua

SEQ ID NO: 2160966 - RNA, 19 nt, Homo sapiens
  misc_RNA (1)...(19): siRNA sense strand
gacaagagcuacugcauca

SEQ ID NO: 2160967 - RNA, 19 nt, Homo sapiens
  misc_RNA (1)...(19): siRNA sense strand
gaugaacaguugaacauga

SEQ ID NO: 2160968 - RNA, 19 nt, Homo sapiens
  misc_RNA (1)...(19): siRNA sense strand
agaagaggauugccguuua

SEQ ID NO: 2160969 - RNA, 19 nt, Homo sapiens
  misc_RNA (1)...(19): siRNA sense strand
agaaagaccugcggcauaa

SEQ ID NO: 2160970 - RNA, 19 nt, Homo sapiens
  misc_RNA (1)...(19): siRNA sense strand
gcaggaaauucaucuacaa

SEQ ID NO: 2160971 - RNA, 19 nt, Homo sapiens
  misc_RNA (1)...(19): siRNA sense strand
gaacaagggagaaugcuau

SEQ ID NO: 2160972 - RNA, 19 nt, Homo sapiens
  misc_RNA (1)...(19): siRNA sense strand
gcaaaggcuuccuccagaa

SEQ ID NO: 2160973 - RNA, 19 nt, Homo sapiens
  misc_RNA (1)...(19): siRNA sense strand
caagggagaaugcuauuaa

SEQ ID NO: 2160974 - RNA, 19 nt, Homo sapiens
  misc_RNA (1)...(19): siRNA sense strand
gcagauacccaaaguacaa

SEQ ID NO: 2160975 - RNA, 19 nt, Homo sapiens
  misc_RNA (1)...(19): siRNA sense strand
gcuugaagguccacuugua

SEQ ID NO: 2160976 - RNA, 19 nt, Homo sapiens
  misc_RNA (1)...(19): siRNA sense strand
gacaagaccuuccgguaca

SEQ ID NO: 2160977 - RNA, 19 nt, Homo sapiens
  misc_RNA (1)...(19): siRNA sense strand
ggcagaagcaaauguauaa

SEQ ID NO: 2160978 - RNA, 19 nt, Homo sapiens
  misc_RNA (1)...(19): siRNA sense strand
caacuagcccuccuacuga

SEQ ID NO: 2160979 - RNA, 19 nt, Homo sapiens
  misc_RNA (1)...(19): siRNA sense strand
gaggauugccguuuaaaug

SEQ ID NO: 2160980 - RNA, 19 nt, Homo sapiens
  misc_RNA (1)...(19): siRNA sense strand
ccagggcgcuuagaaauuc

SEQ ID NO: 2160981 - RNA, 19 nt, Homo sapiens
  misc_RNA (1)...(19): siRNA sense strand
cuggaaaguugcuauguuu

SEQ ID NO: 2160982 - RNA, 19 nt, Homo sapiens
  misc_RNA (1)...(19): siRNA sense strand
gggagaaugcuauuaauca

SEQ ID NO: 2160983 - RNA, 19 nt, Homo sapiens
  misc_RNA (1)...(19): siRNA sense strand
gccauucucuugugugaug

SEQ ID NO: 2160984 - RNA, 19 nt, Homo sapiens
  misc_RNA (1)...(19): siRNA sense strand
guaaggagggauuugcuaa

SEQ ID NO: 2160985 - RNA, 19 nt, Homo sapiens
  misc_RNA (1)...(19): siRNA sense strand
uugaugauguggccuuaua

SEQ ID NO: 2160986 - RNA, 19 nt, Homo sapiens
  misc_RNA (1)...(19): siRNA sense strand
ggaaagagagaaagauuuu

SEQ ID NO: 2160987 - RNA, 19 nt, Homo sapiens
  misc_RNA (1)...(19): siRNA sense strand
gggaaagagagaaagauuu

SEQ ID NO: 2160988 - RNA, 19 nt, Homo sapiens
  misc_RNA (1)...(19): siRNA sense strand
gcaaauguauaagcaagag

SEQ ID NO: 2160989 - RNA, 19 nt, Homo sapiens
  misc_RNA (1)...(19): siRNA sense strand
cauaugauccagacaagaa

SEQ ID NO: 2160990 - RNA, 19 nt, Homo sapiens
  misc_RNA (1)...(19): siRNA sense strand
ggagaaugcuauuaaucag

SEQ ID NO: 2160991 - RNA, 19 nt, Homo sapiens
  misc_RNA (1)...(19): siRNA sense strand
gggccaaccugaagaagca

SEQ ID NO: 2160992 - RNA, 19 nt, Homo sapiens
  misc_RNA (1)...(19): siRNA sense strand
gaaaguugcuauguuuuga

SEQ ID NO: 2160993 - RNA, 19 nt, Homo sapiens
  misc_RNA (1)...(19): siRNA sense strand
caagagaugaagaccaauu

SEQ ID NO: 2160994 - RNA, 19 nt, Homo sapiens
  misc_RNA (1)...(19): siRNA sense strand
ggaacaagggagaaugcua

SEQ ID NO: 2160995 - RNA, 19 nt, Homo sapiens
  misc_RNA (1)...(19): siRNA sense strand
caguugaacaugaagaaua

SEQ ID NO: 2160996 - RNA, 19 nt, Homo sapiens
  misc_RNA (1)...(19): siRNA sense strand
gggagauccuggagaagug

SEQ ID NO: 2160997 - RNA, 19 nt, Homo sapiens
  misc_RNA (1)...(19): siRNA sense strand
ugaagguccacuuguauaa

SEQ ID NO: 2160998 - RNA, 19 nt, Homo sapiens
  misc_RNA (1)...(19): siRNA sense strand
ggaaggccuccaugaaguu

SEQ ID NO: 2160999 - RNA, 19 nt, Homo sapiens
  misc_RNA (1)...(19): siRNA sense strand
ccucgucacucaucagguu

SEQ ID NO: 2161000 - RNA, 19 nt, Homo sapiens
  misc_RNA (1)...(19): siRNA sense strand
gaugauguggccuuauauu

SEQ ID NO: 2161001 - RNA, 19 nt, Homo sapiens
  misc_RNA (1)...(19): siRNA sense strand
agaagcaaauguauaagca

SEQ ID NO: 2161002 - RNA, 19 nt, Homo sapiens
  misc_RNA (1)...(19): siRNA sense strand
gaaagucuuccaaguaagg

SEQ ID NO: 2161003 - RNA, 19 nt, Homo sapiens
  misc_RNA (1)...(19): siRNA sense strand
aagaaagaccugcggcaua

SEQ ID NO: 2161004 - RNA, 19 nt, Homo sapiens
  misc_RNA (1)...(19): siRNA sense strand
gaaggaacucccaggacaa

SEQ ID NO: 2161005 - RNA, 19 nt, Homo sapiens
  misc_RNA (1)...(19): siRNA sense strand
gaacaguugaacaugaaga

SEQ ID NO: 2161006 - RNA, 19 nt, Homo sapiens
  misc_RNA (1)...(19): siRNA sense strand
cagcgaacagggaugcuua

SEQ ID NO: 2161007 - RNA, 19 nt, Homo sapiens
  misc_RNA (1)...(19): siRNA sense strand
gaagaagcaccugugucua

SEQ ID NO: 2161008 - RNA, 19 nt, Homo sapiens
  misc_RNA (1)...(19): siRNA sense strand
uaacugugacauuugauga

SEQ ID NO: 2161009 - RNA, 19 nt, Homo sapiens
  misc_RNA (1)...(19): siRNA sense strand
aagagaugaagaccaauua

SEQ ID NO: 2161010 - RNA, 19 nt, Homo sapiens
  misc_RNA (1)...(19): siRNA sense strand
ggcaggaaauucaucuaca

SEQ ID NO: 2161011 - RNA, 19 nt, Homo sapiens
  misc_RNA (1)...(19): siRNA sense strand
ugaagaauacuggaaaguu

SEQ ID NO: 2161012 - RNA, 19 nt, Homo sapiens
  misc_RNA (1)...(19): siRNA sense strand
ccaauuacgagacccuuga

SEQ ID NO: 2161013 - RNA, 19 nt, Homo sapiens
  misc_RNA (1)...(19): siRNA sense strand
ggacgagcacaucagaguu

SEQ ID NO: 2161014 - RNA, 19 nt, Homo sapiens
  misc_RNA (1)...(19): siRNA sense strand
ugaagaagcaccugugucu

SEQ ID NO: 2161015 - RNA, 19 nt, Homo sapiens
  misc_RNA (1)...(19): siRNA sense strand
ccacagggccaagaugcua

SEQ ID NO: 2161016 - RNA, 19 nt, Homo sapiens
  misc_RNA (1)...(19): siRNA sense strand
ggauugccguuuaaauggu

SEQ ID NO: 2161017 - RNA, 19 nt, Homo sapiens
  misc_RNA (1)...(19): siRNA sense strand
cagauuugaucacauggau

SEQ ID NO: 2161018 - RNA, 19 nt, Homo sapiens
  misc_RNA (1)...(19): siRNA sense strand
agcaagagaugaagaccaa

SEQ ID NO: 2161019 - RNA, 19 nt, Homo sapiens
  misc_RNA (1)...(19): siRNA sense strand
gagaaguggcagaagcaaa

SEQ ID NO: 2161020 - RNA, 19 nt, Homo sapiens
  misc_RNA (1)...(19): siRNA sense strand
cgguaacugugacauuuga

SEQ ID NO: 2161021 - RNA, 19 nt, Homo sapiens
  misc_RNA (1)...(19): siRNA sense strand
gcaaaaguuucacucaaca

SEQ ID NO: 2161022 - RNA, 19 nt, Homo sapiens
  misc_RNA (1)...(19): siRNA sense strand
caaaagccauucucuugug

SEQ ID NO: 2161023 - RNA, 19 nt, Homo sapiens
  misc_RNA (1)...(19): siRNA sense strand
cgcagaggcuccuguguca

SEQ ID NO: 2161024 - RNA, 19 nt, Homo sapiens
  misc_RNA (1)...(19): siRNA sense strand
acagggaugcuuagauaaa

SEQ ID NO: 2161025 - RNA, 19 nt, Homo sapiens
  misc_RNA (1)...(19): siRNA sense strand
gaagcaaauguauaagcaa

SEQ ID NO: 2161026 - RNA, 19 nt, Homo sapiens
  misc_RNA (1)...(19): siRNA sense strand
caagccagauuugaucaca

SEQ ID NO: 2161027 - RNA, 19 nt, Homo sapiens
  misc_RNA (1)...(19): siRNA sense strand
uaaggagggauuugcuaaa

SEQ ID NO: 2161028 - RNA, 19 nt, Homo sapiens
  misc_RNA (1)...(19): siRNA sense strand
uggcagaagcaaauguaua

SEQ ID NO: 2161029 - RNA, 19 nt, Homo sapiens
  misc_RNA (1)...(19): siRNA sense strand
aagaugcuauuccugcuau

SEQ ID NO: 2161030 - RNA, 19 nt, Homo sapiens
  misc_RNA (1)...(19): siRNA sense strand
aaacaagaaggacaacuag

SEQ ID NO: 2161031 - RNA, 19 nt, Homo sapiens
  misc_RNA (1)...(19): siRNA sense strand
gcucaagacccacauugca

SEQ ID NO: 2161032 - RNA, 19 nt, Homo sapiens
  misc_RNA (1)...(19): siRNA sense strand
acaagagcuucuccuggaa

SEQ ID NO: 2161033 - RNA, 19 nt, Homo sapiens
  misc_RNA (1)...(19): siRNA sense strand
acaacuagcccuccuacug

SEQ ID NO: 2161034 - RNA, 19 nt, Homo sapiens
  misc_RNA (1)...(19): siRNA sense strand
agaaguggcagaagcaaau

SEQ ID NO: 2161035 - RNA, 19 nt, Homo sapiens
  misc_RNA (1)...(19): siRNA sense strand
caagaugcuauuccugcua

SEQ ID NO: 2161036 - RNA, 19 nt, Homo sapiens
  misc_RNA (1)...(19): siRNA sense strand
agugggagauccuggagaa

SEQ ID NO: 2161037 - RNA, 19 nt, Homo sapiens
  misc_RNA (1)...(19): siRNA sense strand
cagcauaugauccagacaa

SEQ ID NO: 2161038 - RNA, 19 nt, Homo sapiens
  misc_RNA (1)...(19): siRNA sense strand
aagccauucucuuguguga

SEQ ID NO: 2161039 - RNA, 19 nt, Homo sapiens
  misc_RNA (1)...(19): siRNA sense strand
gcagugagugugagaagag

SEQ ID NO: 2161040 - RNA, 19 nt, Homo sapiens
  misc_RNA (1)...(19): siRNA sense strand
cagaggcuccugugucaga

SEQ ID NO: 2161041 - RNA, 19 nt, Homo sapiens
  misc_RNA (1)...(19): siRNA sense strand
caugaagaauacuggaaag

SEQ ID NO: 2161042 - RNA, 19 nt, Homo sapiens
  misc_RNA (1)...(19): siRNA sense strand
aaaguuucacucaacagua

SEQ ID NO: 2161043 - RNA, 19 nt, Homo sapiens
  misc_RNA (1)...(19): siRNA sense strand
uguauaagcaagagaugaa

SEQ ID NO: 2161044 - RNA, 19 nt, Homo sapiens
  misc_RNA (1)...(19): siRNA sense strand
acuggaaaguugcuauguu

SEQ ID NO: 2161045 - RNA, 19 nt, Homo sapiens
  misc_RNA (1)...(19): siRNA sense strand
augaacaguugaacaugaa

SEQ ID NO: 2161046 - RNA, 19 nt, Homo sapiens
  misc_RNA (1)...(19): siRNA sense strand
gacgagcacaucagaguuc

SEQ ID NO: 2161047 - RNA, 19 nt, Homo sapiens
  misc_RNA (1)...(19): siRNA sense strand
ggcaugaagguccaucuga

SEQ ID NO: 2161048 - RNA, 19 nt, Homo sapiens
  misc_RNA (1)...(19): siRNA sense strand
ggacaaaagaagaggauug

SEQ ID NO: 2161049 - RNA, 19 nt, Homo sapiens
  misc_RNA (1)...(19): siRNA sense strand
ggaaaguugcuauguuuug

SEQ ID NO: 2161050 - RNA, 19 nt, Homo sapiens
  misc_RNA (1)...(19): siRNA sense strand
gaagguccacuuguauaag

SEQ ID NO: 2161051 - RNA, 19 nt, Homo sapiens
  misc_RNA (1)...(19): siRNA sense strand
gagcacaucagaguucaca

SEQ ID NO: 2161052 - RNA, 19 nt, Homo sapiens
  misc_RNA (1)...(19): siRNA sense strand
aagggagaaugcuauuaau

SEQ ID NO: 2161053 - RNA, 19 nt, Homo sapiens
  misc_RNA (1)...(19): siRNA sense strand
gcucacagaacacauucga

SEQ ID NO: 2161054 - RNA, 19 nt, Homo sapiens
  misc_RNA (1)...(19): siRNA sense strand
gccaaaagccauucucuug

SEQ ID NO: 2161055 - RNA, 19 nt, Homo sapiens
  misc_RNA (1)...(19): siRNA sense strand
agagaagcccuaccagugu

SEQ ID NO: 2161056 - RNA, 19 nt, Homo sapiens
  misc_RNA (1)...(19): siRNA sense strand
ggaacaagagugggagauc

SEQ ID NO: 2161057 - RNA, 19 nt, Homo sapiens
  misc_RNA (1)...(19): siRNA sense strand
aagaagaggauugccguuu

SEQ ID NO: 2161058 - RNA, 19 nt, Homo sapiens
  misc_RNA (1)...(19): siRNA sense strand
cgaggagcccuuccagugu

SEQ ID NO: 2161059 - RNA, 19 nt, Homo sapiens
  misc_RNA (1)...(19): siRNA sense strand
guaacugugacauuugaug

SEQ ID NO: 2161060 - RNA, 19 nt, Homo sapiens
  misc_RNA (1)...(19): siRNA sense strand
cgagggaaagagagaaaga

SEQ ID NO: 2161061 - RNA, 19 nt, Homo sapiens
  misc_RNA (1)...(19): siRNA sense strand
uucgguaacugugacauuu

SEQ ID NO: 2161062 - RNA, 19 nt, Homo sapiens
  misc_RNA (1)...(19): siRNA sense strand
gagaagcgcuuucgcaaga

SEQ ID NO: 2161063 - RNA, 19 nt, Homo sapiens
  misc_RNA (1)...(19): siRNA sense strand
gagcagauguccucuucua

SEQ ID NO: 2161064 - RNA, 19 nt, Homo sapiens
  misc_RNA (1)...(19): siRNA sense strand
gacaagcgcuucagcaaga

SEQ ID NO: 2161065 - RNA, 19 nt, Homo sapiens
  misc_RNA (1)...(19): siRNA sense strand
ggagaggaguggaugauuc

SEQ ID NO: 2161066 - RNA, 19 nt, Homo sapiens
  misc_RNA (1)...(19): siRNA sense strand
ggaggaaggugcccacaca

SEQ ID NO: 2161067 - RNA, 19 nt, Homo sapiens
  misc_RNA (1)...(19): siRNA sense strand
cagcaucuaucguuacuuc

SEQ ID NO: 2161068 - RNA, 19 nt, Homo sapiens
  misc_RNA (1)...(19): siRNA sense strand
ggaaggugcccacacagaa

SEQ ID NO: 2161069 - RNA, 19 nt, Homo sapiens
  misc_RNA (1)...(19): siRNA sense strand
caccugggcucgcaccaaa

SEQ ID NO: 2161070 - RNA, 19 nt, Homo sapiens
  misc_RNA (1)...(19): siRNA sense strand
gaagguggaggacgaagau

SEQ ID NO: 2161071 - RNA, 19 nt, Homo sapiens
  misc_RNA (1)...(19): siRNA sense strand
cagaagaggaggucgaaug

SEQ ID NO: 2161072 - RNA, 19 nt, Homo sapiens
  misc_RNA (1)...(19): siRNA sense strand
gaagcgcuuucgcaagaag

SEQ ID NO: 2161073 - RNA, 19 nt, Homo sapiens
  misc_RNA (1)...(19): siRNA sense strand
gcgacaagcgcuucagcaa

SEQ ID NO: 2161074 - RNA, 19 nt, Homo sapiens
  misc_RNA (1)...(19): siRNA sense strand
gcaagcgcuucagccagaa

SEQ ID NO: 2161075 - RNA, 19 nt, Homo sapiens
  misc_RNA (1)...(19): siRNA sense strand
ggaaugcgagaagcgcuuu

SEQ ID NO: 2161076 - RNA, 19 nt, Homo sapiens
  misc_RNA (1)...(19): siRNA sense strand
gaaggugcccacacagaac

SEQ ID NO: 2161077 - RNA, 19 nt, Homo sapiens
  misc_RNA (1)...(19): siRNA sense strand
aagaagacgcacuugauuc

SEQ ID NO: 2161078 - RNA, 19 nt, Homo sapiens
  misc_RNA (1)...(19): siRNA sense strand
ggcgagcgguccuucuucu

SEQ ID NO: 2161079 - RNA, 19 nt, Homo sapiens
  misc_RNA (1)...(19): siRNA sense strand
gagaggaguggaugauucg

SEQ ID NO: 2161080 - RNA, 19 nt, Homo sapiens
  misc_RNA (1)...(19): siRNA sense strand
gagaagcgcuuucgcaaga

SEQ ID NO: 2161081 - RNA, 19 nt, Homo sapiens
  misc_RNA (1)...(19): siRNA sense strand
gagcagauguccucuucua

SEQ ID NO: 2161082 - RNA, 19 nt, Homo sapiens
  misc_RNA (1)...(19): siRNA sense strand
gacaagcgcuucagcaaga

SEQ ID NO: 2161083 - RNA, 19 nt, Homo sapiens
  misc_RNA (1)...(19): siRNA sense strand
ggagaggaguggaugauuc

SEQ ID NO: 2161084 - RNA, 19 nt, Homo sapiens
  misc_RNA (1)...(19): siRNA sense strand
ggaggaaggugcccacaca

SEQ ID NO: 2161085 - RNA, 19 nt, Homo sapiens
  misc_RNA (1)...(19): siRNA sense strand
cagcaucuaucguuacuuc

SEQ ID NO: 2161086 - RNA, 19 nt, Homo sapiens
  misc_RNA (1)...(19): siRNA sense strand
ggaaggugcccacacagaa

SEQ ID NO: 2161087 - RNA, 19 nt, Homo sapiens
  misc_RNA (1)...(19): siRNA sense strand
caccugggcucgcaccaaa

SEQ ID NO: 2161088 - RNA, 19 nt, Homo sapiens
  misc_RNA (1)...(19): siRNA sense strand
gaagguggaggacgaagau

SEQ ID NO: 2161089 - RNA, 19 nt, Homo sapiens
  misc_RNA (1)...(19): siRNA sense strand
cagaagaggaggucgaaug

SEQ ID NO: 2161090 - RNA, 19 nt, Homo sapiens
  misc_RNA (1)...(19): siRNA sense strand
gaagcgcuuucgcaagaag

SEQ ID NO: 2161091 - RNA, 19 nt, Homo sapiens
  misc_RNA (1)...(19): siRNA sense strand
gcgacaagcgcuucagcaa

SEQ ID NO: 2161092 - RNA, 19 nt, Homo sapiens
  misc_RNA (1)...(19): siRNA sense strand
gcaagcgcuucagccagaa

SEQ ID NO: 2161093 - RNA, 19 nt, Homo sapiens
  misc_RNA (1)...(19): siRNA sense strand
ggaaugcgagaagcgcuuu

SEQ ID NO: 2161094 - RNA, 19 nt, Homo sapiens
  misc_RNA (1)...(19): siRNA sense strand
gaaggugcccacacagaac

SEQ ID NO: 2161095 - RNA, 19 nt, Homo sapiens
  misc_RNA (1)...(19): siRNA sense strand
aagaagacgcacuugauuc

SEQ ID NO: 2161096 - RNA, 19 nt, Homo sapiens
  misc_RNA (1)...(19): siRNA sense strand
ggcgagcgguccuucuucu

SEQ ID NO: 2161097 - RNA, 19 nt, Homo sapiens
  misc_RNA (1)...(19): siRNA sense strand
gagaggaguggaugauucg

SEQ ID NO: 2161098 - RNA, 19 nt, Homo sapiens
  misc_RNA (1)...(19): siRNA sense strand
gggauguccugcuccaaua

SEQ ID NO: 2161099 - RNA, 19 nt, Homo sapiens
  misc_RNA (1)...(19): siRNA sense strand
gcacugcucuggaguuugc

SEQ ID NO: 2161100 - RNA, 19 nt, Homo sapiens
  misc_RNA (1)...(19): siRNA sense strand
ccaccgccgucugcuguua

SEQ ID NO: 2161101 - RNA, 19 nt, Homo sapiens
  misc_RNA (1)...(19): siRNA sense strand
gugcccagcucucggaaug

SEQ ID NO: 2161102 - RNA, 19 nt, Homo sapiens
  misc_RNA (1)...(19): siRNA sense strand
gguggggucuuucccuuua

SEQ ID NO: 2161103 - RNA, 19 nt, Homo sapiens
  misc_RNA (1)...(19): siRNA sense strand
ccgcacugcucuggaguuu

SEQ ID NO: 2161104 - RNA, 19 nt, Homo sapiens
  misc_RNA (1)...(19): siRNA sense strand
ucuggaguuugcccucuuu

SEQ ID NO: 2161105 - RNA, 19 nt, Homo sapiens
  misc_RNA (1)...(19): siRNA sense strand
gggauguccugcuccaaua

SEQ ID NO: 2161106 - RNA, 19 nt, Homo sapiens
  misc_RNA (1)...(19): siRNA sense strand
gcacugcucuggaguuugc

SEQ ID NO: 2161107 - RNA, 19 nt, Homo sapiens
  misc_RNA (1)...(19): siRNA sense strand
gggccucuauuggguuaua

SEQ ID NO: 2161108 - RNA, 19 nt, Homo sapiens
  misc_RNA (1)...(19): siRNA sense strand
gugcccagcucucggaaug

SEQ ID NO: 2161109 - RNA, 19 nt, Homo sapiens
  misc_RNA (1)...(19): siRNA sense strand
gguggggucuuucccuuua

SEQ ID NO: 2161110 - RNA, 19 nt, Homo sapiens
  misc_RNA (1)...(19): siRNA sense strand
ccgcacugcucuggaguuu

SEQ ID NO: 2161111 - RNA, 19 nt, Homo sapiens
  misc_RNA (1)...(19): siRNA sense strand
ucuggaguuugcccucuuu

SEQ ID NO: 2161112 - RNA, 19 nt, Homo sapiens
  misc_RNA (1)...(19): siRNA sense strand
gagcuacacuguccacuuu

SEQ ID NO: 2161113 - RNA, 19 nt, Homo sapiens
  misc_RNA (1)...(19): siRNA sense strand
gacacucucuucuuccuua

SEQ ID NO: 2161114 - RNA, 19 nt, Homo sapiens
  misc_RNA (1)...(19): siRNA sense strand
caaccaagaccuguacuua

SEQ ID NO: 2161115 - RNA, 19 nt, Homo sapiens
  misc_RNA (1)...(19): siRNA sense strand
gcagcaguaucgcucauuu

SEQ ID NO: 2161116 - RNA, 19 nt, Homo sapiens
  misc_RNA (1)...(19): siRNA sense strand
ccaacaagcccuacaagaa

SEQ ID NO: 2161117 - RNA, 19 nt, Homo sapiens
  misc_RNA (1)...(19): siRNA sense strand
ggagcgggcuuacagugaa

SEQ ID NO: 2161118 - RNA, 19 nt, Homo sapiens
  misc_RNA (1)...(19): siRNA sense strand
ggaugcagguggugucuca

SEQ ID NO: 2161119 - RNA, 19 nt, Homo sapiens
  misc_RNA (1)...(19): siRNA sense strand
gagcucggcuuuccugagu

SEQ ID NO: 2161120 - RNA, 19 nt, Homo sapiens
  misc_RNA (1)...(19): siRNA sense strand
caacaagcccuacaagaag

SEQ ID NO: 2161121 - RNA, 19 nt, Homo sapiens
  misc_RNA (1)...(19): siRNA sense strand
gaagggagcucggcuuucc

SEQ ID NO: 2161122 - RNA, 19 nt, Homo sapiens
  misc_RNA (1)...(19): siRNA sense strand
ucacagagcagcacaccuu

SEQ ID NO: 2161123 - RNA, 19 nt, Homo sapiens
  misc_RNA (1)...(19): siRNA sense strand
gcggagggcugcuucuaca

SEQ ID NO: 2161124 - RNA, 19 nt, Homo sapiens
  misc_RNA (1)...(19): siRNA sense strand
guccugaccucccgagcua

SEQ ID NO: 2161125 - RNA, 19 nt, Homo sapiens
  misc_RNA (1)...(19): siRNA sense strand
caaccgcugucgcaugaau

SEQ ID NO: 2161126 - RNA, 19 nt, Homo sapiens
  misc_RNA (1)...(19): siRNA sense strand
gagcgggcuuacagugaaa

SEQ ID NO: 2161127 - RNA, 19 nt, Homo sapiens
  misc_RNA (1)...(19): siRNA sense strand
gagcucggcuagaccaaag

SEQ ID NO: 2161128 - RNA, 19 nt, Homo sapiens
  misc_RNA (1)...(19): siRNA sense strand
guucaauccugcccuguca

SEQ ID NO: 2161129 - RNA, 19 nt, Homo sapiens
  misc_RNA (1)...(19): siRNA sense strand
gcucaggacucgguacauc

SEQ ID NO: 2161130 - RNA, 19 nt, Homo sapiens
  misc_RNA (1)...(19): siRNA sense strand
caugcaggaugacacauau

SEQ ID NO: 2161131 - RNA, 19 nt, Homo sapiens
  misc_RNA (1)...(19): siRNA sense strand
caguaucgcucauuugaac

SEQ ID NO: 2161132 - RNA, 19 nt, Homo sapiens
  misc_RNA (1)...(19): siRNA sense strand
ggguggaaauccuaccuau

SEQ ID NO: 2161133 - RNA, 19 nt, Homo sapiens
  misc_RNA (1)...(19): siRNA sense strand
gaacaacugcaggcucaga

SEQ ID NO: 2161134 - RNA, 19 nt, Homo sapiens
  misc_RNA (1)...(19): siRNA sense strand
cuucagcgcucuggaguug

SEQ ID NO: 2161135 - RNA, 19 nt, Homo sapiens
  misc_RNA (1)...(19): siRNA sense strand
acaccacacucucgcuuug

SEQ ID NO: 2161136 - RNA, 19 nt, Homo sapiens
  misc_RNA (1)...(19): siRNA sense strand
ccgccuggcucaugucaga

SEQ ID NO: 2161137 - RNA, 19 nt, Homo sapiens
  misc_RNA (1)...(19): siRNA sense strand
cuuggacgcugccucauug

SEQ ID NO: 2161138 - RNA, 19 nt, Homo sapiens
  misc_RNA (1)...(19): siRNA sense strand
gggcuuacagugaaauaga

SEQ ID NO: 2161139 - RNA, 19 nt, Homo sapiens
  misc_RNA (1)...(19): siRNA sense strand
gcccacggcucagugaaga

SEQ ID NO: 2161140 - RNA, 19 nt, Homo sapiens
  misc_RNA (1)...(19): siRNA sense strand
ucucagggcuccaccucuu

SEQ ID NO: 2161141 - RNA, 19 nt, Homo sapiens
  misc_RNA (1)...(19): siRNA sense strand
ucauggacguggucucgaa

SEQ ID NO: 2161142 - RNA, 19 nt, Homo sapiens
  misc_RNA (1)...(19): siRNA sense strand
gcuccagacccauuucuug

SEQ ID NO: 2161143 - RNA, 19 nt, Homo sapiens
  misc_RNA (1)...(19): siRNA sense strand
ggcuuacagugaaauagaa

SEQ ID NO: 2161144 - RNA, 19 nt, Homo sapiens
  misc_RNA (1)...(19): siRNA sense strand
cucaaccgcugucgcauga

SEQ ID NO: 2161145 - RNA, 19 nt, Homo sapiens
  misc_RNA (1)...(19): siRNA sense strand
gagcaggagcaggccaaua

SEQ ID NO: 2161146 - RNA, 19 nt, Homo sapiens
  misc_RNA (1)...(19): siRNA sense strand
gggcagaggaguucauugg

SEQ ID NO: 2161147 - RNA, 19 nt, Homo sapiens
  misc_RNA (1)...(19): siRNA sense strand
gcaguaucgcucauuugaa

SEQ ID NO: 2161148 - RNA, 19 nt, Homo sapiens
  misc_RNA (1)...(19): siRNA sense strand
ggcuggaggugauggaugu

SEQ ID NO: 2161149 - RNA, 19 nt, Homo sapiens
  misc_RNA (1)...(19): siRNA sense strand
gacuacgacugguucuuca

SEQ ID NO: 2161150 - RNA, 19 nt, Homo sapiens
  misc_RNA (1)...(19): siRNA sense strand
uguggacacucucuucuuc

SEQ ID NO: 2161151 - RNA, 19 nt, Homo sapiens
  misc_RNA (1)...(19): siRNA sense strand
guggaaauccuaccuaugc

SEQ ID NO: 2161152 - RNA, 19 nt, Homo sapiens
  misc_RNA (1)...(19): siRNA sense strand
ccgaagguacccucaugua

SEQ ID NO: 2161153 - RNA, 19 nt, Homo sapiens
  misc_RNA (1)...(19): siRNA sense strand
gaagcacccuguggacacu

SEQ ID NO: 2161154 - RNA, 19 nt, Homo sapiens
  misc_RNA (1)...(19): siRNA sense strand
ggcuauggcucucuuugag

SEQ ID NO: 2161155 - RNA, 19 nt, Homo sapiens
  misc_RNA (1)...(19): siRNA sense strand
gggcuuuggcuaccuguug

SEQ ID NO: 2161156 - RNA, 19 nt, Homo sapiens
  misc_RNA (1)...(19): siRNA sense strand
gagcaggccaauagcacuu

SEQ ID NO: 2161157 - RNA, 19 nt, Homo sapiens
  misc_RNA (1)...(19): siRNA sense strand
gcgaggagggccacagaau

SEQ ID NO: 2161158 - RNA, 19 nt, Homo sapiens
  misc_RNA (1)...(19): siRNA sense strand
gcuacacuguccacuuugg

SEQ ID NO: 2161159 - RNA, 19 nt, Homo sapiens
  misc_RNA (1)...(19): siRNA sense strand
gcaggccaauagcacuuag

SEQ ID NO: 2161160 - RNA, 19 nt, Homo sapiens
  misc_RNA (1)...(19): siRNA sense strand
gcagcucaaucggcgcuau

SEQ ID NO: 2161161 - RNA, 19 nt, Homo sapiens
  misc_RNA (1)...(19): siRNA sense strand
ucagcgcucuggaguugga

SEQ ID NO: 2161162 - RNA, 19 nt, Homo sapiens
  misc_RNA (1)...(19): siRNA sense strand
gcaucaaccaagaccugua

SEQ ID NO: 2161163 - RNA, 19 nt, Homo sapiens
  misc_RNA (1)...(19): siRNA sense strand
ucacuucccucgguuacuc

SEQ ID NO: 2161164 - RNA, 19 nt, Homo sapiens
  misc_RNA (1)...(19): siRNA sense strand
agaccaaagugaugaagac

SEQ ID NO: 2161165 - RNA, 19 nt, Homo sapiens
  misc_RNA (1)...(19): siRNA sense strand
gggcugggacuacuucaca

SEQ ID NO: 2161166 - RNA, 19 nt, Homo sapiens
  misc_RNA (1)...(19): siRNA sense strand
cgacuacgacugguucuuc

SEQ ID NO: 2161167 - RNA, 19 nt, Homo sapiens
  misc_RNA (1)...(19): siRNA sense strand
cgacugguucuucaucaug

SEQ ID NO: 2161168 - RNA, 19 nt, Homo sapiens
  misc_RNA (1)...(19): siRNA sense strand
gccacgagaacaugcauug

SEQ ID NO: 2161169 - RNA, 19 nt, Homo sapiens
  misc_RNA (1)...(19): siRNA sense strand
cacccugucuccgaaggua

SEQ ID NO: 2161170 - RNA, 19 nt, Homo sapiens
  misc_RNA (1)...(19): siRNA sense strand
accaagaccuguacuuagg

SEQ ID NO: 2161171 - RNA, 19 nt, Homo sapiens
  misc_RNA (1)...(19): siRNA sense strand
ggucuacgggccacgagaa

SEQ ID NO: 2161172 - RNA, 19 nt, Homo sapiens
  misc_RNA (1)...(19): siRNA sense strand
gaccugcuguuggaaugug

SEQ ID NO: 2161173 - RNA, 19 nt, Homo sapiens
  misc_RNA (1)...(19): siRNA sense strand
gcucccugcuccuuucaca

SEQ ID NO: 2161174 - RNA, 19 nt, Homo sapiens
  misc_RNA (1)...(19): siRNA sense strand
gcuuggacgcugccucauu

SEQ ID NO: 2161175 - RNA, 19 nt, Homo sapiens
  misc_RNA (1)...(19): siRNA sense strand
guacgguggcccaucacuu

SEQ ID NO: 2161176 - RNA, 19 nt, Homo sapiens
  misc_RNA (1)...(19): siRNA sense strand
cagggcuggugcagaaguu

SEQ ID NO: 2161177 - RNA, 19 nt, Homo sapiens
  misc_RNA (1)...(19): siRNA sense strand
cuaccuaugcccuauguca

SEQ ID NO: 2161178 - RNA, 19 nt, Homo sapiens
  misc_RNA (1)...(19): siRNA sense strand
acagugaaauagaacaacu

SEQ ID NO: 2161179 - RNA, 19 nt, Homo sapiens
  misc_RNA (1)...(19): siRNA sense strand
ggacgcugccucauugacu

SEQ ID NO: 2161180 - RNA, 19 nt, Homo sapiens
  misc_RNA (1)...(19): siRNA sense strand
gaggagggccacagaaucc

SEQ ID NO: 2161181 - RNA, 19 nt, Homo sapiens
  misc_RNA (1)...(19): siRNA sense strand
augcauugcucacccuguu

SEQ ID NO: 2161182 - RNA, 19 nt, Homo sapiens
  misc_RNA (1)...(19): siRNA sense strand
ggcuuuggcuaccuguugu

SEQ ID NO: 2161183 - RNA, 19 nt, Homo sapiens
  misc_RNA (1)...(19): siRNA sense strand
cgaggagggccacagaauc

SEQ ID NO: 2161184 - RNA, 19 nt, Homo sapiens
  misc_RNA (1)...(19): siRNA sense strand
ggacacucucuucuuccuu

SEQ ID NO: 2161185 - RNA, 19 nt, Homo sapiens
  misc_RNA (1)...(19): siRNA sense strand
ggacguggucucgaagaag

SEQ ID NO: 2161186 - RNA, 19 nt, Homo sapiens
  misc_RNA (1)...(19): siRNA sense strand
uggacguggucucgaagaa

SEQ ID NO: 2161187 - RNA, 19 nt, Homo sapiens
  misc_RNA (1)...(19): siRNA sense strand
gagccggguggaaauccua

SEQ ID NO: 2161188 - RNA, 19 nt, Homo sapiens
  misc_RNA (1)...(19): siRNA sense strand
ggaagggagcucggcuuuc

SEQ ID NO: 2161189 - RNA, 19 nt, Homo sapiens
  misc_RNA (1)...(19): siRNA sense strand
gggcagcaguaucgcucau

SEQ ID NO: 2161190 - RNA, 19 nt, Homo sapiens
  misc_RNA (1)...(19): siRNA sense strand
ggagggcugcuucuacaac

SEQ ID NO: 2161191 - RNA, 19 nt, Homo sapiens
  misc_RNA (1)...(19): siRNA sense strand
cagcaguaucgcucauuug

SEQ ID NO: 2161192 - RNA, 19 nt, Homo sapiens
  misc_RNA (1)...(19): siRNA sense strand
gcucagugaagaacucuac

SEQ ID NO: 2161193 - RNA, 19 nt, Homo sapiens
  misc_RNA (1)...(19): siRNA sense strand
aauccuaccuaugcccuau

SEQ ID NO: 2161194 - RNA, 19 nt, Homo sapiens
  misc_RNA (1)...(19): siRNA sense strand
gguggaaauccuaccuaug

SEQ ID NO: 2161195 - RNA, 19 nt, Homo sapiens
  misc_RNA (1)...(19): siRNA sense strand
cuccgaagguacccucaug

SEQ ID NO: 2161196 - RNA, 19 nt, Homo sapiens
  misc_RNA (1)...(19): siRNA sense strand
gagcuacacuguccacuuu

SEQ ID NO: 2161197 - RNA, 19 nt, Homo sapiens
  misc_RNA (1)...(19): siRNA sense strand
gacacucucuucuuccuua

SEQ ID NO: 2161198 - RNA, 19 nt, Homo sapiens
  misc_RNA (1)...(19): siRNA sense strand
caaccaagaccuguacuua

SEQ ID NO: 2161199 - RNA, 19 nt, Homo sapiens
  misc_RNA (1)...(19): siRNA sense strand
gcagcaguaucgcucauuu

SEQ ID NO: 2161200 - RNA, 19 nt, Homo sapiens
  misc_RNA (1)...(19): siRNA sense strand
ccaacaagcccuacaagaa

SEQ ID NO: 2161201 - RNA, 19 nt, Homo sapiens
  misc_RNA (1)...(19): siRNA sense strand
ggagcgggcuuacagugaa

SEQ ID NO: 2161202 - RNA, 19 nt, Homo sapiens
  misc_RNA (1)...(19): siRNA sense strand
ggaugcagguggugucuca

SEQ ID NO: 2161203 - RNA, 19 nt, Homo sapiens
  misc_RNA (1)...(19): siRNA sense strand
gagcucggcuuuccugagu

SEQ ID NO: 2161204 - RNA, 19 nt, Homo sapiens
  misc_RNA (1)...(19): siRNA sense strand
caacaagcccuacaagaag

SEQ ID NO: 2161205 - RNA, 19 nt, Homo sapiens
  misc_RNA (1)...(19): siRNA sense strand
gaagggagcucggcuuucc

SEQ ID NO: 2161206 - RNA, 19 nt, Homo sapiens
  misc_RNA (1)...(19): siRNA sense strand
ucacagagcagcacaccuu

SEQ ID NO: 2161207 - RNA, 19 nt, Homo sapiens
  misc_RNA (1)...(19): siRNA sense strand
gcggagggcugcuucuaca

SEQ ID NO: 2161208 - RNA, 19 nt, Homo sapiens
  misc_RNA (1)...(19): siRNA sense strand
guccugaccucccgagcua

SEQ ID NO: 2161209 - RNA, 19 nt, Homo sapiens
  misc_RNA (1)...(19): siRNA sense strand
caaccgcugucgcaugaau

SEQ ID NO: 2161210 - RNA, 19 nt, Homo sapiens
  misc_RNA (1)...(19): siRNA sense strand
gagcgggcuuacagugaaa

SEQ ID NO: 2161211 - RNA, 19 nt, Homo sapiens
  misc_RNA (1)...(19): siRNA sense strand
gagcucggcuagaccaaag

SEQ ID NO: 2161212 - RNA, 19 nt, Homo sapiens
  misc_RNA (1)...(19): siRNA sense strand
guucaauccugcccuguca

SEQ ID NO: 2161213 - RNA, 19 nt, Homo sapiens
  misc_RNA (1)...(19): siRNA sense strand
gcucaggacucgguacauc

SEQ ID NO: 2161214 - RNA, 19 nt, Homo sapiens
  misc_RNA (1)...(19): siRNA sense strand
caugcaggaugacacauau

SEQ ID NO: 2161215 - RNA, 19 nt, Homo sapiens
  misc_RNA (1)...(19): siRNA sense strand
caguaucgcucauuugaac

SEQ ID NO: 2161216 - RNA, 19 nt, Homo sapiens
  misc_RNA (1)...(19): siRNA sense strand
ggguggaaauccuaccuau

SEQ ID NO: 2161217 - RNA, 19 nt, Homo sapiens
  misc_RNA (1)...(19): siRNA sense strand
gaacaacugcaggcucaga

SEQ ID NO: 2161218 - RNA, 19 nt, Homo sapiens
  misc_RNA (1)...(19): siRNA sense strand
cuucagcgcucuggaguug

SEQ ID NO: 2161219 - RNA, 19 nt, Homo sapiens
  misc_RNA (1)...(19): siRNA sense strand
acaccacacucucgcuuug

SEQ ID NO: 2161220 - RNA, 19 nt, Homo sapiens
  misc_RNA (1)...(19): siRNA sense strand
ccgccuggcucaugucaga

SEQ ID NO: 2161221 - RNA, 19 nt, Homo sapiens
  misc_RNA (1)...(19): siRNA sense strand
cuuggacgcugccucauug

SEQ ID NO: 2161222 - RNA, 19 nt, Homo sapiens
  misc_RNA (1)...(19): siRNA sense strand
gggcuuacagugaaauaga

SEQ ID NO: 2161223 - RNA, 19 nt, Homo sapiens
  misc_RNA (1)...(19): siRNA sense strand
gcccacggcucagugaaga

SEQ ID NO: 2161224 - RNA, 19 nt, Homo sapiens
  misc_RNA (1)...(19): siRNA sense strand
ucucagggcuccaccucuu

SEQ ID NO: 2161225 - RNA, 19 nt, Homo sapiens
  misc_RNA (1)...(19): siRNA sense strand
ucauggacguggucucgaa

SEQ ID NO: 2161226 - RNA, 19 nt, Homo sapiens
  misc_RNA (1)...(19): siRNA sense strand
gcuccagacccauuucuug

SEQ ID NO: 2161227 - RNA, 19 nt, Homo sapiens
  misc_RNA (1)...(19): siRNA sense strand
ggcuuacagugaaauagaa

SEQ ID NO: 2161228 - RNA, 19 nt, Homo sapiens
  misc_RNA (1)...(19): siRNA sense strand
cucaaccgcugucgcauga

SEQ ID NO: 2161229 - RNA, 19 nt, Homo sapiens
  misc_RNA (1)...(19): siRNA sense strand
gagcaggagcaggccaaua

SEQ ID NO: 2161230 - RNA, 19 nt, Homo sapiens
  misc_RNA (1)...(19): siRNA sense strand
gggcagaggaguucauugg

SEQ ID NO: 2161231 - RNA, 19 nt, Homo sapiens
  misc_RNA (1)...(19): siRNA sense strand
gcaguaucgcucauuugaa

SEQ ID NO: 2161232 - RNA, 19 nt, Homo sapiens
  misc_RNA (1)...(19): siRNA sense strand
ggcuggaggugauggaugu

SEQ ID NO: 2161233 - RNA, 19 nt, Homo sapiens
  misc_RNA (1)...(19): siRNA sense strand
gacuacgacugguucuuca

SEQ ID NO: 2161234 - RNA, 19 nt, Homo sapiens
  misc_RNA (1)...(19): siRNA sense strand
uguggacacucucuucuuc

SEQ ID NO: 2161235 - RNA, 19 nt, Homo sapiens
  misc_RNA (1)...(19): siRNA sense strand
guggaaauccuaccuaugc

SEQ ID NO: 2161236 - RNA, 19 nt, Homo sapiens
  misc_RNA (1)...(19): siRNA sense strand
ccgaagguacccucaugua

SEQ ID NO: 2161237 - RNA, 19 nt, Homo sapiens
  misc_RNA (1)...(19): siRNA sense strand
gaagcacccuguggacacu

SEQ ID NO: 2161238 - RNA, 19 nt, Homo sapiens
  misc_RNA (1)...(19): siRNA sense strand
ggcuauggcucucuuugag

SEQ ID NO: 2161239 - RNA, 19 nt, Homo sapiens
  misc_RNA (1)...(19): siRNA sense strand
gggcuuuggcuaccuguug

SEQ ID NO: 2161240 - RNA, 19 nt, Homo sapiens
  misc_RNA (1)...(19): siRNA sense strand
gagcaggccaauagcacuu

SEQ ID NO: 2161241 - RNA, 19 nt, Homo sapiens
  misc_RNA (1)...(19): siRNA sense strand
gcgaggagggccacagaau

SEQ ID NO: 2161242 - RNA, 19 nt, Homo sapiens
  misc_RNA (1)...(19): siRNA sense strand
gcuacacuguccacuuugg

SEQ ID NO: 2161243 - RNA, 19 nt, Homo sapiens
  misc_RNA (1)...(19): siRNA sense strand
gcaggccaauagcacuuag

SEQ ID NO: 2161244 - RNA, 19 nt, Homo sapiens
  misc_RNA (1)...(19): siRNA sense strand
gcagcucaaucggcgcuau

SEQ ID NO: 2161245 - RNA, 19 nt, Homo sapiens
  misc_RNA (1)...(19): siRNA sense strand
ucagcgcucuggaguugga

SEQ ID NO: 2161246 - RNA, 19 nt, Homo sapiens
  misc_RNA (1)...(19): siRNA sense strand
gcaucaaccaagaccugua

SEQ ID NO: 2161247 - RNA, 19 nt, Homo sapiens
  misc_RNA (1)...(19): siRNA sense strand
ucacuucccucgguuacuc

SEQ ID NO: 2161248 - RNA, 19 nt, Homo sapiens
  misc_RNA (1)...(19): siRNA sense strand
agaccaaagugaugaagac

SEQ ID NO: 2161249 - RNA, 19 nt, Homo sapiens
  misc_RNA (1)...(19): siRNA sense strand
gggcugggacuacuucaca

SEQ ID NO: 2161250 - RNA, 19 nt, Homo sapiens
  misc_RNA (1)...(19): siRNA sense strand
cgacuacgacugguucuuc

SEQ ID NO: 2161251 - RNA, 19 nt, Homo sapiens
  misc_RNA (1)...(19): siRNA sense strand
cgacugguucuucaucaug

SEQ ID NO: 2161252 - RNA, 19 nt, Homo sapiens
  misc_RNA (1)...(19): siRNA sense strand
gccacgagaacaugcauug

SEQ ID NO: 2161253 - RNA, 19 nt, Homo sapiens
  misc_RNA (1)...(19): siRNA sense strand
cacccugucuccgaaggua

SEQ ID NO: 2161254 - RNA, 19 nt, Homo sapiens
  misc_RNA (1)...(19): siRNA sense strand
accaagaccuguacuuagg

SEQ ID NO: 2161255 - RNA, 19 nt, Homo sapiens
  misc_RNA (1)...(19): siRNA sense strand
ggucuacgggccacgagaa

SEQ ID NO: 2161256 - RNA, 19 nt, Homo sapiens
  misc_RNA (1)...(19): siRNA sense strand
gaccugcuguuggaaugug

SEQ ID NO: 2161257 - RNA, 19 nt, Homo sapiens
  misc_RNA (1)...(19): siRNA sense strand
gcucccugcuccuuucaca

SEQ ID NO: 2161258 - RNA, 19 nt, Homo sapiens
  misc_RNA (1)...(19): siRNA sense strand
gcuuggacgcugccucauu

SEQ ID NO: 2161259 - RNA, 19 nt, Homo sapiens
  misc_RNA (1)...(19): siRNA sense strand
guacgguggcccaucacuu

SEQ ID NO: 2161260 - RNA, 19 nt, Homo sapiens
  misc_RNA (1)...(19): siRNA sense strand
cagggcuggugcagaaguu

SEQ ID NO: 2161261 - RNA, 19 nt, Homo sapiens
  misc_RNA (1)...(19): siRNA sense strand
cuaccuaugcccuauguca

SEQ ID NO: 2161262 - RNA, 19 nt, Homo sapiens
  misc_RNA (1)...(19): siRNA sense strand
acagugaaauagaacaacu

SEQ ID NO: 2161263 - RNA, 19 nt, Homo sapiens
  misc_RNA (1)...(19): siRNA sense strand
ggacgcugccucauugacu

SEQ ID NO: 2161264 - RNA, 19 nt, Homo sapiens
  misc_RNA (1)...(19): siRNA sense strand
gaggagggccacagaaucc

SEQ ID NO: 2161265 - RNA, 19 nt, Homo sapiens
  misc_RNA (1)...(19): siRNA sense strand
augcauugcucacccuguu

SEQ ID NO: 2161266 - RNA, 19 nt, Homo sapiens
  misc_RNA (1)...(19): siRNA sense strand
ggcuuuggcuaccuguugu

SEQ ID NO: 2161267 - RNA, 19 nt, Homo sapiens
  misc_RNA (1)...(19): siRNA sense strand
cgaggagggccacagaauc

SEQ ID NO: 2161268 - RNA, 19 nt, Homo sapiens
  misc_RNA (1)...(19): siRNA sense strand
ggacacucucuucuuccuu

SEQ ID NO: 2161269 - RNA, 19 nt, Homo sapiens
  misc_RNA (1)...(19): siRNA sense strand
ggacguggucucgaagaag

SEQ ID NO: 2161270 - RNA, 19 nt, Homo sapiens
  misc_RNA (1)...(19): siRNA sense strand
uggacguggucucgaagaa

SEQ ID NO: 2161271 - RNA, 19 nt, Homo sapiens
  misc_RNA (1)...(19): siRNA sense strand
gagccggguggaaauccua

SEQ ID NO: 2161272 - RNA, 19 nt, Homo sapiens
  misc_RNA (1)...(19): siRNA sense strand
ggaagggagcucggcuuuc

SEQ ID NO: 2161273 - RNA, 19 nt, Homo sapiens
  misc_RNA (1)...(19): siRNA sense strand
gggcagcaguaucgcucau

SEQ ID NO: 2161274 - RNA, 19 nt, Homo sapiens
  misc_RNA (1)...(19): siRNA sense strand
ggagggcugcuucuacaac

SEQ ID NO: 2161275 - RNA, 19 nt, Homo sapiens
  misc_RNA (1)...(19): siRNA sense strand
cagcaguaucgcucauuug

SEQ ID NO: 2161276 - RNA, 19 nt, Homo sapiens
  misc_RNA (1)...(19): siRNA sense strand
gcucagugaagaacucuac

SEQ ID NO: 2161277 - RNA, 19 nt, Homo sapiens
  misc_RNA (1)...(19): siRNA sense strand
aauccuaccuaugcccuau

SEQ ID NO: 2161278 - RNA, 19 nt, Homo sapiens
  misc_RNA (1)...(19): siRNA sense strand
gguggaaauccuaccuaug

SEQ ID NO: 2161279 - RNA, 19 nt, Homo sapiens
  misc_RNA (1)...(19): siRNA sense strand
cuccgaagguacccucaug

SEQ ID NO: 2161280 - RNA, 19 nt, Homo sapiens
  misc_RNA (1)...(19): siRNA sense strand
ggccacacauucaucauca

SEQ ID NO: 2161281 - RNA, 19 nt, Homo sapiens
  misc_RNA (1)...(19): siRNA sense strand
acacauucaucaucaacug

SEQ ID NO: 2161282 - RNA, 19 nt, Homo sapiens
  misc_RNA (1)...(19): siRNA sense strand
ucucgcggcucuucagcaa

SEQ ID NO: 2161283 - RNA, 19 nt, Homo sapiens
  misc_RNA (1)...(19): siRNA sense strand
ucgcggcucuucagcaaca

SEQ ID NO: 2161284 - RNA, 19 nt, Homo sapiens
  misc_RNA (1)...(19): siRNA sense strand
cgucgcaggcgucugguuu

SEQ ID NO: 2161285 - RNA, 19 nt, Homo sapiens
  misc_RNA (1)...(19): siRNA sense strand
gugcagugcugugccuagu

SEQ ID NO: 2161286 - RNA, 19 nt, Homo sapiens
  misc_RNA (1)...(19): siRNA sense strand
gccacacauucaucaucaa

SEQ ID NO: 2161287 - RNA, 19 nt, Homo sapiens
  misc_RNA (1)...(19): siRNA sense strand
ggccacacauucaucauca

SEQ ID NO: 2161288 - RNA, 19 nt, Homo sapiens
  misc_RNA (1)...(19): siRNA sense strand
gcagaugucccgggaguuc

SEQ ID NO: 2161289 - RNA, 19 nt, Homo sapiens
  misc_RNA (1)...(19): siRNA sense strand
acacauucaucaucaacug

SEQ ID NO: 2161290 - RNA, 19 nt, Homo sapiens
  misc_RNA (1)...(19): siRNA sense strand
ucugccagcuggaggauga

SEQ ID NO: 2161291 - RNA, 19 nt, Homo sapiens
  misc_RNA (1)...(19): siRNA sense strand
aaagcuaugugaccuucug

SEQ ID NO: 2161292 - RNA, 19 nt, Homo sapiens
  misc_RNA (1)...(19): siRNA sense strand
ucucgcggcucuucagcaa

SEQ ID NO: 2161293 - RNA, 19 nt, Homo sapiens
  misc_RNA (1)...(19): siRNA sense strand
ucgcggcucuucagcaaca

SEQ ID NO: 2161294 - RNA, 19 nt, Homo sapiens
  misc_RNA (1)...(19): siRNA sense strand
ggucuggaguguggacaag

SEQ ID NO: 2161295 - RNA, 19 nt, Homo sapiens
  misc_RNA (1)...(19): siRNA sense strand
gccaacaaccagcucuuca

SEQ ID NO: 2161296 - RNA, 19 nt, Homo sapiens
  misc_RNA (1)...(19): siRNA sense strand
gugcagugcugugccuagu

SEQ ID NO: 2161297 - RNA, 19 nt, Homo sapiens
  misc_RNA (1)...(19): siRNA sense strand
gccacacauucaucaucaa

SEQ ID NO: 2161298 - RNA, 19 nt, Homo sapiens
  misc_RNA (1)...(19): siRNA sense strand
ggccacacauucaucauca

SEQ ID NO: 2161299 - RNA, 19 nt, Homo sapiens
  misc_RNA (1)...(19): siRNA sense strand
gcagaugucccgggaguuc

SEQ ID NO: 2161300 - RNA, 19 nt, Homo sapiens
  misc_RNA (1)...(19): siRNA sense strand
acacauucaucaucaacug

SEQ ID NO: 2161301 - RNA, 19 nt, Homo sapiens
  misc_RNA (1)...(19): siRNA sense strand
ucugccagcuggaggauga

SEQ ID NO: 2161302 - RNA, 19 nt, Homo sapiens
  misc_RNA (1)...(19): siRNA sense strand
aaagcuaugugaccuucug

SEQ ID NO: 2161303 - RNA, 19 nt, Homo sapiens
  misc_RNA (1)...(19): siRNA sense strand
ucucgcggcucuucagcaa

SEQ ID NO: 2161304 - RNA, 19 nt, Homo sapiens
  misc_RNA (1)...(19): siRNA sense strand
ucgcggcucuucagcaaca

SEQ ID NO: 2161305 - RNA, 19 nt, Homo sapiens
  misc_RNA (1)...(19): siRNA sense strand
ggucuggaguguggacaag

SEQ ID NO: 2161306 - RNA, 19 nt, Homo sapiens
  misc_RNA (1)...(19): siRNA sense strand
gccaacaaccagcucuuca

SEQ ID NO: 2161307 - RNA, 19 nt, Homo sapiens
  misc_RNA (1)...(19): siRNA sense strand
gugcagugcugugccuagu

SEQ ID NO: 2161308 - RNA, 19 nt, Homo sapiens
  misc_RNA (1)...(19): siRNA sense strand
gccacacauucaucaucaa

SEQ ID NO: 2161309 - RNA, 19 nt, Homo sapiens
  misc_RNA (1)...(19): siRNA sense strand
gcacagaccugcacaaguu

SEQ ID NO: 2161310 - RNA, 19 nt, Homo sapiens
  misc_RNA (1)...(19): siRNA sense strand
ggagauaucuggaaguuga

SEQ ID NO: 2161311 - RNA, 19 nt, Homo sapiens
  misc_RNA (1)...(19): siRNA sense strand
ggacacaacugaaaccaaa

SEQ ID NO: 2161312 - RNA, 19 nt, Homo sapiens
  misc_RNA (1)...(19): siRNA sense strand
uaaacaagauccaugcaua

SEQ ID NO: 2161313 - RNA, 19 nt, Homo sapiens
  misc_RNA (1)...(19): siRNA sense strand
gaagaaacccagucguaua

SEQ ID NO: 2161314 - RNA, 19 nt, Homo sapiens
  misc_RNA (1)...(19): siRNA sense strand
caaacaaccuauccuguga

SEQ ID NO: 2161315 - RNA, 19 nt, Homo sapiens
  misc_RNA (1)...(19): siRNA sense strand
gaaacccagucguauauau

SEQ ID NO: 2161316 - RNA, 19 nt, Homo sapiens
  misc_RNA (1)...(19): siRNA sense strand
gggaggaaauugcaacaaa

SEQ ID NO: 2161317 - RNA, 19 nt, Homo sapiens
  misc_RNA (1)...(19): siRNA sense strand
gaacauccaugaaaacaaa

SEQ ID NO: 2161318 - RNA, 19 nt, Homo sapiens
  misc_RNA (1)...(19): siRNA sense strand
guacaaccggcuauauuua

SEQ ID NO: 2161319 - RNA, 19 nt, Homo sapiens
  misc_RNA (1)...(19): siRNA sense strand
gcauauuccuuaaacaaga

SEQ ID NO: 2161320 - RNA, 19 nt, Homo sapiens
  misc_RNA (1)...(19): siRNA sense strand
uaacccagauuaugaugaa

SEQ ID NO: 2161321 - RNA, 19 nt, Homo sapiens
  misc_RNA (1)...(19): siRNA sense strand
ggaauuggcaucuauguca

SEQ ID NO: 2161322 - RNA, 19 nt, Homo sapiens
  misc_RNA (1)...(19): siRNA sense strand
gggcacagauggcuacaug

SEQ ID NO: 2161323 - RNA, 19 nt, Homo sapiens
  misc_RNA (1)...(19): siRNA sense strand
cauacaaccuugaaacgaa

SEQ ID NO: 2161324 - RNA, 19 nt, Homo sapiens
  misc_RNA (1)...(19): siRNA sense strand
gaagagaggauuuacaucu

SEQ ID NO: 2161325 - RNA, 19 nt, Homo sapiens
  misc_RNA (1)...(19): siRNA sense strand
caaccuauccugugaucua

SEQ ID NO: 2161326 - RNA, 19 nt, Homo sapiens
  misc_RNA (1)...(19): siRNA sense strand
gggagggccugauaaugaa

SEQ ID NO: 2161327 - RNA, 19 nt, Homo sapiens
  misc_RNA (1)...(19): siRNA sense strand
gauaauaccaaccuauaug

SEQ ID NO: 2161328 - RNA, 19 nt, Homo sapiens
  misc_RNA (1)...(19): siRNA sense strand
gggaagaaacccagucgua

SEQ ID NO: 2161329 - RNA, 19 nt, Homo sapiens
  misc_RNA (1)...(19): siRNA sense strand
gguacaaccggcuauauuu

SEQ ID NO: 2161330 - RNA, 19 nt, Homo sapiens
  misc_RNA (1)...(19): siRNA sense strand
ggacugggucauuguuuaa

SEQ ID NO: 2161331 - RNA, 19 nt, Homo sapiens
  misc_RNA (1)...(19): siRNA sense strand
caacaaaaccccaugaaaa

SEQ ID NO: 2161332 - RNA, 19 nt, Homo sapiens
  misc_RNA (1)...(19): siRNA sense strand
cagauaauaccaaccuaua

SEQ ID NO: 2161333 - RNA, 19 nt, Homo sapiens
  misc_RNA (1)...(19): siRNA sense strand
ggaagaaacccagucguau

SEQ ID NO: 2161334 - RNA, 19 nt, Homo sapiens
  misc_RNA (1)...(19): siRNA sense strand
ucagggaacucuggaggua

SEQ ID NO: 2161335 - RNA, 19 nt, Homo sapiens
  misc_RNA (1)...(19): siRNA sense strand
gaggugauccugggagaua

SEQ ID NO: 2161336 - RNA, 19 nt, Homo sapiens
  misc_RNA (1)...(19): siRNA sense strand
caaacggacugggucauug

SEQ ID NO: 2161337 - RNA, 19 nt, Homo sapiens
  misc_RNA (1)...(19): siRNA sense strand
ggacagcauauuccuuaaa

SEQ ID NO: 2161338 - RNA, 19 nt, Homo sapiens
  misc_RNA (1)...(19): siRNA sense strand
cggacugggucauuguuua

SEQ ID NO: 2161339 - RNA, 19 nt, Homo sapiens
  misc_RNA (1)...(19): siRNA sense strand
ugccagagccaguuuauuu

SEQ ID NO: 2161340 - RNA, 19 nt, Homo sapiens
  misc_RNA (1)...(19): siRNA sense strand
guccauguguguaauguga

SEQ ID NO: 2161341 - RNA, 19 nt, Homo sapiens
  misc_RNA (1)...(19): siRNA sense strand
caaccuauauguguuugga

SEQ ID NO: 2161342 - RNA, 19 nt, Homo sapiens
  misc_RNA (1)...(19): siRNA sense strand
gcaaaccucucccgaacac

SEQ ID NO: 2161343 - RNA, 19 nt, Homo sapiens
  misc_RNA (1)...(19): siRNA sense strand
caagauccaugcauacaac

SEQ ID NO: 2161344 - RNA, 19 nt, Homo sapiens
  misc_RNA (1)...(19): siRNA sense strand
caaguuagaucucaauacc

SEQ ID NO: 2161345 - RNA, 19 nt, Homo sapiens
  misc_RNA (1)...(19): siRNA sense strand
gcagauaauaccaaccuau

SEQ ID NO: 2161346 - RNA, 19 nt, Homo sapiens
  misc_RNA (1)...(19): siRNA sense strand
aguugaaucugcagacuuu

SEQ ID NO: 2161347 - RNA, 19 nt, Homo sapiens
  misc_RNA (1)...(19): siRNA sense strand
ggaggaaauugcaacaaaa

SEQ ID NO: 2161348 - RNA, 19 nt, Homo sapiens
  misc_RNA (1)...(19): siRNA sense strand
agagaggauuuacaucuug

SEQ ID NO: 2161349 - RNA, 19 nt, Homo sapiens
  misc_RNA (1)...(19): siRNA sense strand
gaacucuggagguaucauu

SEQ ID NO: 2161350 - RNA, 19 nt, Homo sapiens
  misc_RNA (1)...(19): siRNA sense strand
cgggagggccugauaauga

SEQ ID NO: 2161351 - RNA, 19 nt, Homo sapiens
  misc_RNA (1)...(19): siRNA sense strand
gacagcauauuccuuaaac

SEQ ID NO: 2161352 - RNA, 19 nt, Homo sapiens
  misc_RNA (1)...(19): siRNA sense strand
cagcauauuccuuaaacaa

SEQ ID NO: 2161353 - RNA, 19 nt, Homo sapiens
  misc_RNA (1)...(19): siRNA sense strand
gaaucgggagggccugaua

SEQ ID NO: 2161354 - RNA, 19 nt, Homo sapiens
  misc_RNA (1)...(19): siRNA sense strand
gcacaaguuagaucucaau

SEQ ID NO: 2161355 - RNA, 19 nt, Homo sapiens
  misc_RNA (1)...(19): siRNA sense strand
caacggcaaugacguccau

SEQ ID NO: 2161356 - RNA, 19 nt, Homo sapiens
  misc_RNA (1)...(19): siRNA sense strand
guacgggcaucccauuugg

SEQ ID NO: 2161357 - RNA, 19 nt, Homo sapiens
  misc_RNA (1)...(19): siRNA sense strand
ggagagagcaacggcaaug

SEQ ID NO: 2161358 - RNA, 19 nt, Homo sapiens
  misc_RNA (1)...(19): siRNA sense strand
ggacucaucgaacgcuuga

SEQ ID NO: 2161359 - RNA, 19 nt, Homo sapiens
  misc_RNA (1)...(19): siRNA sense strand
ccugugaucuaccagaaga

SEQ ID NO: 2161360 - RNA, 19 nt, Homo sapiens
  misc_RNA (1)...(19): siRNA sense strand
cagaagagaggauuuacau

SEQ ID NO: 2161361 - RNA, 19 nt, Homo sapiens
  misc_RNA (1)...(19): siRNA sense strand
ggucauuguuuaagaucug

SEQ ID NO: 2161362 - RNA, 19 nt, Homo sapiens
  misc_RNA (1)...(19): siRNA sense strand
gaaguugaaucugcagacu

SEQ ID NO: 2161363 - RNA, 19 nt, Homo sapiens
  misc_RNA (1)...(19): siRNA sense strand
uauauguguuuggagguua

SEQ ID NO: 2161364 - RNA, 19 nt, Homo sapiens
  misc_RNA (1)...(19): siRNA sense strand
caucgaacgcuugaaauga

SEQ ID NO: 2161365 - RNA, 19 nt, Homo sapiens
  misc_RNA (1)...(19): siRNA sense strand
cuggacagcauauuccuua

SEQ ID NO: 2161366 - RNA, 19 nt, Homo sapiens
  misc_RNA (1)...(19): siRNA sense strand
aagaaacccagucguauau

SEQ ID NO: 2161367 - RNA, 19 nt, Homo sapiens
  misc_RNA (1)...(19): siRNA sense strand
uauaagagaugggcuuugc

SEQ ID NO: 2161368 - RNA, 19 nt, Homo sapiens
  misc_RNA (1)...(19): siRNA sense strand
ggagguacaaccggcuaua

SEQ ID NO: 2161369 - RNA, 19 nt, Homo sapiens
  misc_RNA (1)...(19): siRNA sense strand
gaaguggacaucguugugu

SEQ ID NO: 2161370 - RNA, 19 nt, Homo sapiens
  misc_RNA (1)...(19): siRNA sense strand
guggugaacauccaugaaa

SEQ ID NO: 2161371 - RNA, 19 nt, Homo sapiens
  misc_RNA (1)...(19): siRNA sense strand
caucaauggcucccuuuau

SEQ ID NO: 2161372 - RNA, 19 nt, Homo sapiens
  misc_RNA (1)...(19): siRNA sense strand
gcuauggccaucaucaaug

SEQ ID NO: 2161373 - RNA, 19 nt, Homo sapiens
  misc_RNA (1)...(19): siRNA sense strand
ugggagauaucuggaaguu

SEQ ID NO: 2161374 - RNA, 19 nt, Homo sapiens
  misc_RNA (1)...(19): siRNA sense strand
gcauacaaccuugaaacga

SEQ ID NO: 2161375 - RNA, 19 nt, Homo sapiens
  misc_RNA (1)...(19): siRNA sense strand
gguacgggcaucccauuug

SEQ ID NO: 2161376 - RNA, 19 nt, Homo sapiens
  misc_RNA (1)...(19): siRNA sense strand
auaccaaccuauauguguu

SEQ ID NO: 2161377 - RNA, 19 nt, Homo sapiens
  misc_RNA (1)...(19): siRNA sense strand
guacuuccuggacagcaua

SEQ ID NO: 2161378 - RNA, 19 nt, Homo sapiens
  misc_RNA (1)...(19): siRNA sense strand
gagaguggacacaacugaa

SEQ ID NO: 2161379 - RNA, 19 nt, Homo sapiens
  misc_RNA (1)...(19): siRNA sense strand
aucaauggcucccuuuaug

SEQ ID NO: 2161380 - RNA, 19 nt, Homo sapiens
  misc_RNA (1)...(19): siRNA sense strand
uaccagaagagaggauuua

SEQ ID NO: 2161381 - RNA, 19 nt, Homo sapiens
  misc_RNA (1)...(19): siRNA sense strand
gaggaguggugaacaucca

SEQ ID NO: 2161382 - RNA, 19 nt, Homo sapiens
  misc_RNA (1)...(19): siRNA sense strand
uggcaucuaugucacuugu

SEQ ID NO: 2161383 - RNA, 19 nt, Homo sapiens
  misc_RNA (1)...(19): siRNA sense strand
gcaacaaaaccccaugaaa

SEQ ID NO: 2161384 - RNA, 19 nt, Homo sapiens
  misc_RNA (1)...(19): siRNA sense strand
ggccugauaaugaagacua

SEQ ID NO: 2161385 - RNA, 19 nt, Homo sapiens
  misc_RNA (1)...(19): siRNA sense strand
ucacuugugcugcauggaa

SEQ ID NO: 2161386 - RNA, 19 nt, Homo sapiens
  misc_RNA (1)...(19): siRNA sense strand
cuuuaugucuuuggaggua

SEQ ID NO: 2161387 - RNA, 19 nt, Homo sapiens
  misc_RNA (1)...(19): siRNA sense strand
gagagagcaacggcaauga

SEQ ID NO: 2161388 - RNA, 19 nt, Homo sapiens
  misc_RNA (1)...(19): siRNA sense strand
auacaaccuugaaacgaau

SEQ ID NO: 2161389 - RNA, 19 nt, Homo sapiens
  misc_RNA (1)...(19): siRNA sense strand
acaaccggcuauauuuaca

SEQ ID NO: 2161390 - RNA, 19 nt, Homo sapiens
  misc_RNA (1)...(19): siRNA sense strand
gacaggcuauggccaucau

SEQ ID NO: 2161391 - RNA, 19 nt, Homo sapiens
  misc_RNA (1)...(19): siRNA sense strand
ccaguggcgaccagaaauu

SEQ ID NO: 2161392 - RNA, 19 nt, Homo sapiens
  misc_RNA (1)...(19): siRNA sense strand
gagguacaaccggcuauau

SEQ ID NO: 2161393 - RNA, 19 nt, Homo sapiens
  misc_RNA (1)...(19): siRNA sense strand
ggcaaugacguccaugugu

SEQ ID NO: 2161394 - RNA, 19 nt, Homo sapiens
  misc_RNA (1)...(19): siRNA sense strand
gagguacgggcaucccauu

SEQ ID NO: 2161395 - RNA, 19 nt, Homo sapiens
  misc_RNA (1)...(19): siRNA sense strand
guaaugugaaguauaagag

SEQ ID NO: 2161396 - RNA, 19 nt, Homo sapiens
  misc_RNA (1)...(19): siRNA sense strand
aaugaagacuauccucucu

SEQ ID NO: 2161397 - RNA, 19 nt, Homo sapiens
  misc_RNA (1)...(19): siRNA sense strand
acgaaugccugggaggaaa

SEQ ID NO: 2161398 - RNA, 19 nt, Homo sapiens
  misc_RNA (1)...(19): siRNA sense strand
ggcagauaauaccaaccua

SEQ ID NO: 2161399 - RNA, 19 nt, Homo sapiens
  misc_RNA (1)...(19): siRNA sense strand
agaguggacacaacugaaa

SEQ ID NO: 2161400 - RNA, 19 nt, Homo sapiens
  misc_RNA (1)...(19): siRNA sense strand
uggcucccuuuaugucuuu

SEQ ID NO: 2161401 - RNA, 19 nt, Homo sapiens
  misc_RNA (1)...(19): siRNA sense strand
ugacguccauguguguaau

SEQ ID NO: 2161402 - RNA, 19 nt, Homo sapiens
  misc_RNA (1)...(19): siRNA sense strand
aaaccucucccgaacacaa

SEQ ID NO: 2161403 - RNA, 19 nt, Homo sapiens
  misc_RNA (1)...(19): siRNA sense strand
uaagaucuggcugguggua

SEQ ID NO: 2161404 - RNA, 19 nt, Homo sapiens
  misc_RNA (1)...(19): siRNA sense strand
cuauauguguuuggagguu

SEQ ID NO: 2161405 - RNA, 19 nt, Homo sapiens
  misc_RNA (1)...(19): siRNA sense strand
gauccaugcauacaaccuu

SEQ ID NO: 2161406 - RNA, 19 nt, Homo sapiens
  misc_RNA (1)...(19): siRNA sense strand
aaacaagauccaugcauac

SEQ ID NO: 2161407 - RNA, 19 nt, Homo sapiens
  misc_RNA (1)...(19): siRNA sense strand
ucaauggcucccuuuaugu

SEQ ID NO: 2161408 - RNA, 19 nt, Homo sapiens
  misc_RNA (1)...(19): siRNA sense strand
aaacccagucguauauaug

SEQ ID NO: 2161409 - RNA, 19 nt, Homo sapiens
  misc_RNA (1)...(19): siRNA sense strand
gcacagaccugcacaaguu

SEQ ID NO: 2161410 - RNA, 19 nt, Homo sapiens
  misc_RNA (1)...(19): siRNA sense strand
ggagauaucuggaaguuga

SEQ ID NO: 2161411 - RNA, 19 nt, Homo sapiens
  misc_RNA (1)...(19): siRNA sense strand
ggacacaacugaaaccaaa

SEQ ID NO: 2161412 - RNA, 19 nt, Homo sapiens
  misc_RNA (1)...(19): siRNA sense strand
uaaacaagauccaugcaua

SEQ ID NO: 2161413 - RNA, 19 nt, Homo sapiens
  misc_RNA (1)...(19): siRNA sense strand
gaagaaacccagucguaua

SEQ ID NO: 2161414 - RNA, 19 nt, Homo sapiens
  misc_RNA (1)...(19): siRNA sense strand
caaacaaccuauccuguga

SEQ ID NO: 2161415 - RNA, 19 nt, Homo sapiens
  misc_RNA (1)...(19): siRNA sense strand
gaaacccagucguauauau

SEQ ID NO: 2161416 - RNA, 19 nt, Homo sapiens
  misc_RNA (1)...(19): siRNA sense strand
gggaggaaauugcaacaaa

SEQ ID NO: 2161417 - RNA, 19 nt, Homo sapiens
  misc_RNA (1)...(19): siRNA sense strand
gaacauccaugaaaacaaa

SEQ ID NO: 2161418 - RNA, 19 nt, Homo sapiens
  misc_RNA (1)...(19): siRNA sense strand
guacaaccggcuauauuua

SEQ ID NO: 2161419 - RNA, 19 nt, Homo sapiens
  misc_RNA (1)...(19): siRNA sense strand
gcauauuccuuaaacaaga

SEQ ID NO: 2161420 - RNA, 19 nt, Homo sapiens
  misc_RNA (1)...(19): siRNA sense strand
uaacccagauuaugaugaa

SEQ ID NO: 2161421 - RNA, 19 nt, Homo sapiens
  misc_RNA (1)...(19): siRNA sense strand
ggaauuggcaucuauguca

SEQ ID NO: 2161422 - RNA, 19 nt, Homo sapiens
  misc_RNA (1)...(19): siRNA sense strand
gggcacagauggcuacaug

SEQ ID NO: 2161423 - RNA, 19 nt, Homo sapiens
  misc_RNA (1)...(19): siRNA sense strand
cauacaaccuugaaacgaa

SEQ ID NO: 2161424 - RNA, 19 nt, Homo sapiens
  misc_RNA (1)...(19): siRNA sense strand
gaagagaggauuuacaucu

SEQ ID NO: 2161425 - RNA, 19 nt, Homo sapiens
  misc_RNA (1)...(19): siRNA sense strand
caaccuauccugugaucua

SEQ ID NO: 2161426 - RNA, 19 nt, Homo sapiens
  misc_RNA (1)...(19): siRNA sense strand
gggagggccugauaaugaa

SEQ ID NO: 2161427 - RNA, 19 nt, Homo sapiens
  misc_RNA (1)...(19): siRNA sense strand
gauaauaccaaccuauaug

SEQ ID NO: 2161428 - RNA, 19 nt, Homo sapiens
  misc_RNA (1)...(19): siRNA sense strand
gggaagaaacccagucgua

SEQ ID NO: 2161429 - RNA, 19 nt, Homo sapiens
  misc_RNA (1)...(19): siRNA sense strand
gguacaaccggcuauauuu

SEQ ID NO: 2161430 - RNA, 19 nt, Homo sapiens
  misc_RNA (1)...(19): siRNA sense strand
ggacugggucauuguuuaa

SEQ ID NO: 2161431 - RNA, 19 nt, Homo sapiens
  misc_RNA (1)...(19): siRNA sense strand
caacaaaaccccaugaaaa

SEQ ID NO: 2161432 - RNA, 19 nt, Homo sapiens
  misc_RNA (1)...(19): siRNA sense strand
cagauaauaccaaccuaua

SEQ ID NO: 2161433 - RNA, 19 nt, Homo sapiens
  misc_RNA (1)...(19): siRNA sense strand
ggaagaaacccagucguau

SEQ ID NO: 2161434 - RNA, 19 nt, Homo sapiens
  misc_RNA (1)...(19): siRNA sense strand
ucagggaacucuggaggua

SEQ ID NO: 2161435 - RNA, 19 nt, Homo sapiens
  misc_RNA (1)...(19): siRNA sense strand
gaggugauccugggagaua

SEQ ID NO: 2161436 - RNA, 19 nt, Homo sapiens
  misc_RNA (1)...(19): siRNA sense strand
caaacggacugggucauug

SEQ ID NO: 2161437 - RNA, 19 nt, Homo sapiens
  misc_RNA (1)...(19): siRNA sense strand
ggacagcauauuccuuaaa

SEQ ID NO: 2161438 - RNA, 19 nt, Homo sapiens
  misc_RNA (1)...(19): siRNA sense strand
cggacugggucauuguuua

SEQ ID NO: 2161439 - RNA, 19 nt, Homo sapiens
  misc_RNA (1)...(19): siRNA sense strand
ugccagagccaguuuauuu

SEQ ID NO: 2161440 - RNA, 19 nt, Homo sapiens
  misc_RNA (1)...(19): siRNA sense strand
guccauguguguaauguga

SEQ ID NO: 2161441 - RNA, 19 nt, Homo sapiens
  misc_RNA (1)...(19): siRNA sense strand
caaccuauauguguuugga

SEQ ID NO: 2161442 - RNA, 19 nt, Homo sapiens
  misc_RNA (1)...(19): siRNA sense strand
gcaaaccucucccgaacac

SEQ ID NO: 2161443 - RNA, 19 nt, Homo sapiens
  misc_RNA (1)...(19): siRNA sense strand
caagauccaugcauacaac

SEQ ID NO: 2161444 - RNA, 19 nt, Homo sapiens
  misc_RNA (1)...(19): siRNA sense strand
caaguuagaucucaauacc

SEQ ID NO: 2161445 - RNA, 19 nt, Homo sapiens
  misc_RNA (1)...(19): siRNA sense strand
gcagauaauaccaaccuau

SEQ ID NO: 2161446 - RNA, 19 nt, Homo sapiens
  misc_RNA (1)...(19): siRNA sense strand
aguugaaucugcagacuuu

SEQ ID NO: 2161447 - RNA, 19 nt, Homo sapiens
  misc_RNA (1)...(19): siRNA sense strand
ggaggaaauugcaacaaaa

SEQ ID NO: 2161448 - RNA, 19 nt, Homo sapiens
  misc_RNA (1)...(19): siRNA sense strand
agagaggauuuacaucuug

SEQ ID NO: 2161449 - RNA, 19 nt, Homo sapiens
  misc_RNA (1)...(19): siRNA sense strand
gaacucuggagguaucauu

SEQ ID NO: 2161450 - RNA, 19 nt, Homo sapiens
  misc_RNA (1)...(19): siRNA sense strand
cgggagggccugauaauga

SEQ ID NO: 2161451 - RNA, 19 nt, Homo sapiens
  misc_RNA (1)...(19): siRNA sense strand
gacagcauauuccuuaaac

SEQ ID NO: 2161452 - RNA, 19 nt, Homo sapiens
  misc_RNA (1)...(19): siRNA sense strand
cagcauauuccuuaaacaa

SEQ ID NO: 2161453 - RNA, 19 nt, Homo sapiens
  misc_RNA (1)...(19): siRNA sense strand
gaaucgggagggccugaua

SEQ ID NO: 2161454 - RNA, 19 nt, Homo sapiens
  misc_RNA (1)...(19): siRNA sense strand
gcacaaguuagaucucaau

SEQ ID NO: 2161455 - RNA, 19 nt, Homo sapiens
  misc_RNA (1)...(19): siRNA sense strand
caacggcaaugacguccau

SEQ ID NO: 2161456 - RNA, 19 nt, Homo sapiens
  misc_RNA (1)...(19): siRNA sense strand
guacgggcaucccauuugg

SEQ ID NO: 2161457 - RNA, 19 nt, Homo sapiens
  misc_RNA (1)...(19): siRNA sense strand
ggagagagcaacggcaaug

SEQ ID NO: 2161458 - RNA, 19 nt, Homo sapiens
  misc_RNA (1)...(19): siRNA sense strand
ggacucaucgaacgcuuga

SEQ ID NO: 2161459 - RNA, 19 nt, Homo sapiens
  misc_RNA (1)...(19): siRNA sense strand
ccugugaucuaccagaaga

SEQ ID NO: 2161460 - RNA, 19 nt, Homo sapiens
  misc_RNA (1)...(19): siRNA sense strand
cagaagagaggauuuacau

SEQ ID NO: 2161461 - RNA, 19 nt, Homo sapiens
  misc_RNA (1)...(19): siRNA sense strand
ggucauuguuuaagaucug

SEQ ID NO: 2161462 - RNA, 19 nt, Homo sapiens
  misc_RNA (1)...(19): siRNA sense strand
gaaguugaaucugcagacu

SEQ ID NO: 2161463 - RNA, 19 nt, Homo sapiens
  misc_RNA (1)...(19): siRNA sense strand
uauauguguuuggagguua

SEQ ID NO: 2161464 - RNA, 19 nt, Homo sapiens
  misc_RNA (1)...(19): siRNA sense strand
caucgaacgcuugaaauga

SEQ ID NO: 2161465 - RNA, 19 nt, Homo sapiens
  misc_RNA (1)...(19): siRNA sense strand
cuggacagcauauuccuua

SEQ ID NO: 2161466 - RNA, 19 nt, Homo sapiens
  misc_RNA (1)...(19): siRNA sense strand
aagaaacccagucguauau

SEQ ID NO: 2161467 - RNA, 19 nt, Homo sapiens
  misc_RNA (1)...(19): siRNA sense strand
uauaagagaugggcuuugc

SEQ ID NO: 2161468 - RNA, 19 nt, Homo sapiens
  misc_RNA (1)...(19): siRNA sense strand
ggagguacaaccggcuaua

SEQ ID NO: 2161469 - RNA, 19 nt, Homo sapiens
  misc_RNA (1)...(19): siRNA sense strand
gaaguggacaucguugugu

SEQ ID NO: 2161470 - RNA, 19 nt, Homo sapiens
  misc_RNA (1)...(19): siRNA sense strand
guggugaacauccaugaaa

SEQ ID NO: 2161471 - RNA, 19 nt, Homo sapiens
  misc_RNA (1)...(19): siRNA sense strand
caucaauggcucccuuuau

SEQ ID NO: 2161472 - RNA, 19 nt, Homo sapiens
  misc_RNA (1)...(19): siRNA sense strand
gcuauggccaucaucaaug

SEQ ID NO: 2161473 - RNA, 19 nt, Homo sapiens
  misc_RNA (1)...(19): siRNA sense strand
ugggagauaucuggaaguu

SEQ ID NO: 2161474 - RNA, 19 nt, Homo sapiens
  misc_RNA (1)...(19): siRNA sense strand
gcauacaaccuugaaacga

SEQ ID NO: 2161475 - RNA, 19 nt, Homo sapiens
  misc_RNA (1)...(19): siRNA sense strand
gguacgggcaucccauuug

SEQ ID NO: 2161476 - RNA, 19 nt, Homo sapiens
  misc_RNA (1)...(19): siRNA sense strand
auaccaaccuauauguguu

SEQ ID NO: 2161477 - RNA, 19 nt, Homo sapiens
  misc_RNA (1)...(19): siRNA sense strand
guacuuccuggacagcaua

SEQ ID NO: 2161478 - RNA, 19 nt, Homo sapiens
  misc_RNA (1)...(19): siRNA sense strand
gagaguggacacaacugaa

SEQ ID NO: 2161479 - RNA, 19 nt, Homo sapiens
  misc_RNA (1)...(19): siRNA sense strand
aucaauggcucccuuuaug

SEQ ID NO: 2161480 - RNA, 19 nt, Homo sapiens
  misc_RNA (1)...(19): siRNA sense strand
uaccagaagagaggauuua

SEQ ID NO: 2161481 - RNA, 19 nt, Homo sapiens
  misc_RNA (1)...(19): siRNA sense strand
gaggaguggugaacaucca

SEQ ID NO: 2161482 - RNA, 19 nt, Homo sapiens
  misc_RNA (1)...(19): siRNA sense strand
uggcaucuaugucacuugu

SEQ ID NO: 2161483 - RNA, 19 nt, Homo sapiens
  misc_RNA (1)...(19): siRNA sense strand
gcaacaaaaccccaugaaa

SEQ ID NO: 2161484 - RNA, 19 nt, Homo sapiens
  misc_RNA (1)...(19): siRNA sense strand
ggccugauaaugaagacua

SEQ ID NO: 2161485 - RNA, 19 nt, Homo sapiens
  misc_RNA (1)...(19): siRNA sense strand
ucacuugugcugcauggaa

SEQ ID NO: 2161486 - RNA, 19 nt, Homo sapiens
  misc_RNA (1)...(19): siRNA sense strand
cuuuaugucuuuggaggua

SEQ ID NO: 2161487 - RNA, 19 nt, Homo sapiens
  misc_RNA (1)...(19): siRNA sense strand
gagagagcaacggcaauga

SEQ ID NO: 2161488 - RNA, 19 nt, Homo sapiens
  misc_RNA (1)...(19): siRNA sense strand
auacaaccuugaaacgaau

SEQ ID NO: 2161489 - RNA, 19 nt, Homo sapiens
  misc_RNA (1)...(19): siRNA sense strand
acaaccggcuauauuuaca

SEQ ID NO: 2161490 - RNA, 19 nt, Homo sapiens
  misc_RNA (1)...(19): siRNA sense strand
gacaggcuauggccaucau

SEQ ID NO: 2161491 - RNA, 19 nt, Homo sapiens
  misc_RNA (1)...(19): siRNA sense strand
ccaguggcgaccagaaauu

SEQ ID NO: 2161492 - RNA, 19 nt, Homo sapiens
  misc_RNA (1)...(19): siRNA sense strand
gagguacaaccggcuauau

SEQ ID NO: 2161493 - RNA, 19 nt, Homo sapiens
  misc_RNA (1)...(19): siRNA sense strand
ggcaaugacguccaugugu

SEQ ID NO: 2161494 - RNA, 19 nt, Homo sapiens
  misc_RNA (1)...(19): siRNA sense strand
gagguacgggcaucccauu

SEQ ID NO: 2161495 - RNA, 19 nt, Homo sapiens
  misc_RNA (1)...(19): siRNA sense strand
guaaugugaaguauaagag

SEQ ID NO: 2161496 - RNA, 19 nt, Homo sapiens
  misc_RNA (1)...(19): siRNA sense strand
aaugaagacuauccucucu

SEQ ID NO: 2161497 - RNA, 19 nt, Homo sapiens
  misc_RNA (1)...(19): siRNA sense strand
acgaaugccugggaggaaa

SEQ ID NO: 2161498 - RNA, 19 nt, Homo sapiens
  misc_RNA (1)...(19): siRNA sense strand
ggcagauaauaccaaccua

SEQ ID NO: 2161499 - RNA, 19 nt, Homo sapiens
  misc_RNA (1)...(19): siRNA sense strand
agaguggacacaacugaaa

SEQ ID NO: 2161500 - RNA, 19 nt, Homo sapiens
  misc_RNA (1)...(19): siRNA sense strand
uggcucccuuuaugucuuu

SEQ ID NO: 2161501 - RNA, 19 nt, Homo sapiens
  misc_RNA (1)...(19): siRNA sense strand
ugacguccauguguguaau

SEQ ID NO: 2161502 - RNA, 19 nt, Homo sapiens
  misc_RNA (1)...(19): siRNA sense strand
aaaccucucccgaacacaa

SEQ ID NO: 2161503 - RNA, 19 nt, Homo sapiens
  misc_RNA (1)...(19): siRNA sense strand
uaagaucuggcugguggua

SEQ ID NO: 2161504 - RNA, 19 nt, Homo sapiens
  misc_RNA (1)...(19): siRNA sense strand
cuauauguguuuggagguu

SEQ ID NO: 2161505 - RNA, 19 nt, Homo sapiens
  misc_RNA (1)...(19): siRNA sense strand
gauccaugcauacaaccuu

SEQ ID NO: 2161506 - RNA, 19 nt, Homo sapiens
  misc_RNA (1)...(19): siRNA sense strand
aaacaagauccaugcauac

SEQ ID NO: 2161507 - RNA, 19 nt, Homo sapiens
  misc_RNA (1)...(19): siRNA sense strand
ucaauggcucccuuuaugu

SEQ ID NO: 2161508 - RNA, 19 nt, Homo sapiens
  misc_RNA (1)...(19): siRNA sense strand
aaacccagucguauauaug

SEQ ID NO: 2161509 - RNA, 19 nt, Homo sapiens
  misc_RNA (1)...(19): siRNA sense strand
gaagaaaucucagcaagug

SEQ ID NO: 2161510 - RNA, 19 nt, Homo sapiens
  misc_RNA (1)...(19): siRNA sense strand
gaacagagcagauggaaac

SEQ ID NO: 2161511 - RNA, 19 nt, Homo sapiens
  misc_RNA (1)...(19): siRNA sense strand
ucaagaagguguaugacaa

SEQ ID NO: 2161512 - RNA, 19 nt, Homo sapiens
  misc_RNA (1)...(19): siRNA sense strand
uaacagacauccuggaagu

SEQ ID NO: 2161513 - RNA, 19 nt, Homo sapiens
  misc_RNA (1)...(19): siRNA sense strand
gcacagaagaugucguuug

SEQ ID NO: 2161514 - RNA, 19 nt, Homo sapiens
  misc_RNA (1)...(19): siRNA sense strand
gaaacuuccuucucuaugc

SEQ ID NO: 2161515 - RNA, 19 nt, Homo sapiens
  misc_RNA (1)...(19): siRNA sense strand
caacaucuucuucaugauu

SEQ ID NO: 2161516 - RNA, 19 nt, Homo sapiens
  misc_RNA (1)...(19): siRNA sense strand
gcugguggcuagugacaaa

SEQ ID NO: 2161517 - RNA, 19 nt, Homo sapiens
  misc_RNA (1)...(19): siRNA sense strand
cccaacaucuucuucauga

SEQ ID NO: 2161518 - RNA, 19 nt, Homo sapiens
  misc_RNA (1)...(19): siRNA sense strand
caaccggccugccuucuuc

SEQ ID NO: 2161519 - RNA, 19 nt, Homo sapiens
  misc_RNA (1)...(19): siRNA sense strand
gagccgaucugcacaaugc

SEQ ID NO: 2161520 - RNA, 19 nt, Homo sapiens
  misc_RNA (1)...(19): siRNA sense strand
cagagcagauggaaacuuc

SEQ ID NO: 2161521 - RNA, 19 nt, Homo sapiens
  misc_RNA (1)...(19): siRNA sense strand
gguccuggcugaagcugaa

SEQ ID NO: 2161522 - RNA, 19 nt, Homo sapiens
  misc_RNA (1)...(19): siRNA sense strand
gagagcgucugccugaauc

SEQ ID NO: 2161523 - RNA, 19 nt, Homo sapiens
  misc_RNA (1)...(19): siRNA sense strand
aaggagagauggucugugu

SEQ ID NO: 2161524 - RNA, 19 nt, Homo sapiens
  misc_RNA (1)...(19): siRNA sense strand
ucacauccauaagaagaaa

SEQ ID NO: 2161525 - RNA, 19 nt, Homo sapiens
  misc_RNA (1)...(19): siRNA sense strand
ccaccuacuucauggagaa

SEQ ID NO: 2161526 - RNA, 19 nt, Homo sapiens
  misc_RNA (1)...(19): siRNA sense strand
gacauucacauccauaaga

SEQ ID NO: 2161527 - RNA, 19 nt, Homo sapiens
  misc_RNA (1)...(19): siRNA sense strand
cacagaagaugucguuugg

SEQ ID NO: 2161528 - RNA, 19 nt, Homo sapiens
  misc_RNA (1)...(19): siRNA sense strand
gcuacgaggcgcucaagaa

SEQ ID NO: 2161529 - RNA, 19 nt, Homo sapiens
  misc_RNA (1)...(19): siRNA sense strand
ggaaccggaucgcugagau

SEQ ID NO: 2161530 - RNA, 19 nt, Homo sapiens
  misc_RNA (1)...(19): siRNA sense strand
ucgcugagaugaagaaguc

SEQ ID NO: 2161531 - RNA, 19 nt, Homo sapiens
  misc_RNA (1)...(19): siRNA sense strand
ggagagcgucugccugaau

SEQ ID NO: 2161532 - RNA, 19 nt, Homo sapiens
  misc_RNA (1)...(19): siRNA sense strand
acauucacauccauaagaa

SEQ ID NO: 2161533 - RNA, 19 nt, Homo sapiens
  misc_RNA (1)...(19): siRNA sense strand
guacagcaacauggaguuu

SEQ ID NO: 2161534 - RNA, 19 nt, Homo sapiens
  misc_RNA (1)...(19): siRNA sense strand
ugcagaagcuggacuacau

SEQ ID NO: 2161535 - RNA, 19 nt, Homo sapiens
  misc_RNA (1)...(19): siRNA sense strand
ccuucucuaugcacacuua

SEQ ID NO: 2161536 - RNA, 19 nt, Homo sapiens
  misc_RNA (1)...(19): siRNA sense strand
gauguucuccaccuacuuc

SEQ ID NO: 2161537 - RNA, 19 nt, Homo sapiens
  misc_RNA (1)...(19): siRNA sense strand
gaaccggaucgcugagaug

SEQ ID NO: 2161538 - RNA, 19 nt, Homo sapiens
  misc_RNA (1)...(19): siRNA sense strand
acagcaacauggaguuugu

SEQ ID NO: 2161539 - RNA, 19 nt, Homo sapiens
  misc_RNA (1)...(19): siRNA sense strand
agaaaucucagcaaguguu

SEQ ID NO: 2161540 - RNA, 19 nt, Homo sapiens
  misc_RNA (1)...(19): siRNA sense strand
aaacuuccuucucuaugca

SEQ ID NO: 2161541 - RNA, 19 nt, Homo sapiens
  misc_RNA (1)...(19): siRNA sense strand
ggaaggagagauggucugu

SEQ ID NO: 2161542 - RNA, 19 nt, Homo sapiens
  misc_RNA (1)...(19): siRNA sense strand
gaaaucucagcaaguguuc

SEQ ID NO: 2161543 - RNA, 19 nt, Homo sapiens
  misc_RNA (1)...(19): siRNA sense strand
gcagaagcuggacuacaug

SEQ ID NO: 2161544 - RNA, 19 nt, Homo sapiens
  misc_RNA (1)...(19): siRNA sense strand
uaagaagaaaucucagcaa

SEQ ID NO: 2161545 - RNA, 19 nt, Homo sapiens
  misc_RNA (1)...(19): siRNA sense strand
ugaaucucauccugcagaa

SEQ ID NO: 2161546 - RNA, 19 nt, Homo sapiens
  misc_RNA (1)...(19): siRNA sense strand
ggcagaagcccauccugau

SEQ ID NO: 2161547 - RNA, 19 nt, Homo sapiens
  misc_RNA (1)...(19): siRNA sense strand
cguuuggcuucuacaagua

SEQ ID NO: 2161548 - RNA, 19 nt, Homo sapiens
  misc_RNA (1)...(19): siRNA sense strand
gggacauucacauccauaa

SEQ ID NO: 2161549 - RNA, 19 nt, Homo sapiens
  misc_RNA (1)...(19): siRNA sense strand
ggacauucacauccauaag

SEQ ID NO: 2161550 - RNA, 19 nt, Homo sapiens
  misc_RNA (1)...(19): siRNA sense strand
acgaggcgcucaagaaggu

SEQ ID NO: 2161551 - RNA, 19 nt, Homo sapiens
  misc_RNA (1)...(19): siRNA sense strand
aacaucuucuucaugauug

SEQ ID NO: 2161552 - RNA, 19 nt, Homo sapiens
  misc_RNA (1)...(19): siRNA sense strand
ccggaucgcugagaugaag

SEQ ID NO: 2161553 - RNA, 19 nt, Homo sapiens
  misc_RNA (1)...(19): siRNA sense strand
cuacaaguacagcaacaug

SEQ ID NO: 2161554 - RNA, 19 nt, Homo sapiens
  misc_RNA (1)...(19): siRNA sense strand
ucguuuggcuucuacaagu

SEQ ID NO: 2161555 - RNA, 19 nt, Homo sapiens
  misc_RNA (1)...(19): siRNA sense strand
cgacagcgaggaguucuuc

SEQ ID NO: 2161556 - RNA, 19 nt, Homo sapiens
  misc_RNA (1)...(19): siRNA sense strand
ccuacuucauggagaaaug

SEQ ID NO: 2161557 - RNA, 19 nt, Homo sapiens
  misc_RNA (1)...(19): siRNA sense strand
caacgacagcgaggaguuc

SEQ ID NO: 2161558 - RNA, 19 nt, Homo sapiens
  misc_RNA (1)...(19): siRNA sense strand
agguggagguggaggugua

SEQ ID NO: 2161559 - RNA, 19 nt, Homo sapiens
  misc_RNA (1)...(19): siRNA sense strand
ucuaugcacacuuaaccua

SEQ ID NO: 2161560 - RNA, 19 nt, Homo sapiens
  misc_RNA (1)...(19): siRNA sense strand
cuucuggacuuggauguuc

SEQ ID NO: 2161561 - RNA, 19 nt, Homo sapiens
  misc_RNA (1)...(19): siRNA sense strand
gaugucguuuggcuucuac

SEQ ID NO: 2161562 - RNA, 19 nt, Homo sapiens
  misc_RNA (1)...(19): siRNA sense strand
guucuccaccuacuucaug

SEQ ID NO: 2161563 - RNA, 19 nt, Homo sapiens
  misc_RNA (1)...(19): siRNA sense strand
caagaagguguaugacaac

SEQ ID NO: 2161564 - RNA, 19 nt, Homo sapiens
  misc_RNA (1)...(19): siRNA sense strand
ccaacgacagcgaggaguu

SEQ ID NO: 2161565 - RNA, 19 nt, Homo sapiens
  misc_RNA (1)...(19): siRNA sense strand
acaaguacagcaacaugga

SEQ ID NO: 2161566 - RNA, 19 nt, Homo sapiens
  misc_RNA (1)...(19): siRNA sense strand
cuacgaggcgcucaagaag

SEQ ID NO: 2161567 - RNA, 19 nt, Homo sapiens
  misc_RNA (1)...(19): siRNA sense strand
gaagcugaacagagcagau

SEQ ID NO: 2161568 - RNA, 19 nt, Homo sapiens
  misc_RNA (1)...(19): siRNA sense strand
ggaucgcugagaugaagaa

SEQ ID NO: 2161569 - RNA, 19 nt, Homo sapiens
  misc_RNA (1)...(19): siRNA sense strand
agaagaaaucucagcaagu

SEQ ID NO: 2161570 - RNA, 19 nt, Homo sapiens
  misc_RNA (1)...(19): siRNA sense strand
acagacauccuggaaguuc

SEQ ID NO: 2161571 - RNA, 19 nt, Homo sapiens
  misc_RNA (1)...(19): siRNA sense strand
cggcaggacgacaugcuuu

SEQ ID NO: 2161572 - RNA, 19 nt, Homo sapiens
  misc_RNA (1)...(19): siRNA sense strand
uccauaagaagaaaucuca

SEQ ID NO: 2161573 - RNA, 19 nt, Homo sapiens
  misc_RNA (1)...(19): siRNA sense strand
gcggucagccgagugucua

SEQ ID NO: 2161574 - RNA, 19 nt, Homo sapiens
  misc_RNA (1)...(19): siRNA sense strand
uggcacagaagaugucguu

SEQ ID NO: 2161575 - RNA, 19 nt, Homo sapiens
  misc_RNA (1)...(19): siRNA sense strand
gagcugguggcuagugaca

SEQ ID NO: 2161576 - RNA, 19 nt, Homo sapiens
  misc_RNA (1)...(19): siRNA sense strand
uggagcugguggcuaguga

SEQ ID NO: 2161577 - RNA, 19 nt, Homo sapiens
  misc_RNA (1)...(19): siRNA sense strand
ccaacaucuucuucaugau

SEQ ID NO: 2161578 - RNA, 19 nt, Homo sapiens
  misc_RNA (1)...(19): siRNA sense strand
ggugaugccugaagcucaa

SEQ ID NO: 2161579 - RNA, 19 nt, Homo sapiens
  misc_RNA (1)...(19): siRNA sense strand
gagcaccacccgagacauc

SEQ ID NO: 2161580 - RNA, 19 nt, Homo sapiens
  misc_RNA (1)...(19): siRNA sense strand
gaagauccuccgggaccua

SEQ ID NO: 2161581 - RNA, 19 nt, Homo sapiens
  misc_RNA (1)...(19): siRNA sense strand
gaagcucaagggacugugu

SEQ ID NO: 2161582 - RNA, 19 nt, Homo sapiens
  misc_RNA (1)...(19): siRNA sense strand
aacauuccgucaccacgaa

SEQ ID NO: 2161583 - RNA, 19 nt, Homo sapiens
  misc_RNA (1)...(19): siRNA sense strand
gaaauugccuuauuggaaa

SEQ ID NO: 2161584 - RNA, 19 nt, Homo sapiens
  misc_RNA (1)...(19): siRNA sense strand
ggauggagcuggagcagaa

SEQ ID NO: 2161585 - RNA, 19 nt, Homo sapiens
  misc_RNA (1)...(19): siRNA sense strand
gaacaaagucaucaagcua

SEQ ID NO: 2161586 - RNA, 19 nt, Homo sapiens
  misc_RNA (1)...(19): siRNA sense strand
ucacggacauccagaagua

SEQ ID NO: 2161587 - RNA, 19 nt, Homo sapiens
  misc_RNA (1)...(19): siRNA sense strand
ggaaauugccuuauuggaa

SEQ ID NO: 2161588 - RNA, 19 nt, Homo sapiens
  misc_RNA (1)...(19): siRNA sense strand
guucagaggucacaagaga

SEQ ID NO: 2161589 - RNA, 19 nt, Homo sapiens
  misc_RNA (1)...(19): siRNA sense strand
gaagaaccucucugccuua

SEQ ID NO: 2161590 - RNA, 19 nt, Homo sapiens
  misc_RNA (1)...(19): siRNA sense strand
ccucauugauuucaucuuu

SEQ ID NO: 2161591 - RNA, 19 nt, Homo sapiens
  misc_RNA (1)...(19): siRNA sense strand
gaaccucucugccuuaucc

SEQ ID NO: 2161592 - RNA, 19 nt, Homo sapiens
  misc_RNA (1)...(19): siRNA sense strand
ggaagaugcccacggacua

SEQ ID NO: 2161593 - RNA, 19 nt, Homo sapiens
  misc_RNA (1)...(19): siRNA sense strand
ggagaacacuguggagaca

SEQ ID NO: 2161594 - RNA, 19 nt, Homo sapiens
  misc_RNA (1)...(19): siRNA sense strand
gcaccaagaagggcaauuu

SEQ ID NO: 2161595 - RNA, 19 nt, Homo sapiens
  misc_RNA (1)...(19): siRNA sense strand
gcccgcagguuaacugaaa

SEQ ID NO: 2161596 - RNA, 19 nt, Homo sapiens
  misc_RNA (1)...(19): siRNA sense strand
uggagaagaucaagaacuu

SEQ ID NO: 2161597 - RNA, 19 nt, Homo sapiens
  misc_RNA (1)...(19): siRNA sense strand
ggaacaaagucaucaagcu

SEQ ID NO: 2161598 - RNA, 19 nt, Homo sapiens
  misc_RNA (1)...(19): siRNA sense strand
gugccaagccggucacuaa

SEQ ID NO: 2161599 - RNA, 19 nt, Homo sapiens
  misc_RNA (1)...(19): siRNA sense strand
ccaagccggucacuaacuu

SEQ ID NO: 2161600 - RNA, 19 nt, Homo sapiens
  misc_RNA (1)...(19): siRNA sense strand
gggaguacguggaggacuu

SEQ ID NO: 2161601 - RNA, 19 nt, Homo sapiens
  misc_RNA (1)...(19): siRNA sense strand
ccuggaaauugccuuauug

SEQ ID NO: 2161602 - RNA, 19 nt, Homo sapiens
  misc_RNA (1)...(19): siRNA sense strand
ggccaucccauuguucuua

SEQ ID NO: 2161603 - RNA, 19 nt, Homo sapiens
  misc_RNA (1)...(19): siRNA sense strand
ccaaaucuggguccucaaa

SEQ ID NO: 2161604 - RNA, 19 nt, Homo sapiens
  misc_RNA (1)...(19): siRNA sense strand
ccauuguucuuauuucuag

SEQ ID NO: 2161605 - RNA, 19 nt, Homo sapiens
  misc_RNA (1)...(19): siRNA sense strand
ucaaagaggaacaaaguca

SEQ ID NO: 2161606 - RNA, 19 nt, Homo sapiens
  misc_RNA (1)...(19): siRNA sense strand
ccagaaagcccagaaccuu

SEQ ID NO: 2161607 - RNA, 19 nt, Homo sapiens
  misc_RNA (1)...(19): siRNA sense strand
caaaggaagaccugacugu

SEQ ID NO: 2161608 - RNA, 19 nt, Homo sapiens
  misc_RNA (1)...(19): siRNA sense strand
caacagggaccggaagaug

SEQ ID NO: 2161609 - RNA, 19 nt, Homo sapiens
  misc_RNA (1)...(19): siRNA sense strand
aaaucuggguccucaaaga

SEQ ID NO: 2161610 - RNA, 19 nt, Homo sapiens
  misc_RNA (1)...(19): siRNA sense strand
uggcugacauccuggagaa

SEQ ID NO: 2161611 - RNA, 19 nt, Homo sapiens
  misc_RNA (1)...(19): siRNA sense strand
cagguuaacugaaaauaug

SEQ ID NO: 2161612 - RNA, 19 nt, Homo sapiens
  misc_RNA (1)...(19): siRNA sense strand
gcaauuuccacgagaucuu

SEQ ID NO: 2161613 - RNA, 19 nt, Homo sapiens
  misc_RNA (1)...(19): siRNA sense strand
cgacacgcccuauaucauc

SEQ ID NO: 2161614 - RNA, 19 nt, Homo sapiens
  misc_RNA (1)...(19): siRNA sense strand
ucacggagaauuacuugug

SEQ ID NO: 2161615 - RNA, 19 nt, Homo sapiens
  misc_RNA (1)...(19): siRNA sense strand
agaguuugaucgacugaau

SEQ ID NO: 2161616 - RNA, 19 nt, Homo sapiens
  misc_RNA (1)...(19): siRNA sense strand
uaucaaguucuuccucauu

SEQ ID NO: 2161617 - RNA, 19 nt, Homo sapiens
  misc_RNA (1)...(19): siRNA sense strand
ucagaggucacaagagaga

SEQ ID NO: 2161618 - RNA, 19 nt, Homo sapiens
  misc_RNA (1)...(19): siRNA sense strand
cgaaugcagcgacgaaauc

SEQ ID NO: 2161619 - RNA, 19 nt, Homo sapiens
  misc_RNA (1)...(19): siRNA sense strand
guacgacacgcccuauauc

SEQ ID NO: 2161620 - RNA, 19 nt, Homo sapiens
  misc_RNA (1)...(19): siRNA sense strand
gagcaucgugcccgaagug

SEQ ID NO: 2161621 - RNA, 19 nt, Homo sapiens
  misc_RNA (1)...(19): siRNA sense strand
ucacaagagagaugacuuc

SEQ ID NO: 2161622 - RNA, 19 nt, Homo sapiens
  misc_RNA (1)...(19): siRNA sense strand
gaaguacaagguccugucu

SEQ ID NO: 2161623 - RNA, 19 nt, Homo sapiens
  misc_RNA (1)...(19): siRNA sense strand
gaauuacuugugcuucgaa

SEQ ID NO: 2161624 - RNA, 19 nt, Homo sapiens
  misc_RNA (1)...(19): siRNA sense strand
agccggagaucacacagaa

SEQ ID NO: 2161625 - RNA, 19 nt, Homo sapiens
  misc_RNA (1)...(19): siRNA sense strand
ucuagcaauucugagguua

SEQ ID NO: 2161626 - RNA, 19 nt, Homo sapiens
  misc_RNA (1)...(19): siRNA sense strand
gccaucccauuguucuuau

SEQ ID NO: 2161627 - RNA, 19 nt, Homo sapiens
  misc_RNA (1)...(19): siRNA sense strand
ucaccuggaaauugccuua

SEQ ID NO: 2161628 - RNA, 19 nt, Homo sapiens
  misc_RNA (1)...(19): siRNA sense strand
aguacaagguccugucugu

SEQ ID NO: 2161629 - RNA, 19 nt, Homo sapiens
  misc_RNA (1)...(19): siRNA sense strand
gaagaugcccacggacuac

SEQ ID NO: 2161630 - RNA, 19 nt, Homo sapiens
  misc_RNA (1)...(19): siRNA sense strand
gguuaucccucaauuaccu

SEQ ID NO: 2161631 - RNA, 19 nt, Homo sapiens
  misc_RNA (1)...(19): siRNA sense strand
ccauugccuucaccgugua

SEQ ID NO: 2161632 - RNA, 19 nt, Homo sapiens
  misc_RNA (1)...(19): siRNA sense strand
cuaaggagguuggacaaaa

SEQ ID NO: 2161633 - RNA, 19 nt, Homo sapiens
  misc_RNA (1)...(19): siRNA sense strand
gacacgcccuauaucaucu

SEQ ID NO: 2161634 - RNA, 19 nt, Homo sapiens
  misc_RNA (1)...(19): siRNA sense strand
gacugugucugagaaguuc

SEQ ID NO: 2161635 - RNA, 19 nt, Homo sapiens
  misc_RNA (1)...(19): siRNA sense strand
uagcaauucugagguuauc

SEQ ID NO: 2161636 - RNA, 19 nt, Homo sapiens
  misc_RNA (1)...(19): siRNA sense strand
gagagaugacuuccucgau

SEQ ID NO: 2161637 - RNA, 19 nt, Homo sapiens
  misc_RNA (1)...(19): siRNA sense strand
agaccauucucagccagua

SEQ ID NO: 2161638 - RNA, 19 nt, Homo sapiens
  misc_RNA (1)...(19): siRNA sense strand
uucgaaagcuccaaaucug

SEQ ID NO: 2161639 - RNA, 19 nt, Homo sapiens
  misc_RNA (1)...(19): siRNA sense strand
gugggacucuaugcuggua

SEQ ID NO: 2161640 - RNA, 19 nt, Homo sapiens
  misc_RNA (1)...(19): siRNA sense strand
gcugacauccuggagaaga

SEQ ID NO: 2161641 - RNA, 19 nt, Homo sapiens
  misc_RNA (1)...(19): siRNA sense strand
caucccauuguucuuauuu

SEQ ID NO: 2161642 - RNA, 19 nt, Homo sapiens
  misc_RNA (1)...(19): siRNA sense strand
acaaagucaucaagcuagu

SEQ ID NO: 2161643 - RNA, 19 nt, Homo sapiens
  misc_RNA (1)...(19): siRNA sense strand
uaaggagguuggacaaaau

SEQ ID NO: 2161644 - RNA, 19 nt, Homo sapiens
  misc_RNA (1)...(19): siRNA sense strand
ucaucaagcuaguggacau

SEQ ID NO: 2161645 - RNA, 19 nt, Homo sapiens
  misc_RNA (1)...(19): siRNA sense strand
caaagaggaacaaagucau

SEQ ID NO: 2161646 - RNA, 19 nt, Homo sapiens
  misc_RNA (1)...(19): siRNA sense strand
ccacggacuacaucaggaa

SEQ ID NO: 2161647 - RNA, 19 nt, Homo sapiens
  misc_RNA (1)...(19): siRNA sense strand
ugacugugucugagaaguu

SEQ ID NO: 2161648 - RNA, 19 nt, Homo sapiens
  misc_RNA (1)...(19): siRNA sense strand
gcuaaggagguuggacaaa

SEQ ID NO: 2161649 - RNA, 19 nt, Homo sapiens
  misc_RNA (1)...(19): siRNA sense strand
aagaaccucucugccuuau

SEQ ID NO: 2161650 - RNA, 19 nt, Homo sapiens
  misc_RNA (1)...(19): siRNA sense strand
gccggucacuaacuuugug

SEQ ID NO: 2161651 - RNA, 19 nt, Homo sapiens
  misc_RNA (1)...(19): siRNA sense strand
gaggaacaaagucaucaag

SEQ ID NO: 2161652 - RNA, 19 nt, Homo sapiens
  misc_RNA (1)...(19): siRNA sense strand
ccaagaagggcaauuucca

SEQ ID NO: 2161653 - RNA, 19 nt, Homo sapiens
  misc_RNA (1)...(19): siRNA sense strand
acucuaugcugguaucaag

SEQ ID NO: 2161654 - RNA, 19 nt, Homo sapiens
  misc_RNA (1)...(19): siRNA sense strand
gggacucuaugcugguauc

SEQ ID NO: 2161655 - RNA, 19 nt, Homo sapiens
  misc_RNA (1)...(19): siRNA sense strand
gacuuuaaccggacagagu

SEQ ID NO: 2161656 - RNA, 19 nt, Homo sapiens
  misc_RNA (1)...(19): siRNA sense strand
guaucaaguucuuccucau

SEQ ID NO: 2161657 - RNA, 19 nt, Homo sapiens
  misc_RNA (1)...(19): siRNA sense strand
uccggaagcugcgagaaga

SEQ ID NO: 2161658 - RNA, 19 nt, Homo sapiens
  misc_RNA (1)...(19): siRNA sense strand
aucaaguucuuccucauug

SEQ ID NO: 2161659 - RNA, 19 nt, Homo sapiens
  misc_RNA (1)...(19): siRNA sense strand
gaccugacugugucugaga

SEQ ID NO: 2161660 - RNA, 19 nt, Homo sapiens
  misc_RNA (1)...(19): siRNA sense strand
agaauuacuugugcuucga

SEQ ID NO: 2161661 - RNA, 19 nt, Homo sapiens
  misc_RNA (1)...(19): siRNA sense strand
ucuacgucacggagaauua

SEQ ID NO: 2161662 - RNA, 19 nt, Homo sapiens
  misc_RNA (1)...(19): siRNA sense strand
gcugcugccucaucaacag

SEQ ID NO: 2161663 - RNA, 19 nt, Homo sapiens
  misc_RNA (1)...(19): siRNA sense strand
caaguucuuccucauugau

SEQ ID NO: 2161664 - RNA, 19 nt, Homo sapiens
  misc_RNA (1)...(19): siRNA sense strand
ggagcaucgugcccgaagu

SEQ ID NO: 2161665 - RNA, 19 nt, Homo sapiens
  misc_RNA (1)...(19): siRNA sense strand
gccaguacaucaagaucac

SEQ ID NO: 2161666 - RNA, 19 nt, Homo sapiens
  misc_RNA (1)...(19): siRNA sense strand
ucgggaagauggcugacau

SEQ ID NO: 2161667 - RNA, 19 nt, Homo sapiens
  misc_RNA (1)...(19): siRNA sense strand
aaggaagaccugacugugu

SEQ ID NO: 2161668 - RNA, 19 nt, Homo sapiens
  misc_RNA (1)...(19): siRNA sense strand
cgacugguacuccgucuac

SEQ ID NO: 2161669 - RNA, 19 nt, Homo sapiens
  misc_RNA (1)...(19): siRNA sense strand
aaagaggaacaaagucauc

SEQ ID NO: 2161670 - RNA, 19 nt, Homo sapiens
  misc_RNA (1)...(19): siRNA sense strand
gcagguuaacugaaaauau

SEQ ID NO: 2161671 - RNA, 19 nt, Homo sapiens
  misc_RNA (1)...(19): siRNA sense strand
ucgacugaaugagaucaaa

SEQ ID NO: 2161672 - RNA, 19 nt, Homo sapiens
  misc_RNA (1)...(19): siRNA sense strand
caucgugcccgaagugucu

SEQ ID NO: 2161673 - RNA, 19 nt, Homo sapiens
  misc_RNA (1)...(19): siRNA sense strand
ccaucccauuguucuuauu

SEQ ID NO: 2161674 - RNA, 19 nt, Homo sapiens
  misc_RNA (1)...(19): siRNA sense strand
caagccggucacuaacuuu

SEQ ID NO: 2161675 - RNA, 19 nt, Homo sapiens
  misc_RNA (1)...(19): siRNA sense strand
cacugugccuccucccaaa

SEQ ID NO: 2161676 - RNA, 19 nt, Homo sapiens
  misc_RNA (1)...(19): siRNA sense strand
cgauugcgcucgugacaaa

SEQ ID NO: 2161677 - RNA, 19 nt, Homo sapiens
  misc_RNA (1)...(19): siRNA sense strand
gaaagacaaauaccacguu

SEQ ID NO: 2161678 - RNA, 19 nt, Homo sapiens
  misc_RNA (1)...(19): siRNA sense strand
agacacagaaagacaaaua

SEQ ID NO: 2161679 - RNA, 19 nt, Homo sapiens
  misc_RNA (1)...(19): siRNA sense strand
agacaaauaccacguucua

SEQ ID NO: 2161680 - RNA, 19 nt, Homo sapiens
  misc_RNA (1)...(19): siRNA sense strand
cagcaggcguguccacaga

SEQ ID NO: 2161681 - RNA, 19 nt, Homo sapiens
  misc_RNA (1)...(19): siRNA sense strand
cuucugcucucaguucaua

SEQ ID NO: 2161682 - RNA, 19 nt, Homo sapiens
  misc_RNA (1)...(19): siRNA sense strand
cgaagaaaaugucgaaugg

SEQ ID NO: 2161683 - RNA, 19 nt, Homo sapiens
  misc_RNA (1)...(19): siRNA sense strand
gacaaauaccacguucuaa

SEQ ID NO: 2161684 - RNA, 19 nt, Homo sapiens
  misc_RNA (1)...(19): siRNA sense strand
gacaaaagccagacacaga

SEQ ID NO: 2161685 - RNA, 19 nt, Homo sapiens
  misc_RNA (1)...(19): siRNA sense strand
gcaaggggccuggauagaa

SEQ ID NO: 2161686 - RNA, 19 nt, Homo sapiens
  misc_RNA (1)...(19): siRNA sense strand
ccagacacagaaagacaaa

SEQ ID NO: 2161687 - RNA, 19 nt, Homo sapiens
  misc_RNA (1)...(19): siRNA sense strand
gaagggccagugaggagau

SEQ ID NO: 2161688 - RNA, 19 nt, Homo sapiens
  misc_RNA (1)...(19): siRNA sense strand
cacugugccuccucccaaa

SEQ ID NO: 2161689 - RNA, 19 nt, Homo sapiens
  misc_RNA (1)...(19): siRNA sense strand
gagggcagcuacgacaacu

SEQ ID NO: 2161690 - RNA, 19 nt, Homo sapiens
  misc_RNA (1)...(19): siRNA sense strand
aaagccagacacagaaaga

SEQ ID NO: 2161691 - RNA, 19 nt, Homo sapiens
  misc_RNA (1)...(19): siRNA sense strand
caaggggccuggauagaag

SEQ ID NO: 2161692 - RNA, 19 nt, Homo sapiens
  misc_RNA (1)...(19): siRNA sense strand
gccagacacagaaagacaa

SEQ ID NO: 2161693 - RNA, 19 nt, Homo sapiens
  misc_RNA (1)...(19): siRNA sense strand
gcgccgagcucuuccguaa

SEQ ID NO: 2161694 - RNA, 19 nt, Homo sapiens
  misc_RNA (1)...(19): siRNA sense strand
ccaccgaccuucuuuguug

SEQ ID NO: 2161695 - RNA, 19 nt, Homo sapiens
  misc_RNA (1)...(19): siRNA sense strand
cuacggaccuguucgauga

SEQ ID NO: 2161696 - RNA, 19 nt, Homo sapiens
  misc_RNA (1)...(19): siRNA sense strand
gcacugcuguuuccucuca

SEQ ID NO: 2161697 - RNA, 19 nt, Homo sapiens
  misc_RNA (1)...(19): siRNA sense strand
gaacagccuuggccucauc

SEQ ID NO: 2161698 - RNA, 19 nt, Homo sapiens
  misc_RNA (1)...(19): siRNA sense strand
ucaccaacgugcugucuuu

SEQ ID NO: 2161699 - RNA, 19 nt, Homo sapiens
  misc_RNA (1)...(19): siRNA sense strand
ucaagaagcugcugaaagc

SEQ ID NO: 2161700 - RNA, 19 nt, Homo sapiens
  misc_RNA (1)...(19): siRNA sense strand
gcaagggugucaucgacuu

SEQ ID NO: 2161701 - RNA, 19 nt, Homo sapiens
  misc_RNA (1)...(19): siRNA sense strand
ggacaaagcccagcucaag

SEQ ID NO: 2161702 - RNA, 19 nt, Homo sapiens
  misc_RNA (1)...(19): siRNA sense strand
gcaggucugugugggagua

SEQ ID NO: 2161703 - RNA, 19 nt, Homo sapiens
  misc_RNA (1)...(19): siRNA sense strand
ccaacgugcugucuuuguu

SEQ ID NO: 2161704 - RNA, 19 nt, Homo sapiens
  misc_RNA (1)...(19): siRNA sense strand
cagaguggcugauccagau

SEQ ID NO: 2161705 - RNA, 19 nt, Homo sapiens
  misc_RNA (1)...(19): siRNA sense strand
ggacaucagggccaccuuu

SEQ ID NO: 2161706 - RNA, 19 nt, Homo sapiens
  misc_RNA (1)...(19): siRNA sense strand
ucugagcccuuccgcauuu

SEQ ID NO: 2161707 - RNA, 19 nt, Homo sapiens
  misc_RNA (1)...(19): siRNA sense strand
ccacagagagggaggaaga

SEQ ID NO: 2161708 - RNA, 19 nt, Homo sapiens
  misc_RNA (1)...(19): siRNA sense strand
gcaugucacucgcaagaag

SEQ ID NO: 2161709 - RNA, 19 nt, Homo sapiens
  misc_RNA (1)...(19): siRNA sense strand
agauacagcuucaccuaug

SEQ ID NO: 2161710 - RNA, 19 nt, Homo sapiens
  misc_RNA (1)...(19): siRNA sense strand
gcagcgagcagcccucuau

SEQ ID NO: 2161711 - RNA, 19 nt, Homo sapiens
  misc_RNA (1)...(19): siRNA sense strand
gauacagcuucaccuaugu

SEQ ID NO: 2161712 - RNA, 19 nt, Homo sapiens
  misc_RNA (1)...(19): siRNA sense strand
gcaagaggacgccuguguu

SEQ ID NO: 2161713 - RNA, 19 nt, Homo sapiens
  misc_RNA (1)...(19): siRNA sense strand
cugcagcgcuucccagaga

SEQ ID NO: 2161714 - RNA, 19 nt, Homo sapiens
  misc_RNA (1)...(19): siRNA sense strand
cuaagacuguggacgagaa

SEQ ID NO: 2161715 - RNA, 19 nt, Homo sapiens
  misc_RNA (1)...(19): siRNA sense strand
ggaagaacggucugaugga

SEQ ID NO: 2161716 - RNA, 19 nt, Homo sapiens
  misc_RNA (1)...(19): siRNA sense strand
gauuguugcugaucuggau

SEQ ID NO: 2161717 - RNA, 19 nt, Homo sapiens
  misc_RNA (1)...(19): siRNA sense strand
guuccacaauuacauguau

SEQ ID NO: 2161718 - RNA, 19 nt, Homo sapiens
  misc_RNA (1)...(19): siRNA sense strand
gcucgacucugacuaugag

SEQ ID NO: 2161719 - RNA, 19 nt, Homo sapiens
  misc_RNA (1)...(19): siRNA sense strand
gagcagcccucuauauccu

SEQ ID NO: 2161720 - RNA, 19 nt, Homo sapiens
  misc_RNA (1)...(19): siRNA sense strand
uggcugcgcugaccaagga

SEQ ID NO: 2161721 - RNA, 19 nt, Homo sapiens
  misc_RNA (1)...(19): siRNA sense strand
ggagagcggcuucgaggau

SEQ ID NO: 2161722 - RNA, 19 nt, Homo sapiens
  misc_RNA (1)...(19): siRNA sense strand
caagaggacgccuguguuc

SEQ ID NO: 2161723 - RNA, 19 nt, Homo sapiens
  misc_RNA (1)...(19): siRNA sense strand
ggaauccaccgaccuucuu

SEQ ID NO: 2161724 - RNA, 19 nt, Homo sapiens
  misc_RNA (1)...(19): siRNA sense strand
cccggaaccuggucaagaa

SEQ ID NO: 2161725 - RNA, 19 nt, Homo sapiens
  misc_RNA (1)...(19): siRNA sense strand
gcaacugcaucuccuacgu

SEQ ID NO: 2161726 - RNA, 19 nt, Homo sapiens
  misc_RNA (1)...(19): siRNA sense strand
cagagccacugcagaguca

SEQ ID NO: 2161727 - RNA, 19 nt, Homo sapiens
  misc_RNA (1)...(19): siRNA sense strand
gcgagcagcccucuauauc

SEQ ID NO: 2161728 - RNA, 19 nt, Homo sapiens
  misc_RNA (1)...(19): siRNA sense strand
cagcugcgcuccugcacau

SEQ ID NO: 2161729 - RNA, 19 nt, Homo sapiens
  misc_RNA (1)...(19): siRNA sense strand
agcaggagcuggugcagaa

SEQ ID NO: 2161730 - RNA, 19 nt, Homo sapiens
  misc_RNA (1)...(19): siRNA sense strand
cugcaucuccuacguguuu

SEQ ID NO: 2161731 - RNA, 19 nt, Homo sapiens
  misc_RNA (1)...(19): siRNA sense strand
ucagauacagcuucaccua

SEQ ID NO: 2161732 - RNA, 19 nt, Homo sapiens
  misc_RNA (1)...(19): siRNA sense strand
gaggaagaacggucugaug

SEQ ID NO: 2161733 - RNA, 19 nt, Homo sapiens
  misc_RNA (1)...(19): siRNA sense strand
gcggagccuucacaggaaa

SEQ ID NO: 2161734 - RNA, 19 nt, Homo sapiens
  misc_RNA (1)...(19): siRNA sense strand
gaauccaccgaccuucuuu

SEQ ID NO: 2161735 - RNA, 19 nt, Homo sapiens
  misc_RNA (1)...(19): siRNA sense strand
gggagcuggugcccauuga

SEQ ID NO: 2161736 - RNA, 19 nt, Homo sapiens
  misc_RNA (1)...(19): siRNA sense strand
ggccuuugcuggcuuugug

SEQ ID NO: 2161737 - RNA, 19 nt, Homo sapiens
  misc_RNA (1)...(19): siRNA sense strand
ggagggacggucaccauuc

SEQ ID NO: 2161738 - RNA, 19 nt, Homo sapiens
  misc_RNA (1)...(19): siRNA sense strand
ugguggagcuccuggauuc

SEQ ID NO: 2161739 - RNA, 19 nt, Homo sapiens
  misc_RNA (1)...(19): siRNA sense strand
ggucaccauuccugagugu

SEQ ID NO: 2161740 - RNA, 19 nt, Homo sapiens
  misc_RNA (1)...(19): siRNA sense strand
ugcagaggcuggagacaga

SEQ ID NO: 2161741 - RNA, 19 nt, Homo sapiens
  misc_RNA (1)...(19): siRNA sense strand
ccacguaccgggucaucuu

SEQ ID NO: 2161742 - RNA, 19 nt, Homo sapiens
  misc_RNA (1)...(19): siRNA sense strand
gcaguguggccgagagcua

SEQ ID NO: 2161743 - RNA, 19 nt, Homo sapiens
  misc_RNA (1)...(19): siRNA sense strand
gggugacgcaguuugcaua

SEQ ID NO: 2161744 - RNA, 19 nt, Homo sapiens
  misc_RNA (1)...(19): siRNA sense strand
gcagagcagcggcuucaca

SEQ ID NO: 2161745 - RNA, 19 nt, Homo sapiens
  misc_RNA (1)...(19): siRNA sense strand
cagcaugucacucgcaaga

SEQ ID NO: 2161746 - RNA, 19 nt, Homo sapiens
  misc_RNA (1)...(19): siRNA sense strand
gucaagaacgccaagaaga

SEQ ID NO: 2161747 - RNA, 19 nt, Homo sapiens
  misc_RNA (1)...(19): siRNA sense strand
ugacagcgccgagcucuuc

SEQ ID NO: 2161748 - RNA, 19 nt, Homo sapiens
  misc_RNA (1)...(19): siRNA sense strand
gaggagagcacgguguuca

SEQ ID NO: 2161749 - RNA, 19 nt, Homo sapiens
  misc_RNA (1)...(19): siRNA sense strand
guggagggccugaaugugu

SEQ ID NO: 2161750 - RNA, 19 nt, Homo sapiens
  misc_RNA (1)...(19): siRNA sense strand
gcuguuuccucucagauac

SEQ ID NO: 2161751 - RNA, 19 nt, Homo sapiens
  misc_RNA (1)...(19): siRNA sense strand
gcugguagaggacgauuuc

SEQ ID NO: 2161752 - RNA, 19 nt, Homo sapiens
  misc_RNA (1)...(19): siRNA sense strand
caacguguccaaccugaag

SEQ ID NO: 2161753 - RNA, 19 nt, Homo sapiens
  misc_RNA (1)...(19): siRNA sense strand
ccaccagcaguuugacuuu

SEQ ID NO: 2161754 - RNA, 19 nt, Homo sapiens
  misc_RNA (1)...(19): siRNA sense strand
ggacagcgaccagaguagu

SEQ ID NO: 2161755 - RNA, 19 nt, Homo sapiens
  misc_RNA (1)...(19): siRNA sense strand
ugugggacuucuacacuga

SEQ ID NO: 2161756 - RNA, 19 nt, Homo sapiens
  misc_RNA (1)...(19): siRNA sense strand
gcuggugcccauugaggua

SEQ ID NO: 2161757 - RNA, 19 nt, Homo sapiens
  misc_RNA (1)...(19): siRNA sense strand
ugacgcaguuugcauacag

SEQ ID NO: 2161758 - RNA, 19 nt, Homo sapiens
  misc_RNA (1)...(19): siRNA sense strand
gacuuugucguccguauga

SEQ ID NO: 2161759 - RNA, 19 nt, Homo sapiens
  misc_RNA (1)...(19): siRNA sense strand
cccacgcccuucaucauug

SEQ ID NO: 2161760 - RNA, 19 nt, Homo sapiens
  misc_RNA (1)...(19): siRNA sense strand
guacagccaguuccagaca

SEQ ID NO: 2161761 - RNA, 19 nt, Homo sapiens
  misc_RNA (1)...(19): siRNA sense strand
ucaagggugugcggucaga

SEQ ID NO: 2161762 - RNA, 19 nt, Homo sapiens
  misc_RNA (1)...(19): siRNA sense strand
gcugugguccgcuucauca

SEQ ID NO: 2161763 - RNA, 19 nt, Homo sapiens
  misc_RNA (1)...(19): siRNA sense strand
cccuagacguggcuucuga

SEQ ID NO: 2161764 - RNA, 19 nt, Homo sapiens
  misc_RNA (1)...(19): siRNA sense strand
caccagcaguuugacuuug

SEQ ID NO: 2161765 - RNA, 19 nt, Homo sapiens
  misc_RNA (1)...(19): siRNA sense strand
ccugucauccgcuuccaua

SEQ ID NO: 2161766 - RNA, 19 nt, Homo sapiens
  misc_RNA (1)...(19): siRNA sense strand
ugaagaugcaggacaagga

SEQ ID NO: 2161767 - RNA, 19 nt, Homo sapiens
  misc_RNA (1)...(19): siRNA sense strand
ucacggagcacaagguucu

SEQ ID NO: 2161768 - RNA, 19 nt, Homo sapiens
  misc_RNA (1)...(19): siRNA sense strand
cgagggcacucuguacaag

SEQ ID NO: 2161769 - RNA, 19 nt, Homo sapiens
  misc_RNA (1)...(19): siRNA sense strand
ccaguucuaccucaaguuc

SEQ ID NO: 2161770 - RNA, 19 nt, Homo sapiens
  misc_RNA (1)...(19): siRNA sense strand
ggucaagaacgccaagaag

SEQ ID NO: 2161771 - RNA, 19 nt, Homo sapiens
  misc_RNA (1)...(19): siRNA sense strand
uccguaagcagcugcauaa

SEQ ID NO: 2161772 - RNA, 19 nt, Homo sapiens
  misc_RNA (1)...(19): siRNA sense strand
gucauccgcuuccauaagg

SEQ ID NO: 2161773 - RNA, 19 nt, Homo sapiens
  misc_RNA (1)...(19): siRNA sense strand
gcugcucgaugugauuguu

SEQ ID NO: 2161774 - RNA, 19 nt, Homo sapiens
  misc_RNA (1)...(19): siRNA sense strand
ccucucagauacagcuuca

SEQ ID NO: 2161775 - RNA, 19 nt, Homo sapiens
  misc_RNA (1)...(19): siRNA sense strand
caacgugcugucuuuguuc

SEQ ID NO: 2161776 - RNA, 19 nt, Homo sapiens
  misc_RNA (1)...(19): siRNA sense strand
uggugcagcugcucucaga

SEQ ID NO: 2161777 - RNA, 19 nt, Homo sapiens
  misc_RNA (1)...(19): siRNA sense strand
gccgagcucuuccguaagc

SEQ ID NO: 2161778 - RNA, 19 nt, Homo sapiens
  misc_RNA (1)...(19): siRNA sense strand
agcaagagccgccuacuuc

SEQ ID NO: 2161779 - RNA, 19 nt, Homo sapiens
  misc_RNA (1)...(19): siRNA sense strand
cagcaagagccgccuacuu

SEQ ID NO: 2161780 - RNA, 19 nt, Homo sapiens
  misc_RNA (1)...(19): siRNA sense strand
ggaacagccuuggccucau

SEQ ID NO: 2161781 - RNA, 19 nt, Homo sapiens
  misc_RNA (1)...(19): siRNA sense strand
cagauacagcuucaccuau

SEQ ID NO: 2161782 - RNA, 19 nt, Homo sapiens
  misc_RNA (1)...(19): siRNA sense strand
ggaccaggaggacgagauc

SEQ ID NO: 2161783 - RNA, 19 nt, Homo sapiens
  misc_RNA (1)...(19): siRNA sense strand
gacaucagggccaccuuug

SEQ ID NO: 2161784 - RNA, 19 nt, Homo sapiens
  misc_RNA (1)...(19): siRNA sense strand
gagggacggucaccauucc

SEQ ID NO: 2161785 - RNA, 19 nt, Homo sapiens
  misc_RNA (1)...(19): siRNA sense strand
ugagcagccugguggaaag

SEQ ID NO: 2161786 - RNA, 19 nt, Homo sapiens
  misc_RNA (1)...(19): siRNA sense strand
cagcagagagugagaacag

SEQ ID NO: 2161787 - RNA, 19 nt, Homo sapiens
  misc_RNA (1)...(19): siRNA sense strand
ccacguggagggccugaau

SEQ ID NO: 2161788 - RNA, 19 nt, Homo sapiens
  misc_RNA (1)...(19): siRNA sense strand
agggcacucuguacaagaa

SEQ ID NO: 2161789 - RNA, 19 nt, Homo sapiens
  misc_RNA (1)...(19): siRNA sense strand
cagccaggccauccacuau

SEQ ID NO: 2161790 - RNA, 19 nt, Homo sapiens
  misc_RNA (1)...(19): siRNA sense strand
ccauggaguuugaguucag

SEQ ID NO: 2161791 - RNA, 19 nt, Homo sapiens
  misc_RNA (1)...(19): siRNA sense strand
gccaggccauccacuaugc

SEQ ID NO: 2161792 - RNA, 19 nt, Homo sapiens
  misc_RNA (1)...(19): siRNA sense strand
gagggcacucuguacaaga

SEQ ID NO: 2161793 - RNA, 19 nt, Homo sapiens
  misc_RNA (1)...(19): siRNA sense strand
gcgccgagcucuuccguaa

SEQ ID NO: 2161794 - RNA, 19 nt, Homo sapiens
  misc_RNA (1)...(19): siRNA sense strand
ccaccgaccuucuuuguug

SEQ ID NO: 2161795 - RNA, 19 nt, Homo sapiens
  misc_RNA (1)...(19): siRNA sense strand
cuacggaccuguucgauga

SEQ ID NO: 2161796 - RNA, 19 nt, Homo sapiens
  misc_RNA (1)...(19): siRNA sense strand
gcacugcuguuuccucuca

SEQ ID NO: 2161797 - RNA, 19 nt, Homo sapiens
  misc_RNA (1)...(19): siRNA sense strand
gaacagccuuggccucauc

SEQ ID NO: 2161798 - RNA, 19 nt, Homo sapiens
  misc_RNA (1)...(19): siRNA sense strand
ucaccaacgugcugucuuu

SEQ ID NO: 2161799 - RNA, 19 nt, Homo sapiens
  misc_RNA (1)...(19): siRNA sense strand
ucaagaagcugcugaaagc

SEQ ID NO: 2161800 - RNA, 19 nt, Homo sapiens
  misc_RNA (1)...(19): siRNA sense strand
gcaagggugucaucgacuu

SEQ ID NO: 2161801 - RNA, 19 nt, Homo sapiens
  misc_RNA (1)...(19): siRNA sense strand
ggacaaagcccagcucaag

SEQ ID NO: 2161802 - RNA, 19 nt, Homo sapiens
  misc_RNA (1)...(19): siRNA sense strand
gcaggucugugugggagua

SEQ ID NO: 2161803 - RNA, 19 nt, Homo sapiens
  misc_RNA (1)...(19): siRNA sense strand
ccaacgugcugucuuuguu

SEQ ID NO: 2161804 - RNA, 19 nt, Homo sapiens
  misc_RNA (1)...(19): siRNA sense strand
cagaguggcugauccagau

SEQ ID NO: 2161805 - RNA, 19 nt, Homo sapiens
  misc_RNA (1)...(19): siRNA sense strand
ggacaucagggccaccuuu

SEQ ID NO: 2161806 - RNA, 19 nt, Homo sapiens
  misc_RNA (1)...(19): siRNA sense strand
ucugagcccuuccgcauuu

SEQ ID NO: 2161807 - RNA, 19 nt, Homo sapiens
  misc_RNA (1)...(19): siRNA sense strand
ccacagagagggaggaaga

SEQ ID NO: 2161808 - RNA, 19 nt, Homo sapiens
  misc_RNA (1)...(19): siRNA sense strand
gcaugucacucgcaagaag

SEQ ID NO: 2161809 - RNA, 19 nt, Homo sapiens
  misc_RNA (1)...(19): siRNA sense strand
agauacagcuucaccuaug

SEQ ID NO: 2161810 - RNA, 19 nt, Homo sapiens
  misc_RNA (1)...(19): siRNA sense strand
gcagcgagcagcccucuau

SEQ ID NO: 2161811 - RNA, 19 nt, Homo sapiens
  misc_RNA (1)...(19): siRNA sense strand
gauacagcuucaccuaugu

SEQ ID NO: 2161812 - RNA, 19 nt, Homo sapiens
  misc_RNA (1)...(19): siRNA sense strand
gcaagaggacgccuguguu

SEQ ID NO: 2161813 - RNA, 19 nt, Homo sapiens
  misc_RNA (1)...(19): siRNA sense strand
cugcagcgcuucccagaga

SEQ ID NO: 2161814 - RNA, 19 nt, Homo sapiens
  misc_RNA (1)...(19): siRNA sense strand
cuaagacuguggacgagaa

SEQ ID NO: 2161815 - RNA, 19 nt, Homo sapiens
  misc_RNA (1)...(19): siRNA sense strand
ggaagaacggucugaugga

SEQ ID NO: 2161816 - RNA, 19 nt, Homo sapiens
  misc_RNA (1)...(19): siRNA sense strand
gauuguugcugaucuggau

SEQ ID NO: 2161817 - RNA, 19 nt, Homo sapiens
  misc_RNA (1)...(19): siRNA sense strand
guuccacaauuacauguau

SEQ ID NO: 2161818 - RNA, 19 nt, Homo sapiens
  misc_RNA (1)...(19): siRNA sense strand
gcucgacucugacuaugag

SEQ ID NO: 2161819 - RNA, 19 nt, Homo sapiens
  misc_RNA (1)...(19): siRNA sense strand
gagcagcccucuauauccu

SEQ ID NO: 2161820 - RNA, 19 nt, Homo sapiens
  misc_RNA (1)...(19): siRNA sense strand
uggcugcgcugaccaagga

SEQ ID NO: 2161821 - RNA, 19 nt, Homo sapiens
  misc_RNA (1)...(19): siRNA sense strand
ggagagcggcuucgaggau

SEQ ID NO: 2161822 - RNA, 19 nt, Homo sapiens
  misc_RNA (1)...(19): siRNA sense strand
caagaggacgccuguguuc

SEQ ID NO: 2161823 - RNA, 19 nt, Homo sapiens
  misc_RNA (1)...(19): siRNA sense strand
ggaauccaccgaccuucuu

SEQ ID NO: 2161824 - RNA, 19 nt, Homo sapiens
  misc_RNA (1)...(19): siRNA sense strand
cccggaaccuggucaagaa

SEQ ID NO: 2161825 - RNA, 19 nt, Homo sapiens
  misc_RNA (1)...(19): siRNA sense strand
gcaacugcaucuccuacgu

SEQ ID NO: 2161826 - RNA, 19 nt, Homo sapiens
  misc_RNA (1)...(19): siRNA sense strand
cagagccacugcagaguca

SEQ ID NO: 2161827 - RNA, 19 nt, Homo sapiens
  misc_RNA (1)...(19): siRNA sense strand
gcgagcagcccucuauauc

SEQ ID NO: 2161828 - RNA, 19 nt, Homo sapiens
  misc_RNA (1)...(19): siRNA sense strand
cagcugcgcuccugcacau

SEQ ID NO: 2161829 - RNA, 19 nt, Homo sapiens
  misc_RNA (1)...(19): siRNA sense strand
agcaggagcuggugcagaa

SEQ ID NO: 2161830 - RNA, 19 nt, Homo sapiens
  misc_RNA (1)...(19): siRNA sense strand
cugcaucuccuacguguuu

SEQ ID NO: 2161831 - RNA, 19 nt, Homo sapiens
  misc_RNA (1)...(19): siRNA sense strand
ucagauacagcuucaccua

SEQ ID NO: 2161832 - RNA, 19 nt, Homo sapiens
  misc_RNA (1)...(19): siRNA sense strand
gaggaagaacggucugaug

SEQ ID NO: 2161833 - RNA, 19 nt, Homo sapiens
  misc_RNA (1)...(19): siRNA sense strand
gcggagccuucacaggaaa

SEQ ID NO: 2161834 - RNA, 19 nt, Homo sapiens
  misc_RNA (1)...(19): siRNA sense strand
gaauccaccgaccuucuuu

SEQ ID NO: 2161835 - RNA, 19 nt, Homo sapiens
  misc_RNA (1)...(19): siRNA sense strand
gggagcuggugcccauuga

SEQ ID NO: 2161836 - RNA, 19 nt, Homo sapiens
  misc_RNA (1)...(19): siRNA sense strand
ggccuuugcuggcuuugug

SEQ ID NO: 2161837 - RNA, 19 nt, Homo sapiens
  misc_RNA (1)...(19): siRNA sense strand
ggagggacggucaccauuc

SEQ ID NO: 2161838 - RNA, 19 nt, Homo sapiens
  misc_RNA (1)...(19): siRNA sense strand
ugguggagcuccuggauuc

SEQ ID NO: 2161839 - RNA, 19 nt, Homo sapiens
  misc_RNA (1)...(19): siRNA sense strand
ggucaccauuccugagugu

SEQ ID NO: 2161840 - RNA, 19 nt, Homo sapiens
  misc_RNA (1)...(19): siRNA sense strand
ugcagaggcuggagacaga

SEQ ID NO: 2161841 - RNA, 19 nt, Homo sapiens
  misc_RNA (1)...(19): siRNA sense strand
ccacguaccgggucaucuu

SEQ ID NO: 2161842 - RNA, 19 nt, Homo sapiens
  misc_RNA (1)...(19): siRNA sense strand
gcaguguggccgagagcua

SEQ ID NO: 2161843 - RNA, 19 nt, Homo sapiens
  misc_RNA (1)...(19): siRNA sense strand
gggugacgcaguuugcaua

SEQ ID NO: 2161844 - RNA, 19 nt, Homo sapiens
  misc_RNA (1)...(19): siRNA sense strand
gcagagcagcggcuucaca

SEQ ID NO: 2161845 - RNA, 19 nt, Homo sapiens
  misc_RNA (1)...(19): siRNA sense strand
cagcaugucacucgcaaga

SEQ ID NO: 2161846 - RNA, 19 nt, Homo sapiens
  misc_RNA (1)...(19): siRNA sense strand
gucaagaacgccaagaaga

SEQ ID NO: 2161847 - RNA, 19 nt, Homo sapiens
  misc_RNA (1)...(19): siRNA sense strand
ugacagcgccgagcucuuc

SEQ ID NO: 2161848 - RNA, 19 nt, Homo sapiens
  misc_RNA (1)...(19): siRNA sense strand
gaggagagcacgguguuca

SEQ ID NO: 2161849 - RNA, 19 nt, Homo sapiens
  misc_RNA (1)...(19): siRNA sense strand
guggagggccugaaugugu

SEQ ID NO: 2161850 - RNA, 19 nt, Homo sapiens
  misc_RNA (1)...(19): siRNA sense strand
gcuguuuccucucagauac

SEQ ID NO: 2161851 - RNA, 19 nt, Homo sapiens
  misc_RNA (1)...(19): siRNA sense strand
gcugguagaggacgauuuc

SEQ ID NO: 2161852 - RNA, 19 nt, Homo sapiens
  misc_RNA (1)...(19): siRNA sense strand
caacguguccaaccugaag

SEQ ID NO: 2161853 - RNA, 19 nt, Homo sapiens
  misc_RNA (1)...(19): siRNA sense strand
ccaccagcaguuugacuuu

SEQ ID NO: 2161854 - RNA, 19 nt, Homo sapiens
  misc_RNA (1)...(19): siRNA sense strand
ggacagcgaccagaguagu

SEQ ID NO: 2161855 - RNA, 19 nt, Homo sapiens
  misc_RNA (1)...(19): siRNA sense strand
ugugggacuucuacacuga

SEQ ID NO: 2161856 - RNA, 19 nt, Homo sapiens
  misc_RNA (1)...(19): siRNA sense strand
gcuggugcccauugaggua

SEQ ID NO: 2161857 - RNA, 19 nt, Homo sapiens
  misc_RNA (1)...(19): siRNA sense strand
ugacgcaguuugcauacag

SEQ ID NO: 2161858 - RNA, 19 nt, Homo sapiens
  misc_RNA (1)...(19): siRNA sense strand
gacuuugucguccguauga

SEQ ID NO: 2161859 - RNA, 19 nt, Homo sapiens
  misc_RNA (1)...(19): siRNA sense strand
cccacgcccuucaucauug

SEQ ID NO: 2161860 - RNA, 19 nt, Homo sapiens
  misc_RNA (1)...(19): siRNA sense strand
guacagccaguuccagaca

SEQ ID NO: 2161861 - RNA, 19 nt, Homo sapiens
  misc_RNA (1)...(19): siRNA sense strand
ucaagggugugcggucaga

SEQ ID NO: 2161862 - RNA, 19 nt, Homo sapiens
  misc_RNA (1)...(19): siRNA sense strand
gcugugguccgcuucauca

SEQ ID NO: 2161863 - RNA, 19 nt, Homo sapiens
  misc_RNA (1)...(19): siRNA sense strand
cccuagacguggcuucuga

SEQ ID NO: 2161864 - RNA, 19 nt, Homo sapiens
  misc_RNA (1)...(19): siRNA sense strand
caccagcaguuugacuuug

SEQ ID NO: 2161865 - RNA, 19 nt, Homo sapiens
  misc_RNA (1)...(19): siRNA sense strand
ccugucauccgcuuccaua

SEQ ID NO: 2161866 - RNA, 19 nt, Homo sapiens
  misc_RNA (1)...(19): siRNA sense strand
ugaagaugcaggacaagga

SEQ ID NO: 2161867 - RNA, 19 nt, Homo sapiens
  misc_RNA (1)...(19): siRNA sense strand
ucacggagcacaagguucu

SEQ ID NO: 2161868 - RNA, 19 nt, Homo sapiens
  misc_RNA (1)...(19): siRNA sense strand
cgagggcacucuguacaag

SEQ ID NO: 2161869 - RNA, 19 nt, Homo sapiens
  misc_RNA (1)...(19): siRNA sense strand
ccaguucuaccucaaguuc

SEQ ID NO: 2161870 - RNA, 19 nt, Homo sapiens
  misc_RNA (1)...(19): siRNA sense strand
ggucaagaacgccaagaag

SEQ ID NO: 2161871 - RNA, 19 nt, Homo sapiens
  misc_RNA (1)...(19): siRNA sense strand
uccguaagcagcugcauaa

SEQ ID NO: 2161872 - RNA, 19 nt, Homo sapiens
  misc_RNA (1)...(19): siRNA sense strand
gucauccgcuuccauaagg

SEQ ID NO: 2161873 - RNA, 19 nt, Homo sapiens
  misc_RNA (1)...(19): siRNA sense strand
gcugcucgaugugauuguu

SEQ ID NO: 2161874 - RNA, 19 nt, Homo sapiens
  misc_RNA (1)...(19): siRNA sense strand
ccucucagauacagcuuca

SEQ ID NO: 2161875 - RNA, 19 nt, Homo sapiens
  misc_RNA (1)...(19): siRNA sense strand
caacgugcugucuuuguuc

SEQ ID NO: 2161876 - RNA, 19 nt, Homo sapiens
  misc_RNA (1)...(19): siRNA sense strand
uggugcagcugcucucaga

SEQ ID NO: 2161877 - RNA, 19 nt, Homo sapiens
  misc_RNA (1)...(19): siRNA sense strand
gccgagcucuuccguaagc

SEQ ID NO: 2161878 - RNA, 19 nt, Homo sapiens
  misc_RNA (1)...(19): siRNA sense strand
agcaagagccgccuacuuc

SEQ ID NO: 2161879 - RNA, 19 nt, Homo sapiens
  misc_RNA (1)...(19): siRNA sense strand
cagcaagagccgccuacuu

SEQ ID NO: 2161880 - RNA, 19 nt, Homo sapiens
  misc_RNA (1)...(19): siRNA sense strand
ggaacagccuuggccucau

SEQ ID NO: 2161881 - RNA, 19 nt, Homo sapiens
  misc_RNA (1)...(19): siRNA sense strand
cagauacagcuucaccuau

SEQ ID NO: 2161882 - RNA, 19 nt, Homo sapiens
  misc_RNA (1)...(19): siRNA sense strand
ggaccaggaggacgagauc

SEQ ID NO: 2161883 - RNA, 19 nt, Homo sapiens
  misc_RNA (1)...(19): siRNA sense strand
gacaucagggccaccuuug

SEQ ID NO: 2161884 - RNA, 19 nt, Homo sapiens
  misc_RNA (1)...(19): siRNA sense strand
gagggacggucaccauucc

SEQ ID NO: 2161885 - RNA, 19 nt, Homo sapiens
  misc_RNA (1)...(19): siRNA sense strand
ugagcagccugguggaaag

SEQ ID NO: 2161886 - RNA, 19 nt, Homo sapiens
  misc_RNA (1)...(19): siRNA sense strand
ccacguggagggccugaau

SEQ ID NO: 2161887 - RNA, 19 nt, Homo sapiens
  misc_RNA (1)...(19): siRNA sense strand
agggcacucuguacaagaa

SEQ ID NO: 2161888 - RNA, 19 nt, Homo sapiens
  misc_RNA (1)...(19): siRNA sense strand
cagccaggccauccacuau

SEQ ID NO: 2161889 - RNA, 19 nt, Homo sapiens
  misc_RNA (1)...(19): siRNA sense strand
ccauggaguuugaguucag

SEQ ID NO: 2161890 - RNA, 19 nt, Homo sapiens
  misc_RNA (1)...(19): siRNA sense strand
gccaggccauccacuaugc

SEQ ID NO: 2161891 - RNA, 19 nt, Homo sapiens
  misc_RNA (1)...(19): siRNA sense strand
cagcgagcagcccucuaua

SEQ ID NO: 2161892 - RNA, 19 nt, Homo sapiens
  misc_RNA (1)...(19): siRNA sense strand
gagggcacucuguacaaga

SEQ ID NO: 2161893 - RNA, 19 nt, Homo sapiens
  misc_RNA (1)...(19): siRNA sense strand
gagauuagcucauuguuug

SEQ ID NO: 2161894 - RNA, 19 nt, Homo sapiens
  misc_RNA (1)...(19): siRNA sense strand
caacaucaguggcccuuua

SEQ ID NO: 2161895 - RNA, 19 nt, Homo sapiens
  misc_RNA (1)...(19): siRNA sense strand
gcagagccaugaagaaguu

SEQ ID NO: 2161896 - RNA, 19 nt, Homo sapiens
  misc_RNA (1)...(19): siRNA sense strand
acacagcgauuaugucauu

SEQ ID NO: 2161897 - RNA, 19 nt, Homo sapiens
  misc_RNA (1)...(19): siRNA sense strand
uugcaaagcuucacacaaa

SEQ ID NO: 2161898 - RNA, 19 nt, Homo sapiens
  misc_RNA (1)...(19): siRNA sense strand
uaaaggugcugaagaaugg

SEQ ID NO: 2161899 - RNA, 19 nt, Homo sapiens
  misc_RNA (1)...(19): siRNA sense strand
cagagaagguccaagcuau

SEQ ID NO: 2161900 - RNA, 19 nt, Homo sapiens
  misc_RNA (1)...(19): siRNA sense strand
gaacacagcccugcacauc

SEQ ID NO: 2161901 - RNA, 19 nt, Homo sapiens
  misc_RNA (1)...(19): siRNA sense strand
caaagacucggauguugua

SEQ ID NO: 2161902 - RNA, 19 nt, Homo sapiens
  misc_RNA (1)...(19): siRNA sense strand
gauacaagcggcgaguuua

SEQ ID NO: 2161903 - RNA, 19 nt, Homo sapiens
  misc_RNA (1)...(19): siRNA sense strand
gcaaccgccucgucaugaa

SEQ ID NO: 2161904 - RNA, 19 nt, Homo sapiens
  misc_RNA (1)...(19): siRNA sense strand
caaaggcgaaccugaagaa

SEQ ID NO: 2161905 - RNA, 19 nt, Homo sapiens
  misc_RNA (1)...(19): siRNA sense strand
gagcugguguuugcuguga

SEQ ID NO: 2161906 - RNA, 19 nt, Homo sapiens
  misc_RNA (1)...(19): siRNA sense strand
gccguaaccugaacaagau

SEQ ID NO: 2161907 - RNA, 19 nt, Homo sapiens
  misc_RNA (1)...(19): siRNA sense strand
aggcgaaccugaagaaguu

SEQ ID NO: 2161908 - RNA, 19 nt, Homo sapiens
  misc_RNA (1)...(19): siRNA sense strand
ggaagucacccgaggacaa

SEQ ID NO: 2161909 - RNA, 19 nt, Homo sapiens
  misc_RNA (1)...(19): siRNA sense strand
ucaugaagguugugucugu

SEQ ID NO: 2161910 - RNA, 19 nt, Homo sapiens
  misc_RNA (1)...(19): siRNA sense strand
gggaugcccucugcuguga

SEQ ID NO: 2161911 - RNA, 19 nt, Homo sapiens
  misc_RNA (1)...(19): siRNA sense strand
ccacaaagacucggauguu

SEQ ID NO: 2161912 - RNA, 19 nt, Homo sapiens
  misc_RNA (1)...(19): siRNA sense strand
cacaaagacucggauguug

SEQ ID NO: 2161913 - RNA, 19 nt, Homo sapiens
  misc_RNA (1)...(19): siRNA sense strand
caaggccucccucuucuuu

SEQ ID NO: 2161914 - RNA, 19 nt, Homo sapiens
  misc_RNA (1)...(19): siRNA sense strand
caagguggcacgccuguug

SEQ ID NO: 2161915 - RNA, 19 nt, Homo sapiens
  misc_RNA (1)...(19): siRNA sense strand
acacaaaggcgaaccugaa

SEQ ID NO: 2161916 - RNA, 19 nt, Homo sapiens
  misc_RNA (1)...(19): siRNA sense strand
caucaucgcagggaacuuu

SEQ ID NO: 2161917 - RNA, 19 nt, Homo sapiens
  misc_RNA (1)...(19): siRNA sense strand
cgagauuagcucauuguuu

SEQ ID NO: 2161918 - RNA, 19 nt, Homo sapiens
  misc_RNA (1)...(19): siRNA sense strand
gcgcucaacuaugggcuuu

SEQ ID NO: 2161919 - RNA, 19 nt, Homo sapiens
  misc_RNA (1)...(19): siRNA sense strand
gaugauaagcaguuugcaa

SEQ ID NO: 2161920 - RNA, 19 nt, Homo sapiens
  misc_RNA (1)...(19): siRNA sense strand
ucacacagcgauuauguca

SEQ ID NO: 2161921 - RNA, 19 nt, Homo sapiens
  misc_RNA (1)...(19): siRNA sense strand
ccagcgauaucaaccugaa

SEQ ID NO: 2161922 - RNA, 19 nt, Homo sapiens
  misc_RNA (1)...(19): siRNA sense strand
acacagcccugcacaucug

SEQ ID NO: 2161923 - RNA, 19 nt, Homo sapiens
  misc_RNA (1)...(19): siRNA sense strand
gggcuucaccugacuacaa

SEQ ID NO: 2161924 - RNA, 19 nt, Homo sapiens
  misc_RNA (1)...(19): siRNA sense strand
gauaagcaguuugcaaagc

SEQ ID NO: 2161925 - RNA, 19 nt, Homo sapiens
  misc_RNA (1)...(19): siRNA sense strand
cgaggaccaugagauagaa

SEQ ID NO: 2161926 - RNA, 19 nt, Homo sapiens
  misc_RNA (1)...(19): siRNA sense strand
cagcuggccucaucguugu

SEQ ID NO: 2161927 - RNA, 19 nt, Homo sapiens
  misc_RNA (1)...(19): siRNA sense strand
ugcuaaaggugcugaagaa

SEQ ID NO: 2161928 - RNA, 19 nt, Homo sapiens
  misc_RNA (1)...(19): siRNA sense strand
cgacaaaccaacugugauc

SEQ ID NO: 2161929 - RNA, 19 nt, Homo sapiens
  misc_RNA (1)...(19): siRNA sense strand
gacgacaaaccaacuguga

SEQ ID NO: 2161930 - RNA, 19 nt, Homo sapiens
  misc_RNA (1)...(19): siRNA sense strand
ccagagaagguccaagcua

SEQ ID NO: 2161931 - RNA, 19 nt, Homo sapiens
  misc_RNA (1)...(19): siRNA sense strand
uugagaagcuggacgagau

SEQ ID NO: 2161932 - RNA, 19 nt, Homo sapiens
  misc_RNA (1)...(19): siRNA sense strand
ugacaaggaagccagaaga

SEQ ID NO: 2161933 - RNA, 19 nt, Homo sapiens
  misc_RNA (1)...(19): siRNA sense strand
acagggauguccgcaacua

SEQ ID NO: 2161934 - RNA, 19 nt, Homo sapiens
  misc_RNA (1)...(19): siRNA sense strand
gaggagcuggcccgaauug

SEQ ID NO: 2161935 - RNA, 19 nt, Homo sapiens
  misc_RNA (1)...(19): siRNA sense strand
caucgaugauaagcaguuu

SEQ ID NO: 2161936 - RNA, 19 nt, Homo sapiens
  misc_RNA (1)...(19): siRNA sense strand
ccaggacgcgcucaacuau

SEQ ID NO: 2161937 - RNA, 19 nt, Homo sapiens
  misc_RNA (1)...(19): siRNA sense strand
guuguaccauucagggaaa

SEQ ID NO: 2161938 - RNA, 19 nt, Homo sapiens
  misc_RNA (1)...(19): siRNA sense strand
acucggauguuguaccauu

SEQ ID NO: 2161939 - RNA, 19 nt, Homo sapiens
  misc_RNA (1)...(19): siRNA sense strand
cuaaaggugcugaagaaug

SEQ ID NO: 2161940 - RNA, 19 nt, Homo sapiens
  misc_RNA (1)...(19): siRNA sense strand
gcgacuggcuggagagcau

SEQ ID NO: 2161941 - RNA, 19 nt, Homo sapiens
  misc_RNA (1)...(19): siRNA sense strand
gcuggacccugccaagaag

SEQ ID NO: 2161942 - RNA, 19 nt, Homo sapiens
  misc_RNA (1)...(19): siRNA sense strand
cgauacaagcggcgaguuu

SEQ ID NO: 2161943 - RNA, 19 nt, Homo sapiens
  misc_RNA (1)...(19): siRNA sense strand
gcaggugguggcucugauu

SEQ ID NO: 2161944 - RNA, 19 nt, Homo sapiens
  misc_RNA (1)...(19): siRNA sense strand
ccgccgagauuagcucauu

SEQ ID NO: 2161945 - RNA, 19 nt, Homo sapiens
  misc_RNA (1)...(19): siRNA sense strand
gaagacgacaaaccaacug

SEQ ID NO: 2161946 - RNA, 19 nt, Homo sapiens
  misc_RNA (1)...(19): siRNA sense strand
gcagggaggcagagaaggu

SEQ ID NO: 2161947 - RNA, 19 nt, Homo sapiens
  misc_RNA (1)...(19): siRNA sense strand
cuucgaggaccaugagaua

SEQ ID NO: 2161948 - RNA, 19 nt, Homo sapiens
  misc_RNA (1)...(19): siRNA sense strand
cagggaagcccagcaguga

SEQ ID NO: 2161949 - RNA, 19 nt, Homo sapiens
  misc_RNA (1)...(19): siRNA sense strand
caacgccacggaccugcua

SEQ ID NO: 2161950 - RNA, 19 nt, Homo sapiens
  misc_RNA (1)...(19): siRNA sense strand
gaagucacccgaggacaag

SEQ ID NO: 2161951 - RNA, 19 nt, Homo sapiens
  misc_RNA (1)...(19): siRNA sense strand
ucgaggaacuugagaagcu

SEQ ID NO: 2161952 - RNA, 19 nt, Homo sapiens
  misc_RNA (1)...(19): siRNA sense strand
ccuggacccucgcugagaa

SEQ ID NO: 2161953 - RNA, 19 nt, Homo sapiens
  misc_RNA (1)...(19): siRNA sense strand
uugcagagguuaucaagac

SEQ ID NO: 2161954 - RNA, 19 nt, Homo sapiens
  misc_RNA (1)...(19): siRNA sense strand
ucaccucacacagcgauua

SEQ ID NO: 2161955 - RNA, 19 nt, Homo sapiens
  misc_RNA (1)...(19): siRNA sense strand
ccggcaaguuccuggauga

SEQ ID NO: 2161956 - RNA, 19 nt, Homo sapiens
  misc_RNA (1)...(19): siRNA sense strand
guccaaggccucccucuuc

SEQ ID NO: 2161957 - RNA, 19 nt, Homo sapiens
  misc_RNA (1)...(19): siRNA sense strand
gcgcagagccaugaagaag

SEQ ID NO: 2161958 - RNA, 19 nt, Homo sapiens
  misc_RNA (1)...(19): siRNA sense strand
caugacacacggccugaaa

SEQ ID NO: 2161959 - RNA, 19 nt, Homo sapiens
  misc_RNA (1)...(19): siRNA sense strand
gcaaagcuucacacaaagg

SEQ ID NO: 2161960 - RNA, 19 nt, Homo sapiens
  misc_RNA (1)...(19): siRNA sense strand
gagaagguccaagcuaugg

SEQ ID NO: 2161961 - RNA, 19 nt, Homo sapiens
  misc_RNA (1)...(19): siRNA sense strand
ccacggaccaagucuguag

SEQ ID NO: 2161962 - RNA, 19 nt, Homo sapiens
  misc_RNA (1)...(19): siRNA sense strand
cagcgauuaugucauugau

SEQ ID NO: 2161963 - RNA, 19 nt, Homo sapiens
  misc_RNA (1)...(19): siRNA sense strand
gauuagcucauuguuugaa

SEQ ID NO: 2161964 - RNA, 19 nt, Homo sapiens
  misc_RNA (1)...(19): siRNA sense strand
gggugaacguggugaaggu

SEQ ID NO: 2161965 - RNA, 19 nt, Homo sapiens
  misc_RNA (1)...(19): siRNA sense strand
uggcacgccuguuggacaa

SEQ ID NO: 2161966 - RNA, 19 nt, Homo sapiens
  misc_RNA (1)...(19): siRNA sense strand
ccaaggaggugcgcuucgu

SEQ ID NO: 2161967 - RNA, 19 nt, Homo sapiens
  misc_RNA (1)...(19): siRNA sense strand
caacuacaacagccagaca

SEQ ID NO: 2161968 - RNA, 19 nt, Homo sapiens
  misc_RNA (1)...(19): siRNA sense strand
ggcaaccgccucgucauga

SEQ ID NO: 2161969 - RNA, 19 nt, Homo sapiens
  misc_RNA (1)...(19): siRNA sense strand
gaccaggagagcaacauca

SEQ ID NO: 2161970 - RNA, 19 nt, Homo sapiens
  misc_RNA (1)...(19): siRNA sense strand
agacucggauguuguacca

SEQ ID NO: 2161971 - RNA, 19 nt, Homo sapiens
  misc_RNA (1)...(19): siRNA sense strand
aggacgcgcucaacuaugg

SEQ ID NO: 2161972 - RNA, 19 nt, Homo sapiens
  misc_RNA (1)...(19): siRNA sense strand
augauaagcaguuugcaaa

SEQ ID NO: 2161973 - RNA, 19 nt, Homo sapiens
  misc_RNA (1)...(19): siRNA sense strand
uaucaagacccacaaagac

SEQ ID NO: 2161974 - RNA, 19 nt, Homo sapiens
  misc_RNA (1)...(19): siRNA sense strand
cagagccgccaccgucaaa

SEQ ID NO: 2161975 - RNA, 19 nt, Homo sapiens
  misc_RNA (1)...(19): siRNA sense strand
cagaugaggcagcaugaca

SEQ ID NO: 2161976 - RNA, 19 nt, Homo sapiens
  misc_RNA (1)...(19): siRNA sense strand
gcucagccagcgauaucaa

SEQ ID NO: 2161977 - RNA, 19 nt, Homo sapiens
  misc_RNA (1)...(19): siRNA sense strand
ucgaggaccaugagauaga

SEQ ID NO: 2161978 - RNA, 19 nt, Homo sapiens
  misc_RNA (1)...(19): siRNA sense strand
ggaggagcuggcccgaauu

SEQ ID NO: 2161979 - RNA, 19 nt, Homo sapiens
  misc_RNA (1)...(19): siRNA sense strand
ggcuucaccugacuacaag

SEQ ID NO: 2161980 - RNA, 19 nt, Homo sapiens
  misc_RNA (1)...(19): siRNA sense strand
uaccuggaguuucgauaca

SEQ ID NO: 2161981 - RNA, 19 nt, Homo sapiens
  misc_RNA (1)...(19): siRNA sense strand
gaugaggcagcaugacaca

SEQ ID NO: 2161982 - RNA, 19 nt, Homo sapiens
  misc_RNA (1)...(19): siRNA sense strand
uuaucaagacccacaaaga

SEQ ID NO: 2161983 - RNA, 19 nt, Homo sapiens
  misc_RNA (1)...(19): siRNA sense strand
gggauguccgcaacuacaa

SEQ ID NO: 2161984 - RNA, 19 nt, Homo sapiens
  misc_RNA (1)...(19): siRNA sense strand
ccucacacagcgauuaugu

SEQ ID NO: 2161985 - RNA, 19 nt, Homo sapiens
  misc_RNA (1)...(19): siRNA sense strand
caucaguggcccuuuagca

SEQ ID NO: 2161986 - RNA, 19 nt, Homo sapiens
  misc_RNA (1)...(19): siRNA sense strand
gcgaguuuaugcccagaac

SEQ ID NO: 2161987 - RNA, 19 nt, Homo sapiens
  misc_RNA (1)...(19): siRNA sense strand
ccagggcagcucagaggaa

SEQ ID NO: 2161988 - RNA, 19 nt, Homo sapiens
  misc_RNA (1)...(19): siRNA sense strand
gagccgccaccgucaaaca

SEQ ID NO: 2161989 - RNA, 19 nt, Homo sapiens
  misc_RNA (1)...(19): siRNA sense strand
gcucgaggaacuugagaag

SEQ ID NO: 2161990 - RNA, 19 nt, Homo sapiens
  misc_RNA (1)...(19): siRNA sense strand
gacuacguccagcugcaua

SEQ ID NO: 2161991 - RNA, 19 nt, Homo sapiens
  misc_RNA (1)...(19): siRNA sense strand
uggaggaagugcagaugag

SEQ ID NO: 2161992 - RNA, 19 nt, Homo sapiens
  misc_RNA (1)...(19): siRNA sense strand
acggugcgcuccagcuuca

SEQ ID NO: 2161993 - RNA, 19 nt, Homo sapiens
  misc_RNA (1)...(19): siRNA sense strand
gaaaucaccucuuaucaua

SEQ ID NO: 2161994 - RNA, 19 nt, Homo sapiens
  misc_RNA (1)...(19): siRNA sense strand
gcacagaccuugcuccuuu

SEQ ID NO: 2161995 - RNA, 19 nt, Homo sapiens
  misc_RNA (1)...(19): siRNA sense strand
gaaaauagcuugaagucua

SEQ ID NO: 2161996 - RNA, 19 nt, Homo sapiens
  misc_RNA (1)...(19): siRNA sense strand
ggagaaaccuuaucagugu

SEQ ID NO: 2161997 - RNA, 19 nt, Homo sapiens
  misc_RNA (1)...(19): siRNA sense strand
ggaaaggccuucuguggaa

SEQ ID NO: 2161998 - RNA, 19 nt, Homo sapiens
  misc_RNA (1)...(19): siRNA sense strand
ggaaagacaccuuguauau

SEQ ID NO: 2161999 - RNA, 19 nt, Homo sapiens
  misc_RNA (1)...(19): siRNA sense strand
ggaagaagcccuaugaaug

SEQ ID NO: 2162000 - RNA, 19 nt, Homo sapiens
  misc_RNA (1)...(19): siRNA sense strand
gaaagacaccuuguauaua

SEQ ID NO: 2162001 - RNA, 19 nt, Homo sapiens
  misc_RNA (1)...(19): siRNA sense strand
gaagucacaucucauucua

SEQ ID NO: 2162002 - RNA, 19 nt, Homo sapiens
  misc_RNA (1)...(19): siRNA sense strand
ggagaaacccuaugaaugu

SEQ ID NO: 2162003 - RNA, 19 nt, Homo sapiens
  misc_RNA (1)...(19): siRNA sense strand
ucucagaaaucaccucuua

SEQ ID NO: 2162004 - RNA, 19 nt, Homo sapiens
  misc_RNA (1)...(19): siRNA sense strand
gaagucaccuuucacuguu

SEQ ID NO: 2162005 - RNA, 19 nt, Homo sapiens
  misc_RNA (1)...(19): siRNA sense strand
gaagaagcccuaugaaugu

SEQ ID NO: 2162006 - RNA, 19 nt, Homo sapiens
  misc_RNA (1)...(19): siRNA sense strand
ggacaucaaagaauucaua

SEQ ID NO: 2162007 - RNA, 19 nt, Homo sapiens
  misc_RNA (1)...(19): siRNA sense strand
ggagaccaccuaaguauaa

SEQ ID NO: 2162008 - RNA, 19 nt, Homo sapiens
  misc_RNA (1)...(19): siRNA sense strand
agaaaucacuccucauuau

SEQ ID NO: 2162009 - RNA, 19 nt, Homo sapiens
  misc_RNA (1)...(19): siRNA sense strand
gagaaacccuaugaaugua

SEQ ID NO: 2162010 - RNA, 19 nt, Homo sapiens
  misc_RNA (1)...(19): siRNA sense strand
gagaaacccuaugaaugua

SEQ ID NO: 2162011 - RNA, 19 nt, Homo sapiens
  misc_RNA (1)...(19): siRNA sense strand
gagagaagcccuauaagug

SEQ ID NO: 2162012 - RNA, 19 nt, Homo sapiens
  misc_RNA (1)...(19): siRNA sense strand
gagagaagcccuuugaaug

SEQ ID NO: 2162013 - RNA, 19 nt, Homo sapiens
  misc_RNA (1)...(19): siRNA sense strand
ugaaaggccuugaaucuuc

SEQ ID NO: 2162014 - RNA, 19 nt, Homo sapiens
  misc_RNA (1)...(19): siRNA sense strand
ggagagaaaccuuauaugu

SEQ ID NO: 2162015 - RNA, 19 nt, Homo sapiens
  misc_RNA (1)...(19): siRNA sense strand
cauaggacaucaaagaauu

SEQ ID NO: 2162016 - RNA, 19 nt, Homo sapiens
  misc_RNA (1)...(19): siRNA sense strand
ggagagaaaccauauguau

SEQ ID NO: 2162017 - RNA, 19 nt, Homo sapiens
  misc_RNA (1)...(19): siRNA sense strand
agagaaaccuuauaugugu

SEQ ID NO: 2162018 - RNA, 19 nt, Homo sapiens
  misc_RNA (1)...(19): siRNA sense strand
ggagaaacccuaugagugu

SEQ ID NO: 2162019 - RNA, 19 nt, Homo sapiens
  misc_RNA (1)...(19): siRNA sense strand
gaaagucuccacucauuau

SEQ ID NO: 2162020 - RNA, 19 nt, Homo sapiens
  misc_RNA (1)...(19): siRNA sense strand
ggaaaggacccauggauca

SEQ ID NO: 2162021 - RNA, 19 nt, Homo sapiens
  misc_RNA (1)...(19): siRNA sense strand
ucaaggaaaucaagacaga

SEQ ID NO: 2162022 - RNA, 19 nt, Homo sapiens
  misc_RNA (1)...(19): siRNA sense strand
ggaaagucuccacucauua

SEQ ID NO: 2162023 - RNA, 19 nt, Homo sapiens
  misc_RNA (1)...(19): siRNA sense strand
gagagaaacccuaugaaug

SEQ ID NO: 2162024 - RNA, 19 nt, Homo sapiens
  misc_RNA (1)...(19): siRNA sense strand
gaagucacagcucauuaua

SEQ ID NO: 2162025 - RNA, 19 nt, Homo sapiens
  misc_RNA (1)...(19): siRNA sense strand
ggagauagucaaugugaaa

SEQ ID NO: 2162026 - RNA, 19 nt, Homo sapiens
  misc_RNA (1)...(19): siRNA sense strand
gaaaucacuccucauuauu

SEQ ID NO: 2162027 - RNA, 19 nt, Homo sapiens
  misc_RNA (1)...(19): siRNA sense strand
gcaagcccauguucaguau

SEQ ID NO: 2162028 - RNA, 19 nt, Homo sapiens
  misc_RNA (1)...(19): siRNA sense strand
gagaaaccuuauaugugua

SEQ ID NO: 2162029 - RNA, 19 nt, Homo sapiens
  misc_RNA (1)...(19): siRNA sense strand
gagaaacccuaugagugua

SEQ ID NO: 2162030 - RNA, 19 nt, Homo sapiens
  misc_RNA (1)...(19): siRNA sense strand
gagagaaaccuuauaugug

SEQ ID NO: 2162031 - RNA, 19 nt, Homo sapiens
  misc_RNA (1)...(19): siRNA sense strand
gagaaacccuccagaugca

SEQ ID NO: 2162032 - RNA, 19 nt, Homo sapiens
  misc_RNA (1)...(19): siRNA sense strand
gaucauagagagugaguug

SEQ ID NO: 2162033 - RNA, 19 nt, Homo sapiens
  misc_RNA (1)...(19): siRNA sense strand
ggagagaaacccuaugaau

SEQ ID NO: 2162034 - RNA, 19 nt, Homo sapiens
  misc_RNA (1)...(19): siRNA sense strand
ggaaaucaagacagaguuu

SEQ ID NO: 2162035 - RNA, 19 nt, Homo sapiens
  misc_RNA (1)...(19): siRNA sense strand
ggaagucaccuuucacugu

SEQ ID NO: 2162036 - RNA, 19 nt, Homo sapiens
  misc_RNA (1)...(19): siRNA sense strand
gcaggaaagccuucuguga

SEQ ID NO: 2162037 - RNA, 19 nt, Homo sapiens
  misc_RNA (1)...(19): siRNA sense strand
ggagagaagcccuauaagu

SEQ ID NO: 2162038 - RNA, 19 nt, Homo sapiens
  misc_RNA (1)...(19): siRNA sense strand
ccagaaaucacuccucauu

SEQ ID NO: 2162039 - RNA, 19 nt, Homo sapiens
  misc_RNA (1)...(19): siRNA sense strand
ggaaagccuucagugagaa

SEQ ID NO: 2162040 - RNA, 19 nt, Homo sapiens
  misc_RNA (1)...(19): siRNA sense strand
gaaaggccuucuguggaaa

SEQ ID NO: 2162041 - RNA, 19 nt, Homo sapiens
  misc_RNA (1)...(19): siRNA sense strand
ccagaagucacaucuaauu

SEQ ID NO: 2162042 - RNA, 19 nt, Homo sapiens
  misc_RNA (1)...(19): siRNA sense strand
ucccagaagucacaucuaa

SEQ ID NO: 2162043 - RNA, 19 nt, Homo sapiens
  misc_RNA (1)...(19): siRNA sense strand
gugaaacauugacugauga

SEQ ID NO: 2162044 - RNA, 19 nt, Homo sapiens
  misc_RNA (1)...(19): siRNA sense strand
gggagaaacccuaugaaug

SEQ ID NO: 2162045 - RNA, 19 nt, Homo sapiens
  misc_RNA (1)...(19): siRNA sense strand
agagaaacccuaugaaugu

SEQ ID NO: 2162046 - RNA, 19 nt, Homo sapiens
  misc_RNA (1)...(19): siRNA sense strand
ggauguggcuguggacuuc

SEQ ID NO: 2162047 - RNA, 19 nt, Homo sapiens
  misc_RNA (1)...(19): siRNA sense strand
cagaaaucacuccucauua

SEQ ID NO: 2162048 - RNA, 19 nt, Homo sapiens
  misc_RNA (1)...(19): siRNA sense strand
caucaaagacuucauacug

SEQ ID NO: 2162049 - RNA, 19 nt, Homo sapiens
  misc_RNA (1)...(19): siRNA sense strand
gaaagagccccaaaggaua

SEQ ID NO: 2162050 - RNA, 19 nt, Homo sapiens
  misc_RNA (1)...(19): siRNA sense strand
ggaaaauccuucucucaga

SEQ ID NO: 2162051 - RNA, 19 nt, Homo sapiens
  misc_RNA (1)...(19): siRNA sense strand
ccaacagucccaccucaua

SEQ ID NO: 2162052 - RNA, 19 nt, Homo sapiens
  misc_RNA (1)...(19): siRNA sense strand
cagaagucacaucuaauua

SEQ ID NO: 2162053 - RNA, 19 nt, Homo sapiens
  misc_RNA (1)...(19): siRNA sense strand
gagaaacccuaugaguguu

SEQ ID NO: 2162054 - RNA, 19 nt, Homo sapiens
  misc_RNA (1)...(19): siRNA sense strand
ggagagaaacccuaugagu

SEQ ID NO: 2162055 - RNA, 19 nt, Homo sapiens
  misc_RNA (1)...(19): siRNA sense strand
guacagugcauuugggaaa

SEQ ID NO: 2162056 - RNA, 19 nt, Homo sapiens
  misc_RNA (1)...(19): siRNA sense strand
caucagucgugaaacauug

SEQ ID NO: 2162057 - RNA, 19 nt, Homo sapiens
  misc_RNA (1)...(19): siRNA sense strand
gagagugaguugucaaggu

SEQ ID NO: 2162058 - RNA, 19 nt, Homo sapiens
  misc_RNA (1)...(19): siRNA sense strand
gcucagaagacccugcaua

SEQ ID NO: 2162059 - RNA, 19 nt, Homo sapiens
  misc_RNA (1)...(19): siRNA sense strand
gagaagcccuuugaaugca

SEQ ID NO: 2162060 - RNA, 19 nt, Homo sapiens
  misc_RNA (1)...(19): siRNA sense strand
ccagagagaagcccuuuga

SEQ ID NO: 2162061 - RNA, 19 nt, Homo sapiens
  misc_RNA (1)...(19): siRNA sense strand
guaggaaagccuucaguga

SEQ ID NO: 2162062 - RNA, 19 nt, Homo sapiens
  misc_RNA (1)...(19): siRNA sense strand
cgugaaacauugacugaug

SEQ ID NO: 2162063 - RNA, 19 nt, Homo sapiens
  misc_RNA (1)...(19): siRNA sense strand
uaacaggagcuaugcaaga

SEQ ID NO: 2162064 - RNA, 19 nt, Homo sapiens
  misc_RNA (1)...(19): siRNA sense strand
agucacagcucauuauaca

SEQ ID NO: 2162065 - RNA, 19 nt, Homo sapiens
  misc_RNA (1)...(19): siRNA sense strand
caaagggagauacuagaaa

SEQ ID NO: 2162066 - RNA, 19 nt, Homo sapiens
  misc_RNA (1)...(19): siRNA sense strand
aagcccauguucaguauaa

SEQ ID NO: 2162067 - RNA, 19 nt, Homo sapiens
  misc_RNA (1)...(19): siRNA sense strand
aaagggagauacuagaaag

SEQ ID NO: 2162068 - RNA, 19 nt, Homo sapiens
  misc_RNA (1)...(19): siRNA sense strand
gaaacccuaugaauguagu

SEQ ID NO: 2162069 - RNA, 19 nt, Homo sapiens
  misc_RNA (1)...(19): siRNA sense strand
gggaagaagcccuaugaau

SEQ ID NO: 2162070 - RNA, 19 nt, Homo sapiens
  misc_RNA (1)...(19): siRNA sense strand
ugagauggguuccaaguac

SEQ ID NO: 2162071 - RNA, 19 nt, Homo sapiens
  misc_RNA (1)...(19): siRNA sense strand
cccaaaggauaauucauug

SEQ ID NO: 2162072 - RNA, 19 nt, Homo sapiens
  misc_RNA (1)...(19): siRNA sense strand
caucaaagaauucauacug

SEQ ID NO: 2162073 - RNA, 19 nt, Homo sapiens
  misc_RNA (1)...(19): siRNA sense strand
gauuacauaucagagaaga

SEQ ID NO: 2162074 - RNA, 19 nt, Homo sapiens
  misc_RNA (1)...(19): siRNA sense strand
ccucauaggacaucaaaga

SEQ ID NO: 2162075 - RNA, 19 nt, Homo sapiens
  misc_RNA (1)...(19): siRNA sense strand
gaacgcauacuggagagaa

SEQ ID NO: 2162076 - RNA, 19 nt, Homo sapiens
  misc_RNA (1)...(19): siRNA sense strand
gagauggguuccaaguaca

SEQ ID NO: 2162077 - RNA, 19 nt, Homo sapiens
  misc_RNA (1)...(19): siRNA sense strand
ggagaaaaccccugaaugu

SEQ ID NO: 2162078 - RNA, 19 nt, Homo sapiens
  misc_RNA (1)...(19): siRNA sense strand
ggaaagccuucugugagau

SEQ ID NO: 2162079 - RNA, 19 nt, Homo sapiens
  misc_RNA (1)...(19): siRNA sense strand
ccaccuaaguauaaugcuu

SEQ ID NO: 2162080 - RNA, 19 nt, Homo sapiens
  misc_RNA (1)...(19): siRNA sense strand
gaagaguggcagcaguuga

SEQ ID NO: 2162081 - RNA, 19 nt, Homo sapiens
  misc_RNA (1)...(19): siRNA sense strand
aggaaagccuucugugaga

SEQ ID NO: 2162082 - RNA, 19 nt, Homo sapiens
  misc_RNA (1)...(19): siRNA sense strand
agagaaacccuaugagugu

SEQ ID NO: 2162083 - RNA, 19 nt, Homo sapiens
  misc_RNA (1)...(19): siRNA sense strand
aggaaagccuucagugaga

SEQ ID NO: 2162084 - RNA, 19 nt, Homo sapiens
  misc_RNA (1)...(19): siRNA sense strand
guauaaugcuuccuguucu

SEQ ID NO: 2162085 - RNA, 19 nt, Homo sapiens
  misc_RNA (1)...(19): siRNA sense strand
cacagaccuugcuccuuua

SEQ ID NO: 2162086 - RNA, 19 nt, Homo sapiens
  misc_RNA (1)...(19): siRNA sense strand
cuauaaguguggugaaugu

SEQ ID NO: 2162087 - RNA, 19 nt, Homo sapiens
  misc_RNA (1)...(19): siRNA sense strand
aagaagcccuaugaaugua

SEQ ID NO: 2162088 - RNA, 19 nt, Homo sapiens
  misc_RNA (1)...(19): siRNA sense strand
gggagaccaccuaaguaua

SEQ ID NO: 2162089 - RNA, 19 nt, Homo sapiens
  misc_RNA (1)...(19): siRNA sense strand
ggccaucaaagacuucaua

SEQ ID NO: 2162090 - RNA, 19 nt, Homo sapiens
  misc_RNA (1)...(19): siRNA sense strand
caucagaauccauauagga

SEQ ID NO: 2162091 - RNA, 19 nt, Homo sapiens
  misc_RNA (1)...(19): siRNA sense strand
cagcauguauacuuuacug

SEQ ID NO: 2162092 - RNA, 19 nt, Homo sapiens
  misc_RNA (1)...(19): siRNA sense strand
ccuuauauguguacugaau

SEQ ID NO: 2162093 - RNA, 19 nt, Homo sapiens
  misc_RNA (1)...(19): siRNA sense strand
gcaaugggcuggauuauaa

SEQ ID NO: 2162094 - RNA, 19 nt, Homo sapiens
  misc_RNA (1)...(19): siRNA sense strand
gagaaacggucaucacuga

SEQ ID NO: 2162095 - RNA, 19 nt, Homo sapiens
  misc_RNA (1)...(19): siRNA sense strand
gcaauugcguguagauauu

SEQ ID NO: 2162096 - RNA, 19 nt, Homo sapiens
  misc_RNA (1)...(19): siRNA sense strand
gcaagagccgcgaguauga

SEQ ID NO: 2162097 - RNA, 19 nt, Homo sapiens
  misc_RNA (1)...(19): siRNA sense strand
cuagaagacugggacauaa

SEQ ID NO: 2162098 - RNA, 19 nt, Homo sapiens
  misc_RNA (1)...(19): siRNA sense strand
gugcugagcuggucguaug

SEQ ID NO: 2162099 - RNA, 19 nt, Homo sapiens
  misc_RNA (1)...(19): siRNA sense strand
gaugaccucuucuucuguu

SEQ ID NO: 2162100 - RNA, 19 nt, Homo sapiens
  misc_RNA (1)...(19): siRNA sense strand
ccugagcgaugcugaguuu

SEQ ID NO: 2162101 - RNA, 19 nt, Homo sapiens
  misc_RNA (1)...(19): siRNA sense strand
gcuagaagacugggacaua

SEQ ID NO: 2162102 - RNA, 19 nt, Homo sapiens
  misc_RNA (1)...(19): siRNA sense strand
cauccgagccuuugauuug

SEQ ID NO: 2162103 - RNA, 19 nt, Homo sapiens
  misc_RNA (1)...(19): siRNA sense strand
aagaagaacuuuggcauca

SEQ ID NO: 2162104 - RNA, 19 nt, Homo sapiens
  misc_RNA (1)...(19): siRNA sense strand
ggacagcccauugcuagaa

SEQ ID NO: 2162105 - RNA, 19 nt, Homo sapiens
  misc_RNA (1)...(19): siRNA sense strand
gcggauggacuacaugaaa

SEQ ID NO: 2162106 - RNA, 19 nt, Homo sapiens
  misc_RNA (1)...(19): siRNA sense strand
gaaaugugagagcuucuug

SEQ ID NO: 2162107 - RNA, 19 nt, Homo sapiens
  misc_RNA (1)...(19): siRNA sense strand
ccacccagcugcccuuauc

SEQ ID NO: 2162108 - RNA, 19 nt, Homo sapiens
  misc_RNA (1)...(19): siRNA sense strand
ucucugagccuuuauugaa

SEQ ID NO: 2162109 - RNA, 19 nt, Homo sapiens
  misc_RNA (1)...(19): siRNA sense strand
acaggaaguuuaccucuca

SEQ ID NO: 2162110 - RNA, 19 nt, Homo sapiens
  misc_RNA (1)...(19): siRNA sense strand
auaaugagcuggccaugca

SEQ ID NO: 2162111 - RNA, 19 nt, Homo sapiens
  misc_RNA (1)...(19): siRNA sense strand
ucaccucgcucgacguguu

SEQ ID NO: 2162112 - RNA, 19 nt, Homo sapiens
  misc_RNA (1)...(19): siRNA sense strand
gggcucucuuugcugauua

SEQ ID NO: 2162113 - RNA, 19 nt, Homo sapiens
  misc_RNA (1)...(19): siRNA sense strand
gagagcggauggacuacau

SEQ ID NO: 2162114 - RNA, 19 nt, Homo sapiens
  misc_RNA (1)...(19): siRNA sense strand
ggccacagccgcaucuuga

SEQ ID NO: 2162115 - RNA, 19 nt, Homo sapiens
  misc_RNA (1)...(19): siRNA sense strand
ccacugccuccaaaccuua

SEQ ID NO: 2162116 - RNA, 19 nt, Homo sapiens
  misc_RNA (1)...(19): siRNA sense strand
ugucuaagguccaacaagu

SEQ ID NO: 2162117 - RNA, 19 nt, Homo sapiens
  misc_RNA (1)...(19): siRNA sense strand
guuuaccucucacuucuau

SEQ ID NO: 2162118 - RNA, 19 nt, Homo sapiens
  misc_RNA (1)...(19): siRNA sense strand
gcaccgcgaccacaucaug

SEQ ID NO: 2162119 - RNA, 19 nt, Homo sapiens
  misc_RNA (1)...(19): siRNA sense strand
cgaaagacccuggaaaguc

SEQ ID NO: 2162120 - RNA, 19 nt, Homo sapiens
  misc_RNA (1)...(19): siRNA sense strand
gguaccugcugaacgugua

SEQ ID NO: 2162121 - RNA, 19 nt, Homo sapiens
  misc_RNA (1)...(19): siRNA sense strand
ggaggacagcccauugcua

SEQ ID NO: 2162122 - RNA, 19 nt, Homo sapiens
  misc_RNA (1)...(19): siRNA sense strand
gccgagagcggauggacua

SEQ ID NO: 2162123 - RNA, 19 nt, Homo sapiens
  misc_RNA (1)...(19): siRNA sense strand
cuccaaaccuuaccugcaa

SEQ ID NO: 2162124 - RNA, 19 nt, Homo sapiens
  misc_RNA (1)...(19): siRNA sense strand
ccacugcucuccuccuuuu

SEQ ID NO: 2162125 - RNA, 19 nt, Homo sapiens
  misc_RNA (1)...(19): siRNA sense strand
gagcggauggacuacauga

SEQ ID NO: 2162126 - RNA, 19 nt, Homo sapiens
  misc_RNA (1)...(19): siRNA sense strand
gaccacaucaugcgcaaug

SEQ ID NO: 2162127 - RNA, 19 nt, Homo sapiens
  misc_RNA (1)...(19): siRNA sense strand
gcccugcccuuuacacagu

SEQ ID NO: 2162128 - RNA, 19 nt, Homo sapiens
  misc_RNA (1)...(19): siRNA sense strand
gagcuggccaugcacuuug

SEQ ID NO: 2162129 - RNA, 19 nt, Homo sapiens
  misc_RNA (1)...(19): siRNA sense strand
augcugaguuucacacgua

SEQ ID NO: 2162130 - RNA, 19 nt, Homo sapiens
  misc_RNA (1)...(19): siRNA sense strand
gaagacugggacauaauca

SEQ ID NO: 2162131 - RNA, 19 nt, Homo sapiens
  misc_RNA (1)...(19): siRNA sense strand
gcaagaggcaggcgcugau

SEQ ID NO: 2162132 - RNA, 19 nt, Homo sapiens
  misc_RNA (1)...(19): siRNA sense strand
ugagggccaugccuuuguu

SEQ ID NO: 2162133 - RNA, 19 nt, Homo sapiens
  misc_RNA (1)...(19): siRNA sense strand
gcuccaagucccucucuga

SEQ ID NO: 2162134 - RNA, 19 nt, Homo sapiens
  misc_RNA (1)...(19): siRNA sense strand
gcacuuugaccgccuugug

SEQ ID NO: 2162135 - RNA, 19 nt, Homo sapiens
  misc_RNA (1)...(19): siRNA sense strand
ggaacccauucaugcuguu

SEQ ID NO: 2162136 - RNA, 19 nt, Homo sapiens
  misc_RNA (1)...(19): siRNA sense strand
cgccauggccaccaaguuu

SEQ ID NO: 2162137 - RNA, 19 nt, Homo sapiens
  misc_RNA (1)...(19): siRNA sense strand
gcaacucagggauaacaug

SEQ ID NO: 2162138 - RNA, 19 nt, Homo sapiens
  misc_RNA (1)...(19): siRNA sense strand
cugaugaccucuucuucug

SEQ ID NO: 2162139 - RNA, 19 nt, Homo sapiens
  misc_RNA (1)...(19): siRNA sense strand
ggcuaggacaggaaguuua

SEQ ID NO: 2162140 - RNA, 19 nt, Homo sapiens
  misc_RNA (1)...(19): siRNA sense strand
gucccucucugagccuuua

SEQ ID NO: 2162141 - RNA, 19 nt, Homo sapiens
  misc_RNA (1)...(19): siRNA sense strand
ggaccucagcacagccuuu

SEQ ID NO: 2162142 - RNA, 19 nt, Homo sapiens
  misc_RNA (1)...(19): siRNA sense strand
cacaguccauccucacuca

SEQ ID NO: 2162143 - RNA, 19 nt, Homo sapiens
  misc_RNA (1)...(19): siRNA sense strand
gagcaccgcgaccacauca

SEQ ID NO: 2162144 - RNA, 19 nt, Homo sapiens
  misc_RNA (1)...(19): siRNA sense strand
uccagcaacucagggauaa

SEQ ID NO: 2162145 - RNA, 19 nt, Homo sapiens
  misc_RNA (1)...(19): siRNA sense strand
gccacugccuccaaaccuu

SEQ ID NO: 2162146 - RNA, 19 nt, Homo sapiens
  misc_RNA (1)...(19): siRNA sense strand
ggcgguaccugcugaacgu

SEQ ID NO: 2162147 - RNA, 19 nt, Homo sapiens
  misc_RNA (1)...(19): siRNA sense strand
gauuugagugggaagaaga

SEQ ID NO: 2162148 - RNA, 19 nt, Homo sapiens
  misc_RNA (1)...(19): siRNA sense strand
cugaggaccuggaauucau

SEQ ID NO: 2162149 - RNA, 19 nt, Homo sapiens
  misc_RNA (1)...(19): siRNA sense strand
ccaugccuuuguuugcuuu

SEQ ID NO: 2162150 - RNA, 19 nt, Homo sapiens
  misc_RNA (1)...(19): siRNA sense strand
ugaguucgccuucgacgau

SEQ ID NO: 2162151 - RNA, 19 nt, Homo sapiens
  misc_RNA (1)...(19): siRNA sense strand
gacagcccauugcuagaag

SEQ ID NO: 2162152 - RNA, 19 nt, Homo sapiens
  misc_RNA (1)...(19): siRNA sense strand
cgcaaugggcuggauuaua

SEQ ID NO: 2162153 - RNA, 19 nt, Homo sapiens
  misc_RNA (1)...(19): siRNA sense strand
gccaugccuuuguuugcuu

SEQ ID NO: 2162154 - RNA, 19 nt, Homo sapiens
  misc_RNA (1)...(19): siRNA sense strand
ccaaaccuuaccugcaauu

SEQ ID NO: 2162155 - RNA, 19 nt, Homo sapiens
  misc_RNA (1)...(19): siRNA sense strand
gagacaggccagcuuggau

SEQ ID NO: 2162156 - RNA, 19 nt, Homo sapiens
  misc_RNA (1)...(19): siRNA sense strand
gcugaugaccucuucuucu

SEQ ID NO: 2162157 - RNA, 19 nt, Homo sapiens
  misc_RNA (1)...(19): siRNA sense strand
uaccugcaauugcguguag

SEQ ID NO: 2162158 - RNA, 19 nt, Homo sapiens
  misc_RNA (1)...(19): siRNA sense strand
gcuaggacaggaaguuuac

SEQ ID NO: 2162159 - RNA, 19 nt, Homo sapiens
  misc_RNA (1)...(19): siRNA sense strand
gacccugacuuuuaucaau

SEQ ID NO: 2162160 - RNA, 19 nt, Homo sapiens
  misc_RNA (1)...(19): siRNA sense strand
gagguaggcuccccgaaag

SEQ ID NO: 2162161 - RNA, 19 nt, Homo sapiens
  misc_RNA (1)...(19): siRNA sense strand
ugagugggaagaagaacuu

SEQ ID NO: 2162162 - RNA, 19 nt, Homo sapiens
  misc_RNA (1)...(19): siRNA sense strand
gcugguggaggagguagua

SEQ ID NO: 2162163 - RNA, 19 nt, Homo sapiens
  misc_RNA (1)...(19): siRNA sense strand
gcgcugaugaccucuucuu

SEQ ID NO: 2162164 - RNA, 19 nt, Homo sapiens
  misc_RNA (1)...(19): siRNA sense strand
gaccucagcacagccuuug

SEQ ID NO: 2162165 - RNA, 19 nt, Homo sapiens
  misc_RNA (1)...(19): siRNA sense strand
gcccuuaucagcuccaagu

SEQ ID NO: 2162166 - RNA, 19 nt, Homo sapiens
  misc_RNA (1)...(19): siRNA sense strand
gaguugcgccugcggaucu

SEQ ID NO: 2162167 - RNA, 19 nt, Homo sapiens
  misc_RNA (1)...(19): siRNA sense strand
uagaagacugggacauaau

SEQ ID NO: 2162168 - RNA, 19 nt, Homo sapiens
  misc_RNA (1)...(19): siRNA sense strand
cggauggacuacaugaaac

SEQ ID NO: 2162169 - RNA, 19 nt, Homo sapiens
  misc_RNA (1)...(19): siRNA sense strand
ucaagaaaugugagagcuu

SEQ ID NO: 2162170 - RNA, 19 nt, Homo sapiens
  misc_RNA (1)...(19): siRNA sense strand
ggacauaaucagccccaaa

SEQ ID NO: 2162171 - RNA, 19 nt, Homo sapiens
  misc_RNA (1)...(19): siRNA sense strand
cauuggcuccgacguguug

SEQ ID NO: 2162172 - RNA, 19 nt, Homo sapiens
  misc_RNA (1)...(19): siRNA sense strand
ggcuagggcucucuuugcu

SEQ ID NO: 2162173 - RNA, 19 nt, Homo sapiens
  misc_RNA (1)...(19): siRNA sense strand
cagcaacucagggauaaca

SEQ ID NO: 2162174 - RNA, 19 nt, Homo sapiens
  misc_RNA (1)...(19): siRNA sense strand
acacgcugacccugacuuu

SEQ ID NO: 2162175 - RNA, 19 nt, Homo sapiens
  misc_RNA (1)...(19): siRNA sense strand
gaccugcucaccaccuaug

SEQ ID NO: 2162176 - RNA, 19 nt, Homo sapiens
  misc_RNA (1)...(19): siRNA sense strand
gagcgaugcugaguuucac

SEQ ID NO: 2162177 - RNA, 19 nt, Homo sapiens
  misc_RNA (1)...(19): siRNA sense strand
ugagcgaugcugaguuuca

SEQ ID NO: 2162178 - RNA, 19 nt, Homo sapiens
  misc_RNA (1)...(19): siRNA sense strand
acgcugacccugacuuuua

SEQ ID NO: 2162179 - RNA, 19 nt, Homo sapiens
  misc_RNA (1)...(19): siRNA sense strand
gccauggccaccaaguuug

SEQ ID NO: 2162180 - RNA, 19 nt, Homo sapiens
  misc_RNA (1)...(19): siRNA sense strand
cgaagaacauggaugauaa

SEQ ID NO: 2162181 - RNA, 19 nt, Homo sapiens
  misc_RNA (1)...(19): siRNA sense strand
gcacaugaauagggugaua

SEQ ID NO: 2162182 - RNA, 19 nt, Homo sapiens
  misc_RNA (1)...(19): siRNA sense strand
ggaaucgccuccagaaauc

SEQ ID NO: 2162183 - RNA, 19 nt, Homo sapiens
  misc_RNA (1)...(19): siRNA sense strand
cgaagacccugaugaugaa

SEQ ID NO: 2162184 - RNA, 19 nt, Homo sapiens
  misc_RNA (1)...(19): siRNA sense strand
ggacagaagcccagauaga

SEQ ID NO: 2162185 - RNA, 19 nt, Homo sapiens
  misc_RNA (1)...(19): siRNA sense strand
ggacgacgauggcgaggau

SEQ ID NO: 2162186 - RNA, 19 nt, Homo sapiens
  misc_RNA (1)...(19): siRNA sense strand
gcagagggcucaggaugug

SEQ ID NO: 2162187 - RNA, 19 nt, Homo sapiens
  misc_RNA (1)...(19): siRNA sense strand
gcguggagcucaucaagga

SEQ ID NO: 2162188 - RNA, 19 nt, Homo sapiens
  misc_RNA (1)...(19): siRNA sense strand
gcaaggacaccagcucuuu

SEQ ID NO: 2162189 - RNA, 19 nt, Homo sapiens
  misc_RNA (1)...(19): siRNA sense strand
gaacugaagacgaagaaca

SEQ ID NO: 2162190 - RNA, 19 nt, Homo sapiens
  misc_RNA (1)...(19): siRNA sense strand
ccgaagacccugaugauga

SEQ ID NO: 2162191 - RNA, 19 nt, Homo sapiens
  misc_RNA (1)...(19): siRNA sense strand
cagcuuggaucccauaucu

SEQ ID NO: 2162192 - RNA, 19 nt, Homo sapiens
  misc_RNA (1)...(19): siRNA sense strand
caaggaaucgccuccagaa

SEQ ID NO: 2162193 - RNA, 19 nt, Homo sapiens
  misc_RNA (1)...(19): siRNA sense strand
gccgaagucugucucucua

SEQ ID NO: 2162194 - RNA, 19 nt, Homo sapiens
  misc_RNA (1)...(19): siRNA sense strand
aggaggaacugaagacgaa

SEQ ID NO: 2162195 - RNA, 19 nt, Homo sapiens
  misc_RNA (1)...(19): siRNA sense strand
cagaugacacuucagguuu

SEQ ID NO: 2162196 - RNA, 19 nt, Homo sapiens
  misc_RNA (1)...(19): siRNA sense strand
agacgaagaacauggauga

SEQ ID NO: 2162197 - RNA, 19 nt, Homo sapiens
  misc_RNA (1)...(19): siRNA sense strand
agaaagggaugggcaagga

SEQ ID NO: 2162198 - RNA, 19 nt, Homo sapiens
  misc_RNA (1)...(19): siRNA sense strand
guacagagggucaguucau

SEQ ID NO: 2162199 - RNA, 19 nt, Homo sapiens
  misc_RNA (1)...(19): siRNA sense strand
ggagaucacgcugcacuau

SEQ ID NO: 2162200 - RNA, 19 nt, Homo sapiens
  misc_RNA (1)...(19): siRNA sense strand
ccagaugacacuucagguu

SEQ ID NO: 2162201 - RNA, 19 nt, Homo sapiens
  misc_RNA (1)...(19): siRNA sense strand
cgaagucugucucucuagu

SEQ ID NO: 2162202 - RNA, 19 nt, Homo sapiens
  misc_RNA (1)...(19): siRNA sense strand
gcucuuugcacaugaauag

SEQ ID NO: 2162203 - RNA, 19 nt, Homo sapiens
  misc_RNA (1)...(19): siRNA sense strand
cauggaugauaacaccuuu

SEQ ID NO: 2162204 - RNA, 19 nt, Homo sapiens
  misc_RNA (1)...(19): siRNA sense strand
caccagcucuuugcacaug

SEQ ID NO: 2162205 - RNA, 19 nt, Homo sapiens
  misc_RNA (1)...(19): siRNA sense strand
acgaagaacauggaugaua

SEQ ID NO: 2162206 - RNA, 19 nt, Homo sapiens
  misc_RNA (1)...(19): siRNA sense strand
gacagaagcccagauagag

SEQ ID NO: 2162207 - RNA, 19 nt, Homo sapiens
  misc_RNA (1)...(19): siRNA sense strand
caaggacaccagcucuuug

SEQ ID NO: 2162208 - RNA, 19 nt, Homo sapiens
  misc_RNA (1)...(19): siRNA sense strand
ggaccgcgaccugaucuug

SEQ ID NO: 2162209 - RNA, 19 nt, Homo sapiens
  misc_RNA (1)...(19): siRNA sense strand
gcaccggccaucaggauuc

SEQ ID NO: 2162210 - RNA, 19 nt, Homo sapiens
  misc_RNA (1)...(19): siRNA sense strand
guagccaggccucauguga

SEQ ID NO: 2162211 - RNA, 19 nt, Homo sapiens
  misc_RNA (1)...(19): siRNA sense strand
gggaguaucgagugagaau

SEQ ID NO: 2162212 - RNA, 19 nt, Homo sapiens
  misc_RNA (1)...(19): siRNA sense strand
uacagagggucaguucauu

SEQ ID NO: 2162213 - RNA, 19 nt, Homo sapiens
  misc_RNA (1)...(19): siRNA sense strand
agaugacacuucagguuuc

SEQ ID NO: 2162214 - RNA, 19 nt, Homo sapiens
  misc_RNA (1)...(19): siRNA sense strand
gagaucacgcugcacuaug

SEQ ID NO: 2162215 - RNA, 19 nt, Homo sapiens
  misc_RNA (1)...(19): siRNA sense strand
gaagaacauggaugauaac

SEQ ID NO: 2162216 - RNA, 19 nt, Homo sapiens
  misc_RNA (1)...(19): siRNA sense strand
gaguaucgagugagaaugg

SEQ ID NO: 2162217 - RNA, 19 nt, Homo sapiens
  misc_RNA (1)...(19): siRNA sense strand
gaagucugucucucuagug

SEQ ID NO: 2162218 - RNA, 19 nt, Homo sapiens
  misc_RNA (1)...(19): siRNA sense strand
cgggacagaagcccagaua

SEQ ID NO: 2162219 - RNA, 19 nt, Homo sapiens
  misc_RNA (1)...(19): siRNA sense strand
aggaaucgccuccagaaau

SEQ ID NO: 2162220 - RNA, 19 nt, Homo sapiens
  misc_RNA (1)...(19): siRNA sense strand
ccagcucuuugcacaugaa

SEQ ID NO: 2162221 - RNA, 19 nt, Homo sapiens
  misc_RNA (1)...(19): siRNA sense strand
gaugacacuucagguuucu

SEQ ID NO: 2162222 - RNA, 19 nt, Homo sapiens
  misc_RNA (1)...(19): siRNA sense strand
gaccgcgaccugaucuuga

SEQ ID NO: 2162223 - RNA, 19 nt, Homo sapiens
  misc_RNA (1)...(19): siRNA sense strand
ugaagacgaagaacaugga

SEQ ID NO: 2162224 - RNA, 19 nt, Homo sapiens
  misc_RNA (1)...(19): siRNA sense strand
ggacaccgaagacccugau

SEQ ID NO: 2162225 - RNA, 19 nt, Homo sapiens
  misc_RNA (1)...(19): siRNA sense strand
cgacggcugggcuuccuuu

SEQ ID NO: 2162226 - RNA, 19 nt, Homo sapiens
  misc_RNA (1)...(19): siRNA sense strand
gcgaccugaucuugaagug

SEQ ID NO: 2162227 - RNA, 19 nt, Homo sapiens
  misc_RNA (1)...(19): siRNA sense strand
gaagacgaagaacauggau

SEQ ID NO: 2162228 - RNA, 19 nt, Homo sapiens
  misc_RNA (1)...(19): siRNA sense strand
gaggaacugaagacgaaga

SEQ ID NO: 2162229 - RNA, 19 nt, Homo sapiens
  misc_RNA (1)...(19): siRNA sense strand
ugacggcccugugguucug

SEQ ID NO: 2162230 - RNA, 19 nt, Homo sapiens
  misc_RNA (1)...(19): siRNA sense strand
gcucugaacagcggugugu

SEQ ID NO: 2162231 - RNA, 19 nt, Homo sapiens
  misc_RNA (1)...(19): siRNA sense strand
agaucacgcugcacuaugc

SEQ ID NO: 2162232 - RNA, 19 nt, Homo sapiens
  misc_RNA (1)...(19): siRNA sense strand
gucugucucucuaguguag

SEQ ID NO: 2162233 - RNA, 19 nt, Homo sapiens
  misc_RNA (1)...(19): siRNA sense strand
caccgaagacccugaugau

SEQ ID NO: 2162234 - RNA, 19 nt, Homo sapiens
  misc_RNA (1)...(19): siRNA sense strand
gcugaagagcugcaugaag

SEQ ID NO: 2162235 - RNA, 19 nt, Homo sapiens
  misc_RNA (1)...(19): siRNA sense strand
acagagggucaguucauug

SEQ ID NO: 2162236 - RNA, 19 nt, Homo sapiens
  misc_RNA (1)...(19): siRNA sense strand
ggcagagggcucaggaugu

SEQ ID NO: 2162237 - RNA, 19 nt, Homo sapiens
  misc_RNA (1)...(19): siRNA sense strand
acaccgaagacccugauga

SEQ ID NO: 2162238 - RNA, 19 nt, Homo sapiens
  misc_RNA (1)...(19): siRNA sense strand
gccucucucuggcuugguu

SEQ ID NO: 2162239 - RNA, 19 nt, Homo sapiens
  misc_RNA (1)...(19): siRNA sense strand
gcacuuucugggccaacaa

SEQ ID NO: 2162240 - RNA, 19 nt, Homo sapiens
  misc_RNA (1)...(19): siRNA sense strand
gagaaacccuauaaaugua

SEQ ID NO: 2162241 - RNA, 19 nt, Homo sapiens
  misc_RNA (1)...(19): siRNA sense strand
ucaaagaacucauacagaa

SEQ ID NO: 2162242 - RNA, 19 nt, Homo sapiens
  misc_RNA (1)...(19): siRNA sense strand
caacugucaucauacauua

SEQ ID NO: 2162243 - RNA, 19 nt, Homo sapiens
  misc_RNA (1)...(19): siRNA sense strand
gagaaacccuuugaaugua

SEQ ID NO: 2162244 - RNA, 19 nt, Homo sapiens
  misc_RNA (1)...(19): siRNA sense strand
caaaguucauggcacauua

SEQ ID NO: 2162245 - RNA, 19 nt, Homo sapiens
  misc_RNA (1)...(19): siRNA sense strand
gagaaacccuuugaaugua

SEQ ID NO: 2162246 - RNA, 19 nt, Homo sapiens
  misc_RNA (1)...(19): siRNA sense strand
aaagucaacugucaucaua

SEQ ID NO: 2162247 - RNA, 19 nt, Homo sapiens
  misc_RNA (1)...(19): siRNA sense strand
ggaaaggucuuaggcgaaa

SEQ ID NO: 2162248 - RNA, 19 nt, Homo sapiens
  misc_RNA (1)...(19): siRNA sense strand
agagaaaccucauaaaugu

SEQ ID NO: 2162249 - RNA, 19 nt, Homo sapiens
  misc_RNA (1)...(19): siRNA sense strand
agagaaaccuuaugaaugu

SEQ ID NO: 2162250 - RNA, 19 nt, Homo sapiens
  misc_RNA (1)...(19): siRNA sense strand
gagagaaaccucauaaaug

SEQ ID NO: 2162251 - RNA, 19 nt, Homo sapiens
  misc_RNA (1)...(19): siRNA sense strand
gagagaaacccuauaaaug

SEQ ID NO: 2162252 - RNA, 19 nt, Homo sapiens
  misc_RNA (1)...(19): siRNA sense strand
ucacagaaaucauaucuca

SEQ ID NO: 2162253 - RNA, 19 nt, Homo sapiens
  misc_RNA (1)...(19): siRNA sense strand
ggaaacauacuucaucuga

SEQ ID NO: 2162254 - RNA, 19 nt, Homo sapiens
  misc_RNA (1)...(19): siRNA sense strand
gaagucacagcucauaaua

SEQ ID NO: 2162255 - RNA, 19 nt, Homo sapiens
  misc_RNA (1)...(19): siRNA sense strand
ggaaaagccuucagagaaa

SEQ ID NO: 2162256 - RNA, 19 nt, Homo sapiens
  misc_RNA (1)...(19): siRNA sense strand
ggagagaaacccuauaaau

SEQ ID NO: 2162257 - RNA, 19 nt, Homo sapiens
  misc_RNA (1)...(19): siRNA sense strand
ggagagaaaccucauaaau

SEQ ID NO: 2162258 - RNA, 19 nt, Homo sapiens
  misc_RNA (1)...(19): siRNA sense strand
gagaaucuuucauacagaa

SEQ ID NO: 2162259 - RNA, 19 nt, Homo sapiens
  misc_RNA (1)...(19): siRNA sense strand
ggaagucuuucaaugagaa

SEQ ID NO: 2162260 - RNA, 19 nt, Homo sapiens
  misc_RNA (1)...(19): siRNA sense strand
gagagaaaccuuaugaaug

SEQ ID NO: 2162261 - RNA, 19 nt, Homo sapiens
  misc_RNA (1)...(19): siRNA sense strand
ggcaaagccuucagagaaa

SEQ ID NO: 2162262 - RNA, 19 nt, Homo sapiens
  misc_RNA (1)...(19): siRNA sense strand
caagagugcucgugacugu

SEQ ID NO: 2162263 - RNA, 19 nt, Homo sapiens
  misc_RNA (1)...(19): siRNA sense strand
aaagaaagcccauggaaga

SEQ ID NO: 2162264 - RNA, 19 nt, Homo sapiens
  misc_RNA (1)...(19): siRNA sense strand
guacaucaaagaacucaua

SEQ ID NO: 2162265 - RNA, 19 nt, Homo sapiens
  misc_RNA (1)...(19): siRNA sense strand
ggcaaagccuuccgagaaa

SEQ ID NO: 2162266 - RNA, 19 nt, Homo sapiens
  misc_RNA (1)...(19): siRNA sense strand
gagagaaacccuuugaaug

SEQ ID NO: 2162267 - RNA, 19 nt, Homo sapiens
  misc_RNA (1)...(19): siRNA sense strand
gagagaaacccuaugaaug

SEQ ID NO: 2162268 - RNA, 19 nt, Homo sapiens
  misc_RNA (1)...(19): siRNA sense strand
gagagaaacccuuugaaug

SEQ ID NO: 2162269 - RNA, 19 nt, Homo sapiens
  misc_RNA (1)...(19): siRNA sense strand
gaagucacaccucauugua

SEQ ID NO: 2162270 - RNA, 19 nt, Homo sapiens
  misc_RNA (1)...(19): siRNA sense strand
ggagagaaaccuuaugaau

SEQ ID NO: 2162271 - RNA, 19 nt, Homo sapiens
  misc_RNA (1)...(19): siRNA sense strand
gaaaacaaauccuggaaug

SEQ ID NO: 2162272 - RNA, 19 nt, Homo sapiens
  misc_RNA (1)...(19): siRNA sense strand
ggaaagaaagcccauggaa

SEQ ID NO: 2162273 - RNA, 19 nt, Homo sapiens
  misc_RNA (1)...(19): siRNA sense strand
agucaaagcucauuauaca

SEQ ID NO: 2162274 - RNA, 19 nt, Homo sapiens
  misc_RNA (1)...(19): siRNA sense strand
gauaagucaacucucauua

SEQ ID NO: 2162275 - RNA, 19 nt, Homo sapiens
  misc_RNA (1)...(19): siRNA sense strand
ggagagaaacccuuugaau

SEQ ID NO: 2162276 - RNA, 19 nt, Homo sapiens
  misc_RNA (1)...(19): siRNA sense strand
ggagagaaacccuuugaau

SEQ ID NO: 2162277 - RNA, 19 nt, Homo sapiens
  misc_RNA (1)...(19): siRNA sense strand
ggagagaaacccuaugaau

SEQ ID NO: 2162278 - RNA, 19 nt, Homo sapiens
  misc_RNA (1)...(19): siRNA sense strand
ccucauaaauguacugaau

SEQ ID NO: 2162279 - RNA, 19 nt, Homo sapiens
  misc_RNA (1)...(19): siRNA sense strand
ggaaaagccuucacucaga

SEQ ID NO: 2162280 - RNA, 19 nt, Homo sapiens
  misc_RNA (1)...(19): siRNA sense strand
guacauuggagaacucaua

SEQ ID NO: 2162281 - RNA, 19 nt, Homo sapiens
  misc_RNA (1)...(19): siRNA sense strand
aaacauacuucaucugagu

SEQ ID NO: 2162282 - RNA, 19 nt, Homo sapiens
  misc_RNA (1)...(19): siRNA sense strand
aaacacgaaucauuuggaa

SEQ ID NO: 2162283 - RNA, 19 nt, Homo sapiens
  misc_RNA (1)...(19): siRNA sense strand
cgauaaacacgaaucauuu

SEQ ID NO: 2162284 - RNA, 19 nt, Homo sapiens
  misc_RNA (1)...(19): siRNA sense strand
gauaaacacgaaucauuug

SEQ ID NO: 2162285 - RNA, 19 nt, Homo sapiens
  misc_RNA (1)...(19): siRNA sense strand
ggagagagacccuuugagu

SEQ ID NO: 2162286 - RNA, 19 nt, Homo sapiens
  misc_RNA (1)...(19): siRNA sense strand
gcaaaauuguucuuccaua

SEQ ID NO: 2162287 - RNA, 19 nt, Homo sapiens
  misc_RNA (1)...(19): siRNA sense strand
agagaaacccuauaaaugu

SEQ ID NO: 2162288 - RNA, 19 nt, Homo sapiens
  misc_RNA (1)...(19): siRNA sense strand
uacagaagcuugaucuaau

SEQ ID NO: 2162289 - RNA, 19 nt, Homo sapiens
  misc_RNA (1)...(19): siRNA sense strand
ggagaaucuuucauacaga

SEQ ID NO: 2162290 - RNA, 19 nt, Homo sapiens
  misc_RNA (1)...(19): siRNA sense strand
aaacaaauccuggaaugaa

SEQ ID NO: 2162291 - RNA, 19 nt, Homo sapiens
  misc_RNA (1)...(19): siRNA sense strand
gaagucaacccucauugug

SEQ ID NO: 2162292 - RNA, 19 nt, Homo sapiens
  misc_RNA (1)...(19): siRNA sense strand
caagaagucacaccucauu

SEQ ID NO: 2162293 - RNA, 19 nt, Homo sapiens
  misc_RNA (1)...(19): siRNA sense strand
aaaccuuguugcuucaaua

SEQ ID NO: 2162294 - RNA, 19 nt, Homo sapiens
  misc_RNA (1)...(19): siRNA sense strand
agaaacccuuugaauguaa

SEQ ID NO: 2162295 - RNA, 19 nt, Homo sapiens
  misc_RNA (1)...(19): siRNA sense strand
acagaagcuugaucuaauu

SEQ ID NO: 2162296 - RNA, 19 nt, Homo sapiens
  misc_RNA (1)...(19): siRNA sense strand
aaagaaaggccuuagucua

SEQ ID NO: 2162297 - RNA, 19 nt, Homo sapiens
  misc_RNA (1)...(19): siRNA sense strand
agagaaacccuuugaaugu

SEQ ID NO: 2162298 - RNA, 19 nt, Homo sapiens
  misc_RNA (1)...(19): siRNA sense strand
agagaaacccuaugaaugu

SEQ ID NO: 2162299 - RNA, 19 nt, Homo sapiens
  misc_RNA (1)...(19): siRNA sense strand
gaaagaaaccccaugaaug

SEQ ID NO: 2162300 - RNA, 19 nt, Homo sapiens
  misc_RNA (1)...(19): siRNA sense strand
agagaaacccuuugaaugu

SEQ ID NO: 2162301 - RNA, 19 nt, Homo sapiens
  misc_RNA (1)...(19): siRNA sense strand
cgucacacaucucugcuuu

SEQ ID NO: 2162302 - RNA, 19 nt, Homo sapiens
  misc_RNA (1)...(19): siRNA sense strand
aaucucagcucauuauaca

SEQ ID NO: 2162303 - RNA, 19 nt, Homo sapiens
  misc_RNA (1)...(19): siRNA sense strand
gaaagaaaggccuuagucu

SEQ ID NO: 2162304 - RNA, 19 nt, Homo sapiens
  misc_RNA (1)...(19): siRNA sense strand
gaaaggccuuagucuacau

SEQ ID NO: 2162305 - RNA, 19 nt, Homo sapiens
  misc_RNA (1)...(19): siRNA sense strand
guacaucagagaacucauu

SEQ ID NO: 2162306 - RNA, 19 nt, Homo sapiens
  misc_RNA (1)...(19): siRNA sense strand
gagaaacccuaugaaugug

SEQ ID NO: 2162307 - RNA, 19 nt, Homo sapiens
  misc_RNA (1)...(19): siRNA sense strand
gaaaagccuucacucagaa

SEQ ID NO: 2162308 - RNA, 19 nt, Homo sapiens
  misc_RNA (1)...(19): siRNA sense strand
ccacugagcgugcgcagaa

SEQ ID NO: 2162309 - RNA, 19 nt, Homo sapiens
  misc_RNA (1)...(19): siRNA sense strand
uggcaaagccuucagagaa

SEQ ID NO: 2162310 - RNA, 19 nt, Homo sapiens
  misc_RNA (1)...(19): siRNA sense strand
gagaaaccucauaaaugua

SEQ ID NO: 2162311 - RNA, 19 nt, Homo sapiens
  misc_RNA (1)...(19): siRNA sense strand
gaacucauacuggagagaa

SEQ ID NO: 2162312 - RNA, 19 nt, Homo sapiens
  misc_RNA (1)...(19): siRNA sense strand
agucacagcucauaauaca

SEQ ID NO: 2162313 - RNA, 19 nt, Homo sapiens
  misc_RNA (1)...(19): siRNA sense strand
caaagcucauuauacauca

SEQ ID NO: 2162314 - RNA, 19 nt, Homo sapiens
  misc_RNA (1)...(19): siRNA sense strand
caaguuggagguagaagaa

SEQ ID NO: 2162315 - RNA, 19 nt, Homo sapiens
  misc_RNA (1)...(19): siRNA sense strand
uggcaaagccuuccgagaa

SEQ ID NO: 2162316 - RNA, 19 nt, Homo sapiens
  misc_RNA (1)...(19): siRNA sense strand
gaaacccuuugaauguaau

SEQ ID NO: 2162317 - RNA, 19 nt, Homo sapiens
  misc_RNA (1)...(19): siRNA sense strand
gaaacccuaugaaugugau

SEQ ID NO: 2162318 - RNA, 19 nt, Homo sapiens
  misc_RNA (1)...(19): siRNA sense strand
gaacucauacgggagagaa

SEQ ID NO: 2162319 - RNA, 19 nt, Homo sapiens
  misc_RNA (1)...(19): siRNA sense strand
gaacucauacgggagagaa

SEQ ID NO: 2162320 - RNA, 19 nt, Homo sapiens
  misc_RNA (1)...(19): siRNA sense strand
cagaagcuugaucuaauua

SEQ ID NO: 2162321 - RNA, 19 nt, Homo sapiens
  misc_RNA (1)...(19): siRNA sense strand
gaaaagccuucagagaaaa

SEQ ID NO: 2162322 - RNA, 19 nt, Homo sapiens
  misc_RNA (1)...(19): siRNA sense strand
aaacaauuaucaccaagag

SEQ ID NO: 2162323 - RNA, 19 nt, Homo sapiens
  misc_RNA (1)...(19): siRNA sense strand
caacauucacuguacauca

SEQ ID NO: 2162324 - RNA, 19 nt, Homo sapiens
  misc_RNA (1)...(19): siRNA sense strand
gauaauggaugugcaaaau

SEQ ID NO: 2162325 - RNA, 19 nt, Homo sapiens
  misc_RNA (1)...(19): siRNA sense strand
ggagagaaacccuaugcau

SEQ ID NO: 2162326 - RNA, 19 nt, Homo sapiens
  misc_RNA (1)...(19): siRNA sense strand
cgagugcaaugaaugugaa

SEQ ID NO: 2162327 - RNA, 19 nt, Homo sapiens
  misc_RNA (1)...(19): siRNA sense strand
gugcaucaaagaacucaua

SEQ ID NO: 2162328 - RNA, 19 nt, Homo sapiens
  misc_RNA (1)...(19): siRNA sense strand
agucaacucucauuauaca

SEQ ID NO: 2162329 - RNA, 19 nt, Homo sapiens
  misc_RNA (1)...(19): siRNA sense strand
caucaaagaacucauacug

SEQ ID NO: 2162330 - RNA, 19 nt, Homo sapiens
  misc_RNA (1)...(19): siRNA sense strand
agaggacccuguacagaga

SEQ ID NO: 2162331 - RNA, 19 nt, Homo sapiens
  misc_RNA (1)...(19): siRNA sense strand
caggagagaaaccuuauga

SEQ ID NO: 2162332 - RNA, 19 nt, Homo sapiens
  misc_RNA (1)...(19): siRNA sense strand
aaagaacucauacagaaga

SEQ ID NO: 2162333 - RNA, 19 nt, Homo sapiens
  misc_RNA (1)...(19): siRNA sense strand
gggaagucuuucaaugaga

SEQ ID NO: 2162334 - RNA, 19 nt, Homo sapiens
  misc_RNA (1)...(19): siRNA sense strand
ccgauaaacacgaaucauu

SEQ ID NO: 2162335 - RNA, 19 nt, Homo sapiens
  misc_RNA (1)...(19): siRNA sense strand
gaaacccuauaaauguaca

SEQ ID NO: 2162336 - RNA, 19 nt, Homo sapiens
  misc_RNA (1)...(19): siRNA sense strand
agauguagcuguggauuuc

SEQ ID NO: 2162337 - RNA, 19 nt, Homo sapiens
  misc_RNA (1)...(19): siRNA sense strand
gugggaagucuuucaauga

SEQ ID NO: 2162338 - RNA, 19 nt, Homo sapiens
  misc_RNA (1)...(19): siRNA sense strand
ccagaagucacagcucaua

SEQ ID NO: 2162339 - RNA, 19 nt, Homo sapiens
  misc_RNA (1)...(19): siRNA sense strand
ucaaagcucauuauacauc

SEQ ID NO: 2162340 - RNA, 19 nt, Homo sapiens
  misc_RNA (1)...(19): siRNA sense strand
gcuaugaacucuccacaga

SEQ ID NO: 2162341 - RNA, 19 nt, Homo sapiens
  misc_RNA (1)...(19): siRNA sense strand
ccacagaccugcaggacaa

SEQ ID NO: 2162342 - RNA, 19 nt, Homo sapiens
  misc_RNA (1)...(19): siRNA sense strand
ccacgacccuccagagaaa

SEQ ID NO: 2162343 - RNA, 19 nt, Homo sapiens
  misc_RNA (1)...(19): siRNA sense strand
caccacaucuggagaguuu

SEQ ID NO: 2162344 - RNA, 19 nt, Homo sapiens
  misc_RNA (1)...(19): siRNA sense strand
cgucaaagcugaacgaaag

SEQ ID NO: 2162345 - RNA, 19 nt, Homo sapiens
  misc_RNA (1)...(19): siRNA sense strand
ugcaggagauggagaaaua

SEQ ID NO: 2162346 - RNA, 19 nt, Homo sapiens
  misc_RNA (1)...(19): siRNA sense strand
uaaagucucuggcugaauc

SEQ ID NO: 2162347 - RNA, 19 nt, Homo sapiens
  misc_RNA (1)...(19): siRNA sense strand
gaacgaaagaugaaacuag

SEQ ID NO: 2162348 - RNA, 19 nt, Homo sapiens
  misc_RNA (1)...(19): siRNA sense strand
cuugagagcuccagcaauu

SEQ ID NO: 2162349 - RNA, 19 nt, Homo sapiens
  misc_RNA (1)...(19): siRNA sense strand
ggaaggcgccuaccagaau

SEQ ID NO: 2162350 - RNA, 19 nt, Homo sapiens
  misc_RNA (1)...(19): siRNA sense strand
ggaugcaguucuccuuuga

SEQ ID NO: 2162351 - RNA, 19 nt, Homo sapiens
  misc_RNA (1)...(19): siRNA sense strand
gaccaacgaugaccaugug

SEQ ID NO: 2162352 - RNA, 19 nt, Homo sapiens
  misc_RNA (1)...(19): siRNA sense strand
gaacucugaugguggagau

SEQ ID NO: 2162353 - RNA, 19 nt, Homo sapiens
  misc_RNA (1)...(19): siRNA sense strand
gaaagaugaaacuagauga

SEQ ID NO: 2162354 - RNA, 19 nt, Homo sapiens
  misc_RNA (1)...(19): siRNA sense strand
ccaaacagguaaagucucu

SEQ ID NO: 2162355 - RNA, 19 nt, Homo sapiens
  misc_RNA (1)...(19): siRNA sense strand
gaaaaguccucaucaucuu

SEQ ID NO: 2162356 - RNA, 19 nt, Homo sapiens
  misc_RNA (1)...(19): siRNA sense strand
ccauugagccuccuaguga

SEQ ID NO: 2162357 - RNA, 19 nt, Homo sapiens
  misc_RNA (1)...(19): siRNA sense strand
gguaaagucucuggcugaa

SEQ ID NO: 2162358 - RNA, 19 nt, Homo sapiens
  misc_RNA (1)...(19): siRNA sense strand
gccaucauccuccucaaua

SEQ ID NO: 2162359 - RNA, 19 nt, Homo sapiens
  misc_RNA (1)...(19): siRNA sense strand
gaaaguggagcgacucauc

SEQ ID NO: 2162360 - RNA, 19 nt, Homo sapiens
  misc_RNA (1)...(19): siRNA sense strand
ggacuucuccuccauggau

SEQ ID NO: 2162361 - RNA, 19 nt, Homo sapiens
  misc_RNA (1)...(19): siRNA sense strand
caugauuguuggaaagaaa

SEQ ID NO: 2162362 - RNA, 19 nt, Homo sapiens
  misc_RNA (1)...(19): siRNA sense strand
ugacaauggugaagacauc

SEQ ID NO: 2162363 - RNA, 19 nt, Homo sapiens
  misc_RNA (1)...(19): siRNA sense strand
gaaggcgccuaccagaauc

SEQ ID NO: 2162364 - RNA, 19 nt, Homo sapiens
  misc_RNA (1)...(19): siRNA sense strand
cagagaaggguauccagua

SEQ ID NO: 2162365 - RNA, 19 nt, Homo sapiens
  misc_RNA (1)...(19): siRNA sense strand
ccaaugagaccaucaacug

SEQ ID NO: 2162366 - RNA, 19 nt, Homo sapiens
  misc_RNA (1)...(19): siRNA sense strand
gaaggaagcgggcuauucg

SEQ ID NO: 2162367 - RNA, 19 nt, Homo sapiens
  misc_RNA (1)...(19): siRNA sense strand
gagcacagcgguugauagu

SEQ ID NO: 2162368 - RNA, 19 nt, Homo sapiens
  misc_RNA (1)...(19): siRNA sense strand
agagaaggguauccaguau

SEQ ID NO: 2162369 - RNA, 19 nt, Homo sapiens
  misc_RNA (1)...(19): siRNA sense strand
gaagcuccgucaccacauc

SEQ ID NO: 2162370 - RNA, 19 nt, Homo sapiens
  misc_RNA (1)...(19): siRNA sense strand
caucauccuuuccaacaug

SEQ ID NO: 2162371 - RNA, 19 nt, Homo sapiens
  misc_RNA (1)...(19): siRNA sense strand
gcaugaacaagaacuuuga

SEQ ID NO: 2162372 - RNA, 19 nt, Homo sapiens
  misc_RNA (1)...(19): siRNA sense strand
uggaaaugcuggagaggaa

SEQ ID NO: 2162373 - RNA, 19 nt, Homo sapiens
  misc_RNA (1)...(19): siRNA sense strand
agaagcaguucaacagaga

SEQ ID NO: 2162374 - RNA, 19 nt, Homo sapiens
  misc_RNA (1)...(19): siRNA sense strand
gaacccagacaccaucuuc

SEQ ID NO: 2162375 - RNA, 19 nt, Homo sapiens
  misc_RNA (1)...(19): siRNA sense strand
caucgaagggucuguuauu

SEQ ID NO: 2162376 - RNA, 19 nt, Homo sapiens
  misc_RNA (1)...(19): siRNA sense strand
acaugcagcucuuccagaa

SEQ ID NO: 2162377 - RNA, 19 nt, Homo sapiens
  misc_RNA (1)...(19): siRNA sense strand
gaaucggccucaaccucuu

SEQ ID NO: 2162378 - RNA, 19 nt, Homo sapiens
  misc_RNA (1)...(19): siRNA sense strand
gccaaggacucagugaaug

SEQ ID NO: 2162379 - RNA, 19 nt, Homo sapiens
  misc_RNA (1)...(19): siRNA sense strand
aacgaaagaugaaacuaga

SEQ ID NO: 2162380 - RNA, 19 nt, Homo sapiens
  misc_RNA (1)...(19): siRNA sense strand
gcagaagcaguucaacaga

SEQ ID NO: 2162381 - RNA, 19 nt, Homo sapiens
  misc_RNA (1)...(19): siRNA sense strand
ggacaagaagguggaaaug

SEQ ID NO: 2162382 - RNA, 19 nt, Homo sapiens
  misc_RNA (1)...(19): siRNA sense strand
cuaccuggaugacacaguu

SEQ ID NO: 2162383 - RNA, 19 nt, Homo sapiens
  misc_RNA (1)...(19): siRNA sense strand
gaggacagcucagccacau

SEQ ID NO: 2162384 - RNA, 19 nt, Homo sapiens
  misc_RNA (1)...(19): siRNA sense strand
cgaagggucuguuauuagc

SEQ ID NO: 2162385 - RNA, 19 nt, Homo sapiens
  misc_RNA (1)...(19): siRNA sense strand
gcaggaggaggaggagaua

SEQ ID NO: 2162386 - RNA, 19 nt, Homo sapiens
  misc_RNA (1)...(19): siRNA sense strand
augcagcucuuccagaauu

SEQ ID NO: 2162387 - RNA, 19 nt, Homo sapiens
  misc_RNA (1)...(19): siRNA sense strand
gcgcaugauuguuggaaag

SEQ ID NO: 2162388 - RNA, 19 nt, Homo sapiens
  misc_RNA (1)...(19): siRNA sense strand
cgaaagaugaaacuagaug

SEQ ID NO: 2162389 - RNA, 19 nt, Homo sapiens
  misc_RNA (1)...(19): siRNA sense strand
guacagucccagcgucaaa

SEQ ID NO: 2162390 - RNA, 19 nt, Homo sapiens
  misc_RNA (1)...(19): siRNA sense strand
cuaaugacaucacagaacu

SEQ ID NO: 2162391 - RNA, 19 nt, Homo sapiens
  misc_RNA (1)...(19): siRNA sense strand
gaagcgggagucaaaggaa

SEQ ID NO: 2162392 - RNA, 19 nt, Homo sapiens
  misc_RNA (1)...(19): siRNA sense strand
agucggagcuggagaagca

SEQ ID NO: 2162393 - RNA, 19 nt, Homo sapiens
  misc_RNA (1)...(19): siRNA sense strand
cgccagcuuucaacaauga

SEQ ID NO: 2162394 - RNA, 19 nt, Homo sapiens
  misc_RNA (1)...(19): siRNA sense strand
agaaggguauccaguaucu

SEQ ID NO: 2162395 - RNA, 19 nt, Homo sapiens
  misc_RNA (1)...(19): siRNA sense strand
gcaugauuguuggaaagaa

SEQ ID NO: 2162396 - RNA, 19 nt, Homo sapiens
  misc_RNA (1)...(19): siRNA sense strand
gaugaaacuagaugacuuc

SEQ ID NO: 2162397 - RNA, 19 nt, Homo sapiens
  misc_RNA (1)...(19): siRNA sense strand
acaagaagguggaaaugcu

SEQ ID NO: 2162398 - RNA, 19 nt, Homo sapiens
  misc_RNA (1)...(19): siRNA sense strand
uggagaagcgggagucaaa

SEQ ID NO: 2162399 - RNA, 19 nt, Homo sapiens
  misc_RNA (1)...(19): siRNA sense strand
ggacacuaccgguuacaca

SEQ ID NO: 2162400 - RNA, 19 nt, Homo sapiens
  misc_RNA (1)...(19): siRNA sense strand
ggaggccacagcaccagua

SEQ ID NO: 2162401 - RNA, 19 nt, Homo sapiens
  misc_RNA (1)...(19): siRNA sense strand
guggagcgcaugauuguug

SEQ ID NO: 2162402 - RNA, 19 nt, Homo sapiens
  misc_RNA (1)...(19): siRNA sense strand
agaugaaacuagaugacuu

SEQ ID NO: 2162403 - RNA, 19 nt, Homo sapiens
  misc_RNA (1)...(19): siRNA sense strand
ggaaccggcagaagcaguu

SEQ ID NO: 2162404 - RNA, 19 nt, Homo sapiens
  misc_RNA (1)...(19): siRNA sense strand
gcaccguggucugaugaau

SEQ ID NO: 2162405 - RNA, 19 nt, Homo sapiens
  misc_RNA (1)...(19): siRNA sense strand
ggaccaacgaugaccaugu

SEQ ID NO: 2162406 - RNA, 19 nt, Homo sapiens
  misc_RNA (1)...(19): siRNA sense strand
gccucaaccucuucaacaa

SEQ ID NO: 2162407 - RNA, 19 nt, Homo sapiens
  misc_RNA (1)...(19): siRNA sense strand
ggcaggcgaugggcucaaa

SEQ ID NO: 2162408 - RNA, 19 nt, Homo sapiens
  misc_RNA (1)...(19): siRNA sense strand
gaagcagaaagguaugaug

SEQ ID NO: 2162409 - RNA, 19 nt, Homo sapiens
  misc_RNA (1)...(19): siRNA sense strand
agaagaucuuggugacgua

SEQ ID NO: 2162410 - RNA, 19 nt, Homo sapiens
  misc_RNA (1)...(19): siRNA sense strand
gaaguuccagucccauauc

SEQ ID NO: 2162411 - RNA, 19 nt, Homo sapiens
  misc_RNA (1)...(19): siRNA sense strand
cggaugcaguucuccuuug

SEQ ID NO: 2162412 - RNA, 19 nt, Homo sapiens
  misc_RNA (1)...(19): siRNA sense strand
aucgaagggucuguuauua

SEQ ID NO: 2162413 - RNA, 19 nt, Homo sapiens
  misc_RNA (1)...(19): siRNA sense strand
aaagaaaccaguccugucu

SEQ ID NO: 2162414 - RNA, 19 nt, Homo sapiens
  misc_RNA (1)...(19): siRNA sense strand
caacaagaagccagagaag

SEQ ID NO: 2162415 - RNA, 19 nt, Homo sapiens
  misc_RNA (1)...(19): siRNA sense strand
gccaguaccgcaugaacaa

SEQ ID NO: 2162416 - RNA, 19 nt, Homo sapiens
  misc_RNA (1)...(19): siRNA sense strand
gggaaggcgccuaccagaa

SEQ ID NO: 2162417 - RNA, 19 nt, Homo sapiens
  misc_RNA (1)...(19): siRNA sense strand
ggccaaggacucagugaau

SEQ ID NO: 2162418 - RNA, 19 nt, Homo sapiens
  misc_RNA (1)...(19): siRNA sense strand
gagaagcagaaagguauga

SEQ ID NO: 2162419 - RNA, 19 nt, Homo sapiens
  misc_RNA (1)...(19): siRNA sense strand
caggaccggcugcgcuuua

SEQ ID NO: 2162420 - RNA, 19 nt, Homo sapiens
  misc_RNA (1)...(19): siRNA sense strand
ccucuucaaugaucuccuu

SEQ ID NO: 2162421 - RNA, 19 nt, Homo sapiens
  misc_RNA (1)...(19): siRNA sense strand
ucaacaagaagccagagaa

SEQ ID NO: 2162422 - RNA, 19 nt, Homo sapiens
  misc_RNA (1)...(19): siRNA sense strand
gcaucauccuuuccaacau

SEQ ID NO: 2162423 - RNA, 19 nt, Homo sapiens
  misc_RNA (1)...(19): siRNA sense strand
gaaucgggaggcuguguau

SEQ ID NO: 2162424 - RNA, 19 nt, Homo sapiens
  misc_RNA (1)...(19): siRNA sense strand
uuccugggcucccuauuug

SEQ ID NO: 2162425 - RNA, 19 nt, Homo sapiens
  misc_RNA (1)...(19): siRNA sense strand
uggagaagcagaaagguau

SEQ ID NO: 2162426 - RNA, 19 nt, Homo sapiens
  misc_RNA (1)...(19): siRNA sense strand
gagacguguuggacugugu

SEQ ID NO: 2162427 - RNA, 19 nt, Homo sapiens
  misc_RNA (1)...(19): siRNA sense strand
agacagccuuccgccagua

SEQ ID NO: 2162428 - RNA, 19 nt, Homo sapiens
  misc_RNA (1)...(19): siRNA sense strand
gaaaugcuggagaggaagu

SEQ ID NO: 2162429 - RNA, 19 nt, Homo sapiens
  misc_RNA (1)...(19): siRNA sense strand
gaccugcgcgaguccauug

SEQ ID NO: 2162430 - RNA, 19 nt, Homo sapiens
  misc_RNA (1)...(19): siRNA sense strand
cagcgguacugugucugua

SEQ ID NO: 2162431 - RNA, 19 nt, Homo sapiens
  misc_RNA (1)...(19): siRNA sense strand
gauaacgagagccuugaga

SEQ ID NO: 2162432 - RNA, 19 nt, Homo sapiens
  misc_RNA (1)...(19): siRNA sense strand
gcgagagccaguaccagaa

SEQ ID NO: 2162433 - RNA, 19 nt, Homo sapiens
  misc_RNA (1)...(19): siRNA sense strand
caaguugcugucugcagua

SEQ ID NO: 2162434 - RNA, 19 nt, Homo sapiens
  misc_RNA (1)...(19): siRNA sense strand
gcggaugcaguucuccuuu

SEQ ID NO: 2162435 - RNA, 19 nt, Homo sapiens
  misc_RNA (1)...(19): siRNA sense strand
gagauaacgagagccuuga

SEQ ID NO: 2162436 - RNA, 19 nt, Homo sapiens
  misc_RNA (1)...(19): siRNA sense strand
ggagucaaaggaacagcaa

SEQ ID NO: 2162437 - RNA, 19 nt, Homo sapiens
  misc_RNA (1)...(19): siRNA sense strand
agaaaccaguccugucucu

SEQ ID NO: 2162438 - RNA, 19 nt, Homo sapiens
  misc_RNA (1)...(19): siRNA sense strand
ccaaaauuuuccagaagaa

SEQ ID NO: 2162439 - RNA, 19 nt, Homo sapiens
  misc_RNA (1)...(19): siRNA sense strand
ucaccaaaauuuuccagaa

SEQ ID NO: 2162440 - RNA, 19 nt, Homo sapiens
  misc_RNA (1)...(19): siRNA sense strand
ugagaaagauccuguauua

SEQ ID NO: 2162441 - RNA, 19 nt, Homo sapiens
  misc_RNA (1)...(19): siRNA sense strand
gcaaagcaguggaacauau

SEQ ID NO: 2162442 - RNA, 19 nt, Homo sapiens
  misc_RNA (1)...(19): siRNA sense strand
gaacuggcauggucauuca

SEQ ID NO: 2162443 - RNA, 19 nt, Homo sapiens
  misc_RNA (1)...(19): siRNA sense strand
gacgauggcuccaagagaa

SEQ ID NO: 2162444 - RNA, 19 nt, Homo sapiens
  misc_RNA (1)...(19): siRNA sense strand
guaaaucccucucuguauc

SEQ ID NO: 2162445 - RNA, 19 nt, Homo sapiens
  misc_RNA (1)...(19): siRNA sense strand
gauuggaacuucacagaga

SEQ ID NO: 2162446 - RNA, 19 nt, Homo sapiens
  misc_RNA (1)...(19): siRNA sense strand
gaggaaggcugcacacaag

SEQ ID NO: 2162447 - RNA, 19 nt, Homo sapiens
  misc_RNA (1)...(19): siRNA sense strand
gagaugaaccucuaacaca

SEQ ID NO: 2162448 - RNA, 19 nt, Homo sapiens
  misc_RNA (1)...(19): siRNA sense strand
gauacacacuuggcagaaa

SEQ ID NO: 2162449 - RNA, 19 nt, Homo sapiens
  misc_RNA (1)...(19): siRNA sense strand
ggauuugacuguguuuaug

SEQ ID NO: 2162450 - RNA, 19 nt, Homo sapiens
  misc_RNA (1)...(19): siRNA sense strand
gaugaugauuuccauaucu

SEQ ID NO: 2162451 - RNA, 19 nt, Homo sapiens
  misc_RNA (1)...(19): siRNA sense strand
uaauagaguugcaucaucu

SEQ ID NO: 2162452 - RNA, 19 nt, Homo sapiens
  misc_RNA (1)...(19): siRNA sense strand
uguaccagcucuuagauga

SEQ ID NO: 2162453 - RNA, 19 nt, Homo sapiens
  misc_RNA (1)...(19): siRNA sense strand
ggaauacgccaaagacgau

SEQ ID NO: 2162454 - RNA, 19 nt, Homo sapiens
  misc_RNA (1)...(19): siRNA sense strand
cagcacggauggaaagaug

SEQ ID NO: 2162455 - RNA, 19 nt, Homo sapiens
  misc_RNA (1)...(19): siRNA sense strand
ugacuguguuuauggauug

SEQ ID NO: 2162456 - RNA, 19 nt, Homo sapiens
  misc_RNA (1)...(19): siRNA sense strand
agaguugcaucaucuagaa

SEQ ID NO: 2162457 - RNA, 19 nt, Homo sapiens
  misc_RNA (1)...(19): siRNA sense strand
ggagccaggagaagucaua

SEQ ID NO: 2162458 - RNA, 19 nt, Homo sapiens
  misc_RNA (1)...(19): siRNA sense strand
caaagcaguggaacauauu

SEQ ID NO: 2162459 - RNA, 19 nt, Homo sapiens
  misc_RNA (1)...(19): siRNA sense strand
acacuuggcagaaauaaug

SEQ ID NO: 2162460 - RNA, 19 nt, Homo sapiens
  misc_RNA (1)...(19): siRNA sense strand
ggaaggcugcacacaagaa

SEQ ID NO: 2162461 - RNA, 19 nt, Homo sapiens
  misc_RNA (1)...(19): siRNA sense strand
uaccagcucuuagaugauu

SEQ ID NO: 2162462 - RNA, 19 nt, Homo sapiens
  misc_RNA (1)...(19): siRNA sense strand
gaacacaugguuuuacauu

SEQ ID NO: 2162463 - RNA, 19 nt, Homo sapiens
  misc_RNA (1)...(19): siRNA sense strand
ggucauucaucagguagaa

SEQ ID NO: 2162464 - RNA, 19 nt, Homo sapiens
  misc_RNA (1)...(19): siRNA sense strand
agauggagaugaaccucua

SEQ ID NO: 2162465 - RNA, 19 nt, Homo sapiens
  misc_RNA (1)...(19): siRNA sense strand
gaaauaaugguuggcaaag

SEQ ID NO: 2162466 - RNA, 19 nt, Homo sapiens
  misc_RNA (1)...(19): siRNA sense strand
cuaauagaguugcaucauc

SEQ ID NO: 2162467 - RNA, 19 nt, Homo sapiens
  misc_RNA (1)...(19): siRNA sense strand
cauggucauucaucaggua

SEQ ID NO: 2162468 - RNA, 19 nt, Homo sapiens
  misc_RNA (1)...(19): siRNA sense strand
gcacacaagaagcauagga

SEQ ID NO: 2162469 - RNA, 19 nt, Homo sapiens
  misc_RNA (1)...(19): siRNA sense strand
cuucaagauuccaaugauu

SEQ ID NO: 2162470 - RNA, 19 nt, Homo sapiens
  misc_RNA (1)...(19): siRNA sense strand
gaauucagcacggauggaa

SEQ ID NO: 2162471 - RNA, 19 nt, Homo sapiens
  misc_RNA (1)...(19): siRNA sense strand
caucgugggcugcagaauu

SEQ ID NO: 2162472 - RNA, 19 nt, Homo sapiens
  misc_RNA (1)...(19): siRNA sense strand
aauaaugguuggcaaagca

SEQ ID NO: 2162473 - RNA, 19 nt, Homo sapiens
  misc_RNA (1)...(19): siRNA sense strand
cuaacacaguggaaaggaa

SEQ ID NO: 2162474 - RNA, 19 nt, Homo sapiens
  misc_RNA (1)...(19): siRNA sense strand
auggaaagauggagaugaa

SEQ ID NO: 2162475 - RNA, 19 nt, Homo sapiens
  misc_RNA (1)...(19): siRNA sense strand
gguuuuacauuaccuauga

SEQ ID NO: 2162476 - RNA, 19 nt, Homo sapiens
  misc_RNA (1)...(19): siRNA sense strand
gagaaagauccuguauuau

SEQ ID NO: 2162477 - RNA, 19 nt, Homo sapiens
  misc_RNA (1)...(19): siRNA sense strand
gcacggauggaaagaugga

SEQ ID NO: 2162478 - RNA, 19 nt, Homo sapiens
  misc_RNA (1)...(19): siRNA sense strand
agaaauaaugguuggcaaa

SEQ ID NO: 2162479 - RNA, 19 nt, Homo sapiens
  misc_RNA (1)...(19): siRNA sense strand
agucauagacagccuggua

SEQ ID NO: 2162480 - RNA, 19 nt, Homo sapiens
  misc_RNA (1)...(19): siRNA sense strand
uaggcaaacagguggaaua

SEQ ID NO: 2162481 - RNA, 19 nt, Homo sapiens
  misc_RNA (1)...(19): siRNA sense strand
guuuauggauuggaacuuc

SEQ ID NO: 2162482 - RNA, 19 nt, Homo sapiens
  misc_RNA (1)...(19): siRNA sense strand
auacacacuuggcagaaau

SEQ ID NO: 2162483 - RNA, 19 nt, Homo sapiens
  misc_RNA (1)...(19): siRNA sense strand
gauggaaagauggagauga

SEQ ID NO: 2162484 - RNA, 19 nt, Homo sapiens
  misc_RNA (1)...(19): siRNA sense strand
ucuguuaccaugauaaaga

SEQ ID NO: 2162485 - RNA, 19 nt, Homo sapiens
  misc_RNA (1)...(19): siRNA sense strand
ugauggauuugacuguguu

SEQ ID NO: 2162486 - RNA, 19 nt, Homo sapiens
  misc_RNA (1)...(19): siRNA sense strand
cuguguacuucaucaaauu

SEQ ID NO: 2162487 - RNA, 19 nt, Homo sapiens
  misc_RNA (1)...(19): siRNA sense strand
caucaucuagaaucaguga

SEQ ID NO: 2162488 - RNA, 19 nt, Homo sapiens
  misc_RNA (1)...(19): siRNA sense strand
ccacggcagugugucuguu

SEQ ID NO: 2162489 - RNA, 19 nt, Homo sapiens
  misc_RNA (1)...(19): siRNA sense strand
ugaugaugauuuccauauc

SEQ ID NO: 2162490 - RNA, 19 nt, Homo sapiens
  misc_RNA (1)...(19): siRNA sense strand
ggagaugaaccucuaacac

SEQ ID NO: 2162491 - RNA, 19 nt, Homo sapiens
  misc_RNA (1)...(19): siRNA sense strand
gaaggcugcacacaagaag

SEQ ID NO: 2162492 - RNA, 19 nt, Homo sapiens
  misc_RNA (1)...(19): siRNA sense strand
uguaaaucccucucuguau

SEQ ID NO: 2162493 - RNA, 19 nt, Homo sapiens
  misc_RNA (1)...(19): siRNA sense strand
ggcaaagcaguggaacaua

SEQ ID NO: 2162494 - RNA, 19 nt, Homo sapiens
  misc_RNA (1)...(19): siRNA sense strand
ucuguguacuucaucaaau

SEQ ID NO: 2162495 - RNA, 19 nt, Homo sapiens
  misc_RNA (1)...(19): siRNA sense strand
gcaccugucaugaacacau

SEQ ID NO: 2162496 - RNA, 19 nt, Homo sapiens
  misc_RNA (1)...(19): siRNA sense strand
gaugaaccucuaacacagu

SEQ ID NO: 2162497 - RNA, 19 nt, Homo sapiens
  misc_RNA (1)...(19): siRNA sense strand
agaggaaggcugcacacaa

SEQ ID NO: 2162498 - RNA, 19 nt, Homo sapiens
  misc_RNA (1)...(19): siRNA sense strand
cuguaaaucccucucugua

SEQ ID NO: 2162499 - RNA, 19 nt, Homo sapiens
  misc_RNA (1)...(19): siRNA sense strand
uuaccaugauaaagaggaa

SEQ ID NO: 2162500 - RNA, 19 nt, Homo sapiens
  misc_RNA (1)...(19): siRNA sense strand
cuaugucuacgauuuggua

SEQ ID NO: 2162501 - RNA, 19 nt, Homo sapiens
  misc_RNA (1)...(19): siRNA sense strand
uacauuaccuaugagaaag

SEQ ID NO: 2162502 - RNA, 19 nt, Homo sapiens
  misc_RNA (1)...(19): siRNA sense strand
gaaagauggagaugaaccu

SEQ ID NO: 2162503 - RNA, 19 nt, Homo sapiens
  misc_RNA (1)...(19): siRNA sense strand
gauggagaugaaccucuaa

SEQ ID NO: 2162504 - RNA, 19 nt, Homo sapiens
  misc_RNA (1)...(19): siRNA sense strand
ccuucaagauuccaaugau

SEQ ID NO: 2162505 - RNA, 19 nt, Homo sapiens
  misc_RNA (1)...(19): siRNA sense strand
uaugagaaagauccuguau

SEQ ID NO: 2162506 - RNA, 19 nt, Homo sapiens
  misc_RNA (1)...(19): siRNA sense strand
aaagcaguggaacauauuu

SEQ ID NO: 2162507 - RNA, 19 nt, Homo sapiens
  misc_RNA (1)...(19): siRNA sense strand
guugcaucaucuagaauca

SEQ ID NO: 2162508 - RNA, 19 nt, Homo sapiens
  misc_RNA (1)...(19): siRNA sense strand
uaucuaugucuacgauuug

SEQ ID NO: 2162509 - RNA, 19 nt, Homo sapiens
  misc_RNA (1)...(19): siRNA sense strand
ccaaagacgauggcuccaa

SEQ ID NO: 2162510 - RNA, 19 nt, Homo sapiens
  misc_RNA (1)...(19): siRNA sense strand
cacggcagugugucuguua

SEQ ID NO: 2162511 - RNA, 19 nt, Homo sapiens
  misc_RNA (1)...(19): siRNA sense strand
auauauguaccagcucuua

SEQ ID NO: 2162512 - RNA, 19 nt, Homo sapiens
  misc_RNA (1)...(19): siRNA sense strand
uggauuugacuguguuuau

SEQ ID NO: 2162513 - RNA, 19 nt, Homo sapiens
  misc_RNA (1)...(19): siRNA sense strand
gcaaaacccucuguguacu

SEQ ID NO: 2162514 - RNA, 19 nt, Homo sapiens
  misc_RNA (1)...(19): siRNA sense strand
aagcaaaacccucugugua

SEQ ID NO: 2162515 - RNA, 19 nt, Homo sapiens
  misc_RNA (1)...(19): siRNA sense strand
gagggagccaggagaaguc

SEQ ID NO: 2162516 - RNA, 19 nt, Homo sapiens
  misc_RNA (1)...(19): siRNA sense strand
agagagggagccaggagaa

SEQ ID NO: 2162517 - RNA, 19 nt, Homo sapiens
  misc_RNA (1)...(19): siRNA sense strand
gauuugacuguguuuaugg

SEQ ID NO: 2162518 - RNA, 19 nt, Homo sapiens
  misc_RNA (1)...(19): siRNA sense strand
gaaauaugaugccaaauug

SEQ ID NO: 2162519 - RNA, 19 nt, Homo sapiens
  misc_RNA (1)...(19): siRNA sense strand
gaugacaggucuuuaguuu

SEQ ID NO: 2162520 - RNA, 19 nt, Homo sapiens
  misc_RNA (1)...(19): siRNA sense strand
gaaaucugcucucaucauu

SEQ ID NO: 2162521 - RNA, 19 nt, Homo sapiens
  misc_RNA (1)...(19): siRNA sense strand
gugaugagcuggugaauau

SEQ ID NO: 2162522 - RNA, 19 nt, Homo sapiens
  misc_RNA (1)...(19): siRNA sense strand
ggagggagcucuuuagcaa

SEQ ID NO: 2162523 - RNA, 19 nt, Homo sapiens
  misc_RNA (1)...(19): siRNA sense strand
gagacaagcucuucaacaa

SEQ ID NO: 2162524 - RNA, 19 nt, Homo sapiens
  misc_RNA (1)...(19): siRNA sense strand
uaacacaucucuucuaucu

SEQ ID NO: 2162525 - RNA, 19 nt, Homo sapiens
  misc_RNA (1)...(19): siRNA sense strand
ggaggaaguugaccaugaa

SEQ ID NO: 2162526 - RNA, 19 nt, Homo sapiens
  misc_RNA (1)...(19): siRNA sense strand
ggacaucaaugccaauucu

SEQ ID NO: 2162527 - RNA, 19 nt, Homo sapiens
  misc_RNA (1)...(19): siRNA sense strand
acacaucucuucuaucuuc

SEQ ID NO: 2162528 - RNA, 19 nt, Homo sapiens
  misc_RNA (1)...(19): siRNA sense strand
ggaggaagaagaagaagaa

SEQ ID NO: 2162529 - RNA, 19 nt, Homo sapiens
  misc_RNA (1)...(19): siRNA sense strand
agagaaauaugaugccaaa

SEQ ID NO: 2162530 - RNA, 19 nt, Homo sapiens
  misc_RNA (1)...(19): siRNA sense strand
ggagguggaggccaacuua

SEQ ID NO: 2162531 - RNA, 19 nt, Homo sapiens
  misc_RNA (1)...(19): siRNA sense strand
gcaaaggucuagaaaauuc

SEQ ID NO: 2162532 - RNA, 19 nt, Homo sapiens
  misc_RNA (1)...(19): siRNA sense strand
ucaaggagcucuaguccau

SEQ ID NO: 2162533 - RNA, 19 nt, Homo sapiens
  misc_RNA (1)...(19): siRNA sense strand
cuaccaaucugcguaauga

SEQ ID NO: 2162534 - RNA, 19 nt, Homo sapiens
  misc_RNA (1)...(19): siRNA sense strand
gggaagagcaacucaaaug

SEQ ID NO: 2162535 - RNA, 19 nt, Homo sapiens
  misc_RNA (1)...(19): siRNA sense strand
aggaccagcuccaagauua

SEQ ID NO: 2162536 - RNA, 19 nt, Homo sapiens
  misc_RNA (1)...(19): siRNA sense strand
gcaaauccuuaucuacauc

SEQ ID NO: 2162537 - RNA, 19 nt, Homo sapiens
  misc_RNA (1)...(19): siRNA sense strand
ggaauccaauaacaggaaa

SEQ ID NO: 2162538 - RNA, 19 nt, Homo sapiens
  misc_RNA (1)...(19): siRNA sense strand
aaucugcucucaucauuga

SEQ ID NO: 2162539 - RNA, 19 nt, Homo sapiens
  misc_RNA (1)...(19): siRNA sense strand
gagacaggguucacaaagu

SEQ ID NO: 2162540 - RNA, 19 nt, Homo sapiens
  misc_RNA (1)...(19): siRNA sense strand
gagaguagcaaauccuuau

SEQ ID NO: 2162541 - RNA, 19 nt, Homo sapiens
  misc_RNA (1)...(19): siRNA sense strand
ggagaaguugguacugaua

SEQ ID NO: 2162542 - RNA, 19 nt, Homo sapiens
  misc_RNA (1)...(19): siRNA sense strand
ggaagaagaagaagaagag

SEQ ID NO: 2162543 - RNA, 19 nt, Homo sapiens
  misc_RNA (1)...(19): siRNA sense strand
ccacagaccaaucauauca

SEQ ID NO: 2162544 - RNA, 19 nt, Homo sapiens
  misc_RNA (1)...(19): siRNA sense strand
gagcuuagagccugugcua

SEQ ID NO: 2162545 - RNA, 19 nt, Homo sapiens
  misc_RNA (1)...(19): siRNA sense strand
gcaagcaaaggucuagaaa

SEQ ID NO: 2162546 - RNA, 19 nt, Homo sapiens
  misc_RNA (1)...(19): siRNA sense strand
gaaagaaagaccagacaag

SEQ ID NO: 2162547 - RNA, 19 nt, Homo sapiens
  misc_RNA (1)...(19): siRNA sense strand
gagcccaacuccucaaugg

SEQ ID NO: 2162548 - RNA, 19 nt, Homo sapiens
  misc_RNA (1)...(19): siRNA sense strand
gacaagcucuucaacaaaa

SEQ ID NO: 2162549 - RNA, 19 nt, Homo sapiens
  misc_RNA (1)...(19): siRNA sense strand
gaugaggacuggugaugag

SEQ ID NO: 2162550 - RNA, 19 nt, Homo sapiens
  misc_RNA (1)...(19): siRNA sense strand
ucuaacacaucucuucuau

SEQ ID NO: 2162551 - RNA, 19 nt, Homo sapiens
  misc_RNA (1)...(19): siRNA sense strand
gaaagaccaaccugagaug

SEQ ID NO: 2162552 - RNA, 19 nt, Homo sapiens
  misc_RNA (1)...(19): siRNA sense strand
gaacaaacugaaagaccaa

SEQ ID NO: 2162553 - RNA, 19 nt, Homo sapiens
  misc_RNA (1)...(19): siRNA sense strand
agacaggguucacaaagug

SEQ ID NO: 2162554 - RNA, 19 nt, Homo sapiens
  misc_RNA (1)...(19): siRNA sense strand
ggaggaggaagaagaagaa

SEQ ID NO: 2162555 - RNA, 19 nt, Homo sapiens
  misc_RNA (1)...(19): siRNA sense strand
caugauccuugcauuuauu

SEQ ID NO: 2162556 - RNA, 19 nt, Homo sapiens
  misc_RNA (1)...(19): siRNA sense strand
agucagaaacucccacuua

SEQ ID NO: 2162557 - RNA, 19 nt, Homo sapiens
  misc_RNA (1)...(19): siRNA sense strand
gaaggagaaacugagcuua

SEQ ID NO: 2162558 - RNA, 19 nt, Homo sapiens
  misc_RNA (1)...(19): siRNA sense strand
gggagaaguugguguuugg

SEQ ID NO: 2162559 - RNA, 19 nt, Homo sapiens
  misc_RNA (1)...(19): siRNA sense strand
caggagaaguugguacuga

SEQ ID NO: 2162560 - RNA, 19 nt, Homo sapiens
  misc_RNA (1)...(19): siRNA sense strand
caggaaucccuaccucuua

SEQ ID NO: 2162561 - RNA, 19 nt, Homo sapiens
  misc_RNA (1)...(19): siRNA sense strand
caacccaggugacaacaag

SEQ ID NO: 2162562 - RNA, 19 nt, Homo sapiens
  misc_RNA (1)...(19): siRNA sense strand
ucucuucuaucuucaugua

SEQ ID NO: 2162563 - RNA, 19 nt, Homo sapiens
  misc_RNA (1)...(19): siRNA sense strand
gcacagaggcaggugaaga

SEQ ID NO: 2162564 - RNA, 19 nt, Homo sapiens
  misc_RNA (1)...(19): siRNA sense strand
ugacaggucuuuaguuuug

SEQ ID NO: 2162565 - RNA, 19 nt, Homo sapiens
  misc_RNA (1)...(19): siRNA sense strand
gauggucuccagagcauaa

SEQ ID NO: 2162566 - RNA, 19 nt, Homo sapiens
  misc_RNA (1)...(19): siRNA sense strand
gaagagcaacucaaauguc

SEQ ID NO: 2162567 - RNA, 19 nt, Homo sapiens
  misc_RNA (1)...(19): siRNA sense strand
ggaagagcaacucaaaugu

SEQ ID NO: 2162568 - RNA, 19 nt, Homo sapiens
  misc_RNA (1)...(19): siRNA sense strand
ggaggaggaggaagaagaa

SEQ ID NO: 2162569 - RNA, 19 nt, Homo sapiens
  misc_RNA (1)...(19): siRNA sense strand
cgagcaauuucuucucuug

SEQ ID NO: 2162570 - RNA, 19 nt, Homo sapiens
  misc_RNA (1)...(19): siRNA sense strand
gagaaaagcagcuccauug

SEQ ID NO: 2162571 - RNA, 19 nt, Homo sapiens
  misc_RNA (1)...(19): siRNA sense strand
acagaccaaucauaucauu

SEQ ID NO: 2162572 - RNA, 19 nt, Homo sapiens
  misc_RNA (1)...(19): siRNA sense strand
cagagcagccagugaauug

SEQ ID NO: 2162573 - RNA, 19 nt, Homo sapiens
  misc_RNA (1)...(19): siRNA sense strand
ucaguuugcuaucauaauc

SEQ ID NO: 2162574 - RNA, 19 nt, Homo sapiens
  misc_RNA (1)...(19): siRNA sense strand
gaaaauuccauguguugua

SEQ ID NO: 2162575 - RNA, 19 nt, Homo sapiens
  misc_RNA (1)...(19): siRNA sense strand
ccacuuacucagaauguuu

SEQ ID NO: 2162576 - RNA, 19 nt, Homo sapiens
  misc_RNA (1)...(19): siRNA sense strand
caucucauuugccagguuu

SEQ ID NO: 2162577 - RNA, 19 nt, Homo sapiens
  misc_RNA (1)...(19): siRNA sense strand
caaucugcguaaugaaauu

SEQ ID NO: 2162578 - RNA, 19 nt, Homo sapiens
  misc_RNA (1)...(19): siRNA sense strand
caagugagggccaucagaa

SEQ ID NO: 2162579 - RNA, 19 nt, Homo sapiens
  misc_RNA (1)...(19): siRNA sense strand
gcucugaacagcaucgauu

SEQ ID NO: 2162580 - RNA, 19 nt, Homo sapiens
  misc_RNA (1)...(19): siRNA sense strand
ccucuuacucagcuuauua

SEQ ID NO: 2162581 - RNA, 19 nt, Homo sapiens
  misc_RNA (1)...(19): siRNA sense strand
ugcauucgguguucaguuu

SEQ ID NO: 2162582 - RNA, 19 nt, Homo sapiens
  misc_RNA (1)...(19): siRNA sense strand
ggaaggcccagcuccagaa

SEQ ID NO: 2162583 - RNA, 19 nt, Homo sapiens
  misc_RNA (1)...(19): siRNA sense strand
ccacagaaggagaaacuga

SEQ ID NO: 2162584 - RNA, 19 nt, Homo sapiens
  misc_RNA (1)...(19): siRNA sense strand
ggacaggaagccacugaau

SEQ ID NO: 2162585 - RNA, 19 nt, Homo sapiens
  misc_RNA (1)...(19): siRNA sense strand
cauaggagggagcucuuua

SEQ ID NO: 2162586 - RNA, 19 nt, Homo sapiens
  misc_RNA (1)...(19): siRNA sense strand
aaucugcccugccuugcua

SEQ ID NO: 2162587 - RNA, 19 nt, Homo sapiens
  misc_RNA (1)...(19): siRNA sense strand
ccaugauccuugcauuuau

SEQ ID NO: 2162588 - RNA, 19 nt, Homo sapiens
  misc_RNA (1)...(19): siRNA sense strand
cuaaggagccaguggaaga

SEQ ID NO: 2162589 - RNA, 19 nt, Homo sapiens
  misc_RNA (1)...(19): siRNA sense strand
gagcaacucaaaugucuca

SEQ ID NO: 2162590 - RNA, 19 nt, Homo sapiens
  misc_RNA (1)...(19): siRNA sense strand
acaaaguggucaaccuguu

SEQ ID NO: 2162591 - RNA, 19 nt, Homo sapiens
  misc_RNA (1)...(19): siRNA sense strand
ccagaaaguccuccacuca

SEQ ID NO: 2162592 - RNA, 19 nt, Homo sapiens
  misc_RNA (1)...(19): siRNA sense strand
aggaggaaguugaccauga

SEQ ID NO: 2162593 - RNA, 19 nt, Homo sapiens
  misc_RNA (1)...(19): siRNA sense strand
gcucacagugucuaagauu

SEQ ID NO: 2162594 - RNA, 19 nt, Homo sapiens
  misc_RNA (1)...(19): siRNA sense strand
uagcaaauccuuaucuaca

SEQ ID NO: 2162595 - RNA, 19 nt, Homo sapiens
  misc_RNA (1)...(19): siRNA sense strand
gaugcaggccucaaccaaa

SEQ ID NO: 2162596 - RNA, 19 nt, Homo sapiens
  misc_RNA (1)...(19): siRNA sense strand
gaugagcuggugaauauca

SEQ ID NO: 2162597 - RNA, 19 nt, Homo sapiens
  misc_RNA (1)...(19): siRNA sense strand
aaggagcucuaguccauga

SEQ ID NO: 2162598 - RNA, 19 nt, Homo sapiens
  misc_RNA (1)...(19): siRNA sense strand
gcagaccaaccauaucaug

SEQ ID NO: 2162599 - RNA, 19 nt, Homo sapiens
  misc_RNA (1)...(19): siRNA sense strand
cagcaugugcaccuugaua

SEQ ID NO: 2162600 - RNA, 19 nt, Homo sapiens
  misc_RNA (1)...(19): siRNA sense strand
gcagagcagccagugaauu

SEQ ID NO: 2162601 - RNA, 19 nt, Homo sapiens
  misc_RNA (1)...(19): siRNA sense strand
agaagaagaagaagaggaa

SEQ ID NO: 2162602 - RNA, 19 nt, Homo sapiens
  misc_RNA (1)...(19): siRNA sense strand
ggagaaguacaggcucuuu

SEQ ID NO: 2162603 - RNA, 19 nt, Homo sapiens
  misc_RNA (1)...(19): siRNA sense strand
aagcaaaggucuagaaaau

SEQ ID NO: 2162604 - RNA, 19 nt, Homo sapiens
  misc_RNA (1)...(19): siRNA sense strand
gaggacaucgggacaggaa

SEQ ID NO: 2162605 - RNA, 19 nt, Homo sapiens
  misc_RNA (1)...(19): siRNA sense strand
agcgagagcuggaggagaa

SEQ ID NO: 2162606 - RNA, 19 nt, Homo sapiens
  misc_RNA (1)...(19): siRNA sense strand
aacaagaguuucagcacuu

SEQ ID NO: 2162607 - RNA, 19 nt, Homo sapiens
  misc_RNA (1)...(19): siRNA sense strand
gggcaccaguggacucugu

SEQ ID NO: 2162608 - RNA, 19 nt, Homo sapiens
  misc_RNA (1)...(19): siRNA sense strand
acaagaguuucagcacuuu

SEQ ID NO: 2162609 - RNA, 19 nt, Homo sapiens
  misc_RNA (1)...(19): siRNA sense strand
cagcagagcaagaauccuu

SEQ ID NO: 2162610 - RNA, 19 nt, Homo sapiens
  misc_RNA (1)...(19): siRNA sense strand
agaagaagaggaagaggaa

SEQ ID NO: 2162611 - RNA, 19 nt, Homo sapiens
  misc_RNA (1)...(19): siRNA sense strand
gguguucaguuugcuauca

SEQ ID NO: 2162612 - RNA, 19 nt, Homo sapiens
  misc_RNA (1)...(19): siRNA sense strand
ucacagugucuaagauuga

SEQ ID NO: 2162613 - RNA, 19 nt, Homo sapiens
  misc_RNA (1)...(19): siRNA sense strand
gauccuugcauuuauuguu

SEQ ID NO: 2162614 - RNA, 19 nt, Homo sapiens
  misc_RNA (1)...(19): siRNA sense strand
gcagcuuugucccagaaga

SEQ ID NO: 2162615 - RNA, 19 nt, Homo sapiens
  misc_RNA (1)...(19): siRNA sense strand
ccauuccagugauuucuug

SEQ ID NO: 2162616 - RNA, 19 nt, Homo sapiens
  misc_RNA (1)...(19): siRNA sense strand
aagagcaacucaaaugucu

SEQ ID NO: 2162617 - RNA, 19 nt, Homo sapiens
  misc_RNA (1)...(19): siRNA sense strand
uaccagcacuuugucaaga

SEQ ID NO: 2162618 - RNA, 19 nt, Homo sapiens
  misc_RNA (1)...(19): siRNA sense strand
gcacagaacguacguguau

SEQ ID NO: 2162619 - RNA, 19 nt, Homo sapiens
  misc_RNA (1)...(19): siRNA sense strand
ccgaauaucuggagaaacu

SEQ ID NO: 2162620 - RNA, 19 nt, Homo sapiens
  misc_RNA (1)...(19): siRNA sense strand
gaauaucuggagaaacuaa

SEQ ID NO: 2162621 - RNA, 19 nt, Homo sapiens
  misc_RNA (1)...(19): siRNA sense strand
gaagauucgguuagcauug

SEQ ID NO: 2162622 - RNA, 19 nt, Homo sapiens
  misc_RNA (1)...(19): siRNA sense strand
ggaggaagcgagagugguu

SEQ ID NO: 2162623 - RNA, 19 nt, Homo sapiens
  misc_RNA (1)...(19): siRNA sense strand
gacgagguccuguuaguga

SEQ ID NO: 2162624 - RNA, 19 nt, Homo sapiens
  misc_RNA (1)...(19): siRNA sense strand
ggaagauucgguuagcauu

SEQ ID NO: 2162625 - RNA, 19 nt, Homo sapiens
  misc_RNA (1)...(19): siRNA sense strand
gaagcgagagugguucaaa

SEQ ID NO: 2162626 - RNA, 19 nt, Homo sapiens
  misc_RNA (1)...(19): siRNA sense strand
gagguccuguuagugagua

SEQ ID NO: 2162627 - RNA, 19 nt, Homo sapiens
  misc_RNA (1)...(19): siRNA sense strand
ccucgaggaugaagugcaa

SEQ ID NO: 2162628 - RNA, 19 nt, Homo sapiens
  misc_RNA (1)...(19): siRNA sense strand
uccgagagguguacgaaga

SEQ ID NO: 2162629 - RNA, 19 nt, Homo sapiens
  misc_RNA (1)...(19): siRNA sense strand
cggagcugcuggaggauug

SEQ ID NO: 2162630 - RNA, 19 nt, Homo sapiens
  misc_RNA (1)...(19): siRNA sense strand
gcuggaggauugggaagau

SEQ ID NO: 2162631 - RNA, 19 nt, Homo sapiens
  misc_RNA (1)...(19): siRNA sense strand
cgccgaauaucuggagaaa

SEQ ID NO: 2162632 - RNA, 19 nt, Homo sapiens
  misc_RNA (1)...(19): siRNA sense strand
cgaagaggcgggagucaag

SEQ ID NO: 2162633 - RNA, 19 nt, Homo sapiens
  misc_RNA (1)...(19): siRNA sense strand
uaagccagaaugguugaua

SEQ ID NO: 2162634 - RNA, 19 nt, Homo sapiens
  misc_RNA (1)...(19): siRNA sense strand
gauugggaagauucgguua

SEQ ID NO: 2162635 - RNA, 19 nt, Homo sapiens
  misc_RNA (1)...(19): siRNA sense strand
gggaagauucgguuagcau

SEQ ID NO: 2162636 - RNA, 19 nt, Homo sapiens
  misc_RNA (1)...(19): siRNA sense strand
gcuccugggcgucuucgaa

SEQ ID NO: 2162637 - RNA, 19 nt, Homo sapiens
  misc_RNA (1)...(19): siRNA sense strand
ugaugacgacgcugccuuu

SEQ ID NO: 2162638 - RNA, 19 nt, Homo sapiens
  misc_RNA (1)...(19): siRNA sense strand
cagaacguacguguaugua

SEQ ID NO: 2162639 - RNA, 19 nt, Homo sapiens
  misc_RNA (1)...(19): siRNA sense strand
gcccgugcacgccgaauau

SEQ ID NO: 2162640 - RNA, 19 nt, Homo sapiens
  misc_RNA (1)...(19): siRNA sense strand
aagccagaaugguugauag

SEQ ID NO: 2162641 - RNA, 19 nt, Homo sapiens
  misc_RNA (1)...(19): siRNA sense strand
aagcgagagugguucaaag

SEQ ID NO: 2162642 - RNA, 19 nt, Homo sapiens
  misc_RNA (1)...(19): siRNA sense strand
ggagugagaggagaaacgu

SEQ ID NO: 2162643 - RNA, 19 nt, Homo sapiens
  misc_RNA (1)...(19): siRNA sense strand
aagauucgguuagcauugg

SEQ ID NO: 2162644 - RNA, 19 nt, Homo sapiens
  misc_RNA (1)...(19): siRNA sense strand
acagaacguacguguaugu

SEQ ID NO: 2162645 - RNA, 19 nt, Homo sapiens
  misc_RNA (1)...(19): siRNA sense strand
acaacugccuguggguuuc

SEQ ID NO: 2162646 - RNA, 19 nt, Homo sapiens
  misc_RNA (1)...(19): siRNA sense strand
caagaaguaugcugaauug

SEQ ID NO: 2162647 - RNA, 19 nt, Homo sapiens
  misc_RNA (1)...(19): siRNA sense strand
gaauaugagugcuuuguga

SEQ ID NO: 2162648 - RNA, 19 nt, Homo sapiens
  misc_RNA (1)...(19): siRNA sense strand
ggacaugauugaagagaaa

SEQ ID NO: 2162649 - RNA, 19 nt, Homo sapiens
  misc_RNA (1)...(19): siRNA sense strand
gaaggaagauggccaggau

SEQ ID NO: 2162650 - RNA, 19 nt, Homo sapiens
  misc_RNA (1)...(19): siRNA sense strand
caacaagacucugaaggaa

SEQ ID NO: 2162651 - RNA, 19 nt, Homo sapiens
  misc_RNA (1)...(19): siRNA sense strand
caacguggcugacaccaau

SEQ ID NO: 2162652 - RNA, 19 nt, Homo sapiens
  misc_RNA (1)...(19): siRNA sense strand
ugaagaggcuggaagagaa

SEQ ID NO: 2162653 - RNA, 19 nt, Homo sapiens
  misc_RNA (1)...(19): siRNA sense strand
aaucagagacgcagaaaua

SEQ ID NO: 2162654 - RNA, 19 nt, Homo sapiens
  misc_RNA (1)...(19): siRNA sense strand
gaacacagagcuugcagaa

SEQ ID NO: 2162655 - RNA, 19 nt, Homo sapiens
  misc_RNA (1)...(19): siRNA sense strand
caaagaagccaaccugcua

SEQ ID NO: 2162656 - RNA, 19 nt, Homo sapiens
  misc_RNA (1)...(19): siRNA sense strand
ggacacagccacauggaaa

SEQ ID NO: 2162657 - RNA, 19 nt, Homo sapiens
  misc_RNA (1)...(19): siRNA sense strand
ggccacagccuucaugaua

SEQ ID NO: 2162658 - RNA, 19 nt, Homo sapiens
  misc_RNA (1)...(19): siRNA sense strand
cagaggagguuaauagugu

SEQ ID NO: 2162659 - RNA, 19 nt, Homo sapiens
  misc_RNA (1)...(19): siRNA sense strand
gaagacaucauuaacacuu

SEQ ID NO: 2162660 - RNA, 19 nt, Homo sapiens
  misc_RNA (1)...(19): siRNA sense strand
gaaccucugccgugcuuua

SEQ ID NO: 2162661 - RNA, 19 nt, Homo sapiens
  misc_RNA (1)...(19): siRNA sense strand
acugagagcuaaagaauau

SEQ ID NO: 2162662 - RNA, 19 nt, Homo sapiens
  misc_RNA (1)...(19): siRNA sense strand
gcacugagagcuaaagaau

SEQ ID NO: 2162663 - RNA, 19 nt, Homo sapiens
  misc_RNA (1)...(19): siRNA sense strand
acacagagcuugcagaaaa

SEQ ID NO: 2162664 - RNA, 19 nt, Homo sapiens
  misc_RNA (1)...(19): siRNA sense strand
gagaaacgaacuccacaaa

SEQ ID NO: 2162665 - RNA, 19 nt, Homo sapiens
  misc_RNA (1)...(19): siRNA sense strand
ucaaagagcccgucagcaa

SEQ ID NO: 2162666 - RNA, 19 nt, Homo sapiens
  misc_RNA (1)...(19): siRNA sense strand
agaaagcacugagagcuaa

SEQ ID NO: 2162667 - RNA, 19 nt, Homo sapiens
  misc_RNA (1)...(19): siRNA sense strand
acaagacucugaaggaaga

SEQ ID NO: 2162668 - RNA, 19 nt, Homo sapiens
  misc_RNA (1)...(19): siRNA sense strand
gccacagccuucaugauaa

SEQ ID NO: 2162669 - RNA, 19 nt, Homo sapiens
  misc_RNA (1)...(19): siRNA sense strand
gcacaacuccgaugaagag

SEQ ID NO: 2162670 - RNA, 19 nt, Homo sapiens
  misc_RNA (1)...(19): siRNA sense strand
caggaagguuugaagaauu

SEQ ID NO: 2162671 - RNA, 19 nt, Homo sapiens
  misc_RNA (1)...(19): siRNA sense strand
agaaacagguacaaauuca

SEQ ID NO: 2162672 - RNA, 19 nt, Homo sapiens
  misc_RNA (1)...(19): siRNA sense strand
gagaaccucugccgugcuu

SEQ ID NO: 2162673 - RNA, 19 nt, Homo sapiens
  misc_RNA (1)...(19): siRNA sense strand
gagaggagcaucuggacaa

SEQ ID NO: 2162674 - RNA, 19 nt, Homo sapiens
  misc_RNA (1)...(19): siRNA sense strand
gagaaagcacugagagcua

SEQ ID NO: 2162675 - RNA, 19 nt, Homo sapiens
  misc_RNA (1)...(19): siRNA sense strand
ggaaagcccgauuugagaa

SEQ ID NO: 2162676 - RNA, 19 nt, Homo sapiens
  misc_RNA (1)...(19): siRNA sense strand
gaagcaaauuggagagucu

SEQ ID NO: 2162677 - RNA, 19 nt, Homo sapiens
  misc_RNA (1)...(19): siRNA sense strand
ccacagccuucaugauaau

SEQ ID NO: 2162678 - RNA, 19 nt, Homo sapiens
  misc_RNA (1)...(19): siRNA sense strand
ugaagaagcuggaaaagga

SEQ ID NO: 2162679 - RNA, 19 nt, Homo sapiens
  misc_RNA (1)...(19): siRNA sense strand
gaaauaugaagcucuguca

SEQ ID NO: 2162680 - RNA, 19 nt, Homo sapiens
  misc_RNA (1)...(19): siRNA sense strand
aaagagcccgucagcaaua

SEQ ID NO: 2162681 - RNA, 19 nt, Homo sapiens
  misc_RNA (1)...(19): siRNA sense strand
acaauggccuggagaagga

SEQ ID NO: 2162682 - RNA, 19 nt, Homo sapiens
  misc_RNA (1)...(19): siRNA sense strand
gaaguuaaagcuccuccaa

SEQ ID NO: 2162683 - RNA, 19 nt, Homo sapiens
  misc_RNA (1)...(19): siRNA sense strand
gaagauggaggcagaugug

SEQ ID NO: 2162684 - RNA, 19 nt, Homo sapiens
  misc_RNA (1)...(19): siRNA sense strand
uauccucgcucgaagcaaa

SEQ ID NO: 2162685 - RNA, 19 nt, Homo sapiens
  misc_RNA (1)...(19): siRNA sense strand
gcagcagaguggaaacuuc

SEQ ID NO: 2162686 - RNA, 19 nt, Homo sapiens
  misc_RNA (1)...(19): siRNA sense strand
cccaagaaaugaugaagga

SEQ ID NO: 2162687 - RNA, 19 nt, Homo sapiens
  misc_RNA (1)...(19): siRNA sense strand
cagcagagugagcgaaaua

SEQ ID NO: 2162688 - RNA, 19 nt, Homo sapiens
  misc_RNA (1)...(19): siRNA sense strand
gaacaucguacugagcaaa

SEQ ID NO: 2162689 - RNA, 19 nt, Homo sapiens
  misc_RNA (1)...(19): siRNA sense strand
gagcaggcccaagaaauga

SEQ ID NO: 2162690 - RNA, 19 nt, Homo sapiens
  misc_RNA (1)...(19): siRNA sense strand
acaaagcucuguuggacau

SEQ ID NO: 2162691 - RNA, 19 nt, Homo sapiens
  misc_RNA (1)...(19): siRNA sense strand
ggacaaaacaacuaagaaa

SEQ ID NO: 2162692 - RNA, 19 nt, Homo sapiens
  misc_RNA (1)...(19): siRNA sense strand
ucaggaagguuugaagaau

SEQ ID NO: 2162693 - RNA, 19 nt, Homo sapiens
  misc_RNA (1)...(19): siRNA sense strand
uaugagugcuuugugauga

SEQ ID NO: 2162694 - RNA, 19 nt, Homo sapiens
  misc_RNA (1)...(19): siRNA sense strand
aaagaaacccaacccgaaa

SEQ ID NO: 2162695 - RNA, 19 nt, Homo sapiens
  misc_RNA (1)...(19): siRNA sense strand
ucaagaaguaugcugaauu

SEQ ID NO: 2162696 - RNA, 19 nt, Homo sapiens
  misc_RNA (1)...(19): siRNA sense strand
ccagugagcagccugagaa

SEQ ID NO: 2162697 - RNA, 19 nt, Homo sapiens
  misc_RNA (1)...(19): siRNA sense strand
ggugacaguucaucauuac

SEQ ID NO: 2162698 - RNA, 19 nt, Homo sapiens
  misc_RNA (1)...(19): siRNA sense strand
cagagugagcgaaauauga

SEQ ID NO: 2162699 - RNA, 19 nt, Homo sapiens
  misc_RNA (1)...(19): siRNA sense strand
gcagaggagguuaauagug

SEQ ID NO: 2162700 - RNA, 19 nt, Homo sapiens
  misc_RNA (1)...(19): siRNA sense strand
aaacgucucuguggaucaa

SEQ ID NO: 2162701 - RNA, 19 nt, Homo sapiens
  misc_RNA (1)...(19): siRNA sense strand
gcugguggaugcaaagcuu

SEQ ID NO: 2162702 - RNA, 19 nt, Homo sapiens
  misc_RNA (1)...(19): siRNA sense strand
caaagagcccgucagcaau

SEQ ID NO: 2162703 - RNA, 19 nt, Homo sapiens
  misc_RNA (1)...(19): siRNA sense strand
cagaaaagcugaaaagcau

SEQ ID NO: 2162704 - RNA, 19 nt, Homo sapiens
  misc_RNA (1)...(19): siRNA sense strand
gaacacagcagagcuaucc

SEQ ID NO: 2162705 - RNA, 19 nt, Homo sapiens
  misc_RNA (1)...(19): siRNA sense strand
gaaacagguacaaauucaa

SEQ ID NO: 2162706 - RNA, 19 nt, Homo sapiens
  misc_RNA (1)...(19): siRNA sense strand
ggagagccacccacuguca

SEQ ID NO: 2162707 - RNA, 19 nt, Homo sapiens
  misc_RNA (1)...(19): siRNA sense strand
ccagagcacacuaacuaaa

SEQ ID NO: 2162708 - RNA, 19 nt, Homo sapiens
  misc_RNA (1)...(19): siRNA sense strand
gagcgacacaaacgagaaa

SEQ ID NO: 2162709 - RNA, 19 nt, Homo sapiens
  misc_RNA (1)...(19): siRNA sense strand
gaaauggacaaaacaacua

SEQ ID NO: 2162710 - RNA, 19 nt, Homo sapiens
  misc_RNA (1)...(19): siRNA sense strand
ucagcucacucucuacuca

SEQ ID NO: 2162711 - RNA, 19 nt, Homo sapiens
  misc_RNA (1)...(19): siRNA sense strand
cagaaucaccugacaacga

SEQ ID NO: 2162712 - RNA, 19 nt, Homo sapiens
  misc_RNA (1)...(19): siRNA sense strand
ccgcaccaguccaaagaaa

SEQ ID NO: 2162713 - RNA, 19 nt, Homo sapiens
  misc_RNA (1)...(19): siRNA sense strand
gaauuccagagcacacuaa

SEQ ID NO: 2162714 - RNA, 19 nt, Homo sapiens
  misc_RNA (1)...(19): siRNA sense strand
gcagagugagcgaaauaug

SEQ ID NO: 2162715 - RNA, 19 nt, Homo sapiens
  misc_RNA (1)...(19): siRNA sense strand
gaagccaaccugcuaaugc

SEQ ID NO: 2162716 - RNA, 19 nt, Homo sapiens
  misc_RNA (1)...(19): siRNA sense strand
aggcucagcucacucucua

SEQ ID NO: 2162717 - RNA, 19 nt, Homo sapiens
  misc_RNA (1)...(19): siRNA sense strand
agaaacccaacccgaaaua

SEQ ID NO: 2162718 - RNA, 19 nt, Homo sapiens
  misc_RNA (1)...(19): siRNA sense strand
cugaauugcuggaugaaca

SEQ ID NO: 2162719 - RNA, 19 nt, Homo sapiens
  misc_RNA (1)...(19): siRNA sense strand
ggagguuaauaguguccaa

SEQ ID NO: 2162720 - RNA, 19 nt, Homo sapiens
  misc_RNA (1)...(19): siRNA sense strand
cagcacaacuccgaugaag

SEQ ID NO: 2162721 - RNA, 19 nt, Homo sapiens
  misc_RNA (1)...(19): siRNA sense strand
ugaaaaggaugaccaaagu

SEQ ID NO: 2162722 - RNA, 19 nt, Homo sapiens
  misc_RNA (1)...(19): siRNA sense strand
aaagcaucaucgaucagua

SEQ ID NO: 2162723 - RNA, 19 nt, Homo sapiens
  misc_RNA (1)...(19): siRNA sense strand
acaagccauuuccagagua

SEQ ID NO: 2162724 - RNA, 19 nt, Homo sapiens
  misc_RNA (1)...(19): siRNA sense strand
gaagagaaaaggaaggaaa

SEQ ID NO: 2162725 - RNA, 19 nt, Homo sapiens
  misc_RNA (1)...(19): siRNA sense strand
aaaagaaaaggaccaguua

SEQ ID NO: 2162726 - RNA, 19 nt, Homo sapiens
  misc_RNA (1)...(19): siRNA sense strand
aggugacaguucaucauua

SEQ ID NO: 2162727 - RNA, 19 nt, Homo sapiens
  misc_RNA (1)...(19): siRNA sense strand
acaacaagacucugaagga

SEQ ID NO: 2162728 - RNA, 19 nt, Homo sapiens
  misc_RNA (1)...(19): siRNA sense strand
ggugaacacagcagagcua

SEQ ID NO: 2162729 - RNA, 19 nt, Homo sapiens
  misc_RNA (1)...(19): siRNA sense strand
ggacauccagggccagauc

SEQ ID NO: 2162730 - RNA, 19 nt, Homo sapiens
  misc_RNA (1)...(19): siRNA sense strand
gaaagcacugagagcuaaa

SEQ ID NO: 2162731 - RNA, 19 nt, Homo sapiens
  misc_RNA (1)...(19): siRNA sense strand
cagcuggaagacaucauua

SEQ ID NO: 2162732 - RNA, 19 nt, Homo sapiens
  misc_RNA (1)...(19): siRNA sense strand
aggaagguuugaagaauuc

SEQ ID NO: 2162733 - RNA, 19 nt, Homo sapiens
  misc_RNA (1)...(19): siRNA sense strand
aaagaagccaaccugcuaa

SEQ ID NO: 2162734 - RNA, 19 nt, Homo sapiens
  misc_RNA (1)...(19): siRNA sense strand
cagagacgcagaaauaucu

SEQ ID NO: 2162735 - RNA, 19 nt, Homo sapiens
  misc_RNA (1)...(19): siRNA sense strand
ccucugccgugcuuuacaa

SEQ ID NO: 2162736 - RNA, 19 nt, Homo sapiens
  misc_RNA (1)...(19): siRNA sense strand
ggaggcuaaucacucugaa

SEQ ID NO: 2162737 - RNA, 19 nt, Homo sapiens
  misc_RNA (1)...(19): siRNA sense strand
ugagcaggcccaagaaaug

SEQ ID NO: 2162738 - RNA, 19 nt, Homo sapiens
  misc_RNA (1)...(19): siRNA sense strand
agacacaacaagacucuga

SEQ ID NO: 2162739 - RNA, 19 nt, Homo sapiens
  misc_RNA (1)...(19): siRNA sense strand
ugcaaaaucugaacaaguu

SEQ ID NO: 2162740 - RNA, 19 nt, Homo sapiens
  misc_RNA (1)...(19): siRNA sense strand
guacugagcaaaagaaguu

SEQ ID NO: 2162741 - RNA, 19 nt, Homo sapiens
  misc_RNA (1)...(19): siRNA sense strand
ucuggaaggcgucgacuaa

SEQ ID NO: 2162742 - RNA, 19 nt, Homo sapiens
  misc_RNA (1)...(19): siRNA sense strand
ugagagcuaaagaauauga

SEQ ID NO: 2162743 - RNA, 19 nt, Homo sapiens
  misc_RNA (1)...(19): siRNA sense strand
agagugagcgaaauaugaa

SEQ ID NO: 2162744 - RNA, 19 nt, Homo sapiens
  misc_RNA (1)...(19): siRNA sense strand
cacaagccauuuccagagu

SEQ ID NO: 2162745 - RNA, 19 nt, Homo sapiens
  misc_RNA (1)...(19): siRNA sense strand
augaagagccagagucaaa

SEQ ID NO: 2162746 - RNA, 19 nt, Homo sapiens
  misc_RNA (1)...(19): siRNA sense strand
gcacguggcugauuuauga

SEQ ID NO: 2162747 - RNA, 19 nt, Homo sapiens
  misc_RNA (1)...(19): siRNA sense strand
uaaggaaacugcuauagaa

SEQ ID NO: 2162748 - RNA, 19 nt, Homo sapiens
  misc_RNA (1)...(19): siRNA sense strand
gaagaaugaugauauggaa

SEQ ID NO: 2162749 - RNA, 19 nt, Homo sapiens
  misc_RNA (1)...(19): siRNA sense strand
ggagggaggugaaacagaa

SEQ ID NO: 2162750 - RNA, 19 nt, Homo sapiens
  misc_RNA (1)...(19): siRNA sense strand
ccaaauagguucucuacga

SEQ ID NO: 2162751 - RNA, 19 nt, Homo sapiens
  misc_RNA (1)...(19): siRNA sense strand
gaaagguagugauauauag

SEQ ID NO: 2162752 - RNA, 19 nt, Homo sapiens
  misc_RNA (1)...(19): siRNA sense strand
gcauuuggguugcauauga

SEQ ID NO: 2162753 - RNA, 19 nt, Homo sapiens
  misc_RNA (1)...(19): siRNA sense strand
caagaaggauguaucaaau

SEQ ID NO: 2162754 - RNA, 19 nt, Homo sapiens
  misc_RNA (1)...(19): siRNA sense strand
ggaaagguagugauauaua

SEQ ID NO: 2162755 - RNA, 19 nt, Homo sapiens
  misc_RNA (1)...(19): siRNA sense strand
gaagaaacaacaagucaaa

SEQ ID NO: 2162756 - RNA, 19 nt, Homo sapiens
  misc_RNA (1)...(19): siRNA sense strand
ggaaggagaagaaacagua

SEQ ID NO: 2162757 - RNA, 19 nt, Homo sapiens
  misc_RNA (1)...(19): siRNA sense strand
gcagcuggguuguauauga

SEQ ID NO: 2162758 - RNA, 19 nt, Homo sapiens
  misc_RNA (1)...(19): siRNA sense strand
gagccucucuccagugaua

SEQ ID NO: 2162759 - RNA, 19 nt, Homo sapiens
  misc_RNA (1)...(19): siRNA sense strand
cagcagagcucgcggcaaa

SEQ ID NO: 2162760 - RNA, 19 nt, Homo sapiens
  misc_RNA (1)...(19): siRNA sense strand
ggaaaucaaugacaaagag

SEQ ID NO: 2162761 - RNA, 19 nt, Homo sapiens
  misc_RNA (1)...(19): siRNA sense strand
aaacaaagcaacaggguua

SEQ ID NO: 2162762 - RNA, 19 nt, Homo sapiens
  misc_RNA (1)...(19): siRNA sense strand
caaagguaguuguuuauga

SEQ ID NO: 2162763 - RNA, 19 nt, Homo sapiens
  misc_RNA (1)...(19): siRNA sense strand
gacaugugguucaggauua

SEQ ID NO: 2162764 - RNA, 19 nt, Homo sapiens
  misc_RNA (1)...(19): siRNA sense strand
uaaagcagauguacaaaca

SEQ ID NO: 2162765 - RNA, 19 nt, Homo sapiens
  misc_RNA (1)...(19): siRNA sense strand
gaaacaacaagucaaauug

SEQ ID NO: 2162766 - RNA, 19 nt, Homo sapiens
  misc_RNA (1)...(19): siRNA sense strand
caaccuauauguuuggauu

SEQ ID NO: 2162767 - RNA, 19 nt, Homo sapiens
  misc_RNA (1)...(19): siRNA sense strand
ggaaaaggcuaaucauauu

SEQ ID NO: 2162768 - RNA, 19 nt, Homo sapiens
  misc_RNA (1)...(19): siRNA sense strand
caaagaagaucuggauuca

SEQ ID NO: 2162769 - RNA, 19 nt, Homo sapiens
  misc_RNA (1)...(19): siRNA sense strand
gaacagggacgucacaaau

SEQ ID NO: 2162770 - RNA, 19 nt, Homo sapiens
  misc_RNA (1)...(19): siRNA sense strand
gaacauuucugcugguagu

SEQ ID NO: 2162771 - RNA, 19 nt, Homo sapiens
  misc_RNA (1)...(19): siRNA sense strand
gaagcgaauuuauuucaga

SEQ ID NO: 2162772 - RNA, 19 nt, Homo sapiens
  misc_RNA (1)...(19): siRNA sense strand
ccaaacauguggaacuaaa

SEQ ID NO: 2162773 - RNA, 19 nt, Homo sapiens
  misc_RNA (1)...(19): siRNA sense strand
gcaacaggguuauucaugu

SEQ ID NO: 2162774 - RNA, 19 nt, Homo sapiens
  misc_RNA (1)...(19): siRNA sense strand
gaagacuuguuccaugaaa

SEQ ID NO: 2162775 - RNA, 19 nt, Homo sapiens
  misc_RNA (1)...(19): siRNA sense strand
gcagggauuugguguaaug

SEQ ID NO: 2162776 - RNA, 19 nt, Homo sapiens
  misc_RNA (1)...(19): siRNA sense strand
guuagaggauguuggauuu

SEQ ID NO: 2162777 - RNA, 19 nt, Homo sapiens
  misc_RNA (1)...(19): siRNA sense strand
gaacaaagaacagucaaau

SEQ ID NO: 2162778 - RNA, 19 nt, Homo sapiens
  misc_RNA (1)...(19): siRNA sense strand
gaaggaaagucagccagaa

SEQ ID NO: 2162779 - RNA, 19 nt, Homo sapiens
  misc_RNA (1)...(19): siRNA sense strand
gggaagccaugguccuaua

SEQ ID NO: 2162780 - RNA, 19 nt, Homo sapiens
  misc_RNA (1)...(19): siRNA sense strand
gcaaagagaaguuuacaca

SEQ ID NO: 2162781 - RNA, 19 nt, Homo sapiens
  misc_RNA (1)...(19): siRNA sense strand
gggcaaagcugaauuuagc

SEQ ID NO: 2162782 - RNA, 19 nt, Homo sapiens
  misc_RNA (1)...(19): siRNA sense strand
gaaguccgauggcaggauu

SEQ ID NO: 2162783 - RNA, 19 nt, Homo sapiens
  misc_RNA (1)...(19): siRNA sense strand
gcaaugggugugcuaauaa

SEQ ID NO: 2162784 - RNA, 19 nt, Homo sapiens
  misc_RNA (1)...(19): siRNA sense strand
guacaucacacuccaguuu

SEQ ID NO: 2162785 - RNA, 19 nt, Homo sapiens
  misc_RNA (1)...(19): siRNA sense strand
uaaccaagaugauaaagca

SEQ ID NO: 2162786 - RNA, 19 nt, Homo sapiens
  misc_RNA (1)...(19): siRNA sense strand
cagaagacuuguuccauga

SEQ ID NO: 2162787 - RNA, 19 nt, Homo sapiens
  misc_RNA (1)...(19): siRNA sense strand
ggaggcagcuggguuguau

SEQ ID NO: 2162788 - RNA, 19 nt, Homo sapiens
  misc_RNA (1)...(19): siRNA sense strand
gaaaauggguggccguaaa

SEQ ID NO: 2162789 - RNA, 19 nt, Homo sapiens
  misc_RNA (1)...(19): siRNA sense strand
gcaaguugaagccaaauuu

SEQ ID NO: 2162790 - RNA, 19 nt, Homo sapiens
  misc_RNA (1)...(19): siRNA sense strand
gcaaaagccuuguacuuga

SEQ ID NO: 2162791 - RNA, 19 nt, Homo sapiens
  misc_RNA (1)...(19): siRNA sense strand
gaguauggguagccuauga

SEQ ID NO: 2162792 - RNA, 19 nt, Homo sapiens
  misc_RNA (1)...(19): siRNA sense strand
ggaagaagaaggaaaguca

SEQ ID NO: 2162793 - RNA, 19 nt, Homo sapiens
  misc_RNA (1)...(19): siRNA sense strand
cugcuaaggugcuaacuuu

SEQ ID NO: 2162794 - RNA, 19 nt, Homo sapiens
  misc_RNA (1)...(19): siRNA sense strand
gacgaucauuugccguuua

SEQ ID NO: 2162795 - RNA, 19 nt, Homo sapiens
  misc_RNA (1)...(19): siRNA sense strand
gaaacaggaauguguaguu

SEQ ID NO: 2162796 - RNA, 19 nt, Homo sapiens
  misc_RNA (1)...(19): siRNA sense strand
gaagaagcguacauuggau

SEQ ID NO: 2162797 - RNA, 19 nt, Homo sapiens
  misc_RNA (1)...(19): siRNA sense strand
ucacgaagaccauuuagaa

SEQ ID NO: 2162798 - RNA, 19 nt, Homo sapiens
  misc_RNA (1)...(19): siRNA sense strand
ucagugacauucaggauug

SEQ ID NO: 2162799 - RNA, 19 nt, Homo sapiens
  misc_RNA (1)...(19): siRNA sense strand
caaguugaagccaaauuua

SEQ ID NO: 2162800 - RNA, 19 nt, Homo sapiens
  misc_RNA (1)...(19): siRNA sense strand
gacacagucuauuaaugua

SEQ ID NO: 2162801 - RNA, 19 nt, Homo sapiens
  misc_RNA (1)...(19): siRNA sense strand
uuacagaguuagucacauu

SEQ ID NO: 2162802 - RNA, 19 nt, Homo sapiens
  misc_RNA (1)...(19): siRNA sense strand
guucaggauuacagaguua

SEQ ID NO: 2162803 - RNA, 19 nt, Homo sapiens
  misc_RNA (1)...(19): siRNA sense strand
gaaauggagcaaccugaaa

SEQ ID NO: 2162804 - RNA, 19 nt, Homo sapiens
  misc_RNA (1)...(19): siRNA sense strand
aaagagaaguuuacacaag

SEQ ID NO: 2162805 - RNA, 19 nt, Homo sapiens
  misc_RNA (1)...(19): siRNA sense strand
gucaaccaauggaaacuua

SEQ ID NO: 2162806 - RNA, 19 nt, Homo sapiens
  misc_RNA (1)...(19): siRNA sense strand
auggagagcuucagucuuu

SEQ ID NO: 2162807 - RNA, 19 nt, Homo sapiens
  misc_RNA (1)...(19): siRNA sense strand
gagcacaaccuccagaaga

SEQ ID NO: 2162808 - RNA, 19 nt, Homo sapiens
  misc_RNA (1)...(19): siRNA sense strand
gcuauagaaaccaaaguua

SEQ ID NO: 2162809 - RNA, 19 nt, Homo sapiens
  misc_RNA (1)...(19): siRNA sense strand
ccucaacacugucagcaaa

SEQ ID NO: 2162810 - RNA, 19 nt, Homo sapiens
  misc_RNA (1)...(19): siRNA sense strand
cuggaaagguagugauaua

SEQ ID NO: 2162811 - RNA, 19 nt, Homo sapiens
  misc_RNA (1)...(19): siRNA sense strand
gcccaaacauguggaacua

SEQ ID NO: 2162812 - RNA, 19 nt, Homo sapiens
  misc_RNA (1)...(19): siRNA sense strand
ccaaggagacgaaaucaga

SEQ ID NO: 2162813 - RNA, 19 nt, Homo sapiens
  misc_RNA (1)...(19): siRNA sense strand
gaaaauguguggaacuaga

SEQ ID NO: 2162814 - RNA, 19 nt, Homo sapiens
  misc_RNA (1)...(19): siRNA sense strand
gaggaaguguccaaaauaa

SEQ ID NO: 2162815 - RNA, 19 nt, Homo sapiens
  misc_RNA (1)...(19): siRNA sense strand
ggaauacuccugccucuag

SEQ ID NO: 2162816 - RNA, 19 nt, Homo sapiens
  misc_RNA (1)...(19): siRNA sense strand
ggagagccuuucccagaug

SEQ ID NO: 2162817 - RNA, 19 nt, Homo sapiens
  misc_RNA (1)...(19): siRNA sense strand
ucaagaaggauguaucaaa

SEQ ID NO: 2162818 - RNA, 19 nt, Homo sapiens
  misc_RNA (1)...(19): siRNA sense strand
gauauggagugaagacaca

SEQ ID NO: 2162819 - RNA, 19 nt, Homo sapiens
  misc_RNA (1)...(19): siRNA sense strand
ccagaaacagguacuauga

SEQ ID NO: 2162820 - RNA, 19 nt, Homo sapiens
  misc_RNA (1)...(19): siRNA sense strand
gaagagauucugccagcaa

SEQ ID NO: 2162821 - RNA, 19 nt, Homo sapiens
  misc_RNA (1)...(19): siRNA sense strand
guucagaagcgaauuuauu

SEQ ID NO: 2162822 - RNA, 19 nt, Homo sapiens
  misc_RNA (1)...(19): siRNA sense strand
gauguuggauuuuguauga

SEQ ID NO: 2162823 - RNA, 19 nt, Homo sapiens
  misc_RNA (1)...(19): siRNA sense strand
gaucagacuguuacaaaug

SEQ ID NO: 2162824 - RNA, 19 nt, Homo sapiens
  misc_RNA (1)...(19): siRNA sense strand
gugcagcagugccaugaaa

SEQ ID NO: 2162825 - RNA, 19 nt, Homo sapiens
  misc_RNA (1)...(19): siRNA sense strand
gagaagugcauugaaguuu

SEQ ID NO: 2162826 - RNA, 19 nt, Homo sapiens
  misc_RNA (1)...(19): siRNA sense strand
uaagagaucgagacuagaa

SEQ ID NO: 2162827 - RNA, 19 nt, Homo sapiens
  misc_RNA (1)...(19): siRNA sense strand
ggagcaaccugaaaagaaa

SEQ ID NO: 2162828 - RNA, 19 nt, Homo sapiens
  misc_RNA (1)...(19): siRNA sense strand
ggagggcaaagcugaauuu

SEQ ID NO: 2162829 - RNA, 19 nt, Homo sapiens
  misc_RNA (1)...(19): siRNA sense strand
agaauggugugcugguuaa

SEQ ID NO: 2162830 - RNA, 19 nt, Homo sapiens
  misc_RNA (1)...(19): siRNA sense strand
gaagccaugguccuauaua

SEQ ID NO: 2162831 - RNA, 19 nt, Homo sapiens
  misc_RNA (1)...(19): siRNA sense strand
gggauucaacacacaaaua

SEQ ID NO: 2162832 - RNA, 19 nt, Homo sapiens
  misc_RNA (1)...(19): siRNA sense strand
gagaauacagggacuggaa

SEQ ID NO: 2162833 - RNA, 19 nt, Homo sapiens
  misc_RNA (1)...(19): siRNA sense strand
ugucaaaacugaagaauga

SEQ ID NO: 2162834 - RNA, 19 nt, Homo sapiens
  misc_RNA (1)...(19): siRNA sense strand
caacuugucacaguaauga

SEQ ID NO: 2162835 - RNA, 19 nt, Homo sapiens
  misc_RNA (1)...(19): siRNA sense strand
gcaggaaggagaagaaaca

SEQ ID NO: 2162836 - RNA, 19 nt, Homo sapiens
  misc_RNA (1)...(19): siRNA sense strand
gguuguauaugauggagaa

SEQ ID NO: 2162837 - RNA, 19 nt, Homo sapiens
  misc_RNA (1)...(19): siRNA sense strand
uucaaaugcucacaugaua

SEQ ID NO: 2162838 - RNA, 19 nt, Homo sapiens
  misc_RNA (1)...(19): siRNA sense strand
aauuucaacucgucaagua

SEQ ID NO: 2162839 - RNA, 19 nt, Homo sapiens
  misc_RNA (1)...(19): siRNA sense strand
ugcagaaccuugacacaaa

SEQ ID NO: 2162840 - RNA, 19 nt, Homo sapiens
  misc_RNA (1)...(19): siRNA sense strand
gaaagucagccagaaaugu

SEQ ID NO: 2162841 - RNA, 19 nt, Homo sapiens
  misc_RNA (1)...(19): siRNA sense strand
cauguggaacuaaaucuua

SEQ ID NO: 2162842 - RNA, 19 nt, Homo sapiens
  misc_RNA (1)...(19): siRNA sense strand
aaaggagacuggauaugga

SEQ ID NO: 2162843 - RNA, 19 nt, Homo sapiens
  misc_RNA (1)...(19): siRNA sense strand
caacaggguuauucauguc

SEQ ID NO: 2162844 - RNA, 19 nt, Homo sapiens
  misc_RNA (1)...(19): siRNA sense strand
gcgaauuuauuucagacuu

SEQ ID NO: 2162845 - RNA, 19 nt, Homo sapiens
  misc_RNA (1)...(19): siRNA sense strand
cugcagaaguaccuaauug

SEQ ID NO: 2162846 - RNA, 19 nt, Homo sapiens
  misc_RNA (1)...(19): siRNA sense strand
gaaacacgaccucucuuga

SEQ ID NO: 2162847 - RNA, 19 nt, Homo sapiens
  misc_RNA (1)...(19): siRNA sense strand
cgaccucucuugaaggaaa

SEQ ID NO: 2162848 - RNA, 19 nt, Homo sapiens
  misc_RNA (1)...(19): siRNA sense strand
ggcccuaucuggagaggaa

SEQ ID NO: 2162849 - RNA, 19 nt, Homo sapiens
  misc_RNA (1)...(19): siRNA sense strand
gggcuaugguggugagaug

SEQ ID NO: 2162850 - RNA, 19 nt, Homo sapiens
  misc_RNA (1)...(19): siRNA sense strand
aaacacgaccucucuugaa

SEQ ID NO: 2162851 - RNA, 19 nt, Homo sapiens
  misc_RNA (1)...(19): siRNA sense strand
gaacagcaucggcuauguc

SEQ ID NO: 2162852 - RNA, 19 nt, Homo sapiens
  misc_RNA (1)...(19): siRNA sense strand
gaucaagucucggguucuc

SEQ ID NO: 2162853 - RNA, 19 nt, Homo sapiens
  misc_RNA (1)...(19): siRNA sense strand
gauggaaucagucaagaca

SEQ ID NO: 2162854 - RNA, 19 nt, Homo sapiens
  misc_RNA (1)...(19): siRNA sense strand
guggugagauggugucagu

SEQ ID NO: 2162855 - RNA, 19 nt, Homo sapiens
  misc_RNA (1)...(19): siRNA sense strand
gaagccuccugugcgauga

SEQ ID NO: 2162856 - RNA, 19 nt, Homo sapiens
  misc_RNA (1)...(19): siRNA sense strand
cugagaaaguccaggagaa

SEQ ID NO: 2162857 - RNA, 19 nt, Homo sapiens
  misc_RNA (1)...(19): siRNA sense strand
ugagaaaguccaggagaaa

SEQ ID NO: 2162858 - RNA, 19 nt, Homo sapiens
  misc_RNA (1)...(19): siRNA sense strand
ccuccucgcuguacugcaa

SEQ ID NO: 2162859 - RNA, 19 nt, Homo sapiens
  misc_RNA (1)...(19): siRNA sense strand
cacgaccucucuugaagga

SEQ ID NO: 2162860 - RNA, 19 nt, Homo sapiens
  misc_RNA (1)...(19): siRNA sense strand
ccugugcgaugaccucuuc

SEQ ID NO: 2162861 - RNA, 19 nt, Homo sapiens
  misc_RNA (1)...(19): siRNA sense strand
agaaaguccaggagaaaga

SEQ ID NO: 2162862 - RNA, 19 nt, Homo sapiens
  misc_RNA (1)...(19): siRNA sense strand
uggaaucagucaagacagu

SEQ ID NO: 2162863 - RNA, 19 nt, Homo sapiens
  misc_RNA (1)...(19): siRNA sense strand
gaggauggaaucagucaag

SEQ ID NO: 2162864 - RNA, 19 nt, Homo sapiens
  misc_RNA (1)...(19): siRNA sense strand
agaaacacgaccucucuug

SEQ ID NO: 2162865 - RNA, 19 nt, Homo sapiens
  misc_RNA (1)...(19): siRNA sense strand
gaggaagggaggauggaau

SEQ ID NO: 2162866 - RNA, 19 nt, Homo sapiens
  misc_RNA (1)...(19): siRNA sense strand
ucaacaagcaggccaaugc

SEQ ID NO: 2162867 - RNA, 19 nt, Homo sapiens
  misc_RNA (1)...(19): siRNA sense strand
gaaaguccaggagaaagag

SEQ ID NO: 2162868 - RNA, 19 nt, Homo sapiens
  misc_RNA (1)...(19): siRNA sense strand
gcagugccucugagaaagu

SEQ ID NO: 2162869 - RNA, 19 nt, Homo sapiens
  misc_RNA (1)...(19): siRNA sense strand
cugcagugccucugagaaa

SEQ ID NO: 2162870 - RNA, 19 nt, Homo sapiens
  misc_RNA (1)...(19): siRNA sense strand
ugaacagcaucggcuaugu

SEQ ID NO: 2162871 - RNA, 19 nt, Homo sapiens
  misc_RNA (1)...(19): siRNA sense strand
gagaaaguccaggagaaag

SEQ ID NO: 2162872 - RNA, 19 nt, Homo sapiens
  misc_RNA (1)...(19): siRNA sense strand
gcacuagccccaugucuuc

SEQ ID NO: 2162873 - RNA, 19 nt, Homo sapiens
  misc_RNA (1)...(19): siRNA sense strand
gaaucagucaagacaguca

SEQ ID NO: 2162874 - RNA, 19 nt, Homo sapiens
  misc_RNA (1)...(19): siRNA sense strand
caccuccgccuccaccuuu

SEQ ID NO: 2162875 - RNA, 19 nt, Homo sapiens
  misc_RNA (1)...(19): siRNA sense strand
agucucggcuuccuuugau

SEQ ID NO: 2162876 - RNA, 19 nt, Homo sapiens
  misc_RNA (1)...(19): siRNA sense strand
aacacgaccucucuugaag

SEQ ID NO: 2162877 - RNA, 19 nt, Homo sapiens
  misc_RNA (1)...(19): siRNA sense strand
aagggaggauggaaucagu

SEQ ID NO: 2162878 - RNA, 19 nt, Homo sapiens
  misc_RNA (1)...(19): siRNA sense strand
gagccugccuguggugaac

SEQ ID NO: 2162879 - RNA, 19 nt, Homo sapiens
  misc_RNA (1)...(19): siRNA sense strand
gggaggauggaaucaguca

SEQ ID NO: 2162880 - RNA, 19 nt, Homo sapiens
  misc_RNA (1)...(19): siRNA sense strand
ggaagggaggauggaauca

SEQ ID NO: 2162881 - RNA, 19 nt, Homo sapiens
  misc_RNA (1)...(19): siRNA sense strand
cagucugccucuacaucaa

SEQ ID NO: 2162882 - RNA, 19 nt, Homo sapiens
  misc_RNA (1)...(19): siRNA sense strand
ggugagauggugucagucu

SEQ ID NO: 2162883 - RNA, 19 nt, Homo sapiens
  misc_RNA (1)...(19): siRNA sense strand
gaagggaggauggaaucag

SEQ ID NO: 2162884 - RNA, 19 nt, Homo sapiens
  misc_RNA (1)...(19): siRNA sense strand
gucagucucggcuuccuuu

SEQ ID NO: 2162885 - RNA, 19 nt, Homo sapiens
  misc_RNA (1)...(19): siRNA sense strand
gaaacacgaccucucuuga

SEQ ID NO: 2162886 - RNA, 19 nt, Homo sapiens
  misc_RNA (1)...(19): siRNA sense strand
cgaccucucuugaaggaaa

SEQ ID NO: 2162887 - RNA, 19 nt, Homo sapiens
  misc_RNA (1)...(19): siRNA sense strand
cagugaagaucccaaagaa

SEQ ID NO: 2162888 - RNA, 19 nt, Homo sapiens
  misc_RNA (1)...(19): siRNA sense strand
gcagugaagaucccaaaga

SEQ ID NO: 2162889 - RNA, 19 nt, Homo sapiens
  misc_RNA (1)...(19): siRNA sense strand
ggcccuaucuggagaggaa

SEQ ID NO: 2162890 - RNA, 19 nt, Homo sapiens
  misc_RNA (1)...(19): siRNA sense strand
gggcuaugguggugagaug

SEQ ID NO: 2162891 - RNA, 19 nt, Homo sapiens
  misc_RNA (1)...(19): siRNA sense strand
aaacacgaccucucuugaa

SEQ ID NO: 2162892 - RNA, 19 nt, Homo sapiens
  misc_RNA (1)...(19): siRNA sense strand
gaucaagucucggguucuc

SEQ ID NO: 2162893 - RNA, 19 nt, Homo sapiens
  misc_RNA (1)...(19): siRNA sense strand
gaacagcaucggcuauguc

SEQ ID NO: 2162894 - RNA, 19 nt, Homo sapiens
  misc_RNA (1)...(19): siRNA sense strand
gauggaaucagucaagaca

SEQ ID NO: 2162895 - RNA, 19 nt, Homo sapiens
  misc_RNA (1)...(19): siRNA sense strand
ugcuucagcuggcucuuua

SEQ ID NO: 2162896 - RNA, 19 nt, Homo sapiens
  misc_RNA (1)...(19): siRNA sense strand
guggugagauggugucagu

SEQ ID NO: 2162897 - RNA, 19 nt, Homo sapiens
  misc_RNA (1)...(19): siRNA sense strand
gaagccuccugugcgauga

SEQ ID NO: 2162898 - RNA, 19 nt, Homo sapiens
  misc_RNA (1)...(19): siRNA sense strand
cugagaaaguccaggagaa

SEQ ID NO: 2162899 - RNA, 19 nt, Homo sapiens
  misc_RNA (1)...(19): siRNA sense strand
ugagaaaguccaggagaaa

SEQ ID NO: 2162900 - RNA, 19 nt, Homo sapiens
  misc_RNA (1)...(19): siRNA sense strand
uaaccuuuauucugcuuca

SEQ ID NO: 2162901 - RNA, 19 nt, Homo sapiens
  misc_RNA (1)...(19): siRNA sense strand
ccuccucgcuguacugcaa

SEQ ID NO: 2162902 - RNA, 19 nt, Homo sapiens
  misc_RNA (1)...(19): siRNA sense strand
gugaagaucccaaagaaaa

SEQ ID NO: 2162903 - RNA, 19 nt, Homo sapiens
  misc_RNA (1)...(19): siRNA sense strand
cacgaccucucuugaagga

SEQ ID NO: 2162904 - RNA, 19 nt, Homo sapiens
  misc_RNA (1)...(19): siRNA sense strand
ccugugcgaugaccucuuc

SEQ ID NO: 2162905 - RNA, 19 nt, Homo sapiens
  misc_RNA (1)...(19): siRNA sense strand
agaaaguccaggagaaaga

SEQ ID NO: 2162906 - RNA, 19 nt, Homo sapiens
  misc_RNA (1)...(19): siRNA sense strand
uggaaucagucaagacagu

SEQ ID NO: 2162907 - RNA, 19 nt, Homo sapiens
  misc_RNA (1)...(19): siRNA sense strand
gaggauggaaucagucaag

SEQ ID NO: 2162908 - RNA, 19 nt, Homo sapiens
  misc_RNA (1)...(19): siRNA sense strand
agaaacacgaccucucuug

SEQ ID NO: 2162909 - RNA, 19 nt, Homo sapiens
  misc_RNA (1)...(19): siRNA sense strand
gaggaagggaggauggaau

SEQ ID NO: 2162910 - RNA, 19 nt, Homo sapiens
  misc_RNA (1)...(19): siRNA sense strand
ucaacaagcaggccaaugc

SEQ ID NO: 2162911 - RNA, 19 nt, Homo sapiens
  misc_RNA (1)...(19): siRNA sense strand
gaaaguccaggagaaagag

SEQ ID NO: 2162912 - RNA, 19 nt, Homo sapiens
  misc_RNA (1)...(19): siRNA sense strand
gcagugccucugagaaagu

SEQ ID NO: 2162913 - RNA, 19 nt, Homo sapiens
  misc_RNA (1)...(19): siRNA sense strand
cugcagugccucugagaaa

SEQ ID NO: 2162914 - RNA, 19 nt, Homo sapiens
  misc_RNA (1)...(19): siRNA sense strand
ugaacagcaucggcuaugu

SEQ ID NO: 2162915 - RNA, 19 nt, Homo sapiens
  misc_RNA (1)...(19): siRNA sense strand
gagaaaguccaggagaaag

SEQ ID NO: 2162916 - RNA, 19 nt, Homo sapiens
  misc_RNA (1)...(19): siRNA sense strand
gcacuagccccaugucuuc

SEQ ID NO: 2162917 - RNA, 19 nt, Homo sapiens
  misc_RNA (1)...(19): siRNA sense strand
gaaucagucaagacaguca

SEQ ID NO: 2162918 - RNA, 19 nt, Homo sapiens
  misc_RNA (1)...(19): siRNA sense strand
cggaaacccggguacaaga

SEQ ID NO: 2162919 - RNA, 19 nt, Homo sapiens
  misc_RNA (1)...(19): siRNA sense strand
caccuccgccuccaccuuu

SEQ ID NO: 2162920 - RNA, 19 nt, Homo sapiens
  misc_RNA (1)...(19): siRNA sense strand
agucucggcuuccuuugau

SEQ ID NO: 2162921 - RNA, 19 nt, Homo sapiens
  misc_RNA (1)...(19): siRNA sense strand
aacacgaccucucuugaag

SEQ ID NO: 2162922 - RNA, 19 nt, Homo sapiens
  misc_RNA (1)...(19): siRNA sense strand
aagggaggauggaaucagu

SEQ ID NO: 2162923 - RNA, 19 nt, Homo sapiens
  misc_RNA (1)...(19): siRNA sense strand
cagcagugaagaucccaaa

SEQ ID NO: 2162924 - RNA, 19 nt, Homo sapiens
  misc_RNA (1)...(19): siRNA sense strand
cagucugccucuacaucaa

SEQ ID NO: 2162925 - RNA, 19 nt, Homo sapiens
  misc_RNA (1)...(19): siRNA sense strand
gggaggauggaaucaguca

SEQ ID NO: 2162926 - RNA, 19 nt, Homo sapiens
  misc_RNA (1)...(19): siRNA sense strand
ggaagggaggauggaauca

SEQ ID NO: 2162927 - RNA, 19 nt, Homo sapiens
  misc_RNA (1)...(19): siRNA sense strand
gcggaaacccggguacaag

SEQ ID NO: 2162928 - RNA, 19 nt, Homo sapiens
  misc_RNA (1)...(19): siRNA sense strand
gagccugccuguggugaac

SEQ ID NO: 2162929 - RNA, 19 nt, Homo sapiens
  misc_RNA (1)...(19): siRNA sense strand
ggugagauggugucagucu

SEQ ID NO: 2162930 - RNA, 19 nt, Homo sapiens
  misc_RNA (1)...(19): siRNA sense strand
gaagaucccaaagaaaaga

SEQ ID NO: 2162931 - RNA, 19 nt, Homo sapiens
  misc_RNA (1)...(19): siRNA sense strand
gaagggaggauggaaucag

SEQ ID NO: 2162932 - RNA, 19 nt, Homo sapiens
  misc_RNA (1)...(19): siRNA sense strand
gucagucucggcuuccuuu

SEQ ID NO: 2162933 - RNA, 19 nt, Homo sapiens
  misc_RNA (1)...(19): siRNA sense strand
gaagucagauuguucuuua

SEQ ID NO: 2162934 - RNA, 19 nt, Homo sapiens
  misc_RNA (1)...(19): siRNA sense strand
gaaccgaaacucaaugaaa

SEQ ID NO: 2162935 - RNA, 19 nt, Homo sapiens
  misc_RNA (1)...(19): siRNA sense strand
gaacaccacggauugaauu

SEQ ID NO: 2162936 - RNA, 19 nt, Homo sapiens
  misc_RNA (1)...(19): siRNA sense strand
gcuauaaguugcuguugaa

SEQ ID NO: 2162937 - RNA, 19 nt, Homo sapiens
  misc_RNA (1)...(19): siRNA sense strand
gaagcgaccugcagaaagg

SEQ ID NO: 2162938 - RNA, 19 nt, Homo sapiens
  misc_RNA (1)...(19): siRNA sense strand
gaagcaagaccuaagcaaa

SEQ ID NO: 2162939 - RNA, 19 nt, Homo sapiens
  misc_RNA (1)...(19): siRNA sense strand
aguaauaggucguauguau

SEQ ID NO: 2162940 - RNA, 19 nt, Homo sapiens
  misc_RNA (1)...(19): siRNA sense strand
ucaaagaagucagauuguu

SEQ ID NO: 2162941 - RNA, 19 nt, Homo sapiens
  misc_RNA (1)...(19): siRNA sense strand
gcacugaaugggaagauuu

SEQ ID NO: 2162942 - RNA, 19 nt, Homo sapiens
  misc_RNA (1)...(19): siRNA sense strand
gauauuugcuggcgaugau

SEQ ID NO: 2162943 - RNA, 19 nt, Homo sapiens
  misc_RNA (1)...(19): siRNA sense strand
auaagaagcggccaaauaa

SEQ ID NO: 2162944 - RNA, 19 nt, Homo sapiens
  misc_RNA (1)...(19): siRNA sense strand
gcacaaagcccaaaacgaa

SEQ ID NO: 2162945 - RNA, 19 nt, Homo sapiens
  misc_RNA (1)...(19): siRNA sense strand
aauaagaagcggccaaaua

SEQ ID NO: 2162946 - RNA, 19 nt, Homo sapiens
  misc_RNA (1)...(19): siRNA sense strand
cagaaaggauaacagaaga

SEQ ID NO: 2162947 - RNA, 19 nt, Homo sapiens
  misc_RNA (1)...(19): siRNA sense strand
gggaagauuuacuuucgaa

SEQ ID NO: 2162948 - RNA, 19 nt, Homo sapiens
  misc_RNA (1)...(19): siRNA sense strand
caaaagcucucaagccaaa

SEQ ID NO: 2162949 - RNA, 19 nt, Homo sapiens
  misc_RNA (1)...(19): siRNA sense strand
auaaguugcuguugaagaa

SEQ ID NO: 2162950 - RNA, 19 nt, Homo sapiens
  misc_RNA (1)...(19): siRNA sense strand
gaccuaagcaaacuacaaa

SEQ ID NO: 2162951 - RNA, 19 nt, Homo sapiens
  misc_RNA (1)...(19): siRNA sense strand
gcagaaaggauaacagaag

SEQ ID NO: 2162952 - RNA, 19 nt, Homo sapiens
  misc_RNA (1)...(19): siRNA sense strand
uaauaggucguauguauga

SEQ ID NO: 2162953 - RNA, 19 nt, Homo sapiens
  misc_RNA (1)...(19): siRNA sense strand
caaagaagucagauuguuc

SEQ ID NO: 2162954 - RNA, 19 nt, Homo sapiens
  misc_RNA (1)...(19): siRNA sense strand
uaacagaagaccacgagaa

SEQ ID NO: 2162955 - RNA, 19 nt, Homo sapiens
  misc_RNA (1)...(19): siRNA sense strand
ggauaugauugaauuaggu

SEQ ID NO: 2162956 - RNA, 19 nt, Homo sapiens
  misc_RNA (1)...(19): siRNA sense strand
ugauuucgauguaacagaa

SEQ ID NO: 2162957 - RNA, 19 nt, Homo sapiens
  misc_RNA (1)...(19): siRNA sense strand
ggauugaauuggaagagau

SEQ ID NO: 2162958 - RNA, 19 nt, Homo sapiens
  misc_RNA (1)...(19): siRNA sense strand
gaaggauucauaugcagaa

SEQ ID NO: 2162959 - RNA, 19 nt, Homo sapiens
  misc_RNA (1)...(19): siRNA sense strand
gaagaagcgaccugcagaa

SEQ ID NO: 2162960 - RNA, 19 nt, Homo sapiens
  misc_RNA (1)...(19): siRNA sense strand
caaaugcaacagugacaaa

SEQ ID NO: 2162961 - RNA, 19 nt, Homo sapiens
  misc_RNA (1)...(19): siRNA sense strand
ggauucauaugcagaagca

SEQ ID NO: 2162962 - RNA, 19 nt, Homo sapiens
  misc_RNA (1)...(19): siRNA sense strand
uagaguauguucugcacuu

SEQ ID NO: 2162963 - RNA, 19 nt, Homo sapiens
  misc_RNA (1)...(19): siRNA sense strand
gagaaccgaaacucaauga

SEQ ID NO: 2162964 - RNA, 19 nt, Homo sapiens
  misc_RNA (1)...(19): siRNA sense strand
gaaaagagccaagagauuc

SEQ ID NO: 2162965 - RNA, 19 nt, Homo sapiens
  misc_RNA (1)...(19): siRNA sense strand
gaaugggaagauuuacuuu

SEQ ID NO: 2162966 - RNA, 19 nt, Homo sapiens
  misc_RNA (1)...(19): siRNA sense strand
auguuuggcucccauaaua

SEQ ID NO: 2162967 - RNA, 19 nt, Homo sapiens
  misc_RNA (1)...(19): siRNA sense strand
gaacaaaacccaugcugau

SEQ ID NO: 2162968 - RNA, 19 nt, Homo sapiens
  misc_RNA (1)...(19): siRNA sense strand
gcggccaaauaaucuagua

SEQ ID NO: 2162969 - RNA, 19 nt, Homo sapiens
  misc_RNA (1)...(19): siRNA sense strand
gagagaaccgaaacucaau

SEQ ID NO: 2162970 - RNA, 19 nt, Homo sapiens
  misc_RNA (1)...(19): siRNA sense strand
aaaaugccaugcugauuaa

SEQ ID NO: 2162971 - RNA, 19 nt, Homo sapiens
  misc_RNA (1)...(19): siRNA sense strand
gcagaacaccacggauuga

SEQ ID NO: 2162972 - RNA, 19 nt, Homo sapiens
  misc_RNA (1)...(19): siRNA sense strand
caaaacccaugcugauauu

SEQ ID NO: 2162973 - RNA, 19 nt, Homo sapiens
  misc_RNA (1)...(19): siRNA sense strand
gaagagagaaccgaaacuc

SEQ ID NO: 2162974 - RNA, 19 nt, Homo sapiens
  misc_RNA (1)...(19): siRNA sense strand
gagauuccuugagaagaga

SEQ ID NO: 2162975 - RNA, 19 nt, Homo sapiens
  misc_RNA (1)...(19): siRNA sense strand
gaugggacccucauuggau

SEQ ID NO: 2162976 - RNA, 19 nt, Homo sapiens
  misc_RNA (1)...(19): siRNA sense strand
gaagcuauaaguugcuguu

SEQ ID NO: 2162977 - RNA, 19 nt, Homo sapiens
  misc_RNA (1)...(19): siRNA sense strand
cgauguaacagaagauuau

SEQ ID NO: 2162978 - RNA, 19 nt, Homo sapiens
  misc_RNA (1)...(19): siRNA sense strand
aaagauguguaugcacuga

SEQ ID NO: 2162979 - RNA, 19 nt, Homo sapiens
  misc_RNA (1)...(19): siRNA sense strand
uggcgaugauuucgaugua

SEQ ID NO: 2162980 - RNA, 19 nt, Homo sapiens
  misc_RNA (1)...(19): siRNA sense strand
gaagcggccaaauaaucua

SEQ ID NO: 2162981 - RNA, 19 nt, Homo sapiens
  misc_RNA (1)...(19): siRNA sense strand
gauuuacuuucgaagcuau

SEQ ID NO: 2162982 - RNA, 19 nt, Homo sapiens
  misc_RNA (1)...(19): siRNA sense strand
guaauaggucguauguaug

SEQ ID NO: 2162983 - RNA, 19 nt, Homo sapiens
  misc_RNA (1)...(19): siRNA sense strand
agauguguaugcacugaaa

SEQ ID NO: 2162984 - RNA, 19 nt, Homo sapiens
  misc_RNA (1)...(19): siRNA sense strand
ugaaugggaagauuuacuu

SEQ ID NO: 2162985 - RNA, 19 nt, Homo sapiens
  misc_RNA (1)...(19): siRNA sense strand
uaaauguccugagggaaca

SEQ ID NO: 2162986 - RNA, 19 nt, Homo sapiens
  misc_RNA (1)...(19): siRNA sense strand
gcaagaccuaagcaaacua

SEQ ID NO: 2162987 - RNA, 19 nt, Homo sapiens
  misc_RNA (1)...(19): siRNA sense strand
caccacggauugaauugga

SEQ ID NO: 2162988 - RNA, 19 nt, Homo sapiens
  misc_RNA (1)...(19): siRNA sense strand
ggcgaugauuucgauguaa

SEQ ID NO: 2162989 - RNA, 19 nt, Homo sapiens
  misc_RNA (1)...(19): siRNA sense strand
cuacaaaccaggaaaauga

SEQ ID NO: 2162990 - RNA, 19 nt, Homo sapiens
  misc_RNA (1)...(19): siRNA sense strand
uuucaaagaagucagauug

SEQ ID NO: 2162991 - RNA, 19 nt, Homo sapiens
  misc_RNA (1)...(19): siRNA sense strand
agagauuccuugagaagag

SEQ ID NO: 2162992 - RNA, 19 nt, Homo sapiens
  misc_RNA (1)...(19): siRNA sense strand
gcucucaagccaaagaaga

SEQ ID NO: 2162993 - RNA, 19 nt, Homo sapiens
  misc_RNA (1)...(19): siRNA sense strand
gagaugggacccucauugg

SEQ ID NO: 2162994 - RNA, 19 nt, Homo sapiens
  misc_RNA (1)...(19): siRNA sense strand
gaagagaugggacccucau

SEQ ID NO: 2162995 - RNA, 19 nt, Homo sapiens
  misc_RNA (1)...(19): siRNA sense strand
agagagaaccgaaacucaa

SEQ ID NO: 2162996 - RNA, 19 nt, Homo sapiens
  misc_RNA (1)...(19): siRNA sense strand
gucagauuguucuuuauuc

SEQ ID NO: 2162997 - RNA, 19 nt, Homo sapiens
  misc_RNA (1)...(19): siRNA sense strand
gcaaaugcaacagugacaa

SEQ ID NO: 2162998 - RNA, 19 nt, Homo sapiens
  misc_RNA (1)...(19): siRNA sense strand
gcaaacuacaaaccaggaa

SEQ ID NO: 2162999 - RNA, 19 nt, Homo sapiens
  misc_RNA (1)...(19): siRNA sense strand
aaacccaugcugauauuug

SEQ ID NO: 2163000 - RNA, 19 nt, Homo sapiens
  misc_RNA (1)...(19): siRNA sense strand
gagaagagagaaccgaaac

SEQ ID NO: 2163001 - RNA, 19 nt, Homo sapiens
  misc_RNA (1)...(19): siRNA sense strand
aagaagcggccaaauaauc

SEQ ID NO: 2163002 - RNA, 19 nt, Homo sapiens
  misc_RNA (1)...(19): siRNA sense strand
aacagaagaccacgagaaa

SEQ ID NO: 2163003 - RNA, 19 nt, Homo sapiens
  misc_RNA (1)...(19): siRNA sense strand
caaacuacaaaccaggaaa

SEQ ID NO: 2163004 - RNA, 19 nt, Homo sapiens
  misc_RNA (1)...(19): siRNA sense strand
gcgaugauuucgauguaac

SEQ ID NO: 2163005 - RNA, 19 nt, Homo sapiens
  misc_RNA (1)...(19): siRNA sense strand
uaagaagcggccaaauaau

SEQ ID NO: 2163006 - RNA, 19 nt, Homo sapiens
  misc_RNA (1)...(19): siRNA sense strand
uaggucguauguaugacua

SEQ ID NO: 2163007 - RNA, 19 nt, Homo sapiens
  misc_RNA (1)...(19): siRNA sense strand
ggccaaauaaucuaguaau

SEQ ID NO: 2163008 - RNA, 19 nt, Homo sapiens
  misc_RNA (1)...(19): siRNA sense strand
cacugaaugggaagauuua

SEQ ID NO: 2163009 - RNA, 19 nt, Homo sapiens
  misc_RNA (1)...(19): siRNA sense strand
aaccgaaacucaaugaaaa

SEQ ID NO: 2163010 - RNA, 19 nt, Homo sapiens
  misc_RNA (1)...(19): siRNA sense strand
cuaguaauaggucguaugu

SEQ ID NO: 2163011 - RNA, 19 nt, Homo sapiens
  misc_RNA (1)...(19): siRNA sense strand
ccgccuggcuggauuagag

SEQ ID NO: 2163012 - RNA, 19 nt, Homo sapiens
  misc_RNA (1)...(19): siRNA sense strand
ugcuggauaugauugaauu

SEQ ID NO: 2163013 - RNA, 19 nt, Homo sapiens
  misc_RNA (1)...(19): siRNA sense strand
agagaugggacccucauug

SEQ ID NO: 2163014 - RNA, 19 nt, Homo sapiens
  misc_RNA (1)...(19): siRNA sense strand
cggauugaauuggaagaga

SEQ ID NO: 2163015 - RNA, 19 nt, Homo sapiens
  misc_RNA (1)...(19): siRNA sense strand
guauguaugacuaccaugu

SEQ ID NO: 2163016 - RNA, 19 nt, Homo sapiens
  misc_RNA (1)...(19): siRNA sense strand
caacuuauggaaggauuca

SEQ ID NO: 2163017 - RNA, 19 nt, Homo sapiens
  misc_RNA (1)...(19): siRNA sense strand
gcuggauaugauugaauua

SEQ ID NO: 2163018 - RNA, 19 nt, Homo sapiens
  misc_RNA (1)...(19): siRNA sense strand
uauaaguugcuguugaaga

SEQ ID NO: 2163019 - RNA, 19 nt, Homo sapiens
  misc_RNA (1)...(19): siRNA sense strand
ugacuaccaugugcuggau

SEQ ID NO: 2163020 - RNA, 19 nt, Homo sapiens
  misc_RNA (1)...(19): siRNA sense strand
ugagaagagagaaccgaaa

SEQ ID NO: 2163021 - RNA, 19 nt, Homo sapiens
  misc_RNA (1)...(19): siRNA sense strand
agauuuacuuucgaagcua

SEQ ID NO: 2163022 - RNA, 19 nt, Homo sapiens
  misc_RNA (1)...(19): siRNA sense strand
cgaaaagagccaagagauu

SEQ ID NO: 2163023 - RNA, 19 nt, Homo sapiens
  misc_RNA (1)...(19): siRNA sense strand
uacaagaccuuuugaggau

SEQ ID NO: 2163024 - RNA, 19 nt, Homo sapiens
  misc_RNA (1)...(19): siRNA sense strand
aagaagcgaccugcagaaa

SEQ ID NO: 2163025 - RNA, 19 nt, Homo sapiens
  misc_RNA (1)...(19): siRNA sense strand
uacaacuuauggaaggauu

SEQ ID NO: 2163026 - RNA, 19 nt, Homo sapiens
  misc_RNA (1)...(19): siRNA sense strand
gguacaacuuauggaagga

SEQ ID NO: 2163027 - RNA, 19 nt, Homo sapiens
  misc_RNA (1)...(19): siRNA sense strand
ucaagccaaagaagaagaa

SEQ ID NO: 2163028 - RNA, 19 nt, Homo sapiens
  misc_RNA (1)...(19): siRNA sense strand
ucgauguaacagaagauua

SEQ ID NO: 2163029 - RNA, 19 nt, Homo sapiens
  misc_RNA (1)...(19): siRNA sense strand
cgaccugcagaaaggauaa

SEQ ID NO: 2163030 - RNA, 19 nt, Homo sapiens
  misc_RNA (1)...(19): siRNA sense strand
gcagaagcaagaccuaagc

SEQ ID NO: 2163031 - RNA, 19 nt, Homo sapiens
  misc_RNA (1)...(19): siRNA sense strand
gauugaauuggaagagaug

SEQ ID NO: 2163032 - RNA, 19 nt, Homo sapiens
  misc_RNA (1)...(19): siRNA sense strand
cagaacaccacggauugaa

SEQ ID NO: 2163033 - RNA, 19 nt, Homo sapiens
  misc_RNA (1)...(19): siRNA sense strand
gaacaggugccaacaaaua

SEQ ID NO: 2163034 - RNA, 19 nt, Homo sapiens
  misc_RNA (1)...(19): siRNA sense strand
uaacaacgcuaaacagaaa

SEQ ID NO: 2163035 - RNA, 19 nt, Homo sapiens
  misc_RNA (1)...(19): siRNA sense strand
ggaagaugauuaugacuaa

SEQ ID NO: 2163036 - RNA, 19 nt, Homo sapiens
  misc_RNA (1)...(19): siRNA sense strand
ggaaggaguugaccaagaa

SEQ ID NO: 2163037 - RNA, 19 nt, Homo sapiens
  misc_RNA (1)...(19): siRNA sense strand
gaagggacgugagcuauaa

SEQ ID NO: 2163038 - RNA, 19 nt, Homo sapiens
  misc_RNA (1)...(19): siRNA sense strand
cgaaauagcuuugaggaaa

SEQ ID NO: 2163039 - RNA, 19 nt, Homo sapiens
  misc_RNA (1)...(19): siRNA sense strand
gaaguuaccaccaguuaua

SEQ ID NO: 2163040 - RNA, 19 nt, Homo sapiens
  misc_RNA (1)...(19): siRNA sense strand
gaagaugaauuaccaaagu

SEQ ID NO: 2163041 - RNA, 19 nt, Homo sapiens
  misc_RNA (1)...(19): siRNA sense strand
agaaagagcugagauuuga

SEQ ID NO: 2163042 - RNA, 19 nt, Homo sapiens
  misc_RNA (1)...(19): siRNA sense strand
gagcugagauuugacguuu

SEQ ID NO: 2163043 - RNA, 19 nt, Homo sapiens
  misc_RNA (1)...(19): siRNA sense strand
gaccagaaauuacagaaau

SEQ ID NO: 2163044 - RNA, 19 nt, Homo sapiens
  misc_RNA (1)...(19): siRNA sense strand
gcauaugccuucuccaaug

SEQ ID NO: 2163045 - RNA, 19 nt, Homo sapiens
  misc_RNA (1)...(19): siRNA sense strand
ccaagugauugaucuagua

SEQ ID NO: 2163046 - RNA, 19 nt, Homo sapiens
  misc_RNA (1)...(19): siRNA sense strand
caaaucucauuccacaaua

SEQ ID NO: 2163047 - RNA, 19 nt, Homo sapiens
  misc_RNA (1)...(19): siRNA sense strand
gaugagacauaccgcauau

SEQ ID NO: 2163048 - RNA, 19 nt, Homo sapiens
  misc_RNA (1)...(19): siRNA sense strand
uagaaucccuauccaauug

SEQ ID NO: 2163049 - RNA, 19 nt, Homo sapiens
  misc_RNA (1)...(19): siRNA sense strand
gagaaugaguugcuuccaa

SEQ ID NO: 2163050 - RNA, 19 nt, Homo sapiens
  misc_RNA (1)...(19): siRNA sense strand
uagaacaggugccaacaaa

SEQ ID NO: 2163051 - RNA, 19 nt, Homo sapiens
  misc_RNA (1)...(19): siRNA sense strand
ccaauuggguucaucaugu

SEQ ID NO: 2163052 - RNA, 19 nt, Homo sapiens
  misc_RNA (1)...(19): siRNA sense strand
agacgauucugacuacaua

SEQ ID NO: 2163053 - RNA, 19 nt, Homo sapiens
  misc_RNA (1)...(19): siRNA sense strand
gcagaaggugggcgaaaua

SEQ ID NO: 2163054 - RNA, 19 nt, Homo sapiens
  misc_RNA (1)...(19): siRNA sense strand
gaucuugggucuggaaaug

SEQ ID NO: 2163055 - RNA, 19 nt, Homo sapiens
  misc_RNA (1)...(19): siRNA sense strand
caacacgguuauccucaaa

SEQ ID NO: 2163056 - RNA, 19 nt, Homo sapiens
  misc_RNA (1)...(19): siRNA sense strand
caauuggguucaucaugua

SEQ ID NO: 2163057 - RNA, 19 nt, Homo sapiens
  misc_RNA (1)...(19): siRNA sense strand
ucuaauauguugaccaaga

SEQ ID NO: 2163058 - RNA, 19 nt, Homo sapiens
  misc_RNA (1)...(19): siRNA sense strand
gaaugaagaaucugaggaa

SEQ ID NO: 2163059 - RNA, 19 nt, Homo sapiens
  misc_RNA (1)...(19): siRNA sense strand
gagcacaaauugcccgaau

SEQ ID NO: 2163060 - RNA, 19 nt, Homo sapiens
  misc_RNA (1)...(19): siRNA sense strand
uauuguagcugaaguggaa

SEQ ID NO: 2163061 - RNA, 19 nt, Homo sapiens
  misc_RNA (1)...(19): siRNA sense strand
ggaagaagaagaggaagaa

SEQ ID NO: 2163062 - RNA, 19 nt, Homo sapiens
  misc_RNA (1)...(19): siRNA sense strand
aguuauaccugcacaaauu

SEQ ID NO: 2163063 - RNA, 19 nt, Homo sapiens
  misc_RNA (1)...(19): siRNA sense strand
gaaauagcuuugaggaaaa

SEQ ID NO: 2163064 - RNA, 19 nt, Homo sapiens
  misc_RNA (1)...(19): siRNA sense strand
ugagacauaccgcauauuu

SEQ ID NO: 2163065 - RNA, 19 nt, Homo sapiens
  misc_RNA (1)...(19): siRNA sense strand
uuucagggcugcacaagaa

SEQ ID NO: 2163066 - RNA, 19 nt, Homo sapiens
  misc_RNA (1)...(19): siRNA sense strand
gagcauaugccuucuccaa

SEQ ID NO: 2163067 - RNA, 19 nt, Homo sapiens
  misc_RNA (1)...(19): siRNA sense strand
ggaggaagacucaaacagu

SEQ ID NO: 2163068 - RNA, 19 nt, Homo sapiens
  misc_RNA (1)...(19): siRNA sense strand
caggaaaugagaguaauua

SEQ ID NO: 2163069 - RNA, 19 nt, Homo sapiens
  misc_RNA (1)...(19): siRNA sense strand
gaagaugaaauagcagaaa

SEQ ID NO: 2163070 - RNA, 19 nt, Homo sapiens
  misc_RNA (1)...(19): siRNA sense strand
gagaaucaacuccucauca

SEQ ID NO: 2163071 - RNA, 19 nt, Homo sapiens
  misc_RNA (1)...(19): siRNA sense strand
guagaaucccuauccaauu

SEQ ID NO: 2163072 - RNA, 19 nt, Homo sapiens
  misc_RNA (1)...(19): siRNA sense strand
ugaacaagcuggaguuggu

SEQ ID NO: 2163073 - RNA, 19 nt, Homo sapiens
  misc_RNA (1)...(19): siRNA sense strand
agaggaagauguagcugaa

SEQ ID NO: 2163074 - RNA, 19 nt, Homo sapiens
  misc_RNA (1)...(19): siRNA sense strand
ugacaccaaucucugaaga

SEQ ID NO: 2163075 - RNA, 19 nt, Homo sapiens
  misc_RNA (1)...(19): siRNA sense strand
ugaggaagaugaauuacca

SEQ ID NO: 2163076 - RNA, 19 nt, Homo sapiens
  misc_RNA (1)...(19): siRNA sense strand
gcaauucgggcuuuaaucu

SEQ ID NO: 2163077 - RNA, 19 nt, Homo sapiens
  misc_RNA (1)...(19): siRNA sense strand
ggucuggaaaugaauuaua

SEQ ID NO: 2163078 - RNA, 19 nt, Homo sapiens
  misc_RNA (1)...(19): siRNA sense strand
gcauauuucuugcccucaa

SEQ ID NO: 2163079 - RNA, 19 nt, Homo sapiens
  misc_RNA (1)...(19): siRNA sense strand
gagggacaauggagaaagu

SEQ ID NO: 2163080 - RNA, 19 nt, Homo sapiens
  misc_RNA (1)...(19): siRNA sense strand
guaauugguucaacuccau

SEQ ID NO: 2163081 - RNA, 19 nt, Homo sapiens
  misc_RNA (1)...(19): siRNA sense strand
caccuuauccugauccuuu

SEQ ID NO: 2163082 - RNA, 19 nt, Homo sapiens
  misc_RNA (1)...(19): siRNA sense strand
caaacagugacuaugauuu

SEQ ID NO: 2163083 - RNA, 19 nt, Homo sapiens
  misc_RNA (1)...(19): siRNA sense strand
cgaagggacgugagcuaua

SEQ ID NO: 2163084 - RNA, 19 nt, Homo sapiens
  misc_RNA (1)...(19): siRNA sense strand
aagaugaggaagaugauua

SEQ ID NO: 2163085 - RNA, 19 nt, Homo sapiens
  misc_RNA (1)...(19): siRNA sense strand
aagugaagcucaugaagau

SEQ ID NO: 2163086 - RNA, 19 nt, Homo sapiens
  misc_RNA (1)...(19): siRNA sense strand
gacaggaccacgaguguga

SEQ ID NO: 2163087 - RNA, 19 nt, Homo sapiens
  misc_RNA (1)...(19): siRNA sense strand
ugaggaagaugaagaugag

SEQ ID NO: 2163088 - RNA, 19 nt, Homo sapiens
  misc_RNA (1)...(19): siRNA sense strand
ggaccagaaauuacagaaa

SEQ ID NO: 2163089 - RNA, 19 nt, Homo sapiens
  misc_RNA (1)...(19): siRNA sense strand
aguauaguccagacaauua

SEQ ID NO: 2163090 - RNA, 19 nt, Homo sapiens
  misc_RNA (1)...(19): siRNA sense strand
gaaggcauccaagugauug

SEQ ID NO: 2163091 - RNA, 19 nt, Homo sapiens
  misc_RNA (1)...(19): siRNA sense strand
gugaaguuaccaccaguua

SEQ ID NO: 2163092 - RNA, 19 nt, Homo sapiens
  misc_RNA (1)...(19): siRNA sense strand
ggacaauggagaaagugaa

SEQ ID NO: 2163093 - RNA, 19 nt, Homo sapiens
  misc_RNA (1)...(19): siRNA sense strand
ucaaaucucauuccacaau

SEQ ID NO: 2163094 - RNA, 19 nt, Homo sapiens
  misc_RNA (1)...(19): siRNA sense strand
agaugaggaagaugaauua

SEQ ID NO: 2163095 - RNA, 19 nt, Homo sapiens
  misc_RNA (1)...(19): siRNA sense strand
gaaagugaagcucaugaag

SEQ ID NO: 2163096 - RNA, 19 nt, Homo sapiens
  misc_RNA (1)...(19): siRNA sense strand
cagaaagagcugagauuug

SEQ ID NO: 2163097 - RNA, 19 nt, Homo sapiens
  misc_RNA (1)...(19): siRNA sense strand
ggaagaugaagaugaggaa

SEQ ID NO: 2163098 - RNA, 19 nt, Homo sapiens
  misc_RNA (1)...(19): siRNA sense strand
ggaaggagaggaggaggaa

SEQ ID NO: 2163099 - RNA, 19 nt, Homo sapiens
  misc_RNA (1)...(19): siRNA sense strand
ggaagaccaugggugaagu

SEQ ID NO: 2163100 - RNA, 19 nt, Homo sapiens
  misc_RNA (1)...(19): siRNA sense strand
uaaaugagcguccugaaaa

SEQ ID NO: 2163101 - RNA, 19 nt, Homo sapiens
  misc_RNA (1)...(19): siRNA sense strand
gggcacagaugagacauac

SEQ ID NO: 2163102 - RNA, 19 nt, Homo sapiens
  misc_RNA (1)...(19): siRNA sense strand
agaaaacgcucuuccaaau

SEQ ID NO: 2163103 - RNA, 19 nt, Homo sapiens
  misc_RNA (1)...(19): siRNA sense strand
cgaagcagccguccuugga

SEQ ID NO: 2163104 - RNA, 19 nt, Homo sapiens
  misc_RNA (1)...(19): siRNA sense strand
ugaggaagaugauuaugac

SEQ ID NO: 2163105 - RNA, 19 nt, Homo sapiens
  misc_RNA (1)...(19): siRNA sense strand
uaaguauaguccagacaau

SEQ ID NO: 2163106 - RNA, 19 nt, Homo sapiens
  misc_RNA (1)...(19): siRNA sense strand
guccuucaauccaaccuuu

SEQ ID NO: 2163107 - RNA, 19 nt, Homo sapiens
  misc_RNA (1)...(19): siRNA sense strand
ucaguuuggugaagaggaa

SEQ ID NO: 2163108 - RNA, 19 nt, Homo sapiens
  misc_RNA (1)...(19): siRNA sense strand
gagaaagugaagcucauga

SEQ ID NO: 2163109 - RNA, 19 nt, Homo sapiens
  misc_RNA (1)...(19): siRNA sense strand
gaagauguagcugaagaga

SEQ ID NO: 2163110 - RNA, 19 nt, Homo sapiens
  misc_RNA (1)...(19): siRNA sense strand
ccagggacauuuggaagga

SEQ ID NO: 2163111 - RNA, 19 nt, Homo sapiens
  misc_RNA (1)...(19): siRNA sense strand
uauaacaacgcuaaacaga

SEQ ID NO: 2163112 - RNA, 19 nt, Homo sapiens
  misc_RNA (1)...(19): siRNA sense strand
aaagugaagcucaugaaga

SEQ ID NO: 2163113 - RNA, 19 nt, Homo sapiens
  misc_RNA (1)...(19): siRNA sense strand
gcuguugacaucuuugaaa

SEQ ID NO: 2163114 - RNA, 19 nt, Homo sapiens
  misc_RNA (1)...(19): siRNA sense strand
acagaaagagcugagauuu

SEQ ID NO: 2163115 - RNA, 19 nt, Homo sapiens
  misc_RNA (1)...(19): siRNA sense strand
gaagaugaggaagaugauu

SEQ ID NO: 2163116 - RNA, 19 nt, Homo sapiens
  misc_RNA (1)...(19): siRNA sense strand
gaagauuuagagauucaga

SEQ ID NO: 2163117 - RNA, 19 nt, Homo sapiens
  misc_RNA (1)...(19): siRNA sense strand
uggaaggaguugaccaaga

SEQ ID NO: 2163118 - RNA, 19 nt, Homo sapiens
  misc_RNA (1)...(19): siRNA sense strand
gcuuccaacauaugaaaua

SEQ ID NO: 2163119 - RNA, 19 nt, Homo sapiens
  misc_RNA (1)...(19): siRNA sense strand
uuaaaugagcguccugaaa

SEQ ID NO: 2163120 - RNA, 19 nt, Homo sapiens
  misc_RNA (1)...(19): siRNA sense strand
uagcagcaauucgggcuuu

SEQ ID NO: 2163121 - RNA, 19 nt, Homo sapiens
  misc_RNA (1)...(19): siRNA sense strand
gcuauaacaacgcuaaaca

SEQ ID NO: 2163122 - RNA, 19 nt, Homo sapiens
  misc_RNA (1)...(19): siRNA sense strand
ccaguuccaccaccaguuu

SEQ ID NO: 2163123 - RNA, 19 nt, Homo sapiens
  misc_RNA (1)...(19): siRNA sense strand
agaggaagaagaugaagaa

SEQ ID NO: 2163124 - RNA, 19 nt, Homo sapiens
  misc_RNA (1)...(19): siRNA sense strand
gaaggugggcgaaauagcu

SEQ ID NO: 2163125 - RNA, 19 nt, Homo sapiens
  misc_RNA (1)...(19): siRNA sense strand
ggaggaagaggcagaaggu

SEQ ID NO: 2163126 - RNA, 19 nt, Homo sapiens
  misc_RNA (1)...(19): siRNA sense strand
gaagaccaugggugaaguu

SEQ ID NO: 2163127 - RNA, 19 nt, Homo sapiens
  misc_RNA (1)...(19): siRNA sense strand
gaaaauauuagccaagaug

SEQ ID NO: 2163128 - RNA, 19 nt, Homo sapiens
  misc_RNA (1)...(19): siRNA sense strand
gggcuuuaaucuauaugau

SEQ ID NO: 2163129 - RNA, 19 nt, Homo sapiens
  misc_RNA (1)...(19): siRNA sense strand
agacauaccgcauauuucu

SEQ ID NO: 2163130 - RNA, 19 nt, Homo sapiens
  misc_RNA (1)...(19): siRNA sense strand
caccaccaguuuaucaaga

SEQ ID NO: 2163131 - RNA, 19 nt, Homo sapiens
  misc_RNA (1)...(19): siRNA sense strand
cagggucgcuguaauuggu

SEQ ID NO: 2163132 - RNA, 19 nt, Homo sapiens
  misc_RNA (1)...(19): siRNA sense strand
ggcagaaggugggcgaaau

SEQ ID NO: 2163133 - RNA, 19 nt, Homo sapiens
  misc_RNA (1)...(19): siRNA sense strand
aaacaaagcucgagugaaa

SEQ ID NO: 2163134 - RNA, 19 nt, Homo sapiens
  misc_RNA (1)...(19): siRNA sense strand
agugaaagcuuguuacaua

SEQ ID NO: 2163135 - RNA, 19 nt, Homo sapiens
  misc_RNA (1)...(19): siRNA sense strand
gaaagcuuguuacauaaug

SEQ ID NO: 2163136 - RNA, 19 nt, Homo sapiens
  misc_RNA (1)...(19): siRNA sense strand
cgacaugaauccuuaacaa

SEQ ID NO: 2163137 - RNA, 19 nt, Homo sapiens
  misc_RNA (1)...(19): siRNA sense strand
ggacagggcguuucaaauc

SEQ ID NO: 2163138 - RNA, 19 nt, Homo sapiens
  misc_RNA (1)...(19): siRNA sense strand
agaacgacaugaauccuua

SEQ ID NO: 2163139 - RNA, 19 nt, Homo sapiens
  misc_RNA (1)...(19): siRNA sense strand
gugaaagcuuguuacauaa

SEQ ID NO: 2163140 - RNA, 19 nt, Homo sapiens
  misc_RNA (1)...(19): siRNA sense strand
caugaauccuuaacaaguu

SEQ ID NO: 2163141 - RNA, 19 nt, Homo sapiens
  misc_RNA (1)...(19): siRNA sense strand
ucaaaucgauggaggagau

SEQ ID NO: 2163142 - RNA, 19 nt, Homo sapiens
  misc_RNA (1)...(19): siRNA sense strand
caaaagggcuguagaacga

SEQ ID NO: 2163143 - RNA, 19 nt, Homo sapiens
  misc_RNA (1)...(19): siRNA sense strand
gcaaacacacagagaaugg

SEQ ID NO: 2163144 - RNA, 19 nt, Homo sapiens
  misc_RNA (1)...(19): siRNA sense strand
gaacgacaugaauccuuaa

SEQ ID NO: 2163145 - RNA, 19 nt, Homo sapiens
  misc_RNA (1)...(19): siRNA sense strand
guuggaacuuggcaaagaa

SEQ ID NO: 2163146 - RNA, 19 nt, Homo sapiens
  misc_RNA (1)...(19): siRNA sense strand
acacagagaauggcaauug

SEQ ID NO: 2163147 - RNA, 19 nt, Homo sapiens
  misc_RNA (1)...(19): siRNA sense strand
gaaacaaagcucgagugaa

SEQ ID NO: 2163148 - RNA, 19 nt, Homo sapiens
  misc_RNA (1)...(19): siRNA sense strand
cauaaugauuggacucaca

SEQ ID NO: 2163149 - RNA, 19 nt, Homo sapiens
  misc_RNA (1)...(19): siRNA sense strand
gaucccgccagaaaugaua

SEQ ID NO: 2163150 - RNA, 19 nt, Homo sapiens
  misc_RNA (1)...(19): siRNA sense strand
ucacaauuaucgccugcuu

SEQ ID NO: 2163151 - RNA, 19 nt, Homo sapiens
  misc_RNA (1)...(19): siRNA sense strand
ugauagacaccgcaagaaa

SEQ ID NO: 2163152 - RNA, 19 nt, Homo sapiens
  misc_RNA (1)...(19): siRNA sense strand
acaauuaucgccugcuuug

SEQ ID NO: 2163153 - RNA, 19 nt, Homo sapiens
  misc_RNA (1)...(19): siRNA sense strand
gagacugcauuccgagaca

SEQ ID NO: 2163154 - RNA, 19 nt, Homo sapiens
  misc_RNA (1)...(19): siRNA sense strand
ccucggaucccgccagaaa

SEQ ID NO: 2163155 - RNA, 19 nt, Homo sapiens
  misc_RNA (1)...(19): siRNA sense strand
gacagggcguuucaaaucg

SEQ ID NO: 2163156 - RNA, 19 nt, Homo sapiens
  misc_RNA (1)...(19): siRNA sense strand
gauagacaccgcaagaaac

SEQ ID NO: 2163157 - RNA, 19 nt, Homo sapiens
  misc_RNA (1)...(19): siRNA sense strand
agaaacaaagcucgaguga

SEQ ID NO: 2163158 - RNA, 19 nt, Homo sapiens
  misc_RNA (1)...(19): siRNA sense strand
agacaccgcaagaaacaaa

SEQ ID NO: 2163159 - RNA, 19 nt, Homo sapiens
  misc_RNA (1)...(19): siRNA sense strand
cugcacaggcuaaagcuaa

SEQ ID NO: 2163160 - RNA, 19 nt, Homo sapiens
  misc_RNA (1)...(19): siRNA sense strand
aaagcuaaguggcgugaag

SEQ ID NO: 2163161 - RNA, 19 nt, Homo sapiens
  misc_RNA (1)...(19): siRNA sense strand
cgccugcuuugcugugaua

SEQ ID NO: 2163162 - RNA, 19 nt, Homo sapiens
  misc_RNA (1)...(19): siRNA sense strand
gaacuuggcaaagaaagcu

SEQ ID NO: 2163163 - RNA, 19 nt, Homo sapiens
  misc_RNA (1)...(19): siRNA sense strand
uaaguggcgugaagaagcu

SEQ ID NO: 2163164 - RNA, 19 nt, Homo sapiens
  misc_RNA (1)...(19): siRNA sense strand
gcgugaagaagcugcauug

SEQ ID NO: 2163165 - RNA, 19 nt, Homo sapiens
  misc_RNA (1)...(19): siRNA sense strand
gacaugaauccuuaacaag

SEQ ID NO: 2163166 - RNA, 19 nt, Homo sapiens
  misc_RNA (1)...(19): siRNA sense strand
guggacagggcguuucaaa

SEQ ID NO: 2163167 - RNA, 19 nt, Homo sapiens
  misc_RNA (1)...(19): siRNA sense strand
aaugauagacaccgcaaga

SEQ ID NO: 2163168 - RNA, 19 nt, Homo sapiens
  misc_RNA (1)...(19): siRNA sense strand
acaugaauccuuaacaagu

SEQ ID NO: 2163169 - RNA, 19 nt, Homo sapiens
  misc_RNA (1)...(19): siRNA sense strand
cgagugaaagcuuguuaca

SEQ ID NO: 2163170 - RNA, 19 nt, Homo sapiens
  misc_RNA (1)...(19): siRNA sense strand
gcuguagaacgacaugaau

SEQ ID NO: 2163171 - RNA, 19 nt, Homo sapiens
  misc_RNA (1)...(19): siRNA sense strand
ugcacaggcuaaagcuaaa

SEQ ID NO: 2163172 - RNA, 19 nt, Homo sapiens
  misc_RNA (1)...(19): siRNA sense strand
uggcaaagaaagcuaagug

SEQ ID NO: 2163173 - RNA, 19 nt, Homo sapiens
  misc_RNA (1)...(19): siRNA sense strand
gcacaggcuaaagcuaaau

SEQ ID NO: 2163174 - RNA, 19 nt, Homo sapiens
  misc_RNA (1)...(19): siRNA sense strand
acagggcguuucaaaucga

SEQ ID NO: 2163175 - RNA, 19 nt, Homo sapiens
  misc_RNA (1)...(19): siRNA sense strand
gcuuguuacauaaugauug

SEQ ID NO: 2163176 - RNA, 19 nt, Homo sapiens
  misc_RNA (1)...(19): siRNA sense strand
cugcuuugcugugauagug

SEQ ID NO: 2163177 - RNA, 19 nt, Homo sapiens
  misc_RNA (1)...(19): siRNA sense strand
uaugcaaacacacagagaa

SEQ ID NO: 2163178 - RNA, 19 nt, Homo sapiens
  misc_RNA (1)...(19): siRNA sense strand
gaagagaucucaaucagua

SEQ ID NO: 2163179 - RNA, 19 nt, Homo sapiens
  misc_RNA (1)...(19): siRNA sense strand
gaacacugcuagaccauga

SEQ ID NO: 2163180 - RNA, 19 nt, Homo sapiens
  misc_RNA (1)...(19): siRNA sense strand
uaacuucacuuucaagcaa

SEQ ID NO: 2163181 - RNA, 19 nt, Homo sapiens
  misc_RNA (1)...(19): siRNA sense strand
ggaguaacuucacuuucaa

SEQ ID NO: 2163182 - RNA, 19 nt, Homo sapiens
  misc_RNA (1)...(19): siRNA sense strand
guaacaaccugaacagucu

SEQ ID NO: 2163183 - RNA, 19 nt, Homo sapiens
  misc_RNA (1)...(19): siRNA sense strand
caaaguccaugaagagauc

SEQ ID NO: 2163184 - RNA, 19 nt, Homo sapiens
  misc_RNA (1)...(19): siRNA sense strand
gauugaagauccugagcuu

SEQ ID NO: 2163185 - RNA, 19 nt, Homo sapiens
  misc_RNA (1)...(19): siRNA sense strand
gguacacacugguggauau

SEQ ID NO: 2163186 - RNA, 19 nt, Homo sapiens
  misc_RNA (1)...(19): siRNA sense strand
uggaguaacuucacuuuca

SEQ ID NO: 2163187 - RNA, 19 nt, Homo sapiens
  misc_RNA (1)...(19): siRNA sense strand
uagaagccaugauugaaga

SEQ ID NO: 2163188 - RNA, 19 nt, Homo sapiens
  misc_RNA (1)...(19): siRNA sense strand
gaaugcugccuccuuauga

SEQ ID NO: 2163189 - RNA, 19 nt, Homo sapiens
  misc_RNA (1)...(19): siRNA sense strand
gcaagccucuaaacucaca

SEQ ID NO: 2163190 - RNA, 19 nt, Homo sapiens
  misc_RNA (1)...(19): siRNA sense strand
aagcaagccucuaaacuca

SEQ ID NO: 2163191 - RNA, 19 nt, Homo sapiens
  misc_RNA (1)...(19): siRNA sense strand
gauccugcccucugaguuu

SEQ ID NO: 2163192 - RNA, 19 nt, Homo sapiens
  misc_RNA (1)...(19): siRNA sense strand
ugaaggaaguagagaagga

SEQ ID NO: 2163193 - RNA, 19 nt, Homo sapiens
  misc_RNA (1)...(19): siRNA sense strand
gaacagucuacaccaacua

SEQ ID NO: 2163194 - RNA, 19 nt, Homo sapiens
  misc_RNA (1)...(19): siRNA sense strand
caagugaauggguuuguuu

SEQ ID NO: 2163195 - RNA, 19 nt, Homo sapiens
  misc_RNA (1)...(19): siRNA sense strand
cagcaugccugugaaggaa

SEQ ID NO: 2163196 - RNA, 19 nt, Homo sapiens
  misc_RNA (1)...(19): siRNA sense strand
ggaaugcugccuccuuaug

SEQ ID NO: 2163197 - RNA, 19 nt, Homo sapiens
  misc_RNA (1)...(19): siRNA sense strand
gcuaggaaguuucaucacu

SEQ ID NO: 2163198 - RNA, 19 nt, Homo sapiens
  misc_RNA (1)...(19): siRNA sense strand
gauccggccuuuccugaag

SEQ ID NO: 2163199 - RNA, 19 nt, Homo sapiens
  misc_RNA (1)...(19): siRNA sense strand
ucuaaacucacaccaagua

SEQ ID NO: 2163200 - RNA, 19 nt, Homo sapiens
  misc_RNA (1)...(19): siRNA sense strand
caccaaguaugcugcgauu

SEQ ID NO: 2163201 - RNA, 19 nt, Homo sapiens
  misc_RNA (1)...(19): siRNA sense strand
gaugacagcgaguacaaug

SEQ ID NO: 2163202 - RNA, 19 nt, Homo sapiens
  misc_RNA (1)...(19): siRNA sense strand
uggccaaucuggaccacua

SEQ ID NO: 2163203 - RNA, 19 nt, Homo sapiens
  misc_RNA (1)...(19): siRNA sense strand
gaaggaaguagagaaggaa

SEQ ID NO: 2163204 - RNA, 19 nt, Homo sapiens
  misc_RNA (1)...(19): siRNA sense strand
caacuaauucauccugaga

SEQ ID NO: 2163205 - RNA, 19 nt, Homo sapiens
  misc_RNA (1)...(19): siRNA sense strand
ccaaguaugcugcgauuag

SEQ ID NO: 2163206 - RNA, 19 nt, Homo sapiens
  misc_RNA (1)...(19): siRNA sense strand
caagcaagccucuaaacuc

SEQ ID NO: 2163207 - RNA, 19 nt, Homo sapiens
  misc_RNA (1)...(19): siRNA sense strand
ggaagauucuaguccuuuu

SEQ ID NO: 2163208 - RNA, 19 nt, Homo sapiens
  misc_RNA (1)...(19): siRNA sense strand
gauccugagcuucaaguga

SEQ ID NO: 2163209 - RNA, 19 nt, Homo sapiens
  misc_RNA (1)...(19): siRNA sense strand
guauauccaugcccuguac

SEQ ID NO: 2163210 - RNA, 19 nt, Homo sapiens
  misc_RNA (1)...(19): siRNA sense strand
ucaagugaauggguuuguu

SEQ ID NO: 2163211 - RNA, 19 nt, Homo sapiens
  misc_RNA (1)...(19): siRNA sense strand
ggagaaaacucggaaaagg

SEQ ID NO: 2163212 - RNA, 19 nt, Homo sapiens
  misc_RNA (1)...(19): siRNA sense strand
guacuaaaacgcauggaua

SEQ ID NO: 2163213 - RNA, 19 nt, Homo sapiens
  misc_RNA (1)...(19): siRNA sense strand
gucaaucaaccaugguaua

SEQ ID NO: 2163214 - RNA, 19 nt, Homo sapiens
  misc_RNA (1)...(19): siRNA sense strand
cagcagaaccuggacaugu

SEQ ID NO: 2163215 - RNA, 19 nt, Homo sapiens
  misc_RNA (1)...(19): siRNA sense strand
ccaucuuacuuucuuuaga

SEQ ID NO: 2163216 - RNA, 19 nt, Homo sapiens
  misc_RNA (1)...(19): siRNA sense strand
gcaucaagcaggcacugaa

SEQ ID NO: 2163217 - RNA, 19 nt, Homo sapiens
  misc_RNA (1)...(19): siRNA sense strand
agcagaaccuggacauguu

SEQ ID NO: 2163218 - RNA, 19 nt, Homo sapiens
  misc_RNA (1)...(19): siRNA sense strand
agaaggaacucuccccaaa

SEQ ID NO: 2163219 - RNA, 19 nt, Homo sapiens
  misc_RNA (1)...(19): siRNA sense strand
ucaaucaaccaugguauau

SEQ ID NO: 2163220 - RNA, 19 nt, Homo sapiens
  misc_RNA (1)...(19): siRNA sense strand
gaucauagacuggaguaac

SEQ ID NO: 2163221 - RNA, 19 nt, Homo sapiens
  misc_RNA (1)...(19): siRNA sense strand
gggcuaggaaguuucauca

SEQ ID NO: 2163222 - RNA, 19 nt, Homo sapiens
  misc_RNA (1)...(19): siRNA sense strand
uugaaggccugcaggauag

SEQ ID NO: 2163223 - RNA, 19 nt, Homo sapiens
  misc_RNA (1)...(19): siRNA sense strand
cgauuuggaggaauucauu

SEQ ID NO: 2163224 - RNA, 19 nt, Homo sapiens
  misc_RNA (1)...(19): siRNA sense strand
gcuagaccaugaauaugac

SEQ ID NO: 2163225 - RNA, 19 nt, Homo sapiens
  misc_RNA (1)...(19): siRNA sense strand
gccuggagcucaaugaaaa

SEQ ID NO: 2163226 - RNA, 19 nt, Homo sapiens
  misc_RNA (1)...(19): siRNA sense strand
ccugaacagucuacaccaa

SEQ ID NO: 2163227 - RNA, 19 nt, Homo sapiens
  misc_RNA (1)...(19): siRNA sense strand
gaagaaaacaugcaaccau

SEQ ID NO: 2163228 - RNA, 19 nt, Homo sapiens
  misc_RNA (1)...(19): siRNA sense strand
gcaugccugugaaggaagu

SEQ ID NO: 2163229 - RNA, 19 nt, Homo sapiens
  misc_RNA (1)...(19): siRNA sense strand
aagaaaacaugcaaccauu

SEQ ID NO: 2163230 - RNA, 19 nt, Homo sapiens
  misc_RNA (1)...(19): siRNA sense strand
uaaacucacaccaaguaug

SEQ ID NO: 2163231 - RNA, 19 nt, Homo sapiens
  misc_RNA (1)...(19): siRNA sense strand
caugaagagaucucaauca

SEQ ID NO: 2163232 - RNA, 19 nt, Homo sapiens
  misc_RNA (1)...(19): siRNA sense strand
caccgacccuggcaucaag

SEQ ID NO: 2163233 - RNA, 19 nt, Homo sapiens
  misc_RNA (1)...(19): siRNA sense strand
ccaaaguccaugaagagau

SEQ ID NO: 2163234 - RNA, 19 nt, Homo sapiens
  misc_RNA (1)...(19): siRNA sense strand
cugagauccugcccucuga

SEQ ID NO: 2163235 - RNA, 19 nt, Homo sapiens
  misc_RNA (1)...(19): siRNA sense strand
gguauauccaugcccugua

SEQ ID NO: 2163236 - RNA, 19 nt, Homo sapiens
  misc_RNA (1)...(19): siRNA sense strand
aaucaaccaugguauaucc

SEQ ID NO: 2163237 - RNA, 19 nt, Homo sapiens
  misc_RNA (1)...(19): siRNA sense strand
gauuuggaggaauucauuu

SEQ ID NO: 2163238 - RNA, 19 nt, Homo sapiens
  misc_RNA (1)...(19): siRNA sense strand
ccagcgcgauuuggaggaa

SEQ ID NO: 2163239 - RNA, 19 nt, Homo sapiens
  misc_RNA (1)...(19): siRNA sense strand
ggugagggauauggucauc

SEQ ID NO: 2163240 - RNA, 19 nt, Homo sapiens
  misc_RNA (1)...(19): siRNA sense strand
gugaauggguuuguuuuga

SEQ ID NO: 2163241 - RNA, 19 nt, Homo sapiens
  misc_RNA (1)...(19): siRNA sense strand
ucaagcaggcacugaagga

SEQ ID NO: 2163242 - RNA, 19 nt, Homo sapiens
  misc_RNA (1)...(19): siRNA sense strand
ccaugaauaugacgaugac

SEQ ID NO: 2163243 - RNA, 19 nt, Homo sapiens
  misc_RNA (1)...(19): siRNA sense strand
cagucuacaccaacuaauu

SEQ ID NO: 2163244 - RNA, 19 nt, Homo sapiens
  misc_RNA (1)...(19): siRNA sense strand
guacacacugguggauauu

SEQ ID NO: 2163245 - RNA, 19 nt, Homo sapiens
  misc_RNA (1)...(19): siRNA sense strand
uccaggaggugagggauau

SEQ ID NO: 2163246 - RNA, 19 nt, Homo sapiens
  misc_RNA (1)...(19): siRNA sense strand
auugaaggccugcaggaua

SEQ ID NO: 2163247 - RNA, 19 nt, Homo sapiens
  misc_RNA (1)...(19): siRNA sense strand
caaguaugcugcgauuagc

SEQ ID NO: 2163248 - RNA, 19 nt, Homo sapiens
  misc_RNA (1)...(19): siRNA sense strand
cgugccaucuuacuuucuu

SEQ ID NO: 2163249 - RNA, 19 nt, Homo sapiens
  misc_RNA (1)...(19): siRNA sense strand
acacacugguggauauuuu

SEQ ID NO: 2163250 - RNA, 19 nt, Homo sapiens
  misc_RNA (1)...(19): siRNA sense strand
aaacucacaccaaguaugc

SEQ ID NO: 2163251 - RNA, 19 nt, Homo sapiens
  misc_RNA (1)...(19): siRNA sense strand
ggaaguagagaaggaacuc

SEQ ID NO: 2163252 - RNA, 19 nt, Homo sapiens
  misc_RNA (1)...(19): siRNA sense strand
gagaaaacucggaaaagga

SEQ ID NO: 2163253 - RNA, 19 nt, Homo sapiens
  misc_RNA (1)...(19): siRNA sense strand
augcugcgauuagcuauug

SEQ ID NO: 2163254 - RNA, 19 nt, Homo sapiens
  misc_RNA (1)...(19): siRNA sense strand
ggacauguucaaaagcuuu

SEQ ID NO: 2163255 - RNA, 19 nt, Homo sapiens
  misc_RNA (1)...(19): siRNA sense strand
ugcuagaccaugaauauga

SEQ ID NO: 2163256 - RNA, 19 nt, Homo sapiens
  misc_RNA (1)...(19): siRNA sense strand
ugaacagucuacaccaacu

SEQ ID NO: 2163257 - RNA, 19 nt, Homo sapiens
  misc_RNA (1)...(19): siRNA sense strand
cuacaccaacuaauucauc

SEQ ID NO: 2163258 - RNA, 19 nt, Homo sapiens
  misc_RNA (1)...(19): siRNA sense strand
cuaaaacgcauggauaaaa

SEQ ID NO: 2163259 - RNA, 19 nt, Homo sapiens
  misc_RNA (1)...(19): siRNA sense strand
augaagagaucucaaucag

SEQ ID NO: 2163260 - RNA, 19 nt, Homo sapiens
  misc_RNA (1)...(19): siRNA sense strand
gggcaagaacacugcuaga

SEQ ID NO: 2163261 - RNA, 19 nt, Homo sapiens
  misc_RNA (1)...(19): siRNA sense strand
ggacaugggcaagaacacu

SEQ ID NO: 2163262 - RNA, 19 nt, Homo sapiens
  misc_RNA (1)...(19): siRNA sense strand
uaacaaccugaacagucua

SEQ ID NO: 2163263 - RNA, 19 nt, Homo sapiens
  misc_RNA (1)...(19): siRNA sense strand
acugcuagaccaugaauau

SEQ ID NO: 2163264 - RNA, 19 nt, Homo sapiens
  misc_RNA (1)...(19): siRNA sense strand
uauuuugcgugccaucuua

SEQ ID NO: 2163265 - RNA, 19 nt, Homo sapiens
  misc_RNA (1)...(19): siRNA sense strand
gcugccuccuuaugacaug

SEQ ID NO: 2163266 - RNA, 19 nt, Homo sapiens
  misc_RNA (1)...(19): siRNA sense strand
gaaggccugcaggauaguu

SEQ ID NO: 2163267 - RNA, 19 nt, Homo sapiens
  misc_RNA (1)...(19): siRNA sense strand
ucaccaggccggacauugg

SEQ ID NO: 2163268 - RNA, 19 nt, Homo sapiens
  misc_RNA (1)...(19): siRNA sense strand
gaauggguuuguuuugauc

SEQ ID NO: 2163269 - RNA, 19 nt, Homo sapiens
  misc_RNA (1)...(19): siRNA sense strand
cuuuagaagccaugauuga

SEQ ID NO: 2163270 - RNA, 19 nt, Homo sapiens
  misc_RNA (1)...(19): siRNA sense strand
gugccaucuuacuuucuuu

SEQ ID NO: 2163271 - RNA, 19 nt, Homo sapiens
  misc_RNA (1)...(19): siRNA sense strand
acuaauucauccugagauc

SEQ ID NO: 2163272 - RNA, 19 nt, Homo sapiens
  misc_RNA (1)...(19): siRNA sense strand
ggccggacauuggcuuucu

SEQ ID NO: 2163273 - RNA, 19 nt, Homo sapiens
  misc_RNA (1)...(19): siRNA sense strand
ggaauucauuuugucaauc

SEQ ID NO: 2163274 - RNA, 19 nt, Homo sapiens
  misc_RNA (1)...(19): siRNA sense strand
ugagggauauggucaucac

SEQ ID NO: 2163275 - RNA, 19 nt, Homo sapiens
  misc_RNA (1)...(19): siRNA sense strand
ucaagcaagccucuaaacu

SEQ ID NO: 2163276 - RNA, 19 nt, Homo sapiens
  misc_RNA (1)...(19): siRNA sense strand
gaucauagcugaaauuugu

SEQ ID NO: 2163277 - RNA, 19 nt, Homo sapiens
  misc_RNA (1)...(19): siRNA sense strand
gaacguauuuacacucuaa

SEQ ID NO: 2163278 - RNA, 19 nt, Homo sapiens
  misc_RNA (1)...(19): siRNA sense strand
gaagagcaauauuacauga

SEQ ID NO: 2163279 - RNA, 19 nt, Homo sapiens
  misc_RNA (1)...(19): siRNA sense strand
uaaaggagauuguugaaug

SEQ ID NO: 2163280 - RNA, 19 nt, Homo sapiens
  misc_RNA (1)...(19): siRNA sense strand
ccaagaaacuucacccaaa

SEQ ID NO: 2163281 - RNA, 19 nt, Homo sapiens
  misc_RNA (1)...(19): siRNA sense strand
uagagaaccucaucauaaa

SEQ ID NO: 2163282 - RNA, 19 nt, Homo sapiens
  misc_RNA (1)...(19): siRNA sense strand
uagaagagaucacugaaga

SEQ ID NO: 2163283 - RNA, 19 nt, Homo sapiens
  misc_RNA (1)...(19): siRNA sense strand
agagauugauggagaaaua

SEQ ID NO: 2163284 - RNA, 19 nt, Homo sapiens
  misc_RNA (1)...(19): siRNA sense strand
ucagggaucuuuccauuga

SEQ ID NO: 2163285 - RNA, 19 nt, Homo sapiens
  misc_RNA (1)...(19): siRNA sense strand
caacgaauccauuuccuaa

SEQ ID NO: 2163286 - RNA, 19 nt, Homo sapiens
  misc_RNA (1)...(19): siRNA sense strand
ucacugaagagcaauauua

SEQ ID NO: 2163287 - RNA, 19 nt, Homo sapiens
  misc_RNA (1)...(19): siRNA sense strand
cuagagaaccucaucauaa

SEQ ID NO: 2163288 - RNA, 19 nt, Homo sapiens
  misc_RNA (1)...(19): siRNA sense strand
caagaaacuucacccaaau

SEQ ID NO: 2163289 - RNA, 19 nt, Homo sapiens
  misc_RNA (1)...(19): siRNA sense strand
gaugcuaacugguuucuuc

SEQ ID NO: 2163290 - RNA, 19 nt, Homo sapiens
  misc_RNA (1)...(19): siRNA sense strand
uuacuggucucaaaguuaa

SEQ ID NO: 2163291 - RNA, 19 nt, Homo sapiens
  misc_RNA (1)...(19): siRNA sense strand
ucaucaaacucacucauuu

SEQ ID NO: 2163292 - RNA, 19 nt, Homo sapiens
  misc_RNA (1)...(19): siRNA sense strand
gaagaucauagcugaaauu

SEQ ID NO: 2163293 - RNA, 19 nt, Homo sapiens
  misc_RNA (1)...(19): siRNA sense strand
cauuaucacuggaagaauu

SEQ ID NO: 2163294 - RNA, 19 nt, Homo sapiens
  misc_RNA (1)...(19): siRNA sense strand
gaagauuccuaagaacaga

SEQ ID NO: 2163295 - RNA, 19 nt, Homo sapiens
  misc_RNA (1)...(19): siRNA sense strand
ggacucaacgaauccauuu

SEQ ID NO: 2163296 - RNA, 19 nt, Homo sapiens
  misc_RNA (1)...(19): siRNA sense strand
gaagaugaacguauuuaca

SEQ ID NO: 2163297 - RNA, 19 nt, Homo sapiens
  misc_RNA (1)...(19): siRNA sense strand
ugaaggcucuauuuaugaa

SEQ ID NO: 2163298 - RNA, 19 nt, Homo sapiens
  misc_RNA (1)...(19): siRNA sense strand
uagaggugauucaugauaa

SEQ ID NO: 2163299 - RNA, 19 nt, Homo sapiens
  misc_RNA (1)...(19): siRNA sense strand
caucaaacucacucauuua

SEQ ID NO: 2163300 - RNA, 19 nt, Homo sapiens
  misc_RNA (1)...(19): siRNA sense strand
agaaugauuugguggauga

SEQ ID NO: 2163301 - RNA, 19 nt, Homo sapiens
  misc_RNA (1)...(19): siRNA sense strand
ugaaaugacuaguaaagag

SEQ ID NO: 2163302 - RNA, 19 nt, Homo sapiens
  misc_RNA (1)...(19): siRNA sense strand
ggugauucaugauaagaaa

SEQ ID NO: 2163303 - RNA, 19 nt, Homo sapiens
  misc_RNA (1)...(19): siRNA sense strand
ucacaaggaccauucauau

SEQ ID NO: 2163304 - RNA, 19 nt, Homo sapiens
  misc_RNA (1)...(19): siRNA sense strand
ugaauguucuggccuguga

SEQ ID NO: 2163305 - RNA, 19 nt, Homo sapiens
  misc_RNA (1)...(19): siRNA sense strand
ucucaagccuguuuaugaa

SEQ ID NO: 2163306 - RNA, 19 nt, Homo sapiens
  misc_RNA (1)...(19): siRNA sense strand
cauuugaacugccuaugaa

SEQ ID NO: 2163307 - RNA, 19 nt, Homo sapiens
  misc_RNA (1)...(19): siRNA sense strand
guagaggugauucaugaua

SEQ ID NO: 2163308 - RNA, 19 nt, Homo sapiens
  misc_RNA (1)...(19): siRNA sense strand
acaaggaccauucauauug

SEQ ID NO: 2163309 - RNA, 19 nt, Homo sapiens
  misc_RNA (1)...(19): siRNA sense strand
gaaaucacaaggaccauuc

SEQ ID NO: 2163310 - RNA, 19 nt, Homo sapiens
  misc_RNA (1)...(19): siRNA sense strand
aacaagaacuguaaaccuu

SEQ ID NO: 2163311 - RNA, 19 nt, Homo sapiens
  misc_RNA (1)...(19): siRNA sense strand
gcaggcaucuaucuugaag

SEQ ID NO: 2163312 - RNA, 19 nt, Homo sapiens
  misc_RNA (1)...(19): siRNA sense strand
caaggaaucaucaaacuca

SEQ ID NO: 2163313 - RNA, 19 nt, Homo sapiens
  misc_RNA (1)...(19): siRNA sense strand
caacaggagaagugauuaa

SEQ ID NO: 2163314 - RNA, 19 nt, Homo sapiens
  misc_RNA (1)...(19): siRNA sense strand
ucaggacucugguagaaga

SEQ ID NO: 2163315 - RNA, 19 nt, Homo sapiens
  misc_RNA (1)...(19): siRNA sense strand
gauugaagguugugagucu

SEQ ID NO: 2163316 - RNA, 19 nt, Homo sapiens
  misc_RNA (1)...(19): siRNA sense strand
ccuaagaacagaacaagaa

SEQ ID NO: 2163317 - RNA, 19 nt, Homo sapiens
  misc_RNA (1)...(19): siRNA sense strand
cuugaaggcucuauuuaug

SEQ ID NO: 2163318 - RNA, 19 nt, Homo sapiens
  misc_RNA (1)...(19): siRNA sense strand
gaaauucaaggugugauga

SEQ ID NO: 2163319 - RNA, 19 nt, Homo sapiens
  misc_RNA (1)...(19): siRNA sense strand
gaaaugacuaguaaagagu

SEQ ID NO: 2163320 - RNA, 19 nt, Homo sapiens
  misc_RNA (1)...(19): siRNA sense strand
aagcuggccuggauucaaa

SEQ ID NO: 2163321 - RNA, 19 nt, Homo sapiens
  misc_RNA (1)...(19): siRNA sense strand
agagaucacugaagagcaa

SEQ ID NO: 2163322 - RNA, 19 nt, Homo sapiens
  misc_RNA (1)...(19): siRNA sense strand
ugucagggaucuuuccauu

SEQ ID NO: 2163323 - RNA, 19 nt, Homo sapiens
  misc_RNA (1)...(19): siRNA sense strand
cgaauccauuuccuaaaga

SEQ ID NO: 2163324 - RNA, 19 nt, Homo sapiens
  misc_RNA (1)...(19): siRNA sense strand
aagaaacaguacccgauuu

SEQ ID NO: 2163325 - RNA, 19 nt, Homo sapiens
  misc_RNA (1)...(19): siRNA sense strand
ggaaggagguuuuguagag

SEQ ID NO: 2163326 - RNA, 19 nt, Homo sapiens
  misc_RNA (1)...(19): siRNA sense strand
uuaagauuguggcugauaa

SEQ ID NO: 2163327 - RNA, 19 nt, Homo sapiens
  misc_RNA (1)...(19): siRNA sense strand
cauagaagcaccugaagga

SEQ ID NO: 2163328 - RNA, 19 nt, Homo sapiens
  misc_RNA (1)...(19): siRNA sense strand
uuacgaugcuaacugguuu

SEQ ID NO: 2163329 - RNA, 19 nt, Homo sapiens
  misc_RNA (1)...(19): siRNA sense strand
caaggaccauucauauugg

SEQ ID NO: 2163330 - RNA, 19 nt, Homo sapiens
  misc_RNA (1)...(19): siRNA sense strand
gauaaaacuccauaccuua

SEQ ID NO: 2163331 - RNA, 19 nt, Homo sapiens
  misc_RNA (1)...(19): siRNA sense strand
guagaggaaacaaaguuaa

SEQ ID NO: 2163332 - RNA, 19 nt, Homo sapiens
  misc_RNA (1)...(19): siRNA sense strand
gaacaagaacuguaaaccu

SEQ ID NO: 2163333 - RNA, 19 nt, Homo sapiens
  misc_RNA (1)...(19): siRNA sense strand
gugugaagaugaacguauu

SEQ ID NO: 2163334 - RNA, 19 nt, Homo sapiens
  misc_RNA (1)...(19): siRNA sense strand
cuacgagugugaagaugaa

SEQ ID NO: 2163335 - RNA, 19 nt, Homo sapiens
  misc_RNA (1)...(19): siRNA sense strand
ugaagagauugauggagaa

SEQ ID NO: 2163336 - RNA, 19 nt, Homo sapiens
  misc_RNA (1)...(19): siRNA sense strand
ugaaauuugugagcagauu

SEQ ID NO: 2163337 - RNA, 19 nt, Homo sapiens
  misc_RNA (1)...(19): siRNA sense strand
uaagaaacaguacccgauu

SEQ ID NO: 2163338 - RNA, 19 nt, Homo sapiens
  misc_RNA (1)...(19): siRNA sense strand
ucaaauaagugggacucaa

SEQ ID NO: 2163339 - RNA, 19 nt, Homo sapiens
  misc_RNA (1)...(19): siRNA sense strand
gcaaaucaugcucaacuca

SEQ ID NO: 2163340 - RNA, 19 nt, Homo sapiens
  misc_RNA (1)...(19): siRNA sense strand
caagccuguuuaugaaauu

SEQ ID NO: 2163341 - RNA, 19 nt, Homo sapiens
  misc_RNA (1)...(19): siRNA sense strand
acaagaacuguaaaccuua

SEQ ID NO: 2163342 - RNA, 19 nt, Homo sapiens
  misc_RNA (1)...(19): siRNA sense strand
agagcaauauuacaugaug

SEQ ID NO: 2163343 - RNA, 19 nt, Homo sapiens
  misc_RNA (1)...(19): siRNA sense strand
ucaagccuguuuaugaaau

SEQ ID NO: 2163344 - RNA, 19 nt, Homo sapiens
  misc_RNA (1)...(19): siRNA sense strand
gugagucucuacagccauu

SEQ ID NO: 2163345 - RNA, 19 nt, Homo sapiens
  misc_RNA (1)...(19): siRNA sense strand
aaaucaagcuggccuggau

SEQ ID NO: 2163346 - RNA, 19 nt, Homo sapiens
  misc_RNA (1)...(19): siRNA sense strand
gaaauuugugagcagauug

SEQ ID NO: 2163347 - RNA, 19 nt, Homo sapiens
  misc_RNA (1)...(19): siRNA sense strand
caccaggacugcaguugga

SEQ ID NO: 2163348 - RNA, 19 nt, Homo sapiens
  misc_RNA (1)...(19): siRNA sense strand
uuguagaggugauucauga

SEQ ID NO: 2163349 - RNA, 19 nt, Homo sapiens
  misc_RNA (1)...(19): siRNA sense strand
aggcugcgcugcucccuuu

SEQ ID NO: 2163350 - RNA, 19 nt, Homo sapiens
  misc_RNA (1)...(19): siRNA sense strand
uagaagcaccugaaggaaa

SEQ ID NO: 2163351 - RNA, 19 nt, Homo sapiens
  misc_RNA (1)...(19): siRNA sense strand
gaagagauugauggagaaa

SEQ ID NO: 2163352 - RNA, 19 nt, Homo sapiens
  misc_RNA (1)...(19): siRNA sense strand
cauccuugcuucuaucauc

SEQ ID NO: 2163353 - RNA, 19 nt, Homo sapiens
  misc_RNA (1)...(19): siRNA sense strand
uaucuugaaggcucuauuu

SEQ ID NO: 2163354 - RNA, 19 nt, Homo sapiens
  misc_RNA (1)...(19): siRNA sense strand
gacauaaccaagaaacuuc

SEQ ID NO: 2163355 - RNA, 19 nt, Homo sapiens
  misc_RNA (1)...(19): siRNA sense strand
uuucugagcucuguaaaca

SEQ ID NO: 2163356 - RNA, 19 nt, Homo sapiens
  misc_RNA (1)...(19): siRNA sense strand
guaaagaguuccccauagu

SEQ ID NO: 2163357 - RNA, 19 nt, Homo sapiens
  misc_RNA (1)...(19): siRNA sense strand
gugaagaugaacguauuua

SEQ ID NO: 2163358 - RNA, 19 nt, Homo sapiens
  misc_RNA (1)...(19): siRNA sense strand
gagauugauggagaaauaa

SEQ ID NO: 2163359 - RNA, 19 nt, Homo sapiens
  misc_RNA (1)...(19): siRNA sense strand
ggugagcugugcaguagca

SEQ ID NO: 2163360 - RNA, 19 nt, Homo sapiens
  misc_RNA (1)...(19): siRNA sense strand
aaacuucacccaaaucaag

SEQ ID NO: 2163361 - RNA, 19 nt, Homo sapiens
  misc_RNA (1)...(19): siRNA sense strand
cguuugcccuucaauguga

SEQ ID NO: 2163362 - RNA, 19 nt, Homo sapiens
  misc_RNA (1)...(19): siRNA sense strand
uaaagcagggugagcaaau

SEQ ID NO: 2163363 - RNA, 19 nt, Homo sapiens
  misc_RNA (1)...(19): siRNA sense strand
gcaauagcagaaacauuca

SEQ ID NO: 2163364 - RNA, 19 nt, Homo sapiens
  misc_RNA (1)...(19): siRNA sense strand
cacaaggaccauucauauu

SEQ ID NO: 2163365 - RNA, 19 nt, Homo sapiens
  misc_RNA (1)...(19): siRNA sense strand
ccacagcaauagcagaaac

SEQ ID NO: 2163366 - RNA, 19 nt, Homo sapiens
  misc_RNA (1)...(19): siRNA sense strand
gaaacuucacccaaaucaa

SEQ ID NO: 2163367 - RNA, 19 nt, Homo sapiens
  misc_RNA (1)...(19): siRNA sense strand
agacauaaccaagaaacuu

SEQ ID NO: 2163368 - RNA, 19 nt, Homo sapiens
  misc_RNA (1)...(19): siRNA sense strand
ucccaagcgucaucacgua

SEQ ID NO: 2163369 - RNA, 19 nt, Homo sapiens
  misc_RNA (1)...(19): siRNA sense strand
ccaccaaagcguuucauuc

SEQ ID NO: 2163370 - RNA, 19 nt, Homo sapiens
  misc_RNA (1)...(19): siRNA sense strand
agaagcaccugaaggaaac

SEQ ID NO: 2163371 - RNA, 19 nt, Homo sapiens
  misc_RNA (1)...(19): siRNA sense strand
caggagaagugauuaaaau

SEQ ID NO: 2163372 - RNA, 19 nt, Homo sapiens
  misc_RNA (1)...(19): siRNA sense strand
aaaggagauuguugaaugg

SEQ ID NO: 2163373 - RNA, 19 nt, Homo sapiens
  misc_RNA (1)...(19): siRNA sense strand
aacaguacccgauuucuga

SEQ ID NO: 2163374 - RNA, 19 nt, Homo sapiens
  misc_RNA (1)...(19): siRNA sense strand
cauuacagacucuuaccua

SEQ ID NO: 2163375 - RNA, 19 nt, Homo sapiens
  misc_RNA (1)...(19): siRNA sense strand
ggacauuacagacucuuac

SEQ ID NO: 2163376 - RNA, 19 nt, Homo sapiens
  misc_RNA (1)...(19): siRNA sense strand
gaacauagaagaacccuua

SEQ ID NO: 2163377 - RNA, 19 nt, Homo sapiens
  misc_RNA (1)...(19): siRNA sense strand
ggaagaagauccuaagugu

SEQ ID NO: 2163378 - RNA, 19 nt, Homo sapiens
  misc_RNA (1)...(19): siRNA sense strand
ggaaagguauuuaaagaug

SEQ ID NO: 2163379 - RNA, 19 nt, Homo sapiens
  misc_RNA (1)...(19): siRNA sense strand
gaagaauucucacaaugaa

SEQ ID NO: 2163380 - RNA, 19 nt, Homo sapiens
  misc_RNA (1)...(19): siRNA sense strand
gaacaaacaagauguaaga

SEQ ID NO: 2163381 - RNA, 19 nt, Homo sapiens
  misc_RNA (1)...(19): siRNA sense strand
guaaagggauuggccauuu

SEQ ID NO: 2163382 - RNA, 19 nt, Homo sapiens
  misc_RNA (1)...(19): siRNA sense strand
caucaauccuuuccauaua

SEQ ID NO: 2163383 - RNA, 19 nt, Homo sapiens
  misc_RNA (1)...(19): siRNA sense strand
ggacaaucguuuccuggua

SEQ ID NO: 2163384 - RNA, 19 nt, Homo sapiens
  misc_RNA (1)...(19): siRNA sense strand
cauagaagaacccuuauua

SEQ ID NO: 2163385 - RNA, 19 nt, Homo sapiens
  misc_RNA (1)...(19): siRNA sense strand
gaacauggaaagguauuua

SEQ ID NO: 2163386 - RNA, 19 nt, Homo sapiens
  misc_RNA (1)...(19): siRNA sense strand
ugaagaacauggaaaggua

SEQ ID NO: 2163387 - RNA, 19 nt, Homo sapiens
  misc_RNA (1)...(19): siRNA sense strand
gaaaugagaacaucacaug

SEQ ID NO: 2163388 - RNA, 19 nt, Homo sapiens
  misc_RNA (1)...(19): siRNA sense strand
caaacaagauguaagaauc

SEQ ID NO: 2163389 - RNA, 19 nt, Homo sapiens
  misc_RNA (1)...(19): siRNA sense strand
uaacagauaugguggacaa

SEQ ID NO: 2163390 - RNA, 19 nt, Homo sapiens
  misc_RNA (1)...(19): siRNA sense strand
agagagagaugaugaaaug

SEQ ID NO: 2163391 - RNA, 19 nt, Homo sapiens
  misc_RNA (1)...(19): siRNA sense strand
gaugagagcuaugacuauu

SEQ ID NO: 2163392 - RNA, 19 nt, Homo sapiens
  misc_RNA (1)...(19): siRNA sense strand
ccaguaaaguuuccaaaug

SEQ ID NO: 2163393 - RNA, 19 nt, Homo sapiens
  misc_RNA (1)...(19): siRNA sense strand
guucaaagcugcagagaag

SEQ ID NO: 2163394 - RNA, 19 nt, Homo sapiens
  misc_RNA (1)...(19): siRNA sense strand
ggaacaauugcuaugauua

SEQ ID NO: 2163395 - RNA, 19 nt, Homo sapiens
  misc_RNA (1)...(19): siRNA sense strand
gcaaacuucuuccaacugu

SEQ ID NO: 2163396 - RNA, 19 nt, Homo sapiens
  misc_RNA (1)...(19): siRNA sense strand
gcuccuaagucauuauuug

SEQ ID NO: 2163397 - RNA, 19 nt, Homo sapiens
  misc_RNA (1)...(19): siRNA sense strand
cggcgaagcuguucaagga

SEQ ID NO: 2163398 - RNA, 19 nt, Homo sapiens
  misc_RNA (1)...(19): siRNA sense strand
gacgaggugucagaauuua

SEQ ID NO: 2163399 - RNA, 19 nt, Homo sapiens
  misc_RNA (1)...(19): siRNA sense strand
gaaauuagaaggcguggau

SEQ ID NO: 2163400 - RNA, 19 nt, Homo sapiens
  misc_RNA (1)...(19): siRNA sense strand
gagaagagagagaugauga

SEQ ID NO: 2163401 - RNA, 19 nt, Homo sapiens
  misc_RNA (1)...(19): siRNA sense strand
gguaccaacugcucaagaa

SEQ ID NO: 2163402 - RNA, 19 nt, Homo sapiens
  misc_RNA (1)...(19): siRNA sense strand
cagacgaggugucagaauu

SEQ ID NO: 2163403 - RNA, 19 nt, Homo sapiens
  misc_RNA (1)...(19): siRNA sense strand
gaagaagauccuaagugua

SEQ ID NO: 2163404 - RNA, 19 nt, Homo sapiens
  misc_RNA (1)...(19): siRNA sense strand
ggacguagaagaagacaau

SEQ ID NO: 2163405 - RNA, 19 nt, Homo sapiens
  misc_RNA (1)...(19): siRNA sense strand
ggaagaaagggacguagaa

SEQ ID NO: 2163406 - RNA, 19 nt, Homo sapiens
  misc_RNA (1)...(19): siRNA sense strand
guugaaggauccagugaaa

SEQ ID NO: 2163407 - RNA, 19 nt, Homo sapiens
  misc_RNA (1)...(19): siRNA sense strand
gaagagagagaugaugaaa

SEQ ID NO: 2163408 - RNA, 19 nt, Homo sapiens
  misc_RNA (1)...(19): siRNA sense strand
agaccuaucuuaagacaug

SEQ ID NO: 2163409 - RNA, 19 nt, Homo sapiens
  misc_RNA (1)...(19): siRNA sense strand
uggcagaccuaucuuaaga

SEQ ID NO: 2163410 - RNA, 19 nt, Homo sapiens
  misc_RNA (1)...(19): siRNA sense strand
ggagaacaaacaagaugua

SEQ ID NO: 2163411 - RNA, 19 nt, Homo sapiens
  misc_RNA (1)...(19): siRNA sense strand
gagcuuaccugggugugaa

SEQ ID NO: 2163412 - RNA, 19 nt, Homo sapiens
  misc_RNA (1)...(19): siRNA sense strand
gaacagaaagugaaaugag

SEQ ID NO: 2163413 - RNA, 19 nt, Homo sapiens
  misc_RNA (1)...(19): siRNA sense strand
gaagagagaacagaaagug

SEQ ID NO: 2163414 - RNA, 19 nt, Homo sapiens
  misc_RNA (1)...(19): siRNA sense strand
aaaugaagcuugagguugu

SEQ ID NO: 2163415 - RNA, 19 nt, Homo sapiens
  misc_RNA (1)...(19): siRNA sense strand
ggauucggcuguacuaaag

SEQ ID NO: 2163416 - RNA, 19 nt, Homo sapiens
  misc_RNA (1)...(19): siRNA sense strand
caacguagaugagugucuu

SEQ ID NO: 2163417 - RNA, 19 nt, Homo sapiens
  misc_RNA (1)...(19): siRNA sense strand
gaaaccuccucauggauuc

SEQ ID NO: 2163418 - RNA, 19 nt, Homo sapiens
  misc_RNA (1)...(19): siRNA sense strand
caaaguuggcaugaaauua

SEQ ID NO: 2163419 - RNA, 19 nt, Homo sapiens
  misc_RNA (1)...(19): siRNA sense strand
cacaaguggucaagaguuu

SEQ ID NO: 2163420 - RNA, 19 nt, Homo sapiens
  misc_RNA (1)...(19): siRNA sense strand
gcacaucaaagauaaagau

SEQ ID NO: 2163421 - RNA, 19 nt, Homo sapiens
  misc_RNA (1)...(19): siRNA sense strand
gcacagacgaggugucaga

SEQ ID NO: 2163422 - RNA, 19 nt, Homo sapiens
  misc_RNA (1)...(19): siRNA sense strand
aaaggaacccuauguuuau

SEQ ID NO: 2163423 - RNA, 19 nt, Homo sapiens
  misc_RNA (1)...(19): siRNA sense strand
caacugggaugagagcuau

SEQ ID NO: 2163424 - RNA, 19 nt, Homo sapiens
  misc_RNA (1)...(19): siRNA sense strand
gcagaccuaucuuaagaca

SEQ ID NO: 2163425 - RNA, 19 nt, Homo sapiens
  misc_RNA (1)...(19): siRNA sense strand
guuauggacuggaaagaug

SEQ ID NO: 2163426 - RNA, 19 nt, Homo sapiens
  misc_RNA (1)...(19): siRNA sense strand
gaaucugccucuagcacaa

SEQ ID NO: 2163427 - RNA, 19 nt, Homo sapiens
  misc_RNA (1)...(19): siRNA sense strand
gagcaucaauccuuuccau

SEQ ID NO: 2163428 - RNA, 19 nt, Homo sapiens
  misc_RNA (1)...(19): siRNA sense strand
gcagagagcacggaggaaa

SEQ ID NO: 2163429 - RNA, 19 nt, Homo sapiens
  misc_RNA (1)...(19): siRNA sense strand
gaugcagauucuccugaua

SEQ ID NO: 2163430 - RNA, 19 nt, Homo sapiens
  misc_RNA (1)...(19): siRNA sense strand
gaacaauugcuaugauuac

SEQ ID NO: 2163431 - RNA, 19 nt, Homo sapiens
  misc_RNA (1)...(19): siRNA sense strand
gcaucaauccuuuccauau

SEQ ID NO: 2163432 - RNA, 19 nt, Homo sapiens
  misc_RNA (1)...(19): siRNA sense strand
gcucggcacaucaaagaua

SEQ ID NO: 2163433 - RNA, 19 nt, Homo sapiens
  misc_RNA (1)...(19): siRNA sense strand
cgaggugucagaauuuaua

SEQ ID NO: 2163434 - RNA, 19 nt, Homo sapiens
  misc_RNA (1)...(19): siRNA sense strand
uuugauguguucaguguua

SEQ ID NO: 2163435 - RNA, 19 nt, Homo sapiens
  misc_RNA (1)...(19): siRNA sense strand
caaaugaaagcucuucuuc

SEQ ID NO: 2163436 - RNA, 19 nt, Homo sapiens
  misc_RNA (1)...(19): siRNA sense strand
ggacagaugcaaaugaaag

SEQ ID NO: 2163437 - RNA, 19 nt, Homo sapiens
  misc_RNA (1)...(19): siRNA sense strand
ggaacccuauguuuauuag

SEQ ID NO: 2163438 - RNA, 19 nt, Homo sapiens
  misc_RNA (1)...(19): siRNA sense strand
caaggaggauggagaagag

SEQ ID NO: 2163439 - RNA, 19 nt, Homo sapiens
  misc_RNA (1)...(19): siRNA sense strand
gcacaaguggucaagaguu

SEQ ID NO: 2163440 - RNA, 19 nt, Homo sapiens
  misc_RNA (1)...(19): siRNA sense strand
gagaacagaaagugaaaug

SEQ ID NO: 2163441 - RNA, 19 nt, Homo sapiens
  misc_RNA (1)...(19): siRNA sense strand
uuugauggcuggaacaauu

SEQ ID NO: 2163442 - RNA, 19 nt, Homo sapiens
  misc_RNA (1)...(19): siRNA sense strand
uaaaguuucggguaaauga

SEQ ID NO: 2163443 - RNA, 19 nt, Homo sapiens
  misc_RNA (1)...(19): siRNA sense strand
ccaguuggguggugugaga

SEQ ID NO: 2163444 - RNA, 19 nt, Homo sapiens
  misc_RNA (1)...(19): siRNA sense strand
gggcuucaguucugugaga

SEQ ID NO: 2163445 - RNA, 19 nt, Homo sapiens
  misc_RNA (1)...(19): siRNA sense strand
agaaagggacguagaagaa

SEQ ID NO: 2163446 - RNA, 19 nt, Homo sapiens
  misc_RNA (1)...(19): siRNA sense strand
aauggaagcuucagaacau

SEQ ID NO: 2163447 - RNA, 19 nt, Homo sapiens
  misc_RNA (1)...(19): siRNA sense strand
ugaacaaauugauggagaa

SEQ ID NO: 2163448 - RNA, 19 nt, Homo sapiens
  misc_RNA (1)...(19): siRNA sense strand
gcaugcugaugaugucaaa

SEQ ID NO: 2163449 - RNA, 19 nt, Homo sapiens
  misc_RNA (1)...(19): siRNA sense strand
uaaagggauuggccauuuc

SEQ ID NO: 2163450 - RNA, 19 nt, Homo sapiens
  misc_RNA (1)...(19): siRNA sense strand
guagaugagugucuuucug

SEQ ID NO: 2163451 - RNA, 19 nt, Homo sapiens
  misc_RNA (1)...(19): siRNA sense strand
caguaaaguuuccaaaugg

SEQ ID NO: 2163452 - RNA, 19 nt, Homo sapiens
  misc_RNA (1)...(19): siRNA sense strand
cagcaaagcaaacuucuuc

SEQ ID NO: 2163453 - RNA, 19 nt, Homo sapiens
  misc_RNA (1)...(19): siRNA sense strand
gaaagugaaaugagaacau

SEQ ID NO: 2163454 - RNA, 19 nt, Homo sapiens
  misc_RNA (1)...(19): siRNA sense strand
gcaaaugaaagcucuucuu

SEQ ID NO: 2163455 - RNA, 19 nt, Homo sapiens
  misc_RNA (1)...(19): siRNA sense strand
aaaaggaacccuauguuua

SEQ ID NO: 2163456 - RNA, 19 nt, Homo sapiens
  misc_RNA (1)...(19): siRNA sense strand
caacugcuaccaccacuug

SEQ ID NO: 2163457 - RNA, 19 nt, Homo sapiens
  misc_RNA (1)...(19): siRNA sense strand
gggaugagagcuaugacua

SEQ ID NO: 2163458 - RNA, 19 nt, Homo sapiens
  misc_RNA (1)...(19): siRNA sense strand
ccaucgggcuuucgaguug

SEQ ID NO: 2163459 - RNA, 19 nt, Homo sapiens
  misc_RNA (1)...(19): siRNA sense strand
gagaacaaacaagauguaa

SEQ ID NO: 2163460 - RNA, 19 nt, Homo sapiens
  misc_RNA (1)...(19): siRNA sense strand
gaaggaagaaagggacgua

SEQ ID NO: 2163461 - RNA, 19 nt, Homo sapiens
  misc_RNA (1)...(19): siRNA sense strand
gaaggauccagugaaagua

SEQ ID NO: 2163462 - RNA, 19 nt, Homo sapiens
  misc_RNA (1)...(19): siRNA sense strand
aaggacagaugcaaaugaa

SEQ ID NO: 2163463 - RNA, 19 nt, Homo sapiens
  misc_RNA (1)...(19): siRNA sense strand
caacugucccuauucagaa

SEQ ID NO: 2163464 - RNA, 19 nt, Homo sapiens
  misc_RNA (1)...(19): siRNA sense strand
agauaaagaucagaaggaa

SEQ ID NO: 2163465 - RNA, 19 nt, Homo sapiens
  misc_RNA (1)...(19): siRNA sense strand
caucaaagauaaagaucag

SEQ ID NO: 2163466 - RNA, 19 nt, Homo sapiens
  misc_RNA (1)...(19): siRNA sense strand
aaagggacguagaagaaga

SEQ ID NO: 2163467 - RNA, 19 nt, Homo sapiens
  misc_RNA (1)...(19): siRNA sense strand
gagagaacagaaagugaaa

SEQ ID NO: 2163468 - RNA, 19 nt, Homo sapiens
  misc_RNA (1)...(19): siRNA sense strand
gcuaguccgucauuuccaa

SEQ ID NO: 2163469 - RNA, 19 nt, Homo sapiens
  misc_RNA (1)...(19): siRNA sense strand
gauuggccauuucaagaga

SEQ ID NO: 2163470 - RNA, 19 nt, Homo sapiens
  misc_RNA (1)...(19): siRNA sense strand
gaacaugguggaugcucaa

SEQ ID NO: 2163471 - RNA, 19 nt, Homo sapiens
  misc_RNA (1)...(19): siRNA sense strand
uaugauuacuggauagaug

SEQ ID NO: 2163472 - RNA, 19 nt, Homo sapiens
  misc_RNA (1)...(19): siRNA sense strand
gaguugguaugaagcuuga

SEQ ID NO: 2163473 - RNA, 19 nt, Homo sapiens
  misc_RNA (1)...(19): siRNA sense strand
ccacauauucauccaguug

SEQ ID NO: 2163474 - RNA, 19 nt, Homo sapiens
  misc_RNA (1)...(19): siRNA sense strand
acaaauugauggagaagca

SEQ ID NO: 2163475 - RNA, 19 nt, Homo sapiens
  misc_RNA (1)...(19): siRNA sense strand
gaagaacauggaaagguau

SEQ ID NO: 2163476 - RNA, 19 nt, Homo sapiens
  misc_RNA (1)...(19): siRNA sense strand
caaaugaaauggagaguga

SEQ ID NO: 2163477 - RNA, 19 nt, Homo sapiens
  misc_RNA (1)...(19): siRNA sense strand
gaauacaaauccucaggua

SEQ ID NO: 2163478 - RNA, 19 nt, Homo sapiens
  misc_RNA (1)...(19): siRNA sense strand
cgaaauagcacaaaugaaa

SEQ ID NO: 2163479 - RNA, 19 nt, Homo sapiens
  misc_RNA (1)...(19): siRNA sense strand
gaacacagacccuagauuc

SEQ ID NO: 2163480 - RNA, 19 nt, Homo sapiens
  misc_RNA (1)...(19): siRNA sense strand
cagaagcucucauuccuuu

SEQ ID NO: 2163481 - RNA, 19 nt, Homo sapiens
  misc_RNA (1)...(19): siRNA sense strand
ccacuucucuuucuucuag

SEQ ID NO: 2163482 - RNA, 19 nt, Homo sapiens
  misc_RNA (1)...(19): siRNA sense strand
gaaaggugauccucagucu

SEQ ID NO: 2163483 - RNA, 19 nt, Homo sapiens
  misc_RNA (1)...(19): siRNA sense strand
caauagcagugauggcuuu

SEQ ID NO: 2163484 - RNA, 19 nt, Homo sapiens
  misc_RNA (1)...(19): siRNA sense strand
ggacauggaucugggaauc

SEQ ID NO: 2163485 - RNA, 19 nt, Homo sapiens
  misc_RNA (1)...(19): siRNA sense strand
ccagagaggucacccacaa

SEQ ID NO: 2163486 - RNA, 19 nt, Homo sapiens
  misc_RNA (1)...(19): siRNA sense strand
gcaagagugaaucuaguua

SEQ ID NO: 2163487 - RNA, 19 nt, Homo sapiens
  misc_RNA (1)...(19): siRNA sense strand
gaauggcacuuuccucuac

SEQ ID NO: 2163488 - RNA, 19 nt, Homo sapiens
  misc_RNA (1)...(19): siRNA sense strand
ucaaagcucugcugcugaa

SEQ ID NO: 2163489 - RNA, 19 nt, Homo sapiens
  misc_RNA (1)...(19): siRNA sense strand
ggaccacgauggcuacugu

SEQ ID NO: 2163490 - RNA, 19 nt, Homo sapiens
  misc_RNA (1)...(19): siRNA sense strand
ccaagaagcccaaacuguu

SEQ ID NO: 2163491 - RNA, 19 nt, Homo sapiens
  misc_RNA (1)...(19): siRNA sense strand
gcuaugccguauaauugua

SEQ ID NO: 2163492 - RNA, 19 nt, Homo sapiens
  misc_RNA (1)...(19): siRNA sense strand
gaccaaacguccaacaaag

SEQ ID NO: 2163493 - RNA, 19 nt, Homo sapiens
  misc_RNA (1)...(19): siRNA sense strand
gaucacuacucuacacuag

SEQ ID NO: 2163494 - RNA, 19 nt, Homo sapiens
  misc_RNA (1)...(19): siRNA sense strand
aaacuuaggccauuuagga

SEQ ID NO: 2163495 - RNA, 19 nt, Homo sapiens
  misc_RNA (1)...(19): siRNA sense strand
uuaccaagaugaagaugaa

SEQ ID NO: 2163496 - RNA, 19 nt, Homo sapiens
  misc_RNA (1)...(19): siRNA sense strand
cccaagcuaugccguauaa

SEQ ID NO: 2163497 - RNA, 19 nt, Homo sapiens
  misc_RNA (1)...(19): siRNA sense strand
acaagcagaugaaaacuua

SEQ ID NO: 2163498 - RNA, 19 nt, Homo sapiens
  misc_RNA (1)...(19): siRNA sense strand
cagagaagcauccgaaaga

SEQ ID NO: 2163499 - RNA, 19 nt, Homo sapiens
  misc_RNA (1)...(19): siRNA sense strand
gaaguccucucugauaucu

SEQ ID NO: 2163500 - RNA, 19 nt, Homo sapiens
  misc_RNA (1)...(19): siRNA sense strand
caagcuaugccguauaauu

SEQ ID NO: 2163501 - RNA, 19 nt, Homo sapiens
  misc_RNA (1)...(19): siRNA sense strand
gcgauaaguugcggcauga

SEQ ID NO: 2163502 - RNA, 19 nt, Homo sapiens
  misc_RNA (1)...(19): siRNA sense strand
gcagagaugcucaagaaca

SEQ ID NO: 2163503 - RNA, 19 nt, Homo sapiens
  misc_RNA (1)...(19): siRNA sense strand
agacgggaaugaugaggua

SEQ ID NO: 2163504 - RNA, 19 nt, Homo sapiens
  misc_RNA (1)...(19): siRNA sense strand
gcacaguugucugaacgaa

SEQ ID NO: 2163505 - RNA, 19 nt, Homo sapiens
  misc_RNA (1)...(19): siRNA sense strand
ccaauuaccaggauaaauc

SEQ ID NO: 2163506 - RNA, 19 nt, Homo sapiens
  misc_RNA (1)...(19): siRNA sense strand
ucacuacucuacacuagga

SEQ ID NO: 2163507 - RNA, 19 nt, Homo sapiens
  misc_RNA (1)...(19): siRNA sense strand
guacugagggaaugcgaua

SEQ ID NO: 2163508 - RNA, 19 nt, Homo sapiens
  misc_RNA (1)...(19): siRNA sense strand
gggaaucugugcaauagca

SEQ ID NO: 2163509 - RNA, 19 nt, Homo sapiens
  misc_RNA (1)...(19): siRNA sense strand
gaugcuggcuuccauaguc

SEQ ID NO: 2163510 - RNA, 19 nt, Homo sapiens
  misc_RNA (1)...(19): siRNA sense strand
caugauggcuaccgcaguu

SEQ ID NO: 2163511 - RNA, 19 nt, Homo sapiens
  misc_RNA (1)...(19): siRNA sense strand
gaucaaaaguguucucugu

SEQ ID NO: 2163512 - RNA, 19 nt, Homo sapiens
  misc_RNA (1)...(19): siRNA sense strand
gagggaaugcgauaaguug

SEQ ID NO: 2163513 - RNA, 19 nt, Homo sapiens
  misc_RNA (1)...(19): siRNA sense strand
gaagucacacagagucauu

SEQ ID NO: 2163514 - RNA, 19 nt, Homo sapiens
  misc_RNA (1)...(19): siRNA sense strand
cguggugccuauuaacaua

SEQ ID NO: 2163515 - RNA, 19 nt, Homo sapiens
  misc_RNA (1)...(19): siRNA sense strand
agaugaagaugaagaaaca

SEQ ID NO: 2163516 - RNA, 19 nt, Homo sapiens
  misc_RNA (1)...(19): siRNA sense strand
gauaaccacggaagcauug

SEQ ID NO: 2163517 - RNA, 19 nt, Homo sapiens
  misc_RNA (1)...(19): siRNA sense strand
uuccugaaaucccgaaaua

SEQ ID NO: 2163518 - RNA, 19 nt, Homo sapiens
  misc_RNA (1)...(19): siRNA sense strand
gaugcugggucgcuguauu

SEQ ID NO: 2163519 - RNA, 19 nt, Homo sapiens
  misc_RNA (1)...(19): siRNA sense strand
acacuaggaagguucaaua

SEQ ID NO: 2163520 - RNA, 19 nt, Homo sapiens
  misc_RNA (1)...(19): siRNA sense strand
agacaugaauggcacuuuc

SEQ ID NO: 2163521 - RNA, 19 nt, Homo sapiens
  misc_RNA (1)...(19): siRNA sense strand
gagcaagggcaaacauuca

SEQ ID NO: 2163522 - RNA, 19 nt, Homo sapiens
  misc_RNA (1)...(19): siRNA sense strand
gcacugagccccauucuuc

SEQ ID NO: 2163523 - RNA, 19 nt, Homo sapiens
  misc_RNA (1)...(19): siRNA sense strand
guagagauucagaugauga

SEQ ID NO: 2163524 - RNA, 19 nt, Homo sapiens
  misc_RNA (1)...(19): siRNA sense strand
caagaagcccaaacuguuc

SEQ ID NO: 2163525 - RNA, 19 nt, Homo sapiens
  misc_RNA (1)...(19): siRNA sense strand
ucuccgaccuuaauacuca

SEQ ID NO: 2163526 - RNA, 19 nt, Homo sapiens
  misc_RNA (1)...(19): siRNA sense strand
caagcagcgucaagucaga

SEQ ID NO: 2163527 - RNA, 19 nt, Homo sapiens
  misc_RNA (1)...(19): siRNA sense strand
cugggucgcuguauucuga

SEQ ID NO: 2163528 - RNA, 19 nt, Homo sapiens
  misc_RNA (1)...(19): siRNA sense strand
ggccaugccaccauucuuu

SEQ ID NO: 2163529 - RNA, 19 nt, Homo sapiens
  misc_RNA (1)...(19): siRNA sense strand
ccaccagcaucaucccaaa

SEQ ID NO: 2163530 - RNA, 19 nt, Homo sapiens
  misc_RNA (1)...(19): siRNA sense strand
gaugaaaacuuaggccauu

SEQ ID NO: 2163531 - RNA, 19 nt, Homo sapiens
  misc_RNA (1)...(19): siRNA sense strand
cagacgaacuggaccaagu

SEQ ID NO: 2163532 - RNA, 19 nt, Homo sapiens
  misc_RNA (1)...(19): siRNA sense strand
gcugacguggugccuauua

SEQ ID NO: 2163533 - RNA, 19 nt, Homo sapiens
  misc_RNA (1)...(19): siRNA sense strand
gggcagcgcucagaaacca

SEQ ID NO: 2163534 - RNA, 19 nt, Homo sapiens
  misc_RNA (1)...(19): siRNA sense strand
ggagcaagggcaaacauuc

SEQ ID NO: 2163535 - RNA, 19 nt, Homo sapiens
  misc_RNA (1)...(19): siRNA sense strand
gaucaugucaccagagaag

SEQ ID NO: 2163536 - RNA, 19 nt, Homo sapiens
  misc_RNA (1)...(19): siRNA sense strand
caaccuagaugaggaaagc

SEQ ID NO: 2163537 - RNA, 19 nt, Homo sapiens
  misc_RNA (1)...(19): siRNA sense strand
ggacuuagacccucauucc

SEQ ID NO: 2163538 - RNA, 19 nt, Homo sapiens
  misc_RNA (1)...(19): siRNA sense strand
gaagaugaagaaacagauc

SEQ ID NO: 2163539 - RNA, 19 nt, Homo sapiens
  misc_RNA (1)...(19): siRNA sense strand
caagaacacagacccuaga

SEQ ID NO: 2163540 - RNA, 19 nt, Homo sapiens
  misc_RNA (1)...(19): siRNA sense strand
caccagcagugacaacuuc

SEQ ID NO: 2163541 - RNA, 19 nt, Homo sapiens
  misc_RNA (1)...(19): siRNA sense strand
gguaccaccuccgcagaaa

SEQ ID NO: 2163542 - RNA, 19 nt, Homo sapiens
  misc_RNA (1)...(19): siRNA sense strand
acaguugucugaacgaaca

SEQ ID NO: 2163543 - RNA, 19 nt, Homo sapiens
  misc_RNA (1)...(19): siRNA sense strand
gcccggugguucagucaaa

SEQ ID NO: 2163544 - RNA, 19 nt, Homo sapiens
  misc_RNA (1)...(19): siRNA sense strand
gcacagcgugaucaauguu

SEQ ID NO: 2163545 - RNA, 19 nt, Homo sapiens
  misc_RNA (1)...(19): siRNA sense strand
aagcuaugccguauaauug

SEQ ID NO: 2163546 - RNA, 19 nt, Homo sapiens
  misc_RNA (1)...(19): siRNA sense strand
ugacucagccgucccucua

SEQ ID NO: 2163547 - RNA, 19 nt, Homo sapiens
  misc_RNA (1)...(19): siRNA sense strand
caucagaagaagaaagauu

SEQ ID NO: 2163548 - RNA, 19 nt, Homo sapiens
  misc_RNA (1)...(19): siRNA sense strand
cuaggaagguucaauagcu

SEQ ID NO: 2163549 - RNA, 19 nt, Homo sapiens
  misc_RNA (1)...(19): siRNA sense strand
aagccaagcucaaccucaa

SEQ ID NO: 2163550 - RNA, 19 nt, Homo sapiens
  misc_RNA (1)...(19): siRNA sense strand
gcuccacaguaccacuuaa

SEQ ID NO: 2163551 - RNA, 19 nt, Homo sapiens
  misc_RNA (1)...(19): siRNA sense strand
auacaaauccucagguaau

SEQ ID NO: 2163552 - RNA, 19 nt, Homo sapiens
  misc_RNA (1)...(19): siRNA sense strand
ugacuucuccgaccuuaau

SEQ ID NO: 2163553 - RNA, 19 nt, Homo sapiens
  misc_RNA (1)...(19): siRNA sense strand
ccguagagauucagaugau

SEQ ID NO: 2163554 - RNA, 19 nt, Homo sapiens
  misc_RNA (1)...(19): siRNA sense strand
gaaaguccucggccguaga

SEQ ID NO: 2163555 - RNA, 19 nt, Homo sapiens
  misc_RNA (1)...(19): siRNA sense strand
acgaacagcucaggaacaa

SEQ ID NO: 2163556 - RNA, 19 nt, Homo sapiens
  misc_RNA (1)...(19): siRNA sense strand
uaaaaguucuggcucauca

SEQ ID NO: 2163557 - RNA, 19 nt, Homo sapiens
  misc_RNA (1)...(19): siRNA sense strand
cgggacagcgggaaaguaa

SEQ ID NO: 2163558 - RNA, 19 nt, Homo sapiens
  misc_RNA (1)...(19): siRNA sense strand
ccagaugggccacuucuca

SEQ ID NO: 2163559 - RNA, 19 nt, Homo sapiens
  misc_RNA (1)...(19): siRNA sense strand
ccaagaugaagaugaagaa

SEQ ID NO: 2163560 - RNA, 19 nt, Homo sapiens
  misc_RNA (1)...(19): siRNA sense strand
acacgggcaugcaggaaga

SEQ ID NO: 2163561 - RNA, 19 nt, Homo sapiens
  misc_RNA (1)...(19): siRNA sense strand
caagagugaaucuaguuau

SEQ ID NO: 2163562 - RNA, 19 nt, Homo sapiens
  misc_RNA (1)...(19): siRNA sense strand
gauaaguugcggcaugaug

SEQ ID NO: 2163563 - RNA, 19 nt, Homo sapiens
  misc_RNA (1)...(19): siRNA sense strand
aaacaccagccucaaguga

SEQ ID NO: 2163564 - RNA, 19 nt, Homo sapiens
  misc_RNA (1)...(19): siRNA sense strand
gcucaaccucaaaucagua

SEQ ID NO: 2163565 - RNA, 19 nt, Homo sapiens
  misc_RNA (1)...(19): siRNA sense strand
gccagaagcucucauuccu

SEQ ID NO: 2163566 - RNA, 19 nt, Homo sapiens
  misc_RNA (1)...(19): siRNA sense strand
uaucuucaguauccauuuc

SEQ ID NO: 2163567 - RNA, 19 nt, Homo sapiens
  misc_RNA (1)...(19): siRNA sense strand
aagaucaugucaccagaga

SEQ ID NO: 2163568 - RNA, 19 nt, Homo sapiens
  misc_RNA (1)...(19): siRNA sense strand
guuauuacauugacuacac

SEQ ID NO: 2163569 - RNA, 19 nt, Homo sapiens
  misc_RNA (1)...(19): siRNA sense strand
agaaacagaucaaaagugu

SEQ ID NO: 2163570 - RNA, 19 nt, Homo sapiens
  misc_RNA (1)...(19): siRNA sense strand
gaucugggaaucugugcaa

SEQ ID NO: 2163571 - RNA, 19 nt, Homo sapiens
  misc_RNA (1)...(19): siRNA sense strand
ccguauaauuguagaaaca

SEQ ID NO: 2163572 - RNA, 19 nt, Homo sapiens
  misc_RNA (1)...(19): siRNA sense strand
ugagggccaugccaccauu

SEQ ID NO: 2163573 - RNA, 19 nt, Homo sapiens
  misc_RNA (1)...(19): siRNA sense strand
ggagugggccaagaacgaa

SEQ ID NO: 2163574 - RNA, 19 nt, Homo sapiens
  misc_RNA (1)...(19): siRNA sense strand
ggaaguccucucugauauc

SEQ ID NO: 2163575 - RNA, 19 nt, Homo sapiens
  misc_RNA (1)...(19): siRNA sense strand
gaugaagaaacagaucaaa

SEQ ID NO: 2163576 - RNA, 19 nt, Homo sapiens
  misc_RNA (1)...(19): siRNA sense strand
gaaggaagauuguaacaua

SEQ ID NO: 2163577 - RNA, 19 nt, Homo sapiens
  misc_RNA (1)...(19): siRNA sense strand
gaauguggaucacgagguu

SEQ ID NO: 2163578 - RNA, 19 nt, Homo sapiens
  misc_RNA (1)...(19): siRNA sense strand
ggaggaaauucaucguuug

SEQ ID NO: 2163579 - RNA, 19 nt, Homo sapiens
  misc_RNA (1)...(19): siRNA sense strand
gaaguuuggccuuggauuu

SEQ ID NO: 2163580 - RNA, 19 nt, Homo sapiens
  misc_RNA (1)...(19): siRNA sense strand
gaaaguuaagcgugaaauu

SEQ ID NO: 2163581 - RNA, 19 nt, Homo sapiens
  misc_RNA (1)...(19): siRNA sense strand
gcgcagaaacacuuacuuu

SEQ ID NO: 2163582 - RNA, 19 nt, Homo sapiens
  misc_RNA (1)...(19): siRNA sense strand
gguaggaacucuuaaagcu

SEQ ID NO: 2163583 - RNA, 19 nt, Homo sapiens
  misc_RNA (1)...(19): siRNA sense strand
gcagagaggcagcaaugaa

SEQ ID NO: 2163584 - RNA, 19 nt, Homo sapiens
  misc_RNA (1)...(19): siRNA sense strand
uaaaugugccaaccucuuu

SEQ ID NO: 2163585 - RNA, 19 nt, Homo sapiens
  misc_RNA (1)...(19): siRNA sense strand
aaacgaaggaagauuguaa

SEQ ID NO: 2163586 - RNA, 19 nt, Homo sapiens
  misc_RNA (1)...(19): siRNA sense strand
caaccucuuugaagcauug

SEQ ID NO: 2163587 - RNA, 19 nt, Homo sapiens
  misc_RNA (1)...(19): siRNA sense strand
uggaggaaauucaucguuu

SEQ ID NO: 2163588 - RNA, 19 nt, Homo sapiens
  misc_RNA (1)...(19): siRNA sense strand
aaaugcugauggaaaguua

SEQ ID NO: 2163589 - RNA, 19 nt, Homo sapiens
  misc_RNA (1)...(19): siRNA sense strand
gcauugguaggaacucuua

SEQ ID NO: 2163590 - RNA, 19 nt, Homo sapiens
  misc_RNA (1)...(19): siRNA sense strand
ggucaccucugcuuuguac

SEQ ID NO: 2163591 - RNA, 19 nt, Homo sapiens
  misc_RNA (1)...(19): siRNA sense strand
ccacagccgucuuucucuu

SEQ ID NO: 2163592 - RNA, 19 nt, Homo sapiens
  misc_RNA (1)...(19): siRNA sense strand
ccucuuccgugaugauaaa

SEQ ID NO: 2163593 - RNA, 19 nt, Homo sapiens
  misc_RNA (1)...(19): siRNA sense strand
gcgcagagaggcagcaaug

SEQ ID NO: 2163594 - RNA, 19 nt, Homo sapiens
  misc_RNA (1)...(19): siRNA sense strand
gcaaaacgaaggaagauug

SEQ ID NO: 2163595 - RNA, 19 nt, Homo sapiens
  misc_RNA (1)...(19): siRNA sense strand
gagcuggcacugaaguuug

SEQ ID NO: 2163596 - RNA, 19 nt, Homo sapiens
  misc_RNA (1)...(19): siRNA sense strand
ggaagauuguaacauaucc

SEQ ID NO: 2163597 - RNA, 19 nt, Homo sapiens
  misc_RNA (1)...(19): siRNA sense strand
gagaggcagcaaugaaugu

SEQ ID NO: 2163598 - RNA, 19 nt, Homo sapiens
  misc_RNA (1)...(19): siRNA sense strand
cagagaggcagcaaugaau

SEQ ID NO: 2163599 - RNA, 19 nt, Homo sapiens
  misc_RNA (1)...(19): siRNA sense strand
aaguuaagcgugaaauuug

SEQ ID NO: 2163600 - RNA, 19 nt, Homo sapiens
  misc_RNA (1)...(19): siRNA sense strand
ggaaaguuaagcgugaaau

SEQ ID NO: 2163601 - RNA, 19 nt, Homo sapiens
  misc_RNA (1)...(19): siRNA sense strand
acagccgucuuucucuuug

SEQ ID NO: 2163602 - RNA, 19 nt, Homo sapiens
  misc_RNA (1)...(19): siRNA sense strand
gaacucuuaaagcugcaaa

SEQ ID NO: 2163603 - RNA, 19 nt, Homo sapiens
  misc_RNA (1)...(19): siRNA sense strand
gaggaaauucaucguuugg

SEQ ID NO: 2163604 - RNA, 19 nt, Homo sapiens
  misc_RNA (1)...(19): siRNA sense strand
cagcaaugaauguggauca

SEQ ID NO: 2163605 - RNA, 19 nt, Homo sapiens
  misc_RNA (1)...(19): siRNA sense strand
ucugcaagguguucaugau

SEQ ID NO: 2163606 - RNA, 19 nt, Homo sapiens
  misc_RNA (1)...(19): siRNA sense strand
cuuccgugaugauaaaugu

SEQ ID NO: 2163607 - RNA, 19 nt, Homo sapiens
  misc_RNA (1)...(19): siRNA sense strand
gccaaccucuuugaagcau

SEQ ID NO: 2163608 - RNA, 19 nt, Homo sapiens
  misc_RNA (1)...(19): siRNA sense strand
ucuuaaagcugcaaaacga

SEQ ID NO: 2163609 - RNA, 19 nt, Homo sapiens
  misc_RNA (1)...(19): siRNA sense strand
ccucuuugaagcauuggua

SEQ ID NO: 2163610 - RNA, 19 nt, Homo sapiens
  misc_RNA (1)...(19): siRNA sense strand
cacagccgucuuucucuuu

SEQ ID NO: 2163611 - RNA, 19 nt, Homo sapiens
  misc_RNA (1)...(19): siRNA sense strand
caccucugcuuuguacaug

SEQ ID NO: 2163612 - RNA, 19 nt, Homo sapiens
  misc_RNA (1)...(19): siRNA sense strand
gaagagagaugacacguuu

SEQ ID NO: 2163613 - RNA, 19 nt, Homo sapiens
  misc_RNA (1)...(19): siRNA sense strand
ggaaugaccuggaaaauua

SEQ ID NO: 2163614 - RNA, 19 nt, Homo sapiens
  misc_RNA (1)...(19): siRNA sense strand
ggacuuauguacaagauuu

SEQ ID NO: 2163615 - RNA, 19 nt, Homo sapiens
  misc_RNA (1)...(19): siRNA sense strand
gugaagaguuccacauuua

SEQ ID NO: 2163616 - RNA, 19 nt, Homo sapiens
  misc_RNA (1)...(19): siRNA sense strand
cgaaaggacuuauguacaa

SEQ ID NO: 2163617 - RNA, 19 nt, Homo sapiens
  misc_RNA (1)...(19): siRNA sense strand
ggaaagggaucagcgcuaa

SEQ ID NO: 2163618 - RNA, 19 nt, Homo sapiens
  misc_RNA (1)...(19): siRNA sense strand
caccauaucugacaccaua

SEQ ID NO: 2163619 - RNA, 19 nt, Homo sapiens
  misc_RNA (1)...(19): siRNA sense strand
caagauaucccacguuuga

SEQ ID NO: 2163620 - RNA, 19 nt, Homo sapiens
  misc_RNA (1)...(19): siRNA sense strand
ggauagaguuguucaggaa

SEQ ID NO: 2163621 - RNA, 19 nt, Homo sapiens
  misc_RNA (1)...(19): siRNA sense strand
gagaugacacguuuacaua

SEQ ID NO: 2163622 - RNA, 19 nt, Homo sapiens
  misc_RNA (1)...(19): siRNA sense strand
gaagaguuccacauuuaua

SEQ ID NO: 2163623 - RNA, 19 nt, Homo sapiens
  misc_RNA (1)...(19): siRNA sense strand
aggaagaccugauuucuaa

SEQ ID NO: 2163624 - RNA, 19 nt, Homo sapiens
  misc_RNA (1)...(19): siRNA sense strand
gaagaugacuauguggaaa

SEQ ID NO: 2163625 - RNA, 19 nt, Homo sapiens
  misc_RNA (1)...(19): siRNA sense strand
gaaugaggaugaugaagau

SEQ ID NO: 2163626 - RNA, 19 nt, Homo sapiens
  misc_RNA (1)...(19): siRNA sense strand
cacaugcccuccugaaaua

SEQ ID NO: 2163627 - RNA, 19 nt, Homo sapiens
  misc_RNA (1)...(19): siRNA sense strand
gaaaucugacucaaaguuu

SEQ ID NO: 2163628 - RNA, 19 nt, Homo sapiens
  misc_RNA (1)...(19): siRNA sense strand
gagacuggcuucugcauuc

SEQ ID NO: 2163629 - RNA, 19 nt, Homo sapiens
  misc_RNA (1)...(19): siRNA sense strand
caaagagacugauggagau

SEQ ID NO: 2163630 - RNA, 19 nt, Homo sapiens
  misc_RNA (1)...(19): siRNA sense strand
ggccagaccugaccagcua

SEQ ID NO: 2163631 - RNA, 19 nt, Homo sapiens
  misc_RNA (1)...(19): siRNA sense strand
gguggucaauagaaauuua

SEQ ID NO: 2163632 - RNA, 19 nt, Homo sapiens
  misc_RNA (1)...(19): siRNA sense strand
ggagaggcauccagccaaa

SEQ ID NO: 2163633 - RNA, 19 nt, Homo sapiens
  misc_RNA (1)...(19): siRNA sense strand
gaaggaaaucugacucaaa

SEQ ID NO: 2163634 - RNA, 19 nt, Homo sapiens
  misc_RNA (1)...(19): siRNA sense strand
gaucaugguuaucugaguu

SEQ ID NO: 2163635 - RNA, 19 nt, Homo sapiens
  misc_RNA (1)...(19): siRNA sense strand
ggaaaucaagucagaagaa

SEQ ID NO: 2163636 - RNA, 19 nt, Homo sapiens
  misc_RNA (1)...(19): siRNA sense strand
gcuaugauguggugcuuga

SEQ ID NO: 2163637 - RNA, 19 nt, Homo sapiens
  misc_RNA (1)...(19): siRNA sense strand
agaaauccaugcacaaaga

SEQ ID NO: 2163638 - RNA, 19 nt, Homo sapiens
  misc_RNA (1)...(19): siRNA sense strand
ggauggaggccacagauaa

SEQ ID NO: 2163639 - RNA, 19 nt, Homo sapiens
  misc_RNA (1)...(19): siRNA sense strand
gaguuagccuucacaaaga

SEQ ID NO: 2163640 - RNA, 19 nt, Homo sapiens
  misc_RNA (1)...(19): siRNA sense strand
cagccaagauuccagcuaa

SEQ ID NO: 2163641 - RNA, 19 nt, Homo sapiens
  misc_RNA (1)...(19): siRNA sense strand
ggaaaucugacucaaaguu

SEQ ID NO: 2163642 - RNA, 19 nt, Homo sapiens
  misc_RNA (1)...(19): siRNA sense strand
uaaacuguccgaagaagua

SEQ ID NO: 2163643 - RNA, 19 nt, Homo sapiens
  misc_RNA (1)...(19): siRNA sense strand
gaaaucaagucagaagaag

SEQ ID NO: 2163644 - RNA, 19 nt, Homo sapiens
  misc_RNA (1)...(19): siRNA sense strand
acaagauacuggccaaauu

SEQ ID NO: 2163645 - RNA, 19 nt, Homo sapiens
  misc_RNA (1)...(19): siRNA sense strand
uaagucagcccaacaaaga

SEQ ID NO: 2163646 - RNA, 19 nt, Homo sapiens
  misc_RNA (1)...(19): siRNA sense strand
gucaagauaucccacguuu

SEQ ID NO: 2163647 - RNA, 19 nt, Homo sapiens
  misc_RNA (1)...(19): siRNA sense strand
gaaggcgaaucaacuuuua

SEQ ID NO: 2163648 - RNA, 19 nt, Homo sapiens
  misc_RNA (1)...(19): siRNA sense strand
auacagaguuugcucacua

SEQ ID NO: 2163649 - RNA, 19 nt, Homo sapiens
  misc_RNA (1)...(19): siRNA sense strand
gaggaagaccugauuucua

SEQ ID NO: 2163650 - RNA, 19 nt, Homo sapiens
  misc_RNA (1)...(19): siRNA sense strand
gugaacuucugcaagauuu

SEQ ID NO: 2163651 - RNA, 19 nt, Homo sapiens
  misc_RNA (1)...(19): siRNA sense strand
gcaguacagucagaagauu

SEQ ID NO: 2163652 - RNA, 19 nt, Homo sapiens
  misc_RNA (1)...(19): siRNA sense strand
caucaguuaugaggacuua

SEQ ID NO: 2163653 - RNA, 19 nt, Homo sapiens
  misc_RNA (1)...(19): siRNA sense strand
gaaauaggaacuagugaca

SEQ ID NO: 2163654 - RNA, 19 nt, Homo sapiens
  misc_RNA (1)...(19): siRNA sense strand
gaugacacguuuacauaca

SEQ ID NO: 2163655 - RNA, 19 nt, Homo sapiens
  misc_RNA (1)...(19): siRNA sense strand
gaaugaccuuaguuucaaa

SEQ ID NO: 2163656 - RNA, 19 nt, Homo sapiens
  misc_RNA (1)...(19): siRNA sense strand
gcauaucaaugacaugaag

SEQ ID NO: 2163657 - RNA, 19 nt, Homo sapiens
  misc_RNA (1)...(19): siRNA sense strand
gcagagaugcagcguggua

SEQ ID NO: 2163658 - RNA, 19 nt, Homo sapiens
  misc_RNA (1)...(19): siRNA sense strand
ccaguuguaugaccagauu

SEQ ID NO: 2163659 - RNA, 19 nt, Homo sapiens
  misc_RNA (1)...(19): siRNA sense strand
uacaggagauacagaguuu

SEQ ID NO: 2163660 - RNA, 19 nt, Homo sapiens
  misc_RNA (1)...(19): siRNA sense strand
cuauaguaauggagaguua

SEQ ID NO: 2163661 - RNA, 19 nt, Homo sapiens
  misc_RNA (1)...(19): siRNA sense strand
uaacagaguguaugaggaa

SEQ ID NO: 2163662 - RNA, 19 nt, Homo sapiens
  misc_RNA (1)...(19): siRNA sense strand
caaacugaaugacuaucuu

SEQ ID NO: 2163663 - RNA, 19 nt, Homo sapiens
  misc_RNA (1)...(19): siRNA sense strand
gaaccaugcagccaagauu

SEQ ID NO: 2163664 - RNA, 19 nt, Homo sapiens
  misc_RNA (1)...(19): siRNA sense strand
gaaaccaguucagcggauu

SEQ ID NO: 2163665 - RNA, 19 nt, Homo sapiens
  misc_RNA (1)...(19): siRNA sense strand
gaggcaagcuggccacagu

SEQ ID NO: 2163666 - RNA, 19 nt, Homo sapiens
  misc_RNA (1)...(19): siRNA sense strand
ugaauccacucccucuaaa

SEQ ID NO: 2163667 - RNA, 19 nt, Homo sapiens
  misc_RNA (1)...(19): siRNA sense strand
cagcaaacuuggccuuuca

SEQ ID NO: 2163668 - RNA, 19 nt, Homo sapiens
  misc_RNA (1)...(19): siRNA sense strand
gcgcuaaaucucagccuua

SEQ ID NO: 2163669 - RNA, 19 nt, Homo sapiens
  misc_RNA (1)...(19): siRNA sense strand
gaaaggacuuauguacaag

SEQ ID NO: 2163670 - RNA, 19 nt, Homo sapiens
  misc_RNA (1)...(19): siRNA sense strand
gagaugaagaugacuaugu

SEQ ID NO: 2163671 - RNA, 19 nt, Homo sapiens
  misc_RNA (1)...(19): siRNA sense strand
cugauaaacuguccgaaga

SEQ ID NO: 2163672 - RNA, 19 nt, Homo sapiens
  misc_RNA (1)...(19): siRNA sense strand
agaaugaccuuaguuucaa

SEQ ID NO: 2163673 - RNA, 19 nt, Homo sapiens
  misc_RNA (1)...(19): siRNA sense strand
cauaucggcugagaagaaa

SEQ ID NO: 2163674 - RNA, 19 nt, Homo sapiens
  misc_RNA (1)...(19): siRNA sense strand
auagugaacuucugcaaga

SEQ ID NO: 2163675 - RNA, 19 nt, Homo sapiens
  misc_RNA (1)...(19): siRNA sense strand
caggauaucuaccacuuca

SEQ ID NO: 2163676 - RNA, 19 nt, Homo sapiens
  misc_RNA (1)...(19): siRNA sense strand
gaaacauacaggauaucua

SEQ ID NO: 2163677 - RNA, 19 nt, Homo sapiens
  misc_RNA (1)...(19): siRNA sense strand
cagcuucgguuccacauca

SEQ ID NO: 2163678 - RNA, 19 nt, Homo sapiens
  misc_RNA (1)...(19): siRNA sense strand
gaacuagggaacugcagaa

SEQ ID NO: 2163679 - RNA, 19 nt, Homo sapiens
  misc_RNA (1)...(19): siRNA sense strand
aauaggaacuagugacaga

SEQ ID NO: 2163680 - RNA, 19 nt, Homo sapiens
  misc_RNA (1)...(19): siRNA sense strand
gaccaugucuaugauaaca

SEQ ID NO: 2163681 - RNA, 19 nt, Homo sapiens
  misc_RNA (1)...(19): siRNA sense strand
aaggaaaucugacucaaag

SEQ ID NO: 2163682 - RNA, 19 nt, Homo sapiens
  misc_RNA (1)...(19): siRNA sense strand
ggagcuaucucacaaucgu

SEQ ID NO: 2163683 - RNA, 19 nt, Homo sapiens
  misc_RNA (1)...(19): siRNA sense strand
cagaaugaccuuaguuuca

SEQ ID NO: 2163684 - RNA, 19 nt, Homo sapiens
  misc_RNA (1)...(19): siRNA sense strand
gaaauucuggaaaccgaaa

SEQ ID NO: 2163685 - RNA, 19 nt, Homo sapiens
  misc_RNA (1)...(19): siRNA sense strand
guuuguggaugcugacuuu

SEQ ID NO: 2163686 - RNA, 19 nt, Homo sapiens
  misc_RNA (1)...(19): siRNA sense strand
gugccaggauugcugagua

SEQ ID NO: 2163687 - RNA, 19 nt, Homo sapiens
  misc_RNA (1)...(19): siRNA sense strand
gaggagaacaucuaugaca

SEQ ID NO: 2163688 - RNA, 19 nt, Homo sapiens
  misc_RNA (1)...(19): siRNA sense strand
ggacacagaaggcuaugau

SEQ ID NO: 2163689 - RNA, 19 nt, Homo sapiens
  misc_RNA (1)...(19): siRNA sense strand
cgagucgccuggcauauca

SEQ ID NO: 2163690 - RNA, 19 nt, Homo sapiens
  misc_RNA (1)...(19): siRNA sense strand
cugacaaacugaaugacua

SEQ ID NO: 2163691 - RNA, 19 nt, Homo sapiens
  misc_RNA (1)...(19): siRNA sense strand
ccgaagaaguagaugaaau

SEQ ID NO: 2163692 - RNA, 19 nt, Homo sapiens
  misc_RNA (1)...(19): siRNA sense strand
gauaaacuguccgaagaag

SEQ ID NO: 2163693 - RNA, 19 nt, Homo sapiens
  misc_RNA (1)...(19): siRNA sense strand
uaucugaguuugcuguaug

SEQ ID NO: 2163694 - RNA, 19 nt, Homo sapiens
  misc_RNA (1)...(19): siRNA sense strand
gauaucuaccacuucaaua

SEQ ID NO: 2163695 - RNA, 19 nt, Homo sapiens
  misc_RNA (1)...(19): siRNA sense strand
gaugcugacuuuucugaua

SEQ ID NO: 2163696 - RNA, 19 nt, Homo sapiens
  misc_RNA (1)...(19): siRNA sense strand
cuaaaucucagccuuauca

SEQ ID NO: 2163697 - RNA, 19 nt, Homo sapiens
  misc_RNA (1)...(19): siRNA sense strand
acaguaagggcucucuuua

SEQ ID NO: 2163698 - RNA, 19 nt, Homo sapiens
  misc_RNA (1)...(19): siRNA sense strand
caagagcaccccagaguua

SEQ ID NO: 2163699 - RNA, 19 nt, Homo sapiens
  misc_RNA (1)...(19): siRNA sense strand
ugacagaacuagggaacug

SEQ ID NO: 2163700 - RNA, 19 nt, Homo sapiens
  misc_RNA (1)...(19): siRNA sense strand
cauccaggcuucuguuaca

SEQ ID NO: 2163701 - RNA, 19 nt, Homo sapiens
  misc_RNA (1)...(19): siRNA sense strand
caagauacuggccaaauuc

SEQ ID NO: 2163702 - RNA, 19 nt, Homo sapiens
  misc_RNA (1)...(19): siRNA sense strand
ggaaaacugugaaaaugau

SEQ ID NO: 2163703 - RNA, 19 nt, Homo sapiens
  misc_RNA (1)...(19): siRNA sense strand
uaaccaggauaaggaggua

SEQ ID NO: 2163704 - RNA, 19 nt, Homo sapiens
  misc_RNA (1)...(19): siRNA sense strand
ccuagcaguucuaccauga

SEQ ID NO: 2163705 - RNA, 19 nt, Homo sapiens
  misc_RNA (1)...(19): siRNA sense strand
gauacuggccaaauucuuc

SEQ ID NO: 2163706 - RNA, 19 nt, Homo sapiens
  misc_RNA (1)...(19): siRNA sense strand
uaucugacaccauauaaug

SEQ ID NO: 2163707 - RNA, 19 nt, Homo sapiens
  misc_RNA (1)...(19): siRNA sense strand
gcagaaugaccuuaguuuc

SEQ ID NO: 2163708 - RNA, 19 nt, Homo sapiens
  misc_RNA (1)...(19): siRNA sense strand
uaagaaggcgaaucaacuu

SEQ ID NO: 2163709 - RNA, 19 nt, Homo sapiens
  misc_RNA (1)...(19): siRNA sense strand
gaacucuaccagacuaugu

SEQ ID NO: 2163710 - RNA, 19 nt, Homo sapiens
  misc_RNA (1)...(19): siRNA sense strand
ugaaacagcacaagacauc

SEQ ID NO: 2163711 - RNA, 19 nt, Homo sapiens
  misc_RNA (1)...(19): siRNA sense strand
caacacaugcccuccugaa

SEQ ID NO: 2163712 - RNA, 19 nt, Homo sapiens
  misc_RNA (1)...(19): siRNA sense strand
caaagaaaguggagaagug

SEQ ID NO: 2163713 - RNA, 19 nt, Homo sapiens
  misc_RNA (1)...(19): siRNA sense strand
gcagagacuugaccagcua

SEQ ID NO: 2163714 - RNA, 19 nt, Homo sapiens
  misc_RNA (1)...(19): siRNA sense strand
caacugaauucaccgaaga

SEQ ID NO: 2163715 - RNA, 19 nt, Homo sapiens
  misc_RNA (1)...(19): siRNA sense strand
gcaacuauguggaggucua

SEQ ID NO: 2163716 - RNA, 19 nt, Homo sapiens
  misc_RNA (1)...(19): siRNA sense strand
caccgaagauguagaagaa

SEQ ID NO: 2163717 - RNA, 19 nt, Homo sapiens
  misc_RNA (1)...(19): siRNA sense strand
ggucagcgauggccugcua

SEQ ID NO: 2163718 - RNA, 19 nt, Homo sapiens
  misc_RNA (1)...(19): siRNA sense strand
ccgcagagcucaagcagau

SEQ ID NO: 2163719 - RNA, 19 nt, Homo sapiens
  misc_RNA (1)...(19): siRNA sense strand
gaggugagccgcaucaaga

SEQ ID NO: 2163720 - RNA, 19 nt, Homo sapiens
  misc_RNA (1)...(19): siRNA sense strand
ugaauucaccgaagaugua

SEQ ID NO: 2163721 - RNA, 19 nt, Homo sapiens
  misc_RNA (1)...(19): siRNA sense strand
uguacgagcucuuugagaa

SEQ ID NO: 2163722 - RNA, 19 nt, Homo sapiens
  misc_RNA (1)...(19): siRNA sense strand
ggucgccgcuccaagaaga

SEQ ID NO: 2163723 - RNA, 19 nt, Homo sapiens
  misc_RNA (1)...(19): siRNA sense strand
gcaacuacacggagaucua

SEQ ID NO: 2163724 - RNA, 19 nt, Homo sapiens
  misc_RNA (1)...(19): siRNA sense strand
acaagaagccucuguaugg

SEQ ID NO: 2163725 - RNA, 19 nt, Homo sapiens
  misc_RNA (1)...(19): siRNA sense strand
gaggaggcccugucucuug

SEQ ID NO: 2163726 - RNA, 19 nt, Homo sapiens
  misc_RNA (1)...(19): siRNA sense strand
caacaucuacuuccugauc

SEQ ID NO: 2163727 - RNA, 19 nt, Homo sapiens
  misc_RNA (1)...(19): siRNA sense strand
caagaaagcaaagaaagug

SEQ ID NO: 2163728 - RNA, 19 nt, Homo sapiens
  misc_RNA (1)...(19): siRNA sense strand
ggagacagaggcugaagau

SEQ ID NO: 2163729 - RNA, 19 nt, Homo sapiens
  misc_RNA (1)...(19): siRNA sense strand
ccaggucgccagcuucuuu

SEQ ID NO: 2163730 - RNA, 19 nt, Homo sapiens
  misc_RNA (1)...(19): siRNA sense strand
gcagcaccaucgccucaga

SEQ ID NO: 2163731 - RNA, 19 nt, Homo sapiens
  misc_RNA (1)...(19): siRNA sense strand
acaagaucauggagaagaa

SEQ ID NO: 2163732 - RNA, 19 nt, Homo sapiens
  misc_RNA (1)...(19): siRNA sense strand
uauggcaucucgcacaaga

SEQ ID NO: 2163733 - RNA, 19 nt, Homo sapiens
  misc_RNA (1)...(19): siRNA sense strand
gacagaggcugaagaugcu

SEQ ID NO: 2163734 - RNA, 19 nt, Homo sapiens
  misc_RNA (1)...(19): siRNA sense strand
gaccagcuaugcaaucaac

SEQ ID NO: 2163735 - RNA, 19 nt, Homo sapiens
  misc_RNA (1)...(19): siRNA sense strand
gagaucuacuucccugaca

SEQ ID NO: 2163736 - RNA, 19 nt, Homo sapiens
  misc_RNA (1)...(19): siRNA sense strand
caagcugggugaacaguac

SEQ ID NO: 2163737 - RNA, 19 nt, Homo sapiens
  misc_RNA (1)...(19): siRNA sense strand
ugaacacccucacguccaa

SEQ ID NO: 2163738 - RNA, 19 nt, Homo sapiens
  misc_RNA (1)...(19): siRNA sense strand
gcaaagaaaguggagaagu

SEQ ID NO: 2163739 - RNA, 19 nt, Homo sapiens
  misc_RNA (1)...(19): siRNA sense strand
ccgaagauguagaagaagu

SEQ ID NO: 2163740 - RNA, 19 nt, Homo sapiens
  misc_RNA (1)...(19): siRNA sense strand
gcaagcugggugaacagua

SEQ ID NO: 2163741 - RNA, 19 nt, Homo sapiens
  misc_RNA (1)...(19): siRNA sense strand
cgcacaagaucauggagaa

SEQ ID NO: 2163742 - RNA, 19 nt, Homo sapiens
  misc_RNA (1)...(19): siRNA sense strand
gagaggaggagcccugcaa

SEQ ID NO: 2163743 - RNA, 19 nt, Homo sapiens
  misc_RNA (1)...(19): siRNA sense strand
ggaggagcccugcaacgau

SEQ ID NO: 2163744 - RNA, 19 nt, Homo sapiens
  misc_RNA (1)...(19): siRNA sense strand
cugagaugguggccaaauu

SEQ ID NO: 2163745 - RNA, 19 nt, Homo sapiens
  misc_RNA (1)...(19): siRNA sense strand
cacugcggcuccugaauga

SEQ ID NO: 2163746 - RNA, 19 nt, Homo sapiens
  misc_RNA (1)...(19): siRNA sense strand
acaaggaggugcgugagau

SEQ ID NO: 2163747 - RNA, 19 nt, Homo sapiens
  misc_RNA (1)...(19): siRNA sense strand
ucaagaaagcaaagaaagu

SEQ ID NO: 2163748 - RNA, 19 nt, Homo sapiens
  misc_RNA (1)...(19): siRNA sense strand
aaugcgacauccucaagaa

SEQ ID NO: 2163749 - RNA, 19 nt, Homo sapiens
  misc_RNA (1)...(19): siRNA sense strand
aaacguguacgagcucuuu

SEQ ID NO: 2163750 - RNA, 19 nt, Homo sapiens
  misc_RNA (1)...(19): siRNA sense strand
aaagaaaguggagaaguga

SEQ ID NO: 2163751 - RNA, 19 nt, Homo sapiens
  misc_RNA (1)...(19): siRNA sense strand
uggaggagguguggcacua

SEQ ID NO: 2163752 - RNA, 19 nt, Homo sapiens
  misc_RNA (1)...(19): siRNA sense strand
gaagauguagaagaaguuc

SEQ ID NO: 2163753 - RNA, 19 nt, Homo sapiens
  misc_RNA (1)...(19): siRNA sense strand
ucacugcggcuccugaaug

SEQ ID NO: 2163754 - RNA, 19 nt, Homo sapiens
  misc_RNA (1)...(19): siRNA sense strand
gcaggacuccagcaaacga

SEQ ID NO: 2163755 - RNA, 19 nt, Homo sapiens
  misc_RNA (1)...(19): siRNA sense strand
gaucuacuucccugacaug

SEQ ID NO: 2163756 - RNA, 19 nt, Homo sapiens
  misc_RNA (1)...(19): siRNA sense strand
ugaauuccaggacuucuga

SEQ ID NO: 2163757 - RNA, 19 nt, Homo sapiens
  misc_RNA (1)...(19): siRNA sense strand
gggaccugcuaaacgugua

SEQ ID NO: 2163758 - RNA, 19 nt, Homo sapiens
  misc_RNA (1)...(19): siRNA sense strand
gagcagcuacgcagcaucu

SEQ ID NO: 2163759 - RNA, 19 nt, Homo sapiens
  misc_RNA (1)...(19): siRNA sense strand
aggaggcccugucucuuga

SEQ ID NO: 2163760 - RNA, 19 nt, Homo sapiens
  misc_RNA (1)...(19): siRNA sense strand
ccucaagaaagcaaagaaa

SEQ ID NO: 2163761 - RNA, 19 nt, Homo sapiens
  misc_RNA (1)...(19): siRNA sense strand
ggagguguggcacuacgaa

SEQ ID NO: 2163762 - RNA, 19 nt, Homo sapiens
  misc_RNA (1)...(19): siRNA sense strand
gcagaucauccgcaacuac

SEQ ID NO: 2163763 - RNA, 19 nt, Homo sapiens
  misc_RNA (1)...(19): siRNA sense strand
cucccuaccugcugucuga

SEQ ID NO: 2163764 - RNA, 19 nt, Homo sapiens
  misc_RNA (1)...(19): siRNA sense strand
gaucauggagaagaagaau

SEQ ID NO: 2163765 - RNA, 19 nt, Homo sapiens
  misc_RNA (1)...(19): siRNA sense strand
aagcaaagaaaguggagaa

SEQ ID NO: 2163766 - RNA, 19 nt, Homo sapiens
  misc_RNA (1)...(19): siRNA sense strand
gccacuuccuggacaacaa

SEQ ID NO: 2163767 - RNA, 19 nt, Homo sapiens
  misc_RNA (1)...(19): siRNA sense strand
cgaagauguagaagaaguu

SEQ ID NO: 2163768 - RNA, 19 nt, Homo sapiens
  misc_RNA (1)...(19): siRNA sense strand
gcuccucguccgccuguuu

SEQ ID NO: 2163769 - RNA, 19 nt, Homo sapiens
  misc_RNA (1)...(19): siRNA sense strand
gaggagcagcaaggacuuu

SEQ ID NO: 2163770 - RNA, 19 nt, Homo sapiens
  misc_RNA (1)...(19): siRNA sense strand
gcucuacccacgcgccaaa

SEQ ID NO: 2163771 - RNA, 19 nt, Homo sapiens
  misc_RNA (1)...(19): siRNA sense strand
cagcucauccgcaacuaug

SEQ ID NO: 2163772 - RNA, 19 nt, Homo sapiens
  misc_RNA (1)...(19): siRNA sense strand
ugagaugguggccaaauuc

SEQ ID NO: 2163773 - RNA, 19 nt, Homo sapiens
  misc_RNA (1)...(19): siRNA sense strand
cacaagaucauggagaaga

SEQ ID NO: 2163774 - RNA, 19 nt, Homo sapiens
  misc_RNA (1)...(19): siRNA sense strand
gacaaggaggugcgugaga

SEQ ID NO: 2163775 - RNA, 19 nt, Homo sapiens
  misc_RNA (1)...(19): siRNA sense strand
ggaggaggcccugucucuu

SEQ ID NO: 2163776 - RNA, 19 nt, Homo sapiens
  misc_RNA (1)...(19): siRNA sense strand
ccacuuccuggacaacaaa

SEQ ID NO: 2163777 - RNA, 19 nt, Homo sapiens
  misc_RNA (1)...(19): siRNA sense strand
gggcaggcacugacaacga

SEQ ID NO: 2163778 - RNA, 19 nt, Homo sapiens
  misc_RNA (1)...(19): siRNA sense strand
acacgcaggaccucacuga

SEQ ID NO: 2163779 - RNA, 19 nt, Homo sapiens
  misc_RNA (1)...(19): siRNA sense strand
gguguggcacuacgaaugu

SEQ ID NO: 2163780 - RNA, 19 nt, Homo sapiens
  misc_RNA (1)...(19): siRNA sense strand
uguauggcaucucgcacaa

SEQ ID NO: 2163781 - RNA, 19 nt, Homo sapiens
  misc_RNA (1)...(19): siRNA sense strand
cggcugcaguacaaccauu

SEQ ID NO: 2163782 - RNA, 19 nt, Homo sapiens
  misc_RNA (1)...(19): siRNA sense strand
ucaccgaagauguagaaga

SEQ ID NO: 2163783 - RNA, 19 nt, Homo sapiens
  misc_RNA (1)...(19): siRNA sense strand
gcagcucauccgcaacuau

SEQ ID NO: 2163784 - RNA, 19 nt, Homo sapiens
  misc_RNA (1)...(19): siRNA sense strand
cugcagugccuguggcuuu

SEQ ID NO: 2163785 - RNA, 19 nt, Homo sapiens
  misc_RNA (1)...(19): siRNA sense strand
ucuacuuccugauccagaa

SEQ ID NO: 2163786 - RNA, 19 nt, Homo sapiens
  misc_RNA (1)...(19): siRNA sense strand
caacuacacggagaucuac

SEQ ID NO: 2163787 - RNA, 19 nt, Homo sapiens
  misc_RNA (1)...(19): siRNA sense strand
cagaucauccgcaacuaca

SEQ ID NO: 2163788 - RNA, 19 nt, Homo sapiens
  misc_RNA (1)...(19): siRNA sense strand
cugcaggacuccagcaaac

SEQ ID NO: 2163789 - RNA, 19 nt, Homo sapiens
  misc_RNA (1)...(19): siRNA sense strand
guacgagcucuuugagaag

SEQ ID NO: 2163790 - RNA, 19 nt, Homo sapiens
  misc_RNA (1)...(19): siRNA sense strand
gcgacauccucaagaaagc

SEQ ID NO: 2163791 - RNA, 19 nt, Homo sapiens
  misc_RNA (1)...(19): siRNA sense strand
gaagaggaggcggcugauc

SEQ ID NO: 2163792 - RNA, 19 nt, Homo sapiens
  misc_RNA (1)...(19): siRNA sense strand
gcucauccgcaacuaugug

SEQ ID NO: 2163793 - RNA, 19 nt, Homo sapiens
  misc_RNA (1)...(19): siRNA sense strand
gaauucaccgaagauguag

SEQ ID NO: 2163794 - RNA, 19 nt, Homo sapiens
  misc_RNA (1)...(19): siRNA sense strand
guguggcacuacgaaugua

SEQ ID NO: 2163795 - RNA, 19 nt, Homo sapiens
  misc_RNA (1)...(19): siRNA sense strand
cgacaucucaguggucaag

SEQ ID NO: 2163796 - RNA, 19 nt, Homo sapiens
  misc_RNA (1)...(19): siRNA sense strand
gacuugaccagcuaugcaa

SEQ ID NO: 2163797 - RNA, 19 nt, Homo sapiens
  misc_RNA (1)...(19): siRNA sense strand
gaagaaagauuccaagaaa

SEQ ID NO: 2163798 - RNA, 19 nt, Homo sapiens
  misc_RNA (1)...(19): siRNA sense strand
caagaaagaugacaagaaa

SEQ ID NO: 2163799 - RNA, 19 nt, Homo sapiens
  misc_RNA (1)...(19): siRNA sense strand
gaaaccagcucauaaaugg

SEQ ID NO: 2163800 - RNA, 19 nt, Homo sapiens
  misc_RNA (1)...(19): siRNA sense strand
gacaaacacugaauuccua

SEQ ID NO: 2163801 - RNA, 19 nt, Homo sapiens
  misc_RNA (1)...(19): siRNA sense strand
gaagcaccguggauucaua

SEQ ID NO: 2163802 - RNA, 19 nt, Homo sapiens
  misc_RNA (1)...(19): siRNA sense strand
gcaaauaguagaagagaaa

SEQ ID NO: 2163803 - RNA, 19 nt, Homo sapiens
  misc_RNA (1)...(19): siRNA sense strand
gauaaggcauucuuucaga

SEQ ID NO: 2163804 - RNA, 19 nt, Homo sapiens
  misc_RNA (1)...(19): siRNA sense strand
aaagaaggaugcaaagaaa

SEQ ID NO: 2163805 - RNA, 19 nt, Homo sapiens
  misc_RNA (1)...(19): siRNA sense strand
ggaacagacuccauucaga

SEQ ID NO: 2163806 - RNA, 19 nt, Homo sapiens
  misc_RNA (1)...(19): siRNA sense strand
ggaauuacucacagaauaa

SEQ ID NO: 2163807 - RNA, 19 nt, Homo sapiens
  misc_RNA (1)...(19): siRNA sense strand
agaaagauaucaagaagga

SEQ ID NO: 2163808 - RNA, 19 nt, Homo sapiens
  misc_RNA (1)...(19): siRNA sense strand
ucagacaucuuuauacuuc

SEQ ID NO: 2163809 - RNA, 19 nt, Homo sapiens
  misc_RNA (1)...(19): siRNA sense strand
cuacugaaauggaaucuga

SEQ ID NO: 2163810 - RNA, 19 nt, Homo sapiens
  misc_RNA (1)...(19): siRNA sense strand
ggaagaaagauucaaagaa

SEQ ID NO: 2163811 - RNA, 19 nt, Homo sapiens
  misc_RNA (1)...(19): siRNA sense strand
ucaaagaauuccaagaaga

SEQ ID NO: 2163812 - RNA, 19 nt, Homo sapiens
  misc_RNA (1)...(19): siRNA sense strand
gaaaggaaagauacaaaga

SEQ ID NO: 2163813 - RNA, 19 nt, Homo sapiens
  misc_RNA (1)...(19): siRNA sense strand
caaaggaugcuaagaaaga

SEQ ID NO: 2163814 - RNA, 19 nt, Homo sapiens
  misc_RNA (1)...(19): siRNA sense strand
ggucaaagacuaguaauga

SEQ ID NO: 2163815 - RNA, 19 nt, Homo sapiens
  misc_RNA (1)...(19): siRNA sense strand
aaucugaacuggagucaaa

SEQ ID NO: 2163816 - RNA, 19 nt, Homo sapiens
  misc_RNA (1)...(19): siRNA sense strand
ggaaagauacaaagaagga

SEQ ID NO: 2163817 - RNA, 19 nt, Homo sapiens
  misc_RNA (1)...(19): siRNA sense strand
caaaggagagucagaaaga

SEQ ID NO: 2163818 - RNA, 19 nt, Homo sapiens
  misc_RNA (1)...(19): siRNA sense strand
caagaaggaugcaagaaag

SEQ ID NO: 2163819 - RNA, 19 nt, Homo sapiens
  misc_RNA (1)...(19): siRNA sense strand
gaaaagcucugaugcugaa

SEQ ID NO: 2163820 - RNA, 19 nt, Homo sapiens
  misc_RNA (1)...(19): siRNA sense strand
caacaaauccagaauccaa

SEQ ID NO: 2163821 - RNA, 19 nt, Homo sapiens
  misc_RNA (1)...(19): siRNA sense strand
gaugaagagucuacugaug

SEQ ID NO: 2163822 - RNA, 19 nt, Homo sapiens
  misc_RNA (1)...(19): siRNA sense strand
gaggaacaccuuugaagaa

SEQ ID NO: 2163823 - RNA, 19 nt, Homo sapiens
  misc_RNA (1)...(19): siRNA sense strand
gcacaucugcaaauucaaa

SEQ ID NO: 2163824 - RNA, 19 nt, Homo sapiens
  misc_RNA (1)...(19): siRNA sense strand
ucagagauuugcucagaaa

SEQ ID NO: 2163825 - RNA, 19 nt, Homo sapiens
  misc_RNA (1)...(19): siRNA sense strand
gaagacaaacacugaauuc

SEQ ID NO: 2163826 - RNA, 19 nt, Homo sapiens
  misc_RNA (1)...(19): siRNA sense strand
aagaaacacucaaaggaaa

SEQ ID NO: 2163827 - RNA, 19 nt, Homo sapiens
  misc_RNA (1)...(19): siRNA sense strand
caagaaacacucaaaggaa

SEQ ID NO: 2163828 - RNA, 19 nt, Homo sapiens
  misc_RNA (1)...(19): siRNA sense strand
caaagaaugaugacaagaa

SEQ ID NO: 2163829 - RNA, 19 nt, Homo sapiens
  misc_RNA (1)...(19): siRNA sense strand
caaagaacaauccaaagaa

SEQ ID NO: 2163830 - RNA, 19 nt, Homo sapiens
  misc_RNA (1)...(19): siRNA sense strand
uggaaggacuggaaucaaa

SEQ ID NO: 2163831 - RNA, 19 nt, Homo sapiens
  misc_RNA (1)...(19): siRNA sense strand
uaucagagauuugcucaga

SEQ ID NO: 2163832 - RNA, 19 nt, Homo sapiens
  misc_RNA (1)...(19): siRNA sense strand
aggaauuacucacagaaua

SEQ ID NO: 2163833 - RNA, 19 nt, Homo sapiens
  misc_RNA (1)...(19): siRNA sense strand
ccagaaaccagcucauaaa

SEQ ID NO: 2163834 - RNA, 19 nt, Homo sapiens
  misc_RNA (1)...(19): siRNA sense strand
ccaagaagacaaacacuga

SEQ ID NO: 2163835 - RNA, 19 nt, Homo sapiens
  misc_RNA (1)...(19): siRNA sense strand
caagaaauuugaagaaagc

SEQ ID NO: 2163836 - RNA, 19 nt, Homo sapiens
  misc_RNA (1)...(19): siRNA sense strand
gaucccauaucagagauuu

SEQ ID NO: 2163837 - RNA, 19 nt, Homo sapiens
  misc_RNA (1)...(19): siRNA sense strand
ucaaagagaggauucagaa

SEQ ID NO: 2163838 - RNA, 19 nt, Homo sapiens
  misc_RNA (1)...(19): siRNA sense strand
ucugaagagucacuauaua

SEQ ID NO: 2163839 - RNA, 19 nt, Homo sapiens
  misc_RNA (1)...(19): siRNA sense strand
gaaaagaaagguucaaaga

SEQ ID NO: 2163840 - RNA, 19 nt, Homo sapiens
  misc_RNA (1)...(19): siRNA sense strand
ggaggaacaccuuugaaga

SEQ ID NO: 2163841 - RNA, 19 nt, Homo sapiens
  misc_RNA (1)...(19): siRNA sense strand
uaaagaaggacaagaaaca

SEQ ID NO: 2163842 - RNA, 19 nt, Homo sapiens
  misc_RNA (1)...(19): siRNA sense strand
caagaaugaugaagagucu

SEQ ID NO: 2163843 - RNA, 19 nt, Homo sapiens
  misc_RNA (1)...(19): siRNA sense strand
caaaguauacaaagaagga

SEQ ID NO: 2163844 - RNA, 19 nt, Homo sapiens
  misc_RNA (1)...(19): siRNA sense strand
gggacagucugaugaugaa

SEQ ID NO: 2163845 - RNA, 19 nt, Homo sapiens
  misc_RNA (1)...(19): siRNA sense strand
gcaaguacagguagaguuc

SEQ ID NO: 2163846 - RNA, 19 nt, Homo sapiens
  misc_RNA (1)...(19): siRNA sense strand
ccaagcaaauaguagaaga

SEQ ID NO: 2163847 - RNA, 19 nt, Homo sapiens
  misc_RNA (1)...(19): siRNA sense strand
ucaagaaggaugcaagaaa

SEQ ID NO: 2163848 - RNA, 19 nt, Homo sapiens
  misc_RNA (1)...(19): siRNA sense strand
gaugcaugguuaaggaauu

SEQ ID NO: 2163849 - RNA, 19 nt, Homo sapiens
  misc_RNA (1)...(19): siRNA sense strand
gcaaaggaugcaagaaaug

SEQ ID NO: 2163850 - RNA, 19 nt, Homo sapiens
  misc_RNA (1)...(19): siRNA sense strand
gcucugaugcugaaucuga

SEQ ID NO: 2163851 - RNA, 19 nt, Homo sapiens
  misc_RNA (1)...(19): siRNA sense strand
caaaggaugcaagaaauga

SEQ ID NO: 2163852 - RNA, 19 nt, Homo sapiens
  misc_RNA (1)...(19): siRNA sense strand
uggcacaucugcaaauuca

SEQ ID NO: 2163853 - RNA, 19 nt, Homo sapiens
  misc_RNA (1)...(19): siRNA sense strand
gcaagaaaugauucaagaa

SEQ ID NO: 2163854 - RNA, 19 nt, Homo sapiens
  misc_RNA (1)...(19): siRNA sense strand
acaaagaacaauccaaaga

SEQ ID NO: 2163855 - RNA, 19 nt, Homo sapiens
  misc_RNA (1)...(19): siRNA sense strand
gaaaggacacagagucuac

SEQ ID NO: 2163856 - RNA, 19 nt, Homo sapiens
  misc_RNA (1)...(19): siRNA sense strand
gcuaagaaagauucaaaga

SEQ ID NO: 2163857 - RNA, 19 nt, Homo sapiens
  misc_RNA (1)...(19): siRNA sense strand
gccagaaaccagcucauaa

SEQ ID NO: 2163858 - RNA, 19 nt, Homo sapiens
  misc_RNA (1)...(19): siRNA sense strand
aaucaaagguucagauacu

SEQ ID NO: 2163859 - RNA, 19 nt, Homo sapiens
  misc_RNA (1)...(19): siRNA sense strand
cuacugaugcugaauuuga

SEQ ID NO: 2163860 - RNA, 19 nt, Homo sapiens
  misc_RNA (1)...(19): siRNA sense strand
ugcaagaaaugauucaaga

SEQ ID NO: 2163861 - RNA, 19 nt, Homo sapiens
  misc_RNA (1)...(19): siRNA sense strand
auacaaagaaggacacaaa

SEQ ID NO: 2163862 - RNA, 19 nt, Homo sapiens
  misc_RNA (1)...(19): siRNA sense strand
gggaagaaagauucaaaga

SEQ ID NO: 2163863 - RNA, 19 nt, Homo sapiens
  misc_RNA (1)...(19): siRNA sense strand
ucaagaaagaugacaagaa

SEQ ID NO: 2163864 - RNA, 19 nt, Homo sapiens
  misc_RNA (1)...(19): siRNA sense strand
cucaaaggaugcuaagaaa

SEQ ID NO: 2163865 - RNA, 19 nt, Homo sapiens
  misc_RNA (1)...(19): siRNA sense strand
ugaagaaagauuccaagaa

SEQ ID NO: 2163866 - RNA, 19 nt, Homo sapiens
  misc_RNA (1)...(19): siRNA sense strand
gacuaguaaugaucccaua

SEQ ID NO: 2163867 - RNA, 19 nt, Homo sapiens
  misc_RNA (1)...(19): siRNA sense strand
gaagagucacuauauaaac

SEQ ID NO: 2163868 - RNA, 19 nt, Homo sapiens
  misc_RNA (1)...(19): siRNA sense strand
cugaagagucacuauauaa

SEQ ID NO: 2163869 - RNA, 19 nt, Homo sapiens
  misc_RNA (1)...(19): siRNA sense strand
ggacacagagucuacugau

SEQ ID NO: 2163870 - RNA, 19 nt, Homo sapiens
  misc_RNA (1)...(19): siRNA sense strand
gaaggacuggaaucaaaga

SEQ ID NO: 2163871 - RNA, 19 nt, Homo sapiens
  misc_RNA (1)...(19): siRNA sense strand
ggacacagagucuacugau

SEQ ID NO: 2163872 - RNA, 19 nt, Homo sapiens
  misc_RNA (1)...(19): siRNA sense strand
ggacaagaaacacucaaag

SEQ ID NO: 2163873 - RNA, 19 nt, Homo sapiens
  misc_RNA (1)...(19): siRNA sense strand
ugcagaaucuacugaaaug

SEQ ID NO: 2163874 - RNA, 19 nt, Homo sapiens
  misc_RNA (1)...(19): siRNA sense strand
cuacugaugcugacucuga

SEQ ID NO: 2163875 - RNA, 19 nt, Homo sapiens
  misc_RNA (1)...(19): siRNA sense strand
aaaagucugucaagaauga

SEQ ID NO: 2163876 - RNA, 19 nt, Homo sapiens
  misc_RNA (1)...(19): siRNA sense strand
acaaagaaguacccagagu

SEQ ID NO: 2163877 - RNA, 19 nt, Homo sapiens
  misc_RNA (1)...(19): siRNA sense strand
aggaacaccuuugaagaaa

SEQ ID NO: 2163878 - RNA, 19 nt, Homo sapiens
  misc_RNA (1)...(19): siRNA sense strand
aaaggagguucauaugcaa

SEQ ID NO: 2163879 - RNA, 19 nt, Homo sapiens
  misc_RNA (1)...(19): siRNA sense strand
ccauucagacaucuuuaua

SEQ ID NO: 2163880 - RNA, 19 nt, Homo sapiens
  misc_RNA (1)...(19): siRNA sense strand
acaagaaacacucaaagga

SEQ ID NO: 2163881 - RNA, 19 nt, Homo sapiens
  misc_RNA (1)...(19): siRNA sense strand
ggccagaaaccagcucaua

SEQ ID NO: 2163882 - RNA, 19 nt, Homo sapiens
  misc_RNA (1)...(19): siRNA sense strand
guuccuccaucaagagaaa

SEQ ID NO: 2163883 - RNA, 19 nt, Homo sapiens
  misc_RNA (1)...(19): siRNA sense strand
uagaguuccuccaucaaga

SEQ ID NO: 2163884 - RNA, 19 nt, Homo sapiens
  misc_RNA (1)...(19): siRNA sense strand
agaaucuacugaaauggaa

SEQ ID NO: 2163885 - RNA, 19 nt, Homo sapiens
  misc_RNA (1)...(19): siRNA sense strand
gaacaauccaagaagucaa

SEQ ID NO: 2163886 - RNA, 19 nt, Homo sapiens
  misc_RNA (1)...(19): siRNA sense strand
gacacagagucuacugaug

SEQ ID NO: 2163887 - RNA, 19 nt, Homo sapiens
  misc_RNA (1)...(19): siRNA sense strand
aagaaagcuucaaagaaug

SEQ ID NO: 2163888 - RNA, 19 nt, Homo sapiens
  misc_RNA (1)...(19): siRNA sense strand
aaggaaagauacaaagaag

SEQ ID NO: 2163889 - RNA, 19 nt, Homo sapiens
  misc_RNA (1)...(19): siRNA sense strand
cucaaaggaugaaaggaaa

SEQ ID NO: 2163890 - RNA, 19 nt, Homo sapiens
  misc_RNA (1)...(19): siRNA sense strand
gacacagagucuacugaug

SEQ ID NO: 2163891 - RNA, 19 nt, Homo sapiens
  misc_RNA (1)...(19): siRNA sense strand
agaacaauccaaagaaaga

SEQ ID NO: 2163892 - RNA, 19 nt, Homo sapiens
  misc_RNA (1)...(19): siRNA sense strand
acacugaauuccuacauac

SEQ ID NO: 2163893 - RNA, 19 nt, Homo sapiens
  misc_RNA (1)...(19): siRNA sense strand
guaaagcaggauacaaugu

SEQ ID NO: 2163894 - RNA, 19 nt, Homo sapiens
  misc_RNA (1)...(19): siRNA sense strand
aagaaagguucaaagaaag

SEQ ID NO: 2163895 - RNA, 19 nt, Homo sapiens
  misc_RNA (1)...(19): siRNA sense strand
cugaauuccuacauacaaa

SEQ ID NO: 2163896 - RNA, 19 nt, Homo sapiens
  misc_RNA (1)...(19): siRNA sense strand
guuaaagaaggacaagaaa

SEQ ID NO: 2163897 - RNA, 19 nt, Homo sapiens
  misc_RNA (1)...(19): siRNA sense strand
caaacugacuguuggauuu

SEQ ID NO: 2163898 - RNA, 19 nt, Homo sapiens
  misc_RNA (1)...(19): siRNA sense strand
aaaccaaccuggcaugaaa

SEQ ID NO: 2163899 - RNA, 19 nt, Homo sapiens
  misc_RNA (1)...(19): siRNA sense strand
gaaguaaacgaucaacaaa

SEQ ID NO: 2163900 - RNA, 19 nt, Homo sapiens
  misc_RNA (1)...(19): siRNA sense strand
gcacgaaccaaucaaguuu

SEQ ID NO: 2163901 - RNA, 19 nt, Homo sapiens
  misc_RNA (1)...(19): siRNA sense strand
ggaaucaacugggcaugaa

SEQ ID NO: 2163902 - RNA, 19 nt, Homo sapiens
  misc_RNA (1)...(19): siRNA sense strand
aaacaagcauggauuacuu

SEQ ID NO: 2163903 - RNA, 19 nt, Homo sapiens
  misc_RNA (1)...(19): siRNA sense strand
gaaccaaucaaguuuauca

SEQ ID NO: 2163904 - RNA, 19 nt, Homo sapiens
  misc_RNA (1)...(19): siRNA sense strand
guacaaaccuaccagacau

SEQ ID NO: 2163905 - RNA, 19 nt, Homo sapiens
  misc_RNA (1)...(19): siRNA sense strand
guacaaaccuaccagacau

SEQ ID NO: 2163906 - RNA, 19 nt, Homo sapiens
  misc_RNA (1)...(19): siRNA sense strand
caaaugcacuaccgcaaau

SEQ ID NO: 2163907 - RNA, 19 nt, Homo sapiens
  misc_RNA (1)...(19): siRNA sense strand
aacaagaccugaaccaauu

SEQ ID NO: 2163908 - RNA, 19 nt, Homo sapiens
  misc_RNA (1)...(19): siRNA sense strand
gaaccaaguggacaugaaa

SEQ ID NO: 2163909 - RNA, 19 nt, Homo sapiens
  misc_RNA (1)...(19): siRNA sense strand
gguauaagccaaccaguga

SEQ ID NO: 2163910 - RNA, 19 nt, Homo sapiens
  misc_RNA (1)...(19): siRNA sense strand
gcacaaaccaaucagguau

SEQ ID NO: 2163911 - RNA, 19 nt, Homo sapiens
  misc_RNA (1)...(19): siRNA sense strand
gaaccaaguggacaugaaa

SEQ ID NO: 2163912 - RNA, 19 nt, Homo sapiens
  misc_RNA (1)...(19): siRNA sense strand
gaacuaguccugagugaag

SEQ ID NO: 2163913 - RNA, 19 nt, Homo sapiens
  misc_RNA (1)...(19): siRNA sense strand
gcacuagccaaucaaguaa

SEQ ID NO: 2163914 - RNA, 19 nt, Homo sapiens
  misc_RNA (1)...(19): siRNA sense strand
caacaaagcaggaaucaac

SEQ ID NO: 2163915 - RNA, 19 nt, Homo sapiens
  misc_RNA (1)...(19): siRNA sense strand
ggacuggcaagguacuuua

SEQ ID NO: 2163916 - RNA, 19 nt, Homo sapiens
  misc_RNA (1)...(19): siRNA sense strand
gaaccaagcaggcauaaac

SEQ ID NO: 2163917 - RNA, 19 nt, Homo sapiens
  misc_RNA (1)...(19): siRNA sense strand
gguaugagccaaccaguga

SEQ ID NO: 2163918 - RNA, 19 nt, Homo sapiens
  misc_RNA (1)...(19): siRNA sense strand
caaacucacuugguaugaa

SEQ ID NO: 2163919 - RNA, 19 nt, Homo sapiens
  misc_RNA (1)...(19): siRNA sense strand
agaauuggcugccugugaa

SEQ ID NO: 2163920 - RNA, 19 nt, Homo sapiens
  misc_RNA (1)...(19): siRNA sense strand
caaaugggcaugaggcaaa

SEQ ID NO: 2163921 - RNA, 19 nt, Homo sapiens
  misc_RNA (1)...(19): siRNA sense strand
caacaagaccugaaccaau

SEQ ID NO: 2163922 - RNA, 19 nt, Homo sapiens
  misc_RNA (1)...(19): siRNA sense strand
gcaagccuauaugaaauga

SEQ ID NO: 2163923 - RNA, 19 nt, Homo sapiens
  misc_RNA (1)...(19): siRNA sense strand
gcaagccuauaugaaauga

SEQ ID NO: 2163924 - RNA, 19 nt, Homo sapiens
  misc_RNA (1)...(19): siRNA sense strand
acaaaccaaucagguauaa

SEQ ID NO: 2163925 - RNA, 19 nt, Homo sapiens
  misc_RNA (1)...(19): siRNA sense strand
ccucaucccuucacuuuca

SEQ ID NO: 2163926 - RNA, 19 nt, Homo sapiens
  misc_RNA (1)...(19): siRNA sense strand
acacaagcuuaccaagaua

SEQ ID NO: 2163927 - RNA, 19 nt, Homo sapiens
  misc_RNA (1)...(19): siRNA sense strand
cacacaagcuuaccaagau

SEQ ID NO: 2163928 - RNA, 19 nt, Homo sapiens
  misc_RNA (1)...(19): siRNA sense strand
ggagacugcccagaaauuu

SEQ ID NO: 2163929 - RNA, 19 nt, Homo sapiens
  misc_RNA (1)...(19): siRNA sense strand
ccaaucaaguuuaucagau

SEQ ID NO: 2163930 - RNA, 19 nt, Homo sapiens
  misc_RNA (1)...(19): siRNA sense strand
gacacuagccaaucaugua

SEQ ID NO: 2163931 - RNA, 19 nt, Homo sapiens
  misc_RNA (1)...(19): siRNA sense strand
gugcaagccuauaugaaau

SEQ ID NO: 2163932 - RNA, 19 nt, Homo sapiens
  misc_RNA (1)...(19): siRNA sense strand
gugcaagccuauaugaaau

SEQ ID NO: 2163933 - RNA, 19 nt, Homo sapiens
  misc_RNA (1)...(19): siRNA sense strand
aaaccaacccgacaugaaa

SEQ ID NO: 2163934 - RNA, 19 nt, Homo sapiens
  misc_RNA (1)...(19): siRNA sense strand
ccagacacauggcaauuag

SEQ ID NO: 2163935 - RNA, 19 nt, Homo sapiens
  misc_RNA (1)...(19): siRNA sense strand
aagcauggauuacuuucaa

SEQ ID NO: 2163936 - RNA, 19 nt, Homo sapiens
  misc_RNA (1)...(19): siRNA sense strand
ccagugauguggcaacuag

SEQ ID NO: 2163937 - RNA, 19 nt, Homo sapiens
  misc_RNA (1)...(19): siRNA sense strand
caaccaaacagguauaauc

SEQ ID NO: 2163938 - RNA, 19 nt, Homo sapiens
  misc_RNA (1)...(19): siRNA sense strand
gcacaaacucacuugguau

SEQ ID NO: 2163939 - RNA, 19 nt, Homo sapiens
  misc_RNA (1)...(19): siRNA sense strand
gaaauuuugcgacugauua

SEQ ID NO: 2163940 - RNA, 19 nt, Homo sapiens
  misc_RNA (1)...(19): siRNA sense strand
ggcaaacaagcauggauua

SEQ ID NO: 2163941 - RNA, 19 nt, Homo sapiens
  misc_RNA (1)...(19): siRNA sense strand
ggcacuagccaaucaagua

SEQ ID NO: 2163942 - RNA, 19 nt, Homo sapiens
  misc_RNA (1)...(19): siRNA sense strand
gcacgaaccaaucagguau

SEQ ID NO: 2163943 - RNA, 19 nt, Homo sapiens
  misc_RNA (1)...(19): siRNA sense strand
gagcaaagcaggcauaagc

SEQ ID NO: 2163944 - RNA, 19 nt, Homo sapiens
  misc_RNA (1)...(19): siRNA sense strand
ggagugcaagccuauauga

SEQ ID NO: 2163945 - RNA, 19 nt, Homo sapiens
  misc_RNA (1)...(19): siRNA sense strand
gcaaacugacuguuggauu

SEQ ID NO: 2163946 - RNA, 19 nt, Homo sapiens
  misc_RNA (1)...(19): siRNA sense strand
ggagugcaagccuauauga

SEQ ID NO: 2163947 - RNA, 19 nt, Homo sapiens
  misc_RNA (1)...(19): siRNA sense strand
gcaaauaggcacgaaccaa

SEQ ID NO: 2163948 - RNA, 19 nt, Homo sapiens
  misc_RNA (1)...(19): siRNA sense strand
caagauagccaucacaacu

SEQ ID NO: 2163949 - RNA, 19 nt, Homo sapiens
  misc_RNA (1)...(19): siRNA sense strand
aaauggacaugaaccaaug

SEQ ID NO: 2163950 - RNA, 19 nt, Homo sapiens
  misc_RNA (1)...(19): siRNA sense strand
caaauaggcacgaaccaau

SEQ ID NO: 2163951 - RNA, 19 nt, Homo sapiens
  misc_RNA (1)...(19): siRNA sense strand
gauuugccauguacuacuu

SEQ ID NO: 2163952 - RNA, 19 nt, Homo sapiens
  misc_RNA (1)...(19): siRNA sense strand
gcaacuagacagccaguca

SEQ ID NO: 2163953 - RNA, 19 nt, Homo sapiens
  misc_RNA (1)...(19): siRNA sense strand
caacugggcaugaaccaau

SEQ ID NO: 2163954 - RNA, 19 nt, Homo sapiens
  misc_RNA (1)...(19): siRNA sense strand
caaccaagcaugagacaag

SEQ ID NO: 2163955 - RNA, 19 nt, Homo sapiens
  misc_RNA (1)...(19): siRNA sense strand
ccaaaugcacuaccgcaaa

SEQ ID NO: 2163956 - RNA, 19 nt, Homo sapiens
  misc_RNA (1)...(19): siRNA sense strand
caaccaagcaugagacaag

SEQ ID NO: 2163957 - RNA, 19 nt, Homo sapiens
  misc_RNA (1)...(19): siRNA sense strand
caacuaguccugagcaaag

SEQ ID NO: 2163958 - RNA, 19 nt, Homo sapiens
  misc_RNA (1)...(19): siRNA sense strand
ugaaccaaauggacaugaa

SEQ ID NO: 2163959 - RNA, 19 nt, Homo sapiens
  misc_RNA (1)...(19): siRNA sense strand
ugaaccaaauggacaugaa

SEQ ID NO: 2163960 - RNA, 19 nt, Homo sapiens
  misc_RNA (1)...(19): siRNA sense strand
caaccaggcacauggcaaa

SEQ ID NO: 2163961 - RNA, 19 nt, Homo sapiens
  misc_RNA (1)...(19): siRNA sense strand
caaccaggcacauggcaaa

SEQ ID NO: 2163962 - RNA, 19 nt, Homo sapiens
  misc_RNA (1)...(19): siRNA sense strand
gcgaacuaguccugaguga

SEQ ID NO: 2163963 - RNA, 19 nt, Homo sapiens
  misc_RNA (1)...(19): siRNA sense strand
caaauggacaugaaccaau

SEQ ID NO: 2163964 - RNA, 19 nt, Homo sapiens
  misc_RNA (1)...(19): siRNA sense strand
agaaguaaacgaucaacaa

SEQ ID NO: 2163965 - RNA, 19 nt, Homo sapiens
  misc_RNA (1)...(19): siRNA sense strand
gcgacugauuaaagaauug

SEQ ID NO: 2163966 - RNA, 19 nt, Homo sapiens
  misc_RNA (1)...(19): siRNA sense strand
ugaaccaaguggacaugaa

SEQ ID NO: 2163967 - RNA, 19 nt, Homo sapiens
  misc_RNA (1)...(19): siRNA sense strand
ucacacaagcuuaccaaga

SEQ ID NO: 2163968 - RNA, 19 nt, Homo sapiens
  misc_RNA (1)...(19): siRNA sense strand
ugaaccaaguggacaugaa

SEQ ID NO: 2163969 - RNA, 19 nt, Homo sapiens
  misc_RNA (1)...(19): siRNA sense strand
caauuaggcacaagccaaa

SEQ ID NO: 2163970 - RNA, 19 nt, Homo sapiens
  misc_RNA (1)...(19): siRNA sense strand
ugaaacaaccagacacaug

SEQ ID NO: 2163971 - RNA, 19 nt, Homo sapiens
  misc_RNA (1)...(19): siRNA sense strand
uaaaccaacccgacaugaa

SEQ ID NO: 2163972 - RNA, 19 nt, Homo sapiens
  misc_RNA (1)...(19): siRNA sense strand
ggcaugaggcaaucaggua

SEQ ID NO: 2163973 - RNA, 19 nt, Homo sapiens
  misc_RNA (1)...(19): siRNA sense strand
ccaggcacauggcaauuag

SEQ ID NO: 2163974 - RNA, 19 nt, Homo sapiens
  misc_RNA (1)...(19): siRNA sense strand
ggcaugaggcaaucaggua

SEQ ID NO: 2163975 - RNA, 19 nt, Homo sapiens
  misc_RNA (1)...(19): siRNA sense strand
agcacaaacucacuuggua

SEQ ID NO: 2163976 - RNA, 19 nt, Homo sapiens
  misc_RNA (1)...(19): siRNA sense strand
caacuagacaugagacagu

SEQ ID NO: 2163977 - RNA, 19 nt, Homo sapiens
  misc_RNA (1)...(19): siRNA sense strand
caaccaggcccaagccaau

SEQ ID NO: 2163978 - RNA, 19 nt, Homo sapiens
  misc_RNA (1)...(19): siRNA sense strand
caacuaggcaugagacaac

SEQ ID NO: 2163979 - RNA, 19 nt, Homo sapiens
  misc_RNA (1)...(19): siRNA sense strand
gccaucagccaaucaguug

SEQ ID NO: 2163980 - RNA, 19 nt, Homo sapiens
  misc_RNA (1)...(19): siRNA sense strand
ccagaaauuuugcgacuga

SEQ ID NO: 2163981 - RNA, 19 nt, Homo sapiens
  misc_RNA (1)...(19): siRNA sense strand
caaccaagugugagccaaa

SEQ ID NO: 2163982 - RNA, 19 nt, Homo sapiens
  misc_RNA (1)...(19): siRNA sense strand
aguaggcaccagccaauua

SEQ ID NO: 2163983 - RNA, 19 nt, Homo sapiens
  misc_RNA (1)...(19): siRNA sense strand
caaucaaguuuaucagacu

SEQ ID NO: 2163984 - RNA, 19 nt, Homo sapiens
  misc_RNA (1)...(19): siRNA sense strand
cucauggacuggcaaggua

SEQ ID NO: 2163985 - RNA, 19 nt, Homo sapiens
  misc_RNA (1)...(19): siRNA sense strand
gcuagaugcaauggaguua

SEQ ID NO: 2163986 - RNA, 19 nt, Homo sapiens
  misc_RNA (1)...(19): siRNA sense strand
ggcacaaaccaaucaggua

SEQ ID NO: 2163987 - RNA, 19 nt, Homo sapiens
  misc_RNA (1)...(19): siRNA sense strand
cauguaagaaccaaacaga

SEQ ID NO: 2163988 - RNA, 19 nt, Homo sapiens
  misc_RNA (1)...(19): siRNA sense strand
acacuagccaaucauguaa

SEQ ID NO: 2163989 - RNA, 19 nt, Homo sapiens
  misc_RNA (1)...(19): siRNA sense strand
caaguaggcaccagccaau

SEQ ID NO: 2163990 - RNA, 19 nt, Homo sapiens
  misc_RNA (1)...(19): siRNA sense strand
agauagccaucacaacuca

SEQ ID NO: 2163991 - RNA, 19 nt, Homo sapiens
  misc_RNA (1)...(19): siRNA sense strand
ggcaggagccaaccaagug

SEQ ID NO: 2163992 - RNA, 19 nt, Homo sapiens
  misc_RNA (1)...(19): siRNA sense strand
caaguaggcaccagccaau

SEQ ID NO: 2163993 - RNA, 19 nt, Homo sapiens
  misc_RNA (1)...(19): siRNA sense strand
uaaaccagccaagcacaaa

SEQ ID NO: 2163994 - RNA, 19 nt, Homo sapiens
  misc_RNA (1)...(19): siRNA sense strand
gacgcaaaccaaucaaguu

SEQ ID NO: 2163995 - RNA, 19 nt, Homo sapiens
  misc_RNA (1)...(19): siRNA sense strand
acgaaccaaucaaguuuau

SEQ ID NO: 2163996 - RNA, 19 nt, Homo sapiens
  misc_RNA (1)...(19): siRNA sense strand
caggcaugcugcaacaaga

SEQ ID NO: 2163997 - RNA, 19 nt, Homo sapiens
  misc_RNA (1)...(19): siRNA sense strand
gaaggaaggucgcaacaaa

SEQ ID NO: 2163998 - RNA, 19 nt, Homo sapiens
  misc_RNA (1)...(19): siRNA sense strand
gaaagagaauugcugagua

SEQ ID NO: 2163999 - RNA, 19 nt, Homo sapiens
  misc_RNA (1)...(19): siRNA sense strand
caacugcaguaauuguuua

SEQ ID NO: 2164000 - RNA, 19 nt, Homo sapiens
  misc_RNA (1)...(19): siRNA sense strand
ggagaggccuacccugaaa

SEQ ID NO: 2164001 - RNA, 19 nt, Homo sapiens
  misc_RNA (1)...(19): siRNA sense strand
caacucggcuccacaccua

SEQ ID NO: 2164002 - RNA, 19 nt, Homo sapiens
  misc_RNA (1)...(19): siRNA sense strand
ggacagcgcuuacgaucca

SEQ ID NO: 2164003 - RNA, 19 nt, Homo sapiens
  misc_RNA (1)...(19): siRNA sense strand
gcaacagccugaaggauag

SEQ ID NO: 2164004 - RNA, 19 nt, Homo sapiens
  misc_RNA (1)...(19): siRNA sense strand
caagaggacugucgaugug

SEQ ID NO: 2164005 - RNA, 19 nt, Homo sapiens
  misc_RNA (1)...(19): siRNA sense strand
ucaaggaccugaacgacaa

SEQ ID NO: 2164006 - RNA, 19 nt, Homo sapiens
  misc_RNA (1)...(19): siRNA sense strand
gaauagccgagcccauuua

SEQ ID NO: 2164007 - RNA, 19 nt, Homo sapiens
  misc_RNA (1)...(19): siRNA sense strand
caaaagaaaucaagcaaga

SEQ ID NO: 2164008 - RNA, 19 nt, Homo sapiens
  misc_RNA (1)...(19): siRNA sense strand
ugaaggauaucguucucua

SEQ ID NO: 2164009 - RNA, 19 nt, Homo sapiens
  misc_RNA (1)...(19): siRNA sense strand
acaaagagauccggaccua

SEQ ID NO: 2164010 - RNA, 19 nt, Homo sapiens
  misc_RNA (1)...(19): siRNA sense strand
ggcaacagccugaaggaua

SEQ ID NO: 2164011 - RNA, 19 nt, Homo sapiens
  misc_RNA (1)...(19): siRNA sense strand
ugagagcacuuuccugaau

SEQ ID NO: 2164012 - RNA, 19 nt, Homo sapiens
  misc_RNA (1)...(19): siRNA sense strand
caauacaaccucacaauuc

SEQ ID NO: 2164013 - RNA, 19 nt, Homo sapiens
  misc_RNA (1)...(19): siRNA sense strand
ccuccucccucaacuauuu

SEQ ID NO: 2164014 - RNA, 19 nt, Homo sapiens
  misc_RNA (1)...(19): siRNA sense strand
gcuuuggcgugcagacuua

SEQ ID NO: 2164015 - RNA, 19 nt, Homo sapiens
  misc_RNA (1)...(19): siRNA sense strand
ugaagcgucugaaggauau

SEQ ID NO: 2164016 - RNA, 19 nt, Homo sapiens
  misc_RNA (1)...(19): siRNA sense strand
gcgagcagcacgaccaaua

SEQ ID NO: 2164017 - RNA, 19 nt, Homo sapiens
  misc_RNA (1)...(19): siRNA sense strand
gcgccuaucugcucucugu

SEQ ID NO: 2164018 - RNA, 19 nt, Homo sapiens
  misc_RNA (1)...(19): siRNA sense strand
gcaagaggacugucgaugu

SEQ ID NO: 2164019 - RNA, 19 nt, Homo sapiens
  misc_RNA (1)...(19): siRNA sense strand
gaccaaggcguucgaauuc

SEQ ID NO: 2164020 - RNA, 19 nt, Homo sapiens
  misc_RNA (1)...(19): siRNA sense strand
ucaaggugcuggccaagga

SEQ ID NO: 2164021 - RNA, 19 nt, Homo sapiens
  misc_RNA (1)...(19): siRNA sense strand
ucaacaaugucaacaaugg

SEQ ID NO: 2164022 - RNA, 19 nt, Homo sapiens
  misc_RNA (1)...(19): siRNA sense strand
ggagcaguaugucaacaau

SEQ ID NO: 2164023 - RNA, 19 nt, Homo sapiens
  misc_RNA (1)...(19): siRNA sense strand
cugcugaugucgaggcuua

SEQ ID NO: 2164024 - RNA, 19 nt, Homo sapiens
  misc_RNA (1)...(19): siRNA sense strand
gagagcacuuuccugaaug

SEQ ID NO: 2164025 - RNA, 19 nt, Homo sapiens
  misc_RNA (1)...(19): siRNA sense strand
gaaaucaagcaagaagaaa

SEQ ID NO: 2164026 - RNA, 19 nt, Homo sapiens
  misc_RNA (1)...(19): siRNA sense strand
gaggagaaagugagccuaa

SEQ ID NO: 2164027 - RNA, 19 nt, Homo sapiens
  misc_RNA (1)...(19): siRNA sense strand
cacuacagcuuccgaauca

SEQ ID NO: 2164028 - RNA, 19 nt, Homo sapiens
  misc_RNA (1)...(19): siRNA sense strand
gaaggauaucguucucuaa

SEQ ID NO: 2164029 - RNA, 19 nt, Homo sapiens
  misc_RNA (1)...(19): siRNA sense strand
ucaccaagcagaagauuga

SEQ ID NO: 2164030 - RNA, 19 nt, Homo sapiens
  misc_RNA (1)...(19): siRNA sense strand
aauacaaccucacaauuca

SEQ ID NO: 2164031 - RNA, 19 nt, Homo sapiens
  misc_RNA (1)...(19): siRNA sense strand
ccaauacaaccucacaauu

SEQ ID NO: 2164032 - RNA, 19 nt, Homo sapiens
  misc_RNA (1)...(19): siRNA sense strand
ccagcagccugaccugauu

SEQ ID NO: 2164033 - RNA, 19 nt, Homo sapiens
  misc_RNA (1)...(19): siRNA sense strand
ggaaagagaauugcugagu

SEQ ID NO: 2164034 - RNA, 19 nt, Homo sapiens
  misc_RNA (1)...(19): siRNA sense strand
ggccuucccucacugcaaa

SEQ ID NO: 2164035 - RNA, 19 nt, Homo sapiens
  misc_RNA (1)...(19): siRNA sense strand
ccaaggcguucgaauucaa

SEQ ID NO: 2164036 - RNA, 19 nt, Homo sapiens
  misc_RNA (1)...(19): siRNA sense strand
ucugugaacuuguccuuga

SEQ ID NO: 2164037 - RNA, 19 nt, Homo sapiens
  misc_RNA (1)...(19): siRNA sense strand
ucaucgcgcugucuauuga

SEQ ID NO: 2164038 - RNA, 19 nt, Homo sapiens
  misc_RNA (1)...(19): siRNA sense strand
aaagagaauugcugaguac

SEQ ID NO: 2164039 - RNA, 19 nt, Homo sapiens
  misc_RNA (1)...(19): siRNA sense strand
gcgggcauccucuuuguaa

SEQ ID NO: 2164040 - RNA, 19 nt, Homo sapiens
  misc_RNA (1)...(19): siRNA sense strand
gcucaucacugacgaaaau

SEQ ID NO: 2164041 - RNA, 19 nt, Homo sapiens
  misc_RNA (1)...(19): siRNA sense strand
ucauuaaucucaaguacuc

SEQ ID NO: 2164042 - RNA, 19 nt, Homo sapiens
  misc_RNA (1)...(19): siRNA sense strand
gugaacuuguccuugauuu

SEQ ID NO: 2164043 - RNA, 19 nt, Homo sapiens
  misc_RNA (1)...(19): siRNA sense strand
gcggugagcgugccagaaa

SEQ ID NO: 2164044 - RNA, 19 nt, Homo sapiens
  misc_RNA (1)...(19): siRNA sense strand
cccgugaucuggagcagua

SEQ ID NO: 2164045 - RNA, 19 nt, Homo sapiens
  misc_RNA (1)...(19): siRNA sense strand
uaccaucacucuuucaaca

SEQ ID NO: 2164046 - RNA, 19 nt, Homo sapiens
  misc_RNA (1)...(19): siRNA sense strand
gcagaagauugaccgugau

SEQ ID NO: 2164047 - RNA, 19 nt, Homo sapiens
  misc_RNA (1)...(19): siRNA sense strand
ggacggugauugccaacgu

SEQ ID NO: 2164048 - RNA, 19 nt, Homo sapiens
  misc_RNA (1)...(19): siRNA sense strand
ggaaaucugcgugauaaag

SEQ ID NO: 2164049 - RNA, 19 nt, Homo sapiens
  misc_RNA (1)...(19): siRNA sense strand
gcugauagcgagaaaguca

SEQ ID NO: 2164050 - RNA, 19 nt, Homo sapiens
  misc_RNA (1)...(19): siRNA sense strand
agaugaacguugucaguug

SEQ ID NO: 2164051 - RNA, 19 nt, Homo sapiens
  misc_RNA (1)...(19): siRNA sense strand
gcuccaaguccuccuauga

SEQ ID NO: 2164052 - RNA, 19 nt, Homo sapiens
  misc_RNA (1)...(19): siRNA sense strand
ucaccuaugucuccaucaa

SEQ ID NO: 2164053 - RNA, 19 nt, Homo sapiens
  misc_RNA (1)...(19): siRNA sense strand
uuaccgugcucaucacuga

SEQ ID NO: 2164054 - RNA, 19 nt, Homo sapiens
  misc_RNA (1)...(19): siRNA sense strand
ugucaacaaugucaacaau

SEQ ID NO: 2164055 - RNA, 19 nt, Homo sapiens
  misc_RNA (1)...(19): siRNA sense strand
cagcggagccuguauugug

SEQ ID NO: 2164056 - RNA, 19 nt, Homo sapiens
  misc_RNA (1)...(19): siRNA sense strand
gugaauagccgagcccauu

SEQ ID NO: 2164057 - RNA, 19 nt, Homo sapiens
  misc_RNA (1)...(19): siRNA sense strand
cacugucacuggcgcuuua

SEQ ID NO: 2164058 - RNA, 19 nt, Homo sapiens
  misc_RNA (1)...(19): siRNA sense strand
gaaaucugcgugauaaagg

SEQ ID NO: 2164059 - RNA, 19 nt, Homo sapiens
  misc_RNA (1)...(19): siRNA sense strand
gaaggucgcaacaaagagu

SEQ ID NO: 2164060 - RNA, 19 nt, Homo sapiens
  misc_RNA (1)...(19): siRNA sense strand
ugaucagaaugaaggauuu

SEQ ID NO: 2164061 - RNA, 19 nt, Homo sapiens
  misc_RNA (1)...(19): siRNA sense strand
ggaggagacagacaagaug

SEQ ID NO: 2164062 - RNA, 19 nt, Homo sapiens
  misc_RNA (1)...(19): siRNA sense strand
ggaccuacaacugcaguaa

SEQ ID NO: 2164063 - RNA, 19 nt, Homo sapiens
  misc_RNA (1)...(19): siRNA sense strand
ggcauccucuuuguaacua

SEQ ID NO: 2164064 - RNA, 19 nt, Homo sapiens
  misc_RNA (1)...(19): siRNA sense strand
gcacuacagcuuccgaauc

SEQ ID NO: 2164065 - RNA, 19 nt, Homo sapiens
  misc_RNA (1)...(19): siRNA sense strand
gugaagcgucugaaggaua

SEQ ID NO: 2164066 - RNA, 19 nt, Homo sapiens
  misc_RNA (1)...(19): siRNA sense strand
gaaggauaguggacaugag

SEQ ID NO: 2164067 - RNA, 19 nt, Homo sapiens
  misc_RNA (1)...(19): siRNA sense strand
caucuaccaucacucuuuc

SEQ ID NO: 2164068 - RNA, 19 nt, Homo sapiens
  misc_RNA (1)...(19): siRNA sense strand
gaggagacagacaagauga

SEQ ID NO: 2164069 - RNA, 19 nt, Homo sapiens
  misc_RNA (1)...(19): siRNA sense strand
aaacucgccucccaacaca

SEQ ID NO: 2164070 - RNA, 19 nt, Homo sapiens
  misc_RNA (1)...(19): siRNA sense strand
auggaaaucugcgugauaa

SEQ ID NO: 2164071 - RNA, 19 nt, Homo sapiens
  misc_RNA (1)...(19): siRNA sense strand
gaaugacauccgccuggua

SEQ ID NO: 2164072 - RNA, 19 nt, Homo sapiens
  misc_RNA (1)...(19): siRNA sense strand
caacucaggcgacaucuac

SEQ ID NO: 2164073 - RNA, 19 nt, Homo sapiens
  misc_RNA (1)...(19): siRNA sense strand
gcagagugccaaguccuuu

SEQ ID NO: 2164074 - RNA, 19 nt, Homo sapiens
  misc_RNA (1)...(19): siRNA sense strand
gagcugauagcgagaaagu

SEQ ID NO: 2164075 - RNA, 19 nt, Homo sapiens
  misc_RNA (1)...(19): siRNA sense strand
agaaaucaagcaagaagaa

SEQ ID NO: 2164076 - RNA, 19 nt, Homo sapiens
  misc_RNA (1)...(19): siRNA sense strand
gaauugcugaguacuccua

SEQ ID NO: 2164077 - RNA, 19 nt, Homo sapiens
  misc_RNA (1)...(19): siRNA sense strand
gcaagcgagacaacaaaga

SEQ ID NO: 2164078 - RNA, 19 nt, Homo sapiens
  misc_RNA (1)...(19): siRNA sense strand
ggucauguccagcucaaug

SEQ ID NO: 2164079 - RNA, 19 nt, Homo sapiens
  misc_RNA (1)...(19): siRNA sense strand
cgagucaccuacgacauga

SEQ ID NO: 2164080 - RNA, 19 nt, Homo sapiens
  misc_RNA (1)...(19): siRNA sense strand
agaccaaggcguucgaauu

SEQ ID NO: 2164081 - RNA, 19 nt, Homo sapiens
  misc_RNA (1)...(19): siRNA sense strand
ccaagccuuccgugucuua

SEQ ID NO: 2164082 - RNA, 19 nt, Homo sapiens
  misc_RNA (1)...(19): siRNA sense strand
uagccgagcccauuuaauc

SEQ ID NO: 2164083 - RNA, 19 nt, Homo sapiens
  misc_RNA (1)...(19): siRNA sense strand
ccuuucgacugcaggaaua

SEQ ID NO: 2164084 - RNA, 19 nt, Homo sapiens
  misc_RNA (1)...(19): siRNA sense strand
caagaugaacguugucagu

SEQ ID NO: 2164085 - RNA, 19 nt, Homo sapiens
  misc_RNA (1)...(19): siRNA sense strand
aaagagauccggaccuaca

SEQ ID NO: 2164086 - RNA, 19 nt, Homo sapiens
  misc_RNA (1)...(19): siRNA sense strand
ggucaauggcgaagucaga

SEQ ID NO: 2164087 - RNA, 19 nt, Homo sapiens
  misc_RNA (1)...(19): siRNA sense strand
caccaagccuuccgugucu

SEQ ID NO: 2164088 - RNA, 19 nt, Homo sapiens
  misc_RNA (1)...(19): siRNA sense strand
cuaaccacaucuaccauca

SEQ ID NO: 2164089 - RNA, 19 nt, Homo sapiens
  misc_RNA (1)...(19): siRNA sense strand
gaggucauguccagcucaa

SEQ ID NO: 2164090 - RNA, 19 nt, Homo sapiens
  misc_RNA (1)...(19): siRNA sense strand
cagagugccaaguccuuua

SEQ ID NO: 2164091 - RNA, 19 nt, Homo sapiens
  misc_RNA (1)...(19): siRNA sense strand
ugaauagccgagcccauuu

SEQ ID NO: 2164092 - RNA, 19 nt, Homo sapiens
  misc_RNA (1)...(19): siRNA sense strand
caucucgguuucucccauu

SEQ ID NO: 2164093 - RNA, 19 nt, Homo sapiens
  misc_RNA (1)...(19): siRNA sense strand
ucaaugggcucugugaacu

SEQ ID NO: 2164094 - RNA, 19 nt, Homo sapiens
  misc_RNA (1)...(19): siRNA sense strand
uaggcuaccuggugacugu

SEQ ID NO: 2164095 - RNA, 19 nt, Homo sapiens
  misc_RNA (1)...(19): siRNA sense strand
gagagugaccaaacugaca

SEQ ID NO: 2164096 - RNA, 19 nt, Homo sapiens
  misc_RNA (1)...(19): siRNA sense strand
cggagccuguauugugaua

SEQ ID NO: 2164097 - RNA, 19 nt, Homo sapiens
  misc_RNA (1)...(19): siRNA sense strand
ggagauagcucuguagaaa

SEQ ID NO: 2164098 - RNA, 19 nt, Homo sapiens
  misc_RNA (1)...(19): siRNA sense strand
ccaguuaccucauugcuua

SEQ ID NO: 2164099 - RNA, 19 nt, Homo sapiens
  misc_RNA (1)...(19): siRNA sense strand
gaagaugcauguugagaau

SEQ ID NO: 2164100 - RNA, 19 nt, Homo sapiens
  misc_RNA (1)...(19): siRNA sense strand
ggaagugaacaucaaauua

SEQ ID NO: 2164101 - RNA, 19 nt, Homo sapiens
  misc_RNA (1)...(19): siRNA sense strand
gagauggcauuuaguauga

SEQ ID NO: 2164102 - RNA, 19 nt, Homo sapiens
  misc_RNA (1)...(19): siRNA sense strand
caacgaccauaccauauuu

SEQ ID NO: 2164103 - RNA, 19 nt, Homo sapiens
  misc_RNA (1)...(19): siRNA sense strand
gcaaggaagugaacaucaa

SEQ ID NO: 2164104 - RNA, 19 nt, Homo sapiens
  misc_RNA (1)...(19): siRNA sense strand
gauaggagauagcucugua

SEQ ID NO: 2164105 - RNA, 19 nt, Homo sapiens
  misc_RNA (1)...(19): siRNA sense strand
gcaguuaccucauucaaag

SEQ ID NO: 2164106 - RNA, 19 nt, Homo sapiens
  misc_RNA (1)...(19): siRNA sense strand
ccaguacccuugagccuua

SEQ ID NO: 2164107 - RNA, 19 nt, Homo sapiens
  misc_RNA (1)...(19): siRNA sense strand
gcagaaagccagaggacua

SEQ ID NO: 2164108 - RNA, 19 nt, Homo sapiens
  misc_RNA (1)...(19): siRNA sense strand
gcagaaagccagaggacua

SEQ ID NO: 2164109 - RNA, 19 nt, Homo sapiens
  misc_RNA (1)...(19): siRNA sense strand
ggacccagaucaagaaugu

SEQ ID NO: 2164110 - RNA, 19 nt, Homo sapiens
  misc_RNA (1)...(19): siRNA sense strand
ccaaagacuuguuucagaa

SEQ ID NO: 2164111 - RNA, 19 nt, Homo sapiens
  misc_RNA (1)...(19): siRNA sense strand
gacaagagcaucagacaaa

SEQ ID NO: 2164112 - RNA, 19 nt, Homo sapiens
  misc_RNA (1)...(19): siRNA sense strand
ugaagugccugguaagaaa

SEQ ID NO: 2164113 - RNA, 19 nt, Homo sapiens
  misc_RNA (1)...(19): siRNA sense strand
gaaaagcaguuaccucauu

SEQ ID NO: 2164114 - RNA, 19 nt, Homo sapiens
  misc_RNA (1)...(19): siRNA sense strand
ggacauacgcagcaccaua

SEQ ID NO: 2164115 - RNA, 19 nt, Homo sapiens
  misc_RNA (1)...(19): siRNA sense strand
gcagcaccauacaauauuu

SEQ ID NO: 2164116 - RNA, 19 nt, Homo sapiens
  misc_RNA (1)...(19): siRNA sense strand
aaagagcaguccaagcaua

SEQ ID NO: 2164117 - RNA, 19 nt, Homo sapiens
  misc_RNA (1)...(19): siRNA sense strand
gagcaaagauuuucacaug

SEQ ID NO: 2164118 - RNA, 19 nt, Homo sapiens
  misc_RNA (1)...(19): siRNA sense strand
ucaaagaggacauaugauu

SEQ ID NO: 2164119 - RNA, 19 nt, Homo sapiens
  misc_RNA (1)...(19): siRNA sense strand
gcaaagaaaggccagagaa

SEQ ID NO: 2164120 - RNA, 19 nt, Homo sapiens
  misc_RNA (1)...(19): siRNA sense strand
ucaaguauguggagugaug

SEQ ID NO: 2164121 - RNA, 19 nt, Homo sapiens
  misc_RNA (1)...(19): siRNA sense strand
aaaugaagaugcauguuga

SEQ ID NO: 2164122 - RNA, 19 nt, Homo sapiens
  misc_RNA (1)...(19): siRNA sense strand
ucagaaagaugagagagaa

SEQ ID NO: 2164123 - RNA, 19 nt, Homo sapiens
  misc_RNA (1)...(19): siRNA sense strand
gagaagacgccauuuggaa

SEQ ID NO: 2164124 - RNA, 19 nt, Homo sapiens
  misc_RNA (1)...(19): siRNA sense strand
ggaaacccguagauacaga

SEQ ID NO: 2164125 - RNA, 19 nt, Homo sapiens
  misc_RNA (1)...(19): siRNA sense strand
gaggacauaugauucuuuc

SEQ ID NO: 2164126 - RNA, 19 nt, Homo sapiens
  misc_RNA (1)...(19): siRNA sense strand
ccagagauggcauuuagua

SEQ ID NO: 2164127 - RNA, 19 nt, Homo sapiens
  misc_RNA (1)...(19): siRNA sense strand
gaaaaccaguuaccucauu

SEQ ID NO: 2164128 - RNA, 19 nt, Homo sapiens
  misc_RNA (1)...(19): siRNA sense strand
ucaggaccauauaguauuu

SEQ ID NO: 2164129 - RNA, 19 nt, Homo sapiens
  misc_RNA (1)...(19): siRNA sense strand
gaaagccaguuaccucagu

SEQ ID NO: 2164130 - RNA, 19 nt, Homo sapiens
  misc_RNA (1)...(19): siRNA sense strand
acagagaaaugguugauuc

SEQ ID NO: 2164131 - RNA, 19 nt, Homo sapiens
  misc_RNA (1)...(19): siRNA sense strand
ugggaaagguccaugcuaa

SEQ ID NO: 2164132 - RNA, 19 nt, Homo sapiens
  misc_RNA (1)...(19): siRNA sense strand
agaaaugguugaugucaga

SEQ ID NO: 2164133 - RNA, 19 nt, Homo sapiens
  misc_RNA (1)...(19): siRNA sense strand
ccagaggacuagauccaaa

SEQ ID NO: 2164134 - RNA, 19 nt, Homo sapiens
  misc_RNA (1)...(19): siRNA sense strand
caaagaaaggccagagaaa

SEQ ID NO: 2164135 - RNA, 19 nt, Homo sapiens
  misc_RNA (1)...(19): siRNA sense strand
auguuuagcucuccacuua

SEQ ID NO: 2164136 - RNA, 19 nt, Homo sapiens
  misc_RNA (1)...(19): siRNA sense strand
acagagaaaugguugaugu

SEQ ID NO: 2164137 - RNA, 19 nt, Homo sapiens
  misc_RNA (1)...(19): siRNA sense strand
ccagaggacuagagccaaa

SEQ ID NO: 2164138 - RNA, 19 nt, Homo sapiens
  misc_RNA (1)...(19): siRNA sense strand
acaagcaccucucuucaga

SEQ ID NO: 2164139 - RNA, 19 nt, Homo sapiens
  misc_RNA (1)...(19): siRNA sense strand
ggagugaugcuacaguuug

SEQ ID NO: 2164140 - RNA, 19 nt, Homo sapiens
  misc_RNA (1)...(19): siRNA sense strand
gcaaacagagacuagauuc

SEQ ID NO: 2164141 - RNA, 19 nt, Homo sapiens
  misc_RNA (1)...(19): siRNA sense strand
guuuagcucuccacuuauu

SEQ ID NO: 2164142 - RNA, 19 nt, Homo sapiens
  misc_RNA (1)...(19): siRNA sense strand
agaugcauguugagaauuu

SEQ ID NO: 2164143 - RNA, 19 nt, Homo sapiens
  misc_RNA (1)...(19): siRNA sense strand
gaaaucuguugaagaaagg

SEQ ID NO: 2164144 - RNA, 19 nt, Homo sapiens
  misc_RNA (1)...(19): siRNA sense strand
gaagauacagauuuagaca

SEQ ID NO: 2164145 - RNA, 19 nt, Homo sapiens
  misc_RNA (1)...(19): siRNA sense strand
acagagaaguggucgauuc

SEQ ID NO: 2164146 - RNA, 19 nt, Homo sapiens
  misc_RNA (1)...(19): siRNA sense strand
ugugaucucugcaacauga

SEQ ID NO: 2164147 - RNA, 19 nt, Homo sapiens
  misc_RNA (1)...(19): siRNA sense strand
ugccauauuuguaguauug

SEQ ID NO: 2164148 - RNA, 19 nt, Homo sapiens
  misc_RNA (1)...(19): siRNA sense strand
aagcaccucucuucagaaa

SEQ ID NO: 2164149 - RNA, 19 nt, Homo sapiens
  misc_RNA (1)...(19): siRNA sense strand
ucaagaaugugugagcaaa

SEQ ID NO: 2164150 - RNA, 19 nt, Homo sapiens
  misc_RNA (1)...(19): siRNA sense strand
gacauaugauucuuuccaa

SEQ ID NO: 2164151 - RNA, 19 nt, Homo sapiens
  misc_RNA (1)...(19): siRNA sense strand
ggaugagucuauucuugga

SEQ ID NO: 2164152 - RNA, 19 nt, Homo sapiens
  misc_RNA (1)...(19): siRNA sense strand
gagugaugcuacaguuuga

SEQ ID NO: 2164153 - RNA, 19 nt, Homo sapiens
  misc_RNA (1)...(19): siRNA sense strand
gaacuugaagauuacauca

SEQ ID NO: 2164154 - RNA, 19 nt, Homo sapiens
  misc_RNA (1)...(19): siRNA sense strand
agaaaucuguugaagaaag

SEQ ID NO: 2164155 - RNA, 19 nt, Homo sapiens
  misc_RNA (1)...(19): siRNA sense strand
gaacguaagcacaggaaag

SEQ ID NO: 2164156 - RNA, 19 nt, Homo sapiens
  misc_RNA (1)...(19): siRNA sense strand
agaaacaucagaagagaaa

SEQ ID NO: 2164157 - RNA, 19 nt, Homo sapiens
  misc_RNA (1)...(19): siRNA sense strand
aaacagaaacaucagaaga

SEQ ID NO: 2164158 - RNA, 19 nt, Homo sapiens
  misc_RNA (1)...(19): siRNA sense strand
uguagaaucugaaguuuac

SEQ ID NO: 2164159 - RNA, 19 nt, Homo sapiens
  misc_RNA (1)...(19): siRNA sense strand
caaagaggacauaugauuc

SEQ ID NO: 2164160 - RNA, 19 nt, Homo sapiens
  misc_RNA (1)...(19): siRNA sense strand
aaccagagauggcauuuag

SEQ ID NO: 2164161 - RNA, 19 nt, Homo sapiens
  misc_RNA (1)...(19): siRNA sense strand
gaaaugcuuugggaugagu

SEQ ID NO: 2164162 - RNA, 19 nt, Homo sapiens
  misc_RNA (1)...(19): siRNA sense strand
cauagaauguuggagcaaa

SEQ ID NO: 2164163 - RNA, 19 nt, Homo sapiens
  misc_RNA (1)...(19): siRNA sense strand
gaacagagaaaugguugau

SEQ ID NO: 2164164 - RNA, 19 nt, Homo sapiens
  misc_RNA (1)...(19): siRNA sense strand
gaagauuacaucaaaguac

SEQ ID NO: 2164165 - RNA, 19 nt, Homo sapiens
  misc_RNA (1)...(19): siRNA sense strand
acagaaagccagaggacua

SEQ ID NO: 2164166 - RNA, 19 nt, Homo sapiens
  misc_RNA (1)...(19): siRNA sense strand
caauacugcugaccaucaa

SEQ ID NO: 2164167 - RNA, 19 nt, Homo sapiens
  misc_RNA (1)...(19): siRNA sense strand
aaauaacucuggcucauac

SEQ ID NO: 2164168 - RNA, 19 nt, Homo sapiens
  misc_RNA (1)...(19): siRNA sense strand
agauagcucuguagaaaca

SEQ ID NO: 2164169 - RNA, 19 nt, Homo sapiens
  misc_RNA (1)...(19): siRNA sense strand
uccaaagacuuguuucaga

SEQ ID NO: 2164170 - RNA, 19 nt, Homo sapiens
  misc_RNA (1)...(19): siRNA sense strand
aaacaauacugcugaccau

SEQ ID NO: 2164171 - RNA, 19 nt, Homo sapiens
  misc_RNA (1)...(19): siRNA sense strand
cagagacuguuucccagaa

SEQ ID NO: 2164172 - RNA, 19 nt, Homo sapiens
  misc_RNA (1)...(19): siRNA sense strand
ucagaaagauaggagauag

SEQ ID NO: 2164173 - RNA, 19 nt, Homo sapiens
  misc_RNA (1)...(19): siRNA sense strand
ccaacgaccauaccauauu

SEQ ID NO: 2164174 - RNA, 19 nt, Homo sapiens
  misc_RNA (1)...(19): siRNA sense strand
ucaggaagcuaccgucucu

SEQ ID NO: 2164175 - RNA, 19 nt, Homo sapiens
  misc_RNA (1)...(19): siRNA sense strand
caaggucaguucaggaaag

SEQ ID NO: 2164176 - RNA, 19 nt, Homo sapiens
  misc_RNA (1)...(19): siRNA sense strand
acagaaacaucagaagaga

SEQ ID NO: 2164177 - RNA, 19 nt, Homo sapiens
  misc_RNA (1)...(19): siRNA sense strand
gaaaauaacucuggcucau

SEQ ID NO: 2164178 - RNA, 19 nt, Homo sapiens
  misc_RNA (1)...(19): siRNA sense strand
gaaugugugagcaaagauu

SEQ ID NO: 2164179 - RNA, 19 nt, Homo sapiens
  misc_RNA (1)...(19): siRNA sense strand
gagcaucagacaaaggaaa

SEQ ID NO: 2164180 - RNA, 19 nt, Homo sapiens
  misc_RNA (1)...(19): siRNA sense strand
agaaagagcaguccaagca

SEQ ID NO: 2164181 - RNA, 19 nt, Homo sapiens
  misc_RNA (1)...(19): siRNA sense strand
aaaaugaagugccugguaa

SEQ ID NO: 2164182 - RNA, 19 nt, Homo sapiens
  misc_RNA (1)...(19): siRNA sense strand
ggacauaugauucuuucca

SEQ ID NO: 2164183 - RNA, 19 nt, Homo sapiens
  misc_RNA (1)...(19): siRNA sense strand
aaucugaaguuuacaagca

SEQ ID NO: 2164184 - RNA, 19 nt, Homo sapiens
  misc_RNA (1)...(19): siRNA sense strand
ucaagcaggucauaaacag

SEQ ID NO: 2164185 - RNA, 19 nt, Homo sapiens
  misc_RNA (1)...(19): siRNA sense strand
gacuagauccaaagacuug

SEQ ID NO: 2164186 - RNA, 19 nt, Homo sapiens
  misc_RNA (1)...(19): siRNA sense strand
gaccauauaguauuucaca

SEQ ID NO: 2164187 - RNA, 19 nt, Homo sapiens
  misc_RNA (1)...(19): siRNA sense strand
gggaaagguccaugcuaaa

SEQ ID NO: 2164188 - RNA, 19 nt, Homo sapiens
  misc_RNA (1)...(19): siRNA sense strand
gaaaggacagaagaggaaa

SEQ ID NO: 2164189 - RNA, 19 nt, Homo sapiens
  misc_RNA (1)...(19): siRNA sense strand
aagaaaggccagagaaaga

SEQ ID NO: 2164190 - RNA, 19 nt, Homo sapiens
  misc_RNA (1)...(19): siRNA sense strand
gggcaguaguuuuaaagua

SEQ ID NO: 2164191 - RNA, 19 nt, Homo sapiens
  misc_RNA (1)...(19): siRNA sense strand
acucauggguacagagaaa

SEQ ID NO: 2164192 - RNA, 19 nt, Homo sapiens
  misc_RNA (1)...(19): siRNA sense strand
ucaaucuagugaagaauuc

SEQ ID NO: 2164193 - RNA, 19 nt, Homo sapiens
  misc_RNA (1)...(19): siRNA sense strand
caaggaagugaacaucaaa

SEQ ID NO: 2164194 - RNA, 19 nt, Homo sapiens
  misc_RNA (1)...(19): siRNA sense strand
gaucaggcaucuccaucag

SEQ ID NO: 2164195 - RNA, 19 nt, Homo sapiens
  misc_RNA (1)...(19): siRNA sense strand
ggucauaaacagaaacauc

SEQ ID NO: 2164196 - RNA, 19 nt, Homo sapiens
  misc_RNA (1)...(19): siRNA sense strand
ugggaugagucuauucuug

SEQ ID NO: 2164197 - RNA, 19 nt, Homo sapiens
  misc_RNA (1)...(19): siRNA sense strand
ccaauaggcuugucgauaa

SEQ ID NO: 2164198 - RNA, 19 nt, Homo sapiens
  misc_RNA (1)...(19): siRNA sense strand
gagaggaugugcccaauag

SEQ ID NO: 2164199 - RNA, 19 nt, Homo sapiens
  misc_RNA (1)...(19): siRNA sense strand
uaugauagauggagaugga

SEQ ID NO: 2164200 - RNA, 19 nt, Homo sapiens
  misc_RNA (1)...(19): siRNA sense strand
gagcuaaggaggaaaauua

SEQ ID NO: 2164201 - RNA, 19 nt, Homo sapiens
  misc_RNA (1)...(19): siRNA sense strand
gagccuggaggaaauguua

SEQ ID NO: 2164202 - RNA, 19 nt, Homo sapiens
  misc_RNA (1)...(19): siRNA sense strand
ugagagagcuaaggaggaa

SEQ ID NO: 2164203 - RNA, 19 nt, Homo sapiens
  misc_RNA (1)...(19): siRNA sense strand
gaaaauguccccaaggaaa

SEQ ID NO: 2164204 - RNA, 19 nt, Homo sapiens
  misc_RNA (1)...(19): siRNA sense strand
agauggagaugauauggaa

SEQ ID NO: 2164205 - RNA, 19 nt, Homo sapiens
  misc_RNA (1)...(19): siRNA sense strand
ggagaggaugugcccaaua

SEQ ID NO: 2164206 - RNA, 19 nt, Homo sapiens
  misc_RNA (1)...(19): siRNA sense strand
gagaugagagagcuaagga

SEQ ID NO: 2164207 - RNA, 19 nt, Homo sapiens
  misc_RNA (1)...(19): siRNA sense strand
caugaugaguuuugccuua

SEQ ID NO: 2164208 - RNA, 19 nt, Homo sapiens
  misc_RNA (1)...(19): siRNA sense strand
uuuaggagguggugaauac

SEQ ID NO: 2164209 - RNA, 19 nt, Homo sapiens
  misc_RNA (1)...(19): siRNA sense strand
gaggagaugagagagcuaa

SEQ ID NO: 2164210 - RNA, 19 nt, Homo sapiens
  misc_RNA (1)...(19): siRNA sense strand
uacagucugcgcauucuua

SEQ ID NO: 2164211 - RNA, 19 nt, Homo sapiens
  misc_RNA (1)...(19): siRNA sense strand
agauggagauggagaugau

SEQ ID NO: 2164212 - RNA, 19 nt, Homo sapiens
  misc_RNA (1)...(19): siRNA sense strand
gagguacagucugcgcauu

SEQ ID NO: 2164213 - RNA, 19 nt, Homo sapiens
  misc_RNA (1)...(19): siRNA sense strand
gucgauaacauugauauga

SEQ ID NO: 2164214 - RNA, 19 nt, Homo sapiens
  misc_RNA (1)...(19): siRNA sense strand
cccaauaggcuugucgaua

SEQ ID NO: 2164215 - RNA, 19 nt, Homo sapiens
  misc_RNA (1)...(19): siRNA sense strand
ggacccuccucaccaugau

SEQ ID NO: 2164216 - RNA, 19 nt, Homo sapiens
  misc_RNA (1)...(19): siRNA sense strand
caauaggcuugucgauaac

SEQ ID NO: 2164217 - RNA, 19 nt, Homo sapiens
  misc_RNA (1)...(19): siRNA sense strand
gagauggagaugauaugga

SEQ ID NO: 2164218 - RNA, 19 nt, Homo sapiens
  misc_RNA (1)...(19): siRNA sense strand
gcuugucgauaacauugau

SEQ ID NO: 2164219 - RNA, 19 nt, Homo sapiens
  misc_RNA (1)...(19): siRNA sense strand
gauaugauagauggagaug

SEQ ID NO: 2164220 - RNA, 19 nt, Homo sapiens
  misc_RNA (1)...(19): siRNA sense strand
ggagauggagaugauaugg

SEQ ID NO: 2164221 - RNA, 19 nt, Homo sapiens
  misc_RNA (1)...(19): siRNA sense strand
gguacagucugcgcauucu

SEQ ID NO: 2164222 - RNA, 19 nt, Homo sapiens
  misc_RNA (1)...(19): siRNA sense strand
gggacccuccucaccauga

SEQ ID NO: 2164223 - RNA, 19 nt, Homo sapiens
  misc_RNA (1)...(19): siRNA sense strand
gauagauggagauggagau

SEQ ID NO: 2164224 - RNA, 19 nt, Homo sapiens
  misc_RNA (1)...(19): siRNA sense strand
agucugcgcauucuuauag

SEQ ID NO: 2164225 - RNA, 19 nt, Homo sapiens
  misc_RNA (1)...(19): siRNA sense strand
gauggagauggagaugaua

SEQ ID NO: 2164226 - RNA, 19 nt, Homo sapiens
  misc_RNA (1)...(19): siRNA sense strand
ccagagacaugaucaauau

SEQ ID NO: 2164227 - RNA, 19 nt, Homo sapiens
  misc_RNA (1)...(19): siRNA sense strand
gcaaagccaugggagauuu

SEQ ID NO: 2164228 - RNA, 19 nt, Homo sapiens
  misc_RNA (1)...(19): siRNA sense strand
guugaucacuugaguuaua

SEQ ID NO: 2164229 - RNA, 19 nt, Homo sapiens
  misc_RNA (1)...(19): siRNA sense strand
ggaaggagaugauacuagu

SEQ ID NO: 2164230 - RNA, 19 nt, Homo sapiens
  misc_RNA (1)...(19): siRNA sense strand
uaaaggagcauaucagaaa

SEQ ID NO: 2164231 - RNA, 19 nt, Homo sapiens
  misc_RNA (1)...(19): siRNA sense strand
guaaagaaaccaugucauu

SEQ ID NO: 2164232 - RNA, 19 nt, Homo sapiens
  misc_RNA (1)...(19): siRNA sense strand
gaagaggccacuaucaauu

SEQ ID NO: 2164233 - RNA, 19 nt, Homo sapiens
  misc_RNA (1)...(19): siRNA sense strand
guaacuaucuggcccaaug

SEQ ID NO: 2164234 - RNA, 19 nt, Homo sapiens
  misc_RNA (1)...(19): siRNA sense strand
gaccauagaugagauuaga

SEQ ID NO: 2164235 - RNA, 19 nt, Homo sapiens
  misc_RNA (1)...(19): siRNA sense strand
cgaaguagguguagugaca

SEQ ID NO: 2164236 - RNA, 19 nt, Homo sapiens
  misc_RNA (1)...(19): siRNA sense strand
gguguggccauauuuauua

SEQ ID NO: 2164237 - RNA, 19 nt, Homo sapiens
  misc_RNA (1)...(19): siRNA sense strand
ggcaagcccuccuucauau

SEQ ID NO: 2164238 - RNA, 19 nt, Homo sapiens
  misc_RNA (1)...(19): siRNA sense strand
uaagacagaugcaguagca

SEQ ID NO: 2164239 - RNA, 19 nt, Homo sapiens
  misc_RNA (1)...(19): siRNA sense strand
uaggacaacugacuacuga

SEQ ID NO: 2164240 - RNA, 19 nt, Homo sapiens
  misc_RNA (1)...(19): siRNA sense strand
ggacaacugacuacugauu

SEQ ID NO: 2164241 - RNA, 19 nt, Homo sapiens
  misc_RNA (1)...(19): siRNA sense strand
ugaaggcagugucuaagaa

SEQ ID NO: 2164242 - RNA, 19 nt, Homo sapiens
  misc_RNA (1)...(19): siRNA sense strand
gaaggcauuggcagcauua

SEQ ID NO: 2164243 - RNA, 19 nt, Homo sapiens
  misc_RNA (1)...(19): siRNA sense strand
gaaggaaggagcucuguca

SEQ ID NO: 2164244 - RNA, 19 nt, Homo sapiens
  misc_RNA (1)...(19): siRNA sense strand
ggacuaagaauaagacaag

SEQ ID NO: 2164245 - RNA, 19 nt, Homo sapiens
  misc_RNA (1)...(19): siRNA sense strand
ggaagaggccacuaucaau

SEQ ID NO: 2164246 - RNA, 19 nt, Homo sapiens
  misc_RNA (1)...(19): siRNA sense strand
gagacaugaucaauaugaa

SEQ ID NO: 2164247 - RNA, 19 nt, Homo sapiens
  misc_RNA (1)...(19): siRNA sense strand
ggaggaagagaauguuauu

SEQ ID NO: 2164248 - RNA, 19 nt, Homo sapiens
  misc_RNA (1)...(19): siRNA sense strand
ccagaaaucuuguuuugaa

SEQ ID NO: 2164249 - RNA, 19 nt, Homo sapiens
  misc_RNA (1)...(19): siRNA sense strand
gaaaaugccuguucuuugc

SEQ ID NO: 2164250 - RNA, 19 nt, Homo sapiens
  misc_RNA (1)...(19): siRNA sense strand
ugauaaaccugaaauuggu

SEQ ID NO: 2164251 - RNA, 19 nt, Homo sapiens
  misc_RNA (1)...(19): siRNA sense strand
gcaaaagccaaucuuguua

SEQ ID NO: 2164252 - RNA, 19 nt, Homo sapiens
  misc_RNA (1)...(19): siRNA sense strand
ggacuggucugagguaacu

SEQ ID NO: 2164253 - RNA, 19 nt, Homo sapiens
  misc_RNA (1)...(19): siRNA sense strand
gggaagaggccacuaucaa

SEQ ID NO: 2164254 - RNA, 19 nt, Homo sapiens
  misc_RNA (1)...(19): siRNA sense strand
guccaucacuacauuguug

SEQ ID NO: 2164255 - RNA, 19 nt, Homo sapiens
  misc_RNA (1)...(19): siRNA sense strand
gaacucaccgggacagcaa

SEQ ID NO: 2164256 - RNA, 19 nt, Homo sapiens
  misc_RNA (1)...(19): siRNA sense strand
cuacugauccucuuauuca

SEQ ID NO: 2164257 - RNA, 19 nt, Homo sapiens
  misc_RNA (1)...(19): siRNA sense strand
cuauauggauucugaggaa

SEQ ID NO: 2164258 - RNA, 19 nt, Homo sapiens
  misc_RNA (1)...(19): siRNA sense strand
ggagguaaaugggauuaag

SEQ ID NO: 2164259 - RNA, 19 nt, Homo sapiens
  misc_RNA (1)...(19): siRNA sense strand
gacaagagcccaggccaaa

SEQ ID NO: 2164260 - RNA, 19 nt, Homo sapiens
  misc_RNA (1)...(19): siRNA sense strand
gaggaggaagagaauguua

SEQ ID NO: 2164261 - RNA, 19 nt, Homo sapiens
  misc_RNA (1)...(19): siRNA sense strand
gagggaggcuacugguguu

SEQ ID NO: 2164262 - RNA, 19 nt, Homo sapiens
  misc_RNA (1)...(19): siRNA sense strand
cagggaaguuaaagagauu

SEQ ID NO: 2164263 - RNA, 19 nt, Homo sapiens
  misc_RNA (1)...(19): siRNA sense strand
uuucagagcuuuuccauuu

SEQ ID NO: 2164264 - RNA, 19 nt, Homo sapiens
  misc_RNA (1)...(19): siRNA sense strand
auugaaagcuugcucaguu

SEQ ID NO: 2164265 - RNA, 19 nt, Homo sapiens
  misc_RNA (1)...(19): siRNA sense strand
uuacuuaagucaacuacug

SEQ ID NO: 2164266 - RNA, 19 nt, Homo sapiens
  misc_RNA (1)...(19): siRNA sense strand
ccagcuguguuaggauuua

SEQ ID NO: 2164267 - RNA, 19 nt, Homo sapiens
  misc_RNA (1)...(19): siRNA sense strand
gcaagcccuccuucauaua

SEQ ID NO: 2164268 - RNA, 19 nt, Homo sapiens
  misc_RNA (1)...(19): siRNA sense strand
gaaagacaacgcaaaauug

SEQ ID NO: 2164269 - RNA, 19 nt, Homo sapiens
  misc_RNA (1)...(19): siRNA sense strand
ggucugugcugaggaguug

SEQ ID NO: 2164270 - RNA, 19 nt, Homo sapiens
  misc_RNA (1)...(19): siRNA sense strand
ggaggcuacugguguuguu

SEQ ID NO: 2164271 - RNA, 19 nt, Homo sapiens
  misc_RNA (1)...(19): siRNA sense strand
ggucugagguaacuaucug

SEQ ID NO: 2164272 - RNA, 19 nt, Homo sapiens
  misc_RNA (1)...(19): siRNA sense strand
cagccuguguaugaaauua

SEQ ID NO: 2164273 - RNA, 19 nt, Homo sapiens
  misc_RNA (1)...(19): siRNA sense strand
gaugagauuagacgucaaa

SEQ ID NO: 2164274 - RNA, 19 nt, Homo sapiens
  misc_RNA (1)...(19): siRNA sense strand
ucagggaaguuaaagagau

SEQ ID NO: 2164275 - RNA, 19 nt, Homo sapiens
  misc_RNA (1)...(19): siRNA sense strand
ccaagaguuuauuaacgaa

SEQ ID NO: 2164276 - RNA, 19 nt, Homo sapiens
  misc_RNA (1)...(19): siRNA sense strand
cccaagaguuuauuaacga

SEQ ID NO: 2164277 - RNA, 19 nt, Homo sapiens
  misc_RNA (1)...(19): siRNA sense strand
gccagagacaugaucaaua

SEQ ID NO: 2164278 - RNA, 19 nt, Homo sapiens
  misc_RNA (1)...(19): siRNA sense strand
gacaacugacuacugauuu

SEQ ID NO: 2164279 - RNA, 19 nt, Homo sapiens
  misc_RNA (1)...(19): siRNA sense strand
agaaaaggcucaauuguag

SEQ ID NO: 2164280 - RNA, 19 nt, Homo sapiens
  misc_RNA (1)...(19): siRNA sense strand
cauaaaggagcauaucaga

SEQ ID NO: 2164281 - RNA, 19 nt, Homo sapiens
  misc_RNA (1)...(19): siRNA sense strand
gcacuaagaaugauaaacc

SEQ ID NO: 2164282 - RNA, 19 nt, Homo sapiens
  misc_RNA (1)...(19): siRNA sense strand
caauuguaguuguugauca

SEQ ID NO: 2164283 - RNA, 19 nt, Homo sapiens
  misc_RNA (1)...(19): siRNA sense strand
uaacgaaguagguguagug

SEQ ID NO: 2164284 - RNA, 19 nt, Homo sapiens
  misc_RNA (1)...(19): siRNA sense strand
caagcccuccuucauauau

SEQ ID NO: 2164285 - RNA, 19 nt, Homo sapiens
  misc_RNA (1)...(19): siRNA sense strand
cagaaaaggcucaauugua

SEQ ID NO: 2164286 - RNA, 19 nt, Homo sapiens
  misc_RNA (1)...(19): siRNA sense strand
ugaaggcauuggcagcauu

SEQ ID NO: 2164287 - RNA, 19 nt, Homo sapiens
  misc_RNA (1)...(19): siRNA sense strand
ugaucaauaugaaggcauu

SEQ ID NO: 2164288 - RNA, 19 nt, Homo sapiens
  misc_RNA (1)...(19): siRNA sense strand
aaaugaggcugguacugau

SEQ ID NO: 2164289 - RNA, 19 nt, Homo sapiens
  misc_RNA (1)...(19): siRNA sense strand
ggaugaaagacaacgcaaa

SEQ ID NO: 2164290 - RNA, 19 nt, Homo sapiens
  misc_RNA (1)...(19): siRNA sense strand
aggcaagcccuccuucaua

SEQ ID NO: 2164291 - RNA, 19 nt, Homo sapiens
  misc_RNA (1)...(19): siRNA sense strand
uccaccagcuccacaugua

SEQ ID NO: 2164292 - RNA, 19 nt, Homo sapiens
  misc_RNA (1)...(19): siRNA sense strand
uuagugguguggccauauu

SEQ ID NO: 2164293 - RNA, 19 nt, Homo sapiens
  misc_RNA (1)...(19): siRNA sense strand
agagacaugaucaauauga

SEQ ID NO: 2164294 - RNA, 19 nt, Homo sapiens
  misc_RNA (1)...(19): siRNA sense strand
uugaaagcuugcucaguuu

SEQ ID NO: 2164295 - RNA, 19 nt, Homo sapiens
  misc_RNA (1)...(19): siRNA sense strand
caacuacugauccucuuau

SEQ ID NO: 2164296 - RNA, 19 nt, Homo sapiens
  misc_RNA (1)...(19): siRNA sense strand
ggaggaggaggaagagaau

SEQ ID NO: 2164297 - RNA, 19 nt, Homo sapiens
  misc_RNA (1)...(19): siRNA sense strand
gaaggagaugauacuaguu

SEQ ID NO: 2164298 - RNA, 19 nt, Homo sapiens
  misc_RNA (1)...(19): siRNA sense strand
ugacacuuauugaaagcuu

SEQ ID NO: 2164299 - RNA, 19 nt, Homo sapiens
  misc_RNA (1)...(19): siRNA sense strand
caaggacuggucugaggua

SEQ ID NO: 2164300 - RNA, 19 nt, Homo sapiens
  misc_RNA (1)...(19): siRNA sense strand
aaggagaugauacuaguuu

SEQ ID NO: 2164301 - RNA, 19 nt, Homo sapiens
  misc_RNA (1)...(19): siRNA sense strand
guguggccauauuuauuaa

SEQ ID NO: 2164302 - RNA, 19 nt, Homo sapiens
  misc_RNA (1)...(19): siRNA sense strand
gcccaagaguuuauuaacg

SEQ ID NO: 2164303 - RNA, 19 nt, Homo sapiens
  misc_RNA (1)...(19): siRNA sense strand
uaacauaaaggagcauauc

SEQ ID NO: 2164304 - RNA, 19 nt, Homo sapiens
  misc_RNA (1)...(19): siRNA sense strand
ccaugucauuuccuuugaa

SEQ ID NO: 2164305 - RNA, 19 nt, Homo sapiens
  misc_RNA (1)...(19): siRNA sense strand
agacuguaauuacucugaa

SEQ ID NO: 2164306 - RNA, 19 nt, Homo sapiens
  misc_RNA (1)...(19): siRNA sense strand
gaugaaagacaacgcaaaa

SEQ ID NO: 2164307 - RNA, 19 nt, Homo sapiens
  misc_RNA (1)...(19): siRNA sense strand
gaucccaggcaccaucuga

SEQ ID NO: 2164308 - RNA, 19 nt, Homo sapiens
  misc_RNA (1)...(19): siRNA sense strand
ucaacuacugauccucuua

SEQ ID NO: 2164309 - RNA, 19 nt, Homo sapiens
  misc_RNA (1)...(19): siRNA sense strand
gggcaaagccaugggagau

SEQ ID NO: 2164310 - RNA, 19 nt, Homo sapiens
  misc_RNA (1)...(19): siRNA sense strand
uguaguuguugaucacuug

SEQ ID NO: 2164311 - RNA, 19 nt, Homo sapiens
  misc_RNA (1)...(19): siRNA sense strand
agaugaaggcagugucuaa

SEQ ID NO: 2164312 - RNA, 19 nt, Homo sapiens
  misc_RNA (1)...(19): siRNA sense strand
cauguuaagcauaugugua

SEQ ID NO: 2164313 - RNA, 19 nt, Homo sapiens
  misc_RNA (1)...(19): siRNA sense strand
gcauauguguaaagaaacc

SEQ ID NO: 2164314 - RNA, 19 nt, Homo sapiens
  misc_RNA (1)...(19): siRNA sense strand
guggccauauuuauuaaca

SEQ ID NO: 2164315 - RNA, 19 nt, Homo sapiens
  misc_RNA (1)...(19): siRNA sense strand
gggaaggagaugauacuag

SEQ ID NO: 2164316 - RNA, 19 nt, Homo sapiens
  misc_RNA (1)...(19): siRNA sense strand
acucaucuuuaaccagaaa

SEQ ID NO: 2164317 - RNA, 19 nt, Homo sapiens
  misc_RNA (1)...(19): siRNA sense strand
ugaaagacaacgcaaaauu

SEQ ID NO: 2164318 - RNA, 19 nt, Homo sapiens
  misc_RNA (1)...(19): siRNA sense strand
cccauuugcccaagaguuu

SEQ ID NO: 2164319 - RNA, 19 nt, Homo sapiens
  misc_RNA (1)...(19): siRNA sense strand
ggaggaggaagagaauguu

SEQ ID NO: 2164320 - RNA, 19 nt, Homo sapiens
  misc_RNA (1)...(19): siRNA sense strand
ccaccagcuccacauguaa

SEQ ID NO: 2164321 - RNA, 19 nt, Homo sapiens
  misc_RNA (1)...(19): siRNA sense strand
gacuguaauuacucugaau

SEQ ID NO: 2164322 - RNA, 19 nt, Homo sapiens
  misc_RNA (1)...(19): siRNA sense strand
gccuguguaugaaauuaau

SEQ ID NO: 2164323 - RNA, 19 nt, Homo sapiens
  misc_RNA (1)...(19): siRNA sense strand
gaggaagagaauguuauug

SEQ ID NO: 2164324 - RNA, 19 nt, Homo sapiens
  misc_RNA (1)...(19): siRNA sense strand
uuguugaucacuugaguua

SEQ ID NO: 2164325 - RNA, 19 nt, Homo sapiens
  misc_RNA (1)...(19): siRNA sense strand
gccuaagacucugggcaaa

SEQ ID NO: 2164326 - RNA, 19 nt, Homo sapiens
  misc_RNA (1)...(19): siRNA sense strand
gaagaagaaucccgccauu

SEQ ID NO: 2164327 - RNA, 19 nt, Homo sapiens
  misc_RNA (1)...(19): siRNA sense strand
ugacaaccauuaugacuuu

SEQ ID NO: 2164328 - RNA, 19 nt, Homo sapiens
  misc_RNA (1)...(19): siRNA sense strand
gagaugauguagaaagguu

SEQ ID NO: 2164329 - RNA, 19 nt, Homo sapiens
  misc_RNA (1)...(19): siRNA sense strand
ggaacuagcggcaaacaau

SEQ ID NO: 2164330 - RNA, 19 nt, Homo sapiens
  misc_RNA (1)...(19): siRNA sense strand
gaaaaugcccaacaagaaa

SEQ ID NO: 2164331 - RNA, 19 nt, Homo sapiens
  misc_RNA (1)...(19): siRNA sense strand
agaagaaucccgccauuug

SEQ ID NO: 2164332 - RNA, 19 nt, Homo sapiens
  misc_RNA (1)...(19): siRNA sense strand
gagagaugauguagaaagg

SEQ ID NO: 2164333 - RNA, 19 nt, Homo sapiens
  misc_RNA (1)...(19): siRNA sense strand
ggaaaaugcccaacaagaa

SEQ ID NO: 2164334 - RNA, 19 nt, Homo sapiens
  misc_RNA (1)...(19): siRNA sense strand
gaagaaucccgccauuugg

SEQ ID NO: 2164335 - RNA, 19 nt, Homo sapiens
  misc_RNA (1)...(19): siRNA sense strand
gaacuagcggcaaacaauc

SEQ ID NO: 2164336 - RNA, 19 nt, Homo sapiens
  misc_RNA (1)...(19): siRNA sense strand
aagaggaacuagcggcaaa

SEQ ID NO: 2164337 - RNA, 19 nt, Homo sapiens
  misc_RNA (1)...(19): siRNA sense strand
agcgagagaugauguagaa

SEQ ID NO: 2164338 - RNA, 19 nt, Homo sapiens
  misc_RNA (1)...(19): siRNA sense strand
gaaccugacaaccauuaug

SEQ ID NO: 2164339 - RNA, 19 nt, Homo sapiens
  misc_RNA (1)...(19): siRNA sense strand
ggcgacuugucccuaauuu

SEQ ID NO: 2164340 - RNA, 19 nt, Homo sapiens
  misc_RNA (1)...(19): siRNA sense strand
uagggcagaugauggaaau

SEQ ID NO: 2164341 - RNA, 19 nt, Homo sapiens
  misc_RNA (1)...(19): siRNA sense strand
gagaaagacuagggaacag

SEQ ID NO: 2164342 - RNA, 19 nt, Homo sapiens
  misc_RNA (1)...(19): siRNA sense strand
ccacgcagaaugaagaaga

SEQ ID NO: 2164343 - RNA, 19 nt, Homo sapiens
  misc_RNA (1)...(19): siRNA sense strand
acaaugaagcgagagauga

SEQ ID NO: 2164344 - RNA, 19 nt, Homo sapiens
  misc_RNA (1)...(19): siRNA sense strand
cgagagaugauguagaaag

SEQ ID NO: 2164345 - RNA, 19 nt, Homo sapiens
  misc_RNA (1)...(19): siRNA sense strand
caaugaagcgagagaugau

SEQ ID NO: 2164346 - RNA, 19 nt, Homo sapiens
  misc_RNA (1)...(19): siRNA sense strand
gaugauguagaaagguuug

SEQ ID NO: 2164347 - RNA, 19 nt, Homo sapiens
  misc_RNA (1)...(19): siRNA sense strand
cacgcagaaugaagaagaa

SEQ ID NO: 2164348 - RNA, 19 nt, Homo sapiens
  misc_RNA (1)...(19): siRNA sense strand
gauguagaaagguuuguag

SEQ ID NO: 2164349 - RNA, 19 nt, Homo sapiens
  misc_RNA (1)...(19): siRNA sense strand
gaagcgagagaugauguag

SEQ ID NO: 2164350 - RNA, 19 nt, Homo sapiens
  misc_RNA (1)...(19): siRNA sense strand
aagaagaaucccgccauuu

SEQ ID NO: 2164351 - RNA, 19 nt, Homo sapiens
  misc_RNA (1)...(19): siRNA sense strand
aaccugacaaccauuauga

SEQ ID NO: 2164352 - RNA, 19 nt, Homo sapiens
  misc_RNA (1)...(19): siRNA sense strand
guagggcagaugauggaaa

SEQ ID NO: 2164353 - RNA, 19 nt, Homo sapiens
  misc_RNA (1)...(19): siRNA sense strand
gcagaaugaagaagaaucc

SEQ ID NO: 2164354 - RNA, 19 nt, Homo sapiens
  misc_RNA (1)...(19): siRNA sense strand
cugaaccugacaaccauua

SEQ ID NO: 2164355 - RNA, 19 nt, Homo sapiens
  misc_RNA (1)...(19): siRNA sense strand
ugaagcgagagaugaugua

SEQ ID NO: 2164356 - RNA, 19 nt, Homo sapiens
  misc_RNA (1)...(19): siRNA sense strand
gcacaaugaagcgagagau

SEQ ID NO: 2164357 - RNA, 19 nt, Homo sapiens
  misc_RNA (1)...(19): siRNA sense strand
auaggcauauugagcacaa

SEQ ID NO: 2164358 - RNA, 19 nt, Homo sapiens
  misc_RNA (1)...(19): siRNA sense strand
gggaaaaugcccaacaaga

SEQ ID NO: 2164359 - RNA, 19 nt, Homo sapiens
  misc_RNA (1)...(19): siRNA sense strand
aacagcagaugaggcacua

SEQ ID NO: 2164360 - RNA, 19 nt, Homo sapiens
  misc_RNA (1)...(19): siRNA sense strand
ggaguccaaagaggaacua

SEQ ID NO: 2164361 - RNA, 19 nt, Homo sapiens
  misc_RNA (1)...(19): siRNA sense strand
cgacuugucccuaauuuuc

SEQ ID NO: 2164362 - RNA, 19 nt, Homo sapiens
  misc_RNA (1)...(19): siRNA sense strand
ccucagaacuucacuguau

SEQ ID NO: 2164363 - RNA, 19 nt, Homo sapiens
  misc_RNA (1)...(19): siRNA sense strand
ugucauggauucuuugguu

SEQ ID NO: 2164364 - RNA, 19 nt, Homo sapiens
  misc_RNA (1)...(19): siRNA sense strand
cacgaaggcuguccucaga

SEQ ID NO: 2164365 - RNA, 19 nt, Homo sapiens
  misc_RNA (1)...(19): siRNA sense strand
ugagugucauggauucuuu

SEQ ID NO: 2164366 - RNA, 19 nt, Homo sapiens
  misc_RNA (1)...(19): siRNA sense strand
caccagggccucagccuuu

SEQ ID NO: 2164367 - RNA, 19 nt, Homo sapiens
  misc_RNA (1)...(19): siRNA sense strand
ggacagcuucgccaccuau

SEQ ID NO: 2164368 - RNA, 19 nt, Homo sapiens
  misc_RNA (1)...(19): siRNA sense strand
ccucugagacgaccucuga

SEQ ID NO: 2164369 - RNA, 19 nt, Homo sapiens
  misc_RNA (1)...(19): siRNA sense strand
ccauacagcaacagagaaa

SEQ ID NO: 2164370 - RNA, 19 nt, Homo sapiens
  misc_RNA (1)...(19): siRNA sense strand
uggauucuuugguucauga

SEQ ID NO: 2164371 - RNA, 19 nt, Homo sapiens
  misc_RNA (1)...(19): siRNA sense strand
cagcuucgccaccuauuuc

SEQ ID NO: 2164372 - RNA, 19 nt, Homo sapiens
  misc_RNA (1)...(19): siRNA sense strand
cgaaggcuguccucagaac

SEQ ID NO: 2164373 - RNA, 19 nt, Homo sapiens
  misc_RNA (1)...(19): siRNA sense strand
gaggccaacuccacuacgu

SEQ ID NO: 2164374 - RNA, 19 nt, Homo sapiens
  misc_RNA (1)...(19): siRNA sense strand
gcuggaccuuccucugaga

SEQ ID NO: 2164375 - RNA, 19 nt, Homo sapiens
  misc_RNA (1)...(19): siRNA sense strand
gcaggugccacuccaacug

SEQ ID NO: 2164376 - RNA, 19 nt, Homo sapiens
  misc_RNA (1)...(19): siRNA sense strand
gggacagcuucgccaccua

SEQ ID NO: 2164377 - RNA, 19 nt, Homo sapiens
  misc_RNA (1)...(19): siRNA sense strand
aaagaggccaacuccacua

SEQ ID NO: 2164378 - RNA, 19 nt, Homo sapiens
  misc_RNA (1)...(19): siRNA sense strand
ggccgugagugucauggau

SEQ ID NO: 2164379 - RNA, 19 nt, Homo sapiens
  misc_RNA (1)...(19): siRNA sense strand
uggcuggaccuuccucuga

SEQ ID NO: 2164380 - RNA, 19 nt, Homo sapiens
  misc_RNA (1)...(19): siRNA sense strand
ccacuacgucccagaagca

SEQ ID NO: 2164381 - RNA, 19 nt, Homo sapiens
  misc_RNA (1)...(19): siRNA sense strand
ccaccaagcgccagaccau

SEQ ID NO: 2164382 - RNA, 19 nt, Homo sapiens
  misc_RNA (1)...(19): siRNA sense strand
uuugguucaugacauauug

SEQ ID NO: 2164383 - RNA, 19 nt, Homo sapiens
  misc_RNA (1)...(19): siRNA sense strand
ucacccaggagcccaaaga

SEQ ID NO: 2164384 - RNA, 19 nt, Homo sapiens
  misc_RNA (1)...(19): siRNA sense strand
ucacagagcuaaauguuga

SEQ ID NO: 2164385 - RNA, 19 nt, Homo sapiens
  misc_RNA (1)...(19): siRNA sense strand
ccucagaacuucauuaugu

SEQ ID NO: 2164386 - RNA, 19 nt, Homo sapiens
  misc_RNA (1)...(19): siRNA sense strand
cuggucagcuggcccauua

SEQ ID NO: 2164387 - RNA, 19 nt, Homo sapiens
  misc_RNA (1)...(19): siRNA sense strand
caccagggccucagccuuu

SEQ ID NO: 2164388 - RNA, 19 nt, Homo sapiens
  misc_RNA (1)...(19): siRNA sense strand
caucacagagcuaaauguu

SEQ ID NO: 2164389 - RNA, 19 nt, Homo sapiens
  misc_RNA (1)...(19): siRNA sense strand
ucucuguucuugcuaucua

SEQ ID NO: 2164390 - RNA, 19 nt, Homo sapiens
  misc_RNA (1)...(19): siRNA sense strand
ccacgaaggcccagaagca

SEQ ID NO: 2164391 - RNA, 19 nt, Homo sapiens
  misc_RNA (1)...(19): siRNA sense strand
ugagugucauggauucuau

SEQ ID NO: 2164392 - RNA, 19 nt, Homo sapiens
  misc_RNA (1)...(19): siRNA sense strand
cgauauggcaacagagaaa

SEQ ID NO: 2164393 - RNA, 19 nt, Homo sapiens
  misc_RNA (1)...(19): siRNA sense strand
cgaaggcccagaagcagaa

SEQ ID NO: 2164394 - RNA, 19 nt, Homo sapiens
  misc_RNA (1)...(19): siRNA sense strand
gccaugcgaccauaccaaa

SEQ ID NO: 2164395 - RNA, 19 nt, Homo sapiens
  misc_RNA (1)...(19): siRNA sense strand
gcccucagaacuucauuau

SEQ ID NO: 2164396 - RNA, 19 nt, Homo sapiens
  misc_RNA (1)...(19): siRNA sense strand
ggccgugagugucauggau

SEQ ID NO: 2164397 - RNA, 19 nt, Homo sapiens
  misc_RNA (1)...(19): siRNA sense strand
agagcuaaauguugaucau

SEQ ID NO: 2164398 - RNA, 19 nt, Homo sapiens
  misc_RNA (1)...(19): siRNA sense strand
gcauccaggagcccaaaga

SEQ ID NO: 2164399 - RNA, 19 nt, Homo sapiens
  misc_RNA (1)...(19): siRNA sense strand
ugugcgauauggcaacaga

SEQ ID NO: 2164400 - RNA, 19 nt, Homo sapiens
  misc_RNA (1)...(19): siRNA sense strand
gagcauccaggagcccaaa

SEQ ID NO: 2164401 - RNA, 19 nt, Homo sapiens
  misc_RNA (1)...(19): siRNA sense strand
ggccaucacagagcuaaau

SEQ ID NO: 2164402 - RNA, 19 nt, Homo sapiens
  misc_RNA (1)...(19): siRNA sense strand
gcgauauggcaacagagaa

SEQ ID NO: 2164403 - RNA, 19 nt, Homo sapiens
  misc_RNA (1)...(19): siRNA sense strand
ucggagccaugcgaccaua

SEQ ID NO: 2164404 - RNA, 19 nt, Homo sapiens
  misc_RNA (1)...(19): siRNA sense strand
caaccgucacucucuguuc

SEQ ID NO: 2164405 - RNA, 19 nt, Homo sapiens
  misc_RNA (1)...(19): siRNA sense strand
gagcuaaauguugaucauc

SEQ ID NO: 2164406 - RNA, 19 nt, Homo sapiens
  misc_RNA (1)...(19): siRNA sense strand
caggaggccgugaguguca

SEQ ID NO: 2164407 - RNA, 19 nt, Homo sapiens
  misc_RNA (1)...(19): siRNA sense strand
ggagugcaaugacaaauga

SEQ ID NO: 2164408 - RNA, 19 nt, Homo sapiens
  misc_RNA (1)...(19): siRNA sense strand
gaaacuauaucaaggaaca

SEQ ID NO: 2164409 - RNA, 19 nt, Homo sapiens
  misc_RNA (1)...(19): siRNA sense strand
gcuauucccuguuagauga

SEQ ID NO: 2164410 - RNA, 19 nt, Homo sapiens
  misc_RNA (1)...(19): siRNA sense strand
gaucaggacuucacuucuu

SEQ ID NO: 2164411 - RNA, 19 nt, Homo sapiens
  misc_RNA (1)...(19): siRNA sense strand
ggagugauguacuuucuga

SEQ ID NO: 2164412 - RNA, 19 nt, Homo sapiens
  misc_RNA (1)...(19): siRNA sense strand
gcagugaugucucuucuuc

SEQ ID NO: 2164413 - RNA, 19 nt, Homo sapiens
  misc_RNA (1)...(19): siRNA sense strand
gacagugaguuuauuauug

SEQ ID NO: 2164414 - RNA, 19 nt, Homo sapiens
  misc_RNA (1)...(19): siRNA sense strand
gaaagugaguacugagaug

SEQ ID NO: 2164415 - RNA, 19 nt, Homo sapiens
  misc_RNA (1)...(19): siRNA sense strand
gggagcaacuugauauuau

SEQ ID NO: 2164416 - RNA, 19 nt, Homo sapiens
  misc_RNA (1)...(19): siRNA sense strand
ggagcaacuugauauuauu

SEQ ID NO: 2164417 - RNA, 19 nt, Homo sapiens
  misc_RNA (1)...(19): siRNA sense strand
ucagugggcucuuccuuaa

SEQ ID NO: 2164418 - RNA, 19 nt, Homo sapiens
  misc_RNA (1)...(19): siRNA sense strand
gcaccggaauuuagaugaa

SEQ ID NO: 2164419 - RNA, 19 nt, Homo sapiens
  misc_RNA (1)...(19): siRNA sense strand
gguggaaccuaacuucuug

SEQ ID NO: 2164420 - RNA, 19 nt, Homo sapiens
  misc_RNA (1)...(19): siRNA sense strand
ugaagcagauguugauguu

SEQ ID NO: 2164421 - RNA, 19 nt, Homo sapiens
  misc_RNA (1)...(19): siRNA sense strand
ugauugcuauucccuguua

SEQ ID NO: 2164422 - RNA, 19 nt, Homo sapiens
  misc_RNA (1)...(19): siRNA sense strand
ggaagaccaugaagcagau

SEQ ID NO: 2164423 - RNA, 19 nt, Homo sapiens
  misc_RNA (1)...(19): siRNA sense strand
gaugucucuucuucuauua

SEQ ID NO: 2164424 - RNA, 19 nt, Homo sapiens
  misc_RNA (1)...(19): siRNA sense strand
gaaagugacugaggaagac

SEQ ID NO: 2164425 - RNA, 19 nt, Homo sapiens
  misc_RNA (1)...(19): siRNA sense strand
gggagugucugcagugaug

SEQ ID NO: 2164426 - RNA, 19 nt, Homo sapiens
  misc_RNA (1)...(19): siRNA sense strand
gaagaggugcuguccuuga

SEQ ID NO: 2164427 - RNA, 19 nt, Homo sapiens
  misc_RNA (1)...(19): siRNA sense strand
gcaagaggcagcugaagga

SEQ ID NO: 2164428 - RNA, 19 nt, Homo sapiens
  misc_RNA (1)...(19): siRNA sense strand
gguggaauauauugaguau

SEQ ID NO: 2164429 - RNA, 19 nt, Homo sapiens
  misc_RNA (1)...(19): siRNA sense strand
ugaagcaggucagaaacua

SEQ ID NO: 2164430 - RNA, 19 nt, Homo sapiens
  misc_RNA (1)...(19): siRNA sense strand
aaacaagcaccggaauuua

SEQ ID NO: 2164431 - RNA, 19 nt, Homo sapiens
  misc_RNA (1)...(19): siRNA sense strand
gaagagaagcaacuuuagu

SEQ ID NO: 2164432 - RNA, 19 nt, Homo sapiens
  misc_RNA (1)...(19): siRNA sense strand
cagaaacuauaucaaggaa

SEQ ID NO: 2164433 - RNA, 19 nt, Homo sapiens
  misc_RNA (1)...(19): siRNA sense strand
uggaagagaagcaacuuua

SEQ ID NO: 2164434 - RNA, 19 nt, Homo sapiens
  misc_RNA (1)...(19): siRNA sense strand
caccuugccugcuuccuaa

SEQ ID NO: 2164435 - RNA, 19 nt, Homo sapiens
  misc_RNA (1)...(19): siRNA sense strand
agagaggccuggaagagaa

SEQ ID NO: 2164436 - RNA, 19 nt, Homo sapiens
  misc_RNA (1)...(19): siRNA sense strand
ggucagauagcgaguuuga

SEQ ID NO: 2164437 - RNA, 19 nt, Homo sapiens
  misc_RNA (1)...(19): siRNA sense strand
ugaugucucuucuucuauu

SEQ ID NO: 2164438 - RNA, 19 nt, Homo sapiens
  misc_RNA (1)...(19): siRNA sense strand
gugcuguccuugaaaguga

SEQ ID NO: 2164439 - RNA, 19 nt, Homo sapiens
  misc_RNA (1)...(19): siRNA sense strand
gagcagguggaauauauug

SEQ ID NO: 2164440 - RNA, 19 nt, Homo sapiens
  misc_RNA (1)...(19): siRNA sense strand
ggucagaaacuauaucaag

SEQ ID NO: 2164441 - RNA, 19 nt, Homo sapiens
  misc_RNA (1)...(19): siRNA sense strand
ggacuucacuucuuuugau

SEQ ID NO: 2164442 - RNA, 19 nt, Homo sapiens
  misc_RNA (1)...(19): siRNA sense strand
cuucuucuauuagcacuua

SEQ ID NO: 2164443 - RNA, 19 nt, Homo sapiens
  misc_RNA (1)...(19): siRNA sense strand
gcagagcggauucgggauu

SEQ ID NO: 2164444 - RNA, 19 nt, Homo sapiens
  misc_RNA (1)...(19): siRNA sense strand
uguacuuucugaugucaua

SEQ ID NO: 2164445 - RNA, 19 nt, Homo sapiens
  misc_RNA (1)...(19): siRNA sense strand
agugaugucucuucuucua

SEQ ID NO: 2164446 - RNA, 19 nt, Homo sapiens
  misc_RNA (1)...(19): siRNA sense strand
acagacagugaguuuauua

SEQ ID NO: 2164447 - RNA, 19 nt, Homo sapiens
  misc_RNA (1)...(19): siRNA sense strand
ucagauagcgaguuugaau

SEQ ID NO: 2164448 - RNA, 19 nt, Homo sapiens
  misc_RNA (1)...(19): siRNA sense strand
cuacagacagugaguuuau

SEQ ID NO: 2164449 - RNA, 19 nt, Homo sapiens
  misc_RNA (1)...(19): siRNA sense strand
gugauguacuuucugaugu

SEQ ID NO: 2164450 - RNA, 19 nt, Homo sapiens
  misc_RNA (1)...(19): siRNA sense strand
ggaagagaagcaacuuuag

SEQ ID NO: 2164451 - RNA, 19 nt, Homo sapiens
  misc_RNA (1)...(19): siRNA sense strand
ggaaagugaguacugagau

SEQ ID NO: 2164452 - RNA, 19 nt, Homo sapiens
  misc_RNA (1)...(19): siRNA sense strand
acgaagaggugcuguccuu

SEQ ID NO: 2164453 - RNA, 19 nt, Homo sapiens
  misc_RNA (1)...(19): siRNA sense strand
gauccaagcagcggaaguu

SEQ ID NO: 2164454 - RNA, 19 nt, Homo sapiens
  misc_RNA (1)...(19): siRNA sense strand
gcaagcaccaguggaguga

SEQ ID NO: 2164455 - RNA, 19 nt, Homo sapiens
  misc_RNA (1)...(19): siRNA sense strand
uaucugagucggaaaguga

SEQ ID NO: 2164456 - RNA, 19 nt, Homo sapiens
  misc_RNA (1)...(19): siRNA sense strand
aagaggugcuguccuugaa

SEQ ID NO: 2164457 - RNA, 19 nt, Homo sapiens
  misc_RNA (1)...(19): siRNA sense strand
aaacuccagugccaacaug

SEQ ID NO: 2164458 - RNA, 19 nt, Homo sapiens
  misc_RNA (1)...(19): siRNA sense strand
aagcaggucagaaacuaua

SEQ ID NO: 2164459 - RNA, 19 nt, Homo sapiens
  misc_RNA (1)...(19): siRNA sense strand
gaggugcuguccuugaaag

SEQ ID NO: 2164460 - RNA, 19 nt, Homo sapiens
  misc_RNA (1)...(19): siRNA sense strand
gaugagcagguggaauaua

SEQ ID NO: 2164461 - RNA, 19 nt, Homo sapiens
  misc_RNA (1)...(19): siRNA sense strand
ugaaagugacugaggaaga

SEQ ID NO: 2164462 - RNA, 19 nt, Homo sapiens
  misc_RNA (1)...(19): siRNA sense strand
gaaacucugcuucaaacuc

SEQ ID NO: 2164463 - RNA, 19 nt, Homo sapiens
  misc_RNA (1)...(19): siRNA sense strand
gcaagagaggccuggaaga

SEQ ID NO: 2164464 - RNA, 19 nt, Homo sapiens
  misc_RNA (1)...(19): siRNA sense strand
augagcagguggaauauau

SEQ ID NO: 2164465 - RNA, 19 nt, Homo sapiens
  misc_RNA (1)...(19): siRNA sense strand
ugacugaggaagaccauga

SEQ ID NO: 2164466 - RNA, 19 nt, Homo sapiens
  misc_RNA (1)...(19): siRNA sense strand
gaagcaggucagaaacuau

SEQ ID NO: 2164467 - RNA, 19 nt, Homo sapiens
  misc_RNA (1)...(19): siRNA sense strand
cgggagcaacuugauauua

SEQ ID NO: 2164468 - RNA, 19 nt, Homo sapiens
  misc_RNA (1)...(19): siRNA sense strand
guuggaaacucugcuucaa

SEQ ID NO: 2164469 - RNA, 19 nt, Homo sapiens
  misc_RNA (1)...(19): siRNA sense strand
ccaagcagcggaaguuaca

SEQ ID NO: 2164470 - RNA, 19 nt, Homo sapiens
  misc_RNA (1)...(19): siRNA sense strand
ccucggccaucacuuccua

SEQ ID NO: 2164471 - RNA, 19 nt, Homo sapiens
  misc_RNA (1)...(19): siRNA sense strand
aagcagauguugauguuuu

SEQ ID NO: 2164472 - RNA, 19 nt, Homo sapiens
  misc_RNA (1)...(19): siRNA sense strand
uggaaacucugcuucaaac

SEQ ID NO: 2164473 - RNA, 19 nt, Homo sapiens
  misc_RNA (1)...(19): siRNA sense strand
augaugagcagguggaaua

SEQ ID NO: 2164474 - RNA, 19 nt, Homo sapiens
  misc_RNA (1)...(19): siRNA sense strand
gauguacuuucugauguca

SEQ ID NO: 2164475 - RNA, 19 nt, Homo sapiens
  misc_RNA (1)...(19): siRNA sense strand
gugaggagcuguuuucauc

SEQ ID NO: 2164476 - RNA, 19 nt, Homo sapiens
  misc_RNA (1)...(19): siRNA sense strand
gccaacggccugcaagaga

SEQ ID NO: 2164477 - RNA, 19 nt, Homo sapiens
  misc_RNA (1)...(19): siRNA sense strand
caagagaggccuggaagag

SEQ ID NO: 2164478 - RNA, 19 nt, Homo sapiens
  misc_RNA (1)...(19): siRNA sense strand
gagcacacagugacagcaa

SEQ ID NO: 2164479 - RNA, 19 nt, Homo sapiens
  misc_RNA (1)...(19): siRNA sense strand
ugaggaagaccaugaagca

SEQ ID NO: 2164480 - RNA, 19 nt, Homo sapiens
  misc_RNA (1)...(19): siRNA sense strand
gugcaaugacaaaugauga

SEQ ID NO: 2164481 - RNA, 19 nt, Homo sapiens
  misc_RNA (1)...(19): siRNA sense strand
ccaugaagcagauguugau

SEQ ID NO: 2164482 - RNA, 19 nt, Homo sapiens
  misc_RNA (1)...(19): siRNA sense strand
ucagaaacuauaucaagga

SEQ ID NO: 2164483 - RNA, 19 nt, Homo sapiens
  misc_RNA (1)...(19): siRNA sense strand
gcucaaaucuccccuacag

SEQ ID NO: 2164484 - RNA, 19 nt, Homo sapiens
  misc_RNA (1)...(19): siRNA sense strand
ggaauauauugaguaucug

SEQ ID NO: 2164485 - RNA, 19 nt, Homo sapiens
  misc_RNA (1)...(19): siRNA sense strand
aaccuaacuucuuguggaa

SEQ ID NO: 2164486 - RNA, 19 nt, Homo sapiens
  misc_RNA (1)...(19): siRNA sense strand
cgaguuugaauggcaguua

SEQ ID NO: 2164487 - RNA, 19 nt, Homo sapiens
  misc_RNA (1)...(19): siRNA sense strand
gaagcagauguugauguuu

SEQ ID NO: 2164488 - RNA, 19 nt, Homo sapiens
  misc_RNA (1)...(19): siRNA sense strand
ccuaacuucuuguggaaca

SEQ ID NO: 2164489 - RNA, 19 nt, Homo sapiens
  misc_RNA (1)...(19): siRNA sense strand
gcagguggaauauauugag

SEQ ID NO: 2164490 - RNA, 19 nt, Homo sapiens
  misc_RNA (1)...(19): siRNA sense strand
acaagcaccggaauuuaga

SEQ ID NO: 2164491 - RNA, 19 nt, Homo sapiens
  misc_RNA (1)...(19): siRNA sense strand
gaguuugaauggcaguuac

SEQ ID NO: 2164492 - RNA, 19 nt, Homo sapiens
  misc_RNA (1)...(19): siRNA sense strand
uacagacagugaguuuauu

SEQ ID NO: 2164493 - RNA, 19 nt, Homo sapiens
  misc_RNA (1)...(19): siRNA sense strand
ucaccuugccugcuuccua

SEQ ID NO: 2164494 - RNA, 19 nt, Homo sapiens
  misc_RNA (1)...(19): siRNA sense strand
ucugaugucauacccagua

SEQ ID NO: 2164495 - RNA, 19 nt, Homo sapiens
  misc_RNA (1)...(19): siRNA sense strand
guuagaugaucaggacuuc

SEQ ID NO: 2164496 - RNA, 19 nt, Homo sapiens
  misc_RNA (1)...(19): siRNA sense strand
gucggaaagugaguacuga

SEQ ID NO: 2164497 - RNA, 19 nt, Homo sapiens
  misc_RNA (1)...(19): siRNA sense strand
uuggucagauagcgaguuu

SEQ ID NO: 2164498 - RNA, 19 nt, Homo sapiens
  misc_RNA (1)...(19): siRNA sense strand
cagugggagugauguacuu

SEQ ID NO: 2164499 - RNA, 19 nt, Homo sapiens
  misc_RNA (1)...(19): siRNA sense strand
uuacugggauuggucagau

SEQ ID NO: 2164500 - RNA, 19 nt, Homo sapiens
  misc_RNA (1)...(19): siRNA sense strand
gugccagcauggucaguuc

SEQ ID NO: 2164501 - RNA, 19 nt, Homo sapiens
  misc_RNA (1)...(19): siRNA sense strand
ggucuucgggagcaacuug

SEQ ID NO: 2164502 - RNA, 19 nt, Homo sapiens
  misc_RNA (1)...(19): siRNA sense strand
ucaagaugauugcuauucc

SEQ ID NO: 2164503 - RNA, 19 nt, Homo sapiens
  misc_RNA (1)...(19): siRNA sense strand
agcaguggguccaguguug

SEQ ID NO: 2164504 - RNA, 19 nt, Homo sapiens
  misc_RNA (1)...(19): siRNA sense strand
gaccaugaagcagauguug

SEQ ID NO: 2164505 - RNA, 19 nt, Homo sapiens
  misc_RNA (1)...(19): siRNA sense strand
cagagcggauucgggauuc

SEQ ID NO: 2164506 - RNA, 19 nt, Homo sapiens
  misc_RNA (1)...(19): siRNA sense strand
aucaggacuucacuucuuu

SEQ ID NO: 2164507 - RNA, 19 nt, Homo sapiens
  misc_RNA (1)...(19): siRNA sense strand
ugaggaagcugguggauuu

SEQ ID NO: 2164508 - RNA, 19 nt, Homo sapiens
  misc_RNA (1)...(19): siRNA sense strand
ggcacucccuggccuguua

SEQ ID NO: 2164509 - RNA, 19 nt, Homo sapiens
  misc_RNA (1)...(19): siRNA sense strand
gcaggaggaugaagaagag

SEQ ID NO: 2164510 - RNA, 19 nt, Homo sapiens
  misc_RNA (1)...(19): siRNA sense strand
ggcccuagcuccagaccua

SEQ ID NO: 2164511 - RNA, 19 nt, Homo sapiens
  misc_RNA (1)...(19): siRNA sense strand
gaaguaaaugggagugaaa

SEQ ID NO: 2164512 - RNA, 19 nt, Homo sapiens
  misc_RNA (1)...(19): siRNA sense strand
ggacucagacagcgaagaa

SEQ ID NO: 2164513 - RNA, 19 nt, Homo sapiens
  misc_RNA (1)...(19): siRNA sense strand
aggcaaccaucaaccuaua

SEQ ID NO: 2164514 - RNA, 19 nt, Homo sapiens
  misc_RNA (1)...(19): siRNA sense strand
agaagaagaggaagaugaa

SEQ ID NO: 2164515 - RNA, 19 nt, Homo sapiens
  misc_RNA (1)...(19): siRNA sense strand
ucucuccucuggacaagaa

SEQ ID NO: 2164516 - RNA, 19 nt, Homo sapiens
  misc_RNA (1)...(19): siRNA sense strand
agaaguaaaugggagugaa

SEQ ID NO: 2164517 - RNA, 19 nt, Homo sapiens
  misc_RNA (1)...(19): siRNA sense strand
cagcgaagaagaagaggaa

SEQ ID NO: 2164518 - RNA, 19 nt, Homo sapiens
  misc_RNA (1)...(19): siRNA sense strand
aagaagaagaggaagauga

SEQ ID NO: 2164519 - RNA, 19 nt, Homo sapiens
  misc_RNA (1)...(19): siRNA sense strand
guacagugcuggggagauu

SEQ ID NO: 2164520 - RNA, 19 nt, Homo sapiens
  misc_RNA (1)...(19): siRNA sense strand
gcgaagaagaagaggaaga

SEQ ID NO: 2164521 - RNA, 19 nt, Homo sapiens
  misc_RNA (1)...(19): siRNA sense strand
ucaccaaggcugaauccaa

SEQ ID NO: 2164522 - RNA, 19 nt, Homo sapiens
  misc_RNA (1)...(19): siRNA sense strand
cgaagaagaagaggaagau

SEQ ID NO: 2164523 - RNA, 19 nt, Homo sapiens
  misc_RNA (1)...(19): siRNA sense strand
augaagagcaggaggauga

SEQ ID NO: 2164524 - RNA, 19 nt, Homo sapiens
  misc_RNA (1)...(19): siRNA sense strand
ccaggcaaccaucaaccua

SEQ ID NO: 2164525 - RNA, 19 nt, Homo sapiens
  misc_RNA (1)...(19): siRNA sense strand
gaagaagaagaggaagaug

SEQ ID NO: 2164526 - RNA, 19 nt, Homo sapiens
  misc_RNA (1)...(19): siRNA sense strand
caaccuauacgaggacuca

SEQ ID NO: 2164527 - RNA, 19 nt, Homo sapiens
  misc_RNA (1)...(19): siRNA sense strand
ggaugaagaagagaaguag

SEQ ID NO: 2164528 - RNA, 19 nt, Homo sapiens
  misc_RNA (1)...(19): siRNA sense strand
ggagugaaagaggaacuug

SEQ ID NO: 2164529 - RNA, 19 nt, Homo sapiens
  misc_RNA (1)...(19): siRNA sense strand
aagaagaggaagaugaaga

SEQ ID NO: 2164530 - RNA, 19 nt, Homo sapiens
  misc_RNA (1)...(19): siRNA sense strand
caaggcagaugaggaagcu

SEQ ID NO: 2164531 - RNA, 19 nt, Homo sapiens
  misc_RNA (1)...(19): siRNA sense strand
guaaaugggagugaaagag

SEQ ID NO: 2164532 - RNA, 19 nt, Homo sapiens
  misc_RNA (1)...(19): siRNA sense strand
gcacucccuggccuguuaa

SEQ ID NO: 2164533 - RNA, 19 nt, Homo sapiens
  misc_RNA (1)...(19): siRNA sense strand
ccaaggcugaauccaaguu

SEQ ID NO: 2164534 - RNA, 19 nt, Homo sapiens
  misc_RNA (1)...(19): siRNA sense strand
agacagcgaagaagaagag

SEQ ID NO: 2164535 - RNA, 19 nt, Homo sapiens
  misc_RNA (1)...(19): siRNA sense strand
ggaggaugaagaagagaag

SEQ ID NO: 2164536 - RNA, 19 nt, Homo sapiens
  misc_RNA (1)...(19): siRNA sense strand
cuaaaucccgcuccuucga

SEQ ID NO: 2164537 - RNA, 19 nt, Homo sapiens
  misc_RNA (1)...(19): siRNA sense strand
gaagaagaggaagaugaag

SEQ ID NO: 2164538 - RNA, 19 nt, Homo sapiens
  misc_RNA (1)...(19): siRNA sense strand
aggaugaagaagagaagua

SEQ ID NO: 2164539 - RNA, 19 nt, Homo sapiens
  misc_RNA (1)...(19): siRNA sense strand
gaaguuagguuucgaauuc

SEQ ID NO: 2164540 - RNA, 19 nt, Homo sapiens
  misc_RNA (1)...(19): siRNA sense strand
gaauuucccugagcuauua

SEQ ID NO: 2164541 - RNA, 19 nt, Homo sapiens
  misc_RNA (1)...(19): siRNA sense strand
gauaagaguuggauaguga

SEQ ID NO: 2164542 - RNA, 19 nt, Homo sapiens
  misc_RNA (1)...(19): siRNA sense strand
uaaaggaucugagaccaua

SEQ ID NO: 2164543 - RNA, 19 nt, Homo sapiens
  misc_RNA (1)...(19): siRNA sense strand
gaacucagcaugaccuuaa

SEQ ID NO: 2164544 - RNA, 19 nt, Homo sapiens
  misc_RNA (1)...(19): siRNA sense strand
gaacgggucuccucagugu

SEQ ID NO: 2164545 - RNA, 19 nt, Homo sapiens
  misc_RNA (1)...(19): siRNA sense strand
gaaaggagacuuauaugga

SEQ ID NO: 2164546 - RNA, 19 nt, Homo sapiens
  misc_RNA (1)...(19): siRNA sense strand
gaguuagcaucuccaauua

SEQ ID NO: 2164547 - RNA, 19 nt, Homo sapiens
  misc_RNA (1)...(19): siRNA sense strand
guuagcaucuccaauuaua

SEQ ID NO: 2164548 - RNA, 19 nt, Homo sapiens
  misc_RNA (1)...(19): siRNA sense strand
gcuauuaucuuugaacuug

SEQ ID NO: 2164549 - RNA, 19 nt, Homo sapiens
  misc_RNA (1)...(19): siRNA sense strand
gcaaguacuucaaggauag

SEQ ID NO: 2164550 - RNA, 19 nt, Homo sapiens
  misc_RNA (1)...(19): siRNA sense strand
gaaagucaacugcaagauu

SEQ ID NO: 2164551 - RNA, 19 nt, Homo sapiens
  misc_RNA (1)...(19): siRNA sense strand
gaaaugccauagugaauac

SEQ ID NO: 2164552 - RNA, 19 nt, Homo sapiens
  misc_RNA (1)...(19): siRNA sense strand
uaaagaaagucaacugcaa

SEQ ID NO: 2164553 - RNA, 19 nt, Homo sapiens
  misc_RNA (1)...(19): siRNA sense strand
ggacauguguuaccagaag

SEQ ID NO: 2164554 - RNA, 19 nt, Homo sapiens
  misc_RNA (1)...(19): siRNA sense strand
gaaccgagcagcuuggaaa

SEQ ID NO: 2164555 - RNA, 19 nt, Homo sapiens
  misc_RNA (1)...(19): siRNA sense strand
gaagaucauugaaaggaau

SEQ ID NO: 2164556 - RNA, 19 nt, Homo sapiens
  misc_RNA (1)...(19): siRNA sense strand
gaagucggcuugggaguug

SEQ ID NO: 2164557 - RNA, 19 nt, Homo sapiens
  misc_RNA (1)...(19): siRNA sense strand
ggacagaagggccuccaua

SEQ ID NO: 2164558 - RNA, 19 nt, Homo sapiens
  misc_RNA (1)...(19): siRNA sense strand
guacauaucagaauaaugg

SEQ ID NO: 2164559 - RNA, 19 nt, Homo sapiens
  misc_RNA (1)...(19): siRNA sense strand
ggcaguacauaucagaaua

SEQ ID NO: 2164560 - RNA, 19 nt, Homo sapiens
  misc_RNA (1)...(19): siRNA sense strand
gagaagaacacacagaaug

SEQ ID NO: 2164561 - RNA, 19 nt, Homo sapiens
  misc_RNA (1)...(19): siRNA sense strand
aaggauagcaggaauauaa

SEQ ID NO: 2164562 - RNA, 19 nt, Homo sapiens
  misc_RNA (1)...(19): siRNA sense strand
agagagaaguggagaagaa

SEQ ID NO: 2164563 - RNA, 19 nt, Homo sapiens
  misc_RNA (1)...(19): siRNA sense strand
uaaagagucuggugcuuca

SEQ ID NO: 2164564 - RNA, 19 nt, Homo sapiens
  misc_RNA (1)...(19): siRNA sense strand
ggaaagcuauaaaggaucu

SEQ ID NO: 2164565 - RNA, 19 nt, Homo sapiens
  misc_RNA (1)...(19): siRNA sense strand
cauagugaauaccaagaua

SEQ ID NO: 2164566 - RNA, 19 nt, Homo sapiens
  misc_RNA (1)...(19): siRNA sense strand
gcaauuccaaucuguauau

SEQ ID NO: 2164567 - RNA, 19 nt, Homo sapiens
  misc_RNA (1)...(19): siRNA sense strand
cacaauuccuuaugggaua

SEQ ID NO: 2164568 - RNA, 19 nt, Homo sapiens
  misc_RNA (1)...(19): siRNA sense strand
gaaccuucaucuugacuuc

SEQ ID NO: 2164569 - RNA, 19 nt, Homo sapiens
  misc_RNA (1)...(19): siRNA sense strand
ggaaccagaucaacuuugg

SEQ ID NO: 2164570 - RNA, 19 nt, Homo sapiens
  misc_RNA (1)...(19): siRNA sense strand
ucccugagcuauuaucuuu

SEQ ID NO: 2164571 - RNA, 19 nt, Homo sapiens
  misc_RNA (1)...(19): siRNA sense strand
aaagucaacugcaagauuc

SEQ ID NO: 2164572 - RNA, 19 nt, Homo sapiens
  misc_RNA (1)...(19): siRNA sense strand
gaagguagaugaaaaugug

SEQ ID NO: 2164573 - RNA, 19 nt, Homo sapiens
  misc_RNA (1)...(19): siRNA sense strand
agaagggccuccauaauca

SEQ ID NO: 2164574 - RNA, 19 nt, Homo sapiens
  misc_RNA (1)...(19): siRNA sense strand
gguagcagcucuccucaag

SEQ ID NO: 2164575 - RNA, 19 nt, Homo sapiens
  misc_RNA (1)...(19): siRNA sense strand
aaauaaagguggagauucu

SEQ ID NO: 2164576 - RNA, 19 nt, Homo sapiens
  misc_RNA (1)...(19): siRNA sense strand
ccacgaggauccccaaaua

SEQ ID NO: 2164577 - RNA, 19 nt, Homo sapiens
  misc_RNA (1)...(19): siRNA sense strand
uuaaggaaguggaaagaga

SEQ ID NO: 2164578 - RNA, 19 nt, Homo sapiens
  misc_RNA (1)...(19): siRNA sense strand
gcaguacauaucagaauaa

SEQ ID NO: 2164579 - RNA, 19 nt, Homo sapiens
  misc_RNA (1)...(19): siRNA sense strand
gggauaaaguaugauaaga

SEQ ID NO: 2164580 - RNA, 19 nt, Homo sapiens
  misc_RNA (1)...(19): siRNA sense strand
gacagaagggccuccauaa

SEQ ID NO: 2164581 - RNA, 19 nt, Homo sapiens
  misc_RNA (1)...(19): siRNA sense strand
gaaaugggguggagaguca

SEQ ID NO: 2164582 - RNA, 19 nt, Homo sapiens
  misc_RNA (1)...(19): siRNA sense strand
gaucugagaccauaaagag

SEQ ID NO: 2164583 - RNA, 19 nt, Homo sapiens
  misc_RNA (1)...(19): siRNA sense strand
gguuuaggauuaauaguuc

SEQ ID NO: 2164584 - RNA, 19 nt, Homo sapiens
  misc_RNA (1)...(19): siRNA sense strand
ggguggagagucaauaaua

SEQ ID NO: 2164585 - RNA, 19 nt, Homo sapiens
  misc_RNA (1)...(19): siRNA sense strand
agagaaggcucccaaaguc

SEQ ID NO: 2164586 - RNA, 19 nt, Homo sapiens
  misc_RNA (1)...(19): siRNA sense strand
ggauuaauaguucgugaaa

SEQ ID NO: 2164587 - RNA, 19 nt, Homo sapiens
  misc_RNA (1)...(19): siRNA sense strand
aaggaaagcuauaaaggau

SEQ ID NO: 2164588 - RNA, 19 nt, Homo sapiens
  misc_RNA (1)...(19): siRNA sense strand
ugaaaugccauagugaaua

SEQ ID NO: 2164589 - RNA, 19 nt, Homo sapiens
  misc_RNA (1)...(19): siRNA sense strand
cagaagggccuccauaauc

SEQ ID NO: 2164590 - RNA, 19 nt, Homo sapiens
  misc_RNA (1)...(19): siRNA sense strand
gguggagagucaauaauag

SEQ ID NO: 2164591 - RNA, 19 nt, Homo sapiens
  misc_RNA (1)...(19): siRNA sense strand
ccugagcuauuaucuuuga

SEQ ID NO: 2164592 - RNA, 19 nt, Homo sapiens
  misc_RNA (1)...(19): siRNA sense strand
ggaaaggagacuuauaugg

SEQ ID NO: 2164593 - RNA, 19 nt, Homo sapiens
  misc_RNA (1)...(19): siRNA sense strand
ggagaacacagugauggua

SEQ ID NO: 2164594 - RNA, 19 nt, Homo sapiens
  misc_RNA (1)...(19): siRNA sense strand
uagaauuccuccagagaga

SEQ ID NO: 2164595 - RNA, 19 nt, Homo sapiens
  misc_RNA (1)...(19): siRNA sense strand
uaaggaaagcuauaaagga

SEQ ID NO: 2164596 - RNA, 19 nt, Homo sapiens
  misc_RNA (1)...(19): siRNA sense strand
gagacuuggugaaacauca

SEQ ID NO: 2164597 - RNA, 19 nt, Homo sapiens
  misc_RNA (1)...(19): siRNA sense strand
ucaauggaguauuuaagga

SEQ ID NO: 2164598 - RNA, 19 nt, Homo sapiens
  misc_RNA (1)...(19): siRNA sense strand
uggccugccugacauuaua

SEQ ID NO: 2164599 - RNA, 19 nt, Homo sapiens
  misc_RNA (1)...(19): siRNA sense strand
gauagcaggaauauaaaga

SEQ ID NO: 2164600 - RNA, 19 nt, Homo sapiens
  misc_RNA (1)...(19): siRNA sense strand
gauagaauuccuccagaga

SEQ ID NO: 2164601 - RNA, 19 nt, Homo sapiens
  misc_RNA (1)...(19): siRNA sense strand
ugaagaucauugaaaggaa

SEQ ID NO: 2164602 - RNA, 19 nt, Homo sapiens
  misc_RNA (1)...(19): siRNA sense strand
agaguuggauagugaauuc

SEQ ID NO: 2164603 - RNA, 19 nt, Homo sapiens
  misc_RNA (1)...(19): siRNA sense strand
ugcaaguacuucaaggaua

SEQ ID NO: 2164604 - RNA, 19 nt, Homo sapiens
  misc_RNA (1)...(19): siRNA sense strand
ggaaaccgagguccgcauu

SEQ ID NO: 2164605 - RNA, 19 nt, Homo sapiens
  misc_RNA (1)...(19): siRNA sense strand
gaagaacacacagaaugga

SEQ ID NO: 2164606 - RNA, 19 nt, Homo sapiens
  misc_RNA (1)...(19): siRNA sense strand
ugaugaacaugauggguau

SEQ ID NO: 2164607 - RNA, 19 nt, Homo sapiens
  misc_RNA (1)...(19): siRNA sense strand
ccucaaugcuucucuuucu

SEQ ID NO: 2164608 - RNA, 19 nt, Homo sapiens
  misc_RNA (1)...(19): siRNA sense strand
cagaauggguccaggaaac

SEQ ID NO: 2164609 - RNA, 19 nt, Homo sapiens
  misc_RNA (1)...(19): siRNA sense strand
agcaugaccuuaacuccua

SEQ ID NO: 2164610 - RNA, 19 nt, Homo sapiens
  misc_RNA (1)...(19): siRNA sense strand
acacaggccugaggauuca

SEQ ID NO: 2164611 - RNA, 19 nt, Homo sapiens
  misc_RNA (1)...(19): siRNA sense strand
ccaguccgccuauguaaga

SEQ ID NO: 2164612 - RNA, 19 nt, Homo sapiens
  misc_RNA (1)...(19): siRNA sense strand
aaacaaccccucuaccuua

SEQ ID NO: 2164613 - RNA, 19 nt, Homo sapiens
  misc_RNA (1)...(19): siRNA sense strand
guagacuugugcauccaaa

SEQ ID NO: 2164614 - RNA, 19 nt, Homo sapiens
  misc_RNA (1)...(19): siRNA sense strand
gaccaguccgccuauguaa

SEQ ID NO: 2164615 - RNA, 19 nt, Homo sapiens
  misc_RNA (1)...(19): siRNA sense strand
gacccugaaucucuccaaa

SEQ ID NO: 2164616 - RNA, 19 nt, Homo sapiens
  misc_RNA (1)...(19): siRNA sense strand
ggauaaaguaugauaagag

SEQ ID NO: 2164617 - RNA, 19 nt, Homo sapiens
  misc_RNA (1)...(19): siRNA sense strand
gaaaauaaagguggagauu

SEQ ID NO: 2164618 - RNA, 19 nt, Homo sapiens
  misc_RNA (1)...(19): siRNA sense strand
ugacuucugucggcaauuc

SEQ ID NO: 2164619 - RNA, 19 nt, Homo sapiens
  misc_RNA (1)...(19): siRNA sense strand
gaggguggauggcaguaca

SEQ ID NO: 2164620 - RNA, 19 nt, Homo sapiens
  misc_RNA (1)...(19): siRNA sense strand
gcaauucuagggcaaguag

SEQ ID NO: 2164621 - RNA, 19 nt, Homo sapiens
  misc_RNA (1)...(19): siRNA sense strand
ggagaagaacacacagaau

SEQ ID NO: 2164622 - RNA, 19 nt, Homo sapiens
  misc_RNA (1)...(19): siRNA sense strand
gauaguaggagugugaaau

SEQ ID NO: 2164623 - RNA, 19 nt, Homo sapiens
  misc_RNA (1)...(19): siRNA sense strand
caaggauagcagaaauaua

SEQ ID NO: 2164624 - RNA, 19 nt, Homo sapiens
  misc_RNA (1)...(19): siRNA sense strand
cagaucaacuuuggaugga

SEQ ID NO: 2164625 - RNA, 19 nt, Homo sapiens
  misc_RNA (1)...(19): siRNA sense strand
ccgcauugcuuccgucaca

SEQ ID NO: 2164626 - RNA, 19 nt, Homo sapiens
  misc_RNA (1)...(19): siRNA sense strand
gagcuauuaucuuugaacu

SEQ ID NO: 2164627 - RNA, 19 nt, Homo sapiens
  misc_RNA (1)...(19): siRNA sense strand
gaugaaacuugagcagucu

SEQ ID NO: 2164628 - RNA, 19 nt, Homo sapiens
  misc_RNA (1)...(19): siRNA sense strand
ggaaugccagcacgaagga

SEQ ID NO: 2164629 - RNA, 19 nt, Homo sapiens
  misc_RNA (1)...(19): siRNA sense strand
guaaggaaagcuauaaagg

SEQ ID NO: 2164630 - RNA, 19 nt, Homo sapiens
  misc_RNA (1)...(19): siRNA sense strand
gugaauaccaagauagaau

SEQ ID NO: 2164631 - RNA, 19 nt, Homo sapiens
  misc_RNA (1)...(19): siRNA sense strand
agucugggaugaaacuuga

SEQ ID NO: 2164632 - RNA, 19 nt, Homo sapiens
  misc_RNA (1)...(19): siRNA sense strand
cauaaucacgagaaugcua

SEQ ID NO: 2164633 - RNA, 19 nt, Homo sapiens
  misc_RNA (1)...(19): siRNA sense strand
caauggaguauuuaaggaa

SEQ ID NO: 2164634 - RNA, 19 nt, Homo sapiens
  misc_RNA (1)...(19): siRNA sense strand
cggaaaggaugcucgucuu

SEQ ID NO: 2164635 - RNA, 19 nt, Homo sapiens
  misc_RNA (1)...(19): siRNA sense strand
guucaucuccuuacucauc

SEQ ID NO: 2164636 - RNA, 19 nt, Homo sapiens
  misc_RNA (1)...(19): siRNA sense strand
ugaccaguccgccuaugua

SEQ ID NO: 2164637 - RNA, 19 nt, Homo sapiens
  misc_RNA (1)...(19): siRNA sense strand
ugccugacauuauagagaa

SEQ ID NO: 2164638 - RNA, 19 nt, Homo sapiens
  misc_RNA (1)...(19): siRNA sense strand
ucacgagaaugcuagucuu

SEQ ID NO: 2164639 - RNA, 19 nt, Homo sapiens
  misc_RNA (1)...(19): siRNA sense strand
agaaacagcugcaaaauuu

SEQ ID NO: 2164640 - RNA, 19 nt, Homo sapiens
  misc_RNA (1)...(19): siRNA sense strand
gcaaaccgcuggucuuucg

SEQ ID NO: 2164641 - RNA, 19 nt, Homo sapiens
  misc_RNA (1)...(19): siRNA sense strand
gaagccaccucaaguccuu

SEQ ID NO: 2164642 - RNA, 19 nt, Homo sapiens
  misc_RNA (1)...(19): siRNA sense strand
ucacggagcuggccaggau

SEQ ID NO: 2164643 - RNA, 19 nt, Homo sapiens
  misc_RNA (1)...(19): siRNA sense strand
uuaagaagauugaggaaca

SEQ ID NO: 2164644 - RNA, 19 nt, Homo sapiens
  misc_RNA (1)...(19): siRNA sense strand
ggguauggaucgauggauu

SEQ ID NO: 2164645 - RNA, 19 nt, Homo sapiens
  misc_RNA (1)...(19): siRNA sense strand
gguauggaucgauggauua

SEQ ID NO: 2164646 - RNA, 19 nt, Homo sapiens
  misc_RNA (1)...(19): siRNA sense strand
gggaagauuuuguaccaua

SEQ ID NO: 2164647 - RNA, 19 nt, Homo sapiens
  misc_RNA (1)...(19): siRNA sense strand
ggucagcccucugugcaau

SEQ ID NO: 2164648 - RNA, 19 nt, Homo sapiens
  misc_RNA (1)...(19): siRNA sense strand
gcaauuucaacaucauaga

SEQ ID NO: 2164649 - RNA, 19 nt, Homo sapiens
  misc_RNA (1)...(19): siRNA sense strand
ucaacaucauagagucuuu

SEQ ID NO: 2164650 - RNA, 19 nt, Homo sapiens
  misc_RNA (1)...(19): siRNA sense strand
gauccuggucuacgacauu

SEQ ID NO: 2164651 - RNA, 19 nt, Homo sapiens
  misc_RNA (1)...(19): siRNA sense strand
cgaccaggccuacgacuuc

SEQ ID NO: 2164652 - RNA, 19 nt, Homo sapiens
  misc_RNA (1)...(19): siRNA sense strand
gaucgauggauuaagaaga

SEQ ID NO: 2164653 - RNA, 19 nt, Homo sapiens
  misc_RNA (1)...(19): siRNA sense strand
cgagcaagguacugagcuu

SEQ ID NO: 2164654 - RNA, 19 nt, Homo sapiens
  misc_RNA (1)...(19): siRNA sense strand
ucagcccucugugcaauuu

SEQ ID NO: 2164655 - RNA, 19 nt, Homo sapiens
  misc_RNA (1)...(19): siRNA sense strand
gccuacaucuggcauucaa

SEQ ID NO: 2164656 - RNA, 19 nt, Homo sapiens
  misc_RNA (1)...(19): siRNA sense strand
auggaucgauggauuaaga

SEQ ID NO: 2164657 - RNA, 19 nt, Homo sapiens
  misc_RNA (1)...(19): siRNA sense strand
gagugauccuggucuacga

SEQ ID NO: 2164658 - RNA, 19 nt, Homo sapiens
  misc_RNA (1)...(19): siRNA sense strand
uaagaagccaccucaaguc

SEQ ID NO: 2164659 - RNA, 19 nt, Homo sapiens
  misc_RNA (1)...(19): siRNA sense strand
ggaagauuuuguaccauau

SEQ ID NO: 2164660 - RNA, 19 nt, Homo sapiens
  misc_RNA (1)...(19): siRNA sense strand
uuaagaagccaccucaagu

SEQ ID NO: 2164661 - RNA, 19 nt, Homo sapiens
  misc_RNA (1)...(19): siRNA sense strand
uaagaagauugaggaacau

SEQ ID NO: 2164662 - RNA, 19 nt, Homo sapiens
  misc_RNA (1)...(19): siRNA sense strand
guauggaucgauggauuaa

SEQ ID NO: 2164663 - RNA, 19 nt, Homo sapiens
  misc_RNA (1)...(19): siRNA sense strand
gcuggucuuucgaggguau

SEQ ID NO: 2164664 - RNA, 19 nt, Homo sapiens
  misc_RNA (1)...(19): siRNA sense strand
caccagcuccacucacaaa

SEQ ID NO: 2164665 - RNA, 19 nt, Homo sapiens
  misc_RNA (1)...(19): siRNA sense strand
cuacaucuggcauucaaga

SEQ ID NO: 2164666 - RNA, 19 nt, Homo sapiens
  misc_RNA (1)...(19): siRNA sense strand
gauggauuaagaagauuga

SEQ ID NO: 2164667 - RNA, 19 nt, Homo sapiens
  misc_RNA (1)...(19): siRNA sense strand
gugcaauuucaacaucaua

SEQ ID NO: 2164668 - RNA, 19 nt, Homo sapiens
  misc_RNA (1)...(19): siRNA sense strand
caccagaaacagcugcaaa

SEQ ID NO: 2164669 - RNA, 19 nt, Homo sapiens
  misc_RNA (1)...(19): siRNA sense strand
gauuaagaagauugaggaa

SEQ ID NO: 2164670 - RNA, 19 nt, Homo sapiens
  misc_RNA (1)...(19): siRNA sense strand
gacguaggcaagagugaga

SEQ ID NO: 2164671 - RNA, 19 nt, Homo sapiens
  misc_RNA (1)...(19): siRNA sense strand
cagaaacagcugcaaaauu

SEQ ID NO: 2164672 - RNA, 19 nt, Homo sapiens
  misc_RNA (1)...(19): siRNA sense strand
gggcagggaagauuuugua

SEQ ID NO: 2164673 - RNA, 19 nt, Homo sapiens
  misc_RNA (1)...(19): siRNA sense strand
ucugugcaauuucaacauc

SEQ ID NO: 2164674 - RNA, 19 nt, Homo sapiens
  misc_RNA (1)...(19): siRNA sense strand
uugcaaaccgcuggucuuu

SEQ ID NO: 2164675 - RNA, 19 nt, Homo sapiens
  misc_RNA (1)...(19): siRNA sense strand
ggagcuggccaggauagug

SEQ ID NO: 2164676 - RNA, 19 nt, Homo sapiens
  misc_RNA (1)...(19): siRNA sense strand
caacaucauagagucuuuc

SEQ ID NO: 2164677 - RNA, 19 nt, Homo sapiens
  misc_RNA (1)...(19): siRNA sense strand
gaagagagcgcaaaugaua

SEQ ID NO: 2164678 - RNA, 19 nt, Homo sapiens
  misc_RNA (1)...(19): siRNA sense strand
caaaugauauggaauguga

SEQ ID NO: 2164679 - RNA, 19 nt, Homo sapiens
  misc_RNA (1)...(19): siRNA sense strand
ccagagaccucauggaauu

SEQ ID NO: 2164680 - RNA, 19 nt, Homo sapiens
  misc_RNA (1)...(19): siRNA sense strand
aagaggagcuggacaagua

SEQ ID NO: 2164681 - RNA, 19 nt, Homo sapiens
  misc_RNA (1)...(19): siRNA sense strand
gauaguggaucauaaagug

SEQ ID NO: 2164682 - RNA, 19 nt, Homo sapiens
  misc_RNA (1)...(19): siRNA sense strand
cagaagaucucgcucaaga

SEQ ID NO: 2164683 - RNA, 19 nt, Homo sapiens
  misc_RNA (1)...(19): siRNA sense strand
gaucaagucauucacauuu

SEQ ID NO: 2164684 - RNA, 19 nt, Homo sapiens
  misc_RNA (1)...(19): siRNA sense strand
caacagcucugaugaggau

SEQ ID NO: 2164685 - RNA, 19 nt, Homo sapiens
  misc_RNA (1)...(19): siRNA sense strand
gcacuuugcucuuguccuu

SEQ ID NO: 2164686 - RNA, 19 nt, Homo sapiens
  misc_RNA (1)...(19): siRNA sense strand
gaaaugccucuuccgaaua

SEQ ID NO: 2164687 - RNA, 19 nt, Homo sapiens
  misc_RNA (1)...(19): siRNA sense strand
ugaaugaacuuccuaccuu

SEQ ID NO: 2164688 - RNA, 19 nt, Homo sapiens
  misc_RNA (1)...(19): siRNA sense strand
gaugagcucuccuacucua

SEQ ID NO: 2164689 - RNA, 19 nt, Homo sapiens
  misc_RNA (1)...(19): siRNA sense strand
ugaaacaacucucaaugga

SEQ ID NO: 2164690 - RNA, 19 nt, Homo sapiens
  misc_RNA (1)...(19): siRNA sense strand
gagaagaaccuccggaaau

SEQ ID NO: 2164691 - RNA, 19 nt, Homo sapiens
  misc_RNA (1)...(19): siRNA sense strand
uagaagagguggugaggaa

SEQ ID NO: 2164692 - RNA, 19 nt, Homo sapiens
  misc_RNA (1)...(19): siRNA sense strand
acaaaugguuggaagauga

SEQ ID NO: 2164693 - RNA, 19 nt, Homo sapiens
  misc_RNA (1)...(19): siRNA sense strand
gagcgcaaaugauauggaa

SEQ ID NO: 2164694 - RNA, 19 nt, Homo sapiens
  misc_RNA (1)...(19): siRNA sense strand
gaucaaggcagauuacaug

SEQ ID NO: 2164695 - RNA, 19 nt, Homo sapiens
  misc_RNA (1)...(19): siRNA sense strand
agacagagcugaccaugca

SEQ ID NO: 2164696 - RNA, 19 nt, Homo sapiens
  misc_RNA (1)...(19): siRNA sense strand
gcaagugguucacaauaag

SEQ ID NO: 2164697 - RNA, 19 nt, Homo sapiens
  misc_RNA (1)...(19): siRNA sense strand
cacaaucacuccugaauca

SEQ ID NO: 2164698 - RNA, 19 nt, Homo sapiens
  misc_RNA (1)...(19): siRNA sense strand
ucaagaauguggagaagga

SEQ ID NO: 2164699 - RNA, 19 nt, Homo sapiens
  misc_RNA (1)...(19): siRNA sense strand
gaagaucucgcucaagaau

SEQ ID NO: 2164700 - RNA, 19 nt, Homo sapiens
  misc_RNA (1)...(19): siRNA sense strand
gagaugaugucggccauga

SEQ ID NO: 2164701 - RNA, 19 nt, Homo sapiens
  misc_RNA (1)...(19): siRNA sense strand
gaagaaccacgaagaggaa

SEQ ID NO: 2164702 - RNA, 19 nt, Homo sapiens
  misc_RNA (1)...(19): siRNA sense strand
ugaaaugccucuuccgaau

SEQ ID NO: 2164703 - RNA, 19 nt, Homo sapiens
  misc_RNA (1)...(19): siRNA sense strand
gagagacucauagaacuua

SEQ ID NO: 2164704 - RNA, 19 nt, Homo sapiens
  misc_RNA (1)...(19): siRNA sense strand
ccaacgagcugcugacagu

SEQ ID NO: 2164705 - RNA, 19 nt, Homo sapiens
  misc_RNA (1)...(19): siRNA sense strand
ucacagacaugucagagau

SEQ ID NO: 2164706 - RNA, 19 nt, Homo sapiens
  misc_RNA (1)...(19): siRNA sense strand
aaaugccucuuccgaauaa

SEQ ID NO: 2164707 - RNA, 19 nt, Homo sapiens
  misc_RNA (1)...(19): siRNA sense strand
guuggaagaugacuuuaga

SEQ ID NO: 2164708 - RNA, 19 nt, Homo sapiens
  misc_RNA (1)...(19): siRNA sense strand
gacaagagcccaacucaca

SEQ ID NO: 2164709 - RNA, 19 nt, Homo sapiens
  misc_RNA (1)...(19): siRNA sense strand
ucucagaucuccgaguaua

SEQ ID NO: 2164710 - RNA, 19 nt, Homo sapiens
  misc_RNA (1)...(19): siRNA sense strand
aaaccaaccucaccacugu

SEQ ID NO: 2164711 - RNA, 19 nt, Homo sapiens
  misc_RNA (1)...(19): siRNA sense strand
gguuggagcugcugagaug

SEQ ID NO: 2164712 - RNA, 19 nt, Homo sapiens
  misc_RNA (1)...(19): siRNA sense strand
caaaucugcuuucaucagu

SEQ ID NO: 2164713 - RNA, 19 nt, Homo sapiens
  misc_RNA (1)...(19): siRNA sense strand
ccacugugcuguccgaguu

SEQ ID NO: 2164714 - RNA, 19 nt, Homo sapiens
  misc_RNA (1)...(19): siRNA sense strand
gaacagaaucacaaguuuc

SEQ ID NO: 2164715 - RNA, 19 nt, Homo sapiens
  misc_RNA (1)...(19): siRNA sense strand
ggaccacuguuaaggaugu

SEQ ID NO: 2164716 - RNA, 19 nt, Homo sapiens
  misc_RNA (1)...(19): siRNA sense strand
ggacuucaaucuuggugau

SEQ ID NO: 2164717 - RNA, 19 nt, Homo sapiens
  misc_RNA (1)...(19): siRNA sense strand
ugacauugauugacagugu

SEQ ID NO: 2164718 - RNA, 19 nt, Homo sapiens
  misc_RNA (1)...(19): siRNA sense strand
aggcaaagcuccaguaucu

SEQ ID NO: 2164719 - RNA, 19 nt, Homo sapiens
  misc_RNA (1)...(19): siRNA sense strand
gcaauuccaugcaaaccau

SEQ ID NO: 2164720 - RNA, 19 nt, Homo sapiens
  misc_RNA (1)...(19): siRNA sense strand
cgagaacgcuuuggaaugg

SEQ ID NO: 2164721 - RNA, 19 nt, Homo sapiens
  misc_RNA (1)...(19): siRNA sense strand
gggacaaccugcccaagga

SEQ ID NO: 2164722 - RNA, 19 nt, Homo sapiens
  misc_RNA (1)...(19): siRNA sense strand
agaacagaaucacaaguuu

SEQ ID NO: 2164723 - RNA, 19 nt, Homo sapiens
  misc_RNA (1)...(19): siRNA sense strand
gaggagagcaccacaaugg

SEQ ID NO: 2164724 - RNA, 19 nt, Homo sapiens
  misc_RNA (1)...(19): siRNA sense strand
gcucugcaauucaggcaaa

SEQ ID NO: 2164725 - RNA, 19 nt, Homo sapiens
  misc_RNA (1)...(19): siRNA sense strand
gaaccacgaagaggaagua

SEQ ID NO: 2164726 - RNA, 19 nt, Homo sapiens
  misc_RNA (1)...(19): siRNA sense strand
cuaggaagcuugaaacaac

SEQ ID NO: 2164727 - RNA, 19 nt, Homo sapiens
  misc_RNA (1)...(19): siRNA sense strand
ccagugacauugauugaca

SEQ ID NO: 2164728 - RNA, 19 nt, Homo sapiens
  misc_RNA (1)...(19): siRNA sense strand
agaagcaggucaugugaug

SEQ ID NO: 2164729 - RNA, 19 nt, Homo sapiens
  misc_RNA (1)...(19): siRNA sense strand
ccacagcccguaaccuuaa

SEQ ID NO: 2164730 - RNA, 19 nt, Homo sapiens
  misc_RNA (1)...(19): siRNA sense strand
ccagacagauggccguguu

SEQ ID NO: 2164731 - RNA, 19 nt, Homo sapiens
  misc_RNA (1)...(19): siRNA sense strand
caucaucccucagugaaga

SEQ ID NO: 2164732 - RNA, 19 nt, Homo sapiens
  misc_RNA (1)...(19): siRNA sense strand
cugaagcccugaauuucua

SEQ ID NO: 2164733 - RNA, 19 nt, Homo sapiens
  misc_RNA (1)...(19): siRNA sense strand
gcuccaguaucuacgaauu

SEQ ID NO: 2164734 - RNA, 19 nt, Homo sapiens
  misc_RNA (1)...(19): siRNA sense strand
gaccagauuguggcuauua

SEQ ID NO: 2164735 - RNA, 19 nt, Homo sapiens
  misc_RNA (1)...(19): siRNA sense strand
ucaccgagacccuauauau

SEQ ID NO: 2164736 - RNA, 19 nt, Homo sapiens
  misc_RNA (1)...(19): siRNA sense strand
ugucucagaucuccgagua

SEQ ID NO: 2164737 - RNA, 19 nt, Homo sapiens
  misc_RNA (1)...(19): siRNA sense strand
ccaguaagaaucugaaguu

SEQ ID NO: 2164738 - RNA, 19 nt, Homo sapiens
  misc_RNA (1)...(19): siRNA sense strand
ggacucaggucaugaaacc

SEQ ID NO: 2164739 - RNA, 19 nt, Homo sapiens
  misc_RNA (1)...(19): siRNA sense strand
uggccaagguuaugaggua

SEQ ID NO: 2164740 - RNA, 19 nt, Homo sapiens
  misc_RNA (1)...(19): siRNA sense strand
caggaaagccggacagaug

SEQ ID NO: 2164741 - RNA, 19 nt, Homo sapiens
  misc_RNA (1)...(19): siRNA sense strand
gcaaagcuccaguaucuac

SEQ ID NO: 2164742 - RNA, 19 nt, Homo sapiens
  misc_RNA (1)...(19): siRNA sense strand
gaagaagaaccacgaagag

SEQ ID NO: 2164743 - RNA, 19 nt, Homo sapiens
  misc_RNA (1)...(19): siRNA sense strand
caacuucggcgacuguuau

SEQ ID NO: 2164744 - RNA, 19 nt, Homo sapiens
  misc_RNA (1)...(19): siRNA sense strand
gcagguggcaguuggagaa

SEQ ID NO: 2164745 - RNA, 19 nt, Homo sapiens
  misc_RNA (1)...(19): siRNA sense strand
gagauacugcgacaaguga

SEQ ID NO: 2164746 - RNA, 19 nt, Homo sapiens
  misc_RNA (1)...(19): siRNA sense strand
gcagaagcaggucauguga

SEQ ID NO: 2164747 - RNA, 19 nt, Homo sapiens
  misc_RNA (1)...(19): siRNA sense strand
ggaggaagaugagacaacu

SEQ ID NO: 2164748 - RNA, 19 nt, Homo sapiens
  misc_RNA (1)...(19): siRNA sense strand
agaagaaccuccggaaauc

SEQ ID NO: 2164749 - RNA, 19 nt, Homo sapiens
  misc_RNA (1)...(19): siRNA sense strand
ccuaauguccugaagguuu

SEQ ID NO: 2164750 - RNA, 19 nt, Homo sapiens
  misc_RNA (1)...(19): siRNA sense strand
gaacaagccgagagucagu

SEQ ID NO: 2164751 - RNA, 19 nt, Homo sapiens
  misc_RNA (1)...(19): siRNA sense strand
cuucagagcucacagacau

SEQ ID NO: 2164752 - RNA, 19 nt, Homo sapiens
  misc_RNA (1)...(19): siRNA sense strand
caacgagaaccuaaucuuc

SEQ ID NO: 2164753 - RNA, 19 nt, Homo sapiens
  misc_RNA (1)...(19): siRNA sense strand
ccacuuccaccuccaauga

SEQ ID NO: 2164754 - RNA, 19 nt, Homo sapiens
  misc_RNA (1)...(19): siRNA sense strand
caacugaaggcucaccaaa

SEQ ID NO: 2164755 - RNA, 19 nt, Homo sapiens
  misc_RNA (1)...(19): siRNA sense strand
uuacaguucugcacacuca

SEQ ID NO: 2164756 - RNA, 19 nt, Homo sapiens
  misc_RNA (1)...(19): siRNA sense strand
gagauugaccuccgugugu

SEQ ID NO: 2164757 - RNA, 19 nt, Homo sapiens
  misc_RNA (1)...(19): siRNA sense strand
cagcaagugguucacaaua

SEQ ID NO: 2164758 - RNA, 19 nt, Homo sapiens
  misc_RNA (1)...(19): siRNA sense strand
cagaacagaaucacaaguu

SEQ ID NO: 2164759 - RNA, 19 nt, Homo sapiens
  misc_RNA (1)...(19): siRNA sense strand
ucacggaacugagacauac

SEQ ID NO: 2164760 - RNA, 19 nt, Homo sapiens
  misc_RNA (1)...(19): siRNA sense strand
cacauucacccacuccuua

SEQ ID NO: 2164761 - RNA, 19 nt, Homo sapiens
  misc_RNA (1)...(19): siRNA sense strand
gaagguaaagcaguaugaa

SEQ ID NO: 2164762 - RNA, 19 nt, Homo sapiens
  misc_RNA (1)...(19): siRNA sense strand
gagcagcagugccaguaag

SEQ ID NO: 2164763 - RNA, 19 nt, Homo sapiens
  misc_RNA (1)...(19): siRNA sense strand
agcaagugguucacaauaa

SEQ ID NO: 2164764 - RNA, 19 nt, Homo sapiens
  misc_RNA (1)...(19): siRNA sense strand
gagguucauugagcacuuu

SEQ ID NO: 2164765 - RNA, 19 nt, Homo sapiens
  misc_RNA (1)...(19): siRNA sense strand
gcgcaaaugauauggaaug

SEQ ID NO: 2164766 - RNA, 19 nt, Homo sapiens
  misc_RNA (1)...(19): siRNA sense strand
gcuaugcccuacagaugga

SEQ ID NO: 2164767 - RNA, 19 nt, Homo sapiens
  misc_RNA (1)...(19): siRNA sense strand
agaagaaggagacagauga

SEQ ID NO: 2164768 - RNA, 19 nt, Homo sapiens
  misc_RNA (1)...(19): siRNA sense strand
gcaccaugcccucuaggaa

SEQ ID NO: 2164769 - RNA, 19 nt, Homo sapiens
  misc_RNA (1)...(19): siRNA sense strand
gacaaaugguuggaagaug

SEQ ID NO: 2164770 - RNA, 19 nt, Homo sapiens
  misc_RNA (1)...(19): siRNA sense strand
caggagcgcuaaggaauuc

SEQ ID NO: 2164771 - RNA, 19 nt, Homo sapiens
  misc_RNA (1)...(19): siRNA sense strand
ggagagacucauagaacuu

SEQ ID NO: 2164772 - RNA, 19 nt, Homo sapiens
  misc_RNA (1)...(19): siRNA sense strand
gggagagacucauagaacu

SEQ ID NO: 2164773 - RNA, 19 nt, Homo sapiens
  misc_RNA (1)...(19): siRNA sense strand
aggcuaagaucgccaccua

SEQ ID NO: 2164774 - RNA, 19 nt, Homo sapiens
  misc_RNA (1)...(19): siRNA sense strand
gagauuccagugacauuga

SEQ ID NO: 2164775 - RNA, 19 nt, Homo sapiens
  misc_RNA (1)...(19): siRNA sense strand
ugcagaagguaaagcagua

SEQ ID NO: 2164776 - RNA, 19 nt, Homo sapiens
  misc_RNA (1)...(19): siRNA sense strand
ugaagaagaaccacgaaga

SEQ ID NO: 2164777 - RNA, 19 nt, Homo sapiens
  misc_RNA (1)...(19): siRNA sense strand
ucaccaaccugucauauua

SEQ ID NO: 2164778 - RNA, 19 nt, Homo sapiens
  misc_RNA (1)...(19): siRNA sense strand
caacagagcauuuauuuga

SEQ ID NO: 2164779 - RNA, 19 nt, Homo sapiens
  misc_RNA (1)...(19): siRNA sense strand
cgaaagaucuccucuggau

SEQ ID NO: 2164780 - RNA, 19 nt, Homo sapiens
  misc_RNA (1)...(19): siRNA sense strand
gcaaauaccgaaacaauag

SEQ ID NO: 2164781 - RNA, 19 nt, Homo sapiens
  misc_RNA (1)...(19): siRNA sense strand
aaaggaagcccacgacaua

SEQ ID NO: 2164782 - RNA, 19 nt, Homo sapiens
  misc_RNA (1)...(19): siRNA sense strand
ucauaagcaugcccuguaa

SEQ ID NO: 2164783 - RNA, 19 nt, Homo sapiens
  misc_RNA (1)...(19): siRNA sense strand
gugcucaccuucuucgaaa

SEQ ID NO: 2164784 - RNA, 19 nt, Homo sapiens
  misc_RNA (1)...(19): siRNA sense strand
gaaaucaugagguccaaug

SEQ ID NO: 2164785 - RNA, 19 nt, Homo sapiens
  misc_RNA (1)...(19): siRNA sense strand
ggacccaacagagcauuua

SEQ ID NO: 2164786 - RNA, 19 nt, Homo sapiens
  misc_RNA (1)...(19): siRNA sense strand
aagcaugcccuguaaauau

SEQ ID NO: 2164787 - RNA, 19 nt, Homo sapiens
  misc_RNA (1)...(19): siRNA sense strand
ugaagacgaucauaagcau

SEQ ID NO: 2164788 - RNA, 19 nt, Homo sapiens
  misc_RNA (1)...(19): siRNA sense strand
acagagcauuuauuugaga

SEQ ID NO: 2164789 - RNA, 19 nt, Homo sapiens
  misc_RNA (1)...(19): siRNA sense strand
uaagcaugcccuguaaaua

SEQ ID NO: 2164790 - RNA, 19 nt, Homo sapiens
  misc_RNA (1)...(19): siRNA sense strand
cccaacagagcauuuauuu

SEQ ID NO: 2164791 - RNA, 19 nt, Homo sapiens
  misc_RNA (1)...(19): siRNA sense strand
uagcaaauaccgaaacaau

SEQ ID NO: 2164792 - RNA, 19 nt, Homo sapiens
  misc_RNA (1)...(19): siRNA sense strand
gacauagagaccaggcuua

SEQ ID NO: 2164793 - RNA, 19 nt, Homo sapiens
  misc_RNA (1)...(19): siRNA sense strand
uggagaagcugcugaagac

SEQ ID NO: 2164794 - RNA, 19 nt, Homo sapiens
  misc_RNA (1)...(19): siRNA sense strand
uuaaugagguggagaagcu

SEQ ID NO: 2164795 - RNA, 19 nt, Homo sapiens
  misc_RNA (1)...(19): siRNA sense strand
gaccacaguauaccaaaug

SEQ ID NO: 2164796 - RNA, 19 nt, Homo sapiens
  misc_RNA (1)...(19): siRNA sense strand
gagaauggcagugaguuuc

SEQ ID NO: 2164797 - RNA, 19 nt, Homo sapiens
  misc_RNA (1)...(19): siRNA sense strand
agcaugcccuguaaauauu

SEQ ID NO: 2164798 - RNA, 19 nt, Homo sapiens
  misc_RNA (1)...(19): siRNA sense strand
cagagcauuuauuugagaa

SEQ ID NO: 2164799 - RNA, 19 nt, Homo sapiens
  misc_RNA (1)...(19): siRNA sense strand
gacagacauuugggacuga

SEQ ID NO: 2164800 - RNA, 19 nt, Homo sapiens
  misc_RNA (1)...(19): siRNA sense strand
auagagaccaggcuuaaug

SEQ ID NO: 2164801 - RNA, 19 nt, Homo sapiens
  misc_RNA (1)...(19): siRNA sense strand
cacaguauaccaaauggaa

SEQ ID NO: 2164802 - RNA, 19 nt, Homo sapiens
  misc_RNA (1)...(19): siRNA sense strand
ugagaauggcagugaguuu

SEQ ID NO: 2164803 - RNA, 19 nt, Homo sapiens
  misc_RNA (1)...(19): siRNA sense strand
uaaaggaagcccacgacau

SEQ ID NO: 2164804 - RNA, 19 nt, Homo sapiens
  misc_RNA (1)...(19): siRNA sense strand
ugaccacaguauaccaaau

SEQ ID NO: 2164805 - RNA, 19 nt, Homo sapiens
  misc_RNA (1)...(19): siRNA sense strand
agaagcugcugaagacgau

SEQ ID NO: 2164806 - RNA, 19 nt, Homo sapiens
  misc_RNA (1)...(19): siRNA sense strand
guggagaagcugcugaaga

SEQ ID NO: 2164807 - RNA, 19 nt, Homo sapiens
  misc_RNA (1)...(19): siRNA sense strand
ucaaaguccagucaaaaua

SEQ ID NO: 2164808 - RNA, 19 nt, Homo sapiens
  misc_RNA (1)...(19): siRNA sense strand
caaggacugguugccauaa

SEQ ID NO: 2164809 - RNA, 19 nt, Homo sapiens
  misc_RNA (1)...(19): siRNA sense strand
aaggacugguugccauaaa

SEQ ID NO: 2164810 - RNA, 19 nt, Homo sapiens
  misc_RNA (1)...(19): siRNA sense strand
ccaacagagcauuuauuug

SEQ ID NO: 2164811 - RNA, 19 nt, Homo sapiens
  misc_RNA (1)...(19): siRNA sense strand
acauagagaccaggcuuaa

SEQ ID NO: 2164812 - RNA, 19 nt, Homo sapiens
  misc_RNA (1)...(19): siRNA sense strand
uagagaccaggcuuaauga

SEQ ID NO: 2164813 - RNA, 19 nt, Homo sapiens
  misc_RNA (1)...(19): siRNA sense strand
agcaaauaccgaaacaaua

SEQ ID NO: 2164814 - RNA, 19 nt, Homo sapiens
  misc_RNA (1)...(19): siRNA sense strand
uauucuagaucggaaguug

SEQ ID NO: 2164815 - RNA, 19 nt, Homo sapiens
  misc_RNA (1)...(19): siRNA sense strand
guuauugaccacaguauac

SEQ ID NO: 2164816 - RNA, 19 nt, Homo sapiens
  misc_RNA (1)...(19): siRNA sense strand
ggaagcccacgacauagag

SEQ ID NO: 2164817 - RNA, 19 nt, Homo sapiens
  misc_RNA (1)...(19): siRNA sense strand
caguauaccaaauggaaga

SEQ ID NO: 2164818 - RNA, 19 nt, Homo sapiens
  misc_RNA (1)...(19): siRNA sense strand
cugcugaagacgaucauaa

SEQ ID NO: 2164819 - RNA, 19 nt, Homo sapiens
  misc_RNA (1)...(19): siRNA sense strand
caaaguccagucaaaauau

SEQ ID NO: 2164820 - RNA, 19 nt, Homo sapiens
  misc_RNA (1)...(19): siRNA sense strand
cagaaaucaugagguccaa

SEQ ID NO: 2164821 - RNA, 19 nt, Homo sapiens
  misc_RNA (1)...(19): siRNA sense strand
cggaaguugugcucaccuu

SEQ ID NO: 2164822 - RNA, 19 nt, Homo sapiens
  misc_RNA (1)...(19): siRNA sense strand
caaauaccgaaacaauagu

SEQ ID NO: 2164823 - RNA, 19 nt, Homo sapiens
  misc_RNA (1)...(19): siRNA sense strand
gaagcccacgacauagaga

SEQ ID NO: 2164824 - RNA, 19 nt, Homo sapiens
  misc_RNA (1)...(19): siRNA sense strand
cuacgucaccaaccuguca

SEQ ID NO: 2164825 - RNA, 19 nt, Homo sapiens
  misc_RNA (1)...(19): siRNA sense strand
ggacugguugccauaaagg

SEQ ID NO: 2164826 - RNA, 19 nt, Homo sapiens
  misc_RNA (1)...(19): siRNA sense strand
gucaccaaccugucauauu

SEQ ID NO: 2164827 - RNA, 19 nt, Homo sapiens
  misc_RNA (1)...(19): siRNA sense strand
auaagcaugcccuguaaau

SEQ ID NO: 2164828 - RNA, 19 nt, Homo sapiens
  misc_RNA (1)...(19): siRNA sense strand
cauaagcaugcccuguaaa

SEQ ID NO: 2164829 - RNA, 19 nt, Homo sapiens
  misc_RNA (1)...(19): siRNA sense strand
ucaccaaccugucauauua

SEQ ID NO: 2164830 - RNA, 19 nt, Homo sapiens
  misc_RNA (1)...(19): siRNA sense strand
caacagagcauuuauuuga

SEQ ID NO: 2164831 - RNA, 19 nt, Homo sapiens
  misc_RNA (1)...(19): siRNA sense strand
cgaaagaucuccucuggau

SEQ ID NO: 2164832 - RNA, 19 nt, Homo sapiens
  misc_RNA (1)...(19): siRNA sense strand
gcaaauaccgaaacaauag

SEQ ID NO: 2164833 - RNA, 19 nt, Homo sapiens
  misc_RNA (1)...(19): siRNA sense strand
aaaggaagcccacgacaua

SEQ ID NO: 2164834 - RNA, 19 nt, Homo sapiens
  misc_RNA (1)...(19): siRNA sense strand
ucauaagcaugcccuguaa

SEQ ID NO: 2164835 - RNA, 19 nt, Homo sapiens
  misc_RNA (1)...(19): siRNA sense strand
gugcucaccuucuucgaaa

SEQ ID NO: 2164836 - RNA, 19 nt, Homo sapiens
  misc_RNA (1)...(19): siRNA sense strand
gaaaucaugagguccaaug

SEQ ID NO: 2164837 - RNA, 19 nt, Homo sapiens
  misc_RNA (1)...(19): siRNA sense strand
ggacccaacagagcauuua

SEQ ID NO: 2164838 - RNA, 19 nt, Homo sapiens
  misc_RNA (1)...(19): siRNA sense strand
aagcaugcccuguaaauau

SEQ ID NO: 2164839 - RNA, 19 nt, Homo sapiens
  misc_RNA (1)...(19): siRNA sense strand
ugaagacgaucauaagcau

SEQ ID NO: 2164840 - RNA, 19 nt, Homo sapiens
  misc_RNA (1)...(19): siRNA sense strand
acagagcauuuauuugaga

SEQ ID NO: 2164841 - RNA, 19 nt, Homo sapiens
  misc_RNA (1)...(19): siRNA sense strand
uaagcaugcccuguaaaua

SEQ ID NO: 2164842 - RNA, 19 nt, Homo sapiens
  misc_RNA (1)...(19): siRNA sense strand
cccaacagagcauuuauuu

SEQ ID NO: 2164843 - RNA, 19 nt, Homo sapiens
  misc_RNA (1)...(19): siRNA sense strand
uagcaaauaccgaaacaau

SEQ ID NO: 2164844 - RNA, 19 nt, Homo sapiens
  misc_RNA (1)...(19): siRNA sense strand
gacauagagaccaggcuua

SEQ ID NO: 2164845 - RNA, 19 nt, Homo sapiens
  misc_RNA (1)...(19): siRNA sense strand
uggagaagcugcugaagac

SEQ ID NO: 2164846 - RNA, 19 nt, Homo sapiens
  misc_RNA (1)...(19): siRNA sense strand
uuaaugagguggagaagcu

SEQ ID NO: 2164847 - RNA, 19 nt, Homo sapiens
  misc_RNA (1)...(19): siRNA sense strand
gaccacaguauaccaaaug

SEQ ID NO: 2164848 - RNA, 19 nt, Homo sapiens
  misc_RNA (1)...(19): siRNA sense strand
gagaauggcagugaguuuc

SEQ ID NO: 2164849 - RNA, 19 nt, Homo sapiens
  misc_RNA (1)...(19): siRNA sense strand
agcaugcccuguaaauauu

SEQ ID NO: 2164850 - RNA, 19 nt, Homo sapiens
  misc_RNA (1)...(19): siRNA sense strand
cagagcauuuauuugagaa

SEQ ID NO: 2164851 - RNA, 19 nt, Homo sapiens
  misc_RNA (1)...(19): siRNA sense strand
gacagacauuugggacuga

SEQ ID NO: 2164852 - RNA, 19 nt, Homo sapiens
  misc_RNA (1)...(19): siRNA sense strand
auagagaccaggcuuaaug

SEQ ID NO: 2164853 - RNA, 19 nt, Homo sapiens
  misc_RNA (1)...(19): siRNA sense strand
cacaguauaccaaauggaa

SEQ ID NO: 2164854 - RNA, 19 nt, Homo sapiens
  misc_RNA (1)...(19): siRNA sense strand
ugagaauggcagugaguuu

SEQ ID NO: 2164855 - RNA, 19 nt, Homo sapiens
  misc_RNA (1)...(19): siRNA sense strand
uaaaggaagcccacgacau

SEQ ID NO: 2164856 - RNA, 19 nt, Homo sapiens
  misc_RNA (1)...(19): siRNA sense strand
ugaccacaguauaccaaau

SEQ ID NO: 2164857 - RNA, 19 nt, Homo sapiens
  misc_RNA (1)...(19): siRNA sense strand
agaagcugcugaagacgau

SEQ ID NO: 2164858 - RNA, 19 nt, Homo sapiens
  misc_RNA (1)...(19): siRNA sense strand
guggagaagcugcugaaga

SEQ ID NO: 2164859 - RNA, 19 nt, Homo sapiens
  misc_RNA (1)...(19): siRNA sense strand
ucaaaguccagucaaaaua

SEQ ID NO: 2164860 - RNA, 19 nt, Homo sapiens
  misc_RNA (1)...(19): siRNA sense strand
caaggacugguugccauaa

SEQ ID NO: 2164861 - RNA, 19 nt, Homo sapiens
  misc_RNA (1)...(19): siRNA sense strand
aaggacugguugccauaaa

SEQ ID NO: 2164862 - RNA, 19 nt, Homo sapiens
  misc_RNA (1)...(19): siRNA sense strand
ccaacagagcauuuauuug

SEQ ID NO: 2164863 - RNA, 19 nt, Homo sapiens
  misc_RNA (1)...(19): siRNA sense strand
acauagagaccaggcuuaa

SEQ ID NO: 2164864 - RNA, 19 nt, Homo sapiens
  misc_RNA (1)...(19): siRNA sense strand
uagagaccaggcuuaauga

SEQ ID NO: 2164865 - RNA, 19 nt, Homo sapiens
  misc_RNA (1)...(19): siRNA sense strand
agcaaauaccgaaacaaua

SEQ ID NO: 2164866 - RNA, 19 nt, Homo sapiens
  misc_RNA (1)...(19): siRNA sense strand
uauucuagaucggaaguug

SEQ ID NO: 2164867 - RNA, 19 nt, Homo sapiens
  misc_RNA (1)...(19): siRNA sense strand
guuauugaccacaguauac

SEQ ID NO: 2164868 - RNA, 19 nt, Homo sapiens
  misc_RNA (1)...(19): siRNA sense strand
ggaagcccacgacauagag

SEQ ID NO: 2164869 - RNA, 19 nt, Homo sapiens
  misc_RNA (1)...(19): siRNA sense strand
caguauaccaaauggaaga

SEQ ID NO: 2164870 - RNA, 19 nt, Homo sapiens
  misc_RNA (1)...(19): siRNA sense strand
cugcugaagacgaucauaa

SEQ ID NO: 2164871 - RNA, 19 nt, Homo sapiens
  misc_RNA (1)...(19): siRNA sense strand
caaaguccagucaaaauau

SEQ ID NO: 2164872 - RNA, 19 nt, Homo sapiens
  misc_RNA (1)...(19): siRNA sense strand
cagaaaucaugagguccaa

SEQ ID NO: 2164873 - RNA, 19 nt, Homo sapiens
  misc_RNA (1)...(19): siRNA sense strand
cggaaguugugcucaccuu

SEQ ID NO: 2164874 - RNA, 19 nt, Homo sapiens
  misc_RNA (1)...(19): siRNA sense strand
caaauaccgaaacaauagu

SEQ ID NO: 2164875 - RNA, 19 nt, Homo sapiens
  misc_RNA (1)...(19): siRNA sense strand
gaagcccacgacauagaga

SEQ ID NO: 2164876 - RNA, 19 nt, Homo sapiens
  misc_RNA (1)...(19): siRNA sense strand
cuacgucaccaaccuguca

SEQ ID NO: 2164877 - RNA, 19 nt, Homo sapiens
  misc_RNA (1)...(19): siRNA sense strand
ggacugguugccauaaagg

SEQ ID NO: 2164878 - RNA, 19 nt, Homo sapiens
  misc_RNA (1)...(19): siRNA sense strand
gucaccaaccugucauauu

SEQ ID NO: 2164879 - RNA, 19 nt, Homo sapiens
  misc_RNA (1)...(19): siRNA sense strand
auaagcaugcccuguaaau

SEQ ID NO: 2164880 - RNA, 19 nt, Homo sapiens
  misc_RNA (1)...(19): siRNA sense strand
cauaagcaugcccuguaaa

SEQ ID NO: 2164881 - RNA, 19 nt, Homo sapiens
  misc_RNA (1)...(19): siRNA sense strand
ggaaaacgguucaugauua

SEQ ID NO: 2164882 - RNA, 19 nt, Homo sapiens
  misc_RNA (1)...(19): siRNA sense strand
ccuaauaacuggaugcauu

SEQ ID NO: 2164883 - RNA, 19 nt, Homo sapiens
  misc_RNA (1)...(19): siRNA sense strand
ggacaacgccuccaacugu

SEQ ID NO: 2164884 - RNA, 19 nt, Homo sapiens
  misc_RNA (1)...(19): siRNA sense strand
gaucuugugugugauaaug

SEQ ID NO: 2164885 - RNA, 19 nt, Homo sapiens
  misc_RNA (1)...(19): siRNA sense strand
cuuguaugcuuuacgaaua

SEQ ID NO: 2164886 - RNA, 19 nt, Homo sapiens
  misc_RNA (1)...(19): siRNA sense strand
ggaagguccauaucgcuaa

SEQ ID NO: 2164887 - RNA, 19 nt, Homo sapiens
  misc_RNA (1)...(19): siRNA sense strand
cagguucuuugaaggauuu

SEQ ID NO: 2164888 - RNA, 19 nt, Homo sapiens
  misc_RNA (1)...(19): siRNA sense strand
agugggaucuuguguguga

SEQ ID NO: 2164889 - RNA, 19 nt, Homo sapiens
  misc_RNA (1)...(19): siRNA sense strand
uccaucaucuucauucuga

SEQ ID NO: 2164890 - RNA, 19 nt, Homo sapiens
  misc_RNA (1)...(19): siRNA sense strand
caucuucauucugaucuuu

SEQ ID NO: 2164891 - RNA, 19 nt, Homo sapiens
  misc_RNA (1)...(19): siRNA sense strand
acacucagguucuuugaag

SEQ ID NO: 2164892 - RNA, 19 nt, Homo sapiens
  misc_RNA (1)...(19): siRNA sense strand
gaagguccauaucgcuaag

SEQ ID NO: 2164893 - RNA, 19 nt, Homo sapiens
  misc_RNA (1)...(19): siRNA sense strand
aaucuuuggcuaccuaaua

SEQ ID NO: 2164894 - RNA, 19 nt, Homo sapiens
  misc_RNA (1)...(19): siRNA sense strand
cagugaaugugacaauguu

SEQ ID NO: 2164895 - RNA, 19 nt, Homo sapiens
  misc_RNA (1)...(19): siRNA sense strand
gaaaacgguucaugauuac

SEQ ID NO: 2164896 - RNA, 19 nt, Homo sapiens
  misc_RNA (1)...(19): siRNA sense strand
ucuuguugcuggacuauga

SEQ ID NO: 2164897 - RNA, 19 nt, Homo sapiens
  misc_RNA (1)...(19): siRNA sense strand
gcacacucagguucuuuga

SEQ ID NO: 2164898 - RNA, 19 nt, Homo sapiens
  misc_RNA (1)...(19): siRNA sense strand
uugccuggcuggaaucauu

SEQ ID NO: 2164899 - RNA, 19 nt, Homo sapiens
  misc_RNA (1)...(19): siRNA sense strand
auucugaucuuuggacuga

SEQ ID NO: 2164900 - RNA, 19 nt, Homo sapiens
  misc_RNA (1)...(19): siRNA sense strand
gggaucuugugugugauaa

SEQ ID NO: 2164901 - RNA, 19 nt, Homo sapiens
  misc_RNA (1)...(19): siRNA sense strand
cugguuggauuaaucuuug

SEQ ID NO: 2164902 - RNA, 19 nt, Homo sapiens
  misc_RNA (1)...(19): siRNA sense strand
caccuuguaugcuuuacga

SEQ ID NO: 2164903 - RNA, 19 nt, Homo sapiens
  misc_RNA (1)...(19): siRNA sense strand
cuaauaacuggaugcauug

SEQ ID NO: 2164904 - RNA, 19 nt, Homo sapiens
  misc_RNA (1)...(19): siRNA sense strand
auuaaucuuuggcuaccua

SEQ ID NO: 2164905 - RNA, 19 nt, Homo sapiens
  misc_RNA (1)...(19): siRNA sense strand
ucagguucuuugaaggauu

SEQ ID NO: 2164906 - RNA, 19 nt, Homo sapiens
  misc_RNA (1)...(19): siRNA sense strand
aucuuuggcuaccuaauaa

SEQ ID NO: 2164907 - RNA, 19 nt, Homo sapiens
  misc_RNA (1)...(19): siRNA sense strand
uuacgaugguggcgagcuu

SEQ ID NO: 2164908 - RNA, 19 nt, Homo sapiens
  misc_RNA (1)...(19): siRNA sense strand
ucagugaaugugacaaugu

SEQ ID NO: 2164909 - RNA, 19 nt, Homo sapiens
  misc_RNA (1)...(19): siRNA sense strand
auucucaccuuguaugcuu

SEQ ID NO: 2164910 - RNA, 19 nt, Homo sapiens
  misc_RNA (1)...(19): siRNA sense strand
ucuccuuacugguuggauu

SEQ ID NO: 2164911 - RNA, 19 nt, Homo sapiens
  misc_RNA (1)...(19): siRNA sense strand
cuuacugguuggauuaauc

SEQ ID NO: 2164912 - RNA, 19 nt, Homo sapiens
  misc_RNA (1)...(19): siRNA sense strand
aaacgguucaugauuacga

SEQ ID NO: 2164913 - RNA, 19 nt, Homo sapiens
  misc_RNA (1)...(19): siRNA sense strand
ggacugacuguggcacugu

SEQ ID NO: 2164914 - RNA, 19 nt, Homo sapiens
  misc_RNA (1)...(19): siRNA sense strand
uccagaacguggucagcaa

SEQ ID NO: 2164915 - RNA, 19 nt, Homo sapiens
  misc_RNA (1)...(19): siRNA sense strand
ucagcacacucagguucuu

SEQ ID NO: 2164916 - RNA, 19 nt, Homo sapiens
  misc_RNA (1)...(19): siRNA sense strand
gcugcaggcccucaucauc

SEQ ID NO: 2164917 - RNA, 19 nt, Homo sapiens
  misc_RNA (1)...(19): siRNA sense strand
gaacugauccugaagacaa

SEQ ID NO: 2164918 - RNA, 19 nt, Homo sapiens
  misc_RNA (1)...(19): siRNA sense strand
ccacugggcuccugccaua

SEQ ID NO: 2164919 - RNA, 19 nt, Homo sapiens
  misc_RNA (1)...(19): siRNA sense strand
aaacugagguguaugauca

SEQ ID NO: 2164920 - RNA, 19 nt, Homo sapiens
  misc_RNA (1)...(19): siRNA sense strand
caaauaccaugcacuuuau

SEQ ID NO: 2164921 - RNA, 19 nt, Homo sapiens
  misc_RNA (1)...(19): siRNA sense strand
acaaauaccaugcacuuua

SEQ ID NO: 2164922 - RNA, 19 nt, Homo sapiens
  misc_RNA (1)...(19): siRNA sense strand
ggacaaauaccaugcacuu

SEQ ID NO: 2164923 - RNA, 19 nt, Homo sapiens
  misc_RNA (1)...(19): siRNA sense strand
gaucaggugcuguuccaua

SEQ ID NO: 2164924 - RNA, 19 nt, Homo sapiens
  misc_RNA (1)...(19): siRNA sense strand
gaagacaaaggaccuauca

SEQ ID NO: 2164925 - RNA, 19 nt, Homo sapiens
  misc_RNA (1)...(19): siRNA sense strand
cagcacaaauuuggucuaa

SEQ ID NO: 2164926 - RNA, 19 nt, Homo sapiens
  misc_RNA (1)...(19): siRNA sense strand
gcacaaauuuggucuaacc

SEQ ID NO: 2164927 - RNA, 19 nt, Homo sapiens
  misc_RNA (1)...(19): siRNA sense strand
ccuggucccucaucaguuu

SEQ ID NO: 2164928 - RNA, 19 nt, Homo sapiens
  misc_RNA (1)...(19): siRNA sense strand
aaaggugugugcucuguga

SEQ ID NO: 2164929 - RNA, 19 nt, Homo sapiens
  misc_RNA (1)...(19): siRNA sense strand
gccaggagaugguggacaa

SEQ ID NO: 2164930 - RNA, 19 nt, Homo sapiens
  misc_RNA (1)...(19): siRNA sense strand
aggcaucacuccucacuug

SEQ ID NO: 2164931 - RNA, 19 nt, Homo sapiens
  misc_RNA (1)...(19): siRNA sense strand
aggagaugguggacaaaua

SEQ ID NO: 2164932 - RNA, 19 nt, Homo sapiens
  misc_RNA (1)...(19): siRNA sense strand
gggaaacugagguguauga

SEQ ID NO: 2164933 - RNA, 19 nt, Homo sapiens
  misc_RNA (1)...(19): siRNA sense strand
ccaaaggugugugcucugu

SEQ ID NO: 2164934 - RNA, 19 nt, Homo sapiens
  misc_RNA (1)...(19): siRNA sense strand
cacuauggcugcucagaga

SEQ ID NO: 2164935 - RNA, 19 nt, Homo sapiens
  misc_RNA (1)...(19): siRNA sense strand
gugaggcccugcaaagugu

SEQ ID NO: 2164936 - RNA, 19 nt, Homo sapiens
  misc_RNA (1)...(19): siRNA sense strand
uaucuuugguuucuacugu

SEQ ID NO: 2164937 - RNA, 19 nt, Homo sapiens
  misc_RNA (1)...(19): siRNA sense strand
cuacuguugugucuucuau

SEQ ID NO: 2164938 - RNA, 19 nt, Homo sapiens
  misc_RNA (1)...(19): siRNA sense strand
ggagaugguggacaaauac

SEQ ID NO: 2164939 - RNA, 19 nt, Homo sapiens
  misc_RNA (1)...(19): siRNA sense strand
gaaacugagguguaugauc

SEQ ID NO: 2164940 - RNA, 19 nt, Homo sapiens
  misc_RNA (1)...(19): siRNA sense strand
ggugaggcccugcaaagug

SEQ ID NO: 2164941 - RNA, 19 nt, Homo sapiens
  misc_RNA (1)...(19): siRNA sense strand
gauagcaggauguacaagu

SEQ ID NO: 2164942 - RNA, 19 nt, Homo sapiens
  misc_RNA (1)...(19): siRNA sense strand
uauggaugcucugcacaaa

SEQ ID NO: 2164943 - RNA, 19 nt, Homo sapiens
  misc_RNA (1)...(19): siRNA sense strand
auagcaggauguacaaguu

SEQ ID NO: 2164944 - RNA, 19 nt, Homo sapiens
  misc_RNA (1)...(19): siRNA sense strand
caaccucgugggcauugua

SEQ ID NO: 2164945 - RNA, 19 nt, Homo sapiens
  misc_RNA (1)...(19): siRNA sense strand
gacaaauaccaugcacuuu

SEQ ID NO: 2164946 - RNA, 19 nt, Homo sapiens
  misc_RNA (1)...(19): siRNA sense strand
gaucuugcagccauuguuc

SEQ ID NO: 2164947 - RNA, 19 nt, Homo sapiens
  misc_RNA (1)...(19): siRNA sense strand
gcuaccagugcuuuacuuu

SEQ ID NO: 2164948 - RNA, 19 nt, Homo sapiens
  misc_RNA (1)...(19): siRNA sense strand
ccaggccuauugucacugu

SEQ ID NO: 2164949 - RNA, 19 nt, Homo sapiens
  misc_RNA (1)...(19): siRNA sense strand
uggccacgcuguccugguu

SEQ ID NO: 2164950 - RNA, 19 nt, Homo sapiens
  misc_RNA (1)...(19): siRNA sense strand
uaccagugcuuuacuuugc

SEQ ID NO: 2164951 - RNA, 19 nt, Homo sapiens
  misc_RNA (1)...(19): siRNA sense strand
caacaccaccacccucauc

SEQ ID NO: 2164952 - RNA, 19 nt, Homo sapiens
  misc_RNA (1)...(19): siRNA sense strand
ccagccagccaucaacuau

SEQ ID NO: 2164953 - RNA, 19 nt, Homo sapiens
  misc_RNA (1)...(19): siRNA sense strand
uggaugcucugcacaaacu

SEQ ID NO: 2164954 - RNA, 19 nt, Homo sapiens
  misc_RNA (1)...(19): siRNA sense strand
aucaggugcuguuccauaa

SEQ ID NO: 2164955 - RNA, 19 nt, Homo sapiens
  misc_RNA (1)...(19): siRNA sense strand
ccucaucaguuuggaucuu

SEQ ID NO: 2164956 - RNA, 19 nt, Homo sapiens
  misc_RNA (1)...(19): siRNA sense strand
aaacuguucgaccagcaua

SEQ ID NO: 2164957 - RNA, 19 nt, Homo sapiens
  misc_RNA (1)...(19): siRNA sense strand
gugcuguuccauaaggaua

SEQ ID NO: 2164958 - RNA, 19 nt, Homo sapiens
  misc_RNA (1)...(19): siRNA sense strand
uuucuacuguugugucuuc

SEQ ID NO: 2164959 - RNA, 19 nt, Homo sapiens
  misc_RNA (1)...(19): siRNA sense strand
gcagcacaaauuuggucua

SEQ ID NO: 2164960 - RNA, 19 nt, Homo sapiens
  misc_RNA (1)...(19): siRNA sense strand
caggugcuguuccauaagg

SEQ ID NO: 2164961 - RNA, 19 nt, Homo sapiens
  misc_RNA (1)...(19): siRNA sense strand
cccauggccuccugaccuu

SEQ ID NO: 2164962 - RNA, 19 nt, Homo sapiens
  misc_RNA (1)...(19): siRNA sense strand
aaggauagcaggauguaca

SEQ ID NO: 2164963 - RNA, 19 nt, Homo sapiens
  misc_RNA (1)...(19): siRNA sense strand
uaucaccugagcacaacua

SEQ ID NO: 2164964 - RNA, 19 nt, Homo sapiens
  misc_RNA (1)...(19): siRNA sense strand
ggaucuugcagccauuguu

SEQ ID NO: 2164965 - RNA, 19 nt, Homo sapiens
  misc_RNA (1)...(19): siRNA sense strand
cgccguaucuuugguuucu

SEQ ID NO: 2164966 - RNA, 19 nt, Homo sapiens
  misc_RNA (1)...(19): siRNA sense strand
guucgucuaccugcuguuu

SEQ ID NO: 2164967 - RNA, 19 nt, Homo sapiens
  misc_RNA (1)...(19): siRNA sense strand
uucaagauccccuuuguua

SEQ ID NO: 2164968 - RNA, 19 nt, Homo sapiens
  misc_RNA (1)...(19): siRNA sense strand
uguaugaucaggugcuguu

SEQ ID NO: 2164969 - RNA, 19 nt, Homo sapiens
  misc_RNA (1)...(19): siRNA sense strand
ggaugcaucucccucuuga

SEQ ID NO: 2164970 - RNA, 19 nt, Homo sapiens
  misc_RNA (1)...(19): siRNA sense strand
gcaucucccucuugagcua

SEQ ID NO: 2164971 - RNA, 19 nt, Homo sapiens
  misc_RNA (1)...(19): siRNA sense strand
ggaaggagaacaacaugcu

SEQ ID NO: 2164972 - RNA, 19 nt, Homo sapiens
  misc_RNA (1)...(19): siRNA sense strand
ccaucucgcugccuauugg

SEQ ID NO: 2164973 - RNA, 19 nt, Homo sapiens
  misc_RNA (1)...(19): siRNA sense strand
ucacugggaaggagaacaa

SEQ ID NO: 2164974 - RNA, 19 nt, Homo sapiens
  misc_RNA (1)...(19): siRNA sense strand
gcccgagacccacaucuuc

SEQ ID NO: 2164975 - RNA, 19 nt, Homo sapiens
  misc_RNA (1)...(19): siRNA sense strand
gaggcucugcugacucuga

SEQ ID NO: 2164976 - RNA, 19 nt, Homo sapiens
  misc_RNA (1)...(19): siRNA sense strand
ccauccgugucaggaauuu

SEQ ID NO: 2164977 - RNA, 19 nt, Homo sapiens
  misc_RNA (1)...(19): siRNA sense strand
gcucugcugacucugagaa

SEQ ID NO: 2164978 - RNA, 19 nt, Homo sapiens
  misc_RNA (1)...(19): siRNA sense strand
ucaggaauuugaccaucag

SEQ ID NO: 2164979 - RNA, 19 nt, Homo sapiens
  misc_RNA (1)...(19): siRNA sense strand
cugaggcucugcugacucu

SEQ ID NO: 2164980 - RNA, 19 nt, Homo sapiens
  misc_RNA (1)...(19): siRNA sense strand
ggaugcaucucccucuuga

SEQ ID NO: 2164981 - RNA, 19 nt, Homo sapiens
  misc_RNA (1)...(19): siRNA sense strand
gcaucucccucuugagcua

SEQ ID NO: 2164982 - RNA, 19 nt, Homo sapiens
  misc_RNA (1)...(19): siRNA sense strand
ggaaggagaacaacaugcu

SEQ ID NO: 2164983 - RNA, 19 nt, Homo sapiens
  misc_RNA (1)...(19): siRNA sense strand
ccaucucgcugccuauugg

SEQ ID NO: 2164984 - RNA, 19 nt, Homo sapiens
  misc_RNA (1)...(19): siRNA sense strand
ucacugggaaggagaacaa

SEQ ID NO: 2164985 - RNA, 19 nt, Homo sapiens
  misc_RNA (1)...(19): siRNA sense strand
gcccgagacccacaucuuc

SEQ ID NO: 2164986 - RNA, 19 nt, Homo sapiens
  misc_RNA (1)...(19): siRNA sense strand
gaggcucugcugacucuga

SEQ ID NO: 2164987 - RNA, 19 nt, Homo sapiens
  misc_RNA (1)...(19): siRNA sense strand
ccauccgugucaggaauuu

SEQ ID NO: 2164988 - RNA, 19 nt, Homo sapiens
  misc_RNA (1)...(19): siRNA sense strand
gcucugcugacucugagaa

SEQ ID NO: 2164989 - RNA, 19 nt, Homo sapiens
  misc_RNA (1)...(19): siRNA sense strand
ucaggaauuugaccaucag

SEQ ID NO: 2164990 - RNA, 19 nt, Homo sapiens
  misc_RNA (1)...(19): siRNA sense strand
cugaggcucugcugacucu

SEQ ID NO: 2164991 - RNA, 19 nt, Homo sapiens
  misc_RNA (1)...(19): siRNA sense strand
agaaucagcucaacaaaua

SEQ ID NO: 2164992 - RNA, 19 nt, Homo sapiens
  misc_RNA (1)...(19): siRNA sense strand
gaagaaagauggaaaggau

SEQ ID NO: 2164993 - RNA, 19 nt, Homo sapiens
  misc_RNA (1)...(19): siRNA sense strand
gcaacaagguccuguauga

SEQ ID NO: 2164994 - RNA, 19 nt, Homo sapiens
  misc_RNA (1)...(19): siRNA sense strand
gcaaagcauugaugagaua

SEQ ID NO: 2164995 - RNA, 19 nt, Homo sapiens
  misc_RNA (1)...(19): siRNA sense strand
gaggauggauuuacuuuaa

SEQ ID NO: 2164996 - RNA, 19 nt, Homo sapiens
  misc_RNA (1)...(19): siRNA sense strand
gaaaguuggugaucuaaau

SEQ ID NO: 2164997 - RNA, 19 nt, Homo sapiens
  misc_RNA (1)...(19): siRNA sense strand
gcaggaagaugcccaauuc

SEQ ID NO: 2164998 - RNA, 19 nt, Homo sapiens
  misc_RNA (1)...(19): siRNA sense strand
ggagagaucugcuuuccuu

SEQ ID NO: 2164999 - RNA, 19 nt, Homo sapiens
  misc_RNA (1)...(19): siRNA sense strand
ugaugacucuuaccaauua

SEQ ID NO: 2165000 - RNA, 19 nt, Homo sapiens
  misc_RNA (1)...(19): siRNA sense strand
gaggguaucugcagacauu

SEQ ID NO: 2165001 - RNA, 19 nt, Homo sapiens
  misc_RNA (1)...(19): siRNA sense strand
gugcaaacaugccugguua

SEQ ID NO: 2165002 - RNA, 19 nt, Homo sapiens
  misc_RNA (1)...(19): siRNA sense strand
gcagucaucucauaacuuc

SEQ ID NO: 2165003 - RNA, 19 nt, Homo sapiens
  misc_RNA (1)...(19): siRNA sense strand
ccacugaccuccuggauau

SEQ ID NO: 2165004 - RNA, 19 nt, Homo sapiens
  misc_RNA (1)...(19): siRNA sense strand
caaagaaucccauccauug

SEQ ID NO: 2165005 - RNA, 19 nt, Homo sapiens
  misc_RNA (1)...(19): siRNA sense strand
gagaacagguccacaagga

SEQ ID NO: 2165006 - RNA, 19 nt, Homo sapiens
  misc_RNA (1)...(19): siRNA sense strand
gaagaaaggcaaagaggaa

SEQ ID NO: 2165007 - RNA, 19 nt, Homo sapiens
  misc_RNA (1)...(19): siRNA sense strand
caagaaagcaagccaauug

SEQ ID NO: 2165008 - RNA, 19 nt, Homo sapiens
  misc_RNA (1)...(19): siRNA sense strand
agaggaaagugcucaauaa

SEQ ID NO: 2165009 - RNA, 19 nt, Homo sapiens
  misc_RNA (1)...(19): siRNA sense strand
caaguagucuccauggaaa

SEQ ID NO: 2165010 - RNA, 19 nt, Homo sapiens
  misc_RNA (1)...(19): siRNA sense strand
gacaugcucuucugaaaug

SEQ ID NO: 2165011 - RNA, 19 nt, Homo sapiens
  misc_RNA (1)...(19): siRNA sense strand
aagaagauguggauaacua

SEQ ID NO: 2165012 - RNA, 19 nt, Homo sapiens
  misc_RNA (1)...(19): siRNA sense strand
aauccaaucugucucaaua

SEQ ID NO: 2165013 - RNA, 19 nt, Homo sapiens
  misc_RNA (1)...(19): siRNA sense strand
gaaaauaaccucacaccua

SEQ ID NO: 2165014 - RNA, 19 nt, Homo sapiens
  misc_RNA (1)...(19): siRNA sense strand
ggaagaugaugaugaaugg

SEQ ID NO: 2165015 - RNA, 19 nt, Homo sapiens
  misc_RNA (1)...(19): siRNA sense strand
ggaaagugcucaauaaaau

SEQ ID NO: 2165016 - RNA, 19 nt, Homo sapiens
  misc_RNA (1)...(19): siRNA sense strand
gauaguuccuucauugaga

SEQ ID NO: 2165017 - RNA, 19 nt, Homo sapiens
  misc_RNA (1)...(19): siRNA sense strand
gaagaagagacucgcauuu

SEQ ID NO: 2165018 - RNA, 19 nt, Homo sapiens
  misc_RNA (1)...(19): siRNA sense strand
gaaauuucagcaaguagua

SEQ ID NO: 2165019 - RNA, 19 nt, Homo sapiens
  misc_RNA (1)...(19): siRNA sense strand
gggauucaguguauuaaug

SEQ ID NO: 2165020 - RNA, 19 nt, Homo sapiens
  misc_RNA (1)...(19): siRNA sense strand
gcaaacaugccugguuaua

SEQ ID NO: 2165021 - RNA, 19 nt, Homo sapiens
  misc_RNA (1)...(19): siRNA sense strand
aaccaaagcucuucucaga

SEQ ID NO: 2165022 - RNA, 19 nt, Homo sapiens
  misc_RNA (1)...(19): siRNA sense strand
ucaagcaacuauagaaaug

SEQ ID NO: 2165023 - RNA, 19 nt, Homo sapiens
  misc_RNA (1)...(19): siRNA sense strand
ugaaaugccuuuaucaucu

SEQ ID NO: 2165024 - RNA, 19 nt, Homo sapiens
  misc_RNA (1)...(19): siRNA sense strand
gcaaguaguaaacagauuu

SEQ ID NO: 2165025 - RNA, 19 nt, Homo sapiens
  misc_RNA (1)...(19): siRNA sense strand
ucagauacagugaagauua

SEQ ID NO: 2165026 - RNA, 19 nt, Homo sapiens
  misc_RNA (1)...(19): siRNA sense strand
gagaggaaagugcucaaua

SEQ ID NO: 2165027 - RNA, 19 nt, Homo sapiens
  misc_RNA (1)...(19): siRNA sense strand
gcucuaccuucuuugauaa

SEQ ID NO: 2165028 - RNA, 19 nt, Homo sapiens
  misc_RNA (1)...(19): siRNA sense strand
caaauuaccagaugugaga

SEQ ID NO: 2165029 - RNA, 19 nt, Homo sapiens
  misc_RNA (1)...(19): siRNA sense strand
ggagaaaacacucugauua

SEQ ID NO: 2165030 - RNA, 19 nt, Homo sapiens
  misc_RNA (1)...(19): siRNA sense strand
cauggucacuucccaauga

SEQ ID NO: 2165031 - RNA, 19 nt, Homo sapiens
  misc_RNA (1)...(19): siRNA sense strand
ggacaccacaggagucuaa

SEQ ID NO: 2165032 - RNA, 19 nt, Homo sapiens
  misc_RNA (1)...(19): siRNA sense strand
ucaaacaguucccgucuau

SEQ ID NO: 2165033 - RNA, 19 nt, Homo sapiens
  misc_RNA (1)...(19): siRNA sense strand
gcaagccaauuguucaaau

SEQ ID NO: 2165034 - RNA, 19 nt, Homo sapiens
  misc_RNA (1)...(19): siRNA sense strand
gaaagcaagccaauuguuc

SEQ ID NO: 2165035 - RNA, 19 nt, Homo sapiens
  misc_RNA (1)...(19): siRNA sense strand
gaagaaaaguaacccguaa

SEQ ID NO: 2165036 - RNA, 19 nt, Homo sapiens
  misc_RNA (1)...(19): siRNA sense strand
agacaaagguguagagaag

SEQ ID NO: 2165037 - RNA, 19 nt, Homo sapiens
  misc_RNA (1)...(19): siRNA sense strand
gaagucauuugcagcucua

SEQ ID NO: 2165038 - RNA, 19 nt, Homo sapiens
  misc_RNA (1)...(19): siRNA sense strand
ccaacagccuucuggauga

SEQ ID NO: 2165039 - RNA, 19 nt, Homo sapiens
  misc_RNA (1)...(19): siRNA sense strand
gaaaugccuuuaucaucug

SEQ ID NO: 2165040 - RNA, 19 nt, Homo sapiens
  misc_RNA (1)...(19): siRNA sense strand
gaagcuagguuaaaaucua

SEQ ID NO: 2165041 - RNA, 19 nt, Homo sapiens
  misc_RNA (1)...(19): siRNA sense strand
gcuccuagcugugcaaaug

SEQ ID NO: 2165042 - RNA, 19 nt, Homo sapiens
  misc_RNA (1)...(19): siRNA sense strand
ggaaggacaggaagacaaa

SEQ ID NO: 2165043 - RNA, 19 nt, Homo sapiens
  misc_RNA (1)...(19): siRNA sense strand
gaugagauagcaccacuaa

SEQ ID NO: 2165044 - RNA, 19 nt, Homo sapiens
  misc_RNA (1)...(19): siRNA sense strand
ucugucagcucaaguaauu

SEQ ID NO: 2165045 - RNA, 19 nt, Homo sapiens
  misc_RNA (1)...(19): siRNA sense strand
ggucggcucuuuagcuuug

SEQ ID NO: 2165046 - RNA, 19 nt, Homo sapiens
  misc_RNA (1)...(19): siRNA sense strand
ccacuaauauaccuguuau

SEQ ID NO: 2165047 - RNA, 19 nt, Homo sapiens
  misc_RNA (1)...(19): siRNA sense strand
ccucaaaggcuaauuuaaa

SEQ ID NO: 2165048 - RNA, 19 nt, Homo sapiens
  misc_RNA (1)...(19): siRNA sense strand
uaauagugcuucugugaau

SEQ ID NO: 2165049 - RNA, 19 nt, Homo sapiens
  misc_RNA (1)...(19): siRNA sense strand
ccacaaagaaagggaaaua

SEQ ID NO: 2165050 - RNA, 19 nt, Homo sapiens
  misc_RNA (1)...(19): siRNA sense strand
guuagaugcuucugacuug

SEQ ID NO: 2165051 - RNA, 19 nt, Homo sapiens
  misc_RNA (1)...(19): siRNA sense strand
agaggaagaugaugaugaa

SEQ ID NO: 2165052 - RNA, 19 nt, Homo sapiens
  misc_RNA (1)...(19): siRNA sense strand
caagauaaggcuauuguug

SEQ ID NO: 2165053 - RNA, 19 nt, Homo sapiens
  misc_RNA (1)...(19): siRNA sense strand
caagugcaauacagaagaa

SEQ ID NO: 2165054 - RNA, 19 nt, Homo sapiens
  misc_RNA (1)...(19): siRNA sense strand
gaugauggucggcucuuua

SEQ ID NO: 2165055 - RNA, 19 nt, Homo sapiens
  misc_RNA (1)...(19): siRNA sense strand
gaaucaagcaacuauagaa

SEQ ID NO: 2165056 - RNA, 19 nt, Homo sapiens
  misc_RNA (1)...(19): siRNA sense strand
gaucagaggcacgcuagua

SEQ ID NO: 2165057 - RNA, 19 nt, Homo sapiens
  misc_RNA (1)...(19): siRNA sense strand
gagaaaagccugccuuaaa

SEQ ID NO: 2165058 - RNA, 19 nt, Homo sapiens
  misc_RNA (1)...(19): siRNA sense strand
guggauaacuacauguuug

SEQ ID NO: 2165059 - RNA, 19 nt, Homo sapiens
  misc_RNA (1)...(19): siRNA sense strand
ggcaaaggcugcuaagagu

SEQ ID NO: 2165060 - RNA, 19 nt, Homo sapiens
  misc_RNA (1)...(19): siRNA sense strand
aaacaugccugguuauaac

SEQ ID NO: 2165061 - RNA, 19 nt, Homo sapiens
  misc_RNA (1)...(19): siRNA sense strand
ggacaauguucgagacaag

SEQ ID NO: 2165062 - RNA, 19 nt, Homo sapiens
  misc_RNA (1)...(19): siRNA sense strand
cugcuaauguuaccacuaa

SEQ ID NO: 2165063 - RNA, 19 nt, Homo sapiens
  misc_RNA (1)...(19): siRNA sense strand
cagauacagugaagauuau

SEQ ID NO: 2165064 - RNA, 19 nt, Homo sapiens
  misc_RNA (1)...(19): siRNA sense strand
ccaaagaggaagaugauga

SEQ ID NO: 2165065 - RNA, 19 nt, Homo sapiens
  misc_RNA (1)...(19): siRNA sense strand
ggacugcaguacccuuuca

SEQ ID NO: 2165066 - RNA, 19 nt, Homo sapiens
  misc_RNA (1)...(19): siRNA sense strand
gcuaauguuaccacuaaua

SEQ ID NO: 2165067 - RNA, 19 nt, Homo sapiens
  misc_RNA (1)...(19): siRNA sense strand
gaggaaagugcucaauaaa

SEQ ID NO: 2165068 - RNA, 19 nt, Homo sapiens
  misc_RNA (1)...(19): siRNA sense strand
gcuaauagugcuucuguga

SEQ ID NO: 2165069 - RNA, 19 nt, Homo sapiens
  misc_RNA (1)...(19): siRNA sense strand
ccaaggcccugagagauga

SEQ ID NO: 2165070 - RNA, 19 nt, Homo sapiens
  misc_RNA (1)...(19): siRNA sense strand
caaacaugccugguuauaa

SEQ ID NO: 2165071 - RNA, 19 nt, Homo sapiens
  misc_RNA (1)...(19): siRNA sense strand
uggcagaugugcagagauu

SEQ ID NO: 2165072 - RNA, 19 nt, Homo sapiens
  misc_RNA (1)...(19): siRNA sense strand
ggaggauggauuuacuuua

SEQ ID NO: 2165073 - RNA, 19 nt, Homo sapiens
  misc_RNA (1)...(19): siRNA sense strand
caacagugaauuugaguga

SEQ ID NO: 2165074 - RNA, 19 nt, Homo sapiens
  misc_RNA (1)...(19): siRNA sense strand
uaaaugagaggaaggaaug

SEQ ID NO: 2165075 - RNA, 19 nt, Homo sapiens
  misc_RNA (1)...(19): siRNA sense strand
gaacaugcugcuaauagug

SEQ ID NO: 2165076 - RNA, 19 nt, Homo sapiens
  misc_RNA (1)...(19): siRNA sense strand
ugagagaugagaaauguaa

SEQ ID NO: 2165077 - RNA, 19 nt, Homo sapiens
  misc_RNA (1)...(19): siRNA sense strand
caacauugccucugguaug

SEQ ID NO: 2165078 - RNA, 19 nt, Homo sapiens
  misc_RNA (1)...(19): siRNA sense strand
ggauggcgaugaugauauc

SEQ ID NO: 2165079 - RNA, 19 nt, Homo sapiens
  misc_RNA (1)...(19): siRNA sense strand
acaaagguguagagaagaa

SEQ ID NO: 2165080 - RNA, 19 nt, Homo sapiens
  misc_RNA (1)...(19): siRNA sense strand
gaaagcuccauuugccaua

SEQ ID NO: 2165081 - RNA, 19 nt, Homo sapiens
  misc_RNA (1)...(19): siRNA sense strand
caaaaggccugaacacaug

SEQ ID NO: 2165082 - RNA, 19 nt, Homo sapiens
  misc_RNA (1)...(19): siRNA sense strand
ccaaggagccacuaagaau

SEQ ID NO: 2165083 - RNA, 19 nt, Homo sapiens
  misc_RNA (1)...(19): siRNA sense strand
gggaagacauuggcugaau

SEQ ID NO: 2165084 - RNA, 19 nt, Homo sapiens
  misc_RNA (1)...(19): siRNA sense strand
gauauagggauucagugua

SEQ ID NO: 2165085 - RNA, 19 nt, Homo sapiens
  misc_RNA (1)...(19): siRNA sense strand
gagaaaacacucugauuaa

SEQ ID NO: 2165086 - RNA, 19 nt, Homo sapiens
  misc_RNA (1)...(19): siRNA sense strand
caaagcugcugggcaagaa

SEQ ID NO: 2165087 - RNA, 19 nt, Homo sapiens
  misc_RNA (1)...(19): siRNA sense strand
uugaaaggcuucuggcaaa

SEQ ID NO: 2165088 - RNA, 19 nt, Homo sapiens
  misc_RNA (1)...(19): siRNA sense strand
gagaaucagcucaacaaau

SEQ ID NO: 2165089 - RNA, 19 nt, Homo sapiens
  misc_RNA (1)...(19): siRNA sense strand
ggacugaaguagagcaacu

SEQ ID NO: 2165090 - RNA, 19 nt, Homo sapiens
  misc_RNA (1)...(19): siRNA sense strand
gcacgcuaguaaucauaaa

SEQ ID NO: 2165091 - RNA, 19 nt, Homo sapiens
  misc_RNA (1)...(19): siRNA sense strand
cuacaaagauggugacuua

SEQ ID NO: 2165092 - RNA, 19 nt, Homo sapiens
  misc_RNA (1)...(19): siRNA sense strand
gauggugacuuacgcauua

SEQ ID NO: 2165093 - RNA, 19 nt, Homo sapiens
  misc_RNA (1)...(19): siRNA sense strand
gaaagauccuguucucuau

SEQ ID NO: 2165094 - RNA, 19 nt, Homo sapiens
  misc_RNA (1)...(19): siRNA sense strand
ccgcauaccugaugaagaa

SEQ ID NO: 2165095 - RNA, 19 nt, Homo sapiens
  misc_RNA (1)...(19): siRNA sense strand
gcaaagauaguguguaugg

SEQ ID NO: 2165096 - RNA, 19 nt, Homo sapiens
  misc_RNA (1)...(19): siRNA sense strand
gcaaggcaguggagcaugu

SEQ ID NO: 2165097 - RNA, 19 nt, Homo sapiens
  misc_RNA (1)...(19): siRNA sense strand
gaacugcaccgcgauaaga

SEQ ID NO: 2165098 - RNA, 19 nt, Homo sapiens
  misc_RNA (1)...(19): siRNA sense strand
gaugacggguccaagagaa

SEQ ID NO: 2165099 - RNA, 19 nt, Homo sapiens
  misc_RNA (1)...(19): siRNA sense strand
uggcaaagauaguguguau

SEQ ID NO: 2165100 - RNA, 19 nt, Homo sapiens
  misc_RNA (1)...(19): siRNA sense strand
gaagcccacucuuuacauc

SEQ ID NO: 2165101 - RNA, 19 nt, Homo sapiens
  misc_RNA (1)...(19): siRNA sense strand
caacuacuauuucccuaca

SEQ ID NO: 2165102 - RNA, 19 nt, Homo sapiens
  misc_RNA (1)...(19): siRNA sense strand
uuacaucaccuacgagaaa

SEQ ID NO: 2165103 - RNA, 19 nt, Homo sapiens
  misc_RNA (1)...(19): siRNA sense strand
uguacacgcugcuugauga

SEQ ID NO: 2165104 - RNA, 19 nt, Homo sapiens
  misc_RNA (1)...(19): siRNA sense strand
cuagagauccuuccugaga

SEQ ID NO: 2165105 - RNA, 19 nt, Homo sapiens
  misc_RNA (1)...(19): siRNA sense strand
uagauggcguguccgcaua

SEQ ID NO: 2165106 - RNA, 19 nt, Homo sapiens
  misc_RNA (1)...(19): siRNA sense strand
cagauuccaacuacuauuu

SEQ ID NO: 2165107 - RNA, 19 nt, Homo sapiens
  misc_RNA (1)...(19): siRNA sense strand
ccgugaagcccacucuuua

SEQ ID NO: 2165108 - RNA, 19 nt, Homo sapiens
  misc_RNA (1)...(19): siRNA sense strand
acacgcugcuugaugacua

SEQ ID NO: 2165109 - RNA, 19 nt, Homo sapiens
  misc_RNA (1)...(19): siRNA sense strand
guaccaaggaugaauggaa

SEQ ID NO: 2165110 - RNA, 19 nt, Homo sapiens
  misc_RNA (1)...(19): siRNA sense strand
gcaccgcgauaagagaguu

SEQ ID NO: 2165111 - RNA, 19 nt, Homo sapiens
  misc_RNA (1)...(19): siRNA sense strand
ugugauggauacuugguuu

SEQ ID NO: 2165112 - RNA, 19 nt, Homo sapiens
  misc_RNA (1)...(19): siRNA sense strand
gcugcuugaugacuacaaa

SEQ ID NO: 2165113 - RNA, 19 nt, Homo sapiens
  misc_RNA (1)...(19): siRNA sense strand
ccaucuguuuacuucauua

SEQ ID NO: 2165114 - RNA, 19 nt, Homo sapiens
  misc_RNA (1)...(19): siRNA sense strand
gcauguguuugaaggugaa

SEQ ID NO: 2165115 - RNA, 19 nt, Homo sapiens
  misc_RNA (1)...(19): siRNA sense strand
aagauccuguucucuauau

SEQ ID NO: 2165116 - RNA, 19 nt, Homo sapiens
  misc_RNA (1)...(19): siRNA sense strand
gagagguggucgacagucu

SEQ ID NO: 2165117 - RNA, 19 nt, Homo sapiens
  misc_RNA (1)...(19): siRNA sense strand
gcagguggagcaugccaaa

SEQ ID NO: 2165118 - RNA, 19 nt, Homo sapiens
  misc_RNA (1)...(19): siRNA sense strand
caaagauaguguguaugga

SEQ ID NO: 2165119 - RNA, 19 nt, Homo sapiens
  misc_RNA (1)...(19): siRNA sense strand
gguggagcaugccaaagau

SEQ ID NO: 2165120 - RNA, 19 nt, Homo sapiens
  misc_RNA (1)...(19): siRNA sense strand
gagcuccugugauggauac

SEQ ID NO: 2165121 - RNA, 19 nt, Homo sapiens
  misc_RNA (1)...(19): siRNA sense strand
caacuccucguaucgauuc

SEQ ID NO: 2165122 - RNA, 19 nt, Homo sapiens
  misc_RNA (1)...(19): siRNA sense strand
caguggagcauguguuuga

SEQ ID NO: 2165123 - RNA, 19 nt, Homo sapiens
  misc_RNA (1)...(19): siRNA sense strand
aaagaugacggguccaaga

SEQ ID NO: 2165124 - RNA, 19 nt, Homo sapiens
  misc_RNA (1)...(19): siRNA sense strand
agagauccuuccugagaga

SEQ ID NO: 2165125 - RNA, 19 nt, Homo sapiens
  misc_RNA (1)...(19): siRNA sense strand
ggcaguggagcauguguuu

SEQ ID NO: 2165126 - RNA, 19 nt, Homo sapiens
  misc_RNA (1)...(19): siRNA sense strand
aaagauccuguucucuaua

SEQ ID NO: 2165127 - RNA, 19 nt, Homo sapiens
  misc_RNA (1)...(19): siRNA sense strand
cuugaugacuacaaagaug

SEQ ID NO: 2165128 - RNA, 19 nt, Homo sapiens
  misc_RNA (1)...(19): siRNA sense strand
gccaucuguuuacuucauu

SEQ ID NO: 2165129 - RNA, 19 nt, Homo sapiens
  misc_RNA (1)...(19): siRNA sense strand
acuggcagauucccugauu

SEQ ID NO: 2165130 - RNA, 19 nt, Homo sapiens
  misc_RNA (1)...(19): siRNA sense strand
cuauuucccuacagcagaa

SEQ ID NO: 2165131 - RNA, 19 nt, Homo sapiens
  misc_RNA (1)...(19): siRNA sense strand
gauccuguucucuauaugu

SEQ ID NO: 2165132 - RNA, 19 nt, Homo sapiens
  misc_RNA (1)...(19): siRNA sense strand
ucgagcagguuuccgugaa

SEQ ID NO: 2165133 - RNA, 19 nt, Homo sapiens
  misc_RNA (1)...(19): siRNA sense strand
caacggcgcaagcccacuu

SEQ ID NO: 2165134 - RNA, 19 nt, Homo sapiens
  misc_RNA (1)...(19): siRNA sense strand
gcccacucuuuacaucauu

SEQ ID NO: 2165135 - RNA, 19 nt, Homo sapiens
  misc_RNA (1)...(19): siRNA sense strand
guuugaaggugaacauggu

SEQ ID NO: 2165136 - RNA, 19 nt, Homo sapiens
  misc_RNA (1)...(19): siRNA sense strand
cccacucuuuacaucauua

SEQ ID NO: 2165137 - RNA, 19 nt, Homo sapiens
  misc_RNA (1)...(19): siRNA sense strand
gccaacuccucguaucgau

SEQ ID NO: 2165138 - RNA, 19 nt, Homo sapiens
  misc_RNA (1)...(19): siRNA sense strand
ugucuaugguuuggugaaa

SEQ ID NO: 2165139 - RNA, 19 nt, Homo sapiens
  misc_RNA (1)...(19): siRNA sense strand
gcgaagccaucuguuuacu

SEQ ID NO: 2165140 - RNA, 19 nt, Homo sapiens
  misc_RNA (1)...(19): siRNA sense strand
caucgugggcugccgcauu

SEQ ID NO: 2165141 - RNA, 19 nt, Homo sapiens
  misc_RNA (1)...(19): siRNA sense strand
gauacuugguuuuacauca

SEQ ID NO: 2165142 - RNA, 19 nt, Homo sapiens
  misc_RNA (1)...(19): siRNA sense strand
caagcccacuuuccucacu

SEQ ID NO: 2165143 - RNA, 19 nt, Homo sapiens
  misc_RNA (1)...(19): siRNA sense strand
cuagaacugcaccgcgaua

SEQ ID NO: 2165144 - RNA, 19 nt, Homo sapiens
  misc_RNA (1)...(19): siRNA sense strand
gugaagcccacucuuuaca

SEQ ID NO: 2165145 - RNA, 19 nt, Homo sapiens
  misc_RNA (1)...(19): siRNA sense strand
gugaacaugguaccaagga

SEQ ID NO: 2165146 - RNA, 19 nt, Homo sapiens
  misc_RNA (1)...(19): siRNA sense strand
auucacgacuggcagauuc

SEQ ID NO: 2165147 - RNA, 19 nt, Homo sapiens
  misc_RNA (1)...(19): siRNA sense strand
ccaaagaugacggguccaa

SEQ ID NO: 2165148 - RNA, 19 nt, Homo sapiens
  misc_RNA (1)...(19): siRNA sense strand
gcauuauuccagauuccaa

SEQ ID NO: 2165149 - RNA, 19 nt, Homo sapiens
  misc_RNA (1)...(19): siRNA sense strand
aauaugauggcaaagauag

SEQ ID NO: 2165150 - RNA, 19 nt, Homo sapiens
  misc_RNA (1)...(19): siRNA sense strand
uccaagagaacuggcauuu

SEQ ID NO: 2165151 - RNA, 19 nt, Homo sapiens
  misc_RNA (1)...(19): siRNA sense strand
aaaggcacacccacaggaa

SEQ ID NO: 2165152 - RNA, 19 nt, Homo sapiens
  misc_RNA (1)...(19): siRNA sense strand
ccagauuccaacuacuauu

SEQ ID NO: 2165153 - RNA, 19 nt, Homo sapiens
  misc_RNA (1)...(19): siRNA sense strand
ccuguucucuauauguaca

SEQ ID NO: 2165154 - RNA, 19 nt, Homo sapiens
  misc_RNA (1)...(19): siRNA sense strand
auccuguucucuauaugua

SEQ ID NO: 2165155 - RNA, 19 nt, Homo sapiens
  misc_RNA (1)...(19): siRNA sense strand
cgagcagguuuccgugaag

SEQ ID NO: 2165156 - RNA, 19 nt, Homo sapiens
  misc_RNA (1)...(19): siRNA sense strand
cuccugugauggauacuug

SEQ ID NO: 2165157 - RNA, 19 nt, Homo sapiens
  misc_RNA (1)...(19): siRNA sense strand
ggugacuuacgcauuauuc

SEQ ID NO: 2165158 - RNA, 19 nt, Homo sapiens
  misc_RNA (1)...(19): siRNA sense strand
gcauucaacacggcuggaa

SEQ ID NO: 2165159 - RNA, 19 nt, Homo sapiens
  misc_RNA (1)...(19): siRNA sense strand
cgaagccaucuguuuacuu

SEQ ID NO: 2165160 - RNA, 19 nt, Homo sapiens
  misc_RNA (1)...(19): siRNA sense strand
uggagcaugccaaagauga

SEQ ID NO: 2165161 - RNA, 19 nt, Homo sapiens
  misc_RNA (1)...(19): siRNA sense strand
ggaagaaagugaagaugaa

SEQ ID NO: 2165162 - RNA, 19 nt, Homo sapiens
  misc_RNA (1)...(19): siRNA sense strand
gaaauaucaucuucccuuu

SEQ ID NO: 2165163 - RNA, 19 nt, Homo sapiens
  misc_RNA (1)...(19): siRNA sense strand
gaacaagaaugaggaggaa

SEQ ID NO: 2165164 - RNA, 19 nt, Homo sapiens
  misc_RNA (1)...(19): siRNA sense strand
ucaaaggccugucggaauu

SEQ ID NO: 2165165 - RNA, 19 nt, Homo sapiens
  misc_RNA (1)...(19): siRNA sense strand
gaagaaggaggaagaaaug

SEQ ID NO: 2165166 - RNA, 19 nt, Homo sapiens
  misc_RNA (1)...(19): siRNA sense strand
guacuacagugaagaugaa

SEQ ID NO: 2165167 - RNA, 19 nt, Homo sapiens
  misc_RNA (1)...(19): siRNA sense strand
ggaggaagaggaaaugaaa

SEQ ID NO: 2165168 - RNA, 19 nt, Homo sapiens
  misc_RNA (1)...(19): siRNA sense strand
gaguaaggaugaagaagau

SEQ ID NO: 2165169 - RNA, 19 nt, Homo sapiens
  misc_RNA (1)...(19): siRNA sense strand
uagaugagcugauggagau

SEQ ID NO: 2165170 - RNA, 19 nt, Homo sapiens
  misc_RNA (1)...(19): siRNA sense strand
gaagaguacuacagugaag

SEQ ID NO: 2165171 - RNA, 19 nt, Homo sapiens
  misc_RNA (1)...(19): siRNA sense strand
gaugaaauccguaaggaau

SEQ ID NO: 2165172 - RNA, 19 nt, Homo sapiens
  misc_RNA (1)...(19): siRNA sense strand
aggaagaaaugaagaagaa

SEQ ID NO: 2165173 - RNA, 19 nt, Homo sapiens
  misc_RNA (1)...(19): siRNA sense strand
gaagaggaaaugaaacaga

SEQ ID NO: 2165174 - RNA, 19 nt, Homo sapiens
  misc_RNA (1)...(19): siRNA sense strand
ugcaucaccucccauaaua

SEQ ID NO: 2165175 - RNA, 19 nt, Homo sapiens
  misc_RNA (1)...(19): siRNA sense strand
ugaagaagaugaagaugag

SEQ ID NO: 2165176 - RNA, 19 nt, Homo sapiens
  misc_RNA (1)...(19): siRNA sense strand
ggacaacgccaaguucgaa

SEQ ID NO: 2165177 - RNA, 19 nt, Homo sapiens
  misc_RNA (1)...(19): siRNA sense strand
aagaggaaaugaaacagaa

SEQ ID NO: 2165178 - RNA, 19 nt, Homo sapiens
  misc_RNA (1)...(19): siRNA sense strand
ggcccaagaugaugaccua

SEQ ID NO: 2165179 - RNA, 19 nt, Homo sapiens
  misc_RNA (1)...(19): siRNA sense strand
ggacugaggagaccuaugg

SEQ ID NO: 2165180 - RNA, 19 nt, Homo sapiens
  misc_RNA (1)...(19): siRNA sense strand
gcagcuagagaccuucaua

SEQ ID NO: 2165181 - RNA, 19 nt, Homo sapiens
  misc_RNA (1)...(19): siRNA sense strand
ccaagaugaugaccuagau

SEQ ID NO: 2165182 - RNA, 19 nt, Homo sapiens
  misc_RNA (1)...(19): siRNA sense strand
cggaugaucuuuugauuaa

SEQ ID NO: 2165183 - RNA, 19 nt, Homo sapiens
  misc_RNA (1)...(19): siRNA sense strand
ccgcacaggucguuuagga

SEQ ID NO: 2165184 - RNA, 19 nt, Homo sapiens
  misc_RNA (1)...(19): siRNA sense strand
ccaaugaggaagaaaguga

SEQ ID NO: 2165185 - RNA, 19 nt, Homo sapiens
  misc_RNA (1)...(19): siRNA sense strand
gagauaaggaacaagaaug

SEQ ID NO: 2165186 - RNA, 19 nt, Homo sapiens
  misc_RNA (1)...(19): siRNA sense strand
ugaagaagaaggaagagaa

SEQ ID NO: 2165187 - RNA, 19 nt, Homo sapiens
  misc_RNA (1)...(19): siRNA sense strand
gaggagauaaggaacaaga

SEQ ID NO: 2165188 - RNA, 19 nt, Homo sapiens
  misc_RNA (1)...(19): siRNA sense strand
guguggagauagaaagaaa

SEQ ID NO: 2165189 - RNA, 19 nt, Homo sapiens
  misc_RNA (1)...(19): siRNA sense strand
ggaugaagaagaugaagau

SEQ ID NO: 2165190 - RNA, 19 nt, Homo sapiens
  misc_RNA (1)...(19): siRNA sense strand
guaaggaugaagaagauga

SEQ ID NO: 2165191 - RNA, 19 nt, Homo sapiens
  misc_RNA (1)...(19): siRNA sense strand
ggagauaaggaacaagaau

SEQ ID NO: 2165192 - RNA, 19 nt, Homo sapiens
  misc_RNA (1)...(19): siRNA sense strand
agcaagagaugaaggagaa

SEQ ID NO: 2165193 - RNA, 19 nt, Homo sapiens
  misc_RNA (1)...(19): siRNA sense strand
cagucuaccuggcugaauu

SEQ ID NO: 2165194 - RNA, 19 nt, Homo sapiens
  misc_RNA (1)...(19): siRNA sense strand
gaagaagaaggaagagaag

SEQ ID NO: 2165195 - RNA, 19 nt, Homo sapiens
  misc_RNA (1)...(19): siRNA sense strand
gaaggaggaagaaaugaag

SEQ ID NO: 2165196 - RNA, 19 nt, Homo sapiens
  misc_RNA (1)...(19): siRNA sense strand
aggaggagaugaagaagga

SEQ ID NO: 2165197 - RNA, 19 nt, Homo sapiens
  misc_RNA (1)...(19): siRNA sense strand
aaagugaagaugaagagua

SEQ ID NO: 2165198 - RNA, 19 nt, Homo sapiens
  misc_RNA (1)...(19): siRNA sense strand
ugaaauccguaaggaauuc

SEQ ID NO: 2165199 - RNA, 19 nt, Homo sapiens
  misc_RNA (1)...(19): siRNA sense strand
ggcaaugucuccagcuaca

SEQ ID NO: 2165200 - RNA, 19 nt, Homo sapiens
  misc_RNA (1)...(19): siRNA sense strand
ugaccuagaugagcugaug

SEQ ID NO: 2165201 - RNA, 19 nt, Homo sapiens
  misc_RNA (1)...(19): siRNA sense strand
cagugaagaugaagaccaa

SEQ ID NO: 2165202 - RNA, 19 nt, Homo sapiens
  misc_RNA (1)...(19): siRNA sense strand
cgaccuggaugagcugauu

SEQ ID NO: 2165203 - RNA, 19 nt, Homo sapiens
  misc_RNA (1)...(19): siRNA sense strand
ggaaggagagaguaaggau

SEQ ID NO: 2165204 - RNA, 19 nt, Homo sapiens
  misc_RNA (1)...(19): siRNA sense strand
ucgaauguguggagauaga

SEQ ID NO: 2165205 - RNA, 19 nt, Homo sapiens
  misc_RNA (1)...(19): siRNA sense strand
ugaagaaggaggaagaaau

SEQ ID NO: 2165206 - RNA, 19 nt, Homo sapiens
  misc_RNA (1)...(19): siRNA sense strand
gaccagaggaagcgcauga

SEQ ID NO: 2165207 - RNA, 19 nt, Homo sapiens
  misc_RNA (1)...(19): siRNA sense strand
gcagcuaugcagaugcuuu

SEQ ID NO: 2165208 - RNA, 19 nt, Homo sapiens
  misc_RNA (1)...(19): siRNA sense strand
ggcacaggcuucacuccaa

SEQ ID NO: 2165209 - RNA, 19 nt, Homo sapiens
  misc_RNA (1)...(19): siRNA sense strand
gcucuuauggucaacagaa

SEQ ID NO: 2165210 - RNA, 19 nt, Homo sapiens
  misc_RNA (1)...(19): siRNA sense strand
ggagauggagccgaccuuu

SEQ ID NO: 2165211 - RNA, 19 nt, Homo sapiens
  misc_RNA (1)...(19): siRNA sense strand
ggaugaggcccaagaugau

SEQ ID NO: 2165212 - RNA, 19 nt, Homo sapiens
  misc_RNA (1)...(19): siRNA sense strand
ggaggaggaggaagaggaa

SEQ ID NO: 2165213 - RNA, 19 nt, Homo sapiens
  misc_RNA (1)...(19): siRNA sense strand
gaggaagaaaugaagaaga

SEQ ID NO: 2165214 - RNA, 19 nt, Homo sapiens
  misc_RNA (1)...(19): siRNA sense strand
agaaauggccgaccuggau

SEQ ID NO: 2165215 - RNA, 19 nt, Homo sapiens
  misc_RNA (1)...(19): siRNA sense strand
gcaccaauucaccauucua

SEQ ID NO: 2165216 - RNA, 19 nt, Homo sapiens
  misc_RNA (1)...(19): siRNA sense strand
ucagugagaucgaagucau

SEQ ID NO: 2165217 - RNA, 19 nt, Homo sapiens
  misc_RNA (1)...(19): siRNA sense strand
ggcccugcgcgaagaauua

SEQ ID NO: 2165218 - RNA, 19 nt, Homo sapiens
  misc_RNA (1)...(19): siRNA sense strand
gcagacggaggaaccagaa

SEQ ID NO: 2165219 - RNA, 19 nt, Homo sapiens
  misc_RNA (1)...(19): siRNA sense strand
gugaagaugaagaguacua

SEQ ID NO: 2165220 - RNA, 19 nt, Homo sapiens
  misc_RNA (1)...(19): siRNA sense strand
guuccuggcccaauucuug

SEQ ID NO: 2165221 - RNA, 19 nt, Homo sapiens
  misc_RNA (1)...(19): siRNA sense strand
gugcaucaccucccauaau

SEQ ID NO: 2165222 - RNA, 19 nt, Homo sapiens
  misc_RNA (1)...(19): siRNA sense strand
gagagaguaaggaugaaga

SEQ ID NO: 2165223 - RNA, 19 nt, Homo sapiens
  misc_RNA (1)...(19): siRNA sense strand
agauaaggaacaagaauga

SEQ ID NO: 2165224 - RNA, 19 nt, Homo sapiens
  misc_RNA (1)...(19): siRNA sense strand
gaauguguggagauagaaa

SEQ ID NO: 2165225 - RNA, 19 nt, Homo sapiens
  misc_RNA (1)...(19): siRNA sense strand
aaggagagaguaaggauga

SEQ ID NO: 2165226 - RNA, 19 nt, Homo sapiens
  misc_RNA (1)...(19): siRNA sense strand
gagauggagccgaccuuug

SEQ ID NO: 2165227 - RNA, 19 nt, Homo sapiens
  misc_RNA (1)...(19): siRNA sense strand
uggaugaggcccaagauga

SEQ ID NO: 2165228 - RNA, 19 nt, Homo sapiens
  misc_RNA (1)...(19): siRNA sense strand
gaugacugccgccuccaaa

SEQ ID NO: 2165229 - RNA, 19 nt, Homo sapiens
  misc_RNA (1)...(19): siRNA sense strand
ugaugcagcuagagaccuu

SEQ ID NO: 2165230 - RNA, 19 nt, Homo sapiens
  misc_RNA (1)...(19): siRNA sense strand
gaaggaggaggaggaggaa

SEQ ID NO: 2165231 - RNA, 19 nt, Homo sapiens
  misc_RNA (1)...(19): siRNA sense strand
aaaugaagaagaaggaaga

SEQ ID NO: 2165232 - RNA, 19 nt, Homo sapiens
  misc_RNA (1)...(19): siRNA sense strand
gaagaaagugaagaugaag

SEQ ID NO: 2165233 - RNA, 19 nt, Homo sapiens
  misc_RNA (1)...(19): siRNA sense strand
gagcggguggccuuucuga

SEQ ID NO: 2165234 - RNA, 19 nt, Homo sapiens
  misc_RNA (1)...(19): siRNA sense strand
cagaaucgagucccacuuc

SEQ ID NO: 2165235 - RNA, 19 nt, Homo sapiens
  misc_RNA (1)...(19): siRNA sense strand
agaguaaggaugaagaaga

SEQ ID NO: 2165236 - RNA, 19 nt, Homo sapiens
  misc_RNA (1)...(19): siRNA sense strand
gacuguaucucggaugauc

SEQ ID NO: 2165237 - RNA, 19 nt, Homo sapiens
  misc_RNA (1)...(19): siRNA sense strand
ggaaaugaaacagaaagag

SEQ ID NO: 2165238 - RNA, 19 nt, Homo sapiens
  misc_RNA (1)...(19): siRNA sense strand
ggaggaggaagaggaaaug

SEQ ID NO: 2165239 - RNA, 19 nt, Homo sapiens
  misc_RNA (1)...(19): siRNA sense strand
gaaggaggaggaggagaug

SEQ ID NO: 2165240 - RNA, 19 nt, Homo sapiens
  misc_RNA (1)...(19): siRNA sense strand
uggccgagguuaauuccuu

SEQ ID NO: 2165241 - RNA, 19 nt, Homo sapiens
  misc_RNA (1)...(19): siRNA sense strand
gaagaugaagaguacuaca

SEQ ID NO: 2165242 - RNA, 19 nt, Homo sapiens
  misc_RNA (1)...(19): siRNA sense strand
ggagcggccugagauagag

SEQ ID NO: 2165243 - RNA, 19 nt, Homo sapiens
  misc_RNA (1)...(19): siRNA sense strand
gcggguggccuuucugauc

SEQ ID NO: 2165244 - RNA, 19 nt, Homo sapiens
  misc_RNA (1)...(19): siRNA sense strand
caucaccucccauaauaca

SEQ ID NO: 2165245 - RNA, 19 nt, Homo sapiens
  misc_RNA (1)...(19): siRNA sense strand
agaaggaggaagaaaugaa

SEQ ID NO: 2165246 - RNA, 19 nt, Homo sapiens
  misc_RNA (1)...(19): siRNA sense strand
gaugaagaaggaggaagaa

SEQ ID NO: 2165247 - RNA, 19 nt, Homo sapiens
  misc_RNA (1)...(19): siRNA sense strand
caugagggcuuuucagcaa

SEQ ID NO: 2165248 - RNA, 19 nt, Homo sapiens
  misc_RNA (1)...(19): siRNA sense strand
ugaagaguacuacagugaa

SEQ ID NO: 2165249 - RNA, 19 nt, Homo sapiens
  misc_RNA (1)...(19): siRNA sense strand
aagugaagaugaagaguac

SEQ ID NO: 2165250 - RNA, 19 nt, Homo sapiens
  misc_RNA (1)...(19): siRNA sense strand
aggaagaaagugaagauga

SEQ ID NO: 2165251 - RNA, 19 nt, Homo sapiens
  misc_RNA (1)...(19): siRNA sense strand
aauaucaucuucccuuuug

SEQ ID NO: 2165252 - RNA, 19 nt, Homo sapiens
  misc_RNA (1)...(19): siRNA sense strand
uggccgaauucgaguuuga

SEQ ID NO: 2165253 - RNA, 19 nt, Homo sapiens
  misc_RNA (1)...(19): siRNA sense strand
agauggagccgaccuuugu

SEQ ID NO: 2165254 - RNA, 19 nt, Homo sapiens
  misc_RNA (1)...(19): siRNA sense strand
aagaugaugaccuagauga

SEQ ID NO: 2165255 - RNA, 19 nt, Homo sapiens
  misc_RNA (1)...(19): siRNA sense strand
gaggaaaugaaacagaaag

SEQ ID NO: 2165256 - RNA, 19 nt, Homo sapiens
  misc_RNA (1)...(19): siRNA sense strand
ggagauagaaagaaaagug

SEQ ID NO: 2165257 - RNA, 19 nt, Homo sapiens
  misc_RNA (1)...(19): siRNA sense strand
aggaggagccacuggauga

SEQ ID NO: 2165258 - RNA, 19 nt, Homo sapiens
  misc_RNA (1)...(19): siRNA sense strand
gaggaggaaggagagagua

SEQ ID NO: 2165259 - RNA, 19 nt, Homo sapiens
  misc_RNA (1)...(19): siRNA sense strand
agaagaaggaagagaagga

SEQ ID NO: 2165260 - RNA, 19 nt, Homo sapiens
  misc_RNA (1)...(19): siRNA sense strand
ggaguucgaaauaucaucu

SEQ ID NO: 2165261 - RNA, 19 nt, Homo sapiens
  misc_RNA (1)...(19): siRNA sense strand
gcaagaccaucgacaacaa

SEQ ID NO: 2165262 - RNA, 19 nt, Homo sapiens
  misc_RNA (1)...(19): siRNA sense strand
gugcugacgucaaggauuu

SEQ ID NO: 2165263 - RNA, 19 nt, Homo sapiens
  misc_RNA (1)...(19): siRNA sense strand
caaaguggccugugacgaa

SEQ ID NO: 2165264 - RNA, 19 nt, Homo sapiens
  misc_RNA (1)...(19): siRNA sense strand
cgucaaggauuucgaggaa

SEQ ID NO: 2165265 - RNA, 19 nt, Homo sapiens
  misc_RNA (1)...(19): siRNA sense strand
ucaaggauuucgaggaaga

SEQ ID NO: 2165266 - RNA, 19 nt, Homo sapiens
  misc_RNA (1)...(19): siRNA sense strand
ccugaacuuugaugucaua

SEQ ID NO: 2165267 - RNA, 19 nt, Homo sapiens
  misc_RNA (1)...(19): siRNA sense strand
acaaggcgcuguacaacau

SEQ ID NO: 2165268 - RNA, 19 nt, Homo sapiens
  misc_RNA (1)...(19): siRNA sense strand
gaacccagauuuucagaug

SEQ ID NO: 2165269 - RNA, 19 nt, Homo sapiens
  misc_RNA (1)...(19): siRNA sense strand
gcaacauccucuccugcaa

SEQ ID NO: 2165270 - RNA, 19 nt, Homo sapiens
  misc_RNA (1)...(19): siRNA sense strand
gaaaacagcuuuacuuacc

SEQ ID NO: 2165271 - RNA, 19 nt, Homo sapiens
  misc_RNA (1)...(19): siRNA sense strand
uggagacccugaacuuuga

SEQ ID NO: 2165272 - RNA, 19 nt, Homo sapiens
  misc_RNA (1)...(19): siRNA sense strand
guucacgguuguucuauca

SEQ ID NO: 2165273 - RNA, 19 nt, Homo sapiens
  misc_RNA (1)...(19): siRNA sense strand
ggagauucaagucgcauaa

SEQ ID NO: 2165274 - RNA, 19 nt, Homo sapiens
  misc_RNA (1)...(19): siRNA sense strand
gaggagaggaugagagaau

SEQ ID NO: 2165275 - RNA, 19 nt, Homo sapiens
  misc_RNA (1)...(19): siRNA sense strand
ugaauggcauguuccugaa

SEQ ID NO: 2165276 - RNA, 19 nt, Homo sapiens
  misc_RNA (1)...(19): siRNA sense strand
caacauccucuccugcaaa

SEQ ID NO: 2165277 - RNA, 19 nt, Homo sapiens
  misc_RNA (1)...(19): siRNA sense strand
aggcaaugcuguacgagaa

SEQ ID NO: 2165278 - RNA, 19 nt, Homo sapiens
  misc_RNA (1)...(19): siRNA sense strand
aaaguggccugugacgaaa

SEQ ID NO: 2165279 - RNA, 19 nt, Homo sapiens
  misc_RNA (1)...(19): siRNA sense strand
ucacgguuguucuaucaug

SEQ ID NO: 2165280 - RNA, 19 nt, Homo sapiens
  misc_RNA (1)...(19): siRNA sense strand
aggagaggaugagagaaua

SEQ ID NO: 2165281 - RNA, 19 nt, Homo sapiens
  misc_RNA (1)...(19): siRNA sense strand
cagaaaacagcuuuacuua

SEQ ID NO: 2165282 - RNA, 19 nt, Homo sapiens
  misc_RNA (1)...(19): siRNA sense strand
gcaaugcuguacgagaagu

SEQ ID NO: 2165283 - RNA, 19 nt, Homo sapiens
  misc_RNA (1)...(19): siRNA sense strand
gauucaagucgcauaaaga

SEQ ID NO: 2165284 - RNA, 19 nt, Homo sapiens
  misc_RNA (1)...(19): siRNA sense strand
gcagaggaggagaggauga

SEQ ID NO: 2165285 - RNA, 19 nt, Homo sapiens
  misc_RNA (1)...(19): siRNA sense strand
ucaagaaccugggcaagac

SEQ ID NO: 2165286 - RNA, 19 nt, Homo sapiens
  misc_RNA (1)...(19): siRNA sense strand
ucagauggccucccuguac

SEQ ID NO: 2165287 - RNA, 19 nt, Homo sapiens
  misc_RNA (1)...(19): siRNA sense strand
gccaggcaguccacuagug

SEQ ID NO: 2165288 - RNA, 19 nt, Homo sapiens
  misc_RNA (1)...(19): siRNA sense strand
ugugaugaauggcauguuc

SEQ ID NO: 2165289 - RNA, 19 nt, Homo sapiens
  misc_RNA (1)...(19): siRNA sense strand
acaacaaggcgcuguacaa

SEQ ID NO: 2165290 - RNA, 19 nt, Homo sapiens
  misc_RNA (1)...(19): siRNA sense strand
caagucgcauaaagaacga

SEQ ID NO: 2165291 - RNA, 19 nt, Homo sapiens
  misc_RNA (1)...(19): siRNA sense strand
ucagucacuuccucagguu

SEQ ID NO: 2165292 - RNA, 19 nt, Homo sapiens
  misc_RNA (1)...(19): siRNA sense strand
gagauucaagucgcauaaa

SEQ ID NO: 2165293 - RNA, 19 nt, Homo sapiens
  misc_RNA (1)...(19): siRNA sense strand
ccugcaaaguggccuguga

SEQ ID NO: 2165294 - RNA, 19 nt, Homo sapiens
  misc_RNA (1)...(19): siRNA sense strand
caacaaggcgcuguacaac

SEQ ID NO: 2165295 - RNA, 19 nt, Homo sapiens
  misc_RNA (1)...(19): siRNA sense strand
ugaccgaggcaaugcugua

SEQ ID NO: 2165296 - RNA, 19 nt, Homo sapiens
  misc_RNA (1)...(19): siRNA sense strand
ggaggccaccuugcgauga

SEQ ID NO: 2165297 - RNA, 19 nt, Homo sapiens
  misc_RNA (1)...(19): siRNA sense strand
gcuacggguucgugcacuu

SEQ ID NO: 2165298 - RNA, 19 nt, Homo sapiens
  misc_RNA (1)...(19): siRNA sense strand
gggcaacgucuucaucaag

SEQ ID NO: 2165299 - RNA, 19 nt, Homo sapiens
  misc_RNA (1)...(19): siRNA sense strand
agauucaagucgcauaaag

SEQ ID NO: 2165300 - RNA, 19 nt, Homo sapiens
  misc_RNA (1)...(19): siRNA sense strand
ccgaggcaaugcuguacga

SEQ ID NO: 2165301 - RNA, 19 nt, Homo sapiens
  misc_RNA (1)...(19): siRNA sense strand
cuggagacccugaacuuug

SEQ ID NO: 2165302 - RNA, 19 nt, Homo sapiens
  misc_RNA (1)...(19): siRNA sense strand
gcuacgcguaugucaacua

SEQ ID NO: 2165303 - RNA, 19 nt, Homo sapiens
  misc_RNA (1)...(19): siRNA sense strand
gggagauucaagucgcaua

SEQ ID NO: 2165304 - RNA, 19 nt, Homo sapiens
  misc_RNA (1)...(19): siRNA sense strand
gaacuaccgcaaaauuuuc

SEQ ID NO: 2165305 - RNA, 19 nt, Homo sapiens
  misc_RNA (1)...(19): siRNA sense strand
cauccucuccugcaaagug

SEQ ID NO: 2165306 - RNA, 19 nt, Homo sapiens
  misc_RNA (1)...(19): siRNA sense strand
cagguucacgguuguucua

SEQ ID NO: 2165307 - RNA, 19 nt, Homo sapiens
  misc_RNA (1)...(19): siRNA sense strand
cuacgcguaugucaacuac

SEQ ID NO: 2165308 - RNA, 19 nt, Homo sapiens
  misc_RNA (1)...(19): siRNA sense strand
gauccagccaucacugcaa

SEQ ID NO: 2165309 - RNA, 19 nt, Homo sapiens
  misc_RNA (1)...(19): siRNA sense strand
gaugagacccucggugacu

SEQ ID NO: 2165310 - RNA, 19 nt, Homo sapiens
  misc_RNA (1)...(19): siRNA sense strand
ugaacuaccgcaaaauuuu

SEQ ID NO: 2165311 - RNA, 19 nt, Homo sapiens
  misc_RNA (1)...(19): siRNA sense strand
acccugaacuuugauguca

SEQ ID NO: 2165312 - RNA, 19 nt, Homo sapiens
  misc_RNA (1)...(19): siRNA sense strand
gggcuacgcguaugucaac

SEQ ID NO: 2165313 - RNA, 19 nt, Homo sapiens
  misc_RNA (1)...(19): siRNA sense strand
auucaagucgcauaaagaa

SEQ ID NO: 2165314 - RNA, 19 nt, Homo sapiens
  misc_RNA (1)...(19): siRNA sense strand
ggagaggaugagagaauac

SEQ ID NO: 2165315 - RNA, 19 nt, Homo sapiens
  misc_RNA (1)...(19): siRNA sense strand
cacuagugcugacgucaag

SEQ ID NO: 2165316 - RNA, 19 nt, Homo sapiens
  misc_RNA (1)...(19): siRNA sense strand
ccacuagugcugacgucaa

SEQ ID NO: 2165317 - RNA, 19 nt, Homo sapiens
  misc_RNA (1)...(19): siRNA sense strand
acgcguaugucaacuacca

SEQ ID NO: 2165318 - RNA, 19 nt, Homo sapiens
  misc_RNA (1)...(19): siRNA sense strand
gguucacgguuguucuauc

SEQ ID NO: 2165319 - RNA, 19 nt, Homo sapiens
  misc_RNA (1)...(19): siRNA sense strand
gggcaagaccaucgacaac

SEQ ID NO: 2165320 - RNA, 19 nt, Homo sapiens
  misc_RNA (1)...(19): siRNA sense strand
guaugucaacuaccagcaa

SEQ ID NO: 2165321 - RNA, 19 nt, Homo sapiens
  misc_RNA (1)...(19): siRNA sense strand
gaaaggaaguucacuaaua

SEQ ID NO: 2165322 - RNA, 19 nt, Homo sapiens
  misc_RNA (1)...(19): siRNA sense strand
gaauugcacuugugacuua

SEQ ID NO: 2165323 - RNA, 19 nt, Homo sapiens
  misc_RNA (1)...(19): siRNA sense strand
agaaugaccucuuagaaua

SEQ ID NO: 2165324 - RNA, 19 nt, Homo sapiens
  misc_RNA (1)...(19): siRNA sense strand
ggaacuaucuucaaacugu

SEQ ID NO: 2165325 - RNA, 19 nt, Homo sapiens
  misc_RNA (1)...(19): siRNA sense strand
gaacaaaggauuuacaaca

SEQ ID NO: 2165326 - RNA, 19 nt, Homo sapiens
  misc_RNA (1)...(19): siRNA sense strand
guccuuaccugauaauaua

SEQ ID NO: 2165327 - RNA, 19 nt, Homo sapiens
  misc_RNA (1)...(19): siRNA sense strand
ggacagaacaugccaauuc

SEQ ID NO: 2165328 - RNA, 19 nt, Homo sapiens
  misc_RNA (1)...(19): siRNA sense strand
acaacaagcuugagauauu

SEQ ID NO: 2165329 - RNA, 19 nt, Homo sapiens
  misc_RNA (1)...(19): siRNA sense strand
ggaaccgucuugucaauga

SEQ ID NO: 2165330 - RNA, 19 nt, Homo sapiens
  misc_RNA (1)...(19): siRNA sense strand
ugacaagacuguauccaaa

SEQ ID NO: 2165331 - RNA, 19 nt, Homo sapiens
  misc_RNA (1)...(19): siRNA sense strand
cguaagcuccuuucaauua

SEQ ID NO: 2165332 - RNA, 19 nt, Homo sapiens
  misc_RNA (1)...(19): siRNA sense strand
caacaggauugcagucauu

SEQ ID NO: 2165333 - RNA, 19 nt, Homo sapiens
  misc_RNA (1)...(19): siRNA sense strand
gacguaagcuccuuucaau

SEQ ID NO: 2165334 - RNA, 19 nt, Homo sapiens
  misc_RNA (1)...(19): siRNA sense strand
gcuguacccuucuauguuu

SEQ ID NO: 2165335 - RNA, 19 nt, Homo sapiens
  misc_RNA (1)...(19): siRNA sense strand
gaaggaaggagacccagua

SEQ ID NO: 2165336 - RNA, 19 nt, Homo sapiens
  misc_RNA (1)...(19): siRNA sense strand
gaaguucacuaauaucucu

SEQ ID NO: 2165337 - RNA, 19 nt, Homo sapiens
  misc_RNA (1)...(19): siRNA sense strand
ccaaagaaacucuaccuaa

SEQ ID NO: 2165338 - RNA, 19 nt, Homo sapiens
  misc_RNA (1)...(19): siRNA sense strand
caacaacaagcuugagaua

SEQ ID NO: 2165339 - RNA, 19 nt, Homo sapiens
  misc_RNA (1)...(19): siRNA sense strand
caacaagcuugagauauug

SEQ ID NO: 2165340 - RNA, 19 nt, Homo sapiens
  misc_RNA (1)...(19): siRNA sense strand
caaagaaacucuaccuaac

SEQ ID NO: 2165341 - RNA, 19 nt, Homo sapiens
  misc_RNA (1)...(19): siRNA sense strand
gaauggcaauuaccuugaa

SEQ ID NO: 2165342 - RNA, 19 nt, Homo sapiens
  misc_RNA (1)...(19): siRNA sense strand
uaucgaaucuaucagcuuu

SEQ ID NO: 2165343 - RNA, 19 nt, Homo sapiens
  misc_RNA (1)...(19): siRNA sense strand
gaauguaaacugccaagaa

SEQ ID NO: 2165344 - RNA, 19 nt, Homo sapiens
  misc_RNA (1)...(19): siRNA sense strand
ggccaugucuacaacuaua

SEQ ID NO: 2165345 - RNA, 19 nt, Homo sapiens
  misc_RNA (1)...(19): siRNA sense strand
caaaggauuuacaacaguu

SEQ ID NO: 2165346 - RNA, 19 nt, Homo sapiens
  misc_RNA (1)...(19): siRNA sense strand
caaacugucuauaagaaug

SEQ ID NO: 2165347 - RNA, 19 nt, Homo sapiens
  misc_RNA (1)...(19): siRNA sense strand
caaaggcugucaccuacaa

SEQ ID NO: 2165348 - RNA, 19 nt, Homo sapiens
  misc_RNA (1)...(19): siRNA sense strand
caaaggacaggcaaaguuu

SEQ ID NO: 2165349 - RNA, 19 nt, Homo sapiens
  misc_RNA (1)...(19): siRNA sense strand
ccacugagcugcuagaaaa

SEQ ID NO: 2165350 - RNA, 19 nt, Homo sapiens
  misc_RNA (1)...(19): siRNA sense strand
acaauggucugaauguaaa

SEQ ID NO: 2165351 - RNA, 19 nt, Homo sapiens
  misc_RNA (1)...(19): siRNA sense strand
ucaaagugcucauccugaa

SEQ ID NO: 2165352 - RNA, 19 nt, Homo sapiens
  misc_RNA (1)...(19): siRNA sense strand
aauguaaacugccaagaaa

SEQ ID NO: 2165353 - RNA, 19 nt, Homo sapiens
  misc_RNA (1)...(19): siRNA sense strand
gagacccaguagccuauua

SEQ ID NO: 2165354 - RNA, 19 nt, Homo sapiens
  misc_RNA (1)...(19): siRNA sense strand
gacaauggucugaauguaa

SEQ ID NO: 2165355 - RNA, 19 nt, Homo sapiens
  misc_RNA (1)...(19): siRNA sense strand
gaccuuugaugcuuugauu

SEQ ID NO: 2165356 - RNA, 19 nt, Homo sapiens
  misc_RNA (1)...(19): siRNA sense strand
acagggaacuaucuucaaa

SEQ ID NO: 2165357 - RNA, 19 nt, Homo sapiens
  misc_RNA (1)...(19): siRNA sense strand
caaccacccuuuacugcaa

SEQ ID NO: 2165358 - RNA, 19 nt, Homo sapiens
  misc_RNA (1)...(19): siRNA sense strand
ugggagagauugucuguga

SEQ ID NO: 2165359 - RNA, 19 nt, Homo sapiens
  misc_RNA (1)...(19): siRNA sense strand
auacaguucuuuggacuua

SEQ ID NO: 2165360 - RNA, 19 nt, Homo sapiens
  misc_RNA (1)...(19): siRNA sense strand
ucucagagcucagacaaug

SEQ ID NO: 2165361 - RNA, 19 nt, Homo sapiens
  misc_RNA (1)...(19): siRNA sense strand
caagaaaggaaguucacua

SEQ ID NO: 2165362 - RNA, 19 nt, Homo sapiens
  misc_RNA (1)...(19): siRNA sense strand
cgacuacaauuacaucagu

SEQ ID NO: 2165363 - RNA, 19 nt, Homo sapiens
  misc_RNA (1)...(19): siRNA sense strand
caucuuaucugucuguuuu

SEQ ID NO: 2165364 - RNA, 19 nt, Homo sapiens
  misc_RNA (1)...(19): siRNA sense strand
uggaucagcucccggcuuu

SEQ ID NO: 2165365 - RNA, 19 nt, Homo sapiens
  misc_RNA (1)...(19): siRNA sense strand
gagaacaaaggauuuacaa

SEQ ID NO: 2165366 - RNA, 19 nt, Homo sapiens
  misc_RNA (1)...(19): siRNA sense strand
gaaccgucuugucaaugaa

SEQ ID NO: 2165367 - RNA, 19 nt, Homo sapiens
  misc_RNA (1)...(19): siRNA sense strand
gggaauaggcuaaaaguaa

SEQ ID NO: 2165368 - RNA, 19 nt, Homo sapiens
  misc_RNA (1)...(19): siRNA sense strand
gagcugcuguaucaaaaua

SEQ ID NO: 2165369 - RNA, 19 nt, Homo sapiens
  misc_RNA (1)...(19): siRNA sense strand
uaucaacugugagaacaaa

SEQ ID NO: 2165370 - RNA, 19 nt, Homo sapiens
  misc_RNA (1)...(19): siRNA sense strand
ggaauaccaacaacuuaga

SEQ ID NO: 2165371 - RNA, 19 nt, Homo sapiens
  misc_RNA (1)...(19): siRNA sense strand
caaugaaucacaauacaga

SEQ ID NO: 2165372 - RNA, 19 nt, Homo sapiens
  misc_RNA (1)...(19): siRNA sense strand
uuaagccucugaccuuuga

SEQ ID NO: 2165373 - RNA, 19 nt, Homo sapiens
  misc_RNA (1)...(19): siRNA sense strand
ucaaaggacaggcaaaguu

SEQ ID NO: 2165374 - RNA, 19 nt, Homo sapiens
  misc_RNA (1)...(19): siRNA sense strand
gaacauauuggagggauca

SEQ ID NO: 2165375 - RNA, 19 nt, Homo sapiens
  misc_RNA (1)...(19): siRNA sense strand
ggaauaggcuaaaaguaau

SEQ ID NO: 2165376 - RNA, 19 nt, Homo sapiens
  misc_RNA (1)...(19): siRNA sense strand
gaaaauccauggaauugca

SEQ ID NO: 2165377 - RNA, 19 nt, Homo sapiens
  misc_RNA (1)...(19): siRNA sense strand
cugcaagaguucagcuaua

SEQ ID NO: 2165378 - RNA, 19 nt, Homo sapiens
  misc_RNA (1)...(19): siRNA sense strand
gacugcaucucaacaacaa

SEQ ID NO: 2165379 - RNA, 19 nt, Homo sapiens
  misc_RNA (1)...(19): siRNA sense strand
agccugagcugcuguauca

SEQ ID NO: 2165380 - RNA, 19 nt, Homo sapiens
  misc_RNA (1)...(19): siRNA sense strand
cuagacaccauaacuguuu

SEQ ID NO: 2165381 - RNA, 19 nt, Homo sapiens
  misc_RNA (1)...(19): siRNA sense strand
ggagagauugucugugaga

SEQ ID NO: 2165382 - RNA, 19 nt, Homo sapiens
  misc_RNA (1)...(19): siRNA sense strand
caggaauaccaacaacuua

SEQ ID NO: 2165383 - RNA, 19 nt, Homo sapiens
  misc_RNA (1)...(19): siRNA sense strand
ugaggugacuugcgaaucu

SEQ ID NO: 2165384 - RNA, 19 nt, Homo sapiens
  misc_RNA (1)...(19): siRNA sense strand
ggacuuacugcacuuagga

SEQ ID NO: 2165385 - RNA, 19 nt, Homo sapiens
  misc_RNA (1)...(19): siRNA sense strand
gcugucaccuacaaugaau

SEQ ID NO: 2165386 - RNA, 19 nt, Homo sapiens
  misc_RNA (1)...(19): siRNA sense strand
aagcuaagccgcaaucaga

SEQ ID NO: 2165387 - RNA, 19 nt, Homo sapiens
  misc_RNA (1)...(19): siRNA sense strand
aagaaaggaaguucacuaa

SEQ ID NO: 2165388 - RNA, 19 nt, Homo sapiens
  misc_RNA (1)...(19): siRNA sense strand
uaacagggaacuaucuuca

SEQ ID NO: 2165389 - RNA, 19 nt, Homo sapiens
  misc_RNA (1)...(19): siRNA sense strand
cacaccugcuuacacaaua

SEQ ID NO: 2165390 - RNA, 19 nt, Homo sapiens
  misc_RNA (1)...(19): siRNA sense strand
ccagacagcccaaacuugu

SEQ ID NO: 2165391 - RNA, 19 nt, Homo sapiens
  misc_RNA (1)...(19): siRNA sense strand
ugacuuacuuccucucaag

SEQ ID NO: 2165392 - RNA, 19 nt, Homo sapiens
  misc_RNA (1)...(19): siRNA sense strand
cuucgguccuuaccugaua

SEQ ID NO: 2165393 - RNA, 19 nt, Homo sapiens
  misc_RNA (1)...(19): siRNA sense strand
aaauuaagccucugaccuu

SEQ ID NO: 2165394 - RNA, 19 nt, Homo sapiens
  misc_RNA (1)...(19): siRNA sense strand
ccugaaaacucucaaaaga

SEQ ID NO: 2165395 - RNA, 19 nt, Homo sapiens
  misc_RNA (1)...(19): siRNA sense strand
gaaaacguacugaauauca

SEQ ID NO: 2165396 - RNA, 19 nt, Homo sapiens
  misc_RNA (1)...(19): siRNA sense strand
gagcuugcaauaucucuau

SEQ ID NO: 2165397 - RNA, 19 nt, Homo sapiens
  misc_RNA (1)...(19): siRNA sense strand
ccaacgcggugacucuuca

SEQ ID NO: 2165398 - RNA, 19 nt, Homo sapiens
  misc_RNA (1)...(19): siRNA sense strand
ccaggaauaccaacaacuu

SEQ ID NO: 2165399 - RNA, 19 nt, Homo sapiens
  misc_RNA (1)...(19): siRNA sense strand
ggacuguaccugugacauc

SEQ ID NO: 2165400 - RNA, 19 nt, Homo sapiens
  misc_RNA (1)...(19): siRNA sense strand
acaaaggauuuacaacagu

SEQ ID NO: 2165401 - RNA, 19 nt, Homo sapiens
  misc_RNA (1)...(19): siRNA sense strand
aaaccgaccaguccaaaga

SEQ ID NO: 2165402 - RNA, 19 nt, Homo sapiens
  misc_RNA (1)...(19): siRNA sense strand
guccaaaggcugucaccua

SEQ ID NO: 2165403 - RNA, 19 nt, Homo sapiens
  misc_RNA (1)...(19): siRNA sense strand
gcaauguguuccgcuuugu

SEQ ID NO: 2165404 - RNA, 19 nt, Homo sapiens
  misc_RNA (1)...(19): siRNA sense strand
aaagaaacucuaccuaaca

SEQ ID NO: 2165405 - RNA, 19 nt, Homo sapiens
  misc_RNA (1)...(19): siRNA sense strand
aaccaagacagaaucaaua

SEQ ID NO: 2165406 - RNA, 19 nt, Homo sapiens
  misc_RNA (1)...(19): siRNA sense strand
acaccugcuuacacaauaa

SEQ ID NO: 2165407 - RNA, 19 nt, Homo sapiens
  misc_RNA (1)...(19): siRNA sense strand
caguaugggucuuacaaca

SEQ ID NO: 2165408 - RNA, 19 nt, Homo sapiens
  misc_RNA (1)...(19): siRNA sense strand
uccacugucugucuuaauu

SEQ ID NO: 2165409 - RNA, 19 nt, Homo sapiens
  misc_RNA (1)...(19): siRNA sense strand
gaaguuccacugucugucu

SEQ ID NO: 2165410 - RNA, 19 nt, Homo sapiens
  misc_RNA (1)...(19): siRNA sense strand
gucaaugaaucacaauaca

SEQ ID NO: 2165411 - RNA, 19 nt, Homo sapiens
  misc_RNA (1)...(19): siRNA sense strand
gcugaaagacuggacagaa

SEQ ID NO: 2165412 - RNA, 19 nt, Homo sapiens
  misc_RNA (1)...(19): siRNA sense strand
ggagggaucauggagauuc

SEQ ID NO: 2165413 - RNA, 19 nt, Homo sapiens
  misc_RNA (1)...(19): siRNA sense strand
auauggaacucccaggaaa

SEQ ID NO: 2165414 - RNA, 19 nt, Homo sapiens
  misc_RNA (1)...(19): siRNA sense strand
gaauaucaacugugagaac

SEQ ID NO: 2165415 - RNA, 19 nt, Homo sapiens
  misc_RNA (1)...(19): siRNA sense strand
ccaucuacaugcagaagga

SEQ ID NO: 2165416 - RNA, 19 nt, Homo sapiens
  misc_RNA (1)...(19): siRNA sense strand
gaaucacaauacagacaca

SEQ ID NO: 2165417 - RNA, 19 nt, Homo sapiens
  misc_RNA (1)...(19): siRNA sense strand
gacuguaccugugacauca

SEQ ID NO: 2165418 - RNA, 19 nt, Homo sapiens
  misc_RNA (1)...(19): siRNA sense strand
gaucagcucccggcuuuca

SEQ ID NO: 2165419 - RNA, 19 nt, Homo sapiens
  misc_RNA (1)...(19): siRNA sense strand
uuacugcacuuaggaaaca

SEQ ID NO: 2165420 - RNA, 19 nt, Homo sapiens
  misc_RNA (1)...(19): siRNA sense strand
gagggaucauggagauuca

SEQ ID NO: 2165421 - RNA, 19 nt, Homo sapiens
  misc_RNA (1)...(19): siRNA sense strand
gaaaggaaguucacuaaua

SEQ ID NO: 2165422 - RNA, 19 nt, Homo sapiens
  misc_RNA (1)...(19): siRNA sense strand
gaauugcacuugugacuua

SEQ ID NO: 2165423 - RNA, 19 nt, Homo sapiens
  misc_RNA (1)...(19): siRNA sense strand
agaaugaccucuuagaaua

SEQ ID NO: 2165424 - RNA, 19 nt, Homo sapiens
  misc_RNA (1)...(19): siRNA sense strand
ggaacuaucuucaaacugu

SEQ ID NO: 2165425 - RNA, 19 nt, Homo sapiens
  misc_RNA (1)...(19): siRNA sense strand
gaacaaaggauuuacaaca

SEQ ID NO: 2165426 - RNA, 19 nt, Homo sapiens
  misc_RNA (1)...(19): siRNA sense strand
guccuuaccugauaauaua

SEQ ID NO: 2165427 - RNA, 19 nt, Homo sapiens
  misc_RNA (1)...(19): siRNA sense strand
ggacagaacaugccaauuc

SEQ ID NO: 2165428 - RNA, 19 nt, Homo sapiens
  misc_RNA (1)...(19): siRNA sense strand
acaacaagcuugagauauu

SEQ ID NO: 2165429 - RNA, 19 nt, Homo sapiens
  misc_RNA (1)...(19): siRNA sense strand
ggaaccgucuugucaauga

SEQ ID NO: 2165430 - RNA, 19 nt, Homo sapiens
  misc_RNA (1)...(19): siRNA sense strand
ugacaagacuguauccaaa

SEQ ID NO: 2165431 - RNA, 19 nt, Homo sapiens
  misc_RNA (1)...(19): siRNA sense strand
cguaagcuccuuucaauua

SEQ ID NO: 2165432 - RNA, 19 nt, Homo sapiens
  misc_RNA (1)...(19): siRNA sense strand
caacaggauugcagucauu

SEQ ID NO: 2165433 - RNA, 19 nt, Homo sapiens
  misc_RNA (1)...(19): siRNA sense strand
gacguaagcuccuuucaau

SEQ ID NO: 2165434 - RNA, 19 nt, Homo sapiens
  misc_RNA (1)...(19): siRNA sense strand
gcuguacccuucuauguuu

SEQ ID NO: 2165435 - RNA, 19 nt, Homo sapiens
  misc_RNA (1)...(19): siRNA sense strand
gaaggaaggagacccagua

SEQ ID NO: 2165436 - RNA, 19 nt, Homo sapiens
  misc_RNA (1)...(19): siRNA sense strand
gaaguucacuaauaucucu

SEQ ID NO: 2165437 - RNA, 19 nt, Homo sapiens
  misc_RNA (1)...(19): siRNA sense strand
ccaaagaaacucuaccuaa

SEQ ID NO: 2165438 - RNA, 19 nt, Homo sapiens
  misc_RNA (1)...(19): siRNA sense strand
caacaacaagcuugagaua

SEQ ID NO: 2165439 - RNA, 19 nt, Homo sapiens
  misc_RNA (1)...(19): siRNA sense strand
caacaagcuugagauauug

SEQ ID NO: 2165440 - RNA, 19 nt, Homo sapiens
  misc_RNA (1)...(19): siRNA sense strand
caaagaaacucuaccuaac

SEQ ID NO: 2165441 - RNA, 19 nt, Homo sapiens
  misc_RNA (1)...(19): siRNA sense strand
gaauggcaauuaccuugaa

SEQ ID NO: 2165442 - RNA, 19 nt, Homo sapiens
  misc_RNA (1)...(19): siRNA sense strand
uaucgaaucuaucagcuuu

SEQ ID NO: 2165443 - RNA, 19 nt, Homo sapiens
  misc_RNA (1)...(19): siRNA sense strand
gaauguaaacugccaagaa

SEQ ID NO: 2165444 - RNA, 19 nt, Homo sapiens
  misc_RNA (1)...(19): siRNA sense strand
ggccaugucuacaacuaua

SEQ ID NO: 2165445 - RNA, 19 nt, Homo sapiens
  misc_RNA (1)...(19): siRNA sense strand
caaaggauuuacaacaguu

SEQ ID NO: 2165446 - RNA, 19 nt, Homo sapiens
  misc_RNA (1)...(19): siRNA sense strand
caaacugucuauaagaaug

SEQ ID NO: 2165447 - RNA, 19 nt, Homo sapiens
  misc_RNA (1)...(19): siRNA sense strand
caaaggcugucaccuacaa

SEQ ID NO: 2165448 - RNA, 19 nt, Homo sapiens
  misc_RNA (1)...(19): siRNA sense strand
caaaggacaggcaaaguuu

SEQ ID NO: 2165449 - RNA, 19 nt, Homo sapiens
  misc_RNA (1)...(19): siRNA sense strand
ccacugagcugcuagaaaa

SEQ ID NO: 2165450 - RNA, 19 nt, Homo sapiens
  misc_RNA (1)...(19): siRNA sense strand
acaauggucugaauguaaa

SEQ ID NO: 2165451 - RNA, 19 nt, Homo sapiens
  misc_RNA (1)...(19): siRNA sense strand
ucaaagugcucauccugaa

SEQ ID NO: 2165452 - RNA, 19 nt, Homo sapiens
  misc_RNA (1)...(19): siRNA sense strand
aauguaaacugccaagaaa

SEQ ID NO: 2165453 - RNA, 19 nt, Homo sapiens
  misc_RNA (1)...(19): siRNA sense strand
gagacccaguagccuauua

SEQ ID NO: 2165454 - RNA, 19 nt, Homo sapiens
  misc_RNA (1)...(19): siRNA sense strand
gacaauggucugaauguaa

SEQ ID NO: 2165455 - RNA, 19 nt, Homo sapiens
  misc_RNA (1)...(19): siRNA sense strand
gaccuuugaugcuuugauu

SEQ ID NO: 2165456 - RNA, 19 nt, Homo sapiens
  misc_RNA (1)...(19): siRNA sense strand
acagggaacuaucuucaaa

SEQ ID NO: 2165457 - RNA, 19 nt, Homo sapiens
  misc_RNA (1)...(19): siRNA sense strand
caaccacccuuuacugcaa

SEQ ID NO: 2165458 - RNA, 19 nt, Homo sapiens
  misc_RNA (1)...(19): siRNA sense strand
ugggagagauugucuguga

SEQ ID NO: 2165459 - RNA, 19 nt, Homo sapiens
  misc_RNA (1)...(19): siRNA sense strand
auacaguucuuuggacuua

SEQ ID NO: 2165460 - RNA, 19 nt, Homo sapiens
  misc_RNA (1)...(19): siRNA sense strand
ucucagagcucagacaaug

SEQ ID NO: 2165461 - RNA, 19 nt, Homo sapiens
  misc_RNA (1)...(19): siRNA sense strand
caagaaaggaaguucacua

SEQ ID NO: 2165462 - RNA, 19 nt, Homo sapiens
  misc_RNA (1)...(19): siRNA sense strand
cgacuacaauuacaucagu

SEQ ID NO: 2165463 - RNA, 19 nt, Homo sapiens
  misc_RNA (1)...(19): siRNA sense strand
caucuuaucugucuguuuu

SEQ ID NO: 2165464 - RNA, 19 nt, Homo sapiens
  misc_RNA (1)...(19): siRNA sense strand
uggaucagcucccggcuuu

SEQ ID NO: 2165465 - RNA, 19 nt, Homo sapiens
  misc_RNA (1)...(19): siRNA sense strand
gagaacaaaggauuuacaa

SEQ ID NO: 2165466 - RNA, 19 nt, Homo sapiens
  misc_RNA (1)...(19): siRNA sense strand
gaaccgucuugucaaugaa

SEQ ID NO: 2165467 - RNA, 19 nt, Homo sapiens
  misc_RNA (1)...(19): siRNA sense strand
gggaauaggcuaaaaguaa

SEQ ID NO: 2165468 - RNA, 19 nt, Homo sapiens
  misc_RNA (1)...(19): siRNA sense strand
gagcugcuguaucaaaaua

SEQ ID NO: 2165469 - RNA, 19 nt, Homo sapiens
  misc_RNA (1)...(19): siRNA sense strand
uaucaacugugagaacaaa

SEQ ID NO: 2165470 - RNA, 19 nt, Homo sapiens
  misc_RNA (1)...(19): siRNA sense strand
ggaauaccaacaacuuaga

SEQ ID NO: 2165471 - RNA, 19 nt, Homo sapiens
  misc_RNA (1)...(19): siRNA sense strand
caaugaaucacaauacaga

SEQ ID NO: 2165472 - RNA, 19 nt, Homo sapiens
  misc_RNA (1)...(19): siRNA sense strand
uuaagccucugaccuuuga

SEQ ID NO: 2165473 - RNA, 19 nt, Homo sapiens
  misc_RNA (1)...(19): siRNA sense strand
ucaaaggacaggcaaaguu

SEQ ID NO: 2165474 - RNA, 19 nt, Homo sapiens
  misc_RNA (1)...(19): siRNA sense strand
gaacauauuggagggauca

SEQ ID NO: 2165475 - RNA, 19 nt, Homo sapiens
  misc_RNA (1)...(19): siRNA sense strand
ggaauaggcuaaaaguaau

SEQ ID NO: 2165476 - RNA, 19 nt, Homo sapiens
  misc_RNA (1)...(19): siRNA sense strand
gaaaauccauggaauugca

SEQ ID NO: 2165477 - RNA, 19 nt, Homo sapiens
  misc_RNA (1)...(19): siRNA sense strand
cugcaagaguucagcuaua

SEQ ID NO: 2165478 - RNA, 19 nt, Homo sapiens
  misc_RNA (1)...(19): siRNA sense strand
gacugcaucucaacaacaa

SEQ ID NO: 2165479 - RNA, 19 nt, Homo sapiens
  misc_RNA (1)...(19): siRNA sense strand
agccugagcugcuguauca

SEQ ID NO: 2165480 - RNA, 19 nt, Homo sapiens
  misc_RNA (1)...(19): siRNA sense strand
cuagacaccauaacuguuu

SEQ ID NO: 2165481 - RNA, 19 nt, Homo sapiens
  misc_RNA (1)...(19): siRNA sense strand
ggagagauugucugugaga

SEQ ID NO: 2165482 - RNA, 19 nt, Homo sapiens
  misc_RNA (1)...(19): siRNA sense strand
caggaauaccaacaacuua

SEQ ID NO: 2165483 - RNA, 19 nt, Homo sapiens
  misc_RNA (1)...(19): siRNA sense strand
ugaggugacuugcgaaucu

SEQ ID NO: 2165484 - RNA, 19 nt, Homo sapiens
  misc_RNA (1)...(19): siRNA sense strand
ggacuuacugcacuuagga

SEQ ID NO: 2165485 - RNA, 19 nt, Homo sapiens
  misc_RNA (1)...(19): siRNA sense strand
gcugucaccuacaaugaau

SEQ ID NO: 2165486 - RNA, 19 nt, Homo sapiens
  misc_RNA (1)...(19): siRNA sense strand
aagcuaagccgcaaucaga

SEQ ID NO: 2165487 - RNA, 19 nt, Homo sapiens
  misc_RNA (1)...(19): siRNA sense strand
aagaaaggaaguucacuaa

SEQ ID NO: 2165488 - RNA, 19 nt, Homo sapiens
  misc_RNA (1)...(19): siRNA sense strand
uaacagggaacuaucuuca

SEQ ID NO: 2165489 - RNA, 19 nt, Homo sapiens
  misc_RNA (1)...(19): siRNA sense strand
cacaccugcuuacacaaua

SEQ ID NO: 2165490 - RNA, 19 nt, Homo sapiens
  misc_RNA (1)...(19): siRNA sense strand
ccagacagcccaaacuugu

SEQ ID NO: 2165491 - RNA, 19 nt, Homo sapiens
  misc_RNA (1)...(19): siRNA sense strand
ugacuuacuuccucucaag

SEQ ID NO: 2165492 - RNA, 19 nt, Homo sapiens
  misc_RNA (1)...(19): siRNA sense strand
cuucgguccuuaccugaua

SEQ ID NO: 2165493 - RNA, 19 nt, Homo sapiens
  misc_RNA (1)...(19): siRNA sense strand
aaauuaagccucugaccuu

SEQ ID NO: 2165494 - RNA, 19 nt, Homo sapiens
  misc_RNA (1)...(19): siRNA sense strand
ccugaaaacucucaaaaga

SEQ ID NO: 2165495 - RNA, 19 nt, Homo sapiens
  misc_RNA (1)...(19): siRNA sense strand
gaaaacguacugaauauca

SEQ ID NO: 2165496 - RNA, 19 nt, Homo sapiens
  misc_RNA (1)...(19): siRNA sense strand
gagcuugcaauaucucuau

SEQ ID NO: 2165497 - RNA, 19 nt, Homo sapiens
  misc_RNA (1)...(19): siRNA sense strand
ccaacgcggugacucuuca

SEQ ID NO: 2165498 - RNA, 19 nt, Homo sapiens
  misc_RNA (1)...(19): siRNA sense strand
ccaggaauaccaacaacuu

SEQ ID NO: 2165499 - RNA, 19 nt, Homo sapiens
  misc_RNA (1)...(19): siRNA sense strand
ggacuguaccugugacauc

SEQ ID NO: 2165500 - RNA, 19 nt, Homo sapiens
  misc_RNA (1)...(19): siRNA sense strand
acaaaggauuuacaacagu

SEQ ID NO: 2165501 - RNA, 19 nt, Homo sapiens
  misc_RNA (1)...(19): siRNA sense strand
aaaccgaccaguccaaaga

SEQ ID NO: 2165502 - RNA, 19 nt, Homo sapiens
  misc_RNA (1)...(19): siRNA sense strand
guccaaaggcugucaccua

SEQ ID NO: 2165503 - RNA, 19 nt, Homo sapiens
  misc_RNA (1)...(19): siRNA sense strand
gcaauguguuccgcuuugu

SEQ ID NO: 2165504 - RNA, 19 nt, Homo sapiens
  misc_RNA (1)...(19): siRNA sense strand
aaagaaacucuaccuaaca

SEQ ID NO: 2165505 - RNA, 19 nt, Homo sapiens
  misc_RNA (1)...(19): siRNA sense strand
aaccaagacagaaucaaua

SEQ ID NO: 2165506 - RNA, 19 nt, Homo sapiens
  misc_RNA (1)...(19): siRNA sense strand
acaccugcuuacacaauaa

SEQ ID NO: 2165507 - RNA, 19 nt, Homo sapiens
  misc_RNA (1)...(19): siRNA sense strand
caguaugggucuuacaaca

SEQ ID NO: 2165508 - RNA, 19 nt, Homo sapiens
  misc_RNA (1)...(19): siRNA sense strand
uccacugucugucuuaauu

SEQ ID NO: 2165509 - RNA, 19 nt, Homo sapiens
  misc_RNA (1)...(19): siRNA sense strand
gaaguuccacugucugucu

SEQ ID NO: 2165510 - RNA, 19 nt, Homo sapiens
  misc_RNA (1)...(19): siRNA sense strand
gucaaugaaucacaauaca

SEQ ID NO: 2165511 - RNA, 19 nt, Homo sapiens
  misc_RNA (1)...(19): siRNA sense strand
gcugaaagacuggacagaa

SEQ ID NO: 2165512 - RNA, 19 nt, Homo sapiens
  misc_RNA (1)...(19): siRNA sense strand
ggagggaucauggagauuc

SEQ ID NO: 2165513 - RNA, 19 nt, Homo sapiens
  misc_RNA (1)...(19): siRNA sense strand
auauggaacucccaggaaa

SEQ ID NO: 2165514 - RNA, 19 nt, Homo sapiens
  misc_RNA (1)...(19): siRNA sense strand
gaauaucaacugugagaac

SEQ ID NO: 2165515 - RNA, 19 nt, Homo sapiens
  misc_RNA (1)...(19): siRNA sense strand
ccaucuacaugcagaagga

SEQ ID NO: 2165516 - RNA, 19 nt, Homo sapiens
  misc_RNA (1)...(19): siRNA sense strand
gaaucacaauacagacaca

SEQ ID NO: 2165517 - RNA, 19 nt, Homo sapiens
  misc_RNA (1)...(19): siRNA sense strand
gacuguaccugugacauca

SEQ ID NO: 2165518 - RNA, 19 nt, Homo sapiens
  misc_RNA (1)...(19): siRNA sense strand
gaucagcucccggcuuuca

SEQ ID NO: 2165519 - RNA, 19 nt, Homo sapiens
  misc_RNA (1)...(19): siRNA sense strand
uuacugcacuuaggaaaca

SEQ ID NO: 2165520 - RNA, 19 nt, Homo sapiens
  misc_RNA (1)...(19): siRNA sense strand
gagggaucauggagauuca

SEQ ID NO: 2165521 - RNA, 19 nt, Homo sapiens
  misc_RNA (1)...(19): siRNA sense strand
gaagaaugguguuucaaua

SEQ ID NO: 2165522 - RNA, 19 nt, Homo sapiens
  misc_RNA (1)...(19): siRNA sense strand
ggaaagaauugcucagaaa

SEQ ID NO: 2165523 - RNA, 19 nt, Homo sapiens
  misc_RNA (1)...(19): siRNA sense strand
gcaaauggaugcaguuguu

SEQ ID NO: 2165524 - RNA, 19 nt, Homo sapiens
  misc_RNA (1)...(19): siRNA sense strand
ggagauauccuuguaauuu

SEQ ID NO: 2165525 - RNA, 19 nt, Homo sapiens
  misc_RNA (1)...(19): siRNA sense strand
caucauaugugguaaauug

SEQ ID NO: 2165526 - RNA, 19 nt, Homo sapiens
  misc_RNA (1)...(19): siRNA sense strand
ggaaacugcagcaauauua

SEQ ID NO: 2165527 - RNA, 19 nt, Homo sapiens
  misc_RNA (1)...(19): siRNA sense strand
ggaauaaugcuacauguaa

SEQ ID NO: 2165528 - RNA, 19 nt, Homo sapiens
  misc_RNA (1)...(19): siRNA sense strand
cuacagagauugcugguuu

SEQ ID NO: 2165529 - RNA, 19 nt, Homo sapiens
  misc_RNA (1)...(19): siRNA sense strand
ggagucaccuuccauggua

SEQ ID NO: 2165530 - RNA, 19 nt, Homo sapiens
  misc_RNA (1)...(19): siRNA sense strand
uaaagguccugcucaauuu

SEQ ID NO: 2165531 - RNA, 19 nt, Homo sapiens
  misc_RNA (1)...(19): siRNA sense strand
ucacagcucuuucauaaau

SEQ ID NO: 2165532 - RNA, 19 nt, Homo sapiens
  misc_RNA (1)...(19): siRNA sense strand
gaacgauccugaagauaau

SEQ ID NO: 2165533 - RNA, 19 nt, Homo sapiens
  misc_RNA (1)...(19): siRNA sense strand
gcagcaauauuacuucaaa

SEQ ID NO: 2165534 - RNA, 19 nt, Homo sapiens
  misc_RNA (1)...(19): siRNA sense strand
cauggaaacugcagcaaua

SEQ ID NO: 2165535 - RNA, 19 nt, Homo sapiens
  misc_RNA (1)...(19): siRNA sense strand
gaauaucgguaucuauguu

SEQ ID NO: 2165536 - RNA, 19 nt, Homo sapiens
  misc_RNA (1)...(19): siRNA sense strand
ccacaacccucaucauaug

SEQ ID NO: 2165537 - RNA, 19 nt, Homo sapiens
  misc_RNA (1)...(19): siRNA sense strand
ggacuucgacuaaauguga

SEQ ID NO: 2165538 - RNA, 19 nt, Homo sapiens
  misc_RNA (1)...(19): siRNA sense strand
uuucacagcucuuucauaa

SEQ ID NO: 2165539 - RNA, 19 nt, Homo sapiens
  misc_RNA (1)...(19): siRNA sense strand
gugcaucuguucaccaaua

SEQ ID NO: 2165540 - RNA, 19 nt, Homo sapiens
  misc_RNA (1)...(19): siRNA sense strand
gaaagcaauugaccacugu

SEQ ID NO: 2165541 - RNA, 19 nt, Homo sapiens
  misc_RNA (1)...(19): siRNA sense strand
gagauauccuuguaauuuc

SEQ ID NO: 2165542 - RNA, 19 nt, Homo sapiens
  misc_RNA (1)...(19): siRNA sense strand
caaaugauguuaugugcau

SEQ ID NO: 2165543 - RNA, 19 nt, Homo sapiens
  misc_RNA (1)...(19): siRNA sense strand
acaugaagcuguuuguaaa

SEQ ID NO: 2165544 - RNA, 19 nt, Homo sapiens
  misc_RNA (1)...(19): siRNA sense strand
gaaaaugagugucaacaug

SEQ ID NO: 2165545 - RNA, 19 nt, Homo sapiens
  misc_RNA (1)...(19): siRNA sense strand
caugguauuugccaagaua

SEQ ID NO: 2165546 - RNA, 19 nt, Homo sapiens
  misc_RNA (1)...(19): siRNA sense strand
gaagaugcaaccuauguga

SEQ ID NO: 2165547 - RNA, 19 nt, Homo sapiens
  misc_RNA (1)...(19): siRNA sense strand
gaauauguguggcaauugg

SEQ ID NO: 2165548 - RNA, 19 nt, Homo sapiens
  misc_RNA (1)...(19): siRNA sense strand
ugaacgauccugaagauaa

SEQ ID NO: 2165549 - RNA, 19 nt, Homo sapiens
  misc_RNA (1)...(19): siRNA sense strand
ugaaugugaugagcaauuu

SEQ ID NO: 2165550 - RNA, 19 nt, Homo sapiens
  misc_RNA (1)...(19): siRNA sense strand
cagaugggcuggcaacaug

SEQ ID NO: 2165551 - RNA, 19 nt, Homo sapiens
  misc_RNA (1)...(19): siRNA sense strand
gggaugagcaagcauauga

SEQ ID NO: 2165552 - RNA, 19 nt, Homo sapiens
  misc_RNA (1)...(19): siRNA sense strand
gaauaaugcuacauguaag

SEQ ID NO: 2165553 - RNA, 19 nt, Homo sapiens
  misc_RNA (1)...(19): siRNA sense strand
guaagagcauucaaacauc

SEQ ID NO: 2165554 - RNA, 19 nt, Homo sapiens
  misc_RNA (1)...(19): siRNA sense strand
ggaaugcacacuguuaauu

SEQ ID NO: 2165555 - RNA, 19 nt, Homo sapiens
  misc_RNA (1)...(19): siRNA sense strand
gaagcuguuuguaaagaug

SEQ ID NO: 2165556 - RNA, 19 nt, Homo sapiens
  misc_RNA (1)...(19): siRNA sense strand
gaaagaauugcucagaaau

SEQ ID NO: 2165557 - RNA, 19 nt, Homo sapiens
  misc_RNA (1)...(19): siRNA sense strand
ccacugggacuucgacuaa

SEQ ID NO: 2165558 - RNA, 19 nt, Homo sapiens
  misc_RNA (1)...(19): siRNA sense strand
gcacugaagaugcaaccua

SEQ ID NO: 2165559 - RNA, 19 nt, Homo sapiens
  misc_RNA (1)...(19): siRNA sense strand
ucaacugucugaaugaaga

SEQ ID NO: 2165560 - RNA, 19 nt, Homo sapiens
  misc_RNA (1)...(19): siRNA sense strand
uaagagcauucaaacauca

SEQ ID NO: 2165561 - RNA, 19 nt, Homo sapiens
  misc_RNA (1)...(19): siRNA sense strand
gugguaaauuggacacuaa

SEQ ID NO: 2165562 - RNA, 19 nt, Homo sapiens
  misc_RNA (1)...(19): siRNA sense strand
gaagaagacagucaggaau

SEQ ID NO: 2165563 - RNA, 19 nt, Homo sapiens
  misc_RNA (1)...(19): siRNA sense strand
agaaauaauuggccagugu

SEQ ID NO: 2165564 - RNA, 19 nt, Homo sapiens
  misc_RNA (1)...(19): siRNA sense strand
aaaggaaugcacacuguua

SEQ ID NO: 2165565 - RNA, 19 nt, Homo sapiens
  misc_RNA (1)...(19): siRNA sense strand
caugguaaaugucuuagug

SEQ ID NO: 2165566 - RNA, 19 nt, Homo sapiens
  misc_RNA (1)...(19): siRNA sense strand
ggucaugguaaaugucuua

SEQ ID NO: 2165567 - RNA, 19 nt, Homo sapiens
  misc_RNA (1)...(19): siRNA sense strand
gaggaauaaugcuacaugu

SEQ ID NO: 2165568 - RNA, 19 nt, Homo sapiens
  misc_RNA (1)...(19): siRNA sense strand
gacuaaaugugacagugaa

SEQ ID NO: 2165569 - RNA, 19 nt, Homo sapiens
  misc_RNA (1)...(19): siRNA sense strand
guaagaaaugugagaaaga

SEQ ID NO: 2165570 - RNA, 19 nt, Homo sapiens
  misc_RNA (1)...(19): siRNA sense strand
gauuauccuugcagcugua

SEQ ID NO: 2165571 - RNA, 19 nt, Homo sapiens
  misc_RNA (1)...(19): siRNA sense strand
ggaagaauggcauccacaa

SEQ ID NO: 2165572 - RNA, 19 nt, Homo sapiens
  misc_RNA (1)...(19): siRNA sense strand
ggcaauugguggaagaaug

SEQ ID NO: 2165573 - RNA, 19 nt, Homo sapiens
  misc_RNA (1)...(19): siRNA sense strand
ccaggaaucucugaguuca

SEQ ID NO: 2165574 - RNA, 19 nt, Homo sapiens
  misc_RNA (1)...(19): siRNA sense strand
aagaagacagucaggaaua

SEQ ID NO: 2165575 - RNA, 19 nt, Homo sapiens
  misc_RNA (1)...(19): siRNA sense strand
acaaaucaaucgucauucu

SEQ ID NO: 2165576 - RNA, 19 nt, Homo sapiens
  misc_RNA (1)...(19): siRNA sense strand
uaaauuggacacuaacaga

SEQ ID NO: 2165577 - RNA, 19 nt, Homo sapiens
  misc_RNA (1)...(19): siRNA sense strand
ccaggaacuugaugcaugu

SEQ ID NO: 2165578 - RNA, 19 nt, Homo sapiens
  misc_RNA (1)...(19): siRNA sense strand
ucaggaauaucgguaucua

SEQ ID NO: 2165579 - RNA, 19 nt, Homo sapiens
  misc_RNA (1)...(19): siRNA sense strand
caucaacugucugaaugaa

SEQ ID NO: 2165580 - RNA, 19 nt, Homo sapiens
  misc_RNA (1)...(19): siRNA sense strand
gcagcuguauaucaggauu

SEQ ID NO: 2165581 - RNA, 19 nt, Homo sapiens
  misc_RNA (1)...(19): siRNA sense strand
caucuguucaccaauauuu

SEQ ID NO: 2165582 - RNA, 19 nt, Homo sapiens
  misc_RNA (1)...(19): siRNA sense strand
ggcaacauguaucuggaaa

SEQ ID NO: 2165583 - RNA, 19 nt, Homo sapiens
  misc_RNA (1)...(19): siRNA sense strand
gguuauugaugccuauuuc

SEQ ID NO: 2165584 - RNA, 19 nt, Homo sapiens
  misc_RNA (1)...(19): siRNA sense strand
gcaauugaccacuguaaac

SEQ ID NO: 2165585 - RNA, 19 nt, Homo sapiens
  misc_RNA (1)...(19): siRNA sense strand
auaaagguccugcucaauu

SEQ ID NO: 2165586 - RNA, 19 nt, Homo sapiens
  misc_RNA (1)...(19): siRNA sense strand
agaagacagucaggaauau

SEQ ID NO: 2165587 - RNA, 19 nt, Homo sapiens
  misc_RNA (1)...(19): siRNA sense strand
gcaguuguuugagugaaga

SEQ ID NO: 2165588 - RNA, 19 nt, Homo sapiens
  misc_RNA (1)...(19): siRNA sense strand
ucugugaggugucagcaaa

SEQ ID NO: 2165589 - RNA, 19 nt, Homo sapiens
  misc_RNA (1)...(19): siRNA sense strand
ugaagaagacagucaggaa

SEQ ID NO: 2165590 - RNA, 19 nt, Homo sapiens
  misc_RNA (1)...(19): siRNA sense strand
cacaacggaagaucaguua

SEQ ID NO: 2165591 - RNA, 19 nt, Homo sapiens
  misc_RNA (1)...(19): siRNA sense strand
aaaugagugucaacaugaa

SEQ ID NO: 2165592 - RNA, 19 nt, Homo sapiens
  misc_RNA (1)...(19): siRNA sense strand
agauaaagguccugcucaa

SEQ ID NO: 2165593 - RNA, 19 nt, Homo sapiens
  misc_RNA (1)...(19): siRNA sense strand
ugagcaagcauaugaaugu

SEQ ID NO: 2165594 - RNA, 19 nt, Homo sapiens
  misc_RNA (1)...(19): siRNA sense strand
gcaagugguccaucaccuu

SEQ ID NO: 2165595 - RNA, 19 nt, Homo sapiens
  misc_RNA (1)...(19): siRNA sense strand
cgacuaaaugugacaguga

SEQ ID NO: 2165596 - RNA, 19 nt, Homo sapiens
  misc_RNA (1)...(19): siRNA sense strand
gcaauugguggaagaaugg

SEQ ID NO: 2165597 - RNA, 19 nt, Homo sapiens
  misc_RNA (1)...(19): siRNA sense strand
ggaauaucgguaucuaugu

SEQ ID NO: 2165598 - RNA, 19 nt, Homo sapiens
  misc_RNA (1)...(19): siRNA sense strand
gagaaagauuauccuugca

SEQ ID NO: 2165599 - RNA, 19 nt, Homo sapiens
  misc_RNA (1)...(19): siRNA sense strand
gagcaagcauaugaaugug

SEQ ID NO: 2165600 - RNA, 19 nt, Homo sapiens
  misc_RNA (1)...(19): siRNA sense strand
aggaaagaauugcucagaa

SEQ ID NO: 2165601 - RNA, 19 nt, Homo sapiens
  misc_RNA (1)...(19): siRNA sense strand
gaaaagugccaagggguua

SEQ ID NO: 2165602 - RNA, 19 nt, Homo sapiens
  misc_RNA (1)...(19): siRNA sense strand
guucaccaauauuuacaga

SEQ ID NO: 2165603 - RNA, 19 nt, Homo sapiens
  misc_RNA (1)...(19): siRNA sense strand
uguaagagcauucaaacau

SEQ ID NO: 2165604 - RNA, 19 nt, Homo sapiens
  misc_RNA (1)...(19): siRNA sense strand
caacauguaucuggaaaau

SEQ ID NO: 2165605 - RNA, 19 nt, Homo sapiens
  misc_RNA (1)...(19): siRNA sense strand
ugugaacgauccugaagau

SEQ ID NO: 2165606 - RNA, 19 nt, Homo sapiens
  misc_RNA (1)...(19): siRNA sense strand
uugaauauguguggcaauu

SEQ ID NO: 2165607 - RNA, 19 nt, Homo sapiens
  misc_RNA (1)...(19): siRNA sense strand
uaaaaggaaugcacacugu

SEQ ID NO: 2165608 - RNA, 19 nt, Homo sapiens
  misc_RNA (1)...(19): siRNA sense strand
gcaguugcauuaauaaaag

SEQ ID NO: 2165609 - RNA, 19 nt, Homo sapiens
  misc_RNA (1)...(19): siRNA sense strand
gaaacugcagcaauauuac

SEQ ID NO: 2165610 - RNA, 19 nt, Homo sapiens
  misc_RNA (1)...(19): siRNA sense strand
cacugaagaugcaaccuau

SEQ ID NO: 2165611 - RNA, 19 nt, Homo sapiens
  misc_RNA (1)...(19): siRNA sense strand
gcuuggacuucuacagaga

SEQ ID NO: 2165612 - RNA, 19 nt, Homo sapiens
  misc_RNA (1)...(19): siRNA sense strand
gaaugaagaaugguguuuc

SEQ ID NO: 2165613 - RNA, 19 nt, Homo sapiens
  misc_RNA (1)...(19): siRNA sense strand
gcacacuguuaauucuaag

SEQ ID NO: 2165614 - RNA, 19 nt, Homo sapiens
  misc_RNA (1)...(19): siRNA sense strand
cagauuugcuuuguaagag

SEQ ID NO: 2165615 - RNA, 19 nt, Homo sapiens
  misc_RNA (1)...(19): siRNA sense strand
uuaguaccaugucagaaug

SEQ ID NO: 2165616 - RNA, 19 nt, Homo sapiens
  misc_RNA (1)...(19): siRNA sense strand
ccauuuacaggaaagaauu

SEQ ID NO: 2165617 - RNA, 19 nt, Homo sapiens
  misc_RNA (1)...(19): siRNA sense strand
gaugagcaagcauaugaau

SEQ ID NO: 2165618 - RNA, 19 nt, Homo sapiens
  misc_RNA (1)...(19): siRNA sense strand
ucaaccacaugucuguuuc

SEQ ID NO: 2165619 - RNA, 19 nt, Homo sapiens
  misc_RNA (1)...(19): siRNA sense strand
gcaaacugcacugaagaug

SEQ ID NO: 2165620 - RNA, 19 nt, Homo sapiens
  misc_RNA (1)...(19): siRNA sense strand
gauaaagguccugcucaau

SEQ ID NO: 2165621 - RNA, 19 nt, Homo sapiens
  misc_RNA (1)...(19): siRNA sense strand
gaagaaugguguuucaaua

SEQ ID NO: 2165622 - RNA, 19 nt, Homo sapiens
  misc_RNA (1)...(19): siRNA sense strand
ggaaagaauugcucagaaa

SEQ ID NO: 2165623 - RNA, 19 nt, Homo sapiens
  misc_RNA (1)...(19): siRNA sense strand
gcaaauggaugcaguuguu

SEQ ID NO: 2165624 - RNA, 19 nt, Homo sapiens
  misc_RNA (1)...(19): siRNA sense strand
ggagauauccuuguaauuu

SEQ ID NO: 2165625 - RNA, 19 nt, Homo sapiens
  misc_RNA (1)...(19): siRNA sense strand
caucauaugugguaaauug

SEQ ID NO: 2165626 - RNA, 19 nt, Homo sapiens
  misc_RNA (1)...(19): siRNA sense strand
ggaaacugcagcaauauua

SEQ ID NO: 2165627 - RNA, 19 nt, Homo sapiens
  misc_RNA (1)...(19): siRNA sense strand
ggaauaaugcuacauguaa

SEQ ID NO: 2165628 - RNA, 19 nt, Homo sapiens
  misc_RNA (1)...(19): siRNA sense strand
cuacagagauugcugguuu

SEQ ID NO: 2165629 - RNA, 19 nt, Homo sapiens
  misc_RNA (1)...(19): siRNA sense strand
ggagucaccuuccauggua

SEQ ID NO: 2165630 - RNA, 19 nt, Homo sapiens
  misc_RNA (1)...(19): siRNA sense strand
uaaagguccugcucaauuu

SEQ ID NO: 2165631 - RNA, 19 nt, Homo sapiens
  misc_RNA (1)...(19): siRNA sense strand
ucacagcucuuucauaaau

SEQ ID NO: 2165632 - RNA, 19 nt, Homo sapiens
  misc_RNA (1)...(19): siRNA sense strand
gaacgauccugaagauaau

SEQ ID NO: 2165633 - RNA, 19 nt, Homo sapiens
  misc_RNA (1)...(19): siRNA sense strand
gcagcaauauuacuucaaa

SEQ ID NO: 2165634 - RNA, 19 nt, Homo sapiens
  misc_RNA (1)...(19): siRNA sense strand
cauggaaacugcagcaaua

SEQ ID NO: 2165635 - RNA, 19 nt, Homo sapiens
  misc_RNA (1)...(19): siRNA sense strand
gaauaucgguaucuauguu

SEQ ID NO: 2165636 - RNA, 19 nt, Homo sapiens
  misc_RNA (1)...(19): siRNA sense strand
ccacaacccucaucauaug

SEQ ID NO: 2165637 - RNA, 19 nt, Homo sapiens
  misc_RNA (1)...(19): siRNA sense strand
ggacuucgacuaaauguga

SEQ ID NO: 2165638 - RNA, 19 nt, Homo sapiens
  misc_RNA (1)...(19): siRNA sense strand
uuucacagcucuuucauaa

SEQ ID NO: 2165639 - RNA, 19 nt, Homo sapiens
  misc_RNA (1)...(19): siRNA sense strand
gugcaucuguucaccaaua

SEQ ID NO: 2165640 - RNA, 19 nt, Homo sapiens
  misc_RNA (1)...(19): siRNA sense strand
gaaagcaauugaccacugu

SEQ ID NO: 2165641 - RNA, 19 nt, Homo sapiens
  misc_RNA (1)...(19): siRNA sense strand
gagauauccuuguaauuuc

SEQ ID NO: 2165642 - RNA, 19 nt, Homo sapiens
  misc_RNA (1)...(19): siRNA sense strand
caaaugauguuaugugcau

SEQ ID NO: 2165643 - RNA, 19 nt, Homo sapiens
  misc_RNA (1)...(19): siRNA sense strand
acaugaagcuguuuguaaa

SEQ ID NO: 2165644 - RNA, 19 nt, Homo sapiens
  misc_RNA (1)...(19): siRNA sense strand
gaaaaugagugucaacaug

SEQ ID NO: 2165645 - RNA, 19 nt, Homo sapiens
  misc_RNA (1)...(19): siRNA sense strand
caugguauuugccaagaua

SEQ ID NO: 2165646 - RNA, 19 nt, Homo sapiens
  misc_RNA (1)...(19): siRNA sense strand
gaagaugcaaccuauguga

SEQ ID NO: 2165647 - RNA, 19 nt, Homo sapiens
  misc_RNA (1)...(19): siRNA sense strand
gaauauguguggcaauugg

SEQ ID NO: 2165648 - RNA, 19 nt, Homo sapiens
  misc_RNA (1)...(19): siRNA sense strand
ugaacgauccugaagauaa

SEQ ID NO: 2165649 - RNA, 19 nt, Homo sapiens
  misc_RNA (1)...(19): siRNA sense strand
ugaaugugaugagcaauuu

SEQ ID NO: 2165650 - RNA, 19 nt, Homo sapiens
  misc_RNA (1)...(19): siRNA sense strand
cagaugggcuggcaacaug

SEQ ID NO: 2165651 - RNA, 19 nt, Homo sapiens
  misc_RNA (1)...(19): siRNA sense strand
gggaugagcaagcauauga

SEQ ID NO: 2165652 - RNA, 19 nt, Homo sapiens
  misc_RNA (1)...(19): siRNA sense strand
gaauaaugcuacauguaag

SEQ ID NO: 2165653 - RNA, 19 nt, Homo sapiens
  misc_RNA (1)...(19): siRNA sense strand
guaagagcauucaaacauc

SEQ ID NO: 2165654 - RNA, 19 nt, Homo sapiens
  misc_RNA (1)...(19): siRNA sense strand
ggaaugcacacuguuaauu

SEQ ID NO: 2165655 - RNA, 19 nt, Homo sapiens
  misc_RNA (1)...(19): siRNA sense strand
gaagcuguuuguaaagaug

SEQ ID NO: 2165656 - RNA, 19 nt, Homo sapiens
  misc_RNA (1)...(19): siRNA sense strand
gaaagaauugcucagaaau

SEQ ID NO: 2165657 - RNA, 19 nt, Homo sapiens
  misc_RNA (1)...(19): siRNA sense strand
ccacugggacuucgacuaa

SEQ ID NO: 2165658 - RNA, 19 nt, Homo sapiens
  misc_RNA (1)...(19): siRNA sense strand
gcacugaagaugcaaccua

SEQ ID NO: 2165659 - RNA, 19 nt, Homo sapiens
  misc_RNA (1)...(19): siRNA sense strand
ucaacugucugaaugaaga

SEQ ID NO: 2165660 - RNA, 19 nt, Homo sapiens
  misc_RNA (1)...(19): siRNA sense strand
uaagagcauucaaacauca

SEQ ID NO: 2165661 - RNA, 19 nt, Homo sapiens
  misc_RNA (1)...(19): siRNA sense strand
gugguaaauuggacacuaa

SEQ ID NO: 2165662 - RNA, 19 nt, Homo sapiens
  misc_RNA (1)...(19): siRNA sense strand
gaagaagacagucaggaau

SEQ ID NO: 2165663 - RNA, 19 nt, Homo sapiens
  misc_RNA (1)...(19): siRNA sense strand
agaaauaauuggccagugu

SEQ ID NO: 2165664 - RNA, 19 nt, Homo sapiens
  misc_RNA (1)...(19): siRNA sense strand
aaaggaaugcacacuguua

SEQ ID NO: 2165665 - RNA, 19 nt, Homo sapiens
  misc_RNA (1)...(19): siRNA sense strand
caugguaaaugucuuagug

SEQ ID NO: 2165666 - RNA, 19 nt, Homo sapiens
  misc_RNA (1)...(19): siRNA sense strand
ggucaugguaaaugucuua

SEQ ID NO: 2165667 - RNA, 19 nt, Homo sapiens
  misc_RNA (1)...(19): siRNA sense strand
gaggaauaaugcuacaugu

SEQ ID NO: 2165668 - RNA, 19 nt, Homo sapiens
  misc_RNA (1)...(19): siRNA sense strand
gacuaaaugugacagugaa

SEQ ID NO: 2165669 - RNA, 19 nt, Homo sapiens
  misc_RNA (1)...(19): siRNA sense strand
guaagaaaugugagaaaga

SEQ ID NO: 2165670 - RNA, 19 nt, Homo sapiens
  misc_RNA (1)...(19): siRNA sense strand
gauuauccuugcagcugua

SEQ ID NO: 2165671 - RNA, 19 nt, Homo sapiens
  misc_RNA (1)...(19): siRNA sense strand
ggaagaauggcauccacaa

SEQ ID NO: 2165672 - RNA, 19 nt, Homo sapiens
  misc_RNA (1)...(19): siRNA sense strand
ggcaauugguggaagaaug

SEQ ID NO: 2165673 - RNA, 19 nt, Homo sapiens
  misc_RNA (1)...(19): siRNA sense strand
ccaggaaucucugaguuca

SEQ ID NO: 2165674 - RNA, 19 nt, Homo sapiens
  misc_RNA (1)...(19): siRNA sense strand
aagaagacagucaggaaua

SEQ ID NO: 2165675 - RNA, 19 nt, Homo sapiens
  misc_RNA (1)...(19): siRNA sense strand
acaaaucaaucgucauucu

SEQ ID NO: 2165676 - RNA, 19 nt, Homo sapiens
  misc_RNA (1)...(19): siRNA sense strand
uaaauuggacacuaacaga

SEQ ID NO: 2165677 - RNA, 19 nt, Homo sapiens
  misc_RNA (1)...(19): siRNA sense strand
ccaggaacuugaugcaugu

SEQ ID NO: 2165678 - RNA, 19 nt, Homo sapiens
  misc_RNA (1)...(19): siRNA sense strand
ucaggaauaucgguaucua

SEQ ID NO: 2165679 - RNA, 19 nt, Homo sapiens
  misc_RNA (1)...(19): siRNA sense strand
caucaacugucugaaugaa

SEQ ID NO: 2165680 - RNA, 19 nt, Homo sapiens
  misc_RNA (1)...(19): siRNA sense strand
gcagcuguauaucaggauu

SEQ ID NO: 2165681 - RNA, 19 nt, Homo sapiens
  misc_RNA (1)...(19): siRNA sense strand
caucuguucaccaauauuu

SEQ ID NO: 2165682 - RNA, 19 nt, Homo sapiens
  misc_RNA (1)...(19): siRNA sense strand
ggcaacauguaucuggaaa

SEQ ID NO: 2165683 - RNA, 19 nt, Homo sapiens
  misc_RNA (1)...(19): siRNA sense strand
gguuauugaugccuauuuc

SEQ ID NO: 2165684 - RNA, 19 nt, Homo sapiens
  misc_RNA (1)...(19): siRNA sense strand
gcaauugaccacuguaaac

SEQ ID NO: 2165685 - RNA, 19 nt, Homo sapiens
  misc_RNA (1)...(19): siRNA sense strand
auaaagguccugcucaauu

SEQ ID NO: 2165686 - RNA, 19 nt, Homo sapiens
  misc_RNA (1)...(19): siRNA sense strand
agaagacagucaggaauau

SEQ ID NO: 2165687 - RNA, 19 nt, Homo sapiens
  misc_RNA (1)...(19): siRNA sense strand
gcaguuguuugagugaaga

SEQ ID NO: 2165688 - RNA, 19 nt, Homo sapiens
  misc_RNA (1)...(19): siRNA sense strand
ucugugaggugucagcaaa

SEQ ID NO: 2165689 - RNA, 19 nt, Homo sapiens
  misc_RNA (1)...(19): siRNA sense strand
ugaagaagacagucaggaa

SEQ ID NO: 2165690 - RNA, 19 nt, Homo sapiens
  misc_RNA (1)...(19): siRNA sense strand
cacaacggaagaucaguua

SEQ ID NO: 2165691 - RNA, 19 nt, Homo sapiens
  misc_RNA (1)...(19): siRNA sense strand
aaaugagugucaacaugaa

SEQ ID NO: 2165692 - RNA, 19 nt, Homo sapiens
  misc_RNA (1)...(19): siRNA sense strand
agauaaagguccugcucaa

SEQ ID NO: 2165693 - RNA, 19 nt, Homo sapiens
  misc_RNA (1)...(19): siRNA sense strand
ugagcaagcauaugaaugu

SEQ ID NO: 2165694 - RNA, 19 nt, Homo sapiens
  misc_RNA (1)...(19): siRNA sense strand
gcaagugguccaucaccuu

SEQ ID NO: 2165695 - RNA, 19 nt, Homo sapiens
  misc_RNA (1)...(19): siRNA sense strand
cgacuaaaugugacaguga

SEQ ID NO: 2165696 - RNA, 19 nt, Homo sapiens
  misc_RNA (1)...(19): siRNA sense strand
gcaauugguggaagaaugg

SEQ ID NO: 2165697 - RNA, 19 nt, Homo sapiens
  misc_RNA (1)...(19): siRNA sense strand
ggaauaucgguaucuaugu

SEQ ID NO: 2165698 - RNA, 19 nt, Homo sapiens
  misc_RNA (1)...(19): siRNA sense strand
gagaaagauuauccuugca

SEQ ID NO: 2165699 - RNA, 19 nt, Homo sapiens
  misc_RNA (1)...(19): siRNA sense strand
gagcaagcauaugaaugug

SEQ ID NO: 2165700 - RNA, 19 nt, Homo sapiens
  misc_RNA (1)...(19): siRNA sense strand
aggaaagaauugcucagaa

SEQ ID NO: 2165701 - RNA, 19 nt, Homo sapiens
  misc_RNA (1)...(19): siRNA sense strand
gaaaagugccaagggguua

SEQ ID NO: 2165702 - RNA, 19 nt, Homo sapiens
  misc_RNA (1)...(19): siRNA sense strand
guucaccaauauuuacaga

SEQ ID NO: 2165703 - RNA, 19 nt, Homo sapiens
  misc_RNA (1)...(19): siRNA sense strand
uguaagagcauucaaacau

SEQ ID NO: 2165704 - RNA, 19 nt, Homo sapiens
  misc_RNA (1)...(19): siRNA sense strand
caacauguaucuggaaaau

SEQ ID NO: 2165705 - RNA, 19 nt, Homo sapiens
  misc_RNA (1)...(19): siRNA sense strand
ugugaacgauccugaagau

SEQ ID NO: 2165706 - RNA, 19 nt, Homo sapiens
  misc_RNA (1)...(19): siRNA sense strand
uugaauauguguggcaauu

SEQ ID NO: 2165707 - RNA, 19 nt, Homo sapiens
  misc_RNA (1)...(19): siRNA sense strand
uaaaaggaaugcacacugu

SEQ ID NO: 2165708 - RNA, 19 nt, Homo sapiens
  misc_RNA (1)...(19): siRNA sense strand
gcaguugcauuaauaaaag

SEQ ID NO: 2165709 - RNA, 19 nt, Homo sapiens
  misc_RNA (1)...(19): siRNA sense strand
gaaacugcagcaauauuac

SEQ ID NO: 2165710 - RNA, 19 nt, Homo sapiens
  misc_RNA (1)...(19): siRNA sense strand
cacugaagaugcaaccuau

SEQ ID NO: 2165711 - RNA, 19 nt, Homo sapiens
  misc_RNA (1)...(19): siRNA sense strand
gcuuggacuucuacagaga

SEQ ID NO: 2165712 - RNA, 19 nt, Homo sapiens
  misc_RNA (1)...(19): siRNA sense strand
gaaugaagaaugguguuuc

SEQ ID NO: 2165713 - RNA, 19 nt, Homo sapiens
  misc_RNA (1)...(19): siRNA sense strand
gcacacuguuaauucuaag

SEQ ID NO: 2165714 - RNA, 19 nt, Homo sapiens
  misc_RNA (1)...(19): siRNA sense strand
cagauuugcuuuguaagag

SEQ ID NO: 2165715 - RNA, 19 nt, Homo sapiens
  misc_RNA (1)...(19): siRNA sense strand
uuaguaccaugucagaaug

SEQ ID NO: 2165716 - RNA, 19 nt, Homo sapiens
  misc_RNA (1)...(19): siRNA sense strand
ccauuuacaggaaagaauu

SEQ ID NO: 2165717 - RNA, 19 nt, Homo sapiens
  misc_RNA (1)...(19): siRNA sense strand
gaugagcaagcauaugaau

SEQ ID NO: 2165718 - RNA, 19 nt, Homo sapiens
  misc_RNA (1)...(19): siRNA sense strand
ucaaccacaugucuguuuc

SEQ ID NO: 2165719 - RNA, 19 nt, Homo sapiens
  misc_RNA (1)...(19): siRNA sense strand
gcaaacugcacugaagaug

SEQ ID NO: 2165720 - RNA, 19 nt, Homo sapiens
  misc_RNA (1)...(19): siRNA sense strand
gauaaagguccugcucaau

SEQ ID NO: 2165721 - RNA, 19 nt, Homo sapiens
  misc_RNA (1)...(19): siRNA sense strand
gagagaagcccuuugauug

SEQ ID NO: 2165722 - RNA, 19 nt, Homo sapiens
  misc_RNA (1)...(19): siRNA sense strand
gcagagagaagcccuuuga

SEQ ID NO: 2165723 - RNA, 19 nt, Homo sapiens
  misc_RNA (1)...(19): siRNA sense strand
gagaagggcugggaaugug

SEQ ID NO: 2165724 - RNA, 19 nt, Homo sapiens
  misc_RNA (1)...(19): siRNA sense strand
gaacaucauuuugcuugua

SEQ ID NO: 2165725 - RNA, 19 nt, Homo sapiens
  misc_RNA (1)...(19): siRNA sense strand
ggacaccuuucggcuuaaa

SEQ ID NO: 2165726 - RNA, 19 nt, Homo sapiens
  misc_RNA (1)...(19): siRNA sense strand
ggacugaaacccuaugagu

SEQ ID NO: 2165727 - RNA, 19 nt, Homo sapiens
  misc_RNA (1)...(19): siRNA sense strand
ccucugaccucaucaagca

SEQ ID NO: 2165728 - RNA, 19 nt, Homo sapiens
  misc_RNA (1)...(19): siRNA sense strand
gcucggcacugcagaagca

SEQ ID NO: 2165729 - RNA, 19 nt, Homo sapiens
  misc_RNA (1)...(19): siRNA sense strand
ggggacaccuuucggcuua

SEQ ID NO: 2165730 - RNA, 19 nt, Homo sapiens
  misc_RNA (1)...(19): siRNA sense strand
gaagaaugcaggccugagu

SEQ ID NO: 2165731 - RNA, 19 nt, Homo sapiens
  misc_RNA (1)...(19): siRNA sense strand
ggagaagggcugggaaugu

SEQ ID NO: 2165732 - RNA, 19 nt, Homo sapiens
  misc_RNA (1)...(19): siRNA sense strand
caucagaaacuucacacuu

SEQ ID NO: 2165733 - RNA, 19 nt, Homo sapiens
  misc_RNA (1)...(19): siRNA sense strand
guagggcccuggagaaugc

SEQ ID NO: 2165734 - RNA, 19 nt, Homo sapiens
  misc_RNA (1)...(19): siRNA sense strand
agagagaagcccuuugauu

SEQ ID NO: 2165735 - RNA, 19 nt, Homo sapiens
  misc_RNA (1)...(19): siRNA sense strand
aaacuucacacuucggaaa

SEQ ID NO: 2165736 - RNA, 19 nt, Homo sapiens
  misc_RNA (1)...(19): siRNA sense strand
gcccuuugauugcgaggaa

SEQ ID NO: 2165737 - RNA, 19 nt, Homo sapiens
  misc_RNA (1)...(19): siRNA sense strand
gagauggcguccacaagcu

SEQ ID NO: 2165738 - RNA, 19 nt, Homo sapiens
  misc_RNA (1)...(19): siRNA sense strand
gggcggucguucaaaguca

SEQ ID NO: 2165739 - RNA, 19 nt, Homo sapiens
  misc_RNA (1)...(19): siRNA sense strand
agagggagcccacagaauc

SEQ ID NO: 2165740 - RNA, 19 nt, Homo sapiens
  misc_RNA (1)...(19): siRNA sense strand
gagagggagcccacagaau

SEQ ID NO: 2165741 - RNA, 19 nt, Homo sapiens
  misc_RNA (1)...(19): siRNA sense strand
aucagaaacuucacacuuc

SEQ ID NO: 2165742 - RNA, 19 nt, Homo sapiens
  misc_RNA (1)...(19): siRNA sense strand
gcccauagaacaucauuuu

SEQ ID NO: 2165743 - RNA, 19 nt, Homo sapiens
  misc_RNA (1)...(19): siRNA sense strand
gaggagaagggcugggaau

SEQ ID NO: 2165744 - RNA, 19 nt, Homo sapiens
  misc_RNA (1)...(19): siRNA sense strand
ggguggcggaguuuaauga

SEQ ID NO: 2165745 - RNA, 19 nt, Homo sapiens
  misc_RNA (1)...(19): siRNA sense strand
ccuaugagugcgacaaaug

SEQ ID NO: 2165746 - RNA, 19 nt, Homo sapiens
  misc_RNA (1)...(19): siRNA sense strand
cagcagagagaagcccuuu

SEQ ID NO: 2165747 - RNA, 19 nt, Homo sapiens
  misc_RNA (1)...(19): siRNA sense strand
ggcuuaaaguccugcuugu

SEQ ID NO: 2165748 - RNA, 19 nt, Homo sapiens
  misc_RNA (1)...(19): siRNA sense strand
gaaucugcccauagaacau

SEQ ID NO: 2165749 - RNA, 19 nt, Homo sapiens
  misc_RNA (1)...(19): siRNA sense strand
gggacaccuuucggcuuaa

SEQ ID NO: 2165750 - RNA, 19 nt, Homo sapiens
  misc_RNA (1)...(19): siRNA sense strand
ggagaagagggagcagaug

SEQ ID NO: 2165751 - RNA, 19 nt, Homo sapiens
  misc_RNA (1)...(19): siRNA sense strand
gagggagcccacagaaucu

SEQ ID NO: 2165752 - RNA, 19 nt, Homo sapiens
  misc_RNA (1)...(19): siRNA sense strand
gcacgcacgcauccacagu

SEQ ID NO: 2165753 - RNA, 19 nt, Homo sapiens
  misc_RNA (1)...(19): siRNA sense strand
agucaacacccaccucuuc

SEQ ID NO: 2165754 - RNA, 19 nt, Homo sapiens
  misc_RNA (1)...(19): siRNA sense strand
cgacugcgggaaggucuuu

SEQ ID NO: 2165755 - RNA, 19 nt, Homo sapiens
  misc_RNA (1)...(19): siRNA sense strand
cauccacagcggacugaaa

SEQ ID NO: 2165756 - RNA, 19 nt, Homo sapiens
  misc_RNA (1)...(19): siRNA sense strand
cgacaucagaaacuucaca

SEQ ID NO: 2165757 - RNA, 19 nt, Homo sapiens
  misc_RNA (1)...(19): siRNA sense strand
accagagaguccacaguga

SEQ ID NO: 2165758 - RNA, 19 nt, Homo sapiens
  misc_RNA (1)...(19): siRNA sense strand
agagagggagcccacagaa

SEQ ID NO: 2165759 - RNA, 19 nt, Homo sapiens
  misc_RNA (1)...(19): siRNA sense strand
gcgcaaagcucaagaaguc

SEQ ID NO: 2165760 - RNA, 19 nt, Homo sapiens
  misc_RNA (1)...(19): siRNA sense strand
ggaaaaugcuuaucacaug

SEQ ID NO: 2165761 - RNA, 19 nt, Homo sapiens
  misc_RNA (1)...(19): siRNA sense strand
cuagauagcucuguuguca

SEQ ID NO: 2165762 - RNA, 19 nt, Homo sapiens
  misc_RNA (1)...(19): siRNA sense strand
ggaaaaccuuuacuaauca

SEQ ID NO: 2165763 - RNA, 19 nt, Homo sapiens
  misc_RNA (1)...(19): siRNA sense strand
gaggucugcauuacauuua

SEQ ID NO: 2165764 - RNA, 19 nt, Homo sapiens
  misc_RNA (1)...(19): siRNA sense strand
agaaugggaaggccaaaua

SEQ ID NO: 2165765 - RNA, 19 nt, Homo sapiens
  misc_RNA (1)...(19): siRNA sense strand
caauacaugcugcuucaaa

SEQ ID NO: 2165766 - RNA, 19 nt, Homo sapiens
  misc_RNA (1)...(19): siRNA sense strand
uaacugugacaaaggauuu

SEQ ID NO: 2165767 - RNA, 19 nt, Homo sapiens
  misc_RNA (1)...(19): siRNA sense strand
cauccagacucucaaguuc

SEQ ID NO: 2165768 - RNA, 19 nt, Homo sapiens
  misc_RNA (1)...(19): siRNA sense strand
gggaaggccaaauagauga

SEQ ID NO: 2165769 - RNA, 19 nt, Homo sapiens
  misc_RNA (1)...(19): siRNA sense strand
gagcguuugucgccgucua

SEQ ID NO: 2165770 - RNA, 19 nt, Homo sapiens
  misc_RNA (1)...(19): siRNA sense strand
agauagcucuguugucauc

SEQ ID NO: 2165771 - RNA, 19 nt, Homo sapiens
  misc_RNA (1)...(19): siRNA sense strand
ucaagaagucuguaaccuu

SEQ ID NO: 2165772 - RNA, 19 nt, Homo sapiens
  misc_RNA (1)...(19): siRNA sense strand
aacaauacaugcugcuuca

SEQ ID NO: 2165773 - RNA, 19 nt, Homo sapiens
  misc_RNA (1)...(19): siRNA sense strand
cagacucucaaguucauua

SEQ ID NO: 2165774 - RNA, 19 nt, Homo sapiens
  misc_RNA (1)...(19): siRNA sense strand
agaagucuguaaccuuguu

SEQ ID NO: 2165775 - RNA, 19 nt, Homo sapiens
  misc_RNA (1)...(19): siRNA sense strand
gaaugggaaggccaaauag

SEQ ID NO: 2165776 - RNA, 19 nt, Homo sapiens
  misc_RNA (1)...(19): siRNA sense strand
acacaagcccaaacugcua

SEQ ID NO: 2165777 - RNA, 19 nt, Homo sapiens
  misc_RNA (1)...(19): siRNA sense strand
aauagaugaucaccaguca

SEQ ID NO: 2165778 - RNA, 19 nt, Homo sapiens
  misc_RNA (1)...(19): siRNA sense strand
auauaacugugacaaagga

SEQ ID NO: 2165779 - RNA, 19 nt, Homo sapiens
  misc_RNA (1)...(19): siRNA sense strand
aggaaaaccuuuacuaauc

SEQ ID NO: 2165780 - RNA, 19 nt, Homo sapiens
  misc_RNA (1)...(19): siRNA sense strand
guuugucgccgucuagauu

SEQ ID NO: 2165781 - RNA, 19 nt, Homo sapiens
  misc_RNA (1)...(19): siRNA sense strand
guaagcggcaccucagaag

SEQ ID NO: 2165782 - RNA, 19 nt, Homo sapiens
  misc_RNA (1)...(19): siRNA sense strand
agaggucugcauuacauuu

SEQ ID NO: 2165783 - RNA, 19 nt, Homo sapiens
  misc_RNA (1)...(19): siRNA sense strand
ggaaggccaaauagaugau

SEQ ID NO: 2165784 - RNA, 19 nt, Homo sapiens
  misc_RNA (1)...(19): siRNA sense strand
gcaacaauacaugcugcuu

SEQ ID NO: 2165785 - RNA, 19 nt, Homo sapiens
  misc_RNA (1)...(19): siRNA sense strand
ccaccccaguucuaucaua

SEQ ID NO: 2165786 - RNA, 19 nt, Homo sapiens
  misc_RNA (1)...(19): siRNA sense strand
ucuuguugcuguugagaau

SEQ ID NO: 2165787 - RNA, 19 nt, Homo sapiens
  misc_RNA (1)...(19): siRNA sense strand
ugggaaggccaaauagaug

SEQ ID NO: 2165788 - RNA, 19 nt, Homo sapiens
  misc_RNA (1)...(19): siRNA sense strand
ggagaguggaaaaugcuua

SEQ ID NO: 2165789 - RNA, 19 nt, Homo sapiens
  misc_RNA (1)...(19): siRNA sense strand
gaagucuguaaccuuguug

SEQ ID NO: 2165790 - RNA, 19 nt, Homo sapiens
  misc_RNA (1)...(19): siRNA sense strand
aaaugcuuaucacauggaa

SEQ ID NO: 2165791 - RNA, 19 nt, Homo sapiens
  misc_RNA (1)...(19): siRNA sense strand
ggucugcauuacauuuacu

SEQ ID NO: 2165792 - RNA, 19 nt, Homo sapiens
  misc_RNA (1)...(19): siRNA sense strand
guucauuaacuguacaaca

SEQ ID NO: 2165793 - RNA, 19 nt, Homo sapiens
  misc_RNA (1)...(19): siRNA sense strand
ucauccagacucucaaguu

SEQ ID NO: 2165794 - RNA, 19 nt, Homo sapiens
  misc_RNA (1)...(19): siRNA sense strand
gcaaagaccugaacuaucc

SEQ ID NO: 2165795 - RNA, 19 nt, Homo sapiens
  misc_RNA (1)...(19): siRNA sense strand
ccaagaauguugcacguuu

SEQ ID NO: 2165796 - RNA, 19 nt, Homo sapiens
  misc_RNA (1)...(19): siRNA sense strand
gcacaaaacugauuucaau

SEQ ID NO: 2165797 - RNA, 19 nt, Homo sapiens
  misc_RNA (1)...(19): siRNA sense strand
gcuaauaaaucacuucauc

SEQ ID NO: 2165798 - RNA, 19 nt, Homo sapiens
  misc_RNA (1)...(19): siRNA sense strand
gagaaugacuguuuuauug

SEQ ID NO: 2165799 - RNA, 19 nt, Homo sapiens
  misc_RNA (1)...(19): siRNA sense strand
ggagguaugcccaugaaua

SEQ ID NO: 2165800 - RNA, 19 nt, Homo sapiens
  misc_RNA (1)...(19): siRNA sense strand
gcggugaagucauaauaaa

SEQ ID NO: 2165801 - RNA, 19 nt, Homo sapiens
  misc_RNA (1)...(19): siRNA sense strand
caaaguguauaucuugcua

SEQ ID NO: 2165802 - RNA, 19 nt, Homo sapiens
  misc_RNA (1)...(19): siRNA sense strand
guggagaugugcuguguuu

SEQ ID NO: 2165803 - RNA, 19 nt, Homo sapiens
  misc_RNA (1)...(19): siRNA sense strand
ccugaaggcugcacagaaa

SEQ ID NO: 2165804 - RNA, 19 nt, Homo sapiens
  misc_RNA (1)...(19): siRNA sense strand
gguaugcccaugaauauuu

SEQ ID NO: 2165805 - RNA, 19 nt, Homo sapiens
  misc_RNA (1)...(19): siRNA sense strand
ggagaaugguguugucauc

SEQ ID NO: 2165806 - RNA, 19 nt, Homo sapiens
  misc_RNA (1)...(19): siRNA sense strand
gagcugcuguugauauugu

SEQ ID NO: 2165807 - RNA, 19 nt, Homo sapiens
  misc_RNA (1)...(19): siRNA sense strand
aaaggcaaauaccaaagua

SEQ ID NO: 2165808 - RNA, 19 nt, Homo sapiens
  misc_RNA (1)...(19): siRNA sense strand
gagagaccgugucaucaga

SEQ ID NO: 2165809 - RNA, 19 nt, Homo sapiens
  misc_RNA (1)...(19): siRNA sense strand
gcccaugaauauuuccaua

SEQ ID NO: 2165810 - RNA, 19 nt, Homo sapiens
  misc_RNA (1)...(19): siRNA sense strand
ugacaaaguguauaucuug

SEQ ID NO: 2165811 - RNA, 19 nt, Homo sapiens
  misc_RNA (1)...(19): siRNA sense strand
gagguaugcccaugaauau

SEQ ID NO: 2165812 - RNA, 19 nt, Homo sapiens
  misc_RNA (1)...(19): siRNA sense strand
caucagaaaccaccaaguu

SEQ ID NO: 2165813 - RNA, 19 nt, Homo sapiens
  misc_RNA (1)...(19): siRNA sense strand
gcaagagaaugacuguuuu

SEQ ID NO: 2165814 - RNA, 19 nt, Homo sapiens
  misc_RNA (1)...(19): siRNA sense strand
uggagacucuuucuucuug

SEQ ID NO: 2165815 - RNA, 19 nt, Homo sapiens
  misc_RNA (1)...(19): siRNA sense strand
gcuuggagcugcuguugau

SEQ ID NO: 2165816 - RNA, 19 nt, Homo sapiens
  misc_RNA (1)...(19): siRNA sense strand
gagaugugcuguguuucuu

SEQ ID NO: 2165817 - RNA, 19 nt, Homo sapiens
  misc_RNA (1)...(19): siRNA sense strand
uguaagcguugcaagguaa

SEQ ID NO: 2165818 - RNA, 19 nt, Homo sapiens
  misc_RNA (1)...(19): siRNA sense strand
gaaggagguaugcccauga

SEQ ID NO: 2165819 - RNA, 19 nt, Homo sapiens
  misc_RNA (1)...(19): siRNA sense strand
gagaccgugucaucagaaa

SEQ ID NO: 2165820 - RNA, 19 nt, Homo sapiens
  misc_RNA (1)...(19): siRNA sense strand
caaagccgauucuaguucu

SEQ ID NO: 2165821 - RNA, 19 nt, Homo sapiens
  misc_RNA (1)...(19): siRNA sense strand
gggcuacaguuuguuguug

SEQ ID NO: 2165822 - RNA, 19 nt, Homo sapiens
  misc_RNA (1)...(19): siRNA sense strand
cagcaaagaccugaacuau

SEQ ID NO: 2165823 - RNA, 19 nt, Homo sapiens
  misc_RNA (1)...(19): siRNA sense strand
gcagcaaagaccugaacua

SEQ ID NO: 2165824 - RNA, 19 nt, Homo sapiens
  misc_RNA (1)...(19): siRNA sense strand
ucagacaguuuggugauug

SEQ ID NO: 2165825 - RNA, 19 nt, Homo sapiens
  misc_RNA (1)...(19): siRNA sense strand
cagcagaggucaggcuugu

SEQ ID NO: 2165826 - RNA, 19 nt, Homo sapiens
  misc_RNA (1)...(19): siRNA sense strand
cgcaagagaaugacuguuu

SEQ ID NO: 2165827 - RNA, 19 nt, Homo sapiens
  misc_RNA (1)...(19): siRNA sense strand
gaauuuaagaaccaguuug

SEQ ID NO: 2165828 - RNA, 19 nt, Homo sapiens
  misc_RNA (1)...(19): siRNA sense strand
ggcaaauaccaaaguaauu

SEQ ID NO: 2165829 - RNA, 19 nt, Homo sapiens
  misc_RNA (1)...(19): siRNA sense strand
caaccauuguaaauuggaa

SEQ ID NO: 2165830 - RNA, 19 nt, Homo sapiens
  misc_RNA (1)...(19): siRNA sense strand
gaaccaaaggcaaauacca

SEQ ID NO: 2165831 - RNA, 19 nt, Homo sapiens
  misc_RNA (1)...(19): siRNA sense strand
cuugucagcuugugggaaa

SEQ ID NO: 2165832 - RNA, 19 nt, Homo sapiens
  misc_RNA (1)...(19): siRNA sense strand
gaaccgaaagaaggaggua

SEQ ID NO: 2165833 - RNA, 19 nt, Homo sapiens
  misc_RNA (1)...(19): siRNA sense strand
ggagaugugcuguguuucu

SEQ ID NO: 2165834 - RNA, 19 nt, Homo sapiens
  misc_RNA (1)...(19): siRNA sense strand
gcagaggucaggcuuguac

SEQ ID NO: 2165835 - RNA, 19 nt, Homo sapiens
  misc_RNA (1)...(19): siRNA sense strand
caaaggcaaauaccaaagu

SEQ ID NO: 2165836 - RNA, 19 nt, Homo sapiens
  misc_RNA (1)...(19): siRNA sense strand
gaugugcuguguuucuucu

SEQ ID NO: 2165837 - RNA, 19 nt, Homo sapiens
  misc_RNA (1)...(19): siRNA sense strand
uggagcugcuguugauauu

SEQ ID NO: 2165838 - RNA, 19 nt, Homo sapiens
  misc_RNA (1)...(19): siRNA sense strand
guaugcccaugaauauuuc

SEQ ID NO: 2165839 - RNA, 19 nt, Homo sapiens
  misc_RNA (1)...(19): siRNA sense strand
cagacaguuuggugauuga

SEQ ID NO: 2165840 - RNA, 19 nt, Homo sapiens
  misc_RNA (1)...(19): siRNA sense strand
gaugacaaaguguauaucu

SEQ ID NO: 2165841 - RNA, 19 nt, Homo sapiens
  misc_RNA (1)...(19): siRNA sense strand
uagaagcacuuuuagauuc

SEQ ID NO: 2165842 - RNA, 19 nt, Homo sapiens
  misc_RNA (1)...(19): siRNA sense strand
gcagacgcaagcaaaauua

SEQ ID NO: 2165843 - RNA, 19 nt, Homo sapiens
  misc_RNA (1)...(19): siRNA sense strand
caaagaguaaugccaaucu

SEQ ID NO: 2165844 - RNA, 19 nt, Homo sapiens
  misc_RNA (1)...(19): siRNA sense strand
gccgugggcuacaguuugu

SEQ ID NO: 2165845 - RNA, 19 nt, Homo sapiens
  misc_RNA (1)...(19): siRNA sense strand
ggagagaccgugucaucag

SEQ ID NO: 2165846 - RNA, 19 nt, Homo sapiens
  misc_RNA (1)...(19): siRNA sense strand
gggagaaccgaaagaagga

SEQ ID NO: 2165847 - RNA, 19 nt, Homo sapiens
  misc_RNA (1)...(19): siRNA sense strand
caagaauguugcacguuuu

SEQ ID NO: 2165848 - RNA, 19 nt, Homo sapiens
  misc_RNA (1)...(19): siRNA sense strand
gaaugacuguuuuauugga

SEQ ID NO: 2165849 - RNA, 19 nt, Homo sapiens
  misc_RNA (1)...(19): siRNA sense strand
aaggagguaugcccaugaa

SEQ ID NO: 2165850 - RNA, 19 nt, Homo sapiens
  misc_RNA (1)...(19): siRNA sense strand
ucaaagccgauucuaguuc

SEQ ID NO: 2165851 - RNA, 19 nt, Homo sapiens
  misc_RNA (1)...(19): siRNA sense strand
gcuacaguuuguuguugga

SEQ ID NO: 2165852 - RNA, 19 nt, Homo sapiens
  misc_RNA (1)...(19): siRNA sense strand
aaagaguaaugccaaucug

SEQ ID NO: 2165853 - RNA, 19 nt, Homo sapiens
  misc_RNA (1)...(19): siRNA sense strand
gcucgcaaacccaagaaug

SEQ ID NO: 2165854 - RNA, 19 nt, Homo sapiens
  misc_RNA (1)...(19): siRNA sense strand
auccugcggugaagucaua

SEQ ID NO: 2165855 - RNA, 19 nt, Homo sapiens
  misc_RNA (1)...(19): siRNA sense strand
gauccugggagaaccgaaa

SEQ ID NO: 2165856 - RNA, 19 nt, Homo sapiens
  misc_RNA (1)...(19): siRNA sense strand
caagagaaugacuguuuua

SEQ ID NO: 2165857 - RNA, 19 nt, Homo sapiens
  misc_RNA (1)...(19): siRNA sense strand
gagacucuuucuucuuggu

SEQ ID NO: 2165858 - RNA, 19 nt, Homo sapiens
  misc_RNA (1)...(19): siRNA sense strand
uauuggagacucuuucuuc

SEQ ID NO: 2165859 - RNA, 19 nt, Homo sapiens
  misc_RNA (1)...(19): siRNA sense strand
aaguguauaucuugcuaug

SEQ ID NO: 2165860 - RNA, 19 nt, Homo sapiens
  misc_RNA (1)...(19): siRNA sense strand
gcuagaagcacuuuuagau

SEQ ID NO: 2165861 - RNA, 19 nt, Homo sapiens
  misc_RNA (1)...(19): siRNA sense strand
caguggagaugugcugugu

SEQ ID NO: 2165862 - RNA, 19 nt, Homo sapiens
  misc_RNA (1)...(19): siRNA sense strand
gucaaagaguaaugccaau

SEQ ID NO: 2165863 - RNA, 19 nt, Homo sapiens
  misc_RNA (1)...(19): siRNA sense strand
gaauguugcacguuuuauu

SEQ ID NO: 2165864 - RNA, 19 nt, Homo sapiens
  misc_RNA (1)...(19): siRNA sense strand
cuaccagccaugcaucaaa

SEQ ID NO: 2165865 - RNA, 19 nt, Homo sapiens
  misc_RNA (1)...(19): siRNA sense strand
cagcucuccucugcuagaa

SEQ ID NO: 2165866 - RNA, 19 nt, Homo sapiens
  misc_RNA (1)...(19): siRNA sense strand
aagguaauguugggagaga

SEQ ID NO: 2165867 - RNA, 19 nt, Homo sapiens
  misc_RNA (1)...(19): siRNA sense strand
gagcucuaguuggagaaug

SEQ ID NO: 2165868 - RNA, 19 nt, Homo sapiens
  misc_RNA (1)...(19): siRNA sense strand
ugugcuguguuucuucuga

SEQ ID NO: 2165869 - RNA, 19 nt, Homo sapiens
  misc_RNA (1)...(19): siRNA sense strand
cccaugaauauuuccauaa

SEQ ID NO: 2165870 - RNA, 19 nt, Homo sapiens
  misc_RNA (1)...(19): siRNA sense strand
gggagagaccgugucauca

SEQ ID NO: 2165871 - RNA, 19 nt, Homo sapiens
  misc_RNA (1)...(19): siRNA sense strand
uuguaagcguugcaaggua

SEQ ID NO: 2165872 - RNA, 19 nt, Homo sapiens
  misc_RNA (1)...(19): siRNA sense strand
cugcggugaagucauaaua

SEQ ID NO: 2165873 - RNA, 19 nt, Homo sapiens
  misc_RNA (1)...(19): siRNA sense strand
auucaaagccgauucuagu

SEQ ID NO: 2165874 - RNA, 19 nt, Homo sapiens
  misc_RNA (1)...(19): siRNA sense strand
aggcaaauaccaaaguaau

SEQ ID NO: 2165875 - RNA, 19 nt, Homo sapiens
  misc_RNA (1)...(19): siRNA sense strand
ucacuucauccgcaagaga

SEQ ID NO: 2165876 - RNA, 19 nt, Homo sapiens
  misc_RNA (1)...(19): siRNA sense strand
aaccaaaggcaaauaccaa

SEQ ID NO: 2165877 - RNA, 19 nt, Homo sapiens
  misc_RNA (1)...(19): siRNA sense strand
gacugcagacgcaagcaaa

SEQ ID NO: 2165878 - RNA, 19 nt, Homo sapiens
  misc_RNA (1)...(19): siRNA sense strand
gcuauggcuuuuaaauuca

SEQ ID NO: 2165879 - RNA, 19 nt, Homo sapiens
  misc_RNA (1)...(19): siRNA sense strand
caggaugacaaaguguaua

SEQ ID NO: 2165880 - RNA, 19 nt, Homo sapiens
  misc_RNA (1)...(19): siRNA sense strand
gagcgugaucgcccagugu

SEQ ID NO: 2165881 - RNA, 19 nt, Homo sapiens
  misc_RNA (1)...(19): siRNA sense strand
guuggagaaugguguuguc

SEQ ID NO: 2165882 - RNA, 19 nt, Homo sapiens
  misc_RNA (1)...(19): siRNA sense strand
caucaggguuccuauaaua

SEQ ID NO: 2165883 - RNA, 19 nt, Homo sapiens
  misc_RNA (1)...(19): siRNA sense strand
gaagauaucccuggaauuc

SEQ ID NO: 2165884 - RNA, 19 nt, Homo sapiens
  misc_RNA (1)...(19): siRNA sense strand
ucaaguaucugcacauaug

SEQ ID NO: 2165885 - RNA, 19 nt, Homo sapiens
  misc_RNA (1)...(19): siRNA sense strand
gcaaugccuucgccacuaa

SEQ ID NO: 2165886 - RNA, 19 nt, Homo sapiens
  misc_RNA (1)...(19): siRNA sense strand
gaagcgcuuucaugagaua

SEQ ID NO: 2165887 - RNA, 19 nt, Homo sapiens
  misc_RNA (1)...(19): siRNA sense strand
ggauauaacuucuccacau

SEQ ID NO: 2165888 - RNA, 19 nt, Homo sapiens
  misc_RNA (1)...(19): siRNA sense strand
cuaggaagcuuaacucugu

SEQ ID NO: 2165889 - RNA, 19 nt, Homo sapiens
  misc_RNA (1)...(19): siRNA sense strand
gagugaagaucucuggauu

SEQ ID NO: 2165890 - RNA, 19 nt, Homo sapiens
  misc_RNA (1)...(19): siRNA sense strand
gauauaacuucuccacauc

SEQ ID NO: 2165891 - RNA, 19 nt, Homo sapiens
  misc_RNA (1)...(19): siRNA sense strand
uggaagcgcuuucaugaga

SEQ ID NO: 2165892 - RNA, 19 nt, Homo sapiens
  misc_RNA (1)...(19): siRNA sense strand
gaccaaggccauauuauuc

SEQ ID NO: 2165893 - RNA, 19 nt, Homo sapiens
  misc_RNA (1)...(19): siRNA sense strand
gcuaaaggcuuccgagacu

SEQ ID NO: 2165894 - RNA, 19 nt, Homo sapiens
  misc_RNA (1)...(19): siRNA sense strand
gaagauagauaggaaucca

SEQ ID NO: 2165895 - RNA, 19 nt, Homo sapiens
  misc_RNA (1)...(19): siRNA sense strand
cggcauauuuggaaacuug

SEQ ID NO: 2165896 - RNA, 19 nt, Homo sapiens
  misc_RNA (1)...(19): siRNA sense strand
gaaggagugcaccugcuua

SEQ ID NO: 2165897 - RNA, 19 nt, Homo sapiens
  misc_RNA (1)...(19): siRNA sense strand
gcagauuacucgccugaag

SEQ ID NO: 2165898 - RNA, 19 nt, Homo sapiens
  misc_RNA (1)...(19): siRNA sense strand
gaugaccaaggccauauua

SEQ ID NO: 2165899 - RNA, 19 nt, Homo sapiens
  misc_RNA (1)...(19): siRNA sense strand
gugaagaucucuggauuag

SEQ ID NO: 2165900 - RNA, 19 nt, Homo sapiens
  misc_RNA (1)...(19): siRNA sense strand
acucugaccuuugaagaua

SEQ ID NO: 2165901 - RNA, 19 nt, Homo sapiens
  misc_RNA (1)...(19): siRNA sense strand
gcaaugagagugaagaucu

SEQ ID NO: 2165902 - RNA, 19 nt, Homo sapiens
  misc_RNA (1)...(19): siRNA sense strand
gauaggaauccauuugcua

SEQ ID NO: 2165903 - RNA, 19 nt, Homo sapiens
  misc_RNA (1)...(19): siRNA sense strand
gauaggcacugagaugauc

SEQ ID NO: 2165904 - RNA, 19 nt, Homo sapiens
  misc_RNA (1)...(19): siRNA sense strand
ugaccaaggccauauuauu

SEQ ID NO: 2165905 - RNA, 19 nt, Homo sapiens
  misc_RNA (1)...(19): siRNA sense strand
gcuuaacucugucaucauc

SEQ ID NO: 2165906 - RNA, 19 nt, Homo sapiens
  misc_RNA (1)...(19): siRNA sense strand
gcucaggccucacccucaa

SEQ ID NO: 2165907 - RNA, 19 nt, Homo sapiens
  misc_RNA (1)...(19): siRNA sense strand
caacagaauggguuuggaa

SEQ ID NO: 2165908 - RNA, 19 nt, Homo sapiens
  misc_RNA (1)...(19): siRNA sense strand
uaaagacuguggagacgau

SEQ ID NO: 2165909 - RNA, 19 nt, Homo sapiens
  misc_RNA (1)...(19): siRNA sense strand
gcgcauguuuccagcaaug

SEQ ID NO: 2165910 - RNA, 19 nt, Homo sapiens
  misc_RNA (1)...(19): siRNA sense strand
ugagacaaguuaucagcuu

SEQ ID NO: 2165911 - RNA, 19 nt, Homo sapiens
  misc_RNA (1)...(19): siRNA sense strand
ucucaaguaucugcacaua

SEQ ID NO: 2165912 - RNA, 19 nt, Homo sapiens
  misc_RNA (1)...(19): siRNA sense strand
cagcagaguuucuuugacu

SEQ ID NO: 2165913 - RNA, 19 nt, Homo sapiens
  misc_RNA (1)...(19): siRNA sense strand
gagugcacgucauccguaa

SEQ ID NO: 2165914 - RNA, 19 nt, Homo sapiens
  misc_RNA (1)...(19): siRNA sense strand
gagauaggcacugagauga

SEQ ID NO: 2165915 - RNA, 19 nt, Homo sapiens
  misc_RNA (1)...(19): siRNA sense strand
aauauuacauugccaugga

SEQ ID NO: 2165916 - RNA, 19 nt, Homo sapiens
  misc_RNA (1)...(19): siRNA sense strand
gaagcucaccaacaaugaa

SEQ ID NO: 2165917 - RNA, 19 nt, Homo sapiens
  misc_RNA (1)...(19): siRNA sense strand
ggaauccauuugcuaaagg

SEQ ID NO: 2165918 - RNA, 19 nt, Homo sapiens
  misc_RNA (1)...(19): siRNA sense strand
aagcuuaacucugucauca

SEQ ID NO: 2165919 - RNA, 19 nt, Homo sapiens
  misc_RNA (1)...(19): siRNA sense strand
ccugugcacuauauggaua

SEQ ID NO: 2165920 - RNA, 19 nt, Homo sapiens
  misc_RNA (1)...(19): siRNA sense strand
ccacuaaccagacccauca

SEQ ID NO: 2165921 - RNA, 19 nt, Homo sapiens
  misc_RNA (1)...(19): siRNA sense strand
gcuuauccaugcagauuuc

SEQ ID NO: 2165922 - RNA, 19 nt, Homo sapiens
  misc_RNA (1)...(19): siRNA sense strand
ccaaggccauauuauucuu

SEQ ID NO: 2165923 - RNA, 19 nt, Homo sapiens
  misc_RNA (1)...(19): siRNA sense strand
gucaucaucucaaguaucu

SEQ ID NO: 2165924 - RNA, 19 nt, Homo sapiens
  misc_RNA (1)...(19): siRNA sense strand
ggaagcgcuuucaugagau

SEQ ID NO: 2165925 - RNA, 19 nt, Homo sapiens
  misc_RNA (1)...(19): siRNA sense strand
uuacucgccugaagauaga

SEQ ID NO: 2165926 - RNA, 19 nt, Homo sapiens
  misc_RNA (1)...(19): siRNA sense strand
gauccucaccagcaauauu

SEQ ID NO: 2165927 - RNA, 19 nt, Homo sapiens
  misc_RNA (1)...(19): siRNA sense strand
ggaaggagugcaccugcuu

SEQ ID NO: 2165928 - RNA, 19 nt, Homo sapiens
  misc_RNA (1)...(19): siRNA sense strand
gcaccuccgugaacauguc

SEQ ID NO: 2165929 - RNA, 19 nt, Homo sapiens
  misc_RNA (1)...(19): siRNA sense strand
gcaacagaauggguuugga

SEQ ID NO: 2165930 - RNA, 19 nt, Homo sapiens
  misc_RNA (1)...(19): siRNA sense strand
gacgaucuuucucccauca

SEQ ID NO: 2165931 - RNA, 19 nt, Homo sapiens
  misc_RNA (1)...(19): siRNA sense strand
gccauauuauucuucauuc

SEQ ID NO: 2165932 - RNA, 19 nt, Homo sapiens
  misc_RNA (1)...(19): siRNA sense strand
ggacucugaccuuugaaga

SEQ ID NO: 2165933 - RNA, 19 nt, Homo sapiens
  misc_RNA (1)...(19): siRNA sense strand
aagccuugguggaaucaua

SEQ ID NO: 2165934 - RNA, 19 nt, Homo sapiens
  misc_RNA (1)...(19): siRNA sense strand
cagaaacugucuucacaac

SEQ ID NO: 2165935 - RNA, 19 nt, Homo sapiens
  misc_RNA (1)...(19): siRNA sense strand
gggagggaguaaaggcauu

SEQ ID NO: 2165936 - RNA, 19 nt, Homo sapiens
  misc_RNA (1)...(19): siRNA sense strand
ugagauaggcacugagaug

SEQ ID NO: 2165937 - RNA, 19 nt, Homo sapiens
  misc_RNA (1)...(19): siRNA sense strand
ugacggaucggcagauguu

SEQ ID NO: 2165938 - RNA, 19 nt, Homo sapiens
  misc_RNA (1)...(19): siRNA sense strand
gcuccaagguacugggaau

SEQ ID NO: 2165939 - RNA, 19 nt, Homo sapiens
  misc_RNA (1)...(19): siRNA sense strand
uacggacucugaccuuuga

SEQ ID NO: 2165940 - RNA, 19 nt, Homo sapiens
  misc_RNA (1)...(19): siRNA sense strand
ggccauauuauucuucauu

SEQ ID NO: 2165941 - RNA, 19 nt, Homo sapiens
  misc_RNA (1)...(19): siRNA sense strand
gccugaagauagauaggaa

SEQ ID NO: 2165942 - RNA, 19 nt, Homo sapiens
  misc_RNA (1)...(19): siRNA sense strand
caccaacaaugaacuggau

SEQ ID NO: 2165943 - RNA, 19 nt, Homo sapiens
  misc_RNA (1)...(19): siRNA sense strand
ccaugcagauuucgggaau

SEQ ID NO: 2165944 - RNA, 19 nt, Homo sapiens
  misc_RNA (1)...(19): siRNA sense strand
uccagaaacugucuucaca

SEQ ID NO: 2165945 - RNA, 19 nt, Homo sapiens
  misc_RNA (1)...(19): siRNA sense strand
acaacaggcucaccaacca

SEQ ID NO: 2165946 - RNA, 19 nt, Homo sapiens
  misc_RNA (1)...(19): siRNA sense strand
ccaucaggguuccuauaau

SEQ ID NO: 2165947 - RNA, 19 nt, Homo sapiens
  misc_RNA (1)...(19): siRNA sense strand
uaccacaguucgaaaugga

SEQ ID NO: 2165948 - RNA, 19 nt, Homo sapiens
  misc_RNA (1)...(19): siRNA sense strand
uugaagauaucccuggaau

SEQ ID NO: 2165949 - RNA, 19 nt, Homo sapiens
  misc_RNA (1)...(19): siRNA sense strand
ucuggaagcgcuuucauga

SEQ ID NO: 2165950 - RNA, 19 nt, Homo sapiens
  misc_RNA (1)...(19): siRNA sense strand
gauagauaggaauccauuu

SEQ ID NO: 2165951 - RNA, 19 nt, Homo sapiens
  misc_RNA (1)...(19): siRNA sense strand
cgucauccguaaagacugu

SEQ ID NO: 2165952 - RNA, 19 nt, Homo sapiens
  misc_RNA (1)...(19): siRNA sense strand
ggucagcagaguuucuuug

SEQ ID NO: 2165953 - RNA, 19 nt, Homo sapiens
  misc_RNA (1)...(19): siRNA sense strand
ccaucacccuccagcaaug

SEQ ID NO: 2165954 - RNA, 19 nt, Homo sapiens
  misc_RNA (1)...(19): siRNA sense strand
cagcuuauccaugcagauu

SEQ ID NO: 2165955 - RNA, 19 nt, Homo sapiens
  misc_RNA (1)...(19): siRNA sense strand
auaggaauccauuugcuaa

SEQ ID NO: 2165956 - RNA, 19 nt, Homo sapiens
  misc_RNA (1)...(19): siRNA sense strand
uagauccucaccagcaaua

SEQ ID NO: 2165957 - RNA, 19 nt, Homo sapiens
  misc_RNA (1)...(19): siRNA sense strand
caggguuccuauaauacuu

SEQ ID NO: 2165958 - RNA, 19 nt, Homo sapiens
  misc_RNA (1)...(19): siRNA sense strand
ccacagaccagcuuaucca

SEQ ID NO: 2165959 - RNA, 19 nt, Homo sapiens
  misc_RNA (1)...(19): siRNA sense strand
gcgaaaaggguucuucuga

SEQ ID NO: 2165960 - RNA, 19 nt, Homo sapiens
  misc_RNA (1)...(19): siRNA sense strand
gccucacccucaaccgaua

SEQ ID NO: 2165961 - RNA, 19 nt, Homo sapiens
  misc_RNA (1)...(19): siRNA sense strand
gaccaucacuacggacucu

SEQ ID NO: 2165962 - RNA, 19 nt, Homo sapiens
  misc_RNA (1)...(19): siRNA sense strand
aauggaugguggcagguaa

SEQ ID NO: 2165963 - RNA, 19 nt, Homo sapiens
  misc_RNA (1)...(19): siRNA sense strand
cccaucaggguuccuauaa

SEQ ID NO: 2165964 - RNA, 19 nt, Homo sapiens
  misc_RNA (1)...(19): siRNA sense strand
caugagauaggcacugaga

SEQ ID NO: 2165965 - RNA, 19 nt, Homo sapiens
  misc_RNA (1)...(19): siRNA sense strand
ggaugaccaaggccauauu

SEQ ID NO: 2165966 - RNA, 19 nt, Homo sapiens
  misc_RNA (1)...(19): siRNA sense strand
ccaacaaugaacuggauga

SEQ ID NO: 2165967 - RNA, 19 nt, Homo sapiens
  misc_RNA (1)...(19): siRNA sense strand
ucugucaucaucucaagua

SEQ ID NO: 2165968 - RNA, 19 nt, Homo sapiens
  misc_RNA (1)...(19): siRNA sense strand
cagauuacucgccugaaga

SEQ ID NO: 2165969 - RNA, 19 nt, Homo sapiens
  misc_RNA (1)...(19): siRNA sense strand
ccugaaaccggaacgaaug

SEQ ID NO: 2165970 - RNA, 19 nt, Homo sapiens
  misc_RNA (1)...(19): siRNA sense strand
auagauaggaauccauuug

SEQ ID NO: 2165971 - RNA, 19 nt, Homo sapiens
  misc_RNA (1)...(19): siRNA sense strand
cgauacagcacaucuuugg

SEQ ID NO: 2165972 - RNA, 19 nt, Homo sapiens
  misc_RNA (1)...(19): siRNA sense strand
acauugccauggauauugu

SEQ ID NO: 2165973 - RNA, 19 nt, Homo sapiens
  misc_RNA (1)...(19): siRNA sense strand
ccagaaacugucuucacaa

SEQ ID NO: 2165974 - RNA, 19 nt, Homo sapiens
  misc_RNA (1)...(19): siRNA sense strand
agugaagaucucuggauua

SEQ ID NO: 2165975 - RNA, 19 nt, Homo sapiens
  misc_RNA (1)...(19): siRNA sense strand
caagcaaggcaaugcaagu

SEQ ID NO: 2165976 - RNA, 19 nt, Homo sapiens
  misc_RNA (1)...(19): siRNA sense strand
gaagcuuaacucugucauc

SEQ ID NO: 2165977 - RNA, 19 nt, Homo sapiens
  misc_RNA (1)...(19): siRNA sense strand
ucaccagcaauauuacauu

SEQ ID NO: 2165978 - RNA, 19 nt, Homo sapiens
  misc_RNA (1)...(19): siRNA sense strand
guccauggguggcacugau

SEQ ID NO: 2165979 - RNA, 19 nt, Homo sapiens
  misc_RNA (1)...(19): siRNA sense strand
gccacucacccucaccuuu

SEQ ID NO: 2165980 - RNA, 19 nt, Homo sapiens
  misc_RNA (1)...(19): siRNA sense strand
uuacauugccauggauauu

SEQ ID NO: 2165981 - RNA, 19 nt, Homo sapiens
  misc_RNA (1)...(19): siRNA sense strand
caugacggaucggcagaug

SEQ ID NO: 2165982 - RNA, 19 nt, Homo sapiens
  misc_RNA (1)...(19): siRNA sense strand
gcacugagcuugucuuaaa

SEQ ID NO: 2165983 - RNA, 19 nt, Homo sapiens
  misc_RNA (1)...(19): siRNA sense strand
ucagaaagcuaacaacuua

SEQ ID NO: 2165984 - RNA, 19 nt, Homo sapiens
  misc_RNA (1)...(19): siRNA sense strand
gaaauuugcucccuuuaaa

SEQ ID NO: 2165985 - RNA, 19 nt, Homo sapiens
  misc_RNA (1)...(19): siRNA sense strand
gaaaugaucuguaacuuag

SEQ ID NO: 2165986 - RNA, 19 nt, Homo sapiens
  misc_RNA (1)...(19): siRNA sense strand
gcaaauaacuucaguagca

SEQ ID NO: 2165987 - RNA, 19 nt, Homo sapiens
  misc_RNA (1)...(19): siRNA sense strand
gaacaagauugcuuuaaug

SEQ ID NO: 2165988 - RNA, 19 nt, Homo sapiens
  misc_RNA (1)...(19): siRNA sense strand
gacaaaggaugcacuauuu

SEQ ID NO: 2165989 - RNA, 19 nt, Homo sapiens
  misc_RNA (1)...(19): siRNA sense strand
gaaaguugcuccuccacua

SEQ ID NO: 2165990 - RNA, 19 nt, Homo sapiens
  misc_RNA (1)...(19): siRNA sense strand
gcaagaccauuucauguuu

SEQ ID NO: 2165991 - RNA, 19 nt, Homo sapiens
  misc_RNA (1)...(19): siRNA sense strand
gcaagaaggugcuaagaau

SEQ ID NO: 2165992 - RNA, 19 nt, Homo sapiens
  misc_RNA (1)...(19): siRNA sense strand
gaagagaguuaauaaggaa

SEQ ID NO: 2165993 - RNA, 19 nt, Homo sapiens
  misc_RNA (1)...(19): siRNA sense strand
ggaaaugaucuguaacuua

SEQ ID NO: 2165994 - RNA, 19 nt, Homo sapiens
  misc_RNA (1)...(19): siRNA sense strand
gaauuucgaugucagguaa

SEQ ID NO: 2165995 - RNA, 19 nt, Homo sapiens
  misc_RNA (1)...(19): siRNA sense strand
gaccuuaucuuaccucuga

SEQ ID NO: 2165996 - RNA, 19 nt, Homo sapiens
  misc_RNA (1)...(19): siRNA sense strand
cuacuaaccuucauucaaa

SEQ ID NO: 2165997 - RNA, 19 nt, Homo sapiens
  misc_RNA (1)...(19): siRNA sense strand
gaagauccuuuaccuuuau

SEQ ID NO: 2165998 - RNA, 19 nt, Homo sapiens
  misc_RNA (1)...(19): siRNA sense strand
gaagauagcacaaguguag

SEQ ID NO: 2165999 - RNA, 19 nt, Homo sapiens
  misc_RNA (1)...(19): siRNA sense strand
ugaaaugacuccugaagaa

SEQ ID NO: 2166000 - RNA, 19 nt, Homo sapiens
  misc_RNA (1)...(19): siRNA sense strand
caagauugcuuuaaugaug

SEQ ID NO: 2166001 - RNA, 19 nt, Homo sapiens
  misc_RNA (1)...(19): siRNA sense strand
uaucagagaugggaaauuu

SEQ ID NO: 2166002 - RNA, 19 nt, Homo sapiens
  misc_RNA (1)...(19): siRNA sense strand
gaagagauuucagaaguug

SEQ ID NO: 2166003 - RNA, 19 nt, Homo sapiens
  misc_RNA (1)...(19): siRNA sense strand
ucaagaagguagugaaauu

SEQ ID NO: 2166004 - RNA, 19 nt, Homo sapiens
  misc_RNA (1)...(19): siRNA sense strand
gaagaagcauccauugugu

SEQ ID NO: 2166005 - RNA, 19 nt, Homo sapiens
  misc_RNA (1)...(19): siRNA sense strand
gaaaugaugcccugucuga

SEQ ID NO: 2166006 - RNA, 19 nt, Homo sapiens
  misc_RNA (1)...(19): siRNA sense strand
cgaaauugcucaagaacuu

SEQ ID NO: 2166007 - RNA, 19 nt, Homo sapiens
  misc_RNA (1)...(19): siRNA sense strand
gcuaauacuucuucaaaug

SEQ ID NO: 2166008 - RNA, 19 nt, Homo sapiens
  misc_RNA (1)...(19): siRNA sense strand
gaucacaacuaccaaugaa

SEQ ID NO: 2166009 - RNA, 19 nt, Homo sapiens
  misc_RNA (1)...(19): siRNA sense strand
gaugggaaauuuaucugua

SEQ ID NO: 2166010 - RNA, 19 nt, Homo sapiens
  misc_RNA (1)...(19): siRNA sense strand
gaacacagcagagaauauu

SEQ ID NO: 2166011 - RNA, 19 nt, Homo sapiens
  misc_RNA (1)...(19): siRNA sense strand
guaagugacuguucucgaa

SEQ ID NO: 2166012 - RNA, 19 nt, Homo sapiens
  misc_RNA (1)...(19): siRNA sense strand
uagcaaagcuguguucuga

SEQ ID NO: 2166013 - RNA, 19 nt, Homo sapiens
  misc_RNA (1)...(19): siRNA sense strand
caacucagcucccuuacug

SEQ ID NO: 2166014 - RNA, 19 nt, Homo sapiens
  misc_RNA (1)...(19): siRNA sense strand
aaacagugcuucuaagaga

SEQ ID NO: 2166015 - RNA, 19 nt, Homo sapiens
  misc_RNA (1)...(19): siRNA sense strand
ggacagccuucucuucuug

SEQ ID NO: 2166016 - RNA, 19 nt, Homo sapiens
  misc_RNA (1)...(19): siRNA sense strand
gaucuaugcuuccuucaga

SEQ ID NO: 2166017 - RNA, 19 nt, Homo sapiens
  misc_RNA (1)...(19): siRNA sense strand
uaaagcaacuucaggaaau

SEQ ID NO: 2166018 - RNA, 19 nt, Homo sapiens
  misc_RNA (1)...(19): siRNA sense strand
ugaaauggaugaacuaaca

SEQ ID NO: 2166019 - RNA, 19 nt, Homo sapiens
  misc_RNA (1)...(19): siRNA sense strand
ggaaacgucugagcaagaa

SEQ ID NO: 2166020 - RNA, 19 nt, Homo sapiens
  misc_RNA (1)...(19): siRNA sense strand
ggaagcauguauauucuau

SEQ ID NO: 2166021 - RNA, 19 nt, Homo sapiens
  misc_RNA (1)...(19): siRNA sense strand
cagagaauauugagaaaga

SEQ ID NO: 2166022 - RNA, 19 nt, Homo sapiens
  misc_RNA (1)...(19): siRNA sense strand
ucaauacacuccagaaaug

SEQ ID NO: 2166023 - RNA, 19 nt, Homo sapiens
  misc_RNA (1)...(19): siRNA sense strand
gccagacacuccuagaaua

SEQ ID NO: 2166024 - RNA, 19 nt, Homo sapiens
  misc_RNA (1)...(19): siRNA sense strand
caacugagugaauuucuua

SEQ ID NO: 2166025 - RNA, 19 nt, Homo sapiens
  misc_RNA (1)...(19): siRNA sense strand
ggauguacuucaguuguua

SEQ ID NO: 2166026 - RNA, 19 nt, Homo sapiens
  misc_RNA (1)...(19): siRNA sense strand
uuacagaccuuaucgaugu

SEQ ID NO: 2166027 - RNA, 19 nt, Homo sapiens
  misc_RNA (1)...(19): siRNA sense strand
gaaaggagcaucaagucuu

SEQ ID NO: 2166028 - RNA, 19 nt, Homo sapiens
  misc_RNA (1)...(19): siRNA sense strand
cagaagauccuuuaccuuu

SEQ ID NO: 2166029 - RNA, 19 nt, Homo sapiens
  misc_RNA (1)...(19): siRNA sense strand
uaaaucaacugcagauauc

SEQ ID NO: 2166030 - RNA, 19 nt, Homo sapiens
  misc_RNA (1)...(19): siRNA sense strand
agaagauccuuuaccuuua

SEQ ID NO: 2166031 - RNA, 19 nt, Homo sapiens
  misc_RNA (1)...(19): siRNA sense strand
acauaaggcucauuugauu

SEQ ID NO: 2166032 - RNA, 19 nt, Homo sapiens
  misc_RNA (1)...(19): siRNA sense strand
caaauguaauuccaacuug

SEQ ID NO: 2166033 - RNA, 19 nt, Homo sapiens
  misc_RNA (1)...(19): siRNA sense strand
ugaaguagcuguguccauu

SEQ ID NO: 2166034 - RNA, 19 nt, Homo sapiens
  misc_RNA (1)...(19): siRNA sense strand
gaaguugauugcaaagaug

SEQ ID NO: 2166035 - RNA, 19 nt, Homo sapiens
  misc_RNA (1)...(19): siRNA sense strand
caaaggaugcacuauuuaa

SEQ ID NO: 2166036 - RNA, 19 nt, Homo sapiens
  misc_RNA (1)...(19): siRNA sense strand
aaacuuaccuugucugucu

SEQ ID NO: 2166037 - RNA, 19 nt, Homo sapiens
  misc_RNA (1)...(19): siRNA sense strand
gagcaaugauaauucaaga

SEQ ID NO: 2166038 - RNA, 19 nt, Homo sapiens
  misc_RNA (1)...(19): siRNA sense strand
uaaauggccugcaauuauc

SEQ ID NO: 2166039 - RNA, 19 nt, Homo sapiens
  misc_RNA (1)...(19): siRNA sense strand
gaauguggagauaauguua

SEQ ID NO: 2166040 - RNA, 19 nt, Homo sapiens
  misc_RNA (1)...(19): siRNA sense strand
guauagaacuguguguaaa

SEQ ID NO: 2166041 - RNA, 19 nt, Homo sapiens
  misc_RNA (1)...(19): siRNA sense strand
gaaaguuaaucgaagagau

SEQ ID NO: 2166042 - RNA, 19 nt, Homo sapiens
  misc_RNA (1)...(19): siRNA sense strand
ggauaaggauaaagugaau

SEQ ID NO: 2166043 - RNA, 19 nt, Homo sapiens
  misc_RNA (1)...(19): siRNA sense strand
caaagauugugcagauuga

SEQ ID NO: 2166044 - RNA, 19 nt, Homo sapiens
  misc_RNA (1)...(19): siRNA sense strand
cagcagauguggaaaggaa

SEQ ID NO: 2166045 - RNA, 19 nt, Homo sapiens
  misc_RNA (1)...(19): siRNA sense strand
cacaagauccagucauuua

SEQ ID NO: 2166046 - RNA, 19 nt, Homo sapiens
  misc_RNA (1)...(19): siRNA sense strand
gaaagugucauaaauccaa

SEQ ID NO: 2166047 - RNA, 19 nt, Homo sapiens
  misc_RNA (1)...(19): siRNA sense strand
gaagugaugcuugggauaa

SEQ ID NO: 2166048 - RNA, 19 nt, Homo sapiens
  misc_RNA (1)...(19): siRNA sense strand
caucaagucuuuagagcaa

SEQ ID NO: 2166049 - RNA, 19 nt, Homo sapiens
  misc_RNA (1)...(19): siRNA sense strand
gcugugagcuguuacuugu

SEQ ID NO: 2166050 - RNA, 19 nt, Homo sapiens
  misc_RNA (1)...(19): siRNA sense strand
ggucccaucuuguuggaua

SEQ ID NO: 2166051 - RNA, 19 nt, Homo sapiens
  misc_RNA (1)...(19): siRNA sense strand
gacaugcucagaaacauua

SEQ ID NO: 2166052 - RNA, 19 nt, Homo sapiens
  misc_RNA (1)...(19): siRNA sense strand
guagagacccaagcuaaua

SEQ ID NO: 2166053 - RNA, 19 nt, Homo sapiens
  misc_RNA (1)...(19): siRNA sense strand
gaacaacagcuacaguuuc

SEQ ID NO: 2166054 - RNA, 19 nt, Homo sapiens
  misc_RNA (1)...(19): siRNA sense strand
agaagaagaugguguauac

SEQ ID NO: 2166055 - RNA, 19 nt, Homo sapiens
  misc_RNA (1)...(19): siRNA sense strand
gugaagaaacugaaacuaa

SEQ ID NO: 2166056 - RNA, 19 nt, Homo sapiens
  misc_RNA (1)...(19): siRNA sense strand
uguagcagcuugccuguuu

SEQ ID NO: 2166057 - RNA, 19 nt, Homo sapiens
  misc_RNA (1)...(19): siRNA sense strand
aaacaguucugccuuugaa

SEQ ID NO: 2166058 - RNA, 19 nt, Homo sapiens
  misc_RNA (1)...(19): siRNA sense strand
gaaagaaagaucuaugcuu

SEQ ID NO: 2166059 - RNA, 19 nt, Homo sapiens
  misc_RNA (1)...(19): siRNA sense strand
cagcuucagugcagugaua

SEQ ID NO: 2166060 - RNA, 19 nt, Homo sapiens
  misc_RNA (1)...(19): siRNA sense strand
caacaccgaaaucuucuua

SEQ ID NO: 2166061 - RNA, 19 nt, Homo sapiens
  misc_RNA (1)...(19): siRNA sense strand
gcagauuuguaacccagua

SEQ ID NO: 2166062 - RNA, 19 nt, Homo sapiens
  misc_RNA (1)...(19): siRNA sense strand
gcaaagauugugcagauug

SEQ ID NO: 2166063 - RNA, 19 nt, Homo sapiens
  misc_RNA (1)...(19): siRNA sense strand
uuagaaggcuuacagaaau

SEQ ID NO: 2166064 - RNA, 19 nt, Homo sapiens
  misc_RNA (1)...(19): siRNA sense strand
gaucuggugugacuaacuu

SEQ ID NO: 2166065 - RNA, 19 nt, Homo sapiens
  misc_RNA (1)...(19): siRNA sense strand
guacugcgcuugggaacuu

SEQ ID NO: 2166066 - RNA, 19 nt, Homo sapiens
  misc_RNA (1)...(19): siRNA sense strand
gcagauaucacaguuauuc

SEQ ID NO: 2166067 - RNA, 19 nt, Homo sapiens
  misc_RNA (1)...(19): siRNA sense strand
ggaaacagugcuucuaaga

SEQ ID NO: 2166068 - RNA, 19 nt, Homo sapiens
  misc_RNA (1)...(19): siRNA sense strand
gaacuucuacagaguaaug

SEQ ID NO: 2166069 - RNA, 19 nt, Homo sapiens
  misc_RNA (1)...(19): siRNA sense strand
cuaaauggccugcaauuau

SEQ ID NO: 2166070 - RNA, 19 nt, Homo sapiens
  misc_RNA (1)...(19): siRNA sense strand
gcagaaaguaguucaaugu

SEQ ID NO: 2166071 - RNA, 19 nt, Homo sapiens
  misc_RNA (1)...(19): siRNA sense strand
gaaaguauugcauuuguuc

SEQ ID NO: 2166072 - RNA, 19 nt, Homo sapiens
  misc_RNA (1)...(19): siRNA sense strand
gaaguagcuguguccauua

SEQ ID NO: 2166073 - RNA, 19 nt, Homo sapiens
  misc_RNA (1)...(19): siRNA sense strand
gcauaaagauaaugaagac

SEQ ID NO: 2166074 - RNA, 19 nt, Homo sapiens
  misc_RNA (1)...(19): siRNA sense strand
gcuguuacuuguauugaaa

SEQ ID NO: 2166075 - RNA, 19 nt, Homo sapiens
  misc_RNA (1)...(19): siRNA sense strand
ccagaaauaugaugaagag

SEQ ID NO: 2166076 - RNA, 19 nt, Homo sapiens
  misc_RNA (1)...(19): siRNA sense strand
ccuagaauaugcagagaaa

SEQ ID NO: 2166077 - RNA, 19 nt, Homo sapiens
  misc_RNA (1)...(19): siRNA sense strand
gacaaagaccauccgaaua

SEQ ID NO: 2166078 - RNA, 19 nt, Homo sapiens
  misc_RNA (1)...(19): siRNA sense strand
ggaggagagucaagugaga

SEQ ID NO: 2166079 - RNA, 19 nt, Homo sapiens
  misc_RNA (1)...(19): siRNA sense strand
caaugggacucauagcaaa

SEQ ID NO: 2166080 - RNA, 19 nt, Homo sapiens
  misc_RNA (1)...(19): siRNA sense strand
caagaagguagugaaauua

SEQ ID NO: 2166081 - RNA, 19 nt, Homo sapiens
  misc_RNA (1)...(19): siRNA sense strand
cugaugaucuggaaguuaa

SEQ ID NO: 2166082 - RNA, 19 nt, Homo sapiens
  misc_RNA (1)...(19): siRNA sense strand
aaacauggaugacgaaaug

SEQ ID NO: 2166083 - RNA, 19 nt, Homo sapiens
  misc_RNA (1)...(19): siRNA sense strand
gaaaugagcauccucuaug

SEQ ID NO: 2166084 - RNA, 19 nt, Homo sapiens
  misc_RNA (1)...(19): siRNA sense strand
ggucgaagcuguggagaaa

SEQ ID NO: 2166085 - RNA, 19 nt, Homo sapiens
  misc_RNA (1)...(19): siRNA sense strand
gcaaagccguggaggaaau

SEQ ID NO: 2166086 - RNA, 19 nt, Homo sapiens
  misc_RNA (1)...(19): siRNA sense strand
gaaaacaccuucuaaucuu

SEQ ID NO: 2166087 - RNA, 19 nt, Homo sapiens
  misc_RNA (1)...(19): siRNA sense strand
gcacuuggcugcagaacag

SEQ ID NO: 2166088 - RNA, 19 nt, Homo sapiens
  misc_RNA (1)...(19): siRNA sense strand
gaggaggaauuacaggaaa

SEQ ID NO: 2166089 - RNA, 19 nt, Homo sapiens
  misc_RNA (1)...(19): siRNA sense strand
gcaagaagagguacaggaa

SEQ ID NO: 2166090 - RNA, 19 nt, Homo sapiens
  misc_RNA (1)...(19): siRNA sense strand
gcaauaugauggauaaacu

SEQ ID NO: 2166091 - RNA, 19 nt, Homo sapiens
  misc_RNA (1)...(19): siRNA sense strand
ucacaguuauuaaggauga

SEQ ID NO: 2166092 - RNA, 19 nt, Homo sapiens
  misc_RNA (1)...(19): siRNA sense strand
caaaacaacucuugauuag

SEQ ID NO: 2166093 - RNA, 19 nt, Homo sapiens
  misc_RNA (1)...(19): siRNA sense strand
gcagaggcaagaagaggua

SEQ ID NO: 2166094 - RNA, 19 nt, Homo sapiens
  misc_RNA (1)...(19): siRNA sense strand
aaaccaggauggcauuuca

SEQ ID NO: 2166095 - RNA, 19 nt, Homo sapiens
  misc_RNA (1)...(19): siRNA sense strand
aaacaacugggaaucauga

SEQ ID NO: 2166096 - RNA, 19 nt, Homo sapiens
  misc_RNA (1)...(19): siRNA sense strand
uggaggaaauugugaauac

SEQ ID NO: 2166097 - RNA, 19 nt, Homo sapiens
  misc_RNA (1)...(19): siRNA sense strand
ggaaucaugacaaauugga

SEQ ID NO: 2166098 - RNA, 19 nt, Homo sapiens
  misc_RNA (1)...(19): siRNA sense strand
aagaagagguacaggaagu

SEQ ID NO: 2166099 - RNA, 19 nt, Homo sapiens
  misc_RNA (1)...(19): siRNA sense strand
caacugggaaucaugacaa

SEQ ID NO: 2166100 - RNA, 19 nt, Homo sapiens
  misc_RNA (1)...(19): siRNA sense strand
aaaggauuaugauggaaug

SEQ ID NO: 2166101 - RNA, 19 nt, Homo sapiens
  misc_RNA (1)...(19): siRNA sense strand
caccaggacaugcagauuu

SEQ ID NO: 2166102 - RNA, 19 nt, Homo sapiens
  misc_RNA (1)...(19): siRNA sense strand
ccaaaggauuaugauggaa

SEQ ID NO: 2166103 - RNA, 19 nt, Homo sapiens
  misc_RNA (1)...(19): siRNA sense strand
gaacaaaacaacucuugau

SEQ ID NO: 2166104 - RNA, 19 nt, Homo sapiens
  misc_RNA (1)...(19): siRNA sense strand
ugggaaucaugacaaauug

SEQ ID NO: 2166105 - RNA, 19 nt, Homo sapiens
  misc_RNA (1)...(19): siRNA sense strand
ugaaaugagcauccucuau

SEQ ID NO: 2166106 - RNA, 19 nt, Homo sapiens
  misc_RNA (1)...(19): siRNA sense strand
caugacaaauuggaaagau

SEQ ID NO: 2166107 - RNA, 19 nt, Homo sapiens
  misc_RNA (1)...(19): siRNA sense strand
caaaggauuaugauggaau

SEQ ID NO: 2166108 - RNA, 19 nt, Homo sapiens
  misc_RNA (1)...(19): siRNA sense strand
aauuauaccuuuccuaagc

SEQ ID NO: 2166109 - RNA, 19 nt, Homo sapiens
  misc_RNA (1)...(19): siRNA sense strand
ggaggaaauugugaauacu

SEQ ID NO: 2166110 - RNA, 19 nt, Homo sapiens
  misc_RNA (1)...(19): siRNA sense strand
aagcaaagccguggaggaa

SEQ ID NO: 2166111 - RNA, 19 nt, Homo sapiens
  misc_RNA (1)...(19): siRNA sense strand
uuggcaauaugauggauaa

SEQ ID NO: 2166112 - RNA, 19 nt, Homo sapiens
  misc_RNA (1)...(19): siRNA sense strand
gaggaaauugugaauacug

SEQ ID NO: 2166113 - RNA, 19 nt, Homo sapiens
  misc_RNA (1)...(19): siRNA sense strand
aaaugagcauccucuaugg

SEQ ID NO: 2166114 - RNA, 19 nt, Homo sapiens
  misc_RNA (1)...(19): siRNA sense strand
uggauaaacuggcuaacac

SEQ ID NO: 2166115 - RNA, 19 nt, Homo sapiens
  misc_RNA (1)...(19): siRNA sense strand
ggaaaccaggauggcauuu

SEQ ID NO: 2166116 - RNA, 19 nt, Homo sapiens
  misc_RNA (1)...(19): siRNA sense strand
ccacagagagaaggucgaa

SEQ ID NO: 2166117 - RNA, 19 nt, Homo sapiens
  misc_RNA (1)...(19): siRNA sense strand
cugggaaucaugacaaauu

SEQ ID NO: 2166118 - RNA, 19 nt, Homo sapiens
  misc_RNA (1)...(19): siRNA sense strand
aaacacaucaggccacucu

SEQ ID NO: 2166119 - RNA, 19 nt, Homo sapiens
  misc_RNA (1)...(19): siRNA sense strand
ggaaugccacagagagaag

SEQ ID NO: 2166120 - RNA, 19 nt, Homo sapiens
  misc_RNA (1)...(19): siRNA sense strand
gaaucaugacaaauuggaa

SEQ ID NO: 2166121 - RNA, 19 nt, Homo sapiens
  misc_RNA (1)...(19): siRNA sense strand
gcgcaugguccacagaauc

SEQ ID NO: 2166122 - RNA, 19 nt, Homo sapiens
  misc_RNA (1)...(19): siRNA sense strand
ugucacaguuauuaaggau

SEQ ID NO: 2166123 - RNA, 19 nt, Homo sapiens
  misc_RNA (1)...(19): siRNA sense strand
acacaucaggccacucuug

SEQ ID NO: 2166124 - RNA, 19 nt, Homo sapiens
  misc_RNA (1)...(19): siRNA sense strand
caaaacaacugggaaucau

SEQ ID NO: 2166125 - RNA, 19 nt, Homo sapiens
  misc_RNA (1)...(19): siRNA sense strand
caaagccguggaggaaauu

SEQ ID NO: 2166126 - RNA, 19 nt, Homo sapiens
  misc_RNA (1)...(19): siRNA sense strand
acacaucgcccaggaagca

SEQ ID NO: 2166127 - RNA, 19 nt, Homo sapiens
  misc_RNA (1)...(19): siRNA sense strand
gagaacaaaacaacucuug

SEQ ID NO: 2166128 - RNA, 19 nt, Homo sapiens
  misc_RNA (1)...(19): siRNA sense strand
ggacaugcagauuuuauuc

SEQ ID NO: 2166129 - RNA, 19 nt, Homo sapiens
  misc_RNA (1)...(19): siRNA sense strand
uaugauggaaugccacaga

SEQ ID NO: 2166130 - RNA, 19 nt, Homo sapiens
  misc_RNA (1)...(19): siRNA sense strand
gcaaaacaacugggaauca

SEQ ID NO: 2166131 - RNA, 19 nt, Homo sapiens
  misc_RNA (1)...(19): siRNA sense strand
guggaggaaauugugaaua

SEQ ID NO: 2166132 - RNA, 19 nt, Homo sapiens
  misc_RNA (1)...(19): siRNA sense strand
gaaagaaagaaaacaccuu

SEQ ID NO: 2166133 - RNA, 19 nt, Homo sapiens
  misc_RNA (1)...(19): siRNA sense strand
guccacagaauccaaagga

SEQ ID NO: 2166134 - RNA, 19 nt, Homo sapiens
  misc_RNA (1)...(19): siRNA sense strand
gugucacaguuauuaagga

SEQ ID NO: 2166135 - RNA, 19 nt, Homo sapiens
  misc_RNA (1)...(19): siRNA sense strand
augacgaaaugaagagaga

SEQ ID NO: 2166136 - RNA, 19 nt, Homo sapiens
  misc_RNA (1)...(19): siRNA sense strand
gggagcugcugucuauagc

SEQ ID NO: 2166137 - RNA, 19 nt, Homo sapiens
  misc_RNA (1)...(19): siRNA sense strand
caauaugauggauaaacug

SEQ ID NO: 2166138 - RNA, 19 nt, Homo sapiens
  misc_RNA (1)...(19): siRNA sense strand
aaacaccuucuaaucuugu

SEQ ID NO: 2166139 - RNA, 19 nt, Homo sapiens
  misc_RNA (1)...(19): siRNA sense strand
agaggaggaauuacaggaa

SEQ ID NO: 2166140 - RNA, 19 nt, Homo sapiens
  misc_RNA (1)...(19): siRNA sense strand
gaagaaagcuaggaauaga

SEQ ID NO: 2166141 - RNA, 19 nt, Homo sapiens
  misc_RNA (1)...(19): siRNA sense strand
gaauagaguucauuucaga

SEQ ID NO: 2166142 - RNA, 19 nt, Homo sapiens
  misc_RNA (1)...(19): siRNA sense strand
gaaccucccuguccucauu

SEQ ID NO: 2166143 - RNA, 19 nt, Homo sapiens
  misc_RNA (1)...(19): siRNA sense strand
gagaguucaugguauaaua

SEQ ID NO: 2166144 - RNA, 19 nt, Homo sapiens
  misc_RNA (1)...(19): siRNA sense strand
gaagaacaguuuguaaaug

SEQ ID NO: 2166145 - RNA, 19 nt, Homo sapiens
  misc_RNA (1)...(19): siRNA sense strand
gaaagaaauuggaccacuu

SEQ ID NO: 2166146 - RNA, 19 nt, Homo sapiens
  misc_RNA (1)...(19): siRNA sense strand
ucuaaugccuugaaucaua

SEQ ID NO: 2166147 - RNA, 19 nt, Homo sapiens
  misc_RNA (1)...(19): siRNA sense strand
ccaauaucauucccucuua

SEQ ID NO: 2166148 - RNA, 19 nt, Homo sapiens
  misc_RNA (1)...(19): siRNA sense strand
acaauguucuucccaauaa

SEQ ID NO: 2166149 - RNA, 19 nt, Homo sapiens
  misc_RNA (1)...(19): siRNA sense strand
gaagauacaauguugaaug

SEQ ID NO: 2166150 - RNA, 19 nt, Homo sapiens
  misc_RNA (1)...(19): siRNA sense strand
caacaacacucggguacaa

SEQ ID NO: 2166151 - RNA, 19 nt, Homo sapiens
  misc_RNA (1)...(19): siRNA sense strand
gcacaugauuauuacaaug

SEQ ID NO: 2166152 - RNA, 19 nt, Homo sapiens
  misc_RNA (1)...(19): siRNA sense strand
gaacagagcagcuaaucuc

SEQ ID NO: 2166153 - RNA, 19 nt, Homo sapiens
  misc_RNA (1)...(19): siRNA sense strand
agagaggacuuuaaacuga

SEQ ID NO: 2166154 - RNA, 19 nt, Homo sapiens
  misc_RNA (1)...(19): siRNA sense strand
gaaaugagagcaucaacug

SEQ ID NO: 2166155 - RNA, 19 nt, Homo sapiens
  misc_RNA (1)...(19): siRNA sense strand
ggaaggauuaaaugcauua

SEQ ID NO: 2166156 - RNA, 19 nt, Homo sapiens
  misc_RNA (1)...(19): siRNA sense strand
gaucuaaugccuugaauca

SEQ ID NO: 2166157 - RNA, 19 nt, Homo sapiens
  misc_RNA (1)...(19): siRNA sense strand
aaaccaaccuggagaguuc

SEQ ID NO: 2166158 - RNA, 19 nt, Homo sapiens
  misc_RNA (1)...(19): siRNA sense strand
gagaggacuuuaaacugaa

SEQ ID NO: 2166159 - RNA, 19 nt, Homo sapiens
  misc_RNA (1)...(19): siRNA sense strand
guggagcacaugauuauua

SEQ ID NO: 2166160 - RNA, 19 nt, Homo sapiens
  misc_RNA (1)...(19): siRNA sense strand
agagaaugcugcuuaucua

SEQ ID NO: 2166161 - RNA, 19 nt, Homo sapiens
  misc_RNA (1)...(19): siRNA sense strand
caagaagaacaguuuguaa

SEQ ID NO: 2166162 - RNA, 19 nt, Homo sapiens
  misc_RNA (1)...(19): siRNA sense strand
gaauggcccuucaggaucu

SEQ ID NO: 2166163 - RNA, 19 nt, Homo sapiens
  misc_RNA (1)...(19): siRNA sense strand
caacacucggguacaauua

SEQ ID NO: 2166164 - RNA, 19 nt, Homo sapiens
  misc_RNA (1)...(19): siRNA sense strand
ugacggcacuggauguuau

SEQ ID NO: 2166165 - RNA, 19 nt, Homo sapiens
  misc_RNA (1)...(19): siRNA sense strand
cacaagagaaugcugcuua

SEQ ID NO: 2166166 - RNA, 19 nt, Homo sapiens
  misc_RNA (1)...(19): siRNA sense strand
acacucggguacaauuaua

SEQ ID NO: 2166167 - RNA, 19 nt, Homo sapiens
  misc_RNA (1)...(19): siRNA sense strand
ggaagaaagcuaggaauag

SEQ ID NO: 2166168 - RNA, 19 nt, Homo sapiens
  misc_RNA (1)...(19): siRNA sense strand
ggaaucagggcaaaggaaa

SEQ ID NO: 2166169 - RNA, 19 nt, Homo sapiens
  misc_RNA (1)...(19): siRNA sense strand
ggaauagaguucauuucag

SEQ ID NO: 2166170 - RNA, 19 nt, Homo sapiens
  misc_RNA (1)...(19): siRNA sense strand
gaauagugauggagaacag

SEQ ID NO: 2166171 - RNA, 19 nt, Homo sapiens
  misc_RNA (1)...(19): siRNA sense strand
ccaauaagagccuauggaa

SEQ ID NO: 2166172 - RNA, 19 nt, Homo sapiens
  misc_RNA (1)...(19): siRNA sense strand
cugcugugcuggccuauaa

SEQ ID NO: 2166173 - RNA, 19 nt, Homo sapiens
  misc_RNA (1)...(19): siRNA sense strand
ggugcacaguggaaauuaa

SEQ ID NO: 2166174 - RNA, 19 nt, Homo sapiens
  misc_RNA (1)...(19): siRNA sense strand
gaaauacuauggaaaagca

SEQ ID NO: 2166175 - RNA, 19 nt, Homo sapiens
  misc_RNA (1)...(19): siRNA sense strand
guuuguaaaugcaguagaa

SEQ ID NO: 2166176 - RNA, 19 nt, Homo sapiens
  misc_RNA (1)...(19): siRNA sense strand
gagcacaugauuauuacaa

SEQ ID NO: 2166177 - RNA, 19 nt, Homo sapiens
  misc_RNA (1)...(19): siRNA sense strand
caauaucauucccucuuau

SEQ ID NO: 2166178 - RNA, 19 nt, Homo sapiens
  misc_RNA (1)...(19): siRNA sense strand
cuggagaguucaugguaua

SEQ ID NO: 2166179 - RNA, 19 nt, Homo sapiens
  misc_RNA (1)...(19): siRNA sense strand
ggaaaagccuauccucuca

SEQ ID NO: 2166180 - RNA, 19 nt, Homo sapiens
  misc_RNA (1)...(19): siRNA sense strand
ggaaucagagaggacuuua

SEQ ID NO: 2166181 - RNA, 19 nt, Homo sapiens
  misc_RNA (1)...(19): siRNA sense strand
caagagaagggaagccaaa

SEQ ID NO: 2166182 - RNA, 19 nt, Homo sapiens
  misc_RNA (1)...(19): siRNA sense strand
aaucagagaggacuuuaaa

SEQ ID NO: 2166183 - RNA, 19 nt, Homo sapiens
  misc_RNA (1)...(19): siRNA sense strand
ccaaagcucuggcaaugac

SEQ ID NO: 2166184 - RNA, 19 nt, Homo sapiens
  misc_RNA (1)...(19): siRNA sense strand
aauaagagccuauggaaag

SEQ ID NO: 2166185 - RNA, 19 nt, Homo sapiens
  misc_RNA (1)...(19): siRNA sense strand
gggaaggauuaaaugcauu

SEQ ID NO: 2166186 - RNA, 19 nt, Homo sapiens
  misc_RNA (1)...(19): siRNA sense strand
caucucauucugcuucuua

SEQ ID NO: 2166187 - RNA, 19 nt, Homo sapiens
  misc_RNA (1)...(19): siRNA sense strand
agauauggcugaacaugau

SEQ ID NO: 2166188 - RNA, 19 nt, Homo sapiens
  misc_RNA (1)...(19): siRNA sense strand
gaaugcugcuuaucuacca

SEQ ID NO: 2166189 - RNA, 19 nt, Homo sapiens
  misc_RNA (1)...(19): siRNA sense strand
uggaaagccuauauggaaa

SEQ ID NO: 2166190 - RNA, 19 nt, Homo sapiens
  misc_RNA (1)...(19): siRNA sense strand
gaaaccaaccuggagaguu

SEQ ID NO: 2166191 - RNA, 19 nt, Homo sapiens
  misc_RNA (1)...(19): siRNA sense strand
gaguucauuucagaagaua

SEQ ID NO: 2166192 - RNA, 19 nt, Homo sapiens
  misc_RNA (1)...(19): siRNA sense strand
acaagagaaugcugcuuau

SEQ ID NO: 2166193 - RNA, 19 nt, Homo sapiens
  misc_RNA (1)...(19): siRNA sense strand
ucaagaagaacaguuugua

SEQ ID NO: 2166194 - RNA, 19 nt, Homo sapiens
  misc_RNA (1)...(19): siRNA sense strand
uggaagaaagcuaggaaua

SEQ ID NO: 2166195 - RNA, 19 nt, Homo sapiens
  misc_RNA (1)...(19): siRNA sense strand
cagaagauacaauguugaa

SEQ ID NO: 2166196 - RNA, 19 nt, Homo sapiens
  misc_RNA (1)...(19): siRNA sense strand
ccacuuguguuguuuugua

SEQ ID NO: 2166197 - RNA, 19 nt, Homo sapiens
  misc_RNA (1)...(19): siRNA sense strand
gaaucagagaggacuuuaa

SEQ ID NO: 2166198 - RNA, 19 nt, Homo sapiens
  misc_RNA (1)...(19): siRNA sense strand
caauaagagccuauggaaa

SEQ ID NO: 2166199 - RNA, 19 nt, Homo sapiens
  misc_RNA (1)...(19): siRNA sense strand
uaccagauauggcugaaca

SEQ ID NO: 2166200 - RNA, 19 nt, Homo sapiens
  misc_RNA (1)...(19): siRNA sense strand
agaagauggugguggcaaa

SEQ ID NO: 2166201 - RNA, 19 nt, Homo sapiens
  misc_RNA (1)...(19): siRNA sense strand
acaggaagcucaguucuac

SEQ ID NO: 2166202 - RNA, 19 nt, Homo sapiens
  misc_RNA (1)...(19): siRNA sense strand
ggguacaauuauaagcuaa

SEQ ID NO: 2166203 - RNA, 19 nt, Homo sapiens
  misc_RNA (1)...(19): siRNA sense strand
cggguacaauuauaagcua

SEQ ID NO: 2166204 - RNA, 19 nt, Homo sapiens
  misc_RNA (1)...(19): siRNA sense strand
aagaacaguuuguaaaugc

SEQ ID NO: 2166205 - RNA, 19 nt, Homo sapiens
  misc_RNA (1)...(19): siRNA sense strand
caucaacugcugccacuug

SEQ ID NO: 2166206 - RNA, 19 nt, Homo sapiens
  misc_RNA (1)...(19): siRNA sense strand
aagauacaauguugaaugg

SEQ ID NO: 2166207 - RNA, 19 nt, Homo sapiens
  misc_RNA (1)...(19): siRNA sense strand
caacugcugccacuugugu

SEQ ID NO: 2166208 - RNA, 19 nt, Homo sapiens
  misc_RNA (1)...(19): siRNA sense strand
caggaauagugauggagaa

SEQ ID NO: 2166209 - RNA, 19 nt, Homo sapiens
  misc_RNA (1)...(19): siRNA sense strand
aaagaaauuggaccacuug

SEQ ID NO: 2166210 - RNA, 19 nt, Homo sapiens
  misc_RNA (1)...(19): siRNA sense strand
cagaguuacuggaaggaau

SEQ ID NO: 2166211 - RNA, 19 nt, Homo sapiens
  misc_RNA (1)...(19): siRNA sense strand
ggaaaagcaucucauucug

SEQ ID NO: 2166212 - RNA, 19 nt, Homo sapiens
  misc_RNA (1)...(19): siRNA sense strand
cagagcagcuaaucucacu

SEQ ID NO: 2166213 - RNA, 19 nt, Homo sapiens
  misc_RNA (1)...(19): siRNA sense strand
uagaguucauuucagaaga

SEQ ID NO: 2166214 - RNA, 19 nt, Homo sapiens
  misc_RNA (1)...(19): siRNA sense strand
gagaacagagcagcuaauc

SEQ ID NO: 2166215 - RNA, 19 nt, Homo sapiens
  misc_RNA (1)...(19): siRNA sense strand
gugcuggccuauaacaauc

SEQ ID NO: 2166216 - RNA, 19 nt, Homo sapiens
  misc_RNA (1)...(19): siRNA sense strand
ggauuaaaugcauuagaug

SEQ ID NO: 2166217 - RNA, 19 nt, Homo sapiens
  misc_RNA (1)...(19): siRNA sense strand
gcccacccaucacaagaga

SEQ ID NO: 2166218 - RNA, 19 nt, Homo sapiens
  misc_RNA (1)...(19): siRNA sense strand
cagauauggcugaacauga

SEQ ID NO: 2166219 - RNA, 19 nt, Homo sapiens
  misc_RNA (1)...(19): siRNA sense strand
uucagaagauacaauguug

SEQ ID NO: 2166220 - RNA, 19 nt, Homo sapiens
  misc_RNA (1)...(19): siRNA sense strand
uacaauguucuucccaaua

SEQ ID NO: 2166221 - RNA, 19 nt, Homo sapiens
  misc_RNA (1)...(19): siRNA sense strand
gugcacaguggaaauuaaa

SEQ ID NO: 2166222 - RNA, 19 nt, Homo sapiens
  misc_RNA (1)...(19): siRNA sense strand
aaagguggagcacaugauu

SEQ ID NO: 2166223 - RNA, 19 nt, Homo sapiens
  misc_RNA (1)...(19): siRNA sense strand
gggaaccccugcagaagaa

SEQ ID NO: 2166224 - RNA, 19 nt, Homo sapiens
  misc_RNA (1)...(19): siRNA sense strand
gacuuuaaacugaaacuuc

SEQ ID NO: 2166225 - RNA, 19 nt, Homo sapiens
  misc_RNA (1)...(19): siRNA sense strand
ucagagaggacuuuaaacu

SEQ ID NO: 2166226 - RNA, 19 nt, Homo sapiens
  misc_RNA (1)...(19): siRNA sense strand
uuacaauguucuucccaau

SEQ ID NO: 2166227 - RNA, 19 nt, Homo sapiens
  misc_RNA (1)...(19): siRNA sense strand
ggagaacagagcagcuaau

SEQ ID NO: 2166228 - RNA, 19 nt, Homo sapiens
  misc_RNA (1)...(19): siRNA sense strand
agaggacuuuaaacugaaa

SEQ ID NO: 2166229 - RNA, 19 nt, Homo sapiens
  misc_RNA (1)...(19): siRNA sense strand
cagagaggacuuuaaacug

SEQ ID NO: 2166230 - RNA, 19 nt, Homo sapiens
  misc_RNA (1)...(19): siRNA sense strand
cuaaugccuugaaucauac

SEQ ID NO: 2166231 - RNA, 19 nt, Homo sapiens
  misc_RNA (1)...(19): siRNA sense strand
aggaauagaguucauuuca

SEQ ID NO: 2166232 - RNA, 19 nt, Homo sapiens
  misc_RNA (1)...(19): siRNA sense strand
cuaggaauagaguucauuu

SEQ ID NO: 2166233 - RNA, 19 nt, Homo sapiens
  misc_RNA (1)...(19): siRNA sense strand
auggaaagccuauauggaa

SEQ ID NO: 2166234 - RNA, 19 nt, Homo sapiens
  misc_RNA (1)...(19): siRNA sense strand
gggaaucagggcaaaggaa

SEQ ID NO: 2166235 - RNA, 19 nt, Homo sapiens
  misc_RNA (1)...(19): siRNA sense strand
gcuaaucucacugccaaga

SEQ ID NO: 2166236 - RNA, 19 nt, Homo sapiens
  misc_RNA (1)...(19): siRNA sense strand
agaguucauuucagaagau

SEQ ID NO: 2166237 - RNA, 19 nt, Homo sapiens
  misc_RNA (1)...(19): siRNA sense strand
aauuaaagguggagcacau

SEQ ID NO: 2166238 - RNA, 19 nt, Homo sapiens
  misc_RNA (1)...(19): siRNA sense strand
gcacaguggaaauuaaagg

SEQ ID NO: 2166239 - RNA, 19 nt, Homo sapiens
  misc_RNA (1)...(19): siRNA sense strand
cacaggaagcucaguucua

SEQ ID NO: 2166240 - RNA, 19 nt, Homo sapiens
  misc_RNA (1)...(19): siRNA sense strand
gcaaacaguuaacgaauua

SEQ ID NO: 2166241 - RNA, 19 nt, Homo sapiens
  misc_RNA (1)...(19): siRNA sense strand
caaauccacugucuacaua

SEQ ID NO: 2166242 - RNA, 19 nt, Homo sapiens
  misc_RNA (1)...(19): siRNA sense strand
gaaccacgauguacauuca

SEQ ID NO: 2166243 - RNA, 19 nt, Homo sapiens
  misc_RNA (1)...(19): siRNA sense strand
uagcagagcugucaacuca

SEQ ID NO: 2166244 - RNA, 19 nt, Homo sapiens
  misc_RNA (1)...(19): siRNA sense strand
gaauucagccgaguucuua

SEQ ID NO: 2166245 - RNA, 19 nt, Homo sapiens
  misc_RNA (1)...(19): siRNA sense strand
ggagaaagaaaguguuuaa

SEQ ID NO: 2166246 - RNA, 19 nt, Homo sapiens
  misc_RNA (1)...(19): siRNA sense strand
gaacuacacucaguauaca

SEQ ID NO: 2166247 - RNA, 19 nt, Homo sapiens
  misc_RNA (1)...(19): siRNA sense strand
cgaauuacaugauccaaug

SEQ ID NO: 2166248 - RNA, 19 nt, Homo sapiens
  misc_RNA (1)...(19): siRNA sense strand
caucgucacuugccuguuu

SEQ ID NO: 2166249 - RNA, 19 nt, Homo sapiens
  misc_RNA (1)...(19): siRNA sense strand
ggaauauggcaaacaguua

SEQ ID NO: 2166250 - RNA, 19 nt, Homo sapiens
  misc_RNA (1)...(19): siRNA sense strand
ucacauggaagacuuauaa

SEQ ID NO: 2166251 - RNA, 19 nt, Homo sapiens
  misc_RNA (1)...(19): siRNA sense strand
gaauauggcaaacaguuaa

SEQ ID NO: 2166252 - RNA, 19 nt, Homo sapiens
  misc_RNA (1)...(19): siRNA sense strand
gcuaaagccaauucaaaua

SEQ ID NO: 2166253 - RNA, 19 nt, Homo sapiens
  misc_RNA (1)...(19): siRNA sense strand
ggaaaugugcggagauuau

SEQ ID NO: 2166254 - RNA, 19 nt, Homo sapiens
  misc_RNA (1)...(19): siRNA sense strand
gcaucgccauccuuuauuu

SEQ ID NO: 2166255 - RNA, 19 nt, Homo sapiens
  misc_RNA (1)...(19): siRNA sense strand
gaugcuggaugaccucuuu

SEQ ID NO: 2166256 - RNA, 19 nt, Homo sapiens
  misc_RNA (1)...(19): siRNA sense strand
aagacaagcuuucccauga

SEQ ID NO: 2166257 - RNA, 19 nt, Homo sapiens
  misc_RNA (1)...(19): siRNA sense strand
ugacauguguuguugaguu

SEQ ID NO: 2166258 - RNA, 19 nt, Homo sapiens
  misc_RNA (1)...(19): siRNA sense strand
ggcaaacaguuaacgaauu

SEQ ID NO: 2166259 - RNA, 19 nt, Homo sapiens
  misc_RNA (1)...(19): siRNA sense strand
ggacaaggacccucacaug

SEQ ID NO: 2166260 - RNA, 19 nt, Homo sapiens
  misc_RNA (1)...(19): siRNA sense strand
cagccgaguucuuaucuuu

SEQ ID NO: 2166261 - RNA, 19 nt, Homo sapiens
  misc_RNA (1)...(19): siRNA sense strand
ccuaaauucuucauuguug

SEQ ID NO: 2166262 - RNA, 19 nt, Homo sapiens
  misc_RNA (1)...(19): siRNA sense strand
cgaagaaugcccucuauga

SEQ ID NO: 2166263 - RNA, 19 nt, Homo sapiens
  misc_RNA (1)...(19): siRNA sense strand
gaucucagguugaaauuuu

SEQ ID NO: 2166264 - RNA, 19 nt, Homo sapiens
  misc_RNA (1)...(19): siRNA sense strand
gaucagaggaccuaaagug

SEQ ID NO: 2166265 - RNA, 19 nt, Homo sapiens
  misc_RNA (1)...(19): siRNA sense strand
gcccagaguugccacuaaa

SEQ ID NO: 2166266 - RNA, 19 nt, Homo sapiens
  misc_RNA (1)...(19): siRNA sense strand
cgauguacauucauaacaa

SEQ ID NO: 2166267 - RNA, 19 nt, Homo sapiens
  misc_RNA (1)...(19): siRNA sense strand
gaaaugugcggagauuauu

SEQ ID NO: 2166268 - RNA, 19 nt, Homo sapiens
  misc_RNA (1)...(19): siRNA sense strand
ugcauugacuuucguagua

SEQ ID NO: 2166269 - RNA, 19 nt, Homo sapiens
  misc_RNA (1)...(19): siRNA sense strand
ucaacucacuaccagaauu

SEQ ID NO: 2166270 - RNA, 19 nt, Homo sapiens
  misc_RNA (1)...(19): siRNA sense strand
gaagaaugcccucuaugag

SEQ ID NO: 2166271 - RNA, 19 nt, Homo sapiens
  misc_RNA (1)...(19): siRNA sense strand
cagaggaccuaaagugauc

SEQ ID NO: 2166272 - RNA, 19 nt, Homo sapiens
  misc_RNA (1)...(19): siRNA sense strand
uaaagucgaugguguagcu

SEQ ID NO: 2166273 - RNA, 19 nt, Homo sapiens
  misc_RNA (1)...(19): siRNA sense strand
gacauguguuguugaguug

SEQ ID NO: 2166274 - RNA, 19 nt, Homo sapiens
  misc_RNA (1)...(19): siRNA sense strand
cggaugaugaugugauuua

SEQ ID NO: 2166275 - RNA, 19 nt, Homo sapiens
  misc_RNA (1)...(19): siRNA sense strand
caccuuggccuuuguauau

SEQ ID NO: 2166276 - RNA, 19 nt, Homo sapiens
  misc_RNA (1)...(19): siRNA sense strand
gcagagcugucaacucacu

SEQ ID NO: 2166277 - RNA, 19 nt, Homo sapiens
  misc_RNA (1)...(19): siRNA sense strand
cagcacaacucagcucuca

SEQ ID NO: 2166278 - RNA, 19 nt, Homo sapiens
  misc_RNA (1)...(19): siRNA sense strand
ggaugaugaugugauuuau

SEQ ID NO: 2166279 - RNA, 19 nt, Homo sapiens
  misc_RNA (1)...(19): siRNA sense strand
agacuucugcggcuaauuu

SEQ ID NO: 2166280 - RNA, 19 nt, Homo sapiens
  misc_RNA (1)...(19): siRNA sense strand
gcaaguacuacaagacaau

SEQ ID NO: 2166281 - RNA, 19 nt, Homo sapiens
  misc_RNA (1)...(19): siRNA sense strand
gacaaggacccucacaugu

SEQ ID NO: 2166282 - RNA, 19 nt, Homo sapiens
  misc_RNA (1)...(19): siRNA sense strand
gaguugauaccggaaauuu

SEQ ID NO: 2166283 - RNA, 19 nt, Homo sapiens
  misc_RNA (1)...(19): siRNA sense strand
gaaaucugguuccgguuuu

SEQ ID NO: 2166284 - RNA, 19 nt, Homo sapiens
  misc_RNA (1)...(19): siRNA sense strand
ccucacaugugcagggaaa

SEQ ID NO: 2166285 - RNA, 19 nt, Homo sapiens
  misc_RNA (1)...(19): siRNA sense strand
ucuauggccuguugaacuu

SEQ ID NO: 2166286 - RNA, 19 nt, Homo sapiens
  misc_RNA (1)...(19): siRNA sense strand
uagcaucgccauccuuuau

SEQ ID NO: 2166287 - RNA, 19 nt, Homo sapiens
  misc_RNA (1)...(19): siRNA sense strand
caagauggaaccacgaugu

SEQ ID NO: 2166288 - RNA, 19 nt, Homo sapiens
  misc_RNA (1)...(19): siRNA sense strand
ugaaugacucggaugauga

SEQ ID NO: 2166289 - RNA, 19 nt, Homo sapiens
  misc_RNA (1)...(19): siRNA sense strand
guaccaguaucgaguugau

SEQ ID NO: 2166290 - RNA, 19 nt, Homo sapiens
  misc_RNA (1)...(19): siRNA sense strand
guuaacgaauuacaugauc

SEQ ID NO: 2166291 - RNA, 19 nt, Homo sapiens
  misc_RNA (1)...(19): siRNA sense strand
cuucauuguuggacuauug

SEQ ID NO: 2166292 - RNA, 19 nt, Homo sapiens
  misc_RNA (1)...(19): siRNA sense strand
gggcgcaaguacuacaaga

SEQ ID NO: 2166293 - RNA, 19 nt, Homo sapiens
  misc_RNA (1)...(19): siRNA sense strand
gggagugacuaugaggaaa

SEQ ID NO: 2166294 - RNA, 19 nt, Homo sapiens
  misc_RNA (1)...(19): siRNA sense strand
ugacucggaugaugaugug

SEQ ID NO: 2166295 - RNA, 19 nt, Homo sapiens
  misc_RNA (1)...(19): siRNA sense strand
ccgaguacccugccuuuga

SEQ ID NO: 2166296 - RNA, 19 nt, Homo sapiens
  misc_RNA (1)...(19): siRNA sense strand
aagcuaaagccaauucaaa

SEQ ID NO: 2166297 - RNA, 19 nt, Homo sapiens
  misc_RNA (1)...(19): siRNA sense strand
gauccaauguaccaguauc

SEQ ID NO: 2166298 - RNA, 19 nt, Homo sapiens
  misc_RNA (1)...(19): siRNA sense strand
guucacaaccggacaagga

SEQ ID NO: 2166299 - RNA, 19 nt, Homo sapiens
  misc_RNA (1)...(19): siRNA sense strand
gcuguacgaccuuguguug

SEQ ID NO: 2166300 - RNA, 19 nt, Homo sapiens
  misc_RNA (1)...(19): siRNA sense strand
ccacuuuguccucguguuu

SEQ ID NO: 2166301 - RNA, 19 nt, Homo sapiens
  misc_RNA (1)...(19): siRNA sense strand
gagugacuaugaggaaaug

SEQ ID NO: 2166302 - RNA, 19 nt, Homo sapiens
  misc_RNA (1)...(19): siRNA sense strand
ugguguagcucaagaugga

SEQ ID NO: 2166303 - RNA, 19 nt, Homo sapiens
  misc_RNA (1)...(19): siRNA sense strand
gaaugacucggaugaugau

SEQ ID NO: 2166304 - RNA, 19 nt, Homo sapiens
  misc_RNA (1)...(19): siRNA sense strand
guaccucuuguucuugaua

SEQ ID NO: 2166305 - RNA, 19 nt, Homo sapiens
  misc_RNA (1)...(19): siRNA sense strand
gcagcgguguacauucugu

SEQ ID NO: 2166306 - RNA, 19 nt, Homo sapiens
  misc_RNA (1)...(19): siRNA sense strand
gcugacauguguuguugag

SEQ ID NO: 2166307 - RNA, 19 nt, Homo sapiens
  misc_RNA (1)...(19): siRNA sense strand
caacucacuaccagaauuc

SEQ ID NO: 2166308 - RNA, 19 nt, Homo sapiens
  misc_RNA (1)...(19): siRNA sense strand
uugccuaaauucuucauug

SEQ ID NO: 2166309 - RNA, 19 nt, Homo sapiens
  misc_RNA (1)...(19): siRNA sense strand
ugccucugcugcuacuuua

SEQ ID NO: 2166310 - RNA, 19 nt, Homo sapiens
  misc_RNA (1)...(19): siRNA sense strand
ccacgauguacauucauaa

SEQ ID NO: 2166311 - RNA, 19 nt, Homo sapiens
  misc_RNA (1)...(19): siRNA sense strand
ugaguuggaucaaucaaaa

SEQ ID NO: 2166312 - RNA, 19 nt, Homo sapiens
  misc_RNA (1)...(19): siRNA sense strand
cgaguacccugccuuugag

SEQ ID NO: 2166313 - RNA, 19 nt, Homo sapiens
  misc_RNA (1)...(19): siRNA sense strand
caacuauggcugacaugug

SEQ ID NO: 2166314 - RNA, 19 nt, Homo sapiens
  misc_RNA (1)...(19): siRNA sense strand
ggagugacuaugaggaaau

SEQ ID NO: 2166315 - RNA, 19 nt, Homo sapiens
  misc_RNA (1)...(19): siRNA sense strand
uuacaaugauccguucuuc

SEQ ID NO: 2166316 - RNA, 19 nt, Homo sapiens
  misc_RNA (1)...(19): siRNA sense strand
gcuuuggccugaccaucuu

SEQ ID NO: 2166317 - RNA, 19 nt, Homo sapiens
  misc_RNA (1)...(19): siRNA sense strand
acaaggacccucacaugug

SEQ ID NO: 2166318 - RNA, 19 nt, Homo sapiens
  misc_RNA (1)...(19): siRNA sense strand
gcuuucccaugacuguuaa

SEQ ID NO: 2166319 - RNA, 19 nt, Homo sapiens
  misc_RNA (1)...(19): siRNA sense strand
uacauacaaucagcaacua

SEQ ID NO: 2166320 - RNA, 19 nt, Homo sapiens
  misc_RNA (1)...(19): siRNA sense strand
caucgaagaaugcccucua

SEQ ID NO: 2166321 - RNA, 19 nt, Homo sapiens
  misc_RNA (1)...(19): siRNA sense strand
gcgcaaguacuacaagaca

SEQ ID NO: 2166322 - RNA, 19 nt, Homo sapiens
  misc_RNA (1)...(19): siRNA sense strand
gggagaaagaaaguguuua

SEQ ID NO: 2166323 - RNA, 19 nt, Homo sapiens
  misc_RNA (1)...(19): siRNA sense strand
ucaccuucaucgucacuug

SEQ ID NO: 2166324 - RNA, 19 nt, Homo sapiens
  misc_RNA (1)...(19): siRNA sense strand
uggcugacauguguuguug

SEQ ID NO: 2166325 - RNA, 19 nt, Homo sapiens
  misc_RNA (1)...(19): siRNA sense strand
ucaaauccacugucuacau

SEQ ID NO: 2166326 - RNA, 19 nt, Homo sapiens
  misc_RNA (1)...(19): siRNA sense strand
gaugaugaugugauuuaug

SEQ ID NO: 2166327 - RNA, 19 nt, Homo sapiens
  misc_RNA (1)...(19): siRNA sense strand
caucuucguugggaucaga

SEQ ID NO: 2166328 - RNA, 19 nt, Homo sapiens
  misc_RNA (1)...(19): siRNA sense strand
gcauugacuuucguaguac

SEQ ID NO: 2166329 - RNA, 19 nt, Homo sapiens
  misc_RNA (1)...(19): siRNA sense strand
cuaggaauauggcaaacag

SEQ ID NO: 2166330 - RNA, 19 nt, Homo sapiens
  misc_RNA (1)...(19): siRNA sense strand
auacagugauagugggauu

SEQ ID NO: 2166331 - RNA, 19 nt, Homo sapiens
  misc_RNA (1)...(19): siRNA sense strand
ggaaccacgauguacauuc

SEQ ID NO: 2166332 - RNA, 19 nt, Homo sapiens
  misc_RNA (1)...(19): siRNA sense strand
aacuauggcugacaugugu

SEQ ID NO: 2166333 - RNA, 19 nt, Homo sapiens
  misc_RNA (1)...(19): siRNA sense strand
gggaaaugugcggagauua

SEQ ID NO: 2166334 - RNA, 19 nt, Homo sapiens
  misc_RNA (1)...(19): siRNA sense strand
cugaaugacucggaugaug

SEQ ID NO: 2166335 - RNA, 19 nt, Homo sapiens
  misc_RNA (1)...(19): siRNA sense strand
gccgaguucuuaucuuucu

SEQ ID NO: 2166336 - RNA, 19 nt, Homo sapiens
  misc_RNA (1)...(19): siRNA sense strand
uggcagcgguguacauucu

SEQ ID NO: 2166337 - RNA, 19 nt, Homo sapiens
  misc_RNA (1)...(19): siRNA sense strand
gcaucgagcagaaguggau

SEQ ID NO: 2166338 - RNA, 19 nt, Homo sapiens
  misc_RNA (1)...(19): siRNA sense strand
ugaacuacacucaguauac

SEQ ID NO: 2166339 - RNA, 19 nt, Homo sapiens
  misc_RNA (1)...(19): siRNA sense strand
acaaggaggagucagauag

SEQ ID NO: 2166340 - RNA, 19 nt, Homo sapiens
  misc_RNA (1)...(19): siRNA sense strand
guacagagaugggcaauuu

SEQ ID NO: 2166341 - RNA, 19 nt, Homo sapiens
  misc_RNA (1)...(19): siRNA sense strand
uaaugucacuggagaaaua

SEQ ID NO: 2166342 - RNA, 19 nt, Homo sapiens
  misc_RNA (1)...(19): siRNA sense strand
ggacagacaugacucuugu

SEQ ID NO: 2166343 - RNA, 19 nt, Homo sapiens
  misc_RNA (1)...(19): siRNA sense strand
guaagaaccuugccuaugg

SEQ ID NO: 2166344 - RNA, 19 nt, Homo sapiens
  misc_RNA (1)...(19): siRNA sense strand
ggaacgagccaagaaauuu

SEQ ID NO: 2166345 - RNA, 19 nt, Homo sapiens
  misc_RNA (1)...(19): siRNA sense strand
gaagacagcguuccucaga

SEQ ID NO: 2166346 - RNA, 19 nt, Homo sapiens
  misc_RNA (1)...(19): siRNA sense strand
gaucagccaucacuucaug

SEQ ID NO: 2166347 - RNA, 19 nt, Homo sapiens
  misc_RNA (1)...(19): siRNA sense strand
gcuaggagccaagaauuua

SEQ ID NO: 2166348 - RNA, 19 nt, Homo sapiens
  misc_RNA (1)...(19): siRNA sense strand
ugaaaccucucaaucaaga

SEQ ID NO: 2166349 - RNA, 19 nt, Homo sapiens
  misc_RNA (1)...(19): siRNA sense strand
gaucccaaaugcucuacua

SEQ ID NO: 2166350 - RNA, 19 nt, Homo sapiens
  misc_RNA (1)...(19): siRNA sense strand
gggcagcucuugcaaucuu

SEQ ID NO: 2166351 - RNA, 19 nt, Homo sapiens
  misc_RNA (1)...(19): siRNA sense strand
gaagacagcacaacacagu

SEQ ID NO: 2166352 - RNA, 19 nt, Homo sapiens
  misc_RNA (1)...(19): siRNA sense strand
agacacggaaguuuaauua

SEQ ID NO: 2166353 - RNA, 19 nt, Homo sapiens
  misc_RNA (1)...(19): siRNA sense strand
gagggcagcucuugcaauc

SEQ ID NO: 2166354 - RNA, 19 nt, Homo sapiens
  misc_RNA (1)...(19): siRNA sense strand
gggccaaggcggagaaaua

SEQ ID NO: 2166355 - RNA, 19 nt, Homo sapiens
  misc_RNA (1)...(19): siRNA sense strand
ggaauuuggucaguuuaga

SEQ ID NO: 2166356 - RNA, 19 nt, Homo sapiens
  misc_RNA (1)...(19): siRNA sense strand
gaaccuugccuauggagaa

SEQ ID NO: 2166357 - RNA, 19 nt, Homo sapiens
  misc_RNA (1)...(19): siRNA sense strand
gaucaggcccucuuuggaa

SEQ ID NO: 2166358 - RNA, 19 nt, Homo sapiens
  misc_RNA (1)...(19): siRNA sense strand
aaacacaccugcagcaucu

SEQ ID NO: 2166359 - RNA, 19 nt, Homo sapiens
  misc_RNA (1)...(19): siRNA sense strand
gaaacacucauuugucuuc

SEQ ID NO: 2166360 - RNA, 19 nt, Homo sapiens
  misc_RNA (1)...(19): siRNA sense strand
gaaggucagugcaccagau

SEQ ID NO: 2166361 - RNA, 19 nt, Homo sapiens
  misc_RNA (1)...(19): siRNA sense strand
gagaggacacggaaacuga

SEQ ID NO: 2166362 - RNA, 19 nt, Homo sapiens
  misc_RNA (1)...(19): siRNA sense strand
gccaagaaauuuccaacug

SEQ ID NO: 2166363 - RNA, 19 nt, Homo sapiens
  misc_RNA (1)...(19): siRNA sense strand
ccaaaucccagaaugauau

SEQ ID NO: 2166364 - RNA, 19 nt, Homo sapiens
  misc_RNA (1)...(19): siRNA sense strand
acaggaauuuggucaguuu

SEQ ID NO: 2166365 - RNA, 19 nt, Homo sapiens
  misc_RNA (1)...(19): siRNA sense strand
gaacgagccaagaaauuuc

SEQ ID NO: 2166366 - RNA, 19 nt, Homo sapiens
  misc_RNA (1)...(19): siRNA sense strand
gcagucaagcuuggaguua

SEQ ID NO: 2166367 - RNA, 19 nt, Homo sapiens
  misc_RNA (1)...(19): siRNA sense strand
caggagaccuugaaguauc

SEQ ID NO: 2166368 - RNA, 19 nt, Homo sapiens
  misc_RNA (1)...(19): siRNA sense strand
ucugaaaccucucaaucaa

SEQ ID NO: 2166369 - RNA, 19 nt, Homo sapiens
  misc_RNA (1)...(19): siRNA sense strand
accuugaacucauuuguua

SEQ ID NO: 2166370 - RNA, 19 nt, Homo sapiens
  misc_RNA (1)...(19): siRNA sense strand
ggacagaucagccaucacu

SEQ ID NO: 2166371 - RNA, 19 nt, Homo sapiens
  misc_RNA (1)...(19): siRNA sense strand
ucaagaggaucccaaaugc

SEQ ID NO: 2166372 - RNA, 19 nt, Homo sapiens
  misc_RNA (1)...(19): siRNA sense strand
ggaaguuuaauuagcauug

SEQ ID NO: 2166373 - RNA, 19 nt, Homo sapiens
  misc_RNA (1)...(19): siRNA sense strand
gagcaaaauuucugugguu

SEQ ID NO: 2166374 - RNA, 19 nt, Homo sapiens
  misc_RNA (1)...(19): siRNA sense strand
ggucagugcaccagauauu

SEQ ID NO: 2166375 - RNA, 19 nt, Homo sapiens
  misc_RNA (1)...(19): siRNA sense strand
caacuggaggcaaacauga

SEQ ID NO: 2166376 - RNA, 19 nt, Homo sapiens
  misc_RNA (1)...(19): siRNA sense strand
uaagaaccuugccuaugga

SEQ ID NO: 2166377 - RNA, 19 nt, Homo sapiens
  misc_RNA (1)...(19): siRNA sense strand
uggaaacacucauuugucu

SEQ ID NO: 2166378 - RNA, 19 nt, Homo sapiens
  misc_RNA (1)...(19): siRNA sense strand
cagucaagcuuggaguuaa

SEQ ID NO: 2166379 - RNA, 19 nt, Homo sapiens
  misc_RNA (1)...(19): siRNA sense strand
gcuaaugucacuggagaaa

SEQ ID NO: 2166380 - RNA, 19 nt, Homo sapiens
  misc_RNA (1)...(19): siRNA sense strand
gauggcaccuugaacucau

SEQ ID NO: 2166381 - RNA, 19 nt, Homo sapiens
  misc_RNA (1)...(19): siRNA sense strand
gaggaacgagccaagaaau

SEQ ID NO: 2166382 - RNA, 19 nt, Homo sapiens
  misc_RNA (1)...(19): siRNA sense strand
cauauucucuggagguuuu

SEQ ID NO: 2166383 - RNA, 19 nt, Homo sapiens
  misc_RNA (1)...(19): siRNA sense strand
caucaaggccuguaagaac

SEQ ID NO: 2166384 - RNA, 19 nt, Homo sapiens
  misc_RNA (1)...(19): siRNA sense strand
gaugcaugcucacuaucga

SEQ ID NO: 2166385 - RNA, 19 nt, Homo sapiens
  misc_RNA (1)...(19): siRNA sense strand
agacagcguuccucagagu

SEQ ID NO: 2166386 - RNA, 19 nt, Homo sapiens
  misc_RNA (1)...(19): siRNA sense strand
ggacugggagcacaaagag

SEQ ID NO: 2166387 - RNA, 19 nt, Homo sapiens
  misc_RNA (1)...(19): siRNA sense strand
ggcagcucuugcaaucuua

SEQ ID NO: 2166388 - RNA, 19 nt, Homo sapiens
  misc_RNA (1)...(19): siRNA sense strand
gcccggagaguguuucuug

SEQ ID NO: 2166389 - RNA, 19 nt, Homo sapiens
  misc_RNA (1)...(19): siRNA sense strand
gcaucaaggccuguaagaa

SEQ ID NO: 2166390 - RNA, 19 nt, Homo sapiens
  misc_RNA (1)...(19): siRNA sense strand
cacggaaguuuaauuagca

SEQ ID NO: 2166391 - RNA, 19 nt, Homo sapiens
  misc_RNA (1)...(19): siRNA sense strand
acacggaaguuuaauuagc

SEQ ID NO: 2166392 - RNA, 19 nt, Homo sapiens
  misc_RNA (1)...(19): siRNA sense strand
ccacgugggacuuugaaga

SEQ ID NO: 2166393 - RNA, 19 nt, Homo sapiens
  misc_RNA (1)...(19): siRNA sense strand
uuuaauaaguccguggaaa

SEQ ID NO: 2166394 - RNA, 19 nt, Homo sapiens
  misc_RNA (1)...(19): siRNA sense strand
gaacgaccgcuugcuugga

SEQ ID NO: 2166395 - RNA, 19 nt, Homo sapiens
  misc_RNA (1)...(19): siRNA sense strand
ggaaaggagcgaagaacac

SEQ ID NO: 2166396 - RNA, 19 nt, Homo sapiens
  misc_RNA (1)...(19): siRNA sense strand
ggaaacacucauuugucuu

SEQ ID NO: 2166397 - RNA, 19 nt, Homo sapiens
  misc_RNA (1)...(19): siRNA sense strand
cuucaaaacccauucuuua

SEQ ID NO: 2166398 - RNA, 19 nt, Homo sapiens
  misc_RNA (1)...(19): siRNA sense strand
aggcaaacaugagacaguu

SEQ ID NO: 2166399 - RNA, 19 nt, Homo sapiens
  misc_RNA (1)...(19): siRNA sense strand
ggaucaggcccucuuugga

SEQ ID NO: 2166400 - RNA, 19 nt, Homo sapiens
  misc_RNA (1)...(19): siRNA sense strand
ucacuucauggucaacuuu

SEQ ID NO: 2166401 - RNA, 19 nt, Homo sapiens
  misc_RNA (1)...(19): siRNA sense strand
caacagaaucucccaucca

SEQ ID NO: 2166402 - RNA, 19 nt, Homo sapiens
  misc_RNA (1)...(19): siRNA sense strand
caaucaagaggaucccaaa

SEQ ID NO: 2166403 - RNA, 19 nt, Homo sapiens
  misc_RNA (1)...(19): siRNA sense strand
gaggacacggaaacugaaa

SEQ ID NO: 2166404 - RNA, 19 nt, Homo sapiens
  misc_RNA (1)...(19): siRNA sense strand
uaagcugguucucccuuca

SEQ ID NO: 2166405 - RNA, 19 nt, Homo sapiens
  misc_RNA (1)...(19): siRNA sense strand
gcggagaaauacgaagaca

SEQ ID NO: 2166406 - RNA, 19 nt, Homo sapiens
  misc_RNA (1)...(19): siRNA sense strand
cagcaccuguacagagaug

SEQ ID NO: 2166407 - RNA, 19 nt, Homo sapiens
  misc_RNA (1)...(19): siRNA sense strand
gaggaucccaaaugcucua

SEQ ID NO: 2166408 - RNA, 19 nt, Homo sapiens
  misc_RNA (1)...(19): siRNA sense strand
auaaguccguggaaaauuu

SEQ ID NO: 2166409 - RNA, 19 nt, Homo sapiens
  misc_RNA (1)...(19): siRNA sense strand
acacucauuugucuucagu

SEQ ID NO: 2166410 - RNA, 19 nt, Homo sapiens
  misc_RNA (1)...(19): siRNA sense strand
gugcuaggagccaagaauu

SEQ ID NO: 2166411 - RNA, 19 nt, Homo sapiens
  misc_RNA (1)...(19): siRNA sense strand
ugugaagaccuaccuguug

SEQ ID NO: 2166412 - RNA, 19 nt, Homo sapiens
  misc_RNA (1)...(19): siRNA sense strand
cagcaucuccgguggaaag

SEQ ID NO: 2166413 - RNA, 19 nt, Homo sapiens
  misc_RNA (1)...(19): siRNA sense strand
ugaggaacgagccaagaaa

SEQ ID NO: 2166414 - RNA, 19 nt, Homo sapiens
  misc_RNA (1)...(19): siRNA sense strand
gaggagaggacacggaaac

SEQ ID NO: 2166415 - RNA, 19 nt, Homo sapiens
  misc_RNA (1)...(19): siRNA sense strand
gcaccuugaacucauuugu

SEQ ID NO: 2166416 - RNA, 19 nt, Homo sapiens
  misc_RNA (1)...(19): siRNA sense strand
cagaucagccaucacuuca

SEQ ID NO: 2166417 - RNA, 19 nt, Homo sapiens
  misc_RNA (1)...(19): siRNA sense strand
ggagggcagcucuugcaau

SEQ ID NO: 2166418 - RNA, 19 nt, Homo sapiens
  misc_RNA (1)...(19): siRNA sense strand
cccaaucuauggacagaca

SEQ ID NO: 2166419 - RNA, 19 nt, Homo sapiens
  misc_RNA (1)...(19): siRNA sense strand
ccaaggcggagaaauacga

SEQ ID NO: 2166420 - RNA, 19 nt, Homo sapiens
  misc_RNA (1)...(19): siRNA sense strand
gauauucugaaaccucuca

SEQ ID NO: 2166421 - RNA, 19 nt, Homo sapiens
  misc_RNA (1)...(19): siRNA sense strand
gaauuuggucaguuuagag

SEQ ID NO: 2166422 - RNA, 19 nt, Homo sapiens
  misc_RNA (1)...(19): siRNA sense strand
uuacaggaauuuggucagu

SEQ ID NO: 2166423 - RNA, 19 nt, Homo sapiens
  misc_RNA (1)...(19): siRNA sense strand
ggucaguuuagaggauuua

SEQ ID NO: 2166424 - RNA, 19 nt, Homo sapiens
  misc_RNA (1)...(19): siRNA sense strand
ggagaggacacggaaacug

SEQ ID NO: 2166425 - RNA, 19 nt, Homo sapiens
  misc_RNA (1)...(19): siRNA sense strand
cuugcaaucuuaucagaag

SEQ ID NO: 2166426 - RNA, 19 nt, Homo sapiens
  misc_RNA (1)...(19): siRNA sense strand
aaagggagacacagcuguu

SEQ ID NO: 2166427 - RNA, 19 nt, Homo sapiens
  misc_RNA (1)...(19): siRNA sense strand
caggcccucuuuggaauga

SEQ ID NO: 2166428 - RNA, 19 nt, Homo sapiens
  misc_RNA (1)...(19): siRNA sense strand
ccagauggcaccuugaacu

SEQ ID NO: 2166429 - RNA, 19 nt, Homo sapiens
  misc_RNA (1)...(19): siRNA sense strand
ucacuggagaaauagaauu

SEQ ID NO: 2166430 - RNA, 19 nt, Homo sapiens
  misc_RNA (1)...(19): siRNA sense strand
uuuagacacggaaguuuaa

SEQ ID NO: 2166431 - RNA, 19 nt, Homo sapiens
  misc_RNA (1)...(19): siRNA sense strand
cuacuaacccuauuuugaa

SEQ ID NO: 2166432 - RNA, 19 nt, Homo sapiens
  misc_RNA (1)...(19): siRNA sense strand
gaggcaaacaugagacagu

SEQ ID NO: 2166433 - RNA, 19 nt, Homo sapiens
  misc_RNA (1)...(19): siRNA sense strand
aaugauaugacuucugaga

SEQ ID NO: 2166434 - RNA, 19 nt, Homo sapiens
  misc_RNA (1)...(19): siRNA sense strand
ccaagaaauagaucugagu

SEQ ID NO: 2166435 - RNA, 19 nt, Homo sapiens
  misc_RNA (1)...(19): siRNA sense strand
ccaacuggaggcaaacaug

SEQ ID NO: 2166436 - RNA, 19 nt, Homo sapiens
  misc_RNA (1)...(19): siRNA sense strand
ucaggagaccuugaaguau

SEQ ID NO: 2166437 - RNA, 19 nt, Homo sapiens
  misc_RNA (1)...(19): siRNA sense strand
aaagugcaauccguaugug

SEQ ID NO: 2166438 - RNA, 19 nt, Homo sapiens
  misc_RNA (1)...(19): siRNA sense strand
gaugggcaauuuugacaau

SEQ ID NO: 2166439 - RNA, 19 nt, Homo sapiens
  misc_RNA (1)...(19): siRNA sense strand
gaagcuccaguggcagaaa

SEQ ID NO: 2166440 - RNA, 19 nt, Homo sapiens
  misc_RNA (1)...(19): siRNA sense strand
gaagguaccuccaagauuc

SEQ ID NO: 2166441 - RNA, 19 nt, Homo sapiens
  misc_RNA (1)...(19): siRNA sense strand
ggaagaggccuacguuaua

SEQ ID NO: 2166442 - RNA, 19 nt, Homo sapiens
  misc_RNA (1)...(19): siRNA sense strand
guaauucacugagguauaa

SEQ ID NO: 2166443 - RNA, 19 nt, Homo sapiens
  misc_RNA (1)...(19): siRNA sense strand
gaacagggccucaguccua

SEQ ID NO: 2166444 - RNA, 19 nt, Homo sapiens
  misc_RNA (1)...(19): siRNA sense strand
gaagaggccuacguuauau

SEQ ID NO: 2166445 - RNA, 19 nt, Homo sapiens
  misc_RNA (1)...(19): siRNA sense strand
ggacagagaauuaucaaug

SEQ ID NO: 2166446 - RNA, 19 nt, Homo sapiens
  misc_RNA (1)...(19): siRNA sense strand
ugacguaccuaaauaaaga

SEQ ID NO: 2166447 - RNA, 19 nt, Homo sapiens
  misc_RNA (1)...(19): siRNA sense strand
ggaccuugaucguggguua

SEQ ID NO: 2166448 - RNA, 19 nt, Homo sapiens
  misc_RNA (1)...(19): siRNA sense strand
ggaaggaaacgauuuguug

SEQ ID NO: 2166449 - RNA, 19 nt, Homo sapiens
  misc_RNA (1)...(19): siRNA sense strand
ggucacagguuacuugguu

SEQ ID NO: 2166450 - RNA, 19 nt, Homo sapiens
  misc_RNA (1)...(19): siRNA sense strand
guaacucacuugcccauug

SEQ ID NO: 2166451 - RNA, 19 nt, Homo sapiens
  misc_RNA (1)...(19): siRNA sense strand
ccaaugaccugaagaagag

SEQ ID NO: 2166452 - RNA, 19 nt, Homo sapiens
  misc_RNA (1)...(19): siRNA sense strand
gaucguggguuaguauuga

SEQ ID NO: 2166453 - RNA, 19 nt, Homo sapiens
  misc_RNA (1)...(19): siRNA sense strand
gauggcaaccugauaauga

SEQ ID NO: 2166454 - RNA, 19 nt, Homo sapiens
  misc_RNA (1)...(19): siRNA sense strand
gcacaccucuggccaaugc

SEQ ID NO: 2166455 - RNA, 19 nt, Homo sapiens
  misc_RNA (1)...(19): siRNA sense strand
uagaagcccucccuacuau

SEQ ID NO: 2166456 - RNA, 19 nt, Homo sapiens
  misc_RNA (1)...(19): siRNA sense strand
gaugaugcaugccagauuc

SEQ ID NO: 2166457 - RNA, 19 nt, Homo sapiens
  misc_RNA (1)...(19): siRNA sense strand
gaugauggcaaccugauaa

SEQ ID NO: 2166458 - RNA, 19 nt, Homo sapiens
  misc_RNA (1)...(19): siRNA sense strand
gggaagaggugaagaccau

SEQ ID NO: 2166459 - RNA, 19 nt, Homo sapiens
  misc_RNA (1)...(19): siRNA sense strand
ccgaauggacagagaauua

SEQ ID NO: 2166460 - RNA, 19 nt, Homo sapiens
  misc_RNA (1)...(19): siRNA sense strand
gugcuacgcugaagaagau

SEQ ID NO: 2166461 - RNA, 19 nt, Homo sapiens
  misc_RNA (1)...(19): siRNA sense strand
uaacucacuugcccauuga

SEQ ID NO: 2166462 - RNA, 19 nt, Homo sapiens
  misc_RNA (1)...(19): siRNA sense strand
ggaagguaccuccaagauu

SEQ ID NO: 2166463 - RNA, 19 nt, Homo sapiens
  misc_RNA (1)...(19): siRNA sense strand
gaagguugccacucauuug

SEQ ID NO: 2166464 - RNA, 19 nt, Homo sapiens
  misc_RNA (1)...(19): siRNA sense strand
ggaguuguucuuuguaauu

SEQ ID NO: 2166465 - RNA, 19 nt, Homo sapiens
  misc_RNA (1)...(19): siRNA sense strand
gacagagaauuaucaaugg

SEQ ID NO: 2166466 - RNA, 19 nt, Homo sapiens
  misc_RNA (1)...(19): siRNA sense strand
gaaaguccuuccugguagu

SEQ ID NO: 2166467 - RNA, 19 nt, Homo sapiens
  misc_RNA (1)...(19): siRNA sense strand
gauacauucuacagcauug

SEQ ID NO: 2166468 - RNA, 19 nt, Homo sapiens
  misc_RNA (1)...(19): siRNA sense strand
ccaacacgagguauuauuu

SEQ ID NO: 2166469 - RNA, 19 nt, Homo sapiens
  misc_RNA (1)...(19): siRNA sense strand
ggaagguugccacucauuu

SEQ ID NO: 2166470 - RNA, 19 nt, Homo sapiens
  misc_RNA (1)...(19): siRNA sense strand
cacucaagcuucaucagua

SEQ ID NO: 2166471 - RNA, 19 nt, Homo sapiens
  misc_RNA (1)...(19): siRNA sense strand
uauaauggcagaccaaaug

SEQ ID NO: 2166472 - RNA, 19 nt, Homo sapiens
  misc_RNA (1)...(19): siRNA sense strand
gauaauccucugcuuguug

SEQ ID NO: 2166473 - RNA, 19 nt, Homo sapiens
  misc_RNA (1)...(19): siRNA sense strand
gaggaaggcgccaucaguu

SEQ ID NO: 2166474 - RNA, 19 nt, Homo sapiens
  misc_RNA (1)...(19): siRNA sense strand
gaagaggugaagaccauug

SEQ ID NO: 2166475 - RNA, 19 nt, Homo sapiens
  misc_RNA (1)...(19): siRNA sense strand
caauggcccucaaggaaca

SEQ ID NO: 2166476 - RNA, 19 nt, Homo sapiens
  misc_RNA (1)...(19): siRNA sense strand
gaagcccucccuacuauuc

SEQ ID NO: 2166477 - RNA, 19 nt, Homo sapiens
  misc_RNA (1)...(19): siRNA sense strand
gugacaaccugaaagauac

SEQ ID NO: 2166478 - RNA, 19 nt, Homo sapiens
  misc_RNA (1)...(19): siRNA sense strand
aggccuacguuauauauga

SEQ ID NO: 2166479 - RNA, 19 nt, Homo sapiens
  misc_RNA (1)...(19): siRNA sense strand
gcccuucggucucauuugu

SEQ ID NO: 2166480 - RNA, 19 nt, Homo sapiens
  misc_RNA (1)...(19): siRNA sense strand
acucaagcuucaucaguaa

SEQ ID NO: 2166481 - RNA, 19 nt, Homo sapiens
  misc_RNA (1)...(19): siRNA sense strand
ccacucauuugucauugug

SEQ ID NO: 2166482 - RNA, 19 nt, Homo sapiens
  misc_RNA (1)...(19): siRNA sense strand
ccugaaagauacauucuac

SEQ ID NO: 2166483 - RNA, 19 nt, Homo sapiens
  misc_RNA (1)...(19): siRNA sense strand
gaguuguucuuuguaauuc

SEQ ID NO: 2166484 - RNA, 19 nt, Homo sapiens
  misc_RNA (1)...(19): siRNA sense strand
gaaaguucgugggaguugu

SEQ ID NO: 2166485 - RNA, 19 nt, Homo sapiens
  misc_RNA (1)...(19): siRNA sense strand
ucacagguuacuugguuua

SEQ ID NO: 2166486 - RNA, 19 nt, Homo sapiens
  misc_RNA (1)...(19): siRNA sense strand
ugaucuggcuggaaggaaa

SEQ ID NO: 2166487 - RNA, 19 nt, Homo sapiens
  misc_RNA (1)...(19): siRNA sense strand
caagauaagccaauuuuga

SEQ ID NO: 2166488 - RNA, 19 nt, Homo sapiens
  misc_RNA (1)...(19): siRNA sense strand
ccucauggcuacggaccua

SEQ ID NO: 2166489 - RNA, 19 nt, Homo sapiens
  misc_RNA (1)...(19): siRNA sense strand
agugacaaccugaaagaua

SEQ ID NO: 2166490 - RNA, 19 nt, Homo sapiens
  misc_RNA (1)...(19): siRNA sense strand
cccauucgcuuucaaacau

SEQ ID NO: 2166491 - RNA, 19 nt, Homo sapiens
  misc_RNA (1)...(19): siRNA sense strand
gcggugagccuaucuggau

SEQ ID NO: 2166492 - RNA, 19 nt, Homo sapiens
  misc_RNA (1)...(19): siRNA sense strand
uaucagcccuucggucuca

SEQ ID NO: 2166493 - RNA, 19 nt, Homo sapiens
  misc_RNA (1)...(19): siRNA sense strand
gggcuuggaggucaucaaa

SEQ ID NO: 2166494 - RNA, 19 nt, Homo sapiens
  misc_RNA (1)...(19): siRNA sense strand
ugggaguuguucuuuguaa

SEQ ID NO: 2166495 - RNA, 19 nt, Homo sapiens
  misc_RNA (1)...(19): siRNA sense strand
ggacagccuggaugaaauc

SEQ ID NO: 2166496 - RNA, 19 nt, Homo sapiens
  misc_RNA (1)...(19): siRNA sense strand
cggaagaggccuacguuau

SEQ ID NO: 2166497 - RNA, 19 nt, Homo sapiens
  misc_RNA (1)...(19): siRNA sense strand
ggaugaugcaugccagauu

SEQ ID NO: 2166498 - RNA, 19 nt, Homo sapiens
  misc_RNA (1)...(19): siRNA sense strand
ggaagaacagggccucagu

SEQ ID NO: 2166499 - RNA, 19 nt, Homo sapiens
  misc_RNA (1)...(19): siRNA sense strand
ucaaacaugaucccagcua

SEQ ID NO: 2166500 - RNA, 19 nt, Homo sapiens
  misc_RNA (1)...(19): siRNA sense strand
gggaguuguucuuuguaau

SEQ ID NO: 2166501 - RNA, 19 nt, Homo sapiens
  misc_RNA (1)...(19): siRNA sense strand
cgugggaguuguucuuugu

SEQ ID NO: 2166502 - RNA, 19 nt, Homo sapiens
  misc_RNA (1)...(19): siRNA sense strand
ugaagaagaauuugaucug

SEQ ID NO: 2166503 - RNA, 19 nt, Homo sapiens
  misc_RNA (1)...(19): siRNA sense strand
gcacgugguaucgaaaguu

SEQ ID NO: 2166504 - RNA, 19 nt, Homo sapiens
  misc_RNA (1)...(19): siRNA sense strand
gguuuacagugcauccuau

SEQ ID NO: 2166505 - RNA, 19 nt, Homo sapiens
  misc_RNA (1)...(19): siRNA sense strand
gguugccacucauuuguca

SEQ ID NO: 2166506 - RNA, 19 nt, Homo sapiens
  misc_RNA (1)...(19): siRNA sense strand
aacgauuuguugcuccuua

SEQ ID NO: 2166507 - RNA, 19 nt, Homo sapiens
  misc_RNA (1)...(19): siRNA sense strand
gggccucaguccuauguag

SEQ ID NO: 2166508 - RNA, 19 nt, Homo sapiens
  misc_RNA (1)...(19): siRNA sense strand
cgaauggacagagaauuau

SEQ ID NO: 2166509 - RNA, 19 nt, Homo sapiens
  misc_RNA (1)...(19): siRNA sense strand
gaucccauucgcuuucaaa

SEQ ID NO: 2166510 - RNA, 19 nt, Homo sapiens
  misc_RNA (1)...(19): siRNA sense strand
guggacagccuggaugaaa

SEQ ID NO: 2166511 - RNA, 19 nt, Homo sapiens
  misc_RNA (1)...(19): siRNA sense strand
gaacggcacgacgaugaug

SEQ ID NO: 2166512 - RNA, 19 nt, Homo sapiens
  misc_RNA (1)...(19): siRNA sense strand
aguauugaaugcagaagga

SEQ ID NO: 2166513 - RNA, 19 nt, Homo sapiens
  misc_RNA (1)...(19): siRNA sense strand
caaccugaaagauacauuc

SEQ ID NO: 2166514 - RNA, 19 nt, Homo sapiens
  misc_RNA (1)...(19): siRNA sense strand
gaauggacagagaauuauc

SEQ ID NO: 2166515 - RNA, 19 nt, Homo sapiens
  misc_RNA (1)...(19): siRNA sense strand
ccucuuacagacaagguua

SEQ ID NO: 2166516 - RNA, 19 nt, Homo sapiens
  misc_RNA (1)...(19): siRNA sense strand
uuacagugcauccuaugaa

SEQ ID NO: 2166517 - RNA, 19 nt, Homo sapiens
  misc_RNA (1)...(19): siRNA sense strand
uggcagaccaaauguagaa

SEQ ID NO: 2166518 - RNA, 19 nt, Homo sapiens
  misc_RNA (1)...(19): siRNA sense strand
gcuggaaggaaacgauuug

SEQ ID NO: 2166519 - RNA, 19 nt, Homo sapiens
  misc_RNA (1)...(19): siRNA sense strand
ucacauggaaauccucuuc

SEQ ID NO: 2166520 - RNA, 19 nt, Homo sapiens
  misc_RNA (1)...(19): siRNA sense strand
ucacugagguauaaaaucu

SEQ ID NO: 2166521 - RNA, 19 nt, Homo sapiens
  misc_RNA (1)...(19): siRNA sense strand
aagcgcacgugguaucgaa

SEQ ID NO: 2166522 - RNA, 19 nt, Homo sapiens
  misc_RNA (1)...(19): siRNA sense strand
cagacccucuuacagacaa

SEQ ID NO: 2166523 - RNA, 19 nt, Homo sapiens
  misc_RNA (1)...(19): siRNA sense strand
uaaagcccaacacgaggua

SEQ ID NO: 2166524 - RNA, 19 nt, Homo sapiens
  misc_RNA (1)...(19): siRNA sense strand
ugaaagauacauucuacag

SEQ ID NO: 2166525 - RNA, 19 nt, Homo sapiens
  misc_RNA (1)...(19): siRNA sense strand
aaaucuaccucagugacaa

SEQ ID NO: 2166526 - RNA, 19 nt, Homo sapiens
  misc_RNA (1)...(19): siRNA sense strand
ccaagauucacauggaaau

SEQ ID NO: 2166527 - RNA, 19 nt, Homo sapiens
  misc_RNA (1)...(19): siRNA sense strand
auaauccucugcuuguugu

SEQ ID NO: 2166528 - RNA, 19 nt, Homo sapiens
  misc_RNA (1)...(19): siRNA sense strand
cccaaugaccugaagaaga

SEQ ID NO: 2166529 - RNA, 19 nt, Homo sapiens
  misc_RNA (1)...(19): siRNA sense strand
ugccagacccucuuacaga

SEQ ID NO: 2166530 - RNA, 19 nt, Homo sapiens
  misc_RNA (1)...(19): siRNA sense strand
ugacggccucccacucuuu

SEQ ID NO: 2166531 - RNA, 19 nt, Homo sapiens
  misc_RNA (1)...(19): siRNA sense strand
ggauucacaccuugaugga

SEQ ID NO: 2166532 - RNA, 19 nt, Homo sapiens
  misc_RNA (1)...(19): siRNA sense strand
ggagacagcuggggaagag

SEQ ID NO: 2166533 - RNA, 19 nt, Homo sapiens
  misc_RNA (1)...(19): siRNA sense strand
cacgugguaucgaaaguuc

SEQ ID NO: 2166534 - RNA, 19 nt, Homo sapiens
  misc_RNA (1)...(19): siRNA sense strand
uggacagccuggaugaaau

SEQ ID NO: 2166535 - RNA, 19 nt, Homo sapiens
  misc_RNA (1)...(19): siRNA sense strand
ggccuacguuauauaugau

SEQ ID NO: 2166536 - RNA, 19 nt, Homo sapiens
  misc_RNA (1)...(19): siRNA sense strand
ccacucaagcuucaucagu

SEQ ID NO: 2166537 - RNA, 19 nt, Homo sapiens
  misc_RNA (1)...(19): siRNA sense strand
uguaauucacugagguaua

SEQ ID NO: 2166538 - RNA, 19 nt, Homo sapiens
  misc_RNA (1)...(19): siRNA sense strand
uaauggcagaccaaaugua

SEQ ID NO: 2166539 - RNA, 19 nt, Homo sapiens
  misc_RNA (1)...(19): siRNA sense strand
gccauggacggcaauaugu

SEQ ID NO: 2166540 - RNA, 19 nt, Homo sapiens
  misc_RNA (1)...(19): siRNA sense strand
ggaaagacauguacaauga

SEQ ID NO: 2166541 - RNA, 19 nt, Homo sapiens
  misc_RNA (1)...(19): siRNA sense strand
gaacagagcagaaaucaaa

SEQ ID NO: 2166542 - RNA, 19 nt, Homo sapiens
  misc_RNA (1)...(19): siRNA sense strand
gaagagagcaguugaagaa

SEQ ID NO: 2166543 - RNA, 19 nt, Homo sapiens
  misc_RNA (1)...(19): siRNA sense strand
aaacaaggcugucccauug

SEQ ID NO: 2166544 - RNA, 19 nt, Homo sapiens
  misc_RNA (1)...(19): siRNA sense strand
gcgcacagccucuuuauuu

SEQ ID NO: 2166545 - RNA, 19 nt, Homo sapiens
  misc_RNA (1)...(19): siRNA sense strand
cuacagagaugccaacauu

SEQ ID NO: 2166546 - RNA, 19 nt, Homo sapiens
  misc_RNA (1)...(19): siRNA sense strand
gaagacagccugaagaaga

SEQ ID NO: 2166547 - RNA, 19 nt, Homo sapiens
  misc_RNA (1)...(19): siRNA sense strand
gaagcugguuuaaucuaua

SEQ ID NO: 2166548 - RNA, 19 nt, Homo sapiens
  misc_RNA (1)...(19): siRNA sense strand
ggucacagcucuaccuuug

SEQ ID NO: 2166549 - RNA, 19 nt, Homo sapiens
  misc_RNA (1)...(19): siRNA sense strand
gaaaaggagugcagaauug

SEQ ID NO: 2166550 - RNA, 19 nt, Homo sapiens
  misc_RNA (1)...(19): siRNA sense strand
gcccgaagcugguuuaauc

SEQ ID NO: 2166551 - RNA, 19 nt, Homo sapiens
  misc_RNA (1)...(19): siRNA sense strand
ucacccaacugcugcaaua

SEQ ID NO: 2166552 - RNA, 19 nt, Homo sapiens
  misc_RNA (1)...(19): siRNA sense strand
ggaagaugcucagaacaga

SEQ ID NO: 2166553 - RNA, 19 nt, Homo sapiens
  misc_RNA (1)...(19): siRNA sense strand
cgaagaaauuagcagagua

SEQ ID NO: 2166554 - RNA, 19 nt, Homo sapiens
  misc_RNA (1)...(19): siRNA sense strand
ggaccguuccucugcauua

SEQ ID NO: 2166555 - RNA, 19 nt, Homo sapiens
  misc_RNA (1)...(19): siRNA sense strand
caaacaacuugaagcagaa

SEQ ID NO: 2166556 - RNA, 19 nt, Homo sapiens
  misc_RNA (1)...(19): siRNA sense strand
gagagcaguugaagaagug

SEQ ID NO: 2166557 - RNA, 19 nt, Homo sapiens
  misc_RNA (1)...(19): siRNA sense strand
gaacagcacgcaucuagca

SEQ ID NO: 2166558 - RNA, 19 nt, Homo sapiens
  misc_RNA (1)...(19): siRNA sense strand
gcacaguucugggcuggaa

SEQ ID NO: 2166559 - RNA, 19 nt, Homo sapiens
  misc_RNA (1)...(19): siRNA sense strand
gaaaccaugcagaagauuu

SEQ ID NO: 2166560 - RNA, 19 nt, Homo sapiens
  misc_RNA (1)...(19): siRNA sense strand
gagaagacagccugaagaa

SEQ ID NO: 2166561 - RNA, 19 nt, Homo sapiens
  misc_RNA (1)...(19): siRNA sense strand
acgauuugcuuucagaaua

SEQ ID NO: 2166562 - RNA, 19 nt, Homo sapiens
  misc_RNA (1)...(19): siRNA sense strand
cgauuugcuuucagaauaa

SEQ ID NO: 2166563 - RNA, 19 nt, Homo sapiens
  misc_RNA (1)...(19): siRNA sense strand
cauaaugccuuugaucaga

SEQ ID NO: 2166564 - RNA, 19 nt, Homo sapiens
  misc_RNA (1)...(19): siRNA sense strand
gggagcaucuaaaugaaga

SEQ ID NO: 2166565 - RNA, 19 nt, Homo sapiens
  misc_RNA (1)...(19): siRNA sense strand
gagaauccuuggaccuaga

SEQ ID NO: 2166566 - RNA, 19 nt, Homo sapiens
  misc_RNA (1)...(19): siRNA sense strand
aaagugggcuugccaugga

SEQ ID NO: 2166567 - RNA, 19 nt, Homo sapiens
  misc_RNA (1)...(19): siRNA sense strand
ugaagaagaugcagcugau

SEQ ID NO: 2166568 - RNA, 19 nt, Homo sapiens
  misc_RNA (1)...(19): siRNA sense strand
gaaacuuuaugugccugua

SEQ ID NO: 2166569 - RNA, 19 nt, Homo sapiens
  misc_RNA (1)...(19): siRNA sense strand
caucugcagucccaagaaa

SEQ ID NO: 2166570 - RNA, 19 nt, Homo sapiens
  misc_RNA (1)...(19): siRNA sense strand
cagaaaccaugcagaagau

SEQ ID NO: 2166571 - RNA, 19 nt, Homo sapiens
  misc_RNA (1)...(19): siRNA sense strand
gcucagaaaccaugcagaa

SEQ ID NO: 2166572 - RNA, 19 nt, Homo sapiens
  misc_RNA (1)...(19): siRNA sense strand
ugaaccuagugguguauua

SEQ ID NO: 2166573 - RNA, 19 nt, Homo sapiens
  misc_RNA (1)...(19): siRNA sense strand
acagagaugccaacauuaa

SEQ ID NO: 2166574 - RNA, 19 nt, Homo sapiens
  misc_RNA (1)...(19): siRNA sense strand
ggagaagacagccugaaga

SEQ ID NO: 2166575 - RNA, 19 nt, Homo sapiens
  misc_RNA (1)...(19): siRNA sense strand
cgaagcugguuuaaucuau

SEQ ID NO: 2166576 - RNA, 19 nt, Homo sapiens
  misc_RNA (1)...(19): siRNA sense strand
gcagaaaccggauguaaaa

SEQ ID NO: 2166577 - RNA, 19 nt, Homo sapiens
  misc_RNA (1)...(19): siRNA sense strand
uaggugcgguggcuacuaa

SEQ ID NO: 2166578 - RNA, 19 nt, Homo sapiens
  misc_RNA (1)...(19): siRNA sense strand
cugaaaagcugaaaucuga

SEQ ID NO: 2166579 - RNA, 19 nt, Homo sapiens
  misc_RNA (1)...(19): siRNA sense strand
gaaaccggauguaaaauca

SEQ ID NO: 2166580 - RNA, 19 nt, Homo sapiens
  misc_RNA (1)...(19): siRNA sense strand
cagcacgcaucuagcauug

SEQ ID NO: 2166581 - RNA, 19 nt, Homo sapiens
  misc_RNA (1)...(19): siRNA sense strand
cagaagauuuggaccuugu

SEQ ID NO: 2166582 - RNA, 19 nt, Homo sapiens
  misc_RNA (1)...(19): siRNA sense strand
ugauggagcuugcgauucu

SEQ ID NO: 2166583 - RNA, 19 nt, Homo sapiens
  misc_RNA (1)...(19): siRNA sense strand
gaagaaauuagcagaguac

SEQ ID NO: 2166584 - RNA, 19 nt, Homo sapiens
  misc_RNA (1)...(19): siRNA sense strand
gcuacgauuugcuuucaga

SEQ ID NO: 2166585 - RNA, 19 nt, Homo sapiens
  misc_RNA (1)...(19): siRNA sense strand
ccagcuggcccuaccauaa

SEQ ID NO: 2166586 - RNA, 19 nt, Homo sapiens
  misc_RNA (1)...(19): siRNA sense strand
caucgaaugucagagagaa

SEQ ID NO: 2166587 - RNA, 19 nt, Homo sapiens
  misc_RNA (1)...(19): siRNA sense strand
ucagaaaccaugcagaaga

SEQ ID NO: 2166588 - RNA, 19 nt, Homo sapiens
  misc_RNA (1)...(19): siRNA sense strand
gcucgggucuggcuacgau

SEQ ID NO: 2166589 - RNA, 19 nt, Homo sapiens
  misc_RNA (1)...(19): siRNA sense strand
uuaaauggcaguacagaga

SEQ ID NO: 2166590 - RNA, 19 nt, Homo sapiens
  misc_RNA (1)...(19): siRNA sense strand
ugaugcagcugaugaacga

SEQ ID NO: 2166591 - RNA, 19 nt, Homo sapiens
  misc_RNA (1)...(19): siRNA sense strand
ccagugugccuucaugaaa

SEQ ID NO: 2166592 - RNA, 19 nt, Homo sapiens
  misc_RNA (1)...(19): siRNA sense strand
ccagcaaauucuucaggaa

SEQ ID NO: 2166593 - RNA, 19 nt, Homo sapiens
  misc_RNA (1)...(19): siRNA sense strand
gaauggcaccuacagagau

SEQ ID NO: 2166594 - RNA, 19 nt, Homo sapiens
  misc_RNA (1)...(19): siRNA sense strand
guaaaagaauacccagauu

SEQ ID NO: 2166595 - RNA, 19 nt, Homo sapiens
  misc_RNA (1)...(19): siRNA sense strand
cagcaaauucuucaggaaa

SEQ ID NO: 2166596 - RNA, 19 nt, Homo sapiens
  misc_RNA (1)...(19): siRNA sense strand
uggaucugcuggcaaguuu

SEQ ID NO: 2166597 - RNA, 19 nt, Homo sapiens
  misc_RNA (1)...(19): siRNA sense strand
uauugaaccuaguggugua

SEQ ID NO: 2166598 - RNA, 19 nt, Homo sapiens
  misc_RNA (1)...(19): siRNA sense strand
gaagugaagaaauuauugg

SEQ ID NO: 2166599 - RNA, 19 nt, Homo sapiens
  misc_RNA (1)...(19): siRNA sense strand
gggagaauccuuggaccua

SEQ ID NO: 2166600 - RNA, 19 nt, Homo sapiens
  misc_RNA (1)...(19): siRNA sense strand
aaagacauguacaaugaca

SEQ ID NO: 2166601 - RNA, 19 nt, Homo sapiens
  misc_RNA (1)...(19): siRNA sense strand
gcaugggacugacugaaaa

SEQ ID NO: 2166602 - RNA, 19 nt, Homo sapiens
  misc_RNA (1)...(19): siRNA sense strand
ucacagcucuaccuuugag

SEQ ID NO: 2166603 - RNA, 19 nt, Homo sapiens
  misc_RNA (1)...(19): siRNA sense strand
gcauuucgagcacgacuga

SEQ ID NO: 2166604 - RNA, 19 nt, Homo sapiens
  misc_RNA (1)...(19): siRNA sense strand
uuggaaaucuguuuguugu

SEQ ID NO: 2166605 - RNA, 19 nt, Homo sapiens
  misc_RNA (1)...(19): siRNA sense strand
ucuauacacccuaugagua

SEQ ID NO: 2166606 - RNA, 19 nt, Homo sapiens
  misc_RNA (1)...(19): siRNA sense strand
gcccuaccauaaugccuuu

SEQ ID NO: 2166607 - RNA, 19 nt, Homo sapiens
  misc_RNA (1)...(19): siRNA sense strand
ccaauugggagcaucuaaa

SEQ ID NO: 2166608 - RNA, 19 nt, Homo sapiens
  misc_RNA (1)...(19): siRNA sense strand
gggaccuauuguucaguua

SEQ ID NO: 2166609 - RNA, 19 nt, Homo sapiens
  misc_RNA (1)...(19): siRNA sense strand
gcauugcuccuuuaauugg

SEQ ID NO: 2166610 - RNA, 19 nt, Homo sapiens
  misc_RNA (1)...(19): siRNA sense strand
aaaguucgaaggcacgaua

SEQ ID NO: 2166611 - RNA, 19 nt, Homo sapiens
  misc_RNA (1)...(19): siRNA sense strand
gagaugccaacauuaaauc

SEQ ID NO: 2166612 - RNA, 19 nt, Homo sapiens
  misc_RNA (1)...(19): siRNA sense strand
ggaguggguggucacauga

SEQ ID NO: 2166613 - RNA, 19 nt, Homo sapiens
  misc_RNA (1)...(19): siRNA sense strand
cagugugccuucaugaaau

SEQ ID NO: 2166614 - RNA, 19 nt, Homo sapiens
  misc_RNA (1)...(19): siRNA sense strand
gaccguuccucugcauuau

SEQ ID NO: 2166615 - RNA, 19 nt, Homo sapiens
  misc_RNA (1)...(19): siRNA sense strand
ggcaugggacugacugaaa

SEQ ID NO: 2166616 - RNA, 19 nt, Homo sapiens
  misc_RNA (1)...(19): siRNA sense strand
gauggaucccgcucagaaa

SEQ ID NO: 2166617 - RNA, 19 nt, Homo sapiens
  misc_RNA (1)...(19): siRNA sense strand
gcacaccaacagcacaguu

SEQ ID NO: 2166618 - RNA, 19 nt, Homo sapiens
  misc_RNA (1)...(19): siRNA sense strand
gaaccuagugguguauuag

SEQ ID NO: 2166619 - RNA, 19 nt, Homo sapiens
  misc_RNA (1)...(19): siRNA sense strand
cagagaugccaacauuaaa

SEQ ID NO: 2166620 - RNA, 19 nt, Homo sapiens
  misc_RNA (1)...(19): siRNA sense strand
ggacuuacagccaaacaac

SEQ ID NO: 2166621 - RNA, 19 nt, Homo sapiens
  misc_RNA (1)...(19): siRNA sense strand
uaaauggcaguacagagaa

SEQ ID NO: 2166622 - RNA, 19 nt, Homo sapiens
  misc_RNA (1)...(19): siRNA sense strand
gcugcuggacgaagaaauu

SEQ ID NO: 2166623 - RNA, 19 nt, Homo sapiens
  misc_RNA (1)...(19): siRNA sense strand
aaauggcaguacagagaaa

SEQ ID NO: 2166624 - RNA, 19 nt, Homo sapiens
  misc_RNA (1)...(19): siRNA sense strand
gcacaaccagcaccacgau

SEQ ID NO: 2166625 - RNA, 19 nt, Homo sapiens
  misc_RNA (1)...(19): siRNA sense strand
gcuuggaaaucuguuuguu

SEQ ID NO: 2166626 - RNA, 19 nt, Homo sapiens
  misc_RNA (1)...(19): siRNA sense strand
agagagcaguugaagaagu

SEQ ID NO: 2166627 - RNA, 19 nt, Homo sapiens
  misc_RNA (1)...(19): siRNA sense strand
cagagcagaaaucaaauug

SEQ ID NO: 2166628 - RNA, 19 nt, Homo sapiens
  misc_RNA (1)...(19): siRNA sense strand
caauugggagcaucuaaau

SEQ ID NO: 2166629 - RNA, 19 nt, Homo sapiens
  misc_RNA (1)...(19): siRNA sense strand
gaccuauuguucaguuaca

SEQ ID NO: 2166630 - RNA, 19 nt, Homo sapiens
  misc_RNA (1)...(19): siRNA sense strand
aagcagaaaccggauguaa

SEQ ID NO: 2166631 - RNA, 19 nt, Homo sapiens
  misc_RNA (1)...(19): siRNA sense strand
cgauggaucccgcucagaa

SEQ ID NO: 2166632 - RNA, 19 nt, Homo sapiens
  misc_RNA (1)...(19): siRNA sense strand
uagaggacuuacagccaaa

SEQ ID NO: 2166633 - RNA, 19 nt, Homo sapiens
  misc_RNA (1)...(19): siRNA sense strand
ggaccuagaggacuuacag

SEQ ID NO: 2166634 - RNA, 19 nt, Homo sapiens
  misc_RNA (1)...(19): siRNA sense strand
aaaccaugcagaagauuug

SEQ ID NO: 2166635 - RNA, 19 nt, Homo sapiens
  misc_RNA (1)...(19): siRNA sense strand
ggcaccagcuacaucaauc

SEQ ID NO: 2166636 - RNA, 19 nt, Homo sapiens
  misc_RNA (1)...(19): siRNA sense strand
uaaucuauacacccuauga

SEQ ID NO: 2166637 - RNA, 19 nt, Homo sapiens
  misc_RNA (1)...(19): siRNA sense strand
caacauuaaaucaccaaca

SEQ ID NO: 2166638 - RNA, 19 nt, Homo sapiens
  misc_RNA (1)...(19): siRNA sense strand
aagacagccugaagaagau

SEQ ID NO: 2166639 - RNA, 19 nt, Homo sapiens
  misc_RNA (1)...(19): siRNA sense strand
caaauugaagagagcaguu

SEQ ID NO: 2166640 - RNA, 19 nt, Homo sapiens
  misc_RNA (1)...(19): siRNA sense strand
ggaguuuccuucuucauuu

SEQ ID NO: 2166641 - RNA, 19 nt, Homo sapiens
  misc_RNA (1)...(19): siRNA sense strand
aaucaggucuucuccauuu

SEQ ID NO: 2166642 - RNA, 19 nt, Homo sapiens
  misc_RNA (1)...(19): siRNA sense strand
cagcgugacucugccguua

SEQ ID NO: 2166643 - RNA, 19 nt, Homo sapiens
  misc_RNA (1)...(19): siRNA sense strand
gcugggaguuuccuucuuc

SEQ ID NO: 2166644 - RNA, 19 nt, Homo sapiens
  misc_RNA (1)...(19): siRNA sense strand
gccgaagcgucacauagaa

SEQ ID NO: 2166645 - RNA, 19 nt, Homo sapiens
  misc_RNA (1)...(19): siRNA sense strand
ugaaucaggucuucuccau

SEQ ID NO: 2166646 - RNA, 19 nt, Homo sapiens
  misc_RNA (1)...(19): siRNA sense strand
gggaguuuccuucuucauu

SEQ ID NO: 2166647 - RNA, 19 nt, Homo sapiens
  misc_RNA (1)...(19): siRNA sense strand
ggccgaagcgucacauaga

SEQ ID NO: 2166648 - RNA, 19 nt, Homo sapiens
  misc_RNA (1)...(19): siRNA sense strand
gaaucaggucuucuccauu

SEQ ID NO: 2166649 - RNA, 19 nt, Homo sapiens
  misc_RNA (1)...(19): siRNA sense strand
gaccugagagagcccagaa

SEQ ID NO: 2166650 - RNA, 19 nt, Homo sapiens
  misc_RNA (1)...(19): siRNA sense strand
gguucugucugcugcuuca

SEQ ID NO: 2166651 - RNA, 19 nt, Homo sapiens
  misc_RNA (1)...(19): siRNA sense strand
gugcgugaaucaggucuuc

SEQ ID NO: 2166652 - RNA, 19 nt, Homo sapiens
  misc_RNA (1)...(19): siRNA sense strand
gaguuuccuucuucauuuu

SEQ ID NO: 2166653 - RNA, 19 nt, Homo sapiens
  misc_RNA (1)...(19): siRNA sense strand
ccgaagcgucacauagaaa

SEQ ID NO: 2166654 - RNA, 19 nt, Homo sapiens
  misc_RNA (1)...(19): siRNA sense strand
gggccgaagcgucacauag

SEQ ID NO: 2166655 - RNA, 19 nt, Homo sapiens
  misc_RNA (1)...(19): siRNA sense strand
gaaauacaauugcaaaguc

SEQ ID NO: 2166656 - RNA, 19 nt, Homo sapiens
  misc_RNA (1)...(19): siRNA sense strand
ggaaagcuguuuauaagca

SEQ ID NO: 2166657 - RNA, 19 nt, Homo sapiens
  misc_RNA (1)...(19): siRNA sense strand
caugagaacuaaaugcaua

SEQ ID NO: 2166658 - RNA, 19 nt, Homo sapiens
  misc_RNA (1)...(19): siRNA sense strand
ucauggagauggcaaauaa

SEQ ID NO: 2166659 - RNA, 19 nt, Homo sapiens
  misc_RNA (1)...(19): siRNA sense strand
gaggaacagcccuaaauua

SEQ ID NO: 2166660 - RNA, 19 nt, Homo sapiens
  misc_RNA (1)...(19): siRNA sense strand
guggaaagcuguuuauaag

SEQ ID NO: 2166661 - RNA, 19 nt, Homo sapiens
  misc_RNA (1)...(19): siRNA sense strand
caauuuaugugacuaagga

SEQ ID NO: 2166662 - RNA, 19 nt, Homo sapiens
  misc_RNA (1)...(19): siRNA sense strand
gaaaugauugugccugaaa

SEQ ID NO: 2166663 - RNA, 19 nt, Homo sapiens
  misc_RNA (1)...(19): siRNA sense strand
caacacccaugagaacuaa

SEQ ID NO: 2166664 - RNA, 19 nt, Homo sapiens
  misc_RNA (1)...(19): siRNA sense strand
ggagacagauguggucaga

SEQ ID NO: 2166665 - RNA, 19 nt, Homo sapiens
  misc_RNA (1)...(19): siRNA sense strand
gaaauugaagagcauguuu

SEQ ID NO: 2166666 - RNA, 19 nt, Homo sapiens
  misc_RNA (1)...(19): siRNA sense strand
ggaacagcccuaaauuauu

SEQ ID NO: 2166667 - RNA, 19 nt, Homo sapiens
  misc_RNA (1)...(19): siRNA sense strand
uuacugagcuagaaacaau

SEQ ID NO: 2166668 - RNA, 19 nt, Homo sapiens
  misc_RNA (1)...(19): siRNA sense strand
caaaugaugacuuacguaa

SEQ ID NO: 2166669 - RNA, 19 nt, Homo sapiens
  misc_RNA (1)...(19): siRNA sense strand
aaacccagaugaacaaaug

SEQ ID NO: 2166670 - RNA, 19 nt, Homo sapiens
  misc_RNA (1)...(19): siRNA sense strand
gaucuuggcaaccaccuua

SEQ ID NO: 2166671 - RNA, 19 nt, Homo sapiens
  misc_RNA (1)...(19): siRNA sense strand
gcaaagucacuguaauuga

SEQ ID NO: 2166672 - RNA, 19 nt, Homo sapiens
  misc_RNA (1)...(19): siRNA sense strand
caaaguggaaagcuguuua

SEQ ID NO: 2166673 - RNA, 19 nt, Homo sapiens
  misc_RNA (1)...(19): siRNA sense strand
ggagauggcaaauaaggaa

SEQ ID NO: 2166674 - RNA, 19 nt, Homo sapiens
  misc_RNA (1)...(19): siRNA sense strand
uaagcagacucacuccaaa

SEQ ID NO: 2166675 - RNA, 19 nt, Homo sapiens
  misc_RNA (1)...(19): siRNA sense strand
ggaauucaaacccagauga

SEQ ID NO: 2166676 - RNA, 19 nt, Homo sapiens
  misc_RNA (1)...(19): siRNA sense strand
ccacgagaauuugcugaaa

SEQ ID NO: 2166677 - RNA, 19 nt, Homo sapiens
  misc_RNA (1)...(19): siRNA sense strand
ugaauccacuggcaagaga

SEQ ID NO: 2166678 - RNA, 19 nt, Homo sapiens
  misc_RNA (1)...(19): siRNA sense strand
gauggcacacagacaaaua

SEQ ID NO: 2166679 - RNA, 19 nt, Homo sapiens
  misc_RNA (1)...(19): siRNA sense strand
gaaagccaaguguuugcua

SEQ ID NO: 2166680 - RNA, 19 nt, Homo sapiens
  misc_RNA (1)...(19): siRNA sense strand
gaacaaaugaugacuuacg

SEQ ID NO: 2166681 - RNA, 19 nt, Homo sapiens
  misc_RNA (1)...(19): siRNA sense strand
gcagacgcugugagaaaua

SEQ ID NO: 2166682 - RNA, 19 nt, Homo sapiens
  misc_RNA (1)...(19): siRNA sense strand
caacugauguccaaaagga

SEQ ID NO: 2166683 - RNA, 19 nt, Homo sapiens
  misc_RNA (1)...(19): siRNA sense strand
uuacgcagcuuuaacuagu

SEQ ID NO: 2166684 - RNA, 19 nt, Homo sapiens
  misc_RNA (1)...(19): siRNA sense strand
gcgaggaacagcccuaaau

SEQ ID NO: 2166685 - RNA, 19 nt, Homo sapiens
  misc_RNA (1)...(19): siRNA sense strand
gagcagugguaccauagca

SEQ ID NO: 2166686 - RNA, 19 nt, Homo sapiens
  misc_RNA (1)...(19): siRNA sense strand
gcugugagaaauacaauug

SEQ ID NO: 2166687 - RNA, 19 nt, Homo sapiens
  misc_RNA (1)...(19): siRNA sense strand
aaagaaagccaaguguuug

SEQ ID NO: 2166688 - RNA, 19 nt, Homo sapiens
  misc_RNA (1)...(19): siRNA sense strand
cgaggaacagcccuaaauu

SEQ ID NO: 2166689 - RNA, 19 nt, Homo sapiens
  misc_RNA (1)...(19): siRNA sense strand
ggaaucuuguauccaggaa

SEQ ID NO: 2166690 - RNA, 19 nt, Homo sapiens
  misc_RNA (1)...(19): siRNA sense strand
caaauaaggaacugaagca

SEQ ID NO: 2166691 - RNA, 19 nt, Homo sapiens
  misc_RNA (1)...(19): siRNA sense strand
aggaacagcccuaaauuau

SEQ ID NO: 2166692 - RNA, 19 nt, Homo sapiens
  misc_RNA (1)...(19): siRNA sense strand
gagcuagaaacaauuuaug

SEQ ID NO: 2166693 - RNA, 19 nt, Homo sapiens
  misc_RNA (1)...(19): siRNA sense strand
ccagaugaacaaaugauga

SEQ ID NO: 2166694 - RNA, 19 nt, Homo sapiens
  misc_RNA (1)...(19): siRNA sense strand
gcacacagacaaauaaaau

SEQ ID NO: 2166695 - RNA, 19 nt, Homo sapiens
  misc_RNA (1)...(19): siRNA sense strand
caaccaccuuacugagcua

SEQ ID NO: 2166696 - RNA, 19 nt, Homo sapiens
  misc_RNA (1)...(19): siRNA sense strand
gcuagaaacaauuuaugug

SEQ ID NO: 2166697 - RNA, 19 nt, Homo sapiens
  misc_RNA (1)...(19): siRNA sense strand
gcaaaacucagugaaauga

SEQ ID NO: 2166698 - RNA, 19 nt, Homo sapiens
  misc_RNA (1)...(19): siRNA sense strand
ccaccuuacugagcuagaa

SEQ ID NO: 2166699 - RNA, 19 nt, Homo sapiens
  misc_RNA (1)...(19): siRNA sense strand
aguggaaagcuguuuauaa

SEQ ID NO: 2166700 - RNA, 19 nt, Homo sapiens
  misc_RNA (1)...(19): siRNA sense strand
aaagccaaguguuugcuau

SEQ ID NO: 2166701 - RNA, 19 nt, Homo sapiens
  misc_RNA (1)...(19): siRNA sense strand
uaacuaguucuuccacaga

SEQ ID NO: 2166702 - RNA, 19 nt, Homo sapiens
  misc_RNA (1)...(19): siRNA sense strand
ccacaacacccaugagaac

SEQ ID NO: 2166703 - RNA, 19 nt, Homo sapiens
  misc_RNA (1)...(19): siRNA sense strand
gccaaguguuugcuaucaa

SEQ ID NO: 2166704 - RNA, 19 nt, Homo sapiens
  misc_RNA (1)...(19): siRNA sense strand
gaugaacaaaugaugacuu

SEQ ID NO: 2166705 - RNA, 19 nt, Homo sapiens
  misc_RNA (1)...(19): siRNA sense strand
gcucgaauucucugucuuc

SEQ ID NO: 2166706 - RNA, 19 nt, Homo sapiens
  misc_RNA (1)...(19): siRNA sense strand
gaagaaaauucaggaccuu

SEQ ID NO: 2166707 - RNA, 19 nt, Homo sapiens
  misc_RNA (1)...(19): siRNA sense strand
aaaagaaagccaaguguuu

SEQ ID NO: 2166708 - RNA, 19 nt, Homo sapiens
  misc_RNA (1)...(19): siRNA sense strand
ugaaaugauugugccugaa

SEQ ID NO: 2166709 - RNA, 19 nt, Homo sapiens
  misc_RNA (1)...(19): siRNA sense strand
uuccacagaucaacccaaa

SEQ ID NO: 2166710 - RNA, 19 nt, Homo sapiens
  misc_RNA (1)...(19): siRNA sense strand
aaucuuguauccaggaaca

SEQ ID NO: 2166711 - RNA, 19 nt, Homo sapiens
  misc_RNA (1)...(19): siRNA sense strand
aaacucagugaaaugauug

SEQ ID NO: 2166712 - RNA, 19 nt, Homo sapiens
  misc_RNA (1)...(19): siRNA sense strand
gcugggugcggaauucaaa

SEQ ID NO: 2166713 - RNA, 19 nt, Homo sapiens
  misc_RNA (1)...(19): siRNA sense strand
ccagcugggugcggaauuc

SEQ ID NO: 2166714 - RNA, 19 nt, Homo sapiens
  misc_RNA (1)...(19): siRNA sense strand
uugcaaagucacuguaauu

SEQ ID NO: 2166715 - RNA, 19 nt, Homo sapiens
  misc_RNA (1)...(19): siRNA sense strand
cuaaaugcauagagcuucu

SEQ ID NO: 2166716 - RNA, 19 nt, Homo sapiens
  misc_RNA (1)...(19): siRNA sense strand
gauugugccugaaaauaga

SEQ ID NO: 2166717 - RNA, 19 nt, Homo sapiens
  misc_RNA (1)...(19): siRNA sense strand
acaacacccaugagaacua

SEQ ID NO: 2166718 - RNA, 19 nt, Homo sapiens
  misc_RNA (1)...(19): siRNA sense strand
gagaaauacaauugcaaag

SEQ ID NO: 2166719 - RNA, 19 nt, Homo sapiens
  misc_RNA (1)...(19): siRNA sense strand
uugagcaacugauguccaa

SEQ ID NO: 2166720 - RNA, 19 nt, Homo sapiens
  misc_RNA (1)...(19): siRNA sense strand
ggggagcagugguaccaua

SEQ ID NO: 2166721 - RNA, 19 nt, Homo sapiens
  misc_RNA (1)...(19): siRNA sense strand
caauugcaaagucacugua

SEQ ID NO: 2166722 - RNA, 19 nt, Homo sapiens
  misc_RNA (1)...(19): siRNA sense strand
guaauugauggcacacaga

SEQ ID NO: 2166723 - RNA, 19 nt, Homo sapiens
  misc_RNA (1)...(19): siRNA sense strand
gaucccacaacacccauga

SEQ ID NO: 2166724 - RNA, 19 nt, Homo sapiens
  misc_RNA (1)...(19): siRNA sense strand
ccacagaucaacccaaagc

SEQ ID NO: 2166725 - RNA, 19 nt, Homo sapiens
  misc_RNA (1)...(19): siRNA sense strand
aaaguggaaagcuguuuau

SEQ ID NO: 2166726 - RNA, 19 nt, Homo sapiens
  misc_RNA (1)...(19): siRNA sense strand
aaaguugccaauuugaaga

SEQ ID NO: 2166727 - RNA, 19 nt, Homo sapiens
  misc_RNA (1)...(19): siRNA sense strand
aagagaaauugaagagcau

SEQ ID NO: 2166728 - RNA, 19 nt, Homo sapiens
  misc_RNA (1)...(19): siRNA sense strand
auucaggaccuucucauga

SEQ ID NO: 2166729 - RNA, 19 nt, Homo sapiens
  misc_RNA (1)...(19): siRNA sense strand
gaugacuuacguaauuugu

SEQ ID NO: 2166730 - RNA, 19 nt, Homo sapiens
  misc_RNA (1)...(19): siRNA sense strand
acaaaugaugacuuacgua

SEQ ID NO: 2166731 - RNA, 19 nt, Homo sapiens
  misc_RNA (1)...(19): siRNA sense strand
ugugagaaauacaauugca

SEQ ID NO: 2166732 - RNA, 19 nt, Homo sapiens
  misc_RNA (1)...(19): siRNA sense strand
gauggcaaauaaggaacug

SEQ ID NO: 2166733 - RNA, 19 nt, Homo sapiens
  misc_RNA (1)...(19): siRNA sense strand
cagcucgaauucucugucu

SEQ ID NO: 2166734 - RNA, 19 nt, Homo sapiens
  misc_RNA (1)...(19): siRNA sense strand
aaaugcagacgcugugaga

SEQ ID NO: 2166735 - RNA, 19 nt, Homo sapiens
  misc_RNA (1)...(19): siRNA sense strand
gacccaagucagaaugaga

SEQ ID NO: 2166736 - RNA, 19 nt, Homo sapiens
  misc_RNA (1)...(19): siRNA sense strand
ugcagacgcugugagaaau

SEQ ID NO: 2166737 - RNA, 19 nt, Homo sapiens
  misc_RNA (1)...(19): siRNA sense strand
ccuccuacacggaaucuug

SEQ ID NO: 2166738 - RNA, 19 nt, Homo sapiens
  misc_RNA (1)...(19): siRNA sense strand
aaccuaaggaagagcauuu

SEQ ID NO: 2166739 - RNA, 19 nt, Homo sapiens
  misc_RNA (1)...(19): siRNA sense strand
gagaaauugaagagcaugu

SEQ ID NO: 2166740 - RNA, 19 nt, Homo sapiens
  misc_RNA (1)...(19): siRNA sense strand
caagucagaaugagacacu

SEQ ID NO: 2166741 - RNA, 19 nt, Homo sapiens
  misc_RNA (1)...(19): siRNA sense strand
gagcaacugauguccaaaa

SEQ ID NO: 2166742 - RNA, 19 nt, Homo sapiens
  misc_RNA (1)...(19): siRNA sense strand
ucaaaguggaaagcuguuu

SEQ ID NO: 2166743 - RNA, 19 nt, Homo sapiens
  misc_RNA (1)...(19): siRNA sense strand
uggcaaauaaggaacugaa

SEQ ID NO: 2166744 - RNA, 19 nt, Homo sapiens
  misc_RNA (1)...(19): siRNA sense strand
cuuguauccaggaacauua

SEQ ID NO: 2166745 - RNA, 19 nt, Homo sapiens
  misc_RNA (1)...(19): siRNA sense strand
aacaaaugaugacuuacgu

SEQ ID NO: 2166746 - RNA, 19 nt, Homo sapiens
  misc_RNA (1)...(19): siRNA sense strand
augcagacgcugugagaaa

SEQ ID NO: 2166747 - RNA, 19 nt, Homo sapiens
  misc_RNA (1)...(19): siRNA sense strand
gcacaucaaccuaucauuu

SEQ ID NO: 2166748 - RNA, 19 nt, Homo sapiens
  misc_RNA (1)...(19): siRNA sense strand
gacugaagcuaguggaaua

SEQ ID NO: 2166749 - RNA, 19 nt, Homo sapiens
  misc_RNA (1)...(19): siRNA sense strand
gaagugggauggagucgau

SEQ ID NO: 2166750 - RNA, 19 nt, Homo sapiens
  misc_RNA (1)...(19): siRNA sense strand
caauuuaccuacaaguuug

SEQ ID NO: 2166751 - RNA, 19 nt, Homo sapiens
  misc_RNA (1)...(19): siRNA sense strand
ugaugacacuguuaaguuu

SEQ ID NO: 2166752 - RNA, 19 nt, Homo sapiens
  misc_RNA (1)...(19): siRNA sense strand
agaggaauguaaccaauuu

SEQ ID NO: 2166753 - RNA, 19 nt, Homo sapiens
  misc_RNA (1)...(19): siRNA sense strand
gcagcuagaucuguauguu

SEQ ID NO: 2166754 - RNA, 19 nt, Homo sapiens
  misc_RNA (1)...(19): siRNA sense strand
ccaauuuaccuacaaguuu

SEQ ID NO: 2166755 - RNA, 19 nt, Homo sapiens
  misc_RNA (1)...(19): siRNA sense strand
gaagcuaguggaauacaaa

SEQ ID NO: 2166756 - RNA, 19 nt, Homo sapiens
  misc_RNA (1)...(19): siRNA sense strand
gaucguugguugcuucugu

SEQ ID NO: 2166757 - RNA, 19 nt, Homo sapiens
  misc_RNA (1)...(19): siRNA sense strand
caagcaggauaucauguug

SEQ ID NO: 2166758 - RNA, 19 nt, Homo sapiens
  misc_RNA (1)...(19): siRNA sense strand
cuacaaguuugccgaagaa

SEQ ID NO: 2166759 - RNA, 19 nt, Homo sapiens
  misc_RNA (1)...(19): siRNA sense strand
guggauuucugggcauuua

SEQ ID NO: 2166760 - RNA, 19 nt, Homo sapiens
  misc_RNA (1)...(19): siRNA sense strand
gggauggagucgauucuuc

SEQ ID NO: 2166761 - RNA, 19 nt, Homo sapiens
  misc_RNA (1)...(19): siRNA sense strand
ggacaaagggcagcuagau

SEQ ID NO: 2166762 - RNA, 19 nt, Homo sapiens
  misc_RNA (1)...(19): siRNA sense strand
gaaaucagaaggcagucuu

SEQ ID NO: 2166763 - RNA, 19 nt, Homo sapiens
  misc_RNA (1)...(19): siRNA sense strand
cagcuagaucuguauguua

SEQ ID NO: 2166764 - RNA, 19 nt, Homo sapiens
  misc_RNA (1)...(19): siRNA sense strand
caaguuugccgaagaaauc

SEQ ID NO: 2166765 - RNA, 19 nt, Homo sapiens
  misc_RNA (1)...(19): siRNA sense strand
gcaguuuugugcccauuua

SEQ ID NO: 2166766 - RNA, 19 nt, Homo sapiens
  misc_RNA (1)...(19): siRNA sense strand
gaggaauguaaccaauuua

SEQ ID NO: 2166767 - RNA, 19 nt, Homo sapiens
  misc_RNA (1)...(19): siRNA sense strand
agcuagaucuguauguuaa

SEQ ID NO: 2166768 - RNA, 19 nt, Homo sapiens
  misc_RNA (1)...(19): siRNA sense strand
cuucauggcccgacuaaga

SEQ ID NO: 2166769 - RNA, 19 nt, Homo sapiens
  misc_RNA (1)...(19): siRNA sense strand
cacaucaaccuaucauuug

SEQ ID NO: 2166770 - RNA, 19 nt, Homo sapiens
  misc_RNA (1)...(19): siRNA sense strand
ccuacaaguuugccgaaga

SEQ ID NO: 2166771 - RNA, 19 nt, Homo sapiens
  misc_RNA (1)...(19): siRNA sense strand
ccaagcaggauaucauguu

SEQ ID NO: 2166772 - RNA, 19 nt, Homo sapiens
  misc_RNA (1)...(19): siRNA sense strand
aagggcagcuagaucugua

SEQ ID NO: 2166773 - RNA, 19 nt, Homo sapiens
  misc_RNA (1)...(19): siRNA sense strand
ggacugaagcuaguggaau

SEQ ID NO: 2166774 - RNA, 19 nt, Homo sapiens
  misc_RNA (1)...(19): siRNA sense strand
uggcaaaccuggugagacu

SEQ ID NO: 2166775 - RNA, 19 nt, Homo sapiens
  misc_RNA (1)...(19): siRNA sense strand
gaauacaaaggacagaagu

SEQ ID NO: 2166776 - RNA, 19 nt, Homo sapiens
  misc_RNA (1)...(19): siRNA sense strand
gcuaguggaauacaaagga

SEQ ID NO: 2166777 - RNA, 19 nt, Homo sapiens
  misc_RNA (1)...(19): siRNA sense strand
uaaccaauuuaccuacaag

SEQ ID NO: 2166778 - RNA, 19 nt, Homo sapiens
  misc_RNA (1)...(19): siRNA sense strand
agaggaaaauggaaucuuu

SEQ ID NO: 2166779 - RNA, 19 nt, Homo sapiens
  misc_RNA (1)...(19): siRNA sense strand
cgacugcacguauccauca

SEQ ID NO: 2166780 - RNA, 19 nt, Homo sapiens
  misc_RNA (1)...(19): siRNA sense strand
ggaauacaaaggacagaag

SEQ ID NO: 2166781 - RNA, 19 nt, Homo sapiens
  misc_RNA (1)...(19): siRNA sense strand
ugaagcuaguggaauacaa

SEQ ID NO: 2166782 - RNA, 19 nt, Homo sapiens
  misc_RNA (1)...(19): siRNA sense strand
auagaggaauguaaccaau

SEQ ID NO: 2166783 - RNA, 19 nt, Homo sapiens
  misc_RNA (1)...(19): siRNA sense strand
acaaagggcagcuagaucu

SEQ ID NO: 2166784 - RNA, 19 nt, Homo sapiens
  misc_RNA (1)...(19): siRNA sense strand
gaagcacaucaaccuauca

SEQ ID NO: 2166785 - RNA, 19 nt, Homo sapiens
  misc_RNA (1)...(19): siRNA sense strand
gacaaagggcagcuagauc

SEQ ID NO: 2166786 - RNA, 19 nt, Homo sapiens
  misc_RNA (1)...(19): siRNA sense strand
guugguugcuucuguucug

SEQ ID NO: 2166787 - RNA, 19 nt, Homo sapiens
  misc_RNA (1)...(19): siRNA sense strand
gguugcuucuguucugcua

SEQ ID NO: 2166788 - RNA, 19 nt, Homo sapiens
  misc_RNA (1)...(19): siRNA sense strand
cagaaccgacugcacguau

SEQ ID NO: 2166789 - RNA, 19 nt, Homo sapiens
  misc_RNA (1)...(19): siRNA sense strand
uagaggaauguaaccaauu

SEQ ID NO: 2166790 - RNA, 19 nt, Homo sapiens
  misc_RNA (1)...(19): siRNA sense strand
ggaaaauggaaucuuugua

SEQ ID NO: 2166791 - RNA, 19 nt, Homo sapiens
  misc_RNA (1)...(19): siRNA sense strand
uugaugacacuguuaaguu

SEQ ID NO: 2166792 - RNA, 19 nt, Homo sapiens
  misc_RNA (1)...(19): siRNA sense strand
cagagaaaaucacuuaguc

SEQ ID NO: 2166793 - RNA, 19 nt, Homo sapiens
  misc_RNA (1)...(19): siRNA sense strand
ucacuuagucuccacuuuu

SEQ ID NO: 2166794 - RNA, 19 nt, Homo sapiens
  misc_RNA (1)...(19): siRNA sense strand
ucugggcauuuaccacuug

SEQ ID NO: 2166795 - RNA, 19 nt, Homo sapiens
  misc_RNA (1)...(19): siRNA sense strand
caaagggcagcuagaucug

SEQ ID NO: 2166796 - RNA, 19 nt, Homo sapiens
  misc_RNA (1)...(19): siRNA sense strand
gaaacuaacucuucugaaa

SEQ ID NO: 2166797 - RNA, 19 nt, Homo sapiens
  misc_RNA (1)...(19): siRNA sense strand
ggccggagcugaaauauga

SEQ ID NO: 2166798 - RNA, 19 nt, Homo sapiens
  misc_RNA (1)...(19): siRNA sense strand
gaacgaagcugcucuugcu

SEQ ID NO: 2166799 - RNA, 19 nt, Homo sapiens
  misc_RNA (1)...(19): siRNA sense strand
ggaagugacucuccugguu

SEQ ID NO: 2166800 - RNA, 19 nt, Homo sapiens
  misc_RNA (1)...(19): siRNA sense strand
gaacaagaagcccagauaa

SEQ ID NO: 2166801 - RNA, 19 nt, Homo sapiens
  misc_RNA (1)...(19): siRNA sense strand
uuagagagcugccaaauca

SEQ ID NO: 2166802 - RNA, 19 nt, Homo sapiens
  misc_RNA (1)...(19): siRNA sense strand
caaaugaccaccuuuauug

SEQ ID NO: 2166803 - RNA, 19 nt, Homo sapiens
  misc_RNA (1)...(19): siRNA sense strand
ggaggccagugguaaauuu

SEQ ID NO: 2166804 - RNA, 19 nt, Homo sapiens
  misc_RNA (1)...(19): siRNA sense strand
gcacuuccauuaaggaugu

SEQ ID NO: 2166805 - RNA, 19 nt, Homo sapiens
  misc_RNA (1)...(19): siRNA sense strand
ggaaaggcgugaauuacau

SEQ ID NO: 2166806 - RNA, 19 nt, Homo sapiens
  misc_RNA (1)...(19): siRNA sense strand
gcucagcggucccuauuga

SEQ ID NO: 2166807 - RNA, 19 nt, Homo sapiens
  misc_RNA (1)...(19): siRNA sense strand
gaugggagaugacggcaaa

SEQ ID NO: 2166808 - RNA, 19 nt, Homo sapiens
  misc_RNA (1)...(19): siRNA sense strand
ggagagauccaguugcuuu

SEQ ID NO: 2166809 - RNA, 19 nt, Homo sapiens
  misc_RNA (1)...(19): siRNA sense strand
uaacauggccaacaagaaa

SEQ ID NO: 2166810 - RNA, 19 nt, Homo sapiens
  misc_RNA (1)...(19): siRNA sense strand
ggaacaagaagcccagaua

SEQ ID NO: 2166811 - RNA, 19 nt, Homo sapiens
  misc_RNA (1)...(19): siRNA sense strand
gaaaagcgcucggaaguga

SEQ ID NO: 2166812 - RNA, 19 nt, Homo sapiens
  misc_RNA (1)...(19): siRNA sense strand
gaugguauguggccacuga

SEQ ID NO: 2166813 - RNA, 19 nt, Homo sapiens
  misc_RNA (1)...(19): siRNA sense strand
gcaaugaaacuaacucuuc

SEQ ID NO: 2166814 - RNA, 19 nt, Homo sapiens
  misc_RNA (1)...(19): siRNA sense strand
uccaggaggucgauauuua

SEQ ID NO: 2166815 - RNA, 19 nt, Homo sapiens
  misc_RNA (1)...(19): siRNA sense strand
gaagaaagcacaggaaucu

SEQ ID NO: 2166816 - RNA, 19 nt, Homo sapiens
  misc_RNA (1)...(19): siRNA sense strand
gagacuacuucaucaauca

SEQ ID NO: 2166817 - RNA, 19 nt, Homo sapiens
  misc_RNA (1)...(19): siRNA sense strand
aaggacaacucacuucuuu

SEQ ID NO: 2166818 - RNA, 19 nt, Homo sapiens
  misc_RNA (1)...(19): siRNA sense strand
gaacauaaagaaagcacuu

SEQ ID NO: 2166819 - RNA, 19 nt, Homo sapiens
  misc_RNA (1)...(19): siRNA sense strand
gucagaagcugcaaagaau

SEQ ID NO: 2166820 - RNA, 19 nt, Homo sapiens
  misc_RNA (1)...(19): siRNA sense strand
gagaagaacauaaagaaag

SEQ ID NO: 2166821 - RNA, 19 nt, Homo sapiens
  misc_RNA (1)...(19): siRNA sense strand
ggucagaagcugcaaagaa

SEQ ID NO: 2166822 - RNA, 19 nt, Homo sapiens
  misc_RNA (1)...(19): siRNA sense strand
gcagaccagugacaauuca

SEQ ID NO: 2166823 - RNA, 19 nt, Homo sapiens
  misc_RNA (1)...(19): siRNA sense strand
guccaauccugucaaagua

SEQ ID NO: 2166824 - RNA, 19 nt, Homo sapiens
  misc_RNA (1)...(19): siRNA sense strand
ucacugucauucagccuua

SEQ ID NO: 2166825 - RNA, 19 nt, Homo sapiens
  misc_RNA (1)...(19): siRNA sense strand
caaaggcauugaacacuuc

SEQ ID NO: 2166826 - RNA, 19 nt, Homo sapiens
  misc_RNA (1)...(19): siRNA sense strand
ggaggucgauauuuaacau

SEQ ID NO: 2166827 - RNA, 19 nt, Homo sapiens
  misc_RNA (1)...(19): siRNA sense strand
gauggagccugaaacuaug

SEQ ID NO: 2166828 - RNA, 19 nt, Homo sapiens
  misc_RNA (1)...(19): siRNA sense strand
gcagagggcauccaguuug

SEQ ID NO: 2166829 - RNA, 19 nt, Homo sapiens
  misc_RNA (1)...(19): siRNA sense strand
ccaaaugaccaccuuuauu

SEQ ID NO: 2166830 - RNA, 19 nt, Homo sapiens
  misc_RNA (1)...(19): siRNA sense strand
gaauuagcuucgucccaaa

SEQ ID NO: 2166831 - RNA, 19 nt, Homo sapiens
  misc_RNA (1)...(19): siRNA sense strand
ccaccuggcuuuagagaca

SEQ ID NO: 2166832 - RNA, 19 nt, Homo sapiens
  misc_RNA (1)...(19): siRNA sense strand
cugaaacuauggagacuaa

SEQ ID NO: 2166833 - RNA, 19 nt, Homo sapiens
  misc_RNA (1)...(19): siRNA sense strand
ccagauaacauacauagau

SEQ ID NO: 2166834 - RNA, 19 nt, Homo sapiens
  misc_RNA (1)...(19): siRNA sense strand
gaaaggcgugaauuacauu

SEQ ID NO: 2166835 - RNA, 19 nt, Homo sapiens
  misc_RNA (1)...(19): siRNA sense strand
ccaaggcucuucaguggau

SEQ ID NO: 2166836 - RNA, 19 nt, Homo sapiens
  misc_RNA (1)...(19): siRNA sense strand
gcaaggacagucaaagaug

SEQ ID NO: 2166837 - RNA, 19 nt, Homo sapiens
  misc_RNA (1)...(19): siRNA sense strand
cagaagagcagaccgaguu

SEQ ID NO: 2166838 - RNA, 19 nt, Homo sapiens
  misc_RNA (1)...(19): siRNA sense strand
gaacuggccacagcacaaa

SEQ ID NO: 2166839 - RNA, 19 nt, Homo sapiens
  misc_RNA (1)...(19): siRNA sense strand
gaaaaccucucccgcaugu

SEQ ID NO: 2166840 - RNA, 19 nt, Homo sapiens
  misc_RNA (1)...(19): siRNA sense strand
gaaaaucucccucaaauac

SEQ ID NO: 2166841 - RNA, 19 nt, Homo sapiens
  misc_RNA (1)...(19): siRNA sense strand
gagaagggacuggauaaug

SEQ ID NO: 2166842 - RNA, 19 nt, Homo sapiens
  misc_RNA (1)...(19): siRNA sense strand
ucagugaccuacgauugua

SEQ ID NO: 2166843 - RNA, 19 nt, Homo sapiens
  misc_RNA (1)...(19): siRNA sense strand
gggcgagacuacuucauca

SEQ ID NO: 2166844 - RNA, 19 nt, Homo sapiens
  misc_RNA (1)...(19): siRNA sense strand
gucaacaccugagcacuuu

SEQ ID NO: 2166845 - RNA, 19 nt, Homo sapiens
  misc_RNA (1)...(19): siRNA sense strand
gaacuccacgugcuagaug

SEQ ID NO: 2166846 - RNA, 19 nt, Homo sapiens
  misc_RNA (1)...(19): siRNA sense strand
caaagcaaaucaaaacuug

SEQ ID NO: 2166847 - RNA, 19 nt, Homo sapiens
  misc_RNA (1)...(19): siRNA sense strand
ucgaguaucucuauguuca

SEQ ID NO: 2166848 - RNA, 19 nt, Homo sapiens
  misc_RNA (1)...(19): siRNA sense strand
ggagaucagauuguaauga

SEQ ID NO: 2166849 - RNA, 19 nt, Homo sapiens
  misc_RNA (1)...(19): siRNA sense strand
caagguccauuaucucaag

SEQ ID NO: 2166850 - RNA, 19 nt, Homo sapiens
  misc_RNA (1)...(19): siRNA sense strand
gacugcagcacuuccauua

SEQ ID NO: 2166851 - RNA, 19 nt, Homo sapiens
  misc_RNA (1)...(19): siRNA sense strand
gaacagcagaccagugaca

SEQ ID NO: 2166852 - RNA, 19 nt, Homo sapiens
  misc_RNA (1)...(19): siRNA sense strand
ggaggaggccagugguaaa

SEQ ID NO: 2166853 - RNA, 19 nt, Homo sapiens
  misc_RNA (1)...(19): siRNA sense strand
cagaaaaucucccucaaau

SEQ ID NO: 2166854 - RNA, 19 nt, Homo sapiens
  misc_RNA (1)...(19): siRNA sense strand
caaugaaacuaacucuucu

SEQ ID NO: 2166855 - RNA, 19 nt, Homo sapiens
  misc_RNA (1)...(19): siRNA sense strand
aagaagcccagauaacaua

SEQ ID NO: 2166856 - RNA, 19 nt, Homo sapiens
  misc_RNA (1)...(19): siRNA sense strand
aaagcucucugcacuacaa

SEQ ID NO: 2166857 - RNA, 19 nt, Homo sapiens
  misc_RNA (1)...(19): siRNA sense strand
gaaagagaagaacauaaag

SEQ ID NO: 2166858 - RNA, 19 nt, Homo sapiens
  misc_RNA (1)...(19): siRNA sense strand
aaaguccaauccugucaaa

SEQ ID NO: 2166859 - RNA, 19 nt, Homo sapiens
  misc_RNA (1)...(19): siRNA sense strand
ccaaaguugugccuuccaa

SEQ ID NO: 2166860 - RNA, 19 nt, Homo sapiens
  misc_RNA (1)...(19): siRNA sense strand
augaaacgcuacuagauga

SEQ ID NO: 2166861 - RNA, 19 nt, Homo sapiens
  misc_RNA (1)...(19): siRNA sense strand
ccaugaaccuggccugcuu

SEQ ID NO: 2166862 - RNA, 19 nt, Homo sapiens
  misc_RNA (1)...(19): siRNA sense strand
gaaagucuaucuggaaaau

SEQ ID NO: 2166863 - RNA, 19 nt, Homo sapiens
  misc_RNA (1)...(19): siRNA sense strand
gaacaggagacucuaacuc

SEQ ID NO: 2166864 - RNA, 19 nt, Homo sapiens
  misc_RNA (1)...(19): siRNA sense strand
gggaaaggcgugaauuaca

SEQ ID NO: 2166865 - RNA, 19 nt, Homo sapiens
  misc_RNA (1)...(19): siRNA sense strand
ccaggaggucgauauuuaa

SEQ ID NO: 2166866 - RNA, 19 nt, Homo sapiens
  misc_RNA (1)...(19): siRNA sense strand
gaguaucucuauguucaga

SEQ ID NO: 2166867 - RNA, 19 nt, Homo sapiens
  misc_RNA (1)...(19): siRNA sense strand
ugacacaggcaaucccuuu

SEQ ID NO: 2166868 - RNA, 19 nt, Homo sapiens
  misc_RNA (1)...(19): siRNA sense strand
gaaacuauggagacuaagu

SEQ ID NO: 2166869 - RNA, 19 nt, Homo sapiens
  misc_RNA (1)...(19): siRNA sense strand
agaagggacuggauaaugc

SEQ ID NO: 2166870 - RNA, 19 nt, Homo sapiens
  misc_RNA (1)...(19): siRNA sense strand
gaaaacaaggggaagcaua

SEQ ID NO: 2166871 - RNA, 19 nt, Homo sapiens
  misc_RNA (1)...(19): siRNA sense strand
cggaaacuguuaaggacaa

SEQ ID NO: 2166872 - RNA, 19 nt, Homo sapiens
  misc_RNA (1)...(19): siRNA sense strand
gcucugcacacagccauua

SEQ ID NO: 2166873 - RNA, 19 nt, Homo sapiens
  misc_RNA (1)...(19): siRNA sense strand
cagaaggugaugacaauga

SEQ ID NO: 2166874 - RNA, 19 nt, Homo sapiens
  misc_RNA (1)...(19): siRNA sense strand
ugacaucauugaccucaca

SEQ ID NO: 2166875 - RNA, 19 nt, Homo sapiens
  misc_RNA (1)...(19): siRNA sense strand
guccugaaaugcuggagaa

SEQ ID NO: 2166876 - RNA, 19 nt, Homo sapiens
  misc_RNA (1)...(19): siRNA sense strand
gagagcgggucaucgaucu

SEQ ID NO: 2166877 - RNA, 19 nt, Homo sapiens
  misc_RNA (1)...(19): siRNA sense strand
gaaggugggauggcugaaa

SEQ ID NO: 2166878 - RNA, 19 nt, Homo sapiens
  misc_RNA (1)...(19): siRNA sense strand
agauggagccugaaacuau

SEQ ID NO: 2166879 - RNA, 19 nt, Homo sapiens
  misc_RNA (1)...(19): siRNA sense strand
ggaaaauucuguuuaugca

SEQ ID NO: 2166880 - RNA, 19 nt, Homo sapiens
  misc_RNA (1)...(19): siRNA sense strand
gcaccggcacuuguacaua

SEQ ID NO: 2166881 - RNA, 19 nt, Homo sapiens
  misc_RNA (1)...(19): siRNA sense strand
cugcaaagcaugaaagaga

SEQ ID NO: 2166882 - RNA, 19 nt, Homo sapiens
  misc_RNA (1)...(19): siRNA sense strand
uaaggaaaccacaguguag

SEQ ID NO: 2166883 - RNA, 19 nt, Homo sapiens
  misc_RNA (1)...(19): siRNA sense strand
cgagacuacuucaucaauc

SEQ ID NO: 2166884 - RNA, 19 nt, Homo sapiens
  misc_RNA (1)...(19): siRNA sense strand
uaaauuugguacugugucu

SEQ ID NO: 2166885 - RNA, 19 nt, Homo sapiens
  misc_RNA (1)...(19): siRNA sense strand
ugaaaugacugagaguucu

SEQ ID NO: 2166886 - RNA, 19 nt, Homo sapiens
  misc_RNA (1)...(19): siRNA sense strand
aagaacagcagaccaguga

SEQ ID NO: 2166887 - RNA, 19 nt, Homo sapiens
  misc_RNA (1)...(19): siRNA sense strand
gcuaugaaacgcuacuaga

SEQ ID NO: 2166888 - RNA, 19 nt, Homo sapiens
  misc_RNA (1)...(19): siRNA sense strand
caccggcacuuguacauag

SEQ ID NO: 2166889 - RNA, 19 nt, Homo sapiens
  misc_RNA (1)...(19): siRNA sense strand
acaagaagcccagauaaca

SEQ ID NO: 2166890 - RNA, 19 nt, Homo sapiens
  misc_RNA (1)...(19): siRNA sense strand
cauaagccaugucaucaac

SEQ ID NO: 2166891 - RNA, 19 nt, Homo sapiens
  misc_RNA (1)...(19): siRNA sense strand
ccacggagccaccuuuaag

SEQ ID NO: 2166892 - RNA, 19 nt, Homo sapiens
  misc_RNA (1)...(19): siRNA sense strand
gcaaagcgagggccauuuu

SEQ ID NO: 2166893 - RNA, 19 nt, Homo sapiens
  misc_RNA (1)...(19): siRNA sense strand
agaugaggguccugaaaug

SEQ ID NO: 2166894 - RNA, 19 nt, Homo sapiens
  misc_RNA (1)...(19): siRNA sense strand
aaacacagcgacccaggaa

SEQ ID NO: 2166895 - RNA, 19 nt, Homo sapiens
  misc_RNA (1)...(19): siRNA sense strand
uauuuaacauggccaacaa

SEQ ID NO: 2166896 - RNA, 19 nt, Homo sapiens
  misc_RNA (1)...(19): siRNA sense strand
gaauucagauccagaaaua

SEQ ID NO: 2166897 - RNA, 19 nt, Homo sapiens
  misc_RNA (1)...(19): siRNA sense strand
cagaagagcuuguacauuc

SEQ ID NO: 2166898 - RNA, 19 nt, Homo sapiens
  misc_RNA (1)...(19): siRNA sense strand
gaacuuucauccaguguuu

SEQ ID NO: 2166899 - RNA, 19 nt, Homo sapiens
  misc_RNA (1)...(19): siRNA sense strand
gcagaugccagcccaauua

SEQ ID NO: 2166900 - RNA, 19 nt, Homo sapiens
  misc_RNA (1)...(19): siRNA sense strand
aaacaaaccuacaggagaa

SEQ ID NO: 2166901 - RNA, 19 nt, Homo sapiens
  misc_RNA (1)...(19): siRNA sense strand
uaaacaagcugugaucuau

SEQ ID NO: 2166902 - RNA, 19 nt, Homo sapiens
  misc_RNA (1)...(19): siRNA sense strand
gagaauagauaugucuuug

SEQ ID NO: 2166903 - RNA, 19 nt, Homo sapiens
  misc_RNA (1)...(19): siRNA sense strand
caaaugaccuacgacauga

SEQ ID NO: 2166904 - RNA, 19 nt, Homo sapiens
  misc_RNA (1)...(19): siRNA sense strand
caaggcagauguaaaugaa

SEQ ID NO: 2166905 - RNA, 19 nt, Homo sapiens
  misc_RNA (1)...(19): siRNA sense strand
gaaauacacaggagaauag

SEQ ID NO: 2166906 - RNA, 19 nt, Homo sapiens
  misc_RNA (1)...(19): siRNA sense strand
gaugccagcccaauuauaa

SEQ ID NO: 2166907 - RNA, 19 nt, Homo sapiens
  misc_RNA (1)...(19): siRNA sense strand
aaagaacgguuacagaaug

SEQ ID NO: 2166908 - RNA, 19 nt, Homo sapiens
  misc_RNA (1)...(19): siRNA sense strand
uggccgagcuucagaguaa

SEQ ID NO: 2166909 - RNA, 19 nt, Homo sapiens
  misc_RNA (1)...(19): siRNA sense strand
acucauaaguucagagaaa

SEQ ID NO: 2166910 - RNA, 19 nt, Homo sapiens
  misc_RNA (1)...(19): siRNA sense strand
guaaacaagcugugaucua

SEQ ID NO: 2166911 - RNA, 19 nt, Homo sapiens
  misc_RNA (1)...(19): siRNA sense strand
gaaaagaacgguuacagaa

SEQ ID NO: 2166912 - RNA, 19 nt, Homo sapiens
  misc_RNA (1)...(19): siRNA sense strand
gacaugacauugaaagaag

SEQ ID NO: 2166913 - RNA, 19 nt, Homo sapiens
  misc_RNA (1)...(19): siRNA sense strand
ccaaaugaccuacgacaug

SEQ ID NO: 2166914 - RNA, 19 nt, Homo sapiens
  misc_RNA (1)...(19): siRNA sense strand
gcuuguacauucaggcuaa

SEQ ID NO: 2166915 - RNA, 19 nt, Homo sapiens
  misc_RNA (1)...(19): siRNA sense strand
ggagaauagauaugucuuu

SEQ ID NO: 2166916 - RNA, 19 nt, Homo sapiens
  misc_RNA (1)...(19): siRNA sense strand
aaucaggccugguacagaa

SEQ ID NO: 2166917 - RNA, 19 nt, Homo sapiens
  misc_RNA (1)...(19): siRNA sense strand
ucucaacaaugcaagauau

SEQ ID NO: 2166918 - RNA, 19 nt, Homo sapiens
  misc_RNA (1)...(19): siRNA sense strand
agagagggaugaucagaau

SEQ ID NO: 2166919 - RNA, 19 nt, Homo sapiens
  misc_RNA (1)...(19): siRNA sense strand
aacaagcugugaucuauga

SEQ ID NO: 2166920 - RNA, 19 nt, Homo sapiens
  misc_RNA (1)...(19): siRNA sense strand
acacaaggcagauguaaau

SEQ ID NO: 2166921 - RNA, 19 nt, Homo sapiens
  misc_RNA (1)...(19): siRNA sense strand
gagcguuucucaacaaugc

SEQ ID NO: 2166922 - RNA, 19 nt, Homo sapiens
  misc_RNA (1)...(19): siRNA sense strand
auacacaggagaauagaua

SEQ ID NO: 2166923 - RNA, 19 nt, Homo sapiens
  misc_RNA (1)...(19): siRNA sense strand
cgacaugacauugaaagaa

SEQ ID NO: 2166924 - RNA, 19 nt, Homo sapiens
  misc_RNA (1)...(19): siRNA sense strand
guucagagaaagauuaaug

SEQ ID NO: 2166925 - RNA, 19 nt, Homo sapiens
  misc_RNA (1)...(19): siRNA sense strand
agaaauacacaggagaaua

SEQ ID NO: 2166926 - RNA, 19 nt, Homo sapiens
  misc_RNA (1)...(19): siRNA sense strand
caacaaugcaagauauaca

SEQ ID NO: 2166927 - RNA, 19 nt, Homo sapiens
  misc_RNA (1)...(19): siRNA sense strand
uaucagcguuuacgguuca

SEQ ID NO: 2166928 - RNA, 19 nt, Homo sapiens
  misc_RNA (1)...(19): siRNA sense strand
ccagaaauacacaggagaa

SEQ ID NO: 2166929 - RNA, 19 nt, Homo sapiens
  misc_RNA (1)...(19): siRNA sense strand
aagaacgguuacagaauga

SEQ ID NO: 2166930 - RNA, 19 nt, Homo sapiens
  misc_RNA (1)...(19): siRNA sense strand
ccuacgacaugacauugaa

SEQ ID NO: 2166931 - RNA, 19 nt, Homo sapiens
  misc_RNA (1)...(19): siRNA sense strand
caaaccuacaggagaauuu

SEQ ID NO: 2166932 - RNA, 19 nt, Homo sapiens
  misc_RNA (1)...(19): siRNA sense strand
gcucaggaaaucauaacaa

SEQ ID NO: 2166933 - RNA, 19 nt, Homo sapiens
  misc_RNA (1)...(19): siRNA sense strand
ggcuaaguaucagcguuua

SEQ ID NO: 2166934 - RNA, 19 nt, Homo sapiens
  misc_RNA (1)...(19): siRNA sense strand
guuugaacaucuugacuca

SEQ ID NO: 2166935 - RNA, 19 nt, Homo sapiens
  misc_RNA (1)...(19): siRNA sense strand
ccagcccaauuauaaauca

SEQ ID NO: 2166936 - RNA, 19 nt, Homo sapiens
  misc_RNA (1)...(19): siRNA sense strand
aggcagauguaaaugaaau

SEQ ID NO: 2166937 - RNA, 19 nt, Homo sapiens
  misc_RNA (1)...(19): siRNA sense strand
cagagaaagauuaaugaga

SEQ ID NO: 2166938 - RNA, 19 nt, Homo sapiens
  misc_RNA (1)...(19): siRNA sense strand
guacauucaggcuaaguau

SEQ ID NO: 2166939 - RNA, 19 nt, Homo sapiens
  misc_RNA (1)...(19): siRNA sense strand
agaagagcuuguacauuca

SEQ ID NO: 2166940 - RNA, 19 nt, Homo sapiens
  misc_RNA (1)...(19): siRNA sense strand
uuauaaaucaggccuggua

SEQ ID NO: 2166941 - RNA, 19 nt, Homo sapiens
  misc_RNA (1)...(19): siRNA sense strand
gguuacagaaugaagauga

SEQ ID NO: 2166942 - RNA, 19 nt, Homo sapiens
  misc_RNA (1)...(19): siRNA sense strand
gcagagagggaugaucaga

SEQ ID NO: 2166943 - RNA, 19 nt, Homo sapiens
  misc_RNA (1)...(19): siRNA sense strand
acaaggcagauguaaauga

SEQ ID NO: 2166944 - RNA, 19 nt, Homo sapiens
  misc_RNA (1)...(19): siRNA sense strand
gaaagaaggcgaaaagaac

SEQ ID NO: 2166945 - RNA, 19 nt, Homo sapiens
  misc_RNA (1)...(19): siRNA sense strand
gcagauguaaaugaaauuc

SEQ ID NO: 2166946 - RNA, 19 nt, Homo sapiens
  misc_RNA (1)...(19): siRNA sense strand
caucaccuggcauuacuuu

SEQ ID NO: 2166947 - RNA, 19 nt, Homo sapiens
  misc_RNA (1)...(19): siRNA sense strand
ccaucaaguuaaagcaaau

SEQ ID NO: 2166948 - RNA, 19 nt, Homo sapiens
  misc_RNA (1)...(19): siRNA sense strand
ugacucaacucagaauacu

SEQ ID NO: 2166949 - RNA, 19 nt, Homo sapiens
  misc_RNA (1)...(19): siRNA sense strand
cucaggaaaucauaacaau

SEQ ID NO: 2166950 - RNA, 19 nt, Homo sapiens
  misc_RNA (1)...(19): siRNA sense strand
gaacgguuacagaaugaag

SEQ ID NO: 2166951 - RNA, 19 nt, Homo sapiens
  misc_RNA (1)...(19): siRNA sense strand
uccaucaaguuaaagcaaa

SEQ ID NO: 2166952 - RNA, 19 nt, Homo sapiens
  misc_RNA (1)...(19): siRNA sense strand
aggagaauuugcucaggaa

SEQ ID NO: 2166953 - RNA, 19 nt, Homo sapiens
  misc_RNA (1)...(19): siRNA sense strand
caccuggcauuacuuuaca

SEQ ID NO: 2166954 - RNA, 19 nt, Homo sapiens
  misc_RNA (1)...(19): siRNA sense strand
ugaccuacgacaugacauu

SEQ ID NO: 2166955 - RNA, 19 nt, Homo sapiens
  misc_RNA (1)...(19): siRNA sense strand
gaguaaacaagcugugauc

SEQ ID NO: 2166956 - RNA, 19 nt, Homo sapiens
  misc_RNA (1)...(19): siRNA sense strand
gaugaucagaauuccaguu

SEQ ID NO: 2166957 - RNA, 19 nt, Homo sapiens
  misc_RNA (1)...(19): siRNA sense strand
aagcugugaucuaugaauc

SEQ ID NO: 2166958 - RNA, 19 nt, Homo sapiens
  misc_RNA (1)...(19): siRNA sense strand
cagagagggaugaucagaa

SEQ ID NO: 2166959 - RNA, 19 nt, Homo sapiens
  misc_RNA (1)...(19): siRNA sense strand
ucacucauaaguucagaga

SEQ ID NO: 2166960 - RNA, 19 nt, Homo sapiens
  misc_RNA (1)...(19): siRNA sense strand
uggcauuacuuuacaugag

SEQ ID NO: 2166961 - RNA, 19 nt, Homo sapiens
  misc_RNA (1)...(19): siRNA sense strand
ggagaauuugcucaggaaa

SEQ ID NO: 2166962 - RNA, 19 nt, Homo sapiens
  misc_RNA (1)...(19): siRNA sense strand
ugaauucagauccagaaau

SEQ ID NO: 2166963 - RNA, 19 nt, Homo sapiens
  misc_RNA (1)...(19): siRNA sense strand
acauucaggcuaaguauca

SEQ ID NO: 2166964 - RNA, 19 nt, Homo sapiens
  misc_RNA (1)...(19): siRNA sense strand
agagggaugaucagaauuc

SEQ ID NO: 2166965 - RNA, 19 nt, Homo sapiens
  misc_RNA (1)...(19): siRNA sense strand
gagcuucagaguaaacaag

SEQ ID NO: 2166966 - RNA, 19 nt, Homo sapiens
  misc_RNA (1)...(19): siRNA sense strand
uuacuuuacaugagcguuu

SEQ ID NO: 2166967 - RNA, 19 nt, Homo sapiens
  misc_RNA (1)...(19): siRNA sense strand
cagaguaaacaagcuguga

SEQ ID NO: 2166968 - RNA, 19 nt, Homo sapiens
  misc_RNA (1)...(19): siRNA sense strand
gagagggaugaucagaauu

SEQ ID NO: 2166969 - RNA, 19 nt, Homo sapiens
  misc_RNA (1)...(19): siRNA sense strand
gaccuacgacaugacauug

SEQ ID NO: 2166970 - RNA, 19 nt, Homo sapiens
  misc_RNA (1)...(19): siRNA sense strand
gauauacacaaggcagaug

SEQ ID NO: 2166971 - RNA, 19 nt, Homo sapiens
  misc_RNA (1)...(19): siRNA sense strand
cugcagagagggaugauca

SEQ ID NO: 2166972 - RNA, 19 nt, Homo sapiens
  misc_RNA (1)...(19): siRNA sense strand
ugaaagaaggcgaaaagaa

SEQ ID NO: 2166973 - RNA, 19 nt, Homo sapiens
  misc_RNA (1)...(19): siRNA sense strand
ucaccuggcauuacuuuac

SEQ ID NO: 2166974 - RNA, 19 nt, Homo sapiens
  misc_RNA (1)...(19): siRNA sense strand
aaugcaagauauacacaag

SEQ ID NO: 2166975 - RNA, 19 nt, Homo sapiens
  misc_RNA (1)...(19): siRNA sense strand
cacaggagaauagauaugu

SEQ ID NO: 2166976 - RNA, 19 nt, Homo sapiens
  misc_RNA (1)...(19): siRNA sense strand
gaagagcuuguacauucag

SEQ ID NO: 2166977 - RNA, 19 nt, Homo sapiens
  misc_RNA (1)...(19): siRNA sense strand
acagaagagcuuguacauu

SEQ ID NO: 2166978 - RNA, 19 nt, Homo sapiens
  misc_RNA (1)...(19): siRNA sense strand
aaaccuacaggagaauuug

SEQ ID NO: 2166979 - RNA, 19 nt, Homo sapiens
  misc_RNA (1)...(19): siRNA sense strand
aaacaagcugugaucuaug

SEQ ID NO: 2166980 - RNA, 19 nt, Homo sapiens
  misc_RNA (1)...(19): siRNA sense strand
caaugcaagauauacacaa

SEQ ID NO: 2166981 - RNA, 19 nt, Homo sapiens
  misc_RNA (1)...(19): siRNA sense strand
cagaugccagcccaauuau

SEQ ID NO: 2166982 - RNA, 19 nt, Homo sapiens
  misc_RNA (1)...(19): siRNA sense strand
guuacagaaugaagaugag

SEQ ID NO: 2166983 - RNA, 19 nt, Homo sapiens
  misc_RNA (1)...(19): siRNA sense strand
caagcugugaucuaugaau

SEQ ID NO: 2166984 - RNA, 19 nt, Homo sapiens
  misc_RNA (1)...(19): siRNA sense strand
gaauucagauccagaaaua

SEQ ID NO: 2166985 - RNA, 19 nt, Homo sapiens
  misc_RNA (1)...(19): siRNA sense strand
gaacuuucauccaguguuu

SEQ ID NO: 2166986 - RNA, 19 nt, Homo sapiens
  misc_RNA (1)...(19): siRNA sense strand
gaaaguggcaugaagauga

SEQ ID NO: 2166987 - RNA, 19 nt, Homo sapiens
  misc_RNA (1)...(19): siRNA sense strand
gaagaaaucacuuacaguu

SEQ ID NO: 2166988 - RNA, 19 nt, Homo sapiens
  misc_RNA (1)...(19): siRNA sense strand
gaacucagaaguacuguaa

SEQ ID NO: 2166989 - RNA, 19 nt, Homo sapiens
  misc_RNA (1)...(19): siRNA sense strand
caaaguauccuaugacuau

SEQ ID NO: 2166990 - RNA, 19 nt, Homo sapiens
  misc_RNA (1)...(19): siRNA sense strand
acaaggagcucauuucaga

SEQ ID NO: 2166991 - RNA, 19 nt, Homo sapiens
  misc_RNA (1)...(19): siRNA sense strand
aaacaaaccuacaggagaa

SEQ ID NO: 2166992 - RNA, 19 nt, Homo sapiens
  misc_RNA (1)...(19): siRNA sense strand
uaaacaagcugugaucuau

SEQ ID NO: 2166993 - RNA, 19 nt, Homo sapiens
  misc_RNA (1)...(19): siRNA sense strand
cuaaagacguggagaggua

SEQ ID NO: 2166994 - RNA, 19 nt, Homo sapiens
  misc_RNA (1)...(19): siRNA sense strand
caaccaaaguauccuauga

SEQ ID NO: 2166995 - RNA, 19 nt, Homo sapiens
  misc_RNA (1)...(19): siRNA sense strand
gagaauagauaugucuuug

SEQ ID NO: 2166996 - RNA, 19 nt, Homo sapiens
  misc_RNA (1)...(19): siRNA sense strand
caaaugaccuacgacauga

SEQ ID NO: 2166997 - RNA, 19 nt, Homo sapiens
  misc_RNA (1)...(19): siRNA sense strand
gaaggaaaguggcaugaag

SEQ ID NO: 2166998 - RNA, 19 nt, Homo sapiens
  misc_RNA (1)...(19): siRNA sense strand
gaaauacacaggagaauag

SEQ ID NO: 2166999 - RNA, 19 nt, Homo sapiens
  misc_RNA (1)...(19): siRNA sense strand
caaggcagauguaaaugaa

SEQ ID NO: 2167000 - RNA, 19 nt, Homo sapiens
  misc_RNA (1)...(19): siRNA sense strand
gagagagacucaagaugga

SEQ ID NO: 2167001 - RNA, 19 nt, Homo sapiens
  misc_RNA (1)...(19): siRNA sense strand
aaagaacgguuacagaaug

SEQ ID NO: 2167002 - RNA, 19 nt, Homo sapiens
  misc_RNA (1)...(19): siRNA sense strand
gagagcaauucuuccagua

SEQ ID NO: 2167003 - RNA, 19 nt, Homo sapiens
  misc_RNA (1)...(19): siRNA sense strand
gauuugcgaucuaguaaug

SEQ ID NO: 2167004 - RNA, 19 nt, Homo sapiens
  misc_RNA (1)...(19): siRNA sense strand
gugaaacccucgccuauca

SEQ ID NO: 2167005 - RNA, 19 nt, Homo sapiens
  misc_RNA (1)...(19): siRNA sense strand
uggccgagcuucagaguaa

SEQ ID NO: 2167006 - RNA, 19 nt, Homo sapiens
  misc_RNA (1)...(19): siRNA sense strand
gaaguacuguaaggaagaa

SEQ ID NO: 2167007 - RNA, 19 nt, Homo sapiens
  misc_RNA (1)...(19): siRNA sense strand
guaaacaagcugugaucua

SEQ ID NO: 2167008 - RNA, 19 nt, Homo sapiens
  misc_RNA (1)...(19): siRNA sense strand
gaaaagaacgguuacagaa

SEQ ID NO: 2167009 - RNA, 19 nt, Homo sapiens
  misc_RNA (1)...(19): siRNA sense strand
gacaugacauugaaagaag

SEQ ID NO: 2167010 - RNA, 19 nt, Homo sapiens
  misc_RNA (1)...(19): siRNA sense strand
ccaaaugaccuacgacaug

SEQ ID NO: 2167011 - RNA, 19 nt, Homo sapiens
  misc_RNA (1)...(19): siRNA sense strand
ccacagaguuagaggaagu

SEQ ID NO: 2167012 - RNA, 19 nt, Homo sapiens
  misc_RNA (1)...(19): siRNA sense strand
gauguugauuugcgaucua

SEQ ID NO: 2167013 - RNA, 19 nt, Homo sapiens
  misc_RNA (1)...(19): siRNA sense strand
ggagaauagauaugucuuu

SEQ ID NO: 2167014 - RNA, 19 nt, Homo sapiens
  misc_RNA (1)...(19): siRNA sense strand
ccaguaaccaacuugauaa

SEQ ID NO: 2167015 - RNA, 19 nt, Homo sapiens
  misc_RNA (1)...(19): siRNA sense strand
agagagggaugaucagaau

SEQ ID NO: 2167016 - RNA, 19 nt, Homo sapiens
  misc_RNA (1)...(19): siRNA sense strand
aacaagcugugaucuauga

SEQ ID NO: 2167017 - RNA, 19 nt, Homo sapiens
  misc_RNA (1)...(19): siRNA sense strand
acacaaggcagauguaaau

SEQ ID NO: 2167018 - RNA, 19 nt, Homo sapiens
  misc_RNA (1)...(19): siRNA sense strand
ucucaacaaugcaagauau

SEQ ID NO: 2167019 - RNA, 19 nt, Homo sapiens
  misc_RNA (1)...(19): siRNA sense strand
gagcguuucucaacaaugc

SEQ ID NO: 2167020 - RNA, 19 nt, Homo sapiens
  misc_RNA (1)...(19): siRNA sense strand
guaaggaagaagauagaaa

SEQ ID NO: 2167021 - RNA, 19 nt, Homo sapiens
  misc_RNA (1)...(19): siRNA sense strand
gaucuaguaaugacaaaug

SEQ ID NO: 2167022 - RNA, 19 nt, Homo sapiens
  misc_RNA (1)...(19): siRNA sense strand
ggagaacucagaaguacug

SEQ ID NO: 2167023 - RNA, 19 nt, Homo sapiens
  misc_RNA (1)...(19): siRNA sense strand
auacacaggagaauagaua

SEQ ID NO: 2167024 - RNA, 19 nt, Homo sapiens
  misc_RNA (1)...(19): siRNA sense strand
gagcaauucuuccaguaac

SEQ ID NO: 2167025 - RNA, 19 nt, Homo sapiens
  misc_RNA (1)...(19): siRNA sense strand
gaagagggagagagacuca

SEQ ID NO: 2167026 - RNA, 19 nt, Homo sapiens
  misc_RNA (1)...(19): siRNA sense strand
gcucauuucagaagaggua

SEQ ID NO: 2167027 - RNA, 19 nt, Homo sapiens
  misc_RNA (1)...(19): siRNA sense strand
cgacaugacauugaaagaa

SEQ ID NO: 2167028 - RNA, 19 nt, Homo sapiens
  misc_RNA (1)...(19): siRNA sense strand
agaaauacacaggagaaua

SEQ ID NO: 2167029 - RNA, 19 nt, Homo sapiens
  misc_RNA (1)...(19): siRNA sense strand
ccugaugaccacagaguua

SEQ ID NO: 2167030 - RNA, 19 nt, Homo sapiens
  misc_RNA (1)...(19): siRNA sense strand
aaugacaaauggaaggaaa

SEQ ID NO: 2167031 - RNA, 19 nt, Homo sapiens
  misc_RNA (1)...(19): siRNA sense strand
caggguugcuucuagcuau

SEQ ID NO: 2167032 - RNA, 19 nt, Homo sapiens
  misc_RNA (1)...(19): siRNA sense strand
cagcauugccuguacuuau

SEQ ID NO: 2167033 - RNA, 19 nt, Homo sapiens
  misc_RNA (1)...(19): siRNA sense strand
gaccacagaguuagaggaa

SEQ ID NO: 2167034 - RNA, 19 nt, Homo sapiens
  misc_RNA (1)...(19): siRNA sense strand
caacaaugcaagauauaca

SEQ ID NO: 2167035 - RNA, 19 nt, Homo sapiens
  misc_RNA (1)...(19): siRNA sense strand
gaagaaaacaguagauaca

SEQ ID NO: 2167036 - RNA, 19 nt, Homo sapiens
  misc_RNA (1)...(19): siRNA sense strand
gagacaaggagcucauuuc

SEQ ID NO: 2167037 - RNA, 19 nt, Homo sapiens
  misc_RNA (1)...(19): siRNA sense strand
aagaacgguuacagaauga

SEQ ID NO: 2167038 - RNA, 19 nt, Homo sapiens
  misc_RNA (1)...(19): siRNA sense strand
ccuacgacaugacauugaa

SEQ ID NO: 2167039 - RNA, 19 nt, Homo sapiens
  misc_RNA (1)...(19): siRNA sense strand
ccagaaauacacaggagaa

SEQ ID NO: 2167040 - RNA, 19 nt, Homo sapiens
  misc_RNA (1)...(19): siRNA sense strand
agcauucccucccaccuua

SEQ ID NO: 2167041 - RNA, 19 nt, Homo sapiens
  misc_RNA (1)...(19): siRNA sense strand
ccagagaccaguucagcaa

SEQ ID NO: 2167042 - RNA, 19 nt, Homo sapiens
  misc_RNA (1)...(19): siRNA sense strand
caaaccuacaggagaauuu

SEQ ID NO: 2167043 - RNA, 19 nt, Homo sapiens
  misc_RNA (1)...(19): siRNA sense strand
gaccaggacuuuucugaug

SEQ ID NO: 2167044 - RNA, 19 nt, Homo sapiens
  misc_RNA (1)...(19): siRNA sense strand
ggucaauagcagauucuuu

SEQ ID NO: 2167045 - RNA, 19 nt, Homo sapiens
  misc_RNA (1)...(19): siRNA sense strand
gcucaggaaaucauaacaa

SEQ ID NO: 2167046 - RNA, 19 nt, Homo sapiens
  misc_RNA (1)...(19): siRNA sense strand
guuugaacaucuugacuca

SEQ ID NO: 2167047 - RNA, 19 nt, Homo sapiens
  misc_RNA (1)...(19): siRNA sense strand
ggaagaaaucacuuacagu

SEQ ID NO: 2167048 - RNA, 19 nt, Homo sapiens
  misc_RNA (1)...(19): siRNA sense strand
gaaacccucgccuaucaau

SEQ ID NO: 2167049 - RNA, 19 nt, Homo sapiens
  misc_RNA (1)...(19): siRNA sense strand
ccaggaacccaaaguggaa

SEQ ID NO: 2167050 - RNA, 19 nt, Homo sapiens
  misc_RNA (1)...(19): siRNA sense strand
gguuacagaaugaagauga

SEQ ID NO: 2167051 - RNA, 19 nt, Homo sapiens
  misc_RNA (1)...(19): siRNA sense strand
aggcagauguaaaugaaau

SEQ ID NO: 2167052 - RNA, 19 nt, Homo sapiens
  misc_RNA (1)...(19): siRNA sense strand
gaaaacaguagauacauuc

SEQ ID NO: 2167053 - RNA, 19 nt, Homo sapiens
  misc_RNA (1)...(19): siRNA sense strand
gaaagaaggggauuguaga

SEQ ID NO: 2167054 - RNA, 19 nt, Homo sapiens
  misc_RNA (1)...(19): siRNA sense strand
gaacacccagagaccaguu

SEQ ID NO: 2167055 - RNA, 19 nt, Homo sapiens
  misc_RNA (1)...(19): siRNA sense strand
gcagagagggaugaucaga

SEQ ID NO: 2167056 - RNA, 19 nt, Homo sapiens
  misc_RNA (1)...(19): siRNA sense strand
agcauugccuguacuuauu

SEQ ID NO: 2167057 - RNA, 19 nt, Homo sapiens
  misc_RNA (1)...(19): siRNA sense strand
ucagaaguacuguaaggaa

SEQ ID NO: 2167058 - RNA, 19 nt, Homo sapiens
  misc_RNA (1)...(19): siRNA sense strand
gagcauucccucccaccuu

SEQ ID NO: 2167059 - RNA, 19 nt, Homo sapiens
  misc_RNA (1)...(19): siRNA sense strand
guaaccaacuugauaaaag

SEQ ID NO: 2167060 - RNA, 19 nt, Homo sapiens
  misc_RNA (1)...(19): siRNA sense strand
uccaguaaccaacuugaua

SEQ ID NO: 2167061 - RNA, 19 nt, Homo sapiens
  misc_RNA (1)...(19): siRNA sense strand
caaacguccuaagcucuug

SEQ ID NO: 2167062 - RNA, 19 nt, Homo sapiens
  misc_RNA (1)...(19): siRNA sense strand
gcagauucuuuuagauuug

SEQ ID NO: 2167063 - RNA, 19 nt, Homo sapiens
  misc_RNA (1)...(19): siRNA sense strand
gaaagaaggcgaaaagaac

SEQ ID NO: 2167064 - RNA, 19 nt, Homo sapiens
  misc_RNA (1)...(19): siRNA sense strand
acaaggcagauguaaauga

SEQ ID NO: 2167065 - RNA, 19 nt, Homo sapiens
  misc_RNA (1)...(19): siRNA sense strand
agaaggggauuguagaaaa

SEQ ID NO: 2167066 - RNA, 19 nt, Homo sapiens
  misc_RNA (1)...(19): siRNA sense strand
ccaaaguauccuaugacua

SEQ ID NO: 2167067 - RNA, 19 nt, Homo sapiens
  misc_RNA (1)...(19): siRNA sense strand
gcagauguaaaugaaauuc

SEQ ID NO: 2167068 - RNA, 19 nt, Homo sapiens
  misc_RNA (1)...(19): siRNA sense strand
gcgaucuaguaaugacaaa

SEQ ID NO: 2167069 - RNA, 19 nt, Homo sapiens
  misc_RNA (1)...(19): siRNA sense strand
guugauuugcgaucuagua

SEQ ID NO: 2167070 - RNA, 19 nt, Homo sapiens
  misc_RNA (1)...(19): siRNA sense strand
ggacaagucaaagaaccuu

SEQ ID NO: 2167071 - RNA, 19 nt, Homo sapiens
  misc_RNA (1)...(19): siRNA sense strand
agacaaggagcucauuuca

SEQ ID NO: 2167072 - RNA, 19 nt, Homo sapiens
  misc_RNA (1)...(19): siRNA sense strand
gaugggagaacucagaagu

SEQ ID NO: 2167073 - RNA, 19 nt, Homo sapiens
  misc_RNA (1)...(19): siRNA sense strand
ggagcucauuucagaagag

SEQ ID NO: 2167074 - RNA, 19 nt, Homo sapiens
  misc_RNA (1)...(19): siRNA sense strand
ugaggaucgugauuucaga

SEQ ID NO: 2167075 - RNA, 19 nt, Homo sapiens
  misc_RNA (1)...(19): siRNA sense strand
ggaaaguggcaugaagaug

SEQ ID NO: 2167076 - RNA, 19 nt, Homo sapiens
  misc_RNA (1)...(19): siRNA sense strand
caucaccuggcauuacuuu

SEQ ID NO: 2167077 - RNA, 19 nt, Homo sapiens
  misc_RNA (1)...(19): siRNA sense strand
ccaucaaguuaaagcaaau

SEQ ID NO: 2167078 - RNA, 19 nt, Homo sapiens
  misc_RNA (1)...(19): siRNA sense strand
uuaaaccgucuaagaaaga

SEQ ID NO: 2167079 - RNA, 19 nt, Homo sapiens
  misc_RNA (1)...(19): siRNA sense strand
cuuaggaagaaaucacuua

SEQ ID NO: 2167080 - RNA, 19 nt, Homo sapiens
  misc_RNA (1)...(19): siRNA sense strand
cucaggaaaucauaacaau

SEQ ID NO: 2167081 - RNA, 19 nt, Homo sapiens
  misc_RNA (1)...(19): siRNA sense strand
ugacucaacucagaauacu

SEQ ID NO: 2167082 - RNA, 19 nt, Homo sapiens
  misc_RNA (1)...(19): siRNA sense strand
aggaagaaaucacuuacag

SEQ ID NO: 2167083 - RNA, 19 nt, Homo sapiens
  misc_RNA (1)...(19): siRNA sense strand
cagaaaauauggacacaca

SEQ ID NO: 2167084 - RNA, 19 nt, Homo sapiens
  misc_RNA (1)...(19): siRNA sense strand
gaauaacucugucaaccua

SEQ ID NO: 2167085 - RNA, 19 nt, Homo sapiens
  misc_RNA (1)...(19): siRNA sense strand
gaagaaaucuaggcagaaa

SEQ ID NO: 2167086 - RNA, 19 nt, Homo sapiens
  misc_RNA (1)...(19): siRNA sense strand
ucacaggcauggccaauua

SEQ ID NO: 2167087 - RNA, 19 nt, Homo sapiens
  misc_RNA (1)...(19): siRNA sense strand
caaggaauauugacguaua

SEQ ID NO: 2167088 - RNA, 19 nt, Homo sapiens
  misc_RNA (1)...(19): siRNA sense strand
gcagaucuaccaccaguua

SEQ ID NO: 2167089 - RNA, 19 nt, Homo sapiens
  misc_RNA (1)...(19): siRNA sense strand
ggacaaauagaagacauua

SEQ ID NO: 2167090 - RNA, 19 nt, Homo sapiens
  misc_RNA (1)...(19): siRNA sense strand
gaaaauggccggugaauug

SEQ ID NO: 2167091 - RNA, 19 nt, Homo sapiens
  misc_RNA (1)...(19): siRNA sense strand
ugaaugaccuacaaaugaa

SEQ ID NO: 2167092 - RNA, 19 nt, Homo sapiens
  misc_RNA (1)...(19): siRNA sense strand
gcugagccauugucaaauu

SEQ ID NO: 2167093 - RNA, 19 nt, Homo sapiens
  misc_RNA (1)...(19): siRNA sense strand
gcaauacccugaucuucug

SEQ ID NO: 2167094 - RNA, 19 nt, Homo sapiens
  misc_RNA (1)...(19): siRNA sense strand
gaaccaccacucugcuuua

SEQ ID NO: 2167095 - RNA, 19 nt, Homo sapiens
  misc_RNA (1)...(19): siRNA sense strand
ugacguauauguacacaga

SEQ ID NO: 2167096 - RNA, 19 nt, Homo sapiens
  misc_RNA (1)...(19): siRNA sense strand
caaagcggcuauagaaaca

SEQ ID NO: 2167097 - RNA, 19 nt, Homo sapiens
  misc_RNA (1)...(19): siRNA sense strand
uagcaaagguguagauauc

SEQ ID NO: 2167098 - RNA, 19 nt, Homo sapiens
  misc_RNA (1)...(19): siRNA sense strand
cgacaaagucaucauguuu

SEQ ID NO: 2167099 - RNA, 19 nt, Homo sapiens
  misc_RNA (1)...(19): siRNA sense strand
ugaaagauccuaugauugu

SEQ ID NO: 2167100 - RNA, 19 nt, Homo sapiens
  misc_RNA (1)...(19): siRNA sense strand
gaaauggacaaauagaaga

SEQ ID NO: 2167101 - RNA, 19 nt, Homo sapiens
  misc_RNA (1)...(19): siRNA sense strand
ggaagaucuuguaguaaug

SEQ ID NO: 2167102 - RNA, 19 nt, Homo sapiens
  misc_RNA (1)...(19): siRNA sense strand
cggaagaucuuguaguaau

SEQ ID NO: 2167103 - RNA, 19 nt, Homo sapiens
  misc_RNA (1)...(19): siRNA sense strand
aggcauaucugcagaauca

SEQ ID NO: 2167104 - RNA, 19 nt, Homo sapiens
  misc_RNA (1)...(19): siRNA sense strand
gaaagauccuaugauuguu

SEQ ID NO: 2167105 - RNA, 19 nt, Homo sapiens
  misc_RNA (1)...(19): siRNA sense strand
guaaauacagugaagcaaa

SEQ ID NO: 2167106 - RNA, 19 nt, Homo sapiens
  misc_RNA (1)...(19): siRNA sense strand
ggacagagcaaaucagagu

SEQ ID NO: 2167107 - RNA, 19 nt, Homo sapiens
  misc_RNA (1)...(19): siRNA sense strand
ggaagagggcggaggcuaa

SEQ ID NO: 2167108 - RNA, 19 nt, Homo sapiens
  misc_RNA (1)...(19): siRNA sense strand
caacuagcacuuucuuauu

SEQ ID NO: 2167109 - RNA, 19 nt, Homo sapiens
  misc_RNA (1)...(19): siRNA sense strand
gcacagagaaacacgauca

SEQ ID NO: 2167110 - RNA, 19 nt, Homo sapiens
  misc_RNA (1)...(19): siRNA sense strand
ggccaaagcggcuauagaa

SEQ ID NO: 2167111 - RNA, 19 nt, Homo sapiens
  misc_RNA (1)...(19): siRNA sense strand
ggaaacauaaagauacuga

SEQ ID NO: 2167112 - RNA, 19 nt, Homo sapiens
  misc_RNA (1)...(19): siRNA sense strand
gcaaagguguagauaucau

SEQ ID NO: 2167113 - RNA, 19 nt, Homo sapiens
  misc_RNA (1)...(19): siRNA sense strand
gugauuaacuggagaaagg

SEQ ID NO: 2167114 - RNA, 19 nt, Homo sapiens
  misc_RNA (1)...(19): siRNA sense strand
gagaaacacgaucaagaaa

SEQ ID NO: 2167115 - RNA, 19 nt, Homo sapiens
  misc_RNA (1)...(19): siRNA sense strand
gcugagcaauacaaguuaa

SEQ ID NO: 2167116 - RNA, 19 nt, Homo sapiens
  misc_RNA (1)...(19): siRNA sense strand
gaaugggccugggaugcua

SEQ ID NO: 2167117 - RNA, 19 nt, Homo sapiens
  misc_RNA (1)...(19): siRNA sense strand
uaagaagcauaaccuacuu

SEQ ID NO: 2167118 - RNA, 19 nt, Homo sapiens
  misc_RNA (1)...(19): siRNA sense strand
cauaacgugugaugacuug

SEQ ID NO: 2167119 - RNA, 19 nt, Homo sapiens
  misc_RNA (1)...(19): siRNA sense strand
acauauugcugaugacuug

SEQ ID NO: 2167120 - RNA, 19 nt, Homo sapiens
  misc_RNA (1)...(19): siRNA sense strand
cuacaaggaauagaucuua

SEQ ID NO: 2167121 - RNA, 19 nt, Homo sapiens
  misc_RNA (1)...(19): siRNA sense strand
ccacucugcuuuaaaauaa

SEQ ID NO: 2167122 - RNA, 19 nt, Homo sapiens
  misc_RNA (1)...(19): siRNA sense strand
caacuuggccagauacugu

SEQ ID NO: 2167123 - RNA, 19 nt, Homo sapiens
  misc_RNA (1)...(19): siRNA sense strand
uccggaagaucuuguagua

SEQ ID NO: 2167124 - RNA, 19 nt, Homo sapiens
  misc_RNA (1)...(19): siRNA sense strand
uggagaagcugagccauug

SEQ ID NO: 2167125 - RNA, 19 nt, Homo sapiens
  misc_RNA (1)...(19): siRNA sense strand
caacuugcagguuuaaaga

SEQ ID NO: 2167126 - RNA, 19 nt, Homo sapiens
  misc_RNA (1)...(19): siRNA sense strand
ggaauagaucuuauaguag

SEQ ID NO: 2167127 - RNA, 19 nt, Homo sapiens
  misc_RNA (1)...(19): siRNA sense strand
cauaucugcagaaucauua

SEQ ID NO: 2167128 - RNA, 19 nt, Homo sapiens
  misc_RNA (1)...(19): siRNA sense strand
ccaauuauucuacaaggaa

SEQ ID NO: 2167129 - RNA, 19 nt, Homo sapiens
  misc_RNA (1)...(19): siRNA sense strand
cuacaacauucgacaaaca

SEQ ID NO: 2167130 - RNA, 19 nt, Homo sapiens
  misc_RNA (1)...(19): siRNA sense strand
ucaaauugggaucgcauua

SEQ ID NO: 2167131 - RNA, 19 nt, Homo sapiens
  misc_RNA (1)...(19): siRNA sense strand
agagaaacacgaucaagaa

SEQ ID NO: 2167132 - RNA, 19 nt, Homo sapiens
  misc_RNA (1)...(19): siRNA sense strand
cugaaugaccuacaaauga

SEQ ID NO: 2167133 - RNA, 19 nt, Homo sapiens
  misc_RNA (1)...(19): siRNA sense strand
ucuaaugccuggguuuauu

SEQ ID NO: 2167134 - RNA, 19 nt, Homo sapiens
  misc_RNA (1)...(19): siRNA sense strand
guaaagccaacgccaauuc

SEQ ID NO: 2167135 - RNA, 19 nt, Homo sapiens
  misc_RNA (1)...(19): siRNA sense strand
cccgaggucuugaucuuaa

SEQ ID NO: 2167136 - RNA, 19 nt, Homo sapiens
  misc_RNA (1)...(19): siRNA sense strand
ucaacuagcacuuucuuau

SEQ ID NO: 2167137 - RNA, 19 nt, Homo sapiens
  misc_RNA (1)...(19): siRNA sense strand
caacgccaauucagucaca

SEQ ID NO: 2167138 - RNA, 19 nt, Homo sapiens
  misc_RNA (1)...(19): siRNA sense strand
caagcugcaugucugaaau

SEQ ID NO: 2167139 - RNA, 19 nt, Homo sapiens
  misc_RNA (1)...(19): siRNA sense strand
aagaaaaccuggacaaaga

SEQ ID NO: 2167140 - RNA, 19 nt, Homo sapiens
  misc_RNA (1)...(19): siRNA sense strand
gagcaguagaggacuuuaa

SEQ ID NO: 2167141 - RNA, 19 nt, Homo sapiens
  misc_RNA (1)...(19): siRNA sense strand
caacauaacgugugaugac

SEQ ID NO: 2167142 - RNA, 19 nt, Homo sapiens
  misc_RNA (1)...(19): siRNA sense strand
gaaaugcaggugauuaacu

SEQ ID NO: 2167143 - RNA, 19 nt, Homo sapiens
  misc_RNA (1)...(19): siRNA sense strand
auagggaaaugaaagcaaa

SEQ ID NO: 2167144 - RNA, 19 nt, Homo sapiens
  misc_RNA (1)...(19): siRNA sense strand
gcauaucugcagaaucauu

SEQ ID NO: 2167145 - RNA, 19 nt, Homo sapiens
  misc_RNA (1)...(19): siRNA sense strand
caacaagcugcaugucuga

SEQ ID NO: 2167146 - RNA, 19 nt, Homo sapiens
  misc_RNA (1)...(19): siRNA sense strand
aagcugagccauugucaaa

SEQ ID NO: 2167147 - RNA, 19 nt, Homo sapiens
  misc_RNA (1)...(19): siRNA sense strand
ggaagaaaucuaggcagaa

SEQ ID NO: 2167148 - RNA, 19 nt, Homo sapiens
  misc_RNA (1)...(19): siRNA sense strand
gacaaagacgcaaggaguu

SEQ ID NO: 2167149 - RNA, 19 nt, Homo sapiens
  misc_RNA (1)...(19): siRNA sense strand
gaaacacgaucaagaaaac

SEQ ID NO: 2167150 - RNA, 19 nt, Homo sapiens
  misc_RNA (1)...(19): siRNA sense strand
cagagaaacacgaucaaga

SEQ ID NO: 2167151 - RNA, 19 nt, Homo sapiens
  misc_RNA (1)...(19): siRNA sense strand
ccaccacucugcuuuaaaa

SEQ ID NO: 2167152 - RNA, 19 nt, Homo sapiens
  misc_RNA (1)...(19): siRNA sense strand
guacgucaacuagcacuuu

SEQ ID NO: 2167153 - RNA, 19 nt, Homo sapiens
  misc_RNA (1)...(19): siRNA sense strand
gaggcugaaugaccuacaa

SEQ ID NO: 2167154 - RNA, 19 nt, Homo sapiens
  misc_RNA (1)...(19): siRNA sense strand
gcauauauggugguagaaa

SEQ ID NO: 2167155 - RNA, 19 nt, Homo sapiens
  misc_RNA (1)...(19): siRNA sense strand
cauaauaaggguagggauu

SEQ ID NO: 2167156 - RNA, 19 nt, Homo sapiens
  misc_RNA (1)...(19): siRNA sense strand
gaagcaaaagucagaauuu

SEQ ID NO: 2167157 - RNA, 19 nt, Homo sapiens
  misc_RNA (1)...(19): siRNA sense strand
caaaagaggcacagagaaa

SEQ ID NO: 2167158 - RNA, 19 nt, Homo sapiens
  misc_RNA (1)...(19): siRNA sense strand
gaaucuaguggcuguaaau

SEQ ID NO: 2167159 - RNA, 19 nt, Homo sapiens
  misc_RNA (1)...(19): siRNA sense strand
caacauucgacaaacacua

SEQ ID NO: 2167160 - RNA, 19 nt, Homo sapiens
  misc_RNA (1)...(19): siRNA sense strand
gaagagggcggaggcuaau

SEQ ID NO: 2167161 - RNA, 19 nt, Homo sapiens
  misc_RNA (1)...(19): siRNA sense strand
gucuugaucuuaaugaugu

SEQ ID NO: 2167162 - RNA, 19 nt, Homo sapiens
  misc_RNA (1)...(19): siRNA sense strand
caaggcauaucugcagaau

SEQ ID NO: 2167163 - RNA, 19 nt, Homo sapiens
  misc_RNA (1)...(19): siRNA sense strand
cccaagaauucguagagaa

SEQ ID NO: 2167164 - RNA, 19 nt, Homo sapiens
  misc_RNA (1)...(19): siRNA sense strand
gguuauagaugaggcagau

SEQ ID NO: 2167165 - RNA, 19 nt, Homo sapiens
  misc_RNA (1)...(19): siRNA sense strand
caaggaauagaucuuauag

SEQ ID NO: 2167166 - RNA, 19 nt, Homo sapiens
  misc_RNA (1)...(19): siRNA sense strand
aaaugcaggugauuaacug

SEQ ID NO: 2167167 - RNA, 19 nt, Homo sapiens
  misc_RNA (1)...(19): siRNA sense strand
ggaaaacauuguccuaucu

SEQ ID NO: 2167168 - RNA, 19 nt, Homo sapiens
  misc_RNA (1)...(19): siRNA sense strand
cccaaggaauauugacgua

SEQ ID NO: 2167169 - RNA, 19 nt, Homo sapiens
  misc_RNA (1)...(19): siRNA sense strand
aagcggaaacauaaagaua

SEQ ID NO: 2167170 - RNA, 19 nt, Homo sapiens
  misc_RNA (1)...(19): siRNA sense strand
gcugaaugaccuacaaaug

SEQ ID NO: 2167171 - RNA, 19 nt, Homo sapiens
  misc_RNA (1)...(19): siRNA sense strand
ggcggaggcuaauccaaga

SEQ ID NO: 2167172 - RNA, 19 nt, Homo sapiens
  misc_RNA (1)...(19): siRNA sense strand
acaagaaagcuacaacuca

SEQ ID NO: 2167173 - RNA, 19 nt, Homo sapiens
  misc_RNA (1)...(19): siRNA sense strand
gcggaaacauaaagauacu

SEQ ID NO: 2167174 - RNA, 19 nt, Homo sapiens
  misc_RNA (1)...(19): siRNA sense strand
caacgacaaagucaucaug

SEQ ID NO: 2167175 - RNA, 19 nt, Homo sapiens
  misc_RNA (1)...(19): siRNA sense strand
ccuacuugguuauagauga

SEQ ID NO: 2167176 - RNA, 19 nt, Homo sapiens
  misc_RNA (1)...(19): siRNA sense strand
caaagguguagauaucauu

SEQ ID NO: 2167177 - RNA, 19 nt, Homo sapiens
  misc_RNA (1)...(19): siRNA sense strand
uagaagacauuagcaaagg

SEQ ID NO: 2167178 - RNA, 19 nt, Homo sapiens
  misc_RNA (1)...(19): siRNA sense strand
cagaaauggacaaauagaa

SEQ ID NO: 2167179 - RNA, 19 nt, Homo sapiens
  misc_RNA (1)...(19): siRNA sense strand
uaucuaaugccuggguuua

SEQ ID NO: 2167180 - RNA, 19 nt, Homo sapiens
  misc_RNA (1)...(19): siRNA sense strand
uuacauagaauccaaagca

SEQ ID NO: 2167181 - RNA, 19 nt, Homo sapiens
  misc_RNA (1)...(19): siRNA sense strand
gagcaauacaaguuaaauc

SEQ ID NO: 2167182 - RNA, 19 nt, Homo sapiens
  misc_RNA (1)...(19): siRNA sense strand
aguaauggcugagcaauac

SEQ ID NO: 2167183 - RNA, 19 nt, Homo sapiens
  misc_RNA (1)...(19): siRNA sense strand
uugcauauauggugguaga

SEQ ID NO: 2167184 - RNA, 19 nt, Homo sapiens
  misc_RNA (1)...(19): siRNA sense strand
gaauaacucugucaaccua

SEQ ID NO: 2167185 - RNA, 19 nt, Homo sapiens
  misc_RNA (1)...(19): siRNA sense strand
gaagaaaucuaggcagaaa

SEQ ID NO: 2167186 - RNA, 19 nt, Homo sapiens
  misc_RNA (1)...(19): siRNA sense strand
ucacaggcauggccaauua

SEQ ID NO: 2167187 - RNA, 19 nt, Homo sapiens
  misc_RNA (1)...(19): siRNA sense strand
caaggaauauugacguaua

SEQ ID NO: 2167188 - RNA, 19 nt, Homo sapiens
  misc_RNA (1)...(19): siRNA sense strand
gcagaucuaccaccaguua

SEQ ID NO: 2167189 - RNA, 19 nt, Homo sapiens
  misc_RNA (1)...(19): siRNA sense strand
ggacaaauagaagacauua

SEQ ID NO: 2167190 - RNA, 19 nt, Homo sapiens
  misc_RNA (1)...(19): siRNA sense strand
gaaaauggccggugaauug

SEQ ID NO: 2167191 - RNA, 19 nt, Homo sapiens
  misc_RNA (1)...(19): siRNA sense strand
ugaaugaccuacaaaugaa

SEQ ID NO: 2167192 - RNA, 19 nt, Homo sapiens
  misc_RNA (1)...(19): siRNA sense strand
gcugagccauugucaaauu

SEQ ID NO: 2167193 - RNA, 19 nt, Homo sapiens
  misc_RNA (1)...(19): siRNA sense strand
gcaauacccugaucuucug

SEQ ID NO: 2167194 - RNA, 19 nt, Homo sapiens
  misc_RNA (1)...(19): siRNA sense strand
gaaccaccacucugcuuua

SEQ ID NO: 2167195 - RNA, 19 nt, Homo sapiens
  misc_RNA (1)...(19): siRNA sense strand
ugacguauauguacacaga

SEQ ID NO: 2167196 - RNA, 19 nt, Homo sapiens
  misc_RNA (1)...(19): siRNA sense strand
caaagcggcuauagaaaca

SEQ ID NO: 2167197 - RNA, 19 nt, Homo sapiens
  misc_RNA (1)...(19): siRNA sense strand
uagcaaagguguagauauc

SEQ ID NO: 2167198 - RNA, 19 nt, Homo sapiens
  misc_RNA (1)...(19): siRNA sense strand
cgacaaagucaucauguuu

SEQ ID NO: 2167199 - RNA, 19 nt, Homo sapiens
  misc_RNA (1)...(19): siRNA sense strand
ugaaagauccuaugauugu

SEQ ID NO: 2167200 - RNA, 19 nt, Homo sapiens
  misc_RNA (1)...(19): siRNA sense strand
gaaauggacaaauagaaga

SEQ ID NO: 2167201 - RNA, 19 nt, Homo sapiens
  misc_RNA (1)...(19): siRNA sense strand
ggaagaucuuguaguaaug

SEQ ID NO: 2167202 - RNA, 19 nt, Homo sapiens
  misc_RNA (1)...(19): siRNA sense strand
cggaagaucuuguaguaau

SEQ ID NO: 2167203 - RNA, 19 nt, Homo sapiens
  misc_RNA (1)...(19): siRNA sense strand
aggcauaucugcagaauca

SEQ ID NO: 2167204 - RNA, 19 nt, Homo sapiens
  misc_RNA (1)...(19): siRNA sense strand
gaaagauccuaugauuguu

SEQ ID NO: 2167205 - RNA, 19 nt, Homo sapiens
  misc_RNA (1)...(19): siRNA sense strand
guaaauacagugaagcaaa

SEQ ID NO: 2167206 - RNA, 19 nt, Homo sapiens
  misc_RNA (1)...(19): siRNA sense strand
ggacagagcaaaucagagu

SEQ ID NO: 2167207 - RNA, 19 nt, Homo sapiens
  misc_RNA (1)...(19): siRNA sense strand
ggaagagggcggaggcuaa

SEQ ID NO: 2167208 - RNA, 19 nt, Homo sapiens
  misc_RNA (1)...(19): siRNA sense strand
caacuagcacuuucuuauu

SEQ ID NO: 2167209 - RNA, 19 nt, Homo sapiens
  misc_RNA (1)...(19): siRNA sense strand
gcacagagaaacacgauca

SEQ ID NO: 2167210 - RNA, 19 nt, Homo sapiens
  misc_RNA (1)...(19): siRNA sense strand
ggccaaagcggcuauagaa

SEQ ID NO: 2167211 - RNA, 19 nt, Homo sapiens
  misc_RNA (1)...(19): siRNA sense strand
ggaaacauaaagauacuga

SEQ ID NO: 2167212 - RNA, 19 nt, Homo sapiens
  misc_RNA (1)...(19): siRNA sense strand
gcaaagguguagauaucau

SEQ ID NO: 2167213 - RNA, 19 nt, Homo sapiens
  misc_RNA (1)...(19): siRNA sense strand
gugauuaacuggagaaagg

SEQ ID NO: 2167214 - RNA, 19 nt, Homo sapiens
  misc_RNA (1)...(19): siRNA sense strand
gagaaacacgaucaagaaa

SEQ ID NO: 2167215 - RNA, 19 nt, Homo sapiens
  misc_RNA (1)...(19): siRNA sense strand
gcugagcaauacaaguuaa

SEQ ID NO: 2167216 - RNA, 19 nt, Homo sapiens
  misc_RNA (1)...(19): siRNA sense strand
gaaugggccugggaugcua

SEQ ID NO: 2167217 - RNA, 19 nt, Homo sapiens
  misc_RNA (1)...(19): siRNA sense strand
uaagaagcauaaccuacuu

SEQ ID NO: 2167218 - RNA, 19 nt, Homo sapiens
  misc_RNA (1)...(19): siRNA sense strand
cauaacgugugaugacuug

SEQ ID NO: 2167219 - RNA, 19 nt, Homo sapiens
  misc_RNA (1)...(19): siRNA sense strand
acauauugcugaugacuug

SEQ ID NO: 2167220 - RNA, 19 nt, Homo sapiens
  misc_RNA (1)...(19): siRNA sense strand
cuacaaggaauagaucuua

SEQ ID NO: 2167221 - RNA, 19 nt, Homo sapiens
  misc_RNA (1)...(19): siRNA sense strand
ccacucugcuuuaaaauaa

SEQ ID NO: 2167222 - RNA, 19 nt, Homo sapiens
  misc_RNA (1)...(19): siRNA sense strand
caacuuggccagauacugu

SEQ ID NO: 2167223 - RNA, 19 nt, Homo sapiens
  misc_RNA (1)...(19): siRNA sense strand
uccggaagaucuuguagua

SEQ ID NO: 2167224 - RNA, 19 nt, Homo sapiens
  misc_RNA (1)...(19): siRNA sense strand
uggagaagcugagccauug

SEQ ID NO: 2167225 - RNA, 19 nt, Homo sapiens
  misc_RNA (1)...(19): siRNA sense strand
caacuugcagguuuaaaga

SEQ ID NO: 2167226 - RNA, 19 nt, Homo sapiens
  misc_RNA (1)...(19): siRNA sense strand
ggaauagaucuuauaguag

SEQ ID NO: 2167227 - RNA, 19 nt, Homo sapiens
  misc_RNA (1)...(19): siRNA sense strand
cauaucugcagaaucauua

SEQ ID NO: 2167228 - RNA, 19 nt, Homo sapiens
  misc_RNA (1)...(19): siRNA sense strand
cuacaacauucgacaaaca

SEQ ID NO: 2167229 - RNA, 19 nt, Homo sapiens
  misc_RNA (1)...(19): siRNA sense strand
ccaauuauucuacaaggaa

SEQ ID NO: 2167230 - RNA, 19 nt, Homo sapiens
  misc_RNA (1)...(19): siRNA sense strand
ucaaauugggaucgcauua

SEQ ID NO: 2167231 - RNA, 19 nt, Homo sapiens
  misc_RNA (1)...(19): siRNA sense strand
agagaaacacgaucaagaa

SEQ ID NO: 2167232 - RNA, 19 nt, Homo sapiens
  misc_RNA (1)...(19): siRNA sense strand
cugaaugaccuacaaauga

SEQ ID NO: 2167233 - RNA, 19 nt, Homo sapiens
  misc_RNA (1)...(19): siRNA sense strand
ucuaaugccuggguuuauu

SEQ ID NO: 2167234 - RNA, 19 nt, Homo sapiens
  misc_RNA (1)...(19): siRNA sense strand
guaaagccaacgccaauuc

SEQ ID NO: 2167235 - RNA, 19 nt, Homo sapiens
  misc_RNA (1)...(19): siRNA sense strand
cccgaggucuugaucuuaa

SEQ ID NO: 2167236 - RNA, 19 nt, Homo sapiens
  misc_RNA (1)...(19): siRNA sense strand
ucaacuagcacuuucuuau

SEQ ID NO: 2167237 - RNA, 19 nt, Homo sapiens
  misc_RNA (1)...(19): siRNA sense strand
caacgccaauucagucaca

SEQ ID NO: 2167238 - RNA, 19 nt, Homo sapiens
  misc_RNA (1)...(19): siRNA sense strand
caagcugcaugucugaaau

SEQ ID NO: 2167239 - RNA, 19 nt, Homo sapiens
  misc_RNA (1)...(19): siRNA sense strand
aagaaaaccuggacaaaga

SEQ ID NO: 2167240 - RNA, 19 nt, Homo sapiens
  misc_RNA (1)...(19): siRNA sense strand
gagcaguagaggacuuuaa

SEQ ID NO: 2167241 - RNA, 19 nt, Homo sapiens
  misc_RNA (1)...(19): siRNA sense strand
caacauaacgugugaugac

SEQ ID NO: 2167242 - RNA, 19 nt, Homo sapiens
  misc_RNA (1)...(19): siRNA sense strand
gaaaugcaggugauuaacu

SEQ ID NO: 2167243 - RNA, 19 nt, Homo sapiens
  misc_RNA (1)...(19): siRNA sense strand
auagggaaaugaaagcaaa

SEQ ID NO: 2167244 - RNA, 19 nt, Homo sapiens
  misc_RNA (1)...(19): siRNA sense strand
gcauaucugcagaaucauu

SEQ ID NO: 2167245 - RNA, 19 nt, Homo sapiens
  misc_RNA (1)...(19): siRNA sense strand
caacaagcugcaugucuga

SEQ ID NO: 2167246 - RNA, 19 nt, Homo sapiens
  misc_RNA (1)...(19): siRNA sense strand
aagcugagccauugucaaa

SEQ ID NO: 2167247 - RNA, 19 nt, Homo sapiens
  misc_RNA (1)...(19): siRNA sense strand
ggaagaaaucuaggcagaa

SEQ ID NO: 2167248 - RNA, 19 nt, Homo sapiens
  misc_RNA (1)...(19): siRNA sense strand
gacaaagacgcaaggaguu

SEQ ID NO: 2167249 - RNA, 19 nt, Homo sapiens
  misc_RNA (1)...(19): siRNA sense strand
gaaacacgaucaagaaaac

SEQ ID NO: 2167250 - RNA, 19 nt, Homo sapiens
  misc_RNA (1)...(19): siRNA sense strand
cagagaaacacgaucaaga

SEQ ID NO: 2167251 - RNA, 19 nt, Homo sapiens
  misc_RNA (1)...(19): siRNA sense strand
ccaccacucugcuuuaaaa

SEQ ID NO: 2167252 - RNA, 19 nt, Homo sapiens
  misc_RNA (1)...(19): siRNA sense strand
guacgucaacuagcacuuu

SEQ ID NO: 2167253 - RNA, 19 nt, Homo sapiens
  misc_RNA (1)...(19): siRNA sense strand
gaggcugaaugaccuacaa

SEQ ID NO: 2167254 - RNA, 19 nt, Homo sapiens
  misc_RNA (1)...(19): siRNA sense strand
gcauauauggugguagaaa

SEQ ID NO: 2167255 - RNA, 19 nt, Homo sapiens
  misc_RNA (1)...(19): siRNA sense strand
cauaauaaggguagggauu

SEQ ID NO: 2167256 - RNA, 19 nt, Homo sapiens
  misc_RNA (1)...(19): siRNA sense strand
gaagcaaaagucagaauuu

SEQ ID NO: 2167257 - RNA, 19 nt, Homo sapiens
  misc_RNA (1)...(19): siRNA sense strand
caaaagaggcacagagaaa

SEQ ID NO: 2167258 - RNA, 19 nt, Homo sapiens
  misc_RNA (1)...(19): siRNA sense strand
gaaucuaguggcuguaaau

SEQ ID NO: 2167259 - RNA, 19 nt, Homo sapiens
  misc_RNA (1)...(19): siRNA sense strand
caacauucgacaaacacua

SEQ ID NO: 2167260 - RNA, 19 nt, Homo sapiens
  misc_RNA (1)...(19): siRNA sense strand
gaagagggcggaggcuaau

SEQ ID NO: 2167261 - RNA, 19 nt, Homo sapiens
  misc_RNA (1)...(19): siRNA sense strand
gucuugaucuuaaugaugu

SEQ ID NO: 2167262 - RNA, 19 nt, Homo sapiens
  misc_RNA (1)...(19): siRNA sense strand
caaggcauaucugcagaau

SEQ ID NO: 2167263 - RNA, 19 nt, Homo sapiens
  misc_RNA (1)...(19): siRNA sense strand
cccaagaauucguagagaa

SEQ ID NO: 2167264 - RNA, 19 nt, Homo sapiens
  misc_RNA (1)...(19): siRNA sense strand
gguuauagaugaggcagau

SEQ ID NO: 2167265 - RNA, 19 nt, Homo sapiens
  misc_RNA (1)...(19): siRNA sense strand
caaggaauagaucuuauag

SEQ ID NO: 2167266 - RNA, 19 nt, Homo sapiens
  misc_RNA (1)...(19): siRNA sense strand
aaaugcaggugauuaacug

SEQ ID NO: 2167267 - RNA, 19 nt, Homo sapiens
  misc_RNA (1)...(19): siRNA sense strand
ggaaaacauuguccuaucu

SEQ ID NO: 2167268 - RNA, 19 nt, Homo sapiens
  misc_RNA (1)...(19): siRNA sense strand
cccaaggaauauugacgua

SEQ ID NO: 2167269 - RNA, 19 nt, Homo sapiens
  misc_RNA (1)...(19): siRNA sense strand
aagcggaaacauaaagaua

SEQ ID NO: 2167270 - RNA, 19 nt, Homo sapiens
  misc_RNA (1)...(19): siRNA sense strand
gcugaaugaccuacaaaug

SEQ ID NO: 2167271 - RNA, 19 nt, Homo sapiens
  misc_RNA (1)...(19): siRNA sense strand
ggcggaggcuaauccaaga

SEQ ID NO: 2167272 - RNA, 19 nt, Homo sapiens
  misc_RNA (1)...(19): siRNA sense strand
acaagaaagcuacaacuca

SEQ ID NO: 2167273 - RNA, 19 nt, Homo sapiens
  misc_RNA (1)...(19): siRNA sense strand
gcggaaacauaaagauacu

SEQ ID NO: 2167274 - RNA, 19 nt, Homo sapiens
  misc_RNA (1)...(19): siRNA sense strand
caacgacaaagucaucaug

SEQ ID NO: 2167275 - RNA, 19 nt, Homo sapiens
  misc_RNA (1)...(19): siRNA sense strand
ccuacuugguuauagauga

SEQ ID NO: 2167276 - RNA, 19 nt, Homo sapiens
  misc_RNA (1)...(19): siRNA sense strand
caaagguguagauaucauu

SEQ ID NO: 2167277 - RNA, 19 nt, Homo sapiens
  misc_RNA (1)...(19): siRNA sense strand
uagaagacauuagcaaagg

SEQ ID NO: 2167278 - RNA, 19 nt, Homo sapiens
  misc_RNA (1)...(19): siRNA sense strand
cagaaauggacaaauagaa

SEQ ID NO: 2167279 - RNA, 19 nt, Homo sapiens
  misc_RNA (1)...(19): siRNA sense strand
uaucuaaugccuggguuua

SEQ ID NO: 2167280 - RNA, 19 nt, Homo sapiens
  misc_RNA (1)...(19): siRNA sense strand
uuacauagaauccaaagca

SEQ ID NO: 2167281 - RNA, 19 nt, Homo sapiens
  misc_RNA (1)...(19): siRNA sense strand
gagcaauacaaguuaaauc

SEQ ID NO: 2167282 - RNA, 19 nt, Homo sapiens
  misc_RNA (1)...(19): siRNA sense strand
aguaauggcugagcaauac

SEQ ID NO: 2167283 - RNA, 19 nt, Homo sapiens
  misc_RNA (1)...(19): siRNA sense strand
uugcauauauggugguaga

SEQ ID NO: 2167284 - RNA, 19 nt, Homo sapiens
  misc_RNA (1)...(19): siRNA sense strand
ggacagugcucaauaacaa

SEQ ID NO: 2167285 - RNA, 19 nt, Homo sapiens
  misc_RNA (1)...(19): siRNA sense strand
gcgaagaucugccuagaaa

SEQ ID NO: 2167286 - RNA, 19 nt, Homo sapiens
  misc_RNA (1)...(19): siRNA sense strand
agaagacgcuggagacaua

SEQ ID NO: 2167287 - RNA, 19 nt, Homo sapiens
  misc_RNA (1)...(19): siRNA sense strand
gaggagggauugcuucuug

SEQ ID NO: 2167288 - RNA, 19 nt, Homo sapiens
  misc_RNA (1)...(19): siRNA sense strand
ggaacgagaucaggacaaa

SEQ ID NO: 2167289 - RNA, 19 nt, Homo sapiens
  misc_RNA (1)...(19): siRNA sense strand
gagaugagacuuucuauuc

SEQ ID NO: 2167290 - RNA, 19 nt, Homo sapiens
  misc_RNA (1)...(19): siRNA sense strand
ggucaggcguugcaacuaa

SEQ ID NO: 2167291 - RNA, 19 nt, Homo sapiens
  misc_RNA (1)...(19): siRNA sense strand
gaauaccguucaugagauu

SEQ ID NO: 2167292 - RNA, 19 nt, Homo sapiens
  misc_RNA (1)...(19): siRNA sense strand
gggaauuuguggauccuua

SEQ ID NO: 2167293 - RNA, 19 nt, Homo sapiens
  misc_RNA (1)...(19): siRNA sense strand
ggacauagcaugguuaaca

SEQ ID NO: 2167294 - RNA, 19 nt, Homo sapiens
  misc_RNA (1)...(19): siRNA sense strand
gauaugacaucaccaacga

SEQ ID NO: 2167295 - RNA, 19 nt, Homo sapiens
  misc_RNA (1)...(19): siRNA sense strand
gcuagaaggcccacaagua

SEQ ID NO: 2167296 - RNA, 19 nt, Homo sapiens
  misc_RNA (1)...(19): siRNA sense strand
caggagaacucaagugguu

SEQ ID NO: 2167297 - RNA, 19 nt, Homo sapiens
  misc_RNA (1)...(19): siRNA sense strand
uaacaaauauggacaugag

SEQ ID NO: 2167298 - RNA, 19 nt, Homo sapiens
  misc_RNA (1)...(19): siRNA sense strand
gaacaacggaccaggagaa

SEQ ID NO: 2167299 - RNA, 19 nt, Homo sapiens
  misc_RNA (1)...(19): siRNA sense strand
gcgauuccauccucacuuu

SEQ ID NO: 2167300 - RNA, 19 nt, Homo sapiens
  misc_RNA (1)...(19): siRNA sense strand
gcucaugucuuacuuggau

SEQ ID NO: 2167301 - RNA, 19 nt, Homo sapiens
  misc_RNA (1)...(19): siRNA sense strand
gagaauaagagcaagauga

SEQ ID NO: 2167302 - RNA, 19 nt, Homo sapiens
  misc_RNA (1)...(19): siRNA sense strand
gaugagacuuucuauucaa

SEQ ID NO: 2167303 - RNA, 19 nt, Homo sapiens
  misc_RNA (1)...(19): siRNA sense strand
guaccacgcucugaauuug

SEQ ID NO: 2167304 - RNA, 19 nt, Homo sapiens
  misc_RNA (1)...(19): siRNA sense strand
gcuggaugguuuacaagua

SEQ ID NO: 2167305 - RNA, 19 nt, Homo sapiens
  misc_RNA (1)...(19): siRNA sense strand
gcgagaugcuuucacaaga

SEQ ID NO: 2167306 - RNA, 19 nt, Homo sapiens
  misc_RNA (1)...(19): siRNA sense strand
gcaaagaagggaccauaga

SEQ ID NO: 2167307 - RNA, 19 nt, Homo sapiens
  misc_RNA (1)...(19): siRNA sense strand
gaaauuaugagacucuuag

SEQ ID NO: 2167308 - RNA, 19 nt, Homo sapiens
  misc_RNA (1)...(19): siRNA sense strand
ggacaaacaaauaaugguu

SEQ ID NO: 2167309 - RNA, 19 nt, Homo sapiens
  misc_RNA (1)...(19): siRNA sense strand
caagcuggaugguuuacaa

SEQ ID NO: 2167310 - RNA, 19 nt, Homo sapiens
  misc_RNA (1)...(19): siRNA sense strand
ccagagugauuacuucaga

SEQ ID NO: 2167311 - RNA, 19 nt, Homo sapiens
  misc_RNA (1)...(19): siRNA sense strand
gaaccagagaugagacuuu

SEQ ID NO: 2167312 - RNA, 19 nt, Homo sapiens
  misc_RNA (1)...(19): siRNA sense strand
cuauagagcugaguaugaa

SEQ ID NO: 2167313 - RNA, 19 nt, Homo sapiens
  misc_RNA (1)...(19): siRNA sense strand
cagcagccuuuguuggaua

SEQ ID NO: 2167314 - RNA, 19 nt, Homo sapiens
  misc_RNA (1)...(19): siRNA sense strand
caaagaagggaccauagaa

SEQ ID NO: 2167315 - RNA, 19 nt, Homo sapiens
  misc_RNA (1)...(19): siRNA sense strand
ugaauuugcuguagguguu

SEQ ID NO: 2167316 - RNA, 19 nt, Homo sapiens
  misc_RNA (1)...(19): siRNA sense strand
ugucuuacuuggauaauga

SEQ ID NO: 2167317 - RNA, 19 nt, Homo sapiens
  misc_RNA (1)...(19): siRNA sense strand
ugacugugcuggacaaaca

SEQ ID NO: 2167318 - RNA, 19 nt, Homo sapiens
  misc_RNA (1)...(19): siRNA sense strand
gagaugcuuucacaagaug

SEQ ID NO: 2167319 - RNA, 19 nt, Homo sapiens
  misc_RNA (1)...(19): siRNA sense strand
cgaccugacugccuugcua

SEQ ID NO: 2167320 - RNA, 19 nt, Homo sapiens
  misc_RNA (1)...(19): siRNA sense strand
gagcagguucccagagaua

SEQ ID NO: 2167321 - RNA, 19 nt, Homo sapiens
  misc_RNA (1)...(19): siRNA sense strand
gguuaagacaucagaauuu

SEQ ID NO: 2167322 - RNA, 19 nt, Homo sapiens
  misc_RNA (1)...(19): siRNA sense strand
ccugcaagcuggaugguuu

SEQ ID NO: 2167323 - RNA, 19 nt, Homo sapiens
  misc_RNA (1)...(19): siRNA sense strand
gaauuacgcgagaugcuuu

SEQ ID NO: 2167324 - RNA, 19 nt, Homo sapiens
  misc_RNA (1)...(19): siRNA sense strand
ccauguauguucaacuuau

SEQ ID NO: 2167325 - RNA, 19 nt, Homo sapiens
  misc_RNA (1)...(19): siRNA sense strand
ggaggccuuuguuauaaug

SEQ ID NO: 2167326 - RNA, 19 nt, Homo sapiens
  misc_RNA (1)...(19): siRNA sense strand
uuauagaaguggugaaguu

SEQ ID NO: 2167327 - RNA, 19 nt, Homo sapiens
  misc_RNA (1)...(19): siRNA sense strand
gcagauggcagauaugucu

SEQ ID NO: 2167328 - RNA, 19 nt, Homo sapiens
  misc_RNA (1)...(19): siRNA sense strand
ugacaucaccaacgauaaa

SEQ ID NO: 2167329 - RNA, 19 nt, Homo sapiens
  misc_RNA (1)...(19): siRNA sense strand
gaaguuagacaccuuucug

SEQ ID NO: 2167330 - RNA, 19 nt, Homo sapiens
  misc_RNA (1)...(19): siRNA sense strand
uauugaagaucaucaguuc

SEQ ID NO: 2167331 - RNA, 19 nt, Homo sapiens
  misc_RNA (1)...(19): siRNA sense strand
ccaaaguauucagguauga

SEQ ID NO: 2167332 - RNA, 19 nt, Homo sapiens
  misc_RNA (1)...(19): siRNA sense strand
gaaguugaccaagcauuga

SEQ ID NO: 2167333 - RNA, 19 nt, Homo sapiens
  misc_RNA (1)...(19): siRNA sense strand
ggaacuauagagcugagua

SEQ ID NO: 2167334 - RNA, 19 nt, Homo sapiens
  misc_RNA (1)...(19): siRNA sense strand
gccuugcuaucgucaauaa

SEQ ID NO: 2167335 - RNA, 19 nt, Homo sapiens
  misc_RNA (1)...(19): siRNA sense strand
guacgaggcugugcagucu

SEQ ID NO: 2167336 - RNA, 19 nt, Homo sapiens
  misc_RNA (1)...(19): siRNA sense strand
uuaugagacucuuagauga

SEQ ID NO: 2167337 - RNA, 19 nt, Homo sapiens
  misc_RNA (1)...(19): siRNA sense strand
gaacuauagagcugaguau

SEQ ID NO: 2167338 - RNA, 19 nt, Homo sapiens
  misc_RNA (1)...(19): siRNA sense strand
gccauguccugcaauuuau

SEQ ID NO: 2167339 - RNA, 19 nt, Homo sapiens
  misc_RNA (1)...(19): siRNA sense strand
ccaugcuucuuccaaagua

SEQ ID NO: 2167340 - RNA, 19 nt, Homo sapiens
  misc_RNA (1)...(19): siRNA sense strand
gugcagaaauuaugagacu

SEQ ID NO: 2167341 - RNA, 19 nt, Homo sapiens
  misc_RNA (1)...(19): siRNA sense strand
ggacguggaaggauucugu

SEQ ID NO: 2167342 - RNA, 19 nt, Homo sapiens
  misc_RNA (1)...(19): siRNA sense strand
cgagaugcuuucacaagau

SEQ ID NO: 2167343 - RNA, 19 nt, Homo sapiens
  misc_RNA (1)...(19): siRNA sense strand
uagcaugguuaacaguaaa

SEQ ID NO: 2167344 - RNA, 19 nt, Homo sapiens
  misc_RNA (1)...(19): siRNA sense strand
gauuggacauagcaugguu

SEQ ID NO: 2167345 - RNA, 19 nt, Homo sapiens
  misc_RNA (1)...(19): siRNA sense strand
gggagaaguuagacaccuu

SEQ ID NO: 2167346 - RNA, 19 nt, Homo sapiens
  misc_RNA (1)...(19): siRNA sense strand
ggccugacuuucuguccua

SEQ ID NO: 2167347 - RNA, 19 nt, Homo sapiens
  misc_RNA (1)...(19): siRNA sense strand
gaccaagcauugaauuacu

SEQ ID NO: 2167348 - RNA, 19 nt, Homo sapiens
  misc_RNA (1)...(19): siRNA sense strand
ggagaaguuagacaccuuu

SEQ ID NO: 2167349 - RNA, 19 nt, Homo sapiens
  misc_RNA (1)...(19): siRNA sense strand
agaauaagagcaagaugaa

SEQ ID NO: 2167350 - RNA, 19 nt, Homo sapiens
  misc_RNA (1)...(19): siRNA sense strand
ccagagaugagacuuucua

SEQ ID NO: 2167351 - RNA, 19 nt, Homo sapiens
  misc_RNA (1)...(19): siRNA sense strand
gaggaaugauuggacauag

SEQ ID NO: 2167352 - RNA, 19 nt, Homo sapiens
  misc_RNA (1)...(19): siRNA sense strand
gacuuucuguccuaucuga

SEQ ID NO: 2167353 - RNA, 19 nt, Homo sapiens
  misc_RNA (1)...(19): siRNA sense strand
ucacucugguuauugaaga

SEQ ID NO: 2167354 - RNA, 19 nt, Homo sapiens
  misc_RNA (1)...(19): siRNA sense strand
uuggaggccuuuguuauaa

SEQ ID NO: 2167355 - RNA, 19 nt, Homo sapiens
  misc_RNA (1)...(19): siRNA sense strand
agaugagacuuucuauuca

SEQ ID NO: 2167356 - RNA, 19 nt, Homo sapiens
  misc_RNA (1)...(19): siRNA sense strand
uuacgaaguugaccaagca

SEQ ID NO: 2167357 - RNA, 19 nt, Homo sapiens
  misc_RNA (1)...(19): siRNA sense strand
ucuaacagcuaccgguuuc

SEQ ID NO: 2167358 - RNA, 19 nt, Homo sapiens
  misc_RNA (1)...(19): siRNA sense strand
cagcaaagaagggaccaua

SEQ ID NO: 2167359 - RNA, 19 nt, Homo sapiens
  misc_RNA (1)...(19): siRNA sense strand
caagcaagugugcguguuu

SEQ ID NO: 2167360 - RNA, 19 nt, Homo sapiens
  misc_RNA (1)...(19): siRNA sense strand
gguguuauugggaaguuua

SEQ ID NO: 2167361 - RNA, 19 nt, Homo sapiens
  misc_RNA (1)...(19): siRNA sense strand
ccgauaccaucauucagaa

SEQ ID NO: 2167362 - RNA, 19 nt, Homo sapiens
  misc_RNA (1)...(19): siRNA sense strand
ucccagagauagagcugua

SEQ ID NO: 2167363 - RNA, 19 nt, Homo sapiens
  misc_RNA (1)...(19): siRNA sense strand
agccauguccugcaauuua

SEQ ID NO: 2167364 - RNA, 19 nt, Homo sapiens
  misc_RNA (1)...(19): siRNA sense strand
gugcuggacaaacaaauaa

SEQ ID NO: 2167365 - RNA, 19 nt, Homo sapiens
  misc_RNA (1)...(19): siRNA sense strand
gaauuugcuguagguguua

SEQ ID NO: 2167366 - RNA, 19 nt, Homo sapiens
  misc_RNA (1)...(19): siRNA sense strand
cgaaguugaccaagcauug

SEQ ID NO: 2167367 - RNA, 19 nt, Homo sapiens
  misc_RNA (1)...(19): siRNA sense strand
guuagacaccuuucugcua

SEQ ID NO: 2167368 - RNA, 19 nt, Homo sapiens
  misc_RNA (1)...(19): siRNA sense strand
ggaaugauuggacauagca

SEQ ID NO: 2167369 - RNA, 19 nt, Homo sapiens
  misc_RNA (1)...(19): siRNA sense strand
ugaugucacucugguuauu

SEQ ID NO: 2167370 - RNA, 19 nt, Homo sapiens
  misc_RNA (1)...(19): siRNA sense strand
cuuggaggccuuuguuaua

SEQ ID NO: 2167371 - RNA, 19 nt, Homo sapiens
  misc_RNA (1)...(19): siRNA sense strand
uaugacaucaccaacgaua

SEQ ID NO: 2167372 - RNA, 19 nt, Homo sapiens
  misc_RNA (1)...(19): siRNA sense strand
gagacuuucuauucaacug

SEQ ID NO: 2167373 - RNA, 19 nt, Homo sapiens
  misc_RNA (1)...(19): siRNA sense strand
gguaugacccgagacagaa

SEQ ID NO: 2167374 - RNA, 19 nt, Homo sapiens
  misc_RNA (1)...(19): siRNA sense strand
uagcgaagaucugccuaga

SEQ ID NO: 2167375 - RNA, 19 nt, Homo sapiens
  misc_RNA (1)...(19): siRNA sense strand
ucuauucaacugagagaua

SEQ ID NO: 2167376 - RNA, 19 nt, Homo sapiens
  misc_RNA (1)...(19): siRNA sense strand
gcaggcagaaccagagaug

SEQ ID NO: 2167377 - RNA, 19 nt, Homo sapiens
  misc_RNA (1)...(19): siRNA sense strand
uugagaagguuaagacauc

SEQ ID NO: 2167378 - RNA, 19 nt, Homo sapiens
  misc_RNA (1)...(19): siRNA sense strand
uguccuaucugagcuuuga

SEQ ID NO: 2167379 - RNA, 19 nt, Homo sapiens
  misc_RNA (1)...(19): siRNA sense strand
gcagaaauuaugagacucu

SEQ ID NO: 2167380 - RNA, 19 nt, Homo sapiens
  misc_RNA (1)...(19): siRNA sense strand
gaagaucugccuagaaaau

SEQ ID NO: 2167381 - RNA, 19 nt, Homo sapiens
  misc_RNA (1)...(19): siRNA sense strand
guauuucgaggaaugauug

SEQ ID NO: 2167382 - RNA, 19 nt, Homo sapiens
  misc_RNA (1)...(19): siRNA sense strand
caacggaccaggagaacuc

SEQ ID NO: 2167383 - RNA, 19 nt, Homo sapiens
  misc_RNA (1)...(19): siRNA sense strand
gacauagcaugguuaacag

SEQ ID NO: 2167384 - RNA, 19 nt, Homo sapiens
  misc_RNA (1)...(19): siRNA sense strand
gaaagaagcccaaggaaua

SEQ ID NO: 2167385 - RNA, 19 nt, Homo sapiens
  misc_RNA (1)...(19): siRNA sense strand
caaggaagcuggauaugua

SEQ ID NO: 2167386 - RNA, 19 nt, Homo sapiens
  misc_RNA (1)...(19): siRNA sense strand
caacugagcuggagcauuc

SEQ ID NO: 2167387 - RNA, 19 nt, Homo sapiens
  misc_RNA (1)...(19): siRNA sense strand
gaagaugcauuuguaugua

SEQ ID NO: 2167388 - RNA, 19 nt, Homo sapiens
  misc_RNA (1)...(19): siRNA sense strand
cagcaaagcagcuaacuua

SEQ ID NO: 2167389 - RNA, 19 nt, Homo sapiens
  misc_RNA (1)...(19): siRNA sense strand
ggaauaccaugcuuucuuc

SEQ ID NO: 2167390 - RNA, 19 nt, Homo sapiens
  misc_RNA (1)...(19): siRNA sense strand
gcagaaagguauguagcua

SEQ ID NO: 2167391 - RNA, 19 nt, Homo sapiens
  misc_RNA (1)...(19): siRNA sense strand
gcagaccuguuuacggaua

SEQ ID NO: 2167392 - RNA, 19 nt, Homo sapiens
  misc_RNA (1)...(19): siRNA sense strand
cugaagagcuugccauuug

SEQ ID NO: 2167393 - RNA, 19 nt, Homo sapiens
  misc_RNA (1)...(19): siRNA sense strand
guaaucacaugagcauaua

SEQ ID NO: 2167394 - RNA, 19 nt, Homo sapiens
  misc_RNA (1)...(19): siRNA sense strand
gaggaggaauucugcauug

SEQ ID NO: 2167395 - RNA, 19 nt, Homo sapiens
  misc_RNA (1)...(19): siRNA sense strand
ucucuaagcuccuuccaaa

SEQ ID NO: 2167396 - RNA, 19 nt, Homo sapiens
  misc_RNA (1)...(19): siRNA sense strand
ggcacaaacucgguacuua

SEQ ID NO: 2167397 - RNA, 19 nt, Homo sapiens
  misc_RNA (1)...(19): siRNA sense strand
caaaacaaguggaagauuu

SEQ ID NO: 2167398 - RNA, 19 nt, Homo sapiens
  misc_RNA (1)...(19): siRNA sense strand
cggaagagcccaaaucaaa

SEQ ID NO: 2167399 - RNA, 19 nt, Homo sapiens
  misc_RNA (1)...(19): siRNA sense strand
ggaagcaucuggcacaaac

SEQ ID NO: 2167400 - RNA, 19 nt, Homo sapiens
  misc_RNA (1)...(19): siRNA sense strand
acacggaugugcccuauau

SEQ ID NO: 2167401 - RNA, 19 nt, Homo sapiens
  misc_RNA (1)...(19): siRNA sense strand
acacugagcccaauccuaa

SEQ ID NO: 2167402 - RNA, 19 nt, Homo sapiens
  misc_RNA (1)...(19): siRNA sense strand
caaggaauaucagaaugaa

SEQ ID NO: 2167403 - RNA, 19 nt, Homo sapiens
  misc_RNA (1)...(19): siRNA sense strand
gaagaugcuuauuucaaca

SEQ ID NO: 2167404 - RNA, 19 nt, Homo sapiens
  misc_RNA (1)...(19): siRNA sense strand
gcaagaucaugcacuuuca

SEQ ID NO: 2167405 - RNA, 19 nt, Homo sapiens
  misc_RNA (1)...(19): siRNA sense strand
ucauaaagcagaccuguuu

SEQ ID NO: 2167406 - RNA, 19 nt, Homo sapiens
  misc_RNA (1)...(19): siRNA sense strand
ggaagaugcauuuguaugu

SEQ ID NO: 2167407 - RNA, 19 nt, Homo sapiens
  misc_RNA (1)...(19): siRNA sense strand
acaguuagaugaagaagau

SEQ ID NO: 2167408 - RNA, 19 nt, Homo sapiens
  misc_RNA (1)...(19): siRNA sense strand
gagaguaggaggaggaauu

SEQ ID NO: 2167409 - RNA, 19 nt, Homo sapiens
  misc_RNA (1)...(19): siRNA sense strand
caauguaggucuagaagag

SEQ ID NO: 2167410 - RNA, 19 nt, Homo sapiens
  misc_RNA (1)...(19): siRNA sense strand
gcaaagugcguccagcaaa

SEQ ID NO: 2167411 - RNA, 19 nt, Homo sapiens
  misc_RNA (1)...(19): siRNA sense strand
gaagaggaagacccaaauu

SEQ ID NO: 2167412 - RNA, 19 nt, Homo sapiens
  misc_RNA (1)...(19): siRNA sense strand
aaagguauguagcuaguga

SEQ ID NO: 2167413 - RNA, 19 nt, Homo sapiens
  misc_RNA (1)...(19): siRNA sense strand
ggaagacuuguguggaaua

SEQ ID NO: 2167414 - RNA, 19 nt, Homo sapiens
  misc_RNA (1)...(19): siRNA sense strand
agacuacuaugcuuuguau

SEQ ID NO: 2167415 - RNA, 19 nt, Homo sapiens
  misc_RNA (1)...(19): siRNA sense strand
gcaaugaagccagcugaaa

SEQ ID NO: 2167416 - RNA, 19 nt, Homo sapiens
  misc_RNA (1)...(19): siRNA sense strand
gcagcaaggguuccaguuu

SEQ ID NO: 2167417 - RNA, 19 nt, Homo sapiens
  misc_RNA (1)...(19): siRNA sense strand
gaacuuggagacuuucaug

SEQ ID NO: 2167418 - RNA, 19 nt, Homo sapiens
  misc_RNA (1)...(19): siRNA sense strand
gagccaaucagacaugaaa

SEQ ID NO: 2167419 - RNA, 19 nt, Homo sapiens
  misc_RNA (1)...(19): siRNA sense strand
gcaaagcagcuaacuuaca

SEQ ID NO: 2167420 - RNA, 19 nt, Homo sapiens
  misc_RNA (1)...(19): siRNA sense strand
guacagcguugaugguauc

SEQ ID NO: 2167421 - RNA, 19 nt, Homo sapiens
  misc_RNA (1)...(19): siRNA sense strand
cagcaaggguuccaguuuc

SEQ ID NO: 2167422 - RNA, 19 nt, Homo sapiens
  misc_RNA (1)...(19): siRNA sense strand
caaagcagcuaacuuacac

SEQ ID NO: 2167423 - RNA, 19 nt, Homo sapiens
  misc_RNA (1)...(19): siRNA sense strand
gguaaucacaugagcauau

SEQ ID NO: 2167424 - RNA, 19 nt, Homo sapiens
  misc_RNA (1)...(19): siRNA sense strand
agaugaagaugcuuauuuc

SEQ ID NO: 2167425 - RNA, 19 nt, Homo sapiens
  misc_RNA (1)...(19): siRNA sense strand
gcaaggaagcuggauaugu

SEQ ID NO: 2167426 - RNA, 19 nt, Homo sapiens
  misc_RNA (1)...(19): siRNA sense strand
agacaggacuucacuaaaa

SEQ ID NO: 2167427 - RNA, 19 nt, Homo sapiens
  misc_RNA (1)...(19): siRNA sense strand
caaagugcguccagcaaag

SEQ ID NO: 2167428 - RNA, 19 nt, Homo sapiens
  misc_RNA (1)...(19): siRNA sense strand
caucaaacuucaugccaau

SEQ ID NO: 2167429 - RNA, 19 nt, Homo sapiens
  misc_RNA (1)...(19): siRNA sense strand
ugaagagcuugccauuuga

SEQ ID NO: 2167430 - RNA, 19 nt, Homo sapiens
  misc_RNA (1)...(19): siRNA sense strand
gaucaaaguacagcagaaa

SEQ ID NO: 2167431 - RNA, 19 nt, Homo sapiens
  misc_RNA (1)...(19): siRNA sense strand
uuuggaagaugcauuugua

SEQ ID NO: 2167432 - RNA, 19 nt, Homo sapiens
  misc_RNA (1)...(19): siRNA sense strand
ggucagcagguugguauua

SEQ ID NO: 2167433 - RNA, 19 nt, Homo sapiens
  misc_RNA (1)...(19): siRNA sense strand
gaugugcccuauauuccuu

SEQ ID NO: 2167434 - RNA, 19 nt, Homo sapiens
  misc_RNA (1)...(19): siRNA sense strand
aaagaaggauuuggcucua

SEQ ID NO: 2167435 - RNA, 19 nt, Homo sapiens
  misc_RNA (1)...(19): siRNA sense strand
gucagaauuuagaccuuua

SEQ ID NO: 2167436 - RNA, 19 nt, Homo sapiens
  misc_RNA (1)...(19): siRNA sense strand
ccaaggaauaucagaauga

SEQ ID NO: 2167437 - RNA, 19 nt, Homo sapiens
  misc_RNA (1)...(19): siRNA sense strand
gaagcuauagccaggacua

SEQ ID NO: 2167438 - RNA, 19 nt, Homo sapiens
  misc_RNA (1)...(19): siRNA sense strand
ugaagaagaugaagaugcu

SEQ ID NO: 2167439 - RNA, 19 nt, Homo sapiens
  misc_RNA (1)...(19): siRNA sense strand
aaucagaacuuggagacuu

SEQ ID NO: 2167440 - RNA, 19 nt, Homo sapiens
  misc_RNA (1)...(19): siRNA sense strand
ggaucaaaguacagcagaa

SEQ ID NO: 2167441 - RNA, 19 nt, Homo sapiens
  misc_RNA (1)...(19): siRNA sense strand
gaagagcuugccauuugaa

SEQ ID NO: 2167442 - RNA, 19 nt, Homo sapiens
  misc_RNA (1)...(19): siRNA sense strand
guauguagcuagugaaucc

SEQ ID NO: 2167443 - RNA, 19 nt, Homo sapiens
  misc_RNA (1)...(19): siRNA sense strand
ggaguugccagcaguucua

SEQ ID NO: 2167444 - RNA, 19 nt, Homo sapiens
  misc_RNA (1)...(19): siRNA sense strand
cuacaucagucccaaagca

SEQ ID NO: 2167445 - RNA, 19 nt, Homo sapiens
  misc_RNA (1)...(19): siRNA sense strand
cagcaguucuaauggauca

SEQ ID NO: 2167446 - RNA, 19 nt, Homo sapiens
  misc_RNA (1)...(19): siRNA sense strand
gguaggagcaacaucaaug

SEQ ID NO: 2167447 - RNA, 19 nt, Homo sapiens
  misc_RNA (1)...(19): siRNA sense strand
ggaaacauuacccaucuca

SEQ ID NO: 2167448 - RNA, 19 nt, Homo sapiens
  misc_RNA (1)...(19): siRNA sense strand
gcacaaacucgguacuuac

SEQ ID NO: 2167449 - RNA, 19 nt, Homo sapiens
  misc_RNA (1)...(19): siRNA sense strand
agaggaagacccaaauuug

SEQ ID NO: 2167450 - RNA, 19 nt, Homo sapiens
  misc_RNA (1)...(19): siRNA sense strand
gaucccacauugcuacauc

SEQ ID NO: 2167451 - RNA, 19 nt, Homo sapiens
  misc_RNA (1)...(19): siRNA sense strand
ggaggaggaauucugcauu

SEQ ID NO: 2167452 - RNA, 19 nt, Homo sapiens
  misc_RNA (1)...(19): siRNA sense strand
ggaagagcccaaaucaaag

SEQ ID NO: 2167453 - RNA, 19 nt, Homo sapiens
  misc_RNA (1)...(19): siRNA sense strand
guccugcucucagucauaa

SEQ ID NO: 2167454 - RNA, 19 nt, Homo sapiens
  misc_RNA (1)...(19): siRNA sense strand
cagcguugaugguaucuca

SEQ ID NO: 2167455 - RNA, 19 nt, Homo sapiens
  misc_RNA (1)...(19): siRNA sense strand
gaagaugaagaugcuuauu

SEQ ID NO: 2167456 - RNA, 19 nt, Homo sapiens
  misc_RNA (1)...(19): siRNA sense strand
ucuaauggaucaaaguaca

SEQ ID NO: 2167457 - RNA, 19 nt, Homo sapiens
  misc_RNA (1)...(19): siRNA sense strand
gcugaaagaagcccaagga

SEQ ID NO: 2167458 - RNA, 19 nt, Homo sapiens
  misc_RNA (1)...(19): siRNA sense strand
gcaguuccucuuucccuuu

SEQ ID NO: 2167459 - RNA, 19 nt, Homo sapiens
  misc_RNA (1)...(19): siRNA sense strand
gaggugacauuugcaacug

SEQ ID NO: 2167460 - RNA, 19 nt, Homo sapiens
  misc_RNA (1)...(19): siRNA sense strand
gaagacuuguguggaauac

SEQ ID NO: 2167461 - RNA, 19 nt, Homo sapiens
  misc_RNA (1)...(19): siRNA sense strand
ugaaagaagcccaaggaau

SEQ ID NO: 2167462 - RNA, 19 nt, Homo sapiens
  misc_RNA (1)...(19): siRNA sense strand
ggucacccauggccagaau

SEQ ID NO: 2167463 - RNA, 19 nt, Homo sapiens
  misc_RNA (1)...(19): siRNA sense strand
aaaccagacuacuaugcuu

SEQ ID NO: 2167464 - RNA, 19 nt, Homo sapiens
  misc_RNA (1)...(19): siRNA sense strand
guucuaauggaucaaagua

SEQ ID NO: 2167465 - RNA, 19 nt, Homo sapiens
  misc_RNA (1)...(19): siRNA sense strand
uaucucacaucuuacaauc

SEQ ID NO: 2167466 - RNA, 19 nt, Homo sapiens
  misc_RNA (1)...(19): siRNA sense strand
caaacuucaugccaauauc

SEQ ID NO: 2167467 - RNA, 19 nt, Homo sapiens
  misc_RNA (1)...(19): siRNA sense strand
aagaagaugaagaugcuua

SEQ ID NO: 2167468 - RNA, 19 nt, Homo sapiens
  misc_RNA (1)...(19): siRNA sense strand
agaaagguauguagcuagu

SEQ ID NO: 2167469 - RNA, 19 nt, Homo sapiens
  misc_RNA (1)...(19): siRNA sense strand
aagaggaagacccaaauuu

SEQ ID NO: 2167470 - RNA, 19 nt, Homo sapiens
  misc_RNA (1)...(19): siRNA sense strand
guagagcccacugcaauga

SEQ ID NO: 2167471 - RNA, 19 nt, Homo sapiens
  misc_RNA (1)...(19): siRNA sense strand
cauauauucuggccucaca

SEQ ID NO: 2167472 - RNA, 19 nt, Homo sapiens
  misc_RNA (1)...(19): siRNA sense strand
uauauggacccugucuuua

SEQ ID NO: 2167473 - RNA, 19 nt, Homo sapiens
  misc_RNA (1)...(19): siRNA sense strand
cuggaagacuuguguggaa

SEQ ID NO: 2167474 - RNA, 19 nt, Homo sapiens
  misc_RNA (1)...(19): siRNA sense strand
caacacaccaacugcugaa

SEQ ID NO: 2167475 - RNA, 19 nt, Homo sapiens
  misc_RNA (1)...(19): siRNA sense strand
gaagagcuuucagcaagac

SEQ ID NO: 2167476 - RNA, 19 nt, Homo sapiens
  misc_RNA (1)...(19): siRNA sense strand
gcuguaaguuuucugguaa

SEQ ID NO: 2167477 - RNA, 19 nt, Homo sapiens
  misc_RNA (1)...(19): siRNA sense strand
ggaggaauucugcauugga

SEQ ID NO: 2167478 - RNA, 19 nt, Homo sapiens
  misc_RNA (1)...(19): siRNA sense strand
ccaauuagagcagaggaaa

SEQ ID NO: 2167479 - RNA, 19 nt, Homo sapiens
  misc_RNA (1)...(19): siRNA sense strand
aaggaaacauuacccaucu

SEQ ID NO: 2167480 - RNA, 19 nt, Homo sapiens
  misc_RNA (1)...(19): siRNA sense strand
ggcaagaucaugcacuuuc

SEQ ID NO: 2167481 - RNA, 19 nt, Homo sapiens
  misc_RNA (1)...(19): siRNA sense strand
caaugaagccagcugaaag

SEQ ID NO: 2167482 - RNA, 19 nt, Homo sapiens
  misc_RNA (1)...(19): siRNA sense strand
cuaagcuccuuccaaacaa

SEQ ID NO: 2167483 - RNA, 19 nt, Homo sapiens
  misc_RNA (1)...(19): siRNA sense strand
uuauauggacccugucuuu

SEQ ID NO: 2167484 - RNA, 19 nt, Homo sapiens
  misc_RNA (1)...(19): siRNA sense strand
gaaagaagcccaaggaaua

SEQ ID NO: 2167485 - RNA, 19 nt, Homo sapiens
  misc_RNA (1)...(19): siRNA sense strand
caaggaagcuggauaugua

SEQ ID NO: 2167486 - RNA, 19 nt, Homo sapiens
  misc_RNA (1)...(19): siRNA sense strand
caacugagcuggagcauuc

SEQ ID NO: 2167487 - RNA, 19 nt, Homo sapiens
  misc_RNA (1)...(19): siRNA sense strand
gaagaugcauuuguaugua

SEQ ID NO: 2167488 - RNA, 19 nt, Homo sapiens
  misc_RNA (1)...(19): siRNA sense strand
cagcaaagcagcuaacuua

SEQ ID NO: 2167489 - RNA, 19 nt, Homo sapiens
  misc_RNA (1)...(19): siRNA sense strand
ggaauaccaugcuuucuuc

SEQ ID NO: 2167490 - RNA, 19 nt, Homo sapiens
  misc_RNA (1)...(19): siRNA sense strand
gcagaaagguauguagcua

SEQ ID NO: 2167491 - RNA, 19 nt, Homo sapiens
  misc_RNA (1)...(19): siRNA sense strand
gcagaccuguuuacggaua

SEQ ID NO: 2167492 - RNA, 19 nt, Homo sapiens
  misc_RNA (1)...(19): siRNA sense strand
cugaagagcuugccauuug

SEQ ID NO: 2167493 - RNA, 19 nt, Homo sapiens
  misc_RNA (1)...(19): siRNA sense strand
guaaucacaugagcauaua

SEQ ID NO: 2167494 - RNA, 19 nt, Homo sapiens
  misc_RNA (1)...(19): siRNA sense strand
gaggaggaauucugcauug

SEQ ID NO: 2167495 - RNA, 19 nt, Homo sapiens
  misc_RNA (1)...(19): siRNA sense strand
ucucuaagcuccuuccaaa

SEQ ID NO: 2167496 - RNA, 19 nt, Homo sapiens
  misc_RNA (1)...(19): siRNA sense strand
ggcacaaacucgguacuua

SEQ ID NO: 2167497 - RNA, 19 nt, Homo sapiens
  misc_RNA (1)...(19): siRNA sense strand
caaaacaaguggaagauuu

SEQ ID NO: 2167498 - RNA, 19 nt, Homo sapiens
  misc_RNA (1)...(19): siRNA sense strand
cggaagagcccaaaucaaa

SEQ ID NO: 2167499 - RNA, 19 nt, Homo sapiens
  misc_RNA (1)...(19): siRNA sense strand
ggaagcaucuggcacaaac

SEQ ID NO: 2167500 - RNA, 19 nt, Homo sapiens
  misc_RNA (1)...(19): siRNA sense strand
acacggaugugcccuauau

SEQ ID NO: 2167501 - RNA, 19 nt, Homo sapiens
  misc_RNA (1)...(19): siRNA sense strand
acacugagcccaauccuaa

SEQ ID NO: 2167502 - RNA, 19 nt, Homo sapiens
  misc_RNA (1)...(19): siRNA sense strand
caaggaauaucagaaugaa

SEQ ID NO: 2167503 - RNA, 19 nt, Homo sapiens
  misc_RNA (1)...(19): siRNA sense strand
gaagaugcuuauuucaaca

SEQ ID NO: 2167504 - RNA, 19 nt, Homo sapiens
  misc_RNA (1)...(19): siRNA sense strand
gcaagaucaugcacuuuca

SEQ ID NO: 2167505 - RNA, 19 nt, Homo sapiens
  misc_RNA (1)...(19): siRNA sense strand
ucauaaagcagaccuguuu

SEQ ID NO: 2167506 - RNA, 19 nt, Homo sapiens
  misc_RNA (1)...(19): siRNA sense strand
ggaagaugcauuuguaugu

SEQ ID NO: 2167507 - RNA, 19 nt, Homo sapiens
  misc_RNA (1)...(19): siRNA sense strand
acaguuagaugaagaagau

SEQ ID NO: 2167508 - RNA, 19 nt, Homo sapiens
  misc_RNA (1)...(19): siRNA sense strand
gagaguaggaggaggaauu

SEQ ID NO: 2167509 - RNA, 19 nt, Homo sapiens
  misc_RNA (1)...(19): siRNA sense strand
caauguaggucuagaagag

SEQ ID NO: 2167510 - RNA, 19 nt, Homo sapiens
  misc_RNA (1)...(19): siRNA sense strand
gcaaagugcguccagcaaa

SEQ ID NO: 2167511 - RNA, 19 nt, Homo sapiens
  misc_RNA (1)...(19): siRNA sense strand
gaagaggaagacccaaauu

SEQ ID NO: 2167512 - RNA, 19 nt, Homo sapiens
  misc_RNA (1)...(19): siRNA sense strand
aaagguauguagcuaguga

SEQ ID NO: 2167513 - RNA, 19 nt, Homo sapiens
  misc_RNA (1)...(19): siRNA sense strand
ggaagacuuguguggaaua

SEQ ID NO: 2167514 - RNA, 19 nt, Homo sapiens
  misc_RNA (1)...(19): siRNA sense strand
agacuacuaugcuuuguau

SEQ ID NO: 2167515 - RNA, 19 nt, Homo sapiens
  misc_RNA (1)...(19): siRNA sense strand
gcaaugaagccagcugaaa

SEQ ID NO: 2167516 - RNA, 19 nt, Homo sapiens
  misc_RNA (1)...(19): siRNA sense strand
gcagcaaggguuccaguuu

SEQ ID NO: 2167517 - RNA, 19 nt, Homo sapiens
  misc_RNA (1)...(19): siRNA sense strand
gcaaagcagcuaacuuaca

SEQ ID NO: 2167518 - RNA, 19 nt, Homo sapiens
  misc_RNA (1)...(19): siRNA sense strand
gaacuuggagacuuucaug

SEQ ID NO: 2167519 - RNA, 19 nt, Homo sapiens
  misc_RNA (1)...(19): siRNA sense strand
gagccaaucagacaugaaa

SEQ ID NO: 2167520 - RNA, 19 nt, Homo sapiens
  misc_RNA (1)...(19): siRNA sense strand
cagcaaggguuccaguuuc

SEQ ID NO: 2167521 - RNA, 19 nt, Homo sapiens
  misc_RNA (1)...(19): siRNA sense strand
caaagcagcuaacuuacac

SEQ ID NO: 2167522 - RNA, 19 nt, Homo sapiens
  misc_RNA (1)...(19): siRNA sense strand
gguaaucacaugagcauau

SEQ ID NO: 2167523 - RNA, 19 nt, Homo sapiens
  misc_RNA (1)...(19): siRNA sense strand
agaugaagaugcuuauuuc

SEQ ID NO: 2167524 - RNA, 19 nt, Homo sapiens
  misc_RNA (1)...(19): siRNA sense strand
gcaaggaagcuggauaugu

SEQ ID NO: 2167525 - RNA, 19 nt, Homo sapiens
  misc_RNA (1)...(19): siRNA sense strand
agacaggacuucacuaaaa

SEQ ID NO: 2167526 - RNA, 19 nt, Homo sapiens
  misc_RNA (1)...(19): siRNA sense strand
caaagugcguccagcaaag

SEQ ID NO: 2167527 - RNA, 19 nt, Homo sapiens
  misc_RNA (1)...(19): siRNA sense strand
caucaaacuucaugccaau

SEQ ID NO: 2167528 - RNA, 19 nt, Homo sapiens
  misc_RNA (1)...(19): siRNA sense strand
ugaagagcuugccauuuga

SEQ ID NO: 2167529 - RNA, 19 nt, Homo sapiens
  misc_RNA (1)...(19): siRNA sense strand
gaucaaaguacagcagaaa

SEQ ID NO: 2167530 - RNA, 19 nt, Homo sapiens
  misc_RNA (1)...(19): siRNA sense strand
uuuggaagaugcauuugua

SEQ ID NO: 2167531 - RNA, 19 nt, Homo sapiens
  misc_RNA (1)...(19): siRNA sense strand
ggucagcagguugguauua

SEQ ID NO: 2167532 - RNA, 19 nt, Homo sapiens
  misc_RNA (1)...(19): siRNA sense strand
gaugugcccuauauuccuu

SEQ ID NO: 2167533 - RNA, 19 nt, Homo sapiens
  misc_RNA (1)...(19): siRNA sense strand
ccaaggaauaucagaauga

SEQ ID NO: 2167534 - RNA, 19 nt, Homo sapiens
  misc_RNA (1)...(19): siRNA sense strand
gucagaauuuagaccuuua

SEQ ID NO: 2167535 - RNA, 19 nt, Homo sapiens
  misc_RNA (1)...(19): siRNA sense strand
gaagcuauagccaggacua

SEQ ID NO: 2167536 - RNA, 19 nt, Homo sapiens
  misc_RNA (1)...(19): siRNA sense strand
ugaagaagaugaagaugcu

SEQ ID NO: 2167537 - RNA, 19 nt, Homo sapiens
  misc_RNA (1)...(19): siRNA sense strand
aaucagaacuuggagacuu

SEQ ID NO: 2167538 - RNA, 19 nt, Homo sapiens
  misc_RNA (1)...(19): siRNA sense strand
ggaucaaaguacagcagaa

SEQ ID NO: 2167539 - RNA, 19 nt, Homo sapiens
  misc_RNA (1)...(19): siRNA sense strand
gaagagcuugccauuugaa

SEQ ID NO: 2167540 - RNA, 19 nt, Homo sapiens
  misc_RNA (1)...(19): siRNA sense strand
guauguagcuagugaaucc

SEQ ID NO: 2167541 - RNA, 19 nt, Homo sapiens
  misc_RNA (1)...(19): siRNA sense strand
ggaguugccagcaguucua

SEQ ID NO: 2167542 - RNA, 19 nt, Homo sapiens
  misc_RNA (1)...(19): siRNA sense strand
cuacaucagucccaaagca

SEQ ID NO: 2167543 - RNA, 19 nt, Homo sapiens
  misc_RNA (1)...(19): siRNA sense strand
cagcaguucuaauggauca

SEQ ID NO: 2167544 - RNA, 19 nt, Homo sapiens
  misc_RNA (1)...(19): siRNA sense strand
gguaggagcaacaucaaug

SEQ ID NO: 2167545 - RNA, 19 nt, Homo sapiens
  misc_RNA (1)...(19): siRNA sense strand
gcacaaacucgguacuuac

SEQ ID NO: 2167546 - RNA, 19 nt, Homo sapiens
  misc_RNA (1)...(19): siRNA sense strand
agaggaagacccaaauuug

SEQ ID NO: 2167547 - RNA, 19 nt, Homo sapiens
  misc_RNA (1)...(19): siRNA sense strand
gaucccacauugcuacauc

SEQ ID NO: 2167548 - RNA, 19 nt, Homo sapiens
  misc_RNA (1)...(19): siRNA sense strand
ggaggaggaauucugcauu

SEQ ID NO: 2167549 - RNA, 19 nt, Homo sapiens
  misc_RNA (1)...(19): siRNA sense strand
ggaaacauuacccaucuca

SEQ ID NO: 2167550 - RNA, 19 nt, Homo sapiens
  misc_RNA (1)...(19): siRNA sense strand
ggaagagcccaaaucaaag

SEQ ID NO: 2167551 - RNA, 19 nt, Homo sapiens
  misc_RNA (1)...(19): siRNA sense strand
guccugcucucagucauaa

SEQ ID NO: 2167552 - RNA, 19 nt, Homo sapiens
  misc_RNA (1)...(19): siRNA sense strand
gaagacuuguguggaauac

SEQ ID NO: 2167553 - RNA, 19 nt, Homo sapiens
  misc_RNA (1)...(19): siRNA sense strand
gaagaugaagaugcuuauu

SEQ ID NO: 2167554 - RNA, 19 nt, Homo sapiens
  misc_RNA (1)...(19): siRNA sense strand
ucuaauggaucaaaguaca

SEQ ID NO: 2167555 - RNA, 19 nt, Homo sapiens
  misc_RNA (1)...(19): siRNA sense strand
gcugaaagaagcccaagga

SEQ ID NO: 2167556 - RNA, 19 nt, Homo sapiens
  misc_RNA (1)...(19): siRNA sense strand
gcaguuccucuuucccuuu

SEQ ID NO: 2167557 - RNA, 19 nt, Homo sapiens
  misc_RNA (1)...(19): siRNA sense strand
gaggugacauuugcaacug

SEQ ID NO: 2167558 - RNA, 19 nt, Homo sapiens
  misc_RNA (1)...(19): siRNA sense strand
uaucucacaucuuacaauc

SEQ ID NO: 2167559 - RNA, 19 nt, Homo sapiens
  misc_RNA (1)...(19): siRNA sense strand
ggucacccauggccagaau

SEQ ID NO: 2167560 - RNA, 19 nt, Homo sapiens
  misc_RNA (1)...(19): siRNA sense strand
aaaccagacuacuaugcuu

SEQ ID NO: 2167561 - RNA, 19 nt, Homo sapiens
  misc_RNA (1)...(19): siRNA sense strand
guucuaauggaucaaagua

SEQ ID NO: 2167562 - RNA, 19 nt, Homo sapiens
  misc_RNA (1)...(19): siRNA sense strand
ugaaagaagcccaaggaau

SEQ ID NO: 2167563 - RNA, 19 nt, Homo sapiens
  misc_RNA (1)...(19): siRNA sense strand
caaacuucaugccaauauc

SEQ ID NO: 2167564 - RNA, 19 nt, Homo sapiens
  misc_RNA (1)...(19): siRNA sense strand
aagaagaugaagaugcuua

SEQ ID NO: 2167565 - RNA, 19 nt, Homo sapiens
  misc_RNA (1)...(19): siRNA sense strand
agaaagguauguagcuagu

SEQ ID NO: 2167566 - RNA, 19 nt, Homo sapiens
  misc_RNA (1)...(19): siRNA sense strand
aagaggaagacccaaauuu

SEQ ID NO: 2167567 - RNA, 19 nt, Homo sapiens
  misc_RNA (1)...(19): siRNA sense strand
guagagcccacugcaauga

SEQ ID NO: 2167568 - RNA, 19 nt, Homo sapiens
  misc_RNA (1)...(19): siRNA sense strand
cauauauucuggccucaca

SEQ ID NO: 2167569 - RNA, 19 nt, Homo sapiens
  misc_RNA (1)...(19): siRNA sense strand
uauauggacccugucuuua

SEQ ID NO: 2167570 - RNA, 19 nt, Homo sapiens
  misc_RNA (1)...(19): siRNA sense strand
cuggaagacuuguguggaa

SEQ ID NO: 2167571 - RNA, 19 nt, Homo sapiens
  misc_RNA (1)...(19): siRNA sense strand
caacacaccaacugcugaa

SEQ ID NO: 2167572 - RNA, 19 nt, Homo sapiens
  misc_RNA (1)...(19): siRNA sense strand
gaagagcuuucagcaagac

SEQ ID NO: 2167573 - RNA, 19 nt, Homo sapiens
  misc_RNA (1)...(19): siRNA sense strand
gcuguaaguuuucugguaa

SEQ ID NO: 2167574 - RNA, 19 nt, Homo sapiens
  misc_RNA (1)...(19): siRNA sense strand
ggaggaauucugcauugga

SEQ ID NO: 2167575 - RNA, 19 nt, Homo sapiens
  misc_RNA (1)...(19): siRNA sense strand
ccaauuagagcagaggaaa

SEQ ID NO: 2167576 - RNA, 19 nt, Homo sapiens
  misc_RNA (1)...(19): siRNA sense strand
gcuaaaauccgcaaguuga

SEQ ID NO: 2167577 - RNA, 19 nt, Homo sapiens
  misc_RNA (1)...(19): siRNA sense strand
ggcaagaucaugcacuuuc

SEQ ID NO: 2167578 - RNA, 19 nt, Homo sapiens
  misc_RNA (1)...(19): siRNA sense strand
caaugaagccagcugaaag

SEQ ID NO: 2167579 - RNA, 19 nt, Homo sapiens
  misc_RNA (1)...(19): siRNA sense strand
cuaagcuccuuccaaacaa

SEQ ID NO: 2167580 - RNA, 19 nt, Homo sapiens
  misc_RNA (1)...(19): siRNA sense strand
uuauauggacccugucuuu

SEQ ID NO: 2167581 - RNA, 19 nt, Homo sapiens
  misc_RNA (1)...(19): siRNA sense strand
aaggaaacauuacccaucu

SEQ ID NO: 2167582 - RNA, 19 nt, Homo sapiens
  misc_RNA (1)...(19): siRNA sense strand
caugcuuucuucaggcuuu

SEQ ID NO: 2167583 - RNA, 19 nt, Homo sapiens
  misc_RNA (1)...(19): siRNA sense strand
aggaauaucagaaugaaga

SEQ ID NO: 2167584 - RNA, 19 nt, Homo sapiens
  misc_RNA (1)...(19): siRNA sense strand
gagaaaggacacacucuaa

SEQ ID NO: 2167585 - RNA, 19 nt, Homo sapiens
  misc_RNA (1)...(19): siRNA sense strand
ccagcgagaucgacauaga

SEQ ID NO: 2167586 - RNA, 19 nt, Homo sapiens
  misc_RNA (1)...(19): siRNA sense strand
gcacagcacaggacagaag

SEQ ID NO: 2167587 - RNA, 19 nt, Homo sapiens
  misc_RNA (1)...(19): siRNA sense strand
ucuguaggcugcccauuug

SEQ ID NO: 2167588 - RNA, 19 nt, Homo sapiens
  misc_RNA (1)...(19): siRNA sense strand
agacacagccuccaaccaa

SEQ ID NO: 2167589 - RNA, 19 nt, Homo sapiens
  misc_RNA (1)...(19): siRNA sense strand
cgacauagaaggccuaggu

SEQ ID NO: 2167590 - RNA, 19 nt, Homo sapiens
  misc_RNA (1)...(19): siRNA sense strand
caagacuguuggaaacugu

SEQ ID NO: 2167591 - RNA, 19 nt, Homo sapiens
  misc_RNA (1)...(19): siRNA sense strand
uagaaggccuaggucauca

SEQ ID NO: 2167592 - RNA, 19 nt, Homo sapiens
  misc_RNA (1)...(19): siRNA sense strand
gcuccuacccaucacaguu

SEQ ID NO: 2167593 - RNA, 19 nt, Homo sapiens
  misc_RNA (1)...(19): siRNA sense strand
cgguguagcugggagagaa

SEQ ID NO: 2167594 - RNA, 19 nt, Homo sapiens
  misc_RNA (1)...(19): siRNA sense strand
aggccuaggucaucaagau

SEQ ID NO: 2167595 - RNA, 19 nt, Homo sapiens
  misc_RNA (1)...(19): siRNA sense strand
gaaacugugcgguguagcu

SEQ ID NO: 2167596 - RNA, 19 nt, Homo sapiens
  misc_RNA (1)...(19): siRNA sense strand
cagcgagaucgacauagaa

SEQ ID NO: 2167597 - RNA, 19 nt, Homo sapiens
  misc_RNA (1)...(19): siRNA sense strand
acacagacacagccuccaa

SEQ ID NO: 2167598 - RNA, 19 nt, Homo sapiens
  misc_RNA (1)...(19): siRNA sense strand
cauagaaggccuaggucau

SEQ ID NO: 2167599 - RNA, 19 nt, Homo sapiens
  misc_RNA (1)...(19): siRNA sense strand
gaaggccuaggucaucaag

SEQ ID NO: 2167600 - RNA, 19 nt, Homo sapiens
  misc_RNA (1)...(19): siRNA sense strand
ccuccucgccugcuuguuc

SEQ ID NO: 2167601 - RNA, 19 nt, Homo sapiens
  misc_RNA (1)...(19): siRNA sense strand
gagagaagcucaucuuuaa

SEQ ID NO: 2167602 - RNA, 19 nt, Homo sapiens
  misc_RNA (1)...(19): siRNA sense strand
gagaauagcugcagaagaa

SEQ ID NO: 2167603 - RNA, 19 nt, Homo sapiens
  misc_RNA (1)...(19): siRNA sense strand
gaaaggaagccacguguua

SEQ ID NO: 2167604 - RNA, 19 nt, Homo sapiens
  misc_RNA (1)...(19): siRNA sense strand
gagagacgcuccaaagaaa

SEQ ID NO: 2167605 - RNA, 19 nt, Homo sapiens
  misc_RNA (1)...(19): siRNA sense strand
ggagagaagcucaucuuua

SEQ ID NO: 2167606 - RNA, 19 nt, Homo sapiens
  misc_RNA (1)...(19): siRNA sense strand
gaagaccacuugaaacuca

SEQ ID NO: 2167607 - RNA, 19 nt, Homo sapiens
  misc_RNA (1)...(19): siRNA sense strand
gaaaauaccuccucaaaca

SEQ ID NO: 2167608 - RNA, 19 nt, Homo sapiens
  misc_RNA (1)...(19): siRNA sense strand
agaccaagcuccaauauga

SEQ ID NO: 2167609 - RNA, 19 nt, Homo sapiens
  misc_RNA (1)...(19): siRNA sense strand
ggaggagacuugcugauga

SEQ ID NO: 2167610 - RNA, 19 nt, Homo sapiens
  misc_RNA (1)...(19): siRNA sense strand
gaaagacacuucaauacag

SEQ ID NO: 2167611 - RNA, 19 nt, Homo sapiens
  misc_RNA (1)...(19): siRNA sense strand
uuacaggcgucaccaauua

SEQ ID NO: 2167612 - RNA, 19 nt, Homo sapiens
  misc_RNA (1)...(19): siRNA sense strand
caaacgagauugcuaagga

SEQ ID NO: 2167613 - RNA, 19 nt, Homo sapiens
  misc_RNA (1)...(19): siRNA sense strand
gcaagacgccaauaaagaa

SEQ ID NO: 2167614 - RNA, 19 nt, Homo sapiens
  misc_RNA (1)...(19): siRNA sense strand
gagcaaaacugccaauaaa

SEQ ID NO: 2167615 - RNA, 19 nt, Homo sapiens
  misc_RNA (1)...(19): siRNA sense strand
gaaagaccaagcuccaaua

SEQ ID NO: 2167616 - RNA, 19 nt, Homo sapiens
  misc_RNA (1)...(19): siRNA sense strand
gaaguauucugcaacacaa

SEQ ID NO: 2167617 - RNA, 19 nt, Homo sapiens
  misc_RNA (1)...(19): siRNA sense strand
uagaagagauaguaaccua

SEQ ID NO: 2167618 - RNA, 19 nt, Homo sapiens
  misc_RNA (1)...(19): siRNA sense strand
gcaacccauuccucaaaua

SEQ ID NO: 2167619 - RNA, 19 nt, Homo sapiens
  misc_RNA (1)...(19): siRNA sense strand
gaaagaacacgagagaauu

SEQ ID NO: 2167620 - RNA, 19 nt, Homo sapiens
  misc_RNA (1)...(19): siRNA sense strand
gaagcaagaugugguuaau

SEQ ID NO: 2167621 - RNA, 19 nt, Homo sapiens
  misc_RNA (1)...(19): siRNA sense strand
gagacuugcugaugauuau

SEQ ID NO: 2167622 - RNA, 19 nt, Homo sapiens
  misc_RNA (1)...(19): siRNA sense strand
gaaacacaacuacuugaaa

SEQ ID NO: 2167623 - RNA, 19 nt, Homo sapiens
  misc_RNA (1)...(19): siRNA sense strand
caagaagcgucuaucauca

SEQ ID NO: 2167624 - RNA, 19 nt, Homo sapiens
  misc_RNA (1)...(19): siRNA sense strand
gaagaacaacggagaauag

SEQ ID NO: 2167625 - RNA, 19 nt, Homo sapiens
  misc_RNA (1)...(19): siRNA sense strand
cuacauucgucuacugaua

SEQ ID NO: 2167626 - RNA, 19 nt, Homo sapiens
  misc_RNA (1)...(19): siRNA sense strand
aaagaacacgagagaauua

SEQ ID NO: 2167627 - RNA, 19 nt, Homo sapiens
  misc_RNA (1)...(19): siRNA sense strand
uaacagaugugaggcuuug

SEQ ID NO: 2167628 - RNA, 19 nt, Homo sapiens
  misc_RNA (1)...(19): siRNA sense strand
aaacaaagauuagcaagag

SEQ ID NO: 2167629 - RNA, 19 nt, Homo sapiens
  misc_RNA (1)...(19): siRNA sense strand
guucaacaaugccaagaaa

SEQ ID NO: 2167630 - RNA, 19 nt, Homo sapiens
  misc_RNA (1)...(19): siRNA sense strand
caagaacgguuagaaagga

SEQ ID NO: 2167631 - RNA, 19 nt, Homo sapiens
  misc_RNA (1)...(19): siRNA sense strand
gcaaagggucauuaagaaa

SEQ ID NO: 2167632 - RNA, 19 nt, Homo sapiens
  misc_RNA (1)...(19): siRNA sense strand
ccaaagaaaucagaaaugg

SEQ ID NO: 2167633 - RNA, 19 nt, Homo sapiens
  misc_RNA (1)...(19): siRNA sense strand
gagaagcucaucuuuaaau

SEQ ID NO: 2167634 - RNA, 19 nt, Homo sapiens
  misc_RNA (1)...(19): siRNA sense strand
gaaaggggacgccaaaaua

SEQ ID NO: 2167635 - RNA, 19 nt, Homo sapiens
  misc_RNA (1)...(19): siRNA sense strand
ucagacaccuuuagacaau

SEQ ID NO: 2167636 - RNA, 19 nt, Homo sapiens
  misc_RNA (1)...(19): siRNA sense strand
ggacaaacaggccuuaauc

SEQ ID NO: 2167637 - RNA, 19 nt, Homo sapiens
  misc_RNA (1)...(19): siRNA sense strand
gggaagaaaugcagcaaag

SEQ ID NO: 2167638 - RNA, 19 nt, Homo sapiens
  misc_RNA (1)...(19): siRNA sense strand
uaagaguacugcagguauu

SEQ ID NO: 2167639 - RNA, 19 nt, Homo sapiens
  misc_RNA (1)...(19): siRNA sense strand
gaaaggaggaagcaagaug

SEQ ID NO: 2167640 - RNA, 19 nt, Homo sapiens
  misc_RNA (1)...(19): siRNA sense strand
caaagugcaucaaguacug

SEQ ID NO: 2167641 - RNA, 19 nt, Homo sapiens
  misc_RNA (1)...(19): siRNA sense strand
ccagaaggaugaagcacaa

SEQ ID NO: 2167642 - RNA, 19 nt, Homo sapiens
  misc_RNA (1)...(19): siRNA sense strand
caagaaagaacacgagaga

SEQ ID NO: 2167643 - RNA, 19 nt, Homo sapiens
  misc_RNA (1)...(19): siRNA sense strand
aaucagaaauggacaaaca

SEQ ID NO: 2167644 - RNA, 19 nt, Homo sapiens
  misc_RNA (1)...(19): siRNA sense strand
gaacacgagagaauuaugu

SEQ ID NO: 2167645 - RNA, 19 nt, Homo sapiens
  misc_RNA (1)...(19): siRNA sense strand
ggagacuugcugaugauua

SEQ ID NO: 2167646 - RNA, 19 nt, Homo sapiens
  misc_RNA (1)...(19): siRNA sense strand
uaugaagagucugguaaua

SEQ ID NO: 2167647 - RNA, 19 nt, Homo sapiens
  misc_RNA (1)...(19): siRNA sense strand
agaagcgucuaucaucaua

SEQ ID NO: 2167648 - RNA, 19 nt, Homo sapiens
  misc_RNA (1)...(19): siRNA sense strand
gcacauaugauucugagau

SEQ ID NO: 2167649 - RNA, 19 nt, Homo sapiens
  misc_RNA (1)...(19): siRNA sense strand
gcucugcaauggcgaauuc

SEQ ID NO: 2167650 - RNA, 19 nt, Homo sapiens
  misc_RNA (1)...(19): siRNA sense strand
caugacaucuugccaaagu

SEQ ID NO: 2167651 - RNA, 19 nt, Homo sapiens
  misc_RNA (1)...(19): siRNA sense strand
caaaagacauggcaaagga

SEQ ID NO: 2167652 - RNA, 19 nt, Homo sapiens
  misc_RNA (1)...(19): siRNA sense strand
cagcaaagggucauuaaga

SEQ ID NO: 2167653 - RNA, 19 nt, Homo sapiens
  misc_RNA (1)...(19): siRNA sense strand
gaaagacaacgggaagaaa

SEQ ID NO: 2167654 - RNA, 19 nt, Homo sapiens
  misc_RNA (1)...(19): siRNA sense strand
gcuguuauguuucccaugu

SEQ ID NO: 2167655 - RNA, 19 nt, Homo sapiens
  misc_RNA (1)...(19): siRNA sense strand
ugaagagucugguaauaag

SEQ ID NO: 2167656 - RNA, 19 nt, Homo sapiens
  misc_RNA (1)...(19): siRNA sense strand
ccaucaccauuaccacuua

SEQ ID NO: 2167657 - RNA, 19 nt, Homo sapiens
  misc_RNA (1)...(19): siRNA sense strand
acaggguacuucugcuuua

SEQ ID NO: 2167658 - RNA, 19 nt, Homo sapiens
  misc_RNA (1)...(19): siRNA sense strand
gaaaggcggaugaaaccaa

SEQ ID NO: 2167659 - RNA, 19 nt, Homo sapiens
  misc_RNA (1)...(19): siRNA sense strand
caagaaagacagaugugaa

SEQ ID NO: 2167660 - RNA, 19 nt, Homo sapiens
  misc_RNA (1)...(19): siRNA sense strand
ggaagcaagaugugguuaa

SEQ ID NO: 2167661 - RNA, 19 nt, Homo sapiens
  misc_RNA (1)...(19): siRNA sense strand
cgacaaggacucauugaau

SEQ ID NO: 2167662 - RNA, 19 nt, Homo sapiens
  misc_RNA (1)...(19): siRNA sense strand
auugagggcuguuauguuu

SEQ ID NO: 2167663 - RNA, 19 nt, Homo sapiens
  misc_RNA (1)...(19): siRNA sense strand
uaaauguacuagcgacgaa

SEQ ID NO: 2167664 - RNA, 19 nt, Homo sapiens
  misc_RNA (1)...(19): siRNA sense strand
gaagagauaguaaccuaca

SEQ ID NO: 2167665 - RNA, 19 nt, Homo sapiens
  misc_RNA (1)...(19): siRNA sense strand
gaacaggguacuucugcuu

SEQ ID NO: 2167666 - RNA, 19 nt, Homo sapiens
  misc_RNA (1)...(19): siRNA sense strand
caaagggucauuaagaaau

SEQ ID NO: 2167667 - RNA, 19 nt, Homo sapiens
  misc_RNA (1)...(19): siRNA sense strand
ccaagaagcgucuaucauc

SEQ ID NO: 2167668 - RNA, 19 nt, Homo sapiens
  misc_RNA (1)...(19): siRNA sense strand
gaaaucagaaauggacaaa

SEQ ID NO: 2167669 - RNA, 19 nt, Homo sapiens
  misc_RNA (1)...(19): siRNA sense strand
acccauuccucaaauauaa

SEQ ID NO: 2167670 - RNA, 19 nt, Homo sapiens
  misc_RNA (1)...(19): siRNA sense strand
agacaccuuuagacaauaa

SEQ ID NO: 2167671 - RNA, 19 nt, Homo sapiens
  misc_RNA (1)...(19): siRNA sense strand
gaaguaguuucaagaccau

SEQ ID NO: 2167672 - RNA, 19 nt, Homo sapiens
  misc_RNA (1)...(19): siRNA sense strand
gcucaccuaccaaauuuaa

SEQ ID NO: 2167673 - RNA, 19 nt, Homo sapiens
  misc_RNA (1)...(19): siRNA sense strand
ggacaagaaagacagaugu

SEQ ID NO: 2167674 - RNA, 19 nt, Homo sapiens
  misc_RNA (1)...(19): siRNA sense strand
gaaauuaugaagcggacaa

SEQ ID NO: 2167675 - RNA, 19 nt, Homo sapiens
  misc_RNA (1)...(19): siRNA sense strand
aauaaaagcucaagaggaa

SEQ ID NO: 2167676 - RNA, 19 nt, Homo sapiens
  misc_RNA (1)...(19): siRNA sense strand
cgagagacgcuccaaagaa

SEQ ID NO: 2167677 - RNA, 19 nt, Homo sapiens
  misc_RNA (1)...(19): siRNA sense strand
ccaggugaauguggaagua

SEQ ID NO: 2167678 - RNA, 19 nt, Homo sapiens
  misc_RNA (1)...(19): siRNA sense strand
gaggagacuugcugaugau

SEQ ID NO: 2167679 - RNA, 19 nt, Homo sapiens
  misc_RNA (1)...(19): siRNA sense strand
gccaugacauauaugaaga

SEQ ID NO: 2167680 - RNA, 19 nt, Homo sapiens
  misc_RNA (1)...(19): siRNA sense strand
ucgcauggcugguaagcuu

SEQ ID NO: 2167681 - RNA, 19 nt, Homo sapiens
  misc_RNA (1)...(19): siRNA sense strand
ccaaaggcauaugaucuau

SEQ ID NO: 2167682 - RNA, 19 nt, Homo sapiens
  misc_RNA (1)...(19): siRNA sense strand
gccaaaggcauaugaucua

SEQ ID NO: 2167683 - RNA, 19 nt, Homo sapiens
  misc_RNA (1)...(19): siRNA sense strand
ugagaaggcugccaucaac

SEQ ID NO: 2167684 - RNA, 19 nt, Homo sapiens
  misc_RNA (1)...(19): siRNA sense strand
aaacgagauugcuaaggaa

SEQ ID NO: 2167685 - RNA, 19 nt, Homo sapiens
  misc_RNA (1)...(19): siRNA sense strand
aaagaaacacaacuacuug

SEQ ID NO: 2167686 - RNA, 19 nt, Homo sapiens
  misc_RNA (1)...(19): siRNA sense strand
gcugguauuucuagaagau

SEQ ID NO: 2167687 - RNA, 19 nt, Homo sapiens
  misc_RNA (1)...(19): siRNA sense strand
aggcucaccuaccaaauuu

SEQ ID NO: 2167688 - RNA, 19 nt, Homo sapiens
  misc_RNA (1)...(19): siRNA sense strand
ccucaaaggucacagaaac

SEQ ID NO: 2167689 - RNA, 19 nt, Homo sapiens
  misc_RNA (1)...(19): siRNA sense strand
ggaaguauucugcaacaca

SEQ ID NO: 2167690 - RNA, 19 nt, Homo sapiens
  misc_RNA (1)...(19): siRNA sense strand
uaaacgaucugcaucuacu

SEQ ID NO: 2167691 - RNA, 19 nt, Homo sapiens
  misc_RNA (1)...(19): siRNA sense strand
aauaaacgaucugcaucua

SEQ ID NO: 2167692 - RNA, 19 nt, Homo sapiens
  misc_RNA (1)...(19): siRNA sense strand
ggaagugagucuggaagca

SEQ ID NO: 2167693 - RNA, 19 nt, Homo sapiens
  misc_RNA (1)...(19): siRNA sense strand
cacacaagcugguauuucu

SEQ ID NO: 2167694 - RNA, 19 nt, Homo sapiens
  misc_RNA (1)...(19): siRNA sense strand
agaaagaacacgagagaau

SEQ ID NO: 2167695 - RNA, 19 nt, Homo sapiens
  misc_RNA (1)...(19): siRNA sense strand
gaagaaaggauggcuggau

SEQ ID NO: 2167696 - RNA, 19 nt, Homo sapiens
  misc_RNA (1)...(19): siRNA sense strand
caaaagaacugcccuccau

SEQ ID NO: 2167697 - RNA, 19 nt, Homo sapiens
  misc_RNA (1)...(19): siRNA sense strand
gaauugagggcuguuaugu

SEQ ID NO: 2167698 - RNA, 19 nt, Homo sapiens
  misc_RNA (1)...(19): siRNA sense strand
agcaaagggucauuaagaa

SEQ ID NO: 2167699 - RNA, 19 nt, Homo sapiens
  misc_RNA (1)...(19): siRNA sense strand
uagaagcacucccgaaggu

SEQ ID NO: 2167700 - RNA, 19 nt, Homo sapiens
  misc_RNA (1)...(19): siRNA sense strand
guggugagcacauaugauu

SEQ ID NO: 2167701 - RNA, 19 nt, Homo sapiens
  misc_RNA (1)...(19): siRNA sense strand
gagcggagcuuucguuuuc

SEQ ID NO: 2167702 - RNA, 19 nt, Homo sapiens
  misc_RNA (1)...(19): siRNA sense strand
ucgcugcgguuauugagua

SEQ ID NO: 2167703 - RNA, 19 nt, Homo sapiens
  misc_RNA (1)...(19): siRNA sense strand
cuaccucgcugcgguuauu

SEQ ID NO: 2167704 - RNA, 19 nt, Homo sapiens
  misc_RNA (1)...(19): siRNA sense strand
gcaacgaggcccagaacag

SEQ ID NO: 2167705 - RNA, 19 nt, Homo sapiens
  misc_RNA (1)...(19): siRNA sense strand
cgaccaccaucucucaagu

SEQ ID NO: 2167706 - RNA, 19 nt, Homo sapiens
  misc_RNA (1)...(19): siRNA sense strand
ggacauggugguucacaac

SEQ ID NO: 2167707 - RNA, 19 nt, Homo sapiens
  misc_RNA (1)...(19): siRNA sense strand
gagcuuucguuuucaguga

SEQ ID NO: 2167708 - RNA, 19 nt, Homo sapiens
  misc_RNA (1)...(19): siRNA sense strand
caacacgaccaccaucucu

SEQ ID NO: 2167709 - RNA, 19 nt, Homo sapiens
  misc_RNA (1)...(19): siRNA sense strand
cacaacgacaggcuacuga

SEQ ID NO: 2167710 - RNA, 19 nt, Homo sapiens
  misc_RNA (1)...(19): siRNA sense strand
acacgaccaccaucucuca

SEQ ID NO: 2167711 - RNA, 19 nt, Homo sapiens
  misc_RNA (1)...(19): siRNA sense strand
aaacggaggucucaucugu

SEQ ID NO: 2167712 - RNA, 19 nt, Homo sapiens
  misc_RNA (1)...(19): siRNA sense strand
ggugcagucuuacaugauu

SEQ ID NO: 2167713 - RNA, 19 nt, Homo sapiens
  misc_RNA (1)...(19): siRNA sense strand
uggcaaagcagcagaaaga

SEQ ID NO: 2167714 - RNA, 19 nt, Homo sapiens
  misc_RNA (1)...(19): siRNA sense strand
ugaacuggauccuggugaa

SEQ ID NO: 2167715 - RNA, 19 nt, Homo sapiens
  misc_RNA (1)...(19): siRNA sense strand
gacgauggcucugaacucu

SEQ ID NO: 2167716 - RNA, 19 nt, Homo sapiens
  misc_RNA (1)...(19): siRNA sense strand
gcaaagcagcagaaagagu

SEQ ID NO: 2167717 - RNA, 19 nt, Homo sapiens
  misc_RNA (1)...(19): siRNA sense strand
cccguuaucuaugucuuua

SEQ ID NO: 2167718 - RNA, 19 nt, Homo sapiens
  misc_RNA (1)...(19): siRNA sense strand
ucacaggucucuggucucu

SEQ ID NO: 2167719 - RNA, 19 nt, Homo sapiens
  misc_RNA (1)...(19): siRNA sense strand
gcaagcccuuuggcaaugu

SEQ ID NO: 2167720 - RNA, 19 nt, Homo sapiens
  misc_RNA (1)...(19): siRNA sense strand
cguuaucuaugucuuuaug

SEQ ID NO: 2167721 - RNA, 19 nt, Homo sapiens
  misc_RNA (1)...(19): siRNA sense strand
gguugacgauggcucugaa

SEQ ID NO: 2167722 - RNA, 19 nt, Homo sapiens
  misc_RNA (1)...(19): siRNA sense strand
ccagaaggcagagaaggaa

SEQ ID NO: 2167723 - RNA, 19 nt, Homo sapiens
  misc_RNA (1)...(19): siRNA sense strand
gcauugccuucuccuggau

SEQ ID NO: 2167724 - RNA, 19 nt, Homo sapiens
  misc_RNA (1)...(19): siRNA sense strand
acggaggucucaucugugu

SEQ ID NO: 2167725 - RNA, 19 nt, Homo sapiens
  misc_RNA (1)...(19): siRNA sense strand
gugcagucuuacaugauug

SEQ ID NO: 2167726 - RNA, 19 nt, Homo sapiens
  misc_RNA (1)...(19): siRNA sense strand
gcucugcuaccuccaagug

SEQ ID NO: 2167727 - RNA, 19 nt, Homo sapiens
  misc_RNA (1)...(19): siRNA sense strand
gugcugggccacccuaugu

SEQ ID NO: 2167728 - RNA, 19 nt, Homo sapiens
  misc_RNA (1)...(19): siRNA sense strand
uguaccaccucaccagugu

SEQ ID NO: 2167729 - RNA, 19 nt, Homo sapiens
  misc_RNA (1)...(19): siRNA sense strand
gaaggcagagaaggaagug

SEQ ID NO: 2167730 - RNA, 19 nt, Homo sapiens
  misc_RNA (1)...(19): siRNA sense strand
ggcaaugugagauuugaug

SEQ ID NO: 2167731 - RNA, 19 nt, Homo sapiens
  misc_RNA (1)...(19): siRNA sense strand
gcacuaucagcguugugaa

SEQ ID NO: 2167732 - RNA, 19 nt, Homo sapiens
  misc_RNA (1)...(19): siRNA sense strand
gccacccgcugaacuggau

SEQ ID NO: 2167733 - RNA, 19 nt, Homo sapiens
  misc_RNA (1)...(19): siRNA sense strand
ucaccuacaccaacagcaa

SEQ ID NO: 2167734 - RNA, 19 nt, Homo sapiens
  misc_RNA (1)...(19): siRNA sense strand
ugcaagcccuuuggcaaug

SEQ ID NO: 2167735 - RNA, 19 nt, Homo sapiens
  misc_RNA (1)...(19): siRNA sense strand
gugucuggaugaucuuugu

SEQ ID NO: 2167736 - RNA, 19 nt, Homo sapiens
  misc_RNA (1)...(19): siRNA sense strand
ugaaccggcaguuucgaaa

SEQ ID NO: 2167737 - RNA, 19 nt, Homo sapiens
  misc_RNA (1)...(19): siRNA sense strand
ccacccagaaggcagagaa

SEQ ID NO: 2167738 - RNA, 19 nt, Homo sapiens
  misc_RNA (1)...(19): siRNA sense strand
cuacaaccccguuaucuau

SEQ ID NO: 2167739 - RNA, 19 nt, Homo sapiens
  misc_RNA (1)...(19): siRNA sense strand
ggggugcagucuuacauga

SEQ ID NO: 2167740 - RNA, 19 nt, Homo sapiens
  misc_RNA (1)...(19): siRNA sense strand
gccauccgcaggacagcua

SEQ ID NO: 2167741 - RNA, 19 nt, Homo sapiens
  misc_RNA (1)...(19): siRNA sense strand
aaacggaggucucaucugu

SEQ ID NO: 2167742 - RNA, 19 nt, Homo sapiens
  misc_RNA (1)...(19): siRNA sense strand
ggugcagucuuacaugauu

SEQ ID NO: 2167743 - RNA, 19 nt, Homo sapiens
  misc_RNA (1)...(19): siRNA sense strand
uggcaaagcagcagaaaga

SEQ ID NO: 2167744 - RNA, 19 nt, Homo sapiens
  misc_RNA (1)...(19): siRNA sense strand
ugaacuggauccuggugaa

SEQ ID NO: 2167745 - RNA, 19 nt, Homo sapiens
  misc_RNA (1)...(19): siRNA sense strand
gacgauggcucugaacucu

SEQ ID NO: 2167746 - RNA, 19 nt, Homo sapiens
  misc_RNA (1)...(19): siRNA sense strand
gcaaagcagcagaaagagu

SEQ ID NO: 2167747 - RNA, 19 nt, Homo sapiens
  misc_RNA (1)...(19): siRNA sense strand
cccguuaucuaugucuuua

SEQ ID NO: 2167748 - RNA, 19 nt, Homo sapiens
  misc_RNA (1)...(19): siRNA sense strand
ucacaggucucuggucucu

SEQ ID NO: 2167749 - RNA, 19 nt, Homo sapiens
  misc_RNA (1)...(19): siRNA sense strand
gcaagcccuuuggcaaugu

SEQ ID NO: 2167750 - RNA, 19 nt, Homo sapiens
  misc_RNA (1)...(19): siRNA sense strand
cguuaucuaugucuuuaug

SEQ ID NO: 2167751 - RNA, 19 nt, Homo sapiens
  misc_RNA (1)...(19): siRNA sense strand
gguugacgauggcucugaa

SEQ ID NO: 2167752 - RNA, 19 nt, Homo sapiens
  misc_RNA (1)...(19): siRNA sense strand
ccagaaggcagagaaggaa

SEQ ID NO: 2167753 - RNA, 19 nt, Homo sapiens
  misc_RNA (1)...(19): siRNA sense strand
gcauugccuucuccuggau

SEQ ID NO: 2167754 - RNA, 19 nt, Homo sapiens
  misc_RNA (1)...(19): siRNA sense strand
acggaggucucaucugugu

SEQ ID NO: 2167755 - RNA, 19 nt, Homo sapiens
  misc_RNA (1)...(19): siRNA sense strand
gugcagucuuacaugauug

SEQ ID NO: 2167756 - RNA, 19 nt, Homo sapiens
  misc_RNA (1)...(19): siRNA sense strand
gcucugcuaccuccaagug

SEQ ID NO: 2167757 - RNA, 19 nt, Homo sapiens
  misc_RNA (1)...(19): siRNA sense strand
gugcugggccacccuaugu

SEQ ID NO: 2167758 - RNA, 19 nt, Homo sapiens
  misc_RNA (1)...(19): siRNA sense strand
uguaccaccucaccagugu

SEQ ID NO: 2167759 - RNA, 19 nt, Homo sapiens
  misc_RNA (1)...(19): siRNA sense strand
gaaggcagagaaggaagug

SEQ ID NO: 2167760 - RNA, 19 nt, Homo sapiens
  misc_RNA (1)...(19): siRNA sense strand
ggcaaugugagauuugaug

SEQ ID NO: 2167761 - RNA, 19 nt, Homo sapiens
  misc_RNA (1)...(19): siRNA sense strand
gcacuaucagcguugugaa

SEQ ID NO: 2167762 - RNA, 19 nt, Homo sapiens
  misc_RNA (1)...(19): siRNA sense strand
gccacccgcugaacuggau

SEQ ID NO: 2167763 - RNA, 19 nt, Homo sapiens
  misc_RNA (1)...(19): siRNA sense strand
ucaccuacaccaacagcaa

SEQ ID NO: 2167764 - RNA, 19 nt, Homo sapiens
  misc_RNA (1)...(19): siRNA sense strand
ugcaagcccuuuggcaaug

SEQ ID NO: 2167765 - RNA, 19 nt, Homo sapiens
  misc_RNA (1)...(19): siRNA sense strand
gugucuggaugaucuuugu

SEQ ID NO: 2167766 - RNA, 19 nt, Homo sapiens
  misc_RNA (1)...(19): siRNA sense strand
ugaaccggcaguuucgaaa

SEQ ID NO: 2167767 - RNA, 19 nt, Homo sapiens
  misc_RNA (1)...(19): siRNA sense strand
ccacccagaaggcagagaa

SEQ ID NO: 2167768 - RNA, 19 nt, Homo sapiens
  misc_RNA (1)...(19): siRNA sense strand
cuacaaccccguuaucuau

SEQ ID NO: 2167769 - RNA, 19 nt, Homo sapiens
  misc_RNA (1)...(19): siRNA sense strand
ggggugcagucuuacauga

SEQ ID NO: 2167770 - RNA, 19 nt, Homo sapiens
  misc_RNA (1)...(19): siRNA sense strand
gccauccgcaggacagcua

SEQ ID NO: 2167771 - RNA, 19 nt, Homo sapiens
  misc_RNA (1)...(19): siRNA sense strand
gaagagagcauuucuauga

SEQ ID NO: 2167772 - RNA, 19 nt, Homo sapiens
  misc_RNA (1)...(19): siRNA sense strand
ggaagaagauggagaagaa

SEQ ID NO: 2167773 - RNA, 19 nt, Homo sapiens
  misc_RNA (1)...(19): siRNA sense strand
gaagaagucuccucagauu

SEQ ID NO: 2167774 - RNA, 19 nt, Homo sapiens
  misc_RNA (1)...(19): siRNA sense strand
gaaaugaccucacgacuag

SEQ ID NO: 2167775 - RNA, 19 nt, Homo sapiens
  misc_RNA (1)...(19): siRNA sense strand
caaacuaucugcaaagaaa

SEQ ID NO: 2167776 - RNA, 19 nt, Homo sapiens
  misc_RNA (1)...(19): siRNA sense strand
gaagaagccuuaaacaauc

SEQ ID NO: 2167777 - RNA, 19 nt, Homo sapiens
  misc_RNA (1)...(19): siRNA sense strand
ggacauugcuguugagaga

SEQ ID NO: 2167778 - RNA, 19 nt, Homo sapiens
  misc_RNA (1)...(19): siRNA sense strand
ggaagaagccuuaaacaau

SEQ ID NO: 2167779 - RNA, 19 nt, Homo sapiens
  misc_RNA (1)...(19): siRNA sense strand
ggaaggcacuuauguggaa

SEQ ID NO: 2167780 - RNA, 19 nt, Homo sapiens
  misc_RNA (1)...(19): siRNA sense strand
ugaaagagcugaaaacuaa

SEQ ID NO: 2167781 - RNA, 19 nt, Homo sapiens
  misc_RNA (1)...(19): siRNA sense strand
gagcauggcuguugaagag

SEQ ID NO: 2167782 - RNA, 19 nt, Homo sapiens
  misc_RNA (1)...(19): siRNA sense strand
cuaaggagccuaaauauga

SEQ ID NO: 2167783 - RNA, 19 nt, Homo sapiens
  misc_RNA (1)...(19): siRNA sense strand
gaaauaaaguccagcaacu

SEQ ID NO: 2167784 - RNA, 19 nt, Homo sapiens
  misc_RNA (1)...(19): siRNA sense strand
ggaaaugaccucacgacua

SEQ ID NO: 2167785 - RNA, 19 nt, Homo sapiens
  misc_RNA (1)...(19): siRNA sense strand
uuaaagaggucuaaaguuc

SEQ ID NO: 2167786 - RNA, 19 nt, Homo sapiens
  misc_RNA (1)...(19): siRNA sense strand
gagcaaguguuucaggauu

SEQ ID NO: 2167787 - RNA, 19 nt, Homo sapiens
  misc_RNA (1)...(19): siRNA sense strand
gcaagaaguuuccucaucu

SEQ ID NO: 2167788 - RNA, 19 nt, Homo sapiens
  misc_RNA (1)...(19): siRNA sense strand
gaugaugagucaccuaaga

SEQ ID NO: 2167789 - RNA, 19 nt, Homo sapiens
  misc_RNA (1)...(19): siRNA sense strand
gcaguuauguugaaaagua

SEQ ID NO: 2167790 - RNA, 19 nt, Homo sapiens
  misc_RNA (1)...(19): siRNA sense strand
uggcagaaaucacgcaaua

SEQ ID NO: 2167791 - RNA, 19 nt, Homo sapiens
  misc_RNA (1)...(19): siRNA sense strand
cagcaacuguccucaaauu

SEQ ID NO: 2167792 - RNA, 19 nt, Homo sapiens
  misc_RNA (1)...(19): siRNA sense strand
ggucuucaccuaccaauaa

SEQ ID NO: 2167793 - RNA, 19 nt, Homo sapiens
  misc_RNA (1)...(19): siRNA sense strand
caaagaugcuaccuaugaa

SEQ ID NO: 2167794 - RNA, 19 nt, Homo sapiens
  misc_RNA (1)...(19): siRNA sense strand
ucaaagaugcuaccuauga

SEQ ID NO: 2167795 - RNA, 19 nt, Homo sapiens
  misc_RNA (1)...(19): siRNA sense strand
caagaagucuccucugcuu

SEQ ID NO: 2167796 - RNA, 19 nt, Homo sapiens
  misc_RNA (1)...(19): siRNA sense strand
gaaguuuccucaucuccaa

SEQ ID NO: 2167797 - RNA, 19 nt, Homo sapiens
  misc_RNA (1)...(19): siRNA sense strand
caacagagcaggcccaaau

SEQ ID NO: 2167798 - RNA, 19 nt, Homo sapiens
  misc_RNA (1)...(19): siRNA sense strand
ccagacaucuuucccaguu

SEQ ID NO: 2167799 - RNA, 19 nt, Homo sapiens
  misc_RNA (1)...(19): siRNA sense strand
gagcuucucugaguuauca

SEQ ID NO: 2167800 - RNA, 19 nt, Homo sapiens
  misc_RNA (1)...(19): siRNA sense strand
gaaucaagcaguuauguug

SEQ ID NO: 2167801 - RNA, 19 nt, Homo sapiens
  misc_RNA (1)...(19): siRNA sense strand
gcacagcccauaccugaaa

SEQ ID NO: 2167802 - RNA, 19 nt, Homo sapiens
  misc_RNA (1)...(19): siRNA sense strand
acacuugccucuaccagua

SEQ ID NO: 2167803 - RNA, 19 nt, Homo sapiens
  misc_RNA (1)...(19): siRNA sense strand
ggucuaaaguucaggaaau

SEQ ID NO: 2167804 - RNA, 19 nt, Homo sapiens
  misc_RNA (1)...(19): siRNA sense strand
ccagaaagcacuacuguug

SEQ ID NO: 2167805 - RNA, 19 nt, Homo sapiens
  misc_RNA (1)...(19): siRNA sense strand
caaagagcauggcuguuga

SEQ ID NO: 2167806 - RNA, 19 nt, Homo sapiens
  misc_RNA (1)...(19): siRNA sense strand
caaauaauacuccugaaga

SEQ ID NO: 2167807 - RNA, 19 nt, Homo sapiens
  misc_RNA (1)...(19): siRNA sense strand
caacagaccaggcuccaaa

SEQ ID NO: 2167808 - RNA, 19 nt, Homo sapiens
  misc_RNA (1)...(19): siRNA sense strand
agacuaaggagccuaaaua

SEQ ID NO: 2167809 - RNA, 19 nt, Homo sapiens
  misc_RNA (1)...(19): siRNA sense strand
aagcacagcuguugaggaa

SEQ ID NO: 2167810 - RNA, 19 nt, Homo sapiens
  misc_RNA (1)...(19): siRNA sense strand
caccaacaccuuccaaaua

SEQ ID NO: 2167811 - RNA, 19 nt, Homo sapiens
  misc_RNA (1)...(19): siRNA sense strand
caacaaaacugagauguau

SEQ ID NO: 2167812 - RNA, 19 nt, Homo sapiens
  misc_RNA (1)...(19): siRNA sense strand
gaacccaguugagccaauu

SEQ ID NO: 2167813 - RNA, 19 nt, Homo sapiens
  misc_RNA (1)...(19): siRNA sense strand
ugaggaaaccugaguauga

SEQ ID NO: 2167814 - RNA, 19 nt, Homo sapiens
  misc_RNA (1)...(19): siRNA sense strand
gagaagacagcacagauga

SEQ ID NO: 2167815 - RNA, 19 nt, Homo sapiens
  misc_RNA (1)...(19): siRNA sense strand
caccagaccuuuacagcaa

SEQ ID NO: 2167816 - RNA, 19 nt, Homo sapiens
  misc_RNA (1)...(19): siRNA sense strand
guuugaagaugaacaagaa

SEQ ID NO: 2167817 - RNA, 19 nt, Homo sapiens
  misc_RNA (1)...(19): siRNA sense strand
gcaaguguuucaggauuga

SEQ ID NO: 2167818 - RNA, 19 nt, Homo sapiens
  misc_RNA (1)...(19): siRNA sense strand
gaagucaagcaccaaguuu

SEQ ID NO: 2167819 - RNA, 19 nt, Homo sapiens
  misc_RNA (1)...(19): siRNA sense strand
agaaagcacuacuguugaa

SEQ ID NO: 2167820 - RNA, 19 nt, Homo sapiens
  misc_RNA (1)...(19): siRNA sense strand
caauaagacugccaggaau

SEQ ID NO: 2167821 - RNA, 19 nt, Homo sapiens
  misc_RNA (1)...(19): siRNA sense strand
ccaauaagacugccaggaa

SEQ ID NO: 2167822 - RNA, 19 nt, Homo sapiens
  misc_RNA (1)...(19): siRNA sense strand
caauugagccugucugguu

SEQ ID NO: 2167823 - RNA, 19 nt, Homo sapiens
  misc_RNA (1)...(19): siRNA sense strand
caaaauaucuuacguugca

SEQ ID NO: 2167824 - RNA, 19 nt, Homo sapiens
  misc_RNA (1)...(19): siRNA sense strand
cuucaaagaugcuaccuau

SEQ ID NO: 2167825 - RNA, 19 nt, Homo sapiens
  misc_RNA (1)...(19): siRNA sense strand
agaaaucucucucgaugau

SEQ ID NO: 2167826 - RNA, 19 nt, Homo sapiens
  misc_RNA (1)...(19): siRNA sense strand
cagaggacauugcuguuga

SEQ ID NO: 2167827 - RNA, 19 nt, Homo sapiens
  misc_RNA (1)...(19): siRNA sense strand
gcucagguguuuaugaauc

SEQ ID NO: 2167828 - RNA, 19 nt, Homo sapiens
  misc_RNA (1)...(19): siRNA sense strand
acaauuccaugguuaguga

SEQ ID NO: 2167829 - RNA, 19 nt, Homo sapiens
  misc_RNA (1)...(19): siRNA sense strand
cugaagagcagaaugauuu

SEQ ID NO: 2167830 - RNA, 19 nt, Homo sapiens
  misc_RNA (1)...(19): siRNA sense strand
ggauaacuauggcaaagca

SEQ ID NO: 2167831 - RNA, 19 nt, Homo sapiens
  misc_RNA (1)...(19): siRNA sense strand
gaagacccacagaaaguuu

SEQ ID NO: 2167832 - RNA, 19 nt, Homo sapiens
  misc_RNA (1)...(19): siRNA sense strand
ccaaagagcauggcuguug

SEQ ID NO: 2167833 - RNA, 19 nt, Homo sapiens
  misc_RNA (1)...(19): siRNA sense strand
aagaaggcuuuaccacaua

SEQ ID NO: 2167834 - RNA, 19 nt, Homo sapiens
  misc_RNA (1)...(19): siRNA sense strand
ccuaaagaguggaggaauu

SEQ ID NO: 2167835 - RNA, 19 nt, Homo sapiens
  misc_RNA (1)...(19): siRNA sense strand
gcaacuguccucaaauuuc

SEQ ID NO: 2167836 - RNA, 19 nt, Homo sapiens
  misc_RNA (1)...(19): siRNA sense strand
gaagaggacauuucuaagg

SEQ ID NO: 2167837 - RNA, 19 nt, Homo sapiens
  misc_RNA (1)...(19): siRNA sense strand
ugaagccucugccuccuaa

SEQ ID NO: 2167838 - RNA, 19 nt, Homo sapiens
  misc_RNA (1)...(19): siRNA sense strand
gaagccugaugcugaagaa

SEQ ID NO: 2167839 - RNA, 19 nt, Homo sapiens
  misc_RNA (1)...(19): siRNA sense strand
gagcuucucucucacugau

SEQ ID NO: 2167840 - RNA, 19 nt, Homo sapiens
  misc_RNA (1)...(19): siRNA sense strand
ccaauaugcuacccaguuc

SEQ ID NO: 2167841 - RNA, 19 nt, Homo sapiens
  misc_RNA (1)...(19): siRNA sense strand
uaaccagcaugcaaaccua

SEQ ID NO: 2167842 - RNA, 19 nt, Homo sapiens
  misc_RNA (1)...(19): siRNA sense strand
gcaacagguucauucaagu

SEQ ID NO: 2167843 - RNA, 19 nt, Homo sapiens
  misc_RNA (1)...(19): siRNA sense strand
caaaggaggaggagccaaa

SEQ ID NO: 2167844 - RNA, 19 nt, Homo sapiens
  misc_RNA (1)...(19): siRNA sense strand
gagccgaugcugagacuaa

SEQ ID NO: 2167845 - RNA, 19 nt, Homo sapiens
  misc_RNA (1)...(19): siRNA sense strand
gcacuuguccuuagagaag

SEQ ID NO: 2167846 - RNA, 19 nt, Homo sapiens
  misc_RNA (1)...(19): siRNA sense strand
gagugggugugaauucaaa

SEQ ID NO: 2167847 - RNA, 19 nt, Homo sapiens
  misc_RNA (1)...(19): siRNA sense strand
ggaggccauucucucagua

SEQ ID NO: 2167848 - RNA, 19 nt, Homo sapiens
  misc_RNA (1)...(19): siRNA sense strand
gcacagaugaagccaccua

SEQ ID NO: 2167849 - RNA, 19 nt, Homo sapiens
  misc_RNA (1)...(19): siRNA sense strand
gagccgguuuggauaacua

SEQ ID NO: 2167850 - RNA, 19 nt, Homo sapiens
  misc_RNA (1)...(19): siRNA sense strand
gcaccugccuucaaguagu

SEQ ID NO: 2167851 - RNA, 19 nt, Homo sapiens
  misc_RNA (1)...(19): siRNA sense strand
cagcaaaucuuuucagaga

SEQ ID NO: 2167852 - RNA, 19 nt, Homo sapiens
  misc_RNA (1)...(19): siRNA sense strand
ggaacuguaucaacucucu

SEQ ID NO: 2167853 - RNA, 19 nt, Homo sapiens
  misc_RNA (1)...(19): siRNA sense strand
gacaaguacuacagccaaa

SEQ ID NO: 2167854 - RNA, 19 nt, Homo sapiens
  misc_RNA (1)...(19): siRNA sense strand
ccaguuagaagaucaagaa

SEQ ID NO: 2167855 - RNA, 19 nt, Homo sapiens
  misc_RNA (1)...(19): siRNA sense strand
cgauagagcugggucuuca

SEQ ID NO: 2167856 - RNA, 19 nt, Homo sapiens
  misc_RNA (1)...(19): siRNA sense strand
ggagaagacagcacagaug

SEQ ID NO: 2167857 - RNA, 19 nt, Homo sapiens
  misc_RNA (1)...(19): siRNA sense strand
gcauuuacucuaagaaaga

SEQ ID NO: 2167858 - RNA, 19 nt, Homo sapiens
  misc_RNA (1)...(19): siRNA sense strand
ugagagcaauucugacaau

SEQ ID NO: 2167859 - RNA, 19 nt, Homo sapiens
  misc_RNA (1)...(19): siRNA sense strand
gaggaaaccugaguaugag

SEQ ID NO: 2167860 - RNA, 19 nt, Homo sapiens
  misc_RNA (1)...(19): siRNA sense strand
uaucaaagccugaagucaa

SEQ ID NO: 2167861 - RNA, 19 nt, Homo sapiens
  misc_RNA (1)...(19): siRNA sense strand
cuaagaacuugguagaaau

SEQ ID NO: 2167862 - RNA, 19 nt, Homo sapiens
  misc_RNA (1)...(19): siRNA sense strand
uaaaguggagcaagaaguu

SEQ ID NO: 2167863 - RNA, 19 nt, Homo sapiens
  misc_RNA (1)...(19): siRNA sense strand
aagaggacauuucuaagga

SEQ ID NO: 2167864 - RNA, 19 nt, Homo sapiens
  misc_RNA (1)...(19): siRNA sense strand
gaaguuugaagaugaacaa

SEQ ID NO: 2167865 - RNA, 19 nt, Homo sapiens
  misc_RNA (1)...(19): siRNA sense strand
gaaaccaaacgaucuucaa

SEQ ID NO: 2167866 - RNA, 19 nt, Homo sapiens
  misc_RNA (1)...(19): siRNA sense strand
ggucaacagucagauuaug

SEQ ID NO: 2167867 - RNA, 19 nt, Homo sapiens
  misc_RNA (1)...(19): siRNA sense strand
gauauucuccucaguccuu

SEQ ID NO: 2167868 - RNA, 19 nt, Homo sapiens
  misc_RNA (1)...(19): siRNA sense strand
gcaccaacaccuuccaaau

SEQ ID NO: 2167869 - RNA, 19 nt, Homo sapiens
  misc_RNA (1)...(19): siRNA sense strand
cagaagauacugcaaguuc

SEQ ID NO: 2167870 - RNA, 19 nt, Homo sapiens
  misc_RNA (1)...(19): siRNA sense strand
ucagauaggucuaaauucc

SEQ ID NO: 2167871 - RNA, 19 nt, Homo sapiens
  misc_RNA (1)...(19): siRNA sense strand
gcuaaaggcucaccuguua

SEQ ID NO: 2167872 - RNA, 19 nt, Homo sapiens
  misc_RNA (1)...(19): siRNA sense strand
cagcaaagcucuacauuaa

SEQ ID NO: 2167873 - RNA, 19 nt, Homo sapiens
  misc_RNA (1)...(19): siRNA sense strand
gaaauaaggcugaucaauu

SEQ ID NO: 2167874 - RNA, 19 nt, Homo sapiens
  misc_RNA (1)...(19): siRNA sense strand
ggagagacguguucaauau

SEQ ID NO: 2167875 - RNA, 19 nt, Homo sapiens
  misc_RNA (1)...(19): siRNA sense strand
gaaguaaacagcaacauaa

SEQ ID NO: 2167876 - RNA, 19 nt, Homo sapiens
  misc_RNA (1)...(19): siRNA sense strand
gcaaagcucuacauuaauc

SEQ ID NO: 2167877 - RNA, 19 nt, Homo sapiens
  misc_RNA (1)...(19): siRNA sense strand
gagaagagaaugaagguua

SEQ ID NO: 2167878 - RNA, 19 nt, Homo sapiens
  misc_RNA (1)...(19): siRNA sense strand
ggaaagauccagagaaaga

SEQ ID NO: 2167879 - RNA, 19 nt, Homo sapiens
  misc_RNA (1)...(19): siRNA sense strand
gcauagauaucgucuguau

SEQ ID NO: 2167880 - RNA, 19 nt, Homo sapiens
  misc_RNA (1)...(19): siRNA sense strand
gauaugcccuccauucuug

SEQ ID NO: 2167881 - RNA, 19 nt, Homo sapiens
  misc_RNA (1)...(19): siRNA sense strand
gcugagagcuuugaagauu

SEQ ID NO: 2167882 - RNA, 19 nt, Homo sapiens
  misc_RNA (1)...(19): siRNA sense strand
cagaaacacuggaaucauu

SEQ ID NO: 2167883 - RNA, 19 nt, Homo sapiens
  misc_RNA (1)...(19): siRNA sense strand
gaagagaagaaacaucaua

SEQ ID NO: 2167884 - RNA, 19 nt, Homo sapiens
  misc_RNA (1)...(19): siRNA sense strand
gaagacaaauugggaaguu

SEQ ID NO: 2167885 - RNA, 19 nt, Homo sapiens
  misc_RNA (1)...(19): siRNA sense strand
gaaaccaccugauaaccaa

SEQ ID NO: 2167886 - RNA, 19 nt, Homo sapiens
  misc_RNA (1)...(19): siRNA sense strand
gaagcuaagcaaauuguua

SEQ ID NO: 2167887 - RNA, 19 nt, Homo sapiens
  misc_RNA (1)...(19): siRNA sense strand
ggaaguaaacagcaacaua

SEQ ID NO: 2167888 - RNA, 19 nt, Homo sapiens
  misc_RNA (1)...(19): siRNA sense strand
ggaaagaagaguacacaaa

SEQ ID NO: 2167889 - RNA, 19 nt, Homo sapiens
  misc_RNA (1)...(19): siRNA sense strand
gaagaggccagaucuauau

SEQ ID NO: 2167890 - RNA, 19 nt, Homo sapiens
  misc_RNA (1)...(19): siRNA sense strand
ucacagcaauucaaucaaa

SEQ ID NO: 2167891 - RNA, 19 nt, Homo sapiens
  misc_RNA (1)...(19): siRNA sense strand
ucacauuccuccacaguaa

SEQ ID NO: 2167892 - RNA, 19 nt, Homo sapiens
  misc_RNA (1)...(19): siRNA sense strand
caacaugcacagaacauua

SEQ ID NO: 2167893 - RNA, 19 nt, Homo sapiens
  misc_RNA (1)...(19): siRNA sense strand
gaacacaaacgagaaauug

SEQ ID NO: 2167894 - RNA, 19 nt, Homo sapiens
  misc_RNA (1)...(19): siRNA sense strand
gaaguuauccuuagcuguu

SEQ ID NO: 2167895 - RNA, 19 nt, Homo sapiens
  misc_RNA (1)...(19): siRNA sense strand
guagagaaaccaccugaua

SEQ ID NO: 2167896 - RNA, 19 nt, Homo sapiens
  misc_RNA (1)...(19): siRNA sense strand
caucagcccucaauucuau

SEQ ID NO: 2167897 - RNA, 19 nt, Homo sapiens
  misc_RNA (1)...(19): siRNA sense strand
gcaguggucuccuuacaug

SEQ ID NO: 2167898 - RNA, 19 nt, Homo sapiens
  misc_RNA (1)...(19): siRNA sense strand
caaggaaucuucagcaaag

SEQ ID NO: 2167899 - RNA, 19 nt, Homo sapiens
  misc_RNA (1)...(19): siRNA sense strand
guacugaggagacugauaa

SEQ ID NO: 2167900 - RNA, 19 nt, Homo sapiens
  misc_RNA (1)...(19): siRNA sense strand
gguauuagcauguuuguau

SEQ ID NO: 2167901 - RNA, 19 nt, Homo sapiens
  misc_RNA (1)...(19): siRNA sense strand
gaaauggacaagaaagauu

SEQ ID NO: 2167902 - RNA, 19 nt, Homo sapiens
  misc_RNA (1)...(19): siRNA sense strand
gauggaacauguacagaga

SEQ ID NO: 2167903 - RNA, 19 nt, Homo sapiens
  misc_RNA (1)...(19): siRNA sense strand
gaagcaaacaagaagauaa

SEQ ID NO: 2167904 - RNA, 19 nt, Homo sapiens
  misc_RNA (1)...(19): siRNA sense strand
gcaguacuucuacaauuua

SEQ ID NO: 2167905 - RNA, 19 nt, Homo sapiens
  misc_RNA (1)...(19): siRNA sense strand
ucagaugccuccauacuau

SEQ ID NO: 2167906 - RNA, 19 nt, Homo sapiens
  misc_RNA (1)...(19): siRNA sense strand
agagagaaauggacaagaa

SEQ ID NO: 2167907 - RNA, 19 nt, Homo sapiens
  misc_RNA (1)...(19): siRNA sense strand
cacgaugacuucuuuauau

SEQ ID NO: 2167908 - RNA, 19 nt, Homo sapiens
  misc_RNA (1)...(19): siRNA sense strand
gaaaggaagagaagaaaca

SEQ ID NO: 2167909 - RNA, 19 nt, Homo sapiens
  misc_RNA (1)...(19): siRNA sense strand
caagaaagauuuggacaag

SEQ ID NO: 2167910 - RNA, 19 nt, Homo sapiens
  misc_RNA (1)...(19): siRNA sense strand
gaagagcggccaaauaaag

SEQ ID NO: 2167911 - RNA, 19 nt, Homo sapiens
  misc_RNA (1)...(19): siRNA sense strand
ggaaugcaguugccagugu

SEQ ID NO: 2167912 - RNA, 19 nt, Homo sapiens
  misc_RNA (1)...(19): siRNA sense strand
ggccagaucuauaugcauu

SEQ ID NO: 2167913 - RNA, 19 nt, Homo sapiens
  misc_RNA (1)...(19): siRNA sense strand
aaaggaauguggaaacuau

SEQ ID NO: 2167914 - RNA, 19 nt, Homo sapiens
  misc_RNA (1)...(19): siRNA sense strand
cagcaguacuucuacaauu

SEQ ID NO: 2167915 - RNA, 19 nt, Homo sapiens
  misc_RNA (1)...(19): siRNA sense strand
auacagaguugcagcagua

SEQ ID NO: 2167916 - RNA, 19 nt, Homo sapiens
  misc_RNA (1)...(19): siRNA sense strand
guugcaagcuguacugaaa

SEQ ID NO: 2167917 - RNA, 19 nt, Homo sapiens
  misc_RNA (1)...(19): siRNA sense strand
guacagagaguucuacaga

SEQ ID NO: 2167918 - RNA, 19 nt, Homo sapiens
  misc_RNA (1)...(19): siRNA sense strand
ccacagcaauccaaccauu

SEQ ID NO: 2167919 - RNA, 19 nt, Homo sapiens
  misc_RNA (1)...(19): siRNA sense strand
ggacugcaaugcuuguaug

SEQ ID NO: 2167920 - RNA, 19 nt, Homo sapiens
  misc_RNA (1)...(19): siRNA sense strand
cagcauagauaucgucugu

SEQ ID NO: 2167921 - RNA, 19 nt, Homo sapiens
  misc_RNA (1)...(19): siRNA sense strand
ggaaauaguggcucuaaca

SEQ ID NO: 2167922 - RNA, 19 nt, Homo sapiens
  misc_RNA (1)...(19): siRNA sense strand
agaaacagauggaacaugu

SEQ ID NO: 2167923 - RNA, 19 nt, Homo sapiens
  misc_RNA (1)...(19): siRNA sense strand
gcugauguauucugcauau

SEQ ID NO: 2167924 - RNA, 19 nt, Homo sapiens
  misc_RNA (1)...(19): siRNA sense strand
guacugcccuucaggacaa

SEQ ID NO: 2167925 - RNA, 19 nt, Homo sapiens
  misc_RNA (1)...(19): siRNA sense strand
guuagaaucuuacaugagu

SEQ ID NO: 2167926 - RNA, 19 nt, Homo sapiens
  misc_RNA (1)...(19): siRNA sense strand
aaggaaaucuaaagcauga

SEQ ID NO: 2167927 - RNA, 19 nt, Homo sapiens
  misc_RNA (1)...(19): siRNA sense strand
ggaaaugaaaucaaaggaa

SEQ ID NO: 2167928 - RNA, 19 nt, Homo sapiens
  misc_RNA (1)...(19): siRNA sense strand
aaagagauauagcaaagga

SEQ ID NO: 2167929 - RNA, 19 nt, Homo sapiens
  misc_RNA (1)...(19): siRNA sense strand
ggucagaucagaaacacua

SEQ ID NO: 2167930 - RNA, 19 nt, Homo sapiens
  misc_RNA (1)...(19): siRNA sense strand
gaaauuacagaggaaauga

SEQ ID NO: 2167931 - RNA, 19 nt, Homo sapiens
  misc_RNA (1)...(19): siRNA sense strand
gcucaccuguuaaugcuuu

SEQ ID NO: 2167932 - RNA, 19 nt, Homo sapiens
  misc_RNA (1)...(19): siRNA sense strand
cauuauggaugaacacaaa

SEQ ID NO: 2167933 - RNA, 19 nt, Homo sapiens
  misc_RNA (1)...(19): siRNA sense strand
cauuagggcuuaucaaaca

SEQ ID NO: 2167934 - RNA, 19 nt, Homo sapiens
  misc_RNA (1)...(19): siRNA sense strand
aaagaacgccgaagucuga

SEQ ID NO: 2167935 - RNA, 19 nt, Homo sapiens
  misc_RNA (1)...(19): siRNA sense strand
gaaucugggucaagcuuug

SEQ ID NO: 2167936 - RNA, 19 nt, Homo sapiens
  misc_RNA (1)...(19): siRNA sense strand
ugaaagcaauugaugacaa

SEQ ID NO: 2167937 - RNA, 19 nt, Homo sapiens
  misc_RNA (1)...(19): siRNA sense strand
gaaagaaugaaacaugaug

SEQ ID NO: 2167938 - RNA, 19 nt, Homo sapiens
  misc_RNA (1)...(19): siRNA sense strand
uagcauuacugaccaggua

SEQ ID NO: 2167939 - RNA, 19 nt, Homo sapiens
  misc_RNA (1)...(19): siRNA sense strand
cgagacaccaucaucuuua

SEQ ID NO: 2167940 - RNA, 19 nt, Homo sapiens
  misc_RNA (1)...(19): siRNA sense strand
agaaagagauauagcaaag

SEQ ID NO: 2167941 - RNA, 19 nt, Homo sapiens
  misc_RNA (1)...(19): siRNA sense strand
auacagagauuuccagcaa

SEQ ID NO: 2167942 - RNA, 19 nt, Homo sapiens
  misc_RNA (1)...(19): siRNA sense strand
gcaaauuguuagaaagcuu

SEQ ID NO: 2167943 - RNA, 19 nt, Homo sapiens
  misc_RNA (1)...(19): siRNA sense strand
gagacaccaucaucuuuau

SEQ ID NO: 2167944 - RNA, 19 nt, Homo sapiens
  misc_RNA (1)...(19): siRNA sense strand
agacacaguucuaaaggaa

SEQ ID NO: 2167945 - RNA, 19 nt, Homo sapiens
  misc_RNA (1)...(19): siRNA sense strand
gagaagaggccagaucuau

SEQ ID NO: 2167946 - RNA, 19 nt, Homo sapiens
  misc_RNA (1)...(19): siRNA sense strand
gacauaauuuacacaguug

SEQ ID NO: 2167947 - RNA, 19 nt, Homo sapiens
  misc_RNA (1)...(19): siRNA sense strand
ucaauucuaugcuacauuc

SEQ ID NO: 2167948 - RNA, 19 nt, Homo sapiens
  misc_RNA (1)...(19): siRNA sense strand
auccuuagcuguuugcuua

SEQ ID NO: 2167949 - RNA, 19 nt, Homo sapiens
  misc_RNA (1)...(19): siRNA sense strand
gauguauucugcauauuag

SEQ ID NO: 2167950 - RNA, 19 nt, Homo sapiens
  misc_RNA (1)...(19): siRNA sense strand
gaaagaagaguacacaaaa

SEQ ID NO: 2167951 - RNA, 19 nt, Homo sapiens
  misc_RNA (1)...(19): siRNA sense strand
gauagagccacauaugaaa

SEQ ID NO: 2167952 - RNA, 19 nt, Homo sapiens
  misc_RNA (1)...(19): siRNA sense strand
acagagaguucuacagaga

SEQ ID NO: 2167953 - RNA, 19 nt, Homo sapiens
  misc_RNA (1)...(19): siRNA sense strand
aauaacaccuguaguagau

SEQ ID NO: 2167954 - RNA, 19 nt, Homo sapiens
  misc_RNA (1)...(19): siRNA sense strand
aaacggaaguuauccuuag

SEQ ID NO: 2167955 - RNA, 19 nt, Homo sapiens
  misc_RNA (1)...(19): siRNA sense strand
gcaaacaagaagauaaaga

SEQ ID NO: 2167956 - RNA, 19 nt, Homo sapiens
  misc_RNA (1)...(19): siRNA sense strand
uuagaaagcuuacgauggu

SEQ ID NO: 2167957 - RNA, 19 nt, Homo sapiens
  misc_RNA (1)...(19): siRNA sense strand
caugauaguucaacauaca

SEQ ID NO: 2167958 - RNA, 19 nt, Homo sapiens
  misc_RNA (1)...(19): siRNA sense strand
ugaaaguccuugugaaucu

SEQ ID NO: 2167959 - RNA, 19 nt, Homo sapiens
  misc_RNA (1)...(19): siRNA sense strand
aggaagagcggccaaauaa

SEQ ID NO: 2167960 - RNA, 19 nt, Homo sapiens
  misc_RNA (1)...(19): siRNA sense strand
ugguaaagaugguaaagaa

SEQ ID NO: 2167961 - RNA, 19 nt, Homo sapiens
  misc_RNA (1)...(19): siRNA sense strand
uaaagggaauucaagcaau

SEQ ID NO: 2167962 - RNA, 19 nt, Homo sapiens
  misc_RNA (1)...(19): siRNA sense strand
ucaggaauaucuugauugu

SEQ ID NO: 2167963 - RNA, 19 nt, Homo sapiens
  misc_RNA (1)...(19): siRNA sense strand
ccacacuucuuugcuauga

SEQ ID NO: 2167964 - RNA, 19 nt, Homo sapiens
  misc_RNA (1)...(19): siRNA sense strand
caauagacagagccaaaua

SEQ ID NO: 2167965 - RNA, 19 nt, Homo sapiens
  misc_RNA (1)...(19): siRNA sense strand
gaagccuuauuaaagauug

SEQ ID NO: 2167966 - RNA, 19 nt, Homo sapiens
  misc_RNA (1)...(19): siRNA sense strand
gagaagaaacaucauaagu

SEQ ID NO: 2167967 - RNA, 19 nt, Homo sapiens
  misc_RNA (1)...(19): siRNA sense strand
ccaccggacuuaaccaaga

SEQ ID NO: 2167968 - RNA, 19 nt, Homo sapiens
  misc_RNA (1)...(19): siRNA sense strand
guaaacagcaacauaaagu

SEQ ID NO: 2167969 - RNA, 19 nt, Homo sapiens
  misc_RNA (1)...(19): siRNA sense strand
ugucacaaauacagaagua

SEQ ID NO: 2167970 - RNA, 19 nt, Homo sapiens
  misc_RNA (1)...(19): siRNA sense strand
agggaaagauccagagaaa

SEQ ID NO: 2167971 - RNA, 19 nt, Homo sapiens
  misc_RNA (1)...(19): siRNA sense strand
cagaguuccuccacaauaa

SEQ ID NO: 2167972 - RNA, 19 nt, Homo sapiens
  misc_RNA (1)...(19): siRNA sense strand
gcgcaacacuucacaagau

SEQ ID NO: 2167973 - RNA, 19 nt, Homo sapiens
  misc_RNA (1)...(19): siRNA sense strand
uaaauacccuccuuaccuu

SEQ ID NO: 2167974 - RNA, 19 nt, Homo sapiens
  misc_RNA (1)...(19): siRNA sense strand
ucaagacccuucuagaaau

SEQ ID NO: 2167975 - RNA, 19 nt, Homo sapiens
  misc_RNA (1)...(19): siRNA sense strand
gaacucgucuacaaauaac

SEQ ID NO: 2167976 - RNA, 19 nt, Homo sapiens
  misc_RNA (1)...(19): siRNA sense strand
agagagaaguggacaacaa

SEQ ID NO: 2167977 - RNA, 19 nt, Homo sapiens
  misc_RNA (1)...(19): siRNA sense strand
guaagaacucgucuacaaa

SEQ ID NO: 2167978 - RNA, 19 nt, Homo sapiens
  misc_RNA (1)...(19): siRNA sense strand
caagacccuucuagaaaug

SEQ ID NO: 2167979 - RNA, 19 nt, Homo sapiens
  misc_RNA (1)...(19): siRNA sense strand
ccaaauccaggaagaauga

SEQ ID NO: 2167980 - RNA, 19 nt, Homo sapiens
  misc_RNA (1)...(19): siRNA sense strand
ccagaguuccuccacaaua

SEQ ID NO: 2167981 - RNA, 19 nt, Homo sapiens
  misc_RNA (1)...(19): siRNA sense strand
caaauaacaaccagacuca

SEQ ID NO: 2167982 - RNA, 19 nt, Homo sapiens
  misc_RNA (1)...(19): siRNA sense strand
aagaacucgucuacaaaua

SEQ ID NO: 2167983 - RNA, 19 nt, Homo sapiens
  misc_RNA (1)...(19): siRNA sense strand
cagcaacaauggcaguaug

SEQ ID NO: 2167984 - RNA, 19 nt, Homo sapiens
  misc_RNA (1)...(19): siRNA sense strand
ccacagcgcugagagugau

SEQ ID NO: 2167985 - RNA, 19 nt, Homo sapiens
  misc_RNA (1)...(19): siRNA sense strand
cgcaacacuucacaagaua

SEQ ID NO: 2167986 - RNA, 19 nt, Homo sapiens
  misc_RNA (1)...(19): siRNA sense strand
ucgauugccuugcugacua

SEQ ID NO: 2167987 - RNA, 19 nt, Homo sapiens
  misc_RNA (1)...(19): siRNA sense strand
uaagaacucgucuacaaau

SEQ ID NO: 2167988 - RNA, 19 nt, Homo sapiens
  misc_RNA (1)...(19): siRNA sense strand
agaacucgucuacaaauaa

SEQ ID NO: 2167989 - RNA, 19 nt, Homo sapiens
  misc_RNA (1)...(19): siRNA sense strand
acaauaaauacccuccuua

SEQ ID NO: 2167990 - RNA, 19 nt, Homo sapiens
  misc_RNA (1)...(19): siRNA sense strand
cacaauaaauacccuccuu

SEQ ID NO: 2167991 - RNA, 19 nt, Homo sapiens
  misc_RNA (1)...(19): siRNA sense strand
gcaguaugcgcaacacuuc

SEQ ID NO: 2167992 - RNA, 19 nt, Homo sapiens
  misc_RNA (1)...(19): siRNA sense strand
uugaugagaugcccaaauc

SEQ ID NO: 2167993 - RNA, 19 nt, Homo sapiens
  misc_RNA (1)...(19): siRNA sense strand
cuccuuaccuugcucgauu

SEQ ID NO: 2167994 - RNA, 19 nt, Homo sapiens
  misc_RNA (1)...(19): siRNA sense strand
cucaagacccuucuagaaa

SEQ ID NO: 2167995 - RNA, 19 nt, Homo sapiens
  misc_RNA (1)...(19): siRNA sense strand
caagauagggagagagaag

SEQ ID NO: 2167996 - RNA, 19 nt, Homo sapiens
  misc_RNA (1)...(19): siRNA sense strand
acucaagacccuucuagaa

SEQ ID NO: 2167997 - RNA, 19 nt, Homo sapiens
  misc_RNA (1)...(19): siRNA sense strand
caauaaauacccuccuuac

SEQ ID NO: 2167998 - RNA, 19 nt, Homo sapiens
  misc_RNA (1)...(19): siRNA sense strand
gaugagaugcccaaaucca

SEQ ID NO: 2167999 - RNA, 19 nt, Homo sapiens
  misc_RNA (1)...(19): siRNA sense strand
gagcuacaggucccuagga

SEQ ID NO: 2168000 - RNA, 19 nt, Homo sapiens
  misc_RNA (1)...(19): siRNA sense strand
cacaagauagggagagaga

SEQ ID NO: 2168001 - RNA, 19 nt, Homo sapiens
  misc_RNA (1)...(19): siRNA sense strand
ggagagagaaguggacaac

SEQ ID NO: 2168002 - RNA, 19 nt, Homo sapiens
  misc_RNA (1)...(19): siRNA sense strand
gagagaaguggacaacaac

SEQ ID NO: 2168003 - RNA, 19 nt, Homo sapiens
  misc_RNA (1)...(19): siRNA sense strand
gcccaaauccaggaagaau

SEQ ID NO: 2168004 - RNA, 19 nt, Homo sapiens
  misc_RNA (1)...(19): siRNA sense strand
agccagaguuccuccacaa

SEQ ID NO: 2168005 - RNA, 19 nt, Homo sapiens
  misc_RNA (1)...(19): siRNA sense strand
ggcaguaugcgcaacacuu

SEQ ID NO: 2168006 - RNA, 19 nt, Homo sapiens
  misc_RNA (1)...(19): siRNA sense strand
gaguuccuccacaauaaau

SEQ ID NO: 2168007 - RNA, 19 nt, Homo sapiens
  misc_RNA (1)...(19): siRNA sense strand
gcaacacuucacaagauag

SEQ ID NO: 2168008 - RNA, 19 nt, Homo sapiens
  misc_RNA (1)...(19): siRNA sense strand
auaaauacccuccuuaccu

SEQ ID NO: 2168009 - RNA, 19 nt, Homo sapiens
  misc_RNA (1)...(19): siRNA sense strand
auaacaaccagacucaaga

SEQ ID NO: 2168010 - RNA, 19 nt, Homo sapiens
  misc_RNA (1)...(19): siRNA sense strand
gaugaacgagacguccaaa

SEQ ID NO: 2168011 - RNA, 19 nt, Homo sapiens
  misc_RNA (1)...(19): siRNA sense strand
gcaagucgcuggaugguuu

SEQ ID NO: 2168012 - RNA, 19 nt, Homo sapiens
  misc_RNA (1)...(19): siRNA sense strand
ccaaagcuguccaaauuua

SEQ ID NO: 2168013 - RNA, 19 nt, Homo sapiens
  misc_RNA (1)...(19): siRNA sense strand
aaccaaagcuguccaaauu

SEQ ID NO: 2168014 - RNA, 19 nt, Homo sapiens
  misc_RNA (1)...(19): siRNA sense strand
gcaaggaggagcagcagaa

SEQ ID NO: 2168015 - RNA, 19 nt, Homo sapiens
  misc_RNA (1)...(19): siRNA sense strand
gaugguuuauuaccugaaa

SEQ ID NO: 2168016 - RNA, 19 nt, Homo sapiens
  misc_RNA (1)...(19): siRNA sense strand
ggaccaaccugacuuucca

SEQ ID NO: 2168017 - RNA, 19 nt, Homo sapiens
  misc_RNA (1)...(19): siRNA sense strand
caacuaccuucuccaggaa

SEQ ID NO: 2168018 - RNA, 19 nt, Homo sapiens
  misc_RNA (1)...(19): siRNA sense strand
gucgcuggaugguuuauua

SEQ ID NO: 2168019 - RNA, 19 nt, Homo sapiens
  misc_RNA (1)...(19): siRNA sense strand
caaccugacuuuccacuac

SEQ ID NO: 2168020 - RNA, 19 nt, Homo sapiens
  misc_RNA (1)...(19): siRNA sense strand
gauggugucucuccuccuu

SEQ ID NO: 2168021 - RNA, 19 nt, Homo sapiens
  misc_RNA (1)...(19): siRNA sense strand
gcagaaggaguacagauuc

SEQ ID NO: 2168022 - RNA, 19 nt, Homo sapiens
  misc_RNA (1)...(19): siRNA sense strand
gacauggaaugccagcaaa

SEQ ID NO: 2168023 - RNA, 19 nt, Homo sapiens
  misc_RNA (1)...(19): siRNA sense strand
cgagaaguguuacucuuuc

SEQ ID NO: 2168024 - RNA, 19 nt, Homo sapiens
  misc_RNA (1)...(19): siRNA sense strand
gaguacagauucagaucau

SEQ ID NO: 2168025 - RNA, 19 nt, Homo sapiens
  misc_RNA (1)...(19): siRNA sense strand
gaaggaguacagauucaga

SEQ ID NO: 2168026 - RNA, 19 nt, Homo sapiens
  misc_RNA (1)...(19): siRNA sense strand
ugaaggcuauggaggaugu

SEQ ID NO: 2168027 - RNA, 19 nt, Homo sapiens
  misc_RNA (1)...(19): siRNA sense strand
cagaaggaguacagauuca

SEQ ID NO: 2168028 - RNA, 19 nt, Homo sapiens
  misc_RNA (1)...(19): siRNA sense strand
caacgccucccaaaccaaa

SEQ ID NO: 2168029 - RNA, 19 nt, Homo sapiens
  misc_RNA (1)...(19): siRNA sense strand
cauggaaugccagcaaaua

SEQ ID NO: 2168030 - RNA, 19 nt, Homo sapiens
  misc_RNA (1)...(19): siRNA sense strand
caacggugaugaggccuau

SEQ ID NO: 2168031 - RNA, 19 nt, Homo sapiens
  misc_RNA (1)...(19): siRNA sense strand
gcaaauacuccaggaccaa

SEQ ID NO: 2168032 - RNA, 19 nt, Homo sapiens
  misc_RNA (1)...(19): siRNA sense strand
agacgacauucucuauuuc

SEQ ID NO: 2168033 - RNA, 19 nt, Homo sapiens
  misc_RNA (1)...(19): siRNA sense strand
gccgagaaguguuacucuu

SEQ ID NO: 2168034 - RNA, 19 nt, Homo sapiens
  misc_RNA (1)...(19): siRNA sense strand
guggggagcugccgucuuu

SEQ ID NO: 2168035 - RNA, 19 nt, Homo sapiens
  misc_RNA (1)...(19): siRNA sense strand
ggaguacagauucagauca

SEQ ID NO: 2168036 - RNA, 19 nt, Homo sapiens
  misc_RNA (1)...(19): siRNA sense strand
ccgagaaguguuacucuuu

SEQ ID NO: 2168037 - RNA, 19 nt, Homo sapiens
  misc_RNA (1)...(19): siRNA sense strand
ggugaaggcuauggaggau

SEQ ID NO: 2168038 - RNA, 19 nt, Homo sapiens
  misc_RNA (1)...(19): siRNA sense strand
aaaccaaagcuguccaaau

SEQ ID NO: 2168039 - RNA, 19 nt, Homo sapiens
  misc_RNA (1)...(19): siRNA sense strand
caaagcuguccaaauuuau

SEQ ID NO: 2168040 - RNA, 19 nt, Homo sapiens
  misc_RNA (1)...(19): siRNA sense strand
gcagugacggugacguguu

SEQ ID NO: 2168041 - RNA, 19 nt, Homo sapiens
  misc_RNA (1)...(19): siRNA sense strand
ugacauggaaugccagcaa

SEQ ID NO: 2168042 - RNA, 19 nt, Homo sapiens
  misc_RNA (1)...(19): siRNA sense strand
ugacuuuccacuacagauu

SEQ ID NO: 2168043 - RNA, 19 nt, Homo sapiens
  misc_RNA (1)...(19): siRNA sense strand
cagugacggugacguguuc

SEQ ID NO: 2168044 - RNA, 19 nt, Homo sapiens
  misc_RNA (1)...(19): siRNA sense strand
ggaaugccagcaaauacuc

SEQ ID NO: 2168045 - RNA, 19 nt, Homo sapiens
  misc_RNA (1)...(19): siRNA sense strand
ggaugccugugcagagaca

SEQ ID NO: 2168046 - RNA, 19 nt, Homo sapiens
  misc_RNA (1)...(19): siRNA sense strand
cuacuucaauuuagaaacc

SEQ ID NO: 2168047 - RNA, 19 nt, Homo sapiens
  misc_RNA (1)...(19): siRNA sense strand
ccuucugucuuuauggaaa

SEQ ID NO: 2168048 - RNA, 19 nt, Homo sapiens
  misc_RNA (1)...(19): siRNA sense strand
caagucgcuggaugguuua

SEQ ID NO: 2168049 - RNA, 19 nt, Homo sapiens
  misc_RNA (1)...(19): siRNA sense strand
cgggaugccugugcagaga

SEQ ID NO: 2168050 - RNA, 19 nt, Homo sapiens
  misc_RNA (1)...(19): siRNA sense strand
ggcuauggaggauguauau

SEQ ID NO: 2168051 - RNA, 19 nt, Homo sapiens
  misc_RNA (1)...(19): siRNA sense strand
uggaugccgagaaguguua

SEQ ID NO: 2168052 - RNA, 19 nt, Homo sapiens
  misc_RNA (1)...(19): siRNA sense strand
ccugcaacgucaccauaga

SEQ ID NO: 2168053 - RNA, 19 nt, Homo sapiens
  misc_RNA (1)...(19): siRNA sense strand
caccauagaaggcuuggau

SEQ ID NO: 2168054 - RNA, 19 nt, Homo sapiens
  misc_RNA (1)...(19): siRNA sense strand
aggagcagcagaaggagua

SEQ ID NO: 2168055 - RNA, 19 nt, Homo sapiens
  misc_RNA (1)...(19): siRNA sense strand
gggucagggugaaggcuau

SEQ ID NO: 2168056 - RNA, 19 nt, Homo sapiens
  misc_RNA (1)...(19): siRNA sense strand
cuacggggaucuccucuau

SEQ ID NO: 2168057 - RNA, 19 nt, Homo sapiens
  misc_RNA (1)...(19): siRNA sense strand
ccgugcaggugacauggaa

SEQ ID NO: 2168058 - RNA, 19 nt, Homo sapiens
  misc_RNA (1)...(19): siRNA sense strand
ccgaguggcaguccaaaca

SEQ ID NO: 2168059 - RNA, 19 nt, Homo sapiens
  misc_RNA (1)...(19): siRNA sense strand
aggaggagcagcagaagga

SEQ ID NO: 2168060 - RNA, 19 nt, Homo sapiens
  misc_RNA (1)...(19): siRNA sense strand
gagcagcgagacgacauuc

SEQ ID NO: 2168061 - RNA, 19 nt, Homo sapiens
  misc_RNA (1)...(19): siRNA sense strand
uaccugcaacgucaccaua

SEQ ID NO: 2168062 - RNA, 19 nt, Homo sapiens
  misc_RNA (1)...(19): siRNA sense strand
ccagugcaccaacuaccuu

SEQ ID NO: 2168063 - RNA, 19 nt, Homo sapiens
  misc_RNA (1)...(19): siRNA sense strand
ccaaaccaaagcuguccaa

SEQ ID NO: 2168064 - RNA, 19 nt, Homo sapiens
  misc_RNA (1)...(19): siRNA sense strand
gacaccaacgccucccaaa

SEQ ID NO: 2168065 - RNA, 19 nt, Homo sapiens
  misc_RNA (1)...(19): siRNA sense strand
gcuuggaugccgagaagug

SEQ ID NO: 2168066 - RNA, 19 nt, Homo sapiens
  misc_RNA (1)...(19): siRNA sense strand
gcaagucgcuggaugguuu

SEQ ID NO: 2168067 - RNA, 19 nt, Homo sapiens
  misc_RNA (1)...(19): siRNA sense strand
ccaaagcuguccaaauuua

SEQ ID NO: 2168068 - RNA, 19 nt, Homo sapiens
  misc_RNA (1)...(19): siRNA sense strand
aaccaaagcuguccaaauu

SEQ ID NO: 2168069 - RNA, 19 nt, Homo sapiens
  misc_RNA (1)...(19): siRNA sense strand
gcaaggaggagcagcagaa

SEQ ID NO: 2168070 - RNA, 19 nt, Homo sapiens
  misc_RNA (1)...(19): siRNA sense strand
gaugguuuauuaccugaaa

SEQ ID NO: 2168071 - RNA, 19 nt, Homo sapiens
  misc_RNA (1)...(19): siRNA sense strand
ggaccaaccugacuuucca

SEQ ID NO: 2168072 - RNA, 19 nt, Homo sapiens
  misc_RNA (1)...(19): siRNA sense strand
caacuaccuucuccaggaa

SEQ ID NO: 2168073 - RNA, 19 nt, Homo sapiens
  misc_RNA (1)...(19): siRNA sense strand
gucgcuggaugguuuauua

SEQ ID NO: 2168074 - RNA, 19 nt, Homo sapiens
  misc_RNA (1)...(19): siRNA sense strand
caaccugacuuuccacuac

SEQ ID NO: 2168075 - RNA, 19 nt, Homo sapiens
  misc_RNA (1)...(19): siRNA sense strand
gauggugucucuccuccuu

SEQ ID NO: 2168076 - RNA, 19 nt, Homo sapiens
  misc_RNA (1)...(19): siRNA sense strand
gcagaaggaguacagauuc

SEQ ID NO: 2168077 - RNA, 19 nt, Homo sapiens
  misc_RNA (1)...(19): siRNA sense strand
gacauggaaugccagcaaa

SEQ ID NO: 2168078 - RNA, 19 nt, Homo sapiens
  misc_RNA (1)...(19): siRNA sense strand
cgagaaguguuacucuuuc

SEQ ID NO: 2168079 - RNA, 19 nt, Homo sapiens
  misc_RNA (1)...(19): siRNA sense strand
gaguacagauucagaucau

SEQ ID NO: 2168080 - RNA, 19 nt, Homo sapiens
  misc_RNA (1)...(19): siRNA sense strand
gaaggaguacagauucaga

SEQ ID NO: 2168081 - RNA, 19 nt, Homo sapiens
  misc_RNA (1)...(19): siRNA sense strand
ugaaggcuauggaggaugu

SEQ ID NO: 2168082 - RNA, 19 nt, Homo sapiens
  misc_RNA (1)...(19): siRNA sense strand
cagaaggaguacagauuca

SEQ ID NO: 2168083 - RNA, 19 nt, Homo sapiens
  misc_RNA (1)...(19): siRNA sense strand
caacgccucccaaaccaaa

SEQ ID NO: 2168084 - RNA, 19 nt, Homo sapiens
  misc_RNA (1)...(19): siRNA sense strand
cauggaaugccagcaaaua

SEQ ID NO: 2168085 - RNA, 19 nt, Homo sapiens
  misc_RNA (1)...(19): siRNA sense strand
caacggugaugaggccuau

SEQ ID NO: 2168086 - RNA, 19 nt, Homo sapiens
  misc_RNA (1)...(19): siRNA sense strand
gcaaauacuccaggaccaa

SEQ ID NO: 2168087 - RNA, 19 nt, Homo sapiens
  misc_RNA (1)...(19): siRNA sense strand
agacgacauucucuauuuc

SEQ ID NO: 2168088 - RNA, 19 nt, Homo sapiens
  misc_RNA (1)...(19): siRNA sense strand
gccgagaaguguuacucuu

SEQ ID NO: 2168089 - RNA, 19 nt, Homo sapiens
  misc_RNA (1)...(19): siRNA sense strand
guggggagcugccgucuuu

SEQ ID NO: 2168090 - RNA, 19 nt, Homo sapiens
  misc_RNA (1)...(19): siRNA sense strand
ggaguacagauucagauca

SEQ ID NO: 2168091 - RNA, 19 nt, Homo sapiens
  misc_RNA (1)...(19): siRNA sense strand
ccgagaaguguuacucuuu

SEQ ID NO: 2168092 - RNA, 19 nt, Homo sapiens
  misc_RNA (1)...(19): siRNA sense strand
ggugaaggcuauggaggau

SEQ ID NO: 2168093 - RNA, 19 nt, Homo sapiens
  misc_RNA (1)...(19): siRNA sense strand
aaaccaaagcuguccaaau

SEQ ID NO: 2168094 - RNA, 19 nt, Homo sapiens
  misc_RNA (1)...(19): siRNA sense strand
caaagcuguccaaauuuau

SEQ ID NO: 2168095 - RNA, 19 nt, Homo sapiens
  misc_RNA (1)...(19): siRNA sense strand
gcagugacggugacguguu

SEQ ID NO: 2168096 - RNA, 19 nt, Homo sapiens
  misc_RNA (1)...(19): siRNA sense strand
ugacauggaaugccagcaa

SEQ ID NO: 2168097 - RNA, 19 nt, Homo sapiens
  misc_RNA (1)...(19): siRNA sense strand
ugacuuuccacuacagauu

SEQ ID NO: 2168098 - RNA, 19 nt, Homo sapiens
  misc_RNA (1)...(19): siRNA sense strand
cagugacggugacguguuc

SEQ ID NO: 2168099 - RNA, 19 nt, Homo sapiens
  misc_RNA (1)...(19): siRNA sense strand
ggaaugccagcaaauacuc

SEQ ID NO: 2168100 - RNA, 19 nt, Homo sapiens
  misc_RNA (1)...(19): siRNA sense strand
ggaugccugugcagagaca

SEQ ID NO: 2168101 - RNA, 19 nt, Homo sapiens
  misc_RNA (1)...(19): siRNA sense strand
cuacuucaauuuagaaacc

SEQ ID NO: 2168102 - RNA, 19 nt, Homo sapiens
  misc_RNA (1)...(19): siRNA sense strand
ccuucugucuuuauggaaa

SEQ ID NO: 2168103 - RNA, 19 nt, Homo sapiens
  misc_RNA (1)...(19): siRNA sense strand
caagucgcuggaugguuua

SEQ ID NO: 2168104 - RNA, 19 nt, Homo sapiens
  misc_RNA (1)...(19): siRNA sense strand
cgggaugccugugcagaga

SEQ ID NO: 2168105 - RNA, 19 nt, Homo sapiens
  misc_RNA (1)...(19): siRNA sense strand
ggcuauggaggauguauau

SEQ ID NO: 2168106 - RNA, 19 nt, Homo sapiens
  misc_RNA (1)...(19): siRNA sense strand
uggaugccgagaaguguua

SEQ ID NO: 2168107 - RNA, 19 nt, Homo sapiens
  misc_RNA (1)...(19): siRNA sense strand
ccugcaacgucaccauaga

SEQ ID NO: 2168108 - RNA, 19 nt, Homo sapiens
  misc_RNA (1)...(19): siRNA sense strand
caccauagaaggcuuggau

SEQ ID NO: 2168109 - RNA, 19 nt, Homo sapiens
  misc_RNA (1)...(19): siRNA sense strand
aggagcagcagaaggagua

SEQ ID NO: 2168110 - RNA, 19 nt, Homo sapiens
  misc_RNA (1)...(19): siRNA sense strand
gggucagggugaaggcuau

SEQ ID NO: 2168111 - RNA, 19 nt, Homo sapiens
  misc_RNA (1)...(19): siRNA sense strand
cuacggggaucuccucuau

SEQ ID NO: 2168112 - RNA, 19 nt, Homo sapiens
  misc_RNA (1)...(19): siRNA sense strand
ccgugcaggugacauggaa

SEQ ID NO: 2168113 - RNA, 19 nt, Homo sapiens
  misc_RNA (1)...(19): siRNA sense strand
ccgaguggcaguccaaaca

SEQ ID NO: 2168114 - RNA, 19 nt, Homo sapiens
  misc_RNA (1)...(19): siRNA sense strand
aggaggagcagcagaagga

SEQ ID NO: 2168115 - RNA, 19 nt, Homo sapiens
  misc_RNA (1)...(19): siRNA sense strand
gagcagcgagacgacauuc

SEQ ID NO: 2168116 - RNA, 19 nt, Homo sapiens
  misc_RNA (1)...(19): siRNA sense strand
uaccugcaacgucaccaua

SEQ ID NO: 2168117 - RNA, 19 nt, Homo sapiens
  misc_RNA (1)...(19): siRNA sense strand
ccagugcaccaacuaccuu

SEQ ID NO: 2168118 - RNA, 19 nt, Homo sapiens
  misc_RNA (1)...(19): siRNA sense strand
ccaaaccaaagcuguccaa

SEQ ID NO: 2168119 - RNA, 19 nt, Homo sapiens
  misc_RNA (1)...(19): siRNA sense strand
gacaccaacgccucccaaa

SEQ ID NO: 2168120 - RNA, 19 nt, Homo sapiens
  misc_RNA (1)...(19): siRNA sense strand
gcuuggaugccgagaagug

SEQ ID NO: 2168121 - RNA, 19 nt, Homo sapiens
  misc_RNA (1)...(19): siRNA sense strand
uuaaggagcuugccucaua

SEQ ID NO: 2168122 - RNA, 19 nt, Homo sapiens
  misc_RNA (1)...(19): siRNA sense strand
ccagauggcuguucuucua

SEQ ID NO: 2168123 - RNA, 19 nt, Homo sapiens
  misc_RNA (1)...(19): siRNA sense strand
gcaagaacguuaggagaaa

SEQ ID NO: 2168124 - RNA, 19 nt, Homo sapiens
  misc_RNA (1)...(19): siRNA sense strand
guggaaagguuaugacaaa

SEQ ID NO: 2168125 - RNA, 19 nt, Homo sapiens
  misc_RNA (1)...(19): siRNA sense strand
uaaagcaucugccaaugaa

SEQ ID NO: 2168126 - RNA, 19 nt, Homo sapiens
  misc_RNA (1)...(19): siRNA sense strand
gaagaaagaggauggauuc

SEQ ID NO: 2168127 - RNA, 19 nt, Homo sapiens
  misc_RNA (1)...(19): siRNA sense strand
gaaaggguauagugguauu

SEQ ID NO: 2168128 - RNA, 19 nt, Homo sapiens
  misc_RNA (1)...(19): siRNA sense strand
gagcuugccucauacaaug

SEQ ID NO: 2168129 - RNA, 19 nt, Homo sapiens
  misc_RNA (1)...(19): siRNA sense strand
ucaacuagaucgacagaaa

SEQ ID NO: 2168130 - RNA, 19 nt, Homo sapiens
  misc_RNA (1)...(19): siRNA sense strand
ccaaaggccuggucucuca

SEQ ID NO: 2168131 - RNA, 19 nt, Homo sapiens
  misc_RNA (1)...(19): siRNA sense strand
aaacugacauggacuacaa

SEQ ID NO: 2168132 - RNA, 19 nt, Homo sapiens
  misc_RNA (1)...(19): siRNA sense strand
gagcucagcccaagggaua

SEQ ID NO: 2168133 - RNA, 19 nt, Homo sapiens
  misc_RNA (1)...(19): siRNA sense strand
gauggcuguucuucuauua

SEQ ID NO: 2168134 - RNA, 19 nt, Homo sapiens
  misc_RNA (1)...(19): siRNA sense strand
gaacagacuggaauacaga

SEQ ID NO: 2168135 - RNA, 19 nt, Homo sapiens
  misc_RNA (1)...(19): siRNA sense strand
cucguucgcuguaauauua

SEQ ID NO: 2168136 - RNA, 19 nt, Homo sapiens
  misc_RNA (1)...(19): siRNA sense strand
aagaugcacuucaccauaa

SEQ ID NO: 2168137 - RNA, 19 nt, Homo sapiens
  misc_RNA (1)...(19): siRNA sense strand
gaaagacacagaacgauca

SEQ ID NO: 2168138 - RNA, 19 nt, Homo sapiens
  misc_RNA (1)...(19): siRNA sense strand
ccacuaaugucgcagaugu

SEQ ID NO: 2168139 - RNA, 19 nt, Homo sapiens
  misc_RNA (1)...(19): siRNA sense strand
cuucagagacacacaauua

SEQ ID NO: 2168140 - RNA, 19 nt, Homo sapiens
  misc_RNA (1)...(19): siRNA sense strand
ggguauagugguauuaaua

SEQ ID NO: 2168141 - RNA, 19 nt, Homo sapiens
  misc_RNA (1)...(19): siRNA sense strand
cagagacacacaauuauaa

SEQ ID NO: 2168142 - RNA, 19 nt, Homo sapiens
  misc_RNA (1)...(19): siRNA sense strand
gcuguaauauuaaguugga

SEQ ID NO: 2168143 - RNA, 19 nt, Homo sapiens
  misc_RNA (1)...(19): siRNA sense strand
guaaagcaucugccaauga

SEQ ID NO: 2168144 - RNA, 19 nt, Homo sapiens
  misc_RNA (1)...(19): siRNA sense strand
gaaagguuaugacaaacag

SEQ ID NO: 2168145 - RNA, 19 nt, Homo sapiens
  misc_RNA (1)...(19): siRNA sense strand
cccaagagguuaugauuca

SEQ ID NO: 2168146 - RNA, 19 nt, Homo sapiens
  misc_RNA (1)...(19): siRNA sense strand
ccgaaaggguauaguggua

SEQ ID NO: 2168147 - RNA, 19 nt, Homo sapiens
  misc_RNA (1)...(19): siRNA sense strand
gaacuuccagaucuacaaa

SEQ ID NO: 2168148 - RNA, 19 nt, Homo sapiens
  misc_RNA (1)...(19): siRNA sense strand
ucagagacacacaauuaua

SEQ ID NO: 2168149 - RNA, 19 nt, Homo sapiens
  misc_RNA (1)...(19): siRNA sense strand
ucaagaacuuugugaauac

SEQ ID NO: 2168150 - RNA, 19 nt, Homo sapiens
  misc_RNA (1)...(19): siRNA sense strand
gaauacagaacaagacuca

SEQ ID NO: 2168151 - RNA, 19 nt, Homo sapiens
  misc_RNA (1)...(19): siRNA sense strand
ggugggcaaagaaauauua

SEQ ID NO: 2168152 - RNA, 19 nt, Homo sapiens
  misc_RNA (1)...(19): siRNA sense strand
gugaggcacuuaaggaaug

SEQ ID NO: 2168153 - RNA, 19 nt, Homo sapiens
  misc_RNA (1)...(19): siRNA sense strand
acagagacauuguagugaa

SEQ ID NO: 2168154 - RNA, 19 nt, Homo sapiens
  misc_RNA (1)...(19): siRNA sense strand
ucuaagaacucuccuaaaa

SEQ ID NO: 2168155 - RNA, 19 nt, Homo sapiens
  misc_RNA (1)...(19): siRNA sense strand
aaaggugggcaaagaaaua

SEQ ID NO: 2168156 - RNA, 19 nt, Homo sapiens
  misc_RNA (1)...(19): siRNA sense strand
caauuguacuggaagaaug

SEQ ID NO: 2168157 - RNA, 19 nt, Homo sapiens
  misc_RNA (1)...(19): siRNA sense strand
gacacacaauuauaagaga

SEQ ID NO: 2168158 - RNA, 19 nt, Homo sapiens
  misc_RNA (1)...(19): siRNA sense strand
gcacugaauacagaaguaa

SEQ ID NO: 2168159 - RNA, 19 nt, Homo sapiens
  misc_RNA (1)...(19): siRNA sense strand
cacaaacacuucagagaca

SEQ ID NO: 2168160 - RNA, 19 nt, Homo sapiens
  misc_RNA (1)...(19): siRNA sense strand
ggaacaggccaaugagaga

SEQ ID NO: 2168161 - RNA, 19 nt, Homo sapiens
  misc_RNA (1)...(19): siRNA sense strand
ccauaaggcuaacagaaag

SEQ ID NO: 2168162 - RNA, 19 nt, Homo sapiens
  misc_RNA (1)...(19): siRNA sense strand
gaaaggcagcuucaacucu

SEQ ID NO: 2168163 - RNA, 19 nt, Homo sapiens
  misc_RNA (1)...(19): siRNA sense strand
gauggugcccuugacuuua

SEQ ID NO: 2168164 - RNA, 19 nt, Homo sapiens
  misc_RNA (1)...(19): siRNA sense strand
gcacuuaaggaaugacaga

SEQ ID NO: 2168165 - RNA, 19 nt, Homo sapiens
  misc_RNA (1)...(19): siRNA sense strand
gaaaggugggcaaagaaau

SEQ ID NO: 2168166 - RNA, 19 nt, Homo sapiens
  misc_RNA (1)...(19): siRNA sense strand
gguaaagcaucugccaaug

SEQ ID NO: 2168167 - RNA, 19 nt, Homo sapiens
  misc_RNA (1)...(19): siRNA sense strand
cacaaagaauauggagaua

SEQ ID NO: 2168168 - RNA, 19 nt, Homo sapiens
  misc_RNA (1)...(19): siRNA sense strand
ggaaagguuaugacaaaca

SEQ ID NO: 2168169 - RNA, 19 nt, Homo sapiens
  misc_RNA (1)...(19): siRNA sense strand
ccaaugagagagaguguga

SEQ ID NO: 2168170 - RNA, 19 nt, Homo sapiens
  misc_RNA (1)...(19): siRNA sense strand
aaacaaugccagaagaaga

SEQ ID NO: 2168171 - RNA, 19 nt, Homo sapiens
  misc_RNA (1)...(19): siRNA sense strand
gcauccauccugccucuuu

SEQ ID NO: 2168172 - RNA, 19 nt, Homo sapiens
  misc_RNA (1)...(19): siRNA sense strand
gagaaacuggacccuauug

SEQ ID NO: 2168173 - RNA, 19 nt, Homo sapiens
  misc_RNA (1)...(19): siRNA sense strand
gaaacuggacccuauugca

SEQ ID NO: 2168174 - RNA, 19 nt, Homo sapiens
  misc_RNA (1)...(19): siRNA sense strand
agacaugcauaccucaguu

SEQ ID NO: 2168175 - RNA, 19 nt, Homo sapiens
  misc_RNA (1)...(19): siRNA sense strand
caagagguuaugauucaaa

SEQ ID NO: 2168176 - RNA, 19 nt, Homo sapiens
  misc_RNA (1)...(19): siRNA sense strand
gaucauucuccuaaacuga

SEQ ID NO: 2168177 - RNA, 19 nt, Homo sapiens
  misc_RNA (1)...(19): siRNA sense strand
ugacgaucauucuccuaaa

SEQ ID NO: 2168178 - RNA, 19 nt, Homo sapiens
  misc_RNA (1)...(19): siRNA sense strand
gagaaaggcagcuucaacu

SEQ ID NO: 2168179 - RNA, 19 nt, Homo sapiens
  misc_RNA (1)...(19): siRNA sense strand
acaaacaggaugacacuug

SEQ ID NO: 2168180 - RNA, 19 nt, Homo sapiens
  misc_RNA (1)...(19): siRNA sense strand
aaaaugcacugaauacaga

SEQ ID NO: 2168181 - RNA, 19 nt, Homo sapiens
  misc_RNA (1)...(19): siRNA sense strand
ggauggauucacccagaua

SEQ ID NO: 2168182 - RNA, 19 nt, Homo sapiens
  misc_RNA (1)...(19): siRNA sense strand
gagacauuguagugaagaa

SEQ ID NO: 2168183 - RNA, 19 nt, Homo sapiens
  misc_RNA (1)...(19): siRNA sense strand
ggagaaaggcagcuucaac

SEQ ID NO: 2168184 - RNA, 19 nt, Homo sapiens
  misc_RNA (1)...(19): siRNA sense strand
cuccuaaacugaacacaug

SEQ ID NO: 2168185 - RNA, 19 nt, Homo sapiens
  misc_RNA (1)...(19): siRNA sense strand
gggcaaagaaauauuacug

SEQ ID NO: 2168186 - RNA, 19 nt, Homo sapiens
  misc_RNA (1)...(19): siRNA sense strand
ggacaacagacaugcauac

SEQ ID NO: 2168187 - RNA, 19 nt, Homo sapiens
  misc_RNA (1)...(19): siRNA sense strand
cagaugcacccacuaaugu

SEQ ID NO: 2168188 - RNA, 19 nt, Homo sapiens
  misc_RNA (1)...(19): siRNA sense strand
uugagaaacuggacccuau

SEQ ID NO: 2168189 - RNA, 19 nt, Homo sapiens
  misc_RNA (1)...(19): siRNA sense strand
acacaaagaauauggagau

SEQ ID NO: 2168190 - RNA, 19 nt, Homo sapiens
  misc_RNA (1)...(19): siRNA sense strand
caaggugacagaagggaaa

SEQ ID NO: 2168191 - RNA, 19 nt, Homo sapiens
  misc_RNA (1)...(19): siRNA sense strand
gagacacacaauuauaaga

SEQ ID NO: 2168192 - RNA, 19 nt, Homo sapiens
  misc_RNA (1)...(19): siRNA sense strand
ccagaaagacacagaacga

SEQ ID NO: 2168193 - RNA, 19 nt, Homo sapiens
  misc_RNA (1)...(19): siRNA sense strand
gcaauuguacuggaagaau

SEQ ID NO: 2168194 - RNA, 19 nt, Homo sapiens
  misc_RNA (1)...(19): siRNA sense strand
uauacgaccuuuggacaga

SEQ ID NO: 2168195 - RNA, 19 nt, Homo sapiens
  misc_RNA (1)...(19): siRNA sense strand
gaucucgugugggcuaaug

SEQ ID NO: 2168196 - RNA, 19 nt, Homo sapiens
  misc_RNA (1)...(19): siRNA sense strand
caucaagaacuuugugaau

SEQ ID NO: 2168197 - RNA, 19 nt, Homo sapiens
  misc_RNA (1)...(19): siRNA sense strand
ggcaaagaaauauuacuga

SEQ ID NO: 2168198 - RNA, 19 nt, Homo sapiens
  misc_RNA (1)...(19): siRNA sense strand
ugaaaggugggcaaagaaa

SEQ ID NO: 2168199 - RNA, 19 nt, Homo sapiens
  misc_RNA (1)...(19): siRNA sense strand
agacuggaauacagaacaa

SEQ ID NO: 2168200 - RNA, 19 nt, Homo sapiens
  misc_RNA (1)...(19): siRNA sense strand
gagcagcaccucaugaacu

SEQ ID NO: 2168201 - RNA, 19 nt, Homo sapiens
  misc_RNA (1)...(19): siRNA sense strand
gguauagugguauuaauag

SEQ ID NO: 2168202 - RNA, 19 nt, Homo sapiens
  misc_RNA (1)...(19): siRNA sense strand
ggagcuugccucauacaau

SEQ ID NO: 2168203 - RNA, 19 nt, Homo sapiens
  misc_RNA (1)...(19): siRNA sense strand
agugaaaggugggcaaaga

SEQ ID NO: 2168204 - RNA, 19 nt, Homo sapiens
  misc_RNA (1)...(19): siRNA sense strand
uagcuucccucccagaaag

SEQ ID NO: 2168205 - RNA, 19 nt, Homo sapiens
  misc_RNA (1)...(19): siRNA sense strand
ugaagaaagaggauggauu

SEQ ID NO: 2168206 - RNA, 19 nt, Homo sapiens
  misc_RNA (1)...(19): siRNA sense strand
cccaggaguuugagguuga

SEQ ID NO: 2168207 - RNA, 19 nt, Homo sapiens
  misc_RNA (1)...(19): siRNA sense strand
ucagaugcacccacuaaug

SEQ ID NO: 2168208 - RNA, 19 nt, Homo sapiens
  misc_RNA (1)...(19): siRNA sense strand
gagguugaagcuauuguug

SEQ ID NO: 2168209 - RNA, 19 nt, Homo sapiens
  misc_RNA (1)...(19): siRNA sense strand
ucagaaacuugagaaacug

SEQ ID NO: 2168210 - RNA, 19 nt, Homo sapiens
  misc_RNA (1)...(19): siRNA sense strand
ggguaaagcaucugccaau

SEQ ID NO: 2168211 - RNA, 19 nt, Homo sapiens
  misc_RNA (1)...(19): siRNA sense strand
gcauaccucaguuccaaga

SEQ ID NO: 2168212 - RNA, 19 nt, Homo sapiens
  misc_RNA (1)...(19): siRNA sense strand
cagagcagcaccucaugaa

SEQ ID NO: 2168213 - RNA, 19 nt, Homo sapiens
  misc_RNA (1)...(19): siRNA sense strand
gguugaagcuauuguugac

SEQ ID NO: 2168214 - RNA, 19 nt, Homo sapiens
  misc_RNA (1)...(19): siRNA sense strand
gacgaucauucuccuaaac

SEQ ID NO: 2168215 - RNA, 19 nt, Homo sapiens
  misc_RNA (1)...(19): siRNA sense strand
gggauauaaagcagccuua

SEQ ID NO: 2168216 - RNA, 19 nt, Homo sapiens
  misc_RNA (1)...(19): siRNA sense strand
agugugaggugcugaggaa

SEQ ID NO: 2168217 - RNA, 19 nt, Homo sapiens
  misc_RNA (1)...(19): siRNA sense strand
guuaauugcugggcgaaag

SEQ ID NO: 2168218 - RNA, 19 nt, Homo sapiens
  misc_RNA (1)...(19): siRNA sense strand
uaagaacucuccuaaaacu

SEQ ID NO: 2168219 - RNA, 19 nt, Homo sapiens
  misc_RNA (1)...(19): siRNA sense strand
ucaaacaaugccagaagaa

SEQ ID NO: 2168220 - RNA, 19 nt, Homo sapiens
  misc_RNA (1)...(19): siRNA sense strand
auaccucuauugggauaua

SEQ ID NO: 2168221 - RNA, 19 nt, Homo sapiens
  misc_RNA (1)...(19): siRNA sense strand
ggaagaagcuggacuuugu

SEQ ID NO: 2168222 - RNA, 19 nt, Homo sapiens
  misc_RNA (1)...(19): siRNA sense strand
gaaauucaccucuucuaua

SEQ ID NO: 2168223 - RNA, 19 nt, Homo sapiens
  misc_RNA (1)...(19): siRNA sense strand
gaaauaugcugaucuugga

SEQ ID NO: 2168224 - RNA, 19 nt, Homo sapiens
  misc_RNA (1)...(19): siRNA sense strand
gaagaaggccgugacuuua

SEQ ID NO: 2168225 - RNA, 19 nt, Homo sapiens
  misc_RNA (1)...(19): siRNA sense strand
aagcagauauguuguguaa

SEQ ID NO: 2168226 - RNA, 19 nt, Homo sapiens
  misc_RNA (1)...(19): siRNA sense strand
gcagauauguuguguaacu

SEQ ID NO: 2168227 - RNA, 19 nt, Homo sapiens
  misc_RNA (1)...(19): siRNA sense strand
gaaagcagauauguugugu

SEQ ID NO: 2168228 - RNA, 19 nt, Homo sapiens
  misc_RNA (1)...(19): siRNA sense strand
gcagcucucuguaagaaau

SEQ ID NO: 2168229 - RNA, 19 nt, Homo sapiens
  misc_RNA (1)...(19): siRNA sense strand
ugaagaaggccgugacuuu

SEQ ID NO: 2168230 - RNA, 19 nt, Homo sapiens
  misc_RNA (1)...(19): siRNA sense strand
agaaggccgugacuuuaua

SEQ ID NO: 2168231 - RNA, 19 nt, Homo sapiens
  misc_RNA (1)...(19): siRNA sense strand
agagaaagcagauauguug

SEQ ID NO: 2168232 - RNA, 19 nt, Homo sapiens
  misc_RNA (1)...(19): siRNA sense strand
ggccgugacuuuauaacaa

SEQ ID NO: 2168233 - RNA, 19 nt, Homo sapiens
  misc_RNA (1)...(19): siRNA sense strand
ggaaauucaccucuucuau

SEQ ID NO: 2168234 - RNA, 19 nt, Homo sapiens
  misc_RNA (1)...(19): siRNA sense strand
caacaucaagacucaaauu

SEQ ID NO: 2168235 - RNA, 19 nt, Homo sapiens
  misc_RNA (1)...(19): siRNA sense strand
aaauucaccucuucuauag

SEQ ID NO: 2168236 - RNA, 19 nt, Homo sapiens
  misc_RNA (1)...(19): siRNA sense strand
caucaagacucaaauugca

SEQ ID NO: 2168237 - RNA, 19 nt, Homo sapiens
  misc_RNA (1)...(19): siRNA sense strand
uaacaaagaacaggaguug

SEQ ID NO: 2168238 - RNA, 19 nt, Homo sapiens
  misc_RNA (1)...(19): siRNA sense strand
ucagcaagcuuuacaaugc

SEQ ID NO: 2168239 - RNA, 19 nt, Homo sapiens
  misc_RNA (1)...(19): siRNA sense strand
uaagagagaaagcagauau

SEQ ID NO: 2168240 - RNA, 19 nt, Homo sapiens
  misc_RNA (1)...(19): siRNA sense strand
gcacugcacacaagaguca

SEQ ID NO: 2168241 - RNA, 19 nt, Homo sapiens
  misc_RNA (1)...(19): siRNA sense strand
gccgugacuuuauaacaaa

SEQ ID NO: 2168242 - RNA, 19 nt, Homo sapiens
  misc_RNA (1)...(19): siRNA sense strand
cacaugauauucuucaaca

SEQ ID NO: 2168243 - RNA, 19 nt, Homo sapiens
  misc_RNA (1)...(19): siRNA sense strand
gagagaaagcagauauguu

SEQ ID NO: 2168244 - RNA, 19 nt, Homo sapiens
  misc_RNA (1)...(19): siRNA sense strand
gaaggccgugacuuuauaa

SEQ ID NO: 2168245 - RNA, 19 nt, Homo sapiens
  misc_RNA (1)...(19): siRNA sense strand
gcagugccacaaguaauaa

SEQ ID NO: 2168246 - RNA, 19 nt, Homo sapiens
  misc_RNA (1)...(19): siRNA sense strand
uggcagcucucuguaagaa

SEQ ID NO: 2168247 - RNA, 19 nt, Homo sapiens
  misc_RNA (1)...(19): siRNA sense strand
ggagcuuccugagcaagaa

SEQ ID NO: 2168248 - RNA, 19 nt, Homo sapiens
  misc_RNA (1)...(19): siRNA sense strand
gcacacaagagucaagaag

SEQ ID NO: 2168249 - RNA, 19 nt, Homo sapiens
  misc_RNA (1)...(19): siRNA sense strand
gaagaagcuggacuuugug

SEQ ID NO: 2168250 - RNA, 19 nt, Homo sapiens
  misc_RNA (1)...(19): siRNA sense strand
gaugcaagcccuaaacacu

SEQ ID NO: 2168251 - RNA, 19 nt, Homo sapiens
  misc_RNA (1)...(19): siRNA sense strand
ggucagcaagcuuuacaau

SEQ ID NO: 2168252 - RNA, 19 nt, Homo sapiens
  misc_RNA (1)...(19): siRNA sense strand
augcugaucuuggaaauuc

SEQ ID NO: 2168253 - RNA, 19 nt, Homo sapiens
  misc_RNA (1)...(19): siRNA sense strand
cagcaagcuuuacaaugca

SEQ ID NO: 2168254 - RNA, 19 nt, Homo sapiens
  misc_RNA (1)...(19): siRNA sense strand
guguaacucugaaucacau

SEQ ID NO: 2168255 - RNA, 19 nt, Homo sapiens
  misc_RNA (1)...(19): siRNA sense strand
caugauauucuucaacauc

SEQ ID NO: 2168256 - RNA, 19 nt, Homo sapiens
  misc_RNA (1)...(19): siRNA sense strand
guaagaaauaugcugaucu

SEQ ID NO: 2168257 - RNA, 19 nt, Homo sapiens
  misc_RNA (1)...(19): siRNA sense strand
aagaaggccgugacuuuau

SEQ ID NO: 2168258 - RNA, 19 nt, Homo sapiens
  misc_RNA (1)...(19): siRNA sense strand
ugcagugccacaaguaaua

SEQ ID NO: 2168259 - RNA, 19 nt, Homo sapiens
  misc_RNA (1)...(19): siRNA sense strand
gcuggacuuuguggguuaa

SEQ ID NO: 2168260 - RNA, 19 nt, Homo sapiens
  misc_RNA (1)...(19): siRNA sense strand
guuaagagagaaagcagau

SEQ ID NO: 2168261 - RNA, 19 nt, Homo sapiens
  misc_RNA (1)...(19): siRNA sense strand
gagaaagcagauauguugu

SEQ ID NO: 2168262 - RNA, 19 nt, Homo sapiens
  misc_RNA (1)...(19): siRNA sense strand
caaauugcagugccacaag

SEQ ID NO: 2168263 - RNA, 19 nt, Homo sapiens
  misc_RNA (1)...(19): siRNA sense strand
uguaagaaauaugcugauc

SEQ ID NO: 2168264 - RNA, 19 nt, Homo sapiens
  misc_RNA (1)...(19): siRNA sense strand
aaauugcagugccacaagu

SEQ ID NO: 2168265 - RNA, 19 nt, Homo sapiens
  misc_RNA (1)...(19): siRNA sense strand
guaacucugaaucacauga

SEQ ID NO: 2168266 - RNA, 19 nt, Homo sapiens
  misc_RNA (1)...(19): siRNA sense strand
cgucuggucagcaagcuuu

SEQ ID NO: 2168267 - RNA, 19 nt, Homo sapiens
  misc_RNA (1)...(19): siRNA sense strand
gcaacaggaacaaagaaaa

SEQ ID NO: 2168268 - RNA, 19 nt, Homo sapiens
  misc_RNA (1)...(19): siRNA sense strand
uauguuguguaacucugaa

SEQ ID NO: 2168269 - RNA, 19 nt, Homo sapiens
  misc_RNA (1)...(19): siRNA sense strand
gcccuaaacacucuuucga

SEQ ID NO: 2168270 - RNA, 19 nt, Homo sapiens
  misc_RNA (1)...(19): siRNA sense strand
cuuggaaauucaccucuuc

SEQ ID NO: 2168271 - RNA, 19 nt, Homo sapiens
  misc_RNA (1)...(19): siRNA sense strand
cuuuguggguuaagagaga

SEQ ID NO: 2168272 - RNA, 19 nt, Homo sapiens
  misc_RNA (1)...(19): siRNA sense strand
ggacuuuguggguuaagag

SEQ ID NO: 2168273 - RNA, 19 nt, Homo sapiens
  misc_RNA (1)...(19): siRNA sense strand
caaugcaacaggaacaaag

SEQ ID NO: 2168274 - RNA, 19 nt, Homo sapiens
  misc_RNA (1)...(19): siRNA sense strand
gauauucuucaacaucaag

SEQ ID NO: 2168275 - RNA, 19 nt, Homo sapiens
  misc_RNA (1)...(19): siRNA sense strand
agaaagcagauauguugug

SEQ ID NO: 2168276 - RNA, 19 nt, Homo sapiens
  misc_RNA (1)...(19): siRNA sense strand
agagagaaagcagauaugu

SEQ ID NO: 2168277 - RNA, 19 nt, Homo sapiens
  misc_RNA (1)...(19): siRNA sense strand
gccacaaguaauaaacauu

SEQ ID NO: 2168278 - RNA, 19 nt, Homo sapiens
  misc_RNA (1)...(19): siRNA sense strand
ucaaauugcagugccacaa

SEQ ID NO: 2168279 - RNA, 19 nt, Homo sapiens
  misc_RNA (1)...(19): siRNA sense strand
ggacuuaaagggucaguua

SEQ ID NO: 2168280 - RNA, 19 nt, Homo sapiens
  misc_RNA (1)...(19): siRNA sense strand
gaacauagaacugaagaga

SEQ ID NO: 2168281 - RNA, 19 nt, Homo sapiens
  misc_RNA (1)...(19): siRNA sense strand
ggcaagaccuucacaaugg

SEQ ID NO: 2168282 - RNA, 19 nt, Homo sapiens
  misc_RNA (1)...(19): siRNA sense strand
ugaccuaaaugcagaacua

SEQ ID NO: 2168283 - RNA, 19 nt, Homo sapiens
  misc_RNA (1)...(19): siRNA sense strand
ccucaacucucuacgcuuu

SEQ ID NO: 2168284 - RNA, 19 nt, Homo sapiens
  misc_RNA (1)...(19): siRNA sense strand
gaggaggccugaccagaug

SEQ ID NO: 2168285 - RNA, 19 nt, Homo sapiens
  misc_RNA (1)...(19): siRNA sense strand
gugcuaagaugcucauguu

SEQ ID NO: 2168286 - RNA, 19 nt, Homo sapiens
  misc_RNA (1)...(19): siRNA sense strand
ucaguuaugugaccuaaau

SEQ ID NO: 2168287 - RNA, 19 nt, Homo sapiens
  misc_RNA (1)...(19): siRNA sense strand
ggacagagcgcacaacacu

SEQ ID NO: 2168288 - RNA, 19 nt, Homo sapiens
  misc_RNA (1)...(19): siRNA sense strand
gggaaacacaggccauuaa

SEQ ID NO: 2168289 - RNA, 19 nt, Homo sapiens
  misc_RNA (1)...(19): siRNA sense strand
gcaagaccuucacaaugga

SEQ ID NO: 2168290 - RNA, 19 nt, Homo sapiens
  misc_RNA (1)...(19): siRNA sense strand
aacaggagcugaagaacuu

SEQ ID NO: 2168291 - RNA, 19 nt, Homo sapiens
  misc_RNA (1)...(19): siRNA sense strand
cuaagaugcucauguuugu

SEQ ID NO: 2168292 - RNA, 19 nt, Homo sapiens
  misc_RNA (1)...(19): siRNA sense strand
gcuaagaugcucauguuug

SEQ ID NO: 2168293 - RNA, 19 nt, Homo sapiens
  misc_RNA (1)...(19): siRNA sense strand
ugaaguguuugaagagauu

SEQ ID NO: 2168294 - RNA, 19 nt, Homo sapiens
  misc_RNA (1)...(19): siRNA sense strand
gaagaaacccagcaaacgu

SEQ ID NO: 2168295 - RNA, 19 nt, Homo sapiens
  misc_RNA (1)...(19): siRNA sense strand
gaugaaguguuugaagaga

SEQ ID NO: 2168296 - RNA, 19 nt, Homo sapiens
  misc_RNA (1)...(19): siRNA sense strand
uaaagggucaguuauguga

SEQ ID NO: 2168297 - RNA, 19 nt, Homo sapiens
  misc_RNA (1)...(19): siRNA sense strand
gaagccaguuccugcuguu

SEQ ID NO: 2168298 - RNA, 19 nt, Homo sapiens
  misc_RNA (1)...(19): siRNA sense strand
ggagcucacugucaccaau

SEQ ID NO: 2168299 - RNA, 19 nt, Homo sapiens
  misc_RNA (1)...(19): siRNA sense strand
gagaagaaacggacaagag

SEQ ID NO: 2168300 - RNA, 19 nt, Homo sapiens
  misc_RNA (1)...(19): siRNA sense strand
cugaagaacuugcgugcuu

SEQ ID NO: 2168301 - RNA, 19 nt, Homo sapiens
  misc_RNA (1)...(19): siRNA sense strand
uggacaggaugaaguguuu

SEQ ID NO: 2168302 - RNA, 19 nt, Homo sapiens
  misc_RNA (1)...(19): siRNA sense strand
ucaggaagcagacucaaga

SEQ ID NO: 2168303 - RNA, 19 nt, Homo sapiens
  misc_RNA (1)...(19): siRNA sense strand
aaggugaaccaguguguua

SEQ ID NO: 2168304 - RNA, 19 nt, Homo sapiens
  misc_RNA (1)...(19): siRNA sense strand
gaaguggacaggaugaagu

SEQ ID NO: 2168305 - RNA, 19 nt, Homo sapiens
  misc_RNA (1)...(19): siRNA sense strand
gaaacacaggccauuaaca

SEQ ID NO: 2168306 - RNA, 19 nt, Homo sapiens
  misc_RNA (1)...(19): siRNA sense strand
agaggaggcugcagacauc

SEQ ID NO: 2168307 - RNA, 19 nt, Homo sapiens
  misc_RNA (1)...(19): siRNA sense strand
gugaaccaguguguuauug

SEQ ID NO: 2168308 - RNA, 19 nt, Homo sapiens
  misc_RNA (1)...(19): siRNA sense strand
aggaugaaguguuugaaga

SEQ ID NO: 2168309 - RNA, 19 nt, Homo sapiens
  misc_RNA (1)...(19): siRNA sense strand
ucacgcagccacaguguau

SEQ ID NO: 2168310 - RNA, 19 nt, Homo sapiens
  misc_RNA (1)...(19): siRNA sense strand
agaguuccaucccucacua

SEQ ID NO: 2168311 - RNA, 19 nt, Homo sapiens
  misc_RNA (1)...(19): siRNA sense strand
gaagcagcccugucaagca

SEQ ID NO: 2168312 - RNA, 19 nt, Homo sapiens
  misc_RNA (1)...(19): siRNA sense strand
cuuaaagggucaguuaugu

SEQ ID NO: 2168313 - RNA, 19 nt, Homo sapiens
  misc_RNA (1)...(19): siRNA sense strand
gagaggaggcugcagacau

SEQ ID NO: 2168314 - RNA, 19 nt, Homo sapiens
  misc_RNA (1)...(19): siRNA sense strand
caccaaugcucgauauguc

SEQ ID NO: 2168315 - RNA, 19 nt, Homo sapiens
  misc_RNA (1)...(19): siRNA sense strand
gccuggagccugagaagaa

SEQ ID NO: 2168316 - RNA, 19 nt, Homo sapiens
  misc_RNA (1)...(19): siRNA sense strand
ggaagaaacccagcaaacg

SEQ ID NO: 2168317 - RNA, 19 nt, Homo sapiens
  misc_RNA (1)...(19): siRNA sense strand
gccaacaggagcugaagaa

SEQ ID NO: 2168318 - RNA, 19 nt, Homo sapiens
  misc_RNA (1)...(19): siRNA sense strand
ugaagagauugccaugcuu

SEQ ID NO: 2168319 - RNA, 19 nt, Homo sapiens
  misc_RNA (1)...(19): siRNA sense strand
gggcaacauccguguauuc

SEQ ID NO: 2168320 - RNA, 19 nt, Homo sapiens
  misc_RNA (1)...(19): siRNA sense strand
gauccuccaacccgccuua

SEQ ID NO: 2168321 - RNA, 19 nt, Homo sapiens
  misc_RNA (1)...(19): siRNA sense strand
aaacacaggccauuaacag

SEQ ID NO: 2168322 - RNA, 19 nt, Homo sapiens
  misc_RNA (1)...(19): siRNA sense strand
ugucaccaaugcucgauau

SEQ ID NO: 2168323 - RNA, 19 nt, Homo sapiens
  misc_RNA (1)...(19): siRNA sense strand
guaugcaucuuugccuaug

SEQ ID NO: 2168324 - RNA, 19 nt, Homo sapiens
  misc_RNA (1)...(19): siRNA sense strand
uauccaguaugcaucuuug

SEQ ID NO: 2168325 - RNA, 19 nt, Homo sapiens
  misc_RNA (1)...(19): siRNA sense strand
caacaggagcugaagaacu

SEQ ID NO: 2168326 - RNA, 19 nt, Homo sapiens
  misc_RNA (1)...(19): siRNA sense strand
ggugaaccaguguguuauu

SEQ ID NO: 2168327 - RNA, 19 nt, Homo sapiens
  misc_RNA (1)...(19): siRNA sense strand
ggaaacacaggccauuaac

SEQ ID NO: 2168328 - RNA, 19 nt, Homo sapiens
  misc_RNA (1)...(19): siRNA sense strand
ggugcaagagcuucagaaa

SEQ ID NO: 2168329 - RNA, 19 nt, Homo sapiens
  misc_RNA (1)...(19): siRNA sense strand
gaagaacuugcgugcuugu

SEQ ID NO: 2168330 - RNA, 19 nt, Homo sapiens
  misc_RNA (1)...(19): siRNA sense strand
gacaggaugaaguguuuga

SEQ ID NO: 2168331 - RNA, 19 nt, Homo sapiens
  misc_RNA (1)...(19): siRNA sense strand
gcacaaccagcugcaggaa

SEQ ID NO: 2168332 - RNA, 19 nt, Homo sapiens
  misc_RNA (1)...(19): siRNA sense strand
gggaagaaacccagcaaac

SEQ ID NO: 2168333 - RNA, 19 nt, Homo sapiens
  misc_RNA (1)...(19): siRNA sense strand
guauuccagcuacagauuu

SEQ ID NO: 2168334 - RNA, 19 nt, Homo sapiens
  misc_RNA (1)...(19): siRNA sense strand
gaacggaggggacugaugu

SEQ ID NO: 2168335 - RNA, 19 nt, Homo sapiens
  misc_RNA (1)...(19): siRNA sense strand
ggccagaccacagcucaaa

SEQ ID NO: 2168336 - RNA, 19 nt, Homo sapiens
  misc_RNA (1)...(19): siRNA sense strand
cgggaacgccuucgggaaa

SEQ ID NO: 2168337 - RNA, 19 nt, Homo sapiens
  misc_RNA (1)...(19): siRNA sense strand
ggccugaccagauggaaga

SEQ ID NO: 2168338 - RNA, 19 nt, Homo sapiens
  misc_RNA (1)...(19): siRNA sense strand
uggcaagaccuucacaaug

SEQ ID NO: 2168339 - RNA, 19 nt, Homo sapiens
  misc_RNA (1)...(19): siRNA sense strand
ccuggagccugagaagaaa

SEQ ID NO: 2168340 - RNA, 19 nt, Homo sapiens
  misc_RNA (1)...(19): siRNA sense strand
acaaccagcugcaggaacu

SEQ ID NO: 2168341 - RNA, 19 nt, Homo sapiens
  misc_RNA (1)...(19): siRNA sense strand
ccacaucccacccaagagu

SEQ ID NO: 2168342 - RNA, 19 nt, Homo sapiens
  misc_RNA (1)...(19): siRNA sense strand
gaccuaaaugcagaacuaa

SEQ ID NO: 2168343 - RNA, 19 nt, Homo sapiens
  misc_RNA (1)...(19): siRNA sense strand
ggaaguaaaggggaacaua

SEQ ID NO: 2168344 - RNA, 19 nt, Homo sapiens
  misc_RNA (1)...(19): siRNA sense strand
aagaugcucauguuuguga

SEQ ID NO: 2168345 - RNA, 19 nt, Homo sapiens
  misc_RNA (1)...(19): siRNA sense strand
uaccggaacagcaaacuga

SEQ ID NO: 2168346 - RNA, 19 nt, Homo sapiens
  misc_RNA (1)...(19): siRNA sense strand
ggaacgccuucgggaaaca

SEQ ID NO: 2168347 - RNA, 19 nt, Homo sapiens
  misc_RNA (1)...(19): siRNA sense strand
ggaugaaguguuugaagag

SEQ ID NO: 2168348 - RNA, 19 nt, Homo sapiens
  misc_RNA (1)...(19): siRNA sense strand
gaagaaccagaagccaguu

SEQ ID NO: 2168349 - RNA, 19 nt, Homo sapiens
  misc_RNA (1)...(19): siRNA sense strand
ccacaguguauuccagcua

SEQ ID NO: 2168350 - RNA, 19 nt, Homo sapiens
  misc_RNA (1)...(19): siRNA sense strand
gggaacauagaacugaaga

SEQ ID NO: 2168351 - RNA, 19 nt, Homo sapiens
  misc_RNA (1)...(19): siRNA sense strand
caagggcaacauccgugua

SEQ ID NO: 2168352 - RNA, 19 nt, Homo sapiens
  misc_RNA (1)...(19): siRNA sense strand
ggaggcugcagacaucaga

SEQ ID NO: 2168353 - RNA, 19 nt, Homo sapiens
  misc_RNA (1)...(19): siRNA sense strand
uaccacaucccacccaaga

SEQ ID NO: 2168354 - RNA, 19 nt, Homo sapiens
  misc_RNA (1)...(19): siRNA sense strand
ggaacagcaaacugaccua

SEQ ID NO: 2168355 - RNA, 19 nt, Homo sapiens
  misc_RNA (1)...(19): siRNA sense strand
ccgcacagcccagaaugaa

SEQ ID NO: 2168356 - RNA, 19 nt, Homo sapiens
  misc_RNA (1)...(19): siRNA sense strand
uauuccagcuacagauuuc

SEQ ID NO: 2168357 - RNA, 19 nt, Homo sapiens
  misc_RNA (1)...(19): siRNA sense strand
cgggaaacacaggccauua

SEQ ID NO: 2168358 - RNA, 19 nt, Homo sapiens
  misc_RNA (1)...(19): siRNA sense strand
gagggaagaaacccagcaa

SEQ ID NO: 2168359 - RNA, 19 nt, Homo sapiens
  misc_RNA (1)...(19): siRNA sense strand
ucauggcccugagcaacaa

SEQ ID NO: 2168360 - RNA, 19 nt, Homo sapiens
  misc_RNA (1)...(19): siRNA sense strand
gcaggagggcuuggugcaa

SEQ ID NO: 2168361 - RNA, 19 nt, Homo sapiens
  misc_RNA (1)...(19): siRNA sense strand
gaaguaaaggggaacauag

SEQ ID NO: 2168362 - RNA, 19 nt, Homo sapiens
  misc_RNA (1)...(19): siRNA sense strand
uugaagagauugccaugcu

SEQ ID NO: 2168363 - RNA, 19 nt, Homo sapiens
  misc_RNA (1)...(19): siRNA sense strand
ggaaguggacaggaugaag

SEQ ID NO: 2168364 - RNA, 19 nt, Homo sapiens
  misc_RNA (1)...(19): siRNA sense strand
ggaacucaagggcaacauc

SEQ ID NO: 2168365 - RNA, 19 nt, Homo sapiens
  misc_RNA (1)...(19): siRNA sense strand
gcauuuagccaagguacag

SEQ ID NO: 2168366 - RNA, 19 nt, Homo sapiens
  misc_RNA (1)...(19): siRNA sense strand
ugucccaacuagaggagaa

SEQ ID NO: 2168367 - RNA, 19 nt, Homo sapiens
  misc_RNA (1)...(19): siRNA sense strand
gagcucacugucaccaaug

SEQ ID NO: 2168368 - RNA, 19 nt, Homo sapiens
  misc_RNA (1)...(19): siRNA sense strand
gggaacgccuucgggaaac

SEQ ID NO: 2168369 - RNA, 19 nt, Homo sapiens
  misc_RNA (1)...(19): siRNA sense strand
cgaccaaaauuaccacauc

SEQ ID NO: 2168370 - RNA, 19 nt, Homo sapiens
  misc_RNA (1)...(19): siRNA sense strand
ucaccaaugcucgauaugu

SEQ ID NO: 2168371 - RNA, 19 nt, Homo sapiens
  misc_RNA (1)...(19): siRNA sense strand
cuacagugccacagacaca

SEQ ID NO: 2168372 - RNA, 19 nt, Homo sapiens
  misc_RNA (1)...(19): siRNA sense strand
guggcaagaccuucacaau

SEQ ID NO: 2168373 - RNA, 19 nt, Homo sapiens
  misc_RNA (1)...(19): siRNA sense strand
guacugcucaggccaacag

SEQ ID NO: 2168374 - RNA, 19 nt, Homo sapiens
  misc_RNA (1)...(19): siRNA sense strand
gggugguagugcuaagaug

SEQ ID NO: 2168375 - RNA, 19 nt, Homo sapiens
  misc_RNA (1)...(19): siRNA sense strand
acagcaaacugaccuaccu

SEQ ID NO: 2168376 - RNA, 19 nt, Homo sapiens
  misc_RNA (1)...(19): siRNA sense strand
aggagucccacgugccuua

SEQ ID NO: 2168377 - RNA, 19 nt, Homo sapiens
  misc_RNA (1)...(19): siRNA sense strand
agaggaggccugaccagau

SEQ ID NO: 2168378 - RNA, 19 nt, Homo sapiens
  misc_RNA (1)...(19): siRNA sense strand
agaaguggacgcccugcuu

SEQ ID NO: 2168379 - RNA, 19 nt, Homo sapiens
  misc_RNA (1)...(19): siRNA sense strand
gguuuccucuucucuauua

SEQ ID NO: 2168380 - RNA, 19 nt, Homo sapiens
  misc_RNA (1)...(19): siRNA sense strand
uccaucuucuuccauauua

SEQ ID NO: 2168381 - RNA, 19 nt, Homo sapiens
  misc_RNA (1)...(19): siRNA sense strand
uagguuuccucuucucuau

SEQ ID NO: 2168382 - RNA, 19 nt, Homo sapiens
  misc_RNA (1)...(19): siRNA sense strand
uugguuagguuuccucuuc

SEQ ID NO: 2168383 - RNA, 19 nt, Homo sapiens
  misc_RNA (1)...(19): siRNA sense strand
ccauauuauuccacaguca

SEQ ID NO: 2168384 - RNA, 19 nt, Homo sapiens
  misc_RNA (1)...(19): siRNA sense strand
cacagucauugguuagguu

SEQ ID NO: 2168385 - RNA, 19 nt, Homo sapiens
  misc_RNA (1)...(19): siRNA sense strand
auuccacagucauugguua

SEQ ID NO: 2168386 - RNA, 19 nt, Homo sapiens
  misc_RNA (1)...(19): siRNA sense strand
ccacagucauugguuaggu

SEQ ID NO: 2168387 - RNA, 19 nt, Homo sapiens
  misc_RNA (1)...(19): siRNA sense strand
caagugggaaacaaucugu

SEQ ID NO: 2168388 - RNA, 19 nt, Homo sapiens
  misc_RNA (1)...(19): siRNA sense strand
cuacaagugggaaacaauc

SEQ ID NO: 2168389 - RNA, 19 nt, Homo sapiens
  misc_RNA (1)...(19): siRNA sense strand
gggaugaacuuguccauaa

SEQ ID NO: 2168390 - RNA, 19 nt, Homo sapiens
  misc_RNA (1)...(19): siRNA sense strand
gaagcgcuguguagacuga

SEQ ID NO: 2168391 - RNA, 19 nt, Homo sapiens
  misc_RNA (1)...(19): siRNA sense strand
ggaugaacuuguccauaaa

SEQ ID NO: 2168392 - RNA, 19 nt, Homo sapiens
  misc_RNA (1)...(19): siRNA sense strand
gcagguugcuauuucugaa

SEQ ID NO: 2168393 - RNA, 19 nt, Homo sapiens
  misc_RNA (1)...(19): siRNA sense strand
gaaauuaaggaucgagaau

SEQ ID NO: 2168394 - RNA, 19 nt, Homo sapiens
  misc_RNA (1)...(19): siRNA sense strand
uguguagacugacgauuaa

SEQ ID NO: 2168395 - RNA, 19 nt, Homo sapiens
  misc_RNA (1)...(19): siRNA sense strand
cauaaaugguuugaugaug

SEQ ID NO: 2168396 - RNA, 19 nt, Homo sapiens
  misc_RNA (1)...(19): siRNA sense strand
ucaaucaccuaaacaacag

SEQ ID NO: 2168397 - RNA, 19 nt, Homo sapiens
  misc_RNA (1)...(19): siRNA sense strand
uuaaggaucgagaauuuga

SEQ ID NO: 2168398 - RNA, 19 nt, Homo sapiens
  misc_RNA (1)...(19): siRNA sense strand
agucauugcugaagcuuuc

SEQ ID NO: 2168399 - RNA, 19 nt, Homo sapiens
  misc_RNA (1)...(19): siRNA sense strand
caaagaaauuaaggaucga

SEQ ID NO: 2168400 - RNA, 19 nt, Homo sapiens
  misc_RNA (1)...(19): siRNA sense strand
cuguguagacugacgauua

SEQ ID NO: 2168401 - RNA, 19 nt, Homo sapiens
  misc_RNA (1)...(19): siRNA sense strand
gaugaacuuguccauaaau

SEQ ID NO: 2168402 - RNA, 19 nt, Homo sapiens
  misc_RNA (1)...(19): siRNA sense strand
caccuaaacaacagacuug

SEQ ID NO: 2168403 - RNA, 19 nt, Homo sapiens
  misc_RNA (1)...(19): siRNA sense strand
ugaagucauugcugaagcu

SEQ ID NO: 2168404 - RNA, 19 nt, Homo sapiens
  misc_RNA (1)...(19): siRNA sense strand
gacaguagacguuuucuca

SEQ ID NO: 2168405 - RNA, 19 nt, Homo sapiens
  misc_RNA (1)...(19): siRNA sense strand
agaaauuaaggaucgagaa

SEQ ID NO: 2168406 - RNA, 19 nt, Homo sapiens
  misc_RNA (1)...(19): siRNA sense strand
guagacguuuucucaauca

SEQ ID NO: 2168407 - RNA, 19 nt, Homo sapiens
  misc_RNA (1)...(19): siRNA sense strand
ccuaauaacucuccacuua

SEQ ID NO: 2168408 - RNA, 19 nt, Homo sapiens
  misc_RNA (1)...(19): siRNA sense strand
gggaugaacuuguccauaa

SEQ ID NO: 2168409 - RNA, 19 nt, Homo sapiens
  misc_RNA (1)...(19): siRNA sense strand
gaugaccgcugccuaauaa

SEQ ID NO: 2168410 - RNA, 19 nt, Homo sapiens
  misc_RNA (1)...(19): siRNA sense strand
gaaaacaucucuucucuga

SEQ ID NO: 2168411 - RNA, 19 nt, Homo sapiens
  misc_RNA (1)...(19): siRNA sense strand
gaagaugaccgcugccuaa

SEQ ID NO: 2168412 - RNA, 19 nt, Homo sapiens
  misc_RNA (1)...(19): siRNA sense strand
gaagaagccucguuaugca

SEQ ID NO: 2168413 - RNA, 19 nt, Homo sapiens
  misc_RNA (1)...(19): siRNA sense strand
guacuagcuugaaacauaa

SEQ ID NO: 2168414 - RNA, 19 nt, Homo sapiens
  misc_RNA (1)...(19): siRNA sense strand
gcagaagaauccacuaaca

SEQ ID NO: 2168415 - RNA, 19 nt, Homo sapiens
  misc_RNA (1)...(19): siRNA sense strand
gcaccggauugccuaauaa

SEQ ID NO: 2168416 - RNA, 19 nt, Homo sapiens
  misc_RNA (1)...(19): siRNA sense strand
gaacuaucuuggaccagua

SEQ ID NO: 2168417 - RNA, 19 nt, Homo sapiens
  misc_RNA (1)...(19): siRNA sense strand
aguacuagcuugaaacaua

SEQ ID NO: 2168418 - RNA, 19 nt, Homo sapiens
  misc_RNA (1)...(19): siRNA sense strand
gaaagcguccguuuaauuc

SEQ ID NO: 2168419 - RNA, 19 nt, Homo sapiens
  misc_RNA (1)...(19): siRNA sense strand
gaaagagaguugccagaag

SEQ ID NO: 2168420 - RNA, 19 nt, Homo sapiens
  misc_RNA (1)...(19): siRNA sense strand
ugaagaagcccaugauuau

SEQ ID NO: 2168421 - RNA, 19 nt, Homo sapiens
  misc_RNA (1)...(19): siRNA sense strand
gaagcgcuguguagacuga

SEQ ID NO: 2168422 - RNA, 19 nt, Homo sapiens
  misc_RNA (1)...(19): siRNA sense strand
gaaacagucugcugaucug

SEQ ID NO: 2168423 - RNA, 19 nt, Homo sapiens
  misc_RNA (1)...(19): siRNA sense strand
ccacuuaaaugaccaaucu

SEQ ID NO: 2168424 - RNA, 19 nt, Homo sapiens
  misc_RNA (1)...(19): siRNA sense strand
ggaugaacuuguccauaaa

SEQ ID NO: 2168425 - RNA, 19 nt, Homo sapiens
  misc_RNA (1)...(19): siRNA sense strand
aggaagcggugaugaauuu

SEQ ID NO: 2168426 - RNA, 19 nt, Homo sapiens
  misc_RNA (1)...(19): siRNA sense strand
cugcugaucugcaaucuuu

SEQ ID NO: 2168427 - RNA, 19 nt, Homo sapiens
  misc_RNA (1)...(19): siRNA sense strand
gaaccaagaaucacuaaca

SEQ ID NO: 2168428 - RNA, 19 nt, Homo sapiens
  misc_RNA (1)...(19): siRNA sense strand
ugagugagcucucuuccuu

SEQ ID NO: 2168429 - RNA, 19 nt, Homo sapiens
  misc_RNA (1)...(19): siRNA sense strand
ccaaagacuucugaacaaa

SEQ ID NO: 2168430 - RNA, 19 nt, Homo sapiens
  misc_RNA (1)...(19): siRNA sense strand
gaaggagguucuggaauuc

SEQ ID NO: 2168431 - RNA, 19 nt, Homo sapiens
  misc_RNA (1)...(19): siRNA sense strand
aaacagagcaggcagaaga

SEQ ID NO: 2168432 - RNA, 19 nt, Homo sapiens
  misc_RNA (1)...(19): siRNA sense strand
gcaaagaaagcaccggauu

SEQ ID NO: 2168433 - RNA, 19 nt, Homo sapiens
  misc_RNA (1)...(19): siRNA sense strand
acagaaagcguccguuuaa

SEQ ID NO: 2168434 - RNA, 19 nt, Homo sapiens
  misc_RNA (1)...(19): siRNA sense strand
gcacucagaagaugaagaa

SEQ ID NO: 2168435 - RNA, 19 nt, Homo sapiens
  misc_RNA (1)...(19): siRNA sense strand
cggagaagauaaagauauu

SEQ ID NO: 2168436 - RNA, 19 nt, Homo sapiens
  misc_RNA (1)...(19): siRNA sense strand
caaccuaagucucauuaca

SEQ ID NO: 2168437 - RNA, 19 nt, Homo sapiens
  misc_RNA (1)...(19): siRNA sense strand
cuacaaagaagucaugaaa

SEQ ID NO: 2168438 - RNA, 19 nt, Homo sapiens
  misc_RNA (1)...(19): siRNA sense strand
uugagaaucuugccaguuu

SEQ ID NO: 2168439 - RNA, 19 nt, Homo sapiens
  misc_RNA (1)...(19): siRNA sense strand
gaaaauaugagcuuaggua

SEQ ID NO: 2168440 - RNA, 19 nt, Homo sapiens
  misc_RNA (1)...(19): siRNA sense strand
gcagguugcuauuucugaa

SEQ ID NO: 2168441 - RNA, 19 nt, Homo sapiens
  misc_RNA (1)...(19): siRNA sense strand
caacuguucagacucaaua

SEQ ID NO: 2168442 - RNA, 19 nt, Homo sapiens
  misc_RNA (1)...(19): siRNA sense strand
guacagaaagcguccguuu

SEQ ID NO: 2168443 - RNA, 19 nt, Homo sapiens
  misc_RNA (1)...(19): siRNA sense strand
gaaauuaaggaucgagaau

SEQ ID NO: 2168444 - RNA, 19 nt, Homo sapiens
  misc_RNA (1)...(19): siRNA sense strand
gugcugagguucaauucaa

SEQ ID NO: 2168445 - RNA, 19 nt, Homo sapiens
  misc_RNA (1)...(19): siRNA sense strand
acaagaaccagaaguaauu

SEQ ID NO: 2168446 - RNA, 19 nt, Homo sapiens
  misc_RNA (1)...(19): siRNA sense strand
ccaguggccuugaaagaga

SEQ ID NO: 2168447 - RNA, 19 nt, Homo sapiens
  misc_RNA (1)...(19): siRNA sense strand
gaaggaagcggugaugaau

SEQ ID NO: 2168448 - RNA, 19 nt, Homo sapiens
  misc_RNA (1)...(19): siRNA sense strand
agaaaguacuagcuugaaa

SEQ ID NO: 2168449 - RNA, 19 nt, Homo sapiens
  misc_RNA (1)...(19): siRNA sense strand
ccaagaaucacuaacagaa

SEQ ID NO: 2168450 - RNA, 19 nt, Homo sapiens
  misc_RNA (1)...(19): siRNA sense strand
gaaccugccucugauaguc

SEQ ID NO: 2168451 - RNA, 19 nt, Homo sapiens
  misc_RNA (1)...(19): siRNA sense strand
gauuugcaguucaacauau

SEQ ID NO: 2168452 - RNA, 19 nt, Homo sapiens
  misc_RNA (1)...(19): siRNA sense strand
uaaaccagaugcaacuguu

SEQ ID NO: 2168453 - RNA, 19 nt, Homo sapiens
  misc_RNA (1)...(19): siRNA sense strand
cauucaagcuuuaggagaa

SEQ ID NO: 2168454 - RNA, 19 nt, Homo sapiens
  misc_RNA (1)...(19): siRNA sense strand
uaucacaaguuuccauuca

SEQ ID NO: 2168455 - RNA, 19 nt, Homo sapiens
  misc_RNA (1)...(19): siRNA sense strand
gaaaaucuccucagaacuu

SEQ ID NO: 2168456 - RNA, 19 nt, Homo sapiens
  misc_RNA (1)...(19): siRNA sense strand
uguguagacugacgauuaa

SEQ ID NO: 2168457 - RNA, 19 nt, Homo sapiens
  misc_RNA (1)...(19): siRNA sense strand
cuagagcgcuuucaaaauu

SEQ ID NO: 2168458 - RNA, 19 nt, Homo sapiens
  misc_RNA (1)...(19): siRNA sense strand
cugaagaagcccaugauua

SEQ ID NO: 2168459 - RNA, 19 nt, Homo sapiens
  misc_RNA (1)...(19): siRNA sense strand
gaaauacccgagcaaaaua

SEQ ID NO: 2168460 - RNA, 19 nt, Homo sapiens
  misc_RNA (1)...(19): siRNA sense strand
caaagaaagcaccggauug

SEQ ID NO: 2168461 - RNA, 19 nt, Homo sapiens
  misc_RNA (1)...(19): siRNA sense strand
gcaguggccaugagaaaga

SEQ ID NO: 2168462 - RNA, 19 nt, Homo sapiens
  misc_RNA (1)...(19): siRNA sense strand
agaaagcguccguuuaauu

SEQ ID NO: 2168463 - RNA, 19 nt, Homo sapiens
  misc_RNA (1)...(19): siRNA sense strand
ugagaaacuuggaagacaa

SEQ ID NO: 2168464 - RNA, 19 nt, Homo sapiens
  misc_RNA (1)...(19): siRNA sense strand
uaacagaaaguacuagcuu

SEQ ID NO: 2168465 - RNA, 19 nt, Homo sapiens
  misc_RNA (1)...(19): siRNA sense strand
gaaagaaauacccgagcaa

SEQ ID NO: 2168466 - RNA, 19 nt, Homo sapiens
  misc_RNA (1)...(19): siRNA sense strand
caagaaucacuaacagaaa

SEQ ID NO: 2168467 - RNA, 19 nt, Homo sapiens
  misc_RNA (1)...(19): siRNA sense strand
gauuaucagcuacaaagaa

SEQ ID NO: 2168468 - RNA, 19 nt, Homo sapiens
  misc_RNA (1)...(19): siRNA sense strand
ggaaacagucugcugaucu

SEQ ID NO: 2168469 - RNA, 19 nt, Homo sapiens
  misc_RNA (1)...(19): siRNA sense strand
agacaaagacauaccagaa

SEQ ID NO: 2168470 - RNA, 19 nt, Homo sapiens
  misc_RNA (1)...(19): siRNA sense strand
aaacggagaagauaaagau

SEQ ID NO: 2168471 - RNA, 19 nt, Homo sapiens
  misc_RNA (1)...(19): siRNA sense strand
aacauaagcugagaaacuu

SEQ ID NO: 2168472 - RNA, 19 nt, Homo sapiens
  misc_RNA (1)...(19): siRNA sense strand
gaagcacucagaagaugaa

SEQ ID NO: 2168473 - RNA, 19 nt, Homo sapiens
  misc_RNA (1)...(19): siRNA sense strand
gacaagaaccagaaguaau

SEQ ID NO: 2168474 - RNA, 19 nt, Homo sapiens
  misc_RNA (1)...(19): siRNA sense strand
cauaaaugguuugaugaug

SEQ ID NO: 2168475 - RNA, 19 nt, Homo sapiens
  misc_RNA (1)...(19): siRNA sense strand
gagaaacuuggaagacaaa

SEQ ID NO: 2168476 - RNA, 19 nt, Homo sapiens
  misc_RNA (1)...(19): siRNA sense strand
aaacauaagcugagaaacu

SEQ ID NO: 2168477 - RNA, 19 nt, Homo sapiens
  misc_RNA (1)...(19): siRNA sense strand
uccaaagacuucugaacaa

SEQ ID NO: 2168478 - RNA, 19 nt, Homo sapiens
  misc_RNA (1)...(19): siRNA sense strand
ccacaucuccaaagacuuc

SEQ ID NO: 2168479 - RNA, 19 nt, Homo sapiens
  misc_RNA (1)...(19): siRNA sense strand
caacauaucacaaguuucc

SEQ ID NO: 2168480 - RNA, 19 nt, Homo sapiens
  misc_RNA (1)...(19): siRNA sense strand
aaacuagagcgcuuucaaa

SEQ ID NO: 2168481 - RNA, 19 nt, Homo sapiens
  misc_RNA (1)...(19): siRNA sense strand
ugaaacauaagcugagaaa

SEQ ID NO: 2168482 - RNA, 19 nt, Homo sapiens
  misc_RNA (1)...(19): siRNA sense strand
uauagacaaugcugagaau

SEQ ID NO: 2168483 - RNA, 19 nt, Homo sapiens
  misc_RNA (1)...(19): siRNA sense strand
cuaagucucauuacagaaa

SEQ ID NO: 2168484 - RNA, 19 nt, Homo sapiens
  misc_RNA (1)...(19): siRNA sense strand
ggagaagacaaacagaugu

SEQ ID NO: 2168485 - RNA, 19 nt, Homo sapiens
  misc_RNA (1)...(19): siRNA sense strand
ucacaaguuuccauucaag

SEQ ID NO: 2168486 - RNA, 19 nt, Homo sapiens
  misc_RNA (1)...(19): siRNA sense strand
gaaacggagaagauaaaga

SEQ ID NO: 2168487 - RNA, 19 nt, Homo sapiens
  misc_RNA (1)...(19): siRNA sense strand
cgaaggaagcggugaugaa

SEQ ID NO: 2168488 - RNA, 19 nt, Homo sapiens
  misc_RNA (1)...(19): siRNA sense strand
cuaauaacucuccacuuaa

SEQ ID NO: 2168489 - RNA, 19 nt, Homo sapiens
  misc_RNA (1)...(19): siRNA sense strand
gcuucaagauccucacuca

SEQ ID NO: 2168490 - RNA, 19 nt, Homo sapiens
  misc_RNA (1)...(19): siRNA sense strand
gaagaagcccaugauuauc

SEQ ID NO: 2168491 - RNA, 19 nt, Homo sapiens
  misc_RNA (1)...(19): siRNA sense strand
guaagucugauaaagaaga

SEQ ID NO: 2168492 - RNA, 19 nt, Homo sapiens
  misc_RNA (1)...(19): siRNA sense strand
agaagaauccacuaacaug

SEQ ID NO: 2168493 - RNA, 19 nt, Homo sapiens
  misc_RNA (1)...(19): siRNA sense strand
caauucaacucagacuuca

SEQ ID NO: 2168494 - RNA, 19 nt, Homo sapiens
  misc_RNA (1)...(19): siRNA sense strand
guucagacucaauaaacua

SEQ ID NO: 2168495 - RNA, 19 nt, Homo sapiens
  misc_RNA (1)...(19): siRNA sense strand
gggauccccuuucucaaua

SEQ ID NO: 2168496 - RNA, 19 nt, Homo sapiens
  misc_RNA (1)...(19): siRNA sense strand
gaaacuuggaagacaaaga

SEQ ID NO: 2168497 - RNA, 19 nt, Homo sapiens
  misc_RNA (1)...(19): siRNA sense strand
gaaaguacuagcuugaaac

SEQ ID NO: 2168498 - RNA, 19 nt, Homo sapiens
  misc_RNA (1)...(19): siRNA sense strand
ucacuaacagaaaguacua

SEQ ID NO: 2168499 - RNA, 19 nt, Homo sapiens
  misc_RNA (1)...(19): siRNA sense strand
aagaaucacuaacagaaag

SEQ ID NO: 2168500 - RNA, 19 nt, Homo sapiens
  misc_RNA (1)...(19): siRNA sense strand
gaaaacagagcuucaagau

SEQ ID NO: 2168501 - RNA, 19 nt, Homo sapiens
  misc_RNA (1)...(19): siRNA sense strand
aaccagaaguaauuugaga

SEQ ID NO: 2168502 - RNA, 19 nt, Homo sapiens
  misc_RNA (1)...(19): siRNA sense strand
caagaaccagaaguaauuu

SEQ ID NO: 2168503 - RNA, 19 nt, Homo sapiens
  misc_RNA (1)...(19): siRNA sense strand
caaucugagccaccuguua

SEQ ID NO: 2168504 - RNA, 19 nt, Homo sapiens
  misc_RNA (1)...(19): siRNA sense strand
uaacucuccacuuaaauga

SEQ ID NO: 2168505 - RNA, 19 nt, Homo sapiens
  misc_RNA (1)...(19): siRNA sense strand
uacagaaagcguccguuua

SEQ ID NO: 2168506 - RNA, 19 nt, Homo sapiens
  misc_RNA (1)...(19): siRNA sense strand
cgaagaagccucguuaugc

SEQ ID NO: 2168507 - RNA, 19 nt, Homo sapiens
  misc_RNA (1)...(19): siRNA sense strand
gaaaggagcucaaugaauu

SEQ ID NO: 2168508 - RNA, 19 nt, Homo sapiens
  misc_RNA (1)...(19): siRNA sense strand
gaagaggacucccuagaaa

SEQ ID NO: 2168509 - RNA, 19 nt, Homo sapiens
  misc_RNA (1)...(19): siRNA sense strand
gcacugagauggaaguuca

SEQ ID NO: 2168510 - RNA, 19 nt, Homo sapiens
  misc_RNA (1)...(19): siRNA sense strand
gauggaaguucaugaauug

SEQ ID NO: 2168511 - RNA, 19 nt, Homo sapiens
  misc_RNA (1)...(19): siRNA sense strand
gcuccugccucccacauua

SEQ ID NO: 2168512 - RNA, 19 nt, Homo sapiens
  misc_RNA (1)...(19): siRNA sense strand
ugaauugaguagacacuua

SEQ ID NO: 2168513 - RNA, 19 nt, Homo sapiens
  misc_RNA (1)...(19): siRNA sense strand
ggaaauggaggaagaagaa

SEQ ID NO: 2168514 - RNA, 19 nt, Homo sapiens
  misc_RNA (1)...(19): siRNA sense strand
caaagaaagucaugaucug

SEQ ID NO: 2168515 - RNA, 19 nt, Homo sapiens
  misc_RNA (1)...(19): siRNA sense strand
ggagcucaaugaauucaaa

SEQ ID NO: 2168516 - RNA, 19 nt, Homo sapiens
  misc_RNA (1)...(19): siRNA sense strand
gacgacagcucauuauaca

SEQ ID NO: 2168517 - RNA, 19 nt, Homo sapiens
  misc_RNA (1)...(19): siRNA sense strand
gcagagaagagcugauaaa

SEQ ID NO: 2168518 - RNA, 19 nt, Homo sapiens
  misc_RNA (1)...(19): siRNA sense strand
cagcagcccuggaaaggaa

SEQ ID NO: 2168519 - RNA, 19 nt, Homo sapiens
  misc_RNA (1)...(19): siRNA sense strand
gaauugaguagacacuuaa

SEQ ID NO: 2168520 - RNA, 19 nt, Homo sapiens
  misc_RNA (1)...(19): siRNA sense strand
gaaguaaguuugccaaccu

SEQ ID NO: 2168521 - RNA, 19 nt, Homo sapiens
  misc_RNA (1)...(19): siRNA sense strand
ggaacucucuauauccaau

SEQ ID NO: 2168522 - RNA, 19 nt, Homo sapiens
  misc_RNA (1)...(19): siRNA sense strand
uaagacaagugccaacugu

SEQ ID NO: 2168523 - RNA, 19 nt, Homo sapiens
  misc_RNA (1)...(19): siRNA sense strand
ccucaccgcugcagacaaa

SEQ ID NO: 2168524 - RNA, 19 nt, Homo sapiens
  misc_RNA (1)...(19): siRNA sense strand
gagcugaggcaacagauug

SEQ ID NO: 2168525 - RNA, 19 nt, Homo sapiens
  misc_RNA (1)...(19): siRNA sense strand
ggaaguucaugaauugagu

SEQ ID NO: 2168526 - RNA, 19 nt, Homo sapiens
  misc_RNA (1)...(19): siRNA sense strand
gagaagagagagaucaaga

SEQ ID NO: 2168527 - RNA, 19 nt, Homo sapiens
  misc_RNA (1)...(19): siRNA sense strand
gauagacgagcucaacaaa

SEQ ID NO: 2168528 - RNA, 19 nt, Homo sapiens
  misc_RNA (1)...(19): siRNA sense strand
agaaagucaugaucuguau

SEQ ID NO: 2168529 - RNA, 19 nt, Homo sapiens
  misc_RNA (1)...(19): siRNA sense strand
gaacagaggaacauuuuga

SEQ ID NO: 2168530 - RNA, 19 nt, Homo sapiens
  misc_RNA (1)...(19): siRNA sense strand
agauggaaguucaugaauu

SEQ ID NO: 2168531 - RNA, 19 nt, Homo sapiens
  misc_RNA (1)...(19): siRNA sense strand
gaggccaacugcagaggaa

SEQ ID NO: 2168532 - RNA, 19 nt, Homo sapiens
  misc_RNA (1)...(19): siRNA sense strand
ggaaugaacaagaggaaca

SEQ ID NO: 2168533 - RNA, 19 nt, Homo sapiens
  misc_RNA (1)...(19): siRNA sense strand
uaugggccuuccagaaaua

SEQ ID NO: 2168534 - RNA, 19 nt, Homo sapiens
  misc_RNA (1)...(19): siRNA sense strand
ggaaagaaagauccucauc

SEQ ID NO: 2168535 - RNA, 19 nt, Homo sapiens
  misc_RNA (1)...(19): siRNA sense strand
caagagaagaggaggaaga

SEQ ID NO: 2168536 - RNA, 19 nt, Homo sapiens
  misc_RNA (1)...(19): siRNA sense strand
guagacacuuaacaagguu

SEQ ID NO: 2168537 - RNA, 19 nt, Homo sapiens
  misc_RNA (1)...(19): siRNA sense strand
agacgacgacagcucauua

SEQ ID NO: 2168538 - RNA, 19 nt, Homo sapiens
  misc_RNA (1)...(19): siRNA sense strand
gaagaaaagcgaaaaguuc

SEQ ID NO: 2168539 - RNA, 19 nt, Homo sapiens
  misc_RNA (1)...(19): siRNA sense strand
aaaugugccucaugaguca

SEQ ID NO: 2168540 - RNA, 19 nt, Homo sapiens
  misc_RNA (1)...(19): siRNA sense strand
ugaagaggacucccuagaa

SEQ ID NO: 2168541 - RNA, 19 nt, Homo sapiens
  misc_RNA (1)...(19): siRNA sense strand
gaaguucaugaauugagua

SEQ ID NO: 2168542 - RNA, 19 nt, Homo sapiens
  misc_RNA (1)...(19): siRNA sense strand
cgaaaggagcucaaugaau

SEQ ID NO: 2168543 - RNA, 19 nt, Homo sapiens
  misc_RNA (1)...(19): siRNA sense strand
ccuaugggccuuccagaaa

SEQ ID NO: 2168544 - RNA, 19 nt, Homo sapiens
  misc_RNA (1)...(19): siRNA sense strand
caaaagcacugagauggaa

SEQ ID NO: 2168545 - RNA, 19 nt, Homo sapiens
  misc_RNA (1)...(19): siRNA sense strand
agaggaggcuaacccgaaa

SEQ ID NO: 2168546 - RNA, 19 nt, Homo sapiens
  misc_RNA (1)...(19): siRNA sense strand
gaacuggaacagaggaaca

SEQ ID NO: 2168547 - RNA, 19 nt, Homo sapiens
  misc_RNA (1)...(19): siRNA sense strand
gaaauggaggaagaagaaa

SEQ ID NO: 2168548 - RNA, 19 nt, Homo sapiens
  misc_RNA (1)...(19): siRNA sense strand
gagaucaagaggaggcuaa

SEQ ID NO: 2168549 - RNA, 19 nt, Homo sapiens
  misc_RNA (1)...(19): siRNA sense strand
ccaugaaggucugcaggaa

SEQ ID NO: 2168550 - RNA, 19 nt, Homo sapiens
  misc_RNA (1)...(19): siRNA sense strand
ccaaagaaagucaugaucu

SEQ ID NO: 2168551 - RNA, 19 nt, Homo sapiens
  misc_RNA (1)...(19): siRNA sense strand
cacagacucuuggauguug

SEQ ID NO: 2168552 - RNA, 19 nt, Homo sapiens
  misc_RNA (1)...(19): siRNA sense strand
gagcuucgggaaagaaaga

SEQ ID NO: 2168553 - RNA, 19 nt, Homo sapiens
  misc_RNA (1)...(19): siRNA sense strand
guucaugaauugaguagac

SEQ ID NO: 2168554 - RNA, 19 nt, Homo sapiens
  misc_RNA (1)...(19): siRNA sense strand
aagcagagaagagcugaua

SEQ ID NO: 2168555 - RNA, 19 nt, Homo sapiens
  misc_RNA (1)...(19): siRNA sense strand
agacucuucuugccuguau

SEQ ID NO: 2168556 - RNA, 19 nt, Homo sapiens
  misc_RNA (1)...(19): siRNA sense strand
aagaaagucaugaucugua

SEQ ID NO: 2168557 - RNA, 19 nt, Homo sapiens
  misc_RNA (1)...(19): siRNA sense strand
caccaaagcaggaccuaug

SEQ ID NO: 2168558 - RNA, 19 nt, Homo sapiens
  misc_RNA (1)...(19): siRNA sense strand
gagauggaaguucaugaau

SEQ ID NO: 2168559 - RNA, 19 nt, Homo sapiens
  misc_RNA (1)...(19): siRNA sense strand
ugagauggaaguucaugaa

SEQ ID NO: 2168560 - RNA, 19 nt, Homo sapiens
  misc_RNA (1)...(19): siRNA sense strand
gcagaggaacuggaacaga

SEQ ID NO: 2168561 - RNA, 19 nt, Homo sapiens
  misc_RNA (1)...(19): siRNA sense strand
aagaaaaugugccucauga

SEQ ID NO: 2168562 - RNA, 19 nt, Homo sapiens
  misc_RNA (1)...(19): siRNA sense strand
cuaugggccuuccagaaau

SEQ ID NO: 2168563 - RNA, 19 nt, Homo sapiens
  misc_RNA (1)...(19): siRNA sense strand
ggaagaggaggaggacgaa

SEQ ID NO: 2168564 - RNA, 19 nt, Homo sapiens
  misc_RNA (1)...(19): siRNA sense strand
cugaaggaaaucuaugaua

SEQ ID NO: 2168565 - RNA, 19 nt, Homo sapiens
  misc_RNA (1)...(19): siRNA sense strand
acaaagcugccauccgaaa

SEQ ID NO: 2168566 - RNA, 19 nt, Homo sapiens
  misc_RNA (1)...(19): siRNA sense strand
uuugaaaccucggaaugaa

SEQ ID NO: 2168567 - RNA, 19 nt, Homo sapiens
  misc_RNA (1)...(19): siRNA sense strand
cgacgacagcucauuauac

SEQ ID NO: 2168568 - RNA, 19 nt, Homo sapiens
  misc_RNA (1)...(19): siRNA sense strand
gaaagucaugaucuguaug

SEQ ID NO: 2168569 - RNA, 19 nt, Homo sapiens
  misc_RNA (1)...(19): siRNA sense strand
aguagacacuuaacaaggu

SEQ ID NO: 2168570 - RNA, 19 nt, Homo sapiens
  misc_RNA (1)...(19): siRNA sense strand
uccgcuaccuccaaagaaa

SEQ ID NO: 2168571 - RNA, 19 nt, Homo sapiens
  misc_RNA (1)...(19): siRNA sense strand
cccgaaagcucagucaaag

SEQ ID NO: 2168572 - RNA, 19 nt, Homo sapiens
  misc_RNA (1)...(19): siRNA sense strand
gauguagagucugcucaca

SEQ ID NO: 2168573 - RNA, 19 nt, Homo sapiens
  misc_RNA (1)...(19): siRNA sense strand
ggacuccuuagccaucaaa

SEQ ID NO: 2168574 - RNA, 19 nt, Homo sapiens
  misc_RNA (1)...(19): siRNA sense strand
gaaaaugugccucaugagu

SEQ ID NO: 2168575 - RNA, 19 nt, Homo sapiens
  misc_RNA (1)...(19): siRNA sense strand
ccuuggaaauggaggaaga

SEQ ID NO: 2168576 - RNA, 19 nt, Homo sapiens
  misc_RNA (1)...(19): siRNA sense strand
gaaaagcgaaaaguucaaa

SEQ ID NO: 2168577 - RNA, 19 nt, Homo sapiens
  misc_RNA (1)...(19): siRNA sense strand
ccacccauccgcaggagaa

SEQ ID NO: 2168578 - RNA, 19 nt, Homo sapiens
  misc_RNA (1)...(19): siRNA sense strand
ggagcugaggcaacagauu

SEQ ID NO: 2168579 - RNA, 19 nt, Homo sapiens
  misc_RNA (1)...(19): siRNA sense strand
caagcgagagcuggaagaa

SEQ ID NO: 2168580 - RNA, 19 nt, Homo sapiens
  misc_RNA (1)...(19): siRNA sense strand
ccgaaaggagcucaaugaa

SEQ ID NO: 2168581 - RNA, 19 nt, Homo sapiens
  misc_RNA (1)...(19): siRNA sense strand
gaggagaagagagagauca

SEQ ID NO: 2168582 - RNA, 19 nt, Homo sapiens
  misc_RNA (1)...(19): siRNA sense strand
ucacagacucuuggauguu

SEQ ID NO: 2168583 - RNA, 19 nt, Homo sapiens
  misc_RNA (1)...(19): siRNA sense strand
ggaacaggaggagaagaga

SEQ ID NO: 2168584 - RNA, 19 nt, Homo sapiens
  misc_RNA (1)...(19): siRNA sense strand
aagaggaacaggaggagaa

SEQ ID NO: 2168585 - RNA, 19 nt, Homo sapiens
  misc_RNA (1)...(19): siRNA sense strand
cuacacagcccagaagagu

SEQ ID NO: 2168586 - RNA, 19 nt, Homo sapiens
  misc_RNA (1)...(19): siRNA sense strand
aaauaucuaugaggcaaag

SEQ ID NO: 2168587 - RNA, 19 nt, Homo sapiens
  misc_RNA (1)...(19): siRNA sense strand
uccgaaaggagcucaauga

SEQ ID NO: 2168588 - RNA, 19 nt, Homo sapiens
  misc_RNA (1)...(19): siRNA sense strand
ugaaaccucggaaugaaca

SEQ ID NO: 2168589 - RNA, 19 nt, Homo sapiens
  misc_RNA (1)...(19): siRNA sense strand
gacgacgacagcucauuau

SEQ ID NO: 2168590 - RNA, 19 nt, Homo sapiens
  misc_RNA (1)...(19): siRNA sense strand
gugauugaaugugaugaca

SEQ ID NO: 2168591 - RNA, 19 nt, Homo sapiens
  misc_RNA (1)...(19): siRNA sense strand
ccugugaaauugccuuguc

SEQ ID NO: 2168592 - RNA, 19 nt, Homo sapiens
  misc_RNA (1)...(19): siRNA sense strand
gaacucucuauauccaaug

SEQ ID NO: 2168593 - RNA, 19 nt, Homo sapiens
  misc_RNA (1)...(19): siRNA sense strand
cccucgggcugcagaauga

SEQ ID NO: 2168594 - RNA, 19 nt, Homo sapiens
  misc_RNA (1)...(19): siRNA sense strand
aaauggagccagucccaau

SEQ ID NO: 2168595 - RNA, 19 nt, Homo sapiens
  misc_RNA (1)...(19): siRNA sense strand
ggcuggagcugaggcaaca

SEQ ID NO: 2168596 - RNA, 19 nt, Homo sapiens
  misc_RNA (1)...(19): siRNA sense strand
gccaaccugggaaggauuu

SEQ ID NO: 2168597 - RNA, 19 nt, Homo sapiens
  misc_RNA (1)...(19): siRNA sense strand
ugauagacgagcucaacaa

SEQ ID NO: 2168598 - RNA, 19 nt, Homo sapiens
  misc_RNA (1)...(19): siRNA sense strand
aaagaaagucaugaucugu

SEQ ID NO: 2168599 - RNA, 19 nt, Homo sapiens
  misc_RNA (1)...(19): siRNA sense strand
gcuccaaccgucagacauc

SEQ ID NO: 2168600 - RNA, 19 nt, Homo sapiens
  misc_RNA (1)...(19): siRNA sense strand
cagagaagagcugauaaag

SEQ ID NO: 2168601 - RNA, 19 nt, Homo sapiens
  misc_RNA (1)...(19): siRNA sense strand
ggguugcacucgggugaug

SEQ ID NO: 2168602 - RNA, 19 nt, Homo sapiens
  misc_RNA (1)...(19): siRNA sense strand
ugccuugucugccagugaa

SEQ ID NO: 2168603 - RNA, 19 nt, Homo sapiens
  misc_RNA (1)...(19): siRNA sense strand
ugccugcccuguccgaaau

SEQ ID NO: 2168604 - RNA, 19 nt, Homo sapiens
  misc_RNA (1)...(19): siRNA sense strand
agcgagagcuggaagaaaa

SEQ ID NO: 2168605 - RNA, 19 nt, Homo sapiens
  misc_RNA (1)...(19): siRNA sense strand
aagaggaggaggacgaaga

SEQ ID NO: 2168606 - RNA, 19 nt, Homo sapiens
  misc_RNA (1)...(19): siRNA sense strand
cccauccgcaggagaagua

SEQ ID NO: 2168607 - RNA, 19 nt, Homo sapiens
  misc_RNA (1)...(19): siRNA sense strand
gaauauacaucuuccacua

SEQ ID NO: 2168608 - RNA, 19 nt, Homo sapiens
  misc_RNA (1)...(19): siRNA sense strand
ccucaaagcccaaguauua

SEQ ID NO: 2168609 - RNA, 19 nt, Homo sapiens
  misc_RNA (1)...(19): siRNA sense strand
gcaaugggauaucuuacaa

SEQ ID NO: 2168610 - RNA, 19 nt, Homo sapiens
  misc_RNA (1)...(19): siRNA sense strand
gaauaacgcagcuggcuuu

SEQ ID NO: 2168611 - RNA, 19 nt, Homo sapiens
  misc_RNA (1)...(19): siRNA sense strand
ggaagcauauacacaugaa

SEQ ID NO: 2168612 - RNA, 19 nt, Homo sapiens
  misc_RNA (1)...(19): siRNA sense strand
gaacaacaucgacuugcua

SEQ ID NO: 2168613 - RNA, 19 nt, Homo sapiens
  misc_RNA (1)...(19): siRNA sense strand
gcuaguguauccaauauuc

SEQ ID NO: 2168614 - RNA, 19 nt, Homo sapiens
  misc_RNA (1)...(19): siRNA sense strand
guaacaauuucaaggacua

SEQ ID NO: 2168615 - RNA, 19 nt, Homo sapiens
  misc_RNA (1)...(19): siRNA sense strand
cuacuuauauguugucaug

SEQ ID NO: 2168616 - RNA, 19 nt, Homo sapiens
  misc_RNA (1)...(19): siRNA sense strand
ccagguucaugauggauua

SEQ ID NO: 2168617 - RNA, 19 nt, Homo sapiens
  misc_RNA (1)...(19): siRNA sense strand
gaucugcuuucgaaccuaa

SEQ ID NO: 2168618 - RNA, 19 nt, Homo sapiens
  misc_RNA (1)...(19): siRNA sense strand
ucgaagagcugaagaccuu

SEQ ID NO: 2168619 - RNA, 19 nt, Homo sapiens
  misc_RNA (1)...(19): siRNA sense strand
cuacagacauuacuuccuu

SEQ ID NO: 2168620 - RNA, 19 nt, Homo sapiens
  misc_RNA (1)...(19): siRNA sense strand
gcucgacucugcuacuuau

SEQ ID NO: 2168621 - RNA, 19 nt, Homo sapiens
  misc_RNA (1)...(19): siRNA sense strand
ugucauagcugguccuugu

SEQ ID NO: 2168622 - RNA, 19 nt, Homo sapiens
  misc_RNA (1)...(19): siRNA sense strand
gacauuacuuccuuucuuc

SEQ ID NO: 2168623 - RNA, 19 nt, Homo sapiens
  misc_RNA (1)...(19): siRNA sense strand
gaaccgaccaucagcuuau

SEQ ID NO: 2168624 - RNA, 19 nt, Homo sapiens
  misc_RNA (1)...(19): siRNA sense strand
ggaauucucacuacggauu

SEQ ID NO: 2168625 - RNA, 19 nt, Homo sapiens
  misc_RNA (1)...(19): siRNA sense strand
gaaccuaaacaucuggaaa

SEQ ID NO: 2168626 - RNA, 19 nt, Homo sapiens
  misc_RNA (1)...(19): siRNA sense strand
caacaucgacuugcuauca

SEQ ID NO: 2168627 - RNA, 19 nt, Homo sapiens
  misc_RNA (1)...(19): siRNA sense strand
cuaaacaucuggaaaauug

SEQ ID NO: 2168628 - RNA, 19 nt, Homo sapiens
  misc_RNA (1)...(19): siRNA sense strand
guugggaucugcuuucgaa

SEQ ID NO: 2168629 - RNA, 19 nt, Homo sapiens
  misc_RNA (1)...(19): siRNA sense strand
guagcaaugggauaucuua

SEQ ID NO: 2168630 - RNA, 19 nt, Homo sapiens
  misc_RNA (1)...(19): siRNA sense strand
ucaccugccuuguggauga

SEQ ID NO: 2168631 - RNA, 19 nt, Homo sapiens
  misc_RNA (1)...(19): siRNA sense strand
uaaagugugugugcuauca

SEQ ID NO: 2168632 - RNA, 19 nt, Homo sapiens
  misc_RNA (1)...(19): siRNA sense strand
ucauaagucuccugauaau

SEQ ID NO: 2168633 - RNA, 19 nt, Homo sapiens
  misc_RNA (1)...(19): siRNA sense strand
acgaagaccuuuccuguca

SEQ ID NO: 2168634 - RNA, 19 nt, Homo sapiens
  misc_RNA (1)...(19): siRNA sense strand
gaacaacuacagacauuac

SEQ ID NO: 2168635 - RNA, 19 nt, Homo sapiens
  misc_RNA (1)...(19): siRNA sense strand
ugacugguuuguccauaaa

SEQ ID NO: 2168636 - RNA, 19 nt, Homo sapiens
  misc_RNA (1)...(19): siRNA sense strand
ggauaagaaugggaauuuc

SEQ ID NO: 2168637 - RNA, 19 nt, Homo sapiens
  misc_RNA (1)...(19): siRNA sense strand
gcagccaccucccgaagau

SEQ ID NO: 2168638 - RNA, 19 nt, Homo sapiens
  misc_RNA (1)...(19): siRNA sense strand
agacauuacuuccuuucuu

SEQ ID NO: 2168639 - RNA, 19 nt, Homo sapiens
  misc_RNA (1)...(19): siRNA sense strand
uggaauucuugucacauua

SEQ ID NO: 2168640 - RNA, 19 nt, Homo sapiens
  misc_RNA (1)...(19): siRNA sense strand
ugaaguugcuggaggugaa

SEQ ID NO: 2168641 - RNA, 19 nt, Homo sapiens
  misc_RNA (1)...(19): siRNA sense strand
cuacauagccuucauugag

SEQ ID NO: 2168642 - RNA, 19 nt, Homo sapiens
  misc_RNA (1)...(19): siRNA sense strand
ggaacaacuacagacauua

SEQ ID NO: 2168643 - RNA, 19 nt, Homo sapiens
  misc_RNA (1)...(19): siRNA sense strand
gcauggacauuagcugaug

SEQ ID NO: 2168644 - RNA, 19 nt, Homo sapiens
  misc_RNA (1)...(19): siRNA sense strand
cuucuuaacuggaauucuu

SEQ ID NO: 2168645 - RNA, 19 nt, Homo sapiens
  misc_RNA (1)...(19): siRNA sense strand
gcaaucauggucacugcua

SEQ ID NO: 2168646 - RNA, 19 nt, Homo sapiens
  misc_RNA (1)...(19): siRNA sense strand
ugucuacccuggauacuau

SEQ ID NO: 2168647 - RNA, 19 nt, Homo sapiens
  misc_RNA (1)...(19): siRNA sense strand
gaugacugguuuguccaua

SEQ ID NO: 2168648 - RNA, 19 nt, Homo sapiens
  misc_RNA (1)...(19): siRNA sense strand
gaucacaaccuuggcauuc

SEQ ID NO: 2168649 - RNA, 19 nt, Homo sapiens
  misc_RNA (1)...(19): siRNA sense strand
gcuaaagugugugugcuau

SEQ ID NO: 2168650 - RNA, 19 nt, Homo sapiens
  misc_RNA (1)...(19): siRNA sense strand
cgacucugcuacuuauaug

SEQ ID NO: 2168651 - RNA, 19 nt, Homo sapiens
  misc_RNA (1)...(19): siRNA sense strand
aggaacaacuacagacauu

SEQ ID NO: 2168652 - RNA, 19 nt, Homo sapiens
  misc_RNA (1)...(19): siRNA sense strand
uagcugaugcagugaauaa

SEQ ID NO: 2168653 - RNA, 19 nt, Homo sapiens
  misc_RNA (1)...(19): siRNA sense strand
caugauggauuaggucgaa

SEQ ID NO: 2168654 - RNA, 19 nt, Homo sapiens
  misc_RNA (1)...(19): siRNA sense strand
gcagcuggcuuuggguuca

SEQ ID NO: 2168655 - RNA, 19 nt, Homo sapiens
  misc_RNA (1)...(19): siRNA sense strand
caauuucaaggacuacaua

SEQ ID NO: 2168656 - RNA, 19 nt, Homo sapiens
  misc_RNA (1)...(19): siRNA sense strand
ccacaaguuucaaaaugua

SEQ ID NO: 2168657 - RNA, 19 nt, Homo sapiens
  misc_RNA (1)...(19): siRNA sense strand
ggacuacauagccuucauu

SEQ ID NO: 2168658 - RNA, 19 nt, Homo sapiens
  misc_RNA (1)...(19): siRNA sense strand
gcagaggaggguaaaggaa

SEQ ID NO: 2168659 - RNA, 19 nt, Homo sapiens
  misc_RNA (1)...(19): siRNA sense strand
gguagcacccuuugugaug

SEQ ID NO: 2168660 - RNA, 19 nt, Homo sapiens
  misc_RNA (1)...(19): siRNA sense strand
caacuacagacauuacuuc

SEQ ID NO: 2168661 - RNA, 19 nt, Homo sapiens
  misc_RNA (1)...(19): siRNA sense strand
aaacuggaauauucagaca

SEQ ID NO: 2168662 - RNA, 19 nt, Homo sapiens
  misc_RNA (1)...(19): siRNA sense strand
ccacaucagccgaauauac

SEQ ID NO: 2168663 - RNA, 19 nt, Homo sapiens
  misc_RNA (1)...(19): siRNA sense strand
gcauauacacaugaaguug

SEQ ID NO: 2168664 - RNA, 19 nt, Homo sapiens
  misc_RNA (1)...(19): siRNA sense strand
cuacuuacguccugguaca

SEQ ID NO: 2168665 - RNA, 19 nt, Homo sapiens
  misc_RNA (1)...(19): siRNA sense strand
gcaguugaaccgaccauca

SEQ ID NO: 2168666 - RNA, 19 nt, Homo sapiens
  misc_RNA (1)...(19): siRNA sense strand
gaauucucacuacggauuu

SEQ ID NO: 2168667 - RNA, 19 nt, Homo sapiens
  misc_RNA (1)...(19): siRNA sense strand
ccagcuuguugcucuguuu

SEQ ID NO: 2168668 - RNA, 19 nt, Homo sapiens
  misc_RNA (1)...(19): siRNA sense strand
guacaaccagcucugaugu

SEQ ID NO: 2168669 - RNA, 19 nt, Homo sapiens
  misc_RNA (1)...(19): siRNA sense strand
cuggaauucuugucacauu

SEQ ID NO: 2168670 - RNA, 19 nt, Homo sapiens
  misc_RNA (1)...(19): siRNA sense strand
ucagcggaguggauaagaa

SEQ ID NO: 2168671 - RNA, 19 nt, Homo sapiens
  misc_RNA (1)...(19): siRNA sense strand
gcaugcgguugccaccauu

SEQ ID NO: 2168672 - RNA, 19 nt, Homo sapiens
  misc_RNA (1)...(19): siRNA sense strand
ucucaaggcuguguaugau

SEQ ID NO: 2168673 - RNA, 19 nt, Homo sapiens
  misc_RNA (1)...(19): siRNA sense strand
cuagagcggucaggaacaa

SEQ ID NO: 2168674 - RNA, 19 nt, Homo sapiens
  misc_RNA (1)...(19): siRNA sense strand
ggaauucuugucacauuag

SEQ ID NO: 2168675 - RNA, 19 nt, Homo sapiens
  misc_RNA (1)...(19): siRNA sense strand
uuacuuugcauggacauua

SEQ ID NO: 2168676 - RNA, 19 nt, Homo sapiens
  misc_RNA (1)...(19): siRNA sense strand
ugaagaccuuucugcugaa

SEQ ID NO: 2168677 - RNA, 19 nt, Homo sapiens
  misc_RNA (1)...(19): siRNA sense strand
uuaaugugcuaugcaauca

SEQ ID NO: 2168678 - RNA, 19 nt, Homo sapiens
  misc_RNA (1)...(19): siRNA sense strand
guagcacccuuugugaugu

SEQ ID NO: 2168679 - RNA, 19 nt, Homo sapiens
  misc_RNA (1)...(19): siRNA sense strand
gaauuucuguugggaucug

SEQ ID NO: 2168680 - RNA, 19 nt, Homo sapiens
  misc_RNA (1)...(19): siRNA sense strand
uggauaagaaugggaauuu

SEQ ID NO: 2168681 - RNA, 19 nt, Homo sapiens
  misc_RNA (1)...(19): siRNA sense strand
ccuuguggaugacugguuu

SEQ ID NO: 2168682 - RNA, 19 nt, Homo sapiens
  misc_RNA (1)...(19): siRNA sense strand
gauugucacucagaagauc

SEQ ID NO: 2168683 - RNA, 19 nt, Homo sapiens
  misc_RNA (1)...(19): siRNA sense strand
auauacaucuuccacuaug

SEQ ID NO: 2168684 - RNA, 19 nt, Homo sapiens
  misc_RNA (1)...(19): siRNA sense strand
guuugcgccucgagaguuu

SEQ ID NO: 2168685 - RNA, 19 nt, Homo sapiens
  misc_RNA (1)...(19): siRNA sense strand
guuugcgccucgagaguuu

SEQ ID NO: 2168686 - RNA, 19 nt, Homo sapiens
  misc_RNA (1)...(19): siRNA sense strand
gggaagcauauacacauga

SEQ ID NO: 2168687 - RNA, 19 nt, Homo sapiens
  misc_RNA (1)...(19): siRNA sense strand
agaccuuucugcugaacaa

SEQ ID NO: 2168688 - RNA, 19 nt, Homo sapiens
  misc_RNA (1)...(19): siRNA sense strand
guguuaaugugcuaugcaa

SEQ ID NO: 2168689 - RNA, 19 nt, Homo sapiens
  misc_RNA (1)...(19): siRNA sense strand
uaaaggaaguagggagucu

SEQ ID NO: 2168690 - RNA, 19 nt, Homo sapiens
  misc_RNA (1)...(19): siRNA sense strand
gaagagcugaagaccuuuc

SEQ ID NO: 2168691 - RNA, 19 nt, Homo sapiens
  misc_RNA (1)...(19): siRNA sense strand
ggaacccucuacggcuuga

SEQ ID NO: 2168692 - RNA, 19 nt, Homo sapiens
  misc_RNA (1)...(19): siRNA sense strand
gaccaucagcuuauacaag

SEQ ID NO: 2168693 - RNA, 19 nt, Homo sapiens
  misc_RNA (1)...(19): siRNA sense strand
ggucaggaacaacuacaga

SEQ ID NO: 2168694 - RNA, 19 nt, Homo sapiens
  misc_RNA (1)...(19): siRNA sense strand
ccacggugcuaaccuucau

SEQ ID NO: 2168695 - RNA, 19 nt, Homo sapiens
  misc_RNA (1)...(19): siRNA sense strand
gguacaaccagcucugaug

SEQ ID NO: 2168696 - RNA, 19 nt, Homo sapiens
  misc_RNA (1)...(19): siRNA sense strand
cugcuaguguauccaauau

SEQ ID NO: 2168697 - RNA, 19 nt, Homo sapiens
  misc_RNA (1)...(19): siRNA sense strand
cauaagucuccugauaaua

SEQ ID NO: 2168698 - RNA, 19 nt, Homo sapiens
  misc_RNA (1)...(19): siRNA sense strand
gagacugccacaaguuuca

SEQ ID NO: 2168699 - RNA, 19 nt, Homo sapiens
  misc_RNA (1)...(19): siRNA sense strand
ccaggugaauuuuguggua

SEQ ID NO: 2168700 - RNA, 19 nt, Homo sapiens
  misc_RNA (1)...(19): siRNA sense strand
cucagaagaucacaaccuu

SEQ ID NO: 2168701 - RNA, 19 nt, Homo sapiens
  misc_RNA (1)...(19): siRNA sense strand
guuugcugcuuucugguuu

SEQ ID NO: 2168702 - RNA, 19 nt, Homo sapiens
  misc_RNA (1)...(19): siRNA sense strand
cuuacaauaugccacauca

SEQ ID NO: 2168703 - RNA, 19 nt, Homo sapiens
  misc_RNA (1)...(19): siRNA sense strand
aaugugcuaugcaaucaug

SEQ ID NO: 2168704 - RNA, 19 nt, Homo sapiens
  misc_RNA (1)...(19): siRNA sense strand
accaucagcuuauacaagu

SEQ ID NO: 2168705 - RNA, 19 nt, Homo sapiens
  misc_RNA (1)...(19): siRNA sense strand
gcugaacaacaucgacuug

SEQ ID NO: 2168706 - RNA, 19 nt, Homo sapiens
  misc_RNA (1)...(19): siRNA sense strand
cacaucagccgaauauaca

SEQ ID NO: 2168707 - RNA, 19 nt, Homo sapiens
  misc_RNA (1)...(19): siRNA sense strand
caagucagcucagaugauu

SEQ ID NO: 2168708 - RNA, 19 nt, Homo sapiens
  misc_RNA (1)...(19): siRNA sense strand
gaagagcucuagccaacug

SEQ ID NO: 2168709 - RNA, 19 nt, Homo sapiens
  misc_RNA (1)...(19): siRNA sense strand
gaagaagaaaguaaaguug

SEQ ID NO: 2168710 - RNA, 19 nt, Homo sapiens
  misc_RNA (1)...(19): siRNA sense strand
ggauauaccuccucuuugc

SEQ ID NO: 2168711 - RNA, 19 nt, Homo sapiens
  misc_RNA (1)...(19): siRNA sense strand
gaaaguaaaguuggaaguu

SEQ ID NO: 2168712 - RNA, 19 nt, Homo sapiens
  misc_RNA (1)...(19): siRNA sense strand
ggauguggauacaauuuau

SEQ ID NO: 2168713 - RNA, 19 nt, Homo sapiens
  misc_RNA (1)...(19): siRNA sense strand
gagaaagcauaaaggaugu

SEQ ID NO: 2168714 - RNA, 19 nt, Homo sapiens
  misc_RNA (1)...(19): siRNA sense strand
cacaggaaauccagaauug

SEQ ID NO: 2168715 - RNA, 19 nt, Homo sapiens
  misc_RNA (1)...(19): siRNA sense strand
gaaagcauaaaggauguua

SEQ ID NO: 2168716 - RNA, 19 nt, Homo sapiens
  misc_RNA (1)...(19): siRNA sense strand
gcaguucuccuucuuccua

SEQ ID NO: 2168717 - RNA, 19 nt, Homo sapiens
  misc_RNA (1)...(19): siRNA sense strand
gaagcaggcucagcugugu

SEQ ID NO: 2168718 - RNA, 19 nt, Homo sapiens
  misc_RNA (1)...(19): siRNA sense strand
ggagauucauggcgucguu

SEQ ID NO: 2168719 - RNA, 19 nt, Homo sapiens
  misc_RNA (1)...(19): siRNA sense strand
ccaccaagcucgaguuaac

SEQ ID NO: 2168720 - RNA, 19 nt, Homo sapiens
  misc_RNA (1)...(19): siRNA sense strand
gcaguguggucccugaaga

SEQ ID NO: 2168721 - RNA, 19 nt, Homo sapiens
  misc_RNA (1)...(19): siRNA sense strand
aaaguauacuagcuggaua

SEQ ID NO: 2168722 - RNA, 19 nt, Homo sapiens
  misc_RNA (1)...(19): siRNA sense strand
acugagaagugcagcauuu

SEQ ID NO: 2168723 - RNA, 19 nt, Homo sapiens
  misc_RNA (1)...(19): siRNA sense strand
gggauguggauacaauuua

SEQ ID NO: 2168724 - RNA, 19 nt, Homo sapiens
  misc_RNA (1)...(19): siRNA sense strand
gcaccugccugaggaagau

SEQ ID NO: 2168725 - RNA, 19 nt, Homo sapiens
  misc_RNA (1)...(19): siRNA sense strand
gauauuuccuggccucucu

SEQ ID NO: 2168726 - RNA, 19 nt, Homo sapiens
  misc_RNA (1)...(19): siRNA sense strand
gaagaaaguaaaguuggaa

SEQ ID NO: 2168727 - RNA, 19 nt, Homo sapiens
  misc_RNA (1)...(19): siRNA sense strand
agaagaaaguaaaguugga

SEQ ID NO: 2168728 - RNA, 19 nt, Homo sapiens
  misc_RNA (1)...(19): siRNA sense strand
uaagggagacaaaguugaa

SEQ ID NO: 2168729 - RNA, 19 nt, Homo sapiens
  misc_RNA (1)...(19): siRNA sense strand
ccacaggaaauccagaauu

SEQ ID NO: 2168730 - RNA, 19 nt, Homo sapiens
  misc_RNA (1)...(19): siRNA sense strand
ucagauguaugccuguguu

SEQ ID NO: 2168731 - RNA, 19 nt, Homo sapiens
  misc_RNA (1)...(19): siRNA sense strand
ugccgagccuuccuuguaa

SEQ ID NO: 2168732 - RNA, 19 nt, Homo sapiens
  misc_RNA (1)...(19): siRNA sense strand
ggaaguuaagggagacaaa

SEQ ID NO: 2168733 - RNA, 19 nt, Homo sapiens
  misc_RNA (1)...(19): siRNA sense strand
acaaagugcugguccuuac

SEQ ID NO: 2168734 - RNA, 19 nt, Homo sapiens
  misc_RNA (1)...(19): siRNA sense strand
gaguuaaccuucagcuacu

SEQ ID NO: 2168735 - RNA, 19 nt, Homo sapiens
  misc_RNA (1)...(19): siRNA sense strand
gcucagcugugucuguagu

SEQ ID NO: 2168736 - RNA, 19 nt, Homo sapiens
  misc_RNA (1)...(19): siRNA sense strand
gauguaugccuguguuugu

SEQ ID NO: 2168737 - RNA, 19 nt, Homo sapiens
  misc_RNA (1)...(19): siRNA sense strand
gcaagucagcucagaugau

SEQ ID NO: 2168738 - RNA, 19 nt, Homo sapiens
  misc_RNA (1)...(19): siRNA sense strand
gagacaaaguugaaaacaa

SEQ ID NO: 2168739 - RNA, 19 nt, Homo sapiens
  misc_RNA (1)...(19): siRNA sense strand
caagacaccagggaauuga

SEQ ID NO: 2168740 - RNA, 19 nt, Homo sapiens
  misc_RNA (1)...(19): siRNA sense strand
gauguuauuggcagaaaga

SEQ ID NO: 2168741 - RNA, 19 nt, Homo sapiens
  misc_RNA (1)...(19): siRNA sense strand
ggagcucagggaagucaua

SEQ ID NO: 2168742 - RNA, 19 nt, Homo sapiens
  misc_RNA (1)...(19): siRNA sense strand
gggaagucauagggaguuu

SEQ ID NO: 2168743 - RNA, 19 nt, Homo sapiens
  misc_RNA (1)...(19): siRNA sense strand
gcuuagagcaguucuccuu

SEQ ID NO: 2168744 - RNA, 19 nt, Homo sapiens
  misc_RNA (1)...(19): siRNA sense strand
aaugggauguggauacaau

SEQ ID NO: 2168745 - RNA, 19 nt, Homo sapiens
  misc_RNA (1)...(19): siRNA sense strand
ucagugaagaagaaaguaa

SEQ ID NO: 2168746 - RNA, 19 nt, Homo sapiens
  misc_RNA (1)...(19): siRNA sense strand
cagcaagucagcucagaug

SEQ ID NO: 2168747 - RNA, 19 nt, Homo sapiens
  misc_RNA (1)...(19): siRNA sense strand
uagagcaguucuccuucuu

SEQ ID NO: 2168748 - RNA, 19 nt, Homo sapiens
  misc_RNA (1)...(19): siRNA sense strand
cuggauauaccuccucuuu

SEQ ID NO: 2168749 - RNA, 19 nt, Homo sapiens
  misc_RNA (1)...(19): siRNA sense strand
gaagucauagggaguuugg

SEQ ID NO: 2168750 - RNA, 19 nt, Homo sapiens
  misc_RNA (1)...(19): siRNA sense strand
ccaagacaccagggaauug

SEQ ID NO: 2168751 - RNA, 19 nt, Homo sapiens
  misc_RNA (1)...(19): siRNA sense strand
ucagcuacuuggagauuca

SEQ ID NO: 2168752 - RNA, 19 nt, Homo sapiens
  misc_RNA (1)...(19): siRNA sense strand
gaaguuaagggagacaaag

SEQ ID NO: 2168753 - RNA, 19 nt, Homo sapiens
  misc_RNA (1)...(19): siRNA sense strand
ccuaaagccuccaguucuc

SEQ ID NO: 2168754 - RNA, 19 nt, Homo sapiens
  misc_RNA (1)...(19): siRNA sense strand
gcucagaugauuguggaaa

SEQ ID NO: 2168755 - RNA, 19 nt, Homo sapiens
  misc_RNA (1)...(19): siRNA sense strand
acaaugggauguggauaca

SEQ ID NO: 2168756 - RNA, 19 nt, Homo sapiens
  misc_RNA (1)...(19): siRNA sense strand
aggcucagcugugucugua

SEQ ID NO: 2168757 - RNA, 19 nt, Homo sapiens
  misc_RNA (1)...(19): siRNA sense strand
uacggaagauggugaagca

SEQ ID NO: 2168758 - RNA, 19 nt, Homo sapiens
  misc_RNA (1)...(19): siRNA sense strand
guuaagggagacaaaguug

SEQ ID NO: 2168759 - RNA, 19 nt, Homo sapiens
  misc_RNA (1)...(19): siRNA sense strand
gugcagcauuuccaugaag

SEQ ID NO: 2168760 - RNA, 19 nt, Homo sapiens
  misc_RNA (1)...(19): siRNA sense strand
gaccacaggaaauccagaa

SEQ ID NO: 2168761 - RNA, 19 nt, Homo sapiens
  misc_RNA (1)...(19): siRNA sense strand
guucuccuucuuccuauaa

SEQ ID NO: 2168762 - RNA, 19 nt, Homo sapiens
  misc_RNA (1)...(19): siRNA sense strand
guacaaugggauguggaua

SEQ ID NO: 2168763 - RNA, 19 nt, Homo sapiens
  misc_RNA (1)...(19): siRNA sense strand
cagugaagaagaaaguaaa

SEQ ID NO: 2168764 - RNA, 19 nt, Homo sapiens
  misc_RNA (1)...(19): siRNA sense strand
ggccuaaagccuccaguuc

SEQ ID NO: 2168765 - RNA, 19 nt, Homo sapiens
  misc_RNA (1)...(19): siRNA sense strand
agaugauuguggaaacuga

SEQ ID NO: 2168766 - RNA, 19 nt, Homo sapiens
  misc_RNA (1)...(19): siRNA sense strand
caucuugaccacaggaaau

SEQ ID NO: 2168767 - RNA, 19 nt, Homo sapiens
  misc_RNA (1)...(19): siRNA sense strand
gcgagaaagcauaaaggau

SEQ ID NO: 2168768 - RNA, 19 nt, Homo sapiens
  misc_RNA (1)...(19): siRNA sense strand
auacagggaagaaguacaa

SEQ ID NO: 2168769 - RNA, 19 nt, Homo sapiens
  misc_RNA (1)...(19): siRNA sense strand
gagaagugcagcauuucca

SEQ ID NO: 2168770 - RNA, 19 nt, Homo sapiens
  misc_RNA (1)...(19): siRNA sense strand
cagggaagaaguacaaugg

SEQ ID NO: 2168771 - RNA, 19 nt, Homo sapiens
  misc_RNA (1)...(19): siRNA sense strand
caggaaauccagaauugca

SEQ ID NO: 2168772 - RNA, 19 nt, Homo sapiens
  misc_RNA (1)...(19): siRNA sense strand
guuugugacuggcuuggau

SEQ ID NO: 2168773 - RNA, 19 nt, Homo sapiens
  misc_RNA (1)...(19): siRNA sense strand
ggauguuauuggcagaaag

SEQ ID NO: 2168774 - RNA, 19 nt, Homo sapiens
  misc_RNA (1)...(19): siRNA sense strand
aaacaaagugcugguccuu

SEQ ID NO: 2168775 - RNA, 19 nt, Homo sapiens
  misc_RNA (1)...(19): siRNA sense strand
ucagcugugucuguaguug

SEQ ID NO: 2168776 - RNA, 19 nt, Homo sapiens
  misc_RNA (1)...(19): siRNA sense strand
ccagugagaaucaugaaaa

SEQ ID NO: 2168777 - RNA, 19 nt, Homo sapiens
  misc_RNA (1)...(19): siRNA sense strand
uuagagcaguucuccuucu

SEQ ID NO: 2168778 - RNA, 19 nt, Homo sapiens
  misc_RNA (1)...(19): siRNA sense strand
gccuaaagccuccaguucu

SEQ ID NO: 2168779 - RNA, 19 nt, Homo sapiens
  misc_RNA (1)...(19): siRNA sense strand
augccgagccuuccuugua

SEQ ID NO: 2168780 - RNA, 19 nt, Homo sapiens
  misc_RNA (1)...(19): siRNA sense strand
gcagcaagucagcucagau

SEQ ID NO: 2168781 - RNA, 19 nt, Homo sapiens
  misc_RNA (1)...(19): siRNA sense strand
gauauaccuccucuuugca

SEQ ID NO: 2168782 - RNA, 19 nt, Homo sapiens
  misc_RNA (1)...(19): siRNA sense strand
ggaagucauagggaguuug

SEQ ID NO: 2168783 - RNA, 19 nt, Homo sapiens
  misc_RNA (1)...(19): siRNA sense strand
gggccuaaagccuccaguu

SEQ ID NO: 2168784 - RNA, 19 nt, Homo sapiens
  misc_RNA (1)...(19): siRNA sense strand
gaagugaaaucucuuauac

SEQ ID NO: 2168785 - RNA, 19 nt, Homo sapiens
  misc_RNA (1)...(19): siRNA sense strand
agagagaccuuaugaaugu

SEQ ID NO: 2168786 - RNA, 19 nt, Homo sapiens
  misc_RNA (1)...(19): siRNA sense strand
ugacugugcuggaggauuu

SEQ ID NO: 2168787 - RNA, 19 nt, Homo sapiens
  misc_RNA (1)...(19): siRNA sense strand
ggagagagaccuuaugaau

SEQ ID NO: 2168788 - RNA, 19 nt, Homo sapiens
  misc_RNA (1)...(19): siRNA sense strand
ggagagacccuauaucugu

SEQ ID NO: 2168789 - RNA, 19 nt, Homo sapiens
  misc_RNA (1)...(19): siRNA sense strand
gaacaggaagaguuuguaa

SEQ ID NO: 2168790 - RNA, 19 nt, Homo sapiens
  misc_RNA (1)...(19): siRNA sense strand
gaccagagaugcacaccaa

SEQ ID NO: 2168791 - RNA, 19 nt, Homo sapiens
  misc_RNA (1)...(19): siRNA sense strand
ugagaagccuuaugaaugu

SEQ ID NO: 2168792 - RNA, 19 nt, Homo sapiens
  misc_RNA (1)...(19): siRNA sense strand
gagagacccuauaucugua

SEQ ID NO: 2168793 - RNA, 19 nt, Homo sapiens
  misc_RNA (1)...(19): siRNA sense strand
ggaagugaaaucucuuaua

SEQ ID NO: 2168794 - RNA, 19 nt, Homo sapiens
  misc_RNA (1)...(19): siRNA sense strand
gcucaggagucaucaaaug

SEQ ID NO: 2168795 - RNA, 19 nt, Homo sapiens
  misc_RNA (1)...(19): siRNA sense strand
gcaagaacuucauuuacca

SEQ ID NO: 2168796 - RNA, 19 nt, Homo sapiens
  misc_RNA (1)...(19): siRNA sense strand
aaucaggccugucaagaaa

SEQ ID NO: 2168797 - RNA, 19 nt, Homo sapiens
  misc_RNA (1)...(19): siRNA sense strand
gaaucaggccugucaagaa

SEQ ID NO: 2168798 - RNA, 19 nt, Homo sapiens
  misc_RNA (1)...(19): siRNA sense strand
gaacuucauuuaccauugc

SEQ ID NO: 2168799 - RNA, 19 nt, Homo sapiens
  misc_RNA (1)...(19): siRNA sense strand
gacguucaguccucauuaa

SEQ ID NO: 2168800 - RNA, 19 nt, Homo sapiens
  misc_RNA (1)...(19): siRNA sense strand
gaagagcaacuuggguaua

SEQ ID NO: 2168801 - RNA, 19 nt, Homo sapiens
  misc_RNA (1)...(19): siRNA sense strand
ucaggccugucaagaaaua

SEQ ID NO: 2168802 - RNA, 19 nt, Homo sapiens
  misc_RNA (1)...(19): siRNA sense strand
aagagcaacuuggguauaa

SEQ ID NO: 2168803 - RNA, 19 nt, Homo sapiens
  misc_RNA (1)...(19): siRNA sense strand
gagagagaccuuaugaaug

SEQ ID NO: 2168804 - RNA, 19 nt, Homo sapiens
  misc_RNA (1)...(19): siRNA sense strand
gugagaagccuuaugaaug

SEQ ID NO: 2168805 - RNA, 19 nt, Homo sapiens
  misc_RNA (1)...(19): siRNA sense strand
gcaaagccuucagccagaa

SEQ ID NO: 2168806 - RNA, 19 nt, Homo sapiens
  misc_RNA (1)...(19): siRNA sense strand
caacuuggguauaauuugc

SEQ ID NO: 2168807 - RNA, 19 nt, Homo sapiens
  misc_RNA (1)...(19): siRNA sense strand
ggacuuggaauguggaguu

SEQ ID NO: 2168808 - RNA, 19 nt, Homo sapiens
  misc_RNA (1)...(19): siRNA sense strand
gagcaacuuggguauaauu

SEQ ID NO: 2168809 - RNA, 19 nt, Homo sapiens
  misc_RNA (1)...(19): siRNA sense strand
agagagaucuuucguagac

SEQ ID NO: 2168810 - RNA, 19 nt, Homo sapiens
  misc_RNA (1)...(19): siRNA sense strand
aggaagaguuuguaaagga

SEQ ID NO: 2168811 - RNA, 19 nt, Homo sapiens
  misc_RNA (1)...(19): siRNA sense strand
ucaaaugaccaauuccaaa

SEQ ID NO: 2168812 - RNA, 19 nt, Homo sapiens
  misc_RNA (1)...(19): siRNA sense strand
gacccuauaucuguaguga

SEQ ID NO: 2168813 - RNA, 19 nt, Homo sapiens
  misc_RNA (1)...(19): siRNA sense strand
cgagaggugugcccaguuc

SEQ ID NO: 2168814 - RNA, 19 nt, Homo sapiens
  misc_RNA (1)...(19): siRNA sense strand
gacuuggaauguggaguua

SEQ ID NO: 2168815 - RNA, 19 nt, Homo sapiens
  misc_RNA (1)...(19): siRNA sense strand
acccagaauuccauccuua

SEQ ID NO: 2168816 - RNA, 19 nt, Homo sapiens
  misc_RNA (1)...(19): siRNA sense strand
ugaagaauguggcaagaac

SEQ ID NO: 2168817 - RNA, 19 nt, Homo sapiens
  misc_RNA (1)...(19): siRNA sense strand
gaacacacacaggugagaa

SEQ ID NO: 2168818 - RNA, 19 nt, Homo sapiens
  misc_RNA (1)...(19): siRNA sense strand
agaaauaacccucauacca

SEQ ID NO: 2168819 - RNA, 19 nt, Homo sapiens
  misc_RNA (1)...(19): siRNA sense strand
guggcaagaacuucauuua

SEQ ID NO: 2168820 - RNA, 19 nt, Homo sapiens
  misc_RNA (1)...(19): siRNA sense strand
guucaguccucauuaagca

SEQ ID NO: 2168821 - RNA, 19 nt, Homo sapiens
  misc_RNA (1)...(19): siRNA sense strand
gcaacuuggguauaauuug

SEQ ID NO: 2168822 - RNA, 19 nt, Homo sapiens
  misc_RNA (1)...(19): siRNA sense strand
ggugagaagccuuaugaau

SEQ ID NO: 2168823 - RNA, 19 nt, Homo sapiens
  misc_RNA (1)...(19): siRNA sense strand
caggugagaagccuuauga

SEQ ID NO: 2168824 - RNA, 19 nt, Homo sapiens
  misc_RNA (1)...(19): siRNA sense strand
caagaaauaacccucauac

SEQ ID NO: 2168825 - RNA, 19 nt, Homo sapiens
  misc_RNA (1)...(19): siRNA sense strand
ggcaagaacuucauuuacc

SEQ ID NO: 2168826 - RNA, 19 nt, Homo sapiens
  misc_RNA (1)...(19): siRNA sense strand
caggagcucugccaucagu

SEQ ID NO: 2168827 - RNA, 19 nt, Homo sapiens
  misc_RNA (1)...(19): siRNA sense strand
cgacguucaguccucauua

SEQ ID NO: 2168828 - RNA, 19 nt, Homo sapiens
  misc_RNA (1)...(19): siRNA sense strand
acacaggugagaagccuua

SEQ ID NO: 2168829 - RNA, 19 nt, Homo sapiens
  misc_RNA (1)...(19): siRNA sense strand
cccuauaucuguagugaau

SEQ ID NO: 2168830 - RNA, 19 nt, Homo sapiens
  misc_RNA (1)...(19): siRNA sense strand
ggaagagcaacuuggguau

SEQ ID NO: 2168831 - RNA, 19 nt, Homo sapiens
  misc_RNA (1)...(19): siRNA sense strand
ccagaggucaggccuauuc

SEQ ID NO: 2168832 - RNA, 19 nt, Homo sapiens
  misc_RNA (1)...(19): siRNA sense strand
gcuggaggauuuggagaga

SEQ ID NO: 2168833 - RNA, 19 nt, Homo sapiens
  misc_RNA (1)...(19): siRNA sense strand
cauuuaccauugcaaccua

SEQ ID NO: 2168834 - RNA, 19 nt, Homo sapiens
  misc_RNA (1)...(19): siRNA sense strand
gaauguggcaagaacuuca

SEQ ID NO: 2168835 - RNA, 19 nt, Homo sapiens
  misc_RNA (1)...(19): siRNA sense strand
ucauuaagcaucagagaau

SEQ ID NO: 2168836 - RNA, 19 nt, Homo sapiens
  misc_RNA (1)...(19): siRNA sense strand
caggaagugaaaucucuua

SEQ ID NO: 2168837 - RNA, 19 nt, Homo sapiens
  misc_RNA (1)...(19): siRNA sense strand
gugcccaguucaagagauu

SEQ ID NO: 2168838 - RNA, 19 nt, Homo sapiens
  misc_RNA (1)...(19): siRNA sense strand
ucaagaaauaacccucaua

SEQ ID NO: 2168839 - RNA, 19 nt, Homo sapiens
  misc_RNA (1)...(19): siRNA sense strand
cuauaucuguagugaaugu

SEQ ID NO: 2168840 - RNA, 19 nt, Homo sapiens
  misc_RNA (1)...(19): siRNA sense strand
agaacuucauuuaccauug

SEQ ID NO: 2168841 - RNA, 19 nt, Homo sapiens
  misc_RNA (1)...(19): siRNA sense strand
cauuaagcaucagagaauu

SEQ ID NO: 2168842 - RNA, 19 nt, Homo sapiens
  misc_RNA (1)...(19): siRNA sense strand
gcaaucagugcaauaagag

SEQ ID NO: 2168843 - RNA, 19 nt, Homo sapiens
  misc_RNA (1)...(19): siRNA sense strand
caaaugaccaauuccaaac

SEQ ID NO: 2168844 - RNA, 19 nt, Homo sapiens
  misc_RNA (1)...(19): siRNA sense strand
uuaugaaugugaugagugu

SEQ ID NO: 2168845 - RNA, 19 nt, Homo sapiens
  misc_RNA (1)...(19): siRNA sense strand
agaauuccauccuuaucga

SEQ ID NO: 2168846 - RNA, 19 nt, Homo sapiens
  misc_RNA (1)...(19): siRNA sense strand
guggagagacccuauaucu

SEQ ID NO: 2168847 - RNA, 19 nt, Homo sapiens
  misc_RNA (1)...(19): siRNA sense strand
uggagcaguuccugacuau

SEQ ID NO: 2168848 - RNA, 19 nt, Homo sapiens
  misc_RNA (1)...(19): siRNA sense strand
cagcucaggagucaucaaa

SEQ ID NO: 2168849 - RNA, 19 nt, Homo sapiens
  misc_RNA (1)...(19): siRNA sense strand
uggaggauuuggagagaga

SEQ ID NO: 2168850 - RNA, 19 nt, Homo sapiens
  misc_RNA (1)...(19): siRNA sense strand
ucaugaacaggaagaguuu

SEQ ID NO: 2168851 - RNA, 19 nt, Homo sapiens
  misc_RNA (1)...(19): siRNA sense strand
gagaagccuuaugaaugug

SEQ ID NO: 2168852 - RNA, 19 nt, Homo sapiens
  misc_RNA (1)...(19): siRNA sense strand
gcaaagggugagcucuuca

SEQ ID NO: 2168853 - RNA, 19 nt, Homo sapiens
  misc_RNA (1)...(19): siRNA sense strand
gaagguaaaggaggaagag

SEQ ID NO: 2168854 - RNA, 19 nt, Homo sapiens
  misc_RNA (1)...(19): siRNA sense strand
uccaggagcucugccauca

SEQ ID NO: 2168855 - RNA, 19 nt, Homo sapiens
  misc_RNA (1)...(19): siRNA sense strand
acaggaagaguuuguaaag

SEQ ID NO: 2168856 - RNA, 19 nt, Homo sapiens
  misc_RNA (1)...(19): siRNA sense strand
gagaccuuaugaaugugaa

SEQ ID NO: 2168857 - RNA, 19 nt, Homo sapiens
  misc_RNA (1)...(19): siRNA sense strand
ggaaaacagaaugguaaua

SEQ ID NO: 2168858 - RNA, 19 nt, Homo sapiens
  misc_RNA (1)...(19): siRNA sense strand
ccauaaccuugacccuuca

SEQ ID NO: 2168859 - RNA, 19 nt, Homo sapiens
  misc_RNA (1)...(19): siRNA sense strand
gccagaaucaggccuguca

SEQ ID NO: 2168860 - RNA, 19 nt, Homo sapiens
  misc_RNA (1)...(19): siRNA sense strand
cuggagcaguuccugacua

SEQ ID NO: 2168861 - RNA, 19 nt, Homo sapiens
  misc_RNA (1)...(19): siRNA sense strand
gaagccuuaugaaugugau

SEQ ID NO: 2168862 - RNA, 19 nt, Homo sapiens
  misc_RNA (1)...(19): siRNA sense strand
cgugagggcagauuggaaa

SEQ ID NO: 2168863 - RNA, 19 nt, Homo sapiens
  misc_RNA (1)...(19): siRNA sense strand
gagcaguuccugacuaucc

SEQ ID NO: 2168864 - RNA, 19 nt, Homo sapiens
  misc_RNA (1)...(19): siRNA sense strand
ggaggaagaggaggaacau

SEQ ID NO: 2168865 - RNA, 19 nt, Homo sapiens
  misc_RNA (1)...(19): siRNA sense strand
caggaagaguuuguaaagg

SEQ ID NO: 2168866 - RNA, 19 nt, Homo sapiens
  misc_RNA (1)...(19): siRNA sense strand
aggaagaggaggaacauuc

SEQ ID NO: 2168867 - RNA, 19 nt, Homo sapiens
  misc_RNA (1)...(19): siRNA sense strand
guagacgcuucaggcaguu

SEQ ID NO: 2168868 - RNA, 19 nt, Homo sapiens
  misc_RNA (1)...(19): siRNA sense strand
gaagaauguggcaagaacu

SEQ ID NO: 2168869 - RNA, 19 nt, Homo sapiens
  misc_RNA (1)...(19): siRNA sense strand
gagagaccuuaugaaugug

SEQ ID NO: 2168870 - RNA, 19 nt, Homo sapiens
  misc_RNA (1)...(19): siRNA sense strand
cagagaugcacaccaagga

SEQ ID NO: 2168871 - RNA, 19 nt, Homo sapiens
  misc_RNA (1)...(19): siRNA sense strand
ucaguggagagacccuaua

SEQ ID NO: 2168872 - RNA, 19 nt, Homo sapiens
  misc_RNA (1)...(19): siRNA sense strand
cuggagagagaccuuauga

SEQ ID NO: 2168873 - RNA, 19 nt, Homo sapiens
  misc_RNA (1)...(19): siRNA sense strand
ugaacaggaagaguuugua

SEQ ID NO: 2168874 - RNA, 19 nt, Homo sapiens
  misc_RNA (1)...(19): siRNA sense strand
gucaagaaauaacccucau

SEQ ID NO: 2168875 - RNA, 19 nt, Homo sapiens
  misc_RNA (1)...(19): siRNA sense strand
caucaccucagaauucaca

SEQ ID NO: 2168876 - RNA, 19 nt, Homo sapiens
  misc_RNA (1)...(19): siRNA sense strand
aagaguuuguaaaggagaa

SEQ ID NO: 2168877 - RNA, 19 nt, Homo sapiens
  misc_RNA (1)...(19): siRNA sense strand
ugugaagaauguggcaaga

SEQ ID NO: 2168878 - RNA, 19 nt, Homo sapiens
  misc_RNA (1)...(19): siRNA sense strand
ccagaauuccauccuuauc

SEQ ID NO: 2168879 - RNA, 19 nt, Homo sapiens
  misc_RNA (1)...(19): siRNA sense strand
gagcaccagagaacacaca

SEQ ID NO: 2168880 - RNA, 19 nt, Homo sapiens
  misc_RNA (1)...(19): siRNA sense strand
ccuaauccagcaucggaaa

SEQ ID NO: 2168881 - RNA, 19 nt, Homo sapiens
  misc_RNA (1)...(19): siRNA sense strand
gugaagaauguggcaagaa

SEQ ID NO: 2168882 - RNA, 19 nt, Homo sapiens
  misc_RNA (1)...(19): siRNA sense strand
aauucacacuggagagaga

SEQ ID NO: 2168883 - RNA, 19 nt, Homo sapiens
  misc_RNA (1)...(19): siRNA sense strand
aaucagugcaauaagaguu

SEQ ID NO: 2168884 - RNA, 19 nt, Homo sapiens
  misc_RNA (1)...(19): siRNA sense strand
ggagaaaccuuaugaaugu

SEQ ID NO: 2168885 - RNA, 19 nt, Homo sapiens
  misc_RNA (1)...(19): siRNA sense strand
agagugagcucaaaucuua

SEQ ID NO: 2168886 - RNA, 19 nt, Homo sapiens
  misc_RNA (1)...(19): siRNA sense strand
ggagaagccuuacaaaugu

SEQ ID NO: 2168887 - RNA, 19 nt, Homo sapiens
  misc_RNA (1)...(19): siRNA sense strand
gcagauaucacacuaauga

SEQ ID NO: 2168888 - RNA, 19 nt, Homo sapiens
  misc_RNA (1)...(19): siRNA sense strand
gaaagaaggcucugaggaa

SEQ ID NO: 2168889 - RNA, 19 nt, Homo sapiens
  misc_RNA (1)...(19): siRNA sense strand
gagagaagccucacaaaug

SEQ ID NO: 2168890 - RNA, 19 nt, Homo sapiens
  misc_RNA (1)...(19): siRNA sense strand
gcaagcagauaucacacua

SEQ ID NO: 2168891 - RNA, 19 nt, Homo sapiens
  misc_RNA (1)...(19): siRNA sense strand
ggagaagccuacuggauga

SEQ ID NO: 2168892 - RNA, 19 nt, Homo sapiens
  misc_RNA (1)...(19): siRNA sense strand
agagaaaccuuacaaaugu

SEQ ID NO: 2168893 - RNA, 19 nt, Homo sapiens
  misc_RNA (1)...(19): siRNA sense strand
ggacauaagcgaguucaua

SEQ ID NO: 2168894 - RNA, 19 nt, Homo sapiens
  misc_RNA (1)...(19): siRNA sense strand
gagagaaaccuuacaaaug

SEQ ID NO: 2168895 - RNA, 19 nt, Homo sapiens
  misc_RNA (1)...(19): siRNA sense strand
ggaaagcgcucuauuaccu

SEQ ID NO: 2168896 - RNA, 19 nt, Homo sapiens
  misc_RNA (1)...(19): siRNA sense strand
gauccacacugaagagaaa

SEQ ID NO: 2168897 - RNA, 19 nt, Homo sapiens
  misc_RNA (1)...(19): siRNA sense strand
gggagaagccuuacaaaug

SEQ ID NO: 2168898 - RNA, 19 nt, Homo sapiens
  misc_RNA (1)...(19): siRNA sense strand
ggauguagcugugaacuuc

SEQ ID NO: 2168899 - RNA, 19 nt, Homo sapiens
  misc_RNA (1)...(19): siRNA sense strand
guucagaccucaccaaaca

SEQ ID NO: 2168900 - RNA, 19 nt, Homo sapiens
  misc_RNA (1)...(19): siRNA sense strand
gcacagaaacuccaugaau

SEQ ID NO: 2168901 - RNA, 19 nt, Homo sapiens
  misc_RNA (1)...(19): siRNA sense strand
gacaagauguggccugaga

SEQ ID NO: 2168902 - RNA, 19 nt, Homo sapiens
  misc_RNA (1)...(19): siRNA sense strand
gcgcagggcucaugaacga

SEQ ID NO: 2168903 - RNA, 19 nt, Homo sapiens
  misc_RNA (1)...(19): siRNA sense strand
ucaggaaagcgcucuauua

SEQ ID NO: 2168904 - RNA, 19 nt, Homo sapiens
  misc_RNA (1)...(19): siRNA sense strand
gcucaaaggcaucucuaua

SEQ ID NO: 2168905 - RNA, 19 nt, Homo sapiens
  misc_RNA (1)...(19): siRNA sense strand
ggagagaaaccuuacaaau

SEQ ID NO: 2168906 - RNA, 19 nt, Homo sapiens
  misc_RNA (1)...(19): siRNA sense strand
gggaaggcuuucaacagua

SEQ ID NO: 2168907 - RNA, 19 nt, Homo sapiens
  misc_RNA (1)...(19): siRNA sense strand
gcacucagaucuaauucuc

SEQ ID NO: 2168908 - RNA, 19 nt, Homo sapiens
  misc_RNA (1)...(19): siRNA sense strand
ggaaaagacuucagcauca

SEQ ID NO: 2168909 - RNA, 19 nt, Homo sapiens
  misc_RNA (1)...(19): siRNA sense strand
ucuauuaccugcuccauau

SEQ ID NO: 2168910 - RNA, 19 nt, Homo sapiens
  misc_RNA (1)...(19): siRNA sense strand
gggagaagcccuaucaaug

SEQ ID NO: 2168911 - RNA, 19 nt, Homo sapiens
  misc_RNA (1)...(19): siRNA sense strand
gggagaaacugagagaaga

SEQ ID NO: 2168912 - RNA, 19 nt, Homo sapiens
  misc_RNA (1)...(19): siRNA sense strand
aaaggcaucucuauaagga

SEQ ID NO: 2168913 - RNA, 19 nt, Homo sapiens
  misc_RNA (1)...(19): siRNA sense strand
ggaggaagaaggagaaguu

SEQ ID NO: 2168914 - RNA, 19 nt, Homo sapiens
  misc_RNA (1)...(19): siRNA sense strand
agagaagccucacaaaugu

SEQ ID NO: 2168915 - RNA, 19 nt, Homo sapiens
  misc_RNA (1)...(19): siRNA sense strand
acagaaggauccacacuga

SEQ ID NO: 2168916 - RNA, 19 nt, Homo sapiens
  misc_RNA (1)...(19): siRNA sense strand
aaacacaaacgaauccaua

SEQ ID NO: 2168917 - RNA, 19 nt, Homo sapiens
  misc_RNA (1)...(19): siRNA sense strand
ggagaagccauaugaaugu

SEQ ID NO: 2168918 - RNA, 19 nt, Homo sapiens
  misc_RNA (1)...(19): siRNA sense strand
cacagaaacuccaugaaug

SEQ ID NO: 2168919 - RNA, 19 nt, Homo sapiens
  misc_RNA (1)...(19): siRNA sense strand
ccuacuggaugaaauuuaa

SEQ ID NO: 2168920 - RNA, 19 nt, Homo sapiens
  misc_RNA (1)...(19): siRNA sense strand
gaccaaucaucgaagaauu

SEQ ID NO: 2168921 - RNA, 19 nt, Homo sapiens
  misc_RNA (1)...(19): siRNA sense strand
ggaaggcuuucaacaguag

SEQ ID NO: 2168922 - RNA, 19 nt, Homo sapiens
  misc_RNA (1)...(19): siRNA sense strand
aaacuugaauccaaacuca

SEQ ID NO: 2168923 - RNA, 19 nt, Homo sapiens
  misc_RNA (1)...(19): siRNA sense strand
gagaaaccuuacaaauguu

SEQ ID NO: 2168924 - RNA, 19 nt, Homo sapiens
  misc_RNA (1)...(19): siRNA sense strand
gggagaaaccuuaugaaug

SEQ ID NO: 2168925 - RNA, 19 nt, Homo sapiens
  misc_RNA (1)...(19): siRNA sense strand
ggagagaagccucacaaau

SEQ ID NO: 2168926 - RNA, 19 nt, Homo sapiens
  misc_RNA (1)...(19): siRNA sense strand
gaacaugguaucacuugga

SEQ ID NO: 2168927 - RNA, 19 nt, Homo sapiens
  misc_RNA (1)...(19): siRNA sense strand
gaacucaccaaacacagaa

SEQ ID NO: 2168928 - RNA, 19 nt, Homo sapiens
  misc_RNA (1)...(19): siRNA sense strand
gcucagaccuaagcaaaca

SEQ ID NO: 2168929 - RNA, 19 nt, Homo sapiens
  misc_RNA (1)...(19): siRNA sense strand
ggaagaaggagaaguugug

SEQ ID NO: 2168930 - RNA, 19 nt, Homo sapiens
  misc_RNA (1)...(19): siRNA sense strand
gagaagcccuaucaaugca

SEQ ID NO: 2168931 - RNA, 19 nt, Homo sapiens
  misc_RNA (1)...(19): siRNA sense strand
gaaacugagagaagagaaa

SEQ ID NO: 2168932 - RNA, 19 nt, Homo sapiens
  misc_RNA (1)...(19): siRNA sense strand
gggagaagccauaugaaug

SEQ ID NO: 2168933 - RNA, 19 nt, Homo sapiens
  misc_RNA (1)...(19): siRNA sense strand
ucaaaggcaucucuauaag

SEQ ID NO: 2168934 - RNA, 19 nt, Homo sapiens
  misc_RNA (1)...(19): siRNA sense strand
aaacaucaaguauggagua

SEQ ID NO: 2168935 - RNA, 19 nt, Homo sapiens
  misc_RNA (1)...(19): siRNA sense strand
aggcagaacucaccaaaca

SEQ ID NO: 2168936 - RNA, 19 nt, Homo sapiens
  misc_RNA (1)...(19): siRNA sense strand
gagcucagaccuaagcaaa

SEQ ID NO: 2168937 - RNA, 19 nt, Homo sapiens
  misc_RNA (1)...(19): siRNA sense strand
caaauuagagaaucaaugg

SEQ ID NO: 2168938 - RNA, 19 nt, Homo sapiens
  misc_RNA (1)...(19): siRNA sense strand
ggaugaaauuuaacagucu

SEQ ID NO: 2168939 - RNA, 19 nt, Homo sapiens
  misc_RNA (1)...(19): siRNA sense strand
gagaaguugugcuguugga

SEQ ID NO: 2168940 - RNA, 19 nt, Homo sapiens
  misc_RNA (1)...(19): siRNA sense strand
ggagaaaccuuuuaauugc

SEQ ID NO: 2168941 - RNA, 19 nt, Homo sapiens
  misc_RNA (1)...(19): siRNA sense strand
uguucaggaugucaaauua

SEQ ID NO: 2168942 - RNA, 19 nt, Homo sapiens
  misc_RNA (1)...(19): siRNA sense strand
gaaauuuaacagucuccua

SEQ ID NO: 2168943 - RNA, 19 nt, Homo sapiens
  misc_RNA (1)...(19): siRNA sense strand
caugguaucacuuggauuu

SEQ ID NO: 2168944 - RNA, 19 nt, Homo sapiens
  misc_RNA (1)...(19): siRNA sense strand
ggagaagcccuaucaaugc

SEQ ID NO: 2168945 - RNA, 19 nt, Homo sapiens
  misc_RNA (1)...(19): siRNA sense strand
gagaaucaaugggaaacau

SEQ ID NO: 2168946 - RNA, 19 nt, Homo sapiens
  misc_RNA (1)...(19): siRNA sense strand
gauguggccugagaaugaa

SEQ ID NO: 2168947 - RNA, 19 nt, Homo sapiens
  misc_RNA (1)...(19): siRNA sense strand
aagcagauaucacacuaau

SEQ ID NO: 2168948 - RNA, 19 nt, Homo sapiens
  misc_RNA (1)...(19): siRNA sense strand
acacugaagagaaacguua

SEQ ID NO: 2168949 - RNA, 19 nt, Homo sapiens
  misc_RNA (1)...(19): siRNA sense strand
gaagccuacuggaugaaau

SEQ ID NO: 2168950 - RNA, 19 nt, Homo sapiens
  misc_RNA (1)...(19): siRNA sense strand
aaaggcaaguucacaacaa

SEQ ID NO: 2168951 - RNA, 19 nt, Homo sapiens
  misc_RNA (1)...(19): siRNA sense strand
ggauuuccauuuccuaaac

SEQ ID NO: 2168952 - RNA, 19 nt, Homo sapiens
  misc_RNA (1)...(19): siRNA sense strand
caaauucauucuggugaga

SEQ ID NO: 2168953 - RNA, 19 nt, Homo sapiens
  misc_RNA (1)...(19): siRNA sense strand
caaugggaaacaucuauaa

SEQ ID NO: 2168954 - RNA, 19 nt, Homo sapiens
  misc_RNA (1)...(19): siRNA sense strand
ggaguacccaugaacuuga

SEQ ID NO: 2168955 - RNA, 19 nt, Homo sapiens
  misc_RNA (1)...(19): siRNA sense strand
aacaguagaucagcucuuu

SEQ ID NO: 2168956 - RNA, 19 nt, Homo sapiens
  misc_RNA (1)...(19): siRNA sense strand
agucggagcucagaccuaa

SEQ ID NO: 2168957 - RNA, 19 nt, Homo sapiens
  misc_RNA (1)...(19): siRNA sense strand
gcagaacucaccaaacaca

SEQ ID NO: 2168958 - RNA, 19 nt, Homo sapiens
  misc_RNA (1)...(19): siRNA sense strand
aaacaucuauaagggagaa

SEQ ID NO: 2168959 - RNA, 19 nt, Homo sapiens
  misc_RNA (1)...(19): siRNA sense strand
ucucagaccucaguaguca

SEQ ID NO: 2168960 - RNA, 19 nt, Homo sapiens
  misc_RNA (1)...(19): siRNA sense strand
ccagaaagugcuuaguaaa

SEQ ID NO: 2168961 - RNA, 19 nt, Homo sapiens
  misc_RNA (1)...(19): siRNA sense strand
accagaaagugcuuaguaa

SEQ ID NO: 2168962 - RNA, 19 nt, Homo sapiens
  misc_RNA (1)...(19): siRNA sense strand
gggagaaaccuuuuaauug

SEQ ID NO: 2168963 - RNA, 19 nt, Homo sapiens
  misc_RNA (1)...(19): siRNA sense strand
gaacuugaugggaguagga

SEQ ID NO: 2168964 - RNA, 19 nt, Homo sapiens
  misc_RNA (1)...(19): siRNA sense strand
ccauacaccugcagugagu

SEQ ID NO: 2168965 - RNA, 19 nt, Homo sapiens
  misc_RNA (1)...(19): siRNA sense strand
cucaaaggcaucucuauaa

SEQ ID NO: 2168966 - RNA, 19 nt, Homo sapiens
  misc_RNA (1)...(19): siRNA sense strand
gaaggauccacacugaaga

SEQ ID NO: 2168967 - RNA, 19 nt, Homo sapiens
  misc_RNA (1)...(19): siRNA sense strand
gaaaagacuucagcaucaa

SEQ ID NO: 2168968 - RNA, 19 nt, Homo sapiens
  misc_RNA (1)...(19): siRNA sense strand
cuauaaggaugugauguug

SEQ ID NO: 2168969 - RNA, 19 nt, Homo sapiens
  misc_RNA (1)...(19): siRNA sense strand
auaaggaugugauguugga

SEQ ID NO: 2168970 - RNA, 19 nt, Homo sapiens
  misc_RNA (1)...(19): siRNA sense strand
ccaggaaccgucucuguau

SEQ ID NO: 2168971 - RNA, 19 nt, Homo sapiens
  misc_RNA (1)...(19): siRNA sense strand
gagccaggcccaagaguca

SEQ ID NO: 2168972 - RNA, 19 nt, Homo sapiens
  misc_RNA (1)...(19): siRNA sense strand
aagaggagggucugugaua

SEQ ID NO: 2168973 - RNA, 19 nt, Homo sapiens
  misc_RNA (1)...(19): siRNA sense strand
gggaacaugguaucacuug

SEQ ID NO: 2168974 - RNA, 19 nt, Homo sapiens
  misc_RNA (1)...(19): siRNA sense strand
gaccucaccaaacacauaa

SEQ ID NO: 2168975 - RNA, 19 nt, Homo sapiens
  misc_RNA (1)...(19): siRNA sense strand
gagaagccauaugaaugug

SEQ ID NO: 2168976 - RNA, 19 nt, Homo sapiens
  misc_RNA (1)...(19): siRNA sense strand
ugggaaggcuuucaacagu

SEQ ID NO: 2168977 - RNA, 19 nt, Homo sapiens
  misc_RNA (1)...(19): siRNA sense strand
gaugucaaauuagagaauc

SEQ ID NO: 2168978 - RNA, 19 nt, Homo sapiens
  misc_RNA (1)...(19): siRNA sense strand
gaugugauguuggaaaauu

SEQ ID NO: 2168979 - RNA, 19 nt, Homo sapiens
  misc_RNA (1)...(19): siRNA sense strand
ucacaaggaggaagaagga

SEQ ID NO: 2168980 - RNA, 19 nt, Homo sapiens
  misc_RNA (1)...(19): siRNA sense strand
agauguggccugagaauga

SEQ ID NO: 2168981 - RNA, 19 nt, Homo sapiens
  misc_RNA (1)...(19): siRNA sense strand
ucaaugggaaacaucuaua

SEQ ID NO: 2168982 - RNA, 19 nt, Homo sapiens
  misc_RNA (1)...(19): siRNA sense strand
aaggagaaguugugcuguu

SEQ ID NO: 2168983 - RNA, 19 nt, Homo sapiens
  misc_RNA (1)...(19): siRNA sense strand
ucagcucuuugccgacaua

SEQ ID NO: 2168984 - RNA, 19 nt, Homo sapiens
  misc_RNA (1)...(19): siRNA sense strand
gaaaagagguggaaaguag

SEQ ID NO: 2168985 - RNA, 19 nt, Homo sapiens
  misc_RNA (1)...(19): siRNA sense strand
gaacagaguuugguacaac

SEQ ID NO: 2168986 - RNA, 19 nt, Homo sapiens
  misc_RNA (1)...(19): siRNA sense strand
ugacagaggcccauaaaug

SEQ ID NO: 2168987 - RNA, 19 nt, Homo sapiens
  misc_RNA (1)...(19): siRNA sense strand
ggaagagagucaagagaag

SEQ ID NO: 2168988 - RNA, 19 nt, Homo sapiens
  misc_RNA (1)...(19): siRNA sense strand
gcagaggccuguggaagau

SEQ ID NO: 2168989 - RNA, 19 nt, Homo sapiens
  misc_RNA (1)...(19): siRNA sense strand
ggacauagaggcucaaacu

SEQ ID NO: 2168990 - RNA, 19 nt, Homo sapiens
  misc_RNA (1)...(19): siRNA sense strand
gcucgggacuggaggcaaa

SEQ ID NO: 2168991 - RNA, 19 nt, Homo sapiens
  misc_RNA (1)...(19): siRNA sense strand
acaaacagcuuaagaucuc

SEQ ID NO: 2168992 - RNA, 19 nt, Homo sapiens
  misc_RNA (1)...(19): siRNA sense strand
gggaagagagucaagagaa

SEQ ID NO: 2168993 - RNA, 19 nt, Homo sapiens
  misc_RNA (1)...(19): siRNA sense strand
gagaagaaagacaagacua

SEQ ID NO: 2168994 - RNA, 19 nt, Homo sapiens
  misc_RNA (1)...(19): siRNA sense strand
ggaaauggacccugaacuc

SEQ ID NO: 2168995 - RNA, 19 nt, Homo sapiens
  misc_RNA (1)...(19): siRNA sense strand
aaagaagaguggccaguuc

SEQ ID NO: 2168996 - RNA, 19 nt, Homo sapiens
  misc_RNA (1)...(19): siRNA sense strand
gcaccaaggcccugauugu

SEQ ID NO: 2168997 - RNA, 19 nt, Homo sapiens
  misc_RNA (1)...(19): siRNA sense strand
gaagagagucaagagaaga

SEQ ID NO: 2168998 - RNA, 19 nt, Homo sapiens
  misc_RNA (1)...(19): siRNA sense strand
ggaacagaguuugguacaa

SEQ ID NO: 2168999 - RNA, 19 nt, Homo sapiens
  misc_RNA (1)...(19): siRNA sense strand
ggaagaaugugggagaaaa

SEQ ID NO: 2169000 - RNA, 19 nt, Homo sapiens
  misc_RNA (1)...(19): siRNA sense strand
ugagagcccugcagaacug

SEQ ID NO: 2169001 - RNA, 19 nt, Homo sapiens
  misc_RNA (1)...(19): siRNA sense strand
caacagaaggguggaaaug

SEQ ID NO: 2169002 - RNA, 19 nt, Homo sapiens
  misc_RNA (1)...(19): siRNA sense strand
acagaaggguggaaaugga

SEQ ID NO: 2169003 - RNA, 19 nt, Homo sapiens
  misc_RNA (1)...(19): siRNA sense strand
cgacgaagaggaugaggaa

SEQ ID NO: 2169004 - RNA, 19 nt, Homo sapiens
  misc_RNA (1)...(19): siRNA sense strand
cgggaaggcucgagaaugg

SEQ ID NO: 2169005 - RNA, 19 nt, Homo sapiens
  misc_RNA (1)...(19): siRNA sense strand
gagcaaagccccaggagaa

SEQ ID NO: 2169006 - RNA, 19 nt, Homo sapiens
  misc_RNA (1)...(19): siRNA sense strand
caacaacaacggagugaag

SEQ ID NO: 2169007 - RNA, 19 nt, Homo sapiens
  misc_RNA (1)...(19): siRNA sense strand
ccacaaacagcuuaagauc

SEQ ID NO: 2169008 - RNA, 19 nt, Homo sapiens
  misc_RNA (1)...(19): siRNA sense strand
ucagaggcauggaaaugga

SEQ ID NO: 2169009 - RNA, 19 nt, Homo sapiens
  misc_RNA (1)...(19): siRNA sense strand
gaggucaggagaagaaaga

SEQ ID NO: 2169010 - RNA, 19 nt, Homo sapiens
  misc_RNA (1)...(19): siRNA sense strand
gaggcugaguccuggagaa

SEQ ID NO: 2169011 - RNA, 19 nt, Homo sapiens
  misc_RNA (1)...(19): siRNA sense strand
cgaagaggaugaggaagag

SEQ ID NO: 2169012 - RNA, 19 nt, Homo sapiens
  misc_RNA (1)...(19): siRNA sense strand
ggagaccacguaccaauac

SEQ ID NO: 2169013 - RNA, 19 nt, Homo sapiens
  misc_RNA (1)...(19): siRNA sense strand
cgaaagacaccacaaacag

SEQ ID NO: 2169014 - RNA, 19 nt, Homo sapiens
  misc_RNA (1)...(19): siRNA sense strand
caagacuacucggaagaau

SEQ ID NO: 2169015 - RNA, 19 nt, Homo sapiens
  misc_RNA (1)...(19): siRNA sense strand
ggaugagucugcgguccuu

SEQ ID NO: 2169016 - RNA, 19 nt, Homo sapiens
  misc_RNA (1)...(19): siRNA sense strand
gcugaguccuggagaaacu

SEQ ID NO: 2169017 - RNA, 19 nt, Homo sapiens
  misc_RNA (1)...(19): siRNA sense strand
ggacacccagggacauaga

SEQ ID NO: 2169018 - RNA, 19 nt, Homo sapiens
  misc_RNA (1)...(19): siRNA sense strand
gaagaaagacaagacuacu

SEQ ID NO: 2169019 - RNA, 19 nt, Homo sapiens
  misc_RNA (1)...(19): siRNA sense strand
agacaccacaaacagcuua

SEQ ID NO: 2169020 - RNA, 19 nt, Homo sapiens
  misc_RNA (1)...(19): siRNA sense strand
ccgaggagaucuugguucu

SEQ ID NO: 2169021 - RNA, 19 nt, Homo sapiens
  misc_RNA (1)...(19): siRNA sense strand
acauagaggcucaaacuca

SEQ ID NO: 2169022 - RNA, 19 nt, Homo sapiens
  misc_RNA (1)...(19): siRNA sense strand
gagguggaaaguagacuga

SEQ ID NO: 2169023 - RNA, 19 nt, Homo sapiens
  misc_RNA (1)...(19): siRNA sense strand
agacuacucggaagaaugu

SEQ ID NO: 2169024 - RNA, 19 nt, Homo sapiens
  misc_RNA (1)...(19): siRNA sense strand
gacaagacuacucggaaga

SEQ ID NO: 2169025 - RNA, 19 nt, Homo sapiens
  misc_RNA (1)...(19): siRNA sense strand
ucaagagaagagagacuaa

SEQ ID NO: 2169026 - RNA, 19 nt, Homo sapiens
  misc_RNA (1)...(19): siRNA sense strand
gcaccagaaccgauucauc

SEQ ID NO: 2169027 - RNA, 19 nt, Homo sapiens
  misc_RNA (1)...(19): siRNA sense strand
gggcaugaagccaacagaa

SEQ ID NO: 2169028 - RNA, 19 nt, Homo sapiens
  misc_RNA (1)...(19): siRNA sense strand
gaagaagcgguacccaacu

SEQ ID NO: 2169029 - RNA, 19 nt, Homo sapiens
  misc_RNA (1)...(19): siRNA sense strand
aagaagcgguacccaacug

SEQ ID NO: 2169030 - RNA, 19 nt, Homo sapiens
  misc_RNA (1)...(19): siRNA sense strand
uggagaccacguaccaaua

SEQ ID NO: 2169031 - RNA, 19 nt, Homo sapiens
  misc_RNA (1)...(19): siRNA sense strand
caggagcucccgacuguca

SEQ ID NO: 2169032 - RNA, 19 nt, Homo sapiens
  misc_RNA (1)...(19): siRNA sense strand
ucaggaacagaguuuggua

SEQ ID NO: 2169033 - RNA, 19 nt, Homo sapiens
  misc_RNA (1)...(19): siRNA sense strand
ggagaagaaagacaagacu

SEQ ID NO: 2169034 - RNA, 19 nt, Homo sapiens
  misc_RNA (1)...(19): siRNA sense strand
ccgaaagacaccacaaaca

SEQ ID NO: 2169035 - RNA, 19 nt, Homo sapiens
  misc_RNA (1)...(19): siRNA sense strand
ggacuggaggccugagaca

SEQ ID NO: 2169036 - RNA, 19 nt, Homo sapiens
  misc_RNA (1)...(19): siRNA sense strand
caagggaagagagucaaga

SEQ ID NO: 2169037 - RNA, 19 nt, Homo sapiens
  misc_RNA (1)...(19): siRNA sense strand
acgaagaggaugaggaaga

SEQ ID NO: 2169038 - RNA, 19 nt, Homo sapiens
  misc_RNA (1)...(19): siRNA sense strand
caccacaaacagcuuaaga

SEQ ID NO: 2169039 - RNA, 19 nt, Homo sapiens
  misc_RNA (1)...(19): siRNA sense strand
caacugccgaggagaucuu

SEQ ID NO: 2169040 - RNA, 19 nt, Homo sapiens
  misc_RNA (1)...(19): siRNA sense strand
gucaagagaagagagacua

SEQ ID NO: 2169041 - RNA, 19 nt, Homo sapiens
  misc_RNA (1)...(19): siRNA sense strand
caacuggaggcaacagagu

SEQ ID NO: 2169042 - RNA, 19 nt, Homo sapiens
  misc_RNA (1)...(19): siRNA sense strand
ccugacagaggcccauaaa

SEQ ID NO: 2169043 - RNA, 19 nt, Homo sapiens
  misc_RNA (1)...(19): siRNA sense strand
gcaacaacaacggagugaa

SEQ ID NO: 2169044 - RNA, 19 nt, Homo sapiens
  misc_RNA (1)...(19): siRNA sense strand
cagcuuaagaucuccuuca

SEQ ID NO: 2169045 - RNA, 19 nt, Homo sapiens
  misc_RNA (1)...(19): siRNA sense strand
gcagcagcagcaacaacaa

SEQ ID NO: 2169046 - RNA, 19 nt, Homo sapiens
  misc_RNA (1)...(19): siRNA sense strand
ugagccgccuguucuaugg

SEQ ID NO: 2169047 - RNA, 19 nt, Homo sapiens
  misc_RNA (1)...(19): siRNA sense strand
gagacagcaggaagaggaa

SEQ ID NO: 2169048 - RNA, 19 nt, Homo sapiens
  misc_RNA (1)...(19): siRNA sense strand
ugucagaggcauggaaaug

SEQ ID NO: 2169049 - RNA, 19 nt, Homo sapiens
  misc_RNA (1)...(19): siRNA sense strand
gcgcaccaaggcccugauu

SEQ ID NO: 2169050 - RNA, 19 nt, Homo sapiens
  misc_RNA (1)...(19): siRNA sense strand
ggcaugaagccaacagaag

SEQ ID NO: 2169051 - RNA, 19 nt, Homo sapiens
  misc_RNA (1)...(19): siRNA sense strand
agaagaaagacaagacuac

SEQ ID NO: 2169052 - RNA, 19 nt, Homo sapiens
  misc_RNA (1)...(19): siRNA sense strand
gcaaagccccaggagaaaa

SEQ ID NO: 2169053 - RNA, 19 nt, Homo sapiens
  misc_RNA (1)...(19): siRNA sense strand
gucaggagaagaaagacaa

SEQ ID NO: 2169054 - RNA, 19 nt, Homo sapiens
  misc_RNA (1)...(19): siRNA sense strand
caaccucuccagccacagu

SEQ ID NO: 2169055 - RNA, 19 nt, Homo sapiens
  misc_RNA (1)...(19): siRNA sense strand
acaagacuacucggaagaa

SEQ ID NO: 2169056 - RNA, 19 nt, Homo sapiens
  misc_RNA (1)...(19): siRNA sense strand
ccaguacacccaugaauuu

SEQ ID NO: 2169057 - RNA, 19 nt, Homo sapiens
  misc_RNA (1)...(19): siRNA sense strand
guacacccaugaauuugau

SEQ ID NO: 2169058 - RNA, 19 nt, Homo sapiens
  misc_RNA (1)...(19): siRNA sense strand
gccaguacacccaugaauu

SEQ ID NO: 2169059 - RNA, 19 nt, Homo sapiens
  misc_RNA (1)...(19): siRNA sense strand
ugaauuugauggagaugag

SEQ ID NO: 2169060 - RNA, 19 nt, Homo sapiens
  misc_RNA (1)...(19): siRNA sense strand
gagugaucauuccuucuuc

SEQ ID NO: 2169061 - RNA, 19 nt, Homo sapiens
  misc_RNA (1)...(19): siRNA sense strand
acacugggagccugagauu

SEQ ID NO: 2169062 - RNA, 19 nt, Homo sapiens
  misc_RNA (1)...(19): siRNA sense strand
agagugaucauuccuucuu

SEQ ID NO: 2169063 - RNA, 19 nt, Homo sapiens
  misc_RNA (1)...(19): siRNA sense strand
ccaagagugaucauuccuu

SEQ ID NO: 2169064 - RNA, 19 nt, Homo sapiens
  misc_RNA (1)...(19): siRNA sense strand
uuccugaggucacaguguu

SEQ ID NO: 2169065 - RNA, 19 nt, Homo sapiens
  misc_RNA (1)...(19): siRNA sense strand
gagugaucauuccuucuuc

SEQ ID NO: 2169066 - RNA, 19 nt, Homo sapiens
  misc_RNA (1)...(19): siRNA sense strand
acacugggagccugagauu

SEQ ID NO: 2169067 - RNA, 19 nt, Homo sapiens
  misc_RNA (1)...(19): siRNA sense strand
agagugaucauuccuucuu

SEQ ID NO: 2169068 - RNA, 19 nt, Homo sapiens
  misc_RNA (1)...(19): siRNA sense strand
ccaagagugaucauuccuu

SEQ ID NO: 2169069 - RNA, 19 nt, Homo sapiens
  misc_RNA (1)...(19): siRNA sense strand
uuccugaggucacaguguu

SEQ ID NO: 2169070 - RNA, 19 nt, Homo sapiens
  misc_RNA (1)...(19): siRNA sense strand
gaaaggagaugcccagaua

SEQ ID NO: 2169071 - RNA, 19 nt, Homo sapiens
  misc_RNA (1)...(19): siRNA sense strand
gcaaauagcagcauuaauu

SEQ ID NO: 2169072 - RNA, 19 nt, Homo sapiens
  misc_RNA (1)...(19): siRNA sense strand
gaacugacgucaacauaaa

SEQ ID NO: 2169073 - RNA, 19 nt, Homo sapiens
  misc_RNA (1)...(19): siRNA sense strand
gcaugaggcugcuuuguuu

SEQ ID NO: 2169074 - RNA, 19 nt, Homo sapiens
  misc_RNA (1)...(19): siRNA sense strand
gaagaagaccacauagaua

SEQ ID NO: 2169075 - RNA, 19 nt, Homo sapiens
  misc_RNA (1)...(19): siRNA sense strand
ugacugaacugauuauaga

SEQ ID NO: 2169076 - RNA, 19 nt, Homo sapiens
  misc_RNA (1)...(19): siRNA sense strand
ccacauagauaagaaguau

SEQ ID NO: 2169077 - RNA, 19 nt, Homo sapiens
  misc_RNA (1)...(19): siRNA sense strand
ggaagaagaccacauagau

SEQ ID NO: 2169078 - RNA, 19 nt, Homo sapiens
  misc_RNA (1)...(19): siRNA sense strand
cagcugaggugccaagauu

SEQ ID NO: 2169079 - RNA, 19 nt, Homo sapiens
  misc_RNA (1)...(19): siRNA sense strand
ggucuaaugugauggaaga

SEQ ID NO: 2169080 - RNA, 19 nt, Homo sapiens
  misc_RNA (1)...(19): siRNA sense strand
gaagaucacaugacuggaa

SEQ ID NO: 2169081 - RNA, 19 nt, Homo sapiens
  misc_RNA (1)...(19): siRNA sense strand
gcacuggaaccaccugaua

SEQ ID NO: 2169082 - RNA, 19 nt, Homo sapiens
  misc_RNA (1)...(19): siRNA sense strand
gcaccaugcugcuuugaau

SEQ ID NO: 2169083 - RNA, 19 nt, Homo sapiens
  misc_RNA (1)...(19): siRNA sense strand
auacaaaggugucaaguuc

SEQ ID NO: 2169084 - RNA, 19 nt, Homo sapiens
  misc_RNA (1)...(19): siRNA sense strand
ucaaugaacagaacaauga

SEQ ID NO: 2169085 - RNA, 19 nt, Homo sapiens
  misc_RNA (1)...(19): siRNA sense strand
acccaaagcugaacucaaa

SEQ ID NO: 2169086 - RNA, 19 nt, Homo sapiens
  misc_RNA (1)...(19): siRNA sense strand
ggaacugacgucaacauaa

SEQ ID NO: 2169087 - RNA, 19 nt, Homo sapiens
  misc_RNA (1)...(19): siRNA sense strand
cuacgaagcucuguauaau

SEQ ID NO: 2169088 - RNA, 19 nt, Homo sapiens
  misc_RNA (1)...(19): siRNA sense strand
caacguggcugacucaaaa

SEQ ID NO: 2169089 - RNA, 19 nt, Homo sapiens
  misc_RNA (1)...(19): siRNA sense strand
gaggaaauccgcacuggaa

SEQ ID NO: 2169090 - RNA, 19 nt, Homo sapiens
  misc_RNA (1)...(19): siRNA sense strand
cgaaguggccuaucaguug

SEQ ID NO: 2169091 - RNA, 19 nt, Homo sapiens
  misc_RNA (1)...(19): siRNA sense strand
caaagaaagugguguuggu

SEQ ID NO: 2169092 - RNA, 19 nt, Homo sapiens
  misc_RNA (1)...(19): siRNA sense strand
ugaaggcucuggguuauga

SEQ ID NO: 2169093 - RNA, 19 nt, Homo sapiens
  misc_RNA (1)...(19): siRNA sense strand
caaauagcagcauuaauug

SEQ ID NO: 2169094 - RNA, 19 nt, Homo sapiens
  misc_RNA (1)...(19): siRNA sense strand
ggacagaauccacgcaaga

SEQ ID NO: 2169095 - RNA, 19 nt, Homo sapiens
  misc_RNA (1)...(19): siRNA sense strand
gaccaagacuccacgaaca

SEQ ID NO: 2169096 - RNA, 19 nt, Homo sapiens
  misc_RNA (1)...(19): siRNA sense strand
ggccaaaugugaacugugu

SEQ ID NO: 2169097 - RNA, 19 nt, Homo sapiens
  misc_RNA (1)...(19): siRNA sense strand
gcuccaugcugaucaaaga

SEQ ID NO: 2169098 - RNA, 19 nt, Homo sapiens
  misc_RNA (1)...(19): siRNA sense strand
acacagagguggugaaggu

SEQ ID NO: 2169099 - RNA, 19 nt, Homo sapiens
  misc_RNA (1)...(19): siRNA sense strand
cagagaaacucaucuucga

SEQ ID NO: 2169100 - RNA, 19 nt, Homo sapiens
  misc_RNA (1)...(19): siRNA sense strand
ugacagcacuggcuacaca

SEQ ID NO: 2169101 - RNA, 19 nt, Homo sapiens
  misc_RNA (1)...(19): siRNA sense strand
aagaagaccacauagauaa

SEQ ID NO: 2169102 - RNA, 19 nt, Homo sapiens
  misc_RNA (1)...(19): siRNA sense strand
gcucgcacccugaaacuuu

SEQ ID NO: 2169103 - RNA, 19 nt, Homo sapiens
  misc_RNA (1)...(19): siRNA sense strand
ggaccaagaugcccaaucc

SEQ ID NO: 2169104 - RNA, 19 nt, Homo sapiens
  misc_RNA (1)...(19): siRNA sense strand
gguuacagcuccauugaca

SEQ ID NO: 2169105 - RNA, 19 nt, Homo sapiens
  misc_RNA (1)...(19): siRNA sense strand
gggaguggcuggagucgau

SEQ ID NO: 2169106 - RNA, 19 nt, Homo sapiens
  misc_RNA (1)...(19): siRNA sense strand
cuacggagcacaugaagaa

SEQ ID NO: 2169107 - RNA, 19 nt, Homo sapiens
  misc_RNA (1)...(19): siRNA sense strand
ggagagggccaaaugugaa

SEQ ID NO: 2169108 - RNA, 19 nt, Homo sapiens
  misc_RNA (1)...(19): siRNA sense strand
ggugaaggcucuggguuau

SEQ ID NO: 2169109 - RNA, 19 nt, Homo sapiens
  misc_RNA (1)...(19): siRNA sense strand
cuacguccauuccuucuug

SEQ ID NO: 2169110 - RNA, 19 nt, Homo sapiens
  misc_RNA (1)...(19): siRNA sense strand
gaagaccacauagauaaga

SEQ ID NO: 2169111 - RNA, 19 nt, Homo sapiens
  misc_RNA (1)...(19): siRNA sense strand
cagcugagaugauugaaac

SEQ ID NO: 2169112 - RNA, 19 nt, Homo sapiens
  misc_RNA (1)...(19): siRNA sense strand
gaaccugaccuacgagauc

SEQ ID NO: 2169113 - RNA, 19 nt, Homo sapiens
  misc_RNA (1)...(19): siRNA sense strand
cacgagauccggaacauuu

SEQ ID NO: 2169114 - RNA, 19 nt, Homo sapiens
  misc_RNA (1)...(19): siRNA sense strand
gaacaaugacaacgagaca

SEQ ID NO: 2169115 - RNA, 19 nt, Homo sapiens
  misc_RNA (1)...(19): siRNA sense strand
gagaagggauugacuuuuc

SEQ ID NO: 2169116 - RNA, 19 nt, Homo sapiens
  misc_RNA (1)...(19): siRNA sense strand
gggaugagauugagaaaau

SEQ ID NO: 2169117 - RNA, 19 nt, Homo sapiens
  misc_RNA (1)...(19): siRNA sense strand
uaacagcagagacaaagaa

SEQ ID NO: 2169118 - RNA, 19 nt, Homo sapiens
  misc_RNA (1)...(19): siRNA sense strand
cgaacacccuuaugaacug

SEQ ID NO: 2169119 - RNA, 19 nt, Homo sapiens
  misc_RNA (1)...(19): siRNA sense strand
cagcauuaauugaagauca

SEQ ID NO: 2169120 - RNA, 19 nt, Homo sapiens
  misc_RNA (1)...(19): siRNA sense strand
gaacugccuucucaaaaga

SEQ ID NO: 2169121 - RNA, 19 nt, Homo sapiens
  misc_RNA (1)...(19): siRNA sense strand
caaaagagccagcaaauag

SEQ ID NO: 2169122 - RNA, 19 nt, Homo sapiens
  misc_RNA (1)...(19): siRNA sense strand
cuccugagcugcaacacua

SEQ ID NO: 2169123 - RNA, 19 nt, Homo sapiens
  misc_RNA (1)...(19): siRNA sense strand
ggagugaguccuuauccaa

SEQ ID NO: 2169124 - RNA, 19 nt, Homo sapiens
  misc_RNA (1)...(19): siRNA sense strand
gcugcuacccucugcauuu

SEQ ID NO: 2169125 - RNA, 19 nt, Homo sapiens
  misc_RNA (1)...(19): siRNA sense strand
caccugauauggaccaaga

SEQ ID NO: 2169126 - RNA, 19 nt, Homo sapiens
  misc_RNA (1)...(19): siRNA sense strand
cuugacagcuucugagguu

SEQ ID NO: 2169127 - RNA, 19 nt, Homo sapiens
  misc_RNA (1)...(19): siRNA sense strand
agaggaagaagaccacaua

SEQ ID NO: 2169128 - RNA, 19 nt, Homo sapiens
  misc_RNA (1)...(19): siRNA sense strand
caagacgccugugccaaga

SEQ ID NO: 2169129 - RNA, 19 nt, Homo sapiens
  misc_RNA (1)...(19): siRNA sense strand
ccaauuaucugggcuccau

SEQ ID NO: 2169130 - RNA, 19 nt, Homo sapiens
  misc_RNA (1)...(19): siRNA sense strand
ggagaugggcagugcuuug

SEQ ID NO: 2169131 - RNA, 19 nt, Homo sapiens
  misc_RNA (1)...(19): siRNA sense strand
ugacugcccuagacacugu

SEQ ID NO: 2169132 - RNA, 19 nt, Homo sapiens
  misc_RNA (1)...(19): siRNA sense strand
aaucaugaguucuauugga

SEQ ID NO: 2169133 - RNA, 19 nt, Homo sapiens
  misc_RNA (1)...(19): siRNA sense strand
gaacacccuuaugaacugu

SEQ ID NO: 2169134 - RNA, 19 nt, Homo sapiens
  misc_RNA (1)...(19): siRNA sense strand
gcgaucaucugaccaagac

SEQ ID NO: 2169135 - RNA, 19 nt, Homo sapiens
  misc_RNA (1)...(19): siRNA sense strand
ugaugcaaaugcugaagaa

SEQ ID NO: 2169136 - RNA, 19 nt, Homo sapiens
  misc_RNA (1)...(19): siRNA sense strand
aaagauaaccauggacuga

SEQ ID NO: 2169137 - RNA, 19 nt, Homo sapiens
  misc_RNA (1)...(19): siRNA sense strand
ggaaaucuacggagcacau

SEQ ID NO: 2169138 - RNA, 19 nt, Homo sapiens
  misc_RNA (1)...(19): siRNA sense strand
cagcagagacaaagaaagu

SEQ ID NO: 2169139 - RNA, 19 nt, Homo sapiens
  misc_RNA (1)...(19): siRNA sense strand
gcauuuggcagccuggaaa

SEQ ID NO: 2169140 - RNA, 19 nt, Homo sapiens
  misc_RNA (1)...(19): siRNA sense strand
ccucucaucuccaguaugg

SEQ ID NO: 2169141 - RNA, 19 nt, Homo sapiens
  misc_RNA (1)...(19): siRNA sense strand
cagcaaauagcagcauuaa

SEQ ID NO: 2169142 - RNA, 19 nt, Homo sapiens
  misc_RNA (1)...(19): siRNA sense strand
gugguuaugaagccaauua

SEQ ID NO: 2169143 - RNA, 19 nt, Homo sapiens
  misc_RNA (1)...(19): siRNA sense strand
ccuacgaagcucuguauaa

SEQ ID NO: 2169144 - RNA, 19 nt, Homo sapiens
  misc_RNA (1)...(19): siRNA sense strand
gcaacuaccagacggagau

SEQ ID NO: 2169145 - RNA, 19 nt, Homo sapiens
  misc_RNA (1)...(19): siRNA sense strand
gaaacaaaaucuuccaaac

SEQ ID NO: 2169146 - RNA, 19 nt, Homo sapiens
  misc_RNA (1)...(19): siRNA sense strand
caacaagaacgucauugca

SEQ ID NO: 2169147 - RNA, 19 nt, Homo sapiens
  misc_RNA (1)...(19): siRNA sense strand
caagaccgauguggugcaa

SEQ ID NO: 2169148 - RNA, 19 nt, Homo sapiens
  misc_RNA (1)...(19): siRNA sense strand
cugagaugauugaaacaaa

SEQ ID NO: 2169149 - RNA, 19 nt, Homo sapiens
  misc_RNA (1)...(19): siRNA sense strand
gcucgucaauguccugaag

SEQ ID NO: 2169150 - RNA, 19 nt, Homo sapiens
  misc_RNA (1)...(19): siRNA sense strand
ugaauggcuuugacgaugu

SEQ ID NO: 2169151 - RNA, 19 nt, Homo sapiens
  misc_RNA (1)...(19): siRNA sense strand
aagaucacaugacuggaaa

SEQ ID NO: 2169152 - RNA, 19 nt, Homo sapiens
  misc_RNA (1)...(19): siRNA sense strand
ggaacgaugcgcugaccaa

SEQ ID NO: 2169153 - RNA, 19 nt, Homo sapiens
  misc_RNA (1)...(19): siRNA sense strand
agaccgauguggugcaaau

SEQ ID NO: 2169154 - RNA, 19 nt, Homo sapiens
  misc_RNA (1)...(19): siRNA sense strand
gcagaccagccaccacuau

SEQ ID NO: 2169155 - RNA, 19 nt, Homo sapiens
  misc_RNA (1)...(19): siRNA sense strand
acaaaggugucaaguucau

SEQ ID NO: 2169156 - RNA, 19 nt, Homo sapiens
  misc_RNA (1)...(19): siRNA sense strand
aaacucagccgcagcuugu

SEQ ID NO: 2169157 - RNA, 19 nt, Homo sapiens
  misc_RNA (1)...(19): siRNA sense strand
cuuaugaacuguuguuaac

SEQ ID NO: 2169158 - RNA, 19 nt, Homo sapiens
  misc_RNA (1)...(19): siRNA sense strand
gaagacgaacacccuuaug

SEQ ID NO: 2169159 - RNA, 19 nt, Homo sapiens
  misc_RNA (1)...(19): siRNA sense strand
ggaaaggagaugcccagau

SEQ ID NO: 2169160 - RNA, 19 nt, Homo sapiens
  misc_RNA (1)...(19): siRNA sense strand
cgaguccugugguuaugaa

SEQ ID NO: 2169161 - RNA, 19 nt, Homo sapiens
  misc_RNA (1)...(19): siRNA sense strand
gcaacaccagccagagaaa

SEQ ID NO: 2169162 - RNA, 19 nt, Homo sapiens
  misc_RNA (1)...(19): siRNA sense strand
gaagaaccucugggagcua

SEQ ID NO: 2169163 - RNA, 19 nt, Homo sapiens
  misc_RNA (1)...(19): siRNA sense strand
gaauggcuuugacgauguc

SEQ ID NO: 2169164 - RNA, 19 nt, Homo sapiens
  misc_RNA (1)...(19): siRNA sense strand
ggagugggaugagauugag

SEQ ID NO: 2169165 - RNA, 19 nt, Homo sapiens
  misc_RNA (1)...(19): siRNA sense strand
uagcagcauuaauugaaga

SEQ ID NO: 2169166 - RNA, 19 nt, Homo sapiens
  misc_RNA (1)...(19): siRNA sense strand
ccagcaaauagcagcauua

SEQ ID NO: 2169167 - RNA, 19 nt, Homo sapiens
  misc_RNA (1)...(19): siRNA sense strand
ggaacugccuucucaaaag

SEQ ID NO: 2169168 - RNA, 19 nt, Homo sapiens
  misc_RNA (1)...(19): siRNA sense strand
gagagugggcuaccucaca

SEQ ID NO: 2169169 - RNA, 19 nt, Homo sapiens
  misc_RNA (1)...(19): siRNA sense strand
gcugaggugccaagauuug

SEQ ID NO: 2169170 - RNA, 19 nt, Homo sapiens
  misc_RNA (1)...(19): siRNA sense strand
gaaaggagaugcccagaua

SEQ ID NO: 2169171 - RNA, 19 nt, Homo sapiens
  misc_RNA (1)...(19): siRNA sense strand
gcaaauagcagcauuaauu

SEQ ID NO: 2169172 - RNA, 19 nt, Homo sapiens
  misc_RNA (1)...(19): siRNA sense strand
gaacugacgucaacauaaa

SEQ ID NO: 2169173 - RNA, 19 nt, Homo sapiens
  misc_RNA (1)...(19): siRNA sense strand
gcaugaggcugcuuuguuu

SEQ ID NO: 2169174 - RNA, 19 nt, Homo sapiens
  misc_RNA (1)...(19): siRNA sense strand
gaagaagaccacauagaua

SEQ ID NO: 2169175 - RNA, 19 nt, Homo sapiens
  misc_RNA (1)...(19): siRNA sense strand
ugacugaacugauuauaga

SEQ ID NO: 2169176 - RNA, 19 nt, Homo sapiens
  misc_RNA (1)...(19): siRNA sense strand
ccacauagauaagaaguau

SEQ ID NO: 2169177 - RNA, 19 nt, Homo sapiens
  misc_RNA (1)...(19): siRNA sense strand
ggaagaagaccacauagau

SEQ ID NO: 2169178 - RNA, 19 nt, Homo sapiens
  misc_RNA (1)...(19): siRNA sense strand
cagcugaggugccaagauu

SEQ ID NO: 2169179 - RNA, 19 nt, Homo sapiens
  misc_RNA (1)...(19): siRNA sense strand
ggucuaaugugauggaaga

SEQ ID NO: 2169180 - RNA, 19 nt, Homo sapiens
  misc_RNA (1)...(19): siRNA sense strand
gaagaucacaugacuggaa

SEQ ID NO: 2169181 - RNA, 19 nt, Homo sapiens
  misc_RNA (1)...(19): siRNA sense strand
gcacuggaaccaccugaua

SEQ ID NO: 2169182 - RNA, 19 nt, Homo sapiens
  misc_RNA (1)...(19): siRNA sense strand
gcaccaugcugcuuugaau

SEQ ID NO: 2169183 - RNA, 19 nt, Homo sapiens
  misc_RNA (1)...(19): siRNA sense strand
auacaaaggugucaaguuc

SEQ ID NO: 2169184 - RNA, 19 nt, Homo sapiens
  misc_RNA (1)...(19): siRNA sense strand
ucaaugaacagaacaauga

SEQ ID NO: 2169185 - RNA, 19 nt, Homo sapiens
  misc_RNA (1)...(19): siRNA sense strand
acccaaagcugaacucaaa

SEQ ID NO: 2169186 - RNA, 19 nt, Homo sapiens
  misc_RNA (1)...(19): siRNA sense strand
ggaacugacgucaacauaa

SEQ ID NO: 2169187 - RNA, 19 nt, Homo sapiens
  misc_RNA (1)...(19): siRNA sense strand
cuacgaagcucuguauaau

SEQ ID NO: 2169188 - RNA, 19 nt, Homo sapiens
  misc_RNA (1)...(19): siRNA sense strand
caacguggcugacucaaaa

SEQ ID NO: 2169189 - RNA, 19 nt, Homo sapiens
  misc_RNA (1)...(19): siRNA sense strand
gaggaaauccgcacuggaa

SEQ ID NO: 2169190 - RNA, 19 nt, Homo sapiens
  misc_RNA (1)...(19): siRNA sense strand
cgaaguggccuaucaguug

SEQ ID NO: 2169191 - RNA, 19 nt, Homo sapiens
  misc_RNA (1)...(19): siRNA sense strand
caaagaaagugguguuggu

SEQ ID NO: 2169192 - RNA, 19 nt, Homo sapiens
  misc_RNA (1)...(19): siRNA sense strand
ugaaggcucuggguuauga

SEQ ID NO: 2169193 - RNA, 19 nt, Homo sapiens
  misc_RNA (1)...(19): siRNA sense strand
caaauagcagcauuaauug

SEQ ID NO: 2169194 - RNA, 19 nt, Homo sapiens
  misc_RNA (1)...(19): siRNA sense strand
ggacagaauccacgcaaga

SEQ ID NO: 2169195 - RNA, 19 nt, Homo sapiens
  misc_RNA (1)...(19): siRNA sense strand
gaccaagacuccacgaaca

SEQ ID NO: 2169196 - RNA, 19 nt, Homo sapiens
  misc_RNA (1)...(19): siRNA sense strand
ggccaaaugugaacugugu

SEQ ID NO: 2169197 - RNA, 19 nt, Homo sapiens
  misc_RNA (1)...(19): siRNA sense strand
gcuccaugcugaucaaaga

SEQ ID NO: 2169198 - RNA, 19 nt, Homo sapiens
  misc_RNA (1)...(19): siRNA sense strand
ugacagcacuggcuacaca

SEQ ID NO: 2169199 - RNA, 19 nt, Homo sapiens
  misc_RNA (1)...(19): siRNA sense strand
cagagaaacucaucuucga

SEQ ID NO: 2169200 - RNA, 19 nt, Homo sapiens
  misc_RNA (1)...(19): siRNA sense strand
aagaagaccacauagauaa

SEQ ID NO: 2169201 - RNA, 19 nt, Homo sapiens
  misc_RNA (1)...(19): siRNA sense strand
acacagagguggugaaggu

SEQ ID NO: 2169202 - RNA, 19 nt, Homo sapiens
  misc_RNA (1)...(19): siRNA sense strand
gcucgcacccugaaacuuu

SEQ ID NO: 2169203 - RNA, 19 nt, Homo sapiens
  misc_RNA (1)...(19): siRNA sense strand
ggaccaagaugcccaaucc

SEQ ID NO: 2169204 - RNA, 19 nt, Homo sapiens
  misc_RNA (1)...(19): siRNA sense strand
gguuacagcuccauugaca

SEQ ID NO: 2169205 - RNA, 19 nt, Homo sapiens
  misc_RNA (1)...(19): siRNA sense strand
gggaguggcuggagucgau

SEQ ID NO: 2169206 - RNA, 19 nt, Homo sapiens
  misc_RNA (1)...(19): siRNA sense strand
cuacggagcacaugaagaa

SEQ ID NO: 2169207 - RNA, 19 nt, Homo sapiens
  misc_RNA (1)...(19): siRNA sense strand
ggagagggccaaaugugaa

SEQ ID NO: 2169208 - RNA, 19 nt, Homo sapiens
  misc_RNA (1)...(19): siRNA sense strand
ggugaaggcucuggguuau

SEQ ID NO: 2169209 - RNA, 19 nt, Homo sapiens
  misc_RNA (1)...(19): siRNA sense strand
cuacguccauuccuucuug

SEQ ID NO: 2169210 - RNA, 19 nt, Homo sapiens
  misc_RNA (1)...(19): siRNA sense strand
gaagaccacauagauaaga

SEQ ID NO: 2169211 - RNA, 19 nt, Homo sapiens
  misc_RNA (1)...(19): siRNA sense strand
cagcugagaugauugaaac

SEQ ID NO: 2169212 - RNA, 19 nt, Homo sapiens
  misc_RNA (1)...(19): siRNA sense strand
gaaccugaccuacgagauc

SEQ ID NO: 2169213 - RNA, 19 nt, Homo sapiens
  misc_RNA (1)...(19): siRNA sense strand
cacgagauccggaacauuu

SEQ ID NO: 2169214 - RNA, 19 nt, Homo sapiens
  misc_RNA (1)...(19): siRNA sense strand
gaacaaugacaacgagaca

SEQ ID NO: 2169215 - RNA, 19 nt, Homo sapiens
  misc_RNA (1)...(19): siRNA sense strand
gagaagggauugacuuuuc

SEQ ID NO: 2169216 - RNA, 19 nt, Homo sapiens
  misc_RNA (1)...(19): siRNA sense strand
gggaugagauugagaaaau

SEQ ID NO: 2169217 - RNA, 19 nt, Homo sapiens
  misc_RNA (1)...(19): siRNA sense strand
uaacagcagagacaaagaa

SEQ ID NO: 2169218 - RNA, 19 nt, Homo sapiens
  misc_RNA (1)...(19): siRNA sense strand
cgaacacccuuaugaacug

SEQ ID NO: 2169219 - RNA, 19 nt, Homo sapiens
  misc_RNA (1)...(19): siRNA sense strand
gcccggagacggaaaguuu

SEQ ID NO: 2169220 - RNA, 19 nt, Homo sapiens
  misc_RNA (1)...(19): siRNA sense strand
cagcauuaauugaagauca

SEQ ID NO: 2169221 - RNA, 19 nt, Homo sapiens
  misc_RNA (1)...(19): siRNA sense strand
gaacugccuucucaaaaga

SEQ ID NO: 2169222 - RNA, 19 nt, Homo sapiens
  misc_RNA (1)...(19): siRNA sense strand
caaaagagccagcaaauag

SEQ ID NO: 2169223 - RNA, 19 nt, Homo sapiens
  misc_RNA (1)...(19): siRNA sense strand
cuccugagcugcaacacua

SEQ ID NO: 2169224 - RNA, 19 nt, Homo sapiens
  misc_RNA (1)...(19): siRNA sense strand
ggagugaguccuuauccaa

SEQ ID NO: 2169225 - RNA, 19 nt, Homo sapiens
  misc_RNA (1)...(19): siRNA sense strand
gcugcuacccucugcauuu

SEQ ID NO: 2169226 - RNA, 19 nt, Homo sapiens
  misc_RNA (1)...(19): siRNA sense strand
caccugauauggaccaaga

SEQ ID NO: 2169227 - RNA, 19 nt, Homo sapiens
  misc_RNA (1)...(19): siRNA sense strand
cuugacagcuucugagguu

SEQ ID NO: 2169228 - RNA, 19 nt, Homo sapiens
  misc_RNA (1)...(19): siRNA sense strand
agaggaagaagaccacaua

SEQ ID NO: 2169229 - RNA, 19 nt, Homo sapiens
  misc_RNA (1)...(19): siRNA sense strand
caagacgccugugccaaga

SEQ ID NO: 2169230 - RNA, 19 nt, Homo sapiens
  misc_RNA (1)...(19): siRNA sense strand
ccaauuaucugggcuccau

SEQ ID NO: 2169231 - RNA, 19 nt, Homo sapiens
  misc_RNA (1)...(19): siRNA sense strand
ggagaugggcagugcuuug

SEQ ID NO: 2169232 - RNA, 19 nt, Homo sapiens
  misc_RNA (1)...(19): siRNA sense strand
ugacugcccuagacacugu

SEQ ID NO: 2169233 - RNA, 19 nt, Homo sapiens
  misc_RNA (1)...(19): siRNA sense strand
aaucaugaguucuauugga

SEQ ID NO: 2169234 - RNA, 19 nt, Homo sapiens
  misc_RNA (1)...(19): siRNA sense strand
gaacacccuuaugaacugu

SEQ ID NO: 2169235 - RNA, 19 nt, Homo sapiens
  misc_RNA (1)...(19): siRNA sense strand
gcgaucaucugaccaagac

SEQ ID NO: 2169236 - RNA, 19 nt, Homo sapiens
  misc_RNA (1)...(19): siRNA sense strand
ugaugcaaaugcugaagaa

SEQ ID NO: 2169237 - RNA, 19 nt, Homo sapiens
  misc_RNA (1)...(19): siRNA sense strand
gcauuuggcagccuggaaa

SEQ ID NO: 2169238 - RNA, 19 nt, Homo sapiens
  misc_RNA (1)...(19): siRNA sense strand
ggaaaucuacggagcacau

SEQ ID NO: 2169239 - RNA, 19 nt, Homo sapiens
  misc_RNA (1)...(19): siRNA sense strand
cagcagagacaaagaaagu

SEQ ID NO: 2169240 - RNA, 19 nt, Homo sapiens
  misc_RNA (1)...(19): siRNA sense strand
ccucucaucuccaguaugg

SEQ ID NO: 2169241 - RNA, 19 nt, Homo sapiens
  misc_RNA (1)...(19): siRNA sense strand
aaagauaaccauggacuga

SEQ ID NO: 2169242 - RNA, 19 nt, Homo sapiens
  misc_RNA (1)...(19): siRNA sense strand
cagcaaauagcagcauuaa

SEQ ID NO: 2169243 - RNA, 19 nt, Homo sapiens
  misc_RNA (1)...(19): siRNA sense strand
gugguuaugaagccaauua

SEQ ID NO: 2169244 - RNA, 19 nt, Homo sapiens
  misc_RNA (1)...(19): siRNA sense strand
ccuacgaagcucuguauaa

SEQ ID NO: 2169245 - RNA, 19 nt, Homo sapiens
  misc_RNA (1)...(19): siRNA sense strand
gcaacuaccagacggagau

SEQ ID NO: 2169246 - RNA, 19 nt, Homo sapiens
  misc_RNA (1)...(19): siRNA sense strand
gaaacaaaaucuuccaaac

SEQ ID NO: 2169247 - RNA, 19 nt, Homo sapiens
  misc_RNA (1)...(19): siRNA sense strand
caacaagaacgucauugca

SEQ ID NO: 2169248 - RNA, 19 nt, Homo sapiens
  misc_RNA (1)...(19): siRNA sense strand
caagaccgauguggugcaa

SEQ ID NO: 2169249 - RNA, 19 nt, Homo sapiens
  misc_RNA (1)...(19): siRNA sense strand
cugagaugauugaaacaaa

SEQ ID NO: 2169250 - RNA, 19 nt, Homo sapiens
  misc_RNA (1)...(19): siRNA sense strand
gcucgucaauguccugaag

SEQ ID NO: 2169251 - RNA, 19 nt, Homo sapiens
  misc_RNA (1)...(19): siRNA sense strand
ugaauggcuuugacgaugu

SEQ ID NO: 2169252 - RNA, 19 nt, Homo sapiens
  misc_RNA (1)...(19): siRNA sense strand
ggaacgaugcgcugaccaa

SEQ ID NO: 2169253 - RNA, 19 nt, Homo sapiens
  misc_RNA (1)...(19): siRNA sense strand
aagaucacaugacuggaaa

SEQ ID NO: 2169254 - RNA, 19 nt, Homo sapiens
  misc_RNA (1)...(19): siRNA sense strand
agaccgauguggugcaaau

SEQ ID NO: 2169255 - RNA, 19 nt, Homo sapiens
  misc_RNA (1)...(19): siRNA sense strand
gcagaccagccaccacuau

SEQ ID NO: 2169256 - RNA, 19 nt, Homo sapiens
  misc_RNA (1)...(19): siRNA sense strand
acaaaggugucaaguucau

SEQ ID NO: 2169257 - RNA, 19 nt, Homo sapiens
  misc_RNA (1)...(19): siRNA sense strand
aaacucagccgcagcuugu

SEQ ID NO: 2169258 - RNA, 19 nt, Homo sapiens
  misc_RNA (1)...(19): siRNA sense strand
cuuaugaacuguuguuaac

SEQ ID NO: 2169259 - RNA, 19 nt, Homo sapiens
  misc_RNA (1)...(19): siRNA sense strand
gaagacgaacacccuuaug

SEQ ID NO: 2169260 - RNA, 19 nt, Homo sapiens
  misc_RNA (1)...(19): siRNA sense strand
ggaacugccuucucaaaag

SEQ ID NO: 2169261 - RNA, 19 nt, Homo sapiens
  misc_RNA (1)...(19): siRNA sense strand
ggaaaggagaugcccagau

SEQ ID NO: 2169262 - RNA, 19 nt, Homo sapiens
  misc_RNA (1)...(19): siRNA sense strand
cgaguccugugguuaugaa

SEQ ID NO: 2169263 - RNA, 19 nt, Homo sapiens
  misc_RNA (1)...(19): siRNA sense strand
gcaacaccagccagagaaa

SEQ ID NO: 2169264 - RNA, 19 nt, Homo sapiens
  misc_RNA (1)...(19): siRNA sense strand
gaagaaccucugggagcua

SEQ ID NO: 2169265 - RNA, 19 nt, Homo sapiens
  misc_RNA (1)...(19): siRNA sense strand
gaauggcuuugacgauguc

SEQ ID NO: 2169266 - RNA, 19 nt, Homo sapiens
  misc_RNA (1)...(19): siRNA sense strand
ggagugggaugagauugag

SEQ ID NO: 2169267 - RNA, 19 nt, Homo sapiens
  misc_RNA (1)...(19): siRNA sense strand
uagcagcauuaauugaaga

SEQ ID NO: 2169268 - RNA, 19 nt, Homo sapiens
  misc_RNA (1)...(19): siRNA sense strand
ccagcaaauagcagcauua

SEQ ID NO: 2169269 - RNA, 19 nt, Homo sapiens
  misc_RNA (1)...(19): siRNA sense strand
gcugaggugccaagauuug

SEQ ID NO: 2169270 - RNA, 19 nt, Homo sapiens
  misc_RNA (1)...(19): siRNA sense strand
ggacagagaugacuccaaa

SEQ ID NO: 2169271 - RNA, 19 nt, Homo sapiens
  misc_RNA (1)...(19): siRNA sense strand
gaggaggacuuuaaccuua

SEQ ID NO: 2169272 - RNA, 19 nt, Homo sapiens
  misc_RNA (1)...(19): siRNA sense strand
gaugaugaaugucacaaua

SEQ ID NO: 2169273 - RNA, 19 nt, Homo sapiens
  misc_RNA (1)...(19): siRNA sense strand
ugagugagguuccagauua

SEQ ID NO: 2169274 - RNA, 19 nt, Homo sapiens
  misc_RNA (1)...(19): siRNA sense strand
ugaaggagcugcuggagaa

SEQ ID NO: 2169275 - RNA, 19 nt, Homo sapiens
  misc_RNA (1)...(19): siRNA sense strand
ccagaaagguggaagaaga

SEQ ID NO: 2169276 - RNA, 19 nt, Homo sapiens
  misc_RNA (1)...(19): siRNA sense strand
aaacuaaccugcuauaucu

SEQ ID NO: 2169277 - RNA, 19 nt, Homo sapiens
  misc_RNA (1)...(19): siRNA sense strand
ccaacugcaugaaguauaa

SEQ ID NO: 2169278 - RNA, 19 nt, Homo sapiens
  misc_RNA (1)...(19): siRNA sense strand
gcacaucaguccucuucaa

SEQ ID NO: 2169279 - RNA, 19 nt, Homo sapiens
  misc_RNA (1)...(19): siRNA sense strand
gaaacuaaccugcuauauc

SEQ ID NO: 2169280 - RNA, 19 nt, Homo sapiens
  misc_RNA (1)...(19): siRNA sense strand
gaagacaagugcagugaag

SEQ ID NO: 2169281 - RNA, 19 nt, Homo sapiens
  misc_RNA (1)...(19): siRNA sense strand
aggaggagcugaaguauug

SEQ ID NO: 2169282 - RNA, 19 nt, Homo sapiens
  misc_RNA (1)...(19): siRNA sense strand
gggcugggcucuucaugaa

SEQ ID NO: 2169283 - RNA, 19 nt, Homo sapiens
  misc_RNA (1)...(19): siRNA sense strand
ggaauggugucccucuuau

SEQ ID NO: 2169284 - RNA, 19 nt, Homo sapiens
  misc_RNA (1)...(19): siRNA sense strand
gccauaaggugaacugcua

SEQ ID NO: 2169285 - RNA, 19 nt, Homo sapiens
  misc_RNA (1)...(19): siRNA sense strand
gaacggagacucugacuac

SEQ ID NO: 2169286 - RNA, 19 nt, Homo sapiens
  misc_RNA (1)...(19): siRNA sense strand
ggaggacuuuaaccuuaua

SEQ ID NO: 2169287 - RNA, 19 nt, Homo sapiens
  misc_RNA (1)...(19): siRNA sense strand
gcgcaagacugccuacugu

SEQ ID NO: 2169288 - RNA, 19 nt, Homo sapiens
  misc_RNA (1)...(19): siRNA sense strand
guaguggucucuccuuuca

SEQ ID NO: 2169289 - RNA, 19 nt, Homo sapiens
  misc_RNA (1)...(19): siRNA sense strand
ugcagcggcuucacaauua

SEQ ID NO: 2169290 - RNA, 19 nt, Homo sapiens
  misc_RNA (1)...(19): siRNA sense strand
gcuggaaacuaaccugcua

SEQ ID NO: 2169291 - RNA, 19 nt, Homo sapiens
  misc_RNA (1)...(19): siRNA sense strand
gaaggauccugcacacauc

SEQ ID NO: 2169292 - RNA, 19 nt, Homo sapiens
  misc_RNA (1)...(19): siRNA sense strand
gaauguaguuugggucuca

SEQ ID NO: 2169293 - RNA, 19 nt, Homo sapiens
  misc_RNA (1)...(19): siRNA sense strand
gauaucaccgaaugcaaua

SEQ ID NO: 2169294 - RNA, 19 nt, Homo sapiens
  misc_RNA (1)...(19): siRNA sense strand
ggcagaagcuccggcauga

SEQ ID NO: 2169295 - RNA, 19 nt, Homo sapiens
  misc_RNA (1)...(19): siRNA sense strand
gcaagacugccuacuguga

SEQ ID NO: 2169296 - RNA, 19 nt, Homo sapiens
  misc_RNA (1)...(19): siRNA sense strand
gggaagacguggacaacau

SEQ ID NO: 2169297 - RNA, 19 nt, Homo sapiens
  misc_RNA (1)...(19): siRNA sense strand
gaagagagagaagcucaaa

SEQ ID NO: 2169298 - RNA, 19 nt, Homo sapiens
  misc_RNA (1)...(19): siRNA sense strand
ugaaggaggagcugaagua

SEQ ID NO: 2169299 - RNA, 19 nt, Homo sapiens
  misc_RNA (1)...(19): siRNA sense strand
gaagucugcuuugcuaaca

SEQ ID NO: 2169300 - RNA, 19 nt, Homo sapiens
  misc_RNA (1)...(19): siRNA sense strand
ccaaggagcaggagcugua

SEQ ID NO: 2169301 - RNA, 19 nt, Homo sapiens
  misc_RNA (1)...(19): siRNA sense strand
cagagaacaucggcuauga

SEQ ID NO: 2169302 - RNA, 19 nt, Homo sapiens
  misc_RNA (1)...(19): siRNA sense strand
gcacacaucuucgcagaac

SEQ ID NO: 2169303 - RNA, 19 nt, Homo sapiens
  misc_RNA (1)...(19): siRNA sense strand
cagauuaccuggaauucau

SEQ ID NO: 2169304 - RNA, 19 nt, Homo sapiens
  misc_RNA (1)...(19): siRNA sense strand
ggacuuuaaccuuauaguu

SEQ ID NO: 2169305 - RNA, 19 nt, Homo sapiens
  misc_RNA (1)...(19): siRNA sense strand
ugagaaagagucauacuug

SEQ ID NO: 2169306 - RNA, 19 nt, Homo sapiens
  misc_RNA (1)...(19): siRNA sense strand
ccugaagucugcuuugcua

SEQ ID NO: 2169307 - RNA, 19 nt, Homo sapiens
  misc_RNA (1)...(19): siRNA sense strand
ugaaacccauuaaugauag

SEQ ID NO: 2169308 - RNA, 19 nt, Homo sapiens
  misc_RNA (1)...(19): siRNA sense strand
caucugcagucccaaagaa

SEQ ID NO: 2169309 - RNA, 19 nt, Homo sapiens
  misc_RNA (1)...(19): siRNA sense strand
ucaagggagugcccaagaa

SEQ ID NO: 2169310 - RNA, 19 nt, Homo sapiens
  misc_RNA (1)...(19): siRNA sense strand
ccaagaaacccucauccaa

SEQ ID NO: 2169311 - RNA, 19 nt, Homo sapiens
  misc_RNA (1)...(19): siRNA sense strand
ucccacagauacccucuua

SEQ ID NO: 2169312 - RNA, 19 nt, Homo sapiens
  misc_RNA (1)...(19): siRNA sense strand
gcaauguuauucucuucug

SEQ ID NO: 2169313 - RNA, 19 nt, Homo sapiens
  misc_RNA (1)...(19): siRNA sense strand
caacaagacaguauccaau

SEQ ID NO: 2169314 - RNA, 19 nt, Homo sapiens
  misc_RNA (1)...(19): siRNA sense strand
gaaguauaaugcuaaagac

SEQ ID NO: 2169315 - RNA, 19 nt, Homo sapiens
  misc_RNA (1)...(19): siRNA sense strand
guuauucucuucugugaca

SEQ ID NO: 2169316 - RNA, 19 nt, Homo sapiens
  misc_RNA (1)...(19): siRNA sense strand
aggaagagguggaggaaga

SEQ ID NO: 2169317 - RNA, 19 nt, Homo sapiens
  misc_RNA (1)...(19): siRNA sense strand
ggacuggcauuugaagcuu

SEQ ID NO: 2169318 - RNA, 19 nt, Homo sapiens
  misc_RNA (1)...(19): siRNA sense strand
guauaaugcuaaagacaca

SEQ ID NO: 2169319 - RNA, 19 nt, Homo sapiens
  misc_RNA (1)...(19): siRNA sense strand
gugguggacuggcauuuga

SEQ ID NO: 2169320 - RNA, 19 nt, Homo sapiens
  misc_RNA (1)...(19): siRNA sense strand
gaaagguggaagaagauga

SEQ ID NO: 2169321 - RNA, 19 nt, Homo sapiens
  misc_RNA (1)...(19): siRNA sense strand
augcagagguagaguauga

SEQ ID NO: 2169322 - RNA, 19 nt, Homo sapiens
  misc_RNA (1)...(19): siRNA sense strand
gggagacccugacauaugc

SEQ ID NO: 2169323 - RNA, 19 nt, Homo sapiens
  misc_RNA (1)...(19): siRNA sense strand
gaguagaugggcacaguuu

SEQ ID NO: 2169324 - RNA, 19 nt, Homo sapiens
  misc_RNA (1)...(19): siRNA sense strand
ggaagcaggccaagacaca

SEQ ID NO: 2169325 - RNA, 19 nt, Homo sapiens
  misc_RNA (1)...(19): siRNA sense strand
aaagcaagaugaguuugaa

SEQ ID NO: 2169326 - RNA, 19 nt, Homo sapiens
  misc_RNA (1)...(19): siRNA sense strand
gguagaguaugacauggau

SEQ ID NO: 2169327 - RNA, 19 nt, Homo sapiens
  misc_RNA (1)...(19): siRNA sense strand
ucaagaaggccaagaaugg

SEQ ID NO: 2169328 - RNA, 19 nt, Homo sapiens
  misc_RNA (1)...(19): siRNA sense strand
gcagcggcuucacaauuau

SEQ ID NO: 2169329 - RNA, 19 nt, Homo sapiens
  misc_RNA (1)...(19): siRNA sense strand
ccacagauacccucuuaca

SEQ ID NO: 2169330 - RNA, 19 nt, Homo sapiens
  misc_RNA (1)...(19): siRNA sense strand
ggauaucaccgaaugcaau

SEQ ID NO: 2169331 - RNA, 19 nt, Homo sapiens
  misc_RNA (1)...(19): siRNA sense strand
uagaccggcuugagaaaga

SEQ ID NO: 2169332 - RNA, 19 nt, Homo sapiens
  misc_RNA (1)...(19): siRNA sense strand
ggcuggacauggugaauga

SEQ ID NO: 2169333 - RNA, 19 nt, Homo sapiens
  misc_RNA (1)...(19): siRNA sense strand
gagaagacaagugcaguga

SEQ ID NO: 2169334 - RNA, 19 nt, Homo sapiens
  misc_RNA (1)...(19): siRNA sense strand
cagugcagguggccuauga

SEQ ID NO: 2169335 - RNA, 19 nt, Homo sapiens
  misc_RNA (1)...(19): siRNA sense strand
cggagacucugacuacaau

SEQ ID NO: 2169336 - RNA, 19 nt, Homo sapiens
  misc_RNA (1)...(19): siRNA sense strand
ggguuaagcuacagagaag

SEQ ID NO: 2169337 - RNA, 19 nt, Homo sapiens
  misc_RNA (1)...(19): siRNA sense strand
caacagacuaucccucaug

SEQ ID NO: 2169338 - RNA, 19 nt, Homo sapiens
  misc_RNA (1)...(19): siRNA sense strand
ccaagcagguuccuaaagc

SEQ ID NO: 2169339 - RNA, 19 nt, Homo sapiens
  misc_RNA (1)...(19): siRNA sense strand
cagcccagcuuccguaugg

SEQ ID NO: 2169340 - RNA, 19 nt, Homo sapiens
  misc_RNA (1)...(19): siRNA sense strand
ggcagaggcuggagagaag

SEQ ID NO: 2169341 - RNA, 19 nt, Homo sapiens
  misc_RNA (1)...(19): siRNA sense strand
uacaauggcucaggcagaa

SEQ ID NO: 2169342 - RNA, 19 nt, Homo sapiens
  misc_RNA (1)...(19): siRNA sense strand
cugaaacccauuaaugaua

SEQ ID NO: 2169343 - RNA, 19 nt, Homo sapiens
  misc_RNA (1)...(19): siRNA sense strand
caagaaggagccagaggaa

SEQ ID NO: 2169344 - RNA, 19 nt, Homo sapiens
  misc_RNA (1)...(19): siRNA sense strand
gugccuggaugaugaaugu

SEQ ID NO: 2169345 - RNA, 19 nt, Homo sapiens
  misc_RNA (1)...(19): siRNA sense strand
caagggagugcccaagaaa

SEQ ID NO: 2169346 - RNA, 19 nt, Homo sapiens
  misc_RNA (1)...(19): siRNA sense strand
gagcuaacugcccaggaua

SEQ ID NO: 2169347 - RNA, 19 nt, Homo sapiens
  misc_RNA (1)...(19): siRNA sense strand
agcaggagcuguagugaga

SEQ ID NO: 2169348 - RNA, 19 nt, Homo sapiens
  misc_RNA (1)...(19): siRNA sense strand
ugaagcagaagaucaagaa

SEQ ID NO: 2169349 - RNA, 19 nt, Homo sapiens
  misc_RNA (1)...(19): siRNA sense strand
gcgaguagaugggcacagu

SEQ ID NO: 2169350 - RNA, 19 nt, Homo sapiens
  misc_RNA (1)...(19): siRNA sense strand
cgaaugcaauaguaacaag

SEQ ID NO: 2169351 - RNA, 19 nt, Homo sapiens
  misc_RNA (1)...(19): siRNA sense strand
gaaggaggagcugaaguau

SEQ ID NO: 2169352 - RNA, 19 nt, Homo sapiens
  misc_RNA (1)...(19): siRNA sense strand
ccuuugagcugcugguaga

SEQ ID NO: 2169353 - RNA, 19 nt, Homo sapiens
  misc_RNA (1)...(19): siRNA sense strand
gcucuuccuuguccucuuc

SEQ ID NO: 2169354 - RNA, 19 nt, Homo sapiens
  misc_RNA (1)...(19): siRNA sense strand
ccuagaagcaucagugaga

SEQ ID NO: 2169355 - RNA, 19 nt, Homo sapiens
  misc_RNA (1)...(19): siRNA sense strand
gguggcgccuucaaacaga

SEQ ID NO: 2169356 - RNA, 19 nt, Homo sapiens
  misc_RNA (1)...(19): siRNA sense strand
gugugugccuggaugauga

SEQ ID NO: 2169357 - RNA, 19 nt, Homo sapiens
  misc_RNA (1)...(19): siRNA sense strand
gcagagaacaucggcuaug

SEQ ID NO: 2169358 - RNA, 19 nt, Homo sapiens
  misc_RNA (1)...(19): siRNA sense strand
cggaauggugucccucuua

SEQ ID NO: 2169359 - RNA, 19 nt, Homo sapiens
  misc_RNA (1)...(19): siRNA sense strand
gcagccauccagugccaua

SEQ ID NO: 2169360 - RNA, 19 nt, Homo sapiens
  misc_RNA (1)...(19): siRNA sense strand
gaaugucacaauagcaaug

SEQ ID NO: 2169361 - RNA, 19 nt, Homo sapiens
  misc_RNA (1)...(19): siRNA sense strand
ggaaacuaaccugcuauau

SEQ ID NO: 2169362 - RNA, 19 nt, Homo sapiens
  misc_RNA (1)...(19): siRNA sense strand
caaacgagagcaggucaaa

SEQ ID NO: 2169363 - RNA, 19 nt, Homo sapiens
  misc_RNA (1)...(19): siRNA sense strand
ugagcuaacugcccaggau

SEQ ID NO: 2169364 - RNA, 19 nt, Homo sapiens
  misc_RNA (1)...(19): siRNA sense strand
ggaugcagagguagaguau

SEQ ID NO: 2169365 - RNA, 19 nt, Homo sapiens
  misc_RNA (1)...(19): siRNA sense strand
caccaucacucaacaagac

SEQ ID NO: 2169366 - RNA, 19 nt, Homo sapiens
  misc_RNA (1)...(19): siRNA sense strand
ccacagccaccaucacuca

SEQ ID NO: 2169367 - RNA, 19 nt, Homo sapiens
  misc_RNA (1)...(19): siRNA sense strand
agcagaagaucaagaagga

SEQ ID NO: 2169368 - RNA, 19 nt, Homo sapiens
  misc_RNA (1)...(19): siRNA sense strand
ggaggaagaagagcaggaa

SEQ ID NO: 2169369 - RNA, 19 nt, Homo sapiens
  misc_RNA (1)...(19): siRNA sense strand
ccugcccgcuggaaacuaa

SEQ ID NO: 2169370 - RNA, 19 nt, Homo sapiens
  misc_RNA (1)...(19): siRNA sense strand
gaacaaagccuccaacuac

SEQ ID NO: 2169371 - RNA, 19 nt, Homo sapiens
  misc_RNA (1)...(19): siRNA sense strand
ggaggucccuggagaagga

SEQ ID NO: 2169372 - RNA, 19 nt, Homo sapiens
  misc_RNA (1)...(19): siRNA sense strand
caagagaaccggaagaaca

SEQ ID NO: 2169373 - RNA, 19 nt, Homo sapiens
  misc_RNA (1)...(19): siRNA sense strand
gggcgucgcucuagagauc

SEQ ID NO: 2169374 - RNA, 19 nt, Homo sapiens
  misc_RNA (1)...(19): siRNA sense strand
ugaacaaagccuccaacua

SEQ ID NO: 2169375 - RNA, 19 nt, Homo sapiens
  misc_RNA (1)...(19): siRNA sense strand
ucgaugggcuagaggagaa

SEQ ID NO: 2169376 - RNA, 19 nt, Homo sapiens
  misc_RNA (1)...(19): siRNA sense strand
agaacaugcugcucucugu

SEQ ID NO: 2169377 - RNA, 19 nt, Homo sapiens
  misc_RNA (1)...(19): siRNA sense strand
ggcaagagaaccggaagaa

SEQ ID NO: 2169378 - RNA, 19 nt, Homo sapiens
  misc_RNA (1)...(19): siRNA sense strand
gaaucugggcgucgcucua

SEQ ID NO: 2169379 - RNA, 19 nt, Homo sapiens
  misc_RNA (1)...(19): siRNA sense strand
ggagaagcugucccagugu

SEQ ID NO: 2169380 - RNA, 19 nt, Homo sapiens
  misc_RNA (1)...(19): siRNA sense strand
agagaucgaugggcuagag

SEQ ID NO: 2169381 - RNA, 19 nt, Homo sapiens
  misc_RNA (1)...(19): siRNA sense strand
aaaacagccuaaugaacaa

SEQ ID NO: 2169382 - RNA, 19 nt, Homo sapiens
  misc_RNA (1)...(19): siRNA sense strand
aaaagaagcgggagaaucu

SEQ ID NO: 2169383 - RNA, 19 nt, Homo sapiens
  misc_RNA (1)...(19): siRNA sense strand
gcaacgagcuccuggacuu

SEQ ID NO: 2169384 - RNA, 19 nt, Homo sapiens
  misc_RNA (1)...(19): siRNA sense strand
guacugauuuacaggauga

SEQ ID NO: 2169385 - RNA, 19 nt, Homo sapiens
  misc_RNA (1)...(19): siRNA sense strand
gggcugugcuugugucuga

SEQ ID NO: 2169386 - RNA, 19 nt, Homo sapiens
  misc_RNA (1)...(19): siRNA sense strand
acgaugagguacugauuua

SEQ ID NO: 2169387 - RNA, 19 nt, Homo sapiens
  misc_RNA (1)...(19): siRNA sense strand
ccacuucacugcaauugug

SEQ ID NO: 2169388 - RNA, 19 nt, Homo sapiens
  misc_RNA (1)...(19): siRNA sense strand
caacugcucugacgaugag

SEQ ID NO: 2169389 - RNA, 19 nt, Homo sapiens
  misc_RNA (1)...(19): siRNA sense strand
ggaacgggcugugcuugug

SEQ ID NO: 2169390 - RNA, 19 nt, Homo sapiens
  misc_RNA (1)...(19): siRNA sense strand
ccucaagggucgcuacuuc

SEQ ID NO: 2169391 - RNA, 19 nt, Homo sapiens
  misc_RNA (1)...(19): siRNA sense strand
caaggaccgcugucuauga

SEQ ID NO: 2169392 - RNA, 19 nt, Homo sapiens
  misc_RNA (1)...(19): siRNA sense strand
gcgggacgaugaccuggaa

SEQ ID NO: 2169393 - RNA, 19 nt, Homo sapiens
  misc_RNA (1)...(19): siRNA sense strand
guaacccacuucacugcaa

SEQ ID NO: 2169394 - RNA, 19 nt, Homo sapiens
  misc_RNA (1)...(19): siRNA sense strand
cggaaggucucgaacaucu

SEQ ID NO: 2169395 - RNA, 19 nt, Homo sapiens
  misc_RNA (1)...(19): siRNA sense strand
ccaaucggcugcagaagcu

SEQ ID NO: 2169396 - RNA, 19 nt, Homo sapiens
  misc_RNA (1)...(19): siRNA sense strand
gacgaugagguacugauuu

SEQ ID NO: 2169397 - RNA, 19 nt, Homo sapiens
  misc_RNA (1)...(19): siRNA sense strand
guacaacugcucugacgau

SEQ ID NO: 2169398 - RNA, 19 nt, Homo sapiens
  misc_RNA (1)...(19): siRNA sense strand
gaugagguacugauuuaca

SEQ ID NO: 2169399 - RNA, 19 nt, Homo sapiens
  misc_RNA (1)...(19): siRNA sense strand
ccaggacuuugccaacaug

SEQ ID NO: 2169400 - RNA, 19 nt, Homo sapiens
  misc_RNA (1)...(19): siRNA sense strand
gaucccagccuccaacaag

SEQ ID NO: 2169401 - RNA, 19 nt, Homo sapiens
  misc_RNA (1)...(19): siRNA sense strand
gugcuugugucugaaguga

SEQ ID NO: 2169402 - RNA, 19 nt, Homo sapiens
  misc_RNA (1)...(19): siRNA sense strand
ccaaggggcugcucuuugu

SEQ ID NO: 2169403 - RNA, 19 nt, Homo sapiens
  misc_RNA (1)...(19): siRNA sense strand
gcaacuucaucauccacau

SEQ ID NO: 2169404 - RNA, 19 nt, Homo sapiens
  misc_RNA (1)...(19): siRNA sense strand
gaucuggaccucuccuaca

SEQ ID NO: 2169405 - RNA, 19 nt, Homo sapiens
  misc_RNA (1)...(19): siRNA sense strand
gaacgggcugugcuugugu

SEQ ID NO: 2169406 - RNA, 19 nt, Homo sapiens
  misc_RNA (1)...(19): siRNA sense strand
ggaccucuccuacaacaac

SEQ ID NO: 2169407 - RNA, 19 nt, Homo sapiens
  misc_RNA (1)...(19): siRNA sense strand
ccaagucccgccucucaga

SEQ ID NO: 2169408 - RNA, 19 nt, Homo sapiens
  misc_RNA (1)...(19): siRNA sense strand
gcucccaggcuucggcuuu

SEQ ID NO: 2169409 - RNA, 19 nt, Homo sapiens
  misc_RNA (1)...(19): siRNA sense strand
gcgcccaguucuucaccaa

SEQ ID NO: 2169410 - RNA, 19 nt, Homo sapiens
  misc_RNA (1)...(19): siRNA sense strand
uaacccacuucacugcaau

SEQ ID NO: 2169411 - RNA, 19 nt, Homo sapiens
  misc_RNA (1)...(19): siRNA sense strand
gccaggacuuugccaacau

SEQ ID NO: 2169412 - RNA, 19 nt, Homo sapiens
  misc_RNA (1)...(19): siRNA sense strand
gcuacaaggucugcaacca

SEQ ID NO: 2169413 - RNA, 19 nt, Homo sapiens
  misc_RNA (1)...(19): siRNA sense strand
ccacgcugcuggucuucau

SEQ ID NO: 2169414 - RNA, 19 nt, Homo sapiens
  misc_RNA (1)...(19): siRNA sense strand
ccacccuuguccuuuaguu

SEQ ID NO: 2169415 - RNA, 19 nt, Homo sapiens
  misc_RNA (1)...(19): siRNA sense strand
gaacaccaucagccacauc

SEQ ID NO: 2169416 - RNA, 19 nt, Homo sapiens
  misc_RNA (1)...(19): siRNA sense strand
agauguaccagcugcagua

SEQ ID NO: 2169417 - RNA, 19 nt, Homo sapiens
  misc_RNA (1)...(19): siRNA sense strand
caucagccgccaggacuuu

SEQ ID NO: 2169418 - RNA, 19 nt, Homo sapiens
  misc_RNA (1)...(19): siRNA sense strand
ucucgaacaucuggacgaa

SEQ ID NO: 2169419 - RNA, 19 nt, Homo sapiens
  misc_RNA (1)...(19): siRNA sense strand
ugacgaugagguacugauu

SEQ ID NO: 2169420 - RNA, 19 nt, Homo sapiens
  misc_RNA (1)...(19): siRNA sense strand
caccacaucucaggacagu

SEQ ID NO: 2169421 - RNA, 19 nt, Homo sapiens
  misc_RNA (1)...(19): siRNA sense strand
ccucaaggaccgcugucua

SEQ ID NO: 2169422 - RNA, 19 nt, Homo sapiens
  misc_RNA (1)...(19): siRNA sense strand
aagcgcagccucucuguca

SEQ ID NO: 2169423 - RNA, 19 nt, Homo sapiens
  misc_RNA (1)...(19): siRNA sense strand
ggaacaccaucagccacau

SEQ ID NO: 2169424 - RNA, 19 nt, Homo sapiens
  misc_RNA (1)...(19): siRNA sense strand
ugcagcaccuuaucgugaa

SEQ ID NO: 2169425 - RNA, 19 nt, Homo sapiens
  misc_RNA (1)...(19): siRNA sense strand
gcaugcucuugcccuuuga

SEQ ID NO: 2169426 - RNA, 19 nt, Homo sapiens
  misc_RNA (1)...(19): siRNA sense strand
caccuuaucgugaacaaca

SEQ ID NO: 2169427 - RNA, 19 nt, Homo sapiens
  misc_RNA (1)...(19): siRNA sense strand
ccagcacacacacaaguug

SEQ ID NO: 2169428 - RNA, 19 nt, Homo sapiens
  misc_RNA (1)...(19): siRNA sense strand
gccccacccuuguccuuua

SEQ ID NO: 2169429 - RNA, 19 nt, Homo sapiens
  misc_RNA (1)...(19): siRNA sense strand
ggacuuccugcugacauug

SEQ ID NO: 2169430 - RNA, 19 nt, Homo sapiens
  misc_RNA (1)...(19): siRNA sense strand
ucaaguggucugucagcaa

SEQ ID NO: 2169431 - RNA, 19 nt, Homo sapiens
  misc_RNA (1)...(19): siRNA sense strand
gaccucaagagucagagaa

SEQ ID NO: 2169432 - RNA, 19 nt, Homo sapiens
  misc_RNA (1)...(19): siRNA sense strand
cccuggaccucaagaguca

SEQ ID NO: 2169433 - RNA, 19 nt, Homo sapiens
  misc_RNA (1)...(19): siRNA sense strand
ggucaacaaccugguguca

SEQ ID NO: 2169434 - RNA, 19 nt, Homo sapiens
  misc_RNA (1)...(19): siRNA sense strand
gggacuggcuacgacuugu

SEQ ID NO: 2169435 - RNA, 19 nt, Homo sapiens
  misc_RNA (1)...(19): siRNA sense strand
accacaaccugcuggauca

SEQ ID NO: 2169436 - RNA, 19 nt, Homo sapiens
  misc_RNA (1)...(19): siRNA sense strand
cagccacuccuucgacaug

SEQ ID NO: 2169437 - RNA, 19 nt, Homo sapiens
  misc_RNA (1)...(19): siRNA sense strand
ucaagagucagagaaagga

SEQ ID NO: 2169438 - RNA, 19 nt, Homo sapiens
  misc_RNA (1)...(19): siRNA sense strand
ccucaagagucagagaaag

SEQ ID NO: 2169439 - RNA, 19 nt, Homo sapiens
  misc_RNA (1)...(19): siRNA sense strand
ggaccucaagagucagaga

SEQ ID NO: 2169440 - RNA, 19 nt, Homo sapiens
  misc_RNA (1)...(19): siRNA sense strand
caacuucaucauccacauc

SEQ ID NO: 2169441 - RNA, 19 nt, Homo sapiens
  misc_RNA (1)...(19): siRNA sense strand
ucacccagcacacacacaa

SEQ ID NO: 2169442 - RNA, 19 nt, Homo sapiens
  misc_RNA (1)...(19): siRNA sense strand
ggacuggcuacgacuugug

SEQ ID NO: 2169443 - RNA, 19 nt, Homo sapiens
  misc_RNA (1)...(19): siRNA sense strand
gaacaaggaugcagaagaa

SEQ ID NO: 2169444 - RNA, 19 nt, Homo sapiens
  misc_RNA (1)...(19): siRNA sense strand
gaauucagcugaugaguuu

SEQ ID NO: 2169445 - RNA, 19 nt, Homo sapiens
  misc_RNA (1)...(19): siRNA sense strand
gaaacccacuuuauuguga

SEQ ID NO: 2169446 - RNA, 19 nt, Homo sapiens
  misc_RNA (1)...(19): siRNA sense strand
gcccauaucuucaguuauu

SEQ ID NO: 2169447 - RNA, 19 nt, Homo sapiens
  misc_RNA (1)...(19): siRNA sense strand
agaagaaacucaagaugua

SEQ ID NO: 2169448 - RNA, 19 nt, Homo sapiens
  misc_RNA (1)...(19): siRNA sense strand
gaacuuggauacaguacuu

SEQ ID NO: 2169449 - RNA, 19 nt, Homo sapiens
  misc_RNA (1)...(19): siRNA sense strand
aaacugagguguuggaauu

SEQ ID NO: 2169450 - RNA, 19 nt, Homo sapiens
  misc_RNA (1)...(19): siRNA sense strand
gggcauagauucagcauuc

SEQ ID NO: 2169451 - RNA, 19 nt, Homo sapiens
  misc_RNA (1)...(19): siRNA sense strand
gacaagcaguucuguauga

SEQ ID NO: 2169452 - RNA, 19 nt, Homo sapiens
  misc_RNA (1)...(19): siRNA sense strand
gccaggaccuucucucuaa

SEQ ID NO: 2169453 - RNA, 19 nt, Homo sapiens
  misc_RNA (1)...(19): siRNA sense strand
ucaagaaacucccagagaa

SEQ ID NO: 2169454 - RNA, 19 nt, Homo sapiens
  misc_RNA (1)...(19): siRNA sense strand
gaaagaagggcauagauuc

SEQ ID NO: 2169455 - RNA, 19 nt, Homo sapiens
  misc_RNA (1)...(19): siRNA sense strand
cagggaagauauaugaaua

SEQ ID NO: 2169456 - RNA, 19 nt, Homo sapiens
  misc_RNA (1)...(19): siRNA sense strand
caagugugcugcaaucauu

SEQ ID NO: 2169457 - RNA, 19 nt, Homo sapiens
  misc_RNA (1)...(19): siRNA sense strand
gaauuuguuuccaucagua

SEQ ID NO: 2169458 - RNA, 19 nt, Homo sapiens
  misc_RNA (1)...(19): siRNA sense strand
uaacacaagugaucacaga

SEQ ID NO: 2169459 - RNA, 19 nt, Homo sapiens
  misc_RNA (1)...(19): siRNA sense strand
gcuuggaccugucagauaa

SEQ ID NO: 2169460 - RNA, 19 nt, Homo sapiens
  misc_RNA (1)...(19): siRNA sense strand
gcagauggccauucagaaa

SEQ ID NO: 2169461 - RNA, 19 nt, Homo sapiens
  misc_RNA (1)...(19): siRNA sense strand
ccaaagagaagaagacaaa

SEQ ID NO: 2169462 - RNA, 19 nt, Homo sapiens
  misc_RNA (1)...(19): siRNA sense strand
caacugagugacaucauua

SEQ ID NO: 2169463 - RNA, 19 nt, Homo sapiens
  misc_RNA (1)...(19): siRNA sense strand
gauccaugcuaccugcuua

SEQ ID NO: 2169464 - RNA, 19 nt, Homo sapiens
  misc_RNA (1)...(19): siRNA sense strand
ccagaaugauaacugcuua

SEQ ID NO: 2169465 - RNA, 19 nt, Homo sapiens
  misc_RNA (1)...(19): siRNA sense strand
ggagaaauuugggaucuau

SEQ ID NO: 2169466 - RNA, 19 nt, Homo sapiens
  misc_RNA (1)...(19): siRNA sense strand
ugagagcucuuguggauau

SEQ ID NO: 2169467 - RNA, 19 nt, Homo sapiens
  misc_RNA (1)...(19): siRNA sense strand
ggagauacaggagaaauuu

SEQ ID NO: 2169468 - RNA, 19 nt, Homo sapiens
  misc_RNA (1)...(19): siRNA sense strand
uaagaagccagacgaauuu

SEQ ID NO: 2169469 - RNA, 19 nt, Homo sapiens
  misc_RNA (1)...(19): siRNA sense strand
agacacgaauauacaguua

SEQ ID NO: 2169470 - RNA, 19 nt, Homo sapiens
  misc_RNA (1)...(19): siRNA sense strand
gcaguuuguucuacuaaga

SEQ ID NO: 2169471 - RNA, 19 nt, Homo sapiens
  misc_RNA (1)...(19): siRNA sense strand
gaagauacugggagaaaga

SEQ ID NO: 2169472 - RNA, 19 nt, Homo sapiens
  misc_RNA (1)...(19): siRNA sense strand
aaagauagguuguagugau

SEQ ID NO: 2169473 - RNA, 19 nt, Homo sapiens
  misc_RNA (1)...(19): siRNA sense strand
gccaugaaauccauaaugu

SEQ ID NO: 2169474 - RNA, 19 nt, Homo sapiens
  misc_RNA (1)...(19): siRNA sense strand
ccaguuagcucagcguuug

SEQ ID NO: 2169475 - RNA, 19 nt, Homo sapiens
  misc_RNA (1)...(19): siRNA sense strand
cuucagaggucuaggguuu

SEQ ID NO: 2169476 - RNA, 19 nt, Homo sapiens
  misc_RNA (1)...(19): siRNA sense strand
gaagaagggacaagcaguu

SEQ ID NO: 2169477 - RNA, 19 nt, Homo sapiens
  misc_RNA (1)...(19): siRNA sense strand
gccaguagcuacagguuug

SEQ ID NO: 2169478 - RNA, 19 nt, Homo sapiens
  misc_RNA (1)...(19): siRNA sense strand
gcaagagugccuacaaaga

SEQ ID NO: 2169479 - RNA, 19 nt, Homo sapiens
  misc_RNA (1)...(19): siRNA sense strand
caucuugacuucuccauca

SEQ ID NO: 2169480 - RNA, 19 nt, Homo sapiens
  misc_RNA (1)...(19): siRNA sense strand
gaacaacuucacugccuuu

SEQ ID NO: 2169481 - RNA, 19 nt, Homo sapiens
  misc_RNA (1)...(19): siRNA sense strand
cgaaugaaauuguccuauc

SEQ ID NO: 2169482 - RNA, 19 nt, Homo sapiens
  misc_RNA (1)...(19): siRNA sense strand
caugggacguaucacuuua

SEQ ID NO: 2169483 - RNA, 19 nt, Homo sapiens
  misc_RNA (1)...(19): siRNA sense strand
gcuguuggcugaaauaaac

SEQ ID NO: 2169484 - RNA, 19 nt, Homo sapiens
  misc_RNA (1)...(19): siRNA sense strand
cugaugaguuugcaaauga

SEQ ID NO: 2169485 - RNA, 19 nt, Homo sapiens
  misc_RNA (1)...(19): siRNA sense strand
gcagaagaauucagcugau

SEQ ID NO: 2169486 - RNA, 19 nt, Homo sapiens
  misc_RNA (1)...(19): siRNA sense strand
gcaagcaguauauguuuga

SEQ ID NO: 2169487 - RNA, 19 nt, Homo sapiens
  misc_RNA (1)...(19): siRNA sense strand
uuagugaccucuuauuugu

SEQ ID NO: 2169488 - RNA, 19 nt, Homo sapiens
  misc_RNA (1)...(19): siRNA sense strand
caagaaacucccagagaaa

SEQ ID NO: 2169489 - RNA, 19 nt, Homo sapiens
  misc_RNA (1)...(19): siRNA sense strand
gaugagguaacauaucuaa

SEQ ID NO: 2169490 - RNA, 19 nt, Homo sapiens
  misc_RNA (1)...(19): siRNA sense strand
caaacuggcccauaucuuc

SEQ ID NO: 2169491 - RNA, 19 nt, Homo sapiens
  misc_RNA (1)...(19): siRNA sense strand
auacaugcccagccuauua

SEQ ID NO: 2169492 - RNA, 19 nt, Homo sapiens
  misc_RNA (1)...(19): siRNA sense strand
ggaccugcaguuaaagaua

SEQ ID NO: 2169493 - RNA, 19 nt, Homo sapiens
  misc_RNA (1)...(19): siRNA sense strand
gaauuaucccuaccacaaa

SEQ ID NO: 2169494 - RNA, 19 nt, Homo sapiens
  misc_RNA (1)...(19): siRNA sense strand
gaacuugacccaucagcau

SEQ ID NO: 2169495 - RNA, 19 nt, Homo sapiens
  misc_RNA (1)...(19): siRNA sense strand
cagcugagucggaucuuua

SEQ ID NO: 2169496 - RNA, 19 nt, Homo sapiens
  misc_RNA (1)...(19): siRNA sense strand
gaagccagacgaauuuguu

SEQ ID NO: 2169497 - RNA, 19 nt, Homo sapiens
  misc_RNA (1)...(19): siRNA sense strand
cagaguggcugaugucaag

SEQ ID NO: 2169498 - RNA, 19 nt, Homo sapiens
  misc_RNA (1)...(19): siRNA sense strand
ucaagugaaugcugcagaa

SEQ ID NO: 2169499 - RNA, 19 nt, Homo sapiens
  misc_RNA (1)...(19): siRNA sense strand
ggucacuccuuccauauag

SEQ ID NO: 2169500 - RNA, 19 nt, Homo sapiens
  misc_RNA (1)...(19): siRNA sense strand
gaaacccucucagccaaug

SEQ ID NO: 2169501 - RNA, 19 nt, Homo sapiens
  misc_RNA (1)...(19): siRNA sense strand
agucggaucuuuauguuug

SEQ ID NO: 2169502 - RNA, 19 nt, Homo sapiens
  misc_RNA (1)...(19): siRNA sense strand
caaaugaagcccagagugu

SEQ ID NO: 2169503 - RNA, 19 nt, Homo sapiens
  misc_RNA (1)...(19): siRNA sense strand
ggaccugucagauaauuau

SEQ ID NO: 2169504 - RNA, 19 nt, Homo sapiens
  misc_RNA (1)...(19): siRNA sense strand
ucaacugagugacaucauu

SEQ ID NO: 2169505 - RNA, 19 nt, Homo sapiens
  misc_RNA (1)...(19): siRNA sense strand
aaacgacccuagugagaau

SEQ ID NO: 2169506 - RNA, 19 nt, Homo sapiens
  misc_RNA (1)...(19): siRNA sense strand
gaaaccaccugugcauuuu

SEQ ID NO: 2169507 - RNA, 19 nt, Homo sapiens
  misc_RNA (1)...(19): siRNA sense strand
caggaggccuucucaagug

SEQ ID NO: 2169508 - RNA, 19 nt, Homo sapiens
  misc_RNA (1)...(19): siRNA sense strand
ggucaagugugcugcaauc

SEQ ID NO: 2169509 - RNA, 19 nt, Homo sapiens
  misc_RNA (1)...(19): siRNA sense strand
gugaugagguaacauaucu

SEQ ID NO: 2169510 - RNA, 19 nt, Homo sapiens
  misc_RNA (1)...(19): siRNA sense strand
gaccugcaguuaaagauag

SEQ ID NO: 2169511 - RNA, 19 nt, Homo sapiens
  misc_RNA (1)...(19): siRNA sense strand
ugagugacaucauuaccuu

SEQ ID NO: 2169512 - RNA, 19 nt, Homo sapiens
  misc_RNA (1)...(19): siRNA sense strand
gagcagauggccauucaga

SEQ ID NO: 2169513 - RNA, 19 nt, Homo sapiens
  misc_RNA (1)...(19): siRNA sense strand
ccucauggccaucuucuuu

SEQ ID NO: 2169514 - RNA, 19 nt, Homo sapiens
  misc_RNA (1)...(19): siRNA sense strand
ugagguaacauaucuaaga

SEQ ID NO: 2169515 - RNA, 19 nt, Homo sapiens
  misc_RNA (1)...(19): siRNA sense strand
gaaugaaauuguccuaucc

SEQ ID NO: 2169516 - RNA, 19 nt, Homo sapiens
  misc_RNA (1)...(19): siRNA sense strand
gaagaaacucaagauguau

SEQ ID NO: 2169517 - RNA, 19 nt, Homo sapiens
  misc_RNA (1)...(19): siRNA sense strand
agaaaccaccugugcauuu

SEQ ID NO: 2169518 - RNA, 19 nt, Homo sapiens
  misc_RNA (1)...(19): siRNA sense strand
gcucagugcuaacacaagu

SEQ ID NO: 2169519 - RNA, 19 nt, Homo sapiens
  misc_RNA (1)...(19): siRNA sense strand
gcccaaggaacaacagaua

SEQ ID NO: 2169520 - RNA, 19 nt, Homo sapiens
  misc_RNA (1)...(19): siRNA sense strand
ugaaagaaauagcaguaag

SEQ ID NO: 2169521 - RNA, 19 nt, Homo sapiens
  misc_RNA (1)...(19): siRNA sense strand
gcacagaaagaagggcaua

SEQ ID NO: 2169522 - RNA, 19 nt, Homo sapiens
  misc_RNA (1)...(19): siRNA sense strand
gggacaagcaguucuguau

SEQ ID NO: 2169523 - RNA, 19 nt, Homo sapiens
  misc_RNA (1)...(19): siRNA sense strand
cagaagaaacucaagaugu

SEQ ID NO: 2169524 - RNA, 19 nt, Homo sapiens
  misc_RNA (1)...(19): siRNA sense strand
gcugaugaguuugcaaaug

SEQ ID NO: 2169525 - RNA, 19 nt, Homo sapiens
  misc_RNA (1)...(19): siRNA sense strand
gaggaaggccaggaacuuu

SEQ ID NO: 2169526 - RNA, 19 nt, Homo sapiens
  misc_RNA (1)...(19): siRNA sense strand
uggcccauaucuucaguua

SEQ ID NO: 2169527 - RNA, 19 nt, Homo sapiens
  misc_RNA (1)...(19): siRNA sense strand
gauaguggaagaacaacuu

SEQ ID NO: 2169528 - RNA, 19 nt, Homo sapiens
  misc_RNA (1)...(19): siRNA sense strand
gagaagaagacaaaguuag

SEQ ID NO: 2169529 - RNA, 19 nt, Homo sapiens
  misc_RNA (1)...(19): siRNA sense strand
cuugagagcucuuguggau

SEQ ID NO: 2169530 - RNA, 19 nt, Homo sapiens
  misc_RNA (1)...(19): siRNA sense strand
agaaagaagggcauagauu

SEQ ID NO: 2169531 - RNA, 19 nt, Homo sapiens
  misc_RNA (1)...(19): siRNA sense strand
gcagaagaaacucaagaug

SEQ ID NO: 2169532 - RNA, 19 nt, Homo sapiens
  misc_RNA (1)...(19): siRNA sense strand
gugagcagauggccauuca

SEQ ID NO: 2169533 - RNA, 19 nt, Homo sapiens
  misc_RNA (1)...(19): siRNA sense strand
uggcuacucuuaugcagaa

SEQ ID NO: 2169534 - RNA, 19 nt, Homo sapiens
  misc_RNA (1)...(19): siRNA sense strand
uagaucaagugaagaggaa

SEQ ID NO: 2169535 - RNA, 19 nt, Homo sapiens
  misc_RNA (1)...(19): siRNA sense strand
caggcuacaagaagaauua

SEQ ID NO: 2169536 - RNA, 19 nt, Homo sapiens
  misc_RNA (1)...(19): siRNA sense strand
gaugugaacuuggauacag

SEQ ID NO: 2169537 - RNA, 19 nt, Homo sapiens
  misc_RNA (1)...(19): siRNA sense strand
ggaaggccaggaacuuuau

SEQ ID NO: 2169538 - RNA, 19 nt, Homo sapiens
  misc_RNA (1)...(19): siRNA sense strand
ggaaacccacuuuauugug

SEQ ID NO: 2169539 - RNA, 19 nt, Homo sapiens
  misc_RNA (1)...(19): siRNA sense strand
agaauuaucccuaccacaa

SEQ ID NO: 2169540 - RNA, 19 nt, Homo sapiens
  misc_RNA (1)...(19): siRNA sense strand
ggagaacaaggaugcagaa

SEQ ID NO: 2169541 - RNA, 19 nt, Homo sapiens
  misc_RNA (1)...(19): siRNA sense strand
uggacaaacuggcccauau

SEQ ID NO: 2169542 - RNA, 19 nt, Homo sapiens
  misc_RNA (1)...(19): siRNA sense strand
agauagcucugcaccuuga

SEQ ID NO: 2169543 - RNA, 19 nt, Homo sapiens
  misc_RNA (1)...(19): siRNA sense strand
gaauacugcuguccacuua

SEQ ID NO: 2169544 - RNA, 19 nt, Homo sapiens
  misc_RNA (1)...(19): siRNA sense strand
gcagagcacugaaauuuga

SEQ ID NO: 2169545 - RNA, 19 nt, Homo sapiens
  misc_RNA (1)...(19): siRNA sense strand
ggaccaaccuuucgacauu

SEQ ID NO: 2169546 - RNA, 19 nt, Homo sapiens
  misc_RNA (1)...(19): siRNA sense strand
gagaugacguguaacaauu

SEQ ID NO: 2169547 - RNA, 19 nt, Homo sapiens
  misc_RNA (1)...(19): siRNA sense strand
uagcggcucuguugaguua

SEQ ID NO: 2169548 - RNA, 19 nt, Homo sapiens
  misc_RNA (1)...(19): siRNA sense strand
gcaaugaugacuugacuaa

SEQ ID NO: 2169549 - RNA, 19 nt, Homo sapiens
  misc_RNA (1)...(19): siRNA sense strand
gaacagacauuggcagaag

SEQ ID NO: 2169550 - RNA, 19 nt, Homo sapiens
  misc_RNA (1)...(19): siRNA sense strand
cuacauggaccuaguaaua

SEQ ID NO: 2169551 - RNA, 19 nt, Homo sapiens
  misc_RNA (1)...(19): siRNA sense strand
gaaaccacauuuaagaaca

SEQ ID NO: 2169552 - RNA, 19 nt, Homo sapiens
  misc_RNA (1)...(19): siRNA sense strand
ccacaagcauugaacuauu

SEQ ID NO: 2169553 - RNA, 19 nt, Homo sapiens
  misc_RNA (1)...(19): siRNA sense strand
cagaaacucuuccaacaug

SEQ ID NO: 2169554 - RNA, 19 nt, Homo sapiens
  misc_RNA (1)...(19): siRNA sense strand
uuaauugggucauuuggua

SEQ ID NO: 2169555 - RNA, 19 nt, Homo sapiens
  misc_RNA (1)...(19): siRNA sense strand
gaagaugccaugcgaauca

SEQ ID NO: 2169556 - RNA, 19 nt, Homo sapiens
  misc_RNA (1)...(19): siRNA sense strand
gcaccaaauucaaauaaag

SEQ ID NO: 2169557 - RNA, 19 nt, Homo sapiens
  misc_RNA (1)...(19): siRNA sense strand
caaagucaguuccuuauac

SEQ ID NO: 2169558 - RNA, 19 nt, Homo sapiens
  misc_RNA (1)...(19): siRNA sense strand
ggucaaauacaguuaauug

SEQ ID NO: 2169559 - RNA, 19 nt, Homo sapiens
  misc_RNA (1)...(19): siRNA sense strand
gaacaucuuggaacucaaa

SEQ ID NO: 2169560 - RNA, 19 nt, Homo sapiens
  misc_RNA (1)...(19): siRNA sense strand
cgaaacagcuaacgaaagg

SEQ ID NO: 2169561 - RNA, 19 nt, Homo sapiens
  misc_RNA (1)...(19): siRNA sense strand
gagcagcguuucccaagga

SEQ ID NO: 2169562 - RNA, 19 nt, Homo sapiens
  misc_RNA (1)...(19): siRNA sense strand
cacaagcauugaacuauuu

SEQ ID NO: 2169563 - RNA, 19 nt, Homo sapiens
  misc_RNA (1)...(19): siRNA sense strand
gcaggauucuggaagcaaa

SEQ ID NO: 2169564 - RNA, 19 nt, Homo sapiens
  misc_RNA (1)...(19): siRNA sense strand
caauaucacugaacagaca

SEQ ID NO: 2169565 - RNA, 19 nt, Homo sapiens
  misc_RNA (1)...(19): siRNA sense strand
gaagaagacuugagaaaag

SEQ ID NO: 2169566 - RNA, 19 nt, Homo sapiens
  misc_RNA (1)...(19): siRNA sense strand
gcaguauuguuauucauuc

SEQ ID NO: 2169567 - RNA, 19 nt, Homo sapiens
  misc_RNA (1)...(19): siRNA sense strand
aaugaugacuugacuaaug

SEQ ID NO: 2169568 - RNA, 19 nt, Homo sapiens
  misc_RNA (1)...(19): siRNA sense strand
gaaagccagucaccucaca

SEQ ID NO: 2169569 - RNA, 19 nt, Homo sapiens
  misc_RNA (1)...(19): siRNA sense strand
agaagcagcuguaaauagu

SEQ ID NO: 2169570 - RNA, 19 nt, Homo sapiens
  misc_RNA (1)...(19): siRNA sense strand
uguagaaacugacuccauu

SEQ ID NO: 2169571 - RNA, 19 nt, Homo sapiens
  misc_RNA (1)...(19): siRNA sense strand
gcucauuucuggccaagug

SEQ ID NO: 2169572 - RNA, 19 nt, Homo sapiens
  misc_RNA (1)...(19): siRNA sense strand
cagugaagguguuguagaa

SEQ ID NO: 2169573 - RNA, 19 nt, Homo sapiens
  misc_RNA (1)...(19): siRNA sense strand
gagcacgucugaagagaag

SEQ ID NO: 2169574 - RNA, 19 nt, Homo sapiens
  misc_RNA (1)...(19): siRNA sense strand
gaacaggaacccagcaaca

SEQ ID NO: 2169575 - RNA, 19 nt, Homo sapiens
  misc_RNA (1)...(19): siRNA sense strand
ucaucaggaucaaacuuua

SEQ ID NO: 2169576 - RNA, 19 nt, Homo sapiens
  misc_RNA (1)...(19): siRNA sense strand
ugacggaacccaugaauca

SEQ ID NO: 2169577 - RNA, 19 nt, Homo sapiens
  misc_RNA (1)...(19): siRNA sense strand
aaacaggacuccaguacca

SEQ ID NO: 2169578 - RNA, 19 nt, Homo sapiens
  misc_RNA (1)...(19): siRNA sense strand
acaaagagcuuggaaacca

SEQ ID NO: 2169579 - RNA, 19 nt, Homo sapiens
  misc_RNA (1)...(19): siRNA sense strand
ugauaaagcugcucaugag

SEQ ID NO: 2169580 - RNA, 19 nt, Homo sapiens
  misc_RNA (1)...(19): siRNA sense strand
caaguagccuccaguuucu

SEQ ID NO: 2169581 - RNA, 19 nt, Homo sapiens
  misc_RNA (1)...(19): siRNA sense strand
acacagacaucaugaaagg

SEQ ID NO: 2169582 - RNA, 19 nt, Homo sapiens
  misc_RNA (1)...(19): siRNA sense strand
ggagaugacguguaacaau

SEQ ID NO: 2169583 - RNA, 19 nt, Homo sapiens
  misc_RNA (1)...(19): siRNA sense strand
ucaaguagccuccaguuuc

SEQ ID NO: 2169584 - RNA, 19 nt, Homo sapiens
  misc_RNA (1)...(19): siRNA sense strand
ggagaagggcccagugaug

SEQ ID NO: 2169585 - RNA, 19 nt, Homo sapiens
  misc_RNA (1)...(19): siRNA sense strand
gaaacugacuccauuuuag

SEQ ID NO: 2169586 - RNA, 19 nt, Homo sapiens
  misc_RNA (1)...(19): siRNA sense strand
gcacaaauuuucaaacauc

SEQ ID NO: 2169587 - RNA, 19 nt, Homo sapiens
  misc_RNA (1)...(19): siRNA sense strand
caacagaacacaagaaagc

SEQ ID NO: 2169588 - RNA, 19 nt, Homo sapiens
  misc_RNA (1)...(19): siRNA sense strand
ggaccacagugaagguguu

SEQ ID NO: 2169589 - RNA, 19 nt, Homo sapiens
  misc_RNA (1)...(19): siRNA sense strand
acauggaccuaguaauaaa

SEQ ID NO: 2169590 - RNA, 19 nt, Homo sapiens
  misc_RNA (1)...(19): siRNA sense strand
ccuguuaccguuccauuua

SEQ ID NO: 2169591 - RNA, 19 nt, Homo sapiens
  misc_RNA (1)...(19): siRNA sense strand
uaaagcugcucaugagaca

SEQ ID NO: 2169592 - RNA, 19 nt, Homo sapiens
  misc_RNA (1)...(19): siRNA sense strand
uagugguucuggucaaaua

SEQ ID NO: 2169593 - RNA, 19 nt, Homo sapiens
  misc_RNA (1)...(19): siRNA sense strand
guaaauaguauccuagagu

SEQ ID NO: 2169594 - RNA, 19 nt, Homo sapiens
  misc_RNA (1)...(19): siRNA sense strand
uggcagagcacugaaauuu

SEQ ID NO: 2169595 - RNA, 19 nt, Homo sapiens
  misc_RNA (1)...(19): siRNA sense strand
gaugaucgauaggauguuc

SEQ ID NO: 2169596 - RNA, 19 nt, Homo sapiens
  misc_RNA (1)...(19): siRNA sense strand
ugagaaaaguggacaauga

SEQ ID NO: 2169597 - RNA, 19 nt, Homo sapiens
  misc_RNA (1)...(19): siRNA sense strand
gccaaagccuauccagaug

SEQ ID NO: 2169598 - RNA, 19 nt, Homo sapiens
  misc_RNA (1)...(19): siRNA sense strand
gcacaaccacagcaggaaa

SEQ ID NO: 2169599 - RNA, 19 nt, Homo sapiens
  misc_RNA (1)...(19): siRNA sense strand
gaagcagcuguaaauagua

SEQ ID NO: 2169600 - RNA, 19 nt, Homo sapiens
  misc_RNA (1)...(19): siRNA sense strand
gagcuuggaaaccacauuu

SEQ ID NO: 2169601 - RNA, 19 nt, Homo sapiens
  misc_RNA (1)...(19): siRNA sense strand
ucacugaggaccaaccuuu

SEQ ID NO: 2169602 - RNA, 19 nt, Homo sapiens
  misc_RNA (1)...(19): siRNA sense strand
gagauggugaugaucgaua

SEQ ID NO: 2169603 - RNA, 19 nt, Homo sapiens
  misc_RNA (1)...(19): siRNA sense strand
ccaaagucaguuccuuaua

SEQ ID NO: 2169604 - RNA, 19 nt, Homo sapiens
  misc_RNA (1)...(19): siRNA sense strand
guucauagacagacuccua

SEQ ID NO: 2169605 - RNA, 19 nt, Homo sapiens
  misc_RNA (1)...(19): siRNA sense strand
caucuuuaccugugcauaa

SEQ ID NO: 2169606 - RNA, 19 nt, Homo sapiens
  misc_RNA (1)...(19): siRNA sense strand
auaguauccuagaguguua

SEQ ID NO: 2169607 - RNA, 19 nt, Homo sapiens
  misc_RNA (1)...(19): siRNA sense strand
ggacaaugaauuugagaca

SEQ ID NO: 2169608 - RNA, 19 nt, Homo sapiens
  misc_RNA (1)...(19): siRNA sense strand
gaacccagcaacaauucuu

SEQ ID NO: 2169609 - RNA, 19 nt, Homo sapiens
  misc_RNA (1)...(19): siRNA sense strand
acagaugccugcuccuaga

SEQ ID NO: 2169610 - RNA, 19 nt, Homo sapiens
  misc_RNA (1)...(19): siRNA sense strand
ggaccuaguaauaaaucua

SEQ ID NO: 2169611 - RNA, 19 nt, Homo sapiens
  misc_RNA (1)...(19): siRNA sense strand
gcuuggaaaccacauuuaa

SEQ ID NO: 2169612 - RNA, 19 nt, Homo sapiens
  misc_RNA (1)...(19): siRNA sense strand
ccagccagcauuugucuaa

SEQ ID NO: 2169613 - RNA, 19 nt, Homo sapiens
  misc_RNA (1)...(19): siRNA sense strand
acacacagacaucaugaaa

SEQ ID NO: 2169614 - RNA, 19 nt, Homo sapiens
  misc_RNA (1)...(19): siRNA sense strand
gauucuggaagcaaaguua

SEQ ID NO: 2169615 - RNA, 19 nt, Homo sapiens
  misc_RNA (1)...(19): siRNA sense strand
gaccgaugcuuaacaacca

SEQ ID NO: 2169616 - RNA, 19 nt, Homo sapiens
  misc_RNA (1)...(19): siRNA sense strand
acaguuaauugggucauuu

SEQ ID NO: 2169617 - RNA, 19 nt, Homo sapiens
  misc_RNA (1)...(19): siRNA sense strand
gugauggacugccacuuuc

SEQ ID NO: 2169618 - RNA, 19 nt, Homo sapiens
  misc_RNA (1)...(19): siRNA sense strand
aagcagcuguaaauaguau

SEQ ID NO: 2169619 - RNA, 19 nt, Homo sapiens
  misc_RNA (1)...(19): siRNA sense strand
guagaaacugacuccauuu

SEQ ID NO: 2169620 - RNA, 19 nt, Homo sapiens
  misc_RNA (1)...(19): siRNA sense strand
ccacagugaagguguugua

SEQ ID NO: 2169621 - RNA, 19 nt, Homo sapiens
  misc_RNA (1)...(19): siRNA sense strand
acuuggagaugacguguaa

SEQ ID NO: 2169622 - RNA, 19 nt, Homo sapiens
  misc_RNA (1)...(19): siRNA sense strand
acaaugaauuugagacagu

SEQ ID NO: 2169623 - RNA, 19 nt, Homo sapiens
  misc_RNA (1)...(19): siRNA sense strand
guacaccacguccagacua

SEQ ID NO: 2169624 - RNA, 19 nt, Homo sapiens
  misc_RNA (1)...(19): siRNA sense strand
caagggaucucuuuugcuu

SEQ ID NO: 2169625 - RNA, 19 nt, Homo sapiens
  misc_RNA (1)...(19): siRNA sense strand
agccagcauuugucuaaua

SEQ ID NO: 2169626 - RNA, 19 nt, Homo sapiens
  misc_RNA (1)...(19): siRNA sense strand
gucagacgcugcagccuau

SEQ ID NO: 2169627 - RNA, 19 nt, Homo sapiens
  misc_RNA (1)...(19): siRNA sense strand
acucaggcuucuaauguuu

SEQ ID NO: 2169628 - RNA, 19 nt, Homo sapiens
  misc_RNA (1)...(19): siRNA sense strand
uggcagaagaggcauauuu

SEQ ID NO: 2169629 - RNA, 19 nt, Homo sapiens
  misc_RNA (1)...(19): siRNA sense strand
gcaagaggccaauaucacu

SEQ ID NO: 2169630 - RNA, 19 nt, Homo sapiens
  misc_RNA (1)...(19): siRNA sense strand
cuaguaaugcugauccuaa

SEQ ID NO: 2169631 - RNA, 19 nt, Homo sapiens
  misc_RNA (1)...(19): siRNA sense strand
gaaugaaguuuuacacaca

SEQ ID NO: 2169632 - RNA, 19 nt, Homo sapiens
  misc_RNA (1)...(19): siRNA sense strand
caaugaauuugagacaguu

SEQ ID NO: 2169633 - RNA, 19 nt, Homo sapiens
  misc_RNA (1)...(19): siRNA sense strand
aacagaaacucuuccaaca

SEQ ID NO: 2169634 - RNA, 19 nt, Homo sapiens
  misc_RNA (1)...(19): siRNA sense strand
ggcaacuucuucaaacuca

SEQ ID NO: 2169635 - RNA, 19 nt, Homo sapiens
  misc_RNA (1)...(19): siRNA sense strand
gacuauaaaugggcaacuu

SEQ ID NO: 2169636 - RNA, 19 nt, Homo sapiens
  misc_RNA (1)...(19): siRNA sense strand
auauuuggaugccaguaua

SEQ ID NO: 2169637 - RNA, 19 nt, Homo sapiens
  misc_RNA (1)...(19): siRNA sense strand
cagaagaggcauauuugga

SEQ ID NO: 2169638 - RNA, 19 nt, Homo sapiens
  misc_RNA (1)...(19): siRNA sense strand
ggaaaccacauuuaagaac

SEQ ID NO: 2169639 - RNA, 19 nt, Homo sapiens
  misc_RNA (1)...(19): siRNA sense strand
gaaaaguggacaaugaauu

SEQ ID NO: 2169640 - RNA, 19 nt, Homo sapiens
  misc_RNA (1)...(19): siRNA sense strand
aguuauauccgcauccuua

SEQ ID NO: 2169641 - RNA, 19 nt, Homo sapiens
  misc_RNA (1)...(19): siRNA sense strand
acagaucccugggcucuug

SEQ ID NO: 2169642 - RNA, 19 nt, Homo sapiens
  misc_RNA (1)...(19): siRNA sense strand
gauauucugcagccaauuc

SEQ ID NO: 2169643 - RNA, 19 nt, Homo sapiens
  misc_RNA (1)...(19): siRNA sense strand
caucaagccuucaaacuuu

SEQ ID NO: 2169644 - RNA, 19 nt, Homo sapiens
  misc_RNA (1)...(19): siRNA sense strand
caagagcccugggaaguua

SEQ ID NO: 2169645 - RNA, 19 nt, Homo sapiens
  misc_RNA (1)...(19): siRNA sense strand
ggaggaagaucaaggacaa

SEQ ID NO: 2169646 - RNA, 19 nt, Homo sapiens
  misc_RNA (1)...(19): siRNA sense strand
ccucagagauggccacaaa

SEQ ID NO: 2169647 - RNA, 19 nt, Homo sapiens
  misc_RNA (1)...(19): siRNA sense strand
gaaaggacccagagggaaa

SEQ ID NO: 2169648 - RNA, 19 nt, Homo sapiens
  misc_RNA (1)...(19): siRNA sense strand
ggaagaagaggaugaggaa

SEQ ID NO: 2169649 - RNA, 19 nt, Homo sapiens
  misc_RNA (1)...(19): siRNA sense strand
agacggagcucaaggacuu

SEQ ID NO: 2169650 - RNA, 19 nt, Homo sapiens
  misc_RNA (1)...(19): siRNA sense strand
gcaggaacgagaaguuuaa

SEQ ID NO: 2169651 - RNA, 19 nt, Homo sapiens
  misc_RNA (1)...(19): siRNA sense strand
ggaacaaacuccggaucaa

SEQ ID NO: 2169652 - RNA, 19 nt, Homo sapiens
  misc_RNA (1)...(19): siRNA sense strand
gcagacggcagccauguuu

SEQ ID NO: 2169653 - RNA, 19 nt, Homo sapiens
  misc_RNA (1)...(19): siRNA sense strand
gaacaccgaggaugugcua

SEQ ID NO: 2169654 - RNA, 19 nt, Homo sapiens
  misc_RNA (1)...(19): siRNA sense strand
gaacagguagggaugauca

SEQ ID NO: 2169655 - RNA, 19 nt, Homo sapiens
  misc_RNA (1)...(19): siRNA sense strand
caaacucacugcccaaugg

SEQ ID NO: 2169656 - RNA, 19 nt, Homo sapiens
  misc_RNA (1)...(19): siRNA sense strand
ccaagcagguccucaagau

SEQ ID NO: 2169657 - RNA, 19 nt, Homo sapiens
  misc_RNA (1)...(19): siRNA sense strand
gcacaugccgucagaguuc

SEQ ID NO: 2169658 - RNA, 19 nt, Homo sapiens
  misc_RNA (1)...(19): siRNA sense strand
gaagaucaaggacaaggaa

SEQ ID NO: 2169659 - RNA, 19 nt, Homo sapiens
  misc_RNA (1)...(19): siRNA sense strand
aggaggaccugcagcauuu

SEQ ID NO: 2169660 - RNA, 19 nt, Homo sapiens
  misc_RNA (1)...(19): siRNA sense strand
ggaggaagaugaggaagag

SEQ ID NO: 2169661 - RNA, 19 nt, Homo sapiens
  misc_RNA (1)...(19): siRNA sense strand
ccaacuacguggucaagga

SEQ ID NO: 2169662 - RNA, 19 nt, Homo sapiens
  misc_RNA (1)...(19): siRNA sense strand
ggacgaaaccaacaugagu

SEQ ID NO: 2169663 - RNA, 19 nt, Homo sapiens
  misc_RNA (1)...(19): siRNA sense strand
gcaagagcccugggaaguu

SEQ ID NO: 2169664 - RNA, 19 nt, Homo sapiens
  misc_RNA (1)...(19): siRNA sense strand
ggaagaagaagaggaggaa

SEQ ID NO: 2169665 - RNA, 19 nt, Homo sapiens
  misc_RNA (1)...(19): siRNA sense strand
cagcugcccuggaggaaga

SEQ ID NO: 2169666 - RNA, 19 nt, Homo sapiens
  misc_RNA (1)...(19): siRNA sense strand
gaccaugugugcagguuca

SEQ ID NO: 2169667 - RNA, 19 nt, Homo sapiens
  misc_RNA (1)...(19): siRNA sense strand
agaagaggaugaggaagaa

SEQ ID NO: 2169668 - RNA, 19 nt, Homo sapiens
  misc_RNA (1)...(19): siRNA sense strand
ugaagcacaugccgucaga

SEQ ID NO: 2169669 - RNA, 19 nt, Homo sapiens
  misc_RNA (1)...(19): siRNA sense strand
gaggaggaccugcagcauu

SEQ ID NO: 2169670 - RNA, 19 nt, Homo sapiens
  misc_RNA (1)...(19): siRNA sense strand
gggagaauguggcccucaa

SEQ ID NO: 2169671 - RNA, 19 nt, Homo sapiens
  misc_RNA (1)...(19): siRNA sense strand
gcaaagagugggucaucau

SEQ ID NO: 2169672 - RNA, 19 nt, Homo sapiens
  misc_RNA (1)...(19): siRNA sense strand
ggcaggaacgagaaguuua

SEQ ID NO: 2169673 - RNA, 19 nt, Homo sapiens
  misc_RNA (1)...(19): siRNA sense strand
ggaagaggaggaggaagaa

SEQ ID NO: 2169674 - RNA, 19 nt, Homo sapiens
  misc_RNA (1)...(19): siRNA sense strand
gucuggagcuggccucuga

SEQ ID NO: 2169675 - RNA, 19 nt, Homo sapiens
  misc_RNA (1)...(19): siRNA sense strand
ggaggaggaagaugaggaa

SEQ ID NO: 2169676 - RNA, 19 nt, Homo sapiens
  misc_RNA (1)...(19): siRNA sense strand
gccaagcccugagaaagug

SEQ ID NO: 2169677 - RNA, 19 nt, Homo sapiens
  misc_RNA (1)...(19): siRNA sense strand
ccucuguccucaagucuga

SEQ ID NO: 2169678 - RNA, 19 nt, Homo sapiens
  misc_RNA (1)...(19): siRNA sense strand
ggaagaggaagaagaggau

SEQ ID NO: 2169679 - RNA, 19 nt, Homo sapiens
  misc_RNA (1)...(19): siRNA sense strand
ggaagaugaggaagaggaa

SEQ ID NO: 2169680 - RNA, 19 nt, Homo sapiens
  misc_RNA (1)...(19): siRNA sense strand
ccaaaacgcuggugcuugu

SEQ ID NO: 2169681 - RNA, 19 nt, Homo sapiens
  misc_RNA (1)...(19): siRNA sense strand
ccaaagagcgguggagcaa

SEQ ID NO: 2169682 - RNA, 19 nt, Homo sapiens
  misc_RNA (1)...(19): siRNA sense strand
caaggacaaggaacaggua

SEQ ID NO: 2169683 - RNA, 19 nt, Homo sapiens
  misc_RNA (1)...(19): siRNA sense strand
uggcagcccuucccacuca

SEQ ID NO: 2169684 - RNA, 19 nt, Homo sapiens
  misc_RNA (1)...(19): siRNA sense strand
ugaauuagaaggugguuuc

SEQ ID NO: 2169685 - RNA, 19 nt, Homo sapiens
  misc_RNA (1)...(19): siRNA sense strand
ucaugucaguguuugagaa

SEQ ID NO: 2169686 - RNA, 19 nt, Homo sapiens
  misc_RNA (1)...(19): siRNA sense strand
gaagaagucgcccgucacu

SEQ ID NO: 2169687 - RNA, 19 nt, Homo sapiens
  misc_RNA (1)...(19): siRNA sense strand
gaacaaacuccggaucaac

SEQ ID NO: 2169688 - RNA, 19 nt, Homo sapiens
  misc_RNA (1)...(19): siRNA sense strand
guuauuucaucccaaggaa

SEQ ID NO: 2169689 - RNA, 19 nt, Homo sapiens
  misc_RNA (1)...(19): siRNA sense strand
ggagaacaccgaggaugug

SEQ ID NO: 2169690 - RNA, 19 nt, Homo sapiens
  misc_RNA (1)...(19): siRNA sense strand
ccugggaaguuauuucauc

SEQ ID NO: 2169691 - RNA, 19 nt, Homo sapiens
  misc_RNA (1)...(19): siRNA sense strand
aagaagaggaugaggaaga

SEQ ID NO: 2169692 - RNA, 19 nt, Homo sapiens
  misc_RNA (1)...(19): siRNA sense strand
ggcaggaugucuagaugca

SEQ ID NO: 2169693 - RNA, 19 nt, Homo sapiens
  misc_RNA (1)...(19): siRNA sense strand
ggagccaagcccugagaaa

SEQ ID NO: 2169694 - RNA, 19 nt, Homo sapiens
  misc_RNA (1)...(19): siRNA sense strand
gggagaacaccgaggaugu

SEQ ID NO: 2169695 - RNA, 19 nt, Homo sapiens
  misc_RNA (1)...(19): siRNA sense strand
gaggaccuuugugcacauu

SEQ ID NO: 2169696 - RNA, 19 nt, Homo sapiens
  misc_RNA (1)...(19): siRNA sense strand
ggaugaucaaggagaagua

SEQ ID NO: 2169697 - RNA, 19 nt, Homo sapiens
  misc_RNA (1)...(19): siRNA sense strand
agagauggccacaaacuca

SEQ ID NO: 2169698 - RNA, 19 nt, Homo sapiens
  misc_RNA (1)...(19): siRNA sense strand
uggccgugcucaagaaguu

SEQ ID NO: 2169699 - RNA, 19 nt, Homo sapiens
  misc_RNA (1)...(19): siRNA sense strand
gagccaagcccugagaaag

SEQ ID NO: 2169700 - RNA, 19 nt, Homo sapiens
  misc_RNA (1)...(19): siRNA sense strand
gagcugugccucugagucu

SEQ ID NO: 2169701 - RNA, 19 nt, Homo sapiens
  misc_RNA (1)...(19): siRNA sense strand
uggcugaggaggaggauuu

SEQ ID NO: 2169702 - RNA, 19 nt, Homo sapiens
  misc_RNA (1)...(19): siRNA sense strand
ugaucaaggagaaguauga

SEQ ID NO: 2169703 - RNA, 19 nt, Homo sapiens
  misc_RNA (1)...(19): siRNA sense strand
uagggaugaucaaggagaa

SEQ ID NO: 2169704 - RNA, 19 nt, Homo sapiens
  misc_RNA (1)...(19): siRNA sense strand
ggaagaucaaggacaagga

SEQ ID NO: 2169705 - RNA, 19 nt, Homo sapiens
  misc_RNA (1)...(19): siRNA sense strand
uacaggaagugcuauaugc

SEQ ID NO: 2169706 - RNA, 19 nt, Homo sapiens
  misc_RNA (1)...(19): siRNA sense strand
gcaagggaaggaccaugug

SEQ ID NO: 2169707 - RNA, 19 nt, Homo sapiens
  misc_RNA (1)...(19): siRNA sense strand
gacuaccaguugaucaugu

SEQ ID NO: 2169708 - RNA, 19 nt, Homo sapiens
  misc_RNA (1)...(19): siRNA sense strand
ggcccaucaugaauuagaa

SEQ ID NO: 2169709 - RNA, 19 nt, Homo sapiens
  misc_RNA (1)...(19): siRNA sense strand
acaucaagccuucaaacuu

SEQ ID NO: 2169710 - RNA, 19 nt, Homo sapiens
  misc_RNA (1)...(19): siRNA sense strand
ccaccuacaggaagugcua

SEQ ID NO: 2169711 - RNA, 19 nt, Homo sapiens
  misc_RNA (1)...(19): siRNA sense strand
gcucagcgcgcaacaacca

SEQ ID NO: 2169712 - RNA, 19 nt, Homo sapiens
  misc_RNA (1)...(19): siRNA sense strand
caaagagugggucaucauc

SEQ ID NO: 2169713 - RNA, 19 nt, Homo sapiens
  misc_RNA (1)...(19): siRNA sense strand
ucuacaugcugguggaguu

SEQ ID NO: 2169714 - RNA, 19 nt, Homo sapiens
  misc_RNA (1)...(19): siRNA sense strand
ggaccuuugugcacauugc

SEQ ID NO: 2169715 - RNA, 19 nt, Homo sapiens
  misc_RNA (1)...(19): siRNA sense strand
ccacaggcccacagagaca

SEQ ID NO: 2169716 - RNA, 19 nt, Homo sapiens
  misc_RNA (1)...(19): siRNA sense strand
aagagugggucaucaucga

SEQ ID NO: 2169717 - RNA, 19 nt, Homo sapiens
  misc_RNA (1)...(19): siRNA sense strand
gagguggccgugcucaaga

SEQ ID NO: 2169718 - RNA, 19 nt, Homo sapiens
  misc_RNA (1)...(19): siRNA sense strand
ggaggucacggauggaucu

SEQ ID NO: 2169719 - RNA, 19 nt, Homo sapiens
  misc_RNA (1)...(19): siRNA sense strand
agggagagcaccugaguga

SEQ ID NO: 2169720 - RNA, 19 nt, Homo sapiens
  misc_RNA (1)...(19): siRNA sense strand
ucaccaagcccgacuacca

SEQ ID NO: 2169721 - RNA, 19 nt, Homo sapiens
  misc_RNA (1)...(19): siRNA sense strand
gaugaucaaggagaaguau

SEQ ID NO: 2169722 - RNA, 19 nt, Homo sapiens
  misc_RNA (1)...(19): siRNA sense strand
cuacaggaagugcuauaug

SEQ ID NO: 2169723 - RNA, 19 nt, Homo sapiens
  misc_RNA (1)...(19): siRNA sense strand
aaacccaccucaacgucau

SEQ ID NO: 2169724 - RNA, 19 nt, Homo sapiens
  misc_RNA (1)...(19): siRNA sense strand
gaugucaaccggaacaaac

SEQ ID NO: 2169725 - RNA, 19 nt, Homo sapiens
  misc_RNA (1)...(19): siRNA sense strand
caagcccgacuaccaguug

SEQ ID NO: 2169726 - RNA, 19 nt, Homo sapiens
  misc_RNA (1)...(19): siRNA sense strand
gagaaaguggccaccaucu

SEQ ID NO: 2169727 - RNA, 19 nt, Homo sapiens
  misc_RNA (1)...(19): siRNA sense strand
aagaagaagaggaggaaga

SEQ ID NO: 2169728 - RNA, 19 nt, Homo sapiens
  misc_RNA (1)...(19): siRNA sense strand
cuaaugggaaggaggaaga

SEQ ID NO: 2169729 - RNA, 19 nt, Homo sapiens
  misc_RNA (1)...(19): siRNA sense strand
acaaggagacggagcucaa

SEQ ID NO: 2169730 - RNA, 19 nt, Homo sapiens
  misc_RNA (1)...(19): siRNA sense strand
ggugaacagcccugaguca

SEQ ID NO: 2169731 - RNA, 19 nt, Homo sapiens
  misc_RNA (1)...(19): siRNA sense strand
caacuacguggucaaggau

SEQ ID NO: 2169732 - RNA, 19 nt, Homo sapiens
  misc_RNA (1)...(19): siRNA sense strand
agaagaggaggaagaggaa

SEQ ID NO: 2169733 - RNA, 19 nt, Homo sapiens
  misc_RNA (1)...(19): siRNA sense strand
ccacaagaaccgggagaug

SEQ ID NO: 2169734 - RNA, 19 nt, Homo sapiens
  misc_RNA (1)...(19): siRNA sense strand
aagaggaggaggaagaaga

SEQ ID NO: 2169735 - RNA, 19 nt, Homo sapiens
  misc_RNA (1)...(19): siRNA sense strand
caugugugcagguucauug

SEQ ID NO: 2169736 - RNA, 19 nt, Homo sapiens
  misc_RNA (1)...(19): siRNA sense strand
guugaucaugucaguguuu

SEQ ID NO: 2169737 - RNA, 19 nt, Homo sapiens
  misc_RNA (1)...(19): siRNA sense strand
agguagggaugaucaagga

SEQ ID NO: 2169738 - RNA, 19 nt, Homo sapiens
  misc_RNA (1)...(19): siRNA sense strand
ccgagaaugaggccuuuga

SEQ ID NO: 2169739 - RNA, 19 nt, Homo sapiens
  misc_RNA (1)...(19): siRNA sense strand
gaauggggcugagauagag

SEQ ID NO: 2169740 - RNA, 19 nt, Homo sapiens
  misc_RNA (1)...(19): siRNA sense strand
ggaugaggaagaagaagag

SEQ ID NO: 2169741 - RNA, 19 nt, Homo sapiens
  misc_RNA (1)...(19): siRNA sense strand
ggaggauuucgacagcaaa

SEQ ID NO: 2169742 - RNA, 19 nt, Homo sapiens
  misc_RNA (1)...(19): siRNA sense strand
cgaguggagcuaccugaga

SEQ ID NO: 2169743 - RNA, 19 nt, Homo sapiens
  misc_RNA (1)...(19): siRNA sense strand
gaacaaugccuacagcuuu

SEQ ID NO: 2169744 - RNA, 19 nt, Homo sapiens
  misc_RNA (1)...(19): siRNA sense strand
caacguggcucgccuaaug

SEQ ID NO: 2169745 - RNA, 19 nt, Homo sapiens
  misc_RNA (1)...(19): siRNA sense strand
acacaaagcuggagcagaa

SEQ ID NO: 2169746 - RNA, 19 nt, Homo sapiens
  misc_RNA (1)...(19): siRNA sense strand
gauaaaggaugaugagauc

SEQ ID NO: 2169747 - RNA, 19 nt, Homo sapiens
  misc_RNA (1)...(19): siRNA sense strand
ggacaaccaugcacaagug

SEQ ID NO: 2169748 - RNA, 19 nt, Homo sapiens
  misc_RNA (1)...(19): siRNA sense strand
ucacaaaccuccagagcaa

SEQ ID NO: 2169749 - RNA, 19 nt, Homo sapiens
  misc_RNA (1)...(19): siRNA sense strand
ggacagccaugaccgguau

SEQ ID NO: 2169750 - RNA, 19 nt, Homo sapiens
  misc_RNA (1)...(19): siRNA sense strand
gaacgugccuaccaugauc

SEQ ID NO: 2169751 - RNA, 19 nt, Homo sapiens
  misc_RNA (1)...(19): siRNA sense strand
gaaccaccauugccaacuu

SEQ ID NO: 2169752 - RNA, 19 nt, Homo sapiens
  misc_RNA (1)...(19): siRNA sense strand
ggaaagcuguacuucacaa

SEQ ID NO: 2169753 - RNA, 19 nt, Homo sapiens
  misc_RNA (1)...(19): siRNA sense strand
gcacugcuguucuuauucu

SEQ ID NO: 2169754 - RNA, 19 nt, Homo sapiens
  misc_RNA (1)...(19): siRNA sense strand
cggccaagcuggacaagaa

SEQ ID NO: 2169755 - RNA, 19 nt, Homo sapiens
  misc_RNA (1)...(19): siRNA sense strand
gcccacaacuacaagauug

SEQ ID NO: 2169756 - RNA, 19 nt, Homo sapiens
  misc_RNA (1)...(19): siRNA sense strand
ucaccaagccuguggagua

SEQ ID NO: 2169757 - RNA, 19 nt, Homo sapiens
  misc_RNA (1)...(19): siRNA sense strand
ugaggcagcuauucgguuu

SEQ ID NO: 2169758 - RNA, 19 nt, Homo sapiens
  misc_RNA (1)...(19): siRNA sense strand
gaagguggccugggacuau

SEQ ID NO: 2169759 - RNA, 19 nt, Homo sapiens
  misc_RNA (1)...(19): siRNA sense strand
acagccaucuucaggauaa

SEQ ID NO: 2169760 - RNA, 19 nt, Homo sapiens
  misc_RNA (1)...(19): siRNA sense strand
ccacagcccucaacaacag

SEQ ID NO: 2169761 - RNA, 19 nt, Homo sapiens
  misc_RNA (1)...(19): siRNA sense strand
agaaggagaaggugaauga

SEQ ID NO: 2169762 - RNA, 19 nt, Homo sapiens
  misc_RNA (1)...(19): siRNA sense strand
gucaugaccuacaguauca

SEQ ID NO: 2169763 - RNA, 19 nt, Homo sapiens
  misc_RNA (1)...(19): siRNA sense strand
guagacagguacaaucucu

SEQ ID NO: 2169764 - RNA, 19 nt, Homo sapiens
  misc_RNA (1)...(19): siRNA sense strand
ggugacagaugcagacagu

SEQ ID NO: 2169765 - RNA, 19 nt, Homo sapiens
  misc_RNA (1)...(19): siRNA sense strand
cuacucagccuucuuugaa

SEQ ID NO: 2169766 - RNA, 19 nt, Homo sapiens
  misc_RNA (1)...(19): siRNA sense strand
gaaaagaucaagaagcauu

SEQ ID NO: 2169767 - RNA, 19 nt, Homo sapiens
  misc_RNA (1)...(19): siRNA sense strand
ccaaauaugcagagucaga

SEQ ID NO: 2169768 - RNA, 19 nt, Homo sapiens
  misc_RNA (1)...(19): siRNA sense strand
ggauaaaggaugaugagau

SEQ ID NO: 2169769 - RNA, 19 nt, Homo sapiens
  misc_RNA (1)...(19): siRNA sense strand
aggagaaggugaaugagaa

SEQ ID NO: 2169770 - RNA, 19 nt, Homo sapiens
  misc_RNA (1)...(19): siRNA sense strand
ugacagccaucuucaggau

SEQ ID NO: 2169771 - RNA, 19 nt, Homo sapiens
  misc_RNA (1)...(19): siRNA sense strand
agcagaagcugaaggaaga

SEQ ID NO: 2169772 - RNA, 19 nt, Homo sapiens
  misc_RNA (1)...(19): siRNA sense strand
gagcacacggagacagaua

SEQ ID NO: 2169773 - RNA, 19 nt, Homo sapiens
  misc_RNA (1)...(19): siRNA sense strand
gucauugccucagccuuua

SEQ ID NO: 2169774 - RNA, 19 nt, Homo sapiens
  misc_RNA (1)...(19): siRNA sense strand
gugcuacacuuuccucauc

SEQ ID NO: 2169775 - RNA, 19 nt, Homo sapiens
  misc_RNA (1)...(19): siRNA sense strand
gaugagauccgggacaaau

SEQ ID NO: 2169776 - RNA, 19 nt, Homo sapiens
  misc_RNA (1)...(19): siRNA sense strand
ucaccaccauggacaaguu

SEQ ID NO: 2169777 - RNA, 19 nt, Homo sapiens
  misc_RNA (1)...(19): siRNA sense strand
gagaacgugccuaccauga

SEQ ID NO: 2169778 - RNA, 19 nt, Homo sapiens
  misc_RNA (1)...(19): siRNA sense strand
cuacuacucagccuucuuu

SEQ ID NO: 2169779 - RNA, 19 nt, Homo sapiens
  misc_RNA (1)...(19): siRNA sense strand
ccagcuccguugacuuuga

SEQ ID NO: 2169780 - RNA, 19 nt, Homo sapiens
  misc_RNA (1)...(19): siRNA sense strand
gaaagcuguacuucacaaa

SEQ ID NO: 2169781 - RNA, 19 nt, Homo sapiens
  misc_RNA (1)...(19): siRNA sense strand
cagaaaagaucaagaagca

SEQ ID NO: 2169782 - RNA, 19 nt, Homo sapiens
  misc_RNA (1)...(19): siRNA sense strand
ggacuucaacguguguaaa

SEQ ID NO: 2169783 - RNA, 19 nt, Homo sapiens
  misc_RNA (1)...(19): siRNA sense strand
uggaggccauugaguacua

SEQ ID NO: 2169784 - RNA, 19 nt, Homo sapiens
  misc_RNA (1)...(19): siRNA sense strand
caagaagcauuuugaggaa

SEQ ID NO: 2169785 - RNA, 19 nt, Homo sapiens
  misc_RNA (1)...(19): siRNA sense strand
ccaaaucugcgaaauacau

SEQ ID NO: 2169786 - RNA, 19 nt, Homo sapiens
  misc_RNA (1)...(19): siRNA sense strand
cgucauugccucagccuuu

SEQ ID NO: 2169787 - RNA, 19 nt, Homo sapiens
  misc_RNA (1)...(19): siRNA sense strand
caguguggcuucagcuaug

SEQ ID NO: 2169788 - RNA, 19 nt, Homo sapiens
  misc_RNA (1)...(19): siRNA sense strand
gcaucaggccuacgaguuc

SEQ ID NO: 2169789 - RNA, 19 nt, Homo sapiens
  misc_RNA (1)...(19): siRNA sense strand
ccaaagggacaaugguuuc

SEQ ID NO: 2169790 - RNA, 19 nt, Homo sapiens
  misc_RNA (1)...(19): siRNA sense strand
ggacagccucauagagaau

SEQ ID NO: 2169791 - RNA, 19 nt, Homo sapiens
  misc_RNA (1)...(19): siRNA sense strand
uccgcuggcucuuugauaa

SEQ ID NO: 2169792 - RNA, 19 nt, Homo sapiens
  misc_RNA (1)...(19): siRNA sense strand
uugcacugcuguucuuauu

SEQ ID NO: 2169793 - RNA, 19 nt, Homo sapiens
  misc_RNA (1)...(19): siRNA sense strand
caaauaugcagagucagaa

SEQ ID NO: 2169794 - RNA, 19 nt, Homo sapiens
  misc_RNA (1)...(19): siRNA sense strand
cuccaaauaugcagaguca

SEQ ID NO: 2169795 - RNA, 19 nt, Homo sapiens
  misc_RNA (1)...(19): siRNA sense strand
guagacacaccuccaagau

SEQ ID NO: 2169796 - RNA, 19 nt, Homo sapiens
  misc_RNA (1)...(19): siRNA sense strand
gccuacagcuuugggagaa

SEQ ID NO: 2169797 - RNA, 19 nt, Homo sapiens
  misc_RNA (1)...(19): siRNA sense strand
gcaccacagcccucaacaa

SEQ ID NO: 2169798 - RNA, 19 nt, Homo sapiens
  misc_RNA (1)...(19): siRNA sense strand
ugacagaugcagacagugu

SEQ ID NO: 2169799 - RNA, 19 nt, Homo sapiens
  misc_RNA (1)...(19): siRNA sense strand
ggccuacgaguuccaguuu

SEQ ID NO: 2169800 - RNA, 19 nt, Homo sapiens
  misc_RNA (1)...(19): siRNA sense strand
gggagaaggagaaggugaa

SEQ ID NO: 2169801 - RNA, 19 nt, Homo sapiens
  misc_RNA (1)...(19): siRNA sense strand
ccaagaugcgcuacaagga

SEQ ID NO: 2169802 - RNA, 19 nt, Homo sapiens
  misc_RNA (1)...(19): siRNA sense strand
aacaaugccuacagcuuug

SEQ ID NO: 2169803 - RNA, 19 nt, Homo sapiens
  misc_RNA (1)...(19): siRNA sense strand
gggaccugcuggagaacaa

SEQ ID NO: 2169804 - RNA, 19 nt, Homo sapiens
  misc_RNA (1)...(19): siRNA sense strand
gcauggccuuugucaccuu

SEQ ID NO: 2169805 - RNA, 19 nt, Homo sapiens
  misc_RNA (1)...(19): siRNA sense strand
gcgagucccugcacaucuc

SEQ ID NO: 2169806 - RNA, 19 nt, Homo sapiens
  misc_RNA (1)...(19): siRNA sense strand
caccauugccaacuugaaa

SEQ ID NO: 2169807 - RNA, 19 nt, Homo sapiens
  misc_RNA (1)...(19): siRNA sense strand
ggucaucaccaucgucauc

SEQ ID NO: 2169808 - RNA, 19 nt, Homo sapiens
  misc_RNA (1)...(19): siRNA sense strand
acagguacaaucucuacua

SEQ ID NO: 2169809 - RNA, 19 nt, Homo sapiens
  misc_RNA (1)...(19): siRNA sense strand
ccauugaguacuacacaaa

SEQ ID NO: 2169810 - RNA, 19 nt, Homo sapiens
  misc_RNA (1)...(19): siRNA sense strand
ggaggaugaucuggugaag

SEQ ID NO: 2169811 - RNA, 19 nt, Homo sapiens
  misc_RNA (1)...(19): siRNA sense strand
gcaucgugcugccugucaa

SEQ ID NO: 2169812 - RNA, 19 nt, Homo sapiens
  misc_RNA (1)...(19): siRNA sense strand
gcucccacgucuauguuca

SEQ ID NO: 2169813 - RNA, 19 nt, Homo sapiens
  misc_RNA (1)...(19): siRNA sense strand
caucaucacccaguucuuc

SEQ ID NO: 2169814 - RNA, 19 nt, Homo sapiens
  misc_RNA (1)...(19): siRNA sense strand
cgugcuggcucucgacuuc

SEQ ID NO: 2169815 - RNA, 19 nt, Homo sapiens
  misc_RNA (1)...(19): siRNA sense strand
cagguacaaucucuacuac

SEQ ID NO: 2169816 - RNA, 19 nt, Homo sapiens
  misc_RNA (1)...(19): siRNA sense strand
aagcggacccucuucauca

SEQ ID NO: 2169817 - RNA, 19 nt, Homo sapiens
  misc_RNA (1)...(19): siRNA sense strand
ugcacuaccuguccuuuca

SEQ ID NO: 2169818 - RNA, 19 nt, Homo sapiens
  misc_RNA (1)...(19): siRNA sense strand
ggaagguggccugggacua

SEQ ID NO: 2169819 - RNA, 19 nt, Homo sapiens
  misc_RNA (1)...(19): siRNA sense strand
acacuuuccucaucuucau

SEQ ID NO: 2169820 - RNA, 19 nt, Homo sapiens
  misc_RNA (1)...(19): siRNA sense strand
ucaccgccaucauccugaa

SEQ ID NO: 2169821 - RNA, 19 nt, Homo sapiens
  misc_RNA (1)...(19): siRNA sense strand
gccauugaguacuacacaa

SEQ ID NO: 2169822 - RNA, 19 nt, Homo sapiens
  misc_RNA (1)...(19): siRNA sense strand
ccuccaagaugcgcuacaa

SEQ ID NO: 2169823 - RNA, 19 nt, Homo sapiens
  misc_RNA (1)...(19): siRNA sense strand
gacaaugguuucuguuccu

SEQ ID NO: 2169824 - RNA, 19 nt, Homo sapiens
  misc_RNA (1)...(19): siRNA sense strand
gcgccuucuucgugaacua

SEQ ID NO: 2169825 - RNA, 19 nt, Homo sapiens
  misc_RNA (1)...(19): siRNA sense strand
gcuacacuuuccucaucuu

SEQ ID NO: 2169826 - RNA, 19 nt, Homo sapiens
  misc_RNA (1)...(19): siRNA sense strand
cugcuguucuuauucucua

SEQ ID NO: 2169827 - RNA, 19 nt, Homo sapiens
  misc_RNA (1)...(19): siRNA sense strand
ggcaucaggccuacgaguu

SEQ ID NO: 2169828 - RNA, 19 nt, Homo sapiens
  misc_RNA (1)...(19): siRNA sense strand
aggacagccucauagagaa

SEQ ID NO: 2169829 - RNA, 19 nt, Homo sapiens
  misc_RNA (1)...(19): siRNA sense strand
cuccagcuccguugacuuu

SEQ ID NO: 2169830 - RNA, 19 nt, Homo sapiens
  misc_RNA (1)...(19): siRNA sense strand
gagcgucucaccucugucu

SEQ ID NO: 2169831 - RNA, 19 nt, Homo sapiens
  misc_RNA (1)...(19): siRNA sense strand
cgucugcuuuggacacuuc

SEQ ID NO: 2169832 - RNA, 19 nt, Homo sapiens
  misc_RNA (1)...(19): siRNA sense strand
gggacaaugguuucuguuc

SEQ ID NO: 2169833 - RNA, 19 nt, Homo sapiens
  misc_RNA (1)...(19): siRNA sense strand
aggcagcuauucgguuuga

SEQ ID NO: 2169834 - RNA, 19 nt, Homo sapiens
  misc_RNA (1)...(19): siRNA sense strand
gagacuaucaccgccauca

SEQ ID NO: 2169835 - RNA, 19 nt, Homo sapiens
  misc_RNA (1)...(19): siRNA sense strand
cggacccucuucaucaaug

SEQ ID NO: 2169836 - RNA, 19 nt, Homo sapiens
  misc_RNA (1)...(19): siRNA sense strand
ggagaaggagaaggugaau

SEQ ID NO: 2169837 - RNA, 19 nt, Homo sapiens
  misc_RNA (1)...(19): siRNA sense strand
gccuacgccuggaugaugu

SEQ ID NO: 2169838 - RNA, 19 nt, Homo sapiens
  misc_RNA (1)...(19): siRNA sense strand
ccuacgaguuccaguuugg

SEQ ID NO: 2169839 - RNA, 19 nt, Homo sapiens
  misc_RNA (1)...(19): siRNA sense strand
aagggacaaugguuucugu

SEQ ID NO: 2169840 - RNA, 19 nt, Homo sapiens
  misc_RNA (1)...(19): siRNA sense strand
gcagcuauucgguuugagu

SEQ ID NO: 2169841 - RNA, 19 nt, Homo sapiens
  misc_RNA (1)...(19): siRNA sense strand
caccaagccuguggaguac

SEQ ID NO: 2169842 - RNA, 19 nt, Homo sapiens
  misc_RNA (1)...(19): siRNA sense strand
gacuucaacguguguaaau

SEQ ID NO: 2169843 - RNA, 19 nt, Homo sapiens
  misc_RNA (1)...(19): siRNA sense strand
caucauaccuucuuugaaa

SEQ ID NO: 2169844 - RNA, 19 nt, Homo sapiens
  misc_RNA (1)...(19): siRNA sense strand
ggaggaggcuuguaacaug

SEQ ID NO: 2169845 - RNA, 19 nt, Homo sapiens
  misc_RNA (1)...(19): siRNA sense strand
ggacauaggacgacucauu

SEQ ID NO: 2169846 - RNA, 19 nt, Homo sapiens
  misc_RNA (1)...(19): siRNA sense strand
guacugagauccacuacga

SEQ ID NO: 2169847 - RNA, 19 nt, Homo sapiens
  misc_RNA (1)...(19): siRNA sense strand
gggacaggcugcaaagaaa

SEQ ID NO: 2169848 - RNA, 19 nt, Homo sapiens
  misc_RNA (1)...(19): siRNA sense strand
gaaguggccugguccuugu

SEQ ID NO: 2169849 - RNA, 19 nt, Homo sapiens
  misc_RNA (1)...(19): siRNA sense strand
gcaaacacuccaccuauga

SEQ ID NO: 2169850 - RNA, 19 nt, Homo sapiens
  misc_RNA (1)...(19): siRNA sense strand
cagcagggcucccaucuca

SEQ ID NO: 2169851 - RNA, 19 nt, Homo sapiens
  misc_RNA (1)...(19): siRNA sense strand
gggagaugcuuauccagaa

SEQ ID NO: 2169852 - RNA, 19 nt, Homo sapiens
  misc_RNA (1)...(19): siRNA sense strand
gaugaggccuggcgucuag

SEQ ID NO: 2169853 - RNA, 19 nt, Homo sapiens
  misc_RNA (1)...(19): siRNA sense strand
ggaagcugcccucaguaua

SEQ ID NO: 2169854 - RNA, 19 nt, Homo sapiens
  misc_RNA (1)...(19): siRNA sense strand
cagcggaaguuaugaguuc

SEQ ID NO: 2169855 - RNA, 19 nt, Homo sapiens
  misc_RNA (1)...(19): siRNA sense strand
ggaugaggcuguguacaug

SEQ ID NO: 2169856 - RNA, 19 nt, Homo sapiens
  misc_RNA (1)...(19): siRNA sense strand
caacagagaggcagaugga

SEQ ID NO: 2169857 - RNA, 19 nt, Homo sapiens
  misc_RNA (1)...(19): siRNA sense strand
cgagaccuuucccaucaua

SEQ ID NO: 2169858 - RNA, 19 nt, Homo sapiens
  misc_RNA (1)...(19): siRNA sense strand
cagcugcgcuuggauguga

SEQ ID NO: 2169859 - RNA, 19 nt, Homo sapiens
  misc_RNA (1)...(19): siRNA sense strand
cuaugacacugaccucuuu

SEQ ID NO: 2169860 - RNA, 19 nt, Homo sapiens
  misc_RNA (1)...(19): siRNA sense strand
ggacaucuggcugagcuua

SEQ ID NO: 2169861 - RNA, 19 nt, Homo sapiens
  misc_RNA (1)...(19): siRNA sense strand
gaagcugcccucaguauag

SEQ ID NO: 2169862 - RNA, 19 nt, Homo sapiens
  misc_RNA (1)...(19): siRNA sense strand
ggcaaacacuccaccuaug

SEQ ID NO: 2169863 - RNA, 19 nt, Homo sapiens
  misc_RNA (1)...(19): siRNA sense strand
gucgagaccuuucccauca

SEQ ID NO: 2169864 - RNA, 19 nt, Homo sapiens
  misc_RNA (1)...(19): siRNA sense strand
ggacaggaccaacuucuac

SEQ ID NO: 2169865 - RNA, 19 nt, Homo sapiens
  misc_RNA (1)...(19): siRNA sense strand
gacauaggacgacucauug

SEQ ID NO: 2169866 - RNA, 19 nt, Homo sapiens
  misc_RNA (1)...(19): siRNA sense strand
uuaaggaggaggcuuguaa

SEQ ID NO: 2169867 - RNA, 19 nt, Homo sapiens
  misc_RNA (1)...(19): siRNA sense strand
gaggaaaggcucuggaucu

SEQ ID NO: 2169868 - RNA, 19 nt, Homo sapiens
  misc_RNA (1)...(19): siRNA sense strand
gcagggcucccaucucaau

SEQ ID NO: 2169869 - RNA, 19 nt, Homo sapiens
  misc_RNA (1)...(19): siRNA sense strand
ccugggaacugcugacuca

SEQ ID NO: 2169870 - RNA, 19 nt, Homo sapiens
  misc_RNA (1)...(19): siRNA sense strand
uguggaaacugcugugaug

SEQ ID NO: 2169871 - RNA, 19 nt, Homo sapiens
  misc_RNA (1)...(19): siRNA sense strand
gaccacauccgcacacuca

SEQ ID NO: 2169872 - RNA, 19 nt, Homo sapiens
  misc_RNA (1)...(19): siRNA sense strand
gaaccuggucuucaugcaa

SEQ ID NO: 2169873 - RNA, 19 nt, Homo sapiens
  misc_RNA (1)...(19): siRNA sense strand
auaacgaccuggaagaugu

SEQ ID NO: 2169874 - RNA, 19 nt, Homo sapiens
  misc_RNA (1)...(19): siRNA sense strand
uaacauggccugggaacug

SEQ ID NO: 2169875 - RNA, 19 nt, Homo sapiens
  misc_RNA (1)...(19): siRNA sense strand
gcccagguguugcaacugu

SEQ ID NO: 2169876 - RNA, 19 nt, Homo sapiens
  misc_RNA (1)...(19): siRNA sense strand
uauguucccugcugaagug

SEQ ID NO: 2169877 - RNA, 19 nt, Homo sapiens
  misc_RNA (1)...(19): siRNA sense strand
uugaaaugcuuggcaauug

SEQ ID NO: 2169878 - RNA, 19 nt, Homo sapiens
  misc_RNA (1)...(19): siRNA sense strand
ccuggaagcugcccucagu

SEQ ID NO: 2169879 - RNA, 19 nt, Homo sapiens
  misc_RNA (1)...(19): siRNA sense strand
ccacccaccugcugaacug

SEQ ID NO: 2169880 - RNA, 19 nt, Homo sapiens
  misc_RNA (1)...(19): siRNA sense strand
gcaagaggacgugcuguuc

SEQ ID NO: 2169881 - RNA, 19 nt, Homo sapiens
  misc_RNA (1)...(19): siRNA sense strand
gcuguggccuccucuugga

SEQ ID NO: 2169882 - RNA, 19 nt, Homo sapiens
  misc_RNA (1)...(19): siRNA sense strand
ugaaaugcuuggcaauugg

SEQ ID NO: 2169883 - RNA, 19 nt, Homo sapiens
  misc_RNA (1)...(19): siRNA sense strand
ggacgugcuguucccagua

SEQ ID NO: 2169884 - RNA, 19 nt, Homo sapiens
  misc_RNA (1)...(19): siRNA sense strand
gggacgcaccuguuacgua

SEQ ID NO: 2169885 - RNA, 19 nt, Homo sapiens
  misc_RNA (1)...(19): siRNA sense strand
ggcaccaccuggcuuccua

SEQ ID NO: 2169886 - RNA, 19 nt, Homo sapiens
  misc_RNA (1)...(19): siRNA sense strand
gcccaggucuguggagguu

SEQ ID NO: 2169887 - RNA, 19 nt, Homo sapiens
  misc_RNA (1)...(19): siRNA sense strand
gcucuggaucuccuacuuu

SEQ ID NO: 2169888 - RNA, 19 nt, Homo sapiens
  misc_RNA (1)...(19): siRNA sense strand
caaggcaccggaagcacua

SEQ ID NO: 2169889 - RNA, 19 nt, Homo sapiens
  misc_RNA (1)...(19): siRNA sense strand
ccacugagcggcugagucu

SEQ ID NO: 2169890 - RNA, 19 nt, Homo sapiens
  misc_RNA (1)...(19): siRNA sense strand
auccagaacugcaaaggaa

SEQ ID NO: 2169891 - RNA, 19 nt, Homo sapiens
  misc_RNA (1)...(19): siRNA sense strand
ccaguucaagccaaucuuu

SEQ ID NO: 2169892 - RNA, 19 nt, Homo sapiens
  misc_RNA (1)...(19): siRNA sense strand
ucgccaaccuggugucaga

SEQ ID NO: 2169893 - RNA, 19 nt, Homo sapiens
  misc_RNA (1)...(19): siRNA sense strand
gcugguggcugugcugcaa

SEQ ID NO: 2169894 - RNA, 19 nt, Homo sapiens
  misc_RNA (1)...(19): siRNA sense strand
gcaccggaagcacuacuga

SEQ ID NO: 2169895 - RNA, 19 nt, Homo sapiens
  misc_RNA (1)...(19): siRNA sense strand
cugcugaacugggcacuga

SEQ ID NO: 2169896 - RNA, 19 nt, Homo sapiens
  misc_RNA (1)...(19): siRNA sense strand
gagcuggaggacaccauaa

SEQ ID NO: 2169897 - RNA, 19 nt, Homo sapiens
  misc_RNA (1)...(19): siRNA sense strand
ccaggucuguggagguuuc

SEQ ID NO: 2169898 - RNA, 19 nt, Homo sapiens
  misc_RNA (1)...(19): siRNA sense strand
ggagaugcuuauccagaac

SEQ ID NO: 2169899 - RNA, 19 nt, Homo sapiens
  misc_RNA (1)...(19): siRNA sense strand
ggacaugguagagcugaug

SEQ ID NO: 2169900 - RNA, 19 nt, Homo sapiens
  misc_RNA (1)...(19): siRNA sense strand
ucucagugcuggugaaggu

SEQ ID NO: 2169901 - RNA, 19 nt, Homo sapiens
  misc_RNA (1)...(19): siRNA sense strand
cauugaagcuguggaaacu

SEQ ID NO: 2169902 - RNA, 19 nt, Homo sapiens
  misc_RNA (1)...(19): siRNA sense strand
gacgugcuguucccaguag

SEQ ID NO: 2169903 - RNA, 19 nt, Homo sapiens
  misc_RNA (1)...(19): siRNA sense strand
cacugaggcuguccaagga

SEQ ID NO: 2169904 - RNA, 19 nt, Homo sapiens
  misc_RNA (1)...(19): siRNA sense strand
gagcugcuggccacaguga

SEQ ID NO: 2169905 - RNA, 19 nt, Homo sapiens
  misc_RNA (1)...(19): siRNA sense strand
cgacccagcggaaguuaug

SEQ ID NO: 2169906 - RNA, 19 nt, Homo sapiens
  misc_RNA (1)...(19): siRNA sense strand
cacagucucugcugagucu

SEQ ID NO: 2169907 - RNA, 19 nt, Homo sapiens
  misc_RNA (1)...(19): siRNA sense strand
ccaacacugccauccguaa

SEQ ID NO: 2169908 - RNA, 19 nt, Homo sapiens
  misc_RNA (1)...(19): siRNA sense strand
gccaacagccagaaaugug

SEQ ID NO: 2169909 - RNA, 19 nt, Homo sapiens
  misc_RNA (1)...(19): siRNA sense strand
ggagaaagggguccagcua

SEQ ID NO: 2169910 - RNA, 19 nt, Homo sapiens
  misc_RNA (1)...(19): siRNA sense strand
aagcacuacugaccuggaa

SEQ ID NO: 2169911 - RNA, 19 nt, Homo sapiens
  misc_RNA (1)...(19): siRNA sense strand
cauaggacgacucauugaa

SEQ ID NO: 2169912 - RNA, 19 nt, Homo sapiens
  misc_RNA (1)...(19): siRNA sense strand
ggaaccuggucuucaugca

SEQ ID NO: 2169913 - RNA, 19 nt, Homo sapiens
  misc_RNA (1)...(19): siRNA sense strand
ugugggcccuguacugaga

SEQ ID NO: 2169914 - RNA, 19 nt, Homo sapiens
  misc_RNA (1)...(19): siRNA sense strand
gcucucuggaugagguuua

SEQ ID NO: 2169915 - RNA, 19 nt, Homo sapiens
  misc_RNA (1)...(19): siRNA sense strand
ggcaagaggacgugcuguu

SEQ ID NO: 2169916 - RNA, 19 nt, Homo sapiens
  misc_RNA (1)...(19): siRNA sense strand
ggaugaggccuggcgucua

SEQ ID NO: 2169917 - RNA, 19 nt, Homo sapiens
  misc_RNA (1)...(19): siRNA sense strand
gccgugugcuuuccuuugg

SEQ ID NO: 2169918 - RNA, 19 nt, Homo sapiens
  misc_RNA (1)...(19): siRNA sense strand
ccaacagccagaaaugugu

SEQ ID NO: 2169919 - RNA, 19 nt, Homo sapiens
  misc_RNA (1)...(19): siRNA sense strand
gcgucgagcugugcguuuc

SEQ ID NO: 2169920 - RNA, 19 nt, Homo sapiens
  misc_RNA (1)...(19): siRNA sense strand
gacacagucucugcugagu

SEQ ID NO: 2169921 - RNA, 19 nt, Homo sapiens
  misc_RNA (1)...(19): siRNA sense strand
gaaggggccucugauugug

SEQ ID NO: 2169922 - RNA, 19 nt, Homo sapiens
  misc_RNA (1)...(19): siRNA sense strand
ugggacaggcugcaaagaa

SEQ ID NO: 2169923 - RNA, 19 nt, Homo sapiens
  misc_RNA (1)...(19): siRNA sense strand
gcuuggcaauugggccuuu

SEQ ID NO: 2169924 - RNA, 19 nt, Homo sapiens
  misc_RNA (1)...(19): siRNA sense strand
ugagauccacuacgaccuu

SEQ ID NO: 2169925 - RNA, 19 nt, Homo sapiens
  misc_RNA (1)...(19): siRNA sense strand
agaccucuguggagcuaug

SEQ ID NO: 2169926 - RNA, 19 nt, Homo sapiens
  misc_RNA (1)...(19): siRNA sense strand
ggcaggaugaggcugugua

SEQ ID NO: 2169927 - RNA, 19 nt, Homo sapiens
  misc_RNA (1)...(19): siRNA sense strand
cagggauuguggcuugaug

SEQ ID NO: 2169928 - RNA, 19 nt, Homo sapiens
  misc_RNA (1)...(19): siRNA sense strand
gagcugugcguuucuccau

SEQ ID NO: 2169929 - RNA, 19 nt, Homo sapiens
  misc_RNA (1)...(19): siRNA sense strand
cauaacgaccuggaagaug

SEQ ID NO: 2169930 - RNA, 19 nt, Homo sapiens
  misc_RNA (1)...(19): siRNA sense strand
uaccuucuuugaaaugcuu

SEQ ID NO: 2169931 - RNA, 19 nt, Homo sapiens
  misc_RNA (1)...(19): siRNA sense strand
aggcaaacacuccaccuau

SEQ ID NO: 2169932 - RNA, 19 nt, Homo sapiens
  misc_RNA (1)...(19): siRNA sense strand
caaaugggacaggcugcaa

SEQ ID NO: 2169933 - RNA, 19 nt, Homo sapiens
  misc_RNA (1)...(19): siRNA sense strand
caacacugccauccguaag

SEQ ID NO: 2169934 - RNA, 19 nt, Homo sapiens
  misc_RNA (1)...(19): siRNA sense strand
agaaagggguccagcuaga

SEQ ID NO: 2169935 - RNA, 19 nt, Homo sapiens
  misc_RNA (1)...(19): siRNA sense strand
ggcucuggaucuccuacuu

SEQ ID NO: 2169936 - RNA, 19 nt, Homo sapiens
  misc_RNA (1)...(19): siRNA sense strand
uggaagcugcccucaguau

SEQ ID NO: 2169937 - RNA, 19 nt, Homo sapiens
  misc_RNA (1)...(19): siRNA sense strand
cucuggaucuccuacuuug

SEQ ID NO: 2169938 - RNA, 19 nt, Homo sapiens
  misc_RNA (1)...(19): siRNA sense strand
ggacaggcugcaaagaaaa

SEQ ID NO: 2169939 - RNA, 19 nt, Homo sapiens
  misc_RNA (1)...(19): siRNA sense strand
uaugggaucccugaggaaa

SEQ ID NO: 2169940 - RNA, 19 nt, Homo sapiens
  misc_RNA (1)...(19): siRNA sense strand
caucauaccuucuuugaaa

SEQ ID NO: 2169941 - RNA, 19 nt, Homo sapiens
  misc_RNA (1)...(19): siRNA sense strand
ggaggaggcuuguaacaug

SEQ ID NO: 2169942 - RNA, 19 nt, Homo sapiens
  misc_RNA (1)...(19): siRNA sense strand
ggacauaggacgacucauu

SEQ ID NO: 2169943 - RNA, 19 nt, Homo sapiens
  misc_RNA (1)...(19): siRNA sense strand
guacugagauccacuacga

SEQ ID NO: 2169944 - RNA, 19 nt, Homo sapiens
  misc_RNA (1)...(19): siRNA sense strand
gaaguggccugguccuugu

SEQ ID NO: 2169945 - RNA, 19 nt, Homo sapiens
  misc_RNA (1)...(19): siRNA sense strand
gcaaacacuccaccuauga

SEQ ID NO: 2169946 - RNA, 19 nt, Homo sapiens
  misc_RNA (1)...(19): siRNA sense strand
cagcagggcucccaucuca

SEQ ID NO: 2169947 - RNA, 19 nt, Homo sapiens
  misc_RNA (1)...(19): siRNA sense strand
gggagaugcuuauccagaa

SEQ ID NO: 2169948 - RNA, 19 nt, Homo sapiens
  misc_RNA (1)...(19): siRNA sense strand
gaugaggccuggcgucuag

SEQ ID NO: 2169949 - RNA, 19 nt, Homo sapiens
  misc_RNA (1)...(19): siRNA sense strand
ggaagcugcccucaguaua

SEQ ID NO: 2169950 - RNA, 19 nt, Homo sapiens
  misc_RNA (1)...(19): siRNA sense strand
cagcggaaguuaugaguuc

SEQ ID NO: 2169951 - RNA, 19 nt, Homo sapiens
  misc_RNA (1)...(19): siRNA sense strand
ggaugaggcuguguacaug

SEQ ID NO: 2169952 - RNA, 19 nt, Homo sapiens
  misc_RNA (1)...(19): siRNA sense strand
caacagagaggcagaugga

SEQ ID NO: 2169953 - RNA, 19 nt, Homo sapiens
  misc_RNA (1)...(19): siRNA sense strand
cgagaccuuucccaucaua

SEQ ID NO: 2169954 - RNA, 19 nt, Homo sapiens
  misc_RNA (1)...(19): siRNA sense strand
cagcugcgcuuggauguga

SEQ ID NO: 2169955 - RNA, 19 nt, Homo sapiens
  misc_RNA (1)...(19): siRNA sense strand
cuaugacacugaccucuuu

SEQ ID NO: 2169956 - RNA, 19 nt, Homo sapiens
  misc_RNA (1)...(19): siRNA sense strand
ggacaucuggcugagcuua

SEQ ID NO: 2169957 - RNA, 19 nt, Homo sapiens
  misc_RNA (1)...(19): siRNA sense strand
gaagcugcccucaguauag

SEQ ID NO: 2169958 - RNA, 19 nt, Homo sapiens
  misc_RNA (1)...(19): siRNA sense strand
ggcaaacacuccaccuaug

SEQ ID NO: 2169959 - RNA, 19 nt, Homo sapiens
  misc_RNA (1)...(19): siRNA sense strand
gucgagaccuuucccauca

SEQ ID NO: 2169960 - RNA, 19 nt, Homo sapiens
  misc_RNA (1)...(19): siRNA sense strand
ggacaggaccaacuucuac

SEQ ID NO: 2169961 - RNA, 19 nt, Homo sapiens
  misc_RNA (1)...(19): siRNA sense strand
gacauaggacgacucauug

SEQ ID NO: 2169962 - RNA, 19 nt, Homo sapiens
  misc_RNA (1)...(19): siRNA sense strand
uuaaggaggaggcuuguaa

SEQ ID NO: 2169963 - RNA, 19 nt, Homo sapiens
  misc_RNA (1)...(19): siRNA sense strand
gaggaaaggcucuggaucu

SEQ ID NO: 2169964 - RNA, 19 nt, Homo sapiens
  misc_RNA (1)...(19): siRNA sense strand
gcagggcucccaucucaau

SEQ ID NO: 2169965 - RNA, 19 nt, Homo sapiens
  misc_RNA (1)...(19): siRNA sense strand
ccugggaacugcugacuca

SEQ ID NO: 2169966 - RNA, 19 nt, Homo sapiens
  misc_RNA (1)...(19): siRNA sense strand
uguggaaacugcugugaug

SEQ ID NO: 2169967 - RNA, 19 nt, Homo sapiens
  misc_RNA (1)...(19): siRNA sense strand
gaccacauccgcacacuca

SEQ ID NO: 2169968 - RNA, 19 nt, Homo sapiens
  misc_RNA (1)...(19): siRNA sense strand
gaaccuggucuucaugcaa

SEQ ID NO: 2169969 - RNA, 19 nt, Homo sapiens
  misc_RNA (1)...(19): siRNA sense strand
auaacgaccuggaagaugu

SEQ ID NO: 2169970 - RNA, 19 nt, Homo sapiens
  misc_RNA (1)...(19): siRNA sense strand
uaacauggccugggaacug

SEQ ID NO: 2169971 - RNA, 19 nt, Homo sapiens
  misc_RNA (1)...(19): siRNA sense strand
gcccagguguugcaacugu

SEQ ID NO: 2169972 - RNA, 19 nt, Homo sapiens
  misc_RNA (1)...(19): siRNA sense strand
uauguucccugcugaagug

SEQ ID NO: 2169973 - RNA, 19 nt, Homo sapiens
  misc_RNA (1)...(19): siRNA sense strand
uugaaaugcuuggcaauug

SEQ ID NO: 2169974 - RNA, 19 nt, Homo sapiens
  misc_RNA (1)...(19): siRNA sense strand
ccuggaagcugcccucagu

SEQ ID NO: 2169975 - RNA, 19 nt, Homo sapiens
  misc_RNA (1)...(19): siRNA sense strand
ccacccaccugcugaacug

SEQ ID NO: 2169976 - RNA, 19 nt, Homo sapiens
  misc_RNA (1)...(19): siRNA sense strand
gcaagaggacgugcuguuc

SEQ ID NO: 2169977 - RNA, 19 nt, Homo sapiens
  misc_RNA (1)...(19): siRNA sense strand
gcuguggccuccucuugga

SEQ ID NO: 2169978 - RNA, 19 nt, Homo sapiens
  misc_RNA (1)...(19): siRNA sense strand
ugaaaugcuuggcaauugg

SEQ ID NO: 2169979 - RNA, 19 nt, Homo sapiens
  misc_RNA (1)...(19): siRNA sense strand
ggacgugcuguucccagua

SEQ ID NO: 2169980 - RNA, 19 nt, Homo sapiens
  misc_RNA (1)...(19): siRNA sense strand
gggacgcaccuguuacgua

SEQ ID NO: 2169981 - RNA, 19 nt, Homo sapiens
  misc_RNA (1)...(19): siRNA sense strand
ggcaccaccuggcuuccua

SEQ ID NO: 2169982 - RNA, 19 nt, Homo sapiens
  misc_RNA (1)...(19): siRNA sense strand
gcccaggucuguggagguu

SEQ ID NO: 2169983 - RNA, 19 nt, Homo sapiens
  misc_RNA (1)...(19): siRNA sense strand
gcucuggaucuccuacuuu

SEQ ID NO: 2169984 - RNA, 19 nt, Homo sapiens
  misc_RNA (1)...(19): siRNA sense strand
caaggcaccggaagcacua

SEQ ID NO: 2169985 - RNA, 19 nt, Homo sapiens
  misc_RNA (1)...(19): siRNA sense strand
ccacugagcggcugagucu

SEQ ID NO: 2169986 - RNA, 19 nt, Homo sapiens
  misc_RNA (1)...(19): siRNA sense strand
auccagaacugcaaaggaa

SEQ ID NO: 2169987 - RNA, 19 nt, Homo sapiens
  misc_RNA (1)...(19): siRNA sense strand
ccaguucaagccaaucuuu

SEQ ID NO: 2169988 - RNA, 19 nt, Homo sapiens
  misc_RNA (1)...(19): siRNA sense strand
ucgccaaccuggugucaga

SEQ ID NO: 2169989 - RNA, 19 nt, Homo sapiens
  misc_RNA (1)...(19): siRNA sense strand
gcugguggcugugcugcaa

SEQ ID NO: 2169990 - RNA, 19 nt, Homo sapiens
  misc_RNA (1)...(19): siRNA sense strand
gcaccggaagcacuacuga

SEQ ID NO: 2169991 - RNA, 19 nt, Homo sapiens
  misc_RNA (1)...(19): siRNA sense strand
cugcugaacugggcacuga

SEQ ID NO: 2169992 - RNA, 19 nt, Homo sapiens
  misc_RNA (1)...(19): siRNA sense strand
gagcuggaggacaccauaa

SEQ ID NO: 2169993 - RNA, 19 nt, Homo sapiens
  misc_RNA (1)...(19): siRNA sense strand
ccaggucuguggagguuuc

SEQ ID NO: 2169994 - RNA, 19 nt, Homo sapiens
  misc_RNA (1)...(19): siRNA sense strand
ggagaugcuuauccagaac

SEQ ID NO: 2169995 - RNA, 19 nt, Homo sapiens
  misc_RNA (1)...(19): siRNA sense strand
ggacaugguagagcugaug

SEQ ID NO: 2169996 - RNA, 19 nt, Homo sapiens
  misc_RNA (1)...(19): siRNA sense strand
ucucagugcuggugaaggu

SEQ ID NO: 2169997 - RNA, 19 nt, Homo sapiens
  misc_RNA (1)...(19): siRNA sense strand
cauugaagcuguggaaacu

SEQ ID NO: 2169998 - RNA, 19 nt, Homo sapiens
  misc_RNA (1)...(19): siRNA sense strand
gacgugcuguucccaguag

SEQ ID NO: 2169999 - RNA, 19 nt, Homo sapiens
  misc_RNA (1)...(19): siRNA sense strand
cacugaggcuguccaagga

SEQ ID NO: 2170000 - RNA, 19 nt, Homo sapiens
  misc_RNA (1)...(19): siRNA sense strand
gagcugcuggccacaguga

SEQ ID NO: 2170001 - RNA, 19 nt, Homo sapiens
  misc_RNA (1)...(19): siRNA sense strand
cgacccagcggaaguuaug

SEQ ID NO: 2170002 - RNA, 19 nt, Homo sapiens
  misc_RNA (1)...(19): siRNA sense strand
cacagucucugcugagucu

SEQ ID NO: 2170003 - RNA, 19 nt, Homo sapiens
  misc_RNA (1)...(19): siRNA sense strand
ccaacacugccauccguaa

SEQ ID NO: 2170004 - RNA, 19 nt, Homo sapiens
  misc_RNA (1)...(19): siRNA sense strand
gccaacagccagaaaugug

SEQ ID NO: 2170005 - RNA, 19 nt, Homo sapiens
  misc_RNA (1)...(19): siRNA sense strand
ggagaaagggguccagcua

SEQ ID NO: 2170006 - RNA, 19 nt, Homo sapiens
  misc_RNA (1)...(19): siRNA sense strand
aagcacuacugaccuggaa

SEQ ID NO: 2170007 - RNA, 19 nt, Homo sapiens
  misc_RNA (1)...(19): siRNA sense strand
cauaggacgacucauugaa

SEQ ID NO: 2170008 - RNA, 19 nt, Homo sapiens
  misc_RNA (1)...(19): siRNA sense strand
ggaaccuggucuucaugca

SEQ ID NO: 2170009 - RNA, 19 nt, Homo sapiens
  misc_RNA (1)...(19): siRNA sense strand
ugugggcccuguacugaga

SEQ ID NO: 2170010 - RNA, 19 nt, Homo sapiens
  misc_RNA (1)...(19): siRNA sense strand
gcucucuggaugagguuua

SEQ ID NO: 2170011 - RNA, 19 nt, Homo sapiens
  misc_RNA (1)...(19): siRNA sense strand
ggcaagaggacgugcuguu

SEQ ID NO: 2170012 - RNA, 19 nt, Homo sapiens
  misc_RNA (1)...(19): siRNA sense strand
ggaugaggccuggcgucua

SEQ ID NO: 2170013 - RNA, 19 nt, Homo sapiens
  misc_RNA (1)...(19): siRNA sense strand
gccgugugcuuuccuuugg

SEQ ID NO: 2170014 - RNA, 19 nt, Homo sapiens
  misc_RNA (1)...(19): siRNA sense strand
ccaacagccagaaaugugu

SEQ ID NO: 2170015 - RNA, 19 nt, Homo sapiens
  misc_RNA (1)...(19): siRNA sense strand
gcgucgagcugugcguuuc

SEQ ID NO: 2170016 - RNA, 19 nt, Homo sapiens
  misc_RNA (1)...(19): siRNA sense strand
gacacagucucugcugagu

SEQ ID NO: 2170017 - RNA, 19 nt, Homo sapiens
  misc_RNA (1)...(19): siRNA sense strand
gaaggggccucugauugug

SEQ ID NO: 2170018 - RNA, 19 nt, Homo sapiens
  misc_RNA (1)...(19): siRNA sense strand
gcuuggcaauugggccuuu

SEQ ID NO: 2170019 - RNA, 19 nt, Homo sapiens
  misc_RNA (1)...(19): siRNA sense strand
ugagauccacuacgaccuu

SEQ ID NO: 2170020 - RNA, 19 nt, Homo sapiens
  misc_RNA (1)...(19): siRNA sense strand
agaccucuguggagcuaug

SEQ ID NO: 2170021 - RNA, 19 nt, Homo sapiens
  misc_RNA (1)...(19): siRNA sense strand
ggcaggaugaggcugugua

SEQ ID NO: 2170022 - RNA, 19 nt, Homo sapiens
  misc_RNA (1)...(19): siRNA sense strand
cagggauuguggcuugaug

SEQ ID NO: 2170023 - RNA, 19 nt, Homo sapiens
  misc_RNA (1)...(19): siRNA sense strand
uaccuucuuugaaaugcuu

SEQ ID NO: 2170024 - RNA, 19 nt, Homo sapiens
  misc_RNA (1)...(19): siRNA sense strand
cauaacgaccuggaagaug

SEQ ID NO: 2170025 - RNA, 19 nt, Homo sapiens
  misc_RNA (1)...(19): siRNA sense strand
gagcugugcguuucuccau

SEQ ID NO: 2170026 - RNA, 19 nt, Homo sapiens
  misc_RNA (1)...(19): siRNA sense strand
aggcaaacacuccaccuau

SEQ ID NO: 2170027 - RNA, 19 nt, Homo sapiens
  misc_RNA (1)...(19): siRNA sense strand
caaaugggacaggcugcaa

SEQ ID NO: 2170028 - RNA, 19 nt, Homo sapiens
  misc_RNA (1)...(19): siRNA sense strand
caacacugccauccguaag

SEQ ID NO: 2170029 - RNA, 19 nt, Homo sapiens
  misc_RNA (1)...(19): siRNA sense strand
agaaagggguccagcuaga

SEQ ID NO: 2170030 - RNA, 19 nt, Homo sapiens
  misc_RNA (1)...(19): siRNA sense strand
cucuggaucuccuacuuug

SEQ ID NO: 2170031 - RNA, 19 nt, Homo sapiens
  misc_RNA (1)...(19): siRNA sense strand
uggaagcugcccucaguau

SEQ ID NO: 2170032 - RNA, 19 nt, Homo sapiens
  misc_RNA (1)...(19): siRNA sense strand
uaugggaucccugaggaaa

SEQ ID NO: 2170033 - RNA, 19 nt, Homo sapiens
  misc_RNA (1)...(19): siRNA sense strand
ggcucuggaucuccuacuu

SEQ ID NO: 2170034 - RNA, 19 nt, Homo sapiens
  misc_RNA (1)...(19): siRNA sense strand
gcagagaguucuucaauuu

SEQ ID NO: 2170035 - RNA, 19 nt, Homo sapiens
  misc_RNA (1)...(19): siRNA sense strand
gaacaguugucauguagua

SEQ ID NO: 2170036 - RNA, 19 nt, Homo sapiens
  misc_RNA (1)...(19): siRNA sense strand
aaacaaggcccgaauauua

SEQ ID NO: 2170037 - RNA, 19 nt, Homo sapiens
  misc_RNA (1)...(19): siRNA sense strand
gaagauguguuggaaauaa

SEQ ID NO: 2170038 - RNA, 19 nt, Homo sapiens
  misc_RNA (1)...(19): siRNA sense strand
gcaaagaggagauaugaua

SEQ ID NO: 2170039 - RNA, 19 nt, Homo sapiens
  misc_RNA (1)...(19): siRNA sense strand
gcaauaagaugugaauuug

SEQ ID NO: 2170040 - RNA, 19 nt, Homo sapiens
  misc_RNA (1)...(19): siRNA sense strand
caagacagaugggaaguua

SEQ ID NO: 2170041 - RNA, 19 nt, Homo sapiens
  misc_RNA (1)...(19): siRNA sense strand
gaacauacaaggacuuaaa

SEQ ID NO: 2170042 - RNA, 19 nt, Homo sapiens
  misc_RNA (1)...(19): siRNA sense strand
gaguguggauguauucuua

SEQ ID NO: 2170043 - RNA, 19 nt, Homo sapiens
  misc_RNA (1)...(19): siRNA sense strand
ggagauccuuguauaguaa

SEQ ID NO: 2170044 - RNA, 19 nt, Homo sapiens
  misc_RNA (1)...(19): siRNA sense strand
gagaagauggacauuauua

SEQ ID NO: 2170045 - RNA, 19 nt, Homo sapiens
  misc_RNA (1)...(19): siRNA sense strand
uaaaugaccuuucagacuu

SEQ ID NO: 2170046 - RNA, 19 nt, Homo sapiens
  misc_RNA (1)...(19): siRNA sense strand
ggaaggaguuagugaguug

SEQ ID NO: 2170047 - RNA, 19 nt, Homo sapiens
  misc_RNA (1)...(19): siRNA sense strand
gaaaaccccugcaaagaua

SEQ ID NO: 2170048 - RNA, 19 nt, Homo sapiens
  misc_RNA (1)...(19): siRNA sense strand
agaaguagaugaagagauu

SEQ ID NO: 2170049 - RNA, 19 nt, Homo sapiens
  misc_RNA (1)...(19): siRNA sense strand
gaagaugaagcugaaauua

SEQ ID NO: 2170050 - RNA, 19 nt, Homo sapiens
  misc_RNA (1)...(19): siRNA sense strand
gaagggauguuugugauau

SEQ ID NO: 2170051 - RNA, 19 nt, Homo sapiens
  misc_RNA (1)...(19): siRNA sense strand
ggaauggcauacccaaauu

SEQ ID NO: 2170052 - RNA, 19 nt, Homo sapiens
  misc_RNA (1)...(19): siRNA sense strand
ggcaagaaaugcaaauauu

SEQ ID NO: 2170053 - RNA, 19 nt, Homo sapiens
  misc_RNA (1)...(19): siRNA sense strand
agaaacagcugaagaagga

SEQ ID NO: 2170054 - RNA, 19 nt, Homo sapiens
  misc_RNA (1)...(19): siRNA sense strand
gaacuggaaucuauugagu

SEQ ID NO: 2170055 - RNA, 19 nt, Homo sapiens
  misc_RNA (1)...(19): siRNA sense strand
ggaacuggaaggugaauua

SEQ ID NO: 2170056 - RNA, 19 nt, Homo sapiens
  misc_RNA (1)...(19): siRNA sense strand
cagaugagcuugcugaaau

SEQ ID NO: 2170057 - RNA, 19 nt, Homo sapiens
  misc_RNA (1)...(19): siRNA sense strand
gaaguccucuguucuacaa

SEQ ID NO: 2170058 - RNA, 19 nt, Homo sapiens
  misc_RNA (1)...(19): siRNA sense strand
ggugcagucuuuauaauuu

SEQ ID NO: 2170059 - RNA, 19 nt, Homo sapiens
  misc_RNA (1)...(19): siRNA sense strand
aagcagaguuugaugauaa

SEQ ID NO: 2170060 - RNA, 19 nt, Homo sapiens
  misc_RNA (1)...(19): siRNA sense strand
ccaaugaccuucucucugu

SEQ ID NO: 2170061 - RNA, 19 nt, Homo sapiens
  misc_RNA (1)...(19): siRNA sense strand
cuuaagaucuaucagguua

SEQ ID NO: 2170062 - RNA, 19 nt, Homo sapiens
  misc_RNA (1)...(19): siRNA sense strand
cagagaagauggacauuau

SEQ ID NO: 2170063 - RNA, 19 nt, Homo sapiens
  misc_RNA (1)...(19): siRNA sense strand
gcaaggcagugaaugcaaa

SEQ ID NO: 2170064 - RNA, 19 nt, Homo sapiens
  misc_RNA (1)...(19): siRNA sense strand
caaagucuguuaacaaauc

SEQ ID NO: 2170065 - RNA, 19 nt, Homo sapiens
  misc_RNA (1)...(19): siRNA sense strand
gaaaugguaucugugaaga

SEQ ID NO: 2170066 - RNA, 19 nt, Homo sapiens
  misc_RNA (1)...(19): siRNA sense strand
aaagugcucuucccuauga

SEQ ID NO: 2170067 - RNA, 19 nt, Homo sapiens
  misc_RNA (1)...(19): siRNA sense strand
gaagaaagcagugauggaa

SEQ ID NO: 2170068 - RNA, 19 nt, Homo sapiens
  misc_RNA (1)...(19): siRNA sense strand
gaaaagagcaucuguuuau

SEQ ID NO: 2170069 - RNA, 19 nt, Homo sapiens
  misc_RNA (1)...(19): siRNA sense strand
gaagaaggaacaaggguuu

SEQ ID NO: 2170070 - RNA, 19 nt, Homo sapiens
  misc_RNA (1)...(19): siRNA sense strand
caaauuggaugacaagagu

SEQ ID NO: 2170071 - RNA, 19 nt, Homo sapiens
  misc_RNA (1)...(19): siRNA sense strand
uaacauuugugaaggguuu

SEQ ID NO: 2170072 - RNA, 19 nt, Homo sapiens
  misc_RNA (1)...(19): siRNA sense strand
gguacuugcugccugaaua

SEQ ID NO: 2170073 - RNA, 19 nt, Homo sapiens
  misc_RNA (1)...(19): siRNA sense strand
caaguuguguagaaucuuu

SEQ ID NO: 2170074 - RNA, 19 nt, Homo sapiens
  misc_RNA (1)...(19): siRNA sense strand
caaacuuagucacucaaua

SEQ ID NO: 2170075 - RNA, 19 nt, Homo sapiens
  misc_RNA (1)...(19): siRNA sense strand
ggaggugccugauguguuc

SEQ ID NO: 2170076 - RNA, 19 nt, Homo sapiens
  misc_RNA (1)...(19): siRNA sense strand
gcagguagaguuuguuaaa

SEQ ID NO: 2170077 - RNA, 19 nt, Homo sapiens
  misc_RNA (1)...(19): siRNA sense strand
cauugacacuucaguauuu

SEQ ID NO: 2170078 - RNA, 19 nt, Homo sapiens
  misc_RNA (1)...(19): siRNA sense strand
cagaagauguguuggaaau

SEQ ID NO: 2170079 - RNA, 19 nt, Homo sapiens
  misc_RNA (1)...(19): siRNA sense strand
uaacaaaugguucaacuga

SEQ ID NO: 2170080 - RNA, 19 nt, Homo sapiens
  misc_RNA (1)...(19): siRNA sense strand
gauggaagcaagcacaaua

SEQ ID NO: 2170081 - RNA, 19 nt, Homo sapiens
  misc_RNA (1)...(19): siRNA sense strand
ugauaucccuuuagcaauu

SEQ ID NO: 2170082 - RNA, 19 nt, Homo sapiens
  misc_RNA (1)...(19): siRNA sense strand
gaaaucagaagggauguuu

SEQ ID NO: 2170083 - RNA, 19 nt, Homo sapiens
  misc_RNA (1)...(19): siRNA sense strand
gcagacaggagaaauugua

SEQ ID NO: 2170084 - RNA, 19 nt, Homo sapiens
  misc_RNA (1)...(19): siRNA sense strand
ggaguccucuguucagcua

SEQ ID NO: 2170085 - RNA, 19 nt, Homo sapiens
  misc_RNA (1)...(19): siRNA sense strand
gagcauguguauuauguca

SEQ ID NO: 2170086 - RNA, 19 nt, Homo sapiens
  misc_RNA (1)...(19): siRNA sense strand
gaagaagaauuuguagagu

SEQ ID NO: 2170087 - RNA, 19 nt, Homo sapiens
  misc_RNA (1)...(19): siRNA sense strand
caagauggauccuuugucu

SEQ ID NO: 2170088 - RNA, 19 nt, Homo sapiens
  misc_RNA (1)...(19): siRNA sense strand
gaacacugauuauagaacu

SEQ ID NO: 2170089 - RNA, 19 nt, Homo sapiens
  misc_RNA (1)...(19): siRNA sense strand
ccagauggaacacugauua

SEQ ID NO: 2170090 - RNA, 19 nt, Homo sapiens
  misc_RNA (1)...(19): siRNA sense strand
ugaugcauaugaugucuua

SEQ ID NO: 2170091 - RNA, 19 nt, Homo sapiens
  misc_RNA (1)...(19): siRNA sense strand
cagagugucuuauguugaa

SEQ ID NO: 2170092 - RNA, 19 nt, Homo sapiens
  misc_RNA (1)...(19): siRNA sense strand
gaagcaagcacaauaaugg

SEQ ID NO: 2170093 - RNA, 19 nt, Homo sapiens
  misc_RNA (1)...(19): siRNA sense strand
ccaaguaucaggaauuuga

SEQ ID NO: 2170094 - RNA, 19 nt, Homo sapiens
  misc_RNA (1)...(19): siRNA sense strand
agaaacacauggucuaaau

SEQ ID NO: 2170095 - RNA, 19 nt, Homo sapiens
  misc_RNA (1)...(19): siRNA sense strand
gaucauaucucagcucaac

SEQ ID NO: 2170096 - RNA, 19 nt, Homo sapiens
  misc_RNA (1)...(19): siRNA sense strand
caagcacaauaaugguuua

SEQ ID NO: 2170097 - RNA, 19 nt, Homo sapiens
  misc_RNA (1)...(19): siRNA sense strand
gaaacagccagaacuagaa

SEQ ID NO: 2170098 - RNA, 19 nt, Homo sapiens
  misc_RNA (1)...(19): siRNA sense strand
aauaugaaguugccaugua

SEQ ID NO: 2170099 - RNA, 19 nt, Homo sapiens
  misc_RNA (1)...(19): siRNA sense strand
gcugucagauguucauuau

SEQ ID NO: 2170100 - RNA, 19 nt, Homo sapiens
  misc_RNA (1)...(19): siRNA sense strand
acuggaaucuauugaguua

SEQ ID NO: 2170101 - RNA, 19 nt, Homo sapiens
  misc_RNA (1)...(19): siRNA sense strand
gauaagaguccaccugaga

SEQ ID NO: 2170102 - RNA, 19 nt, Homo sapiens
  misc_RNA (1)...(19): siRNA sense strand
guacugaggacaugagaaa

SEQ ID NO: 2170103 - RNA, 19 nt, Homo sapiens
  misc_RNA (1)...(19): siRNA sense strand
gauggauccuuugucuuua

SEQ ID NO: 2170104 - RNA, 19 nt, Homo sapiens
  misc_RNA (1)...(19): siRNA sense strand
gaaaauauccugguaaaug

SEQ ID NO: 2170105 - RNA, 19 nt, Homo sapiens
  misc_RNA (1)...(19): siRNA sense strand
caaaggagauacuagaacu

SEQ ID NO: 2170106 - RNA, 19 nt, Homo sapiens
  misc_RNA (1)...(19): siRNA sense strand
uaacuuccgugacccuaaa

SEQ ID NO: 2170107 - RNA, 19 nt, Homo sapiens
  misc_RNA (1)...(19): siRNA sense strand
gaccuacccuugugcuuug

SEQ ID NO: 2170108 - RNA, 19 nt, Homo sapiens
  misc_RNA (1)...(19): siRNA sense strand
aaagucaaguuguguagaa

SEQ ID NO: 2170109 - RNA, 19 nt, Homo sapiens
  misc_RNA (1)...(19): siRNA sense strand
uauuggagauccuuguaua

SEQ ID NO: 2170110 - RNA, 19 nt, Homo sapiens
  misc_RNA (1)...(19): siRNA sense strand
gcagguaugcucucaguga

SEQ ID NO: 2170111 - RNA, 19 nt, Homo sapiens
  misc_RNA (1)...(19): siRNA sense strand
gauuugagguuccugacaa

SEQ ID NO: 2170112 - RNA, 19 nt, Homo sapiens
  misc_RNA (1)...(19): siRNA sense strand
gaaugccgguggugaccua

SEQ ID NO: 2170113 - RNA, 19 nt, Homo sapiens
  misc_RNA (1)...(19): siRNA sense strand
gaacaccuacacucugaaa

SEQ ID NO: 2170114 - RNA, 19 nt, Homo sapiens
  misc_RNA (1)...(19): siRNA sense strand
aaacaaacuuagucacuca

SEQ ID NO: 2170115 - RNA, 19 nt, Homo sapiens
  misc_RNA (1)...(19): siRNA sense strand
caauacaagcuuucaauga

SEQ ID NO: 2170116 - RNA, 19 nt, Homo sapiens
  misc_RNA (1)...(19): siRNA sense strand
ggacugguaugacguaagg

SEQ ID NO: 2170117 - RNA, 19 nt, Homo sapiens
  misc_RNA (1)...(19): siRNA sense strand
ccuuugagcauguguauua

SEQ ID NO: 2170118 - RNA, 19 nt, Homo sapiens
  misc_RNA (1)...(19): siRNA sense strand
ucuaucagguuaaagauga

SEQ ID NO: 2170119 - RNA, 19 nt, Homo sapiens
  misc_RNA (1)...(19): siRNA sense strand
caaaugguauggaggagau

SEQ ID NO: 2170120 - RNA, 19 nt, Homo sapiens
  misc_RNA (1)...(19): siRNA sense strand
aaucagacauugacacuuc

SEQ ID NO: 2170121 - RNA, 19 nt, Homo sapiens
  misc_RNA (1)...(19): siRNA sense strand
uuagaacaguugucaugua

SEQ ID NO: 2170122 - RNA, 19 nt, Homo sapiens
  misc_RNA (1)...(19): siRNA sense strand
uaagcuggaugguguaguu

SEQ ID NO: 2170123 - RNA, 19 nt, Homo sapiens
  misc_RNA (1)...(19): siRNA sense strand
ugacaagaguguggaugua

SEQ ID NO: 2170124 - RNA, 19 nt, Homo sapiens
  misc_RNA (1)...(19): siRNA sense strand
gcaagcacaauaaugguuu

SEQ ID NO: 2170125 - RNA, 19 nt, Homo sapiens
  misc_RNA (1)...(19): siRNA sense strand
aaagugaaguccucuguuc

SEQ ID NO: 2170126 - RNA, 19 nt, Homo sapiens
  misc_RNA (1)...(19): siRNA sense strand
gugaugaucugcuuccaau

SEQ ID NO: 2170127 - RNA, 19 nt, Homo sapiens
  misc_RNA (1)...(19): siRNA sense strand
ggaagugaagaauuaguuu

SEQ ID NO: 2170128 - RNA, 19 nt, Homo sapiens
  misc_RNA (1)...(19): siRNA sense strand
gagaaaugguaucugugaa

SEQ ID NO: 2170129 - RNA, 19 nt, Homo sapiens
  misc_RNA (1)...(19): siRNA sense strand
caugcaagcugucagaugu

SEQ ID NO: 2170130 - RNA, 19 nt, Homo sapiens
  misc_RNA (1)...(19): siRNA sense strand
gaaggauuauguucucaag

SEQ ID NO: 2170131 - RNA, 19 nt, Homo sapiens
  misc_RNA (1)...(19): siRNA sense strand
auagggcacuuaucacuaa

SEQ ID NO: 2170132 - RNA, 19 nt, Homo sapiens
  misc_RNA (1)...(19): siRNA sense strand
aauagaagaugaagcugaa

SEQ ID NO: 2170133 - RNA, 19 nt, Homo sapiens
  misc_RNA (1)...(19): siRNA sense strand
agucaaguguuuccauuaa

SEQ ID NO: 2170134 - RNA, 19 nt, Homo sapiens
  misc_RNA (1)...(19): siRNA sense strand
ccaaagaaguagcucauuu

SEQ ID NO: 2170135 - RNA, 19 nt, Homo sapiens
  misc_RNA (1)...(19): siRNA sense strand
ggaaauggauauguccuuu

SEQ ID NO: 2170136 - RNA, 19 nt, Homo sapiens
  misc_RNA (1)...(19): siRNA sense strand
gcugagacccgcugaaaua

SEQ ID NO: 2170137 - RNA, 19 nt, Homo sapiens
  misc_RNA (1)...(19): siRNA sense strand
gaaauggauauguccuuua

SEQ ID NO: 2170138 - RNA, 19 nt, Homo sapiens
  misc_RNA (1)...(19): siRNA sense strand
ugacaaagguagcgauguu

SEQ ID NO: 2170139 - RNA, 19 nt, Homo sapiens
  misc_RNA (1)...(19): siRNA sense strand
gagacccgcugaaauaaug

SEQ ID NO: 2170140 - RNA, 19 nt, Homo sapiens
  misc_RNA (1)...(19): siRNA sense strand
gaaaugaaacugacaaagg

SEQ ID NO: 2170141 - RNA, 19 nt, Homo sapiens
  misc_RNA (1)...(19): siRNA sense strand
gggauucuguccacauuug

SEQ ID NO: 2170142 - RNA, 19 nt, Homo sapiens
  misc_RNA (1)...(19): siRNA sense strand
uguacaaucccaucauuua

SEQ ID NO: 2170143 - RNA, 19 nt, Homo sapiens
  misc_RNA (1)...(19): siRNA sense strand
caacggcugugaucguguu

SEQ ID NO: 2170144 - RNA, 19 nt, Homo sapiens
  misc_RNA (1)...(19): siRNA sense strand
aaaugaaacugacaaaggu

SEQ ID NO: 2170145 - RNA, 19 nt, Homo sapiens
  misc_RNA (1)...(19): siRNA sense strand
cagccuggaucgauauuug

SEQ ID NO: 2170146 - RNA, 19 nt, Homo sapiens
  misc_RNA (1)...(19): siRNA sense strand
ugaaagcaaccaagaagaa

SEQ ID NO: 2170147 - RNA, 19 nt, Homo sapiens
  misc_RNA (1)...(19): siRNA sense strand
gccaugugcuggaaaugaa

SEQ ID NO: 2170148 - RNA, 19 nt, Homo sapiens
  misc_RNA (1)...(19): siRNA sense strand
caaagaaguagcucauuuc

SEQ ID NO: 2170149 - RNA, 19 nt, Homo sapiens
  misc_RNA (1)...(19): siRNA sense strand
gcugaaauaaugacuauca

SEQ ID NO: 2170150 - RNA, 19 nt, Homo sapiens
  misc_RNA (1)...(19): siRNA sense strand
aaagaucauugccaagguu

SEQ ID NO: 2170151 - RNA, 19 nt, Homo sapiens
  misc_RNA (1)...(19): siRNA sense strand
guagcgauguugauuugug

SEQ ID NO: 2170152 - RNA, 19 nt, Homo sapiens
  misc_RNA (1)...(19): siRNA sense strand
ccgcugaaauaaugacuau

SEQ ID NO: 2170153 - RNA, 19 nt, Homo sapiens
  misc_RNA (1)...(19): siRNA sense strand
aaagaaagcacgccuacau

SEQ ID NO: 2170154 - RNA, 19 nt, Homo sapiens
  misc_RNA (1)...(19): siRNA sense strand
gaucguguucuccuacgua

SEQ ID NO: 2170155 - RNA, 19 nt, Homo sapiens
  misc_RNA (1)...(19): siRNA sense strand
ggauuuaguggcuggcuuu

SEQ ID NO: 2170156 - RNA, 19 nt, Homo sapiens
  misc_RNA (1)...(19): siRNA sense strand
gaaagcacgccuacaucug

SEQ ID NO: 2170157 - RNA, 19 nt, Homo sapiens
  misc_RNA (1)...(19): siRNA sense strand
guuaaguccucuuccaaag

SEQ ID NO: 2170158 - RNA, 19 nt, Homo sapiens
  misc_RNA (1)...(19): siRNA sense strand
aaauggauauguccuuuac

SEQ ID NO: 2170159 - RNA, 19 nt, Homo sapiens
  misc_RNA (1)...(19): siRNA sense strand
caagaagaagucucuggaa

SEQ ID NO: 2170160 - RNA, 19 nt, Homo sapiens
  misc_RNA (1)...(19): siRNA sense strand
uaaagaucauugccaaggu

SEQ ID NO: 2170161 - RNA, 19 nt, Homo sapiens
  misc_RNA (1)...(19): siRNA sense strand
gaaagcaaccaagaagaag

SEQ ID NO: 2170162 - RNA, 19 nt, Homo sapiens
  misc_RNA (1)...(19): siRNA sense strand
gguuaaguccucuuccaaa

SEQ ID NO: 2170163 - RNA, 19 nt, Homo sapiens
  misc_RNA (1)...(19): siRNA sense strand
gcuggaaauucaugaagag

SEQ ID NO: 2170164 - RNA, 19 nt, Homo sapiens
  misc_RNA (1)...(19): siRNA sense strand
gauuacaaauuugccuguu

SEQ ID NO: 2170165 - RNA, 19 nt, Homo sapiens
  misc_RNA (1)...(19): siRNA sense strand
cccaucauuuaccaaguua

SEQ ID NO: 2170166 - RNA, 19 nt, Homo sapiens
  misc_RNA (1)...(19): siRNA sense strand
guauggaugggcuggauuu

SEQ ID NO: 2170167 - RNA, 19 nt, Homo sapiens
  misc_RNA (1)...(19): siRNA sense strand
caauuuagcagucugugau

SEQ ID NO: 2170168 - RNA, 19 nt, Homo sapiens
  misc_RNA (1)...(19): siRNA sense strand
caucaucucuugcuuuugu

SEQ ID NO: 2170169 - RNA, 19 nt, Homo sapiens
  misc_RNA (1)...(19): siRNA sense strand
guggaagccuuaucaccau

SEQ ID NO: 2170170 - RNA, 19 nt, Homo sapiens
  misc_RNA (1)...(19): siRNA sense strand
caaccaagaagaagucucu

SEQ ID NO: 2170171 - RNA, 19 nt, Homo sapiens
  misc_RNA (1)...(19): siRNA sense strand
ggguuuggcugaaaagaaa

SEQ ID NO: 2170172 - RNA, 19 nt, Homo sapiens
  misc_RNA (1)...(19): siRNA sense strand
ucaugaagagugggaauaa

SEQ ID NO: 2170173 - RNA, 19 nt, Homo sapiens
  misc_RNA (1)...(19): siRNA sense strand
gcagccaucugggccuaug

SEQ ID NO: 2170174 - RNA, 19 nt, Homo sapiens
  misc_RNA (1)...(19): siRNA sense strand
aaagguagcgauguugauu

SEQ ID NO: 2170175 - RNA, 19 nt, Homo sapiens
  misc_RNA (1)...(19): siRNA sense strand
ggaaaugaaacugacaaag

SEQ ID NO: 2170176 - RNA, 19 nt, Homo sapiens
  misc_RNA (1)...(19): siRNA sense strand
cugcugugcuggaaauuca

SEQ ID NO: 2170177 - RNA, 19 nt, Homo sapiens
  misc_RNA (1)...(19): siRNA sense strand
guacaaucccaucauuuac

SEQ ID NO: 2170178 - RNA, 19 nt, Homo sapiens
  misc_RNA (1)...(19): siRNA sense strand
gccagacuccauucccaua

SEQ ID NO: 2170179 - RNA, 19 nt, Homo sapiens
  misc_RNA (1)...(19): siRNA sense strand
guugauuugugcuggauuc

SEQ ID NO: 2170180 - RNA, 19 nt, Homo sapiens
  misc_RNA (1)...(19): siRNA sense strand
agguagcgauguugauuug

SEQ ID NO: 2170181 - RNA, 19 nt, Homo sapiens
  misc_RNA (1)...(19): siRNA sense strand
ggaagccuuaucaccauga

SEQ ID NO: 2170182 - RNA, 19 nt, Homo sapiens
  misc_RNA (1)...(19): siRNA sense strand
ucccaucauuuaccaaguu

SEQ ID NO: 2170183 - RNA, 19 nt, Homo sapiens
  misc_RNA (1)...(19): siRNA sense strand
cugauugccuggauuccuu

SEQ ID NO: 2170184 - RNA, 19 nt, Homo sapiens
  misc_RNA (1)...(19): siRNA sense strand
ugccaacccuacuugcaaa

SEQ ID NO: 2170185 - RNA, 19 nt, Homo sapiens
  misc_RNA (1)...(19): siRNA sense strand
ugugcuggauuccugauug

SEQ ID NO: 2170186 - RNA, 19 nt, Homo sapiens
  misc_RNA (1)...(19): siRNA sense strand
acaaagguagcgauguuga

SEQ ID NO: 2170187 - RNA, 19 nt, Homo sapiens
  misc_RNA (1)...(19): siRNA sense strand
ggaaggccagacuccauuc

SEQ ID NO: 2170188 - RNA, 19 nt, Homo sapiens
  misc_RNA (1)...(19): siRNA sense strand
ugaacauccucuucuucug

SEQ ID NO: 2170189 - RNA, 19 nt, Homo sapiens
  misc_RNA (1)...(19): siRNA sense strand
cagacuccauucccauaca

SEQ ID NO: 2170190 - RNA, 19 nt, Homo sapiens
  misc_RNA (1)...(19): siRNA sense strand
caccaucaucucuugcuuu

SEQ ID NO: 2170191 - RNA, 19 nt, Homo sapiens
  misc_RNA (1)...(19): siRNA sense strand
uaaccacagucaggaaguc

SEQ ID NO: 2170192 - RNA, 19 nt, Homo sapiens
  misc_RNA (1)...(19): siRNA sense strand
caaaaucugcagcgaugua

SEQ ID NO: 2170193 - RNA, 19 nt, Homo sapiens
  misc_RNA (1)...(19): siRNA sense strand
gaucauugccaagguuaag

SEQ ID NO: 2170194 - RNA, 19 nt, Homo sapiens
  misc_RNA (1)...(19): siRNA sense strand
gugcuggaaaugaaacuga

SEQ ID NO: 2170195 - RNA, 19 nt, Homo sapiens
  misc_RNA (1)...(19): siRNA sense strand
gugccaacccuacuugcaa

SEQ ID NO: 2170196 - RNA, 19 nt, Homo sapiens
  misc_RNA (1)...(19): siRNA sense strand
caaagguagcgauguugau

SEQ ID NO: 2170197 - RNA, 19 nt, Homo sapiens
  misc_RNA (1)...(19): siRNA sense strand
gacaaagguagcgauguug

SEQ ID NO: 2170198 - RNA, 19 nt, Homo sapiens
  misc_RNA (1)...(19): siRNA sense strand
acaaucccaucauuuacca

SEQ ID NO: 2170199 - RNA, 19 nt, Homo sapiens
  misc_RNA (1)...(19): siRNA sense strand
cuuaugcaguggugucugu

SEQ ID NO: 2170200 - RNA, 19 nt, Homo sapiens
  misc_RNA (1)...(19): siRNA sense strand
ucaccaucaucucuugcuu

SEQ ID NO: 2170201 - RNA, 19 nt, Homo sapiens
  misc_RNA (1)...(19): siRNA sense strand
cuucugcugugcuggaaau

SEQ ID NO: 2170202 - RNA, 19 nt, Homo sapiens
  misc_RNA (1)...(19): siRNA sense strand
aagcugagacccgcugaaa

SEQ ID NO: 2170203 - RNA, 19 nt, Homo sapiens
  misc_RNA (1)...(19): siRNA sense strand
agaaagcacgccuacaucu

SEQ ID NO: 2170204 - RNA, 19 nt, Homo sapiens
  misc_RNA (1)...(19): siRNA sense strand
ucaauuuagcagucuguga

SEQ ID NO: 2170205 - RNA, 19 nt, Homo sapiens
  misc_RNA (1)...(19): siRNA sense strand
guggcuggcuuuuaccuaa

SEQ ID NO: 2170206 - RNA, 19 nt, Homo sapiens
  misc_RNA (1)...(19): siRNA sense strand
cugcagcgauguacaaucc

SEQ ID NO: 2170207 - RNA, 19 nt, Homo sapiens
  misc_RNA (1)...(19): siRNA sense strand
aagaucauugccaagguua

SEQ ID NO: 2170208 - RNA, 19 nt, Homo sapiens
  misc_RNA (1)...(19): siRNA sense strand
auuacaaauuugccuguug

SEQ ID NO: 2170209 - RNA, 19 nt, Homo sapiens
  misc_RNA (1)...(19): siRNA sense strand
gaagcugagacccgcugaa

SEQ ID NO: 2170210 - RNA, 19 nt, Homo sapiens
  misc_RNA (1)...(19): siRNA sense strand
gacagucggauccauagca

SEQ ID NO: 2170211 - RNA, 19 nt, Homo sapiens
  misc_RNA (1)...(19): siRNA sense strand
uugggauucuguccacauu

SEQ ID NO: 2170212 - RNA, 19 nt, Homo sapiens
  misc_RNA (1)...(19): siRNA sense strand
ugcuggaaauucaugaaga

SEQ ID NO: 2170213 - RNA, 19 nt, Homo sapiens
  misc_RNA (1)...(19): siRNA sense strand
ccaaagaaguagcucauuu

SEQ ID NO: 2170214 - RNA, 19 nt, Homo sapiens
  misc_RNA (1)...(19): siRNA sense strand
ggaaauggauauguccuuu

SEQ ID NO: 2170215 - RNA, 19 nt, Homo sapiens
  misc_RNA (1)...(19): siRNA sense strand
gcugagacccgcugaaaua

SEQ ID NO: 2170216 - RNA, 19 nt, Homo sapiens
  misc_RNA (1)...(19): siRNA sense strand
gaaauggauauguccuuua

SEQ ID NO: 2170217 - RNA, 19 nt, Homo sapiens
  misc_RNA (1)...(19): siRNA sense strand
ugacaaagguagcgauguu

SEQ ID NO: 2170218 - RNA, 19 nt, Homo sapiens
  misc_RNA (1)...(19): siRNA sense strand
gagacccgcugaaauaaug

SEQ ID NO: 2170219 - RNA, 19 nt, Homo sapiens
  misc_RNA (1)...(19): siRNA sense strand
gaaaugaaacugacaaagg

SEQ ID NO: 2170220 - RNA, 19 nt, Homo sapiens
  misc_RNA (1)...(19): siRNA sense strand
gggauucuguccacauuug

SEQ ID NO: 2170221 - RNA, 19 nt, Homo sapiens
  misc_RNA (1)...(19): siRNA sense strand
uguacaaucccaucauuua

SEQ ID NO: 2170222 - RNA, 19 nt, Homo sapiens
  misc_RNA (1)...(19): siRNA sense strand
caacggcugugaucguguu

SEQ ID NO: 2170223 - RNA, 19 nt, Homo sapiens
  misc_RNA (1)...(19): siRNA sense strand
aaaugaaacugacaaaggu

SEQ ID NO: 2170224 - RNA, 19 nt, Homo sapiens
  misc_RNA (1)...(19): siRNA sense strand
cagccuggaucgauauuug

SEQ ID NO: 2170225 - RNA, 19 nt, Homo sapiens
  misc_RNA (1)...(19): siRNA sense strand
ugaaagcaaccaagaagaa

SEQ ID NO: 2170226 - RNA, 19 nt, Homo sapiens
  misc_RNA (1)...(19): siRNA sense strand
gccaugugcuggaaaugaa

SEQ ID NO: 2170227 - RNA, 19 nt, Homo sapiens
  misc_RNA (1)...(19): siRNA sense strand
caaagaaguagcucauuuc

SEQ ID NO: 2170228 - RNA, 19 nt, Homo sapiens
  misc_RNA (1)...(19): siRNA sense strand
gcugaaauaaugacuauca

SEQ ID NO: 2170229 - RNA, 19 nt, Homo sapiens
  misc_RNA (1)...(19): siRNA sense strand
aaagaucauugccaagguu

SEQ ID NO: 2170230 - RNA, 19 nt, Homo sapiens
  misc_RNA (1)...(19): siRNA sense strand
guagcgauguugauuugug

SEQ ID NO: 2170231 - RNA, 19 nt, Homo sapiens
  misc_RNA (1)...(19): siRNA sense strand
ccgcugaaauaaugacuau

SEQ ID NO: 2170232 - RNA, 19 nt, Homo sapiens
  misc_RNA (1)...(19): siRNA sense strand
aaagaaagcacgccuacau

SEQ ID NO: 2170233 - RNA, 19 nt, Homo sapiens
  misc_RNA (1)...(19): siRNA sense strand
gaucguguucuccuacgua

SEQ ID NO: 2170234 - RNA, 19 nt, Homo sapiens
  misc_RNA (1)...(19): siRNA sense strand
ggauuuaguggcuggcuuu

SEQ ID NO: 2170235 - RNA, 19 nt, Homo sapiens
  misc_RNA (1)...(19): siRNA sense strand
gaaagcacgccuacaucug

SEQ ID NO: 2170236 - RNA, 19 nt, Homo sapiens
  misc_RNA (1)...(19): siRNA sense strand
guuaaguccucuuccaaag

SEQ ID NO: 2170237 - RNA, 19 nt, Homo sapiens
  misc_RNA (1)...(19): siRNA sense strand
aaauggauauguccuuuac

SEQ ID NO: 2170238 - RNA, 19 nt, Homo sapiens
  misc_RNA (1)...(19): siRNA sense strand
caagaagaagucucuggaa

SEQ ID NO: 2170239 - RNA, 19 nt, Homo sapiens
  misc_RNA (1)...(19): siRNA sense strand
uaaagaucauugccaaggu

SEQ ID NO: 2170240 - RNA, 19 nt, Homo sapiens
  misc_RNA (1)...(19): siRNA sense strand
gaaagcaaccaagaagaag

SEQ ID NO: 2170241 - RNA, 19 nt, Homo sapiens
  misc_RNA (1)...(19): siRNA sense strand
gguuaaguccucuuccaaa

SEQ ID NO: 2170242 - RNA, 19 nt, Homo sapiens
  misc_RNA (1)...(19): siRNA sense strand
gcuggaaauucaugaagag

SEQ ID NO: 2170243 - RNA, 19 nt, Homo sapiens
  misc_RNA (1)...(19): siRNA sense strand
gauuacaaauuugccuguu

SEQ ID NO: 2170244 - RNA, 19 nt, Homo sapiens
  misc_RNA (1)...(19): siRNA sense strand
cccaucauuuaccaaguua

SEQ ID NO: 2170245 - RNA, 19 nt, Homo sapiens
  misc_RNA (1)...(19): siRNA sense strand
guauggaugggcuggauuu

SEQ ID NO: 2170246 - RNA, 19 nt, Homo sapiens
  misc_RNA (1)...(19): siRNA sense strand
caauuuagcagucugugau

SEQ ID NO: 2170247 - RNA, 19 nt, Homo sapiens
  misc_RNA (1)...(19): siRNA sense strand
caucaucucuugcuuuugu

SEQ ID NO: 2170248 - RNA, 19 nt, Homo sapiens
  misc_RNA (1)...(19): siRNA sense strand
guggaagccuuaucaccau

SEQ ID NO: 2170249 - RNA, 19 nt, Homo sapiens
  misc_RNA (1)...(19): siRNA sense strand
caaccaagaagaagucucu

SEQ ID NO: 2170250 - RNA, 19 nt, Homo sapiens
  misc_RNA (1)...(19): siRNA sense strand
ggguuuggcugaaaagaaa

SEQ ID NO: 2170251 - RNA, 19 nt, Homo sapiens
  misc_RNA (1)...(19): siRNA sense strand
ucaugaagagugggaauaa

SEQ ID NO: 2170252 - RNA, 19 nt, Homo sapiens
  misc_RNA (1)...(19): siRNA sense strand
gcagccaucugggccuaug

SEQ ID NO: 2170253 - RNA, 19 nt, Homo sapiens
  misc_RNA (1)...(19): siRNA sense strand
aaagguagcgauguugauu

SEQ ID NO: 2170254 - RNA, 19 nt, Homo sapiens
  misc_RNA (1)...(19): siRNA sense strand
ggaaaugaaacugacaaag

SEQ ID NO: 2170255 - RNA, 19 nt, Homo sapiens
  misc_RNA (1)...(19): siRNA sense strand
cugcugugcuggaaauuca

SEQ ID NO: 2170256 - RNA, 19 nt, Homo sapiens
  misc_RNA (1)...(19): siRNA sense strand
guacaaucccaucauuuac

SEQ ID NO: 2170257 - RNA, 19 nt, Homo sapiens
  misc_RNA (1)...(19): siRNA sense strand
gccagacuccauucccaua

SEQ ID NO: 2170258 - RNA, 19 nt, Homo sapiens
  misc_RNA (1)...(19): siRNA sense strand
guugauuugugcuggauuc

SEQ ID NO: 2170259 - RNA, 19 nt, Homo sapiens
  misc_RNA (1)...(19): siRNA sense strand
agguagcgauguugauuug

SEQ ID NO: 2170260 - RNA, 19 nt, Homo sapiens
  misc_RNA (1)...(19): siRNA sense strand
ggaagccuuaucaccauga

SEQ ID NO: 2170261 - RNA, 19 nt, Homo sapiens
  misc_RNA (1)...(19): siRNA sense strand
ucccaucauuuaccaaguu

SEQ ID NO: 2170262 - RNA, 19 nt, Homo sapiens
  misc_RNA (1)...(19): siRNA sense strand
cugauugccuggauuccuu

SEQ ID NO: 2170263 - RNA, 19 nt, Homo sapiens
  misc_RNA (1)...(19): siRNA sense strand
ugccaacccuacuugcaaa

SEQ ID NO: 2170264 - RNA, 19 nt, Homo sapiens
  misc_RNA (1)...(19): siRNA sense strand
ugugcuggauuccugauug

SEQ ID NO: 2170265 - RNA, 19 nt, Homo sapiens
  misc_RNA (1)...(19): siRNA sense strand
acaaagguagcgauguuga

SEQ ID NO: 2170266 - RNA, 19 nt, Homo sapiens
  misc_RNA (1)...(19): siRNA sense strand
ggaaggccagacuccauuc

SEQ ID NO: 2170267 - RNA, 19 nt, Homo sapiens
  misc_RNA (1)...(19): siRNA sense strand
ugaacauccucuucuucug

SEQ ID NO: 2170268 - RNA, 19 nt, Homo sapiens
  misc_RNA (1)...(19): siRNA sense strand
cagacuccauucccauaca

SEQ ID NO: 2170269 - RNA, 19 nt, Homo sapiens
  misc_RNA (1)...(19): siRNA sense strand
caccaucaucucuugcuuu

SEQ ID NO: 2170270 - RNA, 19 nt, Homo sapiens
  misc_RNA (1)...(19): siRNA sense strand
uaaccacagucaggaaguc

SEQ ID NO: 2170271 - RNA, 19 nt, Homo sapiens
  misc_RNA (1)...(19): siRNA sense strand
caaaaucugcagcgaugua

SEQ ID NO: 2170272 - RNA, 19 nt, Homo sapiens
  misc_RNA (1)...(19): siRNA sense strand
gaucauugccaagguuaag

SEQ ID NO: 2170273 - RNA, 19 nt, Homo sapiens
  misc_RNA (1)...(19): siRNA sense strand
gugcuggaaaugaaacuga

SEQ ID NO: 2170274 - RNA, 19 nt, Homo sapiens
  misc_RNA (1)...(19): siRNA sense strand
gugccaacccuacuugcaa

SEQ ID NO: 2170275 - RNA, 19 nt, Homo sapiens
  misc_RNA (1)...(19): siRNA sense strand
caaagguagcgauguugau

SEQ ID NO: 2170276 - RNA, 19 nt, Homo sapiens
  misc_RNA (1)...(19): siRNA sense strand
gacaaagguagcgauguug

SEQ ID NO: 2170277 - RNA, 19 nt, Homo sapiens
  misc_RNA (1)...(19): siRNA sense strand
acaaucccaucauuuacca

SEQ ID NO: 2170278 - RNA, 19 nt, Homo sapiens
  misc_RNA (1)...(19): siRNA sense strand
cuuaugcaguggugucugu

SEQ ID NO: 2170279 - RNA, 19 nt, Homo sapiens
  misc_RNA (1)...(19): siRNA sense strand
ucaccaucaucucuugcuu

SEQ ID NO: 2170280 - RNA, 19 nt, Homo sapiens
  misc_RNA (1)...(19): siRNA sense strand
cuucugcugugcuggaaau

SEQ ID NO: 2170281 - RNA, 19 nt, Homo sapiens
  misc_RNA (1)...(19): siRNA sense strand
aagcugagacccgcugaaa

SEQ ID NO: 2170282 - RNA, 19 nt, Homo sapiens
  misc_RNA (1)...(19): siRNA sense strand
agaaagcacgccuacaucu

SEQ ID NO: 2170283 - RNA, 19 nt, Homo sapiens
  misc_RNA (1)...(19): siRNA sense strand
ucaauuuagcagucuguga

SEQ ID NO: 2170284 - RNA, 19 nt, Homo sapiens
  misc_RNA (1)...(19): siRNA sense strand
guggcuggcuuuuaccuaa

SEQ ID NO: 2170285 - RNA, 19 nt, Homo sapiens
  misc_RNA (1)...(19): siRNA sense strand
cugcagcgauguacaaucc

SEQ ID NO: 2170286 - RNA, 19 nt, Homo sapiens
  misc_RNA (1)...(19): siRNA sense strand
aagaucauugccaagguua

SEQ ID NO: 2170287 - RNA, 19 nt, Homo sapiens
  misc_RNA (1)...(19): siRNA sense strand
auuacaaauuugccuguug

SEQ ID NO: 2170288 - RNA, 19 nt, Homo sapiens
  misc_RNA (1)...(19): siRNA sense strand
gaagcugagacccgcugaa

SEQ ID NO: 2170289 - RNA, 19 nt, Homo sapiens
  misc_RNA (1)...(19): siRNA sense strand
gacagucggauccauagca

SEQ ID NO: 2170290 - RNA, 19 nt, Homo sapiens
  misc_RNA (1)...(19): siRNA sense strand
uugggauucuguccacauu

SEQ ID NO: 2170291 - RNA, 19 nt, Homo sapiens
  misc_RNA (1)...(19): siRNA sense strand
ugcuggaaauucaugaaga

SEQ ID NO: 2170292 - RNA, 19 nt, Homo sapiens
  misc_RNA (1)...(19): siRNA sense strand
gaacaaguuucgaggauuu

SEQ ID NO: 2170293 - RNA, 19 nt, Homo sapiens
  misc_RNA (1)...(19): siRNA sense strand
acaaagaacuugcuucaaa

SEQ ID NO: 2170294 - RNA, 19 nt, Homo sapiens
  misc_RNA (1)...(19): siRNA sense strand
ggaacgaguuucagacuuu

SEQ ID NO: 2170295 - RNA, 19 nt, Homo sapiens
  misc_RNA (1)...(19): siRNA sense strand
caacuuagauccuggaaau

SEQ ID NO: 2170296 - RNA, 19 nt, Homo sapiens
  misc_RNA (1)...(19): siRNA sense strand
cuacguaacuggagaauug

SEQ ID NO: 2170297 - RNA, 19 nt, Homo sapiens
  misc_RNA (1)...(19): siRNA sense strand
gcacaucuacuuacgauaa

SEQ ID NO: 2170298 - RNA, 19 nt, Homo sapiens
  misc_RNA (1)...(19): siRNA sense strand
uaaggaagauguaacaguu

SEQ ID NO: 2170299 - RNA, 19 nt, Homo sapiens
  misc_RNA (1)...(19): siRNA sense strand
gaaguuaacaguuguacaa

SEQ ID NO: 2170300 - RNA, 19 nt, Homo sapiens
  misc_RNA (1)...(19): siRNA sense strand
ggucauugcuuuagugaug

SEQ ID NO: 2170301 - RNA, 19 nt, Homo sapiens
  misc_RNA (1)...(19): siRNA sense strand
gagaauugaauccuacuua

SEQ ID NO: 2170302 - RNA, 19 nt, Homo sapiens
  misc_RNA (1)...(19): siRNA sense strand
gaagugagacaccuaaaga

SEQ ID NO: 2170303 - RNA, 19 nt, Homo sapiens
  misc_RNA (1)...(19): siRNA sense strand
caaugugacucauaacuug

SEQ ID NO: 2170304 - RNA, 19 nt, Homo sapiens
  misc_RNA (1)...(19): siRNA sense strand
gauaaaugcuccaccagau

SEQ ID NO: 2170305 - RNA, 19 nt, Homo sapiens
  misc_RNA (1)...(19): siRNA sense strand
uaguagcucugacacauua

SEQ ID NO: 2170306 - RNA, 19 nt, Homo sapiens
  misc_RNA (1)...(19): siRNA sense strand
gaugauuccugugaugaua

SEQ ID NO: 2170307 - RNA, 19 nt, Homo sapiens
  misc_RNA (1)...(19): siRNA sense strand
ccaaugcccuuuauacuca

SEQ ID NO: 2170308 - RNA, 19 nt, Homo sapiens
  misc_RNA (1)...(19): siRNA sense strand
caaagucauuccuacguaa

SEQ ID NO: 2170309 - RNA, 19 nt, Homo sapiens
  misc_RNA (1)...(19): siRNA sense strand
acaacuggcuccucaaauu

SEQ ID NO: 2170310 - RNA, 19 nt, Homo sapiens
  misc_RNA (1)...(19): siRNA sense strand
caacacaccugcccagagu

SEQ ID NO: 2170311 - RNA, 19 nt, Homo sapiens
  misc_RNA (1)...(19): siRNA sense strand
gacaaacccuugccagaau

SEQ ID NO: 2170312 - RNA, 19 nt, Homo sapiens
  misc_RNA (1)...(19): siRNA sense strand
gaaacuauucggaagauga

SEQ ID NO: 2170313 - RNA, 19 nt, Homo sapiens
  misc_RNA (1)...(19): siRNA sense strand
guaaauaagcagacagaaa

SEQ ID NO: 2170314 - RNA, 19 nt, Homo sapiens
  misc_RNA (1)...(19): siRNA sense strand
ccauugauauucugauuga

SEQ ID NO: 2170315 - RNA, 19 nt, Homo sapiens
  misc_RNA (1)...(19): siRNA sense strand
ggagauuaaugcaguuguu

SEQ ID NO: 2170316 - RNA, 19 nt, Homo sapiens
  misc_RNA (1)...(19): siRNA sense strand
ggaggaaguuaccaagaga

SEQ ID NO: 2170317 - RNA, 19 nt, Homo sapiens
  misc_RNA (1)...(19): siRNA sense strand
gaaguuucccguuauuuga

SEQ ID NO: 2170318 - RNA, 19 nt, Homo sapiens
  misc_RNA (1)...(19): siRNA sense strand
acagagggauauauacuuu

SEQ ID NO: 2170319 - RNA, 19 nt, Homo sapiens
  misc_RNA (1)...(19): siRNA sense strand
gacaagacaagauucauaa

SEQ ID NO: 2170320 - RNA, 19 nt, Homo sapiens
  misc_RNA (1)...(19): siRNA sense strand
gcacaaagcacagcacaug

SEQ ID NO: 2170321 - RNA, 19 nt, Homo sapiens
  misc_RNA (1)...(19): siRNA sense strand
gagcacaucuacuuacgau

SEQ ID NO: 2170322 - RNA, 19 nt, Homo sapiens
  misc_RNA (1)...(19): siRNA sense strand
gaacauaccacaaagucau

SEQ ID NO: 2170323 - RNA, 19 nt, Homo sapiens
  misc_RNA (1)...(19): siRNA sense strand
gagaacaaguuucgaggau

SEQ ID NO: 2170324 - RNA, 19 nt, Homo sapiens
  misc_RNA (1)...(19): siRNA sense strand
agaggaaucuaacaaagaa

SEQ ID NO: 2170325 - RNA, 19 nt, Homo sapiens
  misc_RNA (1)...(19): siRNA sense strand
aggaguaucuguuuacauu

SEQ ID NO: 2170326 - RNA, 19 nt, Homo sapiens
  misc_RNA (1)...(19): siRNA sense strand
caacugaucggcguguuua

SEQ ID NO: 2170327 - RNA, 19 nt, Homo sapiens
  misc_RNA (1)...(19): siRNA sense strand
caaagaacuugcuucaaag

SEQ ID NO: 2170328 - RNA, 19 nt, Homo sapiens
  misc_RNA (1)...(19): siRNA sense strand
gaaaagcccucugggaaaa

SEQ ID NO: 2170329 - RNA, 19 nt, Homo sapiens
  misc_RNA (1)...(19): siRNA sense strand
guacgguucuuacaguuau

SEQ ID NO: 2170330 - RNA, 19 nt, Homo sapiens
  misc_RNA (1)...(19): siRNA sense strand
ccaaagaaaucagacacaa

SEQ ID NO: 2170331 - RNA, 19 nt, Homo sapiens
  misc_RNA (1)...(19): siRNA sense strand
uaauagggcucugaauaga

SEQ ID NO: 2170332 - RNA, 19 nt, Homo sapiens
  misc_RNA (1)...(19): siRNA sense strand
acacugaacagauccaaua

SEQ ID NO: 2170333 - RNA, 19 nt, Homo sapiens
  misc_RNA (1)...(19): siRNA sense strand
ggaaauaguaagcauuaug

SEQ ID NO: 2170334 - RNA, 19 nt, Homo sapiens
  misc_RNA (1)...(19): siRNA sense strand
ucaguagccuuaaaccaaa

SEQ ID NO: 2170335 - RNA, 19 nt, Homo sapiens
  misc_RNA (1)...(19): siRNA sense strand
agacaggaauucaaauguu

SEQ ID NO: 2170336 - RNA, 19 nt, Homo sapiens
  misc_RNA (1)...(19): siRNA sense strand
ccaauaauccaccugguaa

SEQ ID NO: 2170337 - RNA, 19 nt, Homo sapiens
  misc_RNA (1)...(19): siRNA sense strand
cagcaugguucagauaauu

SEQ ID NO: 2170338 - RNA, 19 nt, Homo sapiens
  misc_RNA (1)...(19): siRNA sense strand
gaaauaaaaucugcgacua

SEQ ID NO: 2170339 - RNA, 19 nt, Homo sapiens
  misc_RNA (1)...(19): siRNA sense strand
gacaggaauucaaauguuc

SEQ ID NO: 2170340 - RNA, 19 nt, Homo sapiens
  misc_RNA (1)...(19): siRNA sense strand
guuagaagcauaccaagaa

SEQ ID NO: 2170341 - RNA, 19 nt, Homo sapiens
  misc_RNA (1)...(19): siRNA sense strand
guccauugcuuaauuacaa

SEQ ID NO: 2170342 - RNA, 19 nt, Homo sapiens
  misc_RNA (1)...(19): siRNA sense strand
cuaguccauugcuuaauua

SEQ ID NO: 2170343 - RNA, 19 nt, Homo sapiens
  misc_RNA (1)...(19): siRNA sense strand
uaacaaagaacuugcuuca

SEQ ID NO: 2170344 - RNA, 19 nt, Homo sapiens
  misc_RNA (1)...(19): siRNA sense strand
uaaagaaucaacagacuga

SEQ ID NO: 2170345 - RNA, 19 nt, Homo sapiens
  misc_RNA (1)...(19): siRNA sense strand
ugccauaccuccugcuuaa

SEQ ID NO: 2170346 - RNA, 19 nt, Homo sapiens
  misc_RNA (1)...(19): siRNA sense strand
cauaagaagucacggauac

SEQ ID NO: 2170347 - RNA, 19 nt, Homo sapiens
  misc_RNA (1)...(19): siRNA sense strand
guccuuugaugaagaauuu

SEQ ID NO: 2170348 - RNA, 19 nt, Homo sapiens
  misc_RNA (1)...(19): siRNA sense strand
gaugaagaauuuagaacuc

SEQ ID NO: 2170349 - RNA, 19 nt, Homo sapiens
  misc_RNA (1)...(19): siRNA sense strand
auaaaucgcccagaaauaa

SEQ ID NO: 2170350 - RNA, 19 nt, Homo sapiens
  misc_RNA (1)...(19): siRNA sense strand
acaaagucauuccuacgua

SEQ ID NO: 2170351 - RNA, 19 nt, Homo sapiens
  misc_RNA (1)...(19): siRNA sense strand
gauuugagggcuaugauaa

SEQ ID NO: 2170352 - RNA, 19 nt, Homo sapiens
  misc_RNA (1)...(19): siRNA sense strand
caagcaacaugccaaauac

SEQ ID NO: 2170353 - RNA, 19 nt, Homo sapiens
  misc_RNA (1)...(19): siRNA sense strand
acaagcaacaugccaaaua

SEQ ID NO: 2170354 - RNA, 19 nt, Homo sapiens
  misc_RNA (1)...(19): siRNA sense strand
gaacacggguuagaagcau

SEQ ID NO: 2170355 - RNA, 19 nt, Homo sapiens
  misc_RNA (1)...(19): siRNA sense strand
ccaagagcacaucuacuua

SEQ ID NO: 2170356 - RNA, 19 nt, Homo sapiens
  misc_RNA (1)...(19): siRNA sense strand
gagauuaaugcaguuguua

SEQ ID NO: 2170357 - RNA, 19 nt, Homo sapiens
  misc_RNA (1)...(19): siRNA sense strand
guacagcauuugacagaca

SEQ ID NO: 2170358 - RNA, 19 nt, Homo sapiens
  misc_RNA (1)...(19): siRNA sense strand
ucaaauggaucagcuuuag

SEQ ID NO: 2170359 - RNA, 19 nt, Homo sapiens
  misc_RNA (1)...(19): siRNA sense strand
ccauaccuccugcuuaaua

SEQ ID NO: 2170360 - RNA, 19 nt, Homo sapiens
  misc_RNA (1)...(19): siRNA sense strand
ggauauauuuacagaugug

SEQ ID NO: 2170361 - RNA, 19 nt, Homo sapiens
  misc_RNA (1)...(19): siRNA sense strand
gcacagcacaugguacuga

SEQ ID NO: 2170362 - RNA, 19 nt, Homo sapiens
  misc_RNA (1)...(19): siRNA sense strand
gagauucaagggagauuaa

SEQ ID NO: 2170363 - RNA, 19 nt, Homo sapiens
  misc_RNA (1)...(19): siRNA sense strand
ggaggaggaugaggaggaa

SEQ ID NO: 2170364 - RNA, 19 nt, Homo sapiens
  misc_RNA (1)...(19): siRNA sense strand
guacugaugauuccuguga

SEQ ID NO: 2170365 - RNA, 19 nt, Homo sapiens
  misc_RNA (1)...(19): siRNA sense strand
gaacgaguuucagacuuuc

SEQ ID NO: 2170366 - RNA, 19 nt, Homo sapiens
  misc_RNA (1)...(19): siRNA sense strand
ucuaguccauugcuuaauu

SEQ ID NO: 2170367 - RNA, 19 nt, Homo sapiens
  misc_RNA (1)...(19): siRNA sense strand
caaagaaaucagacacaaa

SEQ ID NO: 2170368 - RNA, 19 nt, Homo sapiens
  misc_RNA (1)...(19): siRNA sense strand
agaagcauaccaagaauuu

SEQ ID NO: 2170369 - RNA, 19 nt, Homo sapiens
  misc_RNA (1)...(19): siRNA sense strand
gcagacaggaauucaaaug

SEQ ID NO: 2170370 - RNA, 19 nt, Homo sapiens
  misc_RNA (1)...(19): siRNA sense strand
gagcuucuacgaucucauu

SEQ ID NO: 2170371 - RNA, 19 nt, Homo sapiens
  misc_RNA (1)...(19): siRNA sense strand
agacaagacaagauucaua

SEQ ID NO: 2170372 - RNA, 19 nt, Homo sapiens
  misc_RNA (1)...(19): siRNA sense strand
cgacuaugggcaacaguua

SEQ ID NO: 2170373 - RNA, 19 nt, Homo sapiens
  misc_RNA (1)...(19): siRNA sense strand
caguauaaaucgcccagaa

SEQ ID NO: 2170374 - RNA, 19 nt, Homo sapiens
  misc_RNA (1)...(19): siRNA sense strand
uaaaugcuccaccagauga

SEQ ID NO: 2170375 - RNA, 19 nt, Homo sapiens
  misc_RNA (1)...(19): siRNA sense strand
aaagaggaaucuaacaaag

SEQ ID NO: 2170376 - RNA, 19 nt, Homo sapiens
  misc_RNA (1)...(19): siRNA sense strand
ccaaaucaguuuccauugc

SEQ ID NO: 2170377 - RNA, 19 nt, Homo sapiens
  misc_RNA (1)...(19): siRNA sense strand
agacugagaaucuacuuaa

SEQ ID NO: 2170378 - RNA, 19 nt, Homo sapiens
  misc_RNA (1)...(19): siRNA sense strand
cuuaauagggcucugaaua

SEQ ID NO: 2170379 - RNA, 19 nt, Homo sapiens
  misc_RNA (1)...(19): siRNA sense strand
gacuuaggcuggccauaug

SEQ ID NO: 2170380 - RNA, 19 nt, Homo sapiens
  misc_RNA (1)...(19): siRNA sense strand
ugauucaucuccuagaaga

SEQ ID NO: 2170381 - RNA, 19 nt, Homo sapiens
  misc_RNA (1)...(19): siRNA sense strand
ccagaaaguugcacaaagc

SEQ ID NO: 2170382 - RNA, 19 nt, Homo sapiens
  misc_RNA (1)...(19): siRNA sense strand
guguaaaucugacaacuac

SEQ ID NO: 2170383 - RNA, 19 nt, Homo sapiens
  misc_RNA (1)...(19): siRNA sense strand
gcucugaauagaaccaaua

SEQ ID NO: 2170384 - RNA, 19 nt, Homo sapiens
  misc_RNA (1)...(19): siRNA sense strand
gauccugugucccuaguuc

SEQ ID NO: 2170385 - RNA, 19 nt, Homo sapiens
  misc_RNA (1)...(19): siRNA sense strand
uauaaaucgcccagaaaua

SEQ ID NO: 2170386 - RNA, 19 nt, Homo sapiens
  misc_RNA (1)...(19): siRNA sense strand
caacaagcaacaugccaaa

SEQ ID NO: 2170387 - RNA, 19 nt, Homo sapiens
  misc_RNA (1)...(19): siRNA sense strand
caaagcacagcacauggua

SEQ ID NO: 2170388 - RNA, 19 nt, Homo sapiens
  misc_RNA (1)...(19): siRNA sense strand
cgaguuagacaaccagaaa

SEQ ID NO: 2170389 - RNA, 19 nt, Homo sapiens
  misc_RNA (1)...(19): siRNA sense strand
gacugagaaucuacuuaaa

SEQ ID NO: 2170390 - RNA, 19 nt, Homo sapiens
  misc_RNA (1)...(19): siRNA sense strand
guacaacuggcuccucaaa

SEQ ID NO: 2170391 - RNA, 19 nt, Homo sapiens
  misc_RNA (1)...(19): siRNA sense strand
gaauagaaccaauaaucca

SEQ ID NO: 2170392 - RNA, 19 nt, Homo sapiens
  misc_RNA (1)...(19): siRNA sense strand
ggacaagccuuagcaaaua

SEQ ID NO: 2170393 - RNA, 19 nt, Homo sapiens
  misc_RNA (1)...(19): siRNA sense strand
gauggaagcuggugacuuu

SEQ ID NO: 2170394 - RNA, 19 nt, Homo sapiens
  misc_RNA (1)...(19): siRNA sense strand
caaacuggcuugucuguaa

SEQ ID NO: 2170395 - RNA, 19 nt, Homo sapiens
  misc_RNA (1)...(19): siRNA sense strand
gaaaggcauucaucaauau

SEQ ID NO: 2170396 - RNA, 19 nt, Homo sapiens
  misc_RNA (1)...(19): siRNA sense strand
gcacaagccuccuucaaug

SEQ ID NO: 2170397 - RNA, 19 nt, Homo sapiens
  misc_RNA (1)...(19): siRNA sense strand
gcaggaaacaucccaguua

SEQ ID NO: 2170398 - RNA, 19 nt, Homo sapiens
  misc_RNA (1)...(19): siRNA sense strand
ccacugaggauuugauaua

SEQ ID NO: 2170399 - RNA, 19 nt, Homo sapiens
  misc_RNA (1)...(19): siRNA sense strand
gaaagugugaugaaagaaa

SEQ ID NO: 2170400 - RNA, 19 nt, Homo sapiens
  misc_RNA (1)...(19): siRNA sense strand
gcaagacacaugaauauuc

SEQ ID NO: 2170401 - RNA, 19 nt, Homo sapiens
  misc_RNA (1)...(19): siRNA sense strand
ggaagcuggugacuuuauu

SEQ ID NO: 2170402 - RNA, 19 nt, Homo sapiens
  misc_RNA (1)...(19): siRNA sense strand
gcucugggcuguccauaug

SEQ ID NO: 2170403 - RNA, 19 nt, Homo sapiens
  misc_RNA (1)...(19): siRNA sense strand
gcaagaagaauauuaacug

SEQ ID NO: 2170404 - RNA, 19 nt, Homo sapiens
  misc_RNA (1)...(19): siRNA sense strand
uaauagaagugacuagcuu

SEQ ID NO: 2170405 - RNA, 19 nt, Homo sapiens
  misc_RNA (1)...(19): siRNA sense strand
uugcaaagcugugaauaaa

SEQ ID NO: 2170406 - RNA, 19 nt, Homo sapiens
  misc_RNA (1)...(19): siRNA sense strand
auacaggugugaaucuaua

SEQ ID NO: 2170407 - RNA, 19 nt, Homo sapiens
  misc_RNA (1)...(19): siRNA sense strand
gggauggauugcagaauga

SEQ ID NO: 2170408 - RNA, 19 nt, Homo sapiens
  misc_RNA (1)...(19): siRNA sense strand
caauacaggugugaaucua

SEQ ID NO: 2170409 - RNA, 19 nt, Homo sapiens
  misc_RNA (1)...(19): siRNA sense strand
ccauaugaaggaaguauua

SEQ ID NO: 2170410 - RNA, 19 nt, Homo sapiens
  misc_RNA (1)...(19): siRNA sense strand
gugaaucuauacaaaguga

SEQ ID NO: 2170411 - RNA, 19 nt, Homo sapiens
  misc_RNA (1)...(19): siRNA sense strand
uggcuugucuguaauagaa

SEQ ID NO: 2170412 - RNA, 19 nt, Homo sapiens
  misc_RNA (1)...(19): siRNA sense strand
caggaaacaucccaguuau

SEQ ID NO: 2170413 - RNA, 19 nt, Homo sapiens
  misc_RNA (1)...(19): siRNA sense strand
gacaagccuuagcaaauau

SEQ ID NO: 2170414 - RNA, 19 nt, Homo sapiens
  misc_RNA (1)...(19): siRNA sense strand
ggaaacaucccaguuaucu

SEQ ID NO: 2170415 - RNA, 19 nt, Homo sapiens
  misc_RNA (1)...(19): siRNA sense strand
uggaaagugugaugaaaga

SEQ ID NO: 2170416 - RNA, 19 nt, Homo sapiens
  misc_RNA (1)...(19): siRNA sense strand
gaauguagccacugaggau

SEQ ID NO: 2170417 - RNA, 19 nt, Homo sapiens
  misc_RNA (1)...(19): siRNA sense strand
gguuauaguuccuacagau

SEQ ID NO: 2170418 - RNA, 19 nt, Homo sapiens
  misc_RNA (1)...(19): siRNA sense strand
gaagcuggugacuuuauuu

SEQ ID NO: 2170419 - RNA, 19 nt, Homo sapiens
  misc_RNA (1)...(19): siRNA sense strand
cuccuaaucuucaggguuu

SEQ ID NO: 2170420 - RNA, 19 nt, Homo sapiens
  misc_RNA (1)...(19): siRNA sense strand
ggaacuccaggaaguauga

SEQ ID NO: 2170421 - RNA, 19 nt, Homo sapiens
  misc_RNA (1)...(19): siRNA sense strand
ggaaguauuacaccgcaaa

SEQ ID NO: 2170422 - RNA, 19 nt, Homo sapiens
  misc_RNA (1)...(19): siRNA sense strand
gaaaguaugggaaaauuug

SEQ ID NO: 2170423 - RNA, 19 nt, Homo sapiens
  misc_RNA (1)...(19): siRNA sense strand
uuagguggcugcccuuaug

SEQ ID NO: 2170424 - RNA, 19 nt, Homo sapiens
  misc_RNA (1)...(19): siRNA sense strand
uaccacagauggcugauca

SEQ ID NO: 2170425 - RNA, 19 nt, Homo sapiens
  misc_RNA (1)...(19): siRNA sense strand
aaagaauguuggaaagugu

SEQ ID NO: 2170426 - RNA, 19 nt, Homo sapiens
  misc_RNA (1)...(19): siRNA sense strand
gaagugacuagcuuugugu

SEQ ID NO: 2170427 - RNA, 19 nt, Homo sapiens
  misc_RNA (1)...(19): siRNA sense strand
gcaaagcugugaauaaaac

SEQ ID NO: 2170428 - RNA, 19 nt, Homo sapiens
  misc_RNA (1)...(19): siRNA sense strand
gcuggugacuuuauuugca

SEQ ID NO: 2170429 - RNA, 19 nt, Homo sapiens
  misc_RNA (1)...(19): siRNA sense strand
ggcauggguuguuaugaga

SEQ ID NO: 2170430 - RNA, 19 nt, Homo sapiens
  misc_RNA (1)...(19): siRNA sense strand
caagacacaugaauauucc

SEQ ID NO: 2170431 - RNA, 19 nt, Homo sapiens
  misc_RNA (1)...(19): siRNA sense strand
ugaucacacugaaguaaug

SEQ ID NO: 2170432 - RNA, 19 nt, Homo sapiens
  misc_RNA (1)...(19): siRNA sense strand
acagauggcugaucacacu

SEQ ID NO: 2170433 - RNA, 19 nt, Homo sapiens
  misc_RNA (1)...(19): siRNA sense strand
ugacuagcuuugugucuuc

SEQ ID NO: 2170434 - RNA, 19 nt, Homo sapiens
  misc_RNA (1)...(19): siRNA sense strand
cacaaacucuaaaguagca

SEQ ID NO: 2170435 - RNA, 19 nt, Homo sapiens
  misc_RNA (1)...(19): siRNA sense strand
guuggaaagugugaugaaa

SEQ ID NO: 2170436 - RNA, 19 nt, Homo sapiens
  misc_RNA (1)...(19): siRNA sense strand
agaagugucuaagagauug

SEQ ID NO: 2170437 - RNA, 19 nt, Homo sapiens
  misc_RNA (1)...(19): siRNA sense strand
uaacuguuccauugaagaa

SEQ ID NO: 2170438 - RNA, 19 nt, Homo sapiens
  misc_RNA (1)...(19): siRNA sense strand
ccagauggguaccacagau

SEQ ID NO: 2170439 - RNA, 19 nt, Homo sapiens
  misc_RNA (1)...(19): siRNA sense strand
gaaucuauacaaagugaug

SEQ ID NO: 2170440 - RNA, 19 nt, Homo sapiens
  misc_RNA (1)...(19): siRNA sense strand
agaagugacuagcuuugug

SEQ ID NO: 2170441 - RNA, 19 nt, Homo sapiens
  misc_RNA (1)...(19): siRNA sense strand
gugugaaucuauacaaagu

SEQ ID NO: 2170442 - RNA, 19 nt, Homo sapiens
  misc_RNA (1)...(19): siRNA sense strand
guuauaguuccuacagaua

SEQ ID NO: 2170443 - RNA, 19 nt, Homo sapiens
  misc_RNA (1)...(19): siRNA sense strand
ugcuggagcuacugagaua

SEQ ID NO: 2170444 - RNA, 19 nt, Homo sapiens
  misc_RNA (1)...(19): siRNA sense strand
gcugaucacacugaaguaa

SEQ ID NO: 2170445 - RNA, 19 nt, Homo sapiens
  misc_RNA (1)...(19): siRNA sense strand
acagaagugucuaagagau

SEQ ID NO: 2170446 - RNA, 19 nt, Homo sapiens
  misc_RNA (1)...(19): siRNA sense strand
gcacgaggguaugugucuu

SEQ ID NO: 2170447 - RNA, 19 nt, Homo sapiens
  misc_RNA (1)...(19): siRNA sense strand
acacugaaguaaugaaagg

SEQ ID NO: 2170448 - RNA, 19 nt, Homo sapiens
  misc_RNA (1)...(19): siRNA sense strand
gcaucugaauccuuuagca

SEQ ID NO: 2170449 - RNA, 19 nt, Homo sapiens
  misc_RNA (1)...(19): siRNA sense strand
aaccacaaacucuaaagua

SEQ ID NO: 2170450 - RNA, 19 nt, Homo sapiens
  misc_RNA (1)...(19): siRNA sense strand
caggugcucuugcuguuca

SEQ ID NO: 2170451 - RNA, 19 nt, Homo sapiens
  misc_RNA (1)...(19): siRNA sense strand
gugacuagcuuugugucuu

SEQ ID NO: 2170452 - RNA, 19 nt, Homo sapiens
  misc_RNA (1)...(19): siRNA sense strand
ucugaauccuuuagcaaga

SEQ ID NO: 2170453 - RNA, 19 nt, Homo sapiens
  misc_RNA (1)...(19): siRNA sense strand
ucaucaauauccaggaguu

SEQ ID NO: 2170454 - RNA, 19 nt, Homo sapiens
  misc_RNA (1)...(19): siRNA sense strand
aaacuggcuugucuguaau

SEQ ID NO: 2170455 - RNA, 19 nt, Homo sapiens
  misc_RNA (1)...(19): siRNA sense strand
ucaaucgacuuucccaaac

SEQ ID NO: 2170456 - RNA, 19 nt, Homo sapiens
  misc_RNA (1)...(19): siRNA sense strand
uugaggagguuguuaaguc

SEQ ID NO: 2170457 - RNA, 19 nt, Homo sapiens
  misc_RNA (1)...(19): siRNA sense strand
cggacaagccuuagcaaau

SEQ ID NO: 2170458 - RNA, 19 nt, Homo sapiens
  misc_RNA (1)...(19): siRNA sense strand
cacauacggacaagccuua

SEQ ID NO: 2170459 - RNA, 19 nt, Homo sapiens
  misc_RNA (1)...(19): siRNA sense strand
cggcauggguuguuaugag

SEQ ID NO: 2170460 - RNA, 19 nt, Homo sapiens
  misc_RNA (1)...(19): siRNA sense strand
cagaagugucuaagagauu

SEQ ID NO: 2170461 - RNA, 19 nt, Homo sapiens
  misc_RNA (1)...(19): siRNA sense strand
gauggcugaucacacugaa

SEQ ID NO: 2170462 - RNA, 19 nt, Homo sapiens
  misc_RNA (1)...(19): siRNA sense strand
agggauggauugcagaaug

SEQ ID NO: 2170463 - RNA, 19 nt, Homo sapiens
  misc_RNA (1)...(19): siRNA sense strand
cugcaagacacaugaauau

SEQ ID NO: 2170464 - RNA, 19 nt, Homo sapiens
  misc_RNA (1)...(19): siRNA sense strand
ucacacugaaguaaugaaa

SEQ ID NO: 2170465 - RNA, 19 nt, Homo sapiens
  misc_RNA (1)...(19): siRNA sense strand
ugaggagguuguuaagucu

SEQ ID NO: 2170466 - RNA, 19 nt, Homo sapiens
  misc_RNA (1)...(19): siRNA sense strand
uguacggcauggguuguua

SEQ ID NO: 2170467 - RNA, 19 nt, Homo sapiens
  misc_RNA (1)...(19): siRNA sense strand
gcucaauacaggugugaau

SEQ ID NO: 2170468 - RNA, 19 nt, Homo sapiens
  misc_RNA (1)...(19): siRNA sense strand
cacugaggauuugauauau

SEQ ID NO: 2170469 - RNA, 19 nt, Homo sapiens
  misc_RNA (1)...(19): siRNA sense strand
gcccuucagaugggaauua

SEQ ID NO: 2170470 - RNA, 19 nt, Homo sapiens
  misc_RNA (1)...(19): siRNA sense strand
cuucagaugggaauuaaug

SEQ ID NO: 2170471 - RNA, 19 nt, Homo sapiens
  misc_RNA (1)...(19): siRNA sense strand
gaucacacugaaguaauga

SEQ ID NO: 2170472 - RNA, 19 nt, Homo sapiens
  misc_RNA (1)...(19): siRNA sense strand
accacaaacucuaaaguag

SEQ ID NO: 2170473 - RNA, 19 nt, Homo sapiens
  misc_RNA (1)...(19): siRNA sense strand
ggaaagugugaugaaagaa

SEQ ID NO: 2170474 - RNA, 19 nt, Homo sapiens
  misc_RNA (1)...(19): siRNA sense strand
uauccuguccuuacuccua

SEQ ID NO: 2170475 - RNA, 19 nt, Homo sapiens
  misc_RNA (1)...(19): siRNA sense strand
gaauaaaaccacaaacucu

SEQ ID NO: 2170476 - RNA, 19 nt, Homo sapiens
  misc_RNA (1)...(19): siRNA sense strand
gugguggacuccgcaguau

SEQ ID NO: 2170477 - RNA, 19 nt, Homo sapiens
  misc_RNA (1)...(19): siRNA sense strand
gaaacaucccaguuaucug

SEQ ID NO: 2170478 - RNA, 19 nt, Homo sapiens
  misc_RNA (1)...(19): siRNA sense strand
gaagaaaguaugggaaaau

SEQ ID NO: 2170479 - RNA, 19 nt, Homo sapiens
  misc_RNA (1)...(19): siRNA sense strand
caucugaauccuuuagcaa

SEQ ID NO: 2170480 - RNA, 19 nt, Homo sapiens
  misc_RNA (1)...(19): siRNA sense strand
caaucgacuuucccaaacu

SEQ ID NO: 2170481 - RNA, 19 nt, Homo sapiens
  misc_RNA (1)...(19): siRNA sense strand
gagcugcaucugaauccuu

SEQ ID NO: 2170482 - RNA, 19 nt, Homo sapiens
  misc_RNA (1)...(19): siRNA sense strand
aaaagaauguuggaaagug

SEQ ID NO: 2170483 - RNA, 19 nt, Homo sapiens
  misc_RNA (1)...(19): siRNA sense strand
ugaaaagaauguuggaaag

SEQ ID NO: 2170484 - RNA, 19 nt, Homo sapiens
  misc_RNA (1)...(19): siRNA sense strand
ucugcaagacacaugaaua

SEQ ID NO: 2170485 - RNA, 19 nt, Homo sapiens
  misc_RNA (1)...(19): siRNA sense strand
cugaauccuuuagcaagaa

SEQ ID NO: 2170486 - RNA, 19 nt, Homo sapiens
  misc_RNA (1)...(19): siRNA sense strand
gauuagguggcugcccuua

SEQ ID NO: 2170487 - RNA, 19 nt, Homo sapiens
  misc_RNA (1)...(19): siRNA sense strand
gauggauugcagaaugaaa

SEQ ID NO: 2170488 - RNA, 19 nt, Homo sapiens
  misc_RNA (1)...(19): siRNA sense strand
ggaaguaugaaaagaaugu

SEQ ID NO: 2170489 - RNA, 19 nt, Homo sapiens
  misc_RNA (1)...(19): siRNA sense strand
agugggaacuccaggaagu

SEQ ID NO: 2170490 - RNA, 19 nt, Homo sapiens
  misc_RNA (1)...(19): siRNA sense strand
cugggaauguagccacuga

SEQ ID NO: 2170491 - RNA, 19 nt, Homo sapiens
  misc_RNA (1)...(19): siRNA sense strand
uguagccacugaggauuug

SEQ ID NO: 2170492 - RNA, 19 nt, Homo sapiens
  misc_RNA (1)...(19): siRNA sense strand
ggaauggauugcauauuua

SEQ ID NO: 2170493 - RNA, 19 nt, Homo sapiens
  misc_RNA (1)...(19): siRNA sense strand
cuaaagaacuugaaacuga

SEQ ID NO: 2170494 - RNA, 19 nt, Homo sapiens
  misc_RNA (1)...(19): siRNA sense strand
gaagguaaauuaggaugua

SEQ ID NO: 2170495 - RNA, 19 nt, Homo sapiens
  misc_RNA (1)...(19): siRNA sense strand
ggaaagaauuagcagauug

SEQ ID NO: 2170496 - RNA, 19 nt, Homo sapiens
  misc_RNA (1)...(19): siRNA sense strand
gaucaaacguaccauaaga

SEQ ID NO: 2170497 - RNA, 19 nt, Homo sapiens
  misc_RNA (1)...(19): siRNA sense strand
gaaauaacuucaccaugga

SEQ ID NO: 2170498 - RNA, 19 nt, Homo sapiens
  misc_RNA (1)...(19): siRNA sense strand
gcaagagaauuacaggaaa

SEQ ID NO: 2170499 - RNA, 19 nt, Homo sapiens
  misc_RNA (1)...(19): siRNA sense strand
gaucaagucagauaaguuu

SEQ ID NO: 2170500 - RNA, 19 nt, Homo sapiens
  misc_RNA (1)...(19): siRNA sense strand
gagaaucaauuggcuauau

SEQ ID NO: 2170501 - RNA, 19 nt, Homo sapiens
  misc_RNA (1)...(19): siRNA sense strand
aaaccacccuagugauuua

SEQ ID NO: 2170502 - RNA, 19 nt, Homo sapiens
  misc_RNA (1)...(19): siRNA sense strand
caauacaaauggcuugaaa

SEQ ID NO: 2170503 - RNA, 19 nt, Homo sapiens
  misc_RNA (1)...(19): siRNA sense strand
gaauuggugucaacuauag

SEQ ID NO: 2170504 - RNA, 19 nt, Homo sapiens
  misc_RNA (1)...(19): siRNA sense strand
aggaauggauugcauauuu

SEQ ID NO: 2170505 - RNA, 19 nt, Homo sapiens
  misc_RNA (1)...(19): siRNA sense strand
cagucaagaucaacuaaua

SEQ ID NO: 2170506 - RNA, 19 nt, Homo sapiens
  misc_RNA (1)...(19): siRNA sense strand
guacaagggugagaaauag

SEQ ID NO: 2170507 - RNA, 19 nt, Homo sapiens
  misc_RNA (1)...(19): siRNA sense strand
cagaaaccaugaagauauu

SEQ ID NO: 2170508 - RNA, 19 nt, Homo sapiens
  misc_RNA (1)...(19): siRNA sense strand
ggaaccacauuucgaguau

SEQ ID NO: 2170509 - RNA, 19 nt, Homo sapiens
  misc_RNA (1)...(19): siRNA sense strand
gaagagauuagcuaacauu

SEQ ID NO: 2170510 - RNA, 19 nt, Homo sapiens
  misc_RNA (1)...(19): siRNA sense strand
gcgaagagauuagcuaaca

SEQ ID NO: 2170511 - RNA, 19 nt, Homo sapiens
  misc_RNA (1)...(19): siRNA sense strand
cgagaccuguucuugaaua

SEQ ID NO: 2170512 - RNA, 19 nt, Homo sapiens
  misc_RNA (1)...(19): siRNA sense strand
caacaaaagucuuccauga

SEQ ID NO: 2170513 - RNA, 19 nt, Homo sapiens
  misc_RNA (1)...(19): siRNA sense strand
ccacauggccuuaugaaga

SEQ ID NO: 2170514 - RNA, 19 nt, Homo sapiens
  misc_RNA (1)...(19): siRNA sense strand
gccaaaaucuguaucauaa

SEQ ID NO: 2170515 - RNA, 19 nt, Homo sapiens
  misc_RNA (1)...(19): siRNA sense strand
ggaagaaagucuggaguag

SEQ ID NO: 2170516 - RNA, 19 nt, Homo sapiens
  misc_RNA (1)...(19): siRNA sense strand
gaaccacauuucgaguaua

SEQ ID NO: 2170517 - RNA, 19 nt, Homo sapiens
  misc_RNA (1)...(19): siRNA sense strand
caucuacaguuucaaagaa

SEQ ID NO: 2170518 - RNA, 19 nt, Homo sapiens
  misc_RNA (1)...(19): siRNA sense strand
caacaagaauagcagaaca

SEQ ID NO: 2170519 - RNA, 19 nt, Homo sapiens
  misc_RNA (1)...(19): siRNA sense strand
ggugagaaauaguuuaaca

SEQ ID NO: 2170520 - RNA, 19 nt, Homo sapiens
  misc_RNA (1)...(19): siRNA sense strand
aaagauaguuagcaccauu

SEQ ID NO: 2170521 - RNA, 19 nt, Homo sapiens
  misc_RNA (1)...(19): siRNA sense strand
caauagugcugaagcugaa

SEQ ID NO: 2170522 - RNA, 19 nt, Homo sapiens
  misc_RNA (1)...(19): siRNA sense strand
gggaaagaauuagcagauu

SEQ ID NO: 2170523 - RNA, 19 nt, Homo sapiens
  misc_RNA (1)...(19): siRNA sense strand
gugauauucuguuuccuaa

SEQ ID NO: 2170524 - RNA, 19 nt, Homo sapiens
  misc_RNA (1)...(19): siRNA sense strand
ucuaggaacuguagcuaaa

SEQ ID NO: 2170525 - RNA, 19 nt, Homo sapiens
  misc_RNA (1)...(19): siRNA sense strand
ccagauuguuggaaugaaa

SEQ ID NO: 2170526 - RNA, 19 nt, Homo sapiens
  misc_RNA (1)...(19): siRNA sense strand
caauagaucauguaucaga

SEQ ID NO: 2170527 - RNA, 19 nt, Homo sapiens
  misc_RNA (1)...(19): siRNA sense strand
cacauggccuuaugaagaa

SEQ ID NO: 2170528 - RNA, 19 nt, Homo sapiens
  misc_RNA (1)...(19): siRNA sense strand
agaccuugcuuuaaugauu

SEQ ID NO: 2170529 - RNA, 19 nt, Homo sapiens
  misc_RNA (1)...(19): siRNA sense strand
gaucuggucuguggugaug

SEQ ID NO: 2170530 - RNA, 19 nt, Homo sapiens
  misc_RNA (1)...(19): siRNA sense strand
gaagacgacauucaguuug

SEQ ID NO: 2170531 - RNA, 19 nt, Homo sapiens
  misc_RNA (1)...(19): siRNA sense strand
gaccuugcuuuaaugauug

SEQ ID NO: 2170532 - RNA, 19 nt, Homo sapiens
  misc_RNA (1)...(19): siRNA sense strand
gggaagaaagucuggagua

SEQ ID NO: 2170533 - RNA, 19 nt, Homo sapiens
  misc_RNA (1)...(19): siRNA sense strand
gcauuuauguuuacagaac

SEQ ID NO: 2170534 - RNA, 19 nt, Homo sapiens
  misc_RNA (1)...(19): siRNA sense strand
gauuacaauugucacuuga

SEQ ID NO: 2170535 - RNA, 19 nt, Homo sapiens
  misc_RNA (1)...(19): siRNA sense strand
gacagaaaccaugaagaua

SEQ ID NO: 2170536 - RNA, 19 nt, Homo sapiens
  misc_RNA (1)...(19): siRNA sense strand
gauuugaucaagucagaua

SEQ ID NO: 2170537 - RNA, 19 nt, Homo sapiens
  misc_RNA (1)...(19): siRNA sense strand
ggucggaaauaauagaauc

SEQ ID NO: 2170538 - RNA, 19 nt, Homo sapiens
  misc_RNA (1)...(19): siRNA sense strand
gcauuacagucaagaucaa

SEQ ID NO: 2170539 - RNA, 19 nt, Homo sapiens
  misc_RNA (1)...(19): siRNA sense strand
cgauuacaauugucacuug

SEQ ID NO: 2170540 - RNA, 19 nt, Homo sapiens
  misc_RNA (1)...(19): siRNA sense strand
gaugcaacaccguuuguaa

SEQ ID NO: 2170541 - RNA, 19 nt, Homo sapiens
  misc_RNA (1)...(19): siRNA sense strand
cauaagagcuuuggaaaau

SEQ ID NO: 2170542 - RNA, 19 nt, Homo sapiens
  misc_RNA (1)...(19): siRNA sense strand
ggucuguggugaugaugaa

SEQ ID NO: 2170543 - RNA, 19 nt, Homo sapiens
  misc_RNA (1)...(19): siRNA sense strand
ugacagaaaccaugaagau

SEQ ID NO: 2170544 - RNA, 19 nt, Homo sapiens
  misc_RNA (1)...(19): siRNA sense strand
caauauaauucagcacaug

SEQ ID NO: 2170545 - RNA, 19 nt, Homo sapiens
  misc_RNA (1)...(19): siRNA sense strand
aagaauuggugucaacuau

SEQ ID NO: 2170546 - RNA, 19 nt, Homo sapiens
  misc_RNA (1)...(19): siRNA sense strand
uagcagaacauauugcaaa

SEQ ID NO: 2170547 - RNA, 19 nt, Homo sapiens
  misc_RNA (1)...(19): siRNA sense strand
guucagcaguucggcauuu

SEQ ID NO: 2170548 - RNA, 19 nt, Homo sapiens
  misc_RNA (1)...(19): siRNA sense strand
gaaaacagacacagaaaau

SEQ ID NO: 2170549 - RNA, 19 nt, Homo sapiens
  misc_RNA (1)...(19): siRNA sense strand
gaaagaauuagcagauugg

SEQ ID NO: 2170550 - RNA, 19 nt, Homo sapiens
  misc_RNA (1)...(19): siRNA sense strand
acagaaaccaugaagauau

SEQ ID NO: 2170551 - RNA, 19 nt, Homo sapiens
  misc_RNA (1)...(19): siRNA sense strand
gaaaaccacccuagugauu

SEQ ID NO: 2170552 - RNA, 19 nt, Homo sapiens
  misc_RNA (1)...(19): siRNA sense strand
agccaucacuuucaucaaa

SEQ ID NO: 2170553 - RNA, 19 nt, Homo sapiens
  misc_RNA (1)...(19): siRNA sense strand
gauacaagaguucggcaaa

SEQ ID NO: 2170554 - RNA, 19 nt, Homo sapiens
  misc_RNA (1)...(19): siRNA sense strand
uaaaauuggucgaguaaug

SEQ ID NO: 2170555 - RNA, 19 nt, Homo sapiens
  misc_RNA (1)...(19): siRNA sense strand
caaaggaaccacauuucga

SEQ ID NO: 2170556 - RNA, 19 nt, Homo sapiens
  misc_RNA (1)...(19): siRNA sense strand
ggcaagagaauuacaggaa

SEQ ID NO: 2170557 - RNA, 19 nt, Homo sapiens
  misc_RNA (1)...(19): siRNA sense strand
ugaagaaggugaaaacaga

SEQ ID NO: 2170558 - RNA, 19 nt, Homo sapiens
  misc_RNA (1)...(19): siRNA sense strand
cacaugaaccuacgccuuu

SEQ ID NO: 2170559 - RNA, 19 nt, Homo sapiens
  misc_RNA (1)...(19): siRNA sense strand
gaccuguucuugaauacau

SEQ ID NO: 2170560 - RNA, 19 nt, Homo sapiens
  misc_RNA (1)...(19): siRNA sense strand
auggagagguaaauuguuu

SEQ ID NO: 2170561 - RNA, 19 nt, Homo sapiens
  misc_RNA (1)...(19): siRNA sense strand
uaggcaagcuucucuacga

SEQ ID NO: 2170562 - RNA, 19 nt, Homo sapiens
  misc_RNA (1)...(19): siRNA sense strand
ccacauuucgaguauauug

SEQ ID NO: 2170563 - RNA, 19 nt, Homo sapiens
  misc_RNA (1)...(19): siRNA sense strand
gcagauugucuaaggcaaa

SEQ ID NO: 2170564 - RNA, 19 nt, Homo sapiens
  misc_RNA (1)...(19): siRNA sense strand
ccaaggaauggauugcaua

SEQ ID NO: 2170565 - RNA, 19 nt, Homo sapiens
  misc_RNA (1)...(19): siRNA sense strand
uaaggauuguucagcaguu

SEQ ID NO: 2170566 - RNA, 19 nt, Homo sapiens
  misc_RNA (1)...(19): siRNA sense strand
aaacguaccauaagagcuu

SEQ ID NO: 2170567 - RNA, 19 nt, Homo sapiens
  misc_RNA (1)...(19): siRNA sense strand
uuacaauugucacuugaug

SEQ ID NO: 2170568 - RNA, 19 nt, Homo sapiens
  misc_RNA (1)...(19): siRNA sense strand
caacaacggaugaaaauga

SEQ ID NO: 2170569 - RNA, 19 nt, Homo sapiens
  misc_RNA (1)...(19): siRNA sense strand
ugaggcaucuacaguuuca

SEQ ID NO: 2170570 - RNA, 19 nt, Homo sapiens
  misc_RNA (1)...(19): siRNA sense strand
uuacagugcaacaagaaua

SEQ ID NO: 2170571 - RNA, 19 nt, Homo sapiens
  misc_RNA (1)...(19): siRNA sense strand
agaaucaauuggcuauaug

SEQ ID NO: 2170572 - RNA, 19 nt, Homo sapiens
  misc_RNA (1)...(19): siRNA sense strand
uguacaagggugagaaaua

SEQ ID NO: 2170573 - RNA, 19 nt, Homo sapiens
  misc_RNA (1)...(19): siRNA sense strand
uaggaacuguagcuaaaga

SEQ ID NO: 2170574 - RNA, 19 nt, Homo sapiens
  misc_RNA (1)...(19): siRNA sense strand
gcaaaggaaccacauuucg

SEQ ID NO: 2170575 - RNA, 19 nt, Homo sapiens
  misc_RNA (1)...(19): siRNA sense strand
uccugcaccuguuauguua

SEQ ID NO: 2170576 - RNA, 19 nt, Homo sapiens
  misc_RNA (1)...(19): siRNA sense strand
caagagaauuacaggaaaa

SEQ ID NO: 2170577 - RNA, 19 nt, Homo sapiens
  misc_RNA (1)...(19): siRNA sense strand
aaccacauuucgaguauau

SEQ ID NO: 2170578 - RNA, 19 nt, Homo sapiens
  misc_RNA (1)...(19): siRNA sense strand
aagauuugaucaagucaga

SEQ ID NO: 2170579 - RNA, 19 nt, Homo sapiens
  misc_RNA (1)...(19): siRNA sense strand
uggaguagcuacaaaauug

SEQ ID NO: 2170580 - RNA, 19 nt, Homo sapiens
  misc_RNA (1)...(19): siRNA sense strand
cagaacauauugcaaaaga

SEQ ID NO: 2170581 - RNA, 19 nt, Homo sapiens
  misc_RNA (1)...(19): siRNA sense strand
gcaagcuucucuacgaaaa

SEQ ID NO: 2170582 - RNA, 19 nt, Homo sapiens
  misc_RNA (1)...(19): siRNA sense strand
gaauggauugcauauuuag

SEQ ID NO: 2170583 - RNA, 19 nt, Homo sapiens
  misc_RNA (1)...(19): siRNA sense strand
caucgagaccuguucuuga

SEQ ID NO: 2170584 - RNA, 19 nt, Homo sapiens
  misc_RNA (1)...(19): siRNA sense strand
acaaaagucuuccaugaga

SEQ ID NO: 2170585 - RNA, 19 nt, Homo sapiens
  misc_RNA (1)...(19): siRNA sense strand
cagguuggcuacagauaca

SEQ ID NO: 2170586 - RNA, 19 nt, Homo sapiens
  misc_RNA (1)...(19): siRNA sense strand
acauucaguuugucaguga

SEQ ID NO: 2170587 - RNA, 19 nt, Homo sapiens
  misc_RNA (1)...(19): siRNA sense strand
caaaccaagcuucuaggaa

SEQ ID NO: 2170588 - RNA, 19 nt, Homo sapiens
  misc_RNA (1)...(19): siRNA sense strand
gcaucuacaguuucaaaga

SEQ ID NO: 2170589 - RNA, 19 nt, Homo sapiens
  misc_RNA (1)...(19): siRNA sense strand
uaucuccagugcacaauuc

SEQ ID NO: 2170590 - RNA, 19 nt, Homo sapiens
  misc_RNA (1)...(19): siRNA sense strand
gucacuugaugauucuaua

SEQ ID NO: 2170591 - RNA, 19 nt, Homo sapiens
  misc_RNA (1)...(19): siRNA sense strand
auacaauccugggaagaaa

SEQ ID NO: 2170592 - RNA, 19 nt, Homo sapiens
  misc_RNA (1)...(19): siRNA sense strand
gcacagauccuuuccacaa

SEQ ID NO: 2170593 - RNA, 19 nt, Homo sapiens
  misc_RNA (1)...(19): siRNA sense strand
gaauaaacuuggccacuca

SEQ ID NO: 2170594 - RNA, 19 nt, Homo sapiens
  misc_RNA (1)...(19): siRNA sense strand
ccucagacauuaugacaaa

SEQ ID NO: 2170595 - RNA, 19 nt, Homo sapiens
  misc_RNA (1)...(19): siRNA sense strand
cagcuugccugaaacagua

SEQ ID NO: 2170596 - RNA, 19 nt, Homo sapiens
  misc_RNA (1)...(19): siRNA sense strand
aagcugagauugccuguuu

SEQ ID NO: 2170597 - RNA, 19 nt, Homo sapiens
  misc_RNA (1)...(19): siRNA sense strand
gcagaggucuccuguagag

SEQ ID NO: 2170598 - RNA, 19 nt, Homo sapiens
  misc_RNA (1)...(19): siRNA sense strand
aaagggccaugcaggaaua

SEQ ID NO: 2170599 - RNA, 19 nt, Homo sapiens
  misc_RNA (1)...(19): siRNA sense strand
gaggaaagacggagagaau

SEQ ID NO: 2170600 - RNA, 19 nt, Homo sapiens
  misc_RNA (1)...(19): siRNA sense strand
uugcacagcuugccugaaa

SEQ ID NO: 2170601 - RNA, 19 nt, Homo sapiens
  misc_RNA (1)...(19): siRNA sense strand
gcgcucagaugaugugcaa

SEQ ID NO: 2170602 - RNA, 19 nt, Homo sapiens
  misc_RNA (1)...(19): siRNA sense strand
ugagauugccuguuuggua

SEQ ID NO: 2170603 - RNA, 19 nt, Homo sapiens
  misc_RNA (1)...(19): siRNA sense strand
gguacugccuccagaacuu

SEQ ID NO: 2170604 - RNA, 19 nt, Homo sapiens
  misc_RNA (1)...(19): siRNA sense strand
ccacaaagggccucuguca

SEQ ID NO: 2170605 - RNA, 19 nt, Homo sapiens
  misc_RNA (1)...(19): siRNA sense strand
uguauaaucuguugugucu

SEQ ID NO: 2170606 - RNA, 19 nt, Homo sapiens
  misc_RNA (1)...(19): siRNA sense strand
gagggaggcuacugagaag

SEQ ID NO: 2170607 - RNA, 19 nt, Homo sapiens
  misc_RNA (1)...(19): siRNA sense strand
ugaccacacuccaggaaug

SEQ ID NO: 2170608 - RNA, 19 nt, Homo sapiens
  misc_RNA (1)...(19): siRNA sense strand
ggaaagacggagagaaugg

SEQ ID NO: 2170609 - RNA, 19 nt, Homo sapiens
  misc_RNA (1)...(19): siRNA sense strand
aaacugcaagcauacauuu

SEQ ID NO: 2170610 - RNA, 19 nt, Homo sapiens
  misc_RNA (1)...(19): siRNA sense strand
ggauugaggagacugaaga

SEQ ID NO: 2170611 - RNA, 19 nt, Homo sapiens
  misc_RNA (1)...(19): siRNA sense strand
cacagauccuuuccacaaa

SEQ ID NO: 2170612 - RNA, 19 nt, Homo sapiens
  misc_RNA (1)...(19): siRNA sense strand
gaaggcugcgcucagauga

SEQ ID NO: 2170613 - RNA, 19 nt, Homo sapiens
  misc_RNA (1)...(19): siRNA sense strand
cgagggaggcuacugagaa

SEQ ID NO: 2170614 - RNA, 19 nt, Homo sapiens
  misc_RNA (1)...(19): siRNA sense strand
ccucaucacuugcaaacuc

SEQ ID NO: 2170615 - RNA, 19 nt, Homo sapiens
  misc_RNA (1)...(19): siRNA sense strand
ugaggagacugaagaaugc

SEQ ID NO: 2170616 - RNA, 19 nt, Homo sapiens
  misc_RNA (1)...(19): siRNA sense strand
gcagagcacggaggaaaga

SEQ ID NO: 2170617 - RNA, 19 nt, Homo sapiens
  misc_RNA (1)...(19): siRNA sense strand
gaaagacggagagaaugga

SEQ ID NO: 2170618 - RNA, 19 nt, Homo sapiens
  misc_RNA (1)...(19): siRNA sense strand
guagagacagucagccuau

SEQ ID NO: 2170619 - RNA, 19 nt, Homo sapiens
  misc_RNA (1)...(19): siRNA sense strand
ucaacuuuaucagagguua

SEQ ID NO: 2170620 - RNA, 19 nt, Homo sapiens
  misc_RNA (1)...(19): siRNA sense strand
ccaguuugccggguuuaua

SEQ ID NO: 2170621 - RNA, 19 nt, Homo sapiens
  misc_RNA (1)...(19): siRNA sense strand
gcacagcuugccugaaaca

SEQ ID NO: 2170622 - RNA, 19 nt, Homo sapiens
  misc_RNA (1)...(19): siRNA sense strand
auuaagcagugcccaguuu

SEQ ID NO: 2170623 - RNA, 19 nt, Homo sapiens
  misc_RNA (1)...(19): siRNA sense strand
aaugaaggcugcgcucaga

SEQ ID NO: 2170624 - RNA, 19 nt, Homo sapiens
  misc_RNA (1)...(19): siRNA sense strand
augcagaggucuccuguag

SEQ ID NO: 2170625 - RNA, 19 nt, Homo sapiens
  misc_RNA (1)...(19): siRNA sense strand
caaagggccaugcaggaau

SEQ ID NO: 2170626 - RNA, 19 nt, Homo sapiens
  misc_RNA (1)...(19): siRNA sense strand
cgacccauccacaaccuaa

SEQ ID NO: 2170627 - RNA, 19 nt, Homo sapiens
  misc_RNA (1)...(19): siRNA sense strand
gaugaccacacuccaggaa

SEQ ID NO: 2170628 - RNA, 19 nt, Homo sapiens
  misc_RNA (1)...(19): siRNA sense strand
gagcaccgagcccucuuug

SEQ ID NO: 2170629 - RNA, 19 nt, Homo sapiens
  misc_RNA (1)...(19): siRNA sense strand
gguuacuucacccuuguua

SEQ ID NO: 2170630 - RNA, 19 nt, Homo sapiens
  misc_RNA (1)...(19): siRNA sense strand
cugguaggcuccacuaucu

SEQ ID NO: 2170631 - RNA, 19 nt, Homo sapiens
  misc_RNA (1)...(19): siRNA sense strand
gagacagucagccuauugu

SEQ ID NO: 2170632 - RNA, 19 nt, Homo sapiens
  misc_RNA (1)...(19): siRNA sense strand
cugaaauucugcucguguu

SEQ ID NO: 2170633 - RNA, 19 nt, Homo sapiens
  misc_RNA (1)...(19): siRNA sense strand
caacuuuaucagagguuaa

SEQ ID NO: 2170634 - RNA, 19 nt, Homo sapiens
  misc_RNA (1)...(19): siRNA sense strand
gcagcuggcaauccgagaa

SEQ ID NO: 2170635 - RNA, 19 nt, Homo sapiens
  misc_RNA (1)...(19): siRNA sense strand
ggaggaaagacggagagaa

SEQ ID NO: 2170636 - RNA, 19 nt, Homo sapiens
  misc_RNA (1)...(19): siRNA sense strand
gacugaagaaugcugaaga

SEQ ID NO: 2170637 - RNA, 19 nt, Homo sapiens
  misc_RNA (1)...(19): siRNA sense strand
uagagacagucagccuauu

SEQ ID NO: 2170638 - RNA, 19 nt, Homo sapiens
  misc_RNA (1)...(19): siRNA sense strand
cuauuguccugccaacaga

SEQ ID NO: 2170639 - RNA, 19 nt, Homo sapiens
  misc_RNA (1)...(19): siRNA sense strand
agagacagucagccuauug

SEQ ID NO: 2170640 - RNA, 19 nt, Homo sapiens
  misc_RNA (1)...(19): siRNA sense strand
gcaaacucugccuguguga

SEQ ID NO: 2170641 - RNA, 19 nt, Homo sapiens
  misc_RNA (1)...(19): siRNA sense strand
acaaagggccaugcaggaa

SEQ ID NO: 2170642 - RNA, 19 nt, Homo sapiens
  misc_RNA (1)...(19): siRNA sense strand
ccgcagagcacggaggaaa

SEQ ID NO: 2170643 - RNA, 19 nt, Homo sapiens
  misc_RNA (1)...(19): siRNA sense strand
agacggagagaauggaaga

SEQ ID NO: 2170644 - RNA, 19 nt, Homo sapiens
  misc_RNA (1)...(19): siRNA sense strand
gcugguaggcuccacuauc

SEQ ID NO: 2170645 - RNA, 19 nt, Homo sapiens
  misc_RNA (1)...(19): siRNA sense strand
ucauugccuugguuacuuc

SEQ ID NO: 2170646 - RNA, 19 nt, Homo sapiens
  misc_RNA (1)...(19): siRNA sense strand
aggcugcgcucagaugaug

SEQ ID NO: 2170647 - RNA, 19 nt, Homo sapiens
  misc_RNA (1)...(19): siRNA sense strand
cuucuugccaccugaaauu

SEQ ID NO: 2170648 - RNA, 19 nt, Homo sapiens
  misc_RNA (1)...(19): siRNA sense strand
gauugaggagacugaagaa

SEQ ID NO: 2170649 - RNA, 19 nt, Homo sapiens
  misc_RNA (1)...(19): siRNA sense strand
caguuugccggguuuauau

SEQ ID NO: 2170650 - RNA, 19 nt, Homo sapiens
  misc_RNA (1)...(19): siRNA sense strand
uugcuugugucguuuggaa

SEQ ID NO: 2170651 - RNA, 19 nt, Homo sapiens
  misc_RNA (1)...(19): siRNA sense strand
ugaaggcugcgcucagaug

SEQ ID NO: 2170652 - RNA, 19 nt, Homo sapiens
  misc_RNA (1)...(19): siRNA sense strand
uugaggagacugaagaaug

SEQ ID NO: 2170653 - RNA, 19 nt, Homo sapiens
  misc_RNA (1)...(19): siRNA sense strand
gcucagaugaugugcaaaa

SEQ ID NO: 2170654 - RNA, 19 nt, Homo sapiens
  misc_RNA (1)...(19): siRNA sense strand
agcagucucuggacaagau

SEQ ID NO: 2170655 - RNA, 19 nt, Homo sapiens
  misc_RNA (1)...(19): siRNA sense strand
guacugccuccagaacuug

SEQ ID NO: 2170656 - RNA, 19 nt, Homo sapiens
  misc_RNA (1)...(19): siRNA sense strand
guuuauaucgaacgcaaug

SEQ ID NO: 2170657 - RNA, 19 nt, Homo sapiens
  misc_RNA (1)...(19): siRNA sense strand
gacauggugugccuaaacc

SEQ ID NO: 2170658 - RNA, 19 nt, Homo sapiens
  misc_RNA (1)...(19): siRNA sense strand
uggacaagaugaccacacu

SEQ ID NO: 2170659 - RNA, 19 nt, Homo sapiens
  misc_RNA (1)...(19): siRNA sense strand
ucacuugcccugacauggu

SEQ ID NO: 2170660 - RNA, 19 nt, Homo sapiens
  misc_RNA (1)...(19): siRNA sense strand
gaaauuggguugacaagug

SEQ ID NO: 2170661 - RNA, 19 nt, Homo sapiens
  misc_RNA (1)...(19): siRNA sense strand
agagaaagaugacaaguaa

SEQ ID NO: 2170662 - RNA, 19 nt, Homo sapiens
  misc_RNA (1)...(19): siRNA sense strand
gaaagaauaagucgucuaa

SEQ ID NO: 2170663 - RNA, 19 nt, Homo sapiens
  misc_RNA (1)...(19): siRNA sense strand
gaagaggacuugucagaag

SEQ ID NO: 2170664 - RNA, 19 nt, Homo sapiens
  misc_RNA (1)...(19): siRNA sense strand
ggaaauauucugauaguga

SEQ ID NO: 2170665 - RNA, 19 nt, Homo sapiens
  misc_RNA (1)...(19): siRNA sense strand
gccagaagcaccuauaaua

SEQ ID NO: 2170666 - RNA, 19 nt, Homo sapiens
  misc_RNA (1)...(19): siRNA sense strand
gaagaccagucguucaaga

SEQ ID NO: 2170667 - RNA, 19 nt, Homo sapiens
  misc_RNA (1)...(19): siRNA sense strand
gaaagcauaggaaauauuc

SEQ ID NO: 2170668 - RNA, 19 nt, Homo sapiens
  misc_RNA (1)...(19): siRNA sense strand
auacauaccucucaagaug

SEQ ID NO: 2170669 - RNA, 19 nt, Homo sapiens
  misc_RNA (1)...(19): siRNA sense strand
cgaaagagagaaaguaaga

SEQ ID NO: 2170670 - RNA, 19 nt, Homo sapiens
  misc_RNA (1)...(19): siRNA sense strand
ggaaagcgaaucccacgaa

SEQ ID NO: 2170671 - RNA, 19 nt, Homo sapiens
  misc_RNA (1)...(19): siRNA sense strand
guaaggagaaccagaucua

SEQ ID NO: 2170672 - RNA, 19 nt, Homo sapiens
  misc_RNA (1)...(19): siRNA sense strand
ggauggagcagccaaaugu

SEQ ID NO: 2170673 - RNA, 19 nt, Homo sapiens
  misc_RNA (1)...(19): siRNA sense strand
gacgaaagagagaaaguaa

SEQ ID NO: 2170674 - RNA, 19 nt, Homo sapiens
  misc_RNA (1)...(19): siRNA sense strand
aagaagagguaacgcauca

SEQ ID NO: 2170675 - RNA, 19 nt, Homo sapiens
  misc_RNA (1)...(19): siRNA sense strand
gcagauacuauggauuuaa

SEQ ID NO: 2170676 - RNA, 19 nt, Homo sapiens
  misc_RNA (1)...(19): siRNA sense strand
gaagagguaacgcaucaga

SEQ ID NO: 2170677 - RNA, 19 nt, Homo sapiens
  misc_RNA (1)...(19): siRNA sense strand
ugacacaaauucugacucu

SEQ ID NO: 2170678 - RNA, 19 nt, Homo sapiens
  misc_RNA (1)...(19): siRNA sense strand
cuacagugcugaugagaag

SEQ ID NO: 2170679 - RNA, 19 nt, Homo sapiens
  misc_RNA (1)...(19): siRNA sense strand
ugacucugaugaugauaaa

SEQ ID NO: 2170680 - RNA, 19 nt, Homo sapiens
  misc_RNA (1)...(19): siRNA sense strand
caaauucugacucugauga

SEQ ID NO: 2170681 - RNA, 19 nt, Homo sapiens
  misc_RNA (1)...(19): siRNA sense strand
gaagcaccuauaauacaua

SEQ ID NO: 2170682 - RNA, 19 nt, Homo sapiens
  misc_RNA (1)...(19): siRNA sense strand
uggcagauacuauggauuu

SEQ ID NO: 2170683 - RNA, 19 nt, Homo sapiens
  misc_RNA (1)...(19): siRNA sense strand
gaaguauggccaugcuuug

SEQ ID NO: 2170684 - RNA, 19 nt, Homo sapiens
  misc_RNA (1)...(19): siRNA sense strand
acacaaauucugacucuga
